United States Patent Application Publication US 2014/0004565 A1 - sequence listing, part 43

SEQ ID NO: 992437 - RNA, 19 nt, Artificial Sequence
  Description of Artificial Sequence: Synthetic oligonucleotide
ugccaagucggaaucauga

SEQ ID NO: 992438 - RNA, 19 nt, Artificial Sequence
  Description of Artificial Sequence: Synthetic oligonucleotide
uuagcuuuugcauuaucau

SEQ ID NO: 992439 - RNA, 19 nt, Artificial Sequence
  Description of Artificial Sequence: Synthetic oligonucleotide
uaagauaagugauguuuca

SEQ ID NO: 992440 - RNA, 19 nt, Artificial Sequence
  Description of Artificial Sequence: Synthetic oligonucleotide
uggaaggugucucuuacac

SEQ ID NO: 992441 - RNA, 19 nt, Artificial Sequence
  Description of Artificial Sequence: Synthetic oligonucleotide
aauccgcaauucugguugc

SEQ ID NO: 992442 - RNA, 19 nt, Artificial Sequence
  Description of Artificial Sequence: Synthetic oligonucleotide
cuaacuagcauuacuuuca

SEQ ID NO: 992443 - RNA, 19 nt, Artificial Sequence
  Description of Artificial Sequence: Synthetic oligonucleotide
auuaauuauguaaacuggu

SEQ ID NO: 992444 - RNA, 19 nt, Artificial Sequence
  Description of Artificial Sequence: Synthetic oligonucleotide
aaccguggcacauacaguu

SEQ ID NO: 992445 - RNA, 19 nt, Artificial Sequence
  Description of Artificial Sequence: Synthetic oligonucleotide
agggauguauguuugagaa

SEQ ID NO: 992446 - RNA, 19 nt, Artificial Sequence
  Description of Artificial Sequence: Synthetic oligonucleotide
uaguuguaagauaagugau

SEQ ID NO: 992447 - RNA, 19 nt, Artificial Sequence
  Description of Artificial Sequence: Synthetic oligonucleotide
auacaagcgagccuuucag

SEQ ID NO: 992448 - RNA, 19 nt, Artificial Sequence
  Description of Artificial Sequence: Synthetic oligonucleotide
uuacacgugacauacuuuu

SEQ ID NO: 992449 - RNA, 19 nt, Artificial Sequence
  Description of Artificial Sequence: Synthetic oligonucleotide
uggcauuauagauuaauua

SEQ ID NO: 992450 - RNA, 19 nt, Artificial Sequence
  Description of Artificial Sequence: Synthetic oligonucleotide
guauguuugagaaagcaga

SEQ ID NO: 992451 - RNA, 19 nt, Artificial Sequence
  Description of Artificial Sequence: Synthetic oligonucleotide
uguuucacagugacuuucc

SEQ ID NO: 992452 - RNA, 19 nt, Artificial Sequence
  Description of Artificial Sequence: Synthetic oligonucleotide
aaagcgaaccuccauccaa

SEQ ID NO: 992453 - RNA, 19 nt, Artificial Sequence
  Description of Artificial Sequence: Synthetic oligonucleotide
uagcauuacuuucacacau

SEQ ID NO: 992454 - RNA, 19 nt, Artificial Sequence
  Description of Artificial Sequence: Synthetic oligonucleotide
auagcaguguguccggauc

SEQ ID NO: 992455 - RNA, 19 nt, Artificial Sequence
  Description of Artificial Sequence: Synthetic oligonucleotide
agaauguccucagagagcu

SEQ ID NO: 992456 - RNA, 19 nt, Artificial Sequence
  Description of Artificial Sequence: Synthetic oligonucleotide
uuacuuucacacaugcauc

SEQ ID NO: 992457 - RNA, 19 nt, Artificial Sequence
  Description of Artificial Sequence: Synthetic oligonucleotide
aaugcacgguucuguuggc

SEQ ID NO: 992458 - RNA, 19 nt, Artificial Sequence
  Description of Artificial Sequence: Synthetic oligonucleotide
acaaagucggcaucaacgu

SEQ ID NO: 992459 - RNA, 19 nt, Artificial Sequence
  Description of Artificial Sequence: Synthetic oligonucleotide
aaugcacccugauuaauua

SEQ ID NO: 992460 - RNA, 19 nt, Artificial Sequence
  Description of Artificial Sequence: Synthetic oligonucleotide
cauuuaacccugaagaaaa

SEQ ID NO: 992461 - RNA, 19 nt, Artificial Sequence
  Description of Artificial Sequence: Synthetic oligonucleotide
uccucuauaauuguuuuau

SEQ ID NO: 992462 - RNA, 19 nt, Artificial Sequence
  Description of Artificial Sequence: Synthetic oligonucleotide
guagaagaaaccccaaaga

SEQ ID NO: 992463 - RNA, 19 nt, Artificial Sequence
  Description of Artificial Sequence: Synthetic oligonucleotide
uccucaguauuuucaaaug

SEQ ID NO: 992464 - RNA, 19 nt, Artificial Sequence
  Description of Artificial Sequence: Synthetic oligonucleotide
caaagaagcgacugccgcg

SEQ ID NO: 992465 - RNA, 19 nt, Artificial Sequence
  Description of Artificial Sequence: Synthetic oligonucleotide
acccugauuaauuauguaa

SEQ ID NO: 992466 - RNA, 19 nt, Artificial Sequence
  Description of Artificial Sequence: Synthetic oligonucleotide
uucgcggcaaacuucugcc

SEQ ID NO: 992467 - RNA, 19 nt, Artificial Sequence
  Description of Artificial Sequence: Synthetic oligonucleotide
auauuuagcuuuugcauua

SEQ ID NO: 992468 - RNA, 19 nt, Artificial Sequence
  Description of Artificial Sequence: Synthetic oligonucleotide
uacacaccguaucucaaca

SEQ ID NO: 992469 - RNA, 19 nt, Artificial Sequence
  Description of Artificial Sequence: Synthetic oligonucleotide
ucaacguccagcuccuucu

SEQ ID NO: 992470 - RNA, 19 nt, Artificial Sequence
  Description of Artificial Sequence: Synthetic oligonucleotide
aguuccagugauaagugag

SEQ ID NO: 992471 - RNA, 19 nt, Artificial Sequence
  Description of Artificial Sequence: Synthetic oligonucleotide
uugcauuaucauuuauggc

SEQ ID NO: 992472 - RNA, 19 nt, Artificial Sequence
  Description of Artificial Sequence: Synthetic oligonucleotide
aaauacaagcgagccuuuc

SEQ ID NO: 992473 - RNA, 19 nt, Artificial Sequence
  Description of Artificial Sequence: Synthetic oligonucleotide
auuggguauuggaaugucc

SEQ ID NO: 992474 - RNA, 19 nt, Artificial Sequence
  Description of Artificial Sequence: Synthetic oligonucleotide
uacaagcgagccuuucagg

SEQ ID NO: 992475 - RNA, 19 nt, Artificial Sequence
  Description of Artificial Sequence: Synthetic oligonucleotide
aacuccacgugccucuuca

SEQ ID NO: 992476 - RNA, 19 nt, Artificial Sequence
  Description of Artificial Sequence: Synthetic oligonucleotide
gguuuguaucauaagaaag

SEQ ID NO: 992477 - RNA, 19 nt, Artificial Sequence
  Description of Artificial Sequence: Synthetic oligonucleotide
guuagaacuuaaaaugcac

SEQ ID NO: 992478 - RNA, 19 nt, Artificial Sequence
  Description of Artificial Sequence: Synthetic oligonucleotide
gaagggauguauguuugag

SEQ ID NO: 992479 - RNA, 19 nt, Artificial Sequence
  Description of Artificial Sequence: Synthetic oligonucleotide
aggaagauuggguauugga

SEQ ID NO: 992480 - RNA, 19 nt, Artificial Sequence
  Description of Artificial Sequence: Synthetic oligonucleotide
gguauuggaauguccuugg

SEQ ID NO: 992481 - RNA, 19 nt, Artificial Sequence
  Description of Artificial Sequence: Synthetic oligonucleotide
cauaagaggaaguucugga

SEQ ID NO: 992482 - RNA, 19 nt, Artificial Sequence
  Description of Artificial Sequence: Synthetic oligonucleotide
caaacggucugcucgucgg

SEQ ID NO: 992483 - RNA, 19 nt, Artificial Sequence
  Description of Artificial Sequence: Synthetic oligonucleotide
ucauaagaaagcgaaccuc

SEQ ID NO: 992484 - RNA, 19 nt, Artificial Sequence
  Description of Artificial Sequence: Synthetic oligonucleotide
aaaugugcauaaaaugcau

SEQ ID NO: 992485 - RNA, 19 nt, Artificial Sequence
  Description of Artificial Sequence: Synthetic oligonucleotide
gaguagugcaaaccguggc

SEQ ID NO: 992486 - RNA, 19 nt, Artificial Sequence
  Description of Artificial Sequence: Synthetic oligonucleotide
aguaaauauagcagugugu

SEQ ID NO: 992487 - RNA, 19 nt, Artificial Sequence
  Description of Artificial Sequence: Synthetic oligonucleotide
agaacuuaaaaugcacccu

SEQ ID NO: 992488 - RNA, 19 nt, Artificial Sequence
  Description of Artificial Sequence: Synthetic oligonucleotide
acaaacggucugcucgucg

SEQ ID NO: 992489 - RNA, 19 nt, Artificial Sequence
  Description of Artificial Sequence: Synthetic oligonucleotide
aguuagaacuuaaaaugca

SEQ ID NO: 992490 - RNA, 19 nt, Artificial Sequence
  Description of Artificial Sequence: Synthetic oligonucleotide
guaagauaagugauguuuc

SEQ ID NO: 992491 - RNA, 19 nt, Artificial Sequence
  Description of Artificial Sequence: Synthetic oligonucleotide
aggagcauuucugggauuc

SEQ ID NO: 992492 - RNA, 19 nt, Artificial Sequence
  Description of Artificial Sequence: Synthetic oligonucleotide
aguauucgcggcaaacuuc

SEQ ID NO: 992493 - RNA, 19 nt, Artificial Sequence
  Description of Artificial Sequence: Synthetic oligonucleotide
agguuaucauuauguuacg

SEQ ID NO: 992494 - RNA, 19 nt, Artificial Sequence
  Description of Artificial Sequence: Synthetic oligonucleotide
uaagaaagcgaaccuccau

SEQ ID NO: 992495 - RNA, 19 nt, Artificial Sequence
  Description of Artificial Sequence: Synthetic oligonucleotide
gauagucuugagguuauca

SEQ ID NO: 992496 - RNA, 19 nt, Artificial Sequence
  Description of Artificial Sequence: Synthetic oligonucleotide
aagcauguuccaaauacaa

SEQ ID NO: 992497 - RNA, 19 nt, Artificial Sequence
  Description of Artificial Sequence: Synthetic oligonucleotide
uuucauguggcugucccgu

SEQ ID NO: 992498 - RNA, 19 nt, Artificial Sequence
  Description of Artificial Sequence: Synthetic oligonucleotide
acaccguaucucaacaaac

SEQ ID NO: 992499 - RNA, 19 nt, Artificial Sequence
  Description of Artificial Sequence: Synthetic oligonucleotide
uacgaguagugcaaaccgu

SEQ ID NO: 992500 - RNA, 19 nt, Artificial Sequence
  Description of Artificial Sequence: Synthetic oligonucleotide
caccauauuuagcuuuugc

SEQ ID NO: 992501 - RNA, 19 nt, Artificial Sequence
  Description of Artificial Sequence: Synthetic oligonucleotide
uaacaaacggucugcucgu

SEQ ID NO: 992502 - RNA, 19 nt, Artificial Sequence
  Description of Artificial Sequence: Synthetic oligonucleotide
ucauuauguuacgaguagu

SEQ ID NO: 992503 - RNA, 19 nt, Artificial Sequence
  Description of Artificial Sequence: Synthetic oligonucleotide
auacagucaaugcaugaua

SEQ ID NO: 992504 - RNA, 19 nt, Artificial Sequence
  Description of Artificial Sequence: Synthetic oligonucleotide
augcaugauagaaagcaug

SEQ ID NO: 992505 - RNA, 19 nt, Artificial Sequence
  Description of Artificial Sequence: Synthetic oligonucleotide
cuguugaaccuuucagaag

SEQ ID NO: 992506 - RNA, 19 nt, Artificial Sequence
  Description of Artificial Sequence: Synthetic oligonucleotide
aacuagcauuacuuucaca

SEQ ID NO: 992507 - RNA, 19 nt, Artificial Sequence
  Description of Artificial Sequence: Synthetic oligonucleotide
ugugcuaugcugugcuuuc

SEQ ID NO: 992508 - RNA, 19 nt, Artificial Sequence
  Description of Artificial Sequence: Synthetic oligonucleotide
uguuacgaguagugcaaac

SEQ ID NO: 992509 - RNA, 19 nt, Artificial Sequence
  Description of Artificial Sequence: Synthetic oligonucleotide
caagcgagccuuucaggcc

SEQ ID NO: 992510 - RNA, 19 nt, Artificial Sequence
  Description of Artificial Sequence: Synthetic oligonucleotide
ugagcggcggcccgaggcg

SEQ ID NO: 992511 - RNA, 19 nt, Artificial Sequence
  Description of Artificial Sequence: Synthetic oligonucleotide
aagcgaaccuccauccaag

SEQ ID NO: 992512 - RNA, 19 nt, Artificial Sequence
  Description of Artificial Sequence: Synthetic oligonucleotide
ucauguggcugucccguug

SEQ ID NO: 992513 - RNA, 19 nt, Artificial Sequence
  Description of Artificial Sequence: Synthetic oligonucleotide
guuguaagauaagugaugu

SEQ ID NO: 992514 - RNA, 19 nt, Artificial Sequence
  Description of Artificial Sequence: Synthetic oligonucleotide
gaacaaaggagaguuccuc

SEQ ID NO: 992515 - RNA, 19 nt, Artificial Sequence
  Description of Artificial Sequence: Synthetic oligonucleotide
ggauuaacugucaccagcc

SEQ ID NO: 992516 - RNA, 19 nt, Artificial Sequence
  Description of Artificial Sequence: Synthetic oligonucleotide
uugagggguccuuccauca

SEQ ID NO: 992517 - RNA, 19 nt, Artificial Sequence
  Description of Artificial Sequence: Synthetic oligonucleotide
gcuaacuagcauuacuuuc

SEQ ID NO: 992518 - RNA, 19 nt, Artificial Sequence
  Description of Artificial Sequence: Synthetic oligonucleotide
agucuugagguuaucauua

SEQ ID NO: 992519 - RNA, 19 nt, Artificial Sequence
  Description of Artificial Sequence: Synthetic oligonucleotide
gcagcuaacaaacggucug

SEQ ID NO: 992520 - RNA, 19 nt, Artificial Sequence
  Description of Artificial Sequence: Synthetic oligonucleotide
ugcuaacuagcauuacuuu

SEQ ID NO: 992521 - RNA, 19 nt, Artificial Sequence
  Description of Artificial Sequence: Synthetic oligonucleotide
aggagaguuccucaguauu

SEQ ID NO: 992522 - RNA, 19 nt, Artificial Sequence
  Description of Artificial Sequence: Synthetic oligonucleotide
uugaaccuuucagaagucu

SEQ ID NO: 992523 - RNA, 19 nt, Artificial Sequence
  Description of Artificial Sequence: Synthetic oligonucleotide
uauggaagggauguauguu

SEQ ID NO: 992524 - RNA, 19 nt, Artificial Sequence
  Description of Artificial Sequence: Synthetic oligonucleotide
aaccagacgcggcggcuag

SEQ ID NO: 992525 - RNA, 19 nt, Artificial Sequence
  Description of Artificial Sequence: Synthetic oligonucleotide
uuucaaccgcuccucgcgu

SEQ ID NO: 992526 - RNA, 19 nt, Artificial Sequence
  Description of Artificial Sequence: Synthetic oligonucleotide
acgaguagugcaaaccgug

SEQ ID NO: 992527 - RNA, 19 nt, Artificial Sequence
  Description of Artificial Sequence: Synthetic oligonucleotide
guaucauaagaaagcgaac

SEQ ID NO: 992528 - RNA, 19 nt, Artificial Sequence
  Description of Artificial Sequence: Synthetic oligonucleotide
cuggauuaacugucaccag

SEQ ID NO: 992529 - RNA, 19 nt, Artificial Sequence
  Description of Artificial Sequence: Synthetic oligonucleotide
ucaugagcuguaguuguaa

SEQ ID NO: 992530 - RNA, 19 nt, Artificial Sequence
  Description of Artificial Sequence: Synthetic oligonucleotide
ugcacgguucuguuggcuc

SEQ ID NO: 992531 - RNA, 19 nt, Artificial Sequence
  Description of Artificial Sequence: Synthetic oligonucleotide
uaggcgggaggcaacucac

SEQ ID NO: 992532 - RNA, 19 nt, Artificial Sequence
  Description of Artificial Sequence: Synthetic oligonucleotide
agauuggguauuggaaugu

SEQ ID NO: 992533 - RNA, 19 nt, Artificial Sequence
  Description of Artificial Sequence: Synthetic oligonucleotide
gcaaguagaagaaacccca

SEQ ID NO: 992534 - RNA, 19 nt, Artificial Sequence
  Description of Artificial Sequence: Synthetic oligonucleotide
aacaaacggucugcucguc

SEQ ID NO: 992535 - RNA, 19 nt, Artificial Sequence
  Description of Artificial Sequence: Synthetic oligonucleotide
ucacgguacccggagccgg

SEQ ID NO: 992536 - RNA, 19 nt, Artificial Sequence
  Description of Artificial Sequence: Synthetic oligonucleotide
gaaagcgaaccuccaucca

SEQ ID NO: 992537 - RNA, 19 nt, Artificial Sequence
  Description of Artificial Sequence: Synthetic oligonucleotide
ucggaaucaugagcuguag

SEQ ID NO: 992538 - RNA, 19 nt, Artificial Sequence
  Description of Artificial Sequence: Synthetic oligonucleotide
auaagaaagcgaaccucca

SEQ ID NO: 992539 - RNA, 19 nt, Artificial Sequence
  Description of Artificial Sequence: Synthetic oligonucleotide
cugugcuuucaaccgcucc

SEQ ID NO: 992540 - RNA, 19 nt, Artificial Sequence
  Description of Artificial Sequence: Synthetic oligonucleotide
caaucaaauacugcuaacu

SEQ ID NO: 992541 - RNA, 19 nt, Artificial Sequence
  Description of Artificial Sequence: Synthetic oligonucleotide
uugugacaagaaauagcuu

SEQ ID NO: 992542 - RNA, 19 nt, Artificial Sequence
  Description of Artificial Sequence: Synthetic oligonucleotide
uccagguagccauuugguu

SEQ ID NO: 992543 - RNA, 19 nt, Artificial Sequence
  Description of Artificial Sequence: Synthetic oligonucleotide
uugcaguuccagugauaag

SEQ ID NO: 992544 - RNA, 19 nt, Artificial Sequence
  Description of Artificial Sequence: Synthetic oligonucleotide
cugauuaauuauguaaacu

SEQ ID NO: 992545 - RNA, 19 nt, Artificial Sequence
  Description of Artificial Sequence: Synthetic oligonucleotide
ggcaacucacgguacccgg

SEQ ID NO: 992546 - RNA, 19 nt, Artificial Sequence
  Description of Artificial Sequence: Synthetic oligonucleotide
aggcgcuucucuauggaag

SEQ ID NO: 992547 - RNA, 19 nt, Artificial Sequence
  Description of Artificial Sequence: Synthetic oligonucleotide
aaagacucccugacccuca

SEQ ID NO: 992548 - RNA, 19 nt, Artificial Sequence
  Description of Artificial Sequence: Synthetic oligonucleotide
ggggcaaccagacgcggcg

SEQ ID NO: 992549 - RNA, 19 nt, Artificial Sequence
  Description of Artificial Sequence: Synthetic oligonucleotide
acuaauaauuugguuccuu

SEQ ID NO: 992550 - RNA, 19 nt, Artificial Sequence
  Description of Artificial Sequence: Synthetic oligonucleotide
cagcuaacaaacggucugc

SEQ ID NO: 992551 - RNA, 19 nt, Artificial Sequence
  Description of Artificial Sequence: Synthetic oligonucleotide
caaagucggcaucaacguc

SEQ ID NO: 992552 - RNA, 19 nt, Artificial Sequence
  Description of Artificial Sequence: Synthetic oligonucleotide
gauuggguauuggaauguc

SEQ ID NO: 992553 - RNA, 19 nt, Artificial Sequence
  Description of Artificial Sequence: Synthetic oligonucleotide
gugagcggcggcccgaggc

SEQ ID NO: 992554 - RNA, 19 nt, Artificial Sequence
  Description of Artificial Sequence: Synthetic oligonucleotide
auggcauuauagauuaauu

SEQ ID NO: 992555 - RNA, 19 nt, Artificial Sequence
  Description of Artificial Sequence: Synthetic oligonucleotide
cuauggaagggauguaugu

SEQ ID NO: 992556 - RNA, 19 nt, Artificial Sequence
  Description of Artificial Sequence: Synthetic oligonucleotide
aaaccguggcacauacagu

SEQ ID NO: 992557 - RNA, 19 nt, Artificial Sequence
  Description of Artificial Sequence: Synthetic oligonucleotide
uccaauggccuuccauuuu

SEQ ID NO: 992558 - RNA, 19 nt, Artificial Sequence
  Description of Artificial Sequence: Synthetic oligonucleotide
uuccgucccugucugugcu

SEQ ID NO: 992559 - RNA, 19 nt, Artificial Sequence
  Description of Artificial Sequence: Synthetic oligonucleotide
acauacaguuccaucugga

SEQ ID NO: 992560 - RNA, 19 nt, Artificial Sequence
  Description of Artificial Sequence: Synthetic oligonucleotide
aacggucugcucgucggcu

SEQ ID NO: 992561 - RNA, 19 nt, Artificial Sequence
  Description of Artificial Sequence: Synthetic oligonucleotide
aggcaacucacgguacccg

SEQ ID NO: 992562 - RNA, 19 nt, Artificial Sequence
  Description of Artificial Sequence: Synthetic oligonucleotide
agggaggcgcuucucuaug

SEQ ID NO: 992563 - RNA, 19 nt, Artificial Sequence
  Description of Artificial Sequence: Synthetic oligonucleotide
ugucugugcuaugcugugc

SEQ ID NO: 992564 - RNA, 19 nt, Artificial Sequence
  Description of Artificial Sequence: Synthetic oligonucleotide
agcuccauaagaggaaguu

SEQ ID NO: 992565 - RNA, 19 nt, Artificial Sequence
  Description of Artificial Sequence: Synthetic oligonucleotide
agaccccggggugagcggc

SEQ ID NO: 992566 - RNA, 19 nt, Artificial Sequence
  Description of Artificial Sequence: Synthetic oligonucleotide
ccggcaaguagaagaaacc

SEQ ID NO: 992567 - RNA, 19 nt, Artificial Sequence
  Description of Artificial Sequence: Synthetic oligonucleotide
cugcucgucggcucuguug

SEQ ID NO: 992568 - RNA, 19 nt, Artificial Sequence
  Description of Artificial Sequence: Synthetic oligonucleotide
uauucgcggcaaacuucug

SEQ ID NO: 992569 - RNA, 19 nt, Artificial Sequence
  Description of Artificial Sequence: Synthetic oligonucleotide
cuuacacaccguaucucaa

SEQ ID NO: 992570 - RNA, 19 nt, Artificial Sequence
  Description of Artificial Sequence: Synthetic oligonucleotide
caaagacucccugacccuc

SEQ ID NO: 992571 - RNA, 19 nt, Artificial Sequence
  Description of Artificial Sequence: Synthetic oligonucleotide
uuauggcauuauagauuaa

SEQ ID NO: 992572 - RNA, 19 nt, Artificial Sequence
  Description of Artificial Sequence: Synthetic oligonucleotide
cacaccguaucucaacaaa

SEQ ID NO: 992573 - RNA, 19 nt, Artificial Sequence
  Description of Artificial Sequence: Synthetic oligonucleotide
auccgcaauucugguugcc

SEQ ID NO: 992574 - RNA, 19 nt, Artificial Sequence
  Description of Artificial Sequence: Synthetic oligonucleotide
aagucggcaucaacgucca

SEQ ID NO: 992575 - RNA, 19 nt, Artificial Sequence
  Description of Artificial Sequence: Synthetic oligonucleotide
cccugauuaauuauguaaa

SEQ ID NO: 992576 - RNA, 19 nt, Artificial Sequence
  Description of Artificial Sequence: Synthetic oligonucleotide
augcacccugauuaauuau

SEQ ID NO: 992577 - RNA, 19 nt, Artificial Sequence
  Description of Artificial Sequence: Synthetic oligonucleotide
auacugcuaacuagcauua

SEQ ID NO: 992578 - RNA, 19 nt, Artificial Sequence
  Description of Artificial Sequence: Synthetic oligonucleotide
acacaccguaucucaacaa

SEQ ID NO: 992579 - RNA, 19 nt, Artificial Sequence
  Description of Artificial Sequence: Synthetic oligonucleotide
ucccugucugugcuaugcu

SEQ ID NO: 992580 - RNA, 19 nt, Artificial Sequence
  Description of Artificial Sequence: Synthetic oligonucleotide
cuaggcgggaggcaacuca

SEQ ID NO: 992581 - RNA, 19 nt, Artificial Sequence
  Description of Artificial Sequence: Synthetic oligonucleotide
agcgaaccuccauccaaga

SEQ ID NO: 992582 - RNA, 19 nt, Artificial Sequence
  Description of Artificial Sequence: Synthetic oligonucleotide
gugauaagugagccugcuc

SEQ ID NO: 992583 - RNA, 19 nt, Artificial Sequence
  Description of Artificial Sequence: Synthetic oligonucleotide
cuguuggcucauucuuuug

SEQ ID NO: 992584 - RNA, 19 nt, Artificial Sequence
  Description of Artificial Sequence: Synthetic oligonucleotide
ucaaccgcuccucgcguuu

SEQ ID NO: 992585 - RNA, 19 nt, Artificial Sequence
  Description of Artificial Sequence: Synthetic oligonucleotide
cugcuaacuagcauuacuu

SEQ ID NO: 992586 - RNA, 19 nt, Artificial Sequence
  Description of Artificial Sequence: Synthetic oligonucleotide
acacaaaguuagaacuuaa

SEQ ID NO: 992587 - RNA, 19 nt, Artificial Sequence
  Description of Artificial Sequence: Synthetic oligonucleotide
guauucgcggcaaacuucu

SEQ ID NO: 992588 - RNA, 19 nt, Artificial Sequence
  Description of Artificial Sequence: Synthetic oligonucleotide
cucacgguacccggagccg

SEQ ID NO: 992589 - RNA, 19 nt, Artificial Sequence
  Description of Artificial Sequence: Synthetic oligonucleotide
auuacacgugacauacuuu

SEQ ID NO: 992590 - RNA, 19 nt, Artificial Sequence
  Description of Artificial Sequence: Synthetic oligonucleotide
accgcuccucgcguuuugc

SEQ ID NO: 992591 - RNA, 19 nt, Artificial Sequence
  Description of Artificial Sequence: Synthetic oligonucleotide
cuguaguuguaagauaagu

SEQ ID NO: 992592 - RNA, 19 nt, Artificial Sequence
  Description of Artificial Sequence: Synthetic oligonucleotide
gguuaucauuauguuacga

SEQ ID NO: 992593 - RNA, 19 nt, Artificial Sequence
  Description of Artificial Sequence: Synthetic oligonucleotide
uccccuggggcguugcuuu

SEQ ID NO: 992594 - RNA, 19 nt, Artificial Sequence
  Description of Artificial Sequence: Synthetic oligonucleotide
gcggcaaacuucugccagg

SEQ ID NO: 992595 - RNA, 19 nt, Artificial Sequence
  Description of Artificial Sequence: Synthetic oligonucleotide
cgaguagugcaaaccgugg

SEQ ID NO: 992596 - RNA, 19 nt, Artificial Sequence
  Description of Artificial Sequence: Synthetic oligonucleotide
gccggcaaguagaagaaac

SEQ ID NO: 992597 - RNA, 19 nt, Artificial Sequence
  Description of Artificial Sequence: Synthetic oligonucleotide
caguuccagugauaaguga

SEQ ID NO: 992598 - RNA, 19 nt, Artificial Sequence
  Description of Artificial Sequence: Synthetic oligonucleotide
ccauauuuagcuuuugcau

SEQ ID NO: 992599 - RNA, 19 nt, Artificial Sequence
  Description of Artificial Sequence: Synthetic oligonucleotide
ccguggcacauacaguucc

SEQ ID NO: 992600 - RNA, 19 nt, Artificial Sequence
  Description of Artificial Sequence: Synthetic oligonucleotide
accguggcacauacaguuc

SEQ ID NO: 992601 - RNA, 19 nt, Artificial Sequence
  Description of Artificial Sequence: Synthetic oligonucleotide
guugaaccuuucagaaguc

SEQ ID NO: 992602 - RNA, 19 nt, Artificial Sequence
  Description of Artificial Sequence: Synthetic oligonucleotide
gcgaaccuccauccaagag

SEQ ID NO: 992603 - RNA, 19 nt, Artificial Sequence
  Description of Artificial Sequence: Synthetic oligonucleotide
cacgguacccggagccggc

SEQ ID NO: 992604 - RNA, 19 nt, Artificial Sequence
  Description of Artificial Sequence: Synthetic oligonucleotide
acuuucacacaugcaucau

SEQ ID NO: 992605 - RNA, 19 nt, Artificial Sequence
  Description of Artificial Sequence: Synthetic oligonucleotide
uucaaccgcuccucgcguu

SEQ ID NO: 992606 - RNA, 19 nt, Artificial Sequence
  Description of Artificial Sequence: Synthetic oligonucleotide
gguacccggagccggcaag

SEQ ID NO: 992607 - RNA, 19 nt, Artificial Sequence
  Description of Artificial Sequence: Synthetic oligonucleotide
gcugucccguugcaguucc

SEQ ID NO: 992608 - RNA, 19 nt, Artificial Sequence
  Description of Artificial Sequence: Synthetic oligonucleotide
cucgucggcucuguuggug

SEQ ID NO: 992609 - RNA, 19 nt, Artificial Sequence
  Description of Artificial Sequence: Synthetic oligonucleotide
cggcaaguagaagaaaccc

SEQ ID NO: 992610 - RNA, 19 nt, Artificial Sequence
  Description of Artificial Sequence: Synthetic oligonucleotide
gagccggcaaguagaagaa

SEQ ID NO: 992611 - RNA, 19 nt, Artificial Sequence
  Description of Artificial Sequence: Synthetic oligonucleotide
gagcaagguugaggggucc

SEQ ID NO: 992612 - RNA, 19 nt, Artificial Sequence
  Description of Artificial Sequence: Synthetic oligonucleotide
auguuacgaguagugcaaa

SEQ ID NO: 992613 - RNA, 19 nt, Artificial Sequence
  Description of Artificial Sequence: Synthetic oligonucleotide
cgcaauucugguugccugc

SEQ ID NO: 992614 - RNA, 19 nt, Artificial Sequence
  Description of Artificial Sequence: Synthetic oligonucleotide
uucauguggcugucccguu

SEQ ID NO: 992615 - RNA, 19 nt, Artificial Sequence
  Description of Artificial Sequence: Synthetic oligonucleotide
ccguaucucaacaaacaaa

SEQ ID NO: 992616 - RNA, 19 nt, Artificial Sequence
  Description of Artificial Sequence: Synthetic oligonucleotide
gcuccauaagaggaaguuc

SEQ ID NO: 992617 - RNA, 19 nt, Artificial Sequence
  Description of Artificial Sequence: Synthetic oligonucleotide
gcguuuugcccucuuccac

SEQ ID NO: 992618 - RNA, 19 nt, Artificial Sequence
  Description of Artificial Sequence: Synthetic oligonucleotide
ucccaguauucgcggcaaa

SEQ ID NO: 992619 - RNA, 19 nt, Artificial Sequence
  Description of Artificial Sequence: Synthetic oligonucleotide
caacguccagcuccuucuc

SEQ ID NO: 992620 - RNA, 19 nt, Artificial Sequence
  Description of Artificial Sequence: Synthetic oligonucleotide
gucggaaucaugagcugua

SEQ ID NO: 992621 - RNA, 19 nt, Artificial Sequence
  Description of Artificial Sequence: Synthetic oligonucleotide
caauggccuuccauuuuaa

SEQ ID NO: 992622 - RNA, 19 nt, Artificial Sequence
  Description of Artificial Sequence: Synthetic oligonucleotide
ggcggcccgaggcggaacg

SEQ ID NO: 992623 - RNA, 19 nt, Artificial Sequence
  Description of Artificial Sequence: Synthetic oligonucleotide
cccugucugugcuaugcug

SEQ ID NO: 992624 - RNA, 19 nt, Artificial Sequence
  Description of Artificial Sequence: Synthetic oligonucleotide
cucuauggaagggauguau

SEQ ID NO: 992625 - RNA, 19 nt, Artificial Sequence
  Description of Artificial Sequence: Synthetic oligonucleotide
gcggcgccugggcacaugg

SEQ ID NO: 992626 - RNA, 19 nt, Artificial Sequence
  Description of Artificial Sequence: Synthetic oligonucleotide
cacccugauuaauuaugua

SEQ ID NO: 992627 - RNA, 19 nt, Artificial Sequence
  Description of Artificial Sequence: Synthetic oligonucleotide
ggagcauuucugggauucc

SEQ ID NO: 992628 - RNA, 19 nt, Artificial Sequence
  Description of Artificial Sequence: Synthetic oligonucleotide
cugugucaacuucauggcu

SEQ ID NO: 992629 - RNA, 19 nt, Artificial Sequence
  Description of Artificial Sequence: Synthetic oligonucleotide
gagccuuucaggccaccau

SEQ ID NO: 992630 - RNA, 19 nt, Artificial Sequence
  Description of Artificial Sequence: Synthetic oligonucleotide
gucggcucuguuggugagc

SEQ ID NO: 992631 - RNA, 19 nt, Artificial Sequence
  Description of Artificial Sequence: Synthetic oligonucleotide
caguauucgcggcaaacuu

SEQ ID NO: 992632 - RNA, 19 nt, Artificial Sequence
  Description of Artificial Sequence: Synthetic oligonucleotide
gcgccugggcacauggagg

SEQ ID NO: 992633 - RNA, 19 nt, Artificial Sequence
  Description of Artificial Sequence: Synthetic oligonucleotide
gcacgguucuguuggcuca

SEQ ID NO: 992634 - RNA, 19 nt, Artificial Sequence
  Description of Artificial Sequence: Synthetic oligonucleotide
caaauccgcaauucugguu

SEQ ID NO: 992635 - RNA, 19 nt, Artificial Sequence
  Description of Artificial Sequence: Synthetic oligonucleotide
agcgagccuuucaggccac

SEQ ID NO: 992636 - RNA, 19 nt, Artificial Sequence
  Description of Artificial Sequence: Synthetic oligonucleotide
cuccaauggccuuccauuu

SEQ ID NO: 992637 - RNA, 19 nt, Artificial Sequence
  Description of Artificial Sequence: Synthetic oligonucleotide
gggcguugcuuucccuuug

SEQ ID NO: 992638 - RNA, 19 nt, Artificial Sequence
  Description of Artificial Sequence: Synthetic oligonucleotide
gcgcuucucuauggaaggg

SEQ ID NO: 992639 - RNA, 19 nt, Artificial Sequence
  Description of Artificial Sequence: Synthetic oligonucleotide
accagacgcggcggcuagg

SEQ ID NO: 992640 - RNA, 19 nt, Artificial Sequence
  Description of Artificial Sequence: Synthetic oligonucleotide
cgaaccuccauccaagagu

SEQ ID NO: 992641 - RNA, 19 nt, Artificial Sequence
  Description of Artificial Sequence: Synthetic oligonucleotide
gagauaagcugaagccuuu

SEQ ID NO: 992642 - RNA, 19 nt, Artificial Sequence
  Description of Artificial Sequence: Synthetic oligonucleotide
gaggguucuggcccuccau

SEQ ID NO: 992643 - RNA, 19 nt, Artificial Sequence
  Description of Artificial Sequence: Synthetic oligonucleotide
agccggcaaguagaagaaa

SEQ ID NO: 992644 - RNA, 19 nt, Artificial Sequence
  Description of Artificial Sequence: Synthetic oligonucleotide
ggagaguuccucaguauuu

SEQ ID NO: 992645 - RNA, 19 nt, Artificial Sequence
  Description of Artificial Sequence: Synthetic oligonucleotide
gcaacucacgguacccgga

SEQ ID NO: 992646 - RNA, 19 nt, Artificial Sequence
  Description of Artificial Sequence: Synthetic oligonucleotide
ggugagcggcggcccgagg

SEQ ID NO: 992647 - RNA, 19 nt, Artificial Sequence
  Description of Artificial Sequence: Synthetic oligonucleotide
gggaggcaacucacgguac

SEQ ID NO: 992648 - RNA, 19 nt, Artificial Sequence
  Description of Artificial Sequence: Synthetic oligonucleotide
acgguacccggagccggca

SEQ ID NO: 992649 - RNA, 19 nt, Artificial Sequence
  Description of Artificial Sequence: Synthetic oligonucleotide
cugugcuaugcugugcuuu

SEQ ID NO: 992650 - RNA, 19 nt, Artificial Sequence
  Description of Artificial Sequence: Synthetic oligonucleotide
cagggaggcgcuucucuau

SEQ ID NO: 992651 - RNA, 19 nt, Artificial Sequence
  Description of Artificial Sequence: Synthetic oligonucleotide
ccaguauucgcggcaaacu

SEQ ID NO: 992652 - RNA, 19 nt, Artificial Sequence
  Description of Artificial Sequence: Synthetic oligonucleotide
guacccggagccggcaagu

SEQ ID NO: 992653 - RNA, 19 nt, Artificial Sequence
  Description of Artificial Sequence: Synthetic oligonucleotide
cgguucuguuggcucauuc

SEQ ID NO: 992654 - RNA, 19 nt, Artificial Sequence
  Description of Artificial Sequence: Synthetic oligonucleotide
gcggcuaggcgggaggcaa

SEQ ID NO: 992655 - RNA, 19 nt, Artificial Sequence
  Description of Artificial Sequence: Synthetic oligonucleotide
ggugucucuuacacaccgu

SEQ ID NO: 992656 - RNA, 19 nt, Artificial Sequence
  Description of Artificial Sequence: Synthetic oligonucleotide
cgaggcggaacggcggcgc

SEQ ID NO: 992657 - RNA, 19 nt, Artificial Sequence
  Description of Artificial Sequence: Synthetic oligonucleotide
acgguucuguuggcucauu

SEQ ID NO: 992658 - RNA, 19 nt, Artificial Sequence
  Description of Artificial Sequence: Synthetic oligonucleotide
gcuaggcgggaggcaacuc

SEQ ID NO: 992659 - RNA, 19 nt, Artificial Sequence
  Description of Artificial Sequence: Synthetic oligonucleotide
ggcuaggcgggaggcaacu

SEQ ID NO: 992660 - RNA, 19 nt, Artificial Sequence
  Description of Artificial Sequence: Synthetic oligonucleotide
ccugacccucagggaggcg

SEQ ID NO: 992661 - RNA, 19 nt, Artificial Sequence
  Description of Artificial Sequence: Synthetic oligonucleotide
ggcggcuaggcgggaggca

SEQ ID NO: 992662 - RNA, 19 nt, Artificial Sequence
  Description of Artificial Sequence: Synthetic oligonucleotide
cggaucccugucaaagacu

SEQ ID NO: 992663 - RNA, 19 nt, Artificial Sequence
  Description of Artificial Sequence: Synthetic oligonucleotide
cgucccugucugugcuaug

SEQ ID NO: 992664 - RNA, 19 nt, Artificial Sequence
  Description of Artificial Sequence: Synthetic oligonucleotide
ggcggcgccugggcacaug

SEQ ID NO: 992665 - RNA, 19 nt, Artificial Sequence
  Description of Artificial Sequence: Synthetic oligonucleotide
ccguugcaguuccagugau

SEQ ID NO: 992666 - RNA, 19 nt, Artificial Sequence
  Description of Artificial Sequence: Synthetic oligonucleotide
caaccgcuccucgcguuuu

SEQ ID NO: 992667 - RNA, 19 nt, Artificial Sequence
  Description of Artificial Sequence: Synthetic oligonucleotide
gcucgucggcucuguuggu

SEQ ID NO: 992668 - RNA, 19 nt, Artificial Sequence
  Description of Artificial Sequence: Synthetic oligonucleotide
ccgucccugucugugcuau

SEQ ID NO: 992669 - RNA, 19 nt, Artificial Sequence
  Description of Artificial Sequence: Synthetic oligonucleotide
gcggcggcccgaggcggaa

SEQ ID NO: 992670 - RNA, 19 nt, Artificial Sequence
  Description of Artificial Sequence: Synthetic oligonucleotide
aauaggauaaacccaaacc

SEQ ID NO: 992671 - RNA, 19 nt, Artificial Sequence
  Description of Artificial Sequence: Synthetic oligonucleotide
aauuguacaguccacgacc

SEQ ID NO: 992672 - RNA, 19 nt, Artificial Sequence
  Description of Artificial Sequence: Synthetic oligonucleotide
auaggauaaacccaaaccc

SEQ ID NO: 992673 - RNA, 19 nt, Artificial Sequence
  Description of Artificial Sequence: Synthetic oligonucleotide
aagaugagaccucagcucc

SEQ ID NO: 992674 - RNA, 19 nt, Artificial Sequence
  Description of Artificial Sequence: Synthetic oligonucleotide
uuuagggucaauaacacga

SEQ ID NO: 992675 - RNA, 19 nt, Artificial Sequence
  Description of Artificial Sequence: Synthetic oligonucleotide
aauaacacgaccguccagc

SEQ ID NO: 992676 - RNA, 19 nt, Artificial Sequence
  Description of Artificial Sequence: Synthetic oligonucleotide
cuuugaauaggauaaaccc

SEQ ID NO: 992677 - RNA, 19 nt, Artificial Sequence
  Description of Artificial Sequence: Synthetic oligonucleotide
aauaagaugcacaugggac

SEQ ID NO: 992678 - RNA, 19 nt, Artificial Sequence
  Description of Artificial Sequence: Synthetic oligonucleotide
ucuauuggaagcucaaugg

SEQ ID NO: 992679 - RNA, 19 nt, Artificial Sequence
  Description of Artificial Sequence: Synthetic oligonucleotide
ucuggaauaguaaacagga

SEQ ID NO: 992680 - RNA, 19 nt, Artificial Sequence
  Description of Artificial Sequence: Synthetic oligonucleotide
uguaaaauaccuuacaaua

SEQ ID NO: 992681 - RNA, 19 nt, Artificial Sequence
  Description of Artificial Sequence: Synthetic oligonucleotide
uaaauuugguacauaauug

SEQ ID NO: 992682 - RNA, 19 nt, Artificial Sequence
  Description of Artificial Sequence: Synthetic oligonucleotide
aaauuugguacauaauugu

SEQ ID NO: 992683 - RNA, 19 nt, Artificial Sequence
  Description of Artificial Sequence: Synthetic oligonucleotide
agcuucaauauccaggucg

SEQ ID NO: 992684 - RNA, 19 nt, Artificial Sequence
  Description of Artificial Sequence: Synthetic oligonucleotide
uuagauucccaaaagguac

SEQ ID NO: 992685 - RNA, 19 nt, Artificial Sequence
  Description of Artificial Sequence: Synthetic oligonucleotide
uccgcguccaaacaaagcg

SEQ ID NO: 992686 - RNA, 19 nt, Artificial Sequence
  Description of Artificial Sequence: Synthetic oligonucleotide
agucguagccgccauagcc

SEQ ID NO: 992687 - RNA, 19 nt, Artificial Sequence
  Description of Artificial Sequence: Synthetic oligonucleotide
aagcucaauggcuucaauc

SEQ ID NO: 992688 - RNA, 19 nt, Artificial Sequence
  Description of Artificial Sequence: Synthetic oligonucleotide
agccguaauagccauaggg

SEQ ID NO: 992689 - RNA, 19 nt, Artificial Sequence
  Description of Artificial Sequence: Synthetic oligonucleotide
auuguguucacuccgcguc

SEQ ID NO: 992690 - RNA, 19 nt, Artificial Sequence
  Description of Artificial Sequence: Synthetic oligonucleotide
aaaaccccgucuuuuguuc

SEQ ID NO: 992691 - RNA, 19 nt, Artificial Sequence
  Description of Artificial Sequence: Synthetic oligonucleotide
gaucugaucgcccucggcg

SEQ ID NO: 992692 - RNA, 19 nt, Artificial Sequence
  Description of Artificial Sequence: Synthetic oligonucleotide
uacauuagauucccaaaag

SEQ ID NO: 992693 - RNA, 19 nt, Artificial Sequence
  Description of Artificial Sequence: Synthetic oligonucleotide
auuacuggaaauguaugac

SEQ ID NO: 992694 - RNA, 19 nt, Artificial Sequence
  Description of Artificial Sequence: Synthetic oligonucleotide
uucaacuugggaucuauug

SEQ ID NO: 992695 - RNA, 19 nt, Artificial Sequence
  Description of Artificial Sequence: Synthetic oligonucleotide
ugauacaccucuuugggcu

SEQ ID NO: 992696 - RNA, 19 nt, Artificial Sequence
  Description of Artificial Sequence: Synthetic oligonucleotide
agacccuccaaucuaguac

SEQ ID NO: 992697 - RNA, 19 nt, Artificial Sequence
  Description of Artificial Sequence: Synthetic oligonucleotide
aaaaucaggacacguguaa

SEQ ID NO: 992698 - RNA, 19 nt, Artificial Sequence
  Description of Artificial Sequence: Synthetic oligonucleotide
aucuauuggaagcucaaug

SEQ ID NO: 992699 - RNA, 19 nt, Artificial Sequence
  Description of Artificial Sequence: Synthetic oligonucleotide
uuuuagggucaauaacacg

SEQ ID NO: 992700 - RNA, 19 nt, Artificial Sequence
  Description of Artificial Sequence: Synthetic oligonucleotide
uguacuacccugacuguag

SEQ ID NO: 992701 - RNA, 19 nt, Artificial Sequence
  Description of Artificial Sequence: Synthetic oligonucleotide
uuaauuguacaguccacga

SEQ ID NO: 992702 - RNA, 19 nt, Artificial Sequence
  Description of Artificial Sequence: Synthetic oligonucleotide
ucaauauccaggucguggc

SEQ ID NO: 992703 - RNA, 19 nt, Artificial Sequence
  Description of Artificial Sequence: Synthetic oligonucleotide
uauuggaagcucaauggcu

SEQ ID NO: 992704 - RNA, 19 nt, Artificial Sequence
  Description of Artificial Sequence: Synthetic oligonucleotide
aacaaaaccccgucuuuug

SEQ ID NO: 992705 - RNA, 19 nt, Artificial Sequence
  Description of Artificial Sequence: Synthetic oligonucleotide
uccauuacuggaaauguau

SEQ ID NO: 992706 - RNA, 19 nt, Artificial Sequence
  Description of Artificial Sequence: Synthetic oligonucleotide
uguaguuauucugauggcc

SEQ ID NO: 992707 - RNA, 19 nt, Artificial Sequence
  Description of Artificial Sequence: Synthetic oligonucleotide
auugcgguuuccucguccc

SEQ ID NO: 992708 - RNA, 19 nt, Artificial Sequence
  Description of Artificial Sequence: Synthetic oligonucleotide
aaucuaguacaggguaacc

SEQ ID NO: 992709 - RNA, 19 nt, Artificial Sequence
  Description of Artificial Sequence: Synthetic oligonucleotide
auacaguuuacucuuuaca

SEQ ID NO: 992710 - RNA, 19 nt, Artificial Sequence
  Description of Artificial Sequence: Synthetic oligonucleotide
cucgauugcgguuuccucg

SEQ ID NO: 992711 - RNA, 19 nt, Artificial Sequence
  Description of Artificial Sequence: Synthetic oligonucleotide
ggaauaguaaacaggagag

SEQ ID NO: 992712 - RNA, 19 nt, Artificial Sequence
  Description of Artificial Sequence: Synthetic oligonucleotide
uuuacaaccaggguccaca

SEQ ID NO: 992713 - RNA, 19 nt, Artificial Sequence
  Description of Artificial Sequence: Synthetic oligonucleotide
uaacacuuccauuacugga

SEQ ID NO: 992714 - RNA, 19 nt, Artificial Sequence
  Description of Artificial Sequence: Synthetic oligonucleotide
ucugagacgccacacgcug

SEQ ID NO: 992715 - RNA, 19 nt, Artificial Sequence
  Description of Artificial Sequence: Synthetic oligonucleotide
guugccguagcccugauuc

SEQ ID NO: 992716 - RNA, 19 nt, Artificial Sequence
  Description of Artificial Sequence: Synthetic oligonucleotide
gaauaggauaaacccaaac

SEQ ID NO: 992717 - RNA, 19 nt, Artificial Sequence
  Description of Artificial Sequence: Synthetic oligonucleotide
aacaaagcgugugcggucg

SEQ ID NO: 992718 - RNA, 19 nt, Artificial Sequence
  Description of Artificial Sequence: Synthetic oligonucleotide
cuauuggaagcucaauggc

SEQ ID NO: 992719 - RNA, 19 nt, Artificial Sequence
  Description of Artificial Sequence: Synthetic oligonucleotide
aguaaaauuaacacuucca

SEQ ID NO: 992720 - RNA, 19 nt, Artificial Sequence
  Description of Artificial Sequence: Synthetic oligonucleotide
gccaaguuaaauuugguac

SEQ ID NO: 992721 - RNA, 19 nt, Artificial Sequence
  Description of Artificial Sequence: Synthetic oligonucleotide
auaacacgaccguccagcc

SEQ ID NO: 992722 - RNA, 19 nt, Artificial Sequence
  Description of Artificial Sequence: Synthetic oligonucleotide
ugacuguagucguagccgg

SEQ ID NO: 992723 - RNA, 19 nt, Artificial Sequence
  Description of Artificial Sequence: Synthetic oligonucleotide
aauuguguucacuccgcgu

SEQ ID NO: 992724 - RNA, 19 nt, Artificial Sequence
  Description of Artificial Sequence: Synthetic oligonucleotide
uaauuguacaguccacgac

SEQ ID NO: 992725 - RNA, 19 nt, Artificial Sequence
  Description of Artificial Sequence: Synthetic oligonucleotide
uagauucccaaaagguacc

SEQ ID NO: 992726 - RNA, 19 nt, Artificial Sequence
  Description of Artificial Sequence: Synthetic oligonucleotide
ucugacucugaccuccacc

SEQ ID NO: 992727 - RNA, 19 nt, Artificial Sequence
  Description of Artificial Sequence: Synthetic oligonucleotide
gucaauaacacgaccgucc

SEQ ID NO: 992728 - RNA, 19 nt, Artificial Sequence
  Description of Artificial Sequence: Synthetic oligonucleotide
agggucaauaacacgaccg

SEQ ID NO: 992729 - RNA, 19 nt, Artificial Sequence
  Description of Artificial Sequence: Synthetic oligonucleotide
aucugaucgcccucggcgc

SEQ ID NO: 992730 - RNA, 19 nt, Artificial Sequence
  Description of Artificial Sequence: Synthetic oligonucleotide
gcuggcguugaucugaucg

SEQ ID NO: 992731 - RNA, 19 nt, Artificial Sequence
  Description of Artificial Sequence: Synthetic oligonucleotide
aacuggccgaaguauucuc

SEQ ID NO: 992732 - RNA, 19 nt, Artificial Sequence
  Description of Artificial Sequence: Synthetic oligonucleotide
ucagccgcguccgacaugg

SEQ ID NO: 992733 - RNA, 19 nt, Artificial Sequence
  Description of Artificial Sequence: Synthetic oligonucleotide
aacuacagcucuggaauag

SEQ ID NO: 992734 - RNA, 19 nt, Artificial Sequence
  Description of Artificial Sequence: Synthetic oligonucleotide
auuucacacuugcuuccgc

SEQ ID NO: 992735 - RNA, 19 nt, Artificial Sequence
  Description of Artificial Sequence: Synthetic oligonucleotide
aaccauacugcuguugcug

SEQ ID NO: 992736 - RNA, 19 nt, Artificial Sequence
  Description of Artificial Sequence: Synthetic oligonucleotide
uuagggucaauaacacgac

SEQ ID NO: 992737 - RNA, 19 nt, Artificial Sequence
  Description of Artificial Sequence: Synthetic oligonucleotide
ucguggcaaaaucaggaca

SEQ ID NO: 992738 - RNA, 19 nt, Artificial Sequence
  Description of Artificial Sequence: Synthetic oligonucleotide
gacucugaccuccaccucc

SEQ ID NO: 992739 - RNA, 19 nt, Artificial Sequence
  Description of Artificial Sequence: Synthetic oligonucleotide
auaccuuacaauacauuag

SEQ ID NO: 992740 - RNA, 19 nt, Artificial Sequence
  Description of Artificial Sequence: Synthetic oligonucleotide
acacguguaaaauaccuua

SEQ ID NO: 992741 - RNA, 19 nt, Artificial Sequence
  Description of Artificial Sequence: Synthetic oligonucleotide
aguuauucugauggccacc

SEQ ID NO: 992742 - RNA, 19 nt, Artificial Sequence
  Description of Artificial Sequence: Synthetic oligonucleotide
gauuccaacucugacucug

SEQ ID NO: 992743 - RNA, 19 nt, Artificial Sequence
  Description of Artificial Sequence: Synthetic oligonucleotide
ucuugaucguccaguguug

SEQ ID NO: 992744 - RNA, 19 nt, Artificial Sequence
  Description of Artificial Sequence: Synthetic oligonucleotide
guagccguaauagccauag

SEQ ID NO: 992745 - RNA, 19 nt, Artificial Sequence
  Description of Artificial Sequence: Synthetic oligonucleotide
ucucaguauggcuuguagu

SEQ ID NO: 992746 - RNA, 19 nt, Artificial Sequence
  Description of Artificial Sequence: Synthetic oligonucleotide
uccaguaguugccguagcc

SEQ ID NO: 992747 - RNA, 19 nt, Artificial Sequence
  Description of Artificial Sequence: Synthetic oligonucleotide
uguagucguagccggggcc

SEQ ID NO: 992748 - RNA, 19 nt, Artificial Sequence
  Description of Artificial Sequence: Synthetic oligonucleotide
guagccguagcccugguuc

SEQ ID NO: 992749 - RNA, 19 nt, Artificial Sequence
  Description of Artificial Sequence: Synthetic oligonucleotide
ugaucguccaguguuggga

SEQ ID NO: 992750 - RNA, 19 nt, Artificial Sequence
  Description of Artificial Sequence: Synthetic oligonucleotide
ugagacgccacacgcugcc

SEQ ID NO: 992751 - RNA, 19 nt, Artificial Sequence
  Description of Artificial Sequence: Synthetic oligonucleotide
caggccauaaaaguuugcc

SEQ ID NO: 992752 - RNA, 19 nt, Artificial Sequence
  Description of Artificial Sequence: Synthetic oligonucleotide
uuguaguuauucugauggc

SEQ ID NO: 992753 - RNA, 19 nt, Artificial Sequence
  Description of Artificial Sequence: Synthetic oligonucleotide
uagggucaauaacacgacc

SEQ ID NO: 992754 - RNA, 19 nt, Artificial Sequence
  Description of Artificial Sequence: Synthetic oligonucleotide
guaauagccauagggcgag

SEQ ID NO: 992755 - RNA, 19 nt, Artificial Sequence
  Description of Artificial Sequence: Synthetic oligonucleotide
cucguguccguucucagug

SEQ ID NO: 992756 - RNA, 19 nt, Artificial Sequence
  Description of Artificial Sequence: Synthetic oligonucleotide
auuagauucccaaaaggua

SEQ ID NO: 992757 - RNA, 19 nt, Artificial Sequence
  Description of Artificial Sequence: Synthetic oligonucleotide
gauugcgguuuccucgucc

SEQ ID NO: 992758 - RNA, 19 nt, Artificial Sequence
  Description of Artificial Sequence: Synthetic oligonucleotide
aaacaaaaccccgucuuuu

SEQ ID NO: 992759 - RNA, 19 nt, Artificial Sequence
  Description of Artificial Sequence: Synthetic oligonucleotide
ucccguaauuuguacuacc

SEQ ID NO: 992760 - RNA, 19 nt, Artificial Sequence
  Description of Artificial Sequence: Synthetic oligonucleotide
guagucguagccgccauag

SEQ ID NO: 992761 - RNA, 19 nt, Artificial Sequence
  Description of Artificial Sequence: Synthetic oligonucleotide
ugggauccauuuuaauugu

SEQ ID NO: 992762 - RNA, 19 nt, Artificial Sequence
  Description of Artificial Sequence: Synthetic oligonucleotide
uuguguucacuccgcgucc

SEQ ID NO: 992763 - RNA, 19 nt, Artificial Sequence
  Description of Artificial Sequence: Synthetic oligonucleotide
uaguuauucugauggccac

SEQ ID NO: 992764 - RNA, 19 nt, Artificial Sequence
  Description of Artificial Sequence: Synthetic oligonucleotide
uuacaaccaggguccacag

SEQ ID NO: 992765 - RNA, 19 nt, Artificial Sequence
  Description of Artificial Sequence: Synthetic oligonucleotide
acacgcugccuacaacuac

SEQ ID NO: 992766 - RNA, 19 nt, Artificial Sequence
  Description of Artificial Sequence: Synthetic oligonucleotide
aggucucacagagagagca

SEQ ID NO: 992767 - RNA, 19 nt, Artificial Sequence
  Description of Artificial Sequence: Synthetic oligonucleotide
ccguaauagccauagggcg

SEQ ID NO: 992768 - RNA, 19 nt, Artificial Sequence
  Description of Artificial Sequence: Synthetic oligonucleotide
acuuaguaaaauaauccuu

SEQ ID NO: 992769 - RNA, 19 nt, Artificial Sequence
  Description of Artificial Sequence: Synthetic oligonucleotide
aucuaguacaggguaaccu

SEQ ID NO: 992770 - RNA, 19 nt, Artificial Sequence
  Description of Artificial Sequence: Synthetic oligonucleotide
aaaccccgucuuuuguuca

SEQ ID NO: 992771 - RNA, 19 nt, Artificial Sequence
  Description of Artificial Sequence: Synthetic oligonucleotide
acuguagucguagccgggg

SEQ ID NO: 992772 - RNA, 19 nt, Artificial Sequence
  Description of Artificial Sequence: Synthetic oligonucleotide
uuuguacuacccugacugu

SEQ ID NO: 992773 - RNA, 19 nt, Artificial Sequence
  Description of Artificial Sequence: Synthetic oligonucleotide
uccaggucguggcaaaauc

SEQ ID NO: 992774 - RNA, 19 nt, Artificial Sequence
  Description of Artificial Sequence: Synthetic oligonucleotide
ucgguucccucgauugcgg

SEQ ID NO: 992775 - RNA, 19 nt, Artificial Sequence
  Description of Artificial Sequence: Synthetic oligonucleotide
caaucuaguacaggguaac

SEQ ID NO: 992776 - RNA, 19 nt, Artificial Sequence
  Description of Artificial Sequence: Synthetic oligonucleotide
uugccaaguuaaauuuggu

SEQ ID NO: 992777 - RNA, 19 nt, Artificial Sequence
  Description of Artificial Sequence: Synthetic oligonucleotide
uggaaauguaugacacaaa

SEQ ID NO: 992778 - RNA, 19 nt, Artificial Sequence
  Description of Artificial Sequence: Synthetic oligonucleotide
aggacacguguaaaauacc

SEQ ID NO: 992779 - RNA, 19 nt, Artificial Sequence
  Description of Artificial Sequence: Synthetic oligonucleotide
uuccuaagauacaguuuac

SEQ ID NO: 992780 - RNA, 19 nt, Artificial Sequence
  Description of Artificial Sequence: Synthetic oligonucleotide
ucguccaguguugggaucc

SEQ ID NO: 992781 - RNA, 19 nt, Artificial Sequence
  Description of Artificial Sequence: Synthetic oligonucleotide
ucgauugcgguuuccucgu

SEQ ID NO: 992782 - RNA, 19 nt, Artificial Sequence
  Description of Artificial Sequence: Synthetic oligonucleotide
aagcgugugcggucgucag

SEQ ID NO: 992783 - RNA, 19 nt, Artificial Sequence
  Description of Artificial Sequence: Synthetic oligonucleotide
uaguacaggguaaccuggu

SEQ ID NO: 992784 - RNA, 19 nt, Artificial Sequence
  Description of Artificial Sequence: Synthetic oligonucleotide
guagucguagccggggccg

SEQ ID NO: 992785 - RNA, 19 nt, Artificial Sequence
  Description of Artificial Sequence: Synthetic oligonucleotide
cuugaucguccaguguugg

SEQ ID NO: 992786 - RNA, 19 nt, Artificial Sequence
  Description of Artificial Sequence: Synthetic oligonucleotide
aaagcgugugcggucguca

SEQ ID NO: 992787 - RNA, 19 nt, Artificial Sequence
  Description of Artificial Sequence: Synthetic oligonucleotide
auagccgggcccguagccc

SEQ ID NO: 992788 - RNA, 19 nt, Artificial Sequence
  Description of Artificial Sequence: Synthetic oligonucleotide
uccccaaacuggccgaagu

SEQ ID NO: 992789 - RNA, 19 nt, Artificial Sequence
  Description of Artificial Sequence: Synthetic oligonucleotide
aagaaucuuugaauaggau

SEQ ID NO: 992790 - RNA, 19 nt, Artificial Sequence
  Description of Artificial Sequence: Synthetic oligonucleotide
ugccuacaacuacagcucu

SEQ ID NO: 992791 - RNA, 19 nt, Artificial Sequence
  Description of Artificial Sequence: Synthetic oligonucleotide
ucugaucgcccucggcgcc

SEQ ID NO: 992792 - RNA, 19 nt, Artificial Sequence
  Description of Artificial Sequence: Synthetic oligonucleotide
ucguguccguucucagugg

SEQ ID NO: 992793 - RNA, 19 nt, Artificial Sequence
  Description of Artificial Sequence: Synthetic oligonucleotide
guacaggguaaccugguaa

SEQ ID NO: 992794 - RNA, 19 nt, Artificial Sequence
  Description of Artificial Sequence: Synthetic oligonucleotide
ugucgcucggcucgacugc

SEQ ID NO: 992795 - RNA, 19 nt, Artificial Sequence
  Description of Artificial Sequence: Synthetic oligonucleotide
uagccauagggcgaguagu

SEQ ID NO: 992796 - RNA, 19 nt, Artificial Sequence
  Description of Artificial Sequence: Synthetic oligonucleotide
gccguaauagccauagggc

SEQ ID NO: 992797 - RNA, 19 nt, Artificial Sequence
  Description of Artificial Sequence: Synthetic oligonucleotide
ucuacacuggaagaaucuu

SEQ ID NO: 992798 - RNA, 19 nt, Artificial Sequence
  Description of Artificial Sequence: Synthetic oligonucleotide
aucaggacacguguaaaau

SEQ ID NO: 992799 - RNA, 19 nt, Artificial Sequence
  Description of Artificial Sequence: Synthetic oligonucleotide
cuucccguaauuuguacua

SEQ ID NO: 992800 - RNA, 19 nt, Artificial Sequence
  Description of Artificial Sequence: Synthetic oligonucleotide
gucuaagaccuucucuaca

SEQ ID NO: 992801 - RNA, 19 nt, Artificial Sequence
  Description of Artificial Sequence: Synthetic oligonucleotide
ucaguauggcuuguaguua

SEQ ID NO: 992802 - RNA, 19 nt, Artificial Sequence
  Description of Artificial Sequence: Synthetic oligonucleotide
uagccguagcccugguucc

SEQ ID NO: 992803 - RNA, 19 nt, Artificial Sequence
  Description of Artificial Sequence: Synthetic oligonucleotide
ugcuuccgcugacaguaug

SEQ ID NO: 992804 - RNA, 19 nt, Artificial Sequence
  Description of Artificial Sequence: Synthetic oligonucleotide
uaacacgaccguccagccu

SEQ ID NO: 992805 - RNA, 19 nt, Artificial Sequence
  Description of Artificial Sequence: Synthetic oligonucleotide
ggauagcuucaauauccag

SEQ ID NO: 992806 - RNA, 19 nt, Artificial Sequence
  Description of Artificial Sequence: Synthetic oligonucleotide
ucgacugccggcguacaca

SEQ ID NO: 992807 - RNA, 19 nt, Artificial Sequence
  Description of Artificial Sequence: Synthetic oligonucleotide
cuacucgccgcggaaggcg

SEQ ID NO: 992808 - RNA, 19 nt, Artificial Sequence
  Description of Artificial Sequence: Synthetic oligonucleotide
gugucgcucggcucgacug

SEQ ID NO: 992809 - RNA, 19 nt, Artificial Sequence
  Description of Artificial Sequence: Synthetic oligonucleotide
cucuucccguaauuuguac

SEQ ID NO: 992810 - RNA, 19 nt, Artificial Sequence
  Description of Artificial Sequence: Synthetic oligonucleotide
acgaccucuccaaacuuag

SEQ ID NO: 992811 - RNA, 19 nt, Artificial Sequence
  Description of Artificial Sequence: Synthetic oligonucleotide
guagccggggccguagccg

SEQ ID NO: 992812 - RNA, 19 nt, Artificial Sequence
  Description of Artificial Sequence: Synthetic oligonucleotide
aucguccaguguugggauc

SEQ ID NO: 992813 - RNA, 19 nt, Artificial Sequence
  Description of Artificial Sequence: Synthetic oligonucleotide
cauagccgggcccguagcc

SEQ ID NO: 992814 - RNA, 19 nt, Artificial Sequence
  Description of Artificial Sequence: Synthetic oligonucleotide
uggccgaaguauucucuga

SEQ ID NO: 992815 - RNA, 19 nt, Artificial Sequence
  Description of Artificial Sequence: Synthetic oligonucleotide
cucaguauggcuuguaguu

SEQ ID NO: 992816 - RNA, 19 nt, Artificial Sequence
  Description of Artificial Sequence: Synthetic oligonucleotide
uacucgccgcggaaggcgc

SEQ ID NO: 992817 - RNA, 19 nt, Artificial Sequence
  Description of Artificial Sequence: Synthetic oligonucleotide
uuguacuacccugacugua

SEQ ID NO: 992818 - RNA, 19 nt, Artificial Sequence
  Description of Artificial Sequence: Synthetic oligonucleotide
ugccggcguacacaggcca

SEQ ID NO: 992819 - RNA, 19 nt, Artificial Sequence
  Description of Artificial Sequence: Synthetic oligonucleotide
cacgcugccuacaacuaca

SEQ ID NO: 992820 - RNA, 19 nt, Artificial Sequence
  Description of Artificial Sequence: Synthetic oligonucleotide
auauccaggucguggcaaa

SEQ ID NO: 992821 - RNA, 19 nt, Artificial Sequence
  Description of Artificial Sequence: Synthetic oligonucleotide
aggucguggcaaaaucagg

SEQ ID NO: 992822 - RNA, 19 nt, Artificial Sequence
  Description of Artificial Sequence: Synthetic oligonucleotide
auacaccucuuugggcugg

SEQ ID NO: 992823 - RNA, 19 nt, Artificial Sequence
  Description of Artificial Sequence: Synthetic oligonucleotide
ccgucuuuuguucaacuug

SEQ ID NO: 992824 - RNA, 19 nt, Artificial Sequence
  Description of Artificial Sequence: Synthetic oligonucleotide
cuucaggguucagaccucc

SEQ ID NO: 992825 - RNA, 19 nt, Artificial Sequence
  Description of Artificial Sequence: Synthetic oligonucleotide
ggggccguagccguaauag

SEQ ID NO: 992826 - RNA, 19 nt, Artificial Sequence
  Description of Artificial Sequence: Synthetic oligonucleotide
uucccguaauuuguacuac

SEQ ID NO: 992827 - RNA, 19 nt, Artificial Sequence
  Description of Artificial Sequence: Synthetic oligonucleotide
uagucguagccgccauagc

SEQ ID NO: 992828 - RNA, 19 nt, Artificial Sequence
  Description of Artificial Sequence: Synthetic oligonucleotide
aaccccgucuuuuguucaa

SEQ ID NO: 992829 - RNA, 19 nt, Artificial Sequence
  Description of Artificial Sequence: Synthetic oligonucleotide
uacuacccugacuguaguc

SEQ ID NO: 992830 - RNA, 19 nt, Artificial Sequence
  Description of Artificial Sequence: Synthetic oligonucleotide
ucaguggcgcccgucgucu

SEQ ID NO: 992831 - RNA, 19 nt, Artificial Sequence
  Description of Artificial Sequence: Synthetic oligonucleotide
ucgucagucggccgcuccu

SEQ ID NO: 992832 - RNA, 19 nt, Artificial Sequence
  Description of Artificial Sequence: Synthetic oligonucleotide
uguguucacuccgcgucca

SEQ ID NO: 992833 - RNA, 19 nt, Artificial Sequence
  Description of Artificial Sequence: Synthetic oligonucleotide
ggccguagccguaauagcc

SEQ ID NO: 992834 - RNA, 19 nt, Artificial Sequence
  Description of Artificial Sequence: Synthetic oligonucleotide
ggucguggcaaaaucagga

SEQ ID NO: 992835 - RNA, 19 nt, Artificial Sequence
  Description of Artificial Sequence: Synthetic oligonucleotide
acccugacuguagucguag

SEQ ID NO: 992836 - RNA, 19 nt, Artificial Sequence
  Description of Artificial Sequence: Synthetic oligonucleotide
aguacaggguaaccuggua

SEQ ID NO: 992837 - RNA, 19 nt, Artificial Sequence
  Description of Artificial Sequence: Synthetic oligonucleotide
gccgcguccgacauggucg

SEQ ID NO: 992838 - RNA, 19 nt, Artificial Sequence
  Description of Artificial Sequence: Synthetic oligonucleotide
gacgccacacgcugccuac

SEQ ID NO: 992839 - RNA, 19 nt, Artificial Sequence
  Description of Artificial Sequence: Synthetic oligonucleotide
cugagacgccacacgcugc

SEQ ID NO: 992840 - RNA, 19 nt, Artificial Sequence
  Description of Artificial Sequence: Synthetic oligonucleotide
caggccaaagaugagaccu

SEQ ID NO: 992841 - RNA, 19 nt, Artificial Sequence
  Description of Artificial Sequence: Synthetic oligonucleotide
auagggcgaguagucguag

SEQ ID NO: 992842 - RNA, 19 nt, Artificial Sequence
  Description of Artificial Sequence: Synthetic oligonucleotide
gucgccguggucccgcccc

SEQ ID NO: 992843 - RNA, 19 nt, Artificial Sequence
  Description of Artificial Sequence: Synthetic oligonucleotide
uugcgguuuccucgucccc

SEQ ID NO: 992844 - RNA, 19 nt, Artificial Sequence
  Description of Artificial Sequence: Synthetic oligonucleotide
ucuuuacaaccagggucca

SEQ ID NO: 992845 - RNA, 19 nt, Artificial Sequence
  Description of Artificial Sequence: Synthetic oligonucleotide
cucuacacuggaagaaucu

SEQ ID NO: 992846 - RNA, 19 nt, Artificial Sequence
  Description of Artificial Sequence: Synthetic oligonucleotide
uccaccgacggugucgcuc

SEQ ID NO: 992847 - RNA, 19 nt, Artificial Sequence
  Description of Artificial Sequence: Synthetic oligonucleotide
acacucacccaggcguggg

SEQ ID NO: 992848 - RNA, 19 nt, Artificial Sequence
  Description of Artificial Sequence: Synthetic oligonucleotide
uguucacuccgcguccaaa

SEQ ID NO: 992849 - RNA, 19 nt, Artificial Sequence
  Description of Artificial Sequence: Synthetic oligonucleotide
ccaguaguugccguagccc

SEQ ID NO: 992850 - RNA, 19 nt, Artificial Sequence
  Description of Artificial Sequence: Synthetic oligonucleotide
caauauccaggucguggca

SEQ ID NO: 992851 - RNA, 19 nt, Artificial Sequence
  Description of Artificial Sequence: Synthetic oligonucleotide
cuuuacaaccaggguccac

SEQ ID NO: 992852 - RNA, 19 nt, Artificial Sequence
  Description of Artificial Sequence: Synthetic oligonucleotide
acgaccguccagccugugu

SEQ ID NO: 992853 - RNA, 19 nt, Artificial Sequence
  Description of Artificial Sequence: Synthetic oligonucleotide
cacucacccaggcgugggg

SEQ ID NO: 992854 - RNA, 19 nt, Artificial Sequence
  Description of Artificial Sequence: Synthetic oligonucleotide
accccgucuuuuguucaac

SEQ ID NO: 992855 - RNA, 19 nt, Artificial Sequence
  Description of Artificial Sequence: Synthetic oligonucleotide
gaucguccaguguugggau

SEQ ID NO: 992856 - RNA, 19 nt, Artificial Sequence
  Description of Artificial Sequence: Synthetic oligonucleotide
guacauaauuguguucacu

SEQ ID NO: 992857 - RNA, 19 nt, Artificial Sequence
  Description of Artificial Sequence: Synthetic oligonucleotide
gccgaugacgccgcgaggc

SEQ ID NO: 992858 - RNA, 19 nt, Artificial Sequence
  Description of Artificial Sequence: Synthetic oligonucleotide
ccaccgacggugucgcucg

SEQ ID NO: 992859 - RNA, 19 nt, Artificial Sequence
  Description of Artificial Sequence: Synthetic oligonucleotide
cauagggcgaguagucgua

SEQ ID NO: 992860 - RNA, 19 nt, Artificial Sequence
  Description of Artificial Sequence: Synthetic oligonucleotide
uacccugacuguagucgua

SEQ ID NO: 992861 - RNA, 19 nt, Artificial Sequence
  Description of Artificial Sequence: Synthetic oligonucleotide
uagccggggccguagccgu

SEQ ID NO: 992862 - RNA, 19 nt, Artificial Sequence
  Description of Artificial Sequence: Synthetic oligonucleotide
gucgucagucggccgcucc

SEQ ID NO: 992863 - RNA, 19 nt, Artificial Sequence
  Description of Artificial Sequence: Synthetic oligonucleotide
gaccguccagccuguguuc

SEQ ID NO: 992864 - RNA, 19 nt, Artificial Sequence
  Description of Artificial Sequence: Synthetic oligonucleotide
gucagucggccgcuccugc

SEQ ID NO: 992865 - RNA, 19 nt, Artificial Sequence
  Description of Artificial Sequence: Synthetic oligonucleotide
cugccggcguacacaggcc

SEQ ID NO: 992866 - RNA, 19 nt, Artificial Sequence
  Description of Artificial Sequence: Synthetic oligonucleotide
aguagucguagccgccaua

SEQ ID NO: 992867 - RNA, 19 nt, Artificial Sequence
  Description of Artificial Sequence: Synthetic oligonucleotide
ggucaauaacacgaccguc

SEQ ID NO: 992868 - RNA, 19 nt, Artificial Sequence
  Description of Artificial Sequence: Synthetic oligonucleotide
accgacggugucgcucggc

SEQ ID NO: 992869 - RNA, 19 nt, Artificial Sequence
  Description of Artificial Sequence: Synthetic oligonucleotide
cuacaacuacagcucugga

SEQ ID NO: 992870 - RNA, 19 nt, Artificial Sequence
  Description of Artificial Sequence: Synthetic oligonucleotide
uauccaggucguggcaaaa

SEQ ID NO: 992871 - RNA, 19 nt, Artificial Sequence
  Description of Artificial Sequence: Synthetic oligonucleotide
cguaauagccauagggcga

SEQ ID NO: 992872 - RNA, 19 nt, Artificial Sequence
  Description of Artificial Sequence: Synthetic oligonucleotide
ucgaccggggccucgccuu

SEQ ID NO: 992873 - RNA, 19 nt, Artificial Sequence
  Description of Artificial Sequence: Synthetic oligonucleotide
agacgccacacgcugccua

SEQ ID NO: 992874 - RNA, 19 nt, Artificial Sequence
  Description of Artificial Sequence: Synthetic oligonucleotide
acaaagcgugugcggucgu

SEQ ID NO: 992875 - RNA, 19 nt, Artificial Sequence
  Description of Artificial Sequence: Synthetic oligonucleotide
ggacacguguaaaauaccu

SEQ ID NO: 992876 - RNA, 19 nt, Artificial Sequence
  Description of Artificial Sequence: Synthetic oligonucleotide
cucgacugccggcguacac

SEQ ID NO: 992877 - RNA, 19 nt, Artificial Sequence
  Description of Artificial Sequence: Synthetic oligonucleotide
gccgcgaggcccuacucgc

SEQ ID NO: 992878 - RNA, 19 nt, Artificial Sequence
  Description of Artificial Sequence: Synthetic oligonucleotide
gccgaaguauucucugauc

SEQ ID NO: 992879 - RNA, 19 nt, Artificial Sequence
  Description of Artificial Sequence: Synthetic oligonucleotide
cugaucgcccucggcgccg

SEQ ID NO: 992880 - RNA, 19 nt, Artificial Sequence
  Description of Artificial Sequence: Synthetic oligonucleotide
caacuacagcucuggaaua

SEQ ID NO: 992881 - RNA, 19 nt, Artificial Sequence
  Description of Artificial Sequence: Synthetic oligonucleotide
ccucuccaaacuuaguaaa

SEQ ID NO: 992882 - RNA, 19 nt, Artificial Sequence
  Description of Artificial Sequence: Synthetic oligonucleotide
acaggguaaccugguaaua

SEQ ID NO: 992883 - RNA, 19 nt, Artificial Sequence
  Description of Artificial Sequence: Synthetic oligonucleotide
acgcugccuacaacuacag

SEQ ID NO: 992884 - RNA, 19 nt, Artificial Sequence
  Description of Artificial Sequence: Synthetic oligonucleotide
cugacaguauggaacuuuu

SEQ ID NO: 992885 - RNA, 19 nt, Artificial Sequence
  Description of Artificial Sequence: Synthetic oligonucleotide
gacacguguaaaauaccuu

SEQ ID NO: 992886 - RNA, 19 nt, Artificial Sequence
  Description of Artificial Sequence: Synthetic oligonucleotide
gaugagaccucagcuccgu

SEQ ID NO: 992887 - RNA, 19 nt, Artificial Sequence
  Description of Artificial Sequence: Synthetic oligonucleotide
gcggucgucagucggccgc

SEQ ID NO: 992888 - RNA, 19 nt, Artificial Sequence
  Description of Artificial Sequence: Synthetic oligonucleotide
gggucaauaacacgaccgu

SEQ ID NO: 992889 - RNA, 19 nt, Artificial Sequence
  Description of Artificial Sequence: Synthetic oligonucleotide
agcuccgucccgcgcggug

SEQ ID NO: 992890 - RNA, 19 nt, Artificial Sequence
  Description of Artificial Sequence: Synthetic oligonucleotide
gggccguagccguaauagc

SEQ ID NO: 992891 - RNA, 19 nt, Artificial Sequence
  Description of Artificial Sequence: Synthetic oligonucleotide
cgcgcugacacccgcaccc

SEQ ID NO: 992892 - RNA, 19 nt, Artificial Sequence
  Description of Artificial Sequence: Synthetic oligonucleotide
cgcguccaaacaaagcgug

SEQ ID NO: 992893 - RNA, 19 nt, Artificial Sequence
  Description of Artificial Sequence: Synthetic oligonucleotide
cuacccugacuguagucgu

SEQ ID NO: 992894 - RNA, 19 nt, Artificial Sequence
  Description of Artificial Sequence: Synthetic oligonucleotide
cagacccuccaaucuagua

SEQ ID NO: 992895 - RNA, 19 nt, Artificial Sequence
  Description of Artificial Sequence: Synthetic oligonucleotide
ggcguugaucugaucgccc

SEQ ID NO: 992896 - RNA, 19 nt, Artificial Sequence
  Description of Artificial Sequence: Synthetic oligonucleotide
ugccucgguucccucgauu

SEQ ID NO: 992897 - RNA, 19 nt, Artificial Sequence
  Description of Artificial Sequence: Synthetic oligonucleotide
gucgcucggcucgacugcc

SEQ ID NO: 992898 - RNA, 19 nt, Artificial Sequence
  Description of Artificial Sequence: Synthetic oligonucleotide
acucgccgcggaaggcgcc

SEQ ID NO: 992899 - RNA, 19 nt, Artificial Sequence
  Description of Artificial Sequence: Synthetic oligonucleotide
cucgccgcggaaggcgccg

SEQ ID NO: 992900 - RNA, 19 nt, Artificial Sequence
  Description of Artificial Sequence: Synthetic oligonucleotide
gcguccaccgacggugucg

SEQ ID NO: 992901 - RNA, 19 nt, Artificial Sequence
  Description of Artificial Sequence: Synthetic oligonucleotide
gugcggucgucagucggcc

SEQ ID NO: 992902 - RNA, 19 nt, Artificial Sequence
  Description of Artificial Sequence: Synthetic oligonucleotide
ucggcucgacugccggcgu

SEQ ID NO: 992903 - RNA, 19 nt, Artificial Sequence
  Description of Artificial Sequence: Synthetic oligonucleotide
caaagcgugugcggucguc

SEQ ID NO: 992904 - RNA, 19 nt, Artificial Sequence
  Description of Artificial Sequence: Synthetic oligonucleotide
ggcguacacaggccaaaga

SEQ ID NO: 992905 - RNA, 19 nt, Artificial Sequence
  Description of Artificial Sequence: Synthetic oligonucleotide
ugauggccaccgcgucgcu

SEQ ID NO: 992906 - RNA, 19 nt, Artificial Sequence
  Description of Artificial Sequence: Synthetic oligonucleotide
gccaaagaugagaccucag

SEQ ID NO: 992907 - RNA, 19 nt, Artificial Sequence
  Description of Artificial Sequence: Synthetic oligonucleotide
gacugccggcguacacagg

SEQ ID NO: 992908 - RNA, 19 nt, Artificial Sequence
  Description of Artificial Sequence: Synthetic oligonucleotide
gccguagccguaauagcca

SEQ ID NO: 992909 - RNA, 19 nt, Artificial Sequence
  Description of Artificial Sequence: Synthetic oligonucleotide
ccucgauugcgguuuccuc

SEQ ID NO: 992910 - RNA, 19 nt, Artificial Sequence
  Description of Artificial Sequence: Synthetic oligonucleotide
gucgcuggcucuucccgua

SEQ ID NO: 992911 - RNA, 19 nt, Artificial Sequence
  Description of Artificial Sequence: Synthetic oligonucleotide
ccgccgaugacgccgcgag

SEQ ID NO: 992912 - RNA, 19 nt, Artificial Sequence
  Description of Artificial Sequence: Synthetic oligonucleotide
cccacacucacccaggcgu

SEQ ID NO: 992913 - RNA, 19 nt, Artificial Sequence
  Description of Artificial Sequence: Synthetic oligonucleotide
cgacugccggcguacacag

SEQ ID NO: 992914 - RNA, 19 nt, Artificial Sequence
  Description of Artificial Sequence: Synthetic oligonucleotide
ggacaggccauaaaaguuu

SEQ ID NO: 992915 - RNA, 19 nt, Artificial Sequence
  Description of Artificial Sequence: Synthetic oligonucleotide
uccugccgccucucaguau

SEQ ID NO: 992916 - RNA, 19 nt, Artificial Sequence
  Description of Artificial Sequence: Synthetic oligonucleotide
cucagccgcguccgacaug

SEQ ID NO: 992917 - RNA, 19 nt, Artificial Sequence
  Description of Artificial Sequence: Synthetic oligonucleotide
gucggccaggccgcagcgg

SEQ ID NO: 992918 - RNA, 19 nt, Artificial Sequence
  Description of Artificial Sequence: Synthetic oligonucleotide
agccguagcccugguucca

SEQ ID NO: 992919 - RNA, 19 nt, Artificial Sequence
  Description of Artificial Sequence: Synthetic oligonucleotide
gaguagucguagccgccau

SEQ ID NO: 992920 - RNA, 19 nt, Artificial Sequence
  Description of Artificial Sequence: Synthetic oligonucleotide
gacgccgcgaggcccuacu

SEQ ID NO: 992921 - RNA, 19 nt, Artificial Sequence
  Description of Artificial Sequence: Synthetic oligonucleotide
gggacaggccauaaaaguu

SEQ ID NO: 992922 - RNA, 19 nt, Artificial Sequence
  Description of Artificial Sequence: Synthetic oligonucleotide
ugaucgcccucggcgccgu

SEQ ID NO: 992923 - RNA, 19 nt, Artificial Sequence
  Description of Artificial Sequence: Synthetic oligonucleotide
gccaccgcgucgcuggcuc

SEQ ID NO: 992924 - RNA, 19 nt, Artificial Sequence
  Description of Artificial Sequence: Synthetic oligonucleotide
ggccgaaguauucucugau

SEQ ID NO: 992925 - RNA, 19 nt, Artificial Sequence
  Description of Artificial Sequence: Synthetic oligonucleotide
gcguugaucugaucgcccu

SEQ ID NO: 992926 - RNA, 19 nt, Artificial Sequence
  Description of Artificial Sequence: Synthetic oligonucleotide
auggucggccaggccgcag

SEQ ID NO: 992927 - RNA, 19 nt, Artificial Sequence
  Description of Artificial Sequence: Synthetic oligonucleotide
gccguucugguucccgcuc

SEQ ID NO: 992928 - RNA, 19 nt, Artificial Sequence
  Description of Artificial Sequence: Synthetic oligonucleotide
ggggccggugccccggcgc

SEQ ID NO: 992929 - RNA, 19 nt, Artificial Sequence
  Description of Artificial Sequence: Synthetic oligonucleotide
ggcucgacugccggcguac

SEQ ID NO: 992930 - RNA, 19 nt, Artificial Sequence
  Description of Artificial Sequence: Synthetic oligonucleotide
ccgacauggucggccaggc

SEQ ID NO: 992931 - RNA, 19 nt, Artificial Sequence
  Description of Artificial Sequence: Synthetic oligonucleotide
cacuuccauuacuggaaau

SEQ ID NO: 992932 - RNA, 19 nt, Artificial Sequence
  Description of Artificial Sequence: Synthetic oligonucleotide
caccgacggugucgcucgg

SEQ ID NO: 992933 - RNA, 19 nt, Artificial Sequence
  Description of Artificial Sequence: Synthetic oligonucleotide
gccgcgcugacacccgcac

SEQ ID NO: 992934 - RNA, 19 nt, Artificial Sequence
  Description of Artificial Sequence: Synthetic oligonucleotide
gcccuacucgccgcggaag

SEQ ID NO: 992935 - RNA, 19 nt, Artificial Sequence
  Description of Artificial Sequence: Synthetic oligonucleotide
ccgucgucuccaugggcug

SEQ ID NO: 992936 - RNA, 19 nt, Artificial Sequence
  Description of Artificial Sequence: Synthetic oligonucleotide
gcgaggcccuacucgccgc

SEQ ID NO: 992937 - RNA, 19 nt, Artificial Sequence
  Description of Artificial Sequence: Synthetic oligonucleotide
cgccgcgaggcccuacucg

SEQ ID NO: 992938 - RNA, 19 nt, Artificial Sequence
  Description of Artificial Sequence: Synthetic oligonucleotide
caguguugggauccauuuu

SEQ ID NO: 992939 - RNA, 19 nt, Artificial Sequence
  Description of Artificial Sequence: Synthetic oligonucleotide
cgccucucaguauggcuug

SEQ ID NO: 992940 - RNA, 19 nt, Artificial Sequence
  Description of Artificial Sequence: Synthetic oligonucleotide
gccguagcccugguuccag

SEQ ID NO: 992941 - RNA, 19 nt, Artificial Sequence
  Description of Artificial Sequence: Synthetic oligonucleotide
cccgucgucuccaugggcu

SEQ ID NO: 992942 - RNA, 19 nt, Artificial Sequence
  Description of Artificial Sequence: Synthetic oligonucleotide
ccguagcccugauuccaac

SEQ ID NO: 992943 - RNA, 19 nt, Artificial Sequence
  Description of Artificial Sequence: Synthetic oligonucleotide
cgugugcggucgucagucg

SEQ ID NO: 992944 - RNA, 19 nt, Artificial Sequence
  Description of Artificial Sequence: Synthetic oligonucleotide
gcccgucgucuccaugggc

SEQ ID NO: 992945 - RNA, 19 nt, Artificial Sequence
  Description of Artificial Sequence: Synthetic oligonucleotide
ccgcugacaguauggaacu

SEQ ID NO: 992946 - RNA, 19 nt, Artificial Sequence
  Description of Artificial Sequence: Synthetic oligonucleotide
acacgaccguccagccugu

SEQ ID NO: 992947 - RNA, 19 nt, Artificial Sequence
  Description of Artificial Sequence: Synthetic oligonucleotide
guggcgcccgucgucucca

SEQ ID NO: 992948 - RNA, 19 nt, Artificial Sequence
  Description of Artificial Sequence: Synthetic oligonucleotide
gcuuggccgcgcugacacc

SEQ ID NO: 992949 - RNA, 19 nt, Artificial Sequence
  Description of Artificial Sequence: Synthetic oligonucleotide
ccagacgcggccggggcug

SEQ ID NO: 992950 - RNA, 19 nt, Artificial Sequence
  Description of Artificial Sequence: Synthetic oligonucleotide
ggggucgccguggucccgc

SEQ ID NO: 992951 - RNA, 19 nt, Artificial Sequence
  Description of Artificial Sequence: Synthetic oligonucleotide
cagacgcggccggggcugc

SEQ ID NO: 992952 - RNA, 19 nt, Artificial Sequence
  Description of Artificial Sequence: Synthetic oligonucleotide
ugacgccgcgaggcccuac

SEQ ID NO: 992953 - RNA, 19 nt, Artificial Sequence
  Description of Artificial Sequence: Synthetic oligonucleotide
gguucccucgauugcgguu

SEQ ID NO: 992954 - RNA, 19 nt, Artificial Sequence
  Description of Artificial Sequence: Synthetic oligonucleotide
ggucgccguggucccgccc

SEQ ID NO: 992955 - RNA, 19 nt, Artificial Sequence
  Description of Artificial Sequence: Synthetic oligonucleotide
cgcgucgcuggcucuuccc

SEQ ID NO: 992956 - RNA, 19 nt, Artificial Sequence
  Description of Artificial Sequence: Synthetic oligonucleotide
ccgcgaggcccuacucgcc

SEQ ID NO: 992957 - RNA, 19 nt, Artificial Sequence
  Description of Artificial Sequence: Synthetic oligonucleotide
cucgaccggggccucgccu

SEQ ID NO: 992958 - RNA, 19 nt, Artificial Sequence
  Description of Artificial Sequence: Synthetic oligonucleotide
ggcccuacucgccgcggaa

SEQ ID NO: 992959 - RNA, 19 nt, Artificial Sequence
  Description of Artificial Sequence: Synthetic oligonucleotide
cgaguagucguagccgcca

SEQ ID NO: 992960 - RNA, 19 nt, Artificial Sequence
  Description of Artificial Sequence: Synthetic oligonucleotide
ccgcguccaaacaaagcgu

SEQ ID NO: 992961 - RNA, 19 nt, Artificial Sequence
  Description of Artificial Sequence: Synthetic oligonucleotide
gcucgaccggggccucgcc

SEQ ID NO: 992962 - RNA, 19 nt, Artificial Sequence
  Description of Artificial Sequence: Synthetic oligonucleotide
ccgcgcugacacccgcacc

SEQ ID NO: 992963 - RNA, 19 nt, Artificial Sequence
  Description of Artificial Sequence: Synthetic oligonucleotide
cgcccgucgucuccauggg

SEQ ID NO: 992964 - RNA, 19 nt, Artificial Sequence
  Description of Artificial Sequence: Synthetic oligonucleotide
cauggucggccaggccgca

SEQ ID NO: 992965 - RNA, 19 nt, Artificial Sequence
  Description of Artificial Sequence: Synthetic oligonucleotide
cacgaccguccagccugug

SEQ ID NO: 992966 - RNA, 19 nt, Artificial Sequence
  Description of Artificial Sequence: Synthetic oligonucleotide
gcgcugacacccgcacccc

SEQ ID NO: 992967 - RNA, 19 nt, Artificial Sequence
  Description of Artificial Sequence: Synthetic oligonucleotide
cggcguacacaggccaaag

SEQ ID NO: 992968 - RNA, 19 nt, Artificial Sequence
  Description of Artificial Sequence: Synthetic oligonucleotide
ccgccucucaguauggcuu

SEQ ID NO: 992969 - RNA, 19 nt, Artificial Sequence
  Description of Artificial Sequence: Synthetic oligonucleotide
gggcaaggucucacagaga

SEQ ID NO: 992970 - RNA, 19 nt, Artificial Sequence
  Description of Artificial Sequence: Synthetic oligonucleotide
gggucgccguggucccgcc

SEQ ID NO: 992971 - RNA, 19 nt, Artificial Sequence
  Description of Artificial Sequence: Synthetic oligonucleotide
gcguccaaacaaagcgugu

SEQ ID NO: 992972 - RNA, 19 nt, Artificial Sequence
  Description of Artificial Sequence: Synthetic oligonucleotide
ccucguguccguucucagu

SEQ ID NO: 992973 - RNA, 19 nt, Artificial Sequence
  Description of Artificial Sequence: Synthetic oligonucleotide
gguagccguagcccugguu

SEQ ID NO: 992974 - RNA, 19 nt, Artificial Sequence
  Description of Artificial Sequence: Synthetic oligonucleotide
cccgucuuuuguucaacuu

SEQ ID NO: 992975 - RNA, 19 nt, Artificial Sequence
  Description of Artificial Sequence: Synthetic oligonucleotide
ccgcgucgcuggcucuucc

SEQ ID NO: 992976 - RNA, 19 nt, Artificial Sequence
  Description of Artificial Sequence: Synthetic oligonucleotide
ccgggagcucguccgcguc

SEQ ID NO: 992977 - RNA, 19 nt, Artificial Sequence
  Description of Artificial Sequence: Synthetic oligonucleotide
cgucagucggccgcuccug

SEQ ID NO: 992978 - RNA, 19 nt, Artificial Sequence
  Description of Artificial Sequence: Synthetic oligonucleotide
ccccgucuuuuguucaacu

SEQ ID NO: 992979 - RNA, 19 nt, Artificial Sequence
  Description of Artificial Sequence: Synthetic oligonucleotide
cgacggugucgcucggcuc

SEQ ID NO: 992980 - RNA, 19 nt, Artificial Sequence
  Description of Artificial Sequence: Synthetic oligonucleotide
ccgacggugucgcucggcu

SEQ ID NO: 992981 - RNA, 19 nt, Artificial Sequence
  Description of Artificial Sequence: Synthetic oligonucleotide
gccggcguacacaggccaa

SEQ ID NO: 992982 - RNA, 19 nt, Artificial Sequence
  Description of Artificial Sequence: Synthetic oligonucleotide
gcucgacugccggcguaca

SEQ ID NO: 992983 - RNA, 19 nt, Artificial Sequence
  Description of Artificial Sequence: Synthetic oligonucleotide
ccguagccguaauagccau

SEQ ID NO: 992984 - RNA, 19 nt, Artificial Sequence
  Description of Artificial Sequence: Synthetic oligonucleotide
ggcccguagcccugcuggu

SEQ ID NO: 992985 - RNA, 19 nt, Artificial Sequence
  Description of Artificial Sequence: Synthetic oligonucleotide
cgauugcgguuuccucguc

SEQ ID NO: 992986 - RNA, 19 nt, Artificial Sequence
  Description of Artificial Sequence: Synthetic oligonucleotide
cccucgauugcgguuuccu

SEQ ID NO: 992987 - RNA, 19 nt, Artificial Sequence
  Description of Artificial Sequence: Synthetic oligonucleotide
cgaccguccagccuguguu

SEQ ID NO: 992988 - RNA, 19 nt, Artificial Sequence
  Description of Artificial Sequence: Synthetic oligonucleotide
gccgccgaugacgccgcga

SEQ ID NO: 992989 - RNA, 19 nt, Artificial Sequence
  Description of Artificial Sequence: Synthetic oligonucleotide
cguagccguaauagccaua

SEQ ID NO: 992990 - RNA, 19 nt, Artificial Sequence
  Description of Artificial Sequence: Synthetic oligonucleotide
gccggggccguagccguaa

SEQ ID NO: 992991 - RNA, 19 nt, Artificial Sequence
  Description of Artificial Sequence: Synthetic oligonucleotide
ccggcguacacaggccaaa

SEQ ID NO: 992992 - RNA, 19 nt, Artificial Sequence
  Description of Artificial Sequence: Synthetic oligonucleotide
ccacgaccucuccaaacuu

SEQ ID NO: 992993 - RNA, 19 nt, Artificial Sequence
  Description of Artificial Sequence: Synthetic oligonucleotide
guccaccgacggugucgcu

SEQ ID NO: 992994 - RNA, 19 nt, Artificial Sequence
  Description of Artificial Sequence: Synthetic oligonucleotide
cgaccggggccucgccuuc

SEQ ID NO: 992995 - RNA, 19 nt, Artificial Sequence
  Description of Artificial Sequence: Synthetic oligonucleotide
cgucgcuggcucuucccgu

SEQ ID NO: 992996 - RNA, 19 nt, Artificial Sequence
  Description of Artificial Sequence: Synthetic oligonucleotide
caccgcgucgcuggcucuu

SEQ ID NO: 992997 - RNA, 19 nt, Artificial Sequence
  Description of Artificial Sequence: Synthetic oligonucleotide
cggcuccucgccgccgaug

SEQ ID NO: 992998 - RNA, 19 nt, Artificial Sequence
  Description of Artificial Sequence: Synthetic oligonucleotide
cgcguccgacauggucggc

SEQ ID NO: 992999 - RNA, 19 nt, Artificial Sequence
  Description of Artificial Sequence: Synthetic oligonucleotide
ccgcguccaccgacggugu

SEQ ID NO: 993000 - RNA, 19 nt, Artificial Sequence
  Description of Artificial Sequence: Synthetic oligonucleotide
cggggccguagccguaaua

SEQ ID NO: 993001 - RNA, 19 nt, Artificial Sequence
  Description of Artificial Sequence: Synthetic oligonucleotide
ccaccgcgucgcuggcucu

SEQ ID NO: 993002 - RNA, 19 nt, Artificial Sequence
  Description of Artificial Sequence: Synthetic oligonucleotide
cagcuccgucccgcgcggu

SEQ ID NO: 993003 - RNA, 19 nt, Artificial Sequence
  Description of Artificial Sequence: Synthetic oligonucleotide
cguccagccuguguuccuu

SEQ ID NO: 993004 - RNA, 19 nt, Artificial Sequence
  Description of Artificial Sequence: Synthetic oligonucleotide
cguucucaguggcgcccgu

SEQ ID NO: 993005 - RNA, 19 nt, Artificial Sequence
  Description of Artificial Sequence: Synthetic oligonucleotide
cggucgucagucggccgcu

SEQ ID NO: 993006 - RNA, 19 nt, Artificial Sequence
  Description of Artificial Sequence: Synthetic oligonucleotide
ccggggccguagccguaau

SEQ ID NO: 993007 - RNA, 19 nt, Artificial Sequence
  Description of Artificial Sequence: Synthetic oligonucleotide
gggcggccucguguccguu

SEQ ID NO: 993008 - RNA, 19 nt, Artificial Sequence
  Description of Artificial Sequence: Synthetic oligonucleotide
aaauauuuugacuagccac

SEQ ID NO: 993009 - RNA, 19 nt, Artificial Sequence
  Description of Artificial Sequence: Synthetic oligonucleotide
aacuuuaaugcccaaaccc

SEQ ID NO: 993010 - RNA, 19 nt, Artificial Sequence
  Description of Artificial Sequence: Synthetic oligonucleotide
aauaugccaauccucuagc

SEQ ID NO: 993011 - RNA, 19 nt, Artificial Sequence
  Description of Artificial Sequence: Synthetic oligonucleotide
ugucuauacacccaaaaug

SEQ ID NO: 993012 - RNA, 19 nt, Artificial Sequence
  Description of Artificial Sequence: Synthetic oligonucleotide
aauaggguggcuuuggugu

SEQ ID NO: 993013 - RNA, 19 nt, Artificial Sequence
  Description of Artificial Sequence: Synthetic oligonucleotide
aagauguuguaauagggug

SEQ ID NO: 993014 - RNA, 19 nt, Artificial Sequence
  Description of Artificial Sequence: Synthetic oligonucleotide
uguauuggaaauauuuuga

SEQ ID NO: 993015 - RNA, 19 nt, Artificial Sequence
  Description of Artificial Sequence: Synthetic oligonucleotide
aacauauacucaucuacag

SEQ ID NO: 993016 - RNA, 19 nt, Artificial Sequence
  Description of Artificial Sequence: Synthetic oligonucleotide
ucuaucguuucacagagca

SEQ ID NO: 993017 - RNA, 19 nt, Artificial Sequence
  Description of Artificial Sequence: Synthetic oligonucleotide
uugaguaggaacaaguacu

SEQ ID NO: 993018 - RNA, 19 nt, Artificial Sequence
  Description of Artificial Sequence: Synthetic oligonucleotide
auagacuagauucuuuggg

SEQ ID NO: 993019 - RNA, 19 nt, Artificial Sequence
  Description of Artificial Sequence: Synthetic oligonucleotide
gauauugcaggcuuguggc

SEQ ID NO: 993020 - RNA, 19 nt, Artificial Sequence
  Description of Artificial Sequence: Synthetic oligonucleotide
aauggcaacauauacucau

SEQ ID NO: 993021 - RNA, 19 nt, Artificial Sequence
  Description of Artificial Sequence: Synthetic oligonucleotide
uucaaaccuagcaaugggg

SEQ ID NO: 993022 - RNA, 19 nt, Artificial Sequence
  Description of Artificial Sequence: Synthetic oligonucleotide
aguguguaaagauggugcc

SEQ ID NO: 993023 - RNA, 19 nt, Artificial Sequence
  Description of Artificial Sequence: Synthetic oligonucleotide
agauauugcaggcuugugg

SEQ ID NO: 993024 - RNA, 19 nt, Artificial Sequence
  Description of Artificial Sequence: Synthetic oligonucleotide
cugcaaucaacauaagugg

SEQ ID NO: 993025 - RNA, 19 nt, Artificial Sequence
  Description of Artificial Sequence: Synthetic oligonucleotide
uacauaucuauccucaaaa

SEQ ID NO: 993026 - RNA, 19 nt, Artificial Sequence
  Description of Artificial Sequence: Synthetic oligonucleotide
uuccagguaaacuauagac

SEQ ID NO: 993027 - RNA, 19 nt, Artificial Sequence
  Description of Artificial Sequence: Synthetic oligonucleotide
gauuagugucuucugacag

SEQ ID NO: 993028 - RNA, 19 nt, Artificial Sequence
  Description of Artificial Sequence: Synthetic oligonucleotide
uccugcauaucuucaagcg

SEQ ID NO: 993029 - RNA, 19 nt, Artificial Sequence
  Description of Artificial Sequence: Synthetic oligonucleotide
uuaaugcccaaacccaaag

SEQ ID NO: 993030 - RNA, 19 nt, Artificial Sequence
  Description of Artificial Sequence: Synthetic oligonucleotide
uuuauagcgcccucuaaca

SEQ ID NO: 993031 - RNA, 19 nt, Artificial Sequence
  Description of Artificial Sequence: Synthetic oligonucleotide
acauauugcccucacagca

SEQ ID NO: 993032 - RNA, 19 nt, Artificial Sequence
  Description of Artificial Sequence: Synthetic oligonucleotide
ucaaaccuagcaaugggga

SEQ ID NO: 993033 - RNA, 19 nt, Artificial Sequence
  Description of Artificial Sequence: Synthetic oligonucleotide
gucuauacacccaaaaugc

SEQ ID NO: 993034 - RNA, 19 nt, Artificial Sequence
  Description of Artificial Sequence: Synthetic oligonucleotide
aagucagcaaugcaagcug

SEQ ID NO: 993035 - RNA, 19 nt, Artificial Sequence
  Description of Artificial Sequence: Synthetic oligonucleotide
caugcguuccacaaggggc

SEQ ID NO: 993036 - RNA, 19 nt, Artificial Sequence
  Description of Artificial Sequence: Synthetic oligonucleotide
uugacuagccacauauuca

SEQ ID NO: 993037 - RNA, 19 nt, Artificial Sequence
  Description of Artificial Sequence: Synthetic oligonucleotide
ugaguaggaacaaguacug

SEQ ID NO: 993038 - RNA, 19 nt, Artificial Sequence
  Description of Artificial Sequence: Synthetic oligonucleotide
uuaaggauuagugucuucu

SEQ ID NO: 993039 - RNA, 19 nt, Artificial Sequence
  Description of Artificial Sequence: Synthetic oligonucleotide
uccucaaauggcaacauau

SEQ ID NO: 993040 - RNA, 19 nt, Artificial Sequence
  Description of Artificial Sequence: Synthetic oligonucleotide
agcaguacaacgagaagcc

SEQ ID NO: 993041 - RNA, 19 nt, Artificial Sequence
  Description of Artificial Sequence: Synthetic oligonucleotide
aaaccuagcaauggggaag

SEQ ID NO: 993042 - RNA, 19 nt, Artificial Sequence
  Description of Artificial Sequence: Synthetic oligonucleotide
cuucuaucguuucacagag

SEQ ID NO: 993043 - RNA, 19 nt, Artificial Sequence
  Description of Artificial Sequence: Synthetic oligonucleotide
cucaaauggcaacauauac

SEQ ID NO: 993044 - RNA, 19 nt, Artificial Sequence
  Description of Artificial Sequence: Synthetic oligonucleotide
augcacaaaugacaauccc

SEQ ID NO: 993045 - RNA, 19 nt, Artificial Sequence
  Description of Artificial Sequence: Synthetic oligonucleotide
aguucauuccaagagacca

SEQ ID NO: 993046 - RNA, 19 nt, Artificial Sequence
  Description of Artificial Sequence: Synthetic oligonucleotide
agugucuucugacagacau

SEQ ID NO: 993047 - RNA, 19 nt, Artificial Sequence
  Description of Artificial Sequence: Synthetic oligonucleotide
cuauacacccaaaaugcac

SEQ ID NO: 993048 - RNA, 19 nt, Artificial Sequence
  Description of Artificial Sequence: Synthetic oligonucleotide
gaaauauuuugacuagcca

SEQ ID NO: 993049 - RNA, 19 nt, Artificial Sequence
  Description of Artificial Sequence: Synthetic oligonucleotide
aauagcaguaguucauuua

SEQ ID NO: 993050 - RNA, 19 nt, Artificial Sequence
  Description of Artificial Sequence: Synthetic oligonucleotide
auaugccaauccucuagcc

SEQ ID NO: 993051 - RNA, 19 nt, Artificial Sequence
  Description of Artificial Sequence: Synthetic oligonucleotide
cuguaguauguucucaugc

SEQ ID NO: 993052 - RNA, 19 nt, Artificial Sequence
  Description of Artificial Sequence: Synthetic oligonucleotide
uaagccagguauaucuuca

SEQ ID NO: 993053 - RNA, 19 nt, Artificial Sequence
  Description of Artificial Sequence: Synthetic oligonucleotide
auuccaagagaccacauua

SEQ ID NO: 993054 - RNA, 19 nt, Artificial Sequence
  Description of Artificial Sequence: Synthetic oligonucleotide
aaacuauagacuucauauu

SEQ ID NO: 993055 - RNA, 19 nt, Artificial Sequence
  Description of Artificial Sequence: Synthetic oligonucleotide
uauaccuccgaguaccaac

SEQ ID NO: 993056 - RNA, 19 nt, Artificial Sequence
  Description of Artificial Sequence: Synthetic oligonucleotide
uguaauaggguggcuuugg

SEQ ID NO: 993057 - RNA, 19 nt, Artificial Sequence
  Description of Artificial Sequence: Synthetic oligonucleotide
guuuauagcgcccucuaac

SEQ ID NO: 993058 - RNA, 19 nt, Artificial Sequence
  Description of Artificial Sequence: Synthetic oligonucleotide
agccaugcguuccacaagg

SEQ ID NO: 993059 - RNA, 19 nt, Artificial Sequence
  Description of Artificial Sequence: Synthetic oligonucleotide
gacuagauucuuuggggag

SEQ ID NO: 993060 - RNA, 19 nt, Artificial Sequence
  Description of Artificial Sequence: Synthetic oligonucleotide
ccuuuggaaguuuauagcg

SEQ ID NO: 993061 - RNA, 19 nt, Artificial Sequence
  Description of Artificial Sequence: Synthetic oligonucleotide
cuugcuuucacuucuaaua

SEQ ID NO: 993062 - RNA, 19 nt, Artificial Sequence
  Description of Artificial Sequence: Synthetic oligonucleotide
auugugaccacuguuacaa

SEQ ID NO: 993063 - RNA, 19 nt, Artificial Sequence
  Description of Artificial Sequence: Synthetic oligonucleotide
uguguaaagauggugccac

SEQ ID NO: 993064 - RNA, 19 nt, Artificial Sequence
  Description of Artificial Sequence: Synthetic oligonucleotide
cauccagcugauaaccugg

SEQ ID NO: 993065 - RNA, 19 nt, Artificial Sequence
  Description of Artificial Sequence: Synthetic oligonucleotide
acaggacuaaucccauggc

SEQ ID NO: 993066 - RNA, 19 nt, Artificial Sequence
  Description of Artificial Sequence: Synthetic oligonucleotide
uccggaaaauaagagaacu

SEQ ID NO: 993067 - RNA, 19 nt, Artificial Sequence
  Description of Artificial Sequence: Synthetic oligonucleotide
auauugcaggcuuguggcc

SEQ ID NO: 993068 - RNA, 19 nt, Artificial Sequence
  Description of Artificial Sequence: Synthetic oligonucleotide
  modified_base (15)..(15): a, c, u, g, unknown or other
acacacaaccaaaunuucc

SEQ ID NO: 993069 - RNA, 19 nt, Artificial Sequence
  Description of Artificial Sequence: Synthetic oligonucleotide
gguguaacaggauuugaag

SEQ ID NO: 993070 - RNA, 19 nt, Artificial Sequence
  Description of Artificial Sequence: Synthetic oligonucleotide
ugcaccaaugaacuguagu

SEQ ID NO: 993071 - RNA, 19 nt, Artificial Sequence
  Description of Artificial Sequence: Synthetic oligonucleotide
aaucugaugucaguuuuca

SEQ ID NO: 993072 - RNA, 19 nt, Artificial Sequence
  Description of Artificial Sequence: Synthetic oligonucleotide
caguacaacgagaagccag

SEQ ID NO: 993073 - RNA, 19 nt, Artificial Sequence
  Description of Artificial Sequence: Synthetic oligonucleotide
cauuugucaccauugugac

SEQ ID NO: 993074 - RNA, 19 nt, Artificial Sequence
  Description of Artificial Sequence: Synthetic oligonucleotide
aaccuagcaauggggaagg

SEQ ID NO: 993075 - RNA, 19 nt, Artificial Sequence
  Description of Artificial Sequence: Synthetic oligonucleotide
agucccaauucucagugug

SEQ ID NO: 993076 - RNA, 19 nt, Artificial Sequence
  Description of Artificial Sequence: Synthetic oligonucleotide
uucugcaauaugacaaagu

SEQ ID NO: 993077 - RNA, 19 nt, Artificial Sequence
  Description of Artificial Sequence: Synthetic oligonucleotide
aguaccaaccuguccauga

SEQ ID NO: 993078 - RNA, 19 nt, Artificial Sequence
  Description of Artificial Sequence: Synthetic oligonucleotide
acuagauucuuuggggagg

SEQ ID NO: 993079 - RNA, 19 nt, Artificial Sequence
  Description of Artificial Sequence: Synthetic oligonucleotide
uaauaggguggcuuuggug

SEQ ID NO: 993080 - RNA, 19 nt, Artificial Sequence
  Description of Artificial Sequence: Synthetic oligonucleotide
auaagugguaccaaggaau

SEQ ID NO: 993081 - RNA, 19 nt, Artificial Sequence
  Description of Artificial Sequence: Synthetic oligonucleotide
cuucguguacauuucucag

SEQ ID NO: 993082 - RNA, 19 nt, Artificial Sequence
  Description of Artificial Sequence: Synthetic oligonucleotide
ugguguaacaggauuugaa

SEQ ID NO: 993083 - RNA, 19 nt, Artificial Sequence
  Description of Artificial Sequence: Synthetic oligonucleotide
uguuacaauguccucugua

SEQ ID NO: 993084 - RNA, 19 nt, Artificial Sequence
  Description of Artificial Sequence: Synthetic oligonucleotide
ucuugaguaggaacaagua

SEQ ID NO: 993085 - RNA, 19 nt, Artificial Sequence
  Description of Artificial Sequence: Synthetic oligonucleotide
ggaagucugacagugaacc

SEQ ID NO: 993086 - RNA, 19 nt, Artificial Sequence
  Description of Artificial Sequence: Synthetic oligonucleotide
aucuccggaaaauaagaga

SEQ ID NO: 993087 - RNA, 19 nt, Artificial Sequence
  Description of Artificial Sequence: Synthetic oligonucleotide
caggacuaaucccauggcg

SEQ ID NO: 993088 - RNA, 19 nt, Artificial Sequence
  Description of Artificial Sequence: Synthetic oligonucleotide
uggcaacauauacucaucu

SEQ ID NO: 993089 - RNA, 19 nt, Artificial Sequence
  Description of Artificial Sequence: Synthetic oligonucleotide
auaccuccgaguaccaacc

SEQ ID NO: 993090 - RNA, 19 nt, Artificial Sequence
  Description of Artificial Sequence: Synthetic oligonucleotide
gaugucuauacacccaaaa

SEQ ID NO: 993091 - RNA, 19 nt, Artificial Sequence
  Description of Artificial Sequence: Synthetic oligonucleotide
ucguguacauuucucaguu

SEQ ID NO: 993092 - RNA, 19 nt, Artificial Sequence
  Description of Artificial Sequence: Synthetic oligonucleotide
agacuagauucuuugggga

SEQ ID NO: 993093 - RNA, 19 nt, Artificial Sequence
  Description of Artificial Sequence: Synthetic oligonucleotide
uuauagcgcccucuaacac

SEQ ID NO: 993094 - RNA, 19 nt, Artificial Sequence
  Description of Artificial Sequence: Synthetic oligonucleotide
uaagugguaccaaggaaua

SEQ ID NO: 993095 - RNA, 19 nt, Artificial Sequence
  Description of Artificial Sequence: Synthetic oligonucleotide
acuaagcaguuuccuuagc

SEQ ID NO: 993096 - RNA, 19 nt, Artificial Sequence
  Description of Artificial Sequence: Synthetic oligonucleotide
ugucauccagccaacuaac

SEQ ID NO: 993097 - RNA, 19 nt, Artificial Sequence
  Description of Artificial Sequence: Synthetic oligonucleotide
uggaaauauuuugacuagc

SEQ ID NO: 993098 - RNA, 19 nt, Artificial Sequence
  Description of Artificial Sequence: Synthetic oligonucleotide
augacaaucccugcaauca

SEQ ID NO: 993099 - RNA, 19 nt, Artificial Sequence
  Description of Artificial Sequence: Synthetic oligonucleotide
caucuccggaaaauaagag

SEQ ID NO: 993100 - RNA, 19 nt, Artificial Sequence
  Description of Artificial Sequence: Synthetic oligonucleotide
uucaagcgauggaugcugg

SEQ ID NO: 993101 - RNA, 19 nt, Artificial Sequence
  Description of Artificial Sequence: Synthetic oligonucleotide
uuaagccagguauaucuuc

SEQ ID NO: 993102 - RNA, 19 nt, Artificial Sequence
  Description of Artificial Sequence: Synthetic oligonucleotide
augucuauacacccaaaau

SEQ ID NO: 993103 - RNA, 19 nt, Artificial Sequence
  Description of Artificial Sequence: Synthetic oligonucleotide
uccaugaguaucaccugca

SEQ ID NO: 993104 - RNA, 19 nt, Artificial Sequence
  Description of Artificial Sequence: Synthetic oligonucleotide
uuagcuuagcagcuccagu

SEQ ID NO: 993105 - RNA, 19 nt, Artificial Sequence
  Description of Artificial Sequence: Synthetic oligonucleotide
aucucuuaaaacaggccuc

SEQ ID NO: 993106 - RNA, 19 nt, Artificial Sequence
  Description of Artificial Sequence: Synthetic oligonucleotide
uuucugcaauaugacaaag

SEQ ID NO: 993107 - RNA, 19 nt, Artificial Sequence
  Description of Artificial Sequence: Synthetic oligonucleotide
ggaaauauuuugacuagcc

SEQ ID NO: 993108 - RNA, 19 nt, Artificial Sequence
  Description of Artificial Sequence: Synthetic oligonucleotide
uucuuacuuuugauguccc

SEQ ID NO: 993109 - RNA, 19 nt, Artificial Sequence
  Description of Artificial Sequence: Synthetic oligonucleotide
cugcaauaugacaaaguuc

SEQ ID NO: 993110 - RNA, 19 nt, Artificial Sequence
  Description of Artificial Sequence: Synthetic oligonucleotide
ugguuucugcaauaugaca

SEQ ID NO: 993111 - RNA, 19 nt, Artificial Sequence
  Description of Artificial Sequence: Synthetic oligonucleotide
cacauauugcccucacagc

SEQ ID NO: 993112 - RNA, 19 nt, Artificial Sequence
  Description of Artificial Sequence: Synthetic oligonucleotide
aguaguucauuuaaggauu

SEQ ID NO: 993113 - RNA, 19 nt, Artificial Sequence
  Description of Artificial Sequence: Synthetic oligonucleotide
cuucugacagacauuaaaa

SEQ ID NO: 993114 - RNA, 19 nt, Artificial Sequence
  Description of Artificial Sequence: Synthetic oligonucleotide
acuguaguauguucucaug

SEQ ID NO: 993115 - RNA, 19 nt, Artificial Sequence
  Description of Artificial Sequence: Synthetic oligonucleotide
ucaguccugucauagcagu

SEQ ID NO: 993116 - RNA, 19 nt, Artificial Sequence
  Description of Artificial Sequence: Synthetic oligonucleotide
gaggguaugccaucuugug

SEQ ID NO: 993117 - RNA, 19 nt, Artificial Sequence
  Description of Artificial Sequence: Synthetic oligonucleotide
acgagaagccaguucccac

SEQ ID NO: 993118 - RNA, 19 nt, Artificial Sequence
  Description of Artificial Sequence: Synthetic oligonucleotide
cagagcauugccauuccug

SEQ ID NO: 993119 - RNA, 19 nt, Artificial Sequence
  Description of Artificial Sequence: Synthetic oligonucleotide
acuaaccuuguuuuacuau

SEQ ID NO: 993120 - RNA, 19 nt, Artificial Sequence
  Description of Artificial Sequence: Synthetic oligonucleotide
uuggagagagccacauucu

SEQ ID NO: 993121 - RNA, 19 nt, Artificial Sequence
  Description of Artificial Sequence: Synthetic oligonucleotide
cagugaacccuuuucauga

SEQ ID NO: 993122 - RNA, 19 nt, Artificial Sequence
  Description of Artificial Sequence: Synthetic oligonucleotide
uguuggcauuacaauaguc

SEQ ID NO: 993123 - RNA, 19 nt, Artificial Sequence
  Description of Artificial Sequence: Synthetic oligonucleotide
agcaacugggcuuuccaca

SEQ ID NO: 993124 - RNA, 19 nt, Artificial Sequence
  Description of Artificial Sequence: Synthetic oligonucleotide
gaagucugacagugaaccc

SEQ ID NO: 993125 - RNA, 19 nt, Artificial Sequence
  Description of Artificial Sequence: Synthetic oligonucleotide
agcaaugcaagcugucaga

SEQ ID NO: 993126 - RNA, 19 nt, Artificial Sequence
  Description of Artificial Sequence: Synthetic oligonucleotide
ucacagcaacaaaaguaca

SEQ ID NO: 993127 - RNA, 19 nt, Artificial Sequence
  Description of Artificial Sequence: Synthetic oligonucleotide
agccauauaccuccgagua

SEQ ID NO: 993128 - RNA, 19 nt, Artificial Sequence
  Description of Artificial Sequence: Synthetic oligonucleotide
uacaacgagaagccaguuc

SEQ ID NO: 993129 - RNA, 19 nt, Artificial Sequence
  Description of Artificial Sequence: Synthetic oligonucleotide
gucccugugagauauugca

SEQ ID NO: 993130 - RNA, 19 nt, Artificial Sequence
  Description of Artificial Sequence: Synthetic oligonucleotide
uguuguaauaggguggcuu

SEQ ID NO: 993131 - RNA, 19 nt, Artificial Sequence
  Description of Artificial Sequence: Synthetic oligonucleotide
aucccugcaaucaacauaa

SEQ ID NO: 993132 - RNA, 19 nt, Artificial Sequence
  Description of Artificial Sequence: Synthetic oligonucleotide
acaggauuugaagugggcu

SEQ ID NO: 993133 - RNA, 19 nt, Artificial Sequence
  Description of Artificial Sequence: Synthetic oligonucleotide
caucuacagguccaucugc

SEQ ID NO: 993134 - RNA, 19 nt, Artificial Sequence
  Description of Artificial Sequence: Synthetic oligonucleotide
ugucccugugagauauugc

SEQ ID NO: 993135 - RNA, 19 nt, Artificial Sequence
  Description of Artificial Sequence: Synthetic oligonucleotide
cuucauaucugugcugcag

SEQ ID NO: 993136 - RNA, 19 nt, Artificial Sequence
  Description of Artificial Sequence: Synthetic oligonucleotide
cagcugauaaccuggcuuc

SEQ ID NO: 993137 - RNA, 19 nt, Artificial Sequence
  Description of Artificial Sequence: Synthetic oligonucleotide
ugcagaugaugcaguaagu

SEQ ID NO: 993138 - RNA, 19 nt, Artificial Sequence
  Description of Artificial Sequence: Synthetic oligonucleotide
agguauaucuucauguaaa

SEQ ID NO: 993139 - RNA, 19 nt, Artificial Sequence
  Description of Artificial Sequence: Synthetic oligonucleotide
ugaugucccugugagauau

SEQ ID NO: 993140 - RNA, 19 nt, Artificial Sequence
  Description of Artificial Sequence: Synthetic oligonucleotide
uggcguacauaucuauccu

SEQ ID NO: 993141 - RNA, 19 nt, Artificial Sequence
  Description of Artificial Sequence: Synthetic oligonucleotide
agccaacuaaccuuguuuu

SEQ ID NO: 993142 - RNA, 19 nt, Artificial Sequence
  Description of Artificial Sequence: Synthetic oligonucleotide
agcauugccauuccugcau

SEQ ID NO: 993143 - RNA, 19 nt, Artificial Sequence
  Description of Artificial Sequence: Synthetic oligonucleotide
uccgaguaccaaccugucc

SEQ ID NO: 993144 - RNA, 19 nt, Artificial Sequence
  Description of Artificial Sequence: Synthetic oligonucleotide
uacacuaagcaguuuccuu

SEQ ID NO: 993145 - RNA, 19 nt, Artificial Sequence
  Description of Artificial Sequence: Synthetic oligonucleotide
ucuaacaccucuggagcca

SEQ ID NO: 993146 - RNA, 19 nt, Artificial Sequence
  Description of Artificial Sequence: Synthetic oligonucleotide
cuacucauuucacacagaa

SEQ ID NO: 993147 - RNA, 19 nt, Artificial Sequence
  Description of Artificial Sequence: Synthetic oligonucleotide
uacacauauugcccucaca

SEQ ID NO: 993148 - RNA, 19 nt, Artificial Sequence
  Description of Artificial Sequence: Synthetic oligonucleotide
cagcaaugcaagcugucag

SEQ ID NO: 993149 - RNA, 19 nt, Artificial Sequence
  Description of Artificial Sequence: Synthetic oligonucleotide
aggcauccuacucauuuca

SEQ ID NO: 993150 - RNA, 19 nt, Artificial Sequence
  Description of Artificial Sequence: Synthetic oligonucleotide
uggaaguuuauagcgcccu

SEQ ID NO: 993151 - RNA, 19 nt, Artificial Sequence
  Description of Artificial Sequence: Synthetic oligonucleotide
ugacaaucccugcaaucaa

SEQ ID NO: 993152 - RNA, 19 nt, Artificial Sequence
  Description of Artificial Sequence: Synthetic oligonucleotide
caaucaguccugucauagc

SEQ ID NO: 993153 - RNA, 19 nt, Artificial Sequence
  Description of Artificial Sequence: Synthetic oligonucleotide
aggacuaaucccauggcgu

SEQ ID NO: 993154 - RNA, 19 nt, Artificial Sequence
  Description of Artificial Sequence: Synthetic oligonucleotide
aacgagaagccaguuccca

SEQ ID NO: 993155 - RNA, 19 nt, Artificial Sequence
  Description of Artificial Sequence: Synthetic oligonucleotide
uucuuuggggaggaaaguc

SEQ ID NO: 993156 - RNA, 19 nt, Artificial Sequence
  Description of Artificial Sequence: Synthetic oligonucleotide
ucuuacuuuugaugucccu

SEQ ID NO: 993157 - RNA, 19 nt, Artificial Sequence
  Description of Artificial Sequence: Synthetic oligonucleotide
aguacaacgagaagccagu

SEQ ID NO: 993158 - RNA, 19 nt, Artificial Sequence
  Description of Artificial Sequence: Synthetic oligonucleotide
acaucaacgcuggugccuc

SEQ ID NO: 993159 - RNA, 19 nt, Artificial Sequence
  Description of Artificial Sequence: Synthetic oligonucleotide
cauuuaaggauuagugucu

SEQ ID NO: 993160 - RNA, 19 nt, Artificial Sequence
  Description of Artificial Sequence: Synthetic oligonucleotide
cuucaagcgauggaugcug

SEQ ID NO: 993161 - RNA, 19 nt, Artificial Sequence
  Description of Artificial Sequence: Synthetic oligonucleotide
ucuauacaaucaguccugu

SEQ ID NO: 993162 - RNA, 19 nt, Artificial Sequence
  Description of Artificial Sequence: Synthetic oligonucleotide
aacgcuggugccucgcuuu

SEQ ID NO: 993163 - RNA, 19 nt, Artificial Sequence
  Description of Artificial Sequence: Synthetic oligonucleotide
aaauggcaacauauacuca

SEQ ID NO: 993164 - RNA, 19 nt, Artificial Sequence
  Description of Artificial Sequence: Synthetic oligonucleotide
gaugucauccagccaacua

SEQ ID NO: 993165 - RNA, 19 nt, Artificial Sequence
  Description of Artificial Sequence: Synthetic oligonucleotide
acuugauuagccaggucca

SEQ ID NO: 993166 - RNA, 19 nt, Artificial Sequence
  Description of Artificial Sequence: Synthetic oligonucleotide
uuguaauaggguggcuuug

SEQ ID NO: 993167 - RNA, 19 nt, Artificial Sequence
  Description of Artificial Sequence: Synthetic oligonucleotide
aucuugugaugucuauaca

SEQ ID NO: 993168 - RNA, 19 nt, Artificial Sequence
  Description of Artificial Sequence: Synthetic oligonucleotide
uggcauuacaauagucauu

SEQ ID NO: 993169 - RNA, 19 nt, Artificial Sequence
  Description of Artificial Sequence: Synthetic oligonucleotide
ucuucaagcgauggaugcu

SEQ ID NO: 993170 - RNA, 19 nt, Artificial Sequence
  Description of Artificial Sequence: Synthetic oligonucleotide
ugucccggaggcauccuac

SEQ ID NO: 993171 - RNA, 19 nt, Artificial Sequence
  Description of Artificial Sequence: Synthetic oligonucleotide
cagguaaacuauagacuuc

SEQ ID NO: 993172 - RNA, 19 nt, Artificial Sequence
  Description of Artificial Sequence: Synthetic oligonucleotide
uauuuugacuagccacaua

SEQ ID NO: 993173 - RNA, 19 nt, Artificial Sequence
  Description of Artificial Sequence: Synthetic oligonucleotide
aggauuugaagugggcugu

SEQ ID NO: 993174 - RNA, 19 nt, Artificial Sequence
  Description of Artificial Sequence: Synthetic oligonucleotide
guacauaucuauccucaaa

SEQ ID NO: 993175 - RNA, 19 nt, Artificial Sequence
  Description of Artificial Sequence: Synthetic oligonucleotide
uucuaucguuucacagagc

SEQ ID NO: 993176 - RNA, 19 nt, Artificial Sequence
  Description of Artificial Sequence: Synthetic oligonucleotide
uucaugaaaugcugugauu

SEQ ID NO: 993177 - RNA, 19 nt, Artificial Sequence
  Description of Artificial Sequence: Synthetic oligonucleotide
acaaguacuggaggguaug

SEQ ID NO: 993178 - RNA, 19 nt, Artificial Sequence
  Description of Artificial Sequence: Synthetic oligonucleotide
cacacagaaaauacacuaa

SEQ ID NO: 993179 - RNA, 19 nt, Artificial Sequence
  Description of Artificial Sequence: Synthetic oligonucleotide
gcugugauuagccacaggu

SEQ ID NO: 993180 - RNA, 19 nt, Artificial Sequence
  Description of Artificial Sequence: Synthetic oligonucleotide
acaauguccucuguaguaa

SEQ ID NO: 993181 - RNA, 19 nt, Artificial Sequence
  Description of Artificial Sequence: Synthetic oligonucleotide
aucaugaucccaacauucu

SEQ ID NO: 993182 - RNA, 19 nt, Artificial Sequence
  Description of Artificial Sequence: Synthetic oligonucleotide
aguuuauagcgcccucuaa

SEQ ID NO: 993183 - RNA, 19 nt, Artificial Sequence
  Description of Artificial Sequence: Synthetic oligonucleotide
ucccuuagacuccccuuca

SEQ ID NO: 993184 - RNA, 19 nt, Artificial Sequence
  Description of Artificial Sequence: Synthetic oligonucleotide
cuguuuguccuguauugga

SEQ ID NO: 993185 - RNA, 19 nt, Artificial Sequence
  Description of Artificial Sequence: Synthetic oligonucleotide
uguccucuguaguaaugau

SEQ ID NO: 993186 - RNA, 19 nt, Artificial Sequence
  Description of Artificial Sequence: Synthetic oligonucleotide
aguaucaccugcagacuug

SEQ ID NO: 993187 - RNA, 19 nt, Artificial Sequence
  Description of Artificial Sequence: Synthetic oligonucleotide
caugaguaucaccugcaga

SEQ ID NO: 993188 - RNA, 19 nt, Artificial Sequence
  Description of Artificial Sequence: Synthetic oligonucleotide
cuuguuuuacuauuucgau

SEQ ID NO: 993189 - RNA, 19 nt, Artificial Sequence
  Description of Artificial Sequence: Synthetic oligonucleotide
aucaacgcuggugccucgc

SEQ ID NO: 993190 - RNA, 19 nt, Artificial Sequence
  Description of Artificial Sequence: Synthetic oligonucleotide
gaggaaagucaacauuugu

SEQ ID NO: 993191 - RNA, 19 nt, Artificial Sequence
  Description of Artificial Sequence: Synthetic oligonucleotide
cuuagacuccccuucauau

SEQ ID NO: 993192 - RNA, 19 nt, Artificial Sequence
  Description of Artificial Sequence: Synthetic oligonucleotide
auagcgcccucuaacaccu

SEQ ID NO: 993193 - RNA, 19 nt, Artificial Sequence
  Description of Artificial Sequence: Synthetic oligonucleotide
uugguguaacaggauuuga

SEQ ID NO: 993194 - RNA, 19 nt, Artificial Sequence
  Description of Artificial Sequence: Synthetic oligonucleotide
ugacuuccaucuccggaaa

SEQ ID NO: 993195 - RNA, 19 nt, Artificial Sequence
  Description of Artificial Sequence: Synthetic oligonucleotide
aacaaguacuggaggguau

SEQ ID NO: 993196 - RNA, 19 nt, Artificial Sequence
  Description of Artificial Sequence: Synthetic oligonucleotide
ucauuccaagagaccacau

SEQ ID NO: 993197 - RNA, 19 nt, Artificial Sequence
  Description of Artificial Sequence: Synthetic oligonucleotide
auauuuugacuagccacau

SEQ ID NO: 993198 - RNA, 19 nt, Artificial Sequence
  Description of Artificial Sequence: Synthetic oligonucleotide
cuaagcaguuuccuuagcu

SEQ ID NO: 993199 - RNA, 19 nt, Artificial Sequence
  Description of Artificial Sequence: Synthetic oligonucleotide
ggauuagugucuucugaca

SEQ ID NO: 993200 - RNA, 19 nt, Artificial Sequence
  Description of Artificial Sequence: Synthetic oligonucleotide
ccugugagauauugcaggc

SEQ ID NO: 993201 - RNA, 19 nt, Artificial Sequence
  Description of Artificial Sequence: Synthetic oligonucleotide
aucguuucacagagcauug

SEQ ID NO: 993202 - RNA, 19 nt, Artificial Sequence
  Description of Artificial Sequence: Synthetic oligonucleotide
ccaacuaaccuuguuuuac

SEQ ID NO: 993203 - RNA, 19 nt, Artificial Sequence
  Description of Artificial Sequence: Synthetic oligonucleotide
ucccaauucucagugugua

SEQ ID NO: 993204 - RNA, 19 nt, Artificial Sequence
  Description of Artificial Sequence: Synthetic oligonucleotide
caccuacacauccagcuga

SEQ ID NO: 993205 - RNA, 19 nt, Artificial Sequence
  Description of Artificial Sequence: Synthetic oligonucleotide
auugcccucacagcaacaa

SEQ ID NO: 993206 - RNA, 19 nt, Artificial Sequence
  Description of Artificial Sequence: Synthetic oligonucleotide
guguaaagauggugccacc

SEQ ID NO: 993207 - RNA, 19 nt, Artificial Sequence
  Description of Artificial Sequence: Synthetic oligonucleotide
gaacaaguacuggagggua

SEQ ID NO: 993208 - RNA, 19 nt, Artificial Sequence
  Description of Artificial Sequence: Synthetic oligonucleotide
gacuaaucccauggcguac

SEQ ID NO: 993209 - RNA, 19 nt, Artificial Sequence
  Description of Artificial Sequence: Synthetic oligonucleotide
cagguauaucuucauguaa

SEQ ID NO: 993210 - RNA, 19 nt, Artificial Sequence
  Description of Artificial Sequence: Synthetic oligonucleotide
ucaacgcuggugccucgcu

SEQ ID NO: 993211 - RNA, 19 nt, Artificial Sequence
  Description of Artificial Sequence: Synthetic oligonucleotide
augcguuccacaaggggcu

SEQ ID NO: 993212 - RNA, 19 nt, Artificial Sequence
  Description of Artificial Sequence: Synthetic oligonucleotide
cugcguacaugucccggag

SEQ ID NO: 993213 - RNA, 19 nt, Artificial Sequence
  Description of Artificial Sequence: Synthetic oligonucleotide
agcgcccucuaacaccucu

SEQ ID NO: 993214 - RNA, 19 nt, Artificial Sequence
  Description of Artificial Sequence: Synthetic oligonucleotide
guuguaauaggguggcuuu

SEQ ID NO: 993215 - RNA, 19 nt, Artificial Sequence
  Description of Artificial Sequence: Synthetic oligonucleotide
uacaaucaguccugucaua

SEQ ID NO: 993216 - RNA, 19 nt, Artificial Sequence
  Description of Artificial Sequence: Synthetic oligonucleotide
ccgaguaccaaccugucca

SEQ ID NO: 993217 - RNA, 19 nt, Artificial Sequence
  Description of Artificial Sequence: Synthetic oligonucleotide
uggagccauauaccuccga

SEQ ID NO: 993218 - RNA, 19 nt, Artificial Sequence
  Description of Artificial Sequence: Synthetic oligonucleotide
cuggagccauauaccuccg

SEQ ID NO: 993219 - RNA, 19 nt, Artificial Sequence
  Description of Artificial Sequence: Synthetic oligonucleotide
aucuuuuaagccagguaua

SEQ ID NO: 993220 - RNA, 19 nt, Artificial Sequence
  Description of Artificial Sequence: Synthetic oligonucleotide
gugugacuuccaucuccgg

SEQ ID NO: 993221 - RNA, 19 nt, Artificial Sequence
  Description of Artificial Sequence: Synthetic oligonucleotide
cuuugguguaacaggauuu

SEQ ID NO: 993222 - RNA, 19 nt, Artificial Sequence
  Description of Artificial Sequence: Synthetic oligonucleotide
ccaugcguuccacaagggg

SEQ ID NO: 993223 - RNA, 19 nt, Artificial Sequence
  Description of Artificial Sequence: Synthetic oligonucleotide
cacaacuacuuccugcaua

SEQ ID NO: 993224 - RNA, 19 nt, Artificial Sequence
  Description of Artificial Sequence: Synthetic oligonucleotide
ugaugucauccagccaacu

SEQ ID NO: 993225 - RNA, 19 nt, Artificial Sequence
  Description of Artificial Sequence: Synthetic oligonucleotide
ccaucuccggaaaauaaga

SEQ ID NO: 993226 - RNA, 19 nt, Artificial Sequence
  Description of Artificial Sequence: Synthetic oligonucleotide
gcauccuacucauuucaca

SEQ ID NO: 993227 - RNA, 19 nt, Artificial Sequence
  Description of Artificial Sequence: Synthetic oligonucleotide
ggcguacauaucuauccuc

SEQ ID NO: 993228 - RNA, 19 nt, Artificial Sequence
  Description of Artificial Sequence: Synthetic oligonucleotide
cauauaccuccgaguacca

SEQ ID NO: 993229 - RNA, 19 nt, Artificial Sequence
  Description of Artificial Sequence: Synthetic oligonucleotide
auaggguggcuuuggugua

SEQ ID NO: 993230 - RNA, 19 nt, Artificial Sequence
  Description of Artificial Sequence: Synthetic oligonucleotide
aggguggcuuugguguaac

SEQ ID NO: 993231 - RNA, 19 nt, Artificial Sequence
  Description of Artificial Sequence: Synthetic oligonucleotide
gucaacauuugucaccauu

SEQ ID NO: 993232 - RNA, 19 nt, Artificial Sequence
  Description of Artificial Sequence: Synthetic oligonucleotide
ucccggaggcauccuacuc

SEQ ID NO: 993233 - RNA, 19 nt, Artificial Sequence
  Description of Artificial Sequence: Synthetic oligonucleotide
caucaacgcuggugccucg

SEQ ID NO: 993234 - RNA, 19 nt, Artificial Sequence
  Description of Artificial Sequence: Synthetic oligonucleotide
cauccagccaacuaaccuu

SEQ ID NO: 993235 - RNA, 19 nt, Artificial Sequence
  Description of Artificial Sequence: Synthetic oligonucleotide
gaguaccaaccuguccaug

SEQ ID NO: 993236 - RNA, 19 nt, Artificial Sequence
  Description of Artificial Sequence: Synthetic oligonucleotide
gcguacauaucuauccuca

SEQ ID NO: 993237 - RNA, 19 nt, Artificial Sequence
  Description of Artificial Sequence: Synthetic oligonucleotide
gguauaucuucauguaaau

SEQ ID NO: 993238 - RNA, 19 nt, Artificial Sequence
  Description of Artificial Sequence: Synthetic oligonucleotide
ugcaagcugucagauuguu

SEQ ID NO: 993239 - RNA, 19 nt, Artificial Sequence
  Description of Artificial Sequence: Synthetic oligonucleotide
caguuuccuuagcuuagca

SEQ ID NO: 993240 - RNA, 19 nt, Artificial Sequence
  Description of Artificial Sequence: Synthetic oligonucleotide
guaauaggguggcuuuggu

SEQ ID NO: 993241 - RNA, 19 nt, Artificial Sequence
  Description of Artificial Sequence: Synthetic oligonucleotide
aggcuuguggccaucuuuu

SEQ ID NO: 993242 - RNA, 19 nt, Artificial Sequence
  Description of Artificial Sequence: Synthetic oligonucleotide
cgagucccaauucucagug

SEQ ID NO: 993243 - RNA, 19 nt, Artificial Sequence
  Description of Artificial Sequence: Synthetic oligonucleotide
cuccgaguaccaaccuguc

SEQ ID NO: 993244 - RNA, 19 nt, Artificial Sequence
  Description of Artificial Sequence: Synthetic oligonucleotide
ggaaguuuauagcgcccuc

SEQ ID NO: 993245 - RNA, 19 nt, Artificial Sequence
  Description of Artificial Sequence: Synthetic oligonucleotide
ccaugaguaucaccugcag

SEQ ID NO: 993246 - RNA, 19 nt, Artificial Sequence
  Description of Artificial Sequence: Synthetic oligonucleotide
gccauauaccuccgaguac

SEQ ID NO: 993247 - RNA, 19 nt, Artificial Sequence
  Description of Artificial Sequence: Synthetic oligonucleotide
ggacuaaucccauggcgua

SEQ ID NO: 993248 - RNA, 19 nt, Artificial Sequence
  Description of Artificial Sequence: Synthetic oligonucleotide
gauggaugcuggccaauuu

SEQ ID NO: 993249 - RNA, 19 nt, Artificial Sequence
  Description of Artificial Sequence: Synthetic oligonucleotide
auugagcaacugggcuuuc

SEQ ID NO: 993250 - RNA, 19 nt, Artificial Sequence
  Description of Artificial Sequence: Synthetic oligonucleotide
auauaccuccgaguaccaa

SEQ ID NO: 993251 - RNA, 19 nt, Artificial Sequence
  Description of Artificial Sequence: Synthetic oligonucleotide
gcaaucaacauaaguggua

SEQ ID NO: 993252 - RNA, 19 nt, Artificial Sequence
  Description of Artificial Sequence: Synthetic oligonucleotide
ugcguuccacaaggggcug

SEQ ID NO: 993253 - RNA, 19 nt, Artificial Sequence
  Description of Artificial Sequence: Synthetic oligonucleotide
ccaauucucaguguguaaa

SEQ ID NO: 993254 - RNA, 19 nt, Artificial Sequence
  Description of Artificial Sequence: Synthetic oligonucleotide
cucaguguguaaagauggu

SEQ ID NO: 993255 - RNA, 19 nt, Artificial Sequence
  Description of Artificial Sequence: Synthetic oligonucleotide
cuugauuagccagguccaa

SEQ ID NO: 993256 - RNA, 19 nt, Artificial Sequence
  Description of Artificial Sequence: Synthetic oligonucleotide
agacuccccuucauaucug

SEQ ID NO: 993257 - RNA, 19 nt, Artificial Sequence
  Description of Artificial Sequence: Synthetic oligonucleotide
ccagguauaucuucaugua

SEQ ID NO: 993258 - RNA, 19 nt, Artificial Sequence
  Description of Artificial Sequence: Synthetic oligonucleotide
ggauuugaagugggcugug

SEQ ID NO: 993259 - RNA, 19 nt, Artificial Sequence
  Description of Artificial Sequence: Synthetic oligonucleotide
ccaacauucuucuaucguu

SEQ ID NO: 993260 - RNA, 19 nt, Artificial Sequence
  Description of Artificial Sequence: Synthetic oligonucleotide
ccacaucaacgcuggugcc

SEQ ID NO: 993261 - RNA, 19 nt, Artificial Sequence
  Description of Artificial Sequence: Synthetic oligonucleotide
gccugcguacaugucccgg

SEQ ID NO: 993262 - RNA, 19 nt, Artificial Sequence
  Description of Artificial Sequence: Synthetic oligonucleotide
ugccagccucaaacuuuaa

SEQ ID NO: 993263 - RNA, 19 nt, Artificial Sequence
  Description of Artificial Sequence: Synthetic oligonucleotide
gccaacuaaccuuguuuua

SEQ ID NO: 993264 - RNA, 19 nt, Artificial Sequence
  Description of Artificial Sequence: Synthetic oligonucleotide
gccaugcguuccacaaggg

SEQ ID NO: 993265 - RNA, 19 nt, Artificial Sequence
  Description of Artificial Sequence: Synthetic oligonucleotide
ccuccgaguaccaaccugu

SEQ ID NO: 993266 - RNA, 19 nt, Artificial Sequence
  Description of Artificial Sequence: Synthetic oligonucleotide
ccugcguacaugucccgga

SEQ ID NO: 993267 - RNA, 19 nt, Artificial Sequence
  Description of Artificial Sequence: Synthetic oligonucleotide
gucccaauucucagugugu

SEQ ID NO: 993268 - RNA, 19 nt, Artificial Sequence
  Description of Artificial Sequence: Synthetic oligonucleotide
caucccuuuggaaguuuau

SEQ ID NO: 993269 - RNA, 19 nt, Artificial Sequence
  Description of Artificial Sequence: Synthetic oligonucleotide
cccggaggcauccuacuca

SEQ ID NO: 993270 - RNA, 19 nt, Artificial Sequence
  Description of Artificial Sequence: Synthetic oligonucleotide
augcaucccuuuggaaguu

SEQ ID NO: 993271 - RNA, 19 nt, Artificial Sequence
  Description of Artificial Sequence: Synthetic oligonucleotide
acgcuggugccucgcuuuu

SEQ ID NO: 993272 - RNA, 19 nt, Artificial Sequence
  Description of Artificial Sequence: Synthetic oligonucleotide
caggcuuguggccaucuuu

SEQ ID NO: 993273 - RNA, 19 nt, Artificial Sequence
  Description of Artificial Sequence: Synthetic oligonucleotide
gcccucuaacaccucugga

SEQ ID NO: 993274 - RNA, 19 nt, Artificial Sequence
  Description of Artificial Sequence: Synthetic oligonucleotide
accuagcaauggggaaggu

SEQ ID NO: 993275 - RNA, 19 nt, Artificial Sequence
  Description of Artificial Sequence: Synthetic oligonucleotide
cguguacauuucucaguuc

SEQ ID NO: 993276 - RNA, 19 nt, Artificial Sequence
  Description of Artificial Sequence: Synthetic oligonucleotide
caccaucauagacuagauu

SEQ ID NO: 993277 - RNA, 19 nt, Artificial Sequence
  Description of Artificial Sequence: Synthetic oligonucleotide
cuguuacaauguccucugu

SEQ ID NO: 993278 - RNA, 19 nt, Artificial Sequence
  Description of Artificial Sequence: Synthetic oligonucleotide
cccaauucucaguguguaa

SEQ ID NO: 993279 - RNA, 19 nt, Artificial Sequence
  Description of Artificial Sequence: Synthetic oligonucleotide
ggcuuguggccaucuuuua

SEQ ID NO: 993280 - RNA, 19 nt, Artificial Sequence
  Description of Artificial Sequence: Synthetic oligonucleotide
uagcgcccucuaacaccuc

SEQ ID NO: 993281 - RNA, 19 nt, Artificial Sequence
  Description of Artificial Sequence: Synthetic oligonucleotide
ccggaaaauaagagaacuu

SEQ ID NO: 993282 - RNA, 19 nt, Artificial Sequence
  Description of Artificial Sequence: Synthetic oligonucleotide
gcgcccucuaacaccucug

SEQ ID NO: 993283 - RNA, 19 nt, Artificial Sequence
  Description of Artificial Sequence: Synthetic oligonucleotide
gcguuccacaaggggcugc

SEQ ID NO: 993284 - RNA, 19 nt, Artificial Sequence
  Description of Artificial Sequence: Synthetic oligonucleotide
gguaaacuauagacuucau

SEQ ID NO: 993285 - RNA, 19 nt, Artificial Sequence
  Description of Artificial Sequence: Synthetic oligonucleotide
ccaguuccgagucccaauu

SEQ ID NO: 993286 - RNA, 19 nt, Artificial Sequence
  Description of Artificial Sequence: Synthetic oligonucleotide
ccaccaucauagacuagau

SEQ ID NO: 993287 - RNA, 19 nt, Artificial Sequence
  Description of Artificial Sequence: Synthetic oligonucleotide
caacgcuggugccucgcuu

SEQ ID NO: 993288 - RNA, 19 nt, Artificial Sequence
  Description of Artificial Sequence: Synthetic oligonucleotide
guccuguauuggaaauauu

SEQ ID NO: 993289 - RNA, 19 nt, Artificial Sequence
  Description of Artificial Sequence: Synthetic oligonucleotide
gaugucccugugagauauu

SEQ ID NO: 993290 - RNA, 19 nt, Artificial Sequence
  Description of Artificial Sequence: Synthetic oligonucleotide
ccaaccuguccaugaguau

SEQ ID NO: 993291 - RNA, 19 nt, Artificial Sequence
  Description of Artificial Sequence: Synthetic oligonucleotide
gcaagcugucagauuguuu

SEQ ID NO: 993292 - RNA, 19 nt, Artificial Sequence
  Description of Artificial Sequence: Synthetic oligonucleotide
ccggaggcauccuacucau

SEQ ID NO: 993293 - RNA, 19 nt, Artificial Sequence
  Description of Artificial Sequence: Synthetic oligonucleotide
cgauggaugcuggccaauu

SEQ ID NO: 993294 - RNA, 19 nt, Artificial Sequence
  Description of Artificial Sequence: Synthetic oligonucleotide
acaucuuacaacuuggugg

SEQ ID NO: 993295 - RNA, 19 nt, Artificial Sequence
  Description of Artificial Sequence: Synthetic oligonucleotide
uuagaaaacacccauggcu

SEQ ID NO: 993296 - RNA, 19 nt, Artificial Sequence
  Description of Artificial Sequence: Synthetic oligonucleotide
augucuacgauccuugucc

SEQ ID NO: 993297 - RNA, 19 nt, Artificial Sequence
  Description of Artificial Sequence: Synthetic oligonucleotide
aacuauaguggucaaggac

SEQ ID NO: 993298 - RNA, 19 nt, Artificial Sequence
  Description of Artificial Sequence: Synthetic oligonucleotide
aaagggguauucuucuucc

SEQ ID NO: 993299 - RNA, 19 nt, Artificial Sequence
  Description of Artificial Sequence: Synthetic oligonucleotide
aacaaggggagucuaaauc

SEQ ID NO: 993300 - RNA, 19 nt, Artificial Sequence
  Description of Artificial Sequence: Synthetic oligonucleotide
uuaaccaaacuggagaugg

SEQ ID NO: 993301 - RNA, 19 nt, Artificial Sequence
  Description of Artificial Sequence: Synthetic oligonucleotide
ugauacagaacaaaucacc

SEQ ID NO: 993302 - RNA, 19 nt, Artificial Sequence
  Description of Artificial Sequence: Synthetic oligonucleotide
aaagcaacuuuuaucaagg

SEQ ID NO: 993303 - RNA, 19 nt, Artificial Sequence
  Description of Artificial Sequence: Synthetic oligonucleotide
aacaaaucacccaagguuc

SEQ ID NO: 993304 - RNA, 19 nt, Artificial Sequence
  Description of Artificial Sequence: Synthetic oligonucleotide
ucuauuucaauuuucccac

SEQ ID NO: 993305 - RNA, 19 nt, Artificial Sequence
  Description of Artificial Sequence: Synthetic oligonucleotide
uaaggauugaaagacaggc

SEQ ID NO: 993306 - RNA, 19 nt, Artificial Sequence
  Description of Artificial Sequence: Synthetic oligonucleotide
acaaacuagcaauacacuc

SEQ ID NO: 993307 - RNA, 19 nt, Artificial Sequence
  Description of Artificial Sequence: Synthetic oligonucleotide
aaucauaaagaaaaggggu

SEQ ID NO: 993308 - RNA, 19 nt, Artificial Sequence
  Description of Artificial Sequence: Synthetic oligonucleotide
aaggaaugcaacuugaguu

SEQ ID NO: 993309 - RNA, 19 nt, Artificial Sequence
  Description of Artificial Sequence: Synthetic oligonucleotide
auggcaucaaacuauagug

SEQ ID NO: 993310 - RNA, 19 nt, Artificial Sequence
  Description of Artificial Sequence: Synthetic oligonucleotide
aacaaauacaaacuagcaa

SEQ ID NO: 993311 - RNA, 19 nt, Artificial Sequence
  Description of Artificial Sequence: Synthetic oligonucleotide
gacagguuaaccaaacugg

SEQ ID NO: 993312 - RNA, 19 nt, Artificial Sequence
  Description of Artificial Sequence: Synthetic oligonucleotide
caaacuauaguggucaagg

SEQ ID NO: 993313 - RNA, 19 nt, Artificial Sequence
  Description of Artificial Sequence: Synthetic oligonucleotide
aaugaugcaaggguucugg

SEQ ID NO: 993314 - RNA, 19 nt, Artificial Sequence
  Description of Artificial Sequence: Synthetic oligonucleotide
ugggcuaauaguauuguug

SEQ ID NO: 993315 - RNA, 19 nt, Artificial Sequence
  Description of Artificial Sequence: Synthetic oligonucleotide
agugagaugcgucaaacug

SEQ ID NO: 993316 - RNA, 19 nt, Artificial Sequence
  Description of Artificial Sequence: Synthetic oligonucleotide
uccauuauaagcacuuaca

SEQ ID NO: 993317 - RNA, 19 nt, Artificial Sequence
  Description of Artificial Sequence: Synthetic oligonucleotide
agacauucagccuacgguc

SEQ ID NO: 993318 - RNA, 19 nt, Artificial Sequence
  Description of Artificial Sequence: Synthetic oligonucleotide
gaugcaaggguucuggggc

SEQ ID NO: 993319 - RNA, 19 nt, Artificial Sequence
  Description of Artificial Sequence: Synthetic oligonucleotide
gagucuaaaucacaagugc

SEQ ID NO: 993320 - RNA, 19 nt, Artificial Sequence
  Description of Artificial Sequence: Synthetic oligonucleotide
ugauccuguggcaagaaug

SEQ ID NO: 993321 - RNA, 19 nt, Artificial Sequence
  Description of Artificial Sequence: Synthetic oligonucleotide
uuauaaauguucucugcca

SEQ ID NO: 993322 - RNA, 19 nt, Artificial Sequence
  Description of Artificial Sequence: Synthetic oligonucleotide
agcacuuacacaguuaguc

SEQ ID NO: 993323 - RNA, 19 nt, Artificial Sequence
  Description of Artificial Sequence: Synthetic oligonucleotide
aaacugagcaucaucguuc

SEQ ID NO: 993324 - RNA, 19 nt, Artificial Sequence
  Description of Artificial Sequence: Synthetic oligonucleotide
aucauuauaaauguucucu

SEQ ID NO: 993325 - RNA, 19 nt, Artificial Sequence
  Description of Artificial Sequence: Synthetic oligonucleotide
ucauuauaaauguucucug

SEQ ID NO: 993326 - RNA, 19 nt, Artificial Sequence
  Description of Artificial Sequence: Synthetic oligonucleotide
uggaaguauuguucgaacg

SEQ ID NO: 993327 - RNA, 19 nt, Artificial Sequence
  Description of Artificial Sequence: Synthetic oligonucleotide
caugaauaaacaacaacuc

SEQ ID NO: 993328 - RNA, 19 nt, Artificial Sequence
  Description of Artificial Sequence: Synthetic oligonucleotide
aacugagcaucaucguucg

SEQ ID NO: 993329 - RNA, 19 nt, Artificial Sequence
  Description of Artificial Sequence: Synthetic oligonucleotide
ugagaugcgucaaacugag

SEQ ID NO: 993330 - RNA, 19 nt, Artificial Sequence
  Description of Artificial Sequence: Synthetic oligonucleotide
gaacgaguaucccagauca

SEQ ID NO: 993331 - RNA, 19 nt, Artificial Sequence
  Description of Artificial Sequence: Synthetic oligonucleotide
ugggcaguuaaacugggcc

SEQ ID NO: 993332 - RNA, 19 nt, Artificial Sequence
  Description of Artificial Sequence: Synthetic oligonucleotide
ucagccuacggucaguacc

SEQ ID NO: 993333 - RNA, 19 nt, Artificial Sequence
  Description of Artificial Sequence: Synthetic oligonucleotide
aaaucacaagugcagacau

SEQ ID NO: 993334 - RNA, 19 nt, Artificial Sequence
  Description of Artificial Sequence: Synthetic oligonucleotide
uuuagaagggugcuuugug

SEQ ID NO: 993335 - RNA, 19 nt, Artificial Sequence
  Description of Artificial Sequence: Synthetic oligonucleotide
uccacggagacguaaaucu

SEQ ID NO: 993336 - RNA, 19 nt, Artificial Sequence
  Description of Artificial Sequence: Synthetic oligonucleotide
ugagcaucaaccgaguggc

SEQ ID NO: 993337 - RNA, 19 nt, Artificial Sequence
  Description of Artificial Sequence: Synthetic oligonucleotide
auaaagaaaagggguauuc

SEQ ID NO: 993338 - RNA, 19 nt, Artificial Sequence
  Description of Artificial Sequence: Synthetic oligonucleotide
uuagucauggagaguaaca

SEQ ID NO: 993339 - RNA, 19 nt, Artificial Sequence
  Description of Artificial Sequence: Synthetic oligonucleotide
uuaugugacucaaaggaau

SEQ ID NO: 993340 - RNA, 19 nt, Artificial Sequence
  Description of Artificial Sequence: Synthetic oligonucleotide
uugguggcaccuauuauag

SEQ ID NO: 993341 - RNA, 19 nt, Artificial Sequence
  Description of Artificial Sequence: Synthetic oligonucleotide
agguuaaccaaacuggaga

SEQ ID NO: 993342 - RNA, 19 nt, Artificial Sequence
  Description of Artificial Sequence: Synthetic oligonucleotide
aacaacaacucuggugggc

SEQ ID NO: 993343 - RNA, 19 nt, Artificial Sequence
  Description of Artificial Sequence: Synthetic oligonucleotide
ucuacuacugcuguaugcc

SEQ ID NO: 993344 - RNA, 19 nt, Artificial Sequence
  Description of Artificial Sequence: Synthetic oligonucleotide
uaugugacucaaaggaaug

SEQ ID NO: 993345 - RNA, 19 nt, Artificial Sequence
  Description of Artificial Sequence: Synthetic oligonucleotide
uggucaaggacuaacuccu

SEQ ID NO: 993346 - RNA, 19 nt, Artificial Sequence
  Description of Artificial Sequence: Synthetic oligonucleotide
aauaguauuguugguggca

SEQ ID NO: 993347 - RNA, 19 nt, Artificial Sequence
  Description of Artificial Sequence: Synthetic oligonucleotide
gagacguaaaucuggguug

SEQ ID NO: 993348 - RNA, 19 nt, Artificial Sequence
  Description of Artificial Sequence: Synthetic oligonucleotide
acuggcuaucaccaggugg

SEQ ID NO: 993349 - RNA, 19 nt, Artificial Sequence
  Description of Artificial Sequence: Synthetic oligonucleotide
uauuguucgaacgaguauc

SEQ ID NO: 993350 - RNA, 19 nt, Artificial Sequence
  Description of Artificial Sequence: Synthetic oligonucleotide
ugguauggucaucugaagc

SEQ ID NO: 993351 - RNA, 19 nt, Artificial Sequence
  Description of Artificial Sequence: Synthetic oligonucleotide
uccuuaugugacucaaagg

SEQ ID NO: 993352 - RNA, 19 nt, Artificial Sequence
  Description of Artificial Sequence: Synthetic oligonucleotide
ugaugcaaggguucugggg

SEQ ID NO: 993353 - RNA, 19 nt, Artificial Sequence
  Description of Artificial Sequence: Synthetic oligonucleotide
uuccauuauaagcacuuac

SEQ ID NO: 993354 - RNA, 19 nt, Artificial Sequence
  Description of Artificial Sequence: Synthetic oligonucleotide
auuauagcuggauagcuua

SEQ ID NO: 993355 - RNA, 19 nt, Artificial Sequence
  Description of Artificial Sequence: Synthetic oligonucleotide
gugagcaucaaccgagugg

SEQ ID NO: 993356 - RNA, 19 nt, Artificial Sequence
  Description of Artificial Sequence: Synthetic oligonucleotide
uguucgaacgaguauccca

SEQ ID NO: 993357 - RNA, 19 nt, Artificial Sequence
  Description of Artificial Sequence: Synthetic oligonucleotide
uauuccucauugaucacac

SEQ ID NO: 993358 - RNA, 19 nt, Artificial Sequence
  Description of Artificial Sequence: Synthetic oligonucleotide
aaacuagcaauacacucuu

SEQ ID NO: 993359 - RNA, 19 nt, Artificial Sequence
  Description of Artificial Sequence: Synthetic oligonucleotide
ucucaaaccaguguuaaau

SEQ ID NO: 993360 - RNA, 19 nt, Artificial Sequence
  Description of Artificial Sequence: Synthetic oligonucleotide
aggacaagccggugaaugc

SEQ ID NO: 993361 - RNA, 19 nt, Artificial Sequence
  Description of Artificial Sequence: Synthetic oligonucleotide
gaagggucugguuuagaag

SEQ ID NO: 993362 - RNA, 19 nt, Artificial Sequence
  Description of Artificial Sequence: Synthetic oligonucleotide
uacaaacuagcaauacacu

SEQ ID NO: 993363 - RNA, 19 nt, Artificial Sequence
  Description of Artificial Sequence: Synthetic oligonucleotide
ugacucaaaggaaugcaac

SEQ ID NO: 993364 - RNA, 19 nt, Artificial Sequence
  Description of Artificial Sequence: Synthetic oligonucleotide
ucuuacaacuugguggucc

SEQ ID NO: 993365 - RNA, 19 nt, Artificial Sequence
  Description of Artificial Sequence: Synthetic oligonucleotide
auaguggucaaggacuaac

SEQ ID NO: 993366 - RNA, 19 nt, Artificial Sequence
  Description of Artificial Sequence: Synthetic oligonucleotide
cacaguuagucauggagag

SEQ ID NO: 993367 - RNA, 19 nt, Artificial Sequence
  Description of Artificial Sequence: Synthetic oligonucleotide
uaaaucacaagugcagaca

SEQ ID NO: 993368 - RNA, 19 nt, Artificial Sequence
  Description of Artificial Sequence: Synthetic oligonucleotide
auuguucgaacgaguaucc

SEQ ID NO: 993369 - RNA, 19 nt, Artificial Sequence
  Description of Artificial Sequence: Synthetic oligonucleotide
auagugagaugcgucaaac

SEQ ID NO: 993370 - RNA, 19 nt, Artificial Sequence
  Description of Artificial Sequence: Synthetic oligonucleotide
uagucauggagaguaacag

SEQ ID NO: 993371 - RNA, 19 nt, Artificial Sequence
  Description of Artificial Sequence: Synthetic oligonucleotide
ugacguauguguucccagg

SEQ ID NO: 993372 - RNA, 19 nt, Artificial Sequence
  Description of Artificial Sequence: Synthetic oligonucleotide
aaacuauaguggucaagga

SEQ ID NO: 993373 - RNA, 19 nt, Artificial Sequence
  Description of Artificial Sequence: Synthetic oligonucleotide
guugcauucuccagaaggg

SEQ ID NO: 993374 - RNA, 19 nt, Artificial Sequence
  Description of Artificial Sequence: Synthetic oligonucleotide
ucuaaaucacaagugcaga

SEQ ID NO: 993375 - RNA, 19 nt, Artificial Sequence
  Description of Artificial Sequence: Synthetic oligonucleotide
uggugagacagguuaacca

SEQ ID NO: 993376 - RNA, 19 nt, Artificial Sequence
  Description of Artificial Sequence: Synthetic oligonucleotide
ccaguuaagauuuagaaaa

SEQ ID NO: 993377 - RNA, 19 nt, Artificial Sequence
  Description of Artificial Sequence: Synthetic oligonucleotide
uuagaagggugcuuugugu

SEQ ID NO: 993378 - RNA, 19 nt, Artificial Sequence
  Description of Artificial Sequence: Synthetic oligonucleotide
cuuacacaguuagucaugg

SEQ ID NO: 993379 - RNA, 19 nt, Artificial Sequence
  Description of Artificial Sequence: Synthetic oligonucleotide
cauuauaagcacuuacaca

SEQ ID NO: 993380 - RNA, 19 nt, Artificial Sequence
  Description of Artificial Sequence: Synthetic oligonucleotide
cacggagacguaaaucugg

SEQ ID NO: 993381 - RNA, 19 nt, Artificial Sequence
  Description of Artificial Sequence: Synthetic oligonucleotide
gucuaaaucacaagugcag

SEQ ID NO: 993382 - RNA, 19 nt, Artificial Sequence
  Description of Artificial Sequence: Synthetic oligonucleotide
uauaagcacuuacacaguu

SEQ ID NO: 993383 - RNA, 19 nt, Artificial Sequence
  Description of Artificial Sequence: Synthetic oligonucleotide
gugaccaccaugaauaaac

SEQ ID NO: 993384 - RNA, 19 nt, Artificial Sequence
  Description of Artificial Sequence: Synthetic oligonucleotide
gagaguaacaggccugaug

SEQ ID NO: 993385 - RNA, 19 nt, Artificial Sequence
  Description of Artificial Sequence: Synthetic oligonucleotide
gaacaaaucacccaagguu

SEQ ID NO: 993386 - RNA, 19 nt, Artificial Sequence
  Description of Artificial Sequence: Synthetic oligonucleotide
uccucauugaucacacgcu

SEQ ID NO: 993387 - RNA, 19 nt, Artificial Sequence
  Description of Artificial Sequence: Synthetic oligonucleotide
aaccgaguggcuuggcuug

SEQ ID NO: 993388 - RNA, 19 nt, Artificial Sequence
  Description of Artificial Sequence: Synthetic oligonucleotide
agcuuaacaaagucugugu

SEQ ID NO: 993389 - RNA, 19 nt, Artificial Sequence
  Description of Artificial Sequence: Synthetic oligonucleotide
uggcaccuauuauagcugg

SEQ ID NO: 993390 - RNA, 19 nt, Artificial Sequence
  Description of Artificial Sequence: Synthetic oligonucleotide
augugacucaaaggaaugc

SEQ ID NO: 993391 - RNA, 19 nt, Artificial Sequence
  Description of Artificial Sequence: Synthetic oligonucleotide
ugugacucaaaggaaugca

SEQ ID NO: 993392 - RNA, 19 nt, Artificial Sequence
  Description of Artificial Sequence: Synthetic oligonucleotide
agcaauuuauuccauuaua

SEQ ID NO: 993393 - RNA, 19 nt, Artificial Sequence
  Description of Artificial Sequence: Synthetic oligonucleotide
agacguaaaucuggguugc

SEQ ID NO: 993394 - RNA, 19 nt, Artificial Sequence
  Description of Artificial Sequence: Synthetic oligonucleotide
auagcuggauagcuuaaca

SEQ ID NO: 993395 - RNA, 19 nt, Artificial Sequence
  Description of Artificial Sequence: Synthetic oligonucleotide
cuggacacuggcuaucacc

SEQ ID NO: 993396 - RNA, 19 nt, Artificial Sequence
  Description of Artificial Sequence: Synthetic oligonucleotide
agccaaaaccuccgaauuc

SEQ ID NO: 993397 - RNA, 19 nt, Artificial Sequence
  Description of Artificial Sequence: Synthetic oligonucleotide
aguuaagauuuagaaaaca

SEQ ID NO: 993398 - RNA, 19 nt, Artificial Sequence
  Description of Artificial Sequence: Synthetic oligonucleotide
uauuauagcuggauagcuu

SEQ ID NO: 993399 - RNA, 19 nt, Artificial Sequence
  Description of Artificial Sequence: Synthetic oligonucleotide
ugcuguaugcccugugaag

SEQ ID NO: 993400 - RNA, 19 nt, Artificial Sequence
  Description of Artificial Sequence: Synthetic oligonucleotide
cuuacaacuuggugguccc

SEQ ID NO: 993401 - RNA, 19 nt, Artificial Sequence
  Description of Artificial Sequence: Synthetic oligonucleotide
ucauaaagaaaagggguau

SEQ ID NO: 993402 - RNA, 19 nt, Artificial Sequence
  Description of Artificial Sequence: Synthetic oligonucleotide
ugguuuuguucaucugacg

SEQ ID NO: 993403 - RNA, 19 nt, Artificial Sequence
  Description of Artificial Sequence: Synthetic oligonucleotide
uaagugcccacugagauuu

SEQ ID NO: 993404 - RNA, 19 nt, Artificial Sequence
  Description of Artificial Sequence: Synthetic oligonucleotide
gaacucacuguaaggauug

SEQ ID NO: 993405 - RNA, 19 nt, Artificial Sequence
  Description of Artificial Sequence: Synthetic oligonucleotide
uucaggccugguuacaucu

SEQ ID NO: 993406 - RNA, 19 nt, Artificial Sequence
  Description of Artificial Sequence: Synthetic oligonucleotide
agcuggauagcuuaacaaa

SEQ ID NO: 993407 - RNA, 19 nt, Artificial Sequence
  Description of Artificial Sequence: Synthetic oligonucleotide
ucaaggacuaacuccuaaa

SEQ ID NO: 993408 - RNA, 19 nt, Artificial Sequence
  Description of Artificial Sequence: Synthetic oligonucleotide
aaacaaggggagucuaaau

SEQ ID NO: 993409 - RNA, 19 nt, Artificial Sequence
  Description of Artificial Sequence: Synthetic oligonucleotide
cucuacuacugcuguaugc

SEQ ID NO: 993410 - RNA, 19 nt, Artificial Sequence
  Description of Artificial Sequence: Synthetic oligonucleotide
aacguccucuacuacugcu

SEQ ID NO: 993411 - RNA, 19 nt, Artificial Sequence
  Description of Artificial Sequence: Synthetic oligonucleotide
ucuucugauacagaacaaa

SEQ ID NO: 993412 - RNA, 19 nt, Artificial Sequence
  Description of Artificial Sequence: Synthetic oligonucleotide
aucacacgcucuuccaccg

SEQ ID NO: 993413 - RNA, 19 nt, Artificial Sequence
  Description of Artificial Sequence: Synthetic oligonucleotide
ccuuaugugacucaaagga

SEQ ID NO: 993414 - RNA, 19 nt, Artificial Sequence
  Description of Artificial Sequence: Synthetic oligonucleotide
aagcacuaaguaagugccc

SEQ ID NO: 993415 - RNA, 19 nt, Artificial Sequence
  Description of Artificial Sequence: Synthetic oligonucleotide
guucgaacgaguaucccag

SEQ ID NO: 993416 - RNA, 19 nt, Artificial Sequence
  Description of Artificial Sequence: Synthetic oligonucleotide
auggugagacagguuaacc

SEQ ID NO: 993417 - RNA, 19 nt, Artificial Sequence
  Description of Artificial Sequence: Synthetic oligonucleotide
ucaaacuauaguggucaag

SEQ ID NO: 993418 - RNA, 19 nt, Artificial Sequence
  Description of Artificial Sequence: Synthetic oligonucleotide
gaccauugaacuuggaaua

SEQ ID NO: 993419 - RNA, 19 nt, Artificial Sequence
  Description of Artificial Sequence: Synthetic oligonucleotide
ugcauucuccagaaggguc

SEQ ID NO: 993420 - RNA, 19 nt, Artificial Sequence
  Description of Artificial Sequence: Synthetic oligonucleotide
agaugguauggucaucuga

SEQ ID NO: 993421 - RNA, 19 nt, Artificial Sequence
  Description of Artificial Sequence: Synthetic oligonucleotide
caucaaacuauagugguca

SEQ ID NO: 993422 - RNA, 19 nt, Artificial Sequence
  Description of Artificial Sequence: Synthetic oligonucleotide
guaaggauugaaagacagg

SEQ ID NO: 993423 - RNA, 19 nt, Artificial Sequence
  Description of Artificial Sequence: Synthetic oligonucleotide
caguuaagauuuagaaaac

SEQ ID NO: 993424 - RNA, 19 nt, Artificial Sequence
  Description of Artificial Sequence: Synthetic oligonucleotide
gcuaauaguauuguuggug

SEQ ID NO: 993425 - RNA, 19 nt, Artificial Sequence
  Description of Artificial Sequence: Synthetic oligonucleotide
uguucaucugacguaugug

SEQ ID NO: 993426 - RNA, 19 nt, Artificial Sequence
  Description of Artificial Sequence: Synthetic oligonucleotide
agaagggucugguuuagaa

SEQ ID NO: 993427 - RNA, 19 nt, Artificial Sequence
  Description of Artificial Sequence: Synthetic oligonucleotide
aggaaugcaacuugaguuu

SEQ ID NO: 993428 - RNA, 19 nt, Artificial Sequence
  Description of Artificial Sequence: Synthetic oligonucleotide
cucaaaccaguguuaaauc

SEQ ID NO: 993429 - RNA, 19 nt, Artificial Sequence
  Description of Artificial Sequence: Synthetic oligonucleotide
ucaucugacguauguguuc

SEQ ID NO: 993430 - RNA, 19 nt, Artificial Sequence
  Description of Artificial Sequence: Synthetic oligonucleotide
agauggucuuugcauccac

SEQ ID NO: 993431 - RNA, 19 nt, Artificial Sequence
  Description of Artificial Sequence: Synthetic oligonucleotide
gacaugucuacgauccuug

SEQ ID NO: 993432 - RNA, 19 nt, Artificial Sequence
  Description of Artificial Sequence: Synthetic oligonucleotide
gucauagugagaugcguca

SEQ ID NO: 993433 - RNA, 19 nt, Artificial Sequence
  Description of Artificial Sequence: Synthetic oligonucleotide
caguguuaaauccaccuca

SEQ ID NO: 993434 - RNA, 19 nt, Artificial Sequence
  Description of Artificial Sequence: Synthetic oligonucleotide
uagcuggauagcuuaacaa

SEQ ID NO: 993435 - RNA, 19 nt, Artificial Sequence
  Description of Artificial Sequence: Synthetic oligonucleotide
aaauccaccucaggguuca

SEQ ID NO: 993436 - RNA, 19 nt, Artificial Sequence
  Description of Artificial Sequence: Synthetic oligonucleotide
caucugacguauguguucc

SEQ ID NO: 993437 - RNA, 19 nt, Artificial Sequence
  Description of Artificial Sequence: Synthetic oligonucleotide
cagguuaaccaaacuggag

SEQ ID NO: 993438 - RNA, 19 nt, Artificial Sequence
  Description of Artificial Sequence: Synthetic oligonucleotide
aagcaacuuuuaucaagga

SEQ ID NO: 993439 - RNA, 19 nt, Artificial Sequence
  Description of Artificial Sequence: Synthetic oligonucleotide
agucuaaaucacaagugca

SEQ ID NO: 993440 - RNA, 19 nt, Artificial Sequence
  Description of Artificial Sequence: Synthetic oligonucleotide
aguguuaaauccaccucag

SEQ ID NO: 993441 - RNA, 19 nt, Artificial Sequence
  Description of Artificial Sequence: Synthetic oligonucleotide
aaggauugaaagacaggca

SEQ ID NO: 993442 - RNA, 19 nt, Artificial Sequence
  Description of Artificial Sequence: Synthetic oligonucleotide
aggaaacguccucuacuac

SEQ ID NO: 993443 - RNA, 19 nt, Artificial Sequence
  Description of Artificial Sequence: Synthetic oligonucleotide
uaucaaggauuaauuuaau

SEQ ID NO: 993444 - RNA, 19 nt, Artificial Sequence
  Description of Artificial Sequence: Synthetic oligonucleotide
caucaccaaaucauaaaga

SEQ ID NO: 993445 - RNA, 19 nt, Artificial Sequence
  Description of Artificial Sequence: Synthetic oligonucleotide
ggaaguauuguucgaacga

SEQ ID NO: 993446 - RNA, 19 nt, Artificial Sequence
  Description of Artificial Sequence: Synthetic oligonucleotide
aucaucguucggaagcugg

SEQ ID NO: 993447 - RNA, 19 nt, Artificial Sequence
  Description of Artificial Sequence: Synthetic oligonucleotide
caaacuagcaauacacucu

SEQ ID NO: 993448 - RNA, 19 nt, Artificial Sequence
  Description of Artificial Sequence: Synthetic oligonucleotide
ucguucggaagcuggacac

SEQ ID NO: 993449 - RNA, 19 nt, Artificial Sequence
  Description of Artificial Sequence: Synthetic oligonucleotide
ucaucguucggaagcugga

SEQ ID NO: 993450 - RNA, 19 nt, Artificial Sequence
  Description of Artificial Sequence: Synthetic oligonucleotide
cuacuacugcuguaugccc

SEQ ID NO: 993451 - RNA, 19 nt, Artificial Sequence
  Description of Artificial Sequence: Synthetic oligonucleotide
gcaacagacccaaacagag

SEQ ID NO: 993452 - RNA, 19 nt, Artificial Sequence
  Description of Artificial Sequence: Synthetic oligonucleotide
guugguggcaccuauuaua

SEQ ID NO: 993453 - RNA, 19 nt, Artificial Sequence
  Description of Artificial Sequence: Synthetic oligonucleotide
uagaagggugcuuugugua

SEQ ID NO: 993454 - RNA, 19 nt, Artificial Sequence
  Description of Artificial Sequence: Synthetic oligonucleotide
cucacuguaaggauugaaa

SEQ ID NO: 993455 - RNA, 19 nt, Artificial Sequence
  Description of Artificial Sequence: Synthetic oligonucleotide
uguaucgagcccuguuuac

SEQ ID NO: 993456 - RNA, 19 nt, Artificial Sequence
  Description of Artificial Sequence: Synthetic oligonucleotide
auugaaagacaggcaguuc

SEQ ID NO: 993457 - RNA, 19 nt, Artificial Sequence
  Description of Artificial Sequence: Synthetic oligonucleotide
augaugcaaggguucuggg

SEQ ID NO: 993458 - RNA, 19 nt, Artificial Sequence
  Description of Artificial Sequence: Synthetic oligonucleotide
aaguauuguucgaacgagu

SEQ ID NO: 993459 - RNA, 19 nt, Artificial Sequence
  Description of Artificial Sequence: Synthetic oligonucleotide
uaaccaaacuggagauggc

SEQ ID NO: 993460 - RNA, 19 nt, Artificial Sequence
  Description of Artificial Sequence: Synthetic oligonucleotide
agcacuaaguaagugccca

SEQ ID NO: 993461 - RNA, 19 nt, Artificial Sequence
  Description of Artificial Sequence: Synthetic oligonucleotide
uuauagcuggauagcuuaa

SEQ ID NO: 993462 - RNA, 19 nt, Artificial Sequence
  Description of Artificial Sequence: Synthetic oligonucleotide
guguuaaauccaccucagg

SEQ ID NO: 993463 - RNA, 19 nt, Artificial Sequence
  Description of Artificial Sequence: Synthetic oligonucleotide
ucucguugugaggugacca

SEQ ID NO: 993464 - RNA, 19 nt, Artificial Sequence
  Description of Artificial Sequence: Synthetic oligonucleotide
aucauaaagaaaaggggua

SEQ ID NO: 993465 - RNA, 19 nt, Artificial Sequence
  Description of Artificial Sequence: Synthetic oligonucleotide
gagcagaugccaggaaacg

SEQ ID NO: 993466 - RNA, 19 nt, Artificial Sequence
  Description of Artificial Sequence: Synthetic oligonucleotide
gacucaaaggaaugcaacu

SEQ ID NO: 993467 - RNA, 19 nt, Artificial Sequence
  Description of Artificial Sequence: Synthetic oligonucleotide
augcgucaaacugagcauc

SEQ ID NO: 993468 - RNA, 19 nt, Artificial Sequence
  Description of Artificial Sequence: Synthetic oligonucleotide
cuuaacaaagucugugucu

SEQ ID NO: 993469 - RNA, 19 nt, Artificial Sequence
  Description of Artificial Sequence: Synthetic oligonucleotide
agaccauaaccuuccuucu

SEQ ID NO: 993470 - RNA, 19 nt, Artificial Sequence
  Description of Artificial Sequence: Synthetic oligonucleotide
aucguucggaagcuggaca

SEQ ID NO: 993471 - RNA, 19 nt, Artificial Sequence
  Description of Artificial Sequence: Synthetic oligonucleotide
uagugagaugcgucaaacu

SEQ ID NO: 993472 - RNA, 19 nt, Artificial Sequence
  Description of Artificial Sequence: Synthetic oligonucleotide
agccggugaaugcugaagu

SEQ ID NO: 993473 - RNA, 19 nt, Artificial Sequence
  Description of Artificial Sequence: Synthetic oligonucleotide
aucgagcccuguuuacuuc

SEQ ID NO: 993474 - RNA, 19 nt, Artificial Sequence
  Description of Artificial Sequence: Synthetic oligonucleotide
uauagcuggauagcuuaac

SEQ ID NO: 993475 - RNA, 19 nt, Artificial Sequence
  Description of Artificial Sequence: Synthetic oligonucleotide
gguacugacugucaguuaa

SEQ ID NO: 993476 - RNA, 19 nt, Artificial Sequence
  Description of Artificial Sequence: Synthetic oligonucleotide
aagggguauucuucuucca

SEQ ID NO: 993477 - RNA, 19 nt, Artificial Sequence
  Description of Artificial Sequence: Synthetic oligonucleotide
aaaccuccgaauucuccuu

SEQ ID NO: 993478 - RNA, 19 nt, Artificial Sequence
  Description of Artificial Sequence: Synthetic oligonucleotide
uggggcauguaucgagccc

SEQ ID NO: 993479 - RNA, 19 nt, Artificial Sequence
  Description of Artificial Sequence: Synthetic oligonucleotide
gacguauguguucccagga

SEQ ID NO: 993480 - RNA, 19 nt, Artificial Sequence
  Description of Artificial Sequence: Synthetic oligonucleotide
agucaccagugguacugac

SEQ ID NO: 993481 - RNA, 19 nt, Artificial Sequence
  Description of Artificial Sequence: Synthetic oligonucleotide
cuucugauguccacggaga

SEQ ID NO: 993482 - RNA, 19 nt, Artificial Sequence
  Description of Artificial Sequence: Synthetic oligonucleotide
uguaugcccugugaagaug

SEQ ID NO: 993483 - RNA, 19 nt, Artificial Sequence
  Description of Artificial Sequence: Synthetic oligonucleotide
uacggucaguaccacuaga

SEQ ID NO: 993484 - RNA, 19 nt, Artificial Sequence
  Description of Artificial Sequence: Synthetic oligonucleotide
aaguaagugcccacugaga

SEQ ID NO: 993485 - RNA, 19 nt, Artificial Sequence
  Description of Artificial Sequence: Synthetic oligonucleotide
caucuuacaacuugguggu

SEQ ID NO: 993486 - RNA, 19 nt, Artificial Sequence
  Description of Artificial Sequence: Synthetic oligonucleotide
uccucuacuacugcuguau

SEQ ID NO: 993487 - RNA, 19 nt, Artificial Sequence
  Description of Artificial Sequence: Synthetic oligonucleotide
ugaggugaccauugaacuu

SEQ ID NO: 993488 - RNA, 19 nt, Artificial Sequence
  Description of Artificial Sequence: Synthetic oligonucleotide
aguauuguucgaacgagua

SEQ ID NO: 993489 - RNA, 19 nt, Artificial Sequence
  Description of Artificial Sequence: Synthetic oligonucleotide
aaucacaagugcagacaug

SEQ ID NO: 993490 - RNA, 19 nt, Artificial Sequence
  Description of Artificial Sequence: Synthetic oligonucleotide
gauggugagacagguuaac

SEQ ID NO: 993491 - RNA, 19 nt, Artificial Sequence
  Description of Artificial Sequence: Synthetic oligonucleotide
uaguauuguugguggcacc

SEQ ID NO: 993492 - RNA, 19 nt, Artificial Sequence
  Description of Artificial Sequence: Synthetic oligonucleotide
ucccaggacaagccgguga

SEQ ID NO: 993493 - RNA, 19 nt, Artificial Sequence
  Description of Artificial Sequence: Synthetic oligonucleotide
ugguugaucuugauuucua

SEQ ID NO: 993494 - RNA, 19 nt, Artificial Sequence
  Description of Artificial Sequence: Synthetic oligonucleotide
guuuuguucaucugacgua

SEQ ID NO: 993495 - RNA, 19 nt, Artificial Sequence
  Description of Artificial Sequence: Synthetic oligonucleotide
ucagcugauccuguggcaa

SEQ ID NO: 993496 - RNA, 19 nt, Artificial Sequence
  Description of Artificial Sequence: Synthetic oligonucleotide
aggauuaauuuaauuuuaa

SEQ ID NO: 993497 - RNA, 19 nt, Artificial Sequence
  Description of Artificial Sequence: Synthetic oligonucleotide
guuagucauggagaguaac

SEQ ID NO: 993498 - RNA, 19 nt, Artificial Sequence
  Description of Artificial Sequence: Synthetic oligonucleotide
acuuacacaguuagucaug

SEQ ID NO: 993499 - RNA, 19 nt, Artificial Sequence
  Description of Artificial Sequence: Synthetic oligonucleotide
cucacugucauagugagau

SEQ ID NO: 993500 - RNA, 19 nt, Artificial Sequence
  Description of Artificial Sequence: Synthetic oligonucleotide
ucgagcccuguuuacuucu

SEQ ID NO: 993501 - RNA, 19 nt, Artificial Sequence
  Description of Artificial Sequence: Synthetic oligonucleotide
guuaaccaaacuggagaug

SEQ ID NO: 993502 - RNA, 19 nt, Artificial Sequence
  Description of Artificial Sequence: Synthetic oligonucleotide
aagauggucuuugcaucca

SEQ ID NO: 993503 - RNA, 19 nt, Artificial Sequence
  Description of Artificial Sequence: Synthetic oligonucleotide
ggugagacagguuaaccaa

SEQ ID NO: 993504 - RNA, 19 nt, Artificial Sequence
  Description of Artificial Sequence: Synthetic oligonucleotide
gguuacaucuggaagccac

SEQ ID NO: 993505 - RNA, 19 nt, Artificial Sequence
  Description of Artificial Sequence: Synthetic oligonucleotide
caguuagucauggagagua

SEQ ID NO: 993506 - RNA, 19 nt, Artificial Sequence
  Description of Artificial Sequence: Synthetic oligonucleotide
gcuuaacaaagucuguguc

SEQ ID NO: 993507 - RNA, 19 nt, Artificial Sequence
  Description of Artificial Sequence: Synthetic oligonucleotide
auguaucgagcccuguuua

SEQ ID NO: 993508 - RNA, 19 nt, Artificial Sequence
  Description of Artificial Sequence: Synthetic oligonucleotide
cugagcaucaucguucgga

SEQ ID NO: 993509 - RNA, 19 nt, Artificial Sequence
  Description of Artificial Sequence: Synthetic oligonucleotide
uuacacaguuagucaugga

SEQ ID NO: 993510 - RNA, 19 nt, Artificial Sequence
  Description of Artificial Sequence: Synthetic oligonucleotide
acaagugcagacaugucua

SEQ ID NO: 993511 - RNA, 19 nt, Artificial Sequence
  Description of Artificial Sequence: Synthetic oligonucleotide
cuggggcauguaucgagcc

SEQ ID NO: 993512 - RNA, 19 nt, Artificial Sequence
  Description of Artificial Sequence: Synthetic oligonucleotide
gugagaugcgucaaacuga

SEQ ID NO: 993513 - RNA, 19 nt, Artificial Sequence
  Description of Artificial Sequence: Synthetic oligonucleotide
gagcaucaucguucggaag

SEQ ID NO: 993514 - RNA, 19 nt, Artificial Sequence
  Description of Artificial Sequence: Synthetic oligonucleotide
uacaacuugguggucccaa

SEQ ID NO: 993515 - RNA, 19 nt, Artificial Sequence
  Description of Artificial Sequence: Synthetic oligonucleotide
agugcccacugagauuugg

SEQ ID NO: 993516 - RNA, 19 nt, Artificial Sequence
  Description of Artificial Sequence: Synthetic oligonucleotide
accgcgucgucaaaggcag

SEQ ID NO: 993517 - RNA, 19 nt, Artificial Sequence
  Description of Artificial Sequence: Synthetic oligonucleotide
cccaaacagagacucgugg

SEQ ID NO: 993518 - RNA, 19 nt, Artificial Sequence
  Description of Artificial Sequence: Synthetic oligonucleotide
auagcuuaacaaagucugu

SEQ ID NO: 993519 - RNA, 19 nt, Artificial Sequence
  Description of Artificial Sequence: Synthetic oligonucleotide
cuacggucaguaccacuag

SEQ ID NO: 993520 - RNA, 19 nt, Artificial Sequence
  Description of Artificial Sequence: Synthetic oligonucleotide
gaaaacaaggggagucuaa

SEQ ID NO: 993521 - RNA, 19 nt, Artificial Sequence
  Description of Artificial Sequence: Synthetic oligonucleotide
gccugguuacaucuggaag

SEQ ID NO: 993522 - RNA, 19 nt, Artificial Sequence
  Description of Artificial Sequence: Synthetic oligonucleotide
agguucauugggauuccag

SEQ ID NO: 993523 - RNA, 19 nt, Artificial Sequence
  Description of Artificial Sequence: Synthetic oligonucleotide
cugaagcacuaaguaagug

SEQ ID NO: 993524 - RNA, 19 nt, Artificial Sequence
  Description of Artificial Sequence: Synthetic oligonucleotide
uuguucgaacgaguauccc

SEQ ID NO: 993525 - RNA, 19 nt, Artificial Sequence
  Description of Artificial Sequence: Synthetic oligonucleotide
agcagaugccaggaaacgu

SEQ ID NO: 993526 - RNA, 19 nt, Artificial Sequence
  Description of Artificial Sequence: Synthetic oligonucleotide
gaugcgucaaacugagcau

SEQ ID NO: 993527 - RNA, 19 nt, Artificial Sequence
  Description of Artificial Sequence: Synthetic oligonucleotide
uugggcuaauaguauuguu

SEQ ID NO: 993528 - RNA, 19 nt, Artificial Sequence
  Description of Artificial Sequence: Synthetic oligonucleotide
cagacauucagccuacggu

SEQ ID NO: 993529 - RNA, 19 nt, Artificial Sequence
  Description of Artificial Sequence: Synthetic oligonucleotide
auacaucuuacaacuuggu

SEQ ID NO: 993530 - RNA, 19 nt, Artificial Sequence
  Description of Artificial Sequence: Synthetic oligonucleotide
gaguuucagguuucucaga

SEQ ID NO: 993531 - RNA, 19 nt, Artificial Sequence
  Description of Artificial Sequence: Synthetic oligonucleotide
acgaguaucccagaucaua

SEQ ID NO: 993532 - RNA, 19 nt, Artificial Sequence
  Description of Artificial Sequence: Synthetic oligonucleotide
aucaaacuauaguggucaa

SEQ ID NO: 993533 - RNA, 19 nt, Artificial Sequence
  Description of Artificial Sequence: Synthetic oligonucleotide
uucgaacgaguaucccaga

SEQ ID NO: 993534 - RNA, 19 nt, Artificial Sequence
  Description of Artificial Sequence: Synthetic oligonucleotide
uuccaccgcgucgucaaag

SEQ ID NO: 993535 - RNA, 19 nt, Artificial Sequence
  Description of Artificial Sequence: Synthetic oligonucleotide
aacaacucuggugggccau

SEQ ID NO: 993536 - RNA, 19 nt, Artificial Sequence
  Description of Artificial Sequence: Synthetic oligonucleotide
cuccgaauucuccuuucuc

SEQ ID NO: 993537 - RNA, 19 nt, Artificial Sequence
  Description of Artificial Sequence: Synthetic oligonucleotide
gucgucaaaggcagcuucc

SEQ ID NO: 993538 - RNA, 19 nt, Artificial Sequence
  Description of Artificial Sequence: Synthetic oligonucleotide
acugagcaucaucguucgg

SEQ ID NO: 993539 - RNA, 19 nt, Artificial Sequence
  Description of Artificial Sequence: Synthetic oligonucleotide
cagccuacggucaguacca

SEQ ID NO: 993540 - RNA, 19 nt, Artificial Sequence
  Description of Artificial Sequence: Synthetic oligonucleotide
aggugguuuuguucaucug

SEQ ID NO: 993541 - RNA, 19 nt, Artificial Sequence
  Description of Artificial Sequence: Synthetic oligonucleotide
acccaagguucauugggau

SEQ ID NO: 993542 - RNA, 19 nt, Artificial Sequence
  Description of Artificial Sequence: Synthetic oligonucleotide
gguggucccaaguucaaaa

SEQ ID NO: 993543 - RNA, 19 nt, Artificial Sequence
  Description of Artificial Sequence: Synthetic oligonucleotide
uacgauccuuguccuucug

SEQ ID NO: 993544 - RNA, 19 nt, Artificial Sequence
  Description of Artificial Sequence: Synthetic oligonucleotide
gcacuuacacaguuaguca

SEQ ID NO: 993545 - RNA, 19 nt, Artificial Sequence
  Description of Artificial Sequence: Synthetic oligonucleotide
ugguggcaccuauuauagc

SEQ ID NO: 993546 - RNA, 19 nt, Artificial Sequence
  Description of Artificial Sequence: Synthetic oligonucleotide
ucacacgcucuuccaccgc

SEQ ID NO: 993547 - RNA, 19 nt, Artificial Sequence
  Description of Artificial Sequence: Synthetic oligonucleotide
augcaaggguucuggggca

SEQ ID NO: 993548 - RNA, 19 nt, Artificial Sequence
  Description of Artificial Sequence: Synthetic oligonucleotide
ugugaccaccaugaauaaa

SEQ ID NO: 993549 - RNA, 19 nt, Artificial Sequence
  Description of Artificial Sequence: Synthetic oligonucleotide
aggggagucuaaaucacaa

SEQ ID NO: 993550 - RNA, 19 nt, Artificial Sequence
  Description of Artificial Sequence: Synthetic oligonucleotide
ggaaacguccucuacuacu

SEQ ID NO: 993551 - RNA, 19 nt, Artificial Sequence
  Description of Artificial Sequence: Synthetic oligonucleotide
caucaaccgaguggcuugg

SEQ ID NO: 993552 - RNA, 19 nt, Artificial Sequence
  Description of Artificial Sequence: Synthetic oligonucleotide
cuauuauagcuggauagcu

SEQ ID NO: 993553 - RNA, 19 nt, Artificial Sequence
  Description of Artificial Sequence: Synthetic oligonucleotide
cuggauagcuuaacaaagu

SEQ ID NO: 993554 - RNA, 19 nt, Artificial Sequence
  Description of Artificial Sequence: Synthetic oligonucleotide
agacaugucuacgauccuu

SEQ ID NO: 993555 - RNA, 19 nt, Artificial Sequence
  Description of Artificial Sequence: Synthetic oligonucleotide
ggagacguaaaucuggguu

SEQ ID NO: 993556 - RNA, 19 nt, Artificial Sequence
  Description of Artificial Sequence: Synthetic oligonucleotide
caggagaaaucagauaucu

SEQ ID NO: 993557 - RNA, 19 nt, Artificial Sequence
  Description of Artificial Sequence: Synthetic oligonucleotide
cuugaguuucagguuucuc

SEQ ID NO: 993558 - RNA, 19 nt, Artificial Sequence
  Description of Artificial Sequence: Synthetic oligonucleotide
caccgcgucgucaaaggca

SEQ ID NO: 993559 - RNA, 19 nt, Artificial Sequence
  Description of Artificial Sequence: Synthetic oligonucleotide
aagcacuuacacaguuagu

SEQ ID NO: 993560 - RNA, 19 nt, Artificial Sequence
  Description of Artificial Sequence: Synthetic oligonucleotide
gcuguaugcccugugaaga

SEQ ID NO: 993561 - RNA, 19 nt, Artificial Sequence
  Description of Artificial Sequence: Synthetic oligonucleotide
gacccaaacagagacucgu

SEQ ID NO: 993562 - RNA, 19 nt, Artificial Sequence
  Description of Artificial Sequence: Synthetic oligonucleotide
uucagccuacggucaguac

SEQ ID NO: 993563 - RNA, 19 nt, Artificial Sequence
  Description of Artificial Sequence: Synthetic oligonucleotide
gauguccacggagacguaa

SEQ ID NO: 993564 - RNA, 19 nt, Artificial Sequence
  Description of Artificial Sequence: Synthetic oligonucleotide
gggcaguuaaacugggcca

SEQ ID NO: 993565 - RNA, 19 nt, Artificial Sequence
  Description of Artificial Sequence: Synthetic oligonucleotide
acguaaaucuggguugcau

SEQ ID NO: 993566 - RNA, 19 nt, Artificial Sequence
  Description of Artificial Sequence: Synthetic oligonucleotide
cauagugagaugcgucaaa

SEQ ID NO: 993567 - RNA, 19 nt, Artificial Sequence
  Description of Artificial Sequence: Synthetic oligonucleotide
agcaucaaccgaguggcuu

SEQ ID NO: 993568 - RNA, 19 nt, Artificial Sequence
  Description of Artificial Sequence: Synthetic oligonucleotide
aggugaccauugaacuugg

SEQ ID NO: 993569 - RNA, 19 nt, Artificial Sequence
  Description of Artificial Sequence: Synthetic oligonucleotide
acugagauuuggauuccaa

SEQ ID NO: 993570 - RNA, 19 nt, Artificial Sequence
  Description of Artificial Sequence: Synthetic oligonucleotide
gguuaaccaaacuggagau

SEQ ID NO: 993571 - RNA, 19 nt, Artificial Sequence
  Description of Artificial Sequence: Synthetic oligonucleotide
caccaugaauaaacaacaa

SEQ ID NO: 993572 - RNA, 19 nt, Artificial Sequence
  Description of Artificial Sequence: Synthetic oligonucleotide
caucguucggaagcuggac

SEQ ID NO: 993573 - RNA, 19 nt, Artificial Sequence
  Description of Artificial Sequence: Synthetic oligonucleotide
gagccaaaaccuccgaauu

SEQ ID NO: 993574 - RNA, 19 nt, Artificial Sequence
  Description of Artificial Sequence: Synthetic oligonucleotide
acaacucuggugggccauc

SEQ ID NO: 993575 - RNA, 19 nt, Artificial Sequence
  Description of Artificial Sequence: Synthetic oligonucleotide
guauuguucgaacgaguau

SEQ ID NO: 993576 - RNA, 19 nt, Artificial Sequence
  Description of Artificial Sequence: Synthetic oligonucleotide
aucaaccgaguggcuuggc

SEQ ID NO: 993577 - RNA, 19 nt, Artificial Sequence
  Description of Artificial Sequence: Synthetic oligonucleotide
caaugaugcaaggguucug

SEQ ID NO: 993578 - RNA, 19 nt, Artificial Sequence
  Description of Artificial Sequence: Synthetic oligonucleotide
ucugccacacuugcaugau

SEQ ID NO: 993579 - RNA, 19 nt, Artificial Sequence
  Description of Artificial Sequence: Synthetic oligonucleotide
gaagcuggacacuggcuau

SEQ ID NO: 993580 - RNA, 19 nt, Artificial Sequence
  Description of Artificial Sequence: Synthetic oligonucleotide
aucuuacaacuuggugguc

SEQ ID NO: 993581 - RNA, 19 nt, Artificial Sequence
  Description of Artificial Sequence: Synthetic oligonucleotide
ggauagcuuaacaaagucu

SEQ ID NO: 993582 - RNA, 19 nt, Artificial Sequence
  Description of Artificial Sequence: Synthetic oligonucleotide
acagacccaaacagagacu

SEQ ID NO: 993583 - RNA, 19 nt, Artificial Sequence
  Description of Artificial Sequence: Synthetic oligonucleotide
ggaaugcaacuugaguuuc

SEQ ID NO: 993584 - RNA, 19 nt, Artificial Sequence
  Description of Artificial Sequence: Synthetic oligonucleotide
aacucuggugggccaucuu

SEQ ID NO: 993585 - RNA, 19 nt, Artificial Sequence
  Description of Artificial Sequence: Synthetic oligonucleotide
caccuauuauagcuggaua

SEQ ID NO: 993586 - RNA, 19 nt, Artificial Sequence
  Description of Artificial Sequence: Synthetic oligonucleotide
ggauuccaggagaaaucag

SEQ ID NO: 993587 - RNA, 19 nt, Artificial Sequence
  Description of Artificial Sequence: Synthetic oligonucleotide
guccacggagacguaaauc

SEQ ID NO: 993588 - RNA, 19 nt, Artificial Sequence
  Description of Artificial Sequence: Synthetic oligonucleotide
auucagccuacggucagua

SEQ ID NO: 993589 - RNA, 19 nt, Artificial Sequence
  Description of Artificial Sequence: Synthetic oligonucleotide
aacgaguaucccagaucau

SEQ ID NO: 993590 - RNA, 19 nt, Artificial Sequence
  Description of Artificial Sequence: Synthetic oligonucleotide
ccuacggucaguaccacua

SEQ ID NO: 993591 - RNA, 19 nt, Artificial Sequence
  Description of Artificial Sequence: Synthetic oligonucleotide
gcaauacacucuuucucaa

SEQ ID NO: 993592 - RNA, 19 nt, Artificial Sequence
  Description of Artificial Sequence: Synthetic oligonucleotide
ccaggagaaaucagauauc

SEQ ID NO: 993593 - RNA, 19 nt, Artificial Sequence
  Description of Artificial Sequence: Synthetic oligonucleotide
acccaaacagagacucgug

SEQ ID NO: 993594 - RNA, 19 nt, Artificial Sequence
  Description of Artificial Sequence: Synthetic oligonucleotide
cauguaucgagcccuguuu

SEQ ID NO: 993595 - RNA, 19 nt, Artificial Sequence
  Description of Artificial Sequence: Synthetic oligonucleotide
cccuguuuacuucuccuuc

SEQ ID NO: 993596 - RNA, 19 nt, Artificial Sequence
  Description of Artificial Sequence: Synthetic oligonucleotide
gucucguugugaggugacc

SEQ ID NO: 993597 - RNA, 19 nt, Artificial Sequence
  Description of Artificial Sequence: Synthetic oligonucleotide
acaagccggugaaugcuga

SEQ ID NO: 993598 - RNA, 19 nt, Artificial Sequence
  Description of Artificial Sequence: Synthetic oligonucleotide
accgaguggcuuggcuugg

SEQ ID NO: 993599 - RNA, 19 nt, Artificial Sequence
  Description of Artificial Sequence: Synthetic oligonucleotide
gcaucaaacuauagugguc

SEQ ID NO: 993600 - RNA, 19 nt, Artificial Sequence
  Description of Artificial Sequence: Synthetic oligonucleotide
cuauuucaauuuucccacu

SEQ ID NO: 993601 - RNA, 19 nt, Artificial Sequence
  Description of Artificial Sequence: Synthetic oligonucleotide
ggagggguugggaucccgg

SEQ ID NO: 993602 - RNA, 19 nt, Artificial Sequence
  Description of Artificial Sequence: Synthetic oligonucleotide
aguuagucauggagaguaa

SEQ ID NO: 993603 - RNA, 19 nt, Artificial Sequence
  Description of Artificial Sequence: Synthetic oligonucleotide
ugguggucccaaguucaaa

SEQ ID NO: 993604 - RNA, 19 nt, Artificial Sequence
  Description of Artificial Sequence: Synthetic oligonucleotide
cagagacucguggagcaga

SEQ ID NO: 993605 - RNA, 19 nt, Artificial Sequence
  Description of Artificial Sequence: Synthetic oligonucleotide
gcacuaaguaagugcccac

SEQ ID NO: 993606 - RNA, 19 nt, Artificial Sequence
  Description of Artificial Sequence: Synthetic oligonucleotide
aacuagcaauacacucuuu

SEQ ID NO: 993607 - RNA, 19 nt, Artificial Sequence
  Description of Artificial Sequence: Synthetic oligonucleotide
gagaugcgucaaacugagc

SEQ ID NO: 993608 - RNA, 19 nt, Artificial Sequence
  Description of Artificial Sequence: Synthetic oligonucleotide
ccacggagacguaaaucug

SEQ ID NO: 993609 - RNA, 19 nt, Artificial Sequence
  Description of Artificial Sequence: Synthetic oligonucleotide
gacguaaaucuggguugca

SEQ ID NO: 993610 - RNA, 19 nt, Artificial Sequence
  Description of Artificial Sequence: Synthetic oligonucleotide
agggugcuuuguguaguca

SEQ ID NO: 993611 - RNA, 19 nt, Artificial Sequence
  Description of Artificial Sequence: Synthetic oligonucleotide
cuugggcuaauaguauugu

SEQ ID NO: 993612 - RNA, 19 nt, Artificial Sequence
  Description of Artificial Sequence: Synthetic oligonucleotide
agccuacggucaguaccac

SEQ ID NO: 993613 - RNA, 19 nt, Artificial Sequence
  Description of Artificial Sequence: Synthetic oligonucleotide
gccaaaaccuccgaauucu

SEQ ID NO: 993614 - RNA, 19 nt, Artificial Sequence
  Description of Artificial Sequence: Synthetic oligonucleotide
ccaaaaccuccgaauucuc

SEQ ID NO: 993615 - RNA, 19 nt, Artificial Sequence
  Description of Artificial Sequence: Synthetic oligonucleotide
cacgcucuuccaccgcguc

SEQ ID NO: 993616 - RNA, 19 nt, Artificial Sequence
  Description of Artificial Sequence: Synthetic oligonucleotide
cgaacgaguaucccagauc

SEQ ID NO: 993617 - RNA, 19 nt, Artificial Sequence
  Description of Artificial Sequence: Synthetic oligonucleotide
cauaaagaaaagggguauu

SEQ ID NO: 993618 - RNA, 19 nt, Artificial Sequence
  Description of Artificial Sequence: Synthetic oligonucleotide
ugauguccacggagacgua

SEQ ID NO: 993619 - RNA, 19 nt, Artificial Sequence
  Description of Artificial Sequence: Synthetic oligonucleotide
cacuaaguaagugcccacu

SEQ ID NO: 993620 - RNA, 19 nt, Artificial Sequence
  Description of Artificial Sequence: Synthetic oligonucleotide
cgaguaucccagaucauaa

SEQ ID NO: 993621 - RNA, 19 nt, Artificial Sequence
  Description of Artificial Sequence: Synthetic oligonucleotide
ggccugguuacaucuggaa

SEQ ID NO: 993622 - RNA, 19 nt, Artificial Sequence
  Description of Artificial Sequence: Synthetic oligonucleotide
ccucuacuacugcuguaug

SEQ ID NO: 993623 - RNA, 19 nt, Artificial Sequence
  Description of Artificial Sequence: Synthetic oligonucleotide
gugaaugcugaagucuuuu

SEQ ID NO: 993624 - RNA, 19 nt, Artificial Sequence
  Description of Artificial Sequence: Synthetic oligonucleotide
cgauccuuguccuucugga

SEQ ID NO: 993625 - RNA, 19 nt, Artificial Sequence
  Description of Artificial Sequence: Synthetic oligonucleotide
aagugcccacugagauuug

SEQ ID NO: 993626 - RNA, 19 nt, Artificial Sequence
  Description of Artificial Sequence: Synthetic oligonucleotide
cuacgauccuuguccuucu

SEQ ID NO: 993627 - RNA, 19 nt, Artificial Sequence
  Description of Artificial Sequence: Synthetic oligonucleotide
cucguugugaggugaccau

SEQ ID NO: 993628 - RNA, 19 nt, Artificial Sequence
  Description of Artificial Sequence: Synthetic oligonucleotide
caagccggugaaugcugaa

SEQ ID NO: 993629 - RNA, 19 nt, Artificial Sequence
  Description of Artificial Sequence: Synthetic oligonucleotide
cgucgucaaaggcagcuuc

SEQ ID NO: 993630 - RNA, 19 nt, Artificial Sequence
  Description of Artificial Sequence: Synthetic oligonucleotide
ggguugcauucuccagaag

SEQ ID NO: 993631 - RNA, 19 nt, Artificial Sequence
  Description of Artificial Sequence: Synthetic oligonucleotide
gggucaucaccaaaucaua

SEQ ID NO: 993632 - RNA, 19 nt, Artificial Sequence
  Description of Artificial Sequence: Synthetic oligonucleotide
ggggcauguaucgagcccu

SEQ ID NO: 993633 - RNA, 19 nt, Artificial Sequence
  Description of Artificial Sequence: Synthetic oligonucleotide
ccaccgcgucgucaaaggc

SEQ ID NO: 993634 - RNA, 19 nt, Artificial Sequence
  Description of Artificial Sequence: Synthetic oligonucleotide
gcaguuaaacugggccaac

SEQ ID NO: 993635 - RNA, 19 nt, Artificial Sequence
  Description of Artificial Sequence: Synthetic oligonucleotide
gccgggagggguugggauc

SEQ ID NO: 993636 - RNA, 19 nt, Artificial Sequence
  Description of Artificial Sequence: Synthetic oligonucleotide
cagucaccagugguacuga

SEQ ID NO: 993637 - RNA, 19 nt, Artificial Sequence
  Description of Artificial Sequence: Synthetic oligonucleotide
gcaccuauuauagcuggau

SEQ ID NO: 993638 - RNA, 19 nt, Artificial Sequence
  Description of Artificial Sequence: Synthetic oligonucleotide
ggcaccuauuauagcugga

SEQ ID NO: 993639 - RNA, 19 nt, Artificial Sequence
  Description of Artificial Sequence: Synthetic oligonucleotide
cccaggacaagccggugaa

SEQ ID NO: 993640 - RNA, 19 nt, Artificial Sequence
  Description of Artificial Sequence: Synthetic oligonucleotide
gcaucaucguucggaagcu

SEQ ID NO: 993641 - RNA, 19 nt, Artificial Sequence
  Description of Artificial Sequence: Synthetic oligonucleotide
cugccacacuugcaugaua

SEQ ID NO: 993642 - RNA, 19 nt, Artificial Sequence
  Description of Artificial Sequence: Synthetic oligonucleotide
gucuacgauccuuguccuu

SEQ ID NO: 993643 - RNA, 19 nt, Artificial Sequence
  Description of Artificial Sequence: Synthetic oligonucleotide
cacccauggcuugggcuaa

SEQ ID NO: 993644 - RNA, 19 nt, Artificial Sequence
  Description of Artificial Sequence: Synthetic oligonucleotide
gagcaucaaccgaguggcu

SEQ ID NO: 993645 - RNA, 19 nt, Artificial Sequence
  Description of Artificial Sequence: Synthetic oligonucleotide
ggcgagccgggagggguug

SEQ ID NO: 993646 - RNA, 19 nt, Artificial Sequence
  Description of Artificial Sequence: Synthetic oligonucleotide
caacucuggugggccaucu

SEQ ID NO: 993647 - RNA, 19 nt, Artificial Sequence
  Description of Artificial Sequence: Synthetic oligonucleotide
gccuacggucaguaccacu

SEQ ID NO: 993648 - RNA, 19 nt, Artificial Sequence
  Description of Artificial Sequence: Synthetic oligonucleotide
acccauggcuugggcuaau

SEQ ID NO: 993649 - RNA, 19 nt, Artificial Sequence
  Description of Artificial Sequence: Synthetic oligonucleotide
gcgagccgggagggguugg

SEQ ID NO: 993650 - RNA, 19 nt, Artificial Sequence
  Description of Artificial Sequence: Synthetic oligonucleotide
ggcuaucaccaggugguuu

SEQ ID NO: 993651 - RNA, 19 nt, Artificial Sequence
  Description of Artificial Sequence: Synthetic oligonucleotide
gccacacuugcaugauauu

SEQ ID NO: 993652 - RNA, 19 nt, Artificial Sequence
  Description of Artificial Sequence: Synthetic oligonucleotide
ccgcgucgucaaaggcagc

SEQ ID NO: 993653 - RNA, 19 nt, Artificial Sequence
  Description of Artificial Sequence: Synthetic oligonucleotide
cuuuuccuucaggccuggu

SEQ ID NO: 993654 - RNA, 19 nt, Artificial Sequence
  Description of Artificial Sequence: Synthetic oligonucleotide
ggcauguaucgagcccugu

SEQ ID NO: 993655 - RNA, 19 nt, Artificial Sequence
  Description of Artificial Sequence: Synthetic oligonucleotide
cgcgucgucaaaggcagcu

SEQ ID NO: 993656 - RNA, 19 nt, Artificial Sequence
  Description of Artificial Sequence: Synthetic oligonucleotide
cggagacguaaaucugggu

SEQ ID NO: 993657 - RNA, 19 nt, Artificial Sequence
  Description of Artificial Sequence: Synthetic oligonucleotide
cguucggaagcuggacacu

SEQ ID NO: 993658 - RNA, 19 nt, Artificial Sequence
  Description of Artificial Sequence: Synthetic oligonucleotide
ucuauagacaugaugaugg

SEQ ID NO: 993659 - RNA, 19 nt, Artificial Sequence
  Description of Artificial Sequence: Synthetic oligonucleotide
aguauagagauccaccucc

SEQ ID NO: 993660 - RNA, 19 nt, Artificial Sequence
  Description of Artificial Sequence: Synthetic oligonucleotide
uucucuauagacaugauga

SEQ ID NO: 993661 - RNA, 19 nt, Artificial Sequence
  Description of Artificial Sequence: Synthetic oligonucleotide
cacgauaaaacucagaggc

SEQ ID NO: 993662 - RNA, 19 nt, Artificial Sequence
  Description of Artificial Sequence: Synthetic oligonucleotide
auuaaaagccggcacaggc

SEQ ID NO: 993663 - RNA, 19 nt, Artificial Sequence
  Description of Artificial Sequence: Synthetic oligonucleotide
ucuucaauucucaugagcu

SEQ ID NO: 993664 - RNA, 19 nt, Artificial Sequence
  Description of Artificial Sequence: Synthetic oligonucleotide
aaguccaagucguauuugc

SEQ ID NO: 993665 - RNA, 19 nt, Artificial Sequence
  Description of Artificial Sequence: Synthetic oligonucleotide
aauuauguccggcgaaucg

SEQ ID NO: 993666 - RNA, 19 nt, Artificial Sequence
  Description of Artificial Sequence: Synthetic oligonucleotide
uuuggcaguauagagaucc

SEQ ID NO: 993667 - RNA, 19 nt, Artificial Sequence
  Description of Artificial Sequence: Synthetic oligonucleotide
uagagauccaccuccacgg

SEQ ID NO: 993668 - RNA, 19 nt, Artificial Sequence
  Description of Artificial Sequence: Synthetic oligonucleotide
cuuguucccagcaugagag

SEQ ID NO: 993669 - RNA, 19 nt, Artificial Sequence
  Description of Artificial Sequence: Synthetic oligonucleotide
cuuacacacagccagagac

SEQ ID NO: 993670 - RNA, 19 nt, Artificial Sequence
  Description of Artificial Sequence: Synthetic oligonucleotide
auaguuccgaacaaagucc

SEQ ID NO: 993671 - RNA, 19 nt, Artificial Sequence
  Description of Artificial Sequence: Synthetic oligonucleotide
gaugguugggaucucgagg

SEQ ID NO: 993672 - RNA, 19 nt, Artificial Sequence
  Description of Artificial Sequence: Synthetic oligonucleotide
aacuauggcaggucaggac

SEQ ID NO: 993673 - RNA, 19 nt, Artificial Sequence
  Description of Artificial Sequence: Synthetic oligonucleotide
auagacaugaugaugguug

SEQ ID NO: 993674 - RNA, 19 nt, Artificial Sequence
  Description of Artificial Sequence: Synthetic oligonucleotide
ucggaaauuauguccggcg

SEQ ID NO: 993675 - RNA, 19 nt, Artificial Sequence
  Description of Artificial Sequence: Synthetic oligonucleotide
aauucucaugagcugguug

SEQ ID NO: 993676 - RNA, 19 nt, Artificial Sequence
  Description of Artificial Sequence: Synthetic oligonucleotide
uggauuuguucucagugcc

SEQ ID NO: 993677 - RNA, 19 nt, Artificial Sequence
  Description of Artificial Sequence: Synthetic oligonucleotide
aguaacgcuguuugucucc

SEQ ID NO: 993678 - RNA, 19 nt, Artificial Sequence
  Description of Artificial Sequence: Synthetic oligonucleotide
uucuucaauucucaugagc

SEQ ID NO: 993679 - RNA, 19 nt, Artificial Sequence
  Description of Artificial Sequence: Synthetic oligonucleotide
agucguauuugccaucacg

SEQ ID NO: 993680 - RNA, 19 nt, Artificial Sequence
  Description of Artificial Sequence: Synthetic oligonucleotide
auuaguggcauccuugcca

SEQ ID NO: 993681 - RNA, 19 nt, Artificial Sequence
  Description of Artificial Sequence: Synthetic oligonucleotide
uucugggugacuuugggcu

SEQ ID NO: 993682 - RNA, 19 nt, Artificial Sequence
  Description of Artificial Sequence: Synthetic oligonucleotide
uuauuggugguacacgccu

SEQ ID NO: 993683 - RNA, 19 nt, Artificial Sequence
  Description of Artificial Sequence: Synthetic oligonucleotide
uggucuacugccuucagga

SEQ ID NO: 993684 - RNA, 19 nt, Artificial Sequence
  Description of Artificial Sequence: Synthetic oligonucleotide
aacaguugcaggccuuuuc

SEQ ID NO: 993685 - RNA, 19 nt, Artificial Sequence
  Description of Artificial Sequence: Synthetic oligonucleotide
aacggguccagagaggagg

SEQ ID NO: 993686 - RNA, 19 nt, Artificial Sequence
  Description of Artificial Sequence: Synthetic oligonucleotide
aacgcuguuugucuccauc

SEQ ID NO: 993687 - RNA, 19 nt, Artificial Sequence
  Description of Artificial Sequence: Synthetic oligonucleotide
uugaccuugagcagcaaac

SEQ ID NO: 993688 - RNA, 19 nt, Artificial Sequence
  Description of Artificial Sequence: Synthetic oligonucleotide
aagaccugagcugacgagg

SEQ ID NO: 993689 - RNA, 19 nt, Artificial Sequence
  Description of Artificial Sequence: Synthetic oligonucleotide
agagcagguaaguugaggu

SEQ ID NO: 993690 - RNA, 19 nt, Artificial Sequence
  Description of Artificial Sequence: Synthetic oligonucleotide
caauguggcgauauagggg

SEQ ID NO: 993691 - RNA, 19 nt, Artificial Sequence
  Description of Artificial Sequence: Synthetic oligonucleotide
uaaguaacgcuguuugucu

SEQ ID NO: 993692 - RNA, 19 nt, Artificial Sequence
  Description of Artificial Sequence: Synthetic oligonucleotide
gauauugggagcaaagcca

SEQ ID NO: 993693 - RNA, 19 nt, Artificial Sequence
  Description of Artificial Sequence: Synthetic oligonucleotide
aucgggaagggucagcggg

SEQ ID NO: 993694 - RNA, 19 nt, Artificial Sequence
  Description of Artificial Sequence: Synthetic oligonucleotide
ugugaacuauggcagguca

SEQ ID NO: 993695 - RNA, 19 nt, Artificial Sequence
  Description of Artificial Sequence: Synthetic oligonucleotide
aaguaacgcuguuugucuc

SEQ ID NO: 993696 - RNA, 19 nt, Artificial Sequence
  Description of Artificial Sequence: Synthetic oligonucleotide
acgcuguuugucuccaucc

SEQ ID NO: 993697 - RNA, 19 nt, Artificial Sequence
  Description of Artificial Sequence: Synthetic oligonucleotide
aggcacacuaaauaaauaa

SEQ ID NO: 993698 - RNA, 19 nt, Artificial Sequence
  Description of Artificial Sequence: Synthetic oligonucleotide
uguugauguggucuacugc

SEQ ID NO: 993699 - RNA, 19 nt, Artificial Sequence
  Description of Artificial Sequence: Synthetic oligonucleotide
ucagcgggagacuugaagu

SEQ ID NO: 993700 - RNA, 19 nt, Artificial Sequence
  Description of Artificial Sequence: Synthetic oligonucleotide
uuugccuaaguaacgcugu

SEQ ID NO: 993701 - RNA, 19 nt, Artificial Sequence
  Description of Artificial Sequence: Synthetic oligonucleotide
gagaauagacaggaaagug

SEQ ID NO: 993702 - RNA, 19 nt, Artificial Sequence
  Description of Artificial Sequence: Synthetic oligonucleotide
aaaacggguccagagagga

SEQ ID NO: 993703 - RNA, 19 nt, Artificial Sequence
  Description of Artificial Sequence: Synthetic oligonucleotide
aaauuauguccggcgaauc

SEQ ID NO: 993704 - RNA, 19 nt, Artificial Sequence
  Description of Artificial Sequence: Synthetic oligonucleotide
gaccuuuggcaguauagag

SEQ ID NO: 993705 - RNA, 19 nt, Artificial Sequence
  Description of Artificial Sequence: Synthetic oligonucleotide
uuuguucucagugccaucu

SEQ ID NO: 993706 - RNA, 19 nt, Artificial Sequence
  Description of Artificial Sequence: Synthetic oligonucleotide
uuuggguuggucaccguga

SEQ ID NO: 993707 - RNA, 19 nt, Artificial Sequence
  Description of Artificial Sequence: Synthetic oligonucleotide
agagcgaugacucaccaua

SEQ ID NO: 993708 - RNA, 19 nt, Artificial Sequence
  Description of Artificial Sequence: Synthetic oligonucleotide
guuguggcaaccaugagca

SEQ ID NO: 993709 - RNA, 19 nt, Artificial Sequence
  Description of Artificial Sequence: Synthetic oligonucleotide
ugugugguacaccucugcc

SEQ ID NO: 993710 - RNA, 19 nt, Artificial Sequence
  Description of Artificial Sequence: Synthetic oligonucleotide
uuauguccggcgaaucgag

SEQ ID NO: 993711 - RNA, 19 nt, Artificial Sequence
  Description of Artificial Sequence: Synthetic oligonucleotide
auauugggagcaaagccac

SEQ ID NO: 993712 - RNA, 19 nt, Artificial Sequence
  Description of Artificial Sequence: Synthetic oligonucleotide
cuuugccuaaguaacgcug

SEQ ID NO: 993713 - RNA, 19 nt, Artificial Sequence
  Description of Artificial Sequence: Synthetic oligonucleotide
ggauauugggagcaaagcc

SEQ ID NO: 993714 - RNA, 19 nt, Artificial Sequence
  Description of Artificial Sequence: Synthetic oligonucleotide
accacggaaagaccugagc

SEQ ID NO: 993715 - RNA, 19 nt, Artificial Sequence
  Description of Artificial Sequence: Synthetic oligonucleotide
agccaguugagcaaugugg

SEQ ID NO: 993716 - RNA, 19 nt, Artificial Sequence
  Description of Artificial Sequence: Synthetic oligonucleotide
cagccuuacacacagccag

SEQ ID NO: 993717 - RNA, 19 nt, Artificial Sequence
  Description of Artificial Sequence: Synthetic oligonucleotide
guuccgaacaaaguccugg

SEQ ID NO: 993718 - RNA, 19 nt, Artificial Sequence
  Description of Artificial Sequence: Synthetic oligonucleotide
aguugagguguucugggug

SEQ ID NO: 993719 - RNA, 19 nt, Artificial Sequence
  Description of Artificial Sequence: Synthetic oligonucleotide
augagagccaccauugauc

SEQ ID NO: 993720 - RNA, 19 nt, Artificial Sequence
  Description of Artificial Sequence: Synthetic oligonucleotide
augagcugguuguacuucg

SEQ ID NO: 993721 - RNA, 19 nt, Artificial Sequence
  Description of Artificial Sequence: Synthetic oligonucleotide
cuaaguaacgcuguuuguc

SEQ ID NO: 993722 - RNA, 19 nt, Artificial Sequence
  Description of Artificial Sequence: Synthetic oligonucleotide
acuuggaccaagcugccca

SEQ ID NO: 993723 - RNA, 19 nt, Artificial Sequence
  Description of Artificial Sequence: Synthetic oligonucleotide
ugggcucaagguaucagug

SEQ ID NO: 993724 - RNA, 19 nt, Artificial Sequence
  Description of Artificial Sequence: Synthetic oligonucleotide
uggaugccgacauuggcug

SEQ ID NO: 993725 - RNA, 19 nt, Artificial Sequence
  Description of Artificial Sequence: Synthetic oligonucleotide
aucucgaggacugcgacuc

SEQ ID NO: 993726 - RNA, 19 nt, Artificial Sequence
  Description of Artificial Sequence: Synthetic oligonucleotide
caaacuuggauuuguucuc

SEQ ID NO: 993727 - RNA, 19 nt, Artificial Sequence
  Description of Artificial Sequence: Synthetic oligonucleotide
uuucggaaauuauguccgg

SEQ ID NO: 993728 - RNA, 19 nt, Artificial Sequence
  Description of Artificial Sequence: Synthetic oligonucleotide
gaccuugagcagcaaacag

SEQ ID NO: 993729 - RNA, 19 nt, Artificial Sequence
  Description of Artificial Sequence: Synthetic oligonucleotide
cucgauacgcuuuggguug

SEQ ID NO: 993730 - RNA, 19 nt, Artificial Sequence
  Description of Artificial Sequence: Synthetic oligonucleotide
uaguuccgaacaaaguccu

SEQ ID NO: 993731 - RNA, 19 nt, Artificial Sequence
  Description of Artificial Sequence: Synthetic oligonucleotide
ugcuccaccacggaaagac

SEQ ID NO: 993732 - RNA, 19 nt, Artificial Sequence
  Description of Artificial Sequence: Synthetic oligonucleotide
gaucacauuaaaagccggc

SEQ ID NO: 993733 - RNA, 19 nt, Artificial Sequence
  Description of Artificial Sequence: Synthetic oligonucleotide
ugaugguugggaucucgag

SEQ ID NO: 993734 - RNA, 19 nt, Artificial Sequence
  Description of Artificial Sequence: Synthetic oligonucleotide
acuaucuggaugccgacau

SEQ ID NO: 993735 - RNA, 19 nt, Artificial Sequence
  Description of Artificial Sequence: Synthetic oligonucleotide
gguuguggcaaccaugagc

SEQ ID NO: 993736 - RNA, 19 nt, Artificial Sequence
  Description of Artificial Sequence: Synthetic oligonucleotide
ucaccgugaggucaucacc

SEQ ID NO: 993737 - RNA, 19 nt, Artificial Sequence
  Description of Artificial Sequence: Synthetic oligonucleotide
auacgcuuuggguugguca

SEQ ID NO: 993738 - RNA, 19 nt, Artificial Sequence
  Description of Artificial Sequence: Synthetic oligonucleotide
gaugaugguugggaucucg

SEQ ID NO: 993739 - RNA, 19 nt, Artificial Sequence
  Description of Artificial Sequence: Synthetic oligonucleotide
uacgcuuuggguuggucac

SEQ ID NO: 993740 - RNA, 19 nt, Artificial Sequence
  Description of Artificial Sequence: Synthetic oligonucleotide
uccaaggcuucacuguucu

SEQ ID NO: 993741 - RNA, 19 nt, Artificial Sequence
  Description of Artificial Sequence: Synthetic oligonucleotide
caccgugaggucaucaccc

SEQ ID NO: 993742 - RNA, 19 nt, Artificial Sequence
  Description of Artificial Sequence: Synthetic oligonucleotide
gaggacugcgacucagccg

SEQ ID NO: 993743 - RNA, 19 nt, Artificial Sequence
  Description of Artificial Sequence: Synthetic oligonucleotide
ggcgaaucgagcuucgucc

SEQ ID NO: 993744 - RNA, 19 nt, Artificial Sequence
  Description of Artificial Sequence: Synthetic oligonucleotide
acugcagcccggaaaagac

SEQ ID NO: 993745 - RNA, 19 nt, Artificial Sequence
  Description of Artificial Sequence: Synthetic oligonucleotide
gaaagaccugagcugacga

SEQ ID NO: 993746 - RNA, 19 nt, Artificial Sequence
  Description of Artificial Sequence: Synthetic oligonucleotide
aaucaccaucuuuuccgug

SEQ ID NO: 993747 - RNA, 19 nt, Artificial Sequence
  Description of Artificial Sequence: Synthetic oligonucleotide
cuucaauucucaugagcug

SEQ ID NO: 993748 - RNA, 19 nt, Artificial Sequence
  Description of Artificial Sequence: Synthetic oligonucleotide
acugauguaucgggaaggg

SEQ ID NO: 993749 - RNA, 19 nt, Artificial Sequence
  Description of Artificial Sequence: Synthetic oligonucleotide
aguccaagucguauuugcc

SEQ ID NO: 993750 - RNA, 19 nt, Artificial Sequence
  Description of Artificial Sequence: Synthetic oligonucleotide
uuaguggcauccuugccau

SEQ ID NO: 993751 - RNA, 19 nt, Artificial Sequence
  Description of Artificial Sequence: Synthetic oligonucleotide
guaucgggaagggucagcg

SEQ ID NO: 993752 - RNA, 19 nt, Artificial Sequence
  Description of Artificial Sequence: Synthetic oligonucleotide
aucacauuaaaagccggca

SEQ ID NO: 993753 - RNA, 19 nt, Artificial Sequence
  Description of Artificial Sequence: Synthetic oligonucleotide
aaguugagguguucugggu

SEQ ID NO: 993754 - RNA, 19 nt, Artificial Sequence
  Description of Artificial Sequence: Synthetic oligonucleotide
aaacuuggauuuguucuca

SEQ ID NO: 993755 - RNA, 19 nt, Artificial Sequence
  Description of Artificial Sequence: Synthetic oligonucleotide
agcgaugacucaccauaac

SEQ ID NO: 993756 - RNA, 19 nt, Artificial Sequence
  Description of Artificial Sequence: Synthetic oligonucleotide
acuuguucccagcaugaga

SEQ ID NO: 993757 - RNA, 19 nt, Artificial Sequence
  Description of Artificial Sequence: Synthetic oligonucleotide
aacuuggaccaagcugccc

SEQ ID NO: 993758 - RNA, 19 nt, Artificial Sequence
  Description of Artificial Sequence: Synthetic oligonucleotide
ucucuauagacaugaugau

SEQ ID NO: 993759 - RNA, 19 nt, Artificial Sequence
  Description of Artificial Sequence: Synthetic oligonucleotide
aagguaucagugugaacua

SEQ ID NO: 993760 - RNA, 19 nt, Artificial Sequence
  Description of Artificial Sequence: Synthetic oligonucleotide
cucuauagacaugaugaug

SEQ ID NO: 993761 - RNA, 19 nt, Artificial Sequence
  Description of Artificial Sequence: Synthetic oligonucleotide
uuggguuggucaccgugag

SEQ ID NO: 993762 - RNA, 19 nt, Artificial Sequence
  Description of Artificial Sequence: Synthetic oligonucleotide
aagucguauuugccaucac

SEQ ID NO: 993763 - RNA, 19 nt, Artificial Sequence
  Description of Artificial Sequence: Synthetic oligonucleotide
cacggaaagaccugagcug

SEQ ID NO: 993764 - RNA, 19 nt, Artificial Sequence
  Description of Artificial Sequence: Synthetic oligonucleotide
acugcgacucagccggugg

SEQ ID NO: 993765 - RNA, 19 nt, Artificial Sequence
  Description of Artificial Sequence: Synthetic oligonucleotide
auuauguccggcgaaucga

SEQ ID NO: 993766 - RNA, 19 nt, Artificial Sequence
  Description of Artificial Sequence: Synthetic oligonucleotide
cagaucuucucuauagaca

SEQ ID NO: 993767 - RNA, 19 nt, Artificial Sequence
  Description of Artificial Sequence: Synthetic oligonucleotide
guucagaccugcauggggc

SEQ ID NO: 993768 - RNA, 19 nt, Artificial Sequence
  Description of Artificial Sequence: Synthetic oligonucleotide
uauagagauccaccuccac

SEQ ID NO: 993769 - RNA, 19 nt, Artificial Sequence
  Description of Artificial Sequence: Synthetic oligonucleotide
cuuuggguuggucaccgug

SEQ ID NO: 993770 - RNA, 19 nt, Artificial Sequence
  Description of Artificial Sequence: Synthetic oligonucleotide
gcucucagcacccacuggg

SEQ ID NO: 993771 - RNA, 19 nt, Artificial Sequence
  Description of Artificial Sequence: Synthetic oligonucleotide
gucguauuugccaucacga

SEQ ID NO: 993772 - RNA, 19 nt, Artificial Sequence
  Description of Artificial Sequence: Synthetic oligonucleotide
aaagccggcacaggcagga

SEQ ID NO: 993773 - RNA, 19 nt, Artificial Sequence
  Description of Artificial Sequence: Synthetic oligonucleotide
gucagcgggagacuugaag

SEQ ID NO: 993774 - RNA, 19 nt, Artificial Sequence
  Description of Artificial Sequence: Synthetic oligonucleotide
auugggagcaaagccaccu

SEQ ID NO: 993775 - RNA, 19 nt, Artificial Sequence
  Description of Artificial Sequence: Synthetic oligonucleotide
gccuaaguaacgcuguuug

SEQ ID NO: 993776 - RNA, 19 nt, Artificial Sequence
  Description of Artificial Sequence: Synthetic oligonucleotide
cuugucgauggcuuccuuc

SEQ ID NO: 993777 - RNA, 19 nt, Artificial Sequence
  Description of Artificial Sequence: Synthetic oligonucleotide
ggcguucagaccugcaugg

SEQ ID NO: 993778 - RNA, 19 nt, Artificial Sequence
  Description of Artificial Sequence: Synthetic oligonucleotide
uucggaaauuauguccggc

SEQ ID NO: 993779 - RNA, 19 nt, Artificial Sequence
  Description of Artificial Sequence: Synthetic oligonucleotide
uugauguggucuacugccu

SEQ ID NO: 993780 - RNA, 19 nt, Artificial Sequence
  Description of Artificial Sequence: Synthetic oligonucleotide
uauaggggcaggucccucu

SEQ ID NO: 993781 - RNA, 19 nt, Artificial Sequence
  Description of Artificial Sequence: Synthetic oligonucleotide
auguccggcgaaucgagcu

SEQ ID NO: 993782 - RNA, 19 nt, Artificial Sequence
  Description of Artificial Sequence: Synthetic oligonucleotide
agcaugagagccaccauug

SEQ ID NO: 993783 - RNA, 19 nt, Artificial Sequence
  Description of Artificial Sequence: Synthetic oligonucleotide
uccacggcccgcucgauac

SEQ ID NO: 993784 - RNA, 19 nt, Artificial Sequence
  Description of Artificial Sequence: Synthetic oligonucleotide
uuugggcucaagguaucag

SEQ ID NO: 993785 - RNA, 19 nt, Artificial Sequence
  Description of Artificial Sequence: Synthetic oligonucleotide
ugagguccgaguucccagc

SEQ ID NO: 993786 - RNA, 19 nt, Artificial Sequence
  Description of Artificial Sequence: Synthetic oligonucleotide
aggcguucagaccugcaug

SEQ ID NO: 993787 - RNA, 19 nt, Artificial Sequence
  Description of Artificial Sequence: Synthetic oligonucleotide
aaagaccuuuggcaguaua

SEQ ID NO: 993788 - RNA, 19 nt, Artificial Sequence
  Description of Artificial Sequence: Synthetic oligonucleotide
agcaaacaguugcaggccu

SEQ ID NO: 993789 - RNA, 19 nt, Artificial Sequence
  Description of Artificial Sequence: Synthetic oligonucleotide
gcgauauaggggcaggucc

SEQ ID NO: 993790 - RNA, 19 nt, Artificial Sequence
  Description of Artificial Sequence: Synthetic oligonucleotide
guugggaucucgaggacug

SEQ ID NO: 993791 - RNA, 19 nt, Artificial Sequence
  Description of Artificial Sequence: Synthetic oligonucleotide
ugaccuugagcagcaaaca

SEQ ID NO: 993792 - RNA, 19 nt, Artificial Sequence
  Description of Artificial Sequence: Synthetic oligonucleotide
guccaagucguauuugcca

SEQ ID NO: 993793 - RNA, 19 nt, Artificial Sequence
  Description of Artificial Sequence: Synthetic oligonucleotide
uaucgggaagggucagcgg

SEQ ID NO: 993794 - RNA, 19 nt, Artificial Sequence
  Description of Artificial Sequence: Synthetic oligonucleotide
gcgaugacucaccauaacc

SEQ ID NO: 993795 - RNA, 19 nt, Artificial Sequence
  Description of Artificial Sequence: Synthetic oligonucleotide
uuguacuucgccaggcguu

SEQ ID NO: 993796 - RNA, 19 nt, Artificial Sequence
  Description of Artificial Sequence: Synthetic oligonucleotide
cagugugaacuauggcagg

SEQ ID NO: 993797 - RNA, 19 nt, Artificial Sequence
  Description of Artificial Sequence: Synthetic oligonucleotide
uguggcgauauaggggcag

SEQ ID NO: 993798 - RNA, 19 nt, Artificial Sequence
  Description of Artificial Sequence: Synthetic oligonucleotide
caagucgcauggcaucccg

SEQ ID NO: 993799 - RNA, 19 nt, Artificial Sequence
  Description of Artificial Sequence: Synthetic oligonucleotide
uauguccggcgaaucgagc

SEQ ID NO: 993800 - RNA, 19 nt, Artificial Sequence
  Description of Artificial Sequence: Synthetic oligonucleotide
acggaaagaccugagcuga

SEQ ID NO: 993801 - RNA, 19 nt, Artificial Sequence
  Description of Artificial Sequence: Synthetic oligonucleotide
ugggagcaaagccaccuuc

SEQ ID NO: 993802 - RNA, 19 nt, Artificial Sequence
  Description of Artificial Sequence: Synthetic oligonucleotide
ugccccaagucgcauggca

SEQ ID NO: 993803 - RNA, 19 nt, Artificial Sequence
  Description of Artificial Sequence: Synthetic oligonucleotide
ucccauaccaggucagcaa

SEQ ID NO: 993804 - RNA, 19 nt, Artificial Sequence
  Description of Artificial Sequence: Synthetic oligonucleotide
uucgccaggcguucagacc

SEQ ID NO: 993805 - RNA, 19 nt, Artificial Sequence
  Description of Artificial Sequence: Synthetic oligonucleotide
gugggaagaauggaauccc

SEQ ID NO: 993806 - RNA, 19 nt, Artificial Sequence
  Description of Artificial Sequence: Synthetic oligonucleotide
auuggccccaaacuuggau

SEQ ID NO: 993807 - RNA, 19 nt, Artificial Sequence
  Description of Artificial Sequence: Synthetic oligonucleotide
auaggggcaggucccucuc

SEQ ID NO: 993808 - RNA, 19 nt, Artificial Sequence
  Description of Artificial Sequence: Synthetic oligonucleotide
augccaaucaccaucuuuu

SEQ ID NO: 993809 - RNA, 19 nt, Artificial Sequence
  Description of Artificial Sequence: Synthetic oligonucleotide
agucgcauggcaucccgga

SEQ ID NO: 993810 - RNA, 19 nt, Artificial Sequence
  Description of Artificial Sequence: Synthetic oligonucleotide
uauagacaugaugaugguu

SEQ ID NO: 993811 - RNA, 19 nt, Artificial Sequence
  Description of Artificial Sequence: Synthetic oligonucleotide
agcaagggguuguggcaac

SEQ ID NO: 993812 - RNA, 19 nt, Artificial Sequence
  Description of Artificial Sequence: Synthetic oligonucleotide
acaggauaguuccgaacaa

SEQ ID NO: 993813 - RNA, 19 nt, Artificial Sequence
  Description of Artificial Sequence: Synthetic oligonucleotide
uggaccaagcugcccaauc

SEQ ID NO: 993814 - RNA, 19 nt, Artificial Sequence
  Description of Artificial Sequence: Synthetic oligonucleotide
gcagagggcucacagcacg

SEQ ID NO: 993815 - RNA, 19 nt, Artificial Sequence
  Description of Artificial Sequence: Synthetic oligonucleotide
gaugccgacauuggcugug

SEQ ID NO: 993816 - RNA, 19 nt, Artificial Sequence
  Description of Artificial Sequence: Synthetic oligonucleotide
gaaaagaccuuuggcagua

SEQ ID NO: 993817 - RNA, 19 nt, Artificial Sequence
  Description of Artificial Sequence: Synthetic oligonucleotide
uucaggagggugagaugga

SEQ ID NO: 993818 - RNA, 19 nt, Artificial Sequence
  Description of Artificial Sequence: Synthetic oligonucleotide
ucgaggacugcgacucagc

SEQ ID NO: 993819 - RNA, 19 nt, Artificial Sequence
  Description of Artificial Sequence: Synthetic oligonucleotide
accuugagcagcaaacagu

SEQ ID NO: 993820 - RNA, 19 nt, Artificial Sequence
  Description of Artificial Sequence: Synthetic oligonucleotide
agguaaguugagguguucu

SEQ ID NO: 993821 - RNA, 19 nt, Artificial Sequence
  Description of Artificial Sequence: Synthetic oligonucleotide
ugcgacucagccgguggcg

SEQ ID NO: 993822 - RNA, 19 nt, Artificial Sequence
  Description of Artificial Sequence: Synthetic oligonucleotide
ugauguggucuacugccuu

SEQ ID NO: 993823 - RNA, 19 nt, Artificial Sequence
  Description of Artificial Sequence: Synthetic oligonucleotide
ucgggaagggucagcggga

SEQ ID NO: 993824 - RNA, 19 nt, Artificial Sequence
  Description of Artificial Sequence: Synthetic oligonucleotide
cuucgccaggcguucagac

SEQ ID NO: 993825 - RNA, 19 nt, Artificial Sequence
  Description of Artificial Sequence: Synthetic oligonucleotide
ugagcaauguggcgauaua

SEQ ID NO: 993826 - RNA, 19 nt, Artificial Sequence
  Description of Artificial Sequence: Synthetic oligonucleotide
agagacagcaagggguugu

SEQ ID NO: 993827 - RNA, 19 nt, Artificial Sequence
  Description of Artificial Sequence: Synthetic oligonucleotide
gguaucagugugaacuaug

SEQ ID NO: 993828 - RNA, 19 nt, Artificial Sequence
  Description of Artificial Sequence: Synthetic oligonucleotide
ccggaaaagaccuuuggca

SEQ ID NO: 993829 - RNA, 19 nt, Artificial Sequence
  Description of Artificial Sequence: Synthetic oligonucleotide
uccggcgaaucgagcuucg

SEQ ID NO: 993830 - RNA, 19 nt, Artificial Sequence
  Description of Artificial Sequence: Synthetic oligonucleotide
gagguccgaguucccagcc

SEQ ID NO: 993831 - RNA, 19 nt, Artificial Sequence
  Description of Artificial Sequence: Synthetic oligonucleotide
agcacgcugggauuucgga

SEQ ID NO: 993832 - RNA, 19 nt, Artificial Sequence
  Description of Artificial Sequence: Synthetic oligonucleotide
cugcagcccggaaaagacc

SEQ ID NO: 993833 - RNA, 19 nt, Artificial Sequence
  Description of Artificial Sequence: Synthetic oligonucleotide
gugaacuauggcaggucag

SEQ ID NO: 993834 - RNA, 19 nt, Artificial Sequence
  Description of Artificial Sequence: Synthetic oligonucleotide
aagucgcauggcaucccgg

SEQ ID NO: 993835 - RNA, 19 nt, Artificial Sequence
  Description of Artificial Sequence: Synthetic oligonucleotide
agggugagauggagggucc

SEQ ID NO: 993836 - RNA, 19 nt, Artificial Sequence
  Description of Artificial Sequence: Synthetic oligonucleotide
ugcauggggccccagucuu

SEQ ID NO: 993837 - RNA, 19 nt, Artificial Sequence
  Description of Artificial Sequence: Synthetic oligonucleotide
agucuucaggcaagcagag

SEQ ID NO: 993838 - RNA, 19 nt, Artificial Sequence
  Description of Artificial Sequence: Synthetic oligonucleotide
ugagugugugguacaccuc

SEQ ID NO: 993839 - RNA, 19 nt, Artificial Sequence
  Description of Artificial Sequence: Synthetic oligonucleotide
ucgauacgcuuuggguugg

SEQ ID NO: 993840 - RNA, 19 nt, Artificial Sequence
  Description of Artificial Sequence: Synthetic oligonucleotide
acgagggcuggugcaaugg

SEQ ID NO: 993841 - RNA, 19 nt, Artificial Sequence
  Description of Artificial Sequence: Synthetic oligonucleotide
uggccaacuuguucccagc

SEQ ID NO: 993842 - RNA, 19 nt, Artificial Sequence
  Description of Artificial Sequence: Synthetic oligonucleotide
uggccccaaacuuggauuu

SEQ ID NO: 993843 - RNA, 19 nt, Artificial Sequence
  Description of Artificial Sequence: Synthetic oligonucleotide
ggaagggucagcgggagac

SEQ ID NO: 993844 - RNA, 19 nt, Artificial Sequence
  Description of Artificial Sequence: Synthetic oligonucleotide
gaucucucgggcccagauc

SEQ ID NO: 993845 - RNA, 19 nt, Artificial Sequence
  Description of Artificial Sequence: Synthetic oligonucleotide
cagcgggagacuugaaguc

SEQ ID NO: 993846 - RNA, 19 nt, Artificial Sequence
  Description of Artificial Sequence: Synthetic oligonucleotide
ucucgggcccagaucuucu

SEQ ID NO: 993847 - RNA, 19 nt, Artificial Sequence
  Description of Artificial Sequence: Synthetic oligonucleotide
acgauaaaacucagaggca

SEQ ID NO: 993848 - RNA, 19 nt, Artificial Sequence
  Description of Artificial Sequence: Synthetic oligonucleotide
cacgcugggauuucggaaa

SEQ ID NO: 993849 - RNA, 19 nt, Artificial Sequence
  Description of Artificial Sequence: Synthetic oligonucleotide
ggaaauuauguccggcgaa

SEQ ID NO: 993850 - RNA, 19 nt, Artificial Sequence
  Description of Artificial Sequence: Synthetic oligonucleotide
caucacgauaaaacucaga

SEQ ID NO: 993851 - RNA, 19 nt, Artificial Sequence
  Description of Artificial Sequence: Synthetic oligonucleotide
agacacacccaggauggca

SEQ ID NO: 993852 - RNA, 19 nt, Artificial Sequence
  Description of Artificial Sequence: Synthetic oligonucleotide
gauuuguucucagugccau

SEQ ID NO: 993853 - RNA, 19 nt, Artificial Sequence
  Description of Artificial Sequence: Synthetic oligonucleotide
acuuugggcucaagguauc

SEQ ID NO: 993854 - RNA, 19 nt, Artificial Sequence
  Description of Artificial Sequence: Synthetic oligonucleotide
acgcuuuggguuggucacc

SEQ ID NO: 993855 - RNA, 19 nt, Artificial Sequence
  Description of Artificial Sequence: Synthetic oligonucleotide
aaacggguccagagaggag

SEQ ID NO: 993856 - RNA, 19 nt, Artificial Sequence
  Description of Artificial Sequence: Synthetic oligonucleotide
uggcaggucaggacagcaa

SEQ ID NO: 993857 - RNA, 19 nt, Artificial Sequence
  Description of Artificial Sequence: Synthetic oligonucleotide
ccaguugagcaauguggcg

SEQ ID NO: 993858 - RNA, 19 nt, Artificial Sequence
  Description of Artificial Sequence: Synthetic oligonucleotide
uguccggcgaaucgagcuu

SEQ ID NO: 993859 - RNA, 19 nt, Artificial Sequence
  Description of Artificial Sequence: Synthetic oligonucleotide
auauaggggcaggucccuc

SEQ ID NO: 993860 - RNA, 19 nt, Artificial Sequence
  Description of Artificial Sequence: Synthetic oligonucleotide
cuggaugccgacauuggcu

SEQ ID NO: 993861 - RNA, 19 nt, Artificial Sequence
  Description of Artificial Sequence: Synthetic oligonucleotide
auuugccaucacgauaaaa

SEQ ID NO: 993862 - RNA, 19 nt, Artificial Sequence
  Description of Artificial Sequence: Synthetic oligonucleotide
uggugcaauggugguguug

SEQ ID NO: 993863 - RNA, 19 nt, Artificial Sequence
  Description of Artificial Sequence: Synthetic oligonucleotide
guauagagauccaccucca

SEQ ID NO: 993864 - RNA, 19 nt, Artificial Sequence
  Description of Artificial Sequence: Synthetic oligonucleotide
cagcacgcugggauuucgg

SEQ ID NO: 993865 - RNA, 19 nt, Artificial Sequence
  Description of Artificial Sequence: Synthetic oligonucleotide
uugccuaaguaacgcuguu

SEQ ID NO: 993866 - RNA, 19 nt, Artificial Sequence
  Description of Artificial Sequence: Synthetic oligonucleotide
gacuuugggcucaagguau

SEQ ID NO: 993867 - RNA, 19 nt, Artificial Sequence
  Description of Artificial Sequence: Synthetic oligonucleotide
guggcgauauaggggcagg

SEQ ID NO: 993868 - RNA, 19 nt, Artificial Sequence
  Description of Artificial Sequence: Synthetic oligonucleotide
ugcacgcuuggauggcuuc

SEQ ID NO: 993869 - RNA, 19 nt, Artificial Sequence
  Description of Artificial Sequence: Synthetic oligonucleotide
uuguucucagugccaucua

SEQ ID NO: 993870 - RNA, 19 nt, Artificial Sequence
  Description of Artificial Sequence: Synthetic oligonucleotide
agggguuguggcaaccaug

SEQ ID NO: 993871 - RNA, 19 nt, Artificial Sequence
  Description of Artificial Sequence: Synthetic oligonucleotide
cucaagguaucagugugaa

SEQ ID NO: 993872 - RNA, 19 nt, Artificial Sequence
  Description of Artificial Sequence: Synthetic oligonucleotide
uugggagcaaagccaccuu

SEQ ID NO: 993873 - RNA, 19 nt, Artificial Sequence
  Description of Artificial Sequence: Synthetic oligonucleotide
caccacggaaagaccugag

SEQ ID NO: 993874 - RNA, 19 nt, Artificial Sequence
  Description of Artificial Sequence: Synthetic oligonucleotide
gcccggaaaagaccuuugg

SEQ ID NO: 993875 - RNA, 19 nt, Artificial Sequence
  Description of Artificial Sequence: Synthetic oligonucleotide
cugcgacucagccgguggc

SEQ ID NO: 993876 - RNA, 19 nt, Artificial Sequence
  Description of Artificial Sequence: Synthetic oligonucleotide
ggaccaagcugcccaauca

SEQ ID NO: 993877 - RNA, 19 nt, Artificial Sequence
  Description of Artificial Sequence: Synthetic oligonucleotide
acggugggauucccacggg

SEQ ID NO: 993878 - RNA, 19 nt, Artificial Sequence
  Description of Artificial Sequence: Synthetic oligonucleotide
gcgaaucgagcuucguccc

SEQ ID NO: 993879 - RNA, 19 nt, Artificial Sequence
  Description of Artificial Sequence: Synthetic oligonucleotide
ggaucucgaggacugcgac

SEQ ID NO: 993880 - RNA, 19 nt, Artificial Sequence
  Description of Artificial Sequence: Synthetic oligonucleotide
auggcaggucaggacagca

SEQ ID NO: 993881 - RNA, 19 nt, Artificial Sequence
  Description of Artificial Sequence: Synthetic oligonucleotide
cccaaacuuggauuuguuc

SEQ ID NO: 993882 - RNA, 19 nt, Artificial Sequence
  Description of Artificial Sequence: Synthetic oligonucleotide
aggcagcgacauccaugcc

SEQ ID NO: 993883 - RNA, 19 nt, Artificial Sequence
  Description of Artificial Sequence: Synthetic oligonucleotide
ugccuaaguaacgcuguuu

SEQ ID NO: 993884 - RNA, 19 nt, Artificial Sequence
  Description of Artificial Sequence: Synthetic oligonucleotide
aaaagaccuuuggcaguau

SEQ ID NO: 993885 - RNA, 19 nt, Artificial Sequence
  Description of Artificial Sequence: Synthetic oligonucleotide
uccagucuucaggcaagca

SEQ ID NO: 993886 - RNA, 19 nt, Artificial Sequence
  Description of Artificial Sequence: Synthetic oligonucleotide
uacugccuucaggacaccu

SEQ ID NO: 993887 - RNA, 19 nt, Artificial Sequence
  Description of Artificial Sequence: Synthetic oligonucleotide
gcugugaacuuggaccaag

SEQ ID NO: 993888 - RNA, 19 nt, Artificial Sequence
  Description of Artificial Sequence: Synthetic oligonucleotide
ucucgaggacugcgacuca

SEQ ID NO: 993889 - RNA, 19 nt, Artificial Sequence
  Description of Artificial Sequence: Synthetic oligonucleotide
gggguuguggcaaccauga

SEQ ID NO: 993890 - RNA, 19 nt, Artificial Sequence
  Description of Artificial Sequence: Synthetic oligonucleotide
gauacgcuuuggguugguc

SEQ ID NO: 993891 - RNA, 19 nt, Artificial Sequence
  Description of Artificial Sequence: Synthetic oligonucleotide
aaacaguugcaggccuuuu

SEQ ID NO: 993892 - RNA, 19 nt, Artificial Sequence
  Description of Artificial Sequence: Synthetic oligonucleotide
gaucucgaggacugcgacu

SEQ ID NO: 993893 - RNA, 19 nt, Artificial Sequence
  Description of Artificial Sequence: Synthetic oligonucleotide
aggacaccuuugccuaagu

SEQ ID NO: 993894 - RNA, 19 nt, Artificial Sequence
  Description of Artificial Sequence: Synthetic oligonucleotide
uccgaguucccagccaguu

SEQ ID NO: 993895 - RNA, 19 nt, Artificial Sequence
  Description of Artificial Sequence: Synthetic oligonucleotide
gacucagccgguggcggug

SEQ ID NO: 993896 - RNA, 19 nt, Artificial Sequence
  Description of Artificial Sequence: Synthetic oligonucleotide
cguucagaccugcaugggg

SEQ ID NO: 993897 - RNA, 19 nt, Artificial Sequence
  Description of Artificial Sequence: Synthetic oligonucleotide
gagagccaccauugaucac

SEQ ID NO: 993898 - RNA, 19 nt, Artificial Sequence
  Description of Artificial Sequence: Synthetic oligonucleotide
uucucaugagcugguugua

SEQ ID NO: 993899 - RNA, 19 nt, Artificial Sequence
  Description of Artificial Sequence: Synthetic oligonucleotide
ggaaaagaccuuuggcagu

SEQ ID NO: 993900 - RNA, 19 nt, Artificial Sequence
  Description of Artificial Sequence: Synthetic oligonucleotide
cuccaccacggaaagaccu

SEQ ID NO: 993901 - RNA, 19 nt, Artificial Sequence
  Description of Artificial Sequence: Synthetic oligonucleotide
cugagcugacgagggcugg

SEQ ID NO: 993902 - RNA, 19 nt, Artificial Sequence
  Description of Artificial Sequence: Synthetic oligonucleotide
cccacuaucuggaugccga

SEQ ID NO: 993903 - RNA, 19 nt, Artificial Sequence
  Description of Artificial Sequence: Synthetic oligonucleotide
agguaucagugugaacuau

SEQ ID NO: 993904 - RNA, 19 nt, Artificial Sequence
  Description of Artificial Sequence: Synthetic oligonucleotide
ggguuggucaccgugaggu

SEQ ID NO: 993905 - RNA, 19 nt, Artificial Sequence
  Description of Artificial Sequence: Synthetic oligonucleotide
caugagagccaccauugau

SEQ ID NO: 993906 - RNA, 19 nt, Artificial Sequence
  Description of Artificial Sequence: Synthetic oligonucleotide
uggcgauauaggggcaggu

SEQ ID NO: 993907 - RNA, 19 nt, Artificial Sequence
  Description of Artificial Sequence: Synthetic oligonucleotide
acgcuuggauggcuucugu

SEQ ID NO: 993908 - RNA, 19 nt, Artificial Sequence
  Description of Artificial Sequence: Synthetic oligonucleotide
ggcauccuugccauacuug

SEQ ID NO: 993909 - RNA, 19 nt, Artificial Sequence
  Description of Artificial Sequence: Synthetic oligonucleotide
caggucaggacagcaagaa

SEQ ID NO: 993910 - RNA, 19 nt, Artificial Sequence
  Description of Artificial Sequence: Synthetic oligonucleotide
gccgacauuggcugugaac

SEQ ID NO: 993911 - RNA, 19 nt, Artificial Sequence
  Description of Artificial Sequence: Synthetic oligonucleotide
ggucuacugccuucaggac

SEQ ID NO: 993912 - RNA, 19 nt, Artificial Sequence
  Description of Artificial Sequence: Synthetic oligonucleotide
gccuuacacacagccagag

SEQ ID NO: 993913 - RNA, 19 nt, Artificial Sequence
  Description of Artificial Sequence: Synthetic oligonucleotide
acgcugggauuucggaaau

SEQ ID NO: 993914 - RNA, 19 nt, Artificial Sequence
  Description of Artificial Sequence: Synthetic oligonucleotide
caggauaguuccgaacaaa

SEQ ID NO: 993915 - RNA, 19 nt, Artificial Sequence
  Description of Artificial Sequence: Synthetic oligonucleotide
cacgcuuggauggcuucug

SEQ ID NO: 993916 - RNA, 19 nt, Artificial Sequence
  Description of Artificial Sequence: Synthetic oligonucleotide
gagcgaugacucaccauaa

SEQ ID NO: 993917 - RNA, 19 nt, Artificial Sequence
  Description of Artificial Sequence: Synthetic oligonucleotide
cacggcccgcucgauacgc

SEQ ID NO: 993918 - RNA, 19 nt, Artificial Sequence
  Description of Artificial Sequence: Synthetic oligonucleotide
gacugcgacucagccggug

SEQ ID NO: 993919 - RNA, 19 nt, Artificial Sequence
  Description of Artificial Sequence: Synthetic oligonucleotide
acugccuucaggacaccuu

SEQ ID NO: 993920 - RNA, 19 nt, Artificial Sequence
  Description of Artificial Sequence: Synthetic oligonucleotide
caagaucucucgggcccag

SEQ ID NO: 993921 - RNA, 19 nt, Artificial Sequence
  Description of Artificial Sequence: Synthetic oligonucleotide
ggguccagucuucaggcaa

SEQ ID NO: 993922 - RNA, 19 nt, Artificial Sequence
  Description of Artificial Sequence: Synthetic oligonucleotide
cuuugggcucaagguauca

SEQ ID NO: 993923 - RNA, 19 nt, Artificial Sequence
  Description of Artificial Sequence: Synthetic oligonucleotide
acuucgccaggcguucaga

SEQ ID NO: 993924 - RNA, 19 nt, Artificial Sequence
  Description of Artificial Sequence: Synthetic oligonucleotide
cucucgggcccagaucuuc

SEQ ID NO: 993925 - RNA, 19 nt, Artificial Sequence
  Description of Artificial Sequence: Synthetic oligonucleotide
gguggcggugcgguggcgg

SEQ ID NO: 993926 - RNA, 19 nt, Artificial Sequence
  Description of Artificial Sequence: Synthetic oligonucleotide
ggauuuguucucagugcca

SEQ ID NO: 993927 - RNA, 19 nt, Artificial Sequence
  Description of Artificial Sequence: Synthetic oligonucleotide
agcccggaaaagaccuuug

SEQ ID NO: 993928 - RNA, 19 nt, Artificial Sequence
  Description of Artificial Sequence: Synthetic oligonucleotide
gcaucccggaagcucucag

SEQ ID NO: 993929 - RNA, 19 nt, Artificial Sequence
  Description of Artificial Sequence: Synthetic oligonucleotide
cacuaucuggaugccgaca

SEQ ID NO: 993930 - RNA, 19 nt, Artificial Sequence
  Description of Artificial Sequence: Synthetic oligonucleotide
ccgacauuggcugugaacu

SEQ ID NO: 993931 - RNA, 19 nt, Artificial Sequence
  Description of Artificial Sequence: Synthetic oligonucleotide
ugccgacauuggcugugaa

SEQ ID NO: 993932 - RNA, 19 nt, Artificial Sequence
  Description of Artificial Sequence: Synthetic oligonucleotide
caagcugcccaaucauccu

SEQ ID NO: 993933 - RNA, 19 nt, Artificial Sequence
  Description of Artificial Sequence: Synthetic oligonucleotide
gcucgauacgcuuuggguu

SEQ ID NO: 993934 - RNA, 19 nt, Artificial Sequence
  Description of Artificial Sequence: Synthetic oligonucleotide
cccaagucgcauggcaucc

SEQ ID NO: 993935 - RNA, 19 nt, Artificial Sequence
  Description of Artificial Sequence: Synthetic oligonucleotide
ccugcauggggccccaguc

SEQ ID NO: 993936 - RNA, 19 nt, Artificial Sequence
  Description of Artificial Sequence: Synthetic oligonucleotide
gagguguucugggugacuu

SEQ ID NO: 993937 - RNA, 19 nt, Artificial Sequence
  Description of Artificial Sequence: Synthetic oligonucleotide
uaacgcuguuugucuccau

SEQ ID NO: 993938 - RNA, 19 nt, Artificial Sequence
  Description of Artificial Sequence: Synthetic oligonucleotide
ccggaagcucucagcaccc

SEQ ID NO: 993939 - RNA, 19 nt, Artificial Sequence
  Description of Artificial Sequence: Synthetic oligonucleotide
aggcaggaugagguccgag

SEQ ID NO: 993940 - RNA, 19 nt, Artificial Sequence
  Description of Artificial Sequence: Synthetic oligonucleotide
cagguaaguugagguguuc

SEQ ID NO: 993941 - RNA, 19 nt, Artificial Sequence
  Description of Artificial Sequence: Synthetic oligonucleotide
ccacggugggauucccacg

SEQ ID NO: 993942 - RNA, 19 nt, Artificial Sequence
  Description of Artificial Sequence: Synthetic oligonucleotide
ccacggaaagaccugagcu

SEQ ID NO: 993943 - RNA, 19 nt, Artificial Sequence
  Description of Artificial Sequence: Synthetic oligonucleotide
ggcaggaugagguccgagu

SEQ ID NO: 993944 - RNA, 19 nt, Artificial Sequence
  Description of Artificial Sequence: Synthetic oligonucleotide
gucgcauggcaucccggaa

SEQ ID NO: 993945 - RNA, 19 nt, Artificial Sequence
  Description of Artificial Sequence: Synthetic oligonucleotide
ggcgauauaggggcagguc

SEQ ID NO: 993946 - RNA, 19 nt, Artificial Sequence
  Description of Artificial Sequence: Synthetic oligonucleotide
ucucucgggcccagaucuu

SEQ ID NO: 993947 - RNA, 19 nt, Artificial Sequence
  Description of Artificial Sequence: Synthetic oligonucleotide
gcucacagcacgcugggau

SEQ ID NO: 993948 - RNA, 19 nt, Artificial Sequence
  Description of Artificial Sequence: Synthetic oligonucleotide
guccggcgaaucgagcuuc

SEQ ID NO: 993949 - RNA, 19 nt, Artificial Sequence
  Description of Artificial Sequence: Synthetic oligonucleotide
gcuguuugucuccaucccu

SEQ ID NO: 993950 - RNA, 19 nt, Artificial Sequence
  Description of Artificial Sequence: Synthetic oligonucleotide
uugcuccaccacggaaaga

SEQ ID NO: 993951 - RNA, 19 nt, Artificial Sequence
  Description of Artificial Sequence: Synthetic oligonucleotide
acggguccagagaggagga

SEQ ID NO: 993952 - RNA, 19 nt, Artificial Sequence
  Description of Artificial Sequence: Synthetic oligonucleotide
ccgcucgauacgcuuuggg

SEQ ID NO: 993953 - RNA, 19 nt, Artificial Sequence
  Description of Artificial Sequence: Synthetic oligonucleotide
uggggacugcagcccggaa

SEQ ID NO: 993954 - RNA, 19 nt, Artificial Sequence
  Description of Artificial Sequence: Synthetic oligonucleotide
uuggaccaagcugcccaau

SEQ ID NO: 993955 - RNA, 19 nt, Artificial Sequence
  Description of Artificial Sequence: Synthetic oligonucleotide
gcaugagagccaccauuga

SEQ ID NO: 993956 - RNA, 19 nt, Artificial Sequence
  Description of Artificial Sequence: Synthetic oligonucleotide
cguauuugccaucacgaua

SEQ ID NO: 993957 - RNA, 19 nt, Artificial Sequence
  Description of Artificial Sequence: Synthetic oligonucleotide
cagcaagggguuguggcaa

SEQ ID NO: 993958 - RNA, 19 nt, Artificial Sequence
  Description of Artificial Sequence: Synthetic oligonucleotide
augccgacauuggcuguga

SEQ ID NO: 993959 - RNA, 19 nt, Artificial Sequence
  Description of Artificial Sequence: Synthetic oligonucleotide
gcucaagguaucaguguga

SEQ ID NO: 993960 - RNA, 19 nt, Artificial Sequence
  Description of Artificial Sequence: Synthetic oligonucleotide
cauuggccccaaacuugga

SEQ ID NO: 993961 - RNA, 19 nt, Artificial Sequence
  Description of Artificial Sequence: Synthetic oligonucleotide
ccccaagucgcauggcauc

SEQ ID NO: 993962 - RNA, 19 nt, Artificial Sequence
  Description of Artificial Sequence: Synthetic oligonucleotide
gcgacucagccgguggcgg

SEQ ID NO: 993963 - RNA, 19 nt, Artificial Sequence
  Description of Artificial Sequence: Synthetic oligonucleotide
gcacgcugggauuucggaa

SEQ ID NO: 993964 - RNA, 19 nt, Artificial Sequence
  Description of Artificial Sequence: Synthetic oligonucleotide
gggcaggucccucucagcu

SEQ ID NO: 993965 - RNA, 19 nt, Artificial Sequence
  Description of Artificial Sequence: Synthetic oligonucleotide
gcguucagaccugcauggg

SEQ ID NO: 993966 - RNA, 19 nt, Artificial Sequence
  Description of Artificial Sequence: Synthetic oligonucleotide
ccacuaucuggaugccgac

SEQ ID NO: 993967 - RNA, 19 nt, Artificial Sequence
  Description of Artificial Sequence: Synthetic oligonucleotide
caguugcaggccuuuuccu

SEQ ID NO: 993968 - RNA, 19 nt, Artificial Sequence
  Description of Artificial Sequence: Synthetic oligonucleotide
ccccuugagugugugguac

SEQ ID NO: 993969 - RNA, 19 nt, Artificial Sequence
  Description of Artificial Sequence: Synthetic oligonucleotide
cggaaauuauguccggcga

SEQ ID NO: 993970 - RNA, 19 nt, Artificial Sequence
  Description of Artificial Sequence: Synthetic oligonucleotide
cugccuucaggacaccuuu

SEQ ID NO: 993971 - RNA, 19 nt, Artificial Sequence
  Description of Artificial Sequence: Synthetic oligonucleotide
gggaucucgaggacugcga

SEQ ID NO: 993972 - RNA, 19 nt, Artificial Sequence
  Description of Artificial Sequence: Synthetic oligonucleotide
gcuugcacgcuuggauggc

SEQ ID NO: 993973 - RNA, 19 nt, Artificial Sequence
  Description of Artificial Sequence: Synthetic oligonucleotide
caggcguucagaccugcau

SEQ ID NO: 993974 - RNA, 19 nt, Artificial Sequence
  Description of Artificial Sequence: Synthetic oligonucleotide
ccgaguucccagccaguug

SEQ ID NO: 993975 - RNA, 19 nt, Artificial Sequence
  Description of Artificial Sequence: Synthetic oligonucleotide
auguggcgauauaggggca

SEQ ID NO: 993976 - RNA, 19 nt, Artificial Sequence
  Description of Artificial Sequence: Synthetic oligonucleotide
cgcuuuggguuggucaccg

SEQ ID NO: 993977 - RNA, 19 nt, Artificial Sequence
  Description of Artificial Sequence: Synthetic oligonucleotide
gggcucaagguaucagugu

SEQ ID NO: 993978 - RNA, 19 nt, Artificial Sequence
  Description of Artificial Sequence: Synthetic oligonucleotide
uaguggcauccuugccaua

SEQ ID NO: 993979 - RNA, 19 nt, Artificial Sequence
  Description of Artificial Sequence: Synthetic oligonucleotide
gcccgcucgauacgcuuug

SEQ ID NO: 993980 - RNA, 19 nt, Artificial Sequence
  Description of Artificial Sequence: Synthetic oligonucleotide
gcuccaccacggaaagacc

SEQ ID NO: 993981 - RNA, 19 nt, Artificial Sequence
  Description of Artificial Sequence: Synthetic oligonucleotide
gguugggaucucgaggacu

SEQ ID NO: 993982 - RNA, 19 nt, Artificial Sequence
  Description of Artificial Sequence: Synthetic oligonucleotide
cugcauggggccccagucu

SEQ ID NO: 993983 - RNA, 19 nt, Artificial Sequence
  Description of Artificial Sequence: Synthetic oligonucleotide
gcgggagacuugaagucca

SEQ ID NO: 993984 - RNA, 19 nt, Artificial Sequence
  Description of Artificial Sequence: Synthetic oligonucleotide
cuacugccuucaggacacc

SEQ ID NO: 993985 - RNA, 19 nt, Artificial Sequence
  Description of Artificial Sequence: Synthetic oligonucleotide
ccuuacacacagccagaga

SEQ ID NO: 993986 - RNA, 19 nt, Artificial Sequence
  Description of Artificial Sequence: Synthetic oligonucleotide
gguguugauguggucuacu

SEQ ID NO: 993987 - RNA, 19 nt, Artificial Sequence
  Description of Artificial Sequence: Synthetic oligonucleotide
ugggugacuuugggcucaa

SEQ ID NO: 993988 - RNA, 19 nt, Artificial Sequence
  Description of Artificial Sequence: Synthetic oligonucleotide
ccaagucgcauggcauccc

SEQ ID NO: 993989 - RNA, 19 nt, Artificial Sequence
  Description of Artificial Sequence: Synthetic oligonucleotide
cugauguaucgggaagggu

SEQ ID NO: 993990 - RNA, 19 nt, Artificial Sequence
  Description of Artificial Sequence: Synthetic oligonucleotide
ggacugcagcccggaaaag

SEQ ID NO: 993991 - RNA, 19 nt, Artificial Sequence
  Description of Artificial Sequence: Synthetic oligonucleotide
guacuucgccaggcguuca

SEQ ID NO: 993992 - RNA, 19 nt, Artificial Sequence
  Description of Artificial Sequence: Synthetic oligonucleotide
ggccccaaacuuggauuug

SEQ ID NO: 993993 - RNA, 19 nt, Artificial Sequence
  Description of Artificial Sequence: Synthetic oligonucleotide
cuucacuguucuccaggau

SEQ ID NO: 993994 - RNA, 19 nt, Artificial Sequence
  Description of Artificial Sequence: Synthetic oligonucleotide
cuugcacgcuuggauggcu

SEQ ID NO: 993995 - RNA, 19 nt, Artificial Sequence
  Description of Artificial Sequence: Synthetic oligonucleotide
cggcgaaucgagcuucguc

SEQ ID NO: 993996 - RNA, 19 nt, Artificial Sequence
  Description of Artificial Sequence: Synthetic oligonucleotide
cagagcgaugacucaccau

SEQ ID NO: 993997 - RNA, 19 nt, Artificial Sequence
  Description of Artificial Sequence: Synthetic oligonucleotide
gggccagcuugcacgcuug

SEQ ID NO: 993998 - RNA, 19 nt, Artificial Sequence
  Description of Artificial Sequence: Synthetic oligonucleotide
gcagccagagcagguaagu

SEQ ID NO: 993999 - RNA, 19 nt, Artificial Sequence
  Description of Artificial Sequence: Synthetic oligonucleotide
guugagcaauguggcgaua

SEQ ID NO: 994000 - RNA, 19 nt, Artificial Sequence
  Description of Artificial Sequence: Synthetic oligonucleotide
ggcccagaucuucucuaua

SEQ ID NO: 994001 - RNA, 19 nt, Artificial Sequence
  Description of Artificial Sequence: Synthetic oligonucleotide
gggaagggucagcgggaga

SEQ ID NO: 994002 - RNA, 19 nt, Artificial Sequence
  Description of Artificial Sequence: Synthetic oligonucleotide
cccuugagugugugguaca

SEQ ID NO: 994003 - RNA, 19 nt, Artificial Sequence
  Description of Artificial Sequence: Synthetic oligonucleotide
cuaucuggaugccgacauu

SEQ ID NO: 994004 - RNA, 19 nt, Artificial Sequence
  Description of Artificial Sequence: Synthetic oligonucleotide
ccacggcccgcucgauacg

SEQ ID NO: 994005 - RNA, 19 nt, Artificial Sequence
  Description of Artificial Sequence: Synthetic oligonucleotide
gccaggcguucagaccugc

SEQ ID NO: 994006 - RNA, 19 nt, Artificial Sequence
  Description of Artificial Sequence: Synthetic oligonucleotide
gggugagauggagggucca

SEQ ID NO: 994007 - RNA, 19 nt, Artificial Sequence
  Description of Artificial Sequence: Synthetic oligonucleotide
acggcccgcucgauacgcu

SEQ ID NO: 994008 - RNA, 19 nt, Artificial Sequence
  Description of Artificial Sequence: Synthetic oligonucleotide
ccguguagccagccuuguc

SEQ ID NO: 994009 - RNA, 19 nt, Artificial Sequence
  Description of Artificial Sequence: Synthetic oligonucleotide
cgcucgauacgcuuugggu

SEQ ID NO: 994010 - RNA, 19 nt, Artificial Sequence
  Description of Artificial Sequence: Synthetic oligonucleotide
ggaugccgacauuggcugu

SEQ ID NO: 994011 - RNA, 19 nt, Artificial Sequence
  Description of Artificial Sequence: Synthetic oligonucleotide
caauucucaugagcugguu

SEQ ID NO: 994012 - RNA, 19 nt, Artificial Sequence
  Description of Artificial Sequence: Synthetic oligonucleotide
ggcaucccggaagcucuca

SEQ ID NO: 994013 - RNA, 19 nt, Artificial Sequence
  Description of Artificial Sequence: Synthetic oligonucleotide
cccgcucgauacgcuuugg

SEQ ID NO: 994014 - RNA, 19 nt, Artificial Sequence
  Description of Artificial Sequence: Synthetic oligonucleotide
cagcccggaaaagaccuuu

SEQ ID NO: 994015 - RNA, 19 nt, Artificial Sequence
  Description of Artificial Sequence: Synthetic oligonucleotide
gggcccagaucuucucuau

SEQ ID NO: 994016 - RNA, 19 nt, Artificial Sequence
  Description of Artificial Sequence: Synthetic oligonucleotide
caggcaggaugagguccga

SEQ ID NO: 994017 - RNA, 19 nt, Artificial Sequence
  Description of Artificial Sequence: Synthetic oligonucleotide
cgggaagggucagcgggag

SEQ ID NO: 994018 - RNA, 19 nt, Artificial Sequence
  Description of Artificial Sequence: Synthetic oligonucleotide
ccaggcguucagaccugca

SEQ ID NO: 994019 - RNA, 19 nt, Artificial Sequence
  Description of Artificial Sequence: Synthetic oligonucleotide
gggugacuuugggcucaag

SEQ ID NO: 994020 - RNA, 19 nt, Artificial Sequence
  Description of Artificial Sequence: Synthetic oligonucleotide
gcagguaaguugagguguu

SEQ ID NO: 994021 - RNA, 19 nt, Artificial Sequence
  Description of Artificial Sequence: Synthetic oligonucleotide
gcacgcuuggauggcuucu

SEQ ID NO: 994022 - RNA, 19 nt, Artificial Sequence
  Description of Artificial Sequence: Synthetic oligonucleotide
cggugggauucccacggga

SEQ ID NO: 994023 - RNA, 19 nt, Artificial Sequence
  Description of Artificial Sequence: Synthetic oligonucleotide
cagcugccccagccuuaca

SEQ ID NO: 994024 - RNA, 19 nt, Artificial Sequence
  Description of Artificial Sequence: Synthetic oligonucleotide
gccccaagucgcauggcau

SEQ ID NO: 994025 - RNA, 19 nt, Artificial Sequence
  Description of Artificial Sequence: Synthetic oligonucleotide
cgccaggcguucagaccug

SEQ ID NO: 994026 - RNA, 19 nt, Artificial Sequence
  Description of Artificial Sequence: Synthetic oligonucleotide
ggucagcgggagacuugaa

SEQ ID NO: 994027 - RNA, 19 nt, Artificial Sequence
  Description of Artificial Sequence: Synthetic oligonucleotide
ggcccgcucgauacgcuuu

SEQ ID NO: 994028 - RNA, 19 nt, Artificial Sequence
  Description of Artificial Sequence: Synthetic oligonucleotide
gcagcccggaaaagaccuu

SEQ ID NO: 994029 - RNA, 19 nt, Artificial Sequence
  Description of Artificial Sequence: Synthetic oligonucleotide
ggacugcgacucagccggu

SEQ ID NO: 994030 - RNA, 19 nt, Artificial Sequence
  Description of Artificial Sequence: Synthetic oligonucleotide
ccggcgaaucgagcuucgu

SEQ ID NO: 994031 - RNA, 19 nt, Artificial Sequence
  Description of Artificial Sequence: Synthetic oligonucleotide
cagcacccacugggaggau

SEQ ID NO: 994032 - RNA, 19 nt, Artificial Sequence
  Description of Artificial Sequence: Synthetic oligonucleotide
cgauacgcuuuggguuggu

SEQ ID NO: 994033 - RNA, 19 nt, Artificial Sequence
  Description of Artificial Sequence: Synthetic oligonucleotide
aaguucucugcucagagcc

SEQ ID NO: 994034 - RNA, 19 nt, Artificial Sequence
  Description of Artificial Sequence: Synthetic oligonucleotide
aacuaaacaaccaaguggg

SEQ ID NO: 994035 - RNA, 19 nt, Artificial Sequence
  Description of Artificial Sequence: Synthetic oligonucleotide
agagaaaacgauaaagugc

SEQ ID NO: 994036 - RNA, 19 nt, Artificial Sequence
  Description of Artificial Sequence: Synthetic oligonucleotide
aaagagaugaggcagggaa

SEQ ID NO: 994037 - RNA, 19 nt, Artificial Sequence
  Description of Artificial Sequence: Synthetic oligonucleotide
gagaaaacgauaaagugcc

SEQ ID NO: 994038 - RNA, 19 nt, Artificial Sequence
  Description of Artificial Sequence: Synthetic oligonucleotide
uauuucuccaguuaucacc

SEQ ID NO: 994039 - RNA, 19 nt, Artificial Sequence
  Description of Artificial Sequence: Synthetic oligonucleotide
uauaccagaucccaggaca

SEQ ID NO: 994040 - RNA, 19 nt, Artificial Sequence
  Description of Artificial Sequence: Synthetic oligonucleotide
uagguuuuaagaugguagg

SEQ ID NO: 994041 - RNA, 19 nt, Artificial Sequence
  Description of Artificial Sequence: Synthetic oligonucleotide
aacgauaaagugccugaac

SEQ ID NO: 994042 - RNA, 19 nt, Artificial Sequence
  Description of Artificial Sequence: Synthetic oligonucleotide
aagaguggggaucacacug

SEQ ID NO: 994043 - RNA, 19 nt, Artificial Sequence
  Description of Artificial Sequence: Synthetic oligonucleotide
agggaaauaaagccaaggg

SEQ ID NO: 994044 - RNA, 19 nt, Artificial Sequence
  Description of Artificial Sequence: Synthetic oligonucleotide
aaccaagugggacaugagg

SEQ ID NO: 994045 - RNA, 19 nt, Artificial Sequence
  Description of Artificial Sequence: Synthetic oligonucleotide
cuugcuuugagaaggcugg

SEQ ID NO: 994046 - RNA, 19 nt, Artificial Sequence
  Description of Artificial Sequence: Synthetic oligonucleotide
ugcguauucacaaagugaa

SEQ ID NO: 994047 - RNA, 19 nt, Artificial Sequence
  Description of Artificial Sequence: Synthetic oligonucleotide
uacuauaccagaucccagg

SEQ ID NO: 994048 - RNA, 19 nt, Artificial Sequence
  Description of Artificial Sequence: Synthetic oligonucleotide
aaaagaaaggguagaccgc

SEQ ID NO: 994049 - RNA, 19 nt, Artificial Sequence
  Description of Artificial Sequence: Synthetic oligonucleotide
aggagaaaaugugacaccc

SEQ ID NO: 994050 - RNA, 19 nt, Artificial Sequence
  Description of Artificial Sequence: Synthetic oligonucleotide
gaugguacuauccacuuca

SEQ ID NO: 994051 - RNA, 19 nt, Artificial Sequence
  Description of Artificial Sequence: Synthetic oligonucleotide
uacuauccacuucagaccc

SEQ ID NO: 994052 - RNA, 19 nt, Artificial Sequence
  Description of Artificial Sequence: Synthetic oligonucleotide
uuauucuuucuuagaagag

SEQ ID NO: 994053 - RNA, 19 nt, Artificial Sequence
  Description of Artificial Sequence: Synthetic oligonucleotide
uaggacaguagagaaaacg

SEQ ID NO: 994054 - RNA, 19 nt, Artificial Sequence
  Description of Artificial Sequence: Synthetic oligonucleotide
gucuguaauagcuaaggcc

SEQ ID NO: 994055 - RNA, 19 nt, Artificial Sequence
  Description of Artificial Sequence: Synthetic oligonucleotide
uguaugagccucuuggucu

SEQ ID NO: 994056 - RNA, 19 nt, Artificial Sequence
  Description of Artificial Sequence: Synthetic oligonucleotide
ucuuucuuagaagaggacc

SEQ ID NO: 994057 - RNA, 19 nt, Artificial Sequence
  Description of Artificial Sequence: Synthetic oligonucleotide
gguacuauccacuucagac

SEQ ID NO: 994058 - RNA, 19 nt, Artificial Sequence
  Description of Artificial Sequence: Synthetic oligonucleotide
agaguagguuuuaagaugg

SEQ ID NO: 994059 - RNA, 19 nt, Artificial Sequence
  Description of Artificial Sequence: Synthetic oligonucleotide
acgauaaagugccugaacu

SEQ ID NO: 994060 - RNA, 19 nt, Artificial Sequence
  Description of Artificial Sequence: Synthetic oligonucleotide
gagggaaugcuccucaacc

SEQ ID NO: 994061 - RNA, 19 nt, Artificial Sequence
  Description of Artificial Sequence: Synthetic oligonucleotide
uccacuaaccaaauggaaa

SEQ ID NO: 994062 - RNA, 19 nt, Artificial Sequence
  Description of Artificial Sequence: Synthetic oligonucleotide
ucggcuucugccuucaugc

SEQ ID NO: 994063 - RNA, 19 nt, Artificial Sequence
  Description of Artificial Sequence: Synthetic oligonucleotide
uuucagccaggcaaagugg

SEQ ID NO: 994064 - RNA, 19 nt, Artificial Sequence
  Description of Artificial Sequence: Synthetic oligonucleotide
cuuagaagaggaccuaccc

SEQ ID NO: 994065 - RNA, 19 nt, Artificial Sequence
  Description of Artificial Sequence: Synthetic oligonucleotide
gaaaaccaauccuaggcac

SEQ ID NO: 994066 - RNA, 19 nt, Artificial Sequence
  Description of Artificial Sequence: Synthetic oligonucleotide
auuaggucaccacucacug

SEQ ID NO: 994067 - RNA, 19 nt, Artificial Sequence
  Description of Artificial Sequence: Synthetic oligonucleotide
uuuagcaggucuucaggag

SEQ ID NO: 994068 - RNA, 19 nt, Artificial Sequence
  Description of Artificial Sequence: Synthetic oligonucleotide
ucuuagaagaggaccuacc

SEQ ID NO: 994069 - RNA, 19 nt, Artificial Sequence
  Description of Artificial Sequence: Synthetic oligonucleotide
agugcguauucacaaagug

SEQ ID NO: 994070 - RNA, 19 nt, Artificial Sequence
  Description of Artificial Sequence: Synthetic oligonucleotide
cagguacuauaccagaucc

SEQ ID NO: 994071 - RNA, 19 nt, Artificial Sequence
  Description of Artificial Sequence: Synthetic oligonucleotide
agugccugaacuaaacaac

SEQ ID NO: 994072 - RNA, 19 nt, Artificial Sequence
  Description of Artificial Sequence: Synthetic oligonucleotide
gaaaacgauaaagugccug

SEQ ID NO: 994073 - RNA, 19 nt, Artificial Sequence
  Description of Artificial Sequence: Synthetic oligonucleotide
caaagaguggggaucacac

SEQ ID NO: 994074 - RNA, 19 nt, Artificial Sequence
  Description of Artificial Sequence: Synthetic oligonucleotide
aaagugccugaacuaaaca

SEQ ID NO: 994075 - RNA, 19 nt, Artificial Sequence
  Description of Artificial Sequence: Synthetic oligonucleotide
acuuuauuucuccaguuau

SEQ ID NO: 994076 - RNA, 19 nt, Artificial Sequence
  Description of Artificial Sequence: Synthetic oligonucleotide
ucugaggcgacagugaccu

SEQ ID NO: 994077 - RNA, 19 nt, Artificial Sequence
  Description of Artificial Sequence: Synthetic oligonucleotide
guacuauccacuucagacc

SEQ ID NO: 994078 - RNA, 19 nt, Artificial Sequence
  Description of Artificial Sequence: Synthetic oligonucleotide
cauuuagcaggucuucagg

SEQ ID NO: 994079 - RNA, 19 nt, Artificial Sequence
  Description of Artificial Sequence: Synthetic oligonucleotide
ggaaauaaagccaagggga

SEQ ID NO: 994080 - RNA, 19 nt, Artificial Sequence
  Description of Artificial Sequence: Synthetic oligonucleotide
uagaagaggaccuacccua

SEQ ID NO: 994081 - RNA, 19 nt, Artificial Sequence
  Description of Artificial Sequence: Synthetic oligonucleotide
agggcuugcuuugagaagg

SEQ ID NO: 994082 - RNA, 19 nt, Artificial Sequence
  Description of Artificial Sequence: Synthetic oligonucleotide
gaaaaugugacacccuuua

SEQ ID NO: 994083 - RNA, 19 nt, Artificial Sequence
  Description of Artificial Sequence: Synthetic oligonucleotide
cugacuguaccagagaaug

SEQ ID NO: 994084 - RNA, 19 nt, Artificial Sequence
  Description of Artificial Sequence: Synthetic oligonucleotide
gaucacacugcuaaggaca

SEQ ID NO: 994085 - RNA, 19 nt, Artificial Sequence
  Description of Artificial Sequence: Synthetic oligonucleotide
cuaaacaaccaagugggac

SEQ ID NO: 994086 - RNA, 19 nt, Artificial Sequence
  Description of Artificial Sequence: Synthetic oligonucleotide
uguaauagcuaaggccagg

SEQ ID NO: 994087 - RNA, 19 nt, Artificial Sequence
  Description of Artificial Sequence: Synthetic oligonucleotide
gaaaggguagaccgccagg

SEQ ID NO: 994088 - RNA, 19 nt, Artificial Sequence
  Description of Artificial Sequence: Synthetic oligonucleotide
gcgacagugaccuaagugc

SEQ ID NO: 994089 - RNA, 19 nt, Artificial Sequence
  Description of Artificial Sequence: Synthetic oligonucleotide
guaauagcuaaggccaggg

SEQ ID NO: 994090 - RNA, 19 nt, Artificial Sequence
  Description of Artificial Sequence: Synthetic oligonucleotide
aggagcauuuagcaggucu

SEQ ID NO: 994091 - RNA, 19 nt, Artificial Sequence
  Description of Artificial Sequence: Synthetic oligonucleotide
cauugaagugcguauucac

SEQ ID NO: 994092 - RNA, 19 nt, Artificial Sequence
  Description of Artificial Sequence: Synthetic oligonucleotide
cuuuauuucuccaguuauc

SEQ ID NO: 994093 - RNA, 19 nt, Artificial Sequence
  Description of Artificial Sequence: Synthetic oligonucleotide
ugcuaaggacaggacaugg

SEQ ID NO: 994094 - RNA, 19 nt, Artificial Sequence
  Description of Artificial Sequence: Synthetic oligonucleotide
cuacccuaaaacuuggcca

SEQ ID NO: 994095 - RNA, 19 nt, Artificial Sequence
  Description of Artificial Sequence: Synthetic oligonucleotide
aaagaguggggaucacacu

SEQ ID NO: 994096 - RNA, 19 nt, Artificial Sequence
  Description of Artificial Sequence: Synthetic oligonucleotide
uagccaaucaacacuuuau

SEQ ID NO: 994097 - RNA, 19 nt, Artificial Sequence
  Description of Artificial Sequence: Synthetic oligonucleotide
uggaaggacuucccuagcc

SEQ ID NO: 994098 - RNA, 19 nt, Artificial Sequence
  Description of Artificial Sequence: Synthetic oligonucleotide
uggccaaugccuguggagg

SEQ ID NO: 994099 - RNA, 19 nt, Artificial Sequence
  Description of Artificial Sequence: Synthetic oligonucleotide
aagaggaccuacccuaaaa

SEQ ID NO: 994100 - RNA, 19 nt, Artificial Sequence
  Description of Artificial Sequence: Synthetic oligonucleotide
gaagccgccgcucucuaag

SEQ ID NO: 994101 - RNA, 19 nt, Artificial Sequence
  Description of Artificial Sequence: Synthetic oligonucleotide
uugaacugggcaaggguac

SEQ ID NO: 994102 - RNA, 19 nt, Artificial Sequence
  Description of Artificial Sequence: Synthetic oligonucleotide
uucccuagccccaaucaca

SEQ ID NO: 994103 - RNA, 19 nt, Artificial Sequence
  Description of Artificial Sequence: Synthetic oligonucleotide
aaucaacacuuuauuucuc

SEQ ID NO: 994104 - RNA, 19 nt, Artificial Sequence
  Description of Artificial Sequence: Synthetic oligonucleotide
aaauaaagccaaggggagu

SEQ ID NO: 994105 - RNA, 19 nt, Artificial Sequence
  Description of Artificial Sequence: Synthetic oligonucleotide
uucuccaguuaucaccuac

SEQ ID NO: 994106 - RNA, 19 nt, Artificial Sequence
  Description of Artificial Sequence: Synthetic oligonucleotide
gaagcaagguuuccuuggc

SEQ ID NO: 994107 - RNA, 19 nt, Artificial Sequence
  Description of Artificial Sequence: Synthetic oligonucleotide
agugcuaugggacccugcu

SEQ ID NO: 994108 - RNA, 19 nt, Artificial Sequence
  Description of Artificial Sequence: Synthetic oligonucleotide
uccaguuaucaccuacaca

SEQ ID NO: 994109 - RNA, 19 nt, Artificial Sequence
  Description of Artificial Sequence: Synthetic oligonucleotide
agcucauucugccauggcu

SEQ ID NO: 994110 - RNA, 19 nt, Artificial Sequence
  Description of Artificial Sequence: Synthetic oligonucleotide
agaaaggguagaccgccag

SEQ ID NO: 994111 - RNA, 19 nt, Artificial Sequence
  Description of Artificial Sequence: Synthetic oligonucleotide
uggcucauggcucaaccac

SEQ ID NO: 994112 - RNA, 19 nt, Artificial Sequence
  Description of Artificial Sequence: Synthetic oligonucleotide
uuagucaggaagcccugcu

SEQ ID NO: 994113 - RNA, 19 nt, Artificial Sequence
  Description of Artificial Sequence: Synthetic oligonucleotide
acuauaccagaucccagga

SEQ ID NO: 994114 - RNA, 19 nt, Artificial Sequence
  Description of Artificial Sequence: Synthetic oligonucleotide
uuuguggugcagggcaucg

SEQ ID NO: 994115 - RNA, 19 nt, Artificial Sequence
  Description of Artificial Sequence: Synthetic oligonucleotide
aggcacagguacuauacca

SEQ ID NO: 994116 - RNA, 19 nt, Artificial Sequence
  Description of Artificial Sequence: Synthetic oligonucleotide
ucaaccacuguaugagccu

SEQ ID NO: 994117 - RNA, 19 nt, Artificial Sequence
  Description of Artificial Sequence: Synthetic oligonucleotide
cagggaaauaaagccaagg

SEQ ID NO: 994118 - RNA, 19 nt, Artificial Sequence
  Description of Artificial Sequence: Synthetic oligonucleotide
ucugagucuguaauagcua

SEQ ID NO: 994119 - RNA, 19 nt, Artificial Sequence
  Description of Artificial Sequence: Synthetic oligonucleotide
aagcaagugcaggcuaugg

SEQ ID NO: 994120 - RNA, 19 nt, Artificial Sequence
  Description of Artificial Sequence: Synthetic oligonucleotide
agaugguacuauccacuuc

SEQ ID NO: 994121 - RNA, 19 nt, Artificial Sequence
  Description of Artificial Sequence: Synthetic oligonucleotide
gguuuauucuuucuuagaa

SEQ ID NO: 994122 - RNA, 19 nt, Artificial Sequence
  Description of Artificial Sequence: Synthetic oligonucleotide
ucaccugcggguaaugcau

SEQ ID NO: 994123 - RNA, 19 nt, Artificial Sequence
  Description of Artificial Sequence: Synthetic oligonucleotide
acaaccaagugggacauga

SEQ ID NO: 994124 - RNA, 19 nt, Artificial Sequence
  Description of Artificial Sequence: Synthetic oligonucleotide
gauagaggccuccucaucu

SEQ ID NO: 994125 - RNA, 19 nt, Artificial Sequence
  Description of Artificial Sequence: Synthetic oligonucleotide
ugcaccaugaggguugaac

SEQ ID NO: 994126 - RNA, 19 nt, Artificial Sequence
  Description of Artificial Sequence: Synthetic oligonucleotide
cucuuggucugacuguacc

SEQ ID NO: 994127 - RNA, 19 nt, Artificial Sequence
  Description of Artificial Sequence: Synthetic oligonucleotide
cuuucuuagaagaggaccu

SEQ ID NO: 994128 - RNA, 19 nt, Artificial Sequence
  Description of Artificial Sequence: Synthetic oligonucleotide
uggaccacuuucagccagg

SEQ ID NO: 994129 - RNA, 19 nt, Artificial Sequence
  Description of Artificial Sequence: Synthetic oligonucleotide
ucauggcucaaccacugua

SEQ ID NO: 994130 - RNA, 19 nt, Artificial Sequence
  Description of Artificial Sequence: Synthetic oligonucleotide
ggaaaggagaaaaugugac

SEQ ID NO: 994131 - RNA, 19 nt, Artificial Sequence
  Description of Artificial Sequence: Synthetic oligonucleotide
ccuagccccaaucacaucc

SEQ ID NO: 994132 - RNA, 19 nt, Artificial Sequence
  Description of Artificial Sequence: Synthetic oligonucleotide
acuucccuagccccaauca

SEQ ID NO: 994133 - RNA, 19 nt, Artificial Sequence
  Description of Artificial Sequence: Synthetic oligonucleotide
agguacuauaccagauccc

SEQ ID NO: 994134 - RNA, 19 nt, Artificial Sequence
  Description of Artificial Sequence: Synthetic oligonucleotide
ugaagugcguauucacaaa

SEQ ID NO: 994135 - RNA, 19 nt, Artificial Sequence
  Description of Artificial Sequence: Synthetic oligonucleotide
agugaccuaagugcagcac

SEQ ID NO: 994136 - RNA, 19 nt, Artificial Sequence
  Description of Artificial Sequence: Synthetic oligonucleotide
caaguucucugcucagagc

SEQ ID NO: 994137 - RNA, 19 nt, Artificial Sequence
  Description of Artificial Sequence: Synthetic oligonucleotide
uuaggucaccacucacugc

SEQ ID NO: 994138 - RNA, 19 nt, Artificial Sequence
  Description of Artificial Sequence: Synthetic oligonucleotide
ugaccuaagugcagcacua

SEQ ID NO: 994139 - RNA, 19 nt, Artificial Sequence
  Description of Artificial Sequence: Synthetic oligonucleotide
gacaguagagaaaacgaua

SEQ ID NO: 994140 - RNA, 19 nt, Artificial Sequence
  Description of Artificial Sequence: Synthetic oligonucleotide
ucuugucauguuuguggug

SEQ ID NO: 994141 - RNA, 19 nt, Artificial Sequence
  Description of Artificial Sequence: Synthetic oligonucleotide
agcaagguuuccuuggcua

SEQ ID NO: 994142 - RNA, 19 nt, Artificial Sequence
  Description of Artificial Sequence: Synthetic oligonucleotide
uggucccaagcccagcucu

SEQ ID NO: 994143 - RNA, 19 nt, Artificial Sequence
  Description of Artificial Sequence: Synthetic oligonucleotide
uucuuagaagaggaccuac

SEQ ID NO: 994144 - RNA, 19 nt, Artificial Sequence
  Description of Artificial Sequence: Synthetic oligonucleotide
ugcuggcaaagugcuaugg

SEQ ID NO: 994145 - RNA, 19 nt, Artificial Sequence
  Description of Artificial Sequence: Synthetic oligonucleotide
cuggcaaagugcuauggga

SEQ ID NO: 994146 - RNA, 19 nt, Artificial Sequence
  Description of Artificial Sequence: Synthetic oligonucleotide
ugguacuauccacuucaga

SEQ ID NO: 994147 - RNA, 19 nt, Artificial Sequence
  Description of Artificial Sequence: Synthetic oligonucleotide
cuucacauccaccacugga

SEQ ID NO: 994148 - RNA, 19 nt, Artificial Sequence
  Description of Artificial Sequence: Synthetic oligonucleotide
guaugagccucuuggucug

SEQ ID NO: 994149 - RNA, 19 nt, Artificial Sequence
  Description of Artificial Sequence: Synthetic oligonucleotide
ugcaggcuauggaaggacu

SEQ ID NO: 994150 - RNA, 19 nt, Artificial Sequence
  Description of Artificial Sequence: Synthetic oligonucleotide
gaggggaugagagcugaag

SEQ ID NO: 994151 - RNA, 19 nt, Artificial Sequence
  Description of Artificial Sequence: Synthetic oligonucleotide
agccauuaggucaccacuc

SEQ ID NO: 994152 - RNA, 19 nt, Artificial Sequence
  Description of Artificial Sequence: Synthetic oligonucleotide
uuuagucaggaagcccugc

SEQ ID NO: 994153 - RNA, 19 nt, Artificial Sequence
  Description of Artificial Sequence: Synthetic oligonucleotide
ugaggcgacagugaccuaa

SEQ ID NO: 994154 - RNA, 19 nt, Artificial Sequence
  Description of Artificial Sequence: Synthetic oligonucleotide
aaacgauaaagugccugaa

SEQ ID NO: 994155 - RNA, 19 nt, Artificial Sequence
  Description of Artificial Sequence: Synthetic oligonucleotide
aaaagagaugaggcaggga

SEQ ID NO: 994156 - RNA, 19 nt, Artificial Sequence
  Description of Artificial Sequence: Synthetic oligonucleotide
cucugccucgcuuucacuc

SEQ ID NO: 994157 - RNA, 19 nt, Artificial Sequence
  Description of Artificial Sequence: Synthetic oligonucleotide
aucaccuacacagauggua

SEQ ID NO: 994158 - RNA, 19 nt, Artificial Sequence
  Description of Artificial Sequence: Synthetic oligonucleotide
gguacuauaccagauccca

SEQ ID NO: 994159 - RNA, 19 nt, Artificial Sequence
  Description of Artificial Sequence: Synthetic oligonucleotide
ucugccucgcuuucacucu

SEQ ID NO: 994160 - RNA, 19 nt, Artificial Sequence
  Description of Artificial Sequence: Synthetic oligonucleotide
cugaacuaaacaaccaagu

SEQ ID NO: 994161 - RNA, 19 nt, Artificial Sequence
  Description of Artificial Sequence: Synthetic oligonucleotide
agccaaucaacacuuuauu

SEQ ID NO: 994162 - RNA, 19 nt, Artificial Sequence
  Description of Artificial Sequence: Synthetic oligonucleotide
accuaagugcagcacuacu

SEQ ID NO: 994163 - RNA, 19 nt, Artificial Sequence
  Description of Artificial Sequence: Synthetic oligonucleotide
acuaaccaaauggaaaauu

SEQ ID NO: 994164 - RNA, 19 nt, Artificial Sequence
  Description of Artificial Sequence: Synthetic oligonucleotide
aagugcguauucacaaagu

SEQ ID NO: 994165 - RNA, 19 nt, Artificial Sequence
  Description of Artificial Sequence: Synthetic oligonucleotide
gaccuacccuaaaacuugg

SEQ ID NO: 994166 - RNA, 19 nt, Artificial Sequence
  Description of Artificial Sequence: Synthetic oligonucleotide
uggcuauagcuucuucuuc

SEQ ID NO: 994167 - RNA, 19 nt, Artificial Sequence
  Description of Artificial Sequence: Synthetic oligonucleotide
cucaacugcgguccagaag

SEQ ID NO: 994168 - RNA, 19 nt, Artificial Sequence
  Description of Artificial Sequence: Synthetic oligonucleotide
cuauaccagaucccaggac

SEQ ID NO: 994169 - RNA, 19 nt, Artificial Sequence
  Description of Artificial Sequence: Synthetic oligonucleotide
gguggcccgagacacagag

SEQ ID NO: 994170 - RNA, 19 nt, Artificial Sequence
  Description of Artificial Sequence: Synthetic oligonucleotide
ucccuagccccaaucacau

SEQ ID NO: 994171 - RNA, 19 nt, Artificial Sequence
  Description of Artificial Sequence: Synthetic oligonucleotide
uucccuugccgcuuccucu

SEQ ID NO: 994172 - RNA, 19 nt, Artificial Sequence
  Description of Artificial Sequence: Synthetic oligonucleotide
cuucccuagccccaaucac

SEQ ID NO: 994173 - RNA, 19 nt, Artificial Sequence
  Description of Artificial Sequence: Synthetic oligonucleotide
uuggucugacuguaccaga

SEQ ID NO: 994174 - RNA, 19 nt, Artificial Sequence
  Description of Artificial Sequence: Synthetic oligonucleotide
cuccaguuaucaccuacac

SEQ ID NO: 994175 - RNA, 19 nt, Artificial Sequence
  Description of Artificial Sequence: Synthetic oligonucleotide
ccuaaaacuuggccaaugc

SEQ ID NO: 994176 - RNA, 19 nt, Artificial Sequence
  Description of Artificial Sequence: Synthetic oligonucleotide
cucucuaagauagaggccu

SEQ ID NO: 994177 - RNA, 19 nt, Artificial Sequence
  Description of Artificial Sequence: Synthetic oligonucleotide
cucugagucuguaauagcu

SEQ ID NO: 994178 - RNA, 19 nt, Artificial Sequence
  Description of Artificial Sequence: Synthetic oligonucleotide
ggagucucaacugcggucc

SEQ ID NO: 994179 - RNA, 19 nt, Artificial Sequence
  Description of Artificial Sequence: Synthetic oligonucleotide
cugagucuguaauagcuaa

SEQ ID NO: 994180 - RNA, 19 nt, Artificial Sequence
  Description of Artificial Sequence: Synthetic oligonucleotide
gcggguaaugcauucuucc

SEQ ID NO: 994181 - RNA, 19 nt, Artificial Sequence
  Description of Artificial Sequence: Synthetic oligonucleotide
aaugccuguggaggaggag

SEQ ID NO: 994182 - RNA, 19 nt, Artificial Sequence
  Description of Artificial Sequence: Synthetic oligonucleotide
guuguggagugguggcccg

SEQ ID NO: 994183 - RNA, 19 nt, Artificial Sequence
  Description of Artificial Sequence: Synthetic oligonucleotide
auaccagaucccaggacag

SEQ ID NO: 994184 - RNA, 19 nt, Artificial Sequence
  Description of Artificial Sequence: Synthetic oligonucleotide
gagagcacuucacuccauc

SEQ ID NO: 994185 - RNA, 19 nt, Artificial Sequence
  Description of Artificial Sequence: Synthetic oligonucleotide
ugcggguaaugcauucuuc

SEQ ID NO: 994186 - RNA, 19 nt, Artificial Sequence
  Description of Artificial Sequence: Synthetic oligonucleotide
gacagugaccuaagugcag

SEQ ID NO: 994187 - RNA, 19 nt, Artificial Sequence
  Description of Artificial Sequence: Synthetic oligonucleotide
gacccugccccauugaagu

SEQ ID NO: 994188 - RNA, 19 nt, Artificial Sequence
  Description of Artificial Sequence: Synthetic oligonucleotide
ucucuaagauagaggccuc

SEQ ID NO: 994189 - RNA, 19 nt, Artificial Sequence
  Description of Artificial Sequence: Synthetic oligonucleotide
cuggaccacuuucagccag

SEQ ID NO: 994190 - RNA, 19 nt, Artificial Sequence
  Description of Artificial Sequence: Synthetic oligonucleotide
uauccacuucagacccuag

SEQ ID NO: 994191 - RNA, 19 nt, Artificial Sequence
  Description of Artificial Sequence: Synthetic oligonucleotide
uggggaucacacugcuaag

SEQ ID NO: 994192 - RNA, 19 nt, Artificial Sequence
  Description of Artificial Sequence: Synthetic oligonucleotide
uguuuguggugcagggcau

SEQ ID NO: 994193 - RNA, 19 nt, Artificial Sequence
  Description of Artificial Sequence: Synthetic oligonucleotide
gcuggaggagcauuuagca

SEQ ID NO: 994194 - RNA, 19 nt, Artificial Sequence
  Description of Artificial Sequence: Synthetic oligonucleotide
gacccuagcagggagucuc

SEQ ID NO: 994195 - RNA, 19 nt, Artificial Sequence
  Description of Artificial Sequence: Synthetic oligonucleotide
agggucuucacugguccuc

SEQ ID NO: 994196 - RNA, 19 nt, Artificial Sequence
  Description of Artificial Sequence: Synthetic oligonucleotide
guacuauaccagaucccag

SEQ ID NO: 994197 - RNA, 19 nt, Artificial Sequence
  Description of Artificial Sequence: Synthetic oligonucleotide
gugcguauucacaaaguga

SEQ ID NO: 994198 - RNA, 19 nt, Artificial Sequence
  Description of Artificial Sequence: Synthetic oligonucleotide
ggaccuacccuaaaacuug

SEQ ID NO: 994199 - RNA, 19 nt, Artificial Sequence
  Description of Artificial Sequence: Synthetic oligonucleotide
ccucuucuggcucacuugg

SEQ ID NO: 994200 - RNA, 19 nt, Artificial Sequence
  Description of Artificial Sequence: Synthetic oligonucleotide
gaagcaagugcaggcuaug

SEQ ID NO: 994201 - RNA, 19 nt, Artificial Sequence
  Description of Artificial Sequence: Synthetic oligonucleotide
cuauggaaggacuucccua

SEQ ID NO: 994202 - RNA, 19 nt, Artificial Sequence
  Description of Artificial Sequence: Synthetic oligonucleotide
aggaccuacccuaaaacuu

SEQ ID NO: 994203 - RNA, 19 nt, Artificial Sequence
  Description of Artificial Sequence: Synthetic oligonucleotide
cucuaagauagaggccucc

SEQ ID NO: 994204 - RNA, 19 nt, Artificial Sequence
  Description of Artificial Sequence: Synthetic oligonucleotide
ugcagcucauucugccaug

SEQ ID NO: 994205 - RNA, 19 nt, Artificial Sequence
  Description of Artificial Sequence: Synthetic oligonucleotide
uuucuuagaagaggaccua

SEQ ID NO: 994206 - RNA, 19 nt, Artificial Sequence
  Description of Artificial Sequence: Synthetic oligonucleotide
agggagucucaacugcggu

SEQ ID NO: 994207 - RNA, 19 nt, Artificial Sequence
  Description of Artificial Sequence: Synthetic oligonucleotide
ggggaugagagcugaagca

SEQ ID NO: 994208 - RNA, 19 nt, Artificial Sequence
  Description of Artificial Sequence: Synthetic oligonucleotide
acugcgguccagaagagua

SEQ ID NO: 994209 - RNA, 19 nt, Artificial Sequence
  Description of Artificial Sequence: Synthetic oligonucleotide
agggguugaggugaguccu

SEQ ID NO: 994210 - RNA, 19 nt, Artificial Sequence
  Description of Artificial Sequence: Synthetic oligonucleotide
ggcacagguacuauaccag

SEQ ID NO: 994211 - RNA, 19 nt, Artificial Sequence
  Description of Artificial Sequence: Synthetic oligonucleotide
cauuaggucaccacucacu

SEQ ID NO: 994212 - RNA, 19 nt, Artificial Sequence
  Description of Artificial Sequence: Synthetic oligonucleotide
caaucacauccacuaacca

SEQ ID NO: 994213 - RNA, 19 nt, Artificial Sequence
  Description of Artificial Sequence: Synthetic oligonucleotide
caaccaagugggacaugag

SEQ ID NO: 994214 - RNA, 19 nt, Artificial Sequence
  Description of Artificial Sequence: Synthetic oligonucleotide
uccccagaguggcagggaa

SEQ ID NO: 994215 - RNA, 19 nt, Artificial Sequence
  Description of Artificial Sequence: Synthetic oligonucleotide
uaucaccuacacagauggu

SEQ ID NO: 994216 - RNA, 19 nt, Artificial Sequence
  Description of Artificial Sequence: Synthetic oligonucleotide
cucagaaacaucugucagu

SEQ ID NO: 994217 - RNA, 19 nt, Artificial Sequence
  Description of Artificial Sequence: Synthetic oligonucleotide
ugcugggugcagccauuag

SEQ ID NO: 994218 - RNA, 19 nt, Artificial Sequence
  Description of Artificial Sequence: Synthetic oligonucleotide
augagagcugaagcaaggu

SEQ ID NO: 994219 - RNA, 19 nt, Artificial Sequence
  Description of Artificial Sequence: Synthetic oligonucleotide
cuagccaaucaacacuuua

SEQ ID NO: 994220 - RNA, 19 nt, Artificial Sequence
  Description of Artificial Sequence: Synthetic oligonucleotide
cuccaggagagcacuucac

SEQ ID NO: 994221 - RNA, 19 nt, Artificial Sequence
  Description of Artificial Sequence: Synthetic oligonucleotide
gacuucccuagccccaauc

SEQ ID NO: 994222 - RNA, 19 nt, Artificial Sequence
  Description of Artificial Sequence: Synthetic oligonucleotide
gaggcgacagugaccuaag

SEQ ID NO: 994223 - RNA, 19 nt, Artificial Sequence
  Description of Artificial Sequence: Synthetic oligonucleotide
aggguugaacugggcaagg

SEQ ID NO: 994224 - RNA, 19 nt, Artificial Sequence
  Description of Artificial Sequence: Synthetic oligonucleotide
gagcauuuagcaggucuuc

SEQ ID NO: 994225 - RNA, 19 nt, Artificial Sequence
  Description of Artificial Sequence: Synthetic oligonucleotide
gggaucacacugcuaagga

SEQ ID NO: 994226 - RNA, 19 nt, Artificial Sequence
  Description of Artificial Sequence: Synthetic oligonucleotide
aacugcgguccagaagagu

SEQ ID NO: 994227 - RNA, 19 nt, Artificial Sequence
  Description of Artificial Sequence: Synthetic oligonucleotide
aagccgccgcucucuaaga

SEQ ID NO: 994228 - RNA, 19 nt, Artificial Sequence
  Description of Artificial Sequence: Synthetic oligonucleotide
ucuagccaaucaacacuuu

SEQ ID NO: 994229 - RNA, 19 nt, Artificial Sequence
  Description of Artificial Sequence: Synthetic oligonucleotide
uaaagccaaggggagugua

SEQ ID NO: 994230 - RNA, 19 nt, Artificial Sequence
  Description of Artificial Sequence: Synthetic oligonucleotide
gaagccccucaccucagaa

SEQ ID NO: 994231 - RNA, 19 nt, Artificial Sequence
  Description of Artificial Sequence: Synthetic oligonucleotide
gucccugaggauaggaaga

SEQ ID NO: 994232 - RNA, 19 nt, Artificial Sequence
  Description of Artificial Sequence: Synthetic oligonucleotide
ggucugaggcgacagugac

SEQ ID NO: 994233 - RNA, 19 nt, Artificial Sequence
  Description of Artificial Sequence: Synthetic oligonucleotide
aggaggggccagcucuguc

SEQ ID NO: 994234 - RNA, 19 nt, Artificial Sequence
  Description of Artificial Sequence: Synthetic oligonucleotide
cuugccgcuuccucuuguc

SEQ ID NO: 994235 - RNA, 19 nt, Artificial Sequence
  Description of Artificial Sequence: Synthetic oligonucleotide
caggcuauggaaggacuuc

SEQ ID NO: 994236 - RNA, 19 nt, Artificial Sequence
  Description of Artificial Sequence: Synthetic oligonucleotide
ccgccgcucucuaagauag

SEQ ID NO: 994237 - RNA, 19 nt, Artificial Sequence
  Description of Artificial Sequence: Synthetic oligonucleotide
gaagaggaccuacccuaaa

SEQ ID NO: 994238 - RNA, 19 nt, Artificial Sequence
  Description of Artificial Sequence: Synthetic oligonucleotide
ugccccauugaagugcgua

SEQ ID NO: 994239 - RNA, 19 nt, Artificial Sequence
  Description of Artificial Sequence: Synthetic oligonucleotide
auaaagccaaggggagugu

SEQ ID NO: 994240 - RNA, 19 nt, Artificial Sequence
  Description of Artificial Sequence: Synthetic oligonucleotide
cacuacuggccugacacca

SEQ ID NO: 994241 - RNA, 19 nt, Artificial Sequence
  Description of Artificial Sequence: Synthetic oligonucleotide
acuaaacaaccaaguggga

SEQ ID NO: 994242 - RNA, 19 nt, Artificial Sequence
  Description of Artificial Sequence: Synthetic oligonucleotide
caguuguggagugguggcc

SEQ ID NO: 994243 - RNA, 19 nt, Artificial Sequence
  Description of Artificial Sequence: Synthetic oligonucleotide
caacugcgguccagaagag

SEQ ID NO: 994244 - RNA, 19 nt, Artificial Sequence
  Description of Artificial Sequence: Synthetic oligonucleotide
aacaaccaagugggacaug

SEQ ID NO: 994245 - RNA, 19 nt, Artificial Sequence
  Description of Artificial Sequence: Synthetic oligonucleotide
ugacaccacuccagguuua

SEQ ID NO: 994246 - RNA, 19 nt, Artificial Sequence
  Description of Artificial Sequence: Synthetic oligonucleotide
gaccuaagugcagcacuac

SEQ ID NO: 994247 - RNA, 19 nt, Artificial Sequence
  Description of Artificial Sequence: Synthetic oligonucleotide
ugggugcagccauuagguc

SEQ ID NO: 994248 - RNA, 19 nt, Artificial Sequence
  Description of Artificial Sequence: Synthetic oligonucleotide
gccgcucucuaagauagag

SEQ ID NO: 994249 - RNA, 19 nt, Artificial Sequence
  Description of Artificial Sequence: Synthetic oligonucleotide
augguacuauccacuucag

SEQ ID NO: 994250 - RNA, 19 nt, Artificial Sequence
  Description of Artificial Sequence: Synthetic oligonucleotide
cauggcucaaccacuguau

SEQ ID NO: 994251 - RNA, 19 nt, Artificial Sequence
  Description of Artificial Sequence: Synthetic oligonucleotide
gcagccauuaggucaccac

SEQ ID NO: 994252 - RNA, 19 nt, Artificial Sequence
  Description of Artificial Sequence: Synthetic oligonucleotide
gccccaaucacauccacua

SEQ ID NO: 994253 - RNA, 19 nt, Artificial Sequence
  Description of Artificial Sequence: Synthetic oligonucleotide
ggcagggaaauaaagccaa

SEQ ID NO: 994254 - RNA, 19 nt, Artificial Sequence
  Description of Artificial Sequence: Synthetic oligonucleotide
ggagggaaugcuccucaac

SEQ ID NO: 994255 - RNA, 19 nt, Artificial Sequence
  Description of Artificial Sequence: Synthetic oligonucleotide
gcuaaggacaggacauggc

SEQ ID NO: 994256 - RNA, 19 nt, Artificial Sequence
  Description of Artificial Sequence: Synthetic oligonucleotide
agucucaacugcgguccag

SEQ ID NO: 994257 - RNA, 19 nt, Artificial Sequence
  Description of Artificial Sequence: Synthetic oligonucleotide
ggaggaggaguuggcaaag

SEQ ID NO: 994258 - RNA, 19 nt, Artificial Sequence
  Description of Artificial Sequence: Synthetic oligonucleotide
ccugccccauugaagugcg

SEQ ID NO: 994259 - RNA, 19 nt, Artificial Sequence
  Description of Artificial Sequence: Synthetic oligonucleotide
ccgcucucuaagauagagg

SEQ ID NO: 994260 - RNA, 19 nt, Artificial Sequence
  Description of Artificial Sequence: Synthetic oligonucleotide
gucugaggcgacagugacc

SEQ ID NO: 994261 - RNA, 19 nt, Artificial Sequence
  Description of Artificial Sequence: Synthetic oligonucleotide
cagacccuagcagggaguc

SEQ ID NO: 994262 - RNA, 19 nt, Artificial Sequence
  Description of Artificial Sequence: Synthetic oligonucleotide
ucccuugccgcuuccucuu

SEQ ID NO: 994263 - RNA, 19 nt, Artificial Sequence
  Description of Artificial Sequence: Synthetic oligonucleotide
guaccagagaauggcuguc

SEQ ID NO: 994264 - RNA, 19 nt, Artificial Sequence
  Description of Artificial Sequence: Synthetic oligonucleotide
gaccacuuucagccaggca

SEQ ID NO: 994265 - RNA, 19 nt, Artificial Sequence
  Description of Artificial Sequence: Synthetic oligonucleotide
cagcucauucugccauggc

SEQ ID NO: 994266 - RNA, 19 nt, Artificial Sequence
  Description of Artificial Sequence: Synthetic oligonucleotide
gguugaacugggcaagggu

SEQ ID NO: 994267 - RNA, 19 nt, Artificial Sequence
  Description of Artificial Sequence: Synthetic oligonucleotide
cggguaaugcauucuuccc

SEQ ID NO: 994268 - RNA, 19 nt, Artificial Sequence
  Description of Artificial Sequence: Synthetic oligonucleotide
ggguugaggugaguccugg

SEQ ID NO: 994269 - RNA, 19 nt, Artificial Sequence
  Description of Artificial Sequence: Synthetic oligonucleotide
gucucaacugcgguccaga

SEQ ID NO: 994270 - RNA, 19 nt, Artificial Sequence
  Description of Artificial Sequence: Synthetic oligonucleotide
cagccauuaggucaccacu

SEQ ID NO: 994271 - RNA, 19 nt, Artificial Sequence
  Description of Artificial Sequence: Synthetic oligonucleotide
gcuaugggacccugcugcc

SEQ ID NO: 994272 - RNA, 19 nt, Artificial Sequence
  Description of Artificial Sequence: Synthetic oligonucleotide
ggguagaccgccagggcug

SEQ ID NO: 994273 - RNA, 19 nt, Artificial Sequence
  Description of Artificial Sequence: Synthetic oligonucleotide
gggaugagagcugaagcaa

SEQ ID NO: 994274 - RNA, 19 nt, Artificial Sequence
  Description of Artificial Sequence: Synthetic oligonucleotide
auccuaggcacagguacua

SEQ ID NO: 994275 - RNA, 19 nt, Artificial Sequence
  Description of Artificial Sequence: Synthetic oligonucleotide
ggcuauggaaggacuuccc

SEQ ID NO: 994276 - RNA, 19 nt, Artificial Sequence
  Description of Artificial Sequence: Synthetic oligonucleotide
ccauuaggucaccacucac

SEQ ID NO: 994277 - RNA, 19 nt, Artificial Sequence
  Description of Artificial Sequence: Synthetic oligonucleotide
gcguauucacaaagugaag

SEQ ID NO: 994278 - RNA, 19 nt, Artificial Sequence
  Description of Artificial Sequence: Synthetic oligonucleotide
ggucugacuguaccagaga

SEQ ID NO: 994279 - RNA, 19 nt, Artificial Sequence
  Description of Artificial Sequence: Synthetic oligonucleotide
ccuagcagggagucucaac

SEQ ID NO: 994280 - RNA, 19 nt, Artificial Sequence
  Description of Artificial Sequence: Synthetic oligonucleotide
gacacccuuuagucaggaa

SEQ ID NO: 994281 - RNA, 19 nt, Artificial Sequence
  Description of Artificial Sequence: Synthetic oligonucleotide
uccuaggcacagguacuau

SEQ ID NO: 994282 - RNA, 19 nt, Artificial Sequence
  Description of Artificial Sequence: Synthetic oligonucleotide
gccaaggggaguguaggac

SEQ ID NO: 994283 - RNA, 19 nt, Artificial Sequence
  Description of Artificial Sequence: Synthetic oligonucleotide
cuggucccaagcccagcuc

SEQ ID NO: 994284 - RNA, 19 nt, Artificial Sequence
  Description of Artificial Sequence: Synthetic oligonucleotide
cuucagacccuagcaggga

SEQ ID NO: 994285 - RNA, 19 nt, Artificial Sequence
  Description of Artificial Sequence: Synthetic oligonucleotide
acuauccacuucagacccu

SEQ ID NO: 994286 - RNA, 19 nt, Artificial Sequence
  Description of Artificial Sequence: Synthetic oligonucleotide
agccgccgcucucuaagau

SEQ ID NO: 994287 - RNA, 19 nt, Artificial Sequence
  Description of Artificial Sequence: Synthetic oligonucleotide
gcagggaaauaaagccaag

SEQ ID NO: 994288 - RNA, 19 nt, Artificial Sequence
  Description of Artificial Sequence: Synthetic oligonucleotide
cauccaccacuggagagaa

SEQ ID NO: 994289 - RNA, 19 nt, Artificial Sequence
  Description of Artificial Sequence: Synthetic oligonucleotide
ggggaguguaggacaguag

SEQ ID NO: 994290 - RNA, 19 nt, Artificial Sequence
  Description of Artificial Sequence: Synthetic oligonucleotide
cagaugguacuauccacuu

SEQ ID NO: 994291 - RNA, 19 nt, Artificial Sequence
  Description of Artificial Sequence: Synthetic oligonucleotide
cccuaaaacuuggccaaug

SEQ ID NO: 994292 - RNA, 19 nt, Artificial Sequence
  Description of Artificial Sequence: Synthetic oligonucleotide
cugacaccacuccagguuu

SEQ ID NO: 994293 - RNA, 19 nt, Artificial Sequence
  Description of Artificial Sequence: Synthetic oligonucleotide
ggacaguagagaaaacgau

SEQ ID NO: 994294 - RNA, 19 nt, Artificial Sequence
  Description of Artificial Sequence: Synthetic oligonucleotide
cccugccccauugaagugc

SEQ ID NO: 994295 - RNA, 19 nt, Artificial Sequence
  Description of Artificial Sequence: Synthetic oligonucleotide
gggaagcaagugcaggcua

SEQ ID NO: 994296 - RNA, 19 nt, Artificial Sequence
  Description of Artificial Sequence: Synthetic oligonucleotide
cgacagugaccuaagugca

SEQ ID NO: 994297 - RNA, 19 nt, Artificial Sequence
  Description of Artificial Sequence: Synthetic oligonucleotide
cuacuggccugacaccacu

SEQ ID NO: 994298 - RNA, 19 nt, Artificial Sequence
  Description of Artificial Sequence: Synthetic oligonucleotide
agacccuagcagggagucu

SEQ ID NO: 994299 - RNA, 19 nt, Artificial Sequence
  Description of Artificial Sequence: Synthetic oligonucleotide
guuucagcaaguggcucau

SEQ ID NO: 994300 - RNA, 19 nt, Artificial Sequence
  Description of Artificial Sequence: Synthetic oligonucleotide
aggacauggcagggaaaua

SEQ ID NO: 994301 - RNA, 19 nt, Artificial Sequence
  Description of Artificial Sequence: Synthetic oligonucleotide
caagguuuccuuggcuaua

SEQ ID NO: 994302 - RNA, 19 nt, Artificial Sequence
  Description of Artificial Sequence: Synthetic oligonucleotide
acccuaaaacuuggccaau

SEQ ID NO: 994303 - RNA, 19 nt, Artificial Sequence
  Description of Artificial Sequence: Synthetic oligonucleotide
cgauaaagugccugaacua

SEQ ID NO: 994304 - RNA, 19 nt, Artificial Sequence
  Description of Artificial Sequence: Synthetic oligonucleotide
gagaagccgccgcucucua

SEQ ID NO: 994305 - RNA, 19 nt, Artificial Sequence
  Description of Artificial Sequence: Synthetic oligonucleotide
gaguagguuuuaagauggu

SEQ ID NO: 994306 - RNA, 19 nt, Artificial Sequence
  Description of Artificial Sequence: Synthetic oligonucleotide
gcaagguuuccuuggcuau

SEQ ID NO: 994307 - RNA, 19 nt, Artificial Sequence
  Description of Artificial Sequence: Synthetic oligonucleotide
ccacuuucagccaggcaaa

SEQ ID NO: 994308 - RNA, 19 nt, Artificial Sequence
  Description of Artificial Sequence: Synthetic oligonucleotide
gcccugcuaugccugcagc

SEQ ID NO: 994309 - RNA, 19 nt, Artificial Sequence
  Description of Artificial Sequence: Synthetic oligonucleotide
gggacccugccccauugaa

SEQ ID NO: 994310 - RNA, 19 nt, Artificial Sequence
  Description of Artificial Sequence: Synthetic oligonucleotide
gggcaucucuggucccaag

SEQ ID NO: 994311 - RNA, 19 nt, Artificial Sequence
  Description of Artificial Sequence: Synthetic oligonucleotide
aggucaccacucacugccu

SEQ ID NO: 994312 - RNA, 19 nt, Artificial Sequence
  Description of Artificial Sequence: Synthetic oligonucleotide
cacuaaccaaauggaaaau

SEQ ID NO: 994313 - RNA, 19 nt, Artificial Sequence
  Description of Artificial Sequence: Synthetic oligonucleotide
ggagcauuuagcaggucuu

SEQ ID NO: 994314 - RNA, 19 nt, Artificial Sequence
  Description of Artificial Sequence: Synthetic oligonucleotide
aguggggaucacacugcua

SEQ ID NO: 994315 - RNA, 19 nt, Artificial Sequence
  Description of Artificial Sequence: Synthetic oligonucleotide
gaggagcauuuagcagguc

SEQ ID NO: 994316 - RNA, 19 nt, Artificial Sequence
  Description of Artificial Sequence: Synthetic oligonucleotide
gcuggggacacaguagagu

SEQ ID NO: 994317 - RNA, 19 nt, Artificial Sequence
  Description of Artificial Sequence: Synthetic oligonucleotide
ccuaggcacagguacuaua

SEQ ID NO: 994318 - RNA, 19 nt, Artificial Sequence
  Description of Artificial Sequence: Synthetic oligonucleotide
acccuagcagggagucuca

SEQ ID NO: 994319 - RNA, 19 nt, Artificial Sequence
  Description of Artificial Sequence: Synthetic oligonucleotide
gacaccacuccagguuuau

SEQ ID NO: 994320 - RNA, 19 nt, Artificial Sequence
  Description of Artificial Sequence: Synthetic oligonucleotide
gggcaaggguacagugcag

SEQ ID NO: 994321 - RNA, 19 nt, Artificial Sequence
  Description of Artificial Sequence: Synthetic oligonucleotide
cucauggcucaaccacugu

SEQ ID NO: 994322 - RNA, 19 nt, Artificial Sequence
  Description of Artificial Sequence: Synthetic oligonucleotide
cugcggguaaugcauucuu

SEQ ID NO: 994323 - RNA, 19 nt, Artificial Sequence
  Description of Artificial Sequence: Synthetic oligonucleotide
ggaagccccucaccucaga

SEQ ID NO: 994324 - RNA, 19 nt, Artificial Sequence
  Description of Artificial Sequence: Synthetic oligonucleotide
ggcucauggcucaaccacu

SEQ ID NO: 994325 - RNA, 19 nt, Artificial Sequence
  Description of Artificial Sequence: Synthetic oligonucleotide
cagggucuucacugguccu

SEQ ID NO: 994326 - RNA, 19 nt, Artificial Sequence
  Description of Artificial Sequence: Synthetic oligonucleotide
cauucuucccuugccgcuu

SEQ ID NO: 994327 - RNA, 19 nt, Artificial Sequence
  Description of Artificial Sequence: Synthetic oligonucleotide
gccgccgcucucuaagaua

SEQ ID NO: 994328 - RNA, 19 nt, Artificial Sequence
  Description of Artificial Sequence: Synthetic oligonucleotide
ccaauccuaggcacaggua

SEQ ID NO: 994329 - RNA, 19 nt, Artificial Sequence
  Description of Artificial Sequence: Synthetic oligonucleotide
gccccauugaagugcguau

SEQ ID NO: 994330 - RNA, 19 nt, Artificial Sequence
  Description of Artificial Sequence: Synthetic oligonucleotide
cucaucaccugcggguaau

SEQ ID NO: 994331 - RNA, 19 nt, Artificial Sequence
  Description of Artificial Sequence: Synthetic oligonucleotide
cagugcuggcaaagugcua

SEQ ID NO: 994332 - RNA, 19 nt, Artificial Sequence
  Description of Artificial Sequence: Synthetic oligonucleotide
ggaggguaacuggaccacu

SEQ ID NO: 994333 - RNA, 19 nt, Artificial Sequence
  Description of Artificial Sequence: Synthetic oligonucleotide
agcuaaggccagggcuguu

SEQ ID NO: 994334 - RNA, 19 nt, Artificial Sequence
  Description of Artificial Sequence: Synthetic oligonucleotide
ccccaaucacauccacuaa

SEQ ID NO: 994335 - RNA, 19 nt, Artificial Sequence
  Description of Artificial Sequence: Synthetic oligonucleotide
gcaggcuauggaaggacuu

SEQ ID NO: 994336 - RNA, 19 nt, Artificial Sequence
  Description of Artificial Sequence: Synthetic oligonucleotide
gcuaaggccagggcuguuu

SEQ ID NO: 994337 - RNA, 19 nt, Artificial Sequence
  Description of Artificial Sequence: Synthetic oligonucleotide
cccuagccccaaucacauc

SEQ ID NO: 994338 - RNA, 19 nt, Artificial Sequence
  Description of Artificial Sequence: Synthetic oligonucleotide
caccugcggguaaugcauu

SEQ ID NO: 994339 - RNA, 19 nt, Artificial Sequence
  Description of Artificial Sequence: Synthetic oligonucleotide
cccuugccgcuuccucuug

SEQ ID NO: 994340 - RNA, 19 nt, Artificial Sequence
  Description of Artificial Sequence: Synthetic oligonucleotide
gccccucaccucagaaaga

SEQ ID NO: 994341 - RNA, 19 nt, Artificial Sequence
  Description of Artificial Sequence: Synthetic oligonucleotide
cugaggcgacagugaccua

SEQ ID NO: 994342 - RNA, 19 nt, Artificial Sequence
  Description of Artificial Sequence: Synthetic oligonucleotide
ccacuccagguuuauucuu

SEQ ID NO: 994343 - RNA, 19 nt, Artificial Sequence
  Description of Artificial Sequence: Synthetic oligonucleotide
ccugcggguaaugcauucu

SEQ ID NO: 994344 - RNA, 19 nt, Artificial Sequence
  Description of Artificial Sequence: Synthetic oligonucleotide
cugccccauugaagugcgu

SEQ ID NO: 994345 - RNA, 19 nt, Artificial Sequence
  Description of Artificial Sequence: Synthetic oligonucleotide
ggacuucccuagccccaau

SEQ ID NO: 994346 - RNA, 19 nt, Artificial Sequence
  Description of Artificial Sequence: Synthetic oligonucleotide
caucggcuucugccuucau

SEQ ID NO: 994347 - RNA, 19 nt, Artificial Sequence
  Description of Artificial Sequence: Synthetic oligonucleotide
cgguccagaagaguagguu

SEQ ID NO: 994348 - RNA, 19 nt, Artificial Sequence
  Description of Artificial Sequence: Synthetic oligonucleotide
cgccgcucucuaagauaga

SEQ ID NO: 994349 - RNA, 19 nt, Artificial Sequence
  Description of Artificial Sequence: Synthetic oligonucleotide
cccugcugcccugcaccau

SEQ ID NO: 994350 - RNA, 19 nt, Artificial Sequence
  Description of Artificial Sequence: Synthetic oligonucleotide
aaucacaaggcacucagcg

SEQ ID NO: 994351 - RNA, 19 nt, Artificial Sequence
  Description of Artificial Sequence: Synthetic oligonucleotide
aagacauagcgcuugaaag

SEQ ID NO: 994352 - RNA, 19 nt, Artificial Sequence
  Description of Artificial Sequence: Synthetic oligonucleotide
uaaggaacggucccgaggg

SEQ ID NO: 994353 - RNA, 19 nt, Artificial Sequence
  Description of Artificial Sequence: Synthetic oligonucleotide
uugaaagacaggcugagug

SEQ ID NO: 994354 - RNA, 19 nt, Artificial Sequence
  Description of Artificial Sequence: Synthetic oligonucleotide
gaacuugccacucuggccg

SEQ ID NO: 994355 - RNA, 19 nt, Artificial Sequence
  Description of Artificial Sequence: Synthetic oligonucleotide
cauuagaucaaugaucugg

SEQ ID NO: 994356 - RNA, 19 nt, Artificial Sequence
  Description of Artificial Sequence: Synthetic oligonucleotide
ucaaucacgagcaucauua

SEQ ID NO: 994357 - RNA, 19 nt, Artificial Sequence
  Description of Artificial Sequence: Synthetic oligonucleotide
augaauggugugcagagac

SEQ ID NO: 994358 - RNA, 19 nt, Artificial Sequence
  Description of Artificial Sequence: Synthetic oligonucleotide
aacaggucuaucuuguuca

SEQ ID NO: 994359 - RNA, 19 nt, Artificial Sequence
  Description of Artificial Sequence: Synthetic oligonucleotide
gaaagaaucaagugugggc

SEQ ID NO: 994360 - RNA, 19 nt, Artificial Sequence
  Description of Artificial Sequence: Synthetic oligonucleotide
cugaagaacagcaugcggc

SEQ ID NO: 994361 - RNA, 19 nt, Artificial Sequence
  Description of Artificial Sequence: Synthetic oligonucleotide
agggauguggauuuugaac

SEQ ID NO: 994362 - RNA, 19 nt, Artificial Sequence
  Description of Artificial Sequence: Synthetic oligonucleotide
aaagacauagcgcuugaaa

SEQ ID NO: 994363 - RNA, 19 nt, Artificial Sequence
  Description of Artificial Sequence: Synthetic oligonucleotide
agcaagacaccauggaagg

SEQ ID NO: 994364 - RNA, 19 nt, Artificial Sequence
  Description of Artificial Sequence: Synthetic oligonucleotide
auuagaucaaugaucuggg

SEQ ID NO: 994365 - RNA, 19 nt, Artificial Sequence
  Description of Artificial Sequence: Synthetic oligonucleotide
auaaggaacggucccgagg

SEQ ID NO: 994366 - RNA, 19 nt, Artificial Sequence
  Description of Artificial Sequence: Synthetic oligonucleotide
guagucauccauuacccgc

SEQ ID NO: 994367 - RNA, 19 nt, Artificial Sequence
  Description of Artificial Sequence: Synthetic oligonucleotide
uguagcaagacaccaugga

SEQ ID NO: 994368 - RNA, 19 nt, Artificial Sequence
  Description of Artificial Sequence: Synthetic oligonucleotide
ggugauauggaacuuggcc

SEQ ID NO: 994369 - RNA, 19 nt, Artificial Sequence
  Description of Artificial Sequence: Synthetic oligonucleotide
ucgaaagaaucaagugugg

SEQ ID NO: 994370 - RNA, 19 nt, Artificial Sequence
  Description of Artificial Sequence: Synthetic oligonucleotide
uguuaggaucuucuuagac

SEQ ID NO: 994371 - RNA, 19 nt, Artificial Sequence
  Description of Artificial Sequence: Synthetic oligonucleotide
gucgaaagaaucaagugug

SEQ ID NO: 994372 - RNA, 19 nt, Artificial Sequence
  Description of Artificial Sequence: Synthetic oligonucleotide
uuguagcaagacaccaugg

SEQ ID NO: 994373 - RNA, 19 nt, Artificial Sequence
  Description of Artificial Sequence: Synthetic oligonucleotide
aauaauuggugcaccccgg

SEQ ID NO: 994374 - RNA, 19 nt, Artificial Sequence
  Description of Artificial Sequence: Synthetic oligonucleotide
uugaguguagguguuagga

SEQ ID NO: 994375 - RNA, 19 nt, Artificial Sequence
  Description of Artificial Sequence: Synthetic oligonucleotide
uguagucauccauuacccg

SEQ ID NO: 994376 - RNA, 19 nt, Artificial Sequence
  Description of Artificial Sequence: Synthetic oligonucleotide
cagucuggaaccaaucacc

SEQ ID NO: 994377 - RNA, 19 nt, Artificial Sequence
  Description of Artificial Sequence: Synthetic oligonucleotide
aauuggugcaccccggaau

SEQ ID NO: 994378 - RNA, 19 nt, Artificial Sequence
  Description of Artificial Sequence: Synthetic oligonucleotide
uucugggugucaaagacau

SEQ ID NO: 994379 - RNA, 19 nt, Artificial Sequence
  Description of Artificial Sequence: Synthetic oligonucleotide
aaucacgagcaucauuaga

SEQ ID NO: 994380 - RNA, 19 nt, Artificial Sequence
  Description of Artificial Sequence: Synthetic oligonucleotide
uuccaauccuuguagcaag

SEQ ID NO: 994381 - RNA, 19 nt, Artificial Sequence
  Description of Artificial Sequence: Synthetic oligonucleotide
ucaggugcacauaccagcc

SEQ ID NO: 994382 - RNA, 19 nt, Artificial Sequence
  Description of Artificial Sequence: Synthetic oligonucleotide
ugaaagacaggcugagugu

SEQ ID NO: 994383 - RNA, 19 nt, Artificial Sequence
  Description of Artificial Sequence: Synthetic oligonucleotide
agacauagcgcuugaaaga

SEQ ID NO: 994384 - RNA, 19 nt, Artificial Sequence
  Description of Artificial Sequence: Synthetic oligonucleotide
gaaccaaucaccaagcaua

SEQ ID NO: 994385 - RNA, 19 nt, Artificial Sequence
  Description of Artificial Sequence: Synthetic oligonucleotide
caccuuaagccccacaaag

SEQ ID NO: 994386 - RNA, 19 nt, Artificial Sequence
  Description of Artificial Sequence: Synthetic oligonucleotide
uaugaaugucggcauccag

SEQ ID NO: 994387 - RNA, 19 nt, Artificial Sequence
  Description of Artificial Sequence: Synthetic oligonucleotide
ugucucguggcccacggug

SEQ ID NO: 994388 - RNA, 19 nt, Artificial Sequence
  Description of Artificial Sequence: Synthetic oligonucleotide
ugaaugucggcauccaguc

SEQ ID NO: 994389 - RNA, 19 nt, Artificial Sequence
  Description of Artificial Sequence: Synthetic oligonucleotide
uagggagucuguaccaugc

SEQ ID NO: 994390 - RNA, 19 nt, Artificial Sequence
  Description of Artificial Sequence: Synthetic oligonucleotide
aucacaaggcacucagcgg

SEQ ID NO: 994391 - RNA, 19 nt, Artificial Sequence
  Description of Artificial Sequence: Synthetic oligonucleotide
ugcaccuuaagccccacaa

SEQ ID NO: 994392 - RNA, 19 nt, Artificial Sequence
  Description of Artificial Sequence: Synthetic oligonucleotide
acaucaaucacgagcauca

SEQ ID NO: 994393 - RNA, 19 nt, Artificial Sequence
  Description of Artificial Sequence: Synthetic oligonucleotide
ugacacagaugcccagucg

SEQ ID NO: 994394 - RNA, 19 nt, Artificial Sequence
  Description of Artificial Sequence: Synthetic oligonucleotide
aggucgaaagaaucaagug

SEQ ID NO: 994395 - RNA, 19 nt, Artificial Sequence
  Description of Artificial Sequence: Synthetic oligonucleotide
cacuuagggagucuguacc

SEQ ID NO: 994396 - RNA, 19 nt, Artificial Sequence
  Description of Artificial Sequence: Synthetic oligonucleotide
uguggauuuugaacuugcc

SEQ ID NO: 994397 - RNA, 19 nt, Artificial Sequence
  Description of Artificial Sequence: Synthetic oligonucleotide
uaccaugcgcuucugggug

SEQ ID NO: 994398 - RNA, 19 nt, Artificial Sequence
  Description of Artificial Sequence: Synthetic oligonucleotide
gacauagcgcuugaaagac

SEQ ID NO: 994399 - RNA, 19 nt, Artificial Sequence
  Description of Artificial Sequence: Synthetic oligonucleotide
gaugguccggaugagggag

SEQ ID NO: 994400 - RNA, 19 nt, Artificial Sequence
  Description of Artificial Sequence: Synthetic oligonucleotide
augaugguccggaugaggg

SEQ ID NO: 994401 - RNA, 19 nt, Artificial Sequence
  Description of Artificial Sequence: Synthetic oligonucleotide
agagguauucccgggagag

SEQ ID NO: 994402 - RNA, 19 nt, Artificial Sequence
  Description of Artificial Sequence: Synthetic oligonucleotide
agugcccugacccuugaug

SEQ ID NO: 994403 - RNA, 19 nt, Artificial Sequence
  Description of Artificial Sequence: Synthetic oligonucleotide
uuagaucaaugaucugggc

SEQ ID NO: 994404 - RNA, 19 nt, Artificial Sequence
  Description of Artificial Sequence: Synthetic oligonucleotide
aucacgagcaucauuagau

SEQ ID NO: 994405 - RNA, 19 nt, Artificial Sequence
  Description of Artificial Sequence: Synthetic oligonucleotide
ugauauggaacuuggccuu

SEQ ID NO: 994406 - RNA, 19 nt, Artificial Sequence
  Description of Artificial Sequence: Synthetic oligonucleotide
aaccaaucaccaagcauag

SEQ ID NO: 994407 - RNA, 19 nt, Artificial Sequence
  Description of Artificial Sequence: Synthetic oligonucleotide
gacucaggugcacauacca

SEQ ID NO: 994408 - RNA, 19 nt, Artificial Sequence
  Description of Artificial Sequence: Synthetic oligonucleotide
ucauccgcuuuucugucca

SEQ ID NO: 994409 - RNA, 19 nt, Artificial Sequence
  Description of Artificial Sequence: Synthetic oligonucleotide
uacccgcuccacaagacca

SEQ ID NO: 994410 - RNA, 19 nt, Artificial Sequence
  Description of Artificial Sequence: Synthetic oligonucleotide
acgggaauaauuggugcac

SEQ ID NO: 994411 - RNA, 19 nt, Artificial Sequence
  Description of Artificial Sequence: Synthetic oligonucleotide
gagaggaugguuccaguca

SEQ ID NO: 994412 - RNA, 19 nt, Artificial Sequence
  Description of Artificial Sequence: Synthetic oligonucleotide
ugacuggcuucucaaacuc

SEQ ID NO: 994413 - RNA, 19 nt, Artificial Sequence
  Description of Artificial Sequence: Synthetic oligonucleotide
agucgaucuccuugugugg

SEQ ID NO: 994414 - RNA, 19 nt, Artificial Sequence
  Description of Artificial Sequence: Synthetic oligonucleotide
guuaggaucuucuuagacu

SEQ ID NO: 994415 - RNA, 19 nt, Artificial Sequence
  Description of Artificial Sequence: Synthetic oligonucleotide
gugauauggaacuuggccu

SEQ ID NO: 994416 - RNA, 19 nt, Artificial Sequence
  Description of Artificial Sequence: Synthetic oligonucleotide
cugggcaccgccaaugaug

SEQ ID NO: 994417 - RNA, 19 nt, Artificial Sequence
  Description of Artificial Sequence: Synthetic oligonucleotide
ugccacgggaauaauuggu

SEQ ID NO: 994418 - RNA, 19 nt, Artificial Sequence
  Description of Artificial Sequence: Synthetic oligonucleotide
ugaauggugugcagagacu

SEQ ID NO: 994419 - RNA, 19 nt, Artificial Sequence
  Description of Artificial Sequence: Synthetic oligonucleotide
uccaaucacgcuguaguca

SEQ ID NO: 994420 - RNA, 19 nt, Artificial Sequence
  Description of Artificial Sequence: Synthetic oligonucleotide
acuuagggagucuguacca

SEQ ID NO: 994421 - RNA, 19 nt, Artificial Sequence
  Description of Artificial Sequence: Synthetic oligonucleotide
uuuugucgauugcugccug

SEQ ID NO: 994422 - RNA, 19 nt, Artificial Sequence
  Description of Artificial Sequence: Synthetic oligonucleotide
aagagguauucccgggaga

SEQ ID NO: 994423 - RNA, 19 nt, Artificial Sequence
  Description of Artificial Sequence: Synthetic oligonucleotide
ggagcguccaaucacgcug

SEQ ID NO: 994424 - RNA, 19 nt, Artificial Sequence
  Description of Artificial Sequence: Synthetic oligonucleotide
guauucccgggagaggucg

SEQ ID NO: 994425 - RNA, 19 nt, Artificial Sequence
  Description of Artificial Sequence: Synthetic oligonucleotide
uugguaugaaugucggcau

SEQ ID NO: 994426 - RNA, 19 nt, Artificial Sequence
  Description of Artificial Sequence: Synthetic oligonucleotide
uuguacacccucagugcug

SEQ ID NO: 994427 - RNA, 19 nt, Artificial Sequence
  Description of Artificial Sequence: Synthetic oligonucleotide
gaucuuuuccacagagaug

SEQ ID NO: 994428 - RNA, 19 nt, Artificial Sequence
  Description of Artificial Sequence: Synthetic oligonucleotide
uauccuagguggugccagg

SEQ ID NO: 994429 - RNA, 19 nt, Artificial Sequence
  Description of Artificial Sequence: Synthetic oligonucleotide
ugccaaggcccuuuccuag

SEQ ID NO: 994430 - RNA, 19 nt, Artificial Sequence
  Description of Artificial Sequence: Synthetic oligonucleotide
uggccgaaggcacugucga

SEQ ID NO: 994431 - RNA, 19 nt, Artificial Sequence
  Description of Artificial Sequence: Synthetic oligonucleotide
gcauguguugguaugaaug

SEQ ID NO: 994432 - RNA, 19 nt, Artificial Sequence
  Description of Artificial Sequence: Synthetic oligonucleotide
auaauuggugcaccccgga

SEQ ID NO: 994433 - RNA, 19 nt, Artificial Sequence
  Description of Artificial Sequence: Synthetic oligonucleotide
uaggaagcucucuguguag

SEQ ID NO: 994434 - RNA, 19 nt, Artificial Sequence
  Description of Artificial Sequence: Synthetic oligonucleotide
acugucucguggcccacgg

SEQ ID NO: 994435 - RNA, 19 nt, Artificial Sequence
  Description of Artificial Sequence: Synthetic oligonucleotide
ccuuaagccccacaaagag

SEQ ID NO: 994436 - RNA, 19 nt, Artificial Sequence
  Description of Artificial Sequence: Synthetic oligonucleotide
auuuugucgauugcugccu

SEQ ID NO: 994437 - RNA, 19 nt, Artificial Sequence
  Description of Artificial Sequence: Synthetic oligonucleotide
acggugauauggaacuugg

SEQ ID NO: 994438 - RNA, 19 nt, Artificial Sequence
  Description of Artificial Sequence: Synthetic oligonucleotide
uggaaccaaucaccaagca

SEQ ID NO: 994439 - RNA, 19 nt, Artificial Sequence
  Description of Artificial Sequence: Synthetic oligonucleotide
agcagggcugaagaacagc

SEQ ID NO: 994440 - RNA, 19 nt, Artificial Sequence
  Description of Artificial Sequence: Synthetic oligonucleotide
guugucaggagcagggcug

SEQ ID NO: 994441 - RNA, 19 nt, Artificial Sequence
  Description of Artificial Sequence: Synthetic oligonucleotide
aaggaacggucccgagggg

SEQ ID NO: 994442 - RNA, 19 nt, Artificial Sequence
  Description of Artificial Sequence: Synthetic oligonucleotide
uaauuggugcaccccggaa

SEQ ID NO: 994443 - RNA, 19 nt, Artificial Sequence
  Description of Artificial Sequence: Synthetic oligonucleotide
aacucuaccagggcccacu

SEQ ID NO: 994444 - RNA, 19 nt, Artificial Sequence
  Description of Artificial Sequence: Synthetic oligonucleotide
auuacccgcuccacaagac

SEQ ID NO: 994445 - RNA, 19 nt, Artificial Sequence
  Description of Artificial Sequence: Synthetic oligonucleotide
cugagaugcccuguggagc

SEQ ID NO: 994446 - RNA, 19 nt, Artificial Sequence
  Description of Artificial Sequence: Synthetic oligonucleotide
auuggugcaccccggaauu

SEQ ID NO: 994447 - RNA, 19 nt, Artificial Sequence
  Description of Artificial Sequence: Synthetic oligonucleotide
agguauucccgggagaggu

SEQ ID NO: 994448 - RNA, 19 nt, Artificial Sequence
  Description of Artificial Sequence: Synthetic oligonucleotide
cuuagacucagggcugagg

SEQ ID NO: 994449 - RNA, 19 nt, Artificial Sequence
  Description of Artificial Sequence: Synthetic oligonucleotide
cacauaccagcccacguuc

SEQ ID NO: 994450 - RNA, 19 nt, Artificial Sequence
  Description of Artificial Sequence: Synthetic oligonucleotide
gguaugaaugucggcaucc

SEQ ID NO: 994451 - RNA, 19 nt, Artificial Sequence
  Description of Artificial Sequence: Synthetic oligonucleotide
agggagucuguaccaugcg

SEQ ID NO: 994452 - RNA, 19 nt, Artificial Sequence
  Description of Artificial Sequence: Synthetic oligonucleotide
cugccacgggaauaauugg

SEQ ID NO: 994453 - RNA, 19 nt, Artificial Sequence
  Description of Artificial Sequence: Synthetic oligonucleotide
caaucacgagcaucauuag

SEQ ID NO: 994454 - RNA, 19 nt, Artificial Sequence
  Description of Artificial Sequence: Synthetic oligonucleotide
ucgauugcugccugccucu

SEQ ID NO: 994455 - RNA, 19 nt, Artificial Sequence
  Description of Artificial Sequence: Synthetic oligonucleotide
agguguuaggaucuucuua

SEQ ID NO: 994456 - RNA, 19 nt, Artificial Sequence
  Description of Artificial Sequence: Synthetic oligonucleotide
uugucgauugcugccugcc

SEQ ID NO: 994457 - RNA, 19 nt, Artificial Sequence
  Description of Artificial Sequence: Synthetic oligonucleotide
ugaugguccggaugaggga

SEQ ID NO: 994458 - RNA, 19 nt, Artificial Sequence
  Description of Artificial Sequence: Synthetic oligonucleotide
guugcuauccuagguggug

SEQ ID NO: 994459 - RNA, 19 nt, Artificial Sequence
  Description of Artificial Sequence: Synthetic oligonucleotide
gaucugggcaccgccaaug

SEQ ID NO: 994460 - RNA, 19 nt, Artificial Sequence
  Description of Artificial Sequence: Synthetic oligonucleotide
uguggagcuuccguuucag

SEQ ID NO: 994461 - RNA, 19 nt, Artificial Sequence
  Description of Artificial Sequence: Synthetic oligonucleotide
ggucgaaagaaucaagugu

SEQ ID NO: 994462 - RNA, 19 nt, Artificial Sequence
  Description of Artificial Sequence: Synthetic oligonucleotide
guggcccacggugauaugg

SEQ ID NO: 994463 - RNA, 19 nt, Artificial Sequence
  Description of Artificial Sequence: Synthetic oligonucleotide
agggaggcgugcccggggc

SEQ ID NO: 994464 - RNA, 19 nt, Artificial Sequence
  Description of Artificial Sequence: Synthetic oligonucleotide
caucuggcacuguagucug

SEQ ID NO: 994465 - RNA, 19 nt, Artificial Sequence
  Description of Artificial Sequence: Synthetic oligonucleotide
caugacugucucguggccc

SEQ ID NO: 994466 - RNA, 19 nt, Artificial Sequence
  Description of Artificial Sequence: Synthetic oligonucleotide
cuauccuagguggugccag

SEQ ID NO: 994467 - RNA, 19 nt, Artificial Sequence
  Description of Artificial Sequence: Synthetic oligonucleotide
ugcuauccuagguggugcc

SEQ ID NO: 994468 - RNA, 19 nt, Artificial Sequence
  Description of Artificial Sequence: Synthetic oligonucleotide
aggaugguuccagucauca

SEQ ID NO: 994469 - RNA, 19 nt, Artificial Sequence
  Description of Artificial Sequence: Synthetic oligonucleotide
gcuuaguugcuauccuagg

SEQ ID NO: 994470 - RNA, 19 nt, Artificial Sequence
  Description of Artificial Sequence: Synthetic oligonucleotide
aaucaagugugggcuccag

SEQ ID NO: 994471 - RNA, 19 nt, Artificial Sequence
  Description of Artificial Sequence: Synthetic oligonucleotide
caauccuuguagcaagaca

SEQ ID NO: 994472 - RNA, 19 nt, Artificial Sequence
  Description of Artificial Sequence: Synthetic oligonucleotide
cauaaggaacggucccgag

SEQ ID NO: 994473 - RNA, 19 nt, Artificial Sequence
  Description of Artificial Sequence: Synthetic oligonucleotide
ugcuugguggucuccccgc

SEQ ID NO: 994474 - RNA, 19 nt, Artificial Sequence
  Description of Artificial Sequence: Synthetic oligonucleotide
ucaaugaucugggcaccgc

SEQ ID NO: 994475 - RNA, 19 nt, Artificial Sequence
  Description of Artificial Sequence: Synthetic oligonucleotide
ugguaugaaugucggcauc

SEQ ID NO: 994476 - RNA, 19 nt, Artificial Sequence
  Description of Artificial Sequence: Synthetic oligonucleotide
gaagcucucuguguaguuc

SEQ ID NO: 994477 - RNA, 19 nt, Artificial Sequence
  Description of Artificial Sequence: Synthetic oligonucleotide
uccccuguagacagcugca

SEQ ID NO: 994478 - RNA, 19 nt, Artificial Sequence
  Description of Artificial Sequence: Synthetic oligonucleotide
gacaccauggaaggccagc

SEQ ID NO: 994479 - RNA, 19 nt, Artificial Sequence
  Description of Artificial Sequence: Synthetic oligonucleotide
cauguguugguaugaaugu

SEQ ID NO: 994480 - RNA, 19 nt, Artificial Sequence
  Description of Artificial Sequence: Synthetic oligonucleotide
cacaucaaucacgagcauc

SEQ ID NO: 994481 - RNA, 19 nt, Artificial Sequence
  Description of Artificial Sequence: Synthetic oligonucleotide
gaacagggagcguccaauc

SEQ ID NO: 994482 - RNA, 19 nt, Artificial Sequence
  Description of Artificial Sequence: Synthetic oligonucleotide
auccauuacccgcuccaca

SEQ ID NO: 994483 - RNA, 19 nt, Artificial Sequence
  Description of Artificial Sequence: Synthetic oligonucleotide
ggggcagucgaccagcgug

SEQ ID NO: 994484 - RNA, 19 nt, Artificial Sequence
  Description of Artificial Sequence: Synthetic oligonucleotide
uccccgaggcugauagugc

SEQ ID NO: 994485 - RNA, 19 nt, Artificial Sequence
  Description of Artificial Sequence: Synthetic oligonucleotide
gaggcugauagugccugag

SEQ ID NO: 994486 - RNA, 19 nt, Artificial Sequence
  Description of Artificial Sequence: Synthetic oligonucleotide
cacgggaauaauuggugca

SEQ ID NO: 994487 - RNA, 19 nt, Artificial Sequence
  Description of Artificial Sequence: Synthetic oligonucleotide
gugggcauggaguccuugc

SEQ ID NO: 994488 - RNA, 19 nt, Artificial Sequence
  Description of Artificial Sequence: Synthetic oligonucleotide
gcgcuugaaagacaggcug

SEQ ID NO: 994489 - RNA, 19 nt, Artificial Sequence
  Description of Artificial Sequence: Synthetic oligonucleotide
agacucaggugcacauacc

SEQ ID NO: 994490 - RNA, 19 nt, Artificial Sequence
  Description of Artificial Sequence: Synthetic oligonucleotide
gugugcagagacucaggug

SEQ ID NO: 994491 - RNA, 19 nt, Artificial Sequence
  Description of Artificial Sequence: Synthetic oligonucleotide
uggcccacggugauaugga

SEQ ID NO: 994492 - RNA, 19 nt, Artificial Sequence
  Description of Artificial Sequence: Synthetic oligonucleotide
agucuggaaccaaucacca

SEQ ID NO: 994493 - RNA, 19 nt, Artificial Sequence
  Description of Artificial Sequence: Synthetic oligonucleotide
acauaaggaacggucccga

SEQ ID NO: 994494 - RNA, 19 nt, Artificial Sequence
  Description of Artificial Sequence: Synthetic oligonucleotide
gagaggucgaaagaaucaa

SEQ ID NO: 994495 - RNA, 19 nt, Artificial Sequence
  Description of Artificial Sequence: Synthetic oligonucleotide
uucuuagacucagggcuga

SEQ ID NO: 994496 - RNA, 19 nt, Artificial Sequence
  Description of Artificial Sequence: Synthetic oligonucleotide
gucgauugcugccugccuc

SEQ ID NO: 994497 - RNA, 19 nt, Artificial Sequence
  Description of Artificial Sequence: Synthetic oligonucleotide
gagguauucccgggagagg

SEQ ID NO: 994498 - RNA, 19 nt, Artificial Sequence
  Description of Artificial Sequence: Synthetic oligonucleotide
cuuuccccagguuuucuca

SEQ ID NO: 994499 - RNA, 19 nt, Artificial Sequence
  Description of Artificial Sequence: Synthetic oligonucleotide
uucuggcaggcgaucuggc

SEQ ID NO: 994500 - RNA, 19 nt, Artificial Sequence
  Description of Artificial Sequence: Synthetic oligonucleotide
gugucauccgcuuuucugu

SEQ ID NO: 994501 - RNA, 19 nt, Artificial Sequence
  Description of Artificial Sequence: Synthetic oligonucleotide
cuuaguugcuauccuaggu

SEQ ID NO: 994502 - RNA, 19 nt, Artificial Sequence
  Description of Artificial Sequence: Synthetic oligonucleotide
cagcccacguuccaacagc

SEQ ID NO: 994503 - RNA, 19 nt, Artificial Sequence
  Description of Artificial Sequence: Synthetic oligonucleotide
augagggaggcgugcccgg

SEQ ID NO: 994504 - RNA, 19 nt, Artificial Sequence
  Description of Artificial Sequence: Synthetic oligonucleotide
guccccgaggcugauagug

SEQ ID NO: 994505 - RNA, 19 nt, Artificial Sequence
  Description of Artificial Sequence: Synthetic oligonucleotide
cuguaccaugcgcuucugg

SEQ ID NO: 994506 - RNA, 19 nt, Artificial Sequence
  Description of Artificial Sequence: Synthetic oligonucleotide
caaggcacucagcggacug

SEQ ID NO: 994507 - RNA, 19 nt, Artificial Sequence
  Description of Artificial Sequence: Synthetic oligonucleotide
cagugguccacagacauaa

SEQ ID NO: 994508 - RNA, 19 nt, Artificial Sequence
  Description of Artificial Sequence: Synthetic oligonucleotide
auccagucuggaaccaauc

SEQ ID NO: 994509 - RNA, 19 nt, Artificial Sequence
  Description of Artificial Sequence: Synthetic oligonucleotide
uagguguuaggaucuucuu

SEQ ID NO: 994510 - RNA, 19 nt, Artificial Sequence
  Description of Artificial Sequence: Synthetic oligonucleotide
gagcaucauuagaucaaug

SEQ ID NO: 994511 - RNA, 19 nt, Artificial Sequence
  Description of Artificial Sequence: Synthetic oligonucleotide
agggcugcaugaauggugu

SEQ ID NO: 994512 - RNA, 19 nt, Artificial Sequence
  Description of Artificial Sequence: Synthetic oligonucleotide
uguagguguuaggaucuuc

SEQ ID NO: 994513 - RNA, 19 nt, Artificial Sequence
  Description of Artificial Sequence: Synthetic oligonucleotide
caaggcccuuuccuagccg

SEQ ID NO: 994514 - RNA, 19 nt, Artificial Sequence
  Description of Artificial Sequence: Synthetic oligonucleotide
uggugcaccccggaauuug

SEQ ID NO: 994515 - RNA, 19 nt, Artificial Sequence
  Description of Artificial Sequence: Synthetic oligonucleotide
aggcacugucgaugaugcc

SEQ ID NO: 994516 - RNA, 19 nt, Artificial Sequence
  Description of Artificial Sequence: Synthetic oligonucleotide
cuccuggagugucauccgc

SEQ ID NO: 994517 - RNA, 19 nt, Artificial Sequence
  Description of Artificial Sequence: Synthetic oligonucleotide
gggagucuguaccaugcgc

SEQ ID NO: 994518 - RNA, 19 nt, Artificial Sequence
  Description of Artificial Sequence: Synthetic oligonucleotide
uccggaugagggaggcgug

SEQ ID NO: 994519 - RNA, 19 nt, Artificial Sequence
  Description of Artificial Sequence: Synthetic oligonucleotide
aaggcacucagcggacugu

SEQ ID NO: 994520 - RNA, 19 nt, Artificial Sequence
  Description of Artificial Sequence: Synthetic oligonucleotide
ucuuagacucagggcugag

SEQ ID NO: 994521 - RNA, 19 nt, Artificial Sequence
  Description of Artificial Sequence: Synthetic oligonucleotide
cuuccaauccuuguagcaa

SEQ ID NO: 994522 - RNA, 19 nt, Artificial Sequence
  Description of Artificial Sequence: Synthetic oligonucleotide
guacugcucuuggaagagg

SEQ ID NO: 994523 - RNA, 19 nt, Artificial Sequence
  Description of Artificial Sequence: Synthetic oligonucleotide
ggcugcaugggcucuggcc

SEQ ID NO: 994524 - RNA, 19 nt, Artificial Sequence
  Description of Artificial Sequence: Synthetic oligonucleotide
acgagcaucauuagaucaa

SEQ ID NO: 994525 - RNA, 19 nt, Artificial Sequence
  Description of Artificial Sequence: Synthetic oligonucleotide
ugauagugccugagaggau

SEQ ID NO: 994526 - RNA, 19 nt, Artificial Sequence
  Description of Artificial Sequence: Synthetic oligonucleotide
aggcugauagugccugaga

SEQ ID NO: 994527 - RNA, 19 nt, Artificial Sequence
  Description of Artificial Sequence: Synthetic oligonucleotide
uauucccgggagaggucga

SEQ ID NO: 994528 - RNA, 19 nt, Artificial Sequence
  Description of Artificial Sequence: Synthetic oligonucleotide
guagguguuaggaucuucu

SEQ ID NO: 994529 - RNA, 19 nt, Artificial Sequence
  Description of Artificial Sequence: Synthetic oligonucleotide
caggugcacauaccagccc

SEQ ID NO: 994530 - RNA, 19 nt, Artificial Sequence
  Description of Artificial Sequence: Synthetic oligonucleotide
ugcccugacccuugaugga

SEQ ID NO: 994531 - RNA, 19 nt, Artificial Sequence
  Description of Artificial Sequence: Synthetic oligonucleotide
ggcugcaugaauggugugc

SEQ ID NO: 994532 - RNA, 19 nt, Artificial Sequence
  Description of Artificial Sequence: Synthetic oligonucleotide
cccaugacugucucguggc

SEQ ID NO: 994533 - RNA, 19 nt, Artificial Sequence
  Description of Artificial Sequence: Synthetic oligonucleotide
uggcaggcgaucuggccaa

SEQ ID NO: 994534 - RNA, 19 nt, Artificial Sequence
  Description of Artificial Sequence: Synthetic oligonucleotide
agcgcuugaaagacaggcu

SEQ ID NO: 994535 - RNA, 19 nt, Artificial Sequence
  Description of Artificial Sequence: Synthetic oligonucleotide
ugaucugggcaccgccaau

SEQ ID NO: 994536 - RNA, 19 nt, Artificial Sequence
  Description of Artificial Sequence: Synthetic oligonucleotide
aggaacggucccgaggggu

SEQ ID NO: 994537 - RNA, 19 nt, Artificial Sequence
  Description of Artificial Sequence: Synthetic oligonucleotide
cagucgaccagcgugaccu

SEQ ID NO: 994538 - RNA, 19 nt, Artificial Sequence
  Description of Artificial Sequence: Synthetic oligonucleotide
gacugucucguggcccacg

SEQ ID NO: 994539 - RNA, 19 nt, Artificial Sequence
  Description of Artificial Sequence: Synthetic oligonucleotide
caggcgaucuggccaauca

SEQ ID NO: 994540 - RNA, 19 nt, Artificial Sequence
  Description of Artificial Sequence: Synthetic oligonucleotide
accgccaaugaugguccgg

SEQ ID NO: 994541 - RNA, 19 nt, Artificial Sequence
  Description of Artificial Sequence: Synthetic oligonucleotide
guaugaaugucggcaucca

SEQ ID NO: 994542 - RNA, 19 nt, Artificial Sequence
  Description of Artificial Sequence: Synthetic oligonucleotide
augucggcauccagucugg

SEQ ID NO: 994543 - RNA, 19 nt, Artificial Sequence
  Description of Artificial Sequence: Synthetic oligonucleotide
caugcggcccaugacuguc

SEQ ID NO: 994544 - RNA, 19 nt, Artificial Sequence
  Description of Artificial Sequence: Synthetic oligonucleotide
caaugaugguccggaugag

SEQ ID NO: 994545 - RNA, 19 nt, Artificial Sequence
  Description of Artificial Sequence: Synthetic oligonucleotide
ccuuguguggcagagguga

SEQ ID NO: 994546 - RNA, 19 nt, Artificial Sequence
  Description of Artificial Sequence: Synthetic oligonucleotide
cacagaugcccagucgauc

SEQ ID NO: 994547 - RNA, 19 nt, Artificial Sequence
  Description of Artificial Sequence: Synthetic oligonucleotide
gccuuagucugcaggaggc

SEQ ID NO: 994548 - RNA, 19 nt, Artificial Sequence
  Description of Artificial Sequence: Synthetic oligonucleotide
guaccaugcgcuucugggu

SEQ ID NO: 994549 - RNA, 19 nt, Artificial Sequence
  Description of Artificial Sequence: Synthetic oligonucleotide
ggugcaccccggaauuugg

SEQ ID NO: 994550 - RNA, 19 nt, Artificial Sequence
  Description of Artificial Sequence: Synthetic oligonucleotide
ggcucaacaucagugggga

SEQ ID NO: 994551 - RNA, 19 nt, Artificial Sequence
  Description of Artificial Sequence: Synthetic oligonucleotide
ggaacaucugcauggacuu

SEQ ID NO: 994552 - RNA, 19 nt, Artificial Sequence
  Description of Artificial Sequence: Synthetic oligonucleotide
guggucuccccgcggccgg

SEQ ID NO: 994553 - RNA, 19 nt, Artificial Sequence
  Description of Artificial Sequence: Synthetic oligonucleotide
ucccgaggggucucuugcu

SEQ ID NO: 994554 - RNA, 19 nt, Artificial Sequence
  Description of Artificial Sequence: Synthetic oligonucleotide
gccgaaggcacugucgaug

SEQ ID NO: 994555 - RNA, 19 nt, Artificial Sequence
  Description of Artificial Sequence: Synthetic oligonucleotide
agguggugccaggauggag

SEQ ID NO: 994556 - RNA, 19 nt, Artificial Sequence
  Description of Artificial Sequence: Synthetic oligonucleotide
gauauggaacuuggccuua

SEQ ID NO: 994557 - RNA, 19 nt, Artificial Sequence
  Description of Artificial Sequence: Synthetic oligonucleotide
ggaaccaaucaccaagcau

SEQ ID NO: 994558 - RNA, 19 nt, Artificial Sequence
  Description of Artificial Sequence: Synthetic oligonucleotide
gcuugguggucuccccgcg

SEQ ID NO: 994559 - RNA, 19 nt, Artificial Sequence
  Description of Artificial Sequence: Synthetic oligonucleotide
cagggauguggauuuugaa

SEQ ID NO: 994560 - RNA, 19 nt, Artificial Sequence
  Description of Artificial Sequence: Synthetic oligonucleotide
ugcggcccaugacugucuc

SEQ ID NO: 994561 - RNA, 19 nt, Artificial Sequence
  Description of Artificial Sequence: Synthetic oligonucleotide
gcacucagcggacuguguc

SEQ ID NO: 994562 - RNA, 19 nt, Artificial Sequence
  Description of Artificial Sequence: Synthetic oligonucleotide
agggcccacuguugccggg

SEQ ID NO: 994563 - RNA, 19 nt, Artificial Sequence
  Description of Artificial Sequence: Synthetic oligonucleotide
ccgaggggucucuugcugg

SEQ ID NO: 994564 - RNA, 19 nt, Artificial Sequence
  Description of Artificial Sequence: Synthetic oligonucleotide
ccaaucaccaagcauaguu

SEQ ID NO: 994565 - RNA, 19 nt, Artificial Sequence
  Description of Artificial Sequence: Synthetic oligonucleotide
ggcgaucuggccaaucaca

SEQ ID NO: 994566 - RNA, 19 nt, Artificial Sequence
  Description of Artificial Sequence: Synthetic oligonucleotide
gucuggaaccaaucaccaa

SEQ ID NO: 994567 - RNA, 19 nt, Artificial Sequence
  Description of Artificial Sequence: Synthetic oligonucleotide
agucgaccagcgugaccug

SEQ ID NO: 994568 - RNA, 19 nt, Artificial Sequence
  Description of Artificial Sequence: Synthetic oligonucleotide
auaccagcccacguuccaa

SEQ ID NO: 994569 - RNA, 19 nt, Artificial Sequence
  Description of Artificial Sequence: Synthetic oligonucleotide
cugacccuugauggagaag

SEQ ID NO: 994570 - RNA, 19 nt, Artificial Sequence
  Description of Artificial Sequence: Synthetic oligonucleotide
gcaggaugguucacuuagg

SEQ ID NO: 994571 - RNA, 19 nt, Artificial Sequence
  Description of Artificial Sequence: Synthetic oligonucleotide
gucacaggcugcaugggcu

SEQ ID NO: 994572 - RNA, 19 nt, Artificial Sequence
  Description of Artificial Sequence: Synthetic oligonucleotide
ggugacggguguguggaac

SEQ ID NO: 994573 - RNA, 19 nt, Artificial Sequence
  Description of Artificial Sequence: Synthetic oligonucleotide
ccgggcuuaguugcuaucc

SEQ ID NO: 994574 - RNA, 19 nt, Artificial Sequence
  Description of Artificial Sequence: Synthetic oligonucleotide
cagcgugaccugcagcuga

SEQ ID NO: 994575 - RNA, 19 nt, Artificial Sequence
  Description of Artificial Sequence: Synthetic oligonucleotide
caggacuaggguggcugag

SEQ ID NO: 994576 - RNA, 19 nt, Artificial Sequence
  Description of Artificial Sequence: Synthetic oligonucleotide
ggacugugucugcauuccc

SEQ ID NO: 994577 - RNA, 19 nt, Artificial Sequence
  Description of Artificial Sequence: Synthetic oligonucleotide
cagaugcccagucgaucuc

SEQ ID NO: 994578 - RNA, 19 nt, Artificial Sequence
  Description of Artificial Sequence: Synthetic oligonucleotide
ugacggguguguggaacau

SEQ ID NO: 994579 - RNA, 19 nt, Artificial Sequence
  Description of Artificial Sequence: Synthetic oligonucleotide
gcaccgccaaugauggucc

SEQ ID NO: 994580 - RNA, 19 nt, Artificial Sequence
  Description of Artificial Sequence: Synthetic oligonucleotide
ggagucuguaccaugcgcu

SEQ ID NO: 994581 - RNA, 19 nt, Artificial Sequence
  Description of Artificial Sequence: Synthetic oligonucleotide
gcuaacaggucuaucuugu

SEQ ID NO: 994582 - RNA, 19 nt, Artificial Sequence
  Description of Artificial Sequence: Synthetic oligonucleotide
ggggcaucuggcacuguag

SEQ ID NO: 994583 - RNA, 19 nt, Artificial Sequence
  Description of Artificial Sequence: Synthetic oligonucleotide
ccaaggcccuuuccuagcc

SEQ ID NO: 994584 - RNA, 19 nt, Artificial Sequence
  Description of Artificial Sequence: Synthetic oligonucleotide
caccgccaaugaugguccg

SEQ ID NO: 994585 - RNA, 19 nt, Artificial Sequence
  Description of Artificial Sequence: Synthetic oligonucleotide
cauccgcuuuucuguccac

SEQ ID NO: 994586 - RNA, 19 nt, Artificial Sequence
  Description of Artificial Sequence: Synthetic oligonucleotide
gcgcuucugggugucaaag

SEQ ID NO: 994587 - RNA, 19 nt, Artificial Sequence
  Description of Artificial Sequence: Synthetic oligonucleotide
ccccgaggcugauagugcc

SEQ ID NO: 994588 - RNA, 19 nt, Artificial Sequence
  Description of Artificial Sequence: Synthetic oligonucleotide
ggaggccccggaaguaagg

SEQ ID NO: 994589 - RNA, 19 nt, Artificial Sequence
  Description of Artificial Sequence: Synthetic oligonucleotide
accccggaauuugguguuc

SEQ ID NO: 994590 - RNA, 19 nt, Artificial Sequence
  Description of Artificial Sequence: Synthetic oligonucleotide
ccacucuggccgaaggcac

SEQ ID NO: 994591 - RNA, 19 nt, Artificial Sequence
  Description of Artificial Sequence: Synthetic oligonucleotide
gagucuguaccaugcgcuu

SEQ ID NO: 994592 - RNA, 19 nt, Artificial Sequence
  Description of Artificial Sequence: Synthetic oligonucleotide
aggcccuuuccuagccggg

SEQ ID NO: 994593 - RNA, 19 nt, Artificial Sequence
  Description of Artificial Sequence: Synthetic oligonucleotide
gcccugacccuugauggag

SEQ ID NO: 994594 - RNA, 19 nt, Artificial Sequence
  Description of Artificial Sequence: Synthetic oligonucleotide
ccagcccacguuccaacag

SEQ ID NO: 994595 - RNA, 19 nt, Artificial Sequence
  Description of Artificial Sequence: Synthetic oligonucleotide
cacucagcggacugugucu

SEQ ID NO: 994596 - RNA, 19 nt, Artificial Sequence
  Description of Artificial Sequence: Synthetic oligonucleotide
cuguggagcuuccguuuca

SEQ ID NO: 994597 - RNA, 19 nt, Artificial Sequence
  Description of Artificial Sequence: Synthetic oligonucleotide
cuaggguggcugaggcaca

SEQ ID NO: 994598 - RNA, 19 nt, Artificial Sequence
  Description of Artificial Sequence: Synthetic oligonucleotide
gcggacugugucugcauuc

SEQ ID NO: 994599 - RNA, 19 nt, Artificial Sequence
  Description of Artificial Sequence: Synthetic oligonucleotide
cugcucuuggaagagguau

SEQ ID NO: 994600 - RNA, 19 nt, Artificial Sequence
  Description of Artificial Sequence: Synthetic oligonucleotide
cauccagucuggaaccaau

SEQ ID NO: 994601 - RNA, 19 nt, Artificial Sequence
  Description of Artificial Sequence: Synthetic oligonucleotide
ccauuacccgcuccacaag

SEQ ID NO: 994602 - RNA, 19 nt, Artificial Sequence
  Description of Artificial Sequence: Synthetic oligonucleotide
ccaugacugucucguggcc

SEQ ID NO: 994603 - RNA, 19 nt, Artificial Sequence
  Description of Artificial Sequence: Synthetic oligonucleotide
ccaauccuuguagcaagac

SEQ ID NO: 994604 - RNA, 19 nt, Artificial Sequence
  Description of Artificial Sequence: Synthetic oligonucleotide
ugucggcauccagucugga

SEQ ID NO: 994605 - RNA, 19 nt, Artificial Sequence
  Description of Artificial Sequence: Synthetic oligonucleotide
cggcauccagucuggaacc

SEQ ID NO: 994606 - RNA, 19 nt, Artificial Sequence
  Description of Artificial Sequence: Synthetic oligonucleotide
ccgaaggcacugucgauga

SEQ ID NO: 994607 - RNA, 19 nt, Artificial Sequence
  Description of Artificial Sequence: Synthetic oligonucleotide
gauggaguggcaggacuuu

SEQ ID NO: 994608 - RNA, 19 nt, Artificial Sequence
  Description of Artificial Sequence: Synthetic oligonucleotide
gagcguccaaucacgcugu

SEQ ID NO: 994609 - RNA, 19 nt, Artificial Sequence
  Description of Artificial Sequence: Synthetic oligonucleotide
gcaccuuaagccccacaaa

SEQ ID NO: 994610 - RNA, 19 nt, Artificial Sequence
  Description of Artificial Sequence: Synthetic oligonucleotide
cccuugauggagaagcagu

SEQ ID NO: 994611 - RNA, 19 nt, Artificial Sequence
  Description of Artificial Sequence: Synthetic oligonucleotide
cugcuccccuguagacagc

SEQ ID NO: 994612 - RNA, 19 nt, Artificial Sequence
  Description of Artificial Sequence: Synthetic oligonucleotide
uuggugcaccccggaauuu

SEQ ID NO: 994613 - RNA, 19 nt, Artificial Sequence
  Description of Artificial Sequence: Synthetic oligonucleotide
ggaacggucccgagggguc

SEQ ID NO: 994614 - RNA, 19 nt, Artificial Sequence
  Description of Artificial Sequence: Synthetic oligonucleotide
cugcuaacaggucuaucuu

SEQ ID NO: 994615 - RNA, 19 nt, Artificial Sequence
  Description of Artificial Sequence: Synthetic oligonucleotide
guucacuuagggagucugu

SEQ ID NO: 994616 - RNA, 19 nt, Artificial Sequence
  Description of Artificial Sequence: Synthetic oligonucleotide
cuugaaagacaggcugagu

SEQ ID NO: 994617 - RNA, 19 nt, Artificial Sequence
  Description of Artificial Sequence: Synthetic oligonucleotide
cgcuuuucuguccaccuca

SEQ ID NO: 994618 - RNA, 19 nt, Artificial Sequence
  Description of Artificial Sequence: Synthetic oligonucleotide
ugacugucucguggcccac

SEQ ID NO: 994619 - RNA, 19 nt, Artificial Sequence
  Description of Artificial Sequence: Synthetic oligonucleotide
gcagucgaccagcgugacc

SEQ ID NO: 994620 - RNA, 19 nt, Artificial Sequence
  Description of Artificial Sequence: Synthetic oligonucleotide
auucccgggagaggucgaa

SEQ ID NO: 994621 - RNA, 19 nt, Artificial Sequence
  Description of Artificial Sequence: Synthetic oligonucleotide
cguccaaucacgcuguagu

SEQ ID NO: 994622 - RNA, 19 nt, Artificial Sequence
  Description of Artificial Sequence: Synthetic oligonucleotide
gcgaucuggccaaucacaa

SEQ ID NO: 994623 - RNA, 19 nt, Artificial Sequence
  Description of Artificial Sequence: Synthetic oligonucleotide
gcggcccaugacugucucg

SEQ ID NO: 994624 - RNA, 19 nt, Artificial Sequence
  Description of Artificial Sequence: Synthetic oligonucleotide
gaugcccagucgaucuccu

SEQ ID NO: 994625 - RNA, 19 nt, Artificial Sequence
  Description of Artificial Sequence: Synthetic oligonucleotide
gcguccaaucacgcuguag

SEQ ID NO: 994626 - RNA, 19 nt, Artificial Sequence
  Description of Artificial Sequence: Synthetic oligonucleotide
ccggaauuugguguucuca

SEQ ID NO: 994627 - RNA, 19 nt, Artificial Sequence
  Description of Artificial Sequence: Synthetic oligonucleotide
cuuagggagucuguaccau

SEQ ID NO: 994628 - RNA, 19 nt, Artificial Sequence
  Description of Artificial Sequence: Synthetic oligonucleotide
ccgaggcugauagugccug

SEQ ID NO: 994629 - RNA, 19 nt, Artificial Sequence
  Description of Artificial Sequence: Synthetic oligonucleotide
gguauucccgggagagguc

SEQ ID NO: 994630 - RNA, 19 nt, Artificial Sequence
  Description of Artificial Sequence: Synthetic oligonucleotide
aggugacggguguguggaa

SEQ ID NO: 994631 - RNA, 19 nt, Artificial Sequence
  Description of Artificial Sequence: Synthetic oligonucleotide
gguccggaugagggaggcg

SEQ ID NO: 994632 - RNA, 19 nt, Artificial Sequence
  Description of Artificial Sequence: Synthetic oligonucleotide
gggcagucgaccagcguga

SEQ ID NO: 994633 - RNA, 19 nt, Artificial Sequence
  Description of Artificial Sequence: Synthetic oligonucleotide
caggaggccccggaaguaa

SEQ ID NO: 994634 - RNA, 19 nt, Artificial Sequence
  Description of Artificial Sequence: Synthetic oligonucleotide
cuagccgggcuuaguugcu

SEQ ID NO: 994635 - RNA, 19 nt, Artificial Sequence
  Description of Artificial Sequence: Synthetic oligonucleotide
cuccccgcggccggcucgg

SEQ ID NO: 994636 - RNA, 19 nt, Artificial Sequence
  Description of Artificial Sequence: Synthetic oligonucleotide
gcuauccuagguggugcca

SEQ ID NO: 994637 - RNA, 19 nt, Artificial Sequence
  Description of Artificial Sequence: Synthetic oligonucleotide
agcguccaaucacgcugua

SEQ ID NO: 994638 - RNA, 19 nt, Artificial Sequence
  Description of Artificial Sequence: Synthetic oligonucleotide
ccggaugagggaggcgugc

SEQ ID NO: 994639 - RNA, 19 nt, Artificial Sequence
  Description of Artificial Sequence: Synthetic oligonucleotide
ccgggagaggucgaaagaa

SEQ ID NO: 994640 - RNA, 19 nt, Artificial Sequence
  Description of Artificial Sequence: Synthetic oligonucleotide
ccacaagaccaugcuugug

SEQ ID NO: 994641 - RNA, 19 nt, Artificial Sequence
  Description of Artificial Sequence: Synthetic oligonucleotide
ggcauccagucuggaacca

SEQ ID NO: 994642 - RNA, 19 nt, Artificial Sequence
  Description of Artificial Sequence: Synthetic oligonucleotide
cccggggcagucgaccagc

SEQ ID NO: 994643 - RNA, 19 nt, Artificial Sequence
  Description of Artificial Sequence: Synthetic oligonucleotide
gggagcguccaaucacgcu

SEQ ID NO: 994644 - RNA, 19 nt, Artificial Sequence
  Description of Artificial Sequence: Synthetic oligonucleotide
ccgccaaugaugguccgga

SEQ ID NO: 994645 - RNA, 19 nt, Artificial Sequence
  Description of Artificial Sequence: Synthetic oligonucleotide
ggccccggaaguaagggau

SEQ ID NO: 994646 - RNA, 19 nt, Artificial Sequence
  Description of Artificial Sequence: Synthetic oligonucleotide
ggcccacggugauauggaa

SEQ ID NO: 994647 - RNA, 19 nt, Artificial Sequence
  Description of Artificial Sequence: Synthetic oligonucleotide
ggcagucgaccagcgugac

SEQ ID NO: 994648 - RNA, 19 nt, Artificial Sequence
  Description of Artificial Sequence: Synthetic oligonucleotide
gcauccagucuggaaccaa

SEQ ID NO: 994649 - RNA, 19 nt, Artificial Sequence
  Description of Artificial Sequence: Synthetic oligonucleotide
gucuccccgcggccggcuc

SEQ ID NO: 994650 - RNA, 19 nt, Artificial Sequence
  Description of Artificial Sequence: Synthetic oligonucleotide
ccggcauguguugguauga

SEQ ID NO: 994651 - RNA, 19 nt, Artificial Sequence
  Description of Artificial Sequence: Synthetic oligonucleotide
caucaaucacgagcaucau

SEQ ID NO: 994652 - RNA, 19 nt, Artificial Sequence
  Description of Artificial Sequence: Synthetic oligonucleotide
ggucucuugcugggaugga

SEQ ID NO: 994653 - RNA, 19 nt, Artificial Sequence
  Description of Artificial Sequence: Synthetic oligonucleotide
gccccggaaguaagggauc

SEQ ID NO: 994654 - RNA, 19 nt, Artificial Sequence
  Description of Artificial Sequence: Synthetic oligonucleotide
cagccggcauguguuggua

SEQ ID NO: 994655 - RNA, 19 nt, Artificial Sequence
  Description of Artificial Sequence: Synthetic oligonucleotide
gcaggcgaucuggccaauc

SEQ ID NO: 994656 - RNA, 19 nt, Artificial Sequence
  Description of Artificial Sequence: Synthetic oligonucleotide
gcccuguggagcuuccguu

SEQ ID NO: 994657 - RNA, 19 nt, Artificial Sequence
  Description of Artificial Sequence: Synthetic oligonucleotide
cugucucguggcccacggu

SEQ ID NO: 994658 - RNA, 19 nt, Artificial Sequence
  Description of Artificial Sequence: Synthetic oligonucleotide
ccgcggccggcucgguucc

SEQ ID NO: 994659 - RNA, 19 nt, Artificial Sequence
  Description of Artificial Sequence: Synthetic oligonucleotide
ccuggagugucauccgcuu

SEQ ID NO: 994660 - RNA, 19 nt, Artificial Sequence
  Description of Artificial Sequence: Synthetic oligonucleotide
gaggcgugcccggggcagu

SEQ ID NO: 994661 - RNA, 19 nt, Artificial Sequence
  Description of Artificial Sequence: Synthetic oligonucleotide
guguagguguuaggaucuu

SEQ ID NO: 994662 - RNA, 19 nt, Artificial Sequence
  Description of Artificial Sequence: Synthetic oligonucleotide
ggcugccacgggaauaauu

SEQ ID NO: 994663 - RNA, 19 nt, Artificial Sequence
  Description of Artificial Sequence: Synthetic oligonucleotide
ccuuuccuagccgggcuua

SEQ ID NO: 994664 - RNA, 19 nt, Artificial Sequence
  Description of Artificial Sequence: Synthetic oligonucleotide
cggaaguaagggaucuuuu

SEQ ID NO: 994665 - RNA, 19 nt, Artificial Sequence
  Description of Artificial Sequence: Synthetic oligonucleotide
ggccgaaggcacugucgau

SEQ ID NO: 994666 - RNA, 19 nt, Artificial Sequence
  Description of Artificial Sequence: Synthetic oligonucleotide
cccuguggagcuuccguuu

SEQ ID NO: 994667 - RNA, 19 nt, Artificial Sequence
  Description of Artificial Sequence: Synthetic oligonucleotide
cgaggcugauagugccuga

SEQ ID NO: 994668 - RNA, 19 nt, Artificial Sequence
  Description of Artificial Sequence: Synthetic oligonucleotide
cccgaggcugauagugccu

SEQ ID NO: 994669 - RNA, 19 nt, Artificial Sequence
  Description of Artificial Sequence: Synthetic oligonucleotide
ccgcuucuugaguguaggu

SEQ ID NO: 994670 - RNA, 19 nt, Artificial Sequence
  Description of Artificial Sequence: Synthetic oligonucleotide
ccccggaaguaagggaucu

SEQ ID NO: 994671 - RNA, 19 nt, Artificial Sequence
  Description of Artificial Sequence: Synthetic oligonucleotide
cgggcuuaguugcuauccu

SEQ ID NO: 994672 - RNA, 19 nt, Artificial Sequence
  Description of Artificial Sequence: Synthetic oligonucleotide
cagugcccugacccuugau

SEQ ID NO: 994673 - RNA, 19 nt, Artificial Sequence
  Description of Artificial Sequence: Synthetic oligonucleotide
ccccggaauuugguguucu

SEQ ID NO: 994674 - RNA, 19 nt, Artificial Sequence
  Description of Artificial Sequence: Synthetic oligonucleotide
gccccacaaagagcuggau

SEQ ID NO: 994675 - RNA, 19 nt, Artificial Sequence
  Description of Artificial Sequence: Synthetic oligonucleotide
ggucuccccgcggccggcu

SEQ ID NO: 994676 - RNA, 19 nt, Artificial Sequence
  Description of Artificial Sequence: Synthetic oligonucleotide
gcgugaccugcagcugagu

SEQ ID NO: 994677 - RNA, 19 nt, Artificial Sequence
  Description of Artificial Sequence: Synthetic oligonucleotide
cggggcagucgaccagcgu

SEQ ID NO: 994678 - RNA, 19 nt, Artificial Sequence
  Description of Artificial Sequence: Synthetic oligonucleotide
cggccggcucgguuccgcu

SEQ ID NO: 994679 - RNA, 19 nt, Artificial Sequence
  Description of Artificial Sequence: Synthetic oligonucleotide
acuaguaagauuuaaaggg

SEQ ID NO: 994680 - RNA, 19 nt, Artificial Sequence
  Description of Artificial Sequence: Synthetic oligonucleotide
aaugaaaacacaucucccc

SEQ ID NO: 994681 - RNA, 19 nt, Artificial Sequence
  Description of Artificial Sequence: Synthetic oligonucleotide
cuuaauguauauuauaugg

SEQ ID NO: 994682 - RNA, 19 nt, Artificial Sequence
  Description of Artificial Sequence: Synthetic oligonucleotide
uuaaauuagaguacaagag

SEQ ID NO: 994683 - RNA, 19 nt, Artificial Sequence
  Description of Artificial Sequence: Synthetic oligonucleotide
agaaauuuguaacacagac

SEQ ID NO: 994684 - RNA, 19 nt, Artificial Sequence
  Description of Artificial Sequence: Synthetic oligonucleotide
aaacuaguaagauuuaaag

SEQ ID NO: 994685 - RNA, 19 nt, Artificial Sequence
  Description of Artificial Sequence: Synthetic oligonucleotide
ucuauuuucacacacuacc

SEQ ID NO: 994686 - RNA, 19 nt, Artificial Sequence
  Description of Artificial Sequence: Synthetic oligonucleotide
auaguaacaaacuaguaag

SEQ ID NO: 994687 - RNA, 19 nt, Artificial Sequence
  Description of Artificial Sequence: Synthetic oligonucleotide
ugguauugaaaccauaacg

SEQ ID NO: 994688 - RNA, 19 nt, Artificial Sequence
  Description of Artificial Sequence: Synthetic oligonucleotide
uauaugacaaaauaguaac

SEQ ID NO: 994689 - RNA, 19 nt, Artificial Sequence
  Description of Artificial Sequence: Synthetic oligonucleotide
cuaugaauaaucuguaugg

SEQ ID NO: 994690 - RNA, 19 nt, Artificial Sequence
  Description of Artificial Sequence: Synthetic oligonucleotide
uuaaauguaguacaacuug

SEQ ID NO: 994691 - RNA, 19 nt, Artificial Sequence
  Description of Artificial Sequence: Synthetic oligonucleotide
aauguauauuauaugggcc

SEQ ID NO: 994692 - RNA, 19 nt, Artificial Sequence
  Description of Artificial Sequence: Synthetic oligonucleotide
uaaauuagaguacaagagc

SEQ ID NO: 994693 - RNA, 19 nt, Artificial Sequence
  Description of Artificial Sequence: Synthetic oligonucleotide
ucucauaccuuacacaagg

SEQ ID NO: 994694 - RNA, 19 nt, Artificial Sequence
  Description of Artificial Sequence: Synthetic oligonucleotide
aauaaugcauguucagacg

SEQ ID NO: 994695 - RNA, 19 nt, Artificial Sequence
  Description of Artificial Sequence: Synthetic oligonucleotide
aauaccauggcuuugugaa

SEQ ID NO: 994696 - RNA, 19 nt, Artificial Sequence
  Description of Artificial Sequence: Synthetic oligonucleotide
uacucaagaaauaccaugg

SEQ ID NO: 994697 - RNA, 19 nt, Artificial Sequence
  Description of Artificial Sequence: Synthetic oligonucleotide
aaguuuacuacaccaaguc

SEQ ID NO: 994698 - RNA, 19 nt, Artificial Sequence
  Description of Artificial Sequence: Synthetic oligonucleotide
aaccauaacggauauuccg

SEQ ID NO: 994699 - RNA, 19 nt, Artificial Sequence
  Description of Artificial Sequence: Synthetic oligonucleotide
uaauguauauuauaugggc

SEQ ID NO: 994700 - RNA, 19 nt, Artificial Sequence
  Description of Artificial Sequence: Synthetic oligonucleotide
uuaucaguauuccaaaccc

SEQ ID NO: 994701 - RNA, 19 nt, Artificial Sequence
  Description of Artificial Sequence: Synthetic oligonucleotide
uccaguaaugauauaaaag

SEQ ID NO: 994702 - RNA, 19 nt, Artificial Sequence
  Description of Artificial Sequence: Synthetic oligonucleotide
auaagaaucacaagaaugg

SEQ ID NO: 994703 - RNA, 19 nt, Artificial Sequence
  Description of Artificial Sequence: Synthetic oligonucleotide
uguccuaugaauaaucugu

SEQ ID NO: 994704 - RNA, 19 nt, Artificial Sequence
  Description of Artificial Sequence: Synthetic oligonucleotide
aacagaauucuaaacacac

SEQ ID NO: 994705 - RNA, 19 nt, Artificial Sequence
  Description of Artificial Sequence: Synthetic oligonucleotide
uguaucaauaaauacacau

SEQ ID NO: 994706 - RNA, 19 nt, Artificial Sequence
  Description of Artificial Sequence: Synthetic oligonucleotide
uuuaaagggaauuguaaug

SEQ ID NO: 994707 - RNA, 19 nt, Artificial Sequence
  Description of Artificial Sequence: Synthetic oligonucleotide
uaugacagaaauuuguaac

SEQ ID NO: 994708 - RNA, 19 nt, Artificial Sequence
  Description of Artificial Sequence: Synthetic oligonucleotide
agacuaaccacaaaguacc

SEQ ID NO: 994709 - RNA, 19 nt, Artificial Sequence
  Description of Artificial Sequence: Synthetic oligonucleotide
aaaaguuugcuacuuacau

SEQ ID NO: 994710 - RNA, 19 nt, Artificial Sequence
  Description of Artificial Sequence: Synthetic oligonucleotide
aauacugucuagcaaauua

SEQ ID NO: 994711 - RNA, 19 nt, Artificial Sequence
  Description of Artificial Sequence: Synthetic oligonucleotide
auacacaucaauuuucuug

SEQ ID NO: 994712 - RNA, 19 nt, Artificial Sequence
  Description of Artificial Sequence: Synthetic oligonucleotide
uuuacuacaccaagucugg

SEQ ID NO: 994713 - RNA, 19 nt, Artificial Sequence
  Description of Artificial Sequence: Synthetic oligonucleotide
auaaugcauguucagacgg

SEQ ID NO: 994714 - RNA, 19 nt, Artificial Sequence
  Description of Artificial Sequence: Synthetic oligonucleotide
aaagaauacacagauauuu

SEQ ID NO: 994715 - RNA, 19 nt, Artificial Sequence
  Description of Artificial Sequence: Synthetic oligonucleotide
aauuguaauguaucaauaa

SEQ ID NO: 994716 - RNA, 19 nt, Artificial Sequence
  Description of Artificial Sequence: Synthetic oligonucleotide
agaaaugaugacuugauau

SEQ ID NO: 994717 - RNA, 19 nt, Artificial Sequence
  Description of Artificial Sequence: Synthetic oligonucleotide
auaugggccaccuuaaauc

SEQ ID NO: 994718 - RNA, 19 nt, Artificial Sequence
  Description of Artificial Sequence: Synthetic oligonucleotide
uguaguacaacuugaucag

SEQ ID NO: 994719 - RNA, 19 nt, Artificial Sequence
  Description of Artificial Sequence: Synthetic oligonucleotide
ugucuagcaaauuacaaac

SEQ ID NO: 994720 - RNA, 19 nt, Artificial Sequence
  Description of Artificial Sequence: Synthetic oligonucleotide
uuagcaugacccuaguuag

SEQ ID NO: 994721 - RNA, 19 nt, Artificial Sequence
  Description of Artificial Sequence: Synthetic oligonucleotide
aaauuagaguacaagagca

SEQ ID NO: 994722 - RNA, 19 nt, Artificial Sequence
  Description of Artificial Sequence: Synthetic oligonucleotide
uuauaaucuccuuagcaug

SEQ ID NO: 994723 - RNA, 19 nt, Artificial Sequence
  Description of Artificial Sequence: Synthetic oligonucleotide
uauuauaugggccaccuua

SEQ ID NO: 994724 - RNA, 19 nt, Artificial Sequence
  Description of Artificial Sequence: Synthetic oligonucleotide
gaaaccauaacggauauuc

SEQ ID NO: 994725 - RNA, 19 nt, Artificial Sequence
  Description of Artificial Sequence: Synthetic oligonucleotide
acagaauauguuuccaaac

SEQ ID NO: 994726 - RNA, 19 nt, Artificial Sequence
  Description of Artificial Sequence: Synthetic oligonucleotide
cauaugaugaauccguccc

SEQ ID NO: 994727 - RNA, 19 nt, Artificial Sequence
  Description of Artificial Sequence: Synthetic oligonucleotide
uuuuaaggaauucagcuuu

SEQ ID NO: 994728 - RNA, 19 nt, Artificial Sequence
  Description of Artificial Sequence: Synthetic oligonucleotide
ucuagguuauauuugggca

SEQ ID NO: 994729 - RNA, 19 nt, Artificial Sequence
  Description of Artificial Sequence: Synthetic oligonucleotide
auuauaaucuccuuagcau

SEQ ID NO: 994730 - RNA, 19 nt, Artificial Sequence
  Description of Artificial Sequence: Synthetic oligonucleotide
acauaugaugaauccgucc

SEQ ID NO: 994731 - RNA, 19 nt, Artificial Sequence
  Description of Artificial Sequence: Synthetic oligonucleotide
gguauugaaaccauaacgg

SEQ ID NO: 994732 - RNA, 19 nt, Artificial Sequence
  Description of Artificial Sequence: Synthetic oligonucleotide
agaguuacuugugaaauac

SEQ ID NO: 994733 - RNA, 19 nt, Artificial Sequence
  Description of Artificial Sequence: Synthetic oligonucleotide
ucaagaaauaccauggcuu

SEQ ID NO: 994734 - RNA, 19 nt, Artificial Sequence
  Description of Artificial Sequence: Synthetic oligonucleotide
aaugcgccagauaagaauc

SEQ ID NO: 994735 - RNA, 19 nt, Artificial Sequence
  Description of Artificial Sequence: Synthetic oligonucleotide
aucaagucuuaagaaaucc

SEQ ID NO: 994736 - RNA, 19 nt, Artificial Sequence
  Description of Artificial Sequence: Synthetic oligonucleotide
agaaaauuuauaagggagg

SEQ ID NO: 994737 - RNA, 19 nt, Artificial Sequence
  Description of Artificial Sequence: Synthetic oligonucleotide
caaaauuaguauguguugg

SEQ ID NO: 994738 - RNA, 19 nt, Artificial Sequence
  Description of Artificial Sequence: Synthetic oligonucleotide
uuuagcugguucauuaaca

SEQ ID NO: 994739 - RNA, 19 nt, Artificial Sequence
  Description of Artificial Sequence: Synthetic oligonucleotide
acgcaugucuuucuaaagc

SEQ ID NO: 994740 - RNA, 19 nt, Artificial Sequence
  Description of Artificial Sequence: Synthetic oligonucleotide
aaaaucauacaaagguuag

SEQ ID NO: 994741 - RNA, 19 nt, Artificial Sequence
  Description of Artificial Sequence: Synthetic oligonucleotide
gaaugcuggggccuuaugg

SEQ ID NO: 994742 - RNA, 19 nt, Artificial Sequence
  Description of Artificial Sequence: Synthetic oligonucleotide
guaauguaucaauaaauac

SEQ ID NO: 994743 - RNA, 19 nt, Artificial Sequence
  Description of Artificial Sequence: Synthetic oligonucleotide
auacucaagaaauaccaug

SEQ ID NO: 994744 - RNA, 19 nt, Artificial Sequence
  Description of Artificial Sequence: Synthetic oligonucleotide
guuauuguuucuauaacgc

SEQ ID NO: 994745 - RNA, 19 nt, Artificial Sequence
  Description of Artificial Sequence: Synthetic oligonucleotide
uaagauuuaaagggaauug

SEQ ID NO: 994746 - RNA, 19 nt, Artificial Sequence
  Description of Artificial Sequence: Synthetic oligonucleotide
uuuaaauguaguacaacuu

SEQ ID NO: 994747 - RNA, 19 nt, Artificial Sequence
  Description of Artificial Sequence: Synthetic oligonucleotide
auguauauuauaugggcca

SEQ ID NO: 994748 - RNA, 19 nt, Artificial Sequence
  Description of Artificial Sequence: Synthetic oligonucleotide
uuacuugugaaauacucaa

SEQ ID NO: 994749 - RNA, 19 nt, Artificial Sequence
  Description of Artificial Sequence: Synthetic oligonucleotide
aagggaauuguaauguauc

SEQ ID NO: 994750 - RNA, 19 nt, Artificial Sequence
  Description of Artificial Sequence: Synthetic oligonucleotide
auaugaugaauccgucccc

SEQ ID NO: 994751 - RNA, 19 nt, Artificial Sequence
  Description of Artificial Sequence: Synthetic oligonucleotide
aaaugcgccagauaagaau

SEQ ID NO: 994752 - RNA, 19 nt, Artificial Sequence
  Description of Artificial Sequence: Synthetic oligonucleotide
guuuacuacaccaagucug

SEQ ID NO: 994753 - RNA, 19 nt, Artificial Sequence
  Description of Artificial Sequence: Synthetic oligonucleotide
uguuaaaagcugcaacuac

SEQ ID NO: 994754 - RNA, 19 nt, Artificial Sequence
  Description of Artificial Sequence: Synthetic oligonucleotide
augguauugaaaccauaac

SEQ ID NO: 994755 - RNA, 19 nt, Artificial Sequence
  Description of Artificial Sequence: Synthetic oligonucleotide
aaaauuuauaagggaggag

SEQ ID NO: 994756 - RNA, 19 nt, Artificial Sequence
  Description of Artificial Sequence: Synthetic oligonucleotide
aauauaugacaaaauagua

SEQ ID NO: 994757 - RNA, 19 nt, Artificial Sequence
  Description of Artificial Sequence: Synthetic oligonucleotide
aguuacuugugaaauacuc

SEQ ID NO: 994758 - RNA, 19 nt, Artificial Sequence
  Description of Artificial Sequence: Synthetic oligonucleotide
uuauuguuucuauaacgca

SEQ ID NO: 994759 - RNA, 19 nt, Artificial Sequence
  Description of Artificial Sequence: Synthetic oligonucleotide
aaguaugacagaaauuugu

SEQ ID NO: 994760 - RNA, 19 nt, Artificial Sequence
  Description of Artificial Sequence: Synthetic oligonucleotide
aaugcauguucagacgggg

SEQ ID NO: 994761 - RNA, 19 nt, Artificial Sequence
  Description of Artificial Sequence: Synthetic oligonucleotide
gaguacuuaauguauauua

SEQ ID NO: 994762 - RNA, 19 nt, Artificial Sequence
  Description of Artificial Sequence: Synthetic oligonucleotide
guaaugauauaaaagguga

SEQ ID NO: 994763 - RNA, 19 nt, Artificial Sequence
  Description of Artificial Sequence: Synthetic oligonucleotide
aagacgagugauuguuuuc

SEQ ID NO: 994764 - RNA, 19 nt, Artificial Sequence
  Description of Artificial Sequence: Synthetic oligonucleotide
ucauaccuuacacaaggca

SEQ ID NO: 994765 - RNA, 19 nt, Artificial Sequence
  Description of Artificial Sequence: Synthetic oligonucleotide
guagauaucauacaggaau

SEQ ID NO: 994766 - RNA, 19 nt, Artificial Sequence
  Description of Artificial Sequence: Synthetic oligonucleotide
ggagagaacacauaugaug

SEQ ID NO: 994767 - RNA, 19 nt, Artificial Sequence
  Description of Artificial Sequence: Synthetic oligonucleotide
aaaccauaacggauauucc

SEQ ID NO: 994768 - RNA, 19 nt, Artificial Sequence
  Description of Artificial Sequence: Synthetic oligonucleotide
aaauacacaucaauuuucu

SEQ ID NO: 994769 - RNA, 19 nt, Artificial Sequence
  Description of Artificial Sequence: Synthetic oligonucleotide
aaaacacaucuccccagag

SEQ ID NO: 994770 - RNA, 19 nt, Artificial Sequence
  Description of Artificial Sequence: Synthetic oligonucleotide
aacgcaugucuuucuaaag

SEQ ID NO: 994771 - RNA, 19 nt, Artificial Sequence
  Description of Artificial Sequence: Synthetic oligonucleotide
uaaugcauguucagacggg

SEQ ID NO: 994772 - RNA, 19 nt, Artificial Sequence
  Description of Artificial Sequence: Synthetic oligonucleotide
ucaggauuuagcugguuca

SEQ ID NO: 994773 - RNA, 19 nt, Artificial Sequence
  Description of Artificial Sequence: Synthetic oligonucleotide
auuacguuuaaaaguuuac

SEQ ID NO: 994774 - RNA, 19 nt, Artificial Sequence
  Description of Artificial Sequence: Synthetic oligonucleotide
uuaacauauugacauuauc

SEQ ID NO: 994775 - RNA, 19 nt, Artificial Sequence
  Description of Artificial Sequence: Synthetic oligonucleotide
accauaacggauauuccgc

SEQ ID NO: 994776 - RNA, 19 nt, Artificial Sequence
  Description of Artificial Sequence: Synthetic oligonucleotide
ucggaaguaugacagaaau

SEQ ID NO: 994777 - RNA, 19 nt, Artificial Sequence
  Description of Artificial Sequence: Synthetic oligonucleotide
uuuacagguuguccuauga

SEQ ID NO: 994778 - RNA, 19 nt, Artificial Sequence
  Description of Artificial Sequence: Synthetic oligonucleotide
guuauauuugggcagaugu

SEQ ID NO: 994779 - RNA, 19 nt, Artificial Sequence
  Description of Artificial Sequence: Synthetic oligonucleotide
ugaaaacacaucuccccag

SEQ ID NO: 994780 - RNA, 19 nt, Artificial Sequence
  Description of Artificial Sequence: Synthetic oligonucleotide
aaauuaguauguguuggca

SEQ ID NO: 994781 - RNA, 19 nt, Artificial Sequence
  Description of Artificial Sequence: Synthetic oligonucleotide
aaauaccauggcuuuguga

SEQ ID NO: 994782 - RNA, 19 nt, Artificial Sequence
  Description of Artificial Sequence: Synthetic oligonucleotide
gccaccuuaaaucaaaggc

SEQ ID NO: 994783 - RNA, 19 nt, Artificial Sequence
  Description of Artificial Sequence: Synthetic oligonucleotide
acauauugacauuaucagu

SEQ ID NO: 994784 - RNA, 19 nt, Artificial Sequence
  Description of Artificial Sequence: Synthetic oligonucleotide
aaaguuuacuacaccaagu

SEQ ID NO: 994785 - RNA, 19 nt, Artificial Sequence
  Description of Artificial Sequence: Synthetic oligonucleotide
caagauacauugcugauga

SEQ ID NO: 994786 - RNA, 19 nt, Artificial Sequence
  Description of Artificial Sequence: Synthetic oligonucleotide
aucuguauggaaaauauaa

SEQ ID NO: 994787 - RNA, 19 nt, Artificial Sequence
  Description of Artificial Sequence: Synthetic oligonucleotide
uaguaacaaacuaguaaga

SEQ ID NO: 994788 - RNA, 19 nt, Artificial Sequence
  Description of Artificial Sequence: Synthetic oligonucleotide
caugcaaagaaaugaugac

SEQ ID NO: 994789 - RNA, 19 nt, Artificial Sequence
  Description of Artificial Sequence: Synthetic oligonucleotide
auuaguauguguuggcaaa

SEQ ID NO: 994790 - RNA, 19 nt, Artificial Sequence
  Description of Artificial Sequence: Synthetic oligonucleotide
gugauuguuuucaucaucc

SEQ ID NO: 994791 - RNA, 19 nt, Artificial Sequence
  Description of Artificial Sequence: Synthetic oligonucleotide
ucaguauuccaaacccaag

SEQ ID NO: 994792 - RNA, 19 nt, Artificial Sequence
  Description of Artificial Sequence: Synthetic oligonucleotide
uccgcaauuuguuuagaug

SEQ ID NO: 994793 - RNA, 19 nt, Artificial Sequence
  Description of Artificial Sequence: Synthetic oligonucleotide
uuacguuuaaaaguuuacu

SEQ ID NO: 994794 - RNA, 19 nt, Artificial Sequence
  Description of Artificial Sequence: Synthetic oligonucleotide
guucucuauauauucugcc

SEQ ID NO: 994795 - RNA, 19 nt, Artificial Sequence
  Description of Artificial Sequence: Synthetic oligonucleotide
ccguacaucaauauuaaag

SEQ ID NO: 994796 - RNA, 19 nt, Artificial Sequence
  Description of Artificial Sequence: Synthetic oligonucleotide
ucauggaaauguauuugga

SEQ ID NO: 994797 - RNA, 19 nt, Artificial Sequence
  Description of Artificial Sequence: Synthetic oligonucleotide
gaugaauccguccccaauc

SEQ ID NO: 994798 - RNA, 19 nt, Artificial Sequence
  Description of Artificial Sequence: Synthetic oligonucleotide
auacaggaaugcuggggcc

SEQ ID NO: 994799 - RNA, 19 nt, Artificial Sequence
  Description of Artificial Sequence: Synthetic oligonucleotide
uacuugugaaauacucaag

SEQ ID NO: 994800 - RNA, 19 nt, Artificial Sequence
  Description of Artificial Sequence: Synthetic oligonucleotide
uauaugggccaccuuaaau

SEQ ID NO: 994801 - RNA, 19 nt, Artificial Sequence
  Description of Artificial Sequence: Synthetic oligonucleotide
uacugucuagcaaauuaca

SEQ ID NO: 994802 - RNA, 19 nt, Artificial Sequence
  Description of Artificial Sequence: Synthetic oligonucleotide
aaacuucaguaucauucca

SEQ ID NO: 994803 - RNA, 19 nt, Artificial Sequence
  Description of Artificial Sequence: Synthetic oligonucleotide
auaucauacaggaaugcug

SEQ ID NO: 994804 - RNA, 19 nt, Artificial Sequence
  Description of Artificial Sequence: Synthetic oligonucleotide
uuagaguacaagagcaaua

SEQ ID NO: 994805 - RNA, 19 nt, Artificial Sequence
  Description of Artificial Sequence: Synthetic oligonucleotide
aguuuacuacaccaagucu

SEQ ID NO: 994806 - RNA, 19 nt, Artificial Sequence
  Description of Artificial Sequence: Synthetic oligonucleotide
uuguccuaugaauaaucug

SEQ ID NO: 994807 - RNA, 19 nt, Artificial Sequence
  Description of Artificial Sequence: Synthetic oligonucleotide
aauuacguuuaaaaguuua

SEQ ID NO: 994808 - RNA, 19 nt, Artificial Sequence
  Description of Artificial Sequence: Synthetic oligonucleotide
guuuucauuacaucaugga

SEQ ID NO: 994809 - RNA, 19 nt, Artificial Sequence
  Description of Artificial Sequence: Synthetic oligonucleotide
uuuacucuccauacuaauu

SEQ ID NO: 994810 - RNA, 19 nt, Artificial Sequence
  Description of Artificial Sequence: Synthetic oligonucleotide
agggaauuguaauguauca

SEQ ID NO: 994811 - RNA, 19 nt, Artificial Sequence
  Description of Artificial Sequence: Synthetic oligonucleotide
agauaagaaucacaagaau

SEQ ID NO: 994812 - RNA, 19 nt, Artificial Sequence
  Description of Artificial Sequence: Synthetic oligonucleotide
ucaauauuaaaggucuuuu

SEQ ID NO: 994813 - RNA, 19 nt, Artificial Sequence
  Description of Artificial Sequence: Synthetic oligonucleotide
auguaacugccguacauca

SEQ ID NO: 994814 - RNA, 19 nt, Artificial Sequence
  Description of Artificial Sequence: Synthetic oligonucleotide
uuaguccccaugcaguagu

SEQ ID NO: 994815 - RNA, 19 nt, Artificial Sequence
  Description of Artificial Sequence: Synthetic oligonucleotide
guucagacgggguaacucc

SEQ ID NO: 994816 - RNA, 19 nt, Artificial Sequence
  Description of Artificial Sequence: Synthetic oligonucleotide
ugguccuagaccagaaacu

SEQ ID NO: 994817 - RNA, 19 nt, Artificial Sequence
  Description of Artificial Sequence: Synthetic oligonucleotide
uuuuacucuccauacuaau

SEQ ID NO: 994818 - RNA, 19 nt, Artificial Sequence
  Description of Artificial Sequence: Synthetic oligonucleotide
ucuauaacgcaugucuuuc

SEQ ID NO: 994819 - RNA, 19 nt, Artificial Sequence
  Description of Artificial Sequence: Synthetic oligonucleotide
auggcuuacagcaauccag

SEQ ID NO: 994820 - RNA, 19 nt, Artificial Sequence
  Description of Artificial Sequence: Synthetic oligonucleotide
cuaccauggucucucauac

SEQ ID NO: 994821 - RNA, 19 nt, Artificial Sequence
  Description of Artificial Sequence: Synthetic oligonucleotide
cauuugaucaaaacauaga

SEQ ID NO: 994822 - RNA, 19 nt, Artificial Sequence
  Description of Artificial Sequence: Synthetic oligonucleotide
ggccuuauggcuuacagca

SEQ ID NO: 994823 - RNA, 19 nt, Artificial Sequence
  Description of Artificial Sequence: Synthetic oligonucleotide
uacagcaauccaguaauga

SEQ ID NO: 994824 - RNA, 19 nt, Artificial Sequence
  Description of Artificial Sequence: Synthetic oligonucleotide
uguauauuauaugggccac

SEQ ID NO: 994825 - RNA, 19 nt, Artificial Sequence
  Description of Artificial Sequence: Synthetic oligonucleotide
uuauggcuuacagcaaucc

SEQ ID NO: 994826 - RNA, 19 nt, Artificial Sequence
  Description of Artificial Sequence: Synthetic oligonucleotide
uaagaaucacaagaauggu

SEQ ID NO: 994827 - RNA, 19 nt, Artificial Sequence
  Description of Artificial Sequence: Synthetic oligonucleotide
uaacgcaugucuuucuaaa

SEQ ID NO: 994828 - RNA, 19 nt, Artificial Sequence
  Description of Artificial Sequence: Synthetic oligonucleotide
gaaguaugacagaaauuug

SEQ ID NO: 994829 - RNA, 19 nt, Artificial Sequence
  Description of Artificial Sequence: Synthetic oligonucleotide
uuucuauaacgcaugucuu

SEQ ID NO: 994830 - RNA, 19 nt, Artificial Sequence
  Description of Artificial Sequence: Synthetic oligonucleotide
uaccuuacacaaggcaugg

SEQ ID NO: 994831 - RNA, 19 nt, Artificial Sequence
  Description of Artificial Sequence: Synthetic oligonucleotide
acgagugauuguuuucauc

SEQ ID NO: 994832 - RNA, 19 nt, Artificial Sequence
  Description of Artificial Sequence: Synthetic oligonucleotide
uauaacgcaugucuuucua

SEQ ID NO: 994833 - RNA, 19 nt, Artificial Sequence
  Description of Artificial Sequence: Synthetic oligonucleotide
ccuaugaauaaucuguaug

SEQ ID NO: 994834 - RNA, 19 nt, Artificial Sequence
  Description of Artificial Sequence: Synthetic oligonucleotide
uaugaugaauccgucccca

SEQ ID NO: 994835 - RNA, 19 nt, Artificial Sequence
  Description of Artificial Sequence: Synthetic oligonucleotide
ugaucagcuuaauuauaac

SEQ ID NO: 994836 - RNA, 19 nt, Artificial Sequence
  Description of Artificial Sequence: Synthetic oligonucleotide
ucagacgggguaacucccg

SEQ ID NO: 994837 - RNA, 19 nt, Artificial Sequence
  Description of Artificial Sequence: Synthetic oligonucleotide
uucagacgggguaacuccc

SEQ ID NO: 994838 - RNA, 19 nt, Artificial Sequence
  Description of Artificial Sequence: Synthetic oligonucleotide
auauugacauuaucaguau

SEQ ID NO: 994839 - RNA, 19 nt, Artificial Sequence
  Description of Artificial Sequence: Synthetic oligonucleotide
uucuauaacgcaugucuuu

SEQ ID NO: 994840 - RNA, 19 nt, Artificial Sequence
  Description of Artificial Sequence: Synthetic oligonucleotide
auaacggauauuccgcaau

SEQ ID NO: 994841 - RNA, 19 nt, Artificial Sequence
  Description of Artificial Sequence: Synthetic oligonucleotide
auauuccgcaauuuguuua

SEQ ID NO: 994842 - RNA, 19 nt, Artificial Sequence
  Description of Artificial Sequence: Synthetic oligonucleotide
acuucaguaucauuccaaa

SEQ ID NO: 994843 - RNA, 19 nt, Artificial Sequence
  Description of Artificial Sequence: Synthetic oligonucleotide
ugcaacuacauuccuucau

SEQ ID NO: 994844 - RNA, 19 nt, Artificial Sequence
  Description of Artificial Sequence: Synthetic oligonucleotide
agauucuagguuauauuug

SEQ ID NO: 994845 - RNA, 19 nt, Artificial Sequence
  Description of Artificial Sequence: Synthetic oligonucleotide
ugcauguucagacggggua

SEQ ID NO: 994846 - RNA, 19 nt, Artificial Sequence
  Description of Artificial Sequence: Synthetic oligonucleotide
aguguugugcugaacaagu

SEQ ID NO: 994847 - RNA, 19 nt, Artificial Sequence
  Description of Artificial Sequence: Synthetic oligonucleotide
uuuuacagguuguccuaug

SEQ ID NO: 994848 - RNA, 19 nt, Artificial Sequence
  Description of Artificial Sequence: Synthetic oligonucleotide
uuuuaguccccaugcagua

SEQ ID NO: 994849 - RNA, 19 nt, Artificial Sequence
  Description of Artificial Sequence: Synthetic oligonucleotide
caaagcauauuuggugagg

SEQ ID NO: 994850 - RNA, 19 nt, Artificial Sequence
  Description of Artificial Sequence: Synthetic oligonucleotide
aguacuuaauguauauuau

SEQ ID NO: 994851 - RNA, 19 nt, Artificial Sequence
  Description of Artificial Sequence: Synthetic oligonucleotide
guuacuugugaaauacuca

SEQ ID NO: 994852 - RNA, 19 nt, Artificial Sequence
  Description of Artificial Sequence: Synthetic oligonucleotide
agcuuaauuauaacagugu

SEQ ID NO: 994853 - RNA, 19 nt, Artificial Sequence
  Description of Artificial Sequence: Synthetic oligonucleotide
cuugccauuugugaucuug

SEQ ID NO: 994854 - RNA, 19 nt, Artificial Sequence
  Description of Artificial Sequence: Synthetic oligonucleotide
ugccguacaucaauauuaa

SEQ ID NO: 994855 - RNA, 19 nt, Artificial Sequence
  Description of Artificial Sequence: Synthetic oligonucleotide
auaaucuccuuagcaugac

SEQ ID NO: 994856 - RNA, 19 nt, Artificial Sequence
  Description of Artificial Sequence: Synthetic oligonucleotide
uccucucggaaguaugaca

SEQ ID NO: 994857 - RNA, 19 nt, Artificial Sequence
  Description of Artificial Sequence: Synthetic oligonucleotide
uaguuagcauuucuuuaaa

SEQ ID NO: 994858 - RNA, 19 nt, Artificial Sequence
  Description of Artificial Sequence: Synthetic oligonucleotide
uuauaacaguguugugcug

SEQ ID NO: 994859 - RNA, 19 nt, Artificial Sequence
  Description of Artificial Sequence: Synthetic oligonucleotide
acuaaccacaaaguaccag

SEQ ID NO: 994860 - RNA, 19 nt, Artificial Sequence
  Description of Artificial Sequence: Synthetic oligonucleotide
auaccuuacacaaggcaug

SEQ ID NO: 994861 - RNA, 19 nt, Artificial Sequence
  Description of Artificial Sequence: Synthetic oligonucleotide
guaugacagaaauuuguaa

SEQ ID NO: 994862 - RNA, 19 nt, Artificial Sequence
  Description of Artificial Sequence: Synthetic oligonucleotide
ucucggaaguaugacagaa

SEQ ID NO: 994863 - RNA, 19 nt, Artificial Sequence
  Description of Artificial Sequence: Synthetic oligonucleotide
acuaccauggucucucaua

SEQ ID NO: 994864 - RNA, 19 nt, Artificial Sequence
  Description of Artificial Sequence: Synthetic oligonucleotide
caguauuccaaacccaaga

SEQ ID NO: 994865 - RNA, 19 nt, Artificial Sequence
  Description of Artificial Sequence: Synthetic oligonucleotide
uagguuauauuugggcaga

SEQ ID NO: 994866 - RNA, 19 nt, Artificial Sequence
  Description of Artificial Sequence: Synthetic oligonucleotide
agacgagugauuguuuuca

SEQ ID NO: 994867 - RNA, 19 nt, Artificial Sequence
  Description of Artificial Sequence: Synthetic oligonucleotide
aacuucaguaucauuccaa

SEQ ID NO: 994868 - RNA, 19 nt, Artificial Sequence
  Description of Artificial Sequence: Synthetic oligonucleotide
cuuacagcaauccaguaau

SEQ ID NO: 994869 - RNA, 19 nt, Artificial Sequence
  Description of Artificial Sequence: Synthetic oligonucleotide
gaauuguaauguaucaaua

SEQ ID NO: 994870 - RNA, 19 nt, Artificial Sequence
  Description of Artificial Sequence: Synthetic oligonucleotide
aacugccguacaucaauau

SEQ ID NO: 994871 - RNA, 19 nt, Artificial Sequence
  Description of Artificial Sequence: Synthetic oligonucleotide
cuccuuagcaugacccuag

SEQ ID NO: 994872 - RNA, 19 nt, Artificial Sequence
  Description of Artificial Sequence: Synthetic oligonucleotide
cucauaccuuacacaaggc

SEQ ID NO: 994873 - RNA, 19 nt, Artificial Sequence
  Description of Artificial Sequence: Synthetic oligonucleotide
cuuauggcuuacagcaauc

SEQ ID NO: 994874 - RNA, 19 nt, Artificial Sequence
  Description of Artificial Sequence: Synthetic oligonucleotide
uuuaguccccaugcaguag

SEQ ID NO: 994875 - RNA, 19 nt, Artificial Sequence
  Description of Artificial Sequence: Synthetic oligonucleotide
auaccauggcuuugugaag

SEQ ID NO: 994876 - RNA, 19 nt, Artificial Sequence
  Description of Artificial Sequence: Synthetic oligonucleotide
uuauaugggccaccuuaaa

SEQ ID NO: 994877 - RNA, 19 nt, Artificial Sequence
  Description of Artificial Sequence: Synthetic oligonucleotide
uccccagaguuccauuuga

SEQ ID NO: 994878 - RNA, 19 nt, Artificial Sequence
  Description of Artificial Sequence: Synthetic oligonucleotide
agcaugacccuaguuagca

SEQ ID NO: 994879 - RNA, 19 nt, Artificial Sequence
  Description of Artificial Sequence: Synthetic oligonucleotide
ggaaguaugacagaaauuu

SEQ ID NO: 994880 - RNA, 19 nt, Artificial Sequence
  Description of Artificial Sequence: Synthetic oligonucleotide
gaaauuuguaacacagacu

SEQ ID NO: 994881 - RNA, 19 nt, Artificial Sequence
  Description of Artificial Sequence: Synthetic oligonucleotide
auaacgcaugucuuucuaa

SEQ ID NO: 994882 - RNA, 19 nt, Artificial Sequence
  Description of Artificial Sequence: Synthetic oligonucleotide
uccuaugaauaaucuguau

SEQ ID NO: 994883 - RNA, 19 nt, Artificial Sequence
  Description of Artificial Sequence: Synthetic oligonucleotide
acacacaaaauuaauuaua

SEQ ID NO: 994884 - RNA, 19 nt, Artificial Sequence
  Description of Artificial Sequence: Synthetic oligonucleotide
uguaacugccguacaucaa

SEQ ID NO: 994885 - RNA, 19 nt, Artificial Sequence
  Description of Artificial Sequence: Synthetic oligonucleotide
caaagguuaguguguuuuc

SEQ ID NO: 994886 - RNA, 19 nt, Artificial Sequence
  Description of Artificial Sequence: Synthetic oligonucleotide
cugccguacaucaauauua

SEQ ID NO: 994887 - RNA, 19 nt, Artificial Sequence
  Description of Artificial Sequence: Synthetic oligonucleotide
cucucauaccuuacacaag

SEQ ID NO: 994888 - RNA, 19 nt, Artificial Sequence
  Description of Artificial Sequence: Synthetic oligonucleotide
uguucagacgggguaacuc

SEQ ID NO: 994889 - RNA, 19 nt, Artificial Sequence
  Description of Artificial Sequence: Synthetic oligonucleotide
uaacggauauuccgcaauu

SEQ ID NO: 994890 - RNA, 19 nt, Artificial Sequence
  Description of Artificial Sequence: Synthetic oligonucleotide
acaaacuaguaagauuuaa

SEQ ID NO: 994891 - RNA, 19 nt, Artificial Sequence
  Description of Artificial Sequence: Synthetic oligonucleotide
guaccagauguuucuugcc

SEQ ID NO: 994892 - RNA, 19 nt, Artificial Sequence
  Description of Artificial Sequence: Synthetic oligonucleotide
gcugaugauuuaaauguag

SEQ ID NO: 994893 - RNA, 19 nt, Artificial Sequence
  Description of Artificial Sequence: Synthetic oligonucleotide
ucccgugagaaaauuuaua

SEQ ID NO: 994894 - RNA, 19 nt, Artificial Sequence
  Description of Artificial Sequence: Synthetic oligonucleotide
aguaugacagaaauuugua

SEQ ID NO: 994895 - RNA, 19 nt, Artificial Sequence
  Description of Artificial Sequence: Synthetic oligonucleotide
cacauaugaugaauccguc

SEQ ID NO: 994896 - RNA, 19 nt, Artificial Sequence
  Description of Artificial Sequence: Synthetic oligonucleotide
cuuucuagcugcagggaga

SEQ ID NO: 994897 - RNA, 19 nt, Artificial Sequence
  Description of Artificial Sequence: Synthetic oligonucleotide
agauuuaaagggaauugua

SEQ ID NO: 994898 - RNA, 19 nt, Artificial Sequence
  Description of Artificial Sequence: Synthetic oligonucleotide
aguaagauuuaaagggaau

SEQ ID NO: 994899 - RNA, 19 nt, Artificial Sequence
  Description of Artificial Sequence: Synthetic oligonucleotide
gaauccguccccaauccca

SEQ ID NO: 994900 - RNA, 19 nt, Artificial Sequence
  Description of Artificial Sequence: Synthetic oligonucleotide
gauaucauacaggaaugcu

SEQ ID NO: 994901 - RNA, 19 nt, Artificial Sequence
  Description of Artificial Sequence: Synthetic oligonucleotide
gacgggguaacucccguga

SEQ ID NO: 994902 - RNA, 19 nt, Artificial Sequence
  Description of Artificial Sequence: Synthetic oligonucleotide
cauaccuuacacaaggcau

SEQ ID NO: 994903 - RNA, 19 nt, Artificial Sequence
  Description of Artificial Sequence: Synthetic oligonucleotide
guauauuauaugggccacc

SEQ ID NO: 994904 - RNA, 19 nt, Artificial Sequence
  Description of Artificial Sequence: Synthetic oligonucleotide
aacccaagaguuacuugug

SEQ ID NO: 994905 - RNA, 19 nt, Artificial Sequence
  Description of Artificial Sequence: Synthetic oligonucleotide
aucuccuuagcaugacccu

SEQ ID NO: 994906 - RNA, 19 nt, Artificial Sequence
  Description of Artificial Sequence: Synthetic oligonucleotide
cugcccaauguaacugccg

SEQ ID NO: 994907 - RNA, 19 nt, Artificial Sequence
  Description of Artificial Sequence: Synthetic oligonucleotide
uuccgcaauuuguuuagau

SEQ ID NO: 994908 - RNA, 19 nt, Artificial Sequence
  Description of Artificial Sequence: Synthetic oligonucleotide
cacacuaccauggucucuc

SEQ ID NO: 994909 - RNA, 19 nt, Artificial Sequence
  Description of Artificial Sequence: Synthetic oligonucleotide
acugccguacaucaauauu

SEQ ID NO: 994910 - RNA, 19 nt, Artificial Sequence
  Description of Artificial Sequence: Synthetic oligonucleotide
ggaauuguaauguaucaau

SEQ ID NO: 994911 - RNA, 19 nt, Artificial Sequence
  Description of Artificial Sequence: Synthetic oligonucleotide
uccguccccaaucccaccu

SEQ ID NO: 994912 - RNA, 19 nt, Artificial Sequence
  Description of Artificial Sequence: Synthetic oligonucleotide
ugaagacgagugauuguuu

SEQ ID NO: 994913 - RNA, 19 nt, Artificial Sequence
  Description of Artificial Sequence: Synthetic oligonucleotide
cagaaauuuguaacacaga

SEQ ID NO: 994914 - RNA, 19 nt, Artificial Sequence
  Description of Artificial Sequence: Synthetic oligonucleotide
auuauaugggccaccuuaa

SEQ ID NO: 994915 - RNA, 19 nt, Artificial Sequence
  Description of Artificial Sequence: Synthetic oligonucleotide
accagauucuagguuauau

SEQ ID NO: 994916 - RNA, 19 nt, Artificial Sequence
  Description of Artificial Sequence: Synthetic oligonucleotide
gguuaguguguuuucauua

SEQ ID NO: 994917 - RNA, 19 nt, Artificial Sequence
  Description of Artificial Sequence: Synthetic oligonucleotide
aaaaugcgccagauaagaa

SEQ ID NO: 994918 - RNA, 19 nt, Artificial Sequence
  Description of Artificial Sequence: Synthetic oligonucleotide
aaauuacguuuaaaaguuu

SEQ ID NO: 994919 - RNA, 19 nt, Artificial Sequence
  Description of Artificial Sequence: Synthetic oligonucleotide
uaacugccguacaucaaua

SEQ ID NO: 994920 - RNA, 19 nt, Artificial Sequence
  Description of Artificial Sequence: Synthetic oligonucleotide
cagcaauccaguaaugaua

SEQ ID NO: 994921 - RNA, 19 nt, Artificial Sequence
  Description of Artificial Sequence: Synthetic oligonucleotide
ccgugagaaaauuuauaag

SEQ ID NO: 994922 - RNA, 19 nt, Artificial Sequence
  Description of Artificial Sequence: Synthetic oligonucleotide
ucauccugagguagauauc

SEQ ID NO: 994923 - RNA, 19 nt, Artificial Sequence
  Description of Artificial Sequence: Synthetic oligonucleotide
auuacaucauggaaaugua

SEQ ID NO: 994924 - RNA, 19 nt, Artificial Sequence
  Description of Artificial Sequence: Synthetic oligonucleotide
ucuauauauucugcccaau

SEQ ID NO: 994925 - RNA, 19 nt, Artificial Sequence
  Description of Artificial Sequence: Synthetic oligonucleotide
gguaacucccgugagaaaa

SEQ ID NO: 994926 - RNA, 19 nt, Artificial Sequence
  Description of Artificial Sequence: Synthetic oligonucleotide
guaacugccguacaucaau

SEQ ID NO: 994927 - RNA, 19 nt, Artificial Sequence
  Description of Artificial Sequence: Synthetic oligonucleotide
accuuaaaucaaaggcauc

SEQ ID NO: 994928 - RNA, 19 nt, Artificial Sequence
  Description of Artificial Sequence: Synthetic oligonucleotide
cgagugauuguuuucauca

SEQ ID NO: 994929 - RNA, 19 nt, Artificial Sequence
  Description of Artificial Sequence: Synthetic oligonucleotide
aacggauauuccgcaauuu

SEQ ID NO: 994930 - RNA, 19 nt, Artificial Sequence
  Description of Artificial Sequence: Synthetic oligonucleotide
gauauuccgcaauuuguuu

SEQ ID NO: 994931 - RNA, 19 nt, Artificial Sequence
  Description of Artificial Sequence: Synthetic oligonucleotide
uggagacagaguacuuaau

SEQ ID NO: 994932 - RNA, 19 nt, Artificial Sequence
  Description of Artificial Sequence: Synthetic oligonucleotide
cucuauauauucugcccaa

SEQ ID NO: 994933 - RNA, 19 nt, Artificial Sequence
  Description of Artificial Sequence: Synthetic oligonucleotide
cauucaaaaguuugcuacu

SEQ ID NO: 994934 - RNA, 19 nt, Artificial Sequence
  Description of Artificial Sequence: Synthetic oligonucleotide
aagauacauugcugaugau

SEQ ID NO: 994935 - RNA, 19 nt, Artificial Sequence
  Description of Artificial Sequence: Synthetic oligonucleotide
gacuugaauccaaagcaua

SEQ ID NO: 994936 - RNA, 19 nt, Artificial Sequence
  Description of Artificial Sequence: Synthetic oligonucleotide
uuacuacaccaagucuggc

SEQ ID NO: 994937 - RNA, 19 nt, Artificial Sequence
  Description of Artificial Sequence: Synthetic oligonucleotide
gaagacgagugauuguuuu

SEQ ID NO: 994938 - RNA, 19 nt, Artificial Sequence
  Description of Artificial Sequence: Synthetic oligonucleotide
guaagauuuaaagggaauu

SEQ ID NO: 994939 - RNA, 19 nt, Artificial Sequence
  Description of Artificial Sequence: Synthetic oligonucleotide
ucuccuuagcaugacccua

SEQ ID NO: 994940 - RNA, 19 nt, Artificial Sequence
  Description of Artificial Sequence: Synthetic oligonucleotide
ugcgccagauaagaaucac

SEQ ID NO: 994941 - RNA, 19 nt, Artificial Sequence
  Description of Artificial Sequence: Synthetic oligonucleotide
agaguacuuaauguauauu

SEQ ID NO: 994942 - RNA, 19 nt, Artificial Sequence
  Description of Artificial Sequence: Synthetic oligonucleotide
ugcuuucuagcugcaggga

SEQ ID NO: 994943 - RNA, 19 nt, Artificial Sequence
  Description of Artificial Sequence: Synthetic oligonucleotide
acucccgugagaaaauuua

SEQ ID NO: 994944 - RNA, 19 nt, Artificial Sequence
  Description of Artificial Sequence: Synthetic oligonucleotide
uccuuagcaugacccuagu

SEQ ID NO: 994945 - RNA, 19 nt, Artificial Sequence
  Description of Artificial Sequence: Synthetic oligonucleotide
gagaacacauaugaugaau

SEQ ID NO: 994946 - RNA, 19 nt, Artificial Sequence
  Description of Artificial Sequence: Synthetic oligonucleotide
acgggguaacucccgugag

SEQ ID NO: 994947 - RNA, 19 nt, Artificial Sequence
  Description of Artificial Sequence: Synthetic oligonucleotide
accccuuugagcacuuuca

SEQ ID NO: 994948 - RNA, 19 nt, Artificial Sequence
  Description of Artificial Sequence: Synthetic oligonucleotide
auauuauaugggccaccuu

SEQ ID NO: 994949 - RNA, 19 nt, Artificial Sequence
  Description of Artificial Sequence: Synthetic oligonucleotide
caacaugcaaagaaaugau

SEQ ID NO: 994950 - RNA, 19 nt, Artificial Sequence
  Description of Artificial Sequence: Synthetic oligonucleotide
uuccucucggaaguaugac

SEQ ID NO: 994951 - RNA, 19 nt, Artificial Sequence
  Description of Artificial Sequence: Synthetic oligonucleotide
cccgugagaaaauuuauaa

SEQ ID NO: 994952 - RNA, 19 nt, Artificial Sequence
  Description of Artificial Sequence: Synthetic oligonucleotide
cauaacggauauuccgcaa

SEQ ID NO: 994953 - RNA, 19 nt, Artificial Sequence
  Description of Artificial Sequence: Synthetic oligonucleotide
caagaguuacuugugaaau

SEQ ID NO: 994954 - RNA, 19 nt, Artificial Sequence
  Description of Artificial Sequence: Synthetic oligonucleotide
agacgggguaacucccgug

SEQ ID NO: 994955 - RNA, 19 nt, Artificial Sequence
  Description of Artificial Sequence: Synthetic oligonucleotide
cccaauguaacugccguac

SEQ ID NO: 994956 - RNA, 19 nt, Artificial Sequence
  Description of Artificial Sequence: Synthetic oligonucleotide
cauguucagacgggguaac

SEQ ID NO: 994957 - RNA, 19 nt, Artificial Sequence
  Description of Artificial Sequence: Synthetic oligonucleotide
gggccuuauggcuuacagc

SEQ ID NO: 994958 - RNA, 19 nt, Artificial Sequence
  Description of Artificial Sequence: Synthetic oligonucleotide
gguuauauuugggcagaug

SEQ ID NO: 994959 - RNA, 19 nt, Artificial Sequence
  Description of Artificial Sequence: Synthetic oligonucleotide
augaugaauccguccccaa

SEQ ID NO: 994960 - RNA, 19 nt, Artificial Sequence
  Description of Artificial Sequence: Synthetic oligonucleotide
aacucccgugagaaaauuu

SEQ ID NO: 994961 - RNA, 19 nt, Artificial Sequence
  Description of Artificial Sequence: Synthetic oligonucleotide
auauuugggcagauguaua

SEQ ID NO: 994962 - RNA, 19 nt, Artificial Sequence
  Description of Artificial Sequence: Synthetic oligonucleotide
gcuuaauuauaacaguguu

SEQ ID NO: 994963 - RNA, 19 nt, Artificial Sequence
  Description of Artificial Sequence: Synthetic oligonucleotide
ggugaggacugacaaucuc

SEQ ID NO: 994964 - RNA, 19 nt, Artificial Sequence
  Description of Artificial Sequence: Synthetic oligonucleotide
gacccuaguuagcauuucu

SEQ ID NO: 994965 - RNA, 19 nt, Artificial Sequence
  Description of Artificial Sequence: Synthetic oligonucleotide
agguuguccuaugaauaau

SEQ ID NO: 994966 - RNA, 19 nt, Artificial Sequence
  Description of Artificial Sequence: Synthetic oligonucleotide
aggagagaacacauaugau

SEQ ID NO: 994967 - RNA, 19 nt, Artificial Sequence
  Description of Artificial Sequence: Synthetic oligonucleotide
gacacaaauucaccagauu

SEQ ID NO: 994968 - RNA, 19 nt, Artificial Sequence
  Description of Artificial Sequence: Synthetic oligonucleotide
gugaagacgagugauuguu

SEQ ID NO: 994969 - RNA, 19 nt, Artificial Sequence
  Description of Artificial Sequence: Synthetic oligonucleotide
gggaauuguaauguaucaa

SEQ ID NO: 994970 - RNA, 19 nt, Artificial Sequence
  Description of Artificial Sequence: Synthetic oligonucleotide
uaacucccgugagaaaauu

SEQ ID NO: 994971 - RNA, 19 nt, Artificial Sequence
  Description of Artificial Sequence: Synthetic oligonucleotide
guccuaugaauaaucugua

SEQ ID NO: 994972 - RNA, 19 nt, Artificial Sequence
  Description of Artificial Sequence: Synthetic oligonucleotide
augacccuaguuagcauuu

SEQ ID NO: 994973 - RNA, 19 nt, Artificial Sequence
  Description of Artificial Sequence: Synthetic oligonucleotide
cuauaacgcaugucuuucu

SEQ ID NO: 994974 - RNA, 19 nt, Artificial Sequence
  Description of Artificial Sequence: Synthetic oligonucleotide
cugcaacuacauuccuuca

SEQ ID NO: 994975 - RNA, 19 nt, Artificial Sequence
  Description of Artificial Sequence: Synthetic oligonucleotide
guccuagaccagaaacuuc

SEQ ID NO: 994976 - RNA, 19 nt, Artificial Sequence
  Description of Artificial Sequence: Synthetic oligonucleotide
ugacccuaguuagcauuuc

SEQ ID NO: 994977 - RNA, 19 nt, Artificial Sequence
  Description of Artificial Sequence: Synthetic oligonucleotide
cucucggaaguaugacaga

SEQ ID NO: 994978 - RNA, 19 nt, Artificial Sequence
  Description of Artificial Sequence: Synthetic oligonucleotide
acacuaccauggucucuca

SEQ ID NO: 994979 - RNA, 19 nt, Artificial Sequence
  Description of Artificial Sequence: Synthetic oligonucleotide
acacacuaccauggucucu

SEQ ID NO: 994980 - RNA, 19 nt, Artificial Sequence
  Description of Artificial Sequence: Synthetic oligonucleotide
auguucagacgggguaacu

SEQ ID NO: 994981 - RNA, 19 nt, Artificial Sequence
  Description of Artificial Sequence: Synthetic oligonucleotide
augcgccagauaagaauca

SEQ ID NO: 994982 - RNA, 19 nt, Artificial Sequence
  Description of Artificial Sequence: Synthetic oligonucleotide
gacgagugauuguuuucau

SEQ ID NO: 994983 - RNA, 19 nt, Artificial Sequence
  Description of Artificial Sequence: Synthetic oligonucleotide
caaucccaccuccaaucaa

SEQ ID NO: 994984 - RNA, 19 nt, Artificial Sequence
  Description of Artificial Sequence: Synthetic oligonucleotide
agguuauauuugggcagau

SEQ ID NO: 994985 - RNA, 19 nt, Artificial Sequence
  Description of Artificial Sequence: Synthetic oligonucleotide
ggauauuccgcaauuuguu

SEQ ID NO: 994986 - RNA, 19 nt, Artificial Sequence
  Description of Artificial Sequence: Synthetic oligonucleotide
cucccgugagaaaauuuau

SEQ ID NO: 994987 - RNA, 19 nt, Artificial Sequence
  Description of Artificial Sequence: Synthetic oligonucleotide
agucauccugagguagaua

SEQ ID NO: 994988 - RNA, 19 nt, Artificial Sequence
  Description of Artificial Sequence: Synthetic oligonucleotide
guaacucccgugagaaaau

SEQ ID NO: 994989 - RNA, 19 nt, Artificial Sequence
  Description of Artificial Sequence: Synthetic oligonucleotide
uggggccuuauggcuuaca

SEQ ID NO: 994990 - RNA, 19 nt, Artificial Sequence
  Description of Artificial Sequence: Synthetic oligonucleotide
gguccuagaccagaaacuu

SEQ ID NO: 994991 - RNA, 19 nt, Artificial Sequence
  Description of Artificial Sequence: Synthetic oligonucleotide
gcgccagauaagaaucaca

SEQ ID NO: 994992 - RNA, 19 nt, Artificial Sequence
  Description of Artificial Sequence: Synthetic oligonucleotide
cggauauuccgcaauuugu

SEQ ID NO: 994993 - RNA, 19 nt, Artificial Sequence
  Description of Artificial Sequence: Synthetic oligonucleotide
ggcuuacagcaauccagua

SEQ ID NO: 994994 - RNA, 19 nt, Artificial Sequence
  Description of Artificial Sequence: Synthetic oligonucleotide
ccuuauggcuuacagcaau

SEQ ID NO: 994995 - RNA, 19 nt, Artificial Sequence
  Description of Artificial Sequence: Synthetic oligonucleotide
gccguacaucaauauuaaa

SEQ ID NO: 994996 - RNA, 19 nt, Artificial Sequence
  Description of Artificial Sequence: Synthetic oligonucleotide
caggauuuagcugguucau

SEQ ID NO: 994997 - RNA, 19 nt, Artificial Sequence
  Description of Artificial Sequence: Synthetic oligonucleotide
ccagauucuagguuauauu

SEQ ID NO: 994998 - RNA, 19 nt, Artificial Sequence
  Description of Artificial Sequence: Synthetic oligonucleotide
cccuaguuagcauuucuuu

SEQ ID NO: 994999 - RNA, 19 nt, Artificial Sequence
  Description of Artificial Sequence: Synthetic oligonucleotide
gcccaauguaacugccgua

SEQ ID NO: 995000 - RNA, 19 nt, Artificial Sequence
  Description of Artificial Sequence: Synthetic oligonucleotide
ccaccuccaaucaagucuu

SEQ ID NO: 995001 - RNA, 19 nt, Artificial Sequence
  Description of Artificial Sequence: Synthetic oligonucleotide
cacuaccauggucucucau

SEQ ID NO: 995002 - RNA, 19 nt, Artificial Sequence
  Description of Artificial Sequence: Synthetic oligonucleotide
ccaaacccaagaguuacuu

SEQ ID NO: 995003 - RNA, 19 nt, Artificial Sequence
  Description of Artificial Sequence: Synthetic oligonucleotide
cgggguaacucccgugaga

SEQ ID NO: 995004 - RNA, 19 nt, Artificial Sequence
  Description of Artificial Sequence: Synthetic oligonucleotide
cggaaguaugacagaaauu

SEQ ID NO: 995005 - RNA, 19 nt, Artificial Sequence
  Description of Artificial Sequence: Synthetic oligonucleotide
ccuuagcaugacccuaguu

SEQ ID NO: 995006 - RNA, 19 nt, Artificial Sequence
  Description of Artificial Sequence: Synthetic oligonucleotide
aauaccaacacacacacac

SEQ ID NO: 995007 - RNA, 19 nt, Artificial Sequence
  Description of Artificial Sequence: Synthetic oligonucleotide
ucuuaagacgaucagaagg

SEQ ID NO: 995008 - RNA, 19 nt, Artificial Sequence
  Description of Artificial Sequence: Synthetic oligonucleotide
aaccuuaucucuuugguac

SEQ ID NO: 995009 - RNA, 19 nt, Artificial Sequence
  Description of Artificial Sequence: Synthetic oligonucleotide
aaauauuacagcgacacag

SEQ ID NO: 995010 - RNA, 19 nt, Artificial Sequence
  Description of Artificial Sequence: Synthetic oligonucleotide
aacacacacacacacacac

SEQ ID NO: 995011 - RNA, 19 nt, Artificial Sequence
  Description of Artificial Sequence: Synthetic oligonucleotide
acuacuuacaauccagugc

SEQ ID NO: 995012 - RNA, 19 nt, Artificial Sequence
  Description of Artificial Sequence: Synthetic oligonucleotide
auggcaacuacuuacaauc

SEQ ID NO: 995013 - RNA, 19 nt, Artificial Sequence
  Description of Artificial Sequence: Synthetic oligonucleotide
aagacgaucagaaggaccc

SEQ ID NO: 995014 - RNA, 19 nt, Artificial Sequence
  Description of Artificial Sequence: Synthetic oligonucleotide
acucaugcaacccugauuc

SEQ ID NO: 995015 - RNA, 19 nt, Artificial Sequence
  Description of Artificial Sequence: Synthetic oligonucleotide
acaagauacagccuuuggc

SEQ ID NO: 995016 - RNA, 19 nt, Artificial Sequence
  Description of Artificial Sequence: Synthetic oligonucleotide
ucaauuaccaggcuauugc

SEQ ID NO: 995017 - RNA, 19 nt, Artificial Sequence
  Description of Artificial Sequence: Synthetic oligonucleotide
cuacuuacaauccagugcc

SEQ ID NO: 995018 - RNA, 19 nt, Artificial Sequence
  Description of Artificial Sequence: Synthetic oligonucleotide
uguuacuuugccaauuugc

SEQ ID NO: 995019 - RNA, 19 nt, Artificial Sequence
  Description of Artificial Sequence: Synthetic oligonucleotide
caaaggauaacaccgauug

SEQ ID NO: 995020 - RNA, 19 nt, Artificial Sequence
  Description of Artificial Sequence: Synthetic oligonucleotide
uacaacaucugaaucuggg

SEQ ID NO: 995021 - RNA, 19 nt, Artificial Sequence
  Description of Artificial Sequence: Synthetic oligonucleotide
cacacaaacacacacacac

SEQ ID NO: 995022 - RNA, 19 nt, Artificial Sequence
  Description of Artificial Sequence: Synthetic oligonucleotide
agaguuuagcuucuuugcc

SEQ ID NO: 995023 - RNA, 19 nt, Artificial Sequence
  Description of Artificial Sequence: Synthetic oligonucleotide
ugggucacgacaaugacca

SEQ ID NO: 995024 - RNA, 19 nt, Artificial Sequence
  Description of Artificial Sequence: Synthetic oligonucleotide
aaggauaacaccgauugug

SEQ ID NO: 995025 - RNA, 19 nt, Artificial Sequence
  Description of Artificial Sequence: Synthetic oligonucleotide
gagaaugcgagcuauggug

SEQ ID NO: 995026 - RNA, 19 nt, Artificial Sequence
  Description of Artificial Sequence: Synthetic oligonucleotide
aacaccgauugugauaacc

SEQ ID NO: 995027 - RNA, 19 nt, Artificial Sequence
  Description of Artificial Sequence: Synthetic oligonucleotide
agaaaugaauguaauuagc

SEQ ID NO: 995028 - RNA, 19 nt, Artificial Sequence
  Description of Artificial Sequence: Synthetic oligonucleotide
agcgccugagcauaaacgc

SEQ ID NO: 995029 - RNA, 19 nt, Artificial Sequence
  Description of Artificial Sequence: Synthetic oligonucleotide
uuaaaacaugguaagcaga

SEQ ID NO: 995030 - RNA, 19 nt, Artificial Sequence
  Description of Artificial Sequence: Synthetic oligonucleotide
aacacacacacacacacaa

SEQ ID NO: 995031 - RNA, 19 nt, Artificial Sequence
  Description of Artificial Sequence: Synthetic oligonucleotide
uacagcuauacccaggacu

SEQ ID NO: 995032 - RNA, 19 nt, Artificial Sequence
  Description of Artificial Sequence: Synthetic oligonucleotide
aacuacuuacaauccagug

SEQ ID NO: 995033 - RNA, 19 nt, Artificial Sequence
  Description of Artificial Sequence: Synthetic oligonucleotide
uagaguuuagcuucuuugc

SEQ ID NO: 995034 - RNA, 19 nt, Artificial Sequence
  Description of Artificial Sequence: Synthetic oligonucleotide
ucaaaugggauaucuuccc

SEQ ID NO: 995035 - RNA, 19 nt, Artificial Sequence
  Description of Artificial Sequence: Synthetic oligonucleotide
caaacacacacacacacac

SEQ ID NO: 995036 - RNA, 19 nt, Artificial Sequence
  Description of Artificial Sequence: Synthetic oligonucleotide
uggauaaccucucacuaca

SEQ ID NO: 995037 - RNA, 19 nt, Artificial Sequence
  Description of Artificial Sequence: Synthetic oligonucleotide
uaagacgaucagaaggacc

SEQ ID NO: 995038 - RNA, 19 nt, Artificial Sequence
  Description of Artificial Sequence: Synthetic oligonucleotide
uaagauaaagccacaggua

SEQ ID NO: 995039 - RNA, 19 nt, Artificial Sequence
  Description of Artificial Sequence: Synthetic oligonucleotide
gagucuauacaaaauuacc

SEQ ID NO: 995040 - RNA, 19 nt, Artificial Sequence
  Description of Artificial Sequence: Synthetic oligonucleotide
aacuugacaaauaccaaca

SEQ ID NO: 995041 - RNA, 19 nt, Artificial Sequence
  Description of Artificial Sequence: Synthetic oligonucleotide
cuuaagacgaucagaagga

SEQ ID NO: 995042 - RNA, 19 nt, Artificial Sequence
  Description of Artificial Sequence: Synthetic oligonucleotide
cacacacacacaaacacac

SEQ ID NO: 995043 - RNA, 19 nt, Artificial Sequence
  Description of Artificial Sequence: Synthetic oligonucleotide
caacuugacaaauaccaac

SEQ ID NO: 995044 - RNA, 19 nt, Artificial Sequence
  Description of Artificial Sequence: Synthetic oligonucleotide
ucccaguauagacuguggg

SEQ ID NO: 995045 - RNA, 19 nt, Artificial Sequence
  Description of Artificial Sequence: Synthetic oligonucleotide
auaaccuuaucucuuuggu

SEQ ID NO: 995046 - RNA, 19 nt, Artificial Sequence
  Description of Artificial Sequence: Synthetic oligonucleotide
ugaauguaauuagcuaggg

SEQ ID NO: 995047 - RNA, 19 nt, Artificial Sequence
  Description of Artificial Sequence: Synthetic oligonucleotide
cacaaacacacacacacac

SEQ ID NO: 995048 - RNA, 19 nt, Artificial Sequence
  Description of Artificial Sequence: Synthetic oligonucleotide
gaacacaugccauguuugg

SEQ ID NO: 995049 - RNA, 19 nt, Artificial Sequence
  Description of Artificial Sequence: Synthetic oligonucleotide
aagagguaccccuauucca

SEQ ID NO: 995050 - RNA, 19 nt, Artificial Sequence
  Description of Artificial Sequence: Synthetic oligonucleotide
uauugcaccauuccaugcu

SEQ ID NO: 995051 - RNA, 19 nt, Artificial Sequence
  Description of Artificial Sequence: Synthetic oligonucleotide
ucuuugguacucauuaaau

SEQ ID NO: 995052 - RNA, 19 nt, Artificial Sequence
  Description of Artificial Sequence: Synthetic oligonucleotide
cacacacacacacacacag

SEQ ID NO: 995053 - RNA, 19 nt, Artificial Sequence
  Description of Artificial Sequence: Synthetic oligonucleotide
uaagcugcggugagaaugc

SEQ ID NO: 995054 - RNA, 19 nt, Artificial Sequence
  Description of Artificial Sequence: Synthetic oligonucleotide
uaccaacacacacacacac

SEQ ID NO: 995055 - RNA, 19 nt, Artificial Sequence
  Description of Artificial Sequence: Synthetic oligonucleotide
uuguaauugugcuauguua

SEQ ID NO: 995056 - RNA, 19 nt, Artificial Sequence
  Description of Artificial Sequence: Synthetic oligonucleotide
agucuauacaaaauuacca

SEQ ID NO: 995057 - RNA, 19 nt, Artificial Sequence
  Description of Artificial Sequence: Synthetic oligonucleotide
augaauguaauuagcuagg

SEQ ID NO: 995058 - RNA, 19 nt, Artificial Sequence
  Description of Artificial Sequence: Synthetic oligonucleotide
aacaccauuucaaauggga

SEQ ID NO: 995059 - RNA, 19 nt, Artificial Sequence
  Description of Artificial Sequence: Synthetic oligonucleotide
aaacucaauuaccaggcua

SEQ ID NO: 995060 - RNA, 19 nt, Artificial Sequence
  Description of Artificial Sequence: Synthetic oligonucleotide
agguacuuuguaauugugc

SEQ ID NO: 995061 - RNA, 19 nt, Artificial Sequence
  Description of Artificial Sequence: Synthetic oligonucleotide
aacauggauucagaaauga

SEQ ID NO: 995062 - RNA, 19 nt, Artificial Sequence
  Description of Artificial Sequence: Synthetic oligonucleotide
cacacacacacacaaacac

SEQ ID NO: 995063 - RNA, 19 nt, Artificial Sequence
  Description of Artificial Sequence: Synthetic oligonucleotide
cacacacacacacacaaac

SEQ ID NO: 995064 - RNA, 19 nt, Artificial Sequence
  Description of Artificial Sequence: Synthetic oligonucleotide
cacacacaaacacacacac

SEQ ID NO: 995065 - RNA, 19 nt, Artificial Sequence
  Description of Artificial Sequence: Synthetic oligonucleotide
acuacagcuauacccagga

SEQ ID NO: 995066 - RNA, 19 nt, Artificial Sequence
  Description of Artificial Sequence: Synthetic oligonucleotide
agaaggaccccugcuaagc

SEQ ID NO: 995067 - RNA, 19 nt, Artificial Sequence
  Description of Artificial Sequence: Synthetic oligonucleotide
auaacaccgauugugauaa

SEQ ID NO: 995068 - RNA, 19 nt, Artificial Sequence
  Description of Artificial Sequence: Synthetic oligonucleotide
uuuguaauugugcuauguu

SEQ ID NO: 995069 - RNA, 19 nt, Artificial Sequence
  Description of Artificial Sequence: Synthetic oligonucleotide
guugagucccacuggagag

SEQ ID NO: 995070 - RNA, 19 nt, Artificial Sequence
  Description of Artificial Sequence: Synthetic oligonucleotide
ucuggauaaccucucacua

SEQ ID NO: 995071 - RNA, 19 nt, Artificial Sequence
  Description of Artificial Sequence: Synthetic oligonucleotide
cacacacacaaacacacac

SEQ ID NO: 995072 - RNA, 19 nt, Artificial Sequence
  Description of Artificial Sequence: Synthetic oligonucleotide
cacacacacacacacacac

SEQ ID NO: 995073 - RNA, 19 nt, Artificial Sequence
  Description of Artificial Sequence: Synthetic oligonucleotide
gucacacacacacacacac

SEQ ID NO: 995074 - RNA, 19 nt, Artificial Sequence
  Description of Artificial Sequence: Synthetic oligonucleotide
auaaacgcaggccaccaca

SEQ ID NO: 995075 - RNA, 19 nt, Artificial Sequence
  Description of Artificial Sequence: Synthetic oligonucleotide
gacuguguuacuuugccaa

SEQ ID NO: 995076 - RNA, 19 nt, Artificial Sequence
  Description of Artificial Sequence: Synthetic oligonucleotide
cacacacacacacacacug

SEQ ID NO: 995077 - RNA, 19 nt, Artificial Sequence
  Description of Artificial Sequence: Synthetic oligonucleotide
aaacuucggccagacuucc

SEQ ID NO: 995078 - RNA, 19 nt, Artificial Sequence
  Description of Artificial Sequence: Synthetic oligonucleotide
gguccaaacaacuugacaa

SEQ ID NO: 995079 - RNA, 19 nt, Artificial Sequence
  Description of Artificial Sequence: Synthetic oligonucleotide
uaaauauuacagcgacaca

SEQ ID NO: 995080 - RNA, 19 nt, Artificial Sequence
  Description of Artificial Sequence: Synthetic oligonucleotide
cuaagcugcggugagaaug

SEQ ID NO: 995081 - RNA, 19 nt, Artificial Sequence
  Description of Artificial Sequence: Synthetic oligonucleotide
auacaaaauuaccauggaa

SEQ ID NO: 995082 - RNA, 19 nt, Artificial Sequence
  Description of Artificial Sequence: Synthetic oligonucleotide
cacgacaaugaccacugcg

SEQ ID NO: 995083 - RNA, 19 nt, Artificial Sequence
  Description of Artificial Sequence: Synthetic oligonucleotide
aaguggccgaugcucuggc

SEQ ID NO: 995084 - RNA, 19 nt, Artificial Sequence
  Description of Artificial Sequence: Synthetic oligonucleotide
gagggcgacuuuuaugucc

SEQ ID NO: 995085 - RNA, 19 nt, Artificial Sequence
  Description of Artificial Sequence: Synthetic oligonucleotide
aacucaauuaccaggcuau

SEQ ID NO: 995086 - RNA, 19 nt, Artificial Sequence
  Description of Artificial Sequence: Synthetic oligonucleotide
aaaggauaacaccgauugu

SEQ ID NO: 995087 - RNA, 19 nt, Artificial Sequence
  Description of Artificial Sequence: Synthetic oligonucleotide
agguaccccuauuccaucc

SEQ ID NO: 995088 - RNA, 19 nt, Artificial Sequence
  Description of Artificial Sequence: Synthetic oligonucleotide
aaugcgagcuauggugacg

SEQ ID NO: 995089 - RNA, 19 nt, Artificial Sequence
  Description of Artificial Sequence: Synthetic oligonucleotide
gaguuuagcuucuuugcca

SEQ ID NO: 995090 - RNA, 19 nt, Artificial Sequence
  Description of Artificial Sequence: Synthetic oligonucleotide
agugccaacauggauucag

SEQ ID NO: 995091 - RNA, 19 nt, Artificial Sequence
  Description of Artificial Sequence: Synthetic oligonucleotide
caugcaacccugauucccc

SEQ ID NO: 995092 - RNA, 19 nt, Artificial Sequence
  Description of Artificial Sequence: Synthetic oligonucleotide
cugucacacacacacacac

SEQ ID NO: 995093 - RNA, 19 nt, Artificial Sequence
  Description of Artificial Sequence: Synthetic oligonucleotide
aguauagacugugggacag

SEQ ID NO: 995094 - RNA, 19 nt, Artificial Sequence
  Description of Artificial Sequence: Synthetic oligonucleotide
auacccaggacugcucucc

SEQ ID NO: 995095 - RNA, 19 nt, Artificial Sequence
  Description of Artificial Sequence: Synthetic oligonucleotide
acagcuauacccaggacug

SEQ ID NO: 995096 - RNA, 19 nt, Artificial Sequence
  Description of Artificial Sequence: Synthetic oligonucleotide
ugagaaugcgagcuauggu

SEQ ID NO: 995097 - RNA, 19 nt, Artificial Sequence
  Description of Artificial Sequence: Synthetic oligonucleotide
aggaagagucuauacaaaa

SEQ ID NO: 995098 - RNA, 19 nt, Artificial Sequence
  Description of Artificial Sequence: Synthetic oligonucleotide
uuggcgaaugugauguaga

SEQ ID NO: 995099 - RNA, 19 nt, Artificial Sequence
  Description of Artificial Sequence: Synthetic oligonucleotide
uguuuggggagccggaauc

SEQ ID NO: 995100 - RNA, 19 nt, Artificial Sequence
  Description of Artificial Sequence: Synthetic oligonucleotide
cacugucacacacacacac

SEQ ID NO: 995101 - RNA, 19 nt, Artificial Sequence
  Description of Artificial Sequence: Synthetic oligonucleotide
agugaggaaacuucccagu

SEQ ID NO: 995102 - RNA, 19 nt, Artificial Sequence
  Description of Artificial Sequence: Synthetic oligonucleotide
gugagaaugcgagcuaugg

SEQ ID NO: 995103 - RNA, 19 nt, Artificial Sequence
  Description of Artificial Sequence: Synthetic oligonucleotide
auugugcuauguuaccuga

SEQ ID NO: 995104 - RNA, 19 nt, Artificial Sequence
  Description of Artificial Sequence: Synthetic oligonucleotide
uggaguaccuggagaaaug

SEQ ID NO: 995105 - RNA, 19 nt, Artificial Sequence
  Description of Artificial Sequence: Synthetic oligonucleotide
ucaugcaacccugauuccc

SEQ ID NO: 995106 - RNA, 19 nt, Artificial Sequence
  Description of Artificial Sequence: Synthetic oligonucleotide
aguuuagcuucuuugccaa

SEQ ID NO: 995107 - RNA, 19 nt, Artificial Sequence
  Description of Artificial Sequence: Synthetic oligonucleotide
acagcgccugagcauaaac

SEQ ID NO: 995108 - RNA, 19 nt, Artificial Sequence
  Description of Artificial Sequence: Synthetic oligonucleotide
uggggagccggaaucuggg

SEQ ID NO: 995109 - RNA, 19 nt, Artificial Sequence
  Description of Artificial Sequence: Synthetic oligonucleotide
cuggcaaccgccuggggcc

SEQ ID NO: 995110 - RNA, 19 nt, Artificial Sequence
  Description of Artificial Sequence: Synthetic oligonucleotide
gucaccguggaacucgaag

SEQ ID NO: 995111 - RNA, 19 nt, Artificial Sequence
  Description of Artificial Sequence: Synthetic oligonucleotide
gaagagucuauacaaaauu

SEQ ID NO: 995112 - RNA, 19 nt, Artificial Sequence
  Description of Artificial Sequence: Synthetic oligonucleotide
uggcaacuacuuacaaucc

SEQ ID NO: 995113 - RNA, 19 nt, Artificial Sequence
  Description of Artificial Sequence: Synthetic oligonucleotide
caaaugggauaucuucccc

SEQ ID NO: 995114 - RNA, 19 nt, Artificial Sequence
  Description of Artificial Sequence: Synthetic oligonucleotide
gacgcgugucuucaaacug

SEQ ID NO: 995115 - RNA, 19 nt, Artificial Sequence
  Description of Artificial Sequence: Synthetic oligonucleotide
aaaugagggcgacuuuuau

SEQ ID NO: 995116 - RNA, 19 nt, Artificial Sequence
  Description of Artificial Sequence: Synthetic oligonucleotide
auuagcuagggcugaggca

SEQ ID NO: 995117 - RNA, 19 nt, Artificial Sequence
  Description of Artificial Sequence: Synthetic oligonucleotide
gucaggaccuucaagacca

SEQ ID NO: 995118 - RNA, 19 nt, Artificial Sequence
  Description of Artificial Sequence: Synthetic oligonucleotide
accccuauuccauccuugg

SEQ ID NO: 995119 - RNA, 19 nt, Artificial Sequence
  Description of Artificial Sequence: Synthetic oligonucleotide
cuggauaaccucucacuac

SEQ ID NO: 995120 - RNA, 19 nt, Artificial Sequence
  Description of Artificial Sequence: Synthetic oligonucleotide
agcgcuaaaaugaucaaau

SEQ ID NO: 995121 - RNA, 19 nt, Artificial Sequence
  Description of Artificial Sequence: Synthetic oligonucleotide
aaggaccccugcuaagcug

SEQ ID NO: 995122 - RNA, 19 nt, Artificial Sequence
  Description of Artificial Sequence: Synthetic oligonucleotide
cacacacacacacugucac

SEQ ID NO: 995123 - RNA, 19 nt, Artificial Sequence
  Description of Artificial Sequence: Synthetic oligonucleotide
cagcgccugagcauaaacg

SEQ ID NO: 995124 - RNA, 19 nt, Artificial Sequence
  Description of Artificial Sequence: Synthetic oligonucleotide
accgccuggggccugcagc

SEQ ID NO: 995125 - RNA, 19 nt, Artificial Sequence
  Description of Artificial Sequence: Synthetic oligonucleotide
uaaacgcaggccaccacaa

SEQ ID NO: 995126 - RNA, 19 nt, Artificial Sequence
  Description of Artificial Sequence: Synthetic oligonucleotide
uuacuuugccaauuugcua

SEQ ID NO: 995127 - RNA, 19 nt, Artificial Sequence
  Description of Artificial Sequence: Synthetic oligonucleotide
agugguagugucacugagg

SEQ ID NO: 995128 - RNA, 19 nt, Artificial Sequence
  Description of Artificial Sequence: Synthetic oligonucleotide
ucggucugguucauuguca

SEQ ID NO: 995129 - RNA, 19 nt, Artificial Sequence
  Description of Artificial Sequence: Synthetic oligonucleotide
aggaccccugcuaagcugc

SEQ ID NO: 995130 - RNA, 19 nt, Artificial Sequence
  Description of Artificial Sequence: Synthetic oligonucleotide
ugucacacacacacacaca

SEQ ID NO: 995131 - RNA, 19 nt, Artificial Sequence
  Description of Artificial Sequence: Synthetic oligonucleotide
uacagcgacacaggcaagc

SEQ ID NO: 995132 - RNA, 19 nt, Artificial Sequence
  Description of Artificial Sequence: Synthetic oligonucleotide
ugacgcgugucuucaaacu

SEQ ID NO: 995133 - RNA, 19 nt, Artificial Sequence
  Description of Artificial Sequence: Synthetic oligonucleotide
uugagucccacuggagagg

SEQ ID NO: 995134 - RNA, 19 nt, Artificial Sequence
  Description of Artificial Sequence: Synthetic oligonucleotide
agcgugcuccucuccaugg

SEQ ID NO: 995135 - RNA, 19 nt, Artificial Sequence
  Description of Artificial Sequence: Synthetic oligonucleotide
guggaacucgaaguggccg

SEQ ID NO: 995136 - RNA, 19 nt, Artificial Sequence
  Description of Artificial Sequence: Synthetic oligonucleotide
ucacacacacacacacaca

SEQ ID NO: 995137 - RNA, 19 nt, Artificial Sequence
  Description of Artificial Sequence: Synthetic oligonucleotide
ggaaagugaggaaacuucc

SEQ ID NO: 995138 - RNA, 19 nt, Artificial Sequence
  Description of Artificial Sequence: Synthetic oligonucleotide
auuaaauauuacagcgaca

SEQ ID NO: 995139 - RNA, 19 nt, Artificial Sequence
  Description of Artificial Sequence: Synthetic oligonucleotide
cacuacagcuauacccagg

SEQ ID NO: 995140 - RNA, 19 nt, Artificial Sequence
  Description of Artificial Sequence: Synthetic oligonucleotide
ccaacacacacacacacac

SEQ ID NO: 995141 - RNA, 19 nt, Artificial Sequence
  Description of Artificial Sequence: Synthetic oligonucleotide
cuuugguacucauuaaaua

SEQ ID NO: 995142 - RNA, 19 nt, Artificial Sequence
  Description of Artificial Sequence: Synthetic oligonucleotide
acaugguaagcagauacaa

SEQ ID NO: 995143 - RNA, 19 nt, Artificial Sequence
  Description of Artificial Sequence: Synthetic oligonucleotide
gguuuaguaacaccauuuc

SEQ ID NO: 995144 - RNA, 19 nt, Artificial Sequence
  Description of Artificial Sequence: Synthetic oligonucleotide
cacacacacacacacuguc

SEQ ID NO: 995145 - RNA, 19 nt, Artificial Sequence
  Description of Artificial Sequence: Synthetic oligonucleotide
gaagaacucaugcaacccu

SEQ ID NO: 995146 - RNA, 19 nt, Artificial Sequence
  Description of Artificial Sequence: Synthetic oligonucleotide
uaccccuauuccauccuug

SEQ ID NO: 995147 - RNA, 19 nt, Artificial Sequence
  Description of Artificial Sequence: Synthetic oligonucleotide
agaaaugagggcgacuuuu

SEQ ID NO: 995148 - RNA, 19 nt, Artificial Sequence
  Description of Artificial Sequence: Synthetic oligonucleotide
caugccauguuuggggagc

SEQ ID NO: 995149 - RNA, 19 nt, Artificial Sequence
  Description of Artificial Sequence: Synthetic oligonucleotide
uuaagacgaucagaaggac

SEQ ID NO: 995150 - RNA, 19 nt, Artificial Sequence
  Description of Artificial Sequence: Synthetic oligonucleotide
aggcuauugcaccauucca

SEQ ID NO: 995151 - RNA, 19 nt, Artificial Sequence
  Description of Artificial Sequence: Synthetic oligonucleotide
cuggggacucuccacgucc

SEQ ID NO: 995152 - RNA, 19 nt, Artificial Sequence
  Description of Artificial Sequence: Synthetic oligonucleotide
ugcaaacauguuuugccuu

SEQ ID NO: 995153 - RNA, 19 nt, Artificial Sequence
  Description of Artificial Sequence: Synthetic oligonucleotide
augaagcagaauauuuuca

SEQ ID NO: 995154 - RNA, 19 nt, Artificial Sequence
  Description of Artificial Sequence: Synthetic oligonucleotide
gacaauuguccaccccaug

SEQ ID NO: 995155 - RNA, 19 nt, Artificial Sequence
  Description of Artificial Sequence: Synthetic oligonucleotide
gacuaggaggaagaagaac

SEQ ID NO: 995156 - RNA, 19 nt, Artificial Sequence
  Description of Artificial Sequence: Synthetic oligonucleotide
gguucauugucauugucaa

SEQ ID NO: 995157 - RNA, 19 nt, Artificial Sequence
  Description of Artificial Sequence: Synthetic oligonucleotide
agcgacacaggcaagcacu

SEQ ID NO: 995158 - RNA, 19 nt, Artificial Sequence
  Description of Artificial Sequence: Synthetic oligonucleotide
uucugacaauuguccaccc

SEQ ID NO: 995159 - RNA, 19 nt, Artificial Sequence
  Description of Artificial Sequence: Synthetic oligonucleotide
agaaugcgagcuaugguga

SEQ ID NO: 995160 - RNA, 19 nt, Artificial Sequence
  Description of Artificial Sequence: Synthetic oligonucleotide
caugggaccucccuuccug

SEQ ID NO: 995161 - RNA, 19 nt, Artificial Sequence
  Description of Artificial Sequence: Synthetic oligonucleotide
aaacacacacacacacaca

SEQ ID NO: 995162 - RNA, 19 nt, Artificial Sequence
  Description of Artificial Sequence: Synthetic oligonucleotide
acacacacacacacacagc

SEQ ID NO: 995163 - RNA, 19 nt, Artificial Sequence
  Description of Artificial Sequence: Synthetic oligonucleotide
gaaugcgagcuauggugac

SEQ ID NO: 995164 - RNA, 19 nt, Artificial Sequence
  Description of Artificial Sequence: Synthetic oligonucleotide
uggcgaaugugauguagaa

SEQ ID NO: 995165 - RNA, 19 nt, Artificial Sequence
  Description of Artificial Sequence: Synthetic oligonucleotide
ggaauggucagugguagug

SEQ ID NO: 995166 - RNA, 19 nt, Artificial Sequence
  Description of Artificial Sequence: Synthetic oligonucleotide
ucggccagacuucccauaa

SEQ ID NO: 995167 - RNA, 19 nt, Artificial Sequence
  Description of Artificial Sequence: Synthetic oligonucleotide
accguggaacucgaagugg

SEQ ID NO: 995168 - RNA, 19 nt, Artificial Sequence
  Description of Artificial Sequence: Synthetic oligonucleotide
cagccuuuggcgaauguga

SEQ ID NO: 995169 - RNA, 19 nt, Artificial Sequence
  Description of Artificial Sequence: Synthetic oligonucleotide
uggacgcagggguugaguc

SEQ ID NO: 995170 - RNA, 19 nt, Artificial Sequence
  Description of Artificial Sequence: Synthetic oligonucleotide
gugcuauguuaccugaauc

SEQ ID NO: 995171 - RNA, 19 nt, Artificial Sequence
  Description of Artificial Sequence: Synthetic oligonucleotide
caaaggauucaagauggca

SEQ ID NO: 995172 - RNA, 19 nt, Artificial Sequence
  Description of Artificial Sequence: Synthetic oligonucleotide
acuuuguaauugugcuaug

SEQ ID NO: 995173 - RNA, 19 nt, Artificial Sequence
  Description of Artificial Sequence: Synthetic oligonucleotide
agacgaucagaaggacccc

SEQ ID NO: 995174 - RNA, 19 nt, Artificial Sequence
  Description of Artificial Sequence: Synthetic oligonucleotide
caugcccgcagcccgcucg

SEQ ID NO: 995175 - RNA, 19 nt, Artificial Sequence
  Description of Artificial Sequence: Synthetic oligonucleotide
aacuucggccagacuuccc

SEQ ID NO: 995176 - RNA, 19 nt, Artificial Sequence
  Description of Artificial Sequence: Synthetic oligonucleotide
uucccauaagagguacccc

SEQ ID NO: 995177 - RNA, 19 nt, Artificial Sequence
  Description of Artificial Sequence: Synthetic oligonucleotide
cacacacacacacacagcu

SEQ ID NO: 995178 - RNA, 19 nt, Artificial Sequence
  Description of Artificial Sequence: Synthetic oligonucleotide
gcugcggugagaaugcgag

SEQ ID NO: 995179 - RNA, 19 nt, Artificial Sequence
  Description of Artificial Sequence: Synthetic oligonucleotide
gguugagucccacuggaga

SEQ ID NO: 995180 - RNA, 19 nt, Artificial Sequence
  Description of Artificial Sequence: Synthetic oligonucleotide
acacacacacacaaacaca

SEQ ID NO: 995181 - RNA, 19 nt, Artificial Sequence
  Description of Artificial Sequence: Synthetic oligonucleotide
guacaacaucugaaucugg

SEQ ID NO: 995182 - RNA, 19 nt, Artificial Sequence
  Description of Artificial Sequence: Synthetic oligonucleotide
acacacacaaacacacaca

SEQ ID NO: 995183 - RNA, 19 nt, Artificial Sequence
  Description of Artificial Sequence: Synthetic oligonucleotide
acaaacacacacacacaca

SEQ ID NO: 995184 - RNA, 19 nt, Artificial Sequence
  Description of Artificial Sequence: Synthetic oligonucleotide
ugcaacccugauuccccag

SEQ ID NO: 995185 - RNA, 19 nt, Artificial Sequence
  Description of Artificial Sequence: Synthetic oligonucleotide
caugguaagcagauacaaa

SEQ ID NO: 995186 - RNA, 19 nt, Artificial Sequence
  Description of Artificial Sequence: Synthetic oligonucleotide
agcuauacccaggacugcu

SEQ ID NO: 995187 - RNA, 19 nt, Artificial Sequence
  Description of Artificial Sequence: Synthetic oligonucleotide
uuacagcgacacaggcaag

SEQ ID NO: 995188 - RNA, 19 nt, Artificial Sequence
  Description of Artificial Sequence: Synthetic oligonucleotide
gugacgcgugucuucaaac

SEQ ID NO: 995189 - RNA, 19 nt, Artificial Sequence
  Description of Artificial Sequence: Synthetic oligonucleotide
agagguaccccuauuccau

SEQ ID NO: 995190 - RNA, 19 nt, Artificial Sequence
  Description of Artificial Sequence: Synthetic oligonucleotide
acacacacacacugucaca

SEQ ID NO: 995191 - RNA, 19 nt, Artificial Sequence
  Description of Artificial Sequence: Synthetic oligonucleotide
acacacacacacacaaaca

SEQ ID NO: 995192 - RNA, 19 nt, Artificial Sequence
  Description of Artificial Sequence: Synthetic oligonucleotide
accccugcuaagcugcggu

SEQ ID NO: 995193 - RNA, 19 nt, Artificial Sequence
  Description of Artificial Sequence: Synthetic oligonucleotide
guauagacugugggacagg

SEQ ID NO: 995194 - RNA, 19 nt, Artificial Sequence
  Description of Artificial Sequence: Synthetic oligonucleotide
acaccauuucaaaugggau

SEQ ID NO: 995195 - RNA, 19 nt, Artificial Sequence
  Description of Artificial Sequence: Synthetic oligonucleotide
ggaacagguagaguuuagc

SEQ ID NO: 995196 - RNA, 19 nt, Artificial Sequence
  Description of Artificial Sequence: Synthetic oligonucleotide
cauaaacgcaggccaccac

SEQ ID NO: 995197 - RNA, 19 nt, Artificial Sequence
  Description of Artificial Sequence: Synthetic oligonucleotide
agaagagcauggucaccgu

SEQ ID NO: 995198 - RNA, 19 nt, Artificial Sequence
  Description of Artificial Sequence: Synthetic oligonucleotide
cccagcgcuaaaaugauca

SEQ ID NO: 995199 - RNA, 19 nt, Artificial Sequence
  Description of Artificial Sequence: Synthetic oligonucleotide
uggaauggucagugguagu

SEQ ID NO: 995200 - RNA, 19 nt, Artificial Sequence
  Description of Artificial Sequence: Synthetic oligonucleotide
ccaacauggauucagaaau

SEQ ID NO: 995201 - RNA, 19 nt, Artificial Sequence
  Description of Artificial Sequence: Synthetic oligonucleotide
ggcaacuacuuacaaucca

SEQ ID NO: 995202 - RNA, 19 nt, Artificial Sequence
  Description of Artificial Sequence: Synthetic oligonucleotide
uccccagcgcuaaaaugau

SEQ ID NO: 995203 - RNA, 19 nt, Artificial Sequence
  Description of Artificial Sequence: Synthetic oligonucleotide
ggacaggaagagucuauac

SEQ ID NO: 995204 - RNA, 19 nt, Artificial Sequence
  Description of Artificial Sequence: Synthetic oligonucleotide
ucuugagcgugcuccucuc

SEQ ID NO: 995205 - RNA, 19 nt, Artificial Sequence
  Description of Artificial Sequence: Synthetic oligonucleotide
caguauagacugugggaca

SEQ ID NO: 995206 - RNA, 19 nt, Artificial Sequence
  Description of Artificial Sequence: Synthetic oligonucleotide
augcccgcagcccgcucgc

SEQ ID NO: 995207 - RNA, 19 nt, Artificial Sequence
  Description of Artificial Sequence: Synthetic oligonucleotide
auaccaacacacacacaca

SEQ ID NO: 995208 - RNA, 19 nt, Artificial Sequence
  Description of Artificial Sequence: Synthetic oligonucleotide
auguuuggggagccggaau

SEQ ID NO: 995209 - RNA, 19 nt, Artificial Sequence
  Description of Artificial Sequence: Synthetic oligonucleotide
uacagccuuuggcgaaugu

SEQ ID NO: 995210 - RNA, 19 nt, Artificial Sequence
  Description of Artificial Sequence: Synthetic oligonucleotide
ggagacuucuucauucuga

SEQ ID NO: 995211 - RNA, 19 nt, Artificial Sequence
  Description of Artificial Sequence: Synthetic oligonucleotide
gaaaugagggcgacuuuua

SEQ ID NO: 995212 - RNA, 19 nt, Artificial Sequence
  Description of Artificial Sequence: Synthetic oligonucleotide
agggcgacuuuuaugucca

SEQ ID NO: 995213 - RNA, 19 nt, Artificial Sequence
  Description of Artificial Sequence: Synthetic oligonucleotide
gcgcuaaaaugaucaaaug

SEQ ID NO: 995214 - RNA, 19 nt, Artificial Sequence
  Description of Artificial Sequence: Synthetic oligonucleotide
ugcgagcuauggugacgcg

SEQ ID NO: 995215 - RNA, 19 nt, Artificial Sequence
  Description of Artificial Sequence: Synthetic oligonucleotide
ccaauaaaacuacaugcaa

SEQ ID NO: 995216 - RNA, 19 nt, Artificial Sequence
  Description of Artificial Sequence: Synthetic oligonucleotide
gagguaccccuauuccauc

SEQ ID NO: 995217 - RNA, 19 nt, Artificial Sequence
  Description of Artificial Sequence: Synthetic oligonucleotide
accgauugugauaaccuua

SEQ ID NO: 995218 - RNA, 19 nt, Artificial Sequence
  Description of Artificial Sequence: Synthetic oligonucleotide
auggugacgcgugucuuca

SEQ ID NO: 995219 - RNA, 19 nt, Artificial Sequence
  Description of Artificial Sequence: Synthetic oligonucleotide
acacaaacacacacacaca

SEQ ID NO: 995220 - RNA, 19 nt, Artificial Sequence
  Description of Artificial Sequence: Synthetic oligonucleotide
acacacacacacacuguca

SEQ ID NO: 995221 - RNA, 19 nt, Artificial Sequence
  Description of Artificial Sequence: Synthetic oligonucleotide
ggccagacuucccauaaga

SEQ ID NO: 995222 - RNA, 19 nt, Artificial Sequence
  Description of Artificial Sequence: Synthetic oligonucleotide
cuuuuauguccagauggaa

SEQ ID NO: 995223 - RNA, 19 nt, Artificial Sequence
  Description of Artificial Sequence: Synthetic oligonucleotide
caacacacacacacacaca

SEQ ID NO: 995224 - RNA, 19 nt, Artificial Sequence
  Description of Artificial Sequence: Synthetic oligonucleotide
acugucacacacacacaca

SEQ ID NO: 995225 - RNA, 19 nt, Artificial Sequence
  Description of Artificial Sequence: Synthetic oligonucleotide
cagcaucuggguuuaguaa

SEQ ID NO: 995226 - RNA, 19 nt, Artificial Sequence
  Description of Artificial Sequence: Synthetic oligonucleotide
cuacagcuauacccaggac

SEQ ID NO: 995227 - RNA, 19 nt, Artificial Sequence
  Description of Artificial Sequence: Synthetic oligonucleotide
ccguggaacucgaaguggc

SEQ ID NO: 995228 - RNA, 19 nt, Artificial Sequence
  Description of Artificial Sequence: Synthetic oligonucleotide
accaacacacacacacaca

SEQ ID NO: 995229 - RNA, 19 nt, Artificial Sequence
  Description of Artificial Sequence: Synthetic oligonucleotide
augcaacccugauucccca

SEQ ID NO: 995230 - RNA, 19 nt, Artificial Sequence
  Description of Artificial Sequence: Synthetic oligonucleotide
acacacaaacacacacaca

SEQ ID NO: 995231 - RNA, 19 nt, Artificial Sequence
  Description of Artificial Sequence: Synthetic oligonucleotide
aucugggaggcaaugucaa

SEQ ID NO: 995232 - RNA, 19 nt, Artificial Sequence
  Description of Artificial Sequence: Synthetic oligonucleotide
caaaagguccaaacaacuu

SEQ ID NO: 995233 - RNA, 19 nt, Artificial Sequence
  Description of Artificial Sequence: Synthetic oligonucleotide
cuauguuaccugaaucuuu

SEQ ID NO: 995234 - RNA, 19 nt, Artificial Sequence
  Description of Artificial Sequence: Synthetic oligonucleotide
cagcgacacaggcaagcac

SEQ ID NO: 995235 - RNA, 19 nt, Artificial Sequence
  Description of Artificial Sequence: Synthetic oligonucleotide
acacacacacacacacugu

SEQ ID NO: 995236 - RNA, 19 nt, Artificial Sequence
  Description of Artificial Sequence: Synthetic oligonucleotide
cgagcuauggugacgcgug

SEQ ID NO: 995237 - RNA, 19 nt, Artificial Sequence
  Description of Artificial Sequence: Synthetic oligonucleotide
cacacacacacacagcuuu

SEQ ID NO: 995238 - RNA, 19 nt, Artificial Sequence
  Description of Artificial Sequence: Synthetic oligonucleotide
gccggaaucugggacacug

SEQ ID NO: 995239 - RNA, 19 nt, Artificial Sequence
  Description of Artificial Sequence: Synthetic oligonucleotide
gagccggaaucugggacac

SEQ ID NO: 995240 - RNA, 19 nt, Artificial Sequence
  Description of Artificial Sequence: Synthetic oligonucleotide
acacacacacaaacacaca

SEQ ID NO: 995241 - RNA, 19 nt, Artificial Sequence
  Description of Artificial Sequence: Synthetic oligonucleotide
acacacacacacacacaca

SEQ ID NO: 995242 - RNA, 19 nt, Artificial Sequence
  Description of Artificial Sequence: Synthetic oligonucleotide
acacacacacacacacacu

SEQ ID NO: 995243 - RNA, 19 nt, Artificial Sequence
  Description of Artificial Sequence: Synthetic oligonucleotide
cuugcccuggccgcccugc

SEQ ID NO: 995244 - RNA, 19 nt, Artificial Sequence
  Description of Artificial Sequence: Synthetic oligonucleotide
gaccaugugcaugggaccu

SEQ ID NO: 995245 - RNA, 19 nt, Artificial Sequence
  Description of Artificial Sequence: Synthetic oligonucleotide
gugauaaccuuaucucuuu

SEQ ID NO: 995246 - RNA, 19 nt, Artificial Sequence
  Description of Artificial Sequence: Synthetic oligonucleotide
cuauacccaggacugcucu

SEQ ID NO: 995247 - RNA, 19 nt, Artificial Sequence
  Description of Artificial Sequence: Synthetic oligonucleotide
gcuagcugcaaacauguuu

SEQ ID NO: 995248 - RNA, 19 nt, Artificial Sequence
  Description of Artificial Sequence: Synthetic oligonucleotide
ugagggcgacagccagcag

SEQ ID NO: 995249 - RNA, 19 nt, Artificial Sequence
  Description of Artificial Sequence: Synthetic oligonucleotide
ccugcuaagcugcggugag

SEQ ID NO: 995250 - RNA, 19 nt, Artificial Sequence
  Description of Artificial Sequence: Synthetic oligonucleotide
gcaaaaugcucugggucac

SEQ ID NO: 995251 - RNA, 19 nt, Artificial Sequence
  Description of Artificial Sequence: Synthetic oligonucleotide
ggugagaaugcgagcuaug

SEQ ID NO: 995252 - RNA, 19 nt, Artificial Sequence
  Description of Artificial Sequence: Synthetic oligonucleotide
caacugagcucuggauaac

SEQ ID NO: 995253 - RNA, 19 nt, Artificial Sequence
  Description of Artificial Sequence: Synthetic oligonucleotide
uaacaccgauugugauaac

SEQ ID NO: 995254 - RNA, 19 nt, Artificial Sequence
  Description of Artificial Sequence: Synthetic oligonucleotide
cacgugagggcgacagcca

SEQ ID NO: 995255 - RNA, 19 nt, Artificial Sequence
  Description of Artificial Sequence: Synthetic oligonucleotide
cagcgcuaaaaugaucaaa

SEQ ID NO: 995256 - RNA, 19 nt, Artificial Sequence
  Description of Artificial Sequence: Synthetic oligonucleotide
gcuauggugacgcgugucu

SEQ ID NO: 995257 - RNA, 19 nt, Artificial Sequence
  Description of Artificial Sequence: Synthetic oligonucleotide
cagccauuccugggcuugg

SEQ ID NO: 995258 - RNA, 19 nt, Artificial Sequence
  Description of Artificial Sequence: Synthetic oligonucleotide
acacacacacacacacaaa

SEQ ID NO: 995259 - RNA, 19 nt, Artificial Sequence
  Description of Artificial Sequence: Synthetic oligonucleotide
gccugagcauaaacgcagg

SEQ ID NO: 995260 - RNA, 19 nt, Artificial Sequence
  Description of Artificial Sequence: Synthetic oligonucleotide
uaccaggcuauugcaccau

SEQ ID NO: 995261 - RNA, 19 nt, Artificial Sequence
  Description of Artificial Sequence: Synthetic oligonucleotide
ggugacgcgugucuucaaa

SEQ ID NO: 995262 - RNA, 19 nt, Artificial Sequence
  Description of Artificial Sequence: Synthetic oligonucleotide
acacugucacacacacaca

SEQ ID NO: 995263 - RNA, 19 nt, Artificial Sequence
  Description of Artificial Sequence: Synthetic oligonucleotide
gcgccuggcaaccgccugg

SEQ ID NO: 995264 - RNA, 19 nt, Artificial Sequence
  Description of Artificial Sequence: Synthetic oligonucleotide
gcauaaacgcaggccacca

SEQ ID NO: 995265 - RNA, 19 nt, Artificial Sequence
  Description of Artificial Sequence: Synthetic oligonucleotide
ggucacgacaaugaccacu

SEQ ID NO: 995266 - RNA, 19 nt, Artificial Sequence
  Description of Artificial Sequence: Synthetic oligonucleotide
agcugcggugagaaugcga

SEQ ID NO: 995267 - RNA, 19 nt, Artificial Sequence
  Description of Artificial Sequence: Synthetic oligonucleotide
cgacuuuuauguccagaug

SEQ ID NO: 995268 - RNA, 19 nt, Artificial Sequence
  Description of Artificial Sequence: Synthetic oligonucleotide
acacacacacacacagcuu

SEQ ID NO: 995269 - RNA, 19 nt, Artificial Sequence
  Description of Artificial Sequence: Synthetic oligonucleotide
agagccugccacagcgccu

SEQ ID NO: 995270 - RNA, 19 nt, Artificial Sequence
  Description of Artificial Sequence: Synthetic oligonucleotide
gcaaacauguuuugccuuu

SEQ ID NO: 995271 - RNA, 19 nt, Artificial Sequence
  Description of Artificial Sequence: Synthetic oligonucleotide
gcucugggucacgacaaug

SEQ ID NO: 995272 - RNA, 19 nt, Artificial Sequence
  Description of Artificial Sequence: Synthetic oligonucleotide
ggcuauugcaccauuccau

SEQ ID NO: 995273 - RNA, 19 nt, Artificial Sequence
  Description of Artificial Sequence: Synthetic oligonucleotide
acacacacacacagcuuua

SEQ ID NO: 995274 - RNA, 19 nt, Artificial Sequence
  Description of Artificial Sequence: Synthetic oligonucleotide
uggugacgcgugucuucaa

SEQ ID NO: 995275 - RNA, 19 nt, Artificial Sequence
  Description of Artificial Sequence: Synthetic oligonucleotide
ggcgacuuuuauguccaga

SEQ ID NO: 995276 - RNA, 19 nt, Artificial Sequence
  Description of Artificial Sequence: Synthetic oligonucleotide
cauaagagguaccccuauu

SEQ ID NO: 995277 - RNA, 19 nt, Artificial Sequence
  Description of Artificial Sequence: Synthetic oligonucleotide
ggcaaaggauaacaccgau

SEQ ID NO: 995278 - RNA, 19 nt, Artificial Sequence
  Description of Artificial Sequence: Synthetic oligonucleotide
gguagaguuuagcuucuuu

SEQ ID NO: 995279 - RNA, 19 nt, Artificial Sequence
  Description of Artificial Sequence: Synthetic oligonucleotide
gcgacacaggcaagcacug

SEQ ID NO: 995280 - RNA, 19 nt, Artificial Sequence
  Description of Artificial Sequence: Synthetic oligonucleotide
caccgauugugauaaccuu

SEQ ID NO: 995281 - RNA, 19 nt, Artificial Sequence
  Description of Artificial Sequence: Synthetic oligonucleotide
cuuuggcgaaugugaugua

SEQ ID NO: 995282 - RNA, 19 nt, Artificial Sequence
  Description of Artificial Sequence: Synthetic oligonucleotide
gcauggucaccguggaacu

SEQ ID NO: 995283 - RNA, 19 nt, Artificial Sequence
  Description of Artificial Sequence: Synthetic oligonucleotide
ccgauugugauaaccuuau

SEQ ID NO: 995284 - RNA, 19 nt, Artificial Sequence
  Description of Artificial Sequence: Synthetic oligonucleotide
gguaccccuauuccauccu

SEQ ID NO: 995285 - RNA, 19 nt, Artificial Sequence
  Description of Artificial Sequence: Synthetic oligonucleotide
uggcaaccgccuggggccu

SEQ ID NO: 995286 - RNA, 19 nt, Artificial Sequence
  Description of Artificial Sequence: Synthetic oligonucleotide
gcgccugagcauaaacgca

SEQ ID NO: 995287 - RNA, 19 nt, Artificial Sequence
  Description of Artificial Sequence: Synthetic oligonucleotide
cugggcgucccgggccgcg

SEQ ID NO: 995288 - RNA, 19 nt, Artificial Sequence
  Description of Artificial Sequence: Synthetic oligonucleotide
guaccccuauuccauccuu

SEQ ID NO: 995289 - RNA, 19 nt, Artificial Sequence
  Description of Artificial Sequence: Synthetic oligonucleotide
cacgcgcgccuggcaaccg

SEQ ID NO: 995290 - RNA, 19 nt, Artificial Sequence
  Description of Artificial Sequence: Synthetic oligonucleotide
ggaccccugcuaagcugcg

SEQ ID NO: 995291 - RNA, 19 nt, Artificial Sequence
  Description of Artificial Sequence: Synthetic oligonucleotide
gggcgacuuuuauguccag

SEQ ID NO: 995292 - RNA, 19 nt, Artificial Sequence
  Description of Artificial Sequence: Synthetic oligonucleotide
cugcuaagcugcggugaga

SEQ ID NO: 995293 - RNA, 19 nt, Artificial Sequence
  Description of Artificial Sequence: Synthetic oligonucleotide
gccccgcagggucuugccc

SEQ ID NO: 995294 - RNA, 19 nt, Artificial Sequence
  Description of Artificial Sequence: Synthetic oligonucleotide
cuucggccagacuucccau

SEQ ID NO: 995295 - RNA, 19 nt, Artificial Sequence
  Description of Artificial Sequence: Synthetic oligonucleotide
cacacacacacagcuuuau

SEQ ID NO: 995296 - RNA, 19 nt, Artificial Sequence
  Description of Artificial Sequence: Synthetic oligonucleotide
ccagcgcuaaaaugaucaa

SEQ ID NO: 995297 - RNA, 19 nt, Artificial Sequence
  Description of Artificial Sequence: Synthetic oligonucleotide
cucgcacgcgcgccuggca

SEQ ID NO: 995298 - RNA, 19 nt, Artificial Sequence
  Description of Artificial Sequence: Synthetic oligonucleotide
ccccugcuaagcugcggug

SEQ ID NO: 995299 - RNA, 19 nt, Artificial Sequence
  Description of Artificial Sequence: Synthetic oligonucleotide
cagaaaugagggcgacuuu

SEQ ID NO: 995300 - RNA, 19 nt, Artificial Sequence
  Description of Artificial Sequence: Synthetic oligonucleotide
ccccagcgcuaaaaugauc

SEQ ID NO: 995301 - RNA, 19 nt, Artificial Sequence
  Description of Artificial Sequence: Synthetic oligonucleotide
gcacgcgcgccuggcaacc

SEQ ID NO: 995302 - RNA, 19 nt, Artificial Sequence
  Description of Artificial Sequence: Synthetic oligonucleotide
cuauggugacgcgugucuu

SEQ ID NO: 995303 - RNA, 19 nt, Artificial Sequence
  Description of Artificial Sequence: Synthetic oligonucleotide
gcggugagaaugcgagcua

SEQ ID NO: 995304 - RNA, 19 nt, Artificial Sequence
  Description of Artificial Sequence: Synthetic oligonucleotide
cagguguauuugucugcau

SEQ ID NO: 995305 - RNA, 19 nt, Artificial Sequence
  Description of Artificial Sequence: Synthetic oligonucleotide
cugucagguuguguucggu

SEQ ID NO: 995306 - RNA, 19 nt, Artificial Sequence
  Description of Artificial Sequence: Synthetic oligonucleotide
ccuucaagaccaugugcau

SEQ ID NO: 995307 - RNA, 19 nt, Artificial Sequence
  Description of Artificial Sequence: Synthetic oligonucleotide
gcgagcuauggugacgcgu

SEQ ID NO: 995308 - RNA, 19 nt, Artificial Sequence
  Description of Artificial Sequence: Synthetic oligonucleotide
gcucgcacgcgcgccuggc

SEQ ID NO: 995309 - RNA, 19 nt, Artificial Sequence
  Description of Artificial Sequence: Synthetic oligonucleotide
cagccgcaggccgcccaug

SEQ ID NO: 995310 - RNA, 19 nt, Artificial Sequence
  Description of Artificial Sequence: Synthetic oligonucleotide
ggacacugucagguugugu

SEQ ID NO: 995311 - RNA, 19 nt, Artificial Sequence
  Description of Artificial Sequence: Synthetic oligonucleotide
uggccgcccugcggccacc

SEQ ID NO: 995312 - RNA, 19 nt, Artificial Sequence
  Description of Artificial Sequence: Synthetic oligonucleotide
cgcacgcgcgccuggcaac

SEQ ID NO: 995313 - RNA, 19 nt, Artificial Sequence
  Description of Artificial Sequence: Synthetic oligonucleotide
acgcagggguugaguccca

SEQ ID NO: 995314 - RNA, 19 nt, Artificial Sequence
  Description of Artificial Sequence: Synthetic oligonucleotide
gcgugcuccucuccauggu

SEQ ID NO: 995315 - RNA, 19 nt, Artificial Sequence
  Description of Artificial Sequence: Synthetic oligonucleotide
cgacaaugaccacugcgau

SEQ ID NO: 995316 - RNA, 19 nt, Artificial Sequence
  Description of Artificial Sequence: Synthetic oligonucleotide
ccggaaucugggacacugu

SEQ ID NO: 995317 - RNA, 19 nt, Artificial Sequence
  Description of Artificial Sequence: Synthetic oligonucleotide
ggcaaccgccuggggccug

SEQ ID NO: 995318 - RNA, 19 nt, Artificial Sequence
  Description of Artificial Sequence: Synthetic oligonucleotide
ggucaccguggaacucgaa

SEQ ID NO: 995319 - RNA, 19 nt, Artificial Sequence
  Description of Artificial Sequence: Synthetic oligonucleotide
gcugccccgcagggucuug

SEQ ID NO: 995320 - RNA, 19 nt, Artificial Sequence
  Description of Artificial Sequence: Synthetic oligonucleotide
caaccgccuggggccugca

SEQ ID NO: 995321 - RNA, 19 nt, Artificial Sequence
  Description of Artificial Sequence: Synthetic oligonucleotide
ccaugcccgcagcccgcuc

SEQ ID NO: 995322 - RNA, 19 nt, Artificial Sequence
  Description of Artificial Sequence: Synthetic oligonucleotide
aaaugauucaaccucggac

SEQ ID NO: 995323 - RNA, 19 nt, Artificial Sequence
  Description of Artificial Sequence: Synthetic oligonucleotide
aaagaggugaagaugaucc

SEQ ID NO: 995324 - RNA, 19 nt, Artificial Sequence
  Description of Artificial Sequence: Synthetic oligonucleotide
auuuaugugcaucugagac

SEQ ID NO: 995325 - RNA, 19 nt, Artificial Sequence
  Description of Artificial Sequence: Synthetic oligonucleotide
uauauuugcaccuugugcc

SEQ ID NO: 995326 - RNA, 19 nt, Artificial Sequence
  Description of Artificial Sequence: Synthetic oligonucleotide
ugcauucuauaucagaugg

SEQ ID NO: 995327 - RNA, 19 nt, Artificial Sequence
  Description of Artificial Sequence: Synthetic oligonucleotide
gauaagaauaucucugacg

SEQ ID NO: 995328 - RNA, 19 nt, Artificial Sequence
  Description of Artificial Sequence: Synthetic oligonucleotide
uaucuuucgauccugacug

SEQ ID NO: 995329 - RNA, 19 nt, Artificial Sequence
  Description of Artificial Sequence: Synthetic oligonucleotide
aaacagauggaauaggaga

SEQ ID NO: 995330 - RNA, 19 nt, Artificial Sequence
  Description of Artificial Sequence: Synthetic oligonucleotide
guugcaaagacuuauuugc

SEQ ID NO: 995331 - RNA, 19 nt, Artificial Sequence
  Description of Artificial Sequence: Synthetic oligonucleotide
gaaaugcugacauaagagg

SEQ ID NO: 995332 - RNA, 19 nt, Artificial Sequence
  Description of Artificial Sequence: Synthetic oligonucleotide
uuauauuugcaccuugugc

SEQ ID NO: 995333 - RNA, 19 nt, Artificial Sequence
  Description of Artificial Sequence: Synthetic oligonucleotide
uauuuaaccaacuccaggu

SEQ ID NO: 995334 - RNA, 19 nt, Artificial Sequence
  Description of Artificial Sequence: Synthetic oligonucleotide
ucuugguccaaaauaaaug

SEQ ID NO: 995335 - RNA, 19 nt, Artificial Sequence
  Description of Artificial Sequence: Synthetic oligonucleotide
auauuuaaccaacuccagg

SEQ ID NO: 995336 - RNA, 19 nt, Artificial Sequence
  Description of Artificial Sequence: Synthetic oligonucleotide
cuaacugagguaaauuacc

SEQ ID NO: 995337 - RNA, 19 nt, Artificial Sequence
  Description of Artificial Sequence: Synthetic oligonucleotide
uacagaguuacucaggaaa

SEQ ID NO: 995338 - RNA, 19 nt, Artificial Sequence
  Description of Artificial Sequence: Synthetic oligonucleotide
agagaaacuugucagagga

SEQ ID NO: 995339 - RNA, 19 nt, Artificial Sequence
  Description of Artificial Sequence: Synthetic oligonucleotide
ugcaacuucagaaaagccu

SEQ ID NO: 995340 - RNA, 19 nt, Artificial Sequence
  Description of Artificial Sequence: Synthetic oligonucleotide
uuauuugcuggauuuaugu

SEQ ID NO: 995341 - RNA, 19 nt, Artificial Sequence
  Description of Artificial Sequence: Synthetic oligonucleotide
gauuaucuuuuccagauca

SEQ ID NO: 995342 - RNA, 19 nt, Artificial Sequence
  Description of Artificial Sequence: Synthetic oligonucleotide
aaacuaggaguuccgacag

SEQ ID NO: 995343 - RNA, 19 nt, Artificial Sequence
  Description of Artificial Sequence: Synthetic oligonucleotide
uagcaauuguacuacauca

SEQ ID NO: 995344 - RNA, 19 nt, Artificial Sequence
  Description of Artificial Sequence: Synthetic oligonucleotide
uuaugugcaucugagaccc

SEQ ID NO: 995345 - RNA, 19 nt, Artificial Sequence
  Description of Artificial Sequence: Synthetic oligonucleotide
uuuauauuugcaccuugug

SEQ ID NO: 995346 - RNA, 19 nt, Artificial Sequence
  Description of Artificial Sequence: Synthetic oligonucleotide
uucgaugagaacucgaggu

SEQ ID NO: 995347 - RNA, 19 nt, Artificial Sequence
  Description of Artificial Sequence: Synthetic oligonucleotide
uuugguaccacugaguaaa

SEQ ID NO: 995348 - RNA, 19 nt, Artificial Sequence
  Description of Artificial Sequence: Synthetic oligonucleotide
aaaagcuuuaccaucggca

SEQ ID NO: 995349 - RNA, 19 nt, Artificial Sequence
  Description of Artificial Sequence: Synthetic oligonucleotide
ugguaacaaagauugacug

SEQ ID NO: 995350 - RNA, 19 nt, Artificial Sequence
  Description of Artificial Sequence: Synthetic oligonucleotide
uguugguacagcuaacuga

SEQ ID NO: 995351 - RNA, 19 nt, Artificial Sequence
  Description of Artificial Sequence: Synthetic oligonucleotide
uugacaacuugccaauucc

SEQ ID NO: 995352 - RNA, 19 nt, Artificial Sequence
  Description of Artificial Sequence: Synthetic oligonucleotide
aggaaagcugcacugcagc

SEQ ID NO: 995353 - RNA, 19 nt, Artificial Sequence
  Description of Artificial Sequence: Synthetic oligonucleotide
acugagguaaauuaccagu

SEQ ID NO: 995354 - RNA, 19 nt, Artificial Sequence
  Description of Artificial Sequence: Synthetic oligonucleotide
uugguaacaaagauugacu

SEQ ID NO: 995355 - RNA, 19 nt, Artificial Sequence
  Description of Artificial Sequence: Synthetic oligonucleotide
uguggagcagccaaguucu

SEQ ID NO: 995356 - RNA, 19 nt, Artificial Sequence
  Description of Artificial Sequence: Synthetic oligonucleotide
aacugagguaaauuaccag

SEQ ID NO: 995357 - RNA, 19 nt, Artificial Sequence
  Description of Artificial Sequence: Synthetic oligonucleotide
ucaaggguguguauucagg

SEQ ID NO: 995358 - RNA, 19 nt, Artificial Sequence
  Description of Artificial Sequence: Synthetic oligonucleotide
gaaacuaggaguuccgaca

SEQ ID NO: 995359 - RNA, 19 nt, Artificial Sequence
  Description of Artificial Sequence: Synthetic oligonucleotide
uuuaaccaacuccaggugu

SEQ ID NO: 995360 - RNA, 19 nt, Artificial Sequence
  Description of Artificial Sequence: Synthetic oligonucleotide
aagaauaucucugacguuu

SEQ ID NO: 995361 - RNA, 19 nt, Artificial Sequence
  Description of Artificial Sequence: Synthetic oligonucleotide
aacaaagauugacugggga

SEQ ID NO: 995362 - RNA, 19 nt, Artificial Sequence
  Description of Artificial Sequence: Synthetic oligonucleotide
ggauugguaacaaagauug

SEQ ID NO: 995363 - RNA, 19 nt, Artificial Sequence
  Description of Artificial Sequence: Synthetic oligonucleotide
ucgaaaugcugacauaaga

SEQ ID NO: 995364 - RNA, 19 nt, Artificial Sequence
  Description of Artificial Sequence: Synthetic oligonucleotide
auaucucugacguuuuaag

SEQ ID NO: 995365 - RNA, 19 nt, Artificial Sequence
  Description of Artificial Sequence: Synthetic oligonucleotide
cuuggaguuaucagggugc

SEQ ID NO: 995366 - RNA, 19 nt, Artificial Sequence
  Description of Artificial Sequence: Synthetic oligonucleotide
ucuuuagccuucacaauug

SEQ ID NO: 995367 - RNA, 19 nt, Artificial Sequence
  Description of Artificial Sequence: Synthetic oligonucleotide
aucucugacguuuuaagga

SEQ ID NO: 995368 - RNA, 19 nt, Artificial Sequence
  Description of Artificial Sequence: Synthetic oligonucleotide
cugugcguaaaucagcucc

SEQ ID NO: 995369 - RNA, 19 nt, Artificial Sequence
  Description of Artificial Sequence: Synthetic oligonucleotide
uccacugugcguaaaucag

SEQ ID NO: 995370 - RNA, 19 nt, Artificial Sequence
  Description of Artificial Sequence: Synthetic oligonucleotide
cugaacaacuuuuacauga

SEQ ID NO: 995371 - RNA, 19 nt, Artificial Sequence
  Description of Artificial Sequence: Synthetic oligonucleotide
ugcaggaaaacccuuguuc

SEQ ID NO: 995372 - RNA, 19 nt, Artificial Sequence
  Description of Artificial Sequence: Synthetic oligonucleotide
uacuugauaagaauaucuc

SEQ ID NO: 995373 - RNA, 19 nt, Artificial Sequence
  Description of Artificial Sequence: Synthetic oligonucleotide
ucuguaaucguugcuaugu

SEQ ID NO: 995374 - RNA, 19 nt, Artificial Sequence
  Description of Artificial Sequence: Synthetic oligonucleotide
cuauguaucucaugcauuc

SEQ ID NO: 995375 - RNA, 19 nt, Artificial Sequence
  Description of Artificial Sequence: Synthetic oligonucleotide
uaacugagguaaauuacca

SEQ ID NO: 995376 - RNA, 19 nt, Artificial Sequence
  Description of Artificial Sequence: Synthetic oligonucleotide
guugguacagcuaacugag

SEQ ID NO: 995377 - RNA, 19 nt, Artificial Sequence
  Description of Artificial Sequence: Synthetic oligonucleotide
uguauaguugcauuuggua

SEQ ID NO: 995378 - RNA, 19 nt, Artificial Sequence
  Description of Artificial Sequence: Synthetic oligonucleotide
uaaaucagcuccuucugcu

SEQ ID NO: 995379 - RNA, 19 nt, Artificial Sequence
  Description of Artificial Sequence: Synthetic oligonucleotide
uuucgaaaugcugacauaa

SEQ ID NO: 995380 - RNA, 19 nt, Artificial Sequence
  Description of Artificial Sequence: Synthetic oligonucleotide
uguugaaacuaggaguucc

SEQ ID NO: 995381 - RNA, 19 nt, Artificial Sequence
  Description of Artificial Sequence: Synthetic oligonucleotide
uuuaggagaaugcuugcau

SEQ ID NO: 995382 - RNA, 19 nt, Artificial Sequence
  Description of Artificial Sequence: Synthetic oligonucleotide
aaacccuuguuccugguaa

SEQ ID NO: 995383 - RNA, 19 nt, Artificial Sequence
  Description of Artificial Sequence: Synthetic oligonucleotide
auucgaugagaacucgagg

SEQ ID NO: 995384 - RNA, 19 nt, Artificial Sequence
  Description of Artificial Sequence: Synthetic oligonucleotide
gguaagggcaguuucuugg

SEQ ID NO: 995385 - RNA, 19 nt, Artificial Sequence
  Description of Artificial Sequence: Synthetic oligonucleotide
ucuagcaaugcuuccaguc

SEQ ID NO: 995386 - RNA, 19 nt, Artificial Sequence
  Description of Artificial Sequence: Synthetic oligonucleotide
gaaacagauggaauaggag

SEQ ID NO: 995387 - RNA, 19 nt, Artificial Sequence
  Description of Artificial Sequence: Synthetic oligonucleotide
ggcauuuuauauuugcacc

SEQ ID NO: 995388 - RNA, 19 nt, Artificial Sequence
  Description of Artificial Sequence: Synthetic oligonucleotide
cauucgaugagaacucgag

SEQ ID NO: 995389 - RNA, 19 nt, Artificial Sequence
  Description of Artificial Sequence: Synthetic oligonucleotide
ucugacguuuuaaggacug

SEQ ID NO: 995390 - RNA, 19 nt, Artificial Sequence
  Description of Artificial Sequence: Synthetic oligonucleotide
auuuuauauuugcaccuug

SEQ ID NO: 995391 - RNA, 19 nt, Artificial Sequence
  Description of Artificial Sequence: Synthetic oligonucleotide
augauucaaccucggacac

SEQ ID NO: 995392 - RNA, 19 nt, Artificial Sequence
  Description of Artificial Sequence: Synthetic oligonucleotide
ugcacuagcaauuguacua

SEQ ID NO: 995393 - RNA, 19 nt, Artificial Sequence
  Description of Artificial Sequence: Synthetic oligonucleotide
cuaccugauggaucaaugg

SEQ ID NO: 995394 - RNA, 19 nt, Artificial Sequence
  Description of Artificial Sequence: Synthetic oligonucleotide
acuuuuacaugacccuuuc

SEQ ID NO: 995395 - RNA, 19 nt, Artificial Sequence
  Description of Artificial Sequence: Synthetic oligonucleotide
uaaucguugcuauguaucu

SEQ ID NO: 995396 - RNA, 19 nt, Artificial Sequence
  Description of Artificial Sequence: Synthetic oligonucleotide
uauuugcuggauuuaugug

SEQ ID NO: 995397 - RNA, 19 nt, Artificial Sequence
  Description of Artificial Sequence: Synthetic oligonucleotide
uuuuccaaguguccgagua

SEQ ID NO: 995398 - RNA, 19 nt, Artificial Sequence
  Description of Artificial Sequence: Synthetic oligonucleotide
ucggcaguugacaacuugc

SEQ ID NO: 995399 - RNA, 19 nt, Artificial Sequence
  Description of Artificial Sequence: Synthetic oligonucleotide
aaaagccuccacagcaagc

SEQ ID NO: 995400 - RNA, 19 nt, Artificial Sequence
  Description of Artificial Sequence: Synthetic oligonucleotide
cagugaaagaagcaucugc

SEQ ID NO: 995401 - RNA, 19 nt, Artificial Sequence
  Description of Artificial Sequence: Synthetic oligonucleotide
cugagguaaauuaccagug

SEQ ID NO: 995402 - RNA, 19 nt, Artificial Sequence
  Description of Artificial Sequence: Synthetic oligonucleotide
cugguaaugccagagaaac

SEQ ID NO: 995403 - RNA, 19 nt, Artificial Sequence
  Description of Artificial Sequence: Synthetic oligonucleotide
cagaucaagcucuuuuagg

SEQ ID NO: 995404 - RNA, 19 nt, Artificial Sequence
  Description of Artificial Sequence: Synthetic oligonucleotide
uguccugauuaucuuuucc

SEQ ID NO: 995405 - RNA, 19 nt, Artificial Sequence
  Description of Artificial Sequence: Synthetic oligonucleotide
cuugcacuagcaauuguac

SEQ ID NO: 995406 - RNA, 19 nt, Artificial Sequence
  Description of Artificial Sequence: Synthetic oligonucleotide
ucucugacguuuuaaggac

SEQ ID NO: 995407 - RNA, 19 nt, Artificial Sequence
  Description of Artificial Sequence: Synthetic oligonucleotide
ugcuauguaucucaugcau

SEQ ID NO: 995408 - RNA, 19 nt, Artificial Sequence
  Description of Artificial Sequence: Synthetic oligonucleotide
uaaaugauucaaccucgga

SEQ ID NO: 995409 - RNA, 19 nt, Artificial Sequence
  Description of Artificial Sequence: Synthetic oligonucleotide
ucuauaucagauggaaacu

SEQ ID NO: 995410 - RNA, 19 nt, Artificial Sequence
  Description of Artificial Sequence: Synthetic oligonucleotide
aucaagcucuuuuaggaga

SEQ ID NO: 995411 - RNA, 19 nt, Artificial Sequence
  Description of Artificial Sequence: Synthetic oligonucleotide
auuuaaccaacuccaggug

SEQ ID NO: 995412 - RNA, 19 nt, Artificial Sequence
  Description of Artificial Sequence: Synthetic oligonucleotide
uuaaccaacuccagguguc

SEQ ID NO: 995413 - RNA, 19 nt, Artificial Sequence
  Description of Artificial Sequence: Synthetic oligonucleotide
aucugagacccauucauca

SEQ ID NO: 995414 - RNA, 19 nt, Artificial Sequence
  Description of Artificial Sequence: Synthetic oligonucleotide
ugagguaaauuaccagugu

SEQ ID NO: 995415 - RNA, 19 nt, Artificial Sequence
  Description of Artificial Sequence: Synthetic oligonucleotide
uucgaaaugcugacauaag

SEQ ID NO: 995416 - RNA, 19 nt, Artificial Sequence
  Description of Artificial Sequence: Synthetic oligonucleotide
uuaucuguaaucguugcua

SEQ ID NO: 995417 - RNA, 19 nt, Artificial Sequence
  Description of Artificial Sequence: Synthetic oligonucleotide
aucguugcuauguaucuca

SEQ ID NO: 995418 - RNA, 19 nt, Artificial Sequence
  Description of Artificial Sequence: Synthetic oligonucleotide
caauugucucaacacauug

SEQ ID NO: 995419 - RNA, 19 nt, Artificial Sequence
  Description of Artificial Sequence: Synthetic oligonucleotide
caaguucuaugucagcccc

SEQ ID NO: 995420 - RNA, 19 nt, Artificial Sequence
  Description of Artificial Sequence: Synthetic oligonucleotide
cugauggaucaauggaugg

SEQ ID NO: 995421 - RNA, 19 nt, Artificial Sequence
  Description of Artificial Sequence: Synthetic oligonucleotide
guuaaaggaacaggauugg

SEQ ID NO: 995422 - RNA, 19 nt, Artificial Sequence
  Description of Artificial Sequence: Synthetic oligonucleotide
ucgaugagaacucgaggug

SEQ ID NO: 995423 - RNA, 19 nt, Artificial Sequence
  Description of Artificial Sequence: Synthetic oligonucleotide
aguaaauaggaggagguau

SEQ ID NO: 995424 - RNA, 19 nt, Artificial Sequence
  Description of Artificial Sequence: Synthetic oligonucleotide
cuagcaauuguacuacauc

SEQ ID NO: 995425 - RNA, 19 nt, Artificial Sequence
  Description of Artificial Sequence: Synthetic oligonucleotide
aaucguugcuauguaucuc

SEQ ID NO: 995426 - RNA, 19 nt, Artificial Sequence
  Description of Artificial Sequence: Synthetic oligonucleotide
uuucgauccugacuggcac

SEQ ID NO: 995427 - RNA, 19 nt, Artificial Sequence
  Description of Artificial Sequence: Synthetic oligonucleotide
uuccuuuugguuguuggcc

SEQ ID NO: 995428 - RNA, 19 nt, Artificial Sequence
  Description of Artificial Sequence: Synthetic oligonucleotide
agugaaagaagcaucugca

SEQ ID NO: 995429 - RNA, 19 nt, Artificial Sequence
  Description of Artificial Sequence: Synthetic oligonucleotide
cuauaucagauggaaacug

SEQ ID NO: 995430 - RNA, 19 nt, Artificial Sequence
  Description of Artificial Sequence: Synthetic oligonucleotide
uccugacuggcacuguucc

SEQ ID NO: 995431 - RNA, 19 nt, Artificial Sequence
  Description of Artificial Sequence: Synthetic oligonucleotide
guuggcccaauguuugugg

SEQ ID NO: 995432 - RNA, 19 nt, Artificial Sequence
  Description of Artificial Sequence: Synthetic oligonucleotide
ucaagcucuuuuaggagaa

SEQ ID NO: 995433 - RNA, 19 nt, Artificial Sequence
  Description of Artificial Sequence: Synthetic oligonucleotide
aauaggagagucacaugug

SEQ ID NO: 995434 - RNA, 19 nt, Artificial Sequence
  Description of Artificial Sequence: Synthetic oligonucleotide
agcuaacugagguaaauua

SEQ ID NO: 995435 - RNA, 19 nt, Artificial Sequence
  Description of Artificial Sequence: Synthetic oligonucleotide
gaacucgagguguugguac

SEQ ID NO: 995436 - RNA, 19 nt, Artificial Sequence
  Description of Artificial Sequence: Synthetic oligonucleotide
auggcaacccaacuggacu

SEQ ID NO: 995437 - RNA, 19 nt, Artificial Sequence
  Description of Artificial Sequence: Synthetic oligonucleotide
uguccgaguacagaguuac

SEQ ID NO: 995438 - RNA, 19 nt, Artificial Sequence
  Description of Artificial Sequence: Synthetic oligonucleotide
ugauggaucaauggauggc

SEQ ID NO: 995439 - RNA, 19 nt, Artificial Sequence
  Description of Artificial Sequence: Synthetic oligonucleotide
ugaaauccagcgcugcguc

SEQ ID NO: 995440 - RNA, 19 nt, Artificial Sequence
  Description of Artificial Sequence: Synthetic oligonucleotide
ucaauggauggcaacccaa

SEQ ID NO: 995441 - RNA, 19 nt, Artificial Sequence
  Description of Artificial Sequence: Synthetic oligonucleotide
aaguggcugaaagagguga

SEQ ID NO: 995442 - RNA, 19 nt, Artificial Sequence
  Description of Artificial Sequence: Synthetic oligonucleotide
acuggacugguagaaacuc

SEQ ID NO: 995443 - RNA, 19 nt, Artificial Sequence
  Description of Artificial Sequence: Synthetic oligonucleotide
aacuaggaguuccgacagg

SEQ ID NO: 995444 - RNA, 19 nt, Artificial Sequence
  Description of Artificial Sequence: Synthetic oligonucleotide
acccuuucgaaaugcugac

SEQ ID NO: 995445 - RNA, 19 nt, Artificial Sequence
  Description of Artificial Sequence: Synthetic oligonucleotide
uguaaucguugcuauguau

SEQ ID NO: 995446 - RNA, 19 nt, Artificial Sequence
  Description of Artificial Sequence: Synthetic oligonucleotide
caacuggacugguagaaac

SEQ ID NO: 995447 - RNA, 19 nt, Artificial Sequence
  Description of Artificial Sequence: Synthetic oligonucleotide
gauggaucaauggauggca

SEQ ID NO: 995448 - RNA, 19 nt, Artificial Sequence
  Description of Artificial Sequence: Synthetic oligonucleotide
caaagauugacuggggauc

SEQ ID NO: 995449 - RNA, 19 nt, Artificial Sequence
  Description of Artificial Sequence: Synthetic oligonucleotide
guugaaacuaggaguuccg

SEQ ID NO: 995450 - RNA, 19 nt, Artificial Sequence
  Description of Artificial Sequence: Synthetic oligonucleotide
auaaaugauucaaccucgg

SEQ ID NO: 995451 - RNA, 19 nt, Artificial Sequence
  Description of Artificial Sequence: Synthetic oligonucleotide
aguaguuccuuaucuguaa

SEQ ID NO: 995452 - RNA, 19 nt, Artificial Sequence
  Description of Artificial Sequence: Synthetic oligonucleotide
gcaggaaaacccuuguucc

SEQ ID NO: 995453 - RNA, 19 nt, Artificial Sequence
  Description of Artificial Sequence: Synthetic oligonucleotide
ccuuaaucaggaaaucugc

SEQ ID NO: 995454 - RNA, 19 nt, Artificial Sequence
  Description of Artificial Sequence: Synthetic oligonucleotide
gaucaauggauggcaaccc

SEQ ID NO: 995455 - RNA, 19 nt, Artificial Sequence
  Description of Artificial Sequence: Synthetic oligonucleotide
aucaaggguguguauucag

SEQ ID NO: 995456 - RNA, 19 nt, Artificial Sequence
  Description of Artificial Sequence: Synthetic oligonucleotide
aauccagcgcugcgucccc

SEQ ID NO: 995457 - RNA, 19 nt, Artificial Sequence
  Description of Artificial Sequence: Synthetic oligonucleotide
acagaguuacucaggaaag

SEQ ID NO: 995458 - RNA, 19 nt, Artificial Sequence
  Description of Artificial Sequence: Synthetic oligonucleotide
uguacuugauaagaauauc

SEQ ID NO: 995459 - RNA, 19 nt, Artificial Sequence
  Description of Artificial Sequence: Synthetic oligonucleotide
uuuagccuucacaauuguc

SEQ ID NO: 995460 - RNA, 19 nt, Artificial Sequence
  Description of Artificial Sequence: Synthetic oligonucleotide
uuugguuguuggcccaaug

SEQ ID NO: 995461 - RNA, 19 nt, Artificial Sequence
  Description of Artificial Sequence: Synthetic oligonucleotide
aaaaguguggcugggccaa

SEQ ID NO: 995462 - RNA, 19 nt, Artificial Sequence
  Description of Artificial Sequence: Synthetic oligonucleotide
guaaucguugcuauguauc

SEQ ID NO: 995463 - RNA, 19 nt, Artificial Sequence
  Description of Artificial Sequence: Synthetic oligonucleotide
ucuggauccacugugcgua

SEQ ID NO: 995464 - RNA, 19 nt, Artificial Sequence
  Description of Artificial Sequence: Synthetic oligonucleotide
gacaacuugccaauuccug

SEQ ID NO: 995465 - RNA, 19 nt, Artificial Sequence
  Description of Artificial Sequence: Synthetic oligonucleotide
aaggguguguauucaggau

SEQ ID NO: 995466 - RNA, 19 nt, Artificial Sequence
  Description of Artificial Sequence: Synthetic oligonucleotide
guauucaggaucugcaaaa

SEQ ID NO: 995467 - RNA, 19 nt, Artificial Sequence
  Description of Artificial Sequence: Synthetic oligonucleotide
ugcagcaacucuugagggc

SEQ ID NO: 995468 - RNA, 19 nt, Artificial Sequence
  Description of Artificial Sequence: Synthetic oligonucleotide
aacucgagguguugguaca

SEQ ID NO: 995469 - RNA, 19 nt, Artificial Sequence
  Description of Artificial Sequence: Synthetic oligonucleotide
gaggagguaucuuucgauc

SEQ ID NO: 995470 - RNA, 19 nt, Artificial Sequence
  Description of Artificial Sequence: Synthetic oligonucleotide
accaucggcaguugacaac

SEQ ID NO: 995471 - RNA, 19 nt, Artificial Sequence
  Description of Artificial Sequence: Synthetic oligonucleotide
uuaggagaaugcuugcauu

SEQ ID NO: 995472 - RNA, 19 nt, Artificial Sequence
  Description of Artificial Sequence: Synthetic oligonucleotide
gaacagugaaagaagcauc

SEQ ID NO: 995473 - RNA, 19 nt, Artificial Sequence
  Description of Artificial Sequence: Synthetic oligonucleotide
uuaccaucggcaguugaca

SEQ ID NO: 995474 - RNA, 19 nt, Artificial Sequence
  Description of Artificial Sequence: Synthetic oligonucleotide
uuccaaguguccgaguaca

SEQ ID NO: 995475 - RNA, 19 nt, Artificial Sequence
  Description of Artificial Sequence: Synthetic oligonucleotide
aaccucuaggcugcauucg

SEQ ID NO: 995476 - RNA, 19 nt, Artificial Sequence
  Description of Artificial Sequence: Synthetic oligonucleotide
uugcacuagcaauuguacu

SEQ ID NO: 995477 - RNA, 19 nt, Artificial Sequence
  Description of Artificial Sequence: Synthetic oligonucleotide
caauggauggcaacccaac

SEQ ID NO: 995478 - RNA, 19 nt, Artificial Sequence
  Description of Artificial Sequence: Synthetic oligonucleotide
uccgaguacagaguuacuc

SEQ ID NO: 995479 - RNA, 19 nt, Artificial Sequence
  Description of Artificial Sequence: Synthetic oligonucleotide
aagcuuuaccaucggcagu

SEQ ID NO: 995480 - RNA, 19 nt, Artificial Sequence
  Description of Artificial Sequence: Synthetic oligonucleotide
gaguuacucaggaaagcug

SEQ ID NO: 995481 - RNA, 19 nt, Artificial Sequence
  Description of Artificial Sequence: Synthetic oligonucleotide
ucaaccucggacaccucgu

SEQ ID NO: 995482 - RNA, 19 nt, Artificial Sequence
  Description of Artificial Sequence: Synthetic oligonucleotide
uugaaauccagcgcugcgu

SEQ ID NO: 995483 - RNA, 19 nt, Artificial Sequence
  Description of Artificial Sequence: Synthetic oligonucleotide
ugcauucgaugagaacucg

SEQ ID NO: 995484 - RNA, 19 nt, Artificial Sequence
  Description of Artificial Sequence: Synthetic oligonucleotide
cugagacccauucaucaug

SEQ ID NO: 995485 - RNA, 19 nt, Artificial Sequence
  Description of Artificial Sequence: Synthetic oligonucleotide
uuaaaggaacaggauuggu

SEQ ID NO: 995486 - RNA, 19 nt, Artificial Sequence
  Description of Artificial Sequence: Synthetic oligonucleotide
acuaggaguuccgacaggu

SEQ ID NO: 995487 - RNA, 19 nt, Artificial Sequence
  Description of Artificial Sequence: Synthetic oligonucleotide
ugguuguuggcccaauguu

SEQ ID NO: 995488 - RNA, 19 nt, Artificial Sequence
  Description of Artificial Sequence: Synthetic oligonucleotide
uggaucaauggauggcaac

SEQ ID NO: 995489 - RNA, 19 nt, Artificial Sequence
  Description of Artificial Sequence: Synthetic oligonucleotide
gaaccucuaggcugcauuc

SEQ ID NO: 995490 - RNA, 19 nt, Artificial Sequence
  Description of Artificial Sequence: Synthetic oligonucleotide
gggcauuuuauauuugcac

SEQ ID NO: 995491 - RNA, 19 nt, Artificial Sequence
  Description of Artificial Sequence: Synthetic oligonucleotide
ggaucaauggauggcaacc

SEQ ID NO: 995492 - RNA, 19 nt, Artificial Sequence
  Description of Artificial Sequence: Synthetic oligonucleotide
aguguccgaguacagaguu

SEQ ID NO: 995493 - RNA, 19 nt, Artificial Sequence
  Description of Artificial Sequence: Synthetic oligonucleotide
aaaacccuuguuccuggua

SEQ ID NO: 995494 - RNA, 19 nt, Artificial Sequence
  Description of Artificial Sequence: Synthetic oligonucleotide
uggggauccugguguauag

SEQ ID NO: 995495 - RNA, 19 nt, Artificial Sequence
  Description of Artificial Sequence: Synthetic oligonucleotide
cauuggaugccagccaaag

SEQ ID NO: 995496 - RNA, 19 nt, Artificial Sequence
  Description of Artificial Sequence: Synthetic oligonucleotide
uggaccaucuccccacccu

SEQ ID NO: 995497 - RNA, 19 nt, Artificial Sequence
  Description of Artificial Sequence: Synthetic oligonucleotide
agaaccucuaggcugcauu

SEQ ID NO: 995498 - RNA, 19 nt, Artificial Sequence
  Description of Artificial Sequence: Synthetic oligonucleotide
ucgagguguugguacagcu

SEQ ID NO: 995499 - RNA, 19 nt, Artificial Sequence
  Description of Artificial Sequence: Synthetic oligonucleotide
ugucugggcauuuuauauu

SEQ ID NO: 995500 - RNA, 19 nt, Artificial Sequence
  Description of Artificial Sequence: Synthetic oligonucleotide
ccaaacguagguugcaaag

SEQ ID NO: 995501 - RNA, 19 nt, Artificial Sequence
  Description of Artificial Sequence: Synthetic oligonucleotide
cauguguuugaggugcuug

SEQ ID NO: 995502 - RNA, 19 nt, Artificial Sequence
  Description of Artificial Sequence: Synthetic oligonucleotide
aucuguaaucguugcuaug

SEQ ID NO: 995503 - RNA, 19 nt, Artificial Sequence
  Description of Artificial Sequence: Synthetic oligonucleotide
aaguaaauaggaggaggua

SEQ ID NO: 995504 - RNA, 19 nt, Artificial Sequence
  Description of Artificial Sequence: Synthetic oligonucleotide
uugaaacuaggaguuccga

SEQ ID NO: 995505 - RNA, 19 nt, Artificial Sequence
  Description of Artificial Sequence: Synthetic oligonucleotide
aguucuaugucagccccug

SEQ ID NO: 995506 - RNA, 19 nt, Artificial Sequence
  Description of Artificial Sequence: Synthetic oligonucleotide
aucuuucgauccugacugg

SEQ ID NO: 995507 - RNA, 19 nt, Artificial Sequence
  Description of Artificial Sequence: Synthetic oligonucleotide
uggugguguuaaaggaaca

SEQ ID NO: 995508 - RNA, 19 nt, Artificial Sequence
  Description of Artificial Sequence: Synthetic oligonucleotide
aucggcaguugacaacuug

SEQ ID NO: 995509 - RNA, 19 nt, Artificial Sequence
  Description of Artificial Sequence: Synthetic oligonucleotide
uauguaucucaugcauucu

SEQ ID NO: 995510 - RNA, 19 nt, Artificial Sequence
  Description of Artificial Sequence: Synthetic oligonucleotide
guuaucagggugcacauuu

SEQ ID NO: 995511 - RNA, 19 nt, Artificial Sequence
  Description of Artificial Sequence: Synthetic oligonucleotide
guaucuuucgauccugacu

SEQ ID NO: 995512 - RNA, 19 nt, Artificial Sequence
  Description of Artificial Sequence: Synthetic oligonucleotide
gagaaacuugucagaggag

SEQ ID NO: 995513 - RNA, 19 nt, Artificial Sequence
  Description of Artificial Sequence: Synthetic oligonucleotide
agccgccaacuugaaaucc

SEQ ID NO: 995514 - RNA, 19 nt, Artificial Sequence
  Description of Artificial Sequence: Synthetic oligonucleotide
uaggagagucacauguguu

SEQ ID NO: 995515 - RNA, 19 nt, Artificial Sequence
  Description of Artificial Sequence: Synthetic oligonucleotide
auuugguaccacugaguaa

SEQ ID NO: 995516 - RNA, 19 nt, Artificial Sequence
  Description of Artificial Sequence: Synthetic oligonucleotide
agguugcaaagacuuauuu

SEQ ID NO: 995517 - RNA, 19 nt, Artificial Sequence
  Description of Artificial Sequence: Synthetic oligonucleotide
cucaugcauucuauaucag

SEQ ID NO: 995518 - RNA, 19 nt, Artificial Sequence
  Description of Artificial Sequence: Synthetic oligonucleotide
gccagcaaauauuuaacca

SEQ ID NO: 995519 - RNA, 19 nt, Artificial Sequence
  Description of Artificial Sequence: Synthetic oligonucleotide
gcaguugacaacuugccaa

SEQ ID NO: 995520 - RNA, 19 nt, Artificial Sequence
  Description of Artificial Sequence: Synthetic oligonucleotide
guacagcuaacugagguaa

SEQ ID NO: 995521 - RNA, 19 nt, Artificial Sequence
  Description of Artificial Sequence: Synthetic oligonucleotide
gauggcaacccaacuggac

SEQ ID NO: 995522 - RNA, 19 nt, Artificial Sequence
  Description of Artificial Sequence: Synthetic oligonucleotide
ucgauccugacuggcacug

SEQ ID NO: 995523 - RNA, 19 nt, Artificial Sequence
  Description of Artificial Sequence: Synthetic oligonucleotide
guaaugccagagaaacuug

SEQ ID NO: 995524 - RNA, 19 nt, Artificial Sequence
  Description of Artificial Sequence: Synthetic oligonucleotide
uaaccaacuccaggugucc

SEQ ID NO: 995525 - RNA, 19 nt, Artificial Sequence
  Description of Artificial Sequence: Synthetic oligonucleotide
gcugaaagaggugaagaug

SEQ ID NO: 995526 - RNA, 19 nt, Artificial Sequence
  Description of Artificial Sequence: Synthetic oligonucleotide
aagguaagggcaguuucuu

SEQ ID NO: 995527 - RNA, 19 nt, Artificial Sequence
  Description of Artificial Sequence: Synthetic oligonucleotide
uaagaauaucucugacguu

SEQ ID NO: 995528 - RNA, 19 nt, Artificial Sequence
  Description of Artificial Sequence: Synthetic oligonucleotide
gagguaucuuucgauccug

SEQ ID NO: 995529 - RNA, 19 nt, Artificial Sequence
  Description of Artificial Sequence: Synthetic oligonucleotide
aggacuggguuauccaaau

SEQ ID NO: 995530 - RNA, 19 nt, Artificial Sequence
  Description of Artificial Sequence: Synthetic oligonucleotide
ugauucaaccucggacacc

SEQ ID NO: 995531 - RNA, 19 nt, Artificial Sequence
  Description of Artificial Sequence: Synthetic oligonucleotide
gcuaacugagguaaauuac

SEQ ID NO: 995532 - RNA, 19 nt, Artificial Sequence
  Description of Artificial Sequence: Synthetic oligonucleotide
aacacauuggugacacuuu

SEQ ID NO: 995533 - RNA, 19 nt, Artificial Sequence
  Description of Artificial Sequence: Synthetic oligonucleotide
uagguugcaaagacuuauu

SEQ ID NO: 995534 - RNA, 19 nt, Artificial Sequence
  Description of Artificial Sequence: Synthetic oligonucleotide
acacauuggugacacuuuu

SEQ ID NO: 995535 - RNA, 19 nt, Artificial Sequence
  Description of Artificial Sequence: Synthetic oligonucleotide
aggauugguaacaaagauu

SEQ ID NO: 995536 - RNA, 19 nt, Artificial Sequence
  Description of Artificial Sequence: Synthetic oligonucleotide
aauuaccaguguccugauu

SEQ ID NO: 995537 - RNA, 19 nt, Artificial Sequence
  Description of Artificial Sequence: Synthetic oligonucleotide
cuuucgauccugacuggca

SEQ ID NO: 995538 - RNA, 19 nt, Artificial Sequence
  Description of Artificial Sequence: Synthetic oligonucleotide
uucgauccugacuggcacu

SEQ ID NO: 995539 - RNA, 19 nt, Artificial Sequence
  Description of Artificial Sequence: Synthetic oligonucleotide
agcuuuaccaucggcaguu

SEQ ID NO: 995540 - RNA, 19 nt, Artificial Sequence
  Description of Artificial Sequence: Synthetic oligonucleotide
ugcuggauuuaugugcauc

SEQ ID NO: 995541 - RNA, 19 nt, Artificial Sequence
  Description of Artificial Sequence: Synthetic oligonucleotide
uaccaucggcaguugacaa

SEQ ID NO: 995542 - RNA, 19 nt, Artificial Sequence
  Description of Artificial Sequence: Synthetic oligonucleotide
uggggagcuaccugaugga

SEQ ID NO: 995543 - RNA, 19 nt, Artificial Sequence
  Description of Artificial Sequence: Synthetic oligonucleotide
gugcaucugagacccauuc

SEQ ID NO: 995544 - RNA, 19 nt, Artificial Sequence
  Description of Artificial Sequence: Synthetic oligonucleotide
uuaucagggugcacauuuu

SEQ ID NO: 995545 - RNA, 19 nt, Artificial Sequence
  Description of Artificial Sequence: Synthetic oligonucleotide
uucuagcaaugcuuccagu

SEQ ID NO: 995546 - RNA, 19 nt, Artificial Sequence
  Description of Artificial Sequence: Synthetic oligonucleotide
gcugcauucgaugagaacu

SEQ ID NO: 995547 - RNA, 19 nt, Artificial Sequence
  Description of Artificial Sequence: Synthetic oligonucleotide
caaacguagguugcaaaga

SEQ ID NO: 995548 - RNA, 19 nt, Artificial Sequence
  Description of Artificial Sequence: Synthetic oligonucleotide
acagugaaagaagcaucug

SEQ ID NO: 995549 - RNA, 19 nt, Artificial Sequence
  Description of Artificial Sequence: Synthetic oligonucleotide
cuaggaguuccgacaggug

SEQ ID NO: 995550 - RNA, 19 nt, Artificial Sequence
  Description of Artificial Sequence: Synthetic oligonucleotide
caccugacugcuaucaaaa

SEQ ID NO: 995551 - RNA, 19 nt, Artificial Sequence
  Description of Artificial Sequence: Synthetic oligonucleotide
cuguacuugauaagaauau

SEQ ID NO: 995552 - RNA, 19 nt, Artificial Sequence
  Description of Artificial Sequence: Synthetic oligonucleotide
aaguguccgaguacagagu

SEQ ID NO: 995553 - RNA, 19 nt, Artificial Sequence
  Description of Artificial Sequence: Synthetic oligonucleotide
gcaauuguacuacaucaaa

SEQ ID NO: 995554 - RNA, 19 nt, Artificial Sequence
  Description of Artificial Sequence: Synthetic oligonucleotide
acagcuaacugagguaaau

SEQ ID NO: 995555 - RNA, 19 nt, Artificial Sequence
  Description of Artificial Sequence: Synthetic oligonucleotide
ccagaucaagcucuuuuag

SEQ ID NO: 995556 - RNA, 19 nt, Artificial Sequence
  Description of Artificial Sequence: Synthetic oligonucleotide
ugcuugcacuagcaauugu

SEQ ID NO: 995557 - RNA, 19 nt, Artificial Sequence
  Description of Artificial Sequence: Synthetic oligonucleotide
uuugcaccuugugccaaca

SEQ ID NO: 995558 - RNA, 19 nt, Artificial Sequence
  Description of Artificial Sequence: Synthetic oligonucleotide
guguauucaggaucugcaa

SEQ ID NO: 995559 - RNA, 19 nt, Artificial Sequence
  Description of Artificial Sequence: Synthetic oligonucleotide
cuagcaaugcuuccagucu

SEQ ID NO: 995560 - RNA, 19 nt, Artificial Sequence
  Description of Artificial Sequence: Synthetic oligonucleotide
cugacguuuuaaggacugg

SEQ ID NO: 995561 - RNA, 19 nt, Artificial Sequence
  Description of Artificial Sequence: Synthetic oligonucleotide
ggaauaggagagucacaug

SEQ ID NO: 995562 - RNA, 19 nt, Artificial Sequence
  Description of Artificial Sequence: Synthetic oligonucleotide
ugugcaucugagacccauu

SEQ ID NO: 995563 - RNA, 19 nt, Artificial Sequence
  Description of Artificial Sequence: Synthetic oligonucleotide
cuggauuuaugugcaucug

SEQ ID NO: 995564 - RNA, 19 nt, Artificial Sequence
  Description of Artificial Sequence: Synthetic oligonucleotide
gguaucuuucgauccugac

SEQ ID NO: 995565 - RNA, 19 nt, Artificial Sequence
  Description of Artificial Sequence: Synthetic oligonucleotide
cuugugccaacagcagcgc

SEQ ID NO: 995566 - RNA, 19 nt, Artificial Sequence
  Description of Artificial Sequence: Synthetic oligonucleotide
gaacaggauugguaacaaa

SEQ ID NO: 995567 - RNA, 19 nt, Artificial Sequence
  Description of Artificial Sequence: Synthetic oligonucleotide
guaucucaugcauucuaua

SEQ ID NO: 995568 - RNA, 19 nt, Artificial Sequence
  Description of Artificial Sequence: Synthetic oligonucleotide
auccugacuggcacuguuc

SEQ ID NO: 995569 - RNA, 19 nt, Artificial Sequence
  Description of Artificial Sequence: Synthetic oligonucleotide
gguaaugccagagaaacuu

SEQ ID NO: 995570 - RNA, 19 nt, Artificial Sequence
  Description of Artificial Sequence: Synthetic oligonucleotide
gaauaucucugacguuuua

SEQ ID NO: 995571 - RNA, 19 nt, Artificial Sequence
  Description of Artificial Sequence: Synthetic oligonucleotide
ucguugcuauguaucucau

SEQ ID NO: 995572 - RNA, 19 nt, Artificial Sequence
  Description of Artificial Sequence: Synthetic oligonucleotide
cgaguacagaguuacucag

SEQ ID NO: 995573 - RNA, 19 nt, Artificial Sequence
  Description of Artificial Sequence: Synthetic oligonucleotide
uugguaccacugaguaaaa

SEQ ID NO: 995574 - RNA, 19 nt, Artificial Sequence
  Description of Artificial Sequence: Synthetic oligonucleotide
gucgcuuccagaggcacca

SEQ ID NO: 995575 - RNA, 19 nt, Artificial Sequence
  Description of Artificial Sequence: Synthetic oligonucleotide
ccaagguaagggcaguuuc

SEQ ID NO: 995576 - RNA, 19 nt, Artificial Sequence
  Description of Artificial Sequence: Synthetic oligonucleotide
gcuguacuugauaagaaua

SEQ ID NO: 995577 - RNA, 19 nt, Artificial Sequence
  Description of Artificial Sequence: Synthetic oligonucleotide
ccaucaaggguguguauuc

SEQ ID NO: 995578 - RNA, 19 nt, Artificial Sequence
  Description of Artificial Sequence: Synthetic oligonucleotide
augagaacucgagguguug

SEQ ID NO: 995579 - RNA, 19 nt, Artificial Sequence
  Description of Artificial Sequence: Synthetic oligonucleotide
caagguaagggcaguuucu

SEQ ID NO: 995580 - RNA, 19 nt, Artificial Sequence
  Description of Artificial Sequence: Synthetic oligonucleotide
ggugcacauuuuccaagug

SEQ ID NO: 995581 - RNA, 19 nt, Artificial Sequence
  Description of Artificial Sequence: Synthetic oligonucleotide
cacugugcguaaaucagcu

SEQ ID NO: 995582 - RNA, 19 nt, Artificial Sequence
  Description of Artificial Sequence: Synthetic oligonucleotide
ucaacacauuggugacacu

SEQ ID NO: 995583 - RNA, 19 nt, Artificial Sequence
  Description of Artificial Sequence: Synthetic oligonucleotide
guuccuuaucuguaaucgu

SEQ ID NO: 995584 - RNA, 19 nt, Artificial Sequence
  Description of Artificial Sequence: Synthetic oligonucleotide
gcuaccugauggaucaaug

SEQ ID NO: 995585 - RNA, 19 nt, Artificial Sequence
  Description of Artificial Sequence: Synthetic oligonucleotide
gcuggauuuaugugcaucu

SEQ ID NO: 995586 - RNA, 19 nt, Artificial Sequence
  Description of Artificial Sequence: Synthetic oligonucleotide
gguacagcuaacugaggua

SEQ ID NO: 995587 - RNA, 19 nt, Artificial Sequence
  Description of Artificial Sequence: Synthetic oligonucleotide
caggauugguaacaaagau

SEQ ID NO: 995588 - RNA, 19 nt, Artificial Sequence
  Description of Artificial Sequence: Synthetic oligonucleotide
cucgagguguugguacagc

SEQ ID NO: 995589 - RNA, 19 nt, Artificial Sequence
  Description of Artificial Sequence: Synthetic oligonucleotide
uuucgguugucugcugcau

SEQ ID NO: 995590 - RNA, 19 nt, Artificial Sequence
  Description of Artificial Sequence: Synthetic oligonucleotide
ugcuggcccuugcaggaaa

SEQ ID NO: 995591 - RNA, 19 nt, Artificial Sequence
  Description of Artificial Sequence: Synthetic oligonucleotide
gucagccccugccuuaauc

SEQ ID NO: 995592 - RNA, 19 nt, Artificial Sequence
  Description of Artificial Sequence: Synthetic oligonucleotide
gcguaaaucagcuccuucu

SEQ ID NO: 995593 - RNA, 19 nt, Artificial Sequence
  Description of Artificial Sequence: Synthetic oligonucleotide
gcacuagcaauuguacuac

SEQ ID NO: 995594 - RNA, 19 nt, Artificial Sequence
  Description of Artificial Sequence: Synthetic oligonucleotide
cugcuguacuugauaagaa

SEQ ID NO: 995595 - RNA, 19 nt, Artificial Sequence
  Description of Artificial Sequence: Synthetic oligonucleotide
gcugacauaagagguguga

SEQ ID NO: 995596 - RNA, 19 nt, Artificial Sequence
  Description of Artificial Sequence: Synthetic oligonucleotide
ggcaguugacaacuugcca

SEQ ID NO: 995597 - RNA, 19 nt, Artificial Sequence
  Description of Artificial Sequence: Synthetic oligonucleotide
ccuuguggugguguuaaag

SEQ ID NO: 995598 - RNA, 19 nt, Artificial Sequence
  Description of Artificial Sequence: Synthetic oligonucleotide
agaauaucucugacguuuu

SEQ ID NO: 995599 - RNA, 19 nt, Artificial Sequence
  Description of Artificial Sequence: Synthetic oligonucleotide
ugaccaccauuggaugcca

SEQ ID NO: 995600 - RNA, 19 nt, Artificial Sequence
  Description of Artificial Sequence: Synthetic oligonucleotide
cccuugguuagcuggcacc

SEQ ID NO: 995601 - RNA, 19 nt, Artificial Sequence
  Description of Artificial Sequence: Synthetic oligonucleotide
cuugggucucuggauccac

SEQ ID NO: 995602 - RNA, 19 nt, Artificial Sequence
  Description of Artificial Sequence: Synthetic oligonucleotide
cacuagcaauuguacuaca

SEQ ID NO: 995603 - RNA, 19 nt, Artificial Sequence
  Description of Artificial Sequence: Synthetic oligonucleotide
cuugcuugggucucuggau

SEQ ID NO: 995604 - RNA, 19 nt, Artificial Sequence
  Description of Artificial Sequence: Synthetic oligonucleotide
agcuaccugauggaucaau

SEQ ID NO: 995605 - RNA, 19 nt, Artificial Sequence
  Description of Artificial Sequence: Synthetic oligonucleotide
caucaaggguguguauuca

SEQ ID NO: 995606 - RNA, 19 nt, Artificial Sequence
  Description of Artificial Sequence: Synthetic oligonucleotide
cuugguuagcuggcaccug

SEQ ID NO: 995607 - RNA, 19 nt, Artificial Sequence
  Description of Artificial Sequence: Synthetic oligonucleotide
agguaucuuucgauccuga

SEQ ID NO: 995608 - RNA, 19 nt, Artificial Sequence
  Description of Artificial Sequence: Synthetic oligonucleotide
guaguuccuuaucuguaau

SEQ ID NO: 995609 - RNA, 19 nt, Artificial Sequence
  Description of Artificial Sequence: Synthetic oligonucleotide
caccauuggaugccagcca

SEQ ID NO: 995610 - RNA, 19 nt, Artificial Sequence
  Description of Artificial Sequence: Synthetic oligonucleotide
cccuuguuccugguaaugc

SEQ ID NO: 995611 - RNA, 19 nt, Artificial Sequence
  Description of Artificial Sequence: Synthetic oligonucleotide
caacacauuggugacacuu

SEQ ID NO: 995612 - RNA, 19 nt, Artificial Sequence
  Description of Artificial Sequence: Synthetic oligonucleotide
ccgagcagcuuccaucaag

SEQ ID NO: 995613 - RNA, 19 nt, Artificial Sequence
  Description of Artificial Sequence: Synthetic oligonucleotide
gaaaacccuuguuccuggu

SEQ ID NO: 995614 - RNA, 19 nt, Artificial Sequence
  Description of Artificial Sequence: Synthetic oligonucleotide
uggaguuaucagggugcac

SEQ ID NO: 995615 - RNA, 19 nt, Artificial Sequence
  Description of Artificial Sequence: Synthetic oligonucleotide
gcuugcacuagcaauugua

SEQ ID NO: 995616 - RNA, 19 nt, Artificial Sequence
  Description of Artificial Sequence: Synthetic oligonucleotide
cuuuagccuucacaauugu

SEQ ID NO: 995617 - RNA, 19 nt, Artificial Sequence
  Description of Artificial Sequence: Synthetic oligonucleotide
ccgccaacuugaaauccag

SEQ ID NO: 995618 - RNA, 19 nt, Artificial Sequence
  Description of Artificial Sequence: Synthetic oligonucleotide
aguugacaacuugccaauu

SEQ ID NO: 995619 - RNA, 19 nt, Artificial Sequence
  Description of Artificial Sequence: Synthetic oligonucleotide
gauccugacuggcacuguu

SEQ ID NO: 995620 - RNA, 19 nt, Artificial Sequence
  Description of Artificial Sequence: Synthetic oligonucleotide
cucugacguuuuaaggacu

SEQ ID NO: 995621 - RNA, 19 nt, Artificial Sequence
  Description of Artificial Sequence: Synthetic oligonucleotide
agcaacucuugagggcagu

SEQ ID NO: 995622 - RNA, 19 nt, Artificial Sequence
  Description of Artificial Sequence: Synthetic oligonucleotide
ggcugcauucgaugagaac

SEQ ID NO: 995623 - RNA, 19 nt, Artificial Sequence
  Description of Artificial Sequence: Synthetic oligonucleotide
gaugagaacucgagguguu

SEQ ID NO: 995624 - RNA, 19 nt, Artificial Sequence
  Description of Artificial Sequence: Synthetic oligonucleotide
uccagcgcugcguccccuc

SEQ ID NO: 995625 - RNA, 19 nt, Artificial Sequence
  Description of Artificial Sequence: Synthetic oligonucleotide
gcagccugcuggucuuuag

SEQ ID NO: 995626 - RNA, 19 nt, Artificial Sequence
  Description of Artificial Sequence: Synthetic oligonucleotide
ggaggagguaucuuucgau

SEQ ID NO: 995627 - RNA, 19 nt, Artificial Sequence
  Description of Artificial Sequence: Synthetic oligonucleotide
gacuggggauccuggugua

SEQ ID NO: 995628 - RNA, 19 nt, Artificial Sequence
  Description of Artificial Sequence: Synthetic oligonucleotide
gcaguggaccaucucccca

SEQ ID NO: 995629 - RNA, 19 nt, Artificial Sequence
  Description of Artificial Sequence: Synthetic oligonucleotide
gguguuaaaggaacaggau

SEQ ID NO: 995630 - RNA, 19 nt, Artificial Sequence
  Description of Artificial Sequence: Synthetic oligonucleotide
gcaacucuugagggcagug

SEQ ID NO: 995631 - RNA, 19 nt, Artificial Sequence
  Description of Artificial Sequence: Synthetic oligonucleotide
gggagcuaccugauggauc

SEQ ID NO: 995632 - RNA, 19 nt, Artificial Sequence
  Description of Artificial Sequence: Synthetic oligonucleotide
ccugguaaugccagagaaa

SEQ ID NO: 995633 - RNA, 19 nt, Artificial Sequence
  Description of Artificial Sequence: Synthetic oligonucleotide
ggacuggguuauccaaauc

SEQ ID NO: 995634 - RNA, 19 nt, Artificial Sequence
  Description of Artificial Sequence: Synthetic oligonucleotide
cccgaagaaacagauggaa

SEQ ID NO: 995635 - RNA, 19 nt, Artificial Sequence
  Description of Artificial Sequence: Synthetic oligonucleotide
caacccaacuggacuggua

SEQ ID NO: 995636 - RNA, 19 nt, Artificial Sequence
  Description of Artificial Sequence: Synthetic oligonucleotide
cugacuggcacuguuccuu

SEQ ID NO: 995637 - RNA, 19 nt, Artificial Sequence
  Description of Artificial Sequence: Synthetic oligonucleotide
gccgccaacuugaaaucca

SEQ ID NO: 995638 - RNA, 19 nt, Artificial Sequence
  Description of Artificial Sequence: Synthetic oligonucleotide
ggauggcaacccaacugga

SEQ ID NO: 995639 - RNA, 19 nt, Artificial Sequence
  Description of Artificial Sequence: Synthetic oligonucleotide
cuggauccacugugcguaa

SEQ ID NO: 995640 - RNA, 19 nt, Artificial Sequence
  Description of Artificial Sequence: Synthetic oligonucleotide
cuaugucagccccugccuu

SEQ ID NO: 995641 - RNA, 19 nt, Artificial Sequence
  Description of Artificial Sequence: Synthetic oligonucleotide
caucuccccacccuugguu

SEQ ID NO: 995642 - RNA, 19 nt, Artificial Sequence
  Description of Artificial Sequence: Synthetic oligonucleotide
cacauguguuugaggugcu

SEQ ID NO: 995643 - RNA, 19 nt, Artificial Sequence
  Description of Artificial Sequence: Synthetic oligonucleotide
ggcaccugacugcuaucaa

SEQ ID NO: 995644 - RNA, 19 nt, Artificial Sequence
  Description of Artificial Sequence: Synthetic oligonucleotide
ccgcccguccucagcacag

SEQ ID NO: 995645 - RNA, 19 nt, Artificial Sequence
  Description of Artificial Sequence: Synthetic oligonucleotide
ccgaagaaacagauggaau

SEQ ID NO: 995646 - RNA, 19 nt, Artificial Sequence
  Description of Artificial Sequence: Synthetic oligonucleotide
ccaucggcaguugacaacu

SEQ ID NO: 995647 - RNA, 19 nt, Artificial Sequence
  Description of Artificial Sequence: Synthetic oligonucleotide
gcuauguaucucaugcauu

SEQ ID NO: 995648 - RNA, 19 nt, Artificial Sequence
  Description of Artificial Sequence: Synthetic oligonucleotide
guguccgaguacagaguua

SEQ ID NO: 995649 - RNA, 19 nt, Artificial Sequence
  Description of Artificial Sequence: Synthetic oligonucleotide
cagcuaacugagguaaauu

SEQ ID NO: 995650 - RNA, 19 nt, Artificial Sequence
  Description of Artificial Sequence: Synthetic oligonucleotide
ggccaaacguagguugcaa

SEQ ID NO: 995651 - RNA, 19 nt, Artificial Sequence
  Description of Artificial Sequence: Synthetic oligonucleotide
gcccaauguuuguggugca

SEQ ID NO: 995652 - RNA, 19 nt, Artificial Sequence
  Description of Artificial Sequence: Synthetic oligonucleotide
cuugagggcaguggaccau

SEQ ID NO: 995653 - RNA, 19 nt, Artificial Sequence
  Description of Artificial Sequence: Synthetic oligonucleotide
caggugccuuggaguuauc

SEQ ID NO: 995654 - RNA, 19 nt, Artificial Sequence
  Description of Artificial Sequence: Synthetic oligonucleotide
ccuugguuagcuggcaccu

SEQ ID NO: 995655 - RNA, 19 nt, Artificial Sequence
  Description of Artificial Sequence: Synthetic oligonucleotide
gagcuaccugauggaucaa

SEQ ID NO: 995656 - RNA, 19 nt, Artificial Sequence
  Description of Artificial Sequence: Synthetic oligonucleotide
gccgcccguccucagcaca

SEQ ID NO: 995657 - RNA, 19 nt, Artificial Sequence
  Description of Artificial Sequence: Synthetic oligonucleotide
ccaacuggacugguagaaa

SEQ ID NO: 995658 - RNA, 19 nt, Artificial Sequence
  Description of Artificial Sequence: Synthetic oligonucleotide
cccauucaucauguuuaca

SEQ ID NO: 995659 - RNA, 19 nt, Artificial Sequence
  Description of Artificial Sequence: Synthetic oligonucleotide
cgaugagaacucgaggugu

SEQ ID NO: 995660 - RNA, 19 nt, Artificial Sequence
  Description of Artificial Sequence: Synthetic oligonucleotide
cccuuucgaaaugcugaca

SEQ ID NO: 995661 - RNA, 19 nt, Artificial Sequence
  Description of Artificial Sequence: Synthetic oligonucleotide
cagcagcgccaccaucucu

SEQ ID NO: 995662 - RNA, 19 nt, Artificial Sequence
  Description of Artificial Sequence: Synthetic oligonucleotide
guccgaguacagaguuacu

SEQ ID NO: 995663 - RNA, 19 nt, Artificial Sequence
  Description of Artificial Sequence: Synthetic oligonucleotide
caagcucuuuuaggagaau

SEQ ID NO: 995664 - RNA, 19 nt, Artificial Sequence
  Description of Artificial Sequence: Synthetic oligonucleotide
cagucuugcuugggucucu

SEQ ID NO: 995665 - RNA, 19 nt, Artificial Sequence
  Description of Artificial Sequence: Synthetic oligonucleotide
ggggagcuaccugauggau

SEQ ID NO: 995666 - RNA, 19 nt, Artificial Sequence
  Description of Artificial Sequence: Synthetic oligonucleotide
caucggcaguugacaacuu

SEQ ID NO: 995667 - RNA, 19 nt, Artificial Sequence
  Description of Artificial Sequence: Synthetic oligonucleotide
ccugacuggcacuguuccu

SEQ ID NO: 995668 - RNA, 19 nt, Artificial Sequence
  Description of Artificial Sequence: Synthetic oligonucleotide
ccccacccuugguuagcug

SEQ ID NO: 995669 - RNA, 19 nt, Artificial Sequence
  Description of Artificial Sequence: Synthetic oligonucleotide
gcaacccaacuggacuggu

SEQ ID NO: 995670 - RNA, 19 nt, Artificial Sequence
  Description of Artificial Sequence: Synthetic oligonucleotide
gggccuuguggugguguua

SEQ ID NO: 995671 - RNA, 19 nt, Artificial Sequence
  Description of Artificial Sequence: Synthetic oligonucleotide
cguccucgucgcuuccaga

SEQ ID NO: 995672 - RNA, 19 nt, Artificial Sequence
  Description of Artificial Sequence: Synthetic oligonucleotide
ccuucccgagcagcuucca

SEQ ID NO: 995673 - RNA, 19 nt, Artificial Sequence
  Description of Artificial Sequence: Synthetic oligonucleotide
caccuccgccgcccguccu

SEQ ID NO: 995674 - RNA, 19 nt, Artificial Sequence
  Description of Artificial Sequence: Synthetic oligonucleotide
ccgacaggugcuggcccuu

SEQ ID NO: 995675 - RNA, 19 nt, Artificial Sequence
  Description of Artificial Sequence: Synthetic oligonucleotide
uaugaaagcaacuauaaac

SEQ ID NO: 995676 - RNA, 19 nt, Artificial Sequence
  Description of Artificial Sequence: Synthetic oligonucleotide
aaagguagagauuuauggg

SEQ ID NO: 995677 - RNA, 19 nt, Artificial Sequence
  Description of Artificial Sequence: Synthetic oligonucleotide
uuauauaaauaccaggaac

SEQ ID NO: 995678 - RNA, 19 nt, Artificial Sequence
  Description of Artificial Sequence: Synthetic oligonucleotide
agcucuagaagguaaauac

SEQ ID NO: 995679 - RNA, 19 nt, Artificial Sequence
  Description of Artificial Sequence: Synthetic oligonucleotide
auuacaguuaagcagacca

SEQ ID NO: 995680 - RNA, 19 nt, Artificial Sequence
  Description of Artificial Sequence: Synthetic oligonucleotide
auuuaugagacuuccauug

SEQ ID NO: 995681 - RNA, 19 nt, Artificial Sequence
  Description of Artificial Sequence: Synthetic oligonucleotide
auaaucuuaucucuaacag

SEQ ID NO: 995682 - RNA, 19 nt, Artificial Sequence
  Description of Artificial Sequence: Synthetic oligonucleotide
aguuaagcagaccaaaauc

SEQ ID NO: 995683 - RNA, 19 nt, Artificial Sequence
  Description of Artificial Sequence: Synthetic oligonucleotide
uuuaacucccuccauacug

SEQ ID NO: 995684 - RNA, 19 nt, Artificial Sequence
  Description of Artificial Sequence: Synthetic oligonucleotide
agaagguaaauacaguguc

SEQ ID NO: 995685 - RNA, 19 nt, Artificial Sequence
  Description of Artificial Sequence: Synthetic oligonucleotide
ugaaugaauggccaggcag

SEQ ID NO: 995686 - RNA, 19 nt, Artificial Sequence
  Description of Artificial Sequence: Synthetic oligonucleotide
ucuguuuacaauguaaagc

SEQ ID NO: 995687 - RNA, 19 nt, Artificial Sequence
  Description of Artificial Sequence: Synthetic oligonucleotide
agauuuaugggauucuauc

SEQ ID NO: 995688 - RNA, 19 nt, Artificial Sequence
  Description of Artificial Sequence: Synthetic oligonucleotide
ucuuaucucuaacaguagg

SEQ ID NO: 995689 - RNA, 19 nt, Artificial Sequence
  Description of Artificial Sequence: Synthetic oligonucleotide
gauuuaugggauucuaucc

SEQ ID NO: 995690 - RNA, 19 nt, Artificial Sequence
  Description of Artificial Sequence: Synthetic oligonucleotide
ucucaauacaggcagauuc

SEQ ID NO: 995691 - RNA, 19 nt, Artificial Sequence
  Description of Artificial Sequence: Synthetic oligonucleotide
aagguagagauuuauggga

SEQ ID NO: 995692 - RNA, 19 nt, Artificial Sequence
  Description of Artificial Sequence: Synthetic oligonucleotide
ucuaacaguaggaagggcu

SEQ ID NO: 995693 - RNA, 19 nt, Artificial Sequence
  Description of Artificial Sequence: Synthetic oligonucleotide
uccaaaacagauuucaaaa

SEQ ID NO: 995694 - RNA, 19 nt, Artificial Sequence
  Description of Artificial Sequence: Synthetic oligonucleotide
cuagaagguaaauacagug

SEQ ID NO: 995695 - RNA, 19 nt, Artificial Sequence
  Description of Artificial Sequence: Synthetic oligonucleotide
agaaaguugagcauauuac

SEQ ID NO: 995696 - RNA, 19 nt, Artificial Sequence
  Description of Artificial Sequence: Synthetic oligonucleotide
aaagcaacuauaaacauua

SEQ ID NO: 995697 - RNA, 19 nt, Artificial Sequence
  Description of Artificial Sequence: Synthetic oligonucleotide
uaagguucacgauacagug

SEQ ID NO: 995698 - RNA, 19 nt, Artificial Sequence
  Description of Artificial Sequence: Synthetic oligonucleotide
aacgaaaagaaaacacugg

SEQ ID NO: 995699 - RNA, 19 nt, Artificial Sequence
  Description of Artificial Sequence: Synthetic oligonucleotide
ucuguuacugaauuucacc

SEQ ID NO: 995700 - RNA, 19 nt, Artificial Sequence
  Description of Artificial Sequence: Synthetic oligonucleotide
uuauagauuccaacuagca

SEQ ID NO: 995701 - RNA, 19 nt, Artificial Sequence
  Description of Artificial Sequence: Synthetic oligonucleotide
uccaauuccgcccucuuag

SEQ ID NO: 995702 - RNA, 19 nt, Artificial Sequence
  Description of Artificial Sequence: Synthetic oligonucleotide
ucaggagagauccaugagc

SEQ ID NO: 995703 - RNA, 19 nt, Artificial Sequence
  Description of Artificial Sequence: Synthetic oligonucleotide
aaggcaaggaccaggacac

SEQ ID NO: 995704 - RNA, 19 nt, Artificial Sequence
  Description of Artificial Sequence: Synthetic oligonucleotide
uuaagguucacgauacagu

SEQ ID NO: 995705 - RNA, 19 nt, Artificial Sequence
  Description of Artificial Sequence: Synthetic oligonucleotide
ugugccuauguucucaccc

SEQ ID NO: 995706 - RNA, 19 nt, Artificial Sequence
  Description of Artificial Sequence: Synthetic oligonucleotide
agauccaugagcaucaaag

SEQ ID NO: 995707 - RNA, 19 nt, Artificial Sequence
  Description of Artificial Sequence: Synthetic oligonucleotide
ucgacaggcacuuagcuga

SEQ ID NO: 995708 - RNA, 19 nt, Artificial Sequence
  Description of Artificial Sequence: Synthetic oligonucleotide
aauuccgcccucuuagaag

SEQ ID NO: 995709 - RNA, 19 nt, Artificial Sequence
  Description of Artificial Sequence: Synthetic oligonucleotide
uagacuugcacaugucugg

SEQ ID NO: 995710 - RNA, 19 nt, Artificial Sequence
  Description of Artificial Sequence: Synthetic oligonucleotide
cuuauagauuccaacuagc

SEQ ID NO: 995711 - RNA, 19 nt, Artificial Sequence
  Description of Artificial Sequence: Synthetic oligonucleotide
aauguaaagcacuguggcu

SEQ ID NO: 995712 - RNA, 19 nt, Artificial Sequence
  Description of Artificial Sequence: Synthetic oligonucleotide
uuuccagucauaaaaggua

SEQ ID NO: 995713 - RNA, 19 nt, Artificial Sequence
  Description of Artificial Sequence: Synthetic oligonucleotide
uuccagucauaaaagguag

SEQ ID NO: 995714 - RNA, 19 nt, Artificial Sequence
  Description of Artificial Sequence: Synthetic oligonucleotide
uuuaugggauucuauccag

SEQ ID NO: 995715 - RNA, 19 nt, Artificial Sequence
  Description of Artificial Sequence: Synthetic oligonucleotide
auuuaugggauucuaucca

SEQ ID NO: 995716 - RNA, 19 nt, Artificial Sequence
  Description of Artificial Sequence: Synthetic oligonucleotide
ugaaaucuaucucuagacu

SEQ ID NO: 995717 - RNA, 19 nt, Artificial Sequence
  Description of Artificial Sequence: Synthetic oligonucleotide
uagaagguaaauacagugu

SEQ ID NO: 995718 - RNA, 19 nt, Artificial Sequence
  Description of Artificial Sequence: Synthetic oligonucleotide
ucuaaacucuaugaaagca

SEQ ID NO: 995719 - RNA, 19 nt, Artificial Sequence
  Description of Artificial Sequence: Synthetic oligonucleotide
uuaugagacuuccauuggc

SEQ ID NO: 995720 - RNA, 19 nt, Artificial Sequence
  Description of Artificial Sequence: Synthetic oligonucleotide
aauuacaguuaagcagacc

SEQ ID NO: 995721 - RNA, 19 nt, Artificial Sequence
  Description of Artificial Sequence: Synthetic oligonucleotide
uaucucuaacaguaggaag

SEQ ID NO: 995722 - RNA, 19 nt, Artificial Sequence
  Description of Artificial Sequence: Synthetic oligonucleotide
ucaggcuuaaggaggaaug

SEQ ID NO: 995723 - RNA, 19 nt, Artificial Sequence
  Description of Artificial Sequence: Synthetic oligonucleotide
agugauauucugcauacaa

SEQ ID NO: 995724 - RNA, 19 nt, Artificial Sequence
  Description of Artificial Sequence: Synthetic oligonucleotide
guuagcuuaagguucacga

SEQ ID NO: 995725 - RNA, 19 nt, Artificial Sequence
  Description of Artificial Sequence: Synthetic oligonucleotide
acuauaaacauuaaauaaa

SEQ ID NO: 995726 - RNA, 19 nt, Artificial Sequence
  Description of Artificial Sequence: Synthetic oligonucleotide
aagguaaauacaguguccu

SEQ ID NO: 995727 - RNA, 19 nt, Artificial Sequence
  Description of Artificial Sequence: Synthetic oligonucleotide
agucagaacuuucuugcgg

SEQ ID NO: 995728 - RNA, 19 nt, Artificial Sequence
  Description of Artificial Sequence: Synthetic oligonucleotide
caguuggugaucaagugag

SEQ ID NO: 995729 - RNA, 19 nt, Artificial Sequence
  Description of Artificial Sequence: Synthetic oligonucleotide
aguaggaagggcugauuac

SEQ ID NO: 995730 - RNA, 19 nt, Artificial Sequence
  Description of Artificial Sequence: Synthetic oligonucleotide
uauagauuccaacuagcau

SEQ ID NO: 995731 - RNA, 19 nt, Artificial Sequence
  Description of Artificial Sequence: Synthetic oligonucleotide
aaaucuaucucuagacuug

SEQ ID NO: 995732 - RNA, 19 nt, Artificial Sequence
  Description of Artificial Sequence: Synthetic oligonucleotide
uuaacucccuccauacugc

SEQ ID NO: 995733 - RNA, 19 nt, Artificial Sequence
  Description of Artificial Sequence: Synthetic oligonucleotide
ugagcuuauagauuccaac

SEQ ID NO: 995734 - RNA, 19 nt, Artificial Sequence
  Description of Artificial Sequence: Synthetic oligonucleotide
ucuagacuugcacaugucu

SEQ ID NO: 995735 - RNA, 19 nt, Artificial Sequence
  Description of Artificial Sequence: Synthetic oligonucleotide
ugcagauaaucuuaucucu

SEQ ID NO: 995736 - RNA, 19 nt, Artificial Sequence
  Description of Artificial Sequence: Synthetic oligonucleotide
aggaccaggacacucgggg

SEQ ID NO: 995737 - RNA, 19 nt, Artificial Sequence
  Description of Artificial Sequence: Synthetic oligonucleotide
ugauagcccagcagcaacg

SEQ ID NO: 995738 - RNA, 19 nt, Artificial Sequence
  Description of Artificial Sequence: Synthetic oligonucleotide
uaaucuuaucucuaacagu

SEQ ID NO: 995739 - RNA, 19 nt, Artificial Sequence
  Description of Artificial Sequence: Synthetic oligonucleotide
ugagcauauuacauuguac

SEQ ID NO: 995740 - RNA, 19 nt, Artificial Sequence
  Description of Artificial Sequence: Synthetic oligonucleotide
gaaugaauggucugccagc

SEQ ID NO: 995741 - RNA, 19 nt, Artificial Sequence
  Description of Artificial Sequence: Synthetic oligonucleotide
caucauuaagccacugggg

SEQ ID NO: 995742 - RNA, 19 nt, Artificial Sequence
  Description of Artificial Sequence: Synthetic oligonucleotide
ugccacuuuuccaauuccg

SEQ ID NO: 995743 - RNA, 19 nt, Artificial Sequence
  Description of Artificial Sequence: Synthetic oligonucleotide
ucacgauacagugauauuc

SEQ ID NO: 995744 - RNA, 19 nt, Artificial Sequence
  Description of Artificial Sequence: Synthetic oligonucleotide
aaaguugagcauauuacau

SEQ ID NO: 995745 - RNA, 19 nt, Artificial Sequence
  Description of Artificial Sequence: Synthetic oligonucleotide
ucaagugaggauucuuuga

SEQ ID NO: 995746 - RNA, 19 nt, Artificial Sequence
  Description of Artificial Sequence: Synthetic oligonucleotide
ucaaagaaagucaggcuua

SEQ ID NO: 995747 - RNA, 19 nt, Artificial Sequence
  Description of Artificial Sequence: Synthetic oligonucleotide
ucucuagacuugcacaugu

SEQ ID NO: 995748 - RNA, 19 nt, Artificial Sequence
  Description of Artificial Sequence: Synthetic oligonucleotide
cuagacuugcacaugucug

SEQ ID NO: 995749 - RNA, 19 nt, Artificial Sequence
  Description of Artificial Sequence: Synthetic oligonucleotide
gaccaaaagucgcagaguc

SEQ ID NO: 995750 - RNA, 19 nt, Artificial Sequence
  Description of Artificial Sequence: Synthetic oligonucleotide
aacucuaugaaagcaacua

SEQ ID NO: 995751 - RNA, 19 nt, Artificial Sequence
  Description of Artificial Sequence: Synthetic oligonucleotide
ugaggaaagaugguuagaa

SEQ ID NO: 995752 - RNA, 19 nt, Artificial Sequence
  Description of Artificial Sequence: Synthetic oligonucleotide
agaccaaaaucuuaagaaa

SEQ ID NO: 995753 - RNA, 19 nt, Artificial Sequence
  Description of Artificial Sequence: Synthetic oligonucleotide
uguuuacaauguaaagcac

SEQ ID NO: 995754 - RNA, 19 nt, Artificial Sequence
  Description of Artificial Sequence: Synthetic oligonucleotide
cuaacaguaggaagggcug

SEQ ID NO: 995755 - RNA, 19 nt, Artificial Sequence
  Description of Artificial Sequence: Synthetic oligonucleotide
cugauuacagugccuacag

SEQ ID NO: 995756 - RNA, 19 nt, Artificial Sequence
  Description of Artificial Sequence: Synthetic oligonucleotide
uuggcaaauguuuuccagu

SEQ ID NO: 995757 - RNA, 19 nt, Artificial Sequence
  Description of Artificial Sequence: Synthetic oligonucleotide
agcuuaagguucacgauac

SEQ ID NO: 995758 - RNA, 19 nt, Artificial Sequence
  Description of Artificial Sequence: Synthetic oligonucleotide
cauuaagccacuggggagg

SEQ ID NO: 995759 - RNA, 19 nt, Artificial Sequence
  Description of Artificial Sequence: Synthetic oligonucleotide
uuauccacugcuucuggcu

SEQ ID NO: 995760 - RNA, 19 nt, Artificial Sequence
  Description of Artificial Sequence: Synthetic oligonucleotide
cacccuucuguuuacaaug

SEQ ID NO: 995761 - RNA, 19 nt, Artificial Sequence
  Description of Artificial Sequence: Synthetic oligonucleotide
gaucaggagagauccauga

SEQ ID NO: 995762 - RNA, 19 nt, Artificial Sequence
  Description of Artificial Sequence: Synthetic oligonucleotide
uugagcauauuacauugua

SEQ ID NO: 995763 - RNA, 19 nt, Artificial Sequence
  Description of Artificial Sequence: Synthetic oligonucleotide
agaagggcugacaucagcg

SEQ ID NO: 995764 - RNA, 19 nt, Artificial Sequence
  Description of Artificial Sequence: Synthetic oligonucleotide
cuuaucucuaacaguagga

SEQ ID NO: 995765 - RNA, 19 nt, Artificial Sequence
  Description of Artificial Sequence: Synthetic oligonucleotide
uagcuuaagguucacgaua

SEQ ID NO: 995766 - RNA, 19 nt, Artificial Sequence
  Description of Artificial Sequence: Synthetic oligonucleotide
acguccuaugcagagaagg

SEQ ID NO: 995767 - RNA, 19 nt, Artificial Sequence
  Description of Artificial Sequence: Synthetic oligonucleotide
agguucacgauacagugau

SEQ ID NO: 995768 - RNA, 19 nt, Artificial Sequence
  Description of Artificial Sequence: Synthetic oligonucleotide
uaagcagaccaaaaucuua

SEQ ID NO: 995769 - RNA, 19 nt, Artificial Sequence
  Description of Artificial Sequence: Synthetic oligonucleotide
gguuagaagcagcaaagcc

SEQ ID NO: 995770 - RNA, 19 nt, Artificial Sequence
  Description of Artificial Sequence: Synthetic oligonucleotide
ccuuauauaaauaccagga

SEQ ID NO: 995771 - RNA, 19 nt, Artificial Sequence
  Description of Artificial Sequence: Synthetic oligonucleotide
gcuuauagauuccaacuag

SEQ ID NO: 995772 - RNA, 19 nt, Artificial Sequence
  Description of Artificial Sequence: Synthetic oligonucleotide
uuaucucuaacaguaggaa

SEQ ID NO: 995773 - RNA, 19 nt, Artificial Sequence
  Description of Artificial Sequence: Synthetic oligonucleotide
uuaagcagaccaaaaucuu

SEQ ID NO: 995774 - RNA, 19 nt, Artificial Sequence
  Description of Artificial Sequence: Synthetic oligonucleotide
uaugggauucuauccaguc

SEQ ID NO: 995775 - RNA, 19 nt, Artificial Sequence
  Description of Artificial Sequence: Synthetic oligonucleotide
uauccaguccuuauauaaa

SEQ ID NO: 995776 - RNA, 19 nt, Artificial Sequence
  Description of Artificial Sequence: Synthetic oligonucleotide
caugacacgcugcugcucc

SEQ ID NO: 995777 - RNA, 19 nt, Artificial Sequence
  Description of Artificial Sequence: Synthetic oligonucleotide
aaagcucagacagcucuag

SEQ ID NO: 995778 - RNA, 19 nt, Artificial Sequence
  Description of Artificial Sequence: Synthetic oligonucleotide
auuccgcccucuuagaaga

SEQ ID NO: 995779 - RNA, 19 nt, Artificial Sequence
  Description of Artificial Sequence: Synthetic oligonucleotide
aaaauuuaugagacuucca

SEQ ID NO: 995780 - RNA, 19 nt, Artificial Sequence
  Description of Artificial Sequence: Synthetic oligonucleotide
augguuagaagcagcaaag

SEQ ID NO: 995781 - RNA, 19 nt, Artificial Sequence
  Description of Artificial Sequence: Synthetic oligonucleotide
cuauccaguccuuauauaa

SEQ ID NO: 995782 - RNA, 19 nt, Artificial Sequence
  Description of Artificial Sequence: Synthetic oligonucleotide
uuagcuuaagguucacgau

SEQ ID NO: 995783 - RNA, 19 nt, Artificial Sequence
  Description of Artificial Sequence: Synthetic oligonucleotide
ggaagggcugauuacagug

SEQ ID NO: 995784 - RNA, 19 nt, Artificial Sequence
  Description of Artificial Sequence: Synthetic oligonucleotide
guuuccuguagcuauuaca

SEQ ID NO: 995785 - RNA, 19 nt, Artificial Sequence
  Description of Artificial Sequence: Synthetic oligonucleotide
aguuuccuguagcuauuac

SEQ ID NO: 995786 - RNA, 19 nt, Artificial Sequence
  Description of Artificial Sequence: Synthetic oligonucleotide
uggcaaauguuuuccaguc

SEQ ID NO: 995787 - RNA, 19 nt, Artificial Sequence
  Description of Artificial Sequence: Synthetic oligonucleotide
uuugaaccuggaucucuag

SEQ ID NO: 995788 - RNA, 19 nt, Artificial Sequence
  Description of Artificial Sequence: Synthetic oligonucleotide
gaagacucuuccuccaaca

SEQ ID NO: 995789 - RNA, 19 nt, Artificial Sequence
  Description of Artificial Sequence: Synthetic oligonucleotide
uguagcuauuacagaggug

SEQ ID NO: 995790 - RNA, 19 nt, Artificial Sequence
  Description of Artificial Sequence: Synthetic oligonucleotide
cuuccauccagacauuuca

SEQ ID NO: 995791 - RNA, 19 nt, Artificial Sequence
  Description of Artificial Sequence: Synthetic oligonucleotide
gagcuuauagauuccaacu

SEQ ID NO: 995792 - RNA, 19 nt, Artificial Sequence
  Description of Artificial Sequence: Synthetic oligonucleotide
guuaagcagaccaaaaucu

SEQ ID NO: 995793 - RNA, 19 nt, Artificial Sequence
  Description of Artificial Sequence: Synthetic oligonucleotide
agcuuauagauuccaacua

SEQ ID NO: 995794 - RNA, 19 nt, Artificial Sequence
  Description of Artificial Sequence: Synthetic oligonucleotide
uuaugggauucuauccagu

SEQ ID NO: 995795 - RNA, 19 nt, Artificial Sequence
  Description of Artificial Sequence: Synthetic oligonucleotide
aaaagucgcagaguccaca

SEQ ID NO: 995796 - RNA, 19 nt, Artificial Sequence
  Description of Artificial Sequence: Synthetic oligonucleotide
caacaaccuggccugaagc

SEQ ID NO: 995797 - RNA, 19 nt, Artificial Sequence
  Description of Artificial Sequence: Synthetic oligonucleotide
acucuaugaaagcaacuau

SEQ ID NO: 995798 - RNA, 19 nt, Artificial Sequence
  Description of Artificial Sequence: Synthetic oligonucleotide
agcuauuacagaggugagg

SEQ ID NO: 995799 - RNA, 19 nt, Artificial Sequence
  Description of Artificial Sequence: Synthetic oligonucleotide
acuugcacaugucuggaau

SEQ ID NO: 995800 - RNA, 19 nt, Artificial Sequence
  Description of Artificial Sequence: Synthetic oligonucleotide
aagcagaccaaaaucuuaa

SEQ ID NO: 995801 - RNA, 19 nt, Artificial Sequence
  Description of Artificial Sequence: Synthetic oligonucleotide
gaaugaauggccaggcaga

SEQ ID NO: 995802 - RNA, 19 nt, Artificial Sequence
  Description of Artificial Sequence: Synthetic oligonucleotide
aaacccacacccagguuag

SEQ ID NO: 995803 - RNA, 19 nt, Artificial Sequence
  Description of Artificial Sequence: Synthetic oligonucleotide
ugagacuuccauuggcaaa

SEQ ID NO: 995804 - RNA, 19 nt, Artificial Sequence
  Description of Artificial Sequence: Synthetic oligonucleotide
acauuguacaauguuuaga

SEQ ID NO: 995805 - RNA, 19 nt, Artificial Sequence
  Description of Artificial Sequence: Synthetic oligonucleotide
ucugucgucuggauagccu

SEQ ID NO: 995806 - RNA, 19 nt, Artificial Sequence
  Description of Artificial Sequence: Synthetic oligonucleotide
agcucagacagcucuagaa

SEQ ID NO: 995807 - RNA, 19 nt, Artificial Sequence
  Description of Artificial Sequence: Synthetic oligonucleotide
gcaucaaagcaucugacca

SEQ ID NO: 995808 - RNA, 19 nt, Artificial Sequence
  Description of Artificial Sequence: Synthetic oligonucleotide
guccuuauauaaauaccag

SEQ ID NO: 995809 - RNA, 19 nt, Artificial Sequence
  Description of Artificial Sequence: Synthetic oligonucleotide
cugcauacaaaucuaaacu

SEQ ID NO: 995810 - RNA, 19 nt, Artificial Sequence
  Description of Artificial Sequence: Synthetic oligonucleotide
aggaacacugaaaucuauc

SEQ ID NO: 995811 - RNA, 19 nt, Artificial Sequence
  Description of Artificial Sequence: Synthetic oligonucleotide
aggugaaugaauggccagg

SEQ ID NO: 995812 - RNA, 19 nt, Artificial Sequence
  Description of Artificial Sequence: Synthetic oligonucleotide
auuaagccacuggggaggc

SEQ ID NO: 995813 - RNA, 19 nt, Artificial Sequence
  Description of Artificial Sequence: Synthetic oligonucleotide
uagcuauuacagaggugag

SEQ ID NO: 995814 - RNA, 19 nt, Artificial Sequence
  Description of Artificial Sequence: Synthetic oligonucleotide
ugccuauguucucacccag

SEQ ID NO: 995815 - RNA, 19 nt, Artificial Sequence
  Description of Artificial Sequence: Synthetic oligonucleotide
guagagauuuaugggauuc

SEQ ID NO: 995816 - RNA, 19 nt, Artificial Sequence
  Description of Artificial Sequence: Synthetic oligonucleotide
agcagaccaaaaucuuaag

SEQ ID NO: 995817 - RNA, 19 nt, Artificial Sequence
  Description of Artificial Sequence: Synthetic oligonucleotide
gagaagggcugacaucagc

SEQ ID NO: 995818 - RNA, 19 nt, Artificial Sequence
  Description of Artificial Sequence: Synthetic oligonucleotide
aaacucuaugaaagcaacu

SEQ ID NO: 995819 - RNA, 19 nt, Artificial Sequence
  Description of Artificial Sequence: Synthetic oligonucleotide
uuacagaggugaggcaagg

SEQ ID NO: 995820 - RNA, 19 nt, Artificial Sequence
  Description of Artificial Sequence: Synthetic oligonucleotide
ucuuugaaccuggaucucu

SEQ ID NO: 995821 - RNA, 19 nt, Artificial Sequence
  Description of Artificial Sequence: Synthetic oligonucleotide
accaaaagucgcagagucc

SEQ ID NO: 995822 - RNA, 19 nt, Artificial Sequence
  Description of Artificial Sequence: Synthetic oligonucleotide
ucugaccaaaagucgcaga

SEQ ID NO: 995823 - RNA, 19 nt, Artificial Sequence
  Description of Artificial Sequence: Synthetic oligonucleotide
agacguccuaugcagagaa

SEQ ID NO: 995824 - RNA, 19 nt, Artificial Sequence
  Description of Artificial Sequence: Synthetic oligonucleotide
ggugaggugaaugaauggc

SEQ ID NO: 995825 - RNA, 19 nt, Artificial Sequence
  Description of Artificial Sequence: Synthetic oligonucleotide
ugguuagaagcagcaaagc

SEQ ID NO: 995826 - RNA, 19 nt, Artificial Sequence
  Description of Artificial Sequence: Synthetic oligonucleotide
uggaaaucacccuucuguu

SEQ ID NO: 995827 - RNA, 19 nt, Artificial Sequence
  Description of Artificial Sequence: Synthetic oligonucleotide
cuugcgguuucuuuuccuc

SEQ ID NO: 995828 - RNA, 19 nt, Artificial Sequence
  Description of Artificial Sequence: Synthetic oligonucleotide
uaaagcacuguggcugucc

SEQ ID NO: 995829 - RNA, 19 nt, Artificial Sequence
  Description of Artificial Sequence: Synthetic oligonucleotide
aggaggaaugaauggucug

SEQ ID NO: 995830 - RNA, 19 nt, Artificial Sequence
  Description of Artificial Sequence: Synthetic oligonucleotide
cugucgucuggauagccug

SEQ ID NO: 995831 - RNA, 19 nt, Artificial Sequence
  Description of Artificial Sequence: Synthetic oligonucleotide
uggugaucaagugaggauu

SEQ ID NO: 995832 - RNA, 19 nt, Artificial Sequence
  Description of Artificial Sequence: Synthetic oligonucleotide
aaugaauggccaggcagaa

SEQ ID NO: 995833 - RNA, 19 nt, Artificial Sequence
  Description of Artificial Sequence: Synthetic oligonucleotide
uuccauccagacauuucac

SEQ ID NO: 995834 - RNA, 19 nt, Artificial Sequence
  Description of Artificial Sequence: Synthetic oligonucleotide
cuuuaggaggcagcagacg

SEQ ID NO: 995835 - RNA, 19 nt, Artificial Sequence
  Description of Artificial Sequence: Synthetic oligonucleotide
uccccuaggagacaucauu

SEQ ID NO: 995836 - RNA, 19 nt, Artificial Sequence
  Description of Artificial Sequence: Synthetic oligonucleotide
ugucgucuggauagccugc

SEQ ID NO: 995837 - RNA, 19 nt, Artificial Sequence
  Description of Artificial Sequence: Synthetic oligonucleotide
gucgacaggcacuuagcug

SEQ ID NO: 995838 - RNA, 19 nt, Artificial Sequence
  Description of Artificial Sequence: Synthetic oligonucleotide
acgauacagugauauucug

SEQ ID NO: 995839 - RNA, 19 nt, Artificial Sequence
  Description of Artificial Sequence: Synthetic oligonucleotide
caaggaccaggacacucgg

SEQ ID NO: 995840 - RNA, 19 nt, Artificial Sequence
  Description of Artificial Sequence: Synthetic oligonucleotide
gcucagacagcucuagaag

SEQ ID NO: 995841 - RNA, 19 nt, Artificial Sequence
  Description of Artificial Sequence: Synthetic oligonucleotide
aauggucugccagccagga

SEQ ID NO: 995842 - RNA, 19 nt, Artificial Sequence
  Description of Artificial Sequence: Synthetic oligonucleotide
agaaaacacugguggguga

SEQ ID NO: 995843 - RNA, 19 nt, Artificial Sequence
  Description of Artificial Sequence: Synthetic oligonucleotide
ucacccuucuguuuacaau

SEQ ID NO: 995844 - RNA, 19 nt, Artificial Sequence
  Description of Artificial Sequence: Synthetic oligonucleotide
ccagguuagcuuaagguuc

SEQ ID NO: 995845 - RNA, 19 nt, Artificial Sequence
  Description of Artificial Sequence: Synthetic oligonucleotide
guaggaagggcugauuaca

SEQ ID NO: 995846 - RNA, 19 nt, Artificial Sequence
  Description of Artificial Sequence: Synthetic oligonucleotide
ucuauccaguccuuauaua

SEQ ID NO: 995847 - RNA, 19 nt, Artificial Sequence
  Description of Artificial Sequence: Synthetic oligonucleotide
caacauguggaccccgcug

SEQ ID NO: 995848 - RNA, 19 nt, Artificial Sequence
  Description of Artificial Sequence: Synthetic oligonucleotide
uagagauuuaugggauucu

SEQ ID NO: 995849 - RNA, 19 nt, Artificial Sequence
  Description of Artificial Sequence: Synthetic oligonucleotide
cacccaggaaagcucagac

SEQ ID NO: 995850 - RNA, 19 nt, Artificial Sequence
  Description of Artificial Sequence: Synthetic oligonucleotide
uagaagacucuuccuccaa

SEQ ID NO: 995851 - RNA, 19 nt, Artificial Sequence
  Description of Artificial Sequence: Synthetic oligonucleotide
guguccucaacauguggac

SEQ ID NO: 995852 - RNA, 19 nt, Artificial Sequence
  Description of Artificial Sequence: Synthetic oligonucleotide
ggaggaaugaauggucugc

SEQ ID NO: 995853 - RNA, 19 nt, Artificial Sequence
  Description of Artificial Sequence: Synthetic oligonucleotide
auggagcucggcuccucac

SEQ ID NO: 995854 - RNA, 19 nt, Artificial Sequence
  Description of Artificial Sequence: Synthetic oligonucleotide
aagguucacgauacaguga

SEQ ID NO: 995855 - RNA, 19 nt, Artificial Sequence
  Description of Artificial Sequence: Synthetic oligonucleotide
uccccaguuggugaucaag

SEQ ID NO: 995856 - RNA, 19 nt, Artificial Sequence
  Description of Artificial Sequence: Synthetic oligonucleotide
uucacaccagucagaacuu

SEQ ID NO: 995857 - RNA, 19 nt, Artificial Sequence
  Description of Artificial Sequence: Synthetic oligonucleotide
aucugaccaaaagucgcag

SEQ ID NO: 995858 - RNA, 19 nt, Artificial Sequence
  Description of Artificial Sequence: Synthetic oligonucleotide
cagauuccaaaacagauuu

SEQ ID NO: 995859 - RNA, 19 nt, Artificial Sequence
  Description of Artificial Sequence: Synthetic oligonucleotide
aucaaagcaucugaccaaa

SEQ ID NO: 995860 - RNA, 19 nt, Artificial Sequence
  Description of Artificial Sequence: Synthetic oligonucleotide
gaaugcugcggguccccag

SEQ ID NO: 995861 - RNA, 19 nt, Artificial Sequence
  Description of Artificial Sequence: Synthetic oligonucleotide
gcagaccaaaaucuuaaga

SEQ ID NO: 995862 - RNA, 19 nt, Artificial Sequence
  Description of Artificial Sequence: Synthetic oligonucleotide
aggcacuuagcugaagcca

SEQ ID NO: 995863 - RNA, 19 nt, Artificial Sequence
  Description of Artificial Sequence: Synthetic oligonucleotide
uggagcucggcuccucacu

SEQ ID NO: 995864 - RNA, 19 nt, Artificial Sequence
  Description of Artificial Sequence: Synthetic oligonucleotide
aucuuaucucuaacaguag

SEQ ID NO: 995865 - RNA, 19 nt, Artificial Sequence
  Description of Artificial Sequence: Synthetic oligonucleotide
cacugagcuuauagauucc

SEQ ID NO: 995866 - RNA, 19 nt, Artificial Sequence
  Description of Artificial Sequence: Synthetic oligonucleotide
caucaaagcaucugaccaa

SEQ ID NO: 995867 - RNA, 19 nt, Artificial Sequence
  Description of Artificial Sequence: Synthetic oligonucleotide
auacagugauauucugcau

SEQ ID NO: 995868 - RNA, 19 nt, Artificial Sequence
  Description of Artificial Sequence: Synthetic oligonucleotide
gacacucgggguccucugc

SEQ ID NO: 995869 - RNA, 19 nt, Artificial Sequence
  Description of Artificial Sequence: Synthetic oligonucleotide
gcagacguccuaugcagag

SEQ ID NO: 995870 - RNA, 19 nt, Artificial Sequence
  Description of Artificial Sequence: Synthetic oligonucleotide
acaccagucagaacuuucu

SEQ ID NO: 995871 - RNA, 19 nt, Artificial Sequence
  Description of Artificial Sequence: Synthetic oligonucleotide
uaacucccuccauacugcu

SEQ ID NO: 995872 - RNA, 19 nt, Artificial Sequence
  Description of Artificial Sequence: Synthetic oligonucleotide
agagauuuaugggauucua

SEQ ID NO: 995873 - RNA, 19 nt, Artificial Sequence
  Description of Artificial Sequence: Synthetic oligonucleotide
cacgauacagugauauucu

SEQ ID NO: 995874 - RNA, 19 nt, Artificial Sequence
  Description of Artificial Sequence: Synthetic oligonucleotide
cagguuagcuuaagguuca

SEQ ID NO: 995875 - RNA, 19 nt, Artificial Sequence
  Description of Artificial Sequence: Synthetic oligonucleotide
caaaagucgcagaguccac

SEQ ID NO: 995876 - RNA, 19 nt, Artificial Sequence
  Description of Artificial Sequence: Synthetic oligonucleotide
uucacgauacagugauauu

SEQ ID NO: 995877 - RNA, 19 nt, Artificial Sequence
  Description of Artificial Sequence: Synthetic oligonucleotide
ugaucaagugaggauucuu

SEQ ID NO: 995878 - RNA, 19 nt, Artificial Sequence
  Description of Artificial Sequence: Synthetic oligonucleotide
agcaaggaucaggagagau

SEQ ID NO: 995879 - RNA, 19 nt, Artificial Sequence
  Description of Artificial Sequence: Synthetic oligonucleotide
gcaaggaccaggacacucg

SEQ ID NO: 995880 - RNA, 19 nt, Artificial Sequence
  Description of Artificial Sequence: Synthetic oligonucleotide
cucgagcucugccugggug

SEQ ID NO: 995881 - RNA, 19 nt, Artificial Sequence
  Description of Artificial Sequence: Synthetic oligonucleotide
cucuagacuugcacauguc

SEQ ID NO: 995882 - RNA, 19 nt, Artificial Sequence
  Description of Artificial Sequence: Synthetic oligonucleotide
acacucgggguccucugcu

SEQ ID NO: 995883 - RNA, 19 nt, Artificial Sequence
  Description of Artificial Sequence: Synthetic oligonucleotide
ucgucuggauagccugcug

SEQ ID NO: 995884 - RNA, 19 nt, Artificial Sequence
  Description of Artificial Sequence: Synthetic oligonucleotide
aacccacacccagguuagc

SEQ ID NO: 995885 - RNA, 19 nt, Artificial Sequence
  Description of Artificial Sequence: Synthetic oligonucleotide
cagucauaaaagguagaga

SEQ ID NO: 995886 - RNA, 19 nt, Artificial Sequence
  Description of Artificial Sequence: Synthetic oligonucleotide
aaggggucgacaggcacuu

SEQ ID NO: 995887 - RNA, 19 nt, Artificial Sequence
  Description of Artificial Sequence: Synthetic oligonucleotide
ugggugaaugcugcggguc

SEQ ID NO: 995888 - RNA, 19 nt, Artificial Sequence
  Description of Artificial Sequence: Synthetic oligonucleotide
cuuugaaccuggaucucua

SEQ ID NO: 995889 - RNA, 19 nt, Artificial Sequence
  Description of Artificial Sequence: Synthetic oligonucleotide
uagcaugggaaagcuuacu

SEQ ID NO: 995890 - RNA, 19 nt, Artificial Sequence
  Description of Artificial Sequence: Synthetic oligonucleotide
gcaacgaaaagaaaacacu

SEQ ID NO: 995891 - RNA, 19 nt, Artificial Sequence
  Description of Artificial Sequence: Synthetic oligonucleotide
cguccuaugcagagaaggg

SEQ ID NO: 995892 - RNA, 19 nt, Artificial Sequence
  Description of Artificial Sequence: Synthetic oligonucleotide
gggugaaugcugcgggucc

SEQ ID NO: 995893 - RNA, 19 nt, Artificial Sequence
  Description of Artificial Sequence: Synthetic oligonucleotide
ggcacuuagcugaagccac

SEQ ID NO: 995894 - RNA, 19 nt, Artificial Sequence
  Description of Artificial Sequence: Synthetic oligonucleotide
cagcaacgaaaagaaaaca

SEQ ID NO: 995895 - RNA, 19 nt, Artificial Sequence
  Description of Artificial Sequence: Synthetic oligonucleotide
cugugccuauguucucacc

SEQ ID NO: 995896 - RNA, 19 nt, Artificial Sequence
  Description of Artificial Sequence: Synthetic oligonucleotide
gccacuuuuccaauuccgc

SEQ ID NO: 995897 - RNA, 19 nt, Artificial Sequence
  Description of Artificial Sequence: Synthetic oligonucleotide
acagcucuagaagguaaau

SEQ ID NO: 995898 - RNA, 19 nt, Artificial Sequence
  Description of Artificial Sequence: Synthetic oligonucleotide
cugagcuuauagauuccaa

SEQ ID NO: 995899 - RNA, 19 nt, Artificial Sequence
  Description of Artificial Sequence: Synthetic oligonucleotide
cucacccaggaaagcucag

SEQ ID NO: 995900 - RNA, 19 nt, Artificial Sequence
  Description of Artificial Sequence: Synthetic oligonucleotide
ugcggguccccaguuggug

SEQ ID NO: 995901 - RNA, 19 nt, Artificial Sequence
  Description of Artificial Sequence: Synthetic oligonucleotide
cucggcuccucacugaugu

SEQ ID NO: 995902 - RNA, 19 nt, Artificial Sequence
  Description of Artificial Sequence: Synthetic oligonucleotide
uucucaauacaggcagauu

SEQ ID NO: 995903 - RNA, 19 nt, Artificial Sequence
  Description of Artificial Sequence: Synthetic oligonucleotide
uucuuugaaccuggaucuc

SEQ ID NO: 995904 - RNA, 19 nt, Artificial Sequence
  Description of Artificial Sequence: Synthetic oligonucleotide
ucacuccguggucuucuuc

SEQ ID NO: 995905 - RNA, 19 nt, Artificial Sequence
  Description of Artificial Sequence: Synthetic oligonucleotide
ggugaucaagugaggauuc

SEQ ID NO: 995906 - RNA, 19 nt, Artificial Sequence
  Description of Artificial Sequence: Synthetic oligonucleotide
cucugucgucuggauagcc

SEQ ID NO: 995907 - RNA, 19 nt, Artificial Sequence
  Description of Artificial Sequence: Synthetic oligonucleotide
gagauuuaugggauucuau

SEQ ID NO: 995908 - RNA, 19 nt, Artificial Sequence
  Description of Artificial Sequence: Synthetic oligonucleotide
gacuugcacaugucuggaa

SEQ ID NO: 995909 - RNA, 19 nt, Artificial Sequence
  Description of Artificial Sequence: Synthetic oligonucleotide
uccgcccucuuagaagacu

SEQ ID NO: 995910 - RNA, 19 nt, Artificial Sequence
  Description of Artificial Sequence: Synthetic oligonucleotide
agggucacugaaguccccu

SEQ ID NO: 995911 - RNA, 19 nt, Artificial Sequence
  Description of Artificial Sequence: Synthetic oligonucleotide
aagcaacuauaaacauuaa

SEQ ID NO: 995912 - RNA, 19 nt, Artificial Sequence
  Description of Artificial Sequence: Synthetic oligonucleotide
gcugauuacagugccuaca

SEQ ID NO: 995913 - RNA, 19 nt, Artificial Sequence
  Description of Artificial Sequence: Synthetic oligonucleotide
auagcccagcagcaacgaa

SEQ ID NO: 995914 - RNA, 19 nt, Artificial Sequence
  Description of Artificial Sequence: Synthetic oligonucleotide
caauuccgcccucuuagaa

SEQ ID NO: 995915 - RNA, 19 nt, Artificial Sequence
  Description of Artificial Sequence: Synthetic oligonucleotide
gacguccuaugcagagaag

SEQ ID NO: 995916 - RNA, 19 nt, Artificial Sequence
  Description of Artificial Sequence: Synthetic oligonucleotide
gcucuagaagguaaauaca

SEQ ID NO: 995917 - RNA, 19 nt, Artificial Sequence
  Description of Artificial Sequence: Synthetic oligonucleotide
cuaugcagagaagggcuga

SEQ ID NO: 995918 - RNA, 19 nt, Artificial Sequence
  Description of Artificial Sequence: Synthetic oligonucleotide
caaagaaagucaggcuuaa

SEQ ID NO: 995919 - RNA, 19 nt, Artificial Sequence
  Description of Artificial Sequence: Synthetic oligonucleotide
aaguccccuaggagacauc

SEQ ID NO: 995920 - RNA, 19 nt, Artificial Sequence
  Description of Artificial Sequence: Synthetic oligonucleotide
ggacuccuaggccuucagc

SEQ ID NO: 995921 - RNA, 19 nt, Artificial Sequence
  Description of Artificial Sequence: Synthetic oligonucleotide
uuccgcccucuuagaagac

SEQ ID NO: 995922 - RNA, 19 nt, Artificial Sequence
  Description of Artificial Sequence: Synthetic oligonucleotide
aggcagcagacguccuaug

SEQ ID NO: 995923 - RNA, 19 nt, Artificial Sequence
  Description of Artificial Sequence: Synthetic oligonucleotide
cucgggguccucugcucug

SEQ ID NO: 995924 - RNA, 19 nt, Artificial Sequence
  Description of Artificial Sequence: Synthetic oligonucleotide
uuaagccacuggggaggcc

SEQ ID NO: 995925 - RNA, 19 nt, Artificial Sequence
  Description of Artificial Sequence: Synthetic oligonucleotide
gccucucauccucaagggc

SEQ ID NO: 995926 - RNA, 19 nt, Artificial Sequence
  Description of Artificial Sequence: Synthetic oligonucleotide
aucuaucucuagacuugca

SEQ ID NO: 995927 - RNA, 19 nt, Artificial Sequence
  Description of Artificial Sequence: Synthetic oligonucleotide
ggcugauuacagugccuac

SEQ ID NO: 995928 - RNA, 19 nt, Artificial Sequence
  Description of Artificial Sequence: Synthetic oligonucleotide
ucacaccagucagaacuuu

SEQ ID NO: 995929 - RNA, 19 nt, Artificial Sequence
  Description of Artificial Sequence: Synthetic oligonucleotide
gagacaucauuaagccacu

SEQ ID NO: 995930 - RNA, 19 nt, Artificial Sequence
  Description of Artificial Sequence: Synthetic oligonucleotide
caaggggucgacaggcacu

SEQ ID NO: 995931 - RNA, 19 nt, Artificial Sequence
  Description of Artificial Sequence: Synthetic oligonucleotide
gccuguuuccgcucgagcu

SEQ ID NO: 995932 - RNA, 19 nt, Artificial Sequence
  Description of Artificial Sequence: Synthetic oligonucleotide
cagcucuagaagguaaaua

SEQ ID NO: 995933 - RNA, 19 nt, Artificial Sequence
  Description of Artificial Sequence: Synthetic oligonucleotide
ucgggguccucugcucugu

SEQ ID NO: 995934 - RNA, 19 nt, Artificial Sequence
  Description of Artificial Sequence: Synthetic oligonucleotide
gggucgacaggcacuuagc

SEQ ID NO: 995935 - RNA, 19 nt, Artificial Sequence
  Description of Artificial Sequence: Synthetic oligonucleotide
ggucgacaggcacuuagcu

SEQ ID NO: 995936 - RNA, 19 nt, Artificial Sequence
  Description of Artificial Sequence: Synthetic oligonucleotide
uggaccccgcuggagcccu

SEQ ID NO: 995937 - RNA, 19 nt, Artificial Sequence
  Description of Artificial Sequence: Synthetic oligonucleotide
gaaguuuccuguagcuauu

SEQ ID NO: 995938 - RNA, 19 nt, Artificial Sequence
  Description of Artificial Sequence: Synthetic oligonucleotide
ccgcccucuuagaagacuc

SEQ ID NO: 995939 - RNA, 19 nt, Artificial Sequence
  Description of Artificial Sequence: Synthetic oligonucleotide
gaacuuucuugcgguuucu

SEQ ID NO: 995940 - RNA, 19 nt, Artificial Sequence
  Description of Artificial Sequence: Synthetic oligonucleotide
ggauagccugcugcugugc

SEQ ID NO: 995941 - RNA, 19 nt, Artificial Sequence
  Description of Artificial Sequence: Synthetic oligonucleotide
cagacguccuaugcagaga

SEQ ID NO: 995942 - RNA, 19 nt, Artificial Sequence
  Description of Artificial Sequence: Synthetic oligonucleotide
gcuuaagguucacgauaca

SEQ ID NO: 995943 - RNA, 19 nt, Artificial Sequence
  Description of Artificial Sequence: Synthetic oligonucleotide
gucaggcuuaaggaggaau

SEQ ID NO: 995944 - RNA, 19 nt, Artificial Sequence
  Description of Artificial Sequence: Synthetic oligonucleotide
gugggugaggugaaugaau

SEQ ID NO: 995945 - RNA, 19 nt, Artificial Sequence
  Description of Artificial Sequence: Synthetic oligonucleotide
cccugaggaaagaugguua

SEQ ID NO: 995946 - RNA, 19 nt, Artificial Sequence
  Description of Artificial Sequence: Synthetic oligonucleotide
agcuugcgcacugucucuu

SEQ ID NO: 995947 - RNA, 19 nt, Artificial Sequence
  Description of Artificial Sequence: Synthetic oligonucleotide
gguccccaguuggugauca

SEQ ID NO: 995948 - RNA, 19 nt, Artificial Sequence
  Description of Artificial Sequence: Synthetic oligonucleotide
gugaucaagugaggauucu

SEQ ID NO: 995949 - RNA, 19 nt, Artificial Sequence
  Description of Artificial Sequence: Synthetic oligonucleotide
cccuaggagacaucauuaa

SEQ ID NO: 995950 - RNA, 19 nt, Artificial Sequence
  Description of Artificial Sequence: Synthetic oligonucleotide
ccucaacauguggaccccg

SEQ ID NO: 995951 - RNA, 19 nt, Artificial Sequence
  Description of Artificial Sequence: Synthetic oligonucleotide
augcugcggguccccaguu

SEQ ID NO: 995952 - RNA, 19 nt, Artificial Sequence
  Description of Artificial Sequence: Synthetic oligonucleotide
cccagguuagcuuaagguu

SEQ ID NO: 995953 - RNA, 19 nt, Artificial Sequence
  Description of Artificial Sequence: Synthetic oligonucleotide
ggauucuauccaguccuua

SEQ ID NO: 995954 - RNA, 19 nt, Artificial Sequence
  Description of Artificial Sequence: Synthetic oligonucleotide
cugucacuccguggucuuc

SEQ ID NO: 995955 - RNA, 19 nt, Artificial Sequence
  Description of Artificial Sequence: Synthetic oligonucleotide
ccaauuccgcccucuuaga

SEQ ID NO: 995956 - RNA, 19 nt, Artificial Sequence
  Description of Artificial Sequence: Synthetic oligonucleotide
ggcagucccuucaccccag

SEQ ID NO: 995957 - RNA, 19 nt, Artificial Sequence
  Description of Artificial Sequence: Synthetic oligonucleotide
gcacuuagcugaagccaca

SEQ ID NO: 995958 - RNA, 19 nt, Artificial Sequence
  Description of Artificial Sequence: Synthetic oligonucleotide
ccucugucgucuggauagc

SEQ ID NO: 995959 - RNA, 19 nt, Artificial Sequence
  Description of Artificial Sequence: Synthetic oligonucleotide
gcgccuguuuccgcucgag

SEQ ID NO: 995960 - RNA, 19 nt, Artificial Sequence
  Description of Artificial Sequence: Synthetic oligonucleotide
caggugccacuuuuccaau

SEQ ID NO: 995961 - RNA, 19 nt, Artificial Sequence
  Description of Artificial Sequence: Synthetic oligonucleotide
gcucggcuccucacugaug

SEQ ID NO: 995962 - RNA, 19 nt, Artificial Sequence
  Description of Artificial Sequence: Synthetic oligonucleotide
cugcggguccccaguuggu

SEQ ID NO: 995963 - RNA, 19 nt, Artificial Sequence
  Description of Artificial Sequence: Synthetic oligonucleotide
cccuucuguuuacaaugua

SEQ ID NO: 995964 - RNA, 19 nt, Artificial Sequence
  Description of Artificial Sequence: Synthetic oligonucleotide
gcccugaggaaagaugguu

SEQ ID NO: 995965 - RNA, 19 nt, Artificial Sequence
  Description of Artificial Sequence: Synthetic oligonucleotide
cugccgggccugccucuca

SEQ ID NO: 995966 - RNA, 19 nt, Artificial Sequence
  Description of Artificial Sequence: Synthetic oligonucleotide
gcgguuucuuuuccucauu

SEQ ID NO: 995967 - RNA, 19 nt, Artificial Sequence
  Description of Artificial Sequence: Synthetic oligonucleotide
gcccucuuagaagacucuu

SEQ ID NO: 995968 - RNA, 19 nt, Artificial Sequence
  Description of Artificial Sequence: Synthetic oligonucleotide
aggggucgacaggcacuua

SEQ ID NO: 995969 - RNA, 19 nt, Artificial Sequence
  Description of Artificial Sequence: Synthetic oligonucleotide
cagccacaccugugccuau

SEQ ID NO: 995970 - RNA, 19 nt, Artificial Sequence
  Description of Artificial Sequence: Synthetic oligonucleotide
cgcccucuuagaagacucu

SEQ ID NO: 995971 - RNA, 19 nt, Artificial Sequence
  Description of Artificial Sequence: Synthetic oligonucleotide
uuaauuauuauucaaucug

SEQ ID NO: 995972 - RNA, 19 nt, Artificial Sequence
  Description of Artificial Sequence: Synthetic oligonucleotide
aaaugaguaaaucaucagg

SEQ ID NO: 995973 - RNA, 19 nt, Artificial Sequence
  Description of Artificial Sequence: Synthetic oligonucleotide
auuuccuuauuuuagaggg

SEQ ID NO: 995974 - RNA, 19 nt, Artificial Sequence
  Description of Artificial Sequence: Synthetic oligonucleotide
uaauuauuauucaaucugg

SEQ ID NO: 995975 - RNA, 19 nt, Artificial Sequence
  Description of Artificial Sequence: Synthetic oligonucleotide
aaugaguaaaucaucaggg

SEQ ID NO: 995976 - RNA, 19 nt, Artificial Sequence
  Description of Artificial Sequence: Synthetic oligonucleotide
ucaguuaacagauagcacc

SEQ ID NO: 995977 - RNA, 19 nt, Artificial Sequence
  Description of Artificial Sequence: Synthetic oligonucleotide
uagauuaacgaauagaaaa

SEQ ID NO: 995978 - RNA, 19 nt, Artificial Sequence
  Description of Artificial Sequence: Synthetic oligonucleotide
ugaaugaucaacauuggga

SEQ ID NO: 995979 - RNA, 19 nt, Artificial Sequence
  Description of Artificial Sequence: Synthetic oligonucleotide
agccuagacauuuacagcc

SEQ ID NO: 995980 - RNA, 19 nt, Artificial Sequence
  Description of Artificial Sequence: Synthetic oligonucleotide
aagaugcugaaauggagac

SEQ ID NO: 995981 - RNA, 19 nt, Artificial Sequence
  Description of Artificial Sequence: Synthetic oligonucleotide
aagaauucccuuugcacgg

SEQ ID NO: 995982 - RNA, 19 nt, Artificial Sequence
  Description of Artificial Sequence: Synthetic oligonucleotide
acaaucaguuaacagauag

SEQ ID NO: 995983 - RNA, 19 nt, Artificial Sequence
  Description of Artificial Sequence: Synthetic oligonucleotide
aagcuaaggguguaaauag

SEQ ID NO: 995984 - RNA, 19 nt, Artificial Sequence
  Description of Artificial Sequence: Synthetic oligonucleotide
uuaacgaauagaaaacacu

SEQ ID NO: 995985 - RNA, 19 nt, Artificial Sequence
  Description of Artificial Sequence: Synthetic oligonucleotide
caaucaauuacccauuccc

SEQ ID NO: 995986 - RNA, 19 nt, Artificial Sequence
  Description of Artificial Sequence: Synthetic oligonucleotide
ugaguaaaucaucagggug

SEQ ID NO: 995987 - RNA, 19 nt, Artificial Sequence
  Description of Artificial Sequence: Synthetic oligonucleotide
uaaaucaucagggugaggu

SEQ ID NO: 995988 - RNA, 19 nt, Artificial Sequence
  Description of Artificial Sequence: Synthetic oligonucleotide
aacgaauagaaaacacucc

SEQ ID NO: 995989 - RNA, 19 nt, Artificial Sequence
  Description of Artificial Sequence: Synthetic oligonucleotide
auaucaggaaaauccuacc

SEQ ID NO: 995990 - RNA, 19 nt, Artificial Sequence
  Description of Artificial Sequence: Synthetic oligonucleotide
uuaacagauagcaccaacu

SEQ ID NO: 995991 - RNA, 19 nt, Artificial Sequence
  Description of Artificial Sequence: Synthetic oligonucleotide
agauuaacgaauagaaaac

SEQ ID NO: 995992 - RNA, 19 nt, Artificial Sequence
  Description of Artificial Sequence: Synthetic oligonucleotide
cauaucaggaaaauccuac

SEQ ID NO: 995993 - RNA, 19 nt, Artificial Sequence
  Description of Artificial Sequence: Synthetic oligonucleotide
gaacggagcauuuguaggg

SEQ ID NO: 995994 - RNA, 19 nt, Artificial Sequence
  Description of Artificial Sequence: Synthetic oligonucleotide
uaacagauagcaccaacug

SEQ ID NO: 995995 - RNA, 19 nt, Artificial Sequence
  Description of Artificial Sequence: Synthetic oligonucleotide
auuaacgaauagaaaacac

SEQ ID NO: 995996 - RNA, 19 nt, Artificial Sequence
  Description of Artificial Sequence: Synthetic oligonucleotide
agaacggagcauuuguagg

SEQ ID NO: 995997 - RNA, 19 nt, Artificial Sequence
  Description of Artificial Sequence: Synthetic oligonucleotide
aguaaggaggcuccgccgc

SEQ ID NO: 995998 - RNA, 19 nt, Artificial Sequence
  Description of Artificial Sequence: Synthetic oligonucleotide
acgaauagaaaacacuccu

SEQ ID NO: 995999 - RNA, 19 nt, Artificial Sequence
  Description of Artificial Sequence: Synthetic oligonucleotide
accaacaugaaaaggaguc

SEQ ID NO: 996000 - RNA, 19 nt, Artificial Sequence
  Description of Artificial Sequence: Synthetic oligonucleotide
uauaaagcgcuguuagagc

SEQ ID NO: 996001 - RNA, 19 nt, Artificial Sequence
  Description of Artificial Sequence: Synthetic oligonucleotide
auagcaccaacugggaugc

SEQ ID NO: 996002 - RNA, 19 nt, Artificial Sequence
  Description of Artificial Sequence: Synthetic oligonucleotide
auuccgcgcacucauaggg

SEQ ID NO: 996003 - RNA, 19 nt, Artificial Sequence
  Description of Artificial Sequence: Synthetic oligonucleotide
auaaagcgcuguuagagca

SEQ ID NO: 996004 - RNA, 19 nt, Artificial Sequence
  Description of Artificial Sequence: Synthetic oligonucleotide
uuuccuuauuuuagagggg

SEQ ID NO: 996005 - RNA, 19 nt, Artificial Sequence
  Description of Artificial Sequence: Synthetic oligonucleotide
ugaguaaggaggcuccgcc

SEQ ID NO: 996006 - RNA, 19 nt, Artificial Sequence
  Description of Artificial Sequence: Synthetic oligonucleotide
ucucgaagggauaagcuaa

SEQ ID NO: 996007 - RNA, 19 nt, Artificial Sequence
  Description of Artificial Sequence: Synthetic oligonucleotide
aaagccgucaggcucugcu

SEQ ID NO: 996008 - RNA, 19 nt, Artificial Sequence
  Description of Artificial Sequence: Synthetic oligonucleotide
uuacccauucccaguaacc

SEQ ID NO: 996009 - RNA, 19 nt, Artificial Sequence
  Description of Artificial Sequence: Synthetic oligonucleotide
ugcuaaacaucuaucucac

SEQ ID NO: 996010 - RNA, 19 nt, Artificial Sequence
  Description of Artificial Sequence: Synthetic oligonucleotide
gguguaaauagauuaacga

SEQ ID NO: 996011 - RNA, 19 nt, Artificial Sequence
  Description of Artificial Sequence: Synthetic oligonucleotide
aacggagcauuuguagggc

SEQ ID NO: 996012 - RNA, 19 nt, Artificial Sequence
  Description of Artificial Sequence: Synthetic oligonucleotide
uuacccuuagcacaucccu

SEQ ID NO: 996013 - RNA, 19 nt, Artificial Sequence
  Description of Artificial Sequence: Synthetic oligonucleotide
agcggagcagcacagauga

SEQ ID NO: 996014 - RNA, 19 nt, Artificial Sequence
  Description of Artificial Sequence: Synthetic oligonucleotide
uaagcuaaggguguaaaua

SEQ ID NO: 996015 - RNA, 19 nt, Artificial Sequence
  Description of Artificial Sequence: Synthetic oligonucleotide
ucaauuacccauucccagu

SEQ ID NO: 996016 - RNA, 19 nt, Artificial Sequence
  Description of Artificial Sequence: Synthetic oligonucleotide
cugaaugaucaacauuggg

SEQ ID NO: 996017 - RNA, 19 nt, Artificial Sequence
  Description of Artificial Sequence: Synthetic oligonucleotide
aaagcgcuguuagagcacg

SEQ ID NO: 996018 - RNA, 19 nt, Artificial Sequence
  Description of Artificial Sequence: Synthetic oligonucleotide
guguaaauagauuaacgaa

SEQ ID NO: 996019 - RNA, 19 nt, Artificial Sequence
  Description of Artificial Sequence: Synthetic oligonucleotide
gauuaacgaauagaaaaca

SEQ ID NO: 996020 - RNA, 19 nt, Artificial Sequence
  Description of Artificial Sequence: Synthetic oligonucleotide
uucccaguaaccccaggag

SEQ ID NO: 996021 - RNA, 19 nt, Artificial Sequence
  Description of Artificial Sequence: Synthetic oligonucleotide
caaucaguuaacagauagc

SEQ ID NO: 996022 - RNA, 19 nt, Artificial Sequence
  Description of Artificial Sequence: Synthetic oligonucleotide
uguuacccuuagcacaucc

SEQ ID NO: 996023 - RNA, 19 nt, Artificial Sequence
  Description of Artificial Sequence: Synthetic oligonucleotide
uuuucucgcauuccgcgca

SEQ ID NO: 996024 - RNA, 19 nt, Artificial Sequence
  Description of Artificial Sequence: Synthetic oligonucleotide
accgccaaagccgucaggc

SEQ ID NO: 996025 - RNA, 19 nt, Artificial Sequence
  Description of Artificial Sequence: Synthetic oligonucleotide
aaugaucaacauugggaaa

SEQ ID NO: 996026 - RNA, 19 nt, Artificial Sequence
  Description of Artificial Sequence: Synthetic oligonucleotide
cuugcuaaacaucuaucuc

SEQ ID NO: 996027 - RNA, 19 nt, Artificial Sequence
  Description of Artificial Sequence: Synthetic oligonucleotide
uguuagagcacgaggcagu

SEQ ID NO: 996028 - RNA, 19 nt, Artificial Sequence
  Description of Artificial Sequence: Synthetic oligonucleotide
uuauucaaucuggauaccu

SEQ ID NO: 996029 - RNA, 19 nt, Artificial Sequence
  Description of Artificial Sequence: Synthetic oligonucleotide
uauuuuagagggguuuuga

SEQ ID NO: 996030 - RNA, 19 nt, Artificial Sequence
  Description of Artificial Sequence: Synthetic oligonucleotide
ucaccugugucucacuuuc

SEQ ID NO: 996031 - RNA, 19 nt, Artificial Sequence
  Description of Artificial Sequence: Synthetic oligonucleotide
uauucaaucuggauaccuu

SEQ ID NO: 996032 - RNA, 19 nt, Artificial Sequence
  Description of Artificial Sequence: Synthetic oligonucleotide
cucaccuuagguuggauca

SEQ ID NO: 996033 - RNA, 19 nt, Artificial Sequence
  Description of Artificial Sequence: Synthetic oligonucleotide
uuccuuauuuuagaggggu

SEQ ID NO: 996034 - RNA, 19 nt, Artificial Sequence
  Description of Artificial Sequence: Synthetic oligonucleotide
auuauucaaucuggauacc

SEQ ID NO: 996035 - RNA, 19 nt, Artificial Sequence
  Description of Artificial Sequence: Synthetic oligonucleotide
uuccuauugcaucuuugcu

SEQ ID NO: 996036 - RNA, 19 nt, Artificial Sequence
  Description of Artificial Sequence: Synthetic oligonucleotide
uaccccaccuaucucgaag

SEQ ID NO: 996037 - RNA, 19 nt, Artificial Sequence
  Description of Artificial Sequence: Synthetic oligonucleotide
uugggcgcuucccaaggcg

SEQ ID NO: 996038 - RNA, 19 nt, Artificial Sequence
  Description of Artificial Sequence: Synthetic oligonucleotide
acagaagcucacaaaggcg

SEQ ID NO: 996039 - RNA, 19 nt, Artificial Sequence
  Description of Artificial Sequence: Synthetic oligonucleotide
uggcaguugaagcuuuucu

SEQ ID NO: 996040 - RNA, 19 nt, Artificial Sequence
  Description of Artificial Sequence: Synthetic oligonucleotide
aaggcggugccguggaaug

SEQ ID NO: 996041 - RNA, 19 nt, Artificial Sequence
  Description of Artificial Sequence: Synthetic oligonucleotide
ucuccucaccuuagguugg

SEQ ID NO: 996042 - RNA, 19 nt, Artificial Sequence
  Description of Artificial Sequence: Synthetic oligonucleotide
cuaucucgaagggauaagc

SEQ ID NO: 996043 - RNA, 19 nt, Artificial Sequence
  Description of Artificial Sequence: Synthetic oligonucleotide
aguaaaucaucagggugag

SEQ ID NO: 996044 - RNA, 19 nt, Artificial Sequence
  Description of Artificial Sequence: Synthetic oligonucleotide
ugagacucccuguucacuc

SEQ ID NO: 996045 - RNA, 19 nt, Artificial Sequence
  Description of Artificial Sequence: Synthetic oligonucleotide
acggagcauuuguagggcc

SEQ ID NO: 996046 - RNA, 19 nt, Artificial Sequence
  Description of Artificial Sequence: Synthetic oligonucleotide
acauuuacagccaaucaau

SEQ ID NO: 996047 - RNA, 19 nt, Artificial Sequence
  Description of Artificial Sequence: Synthetic oligonucleotide
cucucccugaucagaacgg

SEQ ID NO: 996048 - RNA, 19 nt, Artificial Sequence
  Description of Artificial Sequence: Synthetic oligonucleotide
accccaccuaucucgaagg

SEQ ID NO: 996049 - RNA, 19 nt, Artificial Sequence
  Description of Artificial Sequence: Synthetic oligonucleotide
cuuuucucgcauuccgcgc

SEQ ID NO: 996050 - RNA, 19 nt, Artificial Sequence
  Description of Artificial Sequence: Synthetic oligonucleotide
gaccgacagagguaggcag

SEQ ID NO: 996051 - RNA, 19 nt, Artificial Sequence
  Description of Artificial Sequence: Synthetic oligonucleotide
cugagaccgacagagguag

SEQ ID NO: 996052 - RNA, 19 nt, Artificial Sequence
  Description of Artificial Sequence: Synthetic oligonucleotide
gcuuuucucgcauuccgcg

SEQ ID NO: 996053 - RNA, 19 nt, Artificial Sequence
  Description of Artificial Sequence: Synthetic oligonucleotide
agagaggucugagaccgac

SEQ ID NO: 996054 - RNA, 19 nt, Artificial Sequence
  Description of Artificial Sequence: Synthetic oligonucleotide
uucagggugucuccucacc

SEQ ID NO: 996055 - RNA, 19 nt, Artificial Sequence
  Description of Artificial Sequence: Synthetic oligonucleotide
uaaagcgcuguuagagcac

SEQ ID NO: 996056 - RNA, 19 nt, Artificial Sequence
  Description of Artificial Sequence: Synthetic oligonucleotide
uggcuacucuagcagccgg

SEQ ID NO: 996057 - RNA, 19 nt, Artificial Sequence
  Description of Artificial Sequence: Synthetic oligonucleotide
uguugucaugagaauguua

SEQ ID NO: 996058 - RNA, 19 nt, Artificial Sequence
  Description of Artificial Sequence: Synthetic oligonucleotide
uugcgcacgccgaaggucu

SEQ ID NO: 996059 - RNA, 19 nt, Artificial Sequence
  Description of Artificial Sequence: Synthetic oligonucleotide
aucucgaagggauaagcua

SEQ ID NO: 996060 - RNA, 19 nt, Artificial Sequence
  Description of Artificial Sequence: Synthetic oligonucleotide
gaguagggcuugcugcgcg

SEQ ID NO: 996061 - RNA, 19 nt, Artificial Sequence
  Description of Artificial Sequence: Synthetic oligonucleotide
cuuuccucacccugugccc

SEQ ID NO: 996062 - RNA, 19 nt, Artificial Sequence
  Description of Artificial Sequence: Synthetic oligonucleotide
ucuagcagccggucuuucc

SEQ ID NO: 996063 - RNA, 19 nt, Artificial Sequence
  Description of Artificial Sequence: Synthetic oligonucleotide
agcuuuucucgcauuccgc

SEQ ID NO: 996064 - RNA, 19 nt, Artificial Sequence
  Description of Artificial Sequence: Synthetic oligonucleotide
ucagaacggagcauuugua

SEQ ID NO: 996065 - RNA, 19 nt, Artificial Sequence
  Description of Artificial Sequence: Synthetic oligonucleotide
uccgcgcacucauagggcc

SEQ ID NO: 996066 - RNA, 19 nt, Artificial Sequence
  Description of Artificial Sequence: Synthetic oligonucleotide
ucaugagaauguuacccuu

SEQ ID NO: 996067 - RNA, 19 nt, Artificial Sequence
  Description of Artificial Sequence: Synthetic oligonucleotide
ucgaagggauaagcuaagg

SEQ ID NO: 996068 - RNA, 19 nt, Artificial Sequence
  Description of Artificial Sequence: Synthetic oligonucleotide
agaauucccuuugcacggc

SEQ ID NO: 996069 - RNA, 19 nt, Artificial Sequence
  Description of Artificial Sequence: Synthetic oligonucleotide
uacugcgauccccggaagc

SEQ ID NO: 996070 - RNA, 19 nt, Artificial Sequence
  Description of Artificial Sequence: Synthetic oligonucleotide
ugaucaacauugggaaaga

SEQ ID NO: 996071 - RNA, 19 nt, Artificial Sequence
  Description of Artificial Sequence: Synthetic oligonucleotide
ugguggcuacucuagcagc

SEQ ID NO: 996072 - RNA, 19 nt, Artificial Sequence
  Description of Artificial Sequence: Synthetic oligonucleotide
cucgaagggauaagcuaag

SEQ ID NO: 996073 - RNA, 19 nt, Artificial Sequence
  Description of Artificial Sequence: Synthetic oligonucleotide
gagaccgacagagguaggc

SEQ ID NO: 996074 - RNA, 19 nt, Artificial Sequence
  Description of Artificial Sequence: Synthetic oligonucleotide
cacgccgaaggucuugccg

SEQ ID NO: 996075 - RNA, 19 nt, Artificial Sequence
  Description of Artificial Sequence: Synthetic oligonucleotide
uacuccggcaccgccaaag

SEQ ID NO: 996076 - RNA, 19 nt, Artificial Sequence
  Description of Artificial Sequence: Synthetic oligonucleotide
uuagagggguuuugagacu

SEQ ID NO: 996077 - RNA, 19 nt, Artificial Sequence
  Description of Artificial Sequence: Synthetic oligonucleotide
cuguuagagcacgaggcag

SEQ ID NO: 996078 - RNA, 19 nt, Artificial Sequence
  Description of Artificial Sequence: Synthetic oligonucleotide
gaucagaacggagcauuug

SEQ ID NO: 996079 - RNA, 19 nt, Artificial Sequence
  Description of Artificial Sequence: Synthetic oligonucleotide
ggagcgaugcaccaacaug

SEQ ID NO: 996080 - RNA, 19 nt, Artificial Sequence
  Description of Artificial Sequence: Synthetic oligonucleotide
gaaauggagacuggcccac

SEQ ID NO: 996081 - RNA, 19 nt, Artificial Sequence
  Description of Artificial Sequence: Synthetic oligonucleotide
uuugggcgcuucccaaggc

SEQ ID NO: 996082 - RNA, 19 nt, Artificial Sequence
  Description of Artificial Sequence: Synthetic oligonucleotide
caucuaucucaccuguguc

SEQ ID NO: 996083 - RNA, 19 nt, Artificial Sequence
  Description of Artificial Sequence: Synthetic oligonucleotide
cuugguggcuacucuagca

SEQ ID NO: 996084 - RNA, 19 nt, Artificial Sequence
  Description of Artificial Sequence: Synthetic oligonucleotide
cucuugcgcacgccgaagg

SEQ ID NO: 996085 - RNA, 19 nt, Artificial Sequence
  Description of Artificial Sequence: Synthetic oligonucleotide
uagagggguuuugagacuc

SEQ ID NO: 996086 - RNA, 19 nt, Artificial Sequence
  Description of Artificial Sequence: Synthetic oligonucleotide
guuggaucacauuuccuua

SEQ ID NO: 996087 - RNA, 19 nt, Artificial Sequence
  Description of Artificial Sequence: Synthetic oligonucleotide
agaguagggcuugcugcgc

SEQ ID NO: 996088 - RNA, 19 nt, Artificial Sequence
  Description of Artificial Sequence: Synthetic oligonucleotide
uuccgcgcacucauagggc

SEQ ID NO: 996089 - RNA, 19 nt, Artificial Sequence
  Description of Artificial Sequence: Synthetic oligonucleotide
aacaucuaucucaccugug

SEQ ID NO: 996090 - RNA, 19 nt, Artificial Sequence
  Description of Artificial Sequence: Synthetic oligonucleotide
ggcaguugaagcuuuucuc

SEQ ID NO: 996091 - RNA, 19 nt, Artificial Sequence
  Description of Artificial Sequence: Synthetic oligonucleotide
ugaucagaacggagcauuu

SEQ ID NO: 996092 - RNA, 19 nt, Artificial Sequence
  Description of Artificial Sequence: Synthetic oligonucleotide
aaaggcggugccguggaau

SEQ ID NO: 996093 - RNA, 19 nt, Artificial Sequence
  Description of Artificial Sequence: Synthetic oligonucleotide
agauagcaccaacugggau

SEQ ID NO: 996094 - RNA, 19 nt, Artificial Sequence
  Description of Artificial Sequence: Synthetic oligonucleotide
ucuugcgcacgccgaaggu

SEQ ID NO: 996095 - RNA, 19 nt, Artificial Sequence
  Description of Artificial Sequence: Synthetic oligonucleotide
acaaaggcggugccgugga

SEQ ID NO: 996096 - RNA, 19 nt, Artificial Sequence
  Description of Artificial Sequence: Synthetic oligonucleotide
uguucucacuuggucuugc

SEQ ID NO: 996097 - RNA, 19 nt, Artificial Sequence
  Description of Artificial Sequence: Synthetic oligonucleotide
ugagaccgacagagguagg

SEQ ID NO: 996098 - RNA, 19 nt, Artificial Sequence
  Description of Artificial Sequence: Synthetic oligonucleotide
guuacccuuagcacauccc

SEQ ID NO: 996099 - RNA, 19 nt, Artificial Sequence
  Description of Artificial Sequence: Synthetic oligonucleotide
gugcggcucagccacacug

SEQ ID NO: 996100 - RNA, 19 nt, Artificial Sequence
  Description of Artificial Sequence: Synthetic oligonucleotide
uuccccgccgggcugaguc

SEQ ID NO: 996101 - RNA, 19 nt, Artificial Sequence
  Description of Artificial Sequence: Synthetic oligonucleotide
uggggcaugccaccccacc

SEQ ID NO: 996102 - RNA, 19 nt, Artificial Sequence
  Description of Artificial Sequence: Synthetic oligonucleotide
cuaccauaucaggaaaauc

SEQ ID NO: 996103 - RNA, 19 nt, Artificial Sequence
  Description of Artificial Sequence: Synthetic oligonucleotide
cacaaaggcggugccgugg

SEQ ID NO: 996104 - RNA, 19 nt, Artificial Sequence
  Description of Artificial Sequence: Synthetic oligonucleotide
ugcgucaucugguggcgga

SEQ ID NO: 996105 - RNA, 19 nt, Artificial Sequence
  Description of Artificial Sequence: Synthetic oligonucleotide
agggccguucaccacggug

SEQ ID NO: 996106 - RNA, 19 nt, Artificial Sequence
  Description of Artificial Sequence: Synthetic oligonucleotide
agccguggagcgaugcacc

SEQ ID NO: 996107 - RNA, 19 nt, Artificial Sequence
  Description of Artificial Sequence: Synthetic oligonucleotide
uggagcgaugcaccaacau

SEQ ID NO: 996108 - RNA, 19 nt, Artificial Sequence
  Description of Artificial Sequence: Synthetic oligonucleotide
ccgggaagaagaaaacaag

SEQ ID NO: 996109 - RNA, 19 nt, Artificial Sequence
  Description of Artificial Sequence: Synthetic oligonucleotide
gucugaggaaagcggagca

SEQ ID NO: 996110 - RNA, 19 nt, Artificial Sequence
  Description of Artificial Sequence: Synthetic oligonucleotide
guaaccccaggaguugucc

SEQ ID NO: 996111 - RNA, 19 nt, Artificial Sequence
  Description of Artificial Sequence: Synthetic oligonucleotide
uggaucacauuuccuuauu

SEQ ID NO: 996112 - RNA, 19 nt, Artificial Sequence
  Description of Artificial Sequence: Synthetic oligonucleotide
cgcgccgugaguaaggagg

SEQ ID NO: 996113 - RNA, 19 nt, Artificial Sequence
  Description of Artificial Sequence: Synthetic oligonucleotide
auucccuuugcacggcaaa

SEQ ID NO: 996114 - RNA, 19 nt, Artificial Sequence
  Description of Artificial Sequence: Synthetic oligonucleotide
aagcggagcagcacagaug

SEQ ID NO: 996115 - RNA, 19 nt, Artificial Sequence
  Description of Artificial Sequence: Synthetic oligonucleotide
cuugcacccgcaccgccgc

SEQ ID NO: 996116 - RNA, 19 nt, Artificial Sequence
  Description of Artificial Sequence: Synthetic oligonucleotide
uccuuauuuuagagggguu

SEQ ID NO: 996117 - RNA, 19 nt, Artificial Sequence
  Description of Artificial Sequence: Synthetic oligonucleotide
auagggccguuccuuggug

SEQ ID NO: 996118 - RNA, 19 nt, Artificial Sequence
  Description of Artificial Sequence: Synthetic oligonucleotide
cgcuguuagagcacgaggc

SEQ ID NO: 996119 - RNA, 19 nt, Artificial Sequence
  Description of Artificial Sequence: Synthetic oligonucleotide
uuucucgcauuccgcgcac

SEQ ID NO: 996120 - RNA, 19 nt, Artificial Sequence
  Description of Artificial Sequence: Synthetic oligonucleotide
cagccaaucaauuacccau

SEQ ID NO: 996121 - RNA, 19 nt, Artificial Sequence
  Description of Artificial Sequence: Synthetic oligonucleotide
acaagccuagacauuuaca

SEQ ID NO: 996122 - RNA, 19 nt, Artificial Sequence
  Description of Artificial Sequence: Synthetic oligonucleotide
guuagagcacgaggcagug

SEQ ID NO: 996123 - RNA, 19 nt, Artificial Sequence
  Description of Artificial Sequence: Synthetic oligonucleotide
gucugagaccgacagaggu

SEQ ID NO: 996124 - RNA, 19 nt, Artificial Sequence
  Description of Artificial Sequence: Synthetic oligonucleotide
gagggguuuugagacuccc

SEQ ID NO: 996125 - RNA, 19 nt, Artificial Sequence
  Description of Artificial Sequence: Synthetic oligonucleotide
acgagccuucccaagaaca

SEQ ID NO: 996126 - RNA, 19 nt, Artificial Sequence
  Description of Artificial Sequence: Synthetic oligonucleotide
gacgagccuucccaagaac

SEQ ID NO: 996127 - RNA, 19 nt, Artificial Sequence
  Description of Artificial Sequence: Synthetic oligonucleotide
caugagaauguuacccuua

SEQ ID NO: 996128 - RNA, 19 nt, Artificial Sequence
  Description of Artificial Sequence: Synthetic oligonucleotide
agcgcuguuagagcacgag

SEQ ID NO: 996129 - RNA, 19 nt, Artificial Sequence
  Description of Artificial Sequence: Synthetic oligonucleotide
ucucgcauuccgcgcacuc

SEQ ID NO: 996130 - RNA, 19 nt, Artificial Sequence
  Description of Artificial Sequence: Synthetic oligonucleotide
acuugcacccgcaccgccg

SEQ ID NO: 996131 - RNA, 19 nt, Artificial Sequence
  Description of Artificial Sequence: Synthetic oligonucleotide
ucucccugaucagaacgga

SEQ ID NO: 996132 - RNA, 19 nt, Artificial Sequence
  Description of Artificial Sequence: Synthetic oligonucleotide
ccaaucaauuacccauucc

SEQ ID NO: 996133 - RNA, 19 nt, Artificial Sequence
  Description of Artificial Sequence: Synthetic oligonucleotide
cuuagcacaucccucaguu

SEQ ID NO: 996134 - RNA, 19 nt, Artificial Sequence
  Description of Artificial Sequence: Synthetic oligonucleotide
cgaugcaccaacaugaaaa

SEQ ID NO: 996135 - RNA, 19 nt, Artificial Sequence
  Description of Artificial Sequence: Synthetic oligonucleotide
ucacaaaggcggugccgug

SEQ ID NO: 996136 - RNA, 19 nt, Artificial Sequence
  Description of Artificial Sequence: Synthetic oligonucleotide
gaauucccuuugcacggca

SEQ ID NO: 996137 - RNA, 19 nt, Artificial Sequence
  Description of Artificial Sequence: Synthetic oligonucleotide
agacgagccuucccaagaa

SEQ ID NO: 996138 - RNA, 19 nt, Artificial Sequence
  Description of Artificial Sequence: Synthetic oligonucleotide
accuaucucgaagggauaa

SEQ ID NO: 996139 - RNA, 19 nt, Artificial Sequence
  Description of Artificial Sequence: Synthetic oligonucleotide
guggcuacucuagcagccg

SEQ ID NO: 996140 - RNA, 19 nt, Artificial Sequence
  Description of Artificial Sequence: Synthetic oligonucleotide
ucaccuuagguuggaucac

SEQ ID NO: 996141 - RNA, 19 nt, Artificial Sequence
  Description of Artificial Sequence: Synthetic oligonucleotide
uuagcacaucccucaguuu

SEQ ID NO: 996142 - RNA, 19 nt, Artificial Sequence
  Description of Artificial Sequence: Synthetic oligonucleotide
guaaaucaucagggugagg

SEQ ID NO: 996143 - RNA, 19 nt, Artificial Sequence
  Description of Artificial Sequence: Synthetic oligonucleotide
agcuaaggguguaaauaga

SEQ ID NO: 996144 - RNA, 19 nt, Artificial Sequence
  Description of Artificial Sequence: Synthetic oligonucleotide
cacggugcgucaucuggug

SEQ ID NO: 996145 - RNA, 19 nt, Artificial Sequence
  Description of Artificial Sequence: Synthetic oligonucleotide
uggucuugcuaaacaucua

SEQ ID NO: 996146 - RNA, 19 nt, Artificial Sequence
  Description of Artificial Sequence: Synthetic oligonucleotide
aggguuacuccggcaccgc

SEQ ID NO: 996147 - RNA, 19 nt, Artificial Sequence
  Description of Artificial Sequence: Synthetic oligonucleotide
ccuggugcggcucagccac

SEQ ID NO: 996148 - RNA, 19 nt, Artificial Sequence
  Description of Artificial Sequence: Synthetic oligonucleotide
agaccgacagagguaggca

SEQ ID NO: 996149 - RNA, 19 nt, Artificial Sequence
  Description of Artificial Sequence: Synthetic oligonucleotide
gugaguaaggaggcuccgc

SEQ ID NO: 996150 - RNA, 19 nt, Artificial Sequence
  Description of Artificial Sequence: Synthetic oligonucleotide
gguggcuacucuagcagcc

SEQ ID NO: 996151 - RNA, 19 nt, Artificial Sequence
  Description of Artificial Sequence: Synthetic oligonucleotide
guuacuccggcaccgccaa

SEQ ID NO: 996152 - RNA, 19 nt, Artificial Sequence
  Description of Artificial Sequence: Synthetic oligonucleotide
guagggcuugcugcgcgcg

SEQ ID NO: 996153 - RNA, 19 nt, Artificial Sequence
  Description of Artificial Sequence: Synthetic oligonucleotide
ucaccacggugcgucaucu

SEQ ID NO: 996154 - RNA, 19 nt, Artificial Sequence
  Description of Artificial Sequence: Synthetic oligonucleotide
uagggcuugcugcgcgcgc

SEQ ID NO: 996155 - RNA, 19 nt, Artificial Sequence
  Description of Artificial Sequence: Synthetic oligonucleotide
gcuguuagagcacgaggca

SEQ ID NO: 996156 - RNA, 19 nt, Artificial Sequence
  Description of Artificial Sequence: Synthetic oligonucleotide
acuacccgcaccagcgcag

SEQ ID NO: 996157 - RNA, 19 nt, Artificial Sequence
  Description of Artificial Sequence: Synthetic oligonucleotide
gcuaaacaucuaucucacc

SEQ ID NO: 996158 - RNA, 19 nt, Artificial Sequence
  Description of Artificial Sequence: Synthetic oligonucleotide
aguuaacagauagcaccaa

SEQ ID NO: 996159 - RNA, 19 nt, Artificial Sequence
  Description of Artificial Sequence: Synthetic oligonucleotide
uuagagcacgaggcagugu

SEQ ID NO: 996160 - RNA, 19 nt, Artificial Sequence
  Description of Artificial Sequence: Synthetic oligonucleotide
guacugcgauccccggaag

SEQ ID NO: 996161 - RNA, 19 nt, Artificial Sequence
  Description of Artificial Sequence: Synthetic oligonucleotide
cucacuuggucuugcuaaa

SEQ ID NO: 996162 - RNA, 19 nt, Artificial Sequence
  Description of Artificial Sequence: Synthetic oligonucleotide
ccgugaguaaggaggcucc

SEQ ID NO: 996163 - RNA, 19 nt, Artificial Sequence
  Description of Artificial Sequence: Synthetic oligonucleotide
augcugaaauggagacugg

SEQ ID NO: 996164 - RNA, 19 nt, Artificial Sequence
  Description of Artificial Sequence: Synthetic oligonucleotide
ggucuugcuaaacaucuau

SEQ ID NO: 996165 - RNA, 19 nt, Artificial Sequence
  Description of Artificial Sequence: Synthetic oligonucleotide
ucaucagggugaggucuga

SEQ ID NO: 996166 - RNA, 19 nt, Artificial Sequence
  Description of Artificial Sequence: Synthetic oligonucleotide
caaggcgccugcaggguca

SEQ ID NO: 996167 - RNA, 19 nt, Artificial Sequence
  Description of Artificial Sequence: Synthetic oligonucleotide
accacaagaggagcaggaa

SEQ ID NO: 996168 - RNA, 19 nt, Artificial Sequence
  Description of Artificial Sequence: Synthetic oligonucleotide
gggcaugccaccccacccc

SEQ ID NO: 996169 - RNA, 19 nt, Artificial Sequence
  Description of Artificial Sequence: Synthetic oligonucleotide
gcccgcacugccuuccccg

SEQ ID NO: 996170 - RNA, 19 nt, Artificial Sequence
  Description of Artificial Sequence: Synthetic oligonucleotide
ugcgcgcgccgugaguaag

SEQ ID NO: 996171 - RNA, 19 nt, Artificial Sequence
  Description of Artificial Sequence: Synthetic oligonucleotide
accgacagagguaggcagu

SEQ ID NO: 996172 - RNA, 19 nt, Artificial Sequence
  Description of Artificial Sequence: Synthetic oligonucleotide
ggggcaugccaccccaccc

SEQ ID NO: 996173 - RNA, 19 nt, Artificial Sequence
  Description of Artificial Sequence: Synthetic oligonucleotide
cugcgauccccggaagcgc

SEQ ID NO: 996174 - RNA, 19 nt, Artificial Sequence
  Description of Artificial Sequence: Synthetic oligonucleotide
gagacucccuguucacucu

SEQ ID NO: 996175 - RNA, 19 nt, Artificial Sequence
  Description of Artificial Sequence: Synthetic oligonucleotide
gcacaaucaguuaacagau

SEQ ID NO: 996176 - RNA, 19 nt, Artificial Sequence
  Description of Artificial Sequence: Synthetic oligonucleotide
aaggcgccugcagggucag

SEQ ID NO: 996177 - RNA, 19 nt, Artificial Sequence
  Description of Artificial Sequence: Synthetic oligonucleotide
uacccgcaccagcgcagcc

SEQ ID NO: 996178 - RNA, 19 nt, Artificial Sequence
  Description of Artificial Sequence: Synthetic oligonucleotide
ccucaccuuagguuggauc

SEQ ID NO: 996179 - RNA, 19 nt, Artificial Sequence
  Description of Artificial Sequence: Synthetic oligonucleotide
cuacccgcaccagcgcagc

SEQ ID NO: 996180 - RNA, 19 nt, Artificial Sequence
  Description of Artificial Sequence: Synthetic oligonucleotide
cuguacugcgauccccgga

SEQ ID NO: 996181 - RNA, 19 nt, Artificial Sequence
  Description of Artificial Sequence: Synthetic oligonucleotide
cacaaucaguuaacagaua

SEQ ID NO: 996182 - RNA, 19 nt, Artificial Sequence
  Description of Artificial Sequence: Synthetic oligonucleotide
ugcacccgcaccgccgcca

SEQ ID NO: 996183 - RNA, 19 nt, Artificial Sequence
  Description of Artificial Sequence: Synthetic oligonucleotide
gccgggcugagucucgccc

SEQ ID NO: 996184 - RNA, 19 nt, Artificial Sequence
  Description of Artificial Sequence: Synthetic oligonucleotide
cguggagcgaugcaccaac

SEQ ID NO: 996185 - RNA, 19 nt, Artificial Sequence
  Description of Artificial Sequence: Synthetic oligonucleotide
cucccuggccgggaagaag

SEQ ID NO: 996186 - RNA, 19 nt, Artificial Sequence
  Description of Artificial Sequence: Synthetic oligonucleotide
accuuagguuggaucacau

SEQ ID NO: 996187 - RNA, 19 nt, Artificial Sequence
  Description of Artificial Sequence: Synthetic oligonucleotide
ggguuacuccggcaccgcc

SEQ ID NO: 996188 - RNA, 19 nt, Artificial Sequence
  Description of Artificial Sequence: Synthetic oligonucleotide
cugaucagaacggagcauu

SEQ ID NO: 996189 - RNA, 19 nt, Artificial Sequence
  Description of Artificial Sequence: Synthetic oligonucleotide
ccuaucucgaagggauaag

SEQ ID NO: 996190 - RNA, 19 nt, Artificial Sequence
  Description of Artificial Sequence: Synthetic oligonucleotide
gguuacuccggcaccgcca

SEQ ID NO: 996191 - RNA, 19 nt, Artificial Sequence
  Description of Artificial Sequence: Synthetic oligonucleotide
agcgaugcaccaacaugaa

SEQ ID NO: 996192 - RNA, 19 nt, Artificial Sequence
  Description of Artificial Sequence: Synthetic oligonucleotide
uggugcggcucagccacac

SEQ ID NO: 996193 - RNA, 19 nt, Artificial Sequence
  Description of Artificial Sequence: Synthetic oligonucleotide
cacccgcacccgcacuugc

SEQ ID NO: 996194 - RNA, 19 nt, Artificial Sequence
  Description of Artificial Sequence: Synthetic oligonucleotide
caccuuagguuggaucaca

SEQ ID NO: 996195 - RNA, 19 nt, Artificial Sequence
  Description of Artificial Sequence: Synthetic oligonucleotide
cccggaagcgcagggaagc

SEQ ID NO: 996196 - RNA, 19 nt, Artificial Sequence
  Description of Artificial Sequence: Synthetic oligonucleotide
cauagggccguuccuuggu

SEQ ID NO: 996197 - RNA, 19 nt, Artificial Sequence
  Description of Artificial Sequence: Synthetic oligonucleotide
aagcgcuguuagagcacga

SEQ ID NO: 996198 - RNA, 19 nt, Artificial Sequence
  Description of Artificial Sequence: Synthetic oligonucleotide
gccgugaguaaggaggcuc

SEQ ID NO: 996199 - RNA, 19 nt, Artificial Sequence
  Description of Artificial Sequence: Synthetic oligonucleotide
cucgcauuccgcgcacuca

SEQ ID NO: 996200 - RNA, 19 nt, Artificial Sequence
  Description of Artificial Sequence: Synthetic oligonucleotide
cuugcugcgcgcgccguga

SEQ ID NO: 996201 - RNA, 19 nt, Artificial Sequence
  Description of Artificial Sequence: Synthetic oligonucleotide
uucucgcauuccgcgcacu

SEQ ID NO: 996202 - RNA, 19 nt, Artificial Sequence
  Description of Artificial Sequence: Synthetic oligonucleotide
ccaccuaucucgaagggau

SEQ ID NO: 996203 - RNA, 19 nt, Artificial Sequence
  Description of Artificial Sequence: Synthetic oligonucleotide
ugaggccggaguggcaguu

SEQ ID NO: 996204 - RNA, 19 nt, Artificial Sequence
  Description of Artificial Sequence: Synthetic oligonucleotide
uuacuccggcaccgccaaa

SEQ ID NO: 996205 - RNA, 19 nt, Artificial Sequence
  Description of Artificial Sequence: Synthetic oligonucleotide
gccgccaggguuacuccgg

SEQ ID NO: 996206 - RNA, 19 nt, Artificial Sequence
  Description of Artificial Sequence: Synthetic oligonucleotide
ggauaagcuaaggguguaa

SEQ ID NO: 996207 - RNA, 19 nt, Artificial Sequence
  Description of Artificial Sequence: Synthetic oligonucleotide
gggccuggccuuaacugug

SEQ ID NO: 996208 - RNA, 19 nt, Artificial Sequence
  Description of Artificial Sequence: Synthetic oligonucleotide
gaagcgcagggaagccguc

SEQ ID NO: 996209 - RNA, 19 nt, Artificial Sequence
  Description of Artificial Sequence: Synthetic oligonucleotide
uccccgccgggcugagucu

SEQ ID NO: 996210 - RNA, 19 nt, Artificial Sequence
  Description of Artificial Sequence: Synthetic oligonucleotide
cacugccuuccccgccggg

SEQ ID NO: 996211 - RNA, 19 nt, Artificial Sequence
  Description of Artificial Sequence: Synthetic oligonucleotide
auccccggaagcgcaggga

SEQ ID NO: 996212 - RNA, 19 nt, Artificial Sequence
  Description of Artificial Sequence: Synthetic oligonucleotide
ccguucaccacggugcguc

SEQ ID NO: 996213 - RNA, 19 nt, Artificial Sequence
  Description of Artificial Sequence: Synthetic oligonucleotide
ccccguugcuucugagagg

SEQ ID NO: 996214 - RNA, 19 nt, Artificial Sequence
  Description of Artificial Sequence: Synthetic oligonucleotide
ggccguuccuugguguggc

SEQ ID NO: 996215 - RNA, 19 nt, Artificial Sequence
  Description of Artificial Sequence: Synthetic oligonucleotide
ggccuuaacugugcaguga

SEQ ID NO: 996216 - RNA, 19 nt, Artificial Sequence
  Description of Artificial Sequence: Synthetic oligonucleotide
ccgcgcacucauagggccg

SEQ ID NO: 996217 - RNA, 19 nt, Artificial Sequence
  Description of Artificial Sequence: Synthetic oligonucleotide
gcgccgugaguaaggaggc

SEQ ID NO: 996218 - RNA, 19 nt, Artificial Sequence
  Description of Artificial Sequence: Synthetic oligonucleotide
ggcaugccaccccacccca

SEQ ID NO: 996219 - RNA, 19 nt, Artificial Sequence
  Description of Artificial Sequence: Synthetic oligonucleotide
uagggccguucaccacggu

SEQ ID NO: 996220 - RNA, 19 nt, Artificial Sequence
  Description of Artificial Sequence: Synthetic oligonucleotide
cccuuagcacaucccucag

SEQ ID NO: 996221 - RNA, 19 nt, Artificial Sequence
  Description of Artificial Sequence: Synthetic oligonucleotide
cugacgccgccaggguuac

SEQ ID NO: 996222 - RNA, 19 nt, Artificial Sequence
  Description of Artificial Sequence: Synthetic oligonucleotide
caccuaucucgaagggaua

SEQ ID NO: 996223 - RNA, 19 nt, Artificial Sequence
  Description of Artificial Sequence: Synthetic oligonucleotide
guggagcgaugcaccaaca

SEQ ID NO: 996224 - RNA, 19 nt, Artificial Sequence
  Description of Artificial Sequence: Synthetic oligonucleotide
ccuaccccaccuaucucga

SEQ ID NO: 996225 - RNA, 19 nt, Artificial Sequence
  Description of Artificial Sequence: Synthetic oligonucleotide
gcgaugcaccaacaugaaa

SEQ ID NO: 996226 - RNA, 19 nt, Artificial Sequence
  Description of Artificial Sequence: Synthetic oligonucleotide
gccguggaaugcuggccac

SEQ ID NO: 996227 - RNA, 19 nt, Artificial Sequence
  Description of Artificial Sequence: Synthetic oligonucleotide
ccugacgccgccaggguua

SEQ ID NO: 996228 - RNA, 19 nt, Artificial Sequence
  Description of Artificial Sequence: Synthetic oligonucleotide
ggagcauuuguagggccgu

SEQ ID NO: 996229 - RNA, 19 nt, Artificial Sequence
  Description of Artificial Sequence: Synthetic oligonucleotide
cuaccccaccuaucucgaa

SEQ ID NO: 996230 - RNA, 19 nt, Artificial Sequence
  Description of Artificial Sequence: Synthetic oligonucleotide
gggauaagcuaagggugua

SEQ ID NO: 996231 - RNA, 19 nt, Artificial Sequence
  Description of Artificial Sequence: Synthetic oligonucleotide
ccuuauuuuagagggguuu

SEQ ID NO: 996232 - RNA, 19 nt, Artificial Sequence
  Description of Artificial Sequence: Synthetic oligonucleotide
gcacgccgaaggucuugcc

SEQ ID NO: 996233 - RNA, 19 nt, Artificial Sequence
  Description of Artificial Sequence: Synthetic oligonucleotide
ggaguggcaguugaagcuu

SEQ ID NO: 996234 - RNA, 19 nt, Artificial Sequence
  Description of Artificial Sequence: Synthetic oligonucleotide
ccguuccuugguguggcug

SEQ ID NO: 996235 - RNA, 19 nt, Artificial Sequence
  Description of Artificial Sequence: Synthetic oligonucleotide
ccgccaggguuacuccggc

SEQ ID NO: 996236 - RNA, 19 nt, Artificial Sequence
  Description of Artificial Sequence: Synthetic oligonucleotide
cgccgccaggguuacuccg

SEQ ID NO: 996237 - RNA, 19 nt, Artificial Sequence
  Description of Artificial Sequence: Synthetic oligonucleotide
gcgcgcgccgugaguaagg

SEQ ID NO: 996238 - RNA, 19 nt, Artificial Sequence
  Description of Artificial Sequence: Synthetic oligonucleotide
acccgcacuugcacccgca

SEQ ID NO: 996239 - RNA, 19 nt, Artificial Sequence
  Description of Artificial Sequence: Synthetic oligonucleotide
gcgcgccgugaguaaggag

SEQ ID NO: 996240 - RNA, 19 nt, Artificial Sequence
  Description of Artificial Sequence: Synthetic oligonucleotide
cccaccuaucucgaaggga

SEQ ID NO: 996241 - RNA, 19 nt, Artificial Sequence
  Description of Artificial Sequence: Synthetic oligonucleotide
ccguggaaugcuggccacc

SEQ ID NO: 996242 - RNA, 19 nt, Artificial Sequence
  Description of Artificial Sequence: Synthetic oligonucleotide
gcugcgcgcgccgugagua

SEQ ID NO: 996243 - RNA, 19 nt, Artificial Sequence
  Description of Artificial Sequence: Synthetic oligonucleotide
ccggaagcgcagggaagcc

SEQ ID NO: 996244 - RNA, 19 nt, Artificial Sequence
  Description of Artificial Sequence: Synthetic oligonucleotide
caaaggcggugccguggaa

SEQ ID NO: 996245 - RNA, 19 nt, Artificial Sequence
  Description of Artificial Sequence: Synthetic oligonucleotide
cgaauagaaaacacuccuu

SEQ ID NO: 996246 - RNA, 19 nt, Artificial Sequence
  Description of Artificial Sequence: Synthetic oligonucleotide
caccgcccgcacugccuuc

SEQ ID NO: 996247 - RNA, 19 nt, Artificial Sequence
  Description of Artificial Sequence: Synthetic oligonucleotide
cuggugcggcucagccaca

SEQ ID NO: 996248 - RNA, 19 nt, Artificial Sequence
  Description of Artificial Sequence: Synthetic oligonucleotide
cgcacgccgaaggucuugc

SEQ ID NO: 996249 - RNA, 19 nt, Artificial Sequence
  Description of Artificial Sequence: Synthetic oligonucleotide
cccgccgggcugagucucg

SEQ ID NO: 996250 - RNA, 19 nt, Artificial Sequence
  Description of Artificial Sequence: Synthetic oligonucleotide
ggcggugccguggaaugcu

SEQ ID NO: 996251 - RNA, 19 nt, Artificial Sequence
  Description of Artificial Sequence: Synthetic oligonucleotide
cugcgcgcgccgugaguaa

SEQ ID NO: 996252 - RNA, 19 nt, Artificial Sequence
  Description of Artificial Sequence: Synthetic oligonucleotide
ccgcaccgccgccacuacc

SEQ ID NO: 996253 - RNA, 19 nt, Artificial Sequence
  Description of Artificial Sequence: Synthetic oligonucleotide
gccaugcaagaugcugaaa

SEQ ID NO: 996254 - RNA, 19 nt, Artificial Sequence
  Description of Artificial Sequence: Synthetic oligonucleotide
cacuuuccucagcuaccau

SEQ ID NO: 996255 - RNA, 19 nt, Artificial Sequence
  Description of Artificial Sequence: Synthetic oligonucleotide
ugacgccgccaggguuacu

SEQ ID NO: 996256 - RNA, 19 nt, Artificial Sequence
  Description of Artificial Sequence: Synthetic oligonucleotide
gcgcacgccgaaggucuug

SEQ ID NO: 996257 - RNA, 19 nt, Artificial Sequence
  Description of Artificial Sequence: Synthetic oligonucleotide
ccaaagccgucaggcucug

SEQ ID NO: 996258 - RNA, 19 nt, Artificial Sequence
  Description of Artificial Sequence: Synthetic oligonucleotide
ccuuagguuggaucacauu

SEQ ID NO: 996259 - RNA, 19 nt, Artificial Sequence
  Description of Artificial Sequence: Synthetic oligonucleotide
gcaugccaccccaccccac

SEQ ID NO: 996260 - RNA, 19 nt, Artificial Sequence
  Description of Artificial Sequence: Synthetic oligonucleotide
gccggucuuuccucacccu

SEQ ID NO: 996261 - RNA, 19 nt, Artificial Sequence
  Description of Artificial Sequence: Synthetic oligonucleotide
ggcgcuucccaaggcgccu

SEQ ID NO: 996262 - RNA, 19 nt, Artificial Sequence
  Description of Artificial Sequence: Synthetic oligonucleotide
ccuggccgggaagaagaaa

SEQ ID NO: 996263 - RNA, 19 nt, Artificial Sequence
  Description of Artificial Sequence: Synthetic oligonucleotide
cccuggccgggaagaagaa

SEQ ID NO: 996264 - RNA, 19 nt, Artificial Sequence
  Description of Artificial Sequence: Synthetic oligonucleotide
cccgcaccgccgccacuac

SEQ ID NO: 996265 - RNA, 19 nt, Artificial Sequence
  Description of Artificial Sequence: Synthetic oligonucleotide
ccgccaaagccgucaggcu

SEQ ID NO: 996266 - RNA, 19 nt, Artificial Sequence
  Description of Artificial Sequence: Synthetic oligonucleotide
ggccggaguggcaguugaa

SEQ ID NO: 996267 - RNA, 19 nt, Artificial Sequence
  Description of Artificial Sequence: Synthetic oligonucleotide
ccccgccgggcugagucuc

SEQ ID NO: 996268 - RNA, 19 nt, Artificial Sequence
  Description of Artificial Sequence: Synthetic oligonucleotide
ccguggagcgaugcaccaa

SEQ ID NO: 996269 - RNA, 19 nt, Artificial Sequence
  Description of Artificial Sequence: Synthetic oligonucleotide
gcgucaucugguggcggau

SEQ ID NO: 996270 - RNA, 19 nt, Artificial Sequence
  Description of Artificial Sequence: Synthetic oligonucleotide
cgcgcgccgugaguaagga

SEQ ID NO: 996271 - RNA, 19 nt, Artificial Sequence
  Description of Artificial Sequence: Synthetic oligonucleotide
gccguucaccacggugcgu

SEQ ID NO: 996272 - RNA, 19 nt, Artificial Sequence
  Description of Artificial Sequence: Synthetic oligonucleotide
cccugacgccgccaggguu

SEQ ID NO: 996273 - RNA, 19 nt, Artificial Sequence
  Description of Artificial Sequence: Synthetic oligonucleotide
cuuccccgccgggcugagu

SEQ ID NO: 996274 - RNA, 19 nt, Artificial Sequence
  Description of Artificial Sequence: Synthetic oligonucleotide
ccccugacgccgccagggu

SEQ ID NO: 996275 - RNA, 19 nt, Artificial Sequence
  Description of Artificial Sequence: Synthetic oligonucleotide
cgcgcacucauagggccgu

SEQ ID NO: 996276 - RNA, 19 nt, Artificial Sequence
  Description of Artificial Sequence: Synthetic oligonucleotide
cgcacccgcacccgcacuu

SEQ ID NO: 996277 - RNA, 19 nt, Artificial Sequence
  Description of Artificial Sequence: Synthetic oligonucleotide
ccguugcuucugagaggau

SEQ ID NO: 996278 - RNA, 19 nt, Artificial Sequence
  Description of Artificial Sequence: Synthetic oligonucleotide
aauaaaggggacaagaugc

SEQ ID NO: 996279 - RNA, 19 nt, Artificial Sequence
  Description of Artificial Sequence: Synthetic oligonucleotide
gacaagaugccccagaugc

SEQ ID NO: 996280 - RNA, 19 nt, Artificial Sequence
  Description of Artificial Sequence: Synthetic oligonucleotide
ugcagaaucaacuucauuc

SEQ ID NO: 996281 - RNA, 19 nt, Artificial Sequence
  Description of Artificial Sequence: Synthetic oligonucleotide
agacacgucaaccaggggc

SEQ ID NO: 996282 - RNA, 19 nt, Artificial Sequence
  Description of Artificial Sequence: Synthetic oligonucleotide
acaaaauccucguuuggcc

SEQ ID NO: 996283 - RNA, 19 nt, Artificial Sequence
  Description of Artificial Sequence: Synthetic oligonucleotide
ugaacaaugagcuugucau

SEQ ID NO: 996284 - RNA, 19 nt, Artificial Sequence
  Description of Artificial Sequence: Synthetic oligonucleotide
ucaaggucagagaagauga

SEQ ID NO: 996285 - RNA, 19 nt, Artificial Sequence
  Description of Artificial Sequence: Synthetic oligonucleotide
aggcacgucgaauacaucc

SEQ ID NO: 996286 - RNA, 19 nt, Artificial Sequence
  Description of Artificial Sequence: Synthetic oligonucleotide
aagaguugcugaaugaugg

SEQ ID NO: 996287 - RNA, 19 nt, Artificial Sequence
  Description of Artificial Sequence: Synthetic oligonucleotide
gaugcauugcuucagagga

SEQ ID NO: 996288 - RNA, 19 nt, Artificial Sequence
  Description of Artificial Sequence: Synthetic oligonucleotide
ugaaugauggugcagccug

SEQ ID NO: 996289 - RNA, 19 nt, Artificial Sequence
  Description of Artificial Sequence: Synthetic oligonucleotide
aagaagaugccucugcgca

SEQ ID NO: 996290 - RNA, 19 nt, Artificial Sequence
  Description of Artificial Sequence: Synthetic oligonucleotide
cuagcuauaguccaccggc

SEQ ID NO: 996291 - RNA, 19 nt, Artificial Sequence
  Description of Artificial Sequence: Synthetic oligonucleotide
uucucuauucgguuuauca

SEQ ID NO: 996292 - RNA, 19 nt, Artificial Sequence
  Description of Artificial Sequence: Synthetic oligonucleotide
ugcuuguucaccuugcucu

SEQ ID NO: 996293 - RNA, 19 nt, Artificial Sequence
  Description of Artificial Sequence: Synthetic oligonucleotide
ucucuauucgguuuaucag

SEQ ID NO: 996294 - RNA, 19 nt, Artificial Sequence
  Description of Artificial Sequence: Synthetic oligonucleotide
uguacagauaaaauggcuu

SEQ ID NO: 996295 - RNA, 19 nt, Artificial Sequence
  Description of Artificial Sequence: Synthetic oligonucleotide
uugauucauaucucugugg

SEQ ID NO: 996296 - RNA, 19 nt, Artificial Sequence
  Description of Artificial Sequence: Synthetic oligonucleotide
cugugggagaagaagaugc

SEQ ID NO: 996297 - RNA, 19 nt, Artificial Sequence
  Description of Artificial Sequence: Synthetic oligonucleotide
cucuauucgguuuaucagc

SEQ ID NO: 996298 - RNA, 19 nt, Artificial Sequence
  Description of Artificial Sequence: Synthetic oligonucleotide
uuucuuggagggcagucgg

SEQ ID NO: 996299 - RNA, 19 nt, Artificial Sequence
  Description of Artificial Sequence: Synthetic oligonucleotide
ucauagucgaugccuuucg

SEQ ID NO: 996300 - RNA, 19 nt, Artificial Sequence
  Description of Artificial Sequence: Synthetic oligonucleotide
ucuagcuauaguccaccgg

SEQ ID NO: 996301 - RNA, 19 nt, Artificial Sequence
  Description of Artificial Sequence: Synthetic oligonucleotide
ucagagaagaugaaaguuu

SEQ ID NO: 996302 - RNA, 19 nt, Artificial Sequence
  Description of Artificial Sequence: Synthetic oligonucleotide
ucuaugagugucuucuuga

SEQ ID NO: 996303 - RNA, 19 nt, Artificial Sequence
  Description of Artificial Sequence: Synthetic oligonucleotide
ucccucgucauucugaagu

SEQ ID NO: 996304 - RNA, 19 nt, Artificial Sequence
  Description of Artificial Sequence: Synthetic oligonucleotide
ucuauucgguuuaucagcu

SEQ ID NO: 996305 - RNA, 19 nt, Artificial Sequence
  Description of Artificial Sequence: Synthetic oligonucleotide
acugaaaguggaaugacag

SEQ ID NO: 996306 - RNA, 19 nt, Artificial Sequence
  Description of Artificial Sequence: Synthetic oligonucleotide
ucgucauucugaaguaagg

SEQ ID NO: 996307 - RNA, 19 nt, Artificial Sequence
  Description of Artificial Sequence: Synthetic oligonucleotide
gaauacauccugcagccac

SEQ ID NO: 996308 - RNA, 19 nt, Artificial Sequence
  Description of Artificial Sequence: Synthetic oligonucleotide
aucuucgggaaagaguugc

SEQ ID NO: 996309 - RNA, 19 nt, Artificial Sequence
  Description of Artificial Sequence: Synthetic oligonucleotide
cauaaacucaaggucagag

SEQ ID NO: 996310 - RNA, 19 nt, Artificial Sequence
  Description of Artificial Sequence: Synthetic oligonucleotide
uuucguaggcaucaaggac

SEQ ID NO: 996311 - RNA, 19 nt, Artificial Sequence
  Description of Artificial Sequence: Synthetic oligonucleotide
agaacacucaugaguagcc

SEQ ID NO: 996312 - RNA, 19 nt, Artificial Sequence
  Description of Artificial Sequence: Synthetic oligonucleotide
ugggaugaggcacuggaug

SEQ ID NO: 996313 - RNA, 19 nt, Artificial Sequence
  Description of Artificial Sequence: Synthetic oligonucleotide
uucacuugguugaacguga

SEQ ID NO: 996314 - RNA, 19 nt, Artificial Sequence
  Description of Artificial Sequence: Synthetic oligonucleotide
uccugucuagcuauagucc

SEQ ID NO: 996315 - RNA, 19 nt, Artificial Sequence
  Description of Artificial Sequence: Synthetic oligonucleotide
aaaguuuuguugaugucga

SEQ ID NO: 996316 - RNA, 19 nt, Artificial Sequence
  Description of Artificial Sequence: Synthetic oligonucleotide
uauuuucguaggcaucaag

SEQ ID NO: 996317 - RNA, 19 nt, Artificial Sequence
  Description of Artificial Sequence: Synthetic oligonucleotide
agucaugaacuccuucacg

SEQ ID NO: 996318 - RNA, 19 nt, Artificial Sequence
  Description of Artificial Sequence: Synthetic oligonucleotide
uugaacagcuccagugggg

SEQ ID NO: 996319 - RNA, 19 nt, Artificial Sequence
  Description of Artificial Sequence: Synthetic oligonucleotide
gaaaacgcgugcuuguuca

SEQ ID NO: 996320 - RNA, 19 nt, Artificial Sequence
  Description of Artificial Sequence: Synthetic oligonucleotide
aacagaacacucaugagua

SEQ ID NO: 996321 - RNA, 19 nt, Artificial Sequence
  Description of Artificial Sequence: Synthetic oligonucleotide
gaagaagaugccucugcgc

SEQ ID NO: 996322 - RNA, 19 nt, Artificial Sequence
  Description of Artificial Sequence: Synthetic oligonucleotide
uggugcucggcgaucaggg

SEQ ID NO: 996323 - RNA, 19 nt, Artificial Sequence
  Description of Artificial Sequence: Synthetic oligonucleotide
cauucuuguagaagccugg

SEQ ID NO: 996324 - RNA, 19 nt, Artificial Sequence
  Description of Artificial Sequence: Synthetic oligonucleotide
ugccccauaaacucaaggu

SEQ ID NO: 996325 - RNA, 19 nt, Artificial Sequence
  Description of Artificial Sequence: Synthetic oligonucleotide
auaaaggggacaagaugcc

SEQ ID NO: 996326 - RNA, 19 nt, Artificial Sequence
  Description of Artificial Sequence: Synthetic oligonucleotide
agugaugcaagaacagaac

SEQ ID NO: 996327 - RNA, 19 nt, Artificial Sequence
  Description of Artificial Sequence: Synthetic oligonucleotide
aaacgcgugcuuguucacc

SEQ ID NO: 996328 - RNA, 19 nt, Artificial Sequence
  Description of Artificial Sequence: Synthetic oligonucleotide
guacagauaaaauggcuuc

SEQ ID NO: 996329 - RNA, 19 nt, Artificial Sequence
  Description of Artificial Sequence: Synthetic oligonucleotide
uuucacuugguugaacgug

SEQ ID NO: 996330 - RNA, 19 nt, Artificial Sequence
  Description of Artificial Sequence: Synthetic oligonucleotide
ucaucgucagacaucugga

SEQ ID NO: 996331 - RNA, 19 nt, Artificial Sequence
  Description of Artificial Sequence: Synthetic oligonucleotide
uccacuucacaguugcccc

SEQ ID NO: 996332 - RNA, 19 nt, Artificial Sequence
  Description of Artificial Sequence: Synthetic oligonucleotide
aaaacgcgugcuuguucac

SEQ ID NO: 996333 - RNA, 19 nt, Artificial Sequence
  Description of Artificial Sequence: Synthetic oligonucleotide
agaaaacgcgugcuuguuc

SEQ ID NO: 996334 - RNA, 19 nt, Artificial Sequence
  Description of Artificial Sequence: Synthetic oligonucleotide
cucguuuggccuuuguggc

SEQ ID NO: 996335 - RNA, 19 nt, Artificial Sequence
  Description of Artificial Sequence: Synthetic oligonucleotide
uuguugaugucgaaaccac

SEQ ID NO: 996336 - RNA, 19 nt, Artificial Sequence
  Description of Artificial Sequence: Synthetic oligonucleotide
ucacuggcacucaucuugg

SEQ ID NO: 996337 - RNA, 19 nt, Artificial Sequence
  Description of Artificial Sequence: Synthetic oligonucleotide
gaaggucgagugcagcagg

SEQ ID NO: 996338 - RNA, 19 nt, Artificial Sequence
  Description of Artificial Sequence: Synthetic oligonucleotide
uagucgaugccuuucgcac

SEQ ID NO: 996339 - RNA, 19 nt, Artificial Sequence
  Description of Artificial Sequence: Synthetic oligonucleotide
cucgucauucugaaguaag

SEQ ID NO: 996340 - RNA, 19 nt, Artificial Sequence
  Description of Artificial Sequence: Synthetic oligonucleotide
aucuaugagugucuucuug

SEQ ID NO: 996341 - RNA, 19 nt, Artificial Sequence
  Description of Artificial Sequence: Synthetic oligonucleotide
aacgcgugcuuguucaccu

SEQ ID NO: 996342 - RNA, 19 nt, Artificial Sequence
  Description of Artificial Sequence: Synthetic oligonucleotide
agguacaugaaggacacgu

SEQ ID NO: 996343 - RNA, 19 nt, Artificial Sequence
  Description of Artificial Sequence: Synthetic oligonucleotide
cacaaaauccucguuuggc

SEQ ID NO: 996344 - RNA, 19 nt, Artificial Sequence
  Description of Artificial Sequence: Synthetic oligonucleotide
ugcuuguccgcacugucca

SEQ ID NO: 996345 - RNA, 19 nt, Artificial Sequence
  Description of Artificial Sequence: Synthetic oligonucleotide
uguugaugucgaaaccaca

SEQ ID NO: 996346 - RNA, 19 nt, Artificial Sequence
  Description of Artificial Sequence: Synthetic oligonucleotide
cuaugagugucuucuugag

SEQ ID NO: 996347 - RNA, 19 nt, Artificial Sequence
  Description of Artificial Sequence: Synthetic oligonucleotide
caugaguagccuuggugcc

SEQ ID NO: 996348 - RNA, 19 nt, Artificial Sequence
  Description of Artificial Sequence: Synthetic oligonucleotide
ucgccacuggacauguccg

SEQ ID NO: 996349 - RNA, 19 nt, Artificial Sequence
  Description of Artificial Sequence: Synthetic oligonucleotide
ucacgguuuccucagugac

SEQ ID NO: 996350 - RNA, 19 nt, Artificial Sequence
  Description of Artificial Sequence: Synthetic oligonucleotide
auagucgaugccuuucgca

SEQ ID NO: 996351 - RNA, 19 nt, Artificial Sequence
  Description of Artificial Sequence: Synthetic oligonucleotide
agaucuucgggaaagaguu

SEQ ID NO: 996352 - RNA, 19 nt, Artificial Sequence
  Description of Artificial Sequence: Synthetic oligonucleotide
uugaacgugacgugcuucu

SEQ ID NO: 996353 - RNA, 19 nt, Artificial Sequence
  Description of Artificial Sequence: Synthetic oligonucleotide
cuuucgcacugcuuguccg

SEQ ID NO: 996354 - RNA, 19 nt, Artificial Sequence
  Description of Artificial Sequence: Synthetic oligonucleotide
ugaucuucccaaugcaguc

SEQ ID NO: 996355 - RNA, 19 nt, Artificial Sequence
  Description of Artificial Sequence: Synthetic oligonucleotide
cucaaggucagagaagaug

SEQ ID NO: 996356 - RNA, 19 nt, Artificial Sequence
  Description of Artificial Sequence: Synthetic oligonucleotide
gaagaucuucgggaaagag

SEQ ID NO: 996357 - RNA, 19 nt, Artificial Sequence
  Description of Artificial Sequence: Synthetic oligonucleotide
uccccagugagcauggcuc

SEQ ID NO: 996358 - RNA, 19 nt, Artificial Sequence
  Description of Artificial Sequence: Synthetic oligonucleotide
aauggcgcaugggaugagg

SEQ ID NO: 996359 - RNA, 19 nt, Artificial Sequence
  Description of Artificial Sequence: Synthetic oligonucleotide
aacgugacgugcuucugaa

SEQ ID NO: 996360 - RNA, 19 nt, Artificial Sequence
  Description of Artificial Sequence: Synthetic oligonucleotide
cuagugagcagauguguuc

SEQ ID NO: 996361 - RNA, 19 nt, Artificial Sequence
  Description of Artificial Sequence: Synthetic oligonucleotide
aacacucaugaguagccuu

SEQ ID NO: 996362 - RNA, 19 nt, Artificial Sequence
  Description of Artificial Sequence: Synthetic oligonucleotide
uugguugaacgugacgugc

SEQ ID NO: 996363 - RNA, 19 nt, Artificial Sequence
  Description of Artificial Sequence: Synthetic oligonucleotide
gugaugcaagaacagaaca

SEQ ID NO: 996364 - RNA, 19 nt, Artificial Sequence
  Description of Artificial Sequence: Synthetic oligonucleotide
ccuuucacuugguugaacg

SEQ ID NO: 996365 - RNA, 19 nt, Artificial Sequence
  Description of Artificial Sequence: Synthetic oligonucleotide
aaggacacguccacuucac

SEQ ID NO: 996366 - RNA, 19 nt, Artificial Sequence
  Description of Artificial Sequence: Synthetic oligonucleotide
gucaauggcgcaugggaug

SEQ ID NO: 996367 - RNA, 19 nt, Artificial Sequence
  Description of Artificial Sequence: Synthetic oligonucleotide
ucacuauugcucccagcug

SEQ ID NO: 996368 - RNA, 19 nt, Artificial Sequence
  Description of Artificial Sequence: Synthetic oligonucleotide
uccucguuuggccuuugug

SEQ ID NO: 996369 - RNA, 19 nt, Artificial Sequence
  Description of Artificial Sequence: Synthetic oligonucleotide
uacagauaaaauggcuucu

SEQ ID NO: 996370 - RNA, 19 nt, Artificial Sequence
  Description of Artificial Sequence: Synthetic oligonucleotide
ccucguuuggccuuugugg

SEQ ID NO: 996371 - RNA, 19 nt, Artificial Sequence
  Description of Artificial Sequence: Synthetic oligonucleotide
cugucucggaagaucuucg

SEQ ID NO: 996372 - RNA, 19 nt, Artificial Sequence
  Description of Artificial Sequence: Synthetic oligonucleotide
ugagauucggcuucugcuu

SEQ ID NO: 996373 - RNA, 19 nt, Artificial Sequence
  Description of Artificial Sequence: Synthetic oligonucleotide
cagaacacucaugaguagc

SEQ ID NO: 996374 - RNA, 19 nt, Artificial Sequence
  Description of Artificial Sequence: Synthetic oligonucleotide
uucacgguuuccucaguga

SEQ ID NO: 996375 - RNA, 19 nt, Artificial Sequence
  Description of Artificial Sequence: Synthetic oligonucleotide
ugucuagcuauaguccacc

SEQ ID NO: 996376 - RNA, 19 nt, Artificial Sequence
  Description of Artificial Sequence: Synthetic oligonucleotide
ugguguaauccuuucggau

SEQ ID NO: 996377 - RNA, 19 nt, Artificial Sequence
  Description of Artificial Sequence: Synthetic oligonucleotide
gagucaugaacuccuucac

SEQ ID NO: 996378 - RNA, 19 nt, Artificial Sequence
  Description of Artificial Sequence: Synthetic oligonucleotide
gaugcaagaacagaacacu

SEQ ID NO: 996379 - RNA, 19 nt, Artificial Sequence
  Description of Artificial Sequence: Synthetic oligonucleotide
uuguccgcacuguccaagg

SEQ ID NO: 996380 - RNA, 19 nt, Artificial Sequence
  Description of Artificial Sequence: Synthetic oligonucleotide
uccacggugucucuuccac

SEQ ID NO: 996381 - RNA, 19 nt, Artificial Sequence
  Description of Artificial Sequence: Synthetic oligonucleotide
uagcuauaguccaccggcc

SEQ ID NO: 996382 - RNA, 19 nt, Artificial Sequence
  Description of Artificial Sequence: Synthetic oligonucleotide
cauggcagcuuuauagcuc

SEQ ID NO: 996383 - RNA, 19 nt, Artificial Sequence
  Description of Artificial Sequence: Synthetic oligonucleotide
gaugucgaaaccacaggca

SEQ ID NO: 996384 - RNA, 19 nt, Artificial Sequence
  Description of Artificial Sequence: Synthetic oligonucleotide
guggaaugacagcugccgg

SEQ ID NO: 996385 - RNA, 19 nt, Artificial Sequence
  Description of Artificial Sequence: Synthetic oligonucleotide
uccgcacuguccaaggguc

SEQ ID NO: 996386 - RNA, 19 nt, Artificial Sequence
  Description of Artificial Sequence: Synthetic oligonucleotide
uuucgcacugcuuguccgc

SEQ ID NO: 996387 - RNA, 19 nt, Artificial Sequence
  Description of Artificial Sequence: Synthetic oligonucleotide
caaguccuuccacagguac

SEQ ID NO: 996388 - RNA, 19 nt, Artificial Sequence
  Description of Artificial Sequence: Synthetic oligonucleotide
guaggcaucaaggacuuga

SEQ ID NO: 996389 - RNA, 19 nt, Artificial Sequence
  Description of Artificial Sequence: Synthetic oligonucleotide
ugguugaacgugacgugcu

SEQ ID NO: 996390 - RNA, 19 nt, Artificial Sequence
  Description of Artificial Sequence: Synthetic oligonucleotide
cacgucgaauacauccugc

SEQ ID NO: 996391 - RNA, 19 nt, Artificial Sequence
  Description of Artificial Sequence: Synthetic oligonucleotide
acgguuuccucagugaccu

SEQ ID NO: 996392 - RNA, 19 nt, Artificial Sequence
  Description of Artificial Sequence: Synthetic oligonucleotide
aggacuugauucauaucuc

SEQ ID NO: 996393 - RNA, 19 nt, Artificial Sequence
  Description of Artificial Sequence: Synthetic oligonucleotide
acuucagucaagugucaaa

SEQ ID NO: 996394 - RNA, 19 nt, Artificial Sequence
  Description of Artificial Sequence: Synthetic oligonucleotide
cacgguuuccucagugacc

SEQ ID NO: 996395 - RNA, 19 nt, Artificial Sequence
  Description of Artificial Sequence: Synthetic oligonucleotide
aaguaaggguccuggucaa

SEQ ID NO: 996396 - RNA, 19 nt, Artificial Sequence
  Description of Artificial Sequence: Synthetic oligonucleotide
gucuagcuauaguccaccg

SEQ ID NO: 996397 - RNA, 19 nt, Artificial Sequence
  Description of Artificial Sequence: Synthetic oligonucleotide
uugcuacacauggucagcc

SEQ ID NO: 996398 - RNA, 19 nt, Artificial Sequence
  Description of Artificial Sequence: Synthetic oligonucleotide
ucagcucuuugucaauuuu

SEQ ID NO: 996399 - RNA, 19 nt, Artificial Sequence
  Description of Artificial Sequence: Synthetic oligonucleotide
uucggaucuguuccagccu

SEQ ID NO: 996400 - RNA, 19 nt, Artificial Sequence
  Description of Artificial Sequence: Synthetic oligonucleotide
caguagcuuucucuauucg

SEQ ID NO: 996401 - RNA, 19 nt, Artificial Sequence
  Description of Artificial Sequence: Synthetic oligonucleotide
gaucacuauugcucccagc

SEQ ID NO: 996402 - RNA, 19 nt, Artificial Sequence
  Description of Artificial Sequence: Synthetic oligonucleotide
accggccugggguacggcc

SEQ ID NO: 996403 - RNA, 19 nt, Artificial Sequence
  Description of Artificial Sequence: Synthetic oligonucleotide
uggaugaccagaggcacgu

SEQ ID NO: 996404 - RNA, 19 nt, Artificial Sequence
  Description of Artificial Sequence: Synthetic oligonucleotide
uuccaccagaaaacgcgug

SEQ ID NO: 996405 - RNA, 19 nt, Artificial Sequence
  Description of Artificial Sequence: Synthetic oligonucleotide
uguagcuguaugccugcuc

SEQ ID NO: 996406 - RNA, 19 nt, Artificial Sequence
  Description of Artificial Sequence: Synthetic oligonucleotide
ucauaucucugugggagaa

SEQ ID NO: 996407 - RNA, 19 nt, Artificial Sequence
  Description of Artificial Sequence: Synthetic oligonucleotide
cuggaugaccagaggcacg

SEQ ID NO: 996408 - RNA, 19 nt, Artificial Sequence
  Description of Artificial Sequence: Synthetic oligonucleotide
ugcuacacauggucagccc

SEQ ID NO: 996409 - RNA, 19 nt, Artificial Sequence
  Description of Artificial Sequence: Synthetic oligonucleotide
ucuucgggaaagaguugcu

SEQ ID NO: 996410 - RNA, 19 nt, Artificial Sequence
  Description of Artificial Sequence: Synthetic oligonucleotide
cauagucgaugccuuucgc

SEQ ID NO: 996411 - RNA, 19 nt, Artificial Sequence
  Description of Artificial Sequence: Synthetic oligonucleotide
ucgagugcagcagggcagg

SEQ ID NO: 996412 - RNA, 19 nt, Artificial Sequence
  Description of Artificial Sequence: Synthetic oligonucleotide
uggaucacuauugcuccca

SEQ ID NO: 996413 - RNA, 19 nt, Artificial Sequence
  Description of Artificial Sequence: Synthetic oligonucleotide
gaacgugacgugcuucuga

SEQ ID NO: 996414 - RNA, 19 nt, Artificial Sequence
  Description of Artificial Sequence: Synthetic oligonucleotide
gguuuaggguagccgaucc

SEQ ID NO: 996415 - RNA, 19 nt, Artificial Sequence
  Description of Artificial Sequence: Synthetic oligonucleotide
ggcgaucaggggcugaagg

SEQ ID NO: 996416 - RNA, 19 nt, Artificial Sequence
  Description of Artificial Sequence: Synthetic oligonucleotide
cuugcuacacauggucagc

SEQ ID NO: 996417 - RNA, 19 nt, Artificial Sequence
  Description of Artificial Sequence: Synthetic oligonucleotide
guugcugaaugauggugca

SEQ ID NO: 996418 - RNA, 19 nt, Artificial Sequence
  Description of Artificial Sequence: Synthetic oligonucleotide
gaaucaacuucauucuuuu

SEQ ID NO: 996419 - RNA, 19 nt, Artificial Sequence
  Description of Artificial Sequence: Synthetic oligonucleotide
caaccaggggcuuucccug

SEQ ID NO: 996420 - RNA, 19 nt, Artificial Sequence
  Description of Artificial Sequence: Synthetic oligonucleotide
uccguccugucucggaaga

SEQ ID NO: 996421 - RNA, 19 nt, Artificial Sequence
  Description of Artificial Sequence: Synthetic oligonucleotide
ugggguacggccagcgcac

SEQ ID NO: 996422 - RNA, 19 nt, Artificial Sequence
  Description of Artificial Sequence: Synthetic oligonucleotide
uucuuggagggcagucggc

SEQ ID NO: 996423 - RNA, 19 nt, Artificial Sequence
  Description of Artificial Sequence: Synthetic oligonucleotide
ggggcuuucccugagauuc

SEQ ID NO: 996424 - RNA, 19 nt, Artificial Sequence
  Description of Artificial Sequence: Synthetic oligonucleotide
gugcucggcgaucaggggc

SEQ ID NO: 996425 - RNA, 19 nt, Artificial Sequence
  Description of Artificial Sequence: Synthetic oligonucleotide
uugagcagcuaugcuguug

SEQ ID NO: 996426 - RNA, 19 nt, Artificial Sequence
  Description of Artificial Sequence: Synthetic oligonucleotide
cacgagcuccccuugagca

SEQ ID NO: 996427 - RNA, 19 nt, Artificial Sequence
  Description of Artificial Sequence: Synthetic oligonucleotide
cagucggccuuguaccucc

SEQ ID NO: 996428 - RNA, 19 nt, Artificial Sequence
  Description of Artificial Sequence: Synthetic oligonucleotide
agucgaugccuuucgcacu

SEQ ID NO: 996429 - RNA, 19 nt, Artificial Sequence
  Description of Artificial Sequence: Synthetic oligonucleotide
cugucuagcuauaguccac

SEQ ID NO: 996430 - RNA, 19 nt, Artificial Sequence
  Description of Artificial Sequence: Synthetic oligonucleotide
gaccuaggccuuccucugg

SEQ ID NO: 996431 - RNA, 19 nt, Artificial Sequence
  Description of Artificial Sequence: Synthetic oligonucleotide
ugcccguguacagauaaaa

SEQ ID NO: 996432 - RNA, 19 nt, Artificial Sequence
  Description of Artificial Sequence: Synthetic oligonucleotide
agguuuaggguagccgauc

SEQ ID NO: 996433 - RNA, 19 nt, Artificial Sequence
  Description of Artificial Sequence: Synthetic oligonucleotide
ggcaucuggaucacuauug

SEQ ID NO: 996434 - RNA, 19 nt, Artificial Sequence
  Description of Artificial Sequence: Synthetic oligonucleotide
ucugccccauaaacucaag

SEQ ID NO: 996435 - RNA, 19 nt, Artificial Sequence
  Description of Artificial Sequence: Synthetic oligonucleotide
agauucggcuucugcuuug

SEQ ID NO: 996436 - RNA, 19 nt, Artificial Sequence
  Description of Artificial Sequence: Synthetic oligonucleotide
gcagguuuaggguagccga

SEQ ID NO: 996437 - RNA, 19 nt, Artificial Sequence
  Description of Artificial Sequence: Synthetic oligonucleotide
agaggcacgucgaauacau

SEQ ID NO: 996438 - RNA, 19 nt, Artificial Sequence
  Description of Artificial Sequence: Synthetic oligonucleotide
cuuguccgcacuguccaag

SEQ ID NO: 996439 - RNA, 19 nt, Artificial Sequence
  Description of Artificial Sequence: Synthetic oligonucleotide
guagcuuucucuauucggu

SEQ ID NO: 996440 - RNA, 19 nt, Artificial Sequence
  Description of Artificial Sequence: Synthetic oligonucleotide
ucugagugguggcuugcua

SEQ ID NO: 996441 - RNA, 19 nt, Artificial Sequence
  Description of Artificial Sequence: Synthetic oligonucleotide
uagcuuucucuauucgguu

SEQ ID NO: 996442 - RNA, 19 nt, Artificial Sequence
  Description of Artificial Sequence: Synthetic oligonucleotide
gucaagugucaaaacaaaa

SEQ ID NO: 996443 - RNA, 19 nt, Artificial Sequence
  Description of Artificial Sequence: Synthetic oligonucleotide
caaggacuugauucauauc

SEQ ID NO: 996444 - RNA, 19 nt, Artificial Sequence
  Description of Artificial Sequence: Synthetic oligonucleotide
cugagauucggcuucugcu

SEQ ID NO: 996445 - RNA, 19 nt, Artificial Sequence
  Description of Artificial Sequence: Synthetic oligonucleotide
aaccaggggcuuucccuga

SEQ ID NO: 996446 - RNA, 19 nt, Artificial Sequence
  Description of Artificial Sequence: Synthetic oligonucleotide
agugaccuccuugcgucgg

SEQ ID NO: 996447 - RNA, 19 nt, Artificial Sequence
  Description of Artificial Sequence: Synthetic oligonucleotide
cugccggggagucaugaac

SEQ ID NO: 996448 - RNA, 19 nt, Artificial Sequence
  Description of Artificial Sequence: Synthetic oligonucleotide
aggguagccgauccuggga

SEQ ID NO: 996449 - RNA, 19 nt, Artificial Sequence
  Description of Artificial Sequence: Synthetic oligonucleotide
uccgcugguguaauccuuu

SEQ ID NO: 996450 - RNA, 19 nt, Artificial Sequence
  Description of Artificial Sequence: Synthetic oligonucleotide
cugguguaauccuuucgga

SEQ ID NO: 996451 - RNA, 19 nt, Artificial Sequence
  Description of Artificial Sequence: Synthetic oligonucleotide
gccccauaaacucaagguc

SEQ ID NO: 996452 - RNA, 19 nt, Artificial Sequence
  Description of Artificial Sequence: Synthetic oligonucleotide
ggacauguccgccaucuuc

SEQ ID NO: 996453 - RNA, 19 nt, Artificial Sequence
  Description of Artificial Sequence: Synthetic oligonucleotide
ggcagguuuaggguagccg

SEQ ID NO: 996454 - RNA, 19 nt, Artificial Sequence
  Description of Artificial Sequence: Synthetic oligonucleotide
gaucaggggcugaaggaca

SEQ ID NO: 996455 - RNA, 19 nt, Artificial Sequence
  Description of Artificial Sequence: Synthetic oligonucleotide
uuauuuucguaggcaucaa

SEQ ID NO: 996456 - RNA, 19 nt, Artificial Sequence
  Description of Artificial Sequence: Synthetic oligonucleotide
agugagcauggcuccgcug

SEQ ID NO: 996457 - RNA, 19 nt, Artificial Sequence
  Description of Artificial Sequence: Synthetic oligonucleotide
ugaccagaggcacgucgaa

SEQ ID NO: 996458 - RNA, 19 nt, Artificial Sequence
  Description of Artificial Sequence: Synthetic oligonucleotide
ccacauucuuguagaagcc

SEQ ID NO: 996459 - RNA, 19 nt, Artificial Sequence
  Description of Artificial Sequence: Synthetic oligonucleotide
caaaauccucguuuggccu

SEQ ID NO: 996460 - RNA, 19 nt, Artificial Sequence
  Description of Artificial Sequence: Synthetic oligonucleotide
gcuauaguccaccggccug

SEQ ID NO: 996461 - RNA, 19 nt, Artificial Sequence
  Description of Artificial Sequence: Synthetic oligonucleotide
gacacgucaaccaggggcu

SEQ ID NO: 996462 - RNA, 19 nt, Artificial Sequence
  Description of Artificial Sequence: Synthetic oligonucleotide
gaucuucgggaaagaguug

SEQ ID NO: 996463 - RNA, 19 nt, Artificial Sequence
  Description of Artificial Sequence: Synthetic oligonucleotide
gauguccguccugucucgg

SEQ ID NO: 996464 - RNA, 19 nt, Artificial Sequence
  Description of Artificial Sequence: Synthetic oligonucleotide
ugccuuucgcacugcuugu

SEQ ID NO: 996465 - RNA, 19 nt, Artificial Sequence
  Description of Artificial Sequence: Synthetic oligonucleotide
auaguccaccggccugggg

SEQ ID NO: 996466 - RNA, 19 nt, Artificial Sequence
  Description of Artificial Sequence: Synthetic oligonucleotide
cuauucgguuuaucagcuc

SEQ ID NO: 996467 - RNA, 19 nt, Artificial Sequence
  Description of Artificial Sequence: Synthetic oligonucleotide
cauaucucugugggagaag

SEQ ID NO: 996468 - RNA, 19 nt, Artificial Sequence
  Description of Artificial Sequence: Synthetic oligonucleotide
cucggaagaucuucgggaa

SEQ ID NO: 996469 - RNA, 19 nt, Artificial Sequence
  Description of Artificial Sequence: Synthetic oligonucleotide
acucaugaguagccuuggu

SEQ ID NO: 996470 - RNA, 19 nt, Artificial Sequence
  Description of Artificial Sequence: Synthetic oligonucleotide
ggagccacgucccucguca

SEQ ID NO: 996471 - RNA, 19 nt, Artificial Sequence
  Description of Artificial Sequence: Synthetic oligonucleotide
cugggguacggccagcgca

SEQ ID NO: 996472 - RNA, 19 nt, Artificial Sequence
  Description of Artificial Sequence: Synthetic oligonucleotide
gugcuuguucaccuugcuc

SEQ ID NO: 996473 - RNA, 19 nt, Artificial Sequence
  Description of Artificial Sequence: Synthetic oligonucleotide
uucgcacugcuuguccgca

SEQ ID NO: 996474 - RNA, 19 nt, Artificial Sequence
  Description of Artificial Sequence: Synthetic oligonucleotide
cuggugcucggcgaucagg

SEQ ID NO: 996475 - RNA, 19 nt, Artificial Sequence
  Description of Artificial Sequence: Synthetic oligonucleotide
agccgauccugggagccac

SEQ ID NO: 996476 - RNA, 19 nt, Artificial Sequence
  Description of Artificial Sequence: Synthetic oligonucleotide
guugaacgugacgugcuuc

SEQ ID NO: 996477 - RNA, 19 nt, Artificial Sequence
  Description of Artificial Sequence: Synthetic oligonucleotide
ggauguccguccugucucg

SEQ ID NO: 996478 - RNA, 19 nt, Artificial Sequence
  Description of Artificial Sequence: Synthetic oligonucleotide
gcuacacauggucagccca

SEQ ID NO: 996479 - RNA, 19 nt, Artificial Sequence
  Description of Artificial Sequence: Synthetic oligonucleotide
augccccagaugcauugcu

SEQ ID NO: 996480 - RNA, 19 nt, Artificial Sequence
  Description of Artificial Sequence: Synthetic oligonucleotide
cagugaccuccuugcgucg

SEQ ID NO: 996481 - RNA, 19 nt, Artificial Sequence
  Description of Artificial Sequence: Synthetic oligonucleotide
acugaacaaugagcuuguc

SEQ ID NO: 996482 - RNA, 19 nt, Artificial Sequence
  Description of Artificial Sequence: Synthetic oligonucleotide
ccaagacucugaguggugg

SEQ ID NO: 996483 - RNA, 19 nt, Artificial Sequence
  Description of Artificial Sequence: Synthetic oligonucleotide
cgugacgugcuucugaauc

SEQ ID NO: 996484 - RNA, 19 nt, Artificial Sequence
  Description of Artificial Sequence: Synthetic oligonucleotide
ggaucacuauugcucccag

SEQ ID NO: 996485 - RNA, 19 nt, Artificial Sequence
  Description of Artificial Sequence: Synthetic oligonucleotide
uucgguuuaucagcucuuu

SEQ ID NO: 996486 - RNA, 19 nt, Artificial Sequence
  Description of Artificial Sequence: Synthetic oligonucleotide
cuaugcuguugaacagcuc

SEQ ID NO: 996487 - RNA, 19 nt, Artificial Sequence
  Description of Artificial Sequence: Synthetic oligonucleotide
cagagaagaugaaaguuuu

SEQ ID NO: 996488 - RNA, 19 nt, Artificial Sequence
  Description of Artificial Sequence: Synthetic oligonucleotide
augcauugcuucagaggag

SEQ ID NO: 996489 - RNA, 19 nt, Artificial Sequence
  Description of Artificial Sequence: Synthetic oligonucleotide
acgugcuucugaaucuuca

SEQ ID NO: 996490 - RNA, 19 nt, Artificial Sequence
  Description of Artificial Sequence: Synthetic oligonucleotide
agggcagguuuaggguagc

SEQ ID NO: 996491 - RNA, 19 nt, Artificial Sequence
  Description of Artificial Sequence: Synthetic oligonucleotide
gugacgugcuucugaaucu

SEQ ID NO: 996492 - RNA, 19 nt, Artificial Sequence
  Description of Artificial Sequence: Synthetic oligonucleotide
ggcuccgcugguguaaucc

SEQ ID NO: 996493 - RNA, 19 nt, Artificial Sequence
  Description of Artificial Sequence: Synthetic oligonucleotide
ggacuugauucauaucucu

SEQ ID NO: 996494 - RNA, 19 nt, Artificial Sequence
  Description of Artificial Sequence: Synthetic oligonucleotide
ugacgugcuucugaaucuu

SEQ ID NO: 996495 - RNA, 19 nt, Artificial Sequence
  Description of Artificial Sequence: Synthetic oligonucleotide
ccuuucgcacugcuugucc

SEQ ID NO: 996496 - RNA, 19 nt, Artificial Sequence
  Description of Artificial Sequence: Synthetic oligonucleotide
cagacacgucaaccagggg

SEQ ID NO: 996497 - RNA, 19 nt, Artificial Sequence
  Description of Artificial Sequence: Synthetic oligonucleotide
gcacgucgaauacauccug

SEQ ID NO: 996498 - RNA, 19 nt, Artificial Sequence
  Description of Artificial Sequence: Synthetic oligonucleotide
cucugccccauaaacucaa

SEQ ID NO: 996499 - RNA, 19 nt, Artificial Sequence
  Description of Artificial Sequence: Synthetic oligonucleotide
gagugguggcuugcuacac

SEQ ID NO: 996500 - RNA, 19 nt, Artificial Sequence
  Description of Artificial Sequence: Synthetic oligonucleotide
gucagacaucuggaugacc

SEQ ID NO: 996501 - RNA, 19 nt, Artificial Sequence
  Description of Artificial Sequence: Synthetic oligonucleotide
cuuccaccagaaaacgcgu

SEQ ID NO: 996502 - RNA, 19 nt, Artificial Sequence
  Description of Artificial Sequence: Synthetic oligonucleotide
gguagccgauccugggagc

SEQ ID NO: 996503 - RNA, 19 nt, Artificial Sequence
  Description of Artificial Sequence: Synthetic oligonucleotide
uugcgucgggccuggugcu

SEQ ID NO: 996504 - RNA, 19 nt, Artificial Sequence
  Description of Artificial Sequence: Synthetic oligonucleotide
cagcgcacugucugugcug

SEQ ID NO: 996505 - RNA, 19 nt, Artificial Sequence
  Description of Artificial Sequence: Synthetic oligonucleotide
uccaccggccugggguacg

SEQ ID NO: 996506 - RNA, 19 nt, Artificial Sequence
  Description of Artificial Sequence: Synthetic oligonucleotide
cugcgcaggaagcggugug

SEQ ID NO: 996507 - RNA, 19 nt, Artificial Sequence
  Description of Artificial Sequence: Synthetic oligonucleotide
aguccaccggccuggggua

SEQ ID NO: 996508 - RNA, 19 nt, Artificial Sequence
  Description of Artificial Sequence: Synthetic oligonucleotide
gaacacucaugaguagccu

SEQ ID NO: 996509 - RNA, 19 nt, Artificial Sequence
  Description of Artificial Sequence: Synthetic oligonucleotide
gcgaucaggggcugaagga

SEQ ID NO: 996510 - RNA, 19 nt, Artificial Sequence
  Description of Artificial Sequence: Synthetic oligonucleotide
cagauguguucagcaguug

SEQ ID NO: 996511 - RNA, 19 nt, Artificial Sequence
  Description of Artificial Sequence: Synthetic oligonucleotide
caggagcacaauaaaguuu

SEQ ID NO: 996512 - RNA, 19 nt, Artificial Sequence
  Description of Artificial Sequence: Synthetic oligonucleotide
aauccucguuuggccuuug

SEQ ID NO: 996513 - RNA, 19 nt, Artificial Sequence
  Description of Artificial Sequence: Synthetic oligonucleotide
ucggcgaucaggggcugaa

SEQ ID NO: 996514 - RNA, 19 nt, Artificial Sequence
  Description of Artificial Sequence: Synthetic oligonucleotide
acgucccucgucauucuga

SEQ ID NO: 996515 - RNA, 19 nt, Artificial Sequence
  Description of Artificial Sequence: Synthetic oligonucleotide
auucgguuuaucagcucuu

SEQ ID NO: 996516 - RNA, 19 nt, Artificial Sequence
  Description of Artificial Sequence: Synthetic oligonucleotide
cggaagaucuucgggaaag

SEQ ID NO: 996517 - RNA, 19 nt, Artificial Sequence
  Description of Artificial Sequence: Synthetic oligonucleotide
gccccagaugcauugcuuc

SEQ ID NO: 996518 - RNA, 19 nt, Artificial Sequence
  Description of Artificial Sequence: Synthetic oligonucleotide
gcauugcuucagaggaggg

SEQ ID NO: 996519 - RNA, 19 nt, Artificial Sequence
  Description of Artificial Sequence: Synthetic oligonucleotide
gggagaagaagaugccucu

SEQ ID NO: 996520 - RNA, 19 nt, Artificial Sequence
  Description of Artificial Sequence: Synthetic oligonucleotide
guuuaggguagccgauccu

SEQ ID NO: 996521 - RNA, 19 nt, Artificial Sequence
  Description of Artificial Sequence: Synthetic oligonucleotide
agacucugagugguggcuu

SEQ ID NO: 996522 - RNA, 19 nt, Artificial Sequence
  Description of Artificial Sequence: Synthetic oligonucleotide
ucgcacugcuuguccgcac

SEQ ID NO: 996523 - RNA, 19 nt, Artificial Sequence
  Description of Artificial Sequence: Synthetic oligonucleotide
ccagaggcacgucgaauac

SEQ ID NO: 996524 - RNA, 19 nt, Artificial Sequence
  Description of Artificial Sequence: Synthetic oligonucleotide
guccgcacuguccaagggu

SEQ ID NO: 996525 - RNA, 19 nt, Artificial Sequence
  Description of Artificial Sequence: Synthetic oligonucleotide
cgucgaauacauccugcag

SEQ ID NO: 996526 - RNA, 19 nt, Artificial Sequence
  Description of Artificial Sequence: Synthetic oligonucleotide
auccucguuuggccuuugu

SEQ ID NO: 996527 - RNA, 19 nt, Artificial Sequence
  Description of Artificial Sequence: Synthetic oligonucleotide
uggcagcuuuauagcucgu

SEQ ID NO: 996528 - RNA, 19 nt, Artificial Sequence
  Description of Artificial Sequence: Synthetic oligonucleotide
cagcuuuauagcucguuuu

SEQ ID NO: 996529 - RNA, 19 nt, Artificial Sequence
  Description of Artificial Sequence: Synthetic oligonucleotide
uagccgauccugggagcca

SEQ ID NO: 996530 - RNA, 19 nt, Artificial Sequence
  Description of Artificial Sequence: Synthetic oligonucleotide
acgugacgugcuucugaau

SEQ ID NO: 996531 - RNA, 19 nt, Artificial Sequence
  Description of Artificial Sequence: Synthetic oligonucleotide
guacggccagcgcacuguc

SEQ ID NO: 996532 - RNA, 19 nt, Artificial Sequence
  Description of Artificial Sequence: Synthetic oligonucleotide
gaccucacgagcuccccuu

SEQ ID NO: 996533 - RNA, 19 nt, Artificial Sequence
  Description of Artificial Sequence: Synthetic oligonucleotide
cagaggcacgucgaauaca

SEQ ID NO: 996534 - RNA, 19 nt, Artificial Sequence
  Description of Artificial Sequence: Synthetic oligonucleotide
gggcuuucccugagauucg

SEQ ID NO: 996535 - RNA, 19 nt, Artificial Sequence
  Description of Artificial Sequence: Synthetic oligonucleotide
cacuucagucaagugucaa

SEQ ID NO: 996536 - RNA, 19 nt, Artificial Sequence
  Description of Artificial Sequence: Synthetic oligonucleotide
gcuaugcuguugaacagcu

SEQ ID NO: 996537 - RNA, 19 nt, Artificial Sequence
  Description of Artificial Sequence: Synthetic oligonucleotide
agccacgucccucgucauu

SEQ ID NO: 996538 - RNA, 19 nt, Artificial Sequence
  Description of Artificial Sequence: Synthetic oligonucleotide
ggggcugaaggacaucuau

SEQ ID NO: 996539 - RNA, 19 nt, Artificial Sequence
  Description of Artificial Sequence: Synthetic oligonucleotide
gaggcacgucgaauacauc

SEQ ID NO: 996540 - RNA, 19 nt, Artificial Sequence
  Description of Artificial Sequence: Synthetic oligonucleotide
ccagaugcauugcuucaga

SEQ ID NO: 996541 - RNA, 19 nt, Artificial Sequence
  Description of Artificial Sequence: Synthetic oligonucleotide
cgguuuaucagcucuuugu

SEQ ID NO: 996542 - RNA, 19 nt, Artificial Sequence
  Description of Artificial Sequence: Synthetic oligonucleotide
cacuggauguccguccugu

SEQ ID NO: 996543 - RNA, 19 nt, Artificial Sequence
  Description of Artificial Sequence: Synthetic oligonucleotide
ggcuagugagcagaugugu

SEQ ID NO: 996544 - RNA, 19 nt, Artificial Sequence
  Description of Artificial Sequence: Synthetic oligonucleotide
ggaucuguuccagccuguc

SEQ ID NO: 996545 - RNA, 19 nt, Artificial Sequence
  Description of Artificial Sequence: Synthetic oligonucleotide
gcgugcuuguucaccuugc

SEQ ID NO: 996546 - RNA, 19 nt, Artificial Sequence
  Description of Artificial Sequence: Synthetic oligonucleotide
cacuguccaaggguccaca

SEQ ID NO: 996547 - RNA, 19 nt, Artificial Sequence
  Description of Artificial Sequence: Synthetic oligonucleotide
ggggaggugcaggacucgc

SEQ ID NO: 996548 - RNA, 19 nt, Artificial Sequence
  Description of Artificial Sequence: Synthetic oligonucleotide
auggcuccgcugguguaau

SEQ ID NO: 996549 - RNA, 19 nt, Artificial Sequence
  Description of Artificial Sequence: Synthetic oligonucleotide
gcaggacucgccacuggac

SEQ ID NO: 996550 - RNA, 19 nt, Artificial Sequence
  Description of Artificial Sequence: Synthetic oligonucleotide
cagguuuaggguagccgau

SEQ ID NO: 996551 - RNA, 19 nt, Artificial Sequence
  Description of Artificial Sequence: Synthetic oligonucleotide
gcuggguuucuuggagggc

SEQ ID NO: 996552 - RNA, 19 nt, Artificial Sequence
  Description of Artificial Sequence: Synthetic oligonucleotide
gccugggguacggccagcg

SEQ ID NO: 996553 - RNA, 19 nt, Artificial Sequence
  Description of Artificial Sequence: Synthetic oligonucleotide
gacagcugccggggaguca

SEQ ID NO: 996554 - RNA, 19 nt, Artificial Sequence
  Description of Artificial Sequence: Synthetic oligonucleotide
ccggggagucaugaacucc

SEQ ID NO: 996555 - RNA, 19 nt, Artificial Sequence
  Description of Artificial Sequence: Synthetic oligonucleotide
ggcacgucgaauacauccu

SEQ ID NO: 996556 - RNA, 19 nt, Artificial Sequence
  Description of Artificial Sequence: Synthetic oligonucleotide
ccgcacuguccaagggucc

SEQ ID NO: 996557 - RNA, 19 nt, Artificial Sequence
  Description of Artificial Sequence: Synthetic oligonucleotide
ccagaaaacgcgugcuugu

SEQ ID NO: 996558 - RNA, 19 nt, Artificial Sequence
  Description of Artificial Sequence: Synthetic oligonucleotide
gucggccuuguaccuccuc

SEQ ID NO: 996559 - RNA, 19 nt, Artificial Sequence
  Description of Artificial Sequence: Synthetic oligonucleotide
ccuugcgucgggccuggug

SEQ ID NO: 996560 - RNA, 19 nt, Artificial Sequence
  Description of Artificial Sequence: Synthetic oligonucleotide
acgcgugcuuguucaccuu

SEQ ID NO: 996561 - RNA, 19 nt, Artificial Sequence
  Description of Artificial Sequence: Synthetic oligonucleotide
gccggggagucaugaacuc

SEQ ID NO: 996562 - RNA, 19 nt, Artificial Sequence
  Description of Artificial Sequence: Synthetic oligonucleotide
uggcuccgcugguguaauc

SEQ ID NO: 996563 - RNA, 19 nt, Artificial Sequence
  Description of Artificial Sequence: Synthetic oligonucleotide
gaccagaggcacgucgaau

SEQ ID NO: 996564 - RNA, 19 nt, Artificial Sequence
  Description of Artificial Sequence: Synthetic oligonucleotide
ggucaauggcgcaugggau

SEQ ID NO: 996565 - RNA, 19 nt, Artificial Sequence
  Description of Artificial Sequence: Synthetic oligonucleotide
gcgucgggccuggugcucg

SEQ ID NO: 996566 - RNA, 19 nt, Artificial Sequence
  Description of Artificial Sequence: Synthetic oligonucleotide
ccccagaugcauugcuuca

SEQ ID NO: 996567 - RNA, 19 nt, Artificial Sequence
  Description of Artificial Sequence: Synthetic oligonucleotide
gcucugccccauaaacuca

SEQ ID NO: 996568 - RNA, 19 nt, Artificial Sequence
  Description of Artificial Sequence: Synthetic oligonucleotide
gguacggccagcgcacugu

SEQ ID NO: 996569 - RNA, 19 nt, Artificial Sequence
  Description of Artificial Sequence: Synthetic oligonucleotide
cgcgugcuuguucaccuug

SEQ ID NO: 996570 - RNA, 19 nt, Artificial Sequence
  Description of Artificial Sequence: Synthetic oligonucleotide
gggcagguuuaggguagcc

SEQ ID NO: 996571 - RNA, 19 nt, Artificial Sequence
  Description of Artificial Sequence: Synthetic oligonucleotide
cacuggacauguccgccau

SEQ ID NO: 996572 - RNA, 19 nt, Artificial Sequence
  Description of Artificial Sequence: Synthetic oligonucleotide
gcuagugagcagauguguu

SEQ ID NO: 996573 - RNA, 19 nt, Artificial Sequence
  Description of Artificial Sequence: Synthetic oligonucleotide
acacgucaaccaggggcuu

SEQ ID NO: 996574 - RNA, 19 nt, Artificial Sequence
  Description of Artificial Sequence: Synthetic oligonucleotide
gguugaacgugacgugcuu

SEQ ID NO: 996575 - RNA, 19 nt, Artificial Sequence
  Description of Artificial Sequence: Synthetic oligonucleotide
gcuccgcugguguaauccu

SEQ ID NO: 996576 - RNA, 19 nt, Artificial Sequence
  Description of Artificial Sequence: Synthetic oligonucleotide
gccuuucgcacugcuuguc

SEQ ID NO: 996577 - RNA, 19 nt, Artificial Sequence
  Description of Artificial Sequence: Synthetic oligonucleotide
cagaaaacgcgugcuuguu

SEQ ID NO: 996578 - RNA, 19 nt, Artificial Sequence
  Description of Artificial Sequence: Synthetic oligonucleotide
gggagccacgucccucguc

SEQ ID NO: 996579 - RNA, 19 nt, Artificial Sequence
  Description of Artificial Sequence: Synthetic oligonucleotide
gccuggugcucggcgauca

SEQ ID NO: 996580 - RNA, 19 nt, Artificial Sequence
  Description of Artificial Sequence: Synthetic oligonucleotide
cccucgucauucugaagua

SEQ ID NO: 996581 - RNA, 19 nt, Artificial Sequence
  Description of Artificial Sequence: Synthetic oligonucleotide
ccuggugcucggcgaucag

SEQ ID NO: 996582 - RNA, 19 nt, Artificial Sequence
  Description of Artificial Sequence: Synthetic oligonucleotide
agucggccuuguaccuccu

SEQ ID NO: 996583 - RNA, 19 nt, Artificial Sequence
  Description of Artificial Sequence: Synthetic oligonucleotide
cggggagucaugaacuccu

SEQ ID NO: 996584 - RNA, 19 nt, Artificial Sequence
  Description of Artificial Sequence: Synthetic oligonucleotide
cgucagacaucuggaugac

SEQ ID NO: 996585 - RNA, 19 nt, Artificial Sequence
  Description of Artificial Sequence: Synthetic oligonucleotide
cuccgcugguguaauccuu

SEQ ID NO: 996586 - RNA, 19 nt, Artificial Sequence
  Description of Artificial Sequence: Synthetic oligonucleotide
gcuuguccgcacuguccaa

SEQ ID NO: 996587 - RNA, 19 nt, Artificial Sequence
  Description of Artificial Sequence: Synthetic oligonucleotide
cgguguggucucuggccag

SEQ ID NO: 996588 - RNA, 19 nt, Artificial Sequence
  Description of Artificial Sequence: Synthetic oligonucleotide
ggccaguagcuuucucuau

SEQ ID NO: 996589 - RNA, 19 nt, Artificial Sequence
  Description of Artificial Sequence: Synthetic oligonucleotide
cgucccucgucauucugaa

SEQ ID NO: 996590 - RNA, 19 nt, Artificial Sequence
  Description of Artificial Sequence: Synthetic oligonucleotide
caccggccugggguacggc

SEQ ID NO: 996591 - RNA, 19 nt, Artificial Sequence
  Description of Artificial Sequence: Synthetic oligonucleotide
ccucacgagcuccccuuga

SEQ ID NO: 996592 - RNA, 19 nt, Artificial Sequence
  Description of Artificial Sequence: Synthetic oligonucleotide
ccaccggccugggguacgg

SEQ ID NO: 996593 - RNA, 19 nt, Artificial Sequence
  Description of Artificial Sequence: Synthetic oligonucleotide
ggcagcuuuauagcucguu

SEQ ID NO: 996594 - RNA, 19 nt, Artificial Sequence
  Description of Artificial Sequence: Synthetic oligonucleotide
cucggcgaucaggggcuga

SEQ ID NO: 996595 - RNA, 19 nt, Artificial Sequence
  Description of Artificial Sequence: Synthetic oligonucleotide
ccagcgcacugucugugcu

SEQ ID NO: 996596 - RNA, 19 nt, Artificial Sequence
  Description of Artificial Sequence: Synthetic oligonucleotide
uccuugcgucgggccuggu

SEQ ID NO: 996597 - RNA, 19 nt, Artificial Sequence
  Description of Artificial Sequence: Synthetic oligonucleotide
cacgucaaccaggggcuuu

SEQ ID NO: 996598 - RNA, 19 nt, Artificial Sequence
  Description of Artificial Sequence: Synthetic oligonucleotide
gcgcaugggaugaggcacu

SEQ ID NO: 996599 - RNA, 19 nt, Artificial Sequence
  Description of Artificial Sequence: Synthetic oligonucleotide
ggccuggugcucggcgauc

SEQ ID NO: 996600 - RNA, 19 nt, Artificial Sequence
  Description of Artificial Sequence: Synthetic oligonucleotide
gcucggcgaucaggggcug

SEQ ID NO: 996601 - RNA, 19 nt, Artificial Sequence
  Description of Artificial Sequence: Synthetic oligonucleotide
ccccugcccguguacagau

SEQ ID NO: 996602 - RNA, 19 nt, Artificial Sequence
  Description of Artificial Sequence: Synthetic oligonucleotide
cggcgaucaggggcugaag

SEQ ID NO: 996603 - RNA, 19 nt, Artificial Sequence
  Description of Artificial Sequence: Synthetic oligonucleotide
cgcacugcuuguccgcacu

SEQ ID NO: 996604 - RNA, 19 nt, Artificial Sequence
  Description of Artificial Sequence: Synthetic oligonucleotide
ggggagucaugaacuccuu

SEQ ID NO: 996605 - RNA, 19 nt, Artificial Sequence
  Description of Artificial Sequence: Synthetic oligonucleotide
cggaucuguuccagccugu

SEQ ID NO: 996606 - RNA, 19 nt, Artificial Sequence
  Description of Artificial Sequence: Synthetic oligonucleotide
gggguacggccagcgcacu

SEQ ID NO: 996607 - RNA, 19 nt, Artificial Sequence
  Description of Artificial Sequence: Synthetic oligonucleotide
cccugcccguguacagaua

SEQ ID NO: 996608 - RNA, 19 nt, Artificial Sequence
  Description of Artificial Sequence: Synthetic oligonucleotide
cggccagcgcacugucugu

SEQ ID NO: 996609 - RNA, 19 nt, Artificial Sequence
  Description of Artificial Sequence: Synthetic oligonucleotide
aauuacauuacuuugucca

SEQ ID NO: 996610 - RNA, 19 nt, Artificial Sequence
  Description of Artificial Sequence: Synthetic oligonucleotide
uguuuaauuauccacaaga

SEQ ID NO: 996611 - RNA, 19 nt, Artificial Sequence
  Description of Artificial Sequence: Synthetic oligonucleotide
ucuaauacugcccaaauaa

SEQ ID NO: 996612 - RNA, 19 nt, Artificial Sequence
  Description of Artificial Sequence: Synthetic oligonucleotide
augaaugcaaguuucgacc

SEQ ID NO: 996613 - RNA, 19 nt, Artificial Sequence
  Description of Artificial Sequence: Synthetic oligonucleotide
uaagaauaaacaaaccuca

SEQ ID NO: 996614 - RNA, 19 nt, Artificial Sequence
  Description of Artificial Sequence: Synthetic oligonucleotide
ucuguuaagccaaagagcu

SEQ ID NO: 996615 - RNA, 19 nt, Artificial Sequence
  Description of Artificial Sequence: Synthetic oligonucleotide
uuaaccuuaauauacauuu

SEQ ID NO: 996616 - RNA, 19 nt, Artificial Sequence
  Description of Artificial Sequence: Synthetic oligonucleotide
uaugugaaaggguugaaag

SEQ ID NO: 996617 - RNA, 19 nt, Artificial Sequence
  Description of Artificial Sequence: Synthetic oligonucleotide
caucuuauaaauaaaguuc

SEQ ID NO: 996618 - RNA, 19 nt, Artificial Sequence
  Description of Artificial Sequence: Synthetic oligonucleotide
uaugcuuuagcaaaacaug

SEQ ID NO: 996619 - RNA, 19 nt, Artificial Sequence
  Description of Artificial Sequence: Synthetic oligonucleotide
cuaagguacauuuauuugc

SEQ ID NO: 996620 - RNA, 19 nt, Artificial Sequence
  Description of Artificial Sequence: Synthetic oligonucleotide
aauauucuaaacaagucca

SEQ ID NO: 996621 - RNA, 19 nt, Artificial Sequence
  Description of Artificial Sequence: Synthetic oligonucleotide
gaauuuauaucguucauuc

SEQ ID NO: 996622 - RNA, 19 nt, Artificial Sequence
  Description of Artificial Sequence: Synthetic oligonucleotide
ugcacauuaguuuggagag

SEQ ID NO: 996623 - RNA, 19 nt, Artificial Sequence
  Description of Artificial Sequence: Synthetic oligonucleotide
caugauaacuuucuaauac

SEQ ID NO: 996624 - RNA, 19 nt, Artificial Sequence
  Description of Artificial Sequence: Synthetic oligonucleotide
caaagguucacaugaaugc

SEQ ID NO: 996625 - RNA, 19 nt, Artificial Sequence
  Description of Artificial Sequence: Synthetic oligonucleotide
ucaaguaaaauauucuaaa

SEQ ID NO: 996626 - RNA, 19 nt, Artificial Sequence
  Description of Artificial Sequence: Synthetic oligonucleotide
aaaaguucaauggagaaua

SEQ ID NO: 996627 - RNA, 19 nt, Artificial Sequence
  Description of Artificial Sequence: Synthetic oligonucleotide
cucaguuaguuuuaaauug

SEQ ID NO: 996628 - RNA, 19 nt, Artificial Sequence
  Description of Artificial Sequence: Synthetic oligonucleotide
ucaguuaguuuuaaauugc

SEQ ID NO: 996629 - RNA, 19 nt, Artificial Sequence
  Description of Artificial Sequence: Synthetic oligonucleotide
gagauguuaauucaccaug

SEQ ID NO: 996630 - RNA, 19 nt, Artificial Sequence
  Description of Artificial Sequence: Synthetic oligonucleotide
uauuuggugaauugucagg

SEQ ID NO: 996631 - RNA, 19 nt, Artificial Sequence
  Description of Artificial Sequence: Synthetic oligonucleotide
ucaaauuaacuacuggaaa

SEQ ID NO: 996632 - RNA, 19 nt, Artificial Sequence
  Description of Artificial Sequence: Synthetic oligonucleotide
aggauuaacacugaaaagu

SEQ ID NO: 996633 - RNA, 19 nt, Artificial Sequence
  Description of Artificial Sequence: Synthetic oligonucleotide
uuuaauuauccacaagaau

SEQ ID NO: 996634 - RNA, 19 nt, Artificial Sequence
  Description of Artificial Sequence: Synthetic oligonucleotide
auuacauuacuuuguccac

SEQ ID NO: 996635 - RNA, 19 nt, Artificial Sequence
  Description of Artificial Sequence: Synthetic oligonucleotide
aguucaaauuaacuacugg

SEQ ID NO: 996636 - RNA, 19 nt, Artificial Sequence
  Description of Artificial Sequence: Synthetic oligonucleotide
ucuacaucacuaacaagcc

SEQ ID NO: 996637 - RNA, 19 nt, Artificial Sequence
  Description of Artificial Sequence: Synthetic oligonucleotide
ucuaagguacauuuauuug

SEQ ID NO: 996638 - RNA, 19 nt, Artificial Sequence
  Description of Artificial Sequence: Synthetic oligonucleotide
auauaaucaaguaaaauau

SEQ ID NO: 996639 - RNA, 19 nt, Artificial Sequence
  Description of Artificial Sequence: Synthetic oligonucleotide
uaccaauacacauucuucc

SEQ ID NO: 996640 - RNA, 19 nt, Artificial Sequence
  Description of Artificial Sequence: Synthetic oligonucleotide
aacuuucuaauacugccca

SEQ ID NO: 996641 - RNA, 19 nt, Artificial Sequence
  Description of Artificial Sequence: Synthetic oligonucleotide
caaacuuaccccaaauccc

SEQ ID NO: 996642 - RNA, 19 nt, Artificial Sequence
  Description of Artificial Sequence: Synthetic oligonucleotide
aauaaaccuaaggucacag

SEQ ID NO: 996643 - RNA, 19 nt, Artificial Sequence
  Description of Artificial Sequence: Synthetic oligonucleotide
aauuauagaugaguuucuc

SEQ ID NO: 996644 - RNA, 19 nt, Artificial Sequence
  Description of Artificial Sequence: Synthetic oligonucleotide
aacucuacaucacuaacaa

SEQ ID NO: 996645 - RNA, 19 nt, Artificial Sequence
  Description of Artificial Sequence: Synthetic oligonucleotide
uuaacuacuggaaauucau

SEQ ID NO: 996646 - RNA, 19 nt, Artificial Sequence
  Description of Artificial Sequence: Synthetic oligonucleotide
ugaaucugguacaaggaca

SEQ ID NO: 996647 - RNA, 19 nt, Artificial Sequence
  Description of Artificial Sequence: Synthetic oligonucleotide
aguuugaagaauaaugcag

SEQ ID NO: 996648 - RNA, 19 nt, Artificial Sequence
  Description of Artificial Sequence: Synthetic oligonucleotide
aguuuuaccuaguuugaag

SEQ ID NO: 996649 - RNA, 19 nt, Artificial Sequence
  Description of Artificial Sequence: Synthetic oligonucleotide
uuuauaucguucauucagu

SEQ ID NO: 996650 - RNA, 19 nt, Artificial Sequence
  Description of Artificial Sequence: Synthetic oligonucleotide
gauucuaguucuaagguac

SEQ ID NO: 996651 - RNA, 19 nt, Artificial Sequence
  Description of Artificial Sequence: Synthetic oligonucleotide
aaaucucuguuuaucagag

SEQ ID NO: 996652 - RNA, 19 nt, Artificial Sequence
  Description of Artificial Sequence: Synthetic oligonucleotide
uaucaaugcacauucugca

SEQ ID NO: 996653 - RNA, 19 nt, Artificial Sequence
  Description of Artificial Sequence: Synthetic oligonucleotide
ucuugauucaugauaacuu

SEQ ID NO: 996654 - RNA, 19 nt, Artificial Sequence
  Description of Artificial Sequence: Synthetic oligonucleotide
ucuaaacaaguccauugug

SEQ ID NO: 996655 - RNA, 19 nt, Artificial Sequence
  Description of Artificial Sequence: Synthetic oligonucleotide
acuaacaagccuuuauuca

SEQ ID NO: 996656 - RNA, 19 nt, Artificial Sequence
  Description of Artificial Sequence: Synthetic oligonucleotide
uuaucagagaagaagcgau

SEQ ID NO: 996657 - RNA, 19 nt, Artificial Sequence
  Description of Artificial Sequence: Synthetic oligonucleotide
uuaauaaaccuaaggucac

SEQ ID NO: 996658 - RNA, 19 nt, Artificial Sequence
  Description of Artificial Sequence: Synthetic oligonucleotide
auugcaaaauaccaauaca

SEQ ID NO: 996659 - RNA, 19 nt, Artificial Sequence
  Description of Artificial Sequence: Synthetic oligonucleotide
agaauaaacaaaccucacu

SEQ ID NO: 996660 - RNA, 19 nt, Artificial Sequence
  Description of Artificial Sequence: Synthetic oligonucleotide
uguagaaauuacauuacuu

SEQ ID NO: 996661 - RNA, 19 nt, Artificial Sequence
  Description of Artificial Sequence: Synthetic oligonucleotide
aaguuucgaccauuaaaag

SEQ ID NO: 996662 - RNA, 19 nt, Artificial Sequence
  Description of Artificial Sequence: Synthetic oligonucleotide
auaucguucauucaguauu

SEQ ID NO: 996663 - RNA, 19 nt, Artificial Sequence
  Description of Artificial Sequence: Synthetic oligonucleotide
ucagauucagacaaacuua

SEQ ID NO: 996664 - RNA, 19 nt, Artificial Sequence
  Description of Artificial Sequence: Synthetic oligonucleotide
aagaauaaacaaaccucac

SEQ ID NO: 996665 - RNA, 19 nt, Artificial Sequence
  Description of Artificial Sequence: Synthetic oligonucleotide
ugaauucugaaaagggccu

SEQ ID NO: 996666 - RNA, 19 nt, Artificial Sequence
  Description of Artificial Sequence: Synthetic oligonucleotide
uuuggcccuauuaaaauuc

SEQ ID NO: 996667 - RNA, 19 nt, Artificial Sequence
  Description of Artificial Sequence: Synthetic oligonucleotide
aguucuaagguacauuuau

SEQ ID NO: 996668 - RNA, 19 nt, Artificial Sequence
  Description of Artificial Sequence: Synthetic oligonucleotide
aguuucgaccauuaaaagu

SEQ ID NO: 996669 - RNA, 19 nt, Artificial Sequence
  Description of Artificial Sequence: Synthetic oligonucleotide
auauauaacauaggaacca

SEQ ID NO: 996670 - RNA, 19 nt, Artificial Sequence
  Description of Artificial Sequence: Synthetic oligonucleotide
agggccuauguauauaauc

SEQ ID NO: 996671 - RNA, 19 nt, Artificial Sequence
  Description of Artificial Sequence: Synthetic oligonucleotide
uacaucacuaacaagccuu

SEQ ID NO: 996672 - RNA, 19 nt, Artificial Sequence
  Description of Artificial Sequence: Synthetic oligonucleotide
caccaaguaaaugaaaacc

SEQ ID NO: 996673 - RNA, 19 nt, Artificial Sequence
  Description of Artificial Sequence: Synthetic oligonucleotide
uugaaucugguacaaggac

SEQ ID NO: 996674 - RNA, 19 nt, Artificial Sequence
  Description of Artificial Sequence: Synthetic oligonucleotide
augauucuaguucuaaggu

SEQ ID NO: 996675 - RNA, 19 nt, Artificial Sequence
  Description of Artificial Sequence: Synthetic oligonucleotide
ugauuuggcccuauuaaaa

SEQ ID NO: 996676 - RNA, 19 nt, Artificial Sequence
  Description of Artificial Sequence: Synthetic oligonucleotide
uguuaagccaaagagcuuc

SEQ ID NO: 996677 - RNA, 19 nt, Artificial Sequence
  Description of Artificial Sequence: Synthetic oligonucleotide
ugugguagcgauaaacaau

SEQ ID NO: 996678 - RNA, 19 nt, Artificial Sequence
  Description of Artificial Sequence: Synthetic oligonucleotide
cuauuuggugaauugucag

SEQ ID NO: 996679 - RNA, 19 nt, Artificial Sequence
  Description of Artificial Sequence: Synthetic oligonucleotide
uguacuuaugauucuaguu

SEQ ID NO: 996680 - RNA, 19 nt, Artificial Sequence
  Description of Artificial Sequence: Synthetic oligonucleotide
ccaaucuuugcuuagcugg

SEQ ID NO: 996681 - RNA, 19 nt, Artificial Sequence
  Description of Artificial Sequence: Synthetic oligonucleotide
caaguuucgaccauuaaaa

SEQ ID NO: 996682 - RNA, 19 nt, Artificial Sequence
  Description of Artificial Sequence: Synthetic oligonucleotide
guuuuaccuaguuugaaga

SEQ ID NO: 996683 - RNA, 19 nt, Artificial Sequence
  Description of Artificial Sequence: Synthetic oligonucleotide
uguagaaacucuacaucac

SEQ ID NO: 996684 - RNA, 19 nt, Artificial Sequence
  Description of Artificial Sequence: Synthetic oligonucleotide
aaagggccuauguauauaa

SEQ ID NO: 996685 - RNA, 19 nt, Artificial Sequence
  Description of Artificial Sequence: Synthetic oligonucleotide
uuaguuaggccuuccaaaa

SEQ ID NO: 996686 - RNA, 19 nt, Artificial Sequence
  Description of Artificial Sequence: Synthetic oligonucleotide
uuaccuaguuugaagaaua

SEQ ID NO: 996687 - RNA, 19 nt, Artificial Sequence
  Description of Artificial Sequence: Synthetic oligonucleotide
ugaaugcaaguuucgacca

SEQ ID NO: 996688 - RNA, 19 nt, Artificial Sequence
  Description of Artificial Sequence: Synthetic oligonucleotide
gacuacacucucuugaauc

SEQ ID NO: 996689 - RNA, 19 nt, Artificial Sequence
  Description of Artificial Sequence: Synthetic oligonucleotide
ugaguuuuaccuaguuuga

SEQ ID NO: 996690 - RNA, 19 nt, Artificial Sequence
  Description of Artificial Sequence: Synthetic oligonucleotide
uuaacacugaaaagugcac

SEQ ID NO: 996691 - RNA, 19 nt, Artificial Sequence
  Description of Artificial Sequence: Synthetic oligonucleotide
acgggugaaugcuuuauuc

SEQ ID NO: 996692 - RNA, 19 nt, Artificial Sequence
  Description of Artificial Sequence: Synthetic oligonucleotide
gagaagaagcgauucaguc

SEQ ID NO: 996693 - RNA, 19 nt, Artificial Sequence
  Description of Artificial Sequence: Synthetic oligonucleotide
gaaacucuacaucacuaac

SEQ ID NO: 996694 - RNA, 19 nt, Artificial Sequence
  Description of Artificial Sequence: Synthetic oligonucleotide
auaaaccuaaggucacagg

SEQ ID NO: 996695 - RNA, 19 nt, Artificial Sequence
  Description of Artificial Sequence: Synthetic oligonucleotide
aaaggcuauuuauuacaca

SEQ ID NO: 996696 - RNA, 19 nt, Artificial Sequence
  Description of Artificial Sequence: Synthetic oligonucleotide
uguauaugcuuuagcaaaa

SEQ ID NO: 996697 - RNA, 19 nt, Artificial Sequence
  Description of Artificial Sequence: Synthetic oligonucleotide
ucuuaugugaaaggguuga

SEQ ID NO: 996698 - RNA, 19 nt, Artificial Sequence
  Description of Artificial Sequence: Synthetic oligonucleotide
guuuaucagagaagaagcg

SEQ ID NO: 996699 - RNA, 19 nt, Artificial Sequence
  Description of Artificial Sequence: Synthetic oligonucleotide
agaaauuacauuacuuugu

SEQ ID NO: 996700 - RNA, 19 nt, Artificial Sequence
  Description of Artificial Sequence: Synthetic oligonucleotide
auaacauaggaaccauucu

SEQ ID NO: 996701 - RNA, 19 nt, Artificial Sequence
  Description of Artificial Sequence: Synthetic oligonucleotide
gcugcuuucauguauaaca

SEQ ID NO: 996702 - RNA, 19 nt, Artificial Sequence
  Description of Artificial Sequence: Synthetic oligonucleotide
ucuuagccuuuaauaaacc

SEQ ID NO: 996703 - RNA, 19 nt, Artificial Sequence
  Description of Artificial Sequence: Synthetic oligonucleotide
aagggguuaagacggguga

SEQ ID NO: 996704 - RNA, 19 nt, Artificial Sequence
  Description of Artificial Sequence: Synthetic oligonucleotide
ucugaaaagggccuaugua

SEQ ID NO: 996705 - RNA, 19 nt, Artificial Sequence
  Description of Artificial Sequence: Synthetic oligonucleotide
aaagguucacaugaaugca

SEQ ID NO: 996706 - RNA, 19 nt, Artificial Sequence
  Description of Artificial Sequence: Synthetic oligonucleotide
cagguaucaaugcacauuc

SEQ ID NO: 996707 - RNA, 19 nt, Artificial Sequence
  Description of Artificial Sequence: Synthetic oligonucleotide
ugagugaagugucacucac

SEQ ID NO: 996708 - RNA, 19 nt, Artificial Sequence
  Description of Artificial Sequence: Synthetic oligonucleotide
ucuuaguuaggccuuccaa

SEQ ID NO: 996709 - RNA, 19 nt, Artificial Sequence
  Description of Artificial Sequence: Synthetic oligonucleotide
caaugcacauucugcaugc

SEQ ID NO: 996710 - RNA, 19 nt, Artificial Sequence
  Description of Artificial Sequence: Synthetic oligonucleotide
aaucuuaguuaggccuucc

SEQ ID NO: 996711 - RNA, 19 nt, Artificial Sequence
  Description of Artificial Sequence: Synthetic oligonucleotide
uggugaagauuacagguaa

SEQ ID NO: 996712 - RNA, 19 nt, Artificial Sequence
  Description of Artificial Sequence: Synthetic oligonucleotide
ugauucagugaguuuuacc

SEQ ID NO: 996713 - RNA, 19 nt, Artificial Sequence
  Description of Artificial Sequence: Synthetic oligonucleotide
ugaaccauuuccacagcac

SEQ ID NO: 996714 - RNA, 19 nt, Artificial Sequence
  Description of Artificial Sequence: Synthetic oligonucleotide
agcgauucagucuuuucug

SEQ ID NO: 996715 - RNA, 19 nt, Artificial Sequence
  Description of Artificial Sequence: Synthetic oligonucleotide
ugaaaagggccuauguaua

SEQ ID NO: 996716 - RNA, 19 nt, Artificial Sequence
  Description of Artificial Sequence: Synthetic oligonucleotide
gaugugcacaguucacggg

SEQ ID NO: 996717 - RNA, 19 nt, Artificial Sequence
  Description of Artificial Sequence: Synthetic oligonucleotide
agcgauaaacaaugucuuc

SEQ ID NO: 996718 - RNA, 19 nt, Artificial Sequence
  Description of Artificial Sequence: Synthetic oligonucleotide
gaaucugguacaaggacac

SEQ ID NO: 996719 - RNA, 19 nt, Artificial Sequence
  Description of Artificial Sequence: Synthetic oligonucleotide
uuaggccuuccaaaagaag

SEQ ID NO: 996720 - RNA, 19 nt, Artificial Sequence
  Description of Artificial Sequence: Synthetic oligonucleotide
gugguagcgauaaacaaug

SEQ ID NO: 996721 - RNA, 19 nt, Artificial Sequence
  Description of Artificial Sequence: Synthetic oligonucleotide
cacauuaguuuggagagag

SEQ ID NO: 996722 - RNA, 19 nt, Artificial Sequence
  Description of Artificial Sequence: Synthetic oligonucleotide
auaugcuuuagcaaaacau

SEQ ID NO: 996723 - RNA, 19 nt, Artificial Sequence
  Description of Artificial Sequence: Synthetic oligonucleotide
agagguagaaacacuguag

SEQ ID NO: 996724 - RNA, 19 nt, Artificial Sequence
  Description of Artificial Sequence: Synthetic oligonucleotide
ccuuaauauacauuuguac

SEQ ID NO: 996725 - RNA, 19 nt, Artificial Sequence
  Description of Artificial Sequence: Synthetic oligonucleotide
agagauguuaauucaccau

SEQ ID NO: 996726 - RNA, 19 nt, Artificial Sequence
  Description of Artificial Sequence: Synthetic oligonucleotide
gaaccauuuccacagcaca

SEQ ID NO: 996727 - RNA, 19 nt, Artificial Sequence
  Description of Artificial Sequence: Synthetic oligonucleotide
caggauuaacacugaaaag

SEQ ID NO: 996728 - RNA, 19 nt, Artificial Sequence
  Description of Artificial Sequence: Synthetic oligonucleotide
agcuauuuggugaauuguc

SEQ ID NO: 996729 - RNA, 19 nt, Artificial Sequence
  Description of Artificial Sequence: Synthetic oligonucleotide
gugcacauuaguuuggaga

SEQ ID NO: 996730 - RNA, 19 nt, Artificial Sequence
  Description of Artificial Sequence: Synthetic oligonucleotide
caugcucagauucagacaa

SEQ ID NO: 996731 - RNA, 19 nt, Artificial Sequence
  Description of Artificial Sequence: Synthetic oligonucleotide
aaguucaaauuaacuacug

SEQ ID NO: 996732 - RNA, 19 nt, Artificial Sequence
  Description of Artificial Sequence: Synthetic oligonucleotide
gagagauguuaauucacca

SEQ ID NO: 996733 - RNA, 19 nt, Artificial Sequence
  Description of Artificial Sequence: Synthetic oligonucleotide
ugauucuaguucuaaggua

SEQ ID NO: 996734 - RNA, 19 nt, Artificial Sequence
  Description of Artificial Sequence: Synthetic oligonucleotide
ugaagauuacagguaagaa

SEQ ID NO: 996735 - RNA, 19 nt, Artificial Sequence
  Description of Artificial Sequence: Synthetic oligonucleotide
aucacuaacaagccuuuau

SEQ ID NO: 996736 - RNA, 19 nt, Artificial Sequence
  Description of Artificial Sequence: Synthetic oligonucleotide
caaucuuugcuuagcuggc

SEQ ID NO: 996737 - RNA, 19 nt, Artificial Sequence
  Description of Artificial Sequence: Synthetic oligonucleotide
cugcuuucauguauaacac

SEQ ID NO: 996738 - RNA, 19 nt, Artificial Sequence
  Description of Artificial Sequence: Synthetic oligonucleotide
gguaucaaugcacauucug

SEQ ID NO: 996739 - RNA, 19 nt, Artificial Sequence
  Description of Artificial Sequence: Synthetic oligonucleotide
aucuguaggguccugcaga

SEQ ID NO: 996740 - RNA, 19 nt, Artificial Sequence
  Description of Artificial Sequence: Synthetic oligonucleotide
uauaucguucauucaguau

SEQ ID NO: 996741 - RNA, 19 nt, Artificial Sequence
  Description of Artificial Sequence: Synthetic oligonucleotide
guagcgauaaacaaugucu

SEQ ID NO: 996742 - RNA, 19 nt, Artificial Sequence
  Description of Artificial Sequence: Synthetic oligonucleotide
gaugcaugcucagauucag

SEQ ID NO: 996743 - RNA, 19 nt, Artificial Sequence
  Description of Artificial Sequence: Synthetic oligonucleotide
ucaugauaacuuucuaaua

SEQ ID NO: 996744 - RNA, 19 nt, Artificial Sequence
  Description of Artificial Sequence: Synthetic oligonucleotide
uauauaacauaggaaccau

SEQ ID NO: 996745 - RNA, 19 nt, Artificial Sequence
  Description of Artificial Sequence: Synthetic oligonucleotide
uuauaucguucauucagua

SEQ ID NO: 996746 - RNA, 19 nt, Artificial Sequence
  Description of Artificial Sequence: Synthetic oligonucleotide
uagcgauaaacaaugucuu

SEQ ID NO: 996747 - RNA, 19 nt, Artificial Sequence
  Description of Artificial Sequence: Synthetic oligonucleotide
aucaaguaaaauauucuaa

SEQ ID NO: 996748 - RNA, 19 nt, Artificial Sequence
  Description of Artificial Sequence: Synthetic oligonucleotide
cuuaguuaggccuuccaaa

SEQ ID NO: 996749 - RNA, 19 nt, Artificial Sequence
  Description of Artificial Sequence: Synthetic oligonucleotide
uugugguagcgauaaacaa

SEQ ID NO: 996750 - RNA, 19 nt, Artificial Sequence
  Description of Artificial Sequence: Synthetic oligonucleotide
aggguugaaagaaaggggu

SEQ ID NO: 996751 - RNA, 19 nt, Artificial Sequence
  Description of Artificial Sequence: Synthetic oligonucleotide
auuaacuacuggaaauuca

SEQ ID NO: 996752 - RNA, 19 nt, Artificial Sequence
  Description of Artificial Sequence: Synthetic oligonucleotide
ucgaccauuaaaaguucaa

SEQ ID NO: 996753 - RNA, 19 nt, Artificial Sequence
  Description of Artificial Sequence: Synthetic oligonucleotide
auacauuuguacaagcaau

SEQ ID NO: 996754 - RNA, 19 nt, Artificial Sequence
  Description of Artificial Sequence: Synthetic oligonucleotide
ucuguuuaucagagaagaa

SEQ ID NO: 996755 - RNA, 19 nt, Artificial Sequence
  Description of Artificial Sequence: Synthetic oligonucleotide
uugagugaagugucacuca

SEQ ID NO: 996756 - RNA, 19 nt, Artificial Sequence
  Description of Artificial Sequence: Synthetic oligonucleotide
uuaugugaaaggguugaaa

SEQ ID NO: 996757 - RNA, 19 nt, Artificial Sequence
  Description of Artificial Sequence: Synthetic oligonucleotide
ugcuuugugguagcgauaa

SEQ ID NO: 996758 - RNA, 19 nt, Artificial Sequence
  Description of Artificial Sequence: Synthetic oligonucleotide
aguugagugaagugucacu

SEQ ID NO: 996759 - RNA, 19 nt, Artificial Sequence
  Description of Artificial Sequence: Synthetic oligonucleotide
guugagugaagugucacuc

SEQ ID NO: 996760 - RNA, 19 nt, Artificial Sequence
  Description of Artificial Sequence: Synthetic oligonucleotide
uuucgaccauuaaaaguuc

SEQ ID NO: 996761 - RNA, 19 nt, Artificial Sequence
  Description of Artificial Sequence: Synthetic oligonucleotide
aaccucacuucuuucuaau

SEQ ID NO: 996762 - RNA, 19 nt, Artificial Sequence
  Description of Artificial Sequence: Synthetic oligonucleotide
guuuaauuauccacaagaa

SEQ ID NO: 996763 - RNA, 19 nt, Artificial Sequence
  Description of Artificial Sequence: Synthetic oligonucleotide
ugcaaagguucacaugaau

SEQ ID NO: 996764 - RNA, 19 nt, Artificial Sequence
  Description of Artificial Sequence: Synthetic oligonucleotide
gauucagucuuuucuguua

SEQ ID NO: 996765 - RNA, 19 nt, Artificial Sequence
  Description of Artificial Sequence: Synthetic oligonucleotide
guauaacaccagcugcucc

SEQ ID NO: 996766 - RNA, 19 nt, Artificial Sequence
  Description of Artificial Sequence: Synthetic oligonucleotide
cagacugaaccauuuccac

SEQ ID NO: 996767 - RNA, 19 nt, Artificial Sequence
  Description of Artificial Sequence: Synthetic oligonucleotide
uggagaauacauugugaau

SEQ ID NO: 996768 - RNA, 19 nt, Artificial Sequence
  Description of Artificial Sequence: Synthetic oligonucleotide
ugacuagcuauuuggugaa

SEQ ID NO: 996769 - RNA, 19 nt, Artificial Sequence
  Description of Artificial Sequence: Synthetic oligonucleotide
uuggcccuauuaaaauucu

SEQ ID NO: 996770 - RNA, 19 nt, Artificial Sequence
  Description of Artificial Sequence: Synthetic oligonucleotide
agauguuaauucaccauga

SEQ ID NO: 996771 - RNA, 19 nt, Artificial Sequence
  Description of Artificial Sequence: Synthetic oligonucleotide
uaauaaaccuaaggucaca

SEQ ID NO: 996772 - RNA, 19 nt, Artificial Sequence
  Description of Artificial Sequence: Synthetic oligonucleotide
gagguagaaacacuguagu

SEQ ID NO: 996773 - RNA, 19 nt, Artificial Sequence
  Description of Artificial Sequence: Synthetic oligonucleotide
agagagcaggucuuaugug

SEQ ID NO: 996774 - RNA, 19 nt, Artificial Sequence
  Description of Artificial Sequence: Synthetic oligonucleotide
auuuggcccuauuaaaauu

SEQ ID NO: 996775 - RNA, 19 nt, Artificial Sequence
  Description of Artificial Sequence: Synthetic oligonucleotide
gguagaaacacuguaguaa

SEQ ID NO: 996776 - RNA, 19 nt, Artificial Sequence
  Description of Artificial Sequence: Synthetic oligonucleotide
gguuaagacgggugaaugc

SEQ ID NO: 996777 - RNA, 19 nt, Artificial Sequence
  Description of Artificial Sequence: Synthetic oligonucleotide
acuguacuuaugauucuag

SEQ ID NO: 996778 - RNA, 19 nt, Artificial Sequence
  Description of Artificial Sequence: Synthetic oligonucleotide
cuuuggcguagaugcaggg

SEQ ID NO: 996779 - RNA, 19 nt, Artificial Sequence
  Description of Artificial Sequence: Synthetic oligonucleotide
guuucgaccauuaaaaguu

SEQ ID NO: 996780 - RNA, 19 nt, Artificial Sequence
  Description of Artificial Sequence: Synthetic oligonucleotide
cagaaucuuaguuaggccu

SEQ ID NO: 996781 - RNA, 19 nt, Artificial Sequence
  Description of Artificial Sequence: Synthetic oligonucleotide
uggugaugcagaauuuaua

SEQ ID NO: 996782 - RNA, 19 nt, Artificial Sequence
  Description of Artificial Sequence: Synthetic oligonucleotide
uacugcccaaauaaucuua

SEQ ID NO: 996783 - RNA, 19 nt, Artificial Sequence
  Description of Artificial Sequence: Synthetic oligonucleotide
acucuacaucacuaacaag

SEQ ID NO: 996784 - RNA, 19 nt, Artificial Sequence
  Description of Artificial Sequence: Synthetic oligonucleotide
ugaaugcuuuauucaagua

SEQ ID NO: 996785 - RNA, 19 nt, Artificial Sequence
  Description of Artificial Sequence: Synthetic oligonucleotide
gugaagauuacagguaaga

SEQ ID NO: 996786 - RNA, 19 nt, Artificial Sequence
  Description of Artificial Sequence: Synthetic oligonucleotide
ugcucagauucagacaaac

SEQ ID NO: 996787 - RNA, 19 nt, Artificial Sequence
  Description of Artificial Sequence: Synthetic oligonucleotide
uagcuauuuggugaauugu

SEQ ID NO: 996788 - RNA, 19 nt, Artificial Sequence
  Description of Artificial Sequence: Synthetic oligonucleotide
uguauaacaccagcugcuc

SEQ ID NO: 996789 - RNA, 19 nt, Artificial Sequence
  Description of Artificial Sequence: Synthetic oligonucleotide
cacgacuacacucucuuga

SEQ ID NO: 996790 - RNA, 19 nt, Artificial Sequence
  Description of Artificial Sequence: Synthetic oligonucleotide
aacuguacuuaugauucua

SEQ ID NO: 996791 - RNA, 19 nt, Artificial Sequence
  Description of Artificial Sequence: Synthetic oligonucleotide
aagguucacaugaaugcaa

SEQ ID NO: 996792 - RNA, 19 nt, Artificial Sequence
  Description of Artificial Sequence: Synthetic oligonucleotide
aaaccuaaggucacaggua

SEQ ID NO: 996793 - RNA, 19 nt, Artificial Sequence
  Description of Artificial Sequence: Synthetic oligonucleotide
acugcccaaauaaucuuag

SEQ ID NO: 996794 - RNA, 19 nt, Artificial Sequence
  Description of Artificial Sequence: Synthetic oligonucleotide
uagacucuuugcuuguaua

SEQ ID NO: 996795 - RNA, 19 nt, Artificial Sequence
  Description of Artificial Sequence: Synthetic oligonucleotide
uaccuaguuugaagaauaa

SEQ ID NO: 996796 - RNA, 19 nt, Artificial Sequence
  Description of Artificial Sequence: Synthetic oligonucleotide
cugaaaagggccuauguau

SEQ ID NO: 996797 - RNA, 19 nt, Artificial Sequence
  Description of Artificial Sequence: Synthetic oligonucleotide
ucagugaguuuuaccuagu

SEQ ID NO: 996798 - RNA, 19 nt, Artificial Sequence
  Description of Artificial Sequence: Synthetic oligonucleotide
uuaagacgggugaaugcuu

SEQ ID NO: 996799 - RNA, 19 nt, Artificial Sequence
  Description of Artificial Sequence: Synthetic oligonucleotide
cugguccacgacuacacuc

SEQ ID NO: 996800 - RNA, 19 nt, Artificial Sequence
  Description of Artificial Sequence: Synthetic oligonucleotide
aaugauucagugaguuuua

SEQ ID NO: 996801 - RNA, 19 nt, Artificial Sequence
  Description of Artificial Sequence: Synthetic oligonucleotide
gauuuggcccuauuaaaau

SEQ ID NO: 996802 - RNA, 19 nt, Artificial Sequence
  Description of Artificial Sequence: Synthetic oligonucleotide
uuuggugaauugucaggau

SEQ ID NO: 996803 - RNA, 19 nt, Artificial Sequence
  Description of Artificial Sequence: Synthetic oligonucleotide
aagugcacauuaguuugga

SEQ ID NO: 996804 - RNA, 19 nt, Artificial Sequence
  Description of Artificial Sequence: Synthetic oligonucleotide
aagaucuguuggugaagau

SEQ ID NO: 996805 - RNA, 19 nt, Artificial Sequence
  Description of Artificial Sequence: Synthetic oligonucleotide
cccuauuaaaauucucaag

SEQ ID NO: 996806 - RNA, 19 nt, Artificial Sequence
  Description of Artificial Sequence: Synthetic oligonucleotide
gguagcgauaaacaauguc

SEQ ID NO: 996807 - RNA, 19 nt, Artificial Sequence
  Description of Artificial Sequence: Synthetic oligonucleotide
uaguucuaagguacauuua

SEQ ID NO: 996808 - RNA, 19 nt, Artificial Sequence
  Description of Artificial Sequence: Synthetic oligonucleotide
cuaguucuaagguacauuu

SEQ ID NO: 996809 - RNA, 19 nt, Artificial Sequence
  Description of Artificial Sequence: Synthetic oligonucleotide
aucuuaguuaggccuucca

SEQ ID NO: 996810 - RNA, 19 nt, Artificial Sequence
  Description of Artificial Sequence: Synthetic oligonucleotide
ugaucugagcuuuggcgua

SEQ ID NO: 996811 - RNA, 19 nt, Artificial Sequence
  Description of Artificial Sequence: Synthetic oligonucleotide
gcaaguuucgaccauuaaa

SEQ ID NO: 996812 - RNA, 19 nt, Artificial Sequence
  Description of Artificial Sequence: Synthetic oligonucleotide
ggugaaugcuuuauucaag

SEQ ID NO: 996813 - RNA, 19 nt, Artificial Sequence
  Description of Artificial Sequence: Synthetic oligonucleotide
ugcaaguuucgaccauuaa

SEQ ID NO: 996814 - RNA, 19 nt, Artificial Sequence
  Description of Artificial Sequence: Synthetic oligonucleotide
guagaaacucuacaucacu

SEQ ID NO: 996815 - RNA, 19 nt, Artificial Sequence
  Description of Artificial Sequence: Synthetic oligonucleotide
gcaggucuuaugugaaagg

SEQ ID NO: 996816 - RNA, 19 nt, Artificial Sequence
  Description of Artificial Sequence: Synthetic oligonucleotide
cuuugauuuggcccuauua

SEQ ID NO: 996817 - RNA, 19 nt, Artificial Sequence
  Description of Artificial Sequence: Synthetic oligonucleotide
agaauacauugugaauucu

SEQ ID NO: 996818 - RNA, 19 nt, Artificial Sequence
  Description of Artificial Sequence: Synthetic oligonucleotide
aaaagggccuauguauaua

SEQ ID NO: 996819 - RNA, 19 nt, Artificial Sequence
  Description of Artificial Sequence: Synthetic oligonucleotide
acgacuacacucucuugaa

SEQ ID NO: 996820 - RNA, 19 nt, Artificial Sequence
  Description of Artificial Sequence: Synthetic oligonucleotide
agguagaaacacuguagua

SEQ ID NO: 996821 - RNA, 19 nt, Artificial Sequence
  Description of Artificial Sequence: Synthetic oligonucleotide
gaagaauaaugcaguuaca

SEQ ID NO: 996822 - RNA, 19 nt, Artificial Sequence
  Description of Artificial Sequence: Synthetic oligonucleotide
auacugcccaaauaaucuu

SEQ ID NO: 996823 - RNA, 19 nt, Artificial Sequence
  Description of Artificial Sequence: Synthetic oligonucleotide
ugcacaguucacggguucc

SEQ ID NO: 996824 - RNA, 19 nt, Artificial Sequence
  Description of Artificial Sequence: Synthetic oligonucleotide
gaguugagugaagugucac

SEQ ID NO: 996825 - RNA, 19 nt, Artificial Sequence
  Description of Artificial Sequence: Synthetic oligonucleotide
gcaacucaaaauaccacug

SEQ ID NO: 996826 - RNA, 19 nt, Artificial Sequence
  Description of Artificial Sequence: Synthetic oligonucleotide
guuaagacgggugaaugcu

SEQ ID NO: 996827 - RNA, 19 nt, Artificial Sequence
  Description of Artificial Sequence: Synthetic oligonucleotide
uggcguaaggugucugugu

SEQ ID NO: 996828 - RNA, 19 nt, Artificial Sequence
  Description of Artificial Sequence: Synthetic oligonucleotide
gaucugagcuuuggcguag

SEQ ID NO: 996829 - RNA, 19 nt, Artificial Sequence
  Description of Artificial Sequence: Synthetic oligonucleotide
gggccuauguauauaauca

SEQ ID NO: 996830 - RNA, 19 nt, Artificial Sequence
  Description of Artificial Sequence: Synthetic oligonucleotide
cuguaguaaagaccuaaaa

SEQ ID NO: 996831 - RNA, 19 nt, Artificial Sequence
  Description of Artificial Sequence: Synthetic oligonucleotide
cauucuuggagagauguua

SEQ ID NO: 996832 - RNA, 19 nt, Artificial Sequence
  Description of Artificial Sequence: Synthetic oligonucleotide
guuucuugcacauggugau

SEQ ID NO: 996833 - RNA, 19 nt, Artificial Sequence
  Description of Artificial Sequence: Synthetic oligonucleotide
gcgauaaacaaugucuuca

SEQ ID NO: 996834 - RNA, 19 nt, Artificial Sequence
  Description of Artificial Sequence: Synthetic oligonucleotide
uucuaguucuaagguacau

SEQ ID NO: 996835 - RNA, 19 nt, Artificial Sequence
  Description of Artificial Sequence: Synthetic oligonucleotide
ugguagcgauaaacaaugu

SEQ ID NO: 996836 - RNA, 19 nt, Artificial Sequence
  Description of Artificial Sequence: Synthetic oligonucleotide
auauucuaaacaaguccau

SEQ ID NO: 996837 - RNA, 19 nt, Artificial Sequence
  Description of Artificial Sequence: Synthetic oligonucleotide
cuugauucaugauaacuuu

SEQ ID NO: 996838 - RNA, 19 nt, Artificial Sequence
  Description of Artificial Sequence: Synthetic oligonucleotide
uagaugcagggaagcugcc

SEQ ID NO: 996839 - RNA, 19 nt, Artificial Sequence
  Description of Artificial Sequence: Synthetic oligonucleotide
agaaucuuaguuaggccuu

SEQ ID NO: 996840 - RNA, 19 nt, Artificial Sequence
  Description of Artificial Sequence: Synthetic oligonucleotide
ggcguaaggugucugugug

SEQ ID NO: 996841 - RNA, 19 nt, Artificial Sequence
  Description of Artificial Sequence: Synthetic oligonucleotide
gcagguaaguaaaagaacu

SEQ ID NO: 996842 - RNA, 19 nt, Artificial Sequence
  Description of Artificial Sequence: Synthetic oligonucleotide
ccaccaaguaaaugaaaac

SEQ ID NO: 996843 - RNA, 19 nt, Artificial Sequence
  Description of Artificial Sequence: Synthetic oligonucleotide
uggcccuauuaaaauucuc

SEQ ID NO: 996844 - RNA, 19 nt, Artificial Sequence
  Description of Artificial Sequence: Synthetic oligonucleotide
ggcccuauuaaaauucuca

SEQ ID NO: 996845 - RNA, 19 nt, Artificial Sequence
  Description of Artificial Sequence: Synthetic oligonucleotide
caaugauucagugaguuuu

SEQ ID NO: 996846 - RNA, 19 nt, Artificial Sequence
  Description of Artificial Sequence: Synthetic oligonucleotide
ggagaauacauugugaauu

SEQ ID NO: 996847 - RNA, 19 nt, Artificial Sequence
  Description of Artificial Sequence: Synthetic oligonucleotide
agaaagggguuaagacggg

SEQ ID NO: 996848 - RNA, 19 nt, Artificial Sequence
  Description of Artificial Sequence: Synthetic oligonucleotide
caccaugacuagcuauuug

SEQ ID NO: 996849 - RNA, 19 nt, Artificial Sequence
  Description of Artificial Sequence: Synthetic oligonucleotide
ugugcacaguucacggguu

SEQ ID NO: 996850 - RNA, 19 nt, Artificial Sequence
  Description of Artificial Sequence: Synthetic oligonucleotide
caauuauagaugaguuucu

SEQ ID NO: 996851 - RNA, 19 nt, Artificial Sequence
  Description of Artificial Sequence: Synthetic oligonucleotide
aaucugguacaaggacaca

SEQ ID NO: 996852 - RNA, 19 nt, Artificial Sequence
  Description of Artificial Sequence: Synthetic oligonucleotide
auggcguaaggugucugug

SEQ ID NO: 996853 - RNA, 19 nt, Artificial Sequence
  Description of Artificial Sequence: Synthetic oligonucleotide
gggugaaugcuuuauucaa

SEQ ID NO: 996854 - RNA, 19 nt, Artificial Sequence
  Description of Artificial Sequence: Synthetic oligonucleotide
accuaguuugaagaauaau

SEQ ID NO: 996855 - RNA, 19 nt, Artificial Sequence
  Description of Artificial Sequence: Synthetic oligonucleotide
agaugcaugcucagauuca

SEQ ID NO: 996856 - RNA, 19 nt, Artificial Sequence
  Description of Artificial Sequence: Synthetic oligonucleotide
gcuauuuggugaauuguca

SEQ ID NO: 996857 - RNA, 19 nt, Artificial Sequence
  Description of Artificial Sequence: Synthetic oligonucleotide
agaguugagugaaguguca

SEQ ID NO: 996858 - RNA, 19 nt, Artificial Sequence
  Description of Artificial Sequence: Synthetic oligonucleotide
gaguuuuaccuaguuugaa

SEQ ID NO: 996859 - RNA, 19 nt, Artificial Sequence
  Description of Artificial Sequence: Synthetic oligonucleotide
gauggcguaaggugucugu

SEQ ID NO: 996860 - RNA, 19 nt, Artificial Sequence
  Description of Artificial Sequence: Synthetic oligonucleotide
auauaacauaggaaccauu

SEQ ID NO: 996861 - RNA, 19 nt, Artificial Sequence
  Description of Artificial Sequence: Synthetic oligonucleotide
ugcaaacaaccagcaacuc

SEQ ID NO: 996862 - RNA, 19 nt, Artificial Sequence
  Description of Artificial Sequence: Synthetic oligonucleotide
uccuccugagcuguuuaaa

SEQ ID NO: 996863 - RNA, 19 nt, Artificial Sequence
  Description of Artificial Sequence: Synthetic oligonucleotide
gaauucugaaaagggccua

SEQ ID NO: 996864 - RNA, 19 nt, Artificial Sequence
  Description of Artificial Sequence: Synthetic oligonucleotide
auaccacugagaagaucug

SEQ ID NO: 996865 - RNA, 19 nt, Artificial Sequence
  Description of Artificial Sequence: Synthetic oligonucleotide
gcuuuggcguagaugcagg

SEQ ID NO: 996866 - RNA, 19 nt, Artificial Sequence
  Description of Artificial Sequence: Synthetic oligonucleotide
ccuaaggucacagguauca

SEQ ID NO: 996867 - RNA, 19 nt, Artificial Sequence
  Description of Artificial Sequence: Synthetic oligonucleotide
gcagacugaaccauuucca

SEQ ID NO: 996868 - RNA, 19 nt, Artificial Sequence
  Description of Artificial Sequence: Synthetic oligonucleotide
gguugaaagaaagggguua

SEQ ID NO: 996869 - RNA, 19 nt, Artificial Sequence
  Description of Artificial Sequence: Synthetic oligonucleotide
cuguacuuaugauucuagu

SEQ ID NO: 996870 - RNA, 19 nt, Artificial Sequence
  Description of Artificial Sequence: Synthetic oligonucleotide
agaugcagggaagcugcca

SEQ ID NO: 996871 - RNA, 19 nt, Artificial Sequence
  Description of Artificial Sequence: Synthetic oligonucleotide
gccucaguuaguuuuaaau

SEQ ID NO: 996872 - RNA, 19 nt, Artificial Sequence
  Description of Artificial Sequence: Synthetic oligonucleotide
ucaccaugacuagcuauuu

SEQ ID NO: 996873 - RNA, 19 nt, Artificial Sequence
  Description of Artificial Sequence: Synthetic oligonucleotide
aggcuauuuauuacacaau

SEQ ID NO: 996874 - RNA, 19 nt, Artificial Sequence
  Description of Artificial Sequence: Synthetic oligonucleotide
cccaaucuuugcuuagcug

SEQ ID NO: 996875 - RNA, 19 nt, Artificial Sequence
  Description of Artificial Sequence: Synthetic oligonucleotide
agaagcgauucagucuuuu

SEQ ID NO: 996876 - RNA, 19 nt, Artificial Sequence
  Description of Artificial Sequence: Synthetic oligonucleotide
gugcacaguucacggguuc

SEQ ID NO: 996877 - RNA, 19 nt, Artificial Sequence
  Description of Artificial Sequence: Synthetic oligonucleotide
cacaaugauucagugaguu

SEQ ID NO: 996878 - RNA, 19 nt, Artificial Sequence
  Description of Artificial Sequence: Synthetic oligonucleotide
guagacucuuugcuuguau

SEQ ID NO: 996879 - RNA, 19 nt, Artificial Sequence
  Description of Artificial Sequence: Synthetic oligonucleotide
agggguuaagacgggugaa

SEQ ID NO: 996880 - RNA, 19 nt, Artificial Sequence
  Description of Artificial Sequence: Synthetic oligonucleotide
cuuaugugaaaggguugaa

SEQ ID NO: 996881 - RNA, 19 nt, Artificial Sequence
  Description of Artificial Sequence: Synthetic oligonucleotide
guguucucgcuccaucagu

SEQ ID NO: 996882 - RNA, 19 nt, Artificial Sequence
  Description of Artificial Sequence: Synthetic oligonucleotide
augcaaguuucgaccauua

SEQ ID NO: 996883 - RNA, 19 nt, Artificial Sequence
  Description of Artificial Sequence: Synthetic oligonucleotide
cauguacuauucagagagu

SEQ ID NO: 996884 - RNA, 19 nt, Artificial Sequence
  Description of Artificial Sequence: Synthetic oligonucleotide
ucacuuugauuuggcccua

SEQ ID NO: 996885 - RNA, 19 nt, Artificial Sequence
  Description of Artificial Sequence: Synthetic oligonucleotide
guuaagccaaagagcuucu

SEQ ID NO: 996886 - RNA, 19 nt, Artificial Sequence
  Description of Artificial Sequence: Synthetic oligonucleotide
ccucaguuaguuuuaaauu

SEQ ID NO: 996887 - RNA, 19 nt, Artificial Sequence
  Description of Artificial Sequence: Synthetic oligonucleotide
cacucucuugaaucuggua

SEQ ID NO: 996888 - RNA, 19 nt, Artificial Sequence
  Description of Artificial Sequence: Synthetic oligonucleotide
gcacaauuauagaugaguu

SEQ ID NO: 996889 - RNA, 19 nt, Artificial Sequence
  Description of Artificial Sequence: Synthetic oligonucleotide
cugucucuguuaagccaaa

SEQ ID NO: 996890 - RNA, 19 nt, Artificial Sequence
  Description of Artificial Sequence: Synthetic oligonucleotide
cugcuuugugguagcgaua

SEQ ID NO: 996891 - RNA, 19 nt, Artificial Sequence
  Description of Artificial Sequence: Synthetic oligonucleotide
ccacgacuacacucucuug

SEQ ID NO: 996892 - RNA, 19 nt, Artificial Sequence
  Description of Artificial Sequence: Synthetic oligonucleotide
gugaagugucacucacuuu

SEQ ID NO: 996893 - RNA, 19 nt, Artificial Sequence
  Description of Artificial Sequence: Synthetic oligonucleotide
caucacuaacaagccuuua

SEQ ID NO: 996894 - RNA, 19 nt, Artificial Sequence
  Description of Artificial Sequence: Synthetic oligonucleotide
ccacaagaauaacuguacu

SEQ ID NO: 996895 - RNA, 19 nt, Artificial Sequence
  Description of Artificial Sequence: Synthetic oligonucleotide
ccaaauaaucuuagccuuu

SEQ ID NO: 996896 - RNA, 19 nt, Artificial Sequence
  Description of Artificial Sequence: Synthetic oligonucleotide
gacuagcuauuuggugaau

SEQ ID NO: 996897 - RNA, 19 nt, Artificial Sequence
  Description of Artificial Sequence: Synthetic oligonucleotide
ggguugaaagaaagggguu

SEQ ID NO: 996898 - RNA, 19 nt, Artificial Sequence
  Description of Artificial Sequence: Synthetic oligonucleotide
cgaccauuaaaaguucaau

SEQ ID NO: 996899 - RNA, 19 nt, Artificial Sequence
  Description of Artificial Sequence: Synthetic oligonucleotide
cacuuugauuuggcccuau

SEQ ID NO: 996900 - RNA, 19 nt, Artificial Sequence
  Description of Artificial Sequence: Synthetic oligonucleotide
cgacuacacucucuugaau

SEQ ID NO: 996901 - RNA, 19 nt, Artificial Sequence
  Description of Artificial Sequence: Synthetic oligonucleotide
acgguaauuaauuugaagc

SEQ ID NO: 996902 - RNA, 19 nt, Artificial Sequence
  Description of Artificial Sequence: Synthetic oligonucleotide
agaugaaugacucucaucg

SEQ ID NO: 996903 - RNA, 19 nt, Artificial Sequence
  Description of Artificial Sequence: Synthetic oligonucleotide
ucuacauuuguccuuaugg

SEQ ID NO: 996904 - RNA, 19 nt, Artificial Sequence
  Description of Artificial Sequence: Synthetic oligonucleotide
acuuuaaucucacagacgg

SEQ ID NO: 996905 - RNA, 19 nt, Artificial Sequence
  Description of Artificial Sequence: Synthetic oligonucleotide
ucugguauaaguaaacaag

SEQ ID NO: 996906 - RNA, 19 nt, Artificial Sequence
  Description of Artificial Sequence: Synthetic oligonucleotide
gauuguaugaaccugcugc

SEQ ID NO: 996907 - RNA, 19 nt, Artificial Sequence
  Description of Artificial Sequence: Synthetic oligonucleotide
aggaauaugauccaaucac

SEQ ID NO: 996908 - RNA, 19 nt, Artificial Sequence
  Description of Artificial Sequence: Synthetic oligonucleotide
aaugcaaauaacaacaaug

SEQ ID NO: 996909 - RNA, 19 nt, Artificial Sequence
  Description of Artificial Sequence: Synthetic oligonucleotide
uguaaugaauguauuacag

SEQ ID NO: 996910 - RNA, 19 nt, Artificial Sequence
  Description of Artificial Sequence: Synthetic oligonucleotide
uauucuauaaagugcagag

SEQ ID NO: 996911 - RNA, 19 nt, Artificial Sequence
  Description of Artificial Sequence: Synthetic oligonucleotide
uuugguauugacaaaucag

SEQ ID NO: 996912 - RNA, 19 nt, Artificial Sequence
  Description of Artificial Sequence: Synthetic oligonucleotide
auuaauuugaagcuggggu

SEQ ID NO: 996913 - RNA, 19 nt, Artificial Sequence
  Description of Artificial Sequence: Synthetic oligonucleotide
uagaacaaugcaaauaaca

SEQ ID NO: 996914 - RNA, 19 nt, Artificial Sequence
  Description of Artificial Sequence: Synthetic oligonucleotide
agauaugccaaagagcugc

SEQ ID NO: 996915 - RNA, 19 nt, Artificial Sequence
  Description of Artificial Sequence: Synthetic oligonucleotide
uguuuauauacuacaauac

SEQ ID NO: 996916 - RNA, 19 nt, Artificial Sequence
  Description of Artificial Sequence: Synthetic oligonucleotide
auacgaaggacgcagaguc

SEQ ID NO: 996917 - RNA, 19 nt, Artificial Sequence
  Description of Artificial Sequence: Synthetic oligonucleotide
uaugucauaguauuugggc

SEQ ID NO: 996918 - RNA, 19 nt, Artificial Sequence
  Description of Artificial Sequence: Synthetic oligonucleotide
aguauuugggcuaaagacc

SEQ ID NO: 996919 - RNA, 19 nt, Artificial Sequence
  Description of Artificial Sequence: Synthetic oligonucleotide
uaguauuugggcuaaagac

SEQ ID NO: 996920 - RNA, 19 nt, Artificial Sequence
  Description of Artificial Sequence: Synthetic oligonucleotide
aaugucucuagauaugcca

SEQ ID NO: 996921 - RNA, 19 nt, Artificial Sequence
  Description of Artificial Sequence: Synthetic oligonucleotide
auaugauccaaucaccauc

SEQ ID NO: 996922 - RNA, 19 nt, Artificial Sequence
  Description of Artificial Sequence: Synthetic oligonucleotide
gucaacuucacauacgaag

SEQ ID NO: 996923 - RNA, 19 nt, Artificial Sequence
  Description of Artificial Sequence: Synthetic oligonucleotide
aguagugucaacuucacau

SEQ ID NO: 996924 - RNA, 19 nt, Artificial Sequence
  Description of Artificial Sequence: Synthetic oligonucleotide
auugaaagccauuuauuuc

SEQ ID NO: 996925 - RNA, 19 nt, Artificial Sequence
  Description of Artificial Sequence: Synthetic oligonucleotide
ucaaggguuguaaugaaug

SEQ ID NO: 996926 - RNA, 19 nt, Artificial Sequence
  Description of Artificial Sequence: Synthetic oligonucleotide
auagaaagauaaaauacac

SEQ ID NO: 996927 - RNA, 19 nt, Artificial Sequence
  Description of Artificial Sequence: Synthetic oligonucleotide
ugaagugaccuuuuggucc

SEQ ID NO: 996928 - RNA, 19 nt, Artificial Sequence
  Description of Artificial Sequence: Synthetic oligonucleotide
uuaauuugaagcuggggug

SEQ ID NO: 996929 - RNA, 19 nt, Artificial Sequence
  Description of Artificial Sequence: Synthetic oligonucleotide
aaauaucuacauuuguccu

SEQ ID NO: 996930 - RNA, 19 nt, Artificial Sequence
  Description of Artificial Sequence: Synthetic oligonucleotide
cauagcaacacucagagga

SEQ ID NO: 996931 - RNA, 19 nt, Artificial Sequence
  Description of Artificial Sequence: Synthetic oligonucleotide
acaaguuacaucuaucaca

SEQ ID NO: 996932 - RNA, 19 nt, Artificial Sequence
  Description of Artificial Sequence: Synthetic oligonucleotide
aauguauuacagguggcac

SEQ ID NO: 996933 - RNA, 19 nt, Artificial Sequence
  Description of Artificial Sequence: Synthetic oligonucleotide
aagaugcacauccauacug

SEQ ID NO: 996934 - RNA, 19 nt, Artificial Sequence
  Description of Artificial Sequence: Synthetic oligonucleotide
agugauauagaacagucau

SEQ ID NO: 996935 - RNA, 19 nt, Artificial Sequence
  Description of Artificial Sequence: Synthetic oligonucleotide
auggaugucaaaauguuac

SEQ ID NO: 996936 - RNA, 19 nt, Artificial Sequence
  Description of Artificial Sequence: Synthetic oligonucleotide
uaugauccaaucaccauca

SEQ ID NO: 996937 - RNA, 19 nt, Artificial Sequence
  Description of Artificial Sequence: Synthetic oligonucleotide
aauuaauuugaagcugggg

SEQ ID NO: 996938 - RNA, 19 nt, Artificial Sequence
  Description of Artificial Sequence: Synthetic oligonucleotide
ugacaaaucaguaguguca

SEQ ID NO: 996939 - RNA, 19 nt, Artificial Sequence
  Description of Artificial Sequence: Synthetic oligonucleotide
uuaaacuuggcauuggcua

SEQ ID NO: 996940 - RNA, 19 nt, Artificial Sequence
  Description of Artificial Sequence: Synthetic oligonucleotide
auacugugaaguuauuagg

SEQ ID NO: 996941 - RNA, 19 nt, Artificial Sequence
  Description of Artificial Sequence: Synthetic oligonucleotide
auauacuacaauacugacc

SEQ ID NO: 996942 - RNA, 19 nt, Artificial Sequence
  Description of Artificial Sequence: Synthetic oligonucleotide
aauacucuugcaaguaaac

SEQ ID NO: 996943 - RNA, 19 nt, Artificial Sequence
  Description of Artificial Sequence: Synthetic oligonucleotide
agaaauccuaaggagaggg

SEQ ID NO: 996944 - RNA, 19 nt, Artificial Sequence
  Description of Artificial Sequence: Synthetic oligonucleotide
uauuaggaaaauacucuug

SEQ ID NO: 996945 - RNA, 19 nt, Artificial Sequence
  Description of Artificial Sequence: Synthetic oligonucleotide
ucucuuagaacaaugcaaa

SEQ ID NO: 996946 - RNA, 19 nt, Artificial Sequence
  Description of Artificial Sequence: Synthetic oligonucleotide
aaacuauagaaagauaaaa

SEQ ID NO: 996947 - RNA, 19 nt, Artificial Sequence
  Description of Artificial Sequence: Synthetic oligonucleotide
uacugugaaguuauuagga

SEQ ID NO: 996948 - RNA, 19 nt, Artificial Sequence
  Description of Artificial Sequence: Synthetic oligonucleotide
uaauuaauuugaagcuggg

SEQ ID NO: 996949 - RNA, 19 nt, Artificial Sequence
  Description of Artificial Sequence: Synthetic oligonucleotide
gaacaaugcaaauaacaac

SEQ ID NO: 996950 - RNA, 19 nt, Artificial Sequence
  Description of Artificial Sequence: Synthetic oligonucleotide
cacuaagcaaggaugaggc

SEQ ID NO: 996951 - RNA, 19 nt, Artificial Sequence
  Description of Artificial Sequence: Synthetic oligonucleotide
acauuuuaaauuggaaagg

SEQ ID NO: 996952 - RNA, 19 nt, Artificial Sequence
  Description of Artificial Sequence: Synthetic oligonucleotide
ugcaaguaaacuauagaaa

SEQ ID NO: 996953 - RNA, 19 nt, Artificial Sequence
  Description of Artificial Sequence: Synthetic oligonucleotide
uucagauugugucuuggcc

SEQ ID NO: 996954 - RNA, 19 nt, Artificial Sequence
  Description of Artificial Sequence: Synthetic oligonucleotide
aucguggugaacaaauucc

SEQ ID NO: 996955 - RNA, 19 nt, Artificial Sequence
  Description of Artificial Sequence: Synthetic oligonucleotide
cucuagauaugccaaagag

SEQ ID NO: 996956 - RNA, 19 nt, Artificial Sequence
  Description of Artificial Sequence: Synthetic oligonucleotide
acuacaauacugaccaagc

SEQ ID NO: 996957 - RNA, 19 nt, Artificial Sequence
  Description of Artificial Sequence: Synthetic oligonucleotide
ucagauugugucuuggcca

SEQ ID NO: 996958 - RNA, 19 nt, Artificial Sequence
  Description of Artificial Sequence: Synthetic oligonucleotide
ugccaaaucuccauuaagu

SEQ ID NO: 996959 - RNA, 19 nt, Artificial Sequence
  Description of Artificial Sequence: Synthetic oligonucleotide
ucaaacacgcuuuggagcu

SEQ ID NO: 996960 - RNA, 19 nt, Artificial Sequence
  Description of Artificial Sequence: Synthetic oligonucleotide
aacuucacauacgaaggac

SEQ ID NO: 996961 - RNA, 19 nt, Artificial Sequence
  Description of Artificial Sequence: Synthetic oligonucleotide
guaaacuauagaaagauaa

SEQ ID NO: 996962 - RNA, 19 nt, Artificial Sequence
  Description of Artificial Sequence: Synthetic oligonucleotide
acuggucucacuuauuucu

SEQ ID NO: 996963 - RNA, 19 nt, Artificial Sequence
  Description of Artificial Sequence: Synthetic oligonucleotide
uaaguguguuuccugaaca

SEQ ID NO: 996964 - RNA, 19 nt, Artificial Sequence
  Description of Artificial Sequence: Synthetic oligonucleotide
uuguaaugaauguauuaca

SEQ ID NO: 996965 - RNA, 19 nt, Artificial Sequence
  Description of Artificial Sequence: Synthetic oligonucleotide
cuagauaugccaaagagcu

SEQ ID NO: 996966 - RNA, 19 nt, Artificial Sequence
  Description of Artificial Sequence: Synthetic oligonucleotide
uucugucaaacaaaccugc

SEQ ID NO: 996967 - RNA, 19 nt, Artificial Sequence
  Description of Artificial Sequence: Synthetic oligonucleotide
aaauuccuggauuguauga

SEQ ID NO: 996968 - RNA, 19 nt, Artificial Sequence
  Description of Artificial Sequence: Synthetic oligonucleotide
guuguaaugaauguauuac

SEQ ID NO: 996969 - RNA, 19 nt, Artificial Sequence
  Description of Artificial Sequence: Synthetic oligonucleotide
aggacgcagagucugauuc

SEQ ID NO: 996970 - RNA, 19 nt, Artificial Sequence
  Description of Artificial Sequence: Synthetic oligonucleotide
aaaccaagggauccggaug

SEQ ID NO: 996971 - RNA, 19 nt, Artificial Sequence
  Description of Artificial Sequence: Synthetic oligonucleotide
uauugacaaaucaguagug

SEQ ID NO: 996972 - RNA, 19 nt, Artificial Sequence
  Description of Artificial Sequence: Synthetic oligonucleotide
aaucacaccuuacaacagu

SEQ ID NO: 996973 - RNA, 19 nt, Artificial Sequence
  Description of Artificial Sequence: Synthetic oligonucleotide
uaaagugcagagaaauccu

SEQ ID NO: 996974 - RNA, 19 nt, Artificial Sequence
  Description of Artificial Sequence: Synthetic oligonucleotide
uauauacuacaauacugac

SEQ ID NO: 996975 - RNA, 19 nt, Artificial Sequence
  Description of Artificial Sequence: Synthetic oligonucleotide
aauaucuacauuuguccuu

SEQ ID NO: 996976 - RNA, 19 nt, Artificial Sequence
  Description of Artificial Sequence: Synthetic oligonucleotide
uacgguaauuaauuugaag

SEQ ID NO: 996977 - RNA, 19 nt, Artificial Sequence
  Description of Artificial Sequence: Synthetic oligonucleotide
aaagagcugcaaaucacac

SEQ ID NO: 996978 - RNA, 19 nt, Artificial Sequence
  Description of Artificial Sequence: Synthetic oligonucleotide
caagugauauagaacaguc

SEQ ID NO: 996979 - RNA, 19 nt, Artificial Sequence
  Description of Artificial Sequence: Synthetic oligonucleotide
ugauccaaucaccaucaag

SEQ ID NO: 996980 - RNA, 19 nt, Artificial Sequence
  Description of Artificial Sequence: Synthetic oligonucleotide
gguauugacaaaucaguag

SEQ ID NO: 996981 - RNA, 19 nt, Artificial Sequence
  Description of Artificial Sequence: Synthetic oligonucleotide
agugaagaggucucucugg

SEQ ID NO: 996982 - RNA, 19 nt, Artificial Sequence
  Description of Artificial Sequence: Synthetic oligonucleotide
ugcuuaaaggaauaugauc

SEQ ID NO: 996983 - RNA, 19 nt, Artificial Sequence
  Description of Artificial Sequence: Synthetic oligonucleotide
agucaaacacgcuuuggag

SEQ ID NO: 996984 - RNA, 19 nt, Artificial Sequence
  Description of Artificial Sequence: Synthetic oligonucleotide
acuaaaauccuuuuccauu

SEQ ID NO: 996985 - RNA, 19 nt, Artificial Sequence
  Description of Artificial Sequence: Synthetic oligonucleotide
aaauccuaaggagagggga

SEQ ID NO: 996986 - RNA, 19 nt, Artificial Sequence
  Description of Artificial Sequence: Synthetic oligonucleotide
aggagaaaccaagggaucc

SEQ ID NO: 996987 - RNA, 19 nt, Artificial Sequence
  Description of Artificial Sequence: Synthetic oligonucleotide
aaccaagggauccggauga

SEQ ID NO: 996988 - RNA, 19 nt, Artificial Sequence
  Description of Artificial Sequence: Synthetic oligonucleotide
ugguauaaguaaacaaggu

SEQ ID NO: 996989 - RNA, 19 nt, Artificial Sequence
  Description of Artificial Sequence: Synthetic oligonucleotide
ucacauacgaaggacgcag

SEQ ID NO: 996990 - RNA, 19 nt, Artificial Sequence
  Description of Artificial Sequence: Synthetic oligonucleotide
uuaaguguguuuccugaac

SEQ ID NO: 996991 - RNA, 19 nt, Artificial Sequence
  Description of Artificial Sequence: Synthetic oligonucleotide
acuugccucucuuagaaca

SEQ ID NO: 996992 - RNA, 19 nt, Artificial Sequence
  Description of Artificial Sequence: Synthetic oligonucleotide
aaguauguggguuguuugu

SEQ ID NO: 996993 - RNA, 19 nt, Artificial Sequence
  Description of Artificial Sequence: Synthetic oligonucleotide
uuacaucuaucacauuucu

SEQ ID NO: 996994 - RNA, 19 nt, Artificial Sequence
  Description of Artificial Sequence: Synthetic oligonucleotide
aaacacgcuuuggagcucc

SEQ ID NO: 996995 - RNA, 19 nt, Artificial Sequence
  Description of Artificial Sequence: Synthetic oligonucleotide
auucucaagugauauagaa

SEQ ID NO: 996996 - RNA, 19 nt, Artificial Sequence
  Description of Artificial Sequence: Synthetic oligonucleotide
ugcuacgguaauuaauuug

SEQ ID NO: 996997 - RNA, 19 nt, Artificial Sequence
  Description of Artificial Sequence: Synthetic oligonucleotide
uaaggagaggggaagcuac

SEQ ID NO: 996998 - RNA, 19 nt, Artificial Sequence
  Description of Artificial Sequence: Synthetic oligonucleotide
gucaaacacgcuuuggagc

SEQ ID NO: 996999 - RNA, 19 nt, Artificial Sequence
  Description of Artificial Sequence: Synthetic oligonucleotide
aauaacaacaaugcauaua

SEQ ID NO: 997000 - RNA, 19 nt, Artificial Sequence
  Description of Artificial Sequence: Synthetic oligonucleotide
uggaaaggucauaaaaguc

SEQ ID NO: 997001 - RNA, 19 nt, Artificial Sequence
  Description of Artificial Sequence: Synthetic oligonucleotide
uuauggaugucaaaauguu

SEQ ID NO: 997002 - RNA, 19 nt, Artificial Sequence
  Description of Artificial Sequence: Synthetic oligonucleotide
uguccguuuccucaggaga

SEQ ID NO: 997003 - RNA, 19 nt, Artificial Sequence
  Description of Artificial Sequence: Synthetic oligonucleotide
cucagcggcauuuacugcc

SEQ ID NO: 997004 - RNA, 19 nt, Artificial Sequence
  Description of Artificial Sequence: Synthetic oligonucleotide
guagaggcgaaguucagac

SEQ ID NO: 997005 - RNA, 19 nt, Artificial Sequence
  Description of Artificial Sequence: Synthetic oligonucleotide
ugggcuaaagaccuucaga

SEQ ID NO: 997006 - RNA, 19 nt, Artificial Sequence
  Description of Artificial Sequence: Synthetic oligonucleotide
uugacaaaucaguaguguc

SEQ ID NO: 997007 - RNA, 19 nt, Artificial Sequence
  Description of Artificial Sequence: Synthetic oligonucleotide
caaggaugaggcuucauuc

SEQ ID NO: 997008 - RNA, 19 nt, Artificial Sequence
  Description of Artificial Sequence: Synthetic oligonucleotide
uuugcaguccuagugucag

SEQ ID NO: 997009 - RNA, 19 nt, Artificial Sequence
  Description of Artificial Sequence: Synthetic oligonucleotide
uguccgaguagguucugcg

SEQ ID NO: 997010 - RNA, 19 nt, Artificial Sequence
  Description of Artificial Sequence: Synthetic oligonucleotide
gaagaggucucucuggguc

SEQ ID NO: 997011 - RNA, 19 nt, Artificial Sequence
  Description of Artificial Sequence: Synthetic oligonucleotide
cacaccuuacaacaguagc

SEQ ID NO: 997012 - RNA, 19 nt, Artificial Sequence
  Description of Artificial Sequence: Synthetic oligonucleotide
uccgaguagguucugcggc

SEQ ID NO: 997013 - RNA, 19 nt, Artificial Sequence
  Description of Artificial Sequence: Synthetic oligonucleotide
agaggcgaaguucagacau

SEQ ID NO: 997014 - RNA, 19 nt, Artificial Sequence
  Description of Artificial Sequence: Synthetic oligonucleotide
ugugucuuggccagaaguc

SEQ ID NO: 997015 - RNA, 19 nt, Artificial Sequence
  Description of Artificial Sequence: Synthetic oligonucleotide
aauauucuauaaagugcag

SEQ ID NO: 997016 - RNA, 19 nt, Artificial Sequence
  Description of Artificial Sequence: Synthetic oligonucleotide
uagugucaacuucacauac

SEQ ID NO: 997017 - RNA, 19 nt, Artificial Sequence
  Description of Artificial Sequence: Synthetic oligonucleotide
ucugcggcggcguugagga

SEQ ID NO: 997018 - RNA, 19 nt, Artificial Sequence
  Description of Artificial Sequence: Synthetic oligonucleotide
aaaugcaaauuguucuuua

SEQ ID NO: 997019 - RNA, 19 nt, Artificial Sequence
  Description of Artificial Sequence: Synthetic oligonucleotide
aacaucauuagaggagucu

SEQ ID NO: 997020 - RNA, 19 nt, Artificial Sequence
  Description of Artificial Sequence: Synthetic oligonucleotide
caucugaacaggagaaggc

SEQ ID NO: 997021 - RNA, 19 nt, Artificial Sequence
  Description of Artificial Sequence: Synthetic oligonucleotide
acuucacauacgaaggacg

SEQ ID NO: 997022 - RNA, 19 nt, Artificial Sequence
  Description of Artificial Sequence: Synthetic oligonucleotide
ucugucaaacaaaccugcc

SEQ ID NO: 997023 - RNA, 19 nt, Artificial Sequence
  Description of Artificial Sequence: Synthetic oligonucleotide
uuuauuucucugguauaag

SEQ ID NO: 997024 - RNA, 19 nt, Artificial Sequence
  Description of Artificial Sequence: Synthetic oligonucleotide
gaauaugauccaaucacca

SEQ ID NO: 997025 - RNA, 19 nt, Artificial Sequence
  Description of Artificial Sequence: Synthetic oligonucleotide
aaaaguauguggguuguuu

SEQ ID NO: 997026 - RNA, 19 nt, Artificial Sequence
  Description of Artificial Sequence: Synthetic oligonucleotide
uugcauagcaacacucaga

SEQ ID NO: 997027 - RNA, 19 nt, Artificial Sequence
  Description of Artificial Sequence: Synthetic oligonucleotide
cucucagcggcauuuacug

SEQ ID NO: 997028 - RNA, 19 nt, Artificial Sequence
  Description of Artificial Sequence: Synthetic oligonucleotide
gauucagauugugucuugg

SEQ ID NO: 997029 - RNA, 19 nt, Artificial Sequence
  Description of Artificial Sequence: Synthetic oligonucleotide
uaauuugaagcugggguga

SEQ ID NO: 997030 - RNA, 19 nt, Artificial Sequence
  Description of Artificial Sequence: Synthetic oligonucleotide
gcuaaagaccuucagaaca

SEQ ID NO: 997031 - RNA, 19 nt, Artificial Sequence
  Description of Artificial Sequence: Synthetic oligonucleotide
caggauggcuggcagaacg

SEQ ID NO: 997032 - RNA, 19 nt, Artificial Sequence
  Description of Artificial Sequence: Synthetic oligonucleotide
ugguccauggcacaaguua

SEQ ID NO: 997033 - RNA, 19 nt, Artificial Sequence
  Description of Artificial Sequence: Synthetic oligonucleotide
ucucuagauaugccaaaga

SEQ ID NO: 997034 - RNA, 19 nt, Artificial Sequence
  Description of Artificial Sequence: Synthetic oligonucleotide
acauuuguccuuauggaug

SEQ ID NO: 997035 - RNA, 19 nt, Artificial Sequence
  Description of Artificial Sequence: Synthetic oligonucleotide
aacaaaccugccgagauuu

SEQ ID NO: 997036 - RNA, 19 nt, Artificial Sequence
  Description of Artificial Sequence: Synthetic oligonucleotide
aggcaguugaaacaucuca

SEQ ID NO: 997037 - RNA, 19 nt, Artificial Sequence
  Description of Artificial Sequence: Synthetic oligonucleotide
auauucaauaugucauagu

SEQ ID NO: 997038 - RNA, 19 nt, Artificial Sequence
  Description of Artificial Sequence: Synthetic oligonucleotide
uuaggaggucacaguagag

SEQ ID NO: 997039 - RNA, 19 nt, Artificial Sequence
  Description of Artificial Sequence: Synthetic oligonucleotide
gucggugaagggcagaggc

SEQ ID NO: 997040 - RNA, 19 nt, Artificial Sequence
  Description of Artificial Sequence: Synthetic oligonucleotide
agucaggacauaaucaucu

SEQ ID NO: 997041 - RNA, 19 nt, Artificial Sequence
  Description of Artificial Sequence: Synthetic oligonucleotide
uauggaugucaaaauguua

SEQ ID NO: 997042 - RNA, 19 nt, Artificial Sequence
  Description of Artificial Sequence: Synthetic oligonucleotide
uggcacuaagcaaggauga

SEQ ID NO: 997043 - RNA, 19 nt, Artificial Sequence
  Description of Artificial Sequence: Synthetic oligonucleotide
aaauuggaaaggucauaaa

SEQ ID NO: 997044 - RNA, 19 nt, Artificial Sequence
  Description of Artificial Sequence: Synthetic oligonucleotide
uguaaccugauguuuggua

SEQ ID NO: 997045 - RNA, 19 nt, Artificial Sequence
  Description of Artificial Sequence: Synthetic oligonucleotide
auaugucauaguauuuggg

SEQ ID NO: 997046 - RNA, 19 nt, Artificial Sequence
  Description of Artificial Sequence: Synthetic oligonucleotide
acugggagaugaaugacuc

SEQ ID NO: 997047 - RNA, 19 nt, Artificial Sequence
  Description of Artificial Sequence: Synthetic oligonucleotide
ucguggugaacaaauuccu

SEQ ID NO: 997048 - RNA, 19 nt, Artificial Sequence
  Description of Artificial Sequence: Synthetic oligonucleotide
uugcuuaaaggaauaugau

SEQ ID NO: 997049 - RNA, 19 nt, Artificial Sequence
  Description of Artificial Sequence: Synthetic oligonucleotide
acaucucagguuuaaacuu

SEQ ID NO: 997050 - RNA, 19 nt, Artificial Sequence
  Description of Artificial Sequence: Synthetic oligonucleotide
aaaucacaccuuacaacag

SEQ ID NO: 997051 - RNA, 19 nt, Artificial Sequence
  Description of Artificial Sequence: Synthetic oligonucleotide
auaaguaaacaaggucagg

SEQ ID NO: 997052 - RNA, 19 nt, Artificial Sequence
  Description of Artificial Sequence: Synthetic oligonucleotide
auuggcuaucuucacacau

SEQ ID NO: 997053 - RNA, 19 nt, Artificial Sequence
  Description of Artificial Sequence: Synthetic oligonucleotide
auauucuauaaagugcaga

SEQ ID NO: 997054 - RNA, 19 nt, Artificial Sequence
  Description of Artificial Sequence: Synthetic oligonucleotide
acaucauuagaggagucug

SEQ ID NO: 997055 - RNA, 19 nt, Artificial Sequence
  Description of Artificial Sequence: Synthetic oligonucleotide
auugacaaaucaguagugu

SEQ ID NO: 997056 - RNA, 19 nt, Artificial Sequence
  Description of Artificial Sequence: Synthetic oligonucleotide
auguauuacagguggcacu

SEQ ID NO: 997057 - RNA, 19 nt, Artificial Sequence
  Description of Artificial Sequence: Synthetic oligonucleotide
auccggaugaggcaguuga

SEQ ID NO: 997058 - RNA, 19 nt, Artificial Sequence
  Description of Artificial Sequence: Synthetic oligonucleotide
ugaccuuuugguccauggc

SEQ ID NO: 997059 - RNA, 19 nt, Artificial Sequence
  Description of Artificial Sequence: Synthetic oligonucleotide
caucucagguuuaaacuug

SEQ ID NO: 997060 - RNA, 19 nt, Artificial Sequence
  Description of Artificial Sequence: Synthetic oligonucleotide
ggacuuuaaucucacagac

SEQ ID NO: 997061 - RNA, 19 nt, Artificial Sequence
  Description of Artificial Sequence: Synthetic oligonucleotide
ugguuuucagagauucacu

SEQ ID NO: 997062 - RNA, 19 nt, Artificial Sequence
  Description of Artificial Sequence: Synthetic oligonucleotide
aaauacucuugcaaguaaa

SEQ ID NO: 997063 - RNA, 19 nt, Artificial Sequence
  Description of Artificial Sequence: Synthetic oligonucleotide
acauacgaaggacgcagag

SEQ ID NO: 997064 - RNA, 19 nt, Artificial Sequence
  Description of Artificial Sequence: Synthetic oligonucleotide
uggaugucaaaauguuaca

SEQ ID NO: 997065 - RNA, 19 nt, Artificial Sequence
  Description of Artificial Sequence: Synthetic oligonucleotide
cacuguaaccugauguuug

SEQ ID NO: 997066 - RNA, 19 nt, Artificial Sequence
  Description of Artificial Sequence: Synthetic oligonucleotide
acugugaaguuauuaggaa

SEQ ID NO: 997067 - RNA, 19 nt, Artificial Sequence
  Description of Artificial Sequence: Synthetic oligonucleotide
gaauguauuacagguggca

SEQ ID NO: 997068 - RNA, 19 nt, Artificial Sequence
  Description of Artificial Sequence: Synthetic oligonucleotide
gugaccuuuugguccaugg

SEQ ID NO: 997069 - RNA, 19 nt, Artificial Sequence
  Description of Artificial Sequence: Synthetic oligonucleotide
uguauuacagguggcacua

SEQ ID NO: 997070 - RNA, 19 nt, Artificial Sequence
  Description of Artificial Sequence: Synthetic oligonucleotide
cauuaaguguguuuccuga

SEQ ID NO: 997071 - RNA, 19 nt, Artificial Sequence
  Description of Artificial Sequence: Synthetic oligonucleotide
cagauugugucuuggccag

SEQ ID NO: 997072 - RNA, 19 nt, Artificial Sequence
  Description of Artificial Sequence: Synthetic oligonucleotide
cugaauggacuuuaaucuc

SEQ ID NO: 997073 - RNA, 19 nt, Artificial Sequence
  Description of Artificial Sequence: Synthetic oligonucleotide
aggaaugguugcugaugcc

SEQ ID NO: 997074 - RNA, 19 nt, Artificial Sequence
  Description of Artificial Sequence: Synthetic oligonucleotide
agauucacuggucucacuu

SEQ ID NO: 997075 - RNA, 19 nt, Artificial Sequence
  Description of Artificial Sequence: Synthetic oligonucleotide
ucucucagcggcauuuacu

SEQ ID NO: 997076 - RNA, 19 nt, Artificial Sequence
  Description of Artificial Sequence: Synthetic oligonucleotide
augccaaaucuccauuaag

SEQ ID NO: 997077 - RNA, 19 nt, Artificial Sequence
  Description of Artificial Sequence: Synthetic oligonucleotide
uuaaaggaauaugauccaa

SEQ ID NO: 997078 - RNA, 19 nt, Artificial Sequence
  Description of Artificial Sequence: Synthetic oligonucleotide
uugggcuaaagaccuucag

SEQ ID NO: 997079 - RNA, 19 nt, Artificial Sequence
  Description of Artificial Sequence: Synthetic oligonucleotide
gaaauccuaaggagagggg

SEQ ID NO: 997080 - RNA, 19 nt, Artificial Sequence
  Description of Artificial Sequence: Synthetic oligonucleotide
agcgcgaccagccaccucu

SEQ ID NO: 997081 - RNA, 19 nt, Artificial Sequence
  Description of Artificial Sequence: Synthetic oligonucleotide
aaccugauguuugguauug

SEQ ID NO: 997082 - RNA, 19 nt, Artificial Sequence
  Description of Artificial Sequence: Synthetic oligonucleotide
ugucagucaaacacgcuuu

SEQ ID NO: 997083 - RNA, 19 nt, Artificial Sequence
  Description of Artificial Sequence: Synthetic oligonucleotide
cacaaguuacaucuaucac

SEQ ID NO: 997084 - RNA, 19 nt, Artificial Sequence
  Description of Artificial Sequence: Synthetic oligonucleotide
caucguggugaacaaauuc

SEQ ID NO: 997085 - RNA, 19 nt, Artificial Sequence
  Description of Artificial Sequence: Synthetic oligonucleotide
uccuggauuguaugaaccu

SEQ ID NO: 997086 - RNA, 19 nt, Artificial Sequence
  Description of Artificial Sequence: Synthetic oligonucleotide
ucucugguauaaguaaaca

SEQ ID NO: 997087 - RNA, 19 nt, Artificial Sequence
  Description of Artificial Sequence: Synthetic oligonucleotide
aagugauauagaacaguca

SEQ ID NO: 997088 - RNA, 19 nt, Artificial Sequence
  Description of Artificial Sequence: Synthetic oligonucleotide
uuugggcuaaagaccuuca

SEQ ID NO: 997089 - RNA, 19 nt, Artificial Sequence
  Description of Artificial Sequence: Synthetic oligonucleotide
acacuugccucucuuagaa

SEQ ID NO: 997090 - RNA, 19 nt, Artificial Sequence
  Description of Artificial Sequence: Synthetic oligonucleotide
aagucggugaagggcagag

SEQ ID NO: 997091 - RNA, 19 nt, Artificial Sequence
  Description of Artificial Sequence: Synthetic oligonucleotide
uagauaugccaaagagcug

SEQ ID NO: 997092 - RNA, 19 nt, Artificial Sequence
  Description of Artificial Sequence: Synthetic oligonucleotide
gcugaauggacuuuaaucu

SEQ ID NO: 997093 - RNA, 19 nt, Artificial Sequence
  Description of Artificial Sequence: Synthetic oligonucleotide
aagaccuucagaacauuaa

SEQ ID NO: 997094 - RNA, 19 nt, Artificial Sequence
  Description of Artificial Sequence: Synthetic oligonucleotide
ugccucucuuagaacaaug

SEQ ID NO: 997095 - RNA, 19 nt, Artificial Sequence
  Description of Artificial Sequence: Synthetic oligonucleotide
guggcacuaagcaaggaug

SEQ ID NO: 997096 - RNA, 19 nt, Artificial Sequence
  Description of Artificial Sequence: Synthetic oligonucleotide
aaccugccgagauuucaug

SEQ ID NO: 997097 - RNA, 19 nt, Artificial Sequence
  Description of Artificial Sequence: Synthetic oligonucleotide
ccauucucaagugauauag

SEQ ID NO: 997098 - RNA, 19 nt, Artificial Sequence
  Description of Artificial Sequence: Synthetic oligonucleotide
cucagguuuaaacuuggca

SEQ ID NO: 997099 - RNA, 19 nt, Artificial Sequence
  Description of Artificial Sequence: Synthetic oligonucleotide
gcaaaucacaccuuacaac

SEQ ID NO: 997100 - RNA, 19 nt, Artificial Sequence
  Description of Artificial Sequence: Synthetic oligonucleotide
cuuacaacaguagcuucac

SEQ ID NO: 997101 - RNA, 19 nt, Artificial Sequence
  Description of Artificial Sequence: Synthetic oligonucleotide
uucagaacauuaaguguuu

SEQ ID NO: 997102 - RNA, 19 nt, Artificial Sequence
  Description of Artificial Sequence: Synthetic oligonucleotide
cgaaguucagacauuuugg

SEQ ID NO: 997103 - RNA, 19 nt, Artificial Sequence
  Description of Artificial Sequence: Synthetic oligonucleotide
ggaauaugauccaaucacc

SEQ ID NO: 997104 - RNA, 19 nt, Artificial Sequence
  Description of Artificial Sequence: Synthetic oligonucleotide
acaccuuacaacaguagcu

SEQ ID NO: 997105 - RNA, 19 nt, Artificial Sequence
  Description of Artificial Sequence: Synthetic oligonucleotide
agaacgcuucaucaucuga

SEQ ID NO: 997106 - RNA, 19 nt, Artificial Sequence
  Description of Artificial Sequence: Synthetic oligonucleotide
aucuacauuuguccuuaug

SEQ ID NO: 997107 - RNA, 19 nt, Artificial Sequence
  Description of Artificial Sequence: Synthetic oligonucleotide
acaaugcauauacauuuua

SEQ ID NO: 997108 - RNA, 19 nt, Artificial Sequence
  Description of Artificial Sequence: Synthetic oligonucleotide
aaggguuguaaugaaugua

SEQ ID NO: 997109 - RNA, 19 nt, Artificial Sequence
  Description of Artificial Sequence: Synthetic oligonucleotide
aauccuaaggagaggggaa

SEQ ID NO: 997110 - RNA, 19 nt, Artificial Sequence
  Description of Artificial Sequence: Synthetic oligonucleotide
auucaauaugucauaguau

SEQ ID NO: 997111 - RNA, 19 nt, Artificial Sequence
  Description of Artificial Sequence: Synthetic oligonucleotide
aggguuguaaugaauguau

SEQ ID NO: 997112 - RNA, 19 nt, Artificial Sequence
  Description of Artificial Sequence: Synthetic oligonucleotide
gcauuggcuaucuucacac

SEQ ID NO: 997113 - RNA, 19 nt, Artificial Sequence
  Description of Artificial Sequence: Synthetic oligonucleotide
gaugccaaaucuccauuaa

SEQ ID NO: 997114 - RNA, 19 nt, Artificial Sequence
  Description of Artificial Sequence: Synthetic oligonucleotide
cacaguagaggcgaaguuc

SEQ ID NO: 997115 - RNA, 19 nt, Artificial Sequence
  Description of Artificial Sequence: Synthetic oligonucleotide
gcuacgguaauuaauuuga

SEQ ID NO: 997116 - RNA, 19 nt, Artificial Sequence
  Description of Artificial Sequence: Synthetic oligonucleotide
uggcacaaguuacaucuau

SEQ ID NO: 997117 - RNA, 19 nt, Artificial Sequence
  Description of Artificial Sequence: Synthetic oligonucleotide
auagcaacacucagaggag

SEQ ID NO: 997118 - RNA, 19 nt, Artificial Sequence
  Description of Artificial Sequence: Synthetic oligonucleotide
ucuacacugggagaugaau

SEQ ID NO: 997119 - RNA, 19 nt, Artificial Sequence
  Description of Artificial Sequence: Synthetic oligonucleotide
auaucuacauuuguccuua

SEQ ID NO: 997120 - RNA, 19 nt, Artificial Sequence
  Description of Artificial Sequence: Synthetic oligonucleotide
caguagcuucacuaaaauc

SEQ ID NO: 997121 - RNA, 19 nt, Artificial Sequence
  Description of Artificial Sequence: Synthetic oligonucleotide
auuaaguguuuccuuucuu

SEQ ID NO: 997122 - RNA, 19 nt, Artificial Sequence
  Description of Artificial Sequence: Synthetic oligonucleotide
gggcuaaagaccuucagaa

SEQ ID NO: 997123 - RNA, 19 nt, Artificial Sequence
  Description of Artificial Sequence: Synthetic oligonucleotide
guccgaguagguucugcgg

SEQ ID NO: 997124 - RNA, 19 nt, Artificial Sequence
  Description of Artificial Sequence: Synthetic oligonucleotide
agcggcauuuacugccuuc

SEQ ID NO: 997125 - RNA, 19 nt, Artificial Sequence
  Description of Artificial Sequence: Synthetic oligonucleotide
uaugaaccugcugcauuag

SEQ ID NO: 997126 - RNA, 19 nt, Artificial Sequence
  Description of Artificial Sequence: Synthetic oligonucleotide
ccuuauggaugucaaaaug

SEQ ID NO: 997127 - RNA, 19 nt, Artificial Sequence
  Description of Artificial Sequence: Synthetic oligonucleotide
cugugaaguuauuaggaaa

SEQ ID NO: 997128 - RNA, 19 nt, Artificial Sequence
  Description of Artificial Sequence: Synthetic oligonucleotide
uggguuguuuguuuacaau

SEQ ID NO: 997129 - RNA, 19 nt, Artificial Sequence
  Description of Artificial Sequence: Synthetic oligonucleotide
acgaaggacgcagagucug

SEQ ID NO: 997130 - RNA, 19 nt, Artificial Sequence
  Description of Artificial Sequence: Synthetic oligonucleotide
aacaaugcauauacauuuu

SEQ ID NO: 997131 - RNA, 19 nt, Artificial Sequence
  Description of Artificial Sequence: Synthetic oligonucleotide
gaacgcuucaucaucugaa

SEQ ID NO: 997132 - RNA, 19 nt, Artificial Sequence
  Description of Artificial Sequence: Synthetic oligonucleotide
cauugaaagccauuuauuu

SEQ ID NO: 997133 - RNA, 19 nt, Artificial Sequence
  Description of Artificial Sequence: Synthetic oligonucleotide
ugucaacuucacauacgaa

SEQ ID NO: 997134 - RNA, 19 nt, Artificial Sequence
  Description of Artificial Sequence: Synthetic oligonucleotide
guauuugggcuaaagaccu

SEQ ID NO: 997135 - RNA, 19 nt, Artificial Sequence
  Description of Artificial Sequence: Synthetic oligonucleotide
ucagcggcauuuacugccu

SEQ ID NO: 997136 - RNA, 19 nt, Artificial Sequence
  Description of Artificial Sequence: Synthetic oligonucleotide
cuuuggagcuccccagcgc

SEQ ID NO: 997137 - RNA, 19 nt, Artificial Sequence
  Description of Artificial Sequence: Synthetic oligonucleotide
acauccauacugugaaguu

SEQ ID NO: 997138 - RNA, 19 nt, Artificial Sequence
  Description of Artificial Sequence: Synthetic oligonucleotide
aggaugaggcuucauucau

SEQ ID NO: 997139 - RNA, 19 nt, Artificial Sequence
  Description of Artificial Sequence: Synthetic oligonucleotide
uucacauacgaaggacgca

SEQ ID NO: 997140 - RNA, 19 nt, Artificial Sequence
  Description of Artificial Sequence: Synthetic oligonucleotide
uccucaggagaaagauggc

SEQ ID NO: 997141 - RNA, 19 nt, Artificial Sequence
  Description of Artificial Sequence: Synthetic oligonucleotide
cagugaagaggucucucug

SEQ ID NO: 997142 - RNA, 19 nt, Artificial Sequence
  Description of Artificial Sequence: Synthetic oligonucleotide
aggauggcuggcagaacgc

SEQ ID NO: 997143 - RNA, 19 nt, Artificial Sequence
  Description of Artificial Sequence: Synthetic oligonucleotide
gacacuugccucucuuaga

SEQ ID NO: 997144 - RNA, 19 nt, Artificial Sequence
  Description of Artificial Sequence: Synthetic oligonucleotide
aaagugcagagaaauccua

SEQ ID NO: 997145 - RNA, 19 nt, Artificial Sequence
  Description of Artificial Sequence: Synthetic oligonucleotide
auugugucuuggccagaag

SEQ ID NO: 997146 - RNA, 19 nt, Artificial Sequence
  Description of Artificial Sequence: Synthetic oligonucleotide
gucagucaaacacgcuuug

SEQ ID NO: 997147 - RNA, 19 nt, Artificial Sequence
  Description of Artificial Sequence: Synthetic oligonucleotide
gcuaucuucacacauuccu

SEQ ID NO: 997148 - RNA, 19 nt, Artificial Sequence
  Description of Artificial Sequence: Synthetic oligonucleotide
accugccgagauuucaugu

SEQ ID NO: 997149 - RNA, 19 nt, Artificial Sequence
  Description of Artificial Sequence: Synthetic oligonucleotide
ucucagcggcauuuacugc

SEQ ID NO: 997150 - RNA, 19 nt, Artificial Sequence
  Description of Artificial Sequence: Synthetic oligonucleotide
aaaucuccauuaagugugu

SEQ ID NO: 997151 - RNA, 19 nt, Artificial Sequence
  Description of Artificial Sequence: Synthetic oligonucleotide
guaaccugauguuugguau

SEQ ID NO: 997152 - RNA, 19 nt, Artificial Sequence
  Description of Artificial Sequence: Synthetic oligonucleotide
uaaccugauguuugguauu

SEQ ID NO: 997153 - RNA, 19 nt, Artificial Sequence
  Description of Artificial Sequence: Synthetic oligonucleotide
caaaucaguagugucaacu

SEQ ID NO: 997154 - RNA, 19 nt, Artificial Sequence
  Description of Artificial Sequence: Synthetic oligonucleotide
gguuguaaugaauguauua

SEQ ID NO: 997155 - RNA, 19 nt, Artificial Sequence
  Description of Artificial Sequence: Synthetic oligonucleotide
accaucaagcugcuacggu

SEQ ID NO: 997156 - RNA, 19 nt, Artificial Sequence
  Description of Artificial Sequence: Synthetic oligonucleotide
guagugucaacuucacaua

SEQ ID NO: 997157 - RNA, 19 nt, Artificial Sequence
  Description of Artificial Sequence: Synthetic oligonucleotide
acgcuuuggagcuccccag

SEQ ID NO: 997158 - RNA, 19 nt, Artificial Sequence
  Description of Artificial Sequence: Synthetic oligonucleotide
uucugcggcggcguugagg

SEQ ID NO: 997159 - RNA, 19 nt, Artificial Sequence
  Description of Artificial Sequence: Synthetic oligonucleotide
ugaacaggagaaggcgaca

SEQ ID NO: 997160 - RNA, 19 nt, Artificial Sequence
  Description of Artificial Sequence: Synthetic oligonucleotide
uccuagugucagucaaaca

SEQ ID NO: 997161 - RNA, 19 nt, Artificial Sequence
  Description of Artificial Sequence: Synthetic oligonucleotide
aaaccugccgagauuucau

SEQ ID NO: 997162 - RNA, 19 nt, Artificial Sequence
  Description of Artificial Sequence: Synthetic oligonucleotide
gugauauagaacagucauc

SEQ ID NO: 997163 - RNA, 19 nt, Artificial Sequence
  Description of Artificial Sequence: Synthetic oligonucleotide
gaaaccaagggauccggau

SEQ ID NO: 997164 - RNA, 19 nt, Artificial Sequence
  Description of Artificial Sequence: Synthetic oligonucleotide
ggaaaauacucuugcaagu

SEQ ID NO: 997165 - RNA, 19 nt, Artificial Sequence
  Description of Artificial Sequence: Synthetic oligonucleotide
gauucacuggucucacuua

SEQ ID NO: 997166 - RNA, 19 nt, Artificial Sequence
  Description of Artificial Sequence: Synthetic oligonucleotide
guagaaaugcugcucuccu

SEQ ID NO: 997167 - RNA, 19 nt, Artificial Sequence
  Description of Artificial Sequence: Synthetic oligonucleotide
aguaaacuauagaaagaua

SEQ ID NO: 997168 - RNA, 19 nt, Artificial Sequence
  Description of Artificial Sequence: Synthetic oligonucleotide
guguccguuuccucaggag

SEQ ID NO: 997169 - RNA, 19 nt, Artificial Sequence
  Description of Artificial Sequence: Synthetic oligonucleotide
ugccgagauuucauguuua

SEQ ID NO: 997170 - RNA, 19 nt, Artificial Sequence
  Description of Artificial Sequence: Synthetic oligonucleotide
caucaagcugcuacgguaa

SEQ ID NO: 997171 - RNA, 19 nt, Artificial Sequence
  Description of Artificial Sequence: Synthetic oligonucleotide
cauucucaagugauauaga

SEQ ID NO: 997172 - RNA, 19 nt, Artificial Sequence
  Description of Artificial Sequence: Synthetic oligonucleotide
guugaggaagucggugaag

SEQ ID NO: 997173 - RNA, 19 nt, Artificial Sequence
  Description of Artificial Sequence: Synthetic oligonucleotide
aaggacgcagagucugauu

SEQ ID NO: 997174 - RNA, 19 nt, Artificial Sequence
  Description of Artificial Sequence: Synthetic oligonucleotide
aagcugcuacgguaauuaa

SEQ ID NO: 997175 - RNA, 19 nt, Artificial Sequence
  Description of Artificial Sequence: Synthetic oligonucleotide
gaugaaugacucucaucgu

SEQ ID NO: 997176 - RNA, 19 nt, Artificial Sequence
  Description of Artificial Sequence: Synthetic oligonucleotide
guccuagugucagucaaac

SEQ ID NO: 997177 - RNA, 19 nt, Artificial Sequence
  Description of Artificial Sequence: Synthetic oligonucleotide
agcuaccccagaaagaguu

SEQ ID NO: 997178 - RNA, 19 nt, Artificial Sequence
  Description of Artificial Sequence: Synthetic oligonucleotide
agaggaggcgggguguguc

SEQ ID NO: 997179 - RNA, 19 nt, Artificial Sequence
  Description of Artificial Sequence: Synthetic oligonucleotide
ucauaaaagucaggacaua

SEQ ID NO: 997180 - RNA, 19 nt, Artificial Sequence
  Description of Artificial Sequence: Synthetic oligonucleotide
cuaaagaccuucagaacau

SEQ ID NO: 997181 - RNA, 19 nt, Artificial Sequence
  Description of Artificial Sequence: Synthetic oligonucleotide
cacuggucucacuuauuuc

SEQ ID NO: 997182 - RNA, 19 nt, Artificial Sequence
  Description of Artificial Sequence: Synthetic oligonucleotide
aguauguggguuguuuguu

SEQ ID NO: 997183 - RNA, 19 nt, Artificial Sequence
  Description of Artificial Sequence: Synthetic oligonucleotide
ggcagaacgcuucaucauc

SEQ ID NO: 997184 - RNA, 19 nt, Artificial Sequence
  Description of Artificial Sequence: Synthetic oligonucleotide
uacugaccaagcugucagu

SEQ ID NO: 997185 - RNA, 19 nt, Artificial Sequence
  Description of Artificial Sequence: Synthetic oligonucleotide
ggcuaaagaccuucagaac

SEQ ID NO: 997186 - RNA, 19 nt, Artificial Sequence
  Description of Artificial Sequence: Synthetic oligonucleotide
agucaucuugacaggauua

SEQ ID NO: 997187 - RNA, 19 nt, Artificial Sequence
  Description of Artificial Sequence: Synthetic oligonucleotide
gugucagucaaacacgcuu

SEQ ID NO: 997188 - RNA, 19 nt, Artificial Sequence
  Description of Artificial Sequence: Synthetic oligonucleotide
ugacucucaucguggugaa

SEQ ID NO: 997189 - RNA, 19 nt, Artificial Sequence
  Description of Artificial Sequence: Synthetic oligonucleotide
uuacugccuucauguagaa

SEQ ID NO: 997190 - RNA, 19 nt, Artificial Sequence
  Description of Artificial Sequence: Synthetic oligonucleotide
gauaugccaaagagcugca

SEQ ID NO: 997191 - RNA, 19 nt, Artificial Sequence
  Description of Artificial Sequence: Synthetic oligonucleotide
caaggguuguaaugaaugu

SEQ ID NO: 997192 - RNA, 19 nt, Artificial Sequence
  Description of Artificial Sequence: Synthetic oligonucleotide
cugaacagugaagaggucu

SEQ ID NO: 997193 - RNA, 19 nt, Artificial Sequence
  Description of Artificial Sequence: Synthetic oligonucleotide
cacgcuuuggagcucccca

SEQ ID NO: 997194 - RNA, 19 nt, Artificial Sequence
  Description of Artificial Sequence: Synthetic oligonucleotide
uauuugggcuaaagaccuu

SEQ ID NO: 997195 - RNA, 19 nt, Artificial Sequence
  Description of Artificial Sequence: Synthetic oligonucleotide
acacuguaaccugauguuu

SEQ ID NO: 997196 - RNA, 19 nt, Artificial Sequence
  Description of Artificial Sequence: Synthetic oligonucleotide
gagacacuugccucucuua

SEQ ID NO: 997197 - RNA, 19 nt, Artificial Sequence
  Description of Artificial Sequence: Synthetic oligonucleotide
cauuccucaaggguuguaa

SEQ ID NO: 997198 - RNA, 19 nt, Artificial Sequence
  Description of Artificial Sequence: Synthetic oligonucleotide
cuacgguaauuaauuugaa

SEQ ID NO: 997199 - RNA, 19 nt, Artificial Sequence
  Description of Artificial Sequence: Synthetic oligonucleotide
aaguuacaucuaucacauu

SEQ ID NO: 997200 - RNA, 19 nt, Artificial Sequence
  Description of Artificial Sequence: Synthetic oligonucleotide
agucggugaagggcagagg

SEQ ID NO: 997201 - RNA, 19 nt, Artificial Sequence
  Description of Artificial Sequence: Synthetic oligonucleotide
cuaagcaaggaugaggcuu

SEQ ID NO: 997202 - RNA, 19 nt, Artificial Sequence
  Description of Artificial Sequence: Synthetic oligonucleotide
agcugcuacgguaauuaau

SEQ ID NO: 997203 - RNA, 19 nt, Artificial Sequence
  Description of Artificial Sequence: Synthetic oligonucleotide
gaggcaguugaaacaucuc

SEQ ID NO: 997204 - RNA, 19 nt, Artificial Sequence
  Description of Artificial Sequence: Synthetic oligonucleotide
cuacaauacugaccaagcu

SEQ ID NO: 997205 - RNA, 19 nt, Artificial Sequence
  Description of Artificial Sequence: Synthetic oligonucleotide
gcauagcaacacucagagg

SEQ ID NO: 997206 - RNA, 19 nt, Artificial Sequence
  Description of Artificial Sequence: Synthetic oligonucleotide
cacuugccucucuuagaac

SEQ ID NO: 997207 - RNA, 19 nt, Artificial Sequence
  Description of Artificial Sequence: Synthetic oligonucleotide
gucucucagcggcauuuac

SEQ ID NO: 997208 - RNA, 19 nt, Artificial Sequence
  Description of Artificial Sequence: Synthetic oligonucleotide
gccucucuuagaacaaugc

SEQ ID NO: 997209 - RNA, 19 nt, Artificial Sequence
  Description of Artificial Sequence: Synthetic oligonucleotide
ggaacaucauuagaggagu

SEQ ID NO: 997210 - RNA, 19 nt, Artificial Sequence
  Description of Artificial Sequence: Synthetic oligonucleotide
ucaagcugcuacgguaauu

SEQ ID NO: 997211 - RNA, 19 nt, Artificial Sequence
  Description of Artificial Sequence: Synthetic oligonucleotide
uggggugaagugaccuuuu

SEQ ID NO: 997212 - RNA, 19 nt, Artificial Sequence
  Description of Artificial Sequence: Synthetic oligonucleotide
agaaaccaagggauccgga

SEQ ID NO: 997213 - RNA, 19 nt, Artificial Sequence
  Description of Artificial Sequence: Synthetic oligonucleotide
ccgaguagguucugcggcg

SEQ ID NO: 997214 - RNA, 19 nt, Artificial Sequence
  Description of Artificial Sequence: Synthetic oligonucleotide
caucauuagaggagucugu

SEQ ID NO: 997215 - RNA, 19 nt, Artificial Sequence
  Description of Artificial Sequence: Synthetic oligonucleotide
gaaggcgacacaggagaaa

SEQ ID NO: 997216 - RNA, 19 nt, Artificial Sequence
  Description of Artificial Sequence: Synthetic oligonucleotide
auacuacaauacugaccaa

SEQ ID NO: 997217 - RNA, 19 nt, Artificial Sequence
  Description of Artificial Sequence: Synthetic oligonucleotide
cauccauacugugaaguua

SEQ ID NO: 997218 - RNA, 19 nt, Artificial Sequence
  Description of Artificial Sequence: Synthetic oligonucleotide
ccuggauuguaugaaccug

SEQ ID NO: 997219 - RNA, 19 nt, Artificial Sequence
  Description of Artificial Sequence: Synthetic oligonucleotide
cacauacgaaggacgcaga

SEQ ID NO: 997220 - RNA, 19 nt, Artificial Sequence
  Description of Artificial Sequence: Synthetic oligonucleotide
agugucagucaaacacgcu

SEQ ID NO: 997221 - RNA, 19 nt, Artificial Sequence
  Description of Artificial Sequence: Synthetic oligonucleotide
cuucaaaaguauguggguu

SEQ ID NO: 997222 - RNA, 19 nt, Artificial Sequence
  Description of Artificial Sequence: Synthetic oligonucleotide
ccucucuuagaacaaugca

SEQ ID NO: 997223 - RNA, 19 nt, Artificial Sequence
  Description of Artificial Sequence: Synthetic oligonucleotide
accccagaaagaguuuaau

SEQ ID NO: 997224 - RNA, 19 nt, Artificial Sequence
  Description of Artificial Sequence: Synthetic oligonucleotide
ggaagcuaccccagaaaga

SEQ ID NO: 997225 - RNA, 19 nt, Artificial Sequence
  Description of Artificial Sequence: Synthetic oligonucleotide
agugaccuuuugguccaug

SEQ ID NO: 997226 - RNA, 19 nt, Artificial Sequence
  Description of Artificial Sequence: Synthetic oligonucleotide
ggcacaaguuacaucuauc

SEQ ID NO: 997227 - RNA, 19 nt, Artificial Sequence
  Description of Artificial Sequence: Synthetic oligonucleotide
uccccagcgcgaccagcca

SEQ ID NO: 997228 - RNA, 19 nt, Artificial Sequence
  Description of Artificial Sequence: Synthetic oligonucleotide
augauccaaucaccaucaa

SEQ ID NO: 997229 - RNA, 19 nt, Artificial Sequence
  Description of Artificial Sequence: Synthetic oligonucleotide
cuaaggagaggggaagcua

SEQ ID NO: 997230 - RNA, 19 nt, Artificial Sequence
  Description of Artificial Sequence: Synthetic oligonucleotide
cucuugcaaguaaacuaua

SEQ ID NO: 997231 - RNA, 19 nt, Artificial Sequence
  Description of Artificial Sequence: Synthetic oligonucleotide
ggggugaagugaccuuuug

SEQ ID NO: 997232 - RNA, 19 nt, Artificial Sequence
  Description of Artificial Sequence: Synthetic oligonucleotide
ggucacaguagaggcgaag

SEQ ID NO: 997233 - RNA, 19 nt, Artificial Sequence
  Description of Artificial Sequence: Synthetic oligonucleotide
guguccgaguagguucugc

SEQ ID NO: 997234 - RNA, 19 nt, Artificial Sequence
  Description of Artificial Sequence: Synthetic oligonucleotide
gguggcacuaagcaaggau

SEQ ID NO: 997235 - RNA, 19 nt, Artificial Sequence
  Description of Artificial Sequence: Synthetic oligonucleotide
gaagucggugaagggcaga

SEQ ID NO: 997236 - RNA, 19 nt, Artificial Sequence
  Description of Artificial Sequence: Synthetic oligonucleotide
gcugcuacgguaauuaauu

SEQ ID NO: 997237 - RNA, 19 nt, Artificial Sequence
  Description of Artificial Sequence: Synthetic oligonucleotide
aguccuagugucagucaaa

SEQ ID NO: 997238 - RNA, 19 nt, Artificial Sequence
  Description of Artificial Sequence: Synthetic oligonucleotide
cuaccccagaaagaguuua

SEQ ID NO: 997239 - RNA, 19 nt, Artificial Sequence
  Description of Artificial Sequence: Synthetic oligonucleotide
cauacgaaggacgcagagu

SEQ ID NO: 997240 - RNA, 19 nt, Artificial Sequence
  Description of Artificial Sequence: Synthetic oligonucleotide
gugucuuggccagaagucu

SEQ ID NO: 997241 - RNA, 19 nt, Artificial Sequence
  Description of Artificial Sequence: Synthetic oligonucleotide
cucuuagaacaaugcaaau

SEQ ID NO: 997242 - RNA, 19 nt, Artificial Sequence
  Description of Artificial Sequence: Synthetic oligonucleotide
uguguccgaguagguucug

SEQ ID NO: 997243 - RNA, 19 nt, Artificial Sequence
  Description of Artificial Sequence: Synthetic oligonucleotide
agaaggcgacacaggagaa

SEQ ID NO: 997244 - RNA, 19 nt, Artificial Sequence
  Description of Artificial Sequence: Synthetic oligonucleotide
ccaucaagcugcuacggua

SEQ ID NO: 997245 - RNA, 19 nt, Artificial Sequence
  Description of Artificial Sequence: Synthetic oligonucleotide
cuguguccgaguagguucu

SEQ ID NO: 997246 - RNA, 19 nt, Artificial Sequence
  Description of Artificial Sequence: Synthetic oligonucleotide
ccaagggauccggaugagg

SEQ ID NO: 997247 - RNA, 19 nt, Artificial Sequence
  Description of Artificial Sequence: Synthetic oligonucleotide
ggugaacaaauuccuggau

SEQ ID NO: 997248 - RNA, 19 nt, Artificial Sequence
  Description of Artificial Sequence: Synthetic oligonucleotide
cucuacacugggagaugaa

SEQ ID NO: 997249 - RNA, 19 nt, Artificial Sequence
  Description of Artificial Sequence: Synthetic oligonucleotide
caaacacgcuuuggagcuc

SEQ ID NO: 997250 - RNA, 19 nt, Artificial Sequence
  Description of Artificial Sequence: Synthetic oligonucleotide
cccagcgcgaccagccacc

SEQ ID NO: 997251 - RNA, 19 nt, Artificial Sequence
  Description of Artificial Sequence: Synthetic oligonucleotide
agauugugucuuggccaga

SEQ ID NO: 997252 - RNA, 19 nt, Artificial Sequence
  Description of Artificial Sequence: Synthetic oligonucleotide
gcggcauuuacugccuuca

SEQ ID NO: 997253 - RNA, 19 nt, Artificial Sequence
  Description of Artificial Sequence: Synthetic oligonucleotide
caccuuacaacaguagcuu

SEQ ID NO: 997254 - RNA, 19 nt, Artificial Sequence
  Description of Artificial Sequence: Synthetic oligonucleotide
gacucucaucguggugaac

SEQ ID NO: 997255 - RNA, 19 nt, Artificial Sequence
  Description of Artificial Sequence: Synthetic oligonucleotide
gguucugcggcggcguuga

SEQ ID NO: 997256 - RNA, 19 nt, Artificial Sequence
  Description of Artificial Sequence: Synthetic oligonucleotide
gaaggacgcagagucugau

SEQ ID NO: 997257 - RNA, 19 nt, Artificial Sequence
  Description of Artificial Sequence: Synthetic oligonucleotide
gagaaagauggaagagguu

SEQ ID NO: 997258 - RNA, 19 nt, Artificial Sequence
  Description of Artificial Sequence: Synthetic oligonucleotide
acauuccucaaggguugua

SEQ ID NO: 997259 - RNA, 19 nt, Artificial Sequence
  Description of Artificial Sequence: Synthetic oligonucleotide
cuuguguugucugcugaau

SEQ ID NO: 997260 - RNA, 19 nt, Artificial Sequence
  Description of Artificial Sequence: Synthetic oligonucleotide
agcaaggaugaggcuucau

SEQ ID NO: 997261 - RNA, 19 nt, Artificial Sequence
  Description of Artificial Sequence: Synthetic oligonucleotide
gccauucucaagugauaua

SEQ ID NO: 997262 - RNA, 19 nt, Artificial Sequence
  Description of Artificial Sequence: Synthetic oligonucleotide
cugccgagauuucauguuu

SEQ ID NO: 997263 - RNA, 19 nt, Artificial Sequence
  Description of Artificial Sequence: Synthetic oligonucleotide
auggcacaaguuacaucua

SEQ ID NO: 997264 - RNA, 19 nt, Artificial Sequence
  Description of Artificial Sequence: Synthetic oligonucleotide
ggacgcagagucugauucu

SEQ ID NO: 997265 - RNA, 19 nt, Artificial Sequence
  Description of Artificial Sequence: Synthetic oligonucleotide
ccucaaggguuguaaugaa

SEQ ID NO: 997266 - RNA, 19 nt, Artificial Sequence
  Description of Artificial Sequence: Synthetic oligonucleotide
gucuguguccgaguagguu

SEQ ID NO: 997267 - RNA, 19 nt, Artificial Sequence
  Description of Artificial Sequence: Synthetic oligonucleotide
cuggggugaagugaccuuu

SEQ ID NO: 997268 - RNA, 19 nt, Artificial Sequence
  Description of Artificial Sequence: Synthetic oligonucleotide
gccgagauuucauguuuau

SEQ ID NO: 997269 - RNA, 19 nt, Artificial Sequence
  Description of Artificial Sequence: Synthetic oligonucleotide
aggcgggguguguccguuu

SEQ ID NO: 997270 - RNA, 19 nt, Artificial Sequence
  Description of Artificial Sequence: Synthetic oligonucleotide
ccccagcgcgaccagccac

SEQ ID NO: 997271 - RNA, 19 nt, Artificial Sequence
  Description of Artificial Sequence: Synthetic oligonucleotide
ggguuguaaugaauguauu

SEQ ID NO: 997272 - RNA, 19 nt, Artificial Sequence
  Description of Artificial Sequence: Synthetic oligonucleotide
ccuaaggagaggggaagcu

SEQ ID NO: 997273 - RNA, 19 nt, Artificial Sequence
  Description of Artificial Sequence: Synthetic oligonucleotide
cacagacggccaucuuuau

SEQ ID NO: 997274 - RNA, 19 nt, Artificial Sequence
  Description of Artificial Sequence: Synthetic oligonucleotide
caaaaguauguggguuguu

SEQ ID NO: 997275 - RNA, 19 nt, Artificial Sequence
  Description of Artificial Sequence: Synthetic oligonucleotide
cgaaggacgcagagucuga

SEQ ID NO: 997276 - RNA, 19 nt, Artificial Sequence
  Description of Artificial Sequence: Synthetic oligonucleotide
cagcgcgaccagccaccuc

SEQ ID NO: 997277 - RNA, 19 nt, Artificial Sequence
  Description of Artificial Sequence: Synthetic oligonucleotide
ccugccgagauuucauguu

SEQ ID NO: 997278 - RNA, 19 nt, Artificial Sequence
  Description of Artificial Sequence: Synthetic oligonucleotide
gaggcgggguguguccguu

SEQ ID NO: 997279 - RNA, 19 nt, Artificial Sequence
  Description of Artificial Sequence: Synthetic oligonucleotide
ggaggcgggguguguccgu

SEQ ID NO: 997280 - RNA, 19 nt, Artificial Sequence
  Description of Artificial Sequence: Synthetic oligonucleotide
gcgcgaccagccaccucug

SEQ ID NO: 997281 - RNA, 19 nt, Artificial Sequence
  Description of Artificial Sequence: Synthetic oligonucleotide
ggcgaaguucagacauuuu

SEQ ID NO: 997282 - RNA, 19 nt, Artificial Sequence
  Description of Artificial Sequence: Synthetic oligonucleotide
gggauccggaugaggcagu

SEQ ID NO: 997283 - RNA, 19 nt, Artificial Sequence
  Description of Artificial Sequence: Synthetic oligonucleotide
ggauccggaugaggcaguu

SEQ ID NO: 997284 - RNA, 19 nt, Artificial Sequence
  Description of Artificial Sequence: Synthetic oligonucleotide
cagcggcauuuacugccuu

SEQ ID NO: 997285 - RNA, 19 nt, Artificial Sequence
  Description of Artificial Sequence: Synthetic oligonucleotide
cggcauuuacugccuucau

SEQ ID NO: 997286 - RNA, 19 nt, Artificial Sequence
  Description of Artificial Sequence: Synthetic oligonucleotide
ccagcgcgaccagccaccu

SEQ ID NO: 997287 - RNA, 19 nt, Artificial Sequence
  Description of Artificial Sequence: Synthetic oligonucleotide
gaugauaucaaagaggugg

SEQ ID NO: 997288 - RNA, 19 nt, Artificial Sequence
  Description of Artificial Sequence: Synthetic oligonucleotide
aagauagccaaugacacgc

SEQ ID NO: 997289 - RNA, 19 nt, Artificial Sequence
  Description of Artificial Sequence: Synthetic oligonucleotide
auaucaaagagguggaccc

SEQ ID NO: 997290 - RNA, 19 nt, Artificial Sequence
  Description of Artificial Sequence: Synthetic oligonucleotide
caaacgaccaccuacaccc

SEQ ID NO: 997291 - RNA, 19 nt, Artificial Sequence
  Description of Artificial Sequence: Synthetic oligonucleotide
auaaggaucaucauuaggg

SEQ ID NO: 997292 - RNA, 19 nt, Artificial Sequence
  Description of Artificial Sequence: Synthetic oligonucleotide
ucuaagagcaccauuggug

SEQ ID NO: 997293 - RNA, 19 nt, Artificial Sequence
  Description of Artificial Sequence: Synthetic oligonucleotide
uuuugguuaccuuagcaag

SEQ ID NO: 997294 - RNA, 19 nt, Artificial Sequence
  Description of Artificial Sequence: Synthetic oligonucleotide
ucuaaaaucucuaggauuu

SEQ ID NO: 997295 - RNA, 19 nt, Artificial Sequence
  Description of Artificial Sequence: Synthetic oligonucleotide
aaugcgaggauuguuuugg

SEQ ID NO: 997296 - RNA, 19 nt, Artificial Sequence
  Description of Artificial Sequence: Synthetic oligonucleotide
uucauaauagcuguuucgg

SEQ ID NO: 997297 - RNA, 19 nt, Artificial Sequence
  Description of Artificial Sequence: Synthetic oligonucleotide
gacgcaaaucauuaaaagc

SEQ ID NO: 997298 - RNA, 19 nt, Artificial Sequence
  Description of Artificial Sequence: Synthetic oligonucleotide
guucaaauagggaacaagg

SEQ ID NO: 997299 - RNA, 19 nt, Artificial Sequence
  Description of Artificial Sequence: Synthetic oligonucleotide
augaacgucuuguaguugg

SEQ ID NO: 997300 - RNA, 19 nt, Artificial Sequence
  Description of Artificial Sequence: Synthetic oligonucleotide
cauaauagcuguuucggac

SEQ ID NO: 997301 - RNA, 19 nt, Artificial Sequence
  Description of Artificial Sequence: Synthetic oligonucleotide
aacagcgacgccaaaaguc

SEQ ID NO: 997302 - RNA, 19 nt, Artificial Sequence
  Description of Artificial Sequence: Synthetic oligonucleotide
aagucuaagagcaccauug

SEQ ID NO: 997303 - RNA, 19 nt, Artificial Sequence
  Description of Artificial Sequence: Synthetic oligonucleotide
guaggaagucauuucaucc

SEQ ID NO: 997304 - RNA, 19 nt, Artificial Sequence
  Description of Artificial Sequence: Synthetic oligonucleotide
gauaucaaagagguggacc

SEQ ID NO: 997305 - RNA, 19 nt, Artificial Sequence
  Description of Artificial Sequence: Synthetic oligonucleotide
uucaaauagggaacaaggu

SEQ ID NO: 997306 - RNA, 19 nt, Artificial Sequence
  Description of Artificial Sequence: Synthetic oligonucleotide
caggauaaaggcgagaggc

SEQ ID NO: 997307 - RNA, 19 nt, Artificial Sequence
  Description of Artificial Sequence: Synthetic oligonucleotide
auagggaacaaggucuucc

SEQ ID NO: 997308 - RNA, 19 nt, Artificial Sequence
  Description of Artificial Sequence: Synthetic oligonucleotide
guuagagcugaucuccucg

SEQ ID NO: 997309 - RNA, 19 nt, Artificial Sequence
  Description of Artificial Sequence: Synthetic oligonucleotide
guuggcgaaggccaggucg

SEQ ID NO: 997310 - RNA, 19 nt, Artificial Sequence
  Description of Artificial Sequence: Synthetic oligonucleotide
acgcaaaucauuaaaagca

SEQ ID NO: 997311 - RNA, 19 nt, Artificial Sequence
  Description of Artificial Sequence: Synthetic oligonucleotide
cuuaggcaggauaaaggcg

SEQ ID NO: 997312 - RNA, 19 nt, Artificial Sequence
  Description of Artificial Sequence: Synthetic oligonucleotide
ucggaaaucagccccuacc

SEQ ID NO: 997313 - RNA, 19 nt, Artificial Sequence
  Description of Artificial Sequence: Synthetic oligonucleotide
auaauagcuguuucggaca

SEQ ID NO: 997314 - RNA, 19 nt, Artificial Sequence
  Description of Artificial Sequence: Synthetic oligonucleotide
uaaggaucaucauuaggga

SEQ ID NO: 997315 - RNA, 19 nt, Artificial Sequence
  Description of Artificial Sequence: Synthetic oligonucleotide
uuagggauggcagucagga

SEQ ID NO: 997316 - RNA, 19 nt, Artificial Sequence
  Description of Artificial Sequence: Synthetic oligonucleotide
aacgucuuguaguuggcga

SEQ ID NO: 997317 - RNA, 19 nt, Artificial Sequence
  Description of Artificial Sequence: Synthetic oligonucleotide
ggugaugauaucaaagagg

SEQ ID NO: 997318 - RNA, 19 nt, Artificial Sequence
  Description of Artificial Sequence: Synthetic oligonucleotide
acagcgacgccaaaagucc

SEQ ID NO: 997319 - RNA, 19 nt, Artificial Sequence
  Description of Artificial Sequence: Synthetic oligonucleotide
uguacucucccauggcagg

SEQ ID NO: 997320 - RNA, 19 nt, Artificial Sequence
  Description of Artificial Sequence: Synthetic oligonucleotide
agacauguuacugcugccc

SEQ ID NO: 997321 - RNA, 19 nt, Artificial Sequence
  Description of Artificial Sequence: Synthetic oligonucleotide
ugcuucgagagcugggugg

SEQ ID NO: 997322 - RNA, 19 nt, Artificial Sequence
  Description of Artificial Sequence: Synthetic oligonucleotide
agucuaagagcaccauugg

SEQ ID NO: 997323 - RNA, 19 nt, Artificial Sequence
  Description of Artificial Sequence: Synthetic oligonucleotide
agcacgauggaaugcgagg

SEQ ID NO: 997324 - RNA, 19 nt, Artificial Sequence
  Description of Artificial Sequence: Synthetic oligonucleotide
ucucuaaaaucucuaggau

SEQ ID NO: 997325 - RNA, 19 nt, Artificial Sequence
  Description of Artificial Sequence: Synthetic oligonucleotide
agagaguccaaacgaccac

SEQ ID NO: 997326 - RNA, 19 nt, Artificial Sequence
  Description of Artificial Sequence: Synthetic oligonucleotide
aaaaggacuugaagacagc

SEQ ID NO: 997327 - RNA, 19 nt, Artificial Sequence
  Description of Artificial Sequence: Synthetic oligonucleotide
ugcaguagacauguuacug

SEQ ID NO: 997328 - RNA, 19 nt, Artificial Sequence
  Description of Artificial Sequence: Synthetic oligonucleotide
ucggcaccgcgaaugaacg

SEQ ID NO: 997329 - RNA, 19 nt, Artificial Sequence
  Description of Artificial Sequence: Synthetic oligonucleotide
ucauaauagcuguuucgga

SEQ ID NO: 997330 - RNA, 19 nt, Artificial Sequence
  Description of Artificial Sequence: Synthetic oligonucleotide
uacaccccuguaaagguca

SEQ ID NO: 997331 - RNA, 19 nt, Artificial Sequence
  Description of Artificial Sequence: Synthetic oligonucleotide
agucgucgcacauaggcug

SEQ ID NO: 997332 - RNA, 19 nt, Artificial Sequence
  Description of Artificial Sequence: Synthetic oligonucleotide
ugacgaacuucauucacaa

SEQ ID NO: 997333 - RNA, 19 nt, Artificial Sequence
  Description of Artificial Sequence: Synthetic oligonucleotide
agccucuucagcacgaugg

SEQ ID NO: 997334 - RNA, 19 nt, Artificial Sequence
  Description of Artificial Sequence: Synthetic oligonucleotide
uaauagcuguuucggacac

SEQ ID NO: 997335 - RNA, 19 nt, Artificial Sequence
  Description of Artificial Sequence: Synthetic oligonucleotide
guugauugccacccucugg

SEQ ID NO: 997336 - RNA, 19 nt, Artificial Sequence
  Description of Artificial Sequence: Synthetic oligonucleotide
ucuagacagaagacugucu

SEQ ID NO: 997337 - RNA, 19 nt, Artificial Sequence
  Description of Artificial Sequence: Synthetic oligonucleotide
uacgucaggucgcucacgc

SEQ ID NO: 997338 - RNA, 19 nt, Artificial Sequence
  Description of Artificial Sequence: Synthetic oligonucleotide
uggaaugcgaggauuguuu

SEQ ID NO: 997339 - RNA, 19 nt, Artificial Sequence
  Description of Artificial Sequence: Synthetic oligonucleotide
gauagccaaugacacgcag

SEQ ID NO: 997340 - RNA, 19 nt, Artificial Sequence
  Description of Artificial Sequence: Synthetic oligonucleotide
aguguacucucccauggca

SEQ ID NO: 997341 - RNA, 19 nt, Artificial Sequence
  Description of Artificial Sequence: Synthetic oligonucleotide
ggacugacgaacuucauuc

SEQ ID NO: 997342 - RNA, 19 nt, Artificial Sequence
  Description of Artificial Sequence: Synthetic oligonucleotide
agcgguucaaauagggaac

SEQ ID NO: 997343 - RNA, 19 nt, Artificial Sequence
  Description of Artificial Sequence: Synthetic oligonucleotide
ugccgguuuagagucaggg

SEQ ID NO: 997344 - RNA, 19 nt, Artificial Sequence
  Description of Artificial Sequence: Synthetic oligonucleotide
gauaaaggcgagaggcucc

SEQ ID NO: 997345 - RNA, 19 nt, Artificial Sequence
  Description of Artificial Sequence: Synthetic oligonucleotide
ucgcacauaggcugcaagc

SEQ ID NO: 997346 - RNA, 19 nt, Artificial Sequence
  Description of Artificial Sequence: Synthetic oligonucleotide
gaggaguauuuccuuuucc

SEQ ID NO: 997347 - RNA, 19 nt, Artificial Sequence
  Description of Artificial Sequence: Synthetic oligonucleotide
guugcauggacugacgaac

SEQ ID NO: 997348 - RNA, 19 nt, Artificial Sequence
  Description of Artificial Sequence: Synthetic oligonucleotide
uuuccgugcuucgagagcu

SEQ ID NO: 997349 - RNA, 19 nt, Artificial Sequence
  Description of Artificial Sequence: Synthetic oligonucleotide
uccuuuuccagucgucgca

SEQ ID NO: 997350 - RNA, 19 nt, Artificial Sequence
  Description of Artificial Sequence: Synthetic oligonucleotide
uggagcgaagccaagcauc

SEQ ID NO: 997351 - RNA, 19 nt, Artificial Sequence
  Description of Artificial Sequence: Synthetic oligonucleotide
gugaagacauccaugcgcc

SEQ ID NO: 997352 - RNA, 19 nt, Artificial Sequence
  Description of Artificial Sequence: Synthetic oligonucleotide
gauggagcgaagccaagca

SEQ ID NO: 997353 - RNA, 19 nt, Artificial Sequence
  Description of Artificial Sequence: Synthetic oligonucleotide
auagccaaugacacgcagg

SEQ ID NO: 997354 - RNA, 19 nt, Artificial Sequence
  Description of Artificial Sequence: Synthetic oligonucleotide
auccaugcgccgaagauag

SEQ ID NO: 997355 - RNA, 19 nt, Artificial Sequence
  Description of Artificial Sequence: Synthetic oligonucleotide
gaaugcgaggauuguuuug

SEQ ID NO: 997356 - RNA, 19 nt, Artificial Sequence
  Description of Artificial Sequence: Synthetic oligonucleotide
uuggcgaaggccaggucgc

SEQ ID NO: 997357 - RNA, 19 nt, Artificial Sequence
  Description of Artificial Sequence: Synthetic oligonucleotide
agucaggauggagcgaagc

SEQ ID NO: 997358 - RNA, 19 nt, Artificial Sequence
  Description of Artificial Sequence: Synthetic oligonucleotide
agcggccuacgucaggucg

SEQ ID NO: 997359 - RNA, 19 nt, Artificial Sequence
  Description of Artificial Sequence: Synthetic oligonucleotide
agauggcacccucauucac

SEQ ID NO: 997360 - RNA, 19 nt, Artificial Sequence
  Description of Artificial Sequence: Synthetic oligonucleotide
aagucauuucauccuggaa

SEQ ID NO: 997361 - RNA, 19 nt, Artificial Sequence
  Description of Artificial Sequence: Synthetic oligonucleotide
gaagucauuucauccugga

SEQ ID NO: 997362 - RNA, 19 nt, Artificial Sequence
  Description of Artificial Sequence: Synthetic oligonucleotide
gucaggauggagcgaagcc

SEQ ID NO: 997363 - RNA, 19 nt, Artificial Sequence
  Description of Artificial Sequence: Synthetic oligonucleotide
augacacgcaggcaggcug

SEQ ID NO: 997364 - RNA, 19 nt, Artificial Sequence
  Description of Artificial Sequence: Synthetic oligonucleotide
ugaggguguaggaagucau

SEQ ID NO: 997365 - RNA, 19 nt, Artificial Sequence
  Description of Artificial Sequence: Synthetic oligonucleotide
gagaguccaaacgaccacc

SEQ ID NO: 997366 - RNA, 19 nt, Artificial Sequence
  Description of Artificial Sequence: Synthetic oligonucleotide
ucgcucacgccacugggcc

SEQ ID NO: 997367 - RNA, 19 nt, Artificial Sequence
  Description of Artificial Sequence: Synthetic oligonucleotide
caaccaaaauguuguugag

SEQ ID NO: 997368 - RNA, 19 nt, Artificial Sequence
  Description of Artificial Sequence: Synthetic oligonucleotide
ugaagacauccaugcgccg

SEQ ID NO: 997369 - RNA, 19 nt, Artificial Sequence
  Description of Artificial Sequence: Synthetic oligonucleotide
gaacgucuuguaguuggcg

SEQ ID NO: 997370 - RNA, 19 nt, Artificial Sequence
  Description of Artificial Sequence: Synthetic oligonucleotide
aguacaugcacuggcccag

SEQ ID NO: 997371 - RNA, 19 nt, Artificial Sequence
  Description of Artificial Sequence: Synthetic oligonucleotide
agcgcucgggcucucgucg

SEQ ID NO: 997372 - RNA, 19 nt, Artificial Sequence
  Description of Artificial Sequence: Synthetic oligonucleotide
agagcugaucuccucggcu

SEQ ID NO: 997373 - RNA, 19 nt, Artificial Sequence
  Description of Artificial Sequence: Synthetic oligonucleotide
uggaaauaaggaucaucau

SEQ ID NO: 997374 - RNA, 19 nt, Artificial Sequence
  Description of Artificial Sequence: Synthetic oligonucleotide
agcaaccaaaauguuguug

SEQ ID NO: 997375 - RNA, 19 nt, Artificial Sequence
  Description of Artificial Sequence: Synthetic oligonucleotide
aagcggucgaguaggugac

SEQ ID NO: 997376 - RNA, 19 nt, Artificial Sequence
  Description of Artificial Sequence: Synthetic oligonucleotide
ccagucgucgcacauaggc

SEQ ID NO: 997377 - RNA, 19 nt, Artificial Sequence
  Description of Artificial Sequence: Synthetic oligonucleotide
cucggcaccgcgaaugaac

SEQ ID NO: 997378 - RNA, 19 nt, Artificial Sequence
  Description of Artificial Sequence: Synthetic oligonucleotide
uggacugacgaacuucauu

SEQ ID NO: 997379 - RNA, 19 nt, Artificial Sequence
  Description of Artificial Sequence: Synthetic oligonucleotide
agcucuaauucuggggccg

SEQ ID NO: 997380 - RNA, 19 nt, Artificial Sequence
  Description of Artificial Sequence: Synthetic oligonucleotide
guagccguggccgaagcag

SEQ ID NO: 997381 - RNA, 19 nt, Artificial Sequence
  Description of Artificial Sequence: Synthetic oligonucleotide
cauuagggauggcagucag

SEQ ID NO: 997382 - RNA, 19 nt, Artificial Sequence
  Description of Artificial Sequence: Synthetic oligonucleotide
aagcggucgcggaacagcg

SEQ ID NO: 997383 - RNA, 19 nt, Artificial Sequence
  Description of Artificial Sequence: Synthetic oligonucleotide
cuaauucuggggccgcgag

SEQ ID NO: 997384 - RNA, 19 nt, Artificial Sequence
  Description of Artificial Sequence: Synthetic oligonucleotide
gugauauggaaauaaggau

SEQ ID NO: 997385 - RNA, 19 nt, Artificial Sequence
  Description of Artificial Sequence: Synthetic oligonucleotide
aaggcgagaggcuccugga

SEQ ID NO: 997386 - RNA, 19 nt, Artificial Sequence
  Description of Artificial Sequence: Synthetic oligonucleotide
cacccagccaugaaagaug

SEQ ID NO: 997387 - RNA, 19 nt, Artificial Sequence
  Description of Artificial Sequence: Synthetic oligonucleotide
aguugcauggacugacgaa

SEQ ID NO: 997388 - RNA, 19 nt, Artificial Sequence
  Description of Artificial Sequence: Synthetic oligonucleotide
cagagaguccaaacgacca

SEQ ID NO: 997389 - RNA, 19 nt, Artificial Sequence
  Description of Artificial Sequence: Synthetic oligonucleotide
aacgaccaccuacaccccu

SEQ ID NO: 997390 - RNA, 19 nt, Artificial Sequence
  Description of Artificial Sequence: Synthetic oligonucleotide
ggcuaucugagcugguggg

SEQ ID NO: 997391 - RNA, 19 nt, Artificial Sequence
  Description of Artificial Sequence: Synthetic oligonucleotide
aaacgaccaccuacacccc

SEQ ID NO: 997392 - RNA, 19 nt, Artificial Sequence
  Description of Artificial Sequence: Synthetic oligonucleotide
guguccauaagcuggggaa

SEQ ID NO: 997393 - RNA, 19 nt, Artificial Sequence
  Description of Artificial Sequence: Synthetic oligonucleotide
aggguguucauccggcggu

SEQ ID NO: 997394 - RNA, 19 nt, Artificial Sequence
  Description of Artificial Sequence: Synthetic oligonucleotide
cagcgguucaaauagggaa

SEQ ID NO: 997395 - RNA, 19 nt, Artificial Sequence
  Description of Artificial Sequence: Synthetic oligonucleotide
ugugccgguuuagagucag

SEQ ID NO: 997396 - RNA, 19 nt, Artificial Sequence
  Description of Artificial Sequence: Synthetic oligonucleotide
gacccggcaggccucaaug

SEQ ID NO: 997397 - RNA, 19 nt, Artificial Sequence
  Description of Artificial Sequence: Synthetic oligonucleotide
aggauuguuuugguuaccu

SEQ ID NO: 997398 - RNA, 19 nt, Artificial Sequence
  Description of Artificial Sequence: Synthetic oligonucleotide
guuucggacacaggugucc

SEQ ID NO: 997399 - RNA, 19 nt, Artificial Sequence
  Description of Artificial Sequence: Synthetic oligonucleotide
acauccaugcgccgaagau

SEQ ID NO: 997400 - RNA, 19 nt, Artificial Sequence
  Description of Artificial Sequence: Synthetic oligonucleotide
gcgaaugaacgucuuguag

SEQ ID NO: 997401 - RNA, 19 nt, Artificial Sequence
  Description of Artificial Sequence: Synthetic oligonucleotide
gaagacauccaugcgccga

SEQ ID NO: 997402 - RNA, 19 nt, Artificial Sequence
  Description of Artificial Sequence: Synthetic oligonucleotide
cuacccggcuaaaggacag

SEQ ID NO: 997403 - RNA, 19 nt, Artificial Sequence
  Description of Artificial Sequence: Synthetic oligonucleotide
gauggcacugauguucaca

SEQ ID NO: 997404 - RNA, 19 nt, Artificial Sequence
  Description of Artificial Sequence: Synthetic oligonucleotide
uccaaacgaccaccuacac

SEQ ID NO: 997405 - RNA, 19 nt, Artificial Sequence
  Description of Artificial Sequence: Synthetic oligonucleotide
gggauggaggaguauuucc

SEQ ID NO: 997406 - RNA, 19 nt, Artificial Sequence
  Description of Artificial Sequence: Synthetic oligonucleotide
guccuuaguugcuggauca

SEQ ID NO: 997407 - RNA, 19 nt, Artificial Sequence
  Description of Artificial Sequence: Synthetic oligonucleotide
ugauaucaaagagguggac

SEQ ID NO: 997408 - RNA, 19 nt, Artificial Sequence
  Description of Artificial Sequence: Synthetic oligonucleotide
acccagccaugaaagaugg

SEQ ID NO: 997409 - RNA, 19 nt, Artificial Sequence
  Description of Artificial Sequence: Synthetic oligonucleotide
agccggucuagccccgagc

SEQ ID NO: 997410 - RNA, 19 nt, Artificial Sequence
  Description of Artificial Sequence: Synthetic oligonucleotide
ucagcacgauggaaugcga

SEQ ID NO: 997411 - RNA, 19 nt, Artificial Sequence
  Description of Artificial Sequence: Synthetic oligonucleotide
ugguuaccuuagcaagggc

SEQ ID NO: 997412 - RNA, 19 nt, Artificial Sequence
  Description of Artificial Sequence: Synthetic oligonucleotide
ccaaagagacgguggaugc

SEQ ID NO: 997413 - RNA, 19 nt, Artificial Sequence
  Description of Artificial Sequence: Synthetic oligonucleotide
guucauccggcgguuagag

SEQ ID NO: 997414 - RNA, 19 nt, Artificial Sequence
  Description of Artificial Sequence: Synthetic oligonucleotide
gaagccgggcaagcggucg

SEQ ID NO: 997415 - RNA, 19 nt, Artificial Sequence
  Description of Artificial Sequence: Synthetic oligonucleotide
caugcccaagguuuccgug

SEQ ID NO: 997416 - RNA, 19 nt, Artificial Sequence
  Description of Artificial Sequence: Synthetic oligonucleotide
gaugcgcucggugcacucg

SEQ ID NO: 997417 - RNA, 19 nt, Artificial Sequence
  Description of Artificial Sequence: Synthetic oligonucleotide
agagacgguggaugcgcuc

SEQ ID NO: 997418 - RNA, 19 nt, Artificial Sequence
  Description of Artificial Sequence: Synthetic oligonucleotide
augcgcucggugcacucgg

SEQ ID NO: 997419 - RNA, 19 nt, Artificial Sequence
  Description of Artificial Sequence: Synthetic oligonucleotide
gcgagaggcuccuggaugg

SEQ ID NO: 997420 - RNA, 19 nt, Artificial Sequence
  Description of Artificial Sequence: Synthetic oligonucleotide
accgagggacgucuccacg

SEQ ID NO: 997421 - RNA, 19 nt, Artificial Sequence
  Description of Artificial Sequence: Synthetic oligonucleotide
cagcacgauggaaugcgag

SEQ ID NO: 997422 - RNA, 19 nt, Artificial Sequence
  Description of Artificial Sequence: Synthetic oligonucleotide
ugggcuaucugagcuggug

SEQ ID NO: 997423 - RNA, 19 nt, Artificial Sequence
  Description of Artificial Sequence: Synthetic oligonucleotide
gucgcacauaggcugcaag

SEQ ID NO: 997424 - RNA, 19 nt, Artificial Sequence
  Description of Artificial Sequence: Synthetic oligonucleotide
guguucauccggcgguuag

SEQ ID NO: 997425 - RNA, 19 nt, Artificial Sequence
  Description of Artificial Sequence: Synthetic oligonucleotide
auuagggauggcagucagg

SEQ ID NO: 997426 - RNA, 19 nt, Artificial Sequence
  Description of Artificial Sequence: Synthetic oligonucleotide
uguuucggacacagguguc

SEQ ID NO: 997427 - RNA, 19 nt, Artificial Sequence
  Description of Artificial Sequence: Synthetic oligonucleotide
gggcuaucugagcuggugg

SEQ ID NO: 997428 - RNA, 19 nt, Artificial Sequence
  Description of Artificial Sequence: Synthetic oligonucleotide
ucuagccccgagccgcuca

SEQ ID NO: 997429 - RNA, 19 nt, Artificial Sequence
  Description of Artificial Sequence: Synthetic oligonucleotide
uccgccaagcgcucgggcu

SEQ ID NO: 997430 - RNA, 19 nt, Artificial Sequence
  Description of Artificial Sequence: Synthetic oligonucleotide
uccuuaguugcuggaucag

SEQ ID NO: 997431 - RNA, 19 nt, Artificial Sequence
  Description of Artificial Sequence: Synthetic oligonucleotide
acgucaggucgcucacgcc

SEQ ID NO: 997432 - RNA, 19 nt, Artificial Sequence
  Description of Artificial Sequence: Synthetic oligonucleotide
aggucgcucacgccacugg

SEQ ID NO: 997433 - RNA, 19 nt, Artificial Sequence
  Description of Artificial Sequence: Synthetic oligonucleotide
aguaggugaccgagggacg

SEQ ID NO: 997434 - RNA, 19 nt, Artificial Sequence
  Description of Artificial Sequence: Synthetic oligonucleotide
uguccauaagcuggggaau

SEQ ID NO: 997435 - RNA, 19 nt, Artificial Sequence
  Description of Artificial Sequence: Synthetic oligonucleotide
acccggcaggccucaaugg

SEQ ID NO: 997436 - RNA, 19 nt, Artificial Sequence
  Description of Artificial Sequence: Synthetic oligonucleotide
aauagcuguuucggacaca

SEQ ID NO: 997437 - RNA, 19 nt, Artificial Sequence
  Description of Artificial Sequence: Synthetic oligonucleotide
cuacaccccuguaaagguc

SEQ ID NO: 997438 - RNA, 19 nt, Artificial Sequence
  Description of Artificial Sequence: Synthetic oligonucleotide
cuucagcacgauggaaugc

SEQ ID NO: 997439 - RNA, 19 nt, Artificial Sequence
  Description of Artificial Sequence: Synthetic oligonucleotide
auaaaggcgagaggcuccu

SEQ ID NO: 997440 - RNA, 19 nt, Artificial Sequence
  Description of Artificial Sequence: Synthetic oligonucleotide
agcccaaaguacaugcacu

SEQ ID NO: 997441 - RNA, 19 nt, Artificial Sequence
  Description of Artificial Sequence: Synthetic oligonucleotide
ggccucggaaaucagcccc

SEQ ID NO: 997442 - RNA, 19 nt, Artificial Sequence
  Description of Artificial Sequence: Synthetic oligonucleotide
uccagucgucgcacauagg

SEQ ID NO: 997443 - RNA, 19 nt, Artificial Sequence
  Description of Artificial Sequence: Synthetic oligonucleotide
caguguacucucccauggc

SEQ ID NO: 997444 - RNA, 19 nt, Artificial Sequence
  Description of Artificial Sequence: Synthetic oligonucleotide
cagucucuagcaccugcag

SEQ ID NO: 997445 - RNA, 19 nt, Artificial Sequence
  Description of Artificial Sequence: Synthetic oligonucleotide
accgcgaaugaacgucuug

SEQ ID NO: 997446 - RNA, 19 nt, Artificial Sequence
  Description of Artificial Sequence: Synthetic oligonucleotide
uccuggucaucuagacaga

SEQ ID NO: 997447 - RNA, 19 nt, Artificial Sequence
  Description of Artificial Sequence: Synthetic oligonucleotide
ugaccgagggacgucucca

SEQ ID NO: 997448 - RNA, 19 nt, Artificial Sequence
  Description of Artificial Sequence: Synthetic oligonucleotide
acaugcccaagguuuccgu

SEQ ID NO: 997449 - RNA, 19 nt, Artificial Sequence
  Description of Artificial Sequence: Synthetic oligonucleotide
ucacaugcccaagguuucc

SEQ ID NO: 997450 - RNA, 19 nt, Artificial Sequence
  Description of Artificial Sequence: Synthetic oligonucleotide
aguuggcgaaggccagguc

SEQ ID NO: 997451 - RNA, 19 nt, Artificial Sequence
  Description of Artificial Sequence: Synthetic oligonucleotide
gcgguuagagcugaucucc

SEQ ID NO: 997452 - RNA, 19 nt, Artificial Sequence
  Description of Artificial Sequence: Synthetic oligonucleotide
ucgggaaagcggucgcgga

SEQ ID NO: 997453 - RNA, 19 nt, Artificial Sequence
  Description of Artificial Sequence: Synthetic oligonucleotide
ggagcgaagccaagcaucc

SEQ ID NO: 997454 - RNA, 19 nt, Artificial Sequence
  Description of Artificial Sequence: Synthetic oligonucleotide
ggagcaaggggucuucauc

SEQ ID NO: 997455 - RNA, 19 nt, Artificial Sequence
  Description of Artificial Sequence: Synthetic oligonucleotide
aggauaaaggcgagaggcu

SEQ ID NO: 997456 - RNA, 19 nt, Artificial Sequence
  Description of Artificial Sequence: Synthetic oligonucleotide
gccgaagauagccaaugac

SEQ ID NO: 997457 - RNA, 19 nt, Artificial Sequence
  Description of Artificial Sequence: Synthetic oligonucleotide
ugcgaggauuguuuugguu

SEQ ID NO: 997458 - RNA, 19 nt, Artificial Sequence
  Description of Artificial Sequence: Synthetic oligonucleotide
cccuguaaaggucagucuc

SEQ ID NO: 997459 - RNA, 19 nt, Artificial Sequence
  Description of Artificial Sequence: Synthetic oligonucleotide
ugcauggacugacgaacuu

SEQ ID NO: 997460 - RNA, 19 nt, Artificial Sequence
  Description of Artificial Sequence: Synthetic oligonucleotide
gcgaggauuguuuugguua

SEQ ID NO: 997461 - RNA, 19 nt, Artificial Sequence
  Description of Artificial Sequence: Synthetic oligonucleotide
aggucagucucuagcaccu

SEQ ID NO: 997462 - RNA, 19 nt, Artificial Sequence
  Description of Artificial Sequence: Synthetic oligonucleotide
agggacgucuccacgucuc

SEQ ID NO: 997463 - RNA, 19 nt, Artificial Sequence
  Description of Artificial Sequence: Synthetic oligonucleotide
caccuacaccccuguaaag

SEQ ID NO: 997464 - RNA, 19 nt, Artificial Sequence
  Description of Artificial Sequence: Synthetic oligonucleotide
caggauggagcgaagccaa

SEQ ID NO: 997465 - RNA, 19 nt, Artificial Sequence
  Description of Artificial Sequence: Synthetic oligonucleotide
cuguuucggacacaggugu

SEQ ID NO: 997466 - RNA, 19 nt, Artificial Sequence
  Description of Artificial Sequence: Synthetic oligonucleotide
ugcugaacgcagccucuuc

SEQ ID NO: 997467 - RNA, 19 nt, Artificial Sequence
  Description of Artificial Sequence: Synthetic oligonucleotide
caugcgccgaagauagcca

SEQ ID NO: 997468 - RNA, 19 nt, Artificial Sequence
  Description of Artificial Sequence: Synthetic oligonucleotide
gacgucuccacgucuccaa

SEQ ID NO: 997469 - RNA, 19 nt, Artificial Sequence
  Description of Artificial Sequence: Synthetic oligonucleotide
aagccgggcaagcggucga

SEQ ID NO: 997470 - RNA, 19 nt, Artificial Sequence
  Description of Artificial Sequence: Synthetic oligonucleotide
gcagagaguccaaacgacc

SEQ ID NO: 997471 - RNA, 19 nt, Artificial Sequence
  Description of Artificial Sequence: Synthetic oligonucleotide
cauccggcgguuagagcug

SEQ ID NO: 997472 - RNA, 19 nt, Artificial Sequence
  Description of Artificial Sequence: Synthetic oligonucleotide
gggcaagcggucgaguagg

SEQ ID NO: 997473 - RNA, 19 nt, Artificial Sequence
  Description of Artificial Sequence: Synthetic oligonucleotide
uuuccagucgucgcacaua

SEQ ID NO: 997474 - RNA, 19 nt, Artificial Sequence
  Description of Artificial Sequence: Synthetic oligonucleotide
gaagacugucucucucuua

SEQ ID NO: 997475 - RNA, 19 nt, Artificial Sequence
  Description of Artificial Sequence: Synthetic oligonucleotide
ccaugcgccgaagauagcc

SEQ ID NO: 997476 - RNA, 19 nt, Artificial Sequence
  Description of Artificial Sequence: Synthetic oligonucleotide
ucgcgcgucugcugcagca

SEQ ID NO: 997477 - RNA, 19 nt, Artificial Sequence
  Description of Artificial Sequence: Synthetic oligonucleotide
ucggacacagguguccaua

SEQ ID NO: 997478 - RNA, 19 nt, Artificial Sequence
  Description of Artificial Sequence: Synthetic oligonucleotide
gucuaagagcaccauuggu

SEQ ID NO: 997479 - RNA, 19 nt, Artificial Sequence
  Description of Artificial Sequence: Synthetic oligonucleotide
ugguccuuaguugcuggau

SEQ ID NO: 997480 - RNA, 19 nt, Artificial Sequence
  Description of Artificial Sequence: Synthetic oligonucleotide
aagagacgguggaugcgcu

SEQ ID NO: 997481 - RNA, 19 nt, Artificial Sequence
  Description of Artificial Sequence: Synthetic oligonucleotide
gcuguuucggacacaggug

SEQ ID NO: 997482 - RNA, 19 nt, Artificial Sequence
  Description of Artificial Sequence: Synthetic oligonucleotide
augcgccgaagauagccaa

SEQ ID NO: 997483 - RNA, 19 nt, Artificial Sequence
  Description of Artificial Sequence: Synthetic oligonucleotide
gugcuucgagagcugggug

SEQ ID NO: 997484 - RNA, 19 nt, Artificial Sequence
  Description of Artificial Sequence: Synthetic oligonucleotide
ggauggagcgaagccaagc

SEQ ID NO: 997485 - RNA, 19 nt, Artificial Sequence
  Description of Artificial Sequence: Synthetic oligonucleotide
ugcgccgaagauagccaau

SEQ ID NO: 997486 - RNA, 19 nt, Artificial Sequence
  Description of Artificial Sequence: Synthetic oligonucleotide
augcgaggauuguuuuggu

SEQ ID NO: 997487 - RNA, 19 nt, Artificial Sequence
  Description of Artificial Sequence: Synthetic oligonucleotide
gccggucuagccccgagcc

SEQ ID NO: 997488 - RNA, 19 nt, Artificial Sequence
  Description of Artificial Sequence: Synthetic oligonucleotide
cucggaaaucagccccuac

SEQ ID NO: 997489 - RNA, 19 nt, Artificial Sequence
  Description of Artificial Sequence: Synthetic oligonucleotide
gaacagcgacgccaaaagu

SEQ ID NO: 997490 - RNA, 19 nt, Artificial Sequence
  Description of Artificial Sequence: Synthetic oligonucleotide
acgauggaaugcgaggauu

SEQ ID NO: 997491 - RNA, 19 nt, Artificial Sequence
  Description of Artificial Sequence: Synthetic oligonucleotide
ccaagguuuccgugcuucg

SEQ ID NO: 997492 - RNA, 19 nt, Artificial Sequence
  Description of Artificial Sequence: Synthetic oligonucleotide
agcggucgaguaggugacc

SEQ ID NO: 997493 - RNA, 19 nt, Artificial Sequence
  Description of Artificial Sequence: Synthetic oligonucleotide
cgaggauuguuuugguuac

SEQ ID NO: 997494 - RNA, 19 nt, Artificial Sequence
  Description of Artificial Sequence: Synthetic oligonucleotide
augccgagagucugggcua

SEQ ID NO: 997495 - RNA, 19 nt, Artificial Sequence
  Description of Artificial Sequence: Synthetic oligonucleotide
gucgucgcacauaggcugc

SEQ ID NO: 997496 - RNA, 19 nt, Artificial Sequence
  Description of Artificial Sequence: Synthetic oligonucleotide
cuagccccgagccgcucag

SEQ ID NO: 997497 - RNA, 19 nt, Artificial Sequence
  Description of Artificial Sequence: Synthetic oligonucleotide
caucuagacagaagacugu

SEQ ID NO: 997498 - RNA, 19 nt, Artificial Sequence
  Description of Artificial Sequence: Synthetic oligonucleotide
caaagagguggacccggca

SEQ ID NO: 997499 - RNA, 19 nt, Artificial Sequence
  Description of Artificial Sequence: Synthetic oligonucleotide
cuacgucaggucgcucacg

SEQ ID NO: 997500 - RNA, 19 nt, Artificial Sequence
  Description of Artificial Sequence: Synthetic oligonucleotide
cacgccacugggccucggg

SEQ ID NO: 997501 - RNA, 19 nt, Artificial Sequence
  Description of Artificial Sequence: Synthetic oligonucleotide
ucaggucgcucacgccacu

SEQ ID NO: 997502 - RNA, 19 nt, Artificial Sequence
  Description of Artificial Sequence: Synthetic oligonucleotide
gauggaaugcgaggauugu

SEQ ID NO: 997503 - RNA, 19 nt, Artificial Sequence
  Description of Artificial Sequence: Synthetic oligonucleotide
ggucgcggaacagcgacgc

SEQ ID NO: 997504 - RNA, 19 nt, Artificial Sequence
  Description of Artificial Sequence: Synthetic oligonucleotide
uccaugcgccgaagauagc

SEQ ID NO: 997505 - RNA, 19 nt, Artificial Sequence
  Description of Artificial Sequence: Synthetic oligonucleotide
aggugaccgagggacgucu

SEQ ID NO: 997506 - RNA, 19 nt, Artificial Sequence
  Description of Artificial Sequence: Synthetic oligonucleotide
ugcgcucggugcacucggc

SEQ ID NO: 997507 - RNA, 19 nt, Artificial Sequence
  Description of Artificial Sequence: Synthetic oligonucleotide
gucgcucacgccacugggc

SEQ ID NO: 997508 - RNA, 19 nt, Artificial Sequence
  Description of Artificial Sequence: Synthetic oligonucleotide
cuuuuccagucgucgcaca

SEQ ID NO: 997509 - RNA, 19 nt, Artificial Sequence
  Description of Artificial Sequence: Synthetic oligonucleotide
ggcgguuagagcugaucuc

SEQ ID NO: 997510 - RNA, 19 nt, Artificial Sequence
  Description of Artificial Sequence: Synthetic oligonucleotide
cucgggcucucgucgcagc

SEQ ID NO: 997511 - RNA, 19 nt, Artificial Sequence
  Description of Artificial Sequence: Synthetic oligonucleotide
gcggucgaguaggugaccg

SEQ ID NO: 997512 - RNA, 19 nt, Artificial Sequence
  Description of Artificial Sequence: Synthetic oligonucleotide
agauagccaaugacacgca

SEQ ID NO: 997513 - RNA, 19 nt, Artificial Sequence
  Description of Artificial Sequence: Synthetic oligonucleotide
cagagacgcaaaucauuaa

SEQ ID NO: 997514 - RNA, 19 nt, Artificial Sequence
  Description of Artificial Sequence: Synthetic oligonucleotide
gcagugcagaacuggacaa

SEQ ID NO: 997515 - RNA, 19 nt, Artificial Sequence
  Description of Artificial Sequence: Synthetic oligonucleotide
gccuacgucaggucgcuca

SEQ ID NO: 997516 - RNA, 19 nt, Artificial Sequence
  Description of Artificial Sequence: Synthetic oligonucleotide
acgaccaccuacaccccug

SEQ ID NO: 997517 - RNA, 19 nt, Artificial Sequence
  Description of Artificial Sequence: Synthetic oligonucleotide
ggcaccgcgaaugaacguc

SEQ ID NO: 997518 - RNA, 19 nt, Artificial Sequence
  Description of Artificial Sequence: Synthetic oligonucleotide
gguacuagcuccuggucau

SEQ ID NO: 997519 - RNA, 19 nt, Artificial Sequence
  Description of Artificial Sequence: Synthetic oligonucleotide
cauccaugcgccgaagaua

SEQ ID NO: 997520 - RNA, 19 nt, Artificial Sequence
  Description of Artificial Sequence: Synthetic oligonucleotide
uacccggcuaaaggacagc

SEQ ID NO: 997521 - RNA, 19 nt, Artificial Sequence
  Description of Artificial Sequence: Synthetic oligonucleotide
cagccucuucagcacgaug

SEQ ID NO: 997522 - RNA, 19 nt, Artificial Sequence
  Description of Artificial Sequence: Synthetic oligonucleotide
gggaagucuaagagcacca

SEQ ID NO: 997523 - RNA, 19 nt, Artificial Sequence
  Description of Artificial Sequence: Synthetic oligonucleotide
cuucgagagcugggugggg

SEQ ID NO: 997524 - RNA, 19 nt, Artificial Sequence
  Description of Artificial Sequence: Synthetic oligonucleotide
cucgucgcagccggucuag

SEQ ID NO: 997525 - RNA, 19 nt, Artificial Sequence
  Description of Artificial Sequence: Synthetic oligonucleotide
acgguacugggugaugaua

SEQ ID NO: 997526 - RNA, 19 nt, Artificial Sequence
  Description of Artificial Sequence: Synthetic oligonucleotide
gcggucgcggaacagcgac

SEQ ID NO: 997527 - RNA, 19 nt, Artificial Sequence
  Description of Artificial Sequence: Synthetic oligonucleotide
guuuagagucaggguguuc

SEQ ID NO: 997528 - RNA, 19 nt, Artificial Sequence
  Description of Artificial Sequence: Synthetic oligonucleotide
uaaaggcgagaggcuccug

SEQ ID NO: 997529 - RNA, 19 nt, Artificial Sequence
  Description of Artificial Sequence: Synthetic oligonucleotide
cccuacccggcuaaaggac

SEQ ID NO: 997530 - RNA, 19 nt, Artificial Sequence
  Description of Artificial Sequence: Synthetic oligonucleotide
guagcggccuacgucaggu

SEQ ID NO: 997531 - RNA, 19 nt, Artificial Sequence
  Description of Artificial Sequence: Synthetic oligonucleotide
guacaugcacuggcccagc

SEQ ID NO: 997532 - RNA, 19 nt, Artificial Sequence
  Description of Artificial Sequence: Synthetic oligonucleotide
cugggaugcuccacagaaa

SEQ ID NO: 997533 - RNA, 19 nt, Artificial Sequence
  Description of Artificial Sequence: Synthetic oligonucleotide
cuccgccaagcgcucgggc

SEQ ID NO: 997534 - RNA, 19 nt, Artificial Sequence
  Description of Artificial Sequence: Synthetic oligonucleotide
cauccugcgcuagggccac

SEQ ID NO: 997535 - RNA, 19 nt, Artificial Sequence
  Description of Artificial Sequence: Synthetic oligonucleotide
gcgccgaagauagccaaug

SEQ ID NO: 997536 - RNA, 19 nt, Artificial Sequence
  Description of Artificial Sequence: Synthetic oligonucleotide
cagucgucgcacauaggcu

SEQ ID NO: 997537 - RNA, 19 nt, Artificial Sequence
  Description of Artificial Sequence: Synthetic oligonucleotide
ccuacgucaggucgcucac

SEQ ID NO: 997538 - RNA, 19 nt, Artificial Sequence
  Description of Artificial Sequence: Synthetic oligonucleotide
agcaggcuaggggugggaa

SEQ ID NO: 997539 - RNA, 19 nt, Artificial Sequence
  Description of Artificial Sequence: Synthetic oligonucleotide
gggacgucuccacgucucc

SEQ ID NO: 997540 - RNA, 19 nt, Artificial Sequence
  Description of Artificial Sequence: Synthetic oligonucleotide
ccacgucuccaaagagacg

SEQ ID NO: 997541 - RNA, 19 nt, Artificial Sequence
  Description of Artificial Sequence: Synthetic oligonucleotide
gugcacucggcaccgcgaa

SEQ ID NO: 997542 - RNA, 19 nt, Artificial Sequence
  Description of Artificial Sequence: Synthetic oligonucleotide
guaggugaccgagggacgu

SEQ ID NO: 997543 - RNA, 19 nt, Artificial Sequence
  Description of Artificial Sequence: Synthetic oligonucleotide
cacugggccucgggaaagc

SEQ ID NO: 997544 - RNA, 19 nt, Artificial Sequence
  Description of Artificial Sequence: Synthetic oligonucleotide
gucgcggaacagcgacgcc

SEQ ID NO: 997545 - RNA, 19 nt, Artificial Sequence
  Description of Artificial Sequence: Synthetic oligonucleotide
gcgguucaaauagggaaca

SEQ ID NO: 997546 - RNA, 19 nt, Artificial Sequence
  Description of Artificial Sequence: Synthetic oligonucleotide
ccuacccggcuaaaggaca

SEQ ID NO: 997547 - RNA, 19 nt, Artificial Sequence
  Description of Artificial Sequence: Synthetic oligonucleotide
gagggacgucuccacgucu

SEQ ID NO: 997548 - RNA, 19 nt, Artificial Sequence
  Description of Artificial Sequence: Synthetic oligonucleotide
ccuuuuccagucgucgcac

SEQ ID NO: 997549 - RNA, 19 nt, Artificial Sequence
  Description of Artificial Sequence: Synthetic oligonucleotide
ccaccuacaccccuguaaa

SEQ ID NO: 997550 - RNA, 19 nt, Artificial Sequence
  Description of Artificial Sequence: Synthetic oligonucleotide
cucucuuaggcaggauaaa

SEQ ID NO: 997551 - RNA, 19 nt, Artificial Sequence
  Description of Artificial Sequence: Synthetic oligonucleotide
cacucggcaccgcgaauga

SEQ ID NO: 997552 - RNA, 19 nt, Artificial Sequence
  Description of Artificial Sequence: Synthetic oligonucleotide
cccaagguuuccgugcuuc

SEQ ID NO: 997553 - RNA, 19 nt, Artificial Sequence
  Description of Artificial Sequence: Synthetic oligonucleotide
guggaugcgcucggugcac

SEQ ID NO: 997554 - RNA, 19 nt, Artificial Sequence
  Description of Artificial Sequence: Synthetic oligonucleotide
ccuguaaaggucagucucu

SEQ ID NO: 997555 - RNA, 19 nt, Artificial Sequence
  Description of Artificial Sequence: Synthetic oligonucleotide
gucgcgcgucugcugcagc

SEQ ID NO: 997556 - RNA, 19 nt, Artificial Sequence
  Description of Artificial Sequence: Synthetic oligonucleotide
gcgcuagggccacaggaca

SEQ ID NO: 997557 - RNA, 19 nt, Artificial Sequence
  Description of Artificial Sequence: Synthetic oligonucleotide
gugccgguuuagagucagg

SEQ ID NO: 997558 - RNA, 19 nt, Artificial Sequence
  Description of Artificial Sequence: Synthetic oligonucleotide
ccgggccugaagaaacuuc

SEQ ID NO: 997559 - RNA, 19 nt, Artificial Sequence
  Description of Artificial Sequence: Synthetic oligonucleotide
cgucaggucgcucacgcca

SEQ ID NO: 997560 - RNA, 19 nt, Artificial Sequence
  Description of Artificial Sequence: Synthetic oligonucleotide
ggaaugcgaggauuguuuu

SEQ ID NO: 997561 - RNA, 19 nt, Artificial Sequence
  Description of Artificial Sequence: Synthetic oligonucleotide
ucgucgcagccggucuagc

SEQ ID NO: 997562 - RNA, 19 nt, Artificial Sequence
  Description of Artificial Sequence: Synthetic oligonucleotide
agccgggcaagcggucgag

SEQ ID NO: 997563 - RNA, 19 nt, Artificial Sequence
  Description of Artificial Sequence: Synthetic oligonucleotide
cgcgagguccgguacuagc

SEQ ID NO: 997564 - RNA, 19 nt, Artificial Sequence
  Description of Artificial Sequence: Synthetic oligonucleotide
ccuacaccccuguaaaggu

SEQ ID NO: 997565 - RNA, 19 nt, Artificial Sequence
  Description of Artificial Sequence: Synthetic oligonucleotide
ggagccaacuggccucgga

SEQ ID NO: 997566 - RNA, 19 nt, Artificial Sequence
  Description of Artificial Sequence: Synthetic oligonucleotide
cggucuagccccgagccgc

SEQ ID NO: 997567 - RNA, 19 nt, Artificial Sequence
  Description of Artificial Sequence: Synthetic oligonucleotide
auccggcgguuagagcuga

SEQ ID NO: 997568 - RNA, 19 nt, Artificial Sequence
  Description of Artificial Sequence: Synthetic oligonucleotide
gccucgggaaagcggucgc

SEQ ID NO: 997569 - RNA, 19 nt, Artificial Sequence
  Description of Artificial Sequence: Synthetic oligonucleotide
ccaacuggccucggaaauc

SEQ ID NO: 997570 - RNA, 19 nt, Artificial Sequence
  Description of Artificial Sequence: Synthetic oligonucleotide
ucccggagguagcggccua

SEQ ID NO: 997571 - RNA, 19 nt, Artificial Sequence
  Description of Artificial Sequence: Synthetic oligonucleotide
gcggccuacgucaggucgc

SEQ ID NO: 997572 - RNA, 19 nt, Artificial Sequence
  Description of Artificial Sequence: Synthetic oligonucleotide
ccggucuagccccgagccg

SEQ ID NO: 997573 - RNA, 19 nt, Artificial Sequence
  Description of Artificial Sequence: Synthetic oligonucleotide
aggagccaacuggccucgg

SEQ ID NO: 997574 - RNA, 19 nt, Artificial Sequence
  Description of Artificial Sequence: Synthetic oligonucleotide
ucacgccacugggccucgg

SEQ ID NO: 997575 - RNA, 19 nt, Artificial Sequence
  Description of Artificial Sequence: Synthetic oligonucleotide
gccgguuuagagucagggu

SEQ ID NO: 997576 - RNA, 19 nt, Artificial Sequence
  Description of Artificial Sequence: Synthetic oligonucleotide
ggaugcgcucggugcacuc

SEQ ID NO: 997577 - RNA, 19 nt, Artificial Sequence
  Description of Artificial Sequence: Synthetic oligonucleotide
cacgauggaaugcgaggau

SEQ ID NO: 997578 - RNA, 19 nt, Artificial Sequence
  Description of Artificial Sequence: Synthetic oligonucleotide
gaccaccuacaccccugua

SEQ ID NO: 997579 - RNA, 19 nt, Artificial Sequence
  Description of Artificial Sequence: Synthetic oligonucleotide
uccggcgguuagagcugau

SEQ ID NO: 997580 - RNA, 19 nt, Artificial Sequence
  Description of Artificial Sequence: Synthetic oligonucleotide
agcggucgcggaacagcga

SEQ ID NO: 997581 - RNA, 19 nt, Artificial Sequence
  Description of Artificial Sequence: Synthetic oligonucleotide
cgagguccgguacuagcuc

SEQ ID NO: 997582 - RNA, 19 nt, Artificial Sequence
  Description of Artificial Sequence: Synthetic oligonucleotide
ggcacgguacugggugaug

SEQ ID NO: 997583 - RNA, 19 nt, Artificial Sequence
  Description of Artificial Sequence: Synthetic oligonucleotide
ggacgucuccacgucucca

SEQ ID NO: 997584 - RNA, 19 nt, Artificial Sequence
  Description of Artificial Sequence: Synthetic oligonucleotide
gacagggauggaggaguau

SEQ ID NO: 997585 - RNA, 19 nt, Artificial Sequence
  Description of Artificial Sequence: Synthetic oligonucleotide
gcuaggggugggaagucua

SEQ ID NO: 997586 - RNA, 19 nt, Artificial Sequence
  Description of Artificial Sequence: Synthetic oligonucleotide
ccggagguagcggccuacg

SEQ ID NO: 997587 - RNA, 19 nt, Artificial Sequence
  Description of Artificial Sequence: Synthetic oligonucleotide
gcgagguccgguacuagcu

SEQ ID NO: 997588 - RNA, 19 nt, Artificial Sequence
  Description of Artificial Sequence: Synthetic oligonucleotide
gcucucgucgcagccgguc

SEQ ID NO: 997589 - RNA, 19 nt, Artificial Sequence
  Description of Artificial Sequence: Synthetic oligonucleotide
gugugccgguuuagaguca

SEQ ID NO: 997590 - RNA, 19 nt, Artificial Sequence
  Description of Artificial Sequence: Synthetic oligonucleotide
ccuggucaucuagacagaa

SEQ ID NO: 997591 - RNA, 19 nt, Artificial Sequence
  Description of Artificial Sequence: Synthetic oligonucleotide
cggucgcggaacagcgacg

SEQ ID NO: 997592 - RNA, 19 nt, Artificial Sequence
  Description of Artificial Sequence: Synthetic oligonucleotide
gcgcucgggcucucgucgc

SEQ ID NO: 997593 - RNA, 19 nt, Artificial Sequence
  Description of Artificial Sequence: Synthetic oligonucleotide
cgagggacgucuccacguc

SEQ ID NO: 997594 - RNA, 19 nt, Artificial Sequence
  Description of Artificial Sequence: Synthetic oligonucleotide
gcgcucggugcacucggca

SEQ ID NO: 997595 - RNA, 19 nt, Artificial Sequence
  Description of Artificial Sequence: Synthetic oligonucleotide
ccgcgaaugaacgucuugu

SEQ ID NO: 997596 - RNA, 19 nt, Artificial Sequence
  Description of Artificial Sequence: Synthetic oligonucleotide
gacgguggaugcgcucggu

SEQ ID NO: 997597 - RNA, 19 nt, Artificial Sequence
  Description of Artificial Sequence: Synthetic oligonucleotide
guggacccggcaggccuca

SEQ ID NO: 997598 - RNA, 19 nt, Artificial Sequence
  Description of Artificial Sequence: Synthetic oligonucleotide
ccgagggacgucuccacgu

SEQ ID NO: 997599 - RNA, 19 nt, Artificial Sequence
  Description of Artificial Sequence: Synthetic oligonucleotide
ccggcgguuagagcugauc

SEQ ID NO: 997600 - RNA, 19 nt, Artificial Sequence
  Description of Artificial Sequence: Synthetic oligonucleotide
gguguucauccggcgguua

SEQ ID NO: 997601 - RNA, 19 nt, Artificial Sequence
  Description of Artificial Sequence: Synthetic oligonucleotide
gcaccgcgaaugaacgucu

SEQ ID NO: 997602 - RNA, 19 nt, Artificial Sequence
  Description of Artificial Sequence: Synthetic oligonucleotide
gucuagccccgagccgcuc

SEQ ID NO: 997603 - RNA, 19 nt, Artificial Sequence
  Description of Artificial Sequence: Synthetic oligonucleotide
cugggcuaucugagcuggu

SEQ ID NO: 997604 - RNA, 19 nt, Artificial Sequence
  Description of Artificial Sequence: Synthetic oligonucleotide
cgccgaagauagccaauga

SEQ ID NO: 997605 - RNA, 19 nt, Artificial Sequence
  Description of Artificial Sequence: Synthetic oligonucleotide
cccggagguagcggccuac

SEQ ID NO: 997606 - RNA, 19 nt, Artificial Sequence
  Description of Artificial Sequence: Synthetic oligonucleotide
cgcgcgucugcugcagcag

SEQ ID NO: 997607 - RNA, 19 nt, Artificial Sequence
  Description of Artificial Sequence: Synthetic oligonucleotide
cgacgccaaaaguccuuca

SEQ ID NO: 997608 - RNA, 19 nt, Artificial Sequence
  Description of Artificial Sequence: Synthetic oligonucleotide
caccgcgaaugaacgucuu

SEQ ID NO: 997609 - RNA, 19 nt, Artificial Sequence
  Description of Artificial Sequence: Synthetic oligonucleotide
cgggaaagcggucgcggaa

SEQ ID NO: 997610 - RNA, 19 nt, Artificial Sequence
  Description of Artificial Sequence: Synthetic oligonucleotide
cgugcuucgagagcugggu

SEQ ID NO: 997611 - RNA, 19 nt, Artificial Sequence
  Description of Artificial Sequence: Synthetic oligonucleotide
gccgcgagguccgguacua

SEQ ID NO: 997612 - RNA, 19 nt, Artificial Sequence
  Description of Artificial Sequence: Synthetic oligonucleotide
ccgcgagguccgguacuag

SEQ ID NO: 997613 - RNA, 19 nt, Artificial Sequence
  Description of Artificial Sequence: Synthetic oligonucleotide
ggucuagccccgagccgcu

SEQ ID NO: 997614 - RNA, 19 nt, Artificial Sequence
  Description of Artificial Sequence: Synthetic oligonucleotide
cgguucaaauagggaacaa

SEQ ID NO: 997615 - RNA, 19 nt, Artificial Sequence
  Description of Artificial Sequence: Synthetic oligonucleotide
gccgagagucugggcuauc

SEQ ID NO: 997616 - RNA, 19 nt, Artificial Sequence
  Description of Artificial Sequence: Synthetic oligonucleotide
ggccuacgucaggucgcuc

SEQ ID NO: 997617 - RNA, 19 nt, Artificial Sequence
  Description of Artificial Sequence: Synthetic oligonucleotide
cagccccuacccggcuaaa

SEQ ID NO: 997618 - RNA, 19 nt, Artificial Sequence
  Description of Artificial Sequence: Synthetic oligonucleotide
gccgggcaagcggucgagu

SEQ ID NO: 997619 - RNA, 19 nt, Artificial Sequence
  Description of Artificial Sequence: Synthetic oligonucleotide
gcccaagguuuccgugcuu

SEQ ID NO: 997620 - RNA, 19 nt, Artificial Sequence
  Description of Artificial Sequence: Synthetic oligonucleotide
cgucgcacauaggcugcaa

SEQ ID NO: 997621 - RNA, 19 nt, Artificial Sequence
  Description of Artificial Sequence: Synthetic oligonucleotide
ggcucucgucgcagccggu

SEQ ID NO: 997622 - RNA, 19 nt, Artificial Sequence
  Description of Artificial Sequence: Synthetic oligonucleotide
cggcaccgcgaaugaacgu

SEQ ID NO: 997623 - RNA, 19 nt, Artificial Sequence
  Description of Artificial Sequence: Synthetic oligonucleotide
cggccuacgucaggucgcu

SEQ ID NO: 997624 - RNA, 19 nt, Artificial Sequence
  Description of Artificial Sequence: Synthetic oligonucleotide
aaacacguaauuuauuucu

SEQ ID NO: 997625 - RNA, 19 nt, Artificial Sequence
  Description of Artificial Sequence: Synthetic oligonucleotide
cuuguauauaacuaauucc

SEQ ID NO: 997626 - RNA, 19 nt, Artificial Sequence
  Description of Artificial Sequence: Synthetic oligonucleotide
ugccuuauuauuaugaaac

SEQ ID NO: 997627 - RNA, 19 nt, Artificial Sequence
  Description of Artificial Sequence: Synthetic oligonucleotide
aaauuccugggauauaaag

SEQ ID NO: 997628 - RNA, 19 nt, Artificial Sequence
  Description of Artificial Sequence: Synthetic oligonucleotide
uagucuagcagcuuuagag

SEQ ID NO: 997629 - RNA, 19 nt, Artificial Sequence
  Description of Artificial Sequence: Synthetic oligonucleotide
aaauacgucaucaggaauc

SEQ ID NO: 997630 - RNA, 19 nt, Artificial Sequence
  Description of Artificial Sequence: Synthetic oligonucleotide
aaggacuuacuugaguucc

SEQ ID NO: 997631 - RNA, 19 nt, Artificial Sequence
  Description of Artificial Sequence: Synthetic oligonucleotide
uuuugcggcaucaaauacg

SEQ ID NO: 997632 - RNA, 19 nt, Artificial Sequence
  Description of Artificial Sequence: Synthetic oligonucleotide
aauuugcuggcuuacacgu

SEQ ID NO: 997633 - RNA, 19 nt, Artificial Sequence
  Description of Artificial Sequence: Synthetic oligonucleotide
uuuagagugacuauagcau

SEQ ID NO: 997634 - RNA, 19 nt, Artificial Sequence
  Description of Artificial Sequence: Synthetic oligonucleotide
auaacuaauucccuuuuag

SEQ ID NO: 997635 - RNA, 19 nt, Artificial Sequence
  Description of Artificial Sequence: Synthetic oligonucleotide
acuaaugucauuguugcuc

SEQ ID NO: 997636 - RNA, 19 nt, Artificial Sequence
  Description of Artificial Sequence: Synthetic oligonucleotide
caggaauuucaaaugaagg

SEQ ID NO: 997637 - RNA, 19 nt, Artificial Sequence
  Description of Artificial Sequence: Synthetic oligonucleotide
ucauuaauauggccgcucg

SEQ ID NO: 997638 - RNA, 19 nt, Artificial Sequence
  Description of Artificial Sequence: Synthetic oligonucleotide
uucugcuuauuucugcugg

SEQ ID NO: 997639 - RNA, 19 nt, Artificial Sequence
  Description of Artificial Sequence: Synthetic oligonucleotide
ucuagugccaggaauuuca

SEQ ID NO: 997640 - RNA, 19 nt, Artificial Sequence
  Description of Artificial Sequence: Synthetic oligonucleotide
cuucgaaugguucuuagag

SEQ ID NO: 997641 - RNA, 19 nt, Artificial Sequence
  Description of Artificial Sequence: Synthetic oligonucleotide
acacguaauuuauuucucc

SEQ ID NO: 997642 - RNA, 19 nt, Artificial Sequence
  Description of Artificial Sequence: Synthetic oligonucleotide
ucuggauucacuugguagc

SEQ ID NO: 997643 - RNA, 19 nt, Artificial Sequence
  Description of Artificial Sequence: Synthetic oligonucleotide
acguaauuuauuucuccgc

SEQ ID NO: 997644 - RNA, 19 nt, Artificial Sequence
  Description of Artificial Sequence: Synthetic oligonucleotide
ugcggcaucaaauacguca

SEQ ID NO: 997645 - RNA, 19 nt, Artificial Sequence
  Description of Artificial Sequence: Synthetic oligonucleotide
ucgaaugguucuuagagga

SEQ ID NO: 997646 - RNA, 19 nt, Artificial Sequence
  Description of Artificial Sequence: Synthetic oligonucleotide
agauuugggaaccauguug

SEQ ID NO: 997647 - RNA, 19 nt, Artificial Sequence
  Description of Artificial Sequence: Synthetic oligonucleotide
uaaugugggaaugugauac

SEQ ID NO: 997648 - RNA, 19 nt, Artificial Sequence
  Description of Artificial Sequence: Synthetic oligonucleotide
cauaaacaugcauugacac

SEQ ID NO: 997649 - RNA, 19 nt, Artificial Sequence
  Description of Artificial Sequence: Synthetic oligonucleotide
uuguuugcaguuuugucag

SEQ ID NO: 997650 - RNA, 19 nt, Artificial Sequence
  Description of Artificial Sequence: Synthetic oligonucleotide
uggcuuacacguaauacag

SEQ ID NO: 997651 - RNA, 19 nt, Artificial Sequence
  Description of Artificial Sequence: Synthetic oligonucleotide
cuuguugccccucaggucc

SEQ ID NO: 997652 - RNA, 19 nt, Artificial Sequence
  Description of Artificial Sequence: Synthetic oligonucleotide
uuaaucaggcuguaagcag

SEQ ID NO: 997653 - RNA, 19 nt, Artificial Sequence
  Description of Artificial Sequence: Synthetic oligonucleotide
gaaagauugagucgcagca

SEQ ID NO: 997654 - RNA, 19 nt, Artificial Sequence
  Description of Artificial Sequence: Synthetic oligonucleotide
aaaguaaccgggaggaauc

SEQ ID NO: 997655 - RNA, 19 nt, Artificial Sequence
  Description of Artificial Sequence: Synthetic oligonucleotide
aauacagucuugcucaguu

SEQ ID NO: 997656 - RNA, 19 nt, Artificial Sequence
  Description of Artificial Sequence: Synthetic oligonucleotide
aagguugcuuguuuaucac

SEQ ID NO: 997657 - RNA, 19 nt, Artificial Sequence
  Description of Artificial Sequence: Synthetic oligonucleotide
uuuaguugccuagaggaag

SEQ ID NO: 997658 - RNA, 19 nt, Artificial Sequence
  Description of Artificial Sequence: Synthetic oligonucleotide
gugcccuucauuaauaugg

SEQ ID NO: 997659 - RNA, 19 nt, Artificial Sequence
  Description of Artificial Sequence: Synthetic oligonucleotide
acguaauacagucuugcuc

SEQ ID NO: 997660 - RNA, 19 nt, Artificial Sequence
  Description of Artificial Sequence: Synthetic oligonucleotide
acagaccgcagcuuguugc

SEQ ID NO: 997661 - RNA, 19 nt, Artificial Sequence
  Description of Artificial Sequence: Synthetic oligonucleotide
aguuccuuuagcuauaauu

SEQ ID NO: 997662 - RNA, 19 nt, Artificial Sequence
  Description of Artificial Sequence: Synthetic oligonucleotide
uucgaaugguucuuagagg

SEQ ID NO: 997663 - RNA, 19 nt, Artificial Sequence
  Description of Artificial Sequence: Synthetic oligonucleotide
auaaaccugcuuuugauaa

SEQ ID NO: 997664 - RNA, 19 nt, Artificial Sequence
  Description of Artificial Sequence: Synthetic oligonucleotide
uuuugauaauuucagugua

SEQ ID NO: 997665 - RNA, 19 nt, Artificial Sequence
  Description of Artificial Sequence: Synthetic oligonucleotide
uucgcagguauuuuaagga

SEQ ID NO: 997666 - RNA, 19 nt, Artificial Sequence
  Description of Artificial Sequence: Synthetic oligonucleotide
uuugcggcaucaaauacgu

SEQ ID NO: 997667 - RNA, 19 nt, Artificial Sequence
  Description of Artificial Sequence: Synthetic oligonucleotide
uuagagugacuauagcaug

SEQ ID NO: 997668 - RNA, 19 nt, Artificial Sequence
  Description of Artificial Sequence: Synthetic oligonucleotide
cacguaauuuauuucuccg

SEQ ID NO: 997669 - RNA, 19 nt, Artificial Sequence
  Description of Artificial Sequence: Synthetic oligonucleotide
uguucguagcugcacacag

SEQ ID NO: 997670 - RNA, 19 nt, Artificial Sequence
  Description of Artificial Sequence: Synthetic oligonucleotide
ugacacaaucauaugguga

SEQ ID NO: 997671 - RNA, 19 nt, Artificial Sequence
  Description of Artificial Sequence: Synthetic oligonucleotide
  modified_base (17)..(17): a, c, u, g, unknown or other
uucaccuaggugcagcncc

SEQ ID NO: 997672 - RNA, 19 nt, Artificial Sequence
  Description of Artificial Sequence: Synthetic oligonucleotide
cuucgcagguauuuuaagg

SEQ ID NO: 997673 - RNA, 19 nt, Artificial Sequence
  Description of Artificial Sequence: Synthetic oligonucleotide
acacguaauacagucuugc

SEQ ID NO: 997674 - RNA, 19 nt, Artificial Sequence
  Description of Artificial Sequence: Synthetic oligonucleotide
auuaauauggccgcucgag

SEQ ID NO: 997675 - RNA, 19 nt, Artificial Sequence
  Description of Artificial Sequence: Synthetic oligonucleotide
cuuuagagugacuauagca

SEQ ID NO: 997676 - RNA, 19 nt, Artificial Sequence
  Description of Artificial Sequence: Synthetic oligonucleotide
auuguugcugaugagaacu

SEQ ID NO: 997677 - RNA, 19 nt, Artificial Sequence
  Description of Artificial Sequence: Synthetic oligonucleotide
ugauuguugcugaugagaa

SEQ ID NO: 997678 - RNA, 19 nt, Artificial Sequence
  Description of Artificial Sequence: Synthetic oligonucleotide
cagacuacuaaugucauug

SEQ ID NO: 997679 - RNA, 19 nt, Artificial Sequence
  Description of Artificial Sequence: Synthetic oligonucleotide
uucgaucugguuuucaccu

SEQ ID NO: 997680 - RNA, 19 nt, Artificial Sequence
  Description of Artificial Sequence: Synthetic oligonucleotide
aauccuacacauaaacaug

SEQ ID NO: 997681 - RNA, 19 nt, Artificial Sequence
  Description of Artificial Sequence: Synthetic oligonucleotide
agguauuuuaaggacuuac

SEQ ID NO: 997682 - RNA, 19 nt, Artificial Sequence
  Description of Artificial Sequence: Synthetic oligonucleotide
cuagcaguaguguucguag

SEQ ID NO: 997683 - RNA, 19 nt, Artificial Sequence
  Description of Artificial Sequence: Synthetic oligonucleotide
uaaucaggcuguaagcaga

SEQ ID NO: 997684 - RNA, 19 nt, Artificial Sequence
  Description of Artificial Sequence: Synthetic oligonucleotide
auuuccaucuagcaguagu

SEQ ID NO: 997685 - RNA, 19 nt, Artificial Sequence
  Description of Artificial Sequence: Synthetic oligonucleotide
gaagcaagcaaaauuccug

SEQ ID NO: 997686 - RNA, 19 nt, Artificial Sequence
  Description of Artificial Sequence: Synthetic oligonucleotide
uuacacguaauacagucuu

SEQ ID NO: 997687 - RNA, 19 nt, Artificial Sequence
  Description of Artificial Sequence: Synthetic oligonucleotide
acuaauucccuuuuagaaa

SEQ ID NO: 997688 - RNA, 19 nt, Artificial Sequence
  Description of Artificial Sequence: Synthetic oligonucleotide
gcuuuugauaauuucagug

SEQ ID NO: 997689 - RNA, 19 nt, Artificial Sequence
  Description of Artificial Sequence: Synthetic oligonucleotide
uuugauaauuucaguguaa

SEQ ID NO: 997690 - RNA, 19 nt, Artificial Sequence
  Description of Artificial Sequence: Synthetic oligonucleotide
acacacguuacuucugaac

SEQ ID NO: 997691 - RNA, 19 nt, Artificial Sequence
  Description of Artificial Sequence: Synthetic oligonucleotide
gacuauagcauggauguug

SEQ ID NO: 997692 - RNA, 19 nt, Artificial Sequence
  Description of Artificial Sequence: Synthetic oligonucleotide
acagaaucauuuugacugg

SEQ ID NO: 997693 - RNA, 19 nt, Artificial Sequence
  Description of Artificial Sequence: Synthetic oligonucleotide
uugacuggucccaucaucu

SEQ ID NO: 997694 - RNA, 19 nt, Artificial Sequence
  Description of Artificial Sequence: Synthetic oligonucleotide
aaaaguaaccgggaggaau

SEQ ID NO: 997695 - RNA, 19 nt, Artificial Sequence
  Description of Artificial Sequence: Synthetic oligonucleotide
acaguuuccgagcucuggg

SEQ ID NO: 997696 - RNA, 19 nt, Artificial Sequence
  Description of Artificial Sequence: Synthetic oligonucleotide
cuuacuugaguuccuuuag

SEQ ID NO: 997697 - RNA, 19 nt, Artificial Sequence
  Description of Artificial Sequence: Synthetic oligonucleotide
uuacuugaguuccuuuagc

SEQ ID NO: 997698 - RNA, 19 nt, Artificial Sequence
  Description of Artificial Sequence: Synthetic oligonucleotide
auaaacaugcauugacacu

SEQ ID NO: 997699 - RNA, 19 nt, Artificial Sequence
  Description of Artificial Sequence: Synthetic oligonucleotide
aacacguaauuuauuucuc

SEQ ID NO: 997700 - RNA, 19 nt, Artificial Sequence
  Description of Artificial Sequence: Synthetic oligonucleotide
aaugugauacagaacugca

SEQ ID NO: 997701 - RNA, 19 nt, Artificial Sequence
  Description of Artificial Sequence: Synthetic oligonucleotide
auaagaaguaccaggccgg

SEQ ID NO: 997702 - RNA, 19 nt, Artificial Sequence
  Description of Artificial Sequence: Synthetic oligonucleotide
aacaugcauugacacugac

SEQ ID NO: 997703 - RNA, 19 nt, Artificial Sequence
  Description of Artificial Sequence: Synthetic oligonucleotide
agguaaaacacguaauuua

SEQ ID NO: 997704 - RNA, 19 nt, Artificial Sequence
  Description of Artificial Sequence: Synthetic oligonucleotide
ugacacugaccacacagca

SEQ ID NO: 997705 - RNA, 19 nt, Artificial Sequence
  Description of Artificial Sequence: Synthetic oligonucleotide
aagcuuguuaaaacugagg

SEQ ID NO: 997706 - RNA, 19 nt, Artificial Sequence
  Description of Artificial Sequence: Synthetic oligonucleotide
aauacgucaucaggaauca

SEQ ID NO: 997707 - RNA, 19 nt, Artificial Sequence
  Description of Artificial Sequence: Synthetic oligonucleotide
uugacacaaucauauggug

SEQ ID NO: 997708 - RNA, 19 nt, Artificial Sequence
  Description of Artificial Sequence: Synthetic oligonucleotide
uggggaaugaaaagucuga

SEQ ID NO: 997709 - RNA, 19 nt, Artificial Sequence
  Description of Artificial Sequence: Synthetic oligonucleotide
caggaaucaagguugcuug

SEQ ID NO: 997710 - RNA, 19 nt, Artificial Sequence
  Description of Artificial Sequence: Synthetic oligonucleotide
gagccaaccugauuguugc

SEQ ID NO: 997711 - RNA, 19 nt, Artificial Sequence
  Description of Artificial Sequence: Synthetic oligonucleotide
agucuagcuuuaaucaggc

SEQ ID NO: 997712 - RNA, 19 nt, Artificial Sequence
  Description of Artificial Sequence: Synthetic oligonucleotide
guugacaucugauaccauc

SEQ ID NO: 997713 - RNA, 19 nt, Artificial Sequence
  Description of Artificial Sequence: Synthetic oligonucleotide
cccuucauuaauauggccg

SEQ ID NO: 997714 - RNA, 19 nt, Artificial Sequence
  Description of Artificial Sequence: Synthetic oligonucleotide
  modified_base (4)..(4): a, c, u, g, unknown or other
agcnccuuuaguugccuag

SEQ ID NO: 997715 - RNA, 19 nt, Artificial Sequence
  Description of Artificial Sequence: Synthetic oligonucleotide
aaguaaccgggaggaaucc

SEQ ID NO: 997716 - RNA, 19 nt, Artificial Sequence
  Description of Artificial Sequence: Synthetic oligonucleotide
uauuucugcuggcaaacuc

SEQ ID NO: 997717 - RNA, 19 nt, Artificial Sequence
  Description of Artificial Sequence: Synthetic oligonucleotide
gugacuauagcauggaugu

SEQ ID NO: 997718 - RNA, 19 nt, Artificial Sequence
  Description of Artificial Sequence: Synthetic oligonucleotide
ucuauccagaaugaccacc

SEQ ID NO: 997719 - RNA, 19 nt, Artificial Sequence
  Description of Artificial Sequence: Synthetic oligonucleotide
agucuagcagcuuuagagu

SEQ ID NO: 997720 - RNA, 19 nt, Artificial Sequence
  Description of Artificial Sequence: Synthetic oligonucleotide
agcaauuccagugauucca

SEQ ID NO: 997721 - RNA, 19 nt, Artificial Sequence
  Description of Artificial Sequence: Synthetic oligonucleotide
uguuggaaauaagaaguac

SEQ ID NO: 997722 - RNA, 19 nt, Artificial Sequence
  Description of Artificial Sequence: Synthetic oligonucleotide
aauauggccgcucgaggaa

SEQ ID NO: 997723 - RNA, 19 nt, Artificial Sequence
  Description of Artificial Sequence: Synthetic oligonucleotide
agcaagcaaaauuccuggg

SEQ ID NO: 997724 - RNA, 19 nt, Artificial Sequence
  Description of Artificial Sequence: Synthetic oligonucleotide
agaaguaccaggccggaau

SEQ ID NO: 997725 - RNA, 19 nt, Artificial Sequence
  Description of Artificial Sequence: Synthetic oligonucleotide
uuugacuggucccaucauc

SEQ ID NO: 997726 - RNA, 19 nt, Artificial Sequence
  Description of Artificial Sequence: Synthetic oligonucleotide
gcuuguauauaacuaauuc

SEQ ID NO: 997727 - RNA, 19 nt, Artificial Sequence
  Description of Artificial Sequence: Synthetic oligonucleotide
accugcuuuugauaauuuc

SEQ ID NO: 997728 - RNA, 19 nt, Artificial Sequence
  Description of Artificial Sequence: Synthetic oligonucleotide
uagcguuucgaucugguuu

SEQ ID NO: 997729 - RNA, 19 nt, Artificial Sequence
  Description of Artificial Sequence: Synthetic oligonucleotide
gaaagcuuguuaaaacuga

SEQ ID NO: 997730 - RNA, 19 nt, Artificial Sequence
  Description of Artificial Sequence: Synthetic oligonucleotide
cuuguuuaucacuguaguc

SEQ ID NO: 997731 - RNA, 19 nt, Artificial Sequence
  Description of Artificial Sequence: Synthetic oligonucleotide
uugauuguuugcaguuuug

SEQ ID NO: 997732 - RNA, 19 nt, Artificial Sequence
  Description of Artificial Sequence: Synthetic oligonucleotide
gcaaauaaagcaauuccag

SEQ ID NO: 997733 - RNA, 19 nt, Artificial Sequence
  Description of Artificial Sequence: Synthetic oligonucleotide
agaaugaccaccagaauaa

SEQ ID NO: 997734 - RNA, 19 nt, Artificial Sequence
  Description of Artificial Sequence: Synthetic oligonucleotide
uuucagcucaauaauccuu

SEQ ID NO: 997735 - RNA, 19 nt, Artificial Sequence
  Description of Artificial Sequence: Synthetic oligonucleotide
uauggugagccagaagagc

SEQ ID NO: 997736 - RNA, 19 nt, Artificial Sequence
  Description of Artificial Sequence: Synthetic oligonucleotide
ucuaaauagauggcugccu

SEQ ID NO: 997737 - RNA, 19 nt, Artificial Sequence
  Description of Artificial Sequence: Synthetic oligonucleotide
acgucaucaggaaucaagg

SEQ ID NO: 997738 - RNA, 19 nt, Artificial Sequence
  Description of Artificial Sequence: Synthetic oligonucleotide
agauugauuguuugcaguu

SEQ ID NO: 997739 - RNA, 19 nt, Artificial Sequence
  Description of Artificial Sequence: Synthetic oligonucleotide
cuuacugaaguugacagaa

SEQ ID NO: 997740 - RNA, 19 nt, Artificial Sequence
  Description of Artificial Sequence: Synthetic oligonucleotide
cacguuacuucugaacugg

SEQ ID NO: 997741 - RNA, 19 nt, Artificial Sequence
  Description of Artificial Sequence: Synthetic oligonucleotide
ucuucgaaugguucuuaga

SEQ ID NO: 997742 - RNA, 19 nt, Artificial Sequence
  Description of Artificial Sequence: Synthetic oligonucleotide
ugcucaguucacauuauuu

SEQ ID NO: 997743 - RNA, 19 nt, Artificial Sequence
  Description of Artificial Sequence: Synthetic oligonucleotide
augaccaccagaauaagau

SEQ ID NO: 997744 - RNA, 19 nt, Artificial Sequence
  Description of Artificial Sequence: Synthetic oligonucleotide
auugauuguuugcaguuuu

SEQ ID NO: 997745 - RNA, 19 nt, Artificial Sequence
  Description of Artificial Sequence: Synthetic oligonucleotide
agcaguaguguucguagcu

SEQ ID NO: 997746 - RNA, 19 nt, Artificial Sequence
  Description of Artificial Sequence: Synthetic oligonucleotide
uguugcucaagucgagccu

SEQ ID NO: 997747 - RNA, 19 nt, Artificial Sequence
  Description of Artificial Sequence: Synthetic oligonucleotide
uaaggacuuacuugaguuc

SEQ ID NO: 997748 - RNA, 19 nt, Artificial Sequence
  Description of Artificial Sequence: Synthetic oligonucleotide
cuggcuuacacguaauaca

SEQ ID NO: 997749 - RNA, 19 nt, Artificial Sequence
  Description of Artificial Sequence: Synthetic oligonucleotide
ucugcuuauuucugcuggc

SEQ ID NO: 997750 - RNA, 19 nt, Artificial Sequence
  Description of Artificial Sequence: Synthetic oligonucleotide
uacacguaauacagucuug

SEQ ID NO: 997751 - RNA, 19 nt, Artificial Sequence
  Description of Artificial Sequence: Synthetic oligonucleotide
ugauuguuugcaguuuugu

SEQ ID NO: 997752 - RNA, 19 nt, Artificial Sequence
  Description of Artificial Sequence: Synthetic oligonucleotide
acauaaacaugcauugaca

SEQ ID NO: 997753 - RNA, 19 nt, Artificial Sequence
  Description of Artificial Sequence: Synthetic oligonucleotide
uaaaauuugcuggcuuaca

SEQ ID NO: 997754 - RNA, 19 nt, Artificial Sequence
  Description of Artificial Sequence: Synthetic oligonucleotide
  modified_base (7)..(7): a, c, u, g, unknown or other
ugcagcnccuuuaguugcc

SEQ ID NO: 997755 - RNA, 19 nt, Artificial Sequence
  Description of Artificial Sequence: Synthetic oligonucleotide
ucuccgcaaauaaagcaau

SEQ ID NO: 997756 - RNA, 19 nt, Artificial Sequence
  Description of Artificial Sequence: Synthetic oligonucleotide
uccgcaaauaaagcaauuc

SEQ ID NO: 997757 - RNA, 19 nt, Artificial Sequence
  Description of Artificial Sequence: Synthetic oligonucleotide
auauaacuaauucccuuuu

SEQ ID NO: 997758 - RNA, 19 nt, Artificial Sequence
  Description of Artificial Sequence: Synthetic oligonucleotide
acacguuacuucugaacug

SEQ ID NO: 997759 - RNA, 19 nt, Artificial Sequence
  Description of Artificial Sequence: Synthetic oligonucleotide
uugccuagaggaaggaaau

SEQ ID NO: 997760 - RNA, 19 nt, Artificial Sequence
  Description of Artificial Sequence: Synthetic oligonucleotide
gcuuacacguaauacaguc

SEQ ID NO: 997761 - RNA, 19 nt, Artificial Sequence
  Description of Artificial Sequence: Synthetic oligonucleotide
ggaaagauugagucgcagc

SEQ ID NO: 997762 - RNA, 19 nt, Artificial Sequence
  Description of Artificial Sequence: Synthetic oligonucleotide
  modified_base (16)..(16): a, c, u, g, unknown or other
ucaccuaggugcagcnccu

SEQ ID NO: 997763 - RNA, 19 nt, Artificial Sequence
  Description of Artificial Sequence: Synthetic oligonucleotide
ugcuuauuucugcuggcaa

SEQ ID NO: 997764 - RNA, 19 nt, Artificial Sequence
  Description of Artificial Sequence: Synthetic oligonucleotide
acuugguagcgucauggca

SEQ ID NO: 997765 - RNA, 19 nt, Artificial Sequence
  Description of Artificial Sequence: Synthetic oligonucleotide
  modified_base (12)..(12): a, c, u, g, unknown or other
cuaggugcagcnccuuuag

SEQ ID NO: 997766 - RNA, 19 nt, Artificial Sequence
  Description of Artificial Sequence: Synthetic oligonucleotide
agcaaaauuccugggauau

SEQ ID NO: 997767 - RNA, 19 nt, Artificial Sequence
  Description of Artificial Sequence: Synthetic oligonucleotide
aucauuuugacugguccca

SEQ ID NO: 997768 - RNA, 19 nt, Artificial Sequence
  Description of Artificial Sequence: Synthetic oligonucleotide
cuugacacaaucauauggu

SEQ ID NO: 997769 - RNA, 19 nt, Artificial Sequence
  Description of Artificial Sequence: Synthetic oligonucleotide
auuucugcuggcaaacucu

SEQ ID NO: 997770 - RNA, 19 nt, Artificial Sequence
  Description of Artificial Sequence: Synthetic oligonucleotide
guuaaaacugagguugaca

SEQ ID NO: 997771 - RNA, 19 nt, Artificial Sequence
  Description of Artificial Sequence: Synthetic oligonucleotide
ucaggaaucaagguugcuu

SEQ ID NO: 997772 - RNA, 19 nt, Artificial Sequence
  Description of Artificial Sequence: Synthetic oligonucleotide
guaaaauuugcuggcuuac

SEQ ID NO: 997773 - RNA, 19 nt, Artificial Sequence
  Description of Artificial Sequence: Synthetic oligonucleotide
  modified_base (9)..(9): a, c, u, g, unknown or other
ggugcagcnccuuuaguug

SEQ ID NO: 997774 - RNA, 19 nt, Artificial Sequence
  Description of Artificial Sequence: Synthetic oligonucleotide
aguuucaccuucugagggu

SEQ ID NO: 997775 - RNA, 19 nt, Artificial Sequence
  Description of Artificial Sequence: Synthetic oligonucleotide
cuggauucacuugguagcg

SEQ ID NO: 997776 - RNA, 19 nt, Artificial Sequence
  Description of Artificial Sequence: Synthetic oligonucleotide
gauuugggaaccauguugu

SEQ ID NO: 997777 - RNA, 19 nt, Artificial Sequence
  Description of Artificial Sequence: Synthetic oligonucleotide
gcuguaagcagauuuggga

SEQ ID NO: 997778 - RNA, 19 nt, Artificial Sequence
  Description of Artificial Sequence: Synthetic oligonucleotide
agcguuucgaucugguuuu

SEQ ID NO: 997779 - RNA, 19 nt, Artificial Sequence
  Description of Artificial Sequence: Synthetic oligonucleotide
auaagaugucagcuauccu

SEQ ID NO: 997780 - RNA, 19 nt, Artificial Sequence
  Description of Artificial Sequence: Synthetic oligonucleotide
accaggccggaauaaagga

SEQ ID NO: 997781 - RNA, 19 nt, Artificial Sequence
  Description of Artificial Sequence: Synthetic oligonucleotide
agagugcucagguuuucca

SEQ ID NO: 997782 - RNA, 19 nt, Artificial Sequence
  Description of Artificial Sequence: Synthetic oligonucleotide
guaaccgggaggaauccag

SEQ ID NO: 997783 - RNA, 19 nt, Artificial Sequence
  Description of Artificial Sequence: Synthetic oligonucleotide
cguaauacagucuugcuca

SEQ ID NO: 997784 - RNA, 19 nt, Artificial Sequence
  Description of Artificial Sequence: Synthetic oligonucleotide
gaugcccacacauguagaa

SEQ ID NO: 997785 - RNA, 19 nt, Artificial Sequence
  Description of Artificial Sequence: Synthetic oligonucleotide
uggaaagauugagucgcag

SEQ ID NO: 997786 - RNA, 19 nt, Artificial Sequence
  Description of Artificial Sequence: Synthetic oligonucleotide
augcauugacacugaccac

SEQ ID NO: 997787 - RNA, 19 nt, Artificial Sequence
  Description of Artificial Sequence: Synthetic oligonucleotide
aucaagguugcuuguuuau

SEQ ID NO: 997788 - RNA, 19 nt, Artificial Sequence
  Description of Artificial Sequence: Synthetic oligonucleotide
uccucaggaacagaccgca

SEQ ID NO: 997789 - RNA, 19 nt, Artificial Sequence
  Description of Artificial Sequence: Synthetic oligonucleotide
guuuucaccuaggugcagc

SEQ ID NO: 997790 - RNA, 19 nt, Artificial Sequence
  Description of Artificial Sequence: Synthetic oligonucleotide
acuauagcauggauguuga

SEQ ID NO: 997791 - RNA, 19 nt, Artificial Sequence
  Description of Artificial Sequence: Synthetic oligonucleotide
uguugacucuggauucacu

SEQ ID NO: 997792 - RNA, 19 nt, Artificial Sequence
  Description of Artificial Sequence: Synthetic oligonucleotide
ucgagccuuuccaaagacu

SEQ ID NO: 997793 - RNA, 19 nt, Artificial Sequence
  Description of Artificial Sequence: Synthetic oligonucleotide
ucuagcaguaguguucgua

SEQ ID NO: 997794 - RNA, 19 nt, Artificial Sequence
  Description of Artificial Sequence: Synthetic oligonucleotide
uguaaacaacaauguuuau

SEQ ID NO: 997795 - RNA, 19 nt, Artificial Sequence
  Description of Artificial Sequence: Synthetic oligonucleotide
agacuacuaaugucauugu

SEQ ID NO: 997796 - RNA, 19 nt, Artificial Sequence
  Description of Artificial Sequence: Synthetic oligonucleotide
agcgucauggcagucucag

SEQ ID NO: 997797 - RNA, 19 nt, Artificial Sequence
  Description of Artificial Sequence: Synthetic oligonucleotide
ucuucgggcaaagaauuua

SEQ ID NO: 997798 - RNA, 19 nt, Artificial Sequence
  Description of Artificial Sequence: Synthetic oligonucleotide
agauugagucgcagcagac

SEQ ID NO: 997799 - RNA, 19 nt, Artificial Sequence
  Description of Artificial Sequence: Synthetic oligonucleotide
uaaccgggaggaauccaga

SEQ ID NO: 997800 - RNA, 19 nt, Artificial Sequence
  Description of Artificial Sequence: Synthetic oligonucleotide
ugcuucuaaugugggaaug

SEQ ID NO: 997801 - RNA, 19 nt, Artificial Sequence
  Description of Artificial Sequence: Synthetic oligonucleotide
auauggccgcucgaggaac

SEQ ID NO: 997802 - RNA, 19 nt, Artificial Sequence
  Description of Artificial Sequence: Synthetic oligonucleotide
cucuucgaaugguucuuag

SEQ ID NO: 997803 - RNA, 19 nt, Artificial Sequence
  Description of Artificial Sequence: Synthetic oligonucleotide
aauagauggcugccuuauu

SEQ ID NO: 997804 - RNA, 19 nt, Artificial Sequence
  Description of Artificial Sequence: Synthetic oligonucleotide
agucgagccuuuccaaaga

SEQ ID NO: 997805 - RNA, 19 nt, Artificial Sequence
  Description of Artificial Sequence: Synthetic oligonucleotide
  modified_base (8)..(8): a, c, u, g, unknown or other
gugcagcnccuuuaguugc

SEQ ID NO: 997806 - RNA, 19 nt, Artificial Sequence
  Description of Artificial Sequence: Synthetic oligonucleotide
uucacuugguagcgucaug

SEQ ID NO: 997807 - RNA, 19 nt, Artificial Sequence
  Description of Artificial Sequence: Synthetic oligonucleotide
guuccuuuagcuauaauuu

SEQ ID NO: 997808 - RNA, 19 nt, Artificial Sequence
  Description of Artificial Sequence: Synthetic oligonucleotide
aggccggaauaaaggaugc

SEQ ID NO: 997809 - RNA, 19 nt, Artificial Sequence
  Description of Artificial Sequence: Synthetic oligonucleotide
ugguuacuggaaagauuga

SEQ ID NO: 997810 - RNA, 19 nt, Artificial Sequence
  Description of Artificial Sequence: Synthetic oligonucleotide
cacacguuacuucugaacu

SEQ ID NO: 997811 - RNA, 19 nt, Artificial Sequence
  Description of Artificial Sequence: Synthetic oligonucleotide
gcuauaauuucucuucgaa

SEQ ID NO: 997812 - RNA, 19 nt, Artificial Sequence
  Description of Artificial Sequence: Synthetic oligonucleotide
ggauguugacucuggauuc

SEQ ID NO: 997813 - RNA, 19 nt, Artificial Sequence
  Description of Artificial Sequence: Synthetic oligonucleotide
aauucagguaaaacacgua

SEQ ID NO: 997814 - RNA, 19 nt, Artificial Sequence
  Description of Artificial Sequence: Synthetic oligonucleotide
auguugacucuggauucac

SEQ ID NO: 997815 - RNA, 19 nt, Artificial Sequence
  Description of Artificial Sequence: Synthetic oligonucleotide
aguccuaaccuggggaaug

SEQ ID NO: 997816 - RNA, 19 nt, Artificial Sequence
  Description of Artificial Sequence: Synthetic oligonucleotide
aggaaucaagguugcuugu

SEQ ID NO: 997817 - RNA, 19 nt, Artificial Sequence
  Description of Artificial Sequence: Synthetic oligonucleotide
guaccaggccggaauaaag

SEQ ID NO: 997818 - RNA, 19 nt, Artificial Sequence
  Description of Artificial Sequence: Synthetic oligonucleotide
  modified_base (2)..(2): a, c, u, g, unknown or other
cnccuuuaguugccuagag

SEQ ID NO: 997819 - RNA, 19 nt, Artificial Sequence
  Description of Artificial Sequence: Synthetic oligonucleotide
gacaucugauaccaucucu

SEQ ID NO: 997820 - RNA, 19 nt, Artificial Sequence
  Description of Artificial Sequence: Synthetic oligonucleotide
uugguagcgucauggcagu

SEQ ID NO: 997821 - RNA, 19 nt, Artificial Sequence
  Description of Artificial Sequence: Synthetic oligonucleotide
cacuugguagcgucauggc

SEQ ID NO: 997822 - RNA, 19 nt, Artificial Sequence
  Description of Artificial Sequence: Synthetic oligonucleotide
uaagaaguaccaggccgga

SEQ ID NO: 997823 - RNA, 19 nt, Artificial Sequence
  Description of Artificial Sequence: Synthetic oligonucleotide
aaacaugcauugacacuga

SEQ ID NO: 997824 - RNA, 19 nt, Artificial Sequence
  Description of Artificial Sequence: Synthetic oligonucleotide
agaugucagcuauccucag

SEQ ID NO: 997825 - RNA, 19 nt, Artificial Sequence
  Description of Artificial Sequence: Synthetic oligonucleotide
guuacuggaaagauugagu

SEQ ID NO: 997826 - RNA, 19 nt, Artificial Sequence
  Description of Artificial Sequence: Synthetic oligonucleotide
gcaagcaaaauuccuggga

SEQ ID NO: 997827 - RNA, 19 nt, Artificial Sequence
  Description of Artificial Sequence: Synthetic oligonucleotide
guuuaucacuguagucuag

SEQ ID NO: 997828 - RNA, 19 nt, Artificial Sequence
  Description of Artificial Sequence: Synthetic oligonucleotide
agcugugcccuucauuaau

SEQ ID NO: 997829 - RNA, 19 nt, Artificial Sequence
  Description of Artificial Sequence: Synthetic oligonucleotide
acucggaauggauuuccau

SEQ ID NO: 997830 - RNA, 19 nt, Artificial Sequence
  Description of Artificial Sequence: Synthetic oligonucleotide
cuuuaguugccuagaggaa

SEQ ID NO: 997831 - RNA, 19 nt, Artificial Sequence
  Description of Artificial Sequence: Synthetic oligonucleotide
guagcgucauggcagucuc

SEQ ID NO: 997832 - RNA, 19 nt, Artificial Sequence
  Description of Artificial Sequence: Synthetic oligonucleotide
gccggaauaaaggaugccc

SEQ ID NO: 997833 - RNA, 19 nt, Artificial Sequence
  Description of Artificial Sequence: Synthetic oligonucleotide
acguuacuucugaacuggc

SEQ ID NO: 997834 - RNA, 19 nt, Artificial Sequence
  Description of Artificial Sequence: Synthetic oligonucleotide
uauggccgcucgaggaacu

SEQ ID NO: 997835 - RNA, 19 nt, Artificial Sequence
  Description of Artificial Sequence: Synthetic oligonucleotide
gaaguaccaggccggaaua

SEQ ID NO: 997836 - RNA, 19 nt, Artificial Sequence
  Description of Artificial Sequence: Synthetic oligonucleotide
uugcuucgcagguauuuua

SEQ ID NO: 997837 - RNA, 19 nt, Artificial Sequence
  Description of Artificial Sequence: Synthetic oligonucleotide
gucgagccuuuccaaagac

SEQ ID NO: 997838 - RNA, 19 nt, Artificial Sequence
  Description of Artificial Sequence: Synthetic oligonucleotide
augguucuuagaggauuuc

SEQ ID NO: 997839 - RNA, 19 nt, Artificial Sequence
  Description of Artificial Sequence: Synthetic oligonucleotide
gauucacuugguagcguca

SEQ ID NO: 997840 - RNA, 19 nt, Artificial Sequence
  Description of Artificial Sequence: Synthetic oligonucleotide
caaguccuaaccuggggaa

SEQ ID NO: 997841 - RNA, 19 nt, Artificial Sequence
  Description of Artificial Sequence: Synthetic oligonucleotide
ggauucacuugguagcguc

SEQ ID NO: 997842 - RNA, 19 nt, Artificial Sequence
  Description of Artificial Sequence: Synthetic oligonucleotide
uaauacagucuugcucagu

SEQ ID NO: 997843 - RNA, 19 nt, Artificial Sequence
  Description of Artificial Sequence: Synthetic oligonucleotide
guaguguucguagcugcac

SEQ ID NO: 997844 - RNA, 19 nt, Artificial Sequence
  Description of Artificial Sequence: Synthetic oligonucleotide
uugcucaguucacauuauu

SEQ ID NO: 997845 - RNA, 19 nt, Artificial Sequence
  Description of Artificial Sequence: Synthetic oligonucleotide
guagucuagcagcuuuaga

SEQ ID NO: 997846 - RNA, 19 nt, Artificial Sequence
  Description of Artificial Sequence: Synthetic oligonucleotide
ggcuguaagcagauuuggg

SEQ ID NO: 997847 - RNA, 19 nt, Artificial Sequence
  Description of Artificial Sequence: Synthetic oligonucleotide
  modified_base (11)..(11): a, c, u, g, unknown or other
uaggugcagcnccuuuagu

SEQ ID NO: 997848 - RNA, 19 nt, Artificial Sequence
  Description of Artificial Sequence: Synthetic oligonucleotide
gggcagacuacuaauguca

SEQ ID NO: 997849 - RNA, 19 nt, Artificial Sequence
  Description of Artificial Sequence: Synthetic oligonucleotide
uguuugcaguuuugucagu

SEQ ID NO: 997850 - RNA, 19 nt, Artificial Sequence
  Description of Artificial Sequence: Synthetic oligonucleotide
gaaucaagguugcuuguuu

SEQ ID NO: 997851 - RNA, 19 nt, Artificial Sequence
  Description of Artificial Sequence: Synthetic oligonucleotide
cuuacacguaauacagucu

SEQ ID NO: 997852 - RNA, 19 nt, Artificial Sequence
  Description of Artificial Sequence: Synthetic oligonucleotide
aacucggaauggauuucca

SEQ ID NO: 997853 - RNA, 19 nt, Artificial Sequence
  Description of Artificial Sequence: Synthetic oligonucleotide
cucuucuauccagaaugac

SEQ ID NO: 997854 - RNA, 19 nt, Artificial Sequence
  Description of Artificial Sequence: Synthetic oligonucleotide
aaguccuaaccuggggaau

SEQ ID NO: 997855 - RNA, 19 nt, Artificial Sequence
  Description of Artificial Sequence: Synthetic oligonucleotide
cuauagcauggauguugac

SEQ ID NO: 997856 - RNA, 19 nt, Artificial Sequence
  Description of Artificial Sequence: Synthetic oligonucleotide
auucacuugguagcgucau

SEQ ID NO: 997857 - RNA, 19 nt, Artificial Sequence
  Description of Artificial Sequence: Synthetic oligonucleotide
aaguaccaggccggaauaa

SEQ ID NO: 997858 - RNA, 19 nt, Artificial Sequence
  Description of Artificial Sequence: Synthetic oligonucleotide
uucuagugccaggaauuuc

SEQ ID NO: 997859 - RNA, 19 nt, Artificial Sequence
  Description of Artificial Sequence: Synthetic oligonucleotide
cauuaauauggccgcucga

SEQ ID NO: 997860 - RNA, 19 nt, Artificial Sequence
  Description of Artificial Sequence: Synthetic oligonucleotide
cagaucuaaauagauggcu

SEQ ID NO: 997861 - RNA, 19 nt, Artificial Sequence
  Description of Artificial Sequence: Synthetic oligonucleotide
ugccccuagcguuucgauc

SEQ ID NO: 997862 - RNA, 19 nt, Artificial Sequence
  Description of Artificial Sequence: Synthetic oligonucleotide
aguaccaggccggaauaaa

SEQ ID NO: 997863 - RNA, 19 nt, Artificial Sequence
  Description of Artificial Sequence: Synthetic oligonucleotide
agcugguuacuggaaagau

SEQ ID NO: 997864 - RNA, 19 nt, Artificial Sequence
  Description of Artificial Sequence: Synthetic oligonucleotide
ggaauaaaggaugcccaca

SEQ ID NO: 997865 - RNA, 19 nt, Artificial Sequence
  Description of Artificial Sequence: Synthetic oligonucleotide
augcucugccccuagcguu

SEQ ID NO: 997866 - RNA, 19 nt, Artificial Sequence
  Description of Artificial Sequence: Synthetic oligonucleotide
ggagccaaccugauuguug

SEQ ID NO: 997867 - RNA, 19 nt, Artificial Sequence
  Description of Artificial Sequence: Synthetic oligonucleotide
acggagccaaccugauugu

SEQ ID NO: 997868 - RNA, 19 nt, Artificial Sequence
  Description of Artificial Sequence: Synthetic oligonucleotide
ucugccccuagcguuucga

SEQ ID NO: 997869 - RNA, 19 nt, Artificial Sequence
  Description of Artificial Sequence: Synthetic oligonucleotide
  modified_base (14)..(14): a, c, u, g, unknown or other
accuaggugcagcnccuuu

SEQ ID NO: 997870 - RNA, 19 nt, Artificial Sequence
  Description of Artificial Sequence: Synthetic oligonucleotide
gauugagucgcagcagacu

SEQ ID NO: 997871 - RNA, 19 nt, Artificial Sequence
  Description of Artificial Sequence: Synthetic oligonucleotide
aagaaguaccaggccggaa

SEQ ID NO: 997872 - RNA, 19 nt, Artificial Sequence
  Description of Artificial Sequence: Synthetic oligonucleotide
gacacacguuacuucugaa

SEQ ID NO: 997873 - RNA, 19 nt, Artificial Sequence
  Description of Artificial Sequence: Synthetic oligonucleotide
ucgaucugguuuucaccua

SEQ ID NO: 997874 - RNA, 19 nt, Artificial Sequence
  Description of Artificial Sequence: Synthetic oligonucleotide
cuaaauagauggcugccuu

SEQ ID NO: 997875 - RNA, 19 nt, Artificial Sequence
  Description of Artificial Sequence: Synthetic oligonucleotide
aguaaccgggaggaaucca

SEQ ID NO: 997876 - RNA, 19 nt, Artificial Sequence
  Description of Artificial Sequence: Synthetic oligonucleotide
uccacggagccaaccugau

SEQ ID NO: 997877 - RNA, 19 nt, Artificial Sequence
  Description of Artificial Sequence: Synthetic oligonucleotide
ucucuucgaaugguucuua

SEQ ID NO: 997878 - RNA, 19 nt, Artificial Sequence
  Description of Artificial Sequence: Synthetic oligonucleotide
ugaagaugcucugccccua

SEQ ID NO: 997879 - RNA, 19 nt, Artificial Sequence
  Description of Artificial Sequence: Synthetic oligonucleotide
gcaguaguguucguagcug

SEQ ID NO: 997880 - RNA, 19 nt, Artificial Sequence
  Description of Artificial Sequence: Synthetic oligonucleotide
aguugccuagaggaaggaa

SEQ ID NO: 997881 - RNA, 19 nt, Artificial Sequence
  Description of Artificial Sequence: Synthetic oligonucleotide
uagcgucauggcagucuca

SEQ ID NO: 997882 - RNA, 19 nt, Artificial Sequence
  Description of Artificial Sequence: Synthetic oligonucleotide
ccggaauaaaggaugccca

SEQ ID NO: 997883 - RNA, 19 nt, Artificial Sequence
  Description of Artificial Sequence: Synthetic oligonucleotide
cacacaguuuccgagcucu

SEQ ID NO: 997884 - RNA, 19 nt, Artificial Sequence
  Description of Artificial Sequence: Synthetic oligonucleotide
cuggaaagauugagucgca

SEQ ID NO: 997885 - RNA, 19 nt, Artificial Sequence
  Description of Artificial Sequence: Synthetic oligonucleotide
gauugauuguuugcaguuu

SEQ ID NO: 997886 - RNA, 19 nt, Artificial Sequence
  Description of Artificial Sequence: Synthetic oligonucleotide
cuagugccaggaauuucaa

SEQ ID NO: 997887 - RNA, 19 nt, Artificial Sequence
  Description of Artificial Sequence: Synthetic oligonucleotide
gguucuuagaggauuuccu

SEQ ID NO: 997888 - RNA, 19 nt, Artificial Sequence
  Description of Artificial Sequence: Synthetic oligonucleotide
gugauuccaugcugcccac

SEQ ID NO: 997889 - RNA, 19 nt, Artificial Sequence
  Description of Artificial Sequence: Synthetic oligonucleotide
cugcuuauuucugcuggca

SEQ ID NO: 997890 - RNA, 19 nt, Artificial Sequence
  Description of Artificial Sequence: Synthetic oligonucleotide
aggacuuacuugaguuccu

SEQ ID NO: 997891 - RNA, 19 nt, Artificial Sequence
  Description of Artificial Sequence: Synthetic oligonucleotide
uugcucaagucgagccuuu

SEQ ID NO: 997892 - RNA, 19 nt, Artificial Sequence
  Description of Artificial Sequence: Synthetic oligonucleotide
gccccuagcguuucgaucu

SEQ ID NO: 997893 - RNA, 19 nt, Artificial Sequence
  Description of Artificial Sequence: Synthetic oligonucleotide
gccuuauuauuaugaaacu

SEQ ID NO: 997894 - RNA, 19 nt, Artificial Sequence
  Description of Artificial Sequence: Synthetic oligonucleotide
cagggcagacuacuaaugu

SEQ ID NO: 997895 - RNA, 19 nt, Artificial Sequence
  Description of Artificial Sequence: Synthetic oligonucleotide
cacguaauacagucuugcu

SEQ ID NO: 997896 - RNA, 19 nt, Artificial Sequence
  Description of Artificial Sequence: Synthetic oligonucleotide
cugaagaugcucugccccu

SEQ ID NO: 997897 - RNA, 19 nt, Artificial Sequence
  Description of Artificial Sequence: Synthetic oligonucleotide
cggaauaaaggaugcccac

SEQ ID NO: 997898 - RNA, 19 nt, Artificial Sequence
  Description of Artificial Sequence: Synthetic oligonucleotide
ccaaccugauuguugcuga

SEQ ID NO: 997899 - RNA, 19 nt, Artificial Sequence
  Description of Artificial Sequence: Synthetic oligonucleotide
ugccuagaggaaggaaauu

SEQ ID NO: 997900 - RNA, 19 nt, Artificial Sequence
  Description of Artificial Sequence: Synthetic oligonucleotide
accgcagcuuguugccccu

SEQ ID NO: 997901 - RNA, 19 nt, Artificial Sequence
  Description of Artificial Sequence: Synthetic oligonucleotide
gacuuacuugaguuccuuu

SEQ ID NO: 997902 - RNA, 19 nt, Artificial Sequence
  Description of Artificial Sequence: Synthetic oligonucleotide
ugacuauagcauggauguu

SEQ ID NO: 997903 - RNA, 19 nt, Artificial Sequence
  Description of Artificial Sequence: Synthetic oligonucleotide
uccuaaccuggggaaugaa

SEQ ID NO: 997904 - RNA, 19 nt, Artificial Sequence
  Description of Artificial Sequence: Synthetic oligonucleotide
uugcggcaucaaauacguc

SEQ ID NO: 997905 - RNA, 19 nt, Artificial Sequence
  Description of Artificial Sequence: Synthetic oligonucleotide
ccgggaggaauccagaucu

SEQ ID NO: 997906 - RNA, 19 nt, Artificial Sequence
  Description of Artificial Sequence: Synthetic oligonucleotide
aucuagcaguaguguucgu

SEQ ID NO: 997907 - RNA, 19 nt, Artificial Sequence
  Description of Artificial Sequence: Synthetic oligonucleotide
ccagaauaagaugucagcu

SEQ ID NO: 997908 - RNA, 19 nt, Artificial Sequence
  Description of Artificial Sequence: Synthetic oligonucleotide
gcuuguuaaaacugagguu

SEQ ID NO: 997909 - RNA, 19 nt, Artificial Sequence
  Description of Artificial Sequence: Synthetic oligonucleotide
guccuaaccuggggaauga

SEQ ID NO: 997910 - RNA, 19 nt, Artificial Sequence
  Description of Artificial Sequence: Synthetic oligonucleotide
ggaacucggaauggauuuc

SEQ ID NO: 997911 - RNA, 19 nt, Artificial Sequence
  Description of Artificial Sequence: Synthetic oligonucleotide
gcgucauggcagucucagg

SEQ ID NO: 997912 - RNA, 19 nt, Artificial Sequence
  Description of Artificial Sequence: Synthetic oligonucleotide
gggauauaaaggaaagcuu

SEQ ID NO: 997913 - RNA, 19 nt, Artificial Sequence
  Description of Artificial Sequence: Synthetic oligonucleotide
ccuaaccuggggaaugaaa

SEQ ID NO: 997914 - RNA, 19 nt, Artificial Sequence
  Description of Artificial Sequence: Synthetic oligonucleotide
  modified_base (3)..(3): a, c, u, g, unknown or other
gcnccuuuaguugccuaga

SEQ ID NO: 997915 - RNA, 19 nt, Artificial Sequence
  Description of Artificial Sequence: Synthetic oligonucleotide
agccaaaauccuacacaua

SEQ ID NO: 997916 - RNA, 19 nt, Artificial Sequence
  Description of Artificial Sequence: Synthetic oligonucleotide
gggaaccugcaggagguca

SEQ ID NO: 997917 - RNA, 19 nt, Artificial Sequence
  Description of Artificial Sequence: Synthetic oligonucleotide
auacgucaucaggaaucaa

SEQ ID NO: 997918 - RNA, 19 nt, Artificial Sequence
  Description of Artificial Sequence: Synthetic oligonucleotide
gguagcgucauggcagucu

SEQ ID NO: 997919 - RNA, 19 nt, Artificial Sequence
  Description of Artificial Sequence: Synthetic oligonucleotide
ccuucuagugccaggaauu

SEQ ID NO: 997920 - RNA, 19 nt, Artificial Sequence
  Description of Artificial Sequence: Synthetic oligonucleotide
guugccccucagguccagc

SEQ ID NO: 997921 - RNA, 19 nt, Artificial Sequence
  Description of Artificial Sequence: Synthetic oligonucleotide
cagcugugcccuucauuaa

SEQ ID NO: 997922 - RNA, 19 nt, Artificial Sequence
  Description of Artificial Sequence: Synthetic oligonucleotide
cuagcguuucgaucugguu

SEQ ID NO: 997923 - RNA, 19 nt, Artificial Sequence
  Description of Artificial Sequence: Synthetic oligonucleotide
cagauuugggaaccauguu

SEQ ID NO: 997924 - RNA, 19 nt, Artificial Sequence
  Description of Artificial Sequence: Synthetic oligonucleotide
gaguuccuuuagcuauaau

SEQ ID NO: 997925 - RNA, 19 nt, Artificial Sequence
  Description of Artificial Sequence: Synthetic oligonucleotide
ugguagcgucauggcaguc

SEQ ID NO: 997926 - RNA, 19 nt, Artificial Sequence
  Description of Artificial Sequence: Synthetic oligonucleotide
cuugcuucgcagguauuuu

SEQ ID NO: 997927 - RNA, 19 nt, Artificial Sequence
  Description of Artificial Sequence: Synthetic oligonucleotide
cuccgcaaauaaagcaauu

SEQ ID NO: 997928 - RNA, 19 nt, Artificial Sequence
  Description of Artificial Sequence: Synthetic oligonucleotide
  modified_base (5)..(5): a, c, u, g, unknown or other
cagcnccuuuaguugccua

SEQ ID NO: 997929 - RNA, 19 nt, Artificial Sequence
  Description of Artificial Sequence: Synthetic oligonucleotide
gcacacaguuuccgagcuc

SEQ ID NO: 997930 - RNA, 19 nt, Artificial Sequence
  Description of Artificial Sequence: Synthetic oligonucleotide
cucuucgggcaaagaauuu

SEQ ID NO: 997931 - RNA, 19 nt, Artificial Sequence
  Description of Artificial Sequence: Synthetic oligonucleotide
caaccugauuguugcugau

SEQ ID NO: 997932 - RNA, 19 nt, Artificial Sequence
  Description of Artificial Sequence: Synthetic oligonucleotide
gcaaaauuccugggauaua

SEQ ID NO: 997933 - RNA, 19 nt, Artificial Sequence
  Description of Artificial Sequence: Synthetic oligonucleotide
ggaggcugacucucuucua

SEQ ID NO: 997934 - RNA, 19 nt, Artificial Sequence
  Description of Artificial Sequence: Synthetic oligonucleotide
cccuagcguuucgaucugg

SEQ ID NO: 997935 - RNA, 19 nt, Artificial Sequence
  Description of Artificial Sequence: Synthetic oligonucleotide
gcggcaucaaauacgucau

SEQ ID NO: 997936 - RNA, 19 nt, Artificial Sequence
  Description of Artificial Sequence: Synthetic oligonucleotide
ggcuuacacguaauacagu

SEQ ID NO: 997937 - RNA, 19 nt, Artificial Sequence
  Description of Artificial Sequence: Synthetic oligonucleotide
ggcagacuacuaaugucau

SEQ ID NO: 997938 - RNA, 19 nt, Artificial Sequence
  Description of Artificial Sequence: Synthetic oligonucleotide
ccuagcguuucgaucuggu

SEQ ID NO: 997939 - RNA, 19 nt, Artificial Sequence
  Description of Artificial Sequence: Synthetic oligonucleotide
ggaaccugcaggaggucau

SEQ ID NO: 997940 - RNA, 19 nt, Artificial Sequence
  Description of Artificial Sequence: Synthetic oligonucleotide
cguuacuucugaacuggcu

SEQ ID NO: 997941 - RNA, 19 nt, Artificial Sequence
  Description of Artificial Sequence: Synthetic oligonucleotide
gcaauuccagugauuccau

SEQ ID NO: 997942 - RNA, 19 nt, Artificial Sequence
  Description of Artificial Sequence: Synthetic oligonucleotide
cugccccuagcguuucgau

SEQ ID NO: 997943 - RNA, 19 nt, Artificial Sequence
  Description of Artificial Sequence: Synthetic oligonucleotide
ccccuagcguuucgaucug

SEQ ID NO: 997944 - RNA, 19 nt, Artificial Sequence
  Description of Artificial Sequence: Synthetic oligonucleotide
ggacuuacuugaguuccuu

SEQ ID NO: 997945 - RNA, 19 nt, Artificial Sequence
  Description of Artificial Sequence: Synthetic oligonucleotide
  modified_base (6)..(6): a, c, u, g, unknown or other
gcagcnccuuuaguugccu

SEQ ID NO: 997946 - RNA, 19 nt, Artificial Sequence
  Description of Artificial Sequence: Synthetic oligonucleotide
gcguuucgaucugguuuuc

SEQ ID NO: 997947 - RNA, 19 nt, Artificial Sequence
  Description of Artificial Sequence: Synthetic oligonucleotide
  modified_base (15)..(15): a, c, u, g, unknown or other
caccuaggugcagcnccuu

SEQ ID NO: 997948 - RNA, 19 nt, Artificial Sequence
  Description of Artificial Sequence: Synthetic oligonucleotide
  modified_base (1)..(1): a, c, u, g, unknown or other
nccuuuaguugccuagagg

SEQ ID NO: 997949 - RNA, 19 nt, Artificial Sequence
  Description of Artificial Sequence: Synthetic oligonucleotide
ucaacguaggagaugaugg

SEQ ID NO: 997950 - RNA, 19 nt, Artificial Sequence
  Description of Artificial Sequence: Synthetic oligonucleotide
uuaacauugaugccguggg

SEQ ID NO: 997951 - RNA, 19 nt, Artificial Sequence
  Description of Artificial Sequence: Synthetic oligonucleotide
aaagucauuggcuagcgca

SEQ ID NO: 997952 - RNA, 19 nt, Artificial Sequence
  Description of Artificial Sequence: Synthetic oligonucleotide
uaaacagccacaauuggca

SEQ ID NO: 997953 - RNA, 19 nt, Artificial Sequence
  Description of Artificial Sequence: Synthetic oligonucleotide
ucaacuugcagguuucugg

SEQ ID NO: 997954 - RNA, 19 nt, Artificial Sequence
  Description of Artificial Sequence: Synthetic oligonucleotide
acaucgguaaugcucaucg

SEQ ID NO: 997955 - RNA, 19 nt, Artificial Sequence
  Description of Artificial Sequence: Synthetic oligonucleotide
aucgguaaugcucaucgcc

SEQ ID NO: 997956 - RNA, 19 nt, Artificial Sequence
  Description of Artificial Sequence: Synthetic oligonucleotide
aaagccggaagacaucagg

SEQ ID NO: 997957 - RNA, 19 nt, Artificial Sequence
  Description of Artificial Sequence: Synthetic oligonucleotide
aaugcucaucgccaugacc

SEQ ID NO: 997958 - RNA, 19 nt, Artificial Sequence
  Description of Artificial Sequence: Synthetic oligonucleotide
uucucuguuacucucaagu

SEQ ID NO: 997959 - RNA, 19 nt, Artificial Sequence
  Description of Artificial Sequence: Synthetic oligonucleotide
uguggaguaagcauggcca

SEQ ID NO: 997960 - RNA, 19 nt, Artificial Sequence
  Description of Artificial Sequence: Synthetic oligonucleotide
cuaauccucaacuugcagg

SEQ ID NO: 997961 - RNA, 19 nt, Artificial Sequence
  Description of Artificial Sequence: Synthetic oligonucleotide
aaaucuaacauaugagcaa

SEQ ID NO: 997962 - RNA, 19 nt, Artificial Sequence
  Description of Artificial Sequence: Synthetic oligonucleotide
aaucuaacauaugagcaag

SEQ ID NO: 997963 - RNA, 19 nt, Artificial Sequence
  Description of Artificial Sequence: Synthetic oligonucleotide
ugcgcaugcagaaaagccg

SEQ ID NO: 997964 - RNA, 19 nt, Artificial Sequence
  Description of Artificial Sequence: Synthetic oligonucleotide
uuuuacauaggcucgugca

SEQ ID NO: 997965 - RNA, 19 nt, Artificial Sequence
  Description of Artificial Sequence: Synthetic oligonucleotide
ugugcauggucguacacgg

SEQ ID NO: 997966 - RNA, 19 nt, Artificial Sequence
  Description of Artificial Sequence: Synthetic oligonucleotide
ugcuuagcuuccaacaagg

SEQ ID NO: 997967 - RNA, 19 nt, Artificial Sequence
  Description of Artificial Sequence: Synthetic oligonucleotide
cauaugagcaagcauggcc

SEQ ID NO: 997968 - RNA, 19 nt, Artificial Sequence
  Description of Artificial Sequence: Synthetic oligonucleotide
aacauaugagcaagcaugg

SEQ ID NO: 997969 - RNA, 19 nt, Artificial Sequence
  Description of Artificial Sequence: Synthetic oligonucleotide
uuauuggcuaaacagccac

SEQ ID NO: 997970 - RNA, 19 nt, Artificial Sequence
  Description of Artificial Sequence: Synthetic oligonucleotide
acaauuggcaacuuuaaua

SEQ ID NO: 997971 - RNA, 19 nt, Artificial Sequence
  Description of Artificial Sequence: Synthetic oligonucleotide
cauccaaacaccuugguca

SEQ ID NO: 997972 - RNA, 19 nt, Artificial Sequence
  Description of Artificial Sequence: Synthetic oligonucleotide
uucgagacugcucuaagcu

SEQ ID NO: 997973 - RNA, 19 nt, Artificial Sequence
  Description of Artificial Sequence: Synthetic oligonucleotide
cugggaaccacauugauga

SEQ ID NO: 997974 - RNA, 19 nt, Artificial Sequence
  Description of Artificial Sequence: Synthetic oligonucleotide
uggccaugagcaaugaugc

SEQ ID NO: 997975 - RNA, 19 nt, Artificial Sequence
  Description of Artificial Sequence: Synthetic oligonucleotide
gauccuucggauaauauca

SEQ ID NO: 997976 - RNA, 19 nt, Artificial Sequence
  Description of Artificial Sequence: Synthetic oligonucleotide
guaagcauggccaugagca

SEQ ID NO: 997977 - RNA, 19 nt, Artificial Sequence
  Description of Artificial Sequence: Synthetic oligonucleotide
ugccuaauccucaacuugc

SEQ ID NO: 997978 - RNA, 19 nt, Artificial Sequence
  Description of Artificial Sequence: Synthetic oligonucleotide
uguauucaauggcugaccu

SEQ ID NO: 997979 - RNA, 19 nt, Artificial Sequence
  Description of Artificial Sequence: Synthetic oligonucleotide
uccaacaagguacugucac

SEQ ID NO: 997980 - RNA, 19 nt, Artificial Sequence
  Description of Artificial Sequence: Synthetic oligonucleotide
ucggauaauaucaaaucua

SEQ ID NO: 997981 - RNA, 19 nt, Artificial Sequence
  Description of Artificial Sequence: Synthetic oligonucleotide
cuuaacauugaugccgugg

SEQ ID NO: 997982 - RNA, 19 nt, Artificial Sequence
  Description of Artificial Sequence: Synthetic oligonucleotide
cacaaaugaggucagcccc

SEQ ID NO: 997983 - RNA, 19 nt, Artificial Sequence
  Description of Artificial Sequence: Synthetic oligonucleotide
cucaaguacaccguuggcg

SEQ ID NO: 997984 - RNA, 19 nt, Artificial Sequence
  Description of Artificial Sequence: Synthetic oligonucleotide
ucuaacauaugagcaagca

SEQ ID NO: 997985 - RNA, 19 nt, Artificial Sequence
  Description of Artificial Sequence: Synthetic oligonucleotide
uggcuaaacagccacaauu

SEQ ID NO: 997986 - RNA, 19 nt, Artificial Sequence
  Description of Artificial Sequence: Synthetic oligonucleotide
aucgccaugaccacauugc

SEQ ID NO: 997987 - RNA, 19 nt, Artificial Sequence
  Description of Artificial Sequence: Synthetic oligonucleotide
uggcaccaaacacaguggg

SEQ ID NO: 997988 - RNA, 19 nt, Artificial Sequence
  Description of Artificial Sequence: Synthetic oligonucleotide
ucgguaaugcucaucgcca

SEQ ID NO: 997989 - RNA, 19 nt, Artificial Sequence
  Description of Artificial Sequence: Synthetic oligonucleotide
ucuacaggugcacugggaa

SEQ ID NO: 997990 - RNA, 19 nt, Artificial Sequence
  Description of Artificial Sequence: Synthetic oligonucleotide
uuuacauaggcucgugcau

SEQ ID NO: 997991 - RNA, 19 nt, Artificial Sequence
  Description of Artificial Sequence: Synthetic oligonucleotide
aaggugugcauggucguac

SEQ ID NO: 997992 - RNA, 19 nt, Artificial Sequence
  Description of Artificial Sequence: Synthetic oligonucleotide
gagaaaucccaacagucuc

SEQ ID NO: 997993 - RNA, 19 nt, Artificial Sequence
  Description of Artificial Sequence: Synthetic oligonucleotide
acagcuauaccaggagacc

SEQ ID NO: 997994 - RNA, 19 nt, Artificial Sequence
  Description of Artificial Sequence: Synthetic oligonucleotide
ugcucaacguaggagauga

SEQ ID NO: 997995 - RNA, 19 nt, Artificial Sequence
  Description of Artificial Sequence: Synthetic oligonucleotide
cacagcuauaccaggagac

SEQ ID NO: 997996 - RNA, 19 nt, Artificial Sequence
  Description of Artificial Sequence: Synthetic oligonucleotide
cugaccuauagcuggugcg

SEQ ID NO: 997997 - RNA, 19 nt, Artificial Sequence
  Description of Artificial Sequence: Synthetic oligonucleotide
uggcgguagaaccuucagg

SEQ ID NO: 997998 - RNA, 19 nt, Artificial Sequence
  Description of Artificial Sequence: Synthetic oligonucleotide
ugcauccuccacaaaugag

SEQ ID NO: 997999 - RNA, 19 nt, Artificial Sequence
  Description of Artificial Sequence: Synthetic oligonucleotide
auggccaugagcaaugaug

SEQ ID NO: 998000 - RNA, 19 nt, Artificial Sequence
  Description of Artificial Sequence: Synthetic oligonucleotide
cuuaccagagucagcuggc

SEQ ID NO: 998001 - RNA, 19 nt, Artificial Sequence
  Description of Artificial Sequence: Synthetic oligonucleotide
agcaguucccauguggagg

SEQ ID NO: 998002 - RNA, 19 nt, Artificial Sequence
  Description of Artificial Sequence: Synthetic oligonucleotide
uguccuuaacauugaugcc

SEQ ID NO: 998003 - RNA, 19 nt, Artificial Sequence
  Description of Artificial Sequence: Synthetic oligonucleotide
ugacacguucaucucauua

SEQ ID NO: 998004 - RNA, 19 nt, Artificial Sequence
  Description of Artificial Sequence: Synthetic oligonucleotide
gcuuaccagagucagcugg

SEQ ID NO: 998005 - RNA, 19 nt, Artificial Sequence
  Description of Artificial Sequence: Synthetic oligonucleotide
uuacucucaaguacaccgu

SEQ ID NO: 998006 - RNA, 19 nt, Artificial Sequence
  Description of Artificial Sequence: Synthetic oligonucleotide
ggaccuucagccugaagcg

SEQ ID NO: 998007 - RNA, 19 nt, Artificial Sequence
  Description of Artificial Sequence: Synthetic oligonucleotide
agcgcacgaguucaucuac

SEQ ID NO: 998008 - RNA, 19 nt, Artificial Sequence
  Description of Artificial Sequence: Synthetic oligonucleotide
cuucgagacugcucuaagc

SEQ ID NO: 998009 - RNA, 19 nt, Artificial Sequence
  Description of Artificial Sequence: Synthetic oligonucleotide
uggcaugccgcuuaccaga

SEQ ID NO: 998010 - RNA, 19 nt, Artificial Sequence
  Description of Artificial Sequence: Synthetic oligonucleotide
uauuggcuaaacagccaca

SEQ ID NO: 998011 - RNA, 19 nt, Artificial Sequence
  Description of Artificial Sequence: Synthetic oligonucleotide
gguuguacugccucugucc

SEQ ID NO: 998012 - RNA, 19 nt, Artificial Sequence
  Description of Artificial Sequence: Synthetic oligonucleotide
ugcagaguugcugugccgc

SEQ ID NO: 998013 - RNA, 19 nt, Artificial Sequence
  Description of Artificial Sequence: Synthetic oligonucleotide
acacggucgguccacagcu

SEQ ID NO: 998014 - RNA, 19 nt, Artificial Sequence
  Description of Artificial Sequence: Synthetic oligonucleotide
caccguuggcgguagaacc

SEQ ID NO: 998015 - RNA, 19 nt, Artificial Sequence
  Description of Artificial Sequence: Synthetic oligonucleotide
uugcagaucgaaguagaca

SEQ ID NO: 998016 - RNA, 19 nt, Artificial Sequence
  Description of Artificial Sequence: Synthetic oligonucleotide
acucaaugugccaaccggg

SEQ ID NO: 998017 - RNA, 19 nt, Artificial Sequence
  Description of Artificial Sequence: Synthetic oligonucleotide
ucucaaguacaccguuggc

SEQ ID NO: 998018 - RNA, 19 nt, Artificial Sequence
  Description of Artificial Sequence: Synthetic oligonucleotide
aucuaacauaugagcaagc

SEQ ID NO: 998019 - RNA, 19 nt, Artificial Sequence
  Description of Artificial Sequence: Synthetic oligonucleotide
aaccgggccguccgucucc

SEQ ID NO: 998020 - RNA, 19 nt, Artificial Sequence
  Description of Artificial Sequence: Synthetic oligonucleotide
acauaugagcaagcauggc

SEQ ID NO: 998021 - RNA, 19 nt, Artificial Sequence
  Description of Artificial Sequence: Synthetic oligonucleotide
agaacaggugucauggugu

SEQ ID NO: 998022 - RNA, 19 nt, Artificial Sequence
  Description of Artificial Sequence: Synthetic oligonucleotide
caauuggcaacuuuaauau

SEQ ID NO: 998023 - RNA, 19 nt, Artificial Sequence
  Description of Artificial Sequence: Synthetic oligonucleotide
gugcuuagcuuccaacaag

SEQ ID NO: 998024 - RNA, 19 nt, Artificial Sequence
  Description of Artificial Sequence: Synthetic oligonucleotide
cagcuauaccaggagaccg

SEQ ID NO: 998025 - RNA, 19 nt, Artificial Sequence
  Description of Artificial Sequence: Synthetic oligonucleotide
uuggcgguagaaccuucag

SEQ ID NO: 998026 - RNA, 19 nt, Artificial Sequence
  Description of Artificial Sequence: Synthetic oligonucleotide
cacguggaaccacagcugc

SEQ ID NO: 998027 - RNA, 19 nt, Artificial Sequence
  Description of Artificial Sequence: Synthetic oligonucleotide
agaucgaaguagacacugc

SEQ ID NO: 998028 - RNA, 19 nt, Artificial Sequence
  Description of Artificial Sequence: Synthetic oligonucleotide
uguugcuguggaguaagca

SEQ ID NO: 998029 - RNA, 19 nt, Artificial Sequence
  Description of Artificial Sequence: Synthetic oligonucleotide
cagaucgaaguagacacug

SEQ ID NO: 998030 - RNA, 19 nt, Artificial Sequence
  Description of Artificial Sequence: Synthetic oligonucleotide
cuugcagaucgaaguagac

SEQ ID NO: 998031 - RNA, 19 nt, Artificial Sequence
  Description of Artificial Sequence: Synthetic oligonucleotide
uuacauaggcucgugcauc

SEQ ID NO: 998032 - RNA, 19 nt, Artificial Sequence
  Description of Artificial Sequence: Synthetic oligonucleotide
gguagaaccuucagggccg

SEQ ID NO: 998033 - RNA, 19 nt, Artificial Sequence
  Description of Artificial Sequence: Synthetic oligonucleotide
cuauuucguuuucaugaug

SEQ ID NO: 998034 - RNA, 19 nt, Artificial Sequence
  Description of Artificial Sequence: Synthetic oligonucleotide
uccgggucuccccaguagc

SEQ ID NO: 998035 - RNA, 19 nt, Artificial Sequence
  Description of Artificial Sequence: Synthetic oligonucleotide
ugucgauuugccagagaaa

SEQ ID NO: 998036 - RNA, 19 nt, Artificial Sequence
  Description of Artificial Sequence: Synthetic oligonucleotide
agucauuggcuagcgcagc

SEQ ID NO: 998037 - RNA, 19 nt, Artificial Sequence
  Description of Artificial Sequence: Synthetic oligonucleotide
agguuuggccgccuuccac

SEQ ID NO: 998038 - RNA, 19 nt, Artificial Sequence
  Description of Artificial Sequence: Synthetic oligonucleotide
cugucgauuugccagagaa

SEQ ID NO: 998039 - RNA, 19 nt, Artificial Sequence
  Description of Artificial Sequence: Synthetic oligonucleotide
ucuaagcucucuguuccca

SEQ ID NO: 998040 - RNA, 19 nt, Artificial Sequence
  Description of Artificial Sequence: Synthetic oligonucleotide
cauacuggcggaccuucag

SEQ ID NO: 998041 - RNA, 19 nt, Artificial Sequence
  Description of Artificial Sequence: Synthetic oligonucleotide
gcuagcgcagcccucacag

SEQ ID NO: 998042 - RNA, 19 nt, Artificial Sequence
  Description of Artificial Sequence: Synthetic oligonucleotide
ggcuaaacagccacaauug

SEQ ID NO: 998043 - RNA, 19 nt, Artificial Sequence
  Description of Artificial Sequence: Synthetic oligonucleotide
augaugccuucaaugaaag

SEQ ID NO: 998044 - RNA, 19 nt, Artificial Sequence
  Description of Artificial Sequence: Synthetic oligonucleotide
ucgauuugccagagaaauc

SEQ ID NO: 998045 - RNA, 19 nt, Artificial Sequence
  Description of Artificial Sequence: Synthetic oligonucleotide
cagcugcccuuuuacauag

SEQ ID NO: 998046 - RNA, 19 nt, Artificial Sequence
  Description of Artificial Sequence: Synthetic oligonucleotide
ugaugccuucaaugaaagc

SEQ ID NO: 998047 - RNA, 19 nt, Artificial Sequence
  Description of Artificial Sequence: Synthetic oligonucleotide
ucguuuucaugauguggga

SEQ ID NO: 998048 - RNA, 19 nt, Artificial Sequence
  Description of Artificial Sequence: Synthetic oligonucleotide
uccgucuccccauggggag

SEQ ID NO: 998049 - RNA, 19 nt, Artificial Sequence
  Description of Artificial Sequence: Synthetic oligonucleotide
gaggugcuuagcuuccaac

SEQ ID NO: 998050 - RNA, 19 nt, Artificial Sequence
  Description of Artificial Sequence: Synthetic oligonucleotide
acaagguacugucacugua

SEQ ID NO: 998051 - RNA, 19 nt, Artificial Sequence
  Description of Artificial Sequence: Synthetic oligonucleotide
ucgagacugcucuaagcuc

SEQ ID NO: 998052 - RNA, 19 nt, Artificial Sequence
  Description of Artificial Sequence: Synthetic oligonucleotide
acaccguuggcgguagaac

SEQ ID NO: 998053 - RNA, 19 nt, Artificial Sequence
  Description of Artificial Sequence: Synthetic oligonucleotide
acugggaaccacauugaug

SEQ ID NO: 998054 - RNA, 19 nt, Artificial Sequence
  Description of Artificial Sequence: Synthetic oligonucleotide
cuacaggugcacugggaac

SEQ ID NO: 998055 - RNA, 19 nt, Artificial Sequence
  Description of Artificial Sequence: Synthetic oligonucleotide
caucgccaugaccacauug

SEQ ID NO: 998056 - RNA, 19 nt, Artificial Sequence
  Description of Artificial Sequence: Synthetic oligonucleotide
agguccagaacaccuccug

SEQ ID NO: 998057 - RNA, 19 nt, Artificial Sequence
  Description of Artificial Sequence: Synthetic oligonucleotide
uccgugcgggccacgauca

SEQ ID NO: 998058 - RNA, 19 nt, Artificial Sequence
  Description of Artificial Sequence: Synthetic oligonucleotide
cauggucguacacggucgg

SEQ ID NO: 998059 - RNA, 19 nt, Artificial Sequence
  Description of Artificial Sequence: Synthetic oligonucleotide
gugcgcaugcagaaaagcc

SEQ ID NO: 998060 - RNA, 19 nt, Artificial Sequence
  Description of Artificial Sequence: Synthetic oligonucleotide
uacucucaaguacaccguu

SEQ ID NO: 998061 - RNA, 19 nt, Artificial Sequence
  Description of Artificial Sequence: Synthetic oligonucleotide
aagcgcacgaguucaucua

SEQ ID NO: 998062 - RNA, 19 nt, Artificial Sequence
  Description of Artificial Sequence: Synthetic oligonucleotide
gucauuggcuagcgcagcc

SEQ ID NO: 998063 - RNA, 19 nt, Artificial Sequence
  Description of Artificial Sequence: Synthetic oligonucleotide
ggcgugucaaagucauugg

SEQ ID NO: 998064 - RNA, 19 nt, Artificial Sequence
  Description of Artificial Sequence: Synthetic oligonucleotide
gcaugucgagggcagaucc

SEQ ID NO: 998065 - RNA, 19 nt, Artificial Sequence
  Description of Artificial Sequence: Synthetic oligonucleotide
ugaucugcgggauguucuc

SEQ ID NO: 998066 - RNA, 19 nt, Artificial Sequence
  Description of Artificial Sequence: Synthetic oligonucleotide
ucauuggcuagcgcagccc

SEQ ID NO: 998067 - RNA, 19 nt, Artificial Sequence
  Description of Artificial Sequence: Synthetic oligonucleotide
guuuggccgccuuccacag

SEQ ID NO: 998068 - RNA, 19 nt, Artificial Sequence
  Description of Artificial Sequence: Synthetic oligonucleotide
gaagcgcacgaguucaucu

SEQ ID NO: 998069 - RNA, 19 nt, Artificial Sequence
  Description of Artificial Sequence: Synthetic oligonucleotide
cacuguauucaauggcuga

SEQ ID NO: 998070 - RNA, 19 nt, Artificial Sequence
  Description of Artificial Sequence: Synthetic oligonucleotide
uuggcuagcgcagcccuca

SEQ ID NO: 998071 - RNA, 19 nt, Artificial Sequence
  Description of Artificial Sequence: Synthetic oligonucleotide
acacugguggaagacuuca

SEQ ID NO: 998072 - RNA, 19 nt, Artificial Sequence
  Description of Artificial Sequence: Synthetic oligonucleotide
agaaccuucagggccgcca

SEQ ID NO: 998073 - RNA, 19 nt, Artificial Sequence
  Description of Artificial Sequence: Synthetic oligonucleotide
acuuguccccucgagcuug

SEQ ID NO: 998074 - RNA, 19 nt, Artificial Sequence
  Description of Artificial Sequence: Synthetic oligonucleotide
gucgauuugccagagaaau

SEQ ID NO: 998075 - RNA, 19 nt, Artificial Sequence
  Description of Artificial Sequence: Synthetic oligonucleotide
guccccucgagcuugcaga

SEQ ID NO: 998076 - RNA, 19 nt, Artificial Sequence
  Description of Artificial Sequence: Synthetic oligonucleotide
caucgguaaugcucaucgc

SEQ ID NO: 998077 - RNA, 19 nt, Artificial Sequence
  Description of Artificial Sequence: Synthetic oligonucleotide
gcuuccaaacaccucgcug

SEQ ID NO: 998078 - RNA, 19 nt, Artificial Sequence
  Description of Artificial Sequence: Synthetic oligonucleotide
cuggcggaccuucagccug

SEQ ID NO: 998079 - RNA, 19 nt, Artificial Sequence
  Description of Artificial Sequence: Synthetic oligonucleotide
aggugucauggugugguag

SEQ ID NO: 998080 - RNA, 19 nt, Artificial Sequence
  Description of Artificial Sequence: Synthetic oligonucleotide
ucugcgggauguucucugu

SEQ ID NO: 998081 - RNA, 19 nt, Artificial Sequence
  Description of Artificial Sequence: Synthetic oligonucleotide
aguucccauguggagguug

SEQ ID NO: 998082 - RNA, 19 nt, Artificial Sequence
  Description of Artificial Sequence: Synthetic oligonucleotide
gaaaucccaacagucucaa

SEQ ID NO: 998083 - RNA, 19 nt, Artificial Sequence
  Description of Artificial Sequence: Synthetic oligonucleotide
ugggaaccacauugaugag

SEQ ID NO: 998084 - RNA, 19 nt, Artificial Sequence
  Description of Artificial Sequence: Synthetic oligonucleotide
gugccaaccgggccguccg

SEQ ID NO: 998085 - RNA, 19 nt, Artificial Sequence
  Description of Artificial Sequence: Synthetic oligonucleotide
ggucguacacggucggucc

SEQ ID NO: 998086 - RNA, 19 nt, Artificial Sequence
  Description of Artificial Sequence: Synthetic oligonucleotide
aaugcaucacaugccucua

SEQ ID NO: 998087 - RNA, 19 nt, Artificial Sequence
  Description of Artificial Sequence: Synthetic oligonucleotide
gcacucaaugugccaaccg

SEQ ID NO: 998088 - RNA, 19 nt, Artificial Sequence
  Description of Artificial Sequence: Synthetic oligonucleotide
aggagaccgcguccgugcg

SEQ ID NO: 998089 - RNA, 19 nt, Artificial Sequence
  Description of Artificial Sequence: Synthetic oligonucleotide
ggauaauaucaaaucuaac

SEQ ID NO: 998090 - RNA, 19 nt, Artificial Sequence
  Description of Artificial Sequence: Synthetic oligonucleotide
acucucaaguacaccguug

SEQ ID NO: 998091 - RNA, 19 nt, Artificial Sequence
  Description of Artificial Sequence: Synthetic oligonucleotide
ugugccaaccgggccgucc

SEQ ID NO: 998092 - RNA, 19 nt, Artificial Sequence
  Description of Artificial Sequence: Synthetic oligonucleotide
gcuauaccaggagaccgcg

SEQ ID NO: 998093 - RNA, 19 nt, Artificial Sequence
  Description of Artificial Sequence: Synthetic oligonucleotide
aguacaccguuggcgguag

SEQ ID NO: 998094 - RNA, 19 nt, Artificial Sequence
  Description of Artificial Sequence: Synthetic oligonucleotide
uacaccguuggcgguagaa

SEQ ID NO: 998095 - RNA, 19 nt, Artificial Sequence
  Description of Artificial Sequence: Synthetic oligonucleotide
aaguacaccguuggcggua

SEQ ID NO: 998096 - RNA, 19 nt, Artificial Sequence
  Description of Artificial Sequence: Synthetic oligonucleotide
acguggaaccacagcugcc

SEQ ID NO: 998097 - RNA, 19 nt, Artificial Sequence
  Description of Artificial Sequence: Synthetic oligonucleotide
cuaacauaugagcaagcau

SEQ ID NO: 998098 - RNA, 19 nt, Artificial Sequence
  Description of Artificial Sequence: Synthetic oligonucleotide
gcugaccuauagcuggugc

SEQ ID NO: 998099 - RNA, 19 nt, Artificial Sequence
  Description of Artificial Sequence: Synthetic oligonucleotide
gguaaugcucaucgccaug

SEQ ID NO: 998100 - RNA, 19 nt, Artificial Sequence
  Description of Artificial Sequence: Synthetic oligonucleotide
gcgugucaaagucauuggc

SEQ ID NO: 998101 - RNA, 19 nt, Artificial Sequence
  Description of Artificial Sequence: Synthetic oligonucleotide
gguuuggccgccuuccaca

SEQ ID NO: 998102 - RNA, 19 nt, Artificial Sequence
  Description of Artificial Sequence: Synthetic oligonucleotide
uccuucgagacugcucuaa

SEQ ID NO: 998103 - RNA, 19 nt, Artificial Sequence
  Description of Artificial Sequence: Synthetic oligonucleotide
cauugaugccguggguggc

SEQ ID NO: 998104 - RNA, 19 nt, Artificial Sequence
  Description of Artificial Sequence: Synthetic oligonucleotide
ggaaccacauugaugagcu

SEQ ID NO: 998105 - RNA, 19 nt, Artificial Sequence
  Description of Artificial Sequence: Synthetic oligonucleotide
ccgcccuagacccagcgcg

SEQ ID NO: 998106 - RNA, 19 nt, Artificial Sequence
  Description of Artificial Sequence: Synthetic oligonucleotide
gcauccaaacaccuugguc

SEQ ID NO: 998107 - RNA, 19 nt, Artificial Sequence
  Description of Artificial Sequence: Synthetic oligonucleotide
cuguguggauguccaguug

SEQ ID NO: 998108 - RNA, 19 nt, Artificial Sequence
  Description of Artificial Sequence: Synthetic oligonucleotide
gcauggucguacacggucg

SEQ ID NO: 998109 - RNA, 19 nt, Artificial Sequence
  Description of Artificial Sequence: Synthetic oligonucleotide
aggugugcauggucguaca

SEQ ID NO: 998110 - RNA, 19 nt, Artificial Sequence
  Description of Artificial Sequence: Synthetic oligonucleotide
guagcacguggaaccacag

SEQ ID NO: 998111 - RNA, 19 nt, Artificial Sequence
  Description of Artificial Sequence: Synthetic oligonucleotide
gaucagcggcuccuuccug

SEQ ID NO: 998112 - RNA, 19 nt, Artificial Sequence
  Description of Artificial Sequence: Synthetic oligonucleotide
augagcaagcauggccaag

SEQ ID NO: 998113 - RNA, 19 nt, Artificial Sequence
  Description of Artificial Sequence: Synthetic oligonucleotide
cauccuccacaaaugaggu

SEQ ID NO: 998114 - RNA, 19 nt, Artificial Sequence
  Description of Artificial Sequence: Synthetic oligonucleotide
cuagcgcagcccucacagc

SEQ ID NO: 998115 - RNA, 19 nt, Artificial Sequence
  Description of Artificial Sequence: Synthetic oligonucleotide
ggugcgcaugcagaaaagc

SEQ ID NO: 998116 - RNA, 19 nt, Artificial Sequence
  Description of Artificial Sequence: Synthetic oligonucleotide
guacacggucgguccacag

SEQ ID NO: 998117 - RNA, 19 nt, Artificial Sequence
  Description of Artificial Sequence: Synthetic oligonucleotide
cuggugcgcaugcagaaaa

SEQ ID NO: 998118 - RNA, 19 nt, Artificial Sequence
  Description of Artificial Sequence: Synthetic oligonucleotide
ugaagcgcacgaguucauc

SEQ ID NO: 998119 - RNA, 19 nt, Artificial Sequence
  Description of Artificial Sequence: Synthetic oligonucleotide
guauucaauggcugaccua

SEQ ID NO: 998120 - RNA, 19 nt, Artificial Sequence
  Description of Artificial Sequence: Synthetic oligonucleotide
ccuaauccucaacuugcag

SEQ ID NO: 998121 - RNA, 19 nt, Artificial Sequence
  Description of Artificial Sequence: Synthetic oligonucleotide
cuuguccccucgagcuugc

SEQ ID NO: 998122 - RNA, 19 nt, Artificial Sequence
  Description of Artificial Sequence: Synthetic oligonucleotide
uacuuguccccucgagcuu

SEQ ID NO: 998123 - RNA, 19 nt, Artificial Sequence
  Description of Artificial Sequence: Synthetic oligonucleotide
uagcaugucgagggcagau

SEQ ID NO: 998124 - RNA, 19 nt, Artificial Sequence
  Description of Artificial Sequence: Synthetic oligonucleotide
acggucgguccacagcuau

SEQ ID NO: 998125 - RNA, 19 nt, Artificial Sequence
  Description of Artificial Sequence: Synthetic oligonucleotide
cuagacccagcgcgucccg

SEQ ID NO: 998126 - RNA, 19 nt, Artificial Sequence
  Description of Artificial Sequence: Synthetic oligonucleotide
accuauagcuggugcgcau

SEQ ID NO: 998127 - RNA, 19 nt, Artificial Sequence
  Description of Artificial Sequence: Synthetic oligonucleotide
ccaugaccacauugcaucc

SEQ ID NO: 998128 - RNA, 19 nt, Artificial Sequence
  Description of Artificial Sequence: Synthetic oligonucleotide
ggucgguccacagcuauac

SEQ ID NO: 998129 - RNA, 19 nt, Artificial Sequence
  Description of Artificial Sequence: Synthetic oligonucleotide
agacccagcgcgucccgga

SEQ ID NO: 998130 - RNA, 19 nt, Artificial Sequence
  Description of Artificial Sequence: Synthetic oligonucleotide
uguucccauggugcacaag

SEQ ID NO: 998131 - RNA, 19 nt, Artificial Sequence
  Description of Artificial Sequence: Synthetic oligonucleotide
acugcucaacguaggagau

SEQ ID NO: 998132 - RNA, 19 nt, Artificial Sequence
  Description of Artificial Sequence: Synthetic oligonucleotide
auuggcuagcgcagcccuc

SEQ ID NO: 998133 - RNA, 19 nt, Artificial Sequence
  Description of Artificial Sequence: Synthetic oligonucleotide
cucuacaggugcacuggga

SEQ ID NO: 998134 - RNA, 19 nt, Artificial Sequence
  Description of Artificial Sequence: Synthetic oligonucleotide
accugcacgccaguguccu

SEQ ID NO: 998135 - RNA, 19 nt, Artificial Sequence
  Description of Artificial Sequence: Synthetic oligonucleotide
caugucgagggcagaucca

SEQ ID NO: 998136 - RNA, 19 nt, Artificial Sequence
  Description of Artificial Sequence: Synthetic oligonucleotide
gcaaaugcccagaguguag

SEQ ID NO: 998137 - RNA, 19 nt, Artificial Sequence
  Description of Artificial Sequence: Synthetic oligonucleotide
gaccuauagcuggugcgca

SEQ ID NO: 998138 - RNA, 19 nt, Artificial Sequence
  Description of Artificial Sequence: Synthetic oligonucleotide
cggauaauaucaaaucuaa

SEQ ID NO: 998139 - RNA, 19 nt, Artificial Sequence
  Description of Artificial Sequence: Synthetic oligonucleotide
gucgguccacagcuauacc

SEQ ID NO: 998140 - RNA, 19 nt, Artificial Sequence
  Description of Artificial Sequence: Synthetic oligonucleotide
caccugcacgccagugucc

SEQ ID NO: 998141 - RNA, 19 nt, Artificial Sequence
  Description of Artificial Sequence: Synthetic oligonucleotide
ucagggccgccaugucuug

SEQ ID NO: 998142 - RNA, 19 nt, Artificial Sequence
  Description of Artificial Sequence: Synthetic oligonucleotide
ccauacuuguccccucgag

SEQ ID NO: 998143 - RNA, 19 nt, Artificial Sequence
  Description of Artificial Sequence: Synthetic oligonucleotide
guuggcuuccaaacaccuc

SEQ ID NO: 998144 - RNA, 19 nt, Artificial Sequence
  Description of Artificial Sequence: Synthetic oligonucleotide
gguccagaacaccuccuga

SEQ ID NO: 998145 - RNA, 19 nt, Artificial Sequence
  Description of Artificial Sequence: Synthetic oligonucleotide
gagguuuggccgccuucca

SEQ ID NO: 998146 - RNA, 19 nt, Artificial Sequence
  Description of Artificial Sequence: Synthetic oligonucleotide
guggauguccaguuggcuu

SEQ ID NO: 998147 - RNA, 19 nt, Artificial Sequence
  Description of Artificial Sequence: Synthetic oligonucleotide
ucuccgggucuccccagua

SEQ ID NO: 998148 - RNA, 19 nt, Artificial Sequence
  Description of Artificial Sequence: Synthetic oligonucleotide
ugccggugaggcuguugug

SEQ ID NO: 998149 - RNA, 19 nt, Artificial Sequence
  Description of Artificial Sequence: Synthetic oligonucleotide
cacguucaucucauuagcu

SEQ ID NO: 998150 - RNA, 19 nt, Artificial Sequence
  Description of Artificial Sequence: Synthetic oligonucleotide
ucaggauccuucggauaau

SEQ ID NO: 998151 - RNA, 19 nt, Artificial Sequence
  Description of Artificial Sequence: Synthetic oligonucleotide
gguagcacguggaaccaca

SEQ ID NO: 998152 - RNA, 19 nt, Artificial Sequence
  Description of Artificial Sequence: Synthetic oligonucleotide
guuggcgguagaaccuuca

SEQ ID NO: 998153 - RNA, 19 nt, Artificial Sequence
  Description of Artificial Sequence: Synthetic oligonucleotide
cacaucgguaaugcucauc

SEQ ID NO: 998154 - RNA, 19 nt, Artificial Sequence
  Description of Artificial Sequence: Synthetic oligonucleotide
uuuuagggauuuggacauu

SEQ ID NO: 998155 - RNA, 19 nt, Artificial Sequence
  Description of Artificial Sequence: Synthetic oligonucleotide
gccggugaggcuguugugc

SEQ ID NO: 998156 - RNA, 19 nt, Artificial Sequence
  Description of Artificial Sequence: Synthetic oligonucleotide
ugguagcacguggaaccac

SEQ ID NO: 998157 - RNA, 19 nt, Artificial Sequence
  Description of Artificial Sequence: Synthetic oligonucleotide
cucaucgccaugaccacau

SEQ ID NO: 998158 - RNA, 19 nt, Artificial Sequence
  Description of Artificial Sequence: Synthetic oligonucleotide
cugcucaacguaggagaug

SEQ ID NO: 998159 - RNA, 19 nt, Artificial Sequence
  Description of Artificial Sequence: Synthetic oligonucleotide
gucgcuggcaugccgcuua

SEQ ID NO: 998160 - RNA, 19 nt, Artificial Sequence
  Description of Artificial Sequence: Synthetic oligonucleotide
gcuugcagaucgaaguaga

SEQ ID NO: 998161 - RNA, 19 nt, Artificial Sequence
  Description of Artificial Sequence: Synthetic oligonucleotide
auccuucggauaauaucaa

SEQ ID NO: 998162 - RNA, 19 nt, Artificial Sequence
  Description of Artificial Sequence: Synthetic oligonucleotide
ccuucgagacugcucuaag

SEQ ID NO: 998163 - RNA, 19 nt, Artificial Sequence
  Description of Artificial Sequence: Synthetic oligonucleotide
agaccgcguccgugcgggc

SEQ ID NO: 998164 - RNA, 19 nt, Artificial Sequence
  Description of Artificial Sequence: Synthetic oligonucleotide
cccaguagccccaggugug

SEQ ID NO: 998165 - RNA, 19 nt, Artificial Sequence
  Description of Artificial Sequence: Synthetic oligonucleotide
ccuucggauaauaucaaau

SEQ ID NO: 998166 - RNA, 19 nt, Artificial Sequence
  Description of Artificial Sequence: Synthetic oligonucleotide
cucggcgugucaaagucau

SEQ ID NO: 998167 - RNA, 19 nt, Artificial Sequence
  Description of Artificial Sequence: Synthetic oligonucleotide
cauuggcuagcgcagcccu

SEQ ID NO: 998168 - RNA, 19 nt, Artificial Sequence
  Description of Artificial Sequence: Synthetic oligonucleotide
acaagucagcugcccuuuu

SEQ ID NO: 998169 - RNA, 19 nt, Artificial Sequence
  Description of Artificial Sequence: Synthetic oligonucleotide
gccaugagcaaugaugccu

SEQ ID NO: 998170 - RNA, 19 nt, Artificial Sequence
  Description of Artificial Sequence: Synthetic oligonucleotide
gaaccuucagggccgccau

SEQ ID NO: 998171 - RNA, 19 nt, Artificial Sequence
  Description of Artificial Sequence: Synthetic oligonucleotide
agccugaagcgcacgaguu

SEQ ID NO: 998172 - RNA, 19 nt, Artificial Sequence
  Description of Artificial Sequence: Synthetic oligonucleotide
cacgccaguguccuggccu

SEQ ID NO: 998173 - RNA, 19 nt, Artificial Sequence
  Description of Artificial Sequence: Synthetic oligonucleotide
gugguagcacguggaacca

SEQ ID NO: 998174 - RNA, 19 nt, Artificial Sequence
  Description of Artificial Sequence: Synthetic oligonucleotide
uccuuggauccagcaguuc

SEQ ID NO: 998175 - RNA, 19 nt, Artificial Sequence
  Description of Artificial Sequence: Synthetic oligonucleotide
ccugaagcgcacgaguuca

SEQ ID NO: 998176 - RNA, 19 nt, Artificial Sequence
  Description of Artificial Sequence: Synthetic oligonucleotide
uggccaaggugugcauggu

SEQ ID NO: 998177 - RNA, 19 nt, Artificial Sequence
  Description of Artificial Sequence: Synthetic oligonucleotide
gcgggccacgaucagcggc

SEQ ID NO: 998178 - RNA, 19 nt, Artificial Sequence
  Description of Artificial Sequence: Synthetic oligonucleotide
augccguggguggcgaggu

SEQ ID NO: 998179 - RNA, 19 nt, Artificial Sequence
  Description of Artificial Sequence: Synthetic oligonucleotide
cccucggcgugucaaaguc

SEQ ID NO: 998180 - RNA, 19 nt, Artificial Sequence
  Description of Artificial Sequence: Synthetic oligonucleotide
ggcaugccgcuuaccagag

SEQ ID NO: 998181 - RNA, 19 nt, Artificial Sequence
  Description of Artificial Sequence: Synthetic oligonucleotide
ccuagacccagcgcguccc

SEQ ID NO: 998182 - RNA, 19 nt, Artificial Sequence
  Description of Artificial Sequence: Synthetic oligonucleotide
uagaaccuucagggccgcc

SEQ ID NO: 998183 - RNA, 19 nt, Artificial Sequence
  Description of Artificial Sequence: Synthetic oligonucleotide
gccagugcauacuggcgga

SEQ ID NO: 998184 - RNA, 19 nt, Artificial Sequence
  Description of Artificial Sequence: Synthetic oligonucleotide
ccgggucuccccaguagcc

SEQ ID NO: 998185 - RNA, 19 nt, Artificial Sequence
  Description of Artificial Sequence: Synthetic oligonucleotide
gccugaagcgcacgaguuc

SEQ ID NO: 998186 - RNA, 19 nt, Artificial Sequence
  Description of Artificial Sequence: Synthetic oligonucleotide
ugccaaccgggccguccgu

SEQ ID NO: 998187 - RNA, 19 nt, Artificial Sequence
  Description of Artificial Sequence: Synthetic oligonucleotide
auggucguacacggucggu

SEQ ID NO: 998188 - RNA, 19 nt, Artificial Sequence
  Description of Artificial Sequence: Synthetic oligonucleotide
guagcaugucgagggcaga

SEQ ID NO: 998189 - RNA, 19 nt, Artificial Sequence
  Description of Artificial Sequence: Synthetic oligonucleotide
caaccgggccguccgucuc

SEQ ID NO: 998190 - RNA, 19 nt, Artificial Sequence
  Description of Artificial Sequence: Synthetic oligonucleotide
gccgccaugucuuguuuaa

SEQ ID NO: 998191 - RNA, 19 nt, Artificial Sequence
  Description of Artificial Sequence: Synthetic oligonucleotide
cagaacaccuccugagguu

SEQ ID NO: 998192 - RNA, 19 nt, Artificial Sequence
  Description of Artificial Sequence: Synthetic oligonucleotide
caaguacaccguuggcggu

SEQ ID NO: 998193 - RNA, 19 nt, Artificial Sequence
  Description of Artificial Sequence: Synthetic oligonucleotide
ucggcgugucaaagucauu

SEQ ID NO: 998194 - RNA, 19 nt, Artificial Sequence
  Description of Artificial Sequence: Synthetic oligonucleotide
gcgcccguagcaugucgag

SEQ ID NO: 998195 - RNA, 19 nt, Artificial Sequence
  Description of Artificial Sequence: Synthetic oligonucleotide
ggaggugcuuagcuuccaa

SEQ ID NO: 998196 - RNA, 19 nt, Artificial Sequence
  Description of Artificial Sequence: Synthetic oligonucleotide
ccguccgucuccccauggg

SEQ ID NO: 998197 - RNA, 19 nt, Artificial Sequence
  Description of Artificial Sequence: Synthetic oligonucleotide
cgagacugcucuaagcucu

SEQ ID NO: 998198 - RNA, 19 nt, Artificial Sequence
  Description of Artificial Sequence: Synthetic oligonucleotide
gccuaauccucaacuugca

SEQ ID NO: 998199 - RNA, 19 nt, Artificial Sequence
  Description of Artificial Sequence: Synthetic oligonucleotide
ccuuaacauugaugccgug

SEQ ID NO: 998200 - RNA, 19 nt, Artificial Sequence
  Description of Artificial Sequence: Synthetic oligonucleotide
gccguccgucuccccaugg

SEQ ID NO: 998201 - RNA, 19 nt, Artificial Sequence
  Description of Artificial Sequence: Synthetic oligonucleotide
cccguagcaugucgagggc

SEQ ID NO: 998202 - RNA, 19 nt, Artificial Sequence
  Description of Artificial Sequence: Synthetic oligonucleotide
gcgcacgaguucaucuacc

SEQ ID NO: 998203 - RNA, 19 nt, Artificial Sequence
  Description of Artificial Sequence: Synthetic oligonucleotide
uucccauguggagguugua

SEQ ID NO: 998204 - RNA, 19 nt, Artificial Sequence
  Description of Artificial Sequence: Synthetic oligonucleotide
gcgcgcccguagcaugucg

SEQ ID NO: 998205 - RNA, 19 nt, Artificial Sequence
  Description of Artificial Sequence: Synthetic oligonucleotide
ggcugaccuauagcuggug

SEQ ID NO: 998206 - RNA, 19 nt, Artificial Sequence
  Description of Artificial Sequence: Synthetic oligonucleotide
cgcacgaguucaucuacca

SEQ ID NO: 998207 - RNA, 19 nt, Artificial Sequence
  Description of Artificial Sequence: Synthetic oligonucleotide
gccgcccuagacccagcgc

SEQ ID NO: 998208 - RNA, 19 nt, Artificial Sequence
  Description of Artificial Sequence: Synthetic oligonucleotide
ggccgccuuccacagggca

SEQ ID NO: 998209 - RNA, 19 nt, Artificial Sequence
  Description of Artificial Sequence: Synthetic oligonucleotide
gacuucacucugugcuauu

SEQ ID NO: 998210 - RNA, 19 nt, Artificial Sequence
  Description of Artificial Sequence: Synthetic oligonucleotide
ccggugaggcuguugugca

SEQ ID NO: 998211 - RNA, 19 nt, Artificial Sequence
  Description of Artificial Sequence: Synthetic oligonucleotide
ccgcuuaccagagucagcu

SEQ ID NO: 998212 - RNA, 19 nt, Artificial Sequence
  Description of Artificial Sequence: Synthetic oligonucleotide
ccaugagcaaugaugccuu

SEQ ID NO: 998213 - RNA, 19 nt, Artificial Sequence
  Description of Artificial Sequence: Synthetic oligonucleotide
ggcuagcgcagcccucaca

SEQ ID NO: 998214 - RNA, 19 nt, Artificial Sequence
  Description of Artificial Sequence: Synthetic oligonucleotide
gcucaucgccaugaccaca

SEQ ID NO: 998215 - RNA, 19 nt, Artificial Sequence
  Description of Artificial Sequence: Synthetic oligonucleotide
ccaggagaccgcguccgug

SEQ ID NO: 998216 - RNA, 19 nt, Artificial Sequence
  Description of Artificial Sequence: Synthetic oligonucleotide
cauggccaugagcaaugau

SEQ ID NO: 998217 - RNA, 19 nt, Artificial Sequence
  Description of Artificial Sequence: Synthetic oligonucleotide
ccucggcgugucaaaguca

SEQ ID NO: 998218 - RNA, 19 nt, Artificial Sequence
  Description of Artificial Sequence: Synthetic oligonucleotide
cugcccucggcgugucaaa

SEQ ID NO: 998219 - RNA, 19 nt, Artificial Sequence
  Description of Artificial Sequence: Synthetic oligonucleotide
cccagaguguaggaaguaa

SEQ ID NO: 998220 - RNA, 19 nt, Artificial Sequence
  Description of Artificial Sequence: Synthetic oligonucleotide
agucgcuggcaugccgcuu

SEQ ID NO: 998221 - RNA, 19 nt, Artificial Sequence
  Description of Artificial Sequence: Synthetic oligonucleotide
guacaccguuggcgguaga

SEQ ID NO: 998222 - RNA, 19 nt, Artificial Sequence
  Description of Artificial Sequence: Synthetic oligonucleotide
gcggaccuucagccugaag

SEQ ID NO: 998223 - RNA, 19 nt, Artificial Sequence
  Description of Artificial Sequence: Synthetic oligonucleotide
gcuuagcuuccaacaaggu

SEQ ID NO: 998224 - RNA, 19 nt, Artificial Sequence
  Description of Artificial Sequence: Synthetic oligonucleotide
gcauacuggcggaccuuca

SEQ ID NO: 998225 - RNA, 19 nt, Artificial Sequence
  Description of Artificial Sequence: Synthetic oligonucleotide
cugaagcgcacgaguucau

SEQ ID NO: 998226 - RNA, 19 nt, Artificial Sequence
  Description of Artificial Sequence: Synthetic oligonucleotide
cacggucgguccacagcua

SEQ ID NO: 998227 - RNA, 19 nt, Artificial Sequence
  Description of Artificial Sequence: Synthetic oligonucleotide
cccgcgcgcccguagcaug

SEQ ID NO: 998228 - RNA, 19 nt, Artificial Sequence
  Description of Artificial Sequence: Synthetic oligonucleotide
ccaaggugugcauggucgu

SEQ ID NO: 998229 - RNA, 19 nt, Artificial Sequence
  Description of Artificial Sequence: Synthetic oligonucleotide
ccguagcaugucgagggca

SEQ ID NO: 998230 - RNA, 19 nt, Artificial Sequence
  Description of Artificial Sequence: Synthetic oligonucleotide
cgcuuaccagagucagcug

SEQ ID NO: 998231 - RNA, 19 nt, Artificial Sequence
  Description of Artificial Sequence: Synthetic oligonucleotide
cguuggcgguagaaccuuc

SEQ ID NO: 998232 - RNA, 19 nt, Artificial Sequence
  Description of Artificial Sequence: Synthetic oligonucleotide
gugacacguucaucucauu

SEQ ID NO: 998233 - RNA, 19 nt, Artificial Sequence
  Description of Artificial Sequence: Synthetic oligonucleotide
cgccaugucuuguuuaaau

SEQ ID NO: 998234 - RNA, 19 nt, Artificial Sequence
  Description of Artificial Sequence: Synthetic oligonucleotide
cgccgcccuagacccagcg

SEQ ID NO: 998235 - RNA, 19 nt, Artificial Sequence
  Description of Artificial Sequence: Synthetic oligonucleotide
cuaugccaccuguguggau

SEQ ID NO: 998236 - RNA, 19 nt, Artificial Sequence
  Description of Artificial Sequence: Synthetic oligonucleotide
cugcgggauguucucuguu

SEQ ID NO: 998237 - RNA, 19 nt, Artificial Sequence
  Description of Artificial Sequence: Synthetic oligonucleotide
ccgcaacagggccacaagu

SEQ ID NO: 998238 - RNA, 19 nt, Artificial Sequence
  Description of Artificial Sequence: Synthetic oligonucleotide
gccaaccgggccguccguc

SEQ ID NO: 998239 - RNA, 19 nt, Artificial Sequence
  Description of Artificial Sequence: Synthetic oligonucleotide
cgcaugcagaaaagccgga

SEQ ID NO: 998240 - RNA, 19 nt, Artificial Sequence
  Description of Artificial Sequence: Synthetic oligonucleotide
cgcgcccguagcaugucga

SEQ ID NO: 998241 - RNA, 19 nt, Artificial Sequence
  Description of Artificial Sequence: Synthetic oligonucleotide
ccggcccaggcccgcgcgc

SEQ ID NO: 998242 - RNA, 19 nt, Artificial Sequence
  Description of Artificial Sequence: Synthetic oligonucleotide
ccaaccgggccguccgucu

SEQ ID NO: 998243 - RNA, 19 nt, Artificial Sequence
  Description of Artificial Sequence: Synthetic oligonucleotide
cgggccguccgucucccca

SEQ ID NO: 998244 - RNA, 19 nt, Artificial Sequence
  Description of Artificial Sequence: Synthetic oligonucleotide
gggccguccgucuccccau

SEQ ID NO: 998245 - RNA, 19 nt, Artificial Sequence
  Description of Artificial Sequence: Synthetic oligonucleotide
cgccaugaccacauugcau

SEQ ID NO: 998246 - RNA, 19 nt, Artificial Sequence
  Description of Artificial Sequence: Synthetic oligonucleotide
gcaugccgcuuaccagagu

SEQ ID NO: 998247 - RNA, 19 nt, Artificial Sequence
  Description of Artificial Sequence: Synthetic oligonucleotide
cagggccgccaugucuugu

SEQ ID NO: 998248 - RNA, 19 nt, Artificial Sequence
  Description of Artificial Sequence: Synthetic oligonucleotide
ccgccaugucuuguuuaaa

SEQ ID NO: 998249 - RNA, 19 nt, Artificial Sequence
  Description of Artificial Sequence: Synthetic oligonucleotide
ggcgagguccuggcgcaau

SEQ ID NO: 998250 - RNA, 19 nt, Artificial Sequence
  Description of Artificial Sequence: Synthetic oligonucleotide
ccgggccguccgucucccc

SEQ ID NO: 998251 - RNA, 19 nt, Artificial Sequence
  Description of Artificial Sequence: Synthetic oligonucleotide
ggcggaccuucagccugaa

SEQ ID NO: 998252 - RNA, 19 nt, Artificial Sequence
  Description of Artificial Sequence: Synthetic oligonucleotide
cggucgguccacagcuaua

SEQ ID NO: 998253 - RNA, 19 nt, Artificial Sequence
  Description of Artificial Sequence: Synthetic oligonucleotide
ccgcgcgcccguagcaugu

SEQ ID NO: 998254 - RNA, 19 nt, Artificial Sequence
  Description of Artificial Sequence: Synthetic oligonucleotide
cgcccuagacccagcgcgu

SEQ ID NO: 998255 - RNA, 19 nt, Artificial Sequence
  Description of Artificial Sequence: Synthetic oligonucleotide
ccguuggcgguagaaccuu

SEQ ID NO: 998256 - RNA, 19 nt, Artificial Sequence
  Description of Artificial Sequence: Synthetic oligonucleotide
ccgcguccgugcgggccac

SEQ ID NO: 998257 - RNA, 19 nt, Artificial Sequence
  Description of Artificial Sequence: Synthetic oligonucleotide
cgcguccgugcgggccacg

SEQ ID NO: 998258 - RNA, 19 nt, Artificial Sequence
  Description of Artificial Sequence: Synthetic oligonucleotide
gcccgcgcgcccguagcau

SEQ ID NO: 998259 - RNA, 19 nt, Artificial Sequence
  Description of Artificial Sequence: Synthetic oligonucleotide
cguccgugcgggccacgau

SEQ ID NO: 998260 - RNA, 19 nt, Artificial Sequence
  Description of Artificial Sequence: Synthetic oligonucleotide
auuucuaugagccagagcu

SEQ ID NO: 998261 - RNA, 19 nt, Artificial Sequence
  Description of Artificial Sequence: Synthetic oligonucleotide
uguagcauuaaccaugugg

SEQ ID NO: 998262 - RNA, 19 nt, Artificial Sequence
  Description of Artificial Sequence: Synthetic oligonucleotide
cuauucaagaaguaaaugg

SEQ ID NO: 998263 - RNA, 19 nt, Artificial Sequence
  Description of Artificial Sequence: Synthetic oligonucleotide
uagauauugaacuaggggc

SEQ ID NO: 998264 - RNA, 19 nt, Artificial Sequence
  Description of Artificial Sequence: Synthetic oligonucleotide
aauuucaauggguauuaac

SEQ ID NO: 998265 - RNA, 19 nt, Artificial Sequence
  Description of Artificial Sequence: Synthetic oligonucleotide
aacuucaaccaacuuguac

SEQ ID NO: 998266 - RNA, 19 nt, Artificial Sequence
  Description of Artificial Sequence: Synthetic oligonucleotide
cuagauauugaacuagggg

SEQ ID NO: 998267 - RNA, 19 nt, Artificial Sequence
  Description of Artificial Sequence: Synthetic oligonucleotide
aaggguguagcauuaacca

SEQ ID NO: 998268 - RNA, 19 nt, Artificial Sequence
  Description of Artificial Sequence: Synthetic oligonucleotide
uuuaacuaauucuguagcc

SEQ ID NO: 998269 - RNA, 19 nt, Artificial Sequence
  Description of Artificial Sequence: Synthetic oligonucleotide
aacagaauuagucuucuuu

SEQ ID NO: 998270 - RNA, 19 nt, Artificial Sequence
  Description of Artificial Sequence: Synthetic oligonucleotide
uuuguguuaggacaggguc

SEQ ID NO: 998271 - RNA, 19 nt, Artificial Sequence
  Description of Artificial Sequence: Synthetic oligonucleotide
ucugacucccucuuggagg

SEQ ID NO: 998272 - RNA, 19 nt, Artificial Sequence
  Description of Artificial Sequence: Synthetic oligonucleotide
aaugaaguaaacucugcua

SEQ ID NO: 998273 - RNA, 19 nt, Artificial Sequence
  Description of Artificial Sequence: Synthetic oligonucleotide
uuagacaccuugcuagggg

SEQ ID NO: 998274 - RNA, 19 nt, Artificial Sequence
  Description of Artificial Sequence: Synthetic oligonucleotide
uggccuuuaacuaauucug

SEQ ID NO: 998275 - RNA, 19 nt, Artificial Sequence
  Description of Artificial Sequence: Synthetic oligonucleotide
aaucggacuggccuugaac

SEQ ID NO: 998276 - RNA, 19 nt, Artificial Sequence
  Description of Artificial Sequence: Synthetic oligonucleotide
ugcccuaccacuaucuucc

SEQ ID NO: 998277 - RNA, 19 nt, Artificial Sequence
  Description of Artificial Sequence: Synthetic oligonucleotide
uugaacuaggggcuuaugc

SEQ ID NO: 998278 - RNA, 19 nt, Artificial Sequence
  Description of Artificial Sequence: Synthetic oligonucleotide
cuccgagcaaucuugaagg

SEQ ID NO: 998279 - RNA, 19 nt, Artificial Sequence
  Description of Artificial Sequence: Synthetic oligonucleotide
ugagcuuuacuccuagccc

SEQ ID NO: 998280 - RNA, 19 nt, Artificial Sequence
  Description of Artificial Sequence: Synthetic oligonucleotide
uacguaaucggacuggccu

SEQ ID NO: 998281 - RNA, 19 nt, Artificial Sequence
  Description of Artificial Sequence: Synthetic oligonucleotide
uucaagaucugacuccgag

SEQ ID NO: 998282 - RNA, 19 nt, Artificial Sequence
  Description of Artificial Sequence: Synthetic oligonucleotide
ugaacuaggggcuuaugca

SEQ ID NO: 998283 - RNA, 19 nt, Artificial Sequence
  Description of Artificial Sequence: Synthetic oligonucleotide
acagugaccccacaacagc

SEQ ID NO: 998284 - RNA, 19 nt, Artificial Sequence
  Description of Artificial Sequence: Synthetic oligonucleotide
agugucucgagugagggac

SEQ ID NO: 998285 - RNA, 19 nt, Artificial Sequence
  Description of Artificial Sequence: Synthetic oligonucleotide
uuauucagaaauccucucu

SEQ ID NO: 998286 - RNA, 19 nt, Artificial Sequence
  Description of Artificial Sequence: Synthetic oligonucleotide
uugagaagugucucgagug

SEQ ID NO: 998287 - RNA, 19 nt, Artificial Sequence
  Description of Artificial Sequence: Synthetic oligonucleotide
uuugggagauuuuaaggca

SEQ ID NO: 998288 - RNA, 19 nt, Artificial Sequence
  Description of Artificial Sequence: Synthetic oligonucleotide
uggguuuuaacaugaacac

SEQ ID NO: 998289 - RNA, 19 nt, Artificial Sequence
  Description of Artificial Sequence: Synthetic oligonucleotide
uuguguggaauuuugugca

SEQ ID NO: 998290 - RNA, 19 nt, Artificial Sequence
  Description of Artificial Sequence: Synthetic oligonucleotide
uggguauuaacucucuggu

SEQ ID NO: 998291 - RNA, 19 nt, Artificial Sequence
  Description of Artificial Sequence: Synthetic oligonucleotide
augaaguaaacucugcuau

SEQ ID NO: 998292 - RNA, 19 nt, Artificial Sequence
  Description of Artificial Sequence: Synthetic oligonucleotide
gaagcuaguagaacugugg

SEQ ID NO: 998293 - RNA, 19 nt, Artificial Sequence
  Description of Artificial Sequence: Synthetic oligonucleotide
agcauuaaccauguggcac

SEQ ID NO: 998294 - RNA, 19 nt, Artificial Sequence
  Description of Artificial Sequence: Synthetic oligonucleotide
uaguuuacaaugcugcauc

SEQ ID NO: 998295 - RNA, 19 nt, Artificial Sequence
  Description of Artificial Sequence: Synthetic oligonucleotide
cuuuauucuccgaaugagc

SEQ ID NO: 998296 - RNA, 19 nt, Artificial Sequence
  Description of Artificial Sequence: Synthetic oligonucleotide
aagucacgaaagcugacug

SEQ ID NO: 998297 - RNA, 19 nt, Artificial Sequence
  Description of Artificial Sequence: Synthetic oligonucleotide
uuugagaagugucucgagu

SEQ ID NO: 998298 - RNA, 19 nt, Artificial Sequence
  Description of Artificial Sequence: Synthetic oligonucleotide
uccgaaugagcuugggugg

SEQ ID NO: 998299 - RNA, 19 nt, Artificial Sequence
  Description of Artificial Sequence: Synthetic oligonucleotide
auuaacucucuggucaagc

SEQ ID NO: 998300 - RNA, 19 nt, Artificial Sequence
  Description of Artificial Sequence: Synthetic oligonucleotide
ucccauucaacuucaacca

SEQ ID NO: 998301 - RNA, 19 nt, Artificial Sequence
  Description of Artificial Sequence: Synthetic oligonucleotide
uauaguucaugccccaccu

SEQ ID NO: 998302 - RNA, 19 nt, Artificial Sequence
  Description of Artificial Sequence: Synthetic oligonucleotide
guauuugagaagugucucg

SEQ ID NO: 998303 - RNA, 19 nt, Artificial Sequence
  Description of Artificial Sequence: Synthetic oligonucleotide
uggaauuacaggccugugc

SEQ ID NO: 998304 - RNA, 19 nt, Artificial Sequence
  Description of Artificial Sequence: Synthetic oligonucleotide
ugguauuugagaagugucu

SEQ ID NO: 998305 - RNA, 19 nt, Artificial Sequence
  Description of Artificial Sequence: Synthetic oligonucleotide
acuaggggcuuaugcaugc

SEQ ID NO: 998306 - RNA, 19 nt, Artificial Sequence
  Description of Artificial Sequence: Synthetic oligonucleotide
gaggauguagucaucguag

SEQ ID NO: 998307 - RNA, 19 nt, Artificial Sequence
  Description of Artificial Sequence: Synthetic oligonucleotide
cuccgaaugagcuugggug

SEQ ID NO: 998308 - RNA, 19 nt, Artificial Sequence
  Description of Artificial Sequence: Synthetic oligonucleotide
aagcuaguagaacugugga

SEQ ID NO: 998309 - RNA, 19 nt, Artificial Sequence
  Description of Artificial Sequence: Synthetic oligonucleotide
aguaaacucugcuauucug

SEQ ID NO: 998310 - RNA, 19 nt, Artificial Sequence
  Description of Artificial Sequence: Synthetic oligonucleotide
auacuguagggcuuuguag

SEQ ID NO: 998311 - RNA, 19 nt, Artificial Sequence
  Description of Artificial Sequence: Synthetic oligonucleotide
ggaauuacaggccugugcc

SEQ ID NO: 998312 - RNA, 19 nt, Artificial Sequence
  Description of Artificial Sequence: Synthetic oligonucleotide
uagucuucuuugaaggagc

SEQ ID NO: 998313 - RNA, 19 nt, Artificial Sequence
  Description of Artificial Sequence: Synthetic oligonucleotide
cugagcuuuacuccuagcc

SEQ ID NO: 998314 - RNA, 19 nt, Artificial Sequence
  Description of Artificial Sequence: Synthetic oligonucleotide
ugcaacuuagacaccuugc

SEQ ID NO: 998315 - RNA, 19 nt, Artificial Sequence
  Description of Artificial Sequence: Synthetic oligonucleotide
ugaggagugguauuugaga

SEQ ID NO: 998316 - RNA, 19 nt, Artificial Sequence
  Description of Artificial Sequence: Synthetic oligonucleotide
cugcuaauuuucuggaggg

SEQ ID NO: 998317 - RNA, 19 nt, Artificial Sequence
  Description of Artificial Sequence: Synthetic oligonucleotide
uaguucaugccccaccuca

SEQ ID NO: 998318 - RNA, 19 nt, Artificial Sequence
  Description of Artificial Sequence: Synthetic oligonucleotide
uggcuauacagcaaccagc

SEQ ID NO: 998319 - RNA, 19 nt, Artificial Sequence
  Description of Artificial Sequence: Synthetic oligonucleotide
auuagagaccaccaugccu

SEQ ID NO: 998320 - RNA, 19 nt, Artificial Sequence
  Description of Artificial Sequence: Synthetic oligonucleotide
uuaacucucuggucaagcc

SEQ ID NO: 998321 - RNA, 19 nt, Artificial Sequence
  Description of Artificial Sequence: Synthetic oligonucleotide
aaacuccccuaacaaaucu

SEQ ID NO: 998322 - RNA, 19 nt, Artificial Sequence
  Description of Artificial Sequence: Synthetic oligonucleotide
caucguagagcacaucucc

SEQ ID NO: 998323 - RNA, 19 nt, Artificial Sequence
  Description of Artificial Sequence: Synthetic oligonucleotide
uugaggagugguauuugag

SEQ ID NO: 998324 - RNA, 19 nt, Artificial Sequence
  Description of Artificial Sequence: Synthetic oligonucleotide
aaauccucucuguuccaag

SEQ ID NO: 998325 - RNA, 19 nt, Artificial Sequence
  Description of Artificial Sequence: Synthetic oligonucleotide
ugcuucagugacaaaguga

SEQ ID NO: 998326 - RNA, 19 nt, Artificial Sequence
  Description of Artificial Sequence: Synthetic oligonucleotide
aaucuuuggaagggcacuc

SEQ ID NO: 998327 - RNA, 19 nt, Artificial Sequence
  Description of Artificial Sequence: Synthetic oligonucleotide
aauggguauuaacucucug

SEQ ID NO: 998328 - RNA, 19 nt, Artificial Sequence
  Description of Artificial Sequence: Synthetic oligonucleotide
uggaguucuguguagcaug

SEQ ID NO: 998329 - RNA, 19 nt, Artificial Sequence
  Description of Artificial Sequence: Synthetic oligonucleotide
cuagagguggguuuuaaca

SEQ ID NO: 998330 - RNA, 19 nt, Artificial Sequence
  Description of Artificial Sequence: Synthetic oligonucleotide
ucuacugcacggcaugugu

SEQ ID NO: 998331 - RNA, 19 nt, Artificial Sequence
  Description of Artificial Sequence: Synthetic oligonucleotide
ugaagcuaguagaacugug

SEQ ID NO: 998332 - RNA, 19 nt, Artificial Sequence
  Description of Artificial Sequence: Synthetic oligonucleotide
guggguuuuaacaugaaca

SEQ ID NO: 998333 - RNA, 19 nt, Artificial Sequence
  Description of Artificial Sequence: Synthetic oligonucleotide
cuggauaucccgauucagc

SEQ ID NO: 998334 - RNA, 19 nt, Artificial Sequence
  Description of Artificial Sequence: Synthetic oligonucleotide
uaaccauguggcacuuucg

SEQ ID NO: 998335 - RNA, 19 nt, Artificial Sequence
  Description of Artificial Sequence: Synthetic oligonucleotide
uuguguuaggacagggucu

SEQ ID NO: 998336 - RNA, 19 nt, Artificial Sequence
  Description of Artificial Sequence: Synthetic oligonucleotide
uucuaugagccagagcugc

SEQ ID NO: 998337 - RNA, 19 nt, Artificial Sequence
  Description of Artificial Sequence: Synthetic oligonucleotide
agcacccuaggacaugugg

SEQ ID NO: 998338 - RNA, 19 nt, Artificial Sequence
  Description of Artificial Sequence: Synthetic oligonucleotide
cuccgaacaagcuugugug

SEQ ID NO: 998339 - RNA, 19 nt, Artificial Sequence
  Description of Artificial Sequence: Synthetic oligonucleotide
ugugguuagcacuauucaa

SEQ ID NO: 998340 - RNA, 19 nt, Artificial Sequence
  Description of Artificial Sequence: Synthetic oligonucleotide
gugaguaucuucaagaucu

SEQ ID NO: 998341 - RNA, 19 nt, Artificial Sequence
  Description of Artificial Sequence: Synthetic oligonucleotide
uuuagccacaacagaauua

SEQ ID NO: 998342 - RNA, 19 nt, Artificial Sequence
  Description of Artificial Sequence: Synthetic oligonucleotide
agucacgaaagcugacugg

SEQ ID NO: 998343 - RNA, 19 nt, Artificial Sequence
  Description of Artificial Sequence: Synthetic oligonucleotide
agcugcucuacguaaucgg

SEQ ID NO: 998344 - RNA, 19 nt, Artificial Sequence
  Description of Artificial Sequence: Synthetic oligonucleotide
ugguuagcacuauucaaga

SEQ ID NO: 998345 - RNA, 19 nt, Artificial Sequence
  Description of Artificial Sequence: Synthetic oligonucleotide
ucucgagugagggacuugg

SEQ ID NO: 998346 - RNA, 19 nt, Artificial Sequence
  Description of Artificial Sequence: Synthetic oligonucleotide
ucacuacuagauauugaac

SEQ ID NO: 998347 - RNA, 19 nt, Artificial Sequence
  Description of Artificial Sequence: Synthetic oligonucleotide
ucuagcacugagcuuuacu

SEQ ID NO: 998348 - RNA, 19 nt, Artificial Sequence
  Description of Artificial Sequence: Synthetic oligonucleotide
cuauaguucaugccccacc

SEQ ID NO: 998349 - RNA, 19 nt, Artificial Sequence
  Description of Artificial Sequence: Synthetic oligonucleotide
agccuggauaucccgauuc

SEQ ID NO: 998350 - RNA, 19 nt, Artificial Sequence
  Description of Artificial Sequence: Synthetic oligonucleotide
cuacuagauauugaacuag

SEQ ID NO: 998351 - RNA, 19 nt, Artificial Sequence
  Description of Artificial Sequence: Synthetic oligonucleotide
acuagauauugaacuaggg

SEQ ID NO: 998352 - RNA, 19 nt, Artificial Sequence
  Description of Artificial Sequence: Synthetic oligonucleotide
uuucuaugagccagagcug

SEQ ID NO: 998353 - RNA, 19 nt, Artificial Sequence
  Description of Artificial Sequence: Synthetic oligonucleotide
agauauugaacuaggggcu

SEQ ID NO: 998354 - RNA, 19 nt, Artificial Sequence
  Description of Artificial Sequence: Synthetic oligonucleotide
caaucucccaagucugugg

SEQ ID NO: 998355 - RNA, 19 nt, Artificial Sequence
  Description of Artificial Sequence: Synthetic oligonucleotide
uauuucuaugagccagagc

SEQ ID NO: 998356 - RNA, 19 nt, Artificial Sequence
  Description of Artificial Sequence: Synthetic oligonucleotide
gauuagagaccaccaugcc

SEQ ID NO: 998357 - RNA, 19 nt, Artificial Sequence
  Description of Artificial Sequence: Synthetic oligonucleotide
ugaaggguguagcauuaac

SEQ ID NO: 998358 - RNA, 19 nt, Artificial Sequence
  Description of Artificial Sequence: Synthetic oligonucleotide
uccgaacaagcuugugugg

SEQ ID NO: 998359 - RNA, 19 nt, Artificial Sequence
  Description of Artificial Sequence: Synthetic oligonucleotide
ugcucuacguaaucggacu

SEQ ID NO: 998360 - RNA, 19 nt, Artificial Sequence
  Description of Artificial Sequence: Synthetic oligonucleotide
ccuuuaacuaauucuguag

SEQ ID NO: 998361 - RNA, 19 nt, Artificial Sequence
  Description of Artificial Sequence: Synthetic oligonucleotide
ugcuauguaauguggcuau

SEQ ID NO: 998362 - RNA, 19 nt, Artificial Sequence
  Description of Artificial Sequence: Synthetic oligonucleotide
ucggaugccacuccaucug

SEQ ID NO: 998363 - RNA, 19 nt, Artificial Sequence
  Description of Artificial Sequence: Synthetic oligonucleotide
ucgagugagggacuuggga

SEQ ID NO: 998364 - RNA, 19 nt, Artificial Sequence
  Description of Artificial Sequence: Synthetic oligonucleotide
augugguuagcacuauuca

SEQ ID NO: 998365 - RNA, 19 nt, Artificial Sequence
  Description of Artificial Sequence: Synthetic oligonucleotide
agugguauuugagaagugu

SEQ ID NO: 998366 - RNA, 19 nt, Artificial Sequence
  Description of Artificial Sequence: Synthetic oligonucleotide
ggauggaaauacuguaggg

SEQ ID NO: 998367 - RNA, 19 nt, Artificial Sequence
  Description of Artificial Sequence: Synthetic oligonucleotide
ggaauggucuacugcacgg

SEQ ID NO: 998368 - RNA, 19 nt, Artificial Sequence
  Description of Artificial Sequence: Synthetic oligonucleotide
uugggauggaaauacugua

SEQ ID NO: 998369 - RNA, 19 nt, Artificial Sequence
  Description of Artificial Sequence: Synthetic oligonucleotide
cacuacuagauauugaacu

SEQ ID NO: 998370 - RNA, 19 nt, Artificial Sequence
  Description of Artificial Sequence: Synthetic oligonucleotide
agaaccuaaaugaaguaaa

SEQ ID NO: 998371 - RNA, 19 nt, Artificial Sequence
  Description of Artificial Sequence: Synthetic oligonucleotide
guagucaucguagagcaca

SEQ ID NO: 998372 - RNA, 19 nt, Artificial Sequence
  Description of Artificial Sequence: Synthetic oligonucleotide
uccgguaguccacaauaug

SEQ ID NO: 998373 - RNA, 19 nt, Artificial Sequence
  Description of Artificial Sequence: Synthetic oligonucleotide
agccuuuauucuccgaaug

SEQ ID NO: 998374 - RNA, 19 nt, Artificial Sequence
  Description of Artificial Sequence: Synthetic oligonucleotide
gcugcaucgagccaaggag

SEQ ID NO: 998375 - RNA, 19 nt, Artificial Sequence
  Description of Artificial Sequence: Synthetic oligonucleotide
cacagugaccccacaacag

SEQ ID NO: 998376 - RNA, 19 nt, Artificial Sequence
  Description of Artificial Sequence: Synthetic oligonucleotide
ggcuuuguagucauugugg

SEQ ID NO: 998377 - RNA, 19 nt, Artificial Sequence
  Description of Artificial Sequence: Synthetic oligonucleotide
ugcaucgagccaaggagcu

SEQ ID NO: 998378 - RNA, 19 nt, Artificial Sequence
  Description of Artificial Sequence: Synthetic oligonucleotide
gacugcuaauuuucuggag

SEQ ID NO: 998379 - RNA, 19 nt, Artificial Sequence
  Description of Artificial Sequence: Synthetic oligonucleotide
gaaccuaaaugaaguaaac

SEQ ID NO: 998380 - RNA, 19 nt, Artificial Sequence
  Description of Artificial Sequence: Synthetic oligonucleotide
ugagcuuggguggaguucu

SEQ ID NO: 998381 - RNA, 19 nt, Artificial Sequence
  Description of Artificial Sequence: Synthetic oligonucleotide
caugccuaccuccaaucag

SEQ ID NO: 998382 - RNA, 19 nt, Artificial Sequence
  Description of Artificial Sequence: Synthetic oligonucleotide
ucuacguaaucggacuggc

SEQ ID NO: 998383 - RNA, 19 nt, Artificial Sequence
  Description of Artificial Sequence: Synthetic oligonucleotide
gucacgaaagcugacuggc

SEQ ID NO: 998384 - RNA, 19 nt, Artificial Sequence
  Description of Artificial Sequence: Synthetic oligonucleotide
uguggaauuacaggccugu

SEQ ID NO: 998385 - RNA, 19 nt, Artificial Sequence
  Description of Artificial Sequence: Synthetic oligonucleotide
uuucggaugccacuccauc

SEQ ID NO: 998386 - RNA, 19 nt, Artificial Sequence
  Description of Artificial Sequence: Synthetic oligonucleotide
uccgagcaaucuugaaggg

SEQ ID NO: 998387 - RNA, 19 nt, Artificial Sequence
  Description of Artificial Sequence: Synthetic oligonucleotide
cugcaucgagccaaggagc

SEQ ID NO: 998388 - RNA, 19 nt, Artificial Sequence
  Description of Artificial Sequence: Synthetic oligonucleotide
aaugagcuuggguggaguu

SEQ ID NO: 998389 - RNA, 19 nt, Artificial Sequence
  Description of Artificial Sequence: Synthetic oligonucleotide
uguguuaggacagggucuc

SEQ ID NO: 998390 - RNA, 19 nt, Artificial Sequence
  Description of Artificial Sequence: Synthetic oligonucleotide
cuaccuccaaucagaacac

SEQ ID NO: 998391 - RNA, 19 nt, Artificial Sequence
  Description of Artificial Sequence: Synthetic oligonucleotide
ucuccgaaugagcuugggu

SEQ ID NO: 998392 - RNA, 19 nt, Artificial Sequence
  Description of Artificial Sequence: Synthetic oligonucleotide
agcacuauucaagaaguaa

SEQ ID NO: 998393 - RNA, 19 nt, Artificial Sequence
  Description of Artificial Sequence: Synthetic oligonucleotide
cacgaaagcugacuggcac

SEQ ID NO: 998394 - RNA, 19 nt, Artificial Sequence
  Description of Artificial Sequence: Synthetic oligonucleotide
ggcacaagcacccuaggac

SEQ ID NO: 998395 - RNA, 19 nt, Artificial Sequence
  Description of Artificial Sequence: Synthetic oligonucleotide
ucacacgccccuugggucc

SEQ ID NO: 998396 - RNA, 19 nt, Artificial Sequence
  Description of Artificial Sequence: Synthetic oligonucleotide
agcuucuacaggugugaag

SEQ ID NO: 998397 - RNA, 19 nt, Artificial Sequence
  Description of Artificial Sequence: Synthetic oligonucleotide
auaguucaugccccaccuc

SEQ ID NO: 998398 - RNA, 19 nt, Artificial Sequence
  Description of Artificial Sequence: Synthetic oligonucleotide
cuuagacaccuugcuaggg

SEQ ID NO: 998399 - RNA, 19 nt, Artificial Sequence
  Description of Artificial Sequence: Synthetic oligonucleotide
ucugacuccgagcaaucuu

SEQ ID NO: 998400 - RNA, 19 nt, Artificial Sequence
  Description of Artificial Sequence: Synthetic oligonucleotide
uagcauuaaccauguggca

SEQ ID NO: 998401 - RNA, 19 nt, Artificial Sequence
  Description of Artificial Sequence: Synthetic oligonucleotide
ucccgauucagcagcuucu

SEQ ID NO: 998402 - RNA, 19 nt, Artificial Sequence
  Description of Artificial Sequence: Synthetic oligonucleotide
cacggcaugugucuccccg

SEQ ID NO: 998403 - RNA, 19 nt, Artificial Sequence
  Description of Artificial Sequence: Synthetic oligonucleotide
uggaaauacuguagggcuu

SEQ ID NO: 998404 - RNA, 19 nt, Artificial Sequence
  Description of Artificial Sequence: Synthetic oligonucleotide
guaacuaagcagaaccuaa

SEQ ID NO: 998405 - RNA, 19 nt, Artificial Sequence
  Description of Artificial Sequence: Synthetic oligonucleotide
cagaauuagucuucuuuga

SEQ ID NO: 998406 - RNA, 19 nt, Artificial Sequence
  Description of Artificial Sequence: Synthetic oligonucleotide
ggcuauacagcaaccagcc

SEQ ID NO: 998407 - RNA, 19 nt, Artificial Sequence
  Description of Artificial Sequence: Synthetic oligonucleotide
cucuacguaaucggacugg

SEQ ID NO: 998408 - RNA, 19 nt, Artificial Sequence
  Description of Artificial Sequence: Synthetic oligonucleotide
agcuaguagaacuguggaa

SEQ ID NO: 998409 - RNA, 19 nt, Artificial Sequence
  Description of Artificial Sequence: Synthetic oligonucleotide
gaauggucuacugcacggc

SEQ ID NO: 998410 - RNA, 19 nt, Artificial Sequence
  Description of Artificial Sequence: Synthetic oligonucleotide
ccuaccacuaucuucccug

SEQ ID NO: 998411 - RNA, 19 nt, Artificial Sequence
  Description of Artificial Sequence: Synthetic oligonucleotide
ucacgaaagcugacuggca

SEQ ID NO: 998412 - RNA, 19 nt, Artificial Sequence
  Description of Artificial Sequence: Synthetic oligonucleotide
uuauucuccgaaugagcuu

SEQ ID NO: 998413 - RNA, 19 nt, Artificial Sequence
  Description of Artificial Sequence: Synthetic oligonucleotide
ggauguagucaucguagag

SEQ ID NO: 998414 - RNA, 19 nt, Artificial Sequence
  Description of Artificial Sequence: Synthetic oligonucleotide
gagcuuuacuccuagcccu

SEQ ID NO: 998415 - RNA, 19 nt, Artificial Sequence
  Description of Artificial Sequence: Synthetic oligonucleotide
acgaaagcugacuggcaca

SEQ ID NO: 998416 - RNA, 19 nt, Artificial Sequence
  Description of Artificial Sequence: Synthetic oligonucleotide
cuauuucuaugagccagag

SEQ ID NO: 998417 - RNA, 19 nt, Artificial Sequence
  Description of Artificial Sequence: Synthetic oligonucleotide
cugcucuacguaaucggac

SEQ ID NO: 998418 - RNA, 19 nt, Artificial Sequence
  Description of Artificial Sequence: Synthetic oligonucleotide
auggaaggguauucaaaau

SEQ ID NO: 998419 - RNA, 19 nt, Artificial Sequence
  Description of Artificial Sequence: Synthetic oligonucleotide
caggggucagccaagacaa

SEQ ID NO: 998420 - RNA, 19 nt, Artificial Sequence
  Description of Artificial Sequence: Synthetic oligonucleotide
cuacguaaucggacuggcc

SEQ ID NO: 998421 - RNA, 19 nt, Artificial Sequence
  Description of Artificial Sequence: Synthetic oligonucleotide
ggguguagcauuaaccaug

SEQ ID NO: 998422 - RNA, 19 nt, Artificial Sequence
  Description of Artificial Sequence: Synthetic oligonucleotide
cucugaaacuccccuaaca

SEQ ID NO: 998423 - RNA, 19 nt, Artificial Sequence
  Description of Artificial Sequence: Synthetic oligonucleotide
augagcuuggguggaguuc

SEQ ID NO: 998424 - RNA, 19 nt, Artificial Sequence
  Description of Artificial Sequence: Synthetic oligonucleotide
ucaugccccaccucacuac

SEQ ID NO: 998425 - RNA, 19 nt, Artificial Sequence
  Description of Artificial Sequence: Synthetic oligonucleotide
ucuauaguucaugccccac

SEQ ID NO: 998426 - RNA, 19 nt, Artificial Sequence
  Description of Artificial Sequence: Synthetic oligonucleotide
aguucaugccccaccucac

SEQ ID NO: 998427 - RNA, 19 nt, Artificial Sequence
  Description of Artificial Sequence: Synthetic oligonucleotide
ggauaucccgauucagcag

SEQ ID NO: 998428 - RNA, 19 nt, Artificial Sequence
  Description of Artificial Sequence: Synthetic oligonucleotide
aucuacucuugaagauugc

SEQ ID NO: 998429 - RNA, 19 nt, Artificial Sequence
  Description of Artificial Sequence: Synthetic oligonucleotide
aggguguagcauuaaccau

SEQ ID NO: 998430 - RNA, 19 nt, Artificial Sequence
  Description of Artificial Sequence: Synthetic oligonucleotide
ccugugaguaucuucaaga

SEQ ID NO: 998431 - RNA, 19 nt, Artificial Sequence
  Description of Artificial Sequence: Synthetic oligonucleotide
agguucugaaugcaacuua

SEQ ID NO: 998432 - RNA, 19 nt, Artificial Sequence
  Description of Artificial Sequence: Synthetic oligonucleotide
acggcaugugucuccccgg

SEQ ID NO: 998433 - RNA, 19 nt, Artificial Sequence
  Description of Artificial Sequence: Synthetic oligonucleotide
gauggcgugcccuaccacu

SEQ ID NO: 998434 - RNA, 19 nt, Artificial Sequence
  Description of Artificial Sequence: Synthetic oligonucleotide
gaacuaggggcuuaugcau

SEQ ID NO: 998435 - RNA, 19 nt, Artificial Sequence
  Description of Artificial Sequence: Synthetic oligonucleotide
uagucaucguagagcacau

SEQ ID NO: 998436 - RNA, 19 nt, Artificial Sequence
  Description of Artificial Sequence: Synthetic oligonucleotide
agaacacuucugaaaguga

SEQ ID NO: 998437 - RNA, 19 nt, Artificial Sequence
  Description of Artificial Sequence: Synthetic oligonucleotide
agcucacacgccccuuggg

SEQ ID NO: 998438 - RNA, 19 nt, Artificial Sequence
  Description of Artificial Sequence: Synthetic oligonucleotide
gguaguccacaauauggca

SEQ ID NO: 998439 - RNA, 19 nt, Artificial Sequence
  Description of Artificial Sequence: Synthetic oligonucleotide
uauugaacuaggggcuuau

SEQ ID NO: 998440 - RNA, 19 nt, Artificial Sequence
  Description of Artificial Sequence: Synthetic oligonucleotide
uccgguugaggagugguau

SEQ ID NO: 998441 - RNA, 19 nt, Artificial Sequence
  Description of Artificial Sequence: Synthetic oligonucleotide
augccuaccuccaaucaga

SEQ ID NO: 998442 - RNA, 19 nt, Artificial Sequence
  Description of Artificial Sequence: Synthetic oligonucleotide
ugcuaauuuucuggagggu

SEQ ID NO: 998443 - RNA, 19 nt, Artificial Sequence
  Description of Artificial Sequence: Synthetic oligonucleotide
uaccacuaucuucccugug

SEQ ID NO: 998444 - RNA, 19 nt, Artificial Sequence
  Description of Artificial Sequence: Synthetic oligonucleotide
cuacugcacggcauguguc

SEQ ID NO: 998445 - RNA, 19 nt, Artificial Sequence
  Description of Artificial Sequence: Synthetic oligonucleotide
aguccacaauauggcaggg

SEQ ID NO: 998446 - RNA, 19 nt, Artificial Sequence
  Description of Artificial Sequence: Synthetic oligonucleotide
cagaaccuaaaugaaguaa

SEQ ID NO: 998447 - RNA, 19 nt, Artificial Sequence
  Description of Artificial Sequence: Synthetic oligonucleotide
auacagcaaccagccacac

SEQ ID NO: 998448 - RNA, 19 nt, Artificial Sequence
  Description of Artificial Sequence: Synthetic oligonucleotide
agccaagacaaugaugcuu

SEQ ID NO: 998449 - RNA, 19 nt, Artificial Sequence
  Description of Artificial Sequence: Synthetic oligonucleotide
ggagccuuuauucuccgaa

SEQ ID NO: 998450 - RNA, 19 nt, Artificial Sequence
  Description of Artificial Sequence: Synthetic oligonucleotide
uucuccgaaugagcuuggg

SEQ ID NO: 998451 - RNA, 19 nt, Artificial Sequence
  Description of Artificial Sequence: Synthetic oligonucleotide
ugcacggcaugugucuccc

SEQ ID NO: 998452 - RNA, 19 nt, Artificial Sequence
  Description of Artificial Sequence: Synthetic oligonucleotide
caucgagccaaggagcuca

SEQ ID NO: 998453 - RNA, 19 nt, Artificial Sequence
  Description of Artificial Sequence: Synthetic oligonucleotide
ggaaagugcucuagcacug

SEQ ID NO: 998454 - RNA, 19 nt, Artificial Sequence
  Description of Artificial Sequence: Synthetic oligonucleotide
agcuuuacuccuagcccuc

SEQ ID NO: 998455 - RNA, 19 nt, Artificial Sequence
  Description of Artificial Sequence: Synthetic oligonucleotide
gugcccuaccacuaucuuc

SEQ ID NO: 998456 - RNA, 19 nt, Artificial Sequence
  Description of Artificial Sequence: Synthetic oligonucleotide
ggaaggguauucaaaaugu

SEQ ID NO: 998457 - RNA, 19 nt, Artificial Sequence
  Description of Artificial Sequence: Synthetic oligonucleotide
acguaaucggacuggccuu

SEQ ID NO: 998458 - RNA, 19 nt, Artificial Sequence
  Description of Artificial Sequence: Synthetic oligonucleotide
gucuauaguucaugcccca

SEQ ID NO: 998459 - RNA, 19 nt, Artificial Sequence
  Description of Artificial Sequence: Synthetic oligonucleotide
cagucaacugccaccaucu

SEQ ID NO: 998460 - RNA, 19 nt, Artificial Sequence
  Description of Artificial Sequence: Synthetic oligonucleotide
aaugcaacuuagacaccuu

SEQ ID NO: 998461 - RNA, 19 nt, Artificial Sequence
  Description of Artificial Sequence: Synthetic oligonucleotide
cacuuucggaugccacucc

SEQ ID NO: 998462 - RNA, 19 nt, Artificial Sequence
  Description of Artificial Sequence: Synthetic oligonucleotide
ggacugcuaauuuucugga

SEQ ID NO: 998463 - RNA, 19 nt, Artificial Sequence
  Description of Artificial Sequence: Synthetic oligonucleotide
cugcacggcaugugucucc

SEQ ID NO: 998464 - RNA, 19 nt, Artificial Sequence
  Description of Artificial Sequence: Synthetic oligonucleotide
uaaucggacuggccuugaa

SEQ ID NO: 998465 - RNA, 19 nt, Artificial Sequence
  Description of Artificial Sequence: Synthetic oligonucleotide
gaaagugcucuagcacuga

SEQ ID NO: 998466 - RNA, 19 nt, Artificial Sequence
  Description of Artificial Sequence: Synthetic oligonucleotide
ggcuuaugcaugcugggaa

SEQ ID NO: 998467 - RNA, 19 nt, Artificial Sequence
  Description of Artificial Sequence: Synthetic oligonucleotide
cgguaguccacaauauggc

SEQ ID NO: 998468 - RNA, 19 nt, Artificial Sequence
  Description of Artificial Sequence: Synthetic oligonucleotide
gcuaguagaacuguggaau

SEQ ID NO: 998469 - RNA, 19 nt, Artificial Sequence
  Description of Artificial Sequence: Synthetic oligonucleotide
gaucugacuccgagcaauc

SEQ ID NO: 998470 - RNA, 19 nt, Artificial Sequence
  Description of Artificial Sequence: Synthetic oligonucleotide
ggagugguauuugagaagu

SEQ ID NO: 998471 - RNA, 19 nt, Artificial Sequence
  Description of Artificial Sequence: Synthetic oligonucleotide
acuccccuaacaaaucuuu

SEQ ID NO: 998472 - RNA, 19 nt, Artificial Sequence
  Description of Artificial Sequence: Synthetic oligonucleotide
cuuggguggaguucugugu

SEQ ID NO: 998473 - RNA, 19 nt, Artificial Sequence
  Description of Artificial Sequence: Synthetic oligonucleotide
ggguauuaacucucugguc

SEQ ID NO: 998474 - RNA, 19 nt, Artificial Sequence
  Description of Artificial Sequence: Synthetic oligonucleotide
acaugugguuagcacuauu

SEQ ID NO: 998475 - RNA, 19 nt, Artificial Sequence
  Description of Artificial Sequence: Synthetic oligonucleotide
guggauggcgugcccuacc

SEQ ID NO: 998476 - RNA, 19 nt, Artificial Sequence
  Description of Artificial Sequence: Synthetic oligonucleotide
ccacuaucuucccugugag

SEQ ID NO: 998477 - RNA, 19 nt, Artificial Sequence
  Description of Artificial Sequence: Synthetic oligonucleotide
uacaggugugaagcuagua

SEQ ID NO: 998478 - RNA, 19 nt, Artificial Sequence
  Description of Artificial Sequence: Synthetic oligonucleotide
uggagccuuuauucuccga

SEQ ID NO: 998479 - RNA, 19 nt, Artificial Sequence
  Description of Artificial Sequence: Synthetic oligonucleotide
agccuuccgguugaggagu

SEQ ID NO: 998480 - RNA, 19 nt, Artificial Sequence
  Description of Artificial Sequence: Synthetic oligonucleotide
gcucuacguaaucggacug

SEQ ID NO: 998481 - RNA, 19 nt, Artificial Sequence
  Description of Artificial Sequence: Synthetic oligonucleotide
uccaucugguccgguaguc

SEQ ID NO: 998482 - RNA, 19 nt, Artificial Sequence
  Description of Artificial Sequence: Synthetic oligonucleotide
auucuccgaaugagcuugg

SEQ ID NO: 998483 - RNA, 19 nt, Artificial Sequence
  Description of Artificial Sequence: Synthetic oligonucleotide
agcuuguguggaauuuugu

SEQ ID NO: 998484 - RNA, 19 nt, Artificial Sequence
  Description of Artificial Sequence: Synthetic oligonucleotide
ugugucuccccgggacugc

SEQ ID NO: 998485 - RNA, 19 nt, Artificial Sequence
  Description of Artificial Sequence: Synthetic oligonucleotide
aucugacuccgagcaaucu

SEQ ID NO: 998486 - RNA, 19 nt, Artificial Sequence
  Description of Artificial Sequence: Synthetic oligonucleotide
gcauuaaccauguggcacu

SEQ ID NO: 998487 - RNA, 19 nt, Artificial Sequence
  Description of Artificial Sequence: Synthetic oligonucleotide
gguuagcacuauucaagaa

SEQ ID NO: 998488 - RNA, 19 nt, Artificial Sequence
  Description of Artificial Sequence: Synthetic oligonucleotide
gagccuuuauucuccgaau

SEQ ID NO: 998489 - RNA, 19 nt, Artificial Sequence
  Description of Artificial Sequence: Synthetic oligonucleotide
ccuagagguggguuuuaac

SEQ ID NO: 998490 - RNA, 19 nt, Artificial Sequence
  Description of Artificial Sequence: Synthetic oligonucleotide
uccccgggacugcuaauuu

SEQ ID NO: 998491 - RNA, 19 nt, Artificial Sequence
  Description of Artificial Sequence: Synthetic oligonucleotide
gacuccgagcaaucuugaa

SEQ ID NO: 998492 - RNA, 19 nt, Artificial Sequence
  Description of Artificial Sequence: Synthetic oligonucleotide
gguugaggagugguauuug

SEQ ID NO: 998493 - RNA, 19 nt, Artificial Sequence
  Description of Artificial Sequence: Synthetic oligonucleotide
gcuuaugcaugcugggaaa

SEQ ID NO: 998494 - RNA, 19 nt, Artificial Sequence
  Description of Artificial Sequence: Synthetic oligonucleotide
gauauugaacuaggggcuu

SEQ ID NO: 998495 - RNA, 19 nt, Artificial Sequence
  Description of Artificial Sequence: Synthetic oligonucleotide
uagcuucuacaggugugaa

SEQ ID NO: 998496 - RNA, 19 nt, Artificial Sequence
  Description of Artificial Sequence: Synthetic oligonucleotide
auaucccgauucagcagcu

SEQ ID NO: 998497 - RNA, 19 nt, Artificial Sequence
  Description of Artificial Sequence: Synthetic oligonucleotide
aucgagccaaggagcucac

SEQ ID NO: 998498 - RNA, 19 nt, Artificial Sequence
  Description of Artificial Sequence: Synthetic oligonucleotide
caaugaugcuuuccugucu

SEQ ID NO: 998499 - RNA, 19 nt, Artificial Sequence
  Description of Artificial Sequence: Synthetic oligonucleotide
ggcauggaaggguauucaa

SEQ ID NO: 998500 - RNA, 19 nt, Artificial Sequence
  Description of Artificial Sequence: Synthetic oligonucleotide
caauggguauuaacucucu

SEQ ID NO: 998501 - RNA, 19 nt, Artificial Sequence
  Description of Artificial Sequence: Synthetic oligonucleotide
uccuccgaacaagcuugug

SEQ ID NO: 998502 - RNA, 19 nt, Artificial Sequence
  Description of Artificial Sequence: Synthetic oligonucleotide
ugucucgagugagggacuu

SEQ ID NO: 998503 - RNA, 19 nt, Artificial Sequence
  Description of Artificial Sequence: Synthetic oligonucleotide
ccuggauaucccgauucag

SEQ ID NO: 998504 - RNA, 19 nt, Artificial Sequence
  Description of Artificial Sequence: Synthetic oligonucleotide
gaaugagcuuggguggagu

SEQ ID NO: 998505 - RNA, 19 nt, Artificial Sequence
  Description of Artificial Sequence: Synthetic oligonucleotide
uggcgugcccuaccacuau

SEQ ID NO: 998506 - RNA, 19 nt, Artificial Sequence
  Description of Artificial Sequence: Synthetic oligonucleotide
guguagcauuaaccaugug

SEQ ID NO: 998507 - RNA, 19 nt, Artificial Sequence
  Description of Artificial Sequence: Synthetic oligonucleotide
ggacaugugguuagcacua

SEQ ID NO: 998508 - RNA, 19 nt, Artificial Sequence
  Description of Artificial Sequence: Synthetic oligonucleotide
ccccaacaauucuagcuuc

SEQ ID NO: 998509 - RNA, 19 nt, Artificial Sequence
  Description of Artificial Sequence: Synthetic oligonucleotide
aagcacccuaggacaugug

SEQ ID NO: 998510 - RNA, 19 nt, Artificial Sequence
  Description of Artificial Sequence: Synthetic oligonucleotide
acccuaggacaugugguua

SEQ ID NO: 998511 - RNA, 19 nt, Artificial Sequence
  Description of Artificial Sequence: Synthetic oligonucleotide
guucaugccccaccucacu

SEQ ID NO: 998512 - RNA, 19 nt, Artificial Sequence
  Description of Artificial Sequence: Synthetic oligonucleotide
gguguagcauuaaccaugu

SEQ ID NO: 998513 - RNA, 19 nt, Artificial Sequence
  Description of Artificial Sequence: Synthetic oligonucleotide
gcugcucuacguaaucgga

SEQ ID NO: 998514 - RNA, 19 nt, Artificial Sequence
  Description of Artificial Sequence: Synthetic oligonucleotide
ccaagucuguggaauuaca

SEQ ID NO: 998515 - RNA, 19 nt, Artificial Sequence
  Description of Artificial Sequence: Synthetic oligonucleotide
gcuauacagcaaccagcca

SEQ ID NO: 998516 - RNA, 19 nt, Artificial Sequence
  Description of Artificial Sequence: Synthetic oligonucleotide
gcuaauuuucuggaggguu

SEQ ID NO: 998517 - RNA, 19 nt, Artificial Sequence
  Description of Artificial Sequence: Synthetic oligonucleotide
cuaccacuaucuucccugu

SEQ ID NO: 998518 - RNA, 19 nt, Artificial Sequence
  Description of Artificial Sequence: Synthetic oligonucleotide
gccuggauaucccgauuca

SEQ ID NO: 998519 - RNA, 19 nt, Artificial Sequence
  Description of Artificial Sequence: Synthetic oligonucleotide
guaaucggacuggccuuga

SEQ ID NO: 998520 - RNA, 19 nt, Artificial Sequence
  Description of Artificial Sequence: Synthetic oligonucleotide
gucucgagugagggacuug

SEQ ID NO: 998521 - RNA, 19 nt, Artificial Sequence
  Description of Artificial Sequence: Synthetic oligonucleotide
cacaagcacccuaggacau

SEQ ID NO: 998522 - RNA, 19 nt, Artificial Sequence
  Description of Artificial Sequence: Synthetic oligonucleotide
ccauguggcacuuucggau

SEQ ID NO: 998523 - RNA, 19 nt, Artificial Sequence
  Description of Artificial Sequence: Synthetic oligonucleotide
ggcaaguuuugggagauuu

SEQ ID NO: 998524 - RNA, 19 nt, Artificial Sequence
  Description of Artificial Sequence: Synthetic oligonucleotide
auggcgugcccuaccacua

SEQ ID NO: 998525 - RNA, 19 nt, Artificial Sequence
  Description of Artificial Sequence: Synthetic oligonucleotide
caugccccaccucacuacu

SEQ ID NO: 998526 - RNA, 19 nt, Artificial Sequence
  Description of Artificial Sequence: Synthetic oligonucleotide
cacccuaggacaugugguu

SEQ ID NO: 998527 - RNA, 19 nt, Artificial Sequence
  Description of Artificial Sequence: Synthetic oligonucleotide
ccgaacaagcuugugugga

SEQ ID NO: 998528 - RNA, 19 nt, Artificial Sequence
  Description of Artificial Sequence: Synthetic oligonucleotide
gggcauggaaggguauuca

SEQ ID NO: 998529 - RNA, 19 nt, Artificial Sequence
  Description of Artificial Sequence: Synthetic oligonucleotide
gggcuuaugcaugcuggga

SEQ ID NO: 998530 - RNA, 19 nt, Artificial Sequence
  Description of Artificial Sequence: Synthetic oligonucleotide
gccuaccuccaaucagaac

SEQ ID NO: 998531 - RNA, 19 nt, Artificial Sequence
  Description of Artificial Sequence: Synthetic oligonucleotide
cuacaggugugaagcuagu

SEQ ID NO: 998532 - RNA, 19 nt, Artificial Sequence
  Description of Artificial Sequence: Synthetic oligonucleotide
ccuccgaacaagcuugugu

SEQ ID NO: 998533 - RNA, 19 nt, Artificial Sequence
  Description of Artificial Sequence: Synthetic oligonucleotide
guagcauggguggcucuua

SEQ ID NO: 998534 - RNA, 19 nt, Artificial Sequence
  Description of Artificial Sequence: Synthetic oligonucleotide
ccaugccuaccuccaauca

SEQ ID NO: 998535 - RNA, 19 nt, Artificial Sequence
  Description of Artificial Sequence: Synthetic oligonucleotide
cguaaucggacuggccuug

SEQ ID NO: 998536 - RNA, 19 nt, Artificial Sequence
  Description of Artificial Sequence: Synthetic oligonucleotide
ggcgugcccuaccacuauc

SEQ ID NO: 998537 - RNA, 19 nt, Artificial Sequence
  Description of Artificial Sequence: Synthetic oligonucleotide
cucugcuauucugugcuau

SEQ ID NO: 998538 - RNA, 19 nt, Artificial Sequence
  Description of Artificial Sequence: Synthetic oligonucleotide
cuccaucugguccgguagu

SEQ ID NO: 998539 - RNA, 19 nt, Artificial Sequence
  Description of Artificial Sequence: Synthetic oligonucleotide
gcacccuaggacauguggu

SEQ ID NO: 998540 - RNA, 19 nt, Artificial Sequence
  Description of Artificial Sequence: Synthetic oligonucleotide
cccauucaacuucaaccaa

SEQ ID NO: 998541 - RNA, 19 nt, Artificial Sequence
  Description of Artificial Sequence: Synthetic oligonucleotide
guccgguaguccacaauau

SEQ ID NO: 998542 - RNA, 19 nt, Artificial Sequence
  Description of Artificial Sequence: Synthetic oligonucleotide
ccaacaauucuagcuucua

SEQ ID NO: 998543 - RNA, 19 nt, Artificial Sequence
  Description of Artificial Sequence: Synthetic oligonucleotide
gcaucgagccaaggagcuc

SEQ ID NO: 998544 - RNA, 19 nt, Artificial Sequence
  Description of Artificial Sequence: Synthetic oligonucleotide
augccccaccucacuacua

SEQ ID NO: 998545 - RNA, 19 nt, Artificial Sequence
  Description of Artificial Sequence: Synthetic oligonucleotide
cauuaaccauguggcacuu

SEQ ID NO: 998546 - RNA, 19 nt, Artificial Sequence
  Description of Artificial Sequence: Synthetic oligonucleotide
gugucucgagugagggacu

SEQ ID NO: 998547 - RNA, 19 nt, Artificial Sequence
  Description of Artificial Sequence: Synthetic oligonucleotide
ccacugaggaauguccacu

SEQ ID NO: 998548 - RNA, 19 nt, Artificial Sequence
  Description of Artificial Sequence: Synthetic oligonucleotide
gccuagagguggguuuuaa

SEQ ID NO: 998549 - RNA, 19 nt, Artificial Sequence
  Description of Artificial Sequence: Synthetic oligonucleotide
cuccccgggacugcuaauu

SEQ ID NO: 998550 - RNA, 19 nt, Artificial Sequence
  Description of Artificial Sequence: Synthetic oligonucleotide
gcgugcccuaccacuaucu

SEQ ID NO: 998551 - RNA, 19 nt, Artificial Sequence
  Description of Artificial Sequence: Synthetic oligonucleotide
gcuuuacuccuagcccucu

SEQ ID NO: 998552 - RNA, 19 nt, Artificial Sequence
  Description of Artificial Sequence: Synthetic oligonucleotide
cacacgccccuuggguccu

SEQ ID NO: 998553 - RNA, 19 nt, Artificial Sequence
  Description of Artificial Sequence: Synthetic oligonucleotide
cccuaccacuaucuucccu

SEQ ID NO: 998554 - RNA, 19 nt, Artificial Sequence
  Description of Artificial Sequence: Synthetic oligonucleotide
ggccuagagguggguuuua

SEQ ID NO: 998555 - RNA, 19 nt, Artificial Sequence
  Description of Artificial Sequence: Synthetic oligonucleotide
ccgguugaggagugguauu

SEQ ID NO: 998556 - RNA, 19 nt, Artificial Sequence
  Description of Artificial Sequence: Synthetic oligonucleotide
ccccgggacugcuaauuuu

SEQ ID NO: 998557 - RNA, 19 nt, Artificial Sequence
  Description of Artificial Sequence: Synthetic oligonucleotide
cgguugaggagugguauuu

SEQ ID NO: 998558 - RNA, 19 nt, Artificial Sequence
  Description of Artificial Sequence: Synthetic oligonucleotide
cccgauucagcagcuucuu

SEQ ID NO: 998559 - RNA, 19 nt, Artificial Sequence
  Description of Artificial Sequence: Synthetic oligonucleotide
ucuaauuuaaguagugagg

SEQ ID NO: 998560 - RNA, 19 nt, Artificial Sequence
  Description of Artificial Sequence: Synthetic oligonucleotide
uugucuaauauccaaagca

SEQ ID NO: 998561 - RNA, 19 nt, Artificial Sequence
  Description of Artificial Sequence: Synthetic oligonucleotide
auugcuaacaaugagguag

SEQ ID NO: 998562 - RNA, 19 nt, Artificial Sequence
  Description of Artificial Sequence: Synthetic oligonucleotide
aaacggacccauuugcugc

SEQ ID NO: 998563 - RNA, 19 nt, Artificial Sequence
  Description of Artificial Sequence: Synthetic oligonucleotide
ugugcuuuggaaauacugg

SEQ ID NO: 998564 - RNA, 19 nt, Artificial Sequence
  Description of Artificial Sequence: Synthetic oligonucleotide
ucuaauauccaaagcauca

SEQ ID NO: 998565 - RNA, 19 nt, Artificial Sequence
  Description of Artificial Sequence: Synthetic oligonucleotide
auuaguacuaagcacagca

SEQ ID NO: 998566 - RNA, 19 nt, Artificial Sequence
  Description of Artificial Sequence: Synthetic oligonucleotide
aauacuggcagcauguagg

SEQ ID NO: 998567 - RNA, 19 nt, Artificial Sequence
  Description of Artificial Sequence: Synthetic oligonucleotide
uauccuuaggcugagaggg

SEQ ID NO: 998568 - RNA, 19 nt, Artificial Sequence
  Description of Artificial Sequence: Synthetic oligonucleotide
uuauaaaagcccaaagcug

SEQ ID NO: 998569 - RNA, 19 nt, Artificial Sequence
  Description of Artificial Sequence: Synthetic oligonucleotide
uuuggauaaaagaugccag

SEQ ID NO: 998570 - RNA, 19 nt, Artificial Sequence
  Description of Artificial Sequence: Synthetic oligonucleotide
aguucguugucuaauaucc

SEQ ID NO: 998571 - RNA, 19 nt, Artificial Sequence
  Description of Artificial Sequence: Synthetic oligonucleotide
agguauacagcauuuuagc

SEQ ID NO: 998572 - RNA, 19 nt, Artificial Sequence
  Description of Artificial Sequence: Synthetic oligonucleotide
uauauccuuaggcugagag

SEQ ID NO: 998573 - RNA, 19 nt, Artificial Sequence
  Description of Artificial Sequence: Synthetic oligonucleotide
caguaguugaaguaaaagg

SEQ ID NO: 998574 - RNA, 19 nt, Artificial Sequence
  Description of Artificial Sequence: Synthetic oligonucleotide
uguuuauaaaagcccaaag

SEQ ID NO: 998575 - RNA, 19 nt, Artificial Sequence
  Description of Artificial Sequence: Synthetic oligonucleotide
ugauaaguugguaagcuga

SEQ ID NO: 998576 - RNA, 19 nt, Artificial Sequence
  Description of Artificial Sequence: Synthetic oligonucleotide
aauacaagacagguugggc

SEQ ID NO: 998577 - RNA, 19 nt, Artificial Sequence
  Description of Artificial Sequence: Synthetic oligonucleotide
uguauaucugaagauaaag

SEQ ID NO: 998578 - RNA, 19 nt, Artificial Sequence
  Description of Artificial Sequence: Synthetic oligonucleotide
caguaagcaaaacagagag

SEQ ID NO: 998579 - RNA, 19 nt, Artificial Sequence
  Description of Artificial Sequence: Synthetic oligonucleotide
acugauuacuuguugaaug

SEQ ID NO: 998580 - RNA, 19 nt, Artificial Sequence
  Description of Artificial Sequence: Synthetic oligonucleotide
gaggcucuaauuuaaguag

SEQ ID NO: 998581 - RNA, 19 nt, Artificial Sequence
  Description of Artificial Sequence: Synthetic oligonucleotide
ucaucuacaaauccugucu

SEQ ID NO: 998582 - RNA, 19 nt, Artificial Sequence
  Description of Artificial Sequence: Synthetic oligonucleotide
uccguuagcagccagggug

SEQ ID NO: 998583 - RNA, 19 nt, Artificial Sequence
  Description of Artificial Sequence: Synthetic oligonucleotide
uauacagcauuuuagcuuc

SEQ ID NO: 998584 - RNA, 19 nt, Artificial Sequence
  Description of Artificial Sequence: Synthetic oligonucleotide
auucaauagagcagcaucc

SEQ ID NO: 998585 - RNA, 19 nt, Artificial Sequence
  Description of Artificial Sequence: Synthetic oligonucleotide
uguaaaacggacccauuug

SEQ ID NO: 998586 - RNA, 19 nt, Artificial Sequence
  Description of Artificial Sequence: Synthetic oligonucleotide
aguagggacauccuagccg

SEQ ID NO: 998587 - RNA, 19 nt, Artificial Sequence
  Description of Artificial Sequence: Synthetic oligonucleotide
guauugauaaguugguaag

SEQ ID NO: 998588 - RNA, 19 nt, Artificial Sequence
  Description of Artificial Sequence: Synthetic oligonucleotide
agauuuuaucaggugagcc

SEQ ID NO: 998589 - RNA, 19 nt, Artificial Sequence
  Description of Artificial Sequence: Synthetic oligonucleotide
auuuuaucaggugagccac

SEQ ID NO: 998590 - RNA, 19 nt, Artificial Sequence
  Description of Artificial Sequence: Synthetic oligonucleotide
uauacucuucuucgaaggg

SEQ ID NO: 998591 - RNA, 19 nt, Artificial Sequence
  Description of Artificial Sequence: Synthetic oligonucleotide
gagguagucauauuaguac

SEQ ID NO: 998592 - RNA, 19 nt, Artificial Sequence
  Description of Artificial Sequence: Synthetic oligonucleotide
aggucaguaaaguuacuac

SEQ ID NO: 998593 - RNA, 19 nt, Artificial Sequence
  Description of Artificial Sequence: Synthetic oligonucleotide
guuacccucagguauacag

SEQ ID NO: 998594 - RNA, 19 nt, Artificial Sequence
  Description of Artificial Sequence: Synthetic oligonucleotide
guuacuaccugacuuauca

SEQ ID NO: 998595 - RNA, 19 nt, Artificial Sequence
  Description of Artificial Sequence: Synthetic oligonucleotide
aaagagacgcuucaacagu

SEQ ID NO: 998596 - RNA, 19 nt, Artificial Sequence
  Description of Artificial Sequence: Synthetic oligonucleotide
ugacuuaucagcuucggau

SEQ ID NO: 998597 - RNA, 19 nt, Artificial Sequence
  Description of Artificial Sequence: Synthetic oligonucleotide
ugcccuauacucuucuucg

SEQ ID NO: 998598 - RNA, 19 nt, Artificial Sequence
  Description of Artificial Sequence: Synthetic oligonucleotide
auaacuguaguucguuguc

SEQ ID NO: 998599 - RNA, 19 nt, Artificial Sequence
  Description of Artificial Sequence: Synthetic oligonucleotide
aauauccaaagcaucacca

SEQ ID NO: 998600 - RNA, 19 nt, Artificial Sequence
  Description of Artificial Sequence: Synthetic oligonucleotide
aguaaaguuacuaccugac

SEQ ID NO: 998601 - RNA, 19 nt, Artificial Sequence
  Description of Artificial Sequence: Synthetic oligonucleotide
aaaguaugacugcuguuca

SEQ ID NO: 998602 - RNA, 19 nt, Artificial Sequence
  Description of Artificial Sequence: Synthetic oligonucleotide
ugucuaauauccaaagcau

SEQ ID NO: 998603 - RNA, 19 nt, Artificial Sequence
  Description of Artificial Sequence: Synthetic oligonucleotide
uguuucuaaagccucugcu

SEQ ID NO: 998604 - RNA, 19 nt, Artificial Sequence
  Description of Artificial Sequence: Synthetic oligonucleotide
uaaguugguaagcugaaua

SEQ ID NO: 998605 - RNA, 19 nt, Artificial Sequence
  Description of Artificial Sequence: Synthetic oligonucleotide
gauuuuaucaggugagcca

SEQ ID NO: 998606 - RNA, 19 nt, Artificial Sequence
  Description of Artificial Sequence: Synthetic oligonucleotide
aagcacagcauucaauaga

SEQ ID NO: 998607 - RNA, 19 nt, Artificial Sequence
  Description of Artificial Sequence: Synthetic oligonucleotide
acagugcacccucugaucg

SEQ ID NO: 998608 - RNA, 19 nt, Artificial Sequence
  Description of Artificial Sequence: Synthetic oligonucleotide
cagcaaacugaguaaaugc

SEQ ID NO: 998609 - RNA, 19 nt, Artificial Sequence
  Description of Artificial Sequence: Synthetic oligonucleotide
cauucaauagagcagcauc

SEQ ID NO: 998610 - RNA, 19 nt, Artificial Sequence
  Description of Artificial Sequence: Synthetic oligonucleotide
ggugacaugauguaaacca

SEQ ID NO: 998611 - RNA, 19 nt, Artificial Sequence
  Description of Artificial Sequence: Synthetic oligonucleotide
auacaagacagguugggca

SEQ ID NO: 998612 - RNA, 19 nt, Artificial Sequence
  Description of Artificial Sequence: Synthetic oligonucleotide
aacuucaauaacuguaguu

SEQ ID NO: 998613 - RNA, 19 nt, Artificial Sequence
  Description of Artificial Sequence: Synthetic oligonucleotide
guuucuaaagccucugcug

SEQ ID NO: 998614 - RNA, 19 nt, Artificial Sequence
  Description of Artificial Sequence: Synthetic oligonucleotide
cagguauacagcauuuuag

SEQ ID NO: 998615 - RNA, 19 nt, Artificial Sequence
  Description of Artificial Sequence: Synthetic oligonucleotide
uggaacuaucucuucauga

SEQ ID NO: 998616 - RNA, 19 nt, Artificial Sequence
  Description of Artificial Sequence: Synthetic oligonucleotide
uguucccucagcaaacuga

SEQ ID NO: 998617 - RNA, 19 nt, Artificial Sequence
  Description of Artificial Sequence: Synthetic oligonucleotide
aaaauagcuuugaguaggg

SEQ ID NO: 998618 - RNA, 19 nt, Artificial Sequence
  Description of Artificial Sequence: Synthetic oligonucleotide
gaauguuuauaaaagccca

SEQ ID NO: 998619 - RNA, 19 nt, Artificial Sequence
  Description of Artificial Sequence: Synthetic oligonucleotide
aucagcuucggaucuacag

SEQ ID NO: 998620 - RNA, 19 nt, Artificial Sequence
  Description of Artificial Sequence: Synthetic oligonucleotide
aguaugacugcuguucaac

SEQ ID NO: 998621 - RNA, 19 nt, Artificial Sequence
  Description of Artificial Sequence: Synthetic oligonucleotide
ugagcagucagagagaguu

SEQ ID NO: 998622 - RNA, 19 nt, Artificial Sequence
  Description of Artificial Sequence: Synthetic oligonucleotide
acauccuagccguagcuuc

SEQ ID NO: 998623 - RNA, 19 nt, Artificial Sequence
  Description of Artificial Sequence: Synthetic oligonucleotide
gacaacaaguaggaguagg

SEQ ID NO: 998624 - RNA, 19 nt, Artificial Sequence
  Description of Artificial Sequence: Synthetic oligonucleotide
acaacuucaauaacuguag

SEQ ID NO: 998625 - RNA, 19 nt, Artificial Sequence
  Description of Artificial Sequence: Synthetic oligonucleotide
cagagagucaaguucugcc

SEQ ID NO: 998626 - RNA, 19 nt, Artificial Sequence
  Description of Artificial Sequence: Synthetic oligonucleotide
uauugauaaguugguaagc

SEQ ID NO: 998627 - RNA, 19 nt, Artificial Sequence
  Description of Artificial Sequence: Synthetic oligonucleotide
uugaaaugcugcccuauac

SEQ ID NO: 998628 - RNA, 19 nt, Artificial Sequence
  Description of Artificial Sequence: Synthetic oligonucleotide
ugagguagucauauuagua

SEQ ID NO: 998629 - RNA, 19 nt, Artificial Sequence
  Description of Artificial Sequence: Synthetic oligonucleotide
augauuuguucccucagca

SEQ ID NO: 998630 - RNA, 19 nt, Artificial Sequence
  Description of Artificial Sequence: Synthetic oligonucleotide
uacucuucuucgaagggga

SEQ ID NO: 998631 - RNA, 19 nt, Artificial Sequence
  Description of Artificial Sequence: Synthetic oligonucleotide
ucaggugagccacuaaggu

SEQ ID NO: 998632 - RNA, 19 nt, Artificial Sequence
  Description of Artificial Sequence: Synthetic oligonucleotide
uggcuagcaguaaagcaag

SEQ ID NO: 998633 - RNA, 19 nt, Artificial Sequence
  Description of Artificial Sequence: Synthetic oligonucleotide
uuccauaucuagcaaggaa

SEQ ID NO: 998634 - RNA, 19 nt, Artificial Sequence
  Description of Artificial Sequence: Synthetic oligonucleotide
uaaaacggacccauuugcu

SEQ ID NO: 998635 - RNA, 19 nt, Artificial Sequence
  Description of Artificial Sequence: Synthetic oligonucleotide
augcaauguacagugcacc

SEQ ID NO: 998636 - RNA, 19 nt, Artificial Sequence
  Description of Artificial Sequence: Synthetic oligonucleotide
uaugacugcuguucaacca

SEQ ID NO: 998637 - RNA, 19 nt, Artificial Sequence
  Description of Artificial Sequence: Synthetic oligonucleotide
ugcaauguacagugcaccc

SEQ ID NO: 998638 - RNA, 19 nt, Artificial Sequence
  Description of Artificial Sequence: Synthetic oligonucleotide
cuagccguagcuucugugc

SEQ ID NO: 998639 - RNA, 19 nt, Artificial Sequence
  Description of Artificial Sequence: Synthetic oligonucleotide
cucugaucgcgucacaugc

SEQ ID NO: 998640 - RNA, 19 nt, Artificial Sequence
  Description of Artificial Sequence: Synthetic oligonucleotide
guugucuaauauccaaagc

SEQ ID NO: 998641 - RNA, 19 nt, Artificial Sequence
  Description of Artificial Sequence: Synthetic oligonucleotide
agguagucauauuaguacu

SEQ ID NO: 998642 - RNA, 19 nt, Artificial Sequence
  Description of Artificial Sequence: Synthetic oligonucleotide
uagucauauuaguacuaag

SEQ ID NO: 998643 - RNA, 19 nt, Artificial Sequence
  Description of Artificial Sequence: Synthetic oligonucleotide
guuuggauaaaagaugcca

SEQ ID NO: 998644 - RNA, 19 nt, Artificial Sequence
  Description of Artificial Sequence: Synthetic oligonucleotide
auguguuacccucagguau

SEQ ID NO: 998645 - RNA, 19 nt, Artificial Sequence
  Description of Artificial Sequence: Synthetic oligonucleotide
auagcuuugaguagggaca

SEQ ID NO: 998646 - RNA, 19 nt, Artificial Sequence
  Description of Artificial Sequence: Synthetic oligonucleotide
cugaacguagggcugacug

SEQ ID NO: 998647 - RNA, 19 nt, Artificial Sequence
  Description of Artificial Sequence: Synthetic oligonucleotide
gacuuaucagcuucggauc

SEQ ID NO: 998648 - RNA, 19 nt, Artificial Sequence
  Description of Artificial Sequence: Synthetic oligonucleotide
aagcuggugcaaaauacag

SEQ ID NO: 998649 - RNA, 19 nt, Artificial Sequence
  Description of Artificial Sequence: Synthetic oligonucleotide
caugauuuguucccucagc

SEQ ID NO: 998650 - RNA, 19 nt, Artificial Sequence
  Description of Artificial Sequence: Synthetic oligonucleotide
uucgaaggggagcucacga

SEQ ID NO: 998651 - RNA, 19 nt, Artificial Sequence
  Description of Artificial Sequence: Synthetic oligonucleotide
uuguuucuaaagccucugc

SEQ ID NO: 998652 - RNA, 19 nt, Artificial Sequence
  Description of Artificial Sequence: Synthetic oligonucleotide
auaaagcuggugcaaaaua

SEQ ID NO: 998653 - RNA, 19 nt, Artificial Sequence
  Description of Artificial Sequence: Synthetic oligonucleotide
acuuaucagcuucggaucu

SEQ ID NO: 998654 - RNA, 19 nt, Artificial Sequence
  Description of Artificial Sequence: Synthetic oligonucleotide
uuaguacuaagcacagcau

SEQ ID NO: 998655 - RNA, 19 nt, Artificial Sequence
  Description of Artificial Sequence: Synthetic oligonucleotide
uaauuuaaguagugagguc

SEQ ID NO: 998656 - RNA, 19 nt, Artificial Sequence
  Description of Artificial Sequence: Synthetic oligonucleotide
aaacagagagugcuguguu

SEQ ID NO: 998657 - RNA, 19 nt, Artificial Sequence
  Description of Artificial Sequence: Synthetic oligonucleotide
uuaaguagugaggucagua

SEQ ID NO: 998658 - RNA, 19 nt, Artificial Sequence
  Description of Artificial Sequence: Synthetic oligonucleotide
ugcagugcauccaguuccg

SEQ ID NO: 998659 - RNA, 19 nt, Artificial Sequence
  Description of Artificial Sequence: Synthetic oligonucleotide
uuacuaccugacuuaucag

SEQ ID NO: 998660 - RNA, 19 nt, Artificial Sequence
  Description of Artificial Sequence: Synthetic oligonucleotide
guaugacugcuguucaacc

SEQ ID NO: 998661 - RNA, 19 nt, Artificial Sequence
  Description of Artificial Sequence: Synthetic oligonucleotide
uucuagcagccaauucccg

SEQ ID NO: 998662 - RNA, 19 nt, Artificial Sequence
  Description of Artificial Sequence: Synthetic oligonucleotide
auucauguguuacccucag

SEQ ID NO: 998663 - RNA, 19 nt, Artificial Sequence
  Description of Artificial Sequence: Synthetic oligonucleotide
guaguugaaguaaaaggca

SEQ ID NO: 998664 - RNA, 19 nt, Artificial Sequence
  Description of Artificial Sequence: Synthetic oligonucleotide
uugcuaacaaugagguagu

SEQ ID NO: 998665 - RNA, 19 nt, Artificial Sequence
  Description of Artificial Sequence: Synthetic oligonucleotide
uguaguucguugucuaaua

SEQ ID NO: 998666 - RNA, 19 nt, Artificial Sequence
  Description of Artificial Sequence: Synthetic oligonucleotide
uguuucacauaguccacuc

SEQ ID NO: 998667 - RNA, 19 nt, Artificial Sequence
  Description of Artificial Sequence: Synthetic oligonucleotide
aauguuuauaaaagcccaa

SEQ ID NO: 998668 - RNA, 19 nt, Artificial Sequence
  Description of Artificial Sequence: Synthetic oligonucleotide
ggaucuacaguuuggauaa

SEQ ID NO: 998669 - RNA, 19 nt, Artificial Sequence
  Description of Artificial Sequence: Synthetic oligonucleotide
ucguugucuaauauccaaa

SEQ ID NO: 998670 - RNA, 19 nt, Artificial Sequence
  Description of Artificial Sequence: Synthetic oligonucleotide
uaguucguugucuaauauc

SEQ ID NO: 998671 - RNA, 19 nt, Artificial Sequence
  Description of Artificial Sequence: Synthetic oligonucleotide
agugcauccaguuccguua

SEQ ID NO: 998672 - RNA, 19 nt, Artificial Sequence
  Description of Artificial Sequence: Synthetic oligonucleotide
agcaagaauacaagacagg

SEQ ID NO: 998673 - RNA, 19 nt, Artificial Sequence
  Description of Artificial Sequence: Synthetic oligonucleotide
aacuguaguucguugucua

SEQ ID NO: 998674 - RNA, 19 nt, Artificial Sequence
  Description of Artificial Sequence: Synthetic oligonucleotide
agcuggugcaaaauacagc

SEQ ID NO: 998675 - RNA, 19 nt, Artificial Sequence
  Description of Artificial Sequence: Synthetic oligonucleotide
ugaacguagggcugacuga

SEQ ID NO: 998676 - RNA, 19 nt, Artificial Sequence
  Description of Artificial Sequence: Synthetic oligonucleotide
auuuaaguagugaggucag

SEQ ID NO: 998677 - RNA, 19 nt, Artificial Sequence
  Description of Artificial Sequence: Synthetic oligonucleotide
uucagaacugagacacugu

SEQ ID NO: 998678 - RNA, 19 nt, Artificial Sequence
  Description of Artificial Sequence: Synthetic oligonucleotide
aaagaugccaguaguugaa

SEQ ID NO: 998679 - RNA, 19 nt, Artificial Sequence
  Description of Artificial Sequence: Synthetic oligonucleotide
gcaagauuuuaucagguga

SEQ ID NO: 998680 - RNA, 19 nt, Artificial Sequence
  Description of Artificial Sequence: Synthetic oligonucleotide
ggagcaacaacucaguugu

SEQ ID NO: 998681 - RNA, 19 nt, Artificial Sequence
  Description of Artificial Sequence: Synthetic oligonucleotide
cuggcuagcaguaaagcaa

SEQ ID NO: 998682 - RNA, 19 nt, Artificial Sequence
  Description of Artificial Sequence: Synthetic oligonucleotide
aguucaccagaacacugcu

SEQ ID NO: 998683 - RNA, 19 nt, Artificial Sequence
  Description of Artificial Sequence: Synthetic oligonucleotide
cuggauaaauuccaccuga

SEQ ID NO: 998684 - RNA, 19 nt, Artificial Sequence
  Description of Artificial Sequence: Synthetic oligonucleotide
uggauaaaagaugccagua

SEQ ID NO: 998685 - RNA, 19 nt, Artificial Sequence
  Description of Artificial Sequence: Synthetic oligonucleotide
ugcuguauaucugaagaua

SEQ ID NO: 998686 - RNA, 19 nt, Artificial Sequence
  Description of Artificial Sequence: Synthetic oligonucleotide
gguucuguauauccuuagg

SEQ ID NO: 998687 - RNA, 19 nt, Artificial Sequence
  Description of Artificial Sequence: Synthetic oligonucleotide
ugcccuuuaugcuuuacuu

SEQ ID NO: 998688 - RNA, 19 nt, Artificial Sequence
  Description of Artificial Sequence: Synthetic oligonucleotide
guuccguuagcagccaggg

SEQ ID NO: 998689 - RNA, 19 nt, Artificial Sequence
  Description of Artificial Sequence: Synthetic oligonucleotide
agagaggauauaaaaucca

SEQ ID NO: 998690 - RNA, 19 nt, Artificial Sequence
  Description of Artificial Sequence: Synthetic oligonucleotide
uucaugcaauguacagugc

SEQ ID NO: 998691 - RNA, 19 nt, Artificial Sequence
  Description of Artificial Sequence: Synthetic oligonucleotide
uuacuuguugaauguuuau

SEQ ID NO: 998692 - RNA, 19 nt, Artificial Sequence
  Description of Artificial Sequence: Synthetic oligonucleotide
gcaagaaucggacaggaaa

SEQ ID NO: 998693 - RNA, 19 nt, Artificial Sequence
  Description of Artificial Sequence: Synthetic oligonucleotide
cuacaaauccugucuuuuc

SEQ ID NO: 998694 - RNA, 19 nt, Artificial Sequence
  Description of Artificial Sequence: Synthetic oligonucleotide
ucgcgucacaugcagcuug

SEQ ID NO: 998695 - RNA, 19 nt, Artificial Sequence
  Description of Artificial Sequence: Synthetic oligonucleotide
aaggggagcucacgacggg

SEQ ID NO: 998696 - RNA, 19 nt, Artificial Sequence
  Description of Artificial Sequence: Synthetic oligonucleotide
auucccgcuggcuagcagu

SEQ ID NO: 998697 - RNA, 19 nt, Artificial Sequence
  Description of Artificial Sequence: Synthetic oligonucleotide
ugcaccacagguucuguau

SEQ ID NO: 998698 - RNA, 19 nt, Artificial Sequence
  Description of Artificial Sequence: Synthetic oligonucleotide
gaguagggacauccuagcc

SEQ ID NO: 998699 - RNA, 19 nt, Artificial Sequence
  Description of Artificial Sequence: Synthetic oligonucleotide
aauucccgcuggcuagcag

SEQ ID NO: 998700 - RNA, 19 nt, Artificial Sequence
  Description of Artificial Sequence: Synthetic oligonucleotide
cugaucgcgucacaugcag

SEQ ID NO: 998701 - RNA, 19 nt, Artificial Sequence
  Description of Artificial Sequence: Synthetic oligonucleotide
aacggacccauuugcugcu

SEQ ID NO: 998702 - RNA, 19 nt, Artificial Sequence
  Description of Artificial Sequence: Synthetic oligonucleotide
uggauaaauuccaccugau

SEQ ID NO: 998703 - RNA, 19 nt, Artificial Sequence
  Description of Artificial Sequence: Synthetic oligonucleotide
uauuaguacuaagcacagc

SEQ ID NO: 998704 - RNA, 19 nt, Artificial Sequence
  Description of Artificial Sequence: Synthetic oligonucleotide
ucugaucgcgucacaugca

SEQ ID NO: 998705 - RNA, 19 nt, Artificial Sequence
  Description of Artificial Sequence: Synthetic oligonucleotide
guugaaguaaaaggcaaaa

SEQ ID NO: 998706 - RNA, 19 nt, Artificial Sequence
  Description of Artificial Sequence: Synthetic oligonucleotide
cugccugcacaaaaggcug

SEQ ID NO: 998707 - RNA, 19 nt, Artificial Sequence
  Description of Artificial Sequence: Synthetic oligonucleotide
gguugugagcagcugacug

SEQ ID NO: 998708 - RNA, 19 nt, Artificial Sequence
  Description of Artificial Sequence: Synthetic oligonucleotide
aggaaacuugcuguauauc

SEQ ID NO: 998709 - RNA, 19 nt, Artificial Sequence
  Description of Artificial Sequence: Synthetic oligonucleotide
acaguaaccuuggcagugg

SEQ ID NO: 998710 - RNA, 19 nt, Artificial Sequence
  Description of Artificial Sequence: Synthetic oligonucleotide
aauacacucuccagggcaa

SEQ ID NO: 998711 - RNA, 19 nt, Artificial Sequence
  Description of Artificial Sequence: Synthetic oligonucleotide
acaacaaguaggaguagga

SEQ ID NO: 998712 - RNA, 19 nt, Artificial Sequence
  Description of Artificial Sequence: Synthetic oligonucleotide
caguaaaguuacuaccuga

SEQ ID NO: 998713 - RNA, 19 nt, Artificial Sequence
  Description of Artificial Sequence: Synthetic oligonucleotide
cauaguccacucuggcagc

SEQ ID NO: 998714 - RNA, 19 nt, Artificial Sequence
  Description of Artificial Sequence: Synthetic oligonucleotide
uaacuguaguucguugucu

SEQ ID NO: 998715 - RNA, 19 nt, Artificial Sequence
  Description of Artificial Sequence: Synthetic oligonucleotide
aaauugccugcuauuuccu

SEQ ID NO: 998716 - RNA, 19 nt, Artificial Sequence
  Description of Artificial Sequence: Synthetic oligonucleotide
uuaucagcuucggaucuac

SEQ ID NO: 998717 - RNA, 19 nt, Artificial Sequence
  Description of Artificial Sequence: Synthetic oligonucleotide
ggaaauacacugccaaaga

SEQ ID NO: 998718 - RNA, 19 nt, Artificial Sequence
  Description of Artificial Sequence: Synthetic oligonucleotide
aaauagcuuugaguaggga

SEQ ID NO: 998719 - RNA, 19 nt, Artificial Sequence
  Description of Artificial Sequence: Synthetic oligonucleotide
caacaaguaggaguaggac

SEQ ID NO: 998720 - RNA, 19 nt, Artificial Sequence
  Description of Artificial Sequence: Synthetic oligonucleotide
aaguuacuaccugacuuau

SEQ ID NO: 998721 - RNA, 19 nt, Artificial Sequence
  Description of Artificial Sequence: Synthetic oligonucleotide
auaaaagaugccaguaguu

SEQ ID NO: 998722 - RNA, 19 nt, Artificial Sequence
  Description of Artificial Sequence: Synthetic oligonucleotide
cagcuuauccaugacaaca

SEQ ID NO: 998723 - RNA, 19 nt, Artificial Sequence
  Description of Artificial Sequence: Synthetic oligonucleotide
gaucgcgucacaugcagcu

SEQ ID NO: 998724 - RNA, 19 nt, Artificial Sequence
  Description of Artificial Sequence: Synthetic oligonucleotide
gauaaguugguaagcugaa

SEQ ID NO: 998725 - RNA, 19 nt, Artificial Sequence
  Description of Artificial Sequence: Synthetic oligonucleotide
gcugauauaaagugacaga

SEQ ID NO: 998726 - RNA, 19 nt, Artificial Sequence
  Description of Artificial Sequence: Synthetic oligonucleotide
gucuaauauccaaagcauc

SEQ ID NO: 998727 - RNA, 19 nt, Artificial Sequence
  Description of Artificial Sequence: Synthetic oligonucleotide
ugaucgcgucacaugcagc

SEQ ID NO: 998728 - RNA, 19 nt, Artificial Sequence
  Description of Artificial Sequence: Synthetic oligonucleotide
aguuccguuagcagccagg

SEQ ID NO: 998729 - RNA, 19 nt, Artificial Sequence
  Description of Artificial Sequence: Synthetic oligonucleotide
gaguaggacuugugggagc

SEQ ID NO: 998730 - RNA, 19 nt, Artificial Sequence
  Description of Artificial Sequence: Synthetic oligonucleotide
cuuauccaugacaacaagu

SEQ ID NO: 998731 - RNA, 19 nt, Artificial Sequence
  Description of Artificial Sequence: Synthetic oligonucleotide
guggaacuaucucuucaug

SEQ ID NO: 998732 - RNA, 19 nt, Artificial Sequence
  Description of Artificial Sequence: Synthetic oligonucleotide
gaguuguucuagcagccaa

SEQ ID NO: 998733 - RNA, 19 nt, Artificial Sequence
  Description of Artificial Sequence: Synthetic oligonucleotide
agaaucggacaggaaagga

SEQ ID NO: 998734 - RNA, 19 nt, Artificial Sequence
  Description of Artificial Sequence: Synthetic oligonucleotide
ucgaaggggagcucacgac

SEQ ID NO: 998735 - RNA, 19 nt, Artificial Sequence
  Description of Artificial Sequence: Synthetic oligonucleotide
ggaggcucuaauuuaagua

SEQ ID NO: 998736 - RNA, 19 nt, Artificial Sequence
  Description of Artificial Sequence: Synthetic oligonucleotide
guagggacauccuagccgu

SEQ ID NO: 998737 - RNA, 19 nt, Artificial Sequence
  Description of Artificial Sequence: Synthetic oligonucleotide
aggaaauugccugcuauuu

SEQ ID NO: 998738 - RNA, 19 nt, Artificial Sequence
  Description of Artificial Sequence: Synthetic oligonucleotide
uuuaaguagugaggucagu

SEQ ID NO: 998739 - RNA, 19 nt, Artificial Sequence
  Description of Artificial Sequence: Synthetic oligonucleotide
cauucauguguuacccuca

SEQ ID NO: 998740 - RNA, 19 nt, Artificial Sequence
  Description of Artificial Sequence: Synthetic oligonucleotide
ugcuguguucagagaguca

SEQ ID NO: 998741 - RNA, 19 nt, Artificial Sequence
  Description of Artificial Sequence: Synthetic oligonucleotide
gguaaugccugaaaggaaa

SEQ ID NO: 998742 - RNA, 19 nt, Artificial Sequence
  Description of Artificial Sequence: Synthetic oligonucleotide
aagagacgcuucaacagua

SEQ ID NO: 998743 - RNA, 19 nt, Artificial Sequence
  Description of Artificial Sequence: Synthetic oligonucleotide
agcaaaacagagagugcug

SEQ ID NO: 998744 - RNA, 19 nt, Artificial Sequence
  Description of Artificial Sequence: Synthetic oligonucleotide
gaggucaguaaaguuacua

SEQ ID NO: 998745 - RNA, 19 nt, Artificial Sequence
  Description of Artificial Sequence: Synthetic oligonucleotide
guagucauauuaguacuaa

SEQ ID NO: 998746 - RNA, 19 nt, Artificial Sequence
  Description of Artificial Sequence: Synthetic oligonucleotide
acguagggcugacugauua

SEQ ID NO: 998747 - RNA, 19 nt, Artificial Sequence
  Description of Artificial Sequence: Synthetic oligonucleotide
cguugucuaauauccaaag

SEQ ID NO: 998748 - RNA, 19 nt, Artificial Sequence
  Description of Artificial Sequence: Synthetic oligonucleotide
guacuaagcacagcauuca

SEQ ID NO: 998749 - RNA, 19 nt, Artificial Sequence
  Description of Artificial Sequence: Synthetic oligonucleotide
agcaacaacucaguuguuu

SEQ ID NO: 998750 - RNA, 19 nt, Artificial Sequence
  Description of Artificial Sequence: Synthetic oligonucleotide
ccaguaguugaaguaaaag

SEQ ID NO: 998751 - RNA, 19 nt, Artificial Sequence
  Description of Artificial Sequence: Synthetic oligonucleotide
cuuaggcugagagggcagc

SEQ ID NO: 998752 - RNA, 19 nt, Artificial Sequence
  Description of Artificial Sequence: Synthetic oligonucleotide
ugacaacaaguaggaguag

SEQ ID NO: 998753 - RNA, 19 nt, Artificial Sequence
  Description of Artificial Sequence: Synthetic oligonucleotide
aguggguccaguaccacaa

SEQ ID NO: 998754 - RNA, 19 nt, Artificial Sequence
  Description of Artificial Sequence: Synthetic oligonucleotide
aguuacuaccugacuuauc

SEQ ID NO: 998755 - RNA, 19 nt, Artificial Sequence
  Description of Artificial Sequence: Synthetic oligonucleotide
augccugaaaggaaauaca

SEQ ID NO: 998756 - RNA, 19 nt, Artificial Sequence
  Description of Artificial Sequence: Synthetic oligonucleotide
ucggaucuacaguuuggau

SEQ ID NO: 998757 - RNA, 19 nt, Artificial Sequence
  Description of Artificial Sequence: Synthetic oligonucleotide
agggacauccuagccguag

SEQ ID NO: 998758 - RNA, 19 nt, Artificial Sequence
  Description of Artificial Sequence: Synthetic oligonucleotide
cagagagacauggucagga

SEQ ID NO: 998759 - RNA, 19 nt, Artificial Sequence
  Description of Artificial Sequence: Synthetic oligonucleotide
uaaugccugaaaggaaaua

SEQ ID NO: 998760 - RNA, 19 nt, Artificial Sequence
  Description of Artificial Sequence: Synthetic oligonucleotide
auguaggcuuggaggaaac

SEQ ID NO: 998761 - RNA, 19 nt, Artificial Sequence
  Description of Artificial Sequence: Synthetic oligonucleotide
cuguauaucugaagauaaa

SEQ ID NO: 998762 - RNA, 19 nt, Artificial Sequence
  Description of Artificial Sequence: Synthetic oligonucleotide
cuucgaaggggagcucacg

SEQ ID NO: 998763 - RNA, 19 nt, Artificial Sequence
  Description of Artificial Sequence: Synthetic oligonucleotide
augccuccaaagugaguug

SEQ ID NO: 998764 - RNA, 19 nt, Artificial Sequence
  Description of Artificial Sequence: Synthetic oligonucleotide
uucuccuguuucacauagu

SEQ ID NO: 998765 - RNA, 19 nt, Artificial Sequence
  Description of Artificial Sequence: Synthetic oligonucleotide
agccaauucccgcuggcua

SEQ ID NO: 998766 - RNA, 19 nt, Artificial Sequence
  Description of Artificial Sequence: Synthetic oligonucleotide
aggcucuaauuuaaguagu

SEQ ID NO: 998767 - RNA, 19 nt, Artificial Sequence
  Description of Artificial Sequence: Synthetic oligonucleotide
uagcuuugaguagggacau

SEQ ID NO: 998768 - RNA, 19 nt, Artificial Sequence
  Description of Artificial Sequence: Synthetic oligonucleotide
cauaucuagcaaggaaaca

SEQ ID NO: 998769 - RNA, 19 nt, Artificial Sequence
  Description of Artificial Sequence: Synthetic oligonucleotide
auaaguugguaagcugaau

SEQ ID NO: 998770 - RNA, 19 nt, Artificial Sequence
  Description of Artificial Sequence: Synthetic oligonucleotide
acaaugagguagucauauu

SEQ ID NO: 998771 - RNA, 19 nt, Artificial Sequence
  Description of Artificial Sequence: Synthetic oligonucleotide
cagugcacccucugaucgc

SEQ ID NO: 998772 - RNA, 19 nt, Artificial Sequence
  Description of Artificial Sequence: Synthetic oligonucleotide
ggcucuaauuuaaguagug

SEQ ID NO: 998773 - RNA, 19 nt, Artificial Sequence
  Description of Artificial Sequence: Synthetic oligonucleotide
uuccguuagcagccagggu

SEQ ID NO: 998774 - RNA, 19 nt, Artificial Sequence
  Description of Artificial Sequence: Synthetic oligonucleotide
cuguuggagcaacaacuca

SEQ ID NO: 998775 - RNA, 19 nt, Artificial Sequence
  Description of Artificial Sequence: Synthetic oligonucleotide
gcuaacaaugagguaguca

SEQ ID NO: 998776 - RNA, 19 nt, Artificial Sequence
  Description of Artificial Sequence: Synthetic oligonucleotide
cugacuuaucagcuucgga

SEQ ID NO: 998777 - RNA, 19 nt, Artificial Sequence
  Description of Artificial Sequence: Synthetic oligonucleotide
aguuguucuagcagccaau

SEQ ID NO: 998778 - RNA, 19 nt, Artificial Sequence
  Description of Artificial Sequence: Synthetic oligonucleotide
uucccgcuggcuagcagua

SEQ ID NO: 998779 - RNA, 19 nt, Artificial Sequence
  Description of Artificial Sequence: Synthetic oligonucleotide
cuugaaaugcugcccuaua

SEQ ID NO: 998780 - RNA, 19 nt, Artificial Sequence
  Description of Artificial Sequence: Synthetic oligonucleotide
aucggacaggaaaggaaga

SEQ ID NO: 998781 - RNA, 19 nt, Artificial Sequence
  Description of Artificial Sequence: Synthetic oligonucleotide
gcuguucaaccacuucaug

SEQ ID NO: 998782 - RNA, 19 nt, Artificial Sequence
  Description of Artificial Sequence: Synthetic oligonucleotide
gaacguagggcugacugau

SEQ ID NO: 998783 - RNA, 19 nt, Artificial Sequence
  Description of Artificial Sequence: Synthetic oligonucleotide
gcucuaauuuaaguaguga

SEQ ID NO: 998784 - RNA, 19 nt, Artificial Sequence
  Description of Artificial Sequence: Synthetic oligonucleotide
agguaaugccugaaaggaa

SEQ ID NO: 998785 - RNA, 19 nt, Artificial Sequence
  Description of Artificial Sequence: Synthetic oligonucleotide
guaguucguugucuaauau

SEQ ID NO: 998786 - RNA, 19 nt, Artificial Sequence
  Description of Artificial Sequence: Synthetic oligonucleotide
agucugcccagagaggaua

SEQ ID NO: 998787 - RNA, 19 nt, Artificial Sequence
  Description of Artificial Sequence: Synthetic oligonucleotide
ugccugcuauuuccuccug

SEQ ID NO: 998788 - RNA, 19 nt, Artificial Sequence
  Description of Artificial Sequence: Synthetic oligonucleotide
ugaguggguccaguaccac

SEQ ID NO: 998789 - RNA, 19 nt, Artificial Sequence
  Description of Artificial Sequence: Synthetic oligonucleotide
uguuacccucagguauaca

SEQ ID NO: 998790 - RNA, 19 nt, Artificial Sequence
  Description of Artificial Sequence: Synthetic oligonucleotide
gaugggguggggccaugaa

SEQ ID NO: 998791 - RNA, 19 nt, Artificial Sequence
  Description of Artificial Sequence: Synthetic oligonucleotide
guagggcugacugauuacu

SEQ ID NO: 998792 - RNA, 19 nt, Artificial Sequence
  Description of Artificial Sequence: Synthetic oligonucleotide
gccaaaguaugacugcugu

SEQ ID NO: 998793 - RNA, 19 nt, Artificial Sequence
  Description of Artificial Sequence: Synthetic oligonucleotide
ugcuaacaaugagguaguc

SEQ ID NO: 998794 - RNA, 19 nt, Artificial Sequence
  Description of Artificial Sequence: Synthetic oligonucleotide
acgcuucaacaguauugau

SEQ ID NO: 998795 - RNA, 19 nt, Artificial Sequence
  Description of Artificial Sequence: Synthetic oligonucleotide
cuuugaguagggacauccu

SEQ ID NO: 998796 - RNA, 19 nt, Artificial Sequence
  Description of Artificial Sequence: Synthetic oligonucleotide
cauugcuaacaaugaggua

SEQ ID NO: 998797 - RNA, 19 nt, Artificial Sequence
  Description of Artificial Sequence: Synthetic oligonucleotide
aguaaccuuggcaguggau

SEQ ID NO: 998798 - RNA, 19 nt, Artificial Sequence
  Description of Artificial Sequence: Synthetic oligonucleotide
cacaaaaggcuggguugug

SEQ ID NO: 998799 - RNA, 19 nt, Artificial Sequence
  Description of Artificial Sequence: Synthetic oligonucleotide
agagacgcuucaacaguau

SEQ ID NO: 998800 - RNA, 19 nt, Artificial Sequence
  Description of Artificial Sequence: Synthetic oligonucleotide
ccucugaucgcgucacaug

SEQ ID NO: 998801 - RNA, 19 nt, Artificial Sequence
  Description of Artificial Sequence: Synthetic oligonucleotide
guguuacccucagguauac

SEQ ID NO: 998802 - RNA, 19 nt, Artificial Sequence
  Description of Artificial Sequence: Synthetic oligonucleotide
auccuagccguagcuucug

SEQ ID NO: 998803 - RNA, 19 nt, Artificial Sequence
  Description of Artificial Sequence: Synthetic oligonucleotide
ugcugaacguagggcugac

SEQ ID NO: 998804 - RNA, 19 nt, Artificial Sequence
  Description of Artificial Sequence: Synthetic oligonucleotide
gagacgcuucaacaguauu

SEQ ID NO: 998805 - RNA, 19 nt, Artificial Sequence
  Description of Artificial Sequence: Synthetic oligonucleotide
cggaucuacaguuuggaua

SEQ ID NO: 998806 - RNA, 19 nt, Artificial Sequence
  Description of Artificial Sequence: Synthetic oligonucleotide
cauccuagccguagcuucu

SEQ ID NO: 998807 - RNA, 19 nt, Artificial Sequence
  Description of Artificial Sequence: Synthetic oligonucleotide
gacaccucagcuugcccuu

SEQ ID NO: 998808 - RNA, 19 nt, Artificial Sequence
  Description of Artificial Sequence: Synthetic oligonucleotide
ccuccaaagugaguuguuc

SEQ ID NO: 998809 - RNA, 19 nt, Artificial Sequence
  Description of Artificial Sequence: Synthetic oligonucleotide
caccagaacacugcucaaa

SEQ ID NO: 998810 - RNA, 19 nt, Artificial Sequence
  Description of Artificial Sequence: Synthetic oligonucleotide
aacguagggcugacugauu

SEQ ID NO: 998811 - RNA, 19 nt, Artificial Sequence
  Description of Artificial Sequence: Synthetic oligonucleotide
cuucugugcaccacagguu

SEQ ID NO: 998812 - RNA, 19 nt, Artificial Sequence
  Description of Artificial Sequence: Synthetic oligonucleotide
gacccauuugcugcuucua

SEQ ID NO: 998813 - RNA, 19 nt, Artificial Sequence
  Description of Artificial Sequence: Synthetic oligonucleotide
cugccaaaguaugacugcu

SEQ ID NO: 998814 - RNA, 19 nt, Artificial Sequence
  Description of Artificial Sequence: Synthetic oligonucleotide
agcuugcccuuuaugcuuu

SEQ ID NO: 998815 - RNA, 19 nt, Artificial Sequence
  Description of Artificial Sequence: Synthetic oligonucleotide
cuuaucagcuucggaucua

SEQ ID NO: 998816 - RNA, 19 nt, Artificial Sequence
  Description of Artificial Sequence: Synthetic oligonucleotide
cuguaguucguugucuaau

SEQ ID NO: 998817 - RNA, 19 nt, Artificial Sequence
  Description of Artificial Sequence: Synthetic oligonucleotide
cguagggcugacugauuac

SEQ ID NO: 998818 - RNA, 19 nt, Artificial Sequence
  Description of Artificial Sequence: Synthetic oligonucleotide
ggacauccuagccguagcu

SEQ ID NO: 998819 - RNA, 19 nt, Artificial Sequence
  Description of Artificial Sequence: Synthetic oligonucleotide
gaucuacaguuuggauaaa

SEQ ID NO: 998820 - RNA, 19 nt, Artificial Sequence
  Description of Artificial Sequence: Synthetic oligonucleotide
agcuucggaucuacaguuu

SEQ ID NO: 998821 - RNA, 19 nt, Artificial Sequence
  Description of Artificial Sequence: Synthetic oligonucleotide
ccaauucccgcuggcuagc

SEQ ID NO: 998822 - RNA, 19 nt, Artificial Sequence
  Description of Artificial Sequence: Synthetic oligonucleotide
aucgcgucacaugcagcuu

SEQ ID NO: 998823 - RNA, 19 nt, Artificial Sequence
  Description of Artificial Sequence: Synthetic oligonucleotide
gggagcucacgacgggcuc

SEQ ID NO: 998824 - RNA, 19 nt, Artificial Sequence
  Description of Artificial Sequence: Synthetic oligonucleotide
caauucccgcuggcuagca

SEQ ID NO: 998825 - RNA, 19 nt, Artificial Sequence
  Description of Artificial Sequence: Synthetic oligonucleotide
cucagguauacagcauuuu

SEQ ID NO: 998826 - RNA, 19 nt, Artificial Sequence
  Description of Artificial Sequence: Synthetic oligonucleotide
ggcuagcaguaaagcaaga

SEQ ID NO: 998827 - RNA, 19 nt, Artificial Sequence
  Description of Artificial Sequence: Synthetic oligonucleotide
ccucagguauacagcauuu

SEQ ID NO: 998828 - RNA, 19 nt, Artificial Sequence
  Description of Artificial Sequence: Synthetic oligonucleotide
ggggagcucacgacgggcu

SEQ ID NO: 998829 - RNA, 19 nt, Artificial Sequence
  Description of Artificial Sequence: Synthetic oligonucleotide
ccaaaguaugacugcuguu

SEQ ID NO: 998830 - RNA, 19 nt, Artificial Sequence
  Description of Artificial Sequence: Synthetic oligonucleotide
acggacccauuugcugcuu

SEQ ID NO: 998831 - RNA, 19 nt, Artificial Sequence
  Description of Artificial Sequence: Synthetic oligonucleotide
gagcucacgacgggcucuu

SEQ ID NO: 998832 - RNA, 19 nt, Artificial Sequence
  Description of Artificial Sequence: Synthetic oligonucleotide
gcucacgacgggcucuuuu

SEQ ID NO: 998833 - RNA, 19 nt, Artificial Sequence
  Description of Artificial Sequence: Synthetic oligonucleotide
ccguagcuucugugcacca

SEQ ID NO: 998834 - RNA, 19 nt, Artificial Sequence
  Description of Artificial Sequence: Synthetic oligonucleotide
gcuugcccuuuaugcuuua

SEQ ID NO: 998835 - RNA, 19 nt, Artificial Sequence
  Description of Artificial Sequence: Synthetic oligonucleotide
gagcaacaacucaguuguu

SEQ ID NO: 998836 - RNA, 19 nt, Artificial Sequence
  Description of Artificial Sequence: Synthetic oligonucleotide
agcucacgacgggcucuuu

SEQ ID NO: 998837 - RNA, 19 nt, Artificial Sequence
  Description of Artificial Sequence: Synthetic oligonucleotide
ugaagcuuaacacugaugg

SEQ ID NO: 998838 - RNA, 19 nt, Artificial Sequence
  Description of Artificial Sequence: Synthetic oligonucleotide
ugagauuuagauuacaagg

SEQ ID NO: 998839 - RNA, 19 nt, Artificial Sequence
  Description of Artificial Sequence: Synthetic oligonucleotide
aauuauugaauagauagag

SEQ ID NO: 998840 - RNA, 19 nt, Artificial Sequence
  Description of Artificial Sequence: Synthetic oligonucleotide
auugaauagauagagaagg

SEQ ID NO: 998841 - RNA, 19 nt, Artificial Sequence
  Description of Artificial Sequence: Synthetic oligonucleotide
acuauaaugagucuuagga

SEQ ID NO: 998842 - RNA, 19 nt, Artificial Sequence
  Description of Artificial Sequence: Synthetic oligonucleotide
aacagcacucaucacacgc

SEQ ID NO: 998843 - RNA, 19 nt, Artificial Sequence
  Description of Artificial Sequence: Synthetic oligonucleotide
gaaagaagagcacuguugg

SEQ ID NO: 998844 - RNA, 19 nt, Artificial Sequence
  Description of Artificial Sequence: Synthetic oligonucleotide
uuuccauacagacaggaag

SEQ ID NO: 998845 - RNA, 19 nt, Artificial Sequence
  Description of Artificial Sequence: Synthetic oligonucleotide
guuagucugagacauaagg

SEQ ID NO: 998846 - RNA, 19 nt, Artificial Sequence
  Description of Artificial Sequence: Synthetic oligonucleotide
uuaauaauuauugaauaga

SEQ ID NO: 998847 - RNA, 19 nt, Artificial Sequence
  Description of Artificial Sequence: Synthetic oligonucleotide
aauaguauuugcugcaaca

SEQ ID NO: 998848 - RNA, 19 nt, Artificial Sequence
  Description of Artificial Sequence: Synthetic oligonucleotide
gaagaagagagagagagag

SEQ ID NO: 998849 - RNA, 19 nt, Artificial Sequence
  Description of Artificial Sequence: Synthetic oligonucleotide
aagagagagagagagagag

SEQ ID NO: 998850 - RNA, 19 nt, Artificial Sequence
  Description of Artificial Sequence: Synthetic oligonucleotide
  modified_base (16)..(16): a, c, u, g, unknown or other
ugugacuagucacaunacc

SEQ ID NO: 998851 - RNA, 19 nt, Artificial Sequence
  Description of Artificial Sequence: Synthetic oligonucleotide
aacaaacugacuccgucgg

SEQ ID NO: 998852 - RNA, 19 nt, Artificial Sequence
  Description of Artificial Sequence: Synthetic oligonucleotide
uggaagaagagagagagag

SEQ ID NO: 998853 - RNA, 19 nt, Artificial Sequence
  Description of Artificial Sequence: Synthetic oligonucleotide
uauugaauagauagagaag

SEQ ID NO: 998854 - RNA, 19 nt, Artificial Sequence
  Description of Artificial Sequence: Synthetic oligonucleotide
ucaaaugauccuaggagag

SEQ ID NO: 998855 - RNA, 19 nt, Artificial Sequence
  Description of Artificial Sequence: Synthetic oligonucleotide
  modified_base (14)..(14): a, c, u, g, unknown or other
ugacuagucacaunacccc

SEQ ID NO: 998856 - RNA, 19 nt, Artificial Sequence
  Description of Artificial Sequence: Synthetic oligonucleotide
agggaaacaaguucacugc

SEQ ID NO: 998857 - RNA, 19 nt, Artificial Sequence
  Description of Artificial Sequence: Synthetic oligonucleotide
uguaaucaagccuugcuug

SEQ ID NO: 998858 - RNA, 19 nt, Artificial Sequence
  Description of Artificial Sequence: Synthetic oligonucleotide
gaaagauuaaccugccuug

SEQ ID NO: 998859 - RNA, 19 nt, Artificial Sequence
  Description of Artificial Sequence: Synthetic oligonucleotide
aaggagcuaaugcugauug

SEQ ID NO: 998860 - RNA, 19 nt, Artificial Sequence
  Description of Artificial Sequence: Synthetic oligonucleotide
uguauucucguagagaaug

SEQ ID NO: 998861 - RNA, 19 nt, Artificial Sequence
  Description of Artificial Sequence: Synthetic oligonucleotide
aagggaaucaaccuucagu

SEQ ID NO: 998862 - RNA, 19 nt, Artificial Sequence
  Description of Artificial Sequence: Synthetic oligonucleotide
aacccuauagcauuuggga

SEQ ID NO: 998863 - RNA, 19 nt, Artificial Sequence
  Description of Artificial Sequence: Synthetic oligonucleotide
agaagagagagagagagag

SEQ ID NO: 998864 - RNA, 19 nt, Artificial Sequence
  Description of Artificial Sequence: Synthetic oligonucleotide
aauagucccuuuccugccc

SEQ ID NO: 998865 - RNA, 19 nt, Artificial Sequence
  Description of Artificial Sequence: Synthetic oligonucleotide
gagagaaagauuaaccugc

SEQ ID NO: 998866 - RNA, 19 nt, Artificial Sequence
  Description of Artificial Sequence: Synthetic oligonucleotide
uccaauagacaucauuuug

SEQ ID NO: 998867 - RNA, 19 nt, Artificial Sequence
  Description of Artificial Sequence: Synthetic oligonucleotide
aaagccaugugacuaguca

SEQ ID NO: 998868 - RNA, 19 nt, Artificial Sequence
  Description of Artificial Sequence: Synthetic oligonucleotide
ucuaggggcacaauggagc

SEQ ID NO: 998869 - RNA, 19 nt, Artificial Sequence
  Description of Artificial Sequence: Synthetic oligonucleotide
aauagauagagaaggugag

SEQ ID NO: 998870 - RNA, 19 nt, Artificial Sequence
  Description of Artificial Sequence: Synthetic oligonucleotide
uuuaguaauugguacauuu

SEQ ID NO: 998871 - RNA, 19 nt, Artificial Sequence
  Description of Artificial Sequence: Synthetic oligonucleotide
uucucguagagaaugaaaa

SEQ ID NO: 998872 - RNA, 19 nt, Artificial Sequence
  Description of Artificial Sequence: Synthetic oligonucleotide
auauucagaggaucagccc

SEQ ID NO: 998873 - RNA, 19 nt, Artificial Sequence
  Description of Artificial Sequence: Synthetic oligonucleotide
agucuuaggacuacaauac

SEQ ID NO: 998874 - RNA, 19 nt, Artificial Sequence
  Description of Artificial Sequence: Synthetic oligonucleotide
gagagagagagagagagag

SEQ ID NO: 998875 - RNA, 19 nt, Artificial Sequence
  Description of Artificial Sequence: Synthetic oligonucleotide
auuaguaaagggaaucaac

SEQ ID NO: 998876 - RNA, 19 nt, Artificial Sequence
  Description of Artificial Sequence: Synthetic oligonucleotide
uuagucugagacauaaggu

SEQ ID NO: 998877 - RNA, 19 nt, Artificial Sequence
  Description of Artificial Sequence: Synthetic oligonucleotide
agauuaaccugccuugggg

SEQ ID NO: 998878 - RNA, 19 nt, Artificial Sequence
  Description of Artificial Sequence: Synthetic oligonucleotide
gguuacauacauuacauac

SEQ ID NO: 998879 - RNA, 19 nt, Artificial Sequence
  Description of Artificial Sequence: Synthetic oligonucleotide
uagauagagaaggugagcc

SEQ ID NO: 998880 - RNA, 19 nt, Artificial Sequence
  Description of Artificial Sequence: Synthetic oligonucleotide
aguucuagagugaugcugc

SEQ ID NO: 998881 - RNA, 19 nt, Artificial Sequence
  Description of Artificial Sequence: Synthetic oligonucleotide
agagagguuacauacauua

SEQ ID NO: 998882 - RNA, 19 nt, Artificial Sequence
  Description of Artificial Sequence: Synthetic oligonucleotide
agagguuacauacauuaca

SEQ ID NO: 998883 - RNA, 19 nt, Artificial Sequence
  Description of Artificial Sequence: Synthetic oligonucleotide
gauccuaggagagaagggg

SEQ ID NO: 998884 - RNA, 19 nt, Artificial Sequence
  Description of Artificial Sequence: Synthetic oligonucleotide
uuggauauucagaggauca

SEQ ID NO: 998885 - RNA, 19 nt, Artificial Sequence
  Description of Artificial Sequence: Synthetic oligonucleotide
aaagauuaaccugccuugg

SEQ ID NO: 998886 - RNA, 19 nt, Artificial Sequence
  Description of Artificial Sequence: Synthetic oligonucleotide
uaauugguacauuuaucag

SEQ ID NO: 998887 - RNA, 19 nt, Artificial Sequence
  Description of Artificial Sequence: Synthetic oligonucleotide
cacuguuggauauucagag

SEQ ID NO: 998888 - RNA, 19 nt, Artificial Sequence
  Description of Artificial Sequence: Synthetic oligonucleotide
acacaagacaguucuagag

SEQ ID NO: 998889 - RNA, 19 nt, Artificial Sequence
  Description of Artificial Sequence: Synthetic oligonucleotide
agauguauguagcuacuuc

SEQ ID NO: 998890 - RNA, 19 nt, Artificial Sequence
  Description of Artificial Sequence: Synthetic oligonucleotide
cuuaggacuacaauacaac

SEQ ID NO: 998891 - RNA, 19 nt, Artificial Sequence
  Description of Artificial Sequence: Synthetic oligonucleotide
caaaugacgguacagagca

SEQ ID NO: 998892 - RNA, 19 nt, Artificial Sequence
  Description of Artificial Sequence: Synthetic oligonucleotide
caaagcacucuccuaaacg

SEQ ID NO: 998893 - RNA, 19 nt, Artificial Sequence
  Description of Artificial Sequence: Synthetic oligonucleotide
ucuuaggacuacaauacaa

SEQ ID NO: 998894 - RNA, 19 nt, Artificial Sequence
  Description of Artificial Sequence: Synthetic oligonucleotide
aauacacuauaaugagucu

SEQ ID NO: 998895 - RNA, 19 nt, Artificial Sequence
  Description of Artificial Sequence: Synthetic oligonucleotide
acuauucugucuucggauc

SEQ ID NO: 998896 - RNA, 19 nt, Artificial Sequence
  Description of Artificial Sequence: Synthetic oligonucleotide
ugaauagauagagaaggug

SEQ ID NO: 998897 - RNA, 19 nt, Artificial Sequence
  Description of Artificial Sequence: Synthetic oligonucleotide
uuccauacagacaggaagu

SEQ ID NO: 998898 - RNA, 19 nt, Artificial Sequence
  Description of Artificial Sequence: Synthetic oligonucleotide
ugauccuaggagagaaggg

SEQ ID NO: 998899 - RNA, 19 nt, Artificial Sequence
  Description of Artificial Sequence: Synthetic oligonucleotide
uccacuauucacacuauuc

SEQ ID NO: 998900 - RNA, 19 nt, Artificial Sequence
  Description of Artificial Sequence: Synthetic oligonucleotide
cacugaguaacaucugugg

SEQ ID NO: 998901 - RNA, 19 nt, Artificial Sequence
  Description of Artificial Sequence: Synthetic oligonucleotide
aaucugauggucugggaaa

SEQ ID NO: 998902 - RNA, 19 nt, Artificial Sequence
  Description of Artificial Sequence: Synthetic oligonucleotide
aaacccuauagcauuuggg

SEQ ID NO: 998903 - RNA, 19 nt, Artificial Sequence
  Description of Artificial Sequence: Synthetic oligonucleotide
ccaacuaccacauuagccc

SEQ ID NO: 998904 - RNA, 19 nt, Artificial Sequence
  Description of Artificial Sequence: Synthetic oligonucleotide
accaaaugacgguacagag

SEQ ID NO: 998905 - RNA, 19 nt, Artificial Sequence
  Description of Artificial Sequence: Synthetic oligonucleotide
aggacuacaauacaacaau

SEQ ID NO: 998906 - RNA, 19 nt, Artificial Sequence
  Description of Artificial Sequence: Synthetic oligonucleotide
auagauagagaaggugagc

SEQ ID NO: 998907 - RNA, 19 nt, Artificial Sequence
  Description of Artificial Sequence: Synthetic oligonucleotide
accacauuagcccucccuc

SEQ ID NO: 998908 - RNA, 19 nt, Artificial Sequence
  Description of Artificial Sequence: Synthetic oligonucleotide
caacaaacugacuccgucg

SEQ ID NO: 998909 - RNA, 19 nt, Artificial Sequence
  Description of Artificial Sequence: Synthetic oligonucleotide
gagauuuagauuacaagga

SEQ ID NO: 998910 - RNA, 19 nt, Artificial Sequence
  Description of Artificial Sequence: Synthetic oligonucleotide
gauagagaaggugagccug

SEQ ID NO: 998911 - RNA, 19 nt, Artificial Sequence
  Description of Artificial Sequence: Synthetic oligonucleotide
aggugcaugagauuuagau

SEQ ID NO: 998912 - RNA, 19 nt, Artificial Sequence
  Description of Artificial Sequence: Synthetic oligonucleotide
aguguaaucaagccuugcu

SEQ ID NO: 998913 - RNA, 19 nt, Artificial Sequence
  Description of Artificial Sequence: Synthetic oligonucleotide
ucuagagagugcuugccca

SEQ ID NO: 998914 - RNA, 19 nt, Artificial Sequence
  Description of Artificial Sequence: Synthetic oligonucleotide
uuaguaauugguacauuua

SEQ ID NO: 998915 - RNA, 19 nt, Artificial Sequence
  Description of Artificial Sequence: Synthetic oligonucleotide
aacaucuguggucucccag

SEQ ID NO: 998916 - RNA, 19 nt, Artificial Sequence
  Description of Artificial Sequence: Synthetic oligonucleotide
agggaaucaaccuucaguu

SEQ ID NO: 998917 - RNA, 19 nt, Artificial Sequence
  Description of Artificial Sequence: Synthetic oligonucleotide
uacacuauaaugagucuua

SEQ ID NO: 998918 - RNA, 19 nt, Artificial Sequence
  Description of Artificial Sequence: Synthetic oligonucleotide
acuaguuagucugagacau

SEQ ID NO: 998919 - RNA, 19 nt, Artificial Sequence
  Description of Artificial Sequence: Synthetic oligonucleotide
uuggagacggauucuuuag

SEQ ID NO: 998920 - RNA, 19 nt, Artificial Sequence
  Description of Artificial Sequence: Synthetic oligonucleotide
  modified_base (18)..(18): a, c, u, g, unknown or other
caugugacuagucacauna

SEQ ID NO: 998921 - RNA, 19 nt, Artificial Sequence
  Description of Artificial Sequence: Synthetic oligonucleotide
aguaauugguacauuuauc

SEQ ID NO: 998922 - RNA, 19 nt, Artificial Sequence
  Description of Artificial Sequence: Synthetic oligonucleotide
uuuugauaggcuguauucu

SEQ ID NO: 998923 - RNA, 19 nt, Artificial Sequence
  Description of Artificial Sequence: Synthetic oligonucleotide
acuguuggauauucagagg

SEQ ID NO: 998924 - RNA, 19 nt, Artificial Sequence
  Description of Artificial Sequence: Synthetic oligonucleotide
agagauuaccagcugcuca

SEQ ID NO: 998925 - RNA, 19 nt, Artificial Sequence
  Description of Artificial Sequence: Synthetic oligonucleotide
auuaaccugccuuggggag

SEQ ID NO: 998926 - RNA, 19 nt, Artificial Sequence
  Description of Artificial Sequence: Synthetic oligonucleotide
aaauucucaaaugauccua

SEQ ID NO: 998927 - RNA, 19 nt, Artificial Sequence
  Description of Artificial Sequence: Synthetic oligonucleotide
acaaacaauaguauuugcu

SEQ ID NO: 998928 - RNA, 19 nt, Artificial Sequence
  Description of Artificial Sequence: Synthetic oligonucleotide
aauuaguaaagggaaucaa

SEQ ID NO: 998929 - RNA, 19 nt, Artificial Sequence
  Description of Artificial Sequence: Synthetic oligonucleotide
aguaguguaaucaagccuu

SEQ ID NO: 998930 - RNA, 19 nt, Artificial Sequence
  Description of Artificial Sequence: Synthetic oligonucleotide
gauguauguagcuacuucu

SEQ ID NO: 998931 - RNA, 19 nt, Artificial Sequence
  Description of Artificial Sequence: Synthetic oligonucleotide
aaagggaaucaaccuucag

SEQ ID NO: 998932 - RNA, 19 nt, Artificial Sequence
  Description of Artificial Sequence: Synthetic oligonucleotide
uucuaggggcacaauggag

SEQ ID NO: 998933 - RNA, 19 nt, Artificial Sequence
  Description of Artificial Sequence: Synthetic oligonucleotide
gauuaaccugccuugggga

SEQ ID NO: 998934 - RNA, 19 nt, Artificial Sequence
  Description of Artificial Sequence: Synthetic oligonucleotide
gguucuguaucuccaauag

SEQ ID NO: 998935 - RNA, 19 nt, Artificial Sequence
  Description of Artificial Sequence: Synthetic oligonucleotide
aauagcacccagagauuac

SEQ ID NO: 998936 - RNA, 19 nt, Artificial Sequence
  Description of Artificial Sequence: Synthetic oligonucleotide
ggagagaaagauuaaccug

SEQ ID NO: 998937 - RNA, 19 nt, Artificial Sequence
  Description of Artificial Sequence: Synthetic oligonucleotide
gacuacaauacaacaauga

SEQ ID NO: 998938 - RNA, 19 nt, Artificial Sequence
  Description of Artificial Sequence: Synthetic oligonucleotide
acccuauagcauuugggag

SEQ ID NO: 998939 - RNA, 19 nt, Artificial Sequence
  Description of Artificial Sequence: Synthetic oligonucleotide
agagaaagauuaaccugcc

SEQ ID NO: 998940 - RNA, 19 nt, Artificial Sequence
  Description of Artificial Sequence: Synthetic oligonucleotide
  modified_base (15)..(15): a, c, u, g, unknown or other
gugacuagucacaunaccc

SEQ ID NO: 998941 - RNA, 19 nt, Artificial Sequence
  Description of Artificial Sequence: Synthetic oligonucleotide
cacuauaaugagucuuagg

SEQ ID NO: 998942 - RNA, 19 nt, Artificial Sequence
  Description of Artificial Sequence: Synthetic oligonucleotide
cuguuggauauucagagga

SEQ ID NO: 998943 - RNA, 19 nt, Artificial Sequence
  Description of Artificial Sequence: Synthetic oligonucleotide
cuauucugucuucggaucc

SEQ ID NO: 998944 - RNA, 19 nt, Artificial Sequence
  Description of Artificial Sequence: Synthetic oligonucleotide
agcuaaugcugauuggcug

SEQ ID NO: 998945 - RNA, 19 nt, Artificial Sequence
  Description of Artificial Sequence: Synthetic oligonucleotide
aaccaaagauaugagccca

SEQ ID NO: 998946 - RNA, 19 nt, Artificial Sequence
  Description of Artificial Sequence: Synthetic oligonucleotide
uuauugcacauguaugcuc

SEQ ID NO: 998947 - RNA, 19 nt, Artificial Sequence
  Description of Artificial Sequence: Synthetic oligonucleotide
uccuaaacggucccuuccc

SEQ ID NO: 998948 - RNA, 19 nt, Artificial Sequence
  Description of Artificial Sequence: Synthetic oligonucleotide
agagaaugaaaagccaugu

SEQ ID NO: 998949 - RNA, 19 nt, Artificial Sequence
  Description of Artificial Sequence: Synthetic oligonucleotide
aacugacuccgucggguuc

SEQ ID NO: 998950 - RNA, 19 nt, Artificial Sequence
  Description of Artificial Sequence: Synthetic oligonucleotide
uguacgccagggaaacaag

SEQ ID NO: 998951 - RNA, 19 nt, Artificial Sequence
  Description of Artificial Sequence: Synthetic oligonucleotide
aaacggucccuuccccaac

SEQ ID NO: 998952 - RNA, 19 nt, Artificial Sequence
  Description of Artificial Sequence: Synthetic oligonucleotide
guaaagggaaucaaccuuc

SEQ ID NO: 998953 - RNA, 19 nt, Artificial Sequence
  Description of Artificial Sequence: Synthetic oligonucleotide
agagcagauguauguagcu

SEQ ID NO: 998954 - RNA, 19 nt, Artificial Sequence
  Description of Artificial Sequence: Synthetic oligonucleotide
caaugcugggaauccaaag

SEQ ID NO: 998955 - RNA, 19 nt, Artificial Sequence
  Description of Artificial Sequence: Synthetic oligonucleotide
auugguacauuuaucagua

SEQ ID NO: 998956 - RNA, 19 nt, Artificial Sequence
  Description of Artificial Sequence: Synthetic oligonucleotide
uggauauucagaggaucag

SEQ ID NO: 998957 - RNA, 19 nt, Artificial Sequence
  Description of Artificial Sequence: Synthetic oligonucleotide
cacgcacuguaauagcacc

SEQ ID NO: 998958 - RNA, 19 nt, Artificial Sequence
  Description of Artificial Sequence: Synthetic oligonucleotide
cuaggggcacaauggagcc

SEQ ID NO: 998959 - RNA, 19 nt, Artificial Sequence
  Description of Artificial Sequence: Synthetic oligonucleotide
agacggauucuuuaguaau

SEQ ID NO: 998960 - RNA, 19 nt, Artificial Sequence
  Description of Artificial Sequence: Synthetic oligonucleotide
agagcacuguuggauauuc

SEQ ID NO: 998961 - RNA, 19 nt, Artificial Sequence
  Description of Artificial Sequence: Synthetic oligonucleotide
aagacaguucuagagugau

SEQ ID NO: 998962 - RNA, 19 nt, Artificial Sequence
  Description of Artificial Sequence: Synthetic oligonucleotide
guauguagcuacuucucuc

SEQ ID NO: 998963 - RNA, 19 nt, Artificial Sequence
  Description of Artificial Sequence: Synthetic oligonucleotide
ugauaggcuguauucucgu

SEQ ID NO: 998964 - RNA, 19 nt, Artificial Sequence
  Description of Artificial Sequence: Synthetic oligonucleotide
agauagagaaggugagccu

SEQ ID NO: 998965 - RNA, 19 nt, Artificial Sequence
  Description of Artificial Sequence: Synthetic oligonucleotide
uguuggauauucagaggau

SEQ ID NO: 998966 - RNA, 19 nt, Artificial Sequence
  Description of Artificial Sequence: Synthetic oligonucleotide
gaaaggcuccacccagagg

SEQ ID NO: 998967 - RNA, 19 nt, Artificial Sequence
  Description of Artificial Sequence: Synthetic oligonucleotide
aaugagucuuaggacuaca

SEQ ID NO: 998968 - RNA, 19 nt, Artificial Sequence
  Description of Artificial Sequence: Synthetic oligonucleotide
caucuaugguuugaaacac

SEQ ID NO: 998969 - RNA, 19 nt, Artificial Sequence
  Description of Artificial Sequence: Synthetic oligonucleotide
acaaacugacuccgucggg

SEQ ID NO: 998970 - RNA, 19 nt, Artificial Sequence
  Description of Artificial Sequence: Synthetic oligonucleotide
ugcaugagauuuagauuac

SEQ ID NO: 998971 - RNA, 19 nt, Artificial Sequence
  Description of Artificial Sequence: Synthetic oligonucleotide
gagagagagagagagaggu

SEQ ID NO: 998972 - RNA, 19 nt, Artificial Sequence
  Description of Artificial Sequence: Synthetic oligonucleotide
cagcaauuaguaaagggaa

SEQ ID NO: 998973 - RNA, 19 nt, Artificial Sequence
  Description of Artificial Sequence: Synthetic oligonucleotide
agcuacuucucucagucua

SEQ ID NO: 998974 - RNA, 19 nt, Artificial Sequence
  Description of Artificial Sequence: Synthetic oligonucleotide
uguagcuacuucucucagu

SEQ ID NO: 998975 - RNA, 19 nt, Artificial Sequence
  Description of Artificial Sequence: Synthetic oligonucleotide
gacacaagacaguucuaga

SEQ ID NO: 998976 - RNA, 19 nt, Artificial Sequence
  Description of Artificial Sequence: Synthetic oligonucleotide
agagagagagagagguuac

SEQ ID NO: 998977 - RNA, 19 nt, Artificial Sequence
  Description of Artificial Sequence: Synthetic oligonucleotide
aggagcuaaugcugauugg

SEQ ID NO: 998978 - RNA, 19 nt, Artificial Sequence
  Description of Artificial Sequence: Synthetic oligonucleotide
aacucuucuagcggcucag

SEQ ID NO: 998979 - RNA, 19 nt, Artificial Sequence
  Description of Artificial Sequence: Synthetic oligonucleotide
gucggguuccagcugagug

SEQ ID NO: 998980 - RNA, 19 nt, Artificial Sequence
  Description of Artificial Sequence: Synthetic oligonucleotide
ugauggcgguacuagcuca

SEQ ID NO: 998981 - RNA, 19 nt, Artificial Sequence
  Description of Artificial Sequence: Synthetic oligonucleotide
uggagacggauucuuuagu

SEQ ID NO: 998982 - RNA, 19 nt, Artificial Sequence
  Description of Artificial Sequence: Synthetic oligonucleotide
gucuagagagugcuugccc

SEQ ID NO: 998983 - RNA, 19 nt, Artificial Sequence
  Description of Artificial Sequence: Synthetic oligonucleotide
caauaguauuugcugcaac

SEQ ID NO: 998984 - RNA, 19 nt, Artificial Sequence
  Description of Artificial Sequence: Synthetic oligonucleotide
agaggugcaugagauuuag

SEQ ID NO: 998985 - RNA, 19 nt, Artificial Sequence
  Description of Artificial Sequence: Synthetic oligonucleotide
gcugaucaccaaaugacgg

SEQ ID NO: 998986 - RNA, 19 nt, Artificial Sequence
  Description of Artificial Sequence: Synthetic oligonucleotide
uucuguacgccagggaaac

SEQ ID NO: 998987 - RNA, 19 nt, Artificial Sequence
  Description of Artificial Sequence: Synthetic oligonucleotide
cuccuaaacggucccuucc

SEQ ID NO: 998988 - RNA, 19 nt, Artificial Sequence
  Description of Artificial Sequence: Synthetic oligonucleotide
ggagcuaaugcugauuggc

SEQ ID NO: 998989 - RNA, 19 nt, Artificial Sequence
  Description of Artificial Sequence: Synthetic oligonucleotide
gagagagagagagagguua

SEQ ID NO: 998990 - RNA, 19 nt, Artificial Sequence
  Description of Artificial Sequence: Synthetic oligonucleotide
cuggcuacauauuauugaa

SEQ ID NO: 998991 - RNA, 19 nt, Artificial Sequence
  Description of Artificial Sequence: Synthetic oligonucleotide
cccaacuaccacauuagcc

SEQ ID NO: 998992 - RNA, 19 nt, Artificial Sequence
  Description of Artificial Sequence: Synthetic oligonucleotide
ggagaguuucuuuccauac

SEQ ID NO: 998993 - RNA, 19 nt, Artificial Sequence
  Description of Artificial Sequence: Synthetic oligonucleotide
uuacagaggucucuucauu

SEQ ID NO: 998994 - RNA, 19 nt, Artificial Sequence
  Description of Artificial Sequence: Synthetic oligonucleotide
ccggagagaaagauuaacc

SEQ ID NO: 998995 - RNA, 19 nt, Artificial Sequence
  Description of Artificial Sequence: Synthetic oligonucleotide
auacacuauaaugagucuu

SEQ ID NO: 998996 - RNA, 19 nt, Artificial Sequence
  Description of Artificial Sequence: Synthetic oligonucleotide
agcacucuccuaaacgguc

SEQ ID NO: 998997 - RNA, 19 nt, Artificial Sequence
  Description of Artificial Sequence: Synthetic oligonucleotide
ggggccgcaaaauagccag

SEQ ID NO: 998998 - RNA, 19 nt, Artificial Sequence
  Description of Artificial Sequence: Synthetic oligonucleotide
uuugggagaggugcaugag

SEQ ID NO: 998999 - RNA, 19 nt, Artificial Sequence
  Description of Artificial Sequence: Synthetic oligonucleotide
caauuaguaaagggaauca

SEQ ID NO: 999000 - RNA, 19 nt, Artificial Sequence
  Description of Artificial Sequence: Synthetic oligonucleotide
acgcacuguaauagcaccc

SEQ ID NO: 999001 - RNA, 19 nt, Artificial Sequence
  Description of Artificial Sequence: Synthetic oligonucleotide
aacggucccuuccccaacu

SEQ ID NO: 999002 - RNA, 19 nt, Artificial Sequence
  Description of Artificial Sequence: Synthetic oligonucleotide
gagcccacugucuggauga

SEQ ID NO: 999003 - RNA, 19 nt, Artificial Sequence
  Description of Artificial Sequence: Synthetic oligonucleotide
acacgcacuguaauagcac

SEQ ID NO: 999004 - RNA, 19 nt, Artificial Sequence
  Description of Artificial Sequence: Synthetic oligonucleotide
guuggauauucagaggauc

SEQ ID NO: 999005 - RNA, 19 nt, Artificial Sequence
  Description of Artificial Sequence: Synthetic oligonucleotide
uucuagagugaugcugcag

SEQ ID NO: 999006 - RNA, 19 nt, Artificial Sequence
  Description of Artificial Sequence: Synthetic oligonucleotide
acacuauaaugagucuuag

SEQ ID NO: 999007 - RNA, 19 nt, Artificial Sequence
  Description of Artificial Sequence: Synthetic oligonucleotide
ccaaaugacgguacagagc

SEQ ID NO: 999008 - RNA, 19 nt, Artificial Sequence
  Description of Artificial Sequence: Synthetic oligonucleotide
uugcuugugucaggagugg

SEQ ID NO: 999009 - RNA, 19 nt, Artificial Sequence
  Description of Artificial Sequence: Synthetic oligonucleotide
acugauggcgguacuagcu

SEQ ID NO: 999010 - RNA, 19 nt, Artificial Sequence
  Description of Artificial Sequence: Synthetic oligonucleotide
uacgccagggaaacaaguu

SEQ ID NO: 999011 - RNA, 19 nt, Artificial Sequence
  Description of Artificial Sequence: Synthetic oligonucleotide
agcccaaucugauggucug

SEQ ID NO: 999012 - RNA, 19 nt, Artificial Sequence
  Description of Artificial Sequence: Synthetic oligonucleotide
uuuagauuacaaggagcua

SEQ ID NO: 999013 - RNA, 19 nt, Artificial Sequence
  Description of Artificial Sequence: Synthetic oligonucleotide
uggcuacauauuauugaau

SEQ ID NO: 999014 - RNA, 19 nt, Artificial Sequence
  Description of Artificial Sequence: Synthetic oligonucleotide
aagaagagagagagagaga

SEQ ID NO: 999015 - RNA, 19 nt, Artificial Sequence
  Description of Artificial Sequence: Synthetic oligonucleotide
acacugaguaacaucugug

SEQ ID NO: 999016 - RNA, 19 nt, Artificial Sequence
  Description of Artificial Sequence: Synthetic oligonucleotide
gcaauuaguaaagggaauc

SEQ ID NO: 999017 - RNA, 19 nt, Artificial Sequence
  Description of Artificial Sequence: Synthetic oligonucleotide
agagagagagagguuacau

SEQ ID NO: 999018 - RNA, 19 nt, Artificial Sequence
  Description of Artificial Sequence: Synthetic oligonucleotide
agagagagagagagagagg

SEQ ID NO: 999019 - RNA, 19 nt, Artificial Sequence
  Description of Artificial Sequence: Synthetic oligonucleotide
gagagguuacauacauuac

SEQ ID NO: 999020 - RNA, 19 nt, Artificial Sequence
  Description of Artificial Sequence: Synthetic oligonucleotide
uagagugaugcugcagaca

SEQ ID NO: 999021 - RNA, 19 nt, Artificial Sequence
  Description of Artificial Sequence: Synthetic oligonucleotide
gaucaccaaaugacgguac

SEQ ID NO: 999022 - RNA, 19 nt, Artificial Sequence
  Description of Artificial Sequence: Synthetic oligonucleotide
cuucaguuacuuccuccac

SEQ ID NO: 999023 - RNA, 19 nt, Artificial Sequence
  Description of Artificial Sequence: Synthetic oligonucleotide
gagguuacauacauuacau

SEQ ID NO: 999024 - RNA, 19 nt, Artificial Sequence
  Description of Artificial Sequence: Synthetic oligonucleotide
accaaagauaugagcccac

SEQ ID NO: 999025 - RNA, 19 nt, Artificial Sequence
  Description of Artificial Sequence: Synthetic oligonucleotide
cacacgcacuguaauagca

SEQ ID NO: 999026 - RNA, 19 nt, Artificial Sequence
  Description of Artificial Sequence: Synthetic oligonucleotide
uuaaccugccuuggggagu

SEQ ID NO: 999027 - RNA, 19 nt, Artificial Sequence
  Description of Artificial Sequence: Synthetic oligonucleotide
ucuccuaaacggucccuuc

SEQ ID NO: 999028 - RNA, 19 nt, Artificial Sequence
  Description of Artificial Sequence: Synthetic oligonucleotide
uugaaugguucuguaucuc

SEQ ID NO: 999029 - RNA, 19 nt, Artificial Sequence
  Description of Artificial Sequence: Synthetic oligonucleotide
ugcuccacaguaguguaau

SEQ ID NO: 999030 - RNA, 19 nt, Artificial Sequence
  Description of Artificial Sequence: Synthetic oligonucleotide
aagcacucuccuaaacggu

SEQ ID NO: 999031 - RNA, 19 nt, Artificial Sequence
  Description of Artificial Sequence: Synthetic oligonucleotide
gcuaaugcugauuggcuga

SEQ ID NO: 999032 - RNA, 19 nt, Artificial Sequence
  Description of Artificial Sequence: Synthetic oligonucleotide
cugauggcgguacuagcuc

SEQ ID NO: 999033 - RNA, 19 nt, Artificial Sequence
  Description of Artificial Sequence: Synthetic oligonucleotide
gguacuagcucacccagaa

SEQ ID NO: 999034 - RNA, 19 nt, Artificial Sequence
  Description of Artificial Sequence: Synthetic oligonucleotide
aucauuuugauaggcugua

SEQ ID NO: 999035 - RNA, 19 nt, Artificial Sequence
  Description of Artificial Sequence: Synthetic oligonucleotide
agauuaccagcugcucagg

SEQ ID NO: 999036 - RNA, 19 nt, Artificial Sequence
  Description of Artificial Sequence: Synthetic oligonucleotide
cacuaguuagucugagaca

SEQ ID NO: 999037 - RNA, 19 nt, Artificial Sequence
  Description of Artificial Sequence: Synthetic oligonucleotide
aacacugauggcgguacua

SEQ ID NO: 999038 - RNA, 19 nt, Artificial Sequence
  Description of Artificial Sequence: Synthetic oligonucleotide
auagucccuuuccugccca

SEQ ID NO: 999039 - RNA, 19 nt, Artificial Sequence
  Description of Artificial Sequence: Synthetic oligonucleotide
cacuguaauagcacccaga

SEQ ID NO: 999040 - RNA, 19 nt, Artificial Sequence
  Description of Artificial Sequence: Synthetic oligonucleotide
uuccacuauucacacuauu

SEQ ID NO: 999041 - RNA, 19 nt, Artificial Sequence
  Description of Artificial Sequence: Synthetic oligonucleotide
cuuggagacggauucuuua

SEQ ID NO: 999042 - RNA, 19 nt, Artificial Sequence
  Description of Artificial Sequence: Synthetic oligonucleotide
  modified_base (17)..(17): a, c, u, g, unknown or other
augugacuagucacaunac

SEQ ID NO: 999043 - RNA, 19 nt, Artificial Sequence
  Description of Artificial Sequence: Synthetic oligonucleotide
agguuacauacauuacaua

SEQ ID NO: 999044 - RNA, 19 nt, Artificial Sequence
  Description of Artificial Sequence: Synthetic oligonucleotide
cuaaacggucccuucccca

SEQ ID NO: 999045 - RNA, 19 nt, Artificial Sequence
  Description of Artificial Sequence: Synthetic oligonucleotide
gcacaacaaacugacuccg

SEQ ID NO: 999046 - RNA, 19 nt, Artificial Sequence
  Description of Artificial Sequence: Synthetic oligonucleotide
gggaauccaaagaagguuc

SEQ ID NO: 999047 - RNA, 19 nt, Artificial Sequence
  Description of Artificial Sequence: Synthetic oligonucleotide
gucuuaggacuacaauaca

SEQ ID NO: 999048 - RNA, 19 nt, Artificial Sequence
  Description of Artificial Sequence: Synthetic oligonucleotide
cacucuccuaaacgguccc

SEQ ID NO: 999049 - RNA, 19 nt, Artificial Sequence
  Description of Artificial Sequence: Synthetic oligonucleotide
ugacgguacagagcagaug

SEQ ID NO: 999050 - RNA, 19 nt, Artificial Sequence
  Description of Artificial Sequence: Synthetic oligonucleotide
agcaauuaguaaagggaau

SEQ ID NO: 999051 - RNA, 19 nt, Artificial Sequence
  Description of Artificial Sequence: Synthetic oligonucleotide
uugcccaaccacagggcaa

SEQ ID NO: 999052 - RNA, 19 nt, Artificial Sequence
  Description of Artificial Sequence: Synthetic oligonucleotide
ccagauggcuuggagacgg

SEQ ID NO: 999053 - RNA, 19 nt, Artificial Sequence
  Description of Artificial Sequence: Synthetic oligonucleotide
aacaugcucuggcuacaua

SEQ ID NO: 999054 - RNA, 19 nt, Artificial Sequence
  Description of Artificial Sequence: Synthetic oligonucleotide
gaagagagagagagagaga

SEQ ID NO: 999055 - RNA, 19 nt, Artificial Sequence
  Description of Artificial Sequence: Synthetic oligonucleotide
ggacuacaauacaacaaug

SEQ ID NO: 999056 - RNA, 19 nt, Artificial Sequence
  Description of Artificial Sequence: Synthetic oligonucleotide
agaggucucuucauuaaua

SEQ ID NO: 999057 - RNA, 19 nt, Artificial Sequence
  Description of Artificial Sequence: Synthetic oligonucleotide
ccuauagcauuugggagag

SEQ ID NO: 999058 - RNA, 19 nt, Artificial Sequence
  Description of Artificial Sequence: Synthetic oligonucleotide
uugguacauuuaucaguaa

SEQ ID NO: 999059 - RNA, 19 nt, Artificial Sequence
  Description of Artificial Sequence: Synthetic oligonucleotide
aggcaaauucucaaaugau

SEQ ID NO: 999060 - RNA, 19 nt, Artificial Sequence
  Description of Artificial Sequence: Synthetic oligonucleotide
acgaggcacaacaaacuga

SEQ ID NO: 999061 - RNA, 19 nt, Artificial Sequence
  Description of Artificial Sequence: Synthetic oligonucleotide
auccuaggagagaaggggu

SEQ ID NO: 999062 - RNA, 19 nt, Artificial Sequence
  Description of Artificial Sequence: Synthetic oligonucleotide
acagcacucaucacacgca

SEQ ID NO: 999063 - RNA, 19 nt, Artificial Sequence
  Description of Artificial Sequence: Synthetic oligonucleotide
ggaucagcccaaucugaug

SEQ ID NO: 999064 - RNA, 19 nt, Artificial Sequence
  Description of Artificial Sequence: Synthetic oligonucleotide
guauucucguagagaauga

SEQ ID NO: 999065 - RNA, 19 nt, Artificial Sequence
  Description of Artificial Sequence: Synthetic oligonucleotide
caguuacuuccuccacagg

SEQ ID NO: 999066 - RNA, 19 nt, Artificial Sequence
  Description of Artificial Sequence: Synthetic oligonucleotide
accagauggcuuggagacg

SEQ ID NO: 999067 - RNA, 19 nt, Artificial Sequence
  Description of Artificial Sequence: Synthetic oligonucleotide
acagccaagugcucccuua

SEQ ID NO: 999068 - RNA, 19 nt, Artificial Sequence
  Description of Artificial Sequence: Synthetic oligonucleotide
ugcccaaccacagggcaaa

SEQ ID NO: 999069 - RNA, 19 nt, Artificial Sequence
  Description of Artificial Sequence: Synthetic oligonucleotide
acugcccggagagaaagau

SEQ ID NO: 999070 - RNA, 19 nt, Artificial Sequence
  Description of Artificial Sequence: Synthetic oligonucleotide
aacagccaagugcucccuu

SEQ ID NO: 999071 - RNA, 19 nt, Artificial Sequence
  Description of Artificial Sequence: Synthetic oligonucleotide
uugcacauguaugcuccac

SEQ ID NO: 999072 - RNA, 19 nt, Artificial Sequence
  Description of Artificial Sequence: Synthetic oligonucleotide
cccuauagcauuugggaga

SEQ ID NO: 999073 - RNA, 19 nt, Artificial Sequence
  Description of Artificial Sequence: Synthetic oligonucleotide
guguaaucaagccuugcuu

SEQ ID NO: 999074 - RNA, 19 nt, Artificial Sequence
  Description of Artificial Sequence: Synthetic oligonucleotide
gauaggcuguauucucgua

SEQ ID NO: 999075 - RNA, 19 nt, Artificial Sequence
  Description of Artificial Sequence: Synthetic oligonucleotide
gagagagagagagguuaca

SEQ ID NO: 999076 - RNA, 19 nt, Artificial Sequence
  Description of Artificial Sequence: Synthetic oligonucleotide
gaaucaaccuucaguuacu

SEQ ID NO: 999077 - RNA, 19 nt, Artificial Sequence
  Description of Artificial Sequence: Synthetic oligonucleotide
caguaguguaaucaagccu

SEQ ID NO: 999078 - RNA, 19 nt, Artificial Sequence
  Description of Artificial Sequence: Synthetic oligonucleotide
caucacacgcacuguaaua

SEQ ID NO: 999079 - RNA, 19 nt, Artificial Sequence
  Description of Artificial Sequence: Synthetic oligonucleotide
gcgguacuagcucacccag

SEQ ID NO: 999080 - RNA, 19 nt, Artificial Sequence
  Description of Artificial Sequence: Synthetic oligonucleotide
ugcuugugucaggagugga

SEQ ID NO: 999081 - RNA, 19 nt, Artificial Sequence
  Description of Artificial Sequence: Synthetic oligonucleotide
ccacauuagcccucccucc

SEQ ID NO: 999082 - RNA, 19 nt, Artificial Sequence
  Description of Artificial Sequence: Synthetic oligonucleotide
guacuagcucacccagaac

SEQ ID NO: 999083 - RNA, 19 nt, Artificial Sequence
  Description of Artificial Sequence: Synthetic oligonucleotide
guucuagagugaugcugca

SEQ ID NO: 999084 - RNA, 19 nt, Artificial Sequence
  Description of Artificial Sequence: Synthetic oligonucleotide
cacuauucugucuucggau

SEQ ID NO: 999085 - RNA, 19 nt, Artificial Sequence
  Description of Artificial Sequence: Synthetic oligonucleotide
agagagagagagagagaga

SEQ ID NO: 999086 - RNA, 19 nt, Artificial Sequence
  Description of Artificial Sequence: Synthetic oligonucleotide
agcgcuguaucaaacucuu

SEQ ID NO: 999087 - RNA, 19 nt, Artificial Sequence
  Description of Artificial Sequence: Synthetic oligonucleotide
gauuggcugaucaccaaau

SEQ ID NO: 999088 - RNA, 19 nt, Artificial Sequence
  Description of Artificial Sequence: Synthetic oligonucleotide
cauuuugauaggcuguauu

SEQ ID NO: 999089 - RNA, 19 nt, Artificial Sequence
  Description of Artificial Sequence: Synthetic oligonucleotide
cagagauuaccagcugcuc

SEQ ID NO: 999090 - RNA, 19 nt, Artificial Sequence
  Description of Artificial Sequence: Synthetic oligonucleotide
gagcuaaugcugauuggcu

SEQ ID NO: 999091 - RNA, 19 nt, Artificial Sequence
  Description of Artificial Sequence: Synthetic oligonucleotide
ggcgguacuagcucaccca

SEQ ID NO: 999092 - RNA, 19 nt, Artificial Sequence
  Description of Artificial Sequence: Synthetic oligonucleotide
ccuaaacggucccuucccc

SEQ ID NO: 999093 - RNA, 19 nt, Artificial Sequence
  Description of Artificial Sequence: Synthetic oligonucleotide
caacuaccacauuagcccu

SEQ ID NO: 999094 - RNA, 19 nt, Artificial Sequence
  Description of Artificial Sequence: Synthetic oligonucleotide
caaacugacuccgucgggu

SEQ ID NO: 999095 - RNA, 19 nt, Artificial Sequence
  Description of Artificial Sequence: Synthetic oligonucleotide
ggucacgaggcacaacaaa

SEQ ID NO: 999096 - RNA, 19 nt, Artificial Sequence
  Description of Artificial Sequence: Synthetic oligonucleotide
ccacuauucacacuauucu

SEQ ID NO: 999097 - RNA, 19 nt, Artificial Sequence
  Description of Artificial Sequence: Synthetic oligonucleotide
agauggcuuggagacggau

SEQ ID NO: 999098 - RNA, 19 nt, Artificial Sequence
  Description of Artificial Sequence: Synthetic oligonucleotide
ggcuguauucucguagaga

SEQ ID NO: 999099 - RNA, 19 nt, Artificial Sequence
  Description of Artificial Sequence: Synthetic oligonucleotide
augacgguacagagcagau

SEQ ID NO: 999100 - RNA, 19 nt, Artificial Sequence
  Description of Artificial Sequence: Synthetic oligonucleotide
ggaagaagagagagagaga

SEQ ID NO: 999101 - RNA, 19 nt, Artificial Sequence
  Description of Artificial Sequence: Synthetic oligonucleotide
gggaaacaaguucacugcu

SEQ ID NO: 999102 - RNA, 19 nt, Artificial Sequence
  Description of Artificial Sequence: Synthetic oligonucleotide
cacagcgcuguaucaaacu

SEQ ID NO: 999103 - RNA, 19 nt, Artificial Sequence
  Description of Artificial Sequence: Synthetic oligonucleotide
cccuuuucggggcagcauc

SEQ ID NO: 999104 - RNA, 19 nt, Artificial Sequence
  Description of Artificial Sequence: Synthetic oligonucleotide
cacccagagggaaguaaaa

SEQ ID NO: 999105 - RNA, 19 nt, Artificial Sequence
  Description of Artificial Sequence: Synthetic oligonucleotide
auuccacuauucacacuau

SEQ ID NO: 999106 - RNA, 19 nt, Artificial Sequence
  Description of Artificial Sequence: Synthetic oligonucleotide
cagcgcuguaucaaacucu

SEQ ID NO: 999107 - RNA, 19 nt, Artificial Sequence
  Description of Artificial Sequence: Synthetic oligonucleotide
acucuccuaaacggucccu

SEQ ID NO: 999108 - RNA, 19 nt, Artificial Sequence
  Description of Artificial Sequence: Synthetic oligonucleotide
agcacucaucacacgcacu

SEQ ID NO: 999109 - RNA, 19 nt, Artificial Sequence
  Description of Artificial Sequence: Synthetic oligonucleotide
agagagagagagagagguu

SEQ ID NO: 999110 - RNA, 19 nt, Artificial Sequence
  Description of Artificial Sequence: Synthetic oligonucleotide
cuaguuagucugagacaua

SEQ ID NO: 999111 - RNA, 19 nt, Artificial Sequence
  Description of Artificial Sequence: Synthetic oligonucleotide
cccggagagaaagauuaac

SEQ ID NO: 999112 - RNA, 19 nt, Artificial Sequence
  Description of Artificial Sequence: Synthetic oligonucleotide
gauggcuuggagacggauu

SEQ ID NO: 999113 - RNA, 19 nt, Artificial Sequence
  Description of Artificial Sequence: Synthetic oligonucleotide
cucgggcucaggccuguuc

SEQ ID NO: 999114 - RNA, 19 nt, Artificial Sequence
  Description of Artificial Sequence: Synthetic oligonucleotide
gagcacuguuggauauuca

SEQ ID NO: 999115 - RNA, 19 nt, Artificial Sequence
  Description of Artificial Sequence: Synthetic oligonucleotide
gggcacaauggagccauug

SEQ ID NO: 999116 - RNA, 19 nt, Artificial Sequence
  Description of Artificial Sequence: Synthetic oligonucleotide
ggcaggcaaauucucaaau

SEQ ID NO: 999117 - RNA, 19 nt, Artificial Sequence
  Description of Artificial Sequence: Synthetic oligonucleotide
cugcaacaugcucuggcua

SEQ ID NO: 999118 - RNA, 19 nt, Artificial Sequence
  Description of Artificial Sequence: Synthetic oligonucleotide
agacccugauaguguucaa

SEQ ID NO: 999119 - RNA, 19 nt, Artificial Sequence
  Description of Artificial Sequence: Synthetic oligonucleotide
gaggugcaugagauuuaga

SEQ ID NO: 999120 - RNA, 19 nt, Artificial Sequence
  Description of Artificial Sequence: Synthetic oligonucleotide
cagcccaaucugauggucu

SEQ ID NO: 999121 - RNA, 19 nt, Artificial Sequence
  Description of Artificial Sequence: Synthetic oligonucleotide
gcaugagauuuagauuaca

SEQ ID NO: 999122 - RNA, 19 nt, Artificial Sequence
  Description of Artificial Sequence: Synthetic oligonucleotide
cggagagaaagauuaaccu

SEQ ID NO: 999123 - RNA, 19 nt, Artificial Sequence
  Description of Artificial Sequence: Synthetic oligonucleotide
ccuuuucggggcagcauca

SEQ ID NO: 999124 - RNA, 19 nt, Artificial Sequence
  Description of Artificial Sequence: Synthetic oligonucleotide
cuccgucggguuccagcug

SEQ ID NO: 999125 - RNA, 19 nt, Artificial Sequence
  Description of Artificial Sequence: Synthetic oligonucleotide
agguuccaugugaagcuua

SEQ ID NO: 999126 - RNA, 19 nt, Artificial Sequence
  Description of Artificial Sequence: Synthetic oligonucleotide
augcuccacaguaguguaa

SEQ ID NO: 999127 - RNA, 19 nt, Artificial Sequence
  Description of Artificial Sequence: Synthetic oligonucleotide
acggucccuuccccaacua

SEQ ID NO: 999128 - RNA, 19 nt, Artificial Sequence
  Description of Artificial Sequence: Synthetic oligonucleotide
ugacuccgucggguuccag

SEQ ID NO: 999129 - RNA, 19 nt, Artificial Sequence
  Description of Artificial Sequence: Synthetic oligonucleotide
cccacuaguuagucugaga

SEQ ID NO: 999130 - RNA, 19 nt, Artificial Sequence
  Description of Artificial Sequence: Synthetic oligonucleotide
gucacugcccggagagaaa

SEQ ID NO: 999131 - RNA, 19 nt, Artificial Sequence
  Description of Artificial Sequence: Synthetic oligonucleotide
cagauggcuuggagacgga

SEQ ID NO: 999132 - RNA, 19 nt, Artificial Sequence
  Description of Artificial Sequence: Synthetic oligonucleotide
aaccugccuuggggagucu

SEQ ID NO: 999133 - RNA, 19 nt, Artificial Sequence
  Description of Artificial Sequence: Synthetic oligonucleotide
cucuccuaaacggucccuu

SEQ ID NO: 999134 - RNA, 19 nt, Artificial Sequence
  Description of Artificial Sequence: Synthetic oligonucleotide
cgcacuguaauagcaccca

SEQ ID NO: 999135 - RNA, 19 nt, Artificial Sequence
  Description of Artificial Sequence: Synthetic oligonucleotide
gcucccuuacagaggucuc

SEQ ID NO: 999136 - RNA, 19 nt, Artificial Sequence
  Description of Artificial Sequence: Synthetic oligonucleotide
  modified_base (19)..(19): a, c, u, g, unknown or other
ccaugugacuagucacaun

SEQ ID NO: 999137 - RNA, 19 nt, Artificial Sequence
  Description of Artificial Sequence: Synthetic oligonucleotide
gccaugugacuagucacau

SEQ ID NO: 999138 - RNA, 19 nt, Artificial Sequence
  Description of Artificial Sequence: Synthetic oligonucleotide
cugacuccgucggguucca

SEQ ID NO: 999139 - RNA, 19 nt, Artificial Sequence
  Description of Artificial Sequence: Synthetic oligonucleotide
ccgucggguuccagcugag

SEQ ID NO: 999140 - RNA, 19 nt, Artificial Sequence
  Description of Artificial Sequence: Synthetic oligonucleotide
ggccgcaaaauagccaguu

SEQ ID NO: 999141 - RNA, 19 nt, Artificial Sequence
  Description of Artificial Sequence: Synthetic oligonucleotide
gccgcaaaauagccaguuu

SEQ ID NO: 999142 - RNA, 19 nt, Artificial Sequence
  Description of Artificial Sequence: Synthetic oligonucleotide
gcgcuguaucaaacucuuc

SEQ ID NO: 999143 - RNA, 19 nt, Artificial Sequence
  Description of Artificial Sequence: Synthetic oligonucleotide
cgguacuagcucacccaga

SEQ ID NO: 999144 - RNA, 19 nt, Artificial Sequence
  Description of Artificial Sequence: Synthetic oligonucleotide
gcccggagagaaagauuaa

SEQ ID NO: 999145 - RNA, 19 nt, Artificial Sequence
  Description of Artificial Sequence: Synthetic oligonucleotide
cgucggguuccagcugagu

SEQ ID NO: 999146 - RNA, 19 nt, Artificial Sequence
  Description of Artificial Sequence: Synthetic oligonucleotide
aauauugauuucuagagag

SEQ ID NO: 999147 - RNA, 19 nt, Artificial Sequence
  Description of Artificial Sequence: Synthetic oligonucleotide
aauguuguuauauccauag

SEQ ID NO: 999148 - RNA, 19 nt, Artificial Sequence
  Description of Artificial Sequence: Synthetic oligonucleotide
aaauugauuagcuauggug

SEQ ID NO: 999149 - RNA, 19 nt, Artificial Sequence
  Description of Artificial Sequence: Synthetic oligonucleotide
ucaauauugauuucuagag

SEQ ID NO: 999150 - RNA, 19 nt, Artificial Sequence
  Description of Artificial Sequence: Synthetic oligonucleotide
ugcaguaaaaguaaauggg

SEQ ID NO: 999151 - RNA, 19 nt, Artificial Sequence
  Description of Artificial Sequence: Synthetic oligonucleotide
uguuguuauauccauaggc

SEQ ID NO: 999152 - RNA, 19 nt, Artificial Sequence
  Description of Artificial Sequence: Synthetic oligonucleotide
uuugggauuacuuauguga

SEQ ID NO: 999153 - RNA, 19 nt, Artificial Sequence
  Description of Artificial Sequence: Synthetic oligonucleotide
uguuguaauaaacagcaca

SEQ ID NO: 999154 - RNA, 19 nt, Artificial Sequence
  Description of Artificial Sequence: Synthetic oligonucleotide
agcaauaucuucuugggag

SEQ ID NO: 999155 - RNA, 19 nt, Artificial Sequence
  Description of Artificial Sequence: Synthetic oligonucleotide
uugcaguaaaaguaaaugg

SEQ ID NO: 999156 - RNA, 19 nt, Artificial Sequence
  Description of Artificial Sequence: Synthetic oligonucleotide
auuaaaucagcucucacca

SEQ ID NO: 999157 - RNA, 19 nt, Artificial Sequence
  Description of Artificial Sequence: Synthetic oligonucleotide
auugccaucaccuaugacu

SEQ ID NO: 999158 - RNA, 19 nt, Artificial Sequence
  Description of Artificial Sequence: Synthetic oligonucleotide
uugaauuugauaucugaag

SEQ ID NO: 999159 - RNA, 19 nt, Artificial Sequence
  Description of Artificial Sequence: Synthetic oligonucleotide
auauauuccuaguauuuac

SEQ ID NO: 999160 - RNA, 19 nt, Artificial Sequence
  Description of Artificial Sequence: Synthetic oligonucleotide
auaacgucggcucuggugg

SEQ ID NO: 999161 - RNA, 19 nt, Artificial Sequence
  Description of Artificial Sequence: Synthetic oligonucleotide
uguaaauaaugcuuaaggu

SEQ ID NO: 999162 - RNA, 19 nt, Artificial Sequence
  Description of Artificial Sequence: Synthetic oligonucleotide
uuugauaucugaaggacgu

SEQ ID NO: 999163 - RNA, 19 nt, Artificial Sequence
  Description of Artificial Sequence: Synthetic oligonucleotide
aauugauuagcuauggugu

SEQ ID NO: 999164 - RNA, 19 nt, Artificial Sequence
  Description of Artificial Sequence: Synthetic oligonucleotide
cauaauucuguccaggagc

SEQ ID NO: 999165 - RNA, 19 nt, Artificial Sequence
  Description of Artificial Sequence: Synthetic oligonucleotide
uuugcuagaaucuuuuacu

SEQ ID NO: 999166 - RNA, 19 nt, Artificial Sequence
  Description of Artificial Sequence: Synthetic oligonucleotide
uuugcaguaaaaguaaaug

SEQ ID NO: 999167 - RNA, 19 nt, Artificial Sequence
  Description of Artificial Sequence: Synthetic oligonucleotide
ugauauguaaauaaugcuu

SEQ ID NO: 999168 - RNA, 19 nt, Artificial Sequence
  Description of Artificial Sequence: Synthetic oligonucleotide
ucuuguuguaauaaacagc

SEQ ID NO: 999169 - RNA, 19 nt, Artificial Sequence
  Description of Artificial Sequence: Synthetic oligonucleotide
uuuacuacaaugucagaga

SEQ ID NO: 999170 - RNA, 19 nt, Artificial Sequence
  Description of Artificial Sequence: Synthetic oligonucleotide
ucuagagaggaacagggca

SEQ ID NO: 999171 - RNA, 19 nt, Artificial Sequence
  Description of Artificial Sequence: Synthetic oligonucleotide
ugaugcuuugaucacguag

SEQ ID NO: 999172 - RNA, 19 nt, Artificial Sequence
  Description of Artificial Sequence: Synthetic oligonucleotide
auuacuuaugugaacugcc

SEQ ID NO: 999173 - RNA, 19 nt, Artificial Sequence
  Description of Artificial Sequence: Synthetic oligonucleotide
aagggcucaauauugauuu

SEQ ID NO: 999174 - RNA, 19 nt, Artificial Sequence
  Description of Artificial Sequence: Synthetic oligonucleotide
uuacuuaugauuugcuucu

SEQ ID NO: 999175 - RNA, 19 nt, Artificial Sequence
  Description of Artificial Sequence: Synthetic oligonucleotide
uccauuaggagaaacuacu

SEQ ID NO: 999176 - RNA, 19 nt, Artificial Sequence
  Description of Artificial Sequence: Synthetic oligonucleotide
cuugauuuuccauuaggag

SEQ ID NO: 999177 - RNA, 19 nt, Artificial Sequence
  Description of Artificial Sequence: Synthetic oligonucleotide
aguaaaaguaaaugggccu

SEQ ID NO: 999178 - RNA, 19 nt, Artificial Sequence
  Description of Artificial Sequence: Synthetic oligonucleotide
uguuccuuacuuaugauuu

SEQ ID NO: 999179 - RNA, 19 nt, Artificial Sequence
  Description of Artificial Sequence: Synthetic oligonucleotide
ucagagauauccaagccaa

SEQ ID NO: 999180 - RNA, 19 nt, Artificial Sequence
  Description of Artificial Sequence: Synthetic oligonucleotide
uggaugaucucaaacccag

SEQ ID NO: 999181 - RNA, 19 nt, Artificial Sequence
  Description of Artificial Sequence: Synthetic oligonucleotide
ucaccuaugacuucugacu

SEQ ID NO: 999182 - RNA, 19 nt, Artificial Sequence
  Description of Artificial Sequence: Synthetic oligonucleotide
aauggacguacuuuagcug

SEQ ID NO: 999183 - RNA, 19 nt, Artificial Sequence
  Description of Artificial Sequence: Synthetic oligonucleotide
guugagaggaaauugauua

SEQ ID NO: 999184 - RNA, 19 nt, Artificial Sequence
  Description of Artificial Sequence: Synthetic oligonucleotide
uuauucagaggcuugaauu

SEQ ID NO: 999185 - RNA, 19 nt, Artificial Sequence
  Description of Artificial Sequence: Synthetic oligonucleotide
ucguuuauauacuggagcu

SEQ ID NO: 999186 - RNA, 19 nt, Artificial Sequence
  Description of Artificial Sequence: Synthetic oligonucleotide
cucguuuauauacuggagc

SEQ ID NO: 999187 - RNA, 19 nt, Artificial Sequence
  Description of Artificial Sequence: Synthetic oligonucleotide
gaugcuuugaccccgggca

SEQ ID NO: 999188 - RNA, 19 nt, Artificial Sequence
  Description of Artificial Sequence: Synthetic oligonucleotide
augauauguaaauaaugcu

SEQ ID NO: 999189 - RNA, 19 nt, Artificial Sequence
  Description of Artificial Sequence: Synthetic oligonucleotide
aaucugauugccaucaccu

SEQ ID NO: 999190 - RNA, 19 nt, Artificial Sequence
  Description of Artificial Sequence: Synthetic oligonucleotide
auauccauaggcaauagcu

SEQ ID NO: 999191 - RNA, 19 nt, Artificial Sequence
  Description of Artificial Sequence: Synthetic oligonucleotide
acuacaaugucagagauuu

SEQ ID NO: 999192 - RNA, 19 nt, Artificial Sequence
  Description of Artificial Sequence: Synthetic oligonucleotide
aagacuuggaguccccgag

SEQ ID NO: 999193 - RNA, 19 nt, Artificial Sequence
  Description of Artificial Sequence: Synthetic oligonucleotide
aacucagcaguuuugggau

SEQ ID NO: 999194 - RNA, 19 nt, Artificial Sequence
  Description of Artificial Sequence: Synthetic oligonucleotide
aggagaucguaucuguugg

SEQ ID NO: 999195 - RNA, 19 nt, Artificial Sequence
  Description of Artificial Sequence: Synthetic oligonucleotide
caaugaaacugucguaucg

SEQ ID NO: 999196 - RNA, 19 nt, Artificial Sequence
  Description of Artificial Sequence: Synthetic oligonucleotide
auuacucguuuauauacug

SEQ ID NO: 999197 - RNA, 19 nt, Artificial Sequence
  Description of Artificial Sequence: Synthetic oligonucleotide
ugucguaucgaucuuucgu

SEQ ID NO: 999198 - RNA, 19 nt, Artificial Sequence
  Description of Artificial Sequence: Synthetic oligonucleotide
uguuauauccauaggcaau

SEQ ID NO: 999199 - RNA, 19 nt, Artificial Sequence
  Description of Artificial Sequence: Synthetic oligonucleotide
uggugauaacaucaggaug

SEQ ID NO: 999200 - RNA, 19 nt, Artificial Sequence
  Description of Artificial Sequence: Synthetic oligonucleotide
acuaggaggcacaucaagc

SEQ ID NO: 999201 - RNA, 19 nt, Artificial Sequence
  Description of Artificial Sequence: Synthetic oligonucleotide
ugguguauguuuucggcag

SEQ ID NO: 999202 - RNA, 19 nt, Artificial Sequence
  Description of Artificial Sequence: Synthetic oligonucleotide
acaguauucacugaacaug

SEQ ID NO: 999203 - RNA, 19 nt, Artificial Sequence
  Description of Artificial Sequence: Synthetic oligonucleotide
gauuacuuaugugaacugc

SEQ ID NO: 999204 - RNA, 19 nt, Artificial Sequence
  Description of Artificial Sequence: Synthetic oligonucleotide
gauaacgucggcucuggug

SEQ ID NO: 999205 - RNA, 19 nt, Artificial Sequence
  Description of Artificial Sequence: Synthetic oligonucleotide
aaugaaacugucguaucga

SEQ ID NO: 999206 - RNA, 19 nt, Artificial Sequence
  Description of Artificial Sequence: Synthetic oligonucleotide
ucgugaacuugauauuccg

SEQ ID NO: 999207 - RNA, 19 nt, Artificial Sequence
  Description of Artificial Sequence: Synthetic oligonucleotide
ugacaauaaugucaagcac

SEQ ID NO: 999208 - RNA, 19 nt, Artificial Sequence
  Description of Artificial Sequence: Synthetic oligonucleotide
uugagaggaaauugauuag

SEQ ID NO: 999209 - RNA, 19 nt, Artificial Sequence
  Description of Artificial Sequence: Synthetic oligonucleotide
ugaucucaaacccaggauu

SEQ ID NO: 999210 - RNA, 19 nt, Artificial Sequence
  Description of Artificial Sequence: Synthetic oligonucleotide
ugcuacagcaaauggacgu

SEQ ID NO: 999211 - RNA, 19 nt, Artificial Sequence
  Description of Artificial Sequence: Synthetic oligonucleotide
gcuuugaucacguagcccc

SEQ ID NO: 999212 - RNA, 19 nt, Artificial Sequence
  Description of Artificial Sequence: Synthetic oligonucleotide
uuaugauuugcuucucaga

SEQ ID NO: 999213 - RNA, 19 nt, Artificial Sequence
  Description of Artificial Sequence: Synthetic oligonucleotide
aagaaggguagugcgcgcc

SEQ ID NO: 999214 - RNA, 19 nt, Artificial Sequence
  Description of Artificial Sequence: Synthetic oligonucleotide
guauucacugaacauggug

SEQ ID NO: 999215 - RNA, 19 nt, Artificial Sequence
  Description of Artificial Sequence: Synthetic oligonucleotide
aauauauuccuaguauuua

SEQ ID NO: 999216 - RNA, 19 nt, Artificial Sequence
  Description of Artificial Sequence: Synthetic oligonucleotide
uugucagucuuguauauau

SEQ ID NO: 999217 - RNA, 19 nt, Artificial Sequence
  Description of Artificial Sequence: Synthetic oligonucleotide
cucccuuaggcauuacucg

SEQ ID NO: 999218 - RNA, 19 nt, Artificial Sequence
  Description of Artificial Sequence: Synthetic oligonucleotide
uguugaugcuuugaucacg

SEQ ID NO: 999219 - RNA, 19 nt, Artificial Sequence
  Description of Artificial Sequence: Synthetic oligonucleotide
uccacgaugucacaggcau

SEQ ID NO: 999220 - RNA, 19 nt, Artificial Sequence
  Description of Artificial Sequence: Synthetic oligonucleotide
uuacuuaugugaacugccu

SEQ ID NO: 999221 - RNA, 19 nt, Artificial Sequence
  Description of Artificial Sequence: Synthetic oligonucleotide
uuauccuuucuuugaagac

SEQ ID NO: 999222 - RNA, 19 nt, Artificial Sequence
  Description of Artificial Sequence: Synthetic oligonucleotide
auagauaacuggauacagg

SEQ ID NO: 999223 - RNA, 19 nt, Artificial Sequence
  Description of Artificial Sequence: Synthetic oligonucleotide
ucugauugccaucaccuau

SEQ ID NO: 999224 - RNA, 19 nt, Artificial Sequence
  Description of Artificial Sequence: Synthetic oligonucleotide
gauuucuagagaggaacag

SEQ ID NO: 999225 - RNA, 19 nt, Artificial Sequence
  Description of Artificial Sequence: Synthetic oligonucleotide
auggacguacuuuagcugu

SEQ ID NO: 999226 - RNA, 19 nt, Artificial Sequence
  Description of Artificial Sequence: Synthetic oligonucleotide
uuaggcauuacucguuuau

SEQ ID NO: 999227 - RNA, 19 nt, Artificial Sequence
  Description of Artificial Sequence: Synthetic oligonucleotide
guuguuauauccauaggca

SEQ ID NO: 999228 - RNA, 19 nt, Artificial Sequence
  Description of Artificial Sequence: Synthetic oligonucleotide
ugcauaauucuguccagga

SEQ ID NO: 999229 - RNA, 19 nt, Artificial Sequence
  Description of Artificial Sequence: Synthetic oligonucleotide
acgucaaccuuguaaagca

SEQ ID NO: 999230 - RNA, 19 nt, Artificial Sequence
  Description of Artificial Sequence: Synthetic oligonucleotide
ugugaacugccuuuguuuc

SEQ ID NO: 999231 - RNA, 19 nt, Artificial Sequence
  Description of Artificial Sequence: Synthetic oligonucleotide
uauccuuucuuugaagacu

SEQ ID NO: 999232 - RNA, 19 nt, Artificial Sequence
  Description of Artificial Sequence: Synthetic oligonucleotide
cauagauaacuggauacag

SEQ ID NO: 999233 - RNA, 19 nt, Artificial Sequence
  Description of Artificial Sequence: Synthetic oligonucleotide
gucguaucgaucuuucgug

SEQ ID NO: 999234 - RNA, 19 nt, Artificial Sequence
  Description of Artificial Sequence: Synthetic oligonucleotide
guaaaaguaaaugggccug

SEQ ID NO: 999235 - RNA, 19 nt, Artificial Sequence
  Description of Artificial Sequence: Synthetic oligonucleotide
aaacauagcucgucaaauu

SEQ ID NO: 999236 - RNA, 19 nt, Artificial Sequence
  Description of Artificial Sequence: Synthetic oligonucleotide
guauguuuucggcagaguc

SEQ ID NO: 999237 - RNA, 19 nt, Artificial Sequence
  Description of Artificial Sequence: Synthetic oligonucleotide
gaggaaauugauuagcuau

SEQ ID NO: 999238 - RNA, 19 nt, Artificial Sequence
  Description of Artificial Sequence: Synthetic oligonucleotide
gagaggaccacaccauugc

SEQ ID NO: 999239 - RNA, 19 nt, Artificial Sequence
  Description of Artificial Sequence: Synthetic oligonucleotide
uuggugauaacaucaggau

SEQ ID NO: 999240 - RNA, 19 nt, Artificial Sequence
  Description of Artificial Sequence: Synthetic oligonucleotide
caaauggacguacuuuagc

SEQ ID NO: 999241 - RNA, 19 nt, Artificial Sequence
  Description of Artificial Sequence: Synthetic oligonucleotide
cuaugguguauguuuucgg

SEQ ID NO: 999242 - RNA, 19 nt, Artificial Sequence
  Description of Artificial Sequence: Synthetic oligonucleotide
uccaagccaaguuuaucag

SEQ ID NO: 999243 - RNA, 19 nt, Artificial Sequence
  Description of Artificial Sequence: Synthetic oligonucleotide
cacgaugucacaggcaugg

SEQ ID NO: 999244 - RNA, 19 nt, Artificial Sequence
  Description of Artificial Sequence: Synthetic oligonucleotide
ggugauaacaucaggauga

SEQ ID NO: 999245 - RNA, 19 nt, Artificial Sequence
  Description of Artificial Sequence: Synthetic oligonucleotide
gauuucagcacaccgccca

SEQ ID NO: 999246 - RNA, 19 nt, Artificial Sequence
  Description of Artificial Sequence: Synthetic oligonucleotide
caugagugccaauagcaac

SEQ ID NO: 999247 - RNA, 19 nt, Artificial Sequence
  Description of Artificial Sequence: Synthetic oligonucleotide
aaggguagugcgcgccacc

SEQ ID NO: 999248 - RNA, 19 nt, Artificial Sequence
  Description of Artificial Sequence: Synthetic oligonucleotide
ugcuuaaggugguugucag

SEQ ID NO: 999249 - RNA, 19 nt, Artificial Sequence
  Description of Artificial Sequence: Synthetic oligonucleotide
agucaguuccugugcauuc

SEQ ID NO: 999250 - RNA, 19 nt, Artificial Sequence
  Description of Artificial Sequence: Synthetic oligonucleotide
uuuugggauuacuuaugug

SEQ ID NO: 999251 - RNA, 19 nt, Artificial Sequence
  Description of Artificial Sequence: Synthetic oligonucleotide
caagccaaguuuaucagca

SEQ ID NO: 999252 - RNA, 19 nt, Artificial Sequence
  Description of Artificial Sequence: Synthetic oligonucleotide
gcauuacucguuuauauac

SEQ ID NO: 999253 - RNA, 19 nt, Artificial Sequence
  Description of Artificial Sequence: Synthetic oligonucleotide
uucuagagaggaacagggc

SEQ ID NO: 999254 - RNA, 19 nt, Artificial Sequence
  Description of Artificial Sequence: Synthetic oligonucleotide
auguuguuauauccauagg

SEQ ID NO: 999255 - RNA, 19 nt, Artificial Sequence
  Description of Artificial Sequence: Synthetic oligonucleotide
gaacuugauauuccggaga

SEQ ID NO: 999256 - RNA, 19 nt, Artificial Sequence
  Description of Artificial Sequence: Synthetic oligonucleotide
ugccaauagcaaccaaugc

SEQ ID NO: 999257 - RNA, 19 nt, Artificial Sequence
  Description of Artificial Sequence: Synthetic oligonucleotide
ugcuagaaucuuuuacuac

SEQ ID NO: 999258 - RNA, 19 nt, Artificial Sequence
  Description of Artificial Sequence: Synthetic oligonucleotide
aguggcaucuuucgguuug

SEQ ID NO: 999259 - RNA, 19 nt, Artificial Sequence
  Description of Artificial Sequence: Synthetic oligonucleotide
accaucucuuuucuguaag

SEQ ID NO: 999260 - RNA, 19 nt, Artificial Sequence
  Description of Artificial Sequence: Synthetic oligonucleotide
ucaugagugccaauagcaa

SEQ ID NO: 999261 - RNA, 19 nt, Artificial Sequence
  Description of Artificial Sequence: Synthetic oligonucleotide
auauugauuucuagagagg

SEQ ID NO: 999262 - RNA, 19 nt, Artificial Sequence
  Description of Artificial Sequence: Synthetic oligonucleotide
gcaucuuucgguuugccgc

SEQ ID NO: 999263 - RNA, 19 nt, Artificial Sequence
  Description of Artificial Sequence: Synthetic oligonucleotide
gagaacggcugcuacagca

SEQ ID NO: 999264 - RNA, 19 nt, Artificial Sequence
  Description of Artificial Sequence: Synthetic oligonucleotide
ugauuagcuaugguguaug

SEQ ID NO: 999265 - RNA, 19 nt, Artificial Sequence
  Description of Artificial Sequence: Synthetic oligonucleotide
caaucugauugccaucacc

SEQ ID NO: 999266 - RNA, 19 nt, Artificial Sequence
  Description of Artificial Sequence: Synthetic oligonucleotide
ccuuagugaagucaguucc

SEQ ID NO: 999267 - RNA, 19 nt, Artificial Sequence
  Description of Artificial Sequence: Synthetic oligonucleotide
uuccuuacuuaugauuugc

SEQ ID NO: 999268 - RNA, 19 nt, Artificial Sequence
  Description of Artificial Sequence: Synthetic oligonucleotide
ugaaggacgcccagcuucc

SEQ ID NO: 999269 - RNA, 19 nt, Artificial Sequence
  Description of Artificial Sequence: Synthetic oligonucleotide
accuguugaugcuuugauc

SEQ ID NO: 999270 - RNA, 19 nt, Artificial Sequence
  Description of Artificial Sequence: Synthetic oligonucleotide
cuacgucuuugcuagaauc

SEQ ID NO: 999271 - RNA, 19 nt, Artificial Sequence
  Description of Artificial Sequence: Synthetic oligonucleotide
uaucgaucuuucgugaacu

SEQ ID NO: 999272 - RNA, 19 nt, Artificial Sequence
  Description of Artificial Sequence: Synthetic oligonucleotide
uauuccggagaacggcugc

SEQ ID NO: 999273 - RNA, 19 nt, Artificial Sequence
  Description of Artificial Sequence: Synthetic oligonucleotide
uguagguccggcccagagc

SEQ ID NO: 999274 - RNA, 19 nt, Artificial Sequence
  Description of Artificial Sequence: Synthetic oligonucleotide
ugaaacugucguaucgauc

SEQ ID NO: 999275 - RNA, 19 nt, Artificial Sequence
  Description of Artificial Sequence: Synthetic oligonucleotide
auagcugcguccuccacga

SEQ ID NO: 999276 - RNA, 19 nt, Artificial Sequence
  Description of Artificial Sequence: Synthetic oligonucleotide
gacguuuugcaguaaaagu

SEQ ID NO: 999277 - RNA, 19 nt, Artificial Sequence
  Description of Artificial Sequence: Synthetic oligonucleotide
uucgguuugccgcaauggu

SEQ ID NO: 999278 - RNA, 19 nt, Artificial Sequence
  Description of Artificial Sequence: Synthetic oligonucleotide
aaucagcucucaccaucuc

SEQ ID NO: 999279 - RNA, 19 nt, Artificial Sequence
  Description of Artificial Sequence: Synthetic oligonucleotide
augguguauguuuucggca

SEQ ID NO: 999280 - RNA, 19 nt, Artificial Sequence
  Description of Artificial Sequence: Synthetic oligonucleotide
uaugugaacugccuuuguu

SEQ ID NO: 999281 - RNA, 19 nt, Artificial Sequence
  Description of Artificial Sequence: Synthetic oligonucleotide
ucaaacccaggauucuugu

SEQ ID NO: 999282 - RNA, 19 nt, Artificial Sequence
  Description of Artificial Sequence: Synthetic oligonucleotide
uugcuagaaucuuuuacua

SEQ ID NO: 999283 - RNA, 19 nt, Artificial Sequence
  Description of Artificial Sequence: Synthetic oligonucleotide
ugucucuucugugauaauc

SEQ ID NO: 999284 - RNA, 19 nt, Artificial Sequence
  Description of Artificial Sequence: Synthetic oligonucleotide
ucaaugaaacugucguauc

SEQ ID NO: 999285 - RNA, 19 nt, Artificial Sequence
  Description of Artificial Sequence: Synthetic oligonucleotide
uuauauccauaggcaauag

SEQ ID NO: 999286 - RNA, 19 nt, Artificial Sequence
  Description of Artificial Sequence: Synthetic oligonucleotide
aggcauuacucguuuauau

SEQ ID NO: 999287 - RNA, 19 nt, Artificial Sequence
  Description of Artificial Sequence: Synthetic oligonucleotide
gcaccuacgucuuugcuag

SEQ ID NO: 999288 - RNA, 19 nt, Artificial Sequence
  Description of Artificial Sequence: Synthetic oligonucleotide
uccuuacuuaugauuugcu

SEQ ID NO: 999289 - RNA, 19 nt, Artificial Sequence
  Description of Artificial Sequence: Synthetic oligonucleotide
aguguccaagucaugagug

SEQ ID NO: 999290 - RNA, 19 nt, Artificial Sequence
  Description of Artificial Sequence: Synthetic oligonucleotide
cacgucaaccuuguaaagc

SEQ ID NO: 999291 - RNA, 19 nt, Artificial Sequence
  Description of Artificial Sequence: Synthetic oligonucleotide
auugauuagcuauggugua

SEQ ID NO: 999292 - RNA, 19 nt, Artificial Sequence
  Description of Artificial Sequence: Synthetic oligonucleotide
uccuaguauuuacuguuau

SEQ ID NO: 999293 - RNA, 19 nt, Artificial Sequence
  Description of Artificial Sequence: Synthetic oligonucleotide
uaggcaauagcugcguccu

SEQ ID NO: 999294 - RNA, 19 nt, Artificial Sequence
  Description of Artificial Sequence: Synthetic oligonucleotide
gguagugcgcgccaccugg

SEQ ID NO: 999295 - RNA, 19 nt, Artificial Sequence
  Description of Artificial Sequence: Synthetic oligonucleotide
ucguaucgaucuuucguga

SEQ ID NO: 999296 - RNA, 19 nt, Artificial Sequence
  Description of Artificial Sequence: Synthetic oligonucleotide
uuuauauacuggagcuuuu

SEQ ID NO: 999297 - RNA, 19 nt, Artificial Sequence
  Description of Artificial Sequence: Synthetic oligonucleotide
ugauaucugaaggacguuu

SEQ ID NO: 999298 - RNA, 19 nt, Artificial Sequence
  Description of Artificial Sequence: Synthetic oligonucleotide
aaugggccugauaaagugu

SEQ ID NO: 999299 - RNA, 19 nt, Artificial Sequence
  Description of Artificial Sequence: Synthetic oligonucleotide
uuggucuuauucagaggcu

SEQ ID NO: 999300 - RNA, 19 nt, Artificial Sequence
  Description of Artificial Sequence: Synthetic oligonucleotide
guaucgaucuuucgugaac

SEQ ID NO: 999301 - RNA, 19 nt, Artificial Sequence
  Description of Artificial Sequence: Synthetic oligonucleotide
uuaaggugguugucagucu

SEQ ID NO: 999302 - RNA, 19 nt, Artificial Sequence
  Description of Artificial Sequence: Synthetic oligonucleotide
ucgaucuuucgugaacuug

SEQ ID NO: 999303 - RNA, 19 nt, Artificial Sequence
  Description of Artificial Sequence: Synthetic oligonucleotide
uggucuuuagaaggccagg

SEQ ID NO: 999304 - RNA, 19 nt, Artificial Sequence
  Description of Artificial Sequence: Synthetic oligonucleotide
ugggauuacuuaugugaac

SEQ ID NO: 999305 - RNA, 19 nt, Artificial Sequence
  Description of Artificial Sequence: Synthetic oligonucleotide
gauauccaagccaaguuua

SEQ ID NO: 999306 - RNA, 19 nt, Artificial Sequence
  Description of Artificial Sequence: Synthetic oligonucleotide
ucgguuugccgcaaugguc

SEQ ID NO: 999307 - RNA, 19 nt, Artificial Sequence
  Description of Artificial Sequence: Synthetic oligonucleotide
uacuuaugugaacugccuu

SEQ ID NO: 999308 - RNA, 19 nt, Artificial Sequence
  Description of Artificial Sequence: Synthetic oligonucleotide
agugcgcgccaccuggaac

SEQ ID NO: 999309 - RNA, 19 nt, Artificial Sequence
  Description of Artificial Sequence: Synthetic oligonucleotide
agaggaaauugauuagcua

SEQ ID NO: 999310 - RNA, 19 nt, Artificial Sequence
  Description of Artificial Sequence: Synthetic oligonucleotide
guuccugugcauucaauaa

SEQ ID NO: 999311 - RNA, 19 nt, Artificial Sequence
  Description of Artificial Sequence: Synthetic oligonucleotide
agccaguccuuccagacau

SEQ ID NO: 999312 - RNA, 19 nt, Artificial Sequence
  Description of Artificial Sequence: Synthetic oligonucleotide
cugcuacagcaaauggacg

SEQ ID NO: 999313 - RNA, 19 nt, Artificial Sequence
  Description of Artificial Sequence: Synthetic oligonucleotide
aggcacgucaaccuuguaa

SEQ ID NO: 999314 - RNA, 19 nt, Artificial Sequence
  Description of Artificial Sequence: Synthetic oligonucleotide
caaguuuaucagcaauauc

SEQ ID NO: 999315 - RNA, 19 nt, Artificial Sequence
  Description of Artificial Sequence: Synthetic oligonucleotide
cccauuuauuauuggaggc

SEQ ID NO: 999316 - RNA, 19 nt, Artificial Sequence
  Description of Artificial Sequence: Synthetic oligonucleotide
uuucgcaccuacgucuuug

SEQ ID NO: 999317 - RNA, 19 nt, Artificial Sequence
  Description of Artificial Sequence: Synthetic oligonucleotide
uggauaacgucggcucugg

SEQ ID NO: 999318 - RNA, 19 nt, Artificial Sequence
  Description of Artificial Sequence: Synthetic oligonucleotide
caucgagaggaccacacca

SEQ ID NO: 999319 - RNA, 19 nt, Artificial Sequence
  Description of Artificial Sequence: Synthetic oligonucleotide
ugaccccgggcaaagauuu

SEQ ID NO: 999320 - RNA, 19 nt, Artificial Sequence
  Description of Artificial Sequence: Synthetic oligonucleotide
acugucguaucgaucuuuc

SEQ ID NO: 999321 - RNA, 19 nt, Artificial Sequence
  Description of Artificial Sequence: Synthetic oligonucleotide
ggacguuuugcaguaaaag

SEQ ID NO: 999322 - RNA, 19 nt, Artificial Sequence
  Description of Artificial Sequence: Synthetic oligonucleotide
ugagcuuguugagaggaaa

SEQ ID NO: 999323 - RNA, 19 nt, Artificial Sequence
  Description of Artificial Sequence: Synthetic oligonucleotide
agugccaauagcaaccaau

SEQ ID NO: 999324 - RNA, 19 nt, Artificial Sequence
  Description of Artificial Sequence: Synthetic oligonucleotide
uuaaaucagcucucaccau

SEQ ID NO: 999325 - RNA, 19 nt, Artificial Sequence
  Description of Artificial Sequence: Synthetic oligonucleotide
agauucccugauuccaacu

SEQ ID NO: 999326 - RNA, 19 nt, Artificial Sequence
  Description of Artificial Sequence: Synthetic oligonucleotide
augaaacugucguaucgau

SEQ ID NO: 999327 - RNA, 19 nt, Artificial Sequence
  Description of Artificial Sequence: Synthetic oligonucleotide
gcuaugguguauguuuucg

SEQ ID NO: 999328 - RNA, 19 nt, Artificial Sequence
  Description of Artificial Sequence: Synthetic oligonucleotide
gaagacuuggaguccccga

SEQ ID NO: 999329 - RNA, 19 nt, Artificial Sequence
  Description of Artificial Sequence: Synthetic oligonucleotide
acucguuuauauacuggag

SEQ ID NO: 999330 - RNA, 19 nt, Artificial Sequence
  Description of Artificial Sequence: Synthetic oligonucleotide
ggucagcucaaauuuggug

SEQ ID NO: 999331 - RNA, 19 nt, Artificial Sequence
  Description of Artificial Sequence: Synthetic oligonucleotide
uuccuaguauuuacuguua

SEQ ID NO: 999332 - RNA, 19 nt, Artificial Sequence
  Description of Artificial Sequence: Synthetic oligonucleotide
ugauaacaucaggaugaag

SEQ ID NO: 999333 - RNA, 19 nt, Artificial Sequence
  Description of Artificial Sequence: Synthetic oligonucleotide
guuauauccauaggcaaua

SEQ ID NO: 999334 - RNA, 19 nt, Artificial Sequence
  Description of Artificial Sequence: Synthetic oligonucleotide
aggauucuuguuguaauaa

SEQ ID NO: 999335 - RNA, 19 nt, Artificial Sequence
  Description of Artificial Sequence: Synthetic oligonucleotide
auagcaaccaaugcucuuu

SEQ ID NO: 999336 - RNA, 19 nt, Artificial Sequence
  Description of Artificial Sequence: Synthetic oligonucleotide
gaagaaggguagugcgcgc

SEQ ID NO: 999337 - RNA, 19 nt, Artificial Sequence
  Description of Artificial Sequence: Synthetic oligonucleotide
agauuucagcacaccgccc

SEQ ID NO: 999338 - RNA, 19 nt, Artificial Sequence
  Description of Artificial Sequence: Synthetic oligonucleotide
agcucaaauuuggugauaa

SEQ ID NO: 999339 - RNA, 19 nt, Artificial Sequence
  Description of Artificial Sequence: Synthetic oligonucleotide
acagcaaauggacguacuu

SEQ ID NO: 999340 - RNA, 19 nt, Artificial Sequence
  Description of Artificial Sequence: Synthetic oligonucleotide
aauaaugcuuaaggugguu

SEQ ID NO: 999341 - RNA, 19 nt, Artificial Sequence
  Description of Artificial Sequence: Synthetic oligonucleotide
uucccgaugcuuugacccc

SEQ ID NO: 999342 - RNA, 19 nt, Artificial Sequence
  Description of Artificial Sequence: Synthetic oligonucleotide
ugccgcaauggucuuuaga

SEQ ID NO: 999343 - RNA, 19 nt, Artificial Sequence
  Description of Artificial Sequence: Synthetic oligonucleotide
ugcuuugaucacguagccc

SEQ ID NO: 999344 - RNA, 19 nt, Artificial Sequence
  Description of Artificial Sequence: Synthetic oligonucleotide
auaacuggauacaggggcu

SEQ ID NO: 999345 - RNA, 19 nt, Artificial Sequence
  Description of Artificial Sequence: Synthetic oligonucleotide
cugucguaucgaucuuucg

SEQ ID NO: 999346 - RNA, 19 nt, Artificial Sequence
  Description of Artificial Sequence: Synthetic oligonucleotide
uacuacaaugucagagauu

SEQ ID NO: 999347 - RNA, 19 nt, Artificial Sequence
  Description of Artificial Sequence: Synthetic oligonucleotide
gaaauugauuagcuauggu

SEQ ID NO: 999348 - RNA, 19 nt, Artificial Sequence
  Description of Artificial Sequence: Synthetic oligonucleotide
ggauuacuuaugugaacug

SEQ ID NO: 999349 - RNA, 19 nt, Artificial Sequence
  Description of Artificial Sequence: Synthetic oligonucleotide
uucgcaccuacgucuuugc

SEQ ID NO: 999350 - RNA, 19 nt, Artificial Sequence
  Description of Artificial Sequence: Synthetic oligonucleotide
cuuucgguuugccgcaaug

SEQ ID NO: 999351 - RNA, 19 nt, Artificial Sequence
  Description of Artificial Sequence: Synthetic oligonucleotide
uugauuagcuaugguguau

SEQ ID NO: 999352 - RNA, 19 nt, Artificial Sequence
  Description of Artificial Sequence: Synthetic oligonucleotide
guagguccggcccagagcu

SEQ ID NO: 999353 - RNA, 19 nt, Artificial Sequence
  Description of Artificial Sequence: Synthetic oligonucleotide
cauuaguucacaagcugua

SEQ ID NO: 999354 - RNA, 19 nt, Artificial Sequence
  Description of Artificial Sequence: Synthetic oligonucleotide
gcuuguugagaggaaauug

SEQ ID NO: 999355 - RNA, 19 nt, Artificial Sequence
  Description of Artificial Sequence: Synthetic oligonucleotide
gguacuugauuuuccauua

SEQ ID NO: 999356 - RNA, 19 nt, Artificial Sequence
  Description of Artificial Sequence: Synthetic oligonucleotide
auuaguucacaagcuguau

SEQ ID NO: 999357 - RNA, 19 nt, Artificial Sequence
  Description of Artificial Sequence: Synthetic oligonucleotide
uaacgucggcucugguggg

SEQ ID NO: 999358 - RNA, 19 nt, Artificial Sequence
  Description of Artificial Sequence: Synthetic oligonucleotide
ggcacgucaaccuuguaaa

SEQ ID NO: 999359 - RNA, 19 nt, Artificial Sequence
  Description of Artificial Sequence: Synthetic oligonucleotide
guuuugggauuacuuaugu

SEQ ID NO: 999360 - RNA, 19 nt, Artificial Sequence
  Description of Artificial Sequence: Synthetic oligonucleotide
uuugccgcaauggucuuua

SEQ ID NO: 999361 - RNA, 19 nt, Artificial Sequence
  Description of Artificial Sequence: Synthetic oligonucleotide
gcaaaaguaagagcuucag

SEQ ID NO: 999362 - RNA, 19 nt, Artificial Sequence
  Description of Artificial Sequence: Synthetic oligonucleotide
ucccgaugcuuugaccccg

SEQ ID NO: 999363 - RNA, 19 nt, Artificial Sequence
  Description of Artificial Sequence: Synthetic oligonucleotide
gagaggaaauugauuagcu

SEQ ID NO: 999364 - RNA, 19 nt, Artificial Sequence
  Description of Artificial Sequence: Synthetic oligonucleotide
agaaggguagugcgcgcca

SEQ ID NO: 999365 - RNA, 19 nt, Artificial Sequence
  Description of Artificial Sequence: Synthetic oligonucleotide
acggcugcuacagcaaaug

SEQ ID NO: 999366 - RNA, 19 nt, Artificial Sequence
  Description of Artificial Sequence: Synthetic oligonucleotide
cagagauauccaagccaag

SEQ ID NO: 999367 - RNA, 19 nt, Artificial Sequence
  Description of Artificial Sequence: Synthetic oligonucleotide
gcuguauacuccuuggucu

SEQ ID NO: 999368 - RNA, 19 nt, Artificial Sequence
  Description of Artificial Sequence: Synthetic oligonucleotide
uggacguacuuuagcuguc

SEQ ID NO: 999369 - RNA, 19 nt, Artificial Sequence
  Description of Artificial Sequence: Synthetic oligonucleotide
gauugccaucaccuaugac

SEQ ID NO: 999370 - RNA, 19 nt, Artificial Sequence
  Description of Artificial Sequence: Synthetic oligonucleotide
aaacugucguaucgaucuu

SEQ ID NO: 999371 - RNA, 19 nt, Artificial Sequence
  Description of Artificial Sequence: Synthetic oligonucleotide
ugccuuagugaagucaguu

SEQ ID NO: 999372 - RNA, 19 nt, Artificial Sequence
  Description of Artificial Sequence: Synthetic oligonucleotide
caucuuucgguuugccgca

SEQ ID NO: 999373 - RNA, 19 nt, Artificial Sequence
  Description of Artificial Sequence: Synthetic oligonucleotide
cauuacucguuuauauacu

SEQ ID NO: 999374 - RNA, 19 nt, Artificial Sequence
  Description of Artificial Sequence: Synthetic oligonucleotide
ccaagccaaguuuaucagc

SEQ ID NO: 999375 - RNA, 19 nt, Artificial Sequence
  Description of Artificial Sequence: Synthetic oligonucleotide
auuagcuaugguguauguu

SEQ ID NO: 999376 - RNA, 19 nt, Artificial Sequence
  Description of Artificial Sequence: Synthetic oligonucleotide
ucgagaggaccacaccauu

SEQ ID NO: 999377 - RNA, 19 nt, Artificial Sequence
  Description of Artificial Sequence: Synthetic oligonucleotide
ggcaauagcugcguccucc

SEQ ID NO: 999378 - RNA, 19 nt, Artificial Sequence
  Description of Artificial Sequence: Synthetic oligonucleotide
cuguaagccagcucuggaa

SEQ ID NO: 999379 - RNA, 19 nt, Artificial Sequence
  Description of Artificial Sequence: Synthetic oligonucleotide
uuacauugccuuguuccuu

SEQ ID NO: 999380 - RNA, 19 nt, Artificial Sequence
  Description of Artificial Sequence: Synthetic oligonucleotide
ggaaguggcaucuuucggu

SEQ ID NO: 999381 - RNA, 19 nt, Artificial Sequence
  Description of Artificial Sequence: Synthetic oligonucleotide
cgugaacuugauauuccgg

SEQ ID NO: 999382 - RNA, 19 nt, Artificial Sequence
  Description of Artificial Sequence: Synthetic oligonucleotide
aucugauugccaucaccua

SEQ ID NO: 999383 - RNA, 19 nt, Artificial Sequence
  Description of Artificial Sequence: Synthetic oligonucleotide
cuagagaggaacagggcau

SEQ ID NO: 999384 - RNA, 19 nt, Artificial Sequence
  Description of Artificial Sequence: Synthetic oligonucleotide
gggauuacuuaugugaacu

SEQ ID NO: 999385 - RNA, 19 nt, Artificial Sequence
  Description of Artificial Sequence: Synthetic oligonucleotide
cacaggcauggauaacguc

SEQ ID NO: 999386 - RNA, 19 nt, Artificial Sequence
  Description of Artificial Sequence: Synthetic oligonucleotide
uggaggcaucgagaggacc

SEQ ID NO: 999387 - RNA, 19 nt, Artificial Sequence
  Description of Artificial Sequence: Synthetic oligonucleotide
aucuuucgugaacuugaua

SEQ ID NO: 999388 - RNA, 19 nt, Artificial Sequence
  Description of Artificial Sequence: Synthetic oligonucleotide
guugaugcuuugaucacgu

SEQ ID NO: 999389 - RNA, 19 nt, Artificial Sequence
  Description of Artificial Sequence: Synthetic oligonucleotide
ucgcaccuacgucuuugcu

SEQ ID NO: 999390 - RNA, 19 nt, Artificial Sequence
  Description of Artificial Sequence: Synthetic oligonucleotide
uguauacuccuuggucuua

SEQ ID NO: 999391 - RNA, 19 nt, Artificial Sequence
  Description of Artificial Sequence: Synthetic oligonucleotide
gauaucugaaggacguuuu

SEQ ID NO: 999392 - RNA, 19 nt, Artificial Sequence
  Description of Artificial Sequence: Synthetic oligonucleotide
cagcaauaucuucuuggga

SEQ ID NO: 999393 - RNA, 19 nt, Artificial Sequence
  Description of Artificial Sequence: Synthetic oligonucleotide
gccuuagugaagucaguuc

SEQ ID NO: 999394 - RNA, 19 nt, Artificial Sequence
  Description of Artificial Sequence: Synthetic oligonucleotide
aucgaucuuucgugaacuu

SEQ ID NO: 999395 - RNA, 19 nt, Artificial Sequence
  Description of Artificial Sequence: Synthetic oligonucleotide
aggugguugucagucuugu

SEQ ID NO: 999396 - RNA, 19 nt, Artificial Sequence
  Description of Artificial Sequence: Synthetic oligonucleotide
uacuuaugauuugcuucuc

SEQ ID NO: 999397 - RNA, 19 nt, Artificial Sequence
  Description of Artificial Sequence: Synthetic oligonucleotide
aacggcugcuacagcaaau

SEQ ID NO: 999398 - RNA, 19 nt, Artificial Sequence
  Description of Artificial Sequence: Synthetic oligonucleotide
ucuuucgguuugccgcaau

SEQ ID NO: 999399 - RNA, 19 nt, Artificial Sequence
  Description of Artificial Sequence: Synthetic oligonucleotide
aggcaauagcugcguccuc

SEQ ID NO: 999400 - RNA, 19 nt, Artificial Sequence
  Description of Artificial Sequence: Synthetic oligonucleotide
uuggaguccccgagccagu

SEQ ID NO: 999401 - RNA, 19 nt, Artificial Sequence
  Description of Artificial Sequence: Synthetic oligonucleotide
caggauucuuguuguaaua

SEQ ID NO: 999402 - RNA, 19 nt, Artificial Sequence
  Description of Artificial Sequence: Synthetic oligonucleotide
accuacgucuuugcuagaa

SEQ ID NO: 999403 - RNA, 19 nt, Artificial Sequence
  Description of Artificial Sequence: Synthetic oligonucleotide
gaaggguagugcgcgccac

SEQ ID NO: 999404 - RNA, 19 nt, Artificial Sequence
  Description of Artificial Sequence: Synthetic oligonucleotide
cgaucuuucgugaacuuga

SEQ ID NO: 999405 - RNA, 19 nt, Artificial Sequence
  Description of Artificial Sequence: Synthetic oligonucleotide
ugucacaggcauggauaac

SEQ ID NO: 999406 - RNA, 19 nt, Artificial Sequence
  Description of Artificial Sequence: Synthetic oligonucleotide
auuccggagaacggcugcu

SEQ ID NO: 999407 - RNA, 19 nt, Artificial Sequence
  Description of Artificial Sequence: Synthetic oligonucleotide
caauagcugcguccuccac

SEQ ID NO: 999408 - RNA, 19 nt, Artificial Sequence
  Description of Artificial Sequence: Synthetic oligonucleotide
uugauaucugaaggacguu

SEQ ID NO: 999409 - RNA, 19 nt, Artificial Sequence
  Description of Artificial Sequence: Synthetic oligonucleotide
gcacgucaaccuuguaaag

SEQ ID NO: 999410 - RNA, 19 nt, Artificial Sequence
  Description of Artificial Sequence: Synthetic oligonucleotide
cgggcaaagauuucagcac

SEQ ID NO: 999411 - RNA, 19 nt, Artificial Sequence
  Description of Artificial Sequence: Synthetic oligonucleotide
uuuucgcaccuacgucuuu

SEQ ID NO: 999412 - RNA, 19 nt, Artificial Sequence
  Description of Artificial Sequence: Synthetic oligonucleotide
caucaccuaugacuucuga

SEQ ID NO: 999413 - RNA, 19 nt, Artificial Sequence
  Description of Artificial Sequence: Synthetic oligonucleotide
acuggauacaggggcuuau

SEQ ID NO: 999414 - RNA, 19 nt, Artificial Sequence
  Description of Artificial Sequence: Synthetic oligonucleotide
agaacggcugcuacagcaa

SEQ ID NO: 999415 - RNA, 19 nt, Artificial Sequence
  Description of Artificial Sequence: Synthetic oligonucleotide
guuugagaggaaguggcau

SEQ ID NO: 999416 - RNA, 19 nt, Artificial Sequence
  Description of Artificial Sequence: Synthetic oligonucleotide
gcaucgagaggaccacacc

SEQ ID NO: 999417 - RNA, 19 nt, Artificial Sequence
  Description of Artificial Sequence: Synthetic oligonucleotide
uugaugcuuugaucacgua

SEQ ID NO: 999418 - RNA, 19 nt, Artificial Sequence
  Description of Artificial Sequence: Synthetic oligonucleotide
uagugcgcgccaccuggaa

SEQ ID NO: 999419 - RNA, 19 nt, Artificial Sequence
  Description of Artificial Sequence: Synthetic oligonucleotide
gggaggaauuucaaccuca

SEQ ID NO: 999420 - RNA, 19 nt, Artificial Sequence
  Description of Artificial Sequence: Synthetic oligonucleotide
aacgucggcucugguggga

SEQ ID NO: 999421 - RNA, 19 nt, Artificial Sequence
  Description of Artificial Sequence: Synthetic oligonucleotide
aggguagugcgcgccaccu

SEQ ID NO: 999422 - RNA, 19 nt, Artificial Sequence
  Description of Artificial Sequence: Synthetic oligonucleotide
caucaggaugaaggacgcc

SEQ ID NO: 999423 - RNA, 19 nt, Artificial Sequence
  Description of Artificial Sequence: Synthetic oligonucleotide
auaggagaucguaucuguu

SEQ ID NO: 999424 - RNA, 19 nt, Artificial Sequence
  Description of Artificial Sequence: Synthetic oligonucleotide
uugccgcaauggucuuuag

SEQ ID NO: 999425 - RNA, 19 nt, Artificial Sequence
  Description of Artificial Sequence: Synthetic oligonucleotide
agcacaccgcccagggaag

SEQ ID NO: 999426 - RNA, 19 nt, Artificial Sequence
  Description of Artificial Sequence: Synthetic oligonucleotide
cuuaggcauuacucguuua

SEQ ID NO: 999427 - RNA, 19 nt, Artificial Sequence
  Description of Artificial Sequence: Synthetic oligonucleotide
gugcgcgccaccuggaacu

SEQ ID NO: 999428 - RNA, 19 nt, Artificial Sequence
  Description of Artificial Sequence: Synthetic oligonucleotide
ggcaucgagaggaccacac

SEQ ID NO: 999429 - RNA, 19 nt, Artificial Sequence
  Description of Artificial Sequence: Synthetic oligonucleotide
gcuuugaccccgggcaaag

SEQ ID NO: 999430 - RNA, 19 nt, Artificial Sequence
  Description of Artificial Sequence: Synthetic oligonucleotide
gaaggacgcccagcuuccc

SEQ ID NO: 999431 - RNA, 19 nt, Artificial Sequence
  Description of Artificial Sequence: Synthetic oligonucleotide
gcaauagcugcguccucca

SEQ ID NO: 999432 - RNA, 19 nt, Artificial Sequence
  Description of Artificial Sequence: Synthetic oligonucleotide
caguguagguccggcccag

SEQ ID NO: 999433 - RNA, 19 nt, Artificial Sequence
  Description of Artificial Sequence: Synthetic oligonucleotide
gggccugauaaagugucca

SEQ ID NO: 999434 - RNA, 19 nt, Artificial Sequence
  Description of Artificial Sequence: Synthetic oligonucleotide
caccuaugacuucugacuu

SEQ ID NO: 999435 - RNA, 19 nt, Artificial Sequence
  Description of Artificial Sequence: Synthetic oligonucleotide
uggaguccccgagccaguc

SEQ ID NO: 999436 - RNA, 19 nt, Artificial Sequence
  Description of Artificial Sequence: Synthetic oligonucleotide
gaugaaggacgcccagcuu

SEQ ID NO: 999437 - RNA, 19 nt, Artificial Sequence
  Description of Artificial Sequence: Synthetic oligonucleotide
gaucuuucgugaacuugau

SEQ ID NO: 999438 - RNA, 19 nt, Artificial Sequence
  Description of Artificial Sequence: Synthetic oligonucleotide
cuccgugagcuuguugaga

SEQ ID NO: 999439 - RNA, 19 nt, Artificial Sequence
  Description of Artificial Sequence: Synthetic oligonucleotide
cgaugcuuugaccccgggc

SEQ ID NO: 999440 - RNA, 19 nt, Artificial Sequence
  Description of Artificial Sequence: Synthetic oligonucleotide
acgaugucacaggcaugga

SEQ ID NO: 999441 - RNA, 19 nt, Artificial Sequence
  Description of Artificial Sequence: Synthetic oligonucleotide
gaaggacguuuugcaguaa

SEQ ID NO: 999442 - RNA, 19 nt, Artificial Sequence
  Description of Artificial Sequence: Synthetic oligonucleotide
cgucaaccuuguaaagcac

SEQ ID NO: 999443 - RNA, 19 nt, Artificial Sequence
  Description of Artificial Sequence: Synthetic oligonucleotide
uuucucccuuaggcauuac

SEQ ID NO: 999444 - RNA, 19 nt, Artificial Sequence
  Description of Artificial Sequence: Synthetic oligonucleotide
ccuaugacuucugacuuua

SEQ ID NO: 999445 - RNA, 19 nt, Artificial Sequence
  Description of Artificial Sequence: Synthetic oligonucleotide
ggcauggauaacgucggcu

SEQ ID NO: 999446 - RNA, 19 nt, Artificial Sequence
  Description of Artificial Sequence: Synthetic oligonucleotide
cagcaaauggacguacuuu

SEQ ID NO: 999447 - RNA, 19 nt, Artificial Sequence
  Description of Artificial Sequence: Synthetic oligonucleotide
gugagcuuguugagaggaa

SEQ ID NO: 999448 - RNA, 19 nt, Artificial Sequence
  Description of Artificial Sequence: Synthetic oligonucleotide
cggcugcuacagcaaaugg

SEQ ID NO: 999449 - RNA, 19 nt, Artificial Sequence
  Description of Artificial Sequence: Synthetic oligonucleotide
ccagacauaggagaucgua

SEQ ID NO: 999450 - RNA, 19 nt, Artificial Sequence
  Description of Artificial Sequence: Synthetic oligonucleotide
ggguagugcgcgccaccug

SEQ ID NO: 999451 - RNA, 19 nt, Artificial Sequence
  Description of Artificial Sequence: Synthetic oligonucleotide
guagugcgcgccaccugga

SEQ ID NO: 999452 - RNA, 19 nt, Artificial Sequence
  Description of Artificial Sequence: Synthetic oligonucleotide
cuuugaccccgggcaaaga

SEQ ID NO: 999453 - RNA, 19 nt, Artificial Sequence
  Description of Artificial Sequence: Synthetic oligonucleotide
ccacgaugucacaggcaug

SEQ ID NO: 999454 - RNA, 19 nt, Artificial Sequence
  Description of Artificial Sequence: Synthetic oligonucleotide
cgguuugccgcaauggucu

SEQ ID NO: 999455 - RNA, 19 nt, Artificial Sequence
  Description of Artificial Sequence: Synthetic oligonucleotide
gaccccgggcaaagauuuc

SEQ ID NO: 999456 - RNA, 19 nt, Artificial Sequence
  Description of Artificial Sequence: Synthetic oligonucleotide
ccggagaacggcugcuaca

SEQ ID NO: 999457 - RNA, 19 nt, Artificial Sequence
  Description of Artificial Sequence: Synthetic oligonucleotide
ggcaagguuugcaggagau

SEQ ID NO: 999458 - RNA, 19 nt, Artificial Sequence
  Description of Artificial Sequence: Synthetic oligonucleotide
cgcaccuacgucuuugcua

SEQ ID NO: 999459 - RNA, 19 nt, Artificial Sequence
  Description of Artificial Sequence: Synthetic oligonucleotide
cagcuucccgaugcuuuga

SEQ ID NO: 999460 - RNA, 19 nt, Artificial Sequence
  Description of Artificial Sequence: Synthetic oligonucleotide
ccgaugcuuugaccccggg

SEQ ID NO: 999461 - RNA, 19 nt, Artificial Sequence
  Description of Artificial Sequence: Synthetic oligonucleotide
ccauuaggagaaacuacuu

SEQ ID NO: 999462 - RNA, 19 nt, Artificial Sequence
  Description of Artificial Sequence: Synthetic oligonucleotide
caccuacgucuuugcuaga

SEQ ID NO: 999463 - RNA, 19 nt, Artificial Sequence
  Description of Artificial Sequence: Synthetic oligonucleotide
cugcguccuccacgauguc

SEQ ID NO: 999464 - RNA, 19 nt, Artificial Sequence
  Description of Artificial Sequence: Synthetic oligonucleotide
cguacuuuagcugucucuu

SEQ ID NO: 999465 - RNA, 19 nt, Artificial Sequence
  Description of Artificial Sequence: Synthetic oligonucleotide
ccuuaggcauuacucguuu

SEQ ID NO: 999466 - RNA, 19 nt, Artificial Sequence
  Description of Artificial Sequence: Synthetic oligonucleotide
ggauaacgucggcucuggu

SEQ ID NO: 999467 - RNA, 19 nt, Artificial Sequence
  Description of Artificial Sequence: Synthetic oligonucleotide
ccuacgucuuugcuagaau

SEQ ID NO: 999468 - RNA, 19 nt, Artificial Sequence
  Description of Artificial Sequence: Synthetic oligonucleotide
cccuuaggcauuacucguu

SEQ ID NO: 999469 - RNA, 19 nt, Artificial Sequence
  Description of Artificial Sequence: Synthetic oligonucleotide
caggcacgucaaccuugua

SEQ ID NO: 999470 - RNA, 19 nt, Artificial Sequence
  Description of Artificial Sequence: Synthetic oligonucleotide
ggacgcccagcuucccgau

SEQ ID NO: 999471 - RNA, 19 nt, Artificial Sequence
  Description of Artificial Sequence: Synthetic oligonucleotide
aauacuauggcaguuauug

SEQ ID NO: 999472 - RNA, 19 nt, Artificial Sequence
  Description of Artificial Sequence: Synthetic oligonucleotide
uuuaucuucaaucagugcu

SEQ ID NO: 999473 - RNA, 19 nt, Artificial Sequence
  Description of Artificial Sequence: Synthetic oligonucleotide
aaggaaaucauccacccuc

SEQ ID NO: 999474 - RNA, 19 nt, Artificial Sequence
  Description of Artificial Sequence: Synthetic oligonucleotide
uuuaaagacaccuccaagc

SEQ ID NO: 999475 - RNA, 19 nt, Artificial Sequence
  Description of Artificial Sequence: Synthetic oligonucleotide
aaaauuagauagcaauguc

SEQ ID NO: 999476 - RNA, 19 nt, Artificial Sequence
  Description of Artificial Sequence: Synthetic oligonucleotide
auuaagauaacacuccuug

SEQ ID NO: 999477 - RNA, 19 nt, Artificial Sequence
  Description of Artificial Sequence: Synthetic oligonucleotide
agcauuuuagcacucauuc

SEQ ID NO: 999478 - RNA, 19 nt, Artificial Sequence
  Description of Artificial Sequence: Synthetic oligonucleotide
auuaucuucgauaacgacc

SEQ ID NO: 999479 - RNA, 19 nt, Artificial Sequence
  Description of Artificial Sequence: Synthetic oligonucleotide
uuaucuucgauaacgaccu

SEQ ID NO: 999480 - RNA, 19 nt, Artificial Sequence
  Description of Artificial Sequence: Synthetic oligonucleotide
uguacaguuuagaaggaag

SEQ ID NO: 999481 - RNA, 19 nt, Artificial Sequence
  Description of Artificial Sequence: Synthetic oligonucleotide
uaaaggguaauucacgccu

SEQ ID NO: 999482 - RNA, 19 nt, Artificial Sequence
  Description of Artificial Sequence: Synthetic oligonucleotide
uuaguaaaggguaauucac

SEQ ID NO: 999483 - RNA, 19 nt, Artificial Sequence
  Description of Artificial Sequence: Synthetic oligonucleotide
auggacguccucuugaucg

SEQ ID NO: 999484 - RNA, 19 nt, Artificial Sequence
  Description of Artificial Sequence: Synthetic oligonucleotide
auagcaucaaccaugcuac

SEQ ID NO: 999485 - RNA, 19 nt, Artificial Sequence
  Description of Artificial Sequence: Synthetic oligonucleotide
ucaagauccaaaagaaaga

SEQ ID NO: 999486 - RNA, 19 nt, Artificial Sequence
  Description of Artificial Sequence: Synthetic oligonucleotide
cauguuaugaaauucccuc

SEQ ID NO: 999487 - RNA, 19 nt, Artificial Sequence
  Description of Artificial Sequence: Synthetic oligonucleotide
cucacauaaucauuguagg

SEQ ID NO: 999488 - RNA, 19 nt, Artificial Sequence
  Description of Artificial Sequence: Synthetic oligonucleotide
agaaugugggguuaucuuc

SEQ ID NO: 999489 - RNA, 19 nt, Artificial Sequence
  Description of Artificial Sequence: Synthetic oligonucleotide
ucaacuuccugguaucggg

SEQ ID NO: 999490 - RNA, 19 nt, Artificial Sequence
  Description of Artificial Sequence: Synthetic oligonucleotide
auaaauuuacuacuuguaa

SEQ ID NO: 999491 - RNA, 19 nt, Artificial Sequence
  Description of Artificial Sequence: Synthetic oligonucleotide
acuacuuguaaacacacaa

SEQ ID NO: 999492 - RNA, 19 nt, Artificial Sequence
  Description of Artificial Sequence: Synthetic oligonucleotide
agcugauacaagucaauac

SEQ ID NO: 999493 - RNA, 19 nt, Artificial Sequence
  Description of Artificial Sequence: Synthetic oligonucleotide
gauccuuuaaauacccugg

SEQ ID NO: 999494 - RNA, 19 nt, Artificial Sequence
  Description of Artificial Sequence: Synthetic oligonucleotide
acauguagaaacagaaagc

SEQ ID NO: 999495 - RNA, 19 nt, Artificial Sequence
  Description of Artificial Sequence: Synthetic oligonucleotide
aaggauugguaagaugagc

SEQ ID NO: 999496 - RNA, 19 nt, Artificial Sequence
  Description of Artificial Sequence: Synthetic oligonucleotide
uuauucuacugcaugcuug

SEQ ID NO: 999497 - RNA, 19 nt, Artificial Sequence
  Description of Artificial Sequence: Synthetic oligonucleotide
ucggacagaaaauauuaag

SEQ ID NO: 999498 - RNA, 19 nt, Artificial Sequence
  Description of Artificial Sequence: Synthetic oligonucleotide
uagcaauguagaauguggg

SEQ ID NO: 999499 - RNA, 19 nt, Artificial Sequence
  Description of Artificial Sequence: Synthetic oligonucleotide
uuaugaaugagcugauaca

SEQ ID NO: 999500 - RNA, 19 nt, Artificial Sequence
  Description of Artificial Sequence: Synthetic oligonucleotide
gaaugaaucaauaucuaca

SEQ ID NO: 999501 - RNA, 19 nt, Artificial Sequence
  Description of Artificial Sequence: Synthetic oligonucleotide
gagcugauuuaguaaaggg

SEQ ID NO: 999502 - RNA, 19 nt, Artificial Sequence
  Description of Artificial Sequence: Synthetic oligonucleotide
ucgauaacgaccucucucc

SEQ ID NO: 999503 - RNA, 19 nt, Artificial Sequence
  Description of Artificial Sequence: Synthetic oligonucleotide
uaucauaaucauguacucg

SEQ ID NO: 999504 - RNA, 19 nt, Artificial Sequence
  Description of Artificial Sequence: Synthetic oligonucleotide
uauaggagauccaccauga

SEQ ID NO: 999505 - RNA, 19 nt, Artificial Sequence
  Description of Artificial Sequence: Synthetic oligonucleotide
aaucuugacuggcuuaugu

SEQ ID NO: 999506 - RNA, 19 nt, Artificial Sequence
  Description of Artificial Sequence: Synthetic oligonucleotide
acucguuuaucucuguauc

SEQ ID NO: 999507 - RNA, 19 nt, Artificial Sequence
  Description of Artificial Sequence: Synthetic oligonucleotide
uuuauagagaaugaaucaa

SEQ ID NO: 999508 - RNA, 19 nt, Artificial Sequence
  Description of Artificial Sequence: Synthetic oligonucleotide
uuauagagaaugaaucaau

SEQ ID NO: 999509 - RNA, 19 nt, Artificial Sequence
  Description of Artificial Sequence: Synthetic oligonucleotide
aaccaugcuacugaacacg

SEQ ID NO: 999510 - RNA, 19 nt, Artificial Sequence
  Description of Artificial Sequence: Synthetic oligonucleotide
agcaauguagaaugugggg

SEQ ID NO: 999511 - RNA, 19 nt, Artificial Sequence
  Description of Artificial Sequence: Synthetic oligonucleotide
gauacaagucaauacuuuc

SEQ ID NO: 999512 - RNA, 19 nt, Artificial Sequence
  Description of Artificial Sequence: Synthetic oligonucleotide
caaaagcgcauuaucuucg

SEQ ID NO: 999513 - RNA, 19 nt, Artificial Sequence
  Description of Artificial Sequence: Synthetic oligonucleotide
gaaacaggcugcuacaaca

SEQ ID NO: 999514 - RNA, 19 nt, Artificial Sequence
  Description of Artificial Sequence: Synthetic oligonucleotide
uguuaugaaauucccucac

SEQ ID NO: 999515 - RNA, 19 nt, Artificial Sequence
  Description of Artificial Sequence: Synthetic oligonucleotide
uugaucgagguugagaaug

SEQ ID NO: 999516 - RNA, 19 nt, Artificial Sequence
  Description of Artificial Sequence: Synthetic oligonucleotide
uuacuacuuguaaacacac

SEQ ID NO: 999517 - RNA, 19 nt, Artificial Sequence
  Description of Artificial Sequence: Synthetic oligonucleotide
ucuugugacgcauuuuaug

SEQ ID NO: 999518 - RNA, 19 nt, Artificial Sequence
  Description of Artificial Sequence: Synthetic oligonucleotide
caaaguaacucuaggauga

SEQ ID NO: 999519 - RNA, 19 nt, Artificial Sequence
  Description of Artificial Sequence: Synthetic oligonucleotide
cuuauguucauuccaagga

SEQ ID NO: 999520 - RNA, 19 nt, Artificial Sequence
  Description of Artificial Sequence: Synthetic oligonucleotide
auagucaauccuugguuuc

SEQ ID NO: 999521 - RNA, 19 nt, Artificial Sequence
  Description of Artificial Sequence: Synthetic oligonucleotide
ucucggacagaaaauauua

SEQ ID NO: 999522 - RNA, 19 nt, Artificial Sequence
  Description of Artificial Sequence: Synthetic oligonucleotide
uuauguucauuccaaggau

SEQ ID NO: 999523 - RNA, 19 nt, Artificial Sequence
  Description of Artificial Sequence: Synthetic oligonucleotide
aaacugucaacuuccuggu

SEQ ID NO: 999524 - RNA, 19 nt, Artificial Sequence
  Description of Artificial Sequence: Synthetic oligonucleotide
aucauguacucguuuaucu

SEQ ID NO: 999525 - RNA, 19 nt, Artificial Sequence
  Description of Artificial Sequence: Synthetic oligonucleotide
aaaaucgucuguugggaau

SEQ ID NO: 999526 - RNA, 19 nt, Artificial Sequence
  Description of Artificial Sequence: Synthetic oligonucleotide
aagaugauaauaaauccuu

SEQ ID NO: 999527 - RNA, 19 nt, Artificial Sequence
  Description of Artificial Sequence: Synthetic oligonucleotide
uccaucacgcccaaucuug

SEQ ID NO: 999528 - RNA, 19 nt, Artificial Sequence
  Description of Artificial Sequence: Synthetic oligonucleotide
auuugagauuuccaguucu

SEQ ID NO: 999529 - RNA, 19 nt, Artificial Sequence
  Description of Artificial Sequence: Synthetic oligonucleotide
ugugcgucgaaggaaauca

SEQ ID NO: 999530 - RNA, 19 nt, Artificial Sequence
  Description of Artificial Sequence: Synthetic oligonucleotide
uacaacacugccauauagu

SEQ ID NO: 999531 - RNA, 19 nt, Artificial Sequence
  Description of Artificial Sequence: Synthetic oligonucleotide
uucgauaacgaccucucuc

SEQ ID NO: 999532 - RNA, 19 nt, Artificial Sequence
  Description of Artificial Sequence: Synthetic oligonucleotide
cauaaucauuguaggaccc

SEQ ID NO: 999533 - RNA, 19 nt, Artificial Sequence
  Description of Artificial Sequence: Synthetic oligonucleotide
acgcauuuuaugaaugagc

SEQ ID NO: 999534 - RNA, 19 nt, Artificial Sequence
  Description of Artificial Sequence: Synthetic oligonucleotide
uuuagaaggaaggcuaaac

SEQ ID NO: 999535 - RNA, 19 nt, Artificial Sequence
  Description of Artificial Sequence: Synthetic oligonucleotide
ucgucuguugggaauaaga

SEQ ID NO: 999536 - RNA, 19 nt, Artificial Sequence
  Description of Artificial Sequence: Synthetic oligonucleotide
ucuaggacggucucguucu

SEQ ID NO: 999537 - RNA, 19 nt, Artificial Sequence
  Description of Artificial Sequence: Synthetic oligonucleotide
cuugugacgcauuuuauga

SEQ ID NO: 999538 - RNA, 19 nt, Artificial Sequence
  Description of Artificial Sequence: Synthetic oligonucleotide
uacuauggcaguuauugau

SEQ ID NO: 999539 - RNA, 19 nt, Artificial Sequence
  Description of Artificial Sequence: Synthetic oligonucleotide
aguguauaggagauccacc

SEQ ID NO: 999540 - RNA, 19 nt, Artificial Sequence
  Description of Artificial Sequence: Synthetic oligonucleotide
ucgaucacgaccucugucu

SEQ ID NO: 999541 - RNA, 19 nt, Artificial Sequence
  Description of Artificial Sequence: Synthetic oligonucleotide
auaaucauguacucguuua

SEQ ID NO: 999542 - RNA, 19 nt, Artificial Sequence
  Description of Artificial Sequence: Synthetic oligonucleotide
ugaaaaucgucuguuggga

SEQ ID NO: 999543 - RNA, 19 nt, Artificial Sequence
  Description of Artificial Sequence: Synthetic oligonucleotide
cucuaggaugaauacacug

SEQ ID NO: 999544 - RNA, 19 nt, Artificial Sequence
  Description of Artificial Sequence: Synthetic oligonucleotide
uuaaauacccuggucucug

SEQ ID NO: 999545 - RNA, 19 nt, Artificial Sequence
  Description of Artificial Sequence: Synthetic oligonucleotide
agcgcauuaucuucgauaa

SEQ ID NO: 999546 - RNA, 19 nt, Artificial Sequence
  Description of Artificial Sequence: Synthetic oligonucleotide
aggaugaauacacuguaaa

SEQ ID NO: 999547 - RNA, 19 nt, Artificial Sequence
  Description of Artificial Sequence: Synthetic oligonucleotide
acgcaaauugugaacauuc

SEQ ID NO: 999548 - RNA, 19 nt, Artificial Sequence
  Description of Artificial Sequence: Synthetic oligonucleotide
aacacaucucggcgaacuc

SEQ ID NO: 999549 - RNA, 19 nt, Artificial Sequence
  Description of Artificial Sequence: Synthetic oligonucleotide
ugauacaagucaauacuuu

SEQ ID NO: 999550 - RNA, 19 nt, Artificial Sequence
  Description of Artificial Sequence: Synthetic oligonucleotide
ccucacauaaucauuguag

SEQ ID NO: 999551 - RNA, 19 nt, Artificial Sequence
  Description of Artificial Sequence: Synthetic oligonucleotide
aagcgcauuaucuucgaua

SEQ ID NO: 999552 - RNA, 19 nt, Artificial Sequence
  Description of Artificial Sequence: Synthetic oligonucleotide
auguuaugaaauucccuca

SEQ ID NO: 999553 - RNA, 19 nt, Artificial Sequence
  Description of Artificial Sequence: Synthetic oligonucleotide
ucuucgauaacgaccucuc

SEQ ID NO: 999554 - RNA, 19 nt, Artificial Sequence
  Description of Artificial Sequence: Synthetic oligonucleotide
uuuaaguagacagcugaaa

SEQ ID NO: 999555 - RNA, 19 nt, Artificial Sequence
  Description of Artificial Sequence: Synthetic oligonucleotide
uuucacggggucuacuucu

SEQ ID NO: 999556 - RNA, 19 nt, Artificial Sequence
  Description of Artificial Sequence: Synthetic oligonucleotide
auuccaagccgauguacag

SEQ ID NO: 999557 - RNA, 19 nt, Artificial Sequence
  Description of Artificial Sequence: Synthetic oligonucleotide
ugugacgcauuuuaugaau

SEQ ID NO: 999558 - RNA, 19 nt, Artificial Sequence
  Description of Artificial Sequence: Synthetic oligonucleotide
ugaucgagguugagaaugc

SEQ ID NO: 999559 - RNA, 19 nt, Artificial Sequence
  Description of Artificial Sequence: Synthetic oligonucleotide
uuguaggacccauuuaaaa

SEQ ID NO: 999560 - RNA, 19 nt, Artificial Sequence
  Description of Artificial Sequence: Synthetic oligonucleotide
uguucauuccaaggauugg

SEQ ID NO: 999561 - RNA, 19 nt, Artificial Sequence
  Description of Artificial Sequence: Synthetic oligonucleotide
ggauccuuuaaauacccug

SEQ ID NO: 999562 - RNA, 19 nt, Artificial Sequence
  Description of Artificial Sequence: Synthetic oligonucleotide
aaaagcgcauuaucuucga

SEQ ID NO: 999563 - RNA, 19 nt, Artificial Sequence
  Description of Artificial Sequence: Synthetic oligonucleotide
acaguuuagaaggaaggcu

SEQ ID NO: 999564 - RNA, 19 nt, Artificial Sequence
  Description of Artificial Sequence: Synthetic oligonucleotide
acauuuauagagaaugaau

SEQ ID NO: 999565 - RNA, 19 nt, Artificial Sequence
  Description of Artificial Sequence: Synthetic oligonucleotide
uaaucauguacucguuuau

SEQ ID NO: 999566 - RNA, 19 nt, Artificial Sequence
  Description of Artificial Sequence: Synthetic oligonucleotide
ugaacugugugcagcuaca

SEQ ID NO: 999567 - RNA, 19 nt, Artificial Sequence
  Description of Artificial Sequence: Synthetic oligonucleotide
gaagcacccaguguauagg

SEQ ID NO: 999568 - RNA, 19 nt, Artificial Sequence
  Description of Artificial Sequence: Synthetic oligonucleotide
ucgagguugagaaugcauu

SEQ ID NO: 999569 - RNA, 19 nt, Artificial Sequence
  Description of Artificial Sequence: Synthetic oligonucleotide
ugacgcauuuuaugaauga

SEQ ID NO: 999570 - RNA, 19 nt, Artificial Sequence
  Description of Artificial Sequence: Synthetic oligonucleotide
uuuagcacucauuccugcu

SEQ ID NO: 999571 - RNA, 19 nt, Artificial Sequence
  Description of Artificial Sequence: Synthetic oligonucleotide
agcuugugugcgucgaagg

SEQ ID NO: 999572 - RNA, 19 nt, Artificial Sequence
  Description of Artificial Sequence: Synthetic oligonucleotide
gacgcauuuuaugaaugag

SEQ ID NO: 999573 - RNA, 19 nt, Artificial Sequence
  Description of Artificial Sequence: Synthetic oligonucleotide
uucucgacgggauggacgu

SEQ ID NO: 999574 - RNA, 19 nt, Artificial Sequence
  Description of Artificial Sequence: Synthetic oligonucleotide
uaaauacccuggucucugg

SEQ ID NO: 999575 - RNA, 19 nt, Artificial Sequence
  Description of Artificial Sequence: Synthetic oligonucleotide
ucauguacucguuuaucuc

SEQ ID NO: 999576 - RNA, 19 nt, Artificial Sequence
  Description of Artificial Sequence: Synthetic oligonucleotide
uuucucggacagaaaauau

SEQ ID NO: 999577 - RNA, 19 nt, Artificial Sequence
  Description of Artificial Sequence: Synthetic oligonucleotide
ccaaggauugguaagauga

SEQ ID NO: 999578 - RNA, 19 nt, Artificial Sequence
  Description of Artificial Sequence: Synthetic oligonucleotide
cauuuuagcacucauuccu

SEQ ID NO: 999579 - RNA, 19 nt, Artificial Sequence
  Description of Artificial Sequence: Synthetic oligonucleotide
auagucaaaccaucauacu

SEQ ID NO: 999580 - RNA, 19 nt, Artificial Sequence
  Description of Artificial Sequence: Synthetic oligonucleotide
caaggauugguaagaugag

SEQ ID NO: 999581 - RNA, 19 nt, Artificial Sequence
  Description of Artificial Sequence: Synthetic oligonucleotide
agauagucuggcaaaaccu

SEQ ID NO: 999582 - RNA, 19 nt, Artificial Sequence
  Description of Artificial Sequence: Synthetic oligonucleotide
ugcuacaacacugccauau

SEQ ID NO: 999583 - RNA, 19 nt, Artificial Sequence
  Description of Artificial Sequence: Synthetic oligonucleotide
ucgacgccuucccacaucc

SEQ ID NO: 999584 - RNA, 19 nt, Artificial Sequence
  Description of Artificial Sequence: Synthetic oligonucleotide
aagcacccaguguauagga

SEQ ID NO: 999585 - RNA, 19 nt, Artificial Sequence
  Description of Artificial Sequence: Synthetic oligonucleotide
aguaacucuaggaugaaua

SEQ ID NO: 999586 - RNA, 19 nt, Artificial Sequence
  Description of Artificial Sequence: Synthetic oligonucleotide
cucuggugaaacucagggg

SEQ ID NO: 999587 - RNA, 19 nt, Artificial Sequence
  Description of Artificial Sequence: Synthetic oligonucleotide
uacucguuuaucucuguau

SEQ ID NO: 999588 - RNA, 19 nt, Artificial Sequence
  Description of Artificial Sequence: Synthetic oligonucleotide
aagauuugugaaacuguca

SEQ ID NO: 999589 - RNA, 19 nt, Artificial Sequence
  Description of Artificial Sequence: Synthetic oligonucleotide
ugcuacugaacacgggaac

SEQ ID NO: 999590 - RNA, 19 nt, Artificial Sequence
  Description of Artificial Sequence: Synthetic oligonucleotide
caugcuacugaacacggga

SEQ ID NO: 999591 - RNA, 19 nt, Artificial Sequence
  Description of Artificial Sequence: Synthetic oligonucleotide
uacuacuuguaaacacaca

SEQ ID NO: 999592 - RNA, 19 nt, Artificial Sequence
  Description of Artificial Sequence: Synthetic oligonucleotide
uugugugcgucgaaggaaa

SEQ ID NO: 999593 - RNA, 19 nt, Artificial Sequence
  Description of Artificial Sequence: Synthetic oligonucleotide
aaauucccucacauaauca

SEQ ID NO: 999594 - RNA, 19 nt, Artificial Sequence
  Description of Artificial Sequence: Synthetic oligonucleotide
augugggguuaucuucugc

SEQ ID NO: 999595 - RNA, 19 nt, Artificial Sequence
  Description of Artificial Sequence: Synthetic oligonucleotide
uucucggacagaaaauauu

SEQ ID NO: 999596 - RNA, 19 nt, Artificial Sequence
  Description of Artificial Sequence: Synthetic oligonucleotide
uaggaugaauacacuguaa

SEQ ID NO: 999597 - RNA, 19 nt, Artificial Sequence
  Description of Artificial Sequence: Synthetic oligonucleotide
cugguaauaaggauggugu

SEQ ID NO: 999598 - RNA, 19 nt, Artificial Sequence
  Description of Artificial Sequence: Synthetic oligonucleotide
ucauccacccucauaucau

SEQ ID NO: 999599 - RNA, 19 nt, Artificial Sequence
  Description of Artificial Sequence: Synthetic oligonucleotide
accaucauacuucaauauu

SEQ ID NO: 999600 - RNA, 19 nt, Artificial Sequence
  Description of Artificial Sequence: Synthetic oligonucleotide
ugucaacuuccugguaucg

SEQ ID NO: 999601 - RNA, 19 nt, Artificial Sequence
  Description of Artificial Sequence: Synthetic oligonucleotide
uguauaggagauccaccau

SEQ ID NO: 999602 - RNA, 19 nt, Artificial Sequence
  Description of Artificial Sequence: Synthetic oligonucleotide
uuuggcggauuugagauuu

SEQ ID NO: 999603 - RNA, 19 nt, Artificial Sequence
  Description of Artificial Sequence: Synthetic oligonucleotide
caacuuccugguaucgggg

SEQ ID NO: 999604 - RNA, 19 nt, Artificial Sequence
  Description of Artificial Sequence: Synthetic oligonucleotide
ugucaaucuuuuaccaauu

SEQ ID NO: 999605 - RNA, 19 nt, Artificial Sequence
  Description of Artificial Sequence: Synthetic oligonucleotide
aggacggucucguucucuc

SEQ ID NO: 999606 - RNA, 19 nt, Artificial Sequence
  Description of Artificial Sequence: Synthetic oligonucleotide
uaucucuaggacggucucg

SEQ ID NO: 999607 - RNA, 19 nt, Artificial Sequence
  Description of Artificial Sequence: Synthetic oligonucleotide
aaaggguaauucacgccug

SEQ ID NO: 999608 - RNA, 19 nt, Artificial Sequence
  Description of Artificial Sequence: Synthetic oligonucleotide
cgcauuaucuucgauaacg

SEQ ID NO: 999609 - RNA, 19 nt, Artificial Sequence
  Description of Artificial Sequence: Synthetic oligonucleotide
uaucggggauccuuuaaau

SEQ ID NO: 999610 - RNA, 19 nt, Artificial Sequence
  Description of Artificial Sequence: Synthetic oligonucleotide
ugcaugcuuggaacaaaga

SEQ ID NO: 999611 - RNA, 19 nt, Artificial Sequence
  Description of Artificial Sequence: Synthetic oligonucleotide
guucucgacgggauggacg

SEQ ID NO: 999612 - RNA, 19 nt, Artificial Sequence
  Description of Artificial Sequence: Synthetic oligonucleotide
uggucccauguuaugaaau

SEQ ID NO: 999613 - RNA, 19 nt, Artificial Sequence
  Description of Artificial Sequence: Synthetic oligonucleotide
aaaucgucuguugggaaua

SEQ ID NO: 999614 - RNA, 19 nt, Artificial Sequence
  Description of Artificial Sequence: Synthetic oligonucleotide
cugguucucgacgggaugg

SEQ ID NO: 999615 - RNA, 19 nt, Artificial Sequence
  Description of Artificial Sequence: Synthetic oligonucleotide
caguuuagaaggaaggcua

SEQ ID NO: 999616 - RNA, 19 nt, Artificial Sequence
  Description of Artificial Sequence: Synthetic oligonucleotide
uugugacgcauuuuaugaa

SEQ ID NO: 999617 - RNA, 19 nt, Artificial Sequence
  Description of Artificial Sequence: Synthetic oligonucleotide
ucuuucacggggucuacuu

SEQ ID NO: 999618 - RNA, 19 nt, Artificial Sequence
  Description of Artificial Sequence: Synthetic oligonucleotide
uucuggucgacgccuuccc

SEQ ID NO: 999619 - RNA, 19 nt, Artificial Sequence
  Description of Artificial Sequence: Synthetic oligonucleotide
ugcgucgaaggaaaucauc

SEQ ID NO: 999620 - RNA, 19 nt, Artificial Sequence
  Description of Artificial Sequence: Synthetic oligonucleotide
cauuccaagccgauguaca

SEQ ID NO: 999621 - RNA, 19 nt, Artificial Sequence
  Description of Artificial Sequence: Synthetic oligonucleotide
ccgauguacaguuuagaag

SEQ ID NO: 999622 - RNA, 19 nt, Artificial Sequence
  Description of Artificial Sequence: Synthetic oligonucleotide
ucauaaucauguacucguu

SEQ ID NO: 999623 - RNA, 19 nt, Artificial Sequence
  Description of Artificial Sequence: Synthetic oligonucleotide
ggaagcacccaguguauag

SEQ ID NO: 999624 - RNA, 19 nt, Artificial Sequence
  Description of Artificial Sequence: Synthetic oligonucleotide
cauucccggguaaggaggc

SEQ ID NO: 999625 - RNA, 19 nt, Artificial Sequence
  Description of Artificial Sequence: Synthetic oligonucleotide
gaaaaucgucuguugggaa

SEQ ID NO: 999626 - RNA, 19 nt, Artificial Sequence
  Description of Artificial Sequence: Synthetic oligonucleotide
acccucauaucauaaucau

SEQ ID NO: 999627 - RNA, 19 nt, Artificial Sequence
  Description of Artificial Sequence: Synthetic oligonucleotide
caguucuuauucuacugca

SEQ ID NO: 999628 - RNA, 19 nt, Artificial Sequence
  Description of Artificial Sequence: Synthetic oligonucleotide
caaccaugcuacugaacac

SEQ ID NO: 999629 - RNA, 19 nt, Artificial Sequence
  Description of Artificial Sequence: Synthetic oligonucleotide
aacauuccaagccgaugua

SEQ ID NO: 999630 - RNA, 19 nt, Artificial Sequence
  Description of Artificial Sequence: Synthetic oligonucleotide
uaaucauuguaggacccau

SEQ ID NO: 999631 - RNA, 19 nt, Artificial Sequence
  Description of Artificial Sequence: Synthetic oligonucleotide
cacgccugcaaauccaguc

SEQ ID NO: 999632 - RNA, 19 nt, Artificial Sequence
  Description of Artificial Sequence: Synthetic oligonucleotide
aucuucgauaacgaccucu

SEQ ID NO: 999633 - RNA, 19 nt, Artificial Sequence
  Description of Artificial Sequence: Synthetic oligonucleotide
agcaucaaccaugcuacug

SEQ ID NO: 999634 - RNA, 19 nt, Artificial Sequence
  Description of Artificial Sequence: Synthetic oligonucleotide
aaagcgcauuaucuucgau

SEQ ID NO: 999635 - RNA, 19 nt, Artificial Sequence
  Description of Artificial Sequence: Synthetic oligonucleotide
auagucuggcaaaaccuug

SEQ ID NO: 999636 - RNA, 19 nt, Artificial Sequence
  Description of Artificial Sequence: Synthetic oligonucleotide
gucaacuuccugguaucgg

SEQ ID NO: 999637 - RNA, 19 nt, Artificial Sequence
  Description of Artificial Sequence: Synthetic oligonucleotide
gguaagaugagcugauuua

SEQ ID NO: 999638 - RNA, 19 nt, Artificial Sequence
  Description of Artificial Sequence: Synthetic oligonucleotide
uccguucugccccaauaaa

SEQ ID NO: 999639 - RNA, 19 nt, Artificial Sequence
  Description of Artificial Sequence: Synthetic oligonucleotide
cucuaggacggucucguuc

SEQ ID NO: 999640 - RNA, 19 nt, Artificial Sequence
  Description of Artificial Sequence: Synthetic oligonucleotide
cuuuaaguagacagcugaa

SEQ ID NO: 999641 - RNA, 19 nt, Artificial Sequence
  Description of Artificial Sequence: Synthetic oligonucleotide
ggcgaacuccugaaaaucg

SEQ ID NO: 999642 - RNA, 19 nt, Artificial Sequence
  Description of Artificial Sequence: Synthetic oligonucleotide
cauguacucguuuaucucu

SEQ ID NO: 999643 - RNA, 19 nt, Artificial Sequence
  Description of Artificial Sequence: Synthetic oligonucleotide
ucguuuaucucuguaucuu

SEQ ID NO: 999644 - RNA, 19 nt, Artificial Sequence
  Description of Artificial Sequence: Synthetic oligonucleotide
uguuaucucuaggacgguc

SEQ ID NO: 999645 - RNA, 19 nt, Artificial Sequence
  Description of Artificial Sequence: Synthetic oligonucleotide
cuaggaugaauacacugua

SEQ ID NO: 999646 - RNA, 19 nt, Artificial Sequence
  Description of Artificial Sequence: Synthetic oligonucleotide
ccaaaagcgcauuaucuuc

SEQ ID NO: 999647 - RNA, 19 nt, Artificial Sequence
  Description of Artificial Sequence: Synthetic oligonucleotide
gguaauucacgccugcaaa

SEQ ID NO: 999648 - RNA, 19 nt, Artificial Sequence
  Description of Artificial Sequence: Synthetic oligonucleotide
acugguucucgacgggaug

SEQ ID NO: 999649 - RNA, 19 nt, Artificial Sequence
  Description of Artificial Sequence: Synthetic oligonucleotide
ucggcgaacuccugaaaau

SEQ ID NO: 999650 - RNA, 19 nt, Artificial Sequence
  Description of Artificial Sequence: Synthetic oligonucleotide
cacacgcaaauugugaaca

SEQ ID NO: 999651 - RNA, 19 nt, Artificial Sequence
  Description of Artificial Sequence: Synthetic oligonucleotide
uguacucguuuaucucugu

SEQ ID NO: 999652 - RNA, 19 nt, Artificial Sequence
  Description of Artificial Sequence: Synthetic oligonucleotide
cccauguuaugaaauuccc

SEQ ID NO: 999653 - RNA, 19 nt, Artificial Sequence
  Description of Artificial Sequence: Synthetic oligonucleotide
cucgacgggauggacgucc

SEQ ID NO: 999654 - RNA, 19 nt, Artificial Sequence
  Description of Artificial Sequence: Synthetic oligonucleotide
uccgaccacugacaacagc

SEQ ID NO: 999655 - RNA, 19 nt, Artificial Sequence
  Description of Artificial Sequence: Synthetic oligonucleotide
acgcccaaucuugacuggc

SEQ ID NO: 999656 - RNA, 19 nt, Artificial Sequence
  Description of Artificial Sequence: Synthetic oligonucleotide
aaaguaacucuaggaugaa

SEQ ID NO: 999657 - RNA, 19 nt, Artificial Sequence
  Description of Artificial Sequence: Synthetic oligonucleotide
aucggggauccuuuaaaua

SEQ ID NO: 999658 - RNA, 19 nt, Artificial Sequence
  Description of Artificial Sequence: Synthetic oligonucleotide
uuccugguaucggggaucc

SEQ ID NO: 999659 - RNA, 19 nt, Artificial Sequence
  Description of Artificial Sequence: Synthetic oligonucleotide
cucuucucgaucacgaccu

SEQ ID NO: 999660 - RNA, 19 nt, Artificial Sequence
  Description of Artificial Sequence: Synthetic oligonucleotide
uggcggauuugagauuucc

SEQ ID NO: 999661 - RNA, 19 nt, Artificial Sequence
  Description of Artificial Sequence: Synthetic oligonucleotide
uggacguccucuugaucga

SEQ ID NO: 999662 - RNA, 19 nt, Artificial Sequence
  Description of Artificial Sequence: Synthetic oligonucleotide
uuggacuguuccguucugc

SEQ ID NO: 999663 - RNA, 19 nt, Artificial Sequence
  Description of Artificial Sequence: Synthetic oligonucleotide
auugguaagaugagcugau

SEQ ID NO: 999664 - RNA, 19 nt, Artificial Sequence
  Description of Artificial Sequence: Synthetic oligonucleotide
uccacccucauaucauaau

SEQ ID NO: 999665 - RNA, 19 nt, Artificial Sequence
  Description of Artificial Sequence: Synthetic oligonucleotide
uuggaacaaagaugauaau

SEQ ID NO: 999666 - RNA, 19 nt, Artificial Sequence
  Description of Artificial Sequence: Synthetic oligonucleotide
cuuucacggggucuacuuc

SEQ ID NO: 999667 - RNA, 19 nt, Artificial Sequence
  Description of Artificial Sequence: Synthetic oligonucleotide
guaucggggauccuuuaaa

SEQ ID NO: 999668 - RNA, 19 nt, Artificial Sequence
  Description of Artificial Sequence: Synthetic oligonucleotide
ccauucccggguaaggagg

SEQ ID NO: 999669 - RNA, 19 nt, Artificial Sequence
  Description of Artificial Sequence: Synthetic oligonucleotide
gaaugugggguuaucuucu

SEQ ID NO: 999670 - RNA, 19 nt, Artificial Sequence
  Description of Artificial Sequence: Synthetic oligonucleotide
uggucgacgccuucccaca

SEQ ID NO: 999671 - RNA, 19 nt, Artificial Sequence
  Description of Artificial Sequence: Synthetic oligonucleotide
agacagcugaaaauaaauu

SEQ ID NO: 999672 - RNA, 19 nt, Artificial Sequence
  Description of Artificial Sequence: Synthetic oligonucleotide
auggugcugguaauaagga

SEQ ID NO: 999673 - RNA, 19 nt, Artificial Sequence
  Description of Artificial Sequence: Synthetic oligonucleotide
uccaagcauuuuagcacuc

SEQ ID NO: 999674 - RNA, 19 nt, Artificial Sequence
  Description of Artificial Sequence: Synthetic oligonucleotide
cuucuggucgacgccuucc

SEQ ID NO: 999675 - RNA, 19 nt, Artificial Sequence
  Description of Artificial Sequence: Synthetic oligonucleotide
ucccgaucacauauucuuu

SEQ ID NO: 999676 - RNA, 19 nt, Artificial Sequence
  Description of Artificial Sequence: Synthetic oligonucleotide
cugucccgaucacauauuc

SEQ ID NO: 999677 - RNA, 19 nt, Artificial Sequence
  Description of Artificial Sequence: Synthetic oligonucleotide
aaauacuauggcaguuauu

SEQ ID NO: 999678 - RNA, 19 nt, Artificial Sequence
  Description of Artificial Sequence: Synthetic oligonucleotide
gauggacguccucuugauc

SEQ ID NO: 999679 - RNA, 19 nt, Artificial Sequence
  Description of Artificial Sequence: Synthetic oligonucleotide
aguuuagaaggaaggcuaa

SEQ ID NO: 999680 - RNA, 19 nt, Artificial Sequence
  Description of Artificial Sequence: Synthetic oligonucleotide
cauauagucaaaccaucau

SEQ ID NO: 999681 - RNA, 19 nt, Artificial Sequence
  Description of Artificial Sequence: Synthetic oligonucleotide
acuuucucggacagaaaau

SEQ ID NO: 999682 - RNA, 19 nt, Artificial Sequence
  Description of Artificial Sequence: Synthetic oligonucleotide
guaauucacgccugcaaau

SEQ ID NO: 999683 - RNA, 19 nt, Artificial Sequence
  Description of Artificial Sequence: Synthetic oligonucleotide
aguucuuauucuacugcau

SEQ ID NO: 999684 - RNA, 19 nt, Artificial Sequence
  Description of Artificial Sequence: Synthetic oligonucleotide
ucugucccgaucacauauu

SEQ ID NO: 999685 - RNA, 19 nt, Artificial Sequence
  Description of Artificial Sequence: Synthetic oligonucleotide
acacgcaaauugugaacau

SEQ ID NO: 999686 - RNA, 19 nt, Artificial Sequence
  Description of Artificial Sequence: Synthetic oligonucleotide
uuuuggcggauuugagauu

SEQ ID NO: 999687 - RNA, 19 nt, Artificial Sequence
  Description of Artificial Sequence: Synthetic oligonucleotide
guuaucucuaggacggucu

SEQ ID NO: 999688 - RNA, 19 nt, Artificial Sequence
  Description of Artificial Sequence: Synthetic oligonucleotide
cucggacagaaaauauuaa

SEQ ID NO: 999689 - RNA, 19 nt, Artificial Sequence
  Description of Artificial Sequence: Synthetic oligonucleotide
uucuucucuugugacgcau

SEQ ID NO: 999690 - RNA, 19 nt, Artificial Sequence
  Description of Artificial Sequence: Synthetic oligonucleotide
gagcugauacaagucaaua

SEQ ID NO: 999691 - RNA, 19 nt, Artificial Sequence
  Description of Artificial Sequence: Synthetic oligonucleotide
cacugccauauagucaaac

SEQ ID NO: 999692 - RNA, 19 nt, Artificial Sequence
  Description of Artificial Sequence: Synthetic oligonucleotide
aaucgucuguugggaauaa

SEQ ID NO: 999693 - RNA, 19 nt, Artificial Sequence
  Description of Artificial Sequence: Synthetic oligonucleotide
ggacuguuccguucugccc

SEQ ID NO: 999694 - RNA, 19 nt, Artificial Sequence
  Description of Artificial Sequence: Synthetic oligonucleotide
cucguuuaucucuguaucu

SEQ ID NO: 999695 - RNA, 19 nt, Artificial Sequence
  Description of Artificial Sequence: Synthetic oligonucleotide
cacgcccaaucuugacugg

SEQ ID NO: 999696 - RNA, 19 nt, Artificial Sequence
  Description of Artificial Sequence: Synthetic oligonucleotide
ugugugcgucgaaggaaau

SEQ ID NO: 999697 - RNA, 19 nt, Artificial Sequence
  Description of Artificial Sequence: Synthetic oligonucleotide
ucccacaucccggacuggu

SEQ ID NO: 999698 - RNA, 19 nt, Artificial Sequence
  Description of Artificial Sequence: Synthetic oligonucleotide
caccaugaugugauucuga

SEQ ID NO: 999699 - RNA, 19 nt, Artificial Sequence
  Description of Artificial Sequence: Synthetic oligonucleotide
gccgauguacaguuuagaa

SEQ ID NO: 999700 - RNA, 19 nt, Artificial Sequence
  Description of Artificial Sequence: Synthetic oligonucleotide
ucuacacaaugagcuuuaa

SEQ ID NO: 999701 - RNA, 19 nt, Artificial Sequence
  Description of Artificial Sequence: Synthetic oligonucleotide
agcacccaguguauaggag

SEQ ID NO: 999702 - RNA, 19 nt, Artificial Sequence
  Description of Artificial Sequence: Synthetic oligonucleotide
ccggacugguucucgacgg

SEQ ID NO: 999703 - RNA, 19 nt, Artificial Sequence
  Description of Artificial Sequence: Synthetic oligonucleotide
caucaaccaugcuacugaa

SEQ ID NO: 999704 - RNA, 19 nt, Artificial Sequence
  Description of Artificial Sequence: Synthetic oligonucleotide
ucgacgggauggacguccu

SEQ ID NO: 999705 - RNA, 19 nt, Artificial Sequence
  Description of Artificial Sequence: Synthetic oligonucleotide
ucccggacugguucucgac

SEQ ID NO: 999706 - RNA, 19 nt, Artificial Sequence
  Description of Artificial Sequence: Synthetic oligonucleotide
agccgauguacaguuuaga

SEQ ID NO: 999707 - RNA, 19 nt, Artificial Sequence
  Description of Artificial Sequence: Synthetic oligonucleotide
aucgucuguugggaauaag

SEQ ID NO: 999708 - RNA, 19 nt, Artificial Sequence
  Description of Artificial Sequence: Synthetic oligonucleotide
gaucgagguugagaaugca

SEQ ID NO: 999709 - RNA, 19 nt, Artificial Sequence
  Description of Artificial Sequence: Synthetic oligonucleotide
guuuagaaggaaggcuaaa

SEQ ID NO: 999710 - RNA, 19 nt, Artificial Sequence
  Description of Artificial Sequence: Synthetic oligonucleotide
ggauagucaauccuugguu

SEQ ID NO: 999711 - RNA, 19 nt, Artificial Sequence
  Description of Artificial Sequence: Synthetic oligonucleotide
cauaaucauguacucguuu

SEQ ID NO: 999712 - RNA, 19 nt, Artificial Sequence
  Description of Artificial Sequence: Synthetic oligonucleotide
augcuacugaacacgggaa

SEQ ID NO: 999713 - RNA, 19 nt, Artificial Sequence
  Description of Artificial Sequence: Synthetic oligonucleotide
uucccggguaaggaggcau

SEQ ID NO: 999714 - RNA, 19 nt, Artificial Sequence
  Description of Artificial Sequence: Synthetic oligonucleotide
guacucguuuaucucugua

SEQ ID NO: 999715 - RNA, 19 nt, Artificial Sequence
  Description of Artificial Sequence: Synthetic oligonucleotide
ccacacgcaaauugugaac

SEQ ID NO: 999716 - RNA, 19 nt, Artificial Sequence
  Description of Artificial Sequence: Synthetic oligonucleotide
uaggacggucucguucucu

SEQ ID NO: 999717 - RNA, 19 nt, Artificial Sequence
  Description of Artificial Sequence: Synthetic oligonucleotide
ugguucucgacgggaugga

SEQ ID NO: 999718 - RNA, 19 nt, Artificial Sequence
  Description of Artificial Sequence: Synthetic oligonucleotide
caucccggacugguucucg

SEQ ID NO: 999719 - RNA, 19 nt, Artificial Sequence
  Description of Artificial Sequence: Synthetic oligonucleotide
gggauagucaauccuuggu

SEQ ID NO: 999720 - RNA, 19 nt, Artificial Sequence
  Description of Artificial Sequence: Synthetic oligonucleotide
cacaucucggcgaacuccu

SEQ ID NO: 999721 - RNA, 19 nt, Artificial Sequence
  Description of Artificial Sequence: Synthetic oligonucleotide
acaucccggacugguucuc

SEQ ID NO: 999722 - RNA, 19 nt, Artificial Sequence
  Description of Artificial Sequence: Synthetic oligonucleotide
ugguaucggggauccuuua

SEQ ID NO: 999723 - RNA, 19 nt, Artificial Sequence
  Description of Artificial Sequence: Synthetic oligonucleotide
gguggucccauguuaugaa

SEQ ID NO: 999724 - RNA, 19 nt, Artificial Sequence
  Description of Artificial Sequence: Synthetic oligonucleotide
uuggcggauuugagauuuc

SEQ ID NO: 999725 - RNA, 19 nt, Artificial Sequence
  Description of Artificial Sequence: Synthetic oligonucleotide
cuguuaugaauaucauaau

SEQ ID NO: 999726 - RNA, 19 nt, Artificial Sequence
  Description of Artificial Sequence: Synthetic oligonucleotide
aucccggacugguucucga

SEQ ID NO: 999727 - RNA, 19 nt, Artificial Sequence
  Description of Artificial Sequence: Synthetic oligonucleotide
uggaagcacccaguguaua

SEQ ID NO: 999728 - RNA, 19 nt, Artificial Sequence
  Description of Artificial Sequence: Synthetic oligonucleotide
cccggacugguucucgacg

SEQ ID NO: 999729 - RNA, 19 nt, Artificial Sequence
  Description of Artificial Sequence: Synthetic oligonucleotide
gguaucggggauccuuuaa

SEQ ID NO: 999730 - RNA, 19 nt, Artificial Sequence
  Description of Artificial Sequence: Synthetic oligonucleotide
gugugcgucgaaggaaauc

SEQ ID NO: 999731 - RNA, 19 nt, Artificial Sequence
  Description of Artificial Sequence: Synthetic oligonucleotide
gcagaucuaaaugcaagua

SEQ ID NO: 999732 - RNA, 19 nt, Artificial Sequence
  Description of Artificial Sequence: Synthetic oligonucleotide
acgggauggacguccucuu

SEQ ID NO: 999733 - RNA, 19 nt, Artificial Sequence
  Description of Artificial Sequence: Synthetic oligonucleotide
cauccacccucauaucaua

SEQ ID NO: 999734 - RNA, 19 nt, Artificial Sequence
  Description of Artificial Sequence: Synthetic oligonucleotide
ccgaccacugacaacagcu

SEQ ID NO: 999735 - RNA, 19 nt, Artificial Sequence
  Description of Artificial Sequence: Synthetic oligonucleotide
auccacccucauaucauaa

SEQ ID NO: 999736 - RNA, 19 nt, Artificial Sequence
  Description of Artificial Sequence: Synthetic oligonucleotide
ugacuggcuuauguucauu

SEQ ID NO: 999737 - RNA, 19 nt, Artificial Sequence
  Description of Artificial Sequence: Synthetic oligonucleotide
cacccaguguauaggagau

SEQ ID NO: 999738 - RNA, 19 nt, Artificial Sequence
  Description of Artificial Sequence: Synthetic oligonucleotide
gucgacgccuucccacauc

SEQ ID NO: 999739 - RNA, 19 nt, Artificial Sequence
  Description of Artificial Sequence: Synthetic oligonucleotide
ggcggauuugagauuucca

SEQ ID NO: 999740 - RNA, 19 nt, Artificial Sequence
  Description of Artificial Sequence: Synthetic oligonucleotide
cuaggacggucucguucuc

SEQ ID NO: 999741 - RNA, 19 nt, Artificial Sequence
  Description of Artificial Sequence: Synthetic oligonucleotide
cuugaucgagguugagaau

SEQ ID NO: 999742 - RNA, 19 nt, Artificial Sequence
  Description of Artificial Sequence: Synthetic oligonucleotide
ccguucugccccaauaaaa

SEQ ID NO: 999743 - RNA, 19 nt, Artificial Sequence
  Description of Artificial Sequence: Synthetic oligonucleotide
ccauguuaugaaauucccu

SEQ ID NO: 999744 - RNA, 19 nt, Artificial Sequence
  Description of Artificial Sequence: Synthetic oligonucleotide
cuucgauaacgaccucucu

SEQ ID NO: 999745 - RNA, 19 nt, Artificial Sequence
  Description of Artificial Sequence: Synthetic oligonucleotide
cgauaacgaccucucuccc

SEQ ID NO: 999746 - RNA, 19 nt, Artificial Sequence
  Description of Artificial Sequence: Synthetic oligonucleotide
gcuacaacacugccauaua

SEQ ID NO: 999747 - RNA, 19 nt, Artificial Sequence
  Description of Artificial Sequence: Synthetic oligonucleotide
cacaucccggacugguucu

SEQ ID NO: 999748 - RNA, 19 nt, Artificial Sequence
  Description of Artificial Sequence: Synthetic oligonucleotide
acaucucggcgaacuccug

SEQ ID NO: 999749 - RNA, 19 nt, Artificial Sequence
  Description of Artificial Sequence: Synthetic oligonucleotide
cugguaucggggauccuuu

SEQ ID NO: 999750 - RNA, 19 nt, Artificial Sequence
  Description of Artificial Sequence: Synthetic oligonucleotide
cuggaagcacccaguguau

SEQ ID NO: 999751 - RNA, 19 nt, Artificial Sequence
  Description of Artificial Sequence: Synthetic oligonucleotide
gguucucgacgggauggac

SEQ ID NO: 999752 - RNA, 19 nt, Artificial Sequence
  Description of Artificial Sequence: Synthetic oligonucleotide
gcgcauuaucuucgauaac

SEQ ID NO: 999753 - RNA, 19 nt, Artificial Sequence
  Description of Artificial Sequence: Synthetic oligonucleotide
gugaacauuccaagccgau

SEQ ID NO: 999754 - RNA, 19 nt, Artificial Sequence
  Description of Artificial Sequence: Synthetic oligonucleotide
ggauggacguccucuugau

SEQ ID NO: 999755 - RNA, 19 nt, Artificial Sequence
  Description of Artificial Sequence: Synthetic oligonucleotide
ucucgacgggauggacguc

SEQ ID NO: 999756 - RNA, 19 nt, Artificial Sequence
  Description of Artificial Sequence: Synthetic oligonucleotide
cacgcaaauugugaacauu

SEQ ID NO: 999757 - RNA, 19 nt, Artificial Sequence
  Description of Artificial Sequence: Synthetic oligonucleotide
cgaucacgaccucugucuc

SEQ ID NO: 999758 - RNA, 19 nt, Artificial Sequence
  Description of Artificial Sequence: Synthetic oligonucleotide
gcgaacuccugaaaaucgu

SEQ ID NO: 999759 - RNA, 19 nt, Artificial Sequence
  Description of Artificial Sequence: Synthetic oligonucleotide
cggcgaacuccugaaaauc

SEQ ID NO: 999760 - RNA, 19 nt, Artificial Sequence
  Description of Artificial Sequence: Synthetic oligonucleotide
cggucucguucucucuccc

SEQ ID NO: 999761 - RNA, 19 nt, Artificial Sequence
  Description of Artificial Sequence: Synthetic oligonucleotide
ggacggucucguucucucu

SEQ ID NO: 999762 - RNA, 19 nt, Artificial Sequence
  Description of Artificial Sequence: Synthetic oligonucleotide
gugcgucgaaggaaaucau

SEQ ID NO: 999763 - RNA, 19 nt, Artificial Sequence
  Description of Artificial Sequence: Synthetic oligonucleotide
cuguuaucucuaggacggu

SEQ ID NO: 999764 - RNA, 19 nt, Artificial Sequence
  Description of Artificial Sequence: Synthetic oligonucleotide
cgccugcaaauccagucaa

SEQ ID NO: 999765 - RNA, 19 nt, Artificial Sequence
  Description of Artificial Sequence: Synthetic oligonucleotide
ggucgacgccuucccacau

SEQ ID NO: 999766 - RNA, 19 nt, Artificial Sequence
  Description of Artificial Sequence: Synthetic oligonucleotide
cgaccacugacaacagcuu

SEQ ID NO: 999767 - RNA, 19 nt, Artificial Sequence
  Description of Artificial Sequence: Synthetic oligonucleotide
cgacgggauggacguccuc

SEQ ID NO: 999768 - RNA, 19 nt, Artificial Sequence
  Description of Artificial Sequence: Synthetic oligonucleotide
ccaagccgauguacaguuu

SEQ ID NO: 999769 - RNA, 19 nt, Artificial Sequence
  Description of Artificial Sequence: Synthetic oligonucleotide
ucagauauaaagcuaaggg

SEQ ID NO: 999770 - RNA, 19 nt, Artificial Sequence
  Description of Artificial Sequence: Synthetic oligonucleotide
aaagcuaaggguuucauag

SEQ ID NO: 999771 - RNA, 19 nt, Artificial Sequence
  Description of Artificial Sequence: Synthetic oligonucleotide
cuuaauaccacccaggucc

SEQ ID NO: 999772 - RNA, 19 nt, Artificial Sequence
  Description of Artificial Sequence: Synthetic oligonucleotide
uguggaaucaucaguauag

SEQ ID NO: 999773 - RNA, 19 nt, Artificial Sequence
  Description of Artificial Sequence: Synthetic oligonucleotide
uguauaucgaaaaucaccu

SEQ ID NO: 999774 - RNA, 19 nt, Artificial Sequence
  Description of Artificial Sequence: Synthetic oligonucleotide
uguauugcugcacagagug

SEQ ID NO: 999775 - RNA, 19 nt, Artificial Sequence
  Description of Artificial Sequence: Synthetic oligonucleotide
uuauaaugaaaacuguuug

SEQ ID NO: 999776 - RNA, 19 nt, Artificial Sequence
  Description of Artificial Sequence: Synthetic oligonucleotide
ucgaaaaucaccuguaggc

SEQ ID NO: 999777 - RNA, 19 nt, Artificial Sequence
  Description of Artificial Sequence: Synthetic oligonucleotide
auuacgaccccguucaugg

SEQ ID NO: 999778 - RNA, 19 nt, Artificial Sequence
  Description of Artificial Sequence: Synthetic oligonucleotide
aguauagggagccugggac

SEQ ID NO: 999779 - RNA, 19 nt, Artificial Sequence
  Description of Artificial Sequence: Synthetic oligonucleotide
uauaucgaaaaucaccugu

SEQ ID NO: 999780 - RNA, 19 nt, Artificial Sequence
  Description of Artificial Sequence: Synthetic oligonucleotide
uuuauaaugaaaacuguuu

SEQ ID NO: 999781 - RNA, 19 nt, Artificial Sequence
  Description of Artificial Sequence: Synthetic oligonucleotide
ugcaacaaaagcccgaagc

SEQ ID NO: 999782 - RNA, 19 nt, Artificial Sequence
  Description of Artificial Sequence: Synthetic oligonucleotide
ugguguauaucgaaaauca

SEQ ID NO: 999783 - RNA, 19 nt, Artificial Sequence
  Description of Artificial Sequence: Synthetic oligonucleotide
cuuuauguuguguuguggg

SEQ ID NO: 999784 - RNA, 19 nt, Artificial Sequence
  Description of Artificial Sequence: Synthetic oligonucleotide
cuagguaucaaucgggacc

SEQ ID NO: 999785 - RNA, 19 nt, Artificial Sequence
  Description of Artificial Sequence: Synthetic oligonucleotide
agcuaaggguuucauaggc

SEQ ID NO: 999786 - RNA, 19 nt, Artificial Sequence
  Description of Artificial Sequence: Synthetic oligonucleotide
agauaaacacaucuacagg

SEQ ID NO: 999787 - RNA, 19 nt, Artificial Sequence
  Description of Artificial Sequence: Synthetic oligonucleotide
aaaaggacuggcucaucac

SEQ ID NO: 999788 - RNA, 19 nt, Artificial Sequence
  Description of Artificial Sequence: Synthetic oligonucleotide
cucagaguaagaugaaugg

SEQ ID NO: 999789 - RNA, 19 nt, Artificial Sequence
  Description of Artificial Sequence: Synthetic oligonucleotide
uucuuauaaacacuaaaua

SEQ ID NO: 999790 - RNA, 19 nt, Artificial Sequence
  Description of Artificial Sequence: Synthetic oligonucleotide
aaucacagccuauccaguc

SEQ ID NO: 999791 - RNA, 19 nt, Artificial Sequence
  Description of Artificial Sequence: Synthetic oligonucleotide
agguccgaaacucaagggc

SEQ ID NO: 999792 - RNA, 19 nt, Artificial Sequence
  Description of Artificial Sequence: Synthetic oligonucleotide
uauuuuagcgccagguccc

SEQ ID NO: 999793 - RNA, 19 nt, Artificial Sequence
  Description of Artificial Sequence: Synthetic oligonucleotide
ucuccuagguaucaaucgg

SEQ ID NO: 999794 - RNA, 19 nt, Artificial Sequence
  Description of Artificial Sequence: Synthetic oligonucleotide
aaccaaguugaacagauua

SEQ ID NO: 999795 - RNA, 19 nt, Artificial Sequence
  Description of Artificial Sequence: Synthetic oligonucleotide
uggucuacagcauggaugc

SEQ ID NO: 999796 - RNA, 19 nt, Artificial Sequence
  Description of Artificial Sequence: Synthetic oligonucleotide
ugaagcuuccgcgauagcg

SEQ ID NO: 999797 - RNA, 19 nt, Artificial Sequence
  Description of Artificial Sequence: Synthetic oligonucleotide
guauuuuagcgccaggucc

SEQ ID NO: 999798 - RNA, 19 nt, Artificial Sequence
  Description of Artificial Sequence: Synthetic oligonucleotide
uuucaugcgcuucuuugcg

SEQ ID NO: 999799 - RNA, 19 nt, Artificial Sequence
  Description of Artificial Sequence: Synthetic oligonucleotide
aggggauucaaacacaacu

SEQ ID NO: 999800 - RNA, 19 nt, Artificial Sequence
  Description of Artificial Sequence: Synthetic oligonucleotide
uguuauacuguacucugcu

SEQ ID NO: 999801 - RNA, 19 nt, Artificial Sequence
  Description of Artificial Sequence: Synthetic oligonucleotide
aaacuuuugccacuagcca

SEQ ID NO: 999802 - RNA, 19 nt, Artificial Sequence
  Description of Artificial Sequence: Synthetic oligonucleotide
gguuaaaccaaguugaaca

SEQ ID NO: 999803 - RNA, 19 nt, Artificial Sequence
  Description of Artificial Sequence: Synthetic oligonucleotide
uucauuagagcuacuccag

SEQ ID NO: 999804 - RNA, 19 nt, Artificial Sequence
  Description of Artificial Sequence: Synthetic oligonucleotide
aucgaaaaucaccuguagg

SEQ ID NO: 999805 - RNA, 19 nt, Artificial Sequence
  Description of Artificial Sequence: Synthetic oligonucleotide
aacuucauuagagcuacuc

SEQ ID NO: 999806 - RNA, 19 nt, Artificial Sequence
  Description of Artificial Sequence: Synthetic oligonucleotide
uuuuccuaggcuauagagu

SEQ ID NO: 999807 - RNA, 19 nt, Artificial Sequence
  Description of Artificial Sequence: Synthetic oligonucleotide
uaagaagaagagccgcgcg

SEQ ID NO: 999808 - RNA, 19 nt, Artificial Sequence
  Description of Artificial Sequence: Synthetic oligonucleotide
ggaagaauagcaaugguag

SEQ ID NO: 999809 - RNA, 19 nt, Artificial Sequence
  Description of Artificial Sequence: Synthetic oligonucleotide
uaggcgacgguguaggagg

SEQ ID NO: 999810 - RNA, 19 nt, Artificial Sequence
  Description of Artificial Sequence: Synthetic oligonucleotide
aggauuguuauacuguacu

SEQ ID NO: 999811 - RNA, 19 nt, Artificial Sequence
  Description of Artificial Sequence: Synthetic oligonucleotide
gauaagaagaagagccgcg

SEQ ID NO: 999812 - RNA, 19 nt, Artificial Sequence
  Description of Artificial Sequence: Synthetic oligonucleotide
aaguugaacagauuagguu

SEQ ID NO: 999813 - RNA, 19 nt, Artificial Sequence
  Description of Artificial Sequence: Synthetic oligonucleotide
gacucggucaacuuuaguc

SEQ ID NO: 999814 - RNA, 19 nt, Artificial Sequence
  Description of Artificial Sequence: Synthetic oligonucleotide
uucaugguggcacgguugg

SEQ ID NO: 999815 - RNA, 19 nt, Artificial Sequence
  Description of Artificial Sequence: Synthetic oligonucleotide
ucaaucgggacccuacacc

SEQ ID NO: 999816 - RNA, 19 nt, Artificial Sequence
  Description of Artificial Sequence: Synthetic oligonucleotide
auaagaagaagagccgcgc

SEQ ID NO: 999817 - RNA, 19 nt, Artificial Sequence
  Description of Artificial Sequence: Synthetic oligonucleotide
cauuagagcuacuccaggg

SEQ ID NO: 999818 - RNA, 19 nt, Artificial Sequence
  Description of Artificial Sequence: Synthetic oligonucleotide
aauugcauugaaaauucca

SEQ ID NO: 999819 - RNA, 19 nt, Artificial Sequence
  Description of Artificial Sequence: Synthetic oligonucleotide
aagcuaaggguuucauagg

SEQ ID NO: 999820 - RNA, 19 nt, Artificial Sequence
  Description of Artificial Sequence: Synthetic oligonucleotide
acagauuagguugcuaugg

SEQ ID NO: 999821 - RNA, 19 nt, Artificial Sequence
  Description of Artificial Sequence: Synthetic oligonucleotide
ucauuagagcuacuccagg

SEQ ID NO: 999822 - RNA, 19 nt, Artificial Sequence
  Description of Artificial Sequence: Synthetic oligonucleotide
aaaacuggguuaaaccaag

SEQ ID NO: 999823 - RNA, 19 nt, Artificial Sequence
  Description of Artificial Sequence: Synthetic oligonucleotide
uaucgaaaaucaccuguag

SEQ ID NO: 999824 - RNA, 19 nt, Artificial Sequence
  Description of Artificial Sequence: Synthetic oligonucleotide
cagaguaagaugaaugguc

SEQ ID NO: 999825 - RNA, 19 nt, Artificial Sequence
  Description of Artificial Sequence: Synthetic oligonucleotide
uuaauaccacccagguccg

SEQ ID NO: 999826 - RNA, 19 nt, Artificial Sequence
  Description of Artificial Sequence: Synthetic oligonucleotide
ucuacagcauggaugcgcc

SEQ ID NO: 999827 - RNA, 19 nt, Artificial Sequence
  Description of Artificial Sequence: Synthetic oligonucleotide
augguguauaucgaaaauc

SEQ ID NO: 999828 - RNA, 19 nt, Artificial Sequence
  Description of Artificial Sequence: Synthetic oligonucleotide
cucuccuagguaucaaucg

SEQ ID NO: 999829 - RNA, 19 nt, Artificial Sequence
  Description of Artificial Sequence: Synthetic oligonucleotide
aucagauauaaagcuaagg

SEQ ID NO: 999830 - RNA, 19 nt, Artificial Sequence
  Description of Artificial Sequence: Synthetic oligonucleotide
ucuuuagucuccuuucuaa

SEQ ID NO: 999831 - RNA, 19 nt, Artificial Sequence
  Description of Artificial Sequence: Synthetic oligonucleotide
ugauuggggagcaguagag

SEQ ID NO: 999832 - RNA, 19 nt, Artificial Sequence
  Description of Artificial Sequence: Synthetic oligonucleotide
uuuauguuguguuguggga

SEQ ID NO: 999833 - RNA, 19 nt, Artificial Sequence
  Description of Artificial Sequence: Synthetic oligonucleotide
caaaaguccacggcaaugg

SEQ ID NO: 999834 - RNA, 19 nt, Artificial Sequence
  Description of Artificial Sequence: Synthetic oligonucleotide
aggacuuaauaccacccag

SEQ ID NO: 999835 - RNA, 19 nt, Artificial Sequence
  Description of Artificial Sequence: Synthetic oligonucleotide
cuuugcuaaugugagacag

SEQ ID NO: 999836 - RNA, 19 nt, Artificial Sequence
  Description of Artificial Sequence: Synthetic oligonucleotide
acucggucaacuuuagucu

SEQ ID NO: 999837 - RNA, 19 nt, Artificial Sequence
  Description of Artificial Sequence: Synthetic oligonucleotide
aagaugaauggucggagua

SEQ ID NO: 999838 - RNA, 19 nt, Artificial Sequence
  Description of Artificial Sequence: Synthetic oligonucleotide
cuguuggcgaacaaugggc

SEQ ID NO: 999839 - RNA, 19 nt, Artificial Sequence
  Description of Artificial Sequence: Synthetic oligonucleotide
aauagcaaugguaggguga

SEQ ID NO: 999840 - RNA, 19 nt, Artificial Sequence
  Description of Artificial Sequence: Synthetic oligonucleotide
auuagguugcuaugggucu

SEQ ID NO: 999841 - RNA, 19 nt, Artificial Sequence
  Description of Artificial Sequence: Synthetic oligonucleotide
gcuaaugugagacagggga

SEQ ID NO: 999842 - RNA, 19 nt, Artificial Sequence
  Description of Artificial Sequence: Synthetic oligonucleotide
acuuaauaccacccagguc

SEQ ID NO: 999843 - RNA, 19 nt, Artificial Sequence
  Description of Artificial Sequence: Synthetic oligonucleotide
uagguaucaaucgggaccc

SEQ ID NO: 999844 - RNA, 19 nt, Artificial Sequence
  Description of Artificial Sequence: Synthetic oligonucleotide
gaguaagaugaauggucgg

SEQ ID NO: 999845 - RNA, 19 nt, Artificial Sequence
  Description of Artificial Sequence: Synthetic oligonucleotide
agcaaugguagggugaguc

SEQ ID NO: 999846 - RNA, 19 nt, Artificial Sequence
  Description of Artificial Sequence: Synthetic oligonucleotide
gauuagguugcuauggguc

SEQ ID NO: 999847 - RNA, 19 nt, Artificial Sequence
  Description of Artificial Sequence: Synthetic oligonucleotide
cuaaugugagacaggggag

SEQ ID NO: 999848 - RNA, 19 nt, Artificial Sequence
  Description of Artificial Sequence: Synthetic oligonucleotide
uguuggcgaacaaugggca

SEQ ID NO: 999849 - RNA, 19 nt, Artificial Sequence
  Description of Artificial Sequence: Synthetic oligonucleotide
aucaaucgggacccuacac

SEQ ID NO: 999850 - RNA, 19 nt, Artificial Sequence
  Description of Artificial Sequence: Synthetic oligonucleotide
aaggguuucauaggcacca

SEQ ID NO: 999851 - RNA, 19 nt, Artificial Sequence
  Description of Artificial Sequence: Synthetic oligonucleotide
uuuagcgccagguccccgg

SEQ ID NO: 999852 - RNA, 19 nt, Artificial Sequence
  Description of Artificial Sequence: Synthetic oligonucleotide
uuguuauacuguacucugc

SEQ ID NO: 999853 - RNA, 19 nt, Artificial Sequence
  Description of Artificial Sequence: Synthetic oligonucleotide
gaugaauggucggaguaag

SEQ ID NO: 999854 - RNA, 19 nt, Artificial Sequence
  Description of Artificial Sequence: Synthetic oligonucleotide
agagaacccugcuuggaag

SEQ ID NO: 999855 - RNA, 19 nt, Artificial Sequence
  Description of Artificial Sequence: Synthetic oligonucleotide
ugugaacacaucugcgagc

SEQ ID NO: 999856 - RNA, 19 nt, Artificial Sequence
  Description of Artificial Sequence: Synthetic oligonucleotide
aagcuuccgcgauagcguc

SEQ ID NO: 999857 - RNA, 19 nt, Artificial Sequence
  Description of Artificial Sequence: Synthetic oligonucleotide
guaugaaucuguuucccca

SEQ ID NO: 999858 - RNA, 19 nt, Artificial Sequence
  Description of Artificial Sequence: Synthetic oligonucleotide
uauguuguguugugggaac

SEQ ID NO: 999859 - RNA, 19 nt, Artificial Sequence
  Description of Artificial Sequence: Synthetic oligonucleotide
ucggucaacuuuagucugg

SEQ ID NO: 999860 - RNA, 19 nt, Artificial Sequence
  Description of Artificial Sequence: Synthetic oligonucleotide
caaucugcugaguagcuuc

SEQ ID NO: 999861 - RNA, 19 nt, Artificial Sequence
  Description of Artificial Sequence: Synthetic oligonucleotide
cuccuagguaucaaucggg

SEQ ID NO: 999862 - RNA, 19 nt, Artificial Sequence
  Description of Artificial Sequence: Synthetic oligonucleotide
aauggucggaguaagggau

SEQ ID NO: 999863 - RNA, 19 nt, Artificial Sequence
  Description of Artificial Sequence: Synthetic oligonucleotide
auagcaaugguagggugag

SEQ ID NO: 999864 - RNA, 19 nt, Artificial Sequence
  Description of Artificial Sequence: Synthetic oligonucleotide
uccuagguaucaaucggga

SEQ ID NO: 999865 - RNA, 19 nt, Artificial Sequence
  Description of Artificial Sequence: Synthetic oligonucleotide
aggcuauagaguccaaucu

SEQ ID NO: 999866 - RNA, 19 nt, Artificial Sequence
  Description of Artificial Sequence: Synthetic oligonucleotide
guaagaugaauggucggag

SEQ ID NO: 999867 - RNA, 19 nt, Artificial Sequence
  Description of Artificial Sequence: Synthetic oligonucleotide
uucuuugcgacucggucaa

SEQ ID NO: 999868 - RNA, 19 nt, Artificial Sequence
  Description of Artificial Sequence: Synthetic oligonucleotide
uaagaugaauggucggagu

SEQ ID NO: 999869 - RNA, 19 nt, Artificial Sequence
  Description of Artificial Sequence: Synthetic oligonucleotide
aguaagaugaauggucgga

SEQ ID NO: 999870 - RNA, 19 nt, Artificial Sequence
  Description of Artificial Sequence: Synthetic oligonucleotide
cugugaacacaucugcgag

SEQ ID NO: 999871 - RNA, 19 nt, Artificial Sequence
  Description of Artificial Sequence: Synthetic oligonucleotide
ucagaguaagaugaauggu

SEQ ID NO: 999872 - RNA, 19 nt, Artificial Sequence
  Description of Artificial Sequence: Synthetic oligonucleotide
ugcuaaugugagacagggg

SEQ ID NO: 999873 - RNA, 19 nt, Artificial Sequence
  Description of Artificial Sequence: Synthetic oligonucleotide
aacuggguuaaaccaaguu

SEQ ID NO: 999874 - RNA, 19 nt, Artificial Sequence
  Description of Artificial Sequence: Synthetic oligonucleotide
cagauuagguugcuauggg

SEQ ID NO: 999875 - RNA, 19 nt, Artificial Sequence
  Description of Artificial Sequence: Synthetic oligonucleotide
uuauguuguguugugggaa

SEQ ID NO: 999876 - RNA, 19 nt, Artificial Sequence
  Description of Artificial Sequence: Synthetic oligonucleotide
auaaaguaugaaucuguuu

SEQ ID NO: 999877 - RNA, 19 nt, Artificial Sequence
  Description of Artificial Sequence: Synthetic oligonucleotide
acaucuacaggcuguaauu

SEQ ID NO: 999878 - RNA, 19 nt, Artificial Sequence
  Description of Artificial Sequence: Synthetic oligonucleotide
agaacucuccacaaggcug

SEQ ID NO: 999879 - RNA, 19 nt, Artificial Sequence
  Description of Artificial Sequence: Synthetic oligonucleotide
gaauggucggaguaaggga

SEQ ID NO: 999880 - RNA, 19 nt, Artificial Sequence
  Description of Artificial Sequence: Synthetic oligonucleotide
gagaaucacagccuaucca

SEQ ID NO: 999881 - RNA, 19 nt, Artificial Sequence
  Description of Artificial Sequence: Synthetic oligonucleotide
agauuagguugcuaugggu

SEQ ID NO: 999882 - RNA, 19 nt, Artificial Sequence
  Description of Artificial Sequence: Synthetic oligonucleotide
uccacugaagcauggcaga

SEQ ID NO: 999883 - RNA, 19 nt, Artificial Sequence
  Description of Artificial Sequence: Synthetic oligonucleotide
gugaacacaucugcgagcc

SEQ ID NO: 999884 - RNA, 19 nt, Artificial Sequence
  Description of Artificial Sequence: Synthetic oligonucleotide
uaucaaucgggacccuaca

SEQ ID NO: 999885 - RNA, 19 nt, Artificial Sequence
  Description of Artificial Sequence: Synthetic oligonucleotide
aucuuuauguuguguugug

SEQ ID NO: 999886 - RNA, 19 nt, Artificial Sequence
  Description of Artificial Sequence: Synthetic oligonucleotide
aacacagucgccaucuuuu

SEQ ID NO: 999887 - RNA, 19 nt, Artificial Sequence
  Description of Artificial Sequence: Synthetic oligonucleotide
uggauugcaauugguguug

SEQ ID NO: 999888 - RNA, 19 nt, Artificial Sequence
  Description of Artificial Sequence: Synthetic oligonucleotide
ucggcuugugggaagaaua

SEQ ID NO: 999889 - RNA, 19 nt, Artificial Sequence
  Description of Artificial Sequence: Synthetic oligonucleotide
acacauguauugcugcaca

SEQ ID NO: 999890 - RNA, 19 nt, Artificial Sequence
  Description of Artificial Sequence: Synthetic oligonucleotide
uggacaagcccaccgugug

SEQ ID NO: 999891 - RNA, 19 nt, Artificial Sequence
  Description of Artificial Sequence: Synthetic oligonucleotide
guuauacuguacucugcug

SEQ ID NO: 999892 - RNA, 19 nt, Artificial Sequence
  Description of Artificial Sequence: Synthetic oligonucleotide
ggcguugaggacuuaauac

SEQ ID NO: 999893 - RNA, 19 nt, Artificial Sequence
  Description of Artificial Sequence: Synthetic oligonucleotide
ugcuuggaagaaauucacu

SEQ ID NO: 999894 - RNA, 19 nt, Artificial Sequence
  Description of Artificial Sequence: Synthetic oligonucleotide
ugggaacugucgaaugagc

SEQ ID NO: 999895 - RNA, 19 nt, Artificial Sequence
  Description of Artificial Sequence: Synthetic oligonucleotide
agagccgcgcgguaccagc

SEQ ID NO: 999896 - RNA, 19 nt, Artificial Sequence
  Description of Artificial Sequence: Synthetic oligonucleotide
gaaugcaugugggauaaga

SEQ ID NO: 999897 - RNA, 19 nt, Artificial Sequence
  Description of Artificial Sequence: Synthetic oligonucleotide
gguauaaaguaugaaucug

SEQ ID NO: 999898 - RNA, 19 nt, Artificial Sequence
  Description of Artificial Sequence: Synthetic oligonucleotide
uacgaccccguucauggug

SEQ ID NO: 999899 - RNA, 19 nt, Artificial Sequence
  Description of Artificial Sequence: Synthetic oligonucleotide
aaagcccgaagcucagagu

SEQ ID NO: 999900 - RNA, 19 nt, Artificial Sequence
  Description of Artificial Sequence: Synthetic oligonucleotide
uuggcgaacaaugggcacc

SEQ ID NO: 999901 - RNA, 19 nt, Artificial Sequence
  Description of Artificial Sequence: Synthetic oligonucleotide
guauaucgaaaaucaccug

SEQ ID NO: 999902 - RNA, 19 nt, Artificial Sequence
  Description of Artificial Sequence: Synthetic oligonucleotide
agccacagaauucuguaaa

SEQ ID NO: 999903 - RNA, 19 nt, Artificial Sequence
  Description of Artificial Sequence: Synthetic oligonucleotide
ucaugcgcuucuuugcgac

SEQ ID NO: 999904 - RNA, 19 nt, Artificial Sequence
  Description of Artificial Sequence: Synthetic oligonucleotide
gaacagauuagguugcuau

SEQ ID NO: 999905 - RNA, 19 nt, Artificial Sequence
  Description of Artificial Sequence: Synthetic oligonucleotide
uguaccaacuccaggcguu

SEQ ID NO: 999906 - RNA, 19 nt, Artificial Sequence
  Description of Artificial Sequence: Synthetic oligonucleotide
uccuucagcauggauggug

SEQ ID NO: 999907 - RNA, 19 nt, Artificial Sequence
  Description of Artificial Sequence: Synthetic oligonucleotide
ucuuugcuaaugugagaca

SEQ ID NO: 999908 - RNA, 19 nt, Artificial Sequence
  Description of Artificial Sequence: Synthetic oligonucleotide
ugcgacucggucaacuuua

SEQ ID NO: 999909 - RNA, 19 nt, Artificial Sequence
  Description of Artificial Sequence: Synthetic oligonucleotide
gcaauugguguugucaagg

SEQ ID NO: 999910 - RNA, 19 nt, Artificial Sequence
  Description of Artificial Sequence: Synthetic oligonucleotide
aagcccaccguguggguca

SEQ ID NO: 999911 - RNA, 19 nt, Artificial Sequence
  Description of Artificial Sequence: Synthetic oligonucleotide
gaggacuuaauaccaccca

SEQ ID NO: 999912 - RNA, 19 nt, Artificial Sequence
  Description of Artificial Sequence: Synthetic oligonucleotide
augugggauaagaagaaga

SEQ ID NO: 999913 - RNA, 19 nt, Artificial Sequence
  Description of Artificial Sequence: Synthetic oligonucleotide
gacucaguagcuagaugag

SEQ ID NO: 999914 - RNA, 19 nt, Artificial Sequence
  Description of Artificial Sequence: Synthetic oligonucleotide
cagguccgaaacucaaggg

SEQ ID NO: 999915 - RNA, 19 nt, Artificial Sequence
  Description of Artificial Sequence: Synthetic oligonucleotide
uuuagucuggucagcuuuu

SEQ ID NO: 999916 - RNA, 19 nt, Artificial Sequence
  Description of Artificial Sequence: Synthetic oligonucleotide
ccaaguugaacagauuagg

SEQ ID NO: 999917 - RNA, 19 nt, Artificial Sequence
  Description of Artificial Sequence: Synthetic oligonucleotide
ggcagaauggcagaucucc

SEQ ID NO: 999918 - RNA, 19 nt, Artificial Sequence
  Description of Artificial Sequence: Synthetic oligonucleotide
gauucaaacacaacucccu

SEQ ID NO: 999919 - RNA, 19 nt, Artificial Sequence
  Description of Artificial Sequence: Synthetic oligonucleotide
gggauuacgaccccguuca

SEQ ID NO: 999920 - RNA, 19 nt, Artificial Sequence
  Description of Artificial Sequence: Synthetic oligonucleotide
gacuuaauaccacccaggu

SEQ ID NO: 999921 - RNA, 19 nt, Artificial Sequence
  Description of Artificial Sequence: Synthetic oligonucleotide
ggauaagaagaagagccgc

SEQ ID NO: 999922 - RNA, 19 nt, Artificial Sequence
  Description of Artificial Sequence: Synthetic oligonucleotide
auuuuagcgccaggucccc

SEQ ID NO: 999923 - RNA, 19 nt, Artificial Sequence
  Description of Artificial Sequence: Synthetic oligonucleotide
guugcuaugggucuucuau

SEQ ID NO: 999924 - RNA, 19 nt, Artificial Sequence
  Description of Artificial Sequence: Synthetic oligonucleotide
cucggucaacuuuagucug

SEQ ID NO: 999925 - RNA, 19 nt, Artificial Sequence
  Description of Artificial Sequence: Synthetic oligonucleotide
uuccuaggcuauagagucc

SEQ ID NO: 999926 - RNA, 19 nt, Artificial Sequence
  Description of Artificial Sequence: Synthetic oligonucleotide
uuuccuagcggaggaacac

SEQ ID NO: 999927 - RNA, 19 nt, Artificial Sequence
  Description of Artificial Sequence: Synthetic oligonucleotide
ucgaaugagcuggacaauc

SEQ ID NO: 999928 - RNA, 19 nt, Artificial Sequence
  Description of Artificial Sequence: Synthetic oligonucleotide
ggacccuacaccaauuucc

SEQ ID NO: 999929 - RNA, 19 nt, Artificial Sequence
  Description of Artificial Sequence: Synthetic oligonucleotide
aauaccacccagguccgaa

SEQ ID NO: 999930 - RNA, 19 nt, Artificial Sequence
  Description of Artificial Sequence: Synthetic oligonucleotide
caaucgggacccuacacca

SEQ ID NO: 999931 - RNA, 19 nt, Artificial Sequence
  Description of Artificial Sequence: Synthetic oligonucleotide
gauuacgaccccguucaug

SEQ ID NO: 999932 - RNA, 19 nt, Artificial Sequence
  Description of Artificial Sequence: Synthetic oligonucleotide
uggucggaguaagggaugg

SEQ ID NO: 999933 - RNA, 19 nt, Artificial Sequence
  Description of Artificial Sequence: Synthetic oligonucleotide
ugggugagggcuucguacu

SEQ ID NO: 999934 - RNA, 19 nt, Artificial Sequence
  Description of Artificial Sequence: Synthetic oligonucleotide
caucuacaggcuguaauug

SEQ ID NO: 999935 - RNA, 19 nt, Artificial Sequence
  Description of Artificial Sequence: Synthetic oligonucleotide
ggacuuaauaccacccagg

SEQ ID NO: 999936 - RNA, 19 nt, Artificial Sequence
  Description of Artificial Sequence: Synthetic oligonucleotide
uguggucuacagcauggau

SEQ ID NO: 999937 - RNA, 19 nt, Artificial Sequence
  Description of Artificial Sequence: Synthetic oligonucleotide
ugcgcuucuuugcgacucg

SEQ ID NO: 999938 - RNA, 19 nt, Artificial Sequence
  Description of Artificial Sequence: Synthetic oligonucleotide
aacucaagggcuaguugcu

SEQ ID NO: 999939 - RNA, 19 nt, Artificial Sequence
  Description of Artificial Sequence: Synthetic oligonucleotide
auaggcaccaggacuccac

SEQ ID NO: 999940 - RNA, 19 nt, Artificial Sequence
  Description of Artificial Sequence: Synthetic oligonucleotide
guaagggaugguguggaug

SEQ ID NO: 999941 - RNA, 19 nt, Artificial Sequence
  Description of Artificial Sequence: Synthetic oligonucleotide
uggugagccucuccuaggu

SEQ ID NO: 999942 - RNA, 19 nt, Artificial Sequence
  Description of Artificial Sequence: Synthetic oligonucleotide
gagaacccugcuuggaaga

SEQ ID NO: 999943 - RNA, 19 nt, Artificial Sequence
  Description of Artificial Sequence: Synthetic oligonucleotide
agggcuaguugcuccagca

SEQ ID NO: 999944 - RNA, 19 nt, Artificial Sequence
  Description of Artificial Sequence: Synthetic oligonucleotide
gugauuggggagcaguaga

SEQ ID NO: 999945 - RNA, 19 nt, Artificial Sequence
  Description of Artificial Sequence: Synthetic oligonucleotide
cuuccuggccggaagagga

SEQ ID NO: 999946 - RNA, 19 nt, Artificial Sequence
  Description of Artificial Sequence: Synthetic oligonucleotide
acuccacaaacaaacuuca

SEQ ID NO: 999947 - RNA, 19 nt, Artificial Sequence
  Description of Artificial Sequence: Synthetic oligonucleotide
uucaugcgcuucuuugcga

SEQ ID NO: 999948 - RNA, 19 nt, Artificial Sequence
  Description of Artificial Sequence: Synthetic oligonucleotide
uuuucggcuugugggaaga

SEQ ID NO: 999949 - RNA, 19 nt, Artificial Sequence
  Description of Artificial Sequence: Synthetic oligonucleotide
cauuugcuuuccuagcgga

SEQ ID NO: 999950 - RNA, 19 nt, Artificial Sequence
  Description of Artificial Sequence: Synthetic oligonucleotide
gaagcauggcagaauggca

SEQ ID NO: 999951 - RNA, 19 nt, Artificial Sequence
  Description of Artificial Sequence: Synthetic oligonucleotide
guaucaaucgggacccuac

SEQ ID NO: 999952 - RNA, 19 nt, Artificial Sequence
  Description of Artificial Sequence: Synthetic oligonucleotide
gcucagaguaagaugaaug

SEQ ID NO: 999953 - RNA, 19 nt, Artificial Sequence
  Description of Artificial Sequence: Synthetic oligonucleotide
ccagguccgaaacucaagg

SEQ ID NO: 999954 - RNA, 19 nt, Artificial Sequence
  Description of Artificial Sequence: Synthetic oligonucleotide
cuuuucggcuugugggaag

SEQ ID NO: 999955 - RNA, 19 nt, Artificial Sequence
  Description of Artificial Sequence: Synthetic oligonucleotide
ggggcagucaacacagucg

SEQ ID NO: 999956 - RNA, 19 nt, Artificial Sequence
  Description of Artificial Sequence: Synthetic oligonucleotide
uccuagcggaggaacacau

SEQ ID NO: 999957 - RNA, 19 nt, Artificial Sequence
  Description of Artificial Sequence: Synthetic oligonucleotide
uccgaaacucaagggcuag

SEQ ID NO: 999958 - RNA, 19 nt, Artificial Sequence
  Description of Artificial Sequence: Synthetic oligonucleotide
caugugggauaagaagaag

SEQ ID NO: 999959 - RNA, 19 nt, Artificial Sequence
  Description of Artificial Sequence: Synthetic oligonucleotide
acgguuggcaagucaccag

SEQ ID NO: 999960 - RNA, 19 nt, Artificial Sequence
  Description of Artificial Sequence: Synthetic oligonucleotide
aguagcuagaugagugucu

SEQ ID NO: 999961 - RNA, 19 nt, Artificial Sequence
  Description of Artificial Sequence: Synthetic oligonucleotide
gucggaguaagggauggug

SEQ ID NO: 999962 - RNA, 19 nt, Artificial Sequence
  Description of Artificial Sequence: Synthetic oligonucleotide
uugguguugucaagguaua

SEQ ID NO: 999963 - RNA, 19 nt, Artificial Sequence
  Description of Artificial Sequence: Synthetic oligonucleotide
augcgcuucuuugcgacuc

SEQ ID NO: 999964 - RNA, 19 nt, Artificial Sequence
  Description of Artificial Sequence: Synthetic oligonucleotide
agagcuacuccagggugag

SEQ ID NO: 999965 - RNA, 19 nt, Artificial Sequence
  Description of Artificial Sequence: Synthetic oligonucleotide
ggaguaagggauggugugg

SEQ ID NO: 999966 - RNA, 19 nt, Artificial Sequence
  Description of Artificial Sequence: Synthetic oligonucleotide
ugagccucuccuagguauc

SEQ ID NO: 999967 - RNA, 19 nt, Artificial Sequence
  Description of Artificial Sequence: Synthetic oligonucleotide
gagcugcaacaaaagcccg

SEQ ID NO: 999968 - RNA, 19 nt, Artificial Sequence
  Description of Artificial Sequence: Synthetic oligonucleotide
auaucgaaaaucaccugua

SEQ ID NO: 999969 - RNA, 19 nt, Artificial Sequence
  Description of Artificial Sequence: Synthetic oligonucleotide
uuugcgacucggucaacuu

SEQ ID NO: 999970 - RNA, 19 nt, Artificial Sequence
  Description of Artificial Sequence: Synthetic oligonucleotide
gaguaagggauggugugga

SEQ ID NO: 999971 - RNA, 19 nt, Artificial Sequence
  Description of Artificial Sequence: Synthetic oligonucleotide
augaauggucggaguaagg

SEQ ID NO: 999972 - RNA, 19 nt, Artificial Sequence
  Description of Artificial Sequence: Synthetic oligonucleotide
aaccgcacugcugugugaa

SEQ ID NO: 999973 - RNA, 19 nt, Artificial Sequence
  Description of Artificial Sequence: Synthetic oligonucleotide
ugaacacaucugcgagccc

SEQ ID NO: 999974 - RNA, 19 nt, Artificial Sequence
  Description of Artificial Sequence: Synthetic oligonucleotide
guuggcgaacaaugggcac

SEQ ID NO: 999975 - RNA, 19 nt, Artificial Sequence
  Description of Artificial Sequence: Synthetic oligonucleotide
aacugccaaagcacauuug

SEQ ID NO: 999976 - RNA, 19 nt, Artificial Sequence
  Description of Artificial Sequence: Synthetic oligonucleotide
acugucgaaugagcuggac

SEQ ID NO: 999977 - RNA, 19 nt, Artificial Sequence
  Description of Artificial Sequence: Synthetic oligonucleotide
acuguuugcuaaauauaau

SEQ ID NO: 999978 - RNA, 19 nt, Artificial Sequence
  Description of Artificial Sequence: Synthetic oligonucleotide
aucgggacccuacaccaau

SEQ ID NO: 999979 - RNA, 19 nt, Artificial Sequence
  Description of Artificial Sequence: Synthetic oligonucleotide
cuauagaguccaaucuuua

SEQ ID NO: 999980 - RNA, 19 nt, Artificial Sequence
  Description of Artificial Sequence: Synthetic oligonucleotide
gcuagaugagugucuuugc

SEQ ID NO: 999981 - RNA, 19 nt, Artificial Sequence
  Description of Artificial Sequence: Synthetic oligonucleotide
ggggauucaaacacaacuc

SEQ ID NO: 999982 - RNA, 19 nt, Artificial Sequence
  Description of Artificial Sequence: Synthetic oligonucleotide
uuuuagcgccagguccccg

SEQ ID NO: 999983 - RNA, 19 nt, Artificial Sequence
  Description of Artificial Sequence: Synthetic oligonucleotide
aggcguugaggacuuaaua

SEQ ID NO: 999984 - RNA, 19 nt, Artificial Sequence
  Description of Artificial Sequence: Synthetic oligonucleotide
cuucgcgggaaccgcacug

SEQ ID NO: 999985 - RNA, 19 nt, Artificial Sequence
  Description of Artificial Sequence: Synthetic oligonucleotide
accaauuuccugccugguu

SEQ ID NO: 999986 - RNA, 19 nt, Artificial Sequence
  Description of Artificial Sequence: Synthetic oligonucleotide
uugcgacucggucaacuuu

SEQ ID NO: 999987 - RNA, 19 nt, Artificial Sequence
  Description of Artificial Sequence: Synthetic oligonucleotide
gaagcuuccgcgauagcgu

SEQ ID NO: 999988 - RNA, 19 nt, Artificial Sequence
  Description of Artificial Sequence: Synthetic oligonucleotide
uggcgaacaaugggcacca

SEQ ID NO: 999989 - RNA, 19 nt, Artificial Sequence
  Description of Artificial Sequence: Synthetic oligonucleotide
acggcgcaggcuccaaaag

SEQ ID NO: 999990 - RNA, 19 nt, Artificial Sequence
  Description of Artificial Sequence: Synthetic oligonucleotide
cgaaaaucaccuguaggcg

SEQ ID NO: 999991 - RNA, 19 nt, Artificial Sequence
  Description of Artificial Sequence: Synthetic oligonucleotide
uguggaugccugggugagg

SEQ ID NO: 999992 - RNA, 19 nt, Artificial Sequence
  Description of Artificial Sequence: Synthetic oligonucleotide
uucgcgggaaccgcacugc

SEQ ID NO: 999993 - RNA, 19 nt, Artificial Sequence
  Description of Artificial Sequence: Synthetic oligonucleotide
uuccuagcggaggaacaca

SEQ ID NO: 999994 - RNA, 19 nt, Artificial Sequence
  Description of Artificial Sequence: Synthetic oligonucleotide
acaaaagcccgaagcucag

SEQ ID NO: 999995 - RNA, 19 nt, Artificial Sequence
  Description of Artificial Sequence: Synthetic oligonucleotide
ucuucgcgggaaccgcacu

SEQ ID NO: 999996 - RNA, 19 nt, Artificial Sequence
  Description of Artificial Sequence: Synthetic oligonucleotide
gagccacagaauucuguaa

SEQ ID NO: 999997 - RNA, 19 nt, Artificial Sequence
  Description of Artificial Sequence: Synthetic oligonucleotide
acuggaguaagaagguauu

SEQ ID NO: 999998 - RNA, 19 nt, Artificial Sequence
  Description of Artificial Sequence: Synthetic oligonucleotide
ggcuggauugcaauuggug

SEQ ID NO: 999999 - RNA, 19 nt, Artificial Sequence
  Description of Artificial Sequence: Synthetic oligonucleotide
gcuaguugcuccagcagug

SEQ ID NO: 1000000 - RNA, 19 nt, Artificial Sequence
  Description of Artificial Sequence: Synthetic oligonucleotide
agcuuccgcgauagcgucc

SEQ ID NO: 1000001 - RNA, 19 nt, Artificial Sequence
  Description of Artificial Sequence: Synthetic oligonucleotide
gcgacgguguaggaggugg

SEQ ID NO: 1000002 - RNA, 19 nt, Artificial Sequence
  Description of Artificial Sequence: Synthetic oligonucleotide
cacuggaguaagaagguau

SEQ ID NO: 1000003 - RNA, 19 nt, Artificial Sequence
  Description of Artificial Sequence: Synthetic oligonucleotide
cuacagcauggaugcgccc

SEQ ID NO: 1000004 - RNA, 19 nt, Artificial Sequence
  Description of Artificial Sequence: Synthetic oligonucleotide
agaagguauuuuagcgcca

SEQ ID NO: 1000005 - RNA, 19 nt, Artificial Sequence
  Description of Artificial Sequence: Synthetic oligonucleotide
uuagguugcuaugggucuu

SEQ ID NO: 1000006 - RNA, 19 nt, Artificial Sequence
  Description of Artificial Sequence: Synthetic oligonucleotide
gguguugucaagguauaaa

SEQ ID NO: 1000007 - RNA, 19 nt, Artificial Sequence
  Description of Artificial Sequence: Synthetic oligonucleotide
uucggcuugugggaagaau

SEQ ID NO: 1000008 - RNA, 19 nt, Artificial Sequence
  Description of Artificial Sequence: Synthetic oligonucleotide
ccuuucuaacugccaaagc

SEQ ID NO: 1000009 - RNA, 19 nt, Artificial Sequence
  Description of Artificial Sequence: Synthetic oligonucleotide
ggcacgguuggcaagucac

SEQ ID NO: 1000010 - RNA, 19 nt, Artificial Sequence
  Description of Artificial Sequence: Synthetic oligonucleotide
ccuagguaucaaucgggac

SEQ ID NO: 1000011 - RNA, 19 nt, Artificial Sequence
  Description of Artificial Sequence: Synthetic oligonucleotide
ggguuaaaccaaguugaac

SEQ ID NO: 1000012 - RNA, 19 nt, Artificial Sequence
  Description of Artificial Sequence: Synthetic oligonucleotide
aagagccgcgcgguaccag

SEQ ID NO: 1000013 - RNA, 19 nt, Artificial Sequence
  Description of Artificial Sequence: Synthetic oligonucleotide
gugauucuuuuccuaggcu

SEQ ID NO: 1000014 - RNA, 19 nt, Artificial Sequence
  Description of Artificial Sequence: Synthetic oligonucleotide
gggagaaucacagccuauc

SEQ ID NO: 1000015 - RNA, 19 nt, Artificial Sequence
  Description of Artificial Sequence: Synthetic oligonucleotide
gcuggacaagcccaccgug

SEQ ID NO: 1000016 - RNA, 19 nt, Artificial Sequence
  Description of Artificial Sequence: Synthetic oligonucleotide
ugguguugucaagguauaa

SEQ ID NO: 1000017 - RNA, 19 nt, Artificial Sequence
  Description of Artificial Sequence: Synthetic oligonucleotide
gacccuacaccaauuuccu

SEQ ID NO: 1000018 - RNA, 19 nt, Artificial Sequence
  Description of Artificial Sequence: Synthetic oligonucleotide
ccucuccuagguaucaauc

SEQ ID NO: 1000019 - RNA, 19 nt, Artificial Sequence
  Description of Artificial Sequence: Synthetic oligonucleotide
cgcgguaccagcacggcgc

SEQ ID NO: 1000020 - RNA, 19 nt, Artificial Sequence
  Description of Artificial Sequence: Synthetic oligonucleotide
ucguacuuuucggcuugug

SEQ ID NO: 1000021 - RNA, 19 nt, Artificial Sequence
  Description of Artificial Sequence: Synthetic oligonucleotide
uccagucacuuugguuccc

SEQ ID NO: 1000022 - RNA, 19 nt, Artificial Sequence
  Description of Artificial Sequence: Synthetic oligonucleotide
gguucccucuagcugguga

SEQ ID NO: 1000023 - RNA, 19 nt, Artificial Sequence
  Description of Artificial Sequence: Synthetic oligonucleotide
cccugcuuggaagaaauuc

SEQ ID NO: 1000024 - RNA, 19 nt, Artificial Sequence
  Description of Artificial Sequence: Synthetic oligonucleotide
ucgcgggaaccgcacugcu

SEQ ID NO: 1000025 - RNA, 19 nt, Artificial Sequence
  Description of Artificial Sequence: Synthetic oligonucleotide
uuccuggccggaagaggau

SEQ ID NO: 1000026 - RNA, 19 nt, Artificial Sequence
  Description of Artificial Sequence: Synthetic oligonucleotide
agaacccugcuuggaagaa

SEQ ID NO: 1000027 - RNA, 19 nt, Artificial Sequence
  Description of Artificial Sequence: Synthetic oligonucleotide
aaucgggacccuacaccaa

SEQ ID NO: 1000028 - RNA, 19 nt, Artificial Sequence
  Description of Artificial Sequence: Synthetic oligonucleotide
cguugaggacuuaauacca

SEQ ID NO: 1000029 - RNA, 19 nt, Artificial Sequence
  Description of Artificial Sequence: Synthetic oligonucleotide
cacgguuggcaagucacca

SEQ ID NO: 1000030 - RNA, 19 nt, Artificial Sequence
  Description of Artificial Sequence: Synthetic oligonucleotide
ucgggacccuacaccaauu

SEQ ID NO: 1000031 - RNA, 19 nt, Artificial Sequence
  Description of Artificial Sequence: Synthetic oligonucleotide
aaacuucauuagagcuacu

SEQ ID NO: 1000032 - RNA, 19 nt, Artificial Sequence
  Description of Artificial Sequence: Synthetic oligonucleotide
gaaccgcacugcuguguga

SEQ ID NO: 1000033 - RNA, 19 nt, Artificial Sequence
  Description of Artificial Sequence: Synthetic oligonucleotide
ugccacuagccaucaucua

SEQ ID NO: 1000034 - RNA, 19 nt, Artificial Sequence
  Description of Artificial Sequence: Synthetic oligonucleotide
cagugauuggggagcagua

SEQ ID NO: 1000035 - RNA, 19 nt, Artificial Sequence
  Description of Artificial Sequence: Synthetic oligonucleotide
uaauaccacccagguccga

SEQ ID NO: 1000036 - RNA, 19 nt, Artificial Sequence
  Description of Artificial Sequence: Synthetic oligonucleotide
gcuuuccuagcggaggaac

SEQ ID NO: 1000037 - RNA, 19 nt, Artificial Sequence
  Description of Artificial Sequence: Synthetic oligonucleotide
gcuuccgcgauagcguccc

SEQ ID NO: 1000038 - RNA, 19 nt, Artificial Sequence
  Description of Artificial Sequence: Synthetic oligonucleotide
agaaugcaugugggauaag

SEQ ID NO: 1000039 - RNA, 19 nt, Artificial Sequence
  Description of Artificial Sequence: Synthetic oligonucleotide
gguccgaaacucaagggcu

SEQ ID NO: 1000040 - RNA, 19 nt, Artificial Sequence
  Description of Artificial Sequence: Synthetic oligonucleotide
gaugagugucuuugcuaau

SEQ ID NO: 1000041 - RNA, 19 nt, Artificial Sequence
  Description of Artificial Sequence: Synthetic oligonucleotide
accuguaggcgacggugua

SEQ ID NO: 1000042 - RNA, 19 nt, Artificial Sequence
  Description of Artificial Sequence: Synthetic oligonucleotide
cggaguaagggauggugug

SEQ ID NO: 1000043 - RNA, 19 nt, Artificial Sequence
  Description of Artificial Sequence: Synthetic oligonucleotide
gagccucuccuagguauca

SEQ ID NO: 1000044 - RNA, 19 nt, Artificial Sequence
  Description of Artificial Sequence: Synthetic oligonucleotide
cuggacaagcccaccgugu

SEQ ID NO: 1000045 - RNA, 19 nt, Artificial Sequence
  Description of Artificial Sequence: Synthetic oligonucleotide
cacggcgcaggcuccaaaa

SEQ ID NO: 1000046 - RNA, 19 nt, Artificial Sequence
  Description of Artificial Sequence: Synthetic oligonucleotide
guagcuagaugagugucuu

SEQ ID NO: 1000047 - RNA, 19 nt, Artificial Sequence
  Description of Artificial Sequence: Synthetic oligonucleotide
cccagguccgaaacucaag

SEQ ID NO: 1000048 - RNA, 19 nt, Artificial Sequence
  Description of Artificial Sequence: Synthetic oligonucleotide
uuucggcuugugggaagaa

SEQ ID NO: 1000049 - RNA, 19 nt, Artificial Sequence
  Description of Artificial Sequence: Synthetic oligonucleotide
uccacggcaaugggcguuu

SEQ ID NO: 1000050 - RNA, 19 nt, Artificial Sequence
  Description of Artificial Sequence: Synthetic oligonucleotide
gaagagccgcgcgguacca

SEQ ID NO: 1000051 - RNA, 19 nt, Artificial Sequence
  Description of Artificial Sequence: Synthetic oligonucleotide
gaucuccauguggucuaca

SEQ ID NO: 1000052 - RNA, 19 nt, Artificial Sequence
  Description of Artificial Sequence: Synthetic oligonucleotide
cuuugcgacucggucaacu

SEQ ID NO: 1000053 - RNA, 19 nt, Artificial Sequence
  Description of Artificial Sequence: Synthetic oligonucleotide
gucuucgcgggaaccgcac

SEQ ID NO: 1000054 - RNA, 19 nt, Artificial Sequence
  Description of Artificial Sequence: Synthetic oligonucleotide
gcgcgguaccagcacggcg

SEQ ID NO: 1000055 - RNA, 19 nt, Artificial Sequence
  Description of Artificial Sequence: Synthetic oligonucleotide
aggcuggauugcaauuggu

SEQ ID NO: 1000056 - RNA, 19 nt, Artificial Sequence
  Description of Artificial Sequence: Synthetic oligonucleotide
gccgcgcgguaccagcacg

SEQ ID NO: 1000057 - RNA, 19 nt, Artificial Sequence
  Description of Artificial Sequence: Synthetic oligonucleotide
gcgggaaccgcacugcugu

SEQ ID NO: 1000058 - RNA, 19 nt, Artificial Sequence
  Description of Artificial Sequence: Synthetic oligonucleotide
uagcaaugguagggugagu

SEQ ID NO: 1000059 - RNA, 19 nt, Artificial Sequence
  Description of Artificial Sequence: Synthetic oligonucleotide
gcuauagaguccaaucuuu

SEQ ID NO: 1000060 - RNA, 19 nt, Artificial Sequence
  Description of Artificial Sequence: Synthetic oligonucleotide
cacccggcaaggcuucaga

SEQ ID NO: 1000061 - RNA, 19 nt, Artificial Sequence
  Description of Artificial Sequence: Synthetic oligonucleotide
caaaagcccgaagcucaga

SEQ ID NO: 1000062 - RNA, 19 nt, Artificial Sequence
  Description of Artificial Sequence: Synthetic oligonucleotide
guccgaaacucaagggcua

SEQ ID NO: 1000063 - RNA, 19 nt, Artificial Sequence
  Description of Artificial Sequence: Synthetic oligonucleotide
ggucuacagcauggaugcg

SEQ ID NO: 1000064 - RNA, 19 nt, Artificial Sequence
  Description of Artificial Sequence: Synthetic oligonucleotide
ucuuugcgacucggucaac

SEQ ID NO: 1000065 - RNA, 19 nt, Artificial Sequence
  Description of Artificial Sequence: Synthetic oligonucleotide
gcacgguuggcaagucacc

SEQ ID NO: 1000066 - RNA, 19 nt, Artificial Sequence
  Description of Artificial Sequence: Synthetic oligonucleotide
cuaggcuauagaguccaau

SEQ ID NO: 1000067 - RNA, 19 nt, Artificial Sequence
  Description of Artificial Sequence: Synthetic oligonucleotide
caccuguaggcgacggugu

SEQ ID NO: 1000068 - RNA, 19 nt, Artificial Sequence
  Description of Artificial Sequence: Synthetic oligonucleotide
agucaccaguggggucuuc

SEQ ID NO: 1000069 - RNA, 19 nt, Artificial Sequence
  Description of Artificial Sequence: Synthetic oligonucleotide
gguaucaaucgggacccua

SEQ ID NO: 1000070 - RNA, 19 nt, Artificial Sequence
  Description of Artificial Sequence: Synthetic oligonucleotide
gugagggcuucguacuuuu

SEQ ID NO: 1000071 - RNA, 19 nt, Artificial Sequence
  Description of Artificial Sequence: Synthetic oligonucleotide
gagccgcgcgguaccagca

SEQ ID NO: 1000072 - RNA, 19 nt, Artificial Sequence
  Description of Artificial Sequence: Synthetic oligonucleotide
guauugcugcacagagugu

SEQ ID NO: 1000073 - RNA, 19 nt, Artificial Sequence
  Description of Artificial Sequence: Synthetic oligonucleotide
caggcguugaggacuuaau

SEQ ID NO: 1000074 - RNA, 19 nt, Artificial Sequence
  Description of Artificial Sequence: Synthetic oligonucleotide
aucugcugaguagcuucuu

SEQ ID NO: 1000075 - RNA, 19 nt, Artificial Sequence
  Description of Artificial Sequence: Synthetic oligonucleotide
gcuucguacuuuucggcuu

SEQ ID NO: 1000076 - RNA, 19 nt, Artificial Sequence
  Description of Artificial Sequence: Synthetic oligonucleotide
gcgacucggucaacuuuag

SEQ ID NO: 1000077 - RNA, 19 nt, Artificial Sequence
  Description of Artificial Sequence: Synthetic oligonucleotide
agguaucaaucgggacccu

SEQ ID NO: 1000078 - RNA, 19 nt, Artificial Sequence
  Description of Artificial Sequence: Synthetic oligonucleotide
agccucuccuagguaucaa

SEQ ID NO: 1000079 - RNA, 19 nt, Artificial Sequence
  Description of Artificial Sequence: Synthetic oligonucleotide
caugcgcuucuuugcgacu

SEQ ID NO: 1000080 - RNA, 19 nt, Artificial Sequence
  Description of Artificial Sequence: Synthetic oligonucleotide
cgacgguguaggagguggg

SEQ ID NO: 1000081 - RNA, 19 nt, Artificial Sequence
  Description of Artificial Sequence: Synthetic oligonucleotide
aggcgacgguguaggaggu

SEQ ID NO: 1000082 - RNA, 19 nt, Artificial Sequence
  Description of Artificial Sequence: Synthetic oligonucleotide
ggucuucgcgggaaccgca

SEQ ID NO: 1000083 - RNA, 19 nt, Artificial Sequence
  Description of Artificial Sequence: Synthetic oligonucleotide
ggugagccucuccuaggua

SEQ ID NO: 1000084 - RNA, 19 nt, Artificial Sequence
  Description of Artificial Sequence: Synthetic oligonucleotide
ggggccgugcccaagugcu

SEQ ID NO: 1000085 - RNA, 19 nt, Artificial Sequence
  Description of Artificial Sequence: Synthetic oligonucleotide
cacagccuauccagucacu

SEQ ID NO: 1000086 - RNA, 19 nt, Artificial Sequence
  Description of Artificial Sequence: Synthetic oligonucleotide
cccgaagcucagaguaaga

SEQ ID NO: 1000087 - RNA, 19 nt, Artificial Sequence
  Description of Artificial Sequence: Synthetic oligonucleotide
gcgguaccagcacggcgca

SEQ ID NO: 1000088 - RNA, 19 nt, Artificial Sequence
  Description of Artificial Sequence: Synthetic oligonucleotide
cccggacucaguagcuaga

SEQ ID NO: 1000089 - RNA, 19 nt, Artificial Sequence
  Description of Artificial Sequence: Synthetic oligonucleotide
ggcgacgguguaggaggug

SEQ ID NO: 1000090 - RNA, 19 nt, Artificial Sequence
  Description of Artificial Sequence: Synthetic oligonucleotide
gccucuccuagguaucaau

SEQ ID NO: 1000091 - RNA, 19 nt, Artificial Sequence
  Description of Artificial Sequence: Synthetic oligonucleotide
cacaacucccuggauucuu

SEQ ID NO: 1000092 - RNA, 19 nt, Artificial Sequence
  Description of Artificial Sequence: Synthetic oligonucleotide
ggagcaguagaggggccgu

SEQ ID NO: 1000093 - RNA, 19 nt, Artificial Sequence
  Description of Artificial Sequence: Synthetic oligonucleotide
agcacggcgcaggcuccaa

SEQ ID NO: 1000094 - RNA, 19 nt, Artificial Sequence
  Description of Artificial Sequence: Synthetic oligonucleotide
gcgccagguccccggacuc

SEQ ID NO: 1000095 - RNA, 19 nt, Artificial Sequence
  Description of Artificial Sequence: Synthetic oligonucleotide
cuccaggcguugaggacuu

SEQ ID NO: 1000096 - RNA, 19 nt, Artificial Sequence
  Description of Artificial Sequence: Synthetic oligonucleotide
ccgaagcucagaguaagau

SEQ ID NO: 1000097 - RNA, 19 nt, Artificial Sequence
  Description of Artificial Sequence: Synthetic oligonucleotide
gggaaccgcacugcugugu

SEQ ID NO: 1000098 - RNA, 19 nt, Artificial Sequence
  Description of Artificial Sequence: Synthetic oligonucleotide
ccaggcguugaggacuuaa

SEQ ID NO: 1000099 - RNA, 19 nt, Artificial Sequence
  Description of Artificial Sequence: Synthetic oligonucleotide
cccaccgugugggucagaa

SEQ ID NO: 1000100 - RNA, 19 nt, Artificial Sequence
  Description of Artificial Sequence: Synthetic oligonucleotide
ggugagggcuucguacuuu

SEQ ID NO: 1000101 - RNA, 19 nt, Artificial Sequence
  Description of Artificial Sequence: Synthetic oligonucleotide
gcauggcagaauggcagau

SEQ ID NO: 1000102 - RNA, 19 nt, Artificial Sequence
  Description of Artificial Sequence: Synthetic oligonucleotide
gcacagaguguggaaucau

SEQ ID NO: 1000103 - RNA, 19 nt, Artificial Sequence
  Description of Artificial Sequence: Synthetic oligonucleotide
gcggaggaacacauguauu

SEQ ID NO: 1000104 - RNA, 19 nt, Artificial Sequence
  Description of Artificial Sequence: Synthetic oligonucleotide
ggcgaacaaugggcaccac

SEQ ID NO: 1000105 - RNA, 19 nt, Artificial Sequence
  Description of Artificial Sequence: Synthetic oligonucleotide
gggugagggcuucguacuu

SEQ ID NO: 1000106 - RNA, 19 nt, Artificial Sequence
  Description of Artificial Sequence: Synthetic oligonucleotide
ggauuacgaccccguucau

SEQ ID NO: 1000107 - RNA, 19 nt, Artificial Sequence
  Description of Artificial Sequence: Synthetic oligonucleotide
cgggaaccgcacugcugug

SEQ ID NO: 1000108 - RNA, 19 nt, Artificial Sequence
  Description of Artificial Sequence: Synthetic oligonucleotide
cgaaacucaagggcuaguu

SEQ ID NO: 1000109 - RNA, 19 nt, Artificial Sequence
  Description of Artificial Sequence: Synthetic oligonucleotide
cgcgcgguaccagcacggc

SEQ ID NO: 1000110 - RNA, 19 nt, Artificial Sequence
  Description of Artificial Sequence: Synthetic oligonucleotide
cggcgcaggcuccaaaagu

SEQ ID NO: 1000111 - RNA, 19 nt, Artificial Sequence
  Description of Artificial Sequence: Synthetic oligonucleotide
ccggacucaguagcuagau

SEQ ID NO: 1000112 - RNA, 19 nt, Artificial Sequence
  Description of Artificial Sequence: Synthetic oligonucleotide
cguucaugguggcacgguu

SEQ ID NO: 1000113 - RNA, 19 nt, Artificial Sequence
  Description of Artificial Sequence: Synthetic oligonucleotide
ccgaaacucaagggcuagu

SEQ ID NO: 1000114 - RNA, 19 nt, Artificial Sequence
  Description of Artificial Sequence: Synthetic oligonucleotide
ccaccgugugggucagaau

SEQ ID NO: 1000115 - RNA, 19 nt, Artificial Sequence
  Description of Artificial Sequence: Synthetic oligonucleotide
gcccaccgugugggucaga

SEQ ID NO: 1000116 - RNA, 19 nt, Artificial Sequence
  Description of Artificial Sequence: Synthetic oligonucleotide
uuaauuagcauacagugag

SEQ ID NO: 1000117 - RNA, 19 nt, Artificial Sequence
  Description of Artificial Sequence: Synthetic oligonucleotide
aaaauuuggcuauagcuuc

SEQ ID NO: 1000118 - RNA, 19 nt, Artificial Sequence
  Description of Artificial Sequence: Synthetic oligonucleotide
ugucaaaucacauacacga

SEQ ID NO: 1000119 - RNA, 19 nt, Artificial Sequence
  Description of Artificial Sequence: Synthetic oligonucleotide
agcaaaaugguccacacuc

SEQ ID NO: 1000120 - RNA, 19 nt, Artificial Sequence
  Description of Artificial Sequence: Synthetic oligonucleotide
aaugcuuuaaggaagagga

SEQ ID NO: 1000121 - RNA, 19 nt, Artificial Sequence
  Description of Artificial Sequence: Synthetic oligonucleotide
ucaagaaagacacuuuugc

SEQ ID NO: 1000122 - RNA, 19 nt, Artificial Sequence
  Description of Artificial Sequence: Synthetic oligonucleotide
ugugauagacaccaguggg

SEQ ID NO: 1000123 - RNA, 19 nt, Artificial Sequence
  Description of Artificial Sequence: Synthetic oligonucleotide
aagaccugagcauaguuuc

SEQ ID NO: 1000124 - RNA, 19 nt, Artificial Sequence
  Description of Artificial Sequence: Synthetic oligonucleotide
aaauacagcuaaaacaggg

SEQ ID NO: 1000125 - RNA, 19 nt, Artificial Sequence
  Description of Artificial Sequence: Synthetic oligonucleotide
acaacuauggaaguggccc

SEQ ID NO: 1000126 - RNA, 19 nt, Artificial Sequence
  Description of Artificial Sequence: Synthetic oligonucleotide
ugcauauugcuuuaggugc

SEQ ID NO: 1000127 - RNA, 19 nt, Artificial Sequence
  Description of Artificial Sequence: Synthetic oligonucleotide
uuugucaaaucacauacac

SEQ ID NO: 1000128 - RNA, 19 nt, Artificial Sequence
  Description of Artificial Sequence: Synthetic oligonucleotide
ucaaaucacauacacgagc

SEQ ID NO: 1000129 - RNA, 19 nt, Artificial Sequence
  Description of Artificial Sequence: Synthetic oligonucleotide
uuagcauacagugagaggu

SEQ ID NO: 1000130 - RNA, 19 nt, Artificial Sequence
  Description of Artificial Sequence: Synthetic oligonucleotide
ucuuugacuaagcugucgg

SEQ ID NO: 1000131 - RNA, 19 nt, Artificial Sequence
  Description of Artificial Sequence: Synthetic oligonucleotide
ugagcauaguuucggaugg

SEQ ID NO: 1000132 - RNA, 19 nt, Artificial Sequence
  Description of Artificial Sequence: Synthetic oligonucleotide
agaaacacaacuauggaag

SEQ ID NO: 1000133 - RNA, 19 nt, Artificial Sequence
  Description of Artificial Sequence: Synthetic oligonucleotide
uaaaauuacuguccaagga

SEQ ID NO: 1000134 - RNA, 19 nt, Artificial Sequence
  Description of Artificial Sequence: Synthetic oligonucleotide
gauaggacauuccugagac

SEQ ID NO: 1000135 - RNA, 19 nt, Artificial Sequence
  Description of Artificial Sequence: Synthetic oligonucleotide
ucugacagcucuuucaacc

SEQ ID NO: 1000136 - RNA, 19 nt, Artificial Sequence
  Description of Artificial Sequence: Synthetic oligonucleotide
cauuucaucuucaaaugcc

SEQ ID NO: 1000137 - RNA, 19 nt, Artificial Sequence
  Description of Artificial Sequence: Synthetic oligonucleotide
aggacuaagcuucaggcuc

SEQ ID NO: 1000138 - RNA, 19 nt, Artificial Sequence
  Description of Artificial Sequence: Synthetic oligonucleotide
uugggaacugaacacagcc

SEQ ID NO: 1000139 - RNA, 19 nt, Artificial Sequence
  Description of Artificial Sequence: Synthetic oligonucleotide
agugugucugcauagcgac

SEQ ID NO: 1000140 - RNA, 19 nt, Artificial Sequence
  Description of Artificial Sequence: Synthetic oligonucleotide
gaaaugaaaaccccuuccc

SEQ ID NO: 1000141 - RNA, 19 nt, Artificial Sequence
  Description of Artificial Sequence: Synthetic oligonucleotide
uuccgaaaaugcuuuaagg

SEQ ID NO: 1000142 - RNA, 19 nt, Artificial Sequence
  Description of Artificial Sequence: Synthetic oligonucleotide
ugaggacuaagcuucaggc

SEQ ID NO: 1000143 - RNA, 19 nt, Artificial Sequence
  Description of Artificial Sequence: Synthetic oligonucleotide
uuggcuauagcuucaaggu

SEQ ID NO: 1000144 - RNA, 19 nt, Artificial Sequence
  Description of Artificial Sequence: Synthetic oligonucleotide
gacauaaagcaccaccucc

SEQ ID NO: 1000145 - RNA, 19 nt, Artificial Sequence
  Description of Artificial Sequence: Synthetic oligonucleotide
uugacauaaagcaccaccu

SEQ ID NO: 1000146 - RNA, 19 nt, Artificial Sequence
  Description of Artificial Sequence: Synthetic oligonucleotide
uugucaaaucacauacacg

SEQ ID NO: 1000147 - RNA, 19 nt, Artificial Sequence
  Description of Artificial Sequence: Synthetic oligonucleotide
acacaguaccuguaaauac

SEQ ID NO: 1000148 - RNA, 19 nt, Artificial Sequence
  Description of Artificial Sequence: Synthetic oligonucleotide
uccguuuaaacacaacaga

SEQ ID NO: 1000149 - RNA, 19 nt, Artificial Sequence
  Description of Artificial Sequence: Synthetic oligonucleotide
guacuuagcaaaauggucc

SEQ ID NO: 1000150 - RNA, 19 nt, Artificial Sequence
  Description of Artificial Sequence: Synthetic oligonucleotide
uaaucuaaccgugagccag

SEQ ID NO: 1000151 - RNA, 19 nt, Artificial Sequence
  Description of Artificial Sequence: Synthetic oligonucleotide
uaggacauuccugagacag

SEQ ID NO: 1000152 - RNA, 19 nt, Artificial Sequence
  Description of Artificial Sequence: Synthetic oligonucleotide
uaaagcaccaccuccuuga

SEQ ID NO: 1000153 - RNA, 19 nt, Artificial Sequence
  Description of Artificial Sequence: Synthetic oligonucleotide
uucuucgcucagaacaucg

SEQ ID NO: 1000154 - RNA, 19 nt, Artificial Sequence
  Description of Artificial Sequence: Synthetic oligonucleotide
agaaccacgaucuucugga

SEQ ID NO: 1000155 - RNA, 19 nt, Artificial Sequence
  Description of Artificial Sequence: Synthetic oligonucleotide
uucaguauugcuucuucgc

SEQ ID NO: 1000156 - RNA, 19 nt, Artificial Sequence
  Description of Artificial Sequence: Synthetic oligonucleotide
ugaauggcuuuaauuagca

SEQ ID NO: 1000157 - RNA, 19 nt, Artificial Sequence
  Description of Artificial Sequence: Synthetic oligonucleotide
ucaggcuccuaccugaccc

SEQ ID NO: 1000158 - RNA, 19 nt, Artificial Sequence
  Description of Artificial Sequence: Synthetic oligonucleotide
agcgacgguaaucuaaccg

SEQ ID NO: 1000159 - RNA, 19 nt, Artificial Sequence
  Description of Artificial Sequence: Synthetic oligonucleotide
gguaaucuaaccgugagcc

SEQ ID NO: 1000160 - RNA, 19 nt, Artificial Sequence
  Description of Artificial Sequence: Synthetic oligonucleotide
aguacuuagcaaaaugguc

SEQ ID NO: 1000161 - RNA, 19 nt, Artificial Sequence
  Description of Artificial Sequence: Synthetic oligonucleotide
auagacaccaguggggcgc

SEQ ID NO: 1000162 - RNA, 19 nt, Artificial Sequence
  Description of Artificial Sequence: Synthetic oligonucleotide
uccaaguuggcuuuucgca

SEQ ID NO: 1000163 - RNA, 19 nt, Artificial Sequence
  Description of Artificial Sequence: Synthetic oligonucleotide
aacggaauuggcaucuuuc

SEQ ID NO: 1000164 - RNA, 19 nt, Artificial Sequence
  Description of Artificial Sequence: Synthetic oligonucleotide
ugaaccgcuggccuguuag

SEQ ID NO: 1000165 - RNA, 19 nt, Artificial Sequence
  Description of Artificial Sequence: Synthetic oligonucleotide
aacgaguuccuccuucuug

SEQ ID NO: 1000166 - RNA, 19 nt, Artificial Sequence
  Description of Artificial Sequence: Synthetic oligonucleotide
ugaugcuuauucauaaaau

SEQ ID NO: 1000167 - RNA, 19 nt, Artificial Sequence
  Description of Artificial Sequence: Synthetic oligonucleotide
uuuuccggguuuugaaccg

SEQ ID NO: 1000168 - RNA, 19 nt, Artificial Sequence
  Description of Artificial Sequence: Synthetic oligonucleotide
caaguguaguagcugaugc

SEQ ID NO: 1000169 - RNA, 19 nt, Artificial Sequence
  Description of Artificial Sequence: Synthetic oligonucleotide
aaaucacauacacgagcag

SEQ ID NO: 1000170 - RNA, 19 nt, Artificial Sequence
  Description of Artificial Sequence: Synthetic oligonucleotide
ucggaugguuucaugaucu

SEQ ID NO: 1000171 - RNA, 19 nt, Artificial Sequence
  Description of Artificial Sequence: Synthetic oligonucleotide
ugcuuuaaggaagaggaga

SEQ ID NO: 1000172 - RNA, 19 nt, Artificial Sequence
  Description of Artificial Sequence: Synthetic oligonucleotide
acccgaaaaguguggaggc

SEQ ID NO: 1000173 - RNA, 19 nt, Artificial Sequence
  Description of Artificial Sequence: Synthetic oligonucleotide
accgugagccaguagaauc

SEQ ID NO: 1000174 - RNA, 19 nt, Artificial Sequence
  Description of Artificial Sequence: Synthetic oligonucleotide
ucuuugacauaaagcacca

SEQ ID NO: 1000175 - RNA, 19 nt, Artificial Sequence
  Description of Artificial Sequence: Synthetic oligonucleotide
gugcauauugcuuuaggug

SEQ ID NO: 1000176 - RNA, 19 nt, Artificial Sequence
  Description of Artificial Sequence: Synthetic oligonucleotide
ugggaagaguucaagcagc

SEQ ID NO: 1000177 - RNA, 19 nt, Artificial Sequence
  Description of Artificial Sequence: Synthetic oligonucleotide
auacagcuaaaacaggggu

SEQ ID NO: 1000178 - RNA, 19 nt, Artificial Sequence
  Description of Artificial Sequence: Synthetic oligonucleotide
auauuuguaucuccugaug

SEQ ID NO: 1000179 - RNA, 19 nt, Artificial Sequence
  Description of Artificial Sequence: Synthetic oligonucleotide
uuugacuaagcugucggug

SEQ ID NO: 1000180 - RNA, 19 nt, Artificial Sequence
  Description of Artificial Sequence: Synthetic oligonucleotide
ugcguguuccuccaggggc

SEQ ID NO: 1000181 - RNA, 19 nt, Artificial Sequence
  Description of Artificial Sequence: Synthetic oligonucleotide
agcauggccaacuuugucu

SEQ ID NO: 1000182 - RNA, 19 nt, Artificial Sequence
  Description of Artificial Sequence: Synthetic oligonucleotide
cauaguuucggaugguuuc

SEQ ID NO: 1000183 - RNA, 19 nt, Artificial Sequence
  Description of Artificial Sequence: Synthetic oligonucleotide
agaacaucggcuuuauaaa

SEQ ID NO: 1000184 - RNA, 19 nt, Artificial Sequence
  Description of Artificial Sequence: Synthetic oligonucleotide
uccuugauaggacauuccu

SEQ ID NO: 1000185 - RNA, 19 nt, Artificial Sequence
  Description of Artificial Sequence: Synthetic oligonucleotide
aagaccguggguucgaauu

SEQ ID NO: 1000186 - RNA, 19 nt, Artificial Sequence
  Description of Artificial Sequence: Synthetic oligonucleotide
uuauugaagaccugagcau

SEQ ID NO: 1000187 - RNA, 19 nt, Artificial Sequence
  Description of Artificial Sequence: Synthetic oligonucleotide
aaguacuuagcaaaauggu

SEQ ID NO: 1000188 - RNA, 19 nt, Artificial Sequence
  Description of Artificial Sequence: Synthetic oligonucleotide
ucugcaacgaguuccuccu

SEQ ID NO: 1000189 - RNA, 19 nt, Artificial Sequence
  Description of Artificial Sequence: Synthetic oligonucleotide
uugacuaagcugucgguga

SEQ ID NO: 1000190 - RNA, 19 nt, Artificial Sequence
  Description of Artificial Sequence: Synthetic oligonucleotide
aagagguaacggaauuggc

SEQ ID NO: 1000191 - RNA, 19 nt, Artificial Sequence
  Description of Artificial Sequence: Synthetic oligonucleotide
uaagcuucaggcuccuacc

SEQ ID NO: 1000192 - RNA, 19 nt, Artificial Sequence
  Description of Artificial Sequence: Synthetic oligonucleotide
uggccuugggaacugaaca

SEQ ID NO: 1000193 - RNA, 19 nt, Artificial Sequence
  Description of Artificial Sequence: Synthetic oligonucleotide
gagaaccacgaucuucugg

SEQ ID NO: 1000194 - RNA, 19 nt, Artificial Sequence
  Description of Artificial Sequence: Synthetic oligonucleotide
cauacagugagagguagag

SEQ ID NO: 1000195 - RNA, 19 nt, Artificial Sequence
  Description of Artificial Sequence: Synthetic oligonucleotide
uucugaugcuuauucauaa

SEQ ID NO: 1000196 - RNA, 19 nt, Artificial Sequence
  Description of Artificial Sequence: Synthetic oligonucleotide
aacaagcucugacuggccu

SEQ ID NO: 1000197 - RNA, 19 nt, Artificial Sequence
  Description of Artificial Sequence: Synthetic oligonucleotide
uuaguacuggcuucugaug

SEQ ID NO: 1000198 - RNA, 19 nt, Artificial Sequence
  Description of Artificial Sequence: Synthetic oligonucleotide
uacuuagcaaaauggucca

SEQ ID NO: 1000199 - RNA, 19 nt, Artificial Sequence
  Description of Artificial Sequence: Synthetic oligonucleotide
gaauuggcaucuuucucug

SEQ ID NO: 1000200 - RNA, 19 nt, Artificial Sequence
  Description of Artificial Sequence: Synthetic oligonucleotide
aagagacuggugaggaugg

SEQ ID NO: 1000201 - RNA, 19 nt, Artificial Sequence
  Description of Artificial Sequence: Synthetic oligonucleotide
cuaaccgugagccaguaga

SEQ ID NO: 1000202 - RNA, 19 nt, Artificial Sequence
  Description of Artificial Sequence: Synthetic oligonucleotide
cugugauagacaccagugg

SEQ ID NO: 1000203 - RNA, 19 nt, Artificial Sequence
  Description of Artificial Sequence: Synthetic oligonucleotide
uuugucugcucuguuuccg

SEQ ID NO: 1000204 - RNA, 19 nt, Artificial Sequence
  Description of Artificial Sequence: Synthetic oligonucleotide
uacagcuaaaacagggguc

SEQ ID NO: 1000205 - RNA, 19 nt, Artificial Sequence
  Description of Artificial Sequence: Synthetic oligonucleotide
auagcgacgguaaucuaac

SEQ ID NO: 1000206 - RNA, 19 nt, Artificial Sequence
  Description of Artificial Sequence: Synthetic oligonucleotide
agcuucauuaagccccugg

SEQ ID NO: 1000207 - RNA, 19 nt, Artificial Sequence
  Description of Artificial Sequence: Synthetic oligonucleotide
uucgcucagaacaucggcu

SEQ ID NO: 1000208 - RNA, 19 nt, Artificial Sequence
  Description of Artificial Sequence: Synthetic oligonucleotide
auacacgagcaggagaaac

SEQ ID NO: 1000209 - RNA, 19 nt, Artificial Sequence
  Description of Artificial Sequence: Synthetic oligonucleotide
gucagugaaguacuuagca

SEQ ID NO: 1000210 - RNA, 19 nt, Artificial Sequence
  Description of Artificial Sequence: Synthetic oligonucleotide
gacauuuaguuuucuucac

SEQ ID NO: 1000211 - RNA, 19 nt, Artificial Sequence
  Description of Artificial Sequence: Synthetic oligonucleotide
ugcucuguuuccgaaaaug

SEQ ID NO: 1000212 - RNA, 19 nt, Artificial Sequence
  Description of Artificial Sequence: Synthetic oligonucleotide
guuucggaugguuucauga

SEQ ID NO: 1000213 - RNA, 19 nt, Artificial Sequence
  Description of Artificial Sequence: Synthetic oligonucleotide
uuguugaauggcuuuaauu

SEQ ID NO: 1000214 - RNA, 19 nt, Artificial Sequence
  Description of Artificial Sequence: Synthetic oligonucleotide
aguguaguagcugaugccu

SEQ ID NO: 1000215 - RNA, 19 nt, Artificial Sequence
  Description of Artificial Sequence: Synthetic oligonucleotide
acaucggcuuuauaaaaga

SEQ ID NO: 1000216 - RNA, 19 nt, Artificial Sequence
  Description of Artificial Sequence: Synthetic oligonucleotide
uauggaaguggcccuguga

SEQ ID NO: 1000217 - RNA, 19 nt, Artificial Sequence
  Description of Artificial Sequence: Synthetic oligonucleotide
gauagacaccaguggggcg

SEQ ID NO: 1000218 - RNA, 19 nt, Artificial Sequence
  Description of Artificial Sequence: Synthetic oligonucleotide
uuucgcaaggaagagguaa

SEQ ID NO: 1000219 - RNA, 19 nt, Artificial Sequence
  Description of Artificial Sequence: Synthetic oligonucleotide
uguuaguacuggcuucuga

SEQ ID NO: 1000220 - RNA, 19 nt, Artificial Sequence
  Description of Artificial Sequence: Synthetic oligonucleotide
acgguaaucuaaccgugag

SEQ ID NO: 1000221 - RNA, 19 nt, Artificial Sequence
  Description of Artificial Sequence: Synthetic oligonucleotide
uuuguaucuccugaugagu

SEQ ID NO: 1000222 - RNA, 19 nt, Artificial Sequence
  Description of Artificial Sequence: Synthetic oligonucleotide
uaauuagcauacagugaga

SEQ ID NO: 1000223 - RNA, 19 nt, Artificial Sequence
  Description of Artificial Sequence: Synthetic oligonucleotide
aaaaguguggaggcagugu

SEQ ID NO: 1000224 - RNA, 19 nt, Artificial Sequence
  Description of Artificial Sequence: Synthetic oligonucleotide
cugaggacuaagcuucagg

SEQ ID NO: 1000225 - RNA, 19 nt, Artificial Sequence
  Description of Artificial Sequence: Synthetic oligonucleotide
caucuaugcguguuccucc

SEQ ID NO: 1000226 - RNA, 19 nt, Artificial Sequence
  Description of Artificial Sequence: Synthetic oligonucleotide
uucgcaaggaagagguaac

SEQ ID NO: 1000227 - RNA, 19 nt, Artificial Sequence
  Description of Artificial Sequence: Synthetic oligonucleotide
gaugcuuauucauaaaauu

SEQ ID NO: 1000228 - RNA, 19 nt, Artificial Sequence
  Description of Artificial Sequence: Synthetic oligonucleotide
gaggcagugugcucgagac

SEQ ID NO: 1000229 - RNA, 19 nt, Artificial Sequence
  Description of Artificial Sequence: Synthetic oligonucleotide
gugauagacaccagugggg

SEQ ID NO: 1000230 - RNA, 19 nt, Artificial Sequence
  Description of Artificial Sequence: Synthetic oligonucleotide
acacgagcaggagaaacac

SEQ ID NO: 1000231 - RNA, 19 nt, Artificial Sequence
  Description of Artificial Sequence: Synthetic oligonucleotide
ucagggcuccguuuaaaca

SEQ ID NO: 1000232 - RNA, 19 nt, Artificial Sequence
  Description of Artificial Sequence: Synthetic oligonucleotide
uuguaucuccugaugaguu

SEQ ID NO: 1000233 - RNA, 19 nt, Artificial Sequence
  Description of Artificial Sequence: Synthetic oligonucleotide
cagaggagcccgaucacgg

SEQ ID NO: 1000234 - RNA, 19 nt, Artificial Sequence
  Description of Artificial Sequence: Synthetic oligonucleotide
aaguggcccugugauagac

SEQ ID NO: 1000235 - RNA, 19 nt, Artificial Sequence
  Description of Artificial Sequence: Synthetic oligonucleotide
caaaaugguccacacucug

SEQ ID NO: 1000236 - RNA, 19 nt, Artificial Sequence
  Description of Artificial Sequence: Synthetic oligonucleotide
cuuuucgcaaggaagaggu

SEQ ID NO: 1000237 - RNA, 19 nt, Artificial Sequence
  Description of Artificial Sequence: Synthetic oligonucleotide
cacugggaagaguucaagc

SEQ ID NO: 1000238 - RNA, 19 nt, Artificial Sequence
  Description of Artificial Sequence: Synthetic oligonucleotide
cuaugcguguuccuccagg

SEQ ID NO: 1000239 - RNA, 19 nt, Artificial Sequence
  Description of Artificial Sequence: Synthetic oligonucleotide
ccuaucauuuguauccucc

SEQ ID NO: 1000240 - RNA, 19 nt, Artificial Sequence
  Description of Artificial Sequence: Synthetic oligonucleotide
uucccacccgaaaagugug

SEQ ID NO: 1000241 - RNA, 19 nt, Artificial Sequence
  Description of Artificial Sequence: Synthetic oligonucleotide
agagguaacggaauuggca

SEQ ID NO: 1000242 - RNA, 19 nt, Artificial Sequence
  Description of Artificial Sequence: Synthetic oligonucleotide
uucggaugguuucaugauc

SEQ ID NO: 1000243 - RNA, 19 nt, Artificial Sequence
  Description of Artificial Sequence: Synthetic oligonucleotide
ugcgcuucuuuauaccacu

SEQ ID NO: 1000244 - RNA, 19 nt, Artificial Sequence
  Description of Artificial Sequence: Synthetic oligonucleotide
cuucgcucagaacaucggc

SEQ ID NO: 1000245 - RNA, 19 nt, Artificial Sequence
  Description of Artificial Sequence: Synthetic oligonucleotide
gaccugagcauaguuucgg

SEQ ID NO: 1000246 - RNA, 19 nt, Artificial Sequence
  Description of Artificial Sequence: Synthetic oligonucleotide
ggaaguggcccugugauag

SEQ ID NO: 1000247 - RNA, 19 nt, Artificial Sequence
  Description of Artificial Sequence: Synthetic oligonucleotide
accgcuggccuguuaguac

SEQ ID NO: 1000248 - RNA, 19 nt, Artificial Sequence
  Description of Artificial Sequence: Synthetic oligonucleotide
uuucggaugguuucaugau

SEQ ID NO: 1000249 - RNA, 19 nt, Artificial Sequence
  Description of Artificial Sequence: Synthetic oligonucleotide
ucuuucaaccccgcgucag

SEQ ID NO: 1000250 - RNA, 19 nt, Artificial Sequence
  Description of Artificial Sequence: Synthetic oligonucleotide
uguccaaggagggagcgac

SEQ ID NO: 1000251 - RNA, 19 nt, Artificial Sequence
  Description of Artificial Sequence: Synthetic oligonucleotide
uauugcuuuaggugcuuaa

SEQ ID NO: 1000252 - RNA, 19 nt, Artificial Sequence
  Description of Artificial Sequence: Synthetic oligonucleotide
aagaguucaagcagccgcu

SEQ ID NO: 1000253 - RNA, 19 nt, Artificial Sequence
  Description of Artificial Sequence: Synthetic oligonucleotide
caggagaacaagcucugac

SEQ ID NO: 1000254 - RNA, 19 nt, Artificial Sequence
  Description of Artificial Sequence: Synthetic oligonucleotide
ugagcagggaagccucgcc

SEQ ID NO: 1000255 - RNA, 19 nt, Artificial Sequence
  Description of Artificial Sequence: Synthetic oligonucleotide
uuaagagccugcucugcaa

SEQ ID NO: 1000256 - RNA, 19 nt, Artificial Sequence
  Description of Artificial Sequence: Synthetic oligonucleotide
cacaacuauggaaguggcc

SEQ ID NO: 1000257 - RNA, 19 nt, Artificial Sequence
  Description of Artificial Sequence: Synthetic oligonucleotide
uaagccccuggacaagugu

SEQ ID NO: 1000258 - RNA, 19 nt, Artificial Sequence
  Description of Artificial Sequence: Synthetic oligonucleotide
cugaugcuuauucauaaaa

SEQ ID NO: 1000259 - RNA, 19 nt, Artificial Sequence
  Description of Artificial Sequence: Synthetic oligonucleotide
ucgcaaggaagagguaacg

SEQ ID NO: 1000260 - RNA, 19 nt, Artificial Sequence
  Description of Artificial Sequence: Synthetic oligonucleotide
ugcaacgaguuccuccuuc

SEQ ID NO: 1000261 - RNA, 19 nt, Artificial Sequence
  Description of Artificial Sequence: Synthetic oligonucleotide
acucaacagcauucaugac

SEQ ID NO: 1000262 - RNA, 19 nt, Artificial Sequence
  Description of Artificial Sequence: Synthetic oligonucleotide
auucaugacacagguccag

SEQ ID NO: 1000263 - RNA, 19 nt, Artificial Sequence
  Description of Artificial Sequence: Synthetic oligonucleotide
caguauugcuucuucgcuc

SEQ ID NO: 1000264 - RNA, 19 nt, Artificial Sequence
  Description of Artificial Sequence: Synthetic oligonucleotide
guccaaguuggcuuuucgc

SEQ ID NO: 1000265 - RNA, 19 nt, Artificial Sequence
  Description of Artificial Sequence: Synthetic oligonucleotide
ugaaaaccccuuccccucu

SEQ ID NO: 1000266 - RNA, 19 nt, Artificial Sequence
  Description of Artificial Sequence: Synthetic oligonucleotide
cuaccugaccccuuguuga

SEQ ID NO: 1000267 - RNA, 19 nt, Artificial Sequence
  Description of Artificial Sequence: Synthetic oligonucleotide
gagguaacggaauuggcau

SEQ ID NO: 1000268 - RNA, 19 nt, Artificial Sequence
  Description of Artificial Sequence: Synthetic oligonucleotide
cauagcgacgguaaucuaa

SEQ ID NO: 1000269 - RNA, 19 nt, Artificial Sequence
  Description of Artificial Sequence: Synthetic oligonucleotide
gcuccguuuaaacacaaca

SEQ ID NO: 1000270 - RNA, 19 nt, Artificial Sequence
  Description of Artificial Sequence: Synthetic oligonucleotide
ucuaaccgugagccaguag

SEQ ID NO: 1000271 - RNA, 19 nt, Artificial Sequence
  Description of Artificial Sequence: Synthetic oligonucleotide
uugccuuuggcggcgugcg

SEQ ID NO: 1000272 - RNA, 19 nt, Artificial Sequence
  Description of Artificial Sequence: Synthetic oligonucleotide
ucccacccgaaaagugugg

SEQ ID NO: 1000273 - RNA, 19 nt, Artificial Sequence
  Description of Artificial Sequence: Synthetic oligonucleotide
ucaaccccgcgucagugaa

SEQ ID NO: 1000274 - RNA, 19 nt, Artificial Sequence
  Description of Artificial Sequence: Synthetic oligonucleotide
guggcccugugauagacac

SEQ ID NO: 1000275 - RNA, 19 nt, Artificial Sequence
  Description of Artificial Sequence: Synthetic oligonucleotide
agcgacgacgcgcgagacc

SEQ ID NO: 1000276 - RNA, 19 nt, Artificial Sequence
  Description of Artificial Sequence: Synthetic oligonucleotide
uuugccuuuggcggcgugc

SEQ ID NO: 1000277 - RNA, 19 nt, Artificial Sequence
  Description of Artificial Sequence: Synthetic oligonucleotide
cuccuugauaggacauucc

SEQ ID NO: 1000278 - RNA, 19 nt, Artificial Sequence
  Description of Artificial Sequence: Synthetic oligonucleotide
aaaaccccuuccccucuga

SEQ ID NO: 1000279 - RNA, 19 nt, Artificial Sequence
  Description of Artificial Sequence: Synthetic oligonucleotide
auaguuucggaugguuuca

SEQ ID NO: 1000280 - RNA, 19 nt, Artificial Sequence
  Description of Artificial Sequence: Synthetic oligonucleotide
acgagcaggagaaacacaa

SEQ ID NO: 1000281 - RNA, 19 nt, Artificial Sequence
  Description of Artificial Sequence: Synthetic oligonucleotide
ggugaagagacuggugagg

SEQ ID NO: 1000282 - RNA, 19 nt, Artificial Sequence
  Description of Artificial Sequence: Synthetic oligonucleotide
cucgccuaucauuuguauc

SEQ ID NO: 1000283 - RNA, 19 nt, Artificial Sequence
  Description of Artificial Sequence: Synthetic oligonucleotide
uuucaucccuuuuccgggu

SEQ ID NO: 1000284 - RNA, 19 nt, Artificial Sequence
  Description of Artificial Sequence: Synthetic oligonucleotide
ugcucgagacauuuaguuu

SEQ ID NO: 1000285 - RNA, 19 nt, Artificial Sequence
  Description of Artificial Sequence: Synthetic oligonucleotide
ucuaugcguguuccuccag

SEQ ID NO: 1000286 - RNA, 19 nt, Artificial Sequence
  Description of Artificial Sequence: Synthetic oligonucleotide
ugacuaagcugucggugaa

SEQ ID NO: 1000287 - RNA, 19 nt, Artificial Sequence
  Description of Artificial Sequence: Synthetic oligonucleotide
gagggagcgacgacgcgcg

SEQ ID NO: 1000288 - RNA, 19 nt, Artificial Sequence
  Description of Artificial Sequence: Synthetic oligonucleotide
acucggagaaagucugaca

SEQ ID NO: 1000289 - RNA, 19 nt, Artificial Sequence
  Description of Artificial Sequence: Synthetic oligonucleotide
guuaguacuggcuucugau

SEQ ID NO: 1000290 - RNA, 19 nt, Artificial Sequence
  Description of Artificial Sequence: Synthetic oligonucleotide
uggucaagaaagacacuuu

SEQ ID NO: 1000291 - RNA, 19 nt, Artificial Sequence
  Description of Artificial Sequence: Synthetic oligonucleotide
acacucugucuguucacug

SEQ ID NO: 1000292 - RNA, 19 nt, Artificial Sequence
  Description of Artificial Sequence: Synthetic oligonucleotide
augcguguuccuccagggg

SEQ ID NO: 1000293 - RNA, 19 nt, Artificial Sequence
  Description of Artificial Sequence: Synthetic oligonucleotide
aaccccgcgucagugaagu

SEQ ID NO: 1000294 - RNA, 19 nt, Artificial Sequence
  Description of Artificial Sequence: Synthetic oligonucleotide
auuacuguccaaggaggga

SEQ ID NO: 1000295 - RNA, 19 nt, Artificial Sequence
  Description of Artificial Sequence: Synthetic oligonucleotide
auucccacccgaaaagugu

SEQ ID NO: 1000296 - RNA, 19 nt, Artificial Sequence
  Description of Artificial Sequence: Synthetic oligonucleotide
aucuaugcguguuccucca

SEQ ID NO: 1000297 - RNA, 19 nt, Artificial Sequence
  Description of Artificial Sequence: Synthetic oligonucleotide
uguaucccugaagaccgug

SEQ ID NO: 1000298 - RNA, 19 nt, Artificial Sequence
  Description of Artificial Sequence: Synthetic oligonucleotide
aaucuaaccgugagccagu

SEQ ID NO: 1000299 - RNA, 19 nt, Artificial Sequence
  Description of Artificial Sequence: Synthetic oligonucleotide
agugaaguacuuagcaaaa

SEQ ID NO: 1000300 - RNA, 19 nt, Artificial Sequence
  Description of Artificial Sequence: Synthetic oligonucleotide
gagaccgguggcugcggcg

SEQ ID NO: 1000301 - RNA, 19 nt, Artificial Sequence
  Description of Artificial Sequence: Synthetic oligonucleotide
gaggguuccauugcccagc

SEQ ID NO: 1000302 - RNA, 19 nt, Artificial Sequence
  Description of Artificial Sequence: Synthetic oligonucleotide
auaccacuucaguauugcu

SEQ ID NO: 1000303 - RNA, 19 nt, Artificial Sequence
  Description of Artificial Sequence: Synthetic oligonucleotide
cucgagacauuuaguuuuc

SEQ ID NO: 1000304 - RNA, 19 nt, Artificial Sequence
  Description of Artificial Sequence: Synthetic oligonucleotide
cucugagcagggaagccuc

SEQ ID NO: 1000305 - RNA, 19 nt, Artificial Sequence
  Description of Artificial Sequence: Synthetic oligonucleotide
gaugcccgacagcauggcc

SEQ ID NO: 1000306 - RNA, 19 nt, Artificial Sequence
  Description of Artificial Sequence: Synthetic oligonucleotide
ucacggcugucuccgggag

SEQ ID NO: 1000307 - RNA, 19 nt, Artificial Sequence
  Description of Artificial Sequence: Synthetic oligonucleotide
uucaaccccgcgucaguga

SEQ ID NO: 1000308 - RNA, 19 nt, Artificial Sequence
  Description of Artificial Sequence: Synthetic oligonucleotide
aucaucuaugcguguuccu

SEQ ID NO: 1000309 - RNA, 19 nt, Artificial Sequence
  Description of Artificial Sequence: Synthetic oligonucleotide
gaaaaccccuuccccucug

SEQ ID NO: 1000310 - RNA, 19 nt, Artificial Sequence
  Description of Artificial Sequence: Synthetic oligonucleotide
guaaucuaaccgugagcca

SEQ ID NO: 1000311 - RNA, 19 nt, Artificial Sequence
  Description of Artificial Sequence: Synthetic oligonucleotide
uaacggaauuggcaucuuu

SEQ ID NO: 1000312 - RNA, 19 nt, Artificial Sequence
  Description of Artificial Sequence: Synthetic oligonucleotide
ucgcucagaacaucggcuu

SEQ ID NO: 1000313 - RNA, 19 nt, Artificial Sequence
  Description of Artificial Sequence: Synthetic oligonucleotide
ggggcgcucacacaguacc

SEQ ID NO: 1000314 - RNA, 19 nt, Artificial Sequence
  Description of Artificial Sequence: Synthetic oligonucleotide
gguagagucccaaguguag

SEQ ID NO: 1000315 - RNA, 19 nt, Artificial Sequence
  Description of Artificial Sequence: Synthetic oligonucleotide
ugccauccaggcuuugaaa

SEQ ID NO: 1000316 - RNA, 19 nt, Artificial Sequence
  Description of Artificial Sequence: Synthetic oligonucleotide
uuuccggguuuugaaccgc

SEQ ID NO: 1000317 - RNA, 19 nt, Artificial Sequence
  Description of Artificial Sequence: Synthetic oligonucleotide
uguuuccgaaaaugcuuua

SEQ ID NO: 1000318 - RNA, 19 nt, Artificial Sequence
  Description of Artificial Sequence: Synthetic oligonucleotide
agagaaccacgaucuucug

SEQ ID NO: 1000319 - RNA, 19 nt, Artificial Sequence
  Description of Artificial Sequence: Synthetic oligonucleotide
uccggguuuugaaccgcug

SEQ ID NO: 1000320 - RNA, 19 nt, Artificial Sequence
  Description of Artificial Sequence: Synthetic oligonucleotide
ccgugagccaguagaaucc

SEQ ID NO: 1000321 - RNA, 19 nt, Artificial Sequence
  Description of Artificial Sequence: Synthetic oligonucleotide
uuccggguuuugaaccgcu

SEQ ID NO: 1000322 - RNA, 19 nt, Artificial Sequence
  Description of Artificial Sequence: Synthetic oligonucleotide
guuugucaaaucacauaca

SEQ ID NO: 1000323 - RNA, 19 nt, Artificial Sequence
  Description of Artificial Sequence: Synthetic oligonucleotide
ccgaaaaugcuuuaaggaa

SEQ ID NO: 1000324 - RNA, 19 nt, Artificial Sequence
  Description of Artificial Sequence: Synthetic oligonucleotide
uuuucgcaaggaagaggua

SEQ ID NO: 1000325 - RNA, 19 nt, Artificial Sequence
  Description of Artificial Sequence: Synthetic oligonucleotide
accugagcauaguuucgga

SEQ ID NO: 1000326 - RNA, 19 nt, Artificial Sequence
  Description of Artificial Sequence: Synthetic oligonucleotide
ggugcauauugcuuuaggu

SEQ ID NO: 1000327 - RNA, 19 nt, Artificial Sequence
  Description of Artificial Sequence: Synthetic oligonucleotide
uagcgacgguaaucuaacc

SEQ ID NO: 1000328 - RNA, 19 nt, Artificial Sequence
  Description of Artificial Sequence: Synthetic oligonucleotide
gacgguaaucuaaccguga

SEQ ID NO: 1000329 - RNA, 19 nt, Artificial Sequence
  Description of Artificial Sequence: Synthetic oligonucleotide
acaagcucugacuggccuu

SEQ ID NO: 1000330 - RNA, 19 nt, Artificial Sequence
  Description of Artificial Sequence: Synthetic oligonucleotide
uuuggcggcgugcgcuucu

SEQ ID NO: 1000331 - RNA, 19 nt, Artificial Sequence
  Description of Artificial Sequence: Synthetic oligonucleotide
gaaccuucugcaggagaac

SEQ ID NO: 1000332 - RNA, 19 nt, Artificial Sequence
  Description of Artificial Sequence: Synthetic oligonucleotide
gaacaagcucugacuggcc

SEQ ID NO: 1000333 - RNA, 19 nt, Artificial Sequence
  Description of Artificial Sequence: Synthetic oligonucleotide
agaccguggguucgaauuu

SEQ ID NO: 1000334 - RNA, 19 nt, Artificial Sequence
  Description of Artificial Sequence: Synthetic oligonucleotide
auacagugagagguagagu

SEQ ID NO: 1000335 - RNA, 19 nt, Artificial Sequence
  Description of Artificial Sequence: Synthetic oligonucleotide
ccuuuuccggguuuugaac

SEQ ID NO: 1000336 - RNA, 19 nt, Artificial Sequence
  Description of Artificial Sequence: Synthetic oligonucleotide
guuuccgaaaaugcuuuaa

SEQ ID NO: 1000337 - RNA, 19 nt, Artificial Sequence
  Description of Artificial Sequence: Synthetic oligonucleotide
gaagccucgccuaucauuu

SEQ ID NO: 1000338 - RNA, 19 nt, Artificial Sequence
  Description of Artificial Sequence: Synthetic oligonucleotide
uaccugaccccuuguugaa

SEQ ID NO: 1000339 - RNA, 19 nt, Artificial Sequence
  Description of Artificial Sequence: Synthetic oligonucleotide
aaccgugagccaguagaau

SEQ ID NO: 1000340 - RNA, 19 nt, Artificial Sequence
  Description of Artificial Sequence: Synthetic oligonucleotide
uccugagacagucgcucuu

SEQ ID NO: 1000341 - RNA, 19 nt, Artificial Sequence
  Description of Artificial Sequence: Synthetic oligonucleotide
uccuaccugaccccuuguu

SEQ ID NO: 1000342 - RNA, 19 nt, Artificial Sequence
  Description of Artificial Sequence: Synthetic oligonucleotide
acggcugucuccgggaggu

SEQ ID NO: 1000343 - RNA, 19 nt, Artificial Sequence
  Description of Artificial Sequence: Synthetic oligonucleotide
ggccuugggaacugaacac

SEQ ID NO: 1000344 - RNA, 19 nt, Artificial Sequence
  Description of Artificial Sequence: Synthetic oligonucleotide
aggagggagcgacgacgcg

SEQ ID NO: 1000345 - RNA, 19 nt, Artificial Sequence
  Description of Artificial Sequence: Synthetic oligonucleotide
guauugcuucuucgcucag

SEQ ID NO: 1000346 - RNA, 19 nt, Artificial Sequence
  Description of Artificial Sequence: Synthetic oligonucleotide
uggcccugugauagacacc

SEQ ID NO: 1000347 - RNA, 19 nt, Artificial Sequence
  Description of Artificial Sequence: Synthetic oligonucleotide
ucaucccuuuuccggguuu

SEQ ID NO: 1000348 - RNA, 19 nt, Artificial Sequence
  Description of Artificial Sequence: Synthetic oligonucleotide
guaucuccugaugaguuua

SEQ ID NO: 1000349 - RNA, 19 nt, Artificial Sequence
  Description of Artificial Sequence: Synthetic oligonucleotide
gaagaccugagcauaguuu

SEQ ID NO: 1000350 - RNA, 19 nt, Artificial Sequence
  Description of Artificial Sequence: Synthetic oligonucleotide
ggaggguuccauugcccag

SEQ ID NO: 1000351 - RNA, 19 nt, Artificial Sequence
  Description of Artificial Sequence: Synthetic oligonucleotide
ucagaacaucggcuuuaua

SEQ ID NO: 1000352 - RNA, 19 nt, Artificial Sequence
  Description of Artificial Sequence: Synthetic oligonucleotide
ccuaccugaccccuuguug

SEQ ID NO: 1000353 - RNA, 19 nt, Artificial Sequence
  Description of Artificial Sequence: Synthetic oligonucleotide
uggaaguggcccugugaua

SEQ ID NO: 1000354 - RNA, 19 nt, Artificial Sequence
  Description of Artificial Sequence: Synthetic oligonucleotide
gcagcaagcagcggcggcg

SEQ ID NO: 1000355 - RNA, 19 nt, Artificial Sequence
  Description of Artificial Sequence: Synthetic oligonucleotide
uucaucccuuuuccggguu

SEQ ID NO: 1000356 - RNA, 19 nt, Artificial Sequence
  Description of Artificial Sequence: Synthetic oligonucleotide
ccggguuuugaaccgcugg

SEQ ID NO: 1000357 - RNA, 19 nt, Artificial Sequence
  Description of Artificial Sequence: Synthetic oligonucleotide
ggacuaagcuucaggcucc

SEQ ID NO: 1000358 - RNA, 19 nt, Artificial Sequence
  Description of Artificial Sequence: Synthetic oligonucleotide
ucgagacauuuaguuuucu

SEQ ID NO: 1000359 - RNA, 19 nt, Artificial Sequence
  Description of Artificial Sequence: Synthetic oligonucleotide
agcccgaucacggcugucu

SEQ ID NO: 1000360 - RNA, 19 nt, Artificial Sequence
  Description of Artificial Sequence: Synthetic oligonucleotide
ccgaaaaguguggaggcag

SEQ ID NO: 1000361 - RNA, 19 nt, Artificial Sequence
  Description of Artificial Sequence: Synthetic oligonucleotide
ggagggagcgacgacgcgc

SEQ ID NO: 1000362 - RNA, 19 nt, Artificial Sequence
  Description of Artificial Sequence: Synthetic oligonucleotide
cccaaaugcuucagcauuc

SEQ ID NO: 1000363 - RNA, 19 nt, Artificial Sequence
  Description of Artificial Sequence: Synthetic oligonucleotide
aggguuccauugcccagca

SEQ ID NO: 1000364 - RNA, 19 nt, Artificial Sequence
  Description of Artificial Sequence: Synthetic oligonucleotide
uggggcgcucacacaguac

SEQ ID NO: 1000365 - RNA, 19 nt, Artificial Sequence
  Description of Artificial Sequence: Synthetic oligonucleotide
cugcggcggauccugcagc

SEQ ID NO: 1000366 - RNA, 19 nt, Artificial Sequence
  Description of Artificial Sequence: Synthetic oligonucleotide
gcucgagacauuuaguuuu

SEQ ID NO: 1000367 - RNA, 19 nt, Artificial Sequence
  Description of Artificial Sequence: Synthetic oligonucleotide
ccgaucacggcugucuccg

SEQ ID NO: 1000368 - RNA, 19 nt, Artificial Sequence
  Description of Artificial Sequence: Synthetic oligonucleotide
gcgacgguaaucuaaccgu

SEQ ID NO: 1000369 - RNA, 19 nt, Artificial Sequence
  Description of Artificial Sequence: Synthetic oligonucleotide
ggcgugcgcuucuuuauac

SEQ ID NO: 1000370 - RNA, 19 nt, Artificial Sequence
  Description of Artificial Sequence: Synthetic oligonucleotide
gugcgcuucuuuauaccac

SEQ ID NO: 1000371 - RNA, 19 nt, Artificial Sequence
  Description of Artificial Sequence: Synthetic oligonucleotide
cacggcugucuccgggagg

SEQ ID NO: 1000372 - RNA, 19 nt, Artificial Sequence
  Description of Artificial Sequence: Synthetic oligonucleotide
uaguuucggaugguuucau

SEQ ID NO: 1000373 - RNA, 19 nt, Artificial Sequence
  Description of Artificial Sequence: Synthetic oligonucleotide
cuuugacuaagcugucggu

SEQ ID NO: 1000374 - RNA, 19 nt, Artificial Sequence
  Description of Artificial Sequence: Synthetic oligonucleotide
ccccuggacaaguguaucc

SEQ ID NO: 1000375 - RNA, 19 nt, Artificial Sequence
  Description of Artificial Sequence: Synthetic oligonucleotide
cuguuuccgaaaaugcuuu

SEQ ID NO: 1000376 - RNA, 19 nt, Artificial Sequence
  Description of Artificial Sequence: Synthetic oligonucleotide
gggaggguuccauugccca

SEQ ID NO: 1000377 - RNA, 19 nt, Artificial Sequence
  Description of Artificial Sequence: Synthetic oligonucleotide
aggggugcauauugcuuua

SEQ ID NO: 1000378 - RNA, 19 nt, Artificial Sequence
  Description of Artificial Sequence: Synthetic oligonucleotide
gguaacggaauuggcaucu

SEQ ID NO: 1000379 - RNA, 19 nt, Artificial Sequence
  Description of Artificial Sequence: Synthetic oligonucleotide
cuucuucgcucagaacauc

SEQ ID NO: 1000380 - RNA, 19 nt, Artificial Sequence
  Description of Artificial Sequence: Synthetic oligonucleotide
gacgcgcgagaccgguggc

SEQ ID NO: 1000381 - RNA, 19 nt, Artificial Sequence
  Description of Artificial Sequence: Synthetic oligonucleotide
cagcaagcagcggcggcgg

SEQ ID NO: 1000382 - RNA, 19 nt, Artificial Sequence
  Description of Artificial Sequence: Synthetic oligonucleotide
ugccuuuggcggcgugcgc

SEQ ID NO: 1000383 - RNA, 19 nt, Artificial Sequence
  Description of Artificial Sequence: Synthetic oligonucleotide
agcaugcugccugccacca

SEQ ID NO: 1000384 - RNA, 19 nt, Artificial Sequence
  Description of Artificial Sequence: Synthetic oligonucleotide
guagagucccaaguguagu

SEQ ID NO: 1000385 - RNA, 19 nt, Artificial Sequence
  Description of Artificial Sequence: Synthetic oligonucleotide
gcuccuaccugaccccuug

SEQ ID NO: 1000386 - RNA, 19 nt, Artificial Sequence
  Description of Artificial Sequence: Synthetic oligonucleotide
cagugacugcuggacucgg

SEQ ID NO: 1000387 - RNA, 19 nt, Artificial Sequence
  Description of Artificial Sequence: Synthetic oligonucleotide
gagacuggugaggauggcu

SEQ ID NO: 1000388 - RNA, 19 nt, Artificial Sequence
  Description of Artificial Sequence: Synthetic oligonucleotide
ccuguaaauacagcuaaaa

SEQ ID NO: 1000389 - RNA, 19 nt, Artificial Sequence
  Description of Artificial Sequence: Synthetic oligonucleotide
ccaaguguaguagcugaug

SEQ ID NO: 1000390 - RNA, 19 nt, Artificial Sequence
  Description of Artificial Sequence: Synthetic oligonucleotide
gcugcggcggauccugcag

SEQ ID NO: 1000391 - RNA, 19 nt, Artificial Sequence
  Description of Artificial Sequence: Synthetic oligonucleotide
cgucagugaaguacuuagc

SEQ ID NO: 1000392 - RNA, 19 nt, Artificial Sequence
  Description of Artificial Sequence: Synthetic oligonucleotide
caaccccgcgucagugaag

SEQ ID NO: 1000393 - RNA, 19 nt, Artificial Sequence
  Description of Artificial Sequence: Synthetic oligonucleotide
guccaaggagggagcgacg

SEQ ID NO: 1000394 - RNA, 19 nt, Artificial Sequence
  Description of Artificial Sequence: Synthetic oligonucleotide
aggacauuccugagacagu

SEQ ID NO: 1000395 - RNA, 19 nt, Artificial Sequence
  Description of Artificial Sequence: Synthetic oligonucleotide
agugagagguagaguccca

SEQ ID NO: 1000396 - RNA, 19 nt, Artificial Sequence
  Description of Artificial Sequence: Synthetic oligonucleotide
ugaagaccguggguucgaa

SEQ ID NO: 1000397 - RNA, 19 nt, Artificial Sequence
  Description of Artificial Sequence: Synthetic oligonucleotide
gaggucguuccuuuucauu

SEQ ID NO: 1000398 - RNA, 19 nt, Artificial Sequence
  Description of Artificial Sequence: Synthetic oligonucleotide
gcgugcgcuucuuuauacc

SEQ ID NO: 1000399 - RNA, 19 nt, Artificial Sequence
  Description of Artificial Sequence: Synthetic oligonucleotide
gccuguuaguacuggcuuc

SEQ ID NO: 1000400 - RNA, 19 nt, Artificial Sequence
  Description of Artificial Sequence: Synthetic oligonucleotide
guuucccuccccaaaugcu

SEQ ID NO: 1000401 - RNA, 19 nt, Artificial Sequence
  Description of Artificial Sequence: Synthetic oligonucleotide
cugaaaacacacagugguu

SEQ ID NO: 1000402 - RNA, 19 nt, Artificial Sequence
  Description of Artificial Sequence: Synthetic oligonucleotide
caggggugcauauugcuuu

SEQ ID NO: 1000403 - RNA, 19 nt, Artificial Sequence
  Description of Artificial Sequence: Synthetic oligonucleotide
ggaggcagugugcucgaga

SEQ ID NO: 1000404 - RNA, 19 nt, Artificial Sequence
  Description of Artificial Sequence: Synthetic oligonucleotide
ccuccuugauaggacauuc

SEQ ID NO: 1000405 - RNA, 19 nt, Artificial Sequence
  Description of Artificial Sequence: Synthetic oligonucleotide
uugaaccgcuggccuguua

SEQ ID NO: 1000406 - RNA, 19 nt, Artificial Sequence
  Description of Artificial Sequence: Synthetic oligonucleotide
cgguaaucuaaccgugagc

SEQ ID NO: 1000407 - RNA, 19 nt, Artificial Sequence
  Description of Artificial Sequence: Synthetic oligonucleotide
ggcgcucacacaguaccug

SEQ ID NO: 1000408 - RNA, 19 nt, Artificial Sequence
  Description of Artificial Sequence: Synthetic oligonucleotide
ggcagugugcucgagacau

SEQ ID NO: 1000409 - RNA, 19 nt, Artificial Sequence
  Description of Artificial Sequence: Synthetic oligonucleotide
gugagagguagagucccaa

SEQ ID NO: 1000410 - RNA, 19 nt, Artificial Sequence
  Description of Artificial Sequence: Synthetic oligonucleotide
aguggcccugugauagaca

SEQ ID NO: 1000411 - RNA, 19 nt, Artificial Sequence
  Description of Artificial Sequence: Synthetic oligonucleotide
aggggcaagcaugcugccu

SEQ ID NO: 1000412 - RNA, 19 nt, Artificial Sequence
  Description of Artificial Sequence: Synthetic oligonucleotide
agaguucaagcagccgcuu

SEQ ID NO: 1000413 - RNA, 19 nt, Artificial Sequence
  Description of Artificial Sequence: Synthetic oligonucleotide
cgacgguaaucuaaccgug

SEQ ID NO: 1000414 - RNA, 19 nt, Artificial Sequence
  Description of Artificial Sequence: Synthetic oligonucleotide
gcugccugccaccaggaua

SEQ ID NO: 1000415 - RNA, 19 nt, Artificial Sequence
  Description of Artificial Sequence: Synthetic oligonucleotide
gaaccgcuggccuguuagu

SEQ ID NO: 1000416 - RNA, 19 nt, Artificial Sequence
  Description of Artificial Sequence: Synthetic oligonucleotide
aucuccugaugaguuuauu

SEQ ID NO: 1000417 - RNA, 19 nt, Artificial Sequence
  Description of Artificial Sequence: Synthetic oligonucleotide
gaagaccguggguucgaau

SEQ ID NO: 1000418 - RNA, 19 nt, Artificial Sequence
  Description of Artificial Sequence: Synthetic oligonucleotide
cuuucaaccccgcgucagu

SEQ ID NO: 1000419 - RNA, 19 nt, Artificial Sequence
  Description of Artificial Sequence: Synthetic oligonucleotide
ccccgcgucagugaaguac

SEQ ID NO: 1000420 - RNA, 19 nt, Artificial Sequence
  Description of Artificial Sequence: Synthetic oligonucleotide
agccccuggacaaguguau

SEQ ID NO: 1000421 - RNA, 19 nt, Artificial Sequence
  Description of Artificial Sequence: Synthetic oligonucleotide
guguggaggcagugugcuc

SEQ ID NO: 1000422 - RNA, 19 nt, Artificial Sequence
  Description of Artificial Sequence: Synthetic oligonucleotide
cugaagaccguggguucga

SEQ ID NO: 1000423 - RNA, 19 nt, Artificial Sequence
  Description of Artificial Sequence: Synthetic oligonucleotide
gccuaucauuuguauccuc

SEQ ID NO: 1000424 - RNA, 19 nt, Artificial Sequence
  Description of Artificial Sequence: Synthetic oligonucleotide
ggaagccucgccuaucauu

SEQ ID NO: 1000425 - RNA, 19 nt, Artificial Sequence
  Description of Artificial Sequence: Synthetic oligonucleotide
aucuaaccgugagccagua

SEQ ID NO: 1000426 - RNA, 19 nt, Artificial Sequence
  Description of Artificial Sequence: Synthetic oligonucleotide
aggcuccuaccugaccccu

SEQ ID NO: 1000427 - RNA, 19 nt, Artificial Sequence
  Description of Artificial Sequence: Synthetic oligonucleotide
guggggcgcucacacagua

SEQ ID NO: 1000428 - RNA, 19 nt, Artificial Sequence
  Description of Artificial Sequence: Synthetic oligonucleotide
cauaaagcaccaccuccuu

SEQ ID NO: 1000429 - RNA, 19 nt, Artificial Sequence
  Description of Artificial Sequence: Synthetic oligonucleotide
agugugcucgagacauuua

SEQ ID NO: 1000430 - RNA, 19 nt, Artificial Sequence
  Description of Artificial Sequence: Synthetic oligonucleotide
ggggugcauauugcuuuag

SEQ ID NO: 1000431 - RNA, 19 nt, Artificial Sequence
  Description of Artificial Sequence: Synthetic oligonucleotide
accugaccccuuguugaau

SEQ ID NO: 1000432 - RNA, 19 nt, Artificial Sequence
  Description of Artificial Sequence: Synthetic oligonucleotide
gagcgacgacgcgcgagac

SEQ ID NO: 1000433 - RNA, 19 nt, Artificial Sequence
  Description of Artificial Sequence: Synthetic oligonucleotide
cagggaagccucgccuauc

SEQ ID NO: 1000434 - RNA, 19 nt, Artificial Sequence
  Description of Artificial Sequence: Synthetic oligonucleotide
uuugaaccgcuggccuguu

SEQ ID NO: 1000435 - RNA, 19 nt, Artificial Sequence
  Description of Artificial Sequence: Synthetic oligonucleotide
cauacacgagcaggagaaa

SEQ ID NO: 1000436 - RNA, 19 nt, Artificial Sequence
  Description of Artificial Sequence: Synthetic oligonucleotide
ggaugcccgacagcauggc

SEQ ID NO: 1000437 - RNA, 19 nt, Artificial Sequence
  Description of Artificial Sequence: Synthetic oligonucleotide
acgcgcgagaccgguggcu

SEQ ID NO: 1000438 - RNA, 19 nt, Artificial Sequence
  Description of Artificial Sequence: Synthetic oligonucleotide
ggccuguuaguacuggcuu

SEQ ID NO: 1000439 - RNA, 19 nt, Artificial Sequence
  Description of Artificial Sequence: Synthetic oligonucleotide
gacgacgcgcgagaccggu

SEQ ID NO: 1000440 - RNA, 19 nt, Artificial Sequence
  Description of Artificial Sequence: Synthetic oligonucleotide
cuuuggcggcgugcgcuuc

SEQ ID NO: 1000441 - RNA, 19 nt, Artificial Sequence
  Description of Artificial Sequence: Synthetic oligonucleotide
gcucagaacaucggcuuua

SEQ ID NO: 1000442 - RNA, 19 nt, Artificial Sequence
  Description of Artificial Sequence: Synthetic oligonucleotide
cggcggauccugcagcaag

SEQ ID NO: 1000443 - RNA, 19 nt, Artificial Sequence
  Description of Artificial Sequence: Synthetic oligonucleotide
ggcggcgugcgcuucuuua

SEQ ID NO: 1000444 - RNA, 19 nt, Artificial Sequence
  Description of Artificial Sequence: Synthetic oligonucleotide
caccuccuugauaggacau

SEQ ID NO: 1000445 - RNA, 19 nt, Artificial Sequence
  Description of Artificial Sequence: Synthetic oligonucleotide
agggagcgacgacgcgcga

SEQ ID NO: 1000446 - RNA, 19 nt, Artificial Sequence
  Description of Artificial Sequence: Synthetic oligonucleotide
gcuucuucgcucagaacau

SEQ ID NO: 1000447 - RNA, 19 nt, Artificial Sequence
  Description of Artificial Sequence: Synthetic oligonucleotide
cucagaacaucggcuuuau

SEQ ID NO: 1000448 - RNA, 19 nt, Artificial Sequence
  Description of Artificial Sequence: Synthetic oligonucleotide
gcauaguuucggaugguuu

SEQ ID NO: 1000449 - RNA, 19 nt, Artificial Sequence
  Description of Artificial Sequence: Synthetic oligonucleotide
ggacucggagaaagucuga

SEQ ID NO: 1000450 - RNA, 19 nt, Artificial Sequence
  Description of Artificial Sequence: Synthetic oligonucleotide
acgacgcgcgagaccggug

SEQ ID NO: 1000451 - RNA, 19 nt, Artificial Sequence
  Description of Artificial Sequence: Synthetic oligonucleotide
cgggaggucguuccuuuuc

SEQ ID NO: 1000452 - RNA, 19 nt, Artificial Sequence
  Description of Artificial Sequence: Synthetic oligonucleotide
ggguucgaauuucucuuuu

SEQ ID NO: 1000453 - RNA, 19 nt, Artificial Sequence
  Description of Artificial Sequence: Synthetic oligonucleotide
gcccgaucacggcugucuc

SEQ ID NO: 1000454 - RNA, 19 nt, Artificial Sequence
  Description of Artificial Sequence: Synthetic oligonucleotide
uggcggcgugcgcuucuuu

SEQ ID NO: 1000455 - RNA, 19 nt, Artificial Sequence
  Description of Artificial Sequence: Synthetic oligonucleotide
uuggcggcgugcgcuucuu

SEQ ID NO: 1000456 - RNA, 19 nt, Artificial Sequence
  Description of Artificial Sequence: Synthetic oligonucleotide
cccgcgucagugaaguacu

SEQ ID NO: 1000457 - RNA, 19 nt, Artificial Sequence
  Description of Artificial Sequence: Synthetic oligonucleotide
ccccaaaugcuucagcauu

SEQ ID NO: 1000458 - RNA, 19 nt, Artificial Sequence
  Description of Artificial Sequence: Synthetic oligonucleotide
gcgcgagaccgguggcugc

SEQ ID NO: 1000459 - RNA, 19 nt, Artificial Sequence
  Description of Artificial Sequence: Synthetic oligonucleotide
ggaggucguuccuuuucau

SEQ ID NO: 1000460 - RNA, 19 nt, Artificial Sequence
  Description of Artificial Sequence: Synthetic oligonucleotide
cgcgagaccgguggcugcg

SEQ ID NO: 1000461 - RNA, 19 nt, Artificial Sequence
  Description of Artificial Sequence: Synthetic oligonucleotide
gccccuggacaaguguauc

SEQ ID NO: 1000462 - RNA, 19 nt, Artificial Sequence
  Description of Artificial Sequence: Synthetic oligonucleotide
gcauagcgacgguaaucua

SEQ ID NO: 1000463 - RNA, 19 nt, Artificial Sequence
  Description of Artificial Sequence: Synthetic oligonucleotide
cccacccgaaaagugugga

SEQ ID NO: 1000464 - RNA, 19 nt, Artificial Sequence
  Description of Artificial Sequence: Synthetic oligonucleotide
cccgaaaaguguggaggca

SEQ ID NO: 1000465 - RNA, 19 nt, Artificial Sequence
  Description of Artificial Sequence: Synthetic oligonucleotide
gagcccgaucacggcuguc

SEQ ID NO: 1000466 - RNA, 19 nt, Artificial Sequence
  Description of Artificial Sequence: Synthetic oligonucleotide
gccuuuggcggcgugcgcu

SEQ ID NO: 1000467 - RNA, 19 nt, Artificial Sequence
  Description of Artificial Sequence: Synthetic oligonucleotide
guaacggaauuggcaucuu

SEQ ID NO: 1000468 - RNA, 19 nt, Artificial Sequence
  Description of Artificial Sequence: Synthetic oligonucleotide
caucccuuuuccggguuuu

SEQ ID NO: 1000469 - RNA, 19 nt, Artificial Sequence
  Description of Artificial Sequence: Synthetic oligonucleotide
cccuuguugaauggcuuua

SEQ ID NO: 1000470 - RNA, 19 nt, Artificial Sequence
  Description of Artificial Sequence: Synthetic oligonucleotide
cuccuaccugaccccuugu

SEQ ID NO: 1000471 - RNA, 19 nt, Artificial Sequence
  Description of Artificial Sequence: Synthetic oligonucleotide
gggcuccguuuaaacacaa

SEQ ID NO: 1000472 - RNA, 19 nt, Artificial Sequence
  Description of Artificial Sequence: Synthetic oligonucleotide
ugccugccaccaggauauc

SEQ ID NO: 1000473 - RNA, 19 nt, Artificial Sequence
  Description of Artificial Sequence: Synthetic oligonucleotide
accccgcgucagugaagua

SEQ ID NO: 1000474 - RNA, 19 nt, Artificial Sequence
  Description of Artificial Sequence: Synthetic oligonucleotide
ccgcuggccuguuaguacu

SEQ ID NO: 1000475 - RNA, 19 nt, Artificial Sequence
  Description of Artificial Sequence: Synthetic oligonucleotide
gcaggggugcauauugcuu

SEQ ID NO: 1000476 - RNA, 19 nt, Artificial Sequence
  Description of Artificial Sequence: Synthetic oligonucleotide
gcggcgugcgcuucuuuau

SEQ ID NO: 1000477 - RNA, 19 nt, Artificial Sequence
  Description of Artificial Sequence: Synthetic oligonucleotide
cgugagccaguagaaucca

SEQ ID NO: 1000478 - RNA, 19 nt, Artificial Sequence
  Description of Artificial Sequence: Synthetic oligonucleotide
cgagacauuuaguuuucuu

SEQ ID NO: 1000479 - RNA, 19 nt, Artificial Sequence
  Description of Artificial Sequence: Synthetic oligonucleotide
ccucgccuaucauuuguau

SEQ ID NO: 1000480 - RNA, 19 nt, Artificial Sequence
  Description of Artificial Sequence: Synthetic oligonucleotide
ggagcccgaucacggcugu

SEQ ID NO: 1000481 - RNA, 19 nt, Artificial Sequence
  Description of Artificial Sequence: Synthetic oligonucleotide
cgcgcgagaccgguggcug

SEQ ID NO: 1000482 - RNA, 19 nt, Artificial Sequence
  Description of Artificial Sequence: Synthetic oligonucleotide
gggcgcucacacaguaccu

SEQ ID NO: 1000483 - RNA, 19 nt, Artificial Sequence
  Description of Artificial Sequence: Synthetic oligonucleotide
cugcaacgaguuccuccuu

SEQ ID NO: 1000484 - RNA, 19 nt, Artificial Sequence
  Description of Artificial Sequence: Synthetic oligonucleotide
ggggucugcugaggacuaa

SEQ ID NO: 1000485 - RNA, 19 nt, Artificial Sequence
  Description of Artificial Sequence: Synthetic oligonucleotide
ccgcuuguccaaguuggcu

SEQ ID NO: 1000486 - RNA, 19 nt, Artificial Sequence
  Description of Artificial Sequence: Synthetic oligonucleotide
cgcgucagugaaguacuua

SEQ ID NO: 1000487 - RNA, 19 nt, Artificial Sequence
  Description of Artificial Sequence: Synthetic oligonucleotide
gcgcuucuuuauaccacuu

SEQ ID NO: 1000488 - RNA, 19 nt, Artificial Sequence
  Description of Artificial Sequence: Synthetic oligonucleotide
ccgacagcauggccaacuu

SEQ ID NO: 1000489 - RNA, 19 nt, Artificial Sequence
  Description of Artificial Sequence: Synthetic oligonucleotide
cgccuaucauuuguauccu

SEQ ID NO: 1000490 - RNA, 19 nt, Artificial Sequence
  Description of Artificial Sequence: Synthetic oligonucleotide
cggcgugcgcuucuuuaua

SEQ ID NO: 1000491 - RNA, 19 nt, Artificial Sequence
  Description of Artificial Sequence: Synthetic oligonucleotide
gcccgacagcauggccaac

SEQ ID NO: 1000492 - RNA, 19 nt, Artificial Sequence
  Description of Artificial Sequence: Synthetic oligonucleotide
cugucuccgggaggucguu

SEQ ID NO: 1000493 - RNA, 19 nt, Artificial Sequence
  Description of Artificial Sequence: Synthetic oligonucleotide
gcagugugcucgagacauu

SEQ ID NO: 1000494 - RNA, 19 nt, Artificial Sequence
  Description of Artificial Sequence: Synthetic oligonucleotide
ggcuccuaccugaccccuu

SEQ ID NO: 1000495 - RNA, 19 nt, Artificial Sequence
  Description of Artificial Sequence: Synthetic oligonucleotide
cggaugguuucaugaucuu

SEQ ID NO: 1000496 - RNA, 19 nt, Artificial Sequence
  Description of Artificial Sequence: Synthetic oligonucleotide
ccgggaggucguuccuuuu

SEQ ID NO: 1000497 - RNA, 19 nt, Artificial Sequence
  Description of Artificial Sequence: Synthetic oligonucleotide
ccgcgucagugaaguacuu

SEQ ID NO: 1000498 - RNA, 19 nt, Artificial Sequence
  Description of Artificial Sequence: Synthetic oligonucleotide
aaaauccgcagucagauuc

SEQ ID NO: 1000499 - RNA, 19 nt, Artificial Sequence
  Description of Artificial Sequence: Synthetic oligonucleotide
gaauaaagcaucauggugg

SEQ ID NO: 1000500 - RNA, 19 nt, Artificial Sequence
  Description of Artificial Sequence: Synthetic oligonucleotide
aauaaagcaucaugguggg

SEQ ID NO: 1000501 - RNA, 19 nt, Artificial Sequence
  Description of Artificial Sequence: Synthetic oligonucleotide
agaucaauaucauuauugg

SEQ ID NO: 1000502 - RNA, 19 nt, Artificial Sequence
  Description of Artificial Sequence: Synthetic oligonucleotide
auugaugcggacucgaggg

SEQ ID NO: 1000503 - RNA, 19 nt, Artificial Sequence
  Description of Artificial Sequence: Synthetic oligonucleotide
aaugaggaccccaagacgg

SEQ ID NO: 1000504 - RNA, 19 nt, Artificial Sequence
  Description of Artificial Sequence: Synthetic oligonucleotide
acugauguugaucgaaccc

SEQ ID NO: 1000505 - RNA, 19 nt, Artificial Sequence
  Description of Artificial Sequence: Synthetic oligonucleotide
aguauggugggauugcaac

SEQ ID NO: 1000506 - RNA, 19 nt, Artificial Sequence
  Description of Artificial Sequence: Synthetic oligonucleotide
uauuagaggccucaggggc

SEQ ID NO: 1000507 - RNA, 19 nt, Artificial Sequence
  Description of Artificial Sequence: Synthetic oligonucleotide
agguacuccgcauaggccc

SEQ ID NO: 1000508 - RNA, 19 nt, Artificial Sequence
  Description of Artificial Sequence: Synthetic oligonucleotide
agaauaaagcaucauggug

SEQ ID NO: 1000509 - RNA, 19 nt, Artificial Sequence
  Description of Artificial Sequence: Synthetic oligonucleotide
cuugucuucaugcagugcc

SEQ ID NO: 1000510 - RNA, 19 nt, Artificial Sequence
  Description of Artificial Sequence: Synthetic oligonucleotide
aauaucauuauuggcgaug

SEQ ID NO: 1000511 - RNA, 19 nt, Artificial Sequence
  Description of Artificial Sequence: Synthetic oligonucleotide
caggauauaguccagcggc

SEQ ID NO: 1000512 - RNA, 19 nt, Artificial Sequence
  Description of Artificial Sequence: Synthetic oligonucleotide
uuguaaaaggaggugacag

SEQ ID NO: 1000513 - RNA, 19 nt, Artificial Sequence
  Description of Artificial Sequence: Synthetic oligonucleotide
cuuuguugaacuaggcugc

SEQ ID NO: 1000514 - RNA, 19 nt, Artificial Sequence
  Description of Artificial Sequence: Synthetic oligonucleotide
acugugcauauccaggugg

SEQ ID NO: 1000515 - RNA, 19 nt, Artificial Sequence
  Description of Artificial Sequence: Synthetic oligonucleotide
ucggauuucagggaugugg

SEQ ID NO: 1000516 - RNA, 19 nt, Artificial Sequence
  Description of Artificial Sequence: Synthetic oligonucleotide
cuacggaagcccuugaugc

SEQ ID NO: 1000517 - RNA, 19 nt, Artificial Sequence
  Description of Artificial Sequence: Synthetic oligonucleotide
uguugaacuaggcugccgc

SEQ ID NO: 1000518 - RNA, 19 nt, Artificial Sequence
  Description of Artificial Sequence: Synthetic oligonucleotide
guagccagcauucggaucc

SEQ ID NO: 1000519 - RNA, 19 nt, Artificial Sequence
  Description of Artificial Sequence: Synthetic oligonucleotide
agcauucggaucccaagcc

SEQ ID NO: 1000520 - RNA, 19 nt, Artificial Sequence
  Description of Artificial Sequence: Synthetic oligonucleotide
cauuguagggaguaucuag

SEQ ID NO: 1000521 - RNA, 19 nt, Artificial Sequence
  Description of Artificial Sequence: Synthetic oligonucleotide
ucuugcugcaaguagcggc

SEQ ID NO: 1000522 - RNA, 19 nt, Artificial Sequence
  Description of Artificial Sequence: Synthetic oligonucleotide
ugauguugaucgaacccgg

SEQ ID NO: 1000523 - RNA, 19 nt, Artificial Sequence
  Description of Artificial Sequence: Synthetic oligonucleotide
uuugugagcaauuccucca

SEQ ID NO: 1000524 - RNA, 19 nt, Artificial Sequence
  Description of Artificial Sequence: Synthetic oligonucleotide
gaagcagucgacccgcccg

SEQ ID NO: 1000525 - RNA, 19 nt, Artificial Sequence
  Description of Artificial Sequence: Synthetic oligonucleotide
ugaguagccagcauucgga

SEQ ID NO: 1000526 - RNA, 19 nt, Artificial Sequence
  Description of Artificial Sequence: Synthetic oligonucleotide
uaacucuugcugcaaguag

SEQ ID NO: 1000527 - RNA, 19 nt, Artificial Sequence
  Description of Artificial Sequence: Synthetic oligonucleotide
uguugaucgaacccggagu

SEQ ID NO: 1000528 - RNA, 19 nt, Artificial Sequence
  Description of Artificial Sequence: Synthetic oligonucleotide
aagaaggguuccucaagag

SEQ ID NO: 1000529 - RNA, 19 nt, Artificial Sequence
  Description of Artificial Sequence: Synthetic oligonucleotide
aacgggcagccacaugucc

SEQ ID NO: 1000530 - RNA, 19 nt, Artificial Sequence
  Description of Artificial Sequence: Synthetic oligonucleotide
aaauccacccacuuuucaa

SEQ ID NO: 1000531 - RNA, 19 nt, Artificial Sequence
  Description of Artificial Sequence: Synthetic oligonucleotide
uuguccaagaaguaccgga

SEQ ID NO: 1000532 - RNA, 19 nt, Artificial Sequence
  Description of Artificial Sequence: Synthetic oligonucleotide
uaguggugaccccaaagag

SEQ ID NO: 1000533 - RNA, 19 nt, Artificial Sequence
  Description of Artificial Sequence: Synthetic oligonucleotide
gauagacgagugcagauga

SEQ ID NO: 1000534 - RNA, 19 nt, Artificial Sequence
  Description of Artificial Sequence: Synthetic oligonucleotide
cugauguugaucgaacccg

SEQ ID NO: 1000535 - RNA, 19 nt, Artificial Sequence
  Description of Artificial Sequence: Synthetic oligonucleotide
agacgagugcagaugaugc

SEQ ID NO: 1000536 - RNA, 19 nt, Artificial Sequence
  Description of Artificial Sequence: Synthetic oligonucleotide
gaaugaaggggaaacgggc

SEQ ID NO: 1000537 - RNA, 19 nt, Artificial Sequence
  Description of Artificial Sequence: Synthetic oligonucleotide
auuguagggaguaucuagg

SEQ ID NO: 1000538 - RNA, 19 nt, Artificial Sequence
  Description of Artificial Sequence: Synthetic oligonucleotide
ugaaggcccgccccgaagg

SEQ ID NO: 1000539 - RNA, 19 nt, Artificial Sequence
  Description of Artificial Sequence: Synthetic oligonucleotide
uacaugguguguaucggug

SEQ ID NO: 1000540 - RNA, 19 nt, Artificial Sequence
  Description of Artificial Sequence: Synthetic oligonucleotide
agcggcaugggaaugaagg

SEQ ID NO: 1000541 - RNA, 19 nt, Artificial Sequence
  Description of Artificial Sequence: Synthetic oligonucleotide
cuugcugcaaguagcggcc

SEQ ID NO: 1000542 - RNA, 19 nt, Artificial Sequence
  Description of Artificial Sequence: Synthetic oligonucleotide
ugggauugcaaccaaugau

SEQ ID NO: 1000543 - RNA, 19 nt, Artificial Sequence
  Description of Artificial Sequence: Synthetic oligonucleotide
uguaaaaggaggugacagu

SEQ ID NO: 1000544 - RNA, 19 nt, Artificial Sequence
  Description of Artificial Sequence: Synthetic oligonucleotide
aaccaaugaugaaaggaag

SEQ ID NO: 1000545 - RNA, 19 nt, Artificial Sequence
  Description of Artificial Sequence: Synthetic oligonucleotide
caggcgucuggcaaaaucc

SEQ ID NO: 1000546 - RNA, 19 nt, Artificial Sequence
  Description of Artificial Sequence: Synthetic oligonucleotide
aggcuagcaggccaaaauc

SEQ ID NO: 1000547 - RNA, 19 nt, Artificial Sequence
  Description of Artificial Sequence: Synthetic oligonucleotide
ucuacaugguguguaucgg

SEQ ID NO: 1000548 - RNA, 19 nt, Artificial Sequence
  Description of Artificial Sequence: Synthetic oligonucleotide
aacauuguagggaguaucu

SEQ ID NO: 1000549 - RNA, 19 nt, Artificial Sequence
  Description of Artificial Sequence: Synthetic oligonucleotide
uguaguguguggagcguag

SEQ ID NO: 1000550 - RNA, 19 nt, Artificial Sequence
  Description of Artificial Sequence: Synthetic oligonucleotide
acaggcgucuggcaaaauc

SEQ ID NO: 1000551 - RNA, 19 nt, Artificial Sequence
  Description of Artificial Sequence: Synthetic oligonucleotide
cucccggccaucaaugugg

SEQ ID NO: 1000552 - RNA, 19 nt, Artificial Sequence
  Description of Artificial Sequence: Synthetic oligonucleotide
cagcugucgaaccagcugg

SEQ ID NO: 1000553 - RNA, 19 nt, Artificial Sequence
  Description of Artificial Sequence: Synthetic oligonucleotide
uuuucucggauuucaggga

SEQ ID NO: 1000554 - RNA, 19 nt, Artificial Sequence
  Description of Artificial Sequence: Synthetic oligonucleotide
gaaacgggcagccacaugu

SEQ ID NO: 1000555 - RNA, 19 nt, Artificial Sequence
  Description of Artificial Sequence: Synthetic oligonucleotide
aguaucuaggugacucucc

SEQ ID NO: 1000556 - RNA, 19 nt, Artificial Sequence
  Description of Artificial Sequence: Synthetic oligonucleotide
auguugaucgaacccggag

SEQ ID NO: 1000557 - RNA, 19 nt, Artificial Sequence
  Description of Artificial Sequence: Synthetic oligonucleotide
gacugauguugaucgaacc

SEQ ID NO: 1000558 - RNA, 19 nt, Artificial Sequence
  Description of Artificial Sequence: Synthetic oligonucleotide
uugaucggagggaagucug

SEQ ID NO: 1000559 - RNA, 19 nt, Artificial Sequence
  Description of Artificial Sequence: Synthetic oligonucleotide
uguguaucggugacugaug

SEQ ID NO: 1000560 - RNA, 19 nt, Artificial Sequence
  Description of Artificial Sequence: Synthetic oligonucleotide
uaggugacucuccauggug

SEQ ID NO: 1000561 - RNA, 19 nt, Artificial Sequence
  Description of Artificial Sequence: Synthetic oligonucleotide
uccaucgcgaggcuagacc

SEQ ID NO: 1000562 - RNA, 19 nt, Artificial Sequence
  Description of Artificial Sequence: Synthetic oligonucleotide
guaguccaugacucgaucc

SEQ ID NO: 1000563 - RNA, 19 nt, Artificial Sequence
  Description of Artificial Sequence: Synthetic oligonucleotide
ugacugauguugaucgaac

SEQ ID NO: 1000564 - RNA, 19 nt, Artificial Sequence
  Description of Artificial Sequence: Synthetic oligonucleotide
ugauagacgagugcagaug

SEQ ID NO: 1000565 - RNA, 19 nt, Artificial Sequence
  Description of Artificial Sequence: Synthetic oligonucleotide
ucuuugugagcaauuccuc

SEQ ID NO: 1000566 - RNA, 19 nt, Artificial Sequence
  Description of Artificial Sequence: Synthetic oligonucleotide
augagaucaauaucauuau

SEQ ID NO: 1000567 - RNA, 19 nt, Artificial Sequence
  Description of Artificial Sequence: Synthetic oligonucleotide
aagcagucgacccgcccgg

SEQ ID NO: 1000568 - RNA, 19 nt, Artificial Sequence
  Description of Artificial Sequence: Synthetic oligonucleotide
uacggaagcccuugaugcg

SEQ ID NO: 1000569 - RNA, 19 nt, Artificial Sequence
  Description of Artificial Sequence: Synthetic oligonucleotide
uuucucggauuucagggau

SEQ ID NO: 1000570 - RNA, 19 nt, Artificial Sequence
  Description of Artificial Sequence: Synthetic oligonucleotide
aacuaggcugccgcuauag

SEQ ID NO: 1000571 - RNA, 19 nt, Artificial Sequence
  Description of Artificial Sequence: Synthetic oligonucleotide
guaguggugaccccaaaga

SEQ ID NO: 1000572 - RNA, 19 nt, Artificial Sequence
  Description of Artificial Sequence: Synthetic oligonucleotide
ugcaaccaaugaugaaagg

SEQ ID NO: 1000573 - RNA, 19 nt, Artificial Sequence
  Description of Artificial Sequence: Synthetic oligonucleotide
uaguccagcggcaugggaa

SEQ ID NO: 1000574 - RNA, 19 nt, Artificial Sequence
  Description of Artificial Sequence: Synthetic oligonucleotide
guauggugggauugcaacc

SEQ ID NO: 1000575 - RNA, 19 nt, Artificial Sequence
  Description of Artificial Sequence: Synthetic oligonucleotide
uugaugcggacucgagggg

SEQ ID NO: 1000576 - RNA, 19 nt, Artificial Sequence
  Description of Artificial Sequence: Synthetic oligonucleotide
gaugcggugagcaauccuc

SEQ ID NO: 1000577 - RNA, 19 nt, Artificial Sequence
  Description of Artificial Sequence: Synthetic oligonucleotide
gaggaccagaaagugagug

SEQ ID NO: 1000578 - RNA, 19 nt, Artificial Sequence
  Description of Artificial Sequence: Synthetic oligonucleotide
ugcauauccagguggccga

SEQ ID NO: 1000579 - RNA, 19 nt, Artificial Sequence
  Description of Artificial Sequence: Synthetic oligonucleotide
aacccggagugacaaugag

SEQ ID NO: 1000580 - RNA, 19 nt, Artificial Sequence
  Description of Artificial Sequence: Synthetic oligonucleotide
augaaaggaaggcuacgga

SEQ ID NO: 1000581 - RNA, 19 nt, Artificial Sequence
  Description of Artificial Sequence: Synthetic oligonucleotide
gaucccaagccuugaaguc

SEQ ID NO: 1000582 - RNA, 19 nt, Artificial Sequence
  Description of Artificial Sequence: Synthetic oligonucleotide
ugugagcaauuccuccacc

SEQ ID NO: 1000583 - RNA, 19 nt, Artificial Sequence
  Description of Artificial Sequence: Synthetic oligonucleotide
uagacgagugcagaugaug

SEQ ID NO: 1000584 - RNA, 19 nt, Artificial Sequence
  Description of Artificial Sequence: Synthetic oligonucleotide
agacgggccgaagugaagg

SEQ ID NO: 1000585 - RNA, 19 nt, Artificial Sequence
  Description of Artificial Sequence: Synthetic oligonucleotide
ucuauguguuuccggcucu

SEQ ID NO: 1000586 - RNA, 19 nt, Artificial Sequence
  Description of Artificial Sequence: Synthetic oligonucleotide
gaacggccagaauaaagca

SEQ ID NO: 1000587 - RNA, 19 nt, Artificial Sequence
  Description of Artificial Sequence: Synthetic oligonucleotide
ugucgaaccagcuggcaau

SEQ ID NO: 1000588 - RNA, 19 nt, Artificial Sequence
  Description of Artificial Sequence: Synthetic oligonucleotide
gauguauagcucgugcaca

SEQ ID NO: 1000589 - RNA, 19 nt, Artificial Sequence
  Description of Artificial Sequence: Synthetic oligonucleotide
gggauugcaaccaaugaug

SEQ ID NO: 1000590 - RNA, 19 nt, Artificial Sequence
  Description of Artificial Sequence: Synthetic oligonucleotide
uaucggugacugauguuga

SEQ ID NO: 1000591 - RNA, 19 nt, Artificial Sequence
  Description of Artificial Sequence: Synthetic oligonucleotide
uuuccggcucucucgaaga

SEQ ID NO: 1000592 - RNA, 19 nt, Artificial Sequence
  Description of Artificial Sequence: Synthetic oligonucleotide
guuuccggcucucucgaag

SEQ ID NO: 1000593 - RNA, 19 nt, Artificial Sequence
  Description of Artificial Sequence: Synthetic oligonucleotide
gucgauggcugacugguug

SEQ ID NO: 1000594 - RNA, 19 nt, Artificial Sequence
  Description of Artificial Sequence: Synthetic oligonucleotide
agcaauccucacugguaac

SEQ ID NO: 1000595 - RNA, 19 nt, Artificial Sequence
  Description of Artificial Sequence: Synthetic oligonucleotide
auauccagguggccgaaga

SEQ ID NO: 1000596 - RNA, 19 nt, Artificial Sequence
  Description of Artificial Sequence: Synthetic oligonucleotide
gggaaugaaggggaaacgg

SEQ ID NO: 1000597 - RNA, 19 nt, Artificial Sequence
  Description of Artificial Sequence: Synthetic oligonucleotide
ugaucgaacccggagugac

SEQ ID NO: 1000598 - RNA, 19 nt, Artificial Sequence
  Description of Artificial Sequence: Synthetic oligonucleotide
gaugugggucccucgagga

SEQ ID NO: 1000599 - RNA, 19 nt, Artificial Sequence
  Description of Artificial Sequence: Synthetic oligonucleotide
agucuuggagcguucccug

SEQ ID NO: 1000600 - RNA, 19 nt, Artificial Sequence
  Description of Artificial Sequence: Synthetic oligonucleotide
cuaggaggaguguggcagg

SEQ ID NO: 1000601 - RNA, 19 nt, Artificial Sequence
  Description of Artificial Sequence: Synthetic oligonucleotide
gugaacggccagaauaaag

SEQ ID NO: 1000602 - RNA, 19 nt, Artificial Sequence
  Description of Artificial Sequence: Synthetic oligonucleotide
agucagauucugaagcucu

SEQ ID NO: 1000603 - RNA, 19 nt, Artificial Sequence
  Description of Artificial Sequence: Synthetic oligonucleotide
uauaggacuggggacccga

SEQ ID NO: 1000604 - RNA, 19 nt, Artificial Sequence
  Description of Artificial Sequence: Synthetic oligonucleotide
guaucuaggugacucucca

SEQ ID NO: 1000605 - RNA, 19 nt, Artificial Sequence
  Description of Artificial Sequence: Synthetic oligonucleotide
agaaguaccggaccagcuu

SEQ ID NO: 1000606 - RNA, 19 nt, Artificial Sequence
  Description of Artificial Sequence: Synthetic oligonucleotide
cucuauguguuuccggcuc

SEQ ID NO: 1000607 - RNA, 19 nt, Artificial Sequence
  Description of Artificial Sequence: Synthetic oligonucleotide
ggauguauagcucgugcac

SEQ ID NO: 1000608 - RNA, 19 nt, Artificial Sequence
  Description of Artificial Sequence: Synthetic oligonucleotide
caaguagcggccacuuuuc

SEQ ID NO: 1000609 - RNA, 19 nt, Artificial Sequence
  Description of Artificial Sequence: Synthetic oligonucleotide
uaccggaccagcuuuucau

SEQ ID NO: 1000610 - RNA, 19 nt, Artificial Sequence
  Description of Artificial Sequence: Synthetic oligonucleotide
aggaguguggcaggcuagc

SEQ ID NO: 1000611 - RNA, 19 nt, Artificial Sequence
  Description of Artificial Sequence: Synthetic oligonucleotide
guccaagaaguaccggacc

SEQ ID NO: 1000612 - RNA, 19 nt, Artificial Sequence
  Description of Artificial Sequence: Synthetic oligonucleotide
auacugggccucaucugcc

SEQ ID NO: 1000613 - RNA, 19 nt, Artificial Sequence
  Description of Artificial Sequence: Synthetic oligonucleotide
ugccgcuauaggacugggg

SEQ ID NO: 1000614 - RNA, 19 nt, Artificial Sequence
  Description of Artificial Sequence: Synthetic oligonucleotide
ucgaagacccucagcuaac

SEQ ID NO: 1000615 - RNA, 19 nt, Artificial Sequence
  Description of Artificial Sequence: Synthetic oligonucleotide
cucucgaagacccucagcu

SEQ ID NO: 1000616 - RNA, 19 nt, Artificial Sequence
  Description of Artificial Sequence: Synthetic oligonucleotide
aaguagcggccacuuuuca

SEQ ID NO: 1000617 - RNA, 19 nt, Artificial Sequence
  Description of Artificial Sequence: Synthetic oligonucleotide
cucagcgccggcagaacag

SEQ ID NO: 1000618 - RNA, 19 nt, Artificial Sequence
  Description of Artificial Sequence: Synthetic oligonucleotide
aucggagggaagucuguca

SEQ ID NO: 1000619 - RNA, 19 nt, Artificial Sequence
  Description of Artificial Sequence: Synthetic oligonucleotide
aaacgggcagccacauguc

SEQ ID NO: 1000620 - RNA, 19 nt, Artificial Sequence
  Description of Artificial Sequence: Synthetic oligonucleotide
ugaugcggugagcaauccu

SEQ ID NO: 1000621 - RNA, 19 nt, Artificial Sequence
  Description of Artificial Sequence: Synthetic oligonucleotide
ugaucggagggaagucugu

SEQ ID NO: 1000622 - RNA, 19 nt, Artificial Sequence
  Description of Artificial Sequence: Synthetic oligonucleotide
ucgauggcugacugguugu

SEQ ID NO: 1000623 - RNA, 19 nt, Artificial Sequence
  Description of Artificial Sequence: Synthetic oligonucleotide
gcaaccaaugaugaaagga

SEQ ID NO: 1000624 - RNA, 19 nt, Artificial Sequence
  Description of Artificial Sequence: Synthetic oligonucleotide
ggcccggauguauagcucg

SEQ ID NO: 1000625 - RNA, 19 nt, Artificial Sequence
  Description of Artificial Sequence: Synthetic oligonucleotide
uaucauuauuggcgauggu

SEQ ID NO: 1000626 - RNA, 19 nt, Artificial Sequence
  Description of Artificial Sequence: Synthetic oligonucleotide
gcuacggaagcccuugaug

SEQ ID NO: 1000627 - RNA, 19 nt, Artificial Sequence
  Description of Artificial Sequence: Synthetic oligonucleotide
gugggauugcaaccaauga

SEQ ID NO: 1000628 - RNA, 19 nt, Artificial Sequence
  Description of Artificial Sequence: Synthetic oligonucleotide
ucgaggggcauugccauac

SEQ ID NO: 1000629 - RNA, 19 nt, Artificial Sequence
  Description of Artificial Sequence: Synthetic oligonucleotide
cugguuguaaaaggaggug

SEQ ID NO: 1000630 - RNA, 19 nt, Artificial Sequence
  Description of Artificial Sequence: Synthetic oligonucleotide
uggagcguucccuggccag

SEQ ID NO: 1000631 - RNA, 19 nt, Artificial Sequence
  Description of Artificial Sequence: Synthetic oligonucleotide
cucgaagacccucagcuaa

SEQ ID NO: 1000632 - RNA, 19 nt, Artificial Sequence
  Description of Artificial Sequence: Synthetic oligonucleotide
acgucgauggcugacuggu

SEQ ID NO: 1000633 - RNA, 19 nt, Artificial Sequence
  Description of Artificial Sequence: Synthetic oligonucleotide
agaacagcuuccaucgcga

SEQ ID NO: 1000634 - RNA, 19 nt, Artificial Sequence
  Description of Artificial Sequence: Synthetic oligonucleotide
acuugugcucacacaggcg

SEQ ID NO: 1000635 - RNA, 19 nt, Artificial Sequence
  Description of Artificial Sequence: Synthetic oligonucleotide
cuugugcucacacaggcgu

SEQ ID NO: 1000636 - RNA, 19 nt, Artificial Sequence
  Description of Artificial Sequence: Synthetic oligonucleotide
cucgauccaggucuuugug

SEQ ID NO: 1000637 - RNA, 19 nt, Artificial Sequence
  Description of Artificial Sequence: Synthetic oligonucleotide
gaguaucuaggugacucuc

SEQ ID NO: 1000638 - RNA, 19 nt, Artificial Sequence
  Description of Artificial Sequence: Synthetic oligonucleotide
acucgaggggcauugccau

SEQ ID NO: 1000639 - RNA, 19 nt, Artificial Sequence
  Description of Artificial Sequence: Synthetic oligonucleotide
cgcagucagauucugaagc

SEQ ID NO: 1000640 - RNA, 19 nt, Artificial Sequence
  Description of Artificial Sequence: Synthetic oligonucleotide
ggugggauugcaaccaaug

SEQ ID NO: 1000641 - RNA, 19 nt, Artificial Sequence
  Description of Artificial Sequence: Synthetic oligonucleotide
ccaucaauguggcggagcc

SEQ ID NO: 1000642 - RNA, 19 nt, Artificial Sequence
  Description of Artificial Sequence: Synthetic oligonucleotide
gucuuugugagcaauuccu

SEQ ID NO: 1000643 - RNA, 19 nt, Artificial Sequence
  Description of Artificial Sequence: Synthetic oligonucleotide
gucugaggcccuaagcccc

SEQ ID NO: 1000644 - RNA, 19 nt, Artificial Sequence
  Description of Artificial Sequence: Synthetic oligonucleotide
gccgccacugugcauaucc

SEQ ID NO: 1000645 - RNA, 19 nt, Artificial Sequence
  Description of Artificial Sequence: Synthetic oligonucleotide
ugguaguccaugacucgau

SEQ ID NO: 1000646 - RNA, 19 nt, Artificial Sequence
  Description of Artificial Sequence: Synthetic oligonucleotide
ccggccaucaauguggcgg

SEQ ID NO: 1000647 - RNA, 19 nt, Artificial Sequence
  Description of Artificial Sequence: Synthetic oligonucleotide
uuggagcguucccuggcca

SEQ ID NO: 1000648 - RNA, 19 nt, Artificial Sequence
  Description of Artificial Sequence: Synthetic oligonucleotide
guuguaaaaggaggugaca

SEQ ID NO: 1000649 - RNA, 19 nt, Artificial Sequence
  Description of Artificial Sequence: Synthetic oligonucleotide
gccgcuauaggacugggga

SEQ ID NO: 1000650 - RNA, 19 nt, Artificial Sequence
  Description of Artificial Sequence: Synthetic oligonucleotide
ccgagaggguccuaggagg

SEQ ID NO: 1000651 - RNA, 19 nt, Artificial Sequence
  Description of Artificial Sequence: Synthetic oligonucleotide
cccggagugacaaugagga

SEQ ID NO: 1000652 - RNA, 19 nt, Artificial Sequence
  Description of Artificial Sequence: Synthetic oligonucleotide
gguuguaaaaggaggugac

SEQ ID NO: 1000653 - RNA, 19 nt, Artificial Sequence
  Description of Artificial Sequence: Synthetic oligonucleotide
ggcuagcaggccaaaaucc

SEQ ID NO: 1000654 - RNA, 19 nt, Artificial Sequence
  Description of Artificial Sequence: Synthetic oligonucleotide
gaaccgccgaagcagucga

SEQ ID NO: 1000655 - RNA, 19 nt, Artificial Sequence
  Description of Artificial Sequence: Synthetic oligonucleotide
ccaucgcgaggcuagaccc

SEQ ID NO: 1000656 - RNA, 19 nt, Artificial Sequence
  Description of Artificial Sequence: Synthetic oligonucleotide
cacgucgauggcugacugg

SEQ ID NO: 1000657 - RNA, 19 nt, Artificial Sequence
  Description of Artificial Sequence: Synthetic oligonucleotide
acccggagugacaaugagg

SEQ ID NO: 1000658 - RNA, 19 nt, Artificial Sequence
  Description of Artificial Sequence: Synthetic oligonucleotide
gacucgaggggcauugcca

SEQ ID NO: 1000659 - RNA, 19 nt, Artificial Sequence
  Description of Artificial Sequence: Synthetic oligonucleotide
uccuaggaggaguguggca

SEQ ID NO: 1000660 - RNA, 19 nt, Artificial Sequence
  Description of Artificial Sequence: Synthetic oligonucleotide
cuccucccggccaucaaug

SEQ ID NO: 1000661 - RNA, 19 nt, Artificial Sequence
  Description of Artificial Sequence: Synthetic oligonucleotide
gcggcaugggaaugaaggg

SEQ ID NO: 1000662 - RNA, 19 nt, Artificial Sequence
  Description of Artificial Sequence: Synthetic oligonucleotide
gacagguaguggugacccc

SEQ ID NO: 1000663 - RNA, 19 nt, Artificial Sequence
  Description of Artificial Sequence: Synthetic oligonucleotide
agcaauuccuccaccccug

SEQ ID NO: 1000664 - RNA, 19 nt, Artificial Sequence
  Description of Artificial Sequence: Synthetic oligonucleotide
ucaauguggcggagccgca

SEQ ID NO: 1000665 - RNA, 19 nt, Artificial Sequence
  Description of Artificial Sequence: Synthetic oligonucleotide
gagcaauuccuccaccccu

SEQ ID NO: 1000666 - RNA, 19 nt, Artificial Sequence
  Description of Artificial Sequence: Synthetic oligonucleotide
agucgacccgcccggcuag

SEQ ID NO: 1000667 - RNA, 19 nt, Artificial Sequence
  Description of Artificial Sequence: Synthetic oligonucleotide
auaguccagcggcauggga

SEQ ID NO: 1000668 - RNA, 19 nt, Artificial Sequence
  Description of Artificial Sequence: Synthetic oligonucleotide
aucgaacccggagugacaa

SEQ ID NO: 1000669 - RNA, 19 nt, Artificial Sequence
  Description of Artificial Sequence: Synthetic oligonucleotide
gaaggcccggauguauagc

SEQ ID NO: 1000670 - RNA, 19 nt, Artificial Sequence
  Description of Artificial Sequence: Synthetic oligonucleotide
uugaacuaggcugccgcua

SEQ ID NO: 1000671 - RNA, 19 nt, Artificial Sequence
  Description of Artificial Sequence: Synthetic oligonucleotide
ucagcgccggcagaacagc

SEQ ID NO: 1000672 - RNA, 19 nt, Artificial Sequence
  Description of Artificial Sequence: Synthetic oligonucleotide
gaaggcccgccccgaaggc

SEQ ID NO: 1000673 - RNA, 19 nt, Artificial Sequence
  Description of Artificial Sequence: Synthetic oligonucleotide
ggcugacugguuguaaaag

SEQ ID NO: 1000674 - RNA, 19 nt, Artificial Sequence
  Description of Artificial Sequence: Synthetic oligonucleotide
ugcggugagcaauccucac

SEQ ID NO: 1000675 - RNA, 19 nt, Artificial Sequence
  Description of Artificial Sequence: Synthetic oligonucleotide
cgagguacuccgcauaggc

SEQ ID NO: 1000676 - RNA, 19 nt, Artificial Sequence
  Description of Artificial Sequence: Synthetic oligonucleotide
aagacgggccgaagugaag

SEQ ID NO: 1000677 - RNA, 19 nt, Artificial Sequence
  Description of Artificial Sequence: Synthetic oligonucleotide
ucggaucccaagccuugaa

SEQ ID NO: 1000678 - RNA, 19 nt, Artificial Sequence
  Description of Artificial Sequence: Synthetic oligonucleotide
cugggcccggguccgaggg

SEQ ID NO: 1000679 - RNA, 19 nt, Artificial Sequence
  Description of Artificial Sequence: Synthetic oligonucleotide
ugacaugcucagcgccggc

SEQ ID NO: 1000680 - RNA, 19 nt, Artificial Sequence
  Description of Artificial Sequence: Synthetic oligonucleotide
ugugaacggccagaauaaa

SEQ ID NO: 1000681 - RNA, 19 nt, Artificial Sequence
  Description of Artificial Sequence: Synthetic oligonucleotide
uuccggcucucucgaagac

SEQ ID NO: 1000682 - RNA, 19 nt, Artificial Sequence
  Description of Artificial Sequence: Synthetic oligonucleotide
gaucggagggaagucuguc

SEQ ID NO: 1000683 - RNA, 19 nt, Artificial Sequence
  Description of Artificial Sequence: Synthetic oligonucleotide
cuccgcauaggcccuggac

SEQ ID NO: 1000684 - RNA, 19 nt, Artificial Sequence
  Description of Artificial Sequence: Synthetic oligonucleotide
uggugggauugcaaccaau

SEQ ID NO: 1000685 - RNA, 19 nt, Artificial Sequence
  Description of Artificial Sequence: Synthetic oligonucleotide
cugguauuagaggccucag

SEQ ID NO: 1000686 - RNA, 19 nt, Artificial Sequence
  Description of Artificial Sequence: Synthetic oligonucleotide
gugacugauguugaucgaa

SEQ ID NO: 1000687 - RNA, 19 nt, Artificial Sequence
  Description of Artificial Sequence: Synthetic oligonucleotide
aggauauaguccagcggca

SEQ ID NO: 1000688 - RNA, 19 nt, Artificial Sequence
  Description of Artificial Sequence: Synthetic oligonucleotide
uagcggccacuuuucagaa

SEQ ID NO: 1000689 - RNA, 19 nt, Artificial Sequence
  Description of Artificial Sequence: Synthetic oligonucleotide
gauguugaucgaacccgga

SEQ ID NO: 1000690 - RNA, 19 nt, Artificial Sequence
  Description of Artificial Sequence: Synthetic oligonucleotide
acgacauccuuguggucau

SEQ ID NO: 1000691 - RNA, 19 nt, Artificial Sequence
  Description of Artificial Sequence: Synthetic oligonucleotide
gacccgacagguaguggug

SEQ ID NO: 1000692 - RNA, 19 nt, Artificial Sequence
  Description of Artificial Sequence: Synthetic oligonucleotide
auaggacuggggacccgac

SEQ ID NO: 1000693 - RNA, 19 nt, Artificial Sequence
  Description of Artificial Sequence: Synthetic oligonucleotide
ucgcgaggcuagacccugg

SEQ ID NO: 1000694 - RNA, 19 nt, Artificial Sequence
  Description of Artificial Sequence: Synthetic oligonucleotide
guguaucggugacugaugu

SEQ ID NO: 1000695 - RNA, 19 nt, Artificial Sequence
  Description of Artificial Sequence: Synthetic oligonucleotide
cagcccgaagccaaagcca

SEQ ID NO: 1000696 - RNA, 19 nt, Artificial Sequence
  Description of Artificial Sequence: Synthetic oligonucleotide
uucggaucccaagccuuga

SEQ ID NO: 1000697 - RNA, 19 nt, Artificial Sequence
  Description of Artificial Sequence: Synthetic oligonucleotide
gugguaguccaugacucga

SEQ ID NO: 1000698 - RNA, 19 nt, Artificial Sequence
  Description of Artificial Sequence: Synthetic oligonucleotide
guguuuccggcucucucga

SEQ ID NO: 1000699 - RNA, 19 nt, Artificial Sequence
  Description of Artificial Sequence: Synthetic oligonucleotide
agcggccacuuuucagaag

SEQ ID NO: 1000700 - RNA, 19 nt, Artificial Sequence
  Description of Artificial Sequence: Synthetic oligonucleotide
caagacgggccgaagugaa

SEQ ID NO: 1000701 - RNA, 19 nt, Artificial Sequence
  Description of Artificial Sequence: Synthetic oligonucleotide
gaacccggagugacaauga

SEQ ID NO: 1000702 - RNA, 19 nt, Artificial Sequence
  Description of Artificial Sequence: Synthetic oligonucleotide
ccggauguauagcucgugc

SEQ ID NO: 1000703 - RNA, 19 nt, Artificial Sequence
  Description of Artificial Sequence: Synthetic oligonucleotide
guccuaggaggaguguggc

SEQ ID NO: 1000704 - RNA, 19 nt, Artificial Sequence
  Description of Artificial Sequence: Synthetic oligonucleotide
aucgcgaggcuagacccug

SEQ ID NO: 1000705 - RNA, 19 nt, Artificial Sequence
  Description of Artificial Sequence: Synthetic oligonucleotide
ggagccaccgagguacucc

SEQ ID NO: 1000706 - RNA, 19 nt, Artificial Sequence
  Description of Artificial Sequence: Synthetic oligonucleotide
uacuccgcauaggcccugg

SEQ ID NO: 1000707 - RNA, 19 nt, Artificial Sequence
  Description of Artificial Sequence: Synthetic oligonucleotide
uggggacccgacagguagu

SEQ ID NO: 1000708 - RNA, 19 nt, Artificial Sequence
  Description of Artificial Sequence: Synthetic oligonucleotide
caauguggcggagccgcag

SEQ ID NO: 1000709 - RNA, 19 nt, Artificial Sequence
  Description of Artificial Sequence: Synthetic oligonucleotide
accccugucugagauccug

SEQ ID NO: 1000710 - RNA, 19 nt, Artificial Sequence
  Description of Artificial Sequence: Synthetic oligonucleotide
ggacucgaggggcauugcc

SEQ ID NO: 1000711 - RNA, 19 nt, Artificial Sequence
  Description of Artificial Sequence: Synthetic oligonucleotide
gcgucuggcaaaauccacc

SEQ ID NO: 1000712 - RNA, 19 nt, Artificial Sequence
  Description of Artificial Sequence: Synthetic oligonucleotide
gguaguccaugacucgauc

SEQ ID NO: 1000713 - RNA, 19 nt, Artificial Sequence
  Description of Artificial Sequence: Synthetic oligonucleotide
guaccggaccagcuuuuca

SEQ ID NO: 1000714 - RNA, 19 nt, Artificial Sequence
  Description of Artificial Sequence: Synthetic oligonucleotide
aaccgccgaagcagucgac

SEQ ID NO: 1000715 - RNA, 19 nt, Artificial Sequence
  Description of Artificial Sequence: Synthetic oligonucleotide
cugucgaaccagcuggcaa

SEQ ID NO: 1000716 - RNA, 19 nt, Artificial Sequence
  Description of Artificial Sequence: Synthetic oligonucleotide
cauguccauugaugcggac

SEQ ID NO: 1000717 - RNA, 19 nt, Artificial Sequence
  Description of Artificial Sequence: Synthetic oligonucleotide
guguguaucggugacugau

SEQ ID NO: 1000718 - RNA, 19 nt, Artificial Sequence
  Description of Artificial Sequence: Synthetic oligonucleotide
auggugggauugcaaccaa

SEQ ID NO: 1000719 - RNA, 19 nt, Artificial Sequence
  Description of Artificial Sequence: Synthetic oligonucleotide
cuacaugguguguaucggu

SEQ ID NO: 1000720 - RNA, 19 nt, Artificial Sequence
  Description of Artificial Sequence: Synthetic oligonucleotide
gugauagacgagugcagau

SEQ ID NO: 1000721 - RNA, 19 nt, Artificial Sequence
  Description of Artificial Sequence: Synthetic oligonucleotide
uccugugaacggccagaau

SEQ ID NO: 1000722 - RNA, 19 nt, Artificial Sequence
  Description of Artificial Sequence: Synthetic oligonucleotide
augguguguaucggugacu

SEQ ID NO: 1000723 - RNA, 19 nt, Artificial Sequence
  Description of Artificial Sequence: Synthetic oligonucleotide
aggcuagacccugggcccg

SEQ ID NO: 1000724 - RNA, 19 nt, Artificial Sequence
  Description of Artificial Sequence: Synthetic oligonucleotide
gaucgaacccggagugaca

SEQ ID NO: 1000725 - RNA, 19 nt, Artificial Sequence
  Description of Artificial Sequence: Synthetic oligonucleotide
guugaacuaggcugccgcu

SEQ ID NO: 1000726 - RNA, 19 nt, Artificial Sequence
  Description of Artificial Sequence: Synthetic oligonucleotide
agcuggcaauacugggccu

SEQ ID NO: 1000727 - RNA, 19 nt, Artificial Sequence
  Description of Artificial Sequence: Synthetic oligonucleotide
cuauguguuuccggcucuc

SEQ ID NO: 1000728 - RNA, 19 nt, Artificial Sequence
  Description of Artificial Sequence: Synthetic oligonucleotide
uggugaccccaaagaggac

SEQ ID NO: 1000729 - RNA, 19 nt, Artificial Sequence
  Description of Artificial Sequence: Synthetic oligonucleotide
gcuauaggacuggggaccc

SEQ ID NO: 1000730 - RNA, 19 nt, Artificial Sequence
  Description of Artificial Sequence: Synthetic oligonucleotide
cccaagacgggccgaagug

SEQ ID NO: 1000731 - RNA, 19 nt, Artificial Sequence
  Description of Artificial Sequence: Synthetic oligonucleotide
aggcgucuggcaaaaucca

SEQ ID NO: 1000732 - RNA, 19 nt, Artificial Sequence
  Description of Artificial Sequence: Synthetic oligonucleotide
augcggugagcaauccuca

SEQ ID NO: 1000733 - RNA, 19 nt, Artificial Sequence
  Description of Artificial Sequence: Synthetic oligonucleotide
gcugguauuagaggccuca

SEQ ID NO: 1000734 - RNA, 19 nt, Artificial Sequence
  Description of Artificial Sequence: Synthetic oligonucleotide
agcagucgacccgcccggc

SEQ ID NO: 1000735 - RNA, 19 nt, Artificial Sequence
  Description of Artificial Sequence: Synthetic oligonucleotide
uuccaucgcgaggcuagac

SEQ ID NO: 1000736 - RNA, 19 nt, Artificial Sequence
  Description of Artificial Sequence: Synthetic oligonucleotide
ggucccucgaggaugcuga

SEQ ID NO: 1000737 - RNA, 19 nt, Artificial Sequence
  Description of Artificial Sequence: Synthetic oligonucleotide
cuugaucggagggaagucu

SEQ ID NO: 1000738 - RNA, 19 nt, Artificial Sequence
  Description of Artificial Sequence: Synthetic oligonucleotide
gguccgaggggaaccgccg

SEQ ID NO: 1000739 - RNA, 19 nt, Artificial Sequence
  Description of Artificial Sequence: Synthetic oligonucleotide
ccaagaaguaccggaccag

SEQ ID NO: 1000740 - RNA, 19 nt, Artificial Sequence
  Description of Artificial Sequence: Synthetic oligonucleotide
auccugugaacggccagaa

SEQ ID NO: 1000741 - RNA, 19 nt, Artificial Sequence
  Description of Artificial Sequence: Synthetic oligonucleotide
ggguccuaggaggagugug

SEQ ID NO: 1000742 - RNA, 19 nt, Artificial Sequence
  Description of Artificial Sequence: Synthetic oligonucleotide
cgacagguaguggugaccc

SEQ ID NO: 1000743 - RNA, 19 nt, Artificial Sequence
  Description of Artificial Sequence: Synthetic oligonucleotide
cagcggcaugggaaugaag

SEQ ID NO: 1000744 - RNA, 19 nt, Artificial Sequence
  Description of Artificial Sequence: Synthetic oligonucleotide
aaguaccggaccagcuuuu

SEQ ID NO: 1000745 - RNA, 19 nt, Artificial Sequence
  Description of Artificial Sequence: Synthetic oligonucleotide
gcaaguagcggccacuuuu

SEQ ID NO: 1000746 - RNA, 19 nt, Artificial Sequence
  Description of Artificial Sequence: Synthetic oligonucleotide
ggacccgacagguaguggu

SEQ ID NO: 1000747 - RNA, 19 nt, Artificial Sequence
  Description of Artificial Sequence: Synthetic oligonucleotide
gccccacaaagcuguagug

SEQ ID NO: 1000748 - RNA, 19 nt, Artificial Sequence
  Description of Artificial Sequence: Synthetic oligonucleotide
acccgacagguagugguga

SEQ ID NO: 1000749 - RNA, 19 nt, Artificial Sequence
  Description of Artificial Sequence: Synthetic oligonucleotide
gcugccgcuauaggacugg

SEQ ID NO: 1000750 - RNA, 19 nt, Artificial Sequence
  Description of Artificial Sequence: Synthetic oligonucleotide
agaggaccagaaagugagu

SEQ ID NO: 1000751 - RNA, 19 nt, Artificial Sequence
  Description of Artificial Sequence: Synthetic oligonucleotide
ccucaagagugagaacagc

SEQ ID NO: 1000752 - RNA, 19 nt, Artificial Sequence
  Description of Artificial Sequence: Synthetic oligonucleotide
auagacgagugcagaugau

SEQ ID NO: 1000753 - RNA, 19 nt, Artificial Sequence
  Description of Artificial Sequence: Synthetic oligonucleotide
gcuaacagggucacgacau

SEQ ID NO: 1000754 - RNA, 19 nt, Artificial Sequence
  Description of Artificial Sequence: Synthetic oligonucleotide
agcugguauuagaggccuc

SEQ ID NO: 1000755 - RNA, 19 nt, Artificial Sequence
  Description of Artificial Sequence: Synthetic oligonucleotide
ccgcuauaggacuggggac

SEQ ID NO: 1000756 - RNA, 19 nt, Artificial Sequence
  Description of Artificial Sequence: Synthetic oligonucleotide
caggcuagcaggccaaaau

SEQ ID NO: 1000757 - RNA, 19 nt, Artificial Sequence
  Description of Artificial Sequence: Synthetic oligonucleotide
cugccgcuauaggacuggg

SEQ ID NO: 1000758 - RNA, 19 nt, Artificial Sequence
  Description of Artificial Sequence: Synthetic oligonucleotide
cgggccgaagugaaggccc

SEQ ID NO: 1000759 - RNA, 19 nt, Artificial Sequence
  Description of Artificial Sequence: Synthetic oligonucleotide
uggacgugggcagcccgaa

SEQ ID NO: 1000760 - RNA, 19 nt, Artificial Sequence
  Description of Artificial Sequence: Synthetic oligonucleotide
ucgaacccggagugacaau

SEQ ID NO: 1000761 - RNA, 19 nt, Artificial Sequence
  Description of Artificial Sequence: Synthetic oligonucleotide
ggaaacgggcagccacaug

SEQ ID NO: 1000762 - RNA, 19 nt, Artificial Sequence
  Description of Artificial Sequence: Synthetic oligonucleotide
ccgaagugaaggcccgccc

SEQ ID NO: 1000763 - RNA, 19 nt, Artificial Sequence
  Description of Artificial Sequence: Synthetic oligonucleotide
cgaacccggagugacaaug

SEQ ID NO: 1000764 - RNA, 19 nt, Artificial Sequence
  Description of Artificial Sequence: Synthetic oligonucleotide
gaacuaggcugccgcuaua

SEQ ID NO: 1000765 - RNA, 19 nt, Artificial Sequence
  Description of Artificial Sequence: Synthetic oligonucleotide
agggaguaucuaggugacu

SEQ ID NO: 1000766 - RNA, 19 nt, Artificial Sequence
  Description of Artificial Sequence: Synthetic oligonucleotide
acuccgcauaggcccugga

SEQ ID NO: 1000767 - RNA, 19 nt, Artificial Sequence
  Description of Artificial Sequence: Synthetic oligonucleotide
ucgacccgcccggcuagcc

SEQ ID NO: 1000768 - RNA, 19 nt, Artificial Sequence
  Description of Artificial Sequence: Synthetic oligonucleotide
cucggauuucagggaugug

SEQ ID NO: 1000769 - RNA, 19 nt, Artificial Sequence
  Description of Artificial Sequence: Synthetic oligonucleotide
ccaaaauccgcagucagau

SEQ ID NO: 1000770 - RNA, 19 nt, Artificial Sequence
  Description of Artificial Sequence: Synthetic oligonucleotide
ggcgucuggcaaaauccac

SEQ ID NO: 1000771 - RNA, 19 nt, Artificial Sequence
  Description of Artificial Sequence: Synthetic oligonucleotide
cggaucccaagccuugaag

SEQ ID NO: 1000772 - RNA, 19 nt, Artificial Sequence
  Description of Artificial Sequence: Synthetic oligonucleotide
ggagcguucccuggccagc

SEQ ID NO: 1000773 - RNA, 19 nt, Artificial Sequence
  Description of Artificial Sequence: Synthetic oligonucleotide
cagucuuggagcguucccu

SEQ ID NO: 1000774 - RNA, 19 nt, Artificial Sequence
  Description of Artificial Sequence: Synthetic oligonucleotide
gcaauccucacugguaacu

SEQ ID NO: 1000775 - RNA, 19 nt, Artificial Sequence
  Description of Artificial Sequence: Synthetic oligonucleotide
ggguccgaggggaaccgcc

SEQ ID NO: 1000776 - RNA, 19 nt, Artificial Sequence
  Description of Artificial Sequence: Synthetic oligonucleotide
guccgaggggaaccgccga

SEQ ID NO: 1000777 - RNA, 19 nt, Artificial Sequence
  Description of Artificial Sequence: Synthetic oligonucleotide
gugacagucuuggagcguu

SEQ ID NO: 1000778 - RNA, 19 nt, Artificial Sequence
  Description of Artificial Sequence: Synthetic oligonucleotide
cagcucuacauggugugua

SEQ ID NO: 1000779 - RNA, 19 nt, Artificial Sequence
  Description of Artificial Sequence: Synthetic oligonucleotide
gucccucgaggaugcugac

SEQ ID NO: 1000780 - RNA, 19 nt, Artificial Sequence
  Description of Artificial Sequence: Synthetic oligonucleotide
gcucagcgccggcagaaca

SEQ ID NO: 1000781 - RNA, 19 nt, Artificial Sequence
  Description of Artificial Sequence: Synthetic oligonucleotide
aggguccuaggaggagugu

SEQ ID NO: 1000782 - RNA, 19 nt, Artificial Sequence
  Description of Artificial Sequence: Synthetic oligonucleotide
ggggacccgacagguagug

SEQ ID NO: 1000783 - RNA, 19 nt, Artificial Sequence
  Description of Artificial Sequence: Synthetic oligonucleotide
gcaguauggugggauugca

SEQ ID NO: 1000784 - RNA, 19 nt, Artificial Sequence
  Description of Artificial Sequence: Synthetic oligonucleotide
cgaggggaaccgccgaagc

SEQ ID NO: 1000785 - RNA, 19 nt, Artificial Sequence
  Description of Artificial Sequence: Synthetic oligonucleotide
gaggggcauugccauacuu

SEQ ID NO: 1000786 - RNA, 19 nt, Artificial Sequence
  Description of Artificial Sequence: Synthetic oligonucleotide
ccgacagguaguggugacc

SEQ ID NO: 1000787 - RNA, 19 nt, Artificial Sequence
  Description of Artificial Sequence: Synthetic oligonucleotide
gcccggcuagccgagcccg

SEQ ID NO: 1000788 - RNA, 19 nt, Artificial Sequence
  Description of Artificial Sequence: Synthetic oligonucleotide
guacuccgcauaggcccug

SEQ ID NO: 1000789 - RNA, 19 nt, Artificial Sequence
  Description of Artificial Sequence: Synthetic oligonucleotide
caccgagguacuccgcaua

SEQ ID NO: 1000790 - RNA, 19 nt, Artificial Sequence
  Description of Artificial Sequence: Synthetic oligonucleotide
gggacccgacagguagugg

SEQ ID NO: 1000791 - RNA, 19 nt, Artificial Sequence
  Description of Artificial Sequence: Synthetic oligonucleotide
agcuuccaucgcgaggcua

SEQ ID NO: 1000792 - RNA, 19 nt, Artificial Sequence
  Description of Artificial Sequence: Synthetic oligonucleotide
guaguguguggagcguagu

SEQ ID NO: 1000793 - RNA, 19 nt, Artificial Sequence
  Description of Artificial Sequence: Synthetic oligonucleotide
cagucgacccgcccggcua

SEQ ID NO: 1000794 - RNA, 19 nt, Artificial Sequence
  Description of Artificial Sequence: Synthetic oligonucleotide
caaaauccgcagucagauu

SEQ ID NO: 1000795 - RNA, 19 nt, Artificial Sequence
  Description of Artificial Sequence: Synthetic oligonucleotide
gccaugcauagguccugac

SEQ ID NO: 1000796 - RNA, 19 nt, Artificial Sequence
  Description of Artificial Sequence: Synthetic oligonucleotide
cgccgaagcagucgacccg

SEQ ID NO: 1000797 - RNA, 19 nt, Artificial Sequence
  Description of Artificial Sequence: Synthetic oligonucleotide
caucgcgaggcuagacccu

SEQ ID NO: 1000798 - RNA, 19 nt, Artificial Sequence
  Description of Artificial Sequence: Synthetic oligonucleotide
ccggagugacaaugaggac

SEQ ID NO: 1000799 - RNA, 19 nt, Artificial Sequence
  Description of Artificial Sequence: Synthetic oligonucleotide
cuccaccccugucugagau

SEQ ID NO: 1000800 - RNA, 19 nt, Artificial Sequence
  Description of Artificial Sequence: Synthetic oligonucleotide
cuuccaucgcgaggcuaga

SEQ ID NO: 1000801 - RNA, 19 nt, Artificial Sequence
  Description of Artificial Sequence: Synthetic oligonucleotide
gggucacgacauccuugug

SEQ ID NO: 1000802 - RNA, 19 nt, Artificial Sequence
  Description of Artificial Sequence: Synthetic oligonucleotide
ggcuagacccugggcccgg

SEQ ID NO: 1000803 - RNA, 19 nt, Artificial Sequence
  Description of Artificial Sequence: Synthetic oligonucleotide
cgaagcagucgacccgccc

SEQ ID NO: 1000804 - RNA, 19 nt, Artificial Sequence
  Description of Artificial Sequence: Synthetic oligonucleotide
ccaugcauagguccugacu

SEQ ID NO: 1000805 - RNA, 19 nt, Artificial Sequence
  Description of Artificial Sequence: Synthetic oligonucleotide
ggauauaguccagcggcau

SEQ ID NO: 1000806 - RNA, 19 nt, Artificial Sequence
  Description of Artificial Sequence: Synthetic oligonucleotide
gagcguucccuggccagcu

SEQ ID NO: 1000807 - RNA, 19 nt, Artificial Sequence
  Description of Artificial Sequence: Synthetic oligonucleotide
cgcgaggcuagacccuggg

SEQ ID NO: 1000808 - RNA, 19 nt, Artificial Sequence
  Description of Artificial Sequence: Synthetic oligonucleotide
gaaggcuacggaagcccuu

SEQ ID NO: 1000809 - RNA, 19 nt, Artificial Sequence
  Description of Artificial Sequence: Synthetic oligonucleotide
ggaacauuguagggaguau

SEQ ID NO: 1000810 - RNA, 19 nt, Artificial Sequence
  Description of Artificial Sequence: Synthetic oligonucleotide
cucgaggggcauugccaua

SEQ ID NO: 1000811 - RNA, 19 nt, Artificial Sequence
  Description of Artificial Sequence: Synthetic oligonucleotide
ccgaggggaaccgccgaag

SEQ ID NO: 1000812 - RNA, 19 nt, Artificial Sequence
  Description of Artificial Sequence: Synthetic oligonucleotide
gcugucgaaccagcuggca

SEQ ID NO: 1000813 - RNA, 19 nt, Artificial Sequence
  Description of Artificial Sequence: Synthetic oligonucleotide
ccaacacuuggaguaggaa

SEQ ID NO: 1000814 - RNA, 19 nt, Artificial Sequence
  Description of Artificial Sequence: Synthetic oligonucleotide
ggccaucaauguggcggag

SEQ ID NO: 1000815 - RNA, 19 nt, Artificial Sequence
  Description of Artificial Sequence: Synthetic oligonucleotide
gguacuccgcauaggcccu

SEQ ID NO: 1000816 - RNA, 19 nt, Artificial Sequence
  Description of Artificial Sequence: Synthetic oligonucleotide
cccggauguauagcucgug

SEQ ID NO: 1000817 - RNA, 19 nt, Artificial Sequence
  Description of Artificial Sequence: Synthetic oligonucleotide
ccucuauguguuuccggcu

SEQ ID NO: 1000818 - RNA, 19 nt, Artificial Sequence
  Description of Artificial Sequence: Synthetic oligonucleotide
ggcagggcuuuucucggau

SEQ ID NO: 1000819 - RNA, 19 nt, Artificial Sequence
  Description of Artificial Sequence: Synthetic oligonucleotide
gcaauuccuccaccccugu

SEQ ID NO: 1000820 - RNA, 19 nt, Artificial Sequence
  Description of Artificial Sequence: Synthetic oligonucleotide
gcggacugagggcuucucu

SEQ ID NO: 1000821 - RNA, 19 nt, Artificial Sequence
  Description of Artificial Sequence: Synthetic oligonucleotide
caguaucauuguccuguuu

SEQ ID NO: 1000822 - RNA, 19 nt, Artificial Sequence
  Description of Artificial Sequence: Synthetic oligonucleotide
ccagcacaaaagucaguau

SEQ ID NO: 1000823 - RNA, 19 nt, Artificial Sequence
  Description of Artificial Sequence: Synthetic oligonucleotide
ggugacagucuuggagcgu

SEQ ID NO: 1000824 - RNA, 19 nt, Artificial Sequence
  Description of Artificial Sequence: Synthetic oligonucleotide
ccggcuagccgagcccgcc

SEQ ID NO: 1000825 - RNA, 19 nt, Artificial Sequence
  Description of Artificial Sequence: Synthetic oligonucleotide
gcccgaagccaaagccaug

SEQ ID NO: 1000826 - RNA, 19 nt, Artificial Sequence
  Description of Artificial Sequence: Synthetic oligonucleotide
gcaggcuagcaggccaaaa

SEQ ID NO: 1000827 - RNA, 19 nt, Artificial Sequence
  Description of Artificial Sequence: Synthetic oligonucleotide
cccggcuagccgagcccgc

SEQ ID NO: 1000828 - RNA, 19 nt, Artificial Sequence
  Description of Artificial Sequence: Synthetic oligonucleotide
gccacgucgauggcugacu

SEQ ID NO: 1000829 - RNA, 19 nt, Artificial Sequence
  Description of Artificial Sequence: Synthetic oligonucleotide
caccugucugaggcccuaa

SEQ ID NO: 1000830 - RNA, 19 nt, Artificial Sequence
  Description of Artificial Sequence: Synthetic oligonucleotide
gcagucgacccgcccggcu

SEQ ID NO: 1000831 - RNA, 19 nt, Artificial Sequence
  Description of Artificial Sequence: Synthetic oligonucleotide
ccccaagacgggccgaagu

SEQ ID NO: 1000832 - RNA, 19 nt, Artificial Sequence
  Description of Artificial Sequence: Synthetic oligonucleotide
ccgccccgaaggccgcugc

SEQ ID NO: 1000833 - RNA, 19 nt, Artificial Sequence
  Description of Artificial Sequence: Synthetic oligonucleotide
gcccggguccgaggggaac

SEQ ID NO: 1000834 - RNA, 19 nt, Artificial Sequence
  Description of Artificial Sequence: Synthetic oligonucleotide
cggacucgaggggcauugc

SEQ ID NO: 1000835 - RNA, 19 nt, Artificial Sequence
  Description of Artificial Sequence: Synthetic oligonucleotide
gcccggauguauagcucgu

SEQ ID NO: 1000836 - RNA, 19 nt, Artificial Sequence
  Description of Artificial Sequence: Synthetic oligonucleotide
cggguccgaggggaaccgc

SEQ ID NO: 1000837 - RNA, 19 nt, Artificial Sequence
  Description of Artificial Sequence: Synthetic oligonucleotide
ccaccugucugaggcccua

SEQ ID NO: 1000838 - RNA, 19 nt, Artificial Sequence
  Description of Artificial Sequence: Synthetic oligonucleotide
cgucgauggcugacugguu

SEQ ID NO: 1000839 - RNA, 19 nt, Artificial Sequence
  Description of Artificial Sequence: Synthetic oligonucleotide
gcccgccccgaaggccgcu

SEQ ID NO: 1000840 - RNA, 19 nt, Artificial Sequence
  Description of Artificial Sequence: Synthetic oligonucleotide
aauuggaucuguuugaucc

SEQ ID NO: 1000841 - RNA, 19 nt, Artificial Sequence
  Description of Artificial Sequence: Synthetic oligonucleotide
auagucuauagcuuuagcc

SEQ ID NO: 1000842 - RNA, 19 nt, Artificial Sequence
  Description of Artificial Sequence: Synthetic oligonucleotide
aagaguuuagaguuggagg

SEQ ID NO: 1000843 - RNA, 19 nt, Artificial Sequence
  Description of Artificial Sequence: Synthetic oligonucleotide
cuauucaaaucaaugagcg

SEQ ID NO: 1000844 - RNA, 19 nt, Artificial Sequence
  Description of Artificial Sequence: Synthetic oligonucleotide
aaauuguacccacaugaac

SEQ ID NO: 1000845 - RNA, 19 nt, Artificial Sequence
  Description of Artificial Sequence: Synthetic oligonucleotide
ucuauucaaaucaaugagc

SEQ ID NO: 1000846 - RNA, 19 nt, Artificial Sequence
  Description of Artificial Sequence: Synthetic oligonucleotide
ugaacaccaguuuucaugg

SEQ ID NO: 1000847 - RNA, 19 nt, Artificial Sequence
  Description of Artificial Sequence: Synthetic oligonucleotide
auucaaaucaaugagcguc

SEQ ID NO: 1000848 - RNA, 19 nt, Artificial Sequence
  Description of Artificial Sequence: Synthetic oligonucleotide
aaaguugagccacugaacu

SEQ ID NO: 1000849 - RNA, 19 nt, Artificial Sequence
  Description of Artificial Sequence: Synthetic oligonucleotide
aauauugaccaccugcuga

SEQ ID NO: 1000850 - RNA, 19 nt, Artificial Sequence
  Description of Artificial Sequence: Synthetic oligonucleotide
aaacgaacgaguuucauuu

SEQ ID NO: 1000851 - RNA, 19 nt, Artificial Sequence
  Description of Artificial Sequence: Synthetic oligonucleotide
acgaguuucauuuagaauu

SEQ ID NO: 1000852 - RNA, 19 nt, Artificial Sequence
  Description of Artificial Sequence: Synthetic oligonucleotide
uguuuccagacaaugaggc

SEQ ID NO: 1000853 - RNA, 19 nt, Artificial Sequence
  Description of Artificial Sequence: Synthetic oligonucleotide
uaaauaguacagaagagua

SEQ ID NO: 1000854 - RNA, 19 nt, Artificial Sequence
  Description of Artificial Sequence: Synthetic oligonucleotide
uuauaaucaaacgaacgag

SEQ ID NO: 1000855 - RNA, 19 nt, Artificial Sequence
  Description of Artificial Sequence: Synthetic oligonucleotide
uauaaucaaacgaacgagu

SEQ ID NO: 1000856 - RNA, 19 nt, Artificial Sequence
  Description of Artificial Sequence: Synthetic oligonucleotide
caucauagagcacuaaggg

SEQ ID NO: 1000857 - RNA, 19 nt, Artificial Sequence
  Description of Artificial Sequence: Synthetic oligonucleotide
ucuggcauaaaccuguagu

SEQ ID NO: 1000858 - RNA, 19 nt, Artificial Sequence
  Description of Artificial Sequence: Synthetic oligonucleotide
uagucuauagcuuuagcca

SEQ ID NO: 1000859 - RNA, 19 nt, Artificial Sequence
  Description of Artificial Sequence: Synthetic oligonucleotide
aaaaugguuuacccucucg

SEQ ID NO: 1000860 - RNA, 19 nt, Artificial Sequence
  Description of Artificial Sequence: Synthetic oligonucleotide
agagucugcaucugcaggc

SEQ ID NO: 1000861 - RNA, 19 nt, Artificial Sequence
  Description of Artificial Sequence: Synthetic oligonucleotide
uucaguaaugugaagcugu

SEQ ID NO: 1000862 - RNA, 19 nt, Artificial Sequence
  Description of Artificial Sequence: Synthetic oligonucleotide
cucuauucaaaucaaugag

SEQ ID NO: 1000863 - RNA, 19 nt, Artificial Sequence
  Description of Artificial Sequence: Synthetic oligonucleotide
cuuauaaucaaacgaacga

SEQ ID NO: 1000864 - RNA, 19 nt, Artificial Sequence
  Description of Artificial Sequence: Synthetic oligonucleotide
gacggcaagauucuguugc

SEQ ID NO: 1000865 - RNA, 19 nt, Artificial Sequence
  Description of Artificial Sequence: Synthetic oligonucleotide
ucucaguugacccucugcc

SEQ ID NO: 1000866 - RNA, 19 nt, Artificial Sequence
  Description of Artificial Sequence: Synthetic oligonucleotide
uuguguucaccuuuccucg

SEQ ID NO: 1000867 - RNA, 19 nt, Artificial Sequence
  Description of Artificial Sequence: Synthetic oligonucleotide
gacacuguacgucaagugc

SEQ ID NO: 1000868 - RNA, 19 nt, Artificial Sequence
  Description of Artificial Sequence: Synthetic oligonucleotide
aaaccuguagucuugcuuu

SEQ ID NO: 1000869 - RNA, 19 nt, Artificial Sequence
  Description of Artificial Sequence: Synthetic oligonucleotide
ugguuuacccucucgagag

SEQ ID NO: 1000870 - RNA, 19 nt, Artificial Sequence
  Description of Artificial Sequence: Synthetic oligonucleotide
uuuauguggcaguucagug

SEQ ID NO: 1000871 - RNA, 19 nt, Artificial Sequence
  Description of Artificial Sequence: Synthetic oligonucleotide
ugaugcacggauacauugg

SEQ ID NO: 1000872 - RNA, 19 nt, Artificial Sequence
  Description of Artificial Sequence: Synthetic oligonucleotide
gauacauuggcgucuacuc

SEQ ID NO: 1000873 - RNA, 19 nt, Artificial Sequence
  Description of Artificial Sequence: Synthetic oligonucleotide
agaaauugcuuuacugucc

SEQ ID NO: 1000874 - RNA, 19 nt, Artificial Sequence
  Description of Artificial Sequence: Synthetic oligonucleotide
uuagaguuggaggaaaucu

SEQ ID NO: 1000875 - RNA, 19 nt, Artificial Sequence
  Description of Artificial Sequence: Synthetic oligonucleotide
gagauguggcaucauagag

SEQ ID NO: 1000876 - RNA, 19 nt, Artificial Sequence
  Description of Artificial Sequence: Synthetic oligonucleotide
gagagacacaaauuguacc

SEQ ID NO: 1000877 - RNA, 19 nt, Artificial Sequence
  Description of Artificial Sequence: Synthetic oligonucleotide
ucaauccacgcuaaagccc

SEQ ID NO: 1000878 - RNA, 19 nt, Artificial Sequence
  Description of Artificial Sequence: Synthetic oligonucleotide
uuaaucaccgcugccauca

SEQ ID NO: 1000879 - RNA, 19 nt, Artificial Sequence
  Description of Artificial Sequence: Synthetic oligonucleotide
auauugaccaccugcugag

SEQ ID NO: 1000880 - RNA, 19 nt, Artificial Sequence
  Description of Artificial Sequence: Synthetic oligonucleotide
agauguggcaucauagagc

SEQ ID NO: 1000881 - RNA, 19 nt, Artificial Sequence
  Description of Artificial Sequence: Synthetic oligonucleotide
aaccggcaaaguuccaggc

SEQ ID NO: 1000882 - RNA, 19 nt, Artificial Sequence
  Description of Artificial Sequence: Synthetic oligonucleotide
acaggacucucacugacgg

SEQ ID NO: 1000883 - RNA, 19 nt, Artificial Sequence
  Description of Artificial Sequence: Synthetic oligonucleotide
uguccccuagcccaguugg

SEQ ID NO: 1000884 - RNA, 19 nt, Artificial Sequence
  Description of Artificial Sequence: Synthetic oligonucleotide
aaguugagccacugaacuc

SEQ ID NO: 1000885 - RNA, 19 nt, Artificial Sequence
  Description of Artificial Sequence: Synthetic oligonucleotide
uucacuuccguccggacac

SEQ ID NO: 1000886 - RNA, 19 nt, Artificial Sequence
  Description of Artificial Sequence: Synthetic oligonucleotide
uuagccaaaaucugaggcu

SEQ ID NO: 1000887 - RNA, 19 nt, Artificial Sequence
  Description of Artificial Sequence: Synthetic oligonucleotide
gaagaguuuagaguuggag

SEQ ID NO: 1000888 - RNA, 19 nt, Artificial Sequence
  Description of Artificial Sequence: Synthetic oligonucleotide
uucaaaucaaugagcgucu

SEQ ID NO: 1000889 - RNA, 19 nt, Artificial Sequence
  Description of Artificial Sequence: Synthetic oligonucleotide
uagaguuggaggaaaucug

SEQ ID NO: 1000890 - RNA, 19 nt, Artificial Sequence
  Description of Artificial Sequence: Synthetic oligonucleotide
ugaacucuguccccuagcc

SEQ ID NO: 1000891 - RNA, 19 nt, Artificial Sequence
  Description of Artificial Sequence: Synthetic oligonucleotide
aggucauagggucucagag

SEQ ID NO: 1000892 - RNA, 19 nt, Artificial Sequence
  Description of Artificial Sequence: Synthetic oligonucleotide
agacacaaauuguacccac

SEQ ID NO: 1000893 - RNA, 19 nt, Artificial Sequence
  Description of Artificial Sequence: Synthetic oligonucleotide
ucuguugcuuuaaauagua

SEQ ID NO: 1000894 - RNA, 19 nt, Artificial Sequence
  Description of Artificial Sequence: Synthetic oligonucleotide
aguucagugauuugucucu

SEQ ID NO: 1000895 - RNA, 19 nt, Artificial Sequence
  Description of Artificial Sequence: Synthetic oligonucleotide
uggacaugaauuuccaguc

SEQ ID NO: 1000896 - RNA, 19 nt, Artificial Sequence
  Description of Artificial Sequence: Synthetic oligonucleotide
uguugggugaucugguagc

SEQ ID NO: 1000897 - RNA, 19 nt, Artificial Sequence
  Description of Artificial Sequence: Synthetic oligonucleotide
gucaauccacgcuaaagcc

SEQ ID NO: 1000898 - RNA, 19 nt, Artificial Sequence
  Description of Artificial Sequence: Synthetic oligonucleotide
acuucgagaaggccaacuc

SEQ ID NO: 1000899 - RNA, 19 nt, Artificial Sequence
  Description of Artificial Sequence: Synthetic oligonucleotide
uucugagccguguggaggg

SEQ ID NO: 1000900 - RNA, 19 nt, Artificial Sequence
  Description of Artificial Sequence: Synthetic oligonucleotide
aacgaguuucauuuagaau

SEQ ID NO: 1000901 - RNA, 19 nt, Artificial Sequence
  Description of Artificial Sequence: Synthetic oligonucleotide
cagagauguggcaucauag

SEQ ID NO: 1000902 - RNA, 19 nt, Artificial Sequence
  Description of Artificial Sequence: Synthetic oligonucleotide
ucgauccugcauuaguucc

SEQ ID NO: 1000903 - RNA, 19 nt, Artificial Sequence
  Description of Artificial Sequence: Synthetic oligonucleotide
caguaggccaacuucauuc

SEQ ID NO: 1000904 - RNA, 19 nt, Artificial Sequence
  Description of Artificial Sequence: Synthetic oligonucleotide
gaugcacggauacauuggc

SEQ ID NO: 1000905 - RNA, 19 nt, Artificial Sequence
  Description of Artificial Sequence: Synthetic oligonucleotide
ugcacggauacauuggcgu

SEQ ID NO: 1000906 - RNA, 19 nt, Artificial Sequence
  Description of Artificial Sequence: Synthetic oligonucleotide
ucuacacaccuccuguuga

SEQ ID NO: 1000907 - RNA, 19 nt, Artificial Sequence
  Description of Artificial Sequence: Synthetic oligonucleotide
cugagucccacuucgcucg

SEQ ID NO: 1000908 - RNA, 19 nt, Artificial Sequence
  Description of Artificial Sequence: Synthetic oligonucleotide
gaaccggcaaaguuccagg

SEQ ID NO: 1000909 - RNA, 19 nt, Artificial Sequence
  Description of Artificial Sequence: Synthetic oligonucleotide
aagaguauucaggacccag

SEQ ID NO: 1000910 - RNA, 19 nt, Artificial Sequence
  Description of Artificial Sequence: Synthetic oligonucleotide
gaggucaaggagcucggcg

SEQ ID NO: 1000911 - RNA, 19 nt, Artificial Sequence
  Description of Artificial Sequence: Synthetic oligonucleotide
ucucgagagguguagcuug

SEQ ID NO: 1000912 - RNA, 19 nt, Artificial Sequence
  Description of Artificial Sequence: Synthetic oligonucleotide
uucuguugcuuuaaauagu

SEQ ID NO: 1000913 - RNA, 19 nt, Artificial Sequence
  Description of Artificial Sequence: Synthetic oligonucleotide
agcuuauaaucaaacgaac

SEQ ID NO: 1000914 - RNA, 19 nt, Artificial Sequence
  Description of Artificial Sequence: Synthetic oligonucleotide
agaggacacacauuugugu

SEQ ID NO: 1000915 - RNA, 19 nt, Artificial Sequence
  Description of Artificial Sequence: Synthetic oligonucleotide
uuuagaauuucaccuccau

SEQ ID NO: 1000916 - RNA, 19 nt, Artificial Sequence
  Description of Artificial Sequence: Synthetic oligonucleotide
uuucucugguugcacuggg

SEQ ID NO: 1000917 - RNA, 19 nt, Artificial Sequence
  Description of Artificial Sequence: Synthetic oligonucleotide
agcucaggaagcauguccc

SEQ ID NO: 1000918 - RNA, 19 nt, Artificial Sequence
  Description of Artificial Sequence: Synthetic oligonucleotide
acgaacgaguuucauuuag

SEQ ID NO: 1000919 - RNA, 19 nt, Artificial Sequence
  Description of Artificial Sequence: Synthetic oligonucleotide
uagcuuuagccaaaaucug

SEQ ID NO: 1000920 - RNA, 19 nt, Artificial Sequence
  Description of Artificial Sequence: Synthetic oligonucleotide
gcuuauaaucaaacgaacg

SEQ ID NO: 1000921 - RNA, 19 nt, Artificial Sequence
  Description of Artificial Sequence: Synthetic oligonucleotide
agccagucaucacugcagc

SEQ ID NO: 1000922 - RNA, 19 nt, Artificial Sequence
  Description of Artificial Sequence: Synthetic oligonucleotide
ugagagucugcaucugcag

SEQ ID NO: 1000923 - RNA, 19 nt, Artificial Sequence
  Description of Artificial Sequence: Synthetic oligonucleotide
cacgcuaaagcccagcguc

SEQ ID NO: 1000924 - RNA, 19 nt, Artificial Sequence
  Description of Artificial Sequence: Synthetic oligonucleotide
gugaugcacggauacauug

SEQ ID NO: 1000925 - RNA, 19 nt, Artificial Sequence
  Description of Artificial Sequence: Synthetic oligonucleotide
ucaaggagcucggcgagcg

SEQ ID NO: 1000926 - RNA, 19 nt, Artificial Sequence
  Description of Artificial Sequence: Synthetic oligonucleotide
agucuauagcuuuagccaa

SEQ ID NO: 1000927 - RNA, 19 nt, Artificial Sequence
  Description of Artificial Sequence: Synthetic oligonucleotide
cuucgagaaggccaacucc

SEQ ID NO: 1000928 - RNA, 19 nt, Artificial Sequence
  Description of Artificial Sequence: Synthetic oligonucleotide
aaccuguagucuugcuuuc

SEQ ID NO: 1000929 - RNA, 19 nt, Artificial Sequence
  Description of Artificial Sequence: Synthetic oligonucleotide
uauucaaaucaaugagcgu

SEQ ID NO: 1000930 - RNA, 19 nt, Artificial Sequence
  Description of Artificial Sequence: Synthetic oligonucleotide
ucagugauuugucucugaa

SEQ ID NO: 1000931 - RNA, 19 nt, Artificial Sequence
  Description of Artificial Sequence: Synthetic oligonucleotide
agcucuauucaaaucaaug

SEQ ID NO: 1000932 - RNA, 19 nt, Artificial Sequence
  Description of Artificial Sequence: Synthetic oligonucleotide
uagccaaaaucugaggcug

SEQ ID NO: 1000933 - RNA, 19 nt, Artificial Sequence
  Description of Artificial Sequence: Synthetic oligonucleotide
gucuacucucaguugaccc

SEQ ID NO: 1000934 - RNA, 19 nt, Artificial Sequence
  Description of Artificial Sequence: Synthetic oligonucleotide
aaauaguacagaagaguau

SEQ ID NO: 1000935 - RNA, 19 nt, Artificial Sequence
  Description of Artificial Sequence: Synthetic oligonucleotide
ucauggaggcuuuugccac

SEQ ID NO: 1000936 - RNA, 19 nt, Artificial Sequence
  Description of Artificial Sequence: Synthetic oligonucleotide
gagagguguagcuuggcca

SEQ ID NO: 1000937 - RNA, 19 nt, Artificial Sequence
  Description of Artificial Sequence: Synthetic oligonucleotide
ucugguugcacuggggagc

SEQ ID NO: 1000938 - RNA, 19 nt, Artificial Sequence
  Description of Artificial Sequence: Synthetic oligonucleotide
cacaugaacaccaguuuuc

SEQ ID NO: 1000939 - RNA, 19 nt, Artificial Sequence
  Description of Artificial Sequence: Synthetic oligonucleotide
gaacgaguuucauuuagaa

SEQ ID NO: 1000940 - RNA, 19 nt, Artificial Sequence
  Description of Artificial Sequence: Synthetic oligonucleotide
ucauagucuauagcuuuag

SEQ ID NO: 1000941 - RNA, 19 nt, Artificial Sequence
  Description of Artificial Sequence: Synthetic oligonucleotide
cagcuuauaaucaaacgaa

SEQ ID NO: 1000942 - RNA, 19 nt, Artificial Sequence
  Description of Artificial Sequence: Synthetic oligonucleotide
ucuguuugauccucacugu

SEQ ID NO: 1000943 - RNA, 19 nt, Artificial Sequence
  Description of Artificial Sequence: Synthetic oligonucleotide
augguuuacccucucgaga

SEQ ID NO: 1000944 - RNA, 19 nt, Artificial Sequence
  Description of Artificial Sequence: Synthetic oligonucleotide
gaaaguugagccacugaac

SEQ ID NO: 1000945 - RNA, 19 nt, Artificial Sequence
  Description of Artificial Sequence: Synthetic oligonucleotide
auucaggacccaguuaauc

SEQ ID NO: 1000946 - RNA, 19 nt, Artificial Sequence
  Description of Artificial Sequence: Synthetic oligonucleotide
gacacccagagguuccccg

SEQ ID NO: 1000947 - RNA, 19 nt, Artificial Sequence
  Description of Artificial Sequence: Synthetic oligonucleotide
auaguacagaagaguauuc

SEQ ID NO: 1000948 - RNA, 19 nt, Artificial Sequence
  Description of Artificial Sequence: Synthetic oligonucleotide
agacacuguacgucaagug

SEQ ID NO: 1000949 - RNA, 19 nt, Artificial Sequence
  Description of Artificial Sequence: Synthetic oligonucleotide
aacuguuuccagacaauga

SEQ ID NO: 1000950 - RNA, 19 nt, Artificial Sequence
  Description of Artificial Sequence: Synthetic oligonucleotide
gaaguagugcuuccuguca

SEQ ID NO: 1000951 - RNA, 19 nt, Artificial Sequence
  Description of Artificial Sequence: Synthetic oligonucleotide
auacauuggcgucuacucu

SEQ ID NO: 1000952 - RNA, 19 nt, Artificial Sequence
  Description of Artificial Sequence: Synthetic oligonucleotide
gcacaucucacaaugacag

SEQ ID NO: 1000953 - RNA, 19 nt, Artificial Sequence
  Description of Artificial Sequence: Synthetic oligonucleotide
cauagucuauagcuuuagc

SEQ ID NO: 1000954 - RNA, 19 nt, Artificial Sequence
  Description of Artificial Sequence: Synthetic oligonucleotide
aguaggccaacuucauuca

SEQ ID NO: 1000955 - RNA, 19 nt, Artificial Sequence
  Description of Artificial Sequence: Synthetic oligonucleotide
gaucugguagccugcagga

SEQ ID NO: 1000956 - RNA, 19 nt, Artificial Sequence
  Description of Artificial Sequence: Synthetic oligonucleotide
gcucuauucaaaucaauga

SEQ ID NO: 1000957 - RNA, 19 nt, Artificial Sequence
  Description of Artificial Sequence: Synthetic oligonucleotide
ucuggcaguaucccauacu

SEQ ID NO: 1000958 - RNA, 19 nt, Artificial Sequence
  Description of Artificial Sequence: Synthetic oligonucleotide
ucugagucccacuucgcuc

SEQ ID NO: 1000959 - RNA, 19 nt, Artificial Sequence
  Description of Artificial Sequence: Synthetic oligonucleotide
cuuuuaucacacuuuggaa

SEQ ID NO: 1000960 - RNA, 19 nt, Artificial Sequence
  Description of Artificial Sequence: Synthetic oligonucleotide
uuuagaguuggaggaaauc

SEQ ID NO: 1000961 - RNA, 19 nt, Artificial Sequence
  Description of Artificial Sequence: Synthetic oligonucleotide
caggucaggcuccaggacc

SEQ ID NO: 1000962 - RNA, 19 nt, Artificial Sequence
  Description of Artificial Sequence: Synthetic oligonucleotide
cuaaagcccagcgucuucc

SEQ ID NO: 1000963 - RNA, 19 nt, Artificial Sequence
  Description of Artificial Sequence: Synthetic oligonucleotide
auuggaucuguuugauccu

SEQ ID NO: 1000964 - RNA, 19 nt, Artificial Sequence
  Description of Artificial Sequence: Synthetic oligonucleotide
caauccacgcuaaagccca

SEQ ID NO: 1000965 - RNA, 19 nt, Artificial Sequence
  Description of Artificial Sequence: Synthetic oligonucleotide
ucgagaaggccaacuccag

SEQ ID NO: 1000966 - RNA, 19 nt, Artificial Sequence
  Description of Artificial Sequence: Synthetic oligonucleotide
agaaccggcaaaguuccag

SEQ ID NO: 1000967 - RNA, 19 nt, Artificial Sequence
  Description of Artificial Sequence: Synthetic oligonucleotide
ggaaaguugagccacugaa

SEQ ID NO: 1000968 - RNA, 19 nt, Artificial Sequence
  Description of Artificial Sequence: Synthetic oligonucleotide
accuguuuagcugcugagg

SEQ ID NO: 1000969 - RNA, 19 nt, Artificial Sequence
  Description of Artificial Sequence: Synthetic oligonucleotide
gacaugaauuuccaguccu

SEQ ID NO: 1000970 - RNA, 19 nt, Artificial Sequence
  Description of Artificial Sequence: Synthetic oligonucleotide
uuccccggggugaugcacg

SEQ ID NO: 1000971 - RNA, 19 nt, Artificial Sequence
  Description of Artificial Sequence: Synthetic oligonucleotide
cccauuggcagcaauuggg

SEQ ID NO: 1000972 - RNA, 19 nt, Artificial Sequence
  Description of Artificial Sequence: Synthetic oligonucleotide
ucacugacggcaagauucu

SEQ ID NO: 1000973 - RNA, 19 nt, Artificial Sequence
  Description of Artificial Sequence: Synthetic oligonucleotide
cacaaugacaguuuccucu

SEQ ID NO: 1000974 - RNA, 19 nt, Artificial Sequence
  Description of Artificial Sequence: Synthetic oligonucleotide
aggacccaguuaaucaccc

SEQ ID NO: 1000975 - RNA, 19 nt, Artificial Sequence
  Description of Artificial Sequence: Synthetic oligonucleotide
auaaucaaacgaacgaguu

SEQ ID NO: 1000976 - RNA, 19 nt, Artificial Sequence
  Description of Artificial Sequence: Synthetic oligonucleotide
agucccacuucgcucgcgg

SEQ ID NO: 1000977 - RNA, 19 nt, Artificial Sequence
  Description of Artificial Sequence: Synthetic oligonucleotide
uccaguccuaccacagcug

SEQ ID NO: 1000978 - RNA, 19 nt, Artificial Sequence
  Description of Artificial Sequence: Synthetic oligonucleotide
cuucugagccguguggagg

SEQ ID NO: 1000979 - RNA, 19 nt, Artificial Sequence
  Description of Artificial Sequence: Synthetic oligonucleotide
agggcuugaaggaucaucu

SEQ ID NO: 1000980 - RNA, 19 nt, Artificial Sequence
  Description of Artificial Sequence: Synthetic oligonucleotide
uuuacccucucgagaggug

SEQ ID NO: 1000981 - RNA, 19 nt, Artificial Sequence
  Description of Artificial Sequence: Synthetic oligonucleotide
uggcaguaucccauacugc

SEQ ID NO: 1000982 - RNA, 19 nt, Artificial Sequence
  Description of Artificial Sequence: Synthetic oligonucleotide
uuggacgugggcccagucu

SEQ ID NO: 1000983 - RNA, 19 nt, Artificial Sequence
  Description of Artificial Sequence: Synthetic oligonucleotide
acugagagacacaaauugu

SEQ ID NO: 1000984 - RNA, 19 nt, Artificial Sequence
  Description of Artificial Sequence: Synthetic oligonucleotide
gaacucuguccccuagccc

SEQ ID NO: 1000985 - RNA, 19 nt, Artificial Sequence
  Description of Artificial Sequence: Synthetic oligonucleotide
ugcccauuggcagcaauug

SEQ ID NO: 1000986 - RNA, 19 nt, Artificial Sequence
  Description of Artificial Sequence: Synthetic oligonucleotide
uguugagauucuucacuuc

SEQ ID NO: 1000987 - RNA, 19 nt, Artificial Sequence
  Description of Artificial Sequence: Synthetic oligonucleotide
uagacacuguacgucaagu

SEQ ID NO: 1000988 - RNA, 19 nt, Artificial Sequence
  Description of Artificial Sequence: Synthetic oligonucleotide
cugagagacacaaauugua

SEQ ID NO: 1000989 - RNA, 19 nt, Artificial Sequence
  Description of Artificial Sequence: Synthetic oligonucleotide
uguucaccuuuccucggcu

SEQ ID NO: 1000990 - RNA, 19 nt, Artificial Sequence
  Description of Artificial Sequence: Synthetic oligonucleotide
caggacccaguuaaucacc

SEQ ID NO: 1000991 - RNA, 19 nt, Artificial Sequence
  Description of Artificial Sequence: Synthetic oligonucleotide
acaugaacaccaguuuuca

SEQ ID NO: 1000992 - RNA, 19 nt, Artificial Sequence
  Description of Artificial Sequence: Synthetic oligonucleotide
cuguugagaaccggcaaag

SEQ ID NO: 1000993 - RNA, 19 nt, Artificial Sequence
  Description of Artificial Sequence: Synthetic oligonucleotide
uuacuguccaggaggucaa

SEQ ID NO: 1000994 - RNA, 19 nt, Artificial Sequence
  Description of Artificial Sequence: Synthetic oligonucleotide
aaccgccgucaauccacgc

SEQ ID NO: 1000995 - RNA, 19 nt, Artificial Sequence
  Description of Artificial Sequence: Synthetic oligonucleotide
uguccugcuccaauuggau

SEQ ID NO: 1000996 - RNA, 19 nt, Artificial Sequence
  Description of Artificial Sequence: Synthetic oligonucleotide
cauucaguaaugugaagcu

SEQ ID NO: 1000997 - RNA, 19 nt, Artificial Sequence
  Description of Artificial Sequence: Synthetic oligonucleotide
uuagcugcugaggaagaaa

SEQ ID NO: 1000998 - RNA, 19 nt, Artificial Sequence
  Description of Artificial Sequence: Synthetic oligonucleotide
cucgauccugcauuaguuc

SEQ ID NO: 1000999 - RNA, 19 nt, Artificial Sequence
  Description of Artificial Sequence: Synthetic oligonucleotide
uccuguugagaaccggcaa

SEQ ID NO: 1001000 - RNA, 19 nt, Artificial Sequence
  Description of Artificial Sequence: Synthetic oligonucleotide
gaccacuucgagaaggcca

SEQ ID NO: 1001001 - RNA, 19 nt, Artificial Sequence
  Description of Artificial Sequence: Synthetic oligonucleotide
uucagugauuugucucuga

SEQ ID NO: 1001002 - RNA, 19 nt, Artificial Sequence
  Description of Artificial Sequence: Synthetic oligonucleotide
agcuuuagccaaaaucuga

SEQ ID NO: 1001003 - RNA, 19 nt, Artificial Sequence
  Description of Artificial Sequence: Synthetic oligonucleotide
ucucaaguucagugauuug

SEQ ID NO: 1001004 - RNA, 19 nt, Artificial Sequence
  Description of Artificial Sequence: Synthetic oligonucleotide
agguuccccggggugaugc

SEQ ID NO: 1001005 - RNA, 19 nt, Artificial Sequence
  Description of Artificial Sequence: Synthetic oligonucleotide
uguuugccuggcugguucc

SEQ ID NO: 1001006 - RNA, 19 nt, Artificial Sequence
  Description of Artificial Sequence: Synthetic oligonucleotide
cucugguugcacuggggag

SEQ ID NO: 1001007 - RNA, 19 nt, Artificial Sequence
  Description of Artificial Sequence: Synthetic oligonucleotide
agcccaguuggacgugggc

SEQ ID NO: 1001008 - RNA, 19 nt, Artificial Sequence
  Description of Artificial Sequence: Synthetic oligonucleotide
auuggcgucuacucucagu

SEQ ID NO: 1001009 - RNA, 19 nt, Artificial Sequence
  Description of Artificial Sequence: Synthetic oligonucleotide
aaaguuccaggcagagaug

SEQ ID NO: 1001010 - RNA, 19 nt, Artificial Sequence
  Description of Artificial Sequence: Synthetic oligonucleotide
gccauguuugccuggcugg

SEQ ID NO: 1001011 - RNA, 19 nt, Artificial Sequence
  Description of Artificial Sequence: Synthetic oligonucleotide
aguauucaggacccaguua

SEQ ID NO: 1001012 - RNA, 19 nt, Artificial Sequence
  Description of Artificial Sequence: Synthetic oligonucleotide
ucuugguggucaucugacu

SEQ ID NO: 1001013 - RNA, 19 nt, Artificial Sequence
  Description of Artificial Sequence: Synthetic oligonucleotide
caaauuguacccacaugaa

SEQ ID NO: 1001014 - RNA, 19 nt, Artificial Sequence
  Description of Artificial Sequence: Synthetic oligonucleotide
uuacccucucgagaggugu

SEQ ID NO: 1001015 - RNA, 19 nt, Artificial Sequence
  Description of Artificial Sequence: Synthetic oligonucleotide
aggccaacuucauucagua

SEQ ID NO: 1001016 - RNA, 19 nt, Artificial Sequence
  Description of Artificial Sequence: Synthetic oligonucleotide
agcaauugggagccucugu

SEQ ID NO: 1001017 - RNA, 19 nt, Artificial Sequence
  Description of Artificial Sequence: Synthetic oligonucleotide
aacgaacgaguuucauuua

SEQ ID NO: 1001018 - RNA, 19 nt, Artificial Sequence
  Description of Artificial Sequence: Synthetic oligonucleotide
ugagcgucugggaccucag

SEQ ID NO: 1001019 - RNA, 19 nt, Artificial Sequence
  Description of Artificial Sequence: Synthetic oligonucleotide
ucccacuucgcucgcggga

SEQ ID NO: 1001020 - RNA, 19 nt, Artificial Sequence
  Description of Artificial Sequence: Synthetic oligonucleotide
ccgaagcuggucaauauug

SEQ ID NO: 1001021 - RNA, 19 nt, Artificial Sequence
  Description of Artificial Sequence: Synthetic oligonucleotide
ggacaugaauuuccagucc

SEQ ID NO: 1001022 - RNA, 19 nt, Artificial Sequence
  Description of Artificial Sequence: Synthetic oligonucleotide
caauuggaucuguuugauc

SEQ ID NO: 1001023 - RNA, 19 nt, Artificial Sequence
  Description of Artificial Sequence: Synthetic oligonucleotide
ugacggcaagauucuguug

SEQ ID NO: 1001024 - RNA, 19 nt, Artificial Sequence
  Description of Artificial Sequence: Synthetic oligonucleotide
accgccgucaauccacgcu

SEQ ID NO: 1001025 - RNA, 19 nt, Artificial Sequence
  Description of Artificial Sequence: Synthetic oligonucleotide
cugaggaagaaauugcuuu

SEQ ID NO: 1001026 - RNA, 19 nt, Artificial Sequence
  Description of Artificial Sequence: Synthetic oligonucleotide
gaaggucugaguagaagua

SEQ ID NO: 1001027 - RNA, 19 nt, Artificial Sequence
  Description of Artificial Sequence: Synthetic oligonucleotide
uuuagcugcugaggaagaa

SEQ ID NO: 1001028 - RNA, 19 nt, Artificial Sequence
  Description of Artificial Sequence: Synthetic oligonucleotide
ggaaggucugaguagaagu

SEQ ID NO: 1001029 - RNA, 19 nt, Artificial Sequence
  Description of Artificial Sequence: Synthetic oligonucleotide
uuccucggcuucugagccg

SEQ ID NO: 1001030 - RNA, 19 nt, Artificial Sequence
  Description of Artificial Sequence: Synthetic oligonucleotide
ucugcccuaguuucuuuua

SEQ ID NO: 1001031 - RNA, 19 nt, Artificial Sequence
  Description of Artificial Sequence: Synthetic oligonucleotide
ggugugacaggacucucac

SEQ ID NO: 1001032 - RNA, 19 nt, Artificial Sequence
  Description of Artificial Sequence: Synthetic oligonucleotide
guguucaccuuuccucggc

SEQ ID NO: 1001033 - RNA, 19 nt, Artificial Sequence
  Description of Artificial Sequence: Synthetic oligonucleotide
uguugagaaccggcaaagu

SEQ ID NO: 1001034 - RNA, 19 nt, Artificial Sequence
  Description of Artificial Sequence: Synthetic oligonucleotide
ucuguugggugaucuggua

SEQ ID NO: 1001035 - RNA, 19 nt, Artificial Sequence
  Description of Artificial Sequence: Synthetic oligonucleotide
ucauagggucucagaggac

SEQ ID NO: 1001036 - RNA, 19 nt, Artificial Sequence
  Description of Artificial Sequence: Synthetic oligonucleotide
guacgucaagugcccauug

SEQ ID NO: 1001037 - RNA, 19 nt, Artificial Sequence
  Description of Artificial Sequence: Synthetic oligonucleotide
ucaaacgaacgaguuucau

SEQ ID NO: 1001038 - RNA, 19 nt, Artificial Sequence
  Description of Artificial Sequence: Synthetic oligonucleotide
augcacggauacauuggcg

SEQ ID NO: 1001039 - RNA, 19 nt, Artificial Sequence
  Description of Artificial Sequence: Synthetic oligonucleotide
uguacgucaagugcccauu

SEQ ID NO: 1001040 - RNA, 19 nt, Artificial Sequence
  Description of Artificial Sequence: Synthetic oligonucleotide
ggcaguaucccauacugcu

SEQ ID NO: 1001041 - RNA, 19 nt, Artificial Sequence
  Description of Artificial Sequence: Synthetic oligonucleotide
guuuauguggcaguucagu

SEQ ID NO: 1001042 - RNA, 19 nt, Artificial Sequence
  Description of Artificial Sequence: Synthetic oligonucleotide
uggucaucugacuccguuu

SEQ ID NO: 1001043 - RNA, 19 nt, Artificial Sequence
  Description of Artificial Sequence: Synthetic oligonucleotide
ucgcucgcgggaaccgccg

SEQ ID NO: 1001044 - RNA, 19 nt, Artificial Sequence
  Description of Artificial Sequence: Synthetic oligonucleotide
ccggcaaaguuccaggcag

SEQ ID NO: 1001045 - RNA, 19 nt, Artificial Sequence
  Description of Artificial Sequence: Synthetic oligonucleotide
ggcgucuacucucaguuga

SEQ ID NO: 1001046 - RNA, 19 nt, Artificial Sequence
  Description of Artificial Sequence: Synthetic oligonucleotide
uugggagccucuguugggu

SEQ ID NO: 1001047 - RNA, 19 nt, Artificial Sequence
  Description of Artificial Sequence: Synthetic oligonucleotide
acggcaagauucuguugcu

SEQ ID NO: 1001048 - RNA, 19 nt, Artificial Sequence
  Description of Artificial Sequence: Synthetic oligonucleotide
uguggcaguucagugccaa

SEQ ID NO: 1001049 - RNA, 19 nt, Artificial Sequence
  Description of Artificial Sequence: Synthetic oligonucleotide
guagugcuuccugucaaac

SEQ ID NO: 1001050 - RNA, 19 nt, Artificial Sequence
  Description of Artificial Sequence: Synthetic oligonucleotide
uugacacggugcaccccag

SEQ ID NO: 1001051 - RNA, 19 nt, Artificial Sequence
  Description of Artificial Sequence: Synthetic oligonucleotide
aguaucccauacugcugga

SEQ ID NO: 1001052 - RNA, 19 nt, Artificial Sequence
  Description of Artificial Sequence: Synthetic oligonucleotide
ucucacugacggcaagauu

SEQ ID NO: 1001053 - RNA, 19 nt, Artificial Sequence
  Description of Artificial Sequence: Synthetic oligonucleotide
acuucgcucgcgggaaccg

SEQ ID NO: 1001054 - RNA, 19 nt, Artificial Sequence
  Description of Artificial Sequence: Synthetic oligonucleotide
acccacaugaacaccaguu

SEQ ID NO: 1001055 - RNA, 19 nt, Artificial Sequence
  Description of Artificial Sequence: Synthetic oligonucleotide
cucaguugacccucugcca

SEQ ID NO: 1001056 - RNA, 19 nt, Artificial Sequence
  Description of Artificial Sequence: Synthetic oligonucleotide
uacacaccuccuguugaga

SEQ ID NO: 1001057 - RNA, 19 nt, Artificial Sequence
  Description of Artificial Sequence: Synthetic oligonucleotide
agagggaccucagcacauc

SEQ ID NO: 1001058 - RNA, 19 nt, Artificial Sequence
  Description of Artificial Sequence: Synthetic oligonucleotide
cuagcccaguuggacgugg

SEQ ID NO: 1001059 - RNA, 19 nt, Artificial Sequence
  Description of Artificial Sequence: Synthetic oligonucleotide
cuccuguugagaaccggca

SEQ ID NO: 1001060 - RNA, 19 nt, Artificial Sequence
  Description of Artificial Sequence: Synthetic oligonucleotide
caguccuaccacagcugcc

SEQ ID NO: 1001061 - RNA, 19 nt, Artificial Sequence
  Description of Artificial Sequence: Synthetic oligonucleotide
gguuuacccucucgagagg

SEQ ID NO: 1001062 - RNA, 19 nt, Artificial Sequence
  Description of Artificial Sequence: Synthetic oligonucleotide
uggcgucuacucucaguug

SEQ ID NO: 1001063 - RNA, 19 nt, Artificial Sequence
  Description of Artificial Sequence: Synthetic oligonucleotide
guucagugauuugucucug

SEQ ID NO: 1001064 - RNA, 19 nt, Artificial Sequence
  Description of Artificial Sequence: Synthetic oligonucleotide
ucccgaagcuggucaauau

SEQ ID NO: 1001065 - RNA, 19 nt, Artificial Sequence
  Description of Artificial Sequence: Synthetic oligonucleotide
uccccuagcccaguuggac

SEQ ID NO: 1001066 - RNA, 19 nt, Artificial Sequence
  Description of Artificial Sequence: Synthetic oligonucleotide
caccaguuuucaugggcuc

SEQ ID NO: 1001067 - RNA, 19 nt, Artificial Sequence
  Description of Artificial Sequence: Synthetic oligonucleotide
uccccggggugaugcacgg

SEQ ID NO: 1001068 - RNA, 19 nt, Artificial Sequence
  Description of Artificial Sequence: Synthetic oligonucleotide
accacuucgagaaggccaa

SEQ ID NO: 1001069 - RNA, 19 nt, Artificial Sequence
  Description of Artificial Sequence: Synthetic oligonucleotide
gaguuuagaguuggaggaa

SEQ ID NO: 1001070 - RNA, 19 nt, Artificial Sequence
  Description of Artificial Sequence: Synthetic oligonucleotide
gacacggugcaccccagcu

SEQ ID NO: 1001071 - RNA, 19 nt, Artificial Sequence
  Description of Artificial Sequence: Synthetic oligonucleotide
ugagucccacuucgcucgc

SEQ ID NO: 1001072 - RNA, 19 nt, Artificial Sequence
  Description of Artificial Sequence: Synthetic oligonucleotide
aaacaccuguuuagcugcu

SEQ ID NO: 1001073 - RNA, 19 nt, Artificial Sequence
  Description of Artificial Sequence: Synthetic oligonucleotide
cccaguuggacgugggccc

SEQ ID NO: 1001074 - RNA, 19 nt, Artificial Sequence
  Description of Artificial Sequence: Synthetic oligonucleotide
ggcaaaguuccaggcagag

SEQ ID NO: 1001075 - RNA, 19 nt, Artificial Sequence
  Description of Artificial Sequence: Synthetic oligonucleotide
ucugagccguguggagggg

SEQ ID NO: 1001076 - RNA, 19 nt, Artificial Sequence
  Description of Artificial Sequence: Synthetic oligonucleotide
gcauaaaccuguagucuug

SEQ ID NO: 1001077 - RNA, 19 nt, Artificial Sequence
  Description of Artificial Sequence: Synthetic oligonucleotide
augagcgucugggaccuca

SEQ ID NO: 1001078 - RNA, 19 nt, Artificial Sequence
  Description of Artificial Sequence: Synthetic oligonucleotide
caccuccuguugagaaccg

SEQ ID NO: 1001079 - RNA, 19 nt, Artificial Sequence
  Description of Artificial Sequence: Synthetic oligonucleotide
uccggacacccagagguuc

SEQ ID NO: 1001080 - RNA, 19 nt, Artificial Sequence
  Description of Artificial Sequence: Synthetic oligonucleotide
caaacgaacgaguuucauu

SEQ ID NO: 1001081 - RNA, 19 nt, Artificial Sequence
  Description of Artificial Sequence: Synthetic oligonucleotide
ugacuccguuucuucccca

SEQ ID NO: 1001082 - RNA, 19 nt, Artificial Sequence
  Description of Artificial Sequence: Synthetic oligonucleotide
gacgugggcccagucugag

SEQ ID NO: 1001083 - RNA, 19 nt, Artificial Sequence
  Description of Artificial Sequence: Synthetic oligonucleotide
gcaaagcacacuugagcuc

SEQ ID NO: 1001084 - RNA, 19 nt, Artificial Sequence
  Description of Artificial Sequence: Synthetic oligonucleotide
aguucagugccaagccagu

SEQ ID NO: 1001085 - RNA, 19 nt, Artificial Sequence
  Description of Artificial Sequence: Synthetic oligonucleotide
gucccacuucgcucgcggg

SEQ ID NO: 1001086 - RNA, 19 nt, Artificial Sequence
  Description of Artificial Sequence: Synthetic oligonucleotide
guuuagcugcugaggaaga

SEQ ID NO: 1001087 - RNA, 19 nt, Artificial Sequence
  Description of Artificial Sequence: Synthetic oligonucleotide
ggaggcuuuugccacuguc

SEQ ID NO: 1001088 - RNA, 19 nt, Artificial Sequence
  Description of Artificial Sequence: Synthetic oligonucleotide
cauugacacggugcacccc

SEQ ID NO: 1001089 - RNA, 19 nt, Artificial Sequence
  Description of Artificial Sequence: Synthetic oligonucleotide
guaucccauacugcuggac

SEQ ID NO: 1001090 - RNA, 19 nt, Artificial Sequence
  Description of Artificial Sequence: Synthetic oligonucleotide
agaagaguuuagaguugga

SEQ ID NO: 1001091 - RNA, 19 nt, Artificial Sequence
  Description of Artificial Sequence: Synthetic oligonucleotide
gaagaguauucaggaccca

SEQ ID NO: 1001092 - RNA, 19 nt, Artificial Sequence
  Description of Artificial Sequence: Synthetic oligonucleotide
agugcccauuggcagcaau

SEQ ID NO: 1001093 - RNA, 19 nt, Artificial Sequence
  Description of Artificial Sequence: Synthetic oligonucleotide
aggugugacaggacucuca

SEQ ID NO: 1001094 - RNA, 19 nt, Artificial Sequence
  Description of Artificial Sequence: Synthetic oligonucleotide
acccucucgagagguguag

SEQ ID NO: 1001095 - RNA, 19 nt, Artificial Sequence
  Description of Artificial Sequence: Synthetic oligonucleotide
cacuucgcucgcgggaacc

SEQ ID NO: 1001096 - RNA, 19 nt, Artificial Sequence
  Description of Artificial Sequence: Synthetic oligonucleotide
gcaggaaggucugaguaga

SEQ ID NO: 1001097 - RNA, 19 nt, Artificial Sequence
  Description of Artificial Sequence: Synthetic oligonucleotide
cuguugagauucuucacuu

SEQ ID NO: 1001098 - RNA, 19 nt, Artificial Sequence
  Description of Artificial Sequence: Synthetic oligonucleotide
uacccucucgagaggugua

SEQ ID NO: 1001099 - RNA, 19 nt, Artificial Sequence
  Description of Artificial Sequence: Synthetic oligonucleotide
cauuggcgucuacucucag

SEQ ID NO: 1001100 - RNA, 19 nt, Artificial Sequence
  Description of Artificial Sequence: Synthetic oligonucleotide
guuuacccucucgagaggu

SEQ ID NO: 1001101 - RNA, 19 nt, Artificial Sequence
  Description of Artificial Sequence: Synthetic oligonucleotide
uaaucaccgcugccaucau

SEQ ID NO: 1001102 - RNA, 19 nt, Artificial Sequence
  Description of Artificial Sequence: Synthetic oligonucleotide
ccccuagcccaguuggacg

SEQ ID NO: 1001103 - RNA, 19 nt, Artificial Sequence
  Description of Artificial Sequence: Synthetic oligonucleotide
cugaguagaaguagugcuu

SEQ ID NO: 1001104 - RNA, 19 nt, Artificial Sequence
  Description of Artificial Sequence: Synthetic oligonucleotide
gucugagucccacuucgcu

SEQ ID NO: 1001105 - RNA, 19 nt, Artificial Sequence
  Description of Artificial Sequence: Synthetic oligonucleotide
ucugggaccucaggucauc

SEQ ID NO: 1001106 - RNA, 19 nt, Artificial Sequence
  Description of Artificial Sequence: Synthetic oligonucleotide
caccccagcuuauaaucaa

SEQ ID NO: 1001107 - RNA, 19 nt, Artificial Sequence
  Description of Artificial Sequence: Synthetic oligonucleotide
caagugcccauuggcagca

SEQ ID NO: 1001108 - RNA, 19 nt, Artificial Sequence
  Description of Artificial Sequence: Synthetic oligonucleotide
ggucucagaggacacacau

SEQ ID NO: 1001109 - RNA, 19 nt, Artificial Sequence
  Description of Artificial Sequence: Synthetic oligonucleotide
gucuauagcuuuagccaaa

SEQ ID NO: 1001110 - RNA, 19 nt, Artificial Sequence
  Description of Artificial Sequence: Synthetic oligonucleotide
acccaguuaaucacccuuu

SEQ ID NO: 1001111 - RNA, 19 nt, Artificial Sequence
  Description of Artificial Sequence: Synthetic oligonucleotide
aaugagcgucugggaccuc

SEQ ID NO: 1001112 - RNA, 19 nt, Artificial Sequence
  Description of Artificial Sequence: Synthetic oligonucleotide
cuucgcucgcgggaaccgc

SEQ ID NO: 1001113 - RNA, 19 nt, Artificial Sequence
  Description of Artificial Sequence: Synthetic oligonucleotide
gagucccacuucgcucgcg

SEQ ID NO: 1001114 - RNA, 19 nt, Artificial Sequence
  Description of Artificial Sequence: Synthetic oligonucleotide
acgcuaaagcccagcgucu

SEQ ID NO: 1001115 - RNA, 19 nt, Artificial Sequence
  Description of Artificial Sequence: Synthetic oligonucleotide
cagcaauugggagccucug

SEQ ID NO: 1001116 - RNA, 19 nt, Artificial Sequence
  Description of Artificial Sequence: Synthetic oligonucleotide
caaggagcucggcgagcgc

SEQ ID NO: 1001117 - RNA, 19 nt, Artificial Sequence
  Description of Artificial Sequence: Synthetic oligonucleotide
ggugcaccccagcuuauaa

SEQ ID NO: 1001118 - RNA, 19 nt, Artificial Sequence
  Description of Artificial Sequence: Synthetic oligonucleotide
gcacggauacauuggcguc

SEQ ID NO: 1001119 - RNA, 19 nt, Artificial Sequence
  Description of Artificial Sequence: Synthetic oligonucleotide
ucacuuccguccggacacc

SEQ ID NO: 1001120 - RNA, 19 nt, Artificial Sequence
  Description of Artificial Sequence: Synthetic oligonucleotide
cacuuccguccggacaccc

SEQ ID NO: 1001121 - RNA, 19 nt, Artificial Sequence
  Description of Artificial Sequence: Synthetic oligonucleotide
gcgucugggaccucagguc

SEQ ID NO: 1001122 - RNA, 19 nt, Artificial Sequence
  Description of Artificial Sequence: Synthetic oligonucleotide
guuggacgugggcccaguc

SEQ ID NO: 1001123 - RNA, 19 nt, Artificial Sequence
  Description of Artificial Sequence: Synthetic oligonucleotide
gagcucggcgagcgcagca

SEQ ID NO: 1001124 - RNA, 19 nt, Artificial Sequence
  Description of Artificial Sequence: Synthetic oligonucleotide
uggcaucauagagcacuaa

SEQ ID NO: 1001125 - RNA, 19 nt, Artificial Sequence
  Description of Artificial Sequence: Synthetic oligonucleotide
cagugauuugucucugaau

SEQ ID NO: 1001126 - RNA, 19 nt, Artificial Sequence
  Description of Artificial Sequence: Synthetic oligonucleotide
ccggacacccagagguucc

SEQ ID NO: 1001127 - RNA, 19 nt, Artificial Sequence
  Description of Artificial Sequence: Synthetic oligonucleotide
acggauacauuggcgucua

SEQ ID NO: 1001128 - RNA, 19 nt, Artificial Sequence
  Description of Artificial Sequence: Synthetic oligonucleotide
gcuaaagcccagcgucuuc

SEQ ID NO: 1001129 - RNA, 19 nt, Artificial Sequence
  Description of Artificial Sequence: Synthetic oligonucleotide
ccuguugagaaccggcaaa

SEQ ID NO: 1001130 - RNA, 19 nt, Artificial Sequence
  Description of Artificial Sequence: Synthetic oligonucleotide
ggaccacuucgagaaggcc

SEQ ID NO: 1001131 - RNA, 19 nt, Artificial Sequence
  Description of Artificial Sequence: Synthetic oligonucleotide
caaugagcgucugggaccu

SEQ ID NO: 1001132 - RNA, 19 nt, Artificial Sequence
  Description of Artificial Sequence: Synthetic oligonucleotide
guuccccggggugaugcac

SEQ ID NO: 1001133 - RNA, 19 nt, Artificial Sequence
  Description of Artificial Sequence: Synthetic oligonucleotide
acgugggcccagucugagu

SEQ ID NO: 1001134 - RNA, 19 nt, Artificial Sequence
  Description of Artificial Sequence: Synthetic oligonucleotide
gcaauugggagccucuguu

SEQ ID NO: 1001135 - RNA, 19 nt, Artificial Sequence
  Description of Artificial Sequence: Synthetic oligonucleotide
cgucaagugcccauuggca

SEQ ID NO: 1001136 - RNA, 19 nt, Artificial Sequence
  Description of Artificial Sequence: Synthetic oligonucleotide
aguuggacgugggcccagu

SEQ ID NO: 1001137 - RNA, 19 nt, Artificial Sequence
  Description of Artificial Sequence: Synthetic oligonucleotide
acuuccguccggacaccca

SEQ ID NO: 1001138 - RNA, 19 nt, Artificial Sequence
  Description of Artificial Sequence: Synthetic oligonucleotide
cacggauacauuggcgucu

SEQ ID NO: 1001139 - RNA, 19 nt, Artificial Sequence
  Description of Artificial Sequence: Synthetic oligonucleotide
cgaacgaguuucauuuaga

SEQ ID NO: 1001140 - RNA, 19 nt, Artificial Sequence
  Description of Artificial Sequence: Synthetic oligonucleotide
caggugugacaggacucuc

SEQ ID NO: 1001141 - RNA, 19 nt, Artificial Sequence
  Description of Artificial Sequence: Synthetic oligonucleotide
cuucuacacaccuccuguu

SEQ ID NO: 1001142 - RNA, 19 nt, Artificial Sequence
  Description of Artificial Sequence: Synthetic oligonucleotide
cguccggacacccagaggu

SEQ ID NO: 1001143 - RNA, 19 nt, Artificial Sequence
  Description of Artificial Sequence: Synthetic oligonucleotide
ggaucaucugcaguucccu

SEQ ID NO: 1001144 - RNA, 19 nt, Artificial Sequence
  Description of Artificial Sequence: Synthetic oligonucleotide
cuguacgucaagugcccau

SEQ ID NO: 1001145 - RNA, 19 nt, Artificial Sequence
  Description of Artificial Sequence: Synthetic oligonucleotide
ccauguagacacuguacgu

SEQ ID NO: 1001146 - RNA, 19 nt, Artificial Sequence
  Description of Artificial Sequence: Synthetic oligonucleotide
cagcucuauucaaaucaau

SEQ ID NO: 1001147 - RNA, 19 nt, Artificial Sequence
  Description of Artificial Sequence: Synthetic oligonucleotide
gugugacaggacucucacu

SEQ ID NO: 1001148 - RNA, 19 nt, Artificial Sequence
  Description of Artificial Sequence: Synthetic oligonucleotide
gugcaccccagcuuauaau

SEQ ID NO: 1001149 - RNA, 19 nt, Artificial Sequence
  Description of Artificial Sequence: Synthetic oligonucleotide
cacuucgagaaggccaacu

SEQ ID NO: 1001150 - RNA, 19 nt, Artificial Sequence
  Description of Artificial Sequence: Synthetic oligonucleotide
caguuggacgugggcccag

SEQ ID NO: 1001151 - RNA, 19 nt, Artificial Sequence
  Description of Artificial Sequence: Synthetic oligonucleotide
cuauagcuuuagccaaaau

SEQ ID NO: 1001152 - RNA, 19 nt, Artificial Sequence
  Description of Artificial Sequence: Synthetic oligonucleotide
cgucuacucucaguugacc

SEQ ID NO: 1001153 - RNA, 19 nt, Artificial Sequence
  Description of Artificial Sequence: Synthetic oligonucleotide
cccugacagcuauggcugc

SEQ ID NO: 1001154 - RNA, 19 nt, Artificial Sequence
  Description of Artificial Sequence: Synthetic oligonucleotide
cugagccguguggagggga

SEQ ID NO: 1001155 - RNA, 19 nt, Artificial Sequence
  Description of Artificial Sequence: Synthetic oligonucleotide
gcgucuacucucaguugac

SEQ ID NO: 1001156 - RNA, 19 nt, Artificial Sequence
  Description of Artificial Sequence: Synthetic oligonucleotide
ggcgagcgcagcaggugug

SEQ ID NO: 1001157 - RNA, 19 nt, Artificial Sequence
  Description of Artificial Sequence: Synthetic oligonucleotide
guccccuagcccaguugga

SEQ ID NO: 1001158 - RNA, 19 nt, Artificial Sequence
  Description of Artificial Sequence: Synthetic oligonucleotide
cccucucgagagguguagc

SEQ ID NO: 1001159 - RNA, 19 nt, Artificial Sequence
  Description of Artificial Sequence: Synthetic oligonucleotide
ggggugaugcacggauaca

SEQ ID NO: 1001160 - RNA, 19 nt, Artificial Sequence
  Description of Artificial Sequence: Synthetic oligonucleotide
ccguccggacacccagagg

SEQ ID NO: 1001161 - RNA, 19 nt, Artificial Sequence
  Description of Artificial Sequence: Synthetic oligonucleotide
gagccguguggaggggaaa

SEQ ID NO: 1001162 - RNA, 19 nt, Artificial Sequence
  Description of Artificial Sequence: Synthetic oligonucleotide
cgaguuucauuuagaauuu

SEQ ID NO: 1001163 - RNA, 19 nt, Artificial Sequence
  Description of Artificial Sequence: Synthetic oligonucleotide
gguuccccggggugaugca

SEQ ID NO: 1001164 - RNA, 19 nt, Artificial Sequence
  Description of Artificial Sequence: Synthetic oligonucleotide
ggacccaguuaaucacccu

SEQ ID NO: 1001165 - RNA, 19 nt, Artificial Sequence
  Description of Artificial Sequence: Synthetic oligonucleotide
ccucucgagagguguagcu

SEQ ID NO: 1001166 - RNA, 19 nt, Artificial Sequence
  Description of Artificial Sequence: Synthetic oligonucleotide
ccgccgucaauccacgcua

SEQ ID NO: 1001167 - RNA, 19 nt, Artificial Sequence
  Description of Artificial Sequence: Synthetic oligonucleotide
cccuagcccaguuggacgu

SEQ ID NO: 1001168 - RNA, 19 nt, Artificial Sequence
  Description of Artificial Sequence: Synthetic oligonucleotide
ggugaugcacggauacauu

SEQ ID NO: 1001169 - RNA, 19 nt, Artificial Sequence
  Description of Artificial Sequence: Synthetic oligonucleotide
ggacgugggcccagucuga

SEQ ID NO: 1001170 - RNA, 19 nt, Artificial Sequence
  Description of Artificial Sequence: Synthetic oligonucleotide
ugguugcacuggggagcuc

SEQ ID NO: 1001171 - RNA, 19 nt, Artificial Sequence
  Description of Artificial Sequence: Synthetic oligonucleotide
ccacuucgcucgcgggaac

SEQ ID NO: 1001172 - RNA, 19 nt, Artificial Sequence
  Description of Artificial Sequence: Synthetic oligonucleotide
ccuagcccaguuggacgug

SEQ ID NO: 1001173 - RNA, 19 nt, Artificial Sequence
  Description of Artificial Sequence: Synthetic oligonucleotide
gaccaccugcugagagucu

SEQ ID NO: 1001174 - RNA, 19 nt, Artificial Sequence
  Description of Artificial Sequence: Synthetic oligonucleotide
acggugcaccccagcuuau

SEQ ID NO: 1001175 - RNA, 19 nt, Artificial Sequence
  Description of Artificial Sequence: Synthetic oligonucleotide
gcgagcgcagcagguguga

SEQ ID NO: 1001176 - RNA, 19 nt, Artificial Sequence
  Description of Artificial Sequence: Synthetic oligonucleotide
ccacgcuaaagcccagcgu

SEQ ID NO: 1001177 - RNA, 19 nt, Artificial Sequence
  Description of Artificial Sequence: Synthetic oligonucleotide
cccggggugaugcacggau

SEQ ID NO: 1001178 - RNA, 19 nt, Artificial Sequence
  Description of Artificial Sequence: Synthetic oligonucleotide
cccgaagcuggucaauauu

SEQ ID NO: 1001179 - RNA, 19 nt, Artificial Sequence
  Description of Artificial Sequence: Synthetic oligonucleotide
ccacuucgagaaggccaac

SEQ ID NO: 1001180 - RNA, 19 nt, Artificial Sequence
  Description of Artificial Sequence: Synthetic oligonucleotide
gccguguggaggggaaagu

SEQ ID NO: 1001181 - RNA, 19 nt, Artificial Sequence
  Description of Artificial Sequence: Synthetic oligonucleotide
guccggacacccagagguu

SEQ ID NO: 1001182 - RNA, 19 nt, Artificial Sequence
  Description of Artificial Sequence: Synthetic oligonucleotide
cggauacauuggcgucuac

SEQ ID NO: 1001183 - RNA, 19 nt, Artificial Sequence
  Description of Artificial Sequence: Synthetic oligonucleotide
ccggggugaugcacggaua

SEQ ID NO: 1001184 - RNA, 19 nt, Artificial Sequence
  Description of Artificial Sequence: Synthetic oligonucleotide
gcucugcccuaguuucuuu

SEQ ID NO: 1001185 - RNA, 19 nt, Artificial Sequence
  Description of Artificial Sequence: Synthetic oligonucleotide
cccagagguuccccggggu

SEQ ID NO: 1001186 - RNA, 19 nt, Artificial Sequence
  Description of Artificial Sequence: Synthetic oligonucleotide
ggcagagauguggcaucau

SEQ ID NO: 1001187 - RNA, 19 nt, Artificial Sequence
  Description of Artificial Sequence: Synthetic oligonucleotide
cgccgucaauccacgcuaa

SEQ ID NO: 1001188 - RNA, 19 nt, Artificial Sequence
  Description of Artificial Sequence: Synthetic oligonucleotide
ccguguggaggggaaaguu

SEQ ID NO: 1001189 - RNA, 19 nt, Artificial Sequence
  Description of Artificial Sequence: Synthetic oligonucleotide
cgcuaaagcccagcgucuu

SEQ ID NO: 1001190 - RNA, 19 nt, Artificial Sequence
  Description of Artificial Sequence: Synthetic oligonucleotide
ccccggggugaugcacgga

SEQ ID NO: 1001191 - RNA, 19 nt, Artificial Sequence
  Description of Artificial Sequence: Synthetic oligonucleotide
cggcaagauucuguugcuu

SEQ ID NO: 1001192 - RNA, 19 nt, Artificial Sequence
  Description of Artificial Sequence: Synthetic oligonucleotide
ccagggcuugaaggaucau

SEQ ID NO: 1001193 - RNA, 19 nt, Artificial Sequence
  Description of Artificial Sequence: Synthetic oligonucleotide
cgcucgcgggaaccgccgu

SEQ ID NO: 1001194 - RNA, 19 nt, Artificial Sequence
  Description of Artificial Sequence: Synthetic oligonucleotide
uaugauaacggauucaucc

SEQ ID NO: 1001195 - RNA, 19 nt, Artificial Sequence
  Description of Artificial Sequence: Synthetic oligonucleotide
aaccguguagucuugacag

SEQ ID NO: 1001196 - RNA, 19 nt, Artificial Sequence
  Description of Artificial Sequence: Synthetic oligonucleotide
auccaugugagacaugacc

SEQ ID NO: 1001197 - RNA, 19 nt, Artificial Sequence
  Description of Artificial Sequence: Synthetic oligonucleotide
acugauuucgccuguaggg

SEQ ID NO: 1001198 - RNA, 19 nt, Artificial Sequence
  Description of Artificial Sequence: Synthetic oligonucleotide
aaacuauuguucguggccc

SEQ ID NO: 1001199 - RNA, 19 nt, Artificial Sequence
  Description of Artificial Sequence: Synthetic oligonucleotide
ucaaugugacugaagaucc

SEQ ID NO: 1001200 - RNA, 19 nt, Artificial Sequence
  Description of Artificial Sequence: Synthetic oligonucleotide
aacggauucauccaacaug

SEQ ID NO: 1001201 - RNA, 19 nt, Artificial Sequence
  Description of Artificial Sequence: Synthetic oligonucleotide
uaaacuauuguucguggcc

SEQ ID NO: 1001202 - RNA, 19 nt, Artificial Sequence
  Description of Artificial Sequence: Synthetic oligonucleotide
uuuuccacgaggaccaggg

SEQ ID NO: 1001203 - RNA, 19 nt, Artificial Sequence
  Description of Artificial Sequence: Synthetic oligonucleotide
uucacaucauguauuuugg

SEQ ID NO: 1001204 - RNA, 19 nt, Artificial Sequence
  Description of Artificial Sequence: Synthetic oligonucleotide
auaguagacagcuuuccgg

SEQ ID NO: 1001205 - RNA, 19 nt, Artificial Sequence
  Description of Artificial Sequence: Synthetic oligonucleotide
ugauguggcagacauagug

SEQ ID NO: 1001206 - RNA, 19 nt, Artificial Sequence
  Description of Artificial Sequence: Synthetic oligonucleotide
acuaaugaaggcaaagagc

SEQ ID NO: 1001207 - RNA, 19 nt, Artificial Sequence
  Description of Artificial Sequence: Synthetic oligonucleotide
gacuaaugaaggcaaagag

SEQ ID NO: 1001208 - RNA, 19 nt, Artificial Sequence
  Description of Artificial Sequence: Synthetic oligonucleotide
uauaguagacagcuuuccg

SEQ ID NO: 1001209 - RNA, 19 nt, Artificial Sequence
  Description of Artificial Sequence: Synthetic oligonucleotide
agagcugauacuuuccagg

SEQ ID NO: 1001210 - RNA, 19 nt, Artificial Sequence
  Description of Artificial Sequence: Synthetic oligonucleotide
uaggucaucaaugugacug

SEQ ID NO: 1001211 - RNA, 19 nt, Artificial Sequence
  Description of Artificial Sequence: Synthetic oligonucleotide
gauucauccaacaugggug

SEQ ID NO: 1001212 - RNA, 19 nt, Artificial Sequence
  Description of Artificial Sequence: Synthetic oligonucleotide
ucuaaacuauuguucgugg

SEQ ID NO: 1001213 - RNA, 19 nt, Artificial Sequence
  Description of Artificial Sequence: Synthetic oligonucleotide
guugauaaggugaaggaag

SEQ ID NO: 1001214 - RNA, 19 nt, Artificial Sequence
  Description of Artificial Sequence: Synthetic oligonucleotide
uucccuguauaguagacag

SEQ ID NO: 1001215 - RNA, 19 nt, Artificial Sequence
  Description of Artificial Sequence: Synthetic oligonucleotide
ugcucuauccccaaagucu

SEQ ID NO: 1001216 - RNA, 19 nt, Artificial Sequence
  Description of Artificial Sequence: Synthetic oligonucleotide
uuaaguccaucccucaacc

SEQ ID NO: 1001217 - RNA, 19 nt, Artificial Sequence
  Description of Artificial Sequence: Synthetic oligonucleotide
uccaccaacuguaugauaa

SEQ ID NO: 1001218 - RNA, 19 nt, Artificial Sequence
  Description of Artificial Sequence: Synthetic oligonucleotide
gauguagucgacucgcugc

SEQ ID NO: 1001219 - RNA, 19 nt, Artificial Sequence
  Description of Artificial Sequence: Synthetic oligonucleotide
acauagugaccacacauag

SEQ ID NO: 1001220 - RNA, 19 nt, Artificial Sequence
  Description of Artificial Sequence: Synthetic oligonucleotide
cuuuccaggaccaucccgg

SEQ ID NO: 1001221 - RNA, 19 nt, Artificial Sequence
  Description of Artificial Sequence: Synthetic oligonucleotide
uguagaucacccaucugcc

SEQ ID NO: 1001222 - RNA, 19 nt, Artificial Sequence
  Description of Artificial Sequence: Synthetic oligonucleotide
agauccaaucuacagcccg

SEQ ID NO: 1001223 - RNA, 19 nt, Artificial Sequence
  Description of Artificial Sequence: Synthetic oligonucleotide
uggcccuugccaaugagcg

SEQ ID NO: 1001224 - RNA, 19 nt, Artificial Sequence
  Description of Artificial Sequence: Synthetic oligonucleotide
aaagucuacugaguacccc

SEQ ID NO: 1001225 - RNA, 19 nt, Artificial Sequence
  Description of Artificial Sequence: Synthetic oligonucleotide
aagugguaaggguugaggu

SEQ ID NO: 1001226 - RNA, 19 nt, Artificial Sequence
  Description of Artificial Sequence: Synthetic oligonucleotide
aaaaucuggaucauccaug

SEQ ID NO: 1001227 - RNA, 19 nt, Artificial Sequence
  Description of Artificial Sequence: Synthetic oligonucleotide
acuguaugauaacggauuc

SEQ ID NO: 1001228 - RNA, 19 nt, Artificial Sequence
  Description of Artificial Sequence: Synthetic oligonucleotide
uacugauuucgccuguagg

SEQ ID NO: 1001229 - RNA, 19 nt, Artificial Sequence
  Description of Artificial Sequence: Synthetic oligonucleotide
uugauaaggugaaggaaga

SEQ ID NO: 1001230 - RNA, 19 nt, Artificial Sequence
  Description of Artificial Sequence: Synthetic oligonucleotide
agcggaacacuucauuugg

SEQ ID NO: 1001231 - RNA, 19 nt, Artificial Sequence
  Description of Artificial Sequence: Synthetic oligonucleotide
acggauucauccaacaugg

SEQ ID NO: 1001232 - RNA, 19 nt, Artificial Sequence
  Description of Artificial Sequence: Synthetic oligonucleotide
ucuaggucaucaaugugac

SEQ ID NO: 1001233 - RNA, 19 nt, Artificial Sequence
  Description of Artificial Sequence: Synthetic oligonucleotide
agugguaaggguugagguc

SEQ ID NO: 1001234 - RNA, 19 nt, Artificial Sequence
  Description of Artificial Sequence: Synthetic oligonucleotide
uaagaccccucccaacucg

SEQ ID NO: 1001235 - RNA, 19 nt, Artificial Sequence
  Description of Artificial Sequence: Synthetic oligonucleotide
uuugggcucauccggagug

SEQ ID NO: 1001236 - RNA, 19 nt, Artificial Sequence
  Description of Artificial Sequence: Synthetic oligonucleotide
aagcggaacacuucauuug

SEQ ID NO: 1001237 - RNA, 19 nt, Artificial Sequence
  Description of Artificial Sequence: Synthetic oligonucleotide
uggaucauccaugugagac

SEQ ID NO: 1001238 - RNA, 19 nt, Artificial Sequence
  Description of Artificial Sequence: Synthetic oligonucleotide
aacuauuguucguggcccg

SEQ ID NO: 1001239 - RNA, 19 nt, Artificial Sequence
  Description of Artificial Sequence: Synthetic oligonucleotide
aaaccguguagucuugaca

SEQ ID NO: 1001240 - RNA, 19 nt, Artificial Sequence
  Description of Artificial Sequence: Synthetic oligonucleotide
uguaugauaacggauucau

SEQ ID NO: 1001241 - RNA, 19 nt, Artificial Sequence
  Description of Artificial Sequence: Synthetic oligonucleotide
auaguagaaguccccaugu

SEQ ID NO: 1001242 - RNA, 19 nt, Artificial Sequence
  Description of Artificial Sequence: Synthetic oligonucleotide
gauuguggagaacucagga

SEQ ID NO: 1001243 - RNA, 19 nt, Artificial Sequence
  Description of Artificial Sequence: Synthetic oligonucleotide
ucuccuaccgccuccagcu

SEQ ID NO: 1001244 - RNA, 19 nt, Artificial Sequence
  Description of Artificial Sequence: Synthetic oligonucleotide
aacuccggcaauuccucuc

SEQ ID NO: 1001245 - RNA, 19 nt, Artificial Sequence
  Description of Artificial Sequence: Synthetic oligonucleotide
gaagugguaaggguugagg

SEQ ID NO: 1001246 - RNA, 19 nt, Artificial Sequence
  Description of Artificial Sequence: Synthetic oligonucleotide
agacauagugaccacacau

SEQ ID NO: 1001247 - RNA, 19 nt, Artificial Sequence
  Description of Artificial Sequence: Synthetic oligonucleotide
ucaauggaaacauccaguu

SEQ ID NO: 1001248 - RNA, 19 nt, Artificial Sequence
  Description of Artificial Sequence: Synthetic oligonucleotide
aguuaagaccccucccaac

SEQ ID NO: 1001249 - RNA, 19 nt, Artificial Sequence
  Description of Artificial Sequence: Synthetic oligonucleotide
ugggcacccagucuaagcc

SEQ ID NO: 1001250 - RNA, 19 nt, Artificial Sequence
  Description of Artificial Sequence: Synthetic oligonucleotide
acuccggcaauuccucucc

SEQ ID NO: 1001251 - RNA, 19 nt, Artificial Sequence
  Description of Artificial Sequence: Synthetic oligonucleotide
caugauguagucgacucgc

SEQ ID NO: 1001252 - RNA, 19 nt, Artificial Sequence
  Description of Artificial Sequence: Synthetic oligonucleotide
ugacuaaugaaggcaaaga

SEQ ID NO: 1001253 - RNA, 19 nt, Artificial Sequence
  Description of Artificial Sequence: Synthetic oligonucleotide
cauaguagaaguccccaug

SEQ ID NO: 1001254 - RNA, 19 nt, Artificial Sequence
  Description of Artificial Sequence: Synthetic oligonucleotide
augauaacggauucaucca

SEQ ID NO: 1001255 - RNA, 19 nt, Artificial Sequence
  Description of Artificial Sequence: Synthetic oligonucleotide
uuguucguggcccgcagag

SEQ ID NO: 1001256 - RNA, 19 nt, Artificial Sequence
  Description of Artificial Sequence: Synthetic oligonucleotide
aacuguaugauaacggauu

SEQ ID NO: 1001257 - RNA, 19 nt, Artificial Sequence
  Description of Artificial Sequence: Synthetic oligonucleotide
auguagucgacucgcugcg

SEQ ID NO: 1001258 - RNA, 19 nt, Artificial Sequence
  Description of Artificial Sequence: Synthetic oligonucleotide
caucccggacuuuaggucc

SEQ ID NO: 1001259 - RNA, 19 nt, Artificial Sequence
  Description of Artificial Sequence: Synthetic oligonucleotide
ucauccggagugaccaggg

SEQ ID NO: 1001260 - RNA, 19 nt, Artificial Sequence
  Description of Artificial Sequence: Synthetic oligonucleotide
accaacuguaugauaacgg

SEQ ID NO: 1001261 - RNA, 19 nt, Artificial Sequence
  Description of Artificial Sequence: Synthetic oligonucleotide
aacucgaggggcuggguca

SEQ ID NO: 1001262 - RNA, 19 nt, Artificial Sequence
  Description of Artificial Sequence: Synthetic oligonucleotide
ugauguagucgacucgcug

SEQ ID NO: 1001263 - RNA, 19 nt, Artificial Sequence
  Description of Artificial Sequence: Synthetic oligonucleotide
accacucucugguagaagu

SEQ ID NO: 1001264 - RNA, 19 nt, Artificial Sequence
  Description of Artificial Sequence: Synthetic oligonucleotide
uccggagugaccaggggug

SEQ ID NO: 1001265 - RNA, 19 nt, Artificial Sequence
  Description of Artificial Sequence: Synthetic oligonucleotide
auaacggauucauccaaca

SEQ ID NO: 1001266 - RNA, 19 nt, Artificial Sequence
  Description of Artificial Sequence: Synthetic oligonucleotide
uagcugaccacucucuggu

SEQ ID NO: 1001267 - RNA, 19 nt, Artificial Sequence
  Description of Artificial Sequence: Synthetic oligonucleotide
gacagcuacugauuucgcc

SEQ ID NO: 1001268 - RNA, 19 nt, Artificial Sequence
  Description of Artificial Sequence: Synthetic oligonucleotide
ugcuuggccauucuccuac

SEQ ID NO: 1001269 - RNA, 19 nt, Artificial Sequence
  Description of Artificial Sequence: Synthetic oligonucleotide
uggccauucuccuaccgcc

SEQ ID NO: 1001270 - RNA, 19 nt, Artificial Sequence
  Description of Artificial Sequence: Synthetic oligonucleotide
acagcuuuccggcaggcgu

SEQ ID NO: 1001271 - RNA, 19 nt, Artificial Sequence
  Description of Artificial Sequence: Synthetic oligonucleotide
cguucuaaacuauuguucg

SEQ ID NO: 1001272 - RNA, 19 nt, Artificial Sequence
  Description of Artificial Sequence: Synthetic oligonucleotide
uguugauaaggugaaggaa

SEQ ID NO: 1001273 - RNA, 19 nt, Artificial Sequence
  Description of Artificial Sequence: Synthetic oligonucleotide
auacucuagaagcuccucu

SEQ ID NO: 1001274 - RNA, 19 nt, Artificial Sequence
  Description of Artificial Sequence: Synthetic oligonucleotide
aaugugacugaagauccaa

SEQ ID NO: 1001275 - RNA, 19 nt, Artificial Sequence
  Description of Artificial Sequence: Synthetic oligonucleotide
uauccccaaagucuacuga

SEQ ID NO: 1001276 - RNA, 19 nt, Artificial Sequence
  Description of Artificial Sequence: Synthetic oligonucleotide
uuggccauucuccuaccgc

SEQ ID NO: 1001277 - RNA, 19 nt, Artificial Sequence
  Description of Artificial Sequence: Synthetic oligonucleotide
auaaggugaaggaagaauu

SEQ ID NO: 1001278 - RNA, 19 nt, Artificial Sequence
  Description of Artificial Sequence: Synthetic oligonucleotide
agcugauacuuuccaggac

SEQ ID NO: 1001279 - RNA, 19 nt, Artificial Sequence
  Description of Artificial Sequence: Synthetic oligonucleotide
aaccaguuccggcaguggu

SEQ ID NO: 1001280 - RNA, 19 nt, Artificial Sequence
  Description of Artificial Sequence: Synthetic oligonucleotide
ucacaucauguauuuuggc

SEQ ID NO: 1001281 - RNA, 19 nt, Artificial Sequence
  Description of Artificial Sequence: Synthetic oligonucleotide
agaucacccaucugccuuc

SEQ ID NO: 1001282 - RNA, 19 nt, Artificial Sequence
  Description of Artificial Sequence: Synthetic oligonucleotide
cuuuguucagcgcugcauc

SEQ ID NO: 1001283 - RNA, 19 nt, Artificial Sequence
  Description of Artificial Sequence: Synthetic oligonucleotide
uggggcaauaucaggcagc

SEQ ID NO: 1001284 - RNA, 19 nt, Artificial Sequence
  Description of Artificial Sequence: Synthetic oligonucleotide
acacauaguagaagucccc

SEQ ID NO: 1001285 - RNA, 19 nt, Artificial Sequence
  Description of Artificial Sequence: Synthetic oligonucleotide
uagugaccacacauaguag

SEQ ID NO: 1001286 - RNA, 19 nt, Artificial Sequence
  Description of Artificial Sequence: Synthetic oligonucleotide
uguggcagacauagugacc

SEQ ID NO: 1001287 - RNA, 19 nt, Artificial Sequence
  Description of Artificial Sequence: Synthetic oligonucleotide
uauuguucguggcccgcag

SEQ ID NO: 1001288 - RNA, 19 nt, Artificial Sequence
  Description of Artificial Sequence: Synthetic oligonucleotide
ugaguaccccuucucuuug

SEQ ID NO: 1001289 - RNA, 19 nt, Artificial Sequence
  Description of Artificial Sequence: Synthetic oligonucleotide
caaagucuacugaguaccc

SEQ ID NO: 1001290 - RNA, 19 nt, Artificial Sequence
  Description of Artificial Sequence: Synthetic oligonucleotide
ugauuucgccuguagggcu

SEQ ID NO: 1001291 - RNA, 19 nt, Artificial Sequence
  Description of Artificial Sequence: Synthetic oligonucleotide
uaguagaaguccccaugug

SEQ ID NO: 1001292 - RNA, 19 nt, Artificial Sequence
  Description of Artificial Sequence: Synthetic oligonucleotide
uagaucacccaucugccuu

SEQ ID NO: 1001293 - RNA, 19 nt, Artificial Sequence
  Description of Artificial Sequence: Synthetic oligonucleotide
acccagucuaagccaaagg

SEQ ID NO: 1001294 - RNA, 19 nt, Artificial Sequence
  Description of Artificial Sequence: Synthetic oligonucleotide
gauguggcagacauaguga

SEQ ID NO: 1001295 - RNA, 19 nt, Artificial Sequence
  Description of Artificial Sequence: Synthetic oligonucleotide
gauaacggauucauccaac

SEQ ID NO: 1001296 - RNA, 19 nt, Artificial Sequence
  Description of Artificial Sequence: Synthetic oligonucleotide
cugauuucgccuguagggc

SEQ ID NO: 1001297 - RNA, 19 nt, Artificial Sequence
  Description of Artificial Sequence: Synthetic oligonucleotide
uaaguccaucccucaaccc

SEQ ID NO: 1001298 - RNA, 19 nt, Artificial Sequence
  Description of Artificial Sequence: Synthetic oligonucleotide
caccaacuguaugauaacg

SEQ ID NO: 1001299 - RNA, 19 nt, Artificial Sequence
  Description of Artificial Sequence: Synthetic oligonucleotide
augagcgccuugaacauuc

SEQ ID NO: 1001300 - RNA, 19 nt, Artificial Sequence
  Description of Artificial Sequence: Synthetic oligonucleotide
acuauuguucguggcccgc

SEQ ID NO: 1001301 - RNA, 19 nt, Artificial Sequence
  Description of Artificial Sequence: Synthetic oligonucleotide
gagcugauacuuuccagga

SEQ ID NO: 1001302 - RNA, 19 nt, Artificial Sequence
  Description of Artificial Sequence: Synthetic oligonucleotide
agcgccuugaacauucgag

SEQ ID NO: 1001303 - RNA, 19 nt, Artificial Sequence
  Description of Artificial Sequence: Synthetic oligonucleotide
gaacauucgaggggcaaug

SEQ ID NO: 1001304 - RNA, 19 nt, Artificial Sequence
  Description of Artificial Sequence: Synthetic oligonucleotide
uucuccuaccgccuccagc

SEQ ID NO: 1001305 - RNA, 19 nt, Artificial Sequence
  Description of Artificial Sequence: Synthetic oligonucleotide
acaaggucccaguguggac

SEQ ID NO: 1001306 - RNA, 19 nt, Artificial Sequence
  Description of Artificial Sequence: Synthetic oligonucleotide
aaggcuaccuuugggcuca

SEQ ID NO: 1001307 - RNA, 19 nt, Artificial Sequence
  Description of Artificial Sequence: Synthetic oligonucleotide
guaaggguugaggucaggc

SEQ ID NO: 1001308 - RNA, 19 nt, Artificial Sequence
  Description of Artificial Sequence: Synthetic oligonucleotide
accaucccggacuuuaggu

SEQ ID NO: 1001309 - RNA, 19 nt, Artificial Sequence
  Description of Artificial Sequence: Synthetic oligonucleotide
gaaguagauguagcccagg

SEQ ID NO: 1001310 - RNA, 19 nt, Artificial Sequence
  Description of Artificial Sequence: Synthetic oligonucleotide
gaccaucccggacuuuagg

SEQ ID NO: 1001311 - RNA, 19 nt, Artificial Sequence
  Description of Artificial Sequence: Synthetic oligonucleotide
uuaagaccccucccaacuc

SEQ ID NO: 1001312 - RNA, 19 nt, Artificial Sequence
  Description of Artificial Sequence: Synthetic oligonucleotide
cucugagauguccauagca

SEQ ID NO: 1001313 - RNA, 19 nt, Artificial Sequence
  Description of Artificial Sequence: Synthetic oligonucleotide
cugggcccgaaccaguucc

SEQ ID NO: 1001314 - RNA, 19 nt, Artificial Sequence
  Description of Artificial Sequence: Synthetic oligonucleotide
agauggagucagcagcuga

SEQ ID NO: 1001315 - RNA, 19 nt, Artificial Sequence
  Description of Artificial Sequence: Synthetic oligonucleotide
cuugacagcuacugauuuc

SEQ ID NO: 1001316 - RNA, 19 nt, Artificial Sequence
  Description of Artificial Sequence: Synthetic oligonucleotide
ucauccaacaugggugaug

SEQ ID NO: 1001317 - RNA, 19 nt, Artificial Sequence
  Description of Artificial Sequence: Synthetic oligonucleotide
ugucggagaggagaaguga

SEQ ID NO: 1001318 - RNA, 19 nt, Artificial Sequence
  Description of Artificial Sequence: Synthetic oligonucleotide
guguagucuugacagcuac

SEQ ID NO: 1001319 - RNA, 19 nt, Artificial Sequence
  Description of Artificial Sequence: Synthetic oligonucleotide
uucggccccacuauucccu

SEQ ID NO: 1001320 - RNA, 19 nt, Artificial Sequence
  Description of Artificial Sequence: Synthetic oligonucleotide
ucgccuguagggcugugcu

SEQ ID NO: 1001321 - RNA, 19 nt, Artificial Sequence
  Description of Artificial Sequence: Synthetic oligonucleotide
gcgccuugaacauucgagg

SEQ ID NO: 1001322 - RNA, 19 nt, Artificial Sequence
  Description of Artificial Sequence: Synthetic oligonucleotide
gauaaggugaaggaagaau

SEQ ID NO: 1001323 - RNA, 19 nt, Artificial Sequence
  Description of Artificial Sequence: Synthetic oligonucleotide
aggcaaaccguguagucuu

SEQ ID NO: 1001324 - RNA, 19 nt, Artificial Sequence
  Description of Artificial Sequence: Synthetic oligonucleotide
auccggagugaccaggggu

SEQ ID NO: 1001325 - RNA, 19 nt, Artificial Sequence
  Description of Artificial Sequence: Synthetic oligonucleotide
uggcuuuucagaggcacac

SEQ ID NO: 1001326 - RNA, 19 nt, Artificial Sequence
  Description of Artificial Sequence: Synthetic oligonucleotide
ggaugcauaaagccacacc

SEQ ID NO: 1001327 - RNA, 19 nt, Artificial Sequence
  Description of Artificial Sequence: Synthetic oligonucleotide
uguccccugcccgaagugg

SEQ ID NO: 1001328 - RNA, 19 nt, Artificial Sequence
  Description of Artificial Sequence: Synthetic oligonucleotide
ucuuuguucagcgcugcau

SEQ ID NO: 1001329 - RNA, 19 nt, Artificial Sequence
  Description of Artificial Sequence: Synthetic oligonucleotide
cuacugauuucgccuguag

SEQ ID NO: 1001330 - RNA, 19 nt, Artificial Sequence
  Description of Artificial Sequence: Synthetic oligonucleotide
guagucgacucgcugcgug

SEQ ID NO: 1001331 - RNA, 19 nt, Artificial Sequence
  Description of Artificial Sequence: Synthetic oligonucleotide
acacuuucuggucauugua

SEQ ID NO: 1001332 - RNA, 19 nt, Artificial Sequence
  Description of Artificial Sequence: Synthetic oligonucleotide
uacagcccguucuaaacua

SEQ ID NO: 1001333 - RNA, 19 nt, Artificial Sequence
  Description of Artificial Sequence: Synthetic oligonucleotide
gagucagcagcugagcguc

SEQ ID NO: 1001334 - RNA, 19 nt, Artificial Sequence
  Description of Artificial Sequence: Synthetic oligonucleotide
agcugagcgucccucugag

SEQ ID NO: 1001335 - RNA, 19 nt, Artificial Sequence
  Description of Artificial Sequence: Synthetic oligonucleotide
cacuauucccuguauagua

SEQ ID NO: 1001336 - RNA, 19 nt, Artificial Sequence
  Description of Artificial Sequence: Synthetic oligonucleotide
aggaugcauaaagccacac

SEQ ID NO: 1001337 - RNA, 19 nt, Artificial Sequence
  Description of Artificial Sequence: Synthetic oligonucleotide
uggcaucucaauggaaaca

SEQ ID NO: 1001338 - RNA, 19 nt, Artificial Sequence
  Description of Artificial Sequence: Synthetic oligonucleotide
gccuugaacauucgagggg

SEQ ID NO: 1001339 - RNA, 19 nt, Artificial Sequence
  Description of Artificial Sequence: Synthetic oligonucleotide
caaaccguguagucuugac

SEQ ID NO: 1001340 - RNA, 19 nt, Artificial Sequence
  Description of Artificial Sequence: Synthetic oligonucleotide
acucgcugcguguacuuca

SEQ ID NO: 1001341 - RNA, 19 nt, Artificial Sequence
  Description of Artificial Sequence: Synthetic oligonucleotide
ugagcgccuugaacauucg

SEQ ID NO: 1001342 - RNA, 19 nt, Artificial Sequence
  Description of Artificial Sequence: Synthetic oligonucleotide
caucuaggucaucaaugug

SEQ ID NO: 1001343 - RNA, 19 nt, Artificial Sequence
  Description of Artificial Sequence: Synthetic oligonucleotide
uguggacaggcagucggcc

SEQ ID NO: 1001344 - RNA, 19 nt, Artificial Sequence
  Description of Artificial Sequence: Synthetic oligonucleotide
ggacuuuaggucccacagg

SEQ ID NO: 1001345 - RNA, 19 nt, Artificial Sequence
  Description of Artificial Sequence: Synthetic oligonucleotide
ggagcagaaggagucuucg

SEQ ID NO: 1001346 - RNA, 19 nt, Artificial Sequence
  Description of Artificial Sequence: Synthetic oligonucleotide
cugcucuauccccaaaguc

SEQ ID NO: 1001347 - RNA, 19 nt, Artificial Sequence
  Description of Artificial Sequence: Synthetic oligonucleotide
agucuucgucuucguugcc

SEQ ID NO: 1001348 - RNA, 19 nt, Artificial Sequence
  Description of Artificial Sequence: Synthetic oligonucleotide
uuuccaccaacuguaugau

SEQ ID NO: 1001349 - RNA, 19 nt, Artificial Sequence
  Description of Artificial Sequence: Synthetic oligonucleotide
gaaggaggcaaaccgugua

SEQ ID NO: 1001350 - RNA, 19 nt, Artificial Sequence
  Description of Artificial Sequence: Synthetic oligonucleotide
cagcuacugauuucgccug

SEQ ID NO: 1001351 - RNA, 19 nt, Artificial Sequence
  Description of Artificial Sequence: Synthetic oligonucleotide
gacauagugaccacacaua

SEQ ID NO: 1001352 - RNA, 19 nt, Artificial Sequence
  Description of Artificial Sequence: Synthetic oligonucleotide
ccuugaacauucgaggggc

SEQ ID NO: 1001353 - RNA, 19 nt, Artificial Sequence
  Description of Artificial Sequence: Synthetic oligonucleotide
ggcacagucgccucccucc

SEQ ID NO: 1001354 - RNA, 19 nt, Artificial Sequence
  Description of Artificial Sequence: Synthetic oligonucleotide
uucagaacuccggcaauuc

SEQ ID NO: 1001355 - RNA, 19 nt, Artificial Sequence
  Description of Artificial Sequence: Synthetic oligonucleotide
ccguucuaaacuauuguuc

SEQ ID NO: 1001356 - RNA, 19 nt, Artificial Sequence
  Description of Artificial Sequence: Synthetic oligonucleotide
agcccagguccuugggugg

SEQ ID NO: 1001357 - RNA, 19 nt, Artificial Sequence
  Description of Artificial Sequence: Synthetic oligonucleotide
ugcccgaagugguaagggu

SEQ ID NO: 1001358 - RNA, 19 nt, Artificial Sequence
  Description of Artificial Sequence: Synthetic oligonucleotide
caaggcuaccuuugggcuc

SEQ ID NO: 1001359 - RNA, 19 nt, Artificial Sequence
  Description of Artificial Sequence: Synthetic oligonucleotide
ugggcccgaaccaguuccg

SEQ ID NO: 1001360 - RNA, 19 nt, Artificial Sequence
  Description of Artificial Sequence: Synthetic oligonucleotide
gaugucggagaggagaagu

SEQ ID NO: 1001361 - RNA, 19 nt, Artificial Sequence
  Description of Artificial Sequence: Synthetic oligonucleotide
gucguccaccugcucaggg

SEQ ID NO: 1001362 - RNA, 19 nt, Artificial Sequence
  Description of Artificial Sequence: Synthetic oligonucleotide
ccgauuguggagaacucag

SEQ ID NO: 1001363 - RNA, 19 nt, Artificial Sequence
  Description of Artificial Sequence: Synthetic oligonucleotide
cuucggccccacuauuccc

SEQ ID NO: 1001364 - RNA, 19 nt, Artificial Sequence
  Description of Artificial Sequence: Synthetic oligonucleotide
ugcgccccucaacugggag

SEQ ID NO: 1001365 - RNA, 19 nt, Artificial Sequence
  Description of Artificial Sequence: Synthetic oligonucleotide
acagucgccucccuccccu

SEQ ID NO: 1001366 - RNA, 19 nt, Artificial Sequence
  Description of Artificial Sequence: Synthetic oligonucleotide
uuucagaacuccggcaauu

SEQ ID NO: 1001367 - RNA, 19 nt, Artificial Sequence
  Description of Artificial Sequence: Synthetic oligonucleotide
cuacugaguaccccuucuc

SEQ ID NO: 1001368 - RNA, 19 nt, Artificial Sequence
  Description of Artificial Sequence: Synthetic oligonucleotide
agcgcugcauccaugggca

SEQ ID NO: 1001369 - RNA, 19 nt, Artificial Sequence
  Description of Artificial Sequence: Synthetic oligonucleotide
gagaagcccauggaaacaa

SEQ ID NO: 1001370 - RNA, 19 nt, Artificial Sequence
  Description of Artificial Sequence: Synthetic oligonucleotide
cuguauaguagacagcuuu

SEQ ID NO: 1001371 - RNA, 19 nt, Artificial Sequence
  Description of Artificial Sequence: Synthetic oligonucleotide
uggucuguccccugcccga

SEQ ID NO: 1001372 - RNA, 19 nt, Artificial Sequence
  Description of Artificial Sequence: Synthetic oligonucleotide
auuguucguggcccgcaga

SEQ ID NO: 1001373 - RNA, 19 nt, Artificial Sequence
  Description of Artificial Sequence: Synthetic oligonucleotide
augcauaaagccacaccca

SEQ ID NO: 1001374 - RNA, 19 nt, Artificial Sequence
  Description of Artificial Sequence: Synthetic oligonucleotide
aaucuacagcccguucuaa

SEQ ID NO: 1001375 - RNA, 19 nt, Artificial Sequence
  Description of Artificial Sequence: Synthetic oligonucleotide
ugaugucggagaggagaag

SEQ ID NO: 1001376 - RNA, 19 nt, Artificial Sequence
  Description of Artificial Sequence: Synthetic oligonucleotide
ggaucauccaugugagaca

SEQ ID NO: 1001377 - RNA, 19 nt, Artificial Sequence
  Description of Artificial Sequence: Synthetic oligonucleotide
uggcccgcagagcuuucag

SEQ ID NO: 1001378 - RNA, 19 nt, Artificial Sequence
  Description of Artificial Sequence: Synthetic oligonucleotide
cagguacagacucagagau

SEQ ID NO: 1001379 - RNA, 19 nt, Artificial Sequence
  Description of Artificial Sequence: Synthetic oligonucleotide
auaggcuuccagacaggag

SEQ ID NO: 1001380 - RNA, 19 nt, Artificial Sequence
  Description of Artificial Sequence: Synthetic oligonucleotide
ccaacuguaugauaacgga

SEQ ID NO: 1001381 - RNA, 19 nt, Artificial Sequence
  Description of Artificial Sequence: Synthetic oligonucleotide
uagucgacucgcugcgugu

SEQ ID NO: 1001382 - RNA, 19 nt, Artificial Sequence
  Description of Artificial Sequence: Synthetic oligonucleotide
cugcccgaagugguaaggg

SEQ ID NO: 1001383 - RNA, 19 nt, Artificial Sequence
  Description of Artificial Sequence: Synthetic oligonucleotide
cacauaguagaagucccca

SEQ ID NO: 1001384 - RNA, 19 nt, Artificial Sequence
  Description of Artificial Sequence: Synthetic oligonucleotide
augacccaauucauggcug

SEQ ID NO: 1001385 - RNA, 19 nt, Artificial Sequence
  Description of Artificial Sequence: Synthetic oligonucleotide
aggcucuuagcugaccacu

SEQ ID NO: 1001386 - RNA, 19 nt, Artificial Sequence
  Description of Artificial Sequence: Synthetic oligonucleotide
aucccggacuuuagguccc

SEQ ID NO: 1001387 - RNA, 19 nt, Artificial Sequence
  Description of Artificial Sequence: Synthetic oligonucleotide
agcccguucuaaacuauug

SEQ ID NO: 1001388 - RNA, 19 nt, Artificial Sequence
  Description of Artificial Sequence: Synthetic oligonucleotide
gcauaaagccacacccacg

SEQ ID NO: 1001389 - RNA, 19 nt, Artificial Sequence
  Description of Artificial Sequence: Synthetic oligonucleotide
uccggcaauuccucuccac

SEQ ID NO: 1001390 - RNA, 19 nt, Artificial Sequence
  Description of Artificial Sequence: Synthetic oligonucleotide
aucccucaaccccaucccu

SEQ ID NO: 1001391 - RNA, 19 nt, Artificial Sequence
  Description of Artificial Sequence: Synthetic oligonucleotide
ugccgauuguggagaacuc

SEQ ID NO: 1001392 - RNA, 19 nt, Artificial Sequence
  Description of Artificial Sequence: Synthetic oligonucleotide
cucgcugcguguacuucac

SEQ ID NO: 1001393 - RNA, 19 nt, Artificial Sequence
  Description of Artificial Sequence: Synthetic oligonucleotide
aggcacagucgccucccuc

SEQ ID NO: 1001394 - RNA, 19 nt, Artificial Sequence
  Description of Artificial Sequence: Synthetic oligonucleotide
cauccggagugaccagggg

SEQ ID NO: 1001395 - RNA, 19 nt, Artificial Sequence
  Description of Artificial Sequence: Synthetic oligonucleotide
gccauagaaaccaaggcua

SEQ ID NO: 1001396 - RNA, 19 nt, Artificial Sequence
  Description of Artificial Sequence: Synthetic oligonucleotide
guaugauaacggauucauc

SEQ ID NO: 1001397 - RNA, 19 nt, Artificial Sequence
  Description of Artificial Sequence: Synthetic oligonucleotide
cauacucuagaagcuccuc

SEQ ID NO: 1001398 - RNA, 19 nt, Artificial Sequence
  Description of Artificial Sequence: Synthetic oligonucleotide
gcagacauagugaccacac

SEQ ID NO: 1001399 - RNA, 19 nt, Artificial Sequence
  Description of Artificial Sequence: Synthetic oligonucleotide
guucuaaacuauuguucgu

SEQ ID NO: 1001400 - RNA, 19 nt, Artificial Sequence
  Description of Artificial Sequence: Synthetic oligonucleotide
uguucguggcccgcagagc

SEQ ID NO: 1001401 - RNA, 19 nt, Artificial Sequence
  Description of Artificial Sequence: Synthetic oligonucleotide
augucggagaggagaagug

SEQ ID NO: 1001402 - RNA, 19 nt, Artificial Sequence
  Description of Artificial Sequence: Synthetic oligonucleotide
agacucagagauggaguca

SEQ ID NO: 1001403 - RNA, 19 nt, Artificial Sequence
  Description of Artificial Sequence: Synthetic oligonucleotide
cucuauccccaaagucuac

SEQ ID NO: 1001404 - RNA, 19 nt, Artificial Sequence
  Description of Artificial Sequence: Synthetic oligonucleotide
aaugagcgccuugaacauu

SEQ ID NO: 1001405 - RNA, 19 nt, Artificial Sequence
  Description of Artificial Sequence: Synthetic oligonucleotide
agcuacugauuucgccugu

SEQ ID NO: 1001406 - RNA, 19 nt, Artificial Sequence
  Description of Artificial Sequence: Synthetic oligonucleotide
cauaggcuuccagacagga

SEQ ID NO: 1001407 - RNA, 19 nt, Artificial Sequence
  Description of Artificial Sequence: Synthetic oligonucleotide
cacccagucuaagccaaag

SEQ ID NO: 1001408 - RNA, 19 nt, Artificial Sequence
  Description of Artificial Sequence: Synthetic oligonucleotide
gcuucggccccacuauucc

SEQ ID NO: 1001409 - RNA, 19 nt, Artificial Sequence
  Description of Artificial Sequence: Synthetic oligonucleotide
aagaccccucccaacucga

SEQ ID NO: 1001410 - RNA, 19 nt, Artificial Sequence
  Description of Artificial Sequence: Synthetic oligonucleotide
aggguugaggucaggcucu

SEQ ID NO: 1001411 - RNA, 19 nt, Artificial Sequence
  Description of Artificial Sequence: Synthetic oligonucleotide
aagaagcggaacacuucau

SEQ ID NO: 1001412 - RNA, 19 nt, Artificial Sequence
  Description of Artificial Sequence: Synthetic oligonucleotide
caaucuacagcccguucua

SEQ ID NO: 1001413 - RNA, 19 nt, Artificial Sequence
  Description of Artificial Sequence: Synthetic oligonucleotide
caaugugacugaagaucca

SEQ ID NO: 1001414 - RNA, 19 nt, Artificial Sequence
  Description of Artificial Sequence: Synthetic oligonucleotide
ccucaugccagauggucug

SEQ ID NO: 1001415 - RNA, 19 nt, Artificial Sequence
  Description of Artificial Sequence: Synthetic oligonucleotide
aucauguauuuuggcauuu

SEQ ID NO: 1001416 - RNA, 19 nt, Artificial Sequence
  Description of Artificial Sequence: Synthetic oligonucleotide
gucuacugaguaccccuuc

SEQ ID NO: 1001417 - RNA, 19 nt, Artificial Sequence
  Description of Artificial Sequence: Synthetic oligonucleotide
gcaauuccucuccaccaug

SEQ ID NO: 1001418 - RNA, 19 nt, Artificial Sequence
  Description of Artificial Sequence: Synthetic oligonucleotide
cuguaugauaacggauuca

SEQ ID NO: 1001419 - RNA, 19 nt, Artificial Sequence
  Description of Artificial Sequence: Synthetic oligonucleotide
cccgaagugguaaggguug

SEQ ID NO: 1001420 - RNA, 19 nt, Artificial Sequence
  Description of Artificial Sequence: Synthetic oligonucleotide
cacgaggaccaggggaggg

SEQ ID NO: 1001421 - RNA, 19 nt, Artificial Sequence
  Description of Artificial Sequence: Synthetic oligonucleotide
cugagcgucccucugagau

SEQ ID NO: 1001422 - RNA, 19 nt, Artificial Sequence
  Description of Artificial Sequence: Synthetic oligonucleotide
ggagaagugaggggagcag

SEQ ID NO: 1001423 - RNA, 19 nt, Artificial Sequence
  Description of Artificial Sequence: Synthetic oligonucleotide
ccggcaauuccucuccacc

SEQ ID NO: 1001424 - RNA, 19 nt, Artificial Sequence
  Description of Artificial Sequence: Synthetic oligonucleotide
auucuccuaccgccuccag

SEQ ID NO: 1001425 - RNA, 19 nt, Artificial Sequence
  Description of Artificial Sequence: Synthetic oligonucleotide
gucuucguugccauagaaa

SEQ ID NO: 1001426 - RNA, 19 nt, Artificial Sequence
  Description of Artificial Sequence: Synthetic oligonucleotide
aggaccaucccggacuuua

SEQ ID NO: 1001427 - RNA, 19 nt, Artificial Sequence
  Description of Artificial Sequence: Synthetic oligonucleotide
ugaccacucucugguagaa

SEQ ID NO: 1001428 - RNA, 19 nt, Artificial Sequence
  Description of Artificial Sequence: Synthetic oligonucleotide
gagugaccagggguggggc

SEQ ID NO: 1001429 - RNA, 19 nt, Artificial Sequence
  Description of Artificial Sequence: Synthetic oligonucleotide
gaccacucucugguagaag

SEQ ID NO: 1001430 - RNA, 19 nt, Artificial Sequence
  Description of Artificial Sequence: Synthetic oligonucleotide
ucgacucgcugcguguacu

SEQ ID NO: 1001431 - RNA, 19 nt, Artificial Sequence
  Description of Artificial Sequence: Synthetic oligonucleotide
ccaagaagcggaacacuuc

SEQ ID NO: 1001432 - RNA, 19 nt, Artificial Sequence
  Description of Artificial Sequence: Synthetic oligonucleotide
caacuguaugauaacggau

SEQ ID NO: 1001433 - RNA, 19 nt, Artificial Sequence
  Description of Artificial Sequence: Synthetic oligonucleotide
cauccaacaugggugaugu

SEQ ID NO: 1001434 - RNA, 19 nt, Artificial Sequence
  Description of Artificial Sequence: Synthetic oligonucleotide
uuccaccaacuguaugaua

SEQ ID NO: 1001435 - RNA, 19 nt, Artificial Sequence
  Description of Artificial Sequence: Synthetic oligonucleotide
uagcccugcgccccucaac

SEQ ID NO: 1001436 - RNA, 19 nt, Artificial Sequence
  Description of Artificial Sequence: Synthetic oligonucleotide
cauagugaccacacauagu

SEQ ID NO: 1001437 - RNA, 19 nt, Artificial Sequence
  Description of Artificial Sequence: Synthetic oligonucleotide
gggcugggucaucacagag

SEQ ID NO: 1001438 - RNA, 19 nt, Artificial Sequence
  Description of Artificial Sequence: Synthetic oligonucleotide
gucggccccuuccuguccc

SEQ ID NO: 1001439 - RNA, 19 nt, Artificial Sequence
  Description of Artificial Sequence: Synthetic oligonucleotide
caguuaagaccccucccaa

SEQ ID NO: 1001440 - RNA, 19 nt, Artificial Sequence
  Description of Artificial Sequence: Synthetic oligonucleotide
agucuaagccaaaggugaa

SEQ ID NO: 1001441 - RNA, 19 nt, Artificial Sequence
  Description of Artificial Sequence: Synthetic oligonucleotide
gauccaaucuacagcccgu

SEQ ID NO: 1001442 - RNA, 19 nt, Artificial Sequence
  Description of Artificial Sequence: Synthetic oligonucleotide
uugggcucauccggaguga

SEQ ID NO: 1001443 - RNA, 19 nt, Artificial Sequence
  Description of Artificial Sequence: Synthetic oligonucleotide
caugugagacaugacccaa

SEQ ID NO: 1001444 - RNA, 19 nt, Artificial Sequence
  Description of Artificial Sequence: Synthetic oligonucleotide
cugggucaucacagagaag

SEQ ID NO: 1001445 - RNA, 19 nt, Artificial Sequence
  Description of Artificial Sequence: Synthetic oligonucleotide
aggagucuucgucuucguu

SEQ ID NO: 1001446 - RNA, 19 nt, Artificial Sequence
  Description of Artificial Sequence: Synthetic oligonucleotide
uguagucgacucgcugcgu

SEQ ID NO: 1001447 - RNA, 19 nt, Artificial Sequence
  Description of Artificial Sequence: Synthetic oligonucleotide
ccaccauguugauaaggug

SEQ ID NO: 1001448 - RNA, 19 nt, Artificial Sequence
  Description of Artificial Sequence: Synthetic oligonucleotide
aaguccccaugugacuaau

SEQ ID NO: 1001449 - RNA, 19 nt, Artificial Sequence
  Description of Artificial Sequence: Synthetic oligonucleotide
agguacagacucagagaug

SEQ ID NO: 1001450 - RNA, 19 nt, Artificial Sequence
  Description of Artificial Sequence: Synthetic oligonucleotide
cuacagcccguucuaaacu

SEQ ID NO: 1001451 - RNA, 19 nt, Artificial Sequence
  Description of Artificial Sequence: Synthetic oligonucleotide
aggcagucggccccuuccu

SEQ ID NO: 1001452 - RNA, 19 nt, Artificial Sequence
  Description of Artificial Sequence: Synthetic oligonucleotide
gagcgccuugaacauucga

SEQ ID NO: 1001453 - RNA, 19 nt, Artificial Sequence
  Description of Artificial Sequence: Synthetic oligonucleotide
ccggcaggcguccaugggg

SEQ ID NO: 1001454 - RNA, 19 nt, Artificial Sequence
  Description of Artificial Sequence: Synthetic oligonucleotide
guagggcugugcuccagaa

SEQ ID NO: 1001455 - RNA, 19 nt, Artificial Sequence
  Description of Artificial Sequence: Synthetic oligonucleotide
guagaucacccaucugccu

SEQ ID NO: 1001456 - RNA, 19 nt, Artificial Sequence
  Description of Artificial Sequence: Synthetic oligonucleotide
ccaucccggacuuuagguc

SEQ ID NO: 1001457 - RNA, 19 nt, Artificial Sequence
  Description of Artificial Sequence: Synthetic oligonucleotide
agucguccaccugcucagg

SEQ ID NO: 1001458 - RNA, 19 nt, Artificial Sequence
  Description of Artificial Sequence: Synthetic oligonucleotide
caguguggacaggcagucg

SEQ ID NO: 1001459 - RNA, 19 nt, Artificial Sequence
  Description of Artificial Sequence: Synthetic oligonucleotide
cugccgauuguggagaacu

SEQ ID NO: 1001460 - RNA, 19 nt, Artificial Sequence
  Description of Artificial Sequence: Synthetic oligonucleotide
gucgacucgcugcguguac

SEQ ID NO: 1001461 - RNA, 19 nt, Artificial Sequence
  Description of Artificial Sequence: Synthetic oligonucleotide
ugcugccgauuguggagaa

SEQ ID NO: 1001462 - RNA, 19 nt, Artificial Sequence
  Description of Artificial Sequence: Synthetic oligonucleotide
cacagucgccucccucccc

SEQ ID NO: 1001463 - RNA, 19 nt, Artificial Sequence
  Description of Artificial Sequence: Synthetic oligonucleotide
caacaugggugaugucgga

SEQ ID NO: 1001464 - RNA, 19 nt, Artificial Sequence
  Description of Artificial Sequence: Synthetic oligonucleotide
uucauccaacaugggugau

SEQ ID NO: 1001465 - RNA, 19 nt, Artificial Sequence
  Description of Artificial Sequence: Synthetic oligonucleotide
auuucgccuguagggcugu

SEQ ID NO: 1001466 - RNA, 19 nt, Artificial Sequence
  Description of Artificial Sequence: Synthetic oligonucleotide
caaugagcgccuugaacau

SEQ ID NO: 1001467 - RNA, 19 nt, Artificial Sequence
  Description of Artificial Sequence: Synthetic oligonucleotide
ccaguuccggcagugguac

SEQ ID NO: 1001468 - RNA, 19 nt, Artificial Sequence
  Description of Artificial Sequence: Synthetic oligonucleotide
gcccgaaccaguuccggca

SEQ ID NO: 1001469 - RNA, 19 nt, Artificial Sequence
  Description of Artificial Sequence: Synthetic oligonucleotide
ccaugugagacaugaccca

SEQ ID NO: 1001470 - RNA, 19 nt, Artificial Sequence
  Description of Artificial Sequence: Synthetic oligonucleotide
cugaguaccccuucucuuu

SEQ ID NO: 1001471 - RNA, 19 nt, Artificial Sequence
  Description of Artificial Sequence: Synthetic oligonucleotide
ccuuugggcucauccggag

SEQ ID NO: 1001472 - RNA, 19 nt, Artificial Sequence
  Description of Artificial Sequence: Synthetic oligonucleotide
ggcccgaaccaguuccggc

SEQ ID NO: 1001473 - RNA, 19 nt, Artificial Sequence
  Description of Artificial Sequence: Synthetic oligonucleotide
auccaaucuacagcccguu

SEQ ID NO: 1001474 - RNA, 19 nt, Artificial Sequence
  Description of Artificial Sequence: Synthetic oligonucleotide
ggagucagcagcugagcgu

SEQ ID NO: 1001475 - RNA, 19 nt, Artificial Sequence
  Description of Artificial Sequence: Synthetic oligonucleotide
cccagucuaagccaaaggu

SEQ ID NO: 1001476 - RNA, 19 nt, Artificial Sequence
  Description of Artificial Sequence: Synthetic oligonucleotide
cauucuccuaccgccucca

SEQ ID NO: 1001477 - RNA, 19 nt, Artificial Sequence
  Description of Artificial Sequence: Synthetic oligonucleotide
guucagcgcugcauccaug

SEQ ID NO: 1001478 - RNA, 19 nt, Artificial Sequence
  Description of Artificial Sequence: Synthetic oligonucleotide
gucccuugagaagcccaug

SEQ ID NO: 1001479 - RNA, 19 nt, Artificial Sequence
  Description of Artificial Sequence: Synthetic oligonucleotide
gucuguccccugcccgaag

SEQ ID NO: 1001480 - RNA, 19 nt, Artificial Sequence
  Description of Artificial Sequence: Synthetic oligonucleotide
cccuguauaguagacagcu

SEQ ID NO: 1001481 - RNA, 19 nt, Artificial Sequence
  Description of Artificial Sequence: Synthetic oligonucleotide
cucuuuguucagcgcugca

SEQ ID NO: 1001482 - RNA, 19 nt, Artificial Sequence
  Description of Artificial Sequence: Synthetic oligonucleotide
ccaaucuacagcccguucu

SEQ ID NO: 1001483 - RNA, 19 nt, Artificial Sequence
  Description of Artificial Sequence: Synthetic oligonucleotide
ggcagacauagugaccaca

SEQ ID NO: 1001484 - RNA, 19 nt, Artificial Sequence
  Description of Artificial Sequence: Synthetic oligonucleotide
acagcccguucuaaacuau

SEQ ID NO: 1001485 - RNA, 19 nt, Artificial Sequence
  Description of Artificial Sequence: Synthetic oligonucleotide
ggcccuugccaaugagcgc

SEQ ID NO: 1001486 - RNA, 19 nt, Artificial Sequence
  Description of Artificial Sequence: Synthetic oligonucleotide
cucccaacucgaggggcug

SEQ ID NO: 1001487 - RNA, 19 nt, Artificial Sequence
  Description of Artificial Sequence: Synthetic oligonucleotide
caauggaaacauccaguuu

SEQ ID NO: 1001488 - RNA, 19 nt, Artificial Sequence
  Description of Artificial Sequence: Synthetic oligonucleotide
gcucuauccccaaagucua

SEQ ID NO: 1001489 - RNA, 19 nt, Artificial Sequence
  Description of Artificial Sequence: Synthetic oligonucleotide
agucgacucgcugcgugua

SEQ ID NO: 1001490 - RNA, 19 nt, Artificial Sequence
  Description of Artificial Sequence: Synthetic oligonucleotide
agaccccucccaacucgag

SEQ ID NO: 1001491 - RNA, 19 nt, Artificial Sequence
  Description of Artificial Sequence: Synthetic oligonucleotide
cccacgcacacacaguuaa

SEQ ID NO: 1001492 - RNA, 19 nt, Artificial Sequence
  Description of Artificial Sequence: Synthetic oligonucleotide
cuaagccaaaggugaacuu

SEQ ID NO: 1001493 - RNA, 19 nt, Artificial Sequence
  Description of Artificial Sequence: Synthetic oligonucleotide
augaggggauuggcaaaau

SEQ ID NO: 1001494 - RNA, 19 nt, Artificial Sequence
  Description of Artificial Sequence: Synthetic oligonucleotide
ggaccaucccggacuuuag

SEQ ID NO: 1001495 - RNA, 19 nt, Artificial Sequence
  Description of Artificial Sequence: Synthetic oligonucleotide
ggcagucggccccuuccug

SEQ ID NO: 1001496 - RNA, 19 nt, Artificial Sequence
  Description of Artificial Sequence: Synthetic oligonucleotide
cccgaaccaguuccggcag

SEQ ID NO: 1001497 - RNA, 19 nt, Artificial Sequence
  Description of Artificial Sequence: Synthetic oligonucleotide
gucgccucccuccccugga

SEQ ID NO: 1001498 - RNA, 19 nt, Artificial Sequence
  Description of Artificial Sequence: Synthetic oligonucleotide
ccacgcacacacaguuaag

SEQ ID NO: 1001499 - RNA, 19 nt, Artificial Sequence
  Description of Artificial Sequence: Synthetic oligonucleotide
guacagacucagagaugga

SEQ ID NO: 1001500 - RNA, 19 nt, Artificial Sequence
  Description of Artificial Sequence: Synthetic oligonucleotide
gcccguucuaaacuauugu

SEQ ID NO: 1001501 - RNA, 19 nt, Artificial Sequence
  Description of Artificial Sequence: Synthetic oligonucleotide
uuucgccuguagggcugug

SEQ ID NO: 1001502 - RNA, 19 nt, Artificial Sequence
  Description of Artificial Sequence: Synthetic oligonucleotide
cuaggucaucaaugugacu

SEQ ID NO: 1001503 - RNA, 19 nt, Artificial Sequence
  Description of Artificial Sequence: Synthetic oligonucleotide
gacccaauucauggcugcu

SEQ ID NO: 1001504 - RNA, 19 nt, Artificial Sequence
  Description of Artificial Sequence: Synthetic oligonucleotide
ggcaaaccguguagucuug

SEQ ID NO: 1001505 - RNA, 19 nt, Artificial Sequence
  Description of Artificial Sequence: Synthetic oligonucleotide
gcgucccucugagaugucc

SEQ ID NO: 1001506 - RNA, 19 nt, Artificial Sequence
  Description of Artificial Sequence: Synthetic oligonucleotide
ggucaucaaugugacugaa

SEQ ID NO: 1001507 - RNA, 19 nt, Artificial Sequence
  Description of Artificial Sequence: Synthetic oligonucleotide
ggcaauuccucuccaccau

SEQ ID NO: 1001508 - RNA, 19 nt, Artificial Sequence
  Description of Artificial Sequence: Synthetic oligonucleotide
gggagcagaaggagucuuc

SEQ ID NO: 1001509 - RNA, 19 nt, Artificial Sequence
  Description of Artificial Sequence: Synthetic oligonucleotide
ucccggacuuuagguccca

SEQ ID NO: 1001510 - RNA, 19 nt, Artificial Sequence
  Description of Artificial Sequence: Synthetic oligonucleotide
cggauucauccaacauggg

SEQ ID NO: 1001511 - RNA, 19 nt, Artificial Sequence
  Description of Artificial Sequence: Synthetic oligonucleotide
ggcacccagucuaagccaa

SEQ ID NO: 1001512 - RNA, 19 nt, Artificial Sequence
  Description of Artificial Sequence: Synthetic oligonucleotide
ccccaaagucuacugagua

SEQ ID NO: 1001513 - RNA, 19 nt, Artificial Sequence
  Description of Artificial Sequence: Synthetic oligonucleotide
aucccucaugccagauggu

SEQ ID NO: 1001514 - RNA, 19 nt, Artificial Sequence
  Description of Artificial Sequence: Synthetic oligonucleotide
gggcccgaaccaguuccgg

SEQ ID NO: 1001515 - RNA, 19 nt, Artificial Sequence
  Description of Artificial Sequence: Synthetic oligonucleotide
ggcuuuucagaggcacaca

SEQ ID NO: 1001516 - RNA, 19 nt, Artificial Sequence
  Description of Artificial Sequence: Synthetic oligonucleotide
cagucgccucccuccccug

SEQ ID NO: 1001517 - RNA, 19 nt, Artificial Sequence
  Description of Artificial Sequence: Synthetic oligonucleotide
gcugcuucggccccacuau

SEQ ID NO: 1001518 - RNA, 19 nt, Artificial Sequence
  Description of Artificial Sequence: Synthetic oligonucleotide
ccagauggucuguccccug

SEQ ID NO: 1001519 - RNA, 19 nt, Artificial Sequence
  Description of Artificial Sequence: Synthetic oligonucleotide
cccguucuaaacuauuguu

SEQ ID NO: 1001520 - RNA, 19 nt, Artificial Sequence
  Description of Artificial Sequence: Synthetic oligonucleotide
ggaaggaggcaaaccgugu

SEQ ID NO: 1001521 - RNA, 19 nt, Artificial Sequence
  Description of Artificial Sequence: Synthetic oligonucleotide
ccggagugaccaggggugg

SEQ ID NO: 1001522 - RNA, 19 nt, Artificial Sequence
  Description of Artificial Sequence: Synthetic oligonucleotide
ccggacuuuaggucccaca

SEQ ID NO: 1001523 - RNA, 19 nt, Artificial Sequence
  Description of Artificial Sequence: Synthetic oligonucleotide
cccugcccgaagugguaag

SEQ ID NO: 1001524 - RNA, 19 nt, Artificial Sequence
  Description of Artificial Sequence: Synthetic oligonucleotide
gcagagcacuguggauucc

SEQ ID NO: 1001525 - RNA, 19 nt, Artificial Sequence
  Description of Artificial Sequence: Synthetic oligonucleotide
ggucaggcucuuagcugac

SEQ ID NO: 1001526 - RNA, 19 nt, Artificial Sequence
  Description of Artificial Sequence: Synthetic oligonucleotide
acccacgcacacacaguua

SEQ ID NO: 1001527 - RNA, 19 nt, Artificial Sequence
  Description of Artificial Sequence: Synthetic oligonucleotide
cgucccucugagaugucca

SEQ ID NO: 1001528 - RNA, 19 nt, Artificial Sequence
  Description of Artificial Sequence: Synthetic oligonucleotide
ccacgaggaccaggggagg

SEQ ID NO: 1001529 - RNA, 19 nt, Artificial Sequence
  Description of Artificial Sequence: Synthetic oligonucleotide
gcugagcgucccucugaga

SEQ ID NO: 1001530 - RNA, 19 nt, Artificial Sequence
  Description of Artificial Sequence: Synthetic oligonucleotide
agcgucccucugagauguc

SEQ ID NO: 1001531 - RNA, 19 nt, Artificial Sequence
  Description of Artificial Sequence: Synthetic oligonucleotide
cagcccguucuaaacuauu

SEQ ID NO: 1001532 - RNA, 19 nt, Artificial Sequence
  Description of Artificial Sequence: Synthetic oligonucleotide
ccguguagucuugacagcu

SEQ ID NO: 1001533 - RNA, 19 nt, Artificial Sequence
  Description of Artificial Sequence: Synthetic oligonucleotide
gcugccgauuguggagaac

SEQ ID NO: 1001534 - RNA, 19 nt, Artificial Sequence
  Description of Artificial Sequence: Synthetic oligonucleotide
cugcgccccucaacuggga

SEQ ID NO: 1001535 - RNA, 19 nt, Artificial Sequence
  Description of Artificial Sequence: Synthetic oligonucleotide
ccacagguacagacucaga

SEQ ID NO: 1001536 - RNA, 19 nt, Artificial Sequence
  Description of Artificial Sequence: Synthetic oligonucleotide
ccacuauucccuguauagu

SEQ ID NO: 1001537 - RNA, 19 nt, Artificial Sequence
  Description of Artificial Sequence: Synthetic oligonucleotide
caccugggcccgaaccagu

SEQ ID NO: 1001538 - RNA, 19 nt, Artificial Sequence
  Description of Artificial Sequence: Synthetic oligonucleotide
cgcugcguguacuucaccu

SEQ ID NO: 1001539 - RNA, 19 nt, Artificial Sequence
  Description of Artificial Sequence: Synthetic oligonucleotide
ccucaacugggagaugucu

SEQ ID NO: 1001540 - RNA, 19 nt, Artificial Sequence
  Description of Artificial Sequence: Synthetic oligonucleotide
cgucuucguugccauagaa

SEQ ID NO: 1001541 - RNA, 19 nt, Artificial Sequence
  Description of Artificial Sequence: Synthetic oligonucleotide
cguguagucuugacagcua

SEQ ID NO: 1001542 - RNA, 19 nt, Artificial Sequence
  Description of Artificial Sequence: Synthetic oligonucleotide
ccccucaacugggagaugu

SEQ ID NO: 1001543 - RNA, 19 nt, Artificial Sequence
  Description of Artificial Sequence: Synthetic oligonucleotide
ccccacuauucccuguaua

SEQ ID NO: 1001544 - RNA, 19 nt, Artificial Sequence
  Description of Artificial Sequence: Synthetic oligonucleotide
ccgaagugguaaggguuga

SEQ ID NO: 1001545 - RNA, 19 nt, Artificial Sequence
  Description of Artificial Sequence: Synthetic oligonucleotide
gggcaauaucaggcagcuc

SEQ ID NO: 1001546 - RNA, 19 nt, Artificial Sequence
  Description of Artificial Sequence: Synthetic oligonucleotide
ggcaggcguccauggggaa

SEQ ID NO: 1001547 - RNA, 19 nt, Artificial Sequence
  Description of Artificial Sequence: Synthetic oligonucleotide
cgccuguagggcugugcuc

SEQ ID NO: 1001548 - RNA, 19 nt, Artificial Sequence
  Description of Artificial Sequence: Synthetic oligonucleotide
ggggagcagaaggagucuu

SEQ ID NO: 1001549 - RNA, 19 nt, Artificial Sequence
  Description of Artificial Sequence: Synthetic oligonucleotide
gguugaggucaggcucuua

SEQ ID NO: 1001550 - RNA, 19 nt, Artificial Sequence
  Description of Artificial Sequence: Synthetic oligonucleotide
cccggacuuuaggucccac

SEQ ID NO: 1001551 - RNA, 19 nt, Artificial Sequence
  Description of Artificial Sequence: Synthetic oligonucleotide
ccccaucccucaugccaga

SEQ ID NO: 1001552 - RNA, 19 nt, Artificial Sequence
  Description of Artificial Sequence: Synthetic oligonucleotide
ggcuaccuuugggcucauc

SEQ ID NO: 1001553 - RNA, 19 nt, Artificial Sequence
  Description of Artificial Sequence: Synthetic oligonucleotide
aggcuaccuuugggcucau

SEQ ID NO: 1001554 - RNA, 19 nt, Artificial Sequence
  Description of Artificial Sequence: Synthetic oligonucleotide
ccuaccgccuccagcucuu

SEQ ID NO: 1001555 - RNA, 19 nt, Artificial Sequence
  Description of Artificial Sequence: Synthetic oligonucleotide
ccccugcccgaagugguaa

SEQ ID NO: 1001556 - RNA, 19 nt, Artificial Sequence
  Description of Artificial Sequence: Synthetic oligonucleotide
gccccucaacugggagaug

SEQ ID NO: 1001557 - RNA, 19 nt, Artificial Sequence
  Description of Artificial Sequence: Synthetic oligonucleotide
ccgaaccaguuccggcagu

SEQ ID NO: 1001558 - RNA, 19 nt, Artificial Sequence
  Description of Artificial Sequence: Synthetic oligonucleotide
cgccccucaacugggagau

SEQ ID NO: 1001559 - RNA, 19 nt, Artificial Sequence
  Description of Artificial Sequence: Synthetic oligonucleotide
ccaacucgaggggcugggu

SEQ ID NO: 1001560 - RNA, 19 nt, Artificial Sequence
  Description of Artificial Sequence: Synthetic oligonucleotide
cuaccgccuccagcucuuu

SEQ ID NO: 1001561 - RNA, 19 nt, Artificial Sequence
  Description of Artificial Sequence: Synthetic oligonucleotide
cgacucgcugcguguacuu

SEQ ID NO: 1001562 - RNA, 19 nt, Artificial Sequence
  Description of Artificial Sequence: Synthetic oligonucleotide
caggaccaucccggacuuu

SEQ ID NO: 1001563 - RNA, 19 nt, Artificial Sequence
  Description of Artificial Sequence: Synthetic oligonucleotide
uuugauaggaacagcauag

SEQ ID NO: 1001564 - RNA, 19 nt, Artificial Sequence
  Description of Artificial Sequence: Synthetic oligonucleotide
uacagagagauuaauacag

SEQ ID NO: 1001565 - RNA, 19 nt, Artificial Sequence
  Description of Artificial Sequence: Synthetic oligonucleotide
aaaccaaccaucauuggcc

SEQ ID NO: 1001566 - RNA, 19 nt, Artificial Sequence
  Description of Artificial Sequence: Synthetic oligonucleotide
aagaucacgauugggaacc

SEQ ID NO: 1001567 - RNA, 19 nt, Artificial Sequence
  Description of Artificial Sequence: Synthetic oligonucleotide
auuucuguggcucuggagg

SEQ ID NO: 1001568 - RNA, 19 nt, Artificial Sequence
  Description of Artificial Sequence: Synthetic oligonucleotide
uuaacuuacagagagauua

SEQ ID NO: 1001569 - RNA, 19 nt, Artificial Sequence
  Description of Artificial Sequence: Synthetic oligonucleotide
ugucuuaugguuuuaacac

SEQ ID NO: 1001570 - RNA, 19 nt, Artificial Sequence
  Description of Artificial Sequence: Synthetic oligonucleotide
gagauuaauacagauuugg

SEQ ID NO: 1001571 - RNA, 19 nt, Artificial Sequence
  Description of Artificial Sequence: Synthetic oligonucleotide
aggucuagagcucaugugc

SEQ ID NO: 1001572 - RNA, 19 nt, Artificial Sequence
  Description of Artificial Sequence: Synthetic oligonucleotide
aaagaucacgauugggaac

SEQ ID NO: 1001573 - RNA, 19 nt, Artificial Sequence
  Description of Artificial Sequence: Synthetic oligonucleotide
aguuaaguaggacaugcgg

SEQ ID NO: 1001574 - RNA, 19 nt, Artificial Sequence
  Description of Artificial Sequence: Synthetic oligonucleotide
aauucacguuaauuguagc

SEQ ID NO: 1001575 - RNA, 19 nt, Artificial Sequence
  Description of Artificial Sequence: Synthetic oligonucleotide
ugaucaaauaacuuccgug

SEQ ID NO: 1001576 - RNA, 19 nt, Artificial Sequence
  Description of Artificial Sequence: Synthetic oligonucleotide
uuggaugucggauucaacc

SEQ ID NO: 1001577 - RNA, 19 nt, Artificial Sequence
  Description of Artificial Sequence: Synthetic oligonucleotide
gcugucacaacucagauag

SEQ ID NO: 1001578 - RNA, 19 nt, Artificial Sequence
  Description of Artificial Sequence: Synthetic oligonucleotide
gaucaaauaacuuccguga

SEQ ID NO: 1001579 - RNA, 19 nt, Artificial Sequence
  Description of Artificial Sequence: Synthetic oligonucleotide
acuguaaaaucauacucag

SEQ ID NO: 1001580 - RNA, 19 nt, Artificial Sequence
  Description of Artificial Sequence: Synthetic oligonucleotide
aguaaccacgcuuugagug

SEQ ID NO: 1001581 - RNA, 19 nt, Artificial Sequence
  Description of Artificial Sequence: Synthetic oligonucleotide
aaaagaucacgauugggaa

SEQ ID NO: 1001582 - RNA, 19 nt, Artificial Sequence
  Description of Artificial Sequence: Synthetic oligonucleotide
agaaccuucucguaggcag

SEQ ID NO: 1001583 - RNA, 19 nt, Artificial Sequence
  Description of Artificial Sequence: Synthetic oligonucleotide
gagguguuugacuuggagg

SEQ ID NO: 1001584 - RNA, 19 nt, Artificial Sequence
  Description of Artificial Sequence: Synthetic oligonucleotide
ucuuaugguuuuaacaccu

SEQ ID NO: 1001585 - RNA, 19 nt, Artificial Sequence
  Description of Artificial Sequence: Synthetic oligonucleotide
ucgugguagagucuggacg

SEQ ID NO: 1001586 - RNA, 19 nt, Artificial Sequence
  Description of Artificial Sequence: Synthetic oligonucleotide
cuuccgugaacuuuuauug

SEQ ID NO: 1001587 - RNA, 19 nt, Artificial Sequence
  Description of Artificial Sequence: Synthetic oligonucleotide
aaccgaacuacuccacugg

SEQ ID NO: 1001588 - RNA, 19 nt, Artificial Sequence
  Description of Artificial Sequence: Synthetic oligonucleotide
uuggcuugaucaaauaacu

SEQ ID NO: 1001589 - RNA, 19 nt, Artificial Sequence
  Description of Artificial Sequence: Synthetic oligonucleotide
uuuauuggaugucggauuc

SEQ ID NO: 1001590 - RNA, 19 nt, Artificial Sequence
  Description of Artificial Sequence: Synthetic oligonucleotide
ucugcagugcacuuuaacu

SEQ ID NO: 1001591 - RNA, 19 nt, Artificial Sequence
  Description of Artificial Sequence: Synthetic oligonucleotide
guaguaaccacgcuuugag

SEQ ID NO: 1001592 - RNA, 19 nt, Artificial Sequence
  Description of Artificial Sequence: Synthetic oligonucleotide
acugccauagcucgugucg

SEQ ID NO: 1001593 - RNA, 19 nt, Artificial Sequence
  Description of Artificial Sequence: Synthetic oligonucleotide
uuaauacagauuuggucca

SEQ ID NO: 1001594 - RNA, 19 nt, Artificial Sequence
  Description of Artificial Sequence: Synthetic oligonucleotide
aauaagaccacaggucucu

SEQ ID NO: 1001595 - RNA, 19 nt, Artificial Sequence
  Description of Artificial Sequence: Synthetic oligonucleotide
agucagguaacucguuggc

SEQ ID NO: 1001596 - RNA, 19 nt, Artificial Sequence
  Description of Artificial Sequence: Synthetic oligonucleotide
gauugggaaccacugagug

SEQ ID NO: 1001597 - RNA, 19 nt, Artificial Sequence
  Description of Artificial Sequence: Synthetic oligonucleotide
gagagauuaauacagauuu

SEQ ID NO: 1001598 - RNA, 19 nt, Artificial Sequence
  Description of Artificial Sequence: Synthetic oligonucleotide
uuaaguaggacaugcgguc

SEQ ID NO: 1001599 - RNA, 19 nt, Artificial Sequence
  Description of Artificial Sequence: Synthetic oligonucleotide
ggcuauaucugcuaugggg

SEQ ID NO: 1001600 - RNA, 19 nt, Artificial Sequence
  Description of Artificial Sequence: Synthetic oligonucleotide
caaaccaaccaucauuggc

SEQ ID NO: 1001601 - RNA, 19 nt, Artificial Sequence
  Description of Artificial Sequence: Synthetic oligonucleotide
ugcuauggggccaaauaag

SEQ ID NO: 1001602 - RNA, 19 nt, Artificial Sequence
  Description of Artificial Sequence: Synthetic oligonucleotide
uucacguuaauuguagcug

SEQ ID NO: 1001603 - RNA, 19 nt, Artificial Sequence
  Description of Artificial Sequence: Synthetic oligonucleotide
ggacaugcggucuugaggg

SEQ ID NO: 1001604 - RNA, 19 nt, Artificial Sequence
  Description of Artificial Sequence: Synthetic oligonucleotide
auggcuauaucugcuaugg

SEQ ID NO: 1001605 - RNA, 19 nt, Artificial Sequence
  Description of Artificial Sequence: Synthetic oligonucleotide
uugggcgucacaucgagca

SEQ ID NO: 1001606 - RNA, 19 nt, Artificial Sequence
  Description of Artificial Sequence: Synthetic oligonucleotide
auucacguuaauuguagcu

SEQ ID NO: 1001607 - RNA, 19 nt, Artificial Sequence
  Description of Artificial Sequence: Synthetic oligonucleotide
ugguaauucgugcugucug

SEQ ID NO: 1001608 - RNA, 19 nt, Artificial Sequence
  Description of Artificial Sequence: Synthetic oligonucleotide
uuugccuugugauccaucu

SEQ ID NO: 1001609 - RNA, 19 nt, Artificial Sequence
  Description of Artificial Sequence: Synthetic oligonucleotide
agucguaggauucuucucu

SEQ ID NO: 1001610 - RNA, 19 nt, Artificial Sequence
  Description of Artificial Sequence: Synthetic oligonucleotide
cugaguguaguugagcagg

SEQ ID NO: 1001611 - RNA, 19 nt, Artificial Sequence
  Description of Artificial Sequence: Synthetic oligonucleotide
uuccgugaacuuuuauugg

SEQ ID NO: 1001612 - RNA, 19 nt, Artificial Sequence
  Description of Artificial Sequence: Synthetic oligonucleotide
ucggauucaaccucugucu

SEQ ID NO: 1001613 - RNA, 19 nt, Artificial Sequence
  Description of Artificial Sequence: Synthetic oligonucleotide
aggacaugcggucuugagg

SEQ ID NO: 1001614 - RNA, 19 nt, Artificial Sequence
  Description of Artificial Sequence: Synthetic oligonucleotide
agauccugcaucuuugggu

SEQ ID NO: 1001615 - RNA, 19 nt, Artificial Sequence
  Description of Artificial Sequence: Synthetic oligonucleotide
ucagguaacucguuggcaa

SEQ ID NO: 1001616 - RNA, 19 nt, Artificial Sequence
  Description of Artificial Sequence: Synthetic oligonucleotide
ugagacggcugucacaacu

SEQ ID NO: 1001617 - RNA, 19 nt, Artificial Sequence
  Description of Artificial Sequence: Synthetic oligonucleotide
aaauaagaccacaggucuc

SEQ ID NO: 1001618 - RNA, 19 nt, Artificial Sequence
  Description of Artificial Sequence: Synthetic oligonucleotide
gccgaauucacguuaauug

SEQ ID NO: 1001619 - RNA, 19 nt, Artificial Sequence
  Description of Artificial Sequence: Synthetic oligonucleotide
aacuacuccacuggauuuc

SEQ ID NO: 1001620 - RNA, 19 nt, Artificial Sequence
  Description of Artificial Sequence: Synthetic oligonucleotide
ucacgauugggaaccacug

SEQ ID NO: 1001621 - RNA, 19 nt, Artificial Sequence
  Description of Artificial Sequence: Synthetic oligonucleotide
uccgugaacuuuuauugga

SEQ ID NO: 1001622 - RNA, 19 nt, Artificial Sequence
  Description of Artificial Sequence: Synthetic oligonucleotide
ucacguuaauuguagcugu

SEQ ID NO: 1001623 - RNA, 19 nt, Artificial Sequence
  Description of Artificial Sequence: Synthetic oligonucleotide
aguguaggcgccucccucg

SEQ ID NO: 1001624 - RNA, 19 nt, Artificial Sequence
  Description of Artificial Sequence: Synthetic oligonucleotide
ucguaggcagggaacuugg

SEQ ID NO: 1001625 - RNA, 19 nt, Artificial Sequence
  Description of Artificial Sequence: Synthetic oligonucleotide
ugccucacaguguucaacc

SEQ ID NO: 1001626 - RNA, 19 nt, Artificial Sequence
  Description of Artificial Sequence: Synthetic oligonucleotide
uccucaugugagcucgugg

SEQ ID NO: 1001627 - RNA, 19 nt, Artificial Sequence
  Description of Artificial Sequence: Synthetic oligonucleotide
ugauaggaacagcauagau

SEQ ID NO: 1001628 - RNA, 19 nt, Artificial Sequence
  Description of Artificial Sequence: Synthetic oligonucleotide
aaguugaucucugcuagca

SEQ ID NO: 1001629 - RNA, 19 nt, Artificial Sequence
  Description of Artificial Sequence: Synthetic oligonucleotide
agagguguuugacuuggag

SEQ ID NO: 1001630 - RNA, 19 nt, Artificial Sequence
  Description of Artificial Sequence: Synthetic oligonucleotide
cuauaucugcuauggggcc

SEQ ID NO: 1001631 - RNA, 19 nt, Artificial Sequence
  Description of Artificial Sequence: Synthetic oligonucleotide
acaacucagauaguccgcg

SEQ ID NO: 1001632 - RNA, 19 nt, Artificial Sequence
  Description of Artificial Sequence: Synthetic oligonucleotide
cugucuuaugguuuuaaca

SEQ ID NO: 1001633 - RNA, 19 nt, Artificial Sequence
  Description of Artificial Sequence: Synthetic oligonucleotide
guaaccacgcuuugagugc

SEQ ID NO: 1001634 - RNA, 19 nt, Artificial Sequence
  Description of Artificial Sequence: Synthetic oligonucleotide
cagucagguaacucguugg

SEQ ID NO: 1001635 - RNA, 19 nt, Artificial Sequence
  Description of Artificial Sequence: Synthetic oligonucleotide
uuggcgguauuccuccucc

SEQ ID NO: 1001636 - RNA, 19 nt, Artificial Sequence
  Description of Artificial Sequence: Synthetic oligonucleotide
ucugucuuaugguuuuaac

SEQ ID NO: 1001637 - RNA, 19 nt, Artificial Sequence
  Description of Artificial Sequence: Synthetic oligonucleotide
aacuguuggcgguauuccu

SEQ ID NO: 1001638 - RNA, 19 nt, Artificial Sequence
  Description of Artificial Sequence: Synthetic oligonucleotide
acuuccgugaacuuuuauu

SEQ ID NO: 1001639 - RNA, 19 nt, Artificial Sequence
  Description of Artificial Sequence: Synthetic oligonucleotide
uccacaccaaagcaaguaa

SEQ ID NO: 1001640 - RNA, 19 nt, Artificial Sequence
  Description of Artificial Sequence: Synthetic oligonucleotide
uuaacaccuugucuggaau

SEQ ID NO: 1001641 - RNA, 19 nt, Artificial Sequence
  Description of Artificial Sequence: Synthetic oligonucleotide
gaugagacggcugucacaa

SEQ ID NO: 1001642 - RNA, 19 nt, Artificial Sequence
  Description of Artificial Sequence: Synthetic oligonucleotide
uggaucggccggaagcagg

SEQ ID NO: 1001643 - RNA, 19 nt, Artificial Sequence
  Description of Artificial Sequence: Synthetic oligonucleotide
cuguaaaaucauacucagc

SEQ ID NO: 1001644 - RNA, 19 nt, Artificial Sequence
  Description of Artificial Sequence: Synthetic oligonucleotide
ucaaccgaacuacuccacu

SEQ ID NO: 1001645 - RNA, 19 nt, Artificial Sequence
  Description of Artificial Sequence: Synthetic oligonucleotide
uguaguaaccacgcuuuga

SEQ ID NO: 1001646 - RNA, 19 nt, Artificial Sequence
  Description of Artificial Sequence: Synthetic oligonucleotide
cuauggggccaaauaagac

SEQ ID NO: 1001647 - RNA, 19 nt, Artificial Sequence
  Description of Artificial Sequence: Synthetic oligonucleotide
uugguccacaccaaagcaa

SEQ ID NO: 1001648 - RNA, 19 nt, Artificial Sequence
  Description of Artificial Sequence: Synthetic oligonucleotide
ccaaauaagaccacagguc

SEQ ID NO: 1001649 - RNA, 19 nt, Artificial Sequence
  Description of Artificial Sequence: Synthetic oligonucleotide
acaguguucaaccgaacua

SEQ ID NO: 1001650 - RNA, 19 nt, Artificial Sequence
  Description of Artificial Sequence: Synthetic oligonucleotide
uguuugacuuggaggaguc

SEQ ID NO: 1001651 - RNA, 19 nt, Artificial Sequence
  Description of Artificial Sequence: Synthetic oligonucleotide
caauccucgcauucugugc

SEQ ID NO: 1001652 - RNA, 19 nt, Artificial Sequence
  Description of Artificial Sequence: Synthetic oligonucleotide
uucgccuugcugcugcuga

SEQ ID NO: 1001653 - RNA, 19 nt, Artificial Sequence
  Description of Artificial Sequence: Synthetic oligonucleotide
ucguuggcaagccuuucca

SEQ ID NO: 1001654 - RNA, 19 nt, Artificial Sequence
  Description of Artificial Sequence: Synthetic oligonucleotide
gcuauaucugcuauggggc

SEQ ID NO: 1001655 - RNA, 19 nt, Artificial Sequence
  Description of Artificial Sequence: Synthetic oligonucleotide
uaauucgugcugucuguca

SEQ ID NO: 1001656 - RNA, 19 nt, Artificial Sequence
  Description of Artificial Sequence: Synthetic oligonucleotide
gaggucuagagcucaugug

SEQ ID NO: 1001657 - RNA, 19 nt, Artificial Sequence
  Description of Artificial Sequence: Synthetic oligonucleotide
auccucuguaauuuugccu

SEQ ID NO: 1001658 - RNA, 19 nt, Artificial Sequence
  Description of Artificial Sequence: Synthetic oligonucleotide
gucggauucaaccucuguc

SEQ ID NO: 1001659 - RNA, 19 nt, Artificial Sequence
  Description of Artificial Sequence: Synthetic oligonucleotide
acggagauuucuguggcuc

SEQ ID NO: 1001660 - RNA, 19 nt, Artificial Sequence
  Description of Artificial Sequence: Synthetic oligonucleotide
cuguuggcgguauuccucc

SEQ ID NO: 1001661 - RNA, 19 nt, Artificial Sequence
  Description of Artificial Sequence: Synthetic oligonucleotide
auugggaaccacugagugu

SEQ ID NO: 1001662 - RNA, 19 nt, Artificial Sequence
  Description of Artificial Sequence: Synthetic oligonucleotide
uuaccccagucccacacac

SEQ ID NO: 1001663 - RNA, 19 nt, Artificial Sequence
  Description of Artificial Sequence: Synthetic oligonucleotide
ugacacggcagcugucagg

SEQ ID NO: 1001664 - RNA, 19 nt, Artificial Sequence
  Description of Artificial Sequence: Synthetic oligonucleotide
uaaccacgcuuugagugcg

SEQ ID NO: 1001665 - RNA, 19 nt, Artificial Sequence
  Description of Artificial Sequence: Synthetic oligonucleotide
agcaccguccugcuccucg

SEQ ID NO: 1001666 - RNA, 19 nt, Artificial Sequence
  Description of Artificial Sequence: Synthetic oligonucleotide
cacgcuuugagugcgcugc

SEQ ID NO: 1001667 - RNA, 19 nt, Artificial Sequence
  Description of Artificial Sequence: Synthetic oligonucleotide
agguaacucguuggcaagc

SEQ ID NO: 1001668 - RNA, 19 nt, Artificial Sequence
  Description of Artificial Sequence: Synthetic oligonucleotide
agagucuggacggagauuu

SEQ ID NO: 1001669 - RNA, 19 nt, Artificial Sequence
  Description of Artificial Sequence: Synthetic oligonucleotide
uaacucguuggcaagccuu

SEQ ID NO: 1001670 - RNA, 19 nt, Artificial Sequence
  Description of Artificial Sequence: Synthetic oligonucleotide
guucaaccgaacuacucca

SEQ ID NO: 1001671 - RNA, 19 nt, Artificial Sequence
  Description of Artificial Sequence: Synthetic oligonucleotide
caaccgaacuacuccacug

SEQ ID NO: 1001672 - RNA, 19 nt, Artificial Sequence
  Description of Artificial Sequence: Synthetic oligonucleotide
aaauaacuuccgugaacuu

SEQ ID NO: 1001673 - RNA, 19 nt, Artificial Sequence
  Description of Artificial Sequence: Synthetic oligonucleotide
uggcuauaucugcuauggg

SEQ ID NO: 1001674 - RNA, 19 nt, Artificial Sequence
  Description of Artificial Sequence: Synthetic oligonucleotide
caucauuggccgaauucac

SEQ ID NO: 1001675 - RNA, 19 nt, Artificial Sequence
  Description of Artificial Sequence: Synthetic oligonucleotide
uauuuucacucugcccagg

SEQ ID NO: 1001676 - RNA, 19 nt, Artificial Sequence
  Description of Artificial Sequence: Synthetic oligonucleotide
ggccaaauaagaccacagg

SEQ ID NO: 1001677 - RNA, 19 nt, Artificial Sequence
  Description of Artificial Sequence: Synthetic oligonucleotide
ugaguguaguugagcaggu

SEQ ID NO: 1001678 - RNA, 19 nt, Artificial Sequence
  Description of Artificial Sequence: Synthetic oligonucleotide
cuuugggcgucacaucgag

SEQ ID NO: 1001679 - RNA, 19 nt, Artificial Sequence
  Description of Artificial Sequence: Synthetic oligonucleotide
acuguuggcgguauuccuc

SEQ ID NO: 1001680 - RNA, 19 nt, Artificial Sequence
  Description of Artificial Sequence: Synthetic oligonucleotide
uucaaccgaacuacuccac

SEQ ID NO: 1001681 - RNA, 19 nt, Artificial Sequence
  Description of Artificial Sequence: Synthetic oligonucleotide
gcaguuaaguaggacaugc

SEQ ID NO: 1001682 - RNA, 19 nt, Artificial Sequence
  Description of Artificial Sequence: Synthetic oligonucleotide
ugucuggaauccagguuga

SEQ ID NO: 1001683 - RNA, 19 nt, Artificial Sequence
  Description of Artificial Sequence: Synthetic oligonucleotide
uuuaccccagucccacaca

SEQ ID NO: 1001684 - RNA, 19 nt, Artificial Sequence
  Description of Artificial Sequence: Synthetic oligonucleotide
uauuggaugucggauucaa

SEQ ID NO: 1001685 - RNA, 19 nt, Artificial Sequence
  Description of Artificial Sequence: Synthetic oligonucleotide
uuuuaacaccuugucugga

SEQ ID NO: 1001686 - RNA, 19 nt, Artificial Sequence
  Description of Artificial Sequence: Synthetic oligonucleotide
auaauuugccucacagugu

SEQ ID NO: 1001687 - RNA, 19 nt, Artificial Sequence
  Description of Artificial Sequence: Synthetic oligonucleotide
uuaugcucuccucgugcug

SEQ ID NO: 1001688 - RNA, 19 nt, Artificial Sequence
  Description of Artificial Sequence: Synthetic oligonucleotide
aacuuacagagagauuaau

SEQ ID NO: 1001689 - RNA, 19 nt, Artificial Sequence
  Description of Artificial Sequence: Synthetic oligonucleotide
gcuaccaucccuaaguuga

SEQ ID NO: 1001690 - RNA, 19 nt, Artificial Sequence
  Description of Artificial Sequence: Synthetic oligonucleotide
uugauaggaacagcauaga

SEQ ID NO: 1001691 - RNA, 19 nt, Artificial Sequence
  Description of Artificial Sequence: Synthetic oligonucleotide
auuggccgaauucacguua

SEQ ID NO: 1001692 - RNA, 19 nt, Artificial Sequence
  Description of Artificial Sequence: Synthetic oligonucleotide
auaguccgcgcccauggca

SEQ ID NO: 1001693 - RNA, 19 nt, Artificial Sequence
  Description of Artificial Sequence: Synthetic oligonucleotide
uccuuaugcucuccucgug

SEQ ID NO: 1001694 - RNA, 19 nt, Artificial Sequence
  Description of Artificial Sequence: Synthetic oligonucleotide
cucguuggcaagccuuucc

SEQ ID NO: 1001695 - RNA, 19 nt, Artificial Sequence
  Description of Artificial Sequence: Synthetic oligonucleotide
ucacaucgagcagagcaug

SEQ ID NO: 1001696 - RNA, 19 nt, Artificial Sequence
  Description of Artificial Sequence: Synthetic oligonucleotide
agagagauuaauacagauu

SEQ ID NO: 1001697 - RNA, 19 nt, Artificial Sequence
  Description of Artificial Sequence: Synthetic oligonucleotide
aguugguaauucgugcugu

SEQ ID NO: 1001698 - RNA, 19 nt, Artificial Sequence
  Description of Artificial Sequence: Synthetic oligonucleotide
cacaucgagcagagcaugc

SEQ ID NO: 1001699 - RNA, 19 nt, Artificial Sequence
  Description of Artificial Sequence: Synthetic oligonucleotide
ccucaugugagcucguggc

SEQ ID NO: 1001700 - RNA, 19 nt, Artificial Sequence
  Description of Artificial Sequence: Synthetic oligonucleotide
uuggggcuuugauaggaac

SEQ ID NO: 1001701 - RNA, 19 nt, Artificial Sequence
  Description of Artificial Sequence: Synthetic oligonucleotide
uaguaaccacgcuuugagu

SEQ ID NO: 1001702 - RNA, 19 nt, Artificial Sequence
  Description of Artificial Sequence: Synthetic oligonucleotide
guuaaguaggacaugcggu

SEQ ID NO: 1001703 - RNA, 19 nt, Artificial Sequence
  Description of Artificial Sequence: Synthetic oligonucleotide
acuuacagagagauuaaua

SEQ ID NO: 1001704 - RNA, 19 nt, Artificial Sequence
  Description of Artificial Sequence: Synthetic oligonucleotide
caacuguuggcgguauucc

SEQ ID NO: 1001705 - RNA, 19 nt, Artificial Sequence
  Description of Artificial Sequence: Synthetic oligonucleotide
ugucggauucaaccucugu

SEQ ID NO: 1001706 - RNA, 19 nt, Artificial Sequence
  Description of Artificial Sequence: Synthetic oligonucleotide
caguugguaauucgugcug

SEQ ID NO: 1001707 - RNA, 19 nt, Artificial Sequence
  Description of Artificial Sequence: Synthetic oligonucleotide
gucguaggauucuucucug

SEQ ID NO: 1001708 - RNA, 19 nt, Artificial Sequence
  Description of Artificial Sequence: Synthetic oligonucleotide
aucacgauugggaaccacu

SEQ ID NO: 1001709 - RNA, 19 nt, Artificial Sequence
  Description of Artificial Sequence: Synthetic oligonucleotide
aauuugccucacaguguuc

SEQ ID NO: 1001710 - RNA, 19 nt, Artificial Sequence
  Description of Artificial Sequence: Synthetic oligonucleotide
uuggccgaauucacguuaa

SEQ ID NO: 1001711 - RNA, 19 nt, Artificial Sequence
  Description of Artificial Sequence: Synthetic oligonucleotide
ggucuagagcucaugugcg

SEQ ID NO: 1001712 - RNA, 19 nt, Artificial Sequence
  Description of Artificial Sequence: Synthetic oligonucleotide
uugccuugugauccaucug

SEQ ID NO: 1001713 - RNA, 19 nt, Artificial Sequence
  Description of Artificial Sequence: Synthetic oligonucleotide
uucuugaccccggaucucu

SEQ ID NO: 1001714 - RNA, 19 nt, Artificial Sequence
  Description of Artificial Sequence: Synthetic oligonucleotide
auuggaugucggauucaac

SEQ ID NO: 1001715 - RNA, 19 nt, Artificial Sequence
  Description of Artificial Sequence: Synthetic oligonucleotide
gccgucgguaucuucaaag

SEQ ID NO: 1001716 - RNA, 19 nt, Artificial Sequence
  Description of Artificial Sequence: Synthetic oligonucleotide
ggggcaaaccagcaucagg

SEQ ID NO: 1001717 - RNA, 19 nt, Artificial Sequence
  Description of Artificial Sequence: Synthetic oligonucleotide
gagucguaggauucuucuc

SEQ ID NO: 1001718 - RNA, 19 nt, Artificial Sequence
  Description of Artificial Sequence: Synthetic oligonucleotide
acugacacggcagcuguca

SEQ ID NO: 1001719 - RNA, 19 nt, Artificial Sequence
  Description of Artificial Sequence: Synthetic oligonucleotide
accgaacuacuccacugga

SEQ ID NO: 1001720 - RNA, 19 nt, Artificial Sequence
  Description of Artificial Sequence: Synthetic oligonucleotide
ucccuaaguugaucucugc

SEQ ID NO: 1001721 - RNA, 19 nt, Artificial Sequence
  Description of Artificial Sequence: Synthetic oligonucleotide
gugcgcugccaacuguugg

SEQ ID NO: 1001722 - RNA, 19 nt, Artificial Sequence
  Description of Artificial Sequence: Synthetic oligonucleotide
aguaacagugucagacugu

SEQ ID NO: 1001723 - RNA, 19 nt, Artificial Sequence
  Description of Artificial Sequence: Synthetic oligonucleotide
guccccacaguaucucugc

SEQ ID NO: 1001724 - RNA, 19 nt, Artificial Sequence
  Description of Artificial Sequence: Synthetic oligonucleotide
ugggcgucacaucgagcag

SEQ ID NO: 1001725 - RNA, 19 nt, Artificial Sequence
  Description of Artificial Sequence: Synthetic oligonucleotide
cucgccgucgguaucuuca

SEQ ID NO: 1001726 - RNA, 19 nt, Artificial Sequence
  Description of Artificial Sequence: Synthetic oligonucleotide
caacucagauaguccgcgc

SEQ ID NO: 1001727 - RNA, 19 nt, Artificial Sequence
  Description of Artificial Sequence: Synthetic oligonucleotide
ucguaggauucuucucugu

SEQ ID NO: 1001728 - RNA, 19 nt, Artificial Sequence
  Description of Artificial Sequence: Synthetic oligonucleotide
cugcuauggggccaaauaa

SEQ ID NO: 1001729 - RNA, 19 nt, Artificial Sequence
  Description of Artificial Sequence: Synthetic oligonucleotide
agagcaugcuuguccugcu

SEQ ID NO: 1001730 - RNA, 19 nt, Artificial Sequence
  Description of Artificial Sequence: Synthetic oligonucleotide
ggacggagauuucuguggc

SEQ ID NO: 1001731 - RNA, 19 nt, Artificial Sequence
  Description of Artificial Sequence: Synthetic oligonucleotide
ccuuaugcucuccucgugc

SEQ ID NO: 1001732 - RNA, 19 nt, Artificial Sequence
  Description of Artificial Sequence: Synthetic oligonucleotide
agacggcugucacaacuca

SEQ ID NO: 1001733 - RNA, 19 nt, Artificial Sequence
  Description of Artificial Sequence: Synthetic oligonucleotide
cucguaggcagggaacuug

SEQ ID NO: 1001734 - RNA, 19 nt, Artificial Sequence
  Description of Artificial Sequence: Synthetic oligonucleotide
ggugcugacugacacggca

SEQ ID NO: 1001735 - RNA, 19 nt, Artificial Sequence
  Description of Artificial Sequence: Synthetic oligonucleotide
guaacagugucagacugua

SEQ ID NO: 1001736 - RNA, 19 nt, Artificial Sequence
  Description of Artificial Sequence: Synthetic oligonucleotide
acuacuccacuggauuucu

SEQ ID NO: 1001737 - RNA, 19 nt, Artificial Sequence
  Description of Artificial Sequence: Synthetic oligonucleotide
cauggcaguuaaguaggac

SEQ ID NO: 1001738 - RNA, 19 nt, Artificial Sequence
  Description of Artificial Sequence: Synthetic oligonucleotide
ugggaaccacugaguguag

SEQ ID NO: 1001739 - RNA, 19 nt, Artificial Sequence
  Description of Artificial Sequence: Synthetic oligonucleotide
gucgugguagagucuggac

SEQ ID NO: 1001740 - RNA, 19 nt, Artificial Sequence
  Description of Artificial Sequence: Synthetic oligonucleotide
uugccucacaguguucaac

SEQ ID NO: 1001741 - RNA, 19 nt, Artificial Sequence
  Description of Artificial Sequence: Synthetic oligonucleotide
acaucgagcagagcaugcu

SEQ ID NO: 1001742 - RNA, 19 nt, Artificial Sequence
  Description of Artificial Sequence: Synthetic oligonucleotide
aaccacgcuuugagugcgc

SEQ ID NO: 1001743 - RNA, 19 nt, Artificial Sequence
  Description of Artificial Sequence: Synthetic oligonucleotide
acguuaauuguagcuguaa

SEQ ID NO: 1001744 - RNA, 19 nt, Artificial Sequence
  Description of Artificial Sequence: Synthetic oligonucleotide
gagacggcugucacaacuc

SEQ ID NO: 1001745 - RNA, 19 nt, Artificial Sequence
  Description of Artificial Sequence: Synthetic oligonucleotide
caugcggucuugaggguca

SEQ ID NO: 1001746 - RNA, 19 nt, Artificial Sequence
  Description of Artificial Sequence: Synthetic oligonucleotide
uguggcucuggaggucuag

SEQ ID NO: 1001747 - RNA, 19 nt, Artificial Sequence
  Description of Artificial Sequence: Synthetic oligonucleotide
uccucggugcucuccucca

SEQ ID NO: 1001748 - RNA, 19 nt, Artificial Sequence
  Description of Artificial Sequence: Synthetic oligonucleotide
ucagauaguccgcgcccau

SEQ ID NO: 1001749 - RNA, 19 nt, Artificial Sequence
  Description of Artificial Sequence: Synthetic oligonucleotide
ggcgcaaggacaggagugg

SEQ ID NO: 1001750 - RNA, 19 nt, Artificial Sequence
  Description of Artificial Sequence: Synthetic oligonucleotide
gguaacucguuggcaagcc

SEQ ID NO: 1001751 - RNA, 19 nt, Artificial Sequence
  Description of Artificial Sequence: Synthetic oligonucleotide
gaugucggauucaaccucu

SEQ ID NO: 1001752 - RNA, 19 nt, Artificial Sequence
  Description of Artificial Sequence: Synthetic oligonucleotide
augagacggcugucacaac

SEQ ID NO: 1001753 - RNA, 19 nt, Artificial Sequence
  Description of Artificial Sequence: Synthetic oligonucleotide
gucuggacggagauuucug

SEQ ID NO: 1001754 - RNA, 19 nt, Artificial Sequence
  Description of Artificial Sequence: Synthetic oligonucleotide
uggaggucuagagcucaug

SEQ ID NO: 1001755 - RNA, 19 nt, Artificial Sequence
  Description of Artificial Sequence: Synthetic oligonucleotide
guaauucgugcugucuguc

SEQ ID NO: 1001756 - RNA, 19 nt, Artificial Sequence
  Description of Artificial Sequence: Synthetic oligonucleotide
gcggcucuggcuugaaugc

SEQ ID NO: 1001757 - RNA, 19 nt, Artificial Sequence
  Description of Artificial Sequence: Synthetic oligonucleotide
uagcucgugucgugguaga

SEQ ID NO: 1001758 - RNA, 19 nt, Artificial Sequence
  Description of Artificial Sequence: Synthetic oligonucleotide
ggcuaccaucccuaaguug

SEQ ID NO: 1001759 - RNA, 19 nt, Artificial Sequence
  Description of Artificial Sequence: Synthetic oligonucleotide
cacaguguucaaccgaacu

SEQ ID NO: 1001760 - RNA, 19 nt, Artificial Sequence
  Description of Artificial Sequence: Synthetic oligonucleotide
acucguuggcaagccuuuc

SEQ ID NO: 1001761 - RNA, 19 nt, Artificial Sequence
  Description of Artificial Sequence: Synthetic oligonucleotide
cacgauugggaaccacuga

SEQ ID NO: 1001762 - RNA, 19 nt, Artificial Sequence
  Description of Artificial Sequence: Synthetic oligonucleotide
uggggccaaauaagaccac

SEQ ID NO: 1001763 - RNA, 19 nt, Artificial Sequence
  Description of Artificial Sequence: Synthetic oligonucleotide
gucagguaacucguuggca

SEQ ID NO: 1001764 - RNA, 19 nt, Artificial Sequence
  Description of Artificial Sequence: Synthetic oligonucleotide
ccuaaguugaucucugcua

SEQ ID NO: 1001765 - RNA, 19 nt, Artificial Sequence
  Description of Artificial Sequence: Synthetic oligonucleotide
aggucucuugaagccagcu

SEQ ID NO: 1001766 - RNA, 19 nt, Artificial Sequence
  Description of Artificial Sequence: Synthetic oligonucleotide
uggugcugacugacacggc

SEQ ID NO: 1001767 - RNA, 19 nt, Artificial Sequence
  Description of Artificial Sequence: Synthetic oligonucleotide
aggacugaucugggagcac

SEQ ID NO: 1001768 - RNA, 19 nt, Artificial Sequence
  Description of Artificial Sequence: Synthetic oligonucleotide
uggccgcgcauccuccaga

SEQ ID NO: 1001769 - RNA, 19 nt, Artificial Sequence
  Description of Artificial Sequence: Synthetic oligonucleotide
gguguuugacuuggaggag

SEQ ID NO: 1001770 - RNA, 19 nt, Artificial Sequence
  Description of Artificial Sequence: Synthetic oligonucleotide
uguuggcgguauuccuccu

SEQ ID NO: 1001771 - RNA, 19 nt, Artificial Sequence
  Description of Artificial Sequence: Synthetic oligonucleotide
accaaccaucauuggccga

SEQ ID NO: 1001772 - RNA, 19 nt, Artificial Sequence
  Description of Artificial Sequence: Synthetic oligonucleotide
agaccacaggucucuugaa

SEQ ID NO: 1001773 - RNA, 19 nt, Artificial Sequence
  Description of Artificial Sequence: Synthetic oligonucleotide
cugggcguucuggacacug

SEQ ID NO: 1001774 - RNA, 19 nt, Artificial Sequence
  Description of Artificial Sequence: Synthetic oligonucleotide
gggcguucuggacacuggc

SEQ ID NO: 1001775 - RNA, 19 nt, Artificial Sequence
  Description of Artificial Sequence: Synthetic oligonucleotide
gcuagcagcccuccucaug

SEQ ID NO: 1001776 - RNA, 19 nt, Artificial Sequence
  Description of Artificial Sequence: Synthetic oligonucleotide
cacggcagcugucaggucu

SEQ ID NO: 1001777 - RNA, 19 nt, Artificial Sequence
  Description of Artificial Sequence: Synthetic oligonucleotide
ccaacuguuggcgguauuc

SEQ ID NO: 1001778 - RNA, 19 nt, Artificial Sequence
  Description of Artificial Sequence: Synthetic oligonucleotide
ucgccgucgguaucuucaa

SEQ ID NO: 1001779 - RNA, 19 nt, Artificial Sequence
  Description of Artificial Sequence: Synthetic oligonucleotide
agcucgugucgugguagag

SEQ ID NO: 1001780 - RNA, 19 nt, Artificial Sequence
  Description of Artificial Sequence: Synthetic oligonucleotide
gaguguaguugagcagguc

SEQ ID NO: 1001781 - RNA, 19 nt, Artificial Sequence
  Description of Artificial Sequence: Synthetic oligonucleotide
caucccuaaguugaucucu

SEQ ID NO: 1001782 - RNA, 19 nt, Artificial Sequence
  Description of Artificial Sequence: Synthetic oligonucleotide
caggaguggaaggcuucag

SEQ ID NO: 1001783 - RNA, 19 nt, Artificial Sequence
  Description of Artificial Sequence: Synthetic oligonucleotide
ggcgucacaucgagcagag

SEQ ID NO: 1001784 - RNA, 19 nt, Artificial Sequence
  Description of Artificial Sequence: Synthetic oligonucleotide
uggccgaauucacguuaau

SEQ ID NO: 1001785 - RNA, 19 nt, Artificial Sequence
  Description of Artificial Sequence: Synthetic oligonucleotide
uggcgguauuccuccuccu

SEQ ID NO: 1001786 - RNA, 19 nt, Artificial Sequence
  Description of Artificial Sequence: Synthetic oligonucleotide
guguuugacuuggaggagu

SEQ ID NO: 1001787 - RNA, 19 nt, Artificial Sequence
  Description of Artificial Sequence: Synthetic oligonucleotide
cacguuaauuguagcugua

SEQ ID NO: 1001788 - RNA, 19 nt, Artificial Sequence
  Description of Artificial Sequence: Synthetic oligonucleotide
caugugagcucguggcucu

SEQ ID NO: 1001789 - RNA, 19 nt, Artificial Sequence
  Description of Artificial Sequence: Synthetic oligonucleotide
ggcaguuaaguaggacaug

SEQ ID NO: 1001790 - RNA, 19 nt, Artificial Sequence
  Description of Artificial Sequence: Synthetic oligonucleotide
gacggagauuucuguggcu

SEQ ID NO: 1001791 - RNA, 19 nt, Artificial Sequence
  Description of Artificial Sequence: Synthetic oligonucleotide
guaacucguuggcaagccu

SEQ ID NO: 1001792 - RNA, 19 nt, Artificial Sequence
  Description of Artificial Sequence: Synthetic oligonucleotide
uagagucuggacggagauu

SEQ ID NO: 1001793 - RNA, 19 nt, Artificial Sequence
  Description of Artificial Sequence: Synthetic oligonucleotide
guuggccucccaggagucc

SEQ ID NO: 1001794 - RNA, 19 nt, Artificial Sequence
  Description of Artificial Sequence: Synthetic oligonucleotide
ucgccuugcugcugcugaa

SEQ ID NO: 1001795 - RNA, 19 nt, Artificial Sequence
  Description of Artificial Sequence: Synthetic oligonucleotide
cuucuugaccccggaucuc

SEQ ID NO: 1001796 - RNA, 19 nt, Artificial Sequence
  Description of Artificial Sequence: Synthetic oligonucleotide
cuggccgcgcauccuccag

SEQ ID NO: 1001797 - RNA, 19 nt, Artificial Sequence
  Description of Artificial Sequence: Synthetic oligonucleotide
ccgaauucacguuaauugu

SEQ ID NO: 1001798 - RNA, 19 nt, Artificial Sequence
  Description of Artificial Sequence: Synthetic oligonucleotide
ucucguaggcagggaacuu

SEQ ID NO: 1001799 - RNA, 19 nt, Artificial Sequence
  Description of Artificial Sequence: Synthetic oligonucleotide
ggagcgggugauagaagac

SEQ ID NO: 1001800 - RNA, 19 nt, Artificial Sequence
  Description of Artificial Sequence: Synthetic oligonucleotide
ggaguccacacacagccau

SEQ ID NO: 1001801 - RNA, 19 nt, Artificial Sequence
  Description of Artificial Sequence: Synthetic oligonucleotide
cgugucgugguagagucug

SEQ ID NO: 1001802 - RNA, 19 nt, Artificial Sequence
  Description of Artificial Sequence: Synthetic oligonucleotide
agaucacgauugggaacca

SEQ ID NO: 1001803 - RNA, 19 nt, Artificial Sequence
  Description of Artificial Sequence: Synthetic oligonucleotide
cauagcucgugucguggua

SEQ ID NO: 1001804 - RNA, 19 nt, Artificial Sequence
  Description of Artificial Sequence: Synthetic oligonucleotide
guaggacaugcggucuuga

SEQ ID NO: 1001805 - RNA, 19 nt, Artificial Sequence
  Description of Artificial Sequence: Synthetic oligonucleotide
ugcuagcagcccuccucau

SEQ ID NO: 1001806 - RNA, 19 nt, Artificial Sequence
  Description of Artificial Sequence: Synthetic oligonucleotide
augucggauucaaccucug

SEQ ID NO: 1001807 - RNA, 19 nt, Artificial Sequence
  Description of Artificial Sequence: Synthetic oligonucleotide
cgucgguaucuucaaaguc

SEQ ID NO: 1001808 - RNA, 19 nt, Artificial Sequence
  Description of Artificial Sequence: Synthetic oligonucleotide
gucacaucgagcagagcau

SEQ ID NO: 1001809 - RNA, 19 nt, Artificial Sequence
  Description of Artificial Sequence: Synthetic oligonucleotide
aucugcuauggggccaaau

SEQ ID NO: 1001810 - RNA, 19 nt, Artificial Sequence
  Description of Artificial Sequence: Synthetic oligonucleotide
cuuaugguuuuaacaccuu

SEQ ID NO: 1001811 - RNA, 19 nt, Artificial Sequence
  Description of Artificial Sequence: Synthetic oligonucleotide
ccaucccuaaguugaucuc

SEQ ID NO: 1001812 - RNA, 19 nt, Artificial Sequence
  Description of Artificial Sequence: Synthetic oligonucleotide
cguuaauuguagcuguaaa

SEQ ID NO: 1001813 - RNA, 19 nt, Artificial Sequence
  Description of Artificial Sequence: Synthetic oligonucleotide
auaagaccacaggucucuu

SEQ ID NO: 1001814 - RNA, 19 nt, Artificial Sequence
  Description of Artificial Sequence: Synthetic oligonucleotide
gcgcugccaacuguuggcg

SEQ ID NO: 1001815 - RNA, 19 nt, Artificial Sequence
  Description of Artificial Sequence: Synthetic oligonucleotide
aguccgcgcccauggcagu

SEQ ID NO: 1001816 - RNA, 19 nt, Artificial Sequence
  Description of Artificial Sequence: Synthetic oligonucleotide
caucuacaauucugugucu

SEQ ID NO: 1001817 - RNA, 19 nt, Artificial Sequence
  Description of Artificial Sequence: Synthetic oligonucleotide
ggaaccacugaguguaguu

SEQ ID NO: 1001818 - RNA, 19 nt, Artificial Sequence
  Description of Artificial Sequence: Synthetic oligonucleotide
cgaauucacguuaauugua

SEQ ID NO: 1001819 - RNA, 19 nt, Artificial Sequence
  Description of Artificial Sequence: Synthetic oligonucleotide
cacugaugagacggcuguc

SEQ ID NO: 1001820 - RNA, 19 nt, Artificial Sequence
  Description of Artificial Sequence: Synthetic oligonucleotide
gcucguggcucugggcugg

SEQ ID NO: 1001821 - RNA, 19 nt, Artificial Sequence
  Description of Artificial Sequence: Synthetic oligonucleotide
aucucuggccgcgcauccu

SEQ ID NO: 1001822 - RNA, 19 nt, Artificial Sequence
  Description of Artificial Sequence: Synthetic oligonucleotide
gacaugcggucuugagggu

SEQ ID NO: 1001823 - RNA, 19 nt, Artificial Sequence
  Description of Artificial Sequence: Synthetic oligonucleotide
guaucucugcagugcacuu

SEQ ID NO: 1001824 - RNA, 19 nt, Artificial Sequence
  Description of Artificial Sequence: Synthetic oligonucleotide
gugguagagucuggacgga

SEQ ID NO: 1001825 - RNA, 19 nt, Artificial Sequence
  Description of Artificial Sequence: Synthetic oligonucleotide
gggcgucacaucgagcaga

SEQ ID NO: 1001826 - RNA, 19 nt, Artificial Sequence
  Description of Artificial Sequence: Synthetic oligonucleotide
gcgggcuaccaucccuaag

SEQ ID NO: 1001827 - RNA, 19 nt, Artificial Sequence
  Description of Artificial Sequence: Synthetic oligonucleotide
caucgagcagagcaugcuu

SEQ ID NO: 1001828 - RNA, 19 nt, Artificial Sequence
  Description of Artificial Sequence: Synthetic oligonucleotide
gugauccaucugcucaaau

SEQ ID NO: 1001829 - RNA, 19 nt, Artificial Sequence
  Description of Artificial Sequence: Synthetic oligonucleotide
cgcgcauccuccagaaguc

SEQ ID NO: 1001830 - RNA, 19 nt, Artificial Sequence
  Description of Artificial Sequence: Synthetic oligonucleotide
gcuuugauaggaacagcau

SEQ ID NO: 1001831 - RNA, 19 nt, Artificial Sequence
  Description of Artificial Sequence: Synthetic oligonucleotide
cauuggccgaauucacguu

SEQ ID NO: 1001832 - RNA, 19 nt, Artificial Sequence
  Description of Artificial Sequence: Synthetic oligonucleotide
uccgcgcccauggcaguua

SEQ ID NO: 1001833 - RNA, 19 nt, Artificial Sequence
  Description of Artificial Sequence: Synthetic oligonucleotide
ccacgcuuugagugcgcug

SEQ ID NO: 1001834 - RNA, 19 nt, Artificial Sequence
  Description of Artificial Sequence: Synthetic oligonucleotide
cccuaaguugaucucugcu

SEQ ID NO: 1001835 - RNA, 19 nt, Artificial Sequence
  Description of Artificial Sequence: Synthetic oligonucleotide
ccgcgcauccuccagaagu

SEQ ID NO: 1001836 - RNA, 19 nt, Artificial Sequence
  Description of Artificial Sequence: Synthetic oligonucleotide
gcgcccauggcaguuaagu

SEQ ID NO: 1001837 - RNA, 19 nt, Artificial Sequence
  Description of Artificial Sequence: Synthetic oligonucleotide
ggucucuugaagccagcuu

SEQ ID NO: 1001838 - RNA, 19 nt, Artificial Sequence
  Description of Artificial Sequence: Synthetic oligonucleotide
gcuuuaccccagucccaca

SEQ ID NO: 1001839 - RNA, 19 nt, Artificial Sequence
  Description of Artificial Sequence: Synthetic oligonucleotide
cgggcuaccaucccuaagu

SEQ ID NO: 1001840 - RNA, 19 nt, Artificial Sequence
  Description of Artificial Sequence: Synthetic oligonucleotide
ggccgcgcauccuccagaa

SEQ ID NO: 1001841 - RNA, 19 nt, Artificial Sequence
  Description of Artificial Sequence: Synthetic oligonucleotide
ggaucggccggaagcaggu

SEQ ID NO: 1001842 - RNA, 19 nt, Artificial Sequence
  Description of Artificial Sequence: Synthetic oligonucleotide
ccgucgguaucuucaaagu

SEQ ID NO: 1001843 - RNA, 19 nt, Artificial Sequence
  Description of Artificial Sequence: Synthetic oligonucleotide
ggccgaauucacguuaauu

SEQ ID NO: 1001844 - RNA, 19 nt, Artificial Sequence
  Description of Artificial Sequence: Synthetic oligonucleotide
gccgcgcauccuccagaag

SEQ ID NO: 1001845 - RNA, 19 nt, Artificial Sequence
  Description of Artificial Sequence: Synthetic oligonucleotide
ggccggaagcagguuucac

SEQ ID NO: 1001846 - RNA, 19 nt, Artificial Sequence
  Description of Artificial Sequence: Synthetic oligonucleotide
caggauggaucggccggaa

SEQ ID NO: 1001847 - RNA, 19 nt, Artificial Sequence
  Description of Artificial Sequence: Synthetic oligonucleotide
ccggcucuuucggauguuc

SEQ ID NO: 1001848 - RNA, 19 nt, Artificial Sequence
  Description of Artificial Sequence: Synthetic oligonucleotide
gcgcaaggacaggagugga

SEQ ID NO: 1001849 - RNA, 19 nt, Artificial Sequence
  Description of Artificial Sequence: Synthetic oligonucleotide
ggcgggcuaccaucccuaa

SEQ ID NO: 1001850 - RNA, 19 nt, Artificial Sequence
  Description of Artificial Sequence: Synthetic oligonucleotide
gggcuaccaucccuaaguu

SEQ ID NO: 1001851 - RNA, 19 nt, Artificial Sequence
  Description of Artificial Sequence: Synthetic oligonucleotide
gggaaccacugaguguagu

SEQ ID NO: 1001852 - RNA, 19 nt, Artificial Sequence
  Description of Artificial Sequence: Synthetic oligonucleotide
ccauagcucgugucguggu

SEQ ID NO: 1001853 - RNA, 19 nt, Artificial Sequence
  Description of Artificial Sequence: Synthetic oligonucleotide
cgcaaggacaggaguggaa

SEQ ID NO: 1001854 - RNA, 19 nt, Artificial Sequence
  Description of Artificial Sequence: Synthetic oligonucleotide
ccgaacuacuccacuggau

SEQ ID NO: 1001855 - RNA, 19 nt, Artificial Sequence
  Description of Artificial Sequence: Synthetic oligonucleotide
gagcaccguccugcuccuc

SEQ ID NO: 1001856 - RNA, 19 nt, Artificial Sequence
  Description of Artificial Sequence: Synthetic oligonucleotide
ccucgccgucgguaucuuc

SEQ ID NO: 1001857 - RNA, 19 nt, Artificial Sequence
  Description of Artificial Sequence: Synthetic oligonucleotide
ccggaucucuggccgcgca

SEQ ID NO: 1001858 - RNA, 19 nt, Artificial Sequence
  Description of Artificial Sequence: Synthetic oligonucleotide
ccucgcauucugugcuucu

SEQ ID NO: 1001859 - RNA, 19 nt, Artificial Sequence
  Description of Artificial Sequence: Synthetic oligonucleotide
gcgcauccuccagaagucu

SEQ ID NO: 1001860 - RNA, 19 nt, Artificial Sequence
  Description of Artificial Sequence: Synthetic oligonucleotide
cguuggcaagccuuuccau

SEQ ID NO: 1001861 - RNA, 19 nt, Artificial Sequence
  Description of Artificial Sequence: Synthetic oligonucleotide
guccgcgcccauggcaguu

SEQ ID NO: 1001862 - RNA, 19 nt, Artificial Sequence
  Description of Artificial Sequence: Synthetic oligonucleotide
gccaacuguuggcgguauu

SEQ ID NO: 1001863 - RNA, 19 nt, Artificial Sequence
  Description of Artificial Sequence: Synthetic oligonucleotide
ccgcgcccauggcaguuaa

SEQ ID NO: 1001864 - RNA, 19 nt, Artificial Sequence
  Description of Artificial Sequence: Synthetic oligonucleotide
cccggcucuuucggauguu

SEQ ID NO: 1001865 - RNA, 19 nt, Artificial Sequence
  Description of Artificial Sequence: Synthetic oligonucleotide
cccucgccgucgguaucuu

SEQ ID NO: 1001866 - RNA, 19 nt, Artificial Sequence
  Description of Artificial Sequence: Synthetic oligonucleotide
auuugugagacuuucaggg

SEQ ID NO: 1001867 - RNA, 19 nt, Artificial Sequence
  Description of Artificial Sequence: Synthetic oligonucleotide
uguggcauuaagcauaugg

SEQ ID NO: 1001868 - RNA, 19 nt, Artificial Sequence
  Description of Artificial Sequence: Synthetic oligonucleotide
auccacacgaaacaaaucc

SEQ ID NO: 1001869 - RNA, 19 nt, Artificial Sequence
  Description of Artificial Sequence: Synthetic oligonucleotide
aauccgugcaauuagaaca

SEQ ID NO: 1001870 - RNA, 19 nt, Artificial Sequence
  Description of Artificial Sequence: Synthetic oligonucleotide
aagcauauggacaaacucc

SEQ ID NO: 1001871 - RNA, 19 nt, Artificial Sequence
  Description of Artificial Sequence: Synthetic oligonucleotide
acgaaacaaauccaggucc

SEQ ID NO: 1001872 - RNA, 19 nt, Artificial Sequence
  Description of Artificial Sequence: Synthetic oligonucleotide
aaagccgucuaccaucacc

SEQ ID NO: 1001873 - RNA, 19 nt, Artificial Sequence
  Description of Artificial Sequence: Synthetic oligonucleotide
aucgaaauucaacacgucc

SEQ ID NO: 1001874 - RNA, 19 nt, Artificial Sequence
  Description of Artificial Sequence: Synthetic oligonucleotide
ucgacuaccagccaccacg

SEQ ID NO: 1001875 - RNA, 19 nt, Artificial Sequence
  Description of Artificial Sequence: Synthetic oligonucleotide
cuuacuggcagcaugauuc

SEQ ID NO: 1001876 - RNA, 19 nt, Artificial Sequence
  Description of Artificial Sequence: Synthetic oligonucleotide
cuugguacaccgcagaugg

SEQ ID NO: 1001877 - RNA, 19 nt, Artificial Sequence
  Description of Artificial Sequence: Synthetic oligonucleotide
ugccaauuaccuuauaaag

SEQ ID NO: 1001878 - RNA, 19 nt, Artificial Sequence
  Description of Artificial Sequence: Synthetic oligonucleotide
uucuccggcacaaugaugc

SEQ ID NO: 1001879 - RNA, 19 nt, Artificial Sequence
  Description of Artificial Sequence: Synthetic oligonucleotide
gauaccacguguaucacgg

SEQ ID NO: 1001880 - RNA, 19 nt, Artificial Sequence
  Description of Artificial Sequence: Synthetic oligonucleotide
uuuagauggcuccugguca

SEQ ID NO: 1001881 - RNA, 19 nt, Artificial Sequence
  Description of Artificial Sequence: Synthetic oligonucleotide
ucaucgaaauucaacacgu

SEQ ID NO: 1001882 - RNA, 19 nt, Artificial Sequence
  Description of Artificial Sequence: Synthetic oligonucleotide
aguacccucgacuaccagc

SEQ ID NO: 1001883 - RNA, 19 nt, Artificial Sequence
  Description of Artificial Sequence: Synthetic oligonucleotide
uaccuuauaaaguucuuca

SEQ ID NO: 1001884 - RNA, 19 nt, Artificial Sequence
  Description of Artificial Sequence: Synthetic oligonucleotide
auauucacgauaugguaag

SEQ ID NO: 1001885 - RNA, 19 nt, Artificial Sequence
  Description of Artificial Sequence: Synthetic oligonucleotide
ucgaaauucaacacguccu

SEQ ID NO: 1001886 - RNA, 19 nt, Artificial Sequence
  Description of Artificial Sequence: Synthetic oligonucleotide
augacuuauugucaugagg

SEQ ID NO: 1001887 - RNA, 19 nt, Artificial Sequence
  Description of Artificial Sequence: Synthetic oligonucleotide
gucaucgaaauucaacacg

SEQ ID NO: 1001888 - RNA, 19 nt, Artificial Sequence
  Description of Artificial Sequence: Synthetic oligonucleotide
uuugccaauuaccuuauaa

SEQ ID NO: 1001889 - RNA, 19 nt, Artificial Sequence
  Description of Artificial Sequence: Synthetic oligonucleotide
aauuaccuuauaaaguucu

SEQ ID NO: 1001890 - RNA, 19 nt, Artificial Sequence
  Description of Artificial Sequence: Synthetic oligonucleotide
auuagaacaggagaccaac

SEQ ID NO: 1001891 - RNA, 19 nt, Artificial Sequence
  Description of Artificial Sequence: Synthetic oligonucleotide
ugagacaauauucacgaua

SEQ ID NO: 1001892 - RNA, 19 nt, Artificial Sequence
  Description of Artificial Sequence: Synthetic oligonucleotide
auauggacaaacuccaccu

SEQ ID NO: 1001893 - RNA, 19 nt, Artificial Sequence
  Description of Artificial Sequence: Synthetic oligonucleotide
agaaacacuuuauugcaug

SEQ ID NO: 1001894 - RNA, 19 nt, Artificial Sequence
  Description of Artificial Sequence: Synthetic oligonucleotide
gagaccaacucacggaagg

SEQ ID NO: 1001895 - RNA, 19 nt, Artificial Sequence
  Description of Artificial Sequence: Synthetic oligonucleotide
aggucaucgaaauucaaca

SEQ ID NO: 1001896 - RNA, 19 nt, Artificial Sequence
  Description of Artificial Sequence: Synthetic oligonucleotide
uuauccacacgaaacaaau

SEQ ID NO: 1001897 - RNA, 19 nt, Artificial Sequence
  Description of Artificial Sequence: Synthetic oligonucleotide
uucaucguaagaacuguca

SEQ ID NO: 1001898 - RNA, 19 nt, Artificial Sequence
  Description of Artificial Sequence: Synthetic oligonucleotide
auuaagcauauggacaaac

SEQ ID NO: 1001899 - RNA, 19 nt, Artificial Sequence
  Description of Artificial Sequence: Synthetic oligonucleotide
uuaagcauauggacaaacu

SEQ ID NO: 1001900 - RNA, 19 nt, Artificial Sequence
  Description of Artificial Sequence: Synthetic oligonucleotide
aaaugggaucaguucuugg

SEQ ID NO: 1001901 - RNA, 19 nt, Artificial Sequence
  Description of Artificial Sequence: Synthetic oligonucleotide
uuuuagauggcuccugguc

SEQ ID NO: 1001902 - RNA, 19 nt, Artificial Sequence
  Description of Artificial Sequence: Synthetic oligonucleotide
ugcgucucucgaaugaggg

SEQ ID NO: 1001903 - RNA, 19 nt, Artificial Sequence
  Description of Artificial Sequence: Synthetic oligonucleotide
cuuuucgccuucaaagccg

SEQ ID NO: 1001904 - RNA, 19 nt, Artificial Sequence
  Description of Artificial Sequence: Synthetic oligonucleotide
cagcaugauucaaagagcc

SEQ ID NO: 1001905 - RNA, 19 nt, Artificial Sequence
  Description of Artificial Sequence: Synthetic oligonucleotide
ugguaauccgugcaauuag

SEQ ID NO: 1001906 - RNA, 19 nt, Artificial Sequence
  Description of Artificial Sequence: Synthetic oligonucleotide
aucguaagaacugucauca

SEQ ID NO: 1001907 - RNA, 19 nt, Artificial Sequence
  Description of Artificial Sequence: Synthetic oligonucleotide
uucacgauaugguaaggga

SEQ ID NO: 1001908 - RNA, 19 nt, Artificial Sequence
  Description of Artificial Sequence: Synthetic oligonucleotide
ugaggugaugaguacacga

SEQ ID NO: 1001909 - RNA, 19 nt, Artificial Sequence
  Description of Artificial Sequence: Synthetic oligonucleotide
uugugagacuuucagggca

SEQ ID NO: 1001910 - RNA, 19 nt, Artificial Sequence
  Description of Artificial Sequence: Synthetic oligonucleotide
acaggagaccaacucacgg

SEQ ID NO: 1001911 - RNA, 19 nt, Artificial Sequence
  Description of Artificial Sequence: Synthetic oligonucleotide
acacgaaacaaauccaggu

SEQ ID NO: 1001912 - RNA, 19 nt, Artificial Sequence
  Description of Artificial Sequence: Synthetic oligonucleotide
auggacaaacuccaccuuc

SEQ ID NO: 1001913 - RNA, 19 nt, Artificial Sequence
  Description of Artificial Sequence: Synthetic oligonucleotide
aagguucccgaucucucgg

SEQ ID NO: 1001914 - RNA, 19 nt, Artificial Sequence
  Description of Artificial Sequence: Synthetic oligonucleotide
uuucagggcagauaacgug

SEQ ID NO: 1001915 - RNA, 19 nt, Artificial Sequence
  Description of Artificial Sequence: Synthetic oligonucleotide
auagucuugcugcauaagu

SEQ ID NO: 1001916 - RNA, 19 nt, Artificial Sequence
  Description of Artificial Sequence: Synthetic oligonucleotide
aucgucgccacucacuguc

SEQ ID NO: 1001917 - RNA, 19 nt, Artificial Sequence
  Description of Artificial Sequence: Synthetic oligonucleotide
uucagggcagauaacgugu

SEQ ID NO: 1001918 - RNA, 19 nt, Artificial Sequence
  Description of Artificial Sequence: Synthetic oligonucleotide
ugaguacacgaacuguuca

SEQ ID NO: 1001919 - RNA, 19 nt, Artificial Sequence
  Description of Artificial Sequence: Synthetic oligonucleotide
uugccaauuaccuuauaaa

SEQ ID NO: 1001920 - RNA, 19 nt, Artificial Sequence
  Description of Artificial Sequence: Synthetic oligonucleotide
ugcaugaccucuuuccuca

SEQ ID NO: 1001921 - RNA, 19 nt, Artificial Sequence
  Description of Artificial Sequence: Synthetic oligonucleotide
ucgaaugagggcugggucc

SEQ ID NO: 1001922 - RNA, 19 nt, Artificial Sequence
  Description of Artificial Sequence: Synthetic oligonucleotide
gauccccaaagacugguag

SEQ ID NO: 1001923 - RNA, 19 nt, Artificial Sequence
  Description of Artificial Sequence: Synthetic oligonucleotide
auucacgauaugguaaggg

SEQ ID NO: 1001924 - RNA, 19 nt, Artificial Sequence
  Description of Artificial Sequence: Synthetic oligonucleotide
cacacgaaacaaauccagg

SEQ ID NO: 1001925 - RNA, 19 nt, Artificial Sequence
  Description of Artificial Sequence: Synthetic oligonucleotide
ucugcggugccgaucaucu

SEQ ID NO: 1001926 - RNA, 19 nt, Artificial Sequence
  Description of Artificial Sequence: Synthetic oligonucleotide
uaauccgugcaauuagaac

SEQ ID NO: 1001927 - RNA, 19 nt, Artificial Sequence
  Description of Artificial Sequence: Synthetic oligonucleotide
ugguagaauucuucugcgg

SEQ ID NO: 1001928 - RNA, 19 nt, Artificial Sequence
  Description of Artificial Sequence: Synthetic oligonucleotide
acgauaugguaagggaucc

SEQ ID NO: 1001929 - RNA, 19 nt, Artificial Sequence
  Description of Artificial Sequence: Synthetic oligonucleotide
guauagaugggaguguagc

SEQ ID NO: 1001930 - RNA, 19 nt, Artificial Sequence
  Description of Artificial Sequence: Synthetic oligonucleotide
ucacgauaugguaagggau

SEQ ID NO: 1001931 - RNA, 19 nt, Artificial Sequence
  Description of Artificial Sequence: Synthetic oligonucleotide
auaacgugucugcaguaag

SEQ ID NO: 1001932 - RNA, 19 nt, Artificial Sequence
  Description of Artificial Sequence: Synthetic oligonucleotide
gaugcgcucuacuuuguug

SEQ ID NO: 1001933 - RNA, 19 nt, Artificial Sequence
  Description of Artificial Sequence: Synthetic oligonucleotide
caagguacggagugcauac

SEQ ID NO: 1001934 - RNA, 19 nt, Artificial Sequence
  Description of Artificial Sequence: Synthetic oligonucleotide
cacggaaggcaccugagcc

SEQ ID NO: 1001935 - RNA, 19 nt, Artificial Sequence
  Description of Artificial Sequence: Synthetic oligonucleotide
gaugaacucgucaucuccc

SEQ ID NO: 1001936 - RNA, 19 nt, Artificial Sequence
  Description of Artificial Sequence: Synthetic oligonucleotide
uuuucaucguaagaacugu

SEQ ID NO: 1001937 - RNA, 19 nt, Artificial Sequence
  Description of Artificial Sequence: Synthetic oligonucleotide
aggucgagcuucuuacugg

SEQ ID NO: 1001938 - RNA, 19 nt, Artificial Sequence
  Description of Artificial Sequence: Synthetic oligonucleotide
uccaggucgagcuucuuac

SEQ ID NO: 1001939 - RNA, 19 nt, Artificial Sequence
  Description of Artificial Sequence: Synthetic oligonucleotide
uucaacacguccucuggga

SEQ ID NO: 1001940 - RNA, 19 nt, Artificial Sequence
  Description of Artificial Sequence: Synthetic oligonucleotide
acuaccagccaccacggcu

SEQ ID NO: 1001941 - RNA, 19 nt, Artificial Sequence
  Description of Artificial Sequence: Synthetic oligonucleotide
cacgauaugguaagggauc

SEQ ID NO: 1001942 - RNA, 19 nt, Artificial Sequence
  Description of Artificial Sequence: Synthetic oligonucleotide
uagaauucuucugcggugc

SEQ ID NO: 1001943 - RNA, 19 nt, Artificial Sequence
  Description of Artificial Sequence: Synthetic oligonucleotide
gacuuauugucaugaggug

SEQ ID NO: 1001944 - RNA, 19 nt, Artificial Sequence
  Description of Artificial Sequence: Synthetic oligonucleotide
guaagggauccccaaagac

SEQ ID NO: 1001945 - RNA, 19 nt, Artificial Sequence
  Description of Artificial Sequence: Synthetic oligonucleotide
ugauucaaagagccugaga

SEQ ID NO: 1001946 - RNA, 19 nt, Artificial Sequence
  Description of Artificial Sequence: Synthetic oligonucleotide
cucggagguucucaaaccg

SEQ ID NO: 1001947 - RNA, 19 nt, Artificial Sequence
  Description of Artificial Sequence: Synthetic oligonucleotide
uauugucaugaggugauga

SEQ ID NO: 1001948 - RNA, 19 nt, Artificial Sequence
  Description of Artificial Sequence: Synthetic oligonucleotide
acuuauugucaugagguga

SEQ ID NO: 1001949 - RNA, 19 nt, Artificial Sequence
  Description of Artificial Sequence: Synthetic oligonucleotide
ucaucgaugaggagucgga

SEQ ID NO: 1001950 - RNA, 19 nt, Artificial Sequence
  Description of Artificial Sequence: Synthetic oligonucleotide
uucccgaucucucggaggu

SEQ ID NO: 1001951 - RNA, 19 nt, Artificial Sequence
  Description of Artificial Sequence: Synthetic oligonucleotide
ugagcccacuuccugacga

SEQ ID NO: 1001952 - RNA, 19 nt, Artificial Sequence
  Description of Artificial Sequence: Synthetic oligonucleotide
uuaccuuauaaaguucuuc

SEQ ID NO: 1001953 - RNA, 19 nt, Artificial Sequence
  Description of Artificial Sequence: Synthetic oligonucleotide
caugcgaggagaugggaac

SEQ ID NO: 1001954 - RNA, 19 nt, Artificial Sequence
  Description of Artificial Sequence: Synthetic oligonucleotide
uaugguaagggauccccaa

SEQ ID NO: 1001955 - RNA, 19 nt, Artificial Sequence
  Description of Artificial Sequence: Synthetic oligonucleotide
gugaugaguacacgaacug

SEQ ID NO: 1001956 - RNA, 19 nt, Artificial Sequence
  Description of Artificial Sequence: Synthetic oligonucleotide
augcgcucuacuuuguugu

SEQ ID NO: 1001957 - RNA, 19 nt, Artificial Sequence
  Description of Artificial Sequence: Synthetic oligonucleotide
accacggcucccuuuucgc

SEQ ID NO: 1001958 - RNA, 19 nt, Artificial Sequence
  Description of Artificial Sequence: Synthetic oligonucleotide
cacgaaacaaauccagguc

SEQ ID NO: 1001959 - RNA, 19 nt, Artificial Sequence
  Description of Artificial Sequence: Synthetic oligonucleotide
aggaaguacccucgacuac

SEQ ID NO: 1001960 - RNA, 19 nt, Artificial Sequence
  Description of Artificial Sequence: Synthetic oligonucleotide
cucgacuucccaagguacg

SEQ ID NO: 1001961 - RNA, 19 nt, Artificial Sequence
  Description of Artificial Sequence: Synthetic oligonucleotide
agaugggaacaccugcuug

SEQ ID NO: 1001962 - RNA, 19 nt, Artificial Sequence
  Description of Artificial Sequence: Synthetic oligonucleotide
aagccgucuaccaucacca

SEQ ID NO: 1001963 - RNA, 19 nt, Artificial Sequence
  Description of Artificial Sequence: Synthetic oligonucleotide
uaagaacugucaucagacu

SEQ ID NO: 1001964 - RNA, 19 nt, Artificial Sequence
  Description of Artificial Sequence: Synthetic oligonucleotide
uuucaucguaagaacuguc

SEQ ID NO: 1001965 - RNA, 19 nt, Artificial Sequence
  Description of Artificial Sequence: Synthetic oligonucleotide
caugacuuauugucaugag

SEQ ID NO: 1001966 - RNA, 19 nt, Artificial Sequence
  Description of Artificial Sequence: Synthetic oligonucleotide
caauuaccuuauaaaguuc

SEQ ID NO: 1001967 - RNA, 19 nt, Artificial Sequence
  Description of Artificial Sequence: Synthetic oligonucleotide
ucgacuucccaagguacgg

SEQ ID NO: 1001968 - RNA, 19 nt, Artificial Sequence
  Description of Artificial Sequence: Synthetic oligonucleotide
ugaugaguacacgaacugu

SEQ ID NO: 1001969 - RNA, 19 nt, Artificial Sequence
  Description of Artificial Sequence: Synthetic oligonucleotide
gcauaaguucuucagcuug

SEQ ID NO: 1001970 - RNA, 19 nt, Artificial Sequence
  Description of Artificial Sequence: Synthetic oligonucleotide
cacuuuauugcauggcuca

SEQ ID NO: 1001971 - RNA, 19 nt, Artificial Sequence
  Description of Artificial Sequence: Synthetic oligonucleotide
auggcuccuggucaauggg

SEQ ID NO: 1001972 - RNA, 19 nt, Artificial Sequence
  Description of Artificial Sequence: Synthetic oligonucleotide
uaaccgcuccccaucacac

SEQ ID NO: 1001973 - RNA, 19 nt, Artificial Sequence
  Description of Artificial Sequence: Synthetic oligonucleotide
agguacggagugcauacug

SEQ ID NO: 1001974 - RNA, 19 nt, Artificial Sequence
  Description of Artificial Sequence: Synthetic oligonucleotide
agaccaacucacggaaggc

SEQ ID NO: 1001975 - RNA, 19 nt, Artificial Sequence
  Description of Artificial Sequence: Synthetic oligonucleotide
guacccucgacuaccagcc

SEQ ID NO: 1001976 - RNA, 19 nt, Artificial Sequence
  Description of Artificial Sequence: Synthetic oligonucleotide
ucacggaaggcaccugagc

SEQ ID NO: 1001977 - RNA, 19 nt, Artificial Sequence
  Description of Artificial Sequence: Synthetic oligonucleotide
gaguguagccucgacuucc

SEQ ID NO: 1001978 - RNA, 19 nt, Artificial Sequence
  Description of Artificial Sequence: Synthetic oligonucleotide
uauccacacgaaacaaauc

SEQ ID NO: 1001979 - RNA, 19 nt, Artificial Sequence
  Description of Artificial Sequence: Synthetic oligonucleotide
ggacucggaagauaccacg

SEQ ID NO: 1001980 - RNA, 19 nt, Artificial Sequence
  Description of Artificial Sequence: Synthetic oligonucleotide
uccugcgucucucgaauga

SEQ ID NO: 1001981 - RNA, 19 nt, Artificial Sequence
  Description of Artificial Sequence: Synthetic oligonucleotide
augaguacacgaacuguuc

SEQ ID NO: 1001982 - RNA, 19 nt, Artificial Sequence
  Description of Artificial Sequence: Synthetic oligonucleotide
cuaccagccaccacggcuc

SEQ ID NO: 1001983 - RNA, 19 nt, Artificial Sequence
  Description of Artificial Sequence: Synthetic oligonucleotide
uuauugcauggcucagcag

SEQ ID NO: 1001984 - RNA, 19 nt, Artificial Sequence
  Description of Artificial Sequence: Synthetic oligonucleotide
uguagccucgacuucccaa

SEQ ID NO: 1001985 - RNA, 19 nt, Artificial Sequence
  Description of Artificial Sequence: Synthetic oligonucleotide
acguguaucacggccaugu

SEQ ID NO: 1001986 - RNA, 19 nt, Artificial Sequence
  Description of Artificial Sequence: Synthetic oligonucleotide
uucaggaaguacccucgac

SEQ ID NO: 1001987 - RNA, 19 nt, Artificial Sequence
  Description of Artificial Sequence: Synthetic oligonucleotide
auaucggauucggagccgg

SEQ ID NO: 1001988 - RNA, 19 nt, Artificial Sequence
  Description of Artificial Sequence: Synthetic oligonucleotide
acgugucugcaguaagguc

SEQ ID NO: 1001989 - RNA, 19 nt, Artificial Sequence
  Description of Artificial Sequence: Synthetic oligonucleotide
auaccacguguaucacggc

SEQ ID NO: 1001990 - RNA, 19 nt, Artificial Sequence
  Description of Artificial Sequence: Synthetic oligonucleotide
ucggauucggagccggcga

SEQ ID NO: 1001991 - RNA, 19 nt, Artificial Sequence
  Description of Artificial Sequence: Synthetic oligonucleotide
gcagauaacgugucugcag

SEQ ID NO: 1001992 - RNA, 19 nt, Artificial Sequence
  Description of Artificial Sequence: Synthetic oligonucleotide
uccggcacaaugaugccuu

SEQ ID NO: 1001993 - RNA, 19 nt, Artificial Sequence
  Description of Artificial Sequence: Synthetic oligonucleotide
uggacucggaagauaccac

SEQ ID NO: 1001994 - RNA, 19 nt, Artificial Sequence
  Description of Artificial Sequence: Synthetic oligonucleotide
cuggucaaugggugcaggc

SEQ ID NO: 1001995 - RNA, 19 nt, Artificial Sequence
  Description of Artificial Sequence: Synthetic oligonucleotide
auccgugcaauuagaacag

SEQ ID NO: 1001996 - RNA, 19 nt, Artificial Sequence
  Description of Artificial Sequence: Synthetic oligonucleotide
caucguuacugaugggcac

SEQ ID NO: 1001997 - RNA, 19 nt, Artificial Sequence
  Description of Artificial Sequence: Synthetic oligonucleotide
cacaaaugggaucaguucu

SEQ ID NO: 1001998 - RNA, 19 nt, Artificial Sequence
  Description of Artificial Sequence: Synthetic oligonucleotide
uagccucgacuucccaagg

SEQ ID NO: 1001999 - RNA, 19 nt, Artificial Sequence
  Description of Artificial Sequence: Synthetic oligonucleotide
augaacucgucaucuccca

SEQ ID NO: 1002000 - RNA, 19 nt, Artificial Sequence
  Description of Artificial Sequence: Synthetic oligonucleotide
guacacgaacuguucaauc

SEQ ID NO: 1002001 - RNA, 19 nt, Artificial Sequence
  Description of Artificial Sequence: Synthetic oligonucleotide
ugacgaaagcagguggaga

SEQ ID NO: 1002002 - RNA, 19 nt, Artificial Sequence
  Description of Artificial Sequence: Synthetic oligonucleotide
ucguaagaacugucaucag

SEQ ID NO: 1002003 - RNA, 19 nt, Artificial Sequence
  Description of Artificial Sequence: Synthetic oligonucleotide
ugguacucggccucccuga

SEQ ID NO: 1002004 - RNA, 19 nt, Artificial Sequence
  Description of Artificial Sequence: Synthetic oligonucleotide
aaguacccucgacuaccag

SEQ ID NO: 1002005 - RNA, 19 nt, Artificial Sequence
  Description of Artificial Sequence: Synthetic oligonucleotide
uauggacaaacuccaccuu

SEQ ID NO: 1002006 - RNA, 19 nt, Artificial Sequence
  Description of Artificial Sequence: Synthetic oligonucleotide
aucggauucggagccggcg

SEQ ID NO: 1002007 - RNA, 19 nt, Artificial Sequence
  Description of Artificial Sequence: Synthetic oligonucleotide
caggucgagcuucuuacug

SEQ ID NO: 1002008 - RNA, 19 nt, Artificial Sequence
  Description of Artificial Sequence: Synthetic oligonucleotide
ggucaucgaaauucaacac

SEQ ID NO: 1002009 - RNA, 19 nt, Artificial Sequence
  Description of Artificial Sequence: Synthetic oligonucleotide
gacccuuggcccaugcgag

SEQ ID NO: 1002010 - RNA, 19 nt, Artificial Sequence
  Description of Artificial Sequence: Synthetic oligonucleotide
gauaacgugucugcaguaa

SEQ ID NO: 1002011 - RNA, 19 nt, Artificial Sequence
  Description of Artificial Sequence: Synthetic oligonucleotide
uuuaaccgcuccccaucac

SEQ ID NO: 1002012 - RNA, 19 nt, Artificial Sequence
  Description of Artificial Sequence: Synthetic oligonucleotide
uuccugacgaaagcaggug

SEQ ID NO: 1002013 - RNA, 19 nt, Artificial Sequence
  Description of Artificial Sequence: Synthetic oligonucleotide
caacacguccucugggaug

SEQ ID NO: 1002014 - RNA, 19 nt, Artificial Sequence
  Description of Artificial Sequence: Synthetic oligonucleotide
gcuucuuacuggcagcaug

SEQ ID NO: 1002015 - RNA, 19 nt, Artificial Sequence
  Description of Artificial Sequence: Synthetic oligonucleotide
gguacggagugcauacugg

SEQ ID NO: 1002016 - RNA, 19 nt, Artificial Sequence
  Description of Artificial Sequence: Synthetic oligonucleotide
gagacccuuggcccaugcg

SEQ ID NO: 1002017 - RNA, 19 nt, Artificial Sequence
  Description of Artificial Sequence: Synthetic oligonucleotide
gaaccugcaucgucgccac

SEQ ID NO: 1002018 - RNA, 19 nt, Artificial Sequence
  Description of Artificial Sequence: Synthetic oligonucleotide
guacggagugcauacugga

SEQ ID NO: 1002019 - RNA, 19 nt, Artificial Sequence
  Description of Artificial Sequence: Synthetic oligonucleotide
acgaaagcagguggagagg

SEQ ID NO: 1002020 - RNA, 19 nt, Artificial Sequence
  Description of Artificial Sequence: Synthetic oligonucleotide
guacaccgcagaugguucc

SEQ ID NO: 1002021 - RNA, 19 nt, Artificial Sequence
  Description of Artificial Sequence: Synthetic oligonucleotide
aucucccaugacuuauugu

SEQ ID NO: 1002022 - RNA, 19 nt, Artificial Sequence
  Description of Artificial Sequence: Synthetic oligonucleotide
ugguacaccgcagaugguu

SEQ ID NO: 1002023 - RNA, 19 nt, Artificial Sequence
  Description of Artificial Sequence: Synthetic oligonucleotide
ggcccaugcgaggagaugg

SEQ ID NO: 1002024 - RNA, 19 nt, Artificial Sequence
  Description of Artificial Sequence: Synthetic oligonucleotide
caucgaaauucaacacguc

SEQ ID NO: 1002025 - RNA, 19 nt, Artificial Sequence
  Description of Artificial Sequence: Synthetic oligonucleotide
ucucucgaaugagggcugg

SEQ ID NO: 1002026 - RNA, 19 nt, Artificial Sequence
  Description of Artificial Sequence: Synthetic oligonucleotide
gggaauacuucuuccugac

SEQ ID NO: 1002027 - RNA, 19 nt, Artificial Sequence
  Description of Artificial Sequence: Synthetic oligonucleotide
aucguuacugaugggcaca

SEQ ID NO: 1002028 - RNA, 19 nt, Artificial Sequence
  Description of Artificial Sequence: Synthetic oligonucleotide
cugacgaaagcagguggag

SEQ ID NO: 1002029 - RNA, 19 nt, Artificial Sequence
  Description of Artificial Sequence: Synthetic oligonucleotide
ucaaguugucugcccggaa

SEQ ID NO: 1002030 - RNA, 19 nt, Artificial Sequence
  Description of Artificial Sequence: Synthetic oligonucleotide
cugcaugaccucuuuccuc

SEQ ID NO: 1002031 - RNA, 19 nt, Artificial Sequence
  Description of Artificial Sequence: Synthetic oligonucleotide
caccacggcucccuuuucg

SEQ ID NO: 1002032 - RNA, 19 nt, Artificial Sequence
  Description of Artificial Sequence: Synthetic oligonucleotide
augguaagggauccccaaa

SEQ ID NO: 1002033 - RNA, 19 nt, Artificial Sequence
  Description of Artificial Sequence: Synthetic oligonucleotide
ggcuucacaaaugggauca

SEQ ID NO: 1002034 - RNA, 19 nt, Artificial Sequence
  Description of Artificial Sequence: Synthetic oligonucleotide
uaucggauucggagccggc

SEQ ID NO: 1002035 - RNA, 19 nt, Artificial Sequence
  Description of Artificial Sequence: Synthetic oligonucleotide
uccgugcaauuagaacagg

SEQ ID NO: 1002036 - RNA, 19 nt, Artificial Sequence
  Description of Artificial Sequence: Synthetic oligonucleotide
acggugcagagcugcaaug

SEQ ID NO: 1002037 - RNA, 19 nt, Artificial Sequence
  Description of Artificial Sequence: Synthetic oligonucleotide
ucgccacucacuguccgcc

SEQ ID NO: 1002038 - RNA, 19 nt, Artificial Sequence
  Description of Artificial Sequence: Synthetic oligonucleotide
gaugaguacacgaacuguu

SEQ ID NO: 1002039 - RNA, 19 nt, Artificial Sequence
  Description of Artificial Sequence: Synthetic oligonucleotide
cccuuuucgccuucaaagc

SEQ ID NO: 1002040 - RNA, 19 nt, Artificial Sequence
  Description of Artificial Sequence: Synthetic oligonucleotide
cuuuaaccgcuccccauca

SEQ ID NO: 1002041 - RNA, 19 nt, Artificial Sequence
  Description of Artificial Sequence: Synthetic oligonucleotide
cucgucacggugcagagcu

SEQ ID NO: 1002042 - RNA, 19 nt, Artificial Sequence
  Description of Artificial Sequence: Synthetic oligonucleotide
cuuuauccacacgaaacaa

SEQ ID NO: 1002043 - RNA, 19 nt, Artificial Sequence
  Description of Artificial Sequence: Synthetic oligonucleotide
caggaaguacccucgacua

SEQ ID NO: 1002044 - RNA, 19 nt, Artificial Sequence
  Description of Artificial Sequence: Synthetic oligonucleotide
cccggaaccugcaucgucg

SEQ ID NO: 1002045 - RNA, 19 nt, Artificial Sequence
  Description of Artificial Sequence: Synthetic oligonucleotide
ucuccggcacaaugaugcc

SEQ ID NO: 1002046 - RNA, 19 nt, Artificial Sequence
  Description of Artificial Sequence: Synthetic oligonucleotide
ucgccuucaaagccgucua

SEQ ID NO: 1002047 - RNA, 19 nt, Artificial Sequence
  Description of Artificial Sequence: Synthetic oligonucleotide
gcagcaugauucaaagagc

SEQ ID NO: 1002048 - RNA, 19 nt, Artificial Sequence
  Description of Artificial Sequence: Synthetic oligonucleotide
gggcagauaacgugucugc

SEQ ID NO: 1002049 - RNA, 19 nt, Artificial Sequence
  Description of Artificial Sequence: Synthetic oligonucleotide
gcaucgucgccacucacug

SEQ ID NO: 1002050 - RNA, 19 nt, Artificial Sequence
  Description of Artificial Sequence: Synthetic oligonucleotide
ugcagucagaugggacagg

SEQ ID NO: 1002051 - RNA, 19 nt, Artificial Sequence
  Description of Artificial Sequence: Synthetic oligonucleotide
agauaacgugucugcagua

SEQ ID NO: 1002052 - RNA, 19 nt, Artificial Sequence
  Description of Artificial Sequence: Synthetic oligonucleotide
gggaucaguucuuggaguc

SEQ ID NO: 1002053 - RNA, 19 nt, Artificial Sequence
  Description of Artificial Sequence: Synthetic oligonucleotide
uacaccgcagaugguuccc

SEQ ID NO: 1002054 - RNA, 19 nt, Artificial Sequence
  Description of Artificial Sequence: Synthetic oligonucleotide
agccgucuaccaucaccac

SEQ ID NO: 1002055 - RNA, 19 nt, Artificial Sequence
  Description of Artificial Sequence: Synthetic oligonucleotide
cauaaguucuucagcuugu

SEQ ID NO: 1002056 - RNA, 19 nt, Artificial Sequence
  Description of Artificial Sequence: Synthetic oligonucleotide
ccuuuauccacacgaaaca

SEQ ID NO: 1002057 - RNA, 19 nt, Artificial Sequence
  Description of Artificial Sequence: Synthetic oligonucleotide
gcgcagaugguccgggugg

SEQ ID NO: 1002058 - RNA, 19 nt, Artificial Sequence
  Description of Artificial Sequence: Synthetic oligonucleotide
cauacuggaugagcgccug

SEQ ID NO: 1002059 - RNA, 19 nt, Artificial Sequence
  Description of Artificial Sequence: Synthetic oligonucleotide
caugaccucuuuccucaug

SEQ ID NO: 1002060 - RNA, 19 nt, Artificial Sequence
  Description of Artificial Sequence: Synthetic oligonucleotide
guaauccgugcaauuagaa

SEQ ID NO: 1002061 - RNA, 19 nt, Artificial Sequence
  Description of Artificial Sequence: Synthetic oligonucleotide
caucgaugaggagucggac

SEQ ID NO: 1002062 - RNA, 19 nt, Artificial Sequence
  Description of Artificial Sequence: Synthetic oligonucleotide
cagauaacgugucugcagu

SEQ ID NO: 1002063 - RNA, 19 nt, Artificial Sequence
  Description of Artificial Sequence: Synthetic oligonucleotide
ccaauuaccuuauaaaguu

SEQ ID NO: 1002064 - RNA, 19 nt, Artificial Sequence
  Description of Artificial Sequence: Synthetic oligonucleotide
caccgcagaugguuccccg

SEQ ID NO: 1002065 - RNA, 19 nt, Artificial Sequence
  Description of Artificial Sequence: Synthetic oligonucleotide
ugaccucuuuccucaugaa

SEQ ID NO: 1002066 - RNA, 19 nt, Artificial Sequence
  Description of Artificial Sequence: Synthetic oligonucleotide
ucgucgccacucacugucc

SEQ ID NO: 1002067 - RNA, 19 nt, Artificial Sequence
  Description of Artificial Sequence: Synthetic oligonucleotide
agcaugauucaaagagccu

SEQ ID NO: 1002068 - RNA, 19 nt, Artificial Sequence
  Description of Artificial Sequence: Synthetic oligonucleotide
auuaccuuauaaaguucuu

SEQ ID NO: 1002069 - RNA, 19 nt, Artificial Sequence
  Description of Artificial Sequence: Synthetic oligonucleotide
gcuuuaaccgcuccccauc

SEQ ID NO: 1002070 - RNA, 19 nt, Artificial Sequence
  Description of Artificial Sequence: Synthetic oligonucleotide
ccgucuaccaucaccacca

SEQ ID NO: 1002071 - RNA, 19 nt, Artificial Sequence
  Description of Artificial Sequence: Synthetic oligonucleotide
agccucgacuucccaaggu

SEQ ID NO: 1002072 - RNA, 19 nt, Artificial Sequence
  Description of Artificial Sequence: Synthetic oligonucleotide
cucccucaacuucuccggc

SEQ ID NO: 1002073 - RNA, 19 nt, Artificial Sequence
  Description of Artificial Sequence: Synthetic oligonucleotide
gaugguccgggugguagca

SEQ ID NO: 1002074 - RNA, 19 nt, Artificial Sequence
  Description of Artificial Sequence: Synthetic oligonucleotide
ggaaccugcaucgucgcca

SEQ ID NO: 1002075 - RNA, 19 nt, Artificial Sequence
  Description of Artificial Sequence: Synthetic oligonucleotide
aguugucugcccggaaccu

SEQ ID NO: 1002076 - RNA, 19 nt, Artificial Sequence
  Description of Artificial Sequence: Synthetic oligonucleotide
ugucugcccggaaccugca

SEQ ID NO: 1002077 - RNA, 19 nt, Artificial Sequence
  Description of Artificial Sequence: Synthetic oligonucleotide
agguucccgaucucucgga

SEQ ID NO: 1002078 - RNA, 19 nt, Artificial Sequence
  Description of Artificial Sequence: Synthetic oligonucleotide
cuucaucgaugaggagucg

SEQ ID NO: 1002079 - RNA, 19 nt, Artificial Sequence
  Description of Artificial Sequence: Synthetic oligonucleotide
gccgucuaccaucaccacc

SEQ ID NO: 1002080 - RNA, 19 nt, Artificial Sequence
  Description of Artificial Sequence: Synthetic oligonucleotide
accgcagaugguuccccgu

SEQ ID NO: 1002081 - RNA, 19 nt, Artificial Sequence
  Description of Artificial Sequence: Synthetic oligonucleotide
gguaauccgugcaauuaga

SEQ ID NO: 1002082 - RNA, 19 nt, Artificial Sequence
  Description of Artificial Sequence: Synthetic oligonucleotide
auggcgcagaugguccggg

SEQ ID NO: 1002083 - RNA, 19 nt, Artificial Sequence
  Description of Artificial Sequence: Synthetic oligonucleotide
gguucccgaucucucggag

SEQ ID NO: 1002084 - RNA, 19 nt, Artificial Sequence
  Description of Artificial Sequence: Synthetic oligonucleotide
gucgccacucacuguccgc

SEQ ID NO: 1002085 - RNA, 19 nt, Artificial Sequence
  Description of Artificial Sequence: Synthetic oligonucleotide
uugguacaccgcagauggu

SEQ ID NO: 1002086 - RNA, 19 nt, Artificial Sequence
  Description of Artificial Sequence: Synthetic oligonucleotide
augcgaggagaugggaaca

SEQ ID NO: 1002087 - RNA, 19 nt, Artificial Sequence
  Description of Artificial Sequence: Synthetic oligonucleotide
cgggugguagcacacauug

SEQ ID NO: 1002088 - RNA, 19 nt, Artificial Sequence
  Description of Artificial Sequence: Synthetic oligonucleotide
gccaauuaccuuauaaagu

SEQ ID NO: 1002089 - RNA, 19 nt, Artificial Sequence
  Description of Artificial Sequence: Synthetic oligonucleotide
gacuaccagccaccacggc

SEQ ID NO: 1002090 - RNA, 19 nt, Artificial Sequence
  Description of Artificial Sequence: Synthetic oligonucleotide
ccucgacuucccaagguac

SEQ ID NO: 1002091 - RNA, 19 nt, Artificial Sequence
  Description of Artificial Sequence: Synthetic oligonucleotide
gugaggagugguacucggc

SEQ ID NO: 1002092 - RNA, 19 nt, Artificial Sequence
  Description of Artificial Sequence: Synthetic oligonucleotide
cugguaauccgugcaauua

SEQ ID NO: 1002093 - RNA, 19 nt, Artificial Sequence
  Description of Artificial Sequence: Synthetic oligonucleotide
accccagaugcgcucuacu

SEQ ID NO: 1002094 - RNA, 19 nt, Artificial Sequence
  Description of Artificial Sequence: Synthetic oligonucleotide
cgaaauucaacacguccuc

SEQ ID NO: 1002095 - RNA, 19 nt, Artificial Sequence
  Description of Artificial Sequence: Synthetic oligonucleotide
agaugcgcucuacuuuguu

SEQ ID NO: 1002096 - RNA, 19 nt, Artificial Sequence
  Description of Artificial Sequence: Synthetic oligonucleotide
ggaacaccugcuugguaca

SEQ ID NO: 1002097 - RNA, 19 nt, Artificial Sequence
  Description of Artificial Sequence: Synthetic oligonucleotide
agccacucgucacggugca

SEQ ID NO: 1002098 - RNA, 19 nt, Artificial Sequence
  Description of Artificial Sequence: Synthetic oligonucleotide
gaggagugguacucggccu

SEQ ID NO: 1002099 - RNA, 19 nt, Artificial Sequence
  Description of Artificial Sequence: Synthetic oligonucleotide
uucugcggugccgaucauc

SEQ ID NO: 1002100 - RNA, 19 nt, Artificial Sequence
  Description of Artificial Sequence: Synthetic oligonucleotide
ggugccgaucaucucuuca

SEQ ID NO: 1002101 - RNA, 19 nt, Artificial Sequence
  Description of Artificial Sequence: Synthetic oligonucleotide
agcgccugcuccaggaaca

SEQ ID NO: 1002102 - RNA, 19 nt, Artificial Sequence
  Description of Artificial Sequence: Synthetic oligonucleotide
cucucgaaugagggcuggg

SEQ ID NO: 1002103 - RNA, 19 nt, Artificial Sequence
  Description of Artificial Sequence: Synthetic oligonucleotide
aaccaggccuccaggucga

SEQ ID NO: 1002104 - RNA, 19 nt, Artificial Sequence
  Description of Artificial Sequence: Synthetic oligonucleotide
gucucucgaaugagggcug

SEQ ID NO: 1002105 - RNA, 19 nt, Artificial Sequence
  Description of Artificial Sequence: Synthetic oligonucleotide
gcuugguacaccgcagaug

SEQ ID NO: 1002106 - RNA, 19 nt, Artificial Sequence
  Description of Artificial Sequence: Synthetic oligonucleotide
gcaguaaggucaucgaaau

SEQ ID NO: 1002107 - RNA, 19 nt, Artificial Sequence
  Description of Artificial Sequence: Synthetic oligonucleotide
uacccucgacuaccagcca

SEQ ID NO: 1002108 - RNA, 19 nt, Artificial Sequence
  Description of Artificial Sequence: Synthetic oligonucleotide
gggaguguagccucgacuu

SEQ ID NO: 1002109 - RNA, 19 nt, Artificial Sequence
  Description of Artificial Sequence: Synthetic oligonucleotide
cuccugcgucucucgaaug

SEQ ID NO: 1002110 - RNA, 19 nt, Artificial Sequence
  Description of Artificial Sequence: Synthetic oligonucleotide
gguacaccgcagaugguuc

SEQ ID NO: 1002111 - RNA, 19 nt, Artificial Sequence
  Description of Artificial Sequence: Synthetic oligonucleotide
gggugaggagugguacucg

SEQ ID NO: 1002112 - RNA, 19 nt, Artificial Sequence
  Description of Artificial Sequence: Synthetic oligonucleotide
uuucgccuucaaagccguc

SEQ ID NO: 1002113 - RNA, 19 nt, Artificial Sequence
  Description of Artificial Sequence: Synthetic oligonucleotide
ggagaccaacucacggaag

SEQ ID NO: 1002114 - RNA, 19 nt, Artificial Sequence
  Description of Artificial Sequence: Synthetic oligonucleotide
auucggagccggcgagccu

SEQ ID NO: 1002115 - RNA, 19 nt, Artificial Sequence
  Description of Artificial Sequence: Synthetic oligonucleotide
cagcuuuaaccgcucccca

SEQ ID NO: 1002116 - RNA, 19 nt, Artificial Sequence
  Description of Artificial Sequence: Synthetic oligonucleotide
gaaugagggcugggucccc

SEQ ID NO: 1002117 - RNA, 19 nt, Artificial Sequence
  Description of Artificial Sequence: Synthetic oligonucleotide
ggaguguagccucgacuuc

SEQ ID NO: 1002118 - RNA, 19 nt, Artificial Sequence
  Description of Artificial Sequence: Synthetic oligonucleotide
cuuggcccaugcgaggaga

SEQ ID NO: 1002119 - RNA, 19 nt, Artificial Sequence
  Description of Artificial Sequence: Synthetic oligonucleotide
cugcaucgucgccacucac

SEQ ID NO: 1002120 - RNA, 19 nt, Artificial Sequence
  Description of Artificial Sequence: Synthetic oligonucleotide
cgacuaccagccaccacgg

SEQ ID NO: 1002121 - RNA, 19 nt, Artificial Sequence
  Description of Artificial Sequence: Synthetic oligonucleotide
ggcagauaacgugucugca

SEQ ID NO: 1002122 - RNA, 19 nt, Artificial Sequence
  Description of Artificial Sequence: Synthetic oligonucleotide
ccgugcaauuagaacagga

SEQ ID NO: 1002123 - RNA, 19 nt, Artificial Sequence
  Description of Artificial Sequence: Synthetic oligonucleotide
gagcccacuuccugacgaa

SEQ ID NO: 1002124 - RNA, 19 nt, Artificial Sequence
  Description of Artificial Sequence: Synthetic oligonucleotide
caaucaccccagaugcgcu

SEQ ID NO: 1002125 - RNA, 19 nt, Artificial Sequence
  Description of Artificial Sequence: Synthetic oligonucleotide
acggccaugugagcccacu

SEQ ID NO: 1002126 - RNA, 19 nt, Artificial Sequence
  Description of Artificial Sequence: Synthetic oligonucleotide
ccacggcucccuuuucgcc

SEQ ID NO: 1002127 - RNA, 19 nt, Artificial Sequence
  Description of Artificial Sequence: Synthetic oligonucleotide
cacggcucccuuuucgccu

SEQ ID NO: 1002128 - RNA, 19 nt, Artificial Sequence
  Description of Artificial Sequence: Synthetic oligonucleotide
cgaaugagggcuggguccc

SEQ ID NO: 1002129 - RNA, 19 nt, Artificial Sequence
  Description of Artificial Sequence: Synthetic oligonucleotide
cagugaccuccauguucug

SEQ ID NO: 1002130 - RNA, 19 nt, Artificial Sequence
  Description of Artificial Sequence: Synthetic oligonucleotide
cugauggacucggaagaua

SEQ ID NO: 1002131 - RNA, 19 nt, Artificial Sequence
  Description of Artificial Sequence: Synthetic oligonucleotide
ccggcgagccugguaaucc

SEQ ID NO: 1002132 - RNA, 19 nt, Artificial Sequence
  Description of Artificial Sequence: Synthetic oligonucleotide
ccggaaccugcaucgucgc

SEQ ID NO: 1002133 - RNA, 19 nt, Artificial Sequence
  Description of Artificial Sequence: Synthetic oligonucleotide
guguagccucgacuuccca

SEQ ID NO: 1002134 - RNA, 19 nt, Artificial Sequence
  Description of Artificial Sequence: Synthetic oligonucleotide
cccaaagacugguagaauu

SEQ ID NO: 1002135 - RNA, 19 nt, Artificial Sequence
  Description of Artificial Sequence: Synthetic oligonucleotide
ccgucggcugugcagucag

SEQ ID NO: 1002136 - RNA, 19 nt, Artificial Sequence
  Description of Artificial Sequence: Synthetic oligonucleotide
gcccaugcgaggagauggg

SEQ ID NO: 1002137 - RNA, 19 nt, Artificial Sequence
  Description of Artificial Sequence: Synthetic oligonucleotide
guacucggccucccugaaa

SEQ ID NO: 1002138 - RNA, 19 nt, Artificial Sequence
  Description of Artificial Sequence: Synthetic oligonucleotide
ccaugcgaggagaugggaa

SEQ ID NO: 1002139 - RNA, 19 nt, Artificial Sequence
  Description of Artificial Sequence: Synthetic oligonucleotide
gccucgacuucccaaggua

SEQ ID NO: 1002140 - RNA, 19 nt, Artificial Sequence
  Description of Artificial Sequence: Synthetic oligonucleotide
ggugcagaagguucccgau

SEQ ID NO: 1002141 - RNA, 19 nt, Artificial Sequence
  Description of Artificial Sequence: Synthetic oligonucleotide
cccgaucucucggagguuc

SEQ ID NO: 1002142 - RNA, 19 nt, Artificial Sequence
  Description of Artificial Sequence: Synthetic oligonucleotide
cacguguaucacggccaug

SEQ ID NO: 1002143 - RNA, 19 nt, Artificial Sequence
  Description of Artificial Sequence: Synthetic oligonucleotide
caccccagaugcgcucuac

SEQ ID NO: 1002144 - RNA, 19 nt, Artificial Sequence
  Description of Artificial Sequence: Synthetic oligonucleotide
gguacucggccucccugaa

SEQ ID NO: 1002145 - RNA, 19 nt, Artificial Sequence
  Description of Artificial Sequence: Synthetic oligonucleotide
gugucugcaguaaggucau

SEQ ID NO: 1002146 - RNA, 19 nt, Artificial Sequence
  Description of Artificial Sequence: Synthetic oligonucleotide
gucggcugugcagucagau

SEQ ID NO: 1002147 - RNA, 19 nt, Artificial Sequence
  Description of Artificial Sequence: Synthetic oligonucleotide
cugagacaauauucacgau

SEQ ID NO: 1002148 - RNA, 19 nt, Artificial Sequence
  Description of Artificial Sequence: Synthetic oligonucleotide
ccgcagaugguuccccguc

SEQ ID NO: 1002149 - RNA, 19 nt, Artificial Sequence
  Description of Artificial Sequence: Synthetic oligonucleotide
cgauaugguaagggauccc

SEQ ID NO: 1002150 - RNA, 19 nt, Artificial Sequence
  Description of Artificial Sequence: Synthetic oligonucleotide
cagucagaugggacagggu

SEQ ID NO: 1002151 - RNA, 19 nt, Artificial Sequence
  Description of Artificial Sequence: Synthetic oligonucleotide
ccuuggcccaugcgaggag

SEQ ID NO: 1002152 - RNA, 19 nt, Artificial Sequence
  Description of Artificial Sequence: Synthetic oligonucleotide
cggauucggagccggcgag

SEQ ID NO: 1002153 - RNA, 19 nt, Artificial Sequence
  Description of Artificial Sequence: Synthetic oligonucleotide
gcccggaaccugcaucguc

SEQ ID NO: 1002154 - RNA, 19 nt, Artificial Sequence
  Description of Artificial Sequence: Synthetic oligonucleotide
cuccggcacaaugaugccu

SEQ ID NO: 1002155 - RNA, 19 nt, Artificial Sequence
  Description of Artificial Sequence: Synthetic oligonucleotide
ccccggguccuugaagcgc

SEQ ID NO: 1002156 - RNA, 19 nt, Artificial Sequence
  Description of Artificial Sequence: Synthetic oligonucleotide
ccaagguacggagugcaua

SEQ ID NO: 1002157 - RNA, 19 nt, Artificial Sequence
  Description of Artificial Sequence: Synthetic oligonucleotide
gcauggcucagcagucauc

SEQ ID NO: 1002158 - RNA, 19 nt, Artificial Sequence
  Description of Artificial Sequence: Synthetic oligonucleotide
cgucucucgaaugagggcu

SEQ ID NO: 1002159 - RNA, 19 nt, Artificial Sequence
  Description of Artificial Sequence: Synthetic oligonucleotide
gggguauagaugggagugu

SEQ ID NO: 1002160 - RNA, 19 nt, Artificial Sequence
  Description of Artificial Sequence: Synthetic oligonucleotide
ucccgaucucucggagguu

SEQ ID NO: 1002161 - RNA, 19 nt, Artificial Sequence
  Description of Artificial Sequence: Synthetic oligonucleotide
ccgcagccacucgucacgg

SEQ ID NO: 1002162 - RNA, 19 nt, Artificial Sequence
  Description of Artificial Sequence: Synthetic oligonucleotide
gcauacuggaugagcgccu

SEQ ID NO: 1002163 - RNA, 19 nt, Artificial Sequence
  Description of Artificial Sequence: Synthetic oligonucleotide
cggagguucucaaaccgcu

SEQ ID NO: 1002164 - RNA, 19 nt, Artificial Sequence
  Description of Artificial Sequence: Synthetic oligonucleotide
cggaaccugcaucgucgcc

SEQ ID NO: 1002165 - RNA, 19 nt, Artificial Sequence
  Description of Artificial Sequence: Synthetic oligonucleotide
ccgcuccccaucacacuuc

SEQ ID NO: 1002166 - RNA, 19 nt, Artificial Sequence
  Description of Artificial Sequence: Synthetic oligonucleotide
ccugguaauccgugcaauu

SEQ ID NO: 1002167 - RNA, 19 nt, Artificial Sequence
  Description of Artificial Sequence: Synthetic oligonucleotide
ccaugugagcccacuuccu

SEQ ID NO: 1002168 - RNA, 19 nt, Artificial Sequence
  Description of Artificial Sequence: Synthetic oligonucleotide
gccacucgucacggugcag

SEQ ID NO: 1002169 - RNA, 19 nt, Artificial Sequence
  Description of Artificial Sequence: Synthetic oligonucleotide
gguggcaaucagguauuuu

SEQ ID NO: 1002170 - RNA, 19 nt, Artificial Sequence
  Description of Artificial Sequence: Synthetic oligonucleotide
gccggcgagccugguaauc

SEQ ID NO: 1002171 - RNA, 19 nt, Artificial Sequence
  Description of Artificial Sequence: Synthetic oligonucleotide
ccaggucgagcuucuuacu

SEQ ID NO: 1002172 - RNA, 19 nt, Artificial Sequence
  Description of Artificial Sequence: Synthetic oligonucleotide
gccugguaauccgugcaau

SEQ ID NO: 1002173 - RNA, 19 nt, Artificial Sequence
  Description of Artificial Sequence: Synthetic oligonucleotide
cggaagauaccacguguau

SEQ ID NO: 1002174 - RNA, 19 nt, Artificial Sequence
  Description of Artificial Sequence: Synthetic oligonucleotide
ccacguguaucacggccau

SEQ ID NO: 1002175 - RNA, 19 nt, Artificial Sequence
  Description of Artificial Sequence: Synthetic oligonucleotide
ccgaucucucggagguucu

SEQ ID NO: 1002176 - RNA, 19 nt, Artificial Sequence
  Description of Artificial Sequence: Synthetic oligonucleotide
ccccgucggcugugcaguc

SEQ ID NO: 1002177 - RNA, 19 nt, Artificial Sequence
  Description of Artificial Sequence: Synthetic oligonucleotide
cccgucggcugugcaguca

SEQ ID NO: 1002178 - RNA, 19 nt, Artificial Sequence
  Description of Artificial Sequence: Synthetic oligonucleotide
ccccaaagacugguagaau

SEQ ID NO: 1002179 - RNA, 19 nt, Artificial Sequence
  Description of Artificial Sequence: Synthetic oligonucleotide
uuagcguucaccaaguuca

SEQ ID NO: 1002180 - RNA, 19 nt, Artificial Sequence
  Description of Artificial Sequence: Synthetic oligonucleotide
uguugaacaccaaaggagg

SEQ ID NO: 1002181 - RNA, 19 nt, Artificial Sequence
  Description of Artificial Sequence: Synthetic oligonucleotide
aguucugcggcgcugaggc

SEQ ID NO: 1002182 - RNA, 19 nt, Artificial Sequence
  Description of Artificial Sequence: Synthetic oligonucleotide
uguaaacacauccagugca

SEQ ID NO: 1002183 - RNA, 19 nt, Artificial Sequence
  Description of Artificial Sequence: Synthetic oligonucleotide
ugaccuuaguggcagaccg

SEQ ID NO: 1002184 - RNA, 19 nt, Artificial Sequence
  Description of Artificial Sequence: Synthetic oligonucleotide
acugaugagcacuuugcgc

SEQ ID NO: 1002185 - RNA, 19 nt, Artificial Sequence
  Description of Artificial Sequence: Synthetic oligonucleotide
aggucucuccgucagaugc

SEQ ID NO: 1002186 - RNA, 19 nt, Artificial Sequence
  Description of Artificial Sequence: Synthetic oligonucleotide
uagaucacagcaauuaggu

SEQ ID NO: 1002187 - RNA, 19 nt, Artificial Sequence
  Description of Artificial Sequence: Synthetic oligonucleotide
acacaugcugcuuccaugc

SEQ ID NO: 1002188 - RNA, 19 nt, Artificial Sequence
  Description of Artificial Sequence: Synthetic oligonucleotide
uuuacgaccccuguuagag

SEQ ID NO: 1002189 - RNA, 19 nt, Artificial Sequence
  Description of Artificial Sequence: Synthetic oligonucleotide
cuguugaacaccaaaggag

SEQ ID NO: 1002190 - RNA, 19 nt, Artificial Sequence
  Description of Artificial Sequence: Synthetic oligonucleotide
augacuaggaugcccuucc

SEQ ID NO: 1002191 - RNA, 19 nt, Artificial Sequence
  Description of Artificial Sequence: Synthetic oligonucleotide
aauaaggccuucgcagucc

SEQ ID NO: 1002192 - RNA, 19 nt, Artificial Sequence
  Description of Artificial Sequence: Synthetic oligonucleotide
gaaggccucagacacaugc

SEQ ID NO: 1002193 - RNA, 19 nt, Artificial Sequence
  Description of Artificial Sequence: Synthetic oligonucleotide
augaucaucccacagguga

SEQ ID NO: 1002194 - RNA, 19 nt, Artificial Sequence
  Description of Artificial Sequence: Synthetic oligonucleotide
uugguaggaaagcaguugc

SEQ ID NO: 1002195 - RNA, 19 nt, Artificial Sequence
  Description of Artificial Sequence: Synthetic oligonucleotide
gaucaguuguucugggugg

SEQ ID NO: 1002196 - RNA, 19 nt, Artificial Sequence
  Description of Artificial Sequence: Synthetic oligonucleotide
acugguaagagccugcgca

SEQ ID NO: 1002197 - RNA, 19 nt, Artificial Sequence
  Description of Artificial Sequence: Synthetic oligonucleotide
cagugaugaaaucacagag

SEQ ID NO: 1002198 - RNA, 19 nt, Artificial Sequence
  Description of Artificial Sequence: Synthetic oligonucleotide
agcuccauugagcaccugc

SEQ ID NO: 1002199 - RNA, 19 nt, Artificial Sequence
  Description of Artificial Sequence: Synthetic oligonucleotide
aaggccuucgcaguccugc

SEQ ID NO: 1002200 - RNA, 19 nt, Artificial Sequence
  Description of Artificial Sequence: Synthetic oligonucleotide
guguucaugacuaggaugc

SEQ ID NO: 1002201 - RNA, 19 nt, Artificial Sequence
  Description of Artificial Sequence: Synthetic oligonucleotide
agauccacguuguccacgc

SEQ ID NO: 1002202 - RNA, 19 nt, Artificial Sequence
  Description of Artificial Sequence: Synthetic oligonucleotide
uggagguuugguaggaaag

SEQ ID NO: 1002203 - RNA, 19 nt, Artificial Sequence
  Description of Artificial Sequence: Synthetic oligonucleotide
ugcaucagagugcccaacg

SEQ ID NO: 1002204 - RNA, 19 nt, Artificial Sequence
  Description of Artificial Sequence: Synthetic oligonucleotide
aucccaaaggacugcauuc

SEQ ID NO: 1002205 - RNA, 19 nt, Artificial Sequence
  Description of Artificial Sequence: Synthetic oligonucleotide
ugggcagacgcacuuaggc

SEQ ID NO: 1002206 - RNA, 19 nt, Artificial Sequence
  Description of Artificial Sequence: Synthetic oligonucleotide
uggggaaucugucuggcca

SEQ ID NO: 1002207 - RNA, 19 nt, Artificial Sequence
  Description of Artificial Sequence: Synthetic oligonucleotide
uccacuaaggcccgguccc

SEQ ID NO: 1002208 - RNA, 19 nt, Artificial Sequence
  Description of Artificial Sequence: Synthetic oligonucleotide
acucgcacgcccuucuugc

SEQ ID NO: 1002209 - RNA, 19 nt, Artificial Sequence
  Description of Artificial Sequence: Synthetic oligonucleotide
uuugcgaaggccauugcua

SEQ ID NO: 1002210 - RNA, 19 nt, Artificial Sequence
  Description of Artificial Sequence: Synthetic oligonucleotide
acagugaugaaaucacaga

SEQ ID NO: 1002211 - RNA, 19 nt, Artificial Sequence
  Description of Artificial Sequence: Synthetic oligonucleotide
uuugacgcuucccucaaaa

SEQ ID NO: 1002212 - RNA, 19 nt, Artificial Sequence
  Description of Artificial Sequence: Synthetic oligonucleotide
ucgagaucaguuguucugg

SEQ ID NO: 1002213 - RNA, 19 nt, Artificial Sequence
  Description of Artificial Sequence: Synthetic oligonucleotide
cugaugagcacuuugcgca

SEQ ID NO: 1002214 - RNA, 19 nt, Artificial Sequence
  Description of Artificial Sequence: Synthetic oligonucleotide
acugcgaucuccuccccac

SEQ ID NO: 1002215 - RNA, 19 nt, Artificial Sequence
  Description of Artificial Sequence: Synthetic oligonucleotide
cauccgcuugcuuugacgc

SEQ ID NO: 1002216 - RNA, 19 nt, Artificial Sequence
  Description of Artificial Sequence: Synthetic oligonucleotide
aggaucuuccggcagcagg

SEQ ID NO: 1002217 - RNA, 19 nt, Artificial Sequence
  Description of Artificial Sequence: Synthetic oligonucleotide
agagccugcgcauuuacga

SEQ ID NO: 1002218 - RNA, 19 nt, Artificial Sequence
  Description of Artificial Sequence: Synthetic oligonucleotide
aacaaugacugcagggcuc

SEQ ID NO: 1002219 - RNA, 19 nt, Artificial Sequence
  Description of Artificial Sequence: Synthetic oligonucleotide
gcauugaugacaucagcgg

SEQ ID NO: 1002220 - RNA, 19 nt, Artificial Sequence
  Description of Artificial Sequence: Synthetic oligonucleotide
agauguuccuugugucacc

SEQ ID NO: 1002221 - RNA, 19 nt, Artificial Sequence
  Description of Artificial Sequence: Synthetic oligonucleotide
ugacauugaggccagccuc

SEQ ID NO: 1002222 - RNA, 19 nt, Artificial Sequence
  Description of Artificial Sequence: Synthetic oligonucleotide
ugcacugggcaaaagugcu

SEQ ID NO: 1002223 - RNA, 19 nt, Artificial Sequence
  Description of Artificial Sequence: Synthetic oligonucleotide
uugcgaaggccauugcuag

SEQ ID NO: 1002224 - RNA, 19 nt, Artificial Sequence
  Description of Artificial Sequence: Synthetic oligonucleotide
ugaacaccaaaggaggcug

SEQ ID NO: 1002225 - RNA, 19 nt, Artificial Sequence
  Description of Artificial Sequence: Synthetic oligonucleotide
ucaucgaagcuguugccug

SEQ ID NO: 1002226 - RNA, 19 nt, Artificial Sequence
  Description of Artificial Sequence: Synthetic oligonucleotide
ggacgaaaggcccaugacg

SEQ ID NO: 1002227 - RNA, 19 nt, Artificial Sequence
  Description of Artificial Sequence: Synthetic oligonucleotide
acguuguccacgccugugc

SEQ ID NO: 1002228 - RNA, 19 nt, Artificial Sequence
  Description of Artificial Sequence: Synthetic oligonucleotide
ucggcuaucagcuccuccu

SEQ ID NO: 1002229 - RNA, 19 nt, Artificial Sequence
  Description of Artificial Sequence: Synthetic oligonucleotide
uggcagaccggacaauaag

SEQ ID NO: 1002230 - RNA, 19 nt, Artificial Sequence
  Description of Artificial Sequence: Synthetic oligonucleotide
uggacugcgaucuccuccc

SEQ ID NO: 1002231 - RNA, 19 nt, Artificial Sequence
  Description of Artificial Sequence: Synthetic oligonucleotide
uuugcgcagauuugcgaag

SEQ ID NO: 1002232 - RNA, 19 nt, Artificial Sequence
  Description of Artificial Sequence: Synthetic oligonucleotide
acauccgcuugcuuugacg

SEQ ID NO: 1002233 - RNA, 19 nt, Artificial Sequence
  Description of Artificial Sequence: Synthetic oligonucleotide
acaguucacuacucgcacg

SEQ ID NO: 1002234 - RNA, 19 nt, Artificial Sequence
  Description of Artificial Sequence: Synthetic oligonucleotide
caauccaaggcuuggugug

SEQ ID NO: 1002235 - RNA, 19 nt, Artificial Sequence
  Description of Artificial Sequence: Synthetic oligonucleotide
ugcccaacgcuucugccag

SEQ ID NO: 1002236 - RNA, 19 nt, Artificial Sequence
  Description of Artificial Sequence: Synthetic oligonucleotide
auuugcgaaggccauugcu

SEQ ID NO: 1002237 - RNA, 19 nt, Artificial Sequence
  Description of Artificial Sequence: Synthetic oligonucleotide
cuguaaacacauccagugc

SEQ ID NO: 1002238 - RNA, 19 nt, Artificial Sequence
  Description of Artificial Sequence: Synthetic oligonucleotide
cucgagaucaguuguucug

SEQ ID NO: 1002239 - RNA, 19 nt, Artificial Sequence
  Description of Artificial Sequence: Synthetic oligonucleotide
aggccaagaauucccagug

SEQ ID NO: 1002240 - RNA, 19 nt, Artificial Sequence
  Description of Artificial Sequence: Synthetic oligonucleotide
uguguggagagaaggcacu

SEQ ID NO: 1002241 - RNA, 19 nt, Artificial Sequence
  Description of Artificial Sequence: Synthetic oligonucleotide
auugcuagagcaggccucg

SEQ ID NO: 1002242 - RNA, 19 nt, Artificial Sequence
  Description of Artificial Sequence: Synthetic oligonucleotide
cuuagcguucaccaaguuc

SEQ ID NO: 1002243 - RNA, 19 nt, Artificial Sequence
  Description of Artificial Sequence: Synthetic oligonucleotide
aggcaugcaucagagugcc

SEQ ID NO: 1002244 - RNA, 19 nt, Artificial Sequence
  Description of Artificial Sequence: Synthetic oligonucleotide
caguucacuacucgcacgc

SEQ ID NO: 1002245 - RNA, 19 nt, Artificial Sequence
  Description of Artificial Sequence: Synthetic oligonucleotide
gagcacaguucacuacucg

SEQ ID NO: 1002246 - RNA, 19 nt, Artificial Sequence
  Description of Artificial Sequence: Synthetic oligonucleotide
gacgcuucccucaaaaguc

SEQ ID NO: 1002247 - RNA, 19 nt, Artificial Sequence
  Description of Artificial Sequence: Synthetic oligonucleotide
aggccaaucauagugggca

SEQ ID NO: 1002248 - RNA, 19 nt, Artificial Sequence
  Description of Artificial Sequence: Synthetic oligonucleotide
agauuugcgaaggccauug

SEQ ID NO: 1002249 - RNA, 19 nt, Artificial Sequence
  Description of Artificial Sequence: Synthetic oligonucleotide
cuuuaggcgagccagccca

SEQ ID NO: 1002250 - RNA, 19 nt, Artificial Sequence
  Description of Artificial Sequence: Synthetic oligonucleotide
gguguucaugacuaggaug

SEQ ID NO: 1002251 - RNA, 19 nt, Artificial Sequence
  Description of Artificial Sequence: Synthetic oligonucleotide
aagcaguugcacaccugcc

SEQ ID NO: 1002252 - RNA, 19 nt, Artificial Sequence
  Description of Artificial Sequence: Synthetic oligonucleotide
ugcgaucuccuccccacag

SEQ ID NO: 1002253 - RNA, 19 nt, Artificial Sequence
  Description of Artificial Sequence: Synthetic oligonucleotide
uugacgcuucccucaaaag

SEQ ID NO: 1002254 - RNA, 19 nt, Artificial Sequence
  Description of Artificial Sequence: Synthetic oligonucleotide
uugaacaccaaaggaggcu

SEQ ID NO: 1002255 - RNA, 19 nt, Artificial Sequence
  Description of Artificial Sequence: Synthetic oligonucleotide
cucaaaaguccaacaauga

SEQ ID NO: 1002256 - RNA, 19 nt, Artificial Sequence
  Description of Artificial Sequence: Synthetic oligonucleotide
caggcaugcaucagagugc

SEQ ID NO: 1002257 - RNA, 19 nt, Artificial Sequence
  Description of Artificial Sequence: Synthetic oligonucleotide
cagaccggacaauaaggcc

SEQ ID NO: 1002258 - RNA, 19 nt, Artificial Sequence
  Description of Artificial Sequence: Synthetic oligonucleotide
cagcuuagcguucaccaag

SEQ ID NO: 1002259 - RNA, 19 nt, Artificial Sequence
  Description of Artificial Sequence: Synthetic oligonucleotide
cauuuacgaccccuguuag

SEQ ID NO: 1002260 - RNA, 19 nt, Artificial Sequence
  Description of Artificial Sequence: Synthetic oligonucleotide
ugcgcauuuacgaccccug

SEQ ID NO: 1002261 - RNA, 19 nt, Artificial Sequence
  Description of Artificial Sequence: Synthetic oligonucleotide
uguuagagacuuucccuuc

SEQ ID NO: 1002262 - RNA, 19 nt, Artificial Sequence
  Description of Artificial Sequence: Synthetic oligonucleotide
agaccggacaauaaggccu

SEQ ID NO: 1002263 - RNA, 19 nt, Artificial Sequence
  Description of Artificial Sequence: Synthetic oligonucleotide
cacuuugcgcagauuugcg

SEQ ID NO: 1002264 - RNA, 19 nt, Artificial Sequence
  Description of Artificial Sequence: Synthetic oligonucleotide
ucccauuugccaucuuuca

SEQ ID NO: 1002265 - RNA, 19 nt, Artificial Sequence
  Description of Artificial Sequence: Synthetic oligonucleotide
guucacuacucgcacgccc

SEQ ID NO: 1002266 - RNA, 19 nt, Artificial Sequence
  Description of Artificial Sequence: Synthetic oligonucleotide
uuguccacgccugugccag

SEQ ID NO: 1002267 - RNA, 19 nt, Artificial Sequence
  Description of Artificial Sequence: Synthetic oligonucleotide
uugcgcagauuugcgaagg

SEQ ID NO: 1002268 - RNA, 19 nt, Artificial Sequence
  Description of Artificial Sequence: Synthetic oligonucleotide
ccaggcaugcaucagagug

SEQ ID NO: 1002269 - RNA, 19 nt, Artificial Sequence
  Description of Artificial Sequence: Synthetic oligonucleotide
gggaccacaggguuguggg

SEQ ID NO: 1002270 - RNA, 19 nt, Artificial Sequence
  Description of Artificial Sequence: Synthetic oligonucleotide
aauucugcccaggccaaga

SEQ ID NO: 1002271 - RNA, 19 nt, Artificial Sequence
  Description of Artificial Sequence: Synthetic oligonucleotide
accccuguuagagacuuuc

SEQ ID NO: 1002272 - RNA, 19 nt, Artificial Sequence
  Description of Artificial Sequence: Synthetic oligonucleotide
caauagaucacagcaauua

SEQ ID NO: 1002273 - RNA, 19 nt, Artificial Sequence
  Description of Artificial Sequence: Synthetic oligonucleotide
caucgaagcuguugccugg

SEQ ID NO: 1002274 - RNA, 19 nt, Artificial Sequence
  Description of Artificial Sequence: Synthetic oligonucleotide
uguugccuggggaaucugu

SEQ ID NO: 1002275 - RNA, 19 nt, Artificial Sequence
  Description of Artificial Sequence: Synthetic oligonucleotide
acuuugcgcagauuugcga

SEQ ID NO: 1002276 - RNA, 19 nt, Artificial Sequence
  Description of Artificial Sequence: Synthetic oligonucleotide
gcauuacaggguuggaggg

SEQ ID NO: 1002277 - RNA, 19 nt, Artificial Sequence
  Description of Artificial Sequence: Synthetic oligonucleotide
aagagccugcgcauuuacg

SEQ ID NO: 1002278 - RNA, 19 nt, Artificial Sequence
  Description of Artificial Sequence: Synthetic oligonucleotide
gucccuuuaggcgagccag

SEQ ID NO: 1002279 - RNA, 19 nt, Artificial Sequence
  Description of Artificial Sequence: Synthetic oligonucleotide
cauugcuagagcaggccuc

SEQ ID NO: 1002280 - RNA, 19 nt, Artificial Sequence
  Description of Artificial Sequence: Synthetic oligonucleotide
aggccauugcuagagcagg

SEQ ID NO: 1002281 - RNA, 19 nt, Artificial Sequence
  Description of Artificial Sequence: Synthetic oligonucleotide
uacucgcacgcccuucuug

SEQ ID NO: 1002282 - RNA, 19 nt, Artificial Sequence
  Description of Artificial Sequence: Synthetic oligonucleotide
aggcccaugacgugccagg

SEQ ID NO: 1002283 - RNA, 19 nt, Artificial Sequence
  Description of Artificial Sequence: Synthetic oligonucleotide
gaauucccagugucuuucc

SEQ ID NO: 1002284 - RNA, 19 nt, Artificial Sequence
  Description of Artificial Sequence: Synthetic oligonucleotide
auccacguuguccacgccu

SEQ ID NO: 1002285 - RNA, 19 nt, Artificial Sequence
  Description of Artificial Sequence: Synthetic oligonucleotide
auuuacgaccccuguuaga

SEQ ID NO: 1002286 - RNA, 19 nt, Artificial Sequence
  Description of Artificial Sequence: Synthetic oligonucleotide
gcuguugaacaccaaagga

SEQ ID NO: 1002287 - RNA, 19 nt, Artificial Sequence
  Description of Artificial Sequence: Synthetic oligonucleotide
guuagagacuuucccuuca

SEQ ID NO: 1002288 - RNA, 19 nt, Artificial Sequence
  Description of Artificial Sequence: Synthetic oligonucleotide
ugcuuccaugcuuccaggc

SEQ ID NO: 1002289 - RNA, 19 nt, Artificial Sequence
  Description of Artificial Sequence: Synthetic oligonucleotide
uuuaggcgagccagcccag

SEQ ID NO: 1002290 - RNA, 19 nt, Artificial Sequence
  Description of Artificial Sequence: Synthetic oligonucleotide
guucaugacuaggaugccc

SEQ ID NO: 1002291 - RNA, 19 nt, Artificial Sequence
  Description of Artificial Sequence: Synthetic oligonucleotide
cuuugcgcagauuugcgaa

SEQ ID NO: 1002292 - RNA, 19 nt, Artificial Sequence
  Description of Artificial Sequence: Synthetic oligonucleotide
agggacgaaaggcccauga

SEQ ID NO: 1002293 - RNA, 19 nt, Artificial Sequence
  Description of Artificial Sequence: Synthetic oligonucleotide
acgcuucccucaaaagucc

SEQ ID NO: 1002294 - RNA, 19 nt, Artificial Sequence
  Description of Artificial Sequence: Synthetic oligonucleotide
gacgaaaggcccaugacgu

SEQ ID NO: 1002295 - RNA, 19 nt, Artificial Sequence
  Description of Artificial Sequence: Synthetic oligonucleotide
agggguguucaugacuagg

SEQ ID NO: 1002296 - RNA, 19 nt, Artificial Sequence
  Description of Artificial Sequence: Synthetic oligonucleotide
aguucacuacucgcacgcc

SEQ ID NO: 1002297 - RNA, 19 nt, Artificial Sequence
  Description of Artificial Sequence: Synthetic oligonucleotide
cagcggugaccuuaguggc

SEQ ID NO: 1002298 - RNA, 19 nt, Artificial Sequence
  Description of Artificial Sequence: Synthetic oligonucleotide
cagaccaauccaaggcuug

SEQ ID NO: 1002299 - RNA, 19 nt, Artificial Sequence
  Description of Artificial Sequence: Synthetic oligonucleotide
uucaucccaaaggacugca

SEQ ID NO: 1002300 - RNA, 19 nt, Artificial Sequence
  Description of Artificial Sequence: Synthetic oligonucleotide
gaaaggcccaugacgugcc

SEQ ID NO: 1002301 - RNA, 19 nt, Artificial Sequence
  Description of Artificial Sequence: Synthetic oligonucleotide
acuacucgcacgcccuucu

SEQ ID NO: 1002302 - RNA, 19 nt, Artificial Sequence
  Description of Artificial Sequence: Synthetic oligonucleotide
ugcgggcagugcuagcucc

SEQ ID NO: 1002303 - RNA, 19 nt, Artificial Sequence
  Description of Artificial Sequence: Synthetic oligonucleotide
cuugcuuugacgcuucccu

SEQ ID NO: 1002304 - RNA, 19 nt, Artificial Sequence
  Description of Artificial Sequence: Synthetic oligonucleotide
uguggugcccuggaccaag

SEQ ID NO: 1002305 - RNA, 19 nt, Artificial Sequence
  Description of Artificial Sequence: Synthetic oligonucleotide
ccauuugccaucuuucauc

SEQ ID NO: 1002306 - RNA, 19 nt, Artificial Sequence
  Description of Artificial Sequence: Synthetic oligonucleotide
aggcuugguguguggagag

SEQ ID NO: 1002307 - RNA, 19 nt, Artificial Sequence
  Description of Artificial Sequence: Synthetic oligonucleotide
uggaaggccucagacacau

SEQ ID NO: 1002308 - RNA, 19 nt, Artificial Sequence
  Description of Artificial Sequence: Synthetic oligonucleotide
gcaacagggacgaaaggcc

SEQ ID NO: 1002309 - RNA, 19 nt, Artificial Sequence
  Description of Artificial Sequence: Synthetic oligonucleotide
augauggggucauagccua

SEQ ID NO: 1002310 - RNA, 19 nt, Artificial Sequence
  Description of Artificial Sequence: Synthetic oligonucleotide
gagccugcgcauuuacgac

SEQ ID NO: 1002311 - RNA, 19 nt, Artificial Sequence
  Description of Artificial Sequence: Synthetic oligonucleotide
gacuaggaugcccuuccuc

SEQ ID NO: 1002312 - RNA, 19 nt, Artificial Sequence
  Description of Artificial Sequence: Synthetic oligonucleotide
gauguuccuugugucacca

SEQ ID NO: 1002313 - RNA, 19 nt, Artificial Sequence
  Description of Artificial Sequence: Synthetic oligonucleotide
auaaggccuucgcaguccu

SEQ ID NO: 1002314 - RNA, 19 nt, Artificial Sequence
  Description of Artificial Sequence: Synthetic oligonucleotide
cuaaggcccggucccgugg

SEQ ID NO: 1002315 - RNA, 19 nt, Artificial Sequence
  Description of Artificial Sequence: Synthetic oligonucleotide
uggggucauagccuacagu

SEQ ID NO: 1002316 - RNA, 19 nt, Artificial Sequence
  Description of Artificial Sequence: Synthetic oligonucleotide
gcaauuagguuucuucaga

SEQ ID NO: 1002317 - RNA, 19 nt, Artificial Sequence
  Description of Artificial Sequence: Synthetic oligonucleotide
acuaccugcagcccuccau

SEQ ID NO: 1002318 - RNA, 19 nt, Artificial Sequence
  Description of Artificial Sequence: Synthetic oligonucleotide
ggauggucccuuuaggcga

SEQ ID NO: 1002319 - RNA, 19 nt, Artificial Sequence
  Description of Artificial Sequence: Synthetic oligonucleotide
gauggucccuuuaggcgag

SEQ ID NO: 1002320 - RNA, 19 nt, Artificial Sequence
  Description of Artificial Sequence: Synthetic oligonucleotide
aggccucgagaucaguugu

SEQ ID NO: 1002321 - RNA, 19 nt, Artificial Sequence
  Description of Artificial Sequence: Synthetic oligonucleotide
agcacacuguccagacugc

SEQ ID NO: 1002322 - RNA, 19 nt, Artificial Sequence
  Description of Artificial Sequence: Synthetic oligonucleotide
cauuagggguguucaugac

SEQ ID NO: 1002323 - RNA, 19 nt, Artificial Sequence
  Description of Artificial Sequence: Synthetic oligonucleotide
uguucaugacuaggaugcc

SEQ ID NO: 1002324 - RNA, 19 nt, Artificial Sequence
  Description of Artificial Sequence: Synthetic oligonucleotide
ggagguuugguaggaaagc

SEQ ID NO: 1002325 - RNA, 19 nt, Artificial Sequence
  Description of Artificial Sequence: Synthetic oligonucleotide
uugcuuugacgcuucccuc

SEQ ID NO: 1002326 - RNA, 19 nt, Artificial Sequence
  Description of Artificial Sequence: Synthetic oligonucleotide
gaccuuaguggcagaccgg

SEQ ID NO: 1002327 - RNA, 19 nt, Artificial Sequence
  Description of Artificial Sequence: Synthetic oligonucleotide
uuacgaccccuguuagaga

SEQ ID NO: 1002328 - RNA, 19 nt, Artificial Sequence
  Description of Artificial Sequence: Synthetic oligonucleotide
augccuuggagguuuggua

SEQ ID NO: 1002329 - RNA, 19 nt, Artificial Sequence
  Description of Artificial Sequence: Synthetic oligonucleotide
aggaggcauuccccacugc

SEQ ID NO: 1002330 - RNA, 19 nt, Artificial Sequence
  Description of Artificial Sequence: Synthetic oligonucleotide
aagugcugucauucagcaa

SEQ ID NO: 1002331 - RNA, 19 nt, Artificial Sequence
  Description of Artificial Sequence: Synthetic oligonucleotide
acgaaaggcccaugacgug

SEQ ID NO: 1002332 - RNA, 19 nt, Artificial Sequence
  Description of Artificial Sequence: Synthetic oligonucleotide
uuaggcgagccagcccagg

SEQ ID NO: 1002333 - RNA, 19 nt, Artificial Sequence
  Description of Artificial Sequence: Synthetic oligonucleotide
acuaaggcccggucccgug

SEQ ID NO: 1002334 - RNA, 19 nt, Artificial Sequence
  Description of Artificial Sequence: Synthetic oligonucleotide
ggacaauaaggccuucgca

SEQ ID NO: 1002335 - RNA, 19 nt, Artificial Sequence
  Description of Artificial Sequence: Synthetic oligonucleotide
cguaguggcaccucuggcc

SEQ ID NO: 1002336 - RNA, 19 nt, Artificial Sequence
  Description of Artificial Sequence: Synthetic oligonucleotide
gcauuuacgaccccuguua

SEQ ID NO: 1002337 - RNA, 19 nt, Artificial Sequence
  Description of Artificial Sequence: Synthetic oligonucleotide
agcaagccugugguggagg

SEQ ID NO: 1002338 - RNA, 19 nt, Artificial Sequence
  Description of Artificial Sequence: Synthetic oligonucleotide
ugcgaaggccauugcuaga

SEQ ID NO: 1002339 - RNA, 19 nt, Artificial Sequence
  Description of Artificial Sequence: Synthetic oligonucleotide
gaggccaaucauagugggc

SEQ ID NO: 1002340 - RNA, 19 nt, Artificial Sequence
  Description of Artificial Sequence: Synthetic oligonucleotide
ugacuaggaugcccuuccu

SEQ ID NO: 1002341 - RNA, 19 nt, Artificial Sequence
  Description of Artificial Sequence: Synthetic oligonucleotide
uuacaggguuggagggcug

SEQ ID NO: 1002342 - RNA, 19 nt, Artificial Sequence
  Description of Artificial Sequence: Synthetic oligonucleotide
ugcuuccaggcuaggcaac

SEQ ID NO: 1002343 - RNA, 19 nt, Artificial Sequence
  Description of Artificial Sequence: Synthetic oligonucleotide
caugacuaggaugcccuuc

SEQ ID NO: 1002344 - RNA, 19 nt, Artificial Sequence
  Description of Artificial Sequence: Synthetic oligonucleotide
uaaggcccggucccguggu

SEQ ID NO: 1002345 - RNA, 19 nt, Artificial Sequence
  Description of Artificial Sequence: Synthetic oligonucleotide
gccaggaggccaaucauag

SEQ ID NO: 1002346 - RNA, 19 nt, Artificial Sequence
  Description of Artificial Sequence: Synthetic oligonucleotide
uagcguucaccaaguucac

SEQ ID NO: 1002347 - RNA, 19 nt, Artificial Sequence
  Description of Artificial Sequence: Synthetic oligonucleotide
ugcuagcuccggugacugg

SEQ ID NO: 1002348 - RNA, 19 nt, Artificial Sequence
  Description of Artificial Sequence: Synthetic oligonucleotide
gugaccuuaguggcagacc

SEQ ID NO: 1002349 - RNA, 19 nt, Artificial Sequence
  Description of Artificial Sequence: Synthetic oligonucleotide
ucugcggcgcugaggcugu

SEQ ID NO: 1002350 - RNA, 19 nt, Artificial Sequence
  Description of Artificial Sequence: Synthetic oligonucleotide
aucgguguggugcccugga

SEQ ID NO: 1002351 - RNA, 19 nt, Artificial Sequence
  Description of Artificial Sequence: Synthetic oligonucleotide
uacaggguuggagggcuga

SEQ ID NO: 1002352 - RNA, 19 nt, Artificial Sequence
  Description of Artificial Sequence: Synthetic oligonucleotide
ugauggggucauagccuac

SEQ ID NO: 1002353 - RNA, 19 nt, Artificial Sequence
  Description of Artificial Sequence: Synthetic oligonucleotide
uaccugcagcccuccaucu

SEQ ID NO: 1002354 - RNA, 19 nt, Artificial Sequence
  Description of Artificial Sequence: Synthetic oligonucleotide
gggcagacgcacuuaggcc

SEQ ID NO: 1002355 - RNA, 19 nt, Artificial Sequence
  Description of Artificial Sequence: Synthetic oligonucleotide
gcaagccugugguggaggg

SEQ ID NO: 1002356 - RNA, 19 nt, Artificial Sequence
  Description of Artificial Sequence: Synthetic oligonucleotide
cacugguaagagccugcgc

SEQ ID NO: 1002357 - RNA, 19 nt, Artificial Sequence
  Description of Artificial Sequence: Synthetic oligonucleotide
aacgcuucugccagaccaa

SEQ ID NO: 1002358 - RNA, 19 nt, Artificial Sequence
  Description of Artificial Sequence: Synthetic oligonucleotide
aguggcagaccggacaaua

SEQ ID NO: 1002359 - RNA, 19 nt, Artificial Sequence
  Description of Artificial Sequence: Synthetic oligonucleotide
agcuuagcguucaccaagu

SEQ ID NO: 1002360 - RNA, 19 nt, Artificial Sequence
  Description of Artificial Sequence: Synthetic oligonucleotide
gagaucaguuguucugggu

SEQ ID NO: 1002361 - RNA, 19 nt, Artificial Sequence
  Description of Artificial Sequence: Synthetic oligonucleotide
acgccugugccagcccugc

SEQ ID NO: 1002362 - RNA, 19 nt, Artificial Sequence
  Description of Artificial Sequence: Synthetic oligonucleotide
augacgugccaggucucuc

SEQ ID NO: 1002363 - RNA, 19 nt, Artificial Sequence
  Description of Artificial Sequence: Synthetic oligonucleotide
cuuccucguggcagccucc

SEQ ID NO: 1002364 - RNA, 19 nt, Artificial Sequence
  Description of Artificial Sequence: Synthetic oligonucleotide
cacggagcagggcaccuuc

SEQ ID NO: 1002365 - RNA, 19 nt, Artificial Sequence
  Description of Artificial Sequence: Synthetic oligonucleotide
gcagcuguugaacaccaaa

SEQ ID NO: 1002366 - RNA, 19 nt, Artificial Sequence
  Description of Artificial Sequence: Synthetic oligonucleotide
gaugccuuggagguuuggu

SEQ ID NO: 1002367 - RNA, 19 nt, Artificial Sequence
  Description of Artificial Sequence: Synthetic oligonucleotide
uucuugcacugggcaaaag

SEQ ID NO: 1002368 - RNA, 19 nt, Artificial Sequence
  Description of Artificial Sequence: Synthetic oligonucleotide
gacauugaggccagccucu

SEQ ID NO: 1002369 - RNA, 19 nt, Artificial Sequence
  Description of Artificial Sequence: Synthetic oligonucleotide
ucgguguggugcccuggac

SEQ ID NO: 1002370 - RNA, 19 nt, Artificial Sequence
  Description of Artificial Sequence: Synthetic oligonucleotide
gacugcgaucuccucccca

SEQ ID NO: 1002371 - RNA, 19 nt, Artificial Sequence
  Description of Artificial Sequence: Synthetic oligonucleotide
caacaaugacugcagggcu

SEQ ID NO: 1002372 - RNA, 19 nt, Artificial Sequence
  Description of Artificial Sequence: Synthetic oligonucleotide
agaugccuuggagguuugg

SEQ ID NO: 1002373 - RNA, 19 nt, Artificial Sequence
  Description of Artificial Sequence: Synthetic oligonucleotide
caggugaguucugcggcgc

SEQ ID NO: 1002374 - RNA, 19 nt, Artificial Sequence
  Description of Artificial Sequence: Synthetic oligonucleotide
cccaaaggacugcauucgg

SEQ ID NO: 1002375 - RNA, 19 nt, Artificial Sequence
  Description of Artificial Sequence: Synthetic oligonucleotide
gguuugguaggaaagcagu

SEQ ID NO: 1002376 - RNA, 19 nt, Artificial Sequence
  Description of Artificial Sequence: Synthetic oligonucleotide
gggacgaaaggcccaugac

SEQ ID NO: 1002377 - RNA, 19 nt, Artificial Sequence
  Description of Artificial Sequence: Synthetic oligonucleotide
ucccgugguggcucuucug

SEQ ID NO: 1002378 - RNA, 19 nt, Artificial Sequence
  Description of Artificial Sequence: Synthetic oligonucleotide
ugcauucggguggccaccu

SEQ ID NO: 1002379 - RNA, 19 nt, Artificial Sequence
  Description of Artificial Sequence: Synthetic oligonucleotide
gggaguguggacagugaug

SEQ ID NO: 1002380 - RNA, 19 nt, Artificial Sequence
  Description of Artificial Sequence: Synthetic oligonucleotide
caugcaucagagugcccaa

SEQ ID NO: 1002381 - RNA, 19 nt, Artificial Sequence
  Description of Artificial Sequence: Synthetic oligonucleotide
cacuuaggccaggaagcug

SEQ ID NO: 1002382 - RNA, 19 nt, Artificial Sequence
  Description of Artificial Sequence: Synthetic oligonucleotide
cugcauucggguggccacc

SEQ ID NO: 1002383 - RNA, 19 nt, Artificial Sequence
  Description of Artificial Sequence: Synthetic oligonucleotide
cggacaauaaggccuucgc

SEQ ID NO: 1002384 - RNA, 19 nt, Artificial Sequence
  Description of Artificial Sequence: Synthetic oligonucleotide
caggccaagaauucccagu

SEQ ID NO: 1002385 - RNA, 19 nt, Artificial Sequence
  Description of Artificial Sequence: Synthetic oligonucleotide
ucacuacucgcacgcccuu

SEQ ID NO: 1002386 - RNA, 19 nt, Artificial Sequence
  Description of Artificial Sequence: Synthetic oligonucleotide
aggugaguucugcggcgcu

SEQ ID NO: 1002387 - RNA, 19 nt, Artificial Sequence
  Description of Artificial Sequence: Synthetic oligonucleotide
gacgcacuuaggccaggaa

SEQ ID NO: 1002388 - RNA, 19 nt, Artificial Sequence
  Description of Artificial Sequence: Synthetic oligonucleotide
ggugaccuuaguggcagac

SEQ ID NO: 1002389 - RNA, 19 nt, Artificial Sequence
  Description of Artificial Sequence: Synthetic oligonucleotide
gcggugaccuuaguggcag

SEQ ID NO: 1002390 - RNA, 19 nt, Artificial Sequence
  Description of Artificial Sequence: Synthetic oligonucleotide
cgaaaggcccaugacgugc

SEQ ID NO: 1002391 - RNA, 19 nt, Artificial Sequence
  Description of Artificial Sequence: Synthetic oligonucleotide
agcaucgguguggugcccu

SEQ ID NO: 1002392 - RNA, 19 nt, Artificial Sequence
  Description of Artificial Sequence: Synthetic oligonucleotide
acagggacgaaaggcccau

SEQ ID NO: 1002393 - RNA, 19 nt, Artificial Sequence
  Description of Artificial Sequence: Synthetic oligonucleotide
cccagugucagaagcagaa

SEQ ID NO: 1002394 - RNA, 19 nt, Artificial Sequence
  Description of Artificial Sequence: Synthetic oligonucleotide
gccauugcuagagcaggcc

SEQ ID NO: 1002395 - RNA, 19 nt, Artificial Sequence
  Description of Artificial Sequence: Synthetic oligonucleotide
cgcagauuugcgaaggcca

SEQ ID NO: 1002396 - RNA, 19 nt, Artificial Sequence
  Description of Artificial Sequence: Synthetic oligonucleotide
cgagaucaguuguucuggg

SEQ ID NO: 1002397 - RNA, 19 nt, Artificial Sequence
  Description of Artificial Sequence: Synthetic oligonucleotide
agcguucaccaaguucaca

SEQ ID NO: 1002398 - RNA, 19 nt, Artificial Sequence
  Description of Artificial Sequence: Synthetic oligonucleotide
aggcagcuguugaacacca

SEQ ID NO: 1002399 - RNA, 19 nt, Artificial Sequence
  Description of Artificial Sequence: Synthetic oligonucleotide
cacauccgcuugcuuugac

SEQ ID NO: 1002400 - RNA, 19 nt, Artificial Sequence
  Description of Artificial Sequence: Synthetic oligonucleotide
ggcuaggcaacagggacga

SEQ ID NO: 1002401 - RNA, 19 nt, Artificial Sequence
  Description of Artificial Sequence: Synthetic oligonucleotide
ugucaccaccuggaugguc

SEQ ID NO: 1002402 - RNA, 19 nt, Artificial Sequence
  Description of Artificial Sequence: Synthetic oligonucleotide
ggucauagccuacagucuu

SEQ ID NO: 1002403 - RNA, 19 nt, Artificial Sequence
  Description of Artificial Sequence: Synthetic oligonucleotide
agcggugaccuuaguggca

SEQ ID NO: 1002404 - RNA, 19 nt, Artificial Sequence
  Description of Artificial Sequence: Synthetic oligonucleotide
gaucaucccacaggugagu

SEQ ID NO: 1002405 - RNA, 19 nt, Artificial Sequence
  Description of Artificial Sequence: Synthetic oligonucleotide
agacgcacuuaggccagga

SEQ ID NO: 1002406 - RNA, 19 nt, Artificial Sequence
  Description of Artificial Sequence: Synthetic oligonucleotide
ccuuuaggcgagccagccc

SEQ ID NO: 1002407 - RNA, 19 nt, Artificial Sequence
  Description of Artificial Sequence: Synthetic oligonucleotide
ccaggccaagaauucccag

SEQ ID NO: 1002408 - RNA, 19 nt, Artificial Sequence
  Description of Artificial Sequence: Synthetic oligonucleotide
ggucucuccgucagaugcc

SEQ ID NO: 1002409 - RNA, 19 nt, Artificial Sequence
  Description of Artificial Sequence: Synthetic oligonucleotide
gccugcgcauuuacgaccc

SEQ ID NO: 1002410 - RNA, 19 nt, Artificial Sequence
  Description of Artificial Sequence: Synthetic oligonucleotide
cuggaaggccucagacaca

SEQ ID NO: 1002411 - RNA, 19 nt, Artificial Sequence
  Description of Artificial Sequence: Synthetic oligonucleotide
uguccacgccugugccagc

SEQ ID NO: 1002412 - RNA, 19 nt, Artificial Sequence
  Description of Artificial Sequence: Synthetic oligonucleotide
ccaaucauagugggcagca

SEQ ID NO: 1002413 - RNA, 19 nt, Artificial Sequence
  Description of Artificial Sequence: Synthetic oligonucleotide
cuaggaugcccuuccucgu

SEQ ID NO: 1002414 - RNA, 19 nt, Artificial Sequence
  Description of Artificial Sequence: Synthetic oligonucleotide
caccaaguucacauccgcu

SEQ ID NO: 1002415 - RNA, 19 nt, Artificial Sequence
  Description of Artificial Sequence: Synthetic oligonucleotide
gcggcucugggccuccuug

SEQ ID NO: 1002416 - RNA, 19 nt, Artificial Sequence
  Description of Artificial Sequence: Synthetic oligonucleotide
gcuugguguguggagagaa

SEQ ID NO: 1002417 - RNA, 19 nt, Artificial Sequence
  Description of Artificial Sequence: Synthetic oligonucleotide
ucguggcagccuccagauc

SEQ ID NO: 1002418 - RNA, 19 nt, Artificial Sequence
  Description of Artificial Sequence: Synthetic oligonucleotide
guuugguaggaaagcaguu

SEQ ID NO: 1002419 - RNA, 19 nt, Artificial Sequence
  Description of Artificial Sequence: Synthetic oligonucleotide
ucucuccgucagaugccuu

SEQ ID NO: 1002420 - RNA, 19 nt, Artificial Sequence
  Description of Artificial Sequence: Synthetic oligonucleotide
cacugggcaaaagugcugu

SEQ ID NO: 1002421 - RNA, 19 nt, Artificial Sequence
  Description of Artificial Sequence: Synthetic oligonucleotide
cucguggcagccuccagau

SEQ ID NO: 1002422 - RNA, 19 nt, Artificial Sequence
  Description of Artificial Sequence: Synthetic oligonucleotide
acgugccaggucucuccgu

SEQ ID NO: 1002423 - RNA, 19 nt, Artificial Sequence
  Description of Artificial Sequence: Synthetic oligonucleotide
cagcaagccugugguggag

SEQ ID NO: 1002424 - RNA, 19 nt, Artificial Sequence
  Description of Artificial Sequence: Synthetic oligonucleotide
cccuuuaggcgagccagcc

SEQ ID NO: 1002425 - RNA, 19 nt, Artificial Sequence
  Description of Artificial Sequence: Synthetic oligonucleotide
guaagagccugcgcauuua

SEQ ID NO: 1002426 - RNA, 19 nt, Artificial Sequence
  Description of Artificial Sequence: Synthetic oligonucleotide
ggccauugcuagagcaggc

SEQ ID NO: 1002427 - RNA, 19 nt, Artificial Sequence
  Description of Artificial Sequence: Synthetic oligonucleotide
ccuuccucguggcagccuc

SEQ ID NO: 1002428 - RNA, 19 nt, Artificial Sequence
  Description of Artificial Sequence: Synthetic oligonucleotide
gcagcuuagcguucaccaa

SEQ ID NO: 1002429 - RNA, 19 nt, Artificial Sequence
  Description of Artificial Sequence: Synthetic oligonucleotide
ccaugcuuccaggcuaggc

SEQ ID NO: 1002430 - RNA, 19 nt, Artificial Sequence
  Description of Artificial Sequence: Synthetic oligonucleotide
cacgcccuucuugcacugg

SEQ ID NO: 1002431 - RNA, 19 nt, Artificial Sequence
  Description of Artificial Sequence: Synthetic oligonucleotide
accggacaauaaggccuuc

SEQ ID NO: 1002432 - RNA, 19 nt, Artificial Sequence
  Description of Artificial Sequence: Synthetic oligonucleotide
cacuacucgcacgcccuuc

SEQ ID NO: 1002433 - RNA, 19 nt, Artificial Sequence
  Description of Artificial Sequence: Synthetic oligonucleotide
cccaauagaucacagcaau

SEQ ID NO: 1002434 - RNA, 19 nt, Artificial Sequence
  Description of Artificial Sequence: Synthetic oligonucleotide
gguccacuaaggcccgguc

SEQ ID NO: 1002435 - RNA, 19 nt, Artificial Sequence
  Description of Artificial Sequence: Synthetic oligonucleotide
uccggugacugggcagggu

SEQ ID NO: 1002436 - RNA, 19 nt, Artificial Sequence
  Description of Artificial Sequence: Synthetic oligonucleotide
caggaucuuccggcagcag

SEQ ID NO: 1002437 - RNA, 19 nt, Artificial Sequence
  Description of Artificial Sequence: Synthetic oligonucleotide
ccuuaguggcagaccggac

SEQ ID NO: 1002438 - RNA, 19 nt, Artificial Sequence
  Description of Artificial Sequence: Synthetic oligonucleotide
cccaugacgugccaggucu

SEQ ID NO: 1002439 - RNA, 19 nt, Artificial Sequence
  Description of Artificial Sequence: Synthetic oligonucleotide
cucgcacgcccuucuugca

SEQ ID NO: 1002440 - RNA, 19 nt, Artificial Sequence
  Description of Artificial Sequence: Synthetic oligonucleotide
cagacgcacuuaggccagg

SEQ ID NO: 1002441 - RNA, 19 nt, Artificial Sequence
  Description of Artificial Sequence: Synthetic oligonucleotide
cguucaccaaguucacauc

SEQ ID NO: 1002442 - RNA, 19 nt, Artificial Sequence
  Description of Artificial Sequence: Synthetic oligonucleotide
gcaggaggggaguguggac

SEQ ID NO: 1002443 - RNA, 19 nt, Artificial Sequence
  Description of Artificial Sequence: Synthetic oligonucleotide
acgcuucugccagaccaau

SEQ ID NO: 1002444 - RNA, 19 nt, Artificial Sequence
  Description of Artificial Sequence: Synthetic oligonucleotide
gcggcgcugaggcuguuuc

SEQ ID NO: 1002445 - RNA, 19 nt, Artificial Sequence
  Description of Artificial Sequence: Synthetic oligonucleotide
ccccaauagaucacagcaa

SEQ ID NO: 1002446 - RNA, 19 nt, Artificial Sequence
  Description of Artificial Sequence: Synthetic oligonucleotide
ccaggcuaggcaacaggga

SEQ ID NO: 1002447 - RNA, 19 nt, Artificial Sequence
  Description of Artificial Sequence: Synthetic oligonucleotide
gaccggacaauaaggccuu

SEQ ID NO: 1002448 - RNA, 19 nt, Artificial Sequence
  Description of Artificial Sequence: Synthetic oligonucleotide
agcaggccucgagaucagu

SEQ ID NO: 1002449 - RNA, 19 nt, Artificial Sequence
  Description of Artificial Sequence: Synthetic oligonucleotide
gcaucgguguggugcccug

SEQ ID NO: 1002450 - RNA, 19 nt, Artificial Sequence
  Description of Artificial Sequence: Synthetic oligonucleotide
cugcgaucuccuccccaca

SEQ ID NO: 1002451 - RNA, 19 nt, Artificial Sequence
  Description of Artificial Sequence: Synthetic oligonucleotide
uggugacauugaggccagc

SEQ ID NO: 1002452 - RNA, 19 nt, Artificial Sequence
  Description of Artificial Sequence: Synthetic oligonucleotide
acggagcagggcaccuuca

SEQ ID NO: 1002453 - RNA, 19 nt, Artificial Sequence
  Description of Artificial Sequence: Synthetic oligonucleotide
ggggaguguggacagugau

SEQ ID NO: 1002454 - RNA, 19 nt, Artificial Sequence
  Description of Artificial Sequence: Synthetic oligonucleotide
ggacugcgaucuccucccc

SEQ ID NO: 1002455 - RNA, 19 nt, Artificial Sequence
  Description of Artificial Sequence: Synthetic oligonucleotide
ccacuaaggcccggucccg

SEQ ID NO: 1002456 - RNA, 19 nt, Artificial Sequence
  Description of Artificial Sequence: Synthetic oligonucleotide
gcacgcccuucuugcacug

SEQ ID NO: 1002457 - RNA, 19 nt, Artificial Sequence
  Description of Artificial Sequence: Synthetic oligonucleotide
caugacgugccaggucucu

SEQ ID NO: 1002458 - RNA, 19 nt, Artificial Sequence
  Description of Artificial Sequence: Synthetic oligonucleotide
cagcaucgguguggugccc

SEQ ID NO: 1002459 - RNA, 19 nt, Artificial Sequence
  Description of Artificial Sequence: Synthetic oligonucleotide
gggucauagccuacagucu

SEQ ID NO: 1002460 - RNA, 19 nt, Artificial Sequence
  Description of Artificial Sequence: Synthetic oligonucleotide
cagggacgaaaggcccaug

SEQ ID NO: 1002461 - RNA, 19 nt, Artificial Sequence
  Description of Artificial Sequence: Synthetic oligonucleotide
cgaagcuguugccugggga

SEQ ID NO: 1002462 - RNA, 19 nt, Artificial Sequence
  Description of Artificial Sequence: Synthetic oligonucleotide
ccauugcuagagcaggccu

SEQ ID NO: 1002463 - RNA, 19 nt, Artificial Sequence
  Description of Artificial Sequence: Synthetic oligonucleotide
cugcagcaucgguguggug

SEQ ID NO: 1002464 - RNA, 19 nt, Artificial Sequence
  Description of Artificial Sequence: Synthetic oligonucleotide
cugcgcauuuacgaccccu

SEQ ID NO: 1002465 - RNA, 19 nt, Artificial Sequence
  Description of Artificial Sequence: Synthetic oligonucleotide
gggcugagcccggaacaug

SEQ ID NO: 1002466 - RNA, 19 nt, Artificial Sequence
  Description of Artificial Sequence: Synthetic oligonucleotide
ccaugacgugccaggucuc

SEQ ID NO: 1002467 - RNA, 19 nt, Artificial Sequence
  Description of Artificial Sequence: Synthetic oligonucleotide
gcugcgggcagugcuagcu

SEQ ID NO: 1002468 - RNA, 19 nt, Artificial Sequence
  Description of Artificial Sequence: Synthetic oligonucleotide
gugacugggcaggguucuc

SEQ ID NO: 1002469 - RNA, 19 nt, Artificial Sequence
  Description of Artificial Sequence: Synthetic oligonucleotide
ugcggcgcugaggcuguuu

SEQ ID NO: 1002470 - RNA, 19 nt, Artificial Sequence
  Description of Artificial Sequence: Synthetic oligonucleotide
gucccgugguggcucuucu

SEQ ID NO: 1002471 - RNA, 19 nt, Artificial Sequence
  Description of Artificial Sequence: Synthetic oligonucleotide
ccgcuugcuuugacgcuuc

SEQ ID NO: 1002472 - RNA, 19 nt, Artificial Sequence
  Description of Artificial Sequence: Synthetic oligonucleotide
gcgcauuuacgaccccugu

SEQ ID NO: 1002473 - RNA, 19 nt, Artificial Sequence
  Description of Artificial Sequence: Synthetic oligonucleotide
caaucauagugggcagcau

SEQ ID NO: 1002474 - RNA, 19 nt, Artificial Sequence
  Description of Artificial Sequence: Synthetic oligonucleotide
cccauuugccaucuuucau

SEQ ID NO: 1002475 - RNA, 19 nt, Artificial Sequence
  Description of Artificial Sequence: Synthetic oligonucleotide
gccccggcguaguggcacc

SEQ ID NO: 1002476 - RNA, 19 nt, Artificial Sequence
  Description of Artificial Sequence: Synthetic oligonucleotide
guucugcggcgcugaggcu

SEQ ID NO: 1002477 - RNA, 19 nt, Artificial Sequence
  Description of Artificial Sequence: Synthetic oligonucleotide
cauugaggccagccucuuu

SEQ ID NO: 1002478 - RNA, 19 nt, Artificial Sequence
  Description of Artificial Sequence: Synthetic oligonucleotide
cagauuugcgaaggccauu

SEQ ID NO: 1002479 - RNA, 19 nt, Artificial Sequence
  Description of Artificial Sequence: Synthetic oligonucleotide
ccccucgagcacaguucac

SEQ ID NO: 1002480 - RNA, 19 nt, Artificial Sequence
  Description of Artificial Sequence: Synthetic oligonucleotide
guguggugcccuggaccaa

SEQ ID NO: 1002481 - RNA, 19 nt, Artificial Sequence
  Description of Artificial Sequence: Synthetic oligonucleotide
gcgagccagcccaggcaug

SEQ ID NO: 1002482 - RNA, 19 nt, Artificial Sequence
  Description of Artificial Sequence: Synthetic oligonucleotide
cuacucgcacgcccuucuu

SEQ ID NO: 1002483 - RNA, 19 nt, Artificial Sequence
  Description of Artificial Sequence: Synthetic oligonucleotide
gcccaacgcuucugccaga

SEQ ID NO: 1002484 - RNA, 19 nt, Artificial Sequence
  Description of Artificial Sequence: Synthetic oligonucleotide
ggcccaugacgugccaggu

SEQ ID NO: 1002485 - RNA, 19 nt, Artificial Sequence
  Description of Artificial Sequence: Synthetic oligonucleotide
ggggcgccugccagggcca

SEQ ID NO: 1002486 - RNA, 19 nt, Artificial Sequence
  Description of Artificial Sequence: Synthetic oligonucleotide
ccggugacugggcaggguu

SEQ ID NO: 1002487 - RNA, 19 nt, Artificial Sequence
  Description of Artificial Sequence: Synthetic oligonucleotide
cgcauuuacgaccccuguu

SEQ ID NO: 1002488 - RNA, 19 nt, Artificial Sequence
  Description of Artificial Sequence: Synthetic oligonucleotide
cgcacgcccuucuugcacu

SEQ ID NO: 1002489 - RNA, 19 nt, Artificial Sequence
  Description of Artificial Sequence: Synthetic oligonucleotide
gaccccuguuagagacuuu

SEQ ID NO: 1002490 - RNA, 19 nt, Artificial Sequence
  Description of Artificial Sequence: Synthetic oligonucleotide
guggcaccucuggccugaa

SEQ ID NO: 1002491 - RNA, 19 nt, Artificial Sequence
  Description of Artificial Sequence: Synthetic oligonucleotide
ggccucgagaucaguuguu

SEQ ID NO: 1002492 - RNA, 19 nt, Artificial Sequence
  Description of Artificial Sequence: Synthetic oligonucleotide
ggcgccugccagggccaca

SEQ ID NO: 1002493 - RNA, 19 nt, Artificial Sequence
  Description of Artificial Sequence: Synthetic oligonucleotide
cgaccccuguuagagacuu

SEQ ID NO: 1002494 - RNA, 19 nt, Artificial Sequence
  Description of Artificial Sequence: Synthetic oligonucleotide
ccgggaccacaggguugug

SEQ ID NO: 1002495 - RNA, 19 nt, Artificial Sequence
  Description of Artificial Sequence: Synthetic oligonucleotide
cugcggcgcugaggcuguu

SEQ ID NO: 1002496 - RNA, 19 nt, Artificial Sequence
  Description of Artificial Sequence: Synthetic oligonucleotide
cggucccgugguggcucuu

SEQ ID NO: 1002497 - RNA, 19 nt, Artificial Sequence
  Description of Artificial Sequence: Synthetic oligonucleotide
ucaaguaguagucauuucg

SEQ ID NO: 1002498 - RNA, 19 nt, Artificial Sequence
  Description of Artificial Sequence: Synthetic oligonucleotide
ugagauaagcuccuuauag

SEQ ID NO: 1002499 - RNA, 19 nt, Artificial Sequence
  Description of Artificial Sequence: Synthetic oligonucleotide
aacuuagagagcuuacucg

SEQ ID NO: 1002500 - RNA, 19 nt, Artificial Sequence
  Description of Artificial Sequence: Synthetic oligonucleotide
aaaccguucagguucagag

SEQ ID NO: 1002501 - RNA, 19 nt, Artificial Sequence
  Description of Artificial Sequence: Synthetic oligonucleotide
aauuagauuugccaggagu

SEQ ID NO: 1002502 - RNA, 19 nt, Artificial Sequence
  Description of Artificial Sequence: Synthetic oligonucleotide
aucgaaaccguucagguuc

SEQ ID NO: 1002503 - RNA, 19 nt, Artificial Sequence
  Description of Artificial Sequence: Synthetic oligonucleotide
uacccgaacaucauggugg

SEQ ID NO: 1002504 - RNA, 19 nt, Artificial Sequence
  Description of Artificial Sequence: Synthetic oligonucleotide
uuggaauuagauuugccag

SEQ ID NO: 1002505 - RNA, 19 nt, Artificial Sequence
  Description of Artificial Sequence: Synthetic oligonucleotide
ugagguuuuccacugagcc

SEQ ID NO: 1002506 - RNA, 19 nt, Artificial Sequence
  Description of Artificial Sequence: Synthetic oligonucleotide
acagaggauauguaguccc

SEQ ID NO: 1002507 - RNA, 19 nt, Artificial Sequence
  Description of Artificial Sequence: Synthetic oligonucleotide
aucaacaagguucaaguag

SEQ ID NO: 1002508 - RNA, 19 nt, Artificial Sequence
  Description of Artificial Sequence: Synthetic oligonucleotide
aaggagagagugcaagucg

SEQ ID NO: 1002509 - RNA, 19 nt, Artificial Sequence
  Description of Artificial Sequence: Synthetic oligonucleotide
gaauauuggacugccaggg

SEQ ID NO: 1002510 - RNA, 19 nt, Artificial Sequence
  Description of Artificial Sequence: Synthetic oligonucleotide
ucaacggauuccuuggugg

SEQ ID NO: 1002511 - RNA, 19 nt, Artificial Sequence
  Description of Artificial Sequence: Synthetic oligonucleotide
uccaaauucggaugugucg

SEQ ID NO: 1002512 - RNA, 19 nt, Artificial Sequence
  Description of Artificial Sequence: Synthetic oligonucleotide
agauaagcuccuuauagug

SEQ ID NO: 1002513 - RNA, 19 nt, Artificial Sequence
  Description of Artificial Sequence: Synthetic oligonucleotide
aacgugaaccacuggacag

SEQ ID NO: 1002514 - RNA, 19 nt, Artificial Sequence
  Description of Artificial Sequence: Synthetic oligonucleotide
auauuggacugccagggac

SEQ ID NO: 1002515 - RNA, 19 nt, Artificial Sequence
  Description of Artificial Sequence: Synthetic oligonucleotide
agaauauuggacugccagg

SEQ ID NO: 1002516 - RNA, 19 nt, Artificial Sequence
  Description of Artificial Sequence: Synthetic oligonucleotide
guuacuggugcccacagcc

SEQ ID NO: 1002517 - RNA, 19 nt, Artificial Sequence
  Description of Artificial Sequence: Synthetic oligonucleotide
uaaggcuacuuuuagcuac

SEQ ID NO: 1002518 - RNA, 19 nt, Artificial Sequence
  Description of Artificial Sequence: Synthetic oligonucleotide
aaguauccugucugguagc

SEQ ID NO: 1002519 - RNA, 19 nt, Artificial Sequence
  Description of Artificial Sequence: Synthetic oligonucleotide
uuaucauugccaccgcuug

SEQ ID NO: 1002520 - RNA, 19 nt, Artificial Sequence
  Description of Artificial Sequence: Synthetic oligonucleotide
uccccgaccagcuaaaggc

SEQ ID NO: 1002521 - RNA, 19 nt, Artificial Sequence
  Description of Artificial Sequence: Synthetic oligonucleotide
cagaauauuggacugccag

SEQ ID NO: 1002522 - RNA, 19 nt, Artificial Sequence
  Description of Artificial Sequence: Synthetic oligonucleotide
gauaagcuccuuauagugg

SEQ ID NO: 1002523 - RNA, 19 nt, Artificial Sequence
  Description of Artificial Sequence: Synthetic oligonucleotide
aggaauauaucugcaaguc

SEQ ID NO: 1002524 - RNA, 19 nt, Artificial Sequence
  Description of Artificial Sequence: Synthetic oligonucleotide
cuuggaauuagauuugcca

SEQ ID NO: 1002525 - RNA, 19 nt, Artificial Sequence
  Description of Artificial Sequence: Synthetic oligonucleotide
acuuagagagcuuacucga

SEQ ID NO: 1002526 - RNA, 19 nt, Artificial Sequence
  Description of Artificial Sequence: Synthetic oligonucleotide
aacaagaggggucuguuuu

SEQ ID NO: 1002527 - RNA, 19 nt, Artificial Sequence
  Description of Artificial Sequence: Synthetic oligonucleotide
caaguauccugucugguag

SEQ ID NO: 1002528 - RNA, 19 nt, Artificial Sequence
  Description of Artificial Sequence: Synthetic oligonucleotide
auagcggucaccuccaggu

SEQ ID NO: 1002529 - RNA, 19 nt, Artificial Sequence
  Description of Artificial Sequence: Synthetic oligonucleotide
gaaccuuggaauuagauuu

SEQ ID NO: 1002530 - RNA, 19 nt, Artificial Sequence
  Description of Artificial Sequence: Synthetic oligonucleotide
aacccacauacuuccuggc

SEQ ID NO: 1002531 - RNA, 19 nt, Artificial Sequence
  Description of Artificial Sequence: Synthetic oligonucleotide
uagauuugccaggaguucg

SEQ ID NO: 1002532 - RNA, 19 nt, Artificial Sequence
  Description of Artificial Sequence: Synthetic oligonucleotide
auaaccagcugguucuggg

SEQ ID NO: 1002533 - RNA, 19 nt, Artificial Sequence
  Description of Artificial Sequence: Synthetic oligonucleotide
ugugagaucuguuggcggc

SEQ ID NO: 1002534 - RNA, 19 nt, Artificial Sequence
  Description of Artificial Sequence: Synthetic oligonucleotide
aauucggaugugucgguca

SEQ ID NO: 1002535 - RNA, 19 nt, Artificial Sequence
  Description of Artificial Sequence: Synthetic oligonucleotide
agccaguacauuuccagag

SEQ ID NO: 1002536 - RNA, 19 nt, Artificial Sequence
  Description of Artificial Sequence: Synthetic oligonucleotide
aacgccuucuuuccccgac

SEQ ID NO: 1002537 - RNA, 19 nt, Artificial Sequence
  Description of Artificial Sequence: Synthetic oligonucleotide
ugugugaccuuugagcuca

SEQ ID NO: 1002538 - RNA, 19 nt, Artificial Sequence
  Description of Artificial Sequence: Synthetic oligonucleotide
auuugccaggaguucggcc

SEQ ID NO: 1002539 - RNA, 19 nt, Artificial Sequence
  Description of Artificial Sequence: Synthetic oligonucleotide
uuggguacuuccaaauaac

SEQ ID NO: 1002540 - RNA, 19 nt, Artificial Sequence
  Description of Artificial Sequence: Synthetic oligonucleotide
uauuggacugccagggaca

SEQ ID NO: 1002541 - RNA, 19 nt, Artificial Sequence
  Description of Artificial Sequence: Synthetic oligonucleotide
ugaaccuuggaauuagauu

SEQ ID NO: 1002542 - RNA, 19 nt, Artificial Sequence
  Description of Artificial Sequence: Synthetic oligonucleotide
ggauauagcggucaccucc

SEQ ID NO: 1002543 - RNA, 19 nt, Artificial Sequence
  Description of Artificial Sequence: Synthetic oligonucleotide
ugcaagucgcucucgaaca

SEQ ID NO: 1002544 - RNA, 19 nt, Artificial Sequence
  Description of Artificial Sequence: Synthetic oligonucleotide
auuccuugguggauaaggc

SEQ ID NO: 1002545 - RNA, 19 nt, Artificial Sequence
  Description of Artificial Sequence: Synthetic oligonucleotide
uauagcggucaccuccagg

SEQ ID NO: 1002546 - RNA, 19 nt, Artificial Sequence
  Description of Artificial Sequence: Synthetic oligonucleotide
gacguuccaaauucggaug

SEQ ID NO: 1002547 - RNA, 19 nt, Artificial Sequence
  Description of Artificial Sequence: Synthetic oligonucleotide
uguggccagaacgugaacc

SEQ ID NO: 1002548 - RNA, 19 nt, Artificial Sequence
  Description of Artificial Sequence: Synthetic oligonucleotide
augugucggucacuggugc

SEQ ID NO: 1002549 - RNA, 19 nt, Artificial Sequence
  Description of Artificial Sequence: Synthetic oligonucleotide
agguuuuccacugagccug

SEQ ID NO: 1002550 - RNA, 19 nt, Artificial Sequence
  Description of Artificial Sequence: Synthetic oligonucleotide
aauauuggacugccaggga

SEQ ID NO: 1002551 - RNA, 19 nt, Artificial Sequence
  Description of Artificial Sequence: Synthetic oligonucleotide
agacguuccaaauucggau

SEQ ID NO: 1002552 - RNA, 19 nt, Artificial Sequence
  Description of Artificial Sequence: Synthetic oligonucleotide
aggauauguaguccccagg

SEQ ID NO: 1002553 - RNA, 19 nt, Artificial Sequence
  Description of Artificial Sequence: Synthetic oligonucleotide
gaauauagcuguuccaacu

SEQ ID NO: 1002554 - RNA, 19 nt, Artificial Sequence
  Description of Artificial Sequence: Synthetic oligonucleotide
aaucaacaagguucaagua

SEQ ID NO: 1002555 - RNA, 19 nt, Artificial Sequence
  Description of Artificial Sequence: Synthetic oligonucleotide
auaguggggagaccagagg

SEQ ID NO: 1002556 - RNA, 19 nt, Artificial Sequence
  Description of Artificial Sequence: Synthetic oligonucleotide
gaggauauguaguccccag

SEQ ID NO: 1002557 - RNA, 19 nt, Artificial Sequence
  Description of Artificial Sequence: Synthetic oligonucleotide
acucagacaggccccagag

SEQ ID NO: 1002558 - RNA, 19 nt, Artificial Sequence
  Description of Artificial Sequence: Synthetic oligonucleotide
acgaacugcgccaugacag

SEQ ID NO: 1002559 - RNA, 19 nt, Artificial Sequence
  Description of Artificial Sequence: Synthetic oligonucleotide
aacugcgccaugacagugc

SEQ ID NO: 1002560 - RNA, 19 nt, Artificial Sequence
  Description of Artificial Sequence: Synthetic oligonucleotide
ucgcucucgaacacgaacu

SEQ ID NO: 1002561 - RNA, 19 nt, Artificial Sequence
  Description of Artificial Sequence: Synthetic oligonucleotide
cauacuuccuggcuauggc

SEQ ID NO: 1002562 - RNA, 19 nt, Artificial Sequence
  Description of Artificial Sequence: Synthetic oligonucleotide
uauccugucugguagcgaa

SEQ ID NO: 1002563 - RNA, 19 nt, Artificial Sequence
  Description of Artificial Sequence: Synthetic oligonucleotide
ggauauguaguccccaggc

SEQ ID NO: 1002564 - RNA, 19 nt, Artificial Sequence
  Description of Artificial Sequence: Synthetic oligonucleotide
gcuauggccacucagugug

SEQ ID NO: 1002565 - RNA, 19 nt, Artificial Sequence
  Description of Artificial Sequence: Synthetic oligonucleotide
aggagagagugcaagucgc

SEQ ID NO: 1002566 - RNA, 19 nt, Artificial Sequence
  Description of Artificial Sequence: Synthetic oligonucleotide
uccucuacaucgaaaccgu

SEQ ID NO: 1002567 - RNA, 19 nt, Artificial Sequence
  Description of Artificial Sequence: Synthetic oligonucleotide
gaauguuugcaggggagcc

SEQ ID NO: 1002568 - RNA, 19 nt, Artificial Sequence
  Description of Artificial Sequence: Synthetic oligonucleotide
acaagaggggucuguuuuc

SEQ ID NO: 1002569 - RNA, 19 nt, Artificial Sequence
  Description of Artificial Sequence: Synthetic oligonucleotide
ugcgugagucugccgaacg

SEQ ID NO: 1002570 - RNA, 19 nt, Artificial Sequence
  Description of Artificial Sequence: Synthetic oligonucleotide
ugaauguuugcaggggagc

SEQ ID NO: 1002571 - RNA, 19 nt, Artificial Sequence
  Description of Artificial Sequence: Synthetic oligonucleotide
uugccagaauauuggacug

SEQ ID NO: 1002572 - RNA, 19 nt, Artificial Sequence
  Description of Artificial Sequence: Synthetic oligonucleotide
uuccccgaccagcuaaagg

SEQ ID NO: 1002573 - RNA, 19 nt, Artificial Sequence
  Description of Artificial Sequence: Synthetic oligonucleotide
cuuagagagcuuacucgag

SEQ ID NO: 1002574 - RNA, 19 nt, Artificial Sequence
  Description of Artificial Sequence: Synthetic oligonucleotide
caaucaacaagguucaagu

SEQ ID NO: 1002575 - RNA, 19 nt, Artificial Sequence
  Description of Artificial Sequence: Synthetic oligonucleotide
guuggguacuuccaaauaa

SEQ ID NO: 1002576 - RNA, 19 nt, Artificial Sequence
  Description of Artificial Sequence: Synthetic oligonucleotide
aggaguucggcccgggguc

SEQ ID NO: 1002577 - RNA, 19 nt, Artificial Sequence
  Description of Artificial Sequence: Synthetic oligonucleotide
uggaacacaccugggaaug

SEQ ID NO: 1002578 - RNA, 19 nt, Artificial Sequence
  Description of Artificial Sequence: Synthetic oligonucleotide
aacucaaagcaacgccaca

SEQ ID NO: 1002579 - RNA, 19 nt, Artificial Sequence
  Description of Artificial Sequence: Synthetic oligonucleotide
gaacgugaaccacuggaca

SEQ ID NO: 1002580 - RNA, 19 nt, Artificial Sequence
  Description of Artificial Sequence: Synthetic oligonucleotide
uuuagcuacacuggcuuuc

SEQ ID NO: 1002581 - RNA, 19 nt, Artificial Sequence
  Description of Artificial Sequence: Synthetic oligonucleotide
gaauuagauuugccaggag

SEQ ID NO: 1002582 - RNA, 19 nt, Artificial Sequence
  Description of Artificial Sequence: Synthetic oligonucleotide
ucuccuuacgcagggcagg

SEQ ID NO: 1002583 - RNA, 19 nt, Artificial Sequence
  Description of Artificial Sequence: Synthetic oligonucleotide
gcaucaaguauccugucug

SEQ ID NO: 1002584 - RNA, 19 nt, Artificial Sequence
  Description of Artificial Sequence: Synthetic oligonucleotide
aacgccacagccguagagu

SEQ ID NO: 1002585 - RNA, 19 nt, Artificial Sequence
  Description of Artificial Sequence: Synthetic oligonucleotide
cucaaagcaacgccacagc

SEQ ID NO: 1002586 - RNA, 19 nt, Artificial Sequence
  Description of Artificial Sequence: Synthetic oligonucleotide
caacucaaagcaacgccac

SEQ ID NO: 1002587 - RNA, 19 nt, Artificial Sequence
  Description of Artificial Sequence: Synthetic oligonucleotide
gaacacaccugggaauggg

SEQ ID NO: 1002588 - RNA, 19 nt, Artificial Sequence
  Description of Artificial Sequence: Synthetic oligonucleotide
aguauccugucugguagcg

SEQ ID NO: 1002589 - RNA, 19 nt, Artificial Sequence
  Description of Artificial Sequence: Synthetic oligonucleotide
ugguagcgaaggaauauau

SEQ ID NO: 1002590 - RNA, 19 nt, Artificial Sequence
  Description of Artificial Sequence: Synthetic oligonucleotide
caugguguucugcuacccg

SEQ ID NO: 1002591 - RNA, 19 nt, Artificial Sequence
  Description of Artificial Sequence: Synthetic oligonucleotide
uuauaguggggagaccaga

SEQ ID NO: 1002592 - RNA, 19 nt, Artificial Sequence
  Description of Artificial Sequence: Synthetic oligonucleotide
cugugagaucuguuggcgg

SEQ ID NO: 1002593 - RNA, 19 nt, Artificial Sequence
  Description of Artificial Sequence: Synthetic oligonucleotide
uacucgagccgagugacug

SEQ ID NO: 1002594 - RNA, 19 nt, Artificial Sequence
  Description of Artificial Sequence: Synthetic oligonucleotide
cuuacucgagccgagugac

SEQ ID NO: 1002595 - RNA, 19 nt, Artificial Sequence
  Description of Artificial Sequence: Synthetic oligonucleotide
cagaacgugaaccacugga

SEQ ID NO: 1002596 - RNA, 19 nt, Artificial Sequence
  Description of Artificial Sequence: Synthetic oligonucleotide
uuagauuugccaggaguuc

SEQ ID NO: 1002597 - RNA, 19 nt, Artificial Sequence
  Description of Artificial Sequence: Synthetic oligonucleotide
accuccauuugagaagcac

SEQ ID NO: 1002598 - RNA, 19 nt, Artificial Sequence
  Description of Artificial Sequence: Synthetic oligonucleotide
aaacaagaggggucuguuu

SEQ ID NO: 1002599 - RNA, 19 nt, Artificial Sequence
  Description of Artificial Sequence: Synthetic oligonucleotide
ccaaauucggaugugucgg

SEQ ID NO: 1002600 - RNA, 19 nt, Artificial Sequence
  Description of Artificial Sequence: Synthetic oligonucleotide
guuccgaagccguuucugc

SEQ ID NO: 1002601 - RNA, 19 nt, Artificial Sequence
  Description of Artificial Sequence: Synthetic oligonucleotide
ugcauuggggaugggcgcg

SEQ ID NO: 1002602 - RNA, 19 nt, Artificial Sequence
  Description of Artificial Sequence: Synthetic oligonucleotide
aauguggccagaacgugaa

SEQ ID NO: 1002603 - RNA, 19 nt, Artificial Sequence
  Description of Artificial Sequence: Synthetic oligonucleotide
ugguggauaaggcuacuuu

SEQ ID NO: 1002604 - RNA, 19 nt, Artificial Sequence
  Description of Artificial Sequence: Synthetic oligonucleotide
auuggacugccagggacac

SEQ ID NO: 1002605 - RNA, 19 nt, Artificial Sequence
  Description of Artificial Sequence: Synthetic oligonucleotide
aaccuuggaauuagauuug

SEQ ID NO: 1002606 - RNA, 19 nt, Artificial Sequence
  Description of Artificial Sequence: Synthetic oligonucleotide
ucgcuuugcgcugccagcg

SEQ ID NO: 1002607 - RNA, 19 nt, Artificial Sequence
  Description of Artificial Sequence: Synthetic oligonucleotide
ucgggcaccucccgguacg

SEQ ID NO: 1002608 - RNA, 19 nt, Artificial Sequence
  Description of Artificial Sequence: Synthetic oligonucleotide
gagauaagcuccuuauagu

SEQ ID NO: 1002609 - RNA, 19 nt, Artificial Sequence
  Description of Artificial Sequence: Synthetic oligonucleotide
ucggaugugucggucacug

SEQ ID NO: 1002610 - RNA, 19 nt, Artificial Sequence
  Description of Artificial Sequence: Synthetic oligonucleotide
agagcagacguuccaaauu

SEQ ID NO: 1002611 - RNA, 19 nt, Artificial Sequence
  Description of Artificial Sequence: Synthetic oligonucleotide
uuacuggugcccacagcca

SEQ ID NO: 1002612 - RNA, 19 nt, Artificial Sequence
  Description of Artificial Sequence: Synthetic oligonucleotide
cugagguuuuccacugagc

SEQ ID NO: 1002613 - RNA, 19 nt, Artificial Sequence
  Description of Artificial Sequence: Synthetic oligonucleotide
uguuccgaagccguuucug

SEQ ID NO: 1002614 - RNA, 19 nt, Artificial Sequence
  Description of Artificial Sequence: Synthetic oligonucleotide
ucugguagcgaaggaauau

SEQ ID NO: 1002615 - RNA, 19 nt, Artificial Sequence
  Description of Artificial Sequence: Synthetic oligonucleotide
acguuaucauugccaccgc

SEQ ID NO: 1002616 - RNA, 19 nt, Artificial Sequence
  Description of Artificial Sequence: Synthetic oligonucleotide
agcuuacucgagccgagug

SEQ ID NO: 1002617 - RNA, 19 nt, Artificial Sequence
  Description of Artificial Sequence: Synthetic oligonucleotide
cagaggauauguagucccc

SEQ ID NO: 1002618 - RNA, 19 nt, Artificial Sequence
  Description of Artificial Sequence: Synthetic oligonucleotide
acgccacagccguagaguc

SEQ ID NO: 1002619 - RNA, 19 nt, Artificial Sequence
  Description of Artificial Sequence: Synthetic oligonucleotide
ugccagaugccguccaucu

SEQ ID NO: 1002620 - RNA, 19 nt, Artificial Sequence
  Description of Artificial Sequence: Synthetic oligonucleotide
uucgcuuugcgcugccagc

SEQ ID NO: 1002621 - RNA, 19 nt, Artificial Sequence
  Description of Artificial Sequence: Synthetic oligonucleotide
agcgcaacccacauacuuc

SEQ ID NO: 1002622 - RNA, 19 nt, Artificial Sequence
  Description of Artificial Sequence: Synthetic oligonucleotide
ucugcuacccgaacaucau

SEQ ID NO: 1002623 - RNA, 19 nt, Artificial Sequence
  Description of Artificial Sequence: Synthetic oligonucleotide
uucagcguuacuggugccc

SEQ ID NO: 1002624 - RNA, 19 nt, Artificial Sequence
  Description of Artificial Sequence: Synthetic oligonucleotide
ccaaauaaccagcugguuc

SEQ ID NO: 1002625 - RNA, 19 nt, Artificial Sequence
  Description of Artificial Sequence: Synthetic oligonucleotide
gcuacacuggcuuucuccc

SEQ ID NO: 1002626 - RNA, 19 nt, Artificial Sequence
  Description of Artificial Sequence: Synthetic oligonucleotide
cuccaaucaacaagguuca

SEQ ID NO: 1002627 - RNA, 19 nt, Artificial Sequence
  Description of Artificial Sequence: Synthetic oligonucleotide
aacgggugcauuggggaug

SEQ ID NO: 1002628 - RNA, 19 nt, Artificial Sequence
  Description of Artificial Sequence: Synthetic oligonucleotide
guaagacucaggacucggg

SEQ ID NO: 1002629 - RNA, 19 nt, Artificial Sequence
  Description of Artificial Sequence: Synthetic oligonucleotide
gugaauguuugcaggggag

SEQ ID NO: 1002630 - RNA, 19 nt, Artificial Sequence
  Description of Artificial Sequence: Synthetic oligonucleotide
cuguuggcggcccgcaugg

SEQ ID NO: 1002631 - RNA, 19 nt, Artificial Sequence
  Description of Artificial Sequence: Synthetic oligonucleotide
ugcgccaugacagugccua

SEQ ID NO: 1002632 - RNA, 19 nt, Artificial Sequence
  Description of Artificial Sequence: Synthetic oligonucleotide
cuacccgaacaucauggug

SEQ ID NO: 1002633 - RNA, 19 nt, Artificial Sequence
  Description of Artificial Sequence: Synthetic oligonucleotide
gauauagcggucaccucca

SEQ ID NO: 1002634 - RNA, 19 nt, Artificial Sequence
  Description of Artificial Sequence: Synthetic oligonucleotide
agauuugccaggaguucgg

SEQ ID NO: 1002635 - RNA, 19 nt, Artificial Sequence
  Description of Artificial Sequence: Synthetic oligonucleotide
ucgaaaccguucagguuca

SEQ ID NO: 1002636 - RNA, 19 nt, Artificial Sequence
  Description of Artificial Sequence: Synthetic oligonucleotide
uuccgaagccguuucugcu

SEQ ID NO: 1002637 - RNA, 19 nt, Artificial Sequence
  Description of Artificial Sequence: Synthetic oligonucleotide
agaucuguuggcggcccgc

SEQ ID NO: 1002638 - RNA, 19 nt, Artificial Sequence
  Description of Artificial Sequence: Synthetic oligonucleotide
auauagcuguuccaacuua

SEQ ID NO: 1002639 - RNA, 19 nt, Artificial Sequence
  Description of Artificial Sequence: Synthetic oligonucleotide
cuccuuauaguggggagac

SEQ ID NO: 1002640 - RNA, 19 nt, Artificial Sequence
  Description of Artificial Sequence: Synthetic oligonucleotide
gacugcgccgggcuucugg

SEQ ID NO: 1002641 - RNA, 19 nt, Artificial Sequence
  Description of Artificial Sequence: Synthetic oligonucleotide
auaaggcuacuuuuagcua

SEQ ID NO: 1002642 - RNA, 19 nt, Artificial Sequence
  Description of Artificial Sequence: Synthetic oligonucleotide
agcuaaaggcacgccgggc

SEQ ID NO: 1002643 - RNA, 19 nt, Artificial Sequence
  Description of Artificial Sequence: Synthetic oligonucleotide
gucgcucucgaacacgaac

SEQ ID NO: 1002644 - RNA, 19 nt, Artificial Sequence
  Description of Artificial Sequence: Synthetic oligonucleotide
cugggaaugggcauccaca

SEQ ID NO: 1002645 - RNA, 19 nt, Artificial Sequence
  Description of Artificial Sequence: Synthetic oligonucleotide
cacuggacagaauauagcu

SEQ ID NO: 1002646 - RNA, 19 nt, Artificial Sequence
  Description of Artificial Sequence: Synthetic oligonucleotide
cacuucagcguuacuggug

SEQ ID NO: 1002647 - RNA, 19 nt, Artificial Sequence
  Description of Artificial Sequence: Synthetic oligonucleotide
cacauugaccacguuauca

SEQ ID NO: 1002648 - RNA, 19 nt, Artificial Sequence
  Description of Artificial Sequence: Synthetic oligonucleotide
uuagcuacacuggcuuucu

SEQ ID NO: 1002649 - RNA, 19 nt, Artificial Sequence
  Description of Artificial Sequence: Synthetic oligonucleotide
gaguucgggacugcgccgg

SEQ ID NO: 1002650 - RNA, 19 nt, Artificial Sequence
  Description of Artificial Sequence: Synthetic oligonucleotide
ggcgcguccaguuuaagga

SEQ ID NO: 1002651 - RNA, 19 nt, Artificial Sequence
  Description of Artificial Sequence: Synthetic oligonucleotide
acucgagccgagugacugg

SEQ ID NO: 1002652 - RNA, 19 nt, Artificial Sequence
  Description of Artificial Sequence: Synthetic oligonucleotide
ugugucggucacuggugcc

SEQ ID NO: 1002653 - RNA, 19 nt, Artificial Sequence
  Description of Artificial Sequence: Synthetic oligonucleotide
ggcgcugugagaucuguug

SEQ ID NO: 1002654 - RNA, 19 nt, Artificial Sequence
  Description of Artificial Sequence: Synthetic oligonucleotide
cuugauguugagugaaugu

SEQ ID NO: 1002655 - RNA, 19 nt, Artificial Sequence
  Description of Artificial Sequence: Synthetic oligonucleotide
uuuuagcuacacuggcuuu

SEQ ID NO: 1002656 - RNA, 19 nt, Artificial Sequence
  Description of Artificial Sequence: Synthetic oligonucleotide
gaauguggccagaacguga

SEQ ID NO: 1002657 - RNA, 19 nt, Artificial Sequence
  Description of Artificial Sequence: Synthetic oligonucleotide
aagucgcucucgaacacga

SEQ ID NO: 1002658 - RNA, 19 nt, Artificial Sequence
  Description of Artificial Sequence: Synthetic oligonucleotide
gauauguaguccccaggcu

SEQ ID NO: 1002659 - RNA, 19 nt, Artificial Sequence
  Description of Artificial Sequence: Synthetic oligonucleotide
aaggcuacuuuuagcuaca

SEQ ID NO: 1002660 - RNA, 19 nt, Artificial Sequence
  Description of Artificial Sequence: Synthetic oligonucleotide
cccagcgcaacccacauac

SEQ ID NO: 1002661 - RNA, 19 nt, Artificial Sequence
  Description of Artificial Sequence: Synthetic oligonucleotide
caagucgcucucgaacacg

SEQ ID NO: 1002662 - RNA, 19 nt, Artificial Sequence
  Description of Artificial Sequence: Synthetic oligonucleotide
uggccugagauaagcuccu

SEQ ID NO: 1002663 - RNA, 19 nt, Artificial Sequence
  Description of Artificial Sequence: Synthetic oligonucleotide
uucgggacugcgccgggcu

SEQ ID NO: 1002664 - RNA, 19 nt, Artificial Sequence
  Description of Artificial Sequence: Synthetic oligonucleotide
gccaccgcuugccagaugc

SEQ ID NO: 1002665 - RNA, 19 nt, Artificial Sequence
  Description of Artificial Sequence: Synthetic oligonucleotide
cuuugcgcugccagcgcgc

SEQ ID NO: 1002666 - RNA, 19 nt, Artificial Sequence
  Description of Artificial Sequence: Synthetic oligonucleotide
cagacguuccaaauucgga

SEQ ID NO: 1002667 - RNA, 19 nt, Artificial Sequence
  Description of Artificial Sequence: Synthetic oligonucleotide
gagaucuguuggcggcccg

SEQ ID NO: 1002668 - RNA, 19 nt, Artificial Sequence
  Description of Artificial Sequence: Synthetic oligonucleotide
accgaguucgggacugcgc

SEQ ID NO: 1002669 - RNA, 19 nt, Artificial Sequence
  Description of Artificial Sequence: Synthetic oligonucleotide
agaggauauguagucccca

SEQ ID NO: 1002670 - RNA, 19 nt, Artificial Sequence
  Description of Artificial Sequence: Synthetic oligonucleotide
cuauggccacucagugugg

SEQ ID NO: 1002671 - RNA, 19 nt, Artificial Sequence
  Description of Artificial Sequence: Synthetic oligonucleotide
gguccaacucaaagcaacg

SEQ ID NO: 1002672 - RNA, 19 nt, Artificial Sequence
  Description of Artificial Sequence: Synthetic oligonucleotide
aucaaguauccugucuggu

SEQ ID NO: 1002673 - RNA, 19 nt, Artificial Sequence
  Description of Artificial Sequence: Synthetic oligonucleotide
ggaauuagauuugccagga

SEQ ID NO: 1002674 - RNA, 19 nt, Artificial Sequence
  Description of Artificial Sequence: Synthetic oligonucleotide
gcagacguuccaaauucgg

SEQ ID NO: 1002675 - RNA, 19 nt, Artificial Sequence
  Description of Artificial Sequence: Synthetic oligonucleotide
guuggugcgugagucugcc

SEQ ID NO: 1002676 - RNA, 19 nt, Artificial Sequence
  Description of Artificial Sequence: Synthetic oligonucleotide
ccauaaguacacacuguug

SEQ ID NO: 1002677 - RNA, 19 nt, Artificial Sequence
  Description of Artificial Sequence: Synthetic oligonucleotide
gccaugguuggguacuucc

SEQ ID NO: 1002678 - RNA, 19 nt, Artificial Sequence
  Description of Artificial Sequence: Synthetic oligonucleotide
agugccuacaggggcaaga

SEQ ID NO: 1002679 - RNA, 19 nt, Artificial Sequence
  Description of Artificial Sequence: Synthetic oligonucleotide
agugcaagucgcucucgaa

SEQ ID NO: 1002680 - RNA, 19 nt, Artificial Sequence
  Description of Artificial Sequence: Synthetic oligonucleotide
gcgcugugagaucuguugg

SEQ ID NO: 1002681 - RNA, 19 nt, Artificial Sequence
  Description of Artificial Sequence: Synthetic oligonucleotide
uugacagcaccuugauguu

SEQ ID NO: 1002682 - RNA, 19 nt, Artificial Sequence
  Description of Artificial Sequence: Synthetic oligonucleotide
gagguuuuccacugagccu

SEQ ID NO: 1002683 - RNA, 19 nt, Artificial Sequence
  Description of Artificial Sequence: Synthetic oligonucleotide
auauagcggucaccuccag

SEQ ID NO: 1002684 - RNA, 19 nt, Artificial Sequence
  Description of Artificial Sequence: Synthetic oligonucleotide
caacgccacagccguagag

SEQ ID NO: 1002685 - RNA, 19 nt, Artificial Sequence
  Description of Artificial Sequence: Synthetic oligonucleotide
agagugcaagucgcucucg

SEQ ID NO: 1002686 - RNA, 19 nt, Artificial Sequence
  Description of Artificial Sequence: Synthetic oligonucleotide
uacgcggccuucccaggca

SEQ ID NO: 1002687 - RNA, 19 nt, Artificial Sequence
  Description of Artificial Sequence: Synthetic oligonucleotide
caccgcuugccagaugccg

SEQ ID NO: 1002688 - RNA, 19 nt, Artificial Sequence
  Description of Artificial Sequence: Synthetic oligonucleotide
agaggcgaccgaguucggg

SEQ ID NO: 1002689 - RNA, 19 nt, Artificial Sequence
  Description of Artificial Sequence: Synthetic oligonucleotide
cucgagccgagugacuggc

SEQ ID NO: 1002690 - RNA, 19 nt, Artificial Sequence
  Description of Artificial Sequence: Synthetic oligonucleotide
cacgccgggcuguuaauuc

SEQ ID NO: 1002691 - RNA, 19 nt, Artificial Sequence
  Description of Artificial Sequence: Synthetic oligonucleotide
gggcgcguccaguuuaagg

SEQ ID NO: 1002692 - RNA, 19 nt, Artificial Sequence
  Description of Artificial Sequence: Synthetic oligonucleotide
caugguuggguacuuccaa

SEQ ID NO: 1002693 - RNA, 19 nt, Artificial Sequence
  Description of Artificial Sequence: Synthetic oligonucleotide
gaaugggcauccacagcac

SEQ ID NO: 1002694 - RNA, 19 nt, Artificial Sequence
  Description of Artificial Sequence: Synthetic oligonucleotide
gugaauguggccagaacgu

SEQ ID NO: 1002695 - RNA, 19 nt, Artificial Sequence
  Description of Artificial Sequence: Synthetic oligonucleotide
ggguacuuccaaauaacca

SEQ ID NO: 1002696 - RNA, 19 nt, Artificial Sequence
  Description of Artificial Sequence: Synthetic oligonucleotide
gugccuacaggggcaagag

SEQ ID NO: 1002697 - RNA, 19 nt, Artificial Sequence
  Description of Artificial Sequence: Synthetic oligonucleotide
gaccgaguucgggacugcg

SEQ ID NO: 1002698 - RNA, 19 nt, Artificial Sequence
  Description of Artificial Sequence: Synthetic oligonucleotide
agagcuuacucgagccgag

SEQ ID NO: 1002699 - RNA, 19 nt, Artificial Sequence
  Description of Artificial Sequence: Synthetic oligonucleotide
cuccuuacgcagggcaggg

SEQ ID NO: 1002700 - RNA, 19 nt, Artificial Sequence
  Description of Artificial Sequence: Synthetic oligonucleotide
uuucggauuucaggggcau

SEQ ID NO: 1002701 - RNA, 19 nt, Artificial Sequence
  Description of Artificial Sequence: Synthetic oligonucleotide
gcaugggcgagggagcugg

SEQ ID NO: 1002702 - RNA, 19 nt, Artificial Sequence
  Description of Artificial Sequence: Synthetic oligonucleotide
caacggauuccuuggugga

SEQ ID NO: 1002703 - RNA, 19 nt, Artificial Sequence
  Description of Artificial Sequence: Synthetic oligonucleotide
acgugaaccacuggacaga

SEQ ID NO: 1002704 - RNA, 19 nt, Artificial Sequence
  Description of Artificial Sequence: Synthetic oligonucleotide
ccgaguucgggacugcgcc

SEQ ID NO: 1002705 - RNA, 19 nt, Artificial Sequence
  Description of Artificial Sequence: Synthetic oligonucleotide
acgccgggcuguuaauucu

SEQ ID NO: 1002706 - RNA, 19 nt, Artificial Sequence
  Description of Artificial Sequence: Synthetic oligonucleotide
ugagucugccgaacgccuu

SEQ ID NO: 1002707 - RNA, 19 nt, Artificial Sequence
  Description of Artificial Sequence: Synthetic oligonucleotide
gugagaucuguuggcggcc

SEQ ID NO: 1002708 - RNA, 19 nt, Artificial Sequence
  Description of Artificial Sequence: Synthetic oligonucleotide
gcuuugcgcugccagcgcg

SEQ ID NO: 1002709 - RNA, 19 nt, Artificial Sequence
  Description of Artificial Sequence: Synthetic oligonucleotide
uuuccccgaccagcuaaag

SEQ ID NO: 1002710 - RNA, 19 nt, Artificial Sequence
  Description of Artificial Sequence: Synthetic oligonucleotide
guacgcggccuucccaggc

SEQ ID NO: 1002711 - RNA, 19 nt, Artificial Sequence
  Description of Artificial Sequence: Synthetic oligonucleotide
aguucgggacugcgccggg

SEQ ID NO: 1002712 - RNA, 19 nt, Artificial Sequence
  Description of Artificial Sequence: Synthetic oligonucleotide
aggcuacuuuuagcuacac

SEQ ID NO: 1002713 - RNA, 19 nt, Artificial Sequence
  Description of Artificial Sequence: Synthetic oligonucleotide
uuggugggcgucuccccgu

SEQ ID NO: 1002714 - RNA, 19 nt, Artificial Sequence
  Description of Artificial Sequence: Synthetic oligonucleotide
uuugcgcugccagcgcgca

SEQ ID NO: 1002715 - RNA, 19 nt, Artificial Sequence
  Description of Artificial Sequence: Synthetic oligonucleotide
cacgaacugcgccaugaca

SEQ ID NO: 1002716 - RNA, 19 nt, Artificial Sequence
  Description of Artificial Sequence: Synthetic oligonucleotide
ugccagcgcgcaacgggug

SEQ ID NO: 1002717 - RNA, 19 nt, Artificial Sequence
  Description of Artificial Sequence: Synthetic oligonucleotide
gcuuacucgagccgaguga

SEQ ID NO: 1002718 - RNA, 19 nt, Artificial Sequence
  Description of Artificial Sequence: Synthetic oligonucleotide
ucgagccgagugacuggcc

SEQ ID NO: 1002719 - RNA, 19 nt, Artificial Sequence
  Description of Artificial Sequence: Synthetic oligonucleotide
agcguuacuggugcccaca

SEQ ID NO: 1002720 - RNA, 19 nt, Artificial Sequence
  Description of Artificial Sequence: Synthetic oligonucleotide
cagaaccagcauuccauaa

SEQ ID NO: 1002721 - RNA, 19 nt, Artificial Sequence
  Description of Artificial Sequence: Synthetic oligonucleotide
ggaacacaccugggaaugg

SEQ ID NO: 1002722 - RNA, 19 nt, Artificial Sequence
  Description of Artificial Sequence: Synthetic oligonucleotide
cugagauaagcuccuuaua

SEQ ID NO: 1002723 - RNA, 19 nt, Artificial Sequence
  Description of Artificial Sequence: Synthetic oligonucleotide
ccgaacgccuucuuucccc

SEQ ID NO: 1002724 - RNA, 19 nt, Artificial Sequence
  Description of Artificial Sequence: Synthetic oligonucleotide
ccuugauguugagugaaug

SEQ ID NO: 1002725 - RNA, 19 nt, Artificial Sequence
  Description of Artificial Sequence: Synthetic oligonucleotide
gguggauaaggcuacuuuu

SEQ ID NO: 1002726 - RNA, 19 nt, Artificial Sequence
  Description of Artificial Sequence: Synthetic oligonucleotide
gcgcguccaguuuaaggag

SEQ ID NO: 1002727 - RNA, 19 nt, Artificial Sequence
  Description of Artificial Sequence: Synthetic oligonucleotide
ccgaccagcuaaaggcacg

SEQ ID NO: 1002728 - RNA, 19 nt, Artificial Sequence
  Description of Artificial Sequence: Synthetic oligonucleotide
uuccuucgcuuugcgcugc

SEQ ID NO: 1002729 - RNA, 19 nt, Artificial Sequence
  Description of Artificial Sequence: Synthetic oligonucleotide
ugcaagucuuccggcugga

SEQ ID NO: 1002730 - RNA, 19 nt, Artificial Sequence
  Description of Artificial Sequence: Synthetic oligonucleotide
aggcacgccgggcuguuaa

SEQ ID NO: 1002731 - RNA, 19 nt, Artificial Sequence
  Description of Artificial Sequence: Synthetic oligonucleotide
ccuuacgcagggcaggguc

SEQ ID NO: 1002732 - RNA, 19 nt, Artificial Sequence
  Description of Artificial Sequence: Synthetic oligonucleotide
ggcaaagccauggccugag

SEQ ID NO: 1002733 - RNA, 19 nt, Artificial Sequence
  Description of Artificial Sequence: Synthetic oligonucleotide
gguacgcggccuucccagg

SEQ ID NO: 1002734 - RNA, 19 nt, Artificial Sequence
  Description of Artificial Sequence: Synthetic oligonucleotide
gaucuguuggcggcccgca

SEQ ID NO: 1002735 - RNA, 19 nt, Artificial Sequence
  Description of Artificial Sequence: Synthetic oligonucleotide
cuggacucaugguaagacu

SEQ ID NO: 1002736 - RNA, 19 nt, Artificial Sequence
  Description of Artificial Sequence: Synthetic oligonucleotide
uagcuacacuggcuuucuc

SEQ ID NO: 1002737 - RNA, 19 nt, Artificial Sequence
  Description of Artificial Sequence: Synthetic oligonucleotide
gcuaaaggcacgccgggcu

SEQ ID NO: 1002738 - RNA, 19 nt, Artificial Sequence
  Description of Artificial Sequence: Synthetic oligonucleotide
gggugcauuggggaugggc

SEQ ID NO: 1002739 - RNA, 19 nt, Artificial Sequence
  Description of Artificial Sequence: Synthetic oligonucleotide
cuuuccccgaccagcuaaa

SEQ ID NO: 1002740 - RNA, 19 nt, Artificial Sequence
  Description of Artificial Sequence: Synthetic oligonucleotide
ugucggucacuggugccuc

SEQ ID NO: 1002741 - RNA, 19 nt, Artificial Sequence
  Description of Artificial Sequence: Synthetic oligonucleotide
gcgucuccccgucuucugg

SEQ ID NO: 1002742 - RNA, 19 nt, Artificial Sequence
  Description of Artificial Sequence: Synthetic oligonucleotide
uucggauuucaggggcauc

SEQ ID NO: 1002743 - RNA, 19 nt, Artificial Sequence
  Description of Artificial Sequence: Synthetic oligonucleotide
gcaagucgcucucgaacac

SEQ ID NO: 1002744 - RNA, 19 nt, Artificial Sequence
  Description of Artificial Sequence: Synthetic oligonucleotide
gcgugagucugccgaacgc

SEQ ID NO: 1002745 - RNA, 19 nt, Artificial Sequence
  Description of Artificial Sequence: Synthetic oligonucleotide
ggacucaugguaagacuca

SEQ ID NO: 1002746 - RNA, 19 nt, Artificial Sequence
  Description of Artificial Sequence: Synthetic oligonucleotide
ggaugucaccagaaccagc

SEQ ID NO: 1002747 - RNA, 19 nt, Artificial Sequence
  Description of Artificial Sequence: Synthetic oligonucleotide
caccaugcaacagccuuga

SEQ ID NO: 1002748 - RNA, 19 nt, Artificial Sequence
  Description of Artificial Sequence: Synthetic oligonucleotide
gggcauucugagguuuucc

SEQ ID NO: 1002749 - RNA, 19 nt, Artificial Sequence
  Description of Artificial Sequence: Synthetic oligonucleotide
ugggcgucuccccgucuuc

SEQ ID NO: 1002750 - RNA, 19 nt, Artificial Sequence
  Description of Artificial Sequence: Synthetic oligonucleotide
aagaggcgaccgaguucgg

SEQ ID NO: 1002751 - RNA, 19 nt, Artificial Sequence
  Description of Artificial Sequence: Synthetic oligonucleotide
gcguccaguuuaaggagag

SEQ ID NO: 1002752 - RNA, 19 nt, Artificial Sequence
  Description of Artificial Sequence: Synthetic oligonucleotide
gaguucggcccgggguccg

SEQ ID NO: 1002753 - RNA, 19 nt, Artificial Sequence
  Description of Artificial Sequence: Synthetic oligonucleotide
uccaaucaacaagguucaa

SEQ ID NO: 1002754 - RNA, 19 nt, Artificial Sequence
  Description of Artificial Sequence: Synthetic oligonucleotide
acccaggcguggcuuucug

SEQ ID NO: 1002755 - RNA, 19 nt, Artificial Sequence
  Description of Artificial Sequence: Synthetic oligonucleotide
gcucucgaacacgaacugc

SEQ ID NO: 1002756 - RNA, 19 nt, Artificial Sequence
  Description of Artificial Sequence: Synthetic oligonucleotide
cacucagacaggccccaga

SEQ ID NO: 1002757 - RNA, 19 nt, Artificial Sequence
  Description of Artificial Sequence: Synthetic oligonucleotide
cugguagcgaaggaauaua

SEQ ID NO: 1002758 - RNA, 19 nt, Artificial Sequence
  Description of Artificial Sequence: Synthetic oligonucleotide
cgcaacgggugcauugggg

SEQ ID NO: 1002759 - RNA, 19 nt, Artificial Sequence
  Description of Artificial Sequence: Synthetic oligonucleotide
gccacagccaguacauuuc

SEQ ID NO: 1002760 - RNA, 19 nt, Artificial Sequence
  Description of Artificial Sequence: Synthetic oligonucleotide
uuggacugccagggacacc

SEQ ID NO: 1002761 - RNA, 19 nt, Artificial Sequence
  Description of Artificial Sequence: Synthetic oligonucleotide
uggacccaggcguggcuuu

SEQ ID NO: 1002762 - RNA, 19 nt, Artificial Sequence
  Description of Artificial Sequence: Synthetic oligonucleotide
gcuccuuauaguggggaga

SEQ ID NO: 1002763 - RNA, 19 nt, Artificial Sequence
  Description of Artificial Sequence: Synthetic oligonucleotide
cgugagucugccgaacgcc

SEQ ID NO: 1002764 - RNA, 19 nt, Artificial Sequence
  Description of Artificial Sequence: Synthetic oligonucleotide
ccugagauaagcuccuuau

SEQ ID NO: 1002765 - RNA, 19 nt, Artificial Sequence
  Description of Artificial Sequence: Synthetic oligonucleotide
ggggucuguuuucaacgga

SEQ ID NO: 1002766 - RNA, 19 nt, Artificial Sequence
  Description of Artificial Sequence: Synthetic oligonucleotide
ccagaacgugaaccacugg

SEQ ID NO: 1002767 - RNA, 19 nt, Artificial Sequence
  Description of Artificial Sequence: Synthetic oligonucleotide
cagagcagacguuccaaau

SEQ ID NO: 1002768 - RNA, 19 nt, Artificial Sequence
  Description of Artificial Sequence: Synthetic oligonucleotide
cccgaccagcuaaaggcac

SEQ ID NO: 1002769 - RNA, 19 nt, Artificial Sequence
  Description of Artificial Sequence: Synthetic oligonucleotide
uccuuacgcagggcagggu

SEQ ID NO: 1002770 - RNA, 19 nt, Artificial Sequence
  Description of Artificial Sequence: Synthetic oligonucleotide
gggauauagcggucaccuc

SEQ ID NO: 1002771 - RNA, 19 nt, Artificial Sequence
  Description of Artificial Sequence: Synthetic oligonucleotide
aguucggcccgggguccgg

SEQ ID NO: 1002772 - RNA, 19 nt, Artificial Sequence
  Description of Artificial Sequence: Synthetic oligonucleotide
gcgcgcaacgggugcauug

SEQ ID NO: 1002773 - RNA, 19 nt, Artificial Sequence
  Description of Artificial Sequence: Synthetic oligonucleotide
gcgcaacgggugcauuggg

SEQ ID NO: 1002774 - RNA, 19 nt, Artificial Sequence
  Description of Artificial Sequence: Synthetic oligonucleotide
caucgaaaccguucagguu

SEQ ID NO: 1002775 - RNA, 19 nt, Artificial Sequence
  Description of Artificial Sequence: Synthetic oligonucleotide
gcggucaccuccagguuug

SEQ ID NO: 1002776 - RNA, 19 nt, Artificial Sequence
  Description of Artificial Sequence: Synthetic oligonucleotide
cccgcaugggcgagggagc

SEQ ID NO: 1002777 - RNA, 19 nt, Artificial Sequence
  Description of Artificial Sequence: Synthetic oligonucleotide
guucgggacugcgccgggc

SEQ ID NO: 1002778 - RNA, 19 nt, Artificial Sequence
  Description of Artificial Sequence: Synthetic oligonucleotide
ugccaccgcuugccagaug

SEQ ID NO: 1002779 - RNA, 19 nt, Artificial Sequence
  Description of Artificial Sequence: Synthetic oligonucleotide
cuacacuggcuuucucccu

SEQ ID NO: 1002780 - RNA, 19 nt, Artificial Sequence
  Description of Artificial Sequence: Synthetic oligonucleotide
ggugcgugagucugccgaa

SEQ ID NO: 1002781 - RNA, 19 nt, Artificial Sequence
  Description of Artificial Sequence: Synthetic oligonucleotide
ggauuccuugguggauaag

SEQ ID NO: 1002782 - RNA, 19 nt, Artificial Sequence
  Description of Artificial Sequence: Synthetic oligonucleotide
gugcgugagucugccgaac

SEQ ID NO: 1002783 - RNA, 19 nt, Artificial Sequence
  Description of Artificial Sequence: Synthetic oligonucleotide
gugucggucacuggugccu

SEQ ID NO: 1002784 - RNA, 19 nt, Artificial Sequence
  Description of Artificial Sequence: Synthetic oligonucleotide
cgguacgcggccuucccag

SEQ ID NO: 1002785 - RNA, 19 nt, Artificial Sequence
  Description of Artificial Sequence: Synthetic oligonucleotide
cgaguucgggacugcgccg

SEQ ID NO: 1002786 - RNA, 19 nt, Artificial Sequence
  Description of Artificial Sequence: Synthetic oligonucleotide
ggaguucggcccggggucc

SEQ ID NO: 1002787 - RNA, 19 nt, Artificial Sequence
  Description of Artificial Sequence: Synthetic oligonucleotide
cagcgcaacccacauacuu

SEQ ID NO: 1002788 - RNA, 19 nt, Artificial Sequence
  Description of Artificial Sequence: Synthetic oligonucleotide
ggcgucuccccgucuucug

SEQ ID NO: 1002789 - RNA, 19 nt, Artificial Sequence
  Description of Artificial Sequence: Synthetic oligonucleotide
gcgaccgaguucgggacug

SEQ ID NO: 1002790 - RNA, 19 nt, Artificial Sequence
  Description of Artificial Sequence: Synthetic oligonucleotide
ggacucgggcugugugacc

SEQ ID NO: 1002791 - RNA, 19 nt, Artificial Sequence
  Description of Artificial Sequence: Synthetic oligonucleotide
gagccgagugacuggccau

SEQ ID NO: 1002792 - RNA, 19 nt, Artificial Sequence
  Description of Artificial Sequence: Synthetic oligonucleotide
uugcgcugccagcgcgcaa

SEQ ID NO: 1002793 - RNA, 19 nt, Artificial Sequence
  Description of Artificial Sequence: Synthetic oligonucleotide
cgucuccccgucuucuggc

SEQ ID NO: 1002794 - RNA, 19 nt, Artificial Sequence
  Description of Artificial Sequence: Synthetic oligonucleotide
cgaccagcuaaaggcacgc

SEQ ID NO: 1002795 - RNA, 19 nt, Artificial Sequence
  Description of Artificial Sequence: Synthetic oligonucleotide
gcuacccgaacaucauggu

SEQ ID NO: 1002796 - RNA, 19 nt, Artificial Sequence
  Description of Artificial Sequence: Synthetic oligonucleotide
cgcgcaacgggugcauugg

SEQ ID NO: 1002797 - RNA, 19 nt, Artificial Sequence
  Description of Artificial Sequence: Synthetic oligonucleotide
gggucuguuuucaacggau

SEQ ID NO: 1002798 - RNA, 19 nt, Artificial Sequence
  Description of Artificial Sequence: Synthetic oligonucleotide
acucgggcugugugaccuu

SEQ ID NO: 1002799 - RNA, 19 nt, Artificial Sequence
  Description of Artificial Sequence: Synthetic oligonucleotide
gagcuuacucgagccgagu

SEQ ID NO: 1002800 - RNA, 19 nt, Artificial Sequence
  Description of Artificial Sequence: Synthetic oligonucleotide
ccaccgcuugccagaugcc

SEQ ID NO: 1002801 - RNA, 19 nt, Artificial Sequence
  Description of Artificial Sequence: Synthetic oligonucleotide
ccgcuugccagaugccguc

SEQ ID NO: 1002802 - RNA, 19 nt, Artificial Sequence
  Description of Artificial Sequence: Synthetic oligonucleotide
gucuccccgucuucuggcu

SEQ ID NO: 1002803 - RNA, 19 nt, Artificial Sequence
  Description of Artificial Sequence: Synthetic oligonucleotide
caggcguggcuuucuggcu

SEQ ID NO: 1002804 - RNA, 19 nt, Artificial Sequence
  Description of Artificial Sequence: Synthetic oligonucleotide
cgggcuguuaauucuuaaa

SEQ ID NO: 1002805 - RNA, 19 nt, Artificial Sequence
  Description of Artificial Sequence: Synthetic oligonucleotide
guucggcccgggguccggc

SEQ ID NO: 1002806 - RNA, 19 nt, Artificial Sequence
  Description of Artificial Sequence: Synthetic oligonucleotide
ccccgaccagcuaaaggca

SEQ ID NO: 1002807 - RNA, 19 nt, Artificial Sequence
  Description of Artificial Sequence: Synthetic oligonucleotide
agucgcucucgaacacgaa

SEQ ID NO: 1002808 - RNA, 19 nt, Artificial Sequence
  Description of Artificial Sequence: Synthetic oligonucleotide
gugugaccuuugagcucag

SEQ ID NO: 1002809 - RNA, 19 nt, Artificial Sequence
  Description of Artificial Sequence: Synthetic oligonucleotide
ggcuggacccaggcguggc

SEQ ID NO: 1002810 - RNA, 19 nt, Artificial Sequence
  Description of Artificial Sequence: Synthetic oligonucleotide
cggaugugucggucacugg

SEQ ID NO: 1002811 - RNA, 19 nt, Artificial Sequence
  Description of Artificial Sequence: Synthetic oligonucleotide
aagcaacgccacagccgua

SEQ ID NO: 1002812 - RNA, 19 nt, Artificial Sequence
  Description of Artificial Sequence: Synthetic oligonucleotide
gguuuuccacugagccuga

SEQ ID NO: 1002813 - RNA, 19 nt, Artificial Sequence
  Description of Artificial Sequence: Synthetic oligonucleotide
cgcguccaguuuaaggaga

SEQ ID NO: 1002814 - RNA, 19 nt, Artificial Sequence
  Description of Artificial Sequence: Synthetic oligonucleotide
ggccgguggcuuccuucgc

SEQ ID NO: 1002815 - RNA, 19 nt, Artificial Sequence
  Description of Artificial Sequence: Synthetic oligonucleotide
gugggcgucuccccgucuu

SEQ ID NO: 1002816 - RNA, 19 nt, Artificial Sequence
  Description of Artificial Sequence: Synthetic oligonucleotide
gcgccaugacagugccuac

SEQ ID NO: 1002817 - RNA, 19 nt, Artificial Sequence
  Description of Artificial Sequence: Synthetic oligonucleotide
gagcugcacuucagcguua

SEQ ID NO: 1002818 - RNA, 19 nt, Artificial Sequence
  Description of Artificial Sequence: Synthetic oligonucleotide
cgcuuugcgcugccagcgc

SEQ ID NO: 1002819 - RNA, 19 nt, Artificial Sequence
  Description of Artificial Sequence: Synthetic oligonucleotide
ccgggcuguuaauucuuaa

SEQ ID NO: 1002820 - RNA, 19 nt, Artificial Sequence
  Description of Artificial Sequence: Synthetic oligonucleotide
agcgcgcaacgggugcauu

SEQ ID NO: 1002821 - RNA, 19 nt, Artificial Sequence
  Description of Artificial Sequence: Synthetic oligonucleotide
ggccaugguuggguacuuc

SEQ ID NO: 1002822 - RNA, 19 nt, Artificial Sequence
  Description of Artificial Sequence: Synthetic oligonucleotide
cuggggcauucugagguuu

SEQ ID NO: 1002823 - RNA, 19 nt, Artificial Sequence
  Description of Artificial Sequence: Synthetic oligonucleotide
gcgccgggcuucugggcuc

SEQ ID NO: 1002824 - RNA, 19 nt, Artificial Sequence
  Description of Artificial Sequence: Synthetic oligonucleotide
ccguccaucuggggcccag

SEQ ID NO: 1002825 - RNA, 19 nt, Artificial Sequence
  Description of Artificial Sequence: Synthetic oligonucleotide
gccacucaguguggcuaca

SEQ ID NO: 1002826 - RNA, 19 nt, Artificial Sequence
  Description of Artificial Sequence: Synthetic oligonucleotide
cgaacugcgccaugacagu

SEQ ID NO: 1002827 - RNA, 19 nt, Artificial Sequence
  Description of Artificial Sequence: Synthetic oligonucleotide
cccgaacaucaugguggug

SEQ ID NO: 1002828 - RNA, 19 nt, Artificial Sequence
  Description of Artificial Sequence: Synthetic oligonucleotide
cucgggcugugugaccuuu

SEQ ID NO: 1002829 - RNA, 19 nt, Artificial Sequence
  Description of Artificial Sequence: Synthetic oligonucleotide
gggcaagaggcgaccgagu

SEQ ID NO: 1002830 - RNA, 19 nt, Artificial Sequence
  Description of Artificial Sequence: Synthetic oligonucleotide
ccagcgcgcaacgggugca

SEQ ID NO: 1002831 - RNA, 19 nt, Artificial Sequence
  Description of Artificial Sequence: Synthetic oligonucleotide
gccggcgcugugagaucug

SEQ ID NO: 1002832 - RNA, 19 nt, Artificial Sequence
  Description of Artificial Sequence: Synthetic oligonucleotide
gggcgucuccccgucuucu

SEQ ID NO: 1002833 - RNA, 19 nt, Artificial Sequence
  Description of Artificial Sequence: Synthetic oligonucleotide
ccauguuccgaagccguuu

SEQ ID NO: 1002834 - RNA, 19 nt, Artificial Sequence
  Description of Artificial Sequence: Synthetic oligonucleotide
gcauuggggaugggcgcgu

SEQ ID NO: 1002835 - RNA, 19 nt, Artificial Sequence
  Description of Artificial Sequence: Synthetic oligonucleotide
ggcacgccgggcuguuaau

SEQ ID NO: 1002836 - RNA, 19 nt, Artificial Sequence
  Description of Artificial Sequence: Synthetic oligonucleotide
ccggccggcgcugugagau

SEQ ID NO: 1002837 - RNA, 19 nt, Artificial Sequence
  Description of Artificial Sequence: Synthetic oligonucleotide
cguccaguuuaaggagaga

SEQ ID NO: 1002838 - RNA, 19 nt, Artificial Sequence
  Description of Artificial Sequence: Synthetic oligonucleotide
gcccagcgcaacccacaua

SEQ ID NO: 1002839 - RNA, 19 nt, Artificial Sequence
  Description of Artificial Sequence: Synthetic oligonucleotide
gggacugcgccgggcuucu

SEQ ID NO: 1002840 - RNA, 19 nt, Artificial Sequence
  Description of Artificial Sequence: Synthetic oligonucleotide
cgaccgaguucgggacugc

SEQ ID NO: 1002841 - RNA, 19 nt, Artificial Sequence
  Description of Artificial Sequence: Synthetic oligonucleotide
ccagcgcaacccacauacu

SEQ ID NO: 1002842 - RNA, 19 nt, Artificial Sequence
  Description of Artificial Sequence: Synthetic oligonucleotide
gcacgccgggcuguuaauu

SEQ ID NO: 1002843 - RNA, 19 nt, Artificial Sequence
  Description of Artificial Sequence: Synthetic oligonucleotide
cgaacacgaacugcgccau

SEQ ID NO: 1002844 - RNA, 19 nt, Artificial Sequence
  Description of Artificial Sequence: Synthetic oligonucleotide
gccacacauugaccacguu

SEQ ID NO: 1002845 - RNA, 19 nt, Artificial Sequence
  Description of Artificial Sequence: Synthetic oligonucleotide
cagcgcgcaacgggugcau

SEQ ID NO: 1002846 - RNA, 19 nt, Artificial Sequence
  Description of Artificial Sequence: Synthetic oligonucleotide
ccacucaguguggcuacau

SEQ ID NO: 1002847 - RNA, 19 nt, Artificial Sequence
  Description of Artificial Sequence: Synthetic oligonucleotide
ccgcaugggcgagggagcu

SEQ ID NO: 1002848 - RNA, 19 nt, Artificial Sequence
  Description of Artificial Sequence: Synthetic oligonucleotide
ggccugagauaagcuccuu

SEQ ID NO: 1002849 - RNA, 19 nt, Artificial Sequence
  Description of Artificial Sequence: Synthetic oligonucleotide
gggguccggccggcgcugu

SEQ ID NO: 1002850 - RNA, 19 nt, Artificial Sequence
  Description of Artificial Sequence: Synthetic oligonucleotide
  modified_base (3)..(3): a, c, u, g, unknown or other
aanaaaagcacagaagggc

SEQ ID NO: 1002851 - RNA, 19 nt, Artificial Sequence
  Description of Artificial Sequence: Synthetic oligonucleotide
aauagcagcaugcaggcac

SEQ ID NO: 1002852 - RNA, 19 nt, Artificial Sequence
  Description of Artificial Sequence: Synthetic oligonucleotide
auaaagaauggccagacuc

SEQ ID NO: 1002853 - RNA, 19 nt, Artificial Sequence
  Description of Artificial Sequence: Synthetic oligonucleotide
ucuacuuuuaaccauggug

SEQ ID NO: 1002854 - RNA, 19 nt, Artificial Sequence
  Description of Artificial Sequence: Synthetic oligonucleotide
uuuaggaugacuuaggaau

SEQ ID NO: 1002855 - RNA, 19 nt, Artificial Sequence
  Description of Artificial Sequence: Synthetic oligonucleotide
acaggcuugucuuugagcc

SEQ ID NO: 1002856 - RNA, 19 nt, Artificial Sequence
  Description of Artificial Sequence: Synthetic oligonucleotide
uuuaggauaauacuuagua

SEQ ID NO: 1002857 - RNA, 19 nt, Artificial Sequence
  Description of Artificial Sequence: Synthetic oligonucleotide
  modified_base (18)..(18): a, c, u, g, unknown or other
aaaagaaagaaagaaaana

SEQ ID NO: 1002858 - RNA, 19 nt, Artificial Sequence
  Description of Artificial Sequence: Synthetic oligonucleotide
gaaacguacaucgacagcg

SEQ ID NO: 1002859 - RNA, 19 nt, Artificial Sequence
  Description of Artificial Sequence: Synthetic oligonucleotide
  modified_base (9)..(9): a, c, u, g, unknown or other
aaagaaaanaaaagcacag

SEQ ID NO: 1002860 - RNA, 19 nt, Artificial Sequence
  Description of Artificial Sequence: Synthetic oligonucleotide
  modified_base (4)..(4): a, c, u, g, unknown or other
aaanaaaagcacagaaggg

SEQ ID NO: 1002861 - RNA, 19 nt, Artificial Sequence
  Description of Artificial Sequence: Synthetic oligonucleotide
uaggauaauacuuaguaac

SEQ ID NO: 1002862 - RNA, 19 nt, Artificial Sequence
  Description of Artificial Sequence: Synthetic oligonucleotide
aagggcuuaaauugcauuc

SEQ ID NO: 1002863 - RNA, 19 nt, Artificial Sequence
  Description of Artificial Sequence: Synthetic oligonucleotide
ugagaucugguuuucaccg

SEQ ID NO: 1002864 - RNA, 19 nt, Artificial Sequence
  Description of Artificial Sequence: Synthetic oligonucleotide
agaagaauggcacauagga

SEQ ID NO: 1002865 - RNA, 19 nt, Artificial Sequence
  Description of Artificial Sequence: Synthetic oligonucleotide
uuaacuuuaggauaauacu

SEQ ID NO: 1002866 - RNA, 19 nt, Artificial Sequence
  Description of Artificial Sequence: Synthetic oligonucleotide
auauagaaggcuuuaagcu

SEQ ID NO: 1002867 - RNA, 19 nt, Artificial Sequence
  Description of Artificial Sequence: Synthetic oligonucleotide
uuaggugugucauacaggc

SEQ ID NO: 1002868 - RNA, 19 nt, Artificial Sequence
  Description of Artificial Sequence: Synthetic oligonucleotide
agauacagggaauaucagc

SEQ ID NO: 1002869 - RNA, 19 nt, Artificial Sequence
  Description of Artificial Sequence: Synthetic oligonucleotide
aaggaugggucacugauag

SEQ ID NO: 1002870 - RNA, 19 nt, Artificial Sequence
  Description of Artificial Sequence: Synthetic oligonucleotide
uguugcacagacaauagca

SEQ ID NO: 1002871 - RNA, 19 nt, Artificial Sequence
  Description of Artificial Sequence: Synthetic oligonucleotide
uagccaagcacuuugaagc

SEQ ID NO: 1002872 - RNA, 19 nt, Artificial Sequence
  Description of Artificial Sequence: Synthetic oligonucleotide
cuuaaauugcauuccagag

SEQ ID NO: 1002873 - RNA, 19 nt, Artificial Sequence
  Description of Artificial Sequence: Synthetic oligonucleotide
ucaacuauccuuuucuugu

SEQ ID NO: 1002874 - RNA, 19 nt, Artificial Sequence
  Description of Artificial Sequence: Synthetic oligonucleotide
aaagacacuaauauuauau

SEQ ID NO: 1002875 - RNA, 19 nt, Artificial Sequence
  Description of Artificial Sequence: Synthetic oligonucleotide
aguucaaugcacuugagaa

SEQ ID NO: 1002876 - RNA, 19 nt, Artificial Sequence
  Description of Artificial Sequence: Synthetic oligonucleotide
aagaacguauuguaauguc

SEQ ID NO: 1002877 - RNA, 19 nt, Artificial Sequence
  Description of Artificial Sequence: Synthetic oligonucleotide
  modified_base (16)..(16): a, c, u, g, unknown or other
aagaaagaaagaaaanaaa

SEQ ID NO: 1002878 - RNA, 19 nt, Artificial Sequence
  Description of Artificial Sequence: Synthetic oligonucleotide
aacccuaagaguuuucacu

SEQ ID NO: 1002879 - RNA, 19 nt, Artificial Sequence
  Description of Artificial Sequence: Synthetic oligonucleotide
augagaucugguuuucacc

SEQ ID NO: 1002880 - RNA, 19 nt, Artificial Sequence
  Description of Artificial Sequence: Synthetic oligonucleotide
aaugacucaugaccacagc

SEQ ID NO: 1002881 - RNA, 19 nt, Artificial Sequence
  Description of Artificial Sequence: Synthetic oligonucleotide
cauauaucugaccaacucc

SEQ ID NO: 1002882 - RNA, 19 nt, Artificial Sequence
  Description of Artificial Sequence: Synthetic oligonucleotide
aaggauccaguccacgaac

SEQ ID NO: 1002883 - RNA, 19 nt, Artificial Sequence
  Description of Artificial Sequence: Synthetic oligonucleotide
uuucacuuaacuuuaggau

SEQ ID NO: 1002884 - RNA, 19 nt, Artificial Sequence
  Description of Artificial Sequence: Synthetic oligonucleotide
ugugggguugcuuuuacag

SEQ ID NO: 1002885 - RNA, 19 nt, Artificial Sequence
  Description of Artificial Sequence: Synthetic oligonucleotide
gaaucuguugcacagacaa

SEQ ID NO: 1002886 - RNA, 19 nt, Artificial Sequence
  Description of Artificial Sequence: Synthetic oligonucleotide
agcacuuugaagccacacc

SEQ ID NO: 1002887 - RNA, 19 nt, Artificial Sequence
  Description of Artificial Sequence: Synthetic oligonucleotide
uuacagagggcuuucaacu

SEQ ID NO: 1002888 - RNA, 19 nt, Artificial Sequence
  Description of Artificial Sequence: Synthetic oligonucleotide
uggagcugcacuuagaaau

SEQ ID NO: 1002889 - RNA, 19 nt, Artificial Sequence
  Description of Artificial Sequence: Synthetic oligonucleotide
cuggaagagacuucaauag

SEQ ID NO: 1002890 - RNA, 19 nt, Artificial Sequence
  Description of Artificial Sequence: Synthetic oligonucleotide
ugccugauaaagaauggcc

SEQ ID NO: 1002891 - RNA, 19 nt, Artificial Sequence
  Description of Artificial Sequence: Synthetic oligonucleotide
aaauggagcugcaagacug

SEQ ID NO: 1002892 - RNA, 19 nt, Artificial Sequence
  Description of Artificial Sequence: Synthetic oligonucleotide
  modified_base (2)..(2): a, c, u, g, unknown or other
anaaaagcacagaagggcu

SEQ ID NO: 1002893 - RNA, 19 nt, Artificial Sequence
  Description of Artificial Sequence: Synthetic oligonucleotide
uuuugagcugugaauauaa

SEQ ID NO: 1002894 - RNA, 19 nt, Artificial Sequence
  Description of Artificial Sequence: Synthetic oligonucleotide
agaacguauuguaaugucc

SEQ ID NO: 1002895 - RNA, 19 nt, Artificial Sequence
  Description of Artificial Sequence: Synthetic oligonucleotide
aacguacaucgacagcgcc

SEQ ID NO: 1002896 - RNA, 19 nt, Artificial Sequence
  Description of Artificial Sequence: Synthetic oligonucleotide
agggcauugagcuccgacc

SEQ ID NO: 1002897 - RNA, 19 nt, Artificial Sequence
  Description of Artificial Sequence: Synthetic oligonucleotide
guucucaugugcuuggcgg

SEQ ID NO: 1002898 - RNA, 19 nt, Artificial Sequence
  Description of Artificial Sequence: Synthetic oligonucleotide
cugugaauauaauuuauuc

SEQ ID NO: 1002899 - RNA, 19 nt, Artificial Sequence
  Description of Artificial Sequence: Synthetic oligonucleotide
caugaguauccccacaagg

SEQ ID NO: 1002900 - RNA, 19 nt, Artificial Sequence
  Description of Artificial Sequence: Synthetic oligonucleotide
agugccaugaacaugccuc

SEQ ID NO: 1002901 - RNA, 19 nt, Artificial Sequence
  Description of Artificial Sequence: Synthetic oligonucleotide
agaauuaggauuccacuga

SEQ ID NO: 1002902 - RNA, 19 nt, Artificial Sequence
  Description of Artificial Sequence: Synthetic oligonucleotide
gagagaacuguugaaaccc

SEQ ID NO: 1002903 - RNA, 19 nt, Artificial Sequence
  Description of Artificial Sequence: Synthetic oligonucleotide
uuuacagagggcuuucaac

SEQ ID NO: 1002904 - RNA, 19 nt, Artificial Sequence
  Description of Artificial Sequence: Synthetic oligonucleotide
gaccaugugauauugggca

SEQ ID NO: 1002905 - RNA, 19 nt, Artificial Sequence
  Description of Artificial Sequence: Synthetic oligonucleotide
uagaugucuucaaauggag

SEQ ID NO: 1002906 - RNA, 19 nt, Artificial Sequence
  Description of Artificial Sequence: Synthetic oligonucleotide
ugaacacggaguucaaugc

SEQ ID NO: 1002907 - RNA, 19 nt, Artificial Sequence
  Description of Artificial Sequence: Synthetic oligonucleotide
auagccaagcacuuugaag

SEQ ID NO: 1002908 - RNA, 19 nt, Artificial Sequence
  Description of Artificial Sequence: Synthetic oligonucleotide
ucaccagugacauagccaa

SEQ ID NO: 1002909 - RNA, 19 nt, Artificial Sequence
  Description of Artificial Sequence: Synthetic oligonucleotide
aaagaacguauuguaaugu

SEQ ID NO: 1002910 - RNA, 19 nt, Artificial Sequence
  Description of Artificial Sequence: Synthetic oligonucleotide
uacuuuuaaccaugguggg

SEQ ID NO: 1002911 - RNA, 19 nt, Artificial Sequence
  Description of Artificial Sequence: Synthetic oligonucleotide
gaugggauugcugacaaac

SEQ ID NO: 1002912 - RNA, 19 nt, Artificial Sequence
  Description of Artificial Sequence: Synthetic oligonucleotide
uuucguggucaucaagagg

SEQ ID NO: 1002913 - RNA, 19 nt, Artificial Sequence
  Description of Artificial Sequence: Synthetic oligonucleotide
auaucugaccaacucccac

SEQ ID NO: 1002914 - RNA, 19 nt, Artificial Sequence
  Description of Artificial Sequence: Synthetic oligonucleotide
uuaggauaauacuuaguaa

SEQ ID NO: 1002915 - RNA, 19 nt, Artificial Sequence
  Description of Artificial Sequence: Synthetic oligonucleotide
uucaaugcacuugagaaaa

SEQ ID NO: 1002916 - RNA, 19 nt, Artificial Sequence
  Description of Artificial Sequence: Synthetic oligonucleotide
caucaagaggaacaggagc

SEQ ID NO: 1002917 - RNA, 19 nt, Artificial Sequence
  Description of Artificial Sequence: Synthetic oligonucleotide
uuuucguggucaucaagag

SEQ ID NO: 1002918 - RNA, 19 nt, Artificial Sequence
  Description of Artificial Sequence: Synthetic oligonucleotide
uggguuagaacuuuaggau

SEQ ID NO: 1002919 - RNA, 19 nt, Artificial Sequence
  Description of Artificial Sequence: Synthetic oligonucleotide
cagaauuaggauuccacug

SEQ ID NO: 1002920 - RNA, 19 nt, Artificial Sequence
  Description of Artificial Sequence: Synthetic oligonucleotide
uccaauugcaaugcaggcg

SEQ ID NO: 1002921 - RNA, 19 nt, Artificial Sequence
  Description of Artificial Sequence: Synthetic oligonucleotide
gaacuuuaggaugacuuag

SEQ ID NO: 1002922 - RNA, 19 nt, Artificial Sequence
  Description of Artificial Sequence: Synthetic oligonucleotide
uggcacauaggaaaaugcc

SEQ ID NO: 1002923 - RNA, 19 nt, Artificial Sequence
  Description of Artificial Sequence: Synthetic oligonucleotide
uugagcuccgaccauguga

SEQ ID NO: 1002924 - RNA, 19 nt, Artificial Sequence
  Description of Artificial Sequence: Synthetic oligonucleotide
auuguaauguccuguggcu

SEQ ID NO: 1002925 - RNA, 19 nt, Artificial Sequence
  Description of Artificial Sequence: Synthetic oligonucleotide
ugcacuuagaaaugacuca

SEQ ID NO: 1002926 - RNA, 19 nt, Artificial Sequence
  Description of Artificial Sequence: Synthetic oligonucleotide
aacacggaguucaaugcac

SEQ ID NO: 1002927 - RNA, 19 nt, Artificial Sequence
  Description of Artificial Sequence: Synthetic oligonucleotide
cugaacacggaguucaaug

SEQ ID NO: 1002928 - RNA, 19 nt, Artificial Sequence
  Description of Artificial Sequence: Synthetic oligonucleotide
guuuucacuuaacuuuagg

SEQ ID NO: 1002929 - RNA, 19 nt, Artificial Sequence
  Description of Artificial Sequence: Synthetic oligonucleotide
augaguauccccacaaggg

SEQ ID NO: 1002930 - RNA, 19 nt, Artificial Sequence
  Description of Artificial Sequence: Synthetic oligonucleotide
aagacacuaauauuauaua

SEQ ID NO: 1002931 - RNA, 19 nt, Artificial Sequence
  Description of Artificial Sequence: Synthetic oligonucleotide
uaggaaucaaugacaguug

SEQ ID NO: 1002932 - RNA, 19 nt, Artificial Sequence
  Description of Artificial Sequence: Synthetic oligonucleotide
gaccacaguuccuacacag

SEQ ID NO: 1002933 - RNA, 19 nt, Artificial Sequence
  Description of Artificial Sequence: Synthetic oligonucleotide
guggguuagaacuuuagga

SEQ ID NO: 1002934 - RNA, 19 nt, Artificial Sequence
  Description of Artificial Sequence: Synthetic oligonucleotide
ugaguauccccacaagggu

SEQ ID NO: 1002935 - RNA, 19 nt, Artificial Sequence
  Description of Artificial Sequence: Synthetic oligonucleotide
cuuagaaaugacucaugac

SEQ ID NO: 1002936 - RNA, 19 nt, Artificial Sequence
  Description of Artificial Sequence: Synthetic oligonucleotide
gaugagaucugguuuucac

SEQ ID NO: 1002937 - RNA, 19 nt, Artificial Sequence
  Description of Artificial Sequence: Synthetic oligonucleotide
acuuggaaagaacguauug

SEQ ID NO: 1002938 - RNA, 19 nt, Artificial Sequence
  Description of Artificial Sequence: Synthetic oligonucleotide
uuuacuuggaaagaacgua

SEQ ID NO: 1002939 - RNA, 19 nt, Artificial Sequence
  Description of Artificial Sequence: Synthetic oligonucleotide
uuaagcuuguucccauuca

SEQ ID NO: 1002940 - RNA, 19 nt, Artificial Sequence
  Description of Artificial Sequence: Synthetic oligonucleotide
cuuucauaucaccagugac

SEQ ID NO: 1002941 - RNA, 19 nt, Artificial Sequence
  Description of Artificial Sequence: Synthetic oligonucleotide
ugggauugcugacaaacac

SEQ ID NO: 1002942 - RNA, 19 nt, Artificial Sequence
  Description of Artificial Sequence: Synthetic oligonucleotide
uccacgaaggauccagucc

SEQ ID NO: 1002943 - RNA, 19 nt, Artificial Sequence
  Description of Artificial Sequence: Synthetic oligonucleotide
acuuaggaaucaaugacag

SEQ ID NO: 1002944 - RNA, 19 nt, Artificial Sequence
  Description of Artificial Sequence: Synthetic oligonucleotide
ugagacauuccacgaagga

SEQ ID NO: 1002945 - RNA, 19 nt, Artificial Sequence
  Description of Artificial Sequence: Synthetic oligonucleotide
ugcauuccagagaucauga

SEQ ID NO: 1002946 - RNA, 19 nt, Artificial Sequence
  Description of Artificial Sequence: Synthetic oligonucleotide
agucugaaaguuguacccc

SEQ ID NO: 1002947 - RNA, 19 nt, Artificial Sequence
  Description of Artificial Sequence: Synthetic oligonucleotide
aaguuguaccccgugauga

SEQ ID NO: 1002948 - RNA, 19 nt, Artificial Sequence
  Description of Artificial Sequence: Synthetic oligonucleotide
agggcuuaaauugcauucc

SEQ ID NO: 1002949 - RNA, 19 nt, Artificial Sequence
  Description of Artificial Sequence: Synthetic oligonucleotide
aggcuuuaagcuuguuccc

SEQ ID NO: 1002950 - RNA, 19 nt, Artificial Sequence
  Description of Artificial Sequence: Synthetic oligonucleotide
aacguauuguaauguccug

SEQ ID NO: 1002951 - RNA, 19 nt, Artificial Sequence
  Description of Artificial Sequence: Synthetic oligonucleotide
cugaaacguacaucgacag

SEQ ID NO: 1002952 - RNA, 19 nt, Artificial Sequence
  Description of Artificial Sequence: Synthetic oligonucleotide
agccauauaucugaccaac

SEQ ID NO: 1002953 - RNA, 19 nt, Artificial Sequence
  Description of Artificial Sequence: Synthetic oligonucleotide
uuaggaugacuuaggaauc

SEQ ID NO: 1002954 - RNA, 19 nt, Artificial Sequence
  Description of Artificial Sequence: Synthetic oligonucleotide
auugcaaugcaggcgagag

SEQ ID NO: 1002955 - RNA, 19 nt, Artificial Sequence
  Description of Artificial Sequence: Synthetic oligonucleotide
augcacuugagaaaacugg

SEQ ID NO: 1002956 - RNA, 19 nt, Artificial Sequence
  Description of Artificial Sequence: Synthetic oligonucleotide
gaguggagaccacaguucc

SEQ ID NO: 1002957 - RNA, 19 nt, Artificial Sequence
  Description of Artificial Sequence: Synthetic oligonucleotide
uaccccgugaugaaaagaa

SEQ ID NO: 1002958 - RNA, 19 nt, Artificial Sequence
  Description of Artificial Sequence: Synthetic oligonucleotide
aauagucacccuugucuga

SEQ ID NO: 1002959 - RNA, 19 nt, Artificial Sequence
  Description of Artificial Sequence: Synthetic oligonucleotide
guauuguaauguccugugg

SEQ ID NO: 1002960 - RNA, 19 nt, Artificial Sequence
  Description of Artificial Sequence: Synthetic oligonucleotide
gggacuaucuuccauggcc

SEQ ID NO: 1002961 - RNA, 19 nt, Artificial Sequence
  Description of Artificial Sequence: Synthetic oligonucleotide
aguaccacaggcuugucuu

SEQ ID NO: 1002962 - RNA, 19 nt, Artificial Sequence
  Description of Artificial Sequence: Synthetic oligonucleotide
auauugggcacagagguga

SEQ ID NO: 1002963 - RNA, 19 nt, Artificial Sequence
  Description of Artificial Sequence: Synthetic oligonucleotide
accacagcuauuguguggg

SEQ ID NO: 1002964 - RNA, 19 nt, Artificial Sequence
  Description of Artificial Sequence: Synthetic oligonucleotide
accagaauuaggauuccac

SEQ ID NO: 1002965 - RNA, 19 nt, Artificial Sequence
  Description of Artificial Sequence: Synthetic oligonucleotide
ugaaacguacaucgacagc

SEQ ID NO: 1002966 - RNA, 19 nt, Artificial Sequence
  Description of Artificial Sequence: Synthetic oligonucleotide
uucauaucaccagugacau

SEQ ID NO: 1002967 - RNA, 19 nt, Artificial Sequence
  Description of Artificial Sequence: Synthetic oligonucleotide
uauugugugggguugcuuu

SEQ ID NO: 1002968 - RNA, 19 nt, Artificial Sequence
  Description of Artificial Sequence: Synthetic oligonucleotide
agaugucuucaaauggagc

SEQ ID NO: 1002969 - RNA, 19 nt, Artificial Sequence
  Description of Artificial Sequence: Synthetic oligonucleotide
aacucccacuggaagagac

SEQ ID NO: 1002970 - RNA, 19 nt, Artificial Sequence
  Description of Artificial Sequence: Synthetic oligonucleotide
cugagaaucagaagccaac

SEQ ID NO: 1002971 - RNA, 19 nt, Artificial Sequence
  Description of Artificial Sequence: Synthetic oligonucleotide
gagaucaugaccuggacau

SEQ ID NO: 1002972 - RNA, 19 nt, Artificial Sequence
  Description of Artificial Sequence: Synthetic oligonucleotide
ggcauuguagcccuggagc

SEQ ID NO: 1002973 - RNA, 19 nt, Artificial Sequence
  Description of Artificial Sequence: Synthetic oligonucleotide
accaugugauauugggcac

SEQ ID NO: 1002974 - RNA, 19 nt, Artificial Sequence
  Description of Artificial Sequence: Synthetic oligonucleotide
gggaauaucagccaccaga

SEQ ID NO: 1002975 - RNA, 19 nt, Artificial Sequence
  Description of Artificial Sequence: Synthetic oligonucleotide
gucaucaagaggaacagga

SEQ ID NO: 1002976 - RNA, 19 nt, Artificial Sequence
  Description of Artificial Sequence: Synthetic oligonucleotide
caagagggccgucagagug

SEQ ID NO: 1002977 - RNA, 19 nt, Artificial Sequence
  Description of Artificial Sequence: Synthetic oligonucleotide
ucagaguaggugacuuugc

SEQ ID NO: 1002978 - RNA, 19 nt, Artificial Sequence
  Description of Artificial Sequence: Synthetic oligonucleotide
guugcaaauccauagcuua

SEQ ID NO: 1002979 - RNA, 19 nt, Artificial Sequence
  Description of Artificial Sequence: Synthetic oligonucleotide
gacuuaggaaucaaugaca

SEQ ID NO: 1002980 - RNA, 19 nt, Artificial Sequence
  Description of Artificial Sequence: Synthetic oligonucleotide
acaugaugagaucugguuu

SEQ ID NO: 1002981 - RNA, 19 nt, Artificial Sequence
  Description of Artificial Sequence: Synthetic oligonucleotide
cgugaugaaaagaaguugc

SEQ ID NO: 1002982 - RNA, 19 nt, Artificial Sequence
  Description of Artificial Sequence: Synthetic oligonucleotide
gugauauugggcacagagg

SEQ ID NO: 1002983 - RNA, 19 nt, Artificial Sequence
  Description of Artificial Sequence: Synthetic oligonucleotide
gguggguuagaacuuuagg

SEQ ID NO: 1002984 - RNA, 19 nt, Artificial Sequence
  Description of Artificial Sequence: Synthetic oligonucleotide
agaacuuuaggaugacuua

SEQ ID NO: 1002985 - RNA, 19 nt, Artificial Sequence
  Description of Artificial Sequence: Synthetic oligonucleotide
gugggacuaucuuccaugg

SEQ ID NO: 1002986 - RNA, 19 nt, Artificial Sequence
  Description of Artificial Sequence: Synthetic oligonucleotide
agagaacuguugaaacccc

SEQ ID NO: 1002987 - RNA, 19 nt, Artificial Sequence
  Description of Artificial Sequence: Synthetic oligonucleotide
cugagacauuccacgaagg

SEQ ID NO: 1002988 - RNA, 19 nt, Artificial Sequence
  Description of Artificial Sequence: Synthetic oligonucleotide
uccagagaucaugaccugg

SEQ ID NO: 1002989 - RNA, 19 nt, Artificial Sequence
  Description of Artificial Sequence: Synthetic oligonucleotide
uggcucagcaagagggccg

SEQ ID NO: 1002990 - RNA, 19 nt, Artificial Sequence
  Description of Artificial Sequence: Synthetic oligonucleotide
uucucaugugcuuggcggc

SEQ ID NO: 1002991 - RNA, 19 nt, Artificial Sequence
  Description of Artificial Sequence: Synthetic oligonucleotide
accagaaauagucacccuu

SEQ ID NO: 1002992 - RNA, 19 nt, Artificial Sequence
  Description of Artificial Sequence: Synthetic oligonucleotide
uaaagacacuaauauuaua

SEQ ID NO: 1002993 - RNA, 19 nt, Artificial Sequence
  Description of Artificial Sequence: Synthetic oligonucleotide
gguacaaaggaacccuaag

SEQ ID NO: 1002994 - RNA, 19 nt, Artificial Sequence
  Description of Artificial Sequence: Synthetic oligonucleotide
aggauaauacuuaguaaca

SEQ ID NO: 1002995 - RNA, 19 nt, Artificial Sequence
  Description of Artificial Sequence: Synthetic oligonucleotide
acuggagcugcacuuagaa

SEQ ID NO: 1002996 - RNA, 19 nt, Artificial Sequence
  Description of Artificial Sequence: Synthetic oligonucleotide
gaguucaaugcacuugaga

SEQ ID NO: 1002997 - RNA, 19 nt, Artificial Sequence
  Description of Artificial Sequence: Synthetic oligonucleotide
accaacucccacuggaaga

SEQ ID NO: 1002998 - RNA, 19 nt, Artificial Sequence
  Description of Artificial Sequence: Synthetic oligonucleotide
acugauagucugaaaguug

SEQ ID NO: 1002999 - RNA, 19 nt, Artificial Sequence
  Description of Artificial Sequence: Synthetic oligonucleotide
uuguaccccgugaugaaaa

SEQ ID NO: 1003000 - RNA, 19 nt, Artificial Sequence
  Description of Artificial Sequence: Synthetic oligonucleotide
gaacccuaagaguuuucac

SEQ ID NO: 1003001 - RNA, 19 nt, Artificial Sequence
  Description of Artificial Sequence: Synthetic oligonucleotide
uguaccccgugaugaaaag

SEQ ID NO: 1003002 - RNA, 19 nt, Artificial Sequence
  Description of Artificial Sequence: Synthetic oligonucleotide
aaguugcugagaaucagaa

SEQ ID NO: 1003003 - RNA, 19 nt, Artificial Sequence
  Description of Artificial Sequence: Synthetic oligonucleotide
caggugagugccaugaaca

SEQ ID NO: 1003004 - RNA, 19 nt, Artificial Sequence
  Description of Artificial Sequence: Synthetic oligonucleotide
gacauuccacgaaggaucc

SEQ ID NO: 1003005 - RNA, 19 nt, Artificial Sequence
  Description of Artificial Sequence: Synthetic oligonucleotide
cugaguccugcgaugacac

SEQ ID NO: 1003006 - RNA, 19 nt, Artificial Sequence
  Description of Artificial Sequence: Synthetic oligonucleotide
agaguuuacuuggaaagaa

SEQ ID NO: 1003007 - RNA, 19 nt, Artificial Sequence
  Description of Artificial Sequence: Synthetic oligonucleotide
gucccauuugcugaacacg

SEQ ID NO: 1003008 - RNA, 19 nt, Artificial Sequence
  Description of Artificial Sequence: Synthetic oligonucleotide
gcuuaaauugcauuccaga

SEQ ID NO: 1003009 - RNA, 19 nt, Artificial Sequence
  Description of Artificial Sequence: Synthetic oligonucleotide
cuauugcugaccugucuug

SEQ ID NO: 1003010 - RNA, 19 nt, Artificial Sequence
  Description of Artificial Sequence: Synthetic oligonucleotide
auacagggaauaucagcca

SEQ ID NO: 1003011 - RNA, 19 nt, Artificial Sequence
  Description of Artificial Sequence: Synthetic oligonucleotide
agugccugauaaagaaugg

SEQ ID NO: 1003012 - RNA, 19 nt, Artificial Sequence
  Description of Artificial Sequence: Synthetic oligonucleotide
gaacacggaguucaaugca

SEQ ID NO: 1003013 - RNA, 19 nt, Artificial Sequence
  Description of Artificial Sequence: Synthetic oligonucleotide
agggguucuggaccaaaag

SEQ ID NO: 1003014 - RNA, 19 nt, Artificial Sequence
  Description of Artificial Sequence: Synthetic oligonucleotide
uccgaccaugugauauugg

SEQ ID NO: 1003015 - RNA, 19 nt, Artificial Sequence
  Description of Artificial Sequence: Synthetic oligonucleotide
uucaccgcggucuacuuuu

SEQ ID NO: 1003016 - RNA, 19 nt, Artificial Sequence
  Description of Artificial Sequence: Synthetic oligonucleotide
gaguuuacuuggaaagaac

SEQ ID NO: 1003017 - RNA, 19 nt, Artificial Sequence
  Description of Artificial Sequence: Synthetic oligonucleotide
uugcugagggguauccugu

SEQ ID NO: 1003018 - RNA, 19 nt, Artificial Sequence
  Description of Artificial Sequence: Synthetic oligonucleotide
ccugauaaagaauggccag

SEQ ID NO: 1003019 - RNA, 19 nt, Artificial Sequence
  Description of Artificial Sequence: Synthetic oligonucleotide
gcagauacagggaauauca

SEQ ID NO: 1003020 - RNA, 19 nt, Artificial Sequence
  Description of Artificial Sequence: Synthetic oligonucleotide
agaacuguugaaaccccag

SEQ ID NO: 1003021 - RNA, 19 nt, Artificial Sequence
  Description of Artificial Sequence: Synthetic oligonucleotide
agugaacagggcacaggcc

SEQ ID NO: 1003022 - RNA, 19 nt, Artificial Sequence
  Description of Artificial Sequence: Synthetic oligonucleotide
acgaacuggaguaccacag

SEQ ID NO: 1003023 - RNA, 19 nt, Artificial Sequence
  Description of Artificial Sequence: Synthetic oligonucleotide
ugaccacagcuauugugug

SEQ ID NO: 1003024 - RNA, 19 nt, Artificial Sequence
  Description of Artificial Sequence: Synthetic oligonucleotide
aauugcaaugcaggcgaga

SEQ ID NO: 1003025 - RNA, 19 nt, Artificial Sequence
  Description of Artificial Sequence: Synthetic oligonucleotide
gaagccacaccgucucccc

SEQ ID NO: 1003026 - RNA, 19 nt, Artificial Sequence
  Description of Artificial Sequence: Synthetic oligonucleotide
gaacguauuguaauguccu

SEQ ID NO: 1003027 - RNA, 19 nt, Artificial Sequence
  Description of Artificial Sequence: Synthetic oligonucleotide
uggaguaccacaggcuugu

SEQ ID NO: 1003028 - RNA, 19 nt, Artificial Sequence
  Description of Artificial Sequence: Synthetic oligonucleotide
ugagggguauccuguagau

SEQ ID NO: 1003029 - RNA, 19 nt, Artificial Sequence
  Description of Artificial Sequence: Synthetic oligonucleotide
gcuuagguggguuagaacu

SEQ ID NO: 1003030 - RNA, 19 nt, Artificial Sequence
  Description of Artificial Sequence: Synthetic oligonucleotide
caugguucucaugugcuug

SEQ ID NO: 1003031 - RNA, 19 nt, Artificial Sequence
  Description of Artificial Sequence: Synthetic oligonucleotide
agagacuucaauagcucca

SEQ ID NO: 1003032 - RNA, 19 nt, Artificial Sequence
  Description of Artificial Sequence: Synthetic oligonucleotide
ccaccugagacauuccacg

SEQ ID NO: 1003033 - RNA, 19 nt, Artificial Sequence
  Description of Artificial Sequence: Synthetic oligonucleotide
ggaugggucacugauaguc

SEQ ID NO: 1003034 - RNA, 19 nt, Artificial Sequence
  Description of Artificial Sequence: Synthetic oligonucleotide
ccaauagcagcaugcaggc

SEQ ID NO: 1003035 - RNA, 19 nt, Artificial Sequence
  Description of Artificial Sequence: Synthetic oligonucleotide
gcaagucauagacauagca

SEQ ID NO: 1003036 - RNA, 19 nt, Artificial Sequence
  Description of Artificial Sequence: Synthetic oligonucleotide
auuccacugaugggauugc

SEQ ID NO: 1003037 - RNA, 19 nt, Artificial Sequence
  Description of Artificial Sequence: Synthetic oligonucleotide
ugagaaaacugggcaaguc

SEQ ID NO: 1003038 - RNA, 19 nt, Artificial Sequence
  Description of Artificial Sequence: Synthetic oligonucleotide
gcggcauacagucaaaaga

SEQ ID NO: 1003039 - RNA, 19 nt, Artificial Sequence
  Description of Artificial Sequence: Synthetic oligonucleotide
acguauuguaauguccugu

SEQ ID NO: 1003040 - RNA, 19 nt, Artificial Sequence
  Description of Artificial Sequence: Synthetic oligonucleotide
ccgaccaugugauauuggg

SEQ ID NO: 1003041 - RNA, 19 nt, Artificial Sequence
  Description of Artificial Sequence: Synthetic oligonucleotide
acuaucuuccauggccauc

SEQ ID NO: 1003042 - RNA, 19 nt, Artificial Sequence
  Description of Artificial Sequence: Synthetic oligonucleotide
caugugauauugggcacag

SEQ ID NO: 1003043 - RNA, 19 nt, Artificial Sequence
  Description of Artificial Sequence: Synthetic oligonucleotide
auagcagauacagggaaua

SEQ ID NO: 1003044 - RNA, 19 nt, Artificial Sequence
  Description of Artificial Sequence: Synthetic oligonucleotide
acagagggcuuucaacuau

SEQ ID NO: 1003045 - RNA, 19 nt, Artificial Sequence
  Description of Artificial Sequence: Synthetic oligonucleotide
guggccaaacagaaggccc

SEQ ID NO: 1003046 - RNA, 19 nt, Artificial Sequence
  Description of Artificial Sequence: Synthetic oligonucleotide
ugccaggugagugccauga

SEQ ID NO: 1003047 - RNA, 19 nt, Artificial Sequence
  Description of Artificial Sequence: Synthetic oligonucleotide
uuccacgaaggauccaguc

SEQ ID NO: 1003048 - RNA, 19 nt, Artificial Sequence
  Description of Artificial Sequence: Synthetic oligonucleotide
uacagagggcuuucaacua

SEQ ID NO: 1003049 - RNA, 19 nt, Artificial Sequence
  Description of Artificial Sequence: Synthetic oligonucleotide
ucaagaggaacaggagcgu

SEQ ID NO: 1003050 - RNA, 19 nt, Artificial Sequence
  Description of Artificial Sequence: Synthetic oligonucleotide
gccauguugaaagggagag

SEQ ID NO: 1003051 - RNA, 19 nt, Artificial Sequence
  Description of Artificial Sequence: Synthetic oligonucleotide
aaauugcauuccagagauc

SEQ ID NO: 1003052 - RNA, 19 nt, Artificial Sequence
  Description of Artificial Sequence: Synthetic oligonucleotide
ggcugaaacguacaucgac

SEQ ID NO: 1003053 - RNA, 19 nt, Artificial Sequence
  Description of Artificial Sequence: Synthetic oligonucleotide
uugcaaugcaggcgagaga

SEQ ID NO: 1003054 - RNA, 19 nt, Artificial Sequence
  Description of Artificial Sequence: Synthetic oligonucleotide
gguucucaugugcuuggcg

SEQ ID NO: 1003055 - RNA, 19 nt, Artificial Sequence
  Description of Artificial Sequence: Synthetic oligonucleotide
aagacagggaggucccauu

SEQ ID NO: 1003056 - RNA, 19 nt, Artificial Sequence
  Description of Artificial Sequence: Synthetic oligonucleotide
uuaaccauggugggacuau

SEQ ID NO: 1003057 - RNA, 19 nt, Artificial Sequence
  Description of Artificial Sequence: Synthetic oligonucleotide
uugagaaaacugggcaagu

SEQ ID NO: 1003058 - RNA, 19 nt, Artificial Sequence
  Description of Artificial Sequence: Synthetic oligonucleotide
augacaguugcaaauccau

SEQ ID NO: 1003059 - RNA, 19 nt, Artificial Sequence
  Description of Artificial Sequence: Synthetic oligonucleotide
acggaguucaaugcacuug

SEQ ID NO: 1003060 - RNA, 19 nt, Artificial Sequence
  Description of Artificial Sequence: Synthetic oligonucleotide
gaugacacccagcagugau

SEQ ID NO: 1003061 - RNA, 19 nt, Artificial Sequence
  Description of Artificial Sequence: Synthetic oligonucleotide
cagcagugauccaauagca

SEQ ID NO: 1003062 - RNA, 19 nt, Artificial Sequence
  Description of Artificial Sequence: Synthetic oligonucleotide
ccugagacauuccacgaag

SEQ ID NO: 1003063 - RNA, 19 nt, Artificial Sequence
  Description of Artificial Sequence: Synthetic oligonucleotide
acgggugugaagaguuuac

SEQ ID NO: 1003064 - RNA, 19 nt, Artificial Sequence
  Description of Artificial Sequence: Synthetic oligonucleotide
ccauauaucugaccaacuc

SEQ ID NO: 1003065 - RNA, 19 nt, Artificial Sequence
  Description of Artificial Sequence: Synthetic oligonucleotide
uuuaaccauggugggacua

SEQ ID NO: 1003066 - RNA, 19 nt, Artificial Sequence
  Description of Artificial Sequence: Synthetic oligonucleotide
cuucccgguggcagaaggc

SEQ ID NO: 1003067 - RNA, 19 nt, Artificial Sequence
  Description of Artificial Sequence: Synthetic oligonucleotide
gggauugcugacaaacacc

SEQ ID NO: 1003068 - RNA, 19 nt, Artificial Sequence
  Description of Artificial Sequence: Synthetic oligonucleotide
ucaugaccuggacaugguu

SEQ ID NO: 1003069 - RNA, 19 nt, Artificial Sequence
  Description of Artificial Sequence: Synthetic oligonucleotide
agggccgucagaguggaga

SEQ ID NO: 1003070 - RNA, 19 nt, Artificial Sequence
  Description of Artificial Sequence: Synthetic oligonucleotide
cacaugaguggagagaaaa

SEQ ID NO: 1003071 - RNA, 19 nt, Artificial Sequence
  Description of Artificial Sequence: Synthetic oligonucleotide
gcgagagaacuguugaaac

SEQ ID NO: 1003072 - RNA, 19 nt, Artificial Sequence
  Description of Artificial Sequence: Synthetic oligonucleotide
ugcuuuuacagagggcuuu

SEQ ID NO: 1003073 - RNA, 19 nt, Artificial Sequence
  Description of Artificial Sequence: Synthetic oligonucleotide
uaggugugucauacaggcu

SEQ ID NO: 1003074 - RNA, 19 nt, Artificial Sequence
  Description of Artificial Sequence: Synthetic oligonucleotide
ucucaugugcuuggcggca

SEQ ID NO: 1003075 - RNA, 19 nt, Artificial Sequence
  Description of Artificial Sequence: Synthetic oligonucleotide
ggcagugccugauaaagaa

SEQ ID NO: 1003076 - RNA, 19 nt, Artificial Sequence
  Description of Artificial Sequence: Synthetic oligonucleotide
gaauuaggauuccacugau

SEQ ID NO: 1003077 - RNA, 19 nt, Artificial Sequence
  Description of Artificial Sequence: Synthetic oligonucleotide
ccgcggucuacuuuuaacc

SEQ ID NO: 1003078 - RNA, 19 nt, Artificial Sequence
  Description of Artificial Sequence: Synthetic oligonucleotide
agcuccgaccaugugauau

SEQ ID NO: 1003079 - RNA, 19 nt, Artificial Sequence
  Description of Artificial Sequence: Synthetic oligonucleotide
ggcggcauacagucaaaag

SEQ ID NO: 1003080 - RNA, 19 nt, Artificial Sequence
  Description of Artificial Sequence: Synthetic oligonucleotide
acgaaggauccaguccacg

SEQ ID NO: 1003081 - RNA, 19 nt, Artificial Sequence
  Description of Artificial Sequence: Synthetic oligonucleotide
auugagcuccgaccaugug

SEQ ID NO: 1003082 - RNA, 19 nt, Artificial Sequence
  Description of Artificial Sequence: Synthetic oligonucleotide
uuagguggguuagaacuuu

SEQ ID NO: 1003083 - RNA, 19 nt, Artificial Sequence
  Description of Artificial Sequence: Synthetic oligonucleotide
agcugugaauauaauuuau

SEQ ID NO: 1003084 - RNA, 19 nt, Artificial Sequence
  Description of Artificial Sequence: Synthetic oligonucleotide
ccaccagaaauagucaccc

SEQ ID NO: 1003085 - RNA, 19 nt, Artificial Sequence
  Description of Artificial Sequence: Synthetic oligonucleotide
accugagacauuccacgaa

SEQ ID NO: 1003086 - RNA, 19 nt, Artificial Sequence
  Description of Artificial Sequence: Synthetic oligonucleotide
uugcuuuuacagagggcuu

SEQ ID NO: 1003087 - RNA, 19 nt, Artificial Sequence
  Description of Artificial Sequence: Synthetic oligonucleotide
uggcugaaacguacaucga

SEQ ID NO: 1003088 - RNA, 19 nt, Artificial Sequence
  Description of Artificial Sequence: Synthetic oligonucleotide
aguugcaaauccauagcuu

SEQ ID NO: 1003089 - RNA, 19 nt, Artificial Sequence
  Description of Artificial Sequence: Synthetic oligonucleotide
gugaagaguuuacuuggaa

SEQ ID NO: 1003090 - RNA, 19 nt, Artificial Sequence
  Description of Artificial Sequence: Synthetic oligonucleotide
gugaagacagggagguccc

SEQ ID NO: 1003091 - RNA, 19 nt, Artificial Sequence
  Description of Artificial Sequence: Synthetic oligonucleotide
cugagaagacagccaugag

SEQ ID NO: 1003092 - RNA, 19 nt, Artificial Sequence
  Description of Artificial Sequence: Synthetic oligonucleotide
gccauuaggugugucauac

SEQ ID NO: 1003093 - RNA, 19 nt, Artificial Sequence
  Description of Artificial Sequence: Synthetic oligonucleotide
aggagcguggccaaacaga

SEQ ID NO: 1003094 - RNA, 19 nt, Artificial Sequence
  Description of Artificial Sequence: Synthetic oligonucleotide
ggaauaucagccaccagaa

SEQ ID NO: 1003095 - RNA, 19 nt, Artificial Sequence
  Description of Artificial Sequence: Synthetic oligonucleotide
caauugcaaugcaggcgag

SEQ ID NO: 1003096 - RNA, 19 nt, Artificial Sequence
  Description of Artificial Sequence: Synthetic oligonucleotide
cguauuguaauguccugug

SEQ ID NO: 1003097 - RNA, 19 nt, Artificial Sequence
  Description of Artificial Sequence: Synthetic oligonucleotide
cacugaugggauugcugac

SEQ ID NO: 1003098 - RNA, 19 nt, Artificial Sequence
  Description of Artificial Sequence: Synthetic oligonucleotide
acaggagcguggccaaaca

SEQ ID NO: 1003099 - RNA, 19 nt, Artificial Sequence
  Description of Artificial Sequence: Synthetic oligonucleotide
cgagagaacuguugaaacc

SEQ ID NO: 1003100 - RNA, 19 nt, Artificial Sequence
  Description of Artificial Sequence: Synthetic oligonucleotide
ggauaauacuuaguaacaa

SEQ ID NO: 1003101 - RNA, 19 nt, Artificial Sequence
  Description of Artificial Sequence: Synthetic oligonucleotide
acuuaacuuuaggauaaua

SEQ ID NO: 1003102 - RNA, 19 nt, Artificial Sequence
  Description of Artificial Sequence: Synthetic oligonucleotide
agacagcacuggcuuaggu

SEQ ID NO: 1003103 - RNA, 19 nt, Artificial Sequence
  Description of Artificial Sequence: Synthetic oligonucleotide
uuucaccgcggucuacuuu

SEQ ID NO: 1003104 - RNA, 19 nt, Artificial Sequence
  Description of Artificial Sequence: Synthetic oligonucleotide
cacgaacuggaguaccaca

SEQ ID NO: 1003105 - RNA, 19 nt, Artificial Sequence
  Description of Artificial Sequence: Synthetic oligonucleotide
ccaagcacuuugaagccac

SEQ ID NO: 1003106 - RNA, 19 nt, Artificial Sequence
  Description of Artificial Sequence: Synthetic oligonucleotide
uggugggacuaucuuccau

SEQ ID NO: 1003107 - RNA, 19 nt, Artificial Sequence
  Description of Artificial Sequence: Synthetic oligonucleotide
agguggguuagaacuuuag

SEQ ID NO: 1003108 - RNA, 19 nt, Artificial Sequence
  Description of Artificial Sequence: Synthetic oligonucleotide
gcugaaacguacaucgaca

SEQ ID NO: 1003109 - RNA, 19 nt, Artificial Sequence
  Description of Artificial Sequence: Synthetic oligonucleotide
ggucccauuugcugaacac

SEQ ID NO: 1003110 - RNA, 19 nt, Artificial Sequence
  Description of Artificial Sequence: Synthetic oligonucleotide
ccugcgaugacacccagca

SEQ ID NO: 1003111 - RNA, 19 nt, Artificial Sequence
  Description of Artificial Sequence: Synthetic oligonucleotide
augcaggcgagagaacugu

SEQ ID NO: 1003112 - RNA, 19 nt, Artificial Sequence
  Description of Artificial Sequence: Synthetic oligonucleotide
gagacauuccacgaaggau

SEQ ID NO: 1003113 - RNA, 19 nt, Artificial Sequence
  Description of Artificial Sequence: Synthetic oligonucleotide
caguugcaaauccauagcu

SEQ ID NO: 1003114 - RNA, 19 nt, Artificial Sequence
  Description of Artificial Sequence: Synthetic oligonucleotide
gacaugguucucaugugcu

SEQ ID NO: 1003115 - RNA, 19 nt, Artificial Sequence
  Description of Artificial Sequence: Synthetic oligonucleotide
uagguggguuagaacuuua

SEQ ID NO: 1003116 - RNA, 19 nt, Artificial Sequence
  Description of Artificial Sequence: Synthetic oligonucleotide
acguacaucgacagcgcca

SEQ ID NO: 1003117 - RNA, 19 nt, Artificial Sequence
  Description of Artificial Sequence: Synthetic oligonucleotide
uuuucaccgcggucuacuu

SEQ ID NO: 1003118 - RNA, 19 nt, Artificial Sequence
  Description of Artificial Sequence: Synthetic oligonucleotide
aggugacgggugugaagag

SEQ ID NO: 1003119 - RNA, 19 nt, Artificial Sequence
  Description of Artificial Sequence: Synthetic oligonucleotide
gccugauaaagaauggcca

SEQ ID NO: 1003120 - RNA, 19 nt, Artificial Sequence
  Description of Artificial Sequence: Synthetic oligonucleotide
gggcauugagcuccgacca

SEQ ID NO: 1003121 - RNA, 19 nt, Artificial Sequence
  Description of Artificial Sequence: Synthetic oligonucleotide
ucguggucaucaagaggaa

SEQ ID NO: 1003122 - RNA, 19 nt, Artificial Sequence
  Description of Artificial Sequence: Synthetic oligonucleotide
aacuggagcugcacuuaga

SEQ ID NO: 1003123 - RNA, 19 nt, Artificial Sequence
  Description of Artificial Sequence: Synthetic oligonucleotide
gcuuucaacuauccuuuuc

SEQ ID NO: 1003124 - RNA, 19 nt, Artificial Sequence
  Description of Artificial Sequence: Synthetic oligonucleotide
ugaccugucuuggcucagc

SEQ ID NO: 1003125 - RNA, 19 nt, Artificial Sequence
  Description of Artificial Sequence: Synthetic oligonucleotide
cuccgaccaugugauauug

SEQ ID NO: 1003126 - RNA, 19 nt, Artificial Sequence
  Description of Artificial Sequence: Synthetic oligonucleotide
agcaggcaaaaggaugggu

SEQ ID NO: 1003127 - RNA, 19 nt, Artificial Sequence
  Description of Artificial Sequence: Synthetic oligonucleotide
cccagcagugauccaauag

SEQ ID NO: 1003128 - RNA, 19 nt, Artificial Sequence
  Description of Artificial Sequence: Synthetic oligonucleotide
ugccuccaauugcaaugca

SEQ ID NO: 1003129 - RNA, 19 nt, Artificial Sequence
  Description of Artificial Sequence: Synthetic oligonucleotide
ucuggaccaaaagccccac

SEQ ID NO: 1003130 - RNA, 19 nt, Artificial Sequence
  Description of Artificial Sequence: Synthetic oligonucleotide
gaguaccacaggcuugucu

SEQ ID NO: 1003131 - RNA, 19 nt, Artificial Sequence
  Description of Artificial Sequence: Synthetic oligonucleotide
cuggaccaaaagccccacc

SEQ ID NO: 1003132 - RNA, 19 nt, Artificial Sequence
  Description of Artificial Sequence: Synthetic oligonucleotide
acugggcaagucauagaca

SEQ ID NO: 1003133 - RNA, 19 nt, Artificial Sequence
  Description of Artificial Sequence: Synthetic oligonucleotide
aggcgagagaacuguugaa

SEQ ID NO: 1003134 - RNA, 19 nt, Artificial Sequence
  Description of Artificial Sequence: Synthetic oligonucleotide
aggauccaguccacgaacu

SEQ ID NO: 1003135 - RNA, 19 nt, Artificial Sequence
  Description of Artificial Sequence: Synthetic oligonucleotide
ugguucucaugugcuuggc

SEQ ID NO: 1003136 - RNA, 19 nt, Artificial Sequence
  Description of Artificial Sequence: Synthetic oligonucleotide
ccaacucccacuggaagag

SEQ ID NO: 1003137 - RNA, 19 nt, Artificial Sequence
  Description of Artificial Sequence: Synthetic oligonucleotide
acacggaguucaaugcacu

SEQ ID NO: 1003138 - RNA, 19 nt, Artificial Sequence
  Description of Artificial Sequence: Synthetic oligonucleotide
ccacgaaggauccagucca

SEQ ID NO: 1003139 - RNA, 19 nt, Artificial Sequence
  Description of Artificial Sequence: Synthetic oligonucleotide
cauagccaagcacuuugaa

SEQ ID NO: 1003140 - RNA, 19 nt, Artificial Sequence
  Description of Artificial Sequence: Synthetic oligonucleotide
caugugcuuggcggcauac

SEQ ID NO: 1003141 - RNA, 19 nt, Artificial Sequence
  Description of Artificial Sequence: Synthetic oligonucleotide
caccugagacauuccacga

SEQ ID NO: 1003142 - RNA, 19 nt, Artificial Sequence
  Description of Artificial Sequence: Synthetic oligonucleotide
gaugggucacugauagucu

SEQ ID NO: 1003143 - RNA, 19 nt, Artificial Sequence
  Description of Artificial Sequence: Synthetic oligonucleotide
caaugcaggcgagagaacu

SEQ ID NO: 1003144 - RNA, 19 nt, Artificial Sequence
  Description of Artificial Sequence: Synthetic oligonucleotide
accccgugaugaaaagaag

SEQ ID NO: 1003145 - RNA, 19 nt, Artificial Sequence
  Description of Artificial Sequence: Synthetic oligonucleotide
ggacuaucuuccauggcca

SEQ ID NO: 1003146 - RNA, 19 nt, Artificial Sequence
  Description of Artificial Sequence: Synthetic oligonucleotide
ccgugaugaaaagaaguug

SEQ ID NO: 1003147 - RNA, 19 nt, Artificial Sequence
  Description of Artificial Sequence: Synthetic oligonucleotide
caccaccugagacauucca

SEQ ID NO: 1003148 - RNA, 19 nt, Artificial Sequence
  Description of Artificial Sequence: Synthetic oligonucleotide
ucaugugcuuggcggcaua

SEQ ID NO: 1003149 - RNA, 19 nt, Artificial Sequence
  Description of Artificial Sequence: Synthetic oligonucleotide
ugacgggugugaagaguuu

SEQ ID NO: 1003150 - RNA, 19 nt, Artificial Sequence
  Description of Artificial Sequence: Synthetic oligonucleotide
caaauggagcugcaagacu

SEQ ID NO: 1003151 - RNA, 19 nt, Artificial Sequence
  Description of Artificial Sequence: Synthetic oligonucleotide
cgaccaugugauauugggc

SEQ ID NO: 1003152 - RNA, 19 nt, Artificial Sequence
  Description of Artificial Sequence: Synthetic oligonucleotide
gcugcuauugcugaccugu

SEQ ID NO: 1003153 - RNA, 19 nt, Artificial Sequence
  Description of Artificial Sequence: Synthetic oligonucleotide
caccagugacauagccaag

SEQ ID NO: 1003154 - RNA, 19 nt, Artificial Sequence
  Description of Artificial Sequence: Synthetic oligonucleotide
ucaauagcuccagggcauu

SEQ ID NO: 1003155 - RNA, 19 nt, Artificial Sequence
  Description of Artificial Sequence: Synthetic oligonucleotide
caauagcuccagggcauug

SEQ ID NO: 1003156 - RNA, 19 nt, Artificial Sequence
  Description of Artificial Sequence: Synthetic oligonucleotide
gguugcuuuuacagagggc

SEQ ID NO: 1003157 - RNA, 19 nt, Artificial Sequence
  Description of Artificial Sequence: Synthetic oligonucleotide
gcaagacugaguccugcga

SEQ ID NO: 1003158 - RNA, 19 nt, Artificial Sequence
  Description of Artificial Sequence: Synthetic oligonucleotide
gacgggugugaagaguuua

SEQ ID NO: 1003159 - RNA, 19 nt, Artificial Sequence
  Description of Artificial Sequence: Synthetic oligonucleotide
gggguugcuuuuacagagg

SEQ ID NO: 1003160 - RNA, 19 nt, Artificial Sequence
  Description of Artificial Sequence: Synthetic oligonucleotide
ggagaccacaguuccuaca

SEQ ID NO: 1003161 - RNA, 19 nt, Artificial Sequence
  Description of Artificial Sequence: Synthetic oligonucleotide
ccuaagaguuuucacuuaa

SEQ ID NO: 1003162 - RNA, 19 nt, Artificial Sequence
  Description of Artificial Sequence: Synthetic oligonucleotide
ccgacaugaugagaucugg

SEQ ID NO: 1003163 - RNA, 19 nt, Artificial Sequence
  Description of Artificial Sequence: Synthetic oligonucleotide
caagacugaguccugcgau

SEQ ID NO: 1003164 - RNA, 19 nt, Artificial Sequence
  Description of Artificial Sequence: Synthetic oligonucleotide
guuuucaccgcggucuacu

SEQ ID NO: 1003165 - RNA, 19 nt, Artificial Sequence
  Description of Artificial Sequence: Synthetic oligonucleotide
cugcgaugacacccagcag

SEQ ID NO: 1003166 - RNA, 19 nt, Artificial Sequence
  Description of Artificial Sequence: Synthetic oligonucleotide
uggcggcauacagucaaaa

SEQ ID NO: 1003167 - RNA, 19 nt, Artificial Sequence
  Description of Artificial Sequence: Synthetic oligonucleotide
ggcgagagaacuguugaaa

SEQ ID NO: 1003168 - RNA, 19 nt, Artificial Sequence
  Description of Artificial Sequence: Synthetic oligonucleotide
cggcauacagucaaaagaa

SEQ ID NO: 1003169 - RNA, 19 nt, Artificial Sequence
  Description of Artificial Sequence: Synthetic oligonucleotide
agagggccgucagagugga

SEQ ID NO: 1003170 - RNA, 19 nt, Artificial Sequence
  Description of Artificial Sequence: Synthetic oligonucleotide
guaccccgugaugaaaaga

SEQ ID NO: 1003171 - RNA, 19 nt, Artificial Sequence
  Description of Artificial Sequence: Synthetic oligonucleotide
cgaacuggaguaccacagg

SEQ ID NO: 1003172 - RNA, 19 nt, Artificial Sequence
  Description of Artificial Sequence: Synthetic oligonucleotide
guuguaccccgugaugaaa

SEQ ID NO: 1003173 - RNA, 19 nt, Artificial Sequence
  Description of Artificial Sequence: Synthetic oligonucleotide
ggagcguggccaaacagaa

SEQ ID NO: 1003174 - RNA, 19 nt, Artificial Sequence
  Description of Artificial Sequence: Synthetic oligonucleotide
gcauuccagagaucaugac

SEQ ID NO: 1003175 - RNA, 19 nt, Artificial Sequence
  Description of Artificial Sequence: Synthetic oligonucleotide
gccgucagaguggagacca

SEQ ID NO: 1003176 - RNA, 19 nt, Artificial Sequence
  Description of Artificial Sequence: Synthetic oligonucleotide
caggcuugucuuugagcca

SEQ ID NO: 1003177 - RNA, 19 nt, Artificial Sequence
  Description of Artificial Sequence: Synthetic oligonucleotide
gugugggguugcuuuuaca

SEQ ID NO: 1003178 - RNA, 19 nt, Artificial Sequence
  Description of Artificial Sequence: Synthetic oligonucleotide
agcccggcugcuauugcug

SEQ ID NO: 1003179 - RNA, 19 nt, Artificial Sequence
  Description of Artificial Sequence: Synthetic oligonucleotide
cauugagcuccgaccaugu

SEQ ID NO: 1003180 - RNA, 19 nt, Artificial Sequence
  Description of Artificial Sequence: Synthetic oligonucleotide
augugcuuggcggcauaca

SEQ ID NO: 1003181 - RNA, 19 nt, Artificial Sequence
  Description of Artificial Sequence: Synthetic oligonucleotide
gcugaccugucuuggcuca

SEQ ID NO: 1003182 - RNA, 19 nt, Artificial Sequence
  Description of Artificial Sequence: Synthetic oligonucleotide
uguagcccuggagcccggc

SEQ ID NO: 1003183 - RNA, 19 nt, Artificial Sequence
  Description of Artificial Sequence: Synthetic oligonucleotide
gcuauugcugaccugucuu

SEQ ID NO: 1003184 - RNA, 19 nt, Artificial Sequence
  Description of Artificial Sequence: Synthetic oligonucleotide
gacuaucuuccauggccau

SEQ ID NO: 1003185 - RNA, 19 nt, Artificial Sequence
  Description of Artificial Sequence: Synthetic oligonucleotide
gaagacagggaggucccau

SEQ ID NO: 1003186 - RNA, 19 nt, Artificial Sequence
  Description of Artificial Sequence: Synthetic oligonucleotide
ucaccgcggucuacuuuua

SEQ ID NO: 1003187 - RNA, 19 nt, Artificial Sequence
  Description of Artificial Sequence: Synthetic oligonucleotide
gagcccggcugcuauugcu

SEQ ID NO: 1003188 - RNA, 19 nt, Artificial Sequence
  Description of Artificial Sequence: Synthetic oligonucleotide
guauccccacaaggguggc

SEQ ID NO: 1003189 - RNA, 19 nt, Artificial Sequence
  Description of Artificial Sequence: Synthetic oligonucleotide
ggcauacagucaaaagaaa

SEQ ID NO: 1003190 - RNA, 19 nt, Artificial Sequence
  Description of Artificial Sequence: Synthetic oligonucleotide
gcacuuagaaaugacucau

SEQ ID NO: 1003191 - RNA, 19 nt, Artificial Sequence
  Description of Artificial Sequence: Synthetic oligonucleotide
gaggucccauuugcugaac

SEQ ID NO: 1003192 - RNA, 19 nt, Artificial Sequence
  Description of Artificial Sequence: Synthetic oligonucleotide
ccuuaaagacacuaauauu

SEQ ID NO: 1003193 - RNA, 19 nt, Artificial Sequence
  Description of Artificial Sequence: Synthetic oligonucleotide
acucaugaccacagcuauu

SEQ ID NO: 1003194 - RNA, 19 nt, Artificial Sequence
  Description of Artificial Sequence: Synthetic oligonucleotide
ccggcugcuauugcugacc

SEQ ID NO: 1003195 - RNA, 19 nt, Artificial Sequence
  Description of Artificial Sequence: Synthetic oligonucleotide
ccccgugaugaaaagaagu

SEQ ID NO: 1003196 - RNA, 19 nt, Artificial Sequence
  Description of Artificial Sequence: Synthetic oligonucleotide
ggagcccggcugcuauugc

SEQ ID NO: 1003197 - RNA, 19 nt, Artificial Sequence
  Description of Artificial Sequence: Synthetic oligonucleotide
ccacagcuauugugugggg

SEQ ID NO: 1003198 - RNA, 19 nt, Artificial Sequence
  Description of Artificial Sequence: Synthetic oligonucleotide
caguuccuacacagccaca

SEQ ID NO: 1003199 - RNA, 19 nt, Artificial Sequence
  Description of Artificial Sequence: Synthetic oligonucleotide
gcguggccaaacagaaggc

SEQ ID NO: 1003200 - RNA, 19 nt, Artificial Sequence
  Description of Artificial Sequence: Synthetic oligonucleotide
cgcggucuacuuuuaacca

SEQ ID NO: 1003201 - RNA, 19 nt, Artificial Sequence
  Description of Artificial Sequence: Synthetic oligonucleotide
ccaugugauauugggcaca

SEQ ID NO: 1003202 - RNA, 19 nt, Artificial Sequence
  Description of Artificial Sequence: Synthetic oligonucleotide
gggucacugauagucugaa

SEQ ID NO: 1003203 - RNA, 19 nt, Artificial Sequence
  Description of Artificial Sequence: Synthetic oligonucleotide
ccacgaacuggaguaccac

SEQ ID NO: 1003204 - RNA, 19 nt, Artificial Sequence
  Description of Artificial Sequence: Synthetic oligonucleotide
caccagaaauagucacccu

SEQ ID NO: 1003205 - RNA, 19 nt, Artificial Sequence
  Description of Artificial Sequence: Synthetic oligonucleotide
gaacaggagcguggccaaa

SEQ ID NO: 1003206 - RNA, 19 nt, Artificial Sequence
  Description of Artificial Sequence: Synthetic oligonucleotide
gguuuucaccgcggucuac

SEQ ID NO: 1003207 - RNA, 19 nt, Artificial Sequence
  Description of Artificial Sequence: Synthetic oligonucleotide
guagcccuggagcccggcu

SEQ ID NO: 1003208 - RNA, 19 nt, Artificial Sequence
  Description of Artificial Sequence: Synthetic oligonucleotide
cguggucaucaagaggaac

SEQ ID NO: 1003209 - RNA, 19 nt, Artificial Sequence
  Description of Artificial Sequence: Synthetic oligonucleotide
cacggaguucaaugcacuu

SEQ ID NO: 1003210 - RNA, 19 nt, Artificial Sequence
  Description of Artificial Sequence: Synthetic oligonucleotide
ggcaaaaggaugggucacu

SEQ ID NO: 1003211 - RNA, 19 nt, Artificial Sequence
  Description of Artificial Sequence: Synthetic oligonucleotide
ggccgucagaguggagacc

SEQ ID NO: 1003212 - RNA, 19 nt, Artificial Sequence
  Description of Artificial Sequence: Synthetic oligonucleotide
gccauauaucugaccaacu

SEQ ID NO: 1003213 - RNA, 19 nt, Artificial Sequence
  Description of Artificial Sequence: Synthetic oligonucleotide
cccuaagaguuuucacuua

SEQ ID NO: 1003214 - RNA, 19 nt, Artificial Sequence
  Description of Artificial Sequence: Synthetic oligonucleotide
caccgcggucuacuuuuaa

SEQ ID NO: 1003215 - RNA, 19 nt, Artificial Sequence
  Description of Artificial Sequence: Synthetic oligonucleotide
gguucucuucagaguaggu

SEQ ID NO: 1003216 - RNA, 19 nt, Artificial Sequence
  Description of Artificial Sequence: Synthetic oligonucleotide
cccggcugcuauugcugac

SEQ ID NO: 1003217 - RNA, 19 nt, Artificial Sequence
  Description of Artificial Sequence: Synthetic oligonucleotide
gagcuccgaccaugugaua

SEQ ID NO: 1003218 - RNA, 19 nt, Artificial Sequence
  Description of Artificial Sequence: Synthetic oligonucleotide
gcccaaguaccagcuggca

SEQ ID NO: 1003219 - RNA, 19 nt, Artificial Sequence
  Description of Artificial Sequence: Synthetic oligonucleotide
cuauugugugggguugcuu

SEQ ID NO: 1003220 - RNA, 19 nt, Artificial Sequence
  Description of Artificial Sequence: Synthetic oligonucleotide
ccgucagaguggagaccac

SEQ ID NO: 1003221 - RNA, 19 nt, Artificial Sequence
  Description of Artificial Sequence: Synthetic oligonucleotide
cacuuaacuuuaggauaau

SEQ ID NO: 1003222 - RNA, 19 nt, Artificial Sequence
  Description of Artificial Sequence: Synthetic oligonucleotide
gcuccgaccaugugauauu

SEQ ID NO: 1003223 - RNA, 19 nt, Artificial Sequence
  Description of Artificial Sequence: Synthetic oligonucleotide
ccccaccagaauuaggauu

SEQ ID NO: 1003224 - RNA, 19 nt, Artificial Sequence
  Description of Artificial Sequence: Synthetic oligonucleotide
ggauuccacugaugggauu

SEQ ID NO: 1003225 - RNA, 19 nt, Artificial Sequence
  Description of Artificial Sequence: Synthetic oligonucleotide
gcacaugaguggagagaaa

SEQ ID NO: 1003226 - RNA, 19 nt, Artificial Sequence
  Description of Artificial Sequence: Synthetic oligonucleotide
cucaugugcuuggcggcau

SEQ ID NO: 1003227 - RNA, 19 nt, Artificial Sequence
  Description of Artificial Sequence: Synthetic oligonucleotide
ggcuuucaacuauccuuuu

SEQ ID NO: 1003228 - RNA, 19 nt, Artificial Sequence
  Description of Artificial Sequence: Synthetic oligonucleotide
cgacaugaugagaucuggu

SEQ ID NO: 1003229 - RNA, 19 nt, Artificial Sequence
  Description of Artificial Sequence: Synthetic oligonucleotide
ccccgacaugaugagaucu

SEQ ID NO: 1003230 - RNA, 19 nt, Artificial Sequence
  Description of Artificial Sequence: Synthetic oligonucleotide
cguacaucgacagcgccau

SEQ ID NO: 1003231 - RNA, 19 nt, Artificial Sequence
  Description of Artificial Sequence: Synthetic oligonucleotide
ccauguugaaagggagagu

SEQ ID NO: 1003232 - RNA, 19 nt, Artificial Sequence
  Description of Artificial Sequence: Synthetic oligonucleotide
gggguauccuguagauguu

SEQ ID NO: 1003233 - RNA, 19 nt, Artificial Sequence
  Description of Artificial Sequence: Synthetic oligonucleotide
ccagggcauugagcuccga

SEQ ID NO: 1003234 - RNA, 19 nt, Artificial Sequence
  Description of Artificial Sequence: Synthetic oligonucleotide
cuaaggaugaagaugaugg

SEQ ID NO: 1003235 - RNA, 19 nt, Artificial Sequence
  Description of Artificial Sequence: Synthetic oligonucleotide
ucuaugugcaauaaccccg

SEQ ID NO: 1003236 - RNA, 19 nt, Artificial Sequence
  Description of Artificial Sequence: Synthetic oligonucleotide
uuuagcaccagcugggugg

SEQ ID NO: 1003237 - RNA, 19 nt, Artificial Sequence
  Description of Artificial Sequence: Synthetic oligonucleotide
ugccauuucaugaaagugg

SEQ ID NO: 1003238 - RNA, 19 nt, Artificial Sequence
  Description of Artificial Sequence: Synthetic oligonucleotide
agguguucgauccagggcc

SEQ ID NO: 1003239 - RNA, 19 nt, Artificial Sequence
  Description of Artificial Sequence: Synthetic oligonucleotide
gaacuuugcuccuaggugg

SEQ ID NO: 1003240 - RNA, 19 nt, Artificial Sequence
  Description of Artificial Sequence: Synthetic oligonucleotide
aagaacgccuuccacggcc

SEQ ID NO: 1003241 - RNA, 19 nt, Artificial Sequence
  Description of Artificial Sequence: Synthetic oligonucleotide
agggcgagaacuuugcucc

SEQ ID NO: 1003242 - RNA, 19 nt, Artificial Sequence
  Description of Artificial Sequence: Synthetic oligonucleotide
uagauguacagccacagca

SEQ ID NO: 1003243 - RNA, 19 nt, Artificial Sequence
  Description of Artificial Sequence: Synthetic oligonucleotide
ugugcaauaaccccgugug

SEQ ID NO: 1003244 - RNA, 19 nt, Artificial Sequence
  Description of Artificial Sequence: Synthetic oligonucleotide
uuagcagaccccuauagcc

SEQ ID NO: 1003245 - RNA, 19 nt, Artificial Sequence
  Description of Artificial Sequence: Synthetic oligonucleotide
acaaugagaagauggcacc

SEQ ID NO: 1003246 - RNA, 19 nt, Artificial Sequence
  Description of Artificial Sequence: Synthetic oligonucleotide
cagucuaugugcaauaacc

SEQ ID NO: 1003247 - RNA, 19 nt, Artificial Sequence
  Description of Artificial Sequence: Synthetic oligonucleotide
aggucaaucgagcuggggc

SEQ ID NO: 1003248 - RNA, 19 nt, Artificial Sequence
  Description of Artificial Sequence: Synthetic oligonucleotide
aauaaccccgugugguugc

SEQ ID NO: 1003249 - RNA, 19 nt, Artificial Sequence
  Description of Artificial Sequence: Synthetic oligonucleotide
uacaaaagcccuuagcaga

SEQ ID NO: 1003250 - RNA, 19 nt, Artificial Sequence
  Description of Artificial Sequence: Synthetic oligonucleotide
uuaguguagcaccuggucc

SEQ ID NO: 1003251 - RNA, 19 nt, Artificial Sequence
  Description of Artificial Sequence: Synthetic oligonucleotide
aacaucacgcucccucugc

SEQ ID NO: 1003252 - RNA, 19 nt, Artificial Sequence
  Description of Artificial Sequence: Synthetic oligonucleotide
  modified_base (3)..(3): a, c, u, g, unknown or other
ucngaacugaccugugugg

SEQ ID NO: 1003253 - RNA, 19 nt, Artificial Sequence
  Description of Artificial Sequence: Synthetic oligonucleotide
auuucacgcucucauacac

SEQ ID NO: 1003254 - RNA, 19 nt, Artificial Sequence
  Description of Artificial Sequence: Synthetic oligonucleotide
ugaggcacgcucaacauca

SEQ ID NO: 1003255 - RNA, 19 nt, Artificial Sequence
  Description of Artificial Sequence: Synthetic oligonucleotide
agguggaucaggucaaucg

SEQ ID NO: 1003256 - RNA, 19 nt, Artificial Sequence
  Description of Artificial Sequence: Synthetic oligonucleotide
agaacuuugcuccuaggug

SEQ ID NO: 1003257 - RNA, 19 nt, Artificial Sequence
  Description of Artificial Sequence: Synthetic oligonucleotide
ugaacccauggacaaaugc

SEQ ID NO: 1003258 - RNA, 19 nt, Artificial Sequence
  Description of Artificial Sequence: Synthetic oligonucleotide
cacacacuaauccaggagc

SEQ ID NO: 1003259 - RNA, 19 nt, Artificial Sequence
  Description of Artificial Sequence: Synthetic oligonucleotide
agucuaugugcaauaaccc

SEQ ID NO: 1003260 - RNA, 19 nt, Artificial Sequence
  Description of Artificial Sequence: Synthetic oligonucleotide
  modified_base (4)..(4): a, c, u, g, unknown or other
aucngaacugaccugugug

SEQ ID NO: 1003261 - RNA, 19 nt, Artificial Sequence
  Description of Artificial Sequence: Synthetic oligonucleotide
ugacaugcugggcaaagcc

SEQ ID NO: 1003262 - RNA, 19 nt, Artificial Sequence
  Description of Artificial Sequence: Synthetic oligonucleotide
ucugcaauuaguguagcac

SEQ ID NO: 1003263 - RNA, 19 nt, Artificial Sequence
  Description of Artificial Sequence: Synthetic oligonucleotide
cauuuggaagaccacagac

SEQ ID NO: 1003264 - RNA, 19 nt, Artificial Sequence
  Description of Artificial Sequence: Synthetic oligonucleotide
auagauguacagccacagc

SEQ ID NO: 1003265 - RNA, 19 nt, Artificial Sequence
  Description of Artificial Sequence: Synthetic oligonucleotide
aggagcagguucaugaacc

SEQ ID NO: 1003266 - RNA, 19 nt, Artificial Sequence
  Description of Artificial Sequence: Synthetic oligonucleotide
gaugauggagaugcggugg

SEQ ID NO: 1003267 - RNA, 19 nt, Artificial Sequence
  Description of Artificial Sequence: Synthetic oligonucleotide
cugcaauuaguguagcacc

SEQ ID NO: 1003268 - RNA, 19 nt, Artificial Sequence
  Description of Artificial Sequence: Synthetic oligonucleotide
ugagguguucgauccaggg

SEQ ID NO: 1003269 - RNA, 19 nt, Artificial Sequence
  Description of Artificial Sequence: Synthetic oligonucleotide
gauagauguacagccacag

SEQ ID NO: 1003270 - RNA, 19 nt, Artificial Sequence
  Description of Artificial Sequence: Synthetic oligonucleotide
caugaaaguggcuagcguc

SEQ ID NO: 1003271 - RNA, 19 nt, Artificial Sequence
  Description of Artificial Sequence: Synthetic oligonucleotide
caauugaugggauagaugu

SEQ ID NO: 1003272 - RNA, 19 nt, Artificial Sequence
  Description of Artificial Sequence: Synthetic oligonucleotide
gacaaugagaagauggcac

SEQ ID NO: 1003273 - RNA, 19 nt, Artificial Sequence
  Description of Artificial Sequence: Synthetic oligonucleotide
acagagacagccaaaugcg

SEQ ID NO: 1003274 - RNA, 19 nt, Artificial Sequence
  Description of Artificial Sequence: Synthetic oligonucleotide
guauuucacgcucucauac

SEQ ID NO: 1003275 - RNA, 19 nt, Artificial Sequence
  Description of Artificial Sequence: Synthetic oligonucleotide
ugggcaauguugucuaucc

SEQ ID NO: 1003276 - RNA, 19 nt, Artificial Sequence
  Description of Artificial Sequence: Synthetic oligonucleotide
caauuaguguagcaccugg

SEQ ID NO: 1003277 - RNA, 19 nt, Artificial Sequence
  Description of Artificial Sequence: Synthetic oligonucleotide
aacccauggacaaaugcag

SEQ ID NO: 1003278 - RNA, 19 nt, Artificial Sequence
  Description of Artificial Sequence: Synthetic oligonucleotide
ucacaauacucccgcgugg

SEQ ID NO: 1003279 - RNA, 19 nt, Artificial Sequence
  Description of Artificial Sequence: Synthetic oligonucleotide
ugcaauuaguguagcaccu

SEQ ID NO: 1003280 - RNA, 19 nt, Artificial Sequence
  Description of Artificial Sequence: Synthetic oligonucleotide
  modified_base (9)..(9): a, c, u, g, unknown or other
uggaggganacccagcauc

SEQ ID NO: 1003281 - RNA, 19 nt, Artificial Sequence
  Description of Artificial Sequence: Synthetic oligonucleotide
  modified_base (2)..(2): a, c, u, g, unknown or other
  modified_base (13)..(13): a, c, u, g, unknown or other
anacccagcaucngaacug

SEQ ID NO: 1003282 - RNA, 19 nt, Artificial Sequence
  Description of Artificial Sequence: Synthetic oligonucleotide
ugugcagaucaccagcaga

SEQ ID NO: 1003283 - RNA, 19 nt, Artificial Sequence
  Description of Artificial Sequence: Synthetic oligonucleotide
agcagagugacgaugaugu

SEQ ID NO: 1003284 - RNA, 19 nt, Artificial Sequence
  Description of Artificial Sequence: Synthetic oligonucleotide
guaugugcagaucaccagc

SEQ ID NO: 1003285 - RNA, 19 nt, Artificial Sequence
  Description of Artificial Sequence: Synthetic oligonucleotide
cagacagaaguccuggagc

SEQ ID NO: 1003286 - RNA, 19 nt, Artificial Sequence
  Description of Artificial Sequence: Synthetic oligonucleotide
uggaucaggucaaucgagc

SEQ ID NO: 1003287 - RNA, 19 nt, Artificial Sequence
  Description of Artificial Sequence: Synthetic oligonucleotide
aagagacacgcgaggaggc

SEQ ID NO: 1003288 - RNA, 19 nt, Artificial Sequence
  Description of Artificial Sequence: Synthetic oligonucleotide
uaucauucugccauuucau

SEQ ID NO: 1003289 - RNA, 19 nt, Artificial Sequence
  Description of Artificial Sequence: Synthetic oligonucleotide
cauggacaaaugcagggag

SEQ ID NO: 1003290 - RNA, 19 nt, Artificial Sequence
  Description of Artificial Sequence: Synthetic oligonucleotide
aaaccgaagaugugggcaa

SEQ ID NO: 1003291 - RNA, 19 nt, Artificial Sequence
  Description of Artificial Sequence: Synthetic oligonucleotide
cagagugacgaugaugugg

SEQ ID NO: 1003292 - RNA, 19 nt, Artificial Sequence
  Description of Artificial Sequence: Synthetic oligonucleotide
aaauagccaugcaugaacu

SEQ ID NO: 1003293 - RNA, 19 nt, Artificial Sequence
  Description of Artificial Sequence: Synthetic oligonucleotide
ugauuacaaaagcccuuag

SEQ ID NO: 1003294 - RNA, 19 nt, Artificial Sequence
  Description of Artificial Sequence: Synthetic oligonucleotide
acacacuaauccaggagcc

SEQ ID NO: 1003295 - RNA, 19 nt, Artificial Sequence
  Description of Artificial Sequence: Synthetic oligonucleotide
ugcaaugccguaugugcag

SEQ ID NO: 1003296 - RNA, 19 nt, Artificial Sequence
  Description of Artificial Sequence: Synthetic oligonucleotide
agugcacuaucccagcaug

SEQ ID NO: 1003297 - RNA, 19 nt, Artificial Sequence
  Description of Artificial Sequence: Synthetic oligonucleotide
cuuagcagaccccuauagc

SEQ ID NO: 1003298 - RNA, 19 nt, Artificial Sequence
  Description of Artificial Sequence: Synthetic oligonucleotide
ugcaauaaccccguguggu

SEQ ID NO: 1003299 - RNA, 19 nt, Artificial Sequence
  Description of Artificial Sequence: Synthetic oligonucleotide
aaugagaagauggcaccug

SEQ ID NO: 1003300 - RNA, 19 nt, Artificial Sequence
  Description of Artificial Sequence: Synthetic oligonucleotide
agauguacagccacagcac

SEQ ID NO: 1003301 - RNA, 19 nt, Artificial Sequence
  Description of Artificial Sequence: Synthetic oligonucleotide
aacucacaauacucccgcg

SEQ ID NO: 1003302 - RNA, 19 nt, Artificial Sequence
  Description of Artificial Sequence: Synthetic oligonucleotide
ugagggcccaguaucauuc

SEQ ID NO: 1003303 - RNA, 19 nt, Artificial Sequence
  Description of Artificial Sequence: Synthetic oligonucleotide
ucauuuggaagaccacaga

SEQ ID NO: 1003304 - RNA, 19 nt, Artificial Sequence
  Description of Artificial Sequence: Synthetic oligonucleotide
uauuucacgcucucauaca

SEQ ID NO: 1003305 - RNA, 19 nt, Artificial Sequence
  Description of Artificial Sequence: Synthetic oligonucleotide
gacgaugauguggacacag

SEQ ID NO: 1003306 - RNA, 19 nt, Artificial Sequence
  Description of Artificial Sequence: Synthetic oligonucleotide
aaagcacgauggccgacag

SEQ ID NO: 1003307 - RNA, 19 nt, Artificial Sequence
  Description of Artificial Sequence: Synthetic oligonucleotide
cauucuggacacagcagcc

SEQ ID NO: 1003308 - RNA, 19 nt, Artificial Sequence
  Description of Artificial Sequence: Synthetic oligonucleotide
gagcaguccuucuucugcg

SEQ ID NO: 1003309 - RNA, 19 nt, Artificial Sequence
  Description of Artificial Sequence: Synthetic oligonucleotide
  modified_base (7)..(7): a, c, u, g, unknown or other
agcaucngaacugaccugu

SEQ ID NO: 1003310 - RNA, 19 nt, Artificial Sequence
  Description of Artificial Sequence: Synthetic oligonucleotide
gaaaccgaagaugugggca

SEQ ID NO: 1003311 - RNA, 19 nt, Artificial Sequence
  Description of Artificial Sequence: Synthetic oligonucleotide
ucaugaaaguggcuagcgu

SEQ ID NO: 1003312 - RNA, 19 nt, Artificial Sequence
  Description of Artificial Sequence: Synthetic oligonucleotide
aaugccguaugugcagauc

SEQ ID NO: 1003313 - RNA, 19 nt, Artificial Sequence
  Description of Artificial Sequence: Synthetic oligonucleotide
aaccgcagauggcugcuuc

SEQ ID NO: 1003314 - RNA, 19 nt, Artificial Sequence
  Description of Artificial Sequence: Synthetic oligonucleotide
  modified_base (3)..(3): a, c, u, g, unknown or other
  modified_base (14)..(14): a, c, u, g, unknown or other
ganacccagcaucngaacu

SEQ ID NO: 1003315 - RNA, 19 nt, Artificial Sequence
  Description of Artificial Sequence: Synthetic oligonucleotide
augccguaugugcagauca

SEQ ID NO: 1003316 - RNA, 19 nt, Artificial Sequence
  Description of Artificial Sequence: Synthetic oligonucleotide
acaccucuguucuuuagca

SEQ ID NO: 1003317 - RNA, 19 nt, Artificial Sequence
  Description of Artificial Sequence: Synthetic oligonucleotide
auagccaucucuccuugcu

SEQ ID NO: 1003318 - RNA, 19 nt, Artificial Sequence
  Description of Artificial Sequence: Synthetic oligonucleotide
uagcagaccccuauagcca

SEQ ID NO: 1003319 - RNA, 19 nt, Artificial Sequence
  Description of Artificial Sequence: Synthetic oligonucleotide
gaacccauggacaaaugca

SEQ ID NO: 1003320 - RNA, 19 nt, Artificial Sequence
  Description of Artificial Sequence: Synthetic oligonucleotide
gaugccgcuaaggaugaag

SEQ ID NO: 1003321 - RNA, 19 nt, Artificial Sequence
  Description of Artificial Sequence: Synthetic oligonucleotide
gauguagggcaggaaggcg

SEQ ID NO: 1003322 - RNA, 19 nt, Artificial Sequence
  Description of Artificial Sequence: Synthetic oligonucleotide
augcagggaggcuuguagg

SEQ ID NO: 1003323 - RNA, 19 nt, Artificial Sequence
  Description of Artificial Sequence: Synthetic oligonucleotide
ugguucaccagaucuggcu

SEQ ID NO: 1003324 - RNA, 19 nt, Artificial Sequence
  Description of Artificial Sequence: Synthetic oligonucleotide
cuggauguauuucacgcuc

SEQ ID NO: 1003325 - RNA, 19 nt, Artificial Sequence
  Description of Artificial Sequence: Synthetic oligonucleotide
cucacaauacucccgcgug

SEQ ID NO: 1003326 - RNA, 19 nt, Artificial Sequence
  Description of Artificial Sequence: Synthetic oligonucleotide
aaaagggucauagcagcau

SEQ ID NO: 1003327 - RNA, 19 nt, Artificial Sequence
  Description of Artificial Sequence: Synthetic oligonucleotide
gagguguucgauccagggc

SEQ ID NO: 1003328 - RNA, 19 nt, Artificial Sequence
  Description of Artificial Sequence: Synthetic oligonucleotide
uucugcgucuggaugcacc

SEQ ID NO: 1003329 - RNA, 19 nt, Artificial Sequence
  Description of Artificial Sequence: Synthetic oligonucleotide
cuuguccaaacagugcacc

SEQ ID NO: 1003330 - RNA, 19 nt, Artificial Sequence
  Description of Artificial Sequence: Synthetic oligonucleotide
ggcacacaaccgcagaugg

SEQ ID NO: 1003331 - RNA, 19 nt, Artificial Sequence
  Description of Artificial Sequence: Synthetic oligonucleotide
augcaugaacucacaauac

SEQ ID NO: 1003332 - RNA, 19 nt, Artificial Sequence
  Description of Artificial Sequence: Synthetic oligonucleotide
uggauguauuucacgcucu

SEQ ID NO: 1003333 - RNA, 19 nt, Artificial Sequence
  Description of Artificial Sequence: Synthetic oligonucleotide
uucgauccagggccaauug

SEQ ID NO: 1003334 - RNA, 19 nt, Artificial Sequence
  Description of Artificial Sequence: Synthetic oligonucleotide
uguauuucacgcucucaua

SEQ ID NO: 1003335 - RNA, 19 nt, Artificial Sequence
  Description of Artificial Sequence: Synthetic oligonucleotide
aaccccgugugguugcucu

SEQ ID NO: 1003336 - RNA, 19 nt, Artificial Sequence
  Description of Artificial Sequence: Synthetic oligonucleotide
aagucugagggcccaguau

SEQ ID NO: 1003337 - RNA, 19 nt, Artificial Sequence
  Description of Artificial Sequence: Synthetic oligonucleotide
augugcaauaaccccgugu

SEQ ID NO: 1003338 - RNA, 19 nt, Artificial Sequence
  Description of Artificial Sequence: Synthetic oligonucleotide
uguccaaacagugcaccug

SEQ ID NO: 1003339 - RNA, 19 nt, Artificial Sequence
  Description of Artificial Sequence: Synthetic oligonucleotide
accucugcccgauagggga

SEQ ID NO: 1003340 - RNA, 19 nt, Artificial Sequence
  Description of Artificial Sequence: Synthetic oligonucleotide
accccuauagccaucucuc

SEQ ID NO: 1003341 - RNA, 19 nt, Artificial Sequence
  Description of Artificial Sequence: Synthetic oligonucleotide
  modified_base (6)..(6): a, c, u, g, unknown or other
  modified_base (17)..(17): a, c, u, g, unknown or other
aggganacccagcaucnga

SEQ ID NO: 1003342 - RNA, 19 nt, Artificial Sequence
  Description of Artificial Sequence: Synthetic oligonucleotide
gaggcagugcacuauccca

SEQ ID NO: 1003343 - RNA, 19 nt, Artificial Sequence
  Description of Artificial Sequence: Synthetic oligonucleotide
aguggcuagcgucuccgag

SEQ ID NO: 1003344 - RNA, 19 nt, Artificial Sequence
  Description of Artificial Sequence: Synthetic oligonucleotide
ggucaaucgagcuggggcc

SEQ ID NO: 1003345 - RNA, 19 nt, Artificial Sequence
  Description of Artificial Sequence: Synthetic oligonucleotide
uggcuagcgucuccgagca

SEQ ID NO: 1003346 - RNA, 19 nt, Artificial Sequence
  Description of Artificial Sequence: Synthetic oligonucleotide
cuugcgguacuugucacug

SEQ ID NO: 1003347 - RNA, 19 nt, Artificial Sequence
  Description of Artificial Sequence: Synthetic oligonucleotide
cucguggaaauagccaugc

SEQ ID NO: 1003348 - RNA, 19 nt, Artificial Sequence
  Description of Artificial Sequence: Synthetic oligonucleotide
ugcccgauaggggaggaag

SEQ ID NO: 1003349 - RNA, 19 nt, Artificial Sequence
  Description of Artificial Sequence: Synthetic oligonucleotide
acuaucccagcaugcaaga

SEQ ID NO: 1003350 - RNA, 19 nt, Artificial Sequence
  Description of Artificial Sequence: Synthetic oligonucleotide
caucaggccagaugugggc

SEQ ID NO: 1003351 - RNA, 19 nt, Artificial Sequence
  Description of Artificial Sequence: Synthetic oligonucleotide
ucgauccagggccaauuga

SEQ ID NO: 1003352 - RNA, 19 nt, Artificial Sequence
  Description of Artificial Sequence: Synthetic oligonucleotide
gagaacuuugcuccuaggu

SEQ ID NO: 1003353 - RNA, 19 nt, Artificial Sequence
  Description of Artificial Sequence: Synthetic oligonucleotide
gaacugaccugugugguca

SEQ ID NO: 1003354 - RNA, 19 nt, Artificial Sequence
  Description of Artificial Sequence: Synthetic oligonucleotide
guucaugaacccauggaca

SEQ ID NO: 1003355 - RNA, 19 nt, Artificial Sequence
  Description of Artificial Sequence: Synthetic oligonucleotide
augaaaguggcuagcgucu

SEQ ID NO: 1003356 - RNA, 19 nt, Artificial Sequence
  Description of Artificial Sequence: Synthetic oligonucleotide
aaucgagcuggggccaauc

SEQ ID NO: 1003357 - RNA, 19 nt, Artificial Sequence
  Description of Artificial Sequence: Synthetic oligonucleotide
ugucaucaggccagaugug

SEQ ID NO: 1003358 - RNA, 19 nt, Artificial Sequence
  Description of Artificial Sequence: Synthetic oligonucleotide
ucgcagaagcggcugguga

SEQ ID NO: 1003359 - RNA, 19 nt, Artificial Sequence
  Description of Artificial Sequence: Synthetic oligonucleotide
agagacacgcgaggaggcc

SEQ ID NO: 1003360 - RNA, 19 nt, Artificial Sequence
  Description of Artificial Sequence: Synthetic oligonucleotide
gugcaauaaccccgugugg

SEQ ID NO: 1003361 - RNA, 19 nt, Artificial Sequence
  Description of Artificial Sequence: Synthetic oligonucleotide
gaggccaaacugugacccg

SEQ ID NO: 1003362 - RNA, 19 nt, Artificial Sequence
  Description of Artificial Sequence: Synthetic oligonucleotide
ccaaaugcgguagaacugg

SEQ ID NO: 1003363 - RNA, 19 nt, Artificial Sequence
  Description of Artificial Sequence: Synthetic oligonucleotide
ucaggucaaucgagcuggg

SEQ ID NO: 1003364 - RNA, 19 nt, Artificial Sequence
  Description of Artificial Sequence: Synthetic oligonucleotide
cacaaccgcagauggcugc

SEQ ID NO: 1003365 - RNA, 19 nt, Artificial Sequence
  Description of Artificial Sequence: Synthetic oligonucleotide
cagggcgagaacuuugcuc

SEQ ID NO: 1003366 - RNA, 19 nt, Artificial Sequence
  Description of Artificial Sequence: Synthetic oligonucleotide
gguacuugucacuggugcc

SEQ ID NO: 1003367 - RNA, 19 nt, Artificial Sequence
  Description of Artificial Sequence: Synthetic oligonucleotide
acgcgaggaggccaaacug

SEQ ID NO: 1003368 - RNA, 19 nt, Artificial Sequence
  Description of Artificial Sequence: Synthetic oligonucleotide
  modified_base (10)..(10): a, c, u, g, unknown or other
cccagcaucngaacugacc

SEQ ID NO: 1003369 - RNA, 19 nt, Artificial Sequence
  Description of Artificial Sequence: Synthetic oligonucleotide
ugaccuguguggucagaca

SEQ ID NO: 1003370 - RNA, 19 nt, Artificial Sequence
  Description of Artificial Sequence: Synthetic oligonucleotide
ugucuggugaggucacagu

SEQ ID NO: 1003371 - RNA, 19 nt, Artificial Sequence
  Description of Artificial Sequence: Synthetic oligonucleotide
aggcacgcucaacaucacg

SEQ ID NO: 1003372 - RNA, 19 nt, Artificial Sequence
  Description of Artificial Sequence: Synthetic oligonucleotide
gugccgaaggugauguagg

SEQ ID NO: 1003373 - RNA, 19 nt, Artificial Sequence
  Description of Artificial Sequence: Synthetic oligonucleotide
aggccaaacugugacccgg

SEQ ID NO: 1003374 - RNA, 19 nt, Artificial Sequence
  Description of Artificial Sequence: Synthetic oligonucleotide
ggaggccaaacugugaccc

SEQ ID NO: 1003375 - RNA, 19 nt, Artificial Sequence
  Description of Artificial Sequence: Synthetic oligonucleotide
acuaauccaggagccuuag

SEQ ID NO: 1003376 - RNA, 19 nt, Artificial Sequence
  Description of Artificial Sequence: Synthetic oligonucleotide
gagacagccaaaugcggua

SEQ ID NO: 1003377 - RNA, 19 nt, Artificial Sequence
  Description of Artificial Sequence: Synthetic oligonucleotide
aaccccggggacaacugag

SEQ ID NO: 1003378 - RNA, 19 nt, Artificial Sequence
  Description of Artificial Sequence: Synthetic oligonucleotide
uugcgguacuugucacugg

SEQ ID NO: 1003379 - RNA, 19 nt, Artificial Sequence
  Description of Artificial Sequence: Synthetic oligonucleotide
caauaaccccgugugguug

SEQ ID NO: 1003380 - RNA, 19 nt, Artificial Sequence
  Description of Artificial Sequence: Synthetic oligonucleotide
gagcggucauucuggacac

SEQ ID NO: 1003381 - RNA, 19 nt, Artificial Sequence
  Description of Artificial Sequence: Synthetic oligonucleotide
uggaugcacccucgagcgg

SEQ ID NO: 1003382 - RNA, 19 nt, Artificial Sequence
  Description of Artificial Sequence: Synthetic oligonucleotide
acacaccucuguucuuuag

SEQ ID NO: 1003383 - RNA, 19 nt, Artificial Sequence
  Description of Artificial Sequence: Synthetic oligonucleotide
ggcacgcucaacaucacgc

SEQ ID NO: 1003384 - RNA, 19 nt, Artificial Sequence
  Description of Artificial Sequence: Synthetic oligonucleotide
uggcacacaaccgcagaug

SEQ ID NO: 1003385 - RNA, 19 nt, Artificial Sequence
  Description of Artificial Sequence: Synthetic oligonucleotide
uggccgacagguugaagaa

SEQ ID NO: 1003386 - RNA, 19 nt, Artificial Sequence
  Description of Artificial Sequence: Synthetic oligonucleotide
  modified_base (7)..(7): a, c, u, g, unknown or other
  modified_base (18)..(18): a, c, u, g, unknown or other
gaggganacccagcaucng

SEQ ID NO: 1003387 - RNA, 19 nt, Artificial Sequence
  Description of Artificial Sequence: Synthetic oligonucleotide
aauugaugggauagaugua

SEQ ID NO: 1003388 - RNA, 19 nt, Artificial Sequence
  Description of Artificial Sequence: Synthetic oligonucleotide
acccauggacaaaugcagg

SEQ ID NO: 1003389 - RNA, 19 nt, Artificial Sequence
  Description of Artificial Sequence: Synthetic oligonucleotide
ucacgcucucauacacacc

SEQ ID NO: 1003390 - RNA, 19 nt, Artificial Sequence
  Description of Artificial Sequence: Synthetic oligonucleotide
gugccgaugcagcagggac

SEQ ID NO: 1003391 - RNA, 19 nt, Artificial Sequence
  Description of Artificial Sequence: Synthetic oligonucleotide
gguggaucaggucaaucga

SEQ ID NO: 1003392 - RNA, 19 nt, Artificial Sequence
  Description of Artificial Sequence: Synthetic oligonucleotide
uccgagcaguccuucuucu

SEQ ID NO: 1003393 - RNA, 19 nt, Artificial Sequence
  Description of Artificial Sequence: Synthetic oligonucleotide
uugcagucuaugugcaaua

SEQ ID NO: 1003394 - RNA, 19 nt, Artificial Sequence
  Description of Artificial Sequence: Synthetic oligonucleotide
ucuccgagcaguccuucuu

SEQ ID NO: 1003395 - RNA, 19 nt, Artificial Sequence
  Description of Artificial Sequence: Synthetic oligonucleotide
gggccaauugaugggauag

SEQ ID NO: 1003396 - RNA, 19 nt, Artificial Sequence
  Description of Artificial Sequence: Synthetic oligonucleotide
agcagaccccuauagccau

SEQ ID NO: 1003397 - RNA, 19 nt, Artificial Sequence
  Description of Artificial Sequence: Synthetic oligonucleotide
uucacagguucuggggucu

SEQ ID NO: 1003398 - RNA, 19 nt, Artificial Sequence
  Description of Artificial Sequence: Synthetic oligonucleotide
uaccgcugaggaaaccgaa

SEQ ID NO: 1003399 - RNA, 19 nt, Artificial Sequence
  Description of Artificial Sequence: Synthetic oligonucleotide
ugcagucuaugugcaauaa

SEQ ID NO: 1003400 - RNA, 19 nt, Artificial Sequence
  Description of Artificial Sequence: Synthetic oligonucleotide
cagcauaccgcugaggaaa

SEQ ID NO: 1003401 - RNA, 19 nt, Artificial Sequence
  Description of Artificial Sequence: Synthetic oligonucleotide
ggucauuuggaagaccaca

SEQ ID NO: 1003402 - RNA, 19 nt, Artificial Sequence
  Description of Artificial Sequence: Synthetic oligonucleotide
gaccccuauagccaucucu

SEQ ID NO: 1003403 - RNA, 19 nt, Artificial Sequence
  Description of Artificial Sequence: Synthetic oligonucleotide
caccucuguucuuuagcac

SEQ ID NO: 1003404 - RNA, 19 nt, Artificial Sequence
  Description of Artificial Sequence: Synthetic oligonucleotide
acaucacgcucccucugca

SEQ ID NO: 1003405 - RNA, 19 nt, Artificial Sequence
  Description of Artificial Sequence: Synthetic oligonucleotide
aguugccagcucuggaaaa

SEQ ID NO: 1003406 - RNA, 19 nt, Artificial Sequence
  Description of Artificial Sequence: Synthetic oligonucleotide
ccacaaagagacacgcgag

SEQ ID NO: 1003407 - RNA, 19 nt, Artificial Sequence
  Description of Artificial Sequence: Synthetic oligonucleotide
guacagccacagcaccagg

SEQ ID NO: 1003408 - RNA, 19 nt, Artificial Sequence
  Description of Artificial Sequence: Synthetic oligonucleotide
ggaaaccgaagaugugggc

SEQ ID NO: 1003409 - RNA, 19 nt, Artificial Sequence
  Description of Artificial Sequence: Synthetic oligonucleotide
caauacucccgcgugguga

SEQ ID NO: 1003410 - RNA, 19 nt, Artificial Sequence
  Description of Artificial Sequence: Synthetic oligonucleotide
uacucccgcguggugaucu

SEQ ID NO: 1003411 - RNA, 19 nt, Artificial Sequence
  Description of Artificial Sequence: Synthetic oligonucleotide
aggugcaaugccguaugug

SEQ ID NO: 1003412 - RNA, 19 nt, Artificial Sequence
  Description of Artificial Sequence: Synthetic oligonucleotide
agcagggacggccuuugau

SEQ ID NO: 1003413 - RNA, 19 nt, Artificial Sequence
  Description of Artificial Sequence: Synthetic oligonucleotide
  modified_base (4)..(4): a, c, u, g, unknown or other
  modified_base (15)..(15): a, c, u, g, unknown or other
gganacccagcaucngaac

SEQ ID NO: 1003414 - RNA, 19 nt, Artificial Sequence
  Description of Artificial Sequence: Synthetic oligonucleotide
augccgcuaaggaugaaga

SEQ ID NO: 1003415 - RNA, 19 nt, Artificial Sequence
  Description of Artificial Sequence: Synthetic oligonucleotide
uccggaugcagggcgagaa

SEQ ID NO: 1003416 - RNA, 19 nt, Artificial Sequence
  Description of Artificial Sequence: Synthetic oligonucleotide
acacuaauccaggagccuu

SEQ ID NO: 1003417 - RNA, 19 nt, Artificial Sequence
  Description of Artificial Sequence: Synthetic oligonucleotide
cacuggcccuagacaaugg

SEQ ID NO: 1003418 - RNA, 19 nt, Artificial Sequence
  Description of Artificial Sequence: Synthetic oligonucleotide
  modified_base (8)..(8): a, c, u, g, unknown or other
cagcaucngaacugaccug

SEQ ID NO: 1003419 - RNA, 19 nt, Artificial Sequence
  Description of Artificial Sequence: Synthetic oligonucleotide
cuagcgucuccgagcaguc

SEQ ID NO: 1003420 - RNA, 19 nt, Artificial Sequence
  Description of Artificial Sequence: Synthetic oligonucleotide
cagcaugcaagaacagaga

SEQ ID NO: 1003421 - RNA, 19 nt, Artificial Sequence
  Description of Artificial Sequence: Synthetic oligonucleotide
gacaaaugcagggaggcuu

SEQ ID NO: 1003422 - RNA, 19 nt, Artificial Sequence
  Description of Artificial Sequence: Synthetic oligonucleotide
cacgcucaacaucacgcuc

SEQ ID NO: 1003423 - RNA, 19 nt, Artificial Sequence
  Description of Artificial Sequence: Synthetic oligonucleotide
gcagggacggccuuugauc

SEQ ID NO: 1003424 - RNA, 19 nt, Artificial Sequence
  Description of Artificial Sequence: Synthetic oligonucleotide
caacaucacgcucccucug

SEQ ID NO: 1003425 - RNA, 19 nt, Artificial Sequence
  Description of Artificial Sequence: Synthetic oligonucleotide
cuccgagcaguccuucuuc

SEQ ID NO: 1003426 - RNA, 19 nt, Artificial Sequence
  Description of Artificial Sequence: Synthetic oligonucleotide
cuugauuacaaaagcccuu

SEQ ID NO: 1003427 - RNA, 19 nt, Artificial Sequence
  Description of Artificial Sequence: Synthetic oligonucleotide
accgcugaggaaaccgaag

SEQ ID NO: 1003428 - RNA, 19 nt, Artificial Sequence
  Description of Artificial Sequence: Synthetic oligonucleotide
ggcuuguaggacagggagg

SEQ ID NO: 1003429 - RNA, 19 nt, Artificial Sequence
  Description of Artificial Sequence: Synthetic oligonucleotide
caggagugaggaagaggug

SEQ ID NO: 1003430 - RNA, 19 nt, Artificial Sequence
  Description of Artificial Sequence: Synthetic oligonucleotide
guguaugucuggugagguc

SEQ ID NO: 1003431 - RNA, 19 nt, Artificial Sequence
  Description of Artificial Sequence: Synthetic oligonucleotide
ccacacacuaauccaggag

SEQ ID NO: 1003432 - RNA, 19 nt, Artificial Sequence
  Description of Artificial Sequence: Synthetic oligonucleotide
ucccgcguggugaucucac

SEQ ID NO: 1003433 - RNA, 19 nt, Artificial Sequence
  Description of Artificial Sequence: Synthetic oligonucleotide
accgcagauggcugcuucu

SEQ ID NO: 1003434 - RNA, 19 nt, Artificial Sequence
  Description of Artificial Sequence: Synthetic oligonucleotide
cacgaggcagugcacuauc

SEQ ID NO: 1003435 - RNA, 19 nt, Artificial Sequence
  Description of Artificial Sequence: Synthetic oligonucleotide
cuaugugcaauaaccccgu

SEQ ID NO: 1003436 - RNA, 19 nt, Artificial Sequence
  Description of Artificial Sequence: Synthetic oligonucleotide
caucacgcucccucugcac

SEQ ID NO: 1003437 - RNA, 19 nt, Artificial Sequence
  Description of Artificial Sequence: Synthetic oligonucleotide
acacgcgaggaggccaaac

SEQ ID NO: 1003438 - RNA, 19 nt, Artificial Sequence
  Description of Artificial Sequence: Synthetic oligonucleotide
agguugccugugaugccgc

SEQ ID NO: 1003439 - RNA, 19 nt, Artificial Sequence
  Description of Artificial Sequence: Synthetic oligonucleotide
gugagguguucgauccagg

SEQ ID NO: 1003440 - RNA, 19 nt, Artificial Sequence
  Description of Artificial Sequence: Synthetic oligonucleotide
cagcagagugacgaugaug

SEQ ID NO: 1003441 - RNA, 19 nt, Artificial Sequence
  Description of Artificial Sequence: Synthetic oligonucleotide
  modified_base (5)..(5): a, c, u, g, unknown or other
  modified_base (16)..(16): a, c, u, g, unknown or other
ggganacccagcaucngaa

SEQ ID NO: 1003442 - RNA, 19 nt, Artificial Sequence
  Description of Artificial Sequence: Synthetic oligonucleotide
cacacaaccgcagauggcu

SEQ ID NO: 1003443 - RNA, 19 nt, Artificial Sequence
  Description of Artificial Sequence: Synthetic oligonucleotide
uacacaccucuguucuuua

SEQ ID NO: 1003444 - RNA, 19 nt, Artificial Sequence
  Description of Artificial Sequence: Synthetic oligonucleotide
gcgagaacuuugcuccuag

SEQ ID NO: 1003445 - RNA, 19 nt, Artificial Sequence
  Description of Artificial Sequence: Synthetic oligonucleotide
gggaccucaaccccgggga

SEQ ID NO: 1003446 - RNA, 19 nt, Artificial Sequence
  Description of Artificial Sequence: Synthetic oligonucleotide
gugacaugcugggcaaagc

SEQ ID NO: 1003447 - RNA, 19 nt, Artificial Sequence
  Description of Artificial Sequence: Synthetic oligonucleotide
gcagucuaugugcaauaac

SEQ ID NO: 1003448 - RNA, 19 nt, Artificial Sequence
  Description of Artificial Sequence: Synthetic oligonucleotide
ggggaccucaaccccgggg

SEQ ID NO: 1003449 - RNA, 19 nt, Artificial Sequence
  Description of Artificial Sequence: Synthetic oligonucleotide
gagacacgcgaggaggcca

SEQ ID NO: 1003450 - RNA, 19 nt, Artificial Sequence
  Description of Artificial Sequence: Synthetic oligonucleotide
ucgagcggucauucuggac

SEQ ID NO: 1003451 - RNA, 19 nt, Artificial Sequence
  Description of Artificial Sequence: Synthetic oligonucleotide
  modified_base (8)..(8): a, c, u, g, unknown or other
  modified_base (19)..(19): a, c, u, g, unknown or other
ggaggganacccagcaucn

SEQ ID NO: 1003452 - RNA, 19 nt, Artificial Sequence
  Description of Artificial Sequence: Synthetic oligonucleotide
gugcacuaucccagcaugc

SEQ ID NO: 1003453 - RNA, 19 nt, Artificial Sequence
  Description of Artificial Sequence: Synthetic oligonucleotide
ggauguauuucacgcucuc

SEQ ID NO: 1003454 - RNA, 19 nt, Artificial Sequence
  Description of Artificial Sequence: Synthetic oligonucleotide
gccaaaugcgguagaacug

SEQ ID NO: 1003455 - RNA, 19 nt, Artificial Sequence
  Description of Artificial Sequence: Synthetic oligonucleotide
ugccugugaugccgcuaag

SEQ ID NO: 1003456 - RNA, 19 nt, Artificial Sequence
  Description of Artificial Sequence: Synthetic oligonucleotide
auaccgcugaggaaaccga

SEQ ID NO: 1003457 - RNA, 19 nt, Artificial Sequence
  Description of Artificial Sequence: Synthetic oligonucleotide
gaggcuuguaggacaggga

SEQ ID NO: 1003458 - RNA, 19 nt, Artificial Sequence
  Description of Artificial Sequence: Synthetic oligonucleotide
uagguggaucaggucaauc

SEQ ID NO: 1003459 - RNA, 19 nt, Artificial Sequence
  Description of Artificial Sequence: Synthetic oligonucleotide
acaaccgcagauggcugcu

SEQ ID NO: 1003460 - RNA, 19 nt, Artificial Sequence
  Description of Artificial Sequence: Synthetic oligonucleotide
ucucgcagaagcggcuggu

SEQ ID NO: 1003461 - RNA, 19 nt, Artificial Sequence
  Description of Artificial Sequence: Synthetic oligonucleotide
guguggucagacagaaguc

SEQ ID NO: 1003462 - RNA, 19 nt, Artificial Sequence
  Description of Artificial Sequence: Synthetic oligonucleotide
cuuuccggaugcagggcga

SEQ ID NO: 1003463 - RNA, 19 nt, Artificial Sequence
  Description of Artificial Sequence: Synthetic oligonucleotide
agaccccuauagccaucuc

SEQ ID NO: 1003464 - RNA, 19 nt, Artificial Sequence
  Description of Artificial Sequence: Synthetic oligonucleotide
guaugucuggugaggucac

SEQ ID NO: 1003465 - RNA, 19 nt, Artificial Sequence
  Description of Artificial Sequence: Synthetic oligonucleotide
caggucaaucgagcugggg

SEQ ID NO: 1003466 - RNA, 19 nt, Artificial Sequence
  Description of Artificial Sequence: Synthetic oligonucleotide
agggccaauugaugggaua

SEQ ID NO: 1003467 - RNA, 19 nt, Artificial Sequence
  Description of Artificial Sequence: Synthetic oligonucleotide
  modified_base (9)..(9): a, c, u, g, unknown or other
ccagcaucngaacugaccu

SEQ ID NO: 1003468 - RNA, 19 nt, Artificial Sequence
  Description of Artificial Sequence: Synthetic oligonucleotide
aaccgaagaugugggcaau

SEQ ID NO: 1003469 - RNA, 19 nt, Artificial Sequence
  Description of Artificial Sequence: Synthetic oligonucleotide
augcagggcgagaacuuug

SEQ ID NO: 1003470 - RNA, 19 nt, Artificial Sequence
  Description of Artificial Sequence: Synthetic oligonucleotide
gcaauuaguguagcaccug

SEQ ID NO: 1003471 - RNA, 19 nt, Artificial Sequence
  Description of Artificial Sequence: Synthetic oligonucleotide
cucugcccgauaggggagg

SEQ ID NO: 1003472 - RNA, 19 nt, Artificial Sequence
  Description of Artificial Sequence: Synthetic oligonucleotide
gggcccaguaucauucugc

SEQ ID NO: 1003473 - RNA, 19 nt, Artificial Sequence
  Description of Artificial Sequence: Synthetic oligonucleotide
gccugugaugccgcuaagg

SEQ ID NO: 1003474 - RNA, 19 nt, Artificial Sequence
  Description of Artificial Sequence: Synthetic oligonucleotide
cgagcggucauucuggaca

SEQ ID NO: 1003475 - RNA, 19 nt, Artificial Sequence
  Description of Artificial Sequence: Synthetic oligonucleotide
aggugagguguucgaucca

SEQ ID NO: 1003476 - RNA, 19 nt, Artificial Sequence
  Description of Artificial Sequence: Synthetic oligonucleotide
acucccgcguggugaucuc

SEQ ID NO: 1003477 - RNA, 19 nt, Artificial Sequence
  Description of Artificial Sequence: Synthetic oligonucleotide
acacaaccgcagauggcug

SEQ ID NO: 1003478 - RNA, 19 nt, Artificial Sequence
  Description of Artificial Sequence: Synthetic oligonucleotide
uguucgauccagggccaau

SEQ ID NO: 1003479 - RNA, 19 nt, Artificial Sequence
  Description of Artificial Sequence: Synthetic oligonucleotide
ugcacccucgagcggucau

SEQ ID NO: 1003480 - RNA, 19 nt, Artificial Sequence
  Description of Artificial Sequence: Synthetic oligonucleotide
cacuaauccaggagccuua

SEQ ID NO: 1003481 - RNA, 19 nt, Artificial Sequence
  Description of Artificial Sequence: Synthetic oligonucleotide
augaacccauggacaaaug

SEQ ID NO: 1003482 - RNA, 19 nt, Artificial Sequence
  Description of Artificial Sequence: Synthetic oligonucleotide
ggauagauguacagccaca

SEQ ID NO: 1003483 - RNA, 19 nt, Artificial Sequence
  Description of Artificial Sequence: Synthetic oligonucleotide
ugagcgcccgcuugcggua

SEQ ID NO: 1003484 - RNA, 19 nt, Artificial Sequence
  Description of Artificial Sequence: Synthetic oligonucleotide
cccuagacaauggccaaag

SEQ ID NO: 1003485 - RNA, 19 nt, Artificial Sequence
  Description of Artificial Sequence: Synthetic oligonucleotide
cagggacggccuuugaucu

SEQ ID NO: 1003486 - RNA, 19 nt, Artificial Sequence
  Description of Artificial Sequence: Synthetic oligonucleotide
agcaggugagguguucgau

SEQ ID NO: 1003487 - RNA, 19 nt, Artificial Sequence
  Description of Artificial Sequence: Synthetic oligonucleotide
gucaaucgagcuggggcca

SEQ ID NO: 1003488 - RNA, 19 nt, Artificial Sequence
  Description of Artificial Sequence: Synthetic oligonucleotide
ucaaucgagcuggggccaa

SEQ ID NO: 1003489 - RNA, 19 nt, Artificial Sequence
  Description of Artificial Sequence: Synthetic oligonucleotide
ucugcccgauaggggagga

SEQ ID NO: 1003490 - RNA, 19 nt, Artificial Sequence
  Description of Artificial Sequence: Synthetic oligonucleotide
  modified_base (5)..(5): a, c, u, g, unknown or other
caucngaacugaccugugu

SEQ ID NO: 1003491 - RNA, 19 nt, Artificial Sequence
  Description of Artificial Sequence: Synthetic oligonucleotide
ccuagacaauggccaaagc

SEQ ID NO: 1003492 - RNA, 19 nt, Artificial Sequence
  Description of Artificial Sequence: Synthetic oligonucleotide
gccguaugugcagaucacc

SEQ ID NO: 1003493 - RNA, 19 nt, Artificial Sequence
  Description of Artificial Sequence: Synthetic oligonucleotide
ccucguggaaauagccaug

SEQ ID NO: 1003494 - RNA, 19 nt, Artificial Sequence
  Description of Artificial Sequence: Synthetic oligonucleotide
ccccuauagccaucucucc

SEQ ID NO: 1003495 - RNA, 19 nt, Artificial Sequence
  Description of Artificial Sequence: Synthetic oligonucleotide
ggccagguugccugugaug

SEQ ID NO: 1003496 - RNA, 19 nt, Artificial Sequence
  Description of Artificial Sequence: Synthetic oligonucleotide
gacggccuuugaucuugca

SEQ ID NO: 1003497 - RNA, 19 nt, Artificial Sequence
  Description of Artificial Sequence: Synthetic oligonucleotide
gcagagugacgaugaugug

SEQ ID NO: 1003498 - RNA, 19 nt, Artificial Sequence
  Description of Artificial Sequence: Synthetic oligonucleotide
cugugaugccgcuaaggau

SEQ ID NO: 1003499 - RNA, 19 nt, Artificial Sequence
  Description of Artificial Sequence: Synthetic oligonucleotide
cuagggcugagcugguggu

SEQ ID NO: 1003500 - RNA, 19 nt, Artificial Sequence
  Description of Artificial Sequence: Synthetic oligonucleotide
cgcguggugaucucacagc

SEQ ID NO: 1003501 - RNA, 19 nt, Artificial Sequence
  Description of Artificial Sequence: Synthetic oligonucleotide
cucgagcggucauucugga

SEQ ID NO: 1003502 - RNA, 19 nt, Artificial Sequence
  Description of Artificial Sequence: Synthetic oligonucleotide
uuccggaugcagggcgaga

SEQ ID NO: 1003503 - RNA, 19 nt, Artificial Sequence
  Description of Artificial Sequence: Synthetic oligonucleotide
ggcaaagagcccagcgaac

SEQ ID NO: 1003504 - RNA, 19 nt, Artificial Sequence
  Description of Artificial Sequence: Synthetic oligonucleotide
  modified_base (2)..(2): a, c, u, g, unknown or other
cngaacugaccuguguggu

SEQ ID NO: 1003505 - RNA, 19 nt, Artificial Sequence
  Description of Artificial Sequence: Synthetic oligonucleotide
gaugcacccucgagcgguc

SEQ ID NO: 1003506 - RNA, 19 nt, Artificial Sequence
  Description of Artificial Sequence: Synthetic oligonucleotide
agccaugcaugaacucaca

SEQ ID NO: 1003507 - RNA, 19 nt, Artificial Sequence
  Description of Artificial Sequence: Synthetic oligonucleotide
cacagguucuggggucuug

SEQ ID NO: 1003508 - RNA, 19 nt, Artificial Sequence
  Description of Artificial Sequence: Synthetic oligonucleotide
cacgcgaggaggccaaacu

SEQ ID NO: 1003509 - RNA, 19 nt, Artificial Sequence
  Description of Artificial Sequence: Synthetic oligonucleotide
cacaauacucccgcguggu

SEQ ID NO: 1003510 - RNA, 19 nt, Artificial Sequence
  Description of Artificial Sequence: Synthetic oligonucleotide
cgagaacuuugcuccuagg

SEQ ID NO: 1003511 - RNA, 19 nt, Artificial Sequence
  Description of Artificial Sequence: Synthetic oligonucleotide
ccuagguggaucaggucaa

SEQ ID NO: 1003512 - RNA, 19 nt, Artificial Sequence
  Description of Artificial Sequence: Synthetic oligonucleotide
caaccccggggacaacuga

SEQ ID NO: 1003513 - RNA, 19 nt, Artificial Sequence
  Description of Artificial Sequence: Synthetic oligonucleotide
gccaugcaugaacucacaa

SEQ ID NO: 1003514 - RNA, 19 nt, Artificial Sequence
  Description of Artificial Sequence: Synthetic oligonucleotide
agcuagggcugagcuggug

SEQ ID NO: 1003515 - RNA, 19 nt, Artificial Sequence
  Description of Artificial Sequence: Synthetic oligonucleotide
gggcaauguugucuaucca

SEQ ID NO: 1003516 - RNA, 19 nt, Artificial Sequence
  Description of Artificial Sequence: Synthetic oligonucleotide
gaggcacgcucaacaucac

SEQ ID NO: 1003517 - RNA, 19 nt, Artificial Sequence
  Description of Artificial Sequence: Synthetic oligonucleotide
ccgcugaggaaaccgaaga

SEQ ID NO: 1003518 - RNA, 19 nt, Artificial Sequence
  Description of Artificial Sequence: Synthetic oligonucleotide
cagccggccagcuucucua

SEQ ID NO: 1003519 - RNA, 19 nt, Artificial Sequence
  Description of Artificial Sequence: Synthetic oligonucleotide
agacacgcgaggaggccaa

SEQ ID NO: 1003520 - RNA, 19 nt, Artificial Sequence
  Description of Artificial Sequence: Synthetic oligonucleotide
gcguggugaucucacagcu

SEQ ID NO: 1003521 - RNA, 19 nt, Artificial Sequence
  Description of Artificial Sequence: Synthetic oligonucleotide
gcgucuggaugcacccucg

SEQ ID NO: 1003522 - RNA, 19 nt, Artificial Sequence
  Description of Artificial Sequence: Synthetic oligonucleotide
agggacggccuuugaucuu

SEQ ID NO: 1003523 - RNA, 19 nt, Artificial Sequence
  Description of Artificial Sequence: Synthetic oligonucleotide
agacaggaaaagggucaua

SEQ ID NO: 1003524 - RNA, 19 nt, Artificial Sequence
  Description of Artificial Sequence: Synthetic oligonucleotide
  modified_base (6)..(6): a, c, u, g, unknown or other
gcaucngaacugaccugug

SEQ ID NO: 1003525 - RNA, 19 nt, Artificial Sequence
  Description of Artificial Sequence: Synthetic oligonucleotide
gcuagcgucuccgagcagu

SEQ ID NO: 1003526 - RNA, 19 nt, Artificial Sequence
  Description of Artificial Sequence: Synthetic oligonucleotide
cagagcguggccuccucgu

SEQ ID NO: 1003527 - RNA, 19 nt, Artificial Sequence
  Description of Artificial Sequence: Synthetic oligonucleotide
cuaucccagcaugcaagaa

SEQ ID NO: 1003528 - RNA, 19 nt, Artificial Sequence
  Description of Artificial Sequence: Synthetic oligonucleotide
gcacacaaccgcagauggc

SEQ ID NO: 1003529 - RNA, 19 nt, Artificial Sequence
  Description of Artificial Sequence: Synthetic oligonucleotide
ccgauaggggaggaagaug

SEQ ID NO: 1003530 - RNA, 19 nt, Artificial Sequence
  Description of Artificial Sequence: Synthetic oligonucleotide
cuucugcgucuggaugcac

SEQ ID NO: 1003531 - RNA, 19 nt, Artificial Sequence
  Description of Artificial Sequence: Synthetic oligonucleotide
gguguucgauccagggcca

SEQ ID NO: 1003532 - RNA, 19 nt, Artificial Sequence
  Description of Artificial Sequence: Synthetic oligonucleotide
cccgcuugcgguacuuguc

SEQ ID NO: 1003533 - RNA, 19 nt, Artificial Sequence
  Description of Artificial Sequence: Synthetic oligonucleotide
uaaccccgugugguugcuc

SEQ ID NO: 1003534 - RNA, 19 nt, Artificial Sequence
  Description of Artificial Sequence: Synthetic oligonucleotide
cucaaccccggggacaacu

SEQ ID NO: 1003535 - RNA, 19 nt, Artificial Sequence
  Description of Artificial Sequence: Synthetic oligonucleotide
gucagccaguaggugaagu

SEQ ID NO: 1003536 - RNA, 19 nt, Artificial Sequence
  Description of Artificial Sequence: Synthetic oligonucleotide
cacacuaauccaggagccu

SEQ ID NO: 1003537 - RNA, 19 nt, Artificial Sequence
  Description of Artificial Sequence: Synthetic oligonucleotide
cagugcacuaucccagcau

SEQ ID NO: 1003538 - RNA, 19 nt, Artificial Sequence
  Description of Artificial Sequence: Synthetic oligonucleotide
ggcccuagacaauggccaa

SEQ ID NO: 1003539 - RNA, 19 nt, Artificial Sequence
  Description of Artificial Sequence: Synthetic oligonucleotide
guucgauccagggccaauu

SEQ ID NO: 1003540 - RNA, 19 nt, Artificial Sequence
  Description of Artificial Sequence: Synthetic oligonucleotide
cguggaaauagccaugcau

SEQ ID NO: 1003541 - RNA, 19 nt, Artificial Sequence
  Description of Artificial Sequence: Synthetic oligonucleotide
ggccgacagguugaagaac

SEQ ID NO: 1003542 - RNA, 19 nt, Artificial Sequence
  Description of Artificial Sequence: Synthetic oligonucleotide
ccgugugguugcucugggc

SEQ ID NO: 1003543 - RNA, 19 nt, Artificial Sequence
  Description of Artificial Sequence: Synthetic oligonucleotide
ccucucccacacacuaauc

SEQ ID NO: 1003544 - RNA, 19 nt, Artificial Sequence
  Description of Artificial Sequence: Synthetic oligonucleotide
agccucucccacacacuaa

SEQ ID NO: 1003545 - RNA, 19 nt, Artificial Sequence
  Description of Artificial Sequence: Synthetic oligonucleotide
gcaauaaccccgugugguu

SEQ ID NO: 1003546 - RNA, 19 nt, Artificial Sequence
  Description of Artificial Sequence: Synthetic oligonucleotide
ccuauagccaucucuccuu

SEQ ID NO: 1003547 - RNA, 19 nt, Artificial Sequence
  Description of Artificial Sequence: Synthetic oligonucleotide
cagaccccuauagccaucu

SEQ ID NO: 1003548 - RNA, 19 nt, Artificial Sequence
  Description of Artificial Sequence: Synthetic oligonucleotide
cacaggugcaaugccguau

SEQ ID NO: 1003549 - RNA, 19 nt, Artificial Sequence
  Description of Artificial Sequence: Synthetic oligonucleotide
ugaugccgcuaaggaugaa

SEQ ID NO: 1003550 - RNA, 19 nt, Artificial Sequence
  Description of Artificial Sequence: Synthetic oligonucleotide
agcggucauucuggacaca

SEQ ID NO: 1003551 - RNA, 19 nt, Artificial Sequence
  Description of Artificial Sequence: Synthetic oligonucleotide
agcgcccgcuugcgguacu

SEQ ID NO: 1003552 - RNA, 19 nt, Artificial Sequence
  Description of Artificial Sequence: Synthetic oligonucleotide
gagcgcccgcuugcgguac

SEQ ID NO: 1003553 - RNA, 19 nt, Artificial Sequence
  Description of Artificial Sequence: Synthetic oligonucleotide
cgaugauguggacacaggu

SEQ ID NO: 1003554 - RNA, 19 nt, Artificial Sequence
  Description of Artificial Sequence: Synthetic oligonucleotide
cagccugaggcacgcucaa

SEQ ID NO: 1003555 - RNA, 19 nt, Artificial Sequence
  Description of Artificial Sequence: Synthetic oligonucleotide
gggccaauccagaaguuuu

SEQ ID NO: 1003556 - RNA, 19 nt, Artificial Sequence
  Description of Artificial Sequence: Synthetic oligonucleotide
cccuauagccaucucuccu

SEQ ID NO: 1003557 - RNA, 19 nt, Artificial Sequence
  Description of Artificial Sequence: Synthetic oligonucleotide
augcacccucgagcgguca

SEQ ID NO: 1003558 - RNA, 19 nt, Artificial Sequence
  Description of Artificial Sequence: Synthetic oligonucleotide
ccggaugcagggcgagaac

SEQ ID NO: 1003559 - RNA, 19 nt, Artificial Sequence
  Description of Artificial Sequence: Synthetic oligonucleotide
ccgcagauggcugcuucug

SEQ ID NO: 1003560 - RNA, 19 nt, Artificial Sequence
  Description of Artificial Sequence: Synthetic oligonucleotide
gcccgauaggggaggaaga

SEQ ID NO: 1003561 - RNA, 19 nt, Artificial Sequence
  Description of Artificial Sequence: Synthetic oligonucleotide
gucacuggcccuagacaau

SEQ ID NO: 1003562 - RNA, 19 nt, Artificial Sequence
  Description of Artificial Sequence: Synthetic oligonucleotide
ggcuagcgucuccgagcag

SEQ ID NO: 1003563 - RNA, 19 nt, Artificial Sequence
  Description of Artificial Sequence: Synthetic oligonucleotide
ccaucucuccuugcuguca

SEQ ID NO: 1003564 - RNA, 19 nt, Artificial Sequence
  Description of Artificial Sequence: Synthetic oligonucleotide
gcccuuagcagaccccuau

SEQ ID NO: 1003565 - RNA, 19 nt, Artificial Sequence
  Description of Artificial Sequence: Synthetic oligonucleotide
guguucgauccagggccaa

SEQ ID NO: 1003566 - RNA, 19 nt, Artificial Sequence
  Description of Artificial Sequence: Synthetic oligonucleotide
cucccgcguggugaucuca

SEQ ID NO: 1003567 - RNA, 19 nt, Artificial Sequence
  Description of Artificial Sequence: Synthetic oligonucleotide
cagggccaauugaugggau

SEQ ID NO: 1003568 - RNA, 19 nt, Artificial Sequence
  Description of Artificial Sequence: Synthetic oligonucleotide
agcccuuagcagaccccua

SEQ ID NO: 1003569 - RNA, 19 nt, Artificial Sequence
  Description of Artificial Sequence: Synthetic oligonucleotide
caaaugcagggaggcuugu

SEQ ID NO: 1003570 - RNA, 19 nt, Artificial Sequence
  Description of Artificial Sequence: Synthetic oligonucleotide
gacacgcgaggaggccaaa

SEQ ID NO: 1003571 - RNA, 19 nt, Artificial Sequence
  Description of Artificial Sequence: Synthetic oligonucleotide
ggcgagaacuuugcuccua

SEQ ID NO: 1003572 - RNA, 19 nt, Artificial Sequence
  Description of Artificial Sequence: Synthetic oligonucleotide
cgcgaggaggccaaacugu

SEQ ID NO: 1003573 - RNA, 19 nt, Artificial Sequence
  Description of Artificial Sequence: Synthetic oligonucleotide
cggccgcuccagcaguugc

SEQ ID NO: 1003574 - RNA, 19 nt, Artificial Sequence
  Description of Artificial Sequence: Synthetic oligonucleotide
ccugaggcacgcucaacau

SEQ ID NO: 1003575 - RNA, 19 nt, Artificial Sequence
  Description of Artificial Sequence: Synthetic oligonucleotide
gcccgcuugcgguacuugu

SEQ ID NO: 1003576 - RNA, 19 nt, Artificial Sequence
  Description of Artificial Sequence: Synthetic oligonucleotide
ggcuugcucugugcagauc

SEQ ID NO: 1003577 - RNA, 19 nt, Artificial Sequence
  Description of Artificial Sequence: Synthetic oligonucleotide
gcccuagacaauggccaaa

SEQ ID NO: 1003578 - RNA, 19 nt, Artificial Sequence
  Description of Artificial Sequence: Synthetic oligonucleotide
cuagguggaucaggucaau

SEQ ID NO: 1003579 - RNA, 19 nt, Artificial Sequence
  Description of Artificial Sequence: Synthetic oligonucleotide
ggagccuuaggagcagguu

SEQ ID NO: 1003580 - RNA, 19 nt, Artificial Sequence
  Description of Artificial Sequence: Synthetic oligonucleotide
gcagaccccuauagccauc

SEQ ID NO: 1003581 - RNA, 19 nt, Artificial Sequence
  Description of Artificial Sequence: Synthetic oligonucleotide
cccuuagcagaccccuaua

SEQ ID NO: 1003582 - RNA, 19 nt, Artificial Sequence
  Description of Artificial Sequence: Synthetic oligonucleotide
cugcccgauaggggaggaa

SEQ ID NO: 1003583 - RNA, 19 nt, Artificial Sequence
  Description of Artificial Sequence: Synthetic oligonucleotide
ccaguaucauucugccauu

SEQ ID NO: 1003584 - RNA, 19 nt, Artificial Sequence
  Description of Artificial Sequence: Synthetic oligonucleotide
cugcgucuggaugcacccu

SEQ ID NO: 1003585 - RNA, 19 nt, Artificial Sequence
  Description of Artificial Sequence: Synthetic oligonucleotide
caaucgagcuggggccaau

SEQ ID NO: 1003586 - RNA, 19 nt, Artificial Sequence
  Description of Artificial Sequence: Synthetic oligonucleotide
cacggccgcuccagcaguu

SEQ ID NO: 1003587 - RNA, 19 nt, Artificial Sequence
  Description of Artificial Sequence: Synthetic oligonucleotide
ggucggggaccucgggguu

SEQ ID NO: 1003588 - RNA, 19 nt, Artificial Sequence
  Description of Artificial Sequence: Synthetic oligonucleotide
caaccgcagauggcugcuu

SEQ ID NO: 1003589 - RNA, 19 nt, Artificial Sequence
  Description of Artificial Sequence: Synthetic oligonucleotide
cccgcacaccuuguccaaa

SEQ ID NO: 1003590 - RNA, 19 nt, Artificial Sequence
  Description of Artificial Sequence: Synthetic oligonucleotide
ccacggccgcuccagcagu

SEQ ID NO: 1003591 - RNA, 19 nt, Artificial Sequence
  Description of Artificial Sequence: Synthetic oligonucleotide
cgcccgcuugcgguacuug

SEQ ID NO: 1003592 - RNA, 19 nt, Artificial Sequence
  Description of Artificial Sequence: Synthetic oligonucleotide
gcacccucgagcggucauu

SEQ ID NO: 1003593 - RNA, 19 nt, Artificial Sequence
  Description of Artificial Sequence: Synthetic oligonucleotide
gggcccaccucugcccgau

SEQ ID NO: 1003594 - RNA, 19 nt, Artificial Sequence
  Description of Artificial Sequence: Synthetic oligonucleotide
cgcuaaggaugaagaugau

SEQ ID NO: 1003595 - RNA, 19 nt, Artificial Sequence
  Description of Artificial Sequence: Synthetic oligonucleotide
gccccacuggaggcugguu

SEQ ID NO: 1003596 - RNA, 19 nt, Artificial Sequence
  Description of Artificial Sequence: Synthetic oligonucleotide
gcgcccgcuugcgguacuu

SEQ ID NO: 1003597 - RNA, 19 nt, Artificial Sequence
  Description of Artificial Sequence: Synthetic oligonucleotide
  modified_base (1)..(1): a, c, u, g, unknown or other
ngaacugaccugugugguc

SEQ ID NO: 1003598 - RNA, 19 nt, Artificial Sequence
  Description of Artificial Sequence: Synthetic oligonucleotide
auuuagcuaacuuaguuac

SEQ ID NO: 1003599 - RNA, 19 nt, Artificial Sequence
  Description of Artificial Sequence: Synthetic oligonucleotide
uauugaacuggcaagcacg

SEQ ID NO: 1003600 - RNA, 19 nt, Artificial Sequence
  Description of Artificial Sequence: Synthetic oligonucleotide
ucucgauaaaacuuuaugc

SEQ ID NO: 1003601 - RNA, 19 nt, Artificial Sequence
  Description of Artificial Sequence: Synthetic oligonucleotide
aaugaauucuugcaguccu

SEQ ID NO: 1003602 - RNA, 19 nt, Artificial Sequence
  Description of Artificial Sequence: Synthetic oligonucleotide
caaacuauaaccuugagcu

SEQ ID NO: 1003603 - RNA, 19 nt, Artificial Sequence
  Description of Artificial Sequence: Synthetic oligonucleotide
aacuauaaccuugagcuuc

SEQ ID NO: 1003604 - RNA, 19 nt, Artificial Sequence
  Description of Artificial Sequence: Synthetic oligonucleotide
uuucaaacgcuuuaaacac

SEQ ID NO: 1003605 - RNA, 19 nt, Artificial Sequence
  Description of Artificial Sequence: Synthetic oligonucleotide
ucaaucuggauugagaaca

SEQ ID NO: 1003606 - RNA, 19 nt, Artificial Sequence
  Description of Artificial Sequence: Synthetic oligonucleotide
aacuacgguuuucaguagc

SEQ ID NO: 1003607 - RNA, 19 nt, Artificial Sequence
  Description of Artificial Sequence: Synthetic oligonucleotide
auauugcuagcccagagag

SEQ ID NO: 1003608 - RNA, 19 nt, Artificial Sequence
  Description of Artificial Sequence: Synthetic oligonucleotide
uuugaaagucuucucaaga

SEQ ID NO: 1003609 - RNA, 19 nt, Artificial Sequence
  Description of Artificial Sequence: Synthetic oligonucleotide
aguccuaagugcuucacgg

SEQ ID NO: 1003610 - RNA, 19 nt, Artificial Sequence
  Description of Artificial Sequence: Synthetic oligonucleotide
guuguuguggucaugaugc

SEQ ID NO: 1003611 - RNA, 19 nt, Artificial Sequence
  Description of Artificial Sequence: Synthetic oligonucleotide
aacuuaguuacuccuuuag

SEQ ID NO: 1003612 - RNA, 19 nt, Artificial Sequence
  Description of Artificial Sequence: Synthetic oligonucleotide
uacucuuugaaguaaggca

SEQ ID NO: 1003613 - RNA, 19 nt, Artificial Sequence
  Description of Artificial Sequence: Synthetic oligonucleotide
auaaugaauucuugcaguc

SEQ ID NO: 1003614 - RNA, 19 nt, Artificial Sequence
  Description of Artificial Sequence: Synthetic oligonucleotide
aguagccuuguuucgaagc

SEQ ID NO: 1003615 - RNA, 19 nt, Artificial Sequence
  Description of Artificial Sequence: Synthetic oligonucleotide
uguucuaccugccggagag

SEQ ID NO: 1003616 - RNA, 19 nt, Artificial Sequence
  Description of Artificial Sequence: Synthetic oligonucleotide
aacgcuuuaaacacuguuc

SEQ ID NO: 1003617 - RNA, 19 nt, Artificial Sequence
  Description of Artificial Sequence: Synthetic oligonucleotide
uuucuguuaggacagacau

SEQ ID NO: 1003618 - RNA, 19 nt, Artificial Sequence
  Description of Artificial Sequence: Synthetic oligonucleotide
aauauugcuagcccagaga

SEQ ID NO: 1003619 - RNA, 19 nt, Artificial Sequence
  Description of Artificial Sequence: Synthetic oligonucleotide
uggguaacugcccagaagu

SEQ ID NO: 1003620 - RNA, 19 nt, Artificial Sequence
  Description of Artificial Sequence: Synthetic oligonucleotide
ucaaacgcuuuaaacacug

SEQ ID NO: 1003621 - RNA, 19 nt, Artificial Sequence
  Description of Artificial Sequence: Synthetic oligonucleotide
gaacugucccaccugagcg

SEQ ID NO: 1003622 - RNA, 19 nt, Artificial Sequence
  Description of Artificial Sequence: Synthetic oligonucleotide
auaaccuugagcuuccaca

SEQ ID NO: 1003623 - RNA, 19 nt, Artificial Sequence
  Description of Artificial Sequence: Synthetic oligonucleotide
uguuaaguguuuauugaac

SEQ ID NO: 1003624 - RNA, 19 nt, Artificial Sequence
  Description of Artificial Sequence: Synthetic oligonucleotide
ugugagauucccauggaac

SEQ ID NO: 1003625 - RNA, 19 nt, Artificial Sequence
  Description of Artificial Sequence: Synthetic oligonucleotide
acaacuacgguuuucagua

SEQ ID NO: 1003626 - RNA, 19 nt, Artificial Sequence
  Description of Artificial Sequence: Synthetic oligonucleotide
uagaaauucuaucuagagu

SEQ ID NO: 1003627 - RNA, 19 nt, Artificial Sequence
  Description of Artificial Sequence: Synthetic oligonucleotide
ucauuggcagacaacaacu

SEQ ID NO: 1003628 - RNA, 19 nt, Artificial Sequence
  Description of Artificial Sequence: Synthetic oligonucleotide
aacgaucuggguaacugcc

SEQ ID NO: 1003629 - RNA, 19 nt, Artificial Sequence
  Description of Artificial Sequence: Synthetic oligonucleotide
agcuaaauggggcuugugg

SEQ ID NO: 1003630 - RNA, 19 nt, Artificial Sequence
  Description of Artificial Sequence: Synthetic oligonucleotide
aggacuaaaaccuuugaaa

SEQ ID NO: 1003631 - RNA, 19 nt, Artificial Sequence
  Description of Artificial Sequence: Synthetic oligonucleotide
ugucuguuuguccacaaac

SEQ ID NO: 1003632 - RNA, 19 nt, Artificial Sequence
  Description of Artificial Sequence: Synthetic oligonucleotide
aaauucuaucuagaguguc

SEQ ID NO: 1003633 - RNA, 19 nt, Artificial Sequence
  Description of Artificial Sequence: Synthetic oligonucleotide
uauuuagcuaacuuaguua

SEQ ID NO: 1003634 - RNA, 19 nt, Artificial Sequence
  Description of Artificial Sequence: Synthetic oligonucleotide
uucacggucaaccgaaaug

SEQ ID NO: 1003635 - RNA, 19 nt, Artificial Sequence
  Description of Artificial Sequence: Synthetic oligonucleotide
cuugcagccucccaaaacc

SEQ ID NO: 1003636 - RNA, 19 nt, Artificial Sequence
  Description of Artificial Sequence: Synthetic oligonucleotide
gugauugcuguagagaacg

SEQ ID NO: 1003637 - RNA, 19 nt, Artificial Sequence
  Description of Artificial Sequence: Synthetic oligonucleotide
ugcacaauauugcuagccc

SEQ ID NO: 1003638 - RNA, 19 nt, Artificial Sequence
  Description of Artificial Sequence: Synthetic oligonucleotide
uucauuggcagacaacaac

SEQ ID NO: 1003639 - RNA, 19 nt, Artificial Sequence
  Description of Artificial Sequence: Synthetic oligonucleotide
cuaaauggggcuuguggcg

SEQ ID NO: 1003640 - RNA, 19 nt, Artificial Sequence
  Description of Artificial Sequence: Synthetic oligonucleotide
ucguauaaggaaaccagac

SEQ ID NO: 1003641 - RNA, 19 nt, Artificial Sequence
  Description of Artificial Sequence: Synthetic oligonucleotide
uguuucgaagccuugugca

SEQ ID NO: 1003642 - RNA, 19 nt, Artificial Sequence
  Description of Artificial Sequence: Synthetic oligonucleotide
aagcgcaguaacaacuugc

SEQ ID NO: 1003643 - RNA, 19 nt, Artificial Sequence
  Description of Artificial Sequence: Synthetic oligonucleotide
uccuuauaaguuguugugg

SEQ ID NO: 1003644 - RNA, 19 nt, Artificial Sequence
  Description of Artificial Sequence: Synthetic oligonucleotide
aguaaaaccccuguuaagu

SEQ ID NO: 1003645 - RNA, 19 nt, Artificial Sequence
  Description of Artificial Sequence: Synthetic oligonucleotide
uggauugagaacauuuaaa

SEQ ID NO: 1003646 - RNA, 19 nt, Artificial Sequence
  Description of Artificial Sequence: Synthetic oligonucleotide
aauaggacuaaaaccuuug

SEQ ID NO: 1003647 - RNA, 19 nt, Artificial Sequence
  Description of Artificial Sequence: Synthetic oligonucleotide
cauuuaaacucccggcugg

SEQ ID NO: 1003648 - RNA, 19 nt, Artificial Sequence
  Description of Artificial Sequence: Synthetic oligonucleotide
ucuaucuagagugucuuca

SEQ ID NO: 1003649 - RNA, 19 nt, Artificial Sequence
  Description of Artificial Sequence: Synthetic oligonucleotide
ucacggucaaccgaaaugc

SEQ ID NO: 1003650 - RNA, 19 nt, Artificial Sequence
  Description of Artificial Sequence: Synthetic oligonucleotide
guauaaggaaaccagaccu

SEQ ID NO: 1003651 - RNA, 19 nt, Artificial Sequence
  Description of Artificial Sequence: Synthetic oligonucleotide
auaaccugcucaccagccc

SEQ ID NO: 1003652 - RNA, 19 nt, Artificial Sequence
  Description of Artificial Sequence: Synthetic oligonucleotide
uuauugaacuggcaagcac

SEQ ID NO: 1003653 - RNA, 19 nt, Artificial Sequence
  Description of Artificial Sequence: Synthetic oligonucleotide
uggcccuagaaaaucagug

SEQ ID NO: 1003654 - RNA, 19 nt, Artificial Sequence
  Description of Artificial Sequence: Synthetic oligonucleotide
uuagcuaacuuaguuacuc

SEQ ID NO: 1003655 - RNA, 19 nt, Artificial Sequence
  Description of Artificial Sequence: Synthetic oligonucleotide
agagcucgcacaucaaauc

SEQ ID NO: 1003656 - RNA, 19 nt, Artificial Sequence
  Description of Artificial Sequence: Synthetic oligonucleotide
aaggcaguugcaaagagau

SEQ ID NO: 1003657 - RNA, 19 nt, Artificial Sequence
  Description of Artificial Sequence: Synthetic oligonucleotide
uaguuacuccuuuaguggc

SEQ ID NO: 1003658 - RNA, 19 nt, Artificial Sequence
  Description of Artificial Sequence: Synthetic oligonucleotide
cuuugaagugcugauaaug

SEQ ID NO: 1003659 - RNA, 19 nt, Artificial Sequence
  Description of Artificial Sequence: Synthetic oligonucleotide
gucucgauaaaacuuuaug

SEQ ID NO: 1003660 - RNA, 19 nt, Artificial Sequence
  Description of Artificial Sequence: Synthetic oligonucleotide
uaaacgcccaucaaagcaa

SEQ ID NO: 1003661 - RNA, 19 nt, Artificial Sequence
  Description of Artificial Sequence: Synthetic oligonucleotide
ugucuaggagaacacuuug

SEQ ID NO: 1003662 - RNA, 19 nt, Artificial Sequence
  Description of Artificial Sequence: Synthetic oligonucleotide
ucgugucaguuucugagag

SEQ ID NO: 1003663 - RNA, 19 nt, Artificial Sequence
  Description of Artificial Sequence: Synthetic oligonucleotide
caugggaugaauccuggag

SEQ ID NO: 1003664 - RNA, 19 nt, Artificial Sequence
  Description of Artificial Sequence: Synthetic oligonucleotide
uuguuucgaagccuugugc

SEQ ID NO: 1003665 - RNA, 19 nt, Artificial Sequence
  Description of Artificial Sequence: Synthetic oligonucleotide
aggaaaggcauacucuuug

SEQ ID NO: 1003666 - RNA, 19 nt, Artificial Sequence
  Description of Artificial Sequence: Synthetic oligonucleotide
aaacgcuuuaaacacuguu

SEQ ID NO: 1003667 - RNA, 19 nt, Artificial Sequence
  Description of Artificial Sequence: Synthetic oligonucleotide
aacaagcgcaguaacaacu

SEQ ID NO: 1003668 - RNA, 19 nt, Artificial Sequence
  Description of Artificial Sequence: Synthetic oligonucleotide
cacaauauugcuagcccag

SEQ ID NO: 1003669 - RNA, 19 nt, Artificial Sequence
  Description of Artificial Sequence: Synthetic oligonucleotide
aucuaaacgcccaucaaag

SEQ ID NO: 1003670 - RNA, 19 nt, Artificial Sequence
  Description of Artificial Sequence: Synthetic oligonucleotide
ucccuagugcucuucagag

SEQ ID NO: 1003671 - RNA, 19 nt, Artificial Sequence
  Description of Artificial Sequence: Synthetic oligonucleotide
ucuagagugucuucacuga

SEQ ID NO: 1003672 - RNA, 19 nt, Artificial Sequence
  Description of Artificial Sequence: Synthetic oligonucleotide
uaggacuaaaaccuuugaa

SEQ ID NO: 1003673 - RNA, 19 nt, Artificial Sequence
  Description of Artificial Sequence: Synthetic oligonucleotide
ucgauaaaacuuuaugcuu

SEQ ID NO: 1003674 - RNA, 19 nt, Artificial Sequence
  Description of Artificial Sequence: Synthetic oligonucleotide
agagugucuucacugaccu

SEQ ID NO: 1003675 - RNA, 19 nt, Artificial Sequence
  Description of Artificial Sequence: Synthetic oligonucleotide
ugaacgaucuggguaacug

SEQ ID NO: 1003676 - RNA, 19 nt, Artificial Sequence
  Description of Artificial Sequence: Synthetic oligonucleotide
cauacuacucugugcauug

SEQ ID NO: 1003677 - RNA, 19 nt, Artificial Sequence
  Description of Artificial Sequence: Synthetic oligonucleotide
gagaguucgugucaguuuc

SEQ ID NO: 1003678 - RNA, 19 nt, Artificial Sequence
  Description of Artificial Sequence: Synthetic oligonucleotide
agcacuagggucccuagug

SEQ ID NO: 1003679 - RNA, 19 nt, Artificial Sequence
  Description of Artificial Sequence: Synthetic oligonucleotide
ucuaaacgcccaucaaagc

SEQ ID NO: 1003680 - RNA, 19 nt, Artificial Sequence
  Description of Artificial Sequence: Synthetic oligonucleotide
uuaaaagaguugacuguaa

SEQ ID NO: 1003681 - RNA, 19 nt, Artificial Sequence
  Description of Artificial Sequence: Synthetic oligonucleotide
aagguggcccuagaaaauc

SEQ ID NO: 1003682 - RNA, 19 nt, Artificial Sequence
  Description of Artificial Sequence: Synthetic oligonucleotide
gauugagaacauuuaaacu

SEQ ID NO: 1003683 - RNA, 19 nt, Artificial Sequence
  Description of Artificial Sequence: Synthetic oligonucleotide
ucuggauugagaacauuua

SEQ ID NO: 1003684 - RNA, 19 nt, Artificial Sequence
  Description of Artificial Sequence: Synthetic oligonucleotide
acuauaaccuugagcuucc

SEQ ID NO: 1003685 - RNA, 19 nt, Artificial Sequence
  Description of Artificial Sequence: Synthetic oligonucleotide
gagcucgcacaucaaaucc

SEQ ID NO: 1003686 - RNA, 19 nt, Artificial Sequence
  Description of Artificial Sequence: Synthetic oligonucleotide
gaacccauaaccugcucac

SEQ ID NO: 1003687 - RNA, 19 nt, Artificial Sequence
  Description of Artificial Sequence: Synthetic oligonucleotide
cuaaacgcccaucaaagca

SEQ ID NO: 1003688 - RNA, 19 nt, Artificial Sequence
  Description of Artificial Sequence: Synthetic oligonucleotide
accgaaaugccuugcagca

SEQ ID NO: 1003689 - RNA, 19 nt, Artificial Sequence
  Description of Artificial Sequence: Synthetic oligonucleotide
agaacccauaaccugcuca

SEQ ID NO: 1003690 - RNA, 19 nt, Artificial Sequence
  Description of Artificial Sequence: Synthetic oligonucleotide
agcuaacuuaguuacuccu

SEQ ID NO: 1003691 - RNA, 19 nt, Artificial Sequence
  Description of Artificial Sequence: Synthetic oligonucleotide
ugcgguuuccucugucucg

SEQ ID NO: 1003692 - RNA, 19 nt, Artificial Sequence
  Description of Artificial Sequence: Synthetic oligonucleotide
gaacgaucuggguaacugc

SEQ ID NO: 1003693 - RNA, 19 nt, Artificial Sequence
  Description of Artificial Sequence: Synthetic oligonucleotide
guaagguggcccuagaaaa

SEQ ID NO: 1003694 - RNA, 19 nt, Artificial Sequence
  Description of Artificial Sequence: Synthetic oligonucleotide
agaguuccacguaaggugg

SEQ ID NO: 1003695 - RNA, 19 nt, Artificial Sequence
  Description of Artificial Sequence: Synthetic oligonucleotide
uuuagcuaacuuaguuacu

SEQ ID NO: 1003696 - RNA, 19 nt, Artificial Sequence
  Description of Artificial Sequence: Synthetic oligonucleotide
uaaauaggacuaaaaccuu

SEQ ID NO: 1003697 - RNA, 19 nt, Artificial Sequence
  Description of Artificial Sequence: Synthetic oligonucleotide
cucgauaaaacuuuaugcu

SEQ ID NO: 1003698 - RNA, 19 nt, Artificial Sequence
  Description of Artificial Sequence: Synthetic oligonucleotide
augaugauaaauaggacua

SEQ ID NO: 1003699 - RNA, 19 nt, Artificial Sequence
  Description of Artificial Sequence: Synthetic oligonucleotide
caugaugccucuucacagc

SEQ ID NO: 1003700 - RNA, 19 nt, Artificial Sequence
  Description of Artificial Sequence: Synthetic oligonucleotide
gcaaacuauaaccuugagc

SEQ ID NO: 1003701 - RNA, 19 nt, Artificial Sequence
  Description of Artificial Sequence: Synthetic oligonucleotide
auugcuagcccagagaguu

SEQ ID NO: 1003702 - RNA, 19 nt, Artificial Sequence
  Description of Artificial Sequence: Synthetic oligonucleotide
guagccuuguuucgaagcc

SEQ ID NO: 1003703 - RNA, 19 nt, Artificial Sequence
  Description of Artificial Sequence: Synthetic oligonucleotide
uaaccuugagcuuccacau

SEQ ID NO: 1003704 - RNA, 19 nt, Artificial Sequence
  Description of Artificial Sequence: Synthetic oligonucleotide
gcuaaauggggcuuguggc

SEQ ID NO: 1003705 - RNA, 19 nt, Artificial Sequence
  Description of Artificial Sequence: Synthetic oligonucleotide
ugauugcuguagagaacgg

SEQ ID NO: 1003706 - RNA, 19 nt, Artificial Sequence
  Description of Artificial Sequence: Synthetic oligonucleotide
ugugauugcuguagagaac

SEQ ID NO: 1003707 - RNA, 19 nt, Artificial Sequence
  Description of Artificial Sequence: Synthetic oligonucleotide
uucaacugagcccuccaaa

SEQ ID NO: 1003708 - RNA, 19 nt, Artificial Sequence
  Description of Artificial Sequence: Synthetic oligonucleotide
acuacucugugcauuguuc

SEQ ID NO: 1003709 - RNA, 19 nt, Artificial Sequence
  Description of Artificial Sequence: Synthetic oligonucleotide
uguguguguguguuugucu

SEQ ID NO: 1003710 - RNA, 19 nt, Artificial Sequence
  Description of Artificial Sequence: Synthetic oligonucleotide
caauauugcuagcccagag

SEQ ID NO: 1003711 - RNA, 19 nt, Artificial Sequence
  Description of Artificial Sequence: Synthetic oligonucleotide
guuucgaagccuugugcag

SEQ ID NO: 1003712 - RNA, 19 nt, Artificial Sequence
  Description of Artificial Sequence: Synthetic oligonucleotide
uagcuaacuuaguuacucc

SEQ ID NO: 1003713 - RNA, 19 nt, Artificial Sequence
  Description of Artificial Sequence: Synthetic oligonucleotide
gaacccugaacgaucuggg

SEQ ID NO: 1003714 - RNA, 19 nt, Artificial Sequence
  Description of Artificial Sequence: Synthetic oligonucleotide
uauaaguuguuguggucau

SEQ ID NO: 1003715 - RNA, 19 nt, Artificial Sequence
  Description of Artificial Sequence: Synthetic oligonucleotide
uucgaagccuugugcagag

SEQ ID NO: 1003716 - RNA, 19 nt, Artificial Sequence
  Description of Artificial Sequence: Synthetic oligonucleotide
guguguguguguuugucug

SEQ ID NO: 1003717 - RNA, 19 nt, Artificial Sequence
  Description of Artificial Sequence: Synthetic oligonucleotide
agccuguuacucuugagaa

SEQ ID NO: 1003718 - RNA, 19 nt, Artificial Sequence
  Description of Artificial Sequence: Synthetic oligonucleotide
ccacuuaaacagcagaacc

SEQ ID NO: 1003719 - RNA, 19 nt, Artificial Sequence
  Description of Artificial Sequence: Synthetic oligonucleotide
cuaucuagagugucuucac

SEQ ID NO: 1003720 - RNA, 19 nt, Artificial Sequence
  Description of Artificial Sequence: Synthetic oligonucleotide
ggaacaauggcucguauaa

SEQ ID NO: 1003721 - RNA, 19 nt, Artificial Sequence
  Description of Artificial Sequence: Synthetic oligonucleotide
cacaucaaauccugauggc

SEQ ID NO: 1003722 - RNA, 19 nt, Artificial Sequence
  Description of Artificial Sequence: Synthetic oligonucleotide
acaucaaauccugauggcu

SEQ ID NO: 1003723 - RNA, 19 nt, Artificial Sequence
  Description of Artificial Sequence: Synthetic oligonucleotide
uucgugucaguuucugaga

SEQ ID NO: 1003724 - RNA, 19 nt, Artificial Sequence
  Description of Artificial Sequence: Synthetic oligonucleotide
ucggauucuuugcacaaua

SEQ ID NO: 1003725 - RNA, 19 nt, Artificial Sequence
  Description of Artificial Sequence: Synthetic oligonucleotide
uuagcacuagggucccuag

SEQ ID NO: 1003726 - RNA, 19 nt, Artificial Sequence
  Description of Artificial Sequence: Synthetic oligonucleotide
cgcaguaacaacuugcagc

SEQ ID NO: 1003727 - RNA, 19 nt, Artificial Sequence
  Description of Artificial Sequence: Synthetic oligonucleotide
aagcacgcguguggaaugc

SEQ ID NO: 1003728 - RNA, 19 nt, Artificial Sequence
  Description of Artificial Sequence: Synthetic oligonucleotide
aaggcaugggaugaauccu

SEQ ID NO: 1003729 - RNA, 19 nt, Artificial Sequence
  Description of Artificial Sequence: Synthetic oligonucleotide
agguccauacuacucugug

SEQ ID NO: 1003730 - RNA, 19 nt, Artificial Sequence
  Description of Artificial Sequence: Synthetic oligonucleotide
acccauaaccugcucacca

SEQ ID NO: 1003731 - RNA, 19 nt, Artificial Sequence
  Description of Artificial Sequence: Synthetic oligonucleotide
uucucugcgguuuccucug

SEQ ID NO: 1003732 - RNA, 19 nt, Artificial Sequence
  Description of Artificial Sequence: Synthetic oligonucleotide
aguuccacguaagguggcc

SEQ ID NO: 1003733 - RNA, 19 nt, Artificial Sequence
  Description of Artificial Sequence: Synthetic oligonucleotide
auaauggagccucgaagaa

SEQ ID NO: 1003734 - RNA, 19 nt, Artificial Sequence
  Description of Artificial Sequence: Synthetic oligonucleotide
uacuccuuuaguggcaaca

SEQ ID NO: 1003735 - RNA, 19 nt, Artificial Sequence
  Description of Artificial Sequence: Synthetic oligonucleotide
uaagguggcccuagaaaau

SEQ ID NO: 1003736 - RNA, 19 nt, Artificial Sequence
  Description of Artificial Sequence: Synthetic oligonucleotide
uuucgaagccuugugcaga

SEQ ID NO: 1003737 - RNA, 19 nt, Artificial Sequence
  Description of Artificial Sequence: Synthetic oligonucleotide
agaccuccuuaaaaguccc

SEQ ID NO: 1003738 - RNA, 19 nt, Artificial Sequence
  Description of Artificial Sequence: Synthetic oligonucleotide
cuuguggcggcccauucug

SEQ ID NO: 1003739 - RNA, 19 nt, Artificial Sequence
  Description of Artificial Sequence: Synthetic oligonucleotide
ugcugauaauggagccucg

SEQ ID NO: 1003740 - RNA, 19 nt, Artificial Sequence
  Description of Artificial Sequence: Synthetic oligonucleotide
guaacugcccagaaguuuc

SEQ ID NO: 1003741 - RNA, 19 nt, Artificial Sequence
  Description of Artificial Sequence: Synthetic oligonucleotide
ucugcgguuuccucugucu

SEQ ID NO: 1003742 - RNA, 19 nt, Artificial Sequence
  Description of Artificial Sequence: Synthetic oligonucleotide
uauugcuagcccagagagu

SEQ ID NO: 1003743 - RNA, 19 nt, Artificial Sequence
  Description of Artificial Sequence: Synthetic oligonucleotide
cagaaguuucacaugugca

SEQ ID NO: 1003744 - RNA, 19 nt, Artificial Sequence
  Description of Artificial Sequence: Synthetic oligonucleotide
ugcuugucuucaaucugga

SEQ ID NO: 1003745 - RNA, 19 nt, Artificial Sequence
  Description of Artificial Sequence: Synthetic oligonucleotide
cacaucuaaacgcccauca

SEQ ID NO: 1003746 - RNA, 19 nt, Artificial Sequence
  Description of Artificial Sequence: Synthetic oligonucleotide
cucguauaaggaaaccaga

SEQ ID NO: 1003747 - RNA, 19 nt, Artificial Sequence
  Description of Artificial Sequence: Synthetic oligonucleotide
gaacaauggcucguauaag

SEQ ID NO: 1003748 - RNA, 19 nt, Artificial Sequence
  Description of Artificial Sequence: Synthetic oligonucleotide
auggcucguauaaggaaac

SEQ ID NO: 1003749 - RNA, 19 nt, Artificial Sequence
  Description of Artificial Sequence: Synthetic oligonucleotide
uggaacaauggcucguaua

SEQ ID NO: 1003750 - RNA, 19 nt, Artificial Sequence
  Description of Artificial Sequence: Synthetic oligonucleotide
agucccuuauggagaaccc

SEQ ID NO: 1003751 - RNA, 19 nt, Artificial Sequence
  Description of Artificial Sequence: Synthetic oligonucleotide
uucuguuaggacagacauc

SEQ ID NO: 1003752 - RNA, 19 nt, Artificial Sequence
  Description of Artificial Sequence: Synthetic oligonucleotide
cagcaguccaacaagcgca

SEQ ID NO: 1003753 - RNA, 19 nt, Artificial Sequence
  Description of Artificial Sequence: Synthetic oligonucleotide
ucgcacaucaaauccugau

SEQ ID NO: 1003754 - RNA, 19 nt, Artificial Sequence
  Description of Artificial Sequence: Synthetic oligonucleotide
ugucucgauaaaacuuuau

SEQ ID NO: 1003755 - RNA, 19 nt, Artificial Sequence
  Description of Artificial Sequence: Synthetic oligonucleotide
ugaguagccuuguuucgaa

SEQ ID NO: 1003756 - RNA, 19 nt, Artificial Sequence
  Description of Artificial Sequence: Synthetic oligonucleotide
caucuaaacgcccaucaaa

SEQ ID NO: 1003757 - RNA, 19 nt, Artificial Sequence
  Description of Artificial Sequence: Synthetic oligonucleotide
ggucgguuuucccuuaaag

SEQ ID NO: 1003758 - RNA, 19 nt, Artificial Sequence
  Description of Artificial Sequence: Synthetic oligonucleotide
ugaugauaaauaggacuaa

SEQ ID NO: 1003759 - RNA, 19 nt, Artificial Sequence
  Description of Artificial Sequence: Synthetic oligonucleotide
cacgcguguggaaugcugc

SEQ ID NO: 1003760 - RNA, 19 nt, Artificial Sequence
  Description of Artificial Sequence: Synthetic oligonucleotide
gaucuggguaacugcccag

SEQ ID NO: 1003761 - RNA, 19 nt, Artificial Sequence
  Description of Artificial Sequence: Synthetic oligonucleotide
uucauuuguucagauguuu

SEQ ID NO: 1003762 - RNA, 19 nt, Artificial Sequence
  Description of Artificial Sequence: Synthetic oligonucleotide
agaggaaaguuugcuuguc

SEQ ID NO: 1003763 - RNA, 19 nt, Artificial Sequence
  Description of Artificial Sequence: Synthetic oligonucleotide
aaacucccggcuggucucc

SEQ ID NO: 1003764 - RNA, 19 nt, Artificial Sequence
  Description of Artificial Sequence: Synthetic oligonucleotide
gagacaggucuucaacuga

SEQ ID NO: 1003765 - RNA, 19 nt, Artificial Sequence
  Description of Artificial Sequence: Synthetic oligonucleotide
cucccaaaaccuucaucag

SEQ ID NO: 1003766 - RNA, 19 nt, Artificial Sequence
  Description of Artificial Sequence: Synthetic oligonucleotide
uaaacucccggcuggucuc

SEQ ID NO: 1003767 - RNA, 19 nt, Artificial Sequence
  Description of Artificial Sequence: Synthetic oligonucleotide
gcucguauaaggaaaccag

SEQ ID NO: 1003768 - RNA, 19 nt, Artificial Sequence
  Description of Artificial Sequence: Synthetic oligonucleotide
guaacaacuugcagccucc

SEQ ID NO: 1003769 - RNA, 19 nt, Artificial Sequence
  Description of Artificial Sequence: Synthetic oligonucleotide
agacaggucuucaacugag

SEQ ID NO: 1003770 - RNA, 19 nt, Artificial Sequence
  Description of Artificial Sequence: Synthetic oligonucleotide
caacaagcgcaguaacaac

SEQ ID NO: 1003771 - RNA, 19 nt, Artificial Sequence
  Description of Artificial Sequence: Synthetic oligonucleotide
cagcuuguggcacacugug

SEQ ID NO: 1003772 - RNA, 19 nt, Artificial Sequence
  Description of Artificial Sequence: Synthetic oligonucleotide
agagagcucgcacaucaaa

SEQ ID NO: 1003773 - RNA, 19 nt, Artificial Sequence
  Description of Artificial Sequence: Synthetic oligonucleotide
uucaggucgguuuucccuu

SEQ ID NO: 1003774 - RNA, 19 nt, Artificial Sequence
  Description of Artificial Sequence: Synthetic oligonucleotide
uucuaccugccggagagcu

SEQ ID NO: 1003775 - RNA, 19 nt, Artificial Sequence
  Description of Artificial Sequence: Synthetic oligonucleotide
agagaguucgugucaguuu

SEQ ID NO: 1003776 - RNA, 19 nt, Artificial Sequence
  Description of Artificial Sequence: Synthetic oligonucleotide
gaguagccuuguuucgaag

SEQ ID NO: 1003777 - RNA, 19 nt, Artificial Sequence
  Description of Artificial Sequence: Synthetic oligonucleotide
ugguaguuguucuuucauu

SEQ ID NO: 1003778 - RNA, 19 nt, Artificial Sequence
  Description of Artificial Sequence: Synthetic oligonucleotide
gucacucggauucuuugca

SEQ ID NO: 1003779 - RNA, 19 nt, Artificial Sequence
  Description of Artificial Sequence: Synthetic oligonucleotide
ccucgaagaaggcaguugc

SEQ ID NO: 1003780 - RNA, 19 nt, Artificial Sequence
  Description of Artificial Sequence: Synthetic oligonucleotide
cuggauugagaacauuuaa

SEQ ID NO: 1003781 - RNA, 19 nt, Artificial Sequence
  Description of Artificial Sequence: Synthetic oligonucleotide
cccuguuaaguguuuauug

SEQ ID NO: 1003782 - RNA, 19 nt, Artificial Sequence
  Description of Artificial Sequence: Synthetic oligonucleotide
uugaacuggcaagcacgcg

SEQ ID NO: 1003783 - RNA, 19 nt, Artificial Sequence
  Description of Artificial Sequence: Synthetic oligonucleotide
aguucgugucaguuucuga

SEQ ID NO: 1003784 - RNA, 19 nt, Artificial Sequence
  Description of Artificial Sequence: Synthetic oligonucleotide
gagagcuaaauggggcuug

SEQ ID NO: 1003785 - RNA, 19 nt, Artificial Sequence
  Description of Artificial Sequence: Synthetic oligonucleotide
cacuguguguguguguuug

SEQ ID NO: 1003786 - RNA, 19 nt, Artificial Sequence
  Description of Artificial Sequence: Synthetic oligonucleotide
uucuaucuagagugucuuc

SEQ ID NO: 1003787 - RNA, 19 nt, Artificial Sequence
  Description of Artificial Sequence: Synthetic oligonucleotide
gcccuagaaaaucagugac

SEQ ID NO: 1003788 - RNA, 19 nt, Artificial Sequence
  Description of Artificial Sequence: Synthetic oligonucleotide
uguuacucuugagaaguuu

SEQ ID NO: 1003789 - RNA, 19 nt, Artificial Sequence
  Description of Artificial Sequence: Synthetic oligonucleotide
gguccauacuacucugugc

SEQ ID NO: 1003790 - RNA, 19 nt, Artificial Sequence
  Description of Artificial Sequence: Synthetic oligonucleotide
caagcacgcguguggaaug

SEQ ID NO: 1003791 - RNA, 19 nt, Artificial Sequence
  Description of Artificial Sequence: Synthetic oligonucleotide
acuacgguuuucaguagcu

SEQ ID NO: 1003792 - RNA, 19 nt, Artificial Sequence
  Description of Artificial Sequence: Synthetic oligonucleotide
uggcggcccauucuguugu

SEQ ID NO: 1003793 - RNA, 19 nt, Artificial Sequence
  Description of Artificial Sequence: Synthetic oligonucleotide
ggcaguugcaaagagaugu

SEQ ID NO: 1003794 - RNA, 19 nt, Artificial Sequence
  Description of Artificial Sequence: Synthetic oligonucleotide
cacggucaaccgaaaugcc

SEQ ID NO: 1003795 - RNA, 19 nt, Artificial Sequence
  Description of Artificial Sequence: Synthetic oligonucleotide
ggucacucggauucuuugc

SEQ ID NO: 1003796 - RNA, 19 nt, Artificial Sequence
  Description of Artificial Sequence: Synthetic oligonucleotide
acaauauugcuagcccaga

SEQ ID NO: 1003797 - RNA, 19 nt, Artificial Sequence
  Description of Artificial Sequence: Synthetic oligonucleotide
gugcugauaauggagccuc

SEQ ID NO: 1003798 - RNA, 19 nt, Artificial Sequence
  Description of Artificial Sequence: Synthetic oligonucleotide
uggagccucgaagaaggca

SEQ ID NO: 1003799 - RNA, 19 nt, Artificial Sequence
  Description of Artificial Sequence: Synthetic oligonucleotide
gaguucgugucaguuucug

SEQ ID NO: 1003800 - RNA, 19 nt, Artificial Sequence
  Description of Artificial Sequence: Synthetic oligonucleotide
agcgcaguaacaacuugca

SEQ ID NO: 1003801 - RNA, 19 nt, Artificial Sequence
  Description of Artificial Sequence: Synthetic oligonucleotide
cuggcguggggacaacuac

SEQ ID NO: 1003802 - RNA, 19 nt, Artificial Sequence
  Description of Artificial Sequence: Synthetic oligonucleotide
caacuacgguuuucaguag

SEQ ID NO: 1003803 - RNA, 19 nt, Artificial Sequence
  Description of Artificial Sequence: Synthetic oligonucleotide
auuuaaacucccggcuggu

SEQ ID NO: 1003804 - RNA, 19 nt, Artificial Sequence
  Description of Artificial Sequence: Synthetic oligonucleotide
gcccauucuguugugauug

SEQ ID NO: 1003805 - RNA, 19 nt, Artificial Sequence
  Description of Artificial Sequence: Synthetic oligonucleotide
cagacuuugaaagucuucu

SEQ ID NO: 1003806 - RNA, 19 nt, Artificial Sequence
  Description of Artificial Sequence: Synthetic oligonucleotide
guccaacaagcgcaguaac

SEQ ID NO: 1003807 - RNA, 19 nt, Artificial Sequence
  Description of Artificial Sequence: Synthetic oligonucleotide
uggaaccccggcuccuuug

SEQ ID NO: 1003808 - RNA, 19 nt, Artificial Sequence
  Description of Artificial Sequence: Synthetic oligonucleotide
uuuaaacucccggcugguc

SEQ ID NO: 1003809 - RNA, 19 nt, Artificial Sequence
  Description of Artificial Sequence: Synthetic oligonucleotide
gcacaauauugcuagccca

SEQ ID NO: 1003810 - RNA, 19 nt, Artificial Sequence
  Description of Artificial Sequence: Synthetic oligonucleotide
uuggucacucggauucuuu

SEQ ID NO: 1003811 - RNA, 19 nt, Artificial Sequence
  Description of Artificial Sequence: Synthetic oligonucleotide
cgaaaugccuugcagcagc

SEQ ID NO: 1003812 - RNA, 19 nt, Artificial Sequence
  Description of Artificial Sequence: Synthetic oligonucleotide
acuguguguguguguuugu

SEQ ID NO: 1003813 - RNA, 19 nt, Artificial Sequence
  Description of Artificial Sequence: Synthetic oligonucleotide
aguaaggcaugggaugaau

SEQ ID NO: 1003814 - RNA, 19 nt, Artificial Sequence
  Description of Artificial Sequence: Synthetic oligonucleotide
cuccggcaccacaugacug

SEQ ID NO: 1003815 - RNA, 19 nt, Artificial Sequence
  Description of Artificial Sequence: Synthetic oligonucleotide
auaaguuguuguggucaug

SEQ ID NO: 1003816 - RNA, 19 nt, Artificial Sequence
  Description of Artificial Sequence: Synthetic oligonucleotide
ggcccuagaaaaucaguga

SEQ ID NO: 1003817 - RNA, 19 nt, Artificial Sequence
  Description of Artificial Sequence: Synthetic oligonucleotide
ccggagagcuaaauggggc

SEQ ID NO: 1003818 - RNA, 19 nt, Artificial Sequence
  Description of Artificial Sequence: Synthetic oligonucleotide
aaacgcccaucaaagcaaa

SEQ ID NO: 1003819 - RNA, 19 nt, Artificial Sequence
  Description of Artificial Sequence: Synthetic oligonucleotide
aggcaugggaugaauccug

SEQ ID NO: 1003820 - RNA, 19 nt, Artificial Sequence
  Description of Artificial Sequence: Synthetic oligonucleotide
uggcucguauaaggaaacc

SEQ ID NO: 1003821 - RNA, 19 nt, Artificial Sequence
  Description of Artificial Sequence: Synthetic oligonucleotide
cugagcggcuccacuuagc

SEQ ID NO: 1003822 - RNA, 19 nt, Artificial Sequence
  Description of Artificial Sequence: Synthetic oligonucleotide
agcaguccaacaagcgcag

SEQ ID NO: 1003823 - RNA, 19 nt, Artificial Sequence
  Description of Artificial Sequence: Synthetic oligonucleotide
acguaagguggcccuagaa

SEQ ID NO: 1003824 - RNA, 19 nt, Artificial Sequence
  Description of Artificial Sequence: Synthetic oligonucleotide
gcuccacuuagcacuaggg

SEQ ID NO: 1003825 - RNA, 19 nt, Artificial Sequence
  Description of Artificial Sequence: Synthetic oligonucleotide
ggcguggggacaacuacgg

SEQ ID NO: 1003826 - RNA, 19 nt, Artificial Sequence
  Description of Artificial Sequence: Synthetic oligonucleotide
guuccacguaagguggccc

SEQ ID NO: 1003827 - RNA, 19 nt, Artificial Sequence
  Description of Artificial Sequence: Synthetic oligonucleotide
ggcaaacuauaaccuugag

SEQ ID NO: 1003828 - RNA, 19 nt, Artificial Sequence
  Description of Artificial Sequence: Synthetic oligonucleotide
agcucgcacaucaaauccu

SEQ ID NO: 1003829 - RNA, 19 nt, Artificial Sequence
  Description of Artificial Sequence: Synthetic oligonucleotide
caucaaauccugauggcuu

SEQ ID NO: 1003830 - RNA, 19 nt, Artificial Sequence
  Description of Artificial Sequence: Synthetic oligonucleotide
gccuguuacucuugagaag

SEQ ID NO: 1003831 - RNA, 19 nt, Artificial Sequence
  Description of Artificial Sequence: Synthetic oligonucleotide
aucuggguaacugcccaga

SEQ ID NO: 1003832 - RNA, 19 nt, Artificial Sequence
  Description of Artificial Sequence: Synthetic oligonucleotide
cuguguguguguguuuguc

SEQ ID NO: 1003833 - RNA, 19 nt, Artificial Sequence
  Description of Artificial Sequence: Synthetic oligonucleotide
gggacaacuacgguuuuca

SEQ ID NO: 1003834 - RNA, 19 nt, Artificial Sequence
  Description of Artificial Sequence: Synthetic oligonucleotide
ggucaaccgaaaugccuug

SEQ ID NO: 1003835 - RNA, 19 nt, Artificial Sequence
  Description of Artificial Sequence: Synthetic oligonucleotide
agagcuaaauggggcuugu

SEQ ID NO: 1003836 - RNA, 19 nt, Artificial Sequence
  Description of Artificial Sequence: Synthetic oligonucleotide
acgcguguggaaugcugca

SEQ ID NO: 1003837 - RNA, 19 nt, Artificial Sequence
  Description of Artificial Sequence: Synthetic oligonucleotide
gcacuagggucccuagugc

SEQ ID NO: 1003838 - RNA, 19 nt, Artificial Sequence
  Description of Artificial Sequence: Synthetic oligonucleotide
ggaaaccagaccuccuuaa

SEQ ID NO: 1003839 - RNA, 19 nt, Artificial Sequence
  Description of Artificial Sequence: Synthetic oligonucleotide
cuacgguuuucaguagcuc

SEQ ID NO: 1003840 - RNA, 19 nt, Artificial Sequence
  Description of Artificial Sequence: Synthetic oligonucleotide
cuaccugccggagagcuaa

SEQ ID NO: 1003841 - RNA, 19 nt, Artificial Sequence
  Description of Artificial Sequence: Synthetic oligonucleotide
ggcucguauaaggaaacca

SEQ ID NO: 1003842 - RNA, 19 nt, Artificial Sequence
  Description of Artificial Sequence: Synthetic oligonucleotide
guugcccagauagguggcc

SEQ ID NO: 1003843 - RNA, 19 nt, Artificial Sequence
  Description of Artificial Sequence: Synthetic oligonucleotide
ucuaccugccggagagcua

SEQ ID NO: 1003844 - RNA, 19 nt, Artificial Sequence
  Description of Artificial Sequence: Synthetic oligonucleotide
cacuuagcacuaggguccc

SEQ ID NO: 1003845 - RNA, 19 nt, Artificial Sequence
  Description of Artificial Sequence: Synthetic oligonucleotide
gccggagagcuaaaugggg

SEQ ID NO: 1003846 - RNA, 19 nt, Artificial Sequence
  Description of Artificial Sequence: Synthetic oligonucleotide
cuguuaggacagacaucug

SEQ ID NO: 1003847 - RNA, 19 nt, Artificial Sequence
  Description of Artificial Sequence: Synthetic oligonucleotide
gugcuucacggucaaccga

SEQ ID NO: 1003848 - RNA, 19 nt, Artificial Sequence
  Description of Artificial Sequence: Synthetic oligonucleotide
ucaggucgguuuucccuua

SEQ ID NO: 1003849 - RNA, 19 nt, Artificial Sequence
  Description of Artificial Sequence: Synthetic oligonucleotide
ugucccaccugagcggcuc

SEQ ID NO: 1003850 - RNA, 19 nt, Artificial Sequence
  Description of Artificial Sequence: Synthetic oligonucleotide
caguccaacaagcgcagua

SEQ ID NO: 1003851 - RNA, 19 nt, Artificial Sequence
  Description of Artificial Sequence: Synthetic oligonucleotide
ccuuauaaguuguuguggu

SEQ ID NO: 1003852 - RNA, 19 nt, Artificial Sequence
  Description of Artificial Sequence: Synthetic oligonucleotide
gagcuaaauggggcuugug

SEQ ID NO: 1003853 - RNA, 19 nt, Artificial Sequence
  Description of Artificial Sequence: Synthetic oligonucleotide
cuccacuuagcacuagggu

SEQ ID NO: 1003854 - RNA, 19 nt, Artificial Sequence
  Description of Artificial Sequence: Synthetic oligonucleotide
auacuacucugugcauugu

SEQ ID NO: 1003855 - RNA, 19 nt, Artificial Sequence
  Description of Artificial Sequence: Synthetic oligonucleotide
gucccuuauggagaaccca

SEQ ID NO: 1003856 - RNA, 19 nt, Artificial Sequence
  Description of Artificial Sequence: Synthetic oligonucleotide
acugccguuuggauuuccu

SEQ ID NO: 1003857 - RNA, 19 nt, Artificial Sequence
  Description of Artificial Sequence: Synthetic oligonucleotide
ucucugcgguuuccucugu

SEQ ID NO: 1003858 - RNA, 19 nt, Artificial Sequence
  Description of Artificial Sequence: Synthetic oligonucleotide
cuucaacugagcccuccaa

SEQ ID NO: 1003859 - RNA, 19 nt, Artificial Sequence
  Description of Artificial Sequence: Synthetic oligonucleotide
agguggcccuagaaaauca

SEQ ID NO: 1003860 - RNA, 19 nt, Artificial Sequence
  Description of Artificial Sequence: Synthetic oligonucleotide
ccaacaagcgcaguaacaa

SEQ ID NO: 1003861 - RNA, 19 nt, Artificial Sequence
  Description of Artificial Sequence: Synthetic oligonucleotide
cccuagaaaaucagugaca

SEQ ID NO: 1003862 - RNA, 19 nt, Artificial Sequence
  Description of Artificial Sequence: Synthetic oligonucleotide
ccugccggagagcuaaaug

SEQ ID NO: 1003863 - RNA, 19 nt, Artificial Sequence
  Description of Artificial Sequence: Synthetic oligonucleotide
gcgcaguaacaacuugcag

SEQ ID NO: 1003864 - RNA, 19 nt, Artificial Sequence
  Description of Artificial Sequence: Synthetic oligonucleotide
accccggcuccuuuguuuu

SEQ ID NO: 1003865 - RNA, 19 nt, Artificial Sequence
  Description of Artificial Sequence: Synthetic oligonucleotide
cucgcacaucaaauccuga

SEQ ID NO: 1003866 - RNA, 19 nt, Artificial Sequence
  Description of Artificial Sequence: Synthetic oligonucleotide
cugucucgauaaaacuuua

SEQ ID NO: 1003867 - RNA, 19 nt, Artificial Sequence
  Description of Artificial Sequence: Synthetic oligonucleotide
ggcacacugugugugugug

SEQ ID NO: 1003868 - RNA, 19 nt, Artificial Sequence
  Description of Artificial Sequence: Synthetic oligonucleotide
ccuuauggagaacccauaa

SEQ ID NO: 1003869 - RNA, 19 nt, Artificial Sequence
  Description of Artificial Sequence: Synthetic oligonucleotide
agaguucgugucaguuucu

SEQ ID NO: 1003870 - RNA, 19 nt, Artificial Sequence
  Description of Artificial Sequence: Synthetic oligonucleotide
ggcauacucuuugaaguaa

SEQ ID NO: 1003871 - RNA, 19 nt, Artificial Sequence
  Description of Artificial Sequence: Synthetic oligonucleotide
gcguguggaaugcugcaga

SEQ ID NO: 1003872 - RNA, 19 nt, Artificial Sequence
  Description of Artificial Sequence: Synthetic oligonucleotide
agccuuguuucgaagccuu

SEQ ID NO: 1003873 - RNA, 19 nt, Artificial Sequence
  Description of Artificial Sequence: Synthetic oligonucleotide
cucugcgguuuccucuguc

SEQ ID NO: 1003874 - RNA, 19 nt, Artificial Sequence
  Description of Artificial Sequence: Synthetic oligonucleotide
aggcaguugcaaagagaug

SEQ ID NO: 1003875 - RNA, 19 nt, Artificial Sequence
  Description of Artificial Sequence: Synthetic oligonucleotide
acacuguguguguguguuu

SEQ ID NO: 1003876 - RNA, 19 nt, Artificial Sequence
  Description of Artificial Sequence: Synthetic oligonucleotide
gacugccguuuggauuucc

SEQ ID NO: 1003877 - RNA, 19 nt, Artificial Sequence
  Description of Artificial Sequence: Synthetic oligonucleotide
guccuaagugcuucacggu

SEQ ID NO: 1003878 - RNA, 19 nt, Artificial Sequence
  Description of Artificial Sequence: Synthetic oligonucleotide
uggggacaacuacgguuuu

SEQ ID NO: 1003879 - RNA, 19 nt, Artificial Sequence
  Description of Artificial Sequence: Synthetic oligonucleotide
aacgcccaucaaagcaaaa

SEQ ID NO: 1003880 - RNA, 19 nt, Artificial Sequence
  Description of Artificial Sequence: Synthetic oligonucleotide
ggcaccacaugacugccgu

SEQ ID NO: 1003881 - RNA, 19 nt, Artificial Sequence
  Description of Artificial Sequence: Synthetic oligonucleotide
auggaaccccggcuccuuu

SEQ ID NO: 1003882 - RNA, 19 nt, Artificial Sequence
  Description of Artificial Sequence: Synthetic oligonucleotide
ucgaagccuugugcagaga

SEQ ID NO: 1003883 - RNA, 19 nt, Artificial Sequence
  Description of Artificial Sequence: Synthetic oligonucleotide
caaacgcuuuaaacacugu

SEQ ID NO: 1003884 - RNA, 19 nt, Artificial Sequence
  Description of Artificial Sequence: Synthetic oligonucleotide
gccucccaaaaccuucauc

SEQ ID NO: 1003885 - RNA, 19 nt, Artificial Sequence
  Description of Artificial Sequence: Synthetic oligonucleotide
cacguaagguggcccuaga

SEQ ID NO: 1003886 - RNA, 19 nt, Artificial Sequence
  Description of Artificial Sequence: Synthetic oligonucleotide
gcaugggaugaauccugga

SEQ ID NO: 1003887 - RNA, 19 nt, Artificial Sequence
  Description of Artificial Sequence: Synthetic oligonucleotide
agcacgcguguggaaugcu

SEQ ID NO: 1003888 - RNA, 19 nt, Artificial Sequence
  Description of Artificial Sequence: Synthetic oligonucleotide
cacacuguguguguguguu

SEQ ID NO: 1003889 - RNA, 19 nt, Artificial Sequence
  Description of Artificial Sequence: Synthetic oligonucleotide
guagcuccuggcuggguuu

SEQ ID NO: 1003890 - RNA, 19 nt, Artificial Sequence
  Description of Artificial Sequence: Synthetic oligonucleotide
guggcccuagaaaaucagu

SEQ ID NO: 1003891 - RNA, 19 nt, Artificial Sequence
  Description of Artificial Sequence: Synthetic oligonucleotide
gggucccuagugcucuuca

SEQ ID NO: 1003892 - RNA, 19 nt, Artificial Sequence
  Description of Artificial Sequence: Synthetic oligonucleotide
cuucacggucaaccgaaau

SEQ ID NO: 1003893 - RNA, 19 nt, Artificial Sequence
  Description of Artificial Sequence: Synthetic oligonucleotide
uaccugccggagagcuaaa

SEQ ID NO: 1003894 - RNA, 19 nt, Artificial Sequence
  Description of Artificial Sequence: Synthetic oligonucleotide
gcacgcguguggaaugcug

SEQ ID NO: 1003895 - RNA, 19 nt, Artificial Sequence
  Description of Artificial Sequence: Synthetic oligonucleotide
agccucgaagaaggcaguu

SEQ ID NO: 1003896 - RNA, 19 nt, Artificial Sequence
  Description of Artificial Sequence: Synthetic oligonucleotide
cuauaaccuugagcuucca

SEQ ID NO: 1003897 - RNA, 19 nt, Artificial Sequence
  Description of Artificial Sequence: Synthetic oligonucleotide
gcgguuuccucugucucga

SEQ ID NO: 1003898 - RNA, 19 nt, Artificial Sequence
  Description of Artificial Sequence: Synthetic oligonucleotide
ccacguaagguggcccuag

SEQ ID NO: 1003899 - RNA, 19 nt, Artificial Sequence
  Description of Artificial Sequence: Synthetic oligonucleotide
accugccggagagcuaaau

SEQ ID NO: 1003900 - RNA, 19 nt, Artificial Sequence
  Description of Artificial Sequence: Synthetic oligonucleotide
gcuaacuuaguuacuccuu

SEQ ID NO: 1003901 - RNA, 19 nt, Artificial Sequence
  Description of Artificial Sequence: Synthetic oligonucleotide
acuuagcacuagggucccu

SEQ ID NO: 1003902 - RNA, 19 nt, Artificial Sequence
  Description of Artificial Sequence: Synthetic oligonucleotide
ggggacaacuacgguuuuc

SEQ ID NO: 1003903 - RNA, 19 nt, Artificial Sequence
  Description of Artificial Sequence: Synthetic oligonucleotide
gcagaacccugaacgaucu

SEQ ID NO: 1003904 - RNA, 19 nt, Artificial Sequence
  Description of Artificial Sequence: Synthetic oligonucleotide
caugcacuguagcuucuuu

SEQ ID NO: 1003905 - RNA, 19 nt, Artificial Sequence
  Description of Artificial Sequence: Synthetic oligonucleotide
gccuuguuucgaagccuug

SEQ ID NO: 1003906 - RNA, 19 nt, Artificial Sequence
  Description of Artificial Sequence: Synthetic oligonucleotide
gcaagcacgcguguggaau

SEQ ID NO: 1003907 - RNA, 19 nt, Artificial Sequence
  Description of Artificial Sequence: Synthetic oligonucleotide
gaccuccuuaaaagucccu

SEQ ID NO: 1003908 - RNA, 19 nt, Artificial Sequence
  Description of Artificial Sequence: Synthetic oligonucleotide
ggaaccccggcuccuuugu

SEQ ID NO: 1003909 - RNA, 19 nt, Artificial Sequence
  Description of Artificial Sequence: Synthetic oligonucleotide
cuguuacucuugagaaguu

SEQ ID NO: 1003910 - RNA, 19 nt, Artificial Sequence
  Description of Artificial Sequence: Synthetic oligonucleotide
ggcaagcacgcguguggaa

SEQ ID NO: 1003911 - RNA, 19 nt, Artificial Sequence
  Description of Artificial Sequence: Synthetic oligonucleotide
cggcuggucuccugaguag

SEQ ID NO: 1003912 - RNA, 19 nt, Artificial Sequence
  Description of Artificial Sequence: Synthetic oligonucleotide
ccggcaccacaugacugcc

SEQ ID NO: 1003913 - RNA, 19 nt, Artificial Sequence
  Description of Artificial Sequence: Synthetic oligonucleotide
ccugaacgaucuggguaac

SEQ ID NO: 1003914 - RNA, 19 nt, Artificial Sequence
  Description of Artificial Sequence: Synthetic oligonucleotide
cugaacgaucuggguaacu

SEQ ID NO: 1003915 - RNA, 19 nt, Artificial Sequence
  Description of Artificial Sequence: Synthetic oligonucleotide
cccuuauggagaacccaua

SEQ ID NO: 1003916 - RNA, 19 nt, Artificial Sequence
  Description of Artificial Sequence: Synthetic oligonucleotide
cggcaccacaugacugccg

SEQ ID NO: 1003917 - RNA, 19 nt, Artificial Sequence
  Description of Artificial Sequence: Synthetic oligonucleotide
cucggauucuuugcacaau

SEQ ID NO: 1003918 - RNA, 19 nt, Artificial Sequence
  Description of Artificial Sequence: Synthetic oligonucleotide
gaaccccggcuccuuuguu

SEQ ID NO: 1003919 - RNA, 19 nt, Artificial Sequence
  Description of Artificial Sequence: Synthetic oligonucleotide
gcuggcguggggacaacua

SEQ ID NO: 1003920 - RNA, 19 nt, Artificial Sequence
  Description of Artificial Sequence: Synthetic oligonucleotide
cgcuuuaaacacuguucua

SEQ ID NO: 1003921 - RNA, 19 nt, Artificial Sequence
  Description of Artificial Sequence: Synthetic oligonucleotide
ggcccauucuguugugauu

SEQ ID NO: 1003922 - RNA, 19 nt, Artificial Sequence
  Description of Artificial Sequence: Synthetic oligonucleotide
gcacacugugugugugugu

SEQ ID NO: 1003923 - RNA, 19 nt, Artificial Sequence
  Description of Artificial Sequence: Synthetic oligonucleotide
caguaacaacuugcagccu

SEQ ID NO: 1003924 - RNA, 19 nt, Artificial Sequence
  Description of Artificial Sequence: Synthetic oligonucleotide
cggucaaccgaaaugccuu

SEQ ID NO: 1003925 - RNA, 19 nt, Artificial Sequence
  Description of Artificial Sequence: Synthetic oligonucleotide
gcuucacggucaaccgaaa

SEQ ID NO: 1003926 - RNA, 19 nt, Artificial Sequence
  Description of Artificial Sequence: Synthetic oligonucleotide
cccuagugcucuucagagu

SEQ ID NO: 1003927 - RNA, 19 nt, Artificial Sequence
  Description of Artificial Sequence: Synthetic oligonucleotide
gcggcccauucuguuguga

SEQ ID NO: 1003928 - RNA, 19 nt, Artificial Sequence
  Description of Artificial Sequence: Synthetic oligonucleotide
cugucccaccugagcggcu

SEQ ID NO: 1003929 - RNA, 19 nt, Artificial Sequence
  Description of Artificial Sequence: Synthetic oligonucleotide
ggcuggcguggggacaacu

SEQ ID NO: 1003930 - RNA, 19 nt, Artificial Sequence
  Description of Artificial Sequence: Synthetic oligonucleotide
gcaguccaacaagcgcagu

SEQ ID NO: 1003931 - RNA, 19 nt, Artificial Sequence
  Description of Artificial Sequence: Synthetic oligonucleotide
cggcccauucuguugugau

SEQ ID NO: 1003932 - RNA, 19 nt, Artificial Sequence
  Description of Artificial Sequence: Synthetic oligonucleotide
gggcuuguggcggcccauu

SEQ ID NO: 1003933 - RNA, 19 nt, Artificial Sequence
  Description of Artificial Sequence: Synthetic oligonucleotide
ccacaugccuaagccuguu

SEQ ID NO: 1003934 - RNA, 19 nt, Artificial Sequence
  Description of Artificial Sequence: Synthetic oligonucleotide
aacgacuguuucuugaagc

SEQ ID NO: 1003935 - RNA, 19 nt, Artificial Sequence
  Description of Artificial Sequence: Synthetic oligonucleotide
aaugugacaacacuggaga

SEQ ID NO: 1003936 - RNA, 19 nt, Artificial Sequence
  Description of Artificial Sequence: Synthetic oligonucleotide
ugaguuuuggcaauugacc

SEQ ID NO: 1003937 - RNA, 19 nt, Artificial Sequence
  Description of Artificial Sequence: Synthetic oligonucleotide
aucaugguuagacagugac

SEQ ID NO: 1003938 - RNA, 19 nt, Artificial Sequence
  Description of Artificial Sequence: Synthetic oligonucleotide
ucucuguucacccggaaag

SEQ ID NO: 1003939 - RNA, 19 nt, Artificial Sequence
  Description of Artificial Sequence: Synthetic oligonucleotide
gucuugucgauuuugaccc

SEQ ID NO: 1003940 - RNA, 19 nt, Artificial Sequence
  Description of Artificial Sequence: Synthetic oligonucleotide
ucgauuuugaccccuuucc

SEQ ID NO: 1003941 - RNA, 19 nt, Artificial Sequence
  Description of Artificial Sequence: Synthetic oligonucleotide
gauaccggaggcucgaccg

SEQ ID NO: 1003942 - RNA, 19 nt, Artificial Sequence
  Description of Artificial Sequence: Synthetic oligonucleotide
cuccuuauacuuucgaagg

SEQ ID NO: 1003943 - RNA, 19 nt, Artificial Sequence
  Description of Artificial Sequence: Synthetic oligonucleotide
uguuaaggcaucaugguua

SEQ ID NO: 1003944 - RNA, 19 nt, Artificial Sequence
  Description of Artificial Sequence: Synthetic oligonucleotide
acauguuaaggcaucaugg

SEQ ID NO: 1003945 - RNA, 19 nt, Artificial Sequence
  Description of Artificial Sequence: Synthetic oligonucleotide
aagaguuagcgacggcccc

SEQ ID NO: 1003946 - RNA, 19 nt, Artificial Sequence
  Description of Artificial Sequence: Synthetic oligonucleotide
ggaguuaagaguuagcgac

SEQ ID NO: 1003947 - RNA, 19 nt, Artificial Sequence
  Description of Artificial Sequence: Synthetic oligonucleotide
uugaguuuuggcaauugac

SEQ ID NO: 1003948 - RNA, 19 nt, Artificial Sequence
  Description of Artificial Sequence: Synthetic oligonucleotide
ugugaaucgggacuugaug

SEQ ID NO: 1003949 - RNA, 19 nt, Artificial Sequence
  Description of Artificial Sequence: Synthetic oligonucleotide
caugguuagacagugacug

SEQ ID NO: 1003950 - RNA, 19 nt, Artificial Sequence
  Description of Artificial Sequence: Synthetic oligonucleotide
guugacagagugcucaucc

SEQ ID NO: 1003951 - RNA, 19 nt, Artificial Sequence
  Description of Artificial Sequence: Synthetic oligonucleotide
guggaguuaagaguuagcg

SEQ ID NO: 1003952 - RNA, 19 nt, Artificial Sequence
  Description of Artificial Sequence: Synthetic oligonucleotide
acgaucucucuguucaccc

SEQ ID NO: 1003953 - RNA, 19 nt, Artificial Sequence
  Description of Artificial Sequence: Synthetic oligonucleotide
gacaggggagaccacaugc

SEQ ID NO: 1003954 - RNA, 19 nt, Artificial Sequence
  Description of Artificial Sequence: Synthetic oligonucleotide
auuuugaccccuuuccugu

SEQ ID NO: 1003955 - RNA, 19 nt, Artificial Sequence
  Description of Artificial Sequence: Synthetic oligonucleotide
auagcucccgaccauguag

SEQ ID NO: 1003956 - RNA, 19 nt, Artificial Sequence
  Description of Artificial Sequence: Synthetic oligonucleotide
agcacuuugguuuggggug

SEQ ID NO: 1003957 - RNA, 19 nt, Artificial Sequence
  Description of Artificial Sequence: Synthetic oligonucleotide
uguucacccggaaagagau

SEQ ID NO: 1003958 - RNA, 19 nt, Artificial Sequence
  Description of Artificial Sequence: Synthetic oligonucleotide
aaacgacuguuucuugaag

SEQ ID NO: 1003959 - RNA, 19 nt, Artificial Sequence
  Description of Artificial Sequence: Synthetic oligonucleotide
gaucucucuguucacccgg

SEQ ID NO: 1003960 - RNA, 19 nt, Artificial Sequence
  Description of Artificial Sequence: Synthetic oligonucleotide
ugacugacagugauggaug

SEQ ID NO: 1003961 - RNA, 19 nt, Artificial Sequence
  Description of Artificial Sequence: Synthetic oligonucleotide
uauccgguacuccacaccu

SEQ ID NO: 1003962 - RNA, 19 nt, Artificial Sequence
  Description of Artificial Sequence: Synthetic oligonucleotide
ugcuuagaggacacaaccc

SEQ ID NO: 1003963 - RNA, 19 nt, Artificial Sequence
  Description of Artificial Sequence: Synthetic oligonucleotide
uguuccauuccauucuaga

SEQ ID NO: 1003964 - RNA, 19 nt, Artificial Sequence
  Description of Artificial Sequence: Synthetic oligonucleotide
cuuguaguugacagagugc

SEQ ID NO: 1003965 - RNA, 19 nt, Artificial Sequence
  Description of Artificial Sequence: Synthetic oligonucleotide
uuuuauccgguacuccaca

SEQ ID NO: 1003966 - RNA, 19 nt, Artificial Sequence
  Description of Artificial Sequence: Synthetic oligonucleotide
cucccgaccauguagucgg

SEQ ID NO: 1003967 - RNA, 19 nt, Artificial Sequence
  Description of Artificial Sequence: Synthetic oligonucleotide
gugcuuagaggacacaacc

SEQ ID NO: 1003968 - RNA, 19 nt, Artificial Sequence
  Description of Artificial Sequence: Synthetic oligonucleotide
uacuucaugccugacacga

SEQ ID NO: 1003969 - RNA, 19 nt, Artificial Sequence
  Description of Artificial Sequence: Synthetic oligonucleotide
uccuuauacuuucgaaggc

SEQ ID NO: 1003970 - RNA, 19 nt, Artificial Sequence
  Description of Artificial Sequence: Synthetic oligonucleotide
aguuaagaguuagcgacgg

SEQ ID NO: 1003971 - RNA, 19 nt, Artificial Sequence
  Description of Artificial Sequence: Synthetic oligonucleotide
uuucccagucagaagagaa

SEQ ID NO: 1003972 - RNA, 19 nt, Artificial Sequence
  Description of Artificial Sequence: Synthetic oligonucleotide
gacgacagaggaaaccugg

SEQ ID NO: 1003973 - RNA, 19 nt, Artificial Sequence
  Description of Artificial Sequence: Synthetic oligonucleotide
agacaguggaguuaagagu

SEQ ID NO: 1003974 - RNA, 19 nt, Artificial Sequence
  Description of Artificial Sequence: Synthetic oligonucleotide
guuaaggcaucaugguuag

SEQ ID NO: 1003975 - RNA, 19 nt, Artificial Sequence
  Description of Artificial Sequence: Synthetic oligonucleotide
ucuaaccugggauaccgga

SEQ ID NO: 1003976 - RNA, 19 nt, Artificial Sequence
  Description of Artificial Sequence: Synthetic oligonucleotide
uggaguuaagaguuagcga

SEQ ID NO: 1003977 - RNA, 19 nt, Artificial Sequence
  Description of Artificial Sequence: Synthetic oligonucleotide
uggcaauugacccuccccu

SEQ ID NO: 1003978 - RNA, 19 nt, Artificial Sequence
  Description of Artificial Sequence: Synthetic oligonucleotide
uuauacuuucgaaggcucu

SEQ ID NO: 1003979 - RNA, 19 nt, Artificial Sequence
  Description of Artificial Sequence: Synthetic oligonucleotide
ugucaggaacucauacucc

SEQ ID NO: 1003980 - RNA, 19 nt, Artificial Sequence
  Description of Artificial Sequence: Synthetic oligonucleotide
acaaacgacuguuucuuga

SEQ ID NO: 1003981 - RNA, 19 nt, Artificial Sequence
  Description of Artificial Sequence: Synthetic oligonucleotide
uuggcaauugacccucccc

SEQ ID NO: 1003982 - RNA, 19 nt, Artificial Sequence
  Description of Artificial Sequence: Synthetic oligonucleotide
cuuauacuuucgaaggcuc

SEQ ID NO: 1003983 - RNA, 19 nt, Artificial Sequence
  Description of Artificial Sequence: Synthetic oligonucleotide
aauugacccuccccuagcu

SEQ ID NO: 1003984 - RNA, 19 nt, Artificial Sequence
  Description of Artificial Sequence: Synthetic oligonucleotide
ucgaccgucgcucucgcgc

SEQ ID NO: 1003985 - RNA, 19 nt, Artificial Sequence
  Description of Artificial Sequence: Synthetic oligonucleotide
ggucuugucgauuuugacc

SEQ ID NO: 1003986 - RNA, 19 nt, Artificial Sequence
  Description of Artificial Sequence: Synthetic oligonucleotide
cugacagugauggaugacc

SEQ ID NO: 1003987 - RNA, 19 nt, Artificial Sequence
  Description of Artificial Sequence: Synthetic oligonucleotide
uuauccgguacuccacacc

SEQ ID NO: 1003988 - RNA, 19 nt, Artificial Sequence
  Description of Artificial Sequence: Synthetic oligonucleotide
uccauucuagaagccaggg

SEQ ID NO: 1003989 - RNA, 19 nt, Artificial Sequence
  Description of Artificial Sequence: Synthetic oligonucleotide
auugaguuuuggcaauuga

SEQ ID NO: 1003990 - RNA, 19 nt, Artificial Sequence
  Description of Artificial Sequence: Synthetic oligonucleotide
gaggcaauaaauacugaca

SEQ ID NO: 1003991 - RNA, 19 nt, Artificial Sequence
  Description of Artificial Sequence: Synthetic oligonucleotide
ugacagugauggaugaccu

SEQ ID NO: 1003992 - RNA, 19 nt, Artificial Sequence
  Description of Artificial Sequence: Synthetic oligonucleotide
uucucggccgcgaucugcg

SEQ ID NO: 1003993 - RNA, 19 nt, Artificial Sequence
  Description of Artificial Sequence: Synthetic oligonucleotide
uucaacacaaacgacuguu

SEQ ID NO: 1003994 - RNA, 19 nt, Artificial Sequence
  Description of Artificial Sequence: Synthetic oligonucleotide
augugacaacacuggagac

SEQ ID NO: 1003995 - RNA, 19 nt, Artificial Sequence
  Description of Artificial Sequence: Synthetic oligonucleotide
agccacucggcccagcagg

SEQ ID NO: 1003996 - RNA, 19 nt, Artificial Sequence
  Description of Artificial Sequence: Synthetic oligonucleotide
uccccuagcuacuggagcc

SEQ ID NO: 1003997 - RNA, 19 nt, Artificial Sequence
  Description of Artificial Sequence: Synthetic oligonucleotide
ucaugguuagacagugacu

SEQ ID NO: 1003998 - RNA, 19 nt, Artificial Sequence
  Description of Artificial Sequence: Synthetic oligonucleotide
auuccauucuagaagccag

SEQ ID NO: 1003999 - RNA, 19 nt, Artificial Sequence
  Description of Artificial Sequence: Synthetic oligonucleotide
uaugugugcuggauguacu

SEQ ID NO: 1004000 - RNA, 19 nt, Artificial Sequence
  Description of Artificial Sequence: Synthetic oligonucleotide
gaagggacgacagaggaaa

SEQ ID NO: 1004001 - RNA, 19 nt, Artificial Sequence
  Description of Artificial Sequence: Synthetic oligonucleotide
acgacuguuucuugaagcu

SEQ ID NO: 1004002 - RNA, 19 nt, Artificial Sequence
  Description of Artificial Sequence: Synthetic oligonucleotide
agagugcucauccuccuca

SEQ ID NO: 1004003 - RNA, 19 nt, Artificial Sequence
  Description of Artificial Sequence: Synthetic oligonucleotide
guaguugacagagugcuca

SEQ ID NO: 1004004 - RNA, 19 nt, Artificial Sequence
  Description of Artificial Sequence: Synthetic oligonucleotide
ggaggcaauaaauacugac

SEQ ID NO: 1004005 - RNA, 19 nt, Artificial Sequence
  Description of Artificial Sequence: Synthetic oligonucleotide
gacagcucccaacugugug

SEQ ID NO: 1004006 - RNA, 19 nt, Artificial Sequence
  Description of Artificial Sequence: Synthetic oligonucleotide
aguggaguuaagaguuagc

SEQ ID NO: 1004007 - RNA, 19 nt, Artificial Sequence
  Description of Artificial Sequence: Synthetic oligonucleotide
ugccuacaaggacagagaa

SEQ ID NO: 1004008 - RNA, 19 nt, Artificial Sequence
  Description of Artificial Sequence: Synthetic oligonucleotide
agggacgacagaggaaacc

SEQ ID NO: 1004009 - RNA, 19 nt, Artificial Sequence
  Description of Artificial Sequence: Synthetic oligonucleotide
uuuggcaauugacccuccc

SEQ ID NO: 1004010 - RNA, 19 nt, Artificial Sequence
  Description of Artificial Sequence: Synthetic oligonucleotide
cuagcuacuggagccaccc

SEQ ID NO: 1004011 - RNA, 19 nt, Artificial Sequence
  Description of Artificial Sequence: Synthetic oligonucleotide
ugguuagacagugacugac

SEQ ID NO: 1004012 - RNA, 19 nt, Artificial Sequence
  Description of Artificial Sequence: Synthetic oligonucleotide
ugagugcugccuacaagga

SEQ ID NO: 1004013 - RNA, 19 nt, Artificial Sequence
  Description of Artificial Sequence: Synthetic oligonucleotide
uuagacagugacugacagu

SEQ ID NO: 1004014 - RNA, 19 nt, Artificial Sequence
  Description of Artificial Sequence: Synthetic oligonucleotide
uauacuuucgaaggcucuc

SEQ ID NO: 1004015 - RNA, 19 nt, Artificial Sequence
  Description of Artificial Sequence: Synthetic oligonucleotide
uggaugaccuggccagggg

SEQ ID NO: 1004016 - RNA, 19 nt, Artificial Sequence
  Description of Artificial Sequence: Synthetic oligonucleotide
ucggucuugucgauuuuga

SEQ ID NO: 1004017 - RNA, 19 nt, Artificial Sequence
  Description of Artificial Sequence: Synthetic oligonucleotide
uuuauccgguacuccacac

SEQ ID NO: 1004018 - RNA, 19 nt, Artificial Sequence
  Description of Artificial Sequence: Synthetic oligonucleotide
ccuccuuauacuuucgaag

SEQ ID NO: 1004019 - RNA, 19 nt, Artificial Sequence
  Description of Artificial Sequence: Synthetic oligonucleotide
gugagguuccauucccagg

SEQ ID NO: 1004020 - RNA, 19 nt, Artificial Sequence
  Description of Artificial Sequence: Synthetic oligonucleotide
ugucaucgucugugaaucg

SEQ ID NO: 1004021 - RNA, 19 nt, Artificial Sequence
  Description of Artificial Sequence: Synthetic oligonucleotide
uccgguacuccacaccuuc

SEQ ID NO: 1004022 - RNA, 19 nt, Artificial Sequence
  Description of Artificial Sequence: Synthetic oligonucleotide
ggugagacuaguaaggcuc

SEQ ID NO: 1004023 - RNA, 19 nt, Artificial Sequence
  Description of Artificial Sequence: Synthetic oligonucleotide
uccgucuugucaucgucug

SEQ ID NO: 1004024 - RNA, 19 nt, Artificial Sequence
  Description of Artificial Sequence: Synthetic oligonucleotide
ucaacacaaacgacuguuu

SEQ ID NO: 1004025 - RNA, 19 nt, Artificial Sequence
  Description of Artificial Sequence: Synthetic oligonucleotide
auguuaaggcaucaugguu

SEQ ID NO: 1004026 - RNA, 19 nt, Artificial Sequence
  Description of Artificial Sequence: Synthetic oligonucleotide
aacgggaacggggagggga

SEQ ID NO: 1004027 - RNA, 19 nt, Artificial Sequence
  Description of Artificial Sequence: Synthetic oligonucleotide
uucacccggaaagagauuu

SEQ ID NO: 1004028 - RNA, 19 nt, Artificial Sequence
  Description of Artificial Sequence: Synthetic oligonucleotide
uugguuugggguggguagg

SEQ ID NO: 1004029 - RNA, 19 nt, Artificial Sequence
  Description of Artificial Sequence: Synthetic oligonucleotide
gugaaucgggacuugaugu

SEQ ID NO: 1004030 - RNA, 19 nt, Artificial Sequence
  Description of Artificial Sequence: Synthetic oligonucleotide
aggcacgagguucaggcca

SEQ ID NO: 1004031 - RNA, 19 nt, Artificial Sequence
  Description of Artificial Sequence: Synthetic oligonucleotide
auucucggccgcgaucugc

SEQ ID NO: 1004032 - RNA, 19 nt, Artificial Sequence
  Description of Artificial Sequence: Synthetic oligonucleotide
guuuuggcaauugacccuc

SEQ ID NO: 1004033 - RNA, 19 nt, Artificial Sequence
  Description of Artificial Sequence: Synthetic oligonucleotide
ccaggcacgagguucaggc

SEQ ID NO: 1004034 - RNA, 19 nt, Artificial Sequence
  Description of Artificial Sequence: Synthetic oligonucleotide
uagcucccgaccauguagu

SEQ ID NO: 1004035 - RNA, 19 nt, Artificial Sequence
  Description of Artificial Sequence: Synthetic oligonucleotide
gagcgagcaugccuuuggg

SEQ ID NO: 1004036 - RNA, 19 nt, Artificial Sequence
  Description of Artificial Sequence: Synthetic oligonucleotide
caauugacccuccccuagc

SEQ ID NO: 1004037 - RNA, 19 nt, Artificial Sequence
  Description of Artificial Sequence: Synthetic oligonucleotide
gagacuaguaaggcucggc

SEQ ID NO: 1004038 - RNA, 19 nt, Artificial Sequence
  Description of Artificial Sequence: Synthetic oligonucleotide
cagcuggcccaaauggagg

SEQ ID NO: 1004039 - RNA, 19 nt, Artificial Sequence
  Description of Artificial Sequence: Synthetic oligonucleotide
gcuuagaggacacaaccca

SEQ ID NO: 1004040 - RNA, 19 nt, Artificial Sequence
  Description of Artificial Sequence: Synthetic oligonucleotide
gugauggaugaccuggcca

SEQ ID NO: 1004041 - RNA, 19 nt, Artificial Sequence
  Description of Artificial Sequence: Synthetic oligonucleotide
ugagacuaguaaggcucgg

SEQ ID NO: 1004042 - RNA, 19 nt, Artificial Sequence
  Description of Artificial Sequence: Synthetic oligonucleotide
guaugugugcuggauguac

SEQ ID NO: 1004043 - RNA, 19 nt, Artificial Sequence
  Description of Artificial Sequence: Synthetic oligonucleotide
gucgauuuugaccccuuuc

SEQ ID NO: 1004044 - RNA, 19 nt, Artificial Sequence
  Description of Artificial Sequence: Synthetic oligonucleotide
uggaggcaauaaauacuga

SEQ ID NO: 1004045 - RNA, 19 nt, Artificial Sequence
  Description of Artificial Sequence: Synthetic oligonucleotide
ucugugaaucgggacuuga

SEQ ID NO: 1004046 - RNA, 19 nt, Artificial Sequence
  Description of Artificial Sequence: Synthetic oligonucleotide
uggugcuuagaggacacaa

SEQ ID NO: 1004047 - RNA, 19 nt, Artificial Sequence
  Description of Artificial Sequence: Synthetic oligonucleotide
accacacgggaacgggaac

SEQ ID NO: 1004048 - RNA, 19 nt, Artificial Sequence
  Description of Artificial Sequence: Synthetic oligonucleotide
gacaaggugggcugggcaa

SEQ ID NO: 1004049 - RNA, 19 nt, Artificial Sequence
  Description of Artificial Sequence: Synthetic oligonucleotide
uuuuggcaauugacccucc

SEQ ID NO: 1004050 - RNA, 19 nt, Artificial Sequence
  Description of Artificial Sequence: Synthetic oligonucleotide
ggugagguuccauucccag

SEQ ID NO: 1004051 - RNA, 19 nt, Artificial Sequence
  Description of Artificial Sequence: Synthetic oligonucleotide
guuaagaguuagcgacggc

SEQ ID NO: 1004052 - RNA, 19 nt, Artificial Sequence
  Description of Artificial Sequence: Synthetic oligonucleotide
aggugguccgucuugucau

SEQ ID NO: 1004053 - RNA, 19 nt, Artificial Sequence
  Description of Artificial Sequence: Synthetic oligonucleotide
ucuugucgauuuugacccc

SEQ ID NO: 1004054 - RNA, 19 nt, Artificial Sequence
  Description of Artificial Sequence: Synthetic oligonucleotide
gacugacagugauggauga

SEQ ID NO: 1004055 - RNA, 19 nt, Artificial Sequence
  Description of Artificial Sequence: Synthetic oligonucleotide
cugggauaccggaggcucg

SEQ ID NO: 1004056 - RNA, 19 nt, Artificial Sequence
  Description of Artificial Sequence: Synthetic oligonucleotide
cucuaaccugggauaccgg

SEQ ID NO: 1004057 - RNA, 19 nt, Artificial Sequence
  Description of Artificial Sequence: Synthetic oligonucleotide
agcggugggcuccuguucu

SEQ ID NO: 1004058 - RNA, 19 nt, Artificial Sequence
  Description of Artificial Sequence: Synthetic oligonucleotide
auacuuucgaaggcucuca

SEQ ID NO: 1004059 - RNA, 19 nt, Artificial Sequence
  Description of Artificial Sequence: Synthetic oligonucleotide
accucuaaccugggauacc

SEQ ID NO: 1004060 - RNA, 19 nt, Artificial Sequence
  Description of Artificial Sequence: Synthetic oligonucleotide
aagggacgacagaggaaac

SEQ ID NO: 1004061 - RNA, 19 nt, Artificial Sequence
  Description of Artificial Sequence: Synthetic oligonucleotide
caaacgacuguuucuugaa

SEQ ID NO: 1004062 - RNA, 19 nt, Artificial Sequence
  Description of Artificial Sequence: Synthetic oligonucleotide
gcaauugacccuccccuag

SEQ ID NO: 1004063 - RNA, 19 nt, Artificial Sequence
  Description of Artificial Sequence: Synthetic oligonucleotide
augguuagacagugacuga

SEQ ID NO: 1004064 - RNA, 19 nt, Artificial Sequence
  Description of Artificial Sequence: Synthetic oligonucleotide
caguggaguuaagaguuag

SEQ ID NO: 1004065 - RNA, 19 nt, Artificial Sequence
  Description of Artificial Sequence: Synthetic oligonucleotide
agagacaaggugggcuggg

SEQ ID NO: 1004066 - RNA, 19 nt, Artificial Sequence
  Description of Artificial Sequence: Synthetic oligonucleotide
cauugaguuuuggcaauug

SEQ ID NO: 1004067 - RNA, 19 nt, Artificial Sequence
  Description of Artificial Sequence: Synthetic oligonucleotide
aguguuccauuccauucua

SEQ ID NO: 1004068 - RNA, 19 nt, Artificial Sequence
  Description of Artificial Sequence: Synthetic oligonucleotide
acgacagaggaaaccuggg

SEQ ID NO: 1004069 - RNA, 19 nt, Artificial Sequence
  Description of Artificial Sequence: Synthetic oligonucleotide
agguuccauucccaggaca

SEQ ID NO: 1004070 - RNA, 19 nt, Artificial Sequence
  Description of Artificial Sequence: Synthetic oligonucleotide
aggcgggucacaaugacau

SEQ ID NO: 1004071 - RNA, 19 nt, Artificial Sequence
  Description of Artificial Sequence: Synthetic oligonucleotide
uacuuucgaaggcucucau

SEQ ID NO: 1004072 - RNA, 19 nt, Artificial Sequence
  Description of Artificial Sequence: Synthetic oligonucleotide
gacagugacugacagugau

SEQ ID NO: 1004073 - RNA, 19 nt, Artificial Sequence
  Description of Artificial Sequence: Synthetic oligonucleotide
uaaggcucggcuggcuuug

SEQ ID NO: 1004074 - RNA, 19 nt, Artificial Sequence
  Description of Artificial Sequence: Synthetic oligonucleotide
caacugugugcacuugguc

SEQ ID NO: 1004075 - RNA, 19 nt, Artificial Sequence
  Description of Artificial Sequence: Synthetic oligonucleotide
aguaaggcucggcuggcuu

SEQ ID NO: 1004076 - RNA, 19 nt, Artificial Sequence
  Description of Artificial Sequence: Synthetic oligonucleotide
acccuguccugccuccuag

SEQ ID NO: 1004077 - RNA, 19 nt, Artificial Sequence
  Description of Artificial Sequence: Synthetic oligonucleotide
cacacgggaacgggaacgg

SEQ ID NO: 1004078 - RNA, 19 nt, Artificial Sequence
  Description of Artificial Sequence: Synthetic oligonucleotide
ggacgugcugcacaccaag

SEQ ID NO: 1004079 - RNA, 19 nt, Artificial Sequence
  Description of Artificial Sequence: Synthetic oligonucleotide
augggugucaggaacucau

SEQ ID NO: 1004080 - RNA, 19 nt, Artificial Sequence
  Description of Artificial Sequence: Synthetic oligonucleotide
cugaaaccccuccccacug

SEQ ID NO: 1004081 - RNA, 19 nt, Artificial Sequence
  Description of Artificial Sequence: Synthetic oligonucleotide
caacccagcccuuccccag

SEQ ID NO: 1004082 - RNA, 19 nt, Artificial Sequence
  Description of Artificial Sequence: Synthetic oligonucleotide
ccucuaaccugggauaccg

SEQ ID NO: 1004083 - RNA, 19 nt, Artificial Sequence
  Description of Artificial Sequence: Synthetic oligonucleotide
acagugacugacagugaug

SEQ ID NO: 1004084 - RNA, 19 nt, Artificial Sequence
  Description of Artificial Sequence: Synthetic oligonucleotide
ggacauuggggucugcaga

SEQ ID NO: 1004085 - RNA, 19 nt, Artificial Sequence
  Description of Artificial Sequence: Synthetic oligonucleotide
ccagcuggcccaaauggag

SEQ ID NO: 1004086 - RNA, 19 nt, Artificial Sequence
  Description of Artificial Sequence: Synthetic oligonucleotide
ugucgguccuucugucugu

SEQ ID NO: 1004087 - RNA, 19 nt, Artificial Sequence
  Description of Artificial Sequence: Synthetic oligonucleotide
ucuagaagccagggccuga

SEQ ID NO: 1004088 - RNA, 19 nt, Artificial Sequence
  Description of Artificial Sequence: Synthetic oligonucleotide
agcucccgaccauguaguc

SEQ ID NO: 1004089 - RNA, 19 nt, Artificial Sequence
  Description of Artificial Sequence: Synthetic oligonucleotide
ugucgauuuugaccccuuu

SEQ ID NO: 1004090 - RNA, 19 nt, Artificial Sequence
  Description of Artificial Sequence: Synthetic oligonucleotide
cugccuacaaggacagaga

SEQ ID NO: 1004091 - RNA, 19 nt, Artificial Sequence
  Description of Artificial Sequence: Synthetic oligonucleotide
uggaggcauugaguuuugg

SEQ ID NO: 1004092 - RNA, 19 nt, Artificial Sequence
  Description of Artificial Sequence: Synthetic oligonucleotide
ugucagcacuuugguuugg

SEQ ID NO: 1004093 - RNA, 19 nt, Artificial Sequence
  Description of Artificial Sequence: Synthetic oligonucleotide
ggucccacguuuguccugg

SEQ ID NO: 1004094 - RNA, 19 nt, Artificial Sequence
  Description of Artificial Sequence: Synthetic oligonucleotide
gugugcacuuggucccacg

SEQ ID NO: 1004095 - RNA, 19 nt, Artificial Sequence
  Description of Artificial Sequence: Synthetic oligonucleotide
caccucuaaccugggauac

SEQ ID NO: 1004096 - RNA, 19 nt, Artificial Sequence
  Description of Artificial Sequence: Synthetic oligonucleotide
cucauucucggccgcgauc

SEQ ID NO: 1004097 - RNA, 19 nt, Artificial Sequence
  Description of Artificial Sequence: Synthetic oligonucleotide
ucagcggugggcuccuguu

SEQ ID NO: 1004098 - RNA, 19 nt, Artificial Sequence
  Description of Artificial Sequence: Synthetic oligonucleotide
uagcuacuggagccacccc

SEQ ID NO: 1004099 - RNA, 19 nt, Artificial Sequence
  Description of Artificial Sequence: Synthetic oligonucleotide
caggcacgagguucaggcc

SEQ ID NO: 1004100 - RNA, 19 nt, Artificial Sequence
  Description of Artificial Sequence: Synthetic oligonucleotide
cagagacaaggugggcugg

SEQ ID NO: 1004101 - RNA, 19 nt, Artificial Sequence
  Description of Artificial Sequence: Synthetic oligonucleotide
cccacguuuguccuggcug

SEQ ID NO: 1004102 - RNA, 19 nt, Artificial Sequence
  Description of Artificial Sequence: Synthetic oligonucleotide
auaccggaggcucgaccgu

SEQ ID NO: 1004103 - RNA, 19 nt, Artificial Sequence
  Description of Artificial Sequence: Synthetic oligonucleotide
ugggugucaggaacucaua

SEQ ID NO: 1004104 - RNA, 19 nt, Artificial Sequence
  Description of Artificial Sequence: Synthetic oligonucleotide
uugucgauuuugaccccuu

SEQ ID NO: 1004105 - RNA, 19 nt, Artificial Sequence
  Description of Artificial Sequence: Synthetic oligonucleotide
gcaaugugacaacacugga

SEQ ID NO: 1004106 - RNA, 19 nt, Artificial Sequence
  Description of Artificial Sequence: Synthetic oligonucleotide
acccagacaguguuccauu

SEQ ID NO: 1004107 - RNA, 19 nt, Artificial Sequence
  Description of Artificial Sequence: Synthetic oligonucleotide
agcacacuccaggccuccc

SEQ ID NO: 1004108 - RNA, 19 nt, Artificial Sequence
  Description of Artificial Sequence: Synthetic oligonucleotide
auugacccuccccuagcua

SEQ ID NO: 1004109 - RNA, 19 nt, Artificial Sequence
  Description of Artificial Sequence: Synthetic oligonucleotide
ggauaccggaggcucgacc

SEQ ID NO: 1004110 - RNA, 19 nt, Artificial Sequence
  Description of Artificial Sequence: Synthetic oligonucleotide
ggugcuuagaggacacaac

SEQ ID NO: 1004111 - RNA, 19 nt, Artificial Sequence
  Description of Artificial Sequence: Synthetic oligonucleotide
gaacggggaggggaggcac

SEQ ID NO: 1004112 - RNA, 19 nt, Artificial Sequence
  Description of Artificial Sequence: Synthetic oligonucleotide
uggucccacguuuguccug

SEQ ID NO: 1004113 - RNA, 19 nt, Artificial Sequence
  Description of Artificial Sequence: Synthetic oligonucleotide
cagcagauuggaggccugg

SEQ ID NO: 1004114 - RNA, 19 nt, Artificial Sequence
  Description of Artificial Sequence: Synthetic oligonucleotide
ucacccggaaagagauuuu

SEQ ID NO: 1004115 - RNA, 19 nt, Artificial Sequence
  Description of Artificial Sequence: Synthetic oligonucleotide
ucugccuguugaggccuag

SEQ ID NO: 1004116 - RNA, 19 nt, Artificial Sequence
  Description of Artificial Sequence: Synthetic oligonucleotide
gcagagacagccacucggc

SEQ ID NO: 1004117 - RNA, 19 nt, Artificial Sequence
  Description of Artificial Sequence: Synthetic oligonucleotide
gccuaggccuggcagacac

SEQ ID NO: 1004118 - RNA, 19 nt, Artificial Sequence
  Description of Artificial Sequence: Synthetic oligonucleotide
gcucccgaccauguagucg

SEQ ID NO: 1004119 - RNA, 19 nt, Artificial Sequence
  Description of Artificial Sequence: Synthetic oligonucleotide
cucucuguucacccggaaa

SEQ ID NO: 1004120 - RNA, 19 nt, Artificial Sequence
  Description of Artificial Sequence: Synthetic oligonucleotide
acgggaacggggaggggag

SEQ ID NO: 1004121 - RNA, 19 nt, Artificial Sequence
  Description of Artificial Sequence: Synthetic oligonucleotide
guagcugccccgagcgagc

SEQ ID NO: 1004122 - RNA, 19 nt, Artificial Sequence
  Description of Artificial Sequence: Synthetic oligonucleotide
gcagacaguggaguuaaga

SEQ ID NO: 1004123 - RNA, 19 nt, Artificial Sequence
  Description of Artificial Sequence: Synthetic oligonucleotide
cacguuuguccuggcuggg

SEQ ID NO: 1004124 - RNA, 19 nt, Artificial Sequence
  Description of Artificial Sequence: Synthetic oligonucleotide
ccauuccauucuagaagcc

SEQ ID NO: 1004125 - RNA, 19 nt, Artificial Sequence
  Description of Artificial Sequence: Synthetic oligonucleotide
ccacacgggaacgggaacg

SEQ ID NO: 1004126 - RNA, 19 nt, Artificial Sequence
  Description of Artificial Sequence: Synthetic oligonucleotide
aggcucggcuggcuuuguc

SEQ ID NO: 1004127 - RNA, 19 nt, Artificial Sequence
  Description of Artificial Sequence: Synthetic oligonucleotide
gccuacaaggacagagaag

SEQ ID NO: 1004128 - RNA, 19 nt, Artificial Sequence
  Description of Artificial Sequence: Synthetic oligonucleotide
cugucuguccgccgcccug

SEQ ID NO: 1004129 - RNA, 19 nt, Artificial Sequence
  Description of Artificial Sequence: Synthetic oligonucleotide
uuaaggcaucaugguuaga

SEQ ID NO: 1004130 - RNA, 19 nt, Artificial Sequence
  Description of Artificial Sequence: Synthetic oligonucleotide
ggcucgaccgucgcucucg

SEQ ID NO: 1004131 - RNA, 19 nt, Artificial Sequence
  Description of Artificial Sequence: Synthetic oligonucleotide
uaguaaggcucggcuggcu

SEQ ID NO: 1004132 - RNA, 19 nt, Artificial Sequence
  Description of Artificial Sequence: Synthetic oligonucleotide
ggcugaaaccccuccccac

SEQ ID NO: 1004133 - RNA, 19 nt, Artificial Sequence
  Description of Artificial Sequence: Synthetic oligonucleotide
ccaacccuggccaugggga

SEQ ID NO: 1004134 - RNA, 19 nt, Artificial Sequence
  Description of Artificial Sequence: Synthetic oligonucleotide
cuggagcucaguccuucca

SEQ ID NO: 1004135 - RNA, 19 nt, Artificial Sequence
  Description of Artificial Sequence: Synthetic oligonucleotide
cuuugguuuggggugggua

SEQ ID NO: 1004136 - RNA, 19 nt, Artificial Sequence
  Description of Artificial Sequence: Synthetic oligonucleotide
uggcccaaauggaggcaau

SEQ ID NO: 1004137 - RNA, 19 nt, Artificial Sequence
  Description of Artificial Sequence: Synthetic oligonucleotide
cacgagguucaggccacag

SEQ ID NO: 1004138 - RNA, 19 nt, Artificial Sequence
  Description of Artificial Sequence: Synthetic oligonucleotide
cugccuguugaggccuagg

SEQ ID NO: 1004139 - RNA, 19 nt, Artificial Sequence
  Description of Artificial Sequence: Synthetic oligonucleotide
ggaggcucgaccgucgcuc

SEQ ID NO: 1004140 - RNA, 19 nt, Artificial Sequence
  Description of Artificial Sequence: Synthetic oligonucleotide
gguccgucuugucaucguc

SEQ ID NO: 1004141 - RNA, 19 nt, Artificial Sequence
  Description of Artificial Sequence: Synthetic oligonucleotide
accggaggcucgaccgucg

SEQ ID NO: 1004142 - RNA, 19 nt, Artificial Sequence
  Description of Artificial Sequence: Synthetic oligonucleotide
ucccaacugugugcacuug

SEQ ID NO: 1004143 - RNA, 19 nt, Artificial Sequence
  Description of Artificial Sequence: Synthetic oligonucleotide
aggcucgaccgucgcucuc

SEQ ID NO: 1004144 - RNA, 19 nt, Artificial Sequence
  Description of Artificial Sequence: Synthetic oligonucleotide
cucgaccgucgcucucgcg

SEQ ID NO: 1004145 - RNA, 19 nt, Artificial Sequence
  Description of Artificial Sequence: Synthetic oligonucleotide
cccaacccuggccaugggg

SEQ ID NO: 1004146 - RNA, 19 nt, Artificial Sequence
  Description of Artificial Sequence: Synthetic oligonucleotide
acaccacacgggaacggga

SEQ ID NO: 1004147 - RNA, 19 nt, Artificial Sequence
  Description of Artificial Sequence: Synthetic oligonucleotide
cugccccgagcgagcaugc

SEQ ID NO: 1004148 - RNA, 19 nt, Artificial Sequence
  Description of Artificial Sequence: Synthetic oligonucleotide
aucgggacuugauguugua

SEQ ID NO: 1004149 - RNA, 19 nt, Artificial Sequence
  Description of Artificial Sequence: Synthetic oligonucleotide
gaacgggaacggggagggg

SEQ ID NO: 1004150 - RNA, 19 nt, Artificial Sequence
  Description of Artificial Sequence: Synthetic oligonucleotide
gccuccuuauacuuucgaa

SEQ ID NO: 1004151 - RNA, 19 nt, Artificial Sequence
  Description of Artificial Sequence: Synthetic oligonucleotide
uaccggaggcucgaccguc

SEQ ID NO: 1004152 - RNA, 19 nt, Artificial Sequence
  Description of Artificial Sequence: Synthetic oligonucleotide
acagcagauuggaggccug

SEQ ID NO: 1004153 - RNA, 19 nt, Artificial Sequence
  Description of Artificial Sequence: Synthetic oligonucleotide
acguuuguccuggcugggu

SEQ ID NO: 1004154 - RNA, 19 nt, Artificial Sequence
  Description of Artificial Sequence: Synthetic oligonucleotide
agacagugacugacaguga

SEQ ID NO: 1004155 - RNA, 19 nt, Artificial Sequence
  Description of Artificial Sequence: Synthetic oligonucleotide
ggacgacagaggaaaccug

SEQ ID NO: 1004156 - RNA, 19 nt, Artificial Sequence
  Description of Artificial Sequence: Synthetic oligonucleotide
gucaggcgggucacaauga

SEQ ID NO: 1004157 - RNA, 19 nt, Artificial Sequence
  Description of Artificial Sequence: Synthetic oligonucleotide
gggacgacagaggaaaccu

SEQ ID NO: 1004158 - RNA, 19 nt, Artificial Sequence
  Description of Artificial Sequence: Synthetic oligonucleotide
gcugccccgagcgagcaug

SEQ ID NO: 1004159 - RNA, 19 nt, Artificial Sequence
  Description of Artificial Sequence: Synthetic oligonucleotide
cagcggugggcuccuguuc

SEQ ID NO: 1004160 - RNA, 19 nt, Artificial Sequence
  Description of Artificial Sequence: Synthetic oligonucleotide
agucggucuugucgauuuu

SEQ ID NO: 1004161 - RNA, 19 nt, Artificial Sequence
  Description of Artificial Sequence: Synthetic oligonucleotide
acaguggaguuaagaguua

SEQ ID NO: 1004162 - RNA, 19 nt, Artificial Sequence
  Description of Artificial Sequence: Synthetic oligonucleotide
cuugucgauuuugaccccu

SEQ ID NO: 1004163 - RNA, 19 nt, Artificial Sequence
  Description of Artificial Sequence: Synthetic oligonucleotide
cucggccgcgaucugcgca

SEQ ID NO: 1004164 - RNA, 19 nt, Artificial Sequence
  Description of Artificial Sequence: Synthetic oligonucleotide
cauagcucccgaccaugua

SEQ ID NO: 1004165 - RNA, 19 nt, Artificial Sequence
  Description of Artificial Sequence: Synthetic oligonucleotide
gggaacggggaggggaggc

SEQ ID NO: 1004166 - RNA, 19 nt, Artificial Sequence
  Description of Artificial Sequence: Synthetic oligonucleotide
cugugaaucgggacuugau

SEQ ID NO: 1004167 - RNA, 19 nt, Artificial Sequence
  Description of Artificial Sequence: Synthetic oligonucleotide
ucccgaccauguagucggu

SEQ ID NO: 1004168 - RNA, 19 nt, Artificial Sequence
  Description of Artificial Sequence: Synthetic oligonucleotide
ggcaauugacccuccccua

SEQ ID NO: 1004169 - RNA, 19 nt, Artificial Sequence
  Description of Artificial Sequence: Synthetic oligonucleotide
cuggcccaaauggaggcaa

SEQ ID NO: 1004170 - RNA, 19 nt, Artificial Sequence
  Description of Artificial Sequence: Synthetic oligonucleotide
guaaggcucggcuggcuuu

SEQ ID NO: 1004171 - RNA, 19 nt, Artificial Sequence
  Description of Artificial Sequence: Synthetic oligonucleotide
ccuuauacuuucgaaggcu

SEQ ID NO: 1004172 - RNA, 19 nt, Artificial Sequence
  Description of Artificial Sequence: Synthetic oligonucleotide
cacagcagauuggaggccu

SEQ ID NO: 1004173 - RNA, 19 nt, Artificial Sequence
  Description of Artificial Sequence: Synthetic oligonucleotide
ccgguacuccacaccuucc

SEQ ID NO: 1004174 - RNA, 19 nt, Artificial Sequence
  Description of Artificial Sequence: Synthetic oligonucleotide
ggugguccgucuugucauc

SEQ ID NO: 1004175 - RNA, 19 nt, Artificial Sequence
  Description of Artificial Sequence: Synthetic oligonucleotide
cagcccggggcccauagcu

SEQ ID NO: 1004176 - RNA, 19 nt, Artificial Sequence
  Description of Artificial Sequence: Synthetic oligonucleotide
cccgccucccagcuggagc

SEQ ID NO: 1004177 - RNA, 19 nt, Artificial Sequence
  Description of Artificial Sequence: Synthetic oligonucleotide
cauucccaggacagguggu

SEQ ID NO: 1004178 - RNA, 19 nt, Artificial Sequence
  Description of Artificial Sequence: Synthetic oligonucleotide
ggcaucaugguuagacagu

SEQ ID NO: 1004179 - RNA, 19 nt, Artificial Sequence
  Description of Artificial Sequence: Synthetic oligonucleotide
guccgucuugucaucgucu

SEQ ID NO: 1004180 - RNA, 19 nt, Artificial Sequence
  Description of Artificial Sequence: Synthetic oligonucleotide
gaggcucgaccgucgcucu

SEQ ID NO: 1004181 - RNA, 19 nt, Artificial Sequence
  Description of Artificial Sequence: Synthetic oligonucleotide
gcucaguccuuccacuccu

SEQ ID NO: 1004182 - RNA, 19 nt, Artificial Sequence
  Description of Artificial Sequence: Synthetic oligonucleotide
uucaggccacagggcccag

SEQ ID NO: 1004183 - RNA, 19 nt, Artificial Sequence
  Description of Artificial Sequence: Synthetic oligonucleotide
ggggagaccacaugcucau

SEQ ID NO: 1004184 - RNA, 19 nt, Artificial Sequence
  Description of Artificial Sequence: Synthetic oligonucleotide
gaccgucgcucucgcgcuc

SEQ ID NO: 1004185 - RNA, 19 nt, Artificial Sequence
  Description of Artificial Sequence: Synthetic oligonucleotide
gcgcaagcugcucagcggu

SEQ ID NO: 1004186 - RNA, 19 nt, Artificial Sequence
  Description of Artificial Sequence: Synthetic oligonucleotide
caggacaggugguccgucu

SEQ ID NO: 1004187 - RNA, 19 nt, Artificial Sequence
  Description of Artificial Sequence: Synthetic oligonucleotide
ccgcgaucugcgcaagcug

SEQ ID NO: 1004188 - RNA, 19 nt, Artificial Sequence
  Description of Artificial Sequence: Synthetic oligonucleotide
gucccacguuuguccuggc

SEQ ID NO: 1004189 - RNA, 19 nt, Artificial Sequence
  Description of Artificial Sequence: Synthetic oligonucleotide
ggcaacccagacaguguuc

SEQ ID NO: 1004190 - RNA, 19 nt, Artificial Sequence
  Description of Artificial Sequence: Synthetic oligonucleotide
agacagccacucggcccag

SEQ ID NO: 1004191 - RNA, 19 nt, Artificial Sequence
  Description of Artificial Sequence: Synthetic oligonucleotide
agggcccaggugagacuag

SEQ ID NO: 1004192 - RNA, 19 nt, Artificial Sequence
  Description of Artificial Sequence: Synthetic oligonucleotide
cacuuggucccacguuugu

SEQ ID NO: 1004193 - RNA, 19 nt, Artificial Sequence
  Description of Artificial Sequence: Synthetic oligonucleotide
cucccaacugugugcacuu

SEQ ID NO: 1004194 - RNA, 19 nt, Artificial Sequence
  Description of Artificial Sequence: Synthetic oligonucleotide
ccgaccauguagucggucu

SEQ ID NO: 1004195 - RNA, 19 nt, Artificial Sequence
  Description of Artificial Sequence: Synthetic oligonucleotide
ugcccgccucccagcugga

SEQ ID NO: 1004196 - RNA, 19 nt, Artificial Sequence
  Description of Artificial Sequence: Synthetic oligonucleotide
ggggcccauagcucccgac

SEQ ID NO: 1004197 - RNA, 19 nt, Artificial Sequence
  Description of Artificial Sequence: Synthetic oligonucleotide
gcucgaccgucgcucucgc

SEQ ID NO: 1004198 - RNA, 19 nt, Artificial Sequence
  Description of Artificial Sequence: Synthetic oligonucleotide
ggaacggggaggggaggca

SEQ ID NO: 1004199 - RNA, 19 nt, Artificial Sequence
  Description of Artificial Sequence: Synthetic oligonucleotide
agcugccccgagcgagcau

SEQ ID NO: 1004200 - RNA, 19 nt, Artificial Sequence
  Description of Artificial Sequence: Synthetic oligonucleotide
auccgguacuccacaccuu

SEQ ID NO: 1004201 - RNA, 19 nt, Artificial Sequence
  Description of Artificial Sequence: Synthetic oligonucleotide
gggagggccugcccaggga

SEQ ID NO: 1004202 - RNA, 19 nt, Artificial Sequence
  Description of Artificial Sequence: Synthetic oligonucleotide
cucagcggugggcuccugu

SEQ ID NO: 1004203 - RNA, 19 nt, Artificial Sequence
  Description of Artificial Sequence: Synthetic oligonucleotide
ggccgcgaucugcgcaagc

SEQ ID NO: 1004204 - RNA, 19 nt, Artificial Sequence
  Description of Artificial Sequence: Synthetic oligonucleotide
cccuagcuacuggagccac

SEQ ID NO: 1004205 - RNA, 19 nt, Artificial Sequence
  Description of Artificial Sequence: Synthetic oligonucleotide
cgauuuugaccccuuuccu

SEQ ID NO: 1004206 - RNA, 19 nt, Artificial Sequence
  Description of Artificial Sequence: Synthetic oligonucleotide
ggcccaaauggaggcaaua

SEQ ID NO: 1004207 - RNA, 19 nt, Artificial Sequence
  Description of Artificial Sequence: Synthetic oligonucleotide
ccggaggcucgaccgucgc

SEQ ID NO: 1004208 - RNA, 19 nt, Artificial Sequence
  Description of Artificial Sequence: Synthetic oligonucleotide
gccgcgaucugcgcaagcu

SEQ ID NO: 1004209 - RNA, 19 nt, Artificial Sequence
  Description of Artificial Sequence: Synthetic oligonucleotide
gggauaccggaggcucgac

SEQ ID NO: 1004210 - RNA, 19 nt, Artificial Sequence
  Description of Artificial Sequence: Synthetic oligonucleotide
cucaguccuuccacuccuu

SEQ ID NO: 1004211 - RNA, 19 nt, Artificial Sequence
  Description of Artificial Sequence: Synthetic oligonucleotide
cgcucucgcgcucccuccc

SEQ ID NO: 1004212 - RNA, 19 nt, Artificial Sequence
  Description of Artificial Sequence: Synthetic oligonucleotide
ccgagcgagcaugccuuug

SEQ ID NO: 1004213 - RNA, 19 nt, Artificial Sequence
  Description of Artificial Sequence: Synthetic oligonucleotide
ccgccucccagcuggagcu

SEQ ID NO: 1004214 - RNA, 19 nt, Artificial Sequence
  Description of Artificial Sequence: Synthetic oligonucleotide
gggacgugcugcacaccaa

SEQ ID NO: 1004215 - RNA, 19 nt, Artificial Sequence
  Description of Artificial Sequence: Synthetic oligonucleotide
cccgaccauguagucgguc

SEQ ID NO: 1004216 - RNA, 19 nt, Artificial Sequence
  Description of Artificial Sequence: Synthetic oligonucleotide
gcauugaguuuuggcaauu

SEQ ID NO: 1004217 - RNA, 19 nt, Artificial Sequence
  Description of Artificial Sequence: Synthetic oligonucleotide
guucacccggaaagagauu

SEQ ID NO: 1004218 - RNA, 19 nt, Artificial Sequence
  Description of Artificial Sequence: Synthetic oligonucleotide
ccccuagcuacuggagcca

SEQ ID NO: 1004219 - RNA, 19 nt, Artificial Sequence
  Description of Artificial Sequence: Synthetic oligonucleotide
gggcccaggugagacuagu

SEQ ID NO: 1004220 - RNA, 19 nt, Artificial Sequence
  Description of Artificial Sequence: Synthetic oligonucleotide
ggcgggucacaaugacauu

SEQ ID NO: 1004221 - RNA, 19 nt, Artificial Sequence
  Description of Artificial Sequence: Synthetic oligonucleotide
cagaggcaucaggccagcu

SEQ ID NO: 1004222 - RNA, 19 nt, Artificial Sequence
  Description of Artificial Sequence: Synthetic oligonucleotide
gccgcccugcccgccuccc

SEQ ID NO: 1004223 - RNA, 19 nt, Artificial Sequence
  Description of Artificial Sequence: Synthetic oligonucleotide
cgaccgucgcucucgcgcu

SEQ ID NO: 1004224 - RNA, 19 nt, Artificial Sequence
  Description of Artificial Sequence: Synthetic oligonucleotide
cggggacgugcugcacacc

SEQ ID NO: 1004225 - RNA, 19 nt, Artificial Sequence
  Description of Artificial Sequence: Synthetic oligonucleotide
cgaccauguagucggucuu

SEQ ID NO: 1004226 - RNA, 19 nt, Artificial Sequence
  Description of Artificial Sequence: Synthetic oligonucleotide
gcucagcggugggcuccug

SEQ ID NO: 1004227 - RNA, 19 nt, Artificial Sequence
  Description of Artificial Sequence: Synthetic oligonucleotide
cggccgcgaucugcgcaag

SEQ ID NO: 1004228 - RNA, 19 nt, Artificial Sequence
  Description of Artificial Sequence: Synthetic oligonucleotide
gggccugcccagggauggu

SEQ ID NO: 1004229 - RNA, 19 nt, Artificial Sequence
  Description of Artificial Sequence: Synthetic oligonucleotide
ccgcccugcccgccuccca

SEQ ID NO: 1004230 - RNA, 19 nt, Artificial Sequence
  Description of Artificial Sequence: Synthetic oligonucleotide
cggaggcucgaccgucgcu

SEQ ID NO: 1004231 - RNA, 19 nt, Artificial Sequence
  Description of Artificial Sequence: Synthetic oligonucleotide
cggggcccauagcucccga

SEQ ID NO: 1004232 - RNA, 19 nt, Artificial Sequence
  Description of Artificial Sequence: Synthetic oligonucleotide
cgucgcucucgcgcucccu

SEQ ID NO: 1004233 - RNA, 19 nt, Artificial Sequence
  Description of Artificial Sequence: Synthetic oligonucleotide
aauaauaggauuccucucc

SEQ ID NO: 1004234 - RNA, 19 nt, Artificial Sequence
  Description of Artificial Sequence: Synthetic oligonucleotide
aauuagagaauuuaacagg

SEQ ID NO: 1004235 - RNA, 19 nt, Artificial Sequence
  Description of Artificial Sequence: Synthetic oligonucleotide
aaaauguugaguuguuugc

SEQ ID NO: 1004236 - RNA, 19 nt, Artificial Sequence
  Description of Artificial Sequence: Synthetic oligonucleotide
  modified_base (9)..(9): a, c, u, g, unknown or other
aacaauggnaccuugaagu

SEQ ID NO: 1004237 - RNA, 19 nt, Artificial Sequence
  Description of Artificial Sequence: Synthetic oligonucleotide
caaaauaccaucauugucc

SEQ ID NO: 1004238 - RNA, 19 nt, Artificial Sequence
  Description of Artificial Sequence: Synthetic oligonucleotide
uguaaaagaguuuuacugg

SEQ ID NO: 1004239 - RNA, 19 nt, Artificial Sequence
  Description of Artificial Sequence: Synthetic oligonucleotide
uuaauuagagaauuuaaca

SEQ ID NO: 1004240 - RNA, 19 nt, Artificial Sequence
  Description of Artificial Sequence: Synthetic oligonucleotide
uuaauaggcagaaucacag

SEQ ID NO: 1004241 - RNA, 19 nt, Artificial Sequence
  Description of Artificial Sequence: Synthetic oligonucleotide
aagaacaguauauuuuggg

SEQ ID NO: 1004242 - RNA, 19 nt, Artificial Sequence
  Description of Artificial Sequence: Synthetic oligonucleotide
agaacaguauauuuugggc

SEQ ID NO: 1004243 - RNA, 19 nt, Artificial Sequence
  Description of Artificial Sequence: Synthetic oligonucleotide
uauaggaaaaguacaaccc

SEQ ID NO: 1004244 - RNA, 19 nt, Artificial Sequence
  Description of Artificial Sequence: Synthetic oligonucleotide
guaauuauuguguauguag

SEQ ID NO: 1004245 - RNA, 19 nt, Artificial Sequence
  Description of Artificial Sequence: Synthetic oligonucleotide
uagagaauuuaacagguag

SEQ ID NO: 1004246 - RNA, 19 nt, Artificial Sequence
  Description of Artificial Sequence: Synthetic oligonucleotide
aacgacauggagaaaauac

SEQ ID NO: 1004247 - RNA, 19 nt, Artificial Sequence
  Description of Artificial Sequence: Synthetic oligonucleotide
aggaauucggucuuaauuc

SEQ ID NO: 1004248 - RNA, 19 nt, Artificial Sequence
  Description of Artificial Sequence: Synthetic oligonucleotide
agaugaggaaauuuaauag

SEQ ID NO: 1004249 - RNA, 19 nt, Artificial Sequence
  Description of Artificial Sequence: Synthetic oligonucleotide
uaauuauuguguauguagc

SEQ ID NO: 1004250 - RNA, 19 nt, Artificial Sequence
  Description of Artificial Sequence: Synthetic oligonucleotide
aaggcaaucauauagcaua

SEQ ID NO: 1004251 - RNA, 19 nt, Artificial Sequence
  Description of Artificial Sequence: Synthetic oligonucleotide
ugauuuucauugaauauca

SEQ ID NO: 1004252 - RNA, 19 nt, Artificial Sequence
  Description of Artificial Sequence: Synthetic oligonucleotide
uuagaaacaaggucagagg

SEQ ID NO: 1004253 - RNA, 19 nt, Artificial Sequence
  Description of Artificial Sequence: Synthetic oligonucleotide
uacaacccaaacuuaaagg

SEQ ID NO: 1004254 - RNA, 19 nt, Artificial Sequence
  Description of Artificial Sequence: Synthetic oligonucleotide
uuuaacagguaguauagga

SEQ ID NO: 1004255 - RNA, 19 nt, Artificial Sequence
  Description of Artificial Sequence: Synthetic oligonucleotide
aauuuaacagguaguauag

SEQ ID NO: 1004256 - RNA, 19 nt, Artificial Sequence
  Description of Artificial Sequence: Synthetic oligonucleotide
guguaaaagaguuuuacug

SEQ ID NO: 1004257 - RNA, 19 nt, Artificial Sequence
  Description of Artificial Sequence: Synthetic oligonucleotide
gaacaguauauuuugggcc

SEQ ID NO: 1004258 - RNA, 19 nt, Artificial Sequence
  Description of Artificial Sequence: Synthetic oligonucleotide
uggaauaaguucuuaacca

SEQ ID NO: 1004259 - RNA, 19 nt, Artificial Sequence
  Description of Artificial Sequence: Synthetic oligonucleotide
aauaccaucauuguccaca

SEQ ID NO: 1004260 - RNA, 19 nt, Artificial Sequence
  Description of Artificial Sequence: Synthetic oligonucleotide
uugaaguugauucuguagu

SEQ ID NO: 1004261 - RNA, 19 nt, Artificial Sequence
  Description of Artificial Sequence: Synthetic oligonucleotide
aauuauuguguauguagca

SEQ ID NO: 1004262 - RNA, 19 nt, Artificial Sequence
  Description of Artificial Sequence: Synthetic oligonucleotide
aacaguauauuuugggccu

SEQ ID NO: 1004263 - RNA, 19 nt, Artificial Sequence
  Description of Artificial Sequence: Synthetic oligonucleotide
uuuaauaggcagaaucaca

SEQ ID NO: 1004264 - RNA, 19 nt, Artificial Sequence
  Description of Artificial Sequence: Synthetic oligonucleotide
  modified_base (12)..(12): a, c, u, g, unknown or other
aagccagcaacnucacucc

SEQ ID NO: 1004265 - RNA, 19 nt, Artificial Sequence
  Description of Artificial Sequence: Synthetic oligonucleotide
uacaaugcaguuuggauca

SEQ ID NO: 1004266 - RNA, 19 nt, Artificial Sequence
  Description of Artificial Sequence: Synthetic oligonucleotide
augaggaaauuuaauaggc

SEQ ID NO: 1004267 - RNA, 19 nt, Artificial Sequence
  Description of Artificial Sequence: Synthetic oligonucleotide
ucagaguugguacacaagu

SEQ ID NO: 1004268 - RNA, 19 nt, Artificial Sequence
  Description of Artificial Sequence: Synthetic oligonucleotide
  modified_base (7)..(7): a, c, u, g, unknown or other
agcaacnucacuccacuuc

SEQ ID NO: 1004269 - RNA, 19 nt, Artificial Sequence
  Description of Artificial Sequence: Synthetic oligonucleotide
uuuugaaaugaguagccga

SEQ ID NO: 1004270 - RNA, 19 nt, Artificial Sequence
  Description of Artificial Sequence: Synthetic oligonucleotide
uguauguagcacuugcaag

SEQ ID NO: 1004271 - RNA, 19 nt, Artificial Sequence
  Description of Artificial Sequence: Synthetic oligonucleotide
ugugcuucauacuuaacga

SEQ ID NO: 1004272 - RNA, 19 nt, Artificial Sequence
  Description of Artificial Sequence: Synthetic oligonucleotide
aaggcuuguucucucuggc

SEQ ID NO: 1004273 - RNA, 19 nt, Artificial Sequence
  Description of Artificial Sequence: Synthetic oligonucleotide
cugaacagcauguugguag

SEQ ID NO: 1004274 - RNA, 19 nt, Artificial Sequence
  Description of Artificial Sequence: Synthetic oligonucleotide
aaauaggacuuuccuguuc

SEQ ID NO: 1004275 - RNA, 19 nt, Artificial Sequence
  Description of Artificial Sequence: Synthetic oligonucleotide
auuuaauaggcagaaucac

SEQ ID NO: 1004276 - RNA, 19 nt, Artificial Sequence
  Description of Artificial Sequence: Synthetic oligonucleotide
uauagcauagcauguaaaa

SEQ ID NO: 1004277 - RNA, 19 nt, Artificial Sequence
  Description of Artificial Sequence: Synthetic oligonucleotide
uacuuaacgacauggagaa

SEQ ID NO: 1004278 - RNA, 19 nt, Artificial Sequence
  Description of Artificial Sequence: Synthetic oligonucleotide
ugugcuucaggcaaaggga

SEQ ID NO: 1004279 - RNA, 19 nt, Artificial Sequence
  Description of Artificial Sequence: Synthetic oligonucleotide
aguaauuguuugcauguag

SEQ ID NO: 1004280 - RNA, 19 nt, Artificial Sequence
  Description of Artificial Sequence: Synthetic oligonucleotide
  modified_base (3)..(3): a, c, u, g, unknown or other
acnucacuccacuucacac

SEQ ID NO: 1004281 - RNA, 19 nt, Artificial Sequence
  Description of Artificial Sequence: Synthetic oligonucleotide
uaucaagguauucuguaca

SEQ ID NO: 1004282 - RNA, 19 nt, Artificial Sequence
  Description of Artificial Sequence: Synthetic oligonucleotide
aacuuaaaggaacacugaa

SEQ ID NO: 1004283 - RNA, 19 nt, Artificial Sequence
  Description of Artificial Sequence: Synthetic oligonucleotide
ugaaaugaguagccgacug

SEQ ID NO: 1004284 - RNA, 19 nt, Artificial Sequence
  Description of Artificial Sequence: Synthetic oligonucleotide
uuaacagguaguauaggaa

SEQ ID NO: 1004285 - RNA, 19 nt, Artificial Sequence
  Description of Artificial Sequence: Synthetic oligonucleotide
ucuaacaggcugcauaagu

SEQ ID NO: 1004286 - RNA, 19 nt, Artificial Sequence
  Description of Artificial Sequence: Synthetic oligonucleotide
aauuguuugcauguaguca

SEQ ID NO: 1004287 - RNA, 19 nt, Artificial Sequence
  Description of Artificial Sequence: Synthetic oligonucleotide
  modified_base (12)..(12): a, c, u, g, unknown or other
uauaacaauggnaccuuga

SEQ ID NO: 1004288 - RNA, 19 nt, Artificial Sequence
  Description of Artificial Sequence: Synthetic oligonucleotide
aucaagguauucuguacac

SEQ ID NO: 1004289 - RNA, 19 nt, Artificial Sequence
  Description of Artificial Sequence: Synthetic oligonucleotide
aagggauauaaauacguuu

SEQ ID NO: 1004290 - RNA, 19 nt, Artificial Sequence
  Description of Artificial Sequence: Synthetic oligonucleotide
agguauucuguacacuugg

SEQ ID NO: 1004291 - RNA, 19 nt, Artificial Sequence
  Description of Artificial Sequence: Synthetic oligonucleotide
  modified_base (16)..(16): a, c, u, g, unknown or other
cuucaagccagcaacnuca

SEQ ID NO: 1004292 - RNA, 19 nt, Artificial Sequence
  Description of Artificial Sequence: Synthetic oligonucleotide
gauaauggaaggcuuguuc

SEQ ID NO: 1004293 - RNA, 19 nt, Artificial Sequence
  Description of Artificial Sequence: Synthetic oligonucleotide
  modified_base (3)..(3): a, c, u, g, unknown or other
ggnaccuugaaguugauuc

SEQ ID NO: 1004294 - RNA, 19 nt, Artificial Sequence
  Description of Artificial Sequence: Synthetic oligonucleotide
ugagauguauguuuuccug

SEQ ID NO: 1004295 - RNA, 19 nt, Artificial Sequence
  Description of Artificial Sequence: Synthetic oligonucleotide
uuacuucacauaagaacag

SEQ ID NO: 1004296 - RNA, 19 nt, Artificial Sequence
  Description of Artificial Sequence: Synthetic oligonucleotide
aaugauacuuauaucugcu

SEQ ID NO: 1004297 - RNA, 19 nt, Artificial Sequence
  Description of Artificial Sequence: Synthetic oligonucleotide
uucacauaagaacaguaua

SEQ ID NO: 1004298 - RNA, 19 nt, Artificial Sequence
  Description of Artificial Sequence: Synthetic oligonucleotide
auaggaaaaguacaaccca

SEQ ID NO: 1004299 - RNA, 19 nt, Artificial Sequence
  Description of Artificial Sequence: Synthetic oligonucleotide
aagaguaccuacaaaagaa

SEQ ID NO: 1004300 - RNA, 19 nt, Artificial Sequence
  Description of Artificial Sequence: Synthetic oligonucleotide
auagcaauucuagguaacc

SEQ ID NO: 1004301 - RNA, 19 nt, Artificial Sequence
  Description of Artificial Sequence: Synthetic oligonucleotide
uaguauaggaaaaguacaa

SEQ ID NO: 1004302 - RNA, 19 nt, Artificial Sequence
  Description of Artificial Sequence: Synthetic oligonucleotide
guaaccuaguaauuguuug

SEQ ID NO: 1004303 - RNA, 19 nt, Artificial Sequence
  Description of Artificial Sequence: Synthetic oligonucleotide
  modified_base (13)..(13): a, c, u, g, unknown or other
caagccagcaacnucacuc

SEQ ID NO: 1004304 - RNA, 19 nt, Artificial Sequence
  Description of Artificial Sequence: Synthetic oligonucleotide
uugacgguuggcuuggugc

SEQ ID NO: 1004305 - RNA, 19 nt, Artificial Sequence
  Description of Artificial Sequence: Synthetic oligonucleotide
  modified_base (6)..(6): a, c, u, g, unknown or other
aauggnaccuugaaguuga

SEQ ID NO: 1004306 - RNA, 19 nt, Artificial Sequence
  Description of Artificial Sequence: Synthetic oligonucleotide
uaacagguaguauaggaaa

SEQ ID NO: 1004307 - RNA, 19 nt, Artificial Sequence
  Description of Artificial Sequence: Synthetic oligonucleotide
acugcauagcaauucuagg

SEQ ID NO: 1004308 - RNA, 19 nt, Artificial Sequence
  Description of Artificial Sequence: Synthetic oligonucleotide
aacugcauagcaauucuag

SEQ ID NO: 1004309 - RNA, 19 nt, Artificial Sequence
  Description of Artificial Sequence: Synthetic oligonucleotide
ucuuaauucuccgugcagc

SEQ ID NO: 1004310 - RNA, 19 nt, Artificial Sequence
  Description of Artificial Sequence: Synthetic oligonucleotide
uaaccuaguaauuguuugc

SEQ ID NO: 1004311 - RNA, 19 nt, Artificial Sequence
  Description of Artificial Sequence: Synthetic oligonucleotide
auaaucuguacagaaaccu

SEQ ID NO: 1004312 - RNA, 19 nt, Artificial Sequence
  Description of Artificial Sequence: Synthetic oligonucleotide
agaguugguacacaagugu

SEQ ID NO: 1004313 - RNA, 19 nt, Artificial Sequence
  Description of Artificial Sequence: Synthetic oligonucleotide
guuuggaucagaucuugag

SEQ ID NO: 1004314 - RNA, 19 nt, Artificial Sequence
  Description of Artificial Sequence: Synthetic oligonucleotide
aggacuuuccuguuccugg

SEQ ID NO: 1004315 - RNA, 19 nt, Artificial Sequence
  Description of Artificial Sequence: Synthetic oligonucleotide
aauucuagguaaccuagua

SEQ ID NO: 1004316 - RNA, 19 nt, Artificial Sequence
  Description of Artificial Sequence: Synthetic oligonucleotide
augaguagccgacugaacu

SEQ ID NO: 1004317 - RNA, 19 nt, Artificial Sequence
  Description of Artificial Sequence: Synthetic oligonucleotide
ucggucuuaauucuccgug

SEQ ID NO: 1004318 - RNA, 19 nt, Artificial Sequence
  Description of Artificial Sequence: Synthetic oligonucleotide
uaacaggcugcauaagugc

SEQ ID NO: 1004319 - RNA, 19 nt, Artificial Sequence
  Description of Artificial Sequence: Synthetic oligonucleotide
auagccauccgucuuccuc

SEQ ID NO: 1004320 - RNA, 19 nt, Artificial Sequence
  Description of Artificial Sequence: Synthetic oligonucleotide
ucauacuuaacgacaugga

SEQ ID NO: 1004321 - RNA, 19 nt, Artificial Sequence
  Description of Artificial Sequence: Synthetic oligonucleotide
ucuuucacgggcuucugug

SEQ ID NO: 1004322 - RNA, 19 nt, Artificial Sequence
  Description of Artificial Sequence: Synthetic oligonucleotide
cuaacaggcugcauaagug

SEQ ID NO: 1004323 - RNA, 19 nt, Artificial Sequence
  Description of Artificial Sequence: Synthetic oligonucleotide
guagucaaugcaaaugucc

SEQ ID NO: 1004324 - RNA, 19 nt, Artificial Sequence
  Description of Artificial Sequence: Synthetic oligonucleotide
  modified_base (2)..(2): a, c, u, g, unknown or other
cnucacuccacuucacacg

SEQ ID NO: 1004325 - RNA, 19 nt, Artificial Sequence
  Description of Artificial Sequence: Synthetic oligonucleotide
  modified_base (4)..(4): a, c, u, g, unknown or other
aacnucacuccacuucaca

SEQ ID NO: 1004326 - RNA, 19 nt, Artificial Sequence
  Description of Artificial Sequence: Synthetic oligonucleotide
ucgucuaauugcagaaucc

SEQ ID NO: 1004327 - RNA, 19 nt, Artificial Sequence
  Description of Artificial Sequence: Synthetic oligonucleotide
cagagagucaaucucauca

SEQ ID NO: 1004328 - RNA, 19 nt, Artificial Sequence
  Description of Artificial Sequence: Synthetic oligonucleotide
auauuuugggccuaugauu

SEQ ID NO: 1004329 - RNA, 19 nt, Artificial Sequence
  Description of Artificial Sequence: Synthetic oligonucleotide
aguuuaaacauggcugcac

SEQ ID NO: 1004330 - RNA, 19 nt, Artificial Sequence
  Description of Artificial Sequence: Synthetic oligonucleotide
acauggaaacgacuggcuc

SEQ ID NO: 1004331 - RNA, 19 nt, Artificial Sequence
  Description of Artificial Sequence: Synthetic oligonucleotide
uugcauguagucaaugcaa

SEQ ID NO: 1004332 - RNA, 19 nt, Artificial Sequence
  Description of Artificial Sequence: Synthetic oligonucleotide
ugcauagcaauucuaggua

SEQ ID NO: 1004333 - RNA, 19 nt, Artificial Sequence
  Description of Artificial Sequence: Synthetic oligonucleotide
gguaguauaggaaaaguac

SEQ ID NO: 1004334 - RNA, 19 nt, Artificial Sequence
  Description of Artificial Sequence: Synthetic oligonucleotide
auaccaucauuguccacac

SEQ ID NO: 1004335 - RNA, 19 nt, Artificial Sequence
  Description of Artificial Sequence: Synthetic oligonucleotide
ggaauaaguucuuaaccag

SEQ ID NO: 1004336 - RNA, 19 nt, Artificial Sequence
  Description of Artificial Sequence: Synthetic oligonucleotide
uguucauugacgguuggcu

SEQ ID NO: 1004337 - RNA, 19 nt, Artificial Sequence
  Description of Artificial Sequence: Synthetic oligonucleotide
aaaguccucuguaaacuuc

SEQ ID NO: 1004338 - RNA, 19 nt, Artificial Sequence
  Description of Artificial Sequence: Synthetic oligonucleotide
cacaacucagaguugguac

SEQ ID NO: 1004339 - RNA, 19 nt, Artificial Sequence
  Description of Artificial Sequence: Synthetic oligonucleotide
ucauguucauugacgguug

SEQ ID NO: 1004340 - RNA, 19 nt, Artificial Sequence
  Description of Artificial Sequence: Synthetic oligonucleotide
auacuuaacgacauggaga

SEQ ID NO: 1004341 - RNA, 19 nt, Artificial Sequence
  Description of Artificial Sequence: Synthetic oligonucleotide
uuuguuaauuagagaauuu

SEQ ID NO: 1004342 - RNA, 19 nt, Artificial Sequence
  Description of Artificial Sequence: Synthetic oligonucleotide
ucuucgucuaauugcagaa

SEQ ID NO: 1004343 - RNA, 19 nt, Artificial Sequence
  Description of Artificial Sequence: Synthetic oligonucleotide
ucucguacaaugauacuua

SEQ ID NO: 1004344 - RNA, 19 nt, Artificial Sequence
  Description of Artificial Sequence: Synthetic oligonucleotide
uguguauguagcacuugca

SEQ ID NO: 1004345 - RNA, 19 nt, Artificial Sequence
  Description of Artificial Sequence: Synthetic oligonucleotide
aauaaguucuuaaccaguu

SEQ ID NO: 1004346 - RNA, 19 nt, Artificial Sequence
  Description of Artificial Sequence: Synthetic oligonucleotide
uccugaauagccauccguc

SEQ ID NO: 1004347 - RNA, 19 nt, Artificial Sequence
  Description of Artificial Sequence: Synthetic oligonucleotide
aaccuaguaauuguuugca

SEQ ID NO: 1004348 - RNA, 19 nt, Artificial Sequence
  Description of Artificial Sequence: Synthetic oligonucleotide
ucccuguaaacagaugagg

SEQ ID NO: 1004349 - RNA, 19 nt, Artificial Sequence
  Description of Artificial Sequence: Synthetic oligonucleotide
ugaauagccauccgucuuc

SEQ ID NO: 1004350 - RNA, 19 nt, Artificial Sequence
  Description of Artificial Sequence: Synthetic oligonucleotide
cuaucaagguauucuguac

SEQ ID NO: 1004351 - RNA, 19 nt, Artificial Sequence
  Description of Artificial Sequence: Synthetic oligonucleotide
uugguagaguugaagggcu

SEQ ID NO: 1004352 - RNA, 19 nt, Artificial Sequence
  Description of Artificial Sequence: Synthetic oligonucleotide
aaaugaguagccgacugaa

SEQ ID NO: 1004353 - RNA, 19 nt, Artificial Sequence
  Description of Artificial Sequence: Synthetic oligonucleotide
agaaucacagcuucuuuaa

SEQ ID NO: 1004354 - RNA, 19 nt, Artificial Sequence
  Description of Artificial Sequence: Synthetic oligonucleotide
cuucccuguaaacagauga

SEQ ID NO: 1004355 - RNA, 19 nt, Artificial Sequence
  Description of Artificial Sequence: Synthetic oligonucleotide
uuuaucaccuugugcuuca

SEQ ID NO: 1004356 - RNA, 19 nt, Artificial Sequence
  Description of Artificial Sequence: Synthetic oligonucleotide
auguaauuauuguguaugu

SEQ ID NO: 1004357 - RNA, 19 nt, Artificial Sequence
  Description of Artificial Sequence: Synthetic oligonucleotide
cugagugcugcccaagugc

SEQ ID NO: 1004358 - RNA, 19 nt, Artificial Sequence
  Description of Artificial Sequence: Synthetic oligonucleotide
guaguauaggaaaaguaca

SEQ ID NO: 1004359 - RNA, 19 nt, Artificial Sequence
  Description of Artificial Sequence: Synthetic oligonucleotide
uaauaggcagaaucacagc

SEQ ID NO: 1004360 - RNA, 19 nt, Artificial Sequence
  Description of Artificial Sequence: Synthetic oligonucleotide
caaugcaaauguccaaggc

SEQ ID NO: 1004361 - RNA, 19 nt, Artificial Sequence
  Description of Artificial Sequence: Synthetic oligonucleotide
uuugaaccaggaauucggu

SEQ ID NO: 1004362 - RNA, 19 nt, Artificial Sequence
  Description of Artificial Sequence: Synthetic oligonucleotide
aaugaguagccgacugaac

SEQ ID NO: 1004363 - RNA, 19 nt, Artificial Sequence
  Description of Artificial Sequence: Synthetic oligonucleotide
cacuuagaaacaaggucag

SEQ ID NO: 1004364 - RNA, 19 nt, Artificial Sequence
  Description of Artificial Sequence: Synthetic oligonucleotide
ugagugcugcccaagugca

SEQ ID NO: 1004365 - RNA, 19 nt, Artificial Sequence
  Description of Artificial Sequence: Synthetic oligonucleotide
aacgacuggcuccaagagu

SEQ ID NO: 1004366 - RNA, 19 nt, Artificial Sequence
  Description of Artificial Sequence: Synthetic oligonucleotide
auagcauguaaaaugugca

SEQ ID NO: 1004367 - RNA, 19 nt, Artificial Sequence
  Description of Artificial Sequence: Synthetic oligonucleotide
cauaagugcaucucguaca

SEQ ID NO: 1004368 - RNA, 19 nt, Artificial Sequence
  Description of Artificial Sequence: Synthetic oligonucleotide
ugcaagguagaacugcaua

SEQ ID NO: 1004369 - RNA, 19 nt, Artificial Sequence
  Description of Artificial Sequence: Synthetic oligonucleotide
guauauuuugggccuauga

SEQ ID NO: 1004370 - RNA, 19 nt, Artificial Sequence
  Description of Artificial Sequence: Synthetic oligonucleotide
ugguacacaagugugugac

SEQ ID NO: 1004371 - RNA, 19 nt, Artificial Sequence
  Description of Artificial Sequence: Synthetic oligonucleotide
cuuaacgacauggagaaaa

SEQ ID NO: 1004372 - RNA, 19 nt, Artificial Sequence
  Description of Artificial Sequence: Synthetic oligonucleotide
gcuaaauaggacuuuccug

SEQ ID NO: 1004373 - RNA, 19 nt, Artificial Sequence
  Description of Artificial Sequence: Synthetic oligonucleotide
aaaccuaaaggcaaucaua

SEQ ID NO: 1004374 - RNA, 19 nt, Artificial Sequence
  Description of Artificial Sequence: Synthetic oligonucleotide
ugaacagcauguugguaga

SEQ ID NO: 1004375 - RNA, 19 nt, Artificial Sequence
  Description of Artificial Sequence: Synthetic oligonucleotide
ugucauuuccauagcccca

SEQ ID NO: 1004376 - RNA, 19 nt, Artificial Sequence
  Description of Artificial Sequence: Synthetic oligonucleotide
uauuguguauguagcacuu

SEQ ID NO: 1004377 - RNA, 19 nt, Artificial Sequence
  Description of Artificial Sequence: Synthetic oligonucleotide
uuaacgacauggagaaaau

SEQ ID NO: 1004378 - RNA, 19 nt, Artificial Sequence
  Description of Artificial Sequence: Synthetic oligonucleotide
ugugugacacacacccuca

SEQ ID NO: 1004379 - RNA, 19 nt, Artificial Sequence
  Description of Artificial Sequence: Synthetic oligonucleotide
aacuucaacaagucauguu

SEQ ID NO: 1004380 - RNA, 19 nt, Artificial Sequence
  Description of Artificial Sequence: Synthetic oligonucleotide
agcauagcauguaaaaugu

SEQ ID NO: 1004381 - RNA, 19 nt, Artificial Sequence
  Description of Artificial Sequence: Synthetic oligonucleotide
auucuagguaaccuaguaa

SEQ ID NO: 1004382 - RNA, 19 nt, Artificial Sequence
  Description of Artificial Sequence: Synthetic oligonucleotide
uucacacgcucuauaacaa

SEQ ID NO: 1004383 - RNA, 19 nt, Artificial Sequence
  Description of Artificial Sequence: Synthetic oligonucleotide
cauagcaauucuagguaac

SEQ ID NO: 1004384 - RNA, 19 nt, Artificial Sequence
  Description of Artificial Sequence: Synthetic oligonucleotide
cuuugcacuagccuuccug

SEQ ID NO: 1004385 - RNA, 19 nt, Artificial Sequence
  Description of Artificial Sequence: Synthetic oligonucleotide
aucuucgucuaauugcaga

SEQ ID NO: 1004386 - RNA, 19 nt, Artificial Sequence
  Description of Artificial Sequence: Synthetic oligonucleotide
cuguguaaaagaguuuuac

SEQ ID NO: 1004387 - RNA, 19 nt, Artificial Sequence
  Description of Artificial Sequence: Synthetic oligonucleotide
acagguaguauaggaaaag

SEQ ID NO: 1004388 - RNA, 19 nt, Artificial Sequence
  Description of Artificial Sequence: Synthetic oligonucleotide
gaguugaagggcuuccuca

SEQ ID NO: 1004389 - RNA, 19 nt, Artificial Sequence
  Description of Artificial Sequence: Synthetic oligonucleotide
uccguugcaacagcuuugg

SEQ ID NO: 1004390 - RNA, 19 nt, Artificial Sequence
  Description of Artificial Sequence: Synthetic oligonucleotide
ucauugacgguuggcuugg

SEQ ID NO: 1004391 - RNA, 19 nt, Artificial Sequence
  Description of Artificial Sequence: Synthetic oligonucleotide
uggcuaaauaggacuuucc

SEQ ID NO: 1004392 - RNA, 19 nt, Artificial Sequence
  Description of Artificial Sequence: Synthetic oligonucleotide
gagaauuuaacagguagua

SEQ ID NO: 1004393 - RNA, 19 nt, Artificial Sequence
  Description of Artificial Sequence: Synthetic oligonucleotide
agcauguugguagaguuga

SEQ ID NO: 1004394 - RNA, 19 nt, Artificial Sequence
  Description of Artificial Sequence: Synthetic oligonucleotide
agcaauucuagguaaccua

SEQ ID NO: 1004395 - RNA, 19 nt, Artificial Sequence
  Description of Artificial Sequence: Synthetic oligonucleotide
gaaaugaguagccgacuga

SEQ ID NO: 1004396 - RNA, 19 nt, Artificial Sequence
  Description of Artificial Sequence: Synthetic oligonucleotide
gcaaucauauagcauagca

SEQ ID NO: 1004397 - RNA, 19 nt, Artificial Sequence
  Description of Artificial Sequence: Synthetic oligonucleotide
  modified_base (17)..(17): a, c, u, g, unknown or other
cgcucuauaacaauggnac

SEQ ID NO: 1004398 - RNA, 19 nt, Artificial Sequence
  Description of Artificial Sequence: Synthetic oligonucleotide
cuaguaauuguuugcaugu

SEQ ID NO: 1004399 - RNA, 19 nt, Artificial Sequence
  Description of Artificial Sequence: Synthetic oligonucleotide
  modified_base (7)..(7): a, c, u, g, unknown or other
caauggnaccuugaaguug

SEQ ID NO: 1004400 - RNA, 19 nt, Artificial Sequence
  Description of Artificial Sequence: Synthetic oligonucleotide
  modified_base (13)..(13): a, c, u, g, unknown or other
cuauaacaauggnaccuug

SEQ ID NO: 1004401 - RNA, 19 nt, Artificial Sequence
  Description of Artificial Sequence: Synthetic oligonucleotide
uuccguugcaacagcuuug

SEQ ID NO: 1004402 - RNA, 19 nt, Artificial Sequence
  Description of Artificial Sequence: Synthetic oligonucleotide
agugcaguuuaaacauggc

SEQ ID NO: 1004403 - RNA, 19 nt, Artificial Sequence
  Description of Artificial Sequence: Synthetic oligonucleotide
aagguauucuguacacuug

SEQ ID NO: 1004404 - RNA, 19 nt, Artificial Sequence
  Description of Artificial Sequence: Synthetic oligonucleotide
uacuuauaucugcuccuga

SEQ ID NO: 1004405 - RNA, 19 nt, Artificial Sequence
  Description of Artificial Sequence: Synthetic oligonucleotide
guacacaagugugugacac

SEQ ID NO: 1004406 - RNA, 19 nt, Artificial Sequence
  Description of Artificial Sequence: Synthetic oligonucleotide
aggaaauuuaauaggcaga

SEQ ID NO: 1004407 - RNA, 19 nt, Artificial Sequence
  Description of Artificial Sequence: Synthetic oligonucleotide
uguagcucccagaaccaaa

SEQ ID NO: 1004408 - RNA, 19 nt, Artificial Sequence
  Description of Artificial Sequence: Synthetic oligonucleotide
uguaauuauuguguaugua

SEQ ID NO: 1004409 - RNA, 19 nt, Artificial Sequence
  Description of Artificial Sequence: Synthetic oligonucleotide
agagagucaaucucaucaa

SEQ ID NO: 1004410 - RNA, 19 nt, Artificial Sequence
  Description of Artificial Sequence: Synthetic oligonucleotide
aaagggauauaaauacguu

SEQ ID NO: 1004411 - RNA, 19 nt, Artificial Sequence
  Description of Artificial Sequence: Synthetic oligonucleotide
ccacuuagaaacaagguca

SEQ ID NO: 1004412 - RNA, 19 nt, Artificial Sequence
  Description of Artificial Sequence: Synthetic oligonucleotide
aggaacacugaagugagau

SEQ ID NO: 1004413 - RNA, 19 nt, Artificial Sequence
  Description of Artificial Sequence: Synthetic oligonucleotide
auguucauugacgguuggc

SEQ ID NO: 1004414 - RNA, 19 nt, Artificial Sequence
  Description of Artificial Sequence: Synthetic oligonucleotide
cacuuccuuaccauuuuac

SEQ ID NO: 1004415 - RNA, 19 nt, Artificial Sequence
  Description of Artificial Sequence: Synthetic oligonucleotide
uagcaauuuacuucacaua

SEQ ID NO: 1004416 - RNA, 19 nt, Artificial Sequence
  Description of Artificial Sequence: Synthetic oligonucleotide
gcuggaauaaguucuuaac

SEQ ID NO: 1004417 - RNA, 19 nt, Artificial Sequence
  Description of Artificial Sequence: Synthetic oligonucleotide
cagaucuugaggguccacg

SEQ ID NO: 1004418 - RNA, 19 nt, Artificial Sequence
  Description of Artificial Sequence: Synthetic oligonucleotide
gucuaauugcagaauccag

SEQ ID NO: 1004419 - RNA, 19 nt, Artificial Sequence
  Description of Artificial Sequence: Synthetic oligonucleotide
caaggcacaacucagaguu

SEQ ID NO: 1004420 - RNA, 19 nt, Artificial Sequence
  Description of Artificial Sequence: Synthetic oligonucleotide
ucucaaaucuucgucuaau

SEQ ID NO: 1004421 - RNA, 19 nt, Artificial Sequence
  Description of Artificial Sequence: Synthetic oligonucleotide
ugaguagccgacugaacuu

SEQ ID NO: 1004422 - RNA, 19 nt, Artificial Sequence
  Description of Artificial Sequence: Synthetic oligonucleotide
caucaacugcacuggacug

SEQ ID NO: 1004423 - RNA, 19 nt, Artificial Sequence
  Description of Artificial Sequence: Synthetic oligonucleotide
  modified_base (14)..(14): a, c, u, g, unknown or other
ucaagccagcaacnucacu

SEQ ID NO: 1004424 - RNA, 19 nt, Artificial Sequence
  Description of Artificial Sequence: Synthetic oligonucleotide
  modified_base (16)..(16): a, c, u, g, unknown or other
gcucuauaacaauggnacc

SEQ ID NO: 1004425 - RNA, 19 nt, Artificial Sequence
  Description of Artificial Sequence: Synthetic oligonucleotide
ugacgguuggcuuggugcu

SEQ ID NO: 1004426 - RNA, 19 nt, Artificial Sequence
  Description of Artificial Sequence: Synthetic oligonucleotide
uagcaauucuagguaaccu

SEQ ID NO: 1004427 - RNA, 19 nt, Artificial Sequence
  Description of Artificial Sequence: Synthetic oligonucleotide
guacagaaaccuaaaggca

SEQ ID NO: 1004428 - RNA, 19 nt, Artificial Sequence
  Description of Artificial Sequence: Synthetic oligonucleotide
  modified_base (8)..(8): a, c, u, g, unknown or other
acaauggnaccuugaaguu

SEQ ID NO: 1004429 - RNA, 19 nt, Artificial Sequence
  Description of Artificial Sequence: Synthetic oligonucleotide
ggcccugauacuuugcuug

SEQ ID NO: 1004430 - RNA, 19 nt, Artificial Sequence
  Description of Artificial Sequence: Synthetic oligonucleotide
cauaguucccagcuuuguc

SEQ ID NO: 1004431 - RNA, 19 nt, Artificial Sequence
  Description of Artificial Sequence: Synthetic oligonucleotide
auaaguucuuaaccaguuu

SEQ ID NO: 1004432 - RNA, 19 nt, Artificial Sequence
  Description of Artificial Sequence: Synthetic oligonucleotide
gaaaccuaaaggcaaucau

SEQ ID NO: 1004433 - RNA, 19 nt, Artificial Sequence
  Description of Artificial Sequence: Synthetic oligonucleotide
ccaagaguaccuacaaaag

SEQ ID NO: 1004434 - RNA, 19 nt, Artificial Sequence
  Description of Artificial Sequence: Synthetic oligonucleotide
caucauuguccacaccaac

SEQ ID NO: 1004435 - RNA, 19 nt, Artificial Sequence
  Description of Artificial Sequence: Synthetic oligonucleotide
acgacauggagaaaauacu

SEQ ID NO: 1004436 - RNA, 19 nt, Artificial Sequence
  Description of Artificial Sequence: Synthetic oligonucleotide
uuggcuaaauaggacuuuc

SEQ ID NO: 1004437 - RNA, 19 nt, Artificial Sequence
  Description of Artificial Sequence: Synthetic oligonucleotide
ggaaauuuaauaggcagaa

SEQ ID NO: 1004438 - RNA, 19 nt, Artificial Sequence
  Description of Artificial Sequence: Synthetic oligonucleotide
gugcuucauacuuaacgac

SEQ ID NO: 1004439 - RNA, 19 nt, Artificial Sequence
  Description of Artificial Sequence: Synthetic oligonucleotide
uacuucacauaagaacagu

SEQ ID NO: 1004440 - RNA, 19 nt, Artificial Sequence
  Description of Artificial Sequence: Synthetic oligonucleotide
ucuucccuguaaacagaug

SEQ ID NO: 1004441 - RNA, 19 nt, Artificial Sequence
  Description of Artificial Sequence: Synthetic oligonucleotide
cauauagcauagcauguaa

SEQ ID NO: 1004442 - RNA, 19 nt, Artificial Sequence
  Description of Artificial Sequence: Synthetic oligonucleotide
acucagaguugguacacaa

SEQ ID NO: 1004443 - RNA, 19 nt, Artificial Sequence
  Description of Artificial Sequence: Synthetic oligonucleotide
gaacccaggguauauuugu

SEQ ID NO: 1004444 - RNA, 19 nt, Artificial Sequence
  Description of Artificial Sequence: Synthetic oligonucleotide
guuuuacuggaaauaaucu

SEQ ID NO: 1004445 - RNA, 19 nt, Artificial Sequence
  Description of Artificial Sequence: Synthetic oligonucleotide
ucaagguauucuguacacu

SEQ ID NO: 1004446 - RNA, 19 nt, Artificial Sequence
  Description of Artificial Sequence: Synthetic oligonucleotide
uguuugcuuccguugcaac

SEQ ID NO: 1004447 - RNA, 19 nt, Artificial Sequence
  Description of Artificial Sequence: Synthetic oligonucleotide
caagugcaguuuaaacaug

SEQ ID NO: 1004448 - RNA, 19 nt, Artificial Sequence
  Description of Artificial Sequence: Synthetic oligonucleotide
accgcacagagagucaauc

SEQ ID NO: 1004449 - RNA, 19 nt, Artificial Sequence
  Description of Artificial Sequence: Synthetic oligonucleotide
uugaaaugaguagccgacu

SEQ ID NO: 1004450 - RNA, 19 nt, Artificial Sequence
  Description of Artificial Sequence: Synthetic oligonucleotide
  modified_base (2)..(2): a, c, u, g, unknown or other
gnaccuugaaguugauucu

SEQ ID NO: 1004451 - RNA, 19 nt, Artificial Sequence
  Description of Artificial Sequence: Synthetic oligonucleotide
gaguaccuacaaaagaaaa

SEQ ID NO: 1004452 - RNA, 19 nt, Artificial Sequence
  Description of Artificial Sequence: Synthetic oligonucleotide
gcucuaucaagguauucug

SEQ ID NO: 1004453 - RNA, 19 nt, Artificial Sequence
  Description of Artificial Sequence: Synthetic oligonucleotide
cuuuaucaccuugugcuuc

SEQ ID NO: 1004454 - RNA, 19 nt, Artificial Sequence
  Description of Artificial Sequence: Synthetic oligonucleotide
cauguucauugacgguugg

SEQ ID NO: 1004455 - RNA, 19 nt, Artificial Sequence
  Description of Artificial Sequence: Synthetic oligonucleotide
ugcauaagugcaucucgua

SEQ ID NO: 1004456 - RNA, 19 nt, Artificial Sequence
  Description of Artificial Sequence: Synthetic oligonucleotide
gaauaaguucuuaaccagu

SEQ ID NO: 1004457 - RNA, 19 nt, Artificial Sequence
  Description of Artificial Sequence: Synthetic oligonucleotide
caguguaaacauguucuug

SEQ ID NO: 1004458 - RNA, 19 nt, Artificial Sequence
  Description of Artificial Sequence: Synthetic oligonucleotide
cuucauacuuaacgacaug

SEQ ID NO: 1004459 - RNA, 19 nt, Artificial Sequence
  Description of Artificial Sequence: Synthetic oligonucleotide
gaauagccauccgucuucc

SEQ ID NO: 1004460 - RNA, 19 nt, Artificial Sequence
  Description of Artificial Sequence: Synthetic oligonucleotide
agccauccgucuuccuccc

SEQ ID NO: 1004461 - RNA, 19 nt, Artificial Sequence
  Description of Artificial Sequence: Synthetic oligonucleotide
uacuggaaauaaucugaau

SEQ ID NO: 1004462 - RNA, 19 nt, Artificial Sequence
  Description of Artificial Sequence: Synthetic oligonucleotide
uuuucacuucuggaaccgc

SEQ ID NO: 1004463 - RNA, 19 nt, Artificial Sequence
  Description of Artificial Sequence: Synthetic oligonucleotide
uaggacuuuccuguuccug

SEQ ID NO: 1004464 - RNA, 19 nt, Artificial Sequence
  Description of Artificial Sequence: Synthetic oligonucleotide
  modified_base (6)..(6): a, c, u, g, unknown or other
gcaacnucacuccacuuca

SEQ ID NO: 1004465 - RNA, 19 nt, Artificial Sequence
  Description of Artificial Sequence: Synthetic oligonucleotide
gucauccaagaguaccuac

SEQ ID NO: 1004466 - RNA, 19 nt, Artificial Sequence
  Description of Artificial Sequence: Synthetic oligonucleotide
aauagccauccgucuuccu

SEQ ID NO: 1004467 - RNA, 19 nt, Artificial Sequence
  Description of Artificial Sequence: Synthetic oligonucleotide
aaugcaguguaaacauguu

SEQ ID NO: 1004468 - RNA, 19 nt, Artificial Sequence
  Description of Artificial Sequence: Synthetic oligonucleotide
agaacccaggguauauuug

SEQ ID NO: 1004469 - RNA, 19 nt, Artificial Sequence
  Description of Artificial Sequence: Synthetic oligonucleotide
uccgucuuccucccaaguu

SEQ ID NO: 1004470 - RNA, 19 nt, Artificial Sequence
  Description of Artificial Sequence: Synthetic oligonucleotide
aacucagaguugguacaca

SEQ ID NO: 1004471 - RNA, 19 nt, Artificial Sequence
  Description of Artificial Sequence: Synthetic oligonucleotide
uacuuugcuuggcuuuauc

SEQ ID NO: 1004472 - RNA, 19 nt, Artificial Sequence
  Description of Artificial Sequence: Synthetic oligonucleotide
auauagcauagcauguaaa

SEQ ID NO: 1004473 - RNA, 19 nt, Artificial Sequence
  Description of Artificial Sequence: Synthetic oligonucleotide
ucacuuccuuaccauuuua

SEQ ID NO: 1004474 - RNA, 19 nt, Artificial Sequence
  Description of Artificial Sequence: Synthetic oligonucleotide
accuaguaauuguuugcau

SEQ ID NO: 1004475 - RNA, 19 nt, Artificial Sequence
  Description of Artificial Sequence: Synthetic oligonucleotide
agguaguauaggaaaagua

SEQ ID NO: 1004476 - RNA, 19 nt, Artificial Sequence
  Description of Artificial Sequence: Synthetic oligonucleotide
aucaacugcacuggacugu

SEQ ID NO: 1004477 - RNA, 19 nt, Artificial Sequence
  Description of Artificial Sequence: Synthetic oligonucleotide
ggcaagcuggaauaaguuc

SEQ ID NO: 1004478 - RNA, 19 nt, Artificial Sequence
  Description of Artificial Sequence: Synthetic oligonucleotide
ucacacgcucuauaacaau

SEQ ID NO: 1004479 - RNA, 19 nt, Artificial Sequence
  Description of Artificial Sequence: Synthetic oligonucleotide
cccaggguauauuuguagc

SEQ ID NO: 1004480 - RNA, 19 nt, Artificial Sequence
  Description of Artificial Sequence: Synthetic oligonucleotide
uuucuaggaucaucagauu

SEQ ID NO: 1004481 - RNA, 19 nt, Artificial Sequence
  Description of Artificial Sequence: Synthetic oligonucleotide
aguacaacccaaacuuaaa

SEQ ID NO: 1004482 - RNA, 19 nt, Artificial Sequence
  Description of Artificial Sequence: Synthetic oligonucleotide
uuuggcuaaauaggacuuu

SEQ ID NO: 1004483 - RNA, 19 nt, Artificial Sequence
  Description of Artificial Sequence: Synthetic oligonucleotide
caagguauucuguacacuu

SEQ ID NO: 1004484 - RNA, 19 nt, Artificial Sequence
  Description of Artificial Sequence: Synthetic oligonucleotide
agccacuuagaaacaaggu

SEQ ID NO: 1004485 - RNA, 19 nt, Artificial Sequence
  Description of Artificial Sequence: Synthetic oligonucleotide
gcuuuggcuaaauaggacu

SEQ ID NO: 1004486 - RNA, 19 nt, Artificial Sequence
  Description of Artificial Sequence: Synthetic oligonucleotide
cuccuugcauuugaaccag

SEQ ID NO: 1004487 - RNA, 19 nt, Artificial Sequence
  Description of Artificial Sequence: Synthetic oligonucleotide
cauccaagaguaccuacaa

SEQ ID NO: 1004488 - RNA, 19 nt, Artificial Sequence
  Description of Artificial Sequence: Synthetic oligonucleotide
ggaaacgacuggcuccaag

SEQ ID NO: 1004489 - RNA, 19 nt, Artificial Sequence
  Description of Artificial Sequence: Synthetic oligonucleotide
aauucuccgugcagcuuca

SEQ ID NO: 1004490 - RNA, 19 nt, Artificial Sequence
  Description of Artificial Sequence: Synthetic oligonucleotide
  modified_base (5)..(5): a, c, u, g, unknown or other
caacnucacuccacuucac

SEQ ID NO: 1004491 - RNA, 19 nt, Artificial Sequence
  Description of Artificial Sequence: Synthetic oligonucleotide
ccagaaccaaaauaccauc

SEQ ID NO: 1004492 - RNA, 19 nt, Artificial Sequence
  Description of Artificial Sequence: Synthetic oligonucleotide
gugugacacacacccucag

SEQ ID NO: 1004493 - RNA, 19 nt, Artificial Sequence
  Description of Artificial Sequence: Synthetic oligonucleotide
ggucuuaauucuccgugca

SEQ ID NO: 1004494 - RNA, 19 nt, Artificial Sequence
  Description of Artificial Sequence: Synthetic oligonucleotide
uaacgacauggagaaaaua

SEQ ID NO: 1004495 - RNA, 19 nt, Artificial Sequence
  Description of Artificial Sequence: Synthetic oligonucleotide
uaguaauuguuugcaugua

SEQ ID NO: 1004496 - RNA, 19 nt, Artificial Sequence
  Description of Artificial Sequence: Synthetic oligonucleotide
uggucagugaccgcagcau

SEQ ID NO: 1004497 - RNA, 19 nt, Artificial Sequence
  Description of Artificial Sequence: Synthetic oligonucleotide
accgcagcauaucccacau

SEQ ID NO: 1004498 - RNA, 19 nt, Artificial Sequence
  Description of Artificial Sequence: Synthetic oligonucleotide
gugagauguauguuuuccu

SEQ ID NO: 1004499 - RNA, 19 nt, Artificial Sequence
  Description of Artificial Sequence: Synthetic oligonucleotide
  modified_base (18)..(18): a, c, u, g, unknown or other
acgcucuauaacaauggna

SEQ ID NO: 1004500 - RNA, 19 nt, Artificial Sequence
  Description of Artificial Sequence: Synthetic oligonucleotide
uccagaacccaggguauau

SEQ ID NO: 1004501 - RNA, 19 nt, Artificial Sequence
  Description of Artificial Sequence: Synthetic oligonucleotide
ugucauccaagaguaccua

SEQ ID NO: 1004502 - RNA, 19 nt, Artificial Sequence
  Description of Artificial Sequence: Synthetic oligonucleotide
ugaccgcagcauaucccac

SEQ ID NO: 1004503 - RNA, 19 nt, Artificial Sequence
  Description of Artificial Sequence: Synthetic oligonucleotide
caggaauucggucuuaauu

SEQ ID NO: 1004504 - RNA, 19 nt, Artificial Sequence
  Description of Artificial Sequence: Synthetic oligonucleotide
accuaaaggcaaucauaua

SEQ ID NO: 1004505 - RNA, 19 nt, Artificial Sequence
  Description of Artificial Sequence: Synthetic oligonucleotide
gguuuauagcaauuuacuu

SEQ ID NO: 1004506 - RNA, 19 nt, Artificial Sequence
  Description of Artificial Sequence: Synthetic oligonucleotide
gucauguucauugacgguu

SEQ ID NO: 1004507 - RNA, 19 nt, Artificial Sequence
  Description of Artificial Sequence: Synthetic oligonucleotide
  modified_base (19)..(19): a, c, u, g, unknown or other
cacgcucuauaacaauggn

SEQ ID NO: 1004508 - RNA, 19 nt, Artificial Sequence
  Description of Artificial Sequence: Synthetic oligonucleotide
ggcuaaauaggacuuuccu

SEQ ID NO: 1004509 - RNA, 19 nt, Artificial Sequence
  Description of Artificial Sequence: Synthetic oligonucleotide
gcaagcuggaauaaguucu

SEQ ID NO: 1004510 - RNA, 19 nt, Artificial Sequence
  Description of Artificial Sequence: Synthetic oligonucleotide
ccgacugaacuuuucuaac

SEQ ID NO: 1004511 - RNA, 19 nt, Artificial Sequence
  Description of Artificial Sequence: Synthetic oligonucleotide
cagaaaccuaaaggcaauc

SEQ ID NO: 1004512 - RNA, 19 nt, Artificial Sequence
  Description of Artificial Sequence: Synthetic oligonucleotide
gcauagcaauucuagguaa

SEQ ID NO: 1004513 - RNA, 19 nt, Artificial Sequence
  Description of Artificial Sequence: Synthetic oligonucleotide
gcccaagugcaguuuaaac

SEQ ID NO: 1004514 - RNA, 19 nt, Artificial Sequence
  Description of Artificial Sequence: Synthetic oligonucleotide
cucuaucaagguauucugu

SEQ ID NO: 1004515 - RNA, 19 nt, Artificial Sequence
  Description of Artificial Sequence: Synthetic oligonucleotide
gaaccgcacagagagucaa

SEQ ID NO: 1004516 - RNA, 19 nt, Artificial Sequence
  Description of Artificial Sequence: Synthetic oligonucleotide
uuguagcucccagaaccaa

SEQ ID NO: 1004517 - RNA, 19 nt, Artificial Sequence
  Description of Artificial Sequence: Synthetic oligonucleotide
  modified_base (4)..(4): a, c, u, g, unknown or other
uggnaccuugaaguugauu

SEQ ID NO: 1004518 - RNA, 19 nt, Artificial Sequence
  Description of Artificial Sequence: Synthetic oligonucleotide
ccgucuuccucccaaguuc

SEQ ID NO: 1004519 - RNA, 19 nt, Artificial Sequence
  Description of Artificial Sequence: Synthetic oligonucleotide
gguagaguugaagggcuuc

SEQ ID NO: 1004520 - RNA, 19 nt, Artificial Sequence
  Description of Artificial Sequence: Synthetic oligonucleotide
acaaugcaguuuggaucag

SEQ ID NO: 1004521 - RNA, 19 nt, Artificial Sequence
  Description of Artificial Sequence: Synthetic oligonucleotide
cauccaugucauuuccaua

SEQ ID NO: 1004522 - RNA, 19 nt, Artificial Sequence
  Description of Artificial Sequence: Synthetic oligonucleotide
cacauggaaacgacuggcu

SEQ ID NO: 1004523 - RNA, 19 nt, Artificial Sequence
  Description of Artificial Sequence: Synthetic oligonucleotide
ucagaucuugaggguccac

SEQ ID NO: 1004524 - RNA, 19 nt, Artificial Sequence
  Description of Artificial Sequence: Synthetic oligonucleotide
gguacacaagugugugaca

SEQ ID NO: 1004525 - RNA, 19 nt, Artificial Sequence
  Description of Artificial Sequence: Synthetic oligonucleotide
ggcaaucauauagcauagc

SEQ ID NO: 1004526 - RNA, 19 nt, Artificial Sequence
  Description of Artificial Sequence: Synthetic oligonucleotide
gcauagcauguaaaaugug

SEQ ID NO: 1004527 - RNA, 19 nt, Artificial Sequence
  Description of Artificial Sequence: Synthetic oligonucleotide
cuuccguugcaacagcuuu

SEQ ID NO: 1004528 - RNA, 19 nt, Artificial Sequence
  Description of Artificial Sequence: Synthetic oligonucleotide
acaguauauuuugggccua

SEQ ID NO: 1004529 - RNA, 19 nt, Artificial Sequence
  Description of Artificial Sequence: Synthetic oligonucleotide
cggucuuaauucuccgugc

SEQ ID NO: 1004530 - RNA, 19 nt, Artificial Sequence
  Description of Artificial Sequence: Synthetic oligonucleotide
guagccgacugaacuuuuc

SEQ ID NO: 1004531 - RNA, 19 nt, Artificial Sequence
  Description of Artificial Sequence: Synthetic oligonucleotide
auucuccgugcagcuucac

SEQ ID NO: 1004532 - RNA, 19 nt, Artificial Sequence
  Description of Artificial Sequence: Synthetic oligonucleotide
cagguaguauaggaaaagu

SEQ ID NO: 1004533 - RNA, 19 nt, Artificial Sequence
  Description of Artificial Sequence: Synthetic oligonucleotide
caccuugugcuucauacuu

SEQ ID NO: 1004534 - RNA, 19 nt, Artificial Sequence
  Description of Artificial Sequence: Synthetic oligonucleotide
ccuugugcuucauacuuaa

SEQ ID NO: 1004535 - RNA, 19 nt, Artificial Sequence
  Description of Artificial Sequence: Synthetic oligonucleotide
uccauagccccaggaucuc

SEQ ID NO: 1004536 - RNA, 19 nt, Artificial Sequence
  Description of Artificial Sequence: Synthetic oligonucleotide
cagaacccaggguauauuu

SEQ ID NO: 1004537 - RNA, 19 nt, Artificial Sequence
  Description of Artificial Sequence: Synthetic oligonucleotide
ccuaugauuuucauugaau

SEQ ID NO: 1004538 - RNA, 19 nt, Artificial Sequence
  Description of Artificial Sequence: Synthetic oligonucleotide
cugaauagccauccgucuu

SEQ ID NO: 1004539 - RNA, 19 nt, Artificial Sequence
  Description of Artificial Sequence: Synthetic oligonucleotide
cugauacuuugcuuggcuu

SEQ ID NO: 1004540 - RNA, 19 nt, Artificial Sequence
  Description of Artificial Sequence: Synthetic oligonucleotide
accuugugcuucauacuua

SEQ ID NO: 1004541 - RNA, 19 nt, Artificial Sequence
  Description of Artificial Sequence: Synthetic oligonucleotide
cugcacgggcaugugcuuc

SEQ ID NO: 1004542 - RNA, 19 nt, Artificial Sequence
  Description of Artificial Sequence: Synthetic oligonucleotide
aaccaggaauucggucuua

SEQ ID NO: 1004543 - RNA, 19 nt, Artificial Sequence
  Description of Artificial Sequence: Synthetic oligonucleotide
cucguacaaugauacuuau

SEQ ID NO: 1004544 - RNA, 19 nt, Artificial Sequence
  Description of Artificial Sequence: Synthetic oligonucleotide
aggcagaaucacagcuucu

SEQ ID NO: 1004545 - RNA, 19 nt, Artificial Sequence
  Description of Artificial Sequence: Synthetic oligonucleotide
caccaacuccuugcauuug

SEQ ID NO: 1004546 - RNA, 19 nt, Artificial Sequence
  Description of Artificial Sequence: Synthetic oligonucleotide
ccaggguauauuuguagcu

SEQ ID NO: 1004547 - RNA, 19 nt, Artificial Sequence
  Description of Artificial Sequence: Synthetic oligonucleotide
gguaaccuaguaauuguuu

SEQ ID NO: 1004548 - RNA, 19 nt, Artificial Sequence
  Description of Artificial Sequence: Synthetic oligonucleotide
acuuaacgacauggagaaa

SEQ ID NO: 1004549 - RNA, 19 nt, Artificial Sequence
  Description of Artificial Sequence: Synthetic oligonucleotide
aguagccgacugaacuuuu

SEQ ID NO: 1004550 - RNA, 19 nt, Artificial Sequence
  Description of Artificial Sequence: Synthetic oligonucleotide
auccagaacccaggguaua

SEQ ID NO: 1004551 - RNA, 19 nt, Artificial Sequence
  Description of Artificial Sequence: Synthetic oligonucleotide
ggucagugaccgcagcaua

SEQ ID NO: 1004552 - RNA, 19 nt, Artificial Sequence
  Description of Artificial Sequence: Synthetic oligonucleotide
cgucuaauugcagaaucca

SEQ ID NO: 1004553 - RNA, 19 nt, Artificial Sequence
  Description of Artificial Sequence: Synthetic oligonucleotide
auggcugcacgggcaugug

SEQ ID NO: 1004554 - RNA, 19 nt, Artificial Sequence
  Description of Artificial Sequence: Synthetic oligonucleotide
cucacuuccuuaccauuuu

SEQ ID NO: 1004555 - RNA, 19 nt, Artificial Sequence
  Description of Artificial Sequence: Synthetic oligonucleotide
ggacuuuccuguuccuggu

SEQ ID NO: 1004556 - RNA, 19 nt, Artificial Sequence
  Description of Artificial Sequence: Synthetic oligonucleotide
cucuuucacgggcuucugu

SEQ ID NO: 1004557 - RNA, 19 nt, Artificial Sequence
  Description of Artificial Sequence: Synthetic oligonucleotide
ccugaauagccauccgucu

SEQ ID NO: 1004558 - RNA, 19 nt, Artificial Sequence
  Description of Artificial Sequence: Synthetic oligonucleotide
ggggucagcaggucauuua

SEQ ID NO: 1004559 - RNA, 19 nt, Artificial Sequence
  Description of Artificial Sequence: Synthetic oligonucleotide
  modified_base (9)..(9): a, c, u, g, unknown or other
ccagcaacnucacuccacu

SEQ ID NO: 1004560 - RNA, 19 nt, Artificial Sequence
  Description of Artificial Sequence: Synthetic oligonucleotide
ggaaccgcacagagaguca

SEQ ID NO: 1004561 - RNA, 19 nt, Artificial Sequence
  Description of Artificial Sequence: Synthetic oligonucleotide
ggcugcacgggcaugugcu

SEQ ID NO: 1004562 - RNA, 19 nt, Artificial Sequence
  Description of Artificial Sequence: Synthetic oligonucleotide
ccauagccccaggaucucc

SEQ ID NO: 1004563 - RNA, 19 nt, Artificial Sequence
  Description of Artificial Sequence: Synthetic oligonucleotide
acuagccuuccuggccaaa

SEQ ID NO: 1004564 - RNA, 19 nt, Artificial Sequence
  Description of Artificial Sequence: Synthetic oligonucleotide
uggaaacgacuggcuccaa

SEQ ID NO: 1004565 - RNA, 19 nt, Artificial Sequence
  Description of Artificial Sequence: Synthetic oligonucleotide
  modified_base (5)..(5): a, c, u, g, unknown or other
auggnaccuugaaguugau

SEQ ID NO: 1004566 - RNA, 19 nt, Artificial Sequence
  Description of Artificial Sequence: Synthetic oligonucleotide
cacuggacuguuccucuuu

SEQ ID NO: 1004567 - RNA, 19 nt, Artificial Sequence
  Description of Artificial Sequence: Synthetic oligonucleotide
caguauauuuugggccuau

SEQ ID NO: 1004568 - RNA, 19 nt, Artificial Sequence
  Description of Artificial Sequence: Synthetic oligonucleotide
ccgcacagagagucaaucu

SEQ ID NO: 1004569 - RNA, 19 nt, Artificial Sequence
  Description of Artificial Sequence: Synthetic oligonucleotide
  modified_base (8)..(8): a, c, u, g, unknown or other
cagcaacnucacuccacuu

SEQ ID NO: 1004570 - RNA, 19 nt, Artificial Sequence
  Description of Artificial Sequence: Synthetic oligonucleotide
ccgcagcauaucccacaug

SEQ ID NO: 1004571 - RNA, 19 nt, Artificial Sequence
  Description of Artificial Sequence: Synthetic oligonucleotide
gcacuggacuguuccucuu

SEQ ID NO: 1004572 - RNA, 19 nt, Artificial Sequence
  Description of Artificial Sequence: Synthetic oligonucleotide
cauugacgguuggcuuggu

SEQ ID NO: 1004573 - RNA, 19 nt, Artificial Sequence
  Description of Artificial Sequence: Synthetic oligonucleotide
cgacuggcuccaagaguuu

SEQ ID NO: 1004574 - RNA, 19 nt, Artificial Sequence
  Description of Artificial Sequence: Synthetic oligonucleotide
aaauccaguauuuagcacc

SEQ ID NO: 1004575 - RNA, 19 nt, Artificial Sequence
  Description of Artificial Sequence: Synthetic oligonucleotide
auuucaauaacucggaguc

SEQ ID NO: 1004576 - RNA, 19 nt, Artificial Sequence
  Description of Artificial Sequence: Synthetic oligonucleotide
acuaguauaggcuuuaaag

SEQ ID NO: 1004577 - RNA, 19 nt, Artificial Sequence
  Description of Artificial Sequence: Synthetic oligonucleotide
uguguaaugaacaagcaac

SEQ ID NO: 1004578 - RNA, 19 nt, Artificial Sequence
  Description of Artificial Sequence: Synthetic oligonucleotide
ugagauuagaaucauguca

SEQ ID NO: 1004579 - RNA, 19 nt, Artificial Sequence
  Description of Artificial Sequence: Synthetic oligonucleotide
aacgugguaauauuucagc

SEQ ID NO: 1004580 - RNA, 19 nt, Artificial Sequence
  Description of Artificial Sequence: Synthetic oligonucleotide
aauacuguaugugaggagg

SEQ ID NO: 1004581 - RNA, 19 nt, Artificial Sequence
  Description of Artificial Sequence: Synthetic oligonucleotide
uagaguauaauuccuauca

SEQ ID NO: 1004582 - RNA, 19 nt, Artificial Sequence
  Description of Artificial Sequence: Synthetic oligonucleotide
uugcuuauuacacacuugg

SEQ ID NO: 1004583 - RNA, 19 nt, Artificial Sequence
  Description of Artificial Sequence: Synthetic oligonucleotide
cuaguauaggcuuuaaagg

SEQ ID NO: 1004584 - RNA, 19 nt, Artificial Sequence
  Description of Artificial Sequence: Synthetic oligonucleotide
uguugaauuacaaagccac

SEQ ID NO: 1004585 - RNA, 19 nt, Artificial Sequence
  Description of Artificial Sequence: Synthetic oligonucleotide
aauacuaagaguauagaga

SEQ ID NO: 1004586 - RNA, 19 nt, Artificial Sequence
  Description of Artificial Sequence: Synthetic oligonucleotide
cuaugaaucaguuuaugag

SEQ ID NO: 1004587 - RNA, 19 nt, Artificial Sequence
  Description of Artificial Sequence: Synthetic oligonucleotide
ugaguaguuacaaauuagc

SEQ ID NO: 1004588 - RNA, 19 nt, Artificial Sequence
  Description of Artificial Sequence: Synthetic oligonucleotide
uuaauaacaacugcaauac

SEQ ID NO: 1004589 - RNA, 19 nt, Artificial Sequence
  Description of Artificial Sequence: Synthetic oligonucleotide
aauuccaauacuaagagua

SEQ ID NO: 1004590 - RNA, 19 nt, Artificial Sequence
  Description of Artificial Sequence: Synthetic oligonucleotide
aaacuagaguuauuaggac

SEQ ID NO: 1004591 - RNA, 19 nt, Artificial Sequence
  Description of Artificial Sequence: Synthetic oligonucleotide
uaugaaagauuaaauccag

SEQ ID NO: 1004592 - RNA, 19 nt, Artificial Sequence
  Description of Artificial Sequence: Synthetic oligonucleotide
aguggauagacgaaggucc

SEQ ID NO: 1004593 - RNA, 19 nt, Artificial Sequence
  Description of Artificial Sequence: Synthetic oligonucleotide
uccaauacuaagaguauag

SEQ ID NO: 1004594 - RNA, 19 nt, Artificial Sequence
  Description of Artificial Sequence: Synthetic oligonucleotide
agugacaagaagucacucc

SEQ ID NO: 1004595 - RNA, 19 nt, Artificial Sequence
  Description of Artificial Sequence: Synthetic oligonucleotide
aaauugaacagcagaaauc

SEQ ID NO: 1004596 - RNA, 19 nt, Artificial Sequence
  Description of Artificial Sequence: Synthetic oligonucleotide
gauuauuuagaguucgaac

SEQ ID NO: 1004597 - RNA, 19 nt, Artificial Sequence
  Description of Artificial Sequence: Synthetic oligonucleotide
agaguauagagauaaagaa

SEQ ID NO: 1004598 - RNA, 19 nt, Artificial Sequence
  Description of Artificial Sequence: Synthetic oligonucleotide
agaauaacgcucuggagag

SEQ ID NO: 1004599 - RNA, 19 nt, Artificial Sequence
  Description of Artificial Sequence: Synthetic oligonucleotide
uaagaguauagagauaaag

SEQ ID NO: 1004600 - RNA, 19 nt, Artificial Sequence
  Description of Artificial Sequence: Synthetic oligonucleotide
cucauaaugaguuuccaug

SEQ ID NO: 1004601 - RNA, 19 nt, Artificial Sequence
  Description of Artificial Sequence: Synthetic oligonucleotide
caauacuaagaguauagag

SEQ ID NO: 1004602 - RNA, 19 nt, Artificial Sequence
  Description of Artificial Sequence: Synthetic oligonucleotide
aacaaaugagguuuauaca

SEQ ID NO: 1004603 - RNA, 19 nt, Artificial Sequence
  Description of Artificial Sequence: Synthetic oligonucleotide
auacuaagaguauagagau

SEQ ID NO: 1004604 - RNA, 19 nt, Artificial Sequence
  Description of Artificial Sequence: Synthetic oligonucleotide
aacuagaguuauuaggaca

SEQ ID NO: 1004605 - RNA, 19 nt, Artificial Sequence
  Description of Artificial Sequence: Synthetic oligonucleotide
caacauagaguauaauucc

SEQ ID NO: 1004606 - RNA, 19 nt, Artificial Sequence
  Description of Artificial Sequence: Synthetic oligonucleotide
uuugccauuggccagugga

SEQ ID NO: 1004607 - RNA, 19 nt, Artificial Sequence
  Description of Artificial Sequence: Synthetic oligonucleotide
aauuacagaguccuacaca

SEQ ID NO: 1004608 - RNA, 19 nt, Artificial Sequence
  Description of Artificial Sequence: Synthetic oligonucleotide
uuagccaaaccacaggugu

SEQ ID NO: 1004609 - RNA, 19 nt, Artificial Sequence
  Description of Artificial Sequence: Synthetic oligonucleotide
ugcguaaagauuauuuaga

SEQ ID NO: 1004610 - RNA, 19 nt, Artificial Sequence
  Description of Artificial Sequence: Synthetic oligonucleotide
ugcuuauuauuuaaauggc

SEQ ID NO: 1004611 - RNA, 19 nt, Artificial Sequence
  Description of Artificial Sequence: Synthetic oligonucleotide
aguaguuacaaauuagcaa

SEQ ID NO: 1004612 - RNA, 19 nt, Artificial Sequence
  Description of Artificial Sequence: Synthetic oligonucleotide
acuagaguuauuaggacac

SEQ ID NO: 1004613 - RNA, 19 nt, Artificial Sequence
  Description of Artificial Sequence: Synthetic oligonucleotide
aacuccuaaaagaaaggac

SEQ ID NO: 1004614 - RNA, 19 nt, Artificial Sequence
  Description of Artificial Sequence: Synthetic oligonucleotide
ggugauuucaauaacucgg

SEQ ID NO: 1004615 - RNA, 19 nt, Artificial Sequence
  Description of Artificial Sequence: Synthetic oligonucleotide
uaaauucuaugguuuaucu

SEQ ID NO: 1004616 - RNA, 19 nt, Artificial Sequence
  Description of Artificial Sequence: Synthetic oligonucleotide
ugcaaguuuaauguggaag

SEQ ID NO: 1004617 - RNA, 19 nt, Artificial Sequence
  Description of Artificial Sequence: Synthetic oligonucleotide
uguauuuucuuggaaacga

SEQ ID NO: 1004618 - RNA, 19 nt, Artificial Sequence
  Description of Artificial Sequence: Synthetic oligonucleotide
ugguauaugcuguuaaaca

SEQ ID NO: 1004619 - RNA, 19 nt, Artificial Sequence
  Description of Artificial Sequence: Synthetic oligonucleotide
gggaucuuaaauucuaugg

SEQ ID NO: 1004620 - RNA, 19 nt, Artificial Sequence
  Description of Artificial Sequence: Synthetic oligonucleotide
agagauaaagaacuggaaa

SEQ ID NO: 1004621 - RNA, 19 nt, Artificial Sequence
  Description of Artificial Sequence: Synthetic oligonucleotide
uuuacuaacgugguaauau

SEQ ID NO: 1004622 - RNA, 19 nt, Artificial Sequence
  Description of Artificial Sequence: Synthetic oligonucleotide
ucaaucuugagauuagaau

SEQ ID NO: 1004623 - RNA, 19 nt, Artificial Sequence
  Description of Artificial Sequence: Synthetic oligonucleotide
acauaaaugcuuucaaaga

SEQ ID NO: 1004624 - RNA, 19 nt, Artificial Sequence
  Description of Artificial Sequence: Synthetic oligonucleotide
ucucaauggggucuguuag

SEQ ID NO: 1004625 - RNA, 19 nt, Artificial Sequence
  Description of Artificial Sequence: Synthetic oligonucleotide
uggugauuucaauaacucg

SEQ ID NO: 1004626 - RNA, 19 nt, Artificial Sequence
  Description of Artificial Sequence: Synthetic oligonucleotide
uacaagagaauaacgcucu

SEQ ID NO: 1004627 - RNA, 19 nt, Artificial Sequence
  Description of Artificial Sequence: Synthetic oligonucleotide
aguauaauuccuaucaacu

SEQ ID NO: 1004628 - RNA, 19 nt, Artificial Sequence
  Description of Artificial Sequence: Synthetic oligonucleotide
acaaaugacauauauuauu

SEQ ID NO: 1004629 - RNA, 19 nt, Artificial Sequence
  Description of Artificial Sequence: Synthetic oligonucleotide
acuucguuaagacaugacu

SEQ ID NO: 1004630 - RNA, 19 nt, Artificial Sequence
  Description of Artificial Sequence: Synthetic oligonucleotide
uucguuaagacaugacuug

SEQ ID NO: 1004631 - RNA, 19 nt, Artificial Sequence
  Description of Artificial Sequence: Synthetic oligonucleotide
gacaagaagucacuccagg

SEQ ID NO: 1004632 - RNA, 19 nt, Artificial Sequence
  Description of Artificial Sequence: Synthetic oligonucleotide
acuggugucaguuaagaaa

SEQ ID NO: 1004633 - RNA, 19 nt, Artificial Sequence
  Description of Artificial Sequence: Synthetic oligonucleotide
agugcuuucaaacuccuaa

SEQ ID NO: 1004634 - RNA, 19 nt, Artificial Sequence
  Description of Artificial Sequence: Synthetic oligonucleotide
uauuauucucucagggagc

SEQ ID NO: 1004635 - RNA, 19 nt, Artificial Sequence
  Description of Artificial Sequence: Synthetic oligonucleotide
acaaaacuagaguuauuag

SEQ ID NO: 1004636 - RNA, 19 nt, Artificial Sequence
  Description of Artificial Sequence: Synthetic oligonucleotide
uucgagguaaugcacauua

SEQ ID NO: 1004637 - RNA, 19 nt, Artificial Sequence
  Description of Artificial Sequence: Synthetic oligonucleotide
gaguauaauuccuaucaac

SEQ ID NO: 1004638 - RNA, 19 nt, Artificial Sequence
  Description of Artificial Sequence: Synthetic oligonucleotide
auacaagagaauaacgcuc

SEQ ID NO: 1004639 - RNA, 19 nt, Artificial Sequence
  Description of Artificial Sequence: Synthetic oligonucleotide
ucuccuaaguuauauuugu

SEQ ID NO: 1004640 - RNA, 19 nt, Artificial Sequence
  Description of Artificial Sequence: Synthetic oligonucleotide
uucuccuaaguuauauuug

SEQ ID NO: 1004641 - RNA, 19 nt, Artificial Sequence
  Description of Artificial Sequence: Synthetic oligonucleotide
cuaaguuauauuuguaaca

SEQ ID NO: 1004642 - RNA, 19 nt, Artificial Sequence
  Description of Artificial Sequence: Synthetic oligonucleotide
uccuaaguuauauuuguaa

SEQ ID NO: 1004643 - RNA, 19 nt, Artificial Sequence
  Description of Artificial Sequence: Synthetic oligonucleotide
cugcguaaagauuauuuag

SEQ ID NO: 1004644 - RNA, 19 nt, Artificial Sequence
  Description of Artificial Sequence: Synthetic oligonucleotide
augguauaugcuguuaaac

SEQ ID NO: 1004645 - RNA, 19 nt, Artificial Sequence
  Description of Artificial Sequence: Synthetic oligonucleotide
agguaaugcacauuaacau

SEQ ID NO: 1004646 - RNA, 19 nt, Artificial Sequence
  Description of Artificial Sequence: Synthetic oligonucleotide
uacacaauugggagacacg

SEQ ID NO: 1004647 - RNA, 19 nt, Artificial Sequence
  Description of Artificial Sequence: Synthetic oligonucleotide
aauaacgcucuggagagga

SEQ ID NO: 1004648 - RNA, 19 nt, Artificial Sequence
  Description of Artificial Sequence: Synthetic oligonucleotide
gaaaggacauaagaaauuc

SEQ ID NO: 1004649 - RNA, 19 nt, Artificial Sequence
  Description of Artificial Sequence: Synthetic oligonucleotide
aggaccuucucauaaugag

SEQ ID NO: 1004650 - RNA, 19 nt, Artificial Sequence
  Description of Artificial Sequence: Synthetic oligonucleotide
aguuuuacuaacgugguaa

SEQ ID NO: 1004651 - RNA, 19 nt, Artificial Sequence
  Description of Artificial Sequence: Synthetic oligonucleotide
ugcuuauuacacacuuggg

SEQ ID NO: 1004652 - RNA, 19 nt, Artificial Sequence
  Description of Artificial Sequence: Synthetic oligonucleotide
acuuauugugcuuacuuau

SEQ ID NO: 1004653 - RNA, 19 nt, Artificial Sequence
  Description of Artificial Sequence: Synthetic oligonucleotide
acuugcaaguuuaaugugg

SEQ ID NO: 1004654 - RNA, 19 nt, Artificial Sequence
  Description of Artificial Sequence: Synthetic oligonucleotide
aacuugcaaguuuaaugug

SEQ ID NO: 1004655 - RNA, 19 nt, Artificial Sequence
  Description of Artificial Sequence: Synthetic oligonucleotide
ugauuucaauaacucggag

SEQ ID NO: 1004656 - RNA, 19 nt, Artificial Sequence
  Description of Artificial Sequence: Synthetic oligonucleotide
uuaugaguaguuacaaauu

SEQ ID NO: 1004657 - RNA, 19 nt, Artificial Sequence
  Description of Artificial Sequence: Synthetic oligonucleotide
aacuuacucgagucaauca

SEQ ID NO: 1004658 - RNA, 19 nt, Artificial Sequence
  Description of Artificial Sequence: Synthetic oligonucleotide
ucaagauaugacuggcccc

SEQ ID NO: 1004659 - RNA, 19 nt, Artificial Sequence
  Description of Artificial Sequence: Synthetic oligonucleotide
cuugagauuagaaucaugu

SEQ ID NO: 1004660 - RNA, 19 nt, Artificial Sequence
  Description of Artificial Sequence: Synthetic oligonucleotide
auucuaugguuuaucuucc

SEQ ID NO: 1004661 - RNA, 19 nt, Artificial Sequence
  Description of Artificial Sequence: Synthetic oligonucleotide
acuaacgugguaauauuuc

SEQ ID NO: 1004662 - RNA, 19 nt, Artificial Sequence
  Description of Artificial Sequence: Synthetic oligonucleotide
ucucgcugaaugaacaccu

SEQ ID NO: 1004663 - RNA, 19 nt, Artificial Sequence
  Description of Artificial Sequence: Synthetic oligonucleotide
uuagcaacauagaguauaa

SEQ ID NO: 1004664 - RNA, 19 nt, Artificial Sequence
  Description of Artificial Sequence: Synthetic oligonucleotide
aguucgaacuguuucuuca

SEQ ID NO: 1004665 - RNA, 19 nt, Artificial Sequence
  Description of Artificial Sequence: Synthetic oligonucleotide
ucuaucaauccuguucucc

SEQ ID NO: 1004666 - RNA, 19 nt, Artificial Sequence
  Description of Artificial Sequence: Synthetic oligonucleotide
aaauucuaugguuuaucuu

SEQ ID NO: 1004667 - RNA, 19 nt, Artificial Sequence
  Description of Artificial Sequence: Synthetic oligonucleotide
auagauggugauuucaaua

SEQ ID NO: 1004668 - RNA, 19 nt, Artificial Sequence
  Description of Artificial Sequence: Synthetic oligonucleotide
aucuggguggugcauuagc

SEQ ID NO: 1004669 - RNA, 19 nt, Artificial Sequence
  Description of Artificial Sequence: Synthetic oligonucleotide
ccuacaauaucucaacugc

SEQ ID NO: 1004670 - RNA, 19 nt, Artificial Sequence
  Description of Artificial Sequence: Synthetic oligonucleotide
ucugcguaaagauuauuua

SEQ ID NO: 1004671 - RNA, 19 nt, Artificial Sequence
  Description of Artificial Sequence: Synthetic oligonucleotide
ucggaguccucucucaaug

SEQ ID NO: 1004672 - RNA, 19 nt, Artificial Sequence
  Description of Artificial Sequence: Synthetic oligonucleotide
auuagcaacauagaguaua

SEQ ID NO: 1004673 - RNA, 19 nt, Artificial Sequence
  Description of Artificial Sequence: Synthetic oligonucleotide
gagguaaugcacauuaaca

SEQ ID NO: 1004674 - RNA, 19 nt, Artificial Sequence
  Description of Artificial Sequence: Synthetic oligonucleotide
uauaggcuuuaaaggaaca

SEQ ID NO: 1004675 - RNA, 19 nt, Artificial Sequence
  Description of Artificial Sequence: Synthetic oligonucleotide
uuggggagcauauaucuuc

SEQ ID NO: 1004676 - RNA, 19 nt, Artificial Sequence
  Description of Artificial Sequence: Synthetic oligonucleotide
uucgguuucugaaauugaa

SEQ ID NO: 1004677 - RNA, 19 nt, Artificial Sequence
  Description of Artificial Sequence: Synthetic oligonucleotide
aauugacuugaacuugcaa

SEQ ID NO: 1004678 - RNA, 19 nt, Artificial Sequence
  Description of Artificial Sequence: Synthetic oligonucleotide
gaauacuguaugugaggag

SEQ ID NO: 1004679 - RNA, 19 nt, Artificial Sequence
  Description of Artificial Sequence: Synthetic oligonucleotide
acuuacucgagucaaucaa

SEQ ID NO: 1004680 - RNA, 19 nt, Artificial Sequence
  Description of Artificial Sequence: Synthetic oligonucleotide
uauuaggacacuugcuuau

SEQ ID NO: 1004681 - RNA, 19 nt, Artificial Sequence
  Description of Artificial Sequence: Synthetic oligonucleotide
uacuuauuuguguaaugaa

SEQ ID NO: 1004682 - RNA, 19 nt, Artificial Sequence
  Description of Artificial Sequence: Synthetic oligonucleotide
gauuucaauaacucggagu

SEQ ID NO: 1004683 - RNA, 19 nt, Artificial Sequence
  Description of Artificial Sequence: Synthetic oligonucleotide
agcaacacacacaacaucu

SEQ ID NO: 1004684 - RNA, 19 nt, Artificial Sequence
  Description of Artificial Sequence: Synthetic oligonucleotide
uuauuaggacacuugcuua

SEQ ID NO: 1004685 - RNA, 19 nt, Artificial Sequence
  Description of Artificial Sequence: Synthetic oligonucleotide
aagauuaaauccaguauuu

SEQ ID NO: 1004686 - RNA, 19 nt, Artificial Sequence
  Description of Artificial Sequence: Synthetic oligonucleotide
aguauuuagcaccuacaau

SEQ ID NO: 1004687 - RNA, 19 nt, Artificial Sequence
  Description of Artificial Sequence: Synthetic oligonucleotide
agcaucuacuuauugugcu

SEQ ID NO: 1004688 - RNA, 19 nt, Artificial Sequence
  Description of Artificial Sequence: Synthetic oligonucleotide
uuacucgagucaaucaaaa

SEQ ID NO: 1004689 - RNA, 19 nt, Artificial Sequence
  Description of Artificial Sequence: Synthetic oligonucleotide
ucgguuucugaaauugaac

SEQ ID NO: 1004690 - RNA, 19 nt, Artificial Sequence
  Description of Artificial Sequence: Synthetic oligonucleotide
uccuacacaauugggagac

SEQ ID NO: 1004691 - RNA, 19 nt, Artificial Sequence
  Description of Artificial Sequence: Synthetic oligonucleotide
augacauauauuauucucu

SEQ ID NO: 1004692 - RNA, 19 nt, Artificial Sequence
  Description of Artificial Sequence: Synthetic oligonucleotide
cugaaauugaacagcagaa

SEQ ID NO: 1004693 - RNA, 19 nt, Artificial Sequence
  Description of Artificial Sequence: Synthetic oligonucleotide
auaaugaguuuccaugcau

SEQ ID NO: 1004694 - RNA, 19 nt, Artificial Sequence
  Description of Artificial Sequence: Synthetic oligonucleotide
ugacaagaagucacuccag

SEQ ID NO: 1004695 - RNA, 19 nt, Artificial Sequence
  Description of Artificial Sequence: Synthetic oligonucleotide
uuugucuugagcugaccaa

SEQ ID NO: 1004696 - RNA, 19 nt, Artificial Sequence
  Description of Artificial Sequence: Synthetic oligonucleotide
uagucucgcugaaugaaca

SEQ ID NO: 1004697 - RNA, 19 nt, Artificial Sequence
  Description of Artificial Sequence: Synthetic oligonucleotide
aucuacuuauugugcuuac

SEQ ID NO: 1004698 - RNA, 19 nt, Artificial Sequence
  Description of Artificial Sequence: Synthetic oligonucleotide
augaguaguuacaaauuag

SEQ ID NO: 1004699 - RNA, 19 nt, Artificial Sequence
  Description of Artificial Sequence: Synthetic oligonucleotide
agucucgcugaaugaacac

SEQ ID NO: 1004700 - RNA, 19 nt, Artificial Sequence
  Description of Artificial Sequence: Synthetic oligonucleotide
aacuucguuaagacaugac

SEQ ID NO: 1004701 - RNA, 19 nt, Artificial Sequence
  Description of Artificial Sequence: Synthetic oligonucleotide
ugacuuguugaauuacaaa

SEQ ID NO: 1004702 - RNA, 19 nt, Artificial Sequence
  Description of Artificial Sequence: Synthetic oligonucleotide
ugcauaagaagaugguaua

SEQ ID NO: 1004703 - RNA, 19 nt, Artificial Sequence
  Description of Artificial Sequence: Synthetic oligonucleotide
gcaacauagaguauaauuc

SEQ ID NO: 1004704 - RNA, 19 nt, Artificial Sequence
  Description of Artificial Sequence: Synthetic oligonucleotide
aagucacuccagguguggc

SEQ ID NO: 1004705 - RNA, 19 nt, Artificial Sequence
  Description of Artificial Sequence: Synthetic oligonucleotide
cacauuucgagguaaugca

SEQ ID NO: 1004706 - RNA, 19 nt, Artificial Sequence
  Description of Artificial Sequence: Synthetic oligonucleotide
gaggcgggaucuuaaauuc

SEQ ID NO: 1004707 - RNA, 19 nt, Artificial Sequence
  Description of Artificial Sequence: Synthetic oligonucleotide
gaguaguuacaaauuagca

SEQ ID NO: 1004708 - RNA, 19 nt, Artificial Sequence
  Description of Artificial Sequence: Synthetic oligonucleotide
acgugguaauauuucagca

SEQ ID NO: 1004709 - RNA, 19 nt, Artificial Sequence
  Description of Artificial Sequence: Synthetic oligonucleotide
uacuuauugugcuuacuua

SEQ ID NO: 1004710 - RNA, 19 nt, Artificial Sequence
  Description of Artificial Sequence: Synthetic oligonucleotide
aauccaguauuuagcaccu

SEQ ID NO: 1004711 - RNA, 19 nt, Artificial Sequence
  Description of Artificial Sequence: Synthetic oligonucleotide
agacaugacuuguugaauu

SEQ ID NO: 1004712 - RNA, 19 nt, Artificial Sequence
  Description of Artificial Sequence: Synthetic oligonucleotide
caaagaaauaaccugaauu

SEQ ID NO: 1004713 - RNA, 19 nt, Artificial Sequence
  Description of Artificial Sequence: Synthetic oligonucleotide
cucaauggggucuguuagg

SEQ ID NO: 1004714 - RNA, 19 nt, Artificial Sequence
  Description of Artificial Sequence: Synthetic oligonucleotide
gcguaaagauuauuuagag

SEQ ID NO: 1004715 - RNA, 19 nt, Artificial Sequence
  Description of Artificial Sequence: Synthetic oligonucleotide
cuaacgugguaauauuuca

SEQ ID NO: 1004716 - RNA, 19 nt, Artificial Sequence
  Description of Artificial Sequence: Synthetic oligonucleotide
agaugguauaugcuguuaa

SEQ ID NO: 1004717 - RNA, 19 nt, Artificial Sequence
  Description of Artificial Sequence: Synthetic oligonucleotide
cuugcuuauuacacacuug

SEQ ID NO: 1004718 - RNA, 19 nt, Artificial Sequence
  Description of Artificial Sequence: Synthetic oligonucleotide
ucauggcgaggacaggacc

SEQ ID NO: 1004719 - RNA, 19 nt, Artificial Sequence
  Description of Artificial Sequence: Synthetic oligonucleotide
uacuaacgugguaauauuu

SEQ ID NO: 1004720 - RNA, 19 nt, Artificial Sequence
  Description of Artificial Sequence: Synthetic oligonucleotide
acauuucgagguaaugcac

SEQ ID NO: 1004721 - RNA, 19 nt, Artificial Sequence
  Description of Artificial Sequence: Synthetic oligonucleotide
uaggcuuuaaaggaacaaa

SEQ ID NO: 1004722 - RNA, 19 nt, Artificial Sequence
  Description of Artificial Sequence: Synthetic oligonucleotide
uguagucucgcugaaugaa

SEQ ID NO: 1004723 - RNA, 19 nt, Artificial Sequence
  Description of Artificial Sequence: Synthetic oligonucleotide
cuugcaaguuuaaugugga

SEQ ID NO: 1004724 - RNA, 19 nt, Artificial Sequence
  Description of Artificial Sequence: Synthetic oligonucleotide
agaguauaauuccuaucaa

SEQ ID NO: 1004725 - RNA, 19 nt, Artificial Sequence
  Description of Artificial Sequence: Synthetic oligonucleotide
ggaguaacuucguuaagac

SEQ ID NO: 1004726 - RNA, 19 nt, Artificial Sequence
  Description of Artificial Sequence: Synthetic oligonucleotide
aguuuaugaguaguuacaa

SEQ ID NO: 1004727 - RNA, 19 nt, Artificial Sequence
  Description of Artificial Sequence: Synthetic oligonucleotide
caguuuaugaguaguuaca

SEQ ID NO: 1004728 - RNA, 19 nt, Artificial Sequence
  Description of Artificial Sequence: Synthetic oligonucleotide
gaugguauaugcuguuaaa

SEQ ID NO: 1004729 - RNA, 19 nt, Artificial Sequence
  Description of Artificial Sequence: Synthetic oligonucleotide
guuauuaggacacuugcuu

SEQ ID NO: 1004730 - RNA, 19 nt, Artificial Sequence
  Description of Artificial Sequence: Synthetic oligonucleotide
gauacuggugucaguuaag

SEQ ID NO: 1004731 - RNA, 19 nt, Artificial Sequence
  Description of Artificial Sequence: Synthetic oligonucleotide
acugauacuggugucaguu

SEQ ID NO: 1004732 - RNA, 19 nt, Artificial Sequence
  Description of Artificial Sequence: Synthetic oligonucleotide
ugaauguauuuggagacuu

SEQ ID NO: 1004733 - RNA, 19 nt, Artificial Sequence
  Description of Artificial Sequence: Synthetic oligonucleotide
cauuucgagguaaugcaca

SEQ ID NO: 1004734 - RNA, 19 nt, Artificial Sequence
  Description of Artificial Sequence: Synthetic oligonucleotide
uuaggacacuugcuuauua

SEQ ID NO: 1004735 - RNA, 19 nt, Artificial Sequence
  Description of Artificial Sequence: Synthetic oligonucleotide
agauuauuuagaguucgaa

SEQ ID NO: 1004736 - RNA, 19 nt, Artificial Sequence
  Description of Artificial Sequence: Synthetic oligonucleotide
cacacaacaucuuccccac

SEQ ID NO: 1004737 - RNA, 19 nt, Artificial Sequence
  Description of Artificial Sequence: Synthetic oligonucleotide
auuucgagguaaugcacau

SEQ ID NO: 1004738 - RNA, 19 nt, Artificial Sequence
  Description of Artificial Sequence: Synthetic oligonucleotide
uuacuaacgugguaauauu

SEQ ID NO: 1004739 - RNA, 19 nt, Artificial Sequence
  Description of Artificial Sequence: Synthetic oligonucleotide
cuacacaauugggagacac

SEQ ID NO: 1004740 - RNA, 19 nt, Artificial Sequence
  Description of Artificial Sequence: Synthetic oligonucleotide
gauagacgaaggucccagc

SEQ ID NO: 1004741 - RNA, 19 nt, Artificial Sequence
  Description of Artificial Sequence: Synthetic oligonucleotide
aggcauaucugauggcuga

SEQ ID NO: 1004742 - RNA, 19 nt, Artificial Sequence
  Description of Artificial Sequence: Synthetic oligonucleotide
uggguggugcauuagccaa

SEQ ID NO: 1004743 - RNA, 19 nt, Artificial Sequence
  Description of Artificial Sequence: Synthetic oligonucleotide
cuuugucuugagcugacca

SEQ ID NO: 1004744 - RNA, 19 nt, Artificial Sequence
  Description of Artificial Sequence: Synthetic oligonucleotide
guauagagauaaagaacug

SEQ ID NO: 1004745 - RNA, 19 nt, Artificial Sequence
  Description of Artificial Sequence: Synthetic oligonucleotide
guugaauuacaaagccacc

SEQ ID NO: 1004746 - RNA, 19 nt, Artificial Sequence
  Description of Artificial Sequence: Synthetic oligonucleotide
uugaauguauuuggagacu

SEQ ID NO: 1004747 - RNA, 19 nt, Artificial Sequence
  Description of Artificial Sequence: Synthetic oligonucleotide
aaguuuuacuaacguggua

SEQ ID NO: 1004748 - RNA, 19 nt, Artificial Sequence
  Description of Artificial Sequence: Synthetic oligonucleotide
aguuauuaggacacuugcu

SEQ ID NO: 1004749 - RNA, 19 nt, Artificial Sequence
  Description of Artificial Sequence: Synthetic oligonucleotide
auaauuccuaucaacuuuu

SEQ ID NO: 1004750 - RNA, 19 nt, Artificial Sequence
  Description of Artificial Sequence: Synthetic oligonucleotide
aagacaugacuuguugaau

SEQ ID NO: 1004751 - RNA, 19 nt, Artificial Sequence
  Description of Artificial Sequence: Synthetic oligonucleotide
ucguuaagacaugacuugu

SEQ ID NO: 1004752 - RNA, 19 nt, Artificial Sequence
  Description of Artificial Sequence: Synthetic oligonucleotide
ugcuuacuuauuuguguaa

SEQ ID NO: 1004753 - RNA, 19 nt, Artificial Sequence
  Description of Artificial Sequence: Synthetic oligonucleotide
aaauugacuugaacuugca

SEQ ID NO: 1004754 - RNA, 19 nt, Artificial Sequence
  Description of Artificial Sequence: Synthetic oligonucleotide
guuauugcaacaaguuuaa

SEQ ID NO: 1004755 - RNA, 19 nt, Artificial Sequence
  Description of Artificial Sequence: Synthetic oligonucleotide
cucgagucaaucaaaagau

SEQ ID NO: 1004756 - RNA, 19 nt, Artificial Sequence
  Description of Artificial Sequence: Synthetic oligonucleotide
acaagagaauaacgcucug

SEQ ID NO: 1004757 - RNA, 19 nt, Artificial Sequence
  Description of Artificial Sequence: Synthetic oligonucleotide
cuuacucgagucaaucaaa

SEQ ID NO: 1004758 - RNA, 19 nt, Artificial Sequence
  Description of Artificial Sequence: Synthetic oligonucleotide
uacuaagaguauagagaua

SEQ ID NO: 1004759 - RNA, 19 nt, Artificial Sequence
  Description of Artificial Sequence: Synthetic oligonucleotide
auuagccaaaccacaggug

SEQ ID NO: 1004760 - RNA, 19 nt, Artificial Sequence
  Description of Artificial Sequence: Synthetic oligonucleotide
gugauuucaauaacucgga

SEQ ID NO: 1004761 - RNA, 19 nt, Artificial Sequence
  Description of Artificial Sequence: Synthetic oligonucleotide
uuccaauacuaagaguaua

SEQ ID NO: 1004762 - RNA, 19 nt, Artificial Sequence
  Description of Artificial Sequence: Synthetic oligonucleotide
caggcauaucugauggcug

SEQ ID NO: 1004763 - RNA, 19 nt, Artificial Sequence
  Description of Artificial Sequence: Synthetic oligonucleotide
guaacuucguuaagacaug

SEQ ID NO: 1004764 - RNA, 19 nt, Artificial Sequence
  Description of Artificial Sequence: Synthetic oligonucleotide
ucaauaacucggaguccuc

SEQ ID NO: 1004765 - RNA, 19 nt, Artificial Sequence
  Description of Artificial Sequence: Synthetic oligonucleotide
auaggcuuuaaaggaacaa

SEQ ID NO: 1004766 - RNA, 19 nt, Artificial Sequence
  Description of Artificial Sequence: Synthetic oligonucleotide
uagaguuauuaggacacuu

SEQ ID NO: 1004767 - RNA, 19 nt, Artificial Sequence
  Description of Artificial Sequence: Synthetic oligonucleotide
agggacacuuugccauugg

SEQ ID NO: 1004768 - RNA, 19 nt, Artificial Sequence
  Description of Artificial Sequence: Synthetic oligonucleotide
agcaccuacaauaucucaa

SEQ ID NO: 1004769 - RNA, 19 nt, Artificial Sequence
  Description of Artificial Sequence: Synthetic oligonucleotide
caguggauagacgaagguc

SEQ ID NO: 1004770 - RNA, 19 nt, Artificial Sequence
  Description of Artificial Sequence: Synthetic oligonucleotide
gaauaacgcucuggagagg

SEQ ID NO: 1004771 - RNA, 19 nt, Artificial Sequence
  Description of Artificial Sequence: Synthetic oligonucleotide
gucucgcugaaugaacacc

SEQ ID NO: 1004772 - RNA, 19 nt, Artificial Sequence
  Description of Artificial Sequence: Synthetic oligonucleotide
gacagacuaguauaggcuu

SEQ ID NO: 1004773 - RNA, 19 nt, Artificial Sequence
  Description of Artificial Sequence: Synthetic oligonucleotide
uggaggcgggaucuuaaau

SEQ ID NO: 1004774 - RNA, 19 nt, Artificial Sequence
  Description of Artificial Sequence: Synthetic oligonucleotide
uuacacacuuggggcagag

SEQ ID NO: 1004775 - RNA, 19 nt, Artificial Sequence
  Description of Artificial Sequence: Synthetic oligonucleotide
agauuaaauccaguauuua

SEQ ID NO: 1004776 - RNA, 19 nt, Artificial Sequence
  Description of Artificial Sequence: Synthetic oligonucleotide
augaaagauuaaauccagu

SEQ ID NO: 1004777 - RNA, 19 nt, Artificial Sequence
  Description of Artificial Sequence: Synthetic oligonucleotide
ucgagguaaugcacauuaa

SEQ ID NO: 1004778 - RNA, 19 nt, Artificial Sequence
  Description of Artificial Sequence: Synthetic oligonucleotide
ggacacuugcuuauuacac

SEQ ID NO: 1004779 - RNA, 19 nt, Artificial Sequence
  Description of Artificial Sequence: Synthetic oligonucleotide
ggauagacgaaggucccag

SEQ ID NO: 1004780 - RNA, 19 nt, Artificial Sequence
  Description of Artificial Sequence: Synthetic oligonucleotide
gcaccuacaauaucucaac

SEQ ID NO: 1004781 - RNA, 19 nt, Artificial Sequence
  Description of Artificial Sequence: Synthetic oligonucleotide
gggagcauauaucuucuca

SEQ ID NO: 1004782 - RNA, 19 nt, Artificial Sequence
  Description of Artificial Sequence: Synthetic oligonucleotide
aggaaugaacagaaccacu

SEQ ID NO: 1004783 - RNA, 19 nt, Artificial Sequence
  Description of Artificial Sequence: Synthetic oligonucleotide
guagucucgcugaaugaac

SEQ ID NO: 1004784 - RNA, 19 nt, Artificial Sequence
  Description of Artificial Sequence: Synthetic oligonucleotide
gugcuuacuuauuugugua

SEQ ID NO: 1004785 - RNA, 19 nt, Artificial Sequence
  Description of Artificial Sequence: Synthetic oligonucleotide
auuccaauacuaagaguau

SEQ ID NO: 1004786 - RNA, 19 nt, Artificial Sequence
  Description of Artificial Sequence: Synthetic oligonucleotide
uugcaaguuuaauguggaa

SEQ ID NO: 1004787 - RNA, 19 nt, Artificial Sequence
  Description of Artificial Sequence: Synthetic oligonucleotide
aauuagcaacauagaguau

SEQ ID NO: 1004788 - RNA, 19 nt, Artificial Sequence
  Description of Artificial Sequence: Synthetic oligonucleotide
ggacauaagaaauuccaau

SEQ ID NO: 1004789 - RNA, 19 nt, Artificial Sequence
  Description of Artificial Sequence: Synthetic oligonucleotide
gggaguaacuucguuaaga

SEQ ID NO: 1004790 - RNA, 19 nt, Artificial Sequence
  Description of Artificial Sequence: Synthetic oligonucleotide
guggauagacgaagguccc

SEQ ID NO: 1004791 - RNA, 19 nt, Artificial Sequence
  Description of Artificial Sequence: Synthetic oligonucleotide
gaccuucucauaaugaguu

SEQ ID NO: 1004792 - RNA, 19 nt, Artificial Sequence
  Description of Artificial Sequence: Synthetic oligonucleotide
cauuggccaguggauagac

SEQ ID NO: 1004793 - RNA, 19 nt, Artificial Sequence
  Description of Artificial Sequence: Synthetic oligonucleotide
cuacaauaucucaacugcu

SEQ ID NO: 1004794 - RNA, 19 nt, Artificial Sequence
  Description of Artificial Sequence: Synthetic oligonucleotide
caggaccuucucauaauga

SEQ ID NO: 1004795 - RNA, 19 nt, Artificial Sequence
  Description of Artificial Sequence: Synthetic oligonucleotide
guucgaacuguuucuucaa

SEQ ID NO: 1004796 - RNA, 19 nt, Artificial Sequence
  Description of Artificial Sequence: Synthetic oligonucleotide
gguaauauuucagcaaagu

SEQ ID NO: 1004797 - RNA, 19 nt, Artificial Sequence
  Description of Artificial Sequence: Synthetic oligonucleotide
guccuacacaauugggaga

SEQ ID NO: 1004798 - RNA, 19 nt, Artificial Sequence
  Description of Artificial Sequence: Synthetic oligonucleotide
cagcaaaguuauugcaaca

SEQ ID NO: 1004799 - RNA, 19 nt, Artificial Sequence
  Description of Artificial Sequence: Synthetic oligonucleotide
gggucuguuaggaggaggc

SEQ ID NO: 1004800 - RNA, 19 nt, Artificial Sequence
  Description of Artificial Sequence: Synthetic oligonucleotide
gguagggacacuuugccau

SEQ ID NO: 1004801 - RNA, 19 nt, Artificial Sequence
  Description of Artificial Sequence: Synthetic oligonucleotide
gucacuccagguguggcac

SEQ ID NO: 1004802 - RNA, 19 nt, Artificial Sequence
  Description of Artificial Sequence: Synthetic oligonucleotide
agcuccgcggggaacuugg

SEQ ID NO: 1004803 - RNA, 19 nt, Artificial Sequence
  Description of Artificial Sequence: Synthetic oligonucleotide
accacaggugugacacacc

SEQ ID NO: 1004804 - RNA, 19 nt, Artificial Sequence
  Description of Artificial Sequence: Synthetic oligonucleotide
cagaacuuacucgagucaa

SEQ ID NO: 1004805 - RNA, 19 nt, Artificial Sequence
  Description of Artificial Sequence: Synthetic oligonucleotide
aaggcccagaaaacaaauu

SEQ ID NO: 1004806 - RNA, 19 nt, Artificial Sequence
  Description of Artificial Sequence: Synthetic oligonucleotide
cgguuucugaaauugaaca

SEQ ID NO: 1004807 - RNA, 19 nt, Artificial Sequence
  Description of Artificial Sequence: Synthetic oligonucleotide
aagccaccgagggaacugu

SEQ ID NO: 1004808 - RNA, 19 nt, Artificial Sequence
  Description of Artificial Sequence: Synthetic oligonucleotide
agaggagguagggacacuu

SEQ ID NO: 1004809 - RNA, 19 nt, Artificial Sequence
  Description of Artificial Sequence: Synthetic oligonucleotide
cuuccccacauuucgaggu

SEQ ID NO: 1004810 - RNA, 19 nt, Artificial Sequence
  Description of Artificial Sequence: Synthetic oligonucleotide
cucucaauggggucuguua

SEQ ID NO: 1004811 - RNA, 19 nt, Artificial Sequence
  Description of Artificial Sequence: Synthetic oligonucleotide
cacuccagguguggcaccg

SEQ ID NO: 1004812 - RNA, 19 nt, Artificial Sequence
  Description of Artificial Sequence: Synthetic oligonucleotide
auaucucaacugcuucguu

SEQ ID NO: 1004813 - RNA, 19 nt, Artificial Sequence
  Description of Artificial Sequence: Synthetic oligonucleotide
cuccuaaaagaaaggacau

SEQ ID NO: 1004814 - RNA, 19 nt, Artificial Sequence
  Description of Artificial Sequence: Synthetic oligonucleotide
gaucuggguggugcauuag

SEQ ID NO: 1004815 - RNA, 19 nt, Artificial Sequence
  Description of Artificial Sequence: Synthetic oligonucleotide
uucucugcuucugcguaaa

SEQ ID NO: 1004816 - RNA, 19 nt, Artificial Sequence
  Description of Artificial Sequence: Synthetic oligonucleotide
cuuauugugcuuacuuauu

SEQ ID NO: 1004817 - RNA, 19 nt, Artificial Sequence
  Description of Artificial Sequence: Synthetic oligonucleotide
acucggaguccucucucaa

SEQ ID NO: 1004818 - RNA, 19 nt, Artificial Sequence
  Description of Artificial Sequence: Synthetic oligonucleotide
uacacacuuggggcagagc

SEQ ID NO: 1004819 - RNA, 19 nt, Artificial Sequence
  Description of Artificial Sequence: Synthetic oligonucleotide
agaacuuacucgagucaau

SEQ ID NO: 1004820 - RNA, 19 nt, Artificial Sequence
  Description of Artificial Sequence: Synthetic oligonucleotide
cauagauggugauuucaau

SEQ ID NO: 1004821 - RNA, 19 nt, Artificial Sequence
  Description of Artificial Sequence: Synthetic oligonucleotide
gcgaggacaggacccgccg

SEQ ID NO: 1004822 - RNA, 19 nt, Artificial Sequence
  Description of Artificial Sequence: Synthetic oligonucleotide
auaacgcucuggagaggag

SEQ ID NO: 1004823 - RNA, 19 nt, Artificial Sequence
  Description of Artificial Sequence: Synthetic oligonucleotide
acagacuaguauaggcuuu

SEQ ID NO: 1004824 - RNA, 19 nt, Artificial Sequence
  Description of Artificial Sequence: Synthetic oligonucleotide
cuuaaauucuaugguuuau

SEQ ID NO: 1004825 - RNA, 19 nt, Artificial Sequence
  Description of Artificial Sequence: Synthetic oligonucleotide
uagcaacauagaguauaau

SEQ ID NO: 1004826 - RNA, 19 nt, Artificial Sequence
  Description of Artificial Sequence: Synthetic oligonucleotide
uuucgagguaaugcacauu

SEQ ID NO: 1004827 - RNA, 19 nt, Artificial Sequence
  Description of Artificial Sequence: Synthetic oligonucleotide
auuacacacuuggggcaga

SEQ ID NO: 1004828 - RNA, 19 nt, Artificial Sequence
  Description of Artificial Sequence: Synthetic oligonucleotide
gagcuucgguuucugaaau

SEQ ID NO: 1004829 - RNA, 19 nt, Artificial Sequence
  Description of Artificial Sequence: Synthetic oligonucleotide
accgagggaacugucccaa

SEQ ID NO: 1004830 - RNA, 19 nt, Artificial Sequence
  Description of Artificial Sequence: Synthetic oligonucleotide
guggugcauuagccaaacc

SEQ ID NO: 1004831 - RNA, 19 nt, Artificial Sequence
  Description of Artificial Sequence: Synthetic oligonucleotide
ggggaguaacuucguuaag

SEQ ID NO: 1004832 - RNA, 19 nt, Artificial Sequence
  Description of Artificial Sequence: Synthetic oligonucleotide
gguggugcauuagccaaac

SEQ ID NO: 1004833 - RNA, 19 nt, Artificial Sequence
  Description of Artificial Sequence: Synthetic oligonucleotide
gggagacacgaaguggaug

SEQ ID NO: 1004834 - RNA, 19 nt, Artificial Sequence
  Description of Artificial Sequence: Synthetic oligonucleotide
cgggaucuuaaauucuaug

SEQ ID NO: 1004835 - RNA, 19 nt, Artificial Sequence
  Description of Artificial Sequence: Synthetic oligonucleotide
ccuuggggagcauauaucu

SEQ ID NO: 1004836 - RNA, 19 nt, Artificial Sequence
  Description of Artificial Sequence: Synthetic oligonucleotide
ggaggcgggaucuuaaauu

SEQ ID NO: 1004837 - RNA, 19 nt, Artificial Sequence
  Description of Artificial Sequence: Synthetic oligonucleotide
agacuaguauaggcuuuaa

SEQ ID NO: 1004838 - RNA, 19 nt, Artificial Sequence
  Description of Artificial Sequence: Synthetic oligonucleotide
aggcgggaucuuaaauucu

SEQ ID NO: 1004839 - RNA, 19 nt, Artificial Sequence
  Description of Artificial Sequence: Synthetic oligonucleotide
caauaacucggaguccucu

SEQ ID NO: 1004840 - RNA, 19 nt, Artificial Sequence
  Description of Artificial Sequence: Synthetic oligonucleotide
ccaauacuaagaguauaga

SEQ ID NO: 1004841 - RNA, 19 nt, Artificial Sequence
  Description of Artificial Sequence: Synthetic oligonucleotide
cagacuaguauaggcuuua

SEQ ID NO: 1004842 - RNA, 19 nt, Artificial Sequence
  Description of Artificial Sequence: Synthetic oligonucleotide
uggcagcgugugccgcugc

SEQ ID NO: 1004843 - RNA, 19 nt, Artificial Sequence
  Description of Artificial Sequence: Synthetic oligonucleotide
caccgagggaacuguccca

SEQ ID NO: 1004844 - RNA, 19 nt, Artificial Sequence
  Description of Artificial Sequence: Synthetic oligonucleotide
cggaguccucucucaaugg

SEQ ID NO: 1004845 - RNA, 19 nt, Artificial Sequence
  Description of Artificial Sequence: Synthetic oligonucleotide
uggcgaggacaggacccgc

SEQ ID NO: 1004846 - RNA, 19 nt, Artificial Sequence
  Description of Artificial Sequence: Synthetic oligonucleotide
gccaccgagggaacugucc

SEQ ID NO: 1004847 - RNA, 19 nt, Artificial Sequence
  Description of Artificial Sequence: Synthetic oligonucleotide
cacuugcuuauuacacacu

SEQ ID NO: 1004848 - RNA, 19 nt, Artificial Sequence
  Description of Artificial Sequence: Synthetic oligonucleotide
gcuuacuuauuuguguaau

SEQ ID NO: 1004849 - RNA, 19 nt, Artificial Sequence
  Description of Artificial Sequence: Synthetic oligonucleotide
ggcgggaucuuaaauucua

SEQ ID NO: 1004850 - RNA, 19 nt, Artificial Sequence
  Description of Artificial Sequence: Synthetic oligonucleotide
gugugccgcugcuguaguc

SEQ ID NO: 1004851 - RNA, 19 nt, Artificial Sequence
  Description of Artificial Sequence: Synthetic oligonucleotide
ccaugcauaagaagauggu

SEQ ID NO: 1004852 - RNA, 19 nt, Artificial Sequence
  Description of Artificial Sequence: Synthetic oligonucleotide
ggcgaggacaggacccgcc

SEQ ID NO: 1004853 - RNA, 19 nt, Artificial Sequence
  Description of Artificial Sequence: Synthetic oligonucleotide
guagggacacuuugccauu

SEQ ID NO: 1004854 - RNA, 19 nt, Artificial Sequence
  Description of Artificial Sequence: Synthetic oligonucleotide
gagacacgaaguggaugcu

SEQ ID NO: 1004855 - RNA, 19 nt, Artificial Sequence
  Description of Artificial Sequence: Synthetic oligonucleotide
agcgugugccgcugcugua

SEQ ID NO: 1004856 - RNA, 19 nt, Artificial Sequence
  Description of Artificial Sequence: Synthetic oligonucleotide
cugcuucguucauuucuua

SEQ ID NO: 1004857 - RNA, 19 nt, Artificial Sequence
  Description of Artificial Sequence: Synthetic oligonucleotide
cucggaguccucucucaau

SEQ ID NO: 1004858 - RNA, 19 nt, Artificial Sequence
  Description of Artificial Sequence: Synthetic oligonucleotide
caccguggcucuggcagca

SEQ ID NO: 1004859 - RNA, 19 nt, Artificial Sequence
  Description of Artificial Sequence: Synthetic oligonucleotide
ccgagggaacugucccaag

SEQ ID NO: 1004860 - RNA, 19 nt, Artificial Sequence
  Description of Artificial Sequence: Synthetic oligonucleotide
cagcuccgcggggaacuug

SEQ ID NO: 1004861 - RNA, 19 nt, Artificial Sequence
  Description of Artificial Sequence: Synthetic oligonucleotide
gccucauggcgaggacagg

SEQ ID NO: 1004862 - RNA, 19 nt, Artificial Sequence
  Description of Artificial Sequence: Synthetic oligonucleotide
ggguggugcauuagccaaa

SEQ ID NO: 1004863 - RNA, 19 nt, Artificial Sequence
  Description of Artificial Sequence: Synthetic oligonucleotide
gcggggaacuuggucugga

SEQ ID NO: 1004864 - RNA, 19 nt, Artificial Sequence
  Description of Artificial Sequence: Synthetic oligonucleotide
gcggccucauggcgaggac

SEQ ID NO: 1004865 - RNA, 19 nt, Artificial Sequence
  Description of Artificial Sequence: Synthetic oligonucleotide
gcgggaucuuaaauucuau

SEQ ID NO: 1004866 - RNA, 19 nt, Artificial Sequence
  Description of Artificial Sequence: Synthetic oligonucleotide
ccuacacaauugggagaca

SEQ ID NO: 1004867 - RNA, 19 nt, Artificial Sequence
  Description of Artificial Sequence: Synthetic oligonucleotide
cgcggggaacuuggucugg

SEQ ID NO: 1004868 - RNA, 19 nt, Artificial Sequence
  Description of Artificial Sequence: Synthetic oligonucleotide
gcuccgcggggaacuuggu

SEQ ID NO: 1004869 - RNA, 19 nt, Artificial Sequence
  Description of Artificial Sequence: Synthetic oligonucleotide
aagaauagaaauuaagggc

SEQ ID NO: 1004870 - RNA, 19 nt, Artificial Sequence
  Description of Artificial Sequence: Synthetic oligonucleotide
aaauuaagggcccagaugu

SEQ ID NO: 1004871 - RNA, 19 nt, Artificial Sequence
  Description of Artificial Sequence: Synthetic oligonucleotide
agaauagaaauuaagggcc

SEQ ID NO: 1004872 - RNA, 19 nt, Artificial Sequence
  Description of Artificial Sequence: Synthetic oligonucleotide
aaacuuuuauugugaaugc

SEQ ID NO: 1004873 - RNA, 19 nt, Artificial Sequence
  Description of Artificial Sequence: Synthetic oligonucleotide
aacagguacauugagugcc

SEQ ID NO: 1004874 - RNA, 19 nt, Artificial Sequence
  Description of Artificial Sequence: Synthetic oligonucleotide
uuggagaucuggaauaucg

SEQ ID NO: 1004875 - RNA, 19 nt, Artificial Sequence
  Description of Artificial Sequence: Synthetic oligonucleotide
ucuuauaaauuacaauccc

SEQ ID NO: 1004876 - RNA, 19 nt, Artificial Sequence
  Description of Artificial Sequence: Synthetic oligonucleotide
aaagaugugugaguaaggg

SEQ ID NO: 1004877 - RNA, 19 nt, Artificial Sequence
  Description of Artificial Sequence: Synthetic oligonucleotide
cuuuuauugugaaugcugg

SEQ ID NO: 1004878 - RNA, 19 nt, Artificial Sequence
  Description of Artificial Sequence: Synthetic oligonucleotide
aucuuauaaauuacaaucc

SEQ ID NO: 1004879 - RNA, 19 nt, Artificial Sequence
  Description of Artificial Sequence: Synthetic oligonucleotide
gaggacaagaaucucagcc

SEQ ID NO: 1004880 - RNA, 19 nt, Artificial Sequence
  Description of Artificial Sequence: Synthetic oligonucleotide
uugaucaggccucucaacg

SEQ ID NO: 1004881 - RNA, 19 nt, Artificial Sequence
  Description of Artificial Sequence: Synthetic oligonucleotide
aaacagguacauugagugc

SEQ ID NO: 1004882 - RNA, 19 nt, Artificial Sequence
  Description of Artificial Sequence: Synthetic oligonucleotide
uuggugacaaccaacaaaa

SEQ ID NO: 1004883 - RNA, 19 nt, Artificial Sequence
  Description of Artificial Sequence: Synthetic oligonucleotide
aauggacaggaaguuaccc

SEQ ID NO: 1004884 - RNA, 19 nt, Artificial Sequence
  Description of Artificial Sequence: Synthetic oligonucleotide
uuauugugaaugcuggucu

SEQ ID NO: 1004885 - RNA, 19 nt, Artificial Sequence
  Description of Artificial Sequence: Synthetic oligonucleotide
aacuagaaacagcugggag

SEQ ID NO: 1004886 - RNA, 19 nt, Artificial Sequence
  Description of Artificial Sequence: Synthetic oligonucleotide
agggauauucagcagccgc

SEQ ID NO: 1004887 - RNA, 19 nt, Artificial Sequence
  Description of Artificial Sequence: Synthetic oligonucleotide
uguacgaaagaugugugag

SEQ ID NO: 1004888 - RNA, 19 nt, Artificial Sequence
  Description of Artificial Sequence: Synthetic oligonucleotide
gaugguagcugucugccgg

SEQ ID NO: 1004889 - RNA, 19 nt, Artificial Sequence
  Description of Artificial Sequence: Synthetic oligonucleotide
agaugugugaguaagggag

SEQ ID NO: 1004890 - RNA, 19 nt, Artificial Sequence
  Description of Artificial Sequence: Synthetic oligonucleotide
gauggauugacuugacagc

SEQ ID NO: 1004891 - RNA, 19 nt, Artificial Sequence
  Description of Artificial Sequence: Synthetic oligonucleotide
agggcuugcccacagacac

SEQ ID NO: 1004892 - RNA, 19 nt, Artificial Sequence
  Description of Artificial Sequence: Synthetic oligonucleotide
aucuaucugaaacucagca

SEQ ID NO: 1004893 - RNA, 19 nt, Artificial Sequence
  Description of Artificial Sequence: Synthetic oligonucleotide
auuuuaaucugcuggggcu

SEQ ID NO: 1004894 - RNA, 19 nt, Artificial Sequence
  Description of Artificial Sequence: Synthetic oligonucleotide
ggcaacuagaaacagcugg

SEQ ID NO: 1004895 - RNA, 19 nt, Artificial Sequence
  Description of Artificial Sequence: Synthetic oligonucleotide
uacauugagugccaaugcc

SEQ ID NO: 1004896 - RNA, 19 nt, Artificial Sequence
  Description of Artificial Sequence: Synthetic oligonucleotide
gacacacacacacacacac

SEQ ID NO: 1004897 - RNA, 19 nt, Artificial Sequence
  Description of Artificial Sequence: Synthetic oligonucleotide
acuaauuguggugggaugg

SEQ ID NO: 1004898 - RNA, 19 nt, Artificial Sequence
  Description of Artificial Sequence: Synthetic oligonucleotide
aauuguggugggauggugg

SEQ ID NO: 1004899 - RNA, 19 nt, Artificial Sequence
  Description of Artificial Sequence: Synthetic oligonucleotide
agcggaaguggacaguggc

SEQ ID NO: 1004900 - RNA, 19 nt, Artificial Sequence
  Description of Artificial Sequence: Synthetic oligonucleotide
gacaaaagagagcuuagga

SEQ ID NO: 1004901 - RNA, 19 nt, Artificial Sequence
  Description of Artificial Sequence: Synthetic oligonucleotide
uagucccuagagaagaagc

SEQ ID NO: 1004902 - RNA, 19 nt, Artificial Sequence
  Description of Artificial Sequence: Synthetic oligonucleotide
agauguacgaaagaugugu

SEQ ID NO: 1004903 - RNA, 19 nt, Artificial Sequence
  Description of Artificial Sequence: Synthetic oligonucleotide
ucuuccggcagccugguga

SEQ ID NO: 1004904 - RNA, 19 nt, Artificial Sequence
  Description of Artificial Sequence: Synthetic oligonucleotide
acgacagagauauauaaua

SEQ ID NO: 1004905 - RNA, 19 nt, Artificial Sequence
  Description of Artificial Sequence: Synthetic oligonucleotide
cuuuccggauggaugagcg

SEQ ID NO: 1004906 - RNA, 19 nt, Artificial Sequence
  Description of Artificial Sequence: Synthetic oligonucleotide
auggaugagcgcuuuaucu

SEQ ID NO: 1004907 - RNA, 19 nt, Artificial Sequence
  Description of Artificial Sequence: Synthetic oligonucleotide
auuaagggcccagauguac

SEQ ID NO: 1004908 - RNA, 19 nt, Artificial Sequence
  Description of Artificial Sequence: Synthetic oligonucleotide
acuaccagcauugcucgcc

SEQ ID NO: 1004909 - RNA, 19 nt, Artificial Sequence
  Description of Artificial Sequence: Synthetic oligonucleotide
ggcaguggcaacuagaaac

SEQ ID NO: 1004910 - RNA, 19 nt, Artificial Sequence
  Description of Artificial Sequence: Synthetic oligonucleotide
agagcuuaggagucgaggu

SEQ ID NO: 1004911 - RNA, 19 nt, Artificial Sequence
  Description of Artificial Sequence: Synthetic oligonucleotide
agagugaggaucccauggg

SEQ ID NO: 1004912 - RNA, 19 nt, Artificial Sequence
  Description of Artificial Sequence: Synthetic oligonucleotide
aggcaugcgcuuucgaugg

SEQ ID NO: 1004913 - RNA, 19 nt, Artificial Sequence
  Description of Artificial Sequence: Synthetic oligonucleotide
cacacacacacacacacac

SEQ ID NO: 1004914 - RNA, 19 nt, Artificial Sequence
  Description of Artificial Sequence: Synthetic oligonucleotide
ugagcaguagccagaguga

SEQ ID NO: 1004915 - RNA, 19 nt, Artificial Sequence
  Description of Artificial Sequence: Synthetic oligonucleotide
gugaggaucccaugggugg

SEQ ID NO: 1004916 - RNA, 19 nt, Artificial Sequence
  Description of Artificial Sequence: Synthetic oligonucleotide
cuuccuuguagcuggugcg

SEQ ID NO: 1004917 - RNA, 19 nt, Artificial Sequence
  Description of Artificial Sequence: Synthetic oligonucleotide
gaauagaaauuaagggccc

SEQ ID NO: 1004918 - RNA, 19 nt, Artificial Sequence
  Description of Artificial Sequence: Synthetic oligonucleotide
gaaagaugugugaguaagg

SEQ ID NO: 1004919 - RNA, 19 nt, Artificial Sequence
  Description of Artificial Sequence: Synthetic oligonucleotide
cagacacacacacacacac

SEQ ID NO: 1004920 - RNA, 19 nt, Artificial Sequence
  Description of Artificial Sequence: Synthetic oligonucleotide
cacagacacacacacacac

SEQ ID NO: 1004921 - RNA, 19 nt, Artificial Sequence
  Description of Artificial Sequence: Synthetic oligonucleotide
uccuugacaggcaugcgcu

SEQ ID NO: 1004922 - RNA, 19 nt, Artificial Sequence
  Description of Artificial Sequence: Synthetic oligonucleotide
gaugcucccacaguguacc

SEQ ID NO: 1004923 - RNA, 19 nt, Artificial Sequence
  Description of Artificial Sequence: Synthetic oligonucleotide
aguccucggacaucuaguc

SEQ ID NO: 1004924 - RNA, 19 nt, Artificial Sequence
  Description of Artificial Sequence: Synthetic oligonucleotide
uuaggagucgagguggggc

SEQ ID NO: 1004925 - RNA, 19 nt, Artificial Sequence
  Description of Artificial Sequence: Synthetic oligonucleotide
uaucugaaacucagcaggu

SEQ ID NO: 1004926 - RNA, 19 nt, Artificial Sequence
  Description of Artificial Sequence: Synthetic oligonucleotide
uguggacugcauuuuaauc

SEQ ID NO: 1004927 - RNA, 19 nt, Artificial Sequence
  Description of Artificial Sequence: Synthetic oligonucleotide
aauagaaauuaagggccca

SEQ ID NO: 1004928 - RNA, 19 nt, Artificial Sequence
  Description of Artificial Sequence: Synthetic oligonucleotide
gauagcguggacuaauugu

SEQ ID NO: 1004929 - RNA, 19 nt, Artificial Sequence
  Description of Artificial Sequence: Synthetic oligonucleotide
gaugugugaguaagggagg

SEQ ID NO: 1004930 - RNA, 19 nt, Artificial Sequence
  Description of Artificial Sequence: Synthetic oligonucleotide
ugauagcguggacuaauug

SEQ ID NO: 1004931 - RNA, 19 nt, Artificial Sequence
  Description of Artificial Sequence: Synthetic oligonucleotide
uuuuauugugaaugcuggu

SEQ ID NO: 1004932 - RNA, 19 nt, Artificial Sequence
  Description of Artificial Sequence: Synthetic oligonucleotide
uagcguggacuaauugugg

SEQ ID NO: 1004933 - RNA, 19 nt, Artificial Sequence
  Description of Artificial Sequence: Synthetic oligonucleotide
guaccauggcuugauagcg

SEQ ID NO: 1004934 - RNA, 19 nt, Artificial Sequence
  Description of Artificial Sequence: Synthetic oligonucleotide
uauugugaaugcuggucug

SEQ ID NO: 1004935 - RNA, 19 nt, Artificial Sequence
  Description of Artificial Sequence: Synthetic oligonucleotide
cuaugugcagguacucagg

SEQ ID NO: 1004936 - RNA, 19 nt, Artificial Sequence
  Description of Artificial Sequence: Synthetic oligonucleotide
ugccuuuccggauggauga

SEQ ID NO: 1004937 - RNA, 19 nt, Artificial Sequence
  Description of Artificial Sequence: Synthetic oligonucleotide
gaaucuuccggcagccugg

SEQ ID NO: 1004938 - RNA, 19 nt, Artificial Sequence
  Description of Artificial Sequence: Synthetic oligonucleotide
gagagcuuaggagucgagg

SEQ ID NO: 1004939 - RNA, 19 nt, Artificial Sequence
  Description of Artificial Sequence: Synthetic oligonucleotide
uggguggucaaguggacca

SEQ ID NO: 1004940 - RNA, 19 nt, Artificial Sequence
  Description of Artificial Sequence: Synthetic oligonucleotide
auagcguggacuaauugug

SEQ ID NO: 1004941 - RNA, 19 nt, Artificial Sequence
  Description of Artificial Sequence: Synthetic oligonucleotide
acacgacagagauauauaa

SEQ ID NO: 1004942 - RNA, 19 nt, Artificial Sequence
  Description of Artificial Sequence: Synthetic oligonucleotide
agacggucaguccucggac

SEQ ID NO: 1004943 - RNA, 19 nt, Artificial Sequence
  Description of Artificial Sequence: Synthetic oligonucleotide
uggagacuacugcauguag

SEQ ID NO: 1004944 - RNA, 19 nt, Artificial Sequence
  Description of Artificial Sequence: Synthetic oligonucleotide
guacauugagugccaaugc

SEQ ID NO: 1004945 - RNA, 19 nt, Artificial Sequence
  Description of Artificial Sequence: Synthetic oligonucleotide
acacacacacacgacagag

SEQ ID NO: 1004946 - RNA, 19 nt, Artificial Sequence
  Description of Artificial Sequence: Synthetic oligonucleotide
uccaguuggggucaccccu

SEQ ID NO: 1004947 - RNA, 19 nt, Artificial Sequence
  Description of Artificial Sequence: Synthetic oligonucleotide
gacuaauuguggugggaug

SEQ ID NO: 1004948 - RNA, 19 nt, Artificial Sequence
  Description of Artificial Sequence: Synthetic oligonucleotide
acaucuugagcagaucgag

SEQ ID NO: 1004949 - RNA, 19 nt, Artificial Sequence
  Description of Artificial Sequence: Synthetic oligonucleotide
gauguacgaaagaugugug

SEQ ID NO: 1004950 - RNA, 19 nt, Artificial Sequence
  Description of Artificial Sequence: Synthetic oligonucleotide
gaugaagcggaaguggaca

SEQ ID NO: 1004951 - RNA, 19 nt, Artificial Sequence
  Description of Artificial Sequence: Synthetic oligonucleotide
ugagugccaaugccaagcc

SEQ ID NO: 1004952 - RNA, 19 nt, Artificial Sequence
  Description of Artificial Sequence: Synthetic oligonucleotide
gacuugacagcaauggaca

SEQ ID NO: 1004953 - RNA, 19 nt, Artificial Sequence
  Description of Artificial Sequence: Synthetic oligonucleotide
gaucaggccucucaacgug

SEQ ID NO: 1004954 - RNA, 19 nt, Artificial Sequence
  Description of Artificial Sequence: Synthetic oligonucleotide
gguacauugagugccaaug

SEQ ID NO: 1004955 - RNA, 19 nt, Artificial Sequence
  Description of Artificial Sequence: Synthetic oligonucleotide
auagaaauuaagggcccag

SEQ ID NO: 1004956 - RNA, 19 nt, Artificial Sequence
  Description of Artificial Sequence: Synthetic oligonucleotide
uuguugguugucuggagaa

SEQ ID NO: 1004957 - RNA, 19 nt, Artificial Sequence
  Description of Artificial Sequence: Synthetic oligonucleotide
uggguggcggucaaagaug

SEQ ID NO: 1004958 - RNA, 19 nt, Artificial Sequence
  Description of Artificial Sequence: Synthetic oligonucleotide
aauaucgggcacauccucu

SEQ ID NO: 1004959 - RNA, 19 nt, Artificial Sequence
  Description of Artificial Sequence: Synthetic oligonucleotide
auugugaaugcuggucugg

SEQ ID NO: 1004960 - RNA, 19 nt, Artificial Sequence
  Description of Artificial Sequence: Synthetic oligonucleotide
gaagcggaaguggacagug

SEQ ID NO: 1004961 - RNA, 19 nt, Artificial Sequence
  Description of Artificial Sequence: Synthetic oligonucleotide
cuugacagcaauggacagg

SEQ ID NO: 1004962 - RNA, 19 nt, Artificial Sequence
  Description of Artificial Sequence: Synthetic oligonucleotide
ucuucucguuugcuugggg

SEQ ID NO: 1004963 - RNA, 19 nt, Artificial Sequence
  Description of Artificial Sequence: Synthetic oligonucleotide
gauucaagcguggggaaac

SEQ ID NO: 1004964 - RNA, 19 nt, Artificial Sequence
  Description of Artificial Sequence: Synthetic oligonucleotide
gaaaccaucaccaugccuu

SEQ ID NO: 1004965 - RNA, 19 nt, Artificial Sequence
  Description of Artificial Sequence: Synthetic oligonucleotide
ugcggcuggagacuacugc

SEQ ID NO: 1004966 - RNA, 19 nt, Artificial Sequence
  Description of Artificial Sequence: Synthetic oligonucleotide
uuggucauccccaccgacu

SEQ ID NO: 1004967 - RNA, 19 nt, Artificial Sequence
  Description of Artificial Sequence: Synthetic oligonucleotide
auguacgaaagauguguga

SEQ ID NO: 1004968 - RNA, 19 nt, Artificial Sequence
  Description of Artificial Sequence: Synthetic oligonucleotide
guagccagagugaggaucc

SEQ ID NO: 1004969 - RNA, 19 nt, Artificial Sequence
  Description of Artificial Sequence: Synthetic oligonucleotide
ucggacaucuaguccuucc

SEQ ID NO: 1004970 - RNA, 19 nt, Artificial Sequence
  Description of Artificial Sequence: Synthetic oligonucleotide
cacacacacacacacacga

SEQ ID NO: 1004971 - RNA, 19 nt, Artificial Sequence
  Description of Artificial Sequence: Synthetic oligonucleotide
ugaucaggccucucaacgu

SEQ ID NO: 1004972 - RNA, 19 nt, Artificial Sequence
  Description of Artificial Sequence: Synthetic oligonucleotide
gaauaucgggcacauccuc

SEQ ID NO: 1004973 - RNA, 19 nt, Artificial Sequence
  Description of Artificial Sequence: Synthetic oligonucleotide
ggaguuguugguugucugg

SEQ ID NO: 1004974 - RNA, 19 nt, Artificial Sequence
  Description of Artificial Sequence: Synthetic oligonucleotide
ucaagcguggggaaaccau

SEQ ID NO: 1004975 - RNA, 19 nt, Artificial Sequence
  Description of Artificial Sequence: Synthetic oligonucleotide
gagcuuaggagucgaggug

SEQ ID NO: 1004976 - RNA, 19 nt, Artificial Sequence
  Description of Artificial Sequence: Synthetic oligonucleotide
accauggcuugauagcgug

SEQ ID NO: 1004977 - RNA, 19 nt, Artificial Sequence
  Description of Artificial Sequence: Synthetic oligonucleotide
caggcaugcgcuuucgaug

SEQ ID NO: 1004978 - RNA, 19 nt, Artificial Sequence
  Description of Artificial Sequence: Synthetic oligonucleotide
cacaguguaccauggcuug

SEQ ID NO: 1004979 - RNA, 19 nt, Artificial Sequence
  Description of Artificial Sequence: Synthetic oligonucleotide
caucuaucugaaacucagc

SEQ ID NO: 1004980 - RNA, 19 nt, Artificial Sequence
  Description of Artificial Sequence: Synthetic oligonucleotide
gauggaugagcgcuuuauc

SEQ ID NO: 1004981 - RNA, 19 nt, Artificial Sequence
  Description of Artificial Sequence: Synthetic oligonucleotide
uuccggauggaugagcgcu

SEQ ID NO: 1004982 - RNA, 19 nt, Artificial Sequence
  Description of Artificial Sequence: Synthetic oligonucleotide
ggggaaaccaucaccaugc

SEQ ID NO: 1004983 - RNA, 19 nt, Artificial Sequence
  Description of Artificial Sequence: Synthetic oligonucleotide
aguaagggaggagucaggu

SEQ ID NO: 1004984 - RNA, 19 nt, Artificial Sequence
  Description of Artificial Sequence: Synthetic oligonucleotide
guacucaggggucuugaug

SEQ ID NO: 1004985 - RNA, 19 nt, Artificial Sequence
  Description of Artificial Sequence: Synthetic oligonucleotide
uggaugagcgcuuuaucuu

SEQ ID NO: 1004986 - RNA, 19 nt, Artificial Sequence
  Description of Artificial Sequence: Synthetic oligonucleotide
agaucgagguucucgccug

SEQ ID NO: 1004987 - RNA, 19 nt, Artificial Sequence
  Description of Artificial Sequence: Synthetic oligonucleotide
cacaccagggacagaguag

SEQ ID NO: 1004988 - RNA, 19 nt, Artificial Sequence
  Description of Artificial Sequence: Synthetic oligonucleotide
acacacacacacacgacag

SEQ ID NO: 1004989 - RNA, 19 nt, Artificial Sequence
  Description of Artificial Sequence: Synthetic oligonucleotide
agcuugaucaggccucuca

SEQ ID NO: 1004990 - RNA, 19 nt, Artificial Sequence
  Description of Artificial Sequence: Synthetic oligonucleotide
agucaggugggagacgguc

SEQ ID NO: 1004991 - RNA, 19 nt, Artificial Sequence
  Description of Artificial Sequence: Synthetic oligonucleotide
auggguggucaaguggacc

SEQ ID NO: 1004992 - RNA, 19 nt, Artificial Sequence
  Description of Artificial Sequence: Synthetic oligonucleotide
caccaagacaggaaucuuc

SEQ ID NO: 1004993 - RNA, 19 nt, Artificial Sequence
  Description of Artificial Sequence: Synthetic oligonucleotide
cuugaucaggccucucaac

SEQ ID NO: 1004994 - RNA, 19 nt, Artificial Sequence
  Description of Artificial Sequence: Synthetic oligonucleotide
auucaagcguggggaaacc

SEQ ID NO: 1004995 - RNA, 19 nt, Artificial Sequence
  Description of Artificial Sequence: Synthetic oligonucleotide
cccacagacacacacacac

SEQ ID NO: 1004996 - RNA, 19 nt, Artificial Sequence
  Description of Artificial Sequence: Synthetic oligonucleotide
uugcucgcccaccaugagc

SEQ ID NO: 1004997 - RNA, 19 nt, Artificial Sequence
  Description of Artificial Sequence: Synthetic oligonucleotide
acauugagugccaaugcca

SEQ ID NO: 1004998 - RNA, 19 nt, Artificial Sequence
  Description of Artificial Sequence: Synthetic oligonucleotide
uaggagucgagguggggcu

SEQ ID NO: 1004999 - RNA, 19 nt, Artificial Sequence
  Description of Artificial Sequence: Synthetic oligonucleotide
agcguggacuaauuguggu

SEQ ID NO: 1005000 - RNA, 19 nt, Artificial Sequence
  Description of Artificial Sequence: Synthetic oligonucleotide
agaguaggugucaucuauc

SEQ ID NO: 1005001 - RNA, 19 nt, Artificial Sequence
  Description of Artificial Sequence: Synthetic oligonucleotide
uguugguugucuggagaag

SEQ ID NO: 1005002 - RNA, 19 nt, Artificial Sequence
  Description of Artificial Sequence: Synthetic oligonucleotide
uccccaccgacuaccagca

SEQ ID NO: 1005003 - RNA, 19 nt, Artificial Sequence
  Description of Artificial Sequence: Synthetic oligonucleotide
gacauuggagaucuggaau

SEQ ID NO: 1005004 - RNA, 19 nt, Artificial Sequence
  Description of Artificial Sequence: Synthetic oligonucleotide
gauguuggcaggacacaug

SEQ ID NO: 1005005 - RNA, 19 nt, Artificial Sequence
  Description of Artificial Sequence: Synthetic oligonucleotide
uuggggauucaagcguggg

SEQ ID NO: 1005006 - RNA, 19 nt, Artificial Sequence
  Description of Artificial Sequence: Synthetic oligonucleotide
acaggcaugcgcuuucgau

SEQ ID NO: 1005007 - RNA, 19 nt, Artificial Sequence
  Description of Artificial Sequence: Synthetic oligonucleotide
guucucgccugugacauug

SEQ ID NO: 1005008 - RNA, 19 nt, Artificial Sequence
  Description of Artificial Sequence: Synthetic oligonucleotide
ggaccagggauauucagca

SEQ ID NO: 1005009 - RNA, 19 nt, Artificial Sequence
  Description of Artificial Sequence: Synthetic oligonucleotide
augcgcuuucgauggauug

SEQ ID NO: 1005010 - RNA, 19 nt, Artificial Sequence
  Description of Artificial Sequence: Synthetic oligonucleotide
cacacacacacacacgaca

SEQ ID NO: 1005011 - RNA, 19 nt, Artificial Sequence
  Description of Artificial Sequence: Synthetic oligonucleotide
uaauuguggugggauggug

SEQ ID NO: 1005012 - RNA, 19 nt, Artificial Sequence
  Description of Artificial Sequence: Synthetic oligonucleotide
auuggagaucuggaauauc

SEQ ID NO: 1005013 - RNA, 19 nt, Artificial Sequence
  Description of Artificial Sequence: Synthetic oligonucleotide
gaucuggaauaucgggcac

SEQ ID NO: 1005014 - RNA, 19 nt, Artificial Sequence
  Description of Artificial Sequence: Synthetic oligonucleotide
aggugggagacggucaguc

SEQ ID NO: 1005015 - RNA, 19 nt, Artificial Sequence
  Description of Artificial Sequence: Synthetic oligonucleotide
uuaaucugcuggggcuugg

SEQ ID NO: 1005016 - RNA, 19 nt, Artificial Sequence
  Description of Artificial Sequence: Synthetic oligonucleotide
caagcguggggaaaccauc

SEQ ID NO: 1005017 - RNA, 19 nt, Artificial Sequence
  Description of Artificial Sequence: Synthetic oligonucleotide
guaagggaggagucaggug

SEQ ID NO: 1005018 - RNA, 19 nt, Artificial Sequence
  Description of Artificial Sequence: Synthetic oligonucleotide
ucgagguucucgccuguga

SEQ ID NO: 1005019 - RNA, 19 nt, Artificial Sequence
  Description of Artificial Sequence: Synthetic oligonucleotide
cagauguacgaaagaugug

SEQ ID NO: 1005020 - RNA, 19 nt, Artificial Sequence
  Description of Artificial Sequence: Synthetic oligonucleotide
ugagcgcuuuaucuucuuc

SEQ ID NO: 1005021 - RNA, 19 nt, Artificial Sequence
  Description of Artificial Sequence: Synthetic oligonucleotide
ugccaacagccuuggugcg

SEQ ID NO: 1005022 - RNA, 19 nt, Artificial Sequence
  Description of Artificial Sequence: Synthetic oligonucleotide
ugcgcuuucgauggauuga

SEQ ID NO: 1005023 - RNA, 19 nt, Artificial Sequence
  Description of Artificial Sequence: Synthetic oligonucleotide
uuuccggauggaugagcgc

SEQ ID NO: 1005024 - RNA, 19 nt, Artificial Sequence
  Description of Artificial Sequence: Synthetic oligonucleotide
cuaccagcauugcucgccc

SEQ ID NO: 1005025 - RNA, 19 nt, Artificial Sequence
  Description of Artificial Sequence: Synthetic oligonucleotide
uggcaacuagaaacagcug

SEQ ID NO: 1005026 - RNA, 19 nt, Artificial Sequence
  Description of Artificial Sequence: Synthetic oligonucleotide
uugauagcguggacuaauu

SEQ ID NO: 1005027 - RNA, 19 nt, Artificial Sequence
  Description of Artificial Sequence: Synthetic oligonucleotide
guagucccuagagaagaag

SEQ ID NO: 1005028 - RNA, 19 nt, Artificial Sequence
  Description of Artificial Sequence: Synthetic oligonucleotide
ccgacuaccagcauugcuc

SEQ ID NO: 1005029 - RNA, 19 nt, Artificial Sequence
  Description of Artificial Sequence: Synthetic oligonucleotide
agugcaaaggaggcugucu

SEQ ID NO: 1005030 - RNA, 19 nt, Artificial Sequence
  Description of Artificial Sequence: Synthetic oligonucleotide
ucucaacguggucccagac

SEQ ID NO: 1005031 - RNA, 19 nt, Artificial Sequence
  Description of Artificial Sequence: Synthetic oligonucleotide
ucuggaauaucgggcacau

SEQ ID NO: 1005032 - RNA, 19 nt, Artificial Sequence
  Description of Artificial Sequence: Synthetic oligonucleotide
agucccuagagaagaagcu

SEQ ID NO: 1005033 - RNA, 19 nt, Artificial Sequence
  Description of Artificial Sequence: Synthetic oligonucleotide
cauugcucgcccaccauga

SEQ ID NO: 1005034 - RNA, 19 nt, Artificial Sequence
  Description of Artificial Sequence: Synthetic oligonucleotide
accgacuaccagcauugcu

SEQ ID NO: 1005035 - RNA, 19 nt, Artificial Sequence
  Description of Artificial Sequence: Synthetic oligonucleotide
augcucaagaugguagcug

SEQ ID NO: 1005036 - RNA, 19 nt, Artificial Sequence
  Description of Artificial Sequence: Synthetic oligonucleotide
ggagacuacugcauguagc

SEQ ID NO: 1005037 - RNA, 19 nt, Artificial Sequence
  Description of Artificial Sequence: Synthetic oligonucleotide
uucucgccugugacauugg

SEQ ID NO: 1005038 - RNA, 19 nt, Artificial Sequence
  Description of Artificial Sequence: Synthetic oligonucleotide
acacacacacacacacacg

SEQ ID NO: 1005039 - RNA, 19 nt, Artificial Sequence
  Description of Artificial Sequence: Synthetic oligonucleotide
ucucgccugugacauugga

SEQ ID NO: 1005040 - RNA, 19 nt, Artificial Sequence
  Description of Artificial Sequence: Synthetic oligonucleotide
uggacuaauugugguggga

SEQ ID NO: 1005041 - RNA, 19 nt, Artificial Sequence
  Description of Artificial Sequence: Synthetic oligonucleotide
acacacacacacacacgac

SEQ ID NO: 1005042 - RNA, 19 nt, Artificial Sequence
  Description of Artificial Sequence: Synthetic oligonucleotide
cuuggucauccccaccgac

SEQ ID NO: 1005043 - RNA, 19 nt, Artificial Sequence
  Description of Artificial Sequence: Synthetic oligonucleotide
cugucugccggaugcuccc

SEQ ID NO: 1005044 - RNA, 19 nt, Artificial Sequence
  Description of Artificial Sequence: Synthetic oligonucleotide
auugcucgcccaccaugag

SEQ ID NO: 1005045 - RNA, 19 nt, Artificial Sequence
  Description of Artificial Sequence: Synthetic oligonucleotide
ggcaacaaggaugcucugg

SEQ ID NO: 1005046 - RNA, 19 nt, Artificial Sequence
  Description of Artificial Sequence: Synthetic oligonucleotide
ggaugagcgcuuuaucuuc

SEQ ID NO: 1005047 - RNA, 19 nt, Artificial Sequence
  Description of Artificial Sequence: Synthetic oligonucleotide
gguauguccuggcugagaa

SEQ ID NO: 1005048 - RNA, 19 nt, Artificial Sequence
  Description of Artificial Sequence: Synthetic oligonucleotide
aagcggaaguggacagugg

SEQ ID NO: 1005049 - RNA, 19 nt, Artificial Sequence
  Description of Artificial Sequence: Synthetic oligonucleotide
ugacaggcaugcgcuuucg

SEQ ID NO: 1005050 - RNA, 19 nt, Artificial Sequence
  Description of Artificial Sequence: Synthetic oligonucleotide
aagagcagucaggagcaaa

SEQ ID NO: 1005051 - RNA, 19 nt, Artificial Sequence
  Description of Artificial Sequence: Synthetic oligonucleotide
uucaagcguggggaaacca

SEQ ID NO: 1005052 - RNA, 19 nt, Artificial Sequence
  Description of Artificial Sequence: Synthetic oligonucleotide
cacggugcagggcuugccc

SEQ ID NO: 1005053 - RNA, 19 nt, Artificial Sequence
  Description of Artificial Sequence: Synthetic oligonucleotide
cgaaagaugugugaguaag

SEQ ID NO: 1005054 - RNA, 19 nt, Artificial Sequence
  Description of Artificial Sequence: Synthetic oligonucleotide
agacuacugcauguagcag

SEQ ID NO: 1005055 - RNA, 19 nt, Artificial Sequence
  Description of Artificial Sequence: Synthetic oligonucleotide
augccuuuccggauggaug

SEQ ID NO: 1005056 - RNA, 19 nt, Artificial Sequence
  Description of Artificial Sequence: Synthetic oligonucleotide
gaaguuacccaaggggucu

SEQ ID NO: 1005057 - RNA, 19 nt, Artificial Sequence
  Description of Artificial Sequence: Synthetic oligonucleotide
acgaaagaugugugaguaa

SEQ ID NO: 1005058 - RNA, 19 nt, Artificial Sequence
  Description of Artificial Sequence: Synthetic oligonucleotide
aaguuacccaaggggucug

SEQ ID NO: 1005059 - RNA, 19 nt, Artificial Sequence
  Description of Artificial Sequence: Synthetic oligonucleotide
guggcggucaaagaugcuc

SEQ ID NO: 1005060 - RNA, 19 nt, Artificial Sequence
  Description of Artificial Sequence: Synthetic oligonucleotide
ucgggcacauccucucaga

SEQ ID NO: 1005061 - RNA, 19 nt, Artificial Sequence
  Description of Artificial Sequence: Synthetic oligonucleotide
ugggagacggucaguccuc

SEQ ID NO: 1005062 - RNA, 19 nt, Artificial Sequence
  Description of Artificial Sequence: Synthetic oligonucleotide
ccugaggucacggugcagg

SEQ ID NO: 1005063 - RNA, 19 nt, Artificial Sequence
  Description of Artificial Sequence: Synthetic oligonucleotide
uccugugcgcagacagucu

SEQ ID NO: 1005064 - RNA, 19 nt, Artificial Sequence
  Description of Artificial Sequence: Synthetic oligonucleotide
gacggucaguccucggaca

SEQ ID NO: 1005065 - RNA, 19 nt, Artificial Sequence
  Description of Artificial Sequence: Synthetic oligonucleotide
ugacuucagcagucgcugu

SEQ ID NO: 1005066 - RNA, 19 nt, Artificial Sequence
  Description of Artificial Sequence: Synthetic oligonucleotide
ucagcuugaucaggccucu

SEQ ID NO: 1005067 - RNA, 19 nt, Artificial Sequence
  Description of Artificial Sequence: Synthetic oligonucleotide
ugugcgcagacagucuuua

SEQ ID NO: 1005068 - RNA, 19 nt, Artificial Sequence
  Description of Artificial Sequence: Synthetic oligonucleotide
ccaccgacuaccagcauug

SEQ ID NO: 1005069 - RNA, 19 nt, Artificial Sequence
  Description of Artificial Sequence: Synthetic oligonucleotide
aauuaagggcccagaugua

SEQ ID NO: 1005070 - RNA, 19 nt, Artificial Sequence
  Description of Artificial Sequence: Synthetic oligonucleotide
ggggauucaagcgugggga

SEQ ID NO: 1005071 - RNA, 19 nt, Artificial Sequence
  Description of Artificial Sequence: Synthetic oligonucleotide
cuguccccacaccagggac

SEQ ID NO: 1005072 - RNA, 19 nt, Artificial Sequence
  Description of Artificial Sequence: Synthetic oligonucleotide
agguacauugagugccaau

SEQ ID NO: 1005073 - RNA, 19 nt, Artificial Sequence
  Description of Artificial Sequence: Synthetic oligonucleotide
agggcccagauguacgaaa

SEQ ID NO: 1005074 - RNA, 19 nt, Artificial Sequence
  Description of Artificial Sequence: Synthetic oligonucleotide
aaucuuccggcagccuggu

SEQ ID NO: 1005075 - RNA, 19 nt, Artificial Sequence
  Description of Artificial Sequence: Synthetic oligonucleotide
acagacacacacacacaca

SEQ ID NO: 1005076 - RNA, 19 nt, Artificial Sequence
  Description of Artificial Sequence: Synthetic oligonucleotide
ggugcgaccuucccggaac

SEQ ID NO: 1005077 - RNA, 19 nt, Artificial Sequence
  Description of Artificial Sequence: Synthetic oligonucleotide
guacgaaagaugugugagu

SEQ ID NO: 1005078 - RNA, 19 nt, Artificial Sequence
  Description of Artificial Sequence: Synthetic oligonucleotide
acggucaguccucggacau

SEQ ID NO: 1005079 - RNA, 19 nt, Artificial Sequence
  Description of Artificial Sequence: Synthetic oligonucleotide
gggaguuguugguugucug

SEQ ID NO: 1005080 - RNA, 19 nt, Artificial Sequence
  Description of Artificial Sequence: Synthetic oligonucleotide
cgacuaccagcauugcucg

SEQ ID NO: 1005081 - RNA, 19 nt, Artificial Sequence
  Description of Artificial Sequence: Synthetic oligonucleotide
gcauugcucgcccaccaug

SEQ ID NO: 1005082 - RNA, 19 nt, Artificial Sequence
  Description of Artificial Sequence: Synthetic oligonucleotide
gugggagacggucaguccu

SEQ ID NO: 1005083 - RNA, 19 nt, Artificial Sequence
  Description of Artificial Sequence: Synthetic oligonucleotide
ccagcuggugagcaguagc

SEQ ID NO: 1005084 - RNA, 19 nt, Artificial Sequence
  Description of Artificial Sequence: Synthetic oligonucleotide
ugccaaugccaagcccagg

SEQ ID NO: 1005085 - RNA, 19 nt, Artificial Sequence
  Description of Artificial Sequence: Synthetic oligonucleotide
caacuagaaacagcuggga

SEQ ID NO: 1005086 - RNA, 19 nt, Artificial Sequence
  Description of Artificial Sequence: Synthetic oligonucleotide
agcaauggacaggaaguua

SEQ ID NO: 1005087 - RNA, 19 nt, Artificial Sequence
  Description of Artificial Sequence: Synthetic oligonucleotide
caacguggucccagacacc

SEQ ID NO: 1005088 - RNA, 19 nt, Artificial Sequence
  Description of Artificial Sequence: Synthetic oligonucleotide
ggaaguuacccaagggguc

SEQ ID NO: 1005089 - RNA, 19 nt, Artificial Sequence
  Description of Artificial Sequence: Synthetic oligonucleotide
acagguacauugagugcca

SEQ ID NO: 1005090 - RNA, 19 nt, Artificial Sequence
  Description of Artificial Sequence: Synthetic oligonucleotide
gcguggggaaaccaucacc

SEQ ID NO: 1005091 - RNA, 19 nt, Artificial Sequence
  Description of Artificial Sequence: Synthetic oligonucleotide
gugugaguaagggaggagu

SEQ ID NO: 1005092 - RNA, 19 nt, Artificial Sequence
  Description of Artificial Sequence: Synthetic oligonucleotide
aggauguuggcaggacaca

SEQ ID NO: 1005093 - RNA, 19 nt, Artificial Sequence
  Description of Artificial Sequence: Synthetic oligonucleotide
ggcuggagacuacugcaug

SEQ ID NO: 1005094 - RNA, 19 nt, Artificial Sequence
  Description of Artificial Sequence: Synthetic oligonucleotide
ggcuugauagcguggacua

SEQ ID NO: 1005095 - RNA, 19 nt, Artificial Sequence
  Description of Artificial Sequence: Synthetic oligonucleotide
ggaggacaagaaucucagc

SEQ ID NO: 1005096 - RNA, 19 nt, Artificial Sequence
  Description of Artificial Sequence: Synthetic oligonucleotide
aguguaccauggcuugaua

SEQ ID NO: 1005097 - RNA, 19 nt, Artificial Sequence
  Description of Artificial Sequence: Synthetic oligonucleotide
guggguggcggucaaagau

SEQ ID NO: 1005098 - RNA, 19 nt, Artificial Sequence
  Description of Artificial Sequence: Synthetic oligonucleotide
agacacacacacacacaca

SEQ ID NO: 1005099 - RNA, 19 nt, Artificial Sequence
  Description of Artificial Sequence: Synthetic oligonucleotide
gacacaugucaaucuuggu

SEQ ID NO: 1005100 - RNA, 19 nt, Artificial Sequence
  Description of Artificial Sequence: Synthetic oligonucleotide
aguggaccagggauauuca

SEQ ID NO: 1005101 - RNA, 19 nt, Artificial Sequence
  Description of Artificial Sequence: Synthetic oligonucleotide
uccggauggaugagcgcuu

SEQ ID NO: 1005102 - RNA, 19 nt, Artificial Sequence
  Description of Artificial Sequence: Synthetic oligonucleotide
agguacucaggggucuuga

SEQ ID NO: 1005103 - RNA, 19 nt, Artificial Sequence
  Description of Artificial Sequence: Synthetic oligonucleotide
aucuccaguuggggucacc

SEQ ID NO: 1005104 - RNA, 19 nt, Artificial Sequence
  Description of Artificial Sequence: Synthetic oligonucleotide
cuuuauccaugcucaagau

SEQ ID NO: 1005105 - RNA, 19 nt, Artificial Sequence
  Description of Artificial Sequence: Synthetic oligonucleotide
gacccagccagcuggguau

SEQ ID NO: 1005106 - RNA, 19 nt, Artificial Sequence
  Description of Artificial Sequence: Synthetic oligonucleotide
agagagcuuaggagucgag

SEQ ID NO: 1005107 - RNA, 19 nt, Artificial Sequence
  Description of Artificial Sequence: Synthetic oligonucleotide
acacacacacacacacaca

SEQ ID NO: 1005108 - RNA, 19 nt, Artificial Sequence
  Description of Artificial Sequence: Synthetic oligonucleotide
uggugcgaccuucccggaa

SEQ ID NO: 1005109 - RNA, 19 nt, Artificial Sequence
  Description of Artificial Sequence: Synthetic oligonucleotide
acaguguaccauggcuuga

SEQ ID NO: 1005110 - RNA, 19 nt, Artificial Sequence
  Description of Artificial Sequence: Synthetic oligonucleotide
gacuucaccuuguggcgcu

SEQ ID NO: 1005111 - RNA, 19 nt, Artificial Sequence
  Description of Artificial Sequence: Synthetic oligonucleotide
cucaagaugguagcugucu

SEQ ID NO: 1005112 - RNA, 19 nt, Artificial Sequence
  Description of Artificial Sequence: Synthetic oligonucleotide
ggacaguggccuugucucc

SEQ ID NO: 1005113 - RNA, 19 nt, Artificial Sequence
  Description of Artificial Sequence: Synthetic oligonucleotide
gacaggcaugcgcuuucga

SEQ ID NO: 1005114 - RNA, 19 nt, Artificial Sequence
  Description of Artificial Sequence: Synthetic oligonucleotide
ucacggugcagggcuugcc

SEQ ID NO: 1005115 - RNA, 19 nt, Artificial Sequence
  Description of Artificial Sequence: Synthetic oligonucleotide
agcauugcucgcccaccau

SEQ ID NO: 1005116 - RNA, 19 nt, Artificial Sequence
  Description of Artificial Sequence: Synthetic oligonucleotide
cacacacacacacgacaga

SEQ ID NO: 1005117 - RNA, 19 nt, Artificial Sequence
  Description of Artificial Sequence: Synthetic oligonucleotide
cuugauagcguggacuaau

SEQ ID NO: 1005118 - RNA, 19 nt, Artificial Sequence
  Description of Artificial Sequence: Synthetic oligonucleotide
cauccccaccgacuaccag

SEQ ID NO: 1005119 - RNA, 19 nt, Artificial Sequence
  Description of Artificial Sequence: Synthetic oligonucleotide
agccgcuggcaggagucac

SEQ ID NO: 1005120 - RNA, 19 nt, Artificial Sequence
  Description of Artificial Sequence: Synthetic oligonucleotide
gaacaccagccgcuggucu

SEQ ID NO: 1005121 - RNA, 19 nt, Artificial Sequence
  Description of Artificial Sequence: Synthetic oligonucleotide
gggucaccccugcugcugg

SEQ ID NO: 1005122 - RNA, 19 nt, Artificial Sequence
  Description of Artificial Sequence: Synthetic oligonucleotide
acggggcaguggcaacuag

SEQ ID NO: 1005123 - RNA, 19 nt, Artificial Sequence
  Description of Artificial Sequence: Synthetic oligonucleotide
uaccagcauugcucgccca

SEQ ID NO: 1005124 - RNA, 19 nt, Artificial Sequence
  Description of Artificial Sequence: Synthetic oligonucleotide
gcggcuggagacuacugca

SEQ ID NO: 1005125 - RNA, 19 nt, Artificial Sequence
  Description of Artificial Sequence: Synthetic oligonucleotide
gggcccagauguacgaaag

SEQ ID NO: 1005126 - RNA, 19 nt, Artificial Sequence
  Description of Artificial Sequence: Synthetic oligonucleotide
cucucaacguggucccaga

SEQ ID NO: 1005127 - RNA, 19 nt, Artificial Sequence
  Description of Artificial Sequence: Synthetic oligonucleotide
ggacuucaccuuguggcgc

SEQ ID NO: 1005128 - RNA, 19 nt, Artificial Sequence
  Description of Artificial Sequence: Synthetic oligonucleotide
ggacaggaaguuacccaag

SEQ ID NO: 1005129 - RNA, 19 nt, Artificial Sequence
  Description of Artificial Sequence: Synthetic oligonucleotide
cagaucgagguucucgccu

SEQ ID NO: 1005130 - RNA, 19 nt, Artificial Sequence
  Description of Artificial Sequence: Synthetic oligonucleotide
gaccuucccggaacaccag

SEQ ID NO: 1005131 - RNA, 19 nt, Artificial Sequence
  Description of Artificial Sequence: Synthetic oligonucleotide
gcuugaucaggccucucaa

SEQ ID NO: 1005132 - RNA, 19 nt, Artificial Sequence
  Description of Artificial Sequence: Synthetic oligonucleotide
uuggugcgaccuucccgga

SEQ ID NO: 1005133 - RNA, 19 nt, Artificial Sequence
  Description of Artificial Sequence: Synthetic oligonucleotide
gggaaaccaucaccaugcc

SEQ ID NO: 1005134 - RNA, 19 nt, Artificial Sequence
  Description of Artificial Sequence: Synthetic oligonucleotide
cuugucuccugugcgcaga

SEQ ID NO: 1005135 - RNA, 19 nt, Artificial Sequence
  Description of Artificial Sequence: Synthetic oligonucleotide
ggauugacuugacagcaau

SEQ ID NO: 1005136 - RNA, 19 nt, Artificial Sequence
  Description of Artificial Sequence: Synthetic oligonucleotide
agccgcuggucuaugugca

SEQ ID NO: 1005137 - RNA, 19 nt, Artificial Sequence
  Description of Artificial Sequence: Synthetic oligonucleotide
agccagagugaggauccca

SEQ ID NO: 1005138 - RNA, 19 nt, Artificial Sequence
  Description of Artificial Sequence: Synthetic oligonucleotide
aucgagguucucgccugug

SEQ ID NO: 1005139 - RNA, 19 nt, Artificial Sequence
  Description of Artificial Sequence: Synthetic oligonucleotide
gccaaugccaagcccaggu

SEQ ID NO: 1005140 - RNA, 19 nt, Artificial Sequence
  Description of Artificial Sequence: Synthetic oligonucleotide
gcggaaguggacaguggcc

SEQ ID NO: 1005141 - RNA, 19 nt, Artificial Sequence
  Description of Artificial Sequence: Synthetic oligonucleotide
caguccucggacaucuagu

SEQ ID NO: 1005142 - RNA, 19 nt, Artificial Sequence
  Description of Artificial Sequence: Synthetic oligonucleotide
cauggccacggggcagugg

SEQ ID NO: 1005143 - RNA, 19 nt, Artificial Sequence
  Description of Artificial Sequence: Synthetic oligonucleotide
ugcgaccuucccggaacac

SEQ ID NO: 1005144 - RNA, 19 nt, Artificial Sequence
  Description of Artificial Sequence: Synthetic oligonucleotide
augcucccacaguguacca

SEQ ID NO: 1005145 - RNA, 19 nt, Artificial Sequence
  Description of Artificial Sequence: Synthetic oligonucleotide
gcgaccuucccggaacacc

SEQ ID NO: 1005146 - RNA, 19 nt, Artificial Sequence
  Description of Artificial Sequence: Synthetic oligonucleotide
gcgcuuucgauggauugac

SEQ ID NO: 1005147 - RNA, 19 nt, Artificial Sequence
  Description of Artificial Sequence: Synthetic oligonucleotide
ggaaaccaucaccaugccu

SEQ ID NO: 1005148 - RNA, 19 nt, Artificial Sequence
  Description of Artificial Sequence: Synthetic oligonucleotide
ggugacuucagcagucgcu

SEQ ID NO: 1005149 - RNA, 19 nt, Artificial Sequence
  Description of Artificial Sequence: Synthetic oligonucleotide
cuaauuguggugggauggu

SEQ ID NO: 1005150 - RNA, 19 nt, Artificial Sequence
  Description of Artificial Sequence: Synthetic oligonucleotide
aggaaucuuccggcagccu

SEQ ID NO: 1005151 - RNA, 19 nt, Artificial Sequence
  Description of Artificial Sequence: Synthetic oligonucleotide
acguggucccagacaccac

SEQ ID NO: 1005152 - RNA, 19 nt, Artificial Sequence
  Description of Artificial Sequence: Synthetic oligonucleotide
ccuuuccggauggaugagc

SEQ ID NO: 1005153 - RNA, 19 nt, Artificial Sequence
  Description of Artificial Sequence: Synthetic oligonucleotide
caacaaggaugcucuggcu

SEQ ID NO: 1005154 - RNA, 19 nt, Artificial Sequence
  Description of Artificial Sequence: Synthetic oligonucleotide
ggaugcucccacaguguac

SEQ ID NO: 1005155 - RNA, 19 nt, Artificial Sequence
  Description of Artificial Sequence: Synthetic oligonucleotide
cccuagagaagaagcuuca

SEQ ID NO: 1005156 - RNA, 19 nt, Artificial Sequence
  Description of Artificial Sequence: Synthetic oligonucleotide
gguggguggcggucaaaga

SEQ ID NO: 1005157 - RNA, 19 nt, Artificial Sequence
  Description of Artificial Sequence: Synthetic oligonucleotide
gggauucaagcguggggaa

SEQ ID NO: 1005158 - RNA, 19 nt, Artificial Sequence
  Description of Artificial Sequence: Synthetic oligonucleotide
ggaauaucgggcacauccu

SEQ ID NO: 1005159 - RNA, 19 nt, Artificial Sequence
  Description of Artificial Sequence: Synthetic oligonucleotide
gaucgagguucucgccugu

SEQ ID NO: 1005160 - RNA, 19 nt, Artificial Sequence
  Description of Artificial Sequence: Synthetic oligonucleotide
ggcccagauguacgaaaga

SEQ ID NO: 1005161 - RNA, 19 nt, Artificial Sequence
  Description of Artificial Sequence: Synthetic oligonucleotide
gugcgaccuucccggaaca

SEQ ID NO: 1005162 - RNA, 19 nt, Artificial Sequence
  Description of Artificial Sequence: Synthetic oligonucleotide
cauuggagaucuggaauau

SEQ ID NO: 1005163 - RNA, 19 nt, Artificial Sequence
  Description of Artificial Sequence: Synthetic oligonucleotide
ccagcauugcucgcccacc

SEQ ID NO: 1005164 - RNA, 19 nt, Artificial Sequence
  Description of Artificial Sequence: Synthetic oligonucleotide
caccgacuaccagcauugc

SEQ ID NO: 1005165 - RNA, 19 nt, Artificial Sequence
  Description of Artificial Sequence: Synthetic oligonucleotide
ccgcuggucuaugugcagg

SEQ ID NO: 1005166 - RNA, 19 nt, Artificial Sequence
  Description of Artificial Sequence: Synthetic oligonucleotide
ggauucaagcguggggaaa

SEQ ID NO: 1005167 - RNA, 19 nt, Artificial Sequence
  Description of Artificial Sequence: Synthetic oligonucleotide
gucccuagagaagaagcuu

SEQ ID NO: 1005168 - RNA, 19 nt, Artificial Sequence
  Description of Artificial Sequence: Synthetic oligonucleotide
cuggaauaucgggcacauc

SEQ ID NO: 1005169 - RNA, 19 nt, Artificial Sequence
  Description of Artificial Sequence: Synthetic oligonucleotide
ccaccaugagcaugcagaa

SEQ ID NO: 1005170 - RNA, 19 nt, Artificial Sequence
  Description of Artificial Sequence: Synthetic oligonucleotide
ggauggaugagcgcuuuau

SEQ ID NO: 1005171 - RNA, 19 nt, Artificial Sequence
  Description of Artificial Sequence: Synthetic oligonucleotide
aggaggcuuggggauucaa

SEQ ID NO: 1005172 - RNA, 19 nt, Artificial Sequence
  Description of Artificial Sequence: Synthetic oligonucleotide
ccgcaccuccuugacaggc

SEQ ID NO: 1005173 - RNA, 19 nt, Artificial Sequence
  Description of Artificial Sequence: Synthetic oligonucleotide
caugcgcuuucgauggauu

SEQ ID NO: 1005174 - RNA, 19 nt, Artificial Sequence
  Description of Artificial Sequence: Synthetic oligonucleotide
ccacagacacacacacaca

SEQ ID NO: 1005175 - RNA, 19 nt, Artificial Sequence
  Description of Artificial Sequence: Synthetic oligonucleotide
caguguaccauggcuugau

SEQ ID NO: 1005176 - RNA, 19 nt, Artificial Sequence
  Description of Artificial Sequence: Synthetic oligonucleotide
gccuuuccggauggaugag

SEQ ID NO: 1005177 - RNA, 19 nt, Artificial Sequence
  Description of Artificial Sequence: Synthetic oligonucleotide
cagguacauugagugccaa

SEQ ID NO: 1005178 - RNA, 19 nt, Artificial Sequence
  Description of Artificial Sequence: Synthetic oligonucleotide
cccgcaccuccuugacagg

SEQ ID NO: 1005179 - RNA, 19 nt, Artificial Sequence
  Description of Artificial Sequence: Synthetic oligonucleotide
gcuugauagcguggacuaa

SEQ ID NO: 1005180 - RNA, 19 nt, Artificial Sequence
  Description of Artificial Sequence: Synthetic oligonucleotide
gagucgagguggggcugaa

SEQ ID NO: 1005181 - RNA, 19 nt, Artificial Sequence
  Description of Artificial Sequence: Synthetic oligonucleotide
ggcaugcgcuuucgaugga

SEQ ID NO: 1005182 - RNA, 19 nt, Artificial Sequence
  Description of Artificial Sequence: Synthetic oligonucleotide
cggugcagggcuugcccac

SEQ ID NO: 1005183 - RNA, 19 nt, Artificial Sequence
  Description of Artificial Sequence: Synthetic oligonucleotide
aggucacggugcagggcuu

SEQ ID NO: 1005184 - RNA, 19 nt, Artificial Sequence
  Description of Artificial Sequence: Synthetic oligonucleotide
ggugagcaguagccagagu

SEQ ID NO: 1005185 - RNA, 19 nt, Artificial Sequence
  Description of Artificial Sequence: Synthetic oligonucleotide
cccaccgacuaccagcauu

SEQ ID NO: 1005186 - RNA, 19 nt, Artificial Sequence
  Description of Artificial Sequence: Synthetic oligonucleotide
gcaugcgcuuucgauggau

SEQ ID NO: 1005187 - RNA, 19 nt, Artificial Sequence
  Description of Artificial Sequence: Synthetic oligonucleotide
cggacaucuaguccuuccu

SEQ ID NO: 1005188 - RNA, 19 nt, Artificial Sequence
  Description of Artificial Sequence: Synthetic oligonucleotide
cggaugcucccacagugua

SEQ ID NO: 1005189 - RNA, 19 nt, Artificial Sequence
  Description of Artificial Sequence: Synthetic oligonucleotide
cuacugcauguagcagccu

SEQ ID NO: 1005190 - RNA, 19 nt, Artificial Sequence
  Description of Artificial Sequence: Synthetic oligonucleotide
caggugggagacggucagu

SEQ ID NO: 1005191 - RNA, 19 nt, Artificial Sequence
  Description of Artificial Sequence: Synthetic oligonucleotide
ccaaggggucugggcccag

SEQ ID NO: 1005192 - RNA, 19 nt, Artificial Sequence
  Description of Artificial Sequence: Synthetic oligonucleotide
gguucucgccugugacauu

SEQ ID NO: 1005193 - RNA, 19 nt, Artificial Sequence
  Description of Artificial Sequence: Synthetic oligonucleotide
ccauggccacggggcagug

SEQ ID NO: 1005194 - RNA, 19 nt, Artificial Sequence
  Description of Artificial Sequence: Synthetic oligonucleotide
cggucaguccucggacauc

SEQ ID NO: 1005195 - RNA, 19 nt, Artificial Sequence
  Description of Artificial Sequence: Synthetic oligonucleotide
ccacggggcaguggcaacu

SEQ ID NO: 1005196 - RNA, 19 nt, Artificial Sequence
  Description of Artificial Sequence: Synthetic oligonucleotide
cgcuuucgauggauugacu

SEQ ID NO: 1005197 - RNA, 19 nt, Artificial Sequence
  Description of Artificial Sequence: Synthetic oligonucleotide
ccggauggaugagcgcuuu

SEQ ID NO: 1005198 - RNA, 19 nt, Artificial Sequence
  Description of Artificial Sequence: Synthetic oligonucleotide
ccccaccgacuaccagcau

SEQ ID NO: 1005199 - RNA, 19 nt, Artificial Sequence
  Description of Artificial Sequence: Synthetic oligonucleotide
uaauauauauuauauauga

SEQ ID NO: 1005200 - RNA, 19 nt, Artificial Sequence
  Description of Artificial Sequence: Synthetic oligonucleotide
agaauuuacuuauuuaagc

SEQ ID NO: 1005201 - RNA, 19 nt, Artificial Sequence
  Description of Artificial Sequence: Synthetic oligonucleotide
aauaauagagccuaaacua

SEQ ID NO: 1005202 - RNA, 19 nt, Artificial Sequence
  Description of Artificial Sequence: Synthetic oligonucleotide
aguguuaugggucaucugc

SEQ ID NO: 1005203 - RNA, 19 nt, Artificial Sequence
  Description of Artificial Sequence: Synthetic oligonucleotide
aucuauaaacuucaguugc

SEQ ID NO: 1005204 - RNA, 19 nt, Artificial Sequence
  Description of Artificial Sequence: Synthetic oligonucleotide
auauauauuauauaugacu

SEQ ID NO: 1005205 - RNA, 19 nt, Artificial Sequence
  Description of Artificial Sequence: Synthetic oligonucleotide
auuuaagcuaaauucuugc

SEQ ID NO: 1005206 - RNA, 19 nt, Artificial Sequence
  Description of Artificial Sequence: Synthetic oligonucleotide
aauacuuauccauuuagcu

SEQ ID NO: 1005207 - RNA, 19 nt, Artificial Sequence
  Description of Artificial Sequence: Synthetic oligonucleotide
aaaauaauaagcugggaaa

SEQ ID NO: 1005208 - RNA, 19 nt, Artificial Sequence
  Description of Artificial Sequence: Synthetic oligonucleotide
uaagcugggaaaauaauag

SEQ ID NO: 1005209 - RNA, 19 nt, Artificial Sequence
  Description of Artificial Sequence: Synthetic oligonucleotide
aaugaucaaaugcacggac

SEQ ID NO: 1005210 - RNA, 19 nt, Artificial Sequence
  Description of Artificial Sequence: Synthetic oligonucleotide
uuaauauauauuauauaug

SEQ ID NO: 1005211 - RNA, 19 nt, Artificial Sequence
  Description of Artificial Sequence: Synthetic oligonucleotide
uacaauuuguaacaacacg

SEQ ID NO: 1005212 - RNA, 19 nt, Artificial Sequence
  Description of Artificial Sequence: Synthetic oligonucleotide
uauauggaaaguuaguucu

SEQ ID NO: 1005213 - RNA, 19 nt, Artificial Sequence
  Description of Artificial Sequence: Synthetic oligonucleotide
aauucaacuaggaaauggc

SEQ ID NO: 1005214 - RNA, 19 nt, Artificial Sequence
  Description of Artificial Sequence: Synthetic oligonucleotide
aaacguuaaacccaauuug

SEQ ID NO: 1005215 - RNA, 19 nt, Artificial Sequence
  Description of Artificial Sequence: Synthetic oligonucleotide
aauguagcgauacggcagc

SEQ ID NO: 1005216 - RNA, 19 nt, Artificial Sequence
  Description of Artificial Sequence: Synthetic oligonucleotide
aaauuuacuggcuaaaguu

SEQ ID NO: 1005217 - RNA, 19 nt, Artificial Sequence
  Description of Artificial Sequence: Synthetic oligonucleotide
aauguuaaccuaauuacag

SEQ ID NO: 1005218 - RNA, 19 nt, Artificial Sequence
  Description of Artificial Sequence: Synthetic oligonucleotide
auacuagauacacauuugc

SEQ ID NO: 1005219 - RNA, 19 nt, Artificial Sequence
  Description of Artificial Sequence: Synthetic oligonucleotide
aaaccaaccaucccguagg

SEQ ID NO: 1005220 - RNA, 19 nt, Artificial Sequence
  Description of Artificial Sequence: Synthetic oligonucleotide
aaccuaauuacagucacac

SEQ ID NO: 1005221 - RNA, 19 nt, Artificial Sequence
  Description of Artificial Sequence: Synthetic oligonucleotide
aaacuacugauacaucacg

SEQ ID NO: 1005222 - RNA, 19 nt, Artificial Sequence
  Description of Artificial Sequence: Synthetic oligonucleotide
guuagcaacaaucaaauuc

SEQ ID NO: 1005223 - RNA, 19 nt, Artificial Sequence
  Description of Artificial Sequence: Synthetic oligonucleotide
ugaguuaccagagauauug

SEQ ID NO: 1005224 - RNA, 19 nt, Artificial Sequence
  Description of Artificial Sequence: Synthetic oligonucleotide
aaauacuuauccauuuagc

SEQ ID NO: 1005225 - RNA, 19 nt, Artificial Sequence
  Description of Artificial Sequence: Synthetic oligonucleotide
agaaaauuuagcuauucca

SEQ ID NO: 1005226 - RNA, 19 nt, Artificial Sequence
  Description of Artificial Sequence: Synthetic oligonucleotide
aauauauauuauauaugac

SEQ ID NO: 1005227 - RNA, 19 nt, Artificial Sequence
  Description of Artificial Sequence: Synthetic oligonucleotide
uaugacuacaauuuguaac

SEQ ID NO: 1005228 - RNA, 19 nt, Artificial Sequence
  Description of Artificial Sequence: Synthetic oligonucleotide
aagagauaccaauaaagga

SEQ ID NO: 1005229 - RNA, 19 nt, Artificial Sequence
  Description of Artificial Sequence: Synthetic oligonucleotide
gauuauauagcuuaaggua

SEQ ID NO: 1005230 - RNA, 19 nt, Artificial Sequence
  Description of Artificial Sequence: Synthetic oligonucleotide
ucuuacuuuuacaucacag

SEQ ID NO: 1005231 - RNA, 19 nt, Artificial Sequence
  Description of Artificial Sequence: Synthetic oligonucleotide
uauagcuuaagguagaauu

SEQ ID NO: 1005232 - RNA, 19 nt, Artificial Sequence
  Description of Artificial Sequence: Synthetic oligonucleotide
auuagugagaaaauuuagc

SEQ ID NO: 1005233 - RNA, 19 nt, Artificial Sequence
  Description of Artificial Sequence: Synthetic oligonucleotide
aauuaacagugggaaaucc

SEQ ID NO: 1005234 - RNA, 19 nt, Artificial Sequence
  Description of Artificial Sequence: Synthetic oligonucleotide
uuuggauaacaugaaaggg

SEQ ID NO: 1005235 - RNA, 19 nt, Artificial Sequence
  Description of Artificial Sequence: Synthetic oligonucleotide
auuagagucuuacuuuuac

SEQ ID NO: 1005236 - RNA, 19 nt, Artificial Sequence
  Description of Artificial Sequence: Synthetic oligonucleotide
ucaacuaggaaauggcucc

SEQ ID NO: 1005237 - RNA, 19 nt, Artificial Sequence
  Description of Artificial Sequence: Synthetic oligonucleotide
cugaauuugaccaaaauaa

SEQ ID NO: 1005238 - RNA, 19 nt, Artificial Sequence
  Description of Artificial Sequence: Synthetic oligonucleotide
uuaacccagcaaaagaaag

SEQ ID NO: 1005239 - RNA, 19 nt, Artificial Sequence
  Description of Artificial Sequence: Synthetic oligonucleotide
agauauugcaccgaagucg

SEQ ID NO: 1005240 - RNA, 19 nt, Artificial Sequence
  Description of Artificial Sequence: Synthetic oligonucleotide
uaaauuagugagaaaauuu

SEQ ID NO: 1005241 - RNA, 19 nt, Artificial Sequence
  Description of Artificial Sequence: Synthetic oligonucleotide
auuauauagcuuaagguag

SEQ ID NO: 1005242 - RNA, 19 nt, Artificial Sequence
  Description of Artificial Sequence: Synthetic oligonucleotide
augauuuagauauauaaua

SEQ ID NO: 1005243 - RNA, 19 nt, Artificial Sequence
  Description of Artificial Sequence: Synthetic oligonucleotide
acagugggaaauccaaucc

SEQ ID NO: 1005244 - RNA, 19 nt, Artificial Sequence
  Description of Artificial Sequence: Synthetic oligonucleotide
aggacaguaaaucaguaug

SEQ ID NO: 1005245 - RNA, 19 nt, Artificial Sequence
  Description of Artificial Sequence: Synthetic oligonucleotide
aagucguuagcuccauacc

SEQ ID NO: 1005246 - RNA, 19 nt, Artificial Sequence
  Description of Artificial Sequence: Synthetic oligonucleotide
augacuacaauuuguaaca

SEQ ID NO: 1005247 - RNA, 19 nt, Artificial Sequence
  Description of Artificial Sequence: Synthetic oligonucleotide
ucacgcuuggauuuuauag

SEQ ID NO: 1005248 - RNA, 19 nt, Artificial Sequence
  Description of Artificial Sequence: Synthetic oligonucleotide
uaauguagcgauacggcag

SEQ ID NO: 1005249 - RNA, 19 nt, Artificial Sequence
  Description of Artificial Sequence: Synthetic oligonucleotide
cauaagauauauauuguuc

SEQ ID NO: 1005250 - RNA, 19 nt, Artificial Sequence
  Description of Artificial Sequence: Synthetic oligonucleotide
uggguguugaaaauuaaca

SEQ ID NO: 1005251 - RNA, 19 nt, Artificial Sequence
  Description of Artificial Sequence: Synthetic oligonucleotide
acucacuauaaauaaaugu

SEQ ID NO: 1005252 - RNA, 19 nt, Artificial Sequence
  Description of Artificial Sequence: Synthetic oligonucleotide
uagaauuagagucuuacuu

SEQ ID NO: 1005253 - RNA, 19 nt, Artificial Sequence
  Description of Artificial Sequence: Synthetic oligonucleotide
aauuuacuuauuuaagcua

SEQ ID NO: 1005254 - RNA, 19 nt, Artificial Sequence
  Description of Artificial Sequence: Synthetic oligonucleotide
uuuagcauagaacugucau

SEQ ID NO: 1005255 - RNA, 19 nt, Artificial Sequence
  Description of Artificial Sequence: Synthetic oligonucleotide
uuaccagagauauugcacc

SEQ ID NO: 1005256 - RNA, 19 nt, Artificial Sequence
  Description of Artificial Sequence: Synthetic oligonucleotide
acaguaaaucaguaugugg

SEQ ID NO: 1005257 - RNA, 19 nt, Artificial Sequence
  Description of Artificial Sequence: Synthetic oligonucleotide
agagauauugcaccgaagu

SEQ ID NO: 1005258 - RNA, 19 nt, Artificial Sequence
  Description of Artificial Sequence: Synthetic oligonucleotide
aaauucuugcaaaagccuc

SEQ ID NO: 1005259 - RNA, 19 nt, Artificial Sequence
  Description of Artificial Sequence: Synthetic oligonucleotide
cuuaauauauauuauauau

SEQ ID NO: 1005260 - RNA, 19 nt, Artificial Sequence
  Description of Artificial Sequence: Synthetic oligonucleotide
uuaagcuaaauucuugcaa

SEQ ID NO: 1005261 - RNA, 19 nt, Artificial Sequence
  Description of Artificial Sequence: Synthetic oligonucleotide
uaaacguuaaacccaauuu

SEQ ID NO: 1005262 - RNA, 19 nt, Artificial Sequence
  Description of Artificial Sequence: Synthetic oligonucleotide
uggauaacaugaaagggga

SEQ ID NO: 1005263 - RNA, 19 nt, Artificial Sequence
  Description of Artificial Sequence: Synthetic oligonucleotide
uuuggauacaacugguagc

SEQ ID NO: 1005264 - RNA, 19 nt, Artificial Sequence
  Description of Artificial Sequence: Synthetic oligonucleotide
aacacggaacucuccaaac

SEQ ID NO: 1005265 - RNA, 19 nt, Artificial Sequence
  Description of Artificial Sequence: Synthetic oligonucleotide
uuaaccuaauuacagucac

SEQ ID NO: 1005266 - RNA, 19 nt, Artificial Sequence
  Description of Artificial Sequence: Synthetic oligonucleotide
aacuacugauacaucacgc

SEQ ID NO: 1005267 - RNA, 19 nt, Artificial Sequence
  Description of Artificial Sequence: Synthetic oligonucleotide
ugaucaaaugcacggacug

SEQ ID NO: 1005268 - RNA, 19 nt, Artificial Sequence
  Description of Artificial Sequence: Synthetic oligonucleotide
uguuaauaacaacaugccu

SEQ ID NO: 1005269 - RNA, 19 nt, Artificial Sequence
  Description of Artificial Sequence: Synthetic oligonucleotide
uauaugacuacaauuugua

SEQ ID NO: 1005270 - RNA, 19 nt, Artificial Sequence
  Description of Artificial Sequence: Synthetic oligonucleotide
uaagguagaauuagagucu

SEQ ID NO: 1005271 - RNA, 19 nt, Artificial Sequence
  Description of Artificial Sequence: Synthetic oligonucleotide
uguuauugaucuuccaaug

SEQ ID NO: 1005272 - RNA, 19 nt, Artificial Sequence
  Description of Artificial Sequence: Synthetic oligonucleotide
auaacaugaaaggggaugg

SEQ ID NO: 1005273 - RNA, 19 nt, Artificial Sequence
  Description of Artificial Sequence: Synthetic oligonucleotide
uuuuauagucuaccuuagg

SEQ ID NO: 1005274 - RNA, 19 nt, Artificial Sequence
  Description of Artificial Sequence: Synthetic oligonucleotide
aaaauuaccaggccccuaa

SEQ ID NO: 1005275 - RNA, 19 nt, Artificial Sequence
  Description of Artificial Sequence: Synthetic oligonucleotide
uuauauggaaaguuaguuc

SEQ ID NO: 1005276 - RNA, 19 nt, Artificial Sequence
  Description of Artificial Sequence: Synthetic oligonucleotide
gauaacaugaaaggggaug

SEQ ID NO: 1005277 - RNA, 19 nt, Artificial Sequence
  Description of Artificial Sequence: Synthetic oligonucleotide
ucuaaaugggcacaccacu

SEQ ID NO: 1005278 - RNA, 19 nt, Artificial Sequence
  Description of Artificial Sequence: Synthetic oligonucleotide
aaaaugugccggcacaacu

SEQ ID NO: 1005279 - RNA, 19 nt, Artificial Sequence
  Description of Artificial Sequence: Synthetic oligonucleotide
auaauagagccuaaacuac

SEQ ID NO: 1005280 - RNA, 19 nt, Artificial Sequence
  Description of Artificial Sequence: Synthetic oligonucleotide
ugugaacauucuaaauggg

SEQ ID NO: 1005281 - RNA, 19 nt, Artificial Sequence
  Description of Artificial Sequence: Synthetic oligonucleotide
uacuuauccauuuagcuuu

SEQ ID NO: 1005282 - RNA, 19 nt, Artificial Sequence
  Description of Artificial Sequence: Synthetic oligonucleotide
uuuaccuggagaaugguuu

SEQ ID NO: 1005283 - RNA, 19 nt, Artificial Sequence
  Description of Artificial Sequence: Synthetic oligonucleotide
aaauuaacagugggaaauc

SEQ ID NO: 1005284 - RNA, 19 nt, Artificial Sequence
  Description of Artificial Sequence: Synthetic oligonucleotide
accaauaaaggaaaauacg

SEQ ID NO: 1005285 - RNA, 19 nt, Artificial Sequence
  Description of Artificial Sequence: Synthetic oligonucleotide
ugauacaucacgcuuggau

SEQ ID NO: 1005286 - RNA, 19 nt, Artificial Sequence
  Description of Artificial Sequence: Synthetic oligonucleotide
cuaaacuacugauacauca

SEQ ID NO: 1005287 - RNA, 19 nt, Artificial Sequence
  Description of Artificial Sequence: Synthetic oligonucleotide
aacaacacggaacucucca

SEQ ID NO: 1005288 - RNA, 19 nt, Artificial Sequence
  Description of Artificial Sequence: Synthetic oligonucleotide
uuuaagcuaaauucuugca

SEQ ID NO: 1005289 - RNA, 19 nt, Artificial Sequence
  Description of Artificial Sequence: Synthetic oligonucleotide
uagcauagaacugucauca

SEQ ID NO: 1005290 - RNA, 19 nt, Artificial Sequence
  Description of Artificial Sequence: Synthetic oligonucleotide
gcaaugaucaaaugcacgg

SEQ ID NO: 1005291 - RNA, 19 nt, Artificial Sequence
  Description of Artificial Sequence: Synthetic oligonucleotide
uuggauacaacugguagcc

SEQ ID NO: 1005292 - RNA, 19 nt, Artificial Sequence
  Description of Artificial Sequence: Synthetic oligonucleotide
guuccuaucacuugcaaca

SEQ ID NO: 1005293 - RNA, 19 nt, Artificial Sequence
  Description of Artificial Sequence: Synthetic oligonucleotide
uaagauauauauuguuccu

SEQ ID NO: 1005294 - RNA, 19 nt, Artificial Sequence
  Description of Artificial Sequence: Synthetic oligonucleotide
uuaucaauucaacuaggaa

SEQ ID NO: 1005295 - RNA, 19 nt, Artificial Sequence
  Description of Artificial Sequence: Synthetic oligonucleotide
uacauuuagcauagaacug

SEQ ID NO: 1005296 - RNA, 19 nt, Artificial Sequence
  Description of Artificial Sequence: Synthetic oligonucleotide
acauagaaaggguguacac

SEQ ID NO: 1005297 - RNA, 19 nt, Artificial Sequence
  Description of Artificial Sequence: Synthetic oligonucleotide
uacugauacaucacgcuug

SEQ ID NO: 1005298 - RNA, 19 nt, Artificial Sequence
  Description of Artificial Sequence: Synthetic oligonucleotide
uaugugguagcauauggaa

SEQ ID NO: 1005299 - RNA, 19 nt, Artificial Sequence
  Description of Artificial Sequence: Synthetic oligonucleotide
gaagucguuagcuccauac

SEQ ID NO: 1005300 - RNA, 19 nt, Artificial Sequence
  Description of Artificial Sequence: Synthetic oligonucleotide
uuuauauggaaaguuaguu

SEQ ID NO: 1005301 - RNA, 19 nt, Artificial Sequence
  Description of Artificial Sequence: Synthetic oligonucleotide
uuauauagcuuaagguaga

SEQ ID NO: 1005302 - RNA, 19 nt, Artificial Sequence
  Description of Artificial Sequence: Synthetic oligonucleotide
ucccguaggaaauaaacgu

SEQ ID NO: 1005303 - RNA, 19 nt, Artificial Sequence
  Description of Artificial Sequence: Synthetic oligonucleotide
uucaacuaggaaauggcuc

SEQ ID NO: 1005304 - RNA, 19 nt, Artificial Sequence
  Description of Artificial Sequence: Synthetic oligonucleotide
gagccuaaacuacugauac

SEQ ID NO: 1005305 - RNA, 19 nt, Artificial Sequence
  Description of Artificial Sequence: Synthetic oligonucleotide
uggagaaugguuuuggaua

SEQ ID NO: 1005306 - RNA, 19 nt, Artificial Sequence
  Description of Artificial Sequence: Synthetic oligonucleotide
ucuauaaacuucaguugca

SEQ ID NO: 1005307 - RNA, 19 nt, Artificial Sequence
  Description of Artificial Sequence: Synthetic oligonucleotide
aauaugagcucaaauacuu

SEQ ID NO: 1005308 - RNA, 19 nt, Artificial Sequence
  Description of Artificial Sequence: Synthetic oligonucleotide
caauucaacuaggaaaugg

SEQ ID NO: 1005309 - RNA, 19 nt, Artificial Sequence
  Description of Artificial Sequence: Synthetic oligonucleotide
gaaaccaaccaucccguag

SEQ ID NO: 1005310 - RNA, 19 nt, Artificial Sequence
  Description of Artificial Sequence: Synthetic oligonucleotide
caucuauaaacuucaguug

SEQ ID NO: 1005311 - RNA, 19 nt, Artificial Sequence
  Description of Artificial Sequence: Synthetic oligonucleotide
uaauagagccuaaacuacu

SEQ ID NO: 1005312 - RNA, 19 nt, Artificial Sequence
  Description of Artificial Sequence: Synthetic oligonucleotide
agagauaccaauaaaggaa

SEQ ID NO: 1005313 - RNA, 19 nt, Artificial Sequence
  Description of Artificial Sequence: Synthetic oligonucleotide
uagagucuuacuuuuacau

SEQ ID NO: 1005314 - RNA, 19 nt, Artificial Sequence
  Description of Artificial Sequence: Synthetic oligonucleotide
uuggauuuuauagucuacc

SEQ ID NO: 1005315 - RNA, 19 nt, Artificial Sequence
  Description of Artificial Sequence: Synthetic oligonucleotide
cacuucucgguacugaagg

SEQ ID NO: 1005316 - RNA, 19 nt, Artificial Sequence
  Description of Artificial Sequence: Synthetic oligonucleotide
aacguuaaacccaauuugu

SEQ ID NO: 1005317 - RNA, 19 nt, Artificial Sequence
  Description of Artificial Sequence: Synthetic oligonucleotide
agauauauauuguuccuau

SEQ ID NO: 1005318 - RNA, 19 nt, Artificial Sequence
  Description of Artificial Sequence: Synthetic oligonucleotide
aaaugcacggacugcagaa

SEQ ID NO: 1005319 - RNA, 19 nt, Artificial Sequence
  Description of Artificial Sequence: Synthetic oligonucleotide
uguauaccuuaauauauau

SEQ ID NO: 1005320 - RNA, 19 nt, Artificial Sequence
  Description of Artificial Sequence: Synthetic oligonucleotide
agguaauguagcgauacgg

SEQ ID NO: 1005321 - RNA, 19 nt, Artificial Sequence
  Description of Artificial Sequence: Synthetic oligonucleotide
ugauguacauaagauauau

SEQ ID NO: 1005322 - RNA, 19 nt, Artificial Sequence
  Description of Artificial Sequence: Synthetic oligonucleotide
uugaucuuccaaugcaccc

SEQ ID NO: 1005323 - RNA, 19 nt, Artificial Sequence
  Description of Artificial Sequence: Synthetic oligonucleotide
uccaucaagagauaccaau

SEQ ID NO: 1005324 - RNA, 19 nt, Artificial Sequence
  Description of Artificial Sequence: Synthetic oligonucleotide
caucccguagguaauguag

SEQ ID NO: 1005325 - RNA, 19 nt, Artificial Sequence
  Description of Artificial Sequence: Synthetic oligonucleotide
acgcuuggauuuuauaguc

SEQ ID NO: 1005326 - RNA, 19 nt, Artificial Sequence
  Description of Artificial Sequence: Synthetic oligonucleotide
aauaguugccugauuauau

SEQ ID NO: 1005327 - RNA, 19 nt, Artificial Sequence
  Description of Artificial Sequence: Synthetic oligonucleotide
aacaacaugccugcauuag

SEQ ID NO: 1005328 - RNA, 19 nt, Artificial Sequence
  Description of Artificial Sequence: Synthetic oligonucleotide
cucccguaggaaauaaacg

SEQ ID NO: 1005329 - RNA, 19 nt, Artificial Sequence
  Description of Artificial Sequence: Synthetic oligonucleotide
aaauaaacguuaaacccaa

SEQ ID NO: 1005330 - RNA, 19 nt, Artificial Sequence
  Description of Artificial Sequence: Synthetic oligonucleotide
uggauuuuauagucuaccu

SEQ ID NO: 1005331 - RNA, 19 nt, Artificial Sequence
  Description of Artificial Sequence: Synthetic oligonucleotide
uucuccaucaagagauacc

SEQ ID NO: 1005332 - RNA, 19 nt, Artificial Sequence
  Description of Artificial Sequence: Synthetic oligonucleotide
aguacauucaacacagugu

SEQ ID NO: 1005333 - RNA, 19 nt, Artificial Sequence
  Description of Artificial Sequence: Synthetic oligonucleotide
acauuuagcauagaacugu

SEQ ID NO: 1005334 - RNA, 19 nt, Artificial Sequence
  Description of Artificial Sequence: Synthetic oligonucleotide
aauuaccaggccccuaagu

SEQ ID NO: 1005335 - RNA, 19 nt, Artificial Sequence
  Description of Artificial Sequence: Synthetic oligonucleotide
ugccugauuauauagcuua

SEQ ID NO: 1005336 - RNA, 19 nt, Artificial Sequence
  Description of Artificial Sequence: Synthetic oligonucleotide
uuagagucuuacuuuuaca

SEQ ID NO: 1005337 - RNA, 19 nt, Artificial Sequence
  Description of Artificial Sequence: Synthetic oligonucleotide
aucaauucaacuaggaaau

SEQ ID NO: 1005338 - RNA, 19 nt, Artificial Sequence
  Description of Artificial Sequence: Synthetic oligonucleotide
acuacugauacaucacgcu

SEQ ID NO: 1005339 - RNA, 19 nt, Artificial Sequence
  Description of Artificial Sequence: Synthetic oligonucleotide
agucguuagcuccauaccu

SEQ ID NO: 1005340 - RNA, 19 nt, Artificial Sequence
  Description of Artificial Sequence: Synthetic oligonucleotide
uagcuuaagguagaauuag

SEQ ID NO: 1005341 - RNA, 19 nt, Artificial Sequence
  Description of Artificial Sequence: Synthetic oligonucleotide
acauaagauauauauuguu

SEQ ID NO: 1005342 - RNA, 19 nt, Artificial Sequence
  Description of Artificial Sequence: Synthetic oligonucleotide
ugauccgaguguuuuaccu

SEQ ID NO: 1005343 - RNA, 19 nt, Artificial Sequence
  Description of Artificial Sequence: Synthetic oligonucleotide
aaggacaguaaaucaguau

SEQ ID NO: 1005344 - RNA, 19 nt, Artificial Sequence
  Description of Artificial Sequence: Synthetic oligonucleotide
aagcugggaaaauaauaga

SEQ ID NO: 1005345 - RNA, 19 nt, Artificial Sequence
  Description of Artificial Sequence: Synthetic oligonucleotide
cuuagguugcuagugagug

SEQ ID NO: 1005346 - RNA, 19 nt, Artificial Sequence
  Description of Artificial Sequence: Synthetic oligonucleotide
auaaacaaucaagaugaug

SEQ ID NO: 1005347 - RNA, 19 nt, Artificial Sequence
  Description of Artificial Sequence: Synthetic oligonucleotide
aguugccugauuauauagc

SEQ ID NO: 1005348 - RNA, 19 nt, Artificial Sequence
  Description of Artificial Sequence: Synthetic oligonucleotide
guagcgauacggcagcucc

SEQ ID NO: 1005349 - RNA, 19 nt, Artificial Sequence
  Description of Artificial Sequence: Synthetic oligonucleotide
cacuauuucuccaucaaga

SEQ ID NO: 1005350 - RNA, 19 nt, Artificial Sequence
  Description of Artificial Sequence: Synthetic oligonucleotide
uagguaauguagcgauacg

SEQ ID NO: 1005351 - RNA, 19 nt, Artificial Sequence
  Description of Artificial Sequence: Synthetic oligonucleotide
uaguacucauacauuaaau

SEQ ID NO: 1005352 - RNA, 19 nt, Artificial Sequence
  Description of Artificial Sequence: Synthetic oligonucleotide
auaacaacaugccugcauu

SEQ ID NO: 1005353 - RNA, 19 nt, Artificial Sequence
  Description of Artificial Sequence: Synthetic oligonucleotide
auaaauuagugagaaaauu

SEQ ID NO: 1005354 - RNA, 19 nt, Artificial Sequence
  Description of Artificial Sequence: Synthetic oligonucleotide
guacucauacauuaaaucu

SEQ ID NO: 1005355 - RNA, 19 nt, Artificial Sequence
  Description of Artificial Sequence: Synthetic oligonucleotide
acaaucaagaugauguaca

SEQ ID NO: 1005356 - RNA, 19 nt, Artificial Sequence
  Description of Artificial Sequence: Synthetic oligonucleotide
uuagcauagaacugucauc

SEQ ID NO: 1005357 - RNA, 19 nt, Artificial Sequence
  Description of Artificial Sequence: Synthetic oligonucleotide
uccaaugcaccccacaguu

SEQ ID NO: 1005358 - RNA, 19 nt, Artificial Sequence
  Description of Artificial Sequence: Synthetic oligonucleotide
aguuaccagagauauugca

SEQ ID NO: 1005359 - RNA, 19 nt, Artificial Sequence
  Description of Artificial Sequence: Synthetic oligonucleotide
aaaucaguaugugguagca

SEQ ID NO: 1005360 - RNA, 19 nt, Artificial Sequence
  Description of Artificial Sequence: Synthetic oligonucleotide
agaugauguacauaagaua

SEQ ID NO: 1005361 - RNA, 19 nt, Artificial Sequence
  Description of Artificial Sequence: Synthetic oligonucleotide
uagugagaaaauuuagcua

SEQ ID NO: 1005362 - RNA, 19 nt, Artificial Sequence
  Description of Artificial Sequence: Synthetic oligonucleotide
auagucuaccuuagguugc

SEQ ID NO: 1005363 - RNA, 19 nt, Artificial Sequence
  Description of Artificial Sequence: Synthetic oligonucleotide
aaauuaccaggccccuaag

SEQ ID NO: 1005364 - RNA, 19 nt, Artificial Sequence
  Description of Artificial Sequence: Synthetic oligonucleotide
acuguauaccuuaauauau

SEQ ID NO: 1005365 - RNA, 19 nt, Artificial Sequence
  Description of Artificial Sequence: Synthetic oligonucleotide
auguuaaccuaauuacagu

SEQ ID NO: 1005366 - RNA, 19 nt, Artificial Sequence
  Description of Artificial Sequence: Synthetic oligonucleotide
ucuaaaauaguugccugau

SEQ ID NO: 1005367 - RNA, 19 nt, Artificial Sequence
  Description of Artificial Sequence: Synthetic oligonucleotide
auauaugacuacaauuugu

SEQ ID NO: 1005368 - RNA, 19 nt, Artificial Sequence
  Description of Artificial Sequence: Synthetic oligonucleotide
ucaguaccugaauuugacc

SEQ ID NO: 1005369 - RNA, 19 nt, Artificial Sequence
  Description of Artificial Sequence: Synthetic oligonucleotide
cuuccaaugcaccccacag

SEQ ID NO: 1005370 - RNA, 19 nt, Artificial Sequence
  Description of Artificial Sequence: Synthetic oligonucleotide
gauauauauuguuccuauc

SEQ ID NO: 1005371 - RNA, 19 nt, Artificial Sequence
  Description of Artificial Sequence: Synthetic oligonucleotide
aucaguaugugguagcaua

SEQ ID NO: 1005372 - RNA, 19 nt, Artificial Sequence
  Description of Artificial Sequence: Synthetic oligonucleotide
caguaccugaauuugacca

SEQ ID NO: 1005373 - RNA, 19 nt, Artificial Sequence
  Description of Artificial Sequence: Synthetic oligonucleotide
uccuaucacuugcaacacg

SEQ ID NO: 1005374 - RNA, 19 nt, Artificial Sequence
  Description of Artificial Sequence: Synthetic oligonucleotide
ucccguagguaauguagcg

SEQ ID NO: 1005375 - RNA, 19 nt, Artificial Sequence
  Description of Artificial Sequence: Synthetic oligonucleotide
accuuaauauauauuauau

SEQ ID NO: 1005376 - RNA, 19 nt, Artificial Sequence
  Description of Artificial Sequence: Synthetic oligonucleotide
ucuaccuuagguugcuagu

SEQ ID NO: 1005377 - RNA, 19 nt, Artificial Sequence
  Description of Artificial Sequence: Synthetic oligonucleotide
aauacguagggaaccaaaa

SEQ ID NO: 1005378 - RNA, 19 nt, Artificial Sequence
  Description of Artificial Sequence: Synthetic oligonucleotide
guuaccagagauauugcac

SEQ ID NO: 1005379 - RNA, 19 nt, Artificial Sequence
  Description of Artificial Sequence: Synthetic oligonucleotide
guaauguagcgauacggca

SEQ ID NO: 1005380 - RNA, 19 nt, Artificial Sequence
  Description of Artificial Sequence: Synthetic oligonucleotide
guagguaauguagcgauac

SEQ ID NO: 1005381 - RNA, 19 nt, Artificial Sequence
  Description of Artificial Sequence: Synthetic oligonucleotide
aagauauauauuguuccua

SEQ ID NO: 1005382 - RNA, 19 nt, Artificial Sequence
  Description of Artificial Sequence: Synthetic oligonucleotide
aaauaguugccugauuaua

SEQ ID NO: 1005383 - RNA, 19 nt, Artificial Sequence
  Description of Artificial Sequence: Synthetic oligonucleotide
gagauauugcaccgaaguc

SEQ ID NO: 1005384 - RNA, 19 nt, Artificial Sequence
  Description of Artificial Sequence: Synthetic oligonucleotide
ucaguaugugguagcauau

SEQ ID NO: 1005385 - RNA, 19 nt, Artificial Sequence
  Description of Artificial Sequence: Synthetic oligonucleotide
cacaguguacagaacuuug

SEQ ID NO: 1005386 - RNA, 19 nt, Artificial Sequence
  Description of Artificial Sequence: Synthetic oligonucleotide
auaccugauguucauuuau

SEQ ID NO: 1005387 - RNA, 19 nt, Artificial Sequence
  Description of Artificial Sequence: Synthetic oligonucleotide
ugagaaaauuuagcuauuc

SEQ ID NO: 1005388 - RNA, 19 nt, Artificial Sequence
  Description of Artificial Sequence: Synthetic oligonucleotide
agcuaaauucuugcaaaag

SEQ ID NO: 1005389 - RNA, 19 nt, Artificial Sequence
  Description of Artificial Sequence: Synthetic oligonucleotide
guaccgauggcuuccuaag

SEQ ID NO: 1005390 - RNA, 19 nt, Artificial Sequence
  Description of Artificial Sequence: Synthetic oligonucleotide
gcuuccagcguaccgaugg

SEQ ID NO: 1005391 - RNA, 19 nt, Artificial Sequence
  Description of Artificial Sequence: Synthetic oligonucleotide
acugcauauuguuauugau

SEQ ID NO: 1005392 - RNA, 19 nt, Artificial Sequence
  Description of Artificial Sequence: Synthetic oligonucleotide
caauaaaggaaaauacgua

SEQ ID NO: 1005393 - RNA, 19 nt, Artificial Sequence
  Description of Artificial Sequence: Synthetic oligonucleotide
accuuagguugcuagugag

SEQ ID NO: 1005394 - RNA, 19 nt, Artificial Sequence
  Description of Artificial Sequence: Synthetic oligonucleotide
acaguguacagaacuuugg

SEQ ID NO: 1005395 - RNA, 19 nt, Artificial Sequence
  Description of Artificial Sequence: Synthetic oligonucleotide
aacuaggaaauggcucccg

SEQ ID NO: 1005396 - RNA, 19 nt, Artificial Sequence
  Description of Artificial Sequence: Synthetic oligonucleotide
agcacccgcuuucuuuucc

SEQ ID NO: 1005397 - RNA, 19 nt, Artificial Sequence
  Description of Artificial Sequence: Synthetic oligonucleotide
aucccguagguaauguagc

SEQ ID NO: 1005398 - RNA, 19 nt, Artificial Sequence
  Description of Artificial Sequence: Synthetic oligonucleotide
gaaaauacguagggaacca

SEQ ID NO: 1005399 - RNA, 19 nt, Artificial Sequence
  Description of Artificial Sequence: Synthetic oligonucleotide
uaccuuagguugcuaguga

SEQ ID NO: 1005400 - RNA, 19 nt, Artificial Sequence
  Description of Artificial Sequence: Synthetic oligonucleotide
auuuacuggcuaaaguuga

SEQ ID NO: 1005401 - RNA, 19 nt, Artificial Sequence
  Description of Artificial Sequence: Synthetic oligonucleotide
auaugacuacaauuuguaa

SEQ ID NO: 1005402 - RNA, 19 nt, Artificial Sequence
  Description of Artificial Sequence: Synthetic oligonucleotide
auacaucacgcuuggauuu

SEQ ID NO: 1005403 - RNA, 19 nt, Artificial Sequence
  Description of Artificial Sequence: Synthetic oligonucleotide
ucugauccgaguguuuuac

SEQ ID NO: 1005404 - RNA, 19 nt, Artificial Sequence
  Description of Artificial Sequence: Synthetic oligonucleotide
cacucacuggaaauguuug

SEQ ID NO: 1005405 - RNA, 19 nt, Artificial Sequence
  Description of Artificial Sequence: Synthetic oligonucleotide
aaguguuaugggucaucug

SEQ ID NO: 1005406 - RNA, 19 nt, Artificial Sequence
  Description of Artificial Sequence: Synthetic oligonucleotide
gaugugcaaugaucaaaug

SEQ ID NO: 1005407 - RNA, 19 nt, Artificial Sequence
  Description of Artificial Sequence: Synthetic oligonucleotide
aaauacguagggaaccaaa

SEQ ID NO: 1005408 - RNA, 19 nt, Artificial Sequence
  Description of Artificial Sequence: Synthetic oligonucleotide
gguagaauuagagucuuac

SEQ ID NO: 1005409 - RNA, 19 nt, Artificial Sequence
  Description of Artificial Sequence: Synthetic oligonucleotide
gagauaccaauaaaggaaa

SEQ ID NO: 1005410 - RNA, 19 nt, Artificial Sequence
  Description of Artificial Sequence: Synthetic oligonucleotide
auagagccuaaacuacuga

SEQ ID NO: 1005411 - RNA, 19 nt, Artificial Sequence
  Description of Artificial Sequence: Synthetic oligonucleotide
uaacaacacggaacucucc

SEQ ID NO: 1005412 - RNA, 19 nt, Artificial Sequence
  Description of Artificial Sequence: Synthetic oligonucleotide
gcuuaagguagaauuagag

SEQ ID NO: 1005413 - RNA, 19 nt, Artificial Sequence
  Description of Artificial Sequence: Synthetic oligonucleotide
cuuaagguagaauuagagu

SEQ ID NO: 1005414 - RNA, 19 nt, Artificial Sequence
  Description of Artificial Sequence: Synthetic oligonucleotide
uggcuaaaguugaucagau

SEQ ID NO: 1005415 - RNA, 19 nt, Artificial Sequence
  Description of Artificial Sequence: Synthetic oligonucleotide
auaauaagcugggaaaaua

SEQ ID NO: 1005416 - RNA, 19 nt, Artificial Sequence
  Description of Artificial Sequence: Synthetic oligonucleotide
gguaauguagcgauacggc

SEQ ID NO: 1005417 - RNA, 19 nt, Artificial Sequence
  Description of Artificial Sequence: Synthetic oligonucleotide
ucacaguauacaugguguc

SEQ ID NO: 1005418 - RNA, 19 nt, Artificial Sequence
  Description of Artificial Sequence: Synthetic oligonucleotide
ugcaccgaagucguuagcu

SEQ ID NO: 1005419 - RNA, 19 nt, Artificial Sequence
  Description of Artificial Sequence: Synthetic oligonucleotide
gauacggcagcuccacuuc

SEQ ID NO: 1005420 - RNA, 19 nt, Artificial Sequence
  Description of Artificial Sequence: Synthetic oligonucleotide
gaucaaaugcacggacugc

SEQ ID NO: 1005421 - RNA, 19 nt, Artificial Sequence
  Description of Artificial Sequence: Synthetic oligonucleotide
auauggaaaguuaguucuc

SEQ ID NO: 1005422 - RNA, 19 nt, Artificial Sequence
  Description of Artificial Sequence: Synthetic oligonucleotide
accugauguucauuuauau

SEQ ID NO: 1005423 - RNA, 19 nt, Artificial Sequence
  Description of Artificial Sequence: Synthetic oligonucleotide
aguucuuaggcaaaugauu

SEQ ID NO: 1005424 - RNA, 19 nt, Artificial Sequence
  Description of Artificial Sequence: Synthetic oligonucleotide
gauacaucacgcuuggauu

SEQ ID NO: 1005425 - RNA, 19 nt, Artificial Sequence
  Description of Artificial Sequence: Synthetic oligonucleotide
auaugagcucaaauacuuc

SEQ ID NO: 1005426 - RNA, 19 nt, Artificial Sequence
  Description of Artificial Sequence: Synthetic oligonucleotide
agucuuacuuuuacaucac

SEQ ID NO: 1005427 - RNA, 19 nt, Artificial Sequence
  Description of Artificial Sequence: Synthetic oligonucleotide
guugccugauuauauagcu

SEQ ID NO: 1005428 - RNA, 19 nt, Artificial Sequence
  Description of Artificial Sequence: Synthetic oligonucleotide
acacggaacucuccaaaca

SEQ ID NO: 1005429 - RNA, 19 nt, Artificial Sequence
  Description of Artificial Sequence: Synthetic oligonucleotide
ucgguacugaaggagcuca

SEQ ID NO: 1005430 - RNA, 19 nt, Artificial Sequence
  Description of Artificial Sequence: Synthetic oligonucleotide
uauauagcuuaagguagaa

SEQ ID NO: 1005431 - RNA, 19 nt, Artificial Sequence
  Description of Artificial Sequence: Synthetic oligonucleotide
cuucucgguacugaaggag

SEQ ID NO: 1005432 - RNA, 19 nt, Artificial Sequence
  Description of Artificial Sequence: Synthetic oligonucleotide
aucacuugcaacacgcaga

SEQ ID NO: 1005433 - RNA, 19 nt, Artificial Sequence
  Description of Artificial Sequence: Synthetic oligonucleotide
guuaugggucaucugcuuc

SEQ ID NO: 1005434 - RNA, 19 nt, Artificial Sequence
  Description of Artificial Sequence: Synthetic oligonucleotide
caucaagagauaccaauaa

SEQ ID NO: 1005435 - RNA, 19 nt, Artificial Sequence
  Description of Artificial Sequence: Synthetic oligonucleotide
uaccgauggcuuccuaagc

SEQ ID NO: 1005436 - RNA, 19 nt, Artificial Sequence
  Description of Artificial Sequence: Synthetic oligonucleotide
uaccugauguucauuuaua

SEQ ID NO: 1005437 - RNA, 19 nt, Artificial Sequence
  Description of Artificial Sequence: Synthetic oligonucleotide
cuaccuuagguugcuagug

SEQ ID NO: 1005438 - RNA, 19 nt, Artificial Sequence
  Description of Artificial Sequence: Synthetic oligonucleotide
agaaaggcacaguuagcaa

SEQ ID NO: 1005439 - RNA, 19 nt, Artificial Sequence
  Description of Artificial Sequence: Synthetic oligonucleotide
gcuauuccacauuucuucc

SEQ ID NO: 1005440 - RNA, 19 nt, Artificial Sequence
  Description of Artificial Sequence: Synthetic oligonucleotide
auagcuuaagguagaauua

SEQ ID NO: 1005441 - RNA, 19 nt, Artificial Sequence
  Description of Artificial Sequence: Synthetic oligonucleotide
aauggcucccguaggaaau

SEQ ID NO: 1005442 - RNA, 19 nt, Artificial Sequence
  Description of Artificial Sequence: Synthetic oligonucleotide
agcgauacggcagcuccac

SEQ ID NO: 1005443 - RNA, 19 nt, Artificial Sequence
  Description of Artificial Sequence: Synthetic oligonucleotide
aaaauacguagggaaccaa

SEQ ID NO: 1005444 - RNA, 19 nt, Artificial Sequence
  Description of Artificial Sequence: Synthetic oligonucleotide
aggagcucagcccaccuaa

SEQ ID NO: 1005445 - RNA, 19 nt, Artificial Sequence
  Description of Artificial Sequence: Synthetic oligonucleotide
ugugccggcacaacugcau

SEQ ID NO: 1005446 - RNA, 19 nt, Artificial Sequence
  Description of Artificial Sequence: Synthetic oligonucleotide
uaacaacaugccugcauua

SEQ ID NO: 1005447 - RNA, 19 nt, Artificial Sequence
  Description of Artificial Sequence: Synthetic oligonucleotide
ccaauuuguuaauaacaac

SEQ ID NO: 1005448 - RNA, 19 nt, Artificial Sequence
  Description of Artificial Sequence: Synthetic oligonucleotide
aagcacccgcuuucuuuuc

SEQ ID NO: 1005449 - RNA, 19 nt, Artificial Sequence
  Description of Artificial Sequence: Synthetic oligonucleotide
uuguuccuaucacuugcaa

SEQ ID NO: 1005450 - RNA, 19 nt, Artificial Sequence
  Description of Artificial Sequence: Synthetic oligonucleotide
ggauacaacugguagccuc

SEQ ID NO: 1005451 - RNA, 19 nt, Artificial Sequence
  Description of Artificial Sequence: Synthetic oligonucleotide
cuuaggcaaaugauuuaga

SEQ ID NO: 1005452 - RNA, 19 nt, Artificial Sequence
  Description of Artificial Sequence: Synthetic oligonucleotide
uuaccuggagaaugguuuu

SEQ ID NO: 1005453 - RNA, 19 nt, Artificial Sequence
  Description of Artificial Sequence: Synthetic oligonucleotide
uguuaugggucaucugcuu

SEQ ID NO: 1005454 - RNA, 19 nt, Artificial Sequence
  Description of Artificial Sequence: Synthetic oligonucleotide
aaucaguaugugguagcau

SEQ ID NO: 1005455 - RNA, 19 nt, Artificial Sequence
  Description of Artificial Sequence: Synthetic oligonucleotide
guggguguugaaaauuaac

SEQ ID NO: 1005456 - RNA, 19 nt, Artificial Sequence
  Description of Artificial Sequence: Synthetic oligonucleotide
ugaguggguguugaaaauu

SEQ ID NO: 1005457 - RNA, 19 nt, Artificial Sequence
  Description of Artificial Sequence: Synthetic oligonucleotide
cuguauaccuuaauauaua

SEQ ID NO: 1005458 - RNA, 19 nt, Artificial Sequence
  Description of Artificial Sequence: Synthetic oligonucleotide
cugauccgaguguuuuacc

SEQ ID NO: 1005459 - RNA, 19 nt, Artificial Sequence
  Description of Artificial Sequence: Synthetic oligonucleotide
ugcaccccacaguucuuag

SEQ ID NO: 1005460 - RNA, 19 nt, Artificial Sequence
  Description of Artificial Sequence: Synthetic oligonucleotide
aaugcacggacugcagaau

SEQ ID NO: 1005461 - RNA, 19 nt, Artificial Sequence
  Description of Artificial Sequence: Synthetic oligonucleotide
agccuaaacuacugauaca

SEQ ID NO: 1005462 - RNA, 19 nt, Artificial Sequence
  Description of Artificial Sequence: Synthetic oligonucleotide
guaugugguagcauaugga

SEQ ID NO: 1005463 - RNA, 19 nt, Artificial Sequence
  Description of Artificial Sequence: Synthetic oligonucleotide
ugacuacaauuuguaacaa

SEQ ID NO: 1005464 - RNA, 19 nt, Artificial Sequence
  Description of Artificial Sequence: Synthetic oligonucleotide
uugccugauuauauagcuu

SEQ ID NO: 1005465 - RNA, 19 nt, Artificial Sequence
  Description of Artificial Sequence: Synthetic oligonucleotide
uccagcguaccgauggcuu

SEQ ID NO: 1005466 - RNA, 19 nt, Artificial Sequence
  Description of Artificial Sequence: Synthetic oligonucleotide
agcaacaaucaaauucagu

SEQ ID NO: 1005467 - RNA, 19 nt, Artificial Sequence
  Description of Artificial Sequence: Synthetic oligonucleotide
aaccaucccguagguaaug

SEQ ID NO: 1005468 - RNA, 19 nt, Artificial Sequence
  Description of Artificial Sequence: Synthetic oligonucleotide
uuccuaucacuugcaacac

SEQ ID NO: 1005469 - RNA, 19 nt, Artificial Sequence
  Description of Artificial Sequence: Synthetic oligonucleotide
acaacacggaacucuccaa

SEQ ID NO: 1005470 - RNA, 19 nt, Artificial Sequence
  Description of Artificial Sequence: Synthetic oligonucleotide
ugcacggacugcagaauuu

SEQ ID NO: 1005471 - RNA, 19 nt, Artificial Sequence
  Description of Artificial Sequence: Synthetic oligonucleotide
uggugucucuuaacccagc

SEQ ID NO: 1005472 - RNA, 19 nt, Artificial Sequence
  Description of Artificial Sequence: Synthetic oligonucleotide
aguuagcaacaaucaaauu

SEQ ID NO: 1005473 - RNA, 19 nt, Artificial Sequence
  Description of Artificial Sequence: Synthetic oligonucleotide
guucuuaggcaaaugauuu

SEQ ID NO: 1005474 - RNA, 19 nt, Artificial Sequence
  Description of Artificial Sequence: Synthetic oligonucleotide
cacggacugcagaauuuac

SEQ ID NO: 1005475 - RNA, 19 nt, Artificial Sequence
  Description of Artificial Sequence: Synthetic oligonucleotide
cacgcuuggauuuuauagu

SEQ ID NO: 1005476 - RNA, 19 nt, Artificial Sequence
  Description of Artificial Sequence: Synthetic oligonucleotide
ccugaauuugaccaaaaua

SEQ ID NO: 1005477 - RNA, 19 nt, Artificial Sequence
  Description of Artificial Sequence: Synthetic oligonucleotide
ccuaauuacagucacacuu

SEQ ID NO: 1005478 - RNA, 19 nt, Artificial Sequence
  Description of Artificial Sequence: Synthetic oligonucleotide
caacuaggaaauggcuccc

SEQ ID NO: 1005479 - RNA, 19 nt, Artificial Sequence
  Description of Artificial Sequence: Synthetic oligonucleotide
guugcuagugagugggugu

SEQ ID NO: 1005480 - RNA, 19 nt, Artificial Sequence
  Description of Artificial Sequence: Synthetic oligonucleotide
agcuuaagguagaauuaga

SEQ ID NO: 1005481 - RNA, 19 nt, Artificial Sequence
  Description of Artificial Sequence: Synthetic oligonucleotide
uccgaguguuuuaccugga

SEQ ID NO: 1005482 - RNA, 19 nt, Artificial Sequence
  Description of Artificial Sequence: Synthetic oligonucleotide
ggccccuaaguuuucaauc

SEQ ID NO: 1005483 - RNA, 19 nt, Artificial Sequence
  Description of Artificial Sequence: Synthetic oligonucleotide
gcucaaauacuucuguugu

SEQ ID NO: 1005484 - RNA, 19 nt, Artificial Sequence
  Description of Artificial Sequence: Synthetic oligonucleotide
uagucuaccuuagguugcu

SEQ ID NO: 1005485 - RNA, 19 nt, Artificial Sequence
  Description of Artificial Sequence: Synthetic oligonucleotide
agugggaaauccaauccuu

SEQ ID NO: 1005486 - RNA, 19 nt, Artificial Sequence
  Description of Artificial Sequence: Synthetic oligonucleotide
caaaauaauugaggggaaa

SEQ ID NO: 1005487 - RNA, 19 nt, Artificial Sequence
  Description of Artificial Sequence: Synthetic oligonucleotide
uaccuggagaaugguuuug

SEQ ID NO: 1005488 - RNA, 19 nt, Artificial Sequence
  Description of Artificial Sequence: Synthetic oligonucleotide
caaauucuuuagcuuccca

SEQ ID NO: 1005489 - RNA, 19 nt, Artificial Sequence
  Description of Artificial Sequence: Synthetic oligonucleotide
acggacugcagaauuuacu

SEQ ID NO: 1005490 - RNA, 19 nt, Artificial Sequence
  Description of Artificial Sequence: Synthetic oligonucleotide
aauaaacguuaaacccaau

SEQ ID NO: 1005491 - RNA, 19 nt, Artificial Sequence
  Description of Artificial Sequence: Synthetic oligonucleotide
gcucccguaggaaauaaac

SEQ ID NO: 1005492 - RNA, 19 nt, Artificial Sequence
  Description of Artificial Sequence: Synthetic oligonucleotide
cuuccagcguaccgauggc

SEQ ID NO: 1005493 - RNA, 19 nt, Artificial Sequence
  Description of Artificial Sequence: Synthetic oligonucleotide
aggguguacacugucucau

SEQ ID NO: 1005494 - RNA, 19 nt, Artificial Sequence
  Description of Artificial Sequence: Synthetic oligonucleotide
caguaugugguagcauaug

SEQ ID NO: 1005495 - RNA, 19 nt, Artificial Sequence
  Description of Artificial Sequence: Synthetic oligonucleotide
aucacgcuuggauuuuaua

SEQ ID NO: 1005496 - RNA, 19 nt, Artificial Sequence
  Description of Artificial Sequence: Synthetic oligonucleotide
cauagaaaggguguacacu

SEQ ID NO: 1005497 - RNA, 19 nt, Artificial Sequence
  Description of Artificial Sequence: Synthetic oligonucleotide
uugcaccgaagucguuagc

SEQ ID NO: 1005498 - RNA, 19 nt, Artificial Sequence
  Description of Artificial Sequence: Synthetic oligonucleotide
gagaaaccaaccaucccgu

SEQ ID NO: 1005499 - RNA, 19 nt, Artificial Sequence
  Description of Artificial Sequence: Synthetic oligonucleotide
uguagcgauacggcagcuc

SEQ ID NO: 1005500 - RNA, 19 nt, Artificial Sequence
  Description of Artificial Sequence: Synthetic oligonucleotide
gccccuaaguuuucaauca

SEQ ID NO: 1005501 - RNA, 19 nt, Artificial Sequence
  Description of Artificial Sequence: Synthetic oligonucleotide
aggccccuaaguuuucaau

SEQ ID NO: 1005502 - RNA, 19 nt, Artificial Sequence
  Description of Artificial Sequence: Synthetic oligonucleotide
acacaguguacagaacuuu

SEQ ID NO: 1005503 - RNA, 19 nt, Artificial Sequence
  Description of Artificial Sequence: Synthetic oligonucleotide
caacacggaacucuccaaa

SEQ ID NO: 1005504 - RNA, 19 nt, Artificial Sequence
  Description of Artificial Sequence: Synthetic oligonucleotide
uuccagcguaccgauggcu

SEQ ID NO: 1005505 - RNA, 19 nt, Artificial Sequence
  Description of Artificial Sequence: Synthetic oligonucleotide
ugccggcacaacugcauau

SEQ ID NO: 1005506 - RNA, 19 nt, Artificial Sequence
  Description of Artificial Sequence: Synthetic oligonucleotide
acguuaaacccaauuuguu

SEQ ID NO: 1005507 - RNA, 19 nt, Artificial Sequence
  Description of Artificial Sequence: Synthetic oligonucleotide
agauaccaauaaaggaaaa

SEQ ID NO: 1005508 - RNA, 19 nt, Artificial Sequence
  Description of Artificial Sequence: Synthetic oligonucleotide
cagcguaccgauggcuucc

SEQ ID NO: 1005509 - RNA, 19 nt, Artificial Sequence
  Description of Artificial Sequence: Synthetic oligonucleotide
uugcuagugaguggguguu

SEQ ID NO: 1005510 - RNA, 19 nt, Artificial Sequence
  Description of Artificial Sequence: Synthetic oligonucleotide
guuuuggauacaacuggua

SEQ ID NO: 1005511 - RNA, 19 nt, Artificial Sequence
  Description of Artificial Sequence: Synthetic oligonucleotide
gucucuuaacccagcaaaa

SEQ ID NO: 1005512 - RNA, 19 nt, Artificial Sequence
  Description of Artificial Sequence: Synthetic oligonucleotide
ggugucucuuaacccagca

SEQ ID NO: 1005513 - RNA, 19 nt, Artificial Sequence
  Description of Artificial Sequence: Synthetic oligonucleotide
agaaaccaaccaucccgua

SEQ ID NO: 1005514 - RNA, 19 nt, Artificial Sequence
  Description of Artificial Sequence: Synthetic oligonucleotide
caaucaagaugauguacau

SEQ ID NO: 1005515 - RNA, 19 nt, Artificial Sequence
  Description of Artificial Sequence: Synthetic oligonucleotide
ugcuagugaguggguguug

SEQ ID NO: 1005516 - RNA, 19 nt, Artificial Sequence
  Description of Artificial Sequence: Synthetic oligonucleotide
cuaaaugggcacaccacuu

SEQ ID NO: 1005517 - RNA, 19 nt, Artificial Sequence
  Description of Artificial Sequence: Synthetic oligonucleotide
uacaucacgcuuggauuuu

SEQ ID NO: 1005518 - RNA, 19 nt, Artificial Sequence
  Description of Artificial Sequence: Synthetic oligonucleotide
caacaugccugcauuaguu

SEQ ID NO: 1005519 - RNA, 19 nt, Artificial Sequence
  Description of Artificial Sequence: Synthetic oligonucleotide
cuauuccacauuucuuccu

SEQ ID NO: 1005520 - RNA, 19 nt, Artificial Sequence
  Description of Artificial Sequence: Synthetic oligonucleotide
gccuaaacuacugauacau

SEQ ID NO: 1005521 - RNA, 19 nt, Artificial Sequence
  Description of Artificial Sequence: Synthetic oligonucleotide
cuaagcacccgcuuucuuu

SEQ ID NO: 1005522 - RNA, 19 nt, Artificial Sequence
  Description of Artificial Sequence: Synthetic oligonucleotide
cuacugauacaucacgcuu

SEQ ID NO: 1005523 - RNA, 19 nt, Artificial Sequence
  Description of Artificial Sequence: Synthetic oligonucleotide
accaucccguagguaaugu

SEQ ID NO: 1005524 - RNA, 19 nt, Artificial Sequence
  Description of Artificial Sequence: Synthetic oligonucleotide
cacccgcuuucuuuuccug

SEQ ID NO: 1005525 - RNA, 19 nt, Artificial Sequence
  Description of Artificial Sequence: Synthetic oligonucleotide
cacggaacucuccaaacau

SEQ ID NO: 1005526 - RNA, 19 nt, Artificial Sequence
  Description of Artificial Sequence: Synthetic oligonucleotide
ggacaguaaaucaguaugu

SEQ ID NO: 1005527 - RNA, 19 nt, Artificial Sequence
  Description of Artificial Sequence: Synthetic oligonucleotide
cucgguacugaaggagcuc

SEQ ID NO: 1005528 - RNA, 19 nt, Artificial Sequence
  Description of Artificial Sequence: Synthetic oligonucleotide
cguuaaacccaauuuguua

SEQ ID NO: 1005529 - RNA, 19 nt, Artificial Sequence
  Description of Artificial Sequence: Synthetic oligonucleotide
guguuaugggucaucugcu

SEQ ID NO: 1005530 - RNA, 19 nt, Artificial Sequence
  Description of Artificial Sequence: Synthetic oligonucleotide
ccguaggaaauaaacguua

SEQ ID NO: 1005531 - RNA, 19 nt, Artificial Sequence
  Description of Artificial Sequence: Synthetic oligonucleotide
ccaaaauaauugaggggaa

SEQ ID NO: 1005532 - RNA, 19 nt, Artificial Sequence
  Description of Artificial Sequence: Synthetic oligonucleotide
gcaccgaagucguuagcuc

SEQ ID NO: 1005533 - RNA, 19 nt, Artificial Sequence
  Description of Artificial Sequence: Synthetic oligonucleotide
aaugcaccccacaguucuu

SEQ ID NO: 1005534 - RNA, 19 nt, Artificial Sequence
  Description of Artificial Sequence: Synthetic oligonucleotide
cuagugaguggguguugaa

SEQ ID NO: 1005535 - RNA, 19 nt, Artificial Sequence
  Description of Artificial Sequence: Synthetic oligonucleotide
gcuccauaccugauguuca

SEQ ID NO: 1005536 - RNA, 19 nt, Artificial Sequence
  Description of Artificial Sequence: Synthetic oligonucleotide
gcuagugaguggguguuga

SEQ ID NO: 1005537 - RNA, 19 nt, Artificial Sequence
  Description of Artificial Sequence: Synthetic oligonucleotide
ggaaaauaauagagccuaa

SEQ ID NO: 1005538 - RNA, 19 nt, Artificial Sequence
  Description of Artificial Sequence: Synthetic oligonucleotide
gugaguggguguugaaaau

SEQ ID NO: 1005539 - RNA, 19 nt, Artificial Sequence
  Description of Artificial Sequence: Synthetic oligonucleotide
ugguagcauauggaaucuu

SEQ ID NO: 1005540 - RNA, 19 nt, Artificial Sequence
  Description of Artificial Sequence: Synthetic oligonucleotide
ccgaguguuuuaccuggag

SEQ ID NO: 1005541 - RNA, 19 nt, Artificial Sequence
  Description of Artificial Sequence: Synthetic oligonucleotide
uggcucccguaggaaauaa

SEQ ID NO: 1005542 - RNA, 19 nt, Artificial Sequence
  Description of Artificial Sequence: Synthetic oligonucleotide
cucugauccgaguguuuua

SEQ ID NO: 1005543 - RNA, 19 nt, Artificial Sequence
  Description of Artificial Sequence: Synthetic oligonucleotide
ggcccaaauuuacuggcua

SEQ ID NO: 1005544 - RNA, 19 nt, Artificial Sequence
  Description of Artificial Sequence: Synthetic oligonucleotide
ccagagauauugcaccgaa

SEQ ID NO: 1005545 - RNA, 19 nt, Artificial Sequence
  Description of Artificial Sequence: Synthetic oligonucleotide
gugguagcauauggaaucu

SEQ ID NO: 1005546 - RNA, 19 nt, Artificial Sequence
  Description of Artificial Sequence: Synthetic oligonucleotide
ccggcacaacugcauauug

SEQ ID NO: 1005547 - RNA, 19 nt, Artificial Sequence
  Description of Artificial Sequence: Synthetic oligonucleotide
auguagcgauacggcagcu

SEQ ID NO: 1005548 - RNA, 19 nt, Artificial Sequence
  Description of Artificial Sequence: Synthetic oligonucleotide
gguagcauauggaaucuuu

SEQ ID NO: 1005549 - RNA, 19 nt, Artificial Sequence
  Description of Artificial Sequence: Synthetic oligonucleotide
augcaccccacaguucuua

SEQ ID NO: 1005550 - RNA, 19 nt, Artificial Sequence
  Description of Artificial Sequence: Synthetic oligonucleotide
ccagcguaccgauggcuuc

SEQ ID NO: 1005551 - RNA, 19 nt, Artificial Sequence
  Description of Artificial Sequence: Synthetic oligonucleotide
ccaccuaaaacaucuggau

SEQ ID NO: 1005552 - RNA, 19 nt, Artificial Sequence
  Description of Artificial Sequence: Synthetic oligonucleotide
gggcacaccacuucucggu

SEQ ID NO: 1005553 - RNA, 19 nt, Artificial Sequence
  Description of Artificial Sequence: Synthetic oligonucleotide
agcguaccgauggcuuccu

SEQ ID NO: 1005554 - RNA, 19 nt, Artificial Sequence
  Description of Artificial Sequence: Synthetic oligonucleotide
ccuggagaaugguuuugga

SEQ ID NO: 1005555 - RNA, 19 nt, Artificial Sequence
  Description of Artificial Sequence: Synthetic oligonucleotide
caggccccuaaguuuucaa

SEQ ID NO: 1005556 - RNA, 19 nt, Artificial Sequence
  Description of Artificial Sequence: Synthetic oligonucleotide
augugccggcacaacugca

SEQ ID NO: 1005557 - RNA, 19 nt, Artificial Sequence
  Description of Artificial Sequence: Synthetic oligonucleotide
ccccacaguucuuaggcaa

SEQ ID NO: 1005558 - RNA, 19 nt, Artificial Sequence
  Description of Artificial Sequence: Synthetic oligonucleotide
ccguagguaauguagcgau

SEQ ID NO: 1005559 - RNA, 19 nt, Artificial Sequence
  Description of Artificial Sequence: Synthetic oligonucleotide
caaccaucccguagguaau

SEQ ID NO: 1005560 - RNA, 19 nt, Artificial Sequence
  Description of Artificial Sequence: Synthetic oligonucleotide
gugagaaaauuuagcuauu

SEQ ID NO: 1005561 - RNA, 19 nt, Artificial Sequence
  Description of Artificial Sequence: Synthetic oligonucleotide
cuccauaccugauguucau

SEQ ID NO: 1005562 - RNA, 19 nt, Artificial Sequence
  Description of Artificial Sequence: Synthetic oligonucleotide
cguaccgauggcuuccuaa

SEQ ID NO: 1005563 - RNA, 19 nt, Artificial Sequence
  Description of Artificial Sequence: Synthetic oligonucleotide
cugauacaucacgcuugga

SEQ ID NO: 1005564 - RNA, 19 nt, Artificial Sequence
  Description of Artificial Sequence: Synthetic oligonucleotide
gcacggacugcagaauuua

SEQ ID NO: 1005565 - RNA, 19 nt, Artificial Sequence
  Description of Artificial Sequence: Synthetic oligonucleotide
cccguagguaauguagcga

SEQ ID NO: 1005566 - RNA, 19 nt, Artificial Sequence
  Description of Artificial Sequence: Synthetic oligonucleotide
cugaguuaccagagauauu

SEQ ID NO: 1005567 - RNA, 19 nt, Artificial Sequence
  Description of Artificial Sequence: Synthetic oligonucleotide
cccguaggaaauaaacguu

SEQ ID NO: 1005568 - RNA, 19 nt, Artificial Sequence
  Description of Artificial Sequence: Synthetic oligonucleotide
ggcuaaaguugaucagauu

SEQ ID NO: 1005569 - RNA, 19 nt, Artificial Sequence
  Description of Artificial Sequence: Synthetic oligonucleotide
cagcuuccagcguaccgau

SEQ ID NO: 1005570 - RNA, 19 nt, Artificial Sequence
  Description of Artificial Sequence: Synthetic oligonucleotide
gcauauuguuauugaucuu

SEQ ID NO: 1005571 - RNA, 19 nt, Artificial Sequence
  Description of Artificial Sequence: Synthetic oligonucleotide
ggauaacaugaaaggggau

SEQ ID NO: 1005572 - RNA, 19 nt, Artificial Sequence
  Description of Artificial Sequence: Synthetic oligonucleotide
ccaucccguagguaaugua

SEQ ID NO: 1005573 - RNA, 19 nt, Artificial Sequence
  Description of Artificial Sequence: Synthetic oligonucleotide
cguagguaauguagcgaua

SEQ ID NO: 1005574 - RNA, 19 nt, Artificial Sequence
  Description of Artificial Sequence: Synthetic oligonucleotide
ggcucccguaggaaauaaa

SEQ ID NO: 1005575 - RNA, 19 nt, Artificial Sequence
  Description of Artificial Sequence: Synthetic oligonucleotide
cgauacggcagcuccacuu

SEQ ID NO: 1005576 - RNA, 19 nt, Artificial Sequence
  Description of Artificial Sequence: Synthetic oligonucleotide
gcgauacggcagcuccacu

SEQ ID NO: 1005577 - RNA, 19 nt, Artificial Sequence
  Description of Artificial Sequence: Synthetic oligonucleotide
gccggcacaacugcauauu

SEQ ID NO: 1005578 - RNA, 19 nt, Artificial Sequence
  Description of Artificial Sequence: Synthetic oligonucleotide
gcguaccgauggcuuccua

SEQ ID NO: 1005579 - RNA, 19 nt, Artificial Sequence
  Description of Artificial Sequence: Synthetic oligonucleotide
auuuacacgauucuuauuc

SEQ ID NO: 1005580 - RNA, 19 nt, Artificial Sequence
  Description of Artificial Sequence: Synthetic oligonucleotide
aaaagauuaguaaauagag

SEQ ID NO: 1005581 - RNA, 19 nt, Artificial Sequence
  Description of Artificial Sequence: Synthetic oligonucleotide
acuaaguugaacuuagaac

SEQ ID NO: 1005582 - RNA, 19 nt, Artificial Sequence
  Description of Artificial Sequence: Synthetic oligonucleotide
agagauaaugacuaggauc

SEQ ID NO: 1005583 - RNA, 19 nt, Artificial Sequence
  Description of Artificial Sequence: Synthetic oligonucleotide
uuuaucaacauuugggugc

SEQ ID NO: 1005584 - RNA, 19 nt, Artificial Sequence
  Description of Artificial Sequence: Synthetic oligonucleotide
ugaagguuaaaacaguuca

SEQ ID NO: 1005585 - RNA, 19 nt, Artificial Sequence
  Description of Artificial Sequence: Synthetic oligonucleotide
ugauuugagaacuuucugg

SEQ ID NO: 1005586 - RNA, 19 nt, Artificial Sequence
  Description of Artificial Sequence: Synthetic oligonucleotide
agaacuuucuggcagauag

SEQ ID NO: 1005587 - RNA, 19 nt, Artificial Sequence
  Description of Artificial Sequence: Synthetic oligonucleotide
aacuaagugauuugagaac

SEQ ID NO: 1005588 - RNA, 19 nt, Artificial Sequence
  Description of Artificial Sequence: Synthetic oligonucleotide
cuaaguugaacuuagaaca

SEQ ID NO: 1005589 - RNA, 19 nt, Artificial Sequence
  Description of Artificial Sequence: Synthetic oligonucleotide
uaauauuaggcaacuuacg

SEQ ID NO: 1005590 - RNA, 19 nt, Artificial Sequence
  Description of Artificial Sequence: Synthetic oligonucleotide
auaauaaggacuucccauc

SEQ ID NO: 1005591 - RNA, 19 nt, Artificial Sequence
  Description of Artificial Sequence: Synthetic oligonucleotide
uuuaacuaagugauuugag

SEQ ID NO: 1005592 - RNA, 19 nt, Artificial Sequence
  Description of Artificial Sequence: Synthetic oligonucleotide
aucauguugugcuauguac

SEQ ID NO: 1005593 - RNA, 19 nt, Artificial Sequence
  Description of Artificial Sequence: Synthetic oligonucleotide
auccuuauugguuuucacc

SEQ ID NO: 1005594 - RNA, 19 nt, Artificial Sequence
  Description of Artificial Sequence: Synthetic oligonucleotide
aaucucaguacaaaaggac

SEQ ID NO: 1005595 - RNA, 19 nt, Artificial Sequence
  Description of Artificial Sequence: Synthetic oligonucleotide
uuaacuaagugauuugaga

SEQ ID NO: 1005596 - RNA, 19 nt, Artificial Sequence
  Description of Artificial Sequence: Synthetic oligonucleotide
uaauaaggacuucccaucg

SEQ ID NO: 1005597 - RNA, 19 nt, Artificial Sequence
  Description of Artificial Sequence: Synthetic oligonucleotide
aggucuuuacaauucuucc

SEQ ID NO: 1005598 - RNA, 19 nt, Artificial Sequence
  Description of Artificial Sequence: Synthetic oligonucleotide
uuuugggaaagugagauga

SEQ ID NO: 1005599 - RNA, 19 nt, Artificial Sequence
  Description of Artificial Sequence: Synthetic oligonucleotide
uguuuguggauguacauga

SEQ ID NO: 1005600 - RNA, 19 nt, Artificial Sequence
  Description of Artificial Sequence: Synthetic oligonucleotide
aguaaauagaguguaauga

SEQ ID NO: 1005601 - RNA, 19 nt, Artificial Sequence
  Description of Artificial Sequence: Synthetic oligonucleotide
agagauaaaaggaaagggg

SEQ ID NO: 1005602 - RNA, 19 nt, Artificial Sequence
  Description of Artificial Sequence: Synthetic oligonucleotide
aaagcaccuagugaugacc

SEQ ID NO: 1005603 - RNA, 19 nt, Artificial Sequence
  Description of Artificial Sequence: Synthetic oligonucleotide
aucgauagagaucauuguc

SEQ ID NO: 1005604 - RNA, 19 nt, Artificial Sequence
  Description of Artificial Sequence: Synthetic oligonucleotide
uauuauccggaucauguug

SEQ ID NO: 1005605 - RNA, 19 nt, Artificial Sequence
  Description of Artificial Sequence: Synthetic oligonucleotide
uauugcuacauccaaucca

SEQ ID NO: 1005606 - RNA, 19 nt, Artificial Sequence
  Description of Artificial Sequence: Synthetic oligonucleotide
uauuucaguauuuuaacua

SEQ ID NO: 1005607 - RNA, 19 nt, Artificial Sequence
  Description of Artificial Sequence: Synthetic oligonucleotide
uaacuaagugauuugagaa

SEQ ID NO: 1005608 - RNA, 19 nt, Artificial Sequence
  Description of Artificial Sequence: Synthetic oligonucleotide
uuuacuaguauuucaguau

SEQ ID NO: 1005609 - RNA, 19 nt, Artificial Sequence
  Description of Artificial Sequence: Synthetic oligonucleotide
ugaaucuccauuagggucu

SEQ ID NO: 1005610 - RNA, 19 nt, Artificial Sequence
  Description of Artificial Sequence: Synthetic oligonucleotide
aaaguguaucuggaggacc

SEQ ID NO: 1005611 - RNA, 19 nt, Artificial Sequence
  Description of Artificial Sequence: Synthetic oligonucleotide
uccuuauugguuuucaccu

SEQ ID NO: 1005612 - RNA, 19 nt, Artificial Sequence
  Description of Artificial Sequence: Synthetic oligonucleotide
uaaguuggcacuuguuagg

SEQ ID NO: 1005613 - RNA, 19 nt, Artificial Sequence
  Description of Artificial Sequence: Synthetic oligonucleotide
uaauagcaaucccagaugu

SEQ ID NO: 1005614 - RNA, 19 nt, Artificial Sequence
  Description of Artificial Sequence: Synthetic oligonucleotide
uaaguugaacuuagaacag

SEQ ID NO: 1005615 - RNA, 19 nt, Artificial Sequence
  Description of Artificial Sequence: Synthetic oligonucleotide
ucauccaaccuuaauauua

SEQ ID NO: 1005616 - RNA, 19 nt, Artificial Sequence
  Description of Artificial Sequence: Synthetic oligonucleotide
guaaguuggcacuuguuag

SEQ ID NO: 1005617 - RNA, 19 nt, Artificial Sequence
  Description of Artificial Sequence: Synthetic oligonucleotide
ucauugucgucuauuaaac

SEQ ID NO: 1005618 - RNA, 19 nt, Artificial Sequence
  Description of Artificial Sequence: Synthetic oligonucleotide
uuucgcagcaucuacauuu

SEQ ID NO: 1005619 - RNA, 19 nt, Artificial Sequence
  Description of Artificial Sequence: Synthetic oligonucleotide
aaccuuaauauuaggcaac

SEQ ID NO: 1005620 - RNA, 19 nt, Artificial Sequence
  Description of Artificial Sequence: Synthetic oligonucleotide
ucauguugugcuauguaca

SEQ ID NO: 1005621 - RNA, 19 nt, Artificial Sequence
  Description of Artificial Sequence: Synthetic oligonucleotide
auucauccaaccuuaauau

SEQ ID NO: 1005622 - RNA, 19 nt, Artificial Sequence
  Description of Artificial Sequence: Synthetic oligonucleotide
auagcaaucccagauguag

SEQ ID NO: 1005623 - RNA, 19 nt, Artificial Sequence
  Description of Artificial Sequence: Synthetic oligonucleotide
ugaacaguauauauauuau

SEQ ID NO: 1005624 - RNA, 19 nt, Artificial Sequence
  Description of Artificial Sequence: Synthetic oligonucleotide
auuucauuuuaggaggccg

SEQ ID NO: 1005625 - RNA, 19 nt, Artificial Sequence
  Description of Artificial Sequence: Synthetic oligonucleotide
ucaucuguaaguuggcacu

SEQ ID NO: 1005626 - RNA, 19 nt, Artificial Sequence
  Description of Artificial Sequence: Synthetic oligonucleotide
accauauuuaucuucccca

SEQ ID NO: 1005627 - RNA, 19 nt, Artificial Sequence
  Description of Artificial Sequence: Synthetic oligonucleotide
aaagauuaguaaauagagu

SEQ ID NO: 1005628 - RNA, 19 nt, Artificial Sequence
  Description of Artificial Sequence: Synthetic oligonucleotide
uugucgucuauuaaaccug

SEQ ID NO: 1005629 - RNA, 19 nt, Artificial Sequence
  Description of Artificial Sequence: Synthetic oligonucleotide
augguuuaaaggaaauuac

SEQ ID NO: 1005630 - RNA, 19 nt, Artificial Sequence
  Description of Artificial Sequence: Synthetic oligonucleotide
ucgucuauuaaaccugcug

SEQ ID NO: 1005631 - RNA, 19 nt, Artificial Sequence
  Description of Artificial Sequence: Synthetic oligonucleotide
uuauugcuacauccaaucc

SEQ ID NO: 1005632 - RNA, 19 nt, Artificial Sequence
  Description of Artificial Sequence: Synthetic oligonucleotide
ucucaguacaaaaggacaa

SEQ ID NO: 1005633 - RNA, 19 nt, Artificial Sequence
  Description of Artificial Sequence: Synthetic oligonucleotide
uacacgauucuuauucuac

SEQ ID NO: 1005634 - RNA, 19 nt, Artificial Sequence
  Description of Artificial Sequence: Synthetic oligonucleotide
ucucauaaccauauuuauc

SEQ ID NO: 1005635 - RNA, 19 nt, Artificial Sequence
  Description of Artificial Sequence: Synthetic oligonucleotide
acaguauggauaggcaacc

SEQ ID NO: 1005636 - RNA, 19 nt, Artificial Sequence
  Description of Artificial Sequence: Synthetic oligonucleotide
gaaugugucaaaacaaaca

SEQ ID NO: 1005637 - RNA, 19 nt, Artificial Sequence
  Description of Artificial Sequence: Synthetic oligonucleotide
aagcaccuagugaugaccc

SEQ ID NO: 1005638 - RNA, 19 nt, Artificial Sequence
  Description of Artificial Sequence: Synthetic oligonucleotide
ugguuuucaccugacaugc

SEQ ID NO: 1005639 - RNA, 19 nt, Artificial Sequence
  Description of Artificial Sequence: Synthetic oligonucleotide
aacugauaagaaacgauga

SEQ ID NO: 1005640 - RNA, 19 nt, Artificial Sequence
  Description of Artificial Sequence: Synthetic oligonucleotide
acuaagugauuugagaacu

SEQ ID NO: 1005641 - RNA, 19 nt, Artificial Sequence
  Description of Artificial Sequence: Synthetic oligonucleotide
uucguaaaguguaucugga

SEQ ID NO: 1005642 - RNA, 19 nt, Artificial Sequence
  Description of Artificial Sequence: Synthetic oligonucleotide
uuaguaaauagaguguaau

SEQ ID NO: 1005643 - RNA, 19 nt, Artificial Sequence
  Description of Artificial Sequence: Synthetic oligonucleotide
guaaaguguaucuggagga

SEQ ID NO: 1005644 - RNA, 19 nt, Artificial Sequence
  Description of Artificial Sequence: Synthetic oligonucleotide
aguauauauauuauccgga

SEQ ID NO: 1005645 - RNA, 19 nt, Artificial Sequence
  Description of Artificial Sequence: Synthetic oligonucleotide
cauguugugcuauguacag

SEQ ID NO: 1005646 - RNA, 19 nt, Artificial Sequence
  Description of Artificial Sequence: Synthetic oligonucleotide
guaaauagaguguaaugaa

SEQ ID NO: 1005647 - RNA, 19 nt, Artificial Sequence
  Description of Artificial Sequence: Synthetic oligonucleotide
ggaaaaucaaguaauuuac

SEQ ID NO: 1005648 - RNA, 19 nt, Artificial Sequence
  Description of Artificial Sequence: Synthetic oligonucleotide
uacauccaauccaagagau

SEQ ID NO: 1005649 - RNA, 19 nt, Artificial Sequence
  Description of Artificial Sequence: Synthetic oligonucleotide
agcauuaaugacuggcaug

SEQ ID NO: 1005650 - RNA, 19 nt, Artificial Sequence
  Description of Artificial Sequence: Synthetic oligonucleotide
aggaccaauaauaaggacu

SEQ ID NO: 1005651 - RNA, 19 nt, Artificial Sequence
  Description of Artificial Sequence: Synthetic oligonucleotide
aaugcguaaucaucuguaa

SEQ ID NO: 1005652 - RNA, 19 nt, Artificial Sequence
  Description of Artificial Sequence: Synthetic oligonucleotide
caagagauaaugacuagga

SEQ ID NO: 1005653 - RNA, 19 nt, Artificial Sequence
  Description of Artificial Sequence: Synthetic oligonucleotide
aauaaggacuucccaucga

SEQ ID NO: 1005654 - RNA, 19 nt, Artificial Sequence
  Description of Artificial Sequence: Synthetic oligonucleotide
aagagauaaugacuaggau

SEQ ID NO: 1005655 - RNA, 19 nt, Artificial Sequence
  Description of Artificial Sequence: Synthetic oligonucleotide
auaaaaggaaaggggaaug

SEQ ID NO: 1005656 - RNA, 19 nt, Artificial Sequence
  Description of Artificial Sequence: Synthetic oligonucleotide
uccagcaauagguggguag

SEQ ID NO: 1005657 - RNA, 19 nt, Artificial Sequence
  Description of Artificial Sequence: Synthetic oligonucleotide
uuuacacgauucuuauucu

SEQ ID NO: 1005658 - RNA, 19 nt, Artificial Sequence
  Description of Artificial Sequence: Synthetic oligonucleotide
gugaaucucaguacaaaag

SEQ ID NO: 1005659 - RNA, 19 nt, Artificial Sequence
  Description of Artificial Sequence: Synthetic oligonucleotide
uucucauaaccauauuuau

SEQ ID NO: 1005660 - RNA, 19 nt, Artificial Sequence
  Description of Artificial Sequence: Synthetic oligonucleotide
ugucgucuauuaaaccugc

SEQ ID NO: 1005661 - RNA, 19 nt, Artificial Sequence
  Description of Artificial Sequence: Synthetic oligonucleotide
auucaaaaugcguaaucau

SEQ ID NO: 1005662 - RNA, 19 nt, Artificial Sequence
  Description of Artificial Sequence: Synthetic oligonucleotide
acccugaaauaauugaagu

SEQ ID NO: 1005663 - RNA, 19 nt, Artificial Sequence
  Description of Artificial Sequence: Synthetic oligonucleotide
uuugccaacuuguuacaac

SEQ ID NO: 1005664 - RNA, 19 nt, Artificial Sequence
  Description of Artificial Sequence: Synthetic oligonucleotide
gacccugaaauaauugaag

SEQ ID NO: 1005665 - RNA, 19 nt, Artificial Sequence
  Description of Artificial Sequence: Synthetic oligonucleotide
acugauaagaaacgaugaa

SEQ ID NO: 1005666 - RNA, 19 nt, Artificial Sequence
  Description of Artificial Sequence: Synthetic oligonucleotide
cuagguguguggaggaacc

SEQ ID NO: 1005667 - RNA, 19 nt, Artificial Sequence
  Description of Artificial Sequence: Synthetic oligonucleotide
uacuagcuauugaauaaac

SEQ ID NO: 1005668 - RNA, 19 nt, Artificial Sequence
  Description of Artificial Sequence: Synthetic oligonucleotide
aauuggagacccugaaaua

SEQ ID NO: 1005669 - RNA, 19 nt, Artificial Sequence
  Description of Artificial Sequence: Synthetic oligonucleotide
ucauccuccccgccgagag

SEQ ID NO: 1005670 - RNA, 19 nt, Artificial Sequence
  Description of Artificial Sequence: Synthetic oligonucleotide
aaacgaugaaugggaaaag

SEQ ID NO: 1005671 - RNA, 19 nt, Artificial Sequence
  Description of Artificial Sequence: Synthetic oligonucleotide
uuugguacaagguguguuu

SEQ ID NO: 1005672 - RNA, 19 nt, Artificial Sequence
  Description of Artificial Sequence: Synthetic oligonucleotide
cauugucgucuauuaaacc

SEQ ID NO: 1005673 - RNA, 19 nt, Artificial Sequence
  Description of Artificial Sequence: Synthetic oligonucleotide
ugugcaugcuuuauucauc

SEQ ID NO: 1005674 - RNA, 19 nt, Artificial Sequence
  Description of Artificial Sequence: Synthetic oligonucleotide
uucucaauuggagacccug

SEQ ID NO: 1005675 - RNA, 19 nt, Artificial Sequence
  Description of Artificial Sequence: Synthetic oligonucleotide
acuaaucaugaugguuucc

SEQ ID NO: 1005676 - RNA, 19 nt, Artificial Sequence
  Description of Artificial Sequence: Synthetic oligonucleotide
cuauuaaaccugcugaaaa

SEQ ID NO: 1005677 - RNA, 19 nt, Artificial Sequence
  Description of Artificial Sequence: Synthetic oligonucleotide
ucaauuggagacccugaaa

SEQ ID NO: 1005678 - RNA, 19 nt, Artificial Sequence
  Description of Artificial Sequence: Synthetic oligonucleotide
ucucaauuggagacccuga

SEQ ID NO: 1005679 - RNA, 19 nt, Artificial Sequence
  Description of Artificial Sequence: Synthetic oligonucleotide
uguacaugaacaguauaua

SEQ ID NO: 1005680 - RNA, 19 nt, Artificial Sequence
  Description of Artificial Sequence: Synthetic oligonucleotide
uccgucauccuccccgccg

SEQ ID NO: 1005681 - RNA, 19 nt, Artificial Sequence
  Description of Artificial Sequence: Synthetic oligonucleotide
cugaagguuaaaacaguuc

SEQ ID NO: 1005682 - RNA, 19 nt, Artificial Sequence
  Description of Artificial Sequence: Synthetic oligonucleotide
agauuaguaaauagagugu

SEQ ID NO: 1005683 - RNA, 19 nt, Artificial Sequence
  Description of Artificial Sequence: Synthetic oligonucleotide
uuauucauccaaccuuaau

SEQ ID NO: 1005684 - RNA, 19 nt, Artificial Sequence
  Description of Artificial Sequence: Synthetic oligonucleotide
aaaugcguaaucaucugua

SEQ ID NO: 1005685 - RNA, 19 nt, Artificial Sequence
  Description of Artificial Sequence: Synthetic oligonucleotide
uggauaggcaaccaacguu

SEQ ID NO: 1005686 - RNA, 19 nt, Artificial Sequence
  Description of Artificial Sequence: Synthetic oligonucleotide
caaaaugcguaaucaucug

SEQ ID NO: 1005687 - RNA, 19 nt, Artificial Sequence
  Description of Artificial Sequence: Synthetic oligonucleotide
ugcgaguccgcuccgcucc

SEQ ID NO: 1005688 - RNA, 19 nt, Artificial Sequence
  Description of Artificial Sequence: Synthetic oligonucleotide
ugccaacuuguuacaacag

SEQ ID NO: 1005689 - RNA, 19 nt, Artificial Sequence
  Description of Artificial Sequence: Synthetic oligonucleotide
auuggagacccugaaauaa

SEQ ID NO: 1005690 - RNA, 19 nt, Artificial Sequence
  Description of Artificial Sequence: Synthetic oligonucleotide
agaauuuacacgauucuua

SEQ ID NO: 1005691 - RNA, 19 nt, Artificial Sequence
  Description of Artificial Sequence: Synthetic oligonucleotide
aaguugaacuuagaacaga

SEQ ID NO: 1005692 - RNA, 19 nt, Artificial Sequence
  Description of Artificial Sequence: Synthetic oligonucleotide
cuagugaugaccccaccuc

SEQ ID NO: 1005693 - RNA, 19 nt, Artificial Sequence
  Description of Artificial Sequence: Synthetic oligonucleotide
gcaauagguggguagagug

SEQ ID NO: 1005694 - RNA, 19 nt, Artificial Sequence
  Description of Artificial Sequence: Synthetic oligonucleotide
agaaaaccugcuaaagucu

SEQ ID NO: 1005695 - RNA, 19 nt, Artificial Sequence
  Description of Artificial Sequence: Synthetic oligonucleotide
acacgauucuuauucuacu

SEQ ID NO: 1005696 - RNA, 19 nt, Artificial Sequence
  Description of Artificial Sequence: Synthetic oligonucleotide
aaucaucuguaaguuggca

SEQ ID NO: 1005697 - RNA, 19 nt, Artificial Sequence
  Description of Artificial Sequence: Synthetic oligonucleotide
gacuggagcgccgaagccg

SEQ ID NO: 1005698 - RNA, 19 nt, Artificial Sequence
  Description of Artificial Sequence: Synthetic oligonucleotide
guauggauaggcaaccaac

SEQ ID NO: 1005699 - RNA, 19 nt, Artificial Sequence
  Description of Artificial Sequence: Synthetic oligonucleotide
acacuaaucaugaugguuu

SEQ ID NO: 1005700 - RNA, 19 nt, Artificial Sequence
  Description of Artificial Sequence: Synthetic oligonucleotide
cuacauuugcaggugaauc

SEQ ID NO: 1005701 - RNA, 19 nt, Artificial Sequence
  Description of Artificial Sequence: Synthetic oligonucleotide
agcaccuagugaugacccc

SEQ ID NO: 1005702 - RNA, 19 nt, Artificial Sequence
  Description of Artificial Sequence: Synthetic oligonucleotide
uucgcagcaucuacauuug

SEQ ID NO: 1005703 - RNA, 19 nt, Artificial Sequence
  Description of Artificial Sequence: Synthetic oligonucleotide
acuucgcucgcccgcuucc

SEQ ID NO: 1005704 - RNA, 19 nt, Artificial Sequence
  Description of Artificial Sequence: Synthetic oligonucleotide
ugcuaaagucuuuuagaau

SEQ ID NO: 1005705 - RNA, 19 nt, Artificial Sequence
  Description of Artificial Sequence: Synthetic oligonucleotide
auccuccccgccgagagcc

SEQ ID NO: 1005706 - RNA, 19 nt, Artificial Sequence
  Description of Artificial Sequence: Synthetic oligonucleotide
uuaggcaacuuacgggcaa

SEQ ID NO: 1005707 - RNA, 19 nt, Artificial Sequence
  Description of Artificial Sequence: Synthetic oligonucleotide
auggauaggcaaccaacgu

SEQ ID NO: 1005708 - RNA, 19 nt, Artificial Sequence
  Description of Artificial Sequence: Synthetic oligonucleotide
aguauggauaggcaaccaa

SEQ ID NO: 1005709 - RNA, 19 nt, Artificial Sequence
  Description of Artificial Sequence: Synthetic oligonucleotide
cuuauugguuuucaccuga

SEQ ID NO: 1005710 - RNA, 19 nt, Artificial Sequence
  Description of Artificial Sequence: Synthetic oligonucleotide
caaccaacguuccucuggc

SEQ ID NO: 1005711 - RNA, 19 nt, Artificial Sequence
  Description of Artificial Sequence: Synthetic oligonucleotide
uagcaaucccagauguaga

SEQ ID NO: 1005712 - RNA, 19 nt, Artificial Sequence
  Description of Artificial Sequence: Synthetic oligonucleotide
uaaaguguaucuggaggac

SEQ ID NO: 1005713 - RNA, 19 nt, Artificial Sequence
  Description of Artificial Sequence: Synthetic oligonucleotide
uccaauccaagagaugggu

SEQ ID NO: 1005714 - RNA, 19 nt, Artificial Sequence
  Description of Artificial Sequence: Synthetic oligonucleotide
uuucuuacacagcgggcaa

SEQ ID NO: 1005715 - RNA, 19 nt, Artificial Sequence
  Description of Artificial Sequence: Synthetic oligonucleotide
caagagaugggugaaucuc

SEQ ID NO: 1005716 - RNA, 19 nt, Artificial Sequence
  Description of Artificial Sequence: Synthetic oligonucleotide
agaaacgaugaaugggaaa

SEQ ID NO: 1005717 - RNA, 19 nt, Artificial Sequence
  Description of Artificial Sequence: Synthetic oligonucleotide
augaccccaccucugaagu

SEQ ID NO: 1005718 - RNA, 19 nt, Artificial Sequence
  Description of Artificial Sequence: Synthetic oligonucleotide
agcaaucccagauguagaa

SEQ ID NO: 1005719 - RNA, 19 nt, Artificial Sequence
  Description of Artificial Sequence: Synthetic oligonucleotide
gcaaccaacguuccucugg

SEQ ID NO: 1005720 - RNA, 19 nt, Artificial Sequence
  Description of Artificial Sequence: Synthetic oligonucleotide
acuagcuauugaauaaaca

SEQ ID NO: 1005721 - RNA, 19 nt, Artificial Sequence
  Description of Artificial Sequence: Synthetic oligonucleotide
aaguuacuagcuauugaau

SEQ ID NO: 1005722 - RNA, 19 nt, Artificial Sequence
  Description of Artificial Sequence: Synthetic oligonucleotide
uuacacgauucuuauucua

SEQ ID NO: 1005723 - RNA, 19 nt, Artificial Sequence
  Description of Artificial Sequence: Synthetic oligonucleotide
uaggcaaccaacguuccuc

SEQ ID NO: 1005724 - RNA, 19 nt, Artificial Sequence
  Description of Artificial Sequence: Synthetic oligonucleotide
agaguuugccaacuuguua

SEQ ID NO: 1005725 - RNA, 19 nt, Artificial Sequence
  Description of Artificial Sequence: Synthetic oligonucleotide
acaaagcaccuagugauga

SEQ ID NO: 1005726 - RNA, 19 nt, Artificial Sequence
  Description of Artificial Sequence: Synthetic oligonucleotide
acuaguauuucaguauuuu

SEQ ID NO: 1005727 - RNA, 19 nt, Artificial Sequence
  Description of Artificial Sequence: Synthetic oligonucleotide
ucuuacacagcgggcaacu

SEQ ID NO: 1005728 - RNA, 19 nt, Artificial Sequence
  Description of Artificial Sequence: Synthetic oligonucleotide
gauagagaucauugucguc

SEQ ID NO: 1005729 - RNA, 19 nt, Artificial Sequence
  Description of Artificial Sequence: Synthetic oligonucleotide
uuacacagcgggcaacuuu

SEQ ID NO: 1005730 - RNA, 19 nt, Artificial Sequence
  Description of Artificial Sequence: Synthetic oligonucleotide
cuacauccaauccaagaga

SEQ ID NO: 1005731 - RNA, 19 nt, Artificial Sequence
  Description of Artificial Sequence: Synthetic oligonucleotide
aauccaagagaugggugaa

SEQ ID NO: 1005732 - RNA, 19 nt, Artificial Sequence
  Description of Artificial Sequence: Synthetic oligonucleotide
uccaagagaugggugaauc

SEQ ID NO: 1005733 - RNA, 19 nt, Artificial Sequence
  Description of Artificial Sequence: Synthetic oligonucleotide
cuacaagaaagcauuauuu

SEQ ID NO: 1005734 - RNA, 19 nt, Artificial Sequence
  Description of Artificial Sequence: Synthetic oligonucleotide
accuagugaugaccccacc

SEQ ID NO: 1005735 - RNA, 19 nt, Artificial Sequence
  Description of Artificial Sequence: Synthetic oligonucleotide
uuguuaggcucuugucagc

SEQ ID NO: 1005736 - RNA, 19 nt, Artificial Sequence
  Description of Artificial Sequence: Synthetic oligonucleotide
ucacuaaguugaacuuaga

SEQ ID NO: 1005737 - RNA, 19 nt, Artificial Sequence
  Description of Artificial Sequence: Synthetic oligonucleotide
caccccgagaagcaccucg

SEQ ID NO: 1005738 - RNA, 19 nt, Artificial Sequence
  Description of Artificial Sequence: Synthetic oligonucleotide
agguguguggaggaacccg

SEQ ID NO: 1005739 - RNA, 19 nt, Artificial Sequence
  Description of Artificial Sequence: Synthetic oligonucleotide
caauuggagacccugaaau

SEQ ID NO: 1005740 - RNA, 19 nt, Artificial Sequence
  Description of Artificial Sequence: Synthetic oligonucleotide
uggagacccugaaauaauu

SEQ ID NO: 1005741 - RNA, 19 nt, Artificial Sequence
  Description of Artificial Sequence: Synthetic oligonucleotide
gcagauagaagagauaaaa

SEQ ID NO: 1005742 - RNA, 19 nt, Artificial Sequence
  Description of Artificial Sequence: Synthetic oligonucleotide
gggacaagcucugacggcg

SEQ ID NO: 1005743 - RNA, 19 nt, Artificial Sequence
  Description of Artificial Sequence: Synthetic oligonucleotide
ggauaggcaaccaacguuc

SEQ ID NO: 1005744 - RNA, 19 nt, Artificial Sequence
  Description of Artificial Sequence: Synthetic oligonucleotide
caccucugaagucaucgug

SEQ ID NO: 1005745 - RNA, 19 nt, Artificial Sequence
  Description of Artificial Sequence: Synthetic oligonucleotide
auguugugcuauguacagg

SEQ ID NO: 1005746 - RNA, 19 nt, Artificial Sequence
  Description of Artificial Sequence: Synthetic oligonucleotide
aagaaacgaugaaugggaa

SEQ ID NO: 1005747 - RNA, 19 nt, Artificial Sequence
  Description of Artificial Sequence: Synthetic oligonucleotide
cuucgcaguagcagcgcag

SEQ ID NO: 1005748 - RNA, 19 nt, Artificial Sequence
  Description of Artificial Sequence: Synthetic oligonucleotide
caaagcaccuagugaugac

SEQ ID NO: 1005749 - RNA, 19 nt, Artificial Sequence
  Description of Artificial Sequence: Synthetic oligonucleotide
auuugguacaagguguguu

SEQ ID NO: 1005750 - RNA, 19 nt, Artificial Sequence
  Description of Artificial Sequence: Synthetic oligonucleotide
auccaauccaagagauggg

SEQ ID NO: 1005751 - RNA, 19 nt, Artificial Sequence
  Description of Artificial Sequence: Synthetic oligonucleotide
acagcgggcaacuuuccuu

SEQ ID NO: 1005752 - RNA, 19 nt, Artificial Sequence
  Description of Artificial Sequence: Synthetic oligonucleotide
cacuuguuaggcucuuguc

SEQ ID NO: 1005753 - RNA, 19 nt, Artificial Sequence
  Description of Artificial Sequence: Synthetic oligonucleotide
aggcaaccaacguuccucu

SEQ ID NO: 1005754 - RNA, 19 nt, Artificial Sequence
  Description of Artificial Sequence: Synthetic oligonucleotide
aauagcaaucccagaugua

SEQ ID NO: 1005755 - RNA, 19 nt, Artificial Sequence
  Description of Artificial Sequence: Synthetic oligonucleotide
gacaagcucugacggcggc

SEQ ID NO: 1005756 - RNA, 19 nt, Artificial Sequence
  Description of Artificial Sequence: Synthetic oligonucleotide
ucccuccacucuuucgcag

SEQ ID NO: 1005757 - RNA, 19 nt, Artificial Sequence
  Description of Artificial Sequence: Synthetic oligonucleotide
ugaugaccccaccucugaa

SEQ ID NO: 1005758 - RNA, 19 nt, Artificial Sequence
  Description of Artificial Sequence: Synthetic oligonucleotide
aguuggcacuuguuaggcu

SEQ ID NO: 1005759 - RNA, 19 nt, Artificial Sequence
  Description of Artificial Sequence: Synthetic oligonucleotide
augcgaguccgcuccgcuc

SEQ ID NO: 1005760 - RNA, 19 nt, Artificial Sequence
  Description of Artificial Sequence: Synthetic oligonucleotide
cucgcugccgaugcgaguc

SEQ ID NO: 1005761 - RNA, 19 nt, Artificial Sequence
  Description of Artificial Sequence: Synthetic oligonucleotide
cugacaugcuuuaaggaau

SEQ ID NO: 1005762 - RNA, 19 nt, Artificial Sequence
  Description of Artificial Sequence: Synthetic oligonucleotide
ucgcagcaucuacauuugc

SEQ ID NO: 1005763 - RNA, 19 nt, Artificial Sequence
  Description of Artificial Sequence: Synthetic oligonucleotide
aucaacauuugggugccaa

SEQ ID NO: 1005764 - RNA, 19 nt, Artificial Sequence
  Description of Artificial Sequence: Synthetic oligonucleotide
gaaagugagaugagccuua

SEQ ID NO: 1005765 - RNA, 19 nt, Artificial Sequence
  Description of Artificial Sequence: Synthetic oligonucleotide
caccuagugaugaccccac

SEQ ID NO: 1005766 - RNA, 19 nt, Artificial Sequence
  Description of Artificial Sequence: Synthetic oligonucleotide
gccgaugcgaguccgcucc

SEQ ID NO: 1005767 - RNA, 19 nt, Artificial Sequence
  Description of Artificial Sequence: Synthetic oligonucleotide
cucaauuggagacccugaa

SEQ ID NO: 1005768 - RNA, 19 nt, Artificial Sequence
  Description of Artificial Sequence: Synthetic oligonucleotide
ggagacccugaaauaauug

SEQ ID NO: 1005769 - RNA, 19 nt, Artificial Sequence
  Description of Artificial Sequence: Synthetic oligonucleotide
cugauaagaaacgaugaau

SEQ ID NO: 1005770 - RNA, 19 nt, Artificial Sequence
  Description of Artificial Sequence: Synthetic oligonucleotide
cacgauucuuauucuacua

SEQ ID NO: 1005771 - RNA, 19 nt, Artificial Sequence
  Description of Artificial Sequence: Synthetic oligonucleotide
uucuuacacagcgggcaac

SEQ ID NO: 1005772 - RNA, 19 nt, Artificial Sequence
  Description of Artificial Sequence: Synthetic oligonucleotide
ugcuauguacaggucuuua

SEQ ID NO: 1005773 - RNA, 19 nt, Artificial Sequence
  Description of Artificial Sequence: Synthetic oligonucleotide
gagcuagguguguggagga

SEQ ID NO: 1005774 - RNA, 19 nt, Artificial Sequence
  Description of Artificial Sequence: Synthetic oligonucleotide
gcauuaaugacuggcaugu

SEQ ID NO: 1005775 - RNA, 19 nt, Artificial Sequence
  Description of Artificial Sequence: Synthetic oligonucleotide
cuggggcaccccgagaagc

SEQ ID NO: 1005776 - RNA, 19 nt, Artificial Sequence
  Description of Artificial Sequence: Synthetic oligonucleotide
auuaggcaacuuacgggca

SEQ ID NO: 1005777 - RNA, 19 nt, Artificial Sequence
  Description of Artificial Sequence: Synthetic oligonucleotide
gaaggguaagaggacaaau

SEQ ID NO: 1005778 - RNA, 19 nt, Artificial Sequence
  Description of Artificial Sequence: Synthetic oligonucleotide
cucacgcccggaaggggag

SEQ ID NO: 1005779 - RNA, 19 nt, Artificial Sequence
  Description of Artificial Sequence: Synthetic oligonucleotide
uggagcgccgaagccgcgg

SEQ ID NO: 1005780 - RNA, 19 nt, Artificial Sequence
  Description of Artificial Sequence: Synthetic oligonucleotide
cugggacuucgcucgcccg

SEQ ID NO: 1005781 - RNA, 19 nt, Artificial Sequence
  Description of Artificial Sequence: Synthetic oligonucleotide
ggggaggguaccccggccg

SEQ ID NO: 1005782 - RNA, 19 nt, Artificial Sequence
  Description of Artificial Sequence: Synthetic oligonucleotide
guuuucaccugacaugcuu

SEQ ID NO: 1005783 - RNA, 19 nt, Artificial Sequence
  Description of Artificial Sequence: Synthetic oligonucleotide
ggaacuggggacaagcucu

SEQ ID NO: 1005784 - RNA, 19 nt, Artificial Sequence
  Description of Artificial Sequence: Synthetic oligonucleotide
caucgauagagaucauugu

SEQ ID NO: 1005785 - RNA, 19 nt, Artificial Sequence
  Description of Artificial Sequence: Synthetic oligonucleotide
ccgcuuuccucucagcgcc

SEQ ID NO: 1005786 - RNA, 19 nt, Artificial Sequence
  Description of Artificial Sequence: Synthetic oligonucleotide
ccuuauugguuuucaccug

SEQ ID NO: 1005787 - RNA, 19 nt, Artificial Sequence
  Description of Artificial Sequence: Synthetic oligonucleotide
ucgcaguagcagcgcagac

SEQ ID NO: 1005788 - RNA, 19 nt, Artificial Sequence
  Description of Artificial Sequence: Synthetic oligonucleotide
ucgcccgcuucccuccuca

SEQ ID NO: 1005789 - RNA, 19 nt, Artificial Sequence
  Description of Artificial Sequence: Synthetic oligonucleotide
cucaguacaaaaggacaaa

SEQ ID NO: 1005790 - RNA, 19 nt, Artificial Sequence
  Description of Artificial Sequence: Synthetic oligonucleotide
uccggaucauguugugcua

SEQ ID NO: 1005791 - RNA, 19 nt, Artificial Sequence
  Description of Artificial Sequence: Synthetic oligonucleotide
agagaucauugucgucuau

SEQ ID NO: 1005792 - RNA, 19 nt, Artificial Sequence
  Description of Artificial Sequence: Synthetic oligonucleotide
agcgccgaagccgcgggag

SEQ ID NO: 1005793 - RNA, 19 nt, Artificial Sequence
  Description of Artificial Sequence: Synthetic oligonucleotide
uucgaggaacuggggacaa

SEQ ID NO: 1005794 - RNA, 19 nt, Artificial Sequence
  Description of Artificial Sequence: Synthetic oligonucleotide
cugugcaugcuuuauucau

SEQ ID NO: 1005795 - RNA, 19 nt, Artificial Sequence
  Description of Artificial Sequence: Synthetic oligonucleotide
ggugccaaaucucuguaau

SEQ ID NO: 1005796 - RNA, 19 nt, Artificial Sequence
  Description of Artificial Sequence: Synthetic oligonucleotide
gggaaagugagaugagccu

SEQ ID NO: 1005797 - RNA, 19 nt, Artificial Sequence
  Description of Artificial Sequence: Synthetic oligonucleotide
gacuucgcucgcccgcuuc

SEQ ID NO: 1005798 - RNA, 19 nt, Artificial Sequence
  Description of Artificial Sequence: Synthetic oligonucleotide
gcugugcaugcuuuauuca

SEQ ID NO: 1005799 - RNA, 19 nt, Artificial Sequence
  Description of Artificial Sequence: Synthetic oligonucleotide
acaagcucugacggcggcu

SEQ ID NO: 1005800 - RNA, 19 nt, Artificial Sequence
  Description of Artificial Sequence: Synthetic oligonucleotide
ggaccaauaauaaggacuu

SEQ ID NO: 1005801 - RNA, 19 nt, Artificial Sequence
  Description of Artificial Sequence: Synthetic oligonucleotide
cgauucuuauucuacuaca

SEQ ID NO: 1005802 - RNA, 19 nt, Artificial Sequence
  Description of Artificial Sequence: Synthetic oligonucleotide
ucgaggaacuggggacaag

SEQ ID NO: 1005803 - RNA, 19 nt, Artificial Sequence
  Description of Artificial Sequence: Synthetic oligonucleotide
gaugcgaguccgcuccgcu

SEQ ID NO: 1005804 - RNA, 19 nt, Artificial Sequence
  Description of Artificial Sequence: Synthetic oligonucleotide
cucugacggcggcuggagc

SEQ ID NO: 1005805 - RNA, 19 nt, Artificial Sequence
  Description of Artificial Sequence: Synthetic oligonucleotide
guuugccaacuuguuacaa

SEQ ID NO: 1005806 - RNA, 19 nt, Artificial Sequence
  Description of Artificial Sequence: Synthetic oligonucleotide
ucacgcccggaaggggagg

SEQ ID NO: 1005807 - RNA, 19 nt, Artificial Sequence
  Description of Artificial Sequence: Synthetic oligonucleotide
ggggacaagcucugacggc

SEQ ID NO: 1005808 - RNA, 19 nt, Artificial Sequence
  Description of Artificial Sequence: Synthetic oligonucleotide
ggaaacuuuuaauccuuau

SEQ ID NO: 1005809 - RNA, 19 nt, Artificial Sequence
  Description of Artificial Sequence: Synthetic oligonucleotide
cauccuccccgccgagagc

SEQ ID NO: 1005810 - RNA, 19 nt, Artificial Sequence
  Description of Artificial Sequence: Synthetic oligonucleotide
aguguaucuggaggaccaa

SEQ ID NO: 1005811 - RNA, 19 nt, Artificial Sequence
  Description of Artificial Sequence: Synthetic oligonucleotide
ugccgaugcgaguccgcuc

SEQ ID NO: 1005812 - RNA, 19 nt, Artificial Sequence
  Description of Artificial Sequence: Synthetic oligonucleotide
uccgcuccgcuuuccucuc

SEQ ID NO: 1005813 - RNA, 19 nt, Artificial Sequence
  Description of Artificial Sequence: Synthetic oligonucleotide
cuucgcucgcccgcuuccc

SEQ ID NO: 1005814 - RNA, 19 nt, Artificial Sequence
  Description of Artificial Sequence: Synthetic oligonucleotide
aggaacccgggccccgcga

SEQ ID NO: 1005815 - RNA, 19 nt, Artificial Sequence
  Description of Artificial Sequence: Synthetic oligonucleotide
cagcauuaaugacuggcau

SEQ ID NO: 1005816 - RNA, 19 nt, Artificial Sequence
  Description of Artificial Sequence: Synthetic oligonucleotide
gcaccuagugaugacccca

SEQ ID NO: 1005817 - RNA, 19 nt, Artificial Sequence
  Description of Artificial Sequence: Synthetic oligonucleotide
caguauggauaggcaacca

SEQ ID NO: 1005818 - RNA, 19 nt, Artificial Sequence
  Description of Artificial Sequence: Synthetic oligonucleotide
gcacuuguuaggcucuugu

SEQ ID NO: 1005819 - RNA, 19 nt, Artificial Sequence
  Description of Artificial Sequence: Synthetic oligonucleotide
gggaggguaccccggccgc

SEQ ID NO: 1005820 - RNA, 19 nt, Artificial Sequence
  Description of Artificial Sequence: Synthetic oligonucleotide
gggugaaucucaguacaaa

SEQ ID NO: 1005821 - RNA, 19 nt, Artificial Sequence
  Description of Artificial Sequence: Synthetic oligonucleotide
cuggagcgccgaagccgcg

SEQ ID NO: 1005822 - RNA, 19 nt, Artificial Sequence
  Description of Artificial Sequence: Synthetic oligonucleotide
gcuccgucauccuccccgc

SEQ ID NO: 1005823 - RNA, 19 nt, Artificial Sequence
  Description of Artificial Sequence: Synthetic oligonucleotide
cacucuuucgcagcaucua

SEQ ID NO: 1005824 - RNA, 19 nt, Artificial Sequence
  Description of Artificial Sequence: Synthetic oligonucleotide
guagcugugcaugcuuuau

SEQ ID NO: 1005825 - RNA, 19 nt, Artificial Sequence
  Description of Artificial Sequence: Synthetic oligonucleotide
gguaccccggccgccgcgg

SEQ ID NO: 1005826 - RNA, 19 nt, Artificial Sequence
  Description of Artificial Sequence: Synthetic oligonucleotide
ccagcaauagguggguaga

SEQ ID NO: 1005827 - RNA, 19 nt, Artificial Sequence
  Description of Artificial Sequence: Synthetic oligonucleotide
cagaguuugccaacuuguu

SEQ ID NO: 1005828 - RNA, 19 nt, Artificial Sequence
  Description of Artificial Sequence: Synthetic oligonucleotide
cuccccgccgagagcccag

SEQ ID NO: 1005829 - RNA, 19 nt, Artificial Sequence
  Description of Artificial Sequence: Synthetic oligonucleotide
ggaacccgggccccgcgac

SEQ ID NO: 1005830 - RNA, 19 nt, Artificial Sequence
  Description of Artificial Sequence: Synthetic oligonucleotide
acggcggcuggagcuaggu

SEQ ID NO: 1005831 - RNA, 19 nt, Artificial Sequence
  Description of Artificial Sequence: Synthetic oligonucleotide
agcgggcaacuuuccuuuu

SEQ ID NO: 1005832 - RNA, 19 nt, Artificial Sequence
  Description of Artificial Sequence: Synthetic oligonucleotide
ccuagugaugaccccaccu

SEQ ID NO: 1005833 - RNA, 19 nt, Artificial Sequence
  Description of Artificial Sequence: Synthetic oligonucleotide
ggaucauguugugcuaugu

SEQ ID NO: 1005834 - RNA, 19 nt, Artificial Sequence
  Description of Artificial Sequence: Synthetic oligonucleotide
ccaagagaugggugaaucu

SEQ ID NO: 1005835 - RNA, 19 nt, Artificial Sequence
  Description of Artificial Sequence: Synthetic oligonucleotide
gaguccgcuccgcuccgcu

SEQ ID NO: 1005836 - RNA, 19 nt, Artificial Sequence
  Description of Artificial Sequence: Synthetic oligonucleotide
ggcgcgcacugggacuucg

SEQ ID NO: 1005837 - RNA, 19 nt, Artificial Sequence
  Description of Artificial Sequence: Synthetic oligonucleotide
gguaaucuuuugggaaagu

SEQ ID NO: 1005838 - RNA, 19 nt, Artificial Sequence
  Description of Artificial Sequence: Synthetic oligonucleotide
gcgaguccgcuccgcuccg

SEQ ID NO: 1005839 - RNA, 19 nt, Artificial Sequence
  Description of Artificial Sequence: Synthetic oligonucleotide
ucagcgccucacgcccgga

SEQ ID NO: 1005840 - RNA, 19 nt, Artificial Sequence
  Description of Artificial Sequence: Synthetic oligonucleotide
gcguaaucaucuguaaguu

SEQ ID NO: 1005841 - RNA, 19 nt, Artificial Sequence
  Description of Artificial Sequence: Synthetic oligonucleotide
ccauuagggucugccagca

SEQ ID NO: 1005842 - RNA, 19 nt, Artificial Sequence
  Description of Artificial Sequence: Synthetic oligonucleotide
cacagcgggcaacuuuccu

SEQ ID NO: 1005843 - RNA, 19 nt, Artificial Sequence
  Description of Artificial Sequence: Synthetic oligonucleotide
ggaggguaccccggccgcc

SEQ ID NO: 1005844 - RNA, 19 nt, Artificial Sequence
  Description of Artificial Sequence: Synthetic oligonucleotide
gaacccgggccccgcgacu

SEQ ID NO: 1005845 - RNA, 19 nt, Artificial Sequence
  Description of Artificial Sequence: Synthetic oligonucleotide
caucuguaaguuggcacuu

SEQ ID NO: 1005846 - RNA, 19 nt, Artificial Sequence
  Description of Artificial Sequence: Synthetic oligonucleotide
gccucacgcccggaagggg

SEQ ID NO: 1005847 - RNA, 19 nt, Artificial Sequence
  Description of Artificial Sequence: Synthetic oligonucleotide
cagcuccgucauccucccc

SEQ ID NO: 1005848 - RNA, 19 nt, Artificial Sequence
  Description of Artificial Sequence: Synthetic oligonucleotide
ccggaaggggaggguaccc

SEQ ID NO: 1005849 - RNA, 19 nt, Artificial Sequence
  Description of Artificial Sequence: Synthetic oligonucleotide
cucgcccgcuucccuccuc

SEQ ID NO: 1005850 - RNA, 19 nt, Artificial Sequence
  Description of Artificial Sequence: Synthetic oligonucleotide
ccgaugcgaguccgcuccg

SEQ ID NO: 1005851 - RNA, 19 nt, Artificial Sequence
  Description of Artificial Sequence: Synthetic oligonucleotide
gaagccgcgggaggccggu

SEQ ID NO: 1005852 - RNA, 19 nt, Artificial Sequence
  Description of Artificial Sequence: Synthetic oligonucleotide
gccgcgggaggccggucug

SEQ ID NO: 1005853 - RNA, 19 nt, Artificial Sequence
  Description of Artificial Sequence: Synthetic oligonucleotide
cguggaaaaucaaguaauu

SEQ ID NO: 1005854 - RNA, 19 nt, Artificial Sequence
  Description of Artificial Sequence: Synthetic oligonucleotide
cgccucacgcccggaaggg

SEQ ID NO: 1005855 - RNA, 19 nt, Artificial Sequence
  Description of Artificial Sequence: Synthetic oligonucleotide
cagcgccucacgcccggaa

SEQ ID NO: 1005856 - RNA, 19 nt, Artificial Sequence
  Description of Artificial Sequence: Synthetic oligonucleotide
cauuaaugacuggcauguu

SEQ ID NO: 1005857 - RNA, 19 nt, Artificial Sequence
  Description of Artificial Sequence: Synthetic oligonucleotide
cauuagggucugccagcau

SEQ ID NO: 1005858 - RNA, 19 nt, Artificial Sequence
  Description of Artificial Sequence: Synthetic oligonucleotide
gguuuucaccugacaugcu

SEQ ID NO: 1005859 - RNA, 19 nt, Artificial Sequence
  Description of Artificial Sequence: Synthetic oligonucleotide
cuuacacagcgggcaacuu

SEQ ID NO: 1005860 - RNA, 19 nt, Artificial Sequence
  Description of Artificial Sequence: Synthetic oligonucleotide
ccaccuucguaaaguguau

SEQ ID NO: 1005861 - RNA, 19 nt, Artificial Sequence
  Description of Artificial Sequence: Synthetic oligonucleotide
gggacuucgcucgcccgcu

SEQ ID NO: 1005862 - RNA, 19 nt, Artificial Sequence
  Description of Artificial Sequence: Synthetic oligonucleotide
ccccgcgacuggagcgccg

SEQ ID NO: 1005863 - RNA, 19 nt, Artificial Sequence
  Description of Artificial Sequence: Synthetic oligonucleotide
cgcugccgaugcgaguccg

SEQ ID NO: 1005864 - RNA, 19 nt, Artificial Sequence
  Description of Artificial Sequence: Synthetic oligonucleotide
gcgcgcacugggacuucgc

SEQ ID NO: 1005865 - RNA, 19 nt, Artificial Sequence
  Description of Artificial Sequence: Synthetic oligonucleotide
cgccggggcuucgaggaac

SEQ ID NO: 1005866 - RNA, 19 nt, Artificial Sequence
  Description of Artificial Sequence: Synthetic oligonucleotide
gccccgcgacuggagcgcc

SEQ ID NO: 1005867 - RNA, 19 nt, Artificial Sequence
  Description of Artificial Sequence: Synthetic oligonucleotide
cccgccgagagcccaggcu

SEQ ID NO: 1005868 - RNA, 19 nt, Artificial Sequence
  Description of Artificial Sequence: Synthetic oligonucleotide
ccggaucauguugugcuau

SEQ ID NO: 1005869 - RNA, 19 nt, Artificial Sequence
  Description of Artificial Sequence: Synthetic oligonucleotide
cccgcgacuggagcgccga

SEQ ID NO: 1005870 - RNA, 19 nt, Artificial Sequence
  Description of Artificial Sequence: Synthetic oligonucleotide
gccggggcuucgaggaacu

SEQ ID NO: 1005871 - RNA, 19 nt, Artificial Sequence
  Description of Artificial Sequence: Synthetic oligonucleotide
ccggggcuucgaggaacug

SEQ ID NO: 1005872 - RNA, 19 nt, Artificial Sequence
  Description of Artificial Sequence: Synthetic oligonucleotide
cgaguccgcuccgcuccgc

SEQ ID NO: 1005873 - RNA, 19 nt, Artificial Sequence
  Description of Artificial Sequence: Synthetic oligonucleotide
cgcgcacugggacuucgcu

SEQ ID NO: 1005874 - RNA, 19 nt, Artificial Sequence
  Description of Artificial Sequence: Synthetic oligonucleotide
ccucgcugccgaugcgagu

SEQ ID NO: 1005875 - RNA, 19 nt, Artificial Sequence
  Description of Artificial Sequence: Synthetic oligonucleotide
ggacuucgcucgcccgcuu

SEQ ID NO: 1005876 - RNA, 19 nt, Artificial Sequence
  Description of Artificial Sequence: Synthetic oligonucleotide
cgcuccgcuccgcuuuccu

SEQ ID NO: 1005877 - RNA, 19 nt, Artificial Sequence
  Description of Artificial Sequence: Synthetic oligonucleotide
ccgcgacuggagcgccgaa

SEQ ID NO: 1005878 - RNA, 19 nt, Artificial Sequence
  Description of Artificial Sequence: Synthetic oligonucleotide
cggcgcgcacugggacuuc

SEQ ID NO: 1005879 - RNA, 19 nt, Artificial Sequence
  Description of Artificial Sequence: Synthetic oligonucleotide
aaaccuaugauauuaauag

SEQ ID NO: 1005880 - RNA, 19 nt, Artificial Sequence
  Description of Artificial Sequence: Synthetic oligonucleotide
uuaguauugaacuaagagc

SEQ ID NO: 1005881 - RNA, 19 nt, Artificial Sequence
  Description of Artificial Sequence: Synthetic oligonucleotide
uuguauaaugcucaaagag

SEQ ID NO: 1005882 - RNA, 19 nt, Artificial Sequence
  Description of Artificial Sequence: Synthetic oligonucleotide
gaugaauugguaaagaccc

SEQ ID NO: 1005883 - RNA, 19 nt, Artificial Sequence
  Description of Artificial Sequence: Synthetic oligonucleotide
aauaauuucagcgaaucug

SEQ ID NO: 1005884 - RNA, 19 nt, Artificial Sequence
  Description of Artificial Sequence: Synthetic oligonucleotide
uauauuaauccauauauaa

SEQ ID NO: 1005885 - RNA, 19 nt, Artificial Sequence
  Description of Artificial Sequence: Synthetic oligonucleotide
uuucgaaugagucacaaac

SEQ ID NO: 1005886 - RNA, 19 nt, Artificial Sequence
  Description of Artificial Sequence: Synthetic oligonucleotide
ucuaaaugugcccauuucg

SEQ ID NO: 1005887 - RNA, 19 nt, Artificial Sequence
  Description of Artificial Sequence: Synthetic oligonucleotide
uuuacugaagcgaaguaag

SEQ ID NO: 1005888 - RNA, 19 nt, Artificial Sequence
  Description of Artificial Sequence: Synthetic oligonucleotide
cuuaguauugaacuaagag

SEQ ID NO: 1005889 - RNA, 19 nt, Artificial Sequence
  Description of Artificial Sequence: Synthetic oligonucleotide
uguauaaugcucaaagaga

SEQ ID NO: 1005890 - RNA, 19 nt, Artificial Sequence
  Description of Artificial Sequence: Synthetic oligonucleotide
agauuuucaugacucaagc

SEQ ID NO: 1005891 - RNA, 19 nt, Artificial Sequence
  Description of Artificial Sequence: Synthetic oligonucleotide
aaugaaaguaaaagaacac

SEQ ID NO: 1005892 - RNA, 19 nt, Artificial Sequence
  Description of Artificial Sequence: Synthetic oligonucleotide
uuuauuaguuuaaaggguc

SEQ ID NO: 1005893 - RNA, 19 nt, Artificial Sequence
  Description of Artificial Sequence: Synthetic oligonucleotide
aagaacucaaucagggucc

SEQ ID NO: 1005894 - RNA, 19 nt, Artificial Sequence
  Description of Artificial Sequence: Synthetic oligonucleotide
augaaaguaaaagaacacc

SEQ ID NO: 1005895 - RNA, 19 nt, Artificial Sequence
  Description of Artificial Sequence: Synthetic oligonucleotide
accuaugauauuaauaggc

SEQ ID NO: 1005896 - RNA, 19 nt, Artificial Sequence
  Description of Artificial Sequence: Synthetic oligonucleotide
uuauaagauguuuuauuag

SEQ ID NO: 1005897 - RNA, 19 nt, Artificial Sequence
  Description of Artificial Sequence: Synthetic oligonucleotide
auuaauaggcaaauugagc

SEQ ID NO: 1005898 - RNA, 19 nt, Artificial Sequence
  Description of Artificial Sequence: Synthetic oligonucleotide
uguggagagaccccgaucc

SEQ ID NO: 1005899 - RNA, 19 nt, Artificial Sequence
  Description of Artificial Sequence: Synthetic oligonucleotide
aaagaggaccccucucucc

SEQ ID NO: 1005900 - RNA, 19 nt, Artificial Sequence
  Description of Artificial Sequence: Synthetic oligonucleotide
aagaggaccccucucuccc

SEQ ID NO: 1005901 - RNA, 19 nt, Artificial Sequence
  Description of Artificial Sequence: Synthetic oligonucleotide
ugcauaacagagugcaucg

SEQ ID NO: 1005902 - RNA, 19 nt, Artificial Sequence
  Description of Artificial Sequence: Synthetic oligonucleotide
aaccuaugauauuaauagg

SEQ ID NO: 1005903 - RNA, 19 nt, Artificial Sequence
  Description of Artificial Sequence: Synthetic oligonucleotide
aaacucauagagaccaagc

SEQ ID NO: 1005904 - RNA, 19 nt, Artificial Sequence
  Description of Artificial Sequence: Synthetic oligonucleotide
uugaucgccacuuccauag

SEQ ID NO: 1005905 - RNA, 19 nt, Artificial Sequence
  Description of Artificial Sequence: Synthetic oligonucleotide
guauaaugcucaaagagag

SEQ ID NO: 1005906 - RNA, 19 nt, Artificial Sequence
  Description of Artificial Sequence: Synthetic oligonucleotide
uagauuuucaugacucaag

SEQ ID NO: 1005907 - RNA, 19 nt, Artificial Sequence
  Description of Artificial Sequence: Synthetic oligonucleotide
uugucuuguauaaugcuca

SEQ ID NO: 1005908 - RNA, 19 nt, Artificial Sequence
  Description of Artificial Sequence: Synthetic oligonucleotide
agcauacuaauuuugaaaa

SEQ ID NO: 1005909 - RNA, 19 nt, Artificial Sequence
  Description of Artificial Sequence: Synthetic oligonucleotide
gaaugagucacaaacuccc

SEQ ID NO: 1005910 - RNA, 19 nt, Artificial Sequence
  Description of Artificial Sequence: Synthetic oligonucleotide
ucaagcauacuaauuuuga

SEQ ID NO: 1005911 - RNA, 19 nt, Artificial Sequence
  Description of Artificial Sequence: Synthetic oligonucleotide
aguaaaagaacaccacuca

SEQ ID NO: 1005912 - RNA, 19 nt, Artificial Sequence
  Description of Artificial Sequence: Synthetic oligonucleotide
aaccugaaugguuuucccg

SEQ ID NO: 1005913 - RNA, 19 nt, Artificial Sequence
  Description of Artificial Sequence: Synthetic oligonucleotide
ucuuguuccucuauccaag

SEQ ID NO: 1005914 - RNA, 19 nt, Artificial Sequence
  Description of Artificial Sequence: Synthetic oligonucleotide
uguuccucuauccaagacu

SEQ ID NO: 1005915 - RNA, 19 nt, Artificial Sequence
  Description of Artificial Sequence: Synthetic oligonucleotide
agacgucucacucccaggc

SEQ ID NO: 1005916 - RNA, 19 nt, Artificial Sequence
  Description of Artificial Sequence: Synthetic oligonucleotide
gauggagauaccuccacug

SEQ ID NO: 1005917 - RNA, 19 nt, Artificial Sequence
  Description of Artificial Sequence: Synthetic oligonucleotide
augagucacaaacucccgc

SEQ ID NO: 1005918 - RNA, 19 nt, Artificial Sequence
  Description of Artificial Sequence: Synthetic oligonucleotide
uuaucaaccugaaugguuu

SEQ ID NO: 1005919 - RNA, 19 nt, Artificial Sequence
  Description of Artificial Sequence: Synthetic oligonucleotide
auuugcagaagccuugaug

SEQ ID NO: 1005920 - RNA, 19 nt, Artificial Sequence
  Description of Artificial Sequence: Synthetic oligonucleotide
acaauggccgagcauauug

SEQ ID NO: 1005921 - RNA, 19 nt, Artificial Sequence
  Description of Artificial Sequence: Synthetic oligonucleotide
cuuucaauaauuucagcga

SEQ ID NO: 1005922 - RNA, 19 nt, Artificial Sequence
  Description of Artificial Sequence: Synthetic oligonucleotide
ucgaaugagucacaaacuc

SEQ ID NO: 1005923 - RNA, 19 nt, Artificial Sequence
  Description of Artificial Sequence: Synthetic oligonucleotide
ugcacuuguaaacuguggu

SEQ ID NO: 1005924 - RNA, 19 nt, Artificial Sequence
  Description of Artificial Sequence: Synthetic oligonucleotide
acucaugccuuuccgaagg

SEQ ID NO: 1005925 - RNA, 19 nt, Artificial Sequence
  Description of Artificial Sequence: Synthetic oligonucleotide
cuugggucugauauggacc

SEQ ID NO: 1005926 - RNA, 19 nt, Artificial Sequence
  Description of Artificial Sequence: Synthetic oligonucleotide
ucuacaacuugucuuguau

SEQ ID NO: 1005927 - RNA, 19 nt, Artificial Sequence
  Description of Artificial Sequence: Synthetic oligonucleotide
cauaacagagugcaucggc

SEQ ID NO: 1005928 - RNA, 19 nt, Artificial Sequence
  Description of Artificial Sequence: Synthetic oligonucleotide
acuacuggcauguuugaga

SEQ ID NO: 1005929 - RNA, 19 nt, Artificial Sequence
  Description of Artificial Sequence: Synthetic oligonucleotide
cauguuugagauuucuuuc

SEQ ID NO: 1005930 - RNA, 19 nt, Artificial Sequence
  Description of Artificial Sequence: Synthetic oligonucleotide
cuugucuuguauaaugcuc

SEQ ID NO: 1005931 - RNA, 19 nt, Artificial Sequence
  Description of Artificial Sequence: Synthetic oligonucleotide
uucgaaugagucacaaacu

SEQ ID NO: 1005932 - RNA, 19 nt, Artificial Sequence
  Description of Artificial Sequence: Synthetic oligonucleotide
uguuaagguggcagcauug

SEQ ID NO: 1005933 - RNA, 19 nt, Artificial Sequence
  Description of Artificial Sequence: Synthetic oligonucleotide
aacagagugcaucggccag

SEQ ID NO: 1005934 - RNA, 19 nt, Artificial Sequence
  Description of Artificial Sequence: Synthetic oligonucleotide
aagggucuauauuaaucca

SEQ ID NO: 1005935 - RNA, 19 nt, Artificial Sequence
  Description of Artificial Sequence: Synthetic oligonucleotide
ggcaaauugagcuuugcug

SEQ ID NO: 1005936 - RNA, 19 nt, Artificial Sequence
  Description of Artificial Sequence: Synthetic oligonucleotide
ucaugacucaagcauacua

SEQ ID NO: 1005937 - RNA, 19 nt, Artificial Sequence
  Description of Artificial Sequence: Synthetic oligonucleotide
aacaucgccugguuuguug

SEQ ID NO: 1005938 - RNA, 19 nt, Artificial Sequence
  Description of Artificial Sequence: Synthetic oligonucleotide
agacuugggucugauaugg

SEQ ID NO: 1005939 - RNA, 19 nt, Artificial Sequence
  Description of Artificial Sequence: Synthetic oligonucleotide
uggccgagcauauuguugc

SEQ ID NO: 1005940 - RNA, 19 nt, Artificial Sequence
  Description of Artificial Sequence: Synthetic oligonucleotide
ucuuaguauugaacuaaga

SEQ ID NO: 1005941 - RNA, 19 nt, Artificial Sequence
  Description of Artificial Sequence: Synthetic oligonucleotide
uaaggaacgagcccauuuc

SEQ ID NO: 1005942 - RNA, 19 nt, Artificial Sequence
  Description of Artificial Sequence: Synthetic oligonucleotide
uuucagcgaaucugguugg

SEQ ID NO: 1005943 - RNA, 19 nt, Artificial Sequence
  Description of Artificial Sequence: Synthetic oligonucleotide
auauuuugaagcccaaaua

SEQ ID NO: 1005944 - RNA, 19 nt, Artificial Sequence
  Description of Artificial Sequence: Synthetic oligonucleotide
auauggaccucuguuuuac

SEQ ID NO: 1005945 - RNA, 19 nt, Artificial Sequence
  Description of Artificial Sequence: Synthetic oligonucleotide
aagguucggguuuugccug

SEQ ID NO: 1005946 - RNA, 19 nt, Artificial Sequence
  Description of Artificial Sequence: Synthetic oligonucleotide
agaucgguauuuuccaaug

SEQ ID NO: 1005947 - RNA, 19 nt, Artificial Sequence
  Description of Artificial Sequence: Synthetic oligonucleotide
uguaguggauuuccaagaa

SEQ ID NO: 1005948 - RNA, 19 nt, Artificial Sequence
  Description of Artificial Sequence: Synthetic oligonucleotide
cagucuacaacuugucuug

SEQ ID NO: 1005949 - RNA, 19 nt, Artificial Sequence
  Description of Artificial Sequence: Synthetic oligonucleotide
accucuguuuuacuacugg

SEQ ID NO: 1005950 - RNA, 19 nt, Artificial Sequence
  Description of Artificial Sequence: Synthetic oligonucleotide
gccucaaauaguuuguucc

SEQ ID NO: 1005951 - RNA, 19 nt, Artificial Sequence
  Description of Artificial Sequence: Synthetic oligonucleotide
cuaaaugugcccauuucga

SEQ ID NO: 1005952 - RNA, 19 nt, Artificial Sequence
  Description of Artificial Sequence: Synthetic oligonucleotide
auguuauugacaucagcaa

SEQ ID NO: 1005953 - RNA, 19 nt, Artificial Sequence
  Description of Artificial Sequence: Synthetic oligonucleotide
agucacaaacucccgcagg

SEQ ID NO: 1005954 - RNA, 19 nt, Artificial Sequence
  Description of Artificial Sequence: Synthetic oligonucleotide
uggagaaauuucuuaguau

SEQ ID NO: 1005955 - RNA, 19 nt, Artificial Sequence
  Description of Artificial Sequence: Synthetic oligonucleotide
acuuccauagagcuucgcu

SEQ ID NO: 1005956 - RNA, 19 nt, Artificial Sequence
  Description of Artificial Sequence: Synthetic oligonucleotide
uucgucaugucugcugugg

SEQ ID NO: 1005957 - RNA, 19 nt, Artificial Sequence
  Description of Artificial Sequence: Synthetic oligonucleotide
acaucgccugguuuguugg

SEQ ID NO: 1005958 - RNA, 19 nt, Artificial Sequence
  Description of Artificial Sequence: Synthetic oligonucleotide
uuacugaagcgaaguaaga

SEQ ID NO: 1005959 - RNA, 19 nt, Artificial Sequence
  Description of Artificial Sequence: Synthetic oligonucleotide
uaaaugugcccauuucgaa

SEQ ID NO: 1005960 - RNA, 19 nt, Artificial Sequence
  Description of Artificial Sequence: Synthetic oligonucleotide
agagacgucucacucccag

SEQ ID NO: 1005961 - RNA, 19 nt, Artificial Sequence
  Description of Artificial Sequence: Synthetic oligonucleotide
ggaugaauugguaaagacc

SEQ ID NO: 1005962 - RNA, 19 nt, Artificial Sequence
  Description of Artificial Sequence: Synthetic oligonucleotide
ugaagcgaaguaagaacuc

SEQ ID NO: 1005963 - RNA, 19 nt, Artificial Sequence
  Description of Artificial Sequence: Synthetic oligonucleotide
ucaagacauauggagaaau

SEQ ID NO: 1005964 - RNA, 19 nt, Artificial Sequence
  Description of Artificial Sequence: Synthetic oligonucleotide
ucaaauaguuuguuccaua

SEQ ID NO: 1005965 - RNA, 19 nt, Artificial Sequence
  Description of Artificial Sequence: Synthetic oligonucleotide
cacacuaaggaacgagccc

SEQ ID NO: 1005966 - RNA, 19 nt, Artificial Sequence
  Description of Artificial Sequence: Synthetic oligonucleotide
auauuaauccauauauaaa

SEQ ID NO: 1005967 - RNA, 19 nt, Artificial Sequence
  Description of Artificial Sequence: Synthetic oligonucleotide
agaggggccaaaccuauga

SEQ ID NO: 1005968 - RNA, 19 nt, Artificial Sequence
  Description of Artificial Sequence: Synthetic oligonucleotide
uuaaagggucuauauuaau

SEQ ID NO: 1005969 - RNA, 19 nt, Artificial Sequence
  Description of Artificial Sequence: Synthetic oligonucleotide
uucccacaaacaccagggg

SEQ ID NO: 1005970 - RNA, 19 nt, Artificial Sequence
  Description of Artificial Sequence: Synthetic oligonucleotide
acgucucacucccaggcgg

SEQ ID NO: 1005971 - RNA, 19 nt, Artificial Sequence
  Description of Artificial Sequence: Synthetic oligonucleotide
agcgacucgcgcgacagcc

SEQ ID NO: 1005972 - RNA, 19 nt, Artificial Sequence
  Description of Artificial Sequence: Synthetic oligonucleotide
agcgaaucugguugguguc

SEQ ID NO: 1005973 - RNA, 19 nt, Artificial Sequence
  Description of Artificial Sequence: Synthetic oligonucleotide
caacuuauuaaaauucucu

SEQ ID NO: 1005974 - RNA, 19 nt, Artificial Sequence
  Description of Artificial Sequence: Synthetic oligonucleotide
acacuaaggaacgagccca

SEQ ID NO: 1005975 - RNA, 19 nt, Artificial Sequence
  Description of Artificial Sequence: Synthetic oligonucleotide
aucaacuccggcugaucuc

SEQ ID NO: 1005976 - RNA, 19 nt, Artificial Sequence
  Description of Artificial Sequence: Synthetic oligonucleotide
cuaugauauuaauaggcaa

SEQ ID NO: 1005977 - RNA, 19 nt, Artificial Sequence
  Description of Artificial Sequence: Synthetic oligonucleotide
aucgccacuuccauagagc

SEQ ID NO: 1005978 - RNA, 19 nt, Artificial Sequence
  Description of Artificial Sequence: Synthetic oligonucleotide
gaauugguaaagaccccag

SEQ ID NO: 1005979 - RNA, 19 nt, Artificial Sequence
  Description of Artificial Sequence: Synthetic oligonucleotide
uacugaagcgaaguaagaa

SEQ ID NO: 1005980 - RNA, 19 nt, Artificial Sequence
  Description of Artificial Sequence: Synthetic oligonucleotide
uugauggagauaccuccac

SEQ ID NO: 1005981 - RNA, 19 nt, Artificial Sequence
  Description of Artificial Sequence: Synthetic oligonucleotide
gacucaagcauacuaauuu

SEQ ID NO: 1005982 - RNA, 19 nt, Artificial Sequence
  Description of Artificial Sequence: Synthetic oligonucleotide
agagcuucgcugauacagc

SEQ ID NO: 1005983 - RNA, 19 nt, Artificial Sequence
  Description of Artificial Sequence: Synthetic oligonucleotide
uauuaucaaccugaauggu

SEQ ID NO: 1005984 - RNA, 19 nt, Artificial Sequence
  Description of Artificial Sequence: Synthetic oligonucleotide
uccagauauguucaacauu

SEQ ID NO: 1005985 - RNA, 19 nt, Artificial Sequence
  Description of Artificial Sequence: Synthetic oligonucleotide
cauauggagaaauuucuua

SEQ ID NO: 1005986 - RNA, 19 nt, Artificial Sequence
  Description of Artificial Sequence: Synthetic oligonucleotide
gacacaauggccgagcaua

SEQ ID NO: 1005987 - RNA, 19 nt, Artificial Sequence
  Description of Artificial Sequence: Synthetic oligonucleotide
caugacucaagcauacuaa

SEQ ID NO: 1005988 - RNA, 19 nt, Artificial Sequence
  Description of Artificial Sequence: Synthetic oligonucleotide
augaauugguaaagacccc

SEQ ID NO: 1005989 - RNA, 19 nt, Artificial Sequence
  Description of Artificial Sequence: Synthetic oligonucleotide
ucaacuccggcugaucucu

SEQ ID NO: 1005990 - RNA, 19 nt, Artificial Sequence
  Description of Artificial Sequence: Synthetic oligonucleotide
gagcuucgcugauacagcc

SEQ ID NO: 1005991 - RNA, 19 nt, Artificial Sequence
  Description of Artificial Sequence: Synthetic oligonucleotide
auucaauucaagacauaug

SEQ ID NO: 1005992 - RNA, 19 nt, Artificial Sequence
  Description of Artificial Sequence: Synthetic oligonucleotide
augacucaagcauacuaau

SEQ ID NO: 1005993 - RNA, 19 nt, Artificial Sequence
  Description of Artificial Sequence: Synthetic oligonucleotide
ucgccacuuccauagagcu

SEQ ID NO: 1005994 - RNA, 19 nt, Artificial Sequence
  Description of Artificial Sequence: Synthetic oligonucleotide
ucugacaacaucgccuggu

SEQ ID NO: 1005995 - RNA, 19 nt, Artificial Sequence
  Description of Artificial Sequence: Synthetic oligonucleotide
cuauccaagacuugggucu

SEQ ID NO: 1005996 - RNA, 19 nt, Artificial Sequence
  Description of Artificial Sequence: Synthetic oligonucleotide
cuauauuaauccauauaua

SEQ ID NO: 1005997 - RNA, 19 nt, Artificial Sequence
  Description of Artificial Sequence: Synthetic oligonucleotide
gaagcgaaguaagaacuca

SEQ ID NO: 1005998 - RNA, 19 nt, Artificial Sequence
  Description of Artificial Sequence: Synthetic oligonucleotide
cuguuuuacuacuggcaug

SEQ ID NO: 1005999 - RNA, 19 nt, Artificial Sequence
  Description of Artificial Sequence: Synthetic oligonucleotide
uacggaaccucaucuuugu

SEQ ID NO: 1006000 - RNA, 19 nt, Artificial Sequence
  Description of Artificial Sequence: Synthetic oligonucleotide
guuuguuccauagccagga

SEQ ID NO: 1006001 - RNA, 19 nt, Artificial Sequence
  Description of Artificial Sequence: Synthetic oligonucleotide
acucaagcauacuaauuuu

SEQ ID NO: 1006002 - RNA, 19 nt, Artificial Sequence
  Description of Artificial Sequence: Synthetic oligonucleotide
uauuaguuuaaagggucua

SEQ ID NO: 1006003 - RNA, 19 nt, Artificial Sequence
  Description of Artificial Sequence: Synthetic oligonucleotide
ugacucaagcauacuaauu

SEQ ID NO: 1006004 - RNA, 19 nt, Artificial Sequence
  Description of Artificial Sequence: Synthetic oligonucleotide
gacgucucacucccaggcg

SEQ ID NO: 1006005 - RNA, 19 nt, Artificial Sequence
  Description of Artificial Sequence: Synthetic oligonucleotide
auggagauaccuccacugu

SEQ ID NO: 1006006 - RNA, 19 nt, Artificial Sequence
  Description of Artificial Sequence: Synthetic oligonucleotide
uccucaugcagaccauaga

SEQ ID NO: 1006007 - RNA, 19 nt, Artificial Sequence
  Description of Artificial Sequence: Synthetic oligonucleotide
ugccuuuccgaagguacgg

SEQ ID NO: 1006008 - RNA, 19 nt, Artificial Sequence
  Description of Artificial Sequence: Synthetic oligonucleotide
guaaagaccccaguagcac

SEQ ID NO: 1006009 - RNA, 19 nt, Artificial Sequence
  Description of Artificial Sequence: Synthetic oligonucleotide
uaugucuaaaugugcccau

SEQ ID NO: 1006010 - RNA, 19 nt, Artificial Sequence
  Description of Artificial Sequence: Synthetic oligonucleotide
gagacgucucacucccagg

SEQ ID NO: 1006011 - RNA, 19 nt, Artificial Sequence
  Description of Artificial Sequence: Synthetic oligonucleotide
caucaguauuaucaaccug

SEQ ID NO: 1006012 - RNA, 19 nt, Artificial Sequence
  Description of Artificial Sequence: Synthetic oligonucleotide
acucccgcaggaaugcagc

SEQ ID NO: 1006013 - RNA, 19 nt, Artificial Sequence
  Description of Artificial Sequence: Synthetic oligonucleotide
uuccaagaagacugguggu

SEQ ID NO: 1006014 - RNA, 19 nt, Artificial Sequence
  Description of Artificial Sequence: Synthetic oligonucleotide
ggaacgagcccauuucuug

SEQ ID NO: 1006015 - RNA, 19 nt, Artificial Sequence
  Description of Artificial Sequence: Synthetic oligonucleotide
ugucaaagguaauucccuu

SEQ ID NO: 1006016 - RNA, 19 nt, Artificial Sequence
  Description of Artificial Sequence: Synthetic oligonucleotide
auaguuuguuccauagcca

SEQ ID NO: 1006017 - RNA, 19 nt, Artificial Sequence
  Description of Artificial Sequence: Synthetic oligonucleotide
aggccgaccaccaccacac

SEQ ID NO: 1006018 - RNA, 19 nt, Artificial Sequence
  Description of Artificial Sequence: Synthetic oligonucleotide
aucaaccugaaugguuuuc

SEQ ID NO: 1006019 - RNA, 19 nt, Artificial Sequence
  Description of Artificial Sequence: Synthetic oligonucleotide
gcuaugucuaaaugugccc

SEQ ID NO: 1006020 - RNA, 19 nt, Artificial Sequence
  Description of Artificial Sequence: Synthetic oligonucleotide
agauguuuuauuaguuuaa

SEQ ID NO: 1006021 - RNA, 19 nt, Artificial Sequence
  Description of Artificial Sequence: Synthetic oligonucleotide
acaccugcuaugucuaaau

SEQ ID NO: 1006022 - RNA, 19 nt, Artificial Sequence
  Description of Artificial Sequence: Synthetic oligonucleotide
aacuccggcugaucucuug

SEQ ID NO: 1006023 - RNA, 19 nt, Artificial Sequence
  Description of Artificial Sequence: Synthetic oligonucleotide
gucuaaaugugcccauuuc

SEQ ID NO: 1006024 - RNA, 19 nt, Artificial Sequence
  Description of Artificial Sequence: Synthetic oligonucleotide
auguuuucacaaagagggg

SEQ ID NO: 1006025 - RNA, 19 nt, Artificial Sequence
  Description of Artificial Sequence: Synthetic oligonucleotide
uccggcugaucucuugcca

SEQ ID NO: 1006026 - RNA, 19 nt, Artificial Sequence
  Description of Artificial Sequence: Synthetic oligonucleotide
ugucuuguauaaugcucaa

SEQ ID NO: 1006027 - RNA, 19 nt, Artificial Sequence
  Description of Artificial Sequence: Synthetic oligonucleotide
aguauugaacuaagagcug

SEQ ID NO: 1006028 - RNA, 19 nt, Artificial Sequence
  Description of Artificial Sequence: Synthetic oligonucleotide
auuucgaaugagucacaaa

SEQ ID NO: 1006029 - RNA, 19 nt, Artificial Sequence
  Description of Artificial Sequence: Synthetic oligonucleotide
agccggaagaggcagcaga

SEQ ID NO: 1006030 - RNA, 19 nt, Artificial Sequence
  Description of Artificial Sequence: Synthetic oligonucleotide
gacccuucgucaugucugc

SEQ ID NO: 1006031 - RNA, 19 nt, Artificial Sequence
  Description of Artificial Sequence: Synthetic oligonucleotide
ccuaugauauuaauaggca

SEQ ID NO: 1006032 - RNA, 19 nt, Artificial Sequence
  Description of Artificial Sequence: Synthetic oligonucleotide
aacgagcccauuucuuguu

SEQ ID NO: 1006033 - RNA, 19 nt, Artificial Sequence
  Description of Artificial Sequence: Synthetic oligonucleotide
accccgaucccagagacgu

SEQ ID NO: 1006034 - RNA, 19 nt, Artificial Sequence
  Description of Artificial Sequence: Synthetic oligonucleotide
ucgucaugucugcugugga

SEQ ID NO: 1006035 - RNA, 19 nt, Artificial Sequence
  Description of Artificial Sequence: Synthetic oligonucleotide
uauccaagacuugggucug

SEQ ID NO: 1006036 - RNA, 19 nt, Artificial Sequence
  Description of Artificial Sequence: Synthetic oligonucleotide
ucucuccugcacuuguaaa

SEQ ID NO: 1006037 - RNA, 19 nt, Artificial Sequence
  Description of Artificial Sequence: Synthetic oligonucleotide
ccacacuaaggaacgagcc

SEQ ID NO: 1006038 - RNA, 19 nt, Artificial Sequence
  Description of Artificial Sequence: Synthetic oligonucleotide
ccaacuuauuaaaauucuc

SEQ ID NO: 1006039 - RNA, 19 nt, Artificial Sequence
  Description of Artificial Sequence: Synthetic oligonucleotide
aagcgaaguaagaacucaa

SEQ ID NO: 1006040 - RNA, 19 nt, Artificial Sequence
  Description of Artificial Sequence: Synthetic oligonucleotide
gcgaaguaagaacucaauc

SEQ ID NO: 1006041 - RNA, 19 nt, Artificial Sequence
  Description of Artificial Sequence: Synthetic oligonucleotide
uucaagacauauggagaaa

SEQ ID NO: 1006042 - RNA, 19 nt, Artificial Sequence
  Description of Artificial Sequence: Synthetic oligonucleotide
ucagcgaaucugguuggug

SEQ ID NO: 1006043 - RNA, 19 nt, Artificial Sequence
  Description of Artificial Sequence: Synthetic oligonucleotide
ggagaaauuucuuaguauu

SEQ ID NO: 1006044 - RNA, 19 nt, Artificial Sequence
  Description of Artificial Sequence: Synthetic oligonucleotide
gauauggaccucuguuuua

SEQ ID NO: 1006045 - RNA, 19 nt, Artificial Sequence
  Description of Artificial Sequence: Synthetic oligonucleotide
uggcgggccaaguucugcc

SEQ ID NO: 1006046 - RNA, 19 nt, Artificial Sequence
  Description of Artificial Sequence: Synthetic oligonucleotide
uauggaccucuguuuuacu

SEQ ID NO: 1006047 - RNA, 19 nt, Artificial Sequence
  Description of Artificial Sequence: Synthetic oligonucleotide
uucacaaagaggggccaaa

SEQ ID NO: 1006048 - RNA, 19 nt, Artificial Sequence
  Description of Artificial Sequence: Synthetic oligonucleotide
cgaaugagucacaaacucc

SEQ ID NO: 1006049 - RNA, 19 nt, Artificial Sequence
  Description of Artificial Sequence: Synthetic oligonucleotide
ugacaacaucgccugguuu

SEQ ID NO: 1006050 - RNA, 19 nt, Artificial Sequence
  Description of Artificial Sequence: Synthetic oligonucleotide
cugaaugguuuucccguuc

SEQ ID NO: 1006051 - RNA, 19 nt, Artificial Sequence
  Description of Artificial Sequence: Synthetic oligonucleotide
augcagaccauagaagguu

SEQ ID NO: 1006052 - RNA, 19 nt, Artificial Sequence
  Description of Artificial Sequence: Synthetic oligonucleotide
caaagaggggccaaaccua

SEQ ID NO: 1006053 - RNA, 19 nt, Artificial Sequence
  Description of Artificial Sequence: Synthetic oligonucleotide
ccgagcauauuguugcagc

SEQ ID NO: 1006054 - RNA, 19 nt, Artificial Sequence
  Description of Artificial Sequence: Synthetic oligonucleotide
cauagagaccaagcacggc

SEQ ID NO: 1006055 - RNA, 19 nt, Artificial Sequence
  Description of Artificial Sequence: Synthetic oligonucleotide
ugcaucccgcugcaacagc

SEQ ID NO: 1006056 - RNA, 19 nt, Artificial Sequence
  Description of Artificial Sequence: Synthetic oligonucleotide
aguucugcccagaagcaaa

SEQ ID NO: 1006057 - RNA, 19 nt, Artificial Sequence
  Description of Artificial Sequence: Synthetic oligonucleotide
guuuucccguuccuggcuc

SEQ ID NO: 1006058 - RNA, 19 nt, Artificial Sequence
  Description of Artificial Sequence: Synthetic oligonucleotide
gaacgagcccauuucuugu

SEQ ID NO: 1006059 - RNA, 19 nt, Artificial Sequence
  Description of Artificial Sequence: Synthetic oligonucleotide
acaacuugucuuguauaau

SEQ ID NO: 1006060 - RNA, 19 nt, Artificial Sequence
  Description of Artificial Sequence: Synthetic oligonucleotide
cuacaacuugucuuguaua

SEQ ID NO: 1006061 - RNA, 19 nt, Artificial Sequence
  Description of Artificial Sequence: Synthetic oligonucleotide
gguaaagaccccaguagca

SEQ ID NO: 1006062 - RNA, 19 nt, Artificial Sequence
  Description of Artificial Sequence: Synthetic oligonucleotide
guucugcccagaagcaaag

SEQ ID NO: 1006063 - RNA, 19 nt, Artificial Sequence
  Description of Artificial Sequence: Synthetic oligonucleotide
ucagcccgcaugaggucca

SEQ ID NO: 1006064 - RNA, 19 nt, Artificial Sequence
  Description of Artificial Sequence: Synthetic oligonucleotide
auggccgagcauauuguug

SEQ ID NO: 1006065 - RNA, 19 nt, Artificial Sequence
  Description of Artificial Sequence: Synthetic oligonucleotide
gaucgguauuuuccaaugu

SEQ ID NO: 1006066 - RNA, 19 nt, Artificial Sequence
  Description of Artificial Sequence: Synthetic oligonucleotide
gcggagagcgacucgcgcg

SEQ ID NO: 1006067 - RNA, 19 nt, Artificial Sequence
  Description of Artificial Sequence: Synthetic oligonucleotide
ucgccugguuuguuggccu

SEQ ID NO: 1006068 - RNA, 19 nt, Artificial Sequence
  Description of Artificial Sequence: Synthetic oligonucleotide
cacuaggcauguuuucaca

SEQ ID NO: 1006069 - RNA, 19 nt, Artificial Sequence
  Description of Artificial Sequence: Synthetic oligonucleotide
ugaucgccacuuccauaga

SEQ ID NO: 1006070 - RNA, 19 nt, Artificial Sequence
  Description of Artificial Sequence: Synthetic oligonucleotide
caucgccugguuuguuggc

SEQ ID NO: 1006071 - RNA, 19 nt, Artificial Sequence
  Description of Artificial Sequence: Synthetic oligonucleotide
agaccccuuggccacacua

SEQ ID NO: 1006072 - RNA, 19 nt, Artificial Sequence
  Description of Artificial Sequence: Synthetic oligonucleotide
gaccucuguuuuacuacug

SEQ ID NO: 1006073 - RNA, 19 nt, Artificial Sequence
  Description of Artificial Sequence: Synthetic oligonucleotide
aucucuugccaaggccgac

SEQ ID NO: 1006074 - RNA, 19 nt, Artificial Sequence
  Description of Artificial Sequence: Synthetic oligonucleotide
agcgaaguaagaacucaau

SEQ ID NO: 1006075 - RNA, 19 nt, Artificial Sequence
  Description of Artificial Sequence: Synthetic oligonucleotide
gucuaugcuggccucaaau

SEQ ID NO: 1006076 - RNA, 19 nt, Artificial Sequence
  Description of Artificial Sequence: Synthetic oligonucleotide
caugcagaccauagaaggu

SEQ ID NO: 1006077 - RNA, 19 nt, Artificial Sequence
  Description of Artificial Sequence: Synthetic oligonucleotide
acagccggaagaggcagca

SEQ ID NO: 1006078 - RNA, 19 nt, Artificial Sequence
  Description of Artificial Sequence: Synthetic oligonucleotide
caggaugaauugguaaaga

SEQ ID NO: 1006079 - RNA, 19 nt, Artificial Sequence
  Description of Artificial Sequence: Synthetic oligonucleotide
ccaggaugaauugguaaag

SEQ ID NO: 1006080 - RNA, 19 nt, Artificial Sequence
  Description of Artificial Sequence: Synthetic oligonucleotide
gccacacuaaggaacgagc

SEQ ID NO: 1006081 - RNA, 19 nt, Artificial Sequence
  Description of Artificial Sequence: Synthetic oligonucleotide
cuucacuugcauuggggcu

SEQ ID NO: 1006082 - RNA, 19 nt, Artificial Sequence
  Description of Artificial Sequence: Synthetic oligonucleotide
guggagagaccccgauccc

SEQ ID NO: 1006083 - RNA, 19 nt, Artificial Sequence
  Description of Artificial Sequence: Synthetic oligonucleotide
ugucuaugcuggccucaaa

SEQ ID NO: 1006084 - RNA, 19 nt, Artificial Sequence
  Description of Artificial Sequence: Synthetic oligonucleotide
ggagguccagauauguuca

SEQ ID NO: 1006085 - RNA, 19 nt, Artificial Sequence
  Description of Artificial Sequence: Synthetic oligonucleotide
ucaucaacuccggcugauc

SEQ ID NO: 1006086 - RNA, 19 nt, Artificial Sequence
  Description of Artificial Sequence: Synthetic oligonucleotide
agucuacaacuugucuugu

SEQ ID NO: 1006087 - RNA, 19 nt, Artificial Sequence
  Description of Artificial Sequence: Synthetic oligonucleotide
aaccugccugcaucccgcu

SEQ ID NO: 1006088 - RNA, 19 nt, Artificial Sequence
  Description of Artificial Sequence: Synthetic oligonucleotide
cuguggagagaccccgauc

SEQ ID NO: 1006089 - RNA, 19 nt, Artificial Sequence
  Description of Artificial Sequence: Synthetic oligonucleotide
cccgcaggaaugcagcagc

SEQ ID NO: 1006090 - RNA, 19 nt, Artificial Sequence
  Description of Artificial Sequence: Synthetic oligonucleotide
aaacucccgcaggaaugca

SEQ ID NO: 1006091 - RNA, 19 nt, Artificial Sequence
  Description of Artificial Sequence: Synthetic oligonucleotide
cugcaucccgcugcaacag

SEQ ID NO: 1006092 - RNA, 19 nt, Artificial Sequence
  Description of Artificial Sequence: Synthetic oligonucleotide
guccagauauguucaacau

SEQ ID NO: 1006093 - RNA, 19 nt, Artificial Sequence
  Description of Artificial Sequence: Synthetic oligonucleotide
gcauaacagagugcaucgg

SEQ ID NO: 1006094 - RNA, 19 nt, Artificial Sequence
  Description of Artificial Sequence: Synthetic oligonucleotide
gcccauuucgaaugaguca

SEQ ID NO: 1006095 - RNA, 19 nt, Artificial Sequence
  Description of Artificial Sequence: Synthetic oligonucleotide
uucagcgaaucugguuggu

SEQ ID NO: 1006096 - RNA, 19 nt, Artificial Sequence
  Description of Artificial Sequence: Synthetic oligonucleotide
ugucagcccgcaugagguc

SEQ ID NO: 1006097 - RNA, 19 nt, Artificial Sequence
  Description of Artificial Sequence: Synthetic oligonucleotide
ggccucaaauaguuuguuc

SEQ ID NO: 1006098 - RNA, 19 nt, Artificial Sequence
  Description of Artificial Sequence: Synthetic oligonucleotide
cagcgaaucugguuggugu

SEQ ID NO: 1006099 - RNA, 19 nt, Artificial Sequence
  Description of Artificial Sequence: Synthetic oligonucleotide
gcaucaguauuaucaaccu

SEQ ID NO: 1006100 - RNA, 19 nt, Artificial Sequence
  Description of Artificial Sequence: Synthetic oligonucleotide
ggccacacuaaggaacgag

SEQ ID NO: 1006101 - RNA, 19 nt, Artificial Sequence
  Description of Artificial Sequence: Synthetic oligonucleotide
gucaaagguaauucccuuu

SEQ ID NO: 1006102 - RNA, 19 nt, Artificial Sequence
  Description of Artificial Sequence: Synthetic oligonucleotide
cuaaggaacgagcccauuu

SEQ ID NO: 1006103 - RNA, 19 nt, Artificial Sequence
  Description of Artificial Sequence: Synthetic oligonucleotide
gaccccgaucccagagacg

SEQ ID NO: 1006104 - RNA, 19 nt, Artificial Sequence
  Description of Artificial Sequence: Synthetic oligonucleotide
gcagucuacaacuugucuu

SEQ ID NO: 1006105 - RNA, 19 nt, Artificial Sequence
  Description of Artificial Sequence: Synthetic oligonucleotide
cagacacaauggccgagca

SEQ ID NO: 1006106 - RNA, 19 nt, Artificial Sequence
  Description of Artificial Sequence: Synthetic oligonucleotide
guaaacuguggugugucau

SEQ ID NO: 1006107 - RNA, 19 nt, Artificial Sequence
  Description of Artificial Sequence: Synthetic oligonucleotide
caagaagacuggugguucu

SEQ ID NO: 1006108 - RNA, 19 nt, Artificial Sequence
  Description of Artificial Sequence: Synthetic oligonucleotide
caauggccgagcauauugu

SEQ ID NO: 1006109 - RNA, 19 nt, Artificial Sequence
  Description of Artificial Sequence: Synthetic oligonucleotide
gucucacucccaggcggcg

SEQ ID NO: 1006110 - RNA, 19 nt, Artificial Sequence
  Description of Artificial Sequence: Synthetic oligonucleotide
gccgaccaccaccacacug

SEQ ID NO: 1006111 - RNA, 19 nt, Artificial Sequence
  Description of Artificial Sequence: Synthetic oligonucleotide
gagagcgacucgcgcgaca

SEQ ID NO: 1006112 - RNA, 19 nt, Artificial Sequence
  Description of Artificial Sequence: Synthetic oligonucleotide
ggucuauauuaauccauau

SEQ ID NO: 1006113 - RNA, 19 nt, Artificial Sequence
  Description of Artificial Sequence: Synthetic oligonucleotide
acacaauggccgagcauau

SEQ ID NO: 1006114 - RNA, 19 nt, Artificial Sequence
  Description of Artificial Sequence: Synthetic oligonucleotide
ggcggagagcgacucgcgc

SEQ ID NO: 1006115 - RNA, 19 nt, Artificial Sequence
  Description of Artificial Sequence: Synthetic oligonucleotide
cgucaugucugcuguggag

SEQ ID NO: 1006116 - RNA, 19 nt, Artificial Sequence
  Description of Artificial Sequence: Synthetic oligonucleotide
ucgcugauacagccaccuu

SEQ ID NO: 1006117 - RNA, 19 nt, Artificial Sequence
  Description of Artificial Sequence: Synthetic oligonucleotide
caccuccacugaaggcagc

SEQ ID NO: 1006118 - RNA, 19 nt, Artificial Sequence
  Description of Artificial Sequence: Synthetic oligonucleotide
agaccaagcacggcuccuu

SEQ ID NO: 1006119 - RNA, 19 nt, Artificial Sequence
  Description of Artificial Sequence: Synthetic oligonucleotide
gucugauauggaccucugu

SEQ ID NO: 1006120 - RNA, 19 nt, Artificial Sequence
  Description of Artificial Sequence: Synthetic oligonucleotide
ugccuguguaguggauuuc

SEQ ID NO: 1006121 - RNA, 19 nt, Artificial Sequence
  Description of Artificial Sequence: Synthetic oligonucleotide
gccgagcauauuguugcag

SEQ ID NO: 1006122 - RNA, 19 nt, Artificial Sequence
  Description of Artificial Sequence: Synthetic oligonucleotide
gagcuuugcugcagacaca

SEQ ID NO: 1006123 - RNA, 19 nt, Artificial Sequence
  Description of Artificial Sequence: Synthetic oligonucleotide
ggucugauauggaccucug

SEQ ID NO: 1006124 - RNA, 19 nt, Artificial Sequence
  Description of Artificial Sequence: Synthetic oligonucleotide
ucacucccaggcggcggag

SEQ ID NO: 1006125 - RNA, 19 nt, Artificial Sequence
  Description of Artificial Sequence: Synthetic oligonucleotide
cucccgcaggaaugcagca

SEQ ID NO: 1006126 - RNA, 19 nt, Artificial Sequence
  Description of Artificial Sequence: Synthetic oligonucleotide
ccgaagguacggaaccuca

SEQ ID NO: 1006127 - RNA, 19 nt, Artificial Sequence
  Description of Artificial Sequence: Synthetic oligonucleotide
acucgcgcgacagccggaa

SEQ ID NO: 1006128 - RNA, 19 nt, Artificial Sequence
  Description of Artificial Sequence: Synthetic oligonucleotide
gguuuucccguuccuggcu

SEQ ID NO: 1006129 - RNA, 19 nt, Artificial Sequence
  Description of Artificial Sequence: Synthetic oligonucleotide
cuguuaagguggcagcauu

SEQ ID NO: 1006130 - RNA, 19 nt, Artificial Sequence
  Description of Artificial Sequence: Synthetic oligonucleotide
auccaagacuugggucuga

SEQ ID NO: 1006131 - RNA, 19 nt, Artificial Sequence
  Description of Artificial Sequence: Synthetic oligonucleotide
cugccuguguaguggauuu

SEQ ID NO: 1006132 - RNA, 19 nt, Artificial Sequence
  Description of Artificial Sequence: Synthetic oligonucleotide
gugucuaugcuggccucaa

SEQ ID NO: 1006133 - RNA, 19 nt, Artificial Sequence
  Description of Artificial Sequence: Synthetic oligonucleotide
cucgcgcgacagccggaag

SEQ ID NO: 1006134 - RNA, 19 nt, Artificial Sequence
  Description of Artificial Sequence: Synthetic oligonucleotide
guuccauagccaggaugaa

SEQ ID NO: 1006135 - RNA, 19 nt, Artificial Sequence
  Description of Artificial Sequence: Synthetic oligonucleotide
cgacucgcgcgacagccgg

SEQ ID NO: 1006136 - RNA, 19 nt, Artificial Sequence
  Description of Artificial Sequence: Synthetic oligonucleotide
caguauuaucaaccugaau

SEQ ID NO: 1006137 - RNA, 19 nt, Artificial Sequence
  Description of Artificial Sequence: Synthetic oligonucleotide
gccaaaccuaugauauuaa

SEQ ID NO: 1006138 - RNA, 19 nt, Artificial Sequence
  Description of Artificial Sequence: Synthetic oligonucleotide
gagaccaagcacggcuccu

SEQ ID NO: 1006139 - RNA, 19 nt, Artificial Sequence
  Description of Artificial Sequence: Synthetic oligonucleotide
ccuuuccgaagguacggaa

SEQ ID NO: 1006140 - RNA, 19 nt, Artificial Sequence
  Description of Artificial Sequence: Synthetic oligonucleotide
gguucggguuuugccugcc

SEQ ID NO: 1006141 - RNA, 19 nt, Artificial Sequence
  Description of Artificial Sequence: Synthetic oligonucleotide
caugcaccugcagaucggu

SEQ ID NO: 1006142 - RNA, 19 nt, Artificial Sequence
  Description of Artificial Sequence: Synthetic oligonucleotide
cacuaaggaacgagcccau

SEQ ID NO: 1006143 - RNA, 19 nt, Artificial Sequence
  Description of Artificial Sequence: Synthetic oligonucleotide
cagagacgucucacuccca

SEQ ID NO: 1006144 - RNA, 19 nt, Artificial Sequence
  Description of Artificial Sequence: Synthetic oligonucleotide
gccucuugaucgccacuuc

SEQ ID NO: 1006145 - RNA, 19 nt, Artificial Sequence
  Description of Artificial Sequence: Synthetic oligonucleotide
gcccgcaugagguccauau

SEQ ID NO: 1006146 - RNA, 19 nt, Artificial Sequence
  Description of Artificial Sequence: Synthetic oligonucleotide
ccaaaccuaugauauuaau

SEQ ID NO: 1006147 - RNA, 19 nt, Artificial Sequence
  Description of Artificial Sequence: Synthetic oligonucleotide
gcgggccaaguucugccca

SEQ ID NO: 1006148 - RNA, 19 nt, Artificial Sequence
  Description of Artificial Sequence: Synthetic oligonucleotide
guucggguuuugccugccu

SEQ ID NO: 1006149 - RNA, 19 nt, Artificial Sequence
  Description of Artificial Sequence: Synthetic oligonucleotide
gccuucagaggagguccag

SEQ ID NO: 1006150 - RNA, 19 nt, Artificial Sequence
  Description of Artificial Sequence: Synthetic oligonucleotide
ccggcugaucucuugccaa

SEQ ID NO: 1006151 - RNA, 19 nt, Artificial Sequence
  Description of Artificial Sequence: Synthetic oligonucleotide
gacucgcgcgacagccgga

SEQ ID NO: 1006152 - RNA, 19 nt, Artificial Sequence
  Description of Artificial Sequence: Synthetic oligonucleotide
gccuuuccgaagguacgga

SEQ ID NO: 1006153 - RNA, 19 nt, Artificial Sequence
  Description of Artificial Sequence: Synthetic oligonucleotide
cgcccacucaugccuuucc

SEQ ID NO: 1006154 - RNA, 19 nt, Artificial Sequence
  Description of Artificial Sequence: Synthetic oligonucleotide
ggcauguuugagauuucuu

SEQ ID NO: 1006155 - RNA, 19 nt, Artificial Sequence
  Description of Artificial Sequence: Synthetic oligonucleotide
cauuggcuggagacuccau

SEQ ID NO: 1006156 - RNA, 19 nt, Artificial Sequence
  Description of Artificial Sequence: Synthetic oligonucleotide
gcgcgacagccggaagagg

SEQ ID NO: 1006157 - RNA, 19 nt, Artificial Sequence
  Description of Artificial Sequence: Synthetic oligonucleotide
cacuugcauuggggcugcc

SEQ ID NO: 1006158 - RNA, 19 nt, Artificial Sequence
  Description of Artificial Sequence: Synthetic oligonucleotide
ggagagcgacucgcgcgac

SEQ ID NO: 1006159 - RNA, 19 nt, Artificial Sequence
  Description of Artificial Sequence: Synthetic oligonucleotide
cggcggagagcgacucgcg

SEQ ID NO: 1006160 - RNA, 19 nt, Artificial Sequence
  Description of Artificial Sequence: Synthetic oligonucleotide
cggagagcgacucgcgcga

SEQ ID NO: 1006161 - RNA, 19 nt, Artificial Sequence
  Description of Artificial Sequence: Synthetic oligonucleotide
gcauauuguugcagcuccu

SEQ ID NO: 1006162 - RNA, 19 nt, Artificial Sequence
  Description of Artificial Sequence: Synthetic oligonucleotide
ggccucuugaucgccacuu

SEQ ID NO: 1006163 - RNA, 19 nt, Artificial Sequence
  Description of Artificial Sequence: Synthetic oligonucleotide
cccgaucccagagacgucu

SEQ ID NO: 1006164 - RNA, 19 nt, Artificial Sequence
  Description of Artificial Sequence: Synthetic oligonucleotide
ccugaucccagggcuaugu

SEQ ID NO: 1006165 - RNA, 19 nt, Artificial Sequence
  Description of Artificial Sequence: Synthetic oligonucleotide
cacaauggccgagcauauu

SEQ ID NO: 1006166 - RNA, 19 nt, Artificial Sequence
  Description of Artificial Sequence: Synthetic oligonucleotide
ccuguuaagguggcagcau

SEQ ID NO: 1006167 - RNA, 19 nt, Artificial Sequence
  Description of Artificial Sequence: Synthetic oligonucleotide
agcccgcaugagguccaua

SEQ ID NO: 1006168 - RNA, 19 nt, Artificial Sequence
  Description of Artificial Sequence: Synthetic oligonucleotide
ccggaagaggcagcagaaa

SEQ ID NO: 1006169 - RNA, 19 nt, Artificial Sequence
  Description of Artificial Sequence: Synthetic oligonucleotide
ccgcaggaaugcagcagcu

SEQ ID NO: 1006170 - RNA, 19 nt, Artificial Sequence
  Description of Artificial Sequence: Synthetic oligonucleotide
caacuccggcugaucucuu

SEQ ID NO: 1006171 - RNA, 19 nt, Artificial Sequence
  Description of Artificial Sequence: Synthetic oligonucleotide
caacaucgccugguuuguu

SEQ ID NO: 1006172 - RNA, 19 nt, Artificial Sequence
  Description of Artificial Sequence: Synthetic oligonucleotide
cccgcaugagguccauauu

SEQ ID NO: 1006173 - RNA, 19 nt, Artificial Sequence
  Description of Artificial Sequence: Synthetic oligonucleotide
aauauuuucucucacuccc

SEQ ID NO: 1006174 - RNA, 19 nt, Artificial Sequence
  Description of Artificial Sequence: Synthetic oligonucleotide
uaaguaaugagaauaaaca

SEQ ID NO: 1006175 - RNA, 19 nt, Artificial Sequence
  Description of Artificial Sequence: Synthetic oligonucleotide
uauauauauauuuauauau

SEQ ID NO: 1006176 - RNA, 19 nt, Artificial Sequence
  Description of Artificial Sequence: Synthetic oligonucleotide
aacgauugauuauuaauac

SEQ ID NO: 1006177 - RNA, 19 nt, Artificial Sequence
  Description of Artificial Sequence: Synthetic oligonucleotide
uauauauuuauauauauuu

SEQ ID NO: 1006178 - RNA, 19 nt, Artificial Sequence
  Description of Artificial Sequence: Synthetic oligonucleotide
auuacuacgauguuuaugu

SEQ ID NO: 1006179 - RNA, 19 nt, Artificial Sequence
  Description of Artificial Sequence: Synthetic oligonucleotide
uuuaaauauauuacuacga

SEQ ID NO: 1006180 - RNA, 19 nt, Artificial Sequence
  Description of Artificial Sequence: Synthetic oligonucleotide
aacuaacuaaauuccaaac

SEQ ID NO: 1006181 - RNA, 19 nt, Artificial Sequence
  Description of Artificial Sequence: Synthetic oligonucleotide
auuacgucgagucauuccc

SEQ ID NO: 1006182 - RNA, 19 nt, Artificial Sequence
  Description of Artificial Sequence: Synthetic oligonucleotide
ucauuuacuaacaugacaa

SEQ ID NO: 1006183 - RNA, 19 nt, Artificial Sequence
  Description of Artificial Sequence: Synthetic oligonucleotide
aaugguauugccucggaag

SEQ ID NO: 1006184 - RNA, 19 nt, Artificial Sequence
  Description of Artificial Sequence: Synthetic oligonucleotide
  modified_base (2)..(2): a, c, u, g, unknown or other
unuguuuacauuacuacug

SEQ ID NO: 1006185 - RNA, 19 nt, Artificial Sequence
  Description of Artificial Sequence: Synthetic oligonucleotide
uauauauauauauuuauau

SEQ ID NO: 1006186 - RNA, 19 nt, Artificial Sequence
  Description of Artificial Sequence: Synthetic oligonucleotide
aaugguaugacuucaaaua

SEQ ID NO: 1006187 - RNA, 19 nt, Artificial Sequence
  Description of Artificial Sequence: Synthetic oligonucleotide
aaaagaucuacucaaguau

SEQ ID NO: 1006188 - RNA, 19 nt, Artificial Sequence
  Description of Artificial Sequence: Synthetic oligonucleotide
acuguaacuaucccuaagc

SEQ ID NO: 1006189 - RNA, 19 nt, Artificial Sequence
  Description of Artificial Sequence: Synthetic oligonucleotide
aauggaucuaaaguuuucc

SEQ ID NO: 1006190 - RNA, 19 nt, Artificial Sequence
  Description of Artificial Sequence: Synthetic oligonucleotide
acuacagguaguuuuauuc

SEQ ID NO: 1006191 - RNA, 19 nt, Artificial Sequence
  Description of Artificial Sequence: Synthetic oligonucleotide
uguauauauauauauauuu

SEQ ID NO: 1006192 - RNA, 19 nt, Artificial Sequence
  Description of Artificial Sequence: Synthetic oligonucleotide
aauaauugcagguuacaca

SEQ ID NO: 1006193 - RNA, 19 nt, Artificial Sequence
  Description of Artificial Sequence: Synthetic oligonucleotide
aacccaccaaaccauaagc

SEQ ID NO: 1006194 - RNA, 19 nt, Artificial Sequence
  Description of Artificial Sequence: Synthetic oligonucleotide
aauauaccauguuaccaac

SEQ ID NO: 1006195 - RNA, 19 nt, Artificial Sequence
  Description of Artificial Sequence: Synthetic oligonucleotide
uguguauauauauauauau

SEQ ID NO: 1006196 - RNA, 19 nt, Artificial Sequence
  Description of Artificial Sequence: Synthetic oligonucleotide
ucaaguauuacauucaguu

SEQ ID NO: 1006197 - RNA, 19 nt, Artificial Sequence
  Description of Artificial Sequence: Synthetic oligonucleotide
agaaauaauaauugcaggu

SEQ ID NO: 1006198 - RNA, 19 nt, Artificial Sequence
  Description of Artificial Sequence: Synthetic oligonucleotide
aaucguuuccaacugagca

SEQ ID NO: 1006199 - RNA, 19 nt, Artificial Sequence
  Description of Artificial Sequence: Synthetic oligonucleotide
uauauauauauauauuuau

SEQ ID NO: 1006200 - RNA, 19 nt, Artificial Sequence
  Description of Artificial Sequence: Synthetic oligonucleotide
uauauauauuuauauauau

SEQ ID NO: 1006201 - RNA, 19 nt, Artificial Sequence
  Description of Artificial Sequence: Synthetic oligonucleotide
aaacuggcgucucuguucc

SEQ ID NO: 1006202 - RNA, 19 nt, Artificial Sequence
  Description of Artificial Sequence: Synthetic oligonucleotide
uuuauucuauguuucaucu

SEQ ID NO: 1006203 - RNA, 19 nt, Artificial Sequence
  Description of Artificial Sequence: Synthetic oligonucleotide
aauuuguacauacguaacu

SEQ ID NO: 1006204 - RNA, 19 nt, Artificial Sequence
  Description of Artificial Sequence: Synthetic oligonucleotide
aauggugcuuuccaguguc

SEQ ID NO: 1006205 - RNA, 19 nt, Artificial Sequence
  Description of Artificial Sequence: Synthetic oligonucleotide
uuaaauauauuacuacgau

SEQ ID NO: 1006206 - RNA, 19 nt, Artificial Sequence
  Description of Artificial Sequence: Synthetic oligonucleotide
aggaauuacccacuaacac

SEQ ID NO: 1006207 - RNA, 19 nt, Artificial Sequence
  Description of Artificial Sequence: Synthetic oligonucleotide
uauaccauguuaccaaccc

SEQ ID NO: 1006208 - RNA, 19 nt, Artificial Sequence
  Description of Artificial Sequence: Synthetic oligonucleotide
uauuaauacuuuuaaugga

SEQ ID NO: 1006209 - RNA, 19 nt, Artificial Sequence
  Description of Artificial Sequence: Synthetic oligonucleotide
agaacuaaucguuuccaac

SEQ ID NO: 1006210 - RNA, 19 nt, Artificial Sequence
  Description of Artificial Sequence: Synthetic oligonucleotide
uguguguauauauauauau

SEQ ID NO: 1006211 - RNA, 19 nt, Artificial Sequence
  Description of Artificial Sequence: Synthetic oligonucleotide
ugcuacaauacaauauuag

SEQ ID NO: 1006212 - RNA, 19 nt, Artificial Sequence
  Description of Artificial Sequence: Synthetic oligonucleotide
uguauaaccuagcaaauua

SEQ ID NO: 1006213 - RNA, 19 nt, Artificial Sequence
  Description of Artificial Sequence: Synthetic oligonucleotide
uguagaacuaaucguuucc

SEQ ID NO: 1006214 - RNA, 19 nt, Artificial Sequence
  Description of Artificial Sequence: Synthetic oligonucleotide
aucucugacacuuaggagu

SEQ ID NO: 1006215 - RNA, 19 nt, Artificial Sequence
  Description of Artificial Sequence: Synthetic oligonucleotide
agaaugauccuuacuagcc

SEQ ID NO: 1006216 - RNA, 19 nt, Artificial Sequence
  Description of Artificial Sequence: Synthetic oligonucleotide
uguaacuaucccuaagcag

SEQ ID NO: 1006217 - RNA, 19 nt, Artificial Sequence
  Description of Artificial Sequence: Synthetic oligonucleotide
aacuuaacuuucgagguuc

SEQ ID NO: 1006218 - RNA, 19 nt, Artificial Sequence
  Description of Artificial Sequence: Synthetic oligonucleotide
aguauguagaacuaaucgu

SEQ ID NO: 1006219 - RNA, 19 nt, Artificial Sequence
  Description of Artificial Sequence: Synthetic oligonucleotide
uccaacugagcaaauauac

SEQ ID NO: 1006220 - RNA, 19 nt, Artificial Sequence
  Description of Artificial Sequence: Synthetic oligonucleotide
uaagcgauugccaagcuaa

SEQ ID NO: 1006221 - RNA, 19 nt, Artificial Sequence
  Description of Artificial Sequence: Synthetic oligonucleotide
cuauguuucaucuaguaga

SEQ ID NO: 1006222 - RNA, 19 nt, Artificial Sequence
  Description of Artificial Sequence: Synthetic oligonucleotide
aagcucuuaggaauuaccc

SEQ ID NO: 1006223 - RNA, 19 nt, Artificial Sequence
  Description of Artificial Sequence: Synthetic oligonucleotide
uuuaauggaucuaaaguuu

SEQ ID NO: 1006224 - RNA, 19 nt, Artificial Sequence
  Description of Artificial Sequence: Synthetic oligonucleotide
uuaugcuacaauacaauau

SEQ ID NO: 1006225 - RNA, 19 nt, Artificial Sequence
  Description of Artificial Sequence: Synthetic oligonucleotide
uucacugagaaauuaugcu

SEQ ID NO: 1006226 - RNA, 19 nt, Artificial Sequence
  Description of Artificial Sequence: Synthetic oligonucleotide
aauugcagguuacacaaau

SEQ ID NO: 1006227 - RNA, 19 nt, Artificial Sequence
  Description of Artificial Sequence: Synthetic oligonucleotide
augguaugacuucaaauag

SEQ ID NO: 1006228 - RNA, 19 nt, Artificial Sequence
  Description of Artificial Sequence: Synthetic oligonucleotide
uucaauauaggcucaaguu

SEQ ID NO: 1006229 - RNA, 19 nt, Artificial Sequence
  Description of Artificial Sequence: Synthetic oligonucleotide
auagaucaauccaacaugg

SEQ ID NO: 1006230 - RNA, 19 nt, Artificial Sequence
  Description of Artificial Sequence: Synthetic oligonucleotide
auauauauauauuuauaua

SEQ ID NO: 1006231 - RNA, 19 nt, Artificial Sequence
  Description of Artificial Sequence: Synthetic oligonucleotide
auacguaacucacuaaugu

SEQ ID NO: 1006232 - RNA, 19 nt, Artificial Sequence
  Description of Artificial Sequence: Synthetic oligonucleotide
aacuaaucguuuccaacug

SEQ ID NO: 1006233 - RNA, 19 nt, Artificial Sequence
  Description of Artificial Sequence: Synthetic oligonucleotide
aacucacuaauguaaggga

SEQ ID NO: 1006234 - RNA, 19 nt, Artificial Sequence
  Description of Artificial Sequence: Synthetic oligonucleotide
ccuauuuaauauaugacag

SEQ ID NO: 1006235 - RNA, 19 nt, Artificial Sequence
  Description of Artificial Sequence: Synthetic oligonucleotide
cuacucaaguauuacauuc

SEQ ID NO: 1006236 - RNA, 19 nt, Artificial Sequence
  Description of Artificial Sequence: Synthetic oligonucleotide
ugagguguagcccuauggc

SEQ ID NO: 1006237 - RNA, 19 nt, Artificial Sequence
  Description of Artificial Sequence: Synthetic oligonucleotide
ucugacauacuucagcgua

SEQ ID NO: 1006238 - RNA, 19 nt, Artificial Sequence
  Description of Artificial Sequence: Synthetic oligonucleotide
uguagcuaacgauugauua

SEQ ID NO: 1006239 - RNA, 19 nt, Artificial Sequence
  Description of Artificial Sequence: Synthetic oligonucleotide
cuauuaauccacugcauuc

SEQ ID NO: 1006240 - RNA, 19 nt, Artificial Sequence
  Description of Artificial Sequence: Synthetic oligonucleotide
aucauuuacuaacaugaca

SEQ ID NO: 1006241 - RNA, 19 nt, Artificial Sequence
  Description of Artificial Sequence: Synthetic oligonucleotide
uuuagugggaagagagaag

SEQ ID NO: 1006242 - RNA, 19 nt, Artificial Sequence
  Description of Artificial Sequence: Synthetic oligonucleotide
uucuaaguaaugagaauaa

SEQ ID NO: 1006243 - RNA, 19 nt, Artificial Sequence
  Description of Artificial Sequence: Synthetic oligonucleotide
uauaaccuagcaaauuaaa

SEQ ID NO: 1006244 - RNA, 19 nt, Artificial Sequence
  Description of Artificial Sequence: Synthetic oligonucleotide
uuucccauuacgucgaguc

SEQ ID NO: 1006245 - RNA, 19 nt, Artificial Sequence
  Description of Artificial Sequence: Synthetic oligonucleotide
  modified_base (8)..(8): a, c, u, g, unknown or other
ugugggunuguuuacauua

SEQ ID NO: 1006246 - RNA, 19 nt, Artificial Sequence
  Description of Artificial Sequence: Synthetic oligonucleotide
guaacuaucccuaagcaga

SEQ ID NO: 1006247 - RNA, 19 nt, Artificial Sequence
  Description of Artificial Sequence: Synthetic oligonucleotide
uggaucuaaaguuuuccca

SEQ ID NO: 1006248 - RNA, 19 nt, Artificial Sequence
  Description of Artificial Sequence: Synthetic oligonucleotide
ucuauuaauccacugcauu

SEQ ID NO: 1006249 - RNA, 19 nt, Artificial Sequence
  Description of Artificial Sequence: Synthetic oligonucleotide
cuaaucguuuccaacugag

SEQ ID NO: 1006250 - RNA, 19 nt, Artificial Sequence
  Description of Artificial Sequence: Synthetic oligonucleotide
gaacagacaccucagcuac

SEQ ID NO: 1006251 - RNA, 19 nt, Artificial Sequence
  Description of Artificial Sequence: Synthetic oligonucleotide
auuggaucgcaguucccgc

SEQ ID NO: 1006252 - RNA, 19 nt, Artificial Sequence
  Description of Artificial Sequence: Synthetic oligonucleotide
acaauauuaguaauaguca

SEQ ID NO: 1006253 - RNA, 19 nt, Artificial Sequence
  Description of Artificial Sequence: Synthetic oligonucleotide
uucagcguaacuuaacuuu

SEQ ID NO: 1006254 - RNA, 19 nt, Artificial Sequence
  Description of Artificial Sequence: Synthetic oligonucleotide
aauuuuacuacagguaguu

SEQ ID NO: 1006255 - RNA, 19 nt, Artificial Sequence
  Description of Artificial Sequence: Synthetic oligonucleotide
auguagaacuaaucguuuc

SEQ ID NO: 1006256 - RNA, 19 nt, Artificial Sequence
  Description of Artificial Sequence: Synthetic oligonucleotide
ugccuauuuaauauaugac

SEQ ID NO: 1006257 - RNA, 19 nt, Artificial Sequence
  Description of Artificial Sequence: Synthetic oligonucleotide
aaaaugguaugacuucaaa

SEQ ID NO: 1006258 - RNA, 19 nt, Artificial Sequence
  Description of Artificial Sequence: Synthetic oligonucleotide
  modified_base (4)..(4): a, c, u, g, unknown or other
ggunuguuuacauuacuac

SEQ ID NO: 1006259 - RNA, 19 nt, Artificial Sequence
  Description of Artificial Sequence: Synthetic oligonucleotide
aauuaugcuacaauacaau

SEQ ID NO: 1006260 - RNA, 19 nt, Artificial Sequence
  Description of Artificial Sequence: Synthetic oligonucleotide
acauacguaacucacuaau

SEQ ID NO: 1006261 - RNA, 19 nt, Artificial Sequence
  Description of Artificial Sequence: Synthetic oligonucleotide
cagguuacacaaauugugc

SEQ ID NO: 1006262 - RNA, 19 nt, Artificial Sequence
  Description of Artificial Sequence: Synthetic oligonucleotide
caacugagcaaauauacca

SEQ ID NO: 1006263 - RNA, 19 nt, Artificial Sequence
  Description of Artificial Sequence: Synthetic oligonucleotide
guaacucacuaauguaagg

SEQ ID NO: 1006264 - RNA, 19 nt, Artificial Sequence
  Description of Artificial Sequence: Synthetic oligonucleotide
auuaauacuuuuaauggau

SEQ ID NO: 1006265 - RNA, 19 nt, Artificial Sequence
  Description of Artificial Sequence: Synthetic oligonucleotide
cguaacuuaacuuucgagg

SEQ ID NO: 1006266 - RNA, 19 nt, Artificial Sequence
  Description of Artificial Sequence: Synthetic oligonucleotide
uuacccacuaacacaaauc

SEQ ID NO: 1006267 - RNA, 19 nt, Artificial Sequence
  Description of Artificial Sequence: Synthetic oligonucleotide
cagaaugauccuuacuagc

SEQ ID NO: 1006268 - RNA, 19 nt, Artificial Sequence
  Description of Artificial Sequence: Synthetic oligonucleotide
uaauaauugcagguuacac

SEQ ID NO: 1006269 - RNA, 19 nt, Artificial Sequence
  Description of Artificial Sequence: Synthetic oligonucleotide
ugccaagcuaaauaaauua

SEQ ID NO: 1006270 - RNA, 19 nt, Artificial Sequence
  Description of Artificial Sequence: Synthetic oligonucleotide
uaacuuucgagguuccugu

SEQ ID NO: 1006271 - RNA, 19 nt, Artificial Sequence
  Description of Artificial Sequence: Synthetic oligonucleotide
uuaauggaucuaaaguuuu

SEQ ID NO: 1006272 - RNA, 19 nt, Artificial Sequence
  Description of Artificial Sequence: Synthetic oligonucleotide
ucuuacuacuguaacuauc

SEQ ID NO: 1006273 - RNA, 19 nt, Artificial Sequence
  Description of Artificial Sequence: Synthetic oligonucleotide
ucacugagaaauuaugcua

SEQ ID NO: 1006274 - RNA, 19 nt, Artificial Sequence
  Description of Artificial Sequence: Synthetic oligonucleotide
uauuacuacgauguuuaug

SEQ ID NO: 1006275 - RNA, 19 nt, Artificial Sequence
  Description of Artificial Sequence: Synthetic oligonucleotide
agcccuauggcuaaacugg

SEQ ID NO: 1006276 - RNA, 19 nt, Artificial Sequence
  Description of Artificial Sequence: Synthetic oligonucleotide
uacuacuguaacuaucccu

SEQ ID NO: 1006277 - RNA, 19 nt, Artificial Sequence
  Description of Artificial Sequence: Synthetic oligonucleotide
ugguaugacuucaaauaga

SEQ ID NO: 1006278 - RNA, 19 nt, Artificial Sequence
  Description of Artificial Sequence: Synthetic oligonucleotide
ugggagauacaacauugga

SEQ ID NO: 1006279 - RNA, 19 nt, Artificial Sequence
  Description of Artificial Sequence: Synthetic oligonucleotide
ucacuaauguaagggacag

SEQ ID NO: 1006280 - RNA, 19 nt, Artificial Sequence
  Description of Artificial Sequence: Synthetic oligonucleotide
aguauguaaacuugccuau

SEQ ID NO: 1006281 - RNA, 19 nt, Artificial Sequence
  Description of Artificial Sequence: Synthetic oligonucleotide
acucacuaauguaagggac

SEQ ID NO: 1006282 - RNA, 19 nt, Artificial Sequence
  Description of Artificial Sequence: Synthetic oligonucleotide
agaucuacucaaguauuac

SEQ ID NO: 1006283 - RNA, 19 nt, Artificial Sequence
  Description of Artificial Sequence: Synthetic oligonucleotide
uacaacauuggaucgcagu

SEQ ID NO: 1006284 - RNA, 19 nt, Artificial Sequence
  Description of Artificial Sequence: Synthetic oligonucleotide
acuucagcguaacuuaacu

SEQ ID NO: 1006285 - RNA, 19 nt, Artificial Sequence
  Description of Artificial Sequence: Synthetic oligonucleotide
uuuaugucacaauggugcu

SEQ ID NO: 1006286 - RNA, 19 nt, Artificial Sequence
  Description of Artificial Sequence: Synthetic oligonucleotide
uauguaaacuugccuauuu

SEQ ID NO: 1006287 - RNA, 19 nt, Artificial Sequence
  Description of Artificial Sequence: Synthetic oligonucleotide
guacaagcacuggagaugg

SEQ ID NO: 1006288 - RNA, 19 nt, Artificial Sequence
  Description of Artificial Sequence: Synthetic oligonucleotide
gaacuaaucguuuccaacu

SEQ ID NO: 1006289 - RNA, 19 nt, Artificial Sequence
  Description of Artificial Sequence: Synthetic oligonucleotide
cauacguaacucacuaaug

SEQ ID NO: 1006290 - RNA, 19 nt, Artificial Sequence
  Description of Artificial Sequence: Synthetic oligonucleotide
cauauuugagcuuguuuuc

SEQ ID NO: 1006291 - RNA, 19 nt, Artificial Sequence
  Description of Artificial Sequence: Synthetic oligonucleotide
guuucaauuuguacauacg

SEQ ID NO: 1006292 - RNA, 19 nt, Artificial Sequence
  Description of Artificial Sequence: Synthetic oligonucleotide
uaaucguuuccaacugagc

SEQ ID NO: 1006293 - RNA, 19 nt, Artificial Sequence
  Description of Artificial Sequence: Synthetic oligonucleotide
ucagcguaacuuaacuuuc

SEQ ID NO: 1006294 - RNA, 19 nt, Artificial Sequence
  Description of Artificial Sequence: Synthetic oligonucleotide
gaucuacucaaguauuaca

SEQ ID NO: 1006295 - RNA, 19 nt, Artificial Sequence
  Description of Artificial Sequence: Synthetic oligonucleotide
uuacacaaauugugcagug

SEQ ID NO: 1006296 - RNA, 19 nt, Artificial Sequence
  Description of Artificial Sequence: Synthetic oligonucleotide
aagccagaaugauccuuac

SEQ ID NO: 1006297 - RNA, 19 nt, Artificial Sequence
  Description of Artificial Sequence: Synthetic oligonucleotide
acuaucccuaagcagaaaa

SEQ ID NO: 1006298 - RNA, 19 nt, Artificial Sequence
  Description of Artificial Sequence: Synthetic oligonucleotide
auaucaguauguaaacuug

SEQ ID NO: 1006299 - RNA, 19 nt, Artificial Sequence
  Description of Artificial Sequence: Synthetic oligonucleotide
uauguagaacuaaucguuu

SEQ ID NO: 1006300 - RNA, 19 nt, Artificial Sequence
  Description of Artificial Sequence: Synthetic oligonucleotide
aaauuuuacuacagguagu

SEQ ID NO: 1006301 - RNA, 19 nt, Artificial Sequence
  Description of Artificial Sequence: Synthetic oligonucleotide
acgauugauuauuaauacu

SEQ ID NO: 1006302 - RNA, 19 nt, Artificial Sequence
  Description of Artificial Sequence: Synthetic oligonucleotide
guagacucacagcuguggg

SEQ ID NO: 1006303 - RNA, 19 nt, Artificial Sequence
  Description of Artificial Sequence: Synthetic oligonucleotide
uagcccuauggcuaaacug

SEQ ID NO: 1006304 - RNA, 19 nt, Artificial Sequence
  Description of Artificial Sequence: Synthetic oligonucleotide
gcucuuucccauuacgucg

SEQ ID NO: 1006305 - RNA, 19 nt, Artificial Sequence
  Description of Artificial Sequence: Synthetic oligonucleotide
auauaccauguuaccaacc

SEQ ID NO: 1006306 - RNA, 19 nt, Artificial Sequence
  Description of Artificial Sequence: Synthetic oligonucleotide
aucauagauguagcuaacg

SEQ ID NO: 1006307 - RNA, 19 nt, Artificial Sequence
  Description of Artificial Sequence: Synthetic oligonucleotide
cauuggaucgcaguucccg

SEQ ID NO: 1006308 - RNA, 19 nt, Artificial Sequence
  Description of Artificial Sequence: Synthetic oligonucleotide
gccuauuuaauauaugaca

SEQ ID NO: 1006309 - RNA, 19 nt, Artificial Sequence
  Description of Artificial Sequence: Synthetic oligonucleotide
cauuacgucgagucauucc

SEQ ID NO: 1006310 - RNA, 19 nt, Artificial Sequence
  Description of Artificial Sequence: Synthetic oligonucleotide
guaacuuaacuuucgaggu

SEQ ID NO: 1006311 - RNA, 19 nt, Artificial Sequence
  Description of Artificial Sequence: Synthetic oligonucleotide
aacaguauguagaacuaau

SEQ ID NO: 1006312 - RNA, 19 nt, Artificial Sequence
  Description of Artificial Sequence: Synthetic oligonucleotide
acaacauuggaucgcaguu

SEQ ID NO: 1006313 - RNA, 19 nt, Artificial Sequence
  Description of Artificial Sequence: Synthetic oligonucleotide
auauauauauauauuuaua

SEQ ID NO: 1006314 - RNA, 19 nt, Artificial Sequence
  Description of Artificial Sequence: Synthetic oligonucleotide
auauauauauuuauauaua

SEQ ID NO: 1006315 - RNA, 19 nt, Artificial Sequence
  Description of Artificial Sequence: Synthetic oligonucleotide
ggaauuacccacuaacaca

SEQ ID NO: 1006316 - RNA, 19 nt, Artificial Sequence
  Description of Artificial Sequence: Synthetic oligonucleotide
auuacccacuaacacaaau

SEQ ID NO: 1006317 - RNA, 19 nt, Artificial Sequence
  Description of Artificial Sequence: Synthetic oligonucleotide
agcucuuaggaauuaccca

SEQ ID NO: 1006318 - RNA, 19 nt, Artificial Sequence
  Description of Artificial Sequence: Synthetic oligonucleotide
ucacaguaauauaacuuua

SEQ ID NO: 1006319 - RNA, 19 nt, Artificial Sequence
  Description of Artificial Sequence: Synthetic oligonucleotide
uucuauguuucaucuagua

SEQ ID NO: 1006320 - RNA, 19 nt, Artificial Sequence
  Description of Artificial Sequence: Synthetic oligonucleotide
auagauguagcuaacgauu

SEQ ID NO: 1006321 - RNA, 19 nt, Artificial Sequence
  Description of Artificial Sequence: Synthetic oligonucleotide
uaauggaucuaaaguuuuc

SEQ ID NO: 1006322 - RNA, 19 nt, Artificial Sequence
  Description of Artificial Sequence: Synthetic oligonucleotide
ucgagucauucccugaggu

SEQ ID NO: 1006323 - RNA, 19 nt, Artificial Sequence
  Description of Artificial Sequence: Synthetic oligonucleotide
uauuuggcuucaaucacuu

SEQ ID NO: 1006324 - RNA, 19 nt, Artificial Sequence
  Description of Artificial Sequence: Synthetic oligonucleotide
guauauauauauauauuua

SEQ ID NO: 1006325 - RNA, 19 nt, Artificial Sequence
  Description of Artificial Sequence: Synthetic oligonucleotide
aaagaucuacucaaguauu

SEQ ID NO: 1006326 - RNA, 19 nt, Artificial Sequence
  Description of Artificial Sequence: Synthetic oligonucleotide
agaacagacaccucagcua

SEQ ID NO: 1006327 - RNA, 19 nt, Artificial Sequence
  Description of Artificial Sequence: Synthetic oligonucleotide
gauacaacauuggaucgca

SEQ ID NO: 1006328 - RNA, 19 nt, Artificial Sequence
  Description of Artificial Sequence: Synthetic oligonucleotide
uaggguguuaacacuuuaa

SEQ ID NO: 1006329 - RNA, 19 nt, Artificial Sequence
  Description of Artificial Sequence: Synthetic oligonucleotide
uucuauuaauccacugcau

SEQ ID NO: 1006330 - RNA, 19 nt, Artificial Sequence
  Description of Artificial Sequence: Synthetic oligonucleotide
gaagaucaguuucacagua

SEQ ID NO: 1006331 - RNA, 19 nt, Artificial Sequence
  Description of Artificial Sequence: Synthetic oligonucleotide
  modified_base (3)..(3): a, c, u, g, unknown or other
gunuguuuacauuacuacu

SEQ ID NO: 1006332 - RNA, 19 nt, Artificial Sequence
  Description of Artificial Sequence: Synthetic oligonucleotide
uguaagggacaguucuuac

SEQ ID NO: 1006333 - RNA, 19 nt, Artificial Sequence
  Description of Artificial Sequence: Synthetic oligonucleotide
auaacuuuauucacugaga

SEQ ID NO: 1006334 - RNA, 19 nt, Artificial Sequence
  Description of Artificial Sequence: Synthetic oligonucleotide
acuacuguaacuaucccua

SEQ ID NO: 1006335 - RNA, 19 nt, Artificial Sequence
  Description of Artificial Sequence: Synthetic oligonucleotide
acacccagaacagacaccu

SEQ ID NO: 1006336 - RNA, 19 nt, Artificial Sequence
  Description of Artificial Sequence: Synthetic oligonucleotide
uacguaacucacuaaugua

SEQ ID NO: 1006337 - RNA, 19 nt, Artificial Sequence
  Description of Artificial Sequence: Synthetic oligonucleotide
auauauauuuauauauauu

SEQ ID NO: 1006338 - RNA, 19 nt, Artificial Sequence
  Description of Artificial Sequence: Synthetic oligonucleotide
cuugccuauuuaauauaug

SEQ ID NO: 1006339 - RNA, 19 nt, Artificial Sequence
  Description of Artificial Sequence: Synthetic oligonucleotide
aggguguuaacacuuuaaa

SEQ ID NO: 1006340 - RNA, 19 nt, Artificial Sequence
  Description of Artificial Sequence: Synthetic oligonucleotide
ucuaaguaaugagaauaaa

SEQ ID NO: 1006341 - RNA, 19 nt, Artificial Sequence
  Description of Artificial Sequence: Synthetic oligonucleotide
caguauguaaacuugccua

SEQ ID NO: 1006342 - RNA, 19 nt, Artificial Sequence
  Description of Artificial Sequence: Synthetic oligonucleotide
acuaaucguuuccaacuga

SEQ ID NO: 1006343 - RNA, 19 nt, Artificial Sequence
  Description of Artificial Sequence: Synthetic oligonucleotide
acuaaauuccaaacuacaa

SEQ ID NO: 1006344 - RNA, 19 nt, Artificial Sequence
  Description of Artificial Sequence: Synthetic oligonucleotide
aacugagcaaauauaccau

SEQ ID NO: 1006345 - RNA, 19 nt, Artificial Sequence
  Description of Artificial Sequence: Synthetic oligonucleotide
uuccaacugagcaaauaua

SEQ ID NO: 1006346 - RNA, 19 nt, Artificial Sequence
  Description of Artificial Sequence: Synthetic oligonucleotide
auaaccuagcaaauuaaaa

SEQ ID NO: 1006347 - RNA, 19 nt, Artificial Sequence
  Description of Artificial Sequence: Synthetic oligonucleotide
uauggcuaaacuggcgucu

SEQ ID NO: 1006348 - RNA, 19 nt, Artificial Sequence
  Description of Artificial Sequence: Synthetic oligonucleotide
cuaauguaagggacaguuc

SEQ ID NO: 1006349 - RNA, 19 nt, Artificial Sequence
  Description of Artificial Sequence: Synthetic oligonucleotide
cucacuaauguaagggaca

SEQ ID NO: 1006350 - RNA, 19 nt, Artificial Sequence
  Description of Artificial Sequence: Synthetic oligonucleotide
  modified_base (6)..(6): a, c, u, g, unknown or other
ugggunuguuuacauuacu

SEQ ID NO: 1006351 - RNA, 19 nt, Artificial Sequence
  Description of Artificial Sequence: Synthetic oligonucleotide
aucguuuccaacugagcaa

SEQ ID NO: 1006352 - RNA, 19 nt, Artificial Sequence
  Description of Artificial Sequence: Synthetic oligonucleotide
uguuaccaacccaccaaac

SEQ ID NO: 1006353 - RNA, 19 nt, Artificial Sequence
  Description of Artificial Sequence: Synthetic oligonucleotide
cagcguaacuuaacuuucg

SEQ ID NO: 1006354 - RNA, 19 nt, Artificial Sequence
  Description of Artificial Sequence: Synthetic oligonucleotide
uggaucgcaguucccgcag

SEQ ID NO: 1006355 - RNA, 19 nt, Artificial Sequence
  Description of Artificial Sequence: Synthetic oligonucleotide
ugaucuggguggcacgaac

SEQ ID NO: 1006356 - RNA, 19 nt, Artificial Sequence
  Description of Artificial Sequence: Synthetic oligonucleotide
guacauacguaacucacua

SEQ ID NO: 1006357 - RNA, 19 nt, Artificial Sequence
  Description of Artificial Sequence: Synthetic oligonucleotide
uacuucagcguaacuuaac

SEQ ID NO: 1006358 - RNA, 19 nt, Artificial Sequence
  Description of Artificial Sequence: Synthetic oligonucleotide
uaacuuaacuuucgagguu

SEQ ID NO: 1006359 - RNA, 19 nt, Artificial Sequence
  Description of Artificial Sequence: Synthetic oligonucleotide
uuauucuauguuucaucua

SEQ ID NO: 1006360 - RNA, 19 nt, Artificial Sequence
  Description of Artificial Sequence: Synthetic oligonucleotide
agugguuguacaagcacug

SEQ ID NO: 1006361 - RNA, 19 nt, Artificial Sequence
  Description of Artificial Sequence: Synthetic oligonucleotide
auuaauccacugcauucau

SEQ ID NO: 1006362 - RNA, 19 nt, Artificial Sequence
  Description of Artificial Sequence: Synthetic oligonucleotide
uucccauuacgucgaguca

SEQ ID NO: 1006363 - RNA, 19 nt, Artificial Sequence
  Description of Artificial Sequence: Synthetic oligonucleotide
gaucaauccaacaugguuu

SEQ ID NO: 1006364 - RNA, 19 nt, Artificial Sequence
  Description of Artificial Sequence: Synthetic oligonucleotide
acuuaacuuucgagguucc

SEQ ID NO: 1006365 - RNA, 19 nt, Artificial Sequence
  Description of Artificial Sequence: Synthetic oligonucleotide
gcagguuacacaaauugug

SEQ ID NO: 1006366 - RNA, 19 nt, Artificial Sequence
  Description of Artificial Sequence: Synthetic oligonucleotide
ggugggagauacaacauug

SEQ ID NO: 1006367 - RNA, 19 nt, Artificial Sequence
  Description of Artificial Sequence: Synthetic oligonucleotide
uccuuaggaggcuucugac

SEQ ID NO: 1006368 - RNA, 19 nt, Artificial Sequence
  Description of Artificial Sequence: Synthetic oligonucleotide
uacgucgagucauucccug

SEQ ID NO: 1006369 - RNA, 19 nt, Artificial Sequence
  Description of Artificial Sequence: Synthetic oligonucleotide
agcguaacuuaacuuucga

SEQ ID NO: 1006370 - RNA, 19 nt, Artificial Sequence
  Description of Artificial Sequence: Synthetic oligonucleotide
agugggaagagagaaguuu

SEQ ID NO: 1006371 - RNA, 19 nt, Artificial Sequence
  Description of Artificial Sequence: Synthetic oligonucleotide
ggaucuaaaguuuucccaa

SEQ ID NO: 1006372 - RNA, 19 nt, Artificial Sequence
  Description of Artificial Sequence: Synthetic oligonucleotide
cacaguaauauaacuuuaa

SEQ ID NO: 1006373 - RNA, 19 nt, Artificial Sequence
  Description of Artificial Sequence: Synthetic oligonucleotide
acguaacucacuaauguaa

SEQ ID NO: 1006374 - RNA, 19 nt, Artificial Sequence
  Description of Artificial Sequence: Synthetic oligonucleotide
aguucaauauaggcucaag

SEQ ID NO: 1006375 - RNA, 19 nt, Artificial Sequence
  Description of Artificial Sequence: Synthetic oligonucleotide
auguuaccaacccaccaaa

SEQ ID NO: 1006376 - RNA, 19 nt, Artificial Sequence
  Description of Artificial Sequence: Synthetic oligonucleotide
acuuaggaguuggaagauc

SEQ ID NO: 1006377 - RNA, 19 nt, Artificial Sequence
  Description of Artificial Sequence: Synthetic oligonucleotide
uccuuacuagcccuuguuu

SEQ ID NO: 1006378 - RNA, 19 nt, Artificial Sequence
  Description of Artificial Sequence: Synthetic oligonucleotide
guucaauauaggcucaagu

SEQ ID NO: 1006379 - RNA, 19 nt, Artificial Sequence
  Description of Artificial Sequence: Synthetic oligonucleotide
uacugaccugcucugcaac

SEQ ID NO: 1006380 - RNA, 19 nt, Artificial Sequence
  Description of Artificial Sequence: Synthetic oligonucleotide
uuaauccacugcauucaua

SEQ ID NO: 1006381 - RNA, 19 nt, Artificial Sequence
  Description of Artificial Sequence: Synthetic oligonucleotide
uagcuaacgauugauuauu

SEQ ID NO: 1006382 - RNA, 19 nt, Artificial Sequence
  Description of Artificial Sequence: Synthetic oligonucleotide
ugucacaauggugcuuucc

SEQ ID NO: 1006383 - RNA, 19 nt, Artificial Sequence
  Description of Artificial Sequence: Synthetic oligonucleotide
uuucgagguuccuguagac

SEQ ID NO: 1006384 - RNA, 19 nt, Artificial Sequence
  Description of Artificial Sequence: Synthetic oligonucleotide
aagaucuacucaaguauua

SEQ ID NO: 1006385 - RNA, 19 nt, Artificial Sequence
  Description of Artificial Sequence: Synthetic oligonucleotide
uuacgucgagucauucccu

SEQ ID NO: 1006386 - RNA, 19 nt, Artificial Sequence
  Description of Artificial Sequence: Synthetic oligonucleotide
uacacaaauugugcagugu

SEQ ID NO: 1006387 - RNA, 19 nt, Artificial Sequence
  Description of Artificial Sequence: Synthetic oligonucleotide
gugggagauacaacauugg

SEQ ID NO: 1006388 - RNA, 19 nt, Artificial Sequence
  Description of Artificial Sequence: Synthetic oligonucleotide
cuguaacuaucccuaagca

SEQ ID NO: 1006389 - RNA, 19 nt, Artificial Sequence
  Description of Artificial Sequence: Synthetic oligonucleotide
guagaacuaaucguuucca

SEQ ID NO: 1006390 - RNA, 19 nt, Artificial Sequence
  Description of Artificial Sequence: Synthetic oligonucleotide
uacauacguaacucacuaa

SEQ ID NO: 1006391 - RNA, 19 nt, Artificial Sequence
  Description of Artificial Sequence: Synthetic oligonucleotide
uuacuagcccuuguuucug

SEQ ID NO: 1006392 - RNA, 19 nt, Artificial Sequence
  Description of Artificial Sequence: Synthetic oligonucleotide
uuggaucgcaguucccgca

SEQ ID NO: 1006393 - RNA, 19 nt, Artificial Sequence
  Description of Artificial Sequence: Synthetic oligonucleotide
ccaacugagcaaauauacc

SEQ ID NO: 1006394 - RNA, 19 nt, Artificial Sequence
  Description of Artificial Sequence: Synthetic oligonucleotide
cuuucgagguuccuguaga

SEQ ID NO: 1006395 - RNA, 19 nt, Artificial Sequence
  Description of Artificial Sequence: Synthetic oligonucleotide
ucccauuacgucgagucau

SEQ ID NO: 1006396 - RNA, 19 nt, Artificial Sequence
  Description of Artificial Sequence: Synthetic oligonucleotide
gcuacaauacaauauuagu

SEQ ID NO: 1006397 - RNA, 19 nt, Artificial Sequence
  Description of Artificial Sequence: Synthetic oligonucleotide
aauguaagggacaguucuu

SEQ ID NO: 1006398 - RNA, 19 nt, Artificial Sequence
  Description of Artificial Sequence: Synthetic oligonucleotide
uggugggagauacaacauu

SEQ ID NO: 1006399 - RNA, 19 nt, Artificial Sequence
  Description of Artificial Sequence: Synthetic oligonucleotide
auaagcgauugccaagcua

SEQ ID NO: 1006400 - RNA, 19 nt, Artificial Sequence
  Description of Artificial Sequence: Synthetic oligonucleotide
acuugccuauuuaauauau

SEQ ID NO: 1006401 - RNA, 19 nt, Artificial Sequence
  Description of Artificial Sequence: Synthetic oligonucleotide
ugguauugccucggaagcc

SEQ ID NO: 1006402 - RNA, 19 nt, Artificial Sequence
  Description of Artificial Sequence: Synthetic oligonucleotide
gagucauucccugaggugu

SEQ ID NO: 1006403 - RNA, 19 nt, Artificial Sequence
  Description of Artificial Sequence: Synthetic oligonucleotide
aacuggcgucucuguuccc

SEQ ID NO: 1006404 - RNA, 19 nt, Artificial Sequence
  Description of Artificial Sequence: Synthetic oligonucleotide
  modified_base (7)..(7): a, c, u, g, unknown or other
gugggunuguuuacauuac

SEQ ID NO: 1006405 - RNA, 19 nt, Artificial Sequence
  Description of Artificial Sequence: Synthetic oligonucleotide
gcguaacuuaacuuucgag

SEQ ID NO: 1006406 - RNA, 19 nt, Artificial Sequence
  Description of Artificial Sequence: Synthetic oligonucleotide
ugauccuuacuagcccuug

SEQ ID NO: 1006407 - RNA, 19 nt, Artificial Sequence
  Description of Artificial Sequence: Synthetic oligonucleotide
cauagauguagcuaacgau

SEQ ID NO: 1006408 - RNA, 19 nt, Artificial Sequence
  Description of Artificial Sequence: Synthetic oligonucleotide
uuacuacgauguuuauguc

SEQ ID NO: 1006409 - RNA, 19 nt, Artificial Sequence
  Description of Artificial Sequence: Synthetic oligonucleotide
guauguagaacuaaucguu

SEQ ID NO: 1006410 - RNA, 19 nt, Artificial Sequence
  Description of Artificial Sequence: Synthetic oligonucleotide
acgaacugcucuuucccau

SEQ ID NO: 1006411 - RNA, 19 nt, Artificial Sequence
  Description of Artificial Sequence: Synthetic oligonucleotide
agcuacugaccugcucugc

SEQ ID NO: 1006412 - RNA, 19 nt, Artificial Sequence
  Description of Artificial Sequence: Synthetic oligonucleotide
gaaugguauugccucggaa

SEQ ID NO: 1006413 - RNA, 19 nt, Artificial Sequence
  Description of Artificial Sequence: Synthetic oligonucleotide
ucuuucccauuacgucgag

SEQ ID NO: 1006414 - RNA, 19 nt, Artificial Sequence
  Description of Artificial Sequence: Synthetic oligonucleotide
guagcuaacgauugauuau

SEQ ID NO: 1006415 - RNA, 19 nt, Artificial Sequence
  Description of Artificial Sequence: Synthetic oligonucleotide
cuauaacuuuauucacuga

SEQ ID NO: 1006416 - RNA, 19 nt, Artificial Sequence
  Description of Artificial Sequence: Synthetic oligonucleotide
auggcuaaacuggcgucuc

SEQ ID NO: 1006417 - RNA, 19 nt, Artificial Sequence
  Description of Artificial Sequence: Synthetic oligonucleotide
guuacacaaauugugcagu

SEQ ID NO: 1006418 - RNA, 19 nt, Artificial Sequence
  Description of Artificial Sequence: Synthetic oligonucleotide
uucucgggugcuccauucu

SEQ ID NO: 1006419 - RNA, 19 nt, Artificial Sequence
  Description of Artificial Sequence: Synthetic oligonucleotide
aacuuucgagguuccugua

SEQ ID NO: 1006420 - RNA, 19 nt, Artificial Sequence
  Description of Artificial Sequence: Synthetic oligonucleotide
gccaagcuaaauaaauuac

SEQ ID NO: 1006421 - RNA, 19 nt, Artificial Sequence
  Description of Artificial Sequence: Synthetic oligonucleotide
cugagcaaauauaccaugu

SEQ ID NO: 1006422 - RNA, 19 nt, Artificial Sequence
  Description of Artificial Sequence: Synthetic oligonucleotide
ggcacgaacugcucuuucc

SEQ ID NO: 1006423 - RNA, 19 nt, Artificial Sequence
  Description of Artificial Sequence: Synthetic oligonucleotide
ugcccuugauggcuuugca

SEQ ID NO: 1006424 - RNA, 19 nt, Artificial Sequence
  Description of Artificial Sequence: Synthetic oligonucleotide
guguguauauauauauaua

SEQ ID NO: 1006425 - RNA, 19 nt, Artificial Sequence
  Description of Artificial Sequence: Synthetic oligonucleotide
cccacuaacacaaaucucu

SEQ ID NO: 1006426 - RNA, 19 nt, Artificial Sequence
  Description of Artificial Sequence: Synthetic oligonucleotide
auucuauguuucaucuagu

SEQ ID NO: 1006427 - RNA, 19 nt, Artificial Sequence
  Description of Artificial Sequence: Synthetic oligonucleotide
uguagcccuauggcuaaac

SEQ ID NO: 1006428 - RNA, 19 nt, Artificial Sequence
  Description of Artificial Sequence: Synthetic oligonucleotide
caucuaguagaugauuaaa

SEQ ID NO: 1006429 - RNA, 19 nt, Artificial Sequence
  Description of Artificial Sequence: Synthetic oligonucleotide
auguaagggacaguucuua

SEQ ID NO: 1006430 - RNA, 19 nt, Artificial Sequence
  Description of Artificial Sequence: Synthetic oligonucleotide
acauuggaucgcaguuccc

SEQ ID NO: 1006431 - RNA, 19 nt, Artificial Sequence
  Description of Artificial Sequence: Synthetic oligonucleotide
uuacuacugcaaggugaag

SEQ ID NO: 1006432 - RNA, 19 nt, Artificial Sequence
  Description of Artificial Sequence: Synthetic oligonucleotide
cuuaggaauuacccacuaa

SEQ ID NO: 1006433 - RNA, 19 nt, Artificial Sequence
  Description of Artificial Sequence: Synthetic oligonucleotide
uuaugucacaauggugcuu

SEQ ID NO: 1006434 - RNA, 19 nt, Artificial Sequence
  Description of Artificial Sequence: Synthetic oligonucleotide
agaaguuuucugaguaguu

SEQ ID NO: 1006435 - RNA, 19 nt, Artificial Sequence
  Description of Artificial Sequence: Synthetic oligonucleotide
uuccucccuucaaaacagu

SEQ ID NO: 1006436 - RNA, 19 nt, Artificial Sequence
  Description of Artificial Sequence: Synthetic oligonucleotide
gguaugacuucaaauagau

SEQ ID NO: 1006437 - RNA, 19 nt, Artificial Sequence
  Description of Artificial Sequence: Synthetic oligonucleotide
guaugacuucaaauagauc

SEQ ID NO: 1006438 - RNA, 19 nt, Artificial Sequence
  Description of Artificial Sequence: Synthetic oligonucleotide
ccacuaacacaaaucucug

SEQ ID NO: 1006439 - RNA, 19 nt, Artificial Sequence
  Description of Artificial Sequence: Synthetic oligonucleotide
agguguagcccuauggcua

SEQ ID NO: 1006440 - RNA, 19 nt, Artificial Sequence
  Description of Artificial Sequence: Synthetic oligonucleotide
guguauauauauauauauu

SEQ ID NO: 1006441 - RNA, 19 nt, Artificial Sequence
  Description of Artificial Sequence: Synthetic oligonucleotide
cauaauauuuaaggacaua

SEQ ID NO: 1006442 - RNA, 19 nt, Artificial Sequence
  Description of Artificial Sequence: Synthetic oligonucleotide
ucccgcagugguuguacaa

SEQ ID NO: 1006443 - RNA, 19 nt, Artificial Sequence
  Description of Artificial Sequence: Synthetic oligonucleotide
augcuacaauacaauauua

SEQ ID NO: 1006444 - RNA, 19 nt, Artificial Sequence
  Description of Artificial Sequence: Synthetic oligonucleotide
acgucgagucauucccuga

SEQ ID NO: 1006445 - RNA, 19 nt, Artificial Sequence
  Description of Artificial Sequence: Synthetic oligonucleotide
cacgaacugcucuuuccca

SEQ ID NO: 1006446 - RNA, 19 nt, Artificial Sequence
  Description of Artificial Sequence: Synthetic oligonucleotide
gguauugccucggaagcca

SEQ ID NO: 1006447 - RNA, 19 nt, Artificial Sequence
  Description of Artificial Sequence: Synthetic oligonucleotide
gcuaacgauugauuauuaa

SEQ ID NO: 1006448 - RNA, 19 nt, Artificial Sequence
  Description of Artificial Sequence: Synthetic oligonucleotide
aauuacccacuaacacaaa

SEQ ID NO: 1006449 - RNA, 19 nt, Artificial Sequence
  Description of Artificial Sequence: Synthetic oligonucleotide
guauugccucggaagccag

SEQ ID NO: 1006450 - RNA, 19 nt, Artificial Sequence
  Description of Artificial Sequence: Synthetic oligonucleotide
uggcacgaacugcucuuuc

SEQ ID NO: 1006451 - RNA, 19 nt, Artificial Sequence
  Description of Artificial Sequence: Synthetic oligonucleotide
  modified_base (12)..(12): a, c, u, g, unknown or other
cagcugugggunuguuuac

SEQ ID NO: 1006452 - RNA, 19 nt, Artificial Sequence
  Description of Artificial Sequence: Synthetic oligonucleotide
agcgauugccaagcuaaau

SEQ ID NO: 1006453 - RNA, 19 nt, Artificial Sequence
  Description of Artificial Sequence: Synthetic oligonucleotide
auguagcuaacgauugauu

SEQ ID NO: 1006454 - RNA, 19 nt, Artificial Sequence
  Description of Artificial Sequence: Synthetic oligonucleotide
guguguguauauauauaua

SEQ ID NO: 1006455 - RNA, 19 nt, Artificial Sequence
  Description of Artificial Sequence: Synthetic oligonucleotide
caccacccuacauacaacu

SEQ ID NO: 1006456 - RNA, 19 nt, Artificial Sequence
  Description of Artificial Sequence: Synthetic oligonucleotide
  modified_base (5)..(5): a, c, u, g, unknown or other
gggunuguuuacauuacua

SEQ ID NO: 1006457 - RNA, 19 nt, Artificial Sequence
  Description of Artificial Sequence: Synthetic oligonucleotide
cggggaaugguauugccuc

SEQ ID NO: 1006458 - RNA, 19 nt, Artificial Sequence
  Description of Artificial Sequence: Synthetic oligonucleotide
guagcccuauggcuaaacu

SEQ ID NO: 1006459 - RNA, 19 nt, Artificial Sequence
  Description of Artificial Sequence: Synthetic oligonucleotide
ccgcagugguuguacaagc

SEQ ID NO: 1006460 - RNA, 19 nt, Artificial Sequence
  Description of Artificial Sequence: Synthetic oligonucleotide
cacccuacauacaacuaau

SEQ ID NO: 1006461 - RNA, 19 nt, Artificial Sequence
  Description of Artificial Sequence: Synthetic oligonucleotide
cuucagcguaacuuaacuu

SEQ ID NO: 1006462 - RNA, 19 nt, Artificial Sequence
  Description of Artificial Sequence: Synthetic oligonucleotide
agcuaacgauugauuauua

SEQ ID NO: 1006463 - RNA, 19 nt, Artificial Sequence
  Description of Artificial Sequence: Synthetic oligonucleotide
ccuuaggaggcuucugaca

SEQ ID NO: 1006464 - RNA, 19 nt, Artificial Sequence
  Description of Artificial Sequence: Synthetic oligonucleotide
cgucgagucauucccugag

SEQ ID NO: 1006465 - RNA, 19 nt, Artificial Sequence
  Description of Artificial Sequence: Synthetic oligonucleotide
ccauguuaccaacccacca

SEQ ID NO: 1006466 - RNA, 19 nt, Artificial Sequence
  Description of Artificial Sequence: Synthetic oligonucleotide
ccacccuacauacaacuaa

SEQ ID NO: 1006467 - RNA, 19 nt, Artificial Sequence
  Description of Artificial Sequence: Synthetic oligonucleotide
cgagucauucccugaggug

SEQ ID NO: 1006468 - RNA, 19 nt, Artificial Sequence
  Description of Artificial Sequence: Synthetic oligonucleotide
cccgcagugguuguacaag

SEQ ID NO: 1006469 - RNA, 19 nt, Artificial Sequence
  Description of Artificial Sequence: Synthetic oligonucleotide
caccaaaccauaagcgauu

SEQ ID NO: 1006470 - RNA, 19 nt, Artificial Sequence
  Description of Artificial Sequence: Synthetic oligonucleotide
cuaaacuggcgucucuguu

SEQ ID NO: 1006471 - RNA, 19 nt, Artificial Sequence
  Description of Artificial Sequence: Synthetic oligonucleotide
acccuacauacaacuaaua

SEQ ID NO: 1006472 - RNA, 19 nt, Artificial Sequence
  Description of Artificial Sequence: Synthetic oligonucleotide
augauccuuacuagcccuu

SEQ ID NO: 1006473 - RNA, 19 nt, Artificial Sequence
  Description of Artificial Sequence: Synthetic oligonucleotide
accacccuacauacaacua

SEQ ID NO: 1006474 - RNA, 19 nt, Artificial Sequence
  Description of Artificial Sequence: Synthetic oligonucleotide
gcuaaacuggcgucucugu

SEQ ID NO: 1006475 - RNA, 19 nt, Artificial Sequence
  Description of Artificial Sequence: Synthetic oligonucleotide
cauaagcgauugccaagcu

SEQ ID NO: 1006476 - RNA, 19 nt, Artificial Sequence
  Description of Artificial Sequence: Synthetic oligonucleotide
ccaccaaaccauaagcgau

SEQ ID NO: 1006477 - RNA, 19 nt, Artificial Sequence
  Description of Artificial Sequence: Synthetic oligonucleotide
guauguaaacuugccuauu

SEQ ID NO: 1006478 - RNA, 19 nt, Artificial Sequence
  Description of Artificial Sequence: Synthetic oligonucleotide
  modified_base (9)..(9): a, c, u, g, unknown or other
cugugggunuguuuacauu

SEQ ID NO: 1006479 - RNA, 19 nt, Artificial Sequence
  Description of Artificial Sequence: Synthetic oligonucleotide
ggcuacuuccucccuucaa

SEQ ID NO: 1006480 - RNA, 19 nt, Artificial Sequence
  Description of Artificial Sequence: Synthetic oligonucleotide
gccucggaagccagaauga

SEQ ID NO: 1006481 - RNA, 19 nt, Artificial Sequence
  Description of Artificial Sequence: Synthetic oligonucleotide
gguggcacgaacugcucuu

SEQ ID NO: 1006482 - RNA, 19 nt, Artificial Sequence
  Description of Artificial Sequence: Synthetic oligonucleotide
ccauuacgucgagucauuc

SEQ ID NO: 1006483 - RNA, 19 nt, Artificial Sequence
  Description of Artificial Sequence: Synthetic oligonucleotide
cuuucccauuacgucgagu

SEQ ID NO: 1006484 - RNA, 19 nt, Artificial Sequence
  Description of Artificial Sequence: Synthetic oligonucleotide
cacuaauguaagggacagu

SEQ ID NO: 1006485 - RNA, 19 nt, Artificial Sequence
  Description of Artificial Sequence: Synthetic oligonucleotide
ccggggaaugguauugccu

SEQ ID NO: 1006486 - RNA, 19 nt, Artificial Sequence
  Description of Artificial Sequence: Synthetic oligonucleotide
ccccggggaaugguauugc

SEQ ID NO: 1006487 - RNA, 19 nt, Artificial Sequence
  Description of Artificial Sequence: Synthetic oligonucleotide
gcuucucgggugcuccauu

SEQ ID NO: 1006488 - RNA, 19 nt, Artificial Sequence
  Description of Artificial Sequence: Synthetic oligonucleotide
cccauuacgucgagucauu

SEQ ID NO: 1006489 - RNA, 19 nt, Artificial Sequence
  Description of Artificial Sequence: Synthetic oligonucleotide
ccucggaagccagaaugau

SEQ ID NO: 1006490 - RNA, 19 nt, Artificial Sequence
  Description of Artificial Sequence: Synthetic oligonucleotide
gcgucucuguucccugauu

SEQ ID NO: 1006491 - RNA, 19 nt, Artificial Sequence
  Description of Artificial Sequence: Synthetic oligonucleotide
auaaauauaaauuuggucc

SEQ ID NO: 1006492 - RNA, 19 nt, Artificial Sequence
  Description of Artificial Sequence: Synthetic oligonucleotide
aauucaaucauuuuaguuc

SEQ ID NO: 1006493 - RNA, 19 nt, Artificial Sequence
  Description of Artificial Sequence: Synthetic oligonucleotide
auaagagugacuuugaagc

SEQ ID NO: 1006494 - RNA, 19 nt, Artificial Sequence
  Description of Artificial Sequence: Synthetic oligonucleotide
aaaugguuuacuuacaauc

SEQ ID NO: 1006495 - RNA, 19 nt, Artificial Sequence
  Description of Artificial Sequence: Synthetic oligonucleotide
uccguuaaaaucaauaugg

SEQ ID NO: 1006496 - RNA, 19 nt, Artificial Sequence
  Description of Artificial Sequence: Synthetic oligonucleotide
aauccuguaaaauucaauc

SEQ ID NO: 1006497 - RNA, 19 nt, Artificial Sequence
  Description of Artificial Sequence: Synthetic oligonucleotide
ucuacaauuauaaauauaa

SEQ ID NO: 1006498 - RNA, 19 nt, Artificial Sequence
  Description of Artificial Sequence: Synthetic oligonucleotide
aaaacaaauggcuuucuac

SEQ ID NO: 1006499 - RNA, 19 nt, Artificial Sequence
  Description of Artificial Sequence: Synthetic oligonucleotide
aagaacaaugcuuagacug

SEQ ID NO: 1006500 - RNA, 19 nt, Artificial Sequence
  Description of Artificial Sequence: Synthetic oligonucleotide
aaugacaugcagaagaaac

SEQ ID NO: 1006501 - RNA, 19 nt, Artificial Sequence
  Description of Artificial Sequence: Synthetic oligonucleotide
auaaauuugguccauggag

SEQ ID NO: 1006502 - RNA, 19 nt, Artificial Sequence
  Description of Artificial Sequence: Synthetic oligonucleotide
ucaauuuggcagcagaacg

SEQ ID NO: 1006503 - RNA, 19 nt, Artificial Sequence
  Description of Artificial Sequence: Synthetic oligonucleotide
ucaucgugaacaaucaugg

SEQ ID NO: 1006504 - RNA, 19 nt, Artificial Sequence
  Description of Artificial Sequence: Synthetic oligonucleotide
aaucauuuuaguucaaaca

SEQ ID NO: 1006505 - RNA, 19 nt, Artificial Sequence
  Description of Artificial Sequence: Synthetic oligonucleotide
uauauuucuagcaaacaug

SEQ ID NO: 1006506 - RNA, 19 nt, Artificial Sequence
  Description of Artificial Sequence: Synthetic oligonucleotide
aaauugaucaucuuggcua

SEQ ID NO: 1006507 - RNA, 19 nt, Artificial Sequence
  Description of Artificial Sequence: Synthetic oligonucleotide
aaaacaaacaugucccaag

SEQ ID NO: 1006508 - RNA, 19 nt, Artificial Sequence
  Description of Artificial Sequence: Synthetic oligonucleotide
uugaauaucaucaggagau

SEQ ID NO: 1006509 - RNA, 19 nt, Artificial Sequence
  Description of Artificial Sequence: Synthetic oligonucleotide
accacuagaaaacucacac

SEQ ID NO: 1006510 - RNA, 19 nt, Artificial Sequence
  Description of Artificial Sequence: Synthetic oligonucleotide
uacauaaguuacuagauca

SEQ ID NO: 1006511 - RNA, 19 nt, Artificial Sequence
  Description of Artificial Sequence: Synthetic oligonucleotide
aaguauaccacuagaaaac

SEQ ID NO: 1006512 - RNA, 19 nt, Artificial Sequence
  Description of Artificial Sequence: Synthetic oligonucleotide
ugaacuaugagcuuuuccu

SEQ ID NO: 1006513 - RNA, 19 nt, Artificial Sequence
  Description of Artificial Sequence: Synthetic oligonucleotide
acauguuacaaauacagcu

SEQ ID NO: 1006514 - RNA, 19 nt, Artificial Sequence
  Description of Artificial Sequence: Synthetic oligonucleotide
cuuuguuuggccaauaaac

SEQ ID NO: 1006515 - RNA, 19 nt, Artificial Sequence
  Description of Artificial Sequence: Synthetic oligonucleotide
uauaccacuagaaaacuca

SEQ ID NO: 1006516 - RNA, 19 nt, Artificial Sequence
  Description of Artificial Sequence: Synthetic oligonucleotide
aauacuuaugaguucaaau

SEQ ID NO: 1006517 - RNA, 19 nt, Artificial Sequence
  Description of Artificial Sequence: Synthetic oligonucleotide
gaauauuugacugacucag

SEQ ID NO: 1006518 - RNA, 19 nt, Artificial Sequence
  Description of Artificial Sequence: Synthetic oligonucleotide
ucuacuauauuaaaaguua

SEQ ID NO: 1006519 - RNA, 19 nt, Artificial Sequence
  Description of Artificial Sequence: Synthetic oligonucleotide
uaagguguuauucucauaa

SEQ ID NO: 1006520 - RNA, 19 nt, Artificial Sequence
  Description of Artificial Sequence: Synthetic oligonucleotide
aucaucaggagauaaaaug

SEQ ID NO: 1006521 - RNA, 19 nt, Artificial Sequence
  Description of Artificial Sequence: Synthetic oligonucleotide
uuuuguaccaucuggaauc

SEQ ID NO: 1006522 - RNA, 19 nt, Artificial Sequence
  Description of Artificial Sequence: Synthetic oligonucleotide
uuaacauaggaauggaugu

SEQ ID NO: 1006523 - RNA, 19 nt, Artificial Sequence
  Description of Artificial Sequence: Synthetic oligonucleotide
uugauaauacuuaugaguu

SEQ ID NO: 1006524 - RNA, 19 nt, Artificial Sequence
  Description of Artificial Sequence: Synthetic oligonucleotide
uuaguucaaacauaacaag

SEQ ID NO: 1006525 - RNA, 19 nt, Artificial Sequence
  Description of Artificial Sequence: Synthetic oligonucleotide
aaucuacuauauuaaaagu

SEQ ID NO: 1006526 - RNA, 19 nt, Artificial Sequence
  Description of Artificial Sequence: Synthetic oligonucleotide
uuaaacucaaguauaccac

SEQ ID NO: 1006527 - RNA, 19 nt, Artificial Sequence
  Description of Artificial Sequence: Synthetic oligonucleotide
uaaauuugguccauggaga

SEQ ID NO: 1006528 - RNA, 19 nt, Artificial Sequence
  Description of Artificial Sequence: Synthetic oligonucleotide
aguguuaaacuagagacuc

SEQ ID NO: 1006529 - RNA, 19 nt, Artificial Sequence
  Description of Artificial Sequence: Synthetic oligonucleotide
uuuacuaaugggacuaucu

SEQ ID NO: 1006530 - RNA, 19 nt, Artificial Sequence
  Description of Artificial Sequence: Synthetic oligonucleotide
uuauauuucuagcaaacau

SEQ ID NO: 1006531 - RNA, 19 nt, Artificial Sequence
  Description of Artificial Sequence: Synthetic oligonucleotide
uacuaaugggacuaucugg

SEQ ID NO: 1006532 - RNA, 19 nt, Artificial Sequence
  Description of Artificial Sequence: Synthetic oligonucleotide
uuagaagacauguugagua

SEQ ID NO: 1006533 - RNA, 19 nt, Artificial Sequence
  Description of Artificial Sequence: Synthetic oligonucleotide
uggaaucauaaccacaagc

SEQ ID NO: 1006534 - RNA, 19 nt, Artificial Sequence
  Description of Artificial Sequence: Synthetic oligonucleotide
uggccaauaaacaaauuca

SEQ ID NO: 1006535 - RNA, 19 nt, Artificial Sequence
  Description of Artificial Sequence: Synthetic oligonucleotide
auauaggaugcauugaugu

SEQ ID NO: 1006536 - RNA, 19 nt, Artificial Sequence
  Description of Artificial Sequence: Synthetic oligonucleotide
caugauauaggaugcauug

SEQ ID NO: 1006537 - RNA, 19 nt, Artificial Sequence
  Description of Artificial Sequence: Synthetic oligonucleotide
uuaauggugugcagaaggg

SEQ ID NO: 1006538 - RNA, 19 nt, Artificial Sequence
  Description of Artificial Sequence: Synthetic oligonucleotide
aguuguaagauguugaaua

SEQ ID NO: 1006539 - RNA, 19 nt, Artificial Sequence
  Description of Artificial Sequence: Synthetic oligonucleotide
aacaaucaugggcccaucc

SEQ ID NO: 1006540 - RNA, 19 nt, Artificial Sequence
  Description of Artificial Sequence: Synthetic oligonucleotide
cauguuuuguaccaucugg

SEQ ID NO: 1006541 - RNA, 19 nt, Artificial Sequence
  Description of Artificial Sequence: Synthetic oligonucleotide
aacaggguuaguuccuugg

SEQ ID NO: 1006542 - RNA, 19 nt, Artificial Sequence
  Description of Artificial Sequence: Synthetic oligonucleotide
cuuacaaucuacuauauua

SEQ ID NO: 1006543 - RNA, 19 nt, Artificial Sequence
  Description of Artificial Sequence: Synthetic oligonucleotide
auuaacauaggaauggaug

SEQ ID NO: 1006544 - RNA, 19 nt, Artificial Sequence
  Description of Artificial Sequence: Synthetic oligonucleotide
uuaugaucccauaucauuc

SEQ ID NO: 1006545 - RNA, 19 nt, Artificial Sequence
  Description of Artificial Sequence: Synthetic oligonucleotide
aguauggccagagagagag

SEQ ID NO: 1006546 - RNA, 19 nt, Artificial Sequence
  Description of Artificial Sequence: Synthetic oligonucleotide
ugcauaaggguugucaggg

SEQ ID NO: 1006547 - RNA, 19 nt, Artificial Sequence
  Description of Artificial Sequence: Synthetic oligonucleotide
gagagagagagagagagag

SEQ ID NO: 1006548 - RNA, 19 nt, Artificial Sequence
  Description of Artificial Sequence: Synthetic oligonucleotide
uaugaggaguguauuaaca

SEQ ID NO: 1006549 - RNA, 19 nt, Artificial Sequence
  Description of Artificial Sequence: Synthetic oligonucleotide
uuccacgagagucaaaaug

SEQ ID NO: 1006550 - RNA, 19 nt, Artificial Sequence
  Description of Artificial Sequence: Synthetic oligonucleotide
gaggaguguauuaacauag

SEQ ID NO: 1006551 - RNA, 19 nt, Artificial Sequence
  Description of Artificial Sequence: Synthetic oligonucleotide
uaaauugaucaucuuggcu

SEQ ID NO: 1006552 - RNA, 19 nt, Artificial Sequence
  Description of Artificial Sequence: Synthetic oligonucleotide
acuaaugggacuaucuggg

SEQ ID NO: 1006553 - RNA, 19 nt, Artificial Sequence
  Description of Artificial Sequence: Synthetic oligonucleotide
auggcuuucuacuuuccac

SEQ ID NO: 1006554 - RNA, 19 nt, Artificial Sequence
  Description of Artificial Sequence: Synthetic oligonucleotide
uggcuuucuacuuuccacg

SEQ ID NO: 1006555 - RNA, 19 nt, Artificial Sequence
  Description of Artificial Sequence: Synthetic oligonucleotide
gaaucauaaccacaagcug

SEQ ID NO: 1006556 - RNA, 19 nt, Artificial Sequence
  Description of Artificial Sequence: Synthetic oligonucleotide
cuucagaugaauacugcag

SEQ ID NO: 1006557 - RNA, 19 nt, Artificial Sequence
  Description of Artificial Sequence: Synthetic oligonucleotide
aagugaacuacaagaaguc

SEQ ID NO: 1006558 - RNA, 19 nt, Artificial Sequence
  Description of Artificial Sequence: Synthetic oligonucleotide
uagaaaacucacacaguag

SEQ ID NO: 1006559 - RNA, 19 nt, Artificial Sequence
  Description of Artificial Sequence: Synthetic oligonucleotide
aaugcuuagacuggguugu

SEQ ID NO: 1006560 - RNA, 19 nt, Artificial Sequence
  Description of Artificial Sequence: Synthetic oligonucleotide
cuaagaugaagucuugaac

SEQ ID NO: 1006561 - RNA, 19 nt, Artificial Sequence
  Description of Artificial Sequence: Synthetic oligonucleotide
uauuugacugacucagaag

SEQ ID NO: 1006562 - RNA, 19 nt, Artificial Sequence
  Description of Artificial Sequence: Synthetic oligonucleotide
uguuuggccaauaaacaaa

SEQ ID NO: 1006563 - RNA, 19 nt, Artificial Sequence
  Description of Artificial Sequence: Synthetic oligonucleotide
aacccaugauauaggaugc

SEQ ID NO: 1006564 - RNA, 19 nt, Artificial Sequence
  Description of Artificial Sequence: Synthetic oligonucleotide
uacauguuacaaauacagc

SEQ ID NO: 1006565 - RNA, 19 nt, Artificial Sequence
  Description of Artificial Sequence: Synthetic oligonucleotide
cuuugauaauacuuaugag

SEQ ID NO: 1006566 - RNA, 19 nt, Artificial Sequence
  Description of Artificial Sequence: Synthetic oligonucleotide
aacaggacaacagaacuga

SEQ ID NO: 1006567 - RNA, 19 nt, Artificial Sequence
  Description of Artificial Sequence: Synthetic oligonucleotide
agaaaguuccugccguuac

SEQ ID NO: 1006568 - RNA, 19 nt, Artificial Sequence
  Description of Artificial Sequence: Synthetic oligonucleotide
agaccagagaauaaacuac

SEQ ID NO: 1006569 - RNA, 19 nt, Artificial Sequence
  Description of Artificial Sequence: Synthetic oligonucleotide
agacauaagagugacuuug

SEQ ID NO: 1006570 - RNA, 19 nt, Artificial Sequence
  Description of Artificial Sequence: Synthetic oligonucleotide
acuacaagaagucuuucaa

SEQ ID NO: 1006571 - RNA, 19 nt, Artificial Sequence
  Description of Artificial Sequence: Synthetic oligonucleotide
guuacuagaucacuucuac

SEQ ID NO: 1006572 - RNA, 19 nt, Artificial Sequence
  Description of Artificial Sequence: Synthetic oligonucleotide
auauuucuagcaaacauga

SEQ ID NO: 1006573 - RNA, 19 nt, Artificial Sequence
  Description of Artificial Sequence: Synthetic oligonucleotide
uugaacuaugagcuuuucc

SEQ ID NO: 1006574 - RNA, 19 nt, Artificial Sequence
  Description of Artificial Sequence: Synthetic oligonucleotide
uauggccagagagagagag

SEQ ID NO: 1006575 - RNA, 19 nt, Artificial Sequence
  Description of Artificial Sequence: Synthetic oligonucleotide
aaacucacacaguaguaaa

SEQ ID NO: 1006576 - RNA, 19 nt, Artificial Sequence
  Description of Artificial Sequence: Synthetic oligonucleotide
cagagagagagagagagag

SEQ ID NO: 1006577 - RNA, 19 nt, Artificial Sequence
  Description of Artificial Sequence: Synthetic oligonucleotide
acaggguuaguuccuuggc

SEQ ID NO: 1006578 - RNA, 19 nt, Artificial Sequence
  Description of Artificial Sequence: Synthetic oligonucleotide
uuuggcagcagaacgaguu

SEQ ID NO: 1006579 - RNA, 19 nt, Artificial Sequence
  Description of Artificial Sequence: Synthetic oligonucleotide
caaguauaccacuagaaaa

SEQ ID NO: 1006580 - RNA, 19 nt, Artificial Sequence
  Description of Artificial Sequence: Synthetic oligonucleotide
agcucuguuuccaucaggc

SEQ ID NO: 1006581 - RNA, 19 nt, Artificial Sequence
  Description of Artificial Sequence: Synthetic oligonucleotide
cuacuucagaugaauacug

SEQ ID NO: 1006582 - RNA, 19 nt, Artificial Sequence
  Description of Artificial Sequence: Synthetic oligonucleotide
uguuuuacuaaugggacua

SEQ ID NO: 1006583 - RNA, 19 nt, Artificial Sequence
  Description of Artificial Sequence: Synthetic oligonucleotide
uuggcuacuugauaaacau

SEQ ID NO: 1006584 - RNA, 19 nt, Artificial Sequence
  Description of Artificial Sequence: Synthetic oligonucleotide
aggcacacguuguuaaugg

SEQ ID NO: 1006585 - RNA, 19 nt, Artificial Sequence
  Description of Artificial Sequence: Synthetic oligonucleotide
aacgaguuacugucauguc

SEQ ID NO: 1006586 - RNA, 19 nt, Artificial Sequence
  Description of Artificial Sequence: Synthetic oligonucleotide
acuucagaugaauacugca

SEQ ID NO: 1006587 - RNA, 19 nt, Artificial Sequence
  Description of Artificial Sequence: Synthetic oligonucleotide
uguaaaauucaaucauuuu

SEQ ID NO: 1006588 - RNA, 19 nt, Artificial Sequence
  Description of Artificial Sequence: Synthetic oligonucleotide
uguugcuucuaagaugaag

SEQ ID NO: 1006589 - RNA, 19 nt, Artificial Sequence
  Description of Artificial Sequence: Synthetic oligonucleotide
uggccagagagagagagag

SEQ ID NO: 1006590 - RNA, 19 nt, Artificial Sequence
  Description of Artificial Sequence: Synthetic oligonucleotide
ugaaaaugccuuacuucca

SEQ ID NO: 1006591 - RNA, 19 nt, Artificial Sequence
  Description of Artificial Sequence: Synthetic oligonucleotide
agaauaaacuacaucauua

SEQ ID NO: 1006592 - RNA, 19 nt, Artificial Sequence
  Description of Artificial Sequence: Synthetic oligonucleotide
uacuucagaugaauacugc

SEQ ID NO: 1006593 - RNA, 19 nt, Artificial Sequence
  Description of Artificial Sequence: Synthetic oligonucleotide
uccaugcucaucgugaaca

SEQ ID NO: 1006594 - RNA, 19 nt, Artificial Sequence
  Description of Artificial Sequence: Synthetic oligonucleotide
aacuagagacuccaggcuu

SEQ ID NO: 1006595 - RNA, 19 nt, Artificial Sequence
  Description of Artificial Sequence: Synthetic oligonucleotide
acaugaugauacauguuac

SEQ ID NO: 1006596 - RNA, 19 nt, Artificial Sequence
  Description of Artificial Sequence: Synthetic oligonucleotide
acauaaguuacuagaucac

SEQ ID NO: 1006597 - RNA, 19 nt, Artificial Sequence
  Description of Artificial Sequence: Synthetic oligonucleotide
gauauaggaugcauugaug

SEQ ID NO: 1006598 - RNA, 19 nt, Artificial Sequence
  Description of Artificial Sequence: Synthetic oligonucleotide
agagaaacugauacuguuc

SEQ ID NO: 1006599 - RNA, 19 nt, Artificial Sequence
  Description of Artificial Sequence: Synthetic oligonucleotide
caaugcuuagacuggguug

SEQ ID NO: 1006600 - RNA, 19 nt, Artificial Sequence
  Description of Artificial Sequence: Synthetic oligonucleotide
gaucccauaucauucucca

SEQ ID NO: 1006601 - RNA, 19 nt, Artificial Sequence
  Description of Artificial Sequence: Synthetic oligonucleotide
aguaagaccagagaauaaa

SEQ ID NO: 1006602 - RNA, 19 nt, Artificial Sequence
  Description of Artificial Sequence: Synthetic oligonucleotide
uguuuuguaccaucuggaa

SEQ ID NO: 1006603 - RNA, 19 nt, Artificial Sequence
  Description of Artificial Sequence: Synthetic oligonucleotide
augcucaucgugaacaauc

SEQ ID NO: 1006604 - RNA, 19 nt, Artificial Sequence
  Description of Artificial Sequence: Synthetic oligonucleotide
ugcucaucgugaacaauca

SEQ ID NO: 1006605 - RNA, 19 nt, Artificial Sequence
  Description of Artificial Sequence: Synthetic oligonucleotide
aggaccacuuuguagagaa

SEQ ID NO: 1006606 - RNA, 19 nt, Artificial Sequence
  Description of Artificial Sequence: Synthetic oligonucleotide
acgagagucaaaaugacau

SEQ ID NO: 1006607 - RNA, 19 nt, Artificial Sequence
  Description of Artificial Sequence: Synthetic oligonucleotide
gaacuaugagcuuuuccuc

SEQ ID NO: 1006608 - RNA, 19 nt, Artificial Sequence
  Description of Artificial Sequence: Synthetic oligonucleotide
gaccacuuuguagagaaac

SEQ ID NO: 1006609 - RNA, 19 nt, Artificial Sequence
  Description of Artificial Sequence: Synthetic oligonucleotide
aguuuaugggaucaucuuu

SEQ ID NO: 1006610 - RNA, 19 nt, Artificial Sequence
  Description of Artificial Sequence: Synthetic oligonucleotide
uaucaucaggagauaaaau

SEQ ID NO: 1006611 - RNA, 19 nt, Artificial Sequence
  Description of Artificial Sequence: Synthetic oligonucleotide
uugaguaaguaagaccaga

SEQ ID NO: 1006612 - RNA, 19 nt, Artificial Sequence
  Description of Artificial Sequence: Synthetic oligonucleotide
guaccuucuccgcucaggg

SEQ ID NO: 1006613 - RNA, 19 nt, Artificial Sequence
  Description of Artificial Sequence: Synthetic oligonucleotide
gaguguauuaacauaggaa

SEQ ID NO: 1006614 - RNA, 19 nt, Artificial Sequence
  Description of Artificial Sequence: Synthetic oligonucleotide
acucaaguauaccacuaga

SEQ ID NO: 1006615 - RNA, 19 nt, Artificial Sequence
  Description of Artificial Sequence: Synthetic oligonucleotide
uugcuauccagggaugcgg

SEQ ID NO: 1006616 - RNA, 19 nt, Artificial Sequence
  Description of Artificial Sequence: Synthetic oligonucleotide
uucuagacauaagagugac

SEQ ID NO: 1006617 - RNA, 19 nt, Artificial Sequence
  Description of Artificial Sequence: Synthetic oligonucleotide
agagaagaacaaugcuuag

SEQ ID NO: 1006618 - RNA, 19 nt, Artificial Sequence
  Description of Artificial Sequence: Synthetic oligonucleotide
cauuaaacucaaguauacc

SEQ ID NO: 1006619 - RNA, 19 nt, Artificial Sequence
  Description of Artificial Sequence: Synthetic oligonucleotide
ugaggaguguauuaacaua

SEQ ID NO: 1006620 - RNA, 19 nt, Artificial Sequence
  Description of Artificial Sequence: Synthetic oligonucleotide
ugccuguugguccagguau

SEQ ID NO: 1006621 - RNA, 19 nt, Artificial Sequence
  Description of Artificial Sequence: Synthetic oligonucleotide
ccuauuaucuauaaauuga

SEQ ID NO: 1006622 - RNA, 19 nt, Artificial Sequence
  Description of Artificial Sequence: Synthetic oligonucleotide
uguaccuucuccgcucagg

SEQ ID NO: 1006623 - RNA, 19 nt, Artificial Sequence
  Description of Artificial Sequence: Synthetic oligonucleotide
cauguugaguaaguaagac

SEQ ID NO: 1006624 - RNA, 19 nt, Artificial Sequence
  Description of Artificial Sequence: Synthetic oligonucleotide
gcuuuuccucauuugauag

SEQ ID NO: 1006625 - RNA, 19 nt, Artificial Sequence
  Description of Artificial Sequence: Synthetic oligonucleotide
acccuuucaguguuaaacu

SEQ ID NO: 1006626 - RNA, 19 nt, Artificial Sequence
  Description of Artificial Sequence: Synthetic oligonucleotide
cugguaauaacccaugaua

SEQ ID NO: 1006627 - RNA, 19 nt, Artificial Sequence
  Description of Artificial Sequence: Synthetic oligonucleotide
ugccguuacuccuccaugc

SEQ ID NO: 1006628 - RNA, 19 nt, Artificial Sequence
  Description of Artificial Sequence: Synthetic oligonucleotide
aucuacuauauuaaaaguu

SEQ ID NO: 1006629 - RNA, 19 nt, Artificial Sequence
  Description of Artificial Sequence: Synthetic oligonucleotide
uaguuggugcauaaggguu

SEQ ID NO: 1006630 - RNA, 19 nt, Artificial Sequence
  Description of Artificial Sequence: Synthetic oligonucleotide
cuuucuacuuuccacgaga

SEQ ID NO: 1006631 - RNA, 19 nt, Artificial Sequence
  Description of Artificial Sequence: Synthetic oligonucleotide
ugacucagaagcuggaauu

SEQ ID NO: 1006632 - RNA, 19 nt, Artificial Sequence
  Description of Artificial Sequence: Synthetic oligonucleotide
uaugagcuuuuccucauuu

SEQ ID NO: 1006633 - RNA, 19 nt, Artificial Sequence
  Description of Artificial Sequence: Synthetic oligonucleotide
guguauuaacauaggaaug

SEQ ID NO: 1006634 - RNA, 19 nt, Artificial Sequence
  Description of Artificial Sequence: Synthetic oligonucleotide
uuacuagaucacuucuacu

SEQ ID NO: 1006635 - RNA, 19 nt, Artificial Sequence
  Description of Artificial Sequence: Synthetic oligonucleotide
auaaggguugucagggcac

SEQ ID NO: 1006636 - RNA, 19 nt, Artificial Sequence
  Description of Artificial Sequence: Synthetic oligonucleotide
uggggcacugaaaaugccu

SEQ ID NO: 1006637 - RNA, 19 nt, Artificial Sequence
  Description of Artificial Sequence: Synthetic oligonucleotide
uuggcuagcacaguacagu

SEQ ID NO: 1006638 - RNA, 19 nt, Artificial Sequence
  Description of Artificial Sequence: Synthetic oligonucleotide
uagucuguaccuucuccgc

SEQ ID NO: 1006639 - RNA, 19 nt, Artificial Sequence
  Description of Artificial Sequence: Synthetic oligonucleotide
aaauccuguaaaauucaau

SEQ ID NO: 1006640 - RNA, 19 nt, Artificial Sequence
  Description of Artificial Sequence: Synthetic oligonucleotide
acaguuuaugggaucaucu

SEQ ID NO: 1006641 - RNA, 19 nt, Artificial Sequence
  Description of Artificial Sequence: Synthetic oligonucleotide
uaccacuagaaaacucaca

SEQ ID NO: 1006642 - RNA, 19 nt, Artificial Sequence
  Description of Artificial Sequence: Synthetic oligonucleotide
ugccuugugcugacgaggc

SEQ ID NO: 1006643 - RNA, 19 nt, Artificial Sequence
  Description of Artificial Sequence: Synthetic oligonucleotide
aggacguucuguucuucuc

SEQ ID NO: 1006644 - RNA, 19 nt, Artificial Sequence
  Description of Artificial Sequence: Synthetic oligonucleotide
cuauccagggaugcggacg

SEQ ID NO: 1006645 - RNA, 19 nt, Artificial Sequence
  Description of Artificial Sequence: Synthetic oligonucleotide
uggugcauaaggguuguca

SEQ ID NO: 1006646 - RNA, 19 nt, Artificial Sequence
  Description of Artificial Sequence: Synthetic oligonucleotide
auugcuauccagggaugcg

SEQ ID NO: 1006647 - RNA, 19 nt, Artificial Sequence
  Description of Artificial Sequence: Synthetic oligonucleotide
ugcggacggauucucuucc

SEQ ID NO: 1006648 - RNA, 19 nt, Artificial Sequence
  Description of Artificial Sequence: Synthetic oligonucleotide
aagguguuauucucauaaa

SEQ ID NO: 1006649 - RNA, 19 nt, Artificial Sequence
  Description of Artificial Sequence: Synthetic oligonucleotide
uauccggcaccucuguuuc

SEQ ID NO: 1006650 - RNA, 19 nt, Artificial Sequence
  Description of Artificial Sequence: Synthetic oligonucleotide
guaugaggaguguauuaac

SEQ ID NO: 1006651 - RNA, 19 nt, Artificial Sequence
  Description of Artificial Sequence: Synthetic oligonucleotide
uacuuacaaucuacuauau

SEQ ID NO: 1006652 - RNA, 19 nt, Artificial Sequence
  Description of Artificial Sequence: Synthetic oligonucleotide
agaaauccuguaaaauuca

SEQ ID NO: 1006653 - RNA, 19 nt, Artificial Sequence
  Description of Artificial Sequence: Synthetic oligonucleotide
caugaugauacauguuaca

SEQ ID NO: 1006654 - RNA, 19 nt, Artificial Sequence
  Description of Artificial Sequence: Synthetic oligonucleotide
ugaaaugcccacccuugau

SEQ ID NO: 1006655 - RNA, 19 nt, Artificial Sequence
  Description of Artificial Sequence: Synthetic oligonucleotide
ucuagacauaagagugacu

SEQ ID NO: 1006656 - RNA, 19 nt, Artificial Sequence
  Description of Artificial Sequence: Synthetic oligonucleotide
gccagagagagagagagag

SEQ ID NO: 1006657 - RNA, 19 nt, Artificial Sequence
  Description of Artificial Sequence: Synthetic oligonucleotide
caucgugaacaaucauggg

SEQ ID NO: 1006658 - RNA, 19 nt, Artificial Sequence
  Description of Artificial Sequence: Synthetic oligonucleotide
cauaaccacaagcugggca

SEQ ID NO: 1006659 - RNA, 19 nt, Artificial Sequence
  Description of Artificial Sequence: Synthetic oligonucleotide
guuuacuuacaaucuacua

SEQ ID NO: 1006660 - RNA, 19 nt, Artificial Sequence
  Description of Artificial Sequence: Synthetic oligonucleotide
gaacgaguuacugucaugu

SEQ ID NO: 1006661 - RNA, 19 nt, Artificial Sequence
  Description of Artificial Sequence: Synthetic oligonucleotide
uuuugucuugccuguuggu

SEQ ID NO: 1006662 - RNA, 19 nt, Artificial Sequence
  Description of Artificial Sequence: Synthetic oligonucleotide
agugaacuacaagaagucu

SEQ ID NO: 1006663 - RNA, 19 nt, Artificial Sequence
  Description of Artificial Sequence: Synthetic oligonucleotide
uggaauuguuucucuaauu

SEQ ID NO: 1006664 - RNA, 19 nt, Artificial Sequence
  Description of Artificial Sequence: Synthetic oligonucleotide
ggcauuaugaucccauauc

SEQ ID NO: 1006665 - RNA, 19 nt, Artificial Sequence
  Description of Artificial Sequence: Synthetic oligonucleotide
gauuccuauuaucuauaaa

SEQ ID NO: 1006666 - RNA, 19 nt, Artificial Sequence
  Description of Artificial Sequence: Synthetic oligonucleotide
uucauugcucugguaauaa

SEQ ID NO: 1006667 - RNA, 19 nt, Artificial Sequence
  Description of Artificial Sequence: Synthetic oligonucleotide
augcggacggauucucuuc

SEQ ID NO: 1006668 - RNA, 19 nt, Artificial Sequence
  Description of Artificial Sequence: Synthetic oligonucleotide
ugucuugccuguuggucca

SEQ ID NO: 1006669 - RNA, 19 nt, Artificial Sequence
  Description of Artificial Sequence: Synthetic oligonucleotide
uuguaagauguugaauauc

SEQ ID NO: 1006670 - RNA, 19 nt, Artificial Sequence
  Description of Artificial Sequence: Synthetic oligonucleotide
cauaaggguugucagggca

SEQ ID NO: 1006671 - RNA, 19 nt, Artificial Sequence
  Description of Artificial Sequence: Synthetic oligonucleotide
ugcuauccagggaugcgga

SEQ ID NO: 1006672 - RNA, 19 nt, Artificial Sequence
  Description of Artificial Sequence: Synthetic oligonucleotide
agaacgaguuacugucaug

SEQ ID NO: 1006673 - RNA, 19 nt, Artificial Sequence
  Description of Artificial Sequence: Synthetic oligonucleotide
acauaagagugacuuugaa

SEQ ID NO: 1006674 - RNA, 19 nt, Artificial Sequence
  Description of Artificial Sequence: Synthetic oligonucleotide
augguuuacuuacaaucua

SEQ ID NO: 1006675 - RNA, 19 nt, Artificial Sequence
  Description of Artificial Sequence: Synthetic oligonucleotide
auguuuuguaccaucugga

SEQ ID NO: 1006676 - RNA, 19 nt, Artificial Sequence
  Description of Artificial Sequence: Synthetic oligonucleotide
aggguuaguuccuuggcua

SEQ ID NO: 1006677 - RNA, 19 nt, Artificial Sequence
  Description of Artificial Sequence: Synthetic oligonucleotide
acccuugaucuuuccacag

SEQ ID NO: 1006678 - RNA, 19 nt, Artificial Sequence
  Description of Artificial Sequence: Synthetic oligonucleotide
acuaucuggguuuggccau

SEQ ID NO: 1006679 - RNA, 19 nt, Artificial Sequence
  Description of Artificial Sequence: Synthetic oligonucleotide
gucaauuuggcagcagaac

SEQ ID NO: 1006680 - RNA, 19 nt, Artificial Sequence
  Description of Artificial Sequence: Synthetic oligonucleotide
acuacaucauuaaacucaa

SEQ ID NO: 1006681 - RNA, 19 nt, Artificial Sequence
  Description of Artificial Sequence: Synthetic oligonucleotide
aguccuuaauggugugcag

SEQ ID NO: 1006682 - RNA, 19 nt, Artificial Sequence
  Description of Artificial Sequence: Synthetic oligonucleotide
uccugccuugugcugacga

SEQ ID NO: 1006683 - RNA, 19 nt, Artificial Sequence
  Description of Artificial Sequence: Synthetic oligonucleotide
ggaaucauaaccacaagcu

SEQ ID NO: 1006684 - RNA, 19 nt, Artificial Sequence
  Description of Artificial Sequence: Synthetic oligonucleotide
guuaaacuagagacuccag

SEQ ID NO: 1006685 - RNA, 19 nt, Artificial Sequence
  Description of Artificial Sequence: Synthetic oligonucleotide
uggugauuccuauuaucua

SEQ ID NO: 1006686 - RNA, 19 nt, Artificial Sequence
  Description of Artificial Sequence: Synthetic oligonucleotide
ugucaugucaugggaagua

SEQ ID NO: 1006687 - RNA, 19 nt, Artificial Sequence
  Description of Artificial Sequence: Synthetic oligonucleotide
uggguuguccuucacccuu

SEQ ID NO: 1006688 - RNA, 19 nt, Artificial Sequence
  Description of Artificial Sequence: Synthetic oligonucleotide
aggaguguauuaacauagg

SEQ ID NO: 1006689 - RNA, 19 nt, Artificial Sequence
  Description of Artificial Sequence: Synthetic oligonucleotide
ggaguguauuaacauagga

SEQ ID NO: 1006690 - RNA, 19 nt, Artificial Sequence
  Description of Artificial Sequence: Synthetic oligonucleotide
caggagauaaaaugguuua

SEQ ID NO: 1006691 - RNA, 19 nt, Artificial Sequence
  Description of Artificial Sequence: Synthetic oligonucleotide
uaccacaauuaacuucuua

SEQ ID NO: 1006692 - RNA, 19 nt, Artificial Sequence
  Description of Artificial Sequence: Synthetic oligonucleotide
ugguccagguaugaggagu

SEQ ID NO: 1006693 - RNA, 19 nt, Artificial Sequence
  Description of Artificial Sequence: Synthetic oligonucleotide
gaauuguuucucuaauuuu

SEQ ID NO: 1006694 - RNA, 19 nt, Artificial Sequence
  Description of Artificial Sequence: Synthetic oligonucleotide
guauuaacauaggaaugga

SEQ ID NO: 1006695 - RNA, 19 nt, Artificial Sequence
  Description of Artificial Sequence: Synthetic oligonucleotide
aucuuuguuuggccaauaa

SEQ ID NO: 1006696 - RNA, 19 nt, Artificial Sequence
  Description of Artificial Sequence: Synthetic oligonucleotide
ggacguucuguucuucucc

SEQ ID NO: 1006697 - RNA, 19 nt, Artificial Sequence
  Description of Artificial Sequence: Synthetic oligonucleotide
gcacagaaaguuccugccg

SEQ ID NO: 1006698 - RNA, 19 nt, Artificial Sequence
  Description of Artificial Sequence: Synthetic oligonucleotide
ggguuuggccauuuggggc

SEQ ID NO: 1006699 - RNA, 19 nt, Artificial Sequence
  Description of Artificial Sequence: Synthetic oligonucleotide
ugcuucagggcuguagagu

SEQ ID NO: 1006700 - RNA, 19 nt, Artificial Sequence
  Description of Artificial Sequence: Synthetic oligonucleotide
uagucacucugaagaauau

SEQ ID NO: 1006701 - RNA, 19 nt, Artificial Sequence
  Description of Artificial Sequence: Synthetic oligonucleotide
acauguugaguaaguaaga

SEQ ID NO: 1006702 - RNA, 19 nt, Artificial Sequence
  Description of Artificial Sequence: Synthetic oligonucleotide
aggaugcauugauguaguc

SEQ ID NO: 1006703 - RNA, 19 nt, Artificial Sequence
  Description of Artificial Sequence: Synthetic oligonucleotide
gaaaacucacacaguagua

SEQ ID NO: 1006704 - RNA, 19 nt, Artificial Sequence
  Description of Artificial Sequence: Synthetic oligonucleotide
ugcuuagacuggguugucc

SEQ ID NO: 1006705 - RNA, 19 nt, Artificial Sequence
  Description of Artificial Sequence: Synthetic oligonucleotide
acaugucccaaggauggug

SEQ ID NO: 1006706 - RNA, 19 nt, Artificial Sequence
  Description of Artificial Sequence: Synthetic oligonucleotide
acuagaaaacucacacagu

SEQ ID NO: 1006707 - RNA, 19 nt, Artificial Sequence
  Description of Artificial Sequence: Synthetic oligonucleotide
guuguaagauguugaauau

SEQ ID NO: 1006708 - RNA, 19 nt, Artificial Sequence
  Description of Artificial Sequence: Synthetic oligonucleotide
ucccggccucauuaaauug

SEQ ID NO: 1006709 - RNA, 19 nt, Artificial Sequence
  Description of Artificial Sequence: Synthetic oligonucleotide
uagacauaagagugacuuu

SEQ ID NO: 1006710 - RNA, 19 nt, Artificial Sequence
  Description of Artificial Sequence: Synthetic oligonucleotide
acuuaugaguucaaauguu

SEQ ID NO: 1006711 - RNA, 19 nt, Artificial Sequence
  Description of Artificial Sequence: Synthetic oligonucleotide
aaguaagaccagagaauaa

SEQ ID NO: 1006712 - RNA, 19 nt, Artificial Sequence
  Description of Artificial Sequence: Synthetic oligonucleotide
cacgagagucaaaaugaca

SEQ ID NO: 1006713 - RNA, 19 nt, Artificial Sequence
  Description of Artificial Sequence: Synthetic oligonucleotide
agaugaagucuugaacuau

SEQ ID NO: 1006714 - RNA, 19 nt, Artificial Sequence
  Description of Artificial Sequence: Synthetic oligonucleotide
uugguccagguaugaggag

SEQ ID NO: 1006715 - RNA, 19 nt, Artificial Sequence
  Description of Artificial Sequence: Synthetic oligonucleotide
gcugacgaggcugaggacc

SEQ ID NO: 1006716 - RNA, 19 nt, Artificial Sequence
  Description of Artificial Sequence: Synthetic oligonucleotide
ggacggauucucuuccugc

SEQ ID NO: 1006717 - RNA, 19 nt, Artificial Sequence
  Description of Artificial Sequence: Synthetic oligonucleotide
uuugguccauggagacacc

SEQ ID NO: 1006718 - RNA, 19 nt, Artificial Sequence
  Description of Artificial Sequence: Synthetic oligonucleotide
guuuuguaccaucuggaau

SEQ ID NO: 1006719 - RNA, 19 nt, Artificial Sequence
  Description of Artificial Sequence: Synthetic oligonucleotide
cuuaugaguucaaauguuu

SEQ ID NO: 1006720 - RNA, 19 nt, Artificial Sequence
  Description of Artificial Sequence: Synthetic oligonucleotide
uggcuauccggcaccucug

SEQ ID NO: 1006721 - RNA, 19 nt, Artificial Sequence
  Description of Artificial Sequence: Synthetic oligonucleotide
guauaccacuagaaaacuc

SEQ ID NO: 1006722 - RNA, 19 nt, Artificial Sequence
  Description of Artificial Sequence: Synthetic oligonucleotide
uuuccacgagagucaaaau

SEQ ID NO: 1006723 - RNA, 19 nt, Artificial Sequence
  Description of Artificial Sequence: Synthetic oligonucleotide
ggguuaguuccuuggcuag

SEQ ID NO: 1006724 - RNA, 19 nt, Artificial Sequence
  Description of Artificial Sequence: Synthetic oligonucleotide
ggugauuccuauuaucuau

SEQ ID NO: 1006725 - RNA, 19 nt, Artificial Sequence
  Description of Artificial Sequence: Synthetic oligonucleotide
cagggaugcggacggauuc

SEQ ID NO: 1006726 - RNA, 19 nt, Artificial Sequence
  Description of Artificial Sequence: Synthetic oligonucleotide
gaagacauguugaguaagu

SEQ ID NO: 1006727 - RNA, 19 nt, Artificial Sequence
  Description of Artificial Sequence: Synthetic oligonucleotide
guuguuaauggugucaauu

SEQ ID NO: 1006728 - RNA, 19 nt, Artificial Sequence
  Description of Artificial Sequence: Synthetic oligonucleotide
acguuguuaauggugucaa

SEQ ID NO: 1006729 - RNA, 19 nt, Artificial Sequence
  Description of Artificial Sequence: Synthetic oligonucleotide
ccacccuugaucuuuccac

SEQ ID NO: 1006730 - RNA, 19 nt, Artificial Sequence
  Description of Artificial Sequence: Synthetic oligonucleotide
gguaugaggaguguauuaa

SEQ ID NO: 1006731 - RNA, 19 nt, Artificial Sequence
  Description of Artificial Sequence: Synthetic oligonucleotide
auaacccaugauauaggau

SEQ ID NO: 1006732 - RNA, 19 nt, Artificial Sequence
  Description of Artificial Sequence: Synthetic oligonucleotide
aucaggagauaaaaugguu

SEQ ID NO: 1006733 - RNA, 19 nt, Artificial Sequence
  Description of Artificial Sequence: Synthetic oligonucleotide
cagggaugaaaugcccacc

SEQ ID NO: 1006734 - RNA, 19 nt, Artificial Sequence
  Description of Artificial Sequence: Synthetic oligonucleotide
ugggcauuaugaucccaua

SEQ ID NO: 1006735 - RNA, 19 nt, Artificial Sequence
  Description of Artificial Sequence: Synthetic oligonucleotide
acagaaaguuccugccguu

SEQ ID NO: 1006736 - RNA, 19 nt, Artificial Sequence
  Description of Artificial Sequence: Synthetic oligonucleotide
cauaaguuacuagaucacu

SEQ ID NO: 1006737 - RNA, 19 nt, Artificial Sequence
  Description of Artificial Sequence: Synthetic oligonucleotide
cucugguaauaacccauga

SEQ ID NO: 1006738 - RNA, 19 nt, Artificial Sequence
  Description of Artificial Sequence: Synthetic oligonucleotide
auucauugcucugguaaua

SEQ ID NO: 1006739 - RNA, 19 nt, Artificial Sequence
  Description of Artificial Sequence: Synthetic oligonucleotide
caguguuaaacuagagacu

SEQ ID NO: 1006740 - RNA, 19 nt, Artificial Sequence
  Description of Artificial Sequence: Synthetic oligonucleotide
uaccuucuccgcucaggga

SEQ ID NO: 1006741 - RNA, 19 nt, Artificial Sequence
  Description of Artificial Sequence: Synthetic oligonucleotide
uacuuuccacgagagucaa

SEQ ID NO: 1006742 - RNA, 19 nt, Artificial Sequence
  Description of Artificial Sequence: Synthetic oligonucleotide
cacguuguuaaugguguca

SEQ ID NO: 1006743 - RNA, 19 nt, Artificial Sequence
  Description of Artificial Sequence: Synthetic oligonucleotide
cacccuugaucuuuccaca

SEQ ID NO: 1006744 - RNA, 19 nt, Artificial Sequence
  Description of Artificial Sequence: Synthetic oligonucleotide
ucagggcuguagaguaguc

SEQ ID NO: 1006745 - RNA, 19 nt, Artificial Sequence
  Description of Artificial Sequence: Synthetic oligonucleotide
gggacuaucuggguuuggc

SEQ ID NO: 1006746 - RNA, 19 nt, Artificial Sequence
  Description of Artificial Sequence: Synthetic oligonucleotide
gaugaauacugcaguugua

SEQ ID NO: 1006747 - RNA, 19 nt, Artificial Sequence
  Description of Artificial Sequence: Synthetic oligonucleotide
cuacuugauaaacauccau

SEQ ID NO: 1006748 - RNA, 19 nt, Artificial Sequence
  Description of Artificial Sequence: Synthetic oligonucleotide
ucuccgcucagggaugaaa

SEQ ID NO: 1006749 - RNA, 19 nt, Artificial Sequence
  Description of Artificial Sequence: Synthetic oligonucleotide
cuuucacaguuuaugggau

SEQ ID NO: 1006750 - RNA, 19 nt, Artificial Sequence
  Description of Artificial Sequence: Synthetic oligonucleotide
uguuuccaucaggcaaagc

SEQ ID NO: 1006751 - RNA, 19 nt, Artificial Sequence
  Description of Artificial Sequence: Synthetic oligonucleotide
ggcuguagaguagucacuc

SEQ ID NO: 1006752 - RNA, 19 nt, Artificial Sequence
  Description of Artificial Sequence: Synthetic oligonucleotide
cauaggaauggauguggcu

SEQ ID NO: 1006753 - RNA, 19 nt, Artificial Sequence
  Description of Artificial Sequence: Synthetic oligonucleotide
agagagagagagagagaga

SEQ ID NO: 1006754 - RNA, 19 nt, Artificial Sequence
  Description of Artificial Sequence: Synthetic oligonucleotide
ggauguggcuauccggcac

SEQ ID NO: 1006755 - RNA, 19 nt, Artificial Sequence
  Description of Artificial Sequence: Synthetic oligonucleotide
uggugucaauuuggcagca

SEQ ID NO: 1006756 - RNA, 19 nt, Artificial Sequence
  Description of Artificial Sequence: Synthetic oligonucleotide
acuagagacuccaggcuuu

SEQ ID NO: 1006757 - RNA, 19 nt, Artificial Sequence
  Description of Artificial Sequence: Synthetic oligonucleotide
acguucuguucuucucccu

SEQ ID NO: 1006758 - RNA, 19 nt, Artificial Sequence
  Description of Artificial Sequence: Synthetic oligonucleotide
cauccuguguugcuucuaa

SEQ ID NO: 1006759 - RNA, 19 nt, Artificial Sequence
  Description of Artificial Sequence: Synthetic oligonucleotide
cuguuuccaucaggcaaag

SEQ ID NO: 1006760 - RNA, 19 nt, Artificial Sequence
  Description of Artificial Sequence: Synthetic oligonucleotide
ugggacuaucuggguuugg

SEQ ID NO: 1006761 - RNA, 19 nt, Artificial Sequence
  Description of Artificial Sequence: Synthetic oligonucleotide
gaggacguucuguucuucu

SEQ ID NO: 1006762 - RNA, 19 nt, Artificial Sequence
  Description of Artificial Sequence: Synthetic oligonucleotide
gcagcagaacgaguuacug

SEQ ID NO: 1006763 - RNA, 19 nt, Artificial Sequence
  Description of Artificial Sequence: Synthetic oligonucleotide
gaugcggacggauucucuu

SEQ ID NO: 1006764 - RNA, 19 nt, Artificial Sequence
  Description of Artificial Sequence: Synthetic oligonucleotide
gugauuccuauuaucuaua

SEQ ID NO: 1006765 - RNA, 19 nt, Artificial Sequence
  Description of Artificial Sequence: Synthetic oligonucleotide
uggaggacguucuguucuu

SEQ ID NO: 1006766 - RNA, 19 nt, Artificial Sequence
  Description of Artificial Sequence: Synthetic oligonucleotide
ggcuuucuacuuuccacga

SEQ ID NO: 1006767 - RNA, 19 nt, Artificial Sequence
  Description of Artificial Sequence: Synthetic oligonucleotide
augggacuaucuggguuug

SEQ ID NO: 1006768 - RNA, 19 nt, Artificial Sequence
  Description of Artificial Sequence: Synthetic oligonucleotide
aggguugucagggcacaga

SEQ ID NO: 1006769 - RNA, 19 nt, Artificial Sequence
  Description of Artificial Sequence: Synthetic oligonucleotide
ugucccaaggauggugauu

SEQ ID NO: 1006770 - RNA, 19 nt, Artificial Sequence
  Description of Artificial Sequence: Synthetic oligonucleotide
gguaagguguuauucucau

SEQ ID NO: 1006771 - RNA, 19 nt, Artificial Sequence
  Description of Artificial Sequence: Synthetic oligonucleotide
ccguuaaaaucaauaugga

SEQ ID NO: 1006772 - RNA, 19 nt, Artificial Sequence
  Description of Artificial Sequence: Synthetic oligonucleotide
gcauaaggguugucagggc

SEQ ID NO: 1006773 - RNA, 19 nt, Artificial Sequence
  Description of Artificial Sequence: Synthetic oligonucleotide
gguuaguuccuuggcuagc

SEQ ID NO: 1006774 - RNA, 19 nt, Artificial Sequence
  Description of Artificial Sequence: Synthetic oligonucleotide
guaagguguuauucucaua

SEQ ID NO: 1006775 - RNA, 19 nt, Artificial Sequence
  Description of Artificial Sequence: Synthetic oligonucleotide
agggaugcggacggauucu

SEQ ID NO: 1006776 - RNA, 19 nt, Artificial Sequence
  Description of Artificial Sequence: Synthetic oligonucleotide
cguuacuccuccaugcuca

SEQ ID NO: 1006777 - RNA, 19 nt, Artificial Sequence
  Description of Artificial Sequence: Synthetic oligonucleotide
augcuuagacuggguuguc

SEQ ID NO: 1006778 - RNA, 19 nt, Artificial Sequence
  Description of Artificial Sequence: Synthetic oligonucleotide
ugcccacccuugaucuuuc

SEQ ID NO: 1006779 - RNA, 19 nt, Artificial Sequence
  Description of Artificial Sequence: Synthetic oligonucleotide
cuaaugggacuaucugggu

SEQ ID NO: 1006780 - RNA, 19 nt, Artificial Sequence
  Description of Artificial Sequence: Synthetic oligonucleotide
caggguuaguuccuuggcu

SEQ ID NO: 1006781 - RNA, 19 nt, Artificial Sequence
  Description of Artificial Sequence: Synthetic oligonucleotide
gaacaaucaugggcccauc

SEQ ID NO: 1006782 - RNA, 19 nt, Artificial Sequence
  Description of Artificial Sequence: Synthetic oligonucleotide
gacucccggccucauuaaa

SEQ ID NO: 1006783 - RNA, 19 nt, Artificial Sequence
  Description of Artificial Sequence: Synthetic oligonucleotide
cuauccggcaccucuguuu

SEQ ID NO: 1006784 - RNA, 19 nt, Artificial Sequence
  Description of Artificial Sequence: Synthetic oligonucleotide
ccucauuugauagacauuu

SEQ ID NO: 1006785 - RNA, 19 nt, Artificial Sequence
  Description of Artificial Sequence: Synthetic oligonucleotide
cagggcuguagaguaguca

SEQ ID NO: 1006786 - RNA, 19 nt, Artificial Sequence
  Description of Artificial Sequence: Synthetic oligonucleotide
ccauugcuauccagggaug

SEQ ID NO: 1006787 - RNA, 19 nt, Artificial Sequence
  Description of Artificial Sequence: Synthetic oligonucleotide
ugggcccaucccuguuagc

SEQ ID NO: 1006788 - RNA, 19 nt, Artificial Sequence
  Description of Artificial Sequence: Synthetic oligonucleotide
cuguaccuucuccgcucag

SEQ ID NO: 1006789 - RNA, 19 nt, Artificial Sequence
  Description of Artificial Sequence: Synthetic oligonucleotide
auggccagagagagagaga

SEQ ID NO: 1006790 - RNA, 19 nt, Artificial Sequence
  Description of Artificial Sequence: Synthetic oligonucleotide
cccggccucauuaaauuga

SEQ ID NO: 1006791 - RNA, 19 nt, Artificial Sequence
  Description of Artificial Sequence: Synthetic oligonucleotide
cagaacgaguuacugucau

SEQ ID NO: 1006792 - RNA, 19 nt, Artificial Sequence
  Description of Artificial Sequence: Synthetic oligonucleotide
cuccgcucagggaugaaau

SEQ ID NO: 1006793 - RNA, 19 nt, Artificial Sequence
  Description of Artificial Sequence: Synthetic oligonucleotide
auguggcuauccggcaccu

SEQ ID NO: 1006794 - RNA, 19 nt, Artificial Sequence
  Description of Artificial Sequence: Synthetic oligonucleotide
guuggugcauaaggguugu

SEQ ID NO: 1006795 - RNA, 19 nt, Artificial Sequence
  Description of Artificial Sequence: Synthetic oligonucleotide
caugggcccaucccuguua

SEQ ID NO: 1006796 - RNA, 19 nt, Artificial Sequence
  Description of Artificial Sequence: Synthetic oligonucleotide
cagaaaguuccugccguua

SEQ ID NO: 1006797 - RNA, 19 nt, Artificial Sequence
  Description of Artificial Sequence: Synthetic oligonucleotide
gggcauuaugaucccauau

SEQ ID NO: 1006798 - RNA, 19 nt, Artificial Sequence
  Description of Artificial Sequence: Synthetic oligonucleotide
ccuucuccgcucagggaug

SEQ ID NO: 1006799 - RNA, 19 nt, Artificial Sequence
  Description of Artificial Sequence: Synthetic oligonucleotide
auccggcaccucuguuucu

SEQ ID NO: 1006800 - RNA, 19 nt, Artificial Sequence
  Description of Artificial Sequence: Synthetic oligonucleotide
gcagaacgaguuacuguca

SEQ ID NO: 1006801 - RNA, 19 nt, Artificial Sequence
  Description of Artificial Sequence: Synthetic oligonucleotide
ccguuacuccuccaugcuc

SEQ ID NO: 1006802 - RNA, 19 nt, Artificial Sequence
  Description of Artificial Sequence: Synthetic oligonucleotide
caguuguaagauguugaau

SEQ ID NO: 1006803 - RNA, 19 nt, Artificial Sequence
  Description of Artificial Sequence: Synthetic oligonucleotide
uuggugcauaaggguuguc

SEQ ID NO: 1006804 - RNA, 19 nt, Artificial Sequence
  Description of Artificial Sequence: Synthetic oligonucleotide
guuacuccuccaugcucau

SEQ ID NO: 1006805 - RNA, 19 nt, Artificial Sequence
  Description of Artificial Sequence: Synthetic oligonucleotide
cucccggccucauuaaauu

SEQ ID NO: 1006806 - RNA, 19 nt, Artificial Sequence
  Description of Artificial Sequence: Synthetic oligonucleotide
ugacgaggcugaggaccac

SEQ ID NO: 1006807 - RNA, 19 nt, Artificial Sequence
  Description of Artificial Sequence: Synthetic oligonucleotide
ggauggugauuccuauuau

SEQ ID NO: 1006808 - RNA, 19 nt, Artificial Sequence
  Description of Artificial Sequence: Synthetic oligonucleotide
ccagagagagagagagaga

SEQ ID NO: 1006809 - RNA, 19 nt, Artificial Sequence
  Description of Artificial Sequence: Synthetic oligonucleotide
gucuugccuguugguccag

SEQ ID NO: 1006810 - RNA, 19 nt, Artificial Sequence
  Description of Artificial Sequence: Synthetic oligonucleotide
caucuuuguuuggccaaua

SEQ ID NO: 1006811 - RNA, 19 nt, Artificial Sequence
  Description of Artificial Sequence: Synthetic oligonucleotide
guauggccagagagagaga

SEQ ID NO: 1006812 - RNA, 19 nt, Artificial Sequence
  Description of Artificial Sequence: Synthetic oligonucleotide
cuucacccuuucaguguua

SEQ ID NO: 1006813 - RNA, 19 nt, Artificial Sequence
  Description of Artificial Sequence: Synthetic oligonucleotide
ccaugauauaggaugcauu

SEQ ID NO: 1006814 - RNA, 19 nt, Artificial Sequence
  Description of Artificial Sequence: Synthetic oligonucleotide
ggaggacguucuguucuuc

SEQ ID NO: 1006815 - RNA, 19 nt, Artificial Sequence
  Description of Artificial Sequence: Synthetic oligonucleotide
gggaugcggacggauucuc

SEQ ID NO: 1006816 - RNA, 19 nt, Artificial Sequence
  Description of Artificial Sequence: Synthetic oligonucleotide
cggacggauucucuuccug

SEQ ID NO: 1006817 - RNA, 19 nt, Artificial Sequence
  Description of Artificial Sequence: Synthetic oligonucleotide
cuaugagcuuuuccucauu

SEQ ID NO: 1006818 - RNA, 19 nt, Artificial Sequence
  Description of Artificial Sequence: Synthetic oligonucleotide
ggcuauccggcaccucugu

SEQ ID NO: 1006819 - RNA, 19 nt, Artificial Sequence
  Description of Artificial Sequence: Synthetic oligonucleotide
gcucaucgugaacaaucau

SEQ ID NO: 1006820 - RNA, 19 nt, Artificial Sequence
  Description of Artificial Sequence: Synthetic oligonucleotide
ggccagagagagagagaga

SEQ ID NO: 1006821 - RNA, 19 nt, Artificial Sequence
  Description of Artificial Sequence: Synthetic oligonucleotide
cggccucauuaaauugauc

SEQ ID NO: 1006822 - RNA, 19 nt, Artificial Sequence
  Description of Artificial Sequence: Synthetic oligonucleotide
cccaugauauaggaugcau

SEQ ID NO: 1006823 - RNA, 19 nt, Artificial Sequence
  Description of Artificial Sequence: Synthetic oligonucleotide
gggcuguagaguagucacu

SEQ ID NO: 1006824 - RNA, 19 nt, Artificial Sequence
  Description of Artificial Sequence: Synthetic oligonucleotide
ggaccacuuuguagagaaa

SEQ ID NO: 1006825 - RNA, 19 nt, Artificial Sequence
  Description of Artificial Sequence: Synthetic oligonucleotide
ggaugcggacggauucucu

SEQ ID NO: 1006826 - RNA, 19 nt, Artificial Sequence
  Description of Artificial Sequence: Synthetic oligonucleotide
ccggccucauuaaauugau

SEQ ID NO: 1006827 - RNA, 19 nt, Artificial Sequence
  Description of Artificial Sequence: Synthetic oligonucleotide
cuaucuggguuuggccauu

SEQ ID NO: 1006828 - RNA, 19 nt, Artificial Sequence
  Description of Artificial Sequence: Synthetic oligonucleotide
gcggacggauucucuuccu

SEQ ID NO: 1006829 - RNA, 19 nt, Artificial Sequence
  Description of Artificial Sequence: Synthetic oligonucleotide
gcuauccggcaccucuguu

SEQ ID NO: 1006830 - RNA, 19 nt, Artificial Sequence
  Description of Artificial Sequence: Synthetic oligonucleotide
cguuguuaauggugucaau

SEQ ID NO: 1006831 - RNA, 19 nt, Artificial Sequence
  Description of Artificial Sequence: Synthetic oligonucleotide
gccuuacuuccagcacaua

SEQ ID NO: 1006832 - RNA, 19 nt, Artificial Sequence
  Description of Artificial Sequence: Synthetic oligonucleotide
ccggcaccucuguuucuuu

SEQ ID NO: 1006833 - RNA, 19 nt, Artificial Sequence
  Description of Artificial Sequence: Synthetic oligonucleotide
auaagcuacgcuuuggugg

SEQ ID NO: 1006834 - RNA, 19 nt, Artificial Sequence
  Description of Artificial Sequence: Synthetic oligonucleotide
cauaauacccacuugauuc

SEQ ID NO: 1006835 - RNA, 19 nt, Artificial Sequence
  Description of Artificial Sequence: Synthetic oligonucleotide
aacaacuguacagagggcc

SEQ ID NO: 1006836 - RNA, 19 nt, Artificial Sequence
  Description of Artificial Sequence: Synthetic oligonucleotide
ucuuuaaagggcuagcagc

SEQ ID NO: 1006837 - RNA, 19 nt, Artificial Sequence
  Description of Artificial Sequence: Synthetic oligonucleotide
cuaagauugaaccugcacc

SEQ ID NO: 1006838 - RNA, 19 nt, Artificial Sequence
  Description of Artificial Sequence: Synthetic oligonucleotide
acaauugucaccugcucgc

SEQ ID NO: 1006839 - RNA, 19 nt, Artificial Sequence
  Description of Artificial Sequence: Synthetic oligonucleotide
accuggucuaaucaaagcc

SEQ ID NO: 1006840 - RNA, 19 nt, Artificial Sequence
  Description of Artificial Sequence: Synthetic oligonucleotide
aguuaagccucucuggugg

SEQ ID NO: 1006841 - RNA, 19 nt, Artificial Sequence
  Description of Artificial Sequence: Synthetic oligonucleotide
accugcaccauccaaaagg

SEQ ID NO: 1006842 - RNA, 19 nt, Artificial Sequence
  Description of Artificial Sequence: Synthetic oligonucleotide
uaagauugaaccugcacca

SEQ ID NO: 1006843 - RNA, 19 nt, Artificial Sequence
  Description of Artificial Sequence: Synthetic oligonucleotide
acccacuugauucuggccc

SEQ ID NO: 1006844 - RNA, 19 nt, Artificial Sequence
  Description of Artificial Sequence: Synthetic oligonucleotide
uucccguuggauaagagga

SEQ ID NO: 1006845 - RNA, 19 nt, Artificial Sequence
  Description of Artificial Sequence: Synthetic oligonucleotide
caccugaacaagcagaugg

SEQ ID NO: 1006846 - RNA, 19 nt, Artificial Sequence
  Description of Artificial Sequence: Synthetic oligonucleotide
aaacggaaaauaaauuaag

SEQ ID NO: 1006847 - RNA, 19 nt, Artificial Sequence
  Description of Artificial Sequence: Synthetic oligonucleotide
acaacggccacacugcuuc

SEQ ID NO: 1006848 - RNA, 19 nt, Artificial Sequence
  Description of Artificial Sequence: Synthetic oligonucleotide
cuccuuagaaaucagaguc

SEQ ID NO: 1006849 - RNA, 19 nt, Artificial Sequence
  Description of Artificial Sequence: Synthetic oligonucleotide
uuuaagugcacaagccgag

SEQ ID NO: 1006850 - RNA, 19 nt, Artificial Sequence
  Description of Artificial Sequence: Synthetic oligonucleotide
gaagcuuccggcaagauuc

SEQ ID NO: 1006851 - RNA, 19 nt, Artificial Sequence
  Description of Artificial Sequence: Synthetic oligonucleotide
aauucaagggcugugggca

SEQ ID NO: 1006852 - RNA, 19 nt, Artificial Sequence
  Description of Artificial Sequence: Synthetic oligonucleotide
auaaauuaagugauauggg

SEQ ID NO: 1006853 - RNA, 19 nt, Artificial Sequence
  Description of Artificial Sequence: Synthetic oligonucleotide
acacacuuuccuuuauacc

SEQ ID NO: 1006854 - RNA, 19 nt, Artificial Sequence
  Description of Artificial Sequence: Synthetic oligonucleotide
uucacaguaaccagaacaa

SEQ ID NO: 1006855 - RNA, 19 nt, Artificial Sequence
  Description of Artificial Sequence: Synthetic oligonucleotide
ugugccacuucuuuguugc

SEQ ID NO: 1006856 - RNA, 19 nt, Artificial Sequence
  Description of Artificial Sequence: Synthetic oligonucleotide
aguagcauaagcuacgcuu

SEQ ID NO: 1006857 - RNA, 19 nt, Artificial Sequence
  Description of Artificial Sequence: Synthetic oligonucleotide
ucguguggggcacagagag

SEQ ID NO: 1006858 - RNA, 19 nt, Artificial Sequence
  Description of Artificial Sequence: Synthetic oligonucleotide
ugaagacaguauuuauugg

SEQ ID NO: 1006859 - RNA, 19 nt, Artificial Sequence
  Description of Artificial Sequence: Synthetic oligonucleotide
aagggcaugguacucgcag

SEQ ID NO: 1006860 - RNA, 19 nt, Artificial Sequence
  Description of Artificial Sequence: Synthetic oligonucleotide
acaacgaugcccugaauug

SEQ ID NO: 1006861 - RNA, 19 nt, Artificial Sequence
  Description of Artificial Sequence: Synthetic oligonucleotide
cauuguggaagacaccacg

SEQ ID NO: 1006862 - RNA, 19 nt, Artificial Sequence
  Description of Artificial Sequence: Synthetic oligonucleotide
auuguagcuggccacucgg

SEQ ID NO: 1006863 - RNA, 19 nt, Artificial Sequence
  Description of Artificial Sequence: Synthetic oligonucleotide
cuuuauaccaucuaccaua

SEQ ID NO: 1006864 - RNA, 19 nt, Artificial Sequence
  Description of Artificial Sequence: Synthetic oligonucleotide
aaaaggcagggcguauucc

SEQ ID NO: 1006865 - RNA, 19 nt, Artificial Sequence
  Description of Artificial Sequence: Synthetic oligonucleotide
uccaugguaugccaugugc

SEQ ID NO: 1006866 - RNA, 19 nt, Artificial Sequence
  Description of Artificial Sequence: Synthetic oligonucleotide
uaaagggcuagcagcaggc

SEQ ID NO: 1006867 - RNA, 19 nt, Artificial Sequence
  Description of Artificial Sequence: Synthetic oligonucleotide
uccggcaagauucacagua

SEQ ID NO: 1006868 - RNA, 19 nt, Artificial Sequence
  Description of Artificial Sequence: Synthetic oligonucleotide
uuggguuccagcaaucuuc

SEQ ID NO: 1006869 - RNA, 19 nt, Artificial Sequence
  Description of Artificial Sequence: Synthetic oligonucleotide
uugauucuggccccgcagg

SEQ ID NO: 1006870 - RNA, 19 nt, Artificial Sequence
  Description of Artificial Sequence: Synthetic oligonucleotide
ucaaagccugucuaugugc

SEQ ID NO: 1006871 - RNA, 19 nt, Artificial Sequence
  Description of Artificial Sequence: Synthetic oligonucleotide
uauuccacccguaccagca

SEQ ID NO: 1006872 - RNA, 19 nt, Artificial Sequence
  Description of Artificial Sequence: Synthetic oligonucleotide
cugaaaggccaccugagcc

SEQ ID NO: 1006873 - RNA, 19 nt, Artificial Sequence
  Description of Artificial Sequence: Synthetic oligonucleotide
cuuccggcaagauucacag

SEQ ID NO: 1006874 - RNA, 19 nt, Artificial Sequence
  Description of Artificial Sequence: Synthetic oligonucleotide
gauugaaccugcaccaucc

SEQ ID NO: 1006875 - RNA, 19 nt, Artificial Sequence
  Description of Artificial Sequence: Synthetic oligonucleotide
agaccauuguggaagacac

SEQ ID NO: 1006876 - RNA, 19 nt, Artificial Sequence
  Description of Artificial Sequence: Synthetic oligonucleotide
uggaaugagguggaggcgg

SEQ ID NO: 1006877 - RNA, 19 nt, Artificial Sequence
  Description of Artificial Sequence: Synthetic oligonucleotide
aagaggauauucuucccau

SEQ ID NO: 1006878 - RNA, 19 nt, Artificial Sequence
  Description of Artificial Sequence: Synthetic oligonucleotide
agacaguauuuauuggcuc

SEQ ID NO: 1006879 - RNA, 19 nt, Artificial Sequence
  Description of Artificial Sequence: Synthetic oligonucleotide
cacaauugucaccugcucg

SEQ ID NO: 1006880 - RNA, 19 nt, Artificial Sequence
  Description of Artificial Sequence: Synthetic oligonucleotide
cacaguagcauaagcuacg

SEQ ID NO: 1006881 - RNA, 19 nt, Artificial Sequence
  Description of Artificial Sequence: Synthetic oligonucleotide
uuuauaccaucuaccauau

SEQ ID NO: 1006882 - RNA, 19 nt, Artificial Sequence
  Description of Artificial Sequence: Synthetic oligonucleotide
ugaacaagcagauggggua

SEQ ID NO: 1006883 - RNA, 19 nt, Artificial Sequence
  Description of Artificial Sequence: Synthetic oligonucleotide
agagagacuccuuugggga

SEQ ID NO: 1006884 - RNA, 19 nt, Artificial Sequence
  Description of Artificial Sequence: Synthetic oligonucleotide
uaagugcacaagccgaggc

SEQ ID NO: 1006885 - RNA, 19 nt, Artificial Sequence
  Description of Artificial Sequence: Synthetic oligonucleotide
auucuggccccgcaggccc

SEQ ID NO: 1006886 - RNA, 19 nt, Artificial Sequence
  Description of Artificial Sequence: Synthetic oligonucleotide
cacagcuaccccuuggucc

SEQ ID NO: 1006887 - RNA, 19 nt, Artificial Sequence
  Description of Artificial Sequence: Synthetic oligonucleotide
uaagcuacgcuuuggugga

SEQ ID NO: 1006888 - RNA, 19 nt, Artificial Sequence
  Description of Artificial Sequence: Synthetic oligonucleotide
guucccguuggauaagagg

SEQ ID NO: 1006889 - RNA, 19 nt, Artificial Sequence
  Description of Artificial Sequence: Synthetic oligonucleotide
cacaaaucagugcaugaag

SEQ ID NO: 1006890 - RNA, 19 nt, Artificial Sequence
  Description of Artificial Sequence: Synthetic oligonucleotide
auaauacccacuugauucu

SEQ ID NO: 1006891 - RNA, 19 nt, Artificial Sequence
  Description of Artificial Sequence: Synthetic oligonucleotide
aaagcagcuucgugugggg

SEQ ID NO: 1006892 - RNA, 19 nt, Artificial Sequence
  Description of Artificial Sequence: Synthetic oligonucleotide
agauugaaccugcaccauc

SEQ ID NO: 1006893 - RNA, 19 nt, Artificial Sequence
  Description of Artificial Sequence: Synthetic oligonucleotide
ucaagauucggcccaaauu

SEQ ID NO: 1006894 - RNA, 19 nt, Artificial Sequence
  Description of Artificial Sequence: Synthetic oligonucleotide
uuuggggauucacaguaac

SEQ ID NO: 1006895 - RNA, 19 nt, Artificial Sequence
  Description of Artificial Sequence: Synthetic oligonucleotide
agucuauccgcaccugaac

SEQ ID NO: 1006896 - RNA, 19 nt, Artificial Sequence
  Description of Artificial Sequence: Synthetic oligonucleotide
cagagagacuccuuugggg

SEQ ID NO: 1006897 - RNA, 19 nt, Artificial Sequence
  Description of Artificial Sequence: Synthetic oligonucleotide
aguaacaacuguacagagg

SEQ ID NO: 1006898 - RNA, 19 nt, Artificial Sequence
  Description of Artificial Sequence: Synthetic oligonucleotide
caggugucaagauucggcc

SEQ ID NO: 1006899 - RNA, 19 nt, Artificial Sequence
  Description of Artificial Sequence: Synthetic oligonucleotide
agcagucuagccgaagccc

SEQ ID NO: 1006900 - RNA, 19 nt, Artificial Sequence
  Description of Artificial Sequence: Synthetic oligonucleotide
uccgcugggauuuuggguc

SEQ ID NO: 1006901 - RNA, 19 nt, Artificial Sequence
  Description of Artificial Sequence: Synthetic oligonucleotide
agugacccacucaaguucc

SEQ ID NO: 1006902 - RNA, 19 nt, Artificial Sequence
  Description of Artificial Sequence: Synthetic oligonucleotide
guaguaguggcaucucacc

SEQ ID NO: 1006903 - RNA, 19 nt, Artificial Sequence
  Description of Artificial Sequence: Synthetic oligonucleotide
cuccuuuggggauucacag

SEQ ID NO: 1006904 - RNA, 19 nt, Artificial Sequence
  Description of Artificial Sequence: Synthetic oligonucleotide
guaccagcagggcauagag

SEQ ID NO: 1006905 - RNA, 19 nt, Artificial Sequence
  Description of Artificial Sequence: Synthetic oligonucleotide
uagccgaagccccaggaug

SEQ ID NO: 1006906 - RNA, 19 nt, Artificial Sequence
  Description of Artificial Sequence: Synthetic oligonucleotide
auuguggaagacaccacgg

SEQ ID NO: 1006907 - RNA, 19 nt, Artificial Sequence
  Description of Artificial Sequence: Synthetic oligonucleotide
aagauucggcccaaauuuc

SEQ ID NO: 1006908 - RNA, 19 nt, Artificial Sequence
  Description of Artificial Sequence: Synthetic oligonucleotide
uguaagucacuggaaugag

SEQ ID NO: 1006909 - RNA, 19 nt, Artificial Sequence
  Description of Artificial Sequence: Synthetic oligonucleotide
cuauccaugcuguaaguca

SEQ ID NO: 1006910 - RNA, 19 nt, Artificial Sequence
  Description of Artificial Sequence: Synthetic oligonucleotide
acaguagcauaagcuacgc

SEQ ID NO: 1006911 - RNA, 19 nt, Artificial Sequence
  Description of Artificial Sequence: Synthetic oligonucleotide
aggcugcccguuuaagugc

SEQ ID NO: 1006912 - RNA, 19 nt, Artificial Sequence
  Description of Artificial Sequence: Synthetic oligonucleotide
gacaagagaagauguccac

SEQ ID NO: 1006913 - RNA, 19 nt, Artificial Sequence
  Description of Artificial Sequence: Synthetic oligonucleotide
uccacaaaucagugcauga

SEQ ID NO: 1006914 - RNA, 19 nt, Artificial Sequence
  Description of Artificial Sequence: Synthetic oligonucleotide
cauagagguccacaagggc

SEQ ID NO: 1006915 - RNA, 19 nt, Artificial Sequence
  Description of Artificial Sequence: Synthetic oligonucleotide
cugaauuguagcuggccac

SEQ ID NO: 1006916 - RNA, 19 nt, Artificial Sequence
  Description of Artificial Sequence: Synthetic oligonucleotide
uaccaucuaccauaucagc

SEQ ID NO: 1006917 - RNA, 19 nt, Artificial Sequence
  Description of Artificial Sequence: Synthetic oligonucleotide
agggcaugguacucgcagc

SEQ ID NO: 1006918 - RNA, 19 nt, Artificial Sequence
  Description of Artificial Sequence: Synthetic oligonucleotide
aguuccgaugggcugaagu

SEQ ID NO: 1006919 - RNA, 19 nt, Artificial Sequence
  Description of Artificial Sequence: Synthetic oligonucleotide
uacucgcagcucuuuaaag

SEQ ID NO: 1006920 - RNA, 19 nt, Artificial Sequence
  Description of Artificial Sequence: Synthetic oligonucleotide
cauagaggaguguggcucc

SEQ ID NO: 1006921 - RNA, 19 nt, Artificial Sequence
  Description of Artificial Sequence: Synthetic oligonucleotide
ucacccuaagauugaaccu

SEQ ID NO: 1006922 - RNA, 19 nt, Artificial Sequence
  Description of Artificial Sequence: Synthetic oligonucleotide
uuagugacccacucaaguu

SEQ ID NO: 1006923 - RNA, 19 nt, Artificial Sequence
  Description of Artificial Sequence: Synthetic oligonucleotide
uuuccuuagugacccacuc

SEQ ID NO: 1006924 - RNA, 19 nt, Artificial Sequence
  Description of Artificial Sequence: Synthetic oligonucleotide
gucuaugugcuccuccugc

SEQ ID NO: 1006925 - RNA, 19 nt, Artificial Sequence
  Description of Artificial Sequence: Synthetic oligonucleotide
aagauguccacugucgguu

SEQ ID NO: 1006926 - RNA, 19 nt, Artificial Sequence
  Description of Artificial Sequence: Synthetic oligonucleotide
guuuaagugcacaagccga

SEQ ID NO: 1006927 - RNA, 19 nt, Artificial Sequence
  Description of Artificial Sequence: Synthetic oligonucleotide
ucaaguuccgaugggcuga

SEQ ID NO: 1006928 - RNA, 19 nt, Artificial Sequence
  Description of Artificial Sequence: Synthetic oligonucleotide
uccacugucgguucaggaa

SEQ ID NO: 1006929 - RNA, 19 nt, Artificial Sequence
  Description of Artificial Sequence: Synthetic oligonucleotide
uguagcuggccacucgggu

SEQ ID NO: 1006930 - RNA, 19 nt, Artificial Sequence
  Description of Artificial Sequence: Synthetic oligonucleotide
ugauucuggccccgcaggc

SEQ ID NO: 1006931 - RNA, 19 nt, Artificial Sequence
  Description of Artificial Sequence: Synthetic oligonucleotide
aggagguugcuccucccgg

SEQ ID NO: 1006932 - RNA, 19 nt, Artificial Sequence
  Description of Artificial Sequence: Synthetic oligonucleotide
gaaguuaagccucucuggu

SEQ ID NO: 1006933 - RNA, 19 nt, Artificial Sequence
  Description of Artificial Sequence: Synthetic oligonucleotide
ugccacuucuuuguugccg

SEQ ID NO: 1006934 - RNA, 19 nt, Artificial Sequence
  Description of Artificial Sequence: Synthetic oligonucleotide
uuuaaagggcuagcagcag

SEQ ID NO: 1006935 - RNA, 19 nt, Artificial Sequence
  Description of Artificial Sequence: Synthetic oligonucleotide
cucgcacuguccauagagg

SEQ ID NO: 1006936 - RNA, 19 nt, Artificial Sequence
  Description of Artificial Sequence: Synthetic oligonucleotide
agaggcucccuccucagca

SEQ ID NO: 1006937 - RNA, 19 nt, Artificial Sequence
  Description of Artificial Sequence: Synthetic oligonucleotide
cuugauucuggccccgcag

SEQ ID NO: 1006938 - RNA, 19 nt, Artificial Sequence
  Description of Artificial Sequence: Synthetic oligonucleotide
ugaauuguagcuggccacu

SEQ ID NO: 1006939 - RNA, 19 nt, Artificial Sequence
  Description of Artificial Sequence: Synthetic oligonucleotide
agugcacaagccgaggcag

SEQ ID NO: 1006940 - RNA, 19 nt, Artificial Sequence
  Description of Artificial Sequence: Synthetic oligonucleotide
uucaagggucggcagcuca

SEQ ID NO: 1006941 - RNA, 19 nt, Artificial Sequence
  Description of Artificial Sequence: Synthetic oligonucleotide
ucaccccuuauuccacccg

SEQ ID NO: 1006942 - RNA, 19 nt, Artificial Sequence
  Description of Artificial Sequence: Synthetic oligonucleotide
uuauuccacccguaccagc

SEQ ID NO: 1006943 - RNA, 19 nt, Artificial Sequence
  Description of Artificial Sequence: Synthetic oligonucleotide
aaagggcuagcagcaggcg

SEQ ID NO: 1006944 - RNA, 19 nt, Artificial Sequence
  Description of Artificial Sequence: Synthetic oligonucleotide
cucaggauggagguagugc

SEQ ID NO: 1006945 - RNA, 19 nt, Artificial Sequence
  Description of Artificial Sequence: Synthetic oligonucleotide
uaacaacuguacagagggc

SEQ ID NO: 1006946 - RNA, 19 nt, Artificial Sequence
  Description of Artificial Sequence: Synthetic oligonucleotide
uagcauaagcuacgcuuug

SEQ ID NO: 1006947 - RNA, 19 nt, Artificial Sequence
  Description of Artificial Sequence: Synthetic oligonucleotide
ucacaauugucaccugcuc

SEQ ID NO: 1006948 - RNA, 19 nt, Artificial Sequence
  Description of Artificial Sequence: Synthetic oligonucleotide
ugugggccucaucuccucg

SEQ ID NO: 1006949 - RNA, 19 nt, Artificial Sequence
  Description of Artificial Sequence: Synthetic oligonucleotide
gaagcgggagcaaagggca

SEQ ID NO: 1006950 - RNA, 19 nt, Artificial Sequence
  Description of Artificial Sequence: Synthetic oligonucleotide
gcugaugacaacgaugccc

SEQ ID NO: 1006951 - RNA, 19 nt, Artificial Sequence
  Description of Artificial Sequence: Synthetic oligonucleotide
caaagggcaugguacucgc

SEQ ID NO: 1006952 - RNA, 19 nt, Artificial Sequence
  Description of Artificial Sequence: Synthetic oligonucleotide
cucaaguuccgaugggcug

SEQ ID NO: 1006953 - RNA, 19 nt, Artificial Sequence
  Description of Artificial Sequence: Synthetic oligonucleotide
cacaguucucaccaggcuc

SEQ ID NO: 1006954 - RNA, 19 nt, Artificial Sequence
  Description of Artificial Sequence: Synthetic oligonucleotide
cacccuaagauugaaccug

SEQ ID NO: 1006955 - RNA, 19 nt, Artificial Sequence
  Description of Artificial Sequence: Synthetic oligonucleotide
agaggauauucuucccaug

SEQ ID NO: 1006956 - RNA, 19 nt, Artificial Sequence
  Description of Artificial Sequence: Synthetic oligonucleotide
accccauugacaugcagau

SEQ ID NO: 1006957 - RNA, 19 nt, Artificial Sequence
  Description of Artificial Sequence: Synthetic oligonucleotide
uuccgaugggcugaagugc

SEQ ID NO: 1006958 - RNA, 19 nt, Artificial Sequence
  Description of Artificial Sequence: Synthetic oligonucleotide
uuuguugccgucccagcuu

SEQ ID NO: 1006959 - RNA, 19 nt, Artificial Sequence
  Description of Artificial Sequence: Synthetic oligonucleotide
gauggugccuucagggcag

SEQ ID NO: 1006960 - RNA, 19 nt, Artificial Sequence
  Description of Artificial Sequence: Synthetic oligonucleotide
aggauauucuucccauggu

SEQ ID NO: 1006961 - RNA, 19 nt, Artificial Sequence
  Description of Artificial Sequence: Synthetic oligonucleotide
ugucuaugugcuccuccug

SEQ ID NO: 1006962 - RNA, 19 nt, Artificial Sequence
  Description of Artificial Sequence: Synthetic oligonucleotide
agcauaagcuacgcuuugg

SEQ ID NO: 1006963 - RNA, 19 nt, Artificial Sequence
  Description of Artificial Sequence: Synthetic oligonucleotide
uacgcuuugguggaggcau

SEQ ID NO: 1006964 - RNA, 19 nt, Artificial Sequence
  Description of Artificial Sequence: Synthetic oligonucleotide
aguauuuauuggcuccuua

SEQ ID NO: 1006965 - RNA, 19 nt, Artificial Sequence
  Description of Artificial Sequence: Synthetic oligonucleotide
ucgcagcucuuuaaagggc

SEQ ID NO: 1006966 - RNA, 19 nt, Artificial Sequence
  Description of Artificial Sequence: Synthetic oligonucleotide
acccuaagauugaaccugc

SEQ ID NO: 1006967 - RNA, 19 nt, Artificial Sequence
  Description of Artificial Sequence: Synthetic oligonucleotide
cagcauacugaagggacgg

SEQ ID NO: 1006968 - RNA, 19 nt, Artificial Sequence
  Description of Artificial Sequence: Synthetic oligonucleotide
guuaagccucucugguggg

SEQ ID NO: 1006969 - RNA, 19 nt, Artificial Sequence
  Description of Artificial Sequence: Synthetic oligonucleotide
gaugcccugaauuguagcu

SEQ ID NO: 1006970 - RNA, 19 nt, Artificial Sequence
  Description of Artificial Sequence: Synthetic oligonucleotide
uucagaccauuguggaaga

SEQ ID NO: 1006971 - RNA, 19 nt, Artificial Sequence
  Description of Artificial Sequence: Synthetic oligonucleotide
gaagucuauccgcaccuga

SEQ ID NO: 1006972 - RNA, 19 nt, Artificial Sequence
  Description of Artificial Sequence: Synthetic oligonucleotide
caccuggucuaaucaaagc

SEQ ID NO: 1006973 - RNA, 19 nt, Artificial Sequence
  Description of Artificial Sequence: Synthetic oligonucleotide
uucggcccaaauuucucac

SEQ ID NO: 1006974 - RNA, 19 nt, Artificial Sequence
  Description of Artificial Sequence: Synthetic oligonucleotide
guagcuggccacucgggug

SEQ ID NO: 1006975 - RNA, 19 nt, Artificial Sequence
  Description of Artificial Sequence: Synthetic oligonucleotide
gcucgcacuguccauagag

SEQ ID NO: 1006976 - RNA, 19 nt, Artificial Sequence
  Description of Artificial Sequence: Synthetic oligonucleotide
gaugacaacgaugcccuga

SEQ ID NO: 1006977 - RNA, 19 nt, Artificial Sequence
  Description of Artificial Sequence: Synthetic oligonucleotide
ucacaccuggucuaaucaa

SEQ ID NO: 1006978 - RNA, 19 nt, Artificial Sequence
  Description of Artificial Sequence: Synthetic oligonucleotide
gucuauccgcaccugaaca

SEQ ID NO: 1006979 - RNA, 19 nt, Artificial Sequence
  Description of Artificial Sequence: Synthetic oligonucleotide
gaacaagcagaugggguac

SEQ ID NO: 1006980 - RNA, 19 nt, Artificial Sequence
  Description of Artificial Sequence: Synthetic oligonucleotide
caagauucggcccaaauuu

SEQ ID NO: 1006981 - RNA, 19 nt, Artificial Sequence
  Description of Artificial Sequence: Synthetic oligonucleotide
uggucuaaucaaagccugu

SEQ ID NO: 1006982 - RNA, 19 nt, Artificial Sequence
  Description of Artificial Sequence: Synthetic oligonucleotide
cccauugacaugcagauga

SEQ ID NO: 1006983 - RNA, 19 nt, Artificial Sequence
  Description of Artificial Sequence: Synthetic oligonucleotide
gaagacaccacggccccgc

SEQ ID NO: 1006984 - RNA, 19 nt, Artificial Sequence
  Description of Artificial Sequence: Synthetic oligonucleotide
agggaaguuaagccucucu

SEQ ID NO: 1006985 - RNA, 19 nt, Artificial Sequence
  Description of Artificial Sequence: Synthetic oligonucleotide
ucccggaauugcacuuugg

SEQ ID NO: 1006986 - RNA, 19 nt, Artificial Sequence
  Description of Artificial Sequence: Synthetic oligonucleotide
caaaaggcagggcguauuc

SEQ ID NO: 1006987 - RNA, 19 nt, Artificial Sequence
  Description of Artificial Sequence: Synthetic oligonucleotide
ucaggaagucuauccgcac

SEQ ID NO: 1006988 - RNA, 19 nt, Artificial Sequence
  Description of Artificial Sequence: Synthetic oligonucleotide
ugguaugccaugugccacu

SEQ ID NO: 1006989 - RNA, 19 nt, Artificial Sequence
  Description of Artificial Sequence: Synthetic oligonucleotide
uccaugucuccuuggguuc

SEQ ID NO: 1006990 - RNA, 19 nt, Artificial Sequence
  Description of Artificial Sequence: Synthetic oligonucleotide
caaaucccaccccaggcuc

SEQ ID NO: 1006991 - RNA, 19 nt, Artificial Sequence
  Description of Artificial Sequence: Synthetic oligonucleotide
cguuuaagugcacaagccg

SEQ ID NO: 1006992 - RNA, 19 nt, Artificial Sequence
  Description of Artificial Sequence: Synthetic oligonucleotide
ccauagagguccacaaggg

SEQ ID NO: 1006993 - RNA, 19 nt, Artificial Sequence
  Description of Artificial Sequence: Synthetic oligonucleotide
cacucaaguuccgaugggc

SEQ ID NO: 1006994 - RNA, 19 nt, Artificial Sequence
  Description of Artificial Sequence: Synthetic oligonucleotide
cuuagugacccacucaagu

SEQ ID NO: 1006995 - RNA, 19 nt, Artificial Sequence
  Description of Artificial Sequence: Synthetic oligonucleotide
gacaacgaugcccugaauu

SEQ ID NO: 1006996 - RNA, 19 nt, Artificial Sequence
  Description of Artificial Sequence: Synthetic oligonucleotide
cuugguccaccccauugac

SEQ ID NO: 1006997 - RNA, 19 nt, Artificial Sequence
  Description of Artificial Sequence: Synthetic oligonucleotide
cuuauuccacccguaccag

SEQ ID NO: 1006998 - RNA, 19 nt, Artificial Sequence
  Description of Artificial Sequence: Synthetic oligonucleotide
cccguuuaagugcacaagc

SEQ ID NO: 1006999 - RNA, 19 nt, Artificial Sequence
  Description of Artificial Sequence: Synthetic oligonucleotide
gauucacaguaaccagaac

SEQ ID NO: 1007000 - RNA, 19 nt, Artificial Sequence
  Description of Artificial Sequence: Synthetic oligonucleotide
ugggauuuugggucccgga

SEQ ID NO: 1007001 - RNA, 19 nt, Artificial Sequence
  Description of Artificial Sequence: Synthetic oligonucleotide
uuguugccgucccagcuuc

SEQ ID NO: 1007002 - RNA, 19 nt, Artificial Sequence
  Description of Artificial Sequence: Synthetic oligonucleotide
uacccacuugauucuggcc

SEQ ID NO: 1007003 - RNA, 19 nt, Artificial Sequence
  Description of Artificial Sequence: Synthetic oligonucleotide
caggaaguucucugagggc

SEQ ID NO: 1007004 - RNA, 19 nt, Artificial Sequence
  Description of Artificial Sequence: Synthetic oligonucleotide
ugugggcauaauacccacu

SEQ ID NO: 1007005 - RNA, 19 nt, Artificial Sequence
  Description of Artificial Sequence: Synthetic oligonucleotide
uugccgucccagcuucuag

SEQ ID NO: 1007006 - RNA, 19 nt, Artificial Sequence
  Description of Artificial Sequence: Synthetic oligonucleotide
aagucuauccgcaccugaa

SEQ ID NO: 1007007 - RNA, 19 nt, Artificial Sequence
  Description of Artificial Sequence: Synthetic oligonucleotide
cucaccccuuauuccaccc

SEQ ID NO: 1007008 - RNA, 19 nt, Artificial Sequence
  Description of Artificial Sequence: Synthetic oligonucleotide
caacuguacagagggcccg

SEQ ID NO: 1007009 - RNA, 19 nt, Artificial Sequence
  Description of Artificial Sequence: Synthetic oligonucleotide
acaccuggucuaaucaaag

SEQ ID NO: 1007010 - RNA, 19 nt, Artificial Sequence
  Description of Artificial Sequence: Synthetic oligonucleotide
uggggcacagagagacucc

SEQ ID NO: 1007011 - RNA, 19 nt, Artificial Sequence
  Description of Artificial Sequence: Synthetic oligonucleotide
agcaaagggcaugguacuc

SEQ ID NO: 1007012 - RNA, 19 nt, Artificial Sequence
  Description of Artificial Sequence: Synthetic oligonucleotide
agggcauagaggagugugg

SEQ ID NO: 1007013 - RNA, 19 nt, Artificial Sequence
  Description of Artificial Sequence: Synthetic oligonucleotide
ggcaucucaccccuuauuc

SEQ ID NO: 1007014 - RNA, 19 nt, Artificial Sequence
  Description of Artificial Sequence: Synthetic oligonucleotide
ugccaugugccacuucuuu

SEQ ID NO: 1007015 - RNA, 19 nt, Artificial Sequence
  Description of Artificial Sequence: Synthetic oligonucleotide
ggugucaagauucggccca

SEQ ID NO: 1007016 - RNA, 19 nt, Artificial Sequence
  Description of Artificial Sequence: Synthetic oligonucleotide
cccacucaaguuccgaugg

SEQ ID NO: 1007017 - RNA, 19 nt, Artificial Sequence
  Description of Artificial Sequence: Synthetic oligonucleotide
uguacgguucccguuggau

SEQ ID NO: 1007018 - RNA, 19 nt, Artificial Sequence
  Description of Artificial Sequence: Synthetic oligonucleotide
aagcaccuauccaugcugu

SEQ ID NO: 1007019 - RNA, 19 nt, Artificial Sequence
  Description of Artificial Sequence: Synthetic oligonucleotide
cugugggcauaauacccac

SEQ ID NO: 1007020 - RNA, 19 nt, Artificial Sequence
  Description of Artificial Sequence: Synthetic oligonucleotide
ggauaagaggauauucuuc

SEQ ID NO: 1007021 - RNA, 19 nt, Artificial Sequence
  Description of Artificial Sequence: Synthetic oligonucleotide
ugcccguuuaagugcacaa

SEQ ID NO: 1007022 - RNA, 19 nt, Artificial Sequence
  Description of Artificial Sequence: Synthetic oligonucleotide
aagauugaaccugcaccau

SEQ ID NO: 1007023 - RNA, 19 nt, Artificial Sequence
  Description of Artificial Sequence: Synthetic oligonucleotide
gaaagcaccuauccaugcu

SEQ ID NO: 1007024 - RNA, 19 nt, Artificial Sequence
  Description of Artificial Sequence: Synthetic oligonucleotide
ugccgucccagcuucuaga

SEQ ID NO: 1007025 - RNA, 19 nt, Artificial Sequence
  Description of Artificial Sequence: Synthetic oligonucleotide
caguucuuggaagcgggag

SEQ ID NO: 1007026 - RNA, 19 nt, Artificial Sequence
  Description of Artificial Sequence: Synthetic oligonucleotide
agauucggcccaaauuucu

SEQ ID NO: 1007027 - RNA, 19 nt, Artificial Sequence
  Description of Artificial Sequence: Synthetic oligonucleotide
ugggucccggaauugcacu

SEQ ID NO: 1007028 - RNA, 19 nt, Artificial Sequence
  Description of Artificial Sequence: Synthetic oligonucleotide
ccggaauugcacuuuggag

SEQ ID NO: 1007029 - RNA, 19 nt, Artificial Sequence
  Description of Artificial Sequence: Synthetic oligonucleotide
cacccuccguacaacggcc

SEQ ID NO: 1007030 - RNA, 19 nt, Artificial Sequence
  Description of Artificial Sequence: Synthetic oligonucleotide
gauucggcccaaauuucuc

SEQ ID NO: 1007031 - RNA, 19 nt, Artificial Sequence
  Description of Artificial Sequence: Synthetic oligonucleotide
ucggcccaaauuucucaca

SEQ ID NO: 1007032 - RNA, 19 nt, Artificial Sequence
  Description of Artificial Sequence: Synthetic oligonucleotide
gacggggagagcagcacug

SEQ ID NO: 1007033 - RNA, 19 nt, Artificial Sequence
  Description of Artificial Sequence: Synthetic oligonucleotide
ccuaagauugaaccugcac

SEQ ID NO: 1007034 - RNA, 19 nt, Artificial Sequence
  Description of Artificial Sequence: Synthetic oligonucleotide
guggaggcggcuugagacc

SEQ ID NO: 1007035 - RNA, 19 nt, Artificial Sequence
  Description of Artificial Sequence: Synthetic oligonucleotide
cagcacccuccguacaacg

SEQ ID NO: 1007036 - RNA, 19 nt, Artificial Sequence
  Description of Artificial Sequence: Synthetic oligonucleotide
guggaggcaugaaauaauc

SEQ ID NO: 1007037 - RNA, 19 nt, Artificial Sequence
  Description of Artificial Sequence: Synthetic oligonucleotide
ccagcauacugaagggacg

SEQ ID NO: 1007038 - RNA, 19 nt, Artificial Sequence
  Description of Artificial Sequence: Synthetic oligonucleotide
cguacaacggccacacugc

SEQ ID NO: 1007039 - RNA, 19 nt, Artificial Sequence
  Description of Artificial Sequence: Synthetic oligonucleotide
cuggaaugagguggaggcg

SEQ ID NO: 1007040 - RNA, 19 nt, Artificial Sequence
  Description of Artificial Sequence: Synthetic oligonucleotide
aacgaugcccugaauugua

SEQ ID NO: 1007041 - RNA, 19 nt, Artificial Sequence
  Description of Artificial Sequence: Synthetic oligonucleotide
accugaaaggccaccugag

SEQ ID NO: 1007042 - RNA, 19 nt, Artificial Sequence
  Description of Artificial Sequence: Synthetic oligonucleotide
ccuuauuccacccguacca

SEQ ID NO: 1007043 - RNA, 19 nt, Artificial Sequence
  Description of Artificial Sequence: Synthetic oligonucleotide
augcccugaauuguagcug

SEQ ID NO: 1007044 - RNA, 19 nt, Artificial Sequence
  Description of Artificial Sequence: Synthetic oligonucleotide
ccguacaacggccacacug

SEQ ID NO: 1007045 - RNA, 19 nt, Artificial Sequence
  Description of Artificial Sequence: Synthetic oligonucleotide
cuccguacaacggccacac

SEQ ID NO: 1007046 - RNA, 19 nt, Artificial Sequence
  Description of Artificial Sequence: Synthetic oligonucleotide
cuuugguggaggcaugaaa

SEQ ID NO: 1007047 - RNA, 19 nt, Artificial Sequence
  Description of Artificial Sequence: Synthetic oligonucleotide
ucucccuucaagggucggc

SEQ ID NO: 1007048 - RNA, 19 nt, Artificial Sequence
  Description of Artificial Sequence: Synthetic oligonucleotide
agcuacgcuuugguggagg

SEQ ID NO: 1007049 - RNA, 19 nt, Artificial Sequence
  Description of Artificial Sequence: Synthetic oligonucleotide
agcauacugaagggacggg

SEQ ID NO: 1007050 - RNA, 19 nt, Artificial Sequence
  Description of Artificial Sequence: Synthetic oligonucleotide
gguaccagggguuggcuga

SEQ ID NO: 1007051 - RNA, 19 nt, Artificial Sequence
  Description of Artificial Sequence: Synthetic oligonucleotide
ggcuguacgguucccguug

SEQ ID NO: 1007052 - RNA, 19 nt, Artificial Sequence
  Description of Artificial Sequence: Synthetic oligonucleotide
gacuccuuuggggauucac

SEQ ID NO: 1007053 - RNA, 19 nt, Artificial Sequence
  Description of Artificial Sequence: Synthetic oligonucleotide
cugaacaagcagauggggu

SEQ ID NO: 1007054 - RNA, 19 nt, Artificial Sequence
  Description of Artificial Sequence: Synthetic oligonucleotide
agcacccuccguacaacgg

SEQ ID NO: 1007055 - RNA, 19 nt, Artificial Sequence
  Description of Artificial Sequence: Synthetic oligonucleotide
agggcccgcagcuuccuug

SEQ ID NO: 1007056 - RNA, 19 nt, Artificial Sequence
  Description of Artificial Sequence: Synthetic oligonucleotide
uuauaccaucuaccauauc

SEQ ID NO: 1007057 - RNA, 19 nt, Artificial Sequence
  Description of Artificial Sequence: Synthetic oligonucleotide
ugguacucgcagcucuuua

SEQ ID NO: 1007058 - RNA, 19 nt, Artificial Sequence
  Description of Artificial Sequence: Synthetic oligonucleotide
acugucgguucaggaaguc

SEQ ID NO: 1007059 - RNA, 19 nt, Artificial Sequence
  Description of Artificial Sequence: Synthetic oligonucleotide
cacaccuggucuaaucaaa

SEQ ID NO: 1007060 - RNA, 19 nt, Artificial Sequence
  Description of Artificial Sequence: Synthetic oligonucleotide
ugggguaccagggguuggc

SEQ ID NO: 1007061 - RNA, 19 nt, Artificial Sequence
  Description of Artificial Sequence: Synthetic oligonucleotide
gaauuguagcuggccacuc

SEQ ID NO: 1007062 - RNA, 19 nt, Artificial Sequence
  Description of Artificial Sequence: Synthetic oligonucleotide
guacucgcagcucuuuaaa

SEQ ID NO: 1007063 - RNA, 19 nt, Artificial Sequence
  Description of Artificial Sequence: Synthetic oligonucleotide
  modified_base (12)..(12): a, c, u, g, unknown or other
cuuccuuggccncggaaaa

SEQ ID NO: 1007064 - RNA, 19 nt, Artificial Sequence
  Description of Artificial Sequence: Synthetic oligonucleotide
cuuguaguaguggcaucuc

SEQ ID NO: 1007065 - RNA, 19 nt, Artificial Sequence
  Description of Artificial Sequence: Synthetic oligonucleotide
ugacccacucaaguuccga

SEQ ID NO: 1007066 - RNA, 19 nt, Artificial Sequence
  Description of Artificial Sequence: Synthetic oligonucleotide
ggucuaaucaaagccuguc

SEQ ID NO: 1007067 - RNA, 19 nt, Artificial Sequence
  Description of Artificial Sequence: Synthetic oligonucleotide
uacaacggccacacugcuu

SEQ ID NO: 1007068 - RNA, 19 nt, Artificial Sequence
  Description of Artificial Sequence: Synthetic oligonucleotide
gaccauuguggaagacacc

SEQ ID NO: 1007069 - RNA, 19 nt, Artificial Sequence
  Description of Artificial Sequence: Synthetic oligonucleotide
caagggucggcagcucagg

SEQ ID NO: 1007070 - RNA, 19 nt, Artificial Sequence
  Description of Artificial Sequence: Synthetic oligonucleotide
gcacgcacaccugaaaggc

SEQ ID NO: 1007071 - RNA, 19 nt, Artificial Sequence
  Description of Artificial Sequence: Synthetic oligonucleotide
guacgguucccguuggaua

SEQ ID NO: 1007072 - RNA, 19 nt, Artificial Sequence
  Description of Artificial Sequence: Synthetic oligonucleotide
aggguaauagggagucaug

SEQ ID NO: 1007073 - RNA, 19 nt, Artificial Sequence
  Description of Artificial Sequence: Synthetic oligonucleotide
ugaugacucccaggacaag

SEQ ID NO: 1007074 - RNA, 19 nt, Artificial Sequence
  Description of Artificial Sequence: Synthetic oligonucleotide
gaggguaauagggagucau

SEQ ID NO: 1007075 - RNA, 19 nt, Artificial Sequence
  Description of Artificial Sequence: Synthetic oligonucleotide
guucacccuaagauugaac

SEQ ID NO: 1007076 - RNA, 19 nt, Artificial Sequence
  Description of Artificial Sequence: Synthetic oligonucleotide
guaguggcaucucaccccu

SEQ ID NO: 1007077 - RNA, 19 nt, Artificial Sequence
  Description of Artificial Sequence: Synthetic oligonucleotide
gggauucacaguaaccaga

SEQ ID NO: 1007078 - RNA, 19 nt, Artificial Sequence
  Description of Artificial Sequence: Synthetic oligonucleotide
cauccaaaaggcagggcgu

SEQ ID NO: 1007079 - RNA, 19 nt, Artificial Sequence
  Description of Artificial Sequence: Synthetic oligonucleotide
cagggguuggcugaugaca

SEQ ID NO: 1007080 - RNA, 19 nt, Artificial Sequence
  Description of Artificial Sequence: Synthetic oligonucleotide
ggauucacaguaaccagaa

SEQ ID NO: 1007081 - RNA, 19 nt, Artificial Sequence
  Description of Artificial Sequence: Synthetic oligonucleotide
acgaugcccugaauuguag

SEQ ID NO: 1007082 - RNA, 19 nt, Artificial Sequence
  Description of Artificial Sequence: Synthetic oligonucleotide
ccugaauuguagcuggcca

SEQ ID NO: 1007083 - RNA, 19 nt, Artificial Sequence
  Description of Artificial Sequence: Synthetic oligonucleotide
cccuuauuccacccguacc

SEQ ID NO: 1007084 - RNA, 19 nt, Artificial Sequence
  Description of Artificial Sequence: Synthetic oligonucleotide
acaagcagaugggguacca

SEQ ID NO: 1007085 - RNA, 19 nt, Artificial Sequence
  Description of Artificial Sequence: Synthetic oligonucleotide
cacaagccgaggcagggaa

SEQ ID NO: 1007086 - RNA, 19 nt, Artificial Sequence
  Description of Artificial Sequence: Synthetic oligonucleotide
aaagggcaugguacucgca

SEQ ID NO: 1007087 - RNA, 19 nt, Artificial Sequence
  Description of Artificial Sequence: Synthetic oligonucleotide
gggauuuugggucccggaa

SEQ ID NO: 1007088 - RNA, 19 nt, Artificial Sequence
  Description of Artificial Sequence: Synthetic oligonucleotide
gcuguacgguucccguugg

SEQ ID NO: 1007089 - RNA, 19 nt, Artificial Sequence
  Description of Artificial Sequence: Synthetic oligonucleotide
cccacuugauucuggcccc

SEQ ID NO: 1007090 - RNA, 19 nt, Artificial Sequence
  Description of Artificial Sequence: Synthetic oligonucleotide
ucagaccauuguggaagac

SEQ ID NO: 1007091 - RNA, 19 nt, Artificial Sequence
  Description of Artificial Sequence: Synthetic oligonucleotide
gggaggguaauagggaguc

SEQ ID NO: 1007092 - RNA, 19 nt, Artificial Sequence
  Description of Artificial Sequence: Synthetic oligonucleotide
gcuacgcuuugguggaggc

SEQ ID NO: 1007093 - RNA, 19 nt, Artificial Sequence
  Description of Artificial Sequence: Synthetic oligonucleotide
ggggaggcucuccucggcg

SEQ ID NO: 1007094 - RNA, 19 nt, Artificial Sequence
  Description of Artificial Sequence: Synthetic oligonucleotide
cacaagggcauggcacggc

SEQ ID NO: 1007095 - RNA, 19 nt, Artificial Sequence
  Description of Artificial Sequence: Synthetic oligonucleotide
ggugcacaguucucaccag

SEQ ID NO: 1007096 - RNA, 19 nt, Artificial Sequence
  Description of Artificial Sequence: Synthetic oligonucleotide
caggcuccucaaaucccac

SEQ ID NO: 1007097 - RNA, 19 nt, Artificial Sequence
  Description of Artificial Sequence: Synthetic oligonucleotide
agguugcuccucccgggga

SEQ ID NO: 1007098 - RNA, 19 nt, Artificial Sequence
  Description of Artificial Sequence: Synthetic oligonucleotide
uccaaaaggcagggcguau

SEQ ID NO: 1007099 - RNA, 19 nt, Artificial Sequence
  Description of Artificial Sequence: Synthetic oligonucleotide
ggcauggcacggcuggggc

SEQ ID NO: 1007100 - RNA, 19 nt, Artificial Sequence
  Description of Artificial Sequence: Synthetic oligonucleotide
auugcacuuuggaggccag

SEQ ID NO: 1007101 - RNA, 19 nt, Artificial Sequence
  Description of Artificial Sequence: Synthetic oligonucleotide
ugacaacgaugcccugaau

SEQ ID NO: 1007102 - RNA, 19 nt, Artificial Sequence
  Description of Artificial Sequence: Synthetic oligonucleotide
ccggcaagauucacaguag

SEQ ID NO: 1007103 - RNA, 19 nt, Artificial Sequence
  Description of Artificial Sequence: Synthetic oligonucleotide
aagcuacgcuuugguggag

SEQ ID NO: 1007104 - RNA, 19 nt, Artificial Sequence
  Description of Artificial Sequence: Synthetic oligonucleotide
cgcacgcacaccugaaagg

SEQ ID NO: 1007105 - RNA, 19 nt, Artificial Sequence
  Description of Artificial Sequence: Synthetic oligonucleotide
ugcucgcacuguccauaga

SEQ ID NO: 1007106 - RNA, 19 nt, Artificial Sequence
  Description of Artificial Sequence: Synthetic oligonucleotide
gcccaaauuucucacagau

SEQ ID NO: 1007107 - RNA, 19 nt, Artificial Sequence
  Description of Artificial Sequence: Synthetic oligonucleotide
acccguaccagcagggcau

SEQ ID NO: 1007108 - RNA, 19 nt, Artificial Sequence
  Description of Artificial Sequence: Synthetic oligonucleotide
ggcguauucccggggaggc

SEQ ID NO: 1007109 - RNA, 19 nt, Artificial Sequence
  Description of Artificial Sequence: Synthetic oligonucleotide
auccaaaaggcagggcgua

SEQ ID NO: 1007110 - RNA, 19 nt, Artificial Sequence
  Description of Artificial Sequence: Synthetic oligonucleotide
uguugccgucccagcuucu

SEQ ID NO: 1007111 - RNA, 19 nt, Artificial Sequence
  Description of Artificial Sequence: Synthetic oligonucleotide
gugacccacucaaguuccg

SEQ ID NO: 1007112 - RNA, 19 nt, Artificial Sequence
  Description of Artificial Sequence: Synthetic oligonucleotide
gggcccgcagcuuccuugg

SEQ ID NO: 1007113 - RNA, 19 nt, Artificial Sequence
  Description of Artificial Sequence: Synthetic oligonucleotide
agcuucguguggggcacag

SEQ ID NO: 1007114 - RNA, 19 nt, Artificial Sequence
  Description of Artificial Sequence: Synthetic oligonucleotide
ccucgguccagcacccucc

SEQ ID NO: 1007115 - RNA, 19 nt, Artificial Sequence
  Description of Artificial Sequence: Synthetic oligonucleotide
agcaccuauccaugcugua

SEQ ID NO: 1007116 - RNA, 19 nt, Artificial Sequence
  Description of Artificial Sequence: Synthetic oligonucleotide
cacccguaccagcagggca

SEQ ID NO: 1007117 - RNA, 19 nt, Artificial Sequence
  Description of Artificial Sequence: Synthetic oligonucleotide
gagagacuccuuuggggau

SEQ ID NO: 1007118 - RNA, 19 nt, Artificial Sequence
  Description of Artificial Sequence: Synthetic oligonucleotide
caacggccacacugcuucc

SEQ ID NO: 1007119 - RNA, 19 nt, Artificial Sequence
  Description of Artificial Sequence: Synthetic oligonucleotide
ccuggucuaaucaaagccu

SEQ ID NO: 1007120 - RNA, 19 nt, Artificial Sequence
  Description of Artificial Sequence: Synthetic oligonucleotide
gugccacuucuuuguugcc

SEQ ID NO: 1007121 - RNA, 19 nt, Artificial Sequence
  Description of Artificial Sequence: Synthetic oligonucleotide
gucaagauucggcccaaau

SEQ ID NO: 1007122 - RNA, 19 nt, Artificial Sequence
  Description of Artificial Sequence: Synthetic oligonucleotide
cacggcuggggcacaucug

SEQ ID NO: 1007123 - RNA, 19 nt, Artificial Sequence
  Description of Artificial Sequence: Synthetic oligonucleotide
ggguaauagggagucaugu

SEQ ID NO: 1007124 - RNA, 19 nt, Artificial Sequence
  Description of Artificial Sequence: Synthetic oligonucleotide
uggcuguacgguucccguu

SEQ ID NO: 1007125 - RNA, 19 nt, Artificial Sequence
  Description of Artificial Sequence: Synthetic oligonucleotide
ccuauccaugcuguaaguc

SEQ ID NO: 1007126 - RNA, 19 nt, Artificial Sequence
  Description of Artificial Sequence: Synthetic oligonucleotide
cugcuuccaugguaugcca

SEQ ID NO: 1007127 - RNA, 19 nt, Artificial Sequence
  Description of Artificial Sequence: Synthetic oligonucleotide
gggcguauucccggggagg

SEQ ID NO: 1007128 - RNA, 19 nt, Artificial Sequence
  Description of Artificial Sequence: Synthetic oligonucleotide
gcauaagcuacgcuuuggu

SEQ ID NO: 1007129 - RNA, 19 nt, Artificial Sequence
  Description of Artificial Sequence: Synthetic oligonucleotide
gguaauagggagucauguu

SEQ ID NO: 1007130 - RNA, 19 nt, Artificial Sequence
  Description of Artificial Sequence: Synthetic oligonucleotide
gcccguuuaagugcacaag

SEQ ID NO: 1007131 - RNA, 19 nt, Artificial Sequence
  Description of Artificial Sequence: Synthetic oligonucleotide
uccguacaacggccacacu

SEQ ID NO: 1007132 - RNA, 19 nt, Artificial Sequence
  Description of Artificial Sequence: Synthetic oligonucleotide
ccacucaaguuccgauggg

SEQ ID NO: 1007133 - RNA, 19 nt, Artificial Sequence
  Description of Artificial Sequence: Synthetic oligonucleotide
acgguucccguuggauaag

SEQ ID NO: 1007134 - RNA, 19 nt, Artificial Sequence
  Description of Artificial Sequence: Synthetic oligonucleotide
ggauuuugggucccggaau

SEQ ID NO: 1007135 - RNA, 19 nt, Artificial Sequence
  Description of Artificial Sequence: Synthetic oligonucleotide
cccugaauuguagcuggcc

SEQ ID NO: 1007136 - RNA, 19 nt, Artificial Sequence
  Description of Artificial Sequence: Synthetic oligonucleotide
cagggcguauucccgggga

SEQ ID NO: 1007137 - RNA, 19 nt, Artificial Sequence
  Description of Artificial Sequence: Synthetic oligonucleotide
ugucaagauucggcccaaa

SEQ ID NO: 1007138 - RNA, 19 nt, Artificial Sequence
  Description of Artificial Sequence: Synthetic oligonucleotide
gcagggcguauucccgggg

SEQ ID NO: 1007139 - RNA, 19 nt, Artificial Sequence
  Description of Artificial Sequence: Synthetic oligonucleotide
guccgcugggauuuugggu

SEQ ID NO: 1007140 - RNA, 19 nt, Artificial Sequence
  Description of Artificial Sequence: Synthetic oligonucleotide
ccaggacaagagaagaugu

SEQ ID NO: 1007141 - RNA, 19 nt, Artificial Sequence
  Description of Artificial Sequence: Synthetic oligonucleotide
gugcuuguaguaguggcau

SEQ ID NO: 1007142 - RNA, 19 nt, Artificial Sequence
  Description of Artificial Sequence: Synthetic oligonucleotide
guggcuguacgguucccgu

SEQ ID NO: 1007143 - RNA, 19 nt, Artificial Sequence
  Description of Artificial Sequence: Synthetic oligonucleotide
cccggaauugcacuuugga

SEQ ID NO: 1007144 - RNA, 19 nt, Artificial Sequence
  Description of Artificial Sequence: Synthetic oligonucleotide
ccccuuauuccacccguac

SEQ ID NO: 1007145 - RNA, 19 nt, Artificial Sequence
  Description of Artificial Sequence: Synthetic oligonucleotide
cgaugcccugaauuguagc

SEQ ID NO: 1007146 - RNA, 19 nt, Artificial Sequence
  Description of Artificial Sequence: Synthetic oligonucleotide
cucgaagcuuccggcaaga

SEQ ID NO: 1007147 - RNA, 19 nt, Artificial Sequence
  Description of Artificial Sequence: Synthetic oligonucleotide
ucgaagcuuccggcaagau

SEQ ID NO: 1007148 - RNA, 19 nt, Artificial Sequence
  Description of Artificial Sequence: Synthetic oligonucleotide
cagcacacacuuuccuuua

SEQ ID NO: 1007149 - RNA, 19 nt, Artificial Sequence
  Description of Artificial Sequence: Synthetic oligonucleotide
guacaacggccacacugcu

SEQ ID NO: 1007150 - RNA, 19 nt, Artificial Sequence
  Description of Artificial Sequence: Synthetic oligonucleotide
acggggagagcagcacuga

SEQ ID NO: 1007151 - RNA, 19 nt, Artificial Sequence
  Description of Artificial Sequence: Synthetic oligonucleotide
accugcucgcacuguccau

SEQ ID NO: 1007152 - RNA, 19 nt, Artificial Sequence
  Description of Artificial Sequence: Synthetic oligonucleotide
agccccaggauggugccuu

SEQ ID NO: 1007153 - RNA, 19 nt, Artificial Sequence
  Description of Artificial Sequence: Synthetic oligonucleotide
augguacucgcagcucuuu

SEQ ID NO: 1007154 - RNA, 19 nt, Artificial Sequence
  Description of Artificial Sequence: Synthetic oligonucleotide
ccgcaccugaacaagcaga

SEQ ID NO: 1007155 - RNA, 19 nt, Artificial Sequence
  Description of Artificial Sequence: Synthetic oligonucleotide
cuacgcuuugguggaggca

SEQ ID NO: 1007156 - RNA, 19 nt, Artificial Sequence
  Description of Artificial Sequence: Synthetic oligonucleotide
cagggcgcacgcacaccug

SEQ ID NO: 1007157 - RNA, 19 nt, Artificial Sequence
  Description of Artificial Sequence: Synthetic oligonucleotide
caacgaugcccugaauugu

SEQ ID NO: 1007158 - RNA, 19 nt, Artificial Sequence
  Description of Artificial Sequence: Synthetic oligonucleotide
ccacucggguggcuguacg

SEQ ID NO: 1007159 - RNA, 19 nt, Artificial Sequence
  Description of Artificial Sequence: Synthetic oligonucleotide
gccacuucuuuguugccgu

SEQ ID NO: 1007160 - RNA, 19 nt, Artificial Sequence
  Description of Artificial Sequence: Synthetic oligonucleotide
cugcccguuuaagugcaca

SEQ ID NO: 1007161 - RNA, 19 nt, Artificial Sequence
  Description of Artificial Sequence: Synthetic oligonucleotide
uaccagggguuggcugaug

SEQ ID NO: 1007162 - RNA, 19 nt, Artificial Sequence
  Description of Artificial Sequence: Synthetic oligonucleotide
ccagggguuggcugaugac

SEQ ID NO: 1007163 - RNA, 19 nt, Artificial Sequence
  Description of Artificial Sequence: Synthetic oligonucleotide
cuagccgaagccccaggau

SEQ ID NO: 1007164 - RNA, 19 nt, Artificial Sequence
  Description of Artificial Sequence: Synthetic oligonucleotide
gguggaggcaugaaauaau

SEQ ID NO: 1007165 - RNA, 19 nt, Artificial Sequence
  Description of Artificial Sequence: Synthetic oligonucleotide
ggcauaauacccacuugau

SEQ ID NO: 1007166 - RNA, 19 nt, Artificial Sequence
  Description of Artificial Sequence: Synthetic oligonucleotide
cacugucgguucaggaagu

SEQ ID NO: 1007167 - RNA, 19 nt, Artificial Sequence
  Description of Artificial Sequence: Synthetic oligonucleotide
caguagcauaagcuacgcu

SEQ ID NO: 1007168 - RNA, 19 nt, Artificial Sequence
  Description of Artificial Sequence: Synthetic oligonucleotide
acccuccguacaacggcca

SEQ ID NO: 1007169 - RNA, 19 nt, Artificial Sequence
  Description of Artificial Sequence: Synthetic oligonucleotide
guugccgucccagcuucua

SEQ ID NO: 1007170 - RNA, 19 nt, Artificial Sequence
  Description of Artificial Sequence: Synthetic oligonucleotide
cuguacgguucccguugga

SEQ ID NO: 1007171 - RNA, 19 nt, Artificial Sequence
  Description of Artificial Sequence: Synthetic oligonucleotide
ggcugcccguuuaagugca

SEQ ID NO: 1007172 - RNA, 19 nt, Artificial Sequence
  Description of Artificial Sequence: Synthetic oligonucleotide
ggguucacccuaagauuga

SEQ ID NO: 1007173 - RNA, 19 nt, Artificial Sequence
  Description of Artificial Sequence: Synthetic oligonucleotide
uaguggcaucucaccccuu

SEQ ID NO: 1007174 - RNA, 19 nt, Artificial Sequence
  Description of Artificial Sequence: Synthetic oligonucleotide
ccacuugauucuggccccg

SEQ ID NO: 1007175 - RNA, 19 nt, Artificial Sequence
  Description of Artificial Sequence: Synthetic oligonucleotide
ggcaugguacucgcagcuc

SEQ ID NO: 1007176 - RNA, 19 nt, Artificial Sequence
  Description of Artificial Sequence: Synthetic oligonucleotide
caugguacucgcagcucuu

SEQ ID NO: 1007177 - RNA, 19 nt, Artificial Sequence
  Description of Artificial Sequence: Synthetic oligonucleotide
gccaggcugcccguuuaag

SEQ ID NO: 1007178 - RNA, 19 nt, Artificial Sequence
  Description of Artificial Sequence: Synthetic oligonucleotide
cugucgguucaggaagucu

SEQ ID NO: 1007179 - RNA, 19 nt, Artificial Sequence
  Description of Artificial Sequence: Synthetic oligonucleotide
ccauugacaugcagaugaa

SEQ ID NO: 1007180 - RNA, 19 nt, Artificial Sequence
  Description of Artificial Sequence: Synthetic oligonucleotide
gucgguucaggaagucuau

SEQ ID NO: 1007181 - RNA, 19 nt, Artificial Sequence
  Description of Artificial Sequence: Synthetic oligonucleotide
ggaggguaauagggaguca

SEQ ID NO: 1007182 - RNA, 19 nt, Artificial Sequence
  Description of Artificial Sequence: Synthetic oligonucleotide
gcaguucuuggaagcggga

SEQ ID NO: 1007183 - RNA, 19 nt, Artificial Sequence
  Description of Artificial Sequence: Synthetic oligonucleotide
accccuuauuccacccgua

SEQ ID NO: 1007184 - RNA, 19 nt, Artificial Sequence
  Description of Artificial Sequence: Synthetic oligonucleotide
gcacggcuggggcacaucu

SEQ ID NO: 1007185 - RNA, 19 nt, Artificial Sequence
  Description of Artificial Sequence: Synthetic oligonucleotide
cacagaucuucagaccauu

SEQ ID NO: 1007186 - RNA, 19 nt, Artificial Sequence
  Description of Artificial Sequence: Synthetic oligonucleotide
cccuaagauugaaccugca

SEQ ID NO: 1007187 - RNA, 19 nt, Artificial Sequence
  Description of Artificial Sequence: Synthetic oligonucleotide
cugcgccucgccggcauca

SEQ ID NO: 1007188 - RNA, 19 nt, Artificial Sequence
  Description of Artificial Sequence: Synthetic oligonucleotide
ccacacugcuuccauggua

SEQ ID NO: 1007189 - RNA, 19 nt, Artificial Sequence
  Description of Artificial Sequence: Synthetic oligonucleotide
cucggcgccugugggccuc

SEQ ID NO: 1007190 - RNA, 19 nt, Artificial Sequence
  Description of Artificial Sequence: Synthetic oligonucleotide
cccucgguccagcacccuc

SEQ ID NO: 1007191 - RNA, 19 nt, Artificial Sequence
  Description of Artificial Sequence: Synthetic oligonucleotide
ccggggaggugcacaguuc

SEQ ID NO: 1007192 - RNA, 19 nt, Artificial Sequence
  Description of Artificial Sequence: Synthetic oligonucleotide
ccacccguaccagcagggc

SEQ ID NO: 1007193 - RNA, 19 nt, Artificial Sequence
  Description of Artificial Sequence: Synthetic oligonucleotide
ccguuggauaagaggauau

SEQ ID NO: 1007194 - RNA, 19 nt, Artificial Sequence
  Description of Artificial Sequence: Synthetic oligonucleotide
ccccauugacaugcagaug

SEQ ID NO: 1007195 - RNA, 19 nt, Artificial Sequence
  Description of Artificial Sequence: Synthetic oligonucleotide
cuccucccggggaggugca

SEQ ID NO: 1007196 - RNA, 19 nt, Artificial Sequence
  Description of Artificial Sequence: Synthetic oligonucleotide
cccguuggauaagaggaua

SEQ ID NO: 1007197 - RNA, 19 nt, Artificial Sequence
  Description of Artificial Sequence: Synthetic oligonucleotide
  modified_base (18)..(18): a, c, u, g, unknown or other
ccgcagcuuccuuggccnc

SEQ ID NO: 1007198 - RNA, 19 nt, Artificial Sequence
  Description of Artificial Sequence: Synthetic oligonucleotide
ccagggcgcacgcacaccu

SEQ ID NO: 1007199 - RNA, 19 nt, Artificial Sequence
  Description of Artificial Sequence: Synthetic oligonucleotide
ccugcucgcacuguccaua

SEQ ID NO: 1007200 - RNA, 19 nt, Artificial Sequence
  Description of Artificial Sequence: Synthetic oligonucleotide
cgcaccugaacaagcagau

SEQ ID NO: 1007201 - RNA, 19 nt, Artificial Sequence
  Description of Artificial Sequence: Synthetic oligonucleotide
gccacucggguggcuguac

SEQ ID NO: 1007202 - RNA, 19 nt, Artificial Sequence
  Description of Artificial Sequence: Synthetic oligonucleotide
gggucccggaauugcacuu

SEQ ID NO: 1007203 - RNA, 19 nt, Artificial Sequence
  Description of Artificial Sequence: Synthetic oligonucleotide
ccugccaggaaagcaccua

SEQ ID NO: 1007204 - RNA, 19 nt, Artificial Sequence
  Description of Artificial Sequence: Synthetic oligonucleotide
ccguaccagcagggcauag

SEQ ID NO: 1007205 - RNA, 19 nt, Artificial Sequence
  Description of Artificial Sequence: Synthetic oligonucleotide
gguaugccaugugccacuu

SEQ ID NO: 1007206 - RNA, 19 nt, Artificial Sequence
  Description of Artificial Sequence: Synthetic oligonucleotide
ggagccaggcugcccguuu

SEQ ID NO: 1007207 - RNA, 19 nt, Artificial Sequence
  Description of Artificial Sequence: Synthetic oligonucleotide
gccugucuaugugcuccuc

SEQ ID NO: 1007208 - RNA, 19 nt, Artificial Sequence
  Description of Artificial Sequence: Synthetic oligonucleotide
gcugcccguuuaagugcac

SEQ ID NO: 1007209 - RNA, 19 nt, Artificial Sequence
  Description of Artificial Sequence: Synthetic oligonucleotide
cacggccccgcaggagcca

SEQ ID NO: 1007210 - RNA, 19 nt, Artificial Sequence
  Description of Artificial Sequence: Synthetic oligonucleotide
ggucccggaauugcacuuu

SEQ ID NO: 1007211 - RNA, 19 nt, Artificial Sequence
  Description of Artificial Sequence: Synthetic oligonucleotide
ggggcacaucuggcacagc

SEQ ID NO: 1007212 - RNA, 19 nt, Artificial Sequence
  Description of Artificial Sequence: Synthetic oligonucleotide
gggguaccagggguuggcu

SEQ ID NO: 1007213 - RNA, 19 nt, Artificial Sequence
  Description of Artificial Sequence: Synthetic oligonucleotide
gggcgcacgcacaccugaa

SEQ ID NO: 1007214 - RNA, 19 nt, Artificial Sequence
  Description of Artificial Sequence: Synthetic oligonucleotide
cccgcaggcccugcgccuc

SEQ ID NO: 1007215 - RNA, 19 nt, Artificial Sequence
  Description of Artificial Sequence: Synthetic oligonucleotide
ccugcgccucgccggcauc

SEQ ID NO: 1007216 - RNA, 19 nt, Artificial Sequence
  Description of Artificial Sequence: Synthetic oligonucleotide
ccucaucuccucgaagcuu

SEQ ID NO: 1007217 - RNA, 19 nt, Artificial Sequence
  Description of Artificial Sequence: Synthetic oligonucleotide
gcguauucccggggaggcu

SEQ ID NO: 1007218 - RNA, 19 nt, Artificial Sequence
  Description of Artificial Sequence: Synthetic oligonucleotide
cguuggauaagaggauauu

SEQ ID NO: 1007219 - RNA, 19 nt, Artificial Sequence
  Description of Artificial Sequence: Synthetic oligonucleotide
cccugcgccucgccggcau

SEQ ID NO: 1007220 - RNA, 19 nt, Artificial Sequence
  Description of Artificial Sequence: Synthetic oligonucleotide
ccccucgguccagcacccu

SEQ ID NO: 1007221 - RNA, 19 nt, Artificial Sequence
  Description of Artificial Sequence: Synthetic oligonucleotide
aaaaguagcgccuugaucu

SEQ ID NO: 1007222 - RNA, 19 nt, Artificial Sequence
  Description of Artificial Sequence: Synthetic oligonucleotide
aacaaugaaagugucggcc

SEQ ID NO: 1007223 - RNA, 19 nt, Artificial Sequence
  Description of Artificial Sequence: Synthetic oligonucleotide
aauuccacggaguagaccu

SEQ ID NO: 1007224 - RNA, 19 nt, Artificial Sequence
  Description of Artificial Sequence: Synthetic oligonucleotide
uguucggucaccuugaggc

SEQ ID NO: 1007225 - RNA, 19 nt, Artificial Sequence
  Description of Artificial Sequence: Synthetic oligonucleotide
ucaucguugauguugaucu

SEQ ID NO: 1007226 - RNA, 19 nt, Artificial Sequence
  Description of Artificial Sequence: Synthetic oligonucleotide
auaaagacgaaccgucccc

SEQ ID NO: 1007227 - RNA, 19 nt, Artificial Sequence
  Description of Artificial Sequence: Synthetic oligonucleotide
agaguggucagcuugaucu

SEQ ID NO: 1007228 - RNA, 19 nt, Artificial Sequence
  Description of Artificial Sequence: Synthetic oligonucleotide
uugacuguaauccugugcu

SEQ ID NO: 1007229 - RNA, 19 nt, Artificial Sequence
  Description of Artificial Sequence: Synthetic oligonucleotide
ucgaaguucaggaucacag

SEQ ID NO: 1007230 - RNA, 19 nt, Artificial Sequence
  Description of Artificial Sequence: Synthetic oligonucleotide
uuaugaauguuccacugga

SEQ ID NO: 1007231 - RNA, 19 nt, Artificial Sequence
  Description of Artificial Sequence: Synthetic oligonucleotide
gacaucagagcuuaugggc

SEQ ID NO: 1007232 - RNA, 19 nt, Artificial Sequence
  Description of Artificial Sequence: Synthetic oligonucleotide
ugaauguuccacuggauga

SEQ ID NO: 1007233 - RNA, 19 nt, Artificial Sequence
  Description of Artificial Sequence: Synthetic oligonucleotide
uuugccaugugucauugca

SEQ ID NO: 1007234 - RNA, 19 nt, Artificial Sequence
  Description of Artificial Sequence: Synthetic oligonucleotide
ugucauugcaggcaggaca

SEQ ID NO: 1007235 - RNA, 19 nt, Artificial Sequence
  Description of Artificial Sequence: Synthetic oligonucleotide
uuugacuguaauccugugc

SEQ ID NO: 1007236 - RNA, 19 nt, Artificial Sequence
  Description of Artificial Sequence: Synthetic oligonucleotide
gacuuagaaauggaggacg

SEQ ID NO: 1007237 - RNA, 19 nt, Artificial Sequence
  Description of Artificial Sequence: Synthetic oligonucleotide
ucuuaugaauguuccacug

SEQ ID NO: 1007238 - RNA, 19 nt, Artificial Sequence
  Description of Artificial Sequence: Synthetic oligonucleotide
aguggugacuuagaaaugg

SEQ ID NO: 1007239 - RNA, 19 nt, Artificial Sequence
  Description of Artificial Sequence: Synthetic oligonucleotide
aucauaaagacgaaccguc

SEQ ID NO: 1007240 - RNA, 19 nt, Artificial Sequence
  Description of Artificial Sequence: Synthetic oligonucleotide
ucgccaaugcuguacacgg

SEQ ID NO: 1007241 - RNA, 19 nt, Artificial Sequence
  Description of Artificial Sequence: Synthetic oligonucleotide
gagucgaaagcgaagagcc

SEQ ID NO: 1007242 - RNA, 19 nt, Artificial Sequence
  Description of Artificial Sequence: Synthetic oligonucleotide
ugaggcaugucccacaguc

SEQ ID NO: 1007243 - RNA, 19 nt, Artificial Sequence
  Description of Artificial Sequence: Synthetic oligonucleotide
cuuaugaauguuccacugg

SEQ ID NO: 1007244 - RNA, 19 nt, Artificial Sequence
  Description of Artificial Sequence: Synthetic oligonucleotide
aaauggaggacgcuuuggu

SEQ ID NO: 1007245 - RNA, 19 nt, Artificial Sequence
  Description of Artificial Sequence: Synthetic oligonucleotide
uguuuguagccacuguagc

SEQ ID NO: 1007246 - RNA, 19 nt, Artificial Sequence
  Description of Artificial Sequence: Synthetic oligonucleotide
augauggacgaauggugcc

SEQ ID NO: 1007247 - RNA, 19 nt, Artificial Sequence
  Description of Artificial Sequence: Synthetic oligonucleotide
augaauguuccacuggaug

SEQ ID NO: 1007248 - RNA, 19 nt, Artificial Sequence
  Description of Artificial Sequence: Synthetic oligonucleotide
caugauggacgaauggugc

SEQ ID NO: 1007249 - RNA, 19 nt, Artificial Sequence
  Description of Artificial Sequence: Synthetic oligonucleotide
aaaguagcgccuugaucuc

SEQ ID NO: 1007250 - RNA, 19 nt, Artificial Sequence
  Description of Artificial Sequence: Synthetic oligonucleotide
ucuaggaagcacugcagcc

SEQ ID NO: 1007251 - RNA, 19 nt, Artificial Sequence
  Description of Artificial Sequence: Synthetic oligonucleotide
gugacuuagaaauggagga

SEQ ID NO: 1007252 - RNA, 19 nt, Artificial Sequence
  Description of Artificial Sequence: Synthetic oligonucleotide
ucuagagagagcaguggug

SEQ ID NO: 1007253 - RNA, 19 nt, Artificial Sequence
  Description of Artificial Sequence: Synthetic oligonucleotide
uagaccucuccgaaguggg

SEQ ID NO: 1007254 - RNA, 19 nt, Artificial Sequence
  Description of Artificial Sequence: Synthetic oligonucleotide
gacucaagcagcucucuag

SEQ ID NO: 1007255 - RNA, 19 nt, Artificial Sequence
  Description of Artificial Sequence: Synthetic oligonucleotide
cauaaagacgaaccguccc

SEQ ID NO: 1007256 - RNA, 19 nt, Artificial Sequence
  Description of Artificial Sequence: Synthetic oligonucleotide
agacgaaccguccccacac

SEQ ID NO: 1007257 - RNA, 19 nt, Artificial Sequence
  Description of Artificial Sequence: Synthetic oligonucleotide
uggcuucuguaucauaaag

SEQ ID NO: 1007258 - RNA, 19 nt, Artificial Sequence
  Description of Artificial Sequence: Synthetic oligonucleotide
uggugacuuagaaauggag

SEQ ID NO: 1007259 - RNA, 19 nt, Artificial Sequence
  Description of Artificial Sequence: Synthetic oligonucleotide
acuaugaagggcugcucgg

SEQ ID NO: 1007260 - RNA, 19 nt, Artificial Sequence
  Description of Artificial Sequence: Synthetic oligonucleotide
aaagacgaaccguccccac

SEQ ID NO: 1007261 - RNA, 19 nt, Artificial Sequence
  Description of Artificial Sequence: Synthetic oligonucleotide
ucaaguaucuaggaagcac

SEQ ID NO: 1007262 - RNA, 19 nt, Artificial Sequence
  Description of Artificial Sequence: Synthetic oligonucleotide
agaaacaaugaaagugucg

SEQ ID NO: 1007263 - RNA, 19 nt, Artificial Sequence
  Description of Artificial Sequence: Synthetic oligonucleotide
gagcuuaugggccaggaga

SEQ ID NO: 1007264 - RNA, 19 nt, Artificial Sequence
  Description of Artificial Sequence: Synthetic oligonucleotide
ucugagucgaaagcgaaga

SEQ ID NO: 1007265 - RNA, 19 nt, Artificial Sequence
  Description of Artificial Sequence: Synthetic oligonucleotide
uuaugggccaggagagugg

SEQ ID NO: 1007266 - RNA, 19 nt, Artificial Sequence
  Description of Artificial Sequence: Synthetic oligonucleotide
acuuagaaauggaggacgc

SEQ ID NO: 1007267 - RNA, 19 nt, Artificial Sequence
  Description of Artificial Sequence: Synthetic oligonucleotide
aaugaaagugucggcccac

SEQ ID NO: 1007268 - RNA, 19 nt, Artificial Sequence
  Description of Artificial Sequence: Synthetic oligonucleotide
ucaugcugaacagacgaag

SEQ ID NO: 1007269 - RNA, 19 nt, Artificial Sequence
  Description of Artificial Sequence: Synthetic oligonucleotide
ugcuggagacgauaagggg

SEQ ID NO: 1007270 - RNA, 19 nt, Artificial Sequence
  Description of Artificial Sequence: Synthetic oligonucleotide
cuguuuguagccacuguag

SEQ ID NO: 1007271 - RNA, 19 nt, Artificial Sequence
  Description of Artificial Sequence: Synthetic oligonucleotide
gaaaccgcggaagagcaag

SEQ ID NO: 1007272 - RNA, 19 nt, Artificial Sequence
  Description of Artificial Sequence: Synthetic oligonucleotide
ugagucgaaagcgaagagc

SEQ ID NO: 1007273 - RNA, 19 nt, Artificial Sequence
  Description of Artificial Sequence: Synthetic oligonucleotide
cacuaugaagggcugcucg

SEQ ID NO: 1007274 - RNA, 19 nt, Artificial Sequence
  Description of Artificial Sequence: Synthetic oligonucleotide
gacgcuuuggucugcauga

SEQ ID NO: 1007275 - RNA, 19 nt, Artificial Sequence
  Description of Artificial Sequence: Synthetic oligonucleotide
guuuguguuggaccaaggc

SEQ ID NO: 1007276 - RNA, 19 nt, Artificial Sequence
  Description of Artificial Sequence: Synthetic oligonucleotide
uccgaagugggccuuccag

SEQ ID NO: 1007277 - RNA, 19 nt, Artificial Sequence
  Description of Artificial Sequence: Synthetic oligonucleotide
gaggccgugaggcaugucc

SEQ ID NO: 1007278 - RNA, 19 nt, Artificial Sequence
  Description of Artificial Sequence: Synthetic oligonucleotide
acugucgagaaaaguagcg

SEQ ID NO: 1007279 - RNA, 19 nt, Artificial Sequence
  Description of Artificial Sequence: Synthetic oligonucleotide
caccacucaaguaucuagg

SEQ ID NO: 1007280 - RNA, 19 nt, Artificial Sequence
  Description of Artificial Sequence: Synthetic oligonucleotide
gaaaaguagcgccuugauc

SEQ ID NO: 1007281 - RNA, 19 nt, Artificial Sequence
  Description of Artificial Sequence: Synthetic oligonucleotide
gaagagcaaguacucccgg

SEQ ID NO: 1007282 - RNA, 19 nt, Artificial Sequence
  Description of Artificial Sequence: Synthetic oligonucleotide
uuuucaucgccgcccagcu

SEQ ID NO: 1007283 - RNA, 19 nt, Artificial Sequence
  Description of Artificial Sequence: Synthetic oligonucleotide
agacgaagaggcccguugg

SEQ ID NO: 1007284 - RNA, 19 nt, Artificial Sequence
  Description of Artificial Sequence: Synthetic oligonucleotide
guacacggcauucucauca

SEQ ID NO: 1007285 - RNA, 19 nt, Artificial Sequence
  Description of Artificial Sequence: Synthetic oligonucleotide
guugaaggaccacacuuug

SEQ ID NO: 1007286 - RNA, 19 nt, Artificial Sequence
  Description of Artificial Sequence: Synthetic oligonucleotide
ucuccuaccagagcagucc

SEQ ID NO: 1007287 - RNA, 19 nt, Artificial Sequence
  Description of Artificial Sequence: Synthetic oligonucleotide
gaggccacucuuaugaaug

SEQ ID NO: 1007288 - RNA, 19 nt, Artificial Sequence
  Description of Artificial Sequence: Synthetic oligonucleotide
aauggugccuccccauacu

SEQ ID NO: 1007289 - RNA, 19 nt, Artificial Sequence
  Description of Artificial Sequence: Synthetic oligonucleotide
uuagaaauggaggacgcuu

SEQ ID NO: 1007290 - RNA, 19 nt, Artificial Sequence
  Description of Artificial Sequence: Synthetic oligonucleotide
cuugaagggcucuucuuac

SEQ ID NO: 1007291 - RNA, 19 nt, Artificial Sequence
  Description of Artificial Sequence: Synthetic oligonucleotide
guugugcagagaaacaaug

SEQ ID NO: 1007292 - RNA, 19 nt, Artificial Sequence
  Description of Artificial Sequence: Synthetic oligonucleotide
ugagcgggugacaaccuug

SEQ ID NO: 1007293 - RNA, 19 nt, Artificial Sequence
  Description of Artificial Sequence: Synthetic oligonucleotide
agagcaguccacucugcag

SEQ ID NO: 1007294 - RNA, 19 nt, Artificial Sequence
  Description of Artificial Sequence: Synthetic oligonucleotide
agggacaauucuguuugcc

SEQ ID NO: 1007295 - RNA, 19 nt, Artificial Sequence
  Description of Artificial Sequence: Synthetic oligonucleotide
aggaccacacuuugaugac

SEQ ID NO: 1007296 - RNA, 19 nt, Artificial Sequence
  Description of Artificial Sequence: Synthetic oligonucleotide
gaaagcgaagagccggccc

SEQ ID NO: 1007297 - RNA, 19 nt, Artificial Sequence
  Description of Artificial Sequence: Synthetic oligonucleotide
cgggugacaaccuugaagg

SEQ ID NO: 1007298 - RNA, 19 nt, Artificial Sequence
  Description of Artificial Sequence: Synthetic oligonucleotide
ucucgccucacuuccacca

SEQ ID NO: 1007299 - RNA, 19 nt, Artificial Sequence
  Description of Artificial Sequence: Synthetic oligonucleotide
cacggaguagaccucuccg

SEQ ID NO: 1007300 - RNA, 19 nt, Artificial Sequence
  Description of Artificial Sequence: Synthetic oligonucleotide
agagcacgugagcaugugg

SEQ ID NO: 1007301 - RNA, 19 nt, Artificial Sequence
  Description of Artificial Sequence: Synthetic oligonucleotide
gacgaagaggcccguuggg

SEQ ID NO: 1007302 - RNA, 19 nt, Artificial Sequence
  Description of Artificial Sequence: Synthetic oligonucleotide
ucugaagggaggcuguguu

SEQ ID NO: 1007303 - RNA, 19 nt, Artificial Sequence
  Description of Artificial Sequence: Synthetic oligonucleotide
guagcaugcccucucgggc

SEQ ID NO: 1007304 - RNA, 19 nt, Artificial Sequence
  Description of Artificial Sequence: Synthetic oligonucleotide
gcagcuacauggcugagcc

SEQ ID NO: 1007305 - RNA, 19 nt, Artificial Sequence
  Description of Artificial Sequence: Synthetic oligonucleotide
aagacgaaccguccccaca

SEQ ID NO: 1007306 - RNA, 19 nt, Artificial Sequence
  Description of Artificial Sequence: Synthetic oligonucleotide
gaccacacuuugaugaccc

SEQ ID NO: 1007307 - RNA, 19 nt, Artificial Sequence
  Description of Artificial Sequence: Synthetic oligonucleotide
uaugaauguuccacuggau

SEQ ID NO: 1007308 - RNA, 19 nt, Artificial Sequence
  Description of Artificial Sequence: Synthetic oligonucleotide
cuuuggucugcaugauggg

SEQ ID NO: 1007309 - RNA, 19 nt, Artificial Sequence
  Description of Artificial Sequence: Synthetic oligonucleotide
cacugucgagaaaaguagc

SEQ ID NO: 1007310 - RNA, 19 nt, Artificial Sequence
  Description of Artificial Sequence: Synthetic oligonucleotide
ucgaaagcgaagagccggc

SEQ ID NO: 1007311 - RNA, 19 nt, Artificial Sequence
  Description of Artificial Sequence: Synthetic oligonucleotide
acgaagaggcccguugggc

SEQ ID NO: 1007312 - RNA, 19 nt, Artificial Sequence
  Description of Artificial Sequence: Synthetic oligonucleotide
ugcccucugagucgaaagc

SEQ ID NO: 1007313 - RNA, 19 nt, Artificial Sequence
  Description of Artificial Sequence: Synthetic oligonucleotide
uuuugacuguaauccugug

SEQ ID NO: 1007314 - RNA, 19 nt, Artificial Sequence
  Description of Artificial Sequence: Synthetic oligonucleotide
cacgugagcaugugguugc

SEQ ID NO: 1007315 - RNA, 19 nt, Artificial Sequence
  Description of Artificial Sequence: Synthetic oligonucleotide
gugcaugauggacgaaugg

SEQ ID NO: 1007316 - RNA, 19 nt, Artificial Sequence
  Description of Artificial Sequence: Synthetic oligonucleotide
uugcccucugagucgaaag

SEQ ID NO: 1007317 - RNA, 19 nt, Artificial Sequence
  Description of Artificial Sequence: Synthetic oligonucleotide
ucucgggccaccacucaag

SEQ ID NO: 1007318 - RNA, 19 nt, Artificial Sequence
  Description of Artificial Sequence: Synthetic oligonucleotide
ugcgugaaaccgcggaaga

SEQ ID NO: 1007319 - RNA, 19 nt, Artificial Sequence
  Description of Artificial Sequence: Synthetic oligonucleotide
caggagaguggucagcuug

SEQ ID NO: 1007320 - RNA, 19 nt, Artificial Sequence
  Description of Artificial Sequence: Synthetic oligonucleotide
uuggaccaaggccucuucc

SEQ ID NO: 1007321 - RNA, 19 nt, Artificial Sequence
  Description of Artificial Sequence: Synthetic oligonucleotide
agaaaaguagcgccuugau

SEQ ID NO: 1007322 - RNA, 19 nt, Artificial Sequence
  Description of Artificial Sequence: Synthetic oligonucleotide
accacucaaguaucuagga

SEQ ID NO: 1007323 - RNA, 19 nt, Artificial Sequence
  Description of Artificial Sequence: Synthetic oligonucleotide
acucuagagagagcagugg

SEQ ID NO: 1007324 - RNA, 19 nt, Artificial Sequence
  Description of Artificial Sequence: Synthetic oligonucleotide
uccaugcuggagacgauaa

SEQ ID NO: 1007325 - RNA, 19 nt, Artificial Sequence
  Description of Artificial Sequence: Synthetic oligonucleotide
gaauggugccuccccauac

SEQ ID NO: 1007326 - RNA, 19 nt, Artificial Sequence
  Description of Artificial Sequence: Synthetic oligonucleotide
uaaagacgaaccgucccca

SEQ ID NO: 1007327 - RNA, 19 nt, Artificial Sequence
  Description of Artificial Sequence: Synthetic oligonucleotide
ucuguaucauaaagacgaa

SEQ ID NO: 1007328 - RNA, 19 nt, Artificial Sequence
  Description of Artificial Sequence: Synthetic oligonucleotide
agagcuuaugggccaggag

SEQ ID NO: 1007329 - RNA, 19 nt, Artificial Sequence
  Description of Artificial Sequence: Synthetic oligonucleotide
cugucgagaaaaguagcgc

SEQ ID NO: 1007330 - RNA, 19 nt, Artificial Sequence
  Description of Artificial Sequence: Synthetic oligonucleotide
uguuugccaugugucauug

SEQ ID NO: 1007331 - RNA, 19 nt, Artificial Sequence
  Description of Artificial Sequence: Synthetic oligonucleotide
cuucuuacucugaggcagc

SEQ ID NO: 1007332 - RNA, 19 nt, Artificial Sequence
  Description of Artificial Sequence: Synthetic oligonucleotide
uccugugcucuguagcaug

SEQ ID NO: 1007333 - RNA, 19 nt, Artificial Sequence
  Description of Artificial Sequence: Synthetic oligonucleotide
aagaggcccguugggcugc

SEQ ID NO: 1007334 - RNA, 19 nt, Artificial Sequence
  Description of Artificial Sequence: Synthetic oligonucleotide
ugugcgugaaaccgcggaa

SEQ ID NO: 1007335 - RNA, 19 nt, Artificial Sequence
  Description of Artificial Sequence: Synthetic oligonucleotide
auggacgaauggugccucc

SEQ ID NO: 1007336 - RNA, 19 nt, Artificial Sequence
  Description of Artificial Sequence: Synthetic oligonucleotide
agagccggccccugggaac

SEQ ID NO: 1007337 - RNA, 19 nt, Artificial Sequence
  Description of Artificial Sequence: Synthetic oligonucleotide
cuaugaagggcugcucggg

SEQ ID NO: 1007338 - RNA, 19 nt, Artificial Sequence
  Description of Artificial Sequence: Synthetic oligonucleotide
cucgccaaugcuguacacg

SEQ ID NO: 1007339 - RNA, 19 nt, Artificial Sequence
  Description of Artificial Sequence: Synthetic oligonucleotide
caugcugaacagacgaaga

SEQ ID NO: 1007340 - RNA, 19 nt, Artificial Sequence
  Description of Artificial Sequence: Synthetic oligonucleotide
uguaauccugugcucugua

SEQ ID NO: 1007341 - RNA, 19 nt, Artificial Sequence
  Description of Artificial Sequence: Synthetic oligonucleotide
cagcgugugcgugaaaccg

SEQ ID NO: 1007342 - RNA, 19 nt, Artificial Sequence
  Description of Artificial Sequence: Synthetic oligonucleotide
cuggcaugcacuggaagag

SEQ ID NO: 1007343 - RNA, 19 nt, Artificial Sequence
  Description of Artificial Sequence: Synthetic oligonucleotide
ugauggacgaauggugccu

SEQ ID NO: 1007344 - RNA, 19 nt, Artificial Sequence
  Description of Artificial Sequence: Synthetic oligonucleotide
gaguagaccucuccgaagu

SEQ ID NO: 1007345 - RNA, 19 nt, Artificial Sequence
  Description of Artificial Sequence: Synthetic oligonucleotide
agacaggacaaagggacca

SEQ ID NO: 1007346 - RNA, 19 nt, Artificial Sequence
  Description of Artificial Sequence: Synthetic oligonucleotide
guagcugcagcuacauggc

SEQ ID NO: 1007347 - RNA, 19 nt, Artificial Sequence
  Description of Artificial Sequence: Synthetic oligonucleotide
gcucaugcugaacagacga

SEQ ID NO: 1007348 - RNA, 19 nt, Artificial Sequence
  Description of Artificial Sequence: Synthetic oligonucleotide
gaauuccacggaguagacc

SEQ ID NO: 1007349 - RNA, 19 nt, Artificial Sequence
  Description of Artificial Sequence: Synthetic oligonucleotide
agcgccuugaucucugcau

SEQ ID NO: 1007350 - RNA, 19 nt, Artificial Sequence
  Description of Artificial Sequence: Synthetic oligonucleotide
uggcaacucuccuaccaga

SEQ ID NO: 1007351 - RNA, 19 nt, Artificial Sequence
  Description of Artificial Sequence: Synthetic oligonucleotide
gagaaaaguagcgccuuga

SEQ ID NO: 1007352 - RNA, 19 nt, Artificial Sequence
  Description of Artificial Sequence: Synthetic oligonucleotide
acggaguagaccucuccga

SEQ ID NO: 1007353 - RNA, 19 nt, Artificial Sequence
  Description of Artificial Sequence: Synthetic oligonucleotide
ugaggccacucuuaugaau

SEQ ID NO: 1007354 - RNA, 19 nt, Artificial Sequence
  Description of Artificial Sequence: Synthetic oligonucleotide
ugucucgccucacuuccac

SEQ ID NO: 1007355 - RNA, 19 nt, Artificial Sequence
  Description of Artificial Sequence: Synthetic oligonucleotide
auccucgccaaugcuguac

SEQ ID NO: 1007356 - RNA, 19 nt, Artificial Sequence
  Description of Artificial Sequence: Synthetic oligonucleotide
agugucggcccacugucga

SEQ ID NO: 1007357 - RNA, 19 nt, Artificial Sequence
  Description of Artificial Sequence: Synthetic oligonucleotide
cagacgaagaggcccguug

SEQ ID NO: 1007358 - RNA, 19 nt, Artificial Sequence
  Description of Artificial Sequence: Synthetic oligonucleotide
uggacacccgggccagugg

SEQ ID NO: 1007359 - RNA, 19 nt, Artificial Sequence
  Description of Artificial Sequence: Synthetic oligonucleotide
accagggacaauucuguuu

SEQ ID NO: 1007360 - RNA, 19 nt, Artificial Sequence
  Description of Artificial Sequence: Synthetic oligonucleotide
cacucgaggcgacugggag

SEQ ID NO: 1007361 - RNA, 19 nt, Artificial Sequence
  Description of Artificial Sequence: Synthetic oligonucleotide
cugagucgaaagcgaagag

SEQ ID NO: 1007362 - RNA, 19 nt, Artificial Sequence
  Description of Artificial Sequence: Synthetic oligonucleotide
agugcaugauggacgaaug

SEQ ID NO: 1007363 - RNA, 19 nt, Artificial Sequence
  Description of Artificial Sequence: Synthetic oligonucleotide
cuccaguccacagugacca

SEQ ID NO: 1007364 - RNA, 19 nt, Artificial Sequence
  Description of Artificial Sequence: Synthetic oligonucleotide
cucgucugugcguuccacc

SEQ ID NO: 1007365 - RNA, 19 nt, Artificial Sequence
  Description of Artificial Sequence: Synthetic oligonucleotide
gaauguuccacuggaugaa

SEQ ID NO: 1007366 - RNA, 19 nt, Artificial Sequence
  Description of Artificial Sequence: Synthetic oligonucleotide
uccccaaggcgguccaugc

SEQ ID NO: 1007367 - RNA, 19 nt, Artificial Sequence
  Description of Artificial Sequence: Synthetic oligonucleotide
ggaccaguggcaucugaag

SEQ ID NO: 1007368 - RNA, 19 nt, Artificial Sequence
  Description of Artificial Sequence: Synthetic oligonucleotide
acgucuaagcuggcaacuc

SEQ ID NO: 1007369 - RNA, 19 nt, Artificial Sequence
  Description of Artificial Sequence: Synthetic oligonucleotide
ggcucuucuuacucugagg

SEQ ID NO: 1007370 - RNA, 19 nt, Artificial Sequence
  Description of Artificial Sequence: Synthetic oligonucleotide
aagugucggcccacugucg

SEQ ID NO: 1007371 - RNA, 19 nt, Artificial Sequence
  Description of Artificial Sequence: Synthetic oligonucleotide
agucgaaagcgaagagccg

SEQ ID NO: 1007372 - RNA, 19 nt, Artificial Sequence
  Description of Artificial Sequence: Synthetic oligonucleotide
auugcaggcaggacaucag

SEQ ID NO: 1007373 - RNA, 19 nt, Artificial Sequence
  Description of Artificial Sequence: Synthetic oligonucleotide
guucggucaccuugaggcc

SEQ ID NO: 1007374 - RNA, 19 nt, Artificial Sequence
  Description of Artificial Sequence: Synthetic oligonucleotide
ugacuguaauccugugcuc

SEQ ID NO: 1007375 - RNA, 19 nt, Artificial Sequence
  Description of Artificial Sequence: Synthetic oligonucleotide
cuguagcaugcccucucgg

SEQ ID NO: 1007376 - RNA, 19 nt, Artificial Sequence
  Description of Artificial Sequence: Synthetic oligonucleotide
uucagccgauggauuucag

SEQ ID NO: 1007377 - RNA, 19 nt, Artificial Sequence
  Description of Artificial Sequence: Synthetic oligonucleotide
acucgaggcgacugggaga

SEQ ID NO: 1007378 - RNA, 19 nt, Artificial Sequence
  Description of Artificial Sequence: Synthetic oligonucleotide
gcaugauggacgaauggug

SEQ ID NO: 1007379 - RNA, 19 nt, Artificial Sequence
  Description of Artificial Sequence: Synthetic oligonucleotide
gccacccagacucaagcag

SEQ ID NO: 1007380 - RNA, 19 nt, Artificial Sequence
  Description of Artificial Sequence: Synthetic oligonucleotide
ccaccacucaaguaucuag

SEQ ID NO: 1007381 - RNA, 19 nt, Artificial Sequence
  Description of Artificial Sequence: Synthetic oligonucleotide
uggacgaauggugccuccc

SEQ ID NO: 1007382 - RNA, 19 nt, Artificial Sequence
  Description of Artificial Sequence: Synthetic oligonucleotide
cuaccagagcaguccacuc

SEQ ID NO: 1007383 - RNA, 19 nt, Artificial Sequence
  Description of Artificial Sequence: Synthetic oligonucleotide
gugaaaccgcggaagagca

SEQ ID NO: 1007384 - RNA, 19 nt, Artificial Sequence
  Description of Artificial Sequence: Synthetic oligonucleotide
caguggugacuuagaaaug

SEQ ID NO: 1007385 - RNA, 19 nt, Artificial Sequence
  Description of Artificial Sequence: Synthetic oligonucleotide
cauugcaggcaggacauca

SEQ ID NO: 1007386 - RNA, 19 nt, Artificial Sequence
  Description of Artificial Sequence: Synthetic oligonucleotide
aaguagcgccuugaucucu

SEQ ID NO: 1007387 - RNA, 19 nt, Artificial Sequence
  Description of Artificial Sequence: Synthetic oligonucleotide
cggaagagcaaguacuccc

SEQ ID NO: 1007388 - RNA, 19 nt, Artificial Sequence
  Description of Artificial Sequence: Synthetic oligonucleotide
ccuugagcgggugacaacc

SEQ ID NO: 1007389 - RNA, 19 nt, Artificial Sequence
  Description of Artificial Sequence: Synthetic oligonucleotide
ccugucucgccucacuucc

SEQ ID NO: 1007390 - RNA, 19 nt, Artificial Sequence
  Description of Artificial Sequence: Synthetic oligonucleotide
ggacgcuuuggucugcaug

SEQ ID NO: 1007391 - RNA, 19 nt, Artificial Sequence
  Description of Artificial Sequence: Synthetic oligonucleotide
gaggcaugucccacagucc

SEQ ID NO: 1007392 - RNA, 19 nt, Artificial Sequence
  Description of Artificial Sequence: Synthetic oligonucleotide
cucuguagcaugcccucuc

SEQ ID NO: 1007393 - RNA, 19 nt, Artificial Sequence
  Description of Artificial Sequence: Synthetic oligonucleotide
gugacaaccuugaagggcu

SEQ ID NO: 1007394 - RNA, 19 nt, Artificial Sequence
  Description of Artificial Sequence: Synthetic oligonucleotide
uucuuacucugaggcagca

SEQ ID NO: 1007395 - RNA, 19 nt, Artificial Sequence
  Description of Artificial Sequence: Synthetic oligonucleotide
caucagagcuuaugggcca

SEQ ID NO: 1007396 - RNA, 19 nt, Artificial Sequence
  Description of Artificial Sequence: Synthetic oligonucleotide
cuacuggccccauguggag

SEQ ID NO: 1007397 - RNA, 19 nt, Artificial Sequence
  Description of Artificial Sequence: Synthetic oligonucleotide
ugaaaccgcggaagagcaa

SEQ ID NO: 1007398 - RNA, 19 nt, Artificial Sequence
  Description of Artificial Sequence: Synthetic oligonucleotide
gagaguggucagcuugauc

SEQ ID NO: 1007399 - RNA, 19 nt, Artificial Sequence
  Description of Artificial Sequence: Synthetic oligonucleotide
uagcgccuugaucucugca

SEQ ID NO: 1007400 - RNA, 19 nt, Artificial Sequence
  Description of Artificial Sequence: Synthetic oligonucleotide
aggccacucuuaugaaugu

SEQ ID NO: 1007401 - RNA, 19 nt, Artificial Sequence
  Description of Artificial Sequence: Synthetic oligonucleotide
uugaggccacucuuaugaa

SEQ ID NO: 1007402 - RNA, 19 nt, Artificial Sequence
  Description of Artificial Sequence: Synthetic oligonucleotide
gugugcgugaaaccgcgga

SEQ ID NO: 1007403 - RNA, 19 nt, Artificial Sequence
  Description of Artificial Sequence: Synthetic oligonucleotide
ucgagaaaaguagcgccuu

SEQ ID NO: 1007404 - RNA, 19 nt, Artificial Sequence
  Description of Artificial Sequence: Synthetic oligonucleotide
ucggucaccuugaggccac

SEQ ID NO: 1007405 - RNA, 19 nt, Artificial Sequence
  Description of Artificial Sequence: Synthetic oligonucleotide
cucuucuuacucugaggca

SEQ ID NO: 1007406 - RNA, 19 nt, Artificial Sequence
  Description of Artificial Sequence: Synthetic oligonucleotide
ugucgggucuuucccugaa

SEQ ID NO: 1007407 - RNA, 19 nt, Artificial Sequence
  Description of Artificial Sequence: Synthetic oligonucleotide
gaagggcucuucuuacucu

SEQ ID NO: 1007408 - RNA, 19 nt, Artificial Sequence
  Description of Artificial Sequence: Synthetic oligonucleotide
cuguguucggucaccuuga

SEQ ID NO: 1007409 - RNA, 19 nt, Artificial Sequence
  Description of Artificial Sequence: Synthetic oligonucleotide
cacagggacuggcaugcac

SEQ ID NO: 1007410 - RNA, 19 nt, Artificial Sequence
  Description of Artificial Sequence: Synthetic oligonucleotide
gggugacaaccuugaaggg

SEQ ID NO: 1007411 - RNA, 19 nt, Artificial Sequence
  Description of Artificial Sequence: Synthetic oligonucleotide
acgaauggugccuccccau

SEQ ID NO: 1007412 - RNA, 19 nt, Artificial Sequence
  Description of Artificial Sequence: Synthetic oligonucleotide
caucguugauguugaucuc

SEQ ID NO: 1007413 - RNA, 19 nt, Artificial Sequence
  Description of Artificial Sequence: Synthetic oligonucleotide
uugagcgggugacaaccuu

SEQ ID NO: 1007414 - RNA, 19 nt, Artificial Sequence
  Description of Artificial Sequence: Synthetic oligonucleotide
aguagcgccuugaucucug

SEQ ID NO: 1007415 - RNA, 19 nt, Artificial Sequence
  Description of Artificial Sequence: Synthetic oligonucleotide
gagcacgugagcauguggu

SEQ ID NO: 1007416 - RNA, 19 nt, Artificial Sequence
  Description of Artificial Sequence: Synthetic oligonucleotide
gccacuguagccagacagg

SEQ ID NO: 1007417 - RNA, 19 nt, Artificial Sequence
  Description of Artificial Sequence: Synthetic oligonucleotide
ugguugcccucugagucga

SEQ ID NO: 1007418 - RNA, 19 nt, Artificial Sequence
  Description of Artificial Sequence: Synthetic oligonucleotide
aaaccgcggaagagcaagu

SEQ ID NO: 1007419 - RNA, 19 nt, Artificial Sequence
  Description of Artificial Sequence: Synthetic oligonucleotide
agcacgugagcaugugguu

SEQ ID NO: 1007420 - RNA, 19 nt, Artificial Sequence
  Description of Artificial Sequence: Synthetic oligonucleotide
ccgaagugggccuuccagc

SEQ ID NO: 1007421 - RNA, 19 nt, Artificial Sequence
  Description of Artificial Sequence: Synthetic oligonucleotide
ggggcggccucccucagag

SEQ ID NO: 1007422 - RNA, 19 nt, Artificial Sequence
  Description of Artificial Sequence: Synthetic oligonucleotide
gaaccguccccacaccacu

SEQ ID NO: 1007423 - RNA, 19 nt, Artificial Sequence
  Description of Artificial Sequence: Synthetic oligonucleotide
cucuagagagagcaguggu

SEQ ID NO: 1007424 - RNA, 19 nt, Artificial Sequence
  Description of Artificial Sequence: Synthetic oligonucleotide
aggagaguggucagcuuga

SEQ ID NO: 1007425 - RNA, 19 nt, Artificial Sequence
  Description of Artificial Sequence: Synthetic oligonucleotide
gucgggucuuucccugaag

SEQ ID NO: 1007426 - RNA, 19 nt, Artificial Sequence
  Description of Artificial Sequence: Synthetic oligonucleotide
cucgccucacuuccaccag

SEQ ID NO: 1007427 - RNA, 19 nt, Artificial Sequence
  Description of Artificial Sequence: Synthetic oligonucleotide
gcaacucuccuaccagagc

SEQ ID NO: 1007428 - RNA, 19 nt, Artificial Sequence
  Description of Artificial Sequence: Synthetic oligonucleotide
cgugaaaccgcggaagagc

SEQ ID NO: 1007429 - RNA, 19 nt, Artificial Sequence
  Description of Artificial Sequence: Synthetic oligonucleotide
ucuccgaagugggccuucc

SEQ ID NO: 1007430 - RNA, 19 nt, Artificial Sequence
  Description of Artificial Sequence: Synthetic oligonucleotide
aaccguccccacaccacug

SEQ ID NO: 1007431 - RNA, 19 nt, Artificial Sequence
  Description of Artificial Sequence: Synthetic oligonucleotide
augaaagugucggcccacu

SEQ ID NO: 1007432 - RNA, 19 nt, Artificial Sequence
  Description of Artificial Sequence: Synthetic oligonucleotide
ccaaggcgguccaugcugg

SEQ ID NO: 1007433 - RNA, 19 nt, Artificial Sequence
  Description of Artificial Sequence: Synthetic oligonucleotide
aacagacgaagaggcccgu

SEQ ID NO: 1007434 - RNA, 19 nt, Artificial Sequence
  Description of Artificial Sequence: Synthetic oligonucleotide
agcaugcccucucgggcca

SEQ ID NO: 1007435 - RNA, 19 nt, Artificial Sequence
  Description of Artificial Sequence: Synthetic oligonucleotide
cccacugucgagaaaagua

SEQ ID NO: 1007436 - RNA, 19 nt, Artificial Sequence
  Description of Artificial Sequence: Synthetic oligonucleotide
caauucuguuugccaugug

SEQ ID NO: 1007437 - RNA, 19 nt, Artificial Sequence
  Description of Artificial Sequence: Synthetic oligonucleotide
aagcgaagagccggccccu

SEQ ID NO: 1007438 - RNA, 19 nt, Artificial Sequence
  Description of Artificial Sequence: Synthetic oligonucleotide
gagcgggugacaaccuuga

SEQ ID NO: 1007439 - RNA, 19 nt, Artificial Sequence
  Description of Artificial Sequence: Synthetic oligonucleotide
guagcgccuugaucucugc

SEQ ID NO: 1007440 - RNA, 19 nt, Artificial Sequence
  Description of Artificial Sequence: Synthetic oligonucleotide
gcagcgugugcgugaaacc

SEQ ID NO: 1007441 - RNA, 19 nt, Artificial Sequence
  Description of Artificial Sequence: Synthetic oligonucleotide
ugucucgcuugguggccca

SEQ ID NO: 1007442 - RNA, 19 nt, Artificial Sequence
  Description of Artificial Sequence: Synthetic oligonucleotide
cucaugcugaacagacgaa

SEQ ID NO: 1007443 - RNA, 19 nt, Artificial Sequence
  Description of Artificial Sequence: Synthetic oligonucleotide
guggugacuuagaaaugga

SEQ ID NO: 1007444 - RNA, 19 nt, Artificial Sequence
  Description of Artificial Sequence: Synthetic oligonucleotide
ggacacccgggccaguggc

SEQ ID NO: 1007445 - RNA, 19 nt, Artificial Sequence
  Description of Artificial Sequence: Synthetic oligonucleotide
gugucggcccacugucgag

SEQ ID NO: 1007446 - RNA, 19 nt, Artificial Sequence
  Description of Artificial Sequence: Synthetic oligonucleotide
cuguacacggcauucucau

SEQ ID NO: 1007447 - RNA, 19 nt, Artificial Sequence
  Description of Artificial Sequence: Synthetic oligonucleotide
gcgacugggagagggaggc

SEQ ID NO: 1007448 - RNA, 19 nt, Artificial Sequence
  Description of Artificial Sequence: Synthetic oligonucleotide
cucgcuugguggcccacuc

SEQ ID NO: 1007449 - RNA, 19 nt, Artificial Sequence
  Description of Artificial Sequence: Synthetic oligonucleotide
gcccacucuagagagagca

SEQ ID NO: 1007450 - RNA, 19 nt, Artificial Sequence
  Description of Artificial Sequence: Synthetic oligonucleotide
caaccuugaagggcucuuc

SEQ ID NO: 1007451 - RNA, 19 nt, Artificial Sequence
  Description of Artificial Sequence: Synthetic oligonucleotide
acaaccuugaagggcucuu

SEQ ID NO: 1007452 - RNA, 19 nt, Artificial Sequence
  Description of Artificial Sequence: Synthetic oligonucleotide
gcacgugagcaugugguug

SEQ ID NO: 1007453 - RNA, 19 nt, Artificial Sequence
  Description of Artificial Sequence: Synthetic oligonucleotide
uuccuucuuucagccgaug

SEQ ID NO: 1007454 - RNA, 19 nt, Artificial Sequence
  Description of Artificial Sequence: Synthetic oligonucleotide
cagagguucuucuuggcuu

SEQ ID NO: 1007455 - RNA, 19 nt, Artificial Sequence
  Description of Artificial Sequence: Synthetic oligonucleotide
gaggagcagccugucucgc

SEQ ID NO: 1007456 - RNA, 19 nt, Artificial Sequence
  Description of Artificial Sequence: Synthetic oligonucleotide
cagcuacauggcugagccc

SEQ ID NO: 1007457 - RNA, 19 nt, Artificial Sequence
  Description of Artificial Sequence: Synthetic oligonucleotide
uuucaucgccgcccagcuu

SEQ ID NO: 1007458 - RNA, 19 nt, Artificial Sequence
  Description of Artificial Sequence: Synthetic oligonucleotide
gccugucucgcuugguggc

SEQ ID NO: 1007459 - RNA, 19 nt, Artificial Sequence
  Description of Artificial Sequence: Synthetic oligonucleotide
gcgugugcgugaaaccgcg

SEQ ID NO: 1007460 - RNA, 19 nt, Artificial Sequence
  Description of Artificial Sequence: Synthetic oligonucleotide
ggauucugggcaugucauc

SEQ ID NO: 1007461 - RNA, 19 nt, Artificial Sequence
  Description of Artificial Sequence: Synthetic oligonucleotide
uggcuagcucugagucccc

SEQ ID NO: 1007462 - RNA, 19 nt, Artificial Sequence
  Description of Artificial Sequence: Synthetic oligonucleotide
accagcucgucugugcguu

SEQ ID NO: 1007463 - RNA, 19 nt, Artificial Sequence
  Description of Artificial Sequence: Synthetic oligonucleotide
ucucgcuugguggcccacu

SEQ ID NO: 1007464 - RNA, 19 nt, Artificial Sequence
  Description of Artificial Sequence: Synthetic oligonucleotide
agcccacucgaggcgacug

SEQ ID NO: 1007465 - RNA, 19 nt, Artificial Sequence
  Description of Artificial Sequence: Synthetic oligonucleotide
ccacgucuaagcuggcaac

SEQ ID NO: 1007466 - RNA, 19 nt, Artificial Sequence
  Description of Artificial Sequence: Synthetic oligonucleotide
cuucuggcgcagagcuuuc

SEQ ID NO: 1007467 - RNA, 19 nt, Artificial Sequence
  Description of Artificial Sequence: Synthetic oligonucleotide
guggccacccagacucaag

SEQ ID NO: 1007468 - RNA, 19 nt, Artificial Sequence
  Description of Artificial Sequence: Synthetic oligonucleotide
gcgcagagcuuucauuuuc

SEQ ID NO: 1007469 - RNA, 19 nt, Artificial Sequence
  Description of Artificial Sequence: Synthetic oligonucleotide
caucgaaguucaggaucac

SEQ ID NO: 1007470 - RNA, 19 nt, Artificial Sequence
  Description of Artificial Sequence: Synthetic oligonucleotide
cagagcacgugagcaugug

SEQ ID NO: 1007471 - RNA, 19 nt, Artificial Sequence
  Description of Artificial Sequence: Synthetic oligonucleotide
ggaggcuguguucggucac

SEQ ID NO: 1007472 - RNA, 19 nt, Artificial Sequence
  Description of Artificial Sequence: Synthetic oligonucleotide
ccacaguccauggcggugc

SEQ ID NO: 1007473 - RNA, 19 nt, Artificial Sequence
  Description of Artificial Sequence: Synthetic oligonucleotide
gaagcccacucgaggcgac

SEQ ID NO: 1007474 - RNA, 19 nt, Artificial Sequence
  Description of Artificial Sequence: Synthetic oligonucleotide
gaagcgcugucuguccugu

SEQ ID NO: 1007475 - RNA, 19 nt, Artificial Sequence
  Description of Artificial Sequence: Synthetic oligonucleotide
ugcccucucgggccaccac

SEQ ID NO: 1007476 - RNA, 19 nt, Artificial Sequence
  Description of Artificial Sequence: Synthetic oligonucleotide
gcuguacacggcauucuca

SEQ ID NO: 1007477 - RNA, 19 nt, Artificial Sequence
  Description of Artificial Sequence: Synthetic oligonucleotide
ccgcccagcuuguagauga

SEQ ID NO: 1007478 - RNA, 19 nt, Artificial Sequence
  Description of Artificial Sequence: Synthetic oligonucleotide
gcgugaaaccgcggaagag

SEQ ID NO: 1007479 - RNA, 19 nt, Artificial Sequence
  Description of Artificial Sequence: Synthetic oligonucleotide
ccaugugucauugcaggca

SEQ ID NO: 1007480 - RNA, 19 nt, Artificial Sequence
  Description of Artificial Sequence: Synthetic oligonucleotide
ccaugcuggagacgauaag

SEQ ID NO: 1007481 - RNA, 19 nt, Artificial Sequence
  Description of Artificial Sequence: Synthetic oligonucleotide
ucauugcaggcaggacauc

SEQ ID NO: 1007482 - RNA, 19 nt, Artificial Sequence
  Description of Artificial Sequence: Synthetic oligonucleotide
gcgccuugaucucugcauc

SEQ ID NO: 1007483 - RNA, 19 nt, Artificial Sequence
  Description of Artificial Sequence: Synthetic oligonucleotide
ugaccccauccacgucuaa

SEQ ID NO: 1007484 - RNA, 19 nt, Artificial Sequence
  Description of Artificial Sequence: Synthetic oligonucleotide
agcgggugacaaccuugaa

SEQ ID NO: 1007485 - RNA, 19 nt, Artificial Sequence
  Description of Artificial Sequence: Synthetic oligonucleotide
gaggcgacugggagaggga

SEQ ID NO: 1007486 - RNA, 19 nt, Artificial Sequence
  Description of Artificial Sequence: Synthetic oligonucleotide
ucggcccacugucgagaaa

SEQ ID NO: 1007487 - RNA, 19 nt, Artificial Sequence
  Description of Artificial Sequence: Synthetic oligonucleotide
cuugagcgggugacaaccu

SEQ ID NO: 1007488 - RNA, 19 nt, Artificial Sequence
  Description of Artificial Sequence: Synthetic oligonucleotide
cugucgggucuuucccuga

SEQ ID NO: 1007489 - RNA, 19 nt, Artificial Sequence
  Description of Artificial Sequence: Synthetic oligonucleotide
ggaagcccacucgaggcga

SEQ ID NO: 1007490 - RNA, 19 nt, Artificial Sequence
  Description of Artificial Sequence: Synthetic oligonucleotide
cacgucuaagcuggcaacu

SEQ ID NO: 1007491 - RNA, 19 nt, Artificial Sequence
  Description of Artificial Sequence: Synthetic oligonucleotide
cccacucgaggcgacuggg

SEQ ID NO: 1007492 - RNA, 19 nt, Artificial Sequence
  Description of Artificial Sequence: Synthetic oligonucleotide
gguugaaggaccacacuuu

SEQ ID NO: 1007493 - RNA, 19 nt, Artificial Sequence
  Description of Artificial Sequence: Synthetic oligonucleotide
cugucucgccucacuucca

SEQ ID NO: 1007494 - RNA, 19 nt, Artificial Sequence
  Description of Artificial Sequence: Synthetic oligonucleotide
cgaaccguccccacaccac

SEQ ID NO: 1007495 - RNA, 19 nt, Artificial Sequence
  Description of Artificial Sequence: Synthetic oligonucleotide
agcgaagagccggccccug

SEQ ID NO: 1007496 - RNA, 19 nt, Artificial Sequence
  Description of Artificial Sequence: Synthetic oligonucleotide
ccauguggaguuccaggca

SEQ ID NO: 1007497 - RNA, 19 nt, Artificial Sequence
  Description of Artificial Sequence: Synthetic oligonucleotide
gcacaccauggcuagcucu

SEQ ID NO: 1007498 - RNA, 19 nt, Artificial Sequence
  Description of Artificial Sequence: Synthetic oligonucleotide
ugcucggggcggccucccu

SEQ ID NO: 1007499 - RNA, 19 nt, Artificial Sequence
  Description of Artificial Sequence: Synthetic oligonucleotide
ccgcggaagagcaaguacu

SEQ ID NO: 1007500 - RNA, 19 nt, Artificial Sequence
  Description of Artificial Sequence: Synthetic oligonucleotide
ccugucucgcuugguggcc

SEQ ID NO: 1007501 - RNA, 19 nt, Artificial Sequence
  Description of Artificial Sequence: Synthetic oligonucleotide
acgcuuuggucugcaugau

SEQ ID NO: 1007502 - RNA, 19 nt, Artificial Sequence
  Description of Artificial Sequence: Synthetic oligonucleotide
ccaccagggacaauucugu

SEQ ID NO: 1007503 - RNA, 19 nt, Artificial Sequence
  Description of Artificial Sequence: Synthetic oligonucleotide
gcuagcucugaguccccaa

SEQ ID NO: 1007504 - RNA, 19 nt, Artificial Sequence
  Description of Artificial Sequence: Synthetic oligonucleotide
gccuugagcgggugacaac

SEQ ID NO: 1007505 - RNA, 19 nt, Artificial Sequence
  Description of Artificial Sequence: Synthetic oligonucleotide
cuccgaagugggccuucca

SEQ ID NO: 1007506 - RNA, 19 nt, Artificial Sequence
  Description of Artificial Sequence: Synthetic oligonucleotide
cccucucgggccaccacuc

SEQ ID NO: 1007507 - RNA, 19 nt, Artificial Sequence
  Description of Artificial Sequence: Synthetic oligonucleotide
cucgggccaccacucaagu

SEQ ID NO: 1007508 - RNA, 19 nt, Artificial Sequence
  Description of Artificial Sequence: Synthetic oligonucleotide
ccguccccacaccacugcc

SEQ ID NO: 1007509 - RNA, 19 nt, Artificial Sequence
  Description of Artificial Sequence: Synthetic oligonucleotide
gagccggccccugggaacu

SEQ ID NO: 1007510 - RNA, 19 nt, Artificial Sequence
  Description of Artificial Sequence: Synthetic oligonucleotide
ggccuugagcgggugacaa

SEQ ID NO: 1007511 - RNA, 19 nt, Artificial Sequence
  Description of Artificial Sequence: Synthetic oligonucleotide
augcccucucgggccacca

SEQ ID NO: 1007512 - RNA, 19 nt, Artificial Sequence
  Description of Artificial Sequence: Synthetic oligonucleotide
gcacuaugaagggcugcuc

SEQ ID NO: 1007513 - RNA, 19 nt, Artificial Sequence
  Description of Artificial Sequence: Synthetic oligonucleotide
cgugugcgugaaaccgcgg

SEQ ID NO: 1007514 - RNA, 19 nt, Artificial Sequence
  Description of Artificial Sequence: Synthetic oligonucleotide
cccacaguccauggcggug

SEQ ID NO: 1007515 - RNA, 19 nt, Artificial Sequence
  Description of Artificial Sequence: Synthetic oligonucleotide
gccgugaggcaugucccac

SEQ ID NO: 1007516 - RNA, 19 nt, Artificial Sequence
  Description of Artificial Sequence: Synthetic oligonucleotide
ccauccauggaggccguga

SEQ ID NO: 1007517 - RNA, 19 nt, Artificial Sequence
  Description of Artificial Sequence: Synthetic oligonucleotide
ggaggacgcuuuggucugc

SEQ ID NO: 1007518 - RNA, 19 nt, Artificial Sequence
  Description of Artificial Sequence: Synthetic oligonucleotide
gacacccgggccaguggcu

SEQ ID NO: 1007519 - RNA, 19 nt, Artificial Sequence
  Description of Artificial Sequence: Synthetic oligonucleotide
gcugcacaccauggcuagc

SEQ ID NO: 1007520 - RNA, 19 nt, Artificial Sequence
  Description of Artificial Sequence: Synthetic oligonucleotide
gcucgucugugcguuccac

SEQ ID NO: 1007521 - RNA, 19 nt, Artificial Sequence
  Description of Artificial Sequence: Synthetic oligonucleotide
ccuaccagagcaguccacu

SEQ ID NO: 1007522 - RNA, 19 nt, Artificial Sequence
  Description of Artificial Sequence: Synthetic oligonucleotide
cugcucggggcggccuccc

SEQ ID NO: 1007523 - RNA, 19 nt, Artificial Sequence
  Description of Artificial Sequence: Synthetic oligonucleotide
gucucgcuugguggcccac

SEQ ID NO: 1007524 - RNA, 19 nt, Artificial Sequence
  Description of Artificial Sequence: Synthetic oligonucleotide
cggaguagaccucuccgaa

SEQ ID NO: 1007525 - RNA, 19 nt, Artificial Sequence
  Description of Artificial Sequence: Synthetic oligonucleotide
gugaggcaugucccacagu

SEQ ID NO: 1007526 - RNA, 19 nt, Artificial Sequence
  Description of Artificial Sequence: Synthetic oligonucleotide
ggcuagcucugagucccca

SEQ ID NO: 1007527 - RNA, 19 nt, Artificial Sequence
  Description of Artificial Sequence: Synthetic oligonucleotide
gcccgguggccacccagac

SEQ ID NO: 1007528 - RNA, 19 nt, Artificial Sequence
  Description of Artificial Sequence: Synthetic oligonucleotide
ccacucgaggcgacuggga

SEQ ID NO: 1007529 - RNA, 19 nt, Artificial Sequence
  Description of Artificial Sequence: Synthetic oligonucleotide
ggcgcagagcuuucauuuu

SEQ ID NO: 1007530 - RNA, 19 nt, Artificial Sequence
  Description of Artificial Sequence: Synthetic oligonucleotide
ggcccacucuagagagagc

SEQ ID NO: 1007531 - RNA, 19 nt, Artificial Sequence
  Description of Artificial Sequence: Synthetic oligonucleotide
gguggccacccagacucaa

SEQ ID NO: 1007532 - RNA, 19 nt, Artificial Sequence
  Description of Artificial Sequence: Synthetic oligonucleotide
gcccucucgggccaccacu

SEQ ID NO: 1007533 - RNA, 19 nt, Artificial Sequence
  Description of Artificial Sequence: Synthetic oligonucleotide
cggcccacugucgagaaaa

SEQ ID NO: 1007534 - RNA, 19 nt, Artificial Sequence
  Description of Artificial Sequence: Synthetic oligonucleotide
ccaaugcuguacacggcau

SEQ ID NO: 1007535 - RNA, 19 nt, Artificial Sequence
  Description of Artificial Sequence: Synthetic oligonucleotide
ccagcucgucugugcguuc

SEQ ID NO: 1007536 - RNA, 19 nt, Artificial Sequence
  Description of Artificial Sequence: Synthetic oligonucleotide
cgucuaagcuggcaacucu

SEQ ID NO: 1007537 - RNA, 19 nt, Artificial Sequence
  Description of Artificial Sequence: Synthetic oligonucleotide
gggccuugagcgggugaca

SEQ ID NO: 1007538 - RNA, 19 nt, Artificial Sequence
  Description of Artificial Sequence: Synthetic oligonucleotide
gcccacugucgagaaaagu

SEQ ID NO: 1007539 - RNA, 19 nt, Artificial Sequence
  Description of Artificial Sequence: Synthetic oligonucleotide
gcucuguagcaugcccucu

SEQ ID NO: 1007540 - RNA, 19 nt, Artificial Sequence
  Description of Artificial Sequence: Synthetic oligonucleotide
ggagaguggucagcuugau

SEQ ID NO: 1007541 - RNA, 19 nt, Artificial Sequence
  Description of Artificial Sequence: Synthetic oligonucleotide
gccgcagcgugugcgugaa

SEQ ID NO: 1007542 - RNA, 19 nt, Artificial Sequence
  Description of Artificial Sequence: Synthetic oligonucleotide
gccggccccugggaacuug

SEQ ID NO: 1007543 - RNA, 19 nt, Artificial Sequence
  Description of Artificial Sequence: Synthetic oligonucleotide
gcaugucaucguugauguu

SEQ ID NO: 1007544 - RNA, 19 nt, Artificial Sequence
  Description of Artificial Sequence: Synthetic oligonucleotide
ggaggccgugaggcauguc

SEQ ID NO: 1007545 - RNA, 19 nt, Artificial Sequence
  Description of Artificial Sequence: Synthetic oligonucleotide
agccggccccugggaacuu

SEQ ID NO: 1007546 - RNA, 19 nt, Artificial Sequence
  Description of Artificial Sequence: Synthetic oligonucleotide
gguugcccucugagucgaa

SEQ ID NO: 1007547 - RNA, 19 nt, Artificial Sequence
  Description of Artificial Sequence: Synthetic oligonucleotide
caucgccgcccagcuugua

SEQ ID NO: 1007548 - RNA, 19 nt, Artificial Sequence
  Description of Artificial Sequence: Synthetic oligonucleotide
cgacugggagagggaggca

SEQ ID NO: 1007549 - RNA, 19 nt, Artificial Sequence
  Description of Artificial Sequence: Synthetic oligonucleotide
cggggcggccucccucaga

SEQ ID NO: 1007550 - RNA, 19 nt, Artificial Sequence
  Description of Artificial Sequence: Synthetic oligonucleotide
ccgcagcgugugcgugaaa

SEQ ID NO: 1007551 - RNA, 19 nt, Artificial Sequence
  Description of Artificial Sequence: Synthetic oligonucleotide
uguagaaugaucugcaugg

SEQ ID NO: 1007552 - RNA, 19 nt, Artificial Sequence
  Description of Artificial Sequence: Synthetic oligonucleotide
uuuuaaggggagaugaagg

SEQ ID NO: 1007553 - RNA, 19 nt, Artificial Sequence
  Description of Artificial Sequence: Synthetic oligonucleotide
uguguugugcuuuuaaggg

SEQ ID NO: 1007554 - RNA, 19 nt, Artificial Sequence
  Description of Artificial Sequence: Synthetic oligonucleotide
acugagaugguccacauag

SEQ ID NO: 1007555 - RNA, 19 nt, Artificial Sequence
  Description of Artificial Sequence: Synthetic oligonucleotide
aauacucuuucuuggcccc

SEQ ID NO: 1007556 - RNA, 19 nt, Artificial Sequence
  Description of Artificial Sequence: Synthetic oligonucleotide
uuaagaauagugguagugg

SEQ ID NO: 1007557 - RNA, 19 nt, Artificial Sequence
  Description of Artificial Sequence: Synthetic oligonucleotide
aagcccuagagauucauag

SEQ ID NO: 1007558 - RNA, 19 nt, Artificial Sequence
  Description of Artificial Sequence: Synthetic oligonucleotide
acaccagagagcuggaucc

SEQ ID NO: 1007559 - RNA, 19 nt, Artificial Sequence
  Description of Artificial Sequence: Synthetic oligonucleotide
aaugcaaggucggugacac

SEQ ID NO: 1007560 - RNA, 19 nt, Artificial Sequence
  Description of Artificial Sequence: Synthetic oligonucleotide
aggugaucuguucugaagc

SEQ ID NO: 1007561 - RNA, 19 nt, Artificial Sequence
  Description of Artificial Sequence: Synthetic oligonucleotide
acaggacucauagagaacc

SEQ ID NO: 1007562 - RNA, 19 nt, Artificial Sequence
  Description of Artificial Sequence: Synthetic oligonucleotide
guugcugugucauauaccc

SEQ ID NO: 1007563 - RNA, 19 nt, Artificial Sequence
  Description of Artificial Sequence: Synthetic oligonucleotide
agaaaguuugcugugugcc

SEQ ID NO: 1007564 - RNA, 19 nt, Artificial Sequence
  Description of Artificial Sequence: Synthetic oligonucleotide
auuggaggaaugcagcucg

SEQ ID NO: 1007565 - RNA, 19 nt, Artificial Sequence
  Description of Artificial Sequence: Synthetic oligonucleotide
agaaacaugguagccaacc

SEQ ID NO: 1007566 - RNA, 19 nt, Artificial Sequence
  Description of Artificial Sequence: Synthetic oligonucleotide
acaauacucuuucuuggcc

SEQ ID NO: 1007567 - RNA, 19 nt, Artificial Sequence
  Description of Artificial Sequence: Synthetic oligonucleotide
gguagcaucacaaacaucc

SEQ ID NO: 1007568 - RNA, 19 nt, Artificial Sequence
  Description of Artificial Sequence: Synthetic oligonucleotide
auauacccaaaacauuugg

SEQ ID NO: 1007569 - RNA, 19 nt, Artificial Sequence
  Description of Artificial Sequence: Synthetic oligonucleotide
ugugcucuggaccugacug

SEQ ID NO: 1007570 - RNA, 19 nt, Artificial Sequence
  Description of Artificial Sequence: Synthetic oligonucleotide
acccaaaacauuuggacag

SEQ ID NO: 1007571 - RNA, 19 nt, Artificial Sequence
  Description of Artificial Sequence: Synthetic oligonucleotide
aacccagucauggcgaugc

SEQ ID NO: 1007572 - RNA, 19 nt, Artificial Sequence
  Description of Artificial Sequence: Synthetic oligonucleotide
uuccugugcacccugauca

SEQ ID NO: 1007573 - RNA, 19 nt, Artificial Sequence
  Description of Artificial Sequence: Synthetic oligonucleotide
aauagugguaguggugggc

SEQ ID NO: 1007574 - RNA, 19 nt, Artificial Sequence
  Description of Artificial Sequence: Synthetic oligonucleotide
agcaaaaccauucuuuagu

SEQ ID NO: 1007575 - RNA, 19 nt, Artificial Sequence
  Description of Artificial Sequence: Synthetic oligonucleotide
gaagguuuggcaccauugg

SEQ ID NO: 1007576 - RNA, 19 nt, Artificial Sequence
  Description of Artificial Sequence: Synthetic oligonucleotide
aagcgcugcaugcagcccc

SEQ ID NO: 1007577 - RNA, 19 nt, Artificial Sequence
  Description of Artificial Sequence: Synthetic oligonucleotide
uguugugcuuuuaagggga

SEQ ID NO: 1007578 - RNA, 19 nt, Artificial Sequence
  Description of Artificial Sequence: Synthetic oligonucleotide
caagcuaguccuauguggg

SEQ ID NO: 1007579 - RNA, 19 nt, Artificial Sequence
  Description of Artificial Sequence: Synthetic oligonucleotide
aaacaugguagccaaccca

SEQ ID NO: 1007580 - RNA, 19 nt, Artificial Sequence
  Description of Artificial Sequence: Synthetic oligonucleotide
ugugucauauacccaaaac

SEQ ID NO: 1007581 - RNA, 19 nt, Artificial Sequence
  Description of Artificial Sequence: Synthetic oligonucleotide
uuuaaggggagaugaaggu

SEQ ID NO: 1007582 - RNA, 19 nt, Artificial Sequence
  Description of Artificial Sequence: Synthetic oligonucleotide
uaagaauagugguaguggu

SEQ ID NO: 1007583 - RNA, 19 nt, Artificial Sequence
  Description of Artificial Sequence: Synthetic oligonucleotide
uuaguucucgggaagcuac

SEQ ID NO: 1007584 - RNA, 19 nt, Artificial Sequence
  Description of Artificial Sequence: Synthetic oligonucleotide
uugaaugcaaggucgguga

SEQ ID NO: 1007585 - RNA, 19 nt, Artificial Sequence
  Description of Artificial Sequence: Synthetic oligonucleotide
gcuggauccauucugaaag

SEQ ID NO: 1007586 - RNA, 19 nt, Artificial Sequence
  Description of Artificial Sequence: Synthetic oligonucleotide
caauacucuuucuuggccc

SEQ ID NO: 1007587 - RNA, 19 nt, Artificial Sequence
  Description of Artificial Sequence: Synthetic oligonucleotide
uguuguagcugucggcagg

SEQ ID NO: 1007588 - RNA, 19 nt, Artificial Sequence
  Description of Artificial Sequence: Synthetic oligonucleotide
auagugguaguggugggcc

SEQ ID NO: 1007589 - RNA, 19 nt, Artificial Sequence
  Description of Artificial Sequence: Synthetic oligonucleotide
aacaugguagccaacccag

SEQ ID NO: 1007590 - RNA, 19 nt, Artificial Sequence
  Description of Artificial Sequence: Synthetic oligonucleotide
agcuacuuugaaugcaagg

SEQ ID NO: 1007591 - RNA, 19 nt, Artificial Sequence
  Description of Artificial Sequence: Synthetic oligonucleotide
gucaguaucuaccccaacc

SEQ ID NO: 1007592 - RNA, 19 nt, Artificial Sequence
  Description of Artificial Sequence: Synthetic oligonucleotide
ugcuuuuaaggggagauga

SEQ ID NO: 1007593 - RNA, 19 nt, Artificial Sequence
  Description of Artificial Sequence: Synthetic oligonucleotide
gagauguacagcacgcugg

SEQ ID NO: 1007594 - RNA, 19 nt, Artificial Sequence
  Description of Artificial Sequence: Synthetic oligonucleotide
gaaagagccuagcugggcc

SEQ ID NO: 1007595 - RNA, 19 nt, Artificial Sequence
  Description of Artificial Sequence: Synthetic oligonucleotide
gagaugaagguuuggcacc

SEQ ID NO: 1007596 - RNA, 19 nt, Artificial Sequence
  Description of Artificial Sequence: Synthetic oligonucleotide
auucauagguucuuccucu

SEQ ID NO: 1007597 - RNA, 19 nt, Artificial Sequence
  Description of Artificial Sequence: Synthetic oligonucleotide
uuugaaugcaaggucggug

SEQ ID NO: 1007598 - RNA, 19 nt, Artificial Sequence
  Description of Artificial Sequence: Synthetic oligonucleotide
guagguugugcucuggacc

SEQ ID NO: 1007599 - RNA, 19 nt, Artificial Sequence
  Description of Artificial Sequence: Synthetic oligonucleotide
accugaaccaguccuccgc

SEQ ID NO: 1007600 - RNA, 19 nt, Artificial Sequence
  Description of Artificial Sequence: Synthetic oligonucleotide
guagccaacccagucaugg

SEQ ID NO: 1007601 - RNA, 19 nt, Artificial Sequence
  Description of Artificial Sequence: Synthetic oligonucleotide
agauguacagcacgcuggg

SEQ ID NO: 1007602 - RNA, 19 nt, Artificial Sequence
  Description of Artificial Sequence: Synthetic oligonucleotide
ggaagcacaggacucauag

SEQ ID NO: 1007603 - RNA, 19 nt, Artificial Sequence
  Description of Artificial Sequence: Synthetic oligonucleotide
auaggggaccccuuggcuc

SEQ ID NO: 1007604 - RNA, 19 nt, Artificial Sequence
  Description of Artificial Sequence: Synthetic oligonucleotide
ugugccaggaguccuguca

SEQ ID NO: 1007605 - RNA, 19 nt, Artificial Sequence
  Description of Artificial Sequence: Synthetic oligonucleotide
gaagccaagcgcugcaugc

SEQ ID NO: 1007606 - RNA, 19 nt, Artificial Sequence
  Description of Artificial Sequence: Synthetic oligonucleotide
cuugcuggugacaagucac

SEQ ID NO: 1007607 - RNA, 19 nt, Artificial Sequence
  Description of Artificial Sequence: Synthetic oligonucleotide
cauacugggagcagugacc

SEQ ID NO: 1007608 - RNA, 19 nt, Artificial Sequence
  Description of Artificial Sequence: Synthetic oligonucleotide
aaaggccaauuaccacugc

SEQ ID NO: 1007609 - RNA, 19 nt, Artificial Sequence
  Description of Artificial Sequence: Synthetic oligonucleotide
gagauucauagguucuucc

SEQ ID NO: 1007610 - RNA, 19 nt, Artificial Sequence
  Description of Artificial Sequence: Synthetic oligonucleotide
cacacacacacacacacac

SEQ ID NO: 1007611 - RNA, 19 nt, Artificial Sequence
  Description of Artificial Sequence: Synthetic oligonucleotide
cuuguugcccagaagagca

SEQ ID NO: 1007612 - RNA, 19 nt, Artificial Sequence
  Description of Artificial Sequence: Synthetic oligonucleotide
ucauacugggagcagugac

SEQ ID NO: 1007613 - RNA, 19 nt, Artificial Sequence
  Description of Artificial Sequence: Synthetic oligonucleotide
ucuaaaggccaauuaccac

SEQ ID NO: 1007614 - RNA, 19 nt, Artificial Sequence
  Description of Artificial Sequence: Synthetic oligonucleotide
aaccauucuuuaguucucg

SEQ ID NO: 1007615 - RNA, 19 nt, Artificial Sequence
  Description of Artificial Sequence: Synthetic oligonucleotide
aaggccaauuaccacugca

SEQ ID NO: 1007616 - RNA, 19 nt, Artificial Sequence
  Description of Artificial Sequence: Synthetic oligonucleotide
guguugugcuuuuaagggg

SEQ ID NO: 1007617 - RNA, 19 nt, Artificial Sequence
  Description of Artificial Sequence: Synthetic oligonucleotide
auuauccaguuugaggcgg

SEQ ID NO: 1007618 - RNA, 19 nt, Artificial Sequence
  Description of Artificial Sequence: Synthetic oligonucleotide
uguccucaggaauagggga

SEQ ID NO: 1007619 - RNA, 19 nt, Artificial Sequence
  Description of Artificial Sequence: Synthetic oligonucleotide
agccuugaagacuucuggg

SEQ ID NO: 1007620 - RNA, 19 nt, Artificial Sequence
  Description of Artificial Sequence: Synthetic oligonucleotide
cauuauccaguuugaggcg

SEQ ID NO: 1007621 - RNA, 19 nt, Artificial Sequence
  Description of Artificial Sequence: Synthetic oligonucleotide
ugaggccaaguuaagaaua

SEQ ID NO: 1007622 - RNA, 19 nt, Artificial Sequence
  Description of Artificial Sequence: Synthetic oligonucleotide
cuuggaagggccacccugg

SEQ ID NO: 1007623 - RNA, 19 nt, Artificial Sequence
  Description of Artificial Sequence: Synthetic oligonucleotide
acacacacacacaauacuc

SEQ ID NO: 1007624 - RNA, 19 nt, Artificial Sequence
  Description of Artificial Sequence: Synthetic oligonucleotide
caaacauccgcugugccag

SEQ ID NO: 1007625 - RNA, 19 nt, Artificial Sequence
  Description of Artificial Sequence: Synthetic oligonucleotide
aaccuuggaagggccaccc

SEQ ID NO: 1007626 - RNA, 19 nt, Artificial Sequence
  Description of Artificial Sequence: Synthetic oligonucleotide
agugcuaccagaagacaac

SEQ ID NO: 1007627 - RNA, 19 nt, Artificial Sequence
  Description of Artificial Sequence: Synthetic oligonucleotide
aaugcagcucguuccagau

SEQ ID NO: 1007628 - RNA, 19 nt, Artificial Sequence
  Description of Artificial Sequence: Synthetic oligonucleotide
cauauacccaaaacauuug

SEQ ID NO: 1007629 - RNA, 19 nt, Artificial Sequence
  Description of Artificial Sequence: Synthetic oligonucleotide
agcuaguccuauguggggc

SEQ ID NO: 1007630 - RNA, 19 nt, Artificial Sequence
  Description of Artificial Sequence: Synthetic oligonucleotide
agccaacccagucauggcg

SEQ ID NO: 1007631 - RNA, 19 nt, Artificial Sequence
  Description of Artificial Sequence: Synthetic oligonucleotide
uagguugugcucuggaccu

SEQ ID NO: 1007632 - RNA, 19 nt, Artificial Sequence
  Description of Artificial Sequence: Synthetic oligonucleotide
cuacuuugaaugcaagguc

SEQ ID NO: 1007633 - RNA, 19 nt, Artificial Sequence
  Description of Artificial Sequence: Synthetic oligonucleotide
cuguagaaugaucugcaug

SEQ ID NO: 1007634 - RNA, 19 nt, Artificial Sequence
  Description of Artificial Sequence: Synthetic oligonucleotide
cuguccucaggaauagggg

SEQ ID NO: 1007635 - RNA, 19 nt, Artificial Sequence
  Description of Artificial Sequence: Synthetic oligonucleotide
ucuuuaguucucgggaagc

SEQ ID NO: 1007636 - RNA, 19 nt, Artificial Sequence
  Description of Artificial Sequence: Synthetic oligonucleotide
uggugggcccaccugaacc

SEQ ID NO: 1007637 - RNA, 19 nt, Artificial Sequence
  Description of Artificial Sequence: Synthetic oligonucleotide
guagaaaguuugcugugug

SEQ ID NO: 1007638 - RNA, 19 nt, Artificial Sequence
  Description of Artificial Sequence: Synthetic oligonucleotide
auuaccacugcaccuccug

SEQ ID NO: 1007639 - RNA, 19 nt, Artificial Sequence
  Description of Artificial Sequence: Synthetic oligonucleotide
gaauaggggaccccuuggc

SEQ ID NO: 1007640 - RNA, 19 nt, Artificial Sequence
  Description of Artificial Sequence: Synthetic oligonucleotide
aaagccuugaagacuucug

SEQ ID NO: 1007641 - RNA, 19 nt, Artificial Sequence
  Description of Artificial Sequence: Synthetic oligonucleotide
agcccuagagauucauagg

SEQ ID NO: 1007642 - RNA, 19 nt, Artificial Sequence
  Description of Artificial Sequence: Synthetic oligonucleotide
cucuaaaggccaauuacca

SEQ ID NO: 1007643 - RNA, 19 nt, Artificial Sequence
  Description of Artificial Sequence: Synthetic oligonucleotide
agaggaacucuccuguccu

SEQ ID NO: 1007644 - RNA, 19 nt, Artificial Sequence
  Description of Artificial Sequence: Synthetic oligonucleotide
acacacacacacacaauac

SEQ ID NO: 1007645 - RNA, 19 nt, Artificial Sequence
  Description of Artificial Sequence: Synthetic oligonucleotide
uugucaaguuccuugggua

SEQ ID NO: 1007646 - RNA, 19 nt, Artificial Sequence
  Description of Artificial Sequence: Synthetic oligonucleotide
gacagugaccagaugggag

SEQ ID NO: 1007647 - RNA, 19 nt, Artificial Sequence
  Description of Artificial Sequence: Synthetic oligonucleotide
aagcaggugagaggaacuc

SEQ ID NO: 1007648 - RNA, 19 nt, Artificial Sequence
  Description of Artificial Sequence: Synthetic oligonucleotide
aaaguuugcugugugccau

SEQ ID NO: 1007649 - RNA, 19 nt, Artificial Sequence
  Description of Artificial Sequence: Synthetic oligonucleotide
cuaaaggccaauuaccacu

SEQ ID NO: 1007650 - RNA, 19 nt, Artificial Sequence
  Description of Artificial Sequence: Synthetic oligonucleotide
agaaccuuggaagggccac

SEQ ID NO: 1007651 - RNA, 19 nt, Artificial Sequence
  Description of Artificial Sequence: Synthetic oligonucleotide
agcaaaagcccauggcugu

SEQ ID NO: 1007652 - RNA, 19 nt, Artificial Sequence
  Description of Artificial Sequence: Synthetic oligonucleotide
agcccauggcuguagaaug

SEQ ID NO: 1007653 - RNA, 19 nt, Artificial Sequence
  Description of Artificial Sequence: Synthetic oligonucleotide
cagggcacugagauggucc

SEQ ID NO: 1007654 - RNA, 19 nt, Artificial Sequence
  Description of Artificial Sequence: Synthetic oligonucleotide
gaaaguuugcugugugcca

SEQ ID NO: 1007655 - RNA, 19 nt, Artificial Sequence
  Description of Artificial Sequence: Synthetic oligonucleotide
agcaucacaaacauccgcu

SEQ ID NO: 1007656 - RNA, 19 nt, Artificial Sequence
  Description of Artificial Sequence: Synthetic oligonucleotide
acuuugaaugcaaggucgg

SEQ ID NO: 1007657 - RNA, 19 nt, Artificial Sequence
  Description of Artificial Sequence: Synthetic oligonucleotide
ccucuaaaggccaauuacc

SEQ ID NO: 1007658 - RNA, 19 nt, Artificial Sequence
  Description of Artificial Sequence: Synthetic oligonucleotide
ugggccuuagugcccagcc

SEQ ID NO: 1007659 - RNA, 19 nt, Artificial Sequence
  Description of Artificial Sequence: Synthetic oligonucleotide
cugucggcaggcaauggcc

SEQ ID NO: 1007660 - RNA, 19 nt, Artificial Sequence
  Description of Artificial Sequence: Synthetic oligonucleotide
aggaauaggggaccccuug

SEQ ID NO: 1007661 - RNA, 19 nt, Artificial Sequence
  Description of Artificial Sequence: Synthetic oligonucleotide
caccacagcaaaaccauuc

SEQ ID NO: 1007662 - RNA, 19 nt, Artificial Sequence
  Description of Artificial Sequence: Synthetic oligonucleotide
uggcugugaggucauggcc

SEQ ID NO: 1007663 - RNA, 19 nt, Artificial Sequence
  Description of Artificial Sequence: Synthetic oligonucleotide
caaguuaagaauaguggua

SEQ ID NO: 1007664 - RNA, 19 nt, Artificial Sequence
  Description of Artificial Sequence: Synthetic oligonucleotide
uuauccaguuugaggcggc

SEQ ID NO: 1007665 - RNA, 19 nt, Artificial Sequence
  Description of Artificial Sequence: Synthetic oligonucleotide
aggccaauuaccacugcac

SEQ ID NO: 1007666 - RNA, 19 nt, Artificial Sequence
  Description of Artificial Sequence: Synthetic oligonucleotide
uaguggugggcccaccuga

SEQ ID NO: 1007667 - RNA, 19 nt, Artificial Sequence
  Description of Artificial Sequence: Synthetic oligonucleotide
uggauccauucugaaagag

SEQ ID NO: 1007668 - RNA, 19 nt, Artificial Sequence
  Description of Artificial Sequence: Synthetic oligonucleotide
agugaugccagugcaguca

SEQ ID NO: 1007669 - RNA, 19 nt, Artificial Sequence
  Description of Artificial Sequence: Synthetic oligonucleotide
ugcuaccagaagacaacug

SEQ ID NO: 1007670 - RNA, 19 nt, Artificial Sequence
  Description of Artificial Sequence: Synthetic oligonucleotide
aucgcagauggcugugagg

SEQ ID NO: 1007671 - RNA, 19 nt, Artificial Sequence
  Description of Artificial Sequence: Synthetic oligonucleotide
uccauucugaaagagccua

SEQ ID NO: 1007672 - RNA, 19 nt, Artificial Sequence
  Description of Artificial Sequence: Synthetic oligonucleotide
ccuguccucaggaauaggg

SEQ ID NO: 1007673 - RNA, 19 nt, Artificial Sequence
  Description of Artificial Sequence: Synthetic oligonucleotide
acgucuggagagcagguga

SEQ ID NO: 1007674 - RNA, 19 nt, Artificial Sequence
  Description of Artificial Sequence: Synthetic oligonucleotide
uaccacugcaccuccugcc

SEQ ID NO: 1007675 - RNA, 19 nt, Artificial Sequence
  Description of Artificial Sequence: Synthetic oligonucleotide
cauggcuguagaaugaucu

SEQ ID NO: 1007676 - RNA, 19 nt, Artificial Sequence
  Description of Artificial Sequence: Synthetic oligonucleotide
caguaucuaccccaacccc

SEQ ID NO: 1007677 - RNA, 19 nt, Artificial Sequence
  Description of Artificial Sequence: Synthetic oligonucleotide
aaacauccgcugugccagg

SEQ ID NO: 1007678 - RNA, 19 nt, Artificial Sequence
  Description of Artificial Sequence: Synthetic oligonucleotide
agcagucagaacugaggug

SEQ ID NO: 1007679 - RNA, 19 nt, Artificial Sequence
  Description of Artificial Sequence: Synthetic oligonucleotide
guagcaucacaaacauccg

SEQ ID NO: 1007680 - RNA, 19 nt, Artificial Sequence
  Description of Artificial Sequence: Synthetic oligonucleotide
accccuuggcuccuucuac

SEQ ID NO: 1007681 - RNA, 19 nt, Artificial Sequence
  Description of Artificial Sequence: Synthetic oligonucleotide
agagccacgucuggagagc

SEQ ID NO: 1007682 - RNA, 19 nt, Artificial Sequence
  Description of Artificial Sequence: Synthetic oligonucleotide
ugaaagagccuagcugggc

SEQ ID NO: 1007683 - RNA, 19 nt, Artificial Sequence
  Description of Artificial Sequence: Synthetic oligonucleotide
gcuaccagaagacaacuga

SEQ ID NO: 1007684 - RNA, 19 nt, Artificial Sequence
  Description of Artificial Sequence: Synthetic oligonucleotide
ucucgggaagcuacuuuga

SEQ ID NO: 1007685 - RNA, 19 nt, Artificial Sequence
  Description of Artificial Sequence: Synthetic oligonucleotide
ugucggcaggcaauggcca

SEQ ID NO: 1007686 - RNA, 19 nt, Artificial Sequence
  Description of Artificial Sequence: Synthetic oligonucleotide
gagagcggauggcauuggg

SEQ ID NO: 1007687 - RNA, 19 nt, Artificial Sequence
  Description of Artificial Sequence: Synthetic oligonucleotide
ggugaucuguucugaagcc

SEQ ID NO: 1007688 - RNA, 19 nt, Artificial Sequence
  Description of Artificial Sequence: Synthetic oligonucleotide
cagucauggcgaugcaagg

SEQ ID NO: 1007689 - RNA, 19 nt, Artificial Sequence
  Description of Artificial Sequence: Synthetic oligonucleotide
cacacacacacacacacaa

SEQ ID NO: 1007690 - RNA, 19 nt, Artificial Sequence
  Description of Artificial Sequence: Synthetic oligonucleotide
uagaccucaaaagccuuga

SEQ ID NO: 1007691 - RNA, 19 nt, Artificial Sequence
  Description of Artificial Sequence: Synthetic oligonucleotide
ggaauaggggaccccuugg

SEQ ID NO: 1007692 - RNA, 19 nt, Artificial Sequence
  Description of Artificial Sequence: Synthetic oligonucleotide
ucauagguucuuccucuuc

SEQ ID NO: 1007693 - RNA, 19 nt, Artificial Sequence
  Description of Artificial Sequence: Synthetic oligonucleotide
aggaaugcagcucguucca

SEQ ID NO: 1007694 - RNA, 19 nt, Artificial Sequence
  Description of Artificial Sequence: Synthetic oligonucleotide
ucgggaagcuacuuugaau

SEQ ID NO: 1007695 - RNA, 19 nt, Artificial Sequence
  Description of Artificial Sequence: Synthetic oligonucleotide
aucaguugcugugucauau

SEQ ID NO: 1007696 - RNA, 19 nt, Artificial Sequence
  Description of Artificial Sequence: Synthetic oligonucleotide
ucuacucuccccucccuau

SEQ ID NO: 1007697 - RNA, 19 nt, Artificial Sequence
  Description of Artificial Sequence: Synthetic oligonucleotide
uggugucaguaucuacccc

SEQ ID NO: 1007698 - RNA, 19 nt, Artificial Sequence
  Description of Artificial Sequence: Synthetic oligonucleotide
cucuuucuuggccccaggc

SEQ ID NO: 1007699 - RNA, 19 nt, Artificial Sequence
  Description of Artificial Sequence: Synthetic oligonucleotide
ggugagaggaacucuccug

SEQ ID NO: 1007700 - RNA, 19 nt, Artificial Sequence
  Description of Artificial Sequence: Synthetic oligonucleotide
uuaaggggagaugaagguu

SEQ ID NO: 1007701 - RNA, 19 nt, Artificial Sequence
  Description of Artificial Sequence: Synthetic oligonucleotide
uguugcccagaagagcagc

SEQ ID NO: 1007702 - RNA, 19 nt, Artificial Sequence
  Description of Artificial Sequence: Synthetic oligonucleotide
ggccaaguuaagaauagug

SEQ ID NO: 1007703 - RNA, 19 nt, Artificial Sequence
  Description of Artificial Sequence: Synthetic oligonucleotide
cagagagcuggauccauuc

SEQ ID NO: 1007704 - RNA, 19 nt, Artificial Sequence
  Description of Artificial Sequence: Synthetic oligonucleotide
aaugaggaucuugcuggcu

SEQ ID NO: 1007705 - RNA, 19 nt, Artificial Sequence
  Description of Artificial Sequence: Synthetic oligonucleotide
agguuuggcaccauugggu

SEQ ID NO: 1007706 - RNA, 19 nt, Artificial Sequence
  Description of Artificial Sequence: Synthetic oligonucleotide
uccucaggaauaggggacc

SEQ ID NO: 1007707 - RNA, 19 nt, Artificial Sequence
  Description of Artificial Sequence: Synthetic oligonucleotide
cacacacacacacacaaua

SEQ ID NO: 1007708 - RNA, 19 nt, Artificial Sequence
  Description of Artificial Sequence: Synthetic oligonucleotide
agucagaacugaggugugg

SEQ ID NO: 1007709 - RNA, 19 nt, Artificial Sequence
  Description of Artificial Sequence: Synthetic oligonucleotide
agagagcuggauccauucu

SEQ ID NO: 1007710 - RNA, 19 nt, Artificial Sequence
  Description of Artificial Sequence: Synthetic oligonucleotide
gguccugguagaaaguuug

SEQ ID NO: 1007711 - RNA, 19 nt, Artificial Sequence
  Description of Artificial Sequence: Synthetic oligonucleotide
gugaagagagccacgucug

SEQ ID NO: 1007712 - RNA, 19 nt, Artificial Sequence
  Description of Artificial Sequence: Synthetic oligonucleotide
ggccaauuaccacugcacc

SEQ ID NO: 1007713 - RNA, 19 nt, Artificial Sequence
  Description of Artificial Sequence: Synthetic oligonucleotide
aggugagaggaacucuccu

SEQ ID NO: 1007714 - RNA, 19 nt, Artificial Sequence
  Description of Artificial Sequence: Synthetic oligonucleotide
gagcggauggcauuggggu

SEQ ID NO: 1007715 - RNA, 19 nt, Artificial Sequence
  Description of Artificial Sequence: Synthetic oligonucleotide
uccgcugugcaguccugag

SEQ ID NO: 1007716 - RNA, 19 nt, Artificial Sequence
  Description of Artificial Sequence: Synthetic oligonucleotide
aguauuuccugugcacccu

SEQ ID NO: 1007717 - RNA, 19 nt, Artificial Sequence
  Description of Artificial Sequence: Synthetic oligonucleotide
guuguagcugucggcaggc

SEQ ID NO: 1007718 - RNA, 19 nt, Artificial Sequence
  Description of Artificial Sequence: Synthetic oligonucleotide
caucccugggauuguguug

SEQ ID NO: 1007719 - RNA, 19 nt, Artificial Sequence
  Description of Artificial Sequence: Synthetic oligonucleotide
gaagcacaggacucauaga

SEQ ID NO: 1007720 - RNA, 19 nt, Artificial Sequence
  Description of Artificial Sequence: Synthetic oligonucleotide
gaacagggcugaccacagg

SEQ ID NO: 1007721 - RNA, 19 nt, Artificial Sequence
  Description of Artificial Sequence: Synthetic oligonucleotide
uggcucucagagcccagug

SEQ ID NO: 1007722 - RNA, 19 nt, Artificial Sequence
  Description of Artificial Sequence: Synthetic oligonucleotide
cuguuguagcugucggcag

SEQ ID NO: 1007723 - RNA, 19 nt, Artificial Sequence
  Description of Artificial Sequence: Synthetic oligonucleotide
uccccuagcccuucagaac

SEQ ID NO: 1007724 - RNA, 19 nt, Artificial Sequence
  Description of Artificial Sequence: Synthetic oligonucleotide
ccuucuacuccccuagccc

SEQ ID NO: 1007725 - RNA, 19 nt, Artificial Sequence
  Description of Artificial Sequence: Synthetic oligonucleotide
agaugaagguuuggcacca

SEQ ID NO: 1007726 - RNA, 19 nt, Artificial Sequence
  Description of Artificial Sequence: Synthetic oligonucleotide
caucgcagauggcugugag

SEQ ID NO: 1007727 - RNA, 19 nt, Artificial Sequence
  Description of Artificial Sequence: Synthetic oligonucleotide
augggaggcuugcugguga

SEQ ID NO: 1007728 - RNA, 19 nt, Artificial Sequence
  Description of Artificial Sequence: Synthetic oligonucleotide
cccucagucaagcuagucc

SEQ ID NO: 1007729 - RNA, 19 nt, Artificial Sequence
  Description of Artificial Sequence: Synthetic oligonucleotide
cccucuaaaggccaauuac

SEQ ID NO: 1007730 - RNA, 19 nt, Artificial Sequence
  Description of Artificial Sequence: Synthetic oligonucleotide
cuuucuuggccccaggccu

SEQ ID NO: 1007731 - RNA, 19 nt, Artificial Sequence
  Description of Artificial Sequence: Synthetic oligonucleotide
agcccagcgggcugcauug

SEQ ID NO: 1007732 - RNA, 19 nt, Artificial Sequence
  Description of Artificial Sequence: Synthetic oligonucleotide
aggacucauagagaaccug

SEQ ID NO: 1007733 - RNA, 19 nt, Artificial Sequence
  Description of Artificial Sequence: Synthetic oligonucleotide
uaucuaccccaaccccacc

SEQ ID NO: 1007734 - RNA, 19 nt, Artificial Sequence
  Description of Artificial Sequence: Synthetic oligonucleotide
accuuguugcccagaagag

SEQ ID NO: 1007735 - RNA, 19 nt, Artificial Sequence
  Description of Artificial Sequence: Synthetic oligonucleotide
uagccaacccagucauggc

SEQ ID NO: 1007736 - RNA, 19 nt, Artificial Sequence
  Description of Artificial Sequence: Synthetic oligonucleotide
cuagcccuucagaaccuug

SEQ ID NO: 1007737 - RNA, 19 nt, Artificial Sequence
  Description of Artificial Sequence: Synthetic oligonucleotide
caaggucggugacacugcc

SEQ ID NO: 1007738 - RNA, 19 nt, Artificial Sequence
  Description of Artificial Sequence: Synthetic oligonucleotide
gaagagagccacgucugga

SEQ ID NO: 1007739 - RNA, 19 nt, Artificial Sequence
  Description of Artificial Sequence: Synthetic oligonucleotide
ugucaguaucuaccccaac

SEQ ID NO: 1007740 - RNA, 19 nt, Artificial Sequence
  Description of Artificial Sequence: Synthetic oligonucleotide
guaucuaccccaaccccac

SEQ ID NO: 1007741 - RNA, 19 nt, Artificial Sequence
  Description of Artificial Sequence: Synthetic oligonucleotide
cacaggacucauagagaac

SEQ ID NO: 1007742 - RNA, 19 nt, Artificial Sequence
  Description of Artificial Sequence: Synthetic oligonucleotide
aagccaagcgcugcaugca

SEQ ID NO: 1007743 - RNA, 19 nt, Artificial Sequence
  Description of Artificial Sequence: Synthetic oligonucleotide
ggaggaaugcagcucguuc

SEQ ID NO: 1007744 - RNA, 19 nt, Artificial Sequence
  Description of Artificial Sequence: Synthetic oligonucleotide
uuucuuggccccaggccua

SEQ ID NO: 1007745 - RNA, 19 nt, Artificial Sequence
  Description of Artificial Sequence: Synthetic oligonucleotide
cagugcuaccagaagacaa

SEQ ID NO: 1007746 - RNA, 19 nt, Artificial Sequence
  Description of Artificial Sequence: Synthetic oligonucleotide
caaaagcccauggcuguag

SEQ ID NO: 1007747 - RNA, 19 nt, Artificial Sequence
  Description of Artificial Sequence: Synthetic oligonucleotide
gugagaggaacucuccugu

SEQ ID NO: 1007748 - RNA, 19 nt, Artificial Sequence
  Description of Artificial Sequence: Synthetic oligonucleotide
ugcacccugaucacagcuu

SEQ ID NO: 1007749 - RNA, 19 nt, Artificial Sequence
  Description of Artificial Sequence: Synthetic oligonucleotide
cugcccagaggaucucugc

SEQ ID NO: 1007750 - RNA, 19 nt, Artificial Sequence
  Description of Artificial Sequence: Synthetic oligonucleotide
gugcaguccugagggaugg

SEQ ID NO: 1007751 - RNA, 19 nt, Artificial Sequence
  Description of Artificial Sequence: Synthetic oligonucleotide
acauccgcugugccaggag

SEQ ID NO: 1007752 - RNA, 19 nt, Artificial Sequence
  Description of Artificial Sequence: Synthetic oligonucleotide
uggcauugggguuggguuu

SEQ ID NO: 1007753 - RNA, 19 nt, Artificial Sequence
  Description of Artificial Sequence: Synthetic oligonucleotide
ggccuagaccucaaaagcc

SEQ ID NO: 1007754 - RNA, 19 nt, Artificial Sequence
  Description of Artificial Sequence: Synthetic oligonucleotide
gcuacuuugaaugcaaggu

SEQ ID NO: 1007755 - RNA, 19 nt, Artificial Sequence
  Description of Artificial Sequence: Synthetic oligonucleotide
aguccuauguggggcagca

SEQ ID NO: 1007756 - RNA, 19 nt, Artificial Sequence
  Description of Artificial Sequence: Synthetic oligonucleotide
cagagagcggauggcauug

SEQ ID NO: 1007757 - RNA, 19 nt, Artificial Sequence
  Description of Artificial Sequence: Synthetic oligonucleotide
uccacauaggguggccucu

SEQ ID NO: 1007758 - RNA, 19 nt, Artificial Sequence
  Description of Artificial Sequence: Synthetic oligonucleotide
agagaaccugucugcugca

SEQ ID NO: 1007759 - RNA, 19 nt, Artificial Sequence
  Description of Artificial Sequence: Synthetic oligonucleotide
ggagagugaugccagugca

SEQ ID NO: 1007760 - RNA, 19 nt, Artificial Sequence
  Description of Artificial Sequence: Synthetic oligonucleotide
ccccuagcccuucagaacc

SEQ ID NO: 1007761 - RNA, 19 nt, Artificial Sequence
  Description of Artificial Sequence: Synthetic oligonucleotide
uggaccugacugccugccc

SEQ ID NO: 1007762 - RNA, 19 nt, Artificial Sequence
  Description of Artificial Sequence: Synthetic oligonucleotide
cuugucaaguuccuugggu

SEQ ID NO: 1007763 - RNA, 19 nt, Artificial Sequence
  Description of Artificial Sequence: Synthetic oligonucleotide
cacacacacacaauacucu

SEQ ID NO: 1007764 - RNA, 19 nt, Artificial Sequence
  Description of Artificial Sequence: Synthetic oligonucleotide
gagugaugccagugcaguc

SEQ ID NO: 1007765 - RNA, 19 nt, Artificial Sequence
  Description of Artificial Sequence: Synthetic oligonucleotide
uucauagguucuuccucuu

SEQ ID NO: 1007766 - RNA, 19 nt, Artificial Sequence
  Description of Artificial Sequence: Synthetic oligonucleotide
ccaaguuaagaauaguggu

SEQ ID NO: 1007767 - RNA, 19 nt, Artificial Sequence
  Description of Artificial Sequence: Synthetic oligonucleotide
aauuaccacugcaccuccu

SEQ ID NO: 1007768 - RNA, 19 nt, Artificial Sequence
  Description of Artificial Sequence: Synthetic oligonucleotide
gucaggguagguugugcuc

SEQ ID NO: 1007769 - RNA, 19 nt, Artificial Sequence
  Description of Artificial Sequence: Synthetic oligonucleotide
agcccuucagaaccuugga

SEQ ID NO: 1007770 - RNA, 19 nt, Artificial Sequence
  Description of Artificial Sequence: Synthetic oligonucleotide
cacauaggguggccucugg

SEQ ID NO: 1007771 - RNA, 19 nt, Artificial Sequence
  Description of Artificial Sequence: Synthetic oligonucleotide
uuggaggaaugcagcucgu

SEQ ID NO: 1007772 - RNA, 19 nt, Artificial Sequence
  Description of Artificial Sequence: Synthetic oligonucleotide
gcaucacaaacauccgcug

SEQ ID NO: 1007773 - RNA, 19 nt, Artificial Sequence
  Description of Artificial Sequence: Synthetic oligonucleotide
gaguccugucagcuucccc

SEQ ID NO: 1007774 - RNA, 19 nt, Artificial Sequence
  Description of Artificial Sequence: Synthetic oligonucleotide
acggagagugaugccagug

SEQ ID NO: 1007775 - RNA, 19 nt, Artificial Sequence
  Description of Artificial Sequence: Synthetic oligonucleotide
aggucaucaguugcugugu

SEQ ID NO: 1007776 - RNA, 19 nt, Artificial Sequence
  Description of Artificial Sequence: Synthetic oligonucleotide
guuuggcaccauuggguca

SEQ ID NO: 1007777 - RNA, 19 nt, Artificial Sequence
  Description of Artificial Sequence: Synthetic oligonucleotide
acccucuaaaggccaauua

SEQ ID NO: 1007778 - RNA, 19 nt, Artificial Sequence
  Description of Artificial Sequence: Synthetic oligonucleotide
agcacaggacucauagaga

SEQ ID NO: 1007779 - RNA, 19 nt, Artificial Sequence
  Description of Artificial Sequence: Synthetic oligonucleotide
gcugucggcaggcaauggc

SEQ ID NO: 1007780 - RNA, 19 nt, Artificial Sequence
  Description of Artificial Sequence: Synthetic oligonucleotide
uagcugucggcaggcaaug

SEQ ID NO: 1007781 - RNA, 19 nt, Artificial Sequence
  Description of Artificial Sequence: Synthetic oligonucleotide
auccgcugugccaggaguc

SEQ ID NO: 1007782 - RNA, 19 nt, Artificial Sequence
  Description of Artificial Sequence: Synthetic oligonucleotide
ccaauuaccacugcaccuc

SEQ ID NO: 1007783 - RNA, 19 nt, Artificial Sequence
  Description of Artificial Sequence: Synthetic oligonucleotide
cacacacacacacaauacu

SEQ ID NO: 1007784 - RNA, 19 nt, Artificial Sequence
  Description of Artificial Sequence: Synthetic oligonucleotide
ccaagcgcugcaugcagcc

SEQ ID NO: 1007785 - RNA, 19 nt, Artificial Sequence
  Description of Artificial Sequence: Synthetic oligonucleotide
gagcagugaccaggcaucc

SEQ ID NO: 1007786 - RNA, 19 nt, Artificial Sequence
  Description of Artificial Sequence: Synthetic oligonucleotide
acccugaucacagcuucca

SEQ ID NO: 1007787 - RNA, 19 nt, Artificial Sequence
  Description of Artificial Sequence: Synthetic oligonucleotide
cugaaccaguccuccgcug

SEQ ID NO: 1007788 - RNA, 19 nt, Artificial Sequence
  Description of Artificial Sequence: Synthetic oligonucleotide
agagagcggauggcauugg

SEQ ID NO: 1007789 - RNA, 19 nt, Artificial Sequence
  Description of Artificial Sequence: Synthetic oligonucleotide
uucuacuccccuagcccuu

SEQ ID NO: 1007790 - RNA, 19 nt, Artificial Sequence
  Description of Artificial Sequence: Synthetic oligonucleotide
gugcuuuuaaggggagaug

SEQ ID NO: 1007791 - RNA, 19 nt, Artificial Sequence
  Description of Artificial Sequence: Synthetic oligonucleotide
cuccccuagcccuucagaa

SEQ ID NO: 1007792 - RNA, 19 nt, Artificial Sequence
  Description of Artificial Sequence: Synthetic oligonucleotide
cugucaggguagguugugc

SEQ ID NO: 1007793 - RNA, 19 nt, Artificial Sequence
  Description of Artificial Sequence: Synthetic oligonucleotide
cagccuucuucugaaagga

SEQ ID NO: 1007794 - RNA, 19 nt, Artificial Sequence
  Description of Artificial Sequence: Synthetic oligonucleotide
ggagauccaccuuguugcc

SEQ ID NO: 1007795 - RNA, 19 nt, Artificial Sequence
  Description of Artificial Sequence: Synthetic oligonucleotide
ggaagccaagcgcugcaug

SEQ ID NO: 1007796 - RNA, 19 nt, Artificial Sequence
  Description of Artificial Sequence: Synthetic oligonucleotide
gaaaggagauccaccuugu

SEQ ID NO: 1007797 - RNA, 19 nt, Artificial Sequence
  Description of Artificial Sequence: Synthetic oligonucleotide
cagugaccaggcaucccug

SEQ ID NO: 1007798 - RNA, 19 nt, Artificial Sequence
  Description of Artificial Sequence: Synthetic oligonucleotide
cuaguccuauguggggcag

SEQ ID NO: 1007799 - RNA, 19 nt, Artificial Sequence
  Description of Artificial Sequence: Synthetic oligonucleotide
gccacgucuggagagcagg

SEQ ID NO: 1007800 - RNA, 19 nt, Artificial Sequence
  Description of Artificial Sequence: Synthetic oligonucleotide
ccacuaucugucuacucuc

SEQ ID NO: 1007801 - RNA, 19 nt, Artificial Sequence
  Description of Artificial Sequence: Synthetic oligonucleotide
aaggucggugacacugccu

SEQ ID NO: 1007802 - RNA, 19 nt, Artificial Sequence
  Description of Artificial Sequence: Synthetic oligonucleotide
cccaccacaggguagcauc

SEQ ID NO: 1007803 - RNA, 19 nt, Artificial Sequence
  Description of Artificial Sequence: Synthetic oligonucleotide
gcccuagagauucauaggu

SEQ ID NO: 1007804 - RNA, 19 nt, Artificial Sequence
  Description of Artificial Sequence: Synthetic oligonucleotide
ccuuggaagggccacccug

SEQ ID NO: 1007805 - RNA, 19 nt, Artificial Sequence
  Description of Artificial Sequence: Synthetic oligonucleotide
ccauucugaaagagccuag

SEQ ID NO: 1007806 - RNA, 19 nt, Artificial Sequence
  Description of Artificial Sequence: Synthetic oligonucleotide
ucggcaggcaauggccaca

SEQ ID NO: 1007807 - RNA, 19 nt, Artificial Sequence
  Description of Artificial Sequence: Synthetic oligonucleotide
ccuuguugcccagaagagc

SEQ ID NO: 1007808 - RNA, 19 nt, Artificial Sequence
  Description of Artificial Sequence: Synthetic oligonucleotide
uaguccuauguggggcagc

SEQ ID NO: 1007809 - RNA, 19 nt, Artificial Sequence
  Description of Artificial Sequence: Synthetic oligonucleotide
cugugucauauacccaaaa

SEQ ID NO: 1007810 - RNA, 19 nt, Artificial Sequence
  Description of Artificial Sequence: Synthetic oligonucleotide
cacaggguagcaucacaaa

SEQ ID NO: 1007811 - RNA, 19 nt, Artificial Sequence
  Description of Artificial Sequence: Synthetic oligonucleotide
acacacacacacacacaca

SEQ ID NO: 1007812 - RNA, 19 nt, Artificial Sequence
  Description of Artificial Sequence: Synthetic oligonucleotide
gucggugacacugccugca

SEQ ID NO: 1007813 - RNA, 19 nt, Artificial Sequence
  Description of Artificial Sequence: Synthetic oligonucleotide
ccaggcaucccugggauug

SEQ ID NO: 1007814 - RNA, 19 nt, Artificial Sequence
  Description of Artificial Sequence: Synthetic oligonucleotide
caggguagguugugcucug

SEQ ID NO: 1007815 - RNA, 19 nt, Artificial Sequence
  Description of Artificial Sequence: Synthetic oligonucleotide
caggcucauacugggagca

SEQ ID NO: 1007816 - RNA, 19 nt, Artificial Sequence
  Description of Artificial Sequence: Synthetic oligonucleotide
ggaccugacugccugccca

SEQ ID NO: 1007817 - RNA, 19 nt, Artificial Sequence
  Description of Artificial Sequence: Synthetic oligonucleotide
cagaaccuuggaagggcca

SEQ ID NO: 1007818 - RNA, 19 nt, Artificial Sequence
  Description of Artificial Sequence: Synthetic oligonucleotide
gucggcaggcaauggccac

SEQ ID NO: 1007819 - RNA, 19 nt, Artificial Sequence
  Description of Artificial Sequence: Synthetic oligonucleotide
ggugggcccaccugaacca

SEQ ID NO: 1007820 - RNA, 19 nt, Artificial Sequence
  Description of Artificial Sequence: Synthetic oligonucleotide
gcuaguccuauguggggca

SEQ ID NO: 1007821 - RNA, 19 nt, Artificial Sequence
  Description of Artificial Sequence: Synthetic oligonucleotide
uacagcacgcugggguccu

SEQ ID NO: 1007822 - RNA, 19 nt, Artificial Sequence
  Description of Artificial Sequence: Synthetic oligonucleotide
gagccuagcugggccuuag

SEQ ID NO: 1007823 - RNA, 19 nt, Artificial Sequence
  Description of Artificial Sequence: Synthetic oligonucleotide
cuucuacuucugcgucagc

SEQ ID NO: 1007824 - RNA, 19 nt, Artificial Sequence
  Description of Artificial Sequence: Synthetic oligonucleotide
gcugcaugcagccccagua

SEQ ID NO: 1007825 - RNA, 19 nt, Artificial Sequence
  Description of Artificial Sequence: Synthetic oligonucleotide
agcugucggcaggcaaugg

SEQ ID NO: 1007826 - RNA, 19 nt, Artificial Sequence
  Description of Artificial Sequence: Synthetic oligonucleotide
gaagcccuagagauucaua

SEQ ID NO: 1007827 - RNA, 19 nt, Artificial Sequence
  Description of Artificial Sequence: Synthetic oligonucleotide
ccucagucaagcuaguccu

SEQ ID NO: 1007828 - RNA, 19 nt, Artificial Sequence
  Description of Artificial Sequence: Synthetic oligonucleotide
agugaccagaugggaggcu

SEQ ID NO: 1007829 - RNA, 19 nt, Artificial Sequence
  Description of Artificial Sequence: Synthetic oligonucleotide
ggcacugagaugguccaca

SEQ ID NO: 1007830 - RNA, 19 nt, Artificial Sequence
  Description of Artificial Sequence: Synthetic oligonucleotide
auacucuuucuuggcccca

SEQ ID NO: 1007831 - RNA, 19 nt, Artificial Sequence
  Description of Artificial Sequence: Synthetic oligonucleotide
gaccccuuggcuccuucua

SEQ ID NO: 1007832 - RNA, 19 nt, Artificial Sequence
  Description of Artificial Sequence: Synthetic oligonucleotide
cuuuaguucucgggaagcu

SEQ ID NO: 1007833 - RNA, 19 nt, Artificial Sequence
  Description of Artificial Sequence: Synthetic oligonucleotide
guccugagggauggaggcc

SEQ ID NO: 1007834 - RNA, 19 nt, Artificial Sequence
  Description of Artificial Sequence: Synthetic oligonucleotide
acacaggaacagggcugac

SEQ ID NO: 1007835 - RNA, 19 nt, Artificial Sequence
  Description of Artificial Sequence: Synthetic oligonucleotide
caaguuccuuggguagcug

SEQ ID NO: 1007836 - RNA, 19 nt, Artificial Sequence
  Description of Artificial Sequence: Synthetic oligonucleotide
uggaggaaugcagcucguu

SEQ ID NO: 1007837 - RNA, 19 nt, Artificial Sequence
  Description of Artificial Sequence: Synthetic oligonucleotide
uuguagcugucggcaggca

SEQ ID NO: 1007838 - RNA, 19 nt, Artificial Sequence
  Description of Artificial Sequence: Synthetic oligonucleotide
cggagagugaugccagugc

SEQ ID NO: 1007839 - RNA, 19 nt, Artificial Sequence
  Description of Artificial Sequence: Synthetic oligonucleotide
agcugucaggguagguugu

SEQ ID NO: 1007840 - RNA, 19 nt, Artificial Sequence
  Description of Artificial Sequence: Synthetic oligonucleotide
ggaaugcagcucguuccag

SEQ ID NO: 1007841 - RNA, 19 nt, Artificial Sequence
  Description of Artificial Sequence: Synthetic oligonucleotide
acacacacacacacacaau

SEQ ID NO: 1007842 - RNA, 19 nt, Artificial Sequence
  Description of Artificial Sequence: Synthetic oligonucleotide
ggaggcuugcuggugacaa

SEQ ID NO: 1007843 - RNA, 19 nt, Artificial Sequence
  Description of Artificial Sequence: Synthetic oligonucleotide
caaggucaucaguugcugu

SEQ ID NO: 1007844 - RNA, 19 nt, Artificial Sequence
  Description of Artificial Sequence: Synthetic oligonucleotide
gucuacucuccccucccua

SEQ ID NO: 1007845 - RNA, 19 nt, Artificial Sequence
  Description of Artificial Sequence: Synthetic oligonucleotide
ggcaccauugggucaggaa

SEQ ID NO: 1007846 - RNA, 19 nt, Artificial Sequence
  Description of Artificial Sequence: Synthetic oligonucleotide
gugucaguaucuaccccaa

SEQ ID NO: 1007847 - RNA, 19 nt, Artificial Sequence
  Description of Artificial Sequence: Synthetic oligonucleotide
guagaaugaucugcauggu

SEQ ID NO: 1007848 - RNA, 19 nt, Artificial Sequence
  Description of Artificial Sequence: Synthetic oligonucleotide
gagccacgucuggagagca

SEQ ID NO: 1007849 - RNA, 19 nt, Artificial Sequence
  Description of Artificial Sequence: Synthetic oligonucleotide
guagcugucggcaggcaau

SEQ ID NO: 1007850 - RNA, 19 nt, Artificial Sequence
  Description of Artificial Sequence: Synthetic oligonucleotide
aggguggccucuggcagga

SEQ ID NO: 1007851 - RNA, 19 nt, Artificial Sequence
  Description of Artificial Sequence: Synthetic oligonucleotide
ggacaggaagccaagcgcu

SEQ ID NO: 1007852 - RNA, 19 nt, Artificial Sequence
  Description of Artificial Sequence: Synthetic oligonucleotide
cucagucaagcuaguccua

SEQ ID NO: 1007853 - RNA, 19 nt, Artificial Sequence
  Description of Artificial Sequence: Synthetic oligonucleotide
ggucggugacacugccugc

SEQ ID NO: 1007854 - RNA, 19 nt, Artificial Sequence
  Description of Artificial Sequence: Synthetic oligonucleotide
ggguagguugugcucugga

SEQ ID NO: 1007855 - RNA, 19 nt, Artificial Sequence
  Description of Artificial Sequence: Synthetic oligonucleotide
acgcugggguccugguaga

SEQ ID NO: 1007856 - RNA, 19 nt, Artificial Sequence
  Description of Artificial Sequence: Synthetic oligonucleotide
cuuagugcccagccugccu

SEQ ID NO: 1007857 - RNA, 19 nt, Artificial Sequence
  Description of Artificial Sequence: Synthetic oligonucleotide
ggguuggguuucuguuucc

SEQ ID NO: 1007858 - RNA, 19 nt, Artificial Sequence
  Description of Artificial Sequence: Synthetic oligonucleotide
ggcauugggguuggguuuc

SEQ ID NO: 1007859 - RNA, 19 nt, Artificial Sequence
  Description of Artificial Sequence: Synthetic oligonucleotide
caggugaagagagccacgu

SEQ ID NO: 1007860 - RNA, 19 nt, Artificial Sequence
  Description of Artificial Sequence: Synthetic oligonucleotide
gugggcccaccugaaccag

SEQ ID NO: 1007861 - RNA, 19 nt, Artificial Sequence
  Description of Artificial Sequence: Synthetic oligonucleotide
cuuugaaugcaaggucggu

SEQ ID NO: 1007862 - RNA, 19 nt, Artificial Sequence
  Description of Artificial Sequence: Synthetic oligonucleotide
gugcuaccagaagacaacu

SEQ ID NO: 1007863 - RNA, 19 nt, Artificial Sequence
  Description of Artificial Sequence: Synthetic oligonucleotide
accuccugccaaggucauc

SEQ ID NO: 1007864 - RNA, 19 nt, Artificial Sequence
  Description of Artificial Sequence: Synthetic oligonucleotide
agguugugcucuggaccug

SEQ ID NO: 1007865 - RNA, 19 nt, Artificial Sequence
  Description of Artificial Sequence: Synthetic oligonucleotide
caggacucauagagaaccu

SEQ ID NO: 1007866 - RNA, 19 nt, Artificial Sequence
  Description of Artificial Sequence: Synthetic oligonucleotide
cauccgcugugccaggagu

SEQ ID NO: 1007867 - RNA, 19 nt, Artificial Sequence
  Description of Artificial Sequence: Synthetic oligonucleotide
guugugcucuggaccugac

SEQ ID NO: 1007868 - RNA, 19 nt, Artificial Sequence
  Description of Artificial Sequence: Synthetic oligonucleotide
cucucagagcccagugcua

SEQ ID NO: 1007869 - RNA, 19 nt, Artificial Sequence
  Description of Artificial Sequence: Synthetic oligonucleotide
acccagucauggcgaugca

SEQ ID NO: 1007870 - RNA, 19 nt, Artificial Sequence
  Description of Artificial Sequence: Synthetic oligonucleotide
cuuggguagcugucagggu

SEQ ID NO: 1007871 - RNA, 19 nt, Artificial Sequence
  Description of Artificial Sequence: Synthetic oligonucleotide
gguugugcucuggaccuga

SEQ ID NO: 1007872 - RNA, 19 nt, Artificial Sequence
  Description of Artificial Sequence: Synthetic oligonucleotide
gccaacccagucauggcga

SEQ ID NO: 1007873 - RNA, 19 nt, Artificial Sequence
  Description of Artificial Sequence: Synthetic oligonucleotide
ugcaguccugagggaugga

SEQ ID NO: 1007874 - RNA, 19 nt, Artificial Sequence
  Description of Artificial Sequence: Synthetic oligonucleotide
gcugucaggguagguugug

SEQ ID NO: 1007875 - RNA, 19 nt, Artificial Sequence
  Description of Artificial Sequence: Synthetic oligonucleotide
agccacgucuggagagcag

SEQ ID NO: 1007876 - RNA, 19 nt, Artificial Sequence
  Description of Artificial Sequence: Synthetic oligonucleotide
gcuaggggccuggacacca

SEQ ID NO: 1007877 - RNA, 19 nt, Artificial Sequence
  Description of Artificial Sequence: Synthetic oligonucleotide
cugugccaggaguccuguc

SEQ ID NO: 1007878 - RNA, 19 nt, Artificial Sequence
  Description of Artificial Sequence: Synthetic oligonucleotide
ggggccgcaccacagcaaa

SEQ ID NO: 1007879 - RNA, 19 nt, Artificial Sequence
  Description of Artificial Sequence: Synthetic oligonucleotide
cccacggagagugaugcca

SEQ ID NO: 1007880 - RNA, 19 nt, Artificial Sequence
  Description of Artificial Sequence: Synthetic oligonucleotide
ggucauggccacccucuaa

SEQ ID NO: 1007881 - RNA, 19 nt, Artificial Sequence
  Description of Artificial Sequence: Synthetic oligonucleotide
agcgcugcaugcagcccca

SEQ ID NO: 1007882 - RNA, 19 nt, Artificial Sequence
  Description of Artificial Sequence: Synthetic oligonucleotide
ggcaucgcagauggcugug

SEQ ID NO: 1007883 - RNA, 19 nt, Artificial Sequence
  Description of Artificial Sequence: Synthetic oligonucleotide
cagcucagaauggcucuca

SEQ ID NO: 1007884 - RNA, 19 nt, Artificial Sequence
  Description of Artificial Sequence: Synthetic oligonucleotide
ccaggccuagaccucaaaa

SEQ ID NO: 1007885 - RNA, 19 nt, Artificial Sequence
  Description of Artificial Sequence: Synthetic oligonucleotide
ggcccaccugaaccagucc

SEQ ID NO: 1007886 - RNA, 19 nt, Artificial Sequence
  Description of Artificial Sequence: Synthetic oligonucleotide
gguagccaacccagucaug

SEQ ID NO: 1007887 - RNA, 19 nt, Artificial Sequence
  Description of Artificial Sequence: Synthetic oligonucleotide
cacugagaugguccacaua

SEQ ID NO: 1007888 - RNA, 19 nt, Artificial Sequence
  Description of Artificial Sequence: Synthetic oligonucleotide
ccuuagugcccagccugcc

SEQ ID NO: 1007889 - RNA, 19 nt, Artificial Sequence
  Description of Artificial Sequence: Synthetic oligonucleotide
ccaccacaggguagcauca

SEQ ID NO: 1007890 - RNA, 19 nt, Artificial Sequence
  Description of Artificial Sequence: Synthetic oligonucleotide
ccuggcugaggccaaguua

SEQ ID NO: 1007891 - RNA, 19 nt, Artificial Sequence
  Description of Artificial Sequence: Synthetic oligonucleotide
guggggcagcagucagaac

SEQ ID NO: 1007892 - RNA, 19 nt, Artificial Sequence
  Description of Artificial Sequence: Synthetic oligonucleotide
aggaagcacaggacucaua

SEQ ID NO: 1007893 - RNA, 19 nt, Artificial Sequence
  Description of Artificial Sequence: Synthetic oligonucleotide
gugaccagaugggaggcuu

SEQ ID NO: 1007894 - RNA, 19 nt, Artificial Sequence
  Description of Artificial Sequence: Synthetic oligonucleotide
gcuguagaaugaucugcau

SEQ ID NO: 1007895 - RNA, 19 nt, Artificial Sequence
  Description of Artificial Sequence: Synthetic oligonucleotide
gcccauggcuguagaauga

SEQ ID NO: 1007896 - RNA, 19 nt, Artificial Sequence
  Description of Artificial Sequence: Synthetic oligonucleotide
gccucuggcaggacaguga

SEQ ID NO: 1007897 - RNA, 19 nt, Artificial Sequence
  Description of Artificial Sequence: Synthetic oligonucleotide
gcugugucauauacccaaa

SEQ ID NO: 1007898 - RNA, 19 nt, Artificial Sequence
  Description of Artificial Sequence: Synthetic oligonucleotide
agagccuagcugggccuua

SEQ ID NO: 1007899 - RNA, 19 nt, Artificial Sequence
  Description of Artificial Sequence: Synthetic oligonucleotide
ggcucauacugggagcagu

SEQ ID NO: 1007900 - RNA, 19 nt, Artificial Sequence
  Description of Artificial Sequence: Synthetic oligonucleotide
gaugaagguuuggcaccau

SEQ ID NO: 1007901 - RNA, 19 nt, Artificial Sequence
  Description of Artificial Sequence: Synthetic oligonucleotide
ccauugggucaggaagcac

SEQ ID NO: 1007902 - RNA, 19 nt, Artificial Sequence
  Description of Artificial Sequence: Synthetic oligonucleotide
ggcaggacagugaccagau

SEQ ID NO: 1007903 - RNA, 19 nt, Artificial Sequence
  Description of Artificial Sequence: Synthetic oligonucleotide
cacggagagugaugccagu

SEQ ID NO: 1007904 - RNA, 19 nt, Artificial Sequence
  Description of Artificial Sequence: Synthetic oligonucleotide
ggccacccucuaaaggcca

SEQ ID NO: 1007905 - RNA, 19 nt, Artificial Sequence
  Description of Artificial Sequence: Synthetic oligonucleotide
gcaaaagcccauggcugua

SEQ ID NO: 1007906 - RNA, 19 nt, Artificial Sequence
  Description of Artificial Sequence: Synthetic oligonucleotide
gcaucgcagauggcuguga

SEQ ID NO: 1007907 - RNA, 19 nt, Artificial Sequence
  Description of Artificial Sequence: Synthetic oligonucleotide
gcgucagccccuggcacuc

SEQ ID NO: 1007908 - RNA, 19 nt, Artificial Sequence
  Description of Artificial Sequence: Synthetic oligonucleotide
ggauuguguugugcuuuua

SEQ ID NO: 1007909 - RNA, 19 nt, Artificial Sequence
  Description of Artificial Sequence: Synthetic oligonucleotide
ccugugcacccugaucaca

SEQ ID NO: 1007910 - RNA, 19 nt, Artificial Sequence
  Description of Artificial Sequence: Synthetic oligonucleotide
gggguccugguagaaaguu

SEQ ID NO: 1007911 - RNA, 19 nt, Artificial Sequence
  Description of Artificial Sequence: Synthetic oligonucleotide
cccuagagauucauagguu

SEQ ID NO: 1007912 - RNA, 19 nt, Artificial Sequence
  Description of Artificial Sequence: Synthetic oligonucleotide
caggaugcccacggagagu

SEQ ID NO: 1007913 - RNA, 19 nt, Artificial Sequence
  Description of Artificial Sequence: Synthetic oligonucleotide
ccuagaccucaaaagccuu

SEQ ID NO: 1007914 - RNA, 19 nt, Artificial Sequence
  Description of Artificial Sequence: Synthetic oligonucleotide
gcccagcgggcugcauugg

SEQ ID NO: 1007915 - RNA, 19 nt, Artificial Sequence
  Description of Artificial Sequence: Synthetic oligonucleotide
gguagcugucaggguaggu

SEQ ID NO: 1007916 - RNA, 19 nt, Artificial Sequence
  Description of Artificial Sequence: Synthetic oligonucleotide
cacccucuaaaggccaauu

SEQ ID NO: 1007917 - RNA, 19 nt, Artificial Sequence
  Description of Artificial Sequence: Synthetic oligonucleotide
cagcccagcgggcugcauu

SEQ ID NO: 1007918 - RNA, 19 nt, Artificial Sequence
  Description of Artificial Sequence: Synthetic oligonucleotide
ccccucagucaagcuaguc

SEQ ID NO: 1007919 - RNA, 19 nt, Artificial Sequence
  Description of Artificial Sequence: Synthetic oligonucleotide
gcgggcugcauuggaggaa

SEQ ID NO: 1007920 - RNA, 19 nt, Artificial Sequence
  Description of Artificial Sequence: Synthetic oligonucleotide
cccagucauggcgaugcaa

SEQ ID NO: 1007921 - RNA, 19 nt, Artificial Sequence
  Description of Artificial Sequence: Synthetic oligonucleotide
ccacgucuggagagcaggu

SEQ ID NO: 1007922 - RNA, 19 nt, Artificial Sequence
  Description of Artificial Sequence: Synthetic oligonucleotide
ccaguggccuugucaaguu

SEQ ID NO: 1007923 - RNA, 19 nt, Artificial Sequence
  Description of Artificial Sequence: Synthetic oligonucleotide
ccaacccagucauggcgau

SEQ ID NO: 1007924 - RNA, 19 nt, Artificial Sequence
  Description of Artificial Sequence: Synthetic oligonucleotide
gcgcugcaugcagccccag

SEQ ID NO: 1007925 - RNA, 19 nt, Artificial Sequence
  Description of Artificial Sequence: Synthetic oligonucleotide
gccugucuucagccaggau

SEQ ID NO: 1007926 - RNA, 19 nt, Artificial Sequence
  Description of Artificial Sequence: Synthetic oligonucleotide
ccuagcccuucagaaccuu

SEQ ID NO: 1007927 - RNA, 19 nt, Artificial Sequence
  Description of Artificial Sequence: Synthetic oligonucleotide
ugugaaucuacccugaucg

SEQ ID NO: 1007928 - RNA, 19 nt, Artificial Sequence
  Description of Artificial Sequence: Synthetic oligonucleotide
auauaauuaacauuugugu

SEQ ID NO: 1007929 - RNA, 19 nt, Artificial Sequence
  Description of Artificial Sequence: Synthetic oligonucleotide
aguagcaucacucccaggg

SEQ ID NO: 1007930 - RNA, 19 nt, Artificial Sequence
  Description of Artificial Sequence: Synthetic oligonucleotide
agagucauaaaggugaucg

SEQ ID NO: 1007931 - RNA, 19 nt, Artificial Sequence
  Description of Artificial Sequence: Synthetic oligonucleotide
aaacuguccagaucuacac

SEQ ID NO: 1007932 - RNA, 19 nt, Artificial Sequence
  Description of Artificial Sequence: Synthetic oligonucleotide
auucuuaaggcauggcucc

SEQ ID NO: 1007933 - RNA, 19 nt, Artificial Sequence
  Description of Artificial Sequence: Synthetic oligonucleotide
aauucuuaaggcauggcuc

SEQ ID NO: 1007934 - RNA, 19 nt, Artificial Sequence
  Description of Artificial Sequence: Synthetic oligonucleotide
aguguagucaagcaaaucu

SEQ ID NO: 1007935 - RNA, 19 nt, Artificial Sequence
  Description of Artificial Sequence: Synthetic oligonucleotide
uuuuguuacaaagaggaug

SEQ ID NO: 1007936 - RNA, 19 nt, Artificial Sequence
  Description of Artificial Sequence: Synthetic oligonucleotide
uuugcaagaagcauccuca

SEQ ID NO: 1007937 - RNA, 19 nt, Artificial Sequence
  Description of Artificial Sequence: Synthetic oligonucleotide
gauagagucauaaagguga

SEQ ID NO: 1007938 - RNA, 19 nt, Artificial Sequence
  Description of Artificial Sequence: Synthetic oligonucleotide
aaaggugucaucauacuag

SEQ ID NO: 1007939 - RNA, 19 nt, Artificial Sequence
  Description of Artificial Sequence: Synthetic oligonucleotide
uauacaaccagcagaucag

SEQ ID NO: 1007940 - RNA, 19 nt, Artificial Sequence
  Description of Artificial Sequence: Synthetic oligonucleotide
ugggaaaccuguuauacag

SEQ ID NO: 1007941 - RNA, 19 nt, Artificial Sequence
  Description of Artificial Sequence: Synthetic oligonucleotide
ucugaugcagcuugcaagg

SEQ ID NO: 1007942 - RNA, 19 nt, Artificial Sequence
  Description of Artificial Sequence: Synthetic oligonucleotide
aagaagcauccucagugcc

SEQ ID NO: 1007943 - RNA, 19 nt, Artificial Sequence
  Description of Artificial Sequence: Synthetic oligonucleotide
uaagaguggaccugggugg

SEQ ID NO: 1007944 - RNA, 19 nt, Artificial Sequence
  Description of Artificial Sequence: Synthetic oligonucleotide
uacaaucaacuccugagag

SEQ ID NO: 1007945 - RNA, 19 nt, Artificial Sequence
  Description of Artificial Sequence: Synthetic oligonucleotide
uccuaaguggcauucacag

SEQ ID NO: 1007946 - RNA, 19 nt, Artificial Sequence
  Description of Artificial Sequence: Synthetic oligonucleotide
uguauaaauuuuagcaugu

SEQ ID NO: 1007947 - RNA, 19 nt, Artificial Sequence
  Description of Artificial Sequence: Synthetic oligonucleotide
acauuauacaaccagcaga

SEQ ID NO: 1007948 - RNA, 19 nt, Artificial Sequence
  Description of Artificial Sequence: Synthetic oligonucleotide
uuagugggugacuugagag

SEQ ID NO: 1007949 - RNA, 19 nt, Artificial Sequence
  Description of Artificial Sequence: Synthetic oligonucleotide
uuuagcauguccaugugaa

SEQ ID NO: 1007950 - RNA, 19 nt, Artificial Sequence
  Description of Artificial Sequence: Synthetic oligonucleotide
cuugccuauaggcagauag

SEQ ID NO: 1007951 - RNA, 19 nt, Artificial Sequence
  Description of Artificial Sequence: Synthetic oligonucleotide
aauugugggagacauuagu

SEQ ID NO: 1007952 - RNA, 19 nt, Artificial Sequence
  Description of Artificial Sequence: Synthetic oligonucleotide
aaggugucaucauacuagg

SEQ ID NO: 1007953 - RNA, 19 nt, Artificial Sequence
  Description of Artificial Sequence: Synthetic oligonucleotide
guugauguaagcugguucc

SEQ ID NO: 1007954 - RNA, 19 nt, Artificial Sequence
  Description of Artificial Sequence: Synthetic oligonucleotide
ucuagucugggaaagggug

SEQ ID NO: 1007955 - RNA, 19 nt, Artificial Sequence
  Description of Artificial Sequence: Synthetic oligonucleotide
ugacauuauacaaccagca

SEQ ID NO: 1007956 - RNA, 19 nt, Artificial Sequence
  Description of Artificial Sequence: Synthetic oligonucleotide
uguauagaguccacaaagc

SEQ ID NO: 1007957 - RNA, 19 nt, Artificial Sequence
  Description of Artificial Sequence: Synthetic oligonucleotide
aucuuucuuaaauugccgg

SEQ ID NO: 1007958 - RNA, 19 nt, Artificial Sequence
  Description of Artificial Sequence: Synthetic oligonucleotide
aaauugccgguaaagcugc

SEQ ID NO: 1007959 - RNA, 19 nt, Artificial Sequence
  Description of Artificial Sequence: Synthetic oligonucleotide
aaagcauagaccaucuuca

SEQ ID NO: 1007960 - RNA, 19 nt, Artificial Sequence
  Description of Artificial Sequence: Synthetic oligonucleotide
ugcagagaagacuugagac

SEQ ID NO: 1007961 - RNA, 19 nt, Artificial Sequence
  Description of Artificial Sequence: Synthetic oligonucleotide
agaccuguaagaguggacc

SEQ ID NO: 1007962 - RNA, 19 nt, Artificial Sequence
  Description of Artificial Sequence: Synthetic oligonucleotide
uguguugccauuccuaagu

SEQ ID NO: 1007963 - RNA, 19 nt, Artificial Sequence
  Description of Artificial Sequence: Synthetic oligonucleotide
ugggauacucccaagggcc

SEQ ID NO: 1007964 - RNA, 19 nt, Artificial Sequence
  Description of Artificial Sequence: Synthetic oligonucleotide
caaaugagcuacuuugagg

SEQ ID NO: 1007965 - RNA, 19 nt, Artificial Sequence
  Description of Artificial Sequence: Synthetic oligonucleotide
cucaaaguucuuaacacac

SEQ ID NO: 1007966 - RNA, 19 nt, Artificial Sequence
  Description of Artificial Sequence: Synthetic oligonucleotide
cagaucuacaccugaaucc

SEQ ID NO: 1007967 - RNA, 19 nt, Artificial Sequence
  Description of Artificial Sequence: Synthetic oligonucleotide
agugccuaagguucuaggg

SEQ ID NO: 1007968 - RNA, 19 nt, Artificial Sequence
  Description of Artificial Sequence: Synthetic oligonucleotide
ugccuaagguucuagggcg

SEQ ID NO: 1007969 - RNA, 19 nt, Artificial Sequence
  Description of Artificial Sequence: Synthetic oligonucleotide
aacgucugugacauuauac

SEQ ID NO: 1007970 - RNA, 19 nt, Artificial Sequence
  Description of Artificial Sequence: Synthetic oligonucleotide
cuagaguccaauguggagg

SEQ ID NO: 1007971 - RNA, 19 nt, Artificial Sequence
  Description of Artificial Sequence: Synthetic oligonucleotide
acuacuuuugccuguggag

SEQ ID NO: 1007972 - RNA, 19 nt, Artificial Sequence
  Description of Artificial Sequence: Synthetic oligonucleotide
ugggguacaaucaacuccu

SEQ ID NO: 1007973 - RNA, 19 nt, Artificial Sequence
  Description of Artificial Sequence: Synthetic oligonucleotide
acaguuuacacccuuuagu

SEQ ID NO: 1007974 - RNA, 19 nt, Artificial Sequence
  Description of Artificial Sequence: Synthetic oligonucleotide
uuaacauuuguguugccau

SEQ ID NO: 1007975 - RNA, 19 nt, Artificial Sequence
  Description of Artificial Sequence: Synthetic oligonucleotide
uuggcuagaguccaaugug

SEQ ID NO: 1007976 - RNA, 19 nt, Artificial Sequence
  Description of Artificial Sequence: Synthetic oligonucleotide
aucauacuaggcugaagac

SEQ ID NO: 1007977 - RNA, 19 nt, Artificial Sequence
  Description of Artificial Sequence: Synthetic oligonucleotide
acugcuuugcgaucuuccc

SEQ ID NO: 1007978 - RNA, 19 nt, Artificial Sequence
  Description of Artificial Sequence: Synthetic oligonucleotide
uuuugcaagaagcauccuc

SEQ ID NO: 1007979 - RNA, 19 nt, Artificial Sequence
  Description of Artificial Sequence: Synthetic oligonucleotide
aaggugaucggcguggcuc

SEQ ID NO: 1007980 - RNA, 19 nt, Artificial Sequence
  Description of Artificial Sequence: Synthetic oligonucleotide
gaagauucucuccagcaac

SEQ ID NO: 1007981 - RNA, 19 nt, Artificial Sequence
  Description of Artificial Sequence: Synthetic oligonucleotide
ucacuuuacuacuuuugcc

SEQ ID NO: 1007982 - RNA, 19 nt, Artificial Sequence
  Description of Artificial Sequence: Synthetic oligonucleotide
acaaccagcagaucagcuc

SEQ ID NO: 1007983 - RNA, 19 nt, Artificial Sequence
  Description of Artificial Sequence: Synthetic oligonucleotide
aaacuggcccaucacuguc

SEQ ID NO: 1007984 - RNA, 19 nt, Artificial Sequence
  Description of Artificial Sequence: Synthetic oligonucleotide
uccaugugaaucuacccug

SEQ ID NO: 1007985 - RNA, 19 nt, Artificial Sequence
  Description of Artificial Sequence: Synthetic oligonucleotide
acacccuuuaguuauaaaa

SEQ ID NO: 1007986 - RNA, 19 nt, Artificial Sequence
  Description of Artificial Sequence: Synthetic oligonucleotide
uugucuuucacgugggugu

SEQ ID NO: 1007987 - RNA, 19 nt, Artificial Sequence
  Description of Artificial Sequence: Synthetic oligonucleotide
uuugcgaucuucccaagaa

SEQ ID NO: 1007988 - RNA, 19 nt, Artificial Sequence
  Description of Artificial Sequence: Synthetic oligonucleotide
agcagaaaauauaauuaac

SEQ ID NO: 1007989 - RNA, 19 nt, Artificial Sequence
  Description of Artificial Sequence: Synthetic oligonucleotide
uuuuagcauguccauguga

SEQ ID NO: 1007990 - RNA, 19 nt, Artificial Sequence
  Description of Artificial Sequence: Synthetic oligonucleotide
agacaauuucagcucaaag

SEQ ID NO: 1007991 - RNA, 19 nt, Artificial Sequence
  Description of Artificial Sequence: Synthetic oligonucleotide
gauguaagcugguuccaag

SEQ ID NO: 1007992 - RNA, 19 nt, Artificial Sequence
  Description of Artificial Sequence: Synthetic oligonucleotide
auaaaggugaucggcgugg

SEQ ID NO: 1007993 - RNA, 19 nt, Artificial Sequence
  Description of Artificial Sequence: Synthetic oligonucleotide
ugucuagucugggaaaggg

SEQ ID NO: 1007994 - RNA, 19 nt, Artificial Sequence
  Description of Artificial Sequence: Synthetic oligonucleotide
gaguccuugggauguauag

SEQ ID NO: 1007995 - RNA, 19 nt, Artificial Sequence
  Description of Artificial Sequence: Synthetic oligonucleotide
gaaaccuugucuuucacgu

SEQ ID NO: 1007996 - RNA, 19 nt, Artificial Sequence
  Description of Artificial Sequence: Synthetic oligonucleotide
auccuuuaaaacuggggug

SEQ ID NO: 1007997 - RNA, 19 nt, Artificial Sequence
  Description of Artificial Sequence: Synthetic oligonucleotide
guccuugggauguauagag

SEQ ID NO: 1007998 - RNA, 19 nt, Artificial Sequence
  Description of Artificial Sequence: Synthetic oligonucleotide
cuugggauguauagagucc

SEQ ID NO: 1007999 - RNA, 19 nt, Artificial Sequence
  Description of Artificial Sequence: Synthetic oligonucleotide
ucuuacccaggcuaguagc

SEQ ID NO: 1008000 - RNA, 19 nt, Artificial Sequence
  Description of Artificial Sequence: Synthetic oligonucleotide
uaaggcauggcucccuggc

SEQ ID NO: 1008001 - RNA, 19 nt, Artificial Sequence
  Description of Artificial Sequence: Synthetic oligonucleotide
uuuguguugccauuccuaa

SEQ ID NO: 1008002 - RNA, 19 nt, Artificial Sequence
  Description of Artificial Sequence: Synthetic oligonucleotide
acgucugugacauuauaca

SEQ ID NO: 1008003 - RNA, 19 nt, Artificial Sequence
  Description of Artificial Sequence: Synthetic oligonucleotide
aguaguacuuuguugggaa

SEQ ID NO: 1008004 - RNA, 19 nt, Artificial Sequence
  Description of Artificial Sequence: Synthetic oligonucleotide
cugggguacaaucaacucc

SEQ ID NO: 1008005 - RNA, 19 nt, Artificial Sequence
  Description of Artificial Sequence: Synthetic oligonucleotide
uuauccgucaggcacugaa

SEQ ID NO: 1008006 - RNA, 19 nt, Artificial Sequence
  Description of Artificial Sequence: Synthetic oligonucleotide
agacuugagaccuguaaga

SEQ ID NO: 1008007 - RNA, 19 nt, Artificial Sequence
  Description of Artificial Sequence: Synthetic oligonucleotide
caucauacuaggcugaaga

SEQ ID NO: 1008008 - RNA, 19 nt, Artificial Sequence
  Description of Artificial Sequence: Synthetic oligonucleotide
ugaucgcaucugcacaugg

SEQ ID NO: 1008009 - RNA, 19 nt, Artificial Sequence
  Description of Artificial Sequence: Synthetic oligonucleotide
cauacuaggcugaagacaa

SEQ ID NO: 1008010 - RNA, 19 nt, Artificial Sequence
  Description of Artificial Sequence: Synthetic oligonucleotide
uuucuuaaauugccgguaa

SEQ ID NO: 1008011 - RNA, 19 nt, Artificial Sequence
  Description of Artificial Sequence: Synthetic oligonucleotide
aggaugaacaaaagcauag

SEQ ID NO: 1008012 - RNA, 19 nt, Artificial Sequence
  Description of Artificial Sequence: Synthetic oligonucleotide
ucauacuaggcugaagaca

SEQ ID NO: 1008013 - RNA, 19 nt, Artificial Sequence
  Description of Artificial Sequence: Synthetic oligonucleotide
uuuaaaacugggguguuau

SEQ ID NO: 1008014 - RNA, 19 nt, Artificial Sequence
  Description of Artificial Sequence: Synthetic oligonucleotide
ucuagggcguugauguaag

SEQ ID NO: 1008015 - RNA, 19 nt, Artificial Sequence
  Description of Artificial Sequence: Synthetic oligonucleotide
gugucaucauacuaggcug

SEQ ID NO: 1008016 - RNA, 19 nt, Artificial Sequence
  Description of Artificial Sequence: Synthetic oligonucleotide
uccuucauccuuagcugcg

SEQ ID NO: 1008017 - RNA, 19 nt, Artificial Sequence
  Description of Artificial Sequence: Synthetic oligonucleotide
ugagaguacuugcugggga

SEQ ID NO: 1008018 - RNA, 19 nt, Artificial Sequence
  Description of Artificial Sequence: Synthetic oligonucleotide
gguguuauccgucaggcac

SEQ ID NO: 1008019 - RNA, 19 nt, Artificial Sequence
  Description of Artificial Sequence: Synthetic oligonucleotide
cuagucugggaaagggugg

SEQ ID NO: 1008020 - RNA, 19 nt, Artificial Sequence
  Description of Artificial Sequence: Synthetic oligonucleotide
augugaaucuacccugauc

SEQ ID NO: 1008021 - RNA, 19 nt, Artificial Sequence
  Description of Artificial Sequence: Synthetic oligonucleotide
uuuguugggaaaccuguua

SEQ ID NO: 1008022 - RNA, 19 nt, Artificial Sequence
  Description of Artificial Sequence: Synthetic oligonucleotide
gagucauaaaggugaucgg

SEQ ID NO: 1008023 - RNA, 19 nt, Artificial Sequence
  Description of Artificial Sequence: Synthetic oligonucleotide
ugucucuuacccaggcuag

SEQ ID NO: 1008024 - RNA, 19 nt, Artificial Sequence
  Description of Artificial Sequence: Synthetic oligonucleotide
gagaguacuugcuggggag

SEQ ID NO: 1008025 - RNA, 19 nt, Artificial Sequence
  Description of Artificial Sequence: Synthetic oligonucleotide
uguccaugugaaucuaccc

SEQ ID NO: 1008026 - RNA, 19 nt, Artificial Sequence
  Description of Artificial Sequence: Synthetic oligonucleotide
caggcuaguagcaucacuc

SEQ ID NO: 1008027 - RNA, 19 nt, Artificial Sequence
  Description of Artificial Sequence: Synthetic oligonucleotide
gguucuugccuauaggcag

SEQ ID NO: 1008028 - RNA, 19 nt, Artificial Sequence
  Description of Artificial Sequence: Synthetic oligonucleotide
ucagcaacgucugugacau

SEQ ID NO: 1008029 - RNA, 19 nt, Artificial Sequence
  Description of Artificial Sequence: Synthetic oligonucleotide
ugauguuugucuauaucuu

SEQ ID NO: 1008030 - RNA, 19 nt, Artificial Sequence
  Description of Artificial Sequence: Synthetic oligonucleotide
caaguaguacuuuguuggg

SEQ ID NO: 1008031 - RNA, 19 nt, Artificial Sequence
  Description of Artificial Sequence: Synthetic oligonucleotide
caugacaggaucagucagc

SEQ ID NO: 1008032 - RNA, 19 nt, Artificial Sequence
  Description of Artificial Sequence: Synthetic oligonucleotide
ucauaaaggugaucggcgu

SEQ ID NO: 1008033 - RNA, 19 nt, Artificial Sequence
  Description of Artificial Sequence: Synthetic oligonucleotide
ugucaucauacuaggcuga

SEQ ID NO: 1008034 - RNA, 19 nt, Artificial Sequence
  Description of Artificial Sequence: Synthetic oligonucleotide
aaucuacccugaucgcauc

SEQ ID NO: 1008035 - RNA, 19 nt, Artificial Sequence
  Description of Artificial Sequence: Synthetic oligonucleotide
ugacuugagaguacuugcu

SEQ ID NO: 1008036 - RNA, 19 nt, Artificial Sequence
  Description of Artificial Sequence: Synthetic oligonucleotide
uucauccuuagcugcgggg

SEQ ID NO: 1008037 - RNA, 19 nt, Artificial Sequence
  Description of Artificial Sequence: Synthetic oligonucleotide
gacuugagaguacuugcug

SEQ ID NO: 1008038 - RNA, 19 nt, Artificial Sequence
  Description of Artificial Sequence: Synthetic oligonucleotide
agcacaagacucucaaacu

SEQ ID NO: 1008039 - RNA, 19 nt, Artificial Sequence
  Description of Artificial Sequence: Synthetic oligonucleotide
agugacgcuuucuccugcc

SEQ ID NO: 1008040 - RNA, 19 nt, Artificial Sequence
  Description of Artificial Sequence: Synthetic oligonucleotide
uguaagcugguuccaagau

SEQ ID NO: 1008041 - RNA, 19 nt, Artificial Sequence
  Description of Artificial Sequence: Synthetic oligonucleotide
ugggguguuauccgucagg

SEQ ID NO: 1008042 - RNA, 19 nt, Artificial Sequence
  Description of Artificial Sequence: Synthetic oligonucleotide
uuuacuacuuuugccugug

SEQ ID NO: 1008043 - RNA, 19 nt, Artificial Sequence
  Description of Artificial Sequence: Synthetic oligonucleotide
uuugugucccucagggcug

SEQ ID NO: 1008044 - RNA, 19 nt, Artificial Sequence
  Description of Artificial Sequence: Synthetic oligonucleotide
aaugagcuacuuugaggcu

SEQ ID NO: 1008045 - RNA, 19 nt, Artificial Sequence
  Description of Artificial Sequence: Synthetic oligonucleotide
cacauugcaccagugacgc

SEQ ID NO: 1008046 - RNA, 19 nt, Artificial Sequence
  Description of Artificial Sequence: Synthetic oligonucleotide
acauggaaaggugucauca

SEQ ID NO: 1008047 - RNA, 19 nt, Artificial Sequence
  Description of Artificial Sequence: Synthetic oligonucleotide
aaguguagucaagcaaauc

SEQ ID NO: 1008048 - RNA, 19 nt, Artificial Sequence
  Description of Artificial Sequence: Synthetic oligonucleotide
gaagacuugagaccuguaa

SEQ ID NO: 1008049 - RNA, 19 nt, Artificial Sequence
  Description of Artificial Sequence: Synthetic oligonucleotide
uggccuauugucagggaug

SEQ ID NO: 1008050 - RNA, 19 nt, Artificial Sequence
  Description of Artificial Sequence: Synthetic oligonucleotide
aaaccuugucuuucacgug

SEQ ID NO: 1008051 - RNA, 19 nt, Artificial Sequence
  Description of Artificial Sequence: Synthetic oligonucleotide
augagcuacuuugaggcuc

SEQ ID NO: 1008052 - RNA, 19 nt, Artificial Sequence
  Description of Artificial Sequence: Synthetic oligonucleotide
cuguuucugggauacuccc

SEQ ID NO: 1008053 - RNA, 19 nt, Artificial Sequence
  Description of Artificial Sequence: Synthetic oligonucleotide
aggcagauaguucuuugug

SEQ ID NO: 1008054 - RNA, 19 nt, Artificial Sequence
  Description of Artificial Sequence: Synthetic oligonucleotide
auuagugggugacuugaga

SEQ ID NO: 1008055 - RNA, 19 nt, Artificial Sequence
  Description of Artificial Sequence: Synthetic oligonucleotide
ugcuuugcgaucuucccaa

SEQ ID NO: 1008056 - RNA, 19 nt, Artificial Sequence
  Description of Artificial Sequence: Synthetic oligonucleotide
uauccgucaggcacugaag

SEQ ID NO: 1008057 - RNA, 19 nt, Artificial Sequence
  Description of Artificial Sequence: Synthetic oligonucleotide
guugggaaaccuguuauac

SEQ ID NO: 1008058 - RNA, 19 nt, Artificial Sequence
  Description of Artificial Sequence: Synthetic oligonucleotide
gugccuaagguucuagggc

SEQ ID NO: 1008059 - RNA, 19 nt, Artificial Sequence
  Description of Artificial Sequence: Synthetic oligonucleotide
acucccaagggccaauucu

SEQ ID NO: 1008060 - RNA, 19 nt, Artificial Sequence
  Description of Artificial Sequence: Synthetic oligonucleotide
uuccuaaguggcauucaca

SEQ ID NO: 1008061 - RNA, 19 nt, Artificial Sequence
  Description of Artificial Sequence: Synthetic oligonucleotide
guaagcugguuccaagaug

SEQ ID NO: 1008062 - RNA, 19 nt, Artificial Sequence
  Description of Artificial Sequence: Synthetic oligonucleotide
ucaacuccugagaggagac

SEQ ID NO: 1008063 - RNA, 19 nt, Artificial Sequence
  Description of Artificial Sequence: Synthetic oligonucleotide
gauguauagaguccacaaa

SEQ ID NO: 1008064 - RNA, 19 nt, Artificial Sequence
  Description of Artificial Sequence: Synthetic oligonucleotide
uugggaaaccuguuauaca

SEQ ID NO: 1008065 - RNA, 19 nt, Artificial Sequence
  Description of Artificial Sequence: Synthetic oligonucleotide
uggaguacugaggucagca

SEQ ID NO: 1008066 - RNA, 19 nt, Artificial Sequence
  Description of Artificial Sequence: Synthetic oligonucleotide
cugccuuuggcuagagucc

SEQ ID NO: 1008067 - RNA, 19 nt, Artificial Sequence
  Description of Artificial Sequence: Synthetic oligonucleotide
agaucuacaccugaauccu

SEQ ID NO: 1008068 - RNA, 19 nt, Artificial Sequence
  Description of Artificial Sequence: Synthetic oligonucleotide
uugccgguaaagcugcaga

SEQ ID NO: 1008069 - RNA, 19 nt, Artificial Sequence
  Description of Artificial Sequence: Synthetic oligonucleotide
aguggguaaguguagucaa

SEQ ID NO: 1008070 - RNA, 19 nt, Artificial Sequence
  Description of Artificial Sequence: Synthetic oligonucleotide
uuaaggcauggcucccugg

SEQ ID NO: 1008071 - RNA, 19 nt, Artificial Sequence
  Description of Artificial Sequence: Synthetic oligonucleotide
agacucucaaacugcuuug

SEQ ID NO: 1008072 - RNA, 19 nt, Artificial Sequence
  Description of Artificial Sequence: Synthetic oligonucleotide
cauuauacaaccagcagau

SEQ ID NO: 1008073 - RNA, 19 nt, Artificial Sequence
  Description of Artificial Sequence: Synthetic oligonucleotide
auguaagcugguuccaaga

SEQ ID NO: 1008074 - RNA, 19 nt, Artificial Sequence
  Description of Artificial Sequence: Synthetic oligonucleotide
auuuuagcauguccaugug

SEQ ID NO: 1008075 - RNA, 19 nt, Artificial Sequence
  Description of Artificial Sequence: Synthetic oligonucleotide
uuacuacuuuugccugugg

SEQ ID NO: 1008076 - RNA, 19 nt, Artificial Sequence
  Description of Artificial Sequence: Synthetic oligonucleotide
aaguaguacuuuguuggga

SEQ ID NO: 1008077 - RNA, 19 nt, Artificial Sequence
  Description of Artificial Sequence: Synthetic oligonucleotide
agugucuagucugggaaag

SEQ ID NO: 1008078 - RNA, 19 nt, Artificial Sequence
  Description of Artificial Sequence: Synthetic oligonucleotide
uaguacuuuguugggaaac

SEQ ID NO: 1008079 - RNA, 19 nt, Artificial Sequence
  Description of Artificial Sequence: Synthetic oligonucleotide
ucauccuuagcugcgggga

SEQ ID NO: 1008080 - RNA, 19 nt, Artificial Sequence
  Description of Artificial Sequence: Synthetic oligonucleotide
uagucaagcaaaucuucau

SEQ ID NO: 1008081 - RNA, 19 nt, Artificial Sequence
  Description of Artificial Sequence: Synthetic oligonucleotide
uugcaagaagcauccucag

SEQ ID NO: 1008082 - RNA, 19 nt, Artificial Sequence
  Description of Artificial Sequence: Synthetic oligonucleotide
ugucagggacugauguuug

SEQ ID NO: 1008083 - RNA, 19 nt, Artificial Sequence
  Description of Artificial Sequence: Synthetic oligonucleotide
uugccuauaggcagauagu

SEQ ID NO: 1008084 - RNA, 19 nt, Artificial Sequence
  Description of Artificial Sequence: Synthetic oligonucleotide
uucacgugggugucuuuag

SEQ ID NO: 1008085 - RNA, 19 nt, Artificial Sequence
  Description of Artificial Sequence: Synthetic oligonucleotide
guacuugcuggggagacag

SEQ ID NO: 1008086 - RNA, 19 nt, Artificial Sequence
  Description of Artificial Sequence: Synthetic oligonucleotide
ccuauugucagggaugagg

SEQ ID NO: 1008087 - RNA, 19 nt, Artificial Sequence
  Description of Artificial Sequence: Synthetic oligonucleotide
aggaucagucagcacaaga

SEQ ID NO: 1008088 - RNA, 19 nt, Artificial Sequence
  Description of Artificial Sequence: Synthetic oligonucleotide
ucaccagacugcuuugcga

SEQ ID NO: 1008089 - RNA, 19 nt, Artificial Sequence
  Description of Artificial Sequence: Synthetic oligonucleotide
uccagaucuacaccugaau

SEQ ID NO: 1008090 - RNA, 19 nt, Artificial Sequence
  Description of Artificial Sequence: Synthetic oligonucleotide
uagugggugacuugagagu

SEQ ID NO: 1008091 - RNA, 19 nt, Artificial Sequence
  Description of Artificial Sequence: Synthetic oligonucleotide
cauaaaggugaucggcgug

SEQ ID NO: 1008092 - RNA, 19 nt, Artificial Sequence
  Description of Artificial Sequence: Synthetic oligonucleotide
ugucugaugcagcuugcaa

SEQ ID NO: 1008093 - RNA, 19 nt, Artificial Sequence
  Description of Artificial Sequence: Synthetic oligonucleotide
cacuuuacuacuuuugccu

SEQ ID NO: 1008094 - RNA, 19 nt, Artificial Sequence
  Description of Artificial Sequence: Synthetic oligonucleotide
cagcagaaaauauaauuaa

SEQ ID NO: 1008095 - RNA, 19 nt, Artificial Sequence
  Description of Artificial Sequence: Synthetic oligonucleotide
guucuuugugucccucagg

SEQ ID NO: 1008096 - RNA, 19 nt, Artificial Sequence
  Description of Artificial Sequence: Synthetic oligonucleotide
ucuccaagacauucucugu

SEQ ID NO: 1008097 - RNA, 19 nt, Artificial Sequence
  Description of Artificial Sequence: Synthetic oligonucleotide
ugucugagacaaucaguga

SEQ ID NO: 1008098 - RNA, 19 nt, Artificial Sequence
  Description of Artificial Sequence: Synthetic oligonucleotide
ggcaaguaguacuuuguug

SEQ ID NO: 1008099 - RNA, 19 nt, Artificial Sequence
  Description of Artificial Sequence: Synthetic oligonucleotide
agaccuuggcaaaugagcu

SEQ ID NO: 1008100 - RNA, 19 nt, Artificial Sequence
  Description of Artificial Sequence: Synthetic oligonucleotide
aguucuuaacacacagcag

SEQ ID NO: 1008101 - RNA, 19 nt, Artificial Sequence
  Description of Artificial Sequence: Synthetic oligonucleotide
gcaaaugagcuacuuugag

SEQ ID NO: 1008102 - RNA, 19 nt, Artificial Sequence
  Description of Artificial Sequence: Synthetic oligonucleotide
auccgucaggcacugaaga

SEQ ID NO: 1008103 - RNA, 19 nt, Artificial Sequence
  Description of Artificial Sequence: Synthetic oligonucleotide
uaagguucuagggcguuga

SEQ ID NO: 1008104 - RNA, 19 nt, Artificial Sequence
  Description of Artificial Sequence: Synthetic oligonucleotide
gaucagucagcacaagacu

SEQ ID NO: 1008105 - RNA, 19 nt, Artificial Sequence
  Description of Artificial Sequence: Synthetic oligonucleotide
gcacaagacucucaaacug

SEQ ID NO: 1008106 - RNA, 19 nt, Artificial Sequence
  Description of Artificial Sequence: Synthetic oligonucleotide
aucaacuccugagaggaga

SEQ ID NO: 1008107 - RNA, 19 nt, Artificial Sequence
  Description of Artificial Sequence: Synthetic oligonucleotide
ucuacaccugaauccugca

SEQ ID NO: 1008108 - RNA, 19 nt, Artificial Sequence
  Description of Artificial Sequence: Synthetic oligonucleotide
uagggcguugauguaagcu

SEQ ID NO: 1008109 - RNA, 19 nt, Artificial Sequence
  Description of Artificial Sequence: Synthetic oligonucleotide
uuaaaacugggguguuauc

SEQ ID NO: 1008110 - RNA, 19 nt, Artificial Sequence
  Description of Artificial Sequence: Synthetic oligonucleotide
cucuuacccaggcuaguag

SEQ ID NO: 1008111 - RNA, 19 nt, Artificial Sequence
  Description of Artificial Sequence: Synthetic oligonucleotide
gagaguugucucuuaccca

SEQ ID NO: 1008112 - RNA, 19 nt, Artificial Sequence
  Description of Artificial Sequence: Synthetic oligonucleotide
ugcacuccucagcagcccc

SEQ ID NO: 1008113 - RNA, 19 nt, Artificial Sequence
  Description of Artificial Sequence: Synthetic oligonucleotide
caauugugggagacauuag

SEQ ID NO: 1008114 - RNA, 19 nt, Artificial Sequence
  Description of Artificial Sequence: Synthetic oligonucleotide
cuuuggcuagaguccaaug

SEQ ID NO: 1008115 - RNA, 19 nt, Artificial Sequence
  Description of Artificial Sequence: Synthetic oligonucleotide
auuauacaaccagcagauc

SEQ ID NO: 1008116 - RNA, 19 nt, Artificial Sequence
  Description of Artificial Sequence: Synthetic oligonucleotide
aagacaauuucagcucaaa

SEQ ID NO: 1008117 - RNA, 19 nt, Artificial Sequence
  Description of Artificial Sequence: Synthetic oligonucleotide
ggaucagucagcacaagac

SEQ ID NO: 1008118 - RNA, 19 nt, Artificial Sequence
  Description of Artificial Sequence: Synthetic oligonucleotide
uguugggaaaccuguuaua

SEQ ID NO: 1008119 - RNA, 19 nt, Artificial Sequence
  Description of Artificial Sequence: Synthetic oligonucleotide
aacugggguguuauccguc

SEQ ID NO: 1008120 - RNA, 19 nt, Artificial Sequence
  Description of Artificial Sequence: Synthetic oligonucleotide
uucuagggcguugauguaa

SEQ ID NO: 1008121 - RNA, 19 nt, Artificial Sequence
  Description of Artificial Sequence: Synthetic oligonucleotide
auggaaaggugucaucaua

SEQ ID NO: 1008122 - RNA, 19 nt, Artificial Sequence
  Description of Artificial Sequence: Synthetic oligonucleotide
gguaaguguagucaagcaa

SEQ ID NO: 1008123 - RNA, 19 nt, Artificial Sequence
  Description of Artificial Sequence: Synthetic oligonucleotide
cuucauccuuagcugcggg

SEQ ID NO: 1008124 - RNA, 19 nt, Artificial Sequence
  Description of Artificial Sequence: Synthetic oligonucleotide
uuagcugcggggagccuac

SEQ ID NO: 1008125 - RNA, 19 nt, Artificial Sequence
  Description of Artificial Sequence: Synthetic oligonucleotide
auccuuagcugcggggagc

SEQ ID NO: 1008126 - RNA, 19 nt, Artificial Sequence
  Description of Artificial Sequence: Synthetic oligonucleotide
agcaacgucugugacauua

SEQ ID NO: 1008127 - RNA, 19 nt, Artificial Sequence
  Description of Artificial Sequence: Synthetic oligonucleotide
ccuacacugagguucuugc

SEQ ID NO: 1008128 - RNA, 19 nt, Artificial Sequence
  Description of Artificial Sequence: Synthetic oligonucleotide
acugggguguuauccguca

SEQ ID NO: 1008129 - RNA, 19 nt, Artificial Sequence
  Description of Artificial Sequence: Synthetic oligonucleotide
uaacauuuguguugccauu

SEQ ID NO: 1008130 - RNA, 19 nt, Artificial Sequence
  Description of Artificial Sequence: Synthetic oligonucleotide
aaaggugaucggcguggcu

SEQ ID NO: 1008131 - RNA, 19 nt, Artificial Sequence
  Description of Artificial Sequence: Synthetic oligonucleotide
ggauguauagaguccacaa

SEQ ID NO: 1008132 - RNA, 19 nt, Artificial Sequence
  Description of Artificial Sequence: Synthetic oligonucleotide
caauucuuaaggcauggcu

SEQ ID NO: 1008133 - RNA, 19 nt, Artificial Sequence
  Description of Artificial Sequence: Synthetic oligonucleotide
ccuugggauguauagaguc

SEQ ID NO: 1008134 - RNA, 19 nt, Artificial Sequence
  Description of Artificial Sequence: Synthetic oligonucleotide
ugccuauaggcagauaguu

SEQ ID NO: 1008135 - RNA, 19 nt, Artificial Sequence
  Description of Artificial Sequence: Synthetic oligonucleotide
cuacccugaucgcaucugc

SEQ ID NO: 1008136 - RNA, 19 nt, Artificial Sequence
  Description of Artificial Sequence: Synthetic oligonucleotide
ucuacccugaucgcaucug

SEQ ID NO: 1008137 - RNA, 19 nt, Artificial Sequence
  Description of Artificial Sequence: Synthetic oligonucleotide
cuuaaggcauggcucccug

SEQ ID NO: 1008138 - RNA, 19 nt, Artificial Sequence
  Description of Artificial Sequence: Synthetic oligonucleotide
uugauguaagcugguucca

SEQ ID NO: 1008139 - RNA, 19 nt, Artificial Sequence
  Description of Artificial Sequence: Synthetic oligonucleotide
gcuggggagacagagaaac

SEQ ID NO: 1008140 - RNA, 19 nt, Artificial Sequence
  Description of Artificial Sequence: Synthetic oligonucleotide
cugcacauggaaagguguc

SEQ ID NO: 1008141 - RNA, 19 nt, Artificial Sequence
  Description of Artificial Sequence: Synthetic oligonucleotide
cuugcaaggaggggugagc

SEQ ID NO: 1008142 - RNA, 19 nt, Artificial Sequence
  Description of Artificial Sequence: Synthetic oligonucleotide
ggguagguacuucugcugc

SEQ ID NO: 1008143 - RNA, 19 nt, Artificial Sequence
  Description of Artificial Sequence: Synthetic oligonucleotide
aagcugguuccaagauggc

SEQ ID NO: 1008144 - RNA, 19 nt, Artificial Sequence
  Description of Artificial Sequence: Synthetic oligonucleotide
gucagcaacgucugugaca

SEQ ID NO: 1008145 - RNA, 19 nt, Artificial Sequence
  Description of Artificial Sequence: Synthetic oligonucleotide
accagacugcuuugcgauc

SEQ ID NO: 1008146 - RNA, 19 nt, Artificial Sequence
  Description of Artificial Sequence: Synthetic oligonucleotide
uuucacgugggugucuuua

SEQ ID NO: 1008147 - RNA, 19 nt, Artificial Sequence
  Description of Artificial Sequence: Synthetic oligonucleotide
uguuauccgucaggcacug

SEQ ID NO: 1008148 - RNA, 19 nt, Artificial Sequence
  Description of Artificial Sequence: Synthetic oligonucleotide
uacuaggcugaagacaauu

SEQ ID NO: 1008149 - RNA, 19 nt, Artificial Sequence
  Description of Artificial Sequence: Synthetic oligonucleotide
gcuagaguccaauguggag

SEQ ID NO: 1008150 - RNA, 19 nt, Artificial Sequence
  Description of Artificial Sequence: Synthetic oligonucleotide
aaguggcauucacagccaa

SEQ ID NO: 1008151 - RNA, 19 nt, Artificial Sequence
  Description of Artificial Sequence: Synthetic oligonucleotide
ugauguaagcugguuccaa

SEQ ID NO: 1008152 - RNA, 19 nt, Artificial Sequence
  Description of Artificial Sequence: Synthetic oligonucleotide
cugcuaagcaauuguggga

SEQ ID NO: 1008153 - RNA, 19 nt, Artificial Sequence
  Description of Artificial Sequence: Synthetic oligonucleotide
uccgucaggcacugaagaa

SEQ ID NO: 1008154 - RNA, 19 nt, Artificial Sequence
  Description of Artificial Sequence: Synthetic oligonucleotide
gcagcaguccagaagagac

SEQ ID NO: 1008155 - RNA, 19 nt, Artificial Sequence
  Description of Artificial Sequence: Synthetic oligonucleotide
gggaagauucucuccagca

SEQ ID NO: 1008156 - RNA, 19 nt, Artificial Sequence
  Description of Artificial Sequence: Synthetic oligonucleotide
uaaaggugaucggcguggc

SEQ ID NO: 1008157 - RNA, 19 nt, Artificial Sequence
  Description of Artificial Sequence: Synthetic oligonucleotide
ugagaacggccaccugucu

SEQ ID NO: 1008158 - RNA, 19 nt, Artificial Sequence
  Description of Artificial Sequence: Synthetic oligonucleotide
ugaucggcguggcucucca

SEQ ID NO: 1008159 - RNA, 19 nt, Artificial Sequence
  Description of Artificial Sequence: Synthetic oligonucleotide
aguccuugggauguauaga

SEQ ID NO: 1008160 - RNA, 19 nt, Artificial Sequence
  Description of Artificial Sequence: Synthetic oligonucleotide
ugcucacuuuacuacuuuu

SEQ ID NO: 1008161 - RNA, 19 nt, Artificial Sequence
  Description of Artificial Sequence: Synthetic oligonucleotide
aucuacccugaucgcaucu

SEQ ID NO: 1008162 - RNA, 19 nt, Artificial Sequence
  Description of Artificial Sequence: Synthetic oligonucleotide
cauccuuagcugcggggag

SEQ ID NO: 1008163 - RNA, 19 nt, Artificial Sequence
  Description of Artificial Sequence: Synthetic oligonucleotide
uucuuaaggcauggcuccc

SEQ ID NO: 1008164 - RNA, 19 nt, Artificial Sequence
  Description of Artificial Sequence: Synthetic oligonucleotide
ggcuaguagcaucacuccc

SEQ ID NO: 1008165 - RNA, 19 nt, Artificial Sequence
  Description of Artificial Sequence: Synthetic oligonucleotide
caaggaggggugagcgugc

SEQ ID NO: 1008166 - RNA, 19 nt, Artificial Sequence
  Description of Artificial Sequence: Synthetic oligonucleotide
agacauuagugggugacuu

SEQ ID NO: 1008167 - RNA, 19 nt, Artificial Sequence
  Description of Artificial Sequence: Synthetic oligonucleotide
aggcaaguaguacuuuguu

SEQ ID NO: 1008168 - RNA, 19 nt, Artificial Sequence
  Description of Artificial Sequence: Synthetic oligonucleotide
aagaguggaccugggugga

SEQ ID NO: 1008169 - RNA, 19 nt, Artificial Sequence
  Description of Artificial Sequence: Synthetic oligonucleotide
uuccaagauggcaggcuua

SEQ ID NO: 1008170 - RNA, 19 nt, Artificial Sequence
  Description of Artificial Sequence: Synthetic oligonucleotide
gcaauugugggagacauua

SEQ ID NO: 1008171 - RNA, 19 nt, Artificial Sequence
  Description of Artificial Sequence: Synthetic oligonucleotide
ucccugggguacaaucaac

SEQ ID NO: 1008172 - RNA, 19 nt, Artificial Sequence
  Description of Artificial Sequence: Synthetic oligonucleotide
ggagacauuagugggugac

SEQ ID NO: 1008173 - RNA, 19 nt, Artificial Sequence
  Description of Artificial Sequence: Synthetic oligonucleotide
gaagcauccucagugccua

SEQ ID NO: 1008174 - RNA, 19 nt, Artificial Sequence
  Description of Artificial Sequence: Synthetic oligonucleotide
gcugcugucuggccuauug

SEQ ID NO: 1008175 - RNA, 19 nt, Artificial Sequence
  Description of Artificial Sequence: Synthetic oligonucleotide
cagagaagacuugagaccu

SEQ ID NO: 1008176 - RNA, 19 nt, Artificial Sequence
  Description of Artificial Sequence: Synthetic oligonucleotide
gugucuagucugggaaagg

SEQ ID NO: 1008177 - RNA, 19 nt, Artificial Sequence
  Description of Artificial Sequence: Synthetic oligonucleotide
ucucuuacccaggcuagua

SEQ ID NO: 1008178 - RNA, 19 nt, Artificial Sequence
  Description of Artificial Sequence: Synthetic oligonucleotide
guggguaaguguagucaag

SEQ ID NO: 1008179 - RNA, 19 nt, Artificial Sequence
  Description of Artificial Sequence: Synthetic oligonucleotide
aguggcauucacagccaag

SEQ ID NO: 1008180 - RNA, 19 nt, Artificial Sequence
  Description of Artificial Sequence: Synthetic oligonucleotide
gcucacuuuacuacuuuug

SEQ ID NO: 1008181 - RNA, 19 nt, Artificial Sequence
  Description of Artificial Sequence: Synthetic oligonucleotide
ucccaagggccaauucuua

SEQ ID NO: 1008182 - RNA, 19 nt, Artificial Sequence
  Description of Artificial Sequence: Synthetic oligonucleotide
cuaagguucuagggcguug

SEQ ID NO: 1008183 - RNA, 19 nt, Artificial Sequence
  Description of Artificial Sequence: Synthetic oligonucleotide
ugcaccagugacgcuuucu

SEQ ID NO: 1008184 - RNA, 19 nt, Artificial Sequence
  Description of Artificial Sequence: Synthetic oligonucleotide
gauaguucuuugugucccu

SEQ ID NO: 1008185 - RNA, 19 nt, Artificial Sequence
  Description of Artificial Sequence: Synthetic oligonucleotide
gcaggcuuaugccauccug

SEQ ID NO: 1008186 - RNA, 19 nt, Artificial Sequence
  Description of Artificial Sequence: Synthetic oligonucleotide
aggcuuaugccauccuguu

SEQ ID NO: 1008187 - RNA, 19 nt, Artificial Sequence
  Description of Artificial Sequence: Synthetic oligonucleotide
cuagggcguugauguaagc

SEQ ID NO: 1008188 - RNA, 19 nt, Artificial Sequence
  Description of Artificial Sequence: Synthetic oligonucleotide
gcaaggaggggugagcgug

SEQ ID NO: 1008189 - RNA, 19 nt, Artificial Sequence
  Description of Artificial Sequence: Synthetic oligonucleotide
auagagucauaaaggugau

SEQ ID NO: 1008190 - RNA, 19 nt, Artificial Sequence
  Description of Artificial Sequence: Synthetic oligonucleotide
agaguacuugcuggggaga

SEQ ID NO: 1008191 - RNA, 19 nt, Artificial Sequence
  Description of Artificial Sequence: Synthetic oligonucleotide
guaguacuuuguugggaaa

SEQ ID NO: 1008192 - RNA, 19 nt, Artificial Sequence
  Description of Artificial Sequence: Synthetic oligonucleotide
cugcuuugcgaucuuccca

SEQ ID NO: 1008193 - RNA, 19 nt, Artificial Sequence
  Description of Artificial Sequence: Synthetic oligonucleotide
aacggccaccugucugaug

SEQ ID NO: 1008194 - RNA, 19 nt, Artificial Sequence
  Description of Artificial Sequence: Synthetic oligonucleotide
gcuaguagcaucacuccca

SEQ ID NO: 1008195 - RNA, 19 nt, Artificial Sequence
  Description of Artificial Sequence: Synthetic oligonucleotide
gggaguggcggucaggcga

SEQ ID NO: 1008196 - RNA, 19 nt, Artificial Sequence
  Description of Artificial Sequence: Synthetic oligonucleotide
gcagaucagcucuuccagc

SEQ ID NO: 1008197 - RNA, 19 nt, Artificial Sequence
  Description of Artificial Sequence: Synthetic oligonucleotide
gaaucuacccugaucgcau

SEQ ID NO: 1008198 - RNA, 19 nt, Artificial Sequence
  Description of Artificial Sequence: Synthetic oligonucleotide
ggguaaguguagucaagca

SEQ ID NO: 1008199 - RNA, 19 nt, Artificial Sequence
  Description of Artificial Sequence: Synthetic oligonucleotide
cagugacgcuuucuccugc

SEQ ID NO: 1008200 - RNA, 19 nt, Artificial Sequence
  Description of Artificial Sequence: Synthetic oligonucleotide
aaccuguuauacagagaaa

SEQ ID NO: 1008201 - RNA, 19 nt, Artificial Sequence
  Description of Artificial Sequence: Synthetic oligonucleotide
gaccuuggcaaaugagcua

SEQ ID NO: 1008202 - RNA, 19 nt, Artificial Sequence
  Description of Artificial Sequence: Synthetic oligonucleotide
uagagucauaaaggugauc

SEQ ID NO: 1008203 - RNA, 19 nt, Artificial Sequence
  Description of Artificial Sequence: Synthetic oligonucleotide
gugacgcuuucuccugccc

SEQ ID NO: 1008204 - RNA, 19 nt, Artificial Sequence
  Description of Artificial Sequence: Synthetic oligonucleotide
gagaagacuugagaccugu

SEQ ID NO: 1008205 - RNA, 19 nt, Artificial Sequence
  Description of Artificial Sequence: Synthetic oligonucleotide
agcugacagcaaaaugucu

SEQ ID NO: 1008206 - RNA, 19 nt, Artificial Sequence
  Description of Artificial Sequence: Synthetic oligonucleotide
gguuccagaguggggagug

SEQ ID NO: 1008207 - RNA, 19 nt, Artificial Sequence
  Description of Artificial Sequence: Synthetic oligonucleotide
ggcagauaguucuuugugu

SEQ ID NO: 1008208 - RNA, 19 nt, Artificial Sequence
  Description of Artificial Sequence: Synthetic oligonucleotide
caggcuuaugccauccugu

SEQ ID NO: 1008209 - RNA, 19 nt, Artificial Sequence
  Description of Artificial Sequence: Synthetic oligonucleotide
cugggguguuauccgucag

SEQ ID NO: 1008210 - RNA, 19 nt, Artificial Sequence
  Description of Artificial Sequence: Synthetic oligonucleotide
cugugacauuauacaacca

SEQ ID NO: 1008211 - RNA, 19 nt, Artificial Sequence
  Description of Artificial Sequence: Synthetic oligonucleotide
cguugauguaagcugguuc

SEQ ID NO: 1008212 - RNA, 19 nt, Artificial Sequence
  Description of Artificial Sequence: Synthetic oligonucleotide
agagaagacuugagaccug

SEQ ID NO: 1008213 - RNA, 19 nt, Artificial Sequence
  Description of Artificial Sequence: Synthetic oligonucleotide
gcgugcagcaguccagaag

SEQ ID NO: 1008214 - RNA, 19 nt, Artificial Sequence
  Description of Artificial Sequence: Synthetic oligonucleotide
caggcaaguaguacuuugu

SEQ ID NO: 1008215 - RNA, 19 nt, Artificial Sequence
  Description of Artificial Sequence: Synthetic oligonucleotide
ccgucaggcacugaagaag

SEQ ID NO: 1008216 - RNA, 19 nt, Artificial Sequence
  Description of Artificial Sequence: Synthetic oligonucleotide
ugcugccuuuggcuagagu

SEQ ID NO: 1008217 - RNA, 19 nt, Artificial Sequence
  Description of Artificial Sequence: Synthetic oligonucleotide
gacugauguuugucuauau

SEQ ID NO: 1008218 - RNA, 19 nt, Artificial Sequence
  Description of Artificial Sequence: Synthetic oligonucleotide
uucaggcaaguaguacuuu

SEQ ID NO: 1008219 - RNA, 19 nt, Artificial Sequence
  Description of Artificial Sequence: Synthetic oligonucleotide
gaucggcguggcucuccag

SEQ ID NO: 1008220 - RNA, 19 nt, Artificial Sequence
  Description of Artificial Sequence: Synthetic oligonucleotide
gagacauuagugggugacu

SEQ ID NO: 1008221 - RNA, 19 nt, Artificial Sequence
  Description of Artificial Sequence: Synthetic oligonucleotide
gguggaguacugaggucag

SEQ ID NO: 1008222 - RNA, 19 nt, Artificial Sequence
  Description of Artificial Sequence: Synthetic oligonucleotide
agccaaggucacaguuuac

SEQ ID NO: 1008223 - RNA, 19 nt, Artificial Sequence
  Description of Artificial Sequence: Synthetic oligonucleotide
ugucagggaugagggugca

SEQ ID NO: 1008224 - RNA, 19 nt, Artificial Sequence
  Description of Artificial Sequence: Synthetic oligonucleotide
cuucaggcaaguaguacuu

SEQ ID NO: 1008225 - RNA, 19 nt, Artificial Sequence
  Description of Artificial Sequence: Synthetic oligonucleotide
cugaucgcaucugcacaug

SEQ ID NO: 1008226 - RNA, 19 nt, Artificial Sequence
  Description of Artificial Sequence: Synthetic oligonucleotide
aggcccuuggaaggcagca

SEQ ID NO: 1008227 - RNA, 19 nt, Artificial Sequence
  Description of Artificial Sequence: Synthetic oligonucleotide
cauuccuaaguggcauuca

SEQ ID NO: 1008228 - RNA, 19 nt, Artificial Sequence
  Description of Artificial Sequence: Synthetic oligonucleotide
aauugccgguaaagcugca

SEQ ID NO: 1008229 - RNA, 19 nt, Artificial Sequence
  Description of Artificial Sequence: Synthetic oligonucleotide
aggaggggugagcgugcag

SEQ ID NO: 1008230 - RNA, 19 nt, Artificial Sequence
  Description of Artificial Sequence: Synthetic oligonucleotide
cauuuguguugccauuccu

SEQ ID NO: 1008231 - RNA, 19 nt, Artificial Sequence
  Description of Artificial Sequence: Synthetic oligonucleotide
ggucagcaacgucugugac

SEQ ID NO: 1008232 - RNA, 19 nt, Artificial Sequence
  Description of Artificial Sequence: Synthetic oligonucleotide
guacuuuguugggaaaccu

SEQ ID NO: 1008233 - RNA, 19 nt, Artificial Sequence
  Description of Artificial Sequence: Synthetic oligonucleotide
gggauguauagaguccaca

SEQ ID NO: 1008234 - RNA, 19 nt, Artificial Sequence
  Description of Artificial Sequence: Synthetic oligonucleotide
ccgguaaagcugcagagaa

SEQ ID NO: 1008235 - RNA, 19 nt, Artificial Sequence
  Description of Artificial Sequence: Synthetic oligonucleotide
acauugcaccagugacgcu

SEQ ID NO: 1008236 - RNA, 19 nt, Artificial Sequence
  Description of Artificial Sequence: Synthetic oligonucleotide
ggaguggcggucaggcgag

SEQ ID NO: 1008237 - RNA, 19 nt, Artificial Sequence
  Description of Artificial Sequence: Synthetic oligonucleotide
cauggaaaggugucaucau

SEQ ID NO: 1008238 - RNA, 19 nt, Artificial Sequence
  Description of Artificial Sequence: Synthetic oligonucleotide
ggccuauugucagggauga

SEQ ID NO: 1008239 - RNA, 19 nt, Artificial Sequence
  Description of Artificial Sequence: Synthetic oligonucleotide
uggaguccuugggauguau

SEQ ID NO: 1008240 - RNA, 19 nt, Artificial Sequence
  Description of Artificial Sequence: Synthetic oligonucleotide
ggaguacugaggucagcaa

SEQ ID NO: 1008241 - RNA, 19 nt, Artificial Sequence
  Description of Artificial Sequence: Synthetic oligonucleotide
gccuauaggcagauaguuc

SEQ ID NO: 1008242 - RNA, 19 nt, Artificial Sequence
  Description of Artificial Sequence: Synthetic oligonucleotide
cuuaugccauccuguuucu

SEQ ID NO: 1008243 - RNA, 19 nt, Artificial Sequence
  Description of Artificial Sequence: Synthetic oligonucleotide
cuuagcugcggggagccua

SEQ ID NO: 1008244 - RNA, 19 nt, Artificial Sequence
  Description of Artificial Sequence: Synthetic oligonucleotide
ggcuagaguccaaugugga

SEQ ID NO: 1008245 - RNA, 19 nt, Artificial Sequence
  Description of Artificial Sequence: Synthetic oligonucleotide
gugaucggcguggcucucc

SEQ ID NO: 1008246 - RNA, 19 nt, Artificial Sequence
  Description of Artificial Sequence: Synthetic oligonucleotide
gugggugacuugagaguac

SEQ ID NO: 1008247 - RNA, 19 nt, Artificial Sequence
  Description of Artificial Sequence: Synthetic oligonucleotide
ggcaggguagguacuucug

SEQ ID NO: 1008248 - RNA, 19 nt, Artificial Sequence
  Description of Artificial Sequence: Synthetic oligonucleotide
guguuauccgucaggcacu

SEQ ID NO: 1008249 - RNA, 19 nt, Artificial Sequence
  Description of Artificial Sequence: Synthetic oligonucleotide
gagaaacuguccagaucua

SEQ ID NO: 1008250 - RNA, 19 nt, Artificial Sequence
  Description of Artificial Sequence: Synthetic oligonucleotide
guggaguacugaggucagc

SEQ ID NO: 1008251 - RNA, 19 nt, Artificial Sequence
  Description of Artificial Sequence: Synthetic oligonucleotide
agcgugcagcaguccagaa

SEQ ID NO: 1008252 - RNA, 19 nt, Artificial Sequence
  Description of Artificial Sequence: Synthetic oligonucleotide
ggcccuguccccaccacug

SEQ ID NO: 1008253 - RNA, 19 nt, Artificial Sequence
  Description of Artificial Sequence: Synthetic oligonucleotide
gucuagucugggaaagggu

SEQ ID NO: 1008254 - RNA, 19 nt, Artificial Sequence
  Description of Artificial Sequence: Synthetic oligonucleotide
ccauuccuaaguggcauuc

SEQ ID NO: 1008255 - RNA, 19 nt, Artificial Sequence
  Description of Artificial Sequence: Synthetic oligonucleotide
uggaggaaacuggcccauc

SEQ ID NO: 1008256 - RNA, 19 nt, Artificial Sequence
  Description of Artificial Sequence: Synthetic oligonucleotide
gccuacacugagguucuug

SEQ ID NO: 1008257 - RNA, 19 nt, Artificial Sequence
  Description of Artificial Sequence: Synthetic oligonucleotide
gugggagacauuagugggu

SEQ ID NO: 1008258 - RNA, 19 nt, Artificial Sequence
  Description of Artificial Sequence: Synthetic oligonucleotide
caccugaauccugcaugac

SEQ ID NO: 1008259 - RNA, 19 nt, Artificial Sequence
  Description of Artificial Sequence: Synthetic oligonucleotide
cugucugaugcagcuugca

SEQ ID NO: 1008260 - RNA, 19 nt, Artificial Sequence
  Description of Artificial Sequence: Synthetic oligonucleotide
gaguggggaguggcgguca

SEQ ID NO: 1008261 - RNA, 19 nt, Artificial Sequence
  Description of Artificial Sequence: Synthetic oligonucleotide
acugagguucuugccuaua

SEQ ID NO: 1008262 - RNA, 19 nt, Artificial Sequence
  Description of Artificial Sequence: Synthetic oligonucleotide
guucuagggcguugaugua

SEQ ID NO: 1008263 - RNA, 19 nt, Artificial Sequence
  Description of Artificial Sequence: Synthetic oligonucleotide
gaccuggguggaguacuga

SEQ ID NO: 1008264 - RNA, 19 nt, Artificial Sequence
  Description of Artificial Sequence: Synthetic oligonucleotide
caucacucccaggggccac

SEQ ID NO: 1008265 - RNA, 19 nt, Artificial Sequence
  Description of Artificial Sequence: Synthetic oligonucleotide
ggccaccugucugaugcag

SEQ ID NO: 1008266 - RNA, 19 nt, Artificial Sequence
  Description of Artificial Sequence: Synthetic oligonucleotide
cuauaggcagauaguucuu

SEQ ID NO: 1008267 - RNA, 19 nt, Artificial Sequence
  Description of Artificial Sequence: Synthetic oligonucleotide
ggguguuauccgucaggca

SEQ ID NO: 1008268 - RNA, 19 nt, Artificial Sequence
  Description of Artificial Sequence: Synthetic oligonucleotide
gcucccugggguacaauca

SEQ ID NO: 1008269 - RNA, 19 nt, Artificial Sequence
  Description of Artificial Sequence: Synthetic oligonucleotide
agaagacuugagaccugua

SEQ ID NO: 1008270 - RNA, 19 nt, Artificial Sequence
  Description of Artificial Sequence: Synthetic oligonucleotide
auacucccaagggccaauu

SEQ ID NO: 1008271 - RNA, 19 nt, Artificial Sequence
  Description of Artificial Sequence: Synthetic oligonucleotide
ggacugauguuugucuaua

SEQ ID NO: 1008272 - RNA, 19 nt, Artificial Sequence
  Description of Artificial Sequence: Synthetic oligonucleotide
cuacaccugaauccugcau

SEQ ID NO: 1008273 - RNA, 19 nt, Artificial Sequence
  Description of Artificial Sequence: Synthetic oligonucleotide
gccgguaaagcugcagaga

SEQ ID NO: 1008274 - RNA, 19 nt, Artificial Sequence
  Description of Artificial Sequence: Synthetic oligonucleotide
aggucacaguuuacacccu

SEQ ID NO: 1008275 - RNA, 19 nt, Artificial Sequence
  Description of Artificial Sequence: Synthetic oligonucleotide
caugugaaucuacccugau

SEQ ID NO: 1008276 - RNA, 19 nt, Artificial Sequence
  Description of Artificial Sequence: Synthetic oligonucleotide
gggauacucccaagggcca

SEQ ID NO: 1008277 - RNA, 19 nt, Artificial Sequence
  Description of Artificial Sequence: Synthetic oligonucleotide
ggugagcgugcagcagucc

SEQ ID NO: 1008278 - RNA, 19 nt, Artificial Sequence
  Description of Artificial Sequence: Synthetic oligonucleotide
ggcccaguacucugccuga

SEQ ID NO: 1008279 - RNA, 19 nt, Artificial Sequence
  Description of Artificial Sequence: Synthetic oligonucleotide
gcugcggggagccuacacu

SEQ ID NO: 1008280 - RNA, 19 nt, Artificial Sequence
  Description of Artificial Sequence: Synthetic oligonucleotide
gucaggcacugaagaagaa

SEQ ID NO: 1008281 - RNA, 19 nt, Artificial Sequence
  Description of Artificial Sequence: Synthetic oligonucleotide
gcggucaggcgagggaggc

SEQ ID NO: 1008282 - RNA, 19 nt, Artificial Sequence
  Description of Artificial Sequence: Synthetic oligonucleotide
gcaggaguucuggaccaca

SEQ ID NO: 1008283 - RNA, 19 nt, Artificial Sequence
  Description of Artificial Sequence: Synthetic oligonucleotide
ccacaggcccuuggaaggc

SEQ ID NO: 1008284 - RNA, 19 nt, Artificial Sequence
  Description of Artificial Sequence: Synthetic oligonucleotide
gggguacaaucaacuccug

SEQ ID NO: 1008285 - RNA, 19 nt, Artificial Sequence
  Description of Artificial Sequence: Synthetic oligonucleotide
ggauacucccaagggccaa

SEQ ID NO: 1008286 - RNA, 19 nt, Artificial Sequence
  Description of Artificial Sequence: Synthetic oligonucleotide
ggaguccuugggauguaua

SEQ ID NO: 1008287 - RNA, 19 nt, Artificial Sequence
  Description of Artificial Sequence: Synthetic oligonucleotide
uagcugcggggagccuaca

SEQ ID NO: 1008288 - RNA, 19 nt, Artificial Sequence
  Description of Artificial Sequence: Synthetic oligonucleotide
gccuauugucagggaugag

SEQ ID NO: 1008289 - RNA, 19 nt, Artificial Sequence
  Description of Artificial Sequence: Synthetic oligonucleotide
gucuuucacgugggugucu

SEQ ID NO: 1008290 - RNA, 19 nt, Artificial Sequence
  Description of Artificial Sequence: Synthetic oligonucleotide
cacugagguucuugccuau

SEQ ID NO: 1008291 - RNA, 19 nt, Artificial Sequence
  Description of Artificial Sequence: Synthetic oligonucleotide
gaacggccaccugucugau

SEQ ID NO: 1008292 - RNA, 19 nt, Artificial Sequence
  Description of Artificial Sequence: Synthetic oligonucleotide
ccaggcuaguagcaucacu

SEQ ID NO: 1008293 - RNA, 19 nt, Artificial Sequence
  Description of Artificial Sequence: Synthetic oligonucleotide
ggcguugauguaagcuggu

SEQ ID NO: 1008294 - RNA, 19 nt, Artificial Sequence
  Description of Artificial Sequence: Synthetic oligonucleotide
cuuucacgugggugucuuu

SEQ ID NO: 1008295 - RNA, 19 nt, Artificial Sequence
  Description of Artificial Sequence: Synthetic oligonucleotide
gccauuccuaaguggcauu

SEQ ID NO: 1008296 - RNA, 19 nt, Artificial Sequence
  Description of Artificial Sequence: Synthetic oligonucleotide
gcaacgucugugacauuau

SEQ ID NO: 1008297 - RNA, 19 nt, Artificial Sequence
  Description of Artificial Sequence: Synthetic oligonucleotide
ggugaucggcguggcucuc

SEQ ID NO: 1008298 - RNA, 19 nt, Artificial Sequence
  Description of Artificial Sequence: Synthetic oligonucleotide
cguggcucuccagcucacc

SEQ ID NO: 1008299 - RNA, 19 nt, Artificial Sequence
  Description of Artificial Sequence: Synthetic oligonucleotide
gggugcagccagccaacau

SEQ ID NO: 1008300 - RNA, 19 nt, Artificial Sequence
  Description of Artificial Sequence: Synthetic oligonucleotide
gccuaagguucuagggcgu

SEQ ID NO: 1008301 - RNA, 19 nt, Artificial Sequence
  Description of Artificial Sequence: Synthetic oligonucleotide
guggugcccucuccuucau

SEQ ID NO: 1008302 - RNA, 19 nt, Artificial Sequence
  Description of Artificial Sequence: Synthetic oligonucleotide
agccuacacugagguucuu

SEQ ID NO: 1008303 - RNA, 19 nt, Artificial Sequence
  Description of Artificial Sequence: Synthetic oligonucleotide
ccuuggcaaaugagcuacu

SEQ ID NO: 1008304 - RNA, 19 nt, Artificial Sequence
  Description of Artificial Sequence: Synthetic oligonucleotide
gcguugauguaagcugguu

SEQ ID NO: 1008305 - RNA, 19 nt, Artificial Sequence
  Description of Artificial Sequence: Synthetic oligonucleotide
gccuuuggcuagaguccaa

SEQ ID NO: 1008306 - RNA, 19 nt, Artificial Sequence
  Description of Artificial Sequence: Synthetic oligonucleotide
gggugacuugagaguacuu

SEQ ID NO: 1008307 - RNA, 19 nt, Artificial Sequence
  Description of Artificial Sequence: Synthetic oligonucleotide
ccuaagguucuagggcguu

SEQ ID NO: 1008308 - RNA, 19 nt, Artificial Sequence
  Description of Artificial Sequence: Synthetic oligonucleotide
ccacaggggcugaggcccu

SEQ ID NO: 1008309 - RNA, 19 nt, Artificial Sequence
  Description of Artificial Sequence: Synthetic oligonucleotide
cagcaacgucugugacauu

SEQ ID NO: 1008310 - RNA, 19 nt, Artificial Sequence
  Description of Artificial Sequence: Synthetic oligonucleotide
cggucaggcgagggaggca

SEQ ID NO: 1008311 - RNA, 19 nt, Artificial Sequence
  Description of Artificial Sequence: Synthetic oligonucleotide
aacaucgggaguuacacuc

SEQ ID NO: 1008312 - RNA, 19 nt, Artificial Sequence
  Description of Artificial Sequence: Synthetic oligonucleotide
uuugcauucaauacggacc

SEQ ID NO: 1008313 - RNA, 19 nt, Artificial Sequence
  Description of Artificial Sequence: Synthetic oligonucleotide
uggguauacaccuaaaugc

SEQ ID NO: 1008314 - RNA, 19 nt, Artificial Sequence
  Description of Artificial Sequence: Synthetic oligonucleotide
aacuaugaacuacauagag

SEQ ID NO: 1008315 - RNA, 19 nt, Artificial Sequence
  Description of Artificial Sequence: Synthetic oligonucleotide
auauccacgccacuuaacc

SEQ ID NO: 1008316 - RNA, 19 nt, Artificial Sequence
  Description of Artificial Sequence: Synthetic oligonucleotide
aguauauacgucuuccacg

SEQ ID NO: 1008317 - RNA, 19 nt, Artificial Sequence
  Description of Artificial Sequence: Synthetic oligonucleotide
aggauuaagaguccaacac

SEQ ID NO: 1008318 - RNA, 19 nt, Artificial Sequence
  Description of Artificial Sequence: Synthetic oligonucleotide
aacaaagcuauuuugcgga

SEQ ID NO: 1008319 - RNA, 19 nt, Artificial Sequence
  Description of Artificial Sequence: Synthetic oligonucleotide
auuugcauucaauacggac

SEQ ID NO: 1008320 - RNA, 19 nt, Artificial Sequence
  Description of Artificial Sequence: Synthetic oligonucleotide
ucuaugaauacguuguaca

SEQ ID NO: 1008321 - RNA, 19 nt, Artificial Sequence
  Description of Artificial Sequence: Synthetic oligonucleotide
gauguugccauaauaggcg

SEQ ID NO: 1008322 - RNA, 19 nt, Artificial Sequence
  Description of Artificial Sequence: Synthetic oligonucleotide
cauagccacagcaacaucg

SEQ ID NO: 1008323 - RNA, 19 nt, Artificial Sequence
  Description of Artificial Sequence: Synthetic oligonucleotide
aaagcuauuuugcggaucu

SEQ ID NO: 1008324 - RNA, 19 nt, Artificial Sequence
  Description of Artificial Sequence: Synthetic oligonucleotide
aaauuuuccgccaucuuuc

SEQ ID NO: 1008325 - RNA, 19 nt, Artificial Sequence
  Description of Artificial Sequence: Synthetic oligonucleotide
gaugauuugcaacauacuc

SEQ ID NO: 1008326 - RNA, 19 nt, Artificial Sequence
  Description of Artificial Sequence: Synthetic oligonucleotide
aguuagcuaaguuuggguc

SEQ ID NO: 1008327 - RNA, 19 nt, Artificial Sequence
  Description of Artificial Sequence: Synthetic oligonucleotide
uaacaaagcuauuuugcgg

SEQ ID NO: 1008328 - RNA, 19 nt, Artificial Sequence
  Description of Artificial Sequence: Synthetic oligonucleotide
uacuccauaacaaagcuau

SEQ ID NO: 1008329 - RNA, 19 nt, Artificial Sequence
  Description of Artificial Sequence: Synthetic oligonucleotide
auaucuugguuucagcuuc

SEQ ID NO: 1008330 - RNA, 19 nt, Artificial Sequence
  Description of Artificial Sequence: Synthetic oligonucleotide
cagacuaucuauaucuugg

SEQ ID NO: 1008331 - RNA, 19 nt, Artificial Sequence
  Description of Artificial Sequence: Synthetic oligonucleotide
uuagaaacgccaagggcgg

SEQ ID NO: 1008332 - RNA, 19 nt, Artificial Sequence
  Description of Artificial Sequence: Synthetic oligonucleotide
uucuuagaaacgccaaggg

SEQ ID NO: 1008333 - RNA, 19 nt, Artificial Sequence
  Description of Artificial Sequence: Synthetic oligonucleotide
ucugguacuuuccaugucc

SEQ ID NO: 1008334 - RNA, 19 nt, Artificial Sequence
  Description of Artificial Sequence: Synthetic oligonucleotide
uucuaaucaaugcacauua

SEQ ID NO: 1008335 - RNA, 19 nt, Artificial Sequence
  Description of Artificial Sequence: Synthetic oligonucleotide
uucuuauaaucacacaggu

SEQ ID NO: 1008336 - RNA, 19 nt, Artificial Sequence
  Description of Artificial Sequence: Synthetic oligonucleotide
uuaagaguccaacaccagc

SEQ ID NO: 1008337 - RNA, 19 nt, Artificial Sequence
  Description of Artificial Sequence: Synthetic oligonucleotide
augaauacguuguacaccu

SEQ ID NO: 1008338 - RNA, 19 nt, Artificial Sequence
  Description of Artificial Sequence: Synthetic oligonucleotide
agauauugccuucugccac

SEQ ID NO: 1008339 - RNA, 19 nt, Artificial Sequence
  Description of Artificial Sequence: Synthetic oligonucleotide
acaaaaugagagauguugc

SEQ ID NO: 1008340 - RNA, 19 nt, Artificial Sequence
  Description of Artificial Sequence: Synthetic oligonucleotide
auauacgucuuccacguag

SEQ ID NO: 1008341 - RNA, 19 nt, Artificial Sequence
  Description of Artificial Sequence: Synthetic oligonucleotide
agacaauccauauggauca

SEQ ID NO: 1008342 - RNA, 19 nt, Artificial Sequence
  Description of Artificial Sequence: Synthetic oligonucleotide
aacuacauagagcugcaga

SEQ ID NO: 1008343 - RNA, 19 nt, Artificial Sequence
  Description of Artificial Sequence: Synthetic oligonucleotide
acuaugaacuacauagagc

SEQ ID NO: 1008344 - RNA, 19 nt, Artificial Sequence
  Description of Artificial Sequence: Synthetic oligonucleotide
auuaguacggaagaugcag

SEQ ID NO: 1008345 - RNA, 19 nt, Artificial Sequence
  Description of Artificial Sequence: Synthetic oligonucleotide
cauagagcugcagagaugc

SEQ ID NO: 1008346 - RNA, 19 nt, Artificial Sequence
  Description of Artificial Sequence: Synthetic oligonucleotide
aagaugcagaggucguagc

SEQ ID NO: 1008347 - RNA, 19 nt, Artificial Sequence
  Description of Artificial Sequence: Synthetic oligonucleotide
caaaaugagagauguugcc

SEQ ID NO: 1008348 - RNA, 19 nt, Artificial Sequence
  Description of Artificial Sequence: Synthetic oligonucleotide
ugucuuaagugcuauuuac

SEQ ID NO: 1008349 - RNA, 19 nt, Artificial Sequence
  Description of Artificial Sequence: Synthetic oligonucleotide
uuguuaagugcaaugccug

SEQ ID NO: 1008350 - RNA, 19 nt, Artificial Sequence
  Description of Artificial Sequence: Synthetic oligonucleotide
uucaauacggacccguuuc

SEQ ID NO: 1008351 - RNA, 19 nt, Artificial Sequence
  Description of Artificial Sequence: Synthetic oligonucleotide
cuaucuauaucuugguuuc

SEQ ID NO: 1008352 - RNA, 19 nt, Artificial Sequence
  Description of Artificial Sequence: Synthetic oligonucleotide
guuagcuaaguuugggucc

SEQ ID NO: 1008353 - RNA, 19 nt, Artificial Sequence
  Description of Artificial Sequence: Synthetic oligonucleotide
ucgggaguuacacucguag

SEQ ID NO: 1008354 - RNA, 19 nt, Artificial Sequence
  Description of Artificial Sequence: Synthetic oligonucleotide
uuuacagacuaucuauauc

SEQ ID NO: 1008355 - RNA, 19 nt, Artificial Sequence
  Description of Artificial Sequence: Synthetic oligonucleotide
uaauaggcggcauccacag

SEQ ID NO: 1008356 - RNA, 19 nt, Artificial Sequence
  Description of Artificial Sequence: Synthetic oligonucleotide
uguuguaaucaaaggugag

SEQ ID NO: 1008357 - RNA, 19 nt, Artificial Sequence
  Description of Artificial Sequence: Synthetic oligonucleotide
ugagaaugcgcacacacuu

SEQ ID NO: 1008358 - RNA, 19 nt, Artificial Sequence
  Description of Artificial Sequence: Synthetic oligonucleotide
aaugcgcacacacuugaga

SEQ ID NO: 1008359 - RNA, 19 nt, Artificial Sequence
  Description of Artificial Sequence: Synthetic oligonucleotide
ugcuauuuacagacuaucu

SEQ ID NO: 1008360 - RNA, 19 nt, Artificial Sequence
  Description of Artificial Sequence: Synthetic oligonucleotide
acuaugguugacaaaauga

SEQ ID NO: 1008361 - RNA, 19 nt, Artificial Sequence
  Description of Artificial Sequence: Synthetic oligonucleotide
cuggguauacaccuaaaug

SEQ ID NO: 1008362 - RNA, 19 nt, Artificial Sequence
  Description of Artificial Sequence: Synthetic oligonucleotide
gagacaauccauauggauc

SEQ ID NO: 1008363 - RNA, 19 nt, Artificial Sequence
  Description of Artificial Sequence: Synthetic oligonucleotide
uucuaguaguuccaguggu

SEQ ID NO: 1008364 - RNA, 19 nt, Artificial Sequence
  Description of Artificial Sequence: Synthetic oligonucleotide
uaucgcaugccaaggcagg

SEQ ID NO: 1008365 - RNA, 19 nt, Artificial Sequence
  Description of Artificial Sequence: Synthetic oligonucleotide
uauuuacagacuaucuaua

SEQ ID NO: 1008366 - RNA, 19 nt, Artificial Sequence
  Description of Artificial Sequence: Synthetic oligonucleotide
ucuaaccugugccaggcac

SEQ ID NO: 1008367 - RNA, 19 nt, Artificial Sequence
  Description of Artificial Sequence: Synthetic oligonucleotide
uagauauugccuucugcca

SEQ ID NO: 1008368 - RNA, 19 nt, Artificial Sequence
  Description of Artificial Sequence: Synthetic oligonucleotide
auuuucggcaagcuguugu

SEQ ID NO: 1008369 - RNA, 19 nt, Artificial Sequence
  Description of Artificial Sequence: Synthetic oligonucleotide
auuuacagacuaucuauau

SEQ ID NO: 1008370 - RNA, 19 nt, Artificial Sequence
  Description of Artificial Sequence: Synthetic oligonucleotide
  modified_base (2)..(2): a, c, u, g, unknown or other
unuguucuggggcugaguu

SEQ ID NO: 1008371 - RNA, 19 nt, Artificial Sequence
  Description of Artificial Sequence: Synthetic oligonucleotide
aagugcuauuuacagacua

SEQ ID NO: 1008372 - RNA, 19 nt, Artificial Sequence
  Description of Artificial Sequence: Synthetic oligonucleotide
gacaaguggaggcagacaa

SEQ ID NO: 1008373 - RNA, 19 nt, Artificial Sequence
  Description of Artificial Sequence: Synthetic oligonucleotide
uaguacggaagaugcagag

SEQ ID NO: 1008374 - RNA, 19 nt, Artificial Sequence
  Description of Artificial Sequence: Synthetic oligonucleotide
uauacaccuaaaugcucag

SEQ ID NO: 1008375 - RNA, 19 nt, Artificial Sequence
  Description of Artificial Sequence: Synthetic oligonucleotide
agguaguuagcuaaguuug

SEQ ID NO: 1008376 - RNA, 19 nt, Artificial Sequence
  Description of Artificial Sequence: Synthetic oligonucleotide
ucugagucgggauauccac

SEQ ID NO: 1008377 - RNA, 19 nt, Artificial Sequence
  Description of Artificial Sequence: Synthetic oligonucleotide
uauaucuugguuucagcuu

SEQ ID NO: 1008378 - RNA, 19 nt, Artificial Sequence
  Description of Artificial Sequence: Synthetic oligonucleotide
cacaguauauacgucuucc

SEQ ID NO: 1008379 - RNA, 19 nt, Artificial Sequence
  Description of Artificial Sequence: Synthetic oligonucleotide
aagggcgggacaagaaagc

SEQ ID NO: 1008380 - RNA, 19 nt, Artificial Sequence
  Description of Artificial Sequence: Synthetic oligonucleotide
caaguguuuucugagucgg

SEQ ID NO: 1008381 - RNA, 19 nt, Artificial Sequence
  Description of Artificial Sequence: Synthetic oligonucleotide
acgguuagggcaaucauag

SEQ ID NO: 1008382 - RNA, 19 nt, Artificial Sequence
  Description of Artificial Sequence: Synthetic oligonucleotide
uuaguguggcuucaaacuu

SEQ ID NO: 1008383 - RNA, 19 nt, Artificial Sequence
  Description of Artificial Sequence: Synthetic oligonucleotide
ucaaacuucucagggcuag

SEQ ID NO: 1008384 - RNA, 19 nt, Artificial Sequence
  Description of Artificial Sequence: Synthetic oligonucleotide
ucaaagucauaaagauucu

SEQ ID NO: 1008385 - RNA, 19 nt, Artificial Sequence
  Description of Artificial Sequence: Synthetic oligonucleotide
gacgcuucggccuugagcu

SEQ ID NO: 1008386 - RNA, 19 nt, Artificial Sequence
  Description of Artificial Sequence: Synthetic oligonucleotide
acgccacuuaaccagguag

SEQ ID NO: 1008387 - RNA, 19 nt, Artificial Sequence
  Description of Artificial Sequence: Synthetic oligonucleotide
gaggauuaagaguccaaca

SEQ ID NO: 1008388 - RNA, 19 nt, Artificial Sequence
  Description of Artificial Sequence: Synthetic oligonucleotide
ugacgcuucggccuugagc

SEQ ID NO: 1008389 - RNA, 19 nt, Artificial Sequence
  Description of Artificial Sequence: Synthetic oligonucleotide
uaugaacuacauagagcug

SEQ ID NO: 1008390 - RNA, 19 nt, Artificial Sequence
  Description of Artificial Sequence: Synthetic oligonucleotide
caagagggcagcaguagag

SEQ ID NO: 1008391 - RNA, 19 nt, Artificial Sequence
  Description of Artificial Sequence: Synthetic oligonucleotide
cacggaucuucuuauaauc

SEQ ID NO: 1008392 - RNA, 19 nt, Artificial Sequence
  Description of Artificial Sequence: Synthetic oligonucleotide
ugguugacaaaaugagaga

SEQ ID NO: 1008393 - RNA, 19 nt, Artificial Sequence
  Description of Artificial Sequence: Synthetic oligonucleotide
guuaguguggcuucaaacu

SEQ ID NO: 1008394 - RNA, 19 nt, Artificial Sequence
  Description of Artificial Sequence: Synthetic oligonucleotide
uguugucccacauuugcau

SEQ ID NO: 1008395 - RNA, 19 nt, Artificial Sequence
  Description of Artificial Sequence: Synthetic oligonucleotide
agaaugcgcacacacuuga

SEQ ID NO: 1008396 - RNA, 19 nt, Artificial Sequence
  Description of Artificial Sequence: Synthetic oligonucleotide
ucuggccuagauauugccu

SEQ ID NO: 1008397 - RNA, 19 nt, Artificial Sequence
  Description of Artificial Sequence: Synthetic oligonucleotide
aagaaagcgaugcggggua

SEQ ID NO: 1008398 - RNA, 19 nt, Artificial Sequence
  Description of Artificial Sequence: Synthetic oligonucleotide
uuagcuaaguuugggucca

SEQ ID NO: 1008399 - RNA, 19 nt, Artificial Sequence
  Description of Artificial Sequence: Synthetic oligonucleotide
ugaaugcaucccaauucca

SEQ ID NO: 1008400 - RNA, 19 nt, Artificial Sequence
  Description of Artificial Sequence: Synthetic oligonucleotide
uuucugagucgggauaucc

SEQ ID NO: 1008401 - RNA, 19 nt, Artificial Sequence
  Description of Artificial Sequence: Synthetic oligonucleotide
auuuugcggaucuuuucca

SEQ ID NO: 1008402 - RNA, 19 nt, Artificial Sequence
  Description of Artificial Sequence: Synthetic oligonucleotide
auugucuuaagugcuauuu

SEQ ID NO: 1008403 - RNA, 19 nt, Artificial Sequence
  Description of Artificial Sequence: Synthetic oligonucleotide
acacucguagggaugggcc

SEQ ID NO: 1008404 - RNA, 19 nt, Artificial Sequence
  Description of Artificial Sequence: Synthetic oligonucleotide
aaagcuuggccagucggca

SEQ ID NO: 1008405 - RNA, 19 nt, Artificial Sequence
  Description of Artificial Sequence: Synthetic oligonucleotide
ucucccacauacuccauaa

SEQ ID NO: 1008406 - RNA, 19 nt, Artificial Sequence
  Description of Artificial Sequence: Synthetic oligonucleotide
cuuaagugcuauuuacaga

SEQ ID NO: 1008407 - RNA, 19 nt, Artificial Sequence
  Description of Artificial Sequence: Synthetic oligonucleotide
cuauuuacagacuaucuau

SEQ ID NO: 1008408 - RNA, 19 nt, Artificial Sequence
  Description of Artificial Sequence: Synthetic oligonucleotide
gauauugccuucugccaca

SEQ ID NO: 1008409 - RNA, 19 nt, Artificial Sequence
  Description of Artificial Sequence: Synthetic oligonucleotide
uauccacgccacuuaacca

SEQ ID NO: 1008410 - RNA, 19 nt, Artificial Sequence
  Description of Artificial Sequence: Synthetic oligonucleotide
guauauacgucuuccacgu

SEQ ID NO: 1008411 - RNA, 19 nt, Artificial Sequence
  Description of Artificial Sequence: Synthetic oligonucleotide
agacuaucuauaucuuggu

SEQ ID NO: 1008412 - RNA, 19 nt, Artificial Sequence
  Description of Artificial Sequence: Synthetic oligonucleotide
gaagagguauuuucggcaa

SEQ ID NO: 1008413 - RNA, 19 nt, Artificial Sequence
  Description of Artificial Sequence: Synthetic oligonucleotide
ugcuugagaaugcgcacac

SEQ ID NO: 1008414 - RNA, 19 nt, Artificial Sequence
  Description of Artificial Sequence: Synthetic oligonucleotide
uuaaccagguaguacucuu

SEQ ID NO: 1008415 - RNA, 19 nt, Artificial Sequence
  Description of Artificial Sequence: Synthetic oligonucleotide
ucgacuucaaagucauaaa

SEQ ID NO: 1008416 - RNA, 19 nt, Artificial Sequence
  Description of Artificial Sequence: Synthetic oligonucleotide
aguacggaagaugcagagg

SEQ ID NO: 1008417 - RNA, 19 nt, Artificial Sequence
  Description of Artificial Sequence: Synthetic oligonucleotide
acuggguauacaccuaaau

SEQ ID NO: 1008418 - RNA, 19 nt, Artificial Sequence
  Description of Artificial Sequence: Synthetic oligonucleotide
ugguaucgcaugccaaggc

SEQ ID NO: 1008419 - RNA, 19 nt, Artificial Sequence
  Description of Artificial Sequence: Synthetic oligonucleotide
gaagcugauuccaggauga

SEQ ID NO: 1008420 - RNA, 19 nt, Artificial Sequence
  Description of Artificial Sequence: Synthetic oligonucleotide
cugagucgggauauccacg

SEQ ID NO: 1008421 - RNA, 19 nt, Artificial Sequence
  Description of Artificial Sequence: Synthetic oligonucleotide
ggccagucggcacagaucc

SEQ ID NO: 1008422 - RNA, 19 nt, Artificial Sequence
  Description of Artificial Sequence: Synthetic oligonucleotide
guacggaagaugcagaggu

SEQ ID NO: 1008423 - RNA, 19 nt, Artificial Sequence
  Description of Artificial Sequence: Synthetic oligonucleotide
augcgcacacacuugagau

SEQ ID NO: 1008424 - RNA, 19 nt, Artificial Sequence
  Description of Artificial Sequence: Synthetic oligonucleotide
ucuaaucaaugcacauuau

SEQ ID NO: 1008425 - RNA, 19 nt, Artificial Sequence
  Description of Artificial Sequence: Synthetic oligonucleotide
gcuguugucccacauuugc

SEQ ID NO: 1008426 - RNA, 19 nt, Artificial Sequence
  Description of Artificial Sequence: Synthetic oligonucleotide
uuccagugguaucgcaugc

SEQ ID NO: 1008427 - RNA, 19 nt, Artificial Sequence
  Description of Artificial Sequence: Synthetic oligonucleotide
ucuaguaguuccaguggua

SEQ ID NO: 1008428 - RNA, 19 nt, Artificial Sequence
  Description of Artificial Sequence: Synthetic oligonucleotide
agucgggauauccacgcca

SEQ ID NO: 1008429 - RNA, 19 nt, Artificial Sequence
  Description of Artificial Sequence: Synthetic oligonucleotide
uaagugcuauuuacagacu

SEQ ID NO: 1008430 - RNA, 19 nt, Artificial Sequence
  Description of Artificial Sequence: Synthetic oligonucleotide
acgggguccacuugcaugu

SEQ ID NO: 1008431 - RNA, 19 nt, Artificial Sequence
  Description of Artificial Sequence: Synthetic oligonucleotide
cucgcccaucauuaguacg

SEQ ID NO: 1008432 - RNA, 19 nt, Artificial Sequence
  Description of Artificial Sequence: Synthetic oligonucleotide
uacacgguuagggcaauca

SEQ ID NO: 1008433 - RNA, 19 nt, Artificial Sequence
  Description of Artificial Sequence: Synthetic oligonucleotide
acaauccauauggaucagg

SEQ ID NO: 1008434 - RNA, 19 nt, Artificial Sequence
  Description of Artificial Sequence: Synthetic oligonucleotide
uagcggaugccuuucugga

SEQ ID NO: 1008435 - RNA, 19 nt, Artificial Sequence
  Description of Artificial Sequence: Synthetic oligonucleotide
gaugggccaauccaggucu

SEQ ID NO: 1008436 - RNA, 19 nt, Artificial Sequence
  Description of Artificial Sequence: Synthetic oligonucleotide
  modified_base (5)..(5): a, c, u, g, unknown or other
uuuunuguucuggggcuga

SEQ ID NO: 1008437 - RNA, 19 nt, Artificial Sequence
  Description of Artificial Sequence: Synthetic oligonucleotide
  modified_base (4)..(4): a, c, u, g, unknown or other
uuunuguucuggggcugag

SEQ ID NO: 1008438 - RNA, 19 nt, Artificial Sequence
  Description of Artificial Sequence: Synthetic oligonucleotide
aagcgaugcgggguagucg

SEQ ID NO: 1008439 - RNA, 19 nt, Artificial Sequence
  Description of Artificial Sequence: Synthetic oligonucleotide
cucgacuucaaagucauaa

SEQ ID NO: 1008440 - RNA, 19 nt, Artificial Sequence
  Description of Artificial Sequence: Synthetic oligonucleotide
auacgucuuccacguaguc

SEQ ID NO: 1008441 - RNA, 19 nt, Artificial Sequence
  Description of Artificial Sequence: Synthetic oligonucleotide
cauuauugucuuaagugcu

SEQ ID NO: 1008442 - RNA, 19 nt, Artificial Sequence
  Description of Artificial Sequence: Synthetic oligonucleotide
ugcaucccaauuccaggga

SEQ ID NO: 1008443 - RNA, 19 nt, Artificial Sequence
  Description of Artificial Sequence: Synthetic oligonucleotide
aggacaaguggaggcagac

SEQ ID NO: 1008444 - RNA, 19 nt, Artificial Sequence
  Description of Artificial Sequence: Synthetic oligonucleotide
guaucgcaugccaaggcag

SEQ ID NO: 1008445 - RNA, 19 nt, Artificial Sequence
  Description of Artificial Sequence: Synthetic oligonucleotide
cacuuaaccagguaguacu

SEQ ID NO: 1008446 - RNA, 19 nt, Artificial Sequence
  Description of Artificial Sequence: Synthetic oligonucleotide
gaacuaugaacuacauaga

SEQ ID NO: 1008447 - RNA, 19 nt, Artificial Sequence
  Description of Artificial Sequence: Synthetic oligonucleotide
uacggacccguuucuuggg

SEQ ID NO: 1008448 - RNA, 19 nt, Artificial Sequence
  Description of Artificial Sequence: Synthetic oligonucleotide
acuuaaccagguaguacuc

SEQ ID NO: 1008449 - RNA, 19 nt, Artificial Sequence
  Description of Artificial Sequence: Synthetic oligonucleotide
agguugucuaugaauacgu

SEQ ID NO: 1008450 - RNA, 19 nt, Artificial Sequence
  Description of Artificial Sequence: Synthetic oligonucleotide
ugugguuuucaaggcuucc

SEQ ID NO: 1008451 - RNA, 19 nt, Artificial Sequence
  Description of Artificial Sequence: Synthetic oligonucleotide
auucaauacggacccguuu

SEQ ID NO: 1008452 - RNA, 19 nt, Artificial Sequence
  Description of Artificial Sequence: Synthetic oligonucleotide
ugcagguugggaucacaac

SEQ ID NO: 1008453 - RNA, 19 nt, Artificial Sequence
  Description of Artificial Sequence: Synthetic oligonucleotide
uuucggcaagcuguugucc

SEQ ID NO: 1008454 - RNA, 19 nt, Artificial Sequence
  Description of Artificial Sequence: Synthetic oligonucleotide
gucuaugaauacguuguac

SEQ ID NO: 1008455 - RNA, 19 nt, Artificial Sequence
  Description of Artificial Sequence: Synthetic oligonucleotide
gagaaugcgcacacacuug

SEQ ID NO: 1008456 - RNA, 19 nt, Artificial Sequence
  Description of Artificial Sequence: Synthetic oligonucleotide
auauggaucaggugcucua

SEQ ID NO: 1008457 - RNA, 19 nt, Artificial Sequence
  Description of Artificial Sequence: Synthetic oligonucleotide
uacacucguagggaugggc

SEQ ID NO: 1008458 - RNA, 19 nt, Artificial Sequence
  Description of Artificial Sequence: Synthetic oligonucleotide
cugggcguuguuaagugca

SEQ ID NO: 1008459 - RNA, 19 nt, Artificial Sequence
  Description of Artificial Sequence: Synthetic oligonucleotide
ggcguuguuaagugcaaug

SEQ ID NO: 1008460 - RNA, 19 nt, Artificial Sequence
  Description of Artificial Sequence: Synthetic oligonucleotide
aacgccaagggcgggacaa

SEQ ID NO: 1008461 - RNA, 19 nt, Artificial Sequence
  Description of Artificial Sequence: Synthetic oligonucleotide
guugccauaauaggcggca

SEQ ID NO: 1008462 - RNA, 19 nt, Artificial Sequence
  Description of Artificial Sequence: Synthetic oligonucleotide
ugaauacguuguacaccug

SEQ ID NO: 1008463 - RNA, 19 nt, Artificial Sequence
  Description of Artificial Sequence: Synthetic oligonucleotide
uaccucauuucuccacagu

SEQ ID NO: 1008464 - RNA, 19 nt, Artificial Sequence
  Description of Artificial Sequence: Synthetic oligonucleotide
ggcgggacaagaaagcuug

SEQ ID NO: 1008465 - RNA, 19 nt, Artificial Sequence
  Description of Artificial Sequence: Synthetic oligonucleotide
uucaaacuucucagggcua

SEQ ID NO: 1008466 - RNA, 19 nt, Artificial Sequence
  Description of Artificial Sequence: Synthetic oligonucleotide
cacgggguccacuugcaug

SEQ ID NO: 1008467 - RNA, 19 nt, Artificial Sequence
  Description of Artificial Sequence: Synthetic oligonucleotide
gaugcgucccagguggcug

SEQ ID NO: 1008468 - RNA, 19 nt, Artificial Sequence
  Description of Artificial Sequence: Synthetic oligonucleotide
gcuauuuacagacuaucua

SEQ ID NO: 1008469 - RNA, 19 nt, Artificial Sequence
  Description of Artificial Sequence: Synthetic oligonucleotide
gcauguuguaaucaaaggu

SEQ ID NO: 1008470 - RNA, 19 nt, Artificial Sequence
  Description of Artificial Sequence: Synthetic oligonucleotide
uauggaucaggugcucuaa

SEQ ID NO: 1008471 - RNA, 19 nt, Artificial Sequence
  Description of Artificial Sequence: Synthetic oligonucleotide
acaucgggaguuacacucg

SEQ ID NO: 1008472 - RNA, 19 nt, Artificial Sequence
  Description of Artificial Sequence: Synthetic oligonucleotide
acggacccguuucuugggg

SEQ ID NO: 1008473 - RNA, 19 nt, Artificial Sequence
  Description of Artificial Sequence: Synthetic oligonucleotide
aauaggcggcauccacagu

SEQ ID NO: 1008474 - RNA, 19 nt, Artificial Sequence
  Description of Artificial Sequence: Synthetic oligonucleotide
gugcuauuuacagacuauc

SEQ ID NO: 1008475 - RNA, 19 nt, Artificial Sequence
  Description of Artificial Sequence: Synthetic oligonucleotide
agcuucuaaucaaugcaca

SEQ ID NO: 1008476 - RNA, 19 nt, Artificial Sequence
  Description of Artificial Sequence: Synthetic oligonucleotide
acaaagcuauuuugcggau

SEQ ID NO: 1008477 - RNA, 19 nt, Artificial Sequence
  Description of Artificial Sequence: Synthetic oligonucleotide
cauuaguacggaagaugca

SEQ ID NO: 1008478 - RNA, 19 nt, Artificial Sequence
  Description of Artificial Sequence: Synthetic oligonucleotide
caugggugaaugcauccca

SEQ ID NO: 1008479 - RNA, 19 nt, Artificial Sequence
  Description of Artificial Sequence: Synthetic oligonucleotide
uacggaagaugcagagguc

SEQ ID NO: 1008480 - RNA, 19 nt, Artificial Sequence
  Description of Artificial Sequence: Synthetic oligonucleotide
ggaggauuaagaguccaac

SEQ ID NO: 1008481 - RNA, 19 nt, Artificial Sequence
  Description of Artificial Sequence: Synthetic oligonucleotide
aucgcaugccaaggcaggg

SEQ ID NO: 1008482 - RNA, 19 nt, Artificial Sequence
  Description of Artificial Sequence: Synthetic oligonucleotide
agcuuggccagucggcaca

SEQ ID NO: 1008483 - RNA, 19 nt, Artificial Sequence
  Description of Artificial Sequence: Synthetic oligonucleotide
uauugucuuaagugcuauu

SEQ ID NO: 1008484 - RNA, 19 nt, Artificial Sequence
  Description of Artificial Sequence: Synthetic oligonucleotide
ucgccugcccagaugguuc

SEQ ID NO: 1008485 - RNA, 19 nt, Artificial Sequence
  Description of Artificial Sequence: Synthetic oligonucleotide
guacucgacuucaaaguca

SEQ ID NO: 1008486 - RNA, 19 nt, Artificial Sequence
  Description of Artificial Sequence: Synthetic oligonucleotide
gcaacaucgggaguuacac

SEQ ID NO: 1008487 - RNA, 19 nt, Artificial Sequence
  Description of Artificial Sequence: Synthetic oligonucleotide
gguaucgcaugccaaggca

SEQ ID NO: 1008488 - RNA, 19 nt, Artificial Sequence
  Description of Artificial Sequence: Synthetic oligonucleotide
cucacggaucuucuuauaa

SEQ ID NO: 1008489 - RNA, 19 nt, Artificial Sequence
  Description of Artificial Sequence: Synthetic oligonucleotide
ugcauucaauacggacccg

SEQ ID NO: 1008490 - RNA, 19 nt, Artificial Sequence
  Description of Artificial Sequence: Synthetic oligonucleotide
  modified_base (3)..(3): a, c, u, g, unknown or other
uunuguucuggggcugagu

SEQ ID NO: 1008491 - RNA, 19 nt, Artificial Sequence
  Description of Artificial Sequence: Synthetic oligonucleotide
gaacuacauagagcugcag

SEQ ID NO: 1008492 - RNA, 19 nt, Artificial Sequence
  Description of Artificial Sequence: Synthetic oligonucleotide
caggucuaccucauuucuc

SEQ ID NO: 1008493 - RNA, 19 nt, Artificial Sequence
  Description of Artificial Sequence: Synthetic oligonucleotide
gcguuguuaagugcaaugc

SEQ ID NO: 1008494 - RNA, 19 nt, Artificial Sequence
  Description of Artificial Sequence: Synthetic oligonucleotide
ucccaauuccagggaaccc

SEQ ID NO: 1008495 - RNA, 19 nt, Artificial Sequence
  Description of Artificial Sequence: Synthetic oligonucleotide
gacuacacgguuagggcaa

SEQ ID NO: 1008496 - RNA, 19 nt, Artificial Sequence
  Description of Artificial Sequence: Synthetic oligonucleotide
acacgguuagggcaaucau

SEQ ID NO: 1008497 - RNA, 19 nt, Artificial Sequence
  Description of Artificial Sequence: Synthetic oligonucleotide
ucaccagaacacugacccu

SEQ ID NO: 1008498 - RNA, 19 nt, Artificial Sequence
  Description of Artificial Sequence: Synthetic oligonucleotide
cuaaucaaugcacauuauu

SEQ ID NO: 1008499 - RNA, 19 nt, Artificial Sequence
  Description of Artificial Sequence: Synthetic oligonucleotide
cccagaugguucuuguggc

SEQ ID NO: 1008500 - RNA, 19 nt, Artificial Sequence
  Description of Artificial Sequence: Synthetic oligonucleotide
uauauacgucuuccacgua

SEQ ID NO: 1008501 - RNA, 19 nt, Artificial Sequence
  Description of Artificial Sequence: Synthetic oligonucleotide
cguuguuaagugcaaugcc

SEQ ID NO: 1008502 - RNA, 19 nt, Artificial Sequence
  Description of Artificial Sequence: Synthetic oligonucleotide
uggccuagauauugccuuc

SEQ ID NO: 1008503 - RNA, 19 nt, Artificial Sequence
  Description of Artificial Sequence: Synthetic oligonucleotide
ugggcguuguuaagugcaa

SEQ ID NO: 1008504 - RNA, 19 nt, Artificial Sequence
  Description of Artificial Sequence: Synthetic oligonucleotide
uguccacgggguccacuug

SEQ ID NO: 1008505 - RNA, 19 nt, Artificial Sequence
  Description of Artificial Sequence: Synthetic oligonucleotide
cagguaguuagcuaaguuu

SEQ ID NO: 1008506 - RNA, 19 nt, Artificial Sequence
  Description of Artificial Sequence: Synthetic oligonucleotide
aaacgccaagggcgggaca

SEQ ID NO: 1008507 - RNA, 19 nt, Artificial Sequence
  Description of Artificial Sequence: Synthetic oligonucleotide
gaaacgccaagggcgggac

SEQ ID NO: 1008508 - RNA, 19 nt, Artificial Sequence
  Description of Artificial Sequence: Synthetic oligonucleotide
cagguugggaucacaacua

SEQ ID NO: 1008509 - RNA, 19 nt, Artificial Sequence
  Description of Artificial Sequence: Synthetic oligonucleotide
ugcgcacacacuugagauu

SEQ ID NO: 1008510 - RNA, 19 nt, Artificial Sequence
  Description of Artificial Sequence: Synthetic oligonucleotide
agaaacgccaagggcggga

SEQ ID NO: 1008511 - RNA, 19 nt, Artificial Sequence
  Description of Artificial Sequence: Synthetic oligonucleotide
cuuugaccggcggugccgc

SEQ ID NO: 1008512 - RNA, 19 nt, Artificial Sequence
  Description of Artificial Sequence: Synthetic oligonucleotide
uggcggucguagaucuggc

SEQ ID NO: 1008513 - RNA, 19 nt, Artificial Sequence
  Description of Artificial Sequence: Synthetic oligonucleotide
cacgguuagggcaaucaua

SEQ ID NO: 1008514 - RNA, 19 nt, Artificial Sequence
  Description of Artificial Sequence: Synthetic oligonucleotide
agcaacaucgggaguuaca

SEQ ID NO: 1008515 - RNA, 19 nt, Artificial Sequence
  Description of Artificial Sequence: Synthetic oligonucleotide
cagugaugcgucccaggug

SEQ ID NO: 1008516 - RNA, 19 nt, Artificial Sequence
  Description of Artificial Sequence: Synthetic oligonucleotide
ggaguuacacucguaggga

SEQ ID NO: 1008517 - RNA, 19 nt, Artificial Sequence
  Description of Artificial Sequence: Synthetic oligonucleotide
ucaguuaguguggcuucaa

SEQ ID NO: 1008518 - RNA, 19 nt, Artificial Sequence
  Description of Artificial Sequence: Synthetic oligonucleotide
gucgggauauccacgccac

SEQ ID NO: 1008519 - RNA, 19 nt, Artificial Sequence
  Description of Artificial Sequence: Synthetic oligonucleotide
cauuugcauucaauacgga

SEQ ID NO: 1008520 - RNA, 19 nt, Artificial Sequence
  Description of Artificial Sequence: Synthetic oligonucleotide
guuuccagcacuggguaua

SEQ ID NO: 1008521 - RNA, 19 nt, Artificial Sequence
  Description of Artificial Sequence: Synthetic oligonucleotide
gaguuacacucguagggau

SEQ ID NO: 1008522 - RNA, 19 nt, Artificial Sequence
  Description of Artificial Sequence: Synthetic oligonucleotide
ggagaagcucucuuucuaa

SEQ ID NO: 1008523 - RNA, 19 nt, Artificial Sequence
  Description of Artificial Sequence: Synthetic oligonucleotide
ucguagcggaugccuuucu

SEQ ID NO: 1008524 - RNA, 19 nt, Artificial Sequence
  Description of Artificial Sequence: Synthetic oligonucleotide
ucgggauauccacgccacu

SEQ ID NO: 1008525 - RNA, 19 nt, Artificial Sequence
  Description of Artificial Sequence: Synthetic oligonucleotide
cacucguagggaugggcca

SEQ ID NO: 1008526 - RNA, 19 nt, Artificial Sequence
  Description of Artificial Sequence: Synthetic oligonucleotide
ggcugggcguuguuaagug

SEQ ID NO: 1008527 - RNA, 19 nt, Artificial Sequence
  Description of Artificial Sequence: Synthetic oligonucleotide
gucaaagagguagguggca

SEQ ID NO: 1008528 - RNA, 19 nt, Artificial Sequence
  Description of Artificial Sequence: Synthetic oligonucleotide
gcucuaaccugugccaggc

SEQ ID NO: 1008529 - RNA, 19 nt, Artificial Sequence
  Description of Artificial Sequence: Synthetic oligonucleotide
cucccagcggcugcagugc

SEQ ID NO: 1008530 - RNA, 19 nt, Artificial Sequence
  Description of Artificial Sequence: Synthetic oligonucleotide
cagcgugcggacaccccag

SEQ ID NO: 1008531 - RNA, 19 nt, Artificial Sequence
  Description of Artificial Sequence: Synthetic oligonucleotide
gcuuugaccggcggugccg

SEQ ID NO: 1008532 - RNA, 19 nt, Artificial Sequence
  Description of Artificial Sequence: Synthetic oligonucleotide
ggguauacaccuaaaugcu

SEQ ID NO: 1008533 - RNA, 19 nt, Artificial Sequence
  Description of Artificial Sequence: Synthetic oligonucleotide
cuggccuagauauugccuu

SEQ ID NO: 1008534 - RNA, 19 nt, Artificial Sequence
  Description of Artificial Sequence: Synthetic oligonucleotide
ucaggccccuucaguuagu

SEQ ID NO: 1008535 - RNA, 19 nt, Artificial Sequence
  Description of Artificial Sequence: Synthetic oligonucleotide
aagcugauuccaggaugau

SEQ ID NO: 1008536 - RNA, 19 nt, Artificial Sequence
  Description of Artificial Sequence: Synthetic oligonucleotide
aggaggauuaagaguccaa

SEQ ID NO: 1008537 - RNA, 19 nt, Artificial Sequence
  Description of Artificial Sequence: Synthetic oligonucleotide
cucugcagccuuuuaaauu

SEQ ID NO: 1008538 - RNA, 19 nt, Artificial Sequence
  Description of Artificial Sequence: Synthetic oligonucleotide
gaggacaaguggaggcaga

SEQ ID NO: 1008539 - RNA, 19 nt, Artificial Sequence
  Description of Artificial Sequence: Synthetic oligonucleotide
gcugggcguuguuaagugc

SEQ ID NO: 1008540 - RNA, 19 nt, Artificial Sequence
  Description of Artificial Sequence: Synthetic oligonucleotide
cgggaguuacacucguagg

SEQ ID NO: 1008541 - RNA, 19 nt, Artificial Sequence
  Description of Artificial Sequence: Synthetic oligonucleotide
ggucguagaucuggccccg

SEQ ID NO: 1008542 - RNA, 19 nt, Artificial Sequence
  Description of Artificial Sequence: Synthetic oligonucleotide
gaggucguagcggaugccu

SEQ ID NO: 1008543 - RNA, 19 nt, Artificial Sequence
  Description of Artificial Sequence: Synthetic oligonucleotide
guguuuucugagucgggau

SEQ ID NO: 1008544 - RNA, 19 nt, Artificial Sequence
  Description of Artificial Sequence: Synthetic oligonucleotide
ccucaucagcuucuaauca

SEQ ID NO: 1008545 - RNA, 19 nt, Artificial Sequence
  Description of Artificial Sequence: Synthetic oligonucleotide
cuucuaaucaaugcacauu

SEQ ID NO: 1008546 - RNA, 19 nt, Artificial Sequence
  Description of Artificial Sequence: Synthetic oligonucleotide
ccacuuaaccagguaguac

SEQ ID NO: 1008547 - RNA, 19 nt, Artificial Sequence
  Description of Artificial Sequence: Synthetic oligonucleotide
uagcuaaguuuggguccag

SEQ ID NO: 1008548 - RNA, 19 nt, Artificial Sequence
  Description of Artificial Sequence: Synthetic oligonucleotide
ccaugggugaaugcauccc

SEQ ID NO: 1008549 - RNA, 19 nt, Artificial Sequence
  Description of Artificial Sequence: Synthetic oligonucleotide
acagcaacaucgggaguua

SEQ ID NO: 1008550 - RNA, 19 nt, Artificial Sequence
  Description of Artificial Sequence: Synthetic oligonucleotide
auauugccuucugccacau

SEQ ID NO: 1008551 - RNA, 19 nt, Artificial Sequence
  Description of Artificial Sequence: Synthetic oligonucleotide
aggccccuucaguuagugu

SEQ ID NO: 1008552 - RNA, 19 nt, Artificial Sequence
  Description of Artificial Sequence: Synthetic oligonucleotide
ugggccaauccaggucuac

SEQ ID NO: 1008553 - RNA, 19 nt, Artificial Sequence
  Description of Artificial Sequence: Synthetic oligonucleotide
gucguagcggaugccuuuc

SEQ ID NO: 1008554 - RNA, 19 nt, Artificial Sequence
  Description of Artificial Sequence: Synthetic oligonucleotide
gcuucuaaucaaugcacau

SEQ ID NO: 1008555 - RNA, 19 nt, Artificial Sequence
  Description of Artificial Sequence: Synthetic oligonucleotide
ggcggucguagaucuggcc

SEQ ID NO: 1008556 - RNA, 19 nt, Artificial Sequence
  Description of Artificial Sequence: Synthetic oligonucleotide
cguagggaugggccaaucc

SEQ ID NO: 1008557 - RNA, 19 nt, Artificial Sequence
  Description of Artificial Sequence: Synthetic oligonucleotide
gguagucgcucaucaaggu

SEQ ID NO: 1008558 - RNA, 19 nt, Artificial Sequence
  Description of Artificial Sequence: Synthetic oligonucleotide
ccagucggcacagauccug

SEQ ID NO: 1008559 - RNA, 19 nt, Artificial Sequence
  Description of Artificial Sequence: Synthetic oligonucleotide
caggccccuucaguuagug

SEQ ID NO: 1008560 - RNA, 19 nt, Artificial Sequence
  Description of Artificial Sequence: Synthetic oligonucleotide
ggucuaccucauuucucca

SEQ ID NO: 1008561 - RNA, 19 nt, Artificial Sequence
  Description of Artificial Sequence: Synthetic oligonucleotide
ugcgggguagucgcucauc

SEQ ID NO: 1008562 - RNA, 19 nt, Artificial Sequence
  Description of Artificial Sequence: Synthetic oligonucleotide
gcacuggguauacaccuaa

SEQ ID NO: 1008563 - RNA, 19 nt, Artificial Sequence
  Description of Artificial Sequence: Synthetic oligonucleotide
gcgggguagucgcucauca

SEQ ID NO: 1008564 - RNA, 19 nt, Artificial Sequence
  Description of Artificial Sequence: Synthetic oligonucleotide
cacuggguauacaccuaaa

SEQ ID NO: 1008565 - RNA, 19 nt, Artificial Sequence
  Description of Artificial Sequence: Synthetic oligonucleotide
ggggcugggcguuguuaag

SEQ ID NO: 1008566 - RNA, 19 nt, Artificial Sequence
  Description of Artificial Sequence: Synthetic oligonucleotide
ccagccucgcccaucauua

SEQ ID NO: 1008567 - RNA, 19 nt, Artificial Sequence
  Description of Artificial Sequence: Synthetic oligonucleotide
cagcaacaucgggaguuac

SEQ ID NO: 1008568 - RNA, 19 nt, Artificial Sequence
  Description of Artificial Sequence: Synthetic oligonucleotide
cauucaauacggacccguu

SEQ ID NO: 1008569 - RNA, 19 nt, Artificial Sequence
  Description of Artificial Sequence: Synthetic oligonucleotide
caacaucgggaguuacacu

SEQ ID NO: 1008570 - RNA, 19 nt, Artificial Sequence
  Description of Artificial Sequence: Synthetic oligonucleotide
acuacacgguuagggcaau

SEQ ID NO: 1008571 - RNA, 19 nt, Artificial Sequence
  Description of Artificial Sequence: Synthetic oligonucleotide
acuccauaacaaagcuauu

SEQ ID NO: 1008572 - RNA, 19 nt, Artificial Sequence
  Description of Artificial Sequence: Synthetic oligonucleotide
gaaagcgaugcgggguagu

SEQ ID NO: 1008573 - RNA, 19 nt, Artificial Sequence
  Description of Artificial Sequence: Synthetic oligonucleotide
cucuaaccugugccaggca

SEQ ID NO: 1008574 - RNA, 19 nt, Artificial Sequence
  Description of Artificial Sequence: Synthetic oligonucleotide
gcauucaauacggacccgu

SEQ ID NO: 1008575 - RNA, 19 nt, Artificial Sequence
  Description of Artificial Sequence: Synthetic oligonucleotide
guccaacaccagccugaac

SEQ ID NO: 1008576 - RNA, 19 nt, Artificial Sequence
  Description of Artificial Sequence: Synthetic oligonucleotide
acgccaagggcgggacaag

SEQ ID NO: 1008577 - RNA, 19 nt, Artificial Sequence
  Description of Artificial Sequence: Synthetic oligonucleotide
gggugaaugcaucccaauu

SEQ ID NO: 1008578 - RNA, 19 nt, Artificial Sequence
  Description of Artificial Sequence: Synthetic oligonucleotide
caucgggaguuacacucgu

SEQ ID NO: 1008579 - RNA, 19 nt, Artificial Sequence
  Description of Artificial Sequence: Synthetic oligonucleotide
cuacacgguuagggcaauc

SEQ ID NO: 1008580 - RNA, 19 nt, Artificial Sequence
  Description of Artificial Sequence: Synthetic oligonucleotide
ggacaaguggaggcagaca

SEQ ID NO: 1008581 - RNA, 19 nt, Artificial Sequence
  Description of Artificial Sequence: Synthetic oligonucleotide
agcuccucgccugcccaga

SEQ ID NO: 1008582 - RNA, 19 nt, Artificial Sequence
  Description of Artificial Sequence: Synthetic oligonucleotide
augcgggguagucgcucau

SEQ ID NO: 1008583 - RNA, 19 nt, Artificial Sequence
  Description of Artificial Sequence: Synthetic oligonucleotide
cgggacaagaaagcuuggc

SEQ ID NO: 1008584 - RNA, 19 nt, Artificial Sequence
  Description of Artificial Sequence: Synthetic oligonucleotide
gcgugcggacaccccagcc

SEQ ID NO: 1008585 - RNA, 19 nt, Artificial Sequence
  Description of Artificial Sequence: Synthetic oligonucleotide
aggucguagcggaugccuu

SEQ ID NO: 1008586 - RNA, 19 nt, Artificial Sequence
  Description of Artificial Sequence: Synthetic oligonucleotide
gcgggacaagaaagcuugg

SEQ ID NO: 1008587 - RNA, 19 nt, Artificial Sequence
  Description of Artificial Sequence: Synthetic oligonucleotide
ccuuucuggacuacacggu

SEQ ID NO: 1008588 - RNA, 19 nt, Artificial Sequence
  Description of Artificial Sequence: Synthetic oligonucleotide
ccagcgugcggacacccca

SEQ ID NO: 1008589 - RNA, 19 nt, Artificial Sequence
  Description of Artificial Sequence: Synthetic oligonucleotide
aucgggaguuacacucgua

SEQ ID NO: 1008590 - RNA, 19 nt, Artificial Sequence
  Description of Artificial Sequence: Synthetic oligonucleotide
cccaauuccagggaacccu

SEQ ID NO: 1008591 - RNA, 19 nt, Artificial Sequence
  Description of Artificial Sequence: Synthetic oligonucleotide
gcuugagaaugcgcacaca

SEQ ID NO: 1008592 - RNA, 19 nt, Artificial Sequence
  Description of Artificial Sequence: Synthetic oligonucleotide
gcccaucauuaguacggaa

SEQ ID NO: 1008593 - RNA, 19 nt, Artificial Sequence
  Description of Artificial Sequence: Synthetic oligonucleotide
ggcggcauccacaguauau

SEQ ID NO: 1008594 - RNA, 19 nt, Artificial Sequence
  Description of Artificial Sequence: Synthetic oligonucleotide
gcucacggaucuucuuaua

SEQ ID NO: 1008595 - RNA, 19 nt, Artificial Sequence
  Description of Artificial Sequence: Synthetic oligonucleotide
ggucguagcggaugccuuu

SEQ ID NO: 1008596 - RNA, 19 nt, Artificial Sequence
  Description of Artificial Sequence: Synthetic oligonucleotide
gguugucuaugaauacguu

SEQ ID NO: 1008597 - RNA, 19 nt, Artificial Sequence
  Description of Artificial Sequence: Synthetic oligonucleotide
caauacggacccguuucuu

SEQ ID NO: 1008598 - RNA, 19 nt, Artificial Sequence
  Description of Artificial Sequence: Synthetic oligonucleotide
caacaccagccugaacuau

SEQ ID NO: 1008599 - RNA, 19 nt, Artificial Sequence
  Description of Artificial Sequence: Synthetic oligonucleotide
augggccaauccaggucua

SEQ ID NO: 1008600 - RNA, 19 nt, Artificial Sequence
  Description of Artificial Sequence: Synthetic oligonucleotide
ccuggcggucguagaucug

SEQ ID NO: 1008601 - RNA, 19 nt, Artificial Sequence
  Description of Artificial Sequence: Synthetic oligonucleotide
cucgccugcccagaugguu

SEQ ID NO: 1008602 - RNA, 19 nt, Artificial Sequence
  Description of Artificial Sequence: Synthetic oligonucleotide
cccuggcggucguagaucu

SEQ ID NO: 1008603 - RNA, 19 nt, Artificial Sequence
  Description of Artificial Sequence: Synthetic oligonucleotide
gcugacgcuucggccuuga

SEQ ID NO: 1008604 - RNA, 19 nt, Artificial Sequence
  Description of Artificial Sequence: Synthetic oligonucleotide
gcccgccucugcuuggccu

SEQ ID NO: 1008605 - RNA, 19 nt, Artificial Sequence
  Description of Artificial Sequence: Synthetic oligonucleotide
ggcugacgcuucggccuug

SEQ ID NO: 1008606 - RNA, 19 nt, Artificial Sequence
  Description of Artificial Sequence: Synthetic oligonucleotide
gaccggcggugccgccgga

SEQ ID NO: 1008607 - RNA, 19 nt, Artificial Sequence
  Description of Artificial Sequence: Synthetic oligonucleotide
gggcgggacaagaaagcuu

SEQ ID NO: 1008608 - RNA, 19 nt, Artificial Sequence
  Description of Artificial Sequence: Synthetic oligonucleotide
cgcccaucauuaguacgga

SEQ ID NO: 1008609 - RNA, 19 nt, Artificial Sequence
  Description of Artificial Sequence: Synthetic oligonucleotide
gcgaugcgggguagucgcu

SEQ ID NO: 1008610 - RNA, 19 nt, Artificial Sequence
  Description of Artificial Sequence: Synthetic oligonucleotide
ccguggcucccaaguguuu

SEQ ID NO: 1008611 - RNA, 19 nt, Artificial Sequence
  Description of Artificial Sequence: Synthetic oligonucleotide
aauuaaaccaucugugccc

SEQ ID NO: 1008612 - RNA, 19 nt, Artificial Sequence
  Description of Artificial Sequence: Synthetic oligonucleotide
uauauauauauauauaacu

SEQ ID NO: 1008613 - RNA, 19 nt, Artificial Sequence
  Description of Artificial Sequence: Synthetic oligonucleotide
uaaacagacaucuagcacc

SEQ ID NO: 1008614 - RNA, 19 nt, Artificial Sequence
  Description of Artificial Sequence: Synthetic oligonucleotide
uauauauauauauaacucu

SEQ ID NO: 1008615 - RNA, 19 nt, Artificial Sequence
  Description of Artificial Sequence: Synthetic oligonucleotide
aauaaugugugucucucag

SEQ ID NO: 1008616 - RNA, 19 nt, Artificial Sequence
  Description of Artificial Sequence: Synthetic oligonucleotide
auauauauauauauaacuc

SEQ ID NO: 1008617 - RNA, 19 nt, Artificial Sequence
  Description of Artificial Sequence: Synthetic oligonucleotide
ugcacguuauuucacaagg

SEQ ID NO: 1008618 - RNA, 19 nt, Artificial Sequence
  Description of Artificial Sequence: Synthetic oligonucleotide
caugaaagugcauaguugc

SEQ ID NO: 1008619 - RNA, 19 nt, Artificial Sequence
  Description of Artificial Sequence: Synthetic oligonucleotide
auauauauauauauauaac

SEQ ID NO: 1008620 - RNA, 19 nt, Artificial Sequence
  Description of Artificial Sequence: Synthetic oligonucleotide
cauauauauauauauauaa

SEQ ID NO: 1008621 - RNA, 19 nt, Artificial Sequence
  Description of Artificial Sequence: Synthetic oligonucleotide
uauauauauauaacucuga

SEQ ID NO: 1008622 - RNA, 19 nt, Artificial Sequence
  Description of Artificial Sequence: Synthetic oligonucleotide
ucaacugccagcuagggaa

SEQ ID NO: 1008623 - RNA, 19 nt, Artificial Sequence
  Description of Artificial Sequence: Synthetic oligonucleotide
guucuaaacagacaucuag

SEQ ID NO: 1008624 - RNA, 19 nt, Artificial Sequence
  Description of Artificial Sequence: Synthetic oligonucleotide
uucuaaacagacaucuagc

SEQ ID NO: 1008625 - RNA, 19 nt, Artificial Sequence
  Description of Artificial Sequence: Synthetic oligonucleotide
ucuaaacagacaucuagca

SEQ ID NO: 1008626 - RNA, 19 nt, Artificial Sequence
  Description of Artificial Sequence: Synthetic oligonucleotide
uguaaaugggccgaaacca

SEQ ID NO: 1008627 - RNA, 19 nt, Artificial Sequence
  Description of Artificial Sequence: Synthetic oligonucleotide
aacucagcuaccaaugcac

SEQ ID NO: 1008628 - RNA, 19 nt, Artificial Sequence
  Description of Artificial Sequence: Synthetic oligonucleotide
uuggaguauguguaguugg

SEQ ID NO: 1008629 - RNA, 19 nt, Artificial Sequence
  Description of Artificial Sequence: Synthetic oligonucleotide
uaaugugugucucucagaa

SEQ ID NO: 1008630 - RNA, 19 nt, Artificial Sequence
  Description of Artificial Sequence: Synthetic oligonucleotide
auauauauauauaacucug

SEQ ID NO: 1008631 - RNA, 19 nt, Artificial Sequence
  Description of Artificial Sequence: Synthetic oligonucleotide
uagaacuuaugaaccaugc

SEQ ID NO: 1008632 - RNA, 19 nt, Artificial Sequence
  Description of Artificial Sequence: Synthetic oligonucleotide
ugagcuuugcugaaacugc

SEQ ID NO: 1008633 - RNA, 19 nt, Artificial Sequence
  Description of Artificial Sequence: Synthetic oligonucleotide
agcgggaugaauuugggca

SEQ ID NO: 1008634 - RNA, 19 nt, Artificial Sequence
  Description of Artificial Sequence: Synthetic oligonucleotide
cuuuguacaaaguugggga

SEQ ID NO: 1008635 - RNA, 19 nt, Artificial Sequence
  Description of Artificial Sequence: Synthetic oligonucleotide
cuuggcauggccuaccuac

SEQ ID NO: 1008636 - RNA, 19 nt, Artificial Sequence
  Description of Artificial Sequence: Synthetic oligonucleotide
cacguuauuucacaagggg

SEQ ID NO: 1008637 - RNA, 19 nt, Artificial Sequence
  Description of Artificial Sequence: Synthetic oligonucleotide
uaguucuaaacagacaucu

SEQ ID NO: 1008638 - RNA, 19 nt, Artificial Sequence
  Description of Artificial Sequence: Synthetic oligonucleotide
uuuuacagggucaaaugau

SEQ ID NO: 1008639 - RNA, 19 nt, Artificial Sequence
  Description of Artificial Sequence: Synthetic oligonucleotide
agucuugguagaaacaugg

SEQ ID NO: 1008640 - RNA, 19 nt, Artificial Sequence
  Description of Artificial Sequence: Synthetic oligonucleotide
gaacuuaugaaccaugcua

SEQ ID NO: 1008641 - RNA, 19 nt, Artificial Sequence
  Description of Artificial Sequence: Synthetic oligonucleotide
caugcuaagagcgaugaag

SEQ ID NO: 1008642 - RNA, 19 nt, Artificial Sequence
  Description of Artificial Sequence: Synthetic oligonucleotide
aauauugcgucugcgguug

SEQ ID NO: 1008643 - RNA, 19 nt, Artificial Sequence
  Description of Artificial Sequence: Synthetic oligonucleotide
ucguggaacuuccagagga

SEQ ID NO: 1008644 - RNA, 19 nt, Artificial Sequence
  Description of Artificial Sequence: Synthetic oligonucleotide
agaauauugcgucugcggu

SEQ ID NO: 1008645 - RNA, 19 nt, Artificial Sequence
  Description of Artificial Sequence: Synthetic oligonucleotide
cuuggucaagcugagaugc

SEQ ID NO: 1008646 - RNA, 19 nt, Artificial Sequence
  Description of Artificial Sequence: Synthetic oligonucleotide
uggaguauguguaguuggg

SEQ ID NO: 1008647 - RNA, 19 nt, Artificial Sequence
  Description of Artificial Sequence: Synthetic oligonucleotide
ucagcuaccaaugcacagg

SEQ ID NO: 1008648 - RNA, 19 nt, Artificial Sequence
  Description of Artificial Sequence: Synthetic oligonucleotide
uggagaugcagcauuccag

SEQ ID NO: 1008649 - RNA, 19 nt, Artificial Sequence
  Description of Artificial Sequence: Synthetic oligonucleotide
agaaugcaaaagcagguca

SEQ ID NO: 1008650 - RNA, 19 nt, Artificial Sequence
  Description of Artificial Sequence: Synthetic oligonucleotide
uuugucccgaagaaggaga

SEQ ID NO: 1008651 - RNA, 19 nt, Artificial Sequence
  Description of Artificial Sequence: Synthetic oligonucleotide
augaaccaugcuaagagcg

SEQ ID NO: 1008652 - RNA, 19 nt, Artificial Sequence
  Description of Artificial Sequence: Synthetic oligonucleotide
accaacugggcccuccucc

SEQ ID NO: 1008653 - RNA, 19 nt, Artificial Sequence
  Description of Artificial Sequence: Synthetic oligonucleotide
aucucauuggaguaugugu

SEQ ID NO: 1008654 - RNA, 19 nt, Artificial Sequence
  Description of Artificial Sequence: Synthetic oligonucleotide
ucucauuggaguaugugua

SEQ ID NO: 1008655 - RNA, 19 nt, Artificial Sequence
  Description of Artificial Sequence: Synthetic oligonucleotide
cauaguugccuggagaugc

SEQ ID NO: 1008656 - RNA, 19 nt, Artificial Sequence
  Description of Artificial Sequence: Synthetic oligonucleotide
acaacaagagaucuccacu

SEQ ID NO: 1008657 - RNA, 19 nt, Artificial Sequence
  Description of Artificial Sequence: Synthetic oligonucleotide
uacagaucguggaugcuag

SEQ ID NO: 1008658 - RNA, 19 nt, Artificial Sequence
  Description of Artificial Sequence: Synthetic oligonucleotide
aggagaaugcaaaagcagg

SEQ ID NO: 1008659 - RNA, 19 nt, Artificial Sequence
  Description of Artificial Sequence: Synthetic oligonucleotide
aacuuaugaaccaugcuaa

SEQ ID NO: 1008660 - RNA, 19 nt, Artificial Sequence
  Description of Artificial Sequence: Synthetic oligonucleotide
aaugcacaggaccacucca

SEQ ID NO: 1008661 - RNA, 19 nt, Artificial Sequence
  Description of Artificial Sequence: Synthetic oligonucleotide
guaacaggcuuucccaagg

SEQ ID NO: 1008662 - RNA, 19 nt, Artificial Sequence
  Description of Artificial Sequence: Synthetic oligonucleotide
ucuuccacgcuccaguggu

SEQ ID NO: 1008663 - RNA, 19 nt, Artificial Sequence
  Description of Artificial Sequence: Synthetic oligonucleotide
gaauuugggcaaugguggg

SEQ ID NO: 1008664 - RNA, 19 nt, Artificial Sequence
  Description of Artificial Sequence: Synthetic oligonucleotide
agagcgaugaaggaaaaga

SEQ ID NO: 1008665 - RNA, 19 nt, Artificial Sequence
  Description of Artificial Sequence: Synthetic oligonucleotide
gucucucagaaacaagggg

SEQ ID NO: 1008666 - RNA, 19 nt, Artificial Sequence
  Description of Artificial Sequence: Synthetic oligonucleotide
aagaaggccaugaagcuga

SEQ ID NO: 1008667 - RNA, 19 nt, Artificial Sequence
  Description of Artificial Sequence: Synthetic oligonucleotide
uuauuaugguucauccagu

SEQ ID NO: 1008668 - RNA, 19 nt, Artificial Sequence
  Description of Artificial Sequence: Synthetic oligonucleotide
uucacggccagcgugacgc

SEQ ID NO: 1008669 - RNA, 19 nt, Artificial Sequence
  Description of Artificial Sequence: Synthetic oligonucleotide
ugguuuaguucuaaacaga

SEQ ID NO: 1008670 - RNA, 19 nt, Artificial Sequence
  Description of Artificial Sequence: Synthetic oligonucleotide
guaaacaugaucgugggaa

SEQ ID NO: 1008671 - RNA, 19 nt, Artificial Sequence
  Description of Artificial Sequence: Synthetic oligonucleotide
aaaggcgaggccaaaguug

SEQ ID NO: 1008672 - RNA, 19 nt, Artificial Sequence
  Description of Artificial Sequence: Synthetic oligonucleotide
ugagccaauguuugucccg

SEQ ID NO: 1008673 - RNA, 19 nt, Artificial Sequence
  Description of Artificial Sequence: Synthetic oligonucleotide
caacaagagaucuccacug

SEQ ID NO: 1008674 - RNA, 19 nt, Artificial Sequence
  Description of Artificial Sequence: Synthetic oligonucleotide
cuuguaaaugggccgaaac

SEQ ID NO: 1008675 - RNA, 19 nt, Artificial Sequence
  Description of Artificial Sequence: Synthetic oligonucleotide
uagggaauaaugugugucu

SEQ ID NO: 1008676 - RNA, 19 nt, Artificial Sequence
  Description of Artificial Sequence: Synthetic oligonucleotide
uaugguucauccaguuacc

SEQ ID NO: 1008677 - RNA, 19 nt, Artificial Sequence
  Description of Artificial Sequence: Synthetic oligonucleotide
cagaggaccaagagaaggg

SEQ ID NO: 1008678 - RNA, 19 nt, Artificial Sequence
  Description of Artificial Sequence: Synthetic oligonucleotide
uggcgauccagccacagac

SEQ ID NO: 1008679 - RNA, 19 nt, Artificial Sequence
  Description of Artificial Sequence: Synthetic oligonucleotide
auaacucugauucuuugua

SEQ ID NO: 1008680 - RNA, 19 nt, Artificial Sequence
  Description of Artificial Sequence: Synthetic oligonucleotide
ccaaauuaaaccaucugug

SEQ ID NO: 1008681 - RNA, 19 nt, Artificial Sequence
  Description of Artificial Sequence: Synthetic oligonucleotide
gaucguggaugcuaggcug

SEQ ID NO: 1008682 - RNA, 19 nt, Artificial Sequence
  Description of Artificial Sequence: Synthetic oligonucleotide
uccagagguaguagaggcg

SEQ ID NO: 1008683 - RNA, 19 nt, Artificial Sequence
  Description of Artificial Sequence: Synthetic oligonucleotide
acauguggguucuuccacg

SEQ ID NO: 1008684 - RNA, 19 nt, Artificial Sequence
  Description of Artificial Sequence: Synthetic oligonucleotide
ugcauaguugccuggagau

SEQ ID NO: 1008685 - RNA, 19 nt, Artificial Sequence
  Description of Artificial Sequence: Synthetic oligonucleotide
ggaaugagcaucaccaccg

SEQ ID NO: 1008686 - RNA, 19 nt, Artificial Sequence
  Description of Artificial Sequence: Synthetic oligonucleotide
ugaaccaugcuaagagcga

SEQ ID NO: 1008687 - RNA, 19 nt, Artificial Sequence
  Description of Artificial Sequence: Synthetic oligonucleotide
gcuaccaaugcacaggacc

SEQ ID NO: 1008688 - RNA, 19 nt, Artificial Sequence
  Description of Artificial Sequence: Synthetic oligonucleotide
uggagguaacauccuacag

SEQ ID NO: 1008689 - RNA, 19 nt, Artificial Sequence
  Description of Artificial Sequence: Synthetic oligonucleotide
uccuacagaucguggaugc

SEQ ID NO: 1008690 - RNA, 19 nt, Artificial Sequence
  Description of Artificial Sequence: Synthetic oligonucleotide
uuaguucuaaacagacauc

SEQ ID NO: 1008691 - RNA, 19 nt, Artificial Sequence
  Description of Artificial Sequence: Synthetic oligonucleotide
caaggugugaagaggauga

SEQ ID NO: 1008692 - RNA, 19 nt, Artificial Sequence
  Description of Artificial Sequence: Synthetic oligonucleotide
uugguagaaacauggcuuc

SEQ ID NO: 1008693 - RNA, 19 nt, Artificial Sequence
  Description of Artificial Sequence: Synthetic oligonucleotide
gacgcuguucaacauccag

SEQ ID NO: 1008694 - RNA, 19 nt, Artificial Sequence
  Description of Artificial Sequence: Synthetic oligonucleotide
cacauauauauauauauau

SEQ ID NO: 1008695 - RNA, 19 nt, Artificial Sequence
  Description of Artificial Sequence: Synthetic oligonucleotide
acuuaugaaccaugcuaag

SEQ ID NO: 1008696 - RNA, 19 nt, Artificial Sequence
  Description of Artificial Sequence: Synthetic oligonucleotide
agaacuuaugaaccaugcu

SEQ ID NO: 1008697 - RNA, 19 nt, Artificial Sequence
  Description of Artificial Sequence: Synthetic oligonucleotide
aaacaaggggcagugggca

SEQ ID NO: 1008698 - RNA, 19 nt, Artificial Sequence
  Description of Artificial Sequence: Synthetic oligonucleotide
acauccuacagaucgugga

SEQ ID NO: 1008699 - RNA, 19 nt, Artificial Sequence
  Description of Artificial Sequence: Synthetic oligonucleotide
augaucgugggaaugagca

SEQ ID NO: 1008700 - RNA, 19 nt, Artificial Sequence
  Description of Artificial Sequence: Synthetic oligonucleotide
augaaagugcauaguugcc

SEQ ID NO: 1008701 - RNA, 19 nt, Artificial Sequence
  Description of Artificial Sequence: Synthetic oligonucleotide
caaggggacaugaacucag

SEQ ID NO: 1008702 - RNA, 19 nt, Artificial Sequence
  Description of Artificial Sequence: Synthetic oligonucleotide
aaacaugaucgugggaaug

SEQ ID NO: 1008703 - RNA, 19 nt, Artificial Sequence
  Description of Artificial Sequence: Synthetic oligonucleotide
ugcgguugauucauggcac

SEQ ID NO: 1008704 - RNA, 19 nt, Artificial Sequence
  Description of Artificial Sequence: Synthetic oligonucleotide
aggccuuguaaaugggccg

SEQ ID NO: 1008705 - RNA, 19 nt, Artificial Sequence
  Description of Artificial Sequence: Synthetic oligonucleotide
cacacauauauauauauau

SEQ ID NO: 1008706 - RNA, 19 nt, Artificial Sequence
  Description of Artificial Sequence: Synthetic oligonucleotide
aaacagacaucuagcacca

SEQ ID NO: 1008707 - RNA, 19 nt, Artificial Sequence
  Description of Artificial Sequence: Synthetic oligonucleotide
aggggagcugguuuaguuc

SEQ ID NO: 1008708 - RNA, 19 nt, Artificial Sequence
  Description of Artificial Sequence: Synthetic oligonucleotide
uguaaacaugaucguggga

SEQ ID NO: 1008709 - RNA, 19 nt, Artificial Sequence
  Description of Artificial Sequence: Synthetic oligonucleotide
aucacagcccucguggaac

SEQ ID NO: 1008710 - RNA, 19 nt, Artificial Sequence
  Description of Artificial Sequence: Synthetic oligonucleotide
cugagcuuugcugaaacug

SEQ ID NO: 1008711 - RNA, 19 nt, Artificial Sequence
  Description of Artificial Sequence: Synthetic oligonucleotide
auuggaguauguguaguug

SEQ ID NO: 1008712 - RNA, 19 nt, Artificial Sequence
  Description of Artificial Sequence: Synthetic oligonucleotide
ccaguuaccacagauagac

SEQ ID NO: 1008713 - RNA, 19 nt, Artificial Sequence
  Description of Artificial Sequence: Synthetic oligonucleotide
ucccuuuuauuaugguuca

SEQ ID NO: 1008714 - RNA, 19 nt, Artificial Sequence
  Description of Artificial Sequence: Synthetic oligonucleotide
gagguaacauccuacagau

SEQ ID NO: 1008715 - RNA, 19 nt, Artificial Sequence
  Description of Artificial Sequence: Synthetic oligonucleotide
cuagggaauaauguguguc

SEQ ID NO: 1008716 - RNA, 19 nt, Artificial Sequence
  Description of Artificial Sequence: Synthetic oligonucleotide
uauuaugguucauccaguu

SEQ ID NO: 1008717 - RNA, 19 nt, Artificial Sequence
  Description of Artificial Sequence: Synthetic oligonucleotide
agaucguggaugcuaggcu

SEQ ID NO: 1008718 - RNA, 19 nt, Artificial Sequence
  Description of Artificial Sequence: Synthetic oligonucleotide
aggcauggccaauaggucu

SEQ ID NO: 1008719 - RNA, 19 nt, Artificial Sequence
  Description of Artificial Sequence: Synthetic oligonucleotide
acauauauauauauauaua

SEQ ID NO: 1008720 - RNA, 19 nt, Artificial Sequence
  Description of Artificial Sequence: Synthetic oligonucleotide
acaucuagcaccacaacaa

SEQ ID NO: 1008721 - RNA, 19 nt, Artificial Sequence
  Description of Artificial Sequence: Synthetic oligonucleotide
uggcucacaucucauugga

SEQ ID NO: 1008722 - RNA, 19 nt, Artificial Sequence
  Description of Artificial Sequence: Synthetic oligonucleotide
aaaugggccgaaaccagca

SEQ ID NO: 1008723 - RNA, 19 nt, Artificial Sequence
  Description of Artificial Sequence: Synthetic oligonucleotide
ugccagcuagggaauaaug

SEQ ID NO: 1008724 - RNA, 19 nt, Artificial Sequence
  Description of Artificial Sequence: Synthetic oligonucleotide
aaguugguggcuccccgcu

SEQ ID NO: 1008725 - RNA, 19 nt, Artificial Sequence
  Description of Artificial Sequence: Synthetic oligonucleotide
aauaggucugagccaggaa

SEQ ID NO: 1008726 - RNA, 19 nt, Artificial Sequence
  Description of Artificial Sequence: Synthetic oligonucleotide
gaucgugggaaugagcauc

SEQ ID NO: 1008727 - RNA, 19 nt, Artificial Sequence
  Description of Artificial Sequence: Synthetic oligonucleotide
guaaaugggccgaaaccag

SEQ ID NO: 1008728 - RNA, 19 nt, Artificial Sequence
  Description of Artificial Sequence: Synthetic oligonucleotide
acagauagacacauuggcu

SEQ ID NO: 1008729 - RNA, 19 nt, Artificial Sequence
  Description of Artificial Sequence: Synthetic oligonucleotide
agggaauaaugugugucuc

SEQ ID NO: 1008730 - RNA, 19 nt, Artificial Sequence
  Description of Artificial Sequence: Synthetic oligonucleotide
caugaucgugggaaugagc

SEQ ID NO: 1008731 - RNA, 19 nt, Artificial Sequence
  Description of Artificial Sequence: Synthetic oligonucleotide
ccgaagaaggagauggugg

SEQ ID NO: 1008732 - RNA, 19 nt, Artificial Sequence
  Description of Artificial Sequence: Synthetic oligonucleotide
agcaccacaacaagagauc

SEQ ID NO: 1008733 - RNA, 19 nt, Artificial Sequence
  Description of Artificial Sequence: Synthetic oligonucleotide
aaggggacaugaacucagc

SEQ ID NO: 1008734 - RNA, 19 nt, Artificial Sequence
  Description of Artificial Sequence: Synthetic oligonucleotide
uuucccaagggcagcgcca

SEQ ID NO: 1008735 - RNA, 19 nt, Artificial Sequence
  Description of Artificial Sequence: Synthetic oligonucleotide
gaauaaugugugucucuca

SEQ ID NO: 1008736 - RNA, 19 nt, Artificial Sequence
  Description of Artificial Sequence: Synthetic oligonucleotide
caucuagcaccacaacaag

SEQ ID NO: 1008737 - RNA, 19 nt, Artificial Sequence
  Description of Artificial Sequence: Synthetic oligonucleotide
aagagcgaugaaggaaaag

SEQ ID NO: 1008738 - RNA, 19 nt, Artificial Sequence
  Description of Artificial Sequence: Synthetic oligonucleotide
agcgugacgcuguucaaca

SEQ ID NO: 1008739 - RNA, 19 nt, Artificial Sequence
  Description of Artificial Sequence: Synthetic oligonucleotide
guagaacuuaugaaccaug

SEQ ID NO: 1008740 - RNA, 19 nt, Artificial Sequence
  Description of Artificial Sequence: Synthetic oligonucleotide
agagaucuccacugcacgu

SEQ ID NO: 1008741 - RNA, 19 nt, Artificial Sequence
  Description of Artificial Sequence: Synthetic oligonucleotide
cauguggguucuuccacgc

SEQ ID NO: 1008742 - RNA, 19 nt, Artificial Sequence
  Description of Artificial Sequence: Synthetic oligonucleotide
cucagcuaccaaugcacag

SEQ ID NO: 1008743 - RNA, 19 nt, Artificial Sequence
  Description of Artificial Sequence: Synthetic oligonucleotide
ugcuaagagcgaugaagga

SEQ ID NO: 1008744 - RNA, 19 nt, Artificial Sequence
  Description of Artificial Sequence: Synthetic oligonucleotide
cacaaggggacaugaacuc

SEQ ID NO: 1008745 - RNA, 19 nt, Artificial Sequence
  Description of Artificial Sequence: Synthetic oligonucleotide
aagucuugguagaaacaug

SEQ ID NO: 1008746 - RNA, 19 nt, Artificial Sequence
  Description of Artificial Sequence: Synthetic oligonucleotide
caaugcacaggaccacucc

SEQ ID NO: 1008747 - RNA, 19 nt, Artificial Sequence
  Description of Artificial Sequence: Synthetic oligonucleotide
ugguucauccaguuaccac

SEQ ID NO: 1008748 - RNA, 19 nt, Artificial Sequence
  Description of Artificial Sequence: Synthetic oligonucleotide
gguggcagaauauugcguc

SEQ ID NO: 1008749 - RNA, 19 nt, Artificial Sequence
  Description of Artificial Sequence: Synthetic oligonucleotide
aguugccuggagaugcagc

SEQ ID NO: 1008750 - RNA, 19 nt, Artificial Sequence
  Description of Artificial Sequence: Synthetic oligonucleotide
gcugaugaccaacugggcc

SEQ ID NO: 1008751 - RNA, 19 nt, Artificial Sequence
  Description of Artificial Sequence: Synthetic oligonucleotide
uccaguuaccacagauaga

SEQ ID NO: 1008752 - RNA, 19 nt, Artificial Sequence
  Description of Artificial Sequence: Synthetic oligonucleotide
caugauggaucagccagcc

SEQ ID NO: 1008753 - RNA, 19 nt, Artificial Sequence
  Description of Artificial Sequence: Synthetic oligonucleotide
augauggaucagccagccc

SEQ ID NO: 1008754 - RNA, 19 nt, Artificial Sequence
  Description of Artificial Sequence: Synthetic oligonucleotide
cguuauuucacaaggggac

SEQ ID NO: 1008755 - RNA, 19 nt, Artificial Sequence
  Description of Artificial Sequence: Synthetic oligonucleotide
gaaugagcaucaccaccgc

SEQ ID NO: 1008756 - RNA, 19 nt, Artificial Sequence
  Description of Artificial Sequence: Synthetic oligonucleotide
ucggagugccaagagcagg

SEQ ID NO: 1008757 - RNA, 19 nt, Artificial Sequence
  Description of Artificial Sequence: Synthetic oligonucleotide
cugaacaacccgaucgcuc

SEQ ID NO: 1008758 - RNA, 19 nt, Artificial Sequence
  Description of Artificial Sequence: Synthetic oligonucleotide
uuggcauggccuaccuacc

SEQ ID NO: 1008759 - RNA, 19 nt, Artificial Sequence
  Description of Artificial Sequence: Synthetic oligonucleotide
acguuauuucacaagggga

SEQ ID NO: 1008760 - RNA, 19 nt, Artificial Sequence
  Description of Artificial Sequence: Synthetic oligonucleotide
ccgguagaacuuaugaacc

SEQ ID NO: 1008761 - RNA, 19 nt, Artificial Sequence
  Description of Artificial Sequence: Synthetic oligonucleotide
aguagaggcgcuuggucaa

SEQ ID NO: 1008762 - RNA, 19 nt, Artificial Sequence
  Description of Artificial Sequence: Synthetic oligonucleotide
uuucacaaggggacaugaa

SEQ ID NO: 1008763 - RNA, 19 nt, Artificial Sequence
  Description of Artificial Sequence: Synthetic oligonucleotide
cugagccaauguuuguccc

SEQ ID NO: 1008764 - RNA, 19 nt, Artificial Sequence
  Description of Artificial Sequence: Synthetic oligonucleotide
uaggagcaaggugugaaga

SEQ ID NO: 1008765 - RNA, 19 nt, Artificial Sequence
  Description of Artificial Sequence: Synthetic oligonucleotide
cugcacguuauuucacaag

SEQ ID NO: 1008766 - RNA, 19 nt, Artificial Sequence
  Description of Artificial Sequence: Synthetic oligonucleotide
ucauuggaguauguguagu

SEQ ID NO: 1008767 - RNA, 19 nt, Artificial Sequence
  Description of Artificial Sequence: Synthetic oligonucleotide
guuugucccgaagaaggag

SEQ ID NO: 1008768 - RNA, 19 nt, Artificial Sequence
  Description of Artificial Sequence: Synthetic oligonucleotide
cagaucguggaugcuaggc

SEQ ID NO: 1008769 - RNA, 19 nt, Artificial Sequence
  Description of Artificial Sequence: Synthetic oligonucleotide
agcuagggaauaaugugug

SEQ ID NO: 1008770 - RNA, 19 nt, Artificial Sequence
  Description of Artificial Sequence: Synthetic oligonucleotide
aagugcauaguugccugga

SEQ ID NO: 1008771 - RNA, 19 nt, Artificial Sequence
  Description of Artificial Sequence: Synthetic oligonucleotide
uggccuaccuacccuucag

SEQ ID NO: 1008772 - RNA, 19 nt, Artificial Sequence
  Description of Artificial Sequence: Synthetic oligonucleotide
guaguagaggcgcuugguc

SEQ ID NO: 1008773 - RNA, 19 nt, Artificial Sequence
  Description of Artificial Sequence: Synthetic oligonucleotide
accaagagaagggaugaga

SEQ ID NO: 1008774 - RNA, 19 nt, Artificial Sequence
  Description of Artificial Sequence: Synthetic oligonucleotide
aggagggaugucugccucg

SEQ ID NO: 1008775 - RNA, 19 nt, Artificial Sequence
  Description of Artificial Sequence: Synthetic oligonucleotide
cugcuuggucaccacacag

SEQ ID NO: 1008776 - RNA, 19 nt, Artificial Sequence
  Description of Artificial Sequence: Synthetic oligonucleotide
cauuggcucaggcagguca

SEQ ID NO: 1008777 - RNA, 19 nt, Artificial Sequence
  Description of Artificial Sequence: Synthetic oligonucleotide
uggcauggccuaccuaccc

SEQ ID NO: 1008778 - RNA, 19 nt, Artificial Sequence
  Description of Artificial Sequence: Synthetic oligonucleotide
agccacgcgagacagccca

SEQ ID NO: 1008779 - RNA, 19 nt, Artificial Sequence
  Description of Artificial Sequence: Synthetic oligonucleotide
acacauauauauauauaua

SEQ ID NO: 1008780 - RNA, 19 nt, Artificial Sequence
  Description of Artificial Sequence: Synthetic oligonucleotide
cacauguggguucuuccac

SEQ ID NO: 1008781 - RNA, 19 nt, Artificial Sequence
  Description of Artificial Sequence: Synthetic oligonucleotide
cuccacugcacguuauuuc

SEQ ID NO: 1008782 - RNA, 19 nt, Artificial Sequence
  Description of Artificial Sequence: Synthetic oligonucleotide
cucucggagugccaagagc

SEQ ID NO: 1008783 - RNA, 19 nt, Artificial Sequence
  Description of Artificial Sequence: Synthetic oligonucleotide
ccacagauagacacauugg

SEQ ID NO: 1008784 - RNA, 19 nt, Artificial Sequence
  Description of Artificial Sequence: Synthetic oligonucleotide
guuauuucacaaggggaca

SEQ ID NO: 1008785 - RNA, 19 nt, Artificial Sequence
  Description of Artificial Sequence: Synthetic oligonucleotide
acugcacguuauuucacaa

SEQ ID NO: 1008786 - RNA, 19 nt, Artificial Sequence
  Description of Artificial Sequence: Synthetic oligonucleotide
gacaggaaauuggagguaa

SEQ ID NO: 1008787 - RNA, 19 nt, Artificial Sequence
  Description of Artificial Sequence: Synthetic oligonucleotide
augcaaaagcaggucacug

SEQ ID NO: 1008788 - RNA, 19 nt, Artificial Sequence
  Description of Artificial Sequence: Synthetic oligonucleotide
uggaugcuaggcuggcagc

SEQ ID NO: 1008789 - RNA, 19 nt, Artificial Sequence
  Description of Artificial Sequence: Synthetic oligonucleotide
cacacacauauauauauau

SEQ ID NO: 1008790 - RNA, 19 nt, Artificial Sequence
  Description of Artificial Sequence: Synthetic oligonucleotide
ggaguauguguaguugggg

SEQ ID NO: 1008791 - RNA, 19 nt, Artificial Sequence
  Description of Artificial Sequence: Synthetic oligonucleotide
uguugcacauguggguucu

SEQ ID NO: 1008792 - RNA, 19 nt, Artificial Sequence
  Description of Artificial Sequence: Synthetic oligonucleotide
uggcuccccgcuccgauca

SEQ ID NO: 1008793 - RNA, 19 nt, Artificial Sequence
  Description of Artificial Sequence: Synthetic oligonucleotide
acaugaucgugggaaugag

SEQ ID NO: 1008794 - RNA, 19 nt, Artificial Sequence
  Description of Artificial Sequence: Synthetic oligonucleotide
cuaccuacccuucaggccu

SEQ ID NO: 1008795 - RNA, 19 nt, Artificial Sequence
  Description of Artificial Sequence: Synthetic oligonucleotide
uuaaaccaucugugcccag

SEQ ID NO: 1008796 - RNA, 19 nt, Artificial Sequence
  Description of Artificial Sequence: Synthetic oligonucleotide
aaccaugcuaagagcgaug

SEQ ID NO: 1008797 - RNA, 19 nt, Artificial Sequence
  Description of Artificial Sequence: Synthetic oligonucleotide
aguugguggcuccccgcuc

SEQ ID NO: 1008798 - RNA, 19 nt, Artificial Sequence
  Description of Artificial Sequence: Synthetic oligonucleotide
ugcgucugcgguugauuca

SEQ ID NO: 1008799 - RNA, 19 nt, Artificial Sequence
  Description of Artificial Sequence: Synthetic oligonucleotide
cucguggaacuuccagagg

SEQ ID NO: 1008800 - RNA, 19 nt, Artificial Sequence
  Description of Artificial Sequence: Synthetic oligonucleotide
gggguagacauauacauau

SEQ ID NO: 1008801 - RNA, 19 nt, Artificial Sequence
  Description of Artificial Sequence: Synthetic oligonucleotide
accgcugagccaauguuug

SEQ ID NO: 1008802 - RNA, 19 nt, Artificial Sequence
  Description of Artificial Sequence: Synthetic oligonucleotide
cacaucucauuggaguaug

SEQ ID NO: 1008803 - RNA, 19 nt, Artificial Sequence
  Description of Artificial Sequence: Synthetic oligonucleotide
gugcauaguugccuggaga

SEQ ID NO: 1008804 - RNA, 19 nt, Artificial Sequence
  Description of Artificial Sequence: Synthetic oligonucleotide
ucacaucucauuggaguau

SEQ ID NO: 1008805 - RNA, 19 nt, Artificial Sequence
  Description of Artificial Sequence: Synthetic oligonucleotide
cucacaucucauuggagua

SEQ ID NO: 1008806 - RNA, 19 nt, Artificial Sequence
  Description of Artificial Sequence: Synthetic oligonucleotide
ggucaaaugaucccuuuua

SEQ ID NO: 1008807 - RNA, 19 nt, Artificial Sequence
  Description of Artificial Sequence: Synthetic oligonucleotide
cagcgggaugaauuugggc

SEQ ID NO: 1008808 - RNA, 19 nt, Artificial Sequence
  Description of Artificial Sequence: Synthetic oligonucleotide
ugaucgugggaaugagcau

SEQ ID NO: 1008809 - RNA, 19 nt, Artificial Sequence
  Description of Artificial Sequence: Synthetic oligonucleotide
aggucaacugccagcuagg

SEQ ID NO: 1008810 - RNA, 19 nt, Artificial Sequence
  Description of Artificial Sequence: Synthetic oligonucleotide
acacauuggcucaggcagg

SEQ ID NO: 1008811 - RNA, 19 nt, Artificial Sequence
  Description of Artificial Sequence: Synthetic oligonucleotide
aagggcagcgccaggcaug

SEQ ID NO: 1008812 - RNA, 19 nt, Artificial Sequence
  Description of Artificial Sequence: Synthetic oligonucleotide
gcuccgaucagccacgcga

SEQ ID NO: 1008813 - RNA, 19 nt, Artificial Sequence
  Description of Artificial Sequence: Synthetic oligonucleotide
aucuagcaccacaacaaga

SEQ ID NO: 1008814 - RNA, 19 nt, Artificial Sequence
  Description of Artificial Sequence: Synthetic oligonucleotide
ccuaccuacccuucaggcc

SEQ ID NO: 1008815 - RNA, 19 nt, Artificial Sequence
  Description of Artificial Sequence: Synthetic oligonucleotide
gaugcuaggcuggcagcug

SEQ ID NO: 1008816 - RNA, 19 nt, Artificial Sequence
  Description of Artificial Sequence: Synthetic oligonucleotide
acacacauauauauauaua

SEQ ID NO: 1008817 - RNA, 19 nt, Artificial Sequence
  Description of Artificial Sequence: Synthetic oligonucleotide
accaccgcugagccaaugu

SEQ ID NO: 1008818 - RNA, 19 nt, Artificial Sequence
  Description of Artificial Sequence: Synthetic oligonucleotide
cuggagaugcagcauucca

SEQ ID NO: 1008819 - RNA, 19 nt, Artificial Sequence
  Description of Artificial Sequence: Synthetic oligonucleotide
ugugcagcccacagcucuc

SEQ ID NO: 1008820 - RNA, 19 nt, Artificial Sequence
  Description of Artificial Sequence: Synthetic oligonucleotide
ugaccaacugggccaugaa

SEQ ID NO: 1008821 - RNA, 19 nt, Artificial Sequence
  Description of Artificial Sequence: Synthetic oligonucleotide
uucacaccuccuuguccug

SEQ ID NO: 1008822 - RNA, 19 nt, Artificial Sequence
  Description of Artificial Sequence: Synthetic oligonucleotide
gcagaauauugcgucugcg

SEQ ID NO: 1008823 - RNA, 19 nt, Artificial Sequence
  Description of Artificial Sequence: Synthetic oligonucleotide
cacugcacguuauuucaca

SEQ ID NO: 1008824 - RNA, 19 nt, Artificial Sequence
  Description of Artificial Sequence: Synthetic oligonucleotide
cuccccgcuccgaucagcc

SEQ ID NO: 1008825 - RNA, 19 nt, Artificial Sequence
  Description of Artificial Sequence: Synthetic oligonucleotide
gaauauugcgucugcgguu

SEQ ID NO: 1008826 - RNA, 19 nt, Artificial Sequence
  Description of Artificial Sequence: Synthetic oligonucleotide
augaccaacugggccauga

SEQ ID NO: 1008827 - RNA, 19 nt, Artificial Sequence
  Description of Artificial Sequence: Synthetic oligonucleotide
cuguugcacauguggguuc

SEQ ID NO: 1008828 - RNA, 19 nt, Artificial Sequence
  Description of Artificial Sequence: Synthetic oligonucleotide
gagccaauguuugucccga

SEQ ID NO: 1008829 - RNA, 19 nt, Artificial Sequence
  Description of Artificial Sequence: Synthetic oligonucleotide
ucuccacugcacguuauuu

SEQ ID NO: 1008830 - RNA, 19 nt, Artificial Sequence
  Description of Artificial Sequence: Synthetic oligonucleotide
ggcagaauauugcgucugc

SEQ ID NO: 1008831 - RNA, 19 nt, Artificial Sequence
  Description of Artificial Sequence: Synthetic oligonucleotide
cagcuagggaauaaugugu

SEQ ID NO: 1008832 - RNA, 19 nt, Artificial Sequence
  Description of Artificial Sequence: Synthetic oligonucleotide
gcacguuauuucacaaggg

SEQ ID NO: 1008833 - RNA, 19 nt, Artificial Sequence
  Description of Artificial Sequence: Synthetic oligonucleotide
augguucauccaguuacca

SEQ ID NO: 1008834 - RNA, 19 nt, Artificial Sequence
  Description of Artificial Sequence: Synthetic oligonucleotide
auggccuaccuacccuuca

SEQ ID NO: 1008835 - RNA, 19 nt, Artificial Sequence
  Description of Artificial Sequence: Synthetic oligonucleotide
acgcgagacagcccaccag

SEQ ID NO: 1008836 - RNA, 19 nt, Artificial Sequence
  Description of Artificial Sequence: Synthetic oligonucleotide
ugacgcuguucaacaucca

SEQ ID NO: 1008837 - RNA, 19 nt, Artificial Sequence
  Description of Artificial Sequence: Synthetic oligonucleotide
cuguucacaccuccuuguc

SEQ ID NO: 1008838 - RNA, 19 nt, Artificial Sequence
  Description of Artificial Sequence: Synthetic oligonucleotide
aucgugggaaugagcauca

SEQ ID NO: 1008839 - RNA, 19 nt, Artificial Sequence
  Description of Artificial Sequence: Synthetic oligonucleotide
cccaaauuaaaccaucugu

SEQ ID NO: 1008840 - RNA, 19 nt, Artificial Sequence
  Description of Artificial Sequence: Synthetic oligonucleotide
gcucacaucucauuggagu

SEQ ID NO: 1008841 - RNA, 19 nt, Artificial Sequence
  Description of Artificial Sequence: Synthetic oligonucleotide
gcaaggugugaagaggaug

SEQ ID NO: 1008842 - RNA, 19 nt, Artificial Sequence
  Description of Artificial Sequence: Synthetic oligonucleotide
aggacccaaaagguggggu

SEQ ID NO: 1008843 - RNA, 19 nt, Artificial Sequence
  Description of Artificial Sequence: Synthetic oligonucleotide
caggagucuguucacaccu

SEQ ID NO: 1008844 - RNA, 19 nt, Artificial Sequence
  Description of Artificial Sequence: Synthetic oligonucleotide
ugccccgguagaacuuaug

SEQ ID NO: 1008845 - RNA, 19 nt, Artificial Sequence
  Description of Artificial Sequence: Synthetic oligonucleotide
gcuaagagcgaugaaggaa

SEQ ID NO: 1008846 - RNA, 19 nt, Artificial Sequence
  Description of Artificial Sequence: Synthetic oligonucleotide
uugcacauguggguucuuc

SEQ ID NO: 1008847 - RNA, 19 nt, Artificial Sequence
  Description of Artificial Sequence: Synthetic oligonucleotide
uccgaucagccacgcgaga

SEQ ID NO: 1008848 - RNA, 19 nt, Artificial Sequence
  Description of Artificial Sequence: Synthetic oligonucleotide
ugucccgaagaaggagaug

SEQ ID NO: 1008849 - RNA, 19 nt, Artificial Sequence
  Description of Artificial Sequence: Synthetic oligonucleotide
agcagacguaggagcaagg

SEQ ID NO: 1008850 - RNA, 19 nt, Artificial Sequence
  Description of Artificial Sequence: Synthetic oligonucleotide
ggccuaccuacccuucagg

SEQ ID NO: 1008851 - RNA, 19 nt, Artificial Sequence
  Description of Artificial Sequence: Synthetic oligonucleotide
ggucaccacacagaugaug

SEQ ID NO: 1008852 - RNA, 19 nt, Artificial Sequence
  Description of Artificial Sequence: Synthetic oligonucleotide
ugggcaccaggagaaugca

SEQ ID NO: 1008853 - RNA, 19 nt, Artificial Sequence
  Description of Artificial Sequence: Synthetic oligonucleotide
cauggccuaccuacccuuc

SEQ ID NO: 1008854 - RNA, 19 nt, Artificial Sequence
  Description of Artificial Sequence: Synthetic oligonucleotide
ggucaacugccagcuaggg

SEQ ID NO: 1008855 - RNA, 19 nt, Artificial Sequence
  Description of Artificial Sequence: Synthetic oligonucleotide
uagaggcgcuuggucaagc

SEQ ID NO: 1008856 - RNA, 19 nt, Artificial Sequence
  Description of Artificial Sequence: Synthetic oligonucleotide
caauaggucugagccagga

SEQ ID NO: 1008857 - RNA, 19 nt, Artificial Sequence
  Description of Artificial Sequence: Synthetic oligonucleotide
ccugguucccuccucauga

SEQ ID NO: 1008858 - RNA, 19 nt, Artificial Sequence
  Description of Artificial Sequence: Synthetic oligonucleotide
gugugucucucagaaacaa

SEQ ID NO: 1008859 - RNA, 19 nt, Artificial Sequence
  Description of Artificial Sequence: Synthetic oligonucleotide
cuacagaucguggaugcua

SEQ ID NO: 1008860 - RNA, 19 nt, Artificial Sequence
  Description of Artificial Sequence: Synthetic oligonucleotide
cauccugguucccuccuca

SEQ ID NO: 1008861 - RNA, 19 nt, Artificial Sequence
  Description of Artificial Sequence: Synthetic oligonucleotide
ccccagaaccaacugggcc

SEQ ID NO: 1008862 - RNA, 19 nt, Artificial Sequence
  Description of Artificial Sequence: Synthetic oligonucleotide
caggaccacuccaugugca

SEQ ID NO: 1008863 - RNA, 19 nt, Artificial Sequence
  Description of Artificial Sequence: Synthetic oligonucleotide
aguucuaaacagacaucua

SEQ ID NO: 1008864 - RNA, 19 nt, Artificial Sequence
  Description of Artificial Sequence: Synthetic oligonucleotide
agguaacauccuacagauc

SEQ ID NO: 1008865 - RNA, 19 nt, Artificial Sequence
  Description of Artificial Sequence: Synthetic oligonucleotide
agguucacggccagcguga

SEQ ID NO: 1008866 - RNA, 19 nt, Artificial Sequence
  Description of Artificial Sequence: Synthetic oligonucleotide
aucuccacugcacguuauu

SEQ ID NO: 1008867 - RNA, 19 nt, Artificial Sequence
  Description of Artificial Sequence: Synthetic oligonucleotide
cugauucuuuguacaaagu

SEQ ID NO: 1008868 - RNA, 19 nt, Artificial Sequence
  Description of Artificial Sequence: Synthetic oligonucleotide
ggcgaggccaaaguuggug

SEQ ID NO: 1008869 - RNA, 19 nt, Artificial Sequence
  Description of Artificial Sequence: Synthetic oligonucleotide
cagcgugacgcuguucaac

SEQ ID NO: 1008870 - RNA, 19 nt, Artificial Sequence
  Description of Artificial Sequence: Synthetic oligonucleotide
cgcgagacagcccaccagg

SEQ ID NO: 1008871 - RNA, 19 nt, Artificial Sequence
  Description of Artificial Sequence: Synthetic oligonucleotide
acgcuccagugguccauuc

SEQ ID NO: 1008872 - RNA, 19 nt, Artificial Sequence
  Description of Artificial Sequence: Synthetic oligonucleotide
agcuaccaaugcacaggac

SEQ ID NO: 1008873 - RNA, 19 nt, Artificial Sequence
  Description of Artificial Sequence: Synthetic oligonucleotide
ccccaaauuaaaccaucug

SEQ ID NO: 1008874 - RNA, 19 nt, Artificial Sequence
  Description of Artificial Sequence: Synthetic oligonucleotide
gcacauguggguucuucca

SEQ ID NO: 1008875 - RNA, 19 nt, Artificial Sequence
  Description of Artificial Sequence: Synthetic oligonucleotide
gccccgguagaacuuauga

SEQ ID NO: 1008876 - RNA, 19 nt, Artificial Sequence
  Description of Artificial Sequence: Synthetic oligonucleotide
ggggaacccugcuugguca

SEQ ID NO: 1008877 - RNA, 19 nt, Artificial Sequence
  Description of Artificial Sequence: Synthetic oligonucleotide
guagaggcgcuuggucaag

SEQ ID NO: 1008878 - RNA, 19 nt, Artificial Sequence
  Description of Artificial Sequence: Synthetic oligonucleotide
auaguugccuggagaugca

SEQ ID NO: 1008879 - RNA, 19 nt, Artificial Sequence
  Description of Artificial Sequence: Synthetic oligonucleotide
gaaccaugcuaagagcgau

SEQ ID NO: 1008880 - RNA, 19 nt, Artificial Sequence
  Description of Artificial Sequence: Synthetic oligonucleotide
uauugcgucugcgguugau

SEQ ID NO: 1008881 - RNA, 19 nt, Artificial Sequence
  Description of Artificial Sequence: Synthetic oligonucleotide
cgugggaaugagcaucacc

SEQ ID NO: 1008882 - RNA, 19 nt, Artificial Sequence
  Description of Artificial Sequence: Synthetic oligonucleotide
gcgguugauucauggcacc

SEQ ID NO: 1008883 - RNA, 19 nt, Artificial Sequence
  Description of Artificial Sequence: Synthetic oligonucleotide
ggucaagcugagaugcuga

SEQ ID NO: 1008884 - RNA, 19 nt, Artificial Sequence
  Description of Artificial Sequence: Synthetic oligonucleotide
caguuaccacagauagaca

SEQ ID NO: 1008885 - RNA, 19 nt, Artificial Sequence
  Description of Artificial Sequence: Synthetic oligonucleotide
uaccuacccuucaggccuc

SEQ ID NO: 1008886 - RNA, 19 nt, Artificial Sequence
  Description of Artificial Sequence: Synthetic oligonucleotide
guggcagaauauugcgucu

SEQ ID NO: 1008887 - RNA, 19 nt, Artificial Sequence
  Description of Artificial Sequence: Synthetic oligonucleotide
acaucucauuggaguaugu

SEQ ID NO: 1008888 - RNA, 19 nt, Artificial Sequence
  Description of Artificial Sequence: Synthetic oligonucleotide
gacaccccagccuggaauu

SEQ ID NO: 1008889 - RNA, 19 nt, Artificial Sequence
  Description of Artificial Sequence: Synthetic oligonucleotide
gggaauaaugugugucucu

SEQ ID NO: 1008890 - RNA, 19 nt, Artificial Sequence
  Description of Artificial Sequence: Synthetic oligonucleotide
auauugcgucugcgguuga

SEQ ID NO: 1008891 - RNA, 19 nt, Artificial Sequence
  Description of Artificial Sequence: Synthetic oligonucleotide
ggccaauaggucugagcca

SEQ ID NO: 1008892 - RNA, 19 nt, Artificial Sequence
  Description of Artificial Sequence: Synthetic oligonucleotide
cauggccaauaggucugag

SEQ ID NO: 1008893 - RNA, 19 nt, Artificial Sequence
  Description of Artificial Sequence: Synthetic oligonucleotide
ggccgaaaccagcagacgu

SEQ ID NO: 1008894 - RNA, 19 nt, Artificial Sequence
  Description of Artificial Sequence: Synthetic oligonucleotide
auccugguucccuccucau

SEQ ID NO: 1008895 - RNA, 19 nt, Artificial Sequence
  Description of Artificial Sequence: Synthetic oligonucleotide
cucgaagucuugguagaaa

SEQ ID NO: 1008896 - RNA, 19 nt, Artificial Sequence
  Description of Artificial Sequence: Synthetic oligonucleotide
gaaccaacugggcccuccu

SEQ ID NO: 1008897 - RNA, 19 nt, Artificial Sequence
  Description of Artificial Sequence: Synthetic oligonucleotide
ggacccaaaagguggggua

SEQ ID NO: 1008898 - RNA, 19 nt, Artificial Sequence
  Description of Artificial Sequence: Synthetic oligonucleotide
guggcgauccagccacaga

SEQ ID NO: 1008899 - RNA, 19 nt, Artificial Sequence
  Description of Artificial Sequence: Synthetic oligonucleotide
acuccaugugcagcccaca

SEQ ID NO: 1008900 - RNA, 19 nt, Artificial Sequence
  Description of Artificial Sequence: Synthetic oligonucleotide
gcgggaugaauuugggcaa

SEQ ID NO: 1008901 - RNA, 19 nt, Artificial Sequence
  Description of Artificial Sequence: Synthetic oligonucleotide
gggaugaauuugggcaaug

SEQ ID NO: 1008902 - RNA, 19 nt, Artificial Sequence
  Description of Artificial Sequence: Synthetic oligonucleotide
ccaauaggucugagccagg

SEQ ID NO: 1008903 - RNA, 19 nt, Artificial Sequence
  Description of Artificial Sequence: Synthetic oligonucleotide
gguagaacuuaugaaccau

SEQ ID NO: 1008904 - RNA, 19 nt, Artificial Sequence
  Description of Artificial Sequence: Synthetic oligonucleotide
cacgcgagacagcccacca

SEQ ID NO: 1008905 - RNA, 19 nt, Artificial Sequence
  Description of Artificial Sequence: Synthetic oligonucleotide
gguggcgauccagccacag

SEQ ID NO: 1008906 - RNA, 19 nt, Artificial Sequence
  Description of Artificial Sequence: Synthetic oligonucleotide
gagaucuccacugcacguu

SEQ ID NO: 1008907 - RNA, 19 nt, Artificial Sequence
  Description of Artificial Sequence: Synthetic oligonucleotide
acggccagcgugacgcugu

SEQ ID NO: 1008908 - RNA, 19 nt, Artificial Sequence
  Description of Artificial Sequence: Synthetic oligonucleotide
ccacugcacguuauuucac

SEQ ID NO: 1008909 - RNA, 19 nt, Artificial Sequence
  Description of Artificial Sequence: Synthetic oligonucleotide
gaugaccaacugggccaug

SEQ ID NO: 1008910 - RNA, 19 nt, Artificial Sequence
  Description of Artificial Sequence: Synthetic oligonucleotide
gccagcuagggaauaaugu

SEQ ID NO: 1008911 - RNA, 19 nt, Artificial Sequence
  Description of Artificial Sequence: Synthetic oligonucleotide
cccgcuccgaucagccacg

SEQ ID NO: 1008912 - RNA, 19 nt, Artificial Sequence
  Description of Artificial Sequence: Synthetic oligonucleotide
ugguggcgauccagccaca

SEQ ID NO: 1008913 - RNA, 19 nt, Artificial Sequence
  Description of Artificial Sequence: Synthetic oligonucleotide
ggcaauggugggaaguugu

SEQ ID NO: 1008914 - RNA, 19 nt, Artificial Sequence
  Description of Artificial Sequence: Synthetic oligonucleotide
acguaggagcaagguguga

SEQ ID NO: 1008915 - RNA, 19 nt, Artificial Sequence
  Description of Artificial Sequence: Synthetic oligonucleotide
ccgaucagccacgcgagac

SEQ ID NO: 1008916 - RNA, 19 nt, Artificial Sequence
  Description of Artificial Sequence: Synthetic oligonucleotide
gggccgaaaccagcagacg

SEQ ID NO: 1008917 - RNA, 19 nt, Artificial Sequence
  Description of Artificial Sequence: Synthetic oligonucleotide
cugguucccuccucaugaa

SEQ ID NO: 1008918 - RNA, 19 nt, Artificial Sequence
  Description of Artificial Sequence: Synthetic oligonucleotide
ucgugggaaugagcaucac

SEQ ID NO: 1008919 - RNA, 19 nt, Artificial Sequence
  Description of Artificial Sequence: Synthetic oligonucleotide
ggguucuuccacgcuccag

SEQ ID NO: 1008920 - RNA, 19 nt, Artificial Sequence
  Description of Artificial Sequence: Synthetic oligonucleotide
gcuagggaauaaugugugu

SEQ ID NO: 1008921 - RNA, 19 nt, Artificial Sequence
  Description of Artificial Sequence: Synthetic oligonucleotide
caucaccaccgcugagcca

SEQ ID NO: 1008922 - RNA, 19 nt, Artificial Sequence
  Description of Artificial Sequence: Synthetic oligonucleotide
ggagggaugucugccucga

SEQ ID NO: 1008923 - RNA, 19 nt, Artificial Sequence
  Description of Artificial Sequence: Synthetic oligonucleotide
cgguagaacuuaugaacca

SEQ ID NO: 1008924 - RNA, 19 nt, Artificial Sequence
  Description of Artificial Sequence: Synthetic oligonucleotide
gcaccacaacaagagaucu

SEQ ID NO: 1008925 - RNA, 19 nt, Artificial Sequence
  Description of Artificial Sequence: Synthetic oligonucleotide
gagggaugucugccucgaa

SEQ ID NO: 1008926 - RNA, 19 nt, Artificial Sequence
  Description of Artificial Sequence: Synthetic oligonucleotide
caccgcugagccaauguuu

SEQ ID NO: 1008927 - RNA, 19 nt, Artificial Sequence
  Description of Artificial Sequence: Synthetic oligonucleotide
ucaccaccgcugagccaau

SEQ ID NO: 1008928 - RNA, 19 nt, Artificial Sequence
  Description of Artificial Sequence: Synthetic oligonucleotide
cucauccugguucccuccu

SEQ ID NO: 1008929 - RNA, 19 nt, Artificial Sequence
  Description of Artificial Sequence: Synthetic oligonucleotide
cacauuggcucaggcaggu

SEQ ID NO: 1008930 - RNA, 19 nt, Artificial Sequence
  Description of Artificial Sequence: Synthetic oligonucleotide
ggaugcuaggcuggcagcu

SEQ ID NO: 1008931 - RNA, 19 nt, Artificial Sequence
  Description of Artificial Sequence: Synthetic oligonucleotide
ggcauggccuaccuacccu

SEQ ID NO: 1008932 - RNA, 19 nt, Artificial Sequence
  Description of Artificial Sequence: Synthetic oligonucleotide
cggagugccaagagcagga

SEQ ID NO: 1008933 - RNA, 19 nt, Artificial Sequence
  Description of Artificial Sequence: Synthetic oligonucleotide
ccacaacaagagaucucca

SEQ ID NO: 1008934 - RNA, 19 nt, Artificial Sequence
  Description of Artificial Sequence: Synthetic oligonucleotide
gcagacguaggagcaaggu

SEQ ID NO: 1008935 - RNA, 19 nt, Artificial Sequence
  Description of Artificial Sequence: Synthetic oligonucleotide
gccgaaaccagcagacgua

SEQ ID NO: 1008936 - RNA, 19 nt, Artificial Sequence
  Description of Artificial Sequence: Synthetic oligonucleotide
cguaggagcaaggugugaa

SEQ ID NO: 1008937 - RNA, 19 nt, Artificial Sequence
  Description of Artificial Sequence: Synthetic oligonucleotide
caagggcagcgccaggcau

SEQ ID NO: 1008938 - RNA, 19 nt, Artificial Sequence
  Description of Artificial Sequence: Synthetic oligonucleotide
ccacgcgagacagcccacc

SEQ ID NO: 1008939 - RNA, 19 nt, Artificial Sequence
  Description of Artificial Sequence: Synthetic oligonucleotide
gguucacggccagcgugac

SEQ ID NO: 1008940 - RNA, 19 nt, Artificial Sequence
  Description of Artificial Sequence: Synthetic oligonucleotide
agcgccaggcauggccaau

SEQ ID NO: 1008941 - RNA, 19 nt, Artificial Sequence
  Description of Artificial Sequence: Synthetic oligonucleotide
caccaccgcugagccaaug

SEQ ID NO: 1008942 - RNA, 19 nt, Artificial Sequence
  Description of Artificial Sequence: Synthetic oligonucleotide
cgaucagccacgcgagaca

SEQ ID NO: 1008943 - RNA, 19 nt, Artificial Sequence
  Description of Artificial Sequence: Synthetic oligonucleotide
gcuccccgcuccgaucagc

SEQ ID NO: 1008944 - RNA, 19 nt, Artificial Sequence
  Description of Artificial Sequence: Synthetic oligonucleotide
ggcuccccgcuccgaucag

SEQ ID NO: 1008945 - RNA, 19 nt, Artificial Sequence
  Description of Artificial Sequence: Synthetic oligonucleotide
cugccagcuagggaauaau

SEQ ID NO: 1008946 - RNA, 19 nt, Artificial Sequence
  Description of Artificial Sequence: Synthetic oligonucleotide
cagaaccaacugggcccuc

SEQ ID NO: 1008947 - RNA, 19 nt, Artificial Sequence
  Description of Artificial Sequence: Synthetic oligonucleotide
gguggcuccccgcuccgau

SEQ ID NO: 1008948 - RNA, 19 nt, Artificial Sequence
  Description of Artificial Sequence: Synthetic oligonucleotide
gcugccccgguagaacuua

SEQ ID NO: 1008949 - RNA, 19 nt, Artificial Sequence
  Description of Artificial Sequence: Synthetic oligonucleotide
gcgucugcgguugauucau

SEQ ID NO: 1008950 - RNA, 19 nt, Artificial Sequence
  Description of Artificial Sequence: Synthetic oligonucleotide
ccaugcuaagagcgaugaa

SEQ ID NO: 1008951 - RNA, 19 nt, Artificial Sequence
  Description of Artificial Sequence: Synthetic oligonucleotide
ccuguugcacauguggguu

SEQ ID NO: 1008952 - RNA, 19 nt, Artificial Sequence
  Description of Artificial Sequence: Synthetic oligonucleotide
ggaggggagcugguuuagu

SEQ ID NO: 1008953 - RNA, 19 nt, Artificial Sequence
  Description of Artificial Sequence: Synthetic oligonucleotide
cugccccgguagaacuuau

SEQ ID NO: 1008954 - RNA, 19 nt, Artificial Sequence
  Description of Artificial Sequence: Synthetic oligonucleotide
gcgagacagcccaccaggu

SEQ ID NO: 1008955 - RNA, 19 nt, Artificial Sequence
  Description of Artificial Sequence: Synthetic oligonucleotide
gccacgcgagacagcccac

SEQ ID NO: 1008956 - RNA, 19 nt, Artificial Sequence
  Description of Artificial Sequence: Synthetic oligonucleotide
gcgccaggcauggccaaua

SEQ ID NO: 1008957 - RNA, 19 nt, Artificial Sequence
  Description of Artificial Sequence: Synthetic oligonucleotide
ccaccgcugagccaauguu

SEQ ID NO: 1008958 - RNA, 19 nt, Artificial Sequence
  Description of Artificial Sequence: Synthetic oligonucleotide
ccacaacuguaaacaugau

SEQ ID NO: 1008959 - RNA, 19 nt, Artificial Sequence
  Description of Artificial Sequence: Synthetic oligonucleotide
guugcacauguggguucuu

SEQ ID NO: 1008960 - RNA, 19 nt, Artificial Sequence
  Description of Artificial Sequence: Synthetic oligonucleotide
ccgcugccccgguagaacu

SEQ ID NO: 1008961 - RNA, 19 nt, Artificial Sequence
  Description of Artificial Sequence: Synthetic oligonucleotide
ccgcugagccaauguuugu

SEQ ID NO: 1008962 - RNA, 19 nt, Artificial Sequence
  Description of Artificial Sequence: Synthetic oligonucleotide
cagugggcaccaggagaau

SEQ ID NO: 1008963 - RNA, 19 nt, Artificial Sequence
  Description of Artificial Sequence: Synthetic oligonucleotide
gggcagcgccaggcauggc

SEQ ID NO: 1008964 - RNA, 19 nt, Artificial Sequence
  Description of Artificial Sequence: Synthetic oligonucleotide
ucaauuuccaccaagacgc

SEQ ID NO: 1008965 - RNA, 19 nt, Artificial Sequence
  Description of Artificial Sequence: Synthetic oligonucleotide
uuguuaaagagcuucauga

SEQ ID NO: 1008966 - RNA, 19 nt, Artificial Sequence
  Description of Artificial Sequence: Synthetic oligonucleotide
aauugcuccauguccacac

SEQ ID NO: 1008967 - RNA, 19 nt, Artificial Sequence
  Description of Artificial Sequence: Synthetic oligonucleotide
gaugagaagauugacauug

SEQ ID NO: 1008968 - RNA, 19 nt, Artificial Sequence
  Description of Artificial Sequence: Synthetic oligonucleotide
accagauugucccagaagg

SEQ ID NO: 1008969 - RNA, 19 nt, Artificial Sequence
  Description of Artificial Sequence: Synthetic oligonucleotide
uucgagucugcucagaucc

SEQ ID NO: 1008970 - RNA, 19 nt, Artificial Sequence
  Description of Artificial Sequence: Synthetic oligonucleotide
agcacgguuaaugagaacc

SEQ ID NO: 1008971 - RNA, 19 nt, Artificial Sequence
  Description of Artificial Sequence: Synthetic oligonucleotide
agaagauugacauugacuu

SEQ ID NO: 1008972 - RNA, 19 nt, Artificial Sequence
  Description of Artificial Sequence: Synthetic oligonucleotide
uuugguacucagaagcagg

SEQ ID NO: 1008973 - RNA, 19 nt, Artificial Sequence
  Description of Artificial Sequence: Synthetic oligonucleotide
uguugaacccagaaggcgg

SEQ ID NO: 1008974 - RNA, 19 nt, Artificial Sequence
  Description of Artificial Sequence: Synthetic oligonucleotide
aggaacuuggcauuuacag

SEQ ID NO: 1008975 - RNA, 19 nt, Artificial Sequence
  Description of Artificial Sequence: Synthetic oligonucleotide
aacguugagcauuuucuuc

SEQ ID NO: 1008976 - RNA, 19 nt, Artificial Sequence
  Description of Artificial Sequence: Synthetic oligonucleotide
acauccugaagugagagac

SEQ ID NO: 1008977 - RNA, 19 nt, Artificial Sequence
  Description of Artificial Sequence: Synthetic oligonucleotide
uguguaaugaagacacggc

SEQ ID NO: 1008978 - RNA, 19 nt, Artificial Sequence
  Description of Artificial Sequence: Synthetic oligonucleotide
aguaacguugagcauuuuc

SEQ ID NO: 1008979 - RNA, 19 nt, Artificial Sequence
  Description of Artificial Sequence: Synthetic oligonucleotide
acuaggaggagaugauacc

SEQ ID NO: 1008980 - RNA, 19 nt, Artificial Sequence
  Description of Artificial Sequence: Synthetic oligonucleotide
caucaaguaacguugagca

SEQ ID NO: 1008981 - RNA, 19 nt, Artificial Sequence
  Description of Artificial Sequence: Synthetic oligonucleotide
guacacuugggguaguugg

SEQ ID NO: 1008982 - RNA, 19 nt, Artificial Sequence
  Description of Artificial Sequence: Synthetic oligonucleotide
gacacuucgagucugcuca

SEQ ID NO: 1008983 - RNA, 19 nt, Artificial Sequence
  Description of Artificial Sequence: Synthetic oligonucleotide
aagccguugcaccuuuacc

SEQ ID NO: 1008984 - RNA, 19 nt, Artificial Sequence
  Description of Artificial Sequence: Synthetic oligonucleotide
uccucauuggcucuggcca

SEQ ID NO: 1008985 - RNA, 19 nt, Artificial Sequence
  Description of Artificial Sequence: Synthetic oligonucleotide
ucgaagagccacauugggg

SEQ ID NO: 1008986 - RNA, 19 nt, Artificial Sequence
  Description of Artificial Sequence: Synthetic oligonucleotide
cucuauccauccuugaagc

SEQ ID NO: 1008987 - RNA, 19 nt, Artificial Sequence
  Description of Artificial Sequence: Synthetic oligonucleotide
cuuggcugccacuaggagg

SEQ ID NO: 1008988 - RNA, 19 nt, Artificial Sequence
  Description of Artificial Sequence: Synthetic oligonucleotide
gaugauaccgaggagcaac

SEQ ID NO: 1008989 - RNA, 19 nt, Artificial Sequence
  Description of Artificial Sequence: Synthetic oligonucleotide
cuguguaaugaagacacgg

SEQ ID NO: 1008990 - RNA, 19 nt, Artificial Sequence
  Description of Artificial Sequence: Synthetic oligonucleotide
cucgagagaauccccaggg

SEQ ID NO: 1008991 - RNA, 19 nt, Artificial Sequence
  Description of Artificial Sequence: Synthetic oligonucleotide
gaccugaucuguuucuucc

SEQ ID NO: 1008992 - RNA, 19 nt, Artificial Sequence
  Description of Artificial Sequence: Synthetic oligonucleotide
ucuguuugguacucagaag

SEQ ID NO: 1008993 - RNA, 19 nt, Artificial Sequence
  Description of Artificial Sequence: Synthetic oligonucleotide
acguugucauguugaaccc

SEQ ID NO: 1008994 - RNA, 19 nt, Artificial Sequence
  Description of Artificial Sequence: Synthetic oligonucleotide
aucuccucgagagaauccc

SEQ ID NO: 1008995 - RNA, 19 nt, Artificial Sequence
  Description of Artificial Sequence: Synthetic oligonucleotide
agccguugcaccuuuacca

SEQ ID NO: 1008996 - RNA, 19 nt, Artificial Sequence
  Description of Artificial Sequence: Synthetic oligonucleotide
uuccgaaggaacuucuugu

SEQ ID NO: 1008997 - RNA, 19 nt, Artificial Sequence
  Description of Artificial Sequence: Synthetic oligonucleotide
auugacuuuggcuuuguua

SEQ ID NO: 1008998 - RNA, 19 nt, Artificial Sequence
  Description of Artificial Sequence: Synthetic oligonucleotide
ugccagauguccuuggcca

SEQ ID NO: 1008999 - RNA, 19 nt, Artificial Sequence
  Description of Artificial Sequence: Synthetic oligonucleotide
ugagaagauugacauugac

SEQ ID NO: 1009000 - RNA, 19 nt, Artificial Sequence
  Description of Artificial Sequence: Synthetic oligonucleotide
uaccagggcaucaaguaac

SEQ ID NO: 1009001 - RNA, 19 nt, Artificial Sequence
  Description of Artificial Sequence: Synthetic oligonucleotide
uccaacuuguuggugagug

SEQ ID NO: 1009002 - RNA, 19 nt, Artificial Sequence
  Description of Artificial Sequence: Synthetic oligonucleotide
ugcgcugguugccagaugu

SEQ ID NO: 1009003 - RNA, 19 nt, Artificial Sequence
  Description of Artificial Sequence: Synthetic oligonucleotide
uauccauccuugaagccgu

SEQ ID NO: 1009004 - RNA, 19 nt, Artificial Sequence
  Description of Artificial Sequence: Synthetic oligonucleotide
accugaucuguuucuuccc

SEQ ID NO: 1009005 - RNA, 19 nt, Artificial Sequence
  Description of Artificial Sequence: Synthetic oligonucleotide
uguuucuucccacggcagc

SEQ ID NO: 1009006 - RNA, 19 nt, Artificial Sequence
  Description of Artificial Sequence: Synthetic oligonucleotide
auaccgaggagcaacauga

SEQ ID NO: 1009007 - RNA, 19 nt, Artificial Sequence
  Description of Artificial Sequence: Synthetic oligonucleotide
cacaccaagggcuauuuuc

SEQ ID NO: 1009008 - RNA, 19 nt, Artificial Sequence
  Description of Artificial Sequence: Synthetic oligonucleotide
uguggcuacguugucaugu

SEQ ID NO: 1009009 - RNA, 19 nt, Artificial Sequence
  Description of Artificial Sequence: Synthetic oligonucleotide
ucuggccacucccuggcgg

SEQ ID NO: 1009010 - RNA, 19 nt, Artificial Sequence
  Description of Artificial Sequence: Synthetic oligonucleotide
uuugcaucuaggcccugca

SEQ ID NO: 1009011 - RNA, 19 nt, Artificial Sequence
  Description of Artificial Sequence: Synthetic oligonucleotide
cucgaagagccacauuggg

SEQ ID NO: 1009012 - RNA, 19 nt, Artificial Sequence
  Description of Artificial Sequence: Synthetic oligonucleotide
aggagcaacaugaaggcug

SEQ ID NO: 1009013 - RNA, 19 nt, Artificial Sequence
  Description of Artificial Sequence: Synthetic oligonucleotide
gguaguggagcugaaauug

SEQ ID NO: 1009014 - RNA, 19 nt, Artificial Sequence
  Description of Artificial Sequence: Synthetic oligonucleotide
ucuauccauccuugaagcc

SEQ ID NO: 1009015 - RNA, 19 nt, Artificial Sequence
  Description of Artificial Sequence: Synthetic oligonucleotide
aggaacuaucccucgaaga

SEQ ID NO: 1009016 - RNA, 19 nt, Artificial Sequence
  Description of Artificial Sequence: Synthetic oligonucleotide
ggagaugauaccgaggagc

SEQ ID NO: 1009017 - RNA, 19 nt, Artificial Sequence
  Description of Artificial Sequence: Synthetic oligonucleotide
aguaucggacuccagcccu

SEQ ID NO: 1009018 - RNA, 19 nt, Artificial Sequence
  Description of Artificial Sequence: Synthetic oligonucleotide
aagggguacacuuggggua

SEQ ID NO: 1009019 - RNA, 19 nt, Artificial Sequence
  Description of Artificial Sequence: Synthetic oligonucleotide
agggcaucaaguaacguug

SEQ ID NO: 1009020 - RNA, 19 nt, Artificial Sequence
  Description of Artificial Sequence: Synthetic oligonucleotide
cauugaguggugucgucgc

SEQ ID NO: 1009021 - RNA, 19 nt, Artificial Sequence
  Description of Artificial Sequence: Synthetic oligonucleotide
ugcaccuuuaccagggcau

SEQ ID NO: 1009022 - RNA, 19 nt, Artificial Sequence
  Description of Artificial Sequence: Synthetic oligonucleotide
ucaggaacuaucccucgaa

SEQ ID NO: 1009023 - RNA, 19 nt, Artificial Sequence
  Description of Artificial Sequence: Synthetic oligonucleotide
uuaccagggcaucaaguaa

SEQ ID NO: 1009024 - RNA, 19 nt, Artificial Sequence
  Description of Artificial Sequence: Synthetic oligonucleotide
ucccugguagcagucaccg

SEQ ID NO: 1009025 - RNA, 19 nt, Artificial Sequence
  Description of Artificial Sequence: Synthetic oligonucleotide
uaggaggagaugauaccga

SEQ ID NO: 1009026 - RNA, 19 nt, Artificial Sequence
  Description of Artificial Sequence: Synthetic oligonucleotide
gacgucgcuuccuugcugc

SEQ ID NO: 1009027 - RNA, 19 nt, Artificial Sequence
  Description of Artificial Sequence: Synthetic oligonucleotide
uucagggcacaugagcucc

SEQ ID NO: 1009028 - RNA, 19 nt, Artificial Sequence
  Description of Artificial Sequence: Synthetic oligonucleotide
caagacgcccuuuuccagc

SEQ ID NO: 1009029 - RNA, 19 nt, Artificial Sequence
  Description of Artificial Sequence: Synthetic oligonucleotide
ucuuggcugccacuaggag

SEQ ID NO: 1009030 - RNA, 19 nt, Artificial Sequence
  Description of Artificial Sequence: Synthetic oligonucleotide
uguauccccaggacgucgc

SEQ ID NO: 1009031 - RNA, 19 nt, Artificial Sequence
  Description of Artificial Sequence: Synthetic oligonucleotide
aagacgcccuuuuccagca

SEQ ID NO: 1009032 - RNA, 19 nt, Artificial Sequence
  Description of Artificial Sequence: Synthetic oligonucleotide
aggucauuccagcucagga

SEQ ID NO: 1009033 - RNA, 19 nt, Artificial Sequence
  Description of Artificial Sequence: Synthetic oligonucleotide
agcugaaauugcuccaugu

SEQ ID NO: 1009034 - RNA, 19 nt, Artificial Sequence
  Description of Artificial Sequence: Synthetic oligonucleotide
ugcucagauccacuugccc

SEQ ID NO: 1009035 - RNA, 19 nt, Artificial Sequence
  Description of Artificial Sequence: Synthetic oligonucleotide
agucaggaacuaucccucg

SEQ ID NO: 1009036 - RNA, 19 nt, Artificial Sequence
  Description of Artificial Sequence: Synthetic oligonucleotide
cauugggguuccuuaacac

SEQ ID NO: 1009037 - RNA, 19 nt, Artificial Sequence
  Description of Artificial Sequence: Synthetic oligonucleotide
auccccaggacgucgcuuc

SEQ ID NO: 1009038 - RNA, 19 nt, Artificial Sequence
  Description of Artificial Sequence: Synthetic oligonucleotide
agaaggcggcuguaucccc

SEQ ID NO: 1009039 - RNA, 19 nt, Artificial Sequence
  Description of Artificial Sequence: Synthetic oligonucleotide
gcucuauccauccuugaag

SEQ ID NO: 1009040 - RNA, 19 nt, Artificial Sequence
  Description of Artificial Sequence: Synthetic oligonucleotide
guacugguuguaguagucg

SEQ ID NO: 1009041 - RNA, 19 nt, Artificial Sequence
  Description of Artificial Sequence: Synthetic oligonucleotide
agggcuauuuucugaggug

SEQ ID NO: 1009042 - RNA, 19 nt, Artificial Sequence
  Description of Artificial Sequence: Synthetic oligonucleotide
guuugguacucagaagcag

SEQ ID NO: 1009043 - RNA, 19 nt, Artificial Sequence
  Description of Artificial Sequence: Synthetic oligonucleotide
cagagcacgguuaaugaga

SEQ ID NO: 1009044 - RNA, 19 nt, Artificial Sequence
  Description of Artificial Sequence: Synthetic oligonucleotide
ggcgccaacacaucagccg

SEQ ID NO: 1009045 - RNA, 19 nt, Artificial Sequence
  Description of Artificial Sequence: Synthetic oligonucleotide
acgcagguugcgcuggacg

SEQ ID NO: 1009046 - RNA, 19 nt, Artificial Sequence
  Description of Artificial Sequence: Synthetic oligonucleotide
caggacgucgcuuccuugc

SEQ ID NO: 1009047 - RNA, 19 nt, Artificial Sequence
  Description of Artificial Sequence: Synthetic oligonucleotide
ugagaaggacaggaucucc

SEQ ID NO: 1009048 - RNA, 19 nt, Artificial Sequence
  Description of Artificial Sequence: Synthetic oligonucleotide
aaggcucuauccauccuug

SEQ ID NO: 1009049 - RNA, 19 nt, Artificial Sequence
  Description of Artificial Sequence: Synthetic oligonucleotide
uggagcugaaauugcucca

SEQ ID NO: 1009050 - RNA, 19 nt, Artificial Sequence
  Description of Artificial Sequence: Synthetic oligonucleotide
gaagccguugcaccuuuac

SEQ ID NO: 1009051 - RNA, 19 nt, Artificial Sequence
  Description of Artificial Sequence: Synthetic oligonucleotide
guaacguugagcauuuucu

SEQ ID NO: 1009052 - RNA, 19 nt, Artificial Sequence
  Description of Artificial Sequence: Synthetic oligonucleotide
gagaagauugacauugacu

SEQ ID NO: 1009053 - RNA, 19 nt, Artificial Sequence
  Description of Artificial Sequence: Synthetic oligonucleotide
uuuugcaucuaggcccugc

SEQ ID NO: 1009054 - RNA, 19 nt, Artificial Sequence
  Description of Artificial Sequence: Synthetic oligonucleotide
aucuaggcccugcagugug

SEQ ID NO: 1009055 - RNA, 19 nt, Artificial Sequence
  Description of Artificial Sequence: Synthetic oligonucleotide
cuguagccgacgcagguug

SEQ ID NO: 1009056 - RNA, 19 nt, Artificial Sequence
  Description of Artificial Sequence: Synthetic oligonucleotide
gucgcccuguuccucauag

SEQ ID NO: 1009057 - RNA, 19 nt, Artificial Sequence
  Description of Artificial Sequence: Synthetic oligonucleotide
caagggcuauuuucugagg

SEQ ID NO: 1009058 - RNA, 19 nt, Artificial Sequence
  Description of Artificial Sequence: Synthetic oligonucleotide
uaucccucgaagagccaca

SEQ ID NO: 1009059 - RNA, 19 nt, Artificial Sequence
  Description of Artificial Sequence: Synthetic oligonucleotide
agauugacauugacuuugg

SEQ ID NO: 1009060 - RNA, 19 nt, Artificial Sequence
  Description of Artificial Sequence: Synthetic oligonucleotide
cacagucaggaacuauccc

SEQ ID NO: 1009061 - RNA, 19 nt, Artificial Sequence
  Description of Artificial Sequence: Synthetic oligonucleotide
gacacggcugcuucucccc

SEQ ID NO: 1009062 - RNA, 19 nt, Artificial Sequence
  Description of Artificial Sequence: Synthetic oligonucleotide
ucggacuccagcccuucca

SEQ ID NO: 1009063 - RNA, 19 nt, Artificial Sequence
  Description of Artificial Sequence: Synthetic oligonucleotide
ggcgaagggguacacuugg

SEQ ID NO: 1009064 - RNA, 19 nt, Artificial Sequence
  Description of Artificial Sequence: Synthetic oligonucleotide
ugaguggugucgucgcaga

SEQ ID NO: 1009065 - RNA, 19 nt, Artificial Sequence
  Description of Artificial Sequence: Synthetic oligonucleotide
agcaacaugaaggcugaca

SEQ ID NO: 1009066 - RNA, 19 nt, Artificial Sequence
  Description of Artificial Sequence: Synthetic oligonucleotide
caggaacuaucccucgaag

SEQ ID NO: 1009067 - RNA, 19 nt, Artificial Sequence
  Description of Artificial Sequence: Synthetic oligonucleotide
agggagugugccaucauug

SEQ ID NO: 1009068 - RNA, 19 nt, Artificial Sequence
  Description of Artificial Sequence: Synthetic oligonucleotide
aacacccgcucugucuggg

SEQ ID NO: 1009069 - RNA, 19 nt, Artificial Sequence
  Description of Artificial Sequence: Synthetic oligonucleotide
ucgagagaauccccagggu

SEQ ID NO: 1009070 - RNA, 19 nt, Artificial Sequence
  Description of Artificial Sequence: Synthetic oligonucleotide
ugguaguggagcugaaauu

SEQ ID NO: 1009071 - RNA, 19 nt, Artificial Sequence
  Description of Artificial Sequence: Synthetic oligonucleotide
ggugucgucgcagagacuc

SEQ ID NO: 1009072 - RNA, 19 nt, Artificial Sequence
  Description of Artificial Sequence: Synthetic oligonucleotide
ggugucgucaguaucggac

SEQ ID NO: 1009073 - RNA, 19 nt, Artificial Sequence
  Description of Artificial Sequence: Synthetic oligonucleotide
cuggcgccaacacaucagc

SEQ ID NO: 1009074 - RNA, 19 nt, Artificial Sequence
  Description of Artificial Sequence: Synthetic oligonucleotide
ugucgucaguaucggacuc

SEQ ID NO: 1009075 - RNA, 19 nt, Artificial Sequence
  Description of Artificial Sequence: Synthetic oligonucleotide
caguaucggacuccagccc

SEQ ID NO: 1009076 - RNA, 19 nt, Artificial Sequence
  Description of Artificial Sequence: Synthetic oligonucleotide
caauuuccaccaagacgcc

SEQ ID NO: 1009077 - RNA, 19 nt, Artificial Sequence
  Description of Artificial Sequence: Synthetic oligonucleotide
cuaucccucgaagagccac

SEQ ID NO: 1009078 - RNA, 19 nt, Artificial Sequence
  Description of Artificial Sequence: Synthetic oligonucleotide
aucaaguaacguugagcau

SEQ ID NO: 1009079 - RNA, 19 nt, Artificial Sequence
  Description of Artificial Sequence: Synthetic oligonucleotide
ugagugucagggacacuuc

SEQ ID NO: 1009080 - RNA, 19 nt, Artificial Sequence
  Description of Artificial Sequence: Synthetic oligonucleotide
guugaacccagaaggcggc

SEQ ID NO: 1009081 - RNA, 19 nt, Artificial Sequence
  Description of Artificial Sequence: Synthetic oligonucleotide
ucaugacagccacacccuc

SEQ ID NO: 1009082 - RNA, 19 nt, Artificial Sequence
  Description of Artificial Sequence: Synthetic oligonucleotide
uaacacccgcucugucugg

SEQ ID NO: 1009083 - RNA, 19 nt, Artificial Sequence
  Description of Artificial Sequence: Synthetic oligonucleotide
cuucagggcacaugagcuc

SEQ ID NO: 1009084 - RNA, 19 nt, Artificial Sequence
  Description of Artificial Sequence: Synthetic oligonucleotide
uguagccgacgcagguugc

SEQ ID NO: 1009085 - RNA, 19 nt, Artificial Sequence
  Description of Artificial Sequence: Synthetic oligonucleotide
uggcgccaacacaucagcc

SEQ ID NO: 1009086 - RNA, 19 nt, Artificial Sequence
  Description of Artificial Sequence: Synthetic oligonucleotide
acgguuaaugagaaccaca

SEQ ID NO: 1009087 - RNA, 19 nt, Artificial Sequence
  Description of Artificial Sequence: Synthetic oligonucleotide
ccaucauugaguggugucg

SEQ ID NO: 1009088 - RNA, 19 nt, Artificial Sequence
  Description of Artificial Sequence: Synthetic oligonucleotide
ugccuuccgccguugccgg

SEQ ID NO: 1009089 - RNA, 19 nt, Artificial Sequence
  Description of Artificial Sequence: Synthetic oligonucleotide
cuucgagucugcucagauc

SEQ ID NO: 1009090 - RNA, 19 nt, Artificial Sequence
  Description of Artificial Sequence: Synthetic oligonucleotide
gcaucuaggcccugcagug

SEQ ID NO: 1009091 - RNA, 19 nt, Artificial Sequence
  Description of Artificial Sequence: Synthetic oligonucleotide
ucaccggcccugaccagcc

SEQ ID NO: 1009092 - RNA, 19 nt, Artificial Sequence
  Description of Artificial Sequence: Synthetic oligonucleotide
aguagucgcccuguuccuc

SEQ ID NO: 1009093 - RNA, 19 nt, Artificial Sequence
  Description of Artificial Sequence: Synthetic oligonucleotide
auugaguggugucgucgca

SEQ ID NO: 1009094 - RNA, 19 nt, Artificial Sequence
  Description of Artificial Sequence: Synthetic oligonucleotide
ucuccgggcgugaugucaa

SEQ ID NO: 1009095 - RNA, 19 nt, Artificial Sequence
  Description of Artificial Sequence: Synthetic oligonucleotide
uggcuacguugucauguug

SEQ ID NO: 1009096 - RNA, 19 nt, Artificial Sequence
  Description of Artificial Sequence: Synthetic oligonucleotide
ucgucaguaucggacucca

SEQ ID NO: 1009097 - RNA, 19 nt, Artificial Sequence
  Description of Artificial Sequence: Synthetic oligonucleotide
uggugagugucagggacac

SEQ ID NO: 1009098 - RNA, 19 nt, Artificial Sequence
  Description of Artificial Sequence: Synthetic oligonucleotide
gcucagauccacuugccca

SEQ ID NO: 1009099 - RNA, 19 nt, Artificial Sequence
  Description of Artificial Sequence: Synthetic oligonucleotide
ugucgucgcagagacucug

SEQ ID NO: 1009100 - RNA, 19 nt, Artificial Sequence
  Description of Artificial Sequence: Synthetic oligonucleotide
cugcucagauccacuugcc

SEQ ID NO: 1009101 - RNA, 19 nt, Artificial Sequence
  Description of Artificial Sequence: Synthetic oligonucleotide
uaguagucgcccuguuccu

SEQ ID NO: 1009102 - RNA, 19 nt, Artificial Sequence
  Description of Artificial Sequence: Synthetic oligonucleotide
gaguggugucgucgcagag

SEQ ID NO: 1009103 - RNA, 19 nt, Artificial Sequence
  Description of Artificial Sequence: Synthetic oligonucleotide
ugguuguaguagucgcccu

SEQ ID NO: 1009104 - RNA, 19 nt, Artificial Sequence
  Description of Artificial Sequence: Synthetic oligonucleotide
gucgcagagacucugguuu

SEQ ID NO: 1009105 - RNA, 19 nt, Artificial Sequence
  Description of Artificial Sequence: Synthetic oligonucleotide
gaugucaagaugacauccu

SEQ ID NO: 1009106 - RNA, 19 nt, Artificial Sequence
  Description of Artificial Sequence: Synthetic oligonucleotide
cuggugucgucaguaucgg

SEQ ID NO: 1009107 - RNA, 19 nt, Artificial Sequence
  Description of Artificial Sequence: Synthetic oligonucleotide
cuucuaccugggccaagcc

SEQ ID NO: 1009108 - RNA, 19 nt, Artificial Sequence
  Description of Artificial Sequence: Synthetic oligonucleotide
ccagauugucccagaaggc

SEQ ID NO: 1009109 - RNA, 19 nt, Artificial Sequence
  Description of Artificial Sequence: Synthetic oligonucleotide
cguugcaccuuuaccaggg

SEQ ID NO: 1009110 - RNA, 19 nt, Artificial Sequence
  Description of Artificial Sequence: Synthetic oligonucleotide
guagucgcccuguuccuca

SEQ ID NO: 1009111 - RNA, 19 nt, Artificial Sequence
  Description of Artificial Sequence: Synthetic oligonucleotide
cuuucccagccacaguaca

SEQ ID NO: 1009112 - RNA, 19 nt, Artificial Sequence
  Description of Artificial Sequence: Synthetic oligonucleotide
cagccuguaggucauucca

SEQ ID NO: 1009113 - RNA, 19 nt, Artificial Sequence
  Description of Artificial Sequence: Synthetic oligonucleotide
cagucaccggcccugacca

SEQ ID NO: 1009114 - RNA, 19 nt, Artificial Sequence
  Description of Artificial Sequence: Synthetic oligonucleotide
gagacucugguuucugggu

SEQ ID NO: 1009115 - RNA, 19 nt, Artificial Sequence
  Description of Artificial Sequence: Synthetic oligonucleotide
cacgguuaaugagaaccac

SEQ ID NO: 1009116 - RNA, 19 nt, Artificial Sequence
  Description of Artificial Sequence: Synthetic oligonucleotide
ccucgaagagccacauugg

SEQ ID NO: 1009117 - RNA, 19 nt, Artificial Sequence
  Description of Artificial Sequence: Synthetic oligonucleotide
agagcacgguuaaugagaa

SEQ ID NO: 1009118 - RNA, 19 nt, Artificial Sequence
  Description of Artificial Sequence: Synthetic oligonucleotide
guggucaaggcaggccugg

SEQ ID NO: 1009119 - RNA, 19 nt, Artificial Sequence
  Description of Artificial Sequence: Synthetic oligonucleotide
caaaccuuccugccucauc

SEQ ID NO: 1009120 - RNA, 19 nt, Artificial Sequence
  Description of Artificial Sequence: Synthetic oligonucleotide
guagccgacgcagguugcg

SEQ ID NO: 1009121 - RNA, 19 nt, Artificial Sequence
  Description of Artificial Sequence: Synthetic oligonucleotide
acacuucgagucugcucag

SEQ ID NO: 1009122 - RNA, 19 nt, Artificial Sequence
  Description of Artificial Sequence: Synthetic oligonucleotide
cuacguugucauguugaac

SEQ ID NO: 1009123 - RNA, 19 nt, Artificial Sequence
  Description of Artificial Sequence: Synthetic oligonucleotide
ggaggagaugauaccgagg

SEQ ID NO: 1009124 - RNA, 19 nt, Artificial Sequence
  Description of Artificial Sequence: Synthetic oligonucleotide
agggacacuucgagucugc

SEQ ID NO: 1009125 - RNA, 19 nt, Artificial Sequence
  Description of Artificial Sequence: Synthetic oligonucleotide
gccguugcaccuuuaccag

SEQ ID NO: 1009126 - RNA, 19 nt, Artificial Sequence
  Description of Artificial Sequence: Synthetic oligonucleotide
ugggcggcuguguaaugaa

SEQ ID NO: 1009127 - RNA, 19 nt, Artificial Sequence
  Description of Artificial Sequence: Synthetic oligonucleotide
aggacgucgcuuccuugcu

SEQ ID NO: 1009128 - RNA, 19 nt, Artificial Sequence
  Description of Artificial Sequence: Synthetic oligonucleotide
ucgcagagacucugguuuc

SEQ ID NO: 1009129 - RNA, 19 nt, Artificial Sequence
  Description of Artificial Sequence: Synthetic oligonucleotide
gucgucaguaucggacucc

SEQ ID NO: 1009130 - RNA, 19 nt, Artificial Sequence
  Description of Artificial Sequence: Synthetic oligonucleotide
gggcgugaugucaagauga

SEQ ID NO: 1009131 - RNA, 19 nt, Artificial Sequence
  Description of Artificial Sequence: Synthetic oligonucleotide
caagcccguagcaggguuc

SEQ ID NO: 1009132 - RNA, 19 nt, Artificial Sequence
  Description of Artificial Sequence: Synthetic oligonucleotide
cugguaguggagcugaaau

SEQ ID NO: 1009133 - RNA, 19 nt, Artificial Sequence
  Description of Artificial Sequence: Synthetic oligonucleotide
cucaucuccgggcgugaug

SEQ ID NO: 1009134 - RNA, 19 nt, Artificial Sequence
  Description of Artificial Sequence: Synthetic oligonucleotide
caggguucaccagauuguc

SEQ ID NO: 1009135 - RNA, 19 nt, Artificial Sequence
  Description of Artificial Sequence: Synthetic oligonucleotide
gucgucgcagagacucugg

SEQ ID NO: 1009136 - RNA, 19 nt, Artificial Sequence
  Description of Artificial Sequence: Synthetic oligonucleotide
augacauccugaagugaga

SEQ ID NO: 1009137 - RNA, 19 nt, Artificial Sequence
  Description of Artificial Sequence: Synthetic oligonucleotide
gguugcgcuggacgcgucg

SEQ ID NO: 1009138 - RNA, 19 nt, Artificial Sequence
  Description of Artificial Sequence: Synthetic oligonucleotide
uggugucgucaguaucgga

SEQ ID NO: 1009139 - RNA, 19 nt, Artificial Sequence
  Description of Artificial Sequence: Synthetic oligonucleotide
aucuccgggcgugauguca

SEQ ID NO: 1009140 - RNA, 19 nt, Artificial Sequence
  Description of Artificial Sequence: Synthetic oligonucleotide
ggcacaugagcuccuucac

SEQ ID NO: 1009141 - RNA, 19 nt, Artificial Sequence
  Description of Artificial Sequence: Synthetic oligonucleotide
ggcuacguugucauguuga

SEQ ID NO: 1009142 - RNA, 19 nt, Artificial Sequence
  Description of Artificial Sequence: Synthetic oligonucleotide
agccgacgcagguugcgcu

SEQ ID NO: 1009143 - RNA, 19 nt, Artificial Sequence
  Description of Artificial Sequence: Synthetic oligonucleotide
gacucugguuucugggugu

SEQ ID NO: 1009144 - RNA, 19 nt, Artificial Sequence
  Description of Artificial Sequence: Synthetic oligonucleotide
gcggcuguguaaugaagac

SEQ ID NO: 1009145 - RNA, 19 nt, Artificial Sequence
  Description of Artificial Sequence: Synthetic oligonucleotide
uccccaggacgucgcuucc

SEQ ID NO: 1009146 - RNA, 19 nt, Artificial Sequence
  Description of Artificial Sequence: Synthetic oligonucleotide
gucaccggcccugaccagc

SEQ ID NO: 1009147 - RNA, 19 nt, Artificial Sequence
  Description of Artificial Sequence: Synthetic oligonucleotide
gguacacuugggguaguug

SEQ ID NO: 1009148 - RNA, 19 nt, Artificial Sequence
  Description of Artificial Sequence: Synthetic oligonucleotide
ugcgcuggacgcgucgcug

SEQ ID NO: 1009149 - RNA, 19 nt, Artificial Sequence
  Description of Artificial Sequence: Synthetic oligonucleotide
gaacccagaaggcggcugu

SEQ ID NO: 1009150 - RNA, 19 nt, Artificial Sequence
  Description of Artificial Sequence: Synthetic oligonucleotide
ccucgagagaauccccagg

SEQ ID NO: 1009151 - RNA, 19 nt, Artificial Sequence
  Description of Artificial Sequence: Synthetic oligonucleotide
gugagugucagggacacuu

SEQ ID NO: 1009152 - RNA, 19 nt, Artificial Sequence
  Description of Artificial Sequence: Synthetic oligonucleotide
gugucgucaguaucggacu

SEQ ID NO: 1009153 - RNA, 19 nt, Artificial Sequence
  Description of Artificial Sequence: Synthetic oligonucleotide
gcugagaaggacaggaucu

SEQ ID NO: 1009154 - RNA, 19 nt, Artificial Sequence
  Description of Artificial Sequence: Synthetic oligonucleotide
ggcccgaagucucagcauc

SEQ ID NO: 1009155 - RNA, 19 nt, Artificial Sequence
  Description of Artificial Sequence: Synthetic oligonucleotide
uuccucauagaaggugguu

SEQ ID NO: 1009156 - RNA, 19 nt, Artificial Sequence
  Description of Artificial Sequence: Synthetic oligonucleotide
uagccgacgcagguugcgc

SEQ ID NO: 1009157 - RNA, 19 nt, Artificial Sequence
  Description of Artificial Sequence: Synthetic oligonucleotide
accuuuaccagggcaucaa

SEQ ID NO: 1009158 - RNA, 19 nt, Artificial Sequence
  Description of Artificial Sequence: Synthetic oligonucleotide
guugcgcuggacgcgucgc

SEQ ID NO: 1009159 - RNA, 19 nt, Artificial Sequence
  Description of Artificial Sequence: Synthetic oligonucleotide
ucgcuuccagagcacgguu

SEQ ID NO: 1009160 - RNA, 19 nt, Artificial Sequence
  Description of Artificial Sequence: Synthetic oligonucleotide
gguacucagaagcaggcuu

SEQ ID NO: 1009161 - RNA, 19 nt, Artificial Sequence
  Description of Artificial Sequence: Synthetic oligonucleotide
gcuguguaaugaagacacg

SEQ ID NO: 1009162 - RNA, 19 nt, Artificial Sequence
  Description of Artificial Sequence: Synthetic oligonucleotide
uugaacccagaaggcggcu

SEQ ID NO: 1009163 - RNA, 19 nt, Artificial Sequence
  Description of Artificial Sequence: Synthetic oligonucleotide
gagcacgguuaaugagaac

SEQ ID NO: 1009164 - RNA, 19 nt, Artificial Sequence
  Description of Artificial Sequence: Synthetic oligonucleotide
acacggcugcuucuccccu

SEQ ID NO: 1009165 - RNA, 19 nt, Artificial Sequence
  Description of Artificial Sequence: Synthetic oligonucleotide
ggcucuauccauccuugaa

SEQ ID NO: 1009166 - RNA, 19 nt, Artificial Sequence
  Description of Artificial Sequence: Synthetic oligonucleotide
cucagauccacuugcccau

SEQ ID NO: 1009167 - RNA, 19 nt, Artificial Sequence
  Description of Artificial Sequence: Synthetic oligonucleotide
caaguaacguugagcauuu

SEQ ID NO: 1009168 - RNA, 19 nt, Artificial Sequence
  Description of Artificial Sequence: Synthetic oligonucleotide
ccaagacgcccuuuuccag

SEQ ID NO: 1009169 - RNA, 19 nt, Artificial Sequence
  Description of Artificial Sequence: Synthetic oligonucleotide
ggagcaacaugaaggcuga

SEQ ID NO: 1009170 - RNA, 19 nt, Artificial Sequence
  Description of Artificial Sequence: Synthetic oligonucleotide
cagggacacuucgagucug

SEQ ID NO: 1009171 - RNA, 19 nt, Artificial Sequence
  Description of Artificial Sequence: Synthetic oligonucleotide
uggcccgaagucucagcau

SEQ ID NO: 1009172 - RNA, 19 nt, Artificial Sequence
  Description of Artificial Sequence: Synthetic oligonucleotide
guuguaguagucgcccugu

SEQ ID NO: 1009173 - RNA, 19 nt, Artificial Sequence
  Description of Artificial Sequence: Synthetic oligonucleotide
ugcccaucuguggcuacgu

SEQ ID NO: 1009174 - RNA, 19 nt, Artificial Sequence
  Description of Artificial Sequence: Synthetic oligonucleotide
ggaccugaucuguuucuuc

SEQ ID NO: 1009175 - RNA, 19 nt, Artificial Sequence
  Description of Artificial Sequence: Synthetic oligonucleotide
agcugggcggcuguguaau

SEQ ID NO: 1009176 - RNA, 19 nt, Artificial Sequence
  Description of Artificial Sequence: Synthetic oligonucleotide
ggcggcuguguaaugaaga

SEQ ID NO: 1009177 - RNA, 19 nt, Artificial Sequence
  Description of Artificial Sequence: Synthetic oligonucleotide
agacgcccuuuuccagcag

SEQ ID NO: 1009178 - RNA, 19 nt, Artificial Sequence
  Description of Artificial Sequence: Synthetic oligonucleotide
ucgcccuguuccucauaga

SEQ ID NO: 1009179 - RNA, 19 nt, Artificial Sequence
  Description of Artificial Sequence: Synthetic oligonucleotide
agucaccggcccugaccag

SEQ ID NO: 1009180 - RNA, 19 nt, Artificial Sequence
  Description of Artificial Sequence: Synthetic oligonucleotide
uaucggacuccagcccuuc

SEQ ID NO: 1009181 - RNA, 19 nt, Artificial Sequence
  Description of Artificial Sequence: Synthetic oligonucleotide
ucccucgcuuccagagcac

SEQ ID NO: 1009182 - RNA, 19 nt, Artificial Sequence
  Description of Artificial Sequence: Synthetic oligonucleotide
gcagguugcgcuggacgcg

SEQ ID NO: 1009183 - RNA, 19 nt, Artificial Sequence
  Description of Artificial Sequence: Synthetic oligonucleotide
ccguugcaccuuuaccagg

SEQ ID NO: 1009184 - RNA, 19 nt, Artificial Sequence
  Description of Artificial Sequence: Synthetic oligonucleotide
ggccaagcccguagcaggg

SEQ ID NO: 1009185 - RNA, 19 nt, Artificial Sequence
  Description of Artificial Sequence: Synthetic oligonucleotide
ucacaggccuggcgccaac

SEQ ID NO: 1009186 - RNA, 19 nt, Artificial Sequence
  Description of Artificial Sequence: Synthetic oligonucleotide
gccacacccucauacugca

SEQ ID NO: 1009187 - RNA, 19 nt, Artificial Sequence
  Description of Artificial Sequence: Synthetic oligonucleotide
caccagucccugguagcag

SEQ ID NO: 1009188 - RNA, 19 nt, Artificial Sequence
  Description of Artificial Sequence: Synthetic oligonucleotide
gacgcgucgcugcuucucu

SEQ ID NO: 1009189 - RNA, 19 nt, Artificial Sequence
  Description of Artificial Sequence: Synthetic oligonucleotide
acgcgucgcugcuucucug

SEQ ID NO: 1009190 - RNA, 19 nt, Artificial Sequence
  Description of Artificial Sequence: Synthetic oligonucleotide
ccucauuggcucuggccac

SEQ ID NO: 1009191 - RNA, 19 nt, Artificial Sequence
  Description of Artificial Sequence: Synthetic oligonucleotide
uauccccaggacgucgcuu

SEQ ID NO: 1009192 - RNA, 19 nt, Artificial Sequence
  Description of Artificial Sequence: Synthetic oligonucleotide
gcacgguuaaugagaacca

SEQ ID NO: 1009193 - RNA, 19 nt, Artificial Sequence
  Description of Artificial Sequence: Synthetic oligonucleotide
caucauugaguggugucgu

SEQ ID NO: 1009194 - RNA, 19 nt, Artificial Sequence
  Description of Artificial Sequence: Synthetic oligonucleotide
ggcuguauccccaggacgu

SEQ ID NO: 1009195 - RNA, 19 nt, Artificial Sequence
  Description of Artificial Sequence: Synthetic oligonucleotide
cuuuucaggauaggacccu

SEQ ID NO: 1009196 - RNA, 19 nt, Artificial Sequence
  Description of Artificial Sequence: Synthetic oligonucleotide
ggacgucgcuuccuugcug

SEQ ID NO: 1009197 - RNA, 19 nt, Artificial Sequence
  Description of Artificial Sequence: Synthetic oligonucleotide
gcaagagguccugguagug

SEQ ID NO: 1009198 - RNA, 19 nt, Artificial Sequence
  Description of Artificial Sequence: Synthetic oligonucleotide
cggcuguauccccaggacg

SEQ ID NO: 1009199 - RNA, 19 nt, Artificial Sequence
  Description of Artificial Sequence: Synthetic oligonucleotide
cccguagcaggguucacca

SEQ ID NO: 1009200 - RNA, 19 nt, Artificial Sequence
  Description of Artificial Sequence: Synthetic oligonucleotide
ggcgugaugucaagaugac

SEQ ID NO: 1009201 - RNA, 19 nt, Artificial Sequence
  Description of Artificial Sequence: Synthetic oligonucleotide
aucccucgaagagccacau

SEQ ID NO: 1009202 - RNA, 19 nt, Artificial Sequence
  Description of Artificial Sequence: Synthetic oligonucleotide
cguagcaggguucaccaga

SEQ ID NO: 1009203 - RNA, 19 nt, Artificial Sequence
  Description of Artificial Sequence: Synthetic oligonucleotide
cuccgggcgugaugucaag

SEQ ID NO: 1009204 - RNA, 19 nt, Artificial Sequence
  Description of Artificial Sequence: Synthetic oligonucleotide
gaggagcaacaugaaggcu

SEQ ID NO: 1009205 - RNA, 19 nt, Artificial Sequence
  Description of Artificial Sequence: Synthetic oligonucleotide
aacccagaaggcggcugua

SEQ ID NO: 1009206 - RNA, 19 nt, Artificial Sequence
  Description of Artificial Sequence: Synthetic oligonucleotide
gggcuauuuucugaggugu

SEQ ID NO: 1009207 - RNA, 19 nt, Artificial Sequence
  Description of Artificial Sequence: Synthetic oligonucleotide
uagucgcccuguuccucau

SEQ ID NO: 1009208 - RNA, 19 nt, Artificial Sequence
  Description of Artificial Sequence: Synthetic oligonucleotide
caccuuuaccagggcauca

SEQ ID NO: 1009209 - RNA, 19 nt, Artificial Sequence
  Description of Artificial Sequence: Synthetic oligonucleotide
gacgcagguugcgcuggac

SEQ ID NO: 1009210 - RNA, 19 nt, Artificial Sequence
  Description of Artificial Sequence: Synthetic oligonucleotide
gguggucaaggcaggccug

SEQ ID NO: 1009211 - RNA, 19 nt, Artificial Sequence
  Description of Artificial Sequence: Synthetic oligonucleotide
ucccucgaagagccacauu

SEQ ID NO: 1009212 - RNA, 19 nt, Artificial Sequence
  Description of Artificial Sequence: Synthetic oligonucleotide
guagcaggguucaccagau

SEQ ID NO: 1009213 - RNA, 19 nt, Artificial Sequence
  Description of Artificial Sequence: Synthetic oligonucleotide
aaguaacguugagcauuuu

SEQ ID NO: 1009214 - RNA, 19 nt, Artificial Sequence
  Description of Artificial Sequence: Synthetic oligonucleotide
gccguugccggugccugcg

SEQ ID NO: 1009215 - RNA, 19 nt, Artificial Sequence
  Description of Artificial Sequence: Synthetic oligonucleotide
gcccguagcaggguucacc

SEQ ID NO: 1009216 - RNA, 19 nt, Artificial Sequence
  Description of Artificial Sequence: Synthetic oligonucleotide
cacagugucaguggccacu

SEQ ID NO: 1009217 - RNA, 19 nt, Artificial Sequence
  Description of Artificial Sequence: Synthetic oligonucleotide
uuccgccguugccggugcc

SEQ ID NO: 1009218 - RNA, 19 nt, Artificial Sequence
  Description of Artificial Sequence: Synthetic oligonucleotide
cagaggcgaagggguacac

SEQ ID NO: 1009219 - RNA, 19 nt, Artificial Sequence
  Description of Artificial Sequence: Synthetic oligonucleotide
gguccagagccucauugau

SEQ ID NO: 1009220 - RNA, 19 nt, Artificial Sequence
  Description of Artificial Sequence: Synthetic oligonucleotide
gagcaacaugaaggcugac

SEQ ID NO: 1009221 - RNA, 19 nt, Artificial Sequence
  Description of Artificial Sequence: Synthetic oligonucleotide
gggcggcuguguaaugaag

SEQ ID NO: 1009222 - RNA, 19 nt, Artificial Sequence
  Description of Artificial Sequence: Synthetic oligonucleotide
caucuccgggcgugauguc

SEQ ID NO: 1009223 - RNA, 19 nt, Artificial Sequence
  Description of Artificial Sequence: Synthetic oligonucleotide
ccacauugggguuccuuaa

SEQ ID NO: 1009224 - RNA, 19 nt, Artificial Sequence
  Description of Artificial Sequence: Synthetic oligonucleotide
cucgcuuccagagcacggu

SEQ ID NO: 1009225 - RNA, 19 nt, Artificial Sequence
  Description of Artificial Sequence: Synthetic oligonucleotide
cccucgcuuccagagcacg

SEQ ID NO: 1009226 - RNA, 19 nt, Artificial Sequence
  Description of Artificial Sequence: Synthetic oligonucleotide
guggcuacguugucauguu

SEQ ID NO: 1009227 - RNA, 19 nt, Artificial Sequence
  Description of Artificial Sequence: Synthetic oligonucleotide
gggcaucaaguaacguuga

SEQ ID NO: 1009228 - RNA, 19 nt, Artificial Sequence
  Description of Artificial Sequence: Synthetic oligonucleotide
gagaauccccaggguggaa

SEQ ID NO: 1009229 - RNA, 19 nt, Artificial Sequence
  Description of Artificial Sequence: Synthetic oligonucleotide
agucgcccuguuccucaua

SEQ ID NO: 1009230 - RNA, 19 nt, Artificial Sequence
  Description of Artificial Sequence: Synthetic oligonucleotide
ccaggacgucgcuuccuug

SEQ ID NO: 1009231 - RNA, 19 nt, Artificial Sequence
  Description of Artificial Sequence: Synthetic oligonucleotide
cuucccacggcagccugua

SEQ ID NO: 1009232 - RNA, 19 nt, Artificial Sequence
  Description of Artificial Sequence: Synthetic oligonucleotide
gugccugcgcugguugcca

SEQ ID NO: 1009233 - RNA, 19 nt, Artificial Sequence
  Description of Artificial Sequence: Synthetic oligonucleotide
gcgugaugucaagaugaca

SEQ ID NO: 1009234 - RNA, 19 nt, Artificial Sequence
  Description of Artificial Sequence: Synthetic oligonucleotide
cucugguuucuggguguca

SEQ ID NO: 1009235 - RNA, 19 nt, Artificial Sequence
  Description of Artificial Sequence: Synthetic oligonucleotide
cgggcgugaugucaagaug

SEQ ID NO: 1009236 - RNA, 19 nt, Artificial Sequence
  Description of Artificial Sequence: Synthetic oligonucleotide
ccgacgcagguugcgcugg

SEQ ID NO: 1009237 - RNA, 19 nt, Artificial Sequence
  Description of Artificial Sequence: Synthetic oligonucleotide
guauccccaggacgucgcu

SEQ ID NO: 1009238 - RNA, 19 nt, Artificial Sequence
  Description of Artificial Sequence: Synthetic oligonucleotide
gcugggcggcuguguaaug

SEQ ID NO: 1009239 - RNA, 19 nt, Artificial Sequence
  Description of Artificial Sequence: Synthetic oligonucleotide
ccuuccgccguugccggug

SEQ ID NO: 1009240 - RNA, 19 nt, Artificial Sequence
  Description of Artificial Sequence: Synthetic oligonucleotide
ccucauagaaggugguuuu

SEQ ID NO: 1009241 - RNA, 19 nt, Artificial Sequence
  Description of Artificial Sequence: Synthetic oligonucleotide
caucuaggcccugcagugu

SEQ ID NO: 1009242 - RNA, 19 nt, Artificial Sequence
  Description of Artificial Sequence: Synthetic oligonucleotide
cuaccugggccaagcccgu

SEQ ID NO: 1009243 - RNA, 19 nt, Artificial Sequence
  Description of Artificial Sequence: Synthetic oligonucleotide
gucacaggccuggcgccaa

SEQ ID NO: 1009244 - RNA, 19 nt, Artificial Sequence
  Description of Artificial Sequence: Synthetic oligonucleotide
ccggugccugcgcugguug

SEQ ID NO: 1009245 - RNA, 19 nt, Artificial Sequence
  Description of Artificial Sequence: Synthetic oligonucleotide
ccaacacaucagccgguga

SEQ ID NO: 1009246 - RNA, 19 nt, Artificial Sequence
  Description of Artificial Sequence: Synthetic oligonucleotide
cccgcucugucugggcugc

SEQ ID NO: 1009247 - RNA, 19 nt, Artificial Sequence
  Description of Artificial Sequence: Synthetic oligonucleotide
cagguugcgcuggacgcgu

SEQ ID NO: 1009248 - RNA, 19 nt, Artificial Sequence
  Description of Artificial Sequence: Synthetic oligonucleotide
gcgaggaccugaucuguuu

SEQ ID NO: 1009249 - RNA, 19 nt, Artificial Sequence
  Description of Artificial Sequence: Synthetic oligonucleotide
guaucggacuccagcccuu

SEQ ID NO: 1009250 - RNA, 19 nt, Artificial Sequence
  Description of Artificial Sequence: Synthetic oligonucleotide
gccugcgcugguugccaga

SEQ ID NO: 1009251 - RNA, 19 nt, Artificial Sequence
  Description of Artificial Sequence: Synthetic oligonucleotide
gccacuaggaggagaugau

SEQ ID NO: 1009252 - RNA, 19 nt, Artificial Sequence
  Description of Artificial Sequence: Synthetic oligonucleotide
ccgggcgugaugucaagau

SEQ ID NO: 1009253 - RNA, 19 nt, Artificial Sequence
  Description of Artificial Sequence: Synthetic oligonucleotide
auccauccuugaagccguu

SEQ ID NO: 1009254 - RNA, 19 nt, Artificial Sequence
  Description of Artificial Sequence: Synthetic oligonucleotide
caggaucuccugucaccuu

SEQ ID NO: 1009255 - RNA, 19 nt, Artificial Sequence
  Description of Artificial Sequence: Synthetic oligonucleotide
gggacacuucgagucugcu

SEQ ID NO: 1009256 - RNA, 19 nt, Artificial Sequence
  Description of Artificial Sequence: Synthetic oligonucleotide
cagcacagucaggaacuau

SEQ ID NO: 1009257 - RNA, 19 nt, Artificial Sequence
  Description of Artificial Sequence: Synthetic oligonucleotide
ccguugccggugccugcgc

SEQ ID NO: 1009258 - RNA, 19 nt, Artificial Sequence
  Description of Artificial Sequence: Synthetic oligonucleotide
gcgcugguugccagauguc

SEQ ID NO: 1009259 - RNA, 19 nt, Artificial Sequence
  Description of Artificial Sequence: Synthetic oligonucleotide
cacggcugcuucuccccuu

SEQ ID NO: 1009260 - RNA, 19 nt, Artificial Sequence
  Description of Artificial Sequence: Synthetic oligonucleotide
ggccuggcgccaacacauc

SEQ ID NO: 1009261 - RNA, 19 nt, Artificial Sequence
  Description of Artificial Sequence: Synthetic oligonucleotide
gccucaucuccgggcguga

SEQ ID NO: 1009262 - RNA, 19 nt, Artificial Sequence
  Description of Artificial Sequence: Synthetic oligonucleotide
cgccguugccggugccugc

SEQ ID NO: 1009263 - RNA, 19 nt, Artificial Sequence
  Description of Artificial Sequence: Synthetic oligonucleotide
ggugagugucagggacacu

SEQ ID NO: 1009264 - RNA, 19 nt, Artificial Sequence
  Description of Artificial Sequence: Synthetic oligonucleotide
ccaagcccguagcaggguu

SEQ ID NO: 1009265 - RNA, 19 nt, Artificial Sequence
  Description of Artificial Sequence: Synthetic oligonucleotide
ggcgaggaccugaucuguu

SEQ ID NO: 1009266 - RNA, 19 nt, Artificial Sequence
  Description of Artificial Sequence: Synthetic oligonucleotide
ggguacacuugggguaguu

SEQ ID NO: 1009267 - RNA, 19 nt, Artificial Sequence
  Description of Artificial Sequence: Synthetic oligonucleotide
ccugcgcugguugccagau

SEQ ID NO: 1009268 - RNA, 19 nt, Artificial Sequence
  Description of Artificial Sequence: Synthetic oligonucleotide
cccaggacgucgcuuccuu

SEQ ID NO: 1009269 - RNA, 19 nt, Artificial Sequence
  Description of Artificial Sequence: Synthetic oligonucleotide
cgucgcagagacucugguu

SEQ ID NO: 1009270 - RNA, 19 nt, Artificial Sequence
  Description of Artificial Sequence: Synthetic oligonucleotide
gggguacacuugggguagu

SEQ ID NO: 1009271 - RNA, 19 nt, Artificial Sequence
  Description of Artificial Sequence: Synthetic oligonucleotide
cgacgcagguugcgcugga

SEQ ID NO: 1009272 - RNA, 19 nt, Artificial Sequence
  Description of Artificial Sequence: Synthetic oligonucleotide
ccacucccuggcggaucuc

SEQ ID NO: 1009273 - RNA, 19 nt, Artificial Sequence
  Description of Artificial Sequence: Synthetic oligonucleotide
gccuuccgccguugccggu

SEQ ID NO: 1009274 - RNA, 19 nt, Artificial Sequence
  Description of Artificial Sequence: Synthetic oligonucleotide
gcuggacgcgucgcugcuu

SEQ ID NO: 1009275 - RNA, 19 nt, Artificial Sequence
  Description of Artificial Sequence: Synthetic oligonucleotide
ccccaggacgucgcuuccu

SEQ ID NO: 1009276 - RNA, 19 nt, Artificial Sequence
  Description of Artificial Sequence: Synthetic oligonucleotide
ccucaucuccgggcgugau

SEQ ID NO: 1009277 - RNA, 19 nt, Artificial Sequence
  Description of Artificial Sequence: Synthetic oligonucleotide
aaagaaauaacuuugaccu

SEQ ID NO: 1009278 - RNA, 19 nt, Artificial Sequence
  Description of Artificial Sequence: Synthetic oligonucleotide
aaggguaaagaacaaaccc

SEQ ID NO: 1009279 - RNA, 19 nt, Artificial Sequence
  Description of Artificial Sequence: Synthetic oligonucleotide
auaggcucuacuuauaggc

SEQ ID NO: 1009280 - RNA, 19 nt, Artificial Sequence
  Description of Artificial Sequence: Synthetic oligonucleotide
auugauuaccccucaaugc

SEQ ID NO: 1009281 - RNA, 19 nt, Artificial Sequence
  Description of Artificial Sequence: Synthetic oligonucleotide
aaagcgcucaaacuggcgc

SEQ ID NO: 1009282 - RNA, 19 nt, Artificial Sequence
  Description of Artificial Sequence: Synthetic oligonucleotide
uccaaaauacacuucagag

SEQ ID NO: 1009283 - RNA, 19 nt, Artificial Sequence
  Description of Artificial Sequence: Synthetic oligonucleotide
acugaaguuaugcugaggg

SEQ ID NO: 1009284 - RNA, 19 nt, Artificial Sequence
  Description of Artificial Sequence: Synthetic oligonucleotide
gaugauugagcccaggucc

SEQ ID NO: 1009285 - RNA, 19 nt, Artificial Sequence
  Description of Artificial Sequence: Synthetic oligonucleotide
aaggugguaauuaauuucc

SEQ ID NO: 1009286 - RNA, 19 nt, Artificial Sequence
  Description of Artificial Sequence: Synthetic oligonucleotide
auaauuuggaagaaggugg

SEQ ID NO: 1009287 - RNA, 19 nt, Artificial Sequence
  Description of Artificial Sequence: Synthetic oligonucleotide
uauugauuaccccucaaug

SEQ ID NO: 1009288 - RNA, 19 nt, Artificial Sequence
  Description of Artificial Sequence: Synthetic oligonucleotide
aaugcgucgagguagguga

SEQ ID NO: 1009289 - RNA, 19 nt, Artificial Sequence
  Description of Artificial Sequence: Synthetic oligonucleotide
ucacauagcgaauugaugu

SEQ ID NO: 1009290 - RNA, 19 nt, Artificial Sequence
  Description of Artificial Sequence: Synthetic oligonucleotide
aaagaaagcacaacgaaca

SEQ ID NO: 1009291 - RNA, 19 nt, Artificial Sequence
  Description of Artificial Sequence: Synthetic oligonucleotide
agaacaguauguaagcucc

SEQ ID NO: 1009292 - RNA, 19 nt, Artificial Sequence
  Description of Artificial Sequence: Synthetic oligonucleotide
auaacuuugaccugaccuc

SEQ ID NO: 1009293 - RNA, 19 nt, Artificial Sequence
  Description of Artificial Sequence: Synthetic oligonucleotide
aaauaggcucuacuuauag

SEQ ID NO: 1009294 - RNA, 19 nt, Artificial Sequence
  Description of Artificial Sequence: Synthetic oligonucleotide
aagacauugccuugcagag

SEQ ID NO: 1009295 - RNA, 19 nt, Artificial Sequence
  Description of Artificial Sequence: Synthetic oligonucleotide
gaugaguccacgcucaugc

SEQ ID NO: 1009296 - RNA, 19 nt, Artificial Sequence
  Description of Artificial Sequence: Synthetic oligonucleotide
augaaggaaaggcagagag

SEQ ID NO: 1009297 - RNA, 19 nt, Artificial Sequence
  Description of Artificial Sequence: Synthetic oligonucleotide
agagugacuuuccagaauc

SEQ ID NO: 1009298 - RNA, 19 nt, Artificial Sequence
  Description of Artificial Sequence: Synthetic oligonucleotide
uauuggagaagacauugcc

SEQ ID NO: 1009299 - RNA, 19 nt, Artificial Sequence
  Description of Artificial Sequence: Synthetic oligonucleotide
aauaggcucuacuuauagg

SEQ ID NO: 1009300 - RNA, 19 nt, Artificial Sequence
  Description of Artificial Sequence: Synthetic oligonucleotide
uuuacucacagcccuuugg

SEQ ID NO: 1009301 - RNA, 19 nt, Artificial Sequence
  Description of Artificial Sequence: Synthetic oligonucleotide
augcuaacggcucagggac

SEQ ID NO: 1009302 - RNA, 19 nt, Artificial Sequence
  Description of Artificial Sequence: Synthetic oligonucleotide
auagguauugauuaccccu

SEQ ID NO: 1009303 - RNA, 19 nt, Artificial Sequence
  Description of Artificial Sequence: Synthetic oligonucleotide
auagacuccgucccuauac

SEQ ID NO: 1009304 - RNA, 19 nt, Artificial Sequence
  Description of Artificial Sequence: Synthetic oligonucleotide
ugucuuacggcucaguggu

SEQ ID NO: 1009305 - RNA, 19 nt, Artificial Sequence
  Description of Artificial Sequence: Synthetic oligonucleotide
aucacagcggcccuggcgc

SEQ ID NO: 1009306 - RNA, 19 nt, Artificial Sequence
  Description of Artificial Sequence: Synthetic oligonucleotide
gaaacggugugauugguug

SEQ ID NO: 1009307 - RNA, 19 nt, Artificial Sequence
  Description of Artificial Sequence: Synthetic oligonucleotide
aggguaaagaacaaacccc

SEQ ID NO: 1009308 - RNA, 19 nt, Artificial Sequence
  Description of Artificial Sequence: Synthetic oligonucleotide
uuuuauauagucaguguuu

SEQ ID NO: 1009309 - RNA, 19 nt, Artificial Sequence
  Description of Artificial Sequence: Synthetic oligonucleotide
cuacuuauaggccuccugg

SEQ ID NO: 1009310 - RNA, 19 nt, Artificial Sequence
  Description of Artificial Sequence: Synthetic oligonucleotide
cuauacacuugucuuacgg

SEQ ID NO: 1009311 - RNA, 19 nt, Artificial Sequence
  Description of Artificial Sequence: Synthetic oligonucleotide
uguuccauagacuccgucc

SEQ ID NO: 1009312 - RNA, 19 nt, Artificial Sequence
  Description of Artificial Sequence: Synthetic oligonucleotide
aguugcucucaucacagcg

SEQ ID NO: 1009313 - RNA, 19 nt, Artificial Sequence
  Description of Artificial Sequence: Synthetic oligonucleotide
aaggaaacggugugauugg

SEQ ID NO: 1009314 - RNA, 19 nt, Artificial Sequence
  Description of Artificial Sequence: Synthetic oligonucleotide
uguuuuagagggcugggga

SEQ ID NO: 1009315 - RNA, 19 nt, Artificial Sequence
  Description of Artificial Sequence: Synthetic oligonucleotide
auuuuauauagucaguguu

SEQ ID NO: 1009316 - RNA, 19 nt, Artificial Sequence
  Description of Artificial Sequence: Synthetic oligonucleotide
gaagacauugccuugcaga

SEQ ID NO: 1009317 - RNA, 19 nt, Artificial Sequence
  Description of Artificial Sequence: Synthetic oligonucleotide
ucaaauaggcucuacuuau

SEQ ID NO: 1009318 - RNA, 19 nt, Artificial Sequence
  Description of Artificial Sequence: Synthetic oligonucleotide
accuuaaacucucuuaaug

SEQ ID NO: 1009319 - RNA, 19 nt, Artificial Sequence
  Description of Artificial Sequence: Synthetic oligonucleotide
agucccaccuuccacauag

SEQ ID NO: 1009320 - RNA, 19 nt, Artificial Sequence
  Description of Artificial Sequence: Synthetic oligonucleotide
gguuaaagcgcucaaacug

SEQ ID NO: 1009321 - RNA, 19 nt, Artificial Sequence
  Description of Artificial Sequence: Synthetic oligonucleotide
uuucugucggcccagcgcc

SEQ ID NO: 1009322 - RNA, 19 nt, Artificial Sequence
  Description of Artificial Sequence: Synthetic oligonucleotide
uugucuuacggcucagugg

SEQ ID NO: 1009323 - RNA, 19 nt, Artificial Sequence
  Description of Artificial Sequence: Synthetic oligonucleotide
gaaggugguaauuaauuuc

SEQ ID NO: 1009324 - RNA, 19 nt, Artificial Sequence
  Description of Artificial Sequence: Synthetic oligonucleotide
uauacacuugucuuacggc

SEQ ID NO: 1009325 - RNA, 19 nt, Artificial Sequence
  Description of Artificial Sequence: Synthetic oligonucleotide
agaaagugcaacaacgcuc

SEQ ID NO: 1009326 - RNA, 19 nt, Artificial Sequence
  Description of Artificial Sequence: Synthetic oligonucleotide
agugacguagggcagcagg

SEQ ID NO: 1009327 - RNA, 19 nt, Artificial Sequence
  Description of Artificial Sequence: Synthetic oligonucleotide
agaugauugagcccagguc

SEQ ID NO: 1009328 - RNA, 19 nt, Artificial Sequence
  Description of Artificial Sequence: Synthetic oligonucleotide
cuauguuccauagacuccg

SEQ ID NO: 1009329 - RNA, 19 nt, Artificial Sequence
  Description of Artificial Sequence: Synthetic oligonucleotide
guuaaagcgcucaaacugg

SEQ ID NO: 1009330 - RNA, 19 nt, Artificial Sequence
  Description of Artificial Sequence: Synthetic oligonucleotide
ucucuuaauggaacacagg

SEQ ID NO: 1009331 - RNA, 19 nt, Artificial Sequence
  Description of Artificial Sequence: Synthetic oligonucleotide
uaagaagucacguccauuu

SEQ ID NO: 1009332 - RNA, 19 nt, Artificial Sequence
  Description of Artificial Sequence: Synthetic oligonucleotide
aagaaauaacuuugaccug

SEQ ID NO: 1009333 - RNA, 19 nt, Artificial Sequence
  Description of Artificial Sequence: Synthetic oligonucleotide
aaacauaccucccugccua

SEQ ID NO: 1009334 - RNA, 19 nt, Artificial Sequence
  Description of Artificial Sequence: Synthetic oligonucleotide
agaaauaacuuugaccuga

SEQ ID NO: 1009335 - RNA, 19 nt, Artificial Sequence
  Description of Artificial Sequence: Synthetic oligonucleotide
gcaaacaauccccagagag

SEQ ID NO: 1009336 - RNA, 19 nt, Artificial Sequence
  Description of Artificial Sequence: Synthetic oligonucleotide
ugcuacugugacuuguagg

SEQ ID NO: 1009337 - RNA, 19 nt, Artificial Sequence
  Description of Artificial Sequence: Synthetic oligonucleotide
auacacuugucuuacggcu

SEQ ID NO: 1009338 - RNA, 19 nt, Artificial Sequence
  Description of Artificial Sequence: Synthetic oligonucleotide
auagcucgcuccuuuacuc

SEQ ID NO: 1009339 - RNA, 19 nt, Artificial Sequence
  Description of Artificial Sequence: Synthetic oligonucleotide
aauuuaaguuucccagggu

SEQ ID NO: 1009340 - RNA, 19 nt, Artificial Sequence
  Description of Artificial Sequence: Synthetic oligonucleotide
gacauugccuugcagagca

SEQ ID NO: 1009341 - RNA, 19 nt, Artificial Sequence
  Description of Artificial Sequence: Synthetic oligonucleotide
ccuuaaacucucuuaaugg

SEQ ID NO: 1009342 - RNA, 19 nt, Artificial Sequence
  Description of Artificial Sequence: Synthetic oligonucleotide
gcuacugugacuuguaggc

SEQ ID NO: 1009343 - RNA, 19 nt, Artificial Sequence
  Description of Artificial Sequence: Synthetic oligonucleotide
uuuuagagggcuggggagg

SEQ ID NO: 1009344 - RNA, 19 nt, Artificial Sequence
  Description of Artificial Sequence: Synthetic oligonucleotide
ugguugaaggguaaagaac

SEQ ID NO: 1009345 - RNA, 19 nt, Artificial Sequence
  Description of Artificial Sequence: Synthetic oligonucleotide
augguaccugcucaaauag

SEQ ID NO: 1009346 - RNA, 19 nt, Artificial Sequence
  Description of Artificial Sequence: Synthetic oligonucleotide
uugguugaaggguaaagaa

SEQ ID NO: 1009347 - RNA, 19 nt, Artificial Sequence
  Description of Artificial Sequence: Synthetic oligonucleotide
ugcccgacgcuucagaccc

SEQ ID NO: 1009348 - RNA, 19 nt, Artificial Sequence
  Description of Artificial Sequence: Synthetic oligonucleotide
uauguaagcuccagaggug

SEQ ID NO: 1009349 - RNA, 19 nt, Artificial Sequence
  Description of Artificial Sequence: Synthetic oligonucleotide
gaagucacguccauuucgg

SEQ ID NO: 1009350 - RNA, 19 nt, Artificial Sequence
  Description of Artificial Sequence: Synthetic oligonucleotide
gugacuuguaggcaggacc

SEQ ID NO: 1009351 - RNA, 19 nt, Artificial Sequence
  Description of Artificial Sequence: Synthetic oligonucleotide
cugguuaaagcgcucaaac

SEQ ID NO: 1009352 - RNA, 19 nt, Artificial Sequence
  Description of Artificial Sequence: Synthetic oligonucleotide
ucuacuuauaggccuccug

SEQ ID NO: 1009353 - RNA, 19 nt, Artificial Sequence
  Description of Artificial Sequence: Synthetic oligonucleotide
aauugauguuuuccuccag

SEQ ID NO: 1009354 - RNA, 19 nt, Artificial Sequence
  Description of Artificial Sequence: Synthetic oligonucleotide
uccacgcucaugcucauca

SEQ ID NO: 1009355 - RNA, 19 nt, Artificial Sequence
  Description of Artificial Sequence: Synthetic oligonucleotide
aguggguccugcuuauugg

SEQ ID NO: 1009356 - RNA, 19 nt, Artificial Sequence
  Description of Artificial Sequence: Synthetic oligonucleotide
agacccgccaugcuaacgg

SEQ ID NO: 1009357 - RNA, 19 nt, Artificial Sequence
  Description of Artificial Sequence: Synthetic oligonucleotide
cauaaagccauagguauug

SEQ ID NO: 1009358 - RNA, 19 nt, Artificial Sequence
  Description of Artificial Sequence: Synthetic oligonucleotide
gauaguguuggccugguua

SEQ ID NO: 1009359 - RNA, 19 nt, Artificial Sequence
  Description of Artificial Sequence: Synthetic oligonucleotide
uuacucacagcccuuuggu

SEQ ID NO: 1009360 - RNA, 19 nt, Artificial Sequence
  Description of Artificial Sequence: Synthetic oligonucleotide
cugggcaucuccuuugggg

SEQ ID NO: 1009361 - RNA, 19 nt, Artificial Sequence
  Description of Artificial Sequence: Synthetic oligonucleotide
guaagguggcuguagagac

SEQ ID NO: 1009362 - RNA, 19 nt, Artificial Sequence
  Description of Artificial Sequence: Synthetic oligonucleotide
gaaagugcaacaacgcuca

SEQ ID NO: 1009363 - RNA, 19 nt, Artificial Sequence
  Description of Artificial Sequence: Synthetic oligonucleotide
aaacuggcgcucaaguggg

SEQ ID NO: 1009364 - RNA, 19 nt, Artificial Sequence
  Description of Artificial Sequence: Synthetic oligonucleotide
ggcaacaggaaacggaggg

SEQ ID NO: 1009365 - RNA, 19 nt, Artificial Sequence
  Description of Artificial Sequence: Synthetic oligonucleotide
aacaguauguaagcuccag

SEQ ID NO: 1009366 - RNA, 19 nt, Artificial Sequence
  Description of Artificial Sequence: Synthetic oligonucleotide
uuucggaugaguccacgcu

SEQ ID NO: 1009367 - RNA, 19 nt, Artificial Sequence
  Description of Artificial Sequence: Synthetic oligonucleotide
guuuuagagggcuggggag

SEQ ID NO: 1009368 - RNA, 19 nt, Artificial Sequence
  Description of Artificial Sequence: Synthetic oligonucleotide
gucacguccauuucggaug

SEQ ID NO: 1009369 - RNA, 19 nt, Artificial Sequence
  Description of Artificial Sequence: Synthetic oligonucleotide
guauguaagcuccagaggu

SEQ ID NO: 1009370 - RNA, 19 nt, Artificial Sequence
  Description of Artificial Sequence: Synthetic oligonucleotide
agaaccuuaaacucucuua

SEQ ID NO: 1009371 - RNA, 19 nt, Artificial Sequence
  Description of Artificial Sequence: Synthetic oligonucleotide
ucucugugcguuagguggg

SEQ ID NO: 1009372 - RNA, 19 nt, Artificial Sequence
  Description of Artificial Sequence: Synthetic oligonucleotide
uagguauugauuaccccuc

SEQ ID NO: 1009373 - RNA, 19 nt, Artificial Sequence
  Description of Artificial Sequence: Synthetic oligonucleotide
cauagguauugauuacccc

SEQ ID NO: 1009374 - RNA, 19 nt, Artificial Sequence
  Description of Artificial Sequence: Synthetic oligonucleotide
ugcucaaauaggcucuacu

SEQ ID NO: 1009375 - RNA, 19 nt, Artificial Sequence
  Description of Artificial Sequence: Synthetic oligonucleotide
guaaagaacaaaccccaga

SEQ ID NO: 1009376 - RNA, 19 nt, Artificial Sequence
  Description of Artificial Sequence: Synthetic oligonucleotide
ugguaccugcucaaauagg

SEQ ID NO: 1009377 - RNA, 19 nt, Artificial Sequence
  Description of Artificial Sequence: Synthetic oligonucleotide
cagaacaguauguaagcuc

SEQ ID NO: 1009378 - RNA, 19 nt, Artificial Sequence
  Description of Artificial Sequence: Synthetic oligonucleotide
ugguuaaagcgcucaaacu

SEQ ID NO: 1009379 - RNA, 19 nt, Artificial Sequence
  Description of Artificial Sequence: Synthetic oligonucleotide
acauagcucgcuccuuuac

SEQ ID NO: 1009380 - RNA, 19 nt, Artificial Sequence
  Description of Artificial Sequence: Synthetic oligonucleotide
cuugaggauaguguuggcc

SEQ ID NO: 1009381 - RNA, 19 nt, Artificial Sequence
  Description of Artificial Sequence: Synthetic oligonucleotide
cacaguucccuccacuugc

SEQ ID NO: 1009382 - RNA, 19 nt, Artificial Sequence
  Description of Artificial Sequence: Synthetic oligonucleotide
cuugucuuacggcucagug

SEQ ID NO: 1009383 - RNA, 19 nt, Artificial Sequence
  Description of Artificial Sequence: Synthetic oligonucleotide
auaguguuggccugguuaa

SEQ ID NO: 1009384 - RNA, 19 nt, Artificial Sequence
  Description of Artificial Sequence: Synthetic oligonucleotide
uuuggaagaaggugguaau

SEQ ID NO: 1009385 - RNA, 19 nt, Artificial Sequence
  Description of Artificial Sequence: Synthetic oligonucleotide
ugccuaagaaagugcaaca

SEQ ID NO: 1009386 - RNA, 19 nt, Artificial Sequence
  Description of Artificial Sequence: Synthetic oligonucleotide
acaaaauuuaagagcccuc

SEQ ID NO: 1009387 - RNA, 19 nt, Artificial Sequence
  Description of Artificial Sequence: Synthetic oligonucleotide
gaaguuaugcugagggcug

SEQ ID NO: 1009388 - RNA, 19 nt, Artificial Sequence
  Description of Artificial Sequence: Synthetic oligonucleotide
auuuggaagaaggugguaa

SEQ ID NO: 1009389 - RNA, 19 nt, Artificial Sequence
  Description of Artificial Sequence: Synthetic oligonucleotide
uccacuugcagaaccuuaa

SEQ ID NO: 1009390 - RNA, 19 nt, Artificial Sequence
  Description of Artificial Sequence: Synthetic oligonucleotide
ugggcaucuccuuugggga

SEQ ID NO: 1009391 - RNA, 19 nt, Artificial Sequence
  Description of Artificial Sequence: Synthetic oligonucleotide
uucagacccgccaugcuaa

SEQ ID NO: 1009392 - RNA, 19 nt, Artificial Sequence
  Description of Artificial Sequence: Synthetic oligonucleotide
aacaacgcucagugcaugu

SEQ ID NO: 1009393 - RNA, 19 nt, Artificial Sequence
  Description of Artificial Sequence: Synthetic oligonucleotide
aaacggugugauugguuga

SEQ ID NO: 1009394 - RNA, 19 nt, Artificial Sequence
  Description of Artificial Sequence: Synthetic oligonucleotide
aacugaaguuaugcugagg

SEQ ID NO: 1009395 - RNA, 19 nt, Artificial Sequence
  Description of Artificial Sequence: Synthetic oligonucleotide
acggcucagggacagagug

SEQ ID NO: 1009396 - RNA, 19 nt, Artificial Sequence
  Description of Artificial Sequence: Synthetic oligonucleotide
agacuccgucccuauacac

SEQ ID NO: 1009397 - RNA, 19 nt, Artificial Sequence
  Description of Artificial Sequence: Synthetic oligonucleotide
uaacuuugaccugaccuca

SEQ ID NO: 1009398 - RNA, 19 nt, Artificial Sequence
  Description of Artificial Sequence: Synthetic oligonucleotide
cugaaguuaugcugagggc

SEQ ID NO: 1009399 - RNA, 19 nt, Artificial Sequence
  Description of Artificial Sequence: Synthetic oligonucleotide
augauugagcccagguccc

SEQ ID NO: 1009400 - RNA, 19 nt, Artificial Sequence
  Description of Artificial Sequence: Synthetic oligonucleotide
uucggaugaguccacgcuc

SEQ ID NO: 1009401 - RNA, 19 nt, Artificial Sequence
  Description of Artificial Sequence: Synthetic oligonucleotide
ugguaagguggcuguagag

SEQ ID NO: 1009402 - RNA, 19 nt, Artificial Sequence
  Description of Artificial Sequence: Synthetic oligonucleotide
aagcgcucaaacuggcgcu

SEQ ID NO: 1009403 - RNA, 19 nt, Artificial Sequence
  Description of Artificial Sequence: Synthetic oligonucleotide
auaaugucugucugggcau

SEQ ID NO: 1009404 - RNA, 19 nt, Artificial Sequence
  Description of Artificial Sequence: Synthetic oligonucleotide
cuuuggggaacuggaaggg

SEQ ID NO: 1009405 - RNA, 19 nt, Artificial Sequence
  Description of Artificial Sequence: Synthetic oligonucleotide
cuugagagugacguagggc

SEQ ID NO: 1009406 - RNA, 19 nt, Artificial Sequence
  Description of Artificial Sequence: Synthetic oligonucleotide
agcucgcuccuuuacucac

SEQ ID NO: 1009407 - RNA, 19 nt, Artificial Sequence
  Description of Artificial Sequence: Synthetic oligonucleotide
acaguauguaagcuccaga

SEQ ID NO: 1009408 - RNA, 19 nt, Artificial Sequence
  Description of Artificial Sequence: Synthetic oligonucleotide
uuaggugggugccccacga

SEQ ID NO: 1009409 - RNA, 19 nt, Artificial Sequence
  Description of Artificial Sequence: Synthetic oligonucleotide
uacacuugucuuacggcuc

SEQ ID NO: 1009410 - RNA, 19 nt, Artificial Sequence
  Description of Artificial Sequence: Synthetic oligonucleotide
ugccccacgaugucaaaca

SEQ ID NO: 1009411 - RNA, 19 nt, Artificial Sequence
  Description of Artificial Sequence: Synthetic oligonucleotide
uaacggcucagggacagag

SEQ ID NO: 1009412 - RNA, 19 nt, Artificial Sequence
  Description of Artificial Sequence: Synthetic oligonucleotide
cugccuaagaaagugcaac

SEQ ID NO: 1009413 - RNA, 19 nt, Artificial Sequence
  Description of Artificial Sequence: Synthetic oligonucleotide
uuacggcucagugguaagg

SEQ ID NO: 1009414 - RNA, 19 nt, Artificial Sequence
  Description of Artificial Sequence: Synthetic oligonucleotide
uggggaggcacuguuuuag

SEQ ID NO: 1009415 - RNA, 19 nt, Artificial Sequence
  Description of Artificial Sequence: Synthetic oligonucleotide
cucauaaagccauagguau

SEQ ID NO: 1009416 - RNA, 19 nt, Artificial Sequence
  Description of Artificial Sequence: Synthetic oligonucleotide
caacgcucagugcaugucc

SEQ ID NO: 1009417 - RNA, 19 nt, Artificial Sequence
  Description of Artificial Sequence: Synthetic oligonucleotide
ucauaaugucugucugggc

SEQ ID NO: 1009418 - RNA, 19 nt, Artificial Sequence
  Description of Artificial Sequence: Synthetic oligonucleotide
cucaaugcaccugaaagca

SEQ ID NO: 1009419 - RNA, 19 nt, Artificial Sequence
  Description of Artificial Sequence: Synthetic oligonucleotide
uuugaccugaccucagauu

SEQ ID NO: 1009420 - RNA, 19 nt, Artificial Sequence
  Description of Artificial Sequence: Synthetic oligonucleotide
agcagucucaugcugggau

SEQ ID NO: 1009421 - RNA, 19 nt, Artificial Sequence
  Description of Artificial Sequence: Synthetic oligonucleotide
uagacuccgucccuauaca

SEQ ID NO: 1009422 - RNA, 19 nt, Artificial Sequence
  Description of Artificial Sequence: Synthetic oligonucleotide
uggagcaaacaauccccag

SEQ ID NO: 1009423 - RNA, 19 nt, Artificial Sequence
  Description of Artificial Sequence: Synthetic oligonucleotide
cacuguuuuagagggcugg

SEQ ID NO: 1009424 - RNA, 19 nt, Artificial Sequence
  Description of Artificial Sequence: Synthetic oligonucleotide
caugcuaacggcucaggga

SEQ ID NO: 1009425 - RNA, 19 nt, Artificial Sequence
  Description of Artificial Sequence: Synthetic oligonucleotide
caaugcuugcagcaucaag

SEQ ID NO: 1009426 - RNA, 19 nt, Artificial Sequence
  Description of Artificial Sequence: Synthetic oligonucleotide
ucacguccauuucggauga

SEQ ID NO: 1009427 - RNA, 19 nt, Artificial Sequence
  Description of Artificial Sequence: Synthetic oligonucleotide
cagaaugcgucgagguagg

SEQ ID NO: 1009428 - RNA, 19 nt, Artificial Sequence
  Description of Artificial Sequence: Synthetic oligonucleotide
ugucaaacauccgguggag

SEQ ID NO: 1009429 - RNA, 19 nt, Artificial Sequence
  Description of Artificial Sequence: Synthetic oligonucleotide
agacauugccuugcagagc

SEQ ID NO: 1009430 - RNA, 19 nt, Artificial Sequence
  Description of Artificial Sequence: Synthetic oligonucleotide
ugugcguuaggugggugcc

SEQ ID NO: 1009431 - RNA, 19 nt, Artificial Sequence
  Description of Artificial Sequence: Synthetic oligonucleotide
uuaggggauaaguggcaac

SEQ ID NO: 1009432 - RNA, 19 nt, Artificial Sequence
  Description of Artificial Sequence: Synthetic oligonucleotide
ugcaccugaaagcaauguu

SEQ ID NO: 1009433 - RNA, 19 nt, Artificial Sequence
  Description of Artificial Sequence: Synthetic oligonucleotide
gagcccauguuccugcuca

SEQ ID NO: 1009434 - RNA, 19 nt, Artificial Sequence
  Description of Artificial Sequence: Synthetic oligonucleotide
agucacguccauuucggau

SEQ ID NO: 1009435 - RNA, 19 nt, Artificial Sequence
  Description of Artificial Sequence: Synthetic oligonucleotide
gucauggcgagugaugaug

SEQ ID NO: 1009436 - RNA, 19 nt, Artificial Sequence
  Description of Artificial Sequence: Synthetic oligonucleotide
aaagugcaacaacgcucag

SEQ ID NO: 1009437 - RNA, 19 nt, Artificial Sequence
  Description of Artificial Sequence: Synthetic oligonucleotide
gaaacggaggggaagccca

SEQ ID NO: 1009438 - RNA, 19 nt, Artificial Sequence
  Description of Artificial Sequence: Synthetic oligonucleotide
acaaaggcuauguuccaua

SEQ ID NO: 1009439 - RNA, 19 nt, Artificial Sequence
  Description of Artificial Sequence: Synthetic oligonucleotide
ucggcccagcgccagaaug

SEQ ID NO: 1009440 - RNA, 19 nt, Artificial Sequence
  Description of Artificial Sequence: Synthetic oligonucleotide
ggggauaaguggcaacagg

SEQ ID NO: 1009441 - RNA, 19 nt, Artificial Sequence
  Description of Artificial Sequence: Synthetic oligonucleotide
cgaauugauguuuuccucc

SEQ ID NO: 1009442 - RNA, 19 nt, Artificial Sequence
  Description of Artificial Sequence: Synthetic oligonucleotide
acacuugucuuacggcuca

SEQ ID NO: 1009443 - RNA, 19 nt, Artificial Sequence
  Description of Artificial Sequence: Synthetic oligonucleotide
ccucaaugcaccugaaagc

SEQ ID NO: 1009444 - RNA, 19 nt, Artificial Sequence
  Description of Artificial Sequence: Synthetic oligonucleotide
ucaaugcaccugaaagcaa

SEQ ID NO: 1009445 - RNA, 19 nt, Artificial Sequence
  Description of Artificial Sequence: Synthetic oligonucleotide
accucccugccuaagaaag

SEQ ID NO: 1009446 - RNA, 19 nt, Artificial Sequence
  Description of Artificial Sequence: Synthetic oligonucleotide
gucacauagcgaauugaug

SEQ ID NO: 1009447 - RNA, 19 nt, Artificial Sequence
  Description of Artificial Sequence: Synthetic oligonucleotide
ucuuacggcucagugguaa

SEQ ID NO: 1009448 - RNA, 19 nt, Artificial Sequence
  Description of Artificial Sequence: Synthetic oligonucleotide
auugccuugcagagcaguc

SEQ ID NO: 1009449 - RNA, 19 nt, Artificial Sequence
  Description of Artificial Sequence: Synthetic oligonucleotide
acuccgucccuauacacuu

SEQ ID NO: 1009450 - RNA, 19 nt, Artificial Sequence
  Description of Artificial Sequence: Synthetic oligonucleotide
ucccuauacacuugucuua

SEQ ID NO: 1009451 - RNA, 19 nt, Artificial Sequence
  Description of Artificial Sequence: Synthetic oligonucleotide
auguaagcuccagagguga

SEQ ID NO: 1009452 - RNA, 19 nt, Artificial Sequence
  Description of Artificial Sequence: Synthetic oligonucleotide
caggaaacggaggggaagc

SEQ ID NO: 1009453 - RNA, 19 nt, Artificial Sequence
  Description of Artificial Sequence: Synthetic oligonucleotide
aggaaacggaggggaagcc

SEQ ID NO: 1009454 - RNA, 19 nt, Artificial Sequence
  Description of Artificial Sequence: Synthetic oligonucleotide
uggcucaaacauaccuccc

SEQ ID NO: 1009455 - RNA, 19 nt, Artificial Sequence
  Description of Artificial Sequence: Synthetic oligonucleotide
cacacgcacagcugugagg

SEQ ID NO: 1009456 - RNA, 19 nt, Artificial Sequence
  Description of Artificial Sequence: Synthetic oligonucleotide
gauugagcccaggucccgg

SEQ ID NO: 1009457 - RNA, 19 nt, Artificial Sequence
  Description of Artificial Sequence: Synthetic oligonucleotide
cuagccccauucuccagag

SEQ ID NO: 1009458 - RNA, 19 nt, Artificial Sequence
  Description of Artificial Sequence: Synthetic oligonucleotide
aguguccuuuucaagaaau

SEQ ID NO: 1009459 - RNA, 19 nt, Artificial Sequence
  Description of Artificial Sequence: Synthetic oligonucleotide
ccuaagaaagugcaacaac

SEQ ID NO: 1009460 - RNA, 19 nt, Artificial Sequence
  Description of Artificial Sequence: Synthetic oligonucleotide
uugcccgacgcuucagacc

SEQ ID NO: 1009461 - RNA, 19 nt, Artificial Sequence
  Description of Artificial Sequence: Synthetic oligonucleotide
acgaugucaaacauccggu

SEQ ID NO: 1009462 - RNA, 19 nt, Artificial Sequence
  Description of Artificial Sequence: Synthetic oligonucleotide
aaagcacaacgaacaucuc

SEQ ID NO: 1009463 - RNA, 19 nt, Artificial Sequence
  Description of Artificial Sequence: Synthetic oligonucleotide
aagucacguccauuucgga

SEQ ID NO: 1009464 - RNA, 19 nt, Artificial Sequence
  Description of Artificial Sequence: Synthetic oligonucleotide
cuugcccgacgcuucagac

SEQ ID NO: 1009465 - RNA, 19 nt, Artificial Sequence
  Description of Artificial Sequence: Synthetic oligonucleotide
acugugacuuguaggcagg

SEQ ID NO: 1009466 - RNA, 19 nt, Artificial Sequence
  Description of Artificial Sequence: Synthetic oligonucleotide
gugguaugguaccugcuca

SEQ ID NO: 1009467 - RNA, 19 nt, Artificial Sequence
  Description of Artificial Sequence: Synthetic oligonucleotide
ucccgggacuugaggauag

SEQ ID NO: 1009468 - RNA, 19 nt, Artificial Sequence
  Description of Artificial Sequence: Synthetic oligonucleotide
cuuacggcucagugguaag

SEQ ID NO: 1009469 - RNA, 19 nt, Artificial Sequence
  Description of Artificial Sequence: Synthetic oligonucleotide
gaguccacgcucaugcuca

SEQ ID NO: 1009470 - RNA, 19 nt, Artificial Sequence
  Description of Artificial Sequence: Synthetic oligonucleotide
ugauugagcccaggucccg

SEQ ID NO: 1009471 - RNA, 19 nt, Artificial Sequence
  Description of Artificial Sequence: Synthetic oligonucleotide
auuaccccucaaugcaccu

SEQ ID NO: 1009472 - RNA, 19 nt, Artificial Sequence
  Description of Artificial Sequence: Synthetic oligonucleotide
acaacgcucagugcauguc

SEQ ID NO: 1009473 - RNA, 19 nt, Artificial Sequence
  Description of Artificial Sequence: Synthetic oligonucleotide
aggugggugccccacgaug

SEQ ID NO: 1009474 - RNA, 19 nt, Artificial Sequence
  Description of Artificial Sequence: Synthetic oligonucleotide
cauggcgagugaugaugcg

SEQ ID NO: 1009475 - RNA, 19 nt, Artificial Sequence
  Description of Artificial Sequence: Synthetic oligonucleotide
agguauugauuaccccuca

SEQ ID NO: 1009476 - RNA, 19 nt, Artificial Sequence
  Description of Artificial Sequence: Synthetic oligonucleotide
aacgaacaucucugugcgu

SEQ ID NO: 1009477 - RNA, 19 nt, Artificial Sequence
  Description of Artificial Sequence: Synthetic oligonucleotide
ugguaugguaccugcucaa

SEQ ID NO: 1009478 - RNA, 19 nt, Artificial Sequence
  Description of Artificial Sequence: Synthetic oligonucleotide
gucgagguaggugagcuca

SEQ ID NO: 1009479 - RNA, 19 nt, Artificial Sequence
  Description of Artificial Sequence: Synthetic oligonucleotide
ucgagguaggugagcucag

SEQ ID NO: 1009480 - RNA, 19 nt, Artificial Sequence
  Description of Artificial Sequence: Synthetic oligonucleotide
guagggaacaccacuucca

SEQ ID NO: 1009481 - RNA, 19 nt, Artificial Sequence
  Description of Artificial Sequence: Synthetic oligonucleotide
agagcccucauaaagccau

SEQ ID NO: 1009482 - RNA, 19 nt, Artificial Sequence
  Description of Artificial Sequence: Synthetic oligonucleotide
aacgcucagugcauguccu

SEQ ID NO: 1009483 - RNA, 19 nt, Artificial Sequence
  Description of Artificial Sequence: Synthetic oligonucleotide
gugccaguaagaagucacg

SEQ ID NO: 1009484 - RNA, 19 nt, Artificial Sequence
  Description of Artificial Sequence: Synthetic oligonucleotide
ugcguuaggugggugcccc

SEQ ID NO: 1009485 - RNA, 19 nt, Artificial Sequence
  Description of Artificial Sequence: Synthetic oligonucleotide
acgaacaucucugugcguu

SEQ ID NO: 1009486 - RNA, 19 nt, Artificial Sequence
  Description of Artificial Sequence: Synthetic oligonucleotide
uacggcucagugguaaggu

SEQ ID NO: 1009487 - RNA, 19 nt, Artificial Sequence
  Description of Artificial Sequence: Synthetic oligonucleotide
cuuuacucacagcccuuug

SEQ ID NO: 1009488 - RNA, 19 nt, Artificial Sequence
  Description of Artificial Sequence: Synthetic oligonucleotide
aacggaggggaagcccagg

SEQ ID NO: 1009489 - RNA, 19 nt, Artificial Sequence
  Description of Artificial Sequence: Synthetic oligonucleotide
ggugguaugguaccugcuc

SEQ ID NO: 1009490 - RNA, 19 nt, Artificial Sequence
  Description of Artificial Sequence: Synthetic oligonucleotide
agagcccauguuccugcuc

SEQ ID NO: 1009491 - RNA, 19 nt, Artificial Sequence
  Description of Artificial Sequence: Synthetic oligonucleotide
aaguuaugcugagggcuga

SEQ ID NO: 1009492 - RNA, 19 nt, Artificial Sequence
  Description of Artificial Sequence: Synthetic oligonucleotide
agcgccagaaugcgucgag

SEQ ID NO: 1009493 - RNA, 19 nt, Artificial Sequence
  Description of Artificial Sequence: Synthetic oligonucleotide
aacauaccucccugccuaa

SEQ ID NO: 1009494 - RNA, 19 nt, Artificial Sequence
  Description of Artificial Sequence: Synthetic oligonucleotide
caauguucagucccuuaca

SEQ ID NO: 1009495 - RNA, 19 nt, Artificial Sequence
  Description of Artificial Sequence: Synthetic oligonucleotide
gcugcaaucuccagugucc

SEQ ID NO: 1009496 - RNA, 19 nt, Artificial Sequence
  Description of Artificial Sequence: Synthetic oligonucleotide
ugaugcgcagcagcugcag

SEQ ID NO: 1009497 - RNA, 19 nt, Artificial Sequence
  Description of Artificial Sequence: Synthetic oligonucleotide
acagaugauugagcccagg

SEQ ID NO: 1009498 - RNA, 19 nt, Artificial Sequence
  Description of Artificial Sequence: Synthetic oligonucleotide
gcucaaacauaccucccug

SEQ ID NO: 1009499 - RNA, 19 nt, Artificial Sequence
  Description of Artificial Sequence: Synthetic oligonucleotide
accuggcgaaaguugcucu

SEQ ID NO: 1009500 - RNA, 19 nt, Artificial Sequence
  Description of Artificial Sequence: Synthetic oligonucleotide
cagucucaugcugggauag

SEQ ID NO: 1009501 - RNA, 19 nt, Artificial Sequence
  Description of Artificial Sequence: Synthetic oligonucleotide
gaggcuguagagcccaugu

SEQ ID NO: 1009502 - RNA, 19 nt, Artificial Sequence
  Description of Artificial Sequence: Synthetic oligonucleotide
gguaaagaacaaaccccag

SEQ ID NO: 1009503 - RNA, 19 nt, Artificial Sequence
  Description of Artificial Sequence: Synthetic oligonucleotide
guauugauuaccccucaau

SEQ ID NO: 1009504 - RNA, 19 nt, Artificial Sequence
  Description of Artificial Sequence: Synthetic oligonucleotide
gaccugaccucagauuuca

SEQ ID NO: 1009505 - RNA, 19 nt, Artificial Sequence
  Description of Artificial Sequence: Synthetic oligonucleotide
ggugagcucagagaacuug

SEQ ID NO: 1009506 - RNA, 19 nt, Artificial Sequence
  Description of Artificial Sequence: Synthetic oligonucleotide
gcucucaucacagcggccc

SEQ ID NO: 1009507 - RNA, 19 nt, Artificial Sequence
  Description of Artificial Sequence: Synthetic oligonucleotide
acauagcgaauugauguuu

SEQ ID NO: 1009508 - RNA, 19 nt, Artificial Sequence
  Description of Artificial Sequence: Synthetic oligonucleotide
aggcccgucucuucuugag

SEQ ID NO: 1009509 - RNA, 19 nt, Artificial Sequence
  Description of Artificial Sequence: Synthetic oligonucleotide
guuaugcugagggcugagc

SEQ ID NO: 1009510 - RNA, 19 nt, Artificial Sequence
  Description of Artificial Sequence: Synthetic oligonucleotide
ugcuaacggcucagggaca

SEQ ID NO: 1009511 - RNA, 19 nt, Artificial Sequence
  Description of Artificial Sequence: Synthetic oligonucleotide
auccgguggaggcuguaga

SEQ ID NO: 1009512 - RNA, 19 nt, Artificial Sequence
  Description of Artificial Sequence: Synthetic oligonucleotide
ugauugguugaaggguaaa

SEQ ID NO: 1009513 - RNA, 19 nt, Artificial Sequence
  Description of Artificial Sequence: Synthetic oligonucleotide
agcccucauaaagccauag

SEQ ID NO: 1009514 - RNA, 19 nt, Artificial Sequence
  Description of Artificial Sequence: Synthetic oligonucleotide
ugcucucaucacagcggcc

SEQ ID NO: 1009515 - RNA, 19 nt, Artificial Sequence
  Description of Artificial Sequence: Synthetic oligonucleotide
cucaaguggguccugcuua

SEQ ID NO: 1009516 - RNA, 19 nt, Artificial Sequence
  Description of Artificial Sequence: Synthetic oligonucleotide
gcaacaggaaacggagggg

SEQ ID NO: 1009517 - RNA, 19 nt, Artificial Sequence
  Description of Artificial Sequence: Synthetic oligonucleotide
aacaauccccagagaggug

SEQ ID NO: 1009518 - RNA, 19 nt, Artificial Sequence
  Description of Artificial Sequence: Synthetic oligonucleotide
aguuaugcugagggcugag

SEQ ID NO: 1009519 - RNA, 19 nt, Artificial Sequence
  Description of Artificial Sequence: Synthetic oligonucleotide
gcuauguuccauagacucc

SEQ ID NO: 1009520 - RNA, 19 nt, Artificial Sequence
  Description of Artificial Sequence: Synthetic oligonucleotide
gcccucauaaagccauagg

SEQ ID NO: 1009521 - RNA, 19 nt, Artificial Sequence
  Description of Artificial Sequence: Synthetic oligonucleotide
auggagcaaacaaucccca

SEQ ID NO: 1009522 - RNA, 19 nt, Artificial Sequence
  Description of Artificial Sequence: Synthetic oligonucleotide
caggcacaugggugcaggg

SEQ ID NO: 1009523 - RNA, 19 nt, Artificial Sequence
  Description of Artificial Sequence: Synthetic oligonucleotide
uccuuuacucacagcccuu

SEQ ID NO: 1009524 - RNA, 19 nt, Artificial Sequence
  Description of Artificial Sequence: Synthetic oligonucleotide
gacccgccaugcuaacggc

SEQ ID NO: 1009525 - RNA, 19 nt, Artificial Sequence
  Description of Artificial Sequence: Synthetic oligonucleotide
uggcgaaaguugcucucau

SEQ ID NO: 1009526 - RNA, 19 nt, Artificial Sequence
  Description of Artificial Sequence: Synthetic oligonucleotide
ccucaggaguuucugucgg

SEQ ID NO: 1009527 - RNA, 19 nt, Artificial Sequence
  Description of Artificial Sequence: Synthetic oligonucleotide
uccauagacuccgucccua

SEQ ID NO: 1009528 - RNA, 19 nt, Artificial Sequence
  Description of Artificial Sequence: Synthetic oligonucleotide
acguccauuucggaugagu

SEQ ID NO: 1009529 - RNA, 19 nt, Artificial Sequence
  Description of Artificial Sequence: Synthetic oligonucleotide
gcgaauugauguuuuccuc

SEQ ID NO: 1009530 - RNA, 19 nt, Artificial Sequence
  Description of Artificial Sequence: Synthetic oligonucleotide
gccaguaagaagucacguc

SEQ ID NO: 1009531 - RNA, 19 nt, Artificial Sequence
  Description of Artificial Sequence: Synthetic oligonucleotide
caaugcaccugaaagcaau

SEQ ID NO: 1009532 - RNA, 19 nt, Artificial Sequence
  Description of Artificial Sequence: Synthetic oligonucleotide
augaguccacgcucaugcu

SEQ ID NO: 1009533 - RNA, 19 nt, Artificial Sequence
  Description of Artificial Sequence: Synthetic oligonucleotide
gucccuauacacuugucuu

SEQ ID NO: 1009534 - RNA, 19 nt, Artificial Sequence
  Description of Artificial Sequence: Synthetic oligonucleotide
cuucagacccgccaugcua

SEQ ID NO: 1009535 - RNA, 19 nt, Artificial Sequence
  Description of Artificial Sequence: Synthetic oligonucleotide
ucaucacagcggcccuggc

SEQ ID NO: 1009536 - RNA, 19 nt, Artificial Sequence
  Description of Artificial Sequence: Synthetic oligonucleotide
ggaaacggaggggaagccc

SEQ ID NO: 1009537 - RNA, 19 nt, Artificial Sequence
  Description of Artificial Sequence: Synthetic oligonucleotide
ccuauacacuugucuuacg

SEQ ID NO: 1009538 - RNA, 19 nt, Artificial Sequence
  Description of Artificial Sequence: Synthetic oligonucleotide
cuccuuuacucacagcccu

SEQ ID NO: 1009539 - RNA, 19 nt, Artificial Sequence
  Description of Artificial Sequence: Synthetic oligonucleotide
aggugguaauuaauuucca

SEQ ID NO: 1009540 - RNA, 19 nt, Artificial Sequence
  Description of Artificial Sequence: Synthetic oligonucleotide
uggcuugcccgacgcuuca

SEQ ID NO: 1009541 - RNA, 19 nt, Artificial Sequence
  Description of Artificial Sequence: Synthetic oligonucleotide
acgcucaugcucaucaaua

SEQ ID NO: 1009542 - RNA, 19 nt, Artificial Sequence
  Description of Artificial Sequence: Synthetic oligonucleotide
aacggcucagggacagagu

SEQ ID NO: 1009543 - RNA, 19 nt, Artificial Sequence
  Description of Artificial Sequence: Synthetic oligonucleotide
ucugugcguuaggugggug

SEQ ID NO: 1009544 - RNA, 19 nt, Artificial Sequence
  Description of Artificial Sequence: Synthetic oligonucleotide
uaguggggaggcacuguuu

SEQ ID NO: 1009545 - RNA, 19 nt, Artificial Sequence
  Description of Artificial Sequence: Synthetic oligonucleotide
ucagacccgccaugcuaac

SEQ ID NO: 1009546 - RNA, 19 nt, Artificial Sequence
  Description of Artificial Sequence: Synthetic oligonucleotide
ugcgucgagguaggugagc

SEQ ID NO: 1009547 - RNA, 19 nt, Artificial Sequence
  Description of Artificial Sequence: Synthetic oligonucleotide
ugggugccccacgauguca

SEQ ID NO: 1009548 - RNA, 19 nt, Artificial Sequence
  Description of Artificial Sequence: Synthetic oligonucleotide
gugaugcuacugugacuug

SEQ ID NO: 1009549 - RNA, 19 nt, Artificial Sequence
  Description of Artificial Sequence: Synthetic oligonucleotide
caacaacgcucagugcaug

SEQ ID NO: 1009550 - RNA, 19 nt, Artificial Sequence
  Description of Artificial Sequence: Synthetic oligonucleotide
cauagcucgcuccuuuacu

SEQ ID NO: 1009551 - RNA, 19 nt, Artificial Sequence
  Description of Artificial Sequence: Synthetic oligonucleotide
acgccuggcuugcccgacg

SEQ ID NO: 1009552 - RNA, 19 nt, Artificial Sequence
  Description of Artificial Sequence: Synthetic oligonucleotide
cagacccgccaugcuaacg

SEQ ID NO: 1009553 - RNA, 19 nt, Artificial Sequence
  Description of Artificial Sequence: Synthetic oligonucleotide
gccacgccuggcuugcccg

SEQ ID NO: 1009554 - RNA, 19 nt, Artificial Sequence
  Description of Artificial Sequence: Synthetic oligonucleotide
cguccauuucggaugaguc

SEQ ID NO: 1009555 - RNA, 19 nt, Artificial Sequence
  Description of Artificial Sequence: Synthetic oligonucleotide
gcauguccuagccccauuc

SEQ ID NO: 1009556 - RNA, 19 nt, Artificial Sequence
  Description of Artificial Sequence: Synthetic oligonucleotide
cccucauaaagccauaggu

SEQ ID NO: 1009557 - RNA, 19 nt, Artificial Sequence
  Description of Artificial Sequence: Synthetic oligonucleotide
gacuccgucccuauacacu

SEQ ID NO: 1009558 - RNA, 19 nt, Artificial Sequence
  Description of Artificial Sequence: Synthetic oligonucleotide
cauagcgaauugauguuuu

SEQ ID NO: 1009559 - RNA, 19 nt, Artificial Sequence
  Description of Artificial Sequence: Synthetic oligonucleotide
ugcaaucuccaguguccuu

SEQ ID NO: 1009560 - RNA, 19 nt, Artificial Sequence
  Description of Artificial Sequence: Synthetic oligonucleotide
caccuggcgaaaguugcuc

SEQ ID NO: 1009561 - RNA, 19 nt, Artificial Sequence
  Description of Artificial Sequence: Synthetic oligonucleotide
gguauugauuaccccucaa

SEQ ID NO: 1009562 - RNA, 19 nt, Artificial Sequence
  Description of Artificial Sequence: Synthetic oligonucleotide
cuccacuugcagaaccuua

SEQ ID NO: 1009563 - RNA, 19 nt, Artificial Sequence
  Description of Artificial Sequence: Synthetic oligonucleotide
cuccgucccuauacacuug

SEQ ID NO: 1009564 - RNA, 19 nt, Artificial Sequence
  Description of Artificial Sequence: Synthetic oligonucleotide
uaggugggugccccacgau

SEQ ID NO: 1009565 - RNA, 19 nt, Artificial Sequence
  Description of Artificial Sequence: Synthetic oligonucleotide
cuuugaccugaccucagau

SEQ ID NO: 1009566 - RNA, 19 nt, Artificial Sequence
  Description of Artificial Sequence: Synthetic oligonucleotide
cuggcgaaaguugcucuca

SEQ ID NO: 1009567 - RNA, 19 nt, Artificial Sequence
  Description of Artificial Sequence: Synthetic oligonucleotide
cuguagagacacacauuua

SEQ ID NO: 1009568 - RNA, 19 nt, Artificial Sequence
  Description of Artificial Sequence: Synthetic oligonucleotide
agugcauguccuagcccca

SEQ ID NO: 1009569 - RNA, 19 nt, Artificial Sequence
  Description of Artificial Sequence: Synthetic oligonucleotide
ggaguuucugucggcccag

SEQ ID NO: 1009570 - RNA, 19 nt, Artificial Sequence
  Description of Artificial Sequence: Synthetic oligonucleotide
aggauaguguuggccuggu

SEQ ID NO: 1009571 - RNA, 19 nt, Artificial Sequence
  Description of Artificial Sequence: Synthetic oligonucleotide
gaguuucugucggcccagc

SEQ ID NO: 1009572 - RNA, 19 nt, Artificial Sequence
  Description of Artificial Sequence: Synthetic oligonucleotide
ugucggcccagcgccagaa

SEQ ID NO: 1009573 - RNA, 19 nt, Artificial Sequence
  Description of Artificial Sequence: Synthetic oligonucleotide
uaguguuggccugguuaaa

SEQ ID NO: 1009574 - RNA, 19 nt, Artificial Sequence
  Description of Artificial Sequence: Synthetic oligonucleotide
cugcucuuccggccacgcc

SEQ ID NO: 1009575 - RNA, 19 nt, Artificial Sequence
  Description of Artificial Sequence: Synthetic oligonucleotide
cgaugucaaacauccggug

SEQ ID NO: 1009576 - RNA, 19 nt, Artificial Sequence
  Description of Artificial Sequence: Synthetic oligonucleotide
cacauagcgaauugauguu

SEQ ID NO: 1009577 - RNA, 19 nt, Artificial Sequence
  Description of Artificial Sequence: Synthetic oligonucleotide
gugccccacgaugucaaac

SEQ ID NO: 1009578 - RNA, 19 nt, Artificial Sequence
  Description of Artificial Sequence: Synthetic oligonucleotide
gugauugguugaaggguaa

SEQ ID NO: 1009579 - RNA, 19 nt, Artificial Sequence
  Description of Artificial Sequence: Synthetic oligonucleotide
ucacagcggcccuggcgcu

SEQ ID NO: 1009580 - RNA, 19 nt, Artificial Sequence
  Description of Artificial Sequence: Synthetic oligonucleotide
ggcgagugaugaugcgcag

SEQ ID NO: 1009581 - RNA, 19 nt, Artificial Sequence
  Description of Artificial Sequence: Synthetic oligonucleotide
agucucaugcugggauagu

SEQ ID NO: 1009582 - RNA, 19 nt, Artificial Sequence
  Description of Artificial Sequence: Synthetic oligonucleotide
aacauccgguggaggcugu

SEQ ID NO: 1009583 - RNA, 19 nt, Artificial Sequence
  Description of Artificial Sequence: Synthetic oligonucleotide
ggcgaaaguugcucucauc

SEQ ID NO: 1009584 - RNA, 19 nt, Artificial Sequence
  Description of Artificial Sequence: Synthetic oligonucleotide
ggucacauagcgaauugau

SEQ ID NO: 1009585 - RNA, 19 nt, Artificial Sequence
  Description of Artificial Sequence: Synthetic oligonucleotide
cugcucaaauaggcucuac

SEQ ID NO: 1009586 - RNA, 19 nt, Artificial Sequence
  Description of Artificial Sequence: Synthetic oligonucleotide
ccuggcgaaaguugcucuc

SEQ ID NO: 1009587 - RNA, 19 nt, Artificial Sequence
  Description of Artificial Sequence: Synthetic oligonucleotide
ccacgaugucaaacauccg

SEQ ID NO: 1009588 - RNA, 19 nt, Artificial Sequence
  Description of Artificial Sequence: Synthetic oligonucleotide
ggcucuacuuauaggccuc

SEQ ID NO: 1009589 - RNA, 19 nt, Artificial Sequence
  Description of Artificial Sequence: Synthetic oligonucleotide
cauguccuagccccauucu

SEQ ID NO: 1009590 - RNA, 19 nt, Artificial Sequence
  Description of Artificial Sequence: Synthetic oligonucleotide
agaaugcgucgagguaggu

SEQ ID NO: 1009591 - RNA, 19 nt, Artificial Sequence
  Description of Artificial Sequence: Synthetic oligonucleotide
cacuugucuuacggcucag

SEQ ID NO: 1009592 - RNA, 19 nt, Artificial Sequence
  Description of Artificial Sequence: Synthetic oligonucleotide
cauagacuccgucccuaua

SEQ ID NO: 1009593 - RNA, 19 nt, Artificial Sequence
  Description of Artificial Sequence: Synthetic oligonucleotide
augcgucgagguaggugag

SEQ ID NO: 1009594 - RNA, 19 nt, Artificial Sequence
  Description of Artificial Sequence: Synthetic oligonucleotide
cccgccaugcuaacggcuc

SEQ ID NO: 1009595 - RNA, 19 nt, Artificial Sequence
  Description of Artificial Sequence: Synthetic oligonucleotide
ggacccaagcacaguuccc

SEQ ID NO: 1009596 - RNA, 19 nt, Artificial Sequence
  Description of Artificial Sequence: Synthetic oligonucleotide
gggucacauagcgaauuga

SEQ ID NO: 1009597 - RNA, 19 nt, Artificial Sequence
  Description of Artificial Sequence: Synthetic oligonucleotide
gugcguuaggugggugccc

SEQ ID NO: 1009598 - RNA, 19 nt, Artificial Sequence
  Description of Artificial Sequence: Synthetic oligonucleotide
gcucuacuuauaggccucc

SEQ ID NO: 1009599 - RNA, 19 nt, Artificial Sequence
  Description of Artificial Sequence: Synthetic oligonucleotide
ccuagccccauucuccaga

SEQ ID NO: 1009600 - RNA, 19 nt, Artificial Sequence
  Description of Artificial Sequence: Synthetic oligonucleotide
gagcagucucaugcuggga

SEQ ID NO: 1009601 - RNA, 19 nt, Artificial Sequence
  Description of Artificial Sequence: Synthetic oligonucleotide
gguaugguaccugcucaaa

SEQ ID NO: 1009602 - RNA, 19 nt, Artificial Sequence
  Description of Artificial Sequence: Synthetic oligonucleotide
ccccacgaugucaaacauc

SEQ ID NO: 1009603 - RNA, 19 nt, Artificial Sequence
  Description of Artificial Sequence: Synthetic oligonucleotide
gcgccagaaugcgucgagg

SEQ ID NO: 1009604 - RNA, 19 nt, Artificial Sequence
  Description of Artificial Sequence: Synthetic oligonucleotide
cagaaccuuaaacucucuu

SEQ ID NO: 1009605 - RNA, 19 nt, Artificial Sequence
  Description of Artificial Sequence: Synthetic oligonucleotide
cugugacuuguaggcagga

SEQ ID NO: 1009606 - RNA, 19 nt, Artificial Sequence
  Description of Artificial Sequence: Synthetic oligonucleotide
gacacacauuuaggggaua

SEQ ID NO: 1009607 - RNA, 19 nt, Artificial Sequence
  Description of Artificial Sequence: Synthetic oligonucleotide
gcagucucaugcugggaua

SEQ ID NO: 1009608 - RNA, 19 nt, Artificial Sequence
  Description of Artificial Sequence: Synthetic oligonucleotide
cagagugacuuuccagaau

SEQ ID NO: 1009609 - RNA, 19 nt, Artificial Sequence
  Description of Artificial Sequence: Synthetic oligonucleotide
gcuugcccgacgcuucaga

SEQ ID NO: 1009610 - RNA, 19 nt, Artificial Sequence
  Description of Artificial Sequence: Synthetic oligonucleotide
ggccugguuaaagcgcuca

SEQ ID NO: 1009611 - RNA, 19 nt, Artificial Sequence
  Description of Artificial Sequence: Synthetic oligonucleotide
ggugggugccccacgaugu

SEQ ID NO: 1009612 - RNA, 19 nt, Artificial Sequence
  Description of Artificial Sequence: Synthetic oligonucleotide
cacgcucaugcucaucaau

SEQ ID NO: 1009613 - RNA, 19 nt, Artificial Sequence
  Description of Artificial Sequence: Synthetic oligonucleotide
caggcccgucucuucuuga

SEQ ID NO: 1009614 - RNA, 19 nt, Artificial Sequence
  Description of Artificial Sequence: Synthetic oligonucleotide
ccgggacuugaggauagug

SEQ ID NO: 1009615 - RNA, 19 nt, Artificial Sequence
  Description of Artificial Sequence: Synthetic oligonucleotide
gagucccaccuuccacaua

SEQ ID NO: 1009616 - RNA, 19 nt, Artificial Sequence
  Description of Artificial Sequence: Synthetic oligonucleotide
cacguccauuucggaugag

SEQ ID NO: 1009617 - RNA, 19 nt, Artificial Sequence
  Description of Artificial Sequence: Synthetic oligonucleotide
cgcucaugcucaucaauaa

SEQ ID NO: 1009618 - RNA, 19 nt, Artificial Sequence
  Description of Artificial Sequence: Synthetic oligonucleotide
gccugguuaaagcgcucaa

SEQ ID NO: 1009619 - RNA, 19 nt, Artificial Sequence
  Description of Artificial Sequence: Synthetic oligonucleotide
aggugagcucagagaacuu

SEQ ID NO: 1009620 - RNA, 19 nt, Artificial Sequence
  Description of Artificial Sequence: Synthetic oligonucleotide
cgucccuauacacuugucu

SEQ ID NO: 1009621 - RNA, 19 nt, Artificial Sequence
  Description of Artificial Sequence: Synthetic oligonucleotide
cuaacggcucagggacaga

SEQ ID NO: 1009622 - RNA, 19 nt, Artificial Sequence
  Description of Artificial Sequence: Synthetic oligonucleotide
cccgacgcuucagacccgc

SEQ ID NO: 1009623 - RNA, 19 nt, Artificial Sequence
  Description of Artificial Sequence: Synthetic oligonucleotide
gagcccucauaaagccaua

SEQ ID NO: 1009624 - RNA, 19 nt, Artificial Sequence
  Description of Artificial Sequence: Synthetic oligonucleotide
gcgcucaaguggguccugc

SEQ ID NO: 1009625 - RNA, 19 nt, Artificial Sequence
  Description of Artificial Sequence: Synthetic oligonucleotide
gcuuauuggagaagacauu

SEQ ID NO: 1009626 - RNA, 19 nt, Artificial Sequence
  Description of Artificial Sequence: Synthetic oligonucleotide
gcaacaacgcucagugcau

SEQ ID NO: 1009627 - RNA, 19 nt, Artificial Sequence
  Description of Artificial Sequence: Synthetic oligonucleotide
cucuacuuauaggccuccu

SEQ ID NO: 1009628 - RNA, 19 nt, Artificial Sequence
  Description of Artificial Sequence: Synthetic oligonucleotide
gggauaguggggaggcacu

SEQ ID NO: 1009629 - RNA, 19 nt, Artificial Sequence
  Description of Artificial Sequence: Synthetic oligonucleotide
ccacuugcagaaccuuaaa

SEQ ID NO: 1009630 - RNA, 19 nt, Artificial Sequence
  Description of Artificial Sequence: Synthetic oligonucleotide
gcgucgagguaggugagcu

SEQ ID NO: 1009631 - RNA, 19 nt, Artificial Sequence
  Description of Artificial Sequence: Synthetic oligonucleotide
ggaaacggugugauugguu

SEQ ID NO: 1009632 - RNA, 19 nt, Artificial Sequence
  Description of Artificial Sequence: Synthetic oligonucleotide
ggcuugcccgacgcuucag

SEQ ID NO: 1009633 - RNA, 19 nt, Artificial Sequence
  Description of Artificial Sequence: Synthetic oligonucleotide
acauccgguggaggcugua

SEQ ID NO: 1009634 - RNA, 19 nt, Artificial Sequence
  Description of Artificial Sequence: Synthetic oligonucleotide
ggcgcuccagugccaguaa

SEQ ID NO: 1009635 - RNA, 19 nt, Artificial Sequence
  Description of Artificial Sequence: Synthetic oligonucleotide
gggguagggaacaccacuu

SEQ ID NO: 1009636 - RNA, 19 nt, Artificial Sequence
  Description of Artificial Sequence: Synthetic oligonucleotide
cagcgccagaaugcgucga

SEQ ID NO: 1009637 - RNA, 19 nt, Artificial Sequence
  Description of Artificial Sequence: Synthetic oligonucleotide
gggugccccacgaugucaa

SEQ ID NO: 1009638 - RNA, 19 nt, Artificial Sequence
  Description of Artificial Sequence: Synthetic oligonucleotide
ggaggccucgguucuggau

SEQ ID NO: 1009639 - RNA, 19 nt, Artificial Sequence
  Description of Artificial Sequence: Synthetic oligonucleotide
ccgucccuauacacuuguc

SEQ ID NO: 1009640 - RNA, 19 nt, Artificial Sequence
  Description of Artificial Sequence: Synthetic oligonucleotide
gcaaugcuugcagcaucaa

SEQ ID NO: 1009641 - RNA, 19 nt, Artificial Sequence
  Description of Artificial Sequence: Synthetic oligonucleotide
cuggaucacugagggcucu

SEQ ID NO: 1009642 - RNA, 19 nt, Artificial Sequence
  Description of Artificial Sequence: Synthetic oligonucleotide
ccggccacgccuggcuugc

SEQ ID NO: 1009643 - RNA, 19 nt, Artificial Sequence
  Description of Artificial Sequence: Synthetic oligonucleotide
cucugugcguuaggugggu

SEQ ID NO: 1009644 - RNA, 19 nt, Artificial Sequence
  Description of Artificial Sequence: Synthetic oligonucleotide
gucuuacggcucaguggua

SEQ ID NO: 1009645 - RNA, 19 nt, Artificial Sequence
  Description of Artificial Sequence: Synthetic oligonucleotide
cagcugcaaucuccagugu

SEQ ID NO: 1009646 - RNA, 19 nt, Artificial Sequence
  Description of Artificial Sequence: Synthetic oligonucleotide
gcguuaggugggugcccca

SEQ ID NO: 1009647 - RNA, 19 nt, Artificial Sequence
  Description of Artificial Sequence: Synthetic oligonucleotide
ggcgcucaaguggguccug

SEQ ID NO: 1009648 - RNA, 19 nt, Artificial Sequence
  Description of Artificial Sequence: Synthetic oligonucleotide
ccccucaaugcaccugaaa

SEQ ID NO: 1009649 - RNA, 19 nt, Artificial Sequence
  Description of Artificial Sequence: Synthetic oligonucleotide
gccccacgaugucaaacau

SEQ ID NO: 1009650 - RNA, 19 nt, Artificial Sequence
  Description of Artificial Sequence: Synthetic oligonucleotide
ccauagacuccgucccuau

SEQ ID NO: 1009651 - RNA, 19 nt, Artificial Sequence
  Description of Artificial Sequence: Synthetic oligonucleotide
gcaccuggcgaaaguugcu

SEQ ID NO: 1009652 - RNA, 19 nt, Artificial Sequence
  Description of Artificial Sequence: Synthetic oligonucleotide
ggauaguguuggccugguu

SEQ ID NO: 1009653 - RNA, 19 nt, Artificial Sequence
  Description of Artificial Sequence: Synthetic oligonucleotide
gcccgacgcuucagacccg

SEQ ID NO: 1009654 - RNA, 19 nt, Artificial Sequence
  Description of Artificial Sequence: Synthetic oligonucleotide
gcccaggucccgggacuug

SEQ ID NO: 1009655 - RNA, 19 nt, Artificial Sequence
  Description of Artificial Sequence: Synthetic oligonucleotide
cgagguaggugagcucaga

SEQ ID NO: 1009656 - RNA, 19 nt, Artificial Sequence
  Description of Artificial Sequence: Synthetic oligonucleotide
caaguggguccugcuuauu

SEQ ID NO: 1009657 - RNA, 19 nt, Artificial Sequence
  Description of Artificial Sequence: Synthetic oligonucleotide
cgcucaaacuggcgcucaa

SEQ ID NO: 1009658 - RNA, 19 nt, Artificial Sequence
  Description of Artificial Sequence: Synthetic oligonucleotide
gcccagcgccagaaugcgu

SEQ ID NO: 1009659 - RNA, 19 nt, Artificial Sequence
  Description of Artificial Sequence: Synthetic oligonucleotide
cccgggacuugaggauagu

SEQ ID NO: 1009660 - RNA, 19 nt, Artificial Sequence
  Description of Artificial Sequence: Synthetic oligonucleotide
ugauaaaggacuauuagag

SEQ ID NO: 1009661 - RNA, 19 nt, Artificial Sequence
  Description of Artificial Sequence: Synthetic oligonucleotide
aaauucagagacucaaggc

SEQ ID NO: 1009662 - RNA, 19 nt, Artificial Sequence
  Description of Artificial Sequence: Synthetic oligonucleotide
acuauuagagcccugcucc

SEQ ID NO: 1009663 - RNA, 19 nt, Artificial Sequence
  Description of Artificial Sequence: Synthetic oligonucleotide
aggaaauuaaaauuagccg

SEQ ID NO: 1009664 - RNA, 19 nt, Artificial Sequence
  Description of Artificial Sequence: Synthetic oligonucleotide
ugaguuucugugcacaugg

SEQ ID NO: 1009665 - RNA, 19 nt, Artificial Sequence
  Description of Artificial Sequence: Synthetic oligonucleotide
gaugauaaaggacuauuag

SEQ ID NO: 1009666 - RNA, 19 nt, Artificial Sequence
  Description of Artificial Sequence: Synthetic oligonucleotide
agaaugauugcccgcaggc

SEQ ID NO: 1009667 - RNA, 19 nt, Artificial Sequence
  Description of Artificial Sequence: Synthetic oligonucleotide
uccacucuugagaagaagg

SEQ ID NO: 1009668 - RNA, 19 nt, Artificial Sequence
  Description of Artificial Sequence: Synthetic oligonucleotide
ugugcagucuuuguuaucg

SEQ ID NO: 1009669 - RNA, 19 nt, Artificial Sequence
  Description of Artificial Sequence: Synthetic oligonucleotide
gacaucaauggaccgaugg

SEQ ID NO: 1009670 - RNA, 19 nt, Artificial Sequence
  Description of Artificial Sequence: Synthetic oligonucleotide
uguacaguacuucuuugag

SEQ ID NO: 1009671 - RNA, 19 nt, Artificial Sequence
  Description of Artificial Sequence: Synthetic oligonucleotide
aauggugcguuugaagaac

SEQ ID NO: 1009672 - RNA, 19 nt, Artificial Sequence
  Description of Artificial Sequence: Synthetic oligonucleotide
ucaacgagcgugaacagcu

SEQ ID NO: 1009673 - RNA, 19 nt, Artificial Sequence
  Description of Artificial Sequence: Synthetic oligonucleotide
agauguuagucacuggguc

SEQ ID NO: 1009674 - RNA, 19 nt, Artificial Sequence
  Description of Artificial Sequence: Synthetic oligonucleotide
ucugauagcggcaguacug

SEQ ID NO: 1009675 - RNA, 19 nt, Artificial Sequence
  Description of Artificial Sequence: Synthetic oligonucleotide
uucuuugagucuaacuccc

SEQ ID NO: 1009676 - RNA, 19 nt, Artificial Sequence
  Description of Artificial Sequence: Synthetic oligonucleotide
gaccaggaaacccugcucg

SEQ ID NO: 1009677 - RNA, 19 nt, Artificial Sequence
  Description of Artificial Sequence: Synthetic oligonucleotide
uggcaucuggauuaaacag

SEQ ID NO: 1009678 - RNA, 19 nt, Artificial Sequence
  Description of Artificial Sequence: Synthetic oligonucleotide
gauggugcccuuucuagag

SEQ ID NO: 1009679 - RNA, 19 nt, Artificial Sequence
  Description of Artificial Sequence: Synthetic oligonucleotide
acgcauuuuggacacuagc

SEQ ID NO: 1009680 - RNA, 19 nt, Artificial Sequence
  Description of Artificial Sequence: Synthetic oligonucleotide
uugucuuuugccccguugc

SEQ ID NO: 1009681 - RNA, 19 nt, Artificial Sequence
  Description of Artificial Sequence: Synthetic oligonucleotide
acaucaauggaccgauggg

SEQ ID NO: 1009682 - RNA, 19 nt, Artificial Sequence
  Description of Artificial Sequence: Synthetic oligonucleotide
uaaaauuagccgucgguuc

SEQ ID NO: 1009683 - RNA, 19 nt, Artificial Sequence
  Description of Artificial Sequence: Synthetic oligonucleotide
guaaacuccauagugcuug

SEQ ID NO: 1009684 - RNA, 19 nt, Artificial Sequence
  Description of Artificial Sequence: Synthetic oligonucleotide
acauguggucgucacaggg

SEQ ID NO: 1009685 - RNA, 19 nt, Artificial Sequence
  Description of Artificial Sequence: Synthetic oligonucleotide
ucuucgcccacucaacgag

SEQ ID NO: 1009686 - RNA, 19 nt, Artificial Sequence
  Description of Artificial Sequence: Synthetic oligonucleotide
aggacuauuagagcccugc

SEQ ID NO: 1009687 - RNA, 19 nt, Artificial Sequence
  Description of Artificial Sequence: Synthetic oligonucleotide
aaaccggccuugcugcucg

SEQ ID NO: 1009688 - RNA, 19 nt, Artificial Sequence
  Description of Artificial Sequence: Synthetic oligonucleotide
ucuuuguuaucgcggcacg

SEQ ID NO: 1009689 - RNA, 19 nt, Artificial Sequence
  Description of Artificial Sequence: Synthetic oligonucleotide
gacgcguacaccuucuccc

SEQ ID NO: 1009690 - RNA, 19 nt, Artificial Sequence
  Description of Artificial Sequence: Synthetic oligonucleotide
uagucacugggucauucgg

SEQ ID NO: 1009691 - RNA, 19 nt, Artificial Sequence
  Description of Artificial Sequence: Synthetic oligonucleotide
ugagagucgccccugucag

SEQ ID NO: 1009692 - RNA, 19 nt, Artificial Sequence
  Description of Artificial Sequence: Synthetic oligonucleotide
ugcagucuuuguuaucgcg

SEQ ID NO: 1009693 - RNA, 19 nt, Artificial Sequence
  Description of Artificial Sequence: Synthetic oligonucleotide
uuaaaauuagccgucgguu

SEQ ID NO: 1009694 - RNA, 19 nt, Artificial Sequence
  Description of Artificial Sequence: Synthetic oligonucleotide
cuugccugagcuucggucc

SEQ ID NO: 1009695 - RNA, 19 nt, Artificial Sequence
  Description of Artificial Sequence: Synthetic oligonucleotide
uugagucuaacucccaguc

SEQ ID NO: 1009696 - RNA, 19 nt, Artificial Sequence
  Description of Artificial Sequence: Synthetic oligonucleotide
gcagauguuagucacuggg

SEQ ID NO: 1009697 - RNA, 19 nt, Artificial Sequence
  Description of Artificial Sequence: Synthetic oligonucleotide
auagcggcaguacuggcag

SEQ ID NO: 1009698 - RNA, 19 nt, Artificial Sequence
  Description of Artificial Sequence: Synthetic oligonucleotide
ucaaccuggggauguacag

SEQ ID NO: 1009699 - RNA, 19 nt, Artificial Sequence
  Description of Artificial Sequence: Synthetic oligonucleotide
uguaccgccucccuuuuca

SEQ ID NO: 1009700 - RNA, 19 nt, Artificial Sequence
  Description of Artificial Sequence: Synthetic oligonucleotide
uuuguuaucgcggcacgag

SEQ ID NO: 1009701 - RNA, 19 nt, Artificial Sequence
  Description of Artificial Sequence: Synthetic oligonucleotide
aucucggacaucaauggac

SEQ ID NO: 1009702 - RNA, 19 nt, Artificial Sequence
  Description of Artificial Sequence: Synthetic oligonucleotide
ucuguuugcaguaggucuc

SEQ ID NO: 1009703 - RNA, 19 nt, Artificial Sequence
  Description of Artificial Sequence: Synthetic oligonucleotide
ucuuuugccccguugccgc

SEQ ID NO: 1009704 - RNA, 19 nt, Artificial Sequence
  Description of Artificial Sequence: Synthetic oligonucleotide
acucuugagaagaagggag

SEQ ID NO: 1009705 - RNA, 19 nt, Artificial Sequence
  Description of Artificial Sequence: Synthetic oligonucleotide
uuggacacuagcucuguca

SEQ ID NO: 1009706 - RNA, 19 nt, Artificial Sequence
  Description of Artificial Sequence: Synthetic oligonucleotide
agacauguggucgucacag

SEQ ID NO: 1009707 - RNA, 19 nt, Artificial Sequence
  Description of Artificial Sequence: Synthetic oligonucleotide
uuugucuuuugccccguug

SEQ ID NO: 1009708 - RNA, 19 nt, Artificial Sequence
  Description of Artificial Sequence: Synthetic oligonucleotide
uauucgucagucugacugc

SEQ ID NO: 1009709 - RNA, 19 nt, Artificial Sequence
  Description of Artificial Sequence: Synthetic oligonucleotide
augucacgcauuuuggaca

SEQ ID NO: 1009710 - RNA, 19 nt, Artificial Sequence
  Description of Artificial Sequence: Synthetic oligonucleotide
acccucaacgccuugguca

SEQ ID NO: 1009711 - RNA, 19 nt, Artificial Sequence
  Description of Artificial Sequence: Synthetic oligonucleotide
cuaggaggaugccaucucg

SEQ ID NO: 1009712 - RNA, 19 nt, Artificial Sequence
  Description of Artificial Sequence: Synthetic oligonucleotide
uugaucugagggcugcuga

SEQ ID NO: 1009713 - RNA, 19 nt, Artificial Sequence
  Description of Artificial Sequence: Synthetic oligonucleotide
cuuugagucuaacucccag

SEQ ID NO: 1009714 - RNA, 19 nt, Artificial Sequence
  Description of Artificial Sequence: Synthetic oligonucleotide
auguacaguacuucuuuga

SEQ ID NO: 1009715 - RNA, 19 nt, Artificial Sequence
  Description of Artificial Sequence: Synthetic oligonucleotide
cagucugacugcaggaggg

SEQ ID NO: 1009716 - RNA, 19 nt, Artificial Sequence
  Description of Artificial Sequence: Synthetic oligonucleotide
uggcaaaccggccuugcug

SEQ ID NO: 1009717 - RNA, 19 nt, Artificial Sequence
  Description of Artificial Sequence: Synthetic oligonucleotide
uacuucuuugagucuaacu

SEQ ID NO: 1009718 - RNA, 19 nt, Artificial Sequence
  Description of Artificial Sequence: Synthetic oligonucleotide
agugugggauccucuucgc

SEQ ID NO: 1009719 - RNA, 19 nt, Artificial Sequence
  Description of Artificial Sequence: Synthetic oligonucleotide
ugucuuuugccccguugcc

SEQ ID NO: 1009720 - RNA, 19 nt, Artificial Sequence
  Description of Artificial Sequence: Synthetic oligonucleotide
aaaggacuauuagagcccu

SEQ ID NO: 1009721 - RNA, 19 nt, Artificial Sequence
  Description of Artificial Sequence: Synthetic oligonucleotide
gacuauuagagcccugcuc

SEQ ID NO: 1009722 - RNA, 19 nt, Artificial Sequence
  Description of Artificial Sequence: Synthetic oligonucleotide
uucuagaggagcuccguuc

SEQ ID NO: 1009723 - RNA, 19 nt, Artificial Sequence
  Description of Artificial Sequence: Synthetic oligonucleotide
ugucacgcauuuuggacac

SEQ ID NO: 1009724 - RNA, 19 nt, Artificial Sequence
  Description of Artificial Sequence: Synthetic oligonucleotide
agcacccgaucaaagaugg

SEQ ID NO: 1009725 - RNA, 19 nt, Artificial Sequence
  Description of Artificial Sequence: Synthetic oligonucleotide
guuaucgcggcacgaguag

SEQ ID NO: 1009726 - RNA, 19 nt, Artificial Sequence
  Description of Artificial Sequence: Synthetic oligonucleotide
cuucgguccccgcagauug

SEQ ID NO: 1009727 - RNA, 19 nt, Artificial Sequence
  Description of Artificial Sequence: Synthetic oligonucleotide
uguuaucgcggcacgagua

SEQ ID NO: 1009728 - RNA, 19 nt, Artificial Sequence
  Description of Artificial Sequence: Synthetic oligonucleotide
augagagucgccccuguca

SEQ ID NO: 1009729 - RNA, 19 nt, Artificial Sequence
  Description of Artificial Sequence: Synthetic oligonucleotide
aacgagcgugaacagcugu

SEQ ID NO: 1009730 - RNA, 19 nt, Artificial Sequence
  Description of Artificial Sequence: Synthetic oligonucleotide
uuagccgucgguuccucca

SEQ ID NO: 1009731 - RNA, 19 nt, Artificial Sequence
  Description of Artificial Sequence: Synthetic oligonucleotide
cacucaacgagcgugaaca

SEQ ID NO: 1009732 - RNA, 19 nt, Artificial Sequence
  Description of Artificial Sequence: Synthetic oligonucleotide
agagucgccccugucaggg

SEQ ID NO: 1009733 - RNA, 19 nt, Artificial Sequence
  Description of Artificial Sequence: Synthetic oligonucleotide
aggagcucauuccagccug

SEQ ID NO: 1009734 - RNA, 19 nt, Artificial Sequence
  Description of Artificial Sequence: Synthetic oligonucleotide
cuuuauucgucagucugac

SEQ ID NO: 1009735 - RNA, 19 nt, Artificial Sequence
  Description of Artificial Sequence: Synthetic oligonucleotide
auuagccgucgguuccucc

SEQ ID NO: 1009736 - RNA, 19 nt, Artificial Sequence
  Description of Artificial Sequence: Synthetic oligonucleotide
ucugucagcacccgaucaa

SEQ ID NO: 1009737 - RNA, 19 nt, Artificial Sequence
  Description of Artificial Sequence: Synthetic oligonucleotide
aggccgauggagcggaggg

SEQ ID NO: 1009738 - RNA, 19 nt, Artificial Sequence
  Description of Artificial Sequence: Synthetic oligonucleotide
cugauagcggcaguacugg

SEQ ID NO: 1009739 - RNA, 19 nt, Artificial Sequence
  Description of Artificial Sequence: Synthetic oligonucleotide
ucaauggaccgaugggaga

SEQ ID NO: 1009740 - RNA, 19 nt, Artificial Sequence
  Description of Artificial Sequence: Synthetic oligonucleotide
uuguuaucgcggcacgagu

SEQ ID NO: 1009741 - RNA, 19 nt, Artificial Sequence
  Description of Artificial Sequence: Synthetic oligonucleotide
cuauuagagcccugcuccc

SEQ ID NO: 1009742 - RNA, 19 nt, Artificial Sequence
  Description of Artificial Sequence: Synthetic oligonucleotide
agggccagugcuuugugcu

SEQ ID NO: 1009743 - RNA, 19 nt, Artificial Sequence
  Description of Artificial Sequence: Synthetic oligonucleotide
cuggggaugauaaaggacu

SEQ ID NO: 1009744 - RNA, 19 nt, Artificial Sequence
  Description of Artificial Sequence: Synthetic oligonucleotide
caggaaacccugcucgggg

SEQ ID NO: 1009745 - RNA, 19 nt, Artificial Sequence
  Description of Artificial Sequence: Synthetic oligonucleotide
ggcacugacgucaaccugg

SEQ ID NO: 1009746 - RNA, 19 nt, Artificial Sequence
  Description of Artificial Sequence: Synthetic oligonucleotide
gcacgaguaggucaggucc

SEQ ID NO: 1009747 - RNA, 19 nt, Artificial Sequence
  Description of Artificial Sequence: Synthetic oligonucleotide
uaaacuccauagugcuugc

SEQ ID NO: 1009748 - RNA, 19 nt, Artificial Sequence
  Description of Artificial Sequence: Synthetic oligonucleotide
ugcaccauuugcccacggc

SEQ ID NO: 1009749 - RNA, 19 nt, Artificial Sequence
  Description of Artificial Sequence: Synthetic oligonucleotide
cagaaugauugcccgcagg

SEQ ID NO: 1009750 - RNA, 19 nt, Artificial Sequence
  Description of Artificial Sequence: Synthetic oligonucleotide
uccaguccuggcacugacg

SEQ ID NO: 1009751 - RNA, 19 nt, Artificial Sequence
  Description of Artificial Sequence: Synthetic oligonucleotide
gguccuuccgaauggugcg

SEQ ID NO: 1009752 - RNA, 19 nt, Artificial Sequence
  Description of Artificial Sequence: Synthetic oligonucleotide
uuucgcuggcgcuugucca

SEQ ID NO: 1009753 - RNA, 19 nt, Artificial Sequence
  Description of Artificial Sequence: Synthetic oligonucleotide
gaauggugcguuugaagaa

SEQ ID NO: 1009754 - RNA, 19 nt, Artificial Sequence
  Description of Artificial Sequence: Synthetic oligonucleotide
ucuuugagucuaacuccca

SEQ ID NO: 1009755 - RNA, 19 nt, Artificial Sequence
  Description of Artificial Sequence: Synthetic oligonucleotide
guuucgcuggcgcuugucc

SEQ ID NO: 1009756 - RNA, 19 nt, Artificial Sequence
  Description of Artificial Sequence: Synthetic oligonucleotide
augauugcccgcaggcagc

SEQ ID NO: 1009757 - RNA, 19 nt, Artificial Sequence
  Description of Artificial Sequence: Synthetic oligonucleotide
aaauuagccgucgguuccu

SEQ ID NO: 1009758 - RNA, 19 nt, Artificial Sequence
  Description of Artificial Sequence: Synthetic oligonucleotide
auggugcguuugaagaacc

SEQ ID NO: 1009759 - RNA, 19 nt, Artificial Sequence
  Description of Artificial Sequence: Synthetic oligonucleotide
uaucgcggcacgaguaggu

SEQ ID NO: 1009760 - RNA, 19 nt, Artificial Sequence
  Description of Artificial Sequence: Synthetic oligonucleotide
acgcguacaccuucucccg

SEQ ID NO: 1009761 - RNA, 19 nt, Artificial Sequence
  Description of Artificial Sequence: Synthetic oligonucleotide
gucuuuugccccguugccg

SEQ ID NO: 1009762 - RNA, 19 nt, Artificial Sequence
  Description of Artificial Sequence: Synthetic oligonucleotide
agucacugggucauucggg

SEQ ID NO: 1009763 - RNA, 19 nt, Artificial Sequence
  Description of Artificial Sequence: Synthetic oligonucleotide
cauuuuggacacuagcucu

SEQ ID NO: 1009764 - RNA, 19 nt, Artificial Sequence
  Description of Artificial Sequence: Synthetic oligonucleotide
uuccgaauggugcguuuga

SEQ ID NO: 1009765 - RNA, 19 nt, Artificial Sequence
  Description of Artificial Sequence: Synthetic oligonucleotide
uagacauguggucgucaca

SEQ ID NO: 1009766 - RNA, 19 nt, Artificial Sequence
  Description of Artificial Sequence: Synthetic oligonucleotide
ccacucuugagaagaaggg

SEQ ID NO: 1009767 - RNA, 19 nt, Artificial Sequence
  Description of Artificial Sequence: Synthetic oligonucleotide
aauuagccgucgguuccuc

SEQ ID NO: 1009768 - RNA, 19 nt, Artificial Sequence
  Description of Artificial Sequence: Synthetic oligonucleotide
cucggacaucaauggaccg

SEQ ID NO: 1009769 - RNA, 19 nt, Artificial Sequence
  Description of Artificial Sequence: Synthetic oligonucleotide
caagaccaucaacuugggg

SEQ ID NO: 1009770 - RNA, 19 nt, Artificial Sequence
  Description of Artificial Sequence: Synthetic oligonucleotide
ggcaaaccggccuugcugc

SEQ ID NO: 1009771 - RNA, 19 nt, Artificial Sequence
  Description of Artificial Sequence: Synthetic oligonucleotide
gauagcggcaguacuggca

SEQ ID NO: 1009772 - RNA, 19 nt, Artificial Sequence
  Description of Artificial Sequence: Synthetic oligonucleotide
ccucaugucacgcauuuug

SEQ ID NO: 1009773 - RNA, 19 nt, Artificial Sequence
  Description of Artificial Sequence: Synthetic oligonucleotide
uaggucagguccuuccgaa

SEQ ID NO: 1009774 - RNA, 19 nt, Artificial Sequence
  Description of Artificial Sequence: Synthetic oligonucleotide
caucaauggaccgauggga

SEQ ID NO: 1009775 - RNA, 19 nt, Artificial Sequence
  Description of Artificial Sequence: Synthetic oligonucleotide
uuuauucgucagucugacu

SEQ ID NO: 1009776 - RNA, 19 nt, Artificial Sequence
  Description of Artificial Sequence: Synthetic oligonucleotide
gucuuuguuaucgcggcac

SEQ ID NO: 1009777 - RNA, 19 nt, Artificial Sequence
  Description of Artificial Sequence: Synthetic oligonucleotide
uauuagagcccugcuccca

SEQ ID NO: 1009778 - RNA, 19 nt, Artificial Sequence
  Description of Artificial Sequence: Synthetic oligonucleotide
uucgucagucugacugcag

SEQ ID NO: 1009779 - RNA, 19 nt, Artificial Sequence
  Description of Artificial Sequence: Synthetic oligonucleotide
aucccuugaggcugcagga

SEQ ID NO: 1009780 - RNA, 19 nt, Artificial Sequence
  Description of Artificial Sequence: Synthetic oligonucleotide
acucaacgagcgugaacag

SEQ ID NO: 1009781 - RNA, 19 nt, Artificial Sequence
  Description of Artificial Sequence: Synthetic oligonucleotide
agucgccccugucagggag

SEQ ID NO: 1009782 - RNA, 19 nt, Artificial Sequence
  Description of Artificial Sequence: Synthetic oligonucleotide
gagaccccggcaaauucag

SEQ ID NO: 1009783 - RNA, 19 nt, Artificial Sequence
  Description of Artificial Sequence: Synthetic oligonucleotide
agacucaaggccacugaag

SEQ ID NO: 1009784 - RNA, 19 nt, Artificial Sequence
  Description of Artificial Sequence: Synthetic oligonucleotide
ugcggaaugggcugaguuu

SEQ ID NO: 1009785 - RNA, 19 nt, Artificial Sequence
  Description of Artificial Sequence: Synthetic oligonucleotide
uggggaugauaaaggacua

SEQ ID NO: 1009786 - RNA, 19 nt, Artificial Sequence
  Description of Artificial Sequence: Synthetic oligonucleotide
ccaccagaucccuugaggc

SEQ ID NO: 1009787 - RNA, 19 nt, Artificial Sequence
  Description of Artificial Sequence: Synthetic oligonucleotide
auuagagcccugcucccaa

SEQ ID NO: 1009788 - RNA, 19 nt, Artificial Sequence
  Description of Artificial Sequence: Synthetic oligonucleotide
cucaacgagcgugaacagc

SEQ ID NO: 1009789 - RNA, 19 nt, Artificial Sequence
  Description of Artificial Sequence: Synthetic oligonucleotide
uugcaccccucacagcugu

SEQ ID NO: 1009790 - RNA, 19 nt, Artificial Sequence
  Description of Artificial Sequence: Synthetic oligonucleotide
uggaccgaugggagaagga

SEQ ID NO: 1009791 - RNA, 19 nt, Artificial Sequence
  Description of Artificial Sequence: Synthetic oligonucleotide
cagcacccgaucaaagaug

SEQ ID NO: 1009792 - RNA, 19 nt, Artificial Sequence
  Description of Artificial Sequence: Synthetic oligonucleotide
gaucugggucccuucugac

SEQ ID NO: 1009793 - RNA, 19 nt, Artificial Sequence
  Description of Artificial Sequence: Synthetic oligonucleotide
uucgcuggcgcuuguccac

SEQ ID NO: 1009794 - RNA, 19 nt, Artificial Sequence
  Description of Artificial Sequence: Synthetic oligonucleotide
uuggcaaaccggccuugcu

SEQ ID NO: 1009795 - RNA, 19 nt, Artificial Sequence
  Description of Artificial Sequence: Synthetic oligonucleotide
cuucugauagcggcaguac

SEQ ID NO: 1009796 - RNA, 19 nt, Artificial Sequence
  Description of Artificial Sequence: Synthetic oligonucleotide
cuucgcccacucaacgagc

SEQ ID NO: 1009797 - RNA, 19 nt, Artificial Sequence
  Description of Artificial Sequence: Synthetic oligonucleotide
cauguggucgucacaggga

SEQ ID NO: 1009798 - RNA, 19 nt, Artificial Sequence
  Description of Artificial Sequence: Synthetic oligonucleotide
gaaugauugcccgcaggca

SEQ ID NO: 1009799 - RNA, 19 nt, Artificial Sequence
  Description of Artificial Sequence: Synthetic oligonucleotide
auuugcccacggcucuggg

SEQ ID NO: 1009800 - RNA, 19 nt, Artificial Sequence
  Description of Artificial Sequence: Synthetic oligonucleotide
cacacccuuuauucgucag

SEQ ID NO: 1009801 - RNA, 19 nt, Artificial Sequence
  Description of Artificial Sequence: Synthetic oligonucleotide
caggcccggagaauccugg

SEQ ID NO: 1009802 - RNA, 19 nt, Artificial Sequence
  Description of Artificial Sequence: Synthetic oligonucleotide
ucgggguacuucuguuugc

SEQ ID NO: 1009803 - RNA, 19 nt, Artificial Sequence
  Description of Artificial Sequence: Synthetic oligonucleotide
gagagucgccccugucagg

SEQ ID NO: 1009804 - RNA, 19 nt, Artificial Sequence
  Description of Artificial Sequence: Synthetic oligonucleotide
cacgcauuuuggacacuag

SEQ ID NO: 1009805 - RNA, 19 nt, Artificial Sequence
  Description of Artificial Sequence: Synthetic oligonucleotide
ucugcaccauuugcccacg

SEQ ID NO: 1009806 - RNA, 19 nt, Artificial Sequence
  Description of Artificial Sequence: Synthetic oligonucleotide
auugcccgcaggcagccaa

SEQ ID NO: 1009807 - RNA, 19 nt, Artificial Sequence
  Description of Artificial Sequence: Synthetic oligonucleotide
agacccguggcuaggagga

SEQ ID NO: 1009808 - RNA, 19 nt, Artificial Sequence
  Description of Artificial Sequence: Synthetic oligonucleotide
ggaccgaugggagaaggag

SEQ ID NO: 1009809 - RNA, 19 nt, Artificial Sequence
  Description of Artificial Sequence: Synthetic oligonucleotide
ucaggcuagcuggugggga

SEQ ID NO: 1009810 - RNA, 19 nt, Artificial Sequence
  Description of Artificial Sequence: Synthetic oligonucleotide
gaccccuaggaccgguggc

SEQ ID NO: 1009811 - RNA, 19 nt, Artificial Sequence
  Description of Artificial Sequence: Synthetic oligonucleotide
guuagucacugggucauuc

SEQ ID NO: 1009812 - RNA, 19 nt, Artificial Sequence
  Description of Artificial Sequence: Synthetic oligonucleotide
ucgcggcacgaguagguca

SEQ ID NO: 1009813 - RNA, 19 nt, Artificial Sequence
  Description of Artificial Sequence: Synthetic oligonucleotide
uagaggagcuccguuccac

SEQ ID NO: 1009814 - RNA, 19 nt, Artificial Sequence
  Description of Artificial Sequence: Synthetic oligonucleotide
gauccuguccacaggcauc

SEQ ID NO: 1009815 - RNA, 19 nt, Artificial Sequence
  Description of Artificial Sequence: Synthetic oligonucleotide
acacacccuuuauucguca

SEQ ID NO: 1009816 - RNA, 19 nt, Artificial Sequence
  Description of Artificial Sequence: Synthetic oligonucleotide
ugauugcccgcaggcagcc

SEQ ID NO: 1009817 - RNA, 19 nt, Artificial Sequence
  Description of Artificial Sequence: Synthetic oligonucleotide
accccggcaaauucagaga

SEQ ID NO: 1009818 - RNA, 19 nt, Artificial Sequence
  Description of Artificial Sequence: Synthetic oligonucleotide
guacaguacuucuuugagu

SEQ ID NO: 1009819 - RNA, 19 nt, Artificial Sequence
  Description of Artificial Sequence: Synthetic oligonucleotide
guugaucugagggcugcug

SEQ ID NO: 1009820 - RNA, 19 nt, Artificial Sequence
  Description of Artificial Sequence: Synthetic oligonucleotide
acgccuuggucacucuucu

SEQ ID NO: 1009821 - RNA, 19 nt, Artificial Sequence
  Description of Artificial Sequence: Synthetic oligonucleotide
cuguuugcaguaggucucc

SEQ ID NO: 1009822 - RNA, 19 nt, Artificial Sequence
  Description of Artificial Sequence: Synthetic oligonucleotide
acccuuuauucgucagucu

SEQ ID NO: 1009823 - RNA, 19 nt, Artificial Sequence
  Description of Artificial Sequence: Synthetic oligonucleotide
ggucauucgggcugcugcc

SEQ ID NO: 1009824 - RNA, 19 nt, Artificial Sequence
  Description of Artificial Sequence: Synthetic oligonucleotide
acuguggaguugaucugag

SEQ ID NO: 1009825 - RNA, 19 nt, Artificial Sequence
  Description of Artificial Sequence: Synthetic oligonucleotide
cccacacacccuuuauucg

SEQ ID NO: 1009826 - RNA, 19 nt, Artificial Sequence
  Description of Artificial Sequence: Synthetic oligonucleotide
cagccguuugccagucccg

SEQ ID NO: 1009827 - RNA, 19 nt, Artificial Sequence
  Description of Artificial Sequence: Synthetic oligonucleotide
gccccugucagggagaccc

SEQ ID NO: 1009828 - RNA, 19 nt, Artificial Sequence
  Description of Artificial Sequence: Synthetic oligonucleotide
guaggucagguccuuccga

SEQ ID NO: 1009829 - RNA, 19 nt, Artificial Sequence
  Description of Artificial Sequence: Synthetic oligonucleotide
acgccugcggaaugggcug

SEQ ID NO: 1009830 - RNA, 19 nt, Artificial Sequence
  Description of Artificial Sequence: Synthetic oligonucleotide
gaggccgauggagcggagg

SEQ ID NO: 1009831 - RNA, 19 nt, Artificial Sequence
  Description of Artificial Sequence: Synthetic oligonucleotide
uucgguccccgcagauugc

SEQ ID NO: 1009832 - RNA, 19 nt, Artificial Sequence
  Description of Artificial Sequence: Synthetic oligonucleotide
cgaauggugcguuugaaga

SEQ ID NO: 1009833 - RNA, 19 nt, Artificial Sequence
  Description of Artificial Sequence: Synthetic oligonucleotide
gugcagucuuuguuaucgc

SEQ ID NO: 1009834 - RNA, 19 nt, Artificial Sequence
  Description of Artificial Sequence: Synthetic oligonucleotide
cucaacgccuuggucacuc

SEQ ID NO: 1009835 - RNA, 19 nt, Artificial Sequence
  Description of Artificial Sequence: Synthetic oligonucleotide
aggcccggagaauccuggg

SEQ ID NO: 1009836 - RNA, 19 nt, Artificial Sequence
  Description of Artificial Sequence: Synthetic oligonucleotide
ggacgcguacaccuucucc

SEQ ID NO: 1009837 - RNA, 19 nt, Artificial Sequence
  Description of Artificial Sequence: Synthetic oligonucleotide
ccgaauggugcguuugaag

SEQ ID NO: 1009838 - RNA, 19 nt, Artificial Sequence
  Description of Artificial Sequence: Synthetic oligonucleotide
ggaaacccugcucggggcc

SEQ ID NO: 1009839 - RNA, 19 nt, Artificial Sequence
  Description of Artificial Sequence: Synthetic oligonucleotide
aucgcggcacgaguagguc

SEQ ID NO: 1009840 - RNA, 19 nt, Artificial Sequence
  Description of Artificial Sequence: Synthetic oligonucleotide
cccgaucaaagauggcucc

SEQ ID NO: 1009841 - RNA, 19 nt, Artificial Sequence
  Description of Artificial Sequence: Synthetic oligonucleotide
cuggauuaaacagaaugau

SEQ ID NO: 1009842 - RNA, 19 nt, Artificial Sequence
  Description of Artificial Sequence: Synthetic oligonucleotide
caacgagcgugaacagcug

SEQ ID NO: 1009843 - RNA, 19 nt, Artificial Sequence
  Description of Artificial Sequence: Synthetic oligonucleotide
uccgaauggugcguuugaa

SEQ ID NO: 1009844 - RNA, 19 nt, Artificial Sequence
  Description of Artificial Sequence: Synthetic oligonucleotide
ggaccccuaggaccggugg

SEQ ID NO: 1009845 - RNA, 19 nt, Artificial Sequence
  Description of Artificial Sequence: Synthetic oligonucleotide
ucgccgggguuggagaggc

SEQ ID NO: 1009846 - RNA, 19 nt, Artificial Sequence
  Description of Artificial Sequence: Synthetic oligonucleotide
auagugcuugccugagcuu

SEQ ID NO: 1009847 - RNA, 19 nt, Artificial Sequence
  Description of Artificial Sequence: Synthetic oligonucleotide
guggucgucacagggaucu

SEQ ID NO: 1009848 - RNA, 19 nt, Artificial Sequence
  Description of Artificial Sequence: Synthetic oligonucleotide
gucaggcuagcuggugggg

SEQ ID NO: 1009849 - RNA, 19 nt, Artificial Sequence
  Description of Artificial Sequence: Synthetic oligonucleotide
cagauguuagucacugggu

SEQ ID NO: 1009850 - RNA, 19 nt, Artificial Sequence
  Description of Artificial Sequence: Synthetic oligonucleotide
gucaaccuggggauguaca

SEQ ID NO: 1009851 - RNA, 19 nt, Artificial Sequence
  Description of Artificial Sequence: Synthetic oligonucleotide
aaggacuauuagagcccug

SEQ ID NO: 1009852 - RNA, 19 nt, Artificial Sequence
  Description of Artificial Sequence: Synthetic oligonucleotide
uguuugcaguaggucucca

SEQ ID NO: 1009853 - RNA, 19 nt, Artificial Sequence
  Description of Artificial Sequence: Synthetic oligonucleotide
cugacgucaaccuggggau

SEQ ID NO: 1009854 - RNA, 19 nt, Artificial Sequence
  Description of Artificial Sequence: Synthetic oligonucleotide
ugacgucaaccuggggaug

SEQ ID NO: 1009855 - RNA, 19 nt, Artificial Sequence
  Description of Artificial Sequence: Synthetic oligonucleotide
gacccucaacgccuugguc

SEQ ID NO: 1009856 - RNA, 19 nt, Artificial Sequence
  Description of Artificial Sequence: Synthetic oligonucleotide
gcagcgguuucgcuggcgc

SEQ ID NO: 1009857 - RNA, 19 nt, Artificial Sequence
  Description of Artificial Sequence: Synthetic oligonucleotide
ggagccgggaugagagucg

SEQ ID NO: 1009858 - RNA, 19 nt, Artificial Sequence
  Description of Artificial Sequence: Synthetic oligonucleotide
ucaacgccuuggucacucu

SEQ ID NO: 1009859 - RNA, 19 nt, Artificial Sequence
  Description of Artificial Sequence: Synthetic oligonucleotide
cugagcuucgguccccgca

SEQ ID NO: 1009860 - RNA, 19 nt, Artificial Sequence
  Description of Artificial Sequence: Synthetic oligonucleotide
ccggcaaauucagagacuc

SEQ ID NO: 1009861 - RNA, 19 nt, Artificial Sequence
  Description of Artificial Sequence: Synthetic oligonucleotide
accuggggauguacaguac

SEQ ID NO: 1009862 - RNA, 19 nt, Artificial Sequence
  Description of Artificial Sequence: Synthetic oligonucleotide
cuuuguuaucgcggcacga

SEQ ID NO: 1009863 - RNA, 19 nt, Artificial Sequence
  Description of Artificial Sequence: Synthetic oligonucleotide
ccccggcaaauucagagac

SEQ ID NO: 1009864 - RNA, 19 nt, Artificial Sequence
  Description of Artificial Sequence: Synthetic oligonucleotide
accucgccgggguuggaga

SEQ ID NO: 1009865 - RNA, 19 nt, Artificial Sequence
  Description of Artificial Sequence: Synthetic oligonucleotide
ugcuugccugagcuucggu

SEQ ID NO: 1009866 - RNA, 19 nt, Artificial Sequence
  Description of Artificial Sequence: Synthetic oligonucleotide
ucgguccccgcagauugca

SEQ ID NO: 1009867 - RNA, 19 nt, Artificial Sequence
  Description of Artificial Sequence: Synthetic oligonucleotide
agccgucgguuccuccauc

SEQ ID NO: 1009868 - RNA, 19 nt, Artificial Sequence
  Description of Artificial Sequence: Synthetic oligonucleotide
gagccgggaugagagucgc

SEQ ID NO: 1009869 - RNA, 19 nt, Artificial Sequence
  Description of Artificial Sequence: Synthetic oligonucleotide
gccgggaugagagucgccc

SEQ ID NO: 1009870 - RNA, 19 nt, Artificial Sequence
  Description of Artificial Sequence: Synthetic oligonucleotide
cacccgaucaaagauggcu

SEQ ID NO: 1009871 - RNA, 19 nt, Artificial Sequence
  Description of Artificial Sequence: Synthetic oligonucleotide
accccuaggaccgguggcu

SEQ ID NO: 1009872 - RNA, 19 nt, Artificial Sequence
  Description of Artificial Sequence: Synthetic oligonucleotide
uccccgucuuugucuuuug

SEQ ID NO: 1009873 - RNA, 19 nt, Artificial Sequence
  Description of Artificial Sequence: Synthetic oligonucleotide
ggauguacaguacuucuuu

SEQ ID NO: 1009874 - RNA, 19 nt, Artificial Sequence
  Description of Artificial Sequence: Synthetic oligonucleotide
gaaacccugcucggggcca

SEQ ID NO: 1009875 - RNA, 19 nt, Artificial Sequence
  Description of Artificial Sequence: Synthetic oligonucleotide
agucugacugcaggagggu

SEQ ID NO: 1009876 - RNA, 19 nt, Artificial Sequence
  Description of Artificial Sequence: Synthetic oligonucleotide
gccccggaccccuaggacc

SEQ ID NO: 1009877 - RNA, 19 nt, Artificial Sequence
  Description of Artificial Sequence: Synthetic oligonucleotide
uaggaccgguggcuucaca

SEQ ID NO: 1009878 - RNA, 19 nt, Artificial Sequence
  Description of Artificial Sequence: Synthetic oligonucleotide
cagggacgcguacaccuuc

SEQ ID NO: 1009879 - RNA, 19 nt, Artificial Sequence
  Description of Artificial Sequence: Synthetic oligonucleotide
gcggaaugggcugaguuuc

SEQ ID NO: 1009880 - RNA, 19 nt, Artificial Sequence
  Description of Artificial Sequence: Synthetic oligonucleotide
gcggagggcagggagacgc

SEQ ID NO: 1009881 - RNA, 19 nt, Artificial Sequence
  Description of Artificial Sequence: Synthetic oligonucleotide
aggccacugaagguagaca

SEQ ID NO: 1009882 - RNA, 19 nt, Artificial Sequence
  Description of Artificial Sequence: Synthetic oligonucleotide
ccccggaccccuaggaccg

SEQ ID NO: 1009883 - RNA, 19 nt, Artificial Sequence
  Description of Artificial Sequence: Synthetic oligonucleotide
aguugaucugagggcugcu

SEQ ID NO: 1009884 - RNA, 19 nt, Artificial Sequence
  Description of Artificial Sequence: Synthetic oligonucleotide
ugggucauucgggcugcug

SEQ ID NO: 1009885 - RNA, 19 nt, Artificial Sequence
  Description of Artificial Sequence: Synthetic oligonucleotide
gacgucaaccuggggaugu

SEQ ID NO: 1009886 - RNA, 19 nt, Artificial Sequence
  Description of Artificial Sequence: Synthetic oligonucleotide
ggcacgaguaggucagguc

SEQ ID NO: 1009887 - RNA, 19 nt, Artificial Sequence
  Description of Artificial Sequence: Synthetic oligonucleotide
ucgcccacucaacgagcgu

SEQ ID NO: 1009888 - RNA, 19 nt, Artificial Sequence
  Description of Artificial Sequence: Synthetic oligonucleotide
cgucgguuccuccaucucc

SEQ ID NO: 1009889 - RNA, 19 nt, Artificial Sequence
  Description of Artificial Sequence: Synthetic oligonucleotide
cucgauggugcccuuucua

SEQ ID NO: 1009890 - RNA, 19 nt, Artificial Sequence
  Description of Artificial Sequence: Synthetic oligonucleotide
cacgccugcggaaugggcu

SEQ ID NO: 1009891 - RNA, 19 nt, Artificial Sequence
  Description of Artificial Sequence: Synthetic oligonucleotide
agcgcccagagagccacug

SEQ ID NO: 1009892 - RNA, 19 nt, Artificial Sequence
  Description of Artificial Sequence: Synthetic oligonucleotide
cacugacgucaaccugggg

SEQ ID NO: 1009893 - RNA, 19 nt, Artificial Sequence
  Description of Artificial Sequence: Synthetic oligonucleotide
gggagaccccggcaaauuc

SEQ ID NO: 1009894 - RNA, 19 nt, Artificial Sequence
  Description of Artificial Sequence: Synthetic oligonucleotide
uccccguccccgucuuugu

SEQ ID NO: 1009895 - RNA, 19 nt, Artificial Sequence
  Description of Artificial Sequence: Synthetic oligonucleotide
cucgccgggguuggagagg

SEQ ID NO: 1009896 - RNA, 19 nt, Artificial Sequence
  Description of Artificial Sequence: Synthetic oligonucleotide
gaugggagaaggaggcaau

SEQ ID NO: 1009897 - RNA, 19 nt, Artificial Sequence
  Description of Artificial Sequence: Synthetic oligonucleotide
ggagaagugugggauccuc

SEQ ID NO: 1009898 - RNA, 19 nt, Artificial Sequence
  Description of Artificial Sequence: Synthetic oligonucleotide
caaaccggccuugcugcuc

SEQ ID NO: 1009899 - RNA, 19 nt, Artificial Sequence
  Description of Artificial Sequence: Synthetic oligonucleotide
cagaccaccugagaggccu

SEQ ID NO: 1009900 - RNA, 19 nt, Artificial Sequence
  Description of Artificial Sequence: Synthetic oligonucleotide
agcgguuucgcuggcgcuu

SEQ ID NO: 1009901 - RNA, 19 nt, Artificial Sequence
  Description of Artificial Sequence: Synthetic oligonucleotide
gcgugaacagcuguuuguc

SEQ ID NO: 1009902 - RNA, 19 nt, Artificial Sequence
  Description of Artificial Sequence: Synthetic oligonucleotide
gucccggggccaccgggag

SEQ ID NO: 1009903 - RNA, 19 nt, Artificial Sequence
  Description of Artificial Sequence: Synthetic oligonucleotide
augccgguggccaggcacu

SEQ ID NO: 1009904 - RNA, 19 nt, Artificial Sequence
  Description of Artificial Sequence: Synthetic oligonucleotide
cacacagccguuugccagu

SEQ ID NO: 1009905 - RNA, 19 nt, Artificial Sequence
  Description of Artificial Sequence: Synthetic oligonucleotide
gggagccgggaugagaguc

SEQ ID NO: 1009906 - RNA, 19 nt, Artificial Sequence
  Description of Artificial Sequence: Synthetic oligonucleotide
acgagcgugaacagcuguu

SEQ ID NO: 1009907 - RNA, 19 nt, Artificial Sequence
  Description of Artificial Sequence: Synthetic oligonucleotide
ggagaccaggaaacccugc

SEQ ID NO: 1009908 - RNA, 19 nt, Artificial Sequence
  Description of Artificial Sequence: Synthetic oligonucleotide
uccuuccgaauggugcguu

SEQ ID NO: 1009909 - RNA, 19 nt, Artificial Sequence
  Description of Artificial Sequence: Synthetic oligonucleotide
gguagacauguggucguca

SEQ ID NO: 1009910 - RNA, 19 nt, Artificial Sequence
  Description of Artificial Sequence: Synthetic oligonucleotide
agggacgcguacaccuucu

SEQ ID NO: 1009911 - RNA, 19 nt, Artificial Sequence
  Description of Artificial Sequence: Synthetic oligonucleotide
ccgaucaaagauggcuccc

SEQ ID NO: 1009912 - RNA, 19 nt, Artificial Sequence
  Description of Artificial Sequence: Synthetic oligonucleotide
cuuucuagaggagcuccgu

SEQ ID NO: 1009913 - RNA, 19 nt, Artificial Sequence
  Description of Artificial Sequence: Synthetic oligonucleotide
gagcuucgguccccgcaga

SEQ ID NO: 1009914 - RNA, 19 nt, Artificial Sequence
  Description of Artificial Sequence: Synthetic oligonucleotide
agccgggaugagagucgcc

SEQ ID NO: 1009915 - RNA, 19 nt, Artificial Sequence
  Description of Artificial Sequence: Synthetic oligonucleotide
ucgcuggcgcuuguccacu

SEQ ID NO: 1009916 - RNA, 19 nt, Artificial Sequence
  Description of Artificial Sequence: Synthetic oligonucleotide
uccccgcagauugcacaca

SEQ ID NO: 1009917 - RNA, 19 nt, Artificial Sequence
  Description of Artificial Sequence: Synthetic oligonucleotide
ucgccccugucagggagac

SEQ ID NO: 1009918 - RNA, 19 nt, Artificial Sequence
  Description of Artificial Sequence: Synthetic oligonucleotide
cgcggcacgaguaggucag

SEQ ID NO: 1009919 - RNA, 19 nt, Artificial Sequence
  Description of Artificial Sequence: Synthetic oligonucleotide
caccucgccgggguuggag

SEQ ID NO: 1009920 - RNA, 19 nt, Artificial Sequence
  Description of Artificial Sequence: Synthetic oligonucleotide
cagcuguaaacuccauagu

SEQ ID NO: 1009921 - RNA, 19 nt, Artificial Sequence
  Description of Artificial Sequence: Synthetic oligonucleotide
ccgggaugagagucgcccc

SEQ ID NO: 1009922 - RNA, 19 nt, Artificial Sequence
  Description of Artificial Sequence: Synthetic oligonucleotide
gccgauggagcggagggca

SEQ ID NO: 1009923 - RNA, 19 nt, Artificial Sequence
  Description of Artificial Sequence: Synthetic oligonucleotide
cuggggauguacaguacuu

SEQ ID NO: 1009924 - RNA, 19 nt, Artificial Sequence
  Description of Artificial Sequence: Synthetic oligonucleotide
cagucucuccucagaggaa

SEQ ID NO: 1009925 - RNA, 19 nt, Artificial Sequence
  Description of Artificial Sequence: Synthetic oligonucleotide
ggcuagcugguggggagcc

SEQ ID NO: 1009926 - RNA, 19 nt, Artificial Sequence
  Description of Artificial Sequence: Synthetic oligonucleotide
uccucaugucacgcauuuu

SEQ ID NO: 1009927 - RNA, 19 nt, Artificial Sequence
  Description of Artificial Sequence: Synthetic oligonucleotide
uggucgucacagggaucug

SEQ ID NO: 1009928 - RNA, 19 nt, Artificial Sequence
  Description of Artificial Sequence: Synthetic oligonucleotide
gggaugagagucgccccug

SEQ ID NO: 1009929 - RNA, 19 nt, Artificial Sequence
  Description of Artificial Sequence: Synthetic oligonucleotide
ggauccuguccacaggcau

SEQ ID NO: 1009930 - RNA, 19 nt, Artificial Sequence
  Description of Artificial Sequence: Synthetic oligonucleotide
ggacuauuagagcccugcu

SEQ ID NO: 1009931 - RNA, 19 nt, Artificial Sequence
  Description of Artificial Sequence: Synthetic oligonucleotide
gagcgacacuguggaguug

SEQ ID NO: 1009932 - RNA, 19 nt, Artificial Sequence
  Description of Artificial Sequence: Synthetic oligonucleotide
cuguaccgccucccuuuuc

SEQ ID NO: 1009933 - RNA, 19 nt, Artificial Sequence
  Description of Artificial Sequence: Synthetic oligonucleotide
gagucgccccugucaggga

SEQ ID NO: 1009934 - RNA, 19 nt, Artificial Sequence
  Description of Artificial Sequence: Synthetic oligonucleotide
ugcaccccucacagcugua

SEQ ID NO: 1009935 - RNA, 19 nt, Artificial Sequence
  Description of Artificial Sequence: Synthetic oligonucleotide
ccacucaacgagcgugaac

SEQ ID NO: 1009936 - RNA, 19 nt, Artificial Sequence
  Description of Artificial Sequence: Synthetic oligonucleotide
gcgcccagagagccacugg

SEQ ID NO: 1009937 - RNA, 19 nt, Artificial Sequence
  Description of Artificial Sequence: Synthetic oligonucleotide
cuaggaccgguggcuucac

SEQ ID NO: 1009938 - RNA, 19 nt, Artificial Sequence
  Description of Artificial Sequence: Synthetic oligonucleotide
caccccucacagcuguaaa

SEQ ID NO: 1009939 - RNA, 19 nt, Artificial Sequence
  Description of Artificial Sequence: Synthetic oligonucleotide
ccucgccgggguuggagag

SEQ ID NO: 1009940 - RNA, 19 nt, Artificial Sequence
  Description of Artificial Sequence: Synthetic oligonucleotide
ccacacacccuuuauucgu

SEQ ID NO: 1009941 - RNA, 19 nt, Artificial Sequence
  Description of Artificial Sequence: Synthetic oligonucleotide
ggagcgacacuguggaguu

SEQ ID NO: 1009942 - RNA, 19 nt, Artificial Sequence
  Description of Artificial Sequence: Synthetic oligonucleotide
cccagggagcgacacugug

SEQ ID NO: 1009943 - RNA, 19 nt, Artificial Sequence
  Description of Artificial Sequence: Synthetic oligonucleotide
ccugcccgcagcaguauga

SEQ ID NO: 1009944 - RNA, 19 nt, Artificial Sequence
  Description of Artificial Sequence: Synthetic oligonucleotide
cccgcagauugcacacagc

SEQ ID NO: 1009945 - RNA, 19 nt, Artificial Sequence
  Description of Artificial Sequence: Synthetic oligonucleotide
cugcggaaugggcugaguu

SEQ ID NO: 1009946 - RNA, 19 nt, Artificial Sequence
  Description of Artificial Sequence: Synthetic oligonucleotide
cccgcagcaguaugaccug

SEQ ID NO: 1009947 - RNA, 19 nt, Artificial Sequence
  Description of Artificial Sequence: Synthetic oligonucleotide
agaccccggcaaauucaga

SEQ ID NO: 1009948 - RNA, 19 nt, Artificial Sequence
  Description of Artificial Sequence: Synthetic oligonucleotide
ggcuaggaggaugccaucu

SEQ ID NO: 1009949 - RNA, 19 nt, Artificial Sequence
  Description of Artificial Sequence: Synthetic oligonucleotide
ggggugucgccgaugagcu

SEQ ID NO: 1009950 - RNA, 19 nt, Artificial Sequence
  Description of Artificial Sequence: Synthetic oligonucleotide
cagccugcccgcagcagua

SEQ ID NO: 1009951 - RNA, 19 nt, Artificial Sequence
  Description of Artificial Sequence: Synthetic oligonucleotide
ccguuccacucuugagaag

SEQ ID NO: 1009952 - RNA, 19 nt, Artificial Sequence
  Description of Artificial Sequence: Synthetic oligonucleotide
ggucacucuucugcuccac

SEQ ID NO: 1009953 - RNA, 19 nt, Artificial Sequence
  Description of Artificial Sequence: Synthetic oligonucleotide
gauugcccgcaggcagcca

SEQ ID NO: 1009954 - RNA, 19 nt, Artificial Sequence
  Description of Artificial Sequence: Synthetic oligonucleotide
gcaggccccggaccccuag

SEQ ID NO: 1009955 - RNA, 19 nt, Artificial Sequence
  Description of Artificial Sequence: Synthetic oligonucleotide
cauucgggcugcugccacu

SEQ ID NO: 1009956 - RNA, 19 nt, Artificial Sequence
  Description of Artificial Sequence: Synthetic oligonucleotide
cgcccacucaacgagcgug

SEQ ID NO: 1009957 - RNA, 19 nt, Artificial Sequence
  Description of Artificial Sequence: Synthetic oligonucleotide
gcgguuucgcuggcgcuug

SEQ ID NO: 1009958 - RNA, 19 nt, Artificial Sequence
  Description of Artificial Sequence: Synthetic oligonucleotide
gccugcccgcagcaguaug

SEQ ID NO: 1009959 - RNA, 19 nt, Artificial Sequence
  Description of Artificial Sequence: Synthetic oligonucleotide
ggacccucaacgccuuggu

SEQ ID NO: 1009960 - RNA, 19 nt, Artificial Sequence
  Description of Artificial Sequence: Synthetic oligonucleotide
gguuucgcuggcgcuuguc

SEQ ID NO: 1009961 - RNA, 19 nt, Artificial Sequence
  Description of Artificial Sequence: Synthetic oligonucleotide
cuuuugccccguugccgcu

SEQ ID NO: 1009962 - RNA, 19 nt, Artificial Sequence
  Description of Artificial Sequence: Synthetic oligonucleotide
ccuaggaccgguggcuuca

SEQ ID NO: 1009963 - RNA, 19 nt, Artificial Sequence
  Description of Artificial Sequence: Synthetic oligonucleotide
ggagaggcccuuggcaucu

SEQ ID NO: 1009964 - RNA, 19 nt, Artificial Sequence
  Description of Artificial Sequence: Synthetic oligonucleotide
cacccacacacccuuuauu

SEQ ID NO: 1009965 - RNA, 19 nt, Artificial Sequence
  Description of Artificial Sequence: Synthetic oligonucleotide
acgucaaccuggggaugua

SEQ ID NO: 1009966 - RNA, 19 nt, Artificial Sequence
  Description of Artificial Sequence: Synthetic oligonucleotide
gagccucgagcaucuccau

SEQ ID NO: 1009967 - RNA, 19 nt, Artificial Sequence
  Description of Artificial Sequence: Synthetic oligonucleotide
gggcccgcucgauggugcc

SEQ ID NO: 1009968 - RNA, 19 nt, Artificial Sequence
  Description of Artificial Sequence: Synthetic oligonucleotide
ggaugagagucgccccugu

SEQ ID NO: 1009969 - RNA, 19 nt, Artificial Sequence
  Description of Artificial Sequence: Synthetic oligonucleotide
uugccccguugccgcuccu

SEQ ID NO: 1009970 - RNA, 19 nt, Artificial Sequence
  Description of Artificial Sequence: Synthetic oligonucleotide
ugcaggccccggaccccua

SEQ ID NO: 1009971 - RNA, 19 nt, Artificial Sequence
  Description of Artificial Sequence: Synthetic oligonucleotide
ccgcaggcagccaagcucu

SEQ ID NO: 1009972 - RNA, 19 nt, Artificial Sequence
  Description of Artificial Sequence: Synthetic oligonucleotide
gcccacucaacgagcguga

SEQ ID NO: 1009973 - RNA, 19 nt, Artificial Sequence
  Description of Artificial Sequence: Synthetic oligonucleotide
gggauguacaguacuucuu

SEQ ID NO: 1009974 - RNA, 19 nt, Artificial Sequence
  Description of Artificial Sequence: Synthetic oligonucleotide
guaccgccucccuuuucau

SEQ ID NO: 1009975 - RNA, 19 nt, Artificial Sequence
  Description of Artificial Sequence: Synthetic oligonucleotide
gaagggagccgggcccugu

SEQ ID NO: 1009976 - RNA, 19 nt, Artificial Sequence
  Description of Artificial Sequence: Synthetic oligonucleotide
cccuaggaccgguggcuuc

SEQ ID NO: 1009977 - RNA, 19 nt, Artificial Sequence
  Description of Artificial Sequence: Synthetic oligonucleotide
gccgucgguuccuccaucu

SEQ ID NO: 1009978 - RNA, 19 nt, Artificial Sequence
  Description of Artificial Sequence: Synthetic oligonucleotide
cgaugggagaaggaggcaa

SEQ ID NO: 1009979 - RNA, 19 nt, Artificial Sequence
  Description of Artificial Sequence: Synthetic oligonucleotide
guccuuccgaauggugcgu

SEQ ID NO: 1009980 - RNA, 19 nt, Artificial Sequence
  Description of Artificial Sequence: Synthetic oligonucleotide
ccgggcccugugagcaggg

SEQ ID NO: 1009981 - RNA, 19 nt, Artificial Sequence
  Description of Artificial Sequence: Synthetic oligonucleotide
cagcgguuucgcuggcgcu

SEQ ID NO: 1009982 - RNA, 19 nt, Artificial Sequence
  Description of Artificial Sequence: Synthetic oligonucleotide
ggggaugauaaaggacuau

SEQ ID NO: 1009983 - RNA, 19 nt, Artificial Sequence
  Description of Artificial Sequence: Synthetic oligonucleotide
gcaccccucacagcuguaa

SEQ ID NO: 1009984 - RNA, 19 nt, Artificial Sequence
  Description of Artificial Sequence: Synthetic oligonucleotide
caacgccuuggucacucuu

SEQ ID NO: 1009985 - RNA, 19 nt, Artificial Sequence
  Description of Artificial Sequence: Synthetic oligonucleotide
guccccgucuuugucuuuu

SEQ ID NO: 1009986 - RNA, 19 nt, Artificial Sequence
  Description of Artificial Sequence: Synthetic oligonucleotide
gcucgggguacuucuguuu

SEQ ID NO: 1009987 - RNA, 19 nt, Artificial Sequence
  Description of Artificial Sequence: Synthetic oligonucleotide
ccgucgguuccuccaucuc

SEQ ID NO: 1009988 - RNA, 19 nt, Artificial Sequence
  Description of Artificial Sequence: Synthetic oligonucleotide
gcggcacgaguaggucagg

SEQ ID NO: 1009989 - RNA, 19 nt, Artificial Sequence
  Description of Artificial Sequence: Synthetic oligonucleotide
gccuugcugcucgggguac

SEQ ID NO: 1009990 - RNA, 19 nt, Artificial Sequence
  Description of Artificial Sequence: Synthetic oligonucleotide
gcucugucuuguccauccu

SEQ ID NO: 1009991 - RNA, 19 nt, Artificial Sequence
  Description of Artificial Sequence: Synthetic oligonucleotide
cccguccccgucuuugucu

SEQ ID NO: 1009992 - RNA, 19 nt, Artificial Sequence
  Description of Artificial Sequence: Synthetic oligonucleotide
cgccuuggucacucuucug

SEQ ID NO: 1009993 - RNA, 19 nt, Artificial Sequence
  Description of Artificial Sequence: Synthetic oligonucleotide
cccggcaaauucagagacu

SEQ ID NO: 1009994 - RNA, 19 nt, Artificial Sequence
  Description of Artificial Sequence: Synthetic oligonucleotide
gucacgcauuuuggacacu

SEQ ID NO: 1009995 - RNA, 19 nt, Artificial Sequence
  Description of Artificial Sequence: Synthetic oligonucleotide
ccccguccccgucuuuguc

SEQ ID NO: 1009996 - RNA, 19 nt, Artificial Sequence
  Description of Artificial Sequence: Synthetic oligonucleotide
ccguggcuaggaggaugcc

SEQ ID NO: 1009997 - RNA, 19 nt, Artificial Sequence
  Description of Artificial Sequence: Synthetic oligonucleotide
cgguccccgcagauugcac

SEQ ID NO: 1009998 - RNA, 19 nt, Artificial Sequence
  Description of Artificial Sequence: Synthetic oligonucleotide
ccgaugggagaaggaggca

SEQ ID NO: 1009999 - RNA, 19 nt, Artificial Sequence
  Description of Artificial Sequence: Synthetic oligonucleotide
gacccguggcuaggaggau

SEQ ID NO: 1010000 - RNA, 19 nt, Artificial Sequence
  Description of Artificial Sequence: Synthetic oligonucleotide
gcccgcucgauggugcccu

SEQ ID NO: 1010001 - RNA, 19 nt, Artificial Sequence
  Description of Artificial Sequence: Synthetic oligonucleotide
cugucaagcuggggaugau

SEQ ID NO: 1010002 - RNA, 19 nt, Artificial Sequence
  Description of Artificial Sequence: Synthetic oligonucleotide
cggacaucaauggaccgau

SEQ ID NO: 1010003 - RNA, 19 nt, Artificial Sequence
  Description of Artificial Sequence: Synthetic oligonucleotide
cgggaugagagucgccccu

SEQ ID NO: 1010004 - RNA, 19 nt, Artificial Sequence
  Description of Artificial Sequence: Synthetic oligonucleotide
gcuucgguccccgcagauu

SEQ ID NO: 1010005 - RNA, 19 nt, Artificial Sequence
  Description of Artificial Sequence: Synthetic oligonucleotide
cccggaccccuaggaccgg

SEQ ID NO: 1010006 - RNA, 19 nt, Artificial Sequence
  Description of Artificial Sequence: Synthetic oligonucleotide
cccacucaacgagcgugaa

SEQ ID NO: 1010007 - RNA, 19 nt, Artificial Sequence
  Description of Artificial Sequence: Synthetic oligonucleotide
ccuuccgaauggugcguuu

SEQ ID NO: 1010008 - RNA, 19 nt, Artificial Sequence
  Description of Artificial Sequence: Synthetic oligonucleotide
ccagggacgcguacaccuu

SEQ ID NO: 1010009 - RNA, 19 nt, Artificial Sequence
  Description of Artificial Sequence: Synthetic oligonucleotide
cugggucauucgggcugcu

SEQ ID NO: 1010010 - RNA, 19 nt, Artificial Sequence
  Description of Artificial Sequence: Synthetic oligonucleotide
cgagcgugaacagcuguuu

SEQ ID NO: 1010011 - RNA, 19 nt, Artificial Sequence
  Description of Artificial Sequence: Synthetic oligonucleotide
ccguugccgcuccuccugu

SEQ ID NO: 1010012 - RNA, 19 nt, Artificial Sequence
  Description of Artificial Sequence: Synthetic oligonucleotide
ccccagggagcgacacugu

SEQ ID NO: 1010013 - RNA, 19 nt, Artificial Sequence
  Description of Artificial Sequence: Synthetic oligonucleotide
ccugcggaaugggcugagu

SEQ ID NO: 1010014 - RNA, 19 nt, Artificial Sequence
  Description of Artificial Sequence: Synthetic oligonucleotide
cgccccugucagggagacc

SEQ ID NO: 1010015 - RNA, 19 nt, Artificial Sequence
  Description of Artificial Sequence: Synthetic oligonucleotide
cggcacgaguaggucaggu

SEQ ID NO: 1010016 - RNA, 19 nt, Artificial Sequence
  Description of Artificial Sequence: Synthetic oligonucleotide
ccgggacccucaacgccuu

SEQ ID NO: 1010017 - RNA, 19 nt, Artificial Sequence
  Description of Artificial Sequence: Synthetic oligonucleotide
ccucaacgccuuggucacu

SEQ ID NO: 1010018 - RNA, 19 nt, Artificial Sequence
  Description of Artificial Sequence: Synthetic oligonucleotide
ccggaccccuaggaccggu

SEQ ID NO: 1010019 - RNA, 19 nt, Artificial Sequence
  Description of Artificial Sequence: Synthetic oligonucleotide
ccccuaggaccgguggcuu

SEQ ID NO: 1010020 - RNA, 19 nt, Artificial Sequence
  Description of Artificial Sequence: Synthetic oligonucleotide
cgguuucgcuggcgcuugu

SEQ ID NO: 1010021 - RNA, 19 nt, Artificial Sequence
  Description of Artificial Sequence: Synthetic oligonucleotide
ccgcucgauggugcccuuu

SEQ ID NO: 1010022 - RNA, 19 nt, Artificial Sequence
  Description of Artificial Sequence: Synthetic oligonucleotide
cguccccgucuuugucuuu

SEQ ID NO: 1010023 - RNA, 19 nt, Artificial Sequence
  Description of Artificial Sequence: Synthetic oligonucleotide
cccgcucgauggugcccuu

SEQ ID NO: 1010024 - RNA, 19 nt, Artificial Sequence
  Description of Artificial Sequence: Synthetic oligonucleotide
uucauuauacgcuucagcg

SEQ ID NO: 1010025 - RNA, 19 nt, Artificial Sequence
  Description of Artificial Sequence: Synthetic oligonucleotide
uaaacugugcauuucaggg

SEQ ID NO: 1010026 - RNA, 19 nt, Artificial Sequence
  Description of Artificial Sequence: Synthetic oligonucleotide
aaagacagguagcagagag

SEQ ID NO: 1010027 - RNA, 19 nt, Artificial Sequence
  Description of Artificial Sequence: Synthetic oligonucleotide
uucaacacaaccacgauga

SEQ ID NO: 1010028 - RNA, 19 nt, Artificial Sequence
  Description of Artificial Sequence: Synthetic oligonucleotide
aguaagaaugagaagauac

SEQ ID NO: 1010029 - RNA, 19 nt, Artificial Sequence
  Description of Artificial Sequence: Synthetic oligonucleotide
uggaaaacgagguaaaucu

SEQ ID NO: 1010030 - RNA, 19 nt, Artificial Sequence
  Description of Artificial Sequence: Synthetic oligonucleotide
agauacuuaguauaaacug

SEQ ID NO: 1010031 - RNA, 19 nt, Artificial Sequence
  Description of Artificial Sequence: Synthetic oligonucleotide
uucuuaguaagaaugagaa

SEQ ID NO: 1010032 - RNA, 19 nt, Artificial Sequence
  Description of Artificial Sequence: Synthetic oligonucleotide
ucuacaaaccucaaaagau

SEQ ID NO: 1010033 - RNA, 19 nt, Artificial Sequence
  Description of Artificial Sequence: Synthetic oligonucleotide
auugugcaaaacuucauuc

SEQ ID NO: 1010034 - RNA, 19 nt, Artificial Sequence
  Description of Artificial Sequence: Synthetic oligonucleotide
ucuaauuugucauccagca

SEQ ID NO: 1010035 - RNA, 19 nt, Artificial Sequence
  Description of Artificial Sequence: Synthetic oligonucleotide
ucaaacgucagaaaaucca

SEQ ID NO: 1010036 - RNA, 19 nt, Artificial Sequence
  Description of Artificial Sequence: Synthetic oligonucleotide
ugaaaagcauuuacguacg

SEQ ID NO: 1010037 - RNA, 19 nt, Artificial Sequence
  Description of Artificial Sequence: Synthetic oligonucleotide
cuuaguaagaaugagaaga

SEQ ID NO: 1010038 - RNA, 19 nt, Artificial Sequence
  Description of Artificial Sequence: Synthetic oligonucleotide
aaugauuucgccuccucca

SEQ ID NO: 1010039 - RNA, 19 nt, Artificial Sequence
  Description of Artificial Sequence: Synthetic oligonucleotide
uaagcucacuucuucaugg

SEQ ID NO: 1010040 - RNA, 19 nt, Artificial Sequence
  Description of Artificial Sequence: Synthetic oligonucleotide
uuuagcuauaggaucaaac

SEQ ID NO: 1010041 - RNA, 19 nt, Artificial Sequence
  Description of Artificial Sequence: Synthetic oligonucleotide
uuauucuuaguaagaauga

SEQ ID NO: 1010042 - RNA, 19 nt, Artificial Sequence
  Description of Artificial Sequence: Synthetic oligonucleotide
cauuauacgcuucagcgag

SEQ ID NO: 1010043 - RNA, 19 nt, Artificial Sequence
  Description of Artificial Sequence: Synthetic oligonucleotide
uuaguaaugacagcagugc

SEQ ID NO: 1010044 - RNA, 19 nt, Artificial Sequence
  Description of Artificial Sequence: Synthetic oligonucleotide
uucaugcacaagauguugg

SEQ ID NO: 1010045 - RNA, 19 nt, Artificial Sequence
  Description of Artificial Sequence: Synthetic oligonucleotide
uuaucucccaauaccuugg

SEQ ID NO: 1010046 - RNA, 19 nt, Artificial Sequence
  Description of Artificial Sequence: Synthetic oligonucleotide
aaaagcauuuacguacggg

SEQ ID NO: 1010047 - RNA, 19 nt, Artificial Sequence
  Description of Artificial Sequence: Synthetic oligonucleotide
ugaacucuggagauuaucu

SEQ ID NO: 1010048 - RNA, 19 nt, Artificial Sequence
  Description of Artificial Sequence: Synthetic oligonucleotide
aaacugcuuuugaagaugc

SEQ ID NO: 1010049 - RNA, 19 nt, Artificial Sequence
  Description of Artificial Sequence: Synthetic oligonucleotide
uucuaauuugucauccagc

SEQ ID NO: 1010050 - RNA, 19 nt, Artificial Sequence
  Description of Artificial Sequence: Synthetic oligonucleotide
aguauaaacugguaacuca

SEQ ID NO: 1010051 - RNA, 19 nt, Artificial Sequence
  Description of Artificial Sequence: Synthetic oligonucleotide
uuacgucuggaaaacgagg

SEQ ID NO: 1010052 - RNA, 19 nt, Artificial Sequence
  Description of Artificial Sequence: Synthetic oligonucleotide
auuaucucccaauaccuug

SEQ ID NO: 1010053 - RNA, 19 nt, Artificial Sequence
  Description of Artificial Sequence: Synthetic oligonucleotide
uuucucuucucuuauacau

SEQ ID NO: 1010054 - RNA, 19 nt, Artificial Sequence
  Description of Artificial Sequence: Synthetic oligonucleotide
uccucuucuacaaaccuca

SEQ ID NO: 1010055 - RNA, 19 nt, Artificial Sequence
  Description of Artificial Sequence: Synthetic oligonucleotide
uagaguaggaccauucuaa

SEQ ID NO: 1010056 - RNA, 19 nt, Artificial Sequence
  Description of Artificial Sequence: Synthetic oligonucleotide
aauagaagucuuuauucuu

SEQ ID NO: 1010057 - RNA, 19 nt, Artificial Sequence
  Description of Artificial Sequence: Synthetic oligonucleotide
guaauugucucucucugcc

SEQ ID NO: 1010058 - RNA, 19 nt, Artificial Sequence
  Description of Artificial Sequence: Synthetic oligonucleotide
cuuuccguccucuuguacg

SEQ ID NO: 1010059 - RNA, 19 nt, Artificial Sequence
  Description of Artificial Sequence: Synthetic oligonucleotide
aaauauaggcaacuucaau

SEQ ID NO: 1010060 - RNA, 19 nt, Artificial Sequence
  Description of Artificial Sequence: Synthetic oligonucleotide
ucgaucugugacauugugg

SEQ ID NO: 1010061 - RNA, 19 nt, Artificial Sequence
  Description of Artificial Sequence: Synthetic oligonucleotide
ucuucuuacuuucuugggu

SEQ ID NO: 1010062 - RNA, 19 nt, Artificial Sequence
  Description of Artificial Sequence: Synthetic oligonucleotide
uucauagucaggccaagac

SEQ ID NO: 1010063 - RNA, 19 nt, Artificial Sequence
  Description of Artificial Sequence: Synthetic oligonucleotide
ucuugguuaucaaggacug

SEQ ID NO: 1010064 - RNA, 19 nt, Artificial Sequence
  Description of Artificial Sequence: Synthetic oligonucleotide
uagcuauaggaucaaacgu

SEQ ID NO: 1010065 - RNA, 19 nt, Artificial Sequence
  Description of Artificial Sequence: Synthetic oligonucleotide
gaaacaagggcuaccagug

SEQ ID NO: 1010066 - RNA, 19 nt, Artificial Sequence
  Description of Artificial Sequence: Synthetic oligonucleotide
uuaguaagaaugagaagau

SEQ ID NO: 1010067 - RNA, 19 nt, Artificial Sequence
  Description of Artificial Sequence: Synthetic oligonucleotide
uaggcaacuucaaucaugu

SEQ ID NO: 1010068 - RNA, 19 nt, Artificial Sequence
  Description of Artificial Sequence: Synthetic oligonucleotide
uauucuuaguaagaaugag

SEQ ID NO: 1010069 - RNA, 19 nt, Artificial Sequence
  Description of Artificial Sequence: Synthetic oligonucleotide
ugaguucuugguuaucaag

SEQ ID NO: 1010070 - RNA, 19 nt, Artificial Sequence
  Description of Artificial Sequence: Synthetic oligonucleotide
uucaguuacgucuggaaaa

SEQ ID NO: 1010071 - RNA, 19 nt, Artificial Sequence
  Description of Artificial Sequence: Synthetic oligonucleotide
uaacuugguaccauuuucu

SEQ ID NO: 1010072 - RNA, 19 nt, Artificial Sequence
  Description of Artificial Sequence: Synthetic oligonucleotide
uugaucuugguauuaguaa

SEQ ID NO: 1010073 - RNA, 19 nt, Artificial Sequence
  Description of Artificial Sequence: Synthetic oligonucleotide
uaaacugguaacucagaga

SEQ ID NO: 1010074 - RNA, 19 nt, Artificial Sequence
  Description of Artificial Sequence: Synthetic oligonucleotide
ucugugaaugauuucgccu

SEQ ID NO: 1010075 - RNA, 19 nt, Artificial Sequence
  Description of Artificial Sequence: Synthetic oligonucleotide
cagcacauugugaacagcg

SEQ ID NO: 1010076 - RNA, 19 nt, Artificial Sequence
  Description of Artificial Sequence: Synthetic oligonucleotide
uuugacaagugggaaaggc

SEQ ID NO: 1010077 - RNA, 19 nt, Artificial Sequence
  Description of Artificial Sequence: Synthetic oligonucleotide
caucuuuaccacuuggcag

SEQ ID NO: 1010078 - RNA, 19 nt, Artificial Sequence
  Description of Artificial Sequence: Synthetic oligonucleotide
auaccuuggcuuuccgucc

SEQ ID NO: 1010079 - RNA, 19 nt, Artificial Sequence
  Description of Artificial Sequence: Synthetic oligonucleotide
uucagcgagacuagaguag

SEQ ID NO: 1010080 - RNA, 19 nt, Artificial Sequence
  Description of Artificial Sequence: Synthetic oligonucleotide
ucuuaguaagaaugagaag

SEQ ID NO: 1010081 - RNA, 19 nt, Artificial Sequence
  Description of Artificial Sequence: Synthetic oligonucleotide
uuauagaugucuucauagu

SEQ ID NO: 1010082 - RNA, 19 nt, Artificial Sequence
  Description of Artificial Sequence: Synthetic oligonucleotide
agcuauaggaucaaacguc

SEQ ID NO: 1010083 - RNA, 19 nt, Artificial Sequence
  Description of Artificial Sequence: Synthetic oligonucleotide
agaucgaucugugacauug

SEQ ID NO: 1010084 - RNA, 19 nt, Artificial Sequence
  Description of Artificial Sequence: Synthetic oligonucleotide
acugagccaauacagugag

SEQ ID NO: 1010085 - RNA, 19 nt, Artificial Sequence
  Description of Artificial Sequence: Synthetic oligonucleotide
ucuuguacgaacuggguuu

SEQ ID NO: 1010086 - RNA, 19 nt, Artificial Sequence
  Description of Artificial Sequence: Synthetic oligonucleotide
uucauggagaauagaaguc

SEQ ID NO: 1010087 - RNA, 19 nt, Artificial Sequence
  Description of Artificial Sequence: Synthetic oligonucleotide
acgaccauacacuuucauc

SEQ ID NO: 1010088 - RNA, 19 nt, Artificial Sequence
  Description of Artificial Sequence: Synthetic oligonucleotide
caguugaacugaaaacucg

SEQ ID NO: 1010089 - RNA, 19 nt, Artificial Sequence
  Description of Artificial Sequence: Synthetic oligonucleotide
cuugucaaugugugaacgg

SEQ ID NO: 1010090 - RNA, 19 nt, Artificial Sequence
  Description of Artificial Sequence: Synthetic oligonucleotide
ucauuauacgcuucagcga

SEQ ID NO: 1010091 - RNA, 19 nt, Artificial Sequence
  Description of Artificial Sequence: Synthetic oligonucleotide
acuccgaguauuccacucc

SEQ ID NO: 1010092 - RNA, 19 nt, Artificial Sequence
  Description of Artificial Sequence: Synthetic oligonucleotide
uggccuuuuguucucagga

SEQ ID NO: 1010093 - RNA, 19 nt, Artificial Sequence
  Description of Artificial Sequence: Synthetic oligonucleotide
uacgucuggaaaacgaggu

SEQ ID NO: 1010094 - RNA, 19 nt, Artificial Sequence
  Description of Artificial Sequence: Synthetic oligonucleotide
gaaugauuucgccuccucc

SEQ ID NO: 1010095 - RNA, 19 nt, Artificial Sequence
  Description of Artificial Sequence: Synthetic oligonucleotide
aacgucagaaaauccacuu

SEQ ID NO: 1010096 - RNA, 19 nt, Artificial Sequence
  Description of Artificial Sequence: Synthetic oligonucleotide
aucaguaaggccccaggag

SEQ ID NO: 1010097 - RNA, 19 nt, Artificial Sequence
  Description of Artificial Sequence: Synthetic oligonucleotide
caaacgucagaaaauccac

SEQ ID NO: 1010098 - RNA, 19 nt, Artificial Sequence
  Description of Artificial Sequence: Synthetic oligonucleotide
cuacaaaccucaaaagauc

SEQ ID NO: 1010099 - RNA, 19 nt, Artificial Sequence
  Description of Artificial Sequence: Synthetic oligonucleotide
auuuacguacgggauacgg

SEQ ID NO: 1010100 - RNA, 19 nt, Artificial Sequence
  Description of Artificial Sequence: Synthetic oligonucleotide
aagacucuacagcaaagau

SEQ ID NO: 1010101 - RNA, 19 nt, Artificial Sequence
  Description of Artificial Sequence: Synthetic oligonucleotide
uuacguacgggauacgguc

SEQ ID NO: 1010102 - RNA, 19 nt, Artificial Sequence
  Description of Artificial Sequence: Synthetic oligonucleotide
cacaucauauuuaacuguc

SEQ ID NO: 1010103 - RNA, 19 nt, Artificial Sequence
  Description of Artificial Sequence: Synthetic oligonucleotide
uacguugucacauguuuac

SEQ ID NO: 1010104 - RNA, 19 nt, Artificial Sequence
  Description of Artificial Sequence: Synthetic oligonucleotide
uuuacguacgggauacggu

SEQ ID NO: 1010105 - RNA, 19 nt, Artificial Sequence
  Description of Artificial Sequence: Synthetic oligonucleotide
uuacaauaggccugcuugc

SEQ ID NO: 1010106 - RNA, 19 nt, Artificial Sequence
  Description of Artificial Sequence: Synthetic oligonucleotide
cuuugucacgaccauacac

SEQ ID NO: 1010107 - RNA, 19 nt, Artificial Sequence
  Description of Artificial Sequence: Synthetic oligonucleotide
gguauuaguaaugacagca

SEQ ID NO: 1010108 - RNA, 19 nt, Artificial Sequence
  Description of Artificial Sequence: Synthetic oligonucleotide
ucauggagaauagaagucu

SEQ ID NO: 1010109 - RNA, 19 nt, Artificial Sequence
  Description of Artificial Sequence: Synthetic oligonucleotide
aaacgagguaaaucuaaaa

SEQ ID NO: 1010110 - RNA, 19 nt, Artificial Sequence
  Description of Artificial Sequence: Synthetic oligonucleotide
gaucaaacgucagaaaauc

SEQ ID NO: 1010111 - RNA, 19 nt, Artificial Sequence
  Description of Artificial Sequence: Synthetic oligonucleotide
uucucuuauacaugacuga

SEQ ID NO: 1010112 - RNA, 19 nt, Artificial Sequence
  Description of Artificial Sequence: Synthetic oligonucleotide
accauucuaauuugucauc

SEQ ID NO: 1010113 - RNA, 19 nt, Artificial Sequence
  Description of Artificial Sequence: Synthetic oligonucleotide
cuugguaccauuuucugaa

SEQ ID NO: 1010114 - RNA, 19 nt, Artificial Sequence
  Description of Artificial Sequence: Synthetic oligonucleotide
acugguaacucagagaaaa

SEQ ID NO: 1010115 - RNA, 19 nt, Artificial Sequence
  Description of Artificial Sequence: Synthetic oligonucleotide
agaugccuuugucacgacc

SEQ ID NO: 1010116 - RNA, 19 nt, Artificial Sequence
  Description of Artificial Sequence: Synthetic oligonucleotide
cugugaaugauuucgccuc

SEQ ID NO: 1010117 - RNA, 19 nt, Artificial Sequence
  Description of Artificial Sequence: Synthetic oligonucleotide
cuuucuugggucuugaucu

SEQ ID NO: 1010118 - RNA, 19 nt, Artificial Sequence
  Description of Artificial Sequence: Synthetic oligonucleotide
acuugucaaugugugaacg

SEQ ID NO: 1010119 - RNA, 19 nt, Artificial Sequence
  Description of Artificial Sequence: Synthetic oligonucleotide
ugagccaauacagugaguu

SEQ ID NO: 1010120 - RNA, 19 nt, Artificial Sequence
  Description of Artificial Sequence: Synthetic oligonucleotide
ucagcgagacuagaguagg

SEQ ID NO: 1010121 - RNA, 19 nt, Artificial Sequence
  Description of Artificial Sequence: Synthetic oligonucleotide
ugguauaguaugcacugaa

SEQ ID NO: 1010122 - RNA, 19 nt, Artificial Sequence
  Description of Artificial Sequence: Synthetic oligonucleotide
uugagccccaguaaguacu

SEQ ID NO: 1010123 - RNA, 19 nt, Artificial Sequence
  Description of Artificial Sequence: Synthetic oligonucleotide
ugacuugucaaugugugaa

SEQ ID NO: 1010124 - RNA, 19 nt, Artificial Sequence
  Description of Artificial Sequence: Synthetic oligonucleotide
uugugaacagcguucugug

SEQ ID NO: 1010125 - RNA, 19 nt, Artificial Sequence
  Description of Artificial Sequence: Synthetic oligonucleotide
uucauacguugucacaugu

SEQ ID NO: 1010126 - RNA, 19 nt, Artificial Sequence
  Description of Artificial Sequence: Synthetic oligonucleotide
gaauagaagucuuuauucu

SEQ ID NO: 1010127 - RNA, 19 nt, Artificial Sequence
  Description of Artificial Sequence: Synthetic oligonucleotide
gucacgaccauacacuuuc

SEQ ID NO: 1010128 - RNA, 19 nt, Artificial Sequence
  Description of Artificial Sequence: Synthetic oligonucleotide
gauacgguccucuucuaca

SEQ ID NO: 1010129 - RNA, 19 nt, Artificial Sequence
  Description of Artificial Sequence: Synthetic oligonucleotide
gaaaagcauuuacguacgg

SEQ ID NO: 1010130 - RNA, 19 nt, Artificial Sequence
  Description of Artificial Sequence: Synthetic oligonucleotide
uggugguauaguaugcacu

SEQ ID NO: 1010131 - RNA, 19 nt, Artificial Sequence
  Description of Artificial Sequence: Synthetic oligonucleotide
cacuuggcagguuaaacug

SEQ ID NO: 1010132 - RNA, 19 nt, Artificial Sequence
  Description of Artificial Sequence: Synthetic oligonucleotide
augagaagauacuuaguau

SEQ ID NO: 1010133 - RNA, 19 nt, Artificial Sequence
  Description of Artificial Sequence: Synthetic oligonucleotide
auugugaacagcguucugu

SEQ ID NO: 1010134 - RNA, 19 nt, Artificial Sequence
  Description of Artificial Sequence: Synthetic oligonucleotide
uaguaaugacagcagugcu

SEQ ID NO: 1010135 - RNA, 19 nt, Artificial Sequence
  Description of Artificial Sequence: Synthetic oligonucleotide
agauccggaacagacaucu

SEQ ID NO: 1010136 - RNA, 19 nt, Artificial Sequence
  Description of Artificial Sequence: Synthetic oligonucleotide
cuuacaacuuccucagauc

SEQ ID NO: 1010137 - RNA, 19 nt, Artificial Sequence
  Description of Artificial Sequence: Synthetic oligonucleotide
acgucagaaaauccacuuc

SEQ ID NO: 1010138 - RNA, 19 nt, Artificial Sequence
  Description of Artificial Sequence: Synthetic oligonucleotide
uccggaacagacaucugcu

SEQ ID NO: 1010139 - RNA, 19 nt, Artificial Sequence
  Description of Artificial Sequence: Synthetic oligonucleotide
uuuuguucucaggaguccc

SEQ ID NO: 1010140 - RNA, 19 nt, Artificial Sequence
  Description of Artificial Sequence: Synthetic oligonucleotide
ugccuggugguauaguaug

SEQ ID NO: 1010141 - RNA, 19 nt, Artificial Sequence
  Description of Artificial Sequence: Synthetic oligonucleotide
aaaauauaggcaacuucaa

SEQ ID NO: 1010142 - RNA, 19 nt, Artificial Sequence
  Description of Artificial Sequence: Synthetic oligonucleotide
cccaguaaguacuucaugc

SEQ ID NO: 1010143 - RNA, 19 nt, Artificial Sequence
  Description of Artificial Sequence: Synthetic oligonucleotide
aagguagcgcuuccaaaga

SEQ ID NO: 1010144 - RNA, 19 nt, Artificial Sequence
  Description of Artificial Sequence: Synthetic oligonucleotide
aggacuggccuuuuguucu

SEQ ID NO: 1010145 - RNA, 19 nt, Artificial Sequence
  Description of Artificial Sequence: Synthetic oligonucleotide
auacuuaguauaaacuggu

SEQ ID NO: 1010146 - RNA, 19 nt, Artificial Sequence
  Description of Artificial Sequence: Synthetic oligonucleotide
aaaagaucugaaaggguaa

SEQ ID NO: 1010147 - RNA, 19 nt, Artificial Sequence
  Description of Artificial Sequence: Synthetic oligonucleotide
guauuaguaaugacagcag

SEQ ID NO: 1010148 - RNA, 19 nt, Artificial Sequence
  Description of Artificial Sequence: Synthetic oligonucleotide
uggagauuaucucccaaua

SEQ ID NO: 1010149 - RNA, 19 nt, Artificial Sequence
  Description of Artificial Sequence: Synthetic oligonucleotide
acuagaguaggaccauucu

SEQ ID NO: 1010150 - RNA, 19 nt, Artificial Sequence
  Description of Artificial Sequence: Synthetic oligonucleotide
gaugccuuugucacgacca

SEQ ID NO: 1010151 - RNA, 19 nt, Artificial Sequence
  Description of Artificial Sequence: Synthetic oligonucleotide
agcgagacuagaguaggac

SEQ ID NO: 1010152 - RNA, 19 nt, Artificial Sequence
  Description of Artificial Sequence: Synthetic oligonucleotide
aguaaguacuucaugcaca

SEQ ID NO: 1010153 - RNA, 19 nt, Artificial Sequence
  Description of Artificial Sequence: Synthetic oligonucleotide
ucaauuaagcucacuucuu

SEQ ID NO: 1010154 - RNA, 19 nt, Artificial Sequence
  Description of Artificial Sequence: Synthetic oligonucleotide
caguaaguacuucaugcac

SEQ ID NO: 1010155 - RNA, 19 nt, Artificial Sequence
  Description of Artificial Sequence: Synthetic oligonucleotide
guuacgucuggaaaacgag

SEQ ID NO: 1010156 - RNA, 19 nt, Artificial Sequence
  Description of Artificial Sequence: Synthetic oligonucleotide
agccaauacagugaguucu

SEQ ID NO: 1010157 - RNA, 19 nt, Artificial Sequence
  Description of Artificial Sequence: Synthetic oligonucleotide
aacagcguucugugaauga

SEQ ID NO: 1010158 - RNA, 19 nt, Artificial Sequence
  Description of Artificial Sequence: Synthetic oligonucleotide
acagguguugaaccaacca

SEQ ID NO: 1010159 - RNA, 19 nt, Artificial Sequence
  Description of Artificial Sequence: Synthetic oligonucleotide
cuucauggagaauagaagu

SEQ ID NO: 1010160 - RNA, 19 nt, Artificial Sequence
  Description of Artificial Sequence: Synthetic oligonucleotide
gaaaacgagguaaaucuaa

SEQ ID NO: 1010161 - RNA, 19 nt, Artificial Sequence
  Description of Artificial Sequence: Synthetic oligonucleotide
ucaguuacgucuggaaaac

SEQ ID NO: 1010162 - RNA, 19 nt, Artificial Sequence
  Description of Artificial Sequence: Synthetic oligonucleotide
uuuccguccucuuguacga

SEQ ID NO: 1010163 - RNA, 19 nt, Artificial Sequence
  Description of Artificial Sequence: Synthetic oligonucleotide
ggaugcuuugacaaguggg

SEQ ID NO: 1010164 - RNA, 19 nt, Artificial Sequence
  Description of Artificial Sequence: Synthetic oligonucleotide
uacgcuucagcgagacuag

SEQ ID NO: 1010165 - RNA, 19 nt, Artificial Sequence
  Description of Artificial Sequence: Synthetic oligonucleotide
uaguauaaacugguaacuc

SEQ ID NO: 1010166 - RNA, 19 nt, Artificial Sequence
  Description of Artificial Sequence: Synthetic oligonucleotide
ucuccgauuccagucaucu

SEQ ID NO: 1010167 - RNA, 19 nt, Artificial Sequence
  Description of Artificial Sequence: Synthetic oligonucleotide
ucaaugugugaacgguaga

SEQ ID NO: 1010168 - RNA, 19 nt, Artificial Sequence
  Description of Artificial Sequence: Synthetic oligonucleotide
aaaacgagguaaaucuaaa

SEQ ID NO: 1010169 - RNA, 19 nt, Artificial Sequence
  Description of Artificial Sequence: Synthetic oligonucleotide
aaagaucugaaaggguaau

SEQ ID NO: 1010170 - RNA, 19 nt, Artificial Sequence
  Description of Artificial Sequence: Synthetic oligonucleotide
augauuucgccuccuccag

SEQ ID NO: 1010171 - RNA, 19 nt, Artificial Sequence
  Description of Artificial Sequence: Synthetic oligonucleotide
agacucuacagcaaagaug

SEQ ID NO: 1010172 - RNA, 19 nt, Artificial Sequence
  Description of Artificial Sequence: Synthetic oligonucleotide
auacgcuucagcgagacua

SEQ ID NO: 1010173 - RNA, 19 nt, Artificial Sequence
  Description of Artificial Sequence: Synthetic oligonucleotide
uacguacgggauacggucc

SEQ ID NO: 1010174 - RNA, 19 nt, Artificial Sequence
  Description of Artificial Sequence: Synthetic oligonucleotide
ucuucauaacuugguacca

SEQ ID NO: 1010175 - RNA, 19 nt, Artificial Sequence
  Description of Artificial Sequence: Synthetic oligonucleotide
guagcgcuuccaaagauug

SEQ ID NO: 1010176 - RNA, 19 nt, Artificial Sequence
  Description of Artificial Sequence: Synthetic oligonucleotide
ugguauuaguaaugacagc

SEQ ID NO: 1010177 - RNA, 19 nt, Artificial Sequence
  Description of Artificial Sequence: Synthetic oligonucleotide
ugcuuuugaagaugcucca

SEQ ID NO: 1010178 - RNA, 19 nt, Artificial Sequence
  Description of Artificial Sequence: Synthetic oligonucleotide
augacagcagugcuuacaa

SEQ ID NO: 1010179 - RNA, 19 nt, Artificial Sequence
  Description of Artificial Sequence: Synthetic oligonucleotide
agcgcuuccaaagauugug

SEQ ID NO: 1010180 - RNA, 19 nt, Artificial Sequence
  Description of Artificial Sequence: Synthetic oligonucleotide
aaacaagggcuaccagugu

SEQ ID NO: 1010181 - RNA, 19 nt, Artificial Sequence
  Description of Artificial Sequence: Synthetic oligonucleotide
ugcuuugacaagugggaaa

SEQ ID NO: 1010182 - RNA, 19 nt, Artificial Sequence
  Description of Artificial Sequence: Synthetic oligonucleotide
guaggaccauucuaauuug

SEQ ID NO: 1010183 - RNA, 19 nt, Artificial Sequence
  Description of Artificial Sequence: Synthetic oligonucleotide
auaggcaacuucaaucaug

SEQ ID NO: 1010184 - RNA, 19 nt, Artificial Sequence
  Description of Artificial Sequence: Synthetic oligonucleotide
uggcuuuccguccucuugu

SEQ ID NO: 1010185 - RNA, 19 nt, Artificial Sequence
  Description of Artificial Sequence: Synthetic oligonucleotide
gaguugaucuugguauuag

SEQ ID NO: 1010186 - RNA, 19 nt, Artificial Sequence
  Description of Artificial Sequence: Synthetic oligonucleotide
aguugaacugaaaacucga

SEQ ID NO: 1010187 - RNA, 19 nt, Artificial Sequence
  Description of Artificial Sequence: Synthetic oligonucleotide
aaacgucagaaaauccacu

SEQ ID NO: 1010188 - RNA, 19 nt, Artificial Sequence
  Description of Artificial Sequence: Synthetic oligonucleotide
uggagaauagaagucuuua

SEQ ID NO: 1010189 - RNA, 19 nt, Artificial Sequence
  Description of Artificial Sequence: Synthetic oligonucleotide
uuggggaugcuuugacaag

SEQ ID NO: 1010190 - RNA, 19 nt, Artificial Sequence
  Description of Artificial Sequence: Synthetic oligonucleotide
caaaccucaaaagaucuga

SEQ ID NO: 1010191 - RNA, 19 nt, Artificial Sequence
  Description of Artificial Sequence: Synthetic oligonucleotide
aaacucgaaggguccuucu

SEQ ID NO: 1010192 - RNA, 19 nt, Artificial Sequence
  Description of Artificial Sequence: Synthetic oligonucleotide
aaugugugaacgguagauu

SEQ ID NO: 1010193 - RNA, 19 nt, Artificial Sequence
  Description of Artificial Sequence: Synthetic oligonucleotide
cuauaggaucaaacgucag

SEQ ID NO: 1010194 - RNA, 19 nt, Artificial Sequence
  Description of Artificial Sequence: Synthetic oligonucleotide
cuggaaaacgagguaaauc

SEQ ID NO: 1010195 - RNA, 19 nt, Artificial Sequence
  Description of Artificial Sequence: Synthetic oligonucleotide
uuauacgcuucagcgagac

SEQ ID NO: 1010196 - RNA, 19 nt, Artificial Sequence
  Description of Artificial Sequence: Synthetic oligonucleotide
ugaagguagcgcuuccaaa

SEQ ID NO: 1010197 - RNA, 19 nt, Artificial Sequence
  Description of Artificial Sequence: Synthetic oligonucleotide
aucuugguauuaguaauga

SEQ ID NO: 1010198 - RNA, 19 nt, Artificial Sequence
  Description of Artificial Sequence: Synthetic oligonucleotide
gacuugucaaugugugaac

SEQ ID NO: 1010199 - RNA, 19 nt, Artificial Sequence
  Description of Artificial Sequence: Synthetic oligonucleotide
guacuucaugcacaagaug

SEQ ID NO: 1010200 - RNA, 19 nt, Artificial Sequence
  Description of Artificial Sequence: Synthetic oligonucleotide
aggaccauucuaauuuguc

SEQ ID NO: 1010201 - RNA, 19 nt, Artificial Sequence
  Description of Artificial Sequence: Synthetic oligonucleotide
cuuucaaggguggugucac

SEQ ID NO: 1010202 - RNA, 19 nt, Artificial Sequence
  Description of Artificial Sequence: Synthetic oligonucleotide
ugugaacagcguucuguga

SEQ ID NO: 1010203 - RNA, 19 nt, Artificial Sequence
  Description of Artificial Sequence: Synthetic oligonucleotide
cacuucuccgauuccaguc

SEQ ID NO: 1010204 - RNA, 19 nt, Artificial Sequence
  Description of Artificial Sequence: Synthetic oligonucleotide
guagcagucuucaguuacg

SEQ ID NO: 1010205 - RNA, 19 nt, Artificial Sequence
  Description of Artificial Sequence: Synthetic oligonucleotide
cuucauacguugucacaug

SEQ ID NO: 1010206 - RNA, 19 nt, Artificial Sequence
  Description of Artificial Sequence: Synthetic oligonucleotide
uguggcucaucuucucugu

SEQ ID NO: 1010207 - RNA, 19 nt, Artificial Sequence
  Description of Artificial Sequence: Synthetic oligonucleotide
uaggaccauucuaauuugu

SEQ ID NO: 1010208 - RNA, 19 nt, Artificial Sequence
  Description of Artificial Sequence: Synthetic oligonucleotide
aacuucaaucauguuuuau

SEQ ID NO: 1010209 - RNA, 19 nt, Artificial Sequence
  Description of Artificial Sequence: Synthetic oligonucleotide
gugaacagcguucugugaa

SEQ ID NO: 1010210 - RNA, 19 nt, Artificial Sequence
  Description of Artificial Sequence: Synthetic oligonucleotide
auggaaacaagggcuacca

SEQ ID NO: 1010211 - RNA, 19 nt, Artificial Sequence
  Description of Artificial Sequence: Synthetic oligonucleotide
cuggugguauaguaugcac

SEQ ID NO: 1010212 - RNA, 19 nt, Artificial Sequence
  Description of Artificial Sequence: Synthetic oligonucleotide
aagcucacuucuucaugga

SEQ ID NO: 1010213 - RNA, 19 nt, Artificial Sequence
  Description of Artificial Sequence: Synthetic oligonucleotide
gguaccauuuucugaaauc

SEQ ID NO: 1010214 - RNA, 19 nt, Artificial Sequence
  Description of Artificial Sequence: Synthetic oligonucleotide
ucagaucgaucugugacau

SEQ ID NO: 1010215 - RNA, 19 nt, Artificial Sequence
  Description of Artificial Sequence: Synthetic oligonucleotide
gguaauugucucucucugc

SEQ ID NO: 1010216 - RNA, 19 nt, Artificial Sequence
  Description of Artificial Sequence: Synthetic oligonucleotide
aaaauccacuucuccgauu

SEQ ID NO: 1010217 - RNA, 19 nt, Artificial Sequence
  Description of Artificial Sequence: Synthetic oligonucleotide
ugguaccauuuucugaaau

SEQ ID NO: 1010218 - RNA, 19 nt, Artificial Sequence
  Description of Artificial Sequence: Synthetic oligonucleotide
acacacauaccaaucccag

SEQ ID NO: 1010219 - RNA, 19 nt, Artificial Sequence
  Description of Artificial Sequence: Synthetic oligonucleotide
ggagauuaucucccaauac

SEQ ID NO: 1010220 - RNA, 19 nt, Artificial Sequence
  Description of Artificial Sequence: Synthetic oligonucleotide
cucagaucgaucugugaca

SEQ ID NO: 1010221 - RNA, 19 nt, Artificial Sequence
  Description of Artificial Sequence: Synthetic oligonucleotide
auagaagucuuuauucuua

SEQ ID NO: 1010222 - RNA, 19 nt, Artificial Sequence
  Description of Artificial Sequence: Synthetic oligonucleotide
acgggauacgguccucuuc

SEQ ID NO: 1010223 - RNA, 19 nt, Artificial Sequence
  Description of Artificial Sequence: Synthetic oligonucleotide
acaauaguauuugccuuca

SEQ ID NO: 1010224 - RNA, 19 nt, Artificial Sequence
  Description of Artificial Sequence: Synthetic oligonucleotide
gaccauacacuuucaucuc

SEQ ID NO: 1010225 - RNA, 19 nt, Artificial Sequence
  Description of Artificial Sequence: Synthetic oligonucleotide
uacaauaggccugcuugcu

SEQ ID NO: 1010226 - RNA, 19 nt, Artificial Sequence
  Description of Artificial Sequence: Synthetic oligonucleotide
uuaucaaggacuggccuuu

SEQ ID NO: 1010227 - RNA, 19 nt, Artificial Sequence
  Description of Artificial Sequence: Synthetic oligonucleotide
ugaacagcguucugugaau

SEQ ID NO: 1010228 - RNA, 19 nt, Artificial Sequence
  Description of Artificial Sequence: Synthetic oligonucleotide
ggaccauucuaauuuguca

SEQ ID NO: 1010229 - RNA, 19 nt, Artificial Sequence
  Description of Artificial Sequence: Synthetic oligonucleotide
guaaugacagcagugcuua

SEQ ID NO: 1010230 - RNA, 19 nt, Artificial Sequence
  Description of Artificial Sequence: Synthetic oligonucleotide
aagcauuuacguacgggau

SEQ ID NO: 1010231 - RNA, 19 nt, Artificial Sequence
  Description of Artificial Sequence: Synthetic oligonucleotide
cauacacuuucaucucuuc

SEQ ID NO: 1010232 - RNA, 19 nt, Artificial Sequence
  Description of Artificial Sequence: Synthetic oligonucleotide
gacuagaguaggaccauuc

SEQ ID NO: 1010233 - RNA, 19 nt, Artificial Sequence
  Description of Artificial Sequence: Synthetic oligonucleotide
aacucgaaggguccuucuu

SEQ ID NO: 1010234 - RNA, 19 nt, Artificial Sequence
  Description of Artificial Sequence: Synthetic oligonucleotide
cucucugguucucaguguc

SEQ ID NO: 1010235 - RNA, 19 nt, Artificial Sequence
  Description of Artificial Sequence: Synthetic oligonucleotide
cuggccuuuuguucucagg

SEQ ID NO: 1010236 - RNA, 19 nt, Artificial Sequence
  Description of Artificial Sequence: Synthetic oligonucleotide
cacagguguugaaccaacc

SEQ ID NO: 1010237 - RNA, 19 nt, Artificial Sequence
  Description of Artificial Sequence: Synthetic oligonucleotide
gugaacgguagauuggucu

SEQ ID NO: 1010238 - RNA, 19 nt, Artificial Sequence
  Description of Artificial Sequence: Synthetic oligonucleotide
auacgguccucuucuacaa

SEQ ID NO: 1010239 - RNA, 19 nt, Artificial Sequence
  Description of Artificial Sequence: Synthetic oligonucleotide
cgaguauuccacuccaucc

SEQ ID NO: 1010240 - RNA, 19 nt, Artificial Sequence
  Description of Artificial Sequence: Synthetic oligonucleotide
ggguaauugucucucucug

SEQ ID NO: 1010241 - RNA, 19 nt, Artificial Sequence
  Description of Artificial Sequence: Synthetic oligonucleotide
ccucagaucgaucugugac

SEQ ID NO: 1010242 - RNA, 19 nt, Artificial Sequence
  Description of Artificial Sequence: Synthetic oligonucleotide
gaugaagguagcagucuuc

SEQ ID NO: 1010243 - RNA, 19 nt, Artificial Sequence
  Description of Artificial Sequence: Synthetic oligonucleotide
aguaaugacagcagugcuu

SEQ ID NO: 1010244 - RNA, 19 nt, Artificial Sequence
  Description of Artificial Sequence: Synthetic oligonucleotide
cuucaguuacgucuggaaa

SEQ ID NO: 1010245 - RNA, 19 nt, Artificial Sequence
  Description of Artificial Sequence: Synthetic oligonucleotide
aagaucugaaaggguaauu

SEQ ID NO: 1010246 - RNA, 19 nt, Artificial Sequence
  Description of Artificial Sequence: Synthetic oligonucleotide
ccauucuaauuugucaucc

SEQ ID NO: 1010247 - RNA, 19 nt, Artificial Sequence
  Description of Artificial Sequence: Synthetic oligonucleotide
uugucacgaccauacacuu

SEQ ID NO: 1010248 - RNA, 19 nt, Artificial Sequence
  Description of Artificial Sequence: Synthetic oligonucleotide
guaagaaugagaagauacu

SEQ ID NO: 1010249 - RNA, 19 nt, Artificial Sequence
  Description of Artificial Sequence: Synthetic oligonucleotide
cuugguuaucaaggacugg

SEQ ID NO: 1010250 - RNA, 19 nt, Artificial Sequence
  Description of Artificial Sequence: Synthetic oligonucleotide
cuucugacuuuggggaugc

SEQ ID NO: 1010251 - RNA, 19 nt, Artificial Sequence
  Description of Artificial Sequence: Synthetic oligonucleotide
gaacagcguucugugaaug

SEQ ID NO: 1010252 - RNA, 19 nt, Artificial Sequence
  Description of Artificial Sequence: Synthetic oligonucleotide
ucuggaaaacgagguaaau

SEQ ID NO: 1010253 - RNA, 19 nt, Artificial Sequence
  Description of Artificial Sequence: Synthetic oligonucleotide
ucugaagguagcgcuucca

SEQ ID NO: 1010254 - RNA, 19 nt, Artificial Sequence
  Description of Artificial Sequence: Synthetic oligonucleotide
agauguugggaugaaggua

SEQ ID NO: 1010255 - RNA, 19 nt, Artificial Sequence
  Description of Artificial Sequence: Synthetic oligonucleotide
cuucagcgagacuagagua

SEQ ID NO: 1010256 - RNA, 19 nt, Artificial Sequence
  Description of Artificial Sequence: Synthetic oligonucleotide
gcgagacuagaguaggacc

SEQ ID NO: 1010257 - RNA, 19 nt, Artificial Sequence
  Description of Artificial Sequence: Synthetic oligonucleotide
uaguaagaaugagaagaua

SEQ ID NO: 1010258 - RNA, 19 nt, Artificial Sequence
  Description of Artificial Sequence: Synthetic oligonucleotide
ggaaacaagggcuaccagu

SEQ ID NO: 1010259 - RNA, 19 nt, Artificial Sequence
  Description of Artificial Sequence: Synthetic oligonucleotide
uccucagaucgaucuguga

SEQ ID NO: 1010260 - RNA, 19 nt, Artificial Sequence
  Description of Artificial Sequence: Synthetic oligonucleotide
ugugacauuguggcaggaa

SEQ ID NO: 1010261 - RNA, 19 nt, Artificial Sequence
  Description of Artificial Sequence: Synthetic oligonucleotide
gggaugcuuugacaagugg

SEQ ID NO: 1010262 - RNA, 19 nt, Artificial Sequence
  Description of Artificial Sequence: Synthetic oligonucleotide
cuagaguaggaccauucua

SEQ ID NO: 1010263 - RNA, 19 nt, Artificial Sequence
  Description of Artificial Sequence: Synthetic oligonucleotide
caagacucuacagcaaaga

SEQ ID NO: 1010264 - RNA, 19 nt, Artificial Sequence
  Description of Artificial Sequence: Synthetic oligonucleotide
aucaaggacuggccuuuug

SEQ ID NO: 1010265 - RNA, 19 nt, Artificial Sequence
  Description of Artificial Sequence: Synthetic oligonucleotide
gcauuuacguacgggauac

SEQ ID NO: 1010266 - RNA, 19 nt, Artificial Sequence
  Description of Artificial Sequence: Synthetic oligonucleotide
gucacuuagcagcucaagu

SEQ ID NO: 1010267 - RNA, 19 nt, Artificial Sequence
  Description of Artificial Sequence: Synthetic oligonucleotide
uccguccucuuguacgaac

SEQ ID NO: 1010268 - RNA, 19 nt, Artificial Sequence
  Description of Artificial Sequence: Synthetic oligonucleotide
ggcaacuucaaucauguuu

SEQ ID NO: 1010269 - RNA, 19 nt, Artificial Sequence
  Description of Artificial Sequence: Synthetic oligonucleotide
cacuccgaguauuccacuc

SEQ ID NO: 1010270 - RNA, 19 nt, Artificial Sequence
  Description of Artificial Sequence: Synthetic oligonucleotide
uagcagucuucaguuacgu

SEQ ID NO: 1010271 - RNA, 19 nt, Artificial Sequence
  Description of Artificial Sequence: Synthetic oligonucleotide
guagauuggucuuuugguu

SEQ ID NO: 1010272 - RNA, 19 nt, Artificial Sequence
  Description of Artificial Sequence: Synthetic oligonucleotide
uauacgcuucagcgagacu

SEQ ID NO: 1010273 - RNA, 19 nt, Artificial Sequence
  Description of Artificial Sequence: Synthetic oligonucleotide
ucacgaccauacacuuuca

SEQ ID NO: 1010274 - RNA, 19 nt, Artificial Sequence
  Description of Artificial Sequence: Synthetic oligonucleotide
ggcacuaaacugcuuuuga

SEQ ID NO: 1010275 - RNA, 19 nt, Artificial Sequence
  Description of Artificial Sequence: Synthetic oligonucleotide
gcuauaggaucaaacguca

SEQ ID NO: 1010276 - RNA, 19 nt, Artificial Sequence
  Description of Artificial Sequence: Synthetic oligonucleotide
gaaaauccacuucuccgau

SEQ ID NO: 1010277 - RNA, 19 nt, Artificial Sequence
  Description of Artificial Sequence: Synthetic oligonucleotide
acagcguucugugaaugau

SEQ ID NO: 1010278 - RNA, 19 nt, Artificial Sequence
  Description of Artificial Sequence: Synthetic oligonucleotide
agcguucugugaaugauuu

SEQ ID NO: 1010279 - RNA, 19 nt, Artificial Sequence
  Description of Artificial Sequence: Synthetic oligonucleotide
agguagcgcuuccaaagau

SEQ ID NO: 1010280 - RNA, 19 nt, Artificial Sequence
  Description of Artificial Sequence: Synthetic oligonucleotide
acguacgggauacgguccu

SEQ ID NO: 1010281 - RNA, 19 nt, Artificial Sequence
  Description of Artificial Sequence: Synthetic oligonucleotide
cauacguugucacauguuu

SEQ ID NO: 1010282 - RNA, 19 nt, Artificial Sequence
  Description of Artificial Sequence: Synthetic oligonucleotide
uuuuggguacugagccaau

SEQ ID NO: 1010283 - RNA, 19 nt, Artificial Sequence
  Description of Artificial Sequence: Synthetic oligonucleotide
cuaauuugucauccagcaa

SEQ ID NO: 1010284 - RNA, 19 nt, Artificial Sequence
  Description of Artificial Sequence: Synthetic oligonucleotide
uagcgcuuccaaagauugu

SEQ ID NO: 1010285 - RNA, 19 nt, Artificial Sequence
  Description of Artificial Sequence: Synthetic oligonucleotide
guuaucaaggacuggccuu

SEQ ID NO: 1010286 - RNA, 19 nt, Artificial Sequence
  Description of Artificial Sequence: Synthetic oligonucleotide
gccuuugucacgaccauac

SEQ ID NO: 1010287 - RNA, 19 nt, Artificial Sequence
  Description of Artificial Sequence: Synthetic oligonucleotide
caguuacgucuggaaaacg

SEQ ID NO: 1010288 - RNA, 19 nt, Artificial Sequence
  Description of Artificial Sequence: Synthetic oligonucleotide
ucgaaggguccuucuuuuc

SEQ ID NO: 1010289 - RNA, 19 nt, Artificial Sequence
  Description of Artificial Sequence: Synthetic oligonucleotide
cgguagauuggucuuuugg

SEQ ID NO: 1010290 - RNA, 19 nt, Artificial Sequence
  Description of Artificial Sequence: Synthetic oligonucleotide
cugacuugucaauguguga

SEQ ID NO: 1010291 - RNA, 19 nt, Artificial Sequence
  Description of Artificial Sequence: Synthetic oligonucleotide
ggcacagucugaacucugg

SEQ ID NO: 1010292 - RNA, 19 nt, Artificial Sequence
  Description of Artificial Sequence: Synthetic oligonucleotide
acucuacagcaaagaugcc

SEQ ID NO: 1010293 - RNA, 19 nt, Artificial Sequence
  Description of Artificial Sequence: Synthetic oligonucleotide
cucuuauacaugacugacu

SEQ ID NO: 1010294 - RNA, 19 nt, Artificial Sequence
  Description of Artificial Sequence: Synthetic oligonucleotide
uacgguccucuucuacaaa

SEQ ID NO: 1010295 - RNA, 19 nt, Artificial Sequence
  Description of Artificial Sequence: Synthetic oligonucleotide
agggcacuaaacugcuuuu

SEQ ID NO: 1010296 - RNA, 19 nt, Artificial Sequence
  Description of Artificial Sequence: Synthetic oligonucleotide
cauugugaacagcguucug

SEQ ID NO: 1010297 - RNA, 19 nt, Artificial Sequence
  Description of Artificial Sequence: Synthetic oligonucleotide
uccgaguauuccacuccau

SEQ ID NO: 1010298 - RNA, 19 nt, Artificial Sequence
  Description of Artificial Sequence: Synthetic oligonucleotide
cauuuacguacgggauacg

SEQ ID NO: 1010299 - RNA, 19 nt, Artificial Sequence
  Description of Artificial Sequence: Synthetic oligonucleotide
auagucaggccaagacucu

SEQ ID NO: 1010300 - RNA, 19 nt, Artificial Sequence
  Description of Artificial Sequence: Synthetic oligonucleotide
acgguagauuggucuuuug

SEQ ID NO: 1010301 - RNA, 19 nt, Artificial Sequence
  Description of Artificial Sequence: Synthetic oligonucleotide
uauuuggcucuugcuuccu

SEQ ID NO: 1010302 - RNA, 19 nt, Artificial Sequence
  Description of Artificial Sequence: Synthetic oligonucleotide
gacuuuggggaugcuuuga

SEQ ID NO: 1010303 - RNA, 19 nt, Artificial Sequence
  Description of Artificial Sequence: Synthetic oligonucleotide
ccaguaaguacuucaugca

SEQ ID NO: 1010304 - RNA, 19 nt, Artificial Sequence
  Description of Artificial Sequence: Synthetic oligonucleotide
gaaccaaccagggcacuaa

SEQ ID NO: 1010305 - RNA, 19 nt, Artificial Sequence
  Description of Artificial Sequence: Synthetic oligonucleotide
uucuccgauuccagucauc

SEQ ID NO: 1010306 - RNA, 19 nt, Artificial Sequence
  Description of Artificial Sequence: Synthetic oligonucleotide
auacguugucacauguuua

SEQ ID NO: 1010307 - RNA, 19 nt, Artificial Sequence
  Description of Artificial Sequence: Synthetic oligonucleotide
cuccgaguauuccacucca

SEQ ID NO: 1010308 - RNA, 19 nt, Artificial Sequence
  Description of Artificial Sequence: Synthetic oligonucleotide
ggaacagacaucugcugcu

SEQ ID NO: 1010309 - RNA, 19 nt, Artificial Sequence
  Description of Artificial Sequence: Synthetic oligonucleotide
gguuaucaaggacuggccu

SEQ ID NO: 1010310 - RNA, 19 nt, Artificial Sequence
  Description of Artificial Sequence: Synthetic oligonucleotide
caggaaguacaauaguauu

SEQ ID NO: 1010311 - RNA, 19 nt, Artificial Sequence
  Description of Artificial Sequence: Synthetic oligonucleotide
acguugucacauguuuaca

SEQ ID NO: 1010312 - RNA, 19 nt, Artificial Sequence
  Description of Artificial Sequence: Synthetic oligonucleotide
aacugguaacucagagaaa

SEQ ID NO: 1010313 - RNA, 19 nt, Artificial Sequence
  Description of Artificial Sequence: Synthetic oligonucleotide
cgagacuagaguaggacca

SEQ ID NO: 1010314 - RNA, 19 nt, Artificial Sequence
  Description of Artificial Sequence: Synthetic oligonucleotide
auuauacgcuucagcgaga

SEQ ID NO: 1010315 - RNA, 19 nt, Artificial Sequence
  Description of Artificial Sequence: Synthetic oligonucleotide
augccuuugucacgaccau

SEQ ID NO: 1010316 - RNA, 19 nt, Artificial Sequence
  Description of Artificial Sequence: Synthetic oligonucleotide
cgaccauacacuuucaucu

SEQ ID NO: 1010317 - RNA, 19 nt, Artificial Sequence
  Description of Artificial Sequence: Synthetic oligonucleotide
cacuuucaagggugguguc

SEQ ID NO: 1010318 - RNA, 19 nt, Artificial Sequence
  Description of Artificial Sequence: Synthetic oligonucleotide
gcacaucauauuuaacugu

SEQ ID NO: 1010319 - RNA, 19 nt, Artificial Sequence
  Description of Artificial Sequence: Synthetic oligonucleotide
ggagaauagaagucuuuau

SEQ ID NO: 1010320 - RNA, 19 nt, Artificial Sequence
  Description of Artificial Sequence: Synthetic oligonucleotide
cuucugccuggugguauag

SEQ ID NO: 1010321 - RNA, 19 nt, Artificial Sequence
  Description of Artificial Sequence: Synthetic oligonucleotide
gauuaucucccaauaccuu

SEQ ID NO: 1010322 - RNA, 19 nt, Artificial Sequence
  Description of Artificial Sequence: Synthetic oligonucleotide
gguauaguaugcacugaaa

SEQ ID NO: 1010323 - RNA, 19 nt, Artificial Sequence
  Description of Artificial Sequence: Synthetic oligonucleotide
caaugugugaacgguagau

SEQ ID NO: 1010324 - RNA, 19 nt, Artificial Sequence
  Description of Artificial Sequence: Synthetic oligonucleotide
cuucauagucaggccaaga

SEQ ID NO: 1010325 - RNA, 19 nt, Artificial Sequence
  Description of Artificial Sequence: Synthetic oligonucleotide
uugaaccaaccagggcacu

SEQ ID NO: 1010326 - RNA, 19 nt, Artificial Sequence
  Description of Artificial Sequence: Synthetic oligonucleotide
aguaugcacugaaaaccuu

SEQ ID NO: 1010327 - RNA, 19 nt, Artificial Sequence
  Description of Artificial Sequence: Synthetic oligonucleotide
ccgaguauuccacuccauc

SEQ ID NO: 1010328 - RNA, 19 nt, Artificial Sequence
  Description of Artificial Sequence: Synthetic oligonucleotide
gcuucagcgagacuagagu

SEQ ID NO: 1010329 - RNA, 19 nt, Artificial Sequence
  Description of Artificial Sequence: Synthetic oligonucleotide
uacgggauacgguccucuu

SEQ ID NO: 1010330 - RNA, 19 nt, Artificial Sequence
  Description of Artificial Sequence: Synthetic oligonucleotide
gcuucugacuuuggggaug

SEQ ID NO: 1010331 - RNA, 19 nt, Artificial Sequence
  Description of Artificial Sequence: Synthetic oligonucleotide
gugguauaguaugcacuga

SEQ ID NO: 1010332 - RNA, 19 nt, Artificial Sequence
  Description of Artificial Sequence: Synthetic oligonucleotide
agguagcagucuucaguua

SEQ ID NO: 1010333 - RNA, 19 nt, Artificial Sequence
  Description of Artificial Sequence: Synthetic oligonucleotide
uucugccuggugguauagu

SEQ ID NO: 1010334 - RNA, 19 nt, Artificial Sequence
  Description of Artificial Sequence: Synthetic oligonucleotide
caauaccuuggcuuuccgu

SEQ ID NO: 1010335 - RNA, 19 nt, Artificial Sequence
  Description of Artificial Sequence: Synthetic oligonucleotide
cucuuguacgaacuggguu

SEQ ID NO: 1010336 - RNA, 19 nt, Artificial Sequence
  Description of Artificial Sequence: Synthetic oligonucleotide
ugugcauuucagggagguu

SEQ ID NO: 1010337 - RNA, 19 nt, Artificial Sequence
  Description of Artificial Sequence: Synthetic oligonucleotide
gggcacuaaacugcuuuug

SEQ ID NO: 1010338 - RNA, 19 nt, Artificial Sequence
  Description of Artificial Sequence: Synthetic oligonucleotide
ggaucaaacgucagaaaau

SEQ ID NO: 1010339 - RNA, 19 nt, Artificial Sequence
  Description of Artificial Sequence: Synthetic oligonucleotide
ccacagguguugaaccaac

SEQ ID NO: 1010340 - RNA, 19 nt, Artificial Sequence
  Description of Artificial Sequence: Synthetic oligonucleotide
gcuccacuuucaagggugg

SEQ ID NO: 1010341 - RNA, 19 nt, Artificial Sequence
  Description of Artificial Sequence: Synthetic oligonucleotide
ugccuuugucacgaccaua

SEQ ID NO: 1010342 - RNA, 19 nt, Artificial Sequence
  Description of Artificial Sequence: Synthetic oligonucleotide
ggaaaacgagguaaaucua

SEQ ID NO: 1010343 - RNA, 19 nt, Artificial Sequence
  Description of Artificial Sequence: Synthetic oligonucleotide
agacuagaguaggaccauu

SEQ ID NO: 1010344 - RNA, 19 nt, Artificial Sequence
  Description of Artificial Sequence: Synthetic oligonucleotide
cacauaccaaucccagccu

SEQ ID NO: 1010345 - RNA, 19 nt, Artificial Sequence
  Description of Artificial Sequence: Synthetic oligonucleotide
gguugagccccaguaagua

SEQ ID NO: 1010346 - RNA, 19 nt, Artificial Sequence
  Description of Artificial Sequence: Synthetic oligonucleotide
gcgcuuccaaagauugugc

SEQ ID NO: 1010347 - RNA, 19 nt, Artificial Sequence
  Description of Artificial Sequence: Synthetic oligonucleotide
gcuuuccguccucuuguac

SEQ ID NO: 1010348 - RNA, 19 nt, Artificial Sequence
  Description of Artificial Sequence: Synthetic oligonucleotide
caaggacuggccuuuuguu

SEQ ID NO: 1010349 - RNA, 19 nt, Artificial Sequence
  Description of Artificial Sequence: Synthetic oligonucleotide
gaucgaucugugacauugu

SEQ ID NO: 1010350 - RNA, 19 nt, Artificial Sequence
  Description of Artificial Sequence: Synthetic oligonucleotide
cagcgagacuagaguagga

SEQ ID NO: 1010351 - RNA, 19 nt, Artificial Sequence
  Description of Artificial Sequence: Synthetic oligonucleotide
gaaaacucgaaggguccuu

SEQ ID NO: 1010352 - RNA, 19 nt, Artificial Sequence
  Description of Artificial Sequence: Synthetic oligonucleotide
gcagguuaaacugugcauu

SEQ ID NO: 1010353 - RNA, 19 nt, Artificial Sequence
  Description of Artificial Sequence: Synthetic oligonucleotide
ccccaguaaguacuucaug

SEQ ID NO: 1010354 - RNA, 19 nt, Artificial Sequence
  Description of Artificial Sequence: Synthetic oligonucleotide
gcagcacauugugaacagc

SEQ ID NO: 1010355 - RNA, 19 nt, Artificial Sequence
  Description of Artificial Sequence: Synthetic oligonucleotide
ggaugaagguagcagucuu

SEQ ID NO: 1010356 - RNA, 19 nt, Artificial Sequence
  Description of Artificial Sequence: Synthetic oligonucleotide
cugugcauuucagggaggu

SEQ ID NO: 1010357 - RNA, 19 nt, Artificial Sequence
  Description of Artificial Sequence: Synthetic oligonucleotide
cgaaggguccuucuuuuca

SEQ ID NO: 1010358 - RNA, 19 nt, Artificial Sequence
  Description of Artificial Sequence: Synthetic oligonucleotide
uuccguccucuuguacgaa

SEQ ID NO: 1010359 - RNA, 19 nt, Artificial Sequence
  Description of Artificial Sequence: Synthetic oligonucleotide
cacaagauguugggaugaa

SEQ ID NO: 1010360 - RNA, 19 nt, Artificial Sequence
  Description of Artificial Sequence: Synthetic oligonucleotide
ccuggugguauaguaugca

SEQ ID NO: 1010361 - RNA, 19 nt, Artificial Sequence
  Description of Artificial Sequence: Synthetic oligonucleotide
guacgggauacgguccucu

SEQ ID NO: 1010362 - RNA, 19 nt, Artificial Sequence
  Description of Artificial Sequence: Synthetic oligonucleotide
gugaaugauuucgccuccu

SEQ ID NO: 1010363 - RNA, 19 nt, Artificial Sequence
  Description of Artificial Sequence: Synthetic oligonucleotide
cgucuggaaaacgagguaa

SEQ ID NO: 1010364 - RNA, 19 nt, Artificial Sequence
  Description of Artificial Sequence: Synthetic oligonucleotide
gcguucugugaaugauuuc

SEQ ID NO: 1010365 - RNA, 19 nt, Artificial Sequence
  Description of Artificial Sequence: Synthetic oligonucleotide
cagcguucugugaaugauu

SEQ ID NO: 1010366 - RNA, 19 nt, Artificial Sequence
  Description of Artificial Sequence: Synthetic oligonucleotide
cacgaccauacacuuucau

SEQ ID NO: 1010367 - RNA, 19 nt, Artificial Sequence
  Description of Artificial Sequence: Synthetic oligonucleotide
cuuguacgaacuggguuuu

SEQ ID NO: 1010368 - RNA, 19 nt, Artificial Sequence
  Description of Artificial Sequence: Synthetic oligonucleotide
cgauuccagucaucuuuac

SEQ ID NO: 1010369 - RNA, 19 nt, Artificial Sequence
  Description of Artificial Sequence: Synthetic oligonucleotide
gguagcgcuuccaaagauu

SEQ ID NO: 1010370 - RNA, 19 nt, Artificial Sequence
  Description of Artificial Sequence: Synthetic oligonucleotide
ccuuugucacgaccauaca

SEQ ID NO: 1010371 - RNA, 19 nt, Artificial Sequence
  Description of Artificial Sequence: Synthetic oligonucleotide
cugagccaauacagugagu

SEQ ID NO: 1010372 - RNA, 19 nt, Artificial Sequence
  Description of Artificial Sequence: Synthetic oligonucleotide
cgggauacgguccucuucu

SEQ ID NO: 1010373 - RNA, 19 nt, Artificial Sequence
  Description of Artificial Sequence: Synthetic oligonucleotide
ggcuuuccguccucuugua

SEQ ID NO: 1010374 - RNA, 19 nt, Artificial Sequence
  Description of Artificial Sequence: Synthetic oligonucleotide
ccauacacuuucaucucuu

SEQ ID NO: 1010375 - RNA, 19 nt, Artificial Sequence
  Description of Artificial Sequence: Synthetic oligonucleotide
ccucuuguacgaacugggu

SEQ ID NO: 1010376 - RNA, 19 nt, Artificial Sequence
  Description of Artificial Sequence: Synthetic oligonucleotide
cuccacuuucaaggguggu

SEQ ID NO: 1010377 - RNA, 19 nt, Artificial Sequence
  Description of Artificial Sequence: Synthetic oligonucleotide
gccaauacagugaguucuu

SEQ ID NO: 1010378 - RNA, 19 nt, Artificial Sequence
  Description of Artificial Sequence: Synthetic oligonucleotide
ccucucugguucucagugu

SEQ ID NO: 1010379 - RNA, 19 nt, Artificial Sequence
  Description of Artificial Sequence: Synthetic oligonucleotide
gccccaguaaguacuucau

SEQ ID NO: 1010380 - RNA, 19 nt, Artificial Sequence
  Description of Artificial Sequence: Synthetic oligonucleotide
cagaucgaucugugacauu

SEQ ID NO: 1010381 - RNA, 19 nt, Artificial Sequence
  Description of Artificial Sequence: Synthetic oligonucleotide
caaggguccugggcacagu

SEQ ID NO: 1010382 - RNA, 19 nt, Artificial Sequence
  Description of Artificial Sequence: Synthetic oligonucleotide
ccacuccgaguauuccacu

SEQ ID NO: 1010383 - RNA, 19 nt, Artificial Sequence
  Description of Artificial Sequence: Synthetic oligonucleotide
cuuuaccacuuggcagguu

SEQ ID NO: 1010384 - RNA, 19 nt, Artificial Sequence
  Description of Artificial Sequence: Synthetic oligonucleotide
cguacgggauacgguccuc

SEQ ID NO: 1010385 - RNA, 19 nt, Artificial Sequence
  Description of Artificial Sequence: Synthetic oligonucleotide
caccuacucccagggucuu

SEQ ID NO: 1010386 - RNA, 19 nt, Artificial Sequence
  Description of Artificial Sequence: Synthetic oligonucleotide
aacagcacagaucugucgc

SEQ ID NO: 1010387 - RNA, 19 nt, Artificial Sequence
  Description of Artificial Sequence: Synthetic oligonucleotide
uguacagagaaucugcugc

SEQ ID NO: 1010388 - RNA, 19 nt, Artificial Sequence
  Description of Artificial Sequence: Synthetic oligonucleotide
aacugcauggccugagagc

SEQ ID NO: 1010389 - RNA, 19 nt, Artificial Sequence
  Description of Artificial Sequence: Synthetic oligonucleotide
auuacuggcgcuugagacc

SEQ ID NO: 1010390 - RNA, 19 nt, Artificial Sequence
  Description of Artificial Sequence: Synthetic oligonucleotide
uaauaugugccccugacau

SEQ ID NO: 1010391 - RNA, 19 nt, Artificial Sequence
  Description of Artificial Sequence: Synthetic oligonucleotide
gaggacaguaccuaaggag

SEQ ID NO: 1010392 - RNA, 19 nt, Artificial Sequence
  Description of Artificial Sequence: Synthetic oligonucleotide
gaucauggagacugcaugg

SEQ ID NO: 1010393 - RNA, 19 nt, Artificial Sequence
  Description of Artificial Sequence: Synthetic oligonucleotide
agucaaaaggguauggugg

SEQ ID NO: 1010394 - RNA, 19 nt, Artificial Sequence
  Description of Artificial Sequence: Synthetic oligonucleotide
aucagugauccacacuggc

SEQ ID NO: 1010395 - RNA, 19 nt, Artificial Sequence
  Description of Artificial Sequence: Synthetic oligonucleotide
caagcauaggucugaaggg

SEQ ID NO: 1010396 - RNA, 19 nt, Artificial Sequence
  Description of Artificial Sequence: Synthetic oligonucleotide
aauaugugccccugacauc

SEQ ID NO: 1010397 - RNA, 19 nt, Artificial Sequence
  Description of Artificial Sequence: Synthetic oligonucleotide
uuaauaugugccccugaca

SEQ ID NO: 1010398 - RNA, 19 nt, Artificial Sequence
  Description of Artificial Sequence: Synthetic oligonucleotide
gaugcauccaugcgucugg

SEQ ID NO: 1010399 - RNA, 19 nt, Artificial Sequence
  Description of Artificial Sequence: Synthetic oligonucleotide
ccaagcauaggucugaagg

SEQ ID NO: 1010400 - RNA, 19 nt, Artificial Sequence
  Description of Artificial Sequence: Synthetic oligonucleotide
cauuacuggcgcuugagac

SEQ ID NO: 1010401 - RNA, 19 nt, Artificial Sequence
  Description of Artificial Sequence: Synthetic oligonucleotide
guaugguggaagcagcagg

SEQ ID NO: 1010402 - RNA, 19 nt, Artificial Sequence
  Description of Artificial Sequence: Synthetic oligonucleotide
cuuaauaugugccccugac

SEQ ID NO: 1010403 - RNA, 19 nt, Artificial Sequence
  Description of Artificial Sequence: Synthetic oligonucleotide
aaacuguacagagaaucug

SEQ ID NO: 1010404 - RNA, 19 nt, Artificial Sequence
  Description of Artificial Sequence: Synthetic oligonucleotide
ucgcuuuacagucucuccc

SEQ ID NO: 1010405 - RNA, 19 nt, Artificial Sequence
  Description of Artificial Sequence: Synthetic oligonucleotide
ucuagacaggcagugauga

SEQ ID NO: 1010406 - RNA, 19 nt, Artificial Sequence
  Description of Artificial Sequence: Synthetic oligonucleotide
cagaucauugggaaccagg

SEQ ID NO: 1010407 - RNA, 19 nt, Artificial Sequence
  Description of Artificial Sequence: Synthetic oligonucleotide
agucuauuccagucaaaag

SEQ ID NO: 1010408 - RNA, 19 nt, Artificial Sequence
  Description of Artificial Sequence: Synthetic oligonucleotide
uauuccagucaaaagggua

SEQ ID NO: 1010409 - RNA, 19 nt, Artificial Sequence
  Description of Artificial Sequence: Synthetic oligonucleotide
uugguucccaaucuuaaua

SEQ ID NO: 1010410 - RNA, 19 nt, Artificial Sequence
  Description of Artificial Sequence: Synthetic oligonucleotide
auacugcccaccuccuucc

SEQ ID NO: 1010411 - RNA, 19 nt, Artificial Sequence
  Description of Artificial Sequence: Synthetic oligonucleotide
uggggcaguaggcuaaaag

SEQ ID NO: 1010412 - RNA, 19 nt, Artificial Sequence
  Description of Artificial Sequence: Synthetic oligonucleotide
gagacugcauggaaaacag

SEQ ID NO: 1010413 - RNA, 19 nt, Artificial Sequence
  Description of Artificial Sequence: Synthetic oligonucleotide
auaguggcuccuuugggug

SEQ ID NO: 1010414 - RNA, 19 nt, Artificial Sequence
  Description of Artificial Sequence: Synthetic oligonucleotide
aagggaacugcauggccug

SEQ ID NO: 1010415 - RNA, 19 nt, Artificial Sequence
  Description of Artificial Sequence: Synthetic oligonucleotide
ugucgcacacacaggauga

SEQ ID NO: 1010416 - RNA, 19 nt, Artificial Sequence
  Description of Artificial Sequence: Synthetic oligonucleotide
guaggcuaaaagcccaaag

SEQ ID NO: 1010417 - RNA, 19 nt, Artificial Sequence
  Description of Artificial Sequence: Synthetic oligonucleotide
auaugugccccugacaucu

SEQ ID NO: 1010418 - RNA, 19 nt, Artificial Sequence
  Description of Artificial Sequence: Synthetic oligonucleotide
uuacuggcgcuugagaccc

SEQ ID NO: 1010419 - RNA, 19 nt, Artificial Sequence
  Description of Artificial Sequence: Synthetic oligonucleotide
uucugguucgcugagaaua

SEQ ID NO: 1010420 - RNA, 19 nt, Artificial Sequence
  Description of Artificial Sequence: Synthetic oligonucleotide
caugcgucuggcauuacug

SEQ ID NO: 1010421 - RNA, 19 nt, Artificial Sequence
  Description of Artificial Sequence: Synthetic oligonucleotide
ucagugauccacacuggcu

SEQ ID NO: 1010422 - RNA, 19 nt, Artificial Sequence
  Description of Artificial Sequence: Synthetic oligonucleotide
uccaauucccacuggggca

SEQ ID NO: 1010423 - RNA, 19 nt, Artificial Sequence
  Description of Artificial Sequence: Synthetic oligonucleotide
ugaguggccucccauggca

SEQ ID NO: 1010424 - RNA, 19 nt, Artificial Sequence
  Description of Artificial Sequence: Synthetic oligonucleotide
cuccaauucccacuggggc

SEQ ID NO: 1010425 - RNA, 19 nt, Artificial Sequence
  Description of Artificial Sequence: Synthetic oligonucleotide
cagugauccacacuggcug

SEQ ID NO: 1010426 - RNA, 19 nt, Artificial Sequence
  Description of Artificial Sequence: Synthetic oligonucleotide
agugauccacacuggcugg

SEQ ID NO: 1010427 - RNA, 19 nt, Artificial Sequence
  Description of Artificial Sequence: Synthetic oligonucleotide
auuccuggcauccaagcau

SEQ ID NO: 1010428 - RNA, 19 nt, Artificial Sequence
  Description of Artificial Sequence: Synthetic oligonucleotide
gcuccuagaacccugggcc

SEQ ID NO: 1010429 - RNA, 19 nt, Artificial Sequence
  Description of Artificial Sequence: Synthetic oligonucleotide
ggggcaguaggcuaaaagc

SEQ ID NO: 1010430 - RNA, 19 nt, Artificial Sequence
  Description of Artificial Sequence: Synthetic oligonucleotide
augcgucuggcauuacugg

SEQ ID NO: 1010431 - RNA, 19 nt, Artificial Sequence
  Description of Artificial Sequence: Synthetic oligonucleotide
cacugggcgaggcaaaggg

SEQ ID NO: 1010432 - RNA, 19 nt, Artificial Sequence
  Description of Artificial Sequence: Synthetic oligonucleotide
guaggggaugcauccaugc

SEQ ID NO: 1010433 - RNA, 19 nt, Artificial Sequence
  Description of Artificial Sequence: Synthetic oligonucleotide
cccaaucuuaauaugugcc

SEQ ID NO: 1010434 - RNA, 19 nt, Artificial Sequence
  Description of Artificial Sequence: Synthetic oligonucleotide
gaauucgcuuuacagucuc

SEQ ID NO: 1010435 - RNA, 19 nt, Artificial Sequence
  Description of Artificial Sequence: Synthetic oligonucleotide
aggggaugcauccaugcgu

SEQ ID NO: 1010436 - RNA, 19 nt, Artificial Sequence
  Description of Artificial Sequence: Synthetic oligonucleotide
ugcucugcucccgaauucg

SEQ ID NO: 1010437 - RNA, 19 nt, Artificial Sequence
  Description of Artificial Sequence: Synthetic oligonucleotide
agaccggugagccagugau

SEQ ID NO: 1010438 - RNA, 19 nt, Artificial Sequence
  Description of Artificial Sequence: Synthetic oligonucleotide
auggagaccggugagccag

SEQ ID NO: 1010439 - RNA, 19 nt, Artificial Sequence
  Description of Artificial Sequence: Synthetic oligonucleotide
guguaggccgccaagcccg

SEQ ID NO: 1010440 - RNA, 19 nt, Artificial Sequence
  Description of Artificial Sequence: Synthetic oligonucleotide
ugggauaguggcuccuuug

SEQ ID NO: 1010441 - RNA, 19 nt, Artificial Sequence
  Description of Artificial Sequence: Synthetic oligonucleotide
ggcgcaaggucacaggagg

SEQ ID NO: 1010442 - RNA, 19 nt, Artificial Sequence
  Description of Artificial Sequence: Synthetic oligonucleotide
aacccugguugguggagag

SEQ ID NO: 1010443 - RNA, 19 nt, Artificial Sequence
  Description of Artificial Sequence: Synthetic oligonucleotide
acaugaguggccucccaug

SEQ ID NO: 1010444 - RNA, 19 nt, Artificial Sequence
  Description of Artificial Sequence: Synthetic oligonucleotide
agaugguuauccuggcacu

SEQ ID NO: 1010445 - RNA, 19 nt, Artificial Sequence
  Description of Artificial Sequence: Synthetic oligonucleotide
gauggcguaaggcgugccc

SEQ ID NO: 1010446 - RNA, 19 nt, Artificial Sequence
  Description of Artificial Sequence: Synthetic oligonucleotide
aaaggguaugguggaagca

SEQ ID NO: 1010447 - RNA, 19 nt, Artificial Sequence
  Description of Artificial Sequence: Synthetic oligonucleotide
caaucagaucauugggaac

SEQ ID NO: 1010448 - RNA, 19 nt, Artificial Sequence
  Description of Artificial Sequence: Synthetic oligonucleotide
gauaguggcuccuuugggu

SEQ ID NO: 1010449 - RNA, 19 nt, Artificial Sequence
  Description of Artificial Sequence: Synthetic oligonucleotide
agagggagauggcguaagg

SEQ ID NO: 1010450 - RNA, 19 nt, Artificial Sequence
  Description of Artificial Sequence: Synthetic oligonucleotide
gggauaguggcuccuuugg

SEQ ID NO: 1010451 - RNA, 19 nt, Artificial Sequence
  Description of Artificial Sequence: Synthetic oligonucleotide
ucugguucgcugagaauau

SEQ ID NO: 1010452 - RNA, 19 nt, Artificial Sequence
  Description of Artificial Sequence: Synthetic oligonucleotide
aauggagaccggugagcca

SEQ ID NO: 1010453 - RNA, 19 nt, Artificial Sequence
  Description of Artificial Sequence: Synthetic oligonucleotide
uaccuaaggagaggcuugg

SEQ ID NO: 1010454 - RNA, 19 nt, Artificial Sequence
  Description of Artificial Sequence: Synthetic oligonucleotide
gaugguuauccuggcacug

SEQ ID NO: 1010455 - RNA, 19 nt, Artificial Sequence
  Description of Artificial Sequence: Synthetic oligonucleotide
ugguucgcugagaauauuu

SEQ ID NO: 1010456 - RNA, 19 nt, Artificial Sequence
  Description of Artificial Sequence: Synthetic oligonucleotide
gguggugauccgcucaggg

SEQ ID NO: 1010457 - RNA, 19 nt, Artificial Sequence
  Description of Artificial Sequence: Synthetic oligonucleotide
ccgaauucgcuuuacaguc

SEQ ID NO: 1010458 - RNA, 19 nt, Artificial Sequence
  Description of Artificial Sequence: Synthetic oligonucleotide
aguaccuaaggagaggcuu

SEQ ID NO: 1010459 - RNA, 19 nt, Artificial Sequence
  Description of Artificial Sequence: Synthetic oligonucleotide
gguagagccaagaagggca

SEQ ID NO: 1010460 - RNA, 19 nt, Artificial Sequence
  Description of Artificial Sequence: Synthetic oligonucleotide
gguggagucuccuugggca

SEQ ID NO: 1010461 - RNA, 19 nt, Artificial Sequence
  Description of Artificial Sequence: Synthetic oligonucleotide
ugcuugguucccaaucuua

SEQ ID NO: 1010462 - RNA, 19 nt, Artificial Sequence
  Description of Artificial Sequence: Synthetic oligonucleotide
cucuagacaggcagugaug

SEQ ID NO: 1010463 - RNA, 19 nt, Artificial Sequence
  Description of Artificial Sequence: Synthetic oligonucleotide
ucgcugaucuugcugcccu

SEQ ID NO: 1010464 - RNA, 19 nt, Artificial Sequence
  Description of Artificial Sequence: Synthetic oligonucleotide
ggaugauaugggauagugg

SEQ ID NO: 1010465 - RNA, 19 nt, Artificial Sequence
  Description of Artificial Sequence: Synthetic oligonucleotide
ggucacaugccgcucgccg

SEQ ID NO: 1010466 - RNA, 19 nt, Artificial Sequence
  Description of Artificial Sequence: Synthetic oligonucleotide
cucugcuugguucccaauc

SEQ ID NO: 1010467 - RNA, 19 nt, Artificial Sequence
  Description of Artificial Sequence: Synthetic oligonucleotide
auagcuccuagaacccugg

SEQ ID NO: 1010468 - RNA, 19 nt, Artificial Sequence
  Description of Artificial Sequence: Synthetic oligonucleotide
ggauaguggcuccuuuggg

SEQ ID NO: 1010469 - RNA, 19 nt, Artificial Sequence
  Description of Artificial Sequence: Synthetic oligonucleotide
guggugauccgcucagggc

SEQ ID NO: 1010470 - RNA, 19 nt, Artificial Sequence
  Description of Artificial Sequence: Synthetic oligonucleotide
gaucauugggaaccaggaa

SEQ ID NO: 1010471 - RNA, 19 nt, Artificial Sequence
  Description of Artificial Sequence: Synthetic oligonucleotide
uccuugauuuuggugccug

SEQ ID NO: 1010472 - RNA, 19 nt, Artificial Sequence
  Description of Artificial Sequence: Synthetic oligonucleotide
gggcaguaggcuaaaagcc

SEQ ID NO: 1010473 - RNA, 19 nt, Artificial Sequence
  Description of Artificial Sequence: Synthetic oligonucleotide
cagagaugguuauccuggc

SEQ ID NO: 1010474 - RNA, 19 nt, Artificial Sequence
  Description of Artificial Sequence: Synthetic oligonucleotide
cuagacaggcagugaugag

SEQ ID NO: 1010475 - RNA, 19 nt, Artificial Sequence
  Description of Artificial Sequence: Synthetic oligonucleotide
cauggagacugcauggaaa

SEQ ID NO: 1010476 - RNA, 19 nt, Artificial Sequence
  Description of Artificial Sequence: Synthetic oligonucleotide
uagcuccuagaacccuggg

SEQ ID NO: 1010477 - RNA, 19 nt, Artificial Sequence
  Description of Artificial Sequence: Synthetic oligonucleotide
agacugcauggaaaacagc

SEQ ID NO: 1010478 - RNA, 19 nt, Artificial Sequence
  Description of Artificial Sequence: Synthetic oligonucleotide
cacucccucacucaaggca

SEQ ID NO: 1010479 - RNA, 19 nt, Artificial Sequence
  Description of Artificial Sequence: Synthetic oligonucleotide
aaacccugguugguggaga

SEQ ID NO: 1010480 - RNA, 19 nt, Artificial Sequence
  Description of Artificial Sequence: Synthetic oligonucleotide
uguaggccgccaagcccgg

SEQ ID NO: 1010481 - RNA, 19 nt, Artificial Sequence
  Description of Artificial Sequence: Synthetic oligonucleotide
ucugucgcacacacaggau

SEQ ID NO: 1010482 - RNA, 19 nt, Artificial Sequence
  Description of Artificial Sequence: Synthetic oligonucleotide
agacuuggccgucucuaga

SEQ ID NO: 1010483 - RNA, 19 nt, Artificial Sequence
  Description of Artificial Sequence: Synthetic oligonucleotide
gaaaggggugggcaggucu

SEQ ID NO: 1010484 - RNA, 19 nt, Artificial Sequence
  Description of Artificial Sequence: Synthetic oligonucleotide
agguagacuuggccgucuc

SEQ ID NO: 1010485 - RNA, 19 nt, Artificial Sequence
  Description of Artificial Sequence: Synthetic oligonucleotide
uccgaucacacagccaauc

SEQ ID NO: 1010486 - RNA, 19 nt, Artificial Sequence
  Description of Artificial Sequence: Synthetic oligonucleotide
uggcgcuugagaccccaug

SEQ ID NO: 1010487 - RNA, 19 nt, Artificial Sequence
  Description of Artificial Sequence: Synthetic oligonucleotide
cauggcagggcacuaggga

SEQ ID NO: 1010488 - RNA, 19 nt, Artificial Sequence
  Description of Artificial Sequence: Synthetic oligonucleotide
uggcguaaggcgugcccag

SEQ ID NO: 1010489 - RNA, 19 nt, Artificial Sequence
  Description of Artificial Sequence: Synthetic oligonucleotide
uggagagggagauggcgua

SEQ ID NO: 1010490 - RNA, 19 nt, Artificial Sequence
  Description of Artificial Sequence: Synthetic oligonucleotide
ucuggcauuacuggcgcuu

SEQ ID NO: 1010491 - RNA, 19 nt, Artificial Sequence
  Description of Artificial Sequence: Synthetic oligonucleotide
aauucgcuuuacagucucu

SEQ ID NO: 1010492 - RNA, 19 nt, Artificial Sequence
  Description of Artificial Sequence: Synthetic oligonucleotide
cagucuauuccagucaaaa

SEQ ID NO: 1010493 - RNA, 19 nt, Artificial Sequence
  Description of Artificial Sequence: Synthetic oligonucleotide
ggcuaaaagcccaaaggga

SEQ ID NO: 1010494 - RNA, 19 nt, Artificial Sequence
  Description of Artificial Sequence: Synthetic oligonucleotide
cugacaagcccagccaguc

SEQ ID NO: 1010495 - RNA, 19 nt, Artificial Sequence
  Description of Artificial Sequence: Synthetic oligonucleotide
ccaugcaucagcauccgca

SEQ ID NO: 1010496 - RNA, 19 nt, Artificial Sequence
  Description of Artificial Sequence: Synthetic oligonucleotide
uuggaugauaugggauagu

SEQ ID NO: 1010497 - RNA, 19 nt, Artificial Sequence
  Description of Artificial Sequence: Synthetic oligonucleotide
cccucagagaugguuaucc

SEQ ID NO: 1010498 - RNA, 19 nt, Artificial Sequence
  Description of Artificial Sequence: Synthetic oligonucleotide
cugcgagcuggucugugug

SEQ ID NO: 1010499 - RNA, 19 nt, Artificial Sequence
  Description of Artificial Sequence: Synthetic oligonucleotide
ucccauuggccgcugccau

SEQ ID NO: 1010500 - RNA, 19 nt, Artificial Sequence
  Description of Artificial Sequence: Synthetic oligonucleotide
uggcauuacuggcgcuuga

SEQ ID NO: 1010501 - RNA, 19 nt, Artificial Sequence
  Description of Artificial Sequence: Synthetic oligonucleotide
uaugugccccugacaucug

SEQ ID NO: 1010502 - RNA, 19 nt, Artificial Sequence
  Description of Artificial Sequence: Synthetic oligonucleotide
ggagaauuucugccguuca

SEQ ID NO: 1010503 - RNA, 19 nt, Artificial Sequence
  Description of Artificial Sequence: Synthetic oligonucleotide
guagagccaagaagggcac

SEQ ID NO: 1010504 - RNA, 19 nt, Artificial Sequence
  Description of Artificial Sequence: Synthetic oligonucleotide
caucugccggaucucgcug

SEQ ID NO: 1010505 - RNA, 19 nt, Artificial Sequence
  Description of Artificial Sequence: Synthetic oligonucleotide
ucccguagucucccggauc

SEQ ID NO: 1010506 - RNA, 19 nt, Artificial Sequence
  Description of Artificial Sequence: Synthetic oligonucleotide
gcgagaaaggggugggcag

SEQ ID NO: 1010507 - RNA, 19 nt, Artificial Sequence
  Description of Artificial Sequence: Synthetic oligonucleotide
gagaggaggacaguaccua

SEQ ID NO: 1010508 - RNA, 19 nt, Artificial Sequence
  Description of Artificial Sequence: Synthetic oligonucleotide
gcgucuggcauuacuggcg

SEQ ID NO: 1010509 - RNA, 19 nt, Artificial Sequence
  Description of Artificial Sequence: Synthetic oligonucleotide
aggccgccaagcccggcgg

SEQ ID NO: 1010510 - RNA, 19 nt, Artificial Sequence
  Description of Artificial Sequence: Synthetic oligonucleotide
gcuuggugaccuccgcagg

SEQ ID NO: 1010511 - RNA, 19 nt, Artificial Sequence
  Description of Artificial Sequence: Synthetic oligonucleotide
cgaucauggagacugcaug

SEQ ID NO: 1010512 - RNA, 19 nt, Artificial Sequence
  Description of Artificial Sequence: Synthetic oligonucleotide
gagaccccaugguggaguc

SEQ ID NO: 1010513 - RNA, 19 nt, Artificial Sequence
  Description of Artificial Sequence: Synthetic oligonucleotide
guucgcugagaauauuuau

SEQ ID NO: 1010514 - RNA, 19 nt, Artificial Sequence
  Description of Artificial Sequence: Synthetic oligonucleotide
ggcaguguaggccgccaag

SEQ ID NO: 1010515 - RNA, 19 nt, Artificial Sequence
  Description of Artificial Sequence: Synthetic oligonucleotide
acaugccgcucgccggcac

SEQ ID NO: 1010516 - RNA, 19 nt, Artificial Sequence
  Description of Artificial Sequence: Synthetic oligonucleotide
aggggaugaagagaagcuu

SEQ ID NO: 1010517 - RNA, 19 nt, Artificial Sequence
  Description of Artificial Sequence: Synthetic oligonucleotide
ugggcucccguagucuccc

SEQ ID NO: 1010518 - RNA, 19 nt, Artificial Sequence
  Description of Artificial Sequence: Synthetic oligonucleotide
gauccgcucagggcaggag

SEQ ID NO: 1010519 - RNA, 19 nt, Artificial Sequence
  Description of Artificial Sequence: Synthetic oligonucleotide
uacugcccaccuccuuccc

SEQ ID NO: 1010520 - RNA, 19 nt, Artificial Sequence
  Description of Artificial Sequence: Synthetic oligonucleotide
uugagaccccaugguggag

SEQ ID NO: 1010521 - RNA, 19 nt, Artificial Sequence
  Description of Artificial Sequence: Synthetic oligonucleotide
ggcauuacuggcgcuugag

SEQ ID NO: 1010522 - RNA, 19 nt, Artificial Sequence
  Description of Artificial Sequence: Synthetic oligonucleotide
augggauaguggcuccuuu

SEQ ID NO: 1010523 - RNA, 19 nt, Artificial Sequence
  Description of Artificial Sequence: Synthetic oligonucleotide
ugguggugauccgcucagg

SEQ ID NO: 1010524 - RNA, 19 nt, Artificial Sequence
  Description of Artificial Sequence: Synthetic oligonucleotide
gcaaagggaacugcauggc

SEQ ID NO: 1010525 - RNA, 19 nt, Artificial Sequence
  Description of Artificial Sequence: Synthetic oligonucleotide
aguaggcuaaaagcccaaa

SEQ ID NO: 1010526 - RNA, 19 nt, Artificial Sequence
  Description of Artificial Sequence: Synthetic oligonucleotide
ggagauggcguaaggcgug

SEQ ID NO: 1010527 - RNA, 19 nt, Artificial Sequence
  Description of Artificial Sequence: Synthetic oligonucleotide
cagagguagacuuggccgu

SEQ ID NO: 1010528 - RNA, 19 nt, Artificial Sequence
  Description of Artificial Sequence: Synthetic oligonucleotide
gacaugaguggccucccau

SEQ ID NO: 1010529 - RNA, 19 nt, Artificial Sequence
  Description of Artificial Sequence: Synthetic oligonucleotide
cuccuagaacccugggcca

SEQ ID NO: 1010530 - RNA, 19 nt, Artificial Sequence
  Description of Artificial Sequence: Synthetic oligonucleotide
cugccggcgguccugccug

SEQ ID NO: 1010531 - RNA, 19 nt, Artificial Sequence
  Description of Artificial Sequence: Synthetic oligonucleotide
cauugggaaccaggaacuc

SEQ ID NO: 1010532 - RNA, 19 nt, Artificial Sequence
  Description of Artificial Sequence: Synthetic oligonucleotide
ugauggucacaugccgcuc

SEQ ID NO: 1010533 - RNA, 19 nt, Artificial Sequence
  Description of Artificial Sequence: Synthetic oligonucleotide
gagaccggugagccaguga

SEQ ID NO: 1010534 - RNA, 19 nt, Artificial Sequence
  Description of Artificial Sequence: Synthetic oligonucleotide
aggcgcaaggucacaggag

SEQ ID NO: 1010535 - RNA, 19 nt, Artificial Sequence
  Description of Artificial Sequence: Synthetic oligonucleotide
uagagccaagaagggcaca

SEQ ID NO: 1010536 - RNA, 19 nt, Artificial Sequence
  Description of Artificial Sequence: Synthetic oligonucleotide
ccauggcagggcacuaggg

SEQ ID NO: 1010537 - RNA, 19 nt, Artificial Sequence
  Description of Artificial Sequence: Synthetic oligonucleotide
ccuugauuuuggugccugc

SEQ ID NO: 1010538 - RNA, 19 nt, Artificial Sequence
  Description of Artificial Sequence: Synthetic oligonucleotide
ugauccgcucagggcagga

SEQ ID NO: 1010539 - RNA, 19 nt, Artificial Sequence
  Description of Artificial Sequence: Synthetic oligonucleotide
gccauagcuccuagaaccc

SEQ ID NO: 1010540 - RNA, 19 nt, Artificial Sequence
  Description of Artificial Sequence: Synthetic oligonucleotide
ggggaugcauccaugcguc

SEQ ID NO: 1010541 - RNA, 19 nt, Artificial Sequence
  Description of Artificial Sequence: Synthetic oligonucleotide
acugggcgaggcaaaggga

SEQ ID NO: 1010542 - RNA, 19 nt, Artificial Sequence
  Description of Artificial Sequence: Synthetic oligonucleotide
gaccggugagccagugaug

SEQ ID NO: 1010543 - RNA, 19 nt, Artificial Sequence
  Description of Artificial Sequence: Synthetic oligonucleotide
acagcacguucuguggaau

SEQ ID NO: 1010544 - RNA, 19 nt, Artificial Sequence
  Description of Artificial Sequence: Synthetic oligonucleotide
auccaugcgucuggcauua

SEQ ID NO: 1010545 - RNA, 19 nt, Artificial Sequence
  Description of Artificial Sequence: Synthetic oligonucleotide
caggugguagagccaagaa

SEQ ID NO: 1010546 - RNA, 19 nt, Artificial Sequence
  Description of Artificial Sequence: Synthetic oligonucleotide
ggcucccguagucucccgg

SEQ ID NO: 1010547 - RNA, 19 nt, Artificial Sequence
  Description of Artificial Sequence: Synthetic oligonucleotide
uggagaccggugagccagu

SEQ ID NO: 1010548 - RNA, 19 nt, Artificial Sequence
  Description of Artificial Sequence: Synthetic oligonucleotide
uagucucccggaucuccuu

SEQ ID NO: 1010549 - RNA, 19 nt, Artificial Sequence
  Description of Artificial Sequence: Synthetic oligonucleotide
aucaggcaccccagacacg

SEQ ID NO: 1010550 - RNA, 19 nt, Artificial Sequence
  Description of Artificial Sequence: Synthetic oligonucleotide
gaacugggccccugcccca

SEQ ID NO: 1010551 - RNA, 19 nt, Artificial Sequence
  Description of Artificial Sequence: Synthetic oligonucleotide
cccugacaagcccagccag

SEQ ID NO: 1010552 - RNA, 19 nt, Artificial Sequence
  Description of Artificial Sequence: Synthetic oligonucleotide
cguccgaucacacagccaa

SEQ ID NO: 1010553 - RNA, 19 nt, Artificial Sequence
  Description of Artificial Sequence: Synthetic oligonucleotide
acuggcgcuugagacccca

SEQ ID NO: 1010554 - RNA, 19 nt, Artificial Sequence
  Description of Artificial Sequence: Synthetic oligonucleotide
cacucaaggcagagcccuc

SEQ ID NO: 1010555 - RNA, 19 nt, Artificial Sequence
  Description of Artificial Sequence: Synthetic oligonucleotide
cuugguucccaaucuuaau

SEQ ID NO: 1010556 - RNA, 19 nt, Artificial Sequence
  Description of Artificial Sequence: Synthetic oligonucleotide
cucccgaauucgcuuuaca

SEQ ID NO: 1010557 - RNA, 19 nt, Artificial Sequence
  Description of Artificial Sequence: Synthetic oligonucleotide
gucucuagacaggcaguga

SEQ ID NO: 1010558 - RNA, 19 nt, Artificial Sequence
  Description of Artificial Sequence: Synthetic oligonucleotide
uccugcgagcuggucugug

SEQ ID NO: 1010559 - RNA, 19 nt, Artificial Sequence
  Description of Artificial Sequence: Synthetic oligonucleotide
caguaggcuaaaagcccaa

SEQ ID NO: 1010560 - RNA, 19 nt, Artificial Sequence
  Description of Artificial Sequence: Synthetic oligonucleotide
gguucgcugagaauauuua

SEQ ID NO: 1010561 - RNA, 19 nt, Artificial Sequence
  Description of Artificial Sequence: Synthetic oligonucleotide
cagaucugucgcacacaca

SEQ ID NO: 1010562 - RNA, 19 nt, Artificial Sequence
  Description of Artificial Sequence: Synthetic oligonucleotide
gcuugguucccaaucuuaa

SEQ ID NO: 1010563 - RNA, 19 nt, Artificial Sequence
  Description of Artificial Sequence: Synthetic oligonucleotide
gugauccgcucagggcagg

SEQ ID NO: 1010564 - RNA, 19 nt, Artificial Sequence
  Description of Artificial Sequence: Synthetic oligonucleotide
gccauuccuggcauccaag

SEQ ID NO: 1010565 - RNA, 19 nt, Artificial Sequence
  Description of Artificial Sequence: Synthetic oligonucleotide
cccgaauucgcuuuacagu

SEQ ID NO: 1010566 - RNA, 19 nt, Artificial Sequence
  Description of Artificial Sequence: Synthetic oligonucleotide
uacuggcgcuugagacccc

SEQ ID NO: 1010567 - RNA, 19 nt, Artificial Sequence
  Description of Artificial Sequence: Synthetic oligonucleotide
accuaaggagaggcuugga

SEQ ID NO: 1010568 - RNA, 19 nt, Artificial Sequence
  Description of Artificial Sequence: Synthetic oligonucleotide
ccguucagcuuucuugcuc

SEQ ID NO: 1010569 - RNA, 19 nt, Artificial Sequence
  Description of Artificial Sequence: Synthetic oligonucleotide
accuccgcaggggccacug

SEQ ID NO: 1010570 - RNA, 19 nt, Artificial Sequence
  Description of Artificial Sequence: Synthetic oligonucleotide
cgcuugagaccccauggug

SEQ ID NO: 1010571 - RNA, 19 nt, Artificial Sequence
  Description of Artificial Sequence: Synthetic oligonucleotide
cuguggaauuggggagcag

SEQ ID NO: 1010572 - RNA, 19 nt, Artificial Sequence
  Description of Artificial Sequence: Synthetic oligonucleotide
ccagaauaacagcacagau

SEQ ID NO: 1010573 - RNA, 19 nt, Artificial Sequence
  Description of Artificial Sequence: Synthetic oligonucleotide
cucccucacucaaggcaga

SEQ ID NO: 1010574 - RNA, 19 nt, Artificial Sequence
  Description of Artificial Sequence: Synthetic oligonucleotide
gacacggugacagcacguu

SEQ ID NO: 1010575 - RNA, 19 nt, Artificial Sequence
  Description of Artificial Sequence: Synthetic oligonucleotide
ccgaucacacagccaauca

SEQ ID NO: 1010576 - RNA, 19 nt, Artificial Sequence
  Description of Artificial Sequence: Synthetic oligonucleotide
gcucccguagucucccgga

SEQ ID NO: 1010577 - RNA, 19 nt, Artificial Sequence
  Description of Artificial Sequence: Synthetic oligonucleotide
gcgaggcaaagggaacugc

SEQ ID NO: 1010578 - RNA, 19 nt, Artificial Sequence
  Description of Artificial Sequence: Synthetic oligonucleotide
ccacucccucacucaaggc

SEQ ID NO: 1010579 - RNA, 19 nt, Artificial Sequence
  Description of Artificial Sequence: Synthetic oligonucleotide
cacccucugcuugguuccc

SEQ ID NO: 1010580 - RNA, 19 nt, Artificial Sequence
  Description of Artificial Sequence: Synthetic oligonucleotide
ggagaggcuuggaugauau

SEQ ID NO: 1010581 - RNA, 19 nt, Artificial Sequence
  Description of Artificial Sequence: Synthetic oligonucleotide
caguaccuaaggagaggcu

SEQ ID NO: 1010582 - RNA, 19 nt, Artificial Sequence
  Description of Artificial Sequence: Synthetic oligonucleotide
gccagaaacuguccccucu

SEQ ID NO: 1010583 - RNA, 19 nt, Artificial Sequence
  Description of Artificial Sequence: Synthetic oligonucleotide
ggcgaucauggagacugca

SEQ ID NO: 1010584 - RNA, 19 nt, Artificial Sequence
  Description of Artificial Sequence: Synthetic oligonucleotide
gcucugcucccgaauucgc

SEQ ID NO: 1010585 - RNA, 19 nt, Artificial Sequence
  Description of Artificial Sequence: Synthetic oligonucleotide
agaccccaugguggagucu

SEQ ID NO: 1010586 - RNA, 19 nt, Artificial Sequence
  Description of Artificial Sequence: Synthetic oligonucleotide
gcgcaaggucacaggaggc

SEQ ID NO: 1010587 - RNA, 19 nt, Artificial Sequence
  Description of Artificial Sequence: Synthetic oligonucleotide
ggcguaaggcgugcccagc

SEQ ID NO: 1010588 - RNA, 19 nt, Artificial Sequence
  Description of Artificial Sequence: Synthetic oligonucleotide
cuccgcaggggccacugcu

SEQ ID NO: 1010589 - RNA, 19 nt, Artificial Sequence
  Description of Artificial Sequence: Synthetic oligonucleotide
ugccggcgguccugccugc

SEQ ID NO: 1010590 - RNA, 19 nt, Artificial Sequence
  Description of Artificial Sequence: Synthetic oligonucleotide
ggccacugcuccauacuga

SEQ ID NO: 1010591 - RNA, 19 nt, Artificial Sequence
  Description of Artificial Sequence: Synthetic oligonucleotide
ggcaccccagacacgguga

SEQ ID NO: 1010592 - RNA, 19 nt, Artificial Sequence
  Description of Artificial Sequence: Synthetic oligonucleotide
gggcugccauagcuccuag

SEQ ID NO: 1010593 - RNA, 19 nt, Artificial Sequence
  Description of Artificial Sequence: Synthetic oligonucleotide
cccguagucucccggaucu

SEQ ID NO: 1010594 - RNA, 19 nt, Artificial Sequence
  Description of Artificial Sequence: Synthetic oligonucleotide
ggagaccggugagccagug

SEQ ID NO: 1010595 - RNA, 19 nt, Artificial Sequence
  Description of Artificial Sequence: Synthetic oligonucleotide
ggagagggagauggcguaa

SEQ ID NO: 1010596 - RNA, 19 nt, Artificial Sequence
  Description of Artificial Sequence: Synthetic oligonucleotide
ggccgucagggguggcgag

SEQ ID NO: 1010597 - RNA, 19 nt, Artificial Sequence
  Description of Artificial Sequence: Synthetic oligonucleotide
uccaugcgucuggcauuac

SEQ ID NO: 1010598 - RNA, 19 nt, Artificial Sequence
  Description of Artificial Sequence: Synthetic oligonucleotide
gcccaaagggaaggaggac

SEQ ID NO: 1010599 - RNA, 19 nt, Artificial Sequence
  Description of Artificial Sequence: Synthetic oligonucleotide
cugcucccgaauucgcuuu

SEQ ID NO: 1010600 - RNA, 19 nt, Artificial Sequence
  Description of Artificial Sequence: Synthetic oligonucleotide
gcucccgaauucgcuuuac

SEQ ID NO: 1010601 - RNA, 19 nt, Artificial Sequence
  Description of Artificial Sequence: Synthetic oligonucleotide
gucuggcauuacuggcgcu

SEQ ID NO: 1010602 - RNA, 19 nt, Artificial Sequence
  Description of Artificial Sequence: Synthetic oligonucleotide
gcgcuugagaccccauggu

SEQ ID NO: 1010603 - RNA, 19 nt, Artificial Sequence
  Description of Artificial Sequence: Synthetic oligonucleotide
cagcacguucuguggaauu

SEQ ID NO: 1010604 - RNA, 19 nt, Artificial Sequence
  Description of Artificial Sequence: Synthetic oligonucleotide
ccccucucugaggaagaac

SEQ ID NO: 1010605 - RNA, 19 nt, Artificial Sequence
  Description of Artificial Sequence: Synthetic oligonucleotide
gggcgaggcaaagggaacu

SEQ ID NO: 1010606 - RNA, 19 nt, Artificial Sequence
  Description of Artificial Sequence: Synthetic oligonucleotide
cgcuuuacagucucucccu

SEQ ID NO: 1010607 - RNA, 19 nt, Artificial Sequence
  Description of Artificial Sequence: Synthetic oligonucleotide
ccucagagaugguuauccu

SEQ ID NO: 1010608 - RNA, 19 nt, Artificial Sequence
  Description of Artificial Sequence: Synthetic oligonucleotide
ccggcgguccugccugccc

SEQ ID NO: 1010609 - RNA, 19 nt, Artificial Sequence
  Description of Artificial Sequence: Synthetic oligonucleotide
cacaugccgcucgccggca

SEQ ID NO: 1010610 - RNA, 19 nt, Artificial Sequence
  Description of Artificial Sequence: Synthetic oligonucleotide
ccauuggccgcugccaucu

SEQ ID NO: 1010611 - RNA, 19 nt, Artificial Sequence
  Description of Artificial Sequence: Synthetic oligonucleotide
gggccgucagggguggcga

SEQ ID NO: 1010612 - RNA, 19 nt, Artificial Sequence
  Description of Artificial Sequence: Synthetic oligonucleotide
gcgaucauggagacugcau

SEQ ID NO: 1010613 - RNA, 19 nt, Artificial Sequence
  Description of Artificial Sequence: Synthetic oligonucleotide
cucccguagucucccggau

SEQ ID NO: 1010614 - RNA, 19 nt, Artificial Sequence
  Description of Artificial Sequence: Synthetic oligonucleotide
cccggcgguggcccugggg

SEQ ID NO: 1010615 - RNA, 19 nt, Artificial Sequence
  Description of Artificial Sequence: Synthetic oligonucleotide
ccaugcgucuggcauuacu

SEQ ID NO: 1010616 - RNA, 19 nt, Artificial Sequence
  Description of Artificial Sequence: Synthetic oligonucleotide
ccuagaacccugggccaga

SEQ ID NO: 1010617 - RNA, 19 nt, Artificial Sequence
  Description of Artificial Sequence: Synthetic oligonucleotide
gcccuggcguccgaucaca

SEQ ID NO: 1010618 - RNA, 19 nt, Artificial Sequence
  Description of Artificial Sequence: Synthetic oligonucleotide
gccgucagggguggcgaga

SEQ ID NO: 1010619 - RNA, 19 nt, Artificial Sequence
  Description of Artificial Sequence: Synthetic oligonucleotide
ccugcgagcuggucugugu

SEQ ID NO: 1010620 - RNA, 19 nt, Artificial Sequence
  Description of Artificial Sequence: Synthetic oligonucleotide
ccgucucuagacaggcagu

SEQ ID NO: 1010621 - RNA, 19 nt, Artificial Sequence
  Description of Artificial Sequence: Synthetic oligonucleotide
gcguccgaucacacagcca

SEQ ID NO: 1010622 - RNA, 19 nt, Artificial Sequence
  Description of Artificial Sequence: Synthetic oligonucleotide
cuggggcaguaggcuaaaa

SEQ ID NO: 1010623 - RNA, 19 nt, Artificial Sequence
  Description of Artificial Sequence: Synthetic oligonucleotide
cucccauggcagggcacua

SEQ ID NO: 1010624 - RNA, 19 nt, Artificial Sequence
  Description of Artificial Sequence: Synthetic oligonucleotide
guccgaucacacagccaau

SEQ ID NO: 1010625 - RNA, 19 nt, Artificial Sequence
  Description of Artificial Sequence: Synthetic oligonucleotide
cugguucgcugagaauauu

SEQ ID NO: 1010626 - RNA, 19 nt, Artificial Sequence
  Description of Artificial Sequence: Synthetic oligonucleotide
ggcgguccugccugccccu

SEQ ID NO: 1010627 - RNA, 19 nt, Artificial Sequence
  Description of Artificial Sequence: Synthetic oligonucleotide
ccguagucucccggaucuc

SEQ ID NO: 1010628 - RNA, 19 nt, Artificial Sequence
  Description of Artificial Sequence: Synthetic oligonucleotide
gccggcgguccugccugcc

SEQ ID NO: 1010629 - RNA, 19 nt, Artificial Sequence
  Description of Artificial Sequence: Synthetic oligonucleotide
gaccuccgcaggggccacu

SEQ ID NO: 1010630 - RNA, 19 nt, Artificial Sequence
  Description of Artificial Sequence: Synthetic oligonucleotide
ccggugagccagugauggu

SEQ ID NO: 1010631 - RNA, 19 nt, Artificial Sequence
  Description of Artificial Sequence: Synthetic oligonucleotide
ccggcacccucugcuuggu

SEQ ID NO: 1010632 - RNA, 19 nt, Artificial Sequence
  Description of Artificial Sequence: Synthetic oligonucleotide
uuuauucaaacccagaaug

SEQ ID NO: 1010633 - RNA, 19 nt, Artificial Sequence
  Description of Artificial Sequence: Synthetic oligonucleotide
auuucaacgagacagaaag

SEQ ID NO: 1010634 - RNA, 19 nt, Artificial Sequence
  Description of Artificial Sequence: Synthetic oligonucleotide
aaaaucaccaucacaagcc

SEQ ID NO: 1010635 - RNA, 19 nt, Artificial Sequence
  Description of Artificial Sequence: Synthetic oligonucleotide
aaguagacaaaccagagcu

SEQ ID NO: 1010636 - RNA, 19 nt, Artificial Sequence
  Description of Artificial Sequence: Synthetic oligonucleotide
caugacaacacauagcugg

SEQ ID NO: 1010637 - RNA, 19 nt, Artificial Sequence
  Description of Artificial Sequence: Synthetic oligonucleotide
aaaguagacaaaccagagc

SEQ ID NO: 1010638 - RNA, 19 nt, Artificial Sequence
  Description of Artificial Sequence: Synthetic oligonucleotide
aaugugugcuucuaugagc

SEQ ID NO: 1010639 - RNA, 19 nt, Artificial Sequence
  Description of Artificial Sequence: Synthetic oligonucleotide
aacaccauugcugaucugc

SEQ ID NO: 1010640 - RNA, 19 nt, Artificial Sequence
  Description of Artificial Sequence: Synthetic oligonucleotide
aaugucugaucacacuucg

SEQ ID NO: 1010641 - RNA, 19 nt, Artificial Sequence
  Description of Artificial Sequence: Synthetic oligonucleotide
uuagagaagucucugaccu

SEQ ID NO: 1010642 - RNA, 19 nt, Artificial Sequence
  Description of Artificial Sequence: Synthetic oligonucleotide
aggauaaagcaaccgaacc

SEQ ID NO: 1010643 - RNA, 19 nt, Artificial Sequence
  Description of Artificial Sequence: Synthetic oligonucleotide
uuauaauggugauuugugg

SEQ ID NO: 1010644 - RNA, 19 nt, Artificial Sequence
  Description of Artificial Sequence: Synthetic oligonucleotide
uguaguagccaccaaacac

SEQ ID NO: 1010645 - RNA, 19 nt, Artificial Sequence
  Description of Artificial Sequence: Synthetic oligonucleotide
auaauggugauuugugggg

SEQ ID NO: 1010646 - RNA, 19 nt, Artificial Sequence
  Description of Artificial Sequence: Synthetic oligonucleotide
ucuacuuccuguuucuggg

SEQ ID NO: 1010647 - RNA, 19 nt, Artificial Sequence
  Description of Artificial Sequence: Synthetic oligonucleotide
gaaaaucaccaucacaagc

SEQ ID NO: 1010648 - RNA, 19 nt, Artificial Sequence
  Description of Artificial Sequence: Synthetic oligonucleotide
uaagaguccaacaggaaca

SEQ ID NO: 1010649 - RNA, 19 nt, Artificial Sequence
  Description of Artificial Sequence: Synthetic oligonucleotide
aaaugugugcuucuaugag

SEQ ID NO: 1010650 - RNA, 19 nt, Artificial Sequence
  Description of Artificial Sequence: Synthetic oligonucleotide
gaaacagauccauaugucc

SEQ ID NO: 1010651 - RNA, 19 nt, Artificial Sequence
  Description of Artificial Sequence: Synthetic oligonucleotide
caagauaagggcuauggac

SEQ ID NO: 1010652 - RNA, 19 nt, Artificial Sequence
  Description of Artificial Sequence: Synthetic oligonucleotide
cuuauaauggugauuugug

SEQ ID NO: 1010653 - RNA, 19 nt, Artificial Sequence
  Description of Artificial Sequence: Synthetic oligonucleotide
uuacuuuguucuaagcaag

SEQ ID NO: 1010654 - RNA, 19 nt, Artificial Sequence
  Description of Artificial Sequence: Synthetic oligonucleotide
gaguugacagucucgauag

SEQ ID NO: 1010655 - RNA, 19 nt, Artificial Sequence
  Description of Artificial Sequence: Synthetic oligonucleotide
aacagauccauauguccuc

SEQ ID NO: 1010656 - RNA, 19 nt, Artificial Sequence
  Description of Artificial Sequence: Synthetic oligonucleotide
aguguuagccuuucucugc

SEQ ID NO: 1010657 - RNA, 19 nt, Artificial Sequence
  Description of Artificial Sequence: Synthetic oligonucleotide
aguuacuuuguucuaagca

SEQ ID NO: 1010658 - RNA, 19 nt, Artificial Sequence
  Description of Artificial Sequence: Synthetic oligonucleotide
cuuuguucuaagcaagucc

SEQ ID NO: 1010659 - RNA, 19 nt, Artificial Sequence
  Description of Artificial Sequence: Synthetic oligonucleotide
aacaaauacaucugccagu

SEQ ID NO: 1010660 - RNA, 19 nt, Artificial Sequence
  Description of Artificial Sequence: Synthetic oligonucleotide
uuaguguuagccuuucucu

SEQ ID NO: 1010661 - RNA, 19 nt, Artificial Sequence
  Description of Artificial Sequence: Synthetic oligonucleotide
agggcaaacauuuggcugg

SEQ ID NO: 1010662 - RNA, 19 nt, Artificial Sequence
  Description of Artificial Sequence: Synthetic oligonucleotide
uuuaucucaaugcuucaac

SEQ ID NO: 1010663 - RNA, 19 nt, Artificial Sequence
  Description of Artificial Sequence: Synthetic oligonucleotide
ugacagaauaucuccauca

SEQ ID NO: 1010664 - RNA, 19 nt, Artificial Sequence
  Description of Artificial Sequence: Synthetic oligonucleotide
uucaacgagacagaaagca

SEQ ID NO: 1010665 - RNA, 19 nt, Artificial Sequence
  Description of Artificial Sequence: Synthetic oligonucleotide
ucuguagggagaaacagau

SEQ ID NO: 1010666 - RNA, 19 nt, Artificial Sequence
  Description of Artificial Sequence: Synthetic oligonucleotide
ucucaaugcuucaacagga

SEQ ID NO: 1010667 - RNA, 19 nt, Artificial Sequence
  Description of Artificial Sequence: Synthetic oligonucleotide
guagaguagauguuggccc

SEQ ID NO: 1010668 - RNA, 19 nt, Artificial Sequence
  Description of Artificial Sequence: Synthetic oligonucleotide
aacccagaaugucugauca

SEQ ID NO: 1010669 - RNA, 19 nt, Artificial Sequence
  Description of Artificial Sequence: Synthetic oligonucleotide
gaagaauuccaacuuauaa

SEQ ID NO: 1010670 - RNA, 19 nt, Artificial Sequence
  Description of Artificial Sequence: Synthetic oligonucleotide
acuucguuccauaacagcg

SEQ ID NO: 1010671 - RNA, 19 nt, Artificial Sequence
  Description of Artificial Sequence: Synthetic oligonucleotide
aaacucuuagagaagucuc

SEQ ID NO: 1010672 - RNA, 19 nt, Artificial Sequence
  Description of Artificial Sequence: Synthetic oligonucleotide
ugucagaaaacaccauugc

SEQ ID NO: 1010673 - RNA, 19 nt, Artificial Sequence
  Description of Artificial Sequence: Synthetic oligonucleotide
ggucaaaggagauaggugc

SEQ ID NO: 1010674 - RNA, 19 nt, Artificial Sequence
  Description of Artificial Sequence: Synthetic oligonucleotide
auagaauacaacagcaaag

SEQ ID NO: 1010675 - RNA, 19 nt, Artificial Sequence
  Description of Artificial Sequence: Synthetic oligonucleotide
auaagggcuauggacaugg

SEQ ID NO: 1010676 - RNA, 19 nt, Artificial Sequence
  Description of Artificial Sequence: Synthetic oligonucleotide
ucaacgagacagaaagcag

SEQ ID NO: 1010677 - RNA, 19 nt, Artificial Sequence
  Description of Artificial Sequence: Synthetic oligonucleotide
gaccuugaggaguugacag

SEQ ID NO: 1010678 - RNA, 19 nt, Artificial Sequence
  Description of Artificial Sequence: Synthetic oligonucleotide
uuaucucaaugcuucaaca

SEQ ID NO: 1010679 - RNA, 19 nt, Artificial Sequence
  Description of Artificial Sequence: Synthetic oligonucleotide
uuccaacuuauaaugguga

SEQ ID NO: 1010680 - RNA, 19 nt, Artificial Sequence
  Description of Artificial Sequence: Synthetic oligonucleotide
uggaucuuggagcuggacc

SEQ ID NO: 1010681 - RNA, 19 nt, Artificial Sequence
  Description of Artificial Sequence: Synthetic oligonucleotide
gaauuccaacuuauaaugg

SEQ ID NO: 1010682 - RNA, 19 nt, Artificial Sequence
  Description of Artificial Sequence: Synthetic oligonucleotide
caacgagacagaaagcagc

SEQ ID NO: 1010683 - RNA, 19 nt, Artificial Sequence
  Description of Artificial Sequence: Synthetic oligonucleotide
auuccuaggucaccuggcc

SEQ ID NO: 1010684 - RNA, 19 nt, Artificial Sequence
  Description of Artificial Sequence: Synthetic oligonucleotide
gguauugucgauccggagg

SEQ ID NO: 1010685 - RNA, 19 nt, Artificial Sequence
  Description of Artificial Sequence: Synthetic oligonucleotide
guaagaguccaacaggaac

SEQ ID NO: 1010686 - RNA, 19 nt, Artificial Sequence
  Description of Artificial Sequence: Synthetic oligonucleotide
cugguagagaggauaaagc

SEQ ID NO: 1010687 - RNA, 19 nt, Artificial Sequence
  Description of Artificial Sequence: Synthetic oligonucleotide
uguucuaagcaaguccagg

SEQ ID NO: 1010688 - RNA, 19 nt, Artificial Sequence
  Description of Artificial Sequence: Synthetic oligonucleotide
guuacuuuguucuaagcaa

SEQ ID NO: 1010689 - RNA, 19 nt, Artificial Sequence
  Description of Artificial Sequence: Synthetic oligonucleotide
auccauauguccucuucac

SEQ ID NO: 1010690 - RNA, 19 nt, Artificial Sequence
  Description of Artificial Sequence: Synthetic oligonucleotide
uggaccuucacacaagaua

SEQ ID NO: 1010691 - RNA, 19 nt, Artificial Sequence
  Description of Artificial Sequence: Synthetic oligonucleotide
acacauagcuggcuuaauc

SEQ ID NO: 1010692 - RNA, 19 nt, Artificial Sequence
  Description of Artificial Sequence: Synthetic oligonucleotide
agaaaaucaccaucacaag

SEQ ID NO: 1010693 - RNA, 19 nt, Artificial Sequence
  Description of Artificial Sequence: Synthetic oligonucleotide
aaaucaccaucacaagcca

SEQ ID NO: 1010694 - RNA, 19 nt, Artificial Sequence
  Description of Artificial Sequence: Synthetic oligonucleotide
agauuccuaggucaccugg

SEQ ID NO: 1010695 - RNA, 19 nt, Artificial Sequence
  Description of Artificial Sequence: Synthetic oligonucleotide
cacaagauaagggcuaugg

SEQ ID NO: 1010696 - RNA, 19 nt, Artificial Sequence
  Description of Artificial Sequence: Synthetic oligonucleotide
agaguuacuuuguucuaag

SEQ ID NO: 1010697 - RNA, 19 nt, Artificial Sequence
  Description of Artificial Sequence: Synthetic oligonucleotide
acagguauugucgauccgg

SEQ ID NO: 1010698 - RNA, 19 nt, Artificial Sequence
  Description of Artificial Sequence: Synthetic oligonucleotide
gcuucuaugagcuggcagg

SEQ ID NO: 1010699 - RNA, 19 nt, Artificial Sequence
  Description of Artificial Sequence: Synthetic oligonucleotide
ucucugaccucuuuauuca

SEQ ID NO: 1010700 - RNA, 19 nt, Artificial Sequence
  Description of Artificial Sequence: Synthetic oligonucleotide
ucuguguuaguguuagccu

SEQ ID NO: 1010701 - RNA, 19 nt, Artificial Sequence
  Description of Artificial Sequence: Synthetic oligonucleotide
gaaccaugggacuuuucag

SEQ ID NO: 1010702 - RNA, 19 nt, Artificial Sequence
  Description of Artificial Sequence: Synthetic oligonucleotide
augacagaauaucuccauc

SEQ ID NO: 1010703 - RNA, 19 nt, Artificial Sequence
  Description of Artificial Sequence: Synthetic oligonucleotide
agaaugucugaucacacuu

SEQ ID NO: 1010704 - RNA, 19 nt, Artificial Sequence
  Description of Artificial Sequence: Synthetic oligonucleotide
cacugagucagucaucccc

SEQ ID NO: 1010705 - RNA, 19 nt, Artificial Sequence
  Description of Artificial Sequence: Synthetic oligonucleotide
ugucugaucacacuucguu

SEQ ID NO: 1010706 - RNA, 19 nt, Artificial Sequence
  Description of Artificial Sequence: Synthetic oligonucleotide
gagaggauaaagcaaccga

SEQ ID NO: 1010707 - RNA, 19 nt, Artificial Sequence
  Description of Artificial Sequence: Synthetic oligonucleotide
agucagaguggcaagcagc

SEQ ID NO: 1010708 - RNA, 19 nt, Artificial Sequence
  Description of Artificial Sequence: Synthetic oligonucleotide
aagggcuauggacauggug

SEQ ID NO: 1010709 - RNA, 19 nt, Artificial Sequence
  Description of Artificial Sequence: Synthetic oligonucleotide
agucugugugucgaguucc

SEQ ID NO: 1010710 - RNA, 19 nt, Artificial Sequence
  Description of Artificial Sequence: Synthetic oligonucleotide
ugacagucucgauagaaaa

SEQ ID NO: 1010711 - RNA, 19 nt, Artificial Sequence
  Description of Artificial Sequence: Synthetic oligonucleotide
caugaucuaggucuuauca

SEQ ID NO: 1010712 - RNA, 19 nt, Artificial Sequence
  Description of Artificial Sequence: Synthetic oligonucleotide
agaaacagauccauauguc

SEQ ID NO: 1010713 - RNA, 19 nt, Artificial Sequence
  Description of Artificial Sequence: Synthetic oligonucleotide
ugaucuaggucuuaucauu

SEQ ID NO: 1010714 - RNA, 19 nt, Artificial Sequence
  Description of Artificial Sequence: Synthetic oligonucleotide
acagucucgauagaaaaga

SEQ ID NO: 1010715 - RNA, 19 nt, Artificial Sequence
  Description of Artificial Sequence: Synthetic oligonucleotide
cacccggugucucagaagg

SEQ ID NO: 1010716 - RNA, 19 nt, Artificial Sequence
  Description of Artificial Sequence: Synthetic oligonucleotide
aaaaccaugaaggcuggau

SEQ ID NO: 1010717 - RNA, 19 nt, Artificial Sequence
  Description of Artificial Sequence: Synthetic oligonucleotide
aagauagaggugggcaggg

SEQ ID NO: 1010718 - RNA, 19 nt, Artificial Sequence
  Description of Artificial Sequence: Synthetic oligonucleotide
gcugauagaguucagucug

SEQ ID NO: 1010719 - RNA, 19 nt, Artificial Sequence
  Description of Artificial Sequence: Synthetic oligonucleotide
caucugaacucacuguccc

SEQ ID NO: 1010720 - RNA, 19 nt, Artificial Sequence
  Description of Artificial Sequence: Synthetic oligonucleotide
ugcuucuaugagcuggcag

SEQ ID NO: 1010721 - RNA, 19 nt, Artificial Sequence
  Description of Artificial Sequence: Synthetic oligonucleotide
agagaggauaaagcaaccg

SEQ ID NO: 1010722 - RNA, 19 nt, Artificial Sequence
  Description of Artificial Sequence: Synthetic oligonucleotide
cugguagaguagauguugg

SEQ ID NO: 1010723 - RNA, 19 nt, Artificial Sequence
  Description of Artificial Sequence: Synthetic oligonucleotide
aaagugucuccaaaugcug

SEQ ID NO: 1010724 - RNA, 19 nt, Artificial Sequence
  Description of Artificial Sequence: Synthetic oligonucleotide
aagucucugaccucuuuau

SEQ ID NO: 1010725 - RNA, 19 nt, Artificial Sequence
  Description of Artificial Sequence: Synthetic oligonucleotide
uuucagaguuacuuuguuc

SEQ ID NO: 1010726 - RNA, 19 nt, Artificial Sequence
  Description of Artificial Sequence: Synthetic oligonucleotide
cagcccaagauagaggugg

SEQ ID NO: 1010727 - RNA, 19 nt, Artificial Sequence
  Description of Artificial Sequence: Synthetic oligonucleotide
ucauuucuuggacaugguc

SEQ ID NO: 1010728 - RNA, 19 nt, Artificial Sequence
  Description of Artificial Sequence: Synthetic oligonucleotide
uuucaacgagacagaaagc

SEQ ID NO: 1010729 - RNA, 19 nt, Artificial Sequence
  Description of Artificial Sequence: Synthetic oligonucleotide
cauaacagcggagugucag

SEQ ID NO: 1010730 - RNA, 19 nt, Artificial Sequence
  Description of Artificial Sequence: Synthetic oligonucleotide
ucuaggucuuaucauucaa

SEQ ID NO: 1010731 - RNA, 19 nt, Artificial Sequence
  Description of Artificial Sequence: Synthetic oligonucleotide
agugucagaaaacaccauu

SEQ ID NO: 1010732 - RNA, 19 nt, Artificial Sequence
  Description of Artificial Sequence: Synthetic oligonucleotide
cugaccucuuuauucaaac

SEQ ID NO: 1010733 - RNA, 19 nt, Artificial Sequence
  Description of Artificial Sequence: Synthetic oligonucleotide
guauugucgauccggagga

SEQ ID NO: 1010734 - RNA, 19 nt, Artificial Sequence
  Description of Artificial Sequence: Synthetic oligonucleotide
agaguggcaagcagcacgc

SEQ ID NO: 1010735 - RNA, 19 nt, Artificial Sequence
  Description of Artificial Sequence: Synthetic oligonucleotide
agcugauagaguucagucu

SEQ ID NO: 1010736 - RNA, 19 nt, Artificial Sequence
  Description of Artificial Sequence: Synthetic oligonucleotide
uugucgauccggaggacug

SEQ ID NO: 1010737 - RNA, 19 nt, Artificial Sequence
  Description of Artificial Sequence: Synthetic oligonucleotide
gcugacggcagucagagug

SEQ ID NO: 1010738 - RNA, 19 nt, Artificial Sequence
  Description of Artificial Sequence: Synthetic oligonucleotide
agucucgauagaaaagagg

SEQ ID NO: 1010739 - RNA, 19 nt, Artificial Sequence
  Description of Artificial Sequence: Synthetic oligonucleotide
aggucaaaguagacaaacc

SEQ ID NO: 1010740 - RNA, 19 nt, Artificial Sequence
  Description of Artificial Sequence: Synthetic oligonucleotide
aaccagagcuggaucacac

SEQ ID NO: 1010741 - RNA, 19 nt, Artificial Sequence
  Description of Artificial Sequence: Synthetic oligonucleotide
ucacacaagauaagggcua

SEQ ID NO: 1010742 - RNA, 19 nt, Artificial Sequence
  Description of Artificial Sequence: Synthetic oligonucleotide
uucguuccauaacagcgga

SEQ ID NO: 1010743 - RNA, 19 nt, Artificial Sequence
  Description of Artificial Sequence: Synthetic oligonucleotide
uccugugcccaaaaugugu

SEQ ID NO: 1010744 - RNA, 19 nt, Artificial Sequence
  Description of Artificial Sequence: Synthetic oligonucleotide
gauccauauguccucuuca

SEQ ID NO: 1010745 - RNA, 19 nt, Artificial Sequence
  Description of Artificial Sequence: Synthetic oligonucleotide
gacagucucgauagaaaag

SEQ ID NO: 1010746 - RNA, 19 nt, Artificial Sequence
  Description of Artificial Sequence: Synthetic oligonucleotide
ucuuaucauucaaccacgu

SEQ ID NO: 1010747 - RNA, 19 nt, Artificial Sequence
  Description of Artificial Sequence: Synthetic oligonucleotide
auuccaacuuauaauggug

SEQ ID NO: 1010748 - RNA, 19 nt, Artificial Sequence
  Description of Artificial Sequence: Synthetic oligonucleotide
acagcggagugucagaaaa

SEQ ID NO: 1010749 - RNA, 19 nt, Artificial Sequence
  Description of Artificial Sequence: Synthetic oligonucleotide
ucagaagggcuccauuggu

SEQ ID NO: 1010750 - RNA, 19 nt, Artificial Sequence
  Description of Artificial Sequence: Synthetic oligonucleotide
aacgagacagaaagcagca

SEQ ID NO: 1010751 - RNA, 19 nt, Artificial Sequence
  Description of Artificial Sequence: Synthetic oligonucleotide
guucagucugcaugagugg

SEQ ID NO: 1010752 - RNA, 19 nt, Artificial Sequence
  Description of Artificial Sequence: Synthetic oligonucleotide
aggagccgaguguaguagc

SEQ ID NO: 1010753 - RNA, 19 nt, Artificial Sequence
  Description of Artificial Sequence: Synthetic oligonucleotide
ugaguggucuuuccugaug

SEQ ID NO: 1010754 - RNA, 19 nt, Artificial Sequence
  Description of Artificial Sequence: Synthetic oligonucleotide
aggggcaugggacccuugc

SEQ ID NO: 1010755 - RNA, 19 nt, Artificial Sequence
  Description of Artificial Sequence: Synthetic oligonucleotide
augaagauuccuaggucac

SEQ ID NO: 1010756 - RNA, 19 nt, Artificial Sequence
  Description of Artificial Sequence: Synthetic oligonucleotide
acaagauaagggcuaugga

SEQ ID NO: 1010757 - RNA, 19 nt, Artificial Sequence
  Description of Artificial Sequence: Synthetic oligonucleotide
aacucuuagagaagucucu

SEQ ID NO: 1010758 - RNA, 19 nt, Artificial Sequence
  Description of Artificial Sequence: Synthetic oligonucleotide
aguguuggaccuugaggag

SEQ ID NO: 1010759 - RNA, 19 nt, Artificial Sequence
  Description of Artificial Sequence: Synthetic oligonucleotide
ugucgaguucccauuggcu

SEQ ID NO: 1010760 - RNA, 19 nt, Artificial Sequence
  Description of Artificial Sequence: Synthetic oligonucleotide
gauccggaggacugugagg

SEQ ID NO: 1010761 - RNA, 19 nt, Artificial Sequence
  Description of Artificial Sequence: Synthetic oligonucleotide
uccauaacagcggaguguc

SEQ ID NO: 1010762 - RNA, 19 nt, Artificial Sequence
  Description of Artificial Sequence: Synthetic oligonucleotide
caagauagaggugggcagg

SEQ ID NO: 1010763 - RNA, 19 nt, Artificial Sequence
  Description of Artificial Sequence: Synthetic oligonucleotide
ucacacuucguuccauaac

SEQ ID NO: 1010764 - RNA, 19 nt, Artificial Sequence
  Description of Artificial Sequence: Synthetic oligonucleotide
cagggcaaacauuuggcug

SEQ ID NO: 1010765 - RNA, 19 nt, Artificial Sequence
  Description of Artificial Sequence: Synthetic oligonucleotide
gaggauaaagcaaccgaac

SEQ ID NO: 1010766 - RNA, 19 nt, Artificial Sequence
  Description of Artificial Sequence: Synthetic oligonucleotide
augaucuaggucuuaucau

SEQ ID NO: 1010767 - RNA, 19 nt, Artificial Sequence
  Description of Artificial Sequence: Synthetic oligonucleotide
ucaaacucuuagagaaguc

SEQ ID NO: 1010768 - RNA, 19 nt, Artificial Sequence
  Description of Artificial Sequence: Synthetic oligonucleotide
guagauguuggcccacacc

SEQ ID NO: 1010769 - RNA, 19 nt, Artificial Sequence
  Description of Artificial Sequence: Synthetic oligonucleotide
cacuucguuccauaacagc

SEQ ID NO: 1010770 - RNA, 19 nt, Artificial Sequence
  Description of Artificial Sequence: Synthetic oligonucleotide
ucuuggacauggucggaca

SEQ ID NO: 1010771 - RNA, 19 nt, Artificial Sequence
  Description of Artificial Sequence: Synthetic oligonucleotide
cuucuaugagcuggcaggg

SEQ ID NO: 1010772 - RNA, 19 nt, Artificial Sequence
  Description of Artificial Sequence: Synthetic oligonucleotide
agguauauauacaggagaa

SEQ ID NO: 1010773 - RNA, 19 nt, Artificial Sequence
  Description of Artificial Sequence: Synthetic oligonucleotide
gguagaguagauguuggcc

SEQ ID NO: 1010774 - RNA, 19 nt, Artificial Sequence
  Description of Artificial Sequence: Synthetic oligonucleotide
cugcuuuucagcaaggacu

SEQ ID NO: 1010775 - RNA, 19 nt, Artificial Sequence
  Description of Artificial Sequence: Synthetic oligonucleotide
guccaacaggaacaaauac

SEQ ID NO: 1010776 - RNA, 19 nt, Artificial Sequence
  Description of Artificial Sequence: Synthetic oligonucleotide
uguguuaguguuagccuuu

SEQ ID NO: 1010777 - RNA, 19 nt, Artificial Sequence
  Description of Artificial Sequence: Synthetic oligonucleotide
uccaacuuauaauggugau

SEQ ID NO: 1010778 - RNA, 19 nt, Artificial Sequence
  Description of Artificial Sequence: Synthetic oligonucleotide
ugcgcaaaaccagucugag

SEQ ID NO: 1010779 - RNA, 19 nt, Artificial Sequence
  Description of Artificial Sequence: Synthetic oligonucleotide
ugggacuuuucagaguuac

SEQ ID NO: 1010780 - RNA, 19 nt, Artificial Sequence
  Description of Artificial Sequence: Synthetic oligonucleotide
ucucgauagaaaagaggua

SEQ ID NO: 1010781 - RNA, 19 nt, Artificial Sequence
  Description of Artificial Sequence: Synthetic oligonucleotide
ucgauagaaaagagguaua

SEQ ID NO: 1010782 - RNA, 19 nt, Artificial Sequence
  Description of Artificial Sequence: Synthetic oligonucleotide
cugacggcagucagagugg

SEQ ID NO: 1010783 - RNA, 19 nt, Artificial Sequence
  Description of Artificial Sequence: Synthetic oligonucleotide
uuccauaacagcggagugu

SEQ ID NO: 1010784 - RNA, 19 nt, Artificial Sequence
  Description of Artificial Sequence: Synthetic oligonucleotide
gaucuaggucuuaucauuc

SEQ ID NO: 1010785 - RNA, 19 nt, Artificial Sequence
  Description of Artificial Sequence: Synthetic oligonucleotide
uugaagcaugaguaagagu

SEQ ID NO: 1010786 - RNA, 19 nt, Artificial Sequence
  Description of Artificial Sequence: Synthetic oligonucleotide
agaggauaaagcaaccgaa

SEQ ID NO: 1010787 - RNA, 19 nt, Artificial Sequence
  Description of Artificial Sequence: Synthetic oligonucleotide
cuggcauccuuccacugag

SEQ ID NO: 1010788 - RNA, 19 nt, Artificial Sequence
  Description of Artificial Sequence: Synthetic oligonucleotide
gauuccuaggucaccuggc

SEQ ID NO: 1010789 - RNA, 19 nt, Artificial Sequence
  Description of Artificial Sequence: Synthetic oligonucleotide
cagucucgauagaaaagag

SEQ ID NO: 1010790 - RNA, 19 nt, Artificial Sequence
  Description of Artificial Sequence: Synthetic oligonucleotide
acagugcucacucccgucu

SEQ ID NO: 1010791 - RNA, 19 nt, Artificial Sequence
  Description of Artificial Sequence: Synthetic oligonucleotide
ugauuucaucugaacucac

SEQ ID NO: 1010792 - RNA, 19 nt, Artificial Sequence
  Description of Artificial Sequence: Synthetic oligonucleotide
ucagucucggaggaagaug

SEQ ID NO: 1010793 - RNA, 19 nt, Artificial Sequence
  Description of Artificial Sequence: Synthetic oligonucleotide
guuccauaacagcggagug

SEQ ID NO: 1010794 - RNA, 19 nt, Artificial Sequence
  Description of Artificial Sequence: Synthetic oligonucleotide
aucuaggucuuaucauuca

SEQ ID NO: 1010795 - RNA, 19 nt, Artificial Sequence
  Description of Artificial Sequence: Synthetic oligonucleotide
ggagaaacagauccauaug

SEQ ID NO: 1010796 - RNA, 19 nt, Artificial Sequence
  Description of Artificial Sequence: Synthetic oligonucleotide
acgccugcccacugguugc

SEQ ID NO: 1010797 - RNA, 19 nt, Artificial Sequence
  Description of Artificial Sequence: Synthetic oligonucleotide
cagucucggaggaagauga

SEQ ID NO: 1010798 - RNA, 19 nt, Artificial Sequence
  Description of Artificial Sequence: Synthetic oligonucleotide
acccagaaugucugaucac

SEQ ID NO: 1010799 - RNA, 19 nt, Artificial Sequence
  Description of Artificial Sequence: Synthetic oligonucleotide
auaacagcggagugucaga

SEQ ID NO: 1010800 - RNA, 19 nt, Artificial Sequence
  Description of Artificial Sequence: Synthetic oligonucleotide
gaugcggaaagcuggauuu

SEQ ID NO: 1010801 - RNA, 19 nt, Artificial Sequence
  Description of Artificial Sequence: Synthetic oligonucleotide
auacaucugccaguucagg

SEQ ID NO: 1010802 - RNA, 19 nt, Artificial Sequence
  Description of Artificial Sequence: Synthetic oligonucleotide
ucaugaucuaggucuuauc

SEQ ID NO: 1010803 - RNA, 19 nt, Artificial Sequence
  Description of Artificial Sequence: Synthetic oligonucleotide
gucugaucacacuucguuc

SEQ ID NO: 1010804 - RNA, 19 nt, Artificial Sequence
  Description of Artificial Sequence: Synthetic oligonucleotide
agcggagugucagaaaaca

SEQ ID NO: 1010805 - RNA, 19 nt, Artificial Sequence
  Description of Artificial Sequence: Synthetic oligonucleotide
caugaguggucuuuccuga

SEQ ID NO: 1010806 - RNA, 19 nt, Artificial Sequence
  Description of Artificial Sequence: Synthetic oligonucleotide
ugugugucgaguucccauu

SEQ ID NO: 1010807 - RNA, 19 nt, Artificial Sequence
  Description of Artificial Sequence: Synthetic oligonucleotide
ugugggcagucuucaaacu

SEQ ID NO: 1010808 - RNA, 19 nt, Artificial Sequence
  Description of Artificial Sequence: Synthetic oligonucleotide
agguauugucgauccggag

SEQ ID NO: 1010809 - RNA, 19 nt, Artificial Sequence
  Description of Artificial Sequence: Synthetic oligonucleotide
gugucgaguucccauuggc

SEQ ID NO: 1010810 - RNA, 19 nt, Artificial Sequence
  Description of Artificial Sequence: Synthetic oligonucleotide
gcagaagggaugcggaaag

SEQ ID NO: 1010811 - RNA, 19 nt, Artificial Sequence
  Description of Artificial Sequence: Synthetic oligonucleotide
uggaucacacucuggcauc

SEQ ID NO: 1010812 - RNA, 19 nt, Artificial Sequence
  Description of Artificial Sequence: Synthetic oligonucleotide
aggcugacggcagucagag

SEQ ID NO: 1010813 - RNA, 19 nt, Artificial Sequence
  Description of Artificial Sequence: Synthetic oligonucleotide
cacauagcuggcuuaaucu

SEQ ID NO: 1010814 - RNA, 19 nt, Artificial Sequence
  Description of Artificial Sequence: Synthetic oligonucleotide
ucguuccauaacagcggag

SEQ ID NO: 1010815 - RNA, 19 nt, Artificial Sequence
  Description of Artificial Sequence: Synthetic oligonucleotide
cuggcaggggcaugggacc

SEQ ID NO: 1010816 - RNA, 19 nt, Artificial Sequence
  Description of Artificial Sequence: Synthetic oligonucleotide
caauuugccacaacuggua

SEQ ID NO: 1010817 - RNA, 19 nt, Artificial Sequence
  Description of Artificial Sequence: Synthetic oligonucleotide
guaguagccaccaaacacu

SEQ ID NO: 1010818 - RNA, 19 nt, Artificial Sequence
  Description of Artificial Sequence: Synthetic oligonucleotide
aguagacaaaccagagcug

SEQ ID NO: 1010819 - RNA, 19 nt, Artificial Sequence
  Description of Artificial Sequence: Synthetic oligonucleotide
cucuguagggagaaacaga

SEQ ID NO: 1010820 - RNA, 19 nt, Artificial Sequence
  Description of Artificial Sequence: Synthetic oligonucleotide
acaacacauagcuggcuua

SEQ ID NO: 1010821 - RNA, 19 nt, Artificial Sequence
  Description of Artificial Sequence: Synthetic oligonucleotide
gcaugaguggucuuuccug

SEQ ID NO: 1010822 - RNA, 19 nt, Artificial Sequence
  Description of Artificial Sequence: Synthetic oligonucleotide
gaagauuccuaggucaccu

SEQ ID NO: 1010823 - RNA, 19 nt, Artificial Sequence
  Description of Artificial Sequence: Synthetic oligonucleotide
acugagucagucaucccca

SEQ ID NO: 1010824 - RNA, 19 nt, Artificial Sequence
  Description of Artificial Sequence: Synthetic oligonucleotide
cucgauagaaaagagguau

SEQ ID NO: 1010825 - RNA, 19 nt, Artificial Sequence
  Description of Artificial Sequence: Synthetic oligonucleotide
aacagcggagugucagaaa

SEQ ID NO: 1010826 - RNA, 19 nt, Artificial Sequence
  Description of Artificial Sequence: Synthetic oligonucleotide
gagucugugugucgaguuc

SEQ ID NO: 1010827 - RNA, 19 nt, Artificial Sequence
  Description of Artificial Sequence: Synthetic oligonucleotide
gaguccaacaggaacaaau

SEQ ID NO: 1010828 - RNA, 19 nt, Artificial Sequence
  Description of Artificial Sequence: Synthetic oligonucleotide
aguagccaccaaacacugc

SEQ ID NO: 1010829 - RNA, 19 nt, Artificial Sequence
  Description of Artificial Sequence: Synthetic oligonucleotide
ggaccuucacacaagauaa

SEQ ID NO: 1010830 - RNA, 19 nt, Artificial Sequence
  Description of Artificial Sequence: Synthetic oligonucleotide
auugucgauccggaggacu

SEQ ID NO: 1010831 - RNA, 19 nt, Artificial Sequence
  Description of Artificial Sequence: Synthetic oligonucleotide
uaacagcggagugucagaa

SEQ ID NO: 1010832 - RNA, 19 nt, Artificial Sequence
  Description of Artificial Sequence: Synthetic oligonucleotide
agcauccggaacaagcuga

SEQ ID NO: 1010833 - RNA, 19 nt, Artificial Sequence
  Description of Artificial Sequence: Synthetic oligonucleotide
uguuagccuuucucugcug

SEQ ID NO: 1010834 - RNA, 19 nt, Artificial Sequence
  Description of Artificial Sequence: Synthetic oligonucleotide
agcaaguccaggucauuua

SEQ ID NO: 1010835 - RNA, 19 nt, Artificial Sequence
  Description of Artificial Sequence: Synthetic oligonucleotide
aucaugaucuaggucuuau

SEQ ID NO: 1010836 - RNA, 19 nt, Artificial Sequence
  Description of Artificial Sequence: Synthetic oligonucleotide
acuguuuaucucaaugcuu

SEQ ID NO: 1010837 - RNA, 19 nt, Artificial Sequence
  Description of Artificial Sequence: Synthetic oligonucleotide
uuggaccuugaggaguuga

SEQ ID NO: 1010838 - RNA, 19 nt, Artificial Sequence
  Description of Artificial Sequence: Synthetic oligonucleotide
gcugcgcaaaaccagucug

SEQ ID NO: 1010839 - RNA, 19 nt, Artificial Sequence
  Description of Artificial Sequence: Synthetic oligonucleotide
agccucaggucuguguuag

SEQ ID NO: 1010840 - RNA, 19 nt, Artificial Sequence
  Description of Artificial Sequence: Synthetic oligonucleotide
aaacaccauugcugaucug

SEQ ID NO: 1010841 - RNA, 19 nt, Artificial Sequence
  Description of Artificial Sequence: Synthetic oligonucleotide
guggcaagcagcacgccug

SEQ ID NO: 1010842 - RNA, 19 nt, Artificial Sequence
  Description of Artificial Sequence: Synthetic oligonucleotide
gaacaagcugauagaguuc

SEQ ID NO: 1010843 - RNA, 19 nt, Artificial Sequence
  Description of Artificial Sequence: Synthetic oligonucleotide
auaaagcaaccgaaccaug

SEQ ID NO: 1010844 - RNA, 19 nt, Artificial Sequence
  Description of Artificial Sequence: Synthetic oligonucleotide
agcgacucaccuccacuug

SEQ ID NO: 1010845 - RNA, 19 nt, Artificial Sequence
  Description of Artificial Sequence: Synthetic oligonucleotide
cacgccugcccacugguug

SEQ ID NO: 1010846 - RNA, 19 nt, Artificial Sequence
  Description of Artificial Sequence: Synthetic oligonucleotide
gagcuggaccuucacacaa

SEQ ID NO: 1010847 - RNA, 19 nt, Artificial Sequence
  Description of Artificial Sequence: Synthetic oligonucleotide
gauaagggcuauggacaug

SEQ ID NO: 1010848 - RNA, 19 nt, Artificial Sequence
  Description of Artificial Sequence: Synthetic oligonucleotide
caccauugcugaucugcag

SEQ ID NO: 1010849 - RNA, 19 nt, Artificial Sequence
  Description of Artificial Sequence: Synthetic oligonucleotide
gaccuucacacaagauaag

SEQ ID NO: 1010850 - RNA, 19 nt, Artificial Sequence
  Description of Artificial Sequence: Synthetic oligonucleotide
caacugguagagaggauaa

SEQ ID NO: 1010851 - RNA, 19 nt, Artificial Sequence
  Description of Artificial Sequence: Synthetic oligonucleotide
cugcaugaguggucuuucc

SEQ ID NO: 1010852 - RNA, 19 nt, Artificial Sequence
  Description of Artificial Sequence: Synthetic oligonucleotide
acacuucguuccauaacag

SEQ ID NO: 1010853 - RNA, 19 nt, Artificial Sequence
  Description of Artificial Sequence: Synthetic oligonucleotide
gcaaguccaggucauuuac

SEQ ID NO: 1010854 - RNA, 19 nt, Artificial Sequence
  Description of Artificial Sequence: Synthetic oligonucleotide
gguagagaggauaaagcaa

SEQ ID NO: 1010855 - RNA, 19 nt, Artificial Sequence
  Description of Artificial Sequence: Synthetic oligonucleotide
uagagaagucucugaccuc

SEQ ID NO: 1010856 - RNA, 19 nt, Artificial Sequence
  Description of Artificial Sequence: Synthetic oligonucleotide
ucaccaggagccgagugua

SEQ ID NO: 1010857 - RNA, 19 nt, Artificial Sequence
  Description of Artificial Sequence: Synthetic oligonucleotide
cacagguauugucgauccg

SEQ ID NO: 1010858 - RNA, 19 nt, Artificial Sequence
  Description of Artificial Sequence: Synthetic oligonucleotide
cuauggacauggugcugug

SEQ ID NO: 1010859 - RNA, 19 nt, Artificial Sequence
  Description of Artificial Sequence: Synthetic oligonucleotide
cacuguuuaucucaaugcu

SEQ ID NO: 1010860 - RNA, 19 nt, Artificial Sequence
  Description of Artificial Sequence: Synthetic oligonucleotide
augccgggcagcgacucac

SEQ ID NO: 1010861 - RNA, 19 nt, Artificial Sequence
  Description of Artificial Sequence: Synthetic oligonucleotide
gucaaaggagauaggugca

SEQ ID NO: 1010862 - RNA, 19 nt, Artificial Sequence
  Description of Artificial Sequence: Synthetic oligonucleotide
cagguauugucgauccgga

SEQ ID NO: 1010863 - RNA, 19 nt, Artificial Sequence
  Description of Artificial Sequence: Synthetic oligonucleotide
caaguccaggucauuuaca

SEQ ID NO: 1010864 - RNA, 19 nt, Artificial Sequence
  Description of Artificial Sequence: Synthetic oligonucleotide
gacaacacauagcuggcuu

SEQ ID NO: 1010865 - RNA, 19 nt, Artificial Sequence
  Description of Artificial Sequence: Synthetic oligonucleotide
accacguuugcagaacaau

SEQ ID NO: 1010866 - RNA, 19 nt, Artificial Sequence
  Description of Artificial Sequence: Synthetic oligonucleotide
caugggacuuuucagaguu

SEQ ID NO: 1010867 - RNA, 19 nt, Artificial Sequence
  Description of Artificial Sequence: Synthetic oligonucleotide
accagagcuggaucacacu

SEQ ID NO: 1010868 - RNA, 19 nt, Artificial Sequence
  Description of Artificial Sequence: Synthetic oligonucleotide
cugagucagucauccccag

SEQ ID NO: 1010869 - RNA, 19 nt, Artificial Sequence
  Description of Artificial Sequence: Synthetic oligonucleotide
ccacuucucagucucggag

SEQ ID NO: 1010870 - RNA, 19 nt, Artificial Sequence
  Description of Artificial Sequence: Synthetic oligonucleotide
cuguagggagaaacagauc

SEQ ID NO: 1010871 - RNA, 19 nt, Artificial Sequence
  Description of Artificial Sequence: Synthetic oligonucleotide
acccuugcagagucugugu

SEQ ID NO: 1010872 - RNA, 19 nt, Artificial Sequence
  Description of Artificial Sequence: Synthetic oligonucleotide
caagcagcacgccugccca

SEQ ID NO: 1010873 - RNA, 19 nt, Artificial Sequence
  Description of Artificial Sequence: Synthetic oligonucleotide
agauggguacaguguugga

SEQ ID NO: 1010874 - RNA, 19 nt, Artificial Sequence
  Description of Artificial Sequence: Synthetic oligonucleotide
cauauguccucuucacugu

SEQ ID NO: 1010875 - RNA, 19 nt, Artificial Sequence
  Description of Artificial Sequence: Synthetic oligonucleotide
aagcuggauuuugaagcau

SEQ ID NO: 1010876 - RNA, 19 nt, Artificial Sequence
  Description of Artificial Sequence: Synthetic oligonucleotide
aacacauagcuggcuuaau

SEQ ID NO: 1010877 - RNA, 19 nt, Artificial Sequence
  Description of Artificial Sequence: Synthetic oligonucleotide
aguaagaguccaacaggaa

SEQ ID NO: 1010878 - RNA, 19 nt, Artificial Sequence
  Description of Artificial Sequence: Synthetic oligonucleotide
aguugacagucucgauaga

SEQ ID NO: 1010879 - RNA, 19 nt, Artificial Sequence
  Description of Artificial Sequence: Synthetic oligonucleotide
cagcggagugucagaaaac

SEQ ID NO: 1010880 - RNA, 19 nt, Artificial Sequence
  Description of Artificial Sequence: Synthetic oligonucleotide
cugcgcaaaaccagucuga

SEQ ID NO: 1010881 - RNA, 19 nt, Artificial Sequence
  Description of Artificial Sequence: Synthetic oligonucleotide
ggucuuuccugaugaccag

SEQ ID NO: 1010882 - RNA, 19 nt, Artificial Sequence
  Description of Artificial Sequence: Synthetic oligonucleotide
acgagacagaaagcagcag

SEQ ID NO: 1010883 - RNA, 19 nt, Artificial Sequence
  Description of Artificial Sequence: Synthetic oligonucleotide
gccacaacugguagagagg

SEQ ID NO: 1010884 - RNA, 19 nt, Artificial Sequence
  Description of Artificial Sequence: Synthetic oligonucleotide
augaguggucuuuccugau

SEQ ID NO: 1010885 - RNA, 19 nt, Artificial Sequence
  Description of Artificial Sequence: Synthetic oligonucleotide
gcaugaguaagaguccaac

SEQ ID NO: 1010886 - RNA, 19 nt, Artificial Sequence
  Description of Artificial Sequence: Synthetic oligonucleotide
uaagggcuauggacauggu

SEQ ID NO: 1010887 - RNA, 19 nt, Artificial Sequence
  Description of Artificial Sequence: Synthetic oligonucleotide
auguggcugcgcaaaacca

SEQ ID NO: 1010888 - RNA, 19 nt, Artificial Sequence
  Description of Artificial Sequence: Synthetic oligonucleotide
agcacccggugucucagaa

SEQ ID NO: 1010889 - RNA, 19 nt, Artificial Sequence
  Description of Artificial Sequence: Synthetic oligonucleotide
gguauauauacaggagaaa

SEQ ID NO: 1010890 - RNA, 19 nt, Artificial Sequence
  Description of Artificial Sequence: Synthetic oligonucleotide
aaccacguuugcagaacaa

SEQ ID NO: 1010891 - RNA, 19 nt, Artificial Sequence
  Description of Artificial Sequence: Synthetic oligonucleotide
ggugucucagaagggcucc

SEQ ID NO: 1010892 - RNA, 19 nt, Artificial Sequence
  Description of Artificial Sequence: Synthetic oligonucleotide
cagaguuacuuuguucuaa

SEQ ID NO: 1010893 - RNA, 19 nt, Artificial Sequence
  Description of Artificial Sequence: Synthetic oligonucleotide
cacagugcucacucccguc

SEQ ID NO: 1010894 - RNA, 19 nt, Artificial Sequence
  Description of Artificial Sequence: Synthetic oligonucleotide
aaccgaaccaugggacuuu

SEQ ID NO: 1010895 - RNA, 19 nt, Artificial Sequence
  Description of Artificial Sequence: Synthetic oligonucleotide
aggaguugacagucucgau

SEQ ID NO: 1010896 - RNA, 19 nt, Artificial Sequence
  Description of Artificial Sequence: Synthetic oligonucleotide
gcgacucaccuccacuugc

SEQ ID NO: 1010897 - RNA, 19 nt, Artificial Sequence
  Description of Artificial Sequence: Synthetic oligonucleotide
ugucgauccggaggacugu

SEQ ID NO: 1010898 - RNA, 19 nt, Artificial Sequence
  Description of Artificial Sequence: Synthetic oligonucleotide
acacaagauaagggcuaug

SEQ ID NO: 1010899 - RNA, 19 nt, Artificial Sequence
  Description of Artificial Sequence: Synthetic oligonucleotide
agcuggaccuucacacaag

SEQ ID NO: 1010900 - RNA, 19 nt, Artificial Sequence
  Description of Artificial Sequence: Synthetic oligonucleotide
cuuggacauggucggacaa

SEQ ID NO: 1010901 - RNA, 19 nt, Artificial Sequence
  Description of Artificial Sequence: Synthetic oligonucleotide
uauugucgauccggaggac

SEQ ID NO: 1010902 - RNA, 19 nt, Artificial Sequence
  Description of Artificial Sequence: Synthetic oligonucleotide
cagaaugucugaucacacu

SEQ ID NO: 1010903 - RNA, 19 nt, Artificial Sequence
  Description of Artificial Sequence: Synthetic oligonucleotide
ggaucacacucuggcaucc

SEQ ID NO: 1010904 - RNA, 19 nt, Artificial Sequence
  Description of Artificial Sequence: Synthetic oligonucleotide
guguuagccuuucucugcu

SEQ ID NO: 1010905 - RNA, 19 nt, Artificial Sequence
  Description of Artificial Sequence: Synthetic oligonucleotide
cuugccucuguagggagaa

SEQ ID NO: 1010906 - RNA, 19 nt, Artificial Sequence
  Description of Artificial Sequence: Synthetic oligonucleotide
ggagccgaguguaguagcc

SEQ ID NO: 1010907 - RNA, 19 nt, Artificial Sequence
  Description of Artificial Sequence: Synthetic oligonucleotide
ugccgggcagcgacucacc

SEQ ID NO: 1010908 - RNA, 19 nt, Artificial Sequence
  Description of Artificial Sequence: Synthetic oligonucleotide
ucaugccgggcagcgacuc

SEQ ID NO: 1010909 - RNA, 19 nt, Artificial Sequence
  Description of Artificial Sequence: Synthetic oligonucleotide
gagccgaguguaguagcca

SEQ ID NO: 1010910 - RNA, 19 nt, Artificial Sequence
  Description of Artificial Sequence: Synthetic oligonucleotide
cggucaaaggagauaggug

SEQ ID NO: 1010911 - RNA, 19 nt, Artificial Sequence
  Description of Artificial Sequence: Synthetic oligonucleotide
guguuaguguuagccuuuc

SEQ ID NO: 1010912 - RNA, 19 nt, Artificial Sequence
  Description of Artificial Sequence: Synthetic oligonucleotide
uccggaggacugugaggac

SEQ ID NO: 1010913 - RNA, 19 nt, Artificial Sequence
  Description of Artificial Sequence: Synthetic oligonucleotide
augucugaucacacuucgu

SEQ ID NO: 1010914 - RNA, 19 nt, Artificial Sequence
  Description of Artificial Sequence: Synthetic oligonucleotide
agggaugcggaaagcugga

SEQ ID NO: 1010915 - RNA, 19 nt, Artificial Sequence
  Description of Artificial Sequence: Synthetic oligonucleotide
cagugcucacucccgucuc

SEQ ID NO: 1010916 - RNA, 19 nt, Artificial Sequence
  Description of Artificial Sequence: Synthetic oligonucleotide
ccaccacauagaauacaac

SEQ ID NO: 1010917 - RNA, 19 nt, Artificial Sequence
  Description of Artificial Sequence: Synthetic oligonucleotide
cuuaucauucaaccacguu

SEQ ID NO: 1010918 - RNA, 19 nt, Artificial Sequence
  Description of Artificial Sequence: Synthetic oligonucleotide
uggcccacaccaccacaua

SEQ ID NO: 1010919 - RNA, 19 nt, Artificial Sequence
  Description of Artificial Sequence: Synthetic oligonucleotide
agcagcacgccugcccacu

SEQ ID NO: 1010920 - RNA, 19 nt, Artificial Sequence
  Description of Artificial Sequence: Synthetic oligonucleotide
guguuggaccuugaggagu

SEQ ID NO: 1010921 - RNA, 19 nt, Artificial Sequence
  Description of Artificial Sequence: Synthetic oligonucleotide
gcuauggacauggugcugu

SEQ ID NO: 1010922 - RNA, 19 nt, Artificial Sequence
  Description of Artificial Sequence: Synthetic oligonucleotide
gacucaccuccacuugccu

SEQ ID NO: 1010923 - RNA, 19 nt, Artificial Sequence
  Description of Artificial Sequence: Synthetic oligonucleotide
gaguggcaagcagcacgcc

SEQ ID NO: 1010924 - RNA, 19 nt, Artificial Sequence
  Description of Artificial Sequence: Synthetic oligonucleotide
cgauccggaggacugugag

SEQ ID NO: 1010925 - RNA, 19 nt, Artificial Sequence
  Description of Artificial Sequence: Synthetic oligonucleotide
gucaggcugacggcaguca

SEQ ID NO: 1010926 - RNA, 19 nt, Artificial Sequence
  Description of Artificial Sequence: Synthetic oligonucleotide
gcacccggugucucagaag

SEQ ID NO: 1010927 - RNA, 19 nt, Artificial Sequence
  Description of Artificial Sequence: Synthetic oligonucleotide
agccagcauguggcugcgc

SEQ ID NO: 1010928 - RNA, 19 nt, Artificial Sequence
  Description of Artificial Sequence: Synthetic oligonucleotide
gccaguucagggaagaauu

SEQ ID NO: 1010929 - RNA, 19 nt, Artificial Sequence
  Description of Artificial Sequence: Synthetic oligonucleotide
guggcugcgcaaaaccagu

SEQ ID NO: 1010930 - RNA, 19 nt, Artificial Sequence
  Description of Artificial Sequence: Synthetic oligonucleotide
gcaaccgaaccaugggacu

SEQ ID NO: 1010931 - RNA, 19 nt, Artificial Sequence
  Description of Artificial Sequence: Synthetic oligonucleotide
ccguucaugccgggcagcg

SEQ ID NO: 1010932 - RNA, 19 nt, Artificial Sequence
  Description of Artificial Sequence: Synthetic oligonucleotide
ccuaggucaccuggccagg

SEQ ID NO: 1010933 - RNA, 19 nt, Artificial Sequence
  Description of Artificial Sequence: Synthetic oligonucleotide
gcggaaagcuggauuuuga

SEQ ID NO: 1010934 - RNA, 19 nt, Artificial Sequence
  Description of Artificial Sequence: Synthetic oligonucleotide
ggaugcggaaagcuggauu

SEQ ID NO: 1010935 - RNA, 19 nt, Artificial Sequence
  Description of Artificial Sequence: Synthetic oligonucleotide
ggagggcuccuuugaggca

SEQ ID NO: 1010936 - RNA, 19 nt, Artificial Sequence
  Description of Artificial Sequence: Synthetic oligonucleotide
ggcuauggacauggugcug

SEQ ID NO: 1010937 - RNA, 19 nt, Artificial Sequence
  Description of Artificial Sequence: Synthetic oligonucleotide
cccacaccaccacauagaa

SEQ ID NO: 1010938 - RNA, 19 nt, Artificial Sequence
  Description of Artificial Sequence: Synthetic oligonucleotide
ccacugagucagucauccc

SEQ ID NO: 1010939 - RNA, 19 nt, Artificial Sequence
  Description of Artificial Sequence: Synthetic oligonucleotide
ggcugcgcaaaaccagucu

SEQ ID NO: 1010940 - RNA, 19 nt, Artificial Sequence
  Description of Artificial Sequence: Synthetic oligonucleotide
ccgaguguaguagccacca

SEQ ID NO: 1010941 - RNA, 19 nt, Artificial Sequence
  Description of Artificial Sequence: Synthetic oligonucleotide
agucucggaggaagaugaa

SEQ ID NO: 1010942 - RNA, 19 nt, Artificial Sequence
  Description of Artificial Sequence: Synthetic oligonucleotide
cagcgacucaccuccacuu

SEQ ID NO: 1010943 - RNA, 19 nt, Artificial Sequence
  Description of Artificial Sequence: Synthetic oligonucleotide
accgaaccaugggacuuuu

SEQ ID NO: 1010944 - RNA, 19 nt, Artificial Sequence
  Description of Artificial Sequence: Synthetic oligonucleotide
gaucacacucuggcauccu

SEQ ID NO: 1010945 - RNA, 19 nt, Artificial Sequence
  Description of Artificial Sequence: Synthetic oligonucleotide
cacacaagauaagggcuau

SEQ ID NO: 1010946 - RNA, 19 nt, Artificial Sequence
  Description of Artificial Sequence: Synthetic oligonucleotide
caugggacccuugcagagu

SEQ ID NO: 1010947 - RNA, 19 nt, Artificial Sequence
  Description of Artificial Sequence: Synthetic oligonucleotide
augggacuuuucagaguua

SEQ ID NO: 1010948 - RNA, 19 nt, Artificial Sequence
  Description of Artificial Sequence: Synthetic oligonucleotide
ggucagggucaggcugacg

SEQ ID NO: 1010949 - RNA, 19 nt, Artificial Sequence
  Description of Artificial Sequence: Synthetic oligonucleotide
caggauccugacuccuccu

SEQ ID NO: 1010950 - RNA, 19 nt, Artificial Sequence
  Description of Artificial Sequence: Synthetic oligonucleotide
gugcacagguauugucgau

SEQ ID NO: 1010951 - RNA, 19 nt, Artificial Sequence
  Description of Artificial Sequence: Synthetic oligonucleotide
caaccgaaccaugggacuu

SEQ ID NO: 1010952 - RNA, 19 nt, Artificial Sequence
  Description of Artificial Sequence: Synthetic oligonucleotide
ccacuugccucuguaggga

SEQ ID NO: 1010953 - RNA, 19 nt, Artificial Sequence
  Description of Artificial Sequence: Synthetic oligonucleotide
cuucucagucucggaggaa

SEQ ID NO: 1010954 - RNA, 19 nt, Artificial Sequence
  Description of Artificial Sequence: Synthetic oligonucleotide
gggugccguucaugccggg

SEQ ID NO: 1010955 - RNA, 19 nt, Artificial Sequence
  Description of Artificial Sequence: Synthetic oligonucleotide
cgauagaaaagagguauau

SEQ ID NO: 1010956 - RNA, 19 nt, Artificial Sequence
  Description of Artificial Sequence: Synthetic oligonucleotide
ccauaacagcggaguguca

SEQ ID NO: 1010957 - RNA, 19 nt, Artificial Sequence
  Description of Artificial Sequence: Synthetic oligonucleotide
ccgucuccaugacaacaca

SEQ ID NO: 1010958 - RNA, 19 nt, Artificial Sequence
  Description of Artificial Sequence: Synthetic oligonucleotide
cauccggaacaagcugaua

SEQ ID NO: 1010959 - RNA, 19 nt, Artificial Sequence
  Description of Artificial Sequence: Synthetic oligonucleotide
cagcacccggugucucaga

SEQ ID NO: 1010960 - RNA, 19 nt, Artificial Sequence
  Description of Artificial Sequence: Synthetic oligonucleotide
ccgaaccaugggacuuuuc

SEQ ID NO: 1010961 - RNA, 19 nt, Artificial Sequence
  Description of Artificial Sequence: Synthetic oligonucleotide
ccaacuuauaauggugauu

SEQ ID NO: 1010962 - RNA, 19 nt, Artificial Sequence
  Description of Artificial Sequence: Synthetic oligonucleotide
cggaacaagcugauagagu

SEQ ID NO: 1010963 - RNA, 19 nt, Artificial Sequence
  Description of Artificial Sequence: Synthetic oligonucleotide
gcauccggaacaagcugau

SEQ ID NO: 1010964 - RNA, 19 nt, Artificial Sequence
  Description of Artificial Sequence: Synthetic oligonucleotide
ggcuccuuugaggcagggu

SEQ ID NO: 1010965 - RNA, 19 nt, Artificial Sequence
  Description of Artificial Sequence: Synthetic oligonucleotide
ggcaaacauuuggcuggua

SEQ ID NO: 1010966 - RNA, 19 nt, Artificial Sequence
  Description of Artificial Sequence: Synthetic oligonucleotide
gggaugcggaaagcuggau

SEQ ID NO: 1010967 - RNA, 19 nt, Artificial Sequence
  Description of Artificial Sequence: Synthetic oligonucleotide
cgaguguaguagccaccaa

SEQ ID NO: 1010968 - RNA, 19 nt, Artificial Sequence
  Description of Artificial Sequence: Synthetic oligonucleotide
ggcugacggcagucagagu

SEQ ID NO: 1010969 - RNA, 19 nt, Artificial Sequence
  Description of Artificial Sequence: Synthetic oligonucleotide
ugugaguuagaaaugaacg

SEQ ID NO: 1010970 - RNA, 19 nt, Artificial Sequence
  Description of Artificial Sequence: Synthetic oligonucleotide
uagguuaugaccaacauca

SEQ ID NO: 1010971 - RNA, 19 nt, Artificial Sequence
  Description of Artificial Sequence: Synthetic oligonucleotide
aguuauauggacuuucugg

SEQ ID NO: 1010972 - RNA, 19 nt, Artificial Sequence
  Description of Artificial Sequence: Synthetic oligonucleotide
aaauuagccucugaaaugc

SEQ ID NO: 1010973 - RNA, 19 nt, Artificial Sequence
  Description of Artificial Sequence: Synthetic oligonucleotide
auugguuacagguauaagg

SEQ ID NO: 1010974 - RNA, 19 nt, Artificial Sequence
  Description of Artificial Sequence: Synthetic oligonucleotide
ugagggauacccaacaucg

SEQ ID NO: 1010975 - RNA, 19 nt, Artificial Sequence
  Description of Artificial Sequence: Synthetic oligonucleotide
acggauuucacucuuggcc

SEQ ID NO: 1010976 - RNA, 19 nt, Artificial Sequence
  Description of Artificial Sequence: Synthetic oligonucleotide
acauacauaaggaaggucc

SEQ ID NO: 1010977 - RNA, 19 nt, Artificial Sequence
  Description of Artificial Sequence: Synthetic oligonucleotide
uguacaaugagauuugcac

SEQ ID NO: 1010978 - RNA, 19 nt, Artificial Sequence
  Description of Artificial Sequence: Synthetic oligonucleotide
uccauuacagaaaauaacu

SEQ ID NO: 1010979 - RNA, 19 nt, Artificial Sequence
  Description of Artificial Sequence: Synthetic oligonucleotide
uuuaccuuccauuacagaa

SEQ ID NO: 1010980 - RNA, 19 nt, Artificial Sequence
  Description of Artificial Sequence: Synthetic oligonucleotide
uggacaauaaggcaggaga

SEQ ID NO: 1010981 - RNA, 19 nt, Artificial Sequence
  Description of Artificial Sequence: Synthetic oligonucleotide
acguaaaaggcuuuucccc

SEQ ID NO: 1010982 - RNA, 19 nt, Artificial Sequence
  Description of Artificial Sequence: Synthetic oligonucleotide
auuauggauucuuugauga

SEQ ID NO: 1010983 - RNA, 19 nt, Artificial Sequence
  Description of Artificial Sequence: Synthetic oligonucleotide
caaggaaacacccuguugc

SEQ ID NO: 1010984 - RNA, 19 nt, Artificial Sequence
  Description of Artificial Sequence: Synthetic oligonucleotide
uauucucuuuaaauuagcc

SEQ ID NO: 1010985 - RNA, 19 nt, Artificial Sequence
  Description of Artificial Sequence: Synthetic oligonucleotide
aguaguuguagguucuugg

SEQ ID NO: 1010986 - RNA, 19 nt, Artificial Sequence
  Description of Artificial Sequence: Synthetic oligonucleotide
aaguguauagacuuuguuu

SEQ ID NO: 1010987 - RNA, 19 nt, Artificial Sequence
  Description of Artificial Sequence: Synthetic oligonucleotide
gaucuucgaaagcugaggg

SEQ ID NO: 1010988 - RNA, 19 nt, Artificial Sequence
  Description of Artificial Sequence: Synthetic oligonucleotide
cuuggugucaguaucuagc

SEQ ID NO: 1010989 - RNA, 19 nt, Artificial Sequence
  Description of Artificial Sequence: Synthetic oligonucleotide
acacuuugcgcauucauag

SEQ ID NO: 1010990 - RNA, 19 nt, Artificial Sequence
  Description of Artificial Sequence: Synthetic oligonucleotide
acuuugcgcauucauaggg

SEQ ID NO: 1010991 - RNA, 19 nt, Artificial Sequence
  Description of Artificial Sequence: Synthetic oligonucleotide
auuucucaguuauauggac

SEQ ID NO: 1010992 - RNA, 19 nt, Artificial Sequence
  Description of Artificial Sequence: Synthetic oligonucleotide
uuccauuacagaaaauaac

SEQ ID NO: 1010993 - RNA, 19 nt, Artificial Sequence
  Description of Artificial Sequence: Synthetic oligonucleotide
cauuuucugacccuuuucc

SEQ ID NO: 1010994 - RNA, 19 nt, Artificial Sequence
  Description of Artificial Sequence: Synthetic oligonucleotide
uuaaaguguauagacuuug

SEQ ID NO: 1010995 - RNA, 19 nt, Artificial Sequence
  Description of Artificial Sequence: Synthetic oligonucleotide
aguuguagguucuuggugu

SEQ ID NO: 1010996 - RNA, 19 nt, Artificial Sequence
  Description of Artificial Sequence: Synthetic oligonucleotide
ugaguuagaaaugaacgcu

SEQ ID NO: 1010997 - RNA, 19 nt, Artificial Sequence
  Description of Artificial Sequence: Synthetic oligonucleotide
uuuucuaaggaguggauuu

SEQ ID NO: 1010998 - RNA, 19 nt, Artificial Sequence
  Description of Artificial Sequence: Synthetic oligonucleotide
uaugagcuacaagugaagg

SEQ ID NO: 1010999 - RNA, 19 nt, Artificial Sequence
  Description of Artificial Sequence: Synthetic oligonucleotide
uguuuuaacaauggaagaa

SEQ ID NO: 1011000 - RNA, 19 nt, Artificial Sequence
  Description of Artificial Sequence: Synthetic oligonucleotide
auaaggaccugccccaggg

SEQ ID NO: 1011001 - RNA, 19 nt, Artificial Sequence
  Description of Artificial Sequence: Synthetic oligonucleotide
augaguagguaugagcuac

SEQ ID NO: 1011002 - RNA, 19 nt, Artificial Sequence
  Description of Artificial Sequence: Synthetic oligonucleotide
uuagacuucuucuuucacu

SEQ ID NO: 1011003 - RNA, 19 nt, Artificial Sequence
  Description of Artificial Sequence: Synthetic oligonucleotide
gugaguuagaaaugaacgc

SEQ ID NO: 1011004 - RNA, 19 nt, Artificial Sequence
  Description of Artificial Sequence: Synthetic oligonucleotide
cuuaaauaaggaccugccc

SEQ ID NO: 1011005 - RNA, 19 nt, Artificial Sequence
  Description of Artificial Sequence: Synthetic oligonucleotide
augccggacucauaguucc

SEQ ID NO: 1011006 - RNA, 19 nt, Artificial Sequence
  Description of Artificial Sequence: Synthetic oligonucleotide
agaggugccuacuaucggg

SEQ ID NO: 1011007 - RNA, 19 nt, Artificial Sequence
  Description of Artificial Sequence: Synthetic oligonucleotide
aaaugaacgcugcaccaca

SEQ ID NO: 1011008 - RNA, 19 nt, Artificial Sequence
  Description of Artificial Sequence: Synthetic oligonucleotide
uuuaggaccagugccaugu

SEQ ID NO: 1011009 - RNA, 19 nt, Artificial Sequence
  Description of Artificial Sequence: Synthetic oligonucleotide
ugcacaacaagguuugcac

SEQ ID NO: 1011010 - RNA, 19 nt, Artificial Sequence
  Description of Artificial Sequence: Synthetic oligonucleotide
uacacuugcugacuggaug

SEQ ID NO: 1011011 - RNA, 19 nt, Artificial Sequence
  Description of Artificial Sequence: Synthetic oligonucleotide
auaaggaagguccccacug

SEQ ID NO: 1011012 - RNA, 19 nt, Artificial Sequence
  Description of Artificial Sequence: Synthetic oligonucleotide
uguguugcuuuuaggacca

SEQ ID NO: 1011013 - RNA, 19 nt, Artificial Sequence
  Description of Artificial Sequence: Synthetic oligonucleotide
uuaugaccaacaucaagga

SEQ ID NO: 1011014 - RNA, 19 nt, Artificial Sequence
  Description of Artificial Sequence: Synthetic oligonucleotide
ugaugcacaaugaggugag

SEQ ID NO: 1011015 - RNA, 19 nt, Artificial Sequence
  Description of Artificial Sequence: Synthetic oligonucleotide
uuucucaguuauauggacu

SEQ ID NO: 1011016 - RNA, 19 nt, Artificial Sequence
  Description of Artificial Sequence: Synthetic oligonucleotide
ugucccagaacauuuucug

SEQ ID NO: 1011017 - RNA, 19 nt, Artificial Sequence
  Description of Artificial Sequence: Synthetic oligonucleotide
aauaaggaccugccccagg

SEQ ID NO: 1011018 - RNA, 19 nt, Artificial Sequence
  Description of Artificial Sequence: Synthetic oligonucleotide
aguuagaaaugaacgcugc

SEQ ID NO: 1011019 - RNA, 19 nt, Artificial Sequence
  Description of Artificial Sequence: Synthetic oligonucleotide
cacguaaaaggcuuuuccc

SEQ ID NO: 1011020 - RNA, 19 nt, Artificial Sequence
  Description of Artificial Sequence: Synthetic oligonucleotide
uacucaacaagauggguuc

SEQ ID NO: 1011021 - RNA, 19 nt, Artificial Sequence
  Description of Artificial Sequence: Synthetic oligonucleotide
agucguuacaggcgaaagg

SEQ ID NO: 1011022 - RNA, 19 nt, Artificial Sequence
  Description of Artificial Sequence: Synthetic oligonucleotide
uggacagugaggcucgagc

SEQ ID NO: 1011023 - RNA, 19 nt, Artificial Sequence
  Description of Artificial Sequence: Synthetic oligonucleotide
uuaccuuccauuacagaaa

SEQ ID NO: 1011024 - RNA, 19 nt, Artificial Sequence
  Description of Artificial Sequence: Synthetic oligonucleotide
guugcuacucaacaagaug

SEQ ID NO: 1011025 - RNA, 19 nt, Artificial Sequence
  Description of Artificial Sequence: Synthetic oligonucleotide
ugaguagcucccaaggggu

SEQ ID NO: 1011026 - RNA, 19 nt, Artificial Sequence
  Description of Artificial Sequence: Synthetic oligonucleotide
uacuaucgggagcaguagg

SEQ ID NO: 1011027 - RNA, 19 nt, Artificial Sequence
  Description of Artificial Sequence: Synthetic oligonucleotide
guaacugaaggcuuucuca

SEQ ID NO: 1011028 - RNA, 19 nt, Artificial Sequence
  Description of Artificial Sequence: Synthetic oligonucleotide
ugagguuggagcuucuagu

SEQ ID NO: 1011029 - RNA, 19 nt, Artificial Sequence
  Description of Artificial Sequence: Synthetic oligonucleotide
acaagauggguucuguggu

SEQ ID NO: 1011030 - RNA, 19 nt, Artificial Sequence
  Description of Artificial Sequence: Synthetic oligonucleotide
ugcuuaaauaaggaccugc

SEQ ID NO: 1011031 - RNA, 19 nt, Artificial Sequence
  Description of Artificial Sequence: Synthetic oligonucleotide
uguaucucugucuuaggau

SEQ ID NO: 1011032 - RNA, 19 nt, Artificial Sequence
  Description of Artificial Sequence: Synthetic oligonucleotide
cuggaugccggacucauag

SEQ ID NO: 1011033 - RNA, 19 nt, Artificial Sequence
  Description of Artificial Sequence: Synthetic oligonucleotide
guaaugaguagcucccaag

SEQ ID NO: 1011034 - RNA, 19 nt, Artificial Sequence
  Description of Artificial Sequence: Synthetic oligonucleotide
uaaaguguauagacuuugu

SEQ ID NO: 1011035 - RNA, 19 nt, Artificial Sequence
  Description of Artificial Sequence: Synthetic oligonucleotide
gucguuacaggcgaaaggc

SEQ ID NO: 1011036 - RNA, 19 nt, Artificial Sequence
  Description of Artificial Sequence: Synthetic oligonucleotide
ggagcaguagguuaugacc

SEQ ID NO: 1011037 - RNA, 19 nt, Artificial Sequence
  Description of Artificial Sequence: Synthetic oligonucleotide
guaucucugucuuaggauc

SEQ ID NO: 1011038 - RNA, 19 nt, Artificial Sequence
  Description of Artificial Sequence: Synthetic oligonucleotide
auacauaaggaaggucccc

SEQ ID NO: 1011039 - RNA, 19 nt, Artificial Sequence
  Description of Artificial Sequence: Synthetic oligonucleotide
acauugaugcuuaaauaag

SEQ ID NO: 1011040 - RNA, 19 nt, Artificial Sequence
  Description of Artificial Sequence: Synthetic oligonucleotide
acauaaggaagguccccac

SEQ ID NO: 1011041 - RNA, 19 nt, Artificial Sequence
  Description of Artificial Sequence: Synthetic oligonucleotide
guuauauggacuuucuggu

SEQ ID NO: 1011042 - RNA, 19 nt, Artificial Sequence
  Description of Artificial Sequence: Synthetic oligonucleotide
acuuuguuuuaacaaugga

SEQ ID NO: 1011043 - RNA, 19 nt, Artificial Sequence
  Description of Artificial Sequence: Synthetic oligonucleotide
ucccgcuuuauuuucugcc

SEQ ID NO: 1011044 - RNA, 19 nt, Artificial Sequence
  Description of Artificial Sequence: Synthetic oligonucleotide
aguagguaugagcuacaag

SEQ ID NO: 1011045 - RNA, 19 nt, Artificial Sequence
  Description of Artificial Sequence: Synthetic oligonucleotide
acaucggucacaccccauc

SEQ ID NO: 1011046 - RNA, 19 nt, Artificial Sequence
  Description of Artificial Sequence: Synthetic oligonucleotide
uuugcgcauucauagggcu

SEQ ID NO: 1011047 - RNA, 19 nt, Artificial Sequence
  Description of Artificial Sequence: Synthetic oligonucleotide
aaugaguagguaugagcua

SEQ ID NO: 1011048 - RNA, 19 nt, Artificial Sequence
  Description of Artificial Sequence: Synthetic oligonucleotide
cuuugcgcauucauagggc

SEQ ID NO: 1011049 - RNA, 19 nt, Artificial Sequence
  Description of Artificial Sequence: Synthetic oligonucleotide
gacaauaaggcaggagagc

SEQ ID NO: 1011050 - RNA, 19 nt, Artificial Sequence
  Description of Artificial Sequence: Synthetic oligonucleotide
ucacuacauacauaaggaa

SEQ ID NO: 1011051 - RNA, 19 nt, Artificial Sequence
  Description of Artificial Sequence: Synthetic oligonucleotide
ucacuacacguaaaaggcu

SEQ ID NO: 1011052 - RNA, 19 nt, Artificial Sequence
  Description of Artificial Sequence: Synthetic oligonucleotide
agaguacacuugcugacug

SEQ ID NO: 1011053 - RNA, 19 nt, Artificial Sequence
  Description of Artificial Sequence: Synthetic oligonucleotide
aaguugcgaacuguaacug

SEQ ID NO: 1011054 - RNA, 19 nt, Artificial Sequence
  Description of Artificial Sequence: Synthetic oligonucleotide
cccaacaucggucacaccc

SEQ ID NO: 1011055 - RNA, 19 nt, Artificial Sequence
  Description of Artificial Sequence: Synthetic oligonucleotide
uguauagacuuuguuuuaa

SEQ ID NO: 1011056 - RNA, 19 nt, Artificial Sequence
  Description of Artificial Sequence: Synthetic oligonucleotide
agguaugagcuacaaguga

SEQ ID NO: 1011057 - RNA, 19 nt, Artificial Sequence
  Description of Artificial Sequence: Synthetic oligonucleotide
uaccuuccauuacagaaaa

SEQ ID NO: 1011058 - RNA, 19 nt, Artificial Sequence
  Description of Artificial Sequence: Synthetic oligonucleotide
uaugaccaacaucaaggaa

SEQ ID NO: 1011059 - RNA, 19 nt, Artificial Sequence
  Description of Artificial Sequence: Synthetic oligonucleotide
agaggcucgccccacgauc

SEQ ID NO: 1011060 - RNA, 19 nt, Artificial Sequence
  Description of Artificial Sequence: Synthetic oligonucleotide
acuuuaaaguguauagacu

SEQ ID NO: 1011061 - RNA, 19 nt, Artificial Sequence
  Description of Artificial Sequence: Synthetic oligonucleotide
uuggagcuucuagugaagg

SEQ ID NO: 1011062 - RNA, 19 nt, Artificial Sequence
  Description of Artificial Sequence: Synthetic oligonucleotide
agauucuccuagcucaggu

SEQ ID NO: 1011063 - RNA, 19 nt, Artificial Sequence
  Description of Artificial Sequence: Synthetic oligonucleotide
gguuaugaccaacaucaag

SEQ ID NO: 1011064 - RNA, 19 nt, Artificial Sequence
  Description of Artificial Sequence: Synthetic oligonucleotide
uacaagugaaggccuuccc

SEQ ID NO: 1011065 - RNA, 19 nt, Artificial Sequence
  Description of Artificial Sequence: Synthetic oligonucleotide
uuaggauccaguaguugua

SEQ ID NO: 1011066 - RNA, 19 nt, Artificial Sequence
  Description of Artificial Sequence: Synthetic oligonucleotide
agggauacccaacaucggu

SEQ ID NO: 1011067 - RNA, 19 nt, Artificial Sequence
  Description of Artificial Sequence: Synthetic oligonucleotide
gaguacacuugcugacugg

SEQ ID NO: 1011068 - RNA, 19 nt, Artificial Sequence
  Description of Artificial Sequence: Synthetic oligonucleotide
gacucauaguuccaugcuc

SEQ ID NO: 1011069 - RNA, 19 nt, Artificial Sequence
  Description of Artificial Sequence: Synthetic oligonucleotide
cuuucuggugccgagcaag

SEQ ID NO: 1011070 - RNA, 19 nt, Artificial Sequence
  Description of Artificial Sequence: Synthetic oligonucleotide
gagcaguagguuaugacca

SEQ ID NO: 1011071 - RNA, 19 nt, Artificial Sequence
  Description of Artificial Sequence: Synthetic oligonucleotide
uggagcuucuagugaaggc

SEQ ID NO: 1011072 - RNA, 19 nt, Artificial Sequence
  Description of Artificial Sequence: Synthetic oligonucleotide
uucugauacauugaugcuu

SEQ ID NO: 1011073 - RNA, 19 nt, Artificial Sequence
  Description of Artificial Sequence: Synthetic oligonucleotide
cauuucucaguuauaugga

SEQ ID NO: 1011074 - RNA, 19 nt, Artificial Sequence
  Description of Artificial Sequence: Synthetic oligonucleotide
ugaacgcugcaccacacuu

SEQ ID NO: 1011075 - RNA, 19 nt, Artificial Sequence
  Description of Artificial Sequence: Synthetic oligonucleotide
ggacagugaggcucgagcg

SEQ ID NO: 1011076 - RNA, 19 nt, Artificial Sequence
  Description of Artificial Sequence: Synthetic oligonucleotide
ucggucacaccccaucuaa

SEQ ID NO: 1011077 - RNA, 19 nt, Artificial Sequence
  Description of Artificial Sequence: Synthetic oligonucleotide
aagauucuccuagcucagg

SEQ ID NO: 1011078 - RNA, 19 nt, Artificial Sequence
  Description of Artificial Sequence: Synthetic oligonucleotide
ucaguaucuagcggggcug

SEQ ID NO: 1011079 - RNA, 19 nt, Artificial Sequence
  Description of Artificial Sequence: Synthetic oligonucleotide
cacuuugcgcauucauagg

SEQ ID NO: 1011080 - RNA, 19 nt, Artificial Sequence
  Description of Artificial Sequence: Synthetic oligonucleotide
uuugaugaaugaguaggua

SEQ ID NO: 1011081 - RNA, 19 nt, Artificial Sequence
  Description of Artificial Sequence: Synthetic oligonucleotide
aguugcgaacuguaacuga

SEQ ID NO: 1011082 - RNA, 19 nt, Artificial Sequence
  Description of Artificial Sequence: Synthetic oligonucleotide
uggacuuucuggugccgag

SEQ ID NO: 1011083 - RNA, 19 nt, Artificial Sequence
  Description of Artificial Sequence: Synthetic oligonucleotide
cucaguuauauggacuuuc

SEQ ID NO: 1011084 - RNA, 19 nt, Artificial Sequence
  Description of Artificial Sequence: Synthetic oligonucleotide
ugaguagguaugagcuaca

SEQ ID NO: 1011085 - RNA, 19 nt, Artificial Sequence
  Description of Artificial Sequence: Synthetic oligonucleotide
ugucgcaugaggugugagu

SEQ ID NO: 1011086 - RNA, 19 nt, Artificial Sequence
  Description of Artificial Sequence: Synthetic oligonucleotide
acauuucccuuuucacaag

SEQ ID NO: 1011087 - RNA, 19 nt, Artificial Sequence
  Description of Artificial Sequence: Synthetic oligonucleotide
aaacacccuguugcuacuc

SEQ ID NO: 1011088 - RNA, 19 nt, Artificial Sequence
  Description of Artificial Sequence: Synthetic oligonucleotide
ucguuacaggcgaaaggcu

SEQ ID NO: 1011089 - RNA, 19 nt, Artificial Sequence
  Description of Artificial Sequence: Synthetic oligonucleotide
cuucuagugaaggcuuucc

SEQ ID NO: 1011090 - RNA, 19 nt, Artificial Sequence
  Description of Artificial Sequence: Synthetic oligonucleotide
gacuuucuggugccgagca

SEQ ID NO: 1011091 - RNA, 19 nt, Artificial Sequence
  Description of Artificial Sequence: Synthetic oligonucleotide
cugagggauacccaacauc

SEQ ID NO: 1011092 - RNA, 19 nt, Artificial Sequence
  Description of Artificial Sequence: Synthetic oligonucleotide
ggaucuucgaaagcugagg

SEQ ID NO: 1011093 - RNA, 19 nt, Artificial Sequence
  Description of Artificial Sequence: Synthetic oligonucleotide
aggugugaguuagaaauga

SEQ ID NO: 1011094 - RNA, 19 nt, Artificial Sequence
  Description of Artificial Sequence: Synthetic oligonucleotide
ucgagcgcugucugaaggc

SEQ ID NO: 1011095 - RNA, 19 nt, Artificial Sequence
  Description of Artificial Sequence: Synthetic oligonucleotide
caauaaggcaggagagcug

SEQ ID NO: 1011096 - RNA, 19 nt, Artificial Sequence
  Description of Artificial Sequence: Synthetic oligonucleotide
uugucagaguacacuugcu

SEQ ID NO: 1011097 - RNA, 19 nt, Artificial Sequence
  Description of Artificial Sequence: Synthetic oligonucleotide
uaucuagcggggcuggguu

SEQ ID NO: 1011098 - RNA, 19 nt, Artificial Sequence
  Description of Artificial Sequence: Synthetic oligonucleotide
uaucgggagcaguagguua

SEQ ID NO: 1011099 - RNA, 19 nt, Artificial Sequence
  Description of Artificial Sequence: Synthetic oligonucleotide
uuuuaggaccagugccaug

SEQ ID NO: 1011100 - RNA, 19 nt, Artificial Sequence
  Description of Artificial Sequence: Synthetic oligonucleotide
gcaaguugcgaacuguaac

SEQ ID NO: 1011101 - RNA, 19 nt, Artificial Sequence
  Description of Artificial Sequence: Synthetic oligonucleotide
agaacagaggugccuacua

SEQ ID NO: 1011102 - RNA, 19 nt, Artificial Sequence
  Description of Artificial Sequence: Synthetic oligonucleotide
caaguugcgaacuguaacu

SEQ ID NO: 1011103 - RNA, 19 nt, Artificial Sequence
  Description of Artificial Sequence: Synthetic oligonucleotide
uacauacauaaggaagguc

SEQ ID NO: 1011104 - RNA, 19 nt, Artificial Sequence
  Description of Artificial Sequence: Synthetic oligonucleotide
auaaagcagaacagaggug

SEQ ID NO: 1011105 - RNA, 19 nt, Artificial Sequence
  Description of Artificial Sequence: Synthetic oligonucleotide
uugcacaaacauaggguuu

SEQ ID NO: 1011106 - RNA, 19 nt, Artificial Sequence
  Description of Artificial Sequence: Synthetic oligonucleotide
uauggacuuucuggugccg

SEQ ID NO: 1011107 - RNA, 19 nt, Artificial Sequence
  Description of Artificial Sequence: Synthetic oligonucleotide
cacggauuucacucuuggc

SEQ ID NO: 1011108 - RNA, 19 nt, Artificial Sequence
  Description of Artificial Sequence: Synthetic oligonucleotide
uccacggauuucacucuug

SEQ ID NO: 1011109 - RNA, 19 nt, Artificial Sequence
  Description of Artificial Sequence: Synthetic oligonucleotide
agucccugguaaugaguag

SEQ ID NO: 1011110 - RNA, 19 nt, Artificial Sequence
  Description of Artificial Sequence: Synthetic oligonucleotide
aucaaggaaacacccuguu

SEQ ID NO: 1011111 - RNA, 19 nt, Artificial Sequence
  Description of Artificial Sequence: Synthetic oligonucleotide
cugaaaugcuuguguuuac

SEQ ID NO: 1011112 - RNA, 19 nt, Artificial Sequence
  Description of Artificial Sequence: Synthetic oligonucleotide
ggcuccacggauuucacuc

SEQ ID NO: 1011113 - RNA, 19 nt, Artificial Sequence
  Description of Artificial Sequence: Synthetic oligonucleotide
acuaucgggagcaguaggu

SEQ ID NO: 1011114 - RNA, 19 nt, Artificial Sequence
  Description of Artificial Sequence: Synthetic oligonucleotide
uacccaacaucggucacac

SEQ ID NO: 1011115 - RNA, 19 nt, Artificial Sequence
  Description of Artificial Sequence: Synthetic oligonucleotide
gugucaguaucuagcgggg

SEQ ID NO: 1011116 - RNA, 19 nt, Artificial Sequence
  Description of Artificial Sequence: Synthetic oligonucleotide
gagggauacccaacaucgg

SEQ ID NO: 1011117 - RNA, 19 nt, Artificial Sequence
  Description of Artificial Sequence: Synthetic oligonucleotide
ugguuacagguauaagguu

SEQ ID NO: 1011118 - RNA, 19 nt, Artificial Sequence
  Description of Artificial Sequence: Synthetic oligonucleotide
aaauaacuuuaaaguguau

SEQ ID NO: 1011119 - RNA, 19 nt, Artificial Sequence
  Description of Artificial Sequence: Synthetic oligonucleotide
ccagaacauuuucugaccc

SEQ ID NO: 1011120 - RNA, 19 nt, Artificial Sequence
  Description of Artificial Sequence: Synthetic oligonucleotide
caaugagauuugcacucug

SEQ ID NO: 1011121 - RNA, 19 nt, Artificial Sequence
  Description of Artificial Sequence: Synthetic oligonucleotide
aucuagcggggcuggguuc

SEQ ID NO: 1011122 - RNA, 19 nt, Artificial Sequence
  Description of Artificial Sequence: Synthetic oligonucleotide
cagaggugccuacuaucgg

SEQ ID NO: 1011123 - RNA, 19 nt, Artificial Sequence
  Description of Artificial Sequence: Synthetic oligonucleotide
aauuagccucugaaaugcu

SEQ ID NO: 1011124 - RNA, 19 nt, Artificial Sequence
  Description of Artificial Sequence: Synthetic oligonucleotide
uuucuaaggaguggauuuu

SEQ ID NO: 1011125 - RNA, 19 nt, Artificial Sequence
  Description of Artificial Sequence: Synthetic oligonucleotide
gaugccggacucauaguuc

SEQ ID NO: 1011126 - RNA, 19 nt, Artificial Sequence
  Description of Artificial Sequence: Synthetic oligonucleotide
ucccaagggguaccgcagc

SEQ ID NO: 1011127 - RNA, 19 nt, Artificial Sequence
  Description of Artificial Sequence: Synthetic oligonucleotide
uguugcuuuuaggaccagu

SEQ ID NO: 1011128 - RNA, 19 nt, Artificial Sequence
  Description of Artificial Sequence: Synthetic oligonucleotide
ugaggcucgagcgcugucu

SEQ ID NO: 1011129 - RNA, 19 nt, Artificial Sequence
  Description of Artificial Sequence: Synthetic oligonucleotide
guugcgaacuguaacugaa

SEQ ID NO: 1011130 - RNA, 19 nt, Artificial Sequence
  Description of Artificial Sequence: Synthetic oligonucleotide
acaaugagauuugcacucu

SEQ ID NO: 1011131 - RNA, 19 nt, Artificial Sequence
  Description of Artificial Sequence: Synthetic oligonucleotide
guggacaaugagguuggag

SEQ ID NO: 1011132 - RNA, 19 nt, Artificial Sequence
  Description of Artificial Sequence: Synthetic oligonucleotide
cucccaagggguaccgcag

SEQ ID NO: 1011133 - RNA, 19 nt, Artificial Sequence
  Description of Artificial Sequence: Synthetic oligonucleotide
cuacuaucgggagcaguag

SEQ ID NO: 1011134 - RNA, 19 nt, Artificial Sequence
  Description of Artificial Sequence: Synthetic oligonucleotide
uccuagcucagguccuuga

SEQ ID NO: 1011135 - RNA, 19 nt, Artificial Sequence
  Description of Artificial Sequence: Synthetic oligonucleotide
ugucaguaucuagcggggc

SEQ ID NO: 1011136 - RNA, 19 nt, Artificial Sequence
  Description of Artificial Sequence: Synthetic oligonucleotide
ggauacccaacaucgguca

SEQ ID NO: 1011137 - RNA, 19 nt, Artificial Sequence
  Description of Artificial Sequence: Synthetic oligonucleotide
ugccgagcaaguugcgaac

SEQ ID NO: 1011138 - RNA, 19 nt, Artificial Sequence
  Description of Artificial Sequence: Synthetic oligonucleotide
ggauuucacucuuggccag

SEQ ID NO: 1011139 - RNA, 19 nt, Artificial Sequence
  Description of Artificial Sequence: Synthetic oligonucleotide
gaggcucgagcgcugucug

SEQ ID NO: 1011140 - RNA, 19 nt, Artificial Sequence
  Description of Artificial Sequence: Synthetic oligonucleotide
gugccuacuaucgggagca

SEQ ID NO: 1011141 - RNA, 19 nt, Artificial Sequence
  Description of Artificial Sequence: Synthetic oligonucleotide
guggacaauaaggcaggag

SEQ ID NO: 1011142 - RNA, 19 nt, Artificial Sequence
  Description of Artificial Sequence: Synthetic oligonucleotide
gguaugagcuacaagugaa

SEQ ID NO: 1011143 - RNA, 19 nt, Artificial Sequence
  Description of Artificial Sequence: Synthetic oligonucleotide
cccagaacauuuucugacc

SEQ ID NO: 1011144 - RNA, 19 nt, Artificial Sequence
  Description of Artificial Sequence: Synthetic oligonucleotide
gccacagucguuacaggcg

SEQ ID NO: 1011145 - RNA, 19 nt, Artificial Sequence
  Description of Artificial Sequence: Synthetic oligonucleotide
aacuaaggcuguauuucuu

SEQ ID NO: 1011146 - RNA, 19 nt, Artificial Sequence
  Description of Artificial Sequence: Synthetic oligonucleotide
aggugccuacuaucgggag

SEQ ID NO: 1011147 - RNA, 19 nt, Artificial Sequence
  Description of Artificial Sequence: Synthetic oligonucleotide
ccaacaucggucacacccc

SEQ ID NO: 1011148 - RNA, 19 nt, Artificial Sequence
  Description of Artificial Sequence: Synthetic oligonucleotide
ggugccuacuaucgggagc

SEQ ID NO: 1011149 - RNA, 19 nt, Artificial Sequence
  Description of Artificial Sequence: Synthetic oligonucleotide
aagaggcucgccccacgau

SEQ ID NO: 1011150 - RNA, 19 nt, Artificial Sequence
  Description of Artificial Sequence: Synthetic oligonucleotide
cagucguuacaggcgaaag

SEQ ID NO: 1011151 - RNA, 19 nt, Artificial Sequence
  Description of Artificial Sequence: Synthetic oligonucleotide
cacacuuugcgcauucaua

SEQ ID NO: 1011152 - RNA, 19 nt, Artificial Sequence
  Description of Artificial Sequence: Synthetic oligonucleotide
gauguacaacaagguuugc

SEQ ID NO: 1011153 - RNA, 19 nt, Artificial Sequence
  Description of Artificial Sequence: Synthetic oligonucleotide
cugguguacaaugagauuu

SEQ ID NO: 1011154 - RNA, 19 nt, Artificial Sequence
  Description of Artificial Sequence: Synthetic oligonucleotide
gagucccugguaaugagua

SEQ ID NO: 1011155 - RNA, 19 nt, Artificial Sequence
  Description of Artificial Sequence: Synthetic oligonucleotide
aagggguaccgcagcagca

SEQ ID NO: 1011156 - RNA, 19 nt, Artificial Sequence
  Description of Artificial Sequence: Synthetic oligonucleotide
uggugccgagcaaguugcg

SEQ ID NO: 1011157 - RNA, 19 nt, Artificial Sequence
  Description of Artificial Sequence: Synthetic oligonucleotide
aguaucuagcggggcuggg

SEQ ID NO: 1011158 - RNA, 19 nt, Artificial Sequence
  Description of Artificial Sequence: Synthetic oligonucleotide
gaugcacaacaagguuugc

SEQ ID NO: 1011159 - RNA, 19 nt, Artificial Sequence
  Description of Artificial Sequence: Synthetic oligonucleotide
caguaucuagcggggcugg

SEQ ID NO: 1011160 - RNA, 19 nt, Artificial Sequence
  Description of Artificial Sequence: Synthetic oligonucleotide
uugcgcauucauagggcuu

SEQ ID NO: 1011161 - RNA, 19 nt, Artificial Sequence
  Description of Artificial Sequence: Synthetic oligonucleotide
gugccgagcaaguugcgaa

SEQ ID NO: 1011162 - RNA, 19 nt, Artificial Sequence
  Description of Artificial Sequence: Synthetic oligonucleotide
ccacggauuucacucuugg

SEQ ID NO: 1011163 - RNA, 19 nt, Artificial Sequence
  Description of Artificial Sequence: Synthetic oligonucleotide
uuaggaccagugccauguc

SEQ ID NO: 1011164 - RNA, 19 nt, Artificial Sequence
  Description of Artificial Sequence: Synthetic oligonucleotide
cccaucuaaucuucaaguc

SEQ ID NO: 1011165 - RNA, 19 nt, Artificial Sequence
  Description of Artificial Sequence: Synthetic oligonucleotide
gcuuuuaggaccagugcca

SEQ ID NO: 1011166 - RNA, 19 nt, Artificial Sequence
  Description of Artificial Sequence: Synthetic oligonucleotide
gaggugccuacuaucggga

SEQ ID NO: 1011167 - RNA, 19 nt, Artificial Sequence
  Description of Artificial Sequence: Synthetic oligonucleotide
caagguuugcacucugacu

SEQ ID NO: 1011168 - RNA, 19 nt, Artificial Sequence
  Description of Artificial Sequence: Synthetic oligonucleotide
guagcucccaagggguacc

SEQ ID NO: 1011169 - RNA, 19 nt, Artificial Sequence
  Description of Artificial Sequence: Synthetic oligonucleotide
ucgaaagcugagggauacc

SEQ ID NO: 1011170 - RNA, 19 nt, Artificial Sequence
  Description of Artificial Sequence: Synthetic oligonucleotide
uggaugccggacucauagu

SEQ ID NO: 1011171 - RNA, 19 nt, Artificial Sequence
  Description of Artificial Sequence: Synthetic oligonucleotide
aggaagguccccacuguga

SEQ ID NO: 1011172 - RNA, 19 nt, Artificial Sequence
  Description of Artificial Sequence: Synthetic oligonucleotide
gguguacaaugagauuugc

SEQ ID NO: 1011173 - RNA, 19 nt, Artificial Sequence
  Description of Artificial Sequence: Synthetic oligonucleotide
acacccuguugcuacucaa

SEQ ID NO: 1011174 - RNA, 19 nt, Artificial Sequence
  Description of Artificial Sequence: Synthetic oligonucleotide
aucgggagcaguagguuau

SEQ ID NO: 1011175 - RNA, 19 nt, Artificial Sequence
  Description of Artificial Sequence: Synthetic oligonucleotide
cgcugcaccacacuuugcg

SEQ ID NO: 1011176 - RNA, 19 nt, Artificial Sequence
  Description of Artificial Sequence: Synthetic oligonucleotide
ggauccaguaguuguaggu

SEQ ID NO: 1011177 - RNA, 19 nt, Artificial Sequence
  Description of Artificial Sequence: Synthetic oligonucleotide
cgaaagcugagggauaccc

SEQ ID NO: 1011178 - RNA, 19 nt, Artificial Sequence
  Description of Artificial Sequence: Synthetic oligonucleotide
ugccaugucccagaacauu

SEQ ID NO: 1011179 - RNA, 19 nt, Artificial Sequence
  Description of Artificial Sequence: Synthetic oligonucleotide
cacuugcugacuggaugcc

SEQ ID NO: 1011180 - RNA, 19 nt, Artificial Sequence
  Description of Artificial Sequence: Synthetic oligonucleotide
auggacuuucuggugccga

SEQ ID NO: 1011181 - RNA, 19 nt, Artificial Sequence
  Description of Artificial Sequence: Synthetic oligonucleotide
caucaaggaaacacccugu

SEQ ID NO: 1011182 - RNA, 19 nt, Artificial Sequence
  Description of Artificial Sequence: Synthetic oligonucleotide
agcaaguugcgaacuguaa

SEQ ID NO: 1011183 - RNA, 19 nt, Artificial Sequence
  Description of Artificial Sequence: Synthetic oligonucleotide
ucgcaugaggugugaguua

SEQ ID NO: 1011184 - RNA, 19 nt, Artificial Sequence
  Description of Artificial Sequence: Synthetic oligonucleotide
cacuacacguaaaaggcuu

SEQ ID NO: 1011185 - RNA, 19 nt, Artificial Sequence
  Description of Artificial Sequence: Synthetic oligonucleotide
acagucguuacaggcgaaa

SEQ ID NO: 1011186 - RNA, 19 nt, Artificial Sequence
  Description of Artificial Sequence: Synthetic oligonucleotide
ucucaguuauauggacuuu

SEQ ID NO: 1011187 - RNA, 19 nt, Artificial Sequence
  Description of Artificial Sequence: Synthetic oligonucleotide
ccuaaaaucaggagaggcu

SEQ ID NO: 1011188 - RNA, 19 nt, Artificial Sequence
  Description of Artificial Sequence: Synthetic oligonucleotide
gaguagguaugagcuacaa

SEQ ID NO: 1011189 - RNA, 19 nt, Artificial Sequence
  Description of Artificial Sequence: Synthetic oligonucleotide
aucggucacaccccaucua

SEQ ID NO: 1011190 - RNA, 19 nt, Artificial Sequence
  Description of Artificial Sequence: Synthetic oligonucleotide
ccuacuaucgggagcagua

SEQ ID NO: 1011191 - RNA, 19 nt, Artificial Sequence
  Description of Artificial Sequence: Synthetic oligonucleotide
gagcaaguugcgaacugua

SEQ ID NO: 1011192 - RNA, 19 nt, Artificial Sequence
  Description of Artificial Sequence: Synthetic oligonucleotide
aggcuccacggauuucacu

SEQ ID NO: 1011193 - RNA, 19 nt, Artificial Sequence
  Description of Artificial Sequence: Synthetic oligonucleotide
acuacacguaaaaggcuuu

SEQ ID NO: 1011194 - RNA, 19 nt, Artificial Sequence
  Description of Artificial Sequence: Synthetic oligonucleotide
gggauacccaacaucgguc

SEQ ID NO: 1011195 - RNA, 19 nt, Artificial Sequence
  Description of Artificial Sequence: Synthetic oligonucleotide
auuugaacucugagugaaa

SEQ ID NO: 1011196 - RNA, 19 nt, Artificial Sequence
  Description of Artificial Sequence: Synthetic oligonucleotide
caagguuugcacucugaau

SEQ ID NO: 1011197 - RNA, 19 nt, Artificial Sequence
  Description of Artificial Sequence: Synthetic oligonucleotide
cuacauacauaaggaaggu

SEQ ID NO: 1011198 - RNA, 19 nt, Artificial Sequence
  Description of Artificial Sequence: Synthetic oligonucleotide
cauaaggaagguccccacu

SEQ ID NO: 1011199 - RNA, 19 nt, Artificial Sequence
  Description of Artificial Sequence: Synthetic oligonucleotide
caacaucggucacacccca

SEQ ID NO: 1011200 - RNA, 19 nt, Artificial Sequence
  Description of Artificial Sequence: Synthetic oligonucleotide
guuacagguauaagguuuu

SEQ ID NO: 1011201 - RNA, 19 nt, Artificial Sequence
  Description of Artificial Sequence: Synthetic oligonucleotide
ucgggagcaguagguuaug

SEQ ID NO: 1011202 - RNA, 19 nt, Artificial Sequence
  Description of Artificial Sequence: Synthetic oligonucleotide
augaggcuccacggauuuc

SEQ ID NO: 1011203 - RNA, 19 nt, Artificial Sequence
  Description of Artificial Sequence: Synthetic oligonucleotide
gucgcaugaggugugaguu

SEQ ID NO: 1011204 - RNA, 19 nt, Artificial Sequence
  Description of Artificial Sequence: Synthetic oligonucleotide
cacauugguuacagguaua

SEQ ID NO: 1011205 - RNA, 19 nt, Artificial Sequence
  Description of Artificial Sequence: Synthetic oligonucleotide
ggacucauaguuccaugcu

SEQ ID NO: 1011206 - RNA, 19 nt, Artificial Sequence
  Description of Artificial Sequence: Synthetic oligonucleotide
ggacuuucuggugccgagc

SEQ ID NO: 1011207 - RNA, 19 nt, Artificial Sequence
  Description of Artificial Sequence: Synthetic oligonucleotide
gugucgcaugaggugugag

SEQ ID NO: 1011208 - RNA, 19 nt, Artificial Sequence
  Description of Artificial Sequence: Synthetic oligonucleotide
acgcugcaccacacuuugc

SEQ ID NO: 1011209 - RNA, 19 nt, Artificial Sequence
  Description of Artificial Sequence: Synthetic oligonucleotide
gaggcucgccccacgaucu

SEQ ID NO: 1011210 - RNA, 19 nt, Artificial Sequence
  Description of Artificial Sequence: Synthetic oligonucleotide
uucuggugccgagcaaguu

SEQ ID NO: 1011211 - RNA, 19 nt, Artificial Sequence
  Description of Artificial Sequence: Synthetic oligonucleotide
ccacagucguuacaggcga

SEQ ID NO: 1011212 - RNA, 19 nt, Artificial Sequence
  Description of Artificial Sequence: Synthetic oligonucleotide
gccccaggccuugacauug

SEQ ID NO: 1011213 - RNA, 19 nt, Artificial Sequence
  Description of Artificial Sequence: Synthetic oligonucleotide
ggugugaguuagaaaugaa

SEQ ID NO: 1011214 - RNA, 19 nt, Artificial Sequence
  Description of Artificial Sequence: Synthetic oligonucleotide
ugccuacuaucgggagcag

SEQ ID NO: 1011215 - RNA, 19 nt, Artificial Sequence
  Description of Artificial Sequence: Synthetic oligonucleotide
agguuaugaccaacaucaa

SEQ ID NO: 1011216 - RNA, 19 nt, Artificial Sequence
  Description of Artificial Sequence: Synthetic oligonucleotide
uggcuucgcugguguacaa

SEQ ID NO: 1011217 - RNA, 19 nt, Artificial Sequence
  Description of Artificial Sequence: Synthetic oligonucleotide
ccaagaggcucgccccacg

SEQ ID NO: 1011218 - RNA, 19 nt, Artificial Sequence
  Description of Artificial Sequence: Synthetic oligonucleotide
gcucgagcgcugucugaag

SEQ ID NO: 1011219 - RNA, 19 nt, Artificial Sequence
  Description of Artificial Sequence: Synthetic oligonucleotide
ccggacucauaguuccaug

SEQ ID NO: 1011220 - RNA, 19 nt, Artificial Sequence
  Description of Artificial Sequence: Synthetic oligonucleotide
guaucuagcggggcugggu

SEQ ID NO: 1011221 - RNA, 19 nt, Artificial Sequence
  Description of Artificial Sequence: Synthetic oligonucleotide
agcuucuagugaaggcuuu

SEQ ID NO: 1011222 - RNA, 19 nt, Artificial Sequence
  Description of Artificial Sequence: Synthetic oligonucleotide
cccuuuucacaagauucuc

SEQ ID NO: 1011223 - RNA, 19 nt, Artificial Sequence
  Description of Artificial Sequence: Synthetic oligonucleotide
cagaguacacuugcugacu

SEQ ID NO: 1011224 - RNA, 19 nt, Artificial Sequence
  Description of Artificial Sequence: Synthetic oligonucleotide
gaguagcucccaaggggua

SEQ ID NO: 1011225 - RNA, 19 nt, Artificial Sequence
  Description of Artificial Sequence: Synthetic oligonucleotide
ccgagcaaguugcgaacug

SEQ ID NO: 1011226 - RNA, 19 nt, Artificial Sequence
  Description of Artificial Sequence: Synthetic oligonucleotide
ggugccgagcaaguugcga

SEQ ID NO: 1011227 - RNA, 19 nt, Artificial Sequence
  Description of Artificial Sequence: Synthetic oligonucleotide
cuagcggggcuggguuccc

SEQ ID NO: 1011228 - RNA, 19 nt, Artificial Sequence
  Description of Artificial Sequence: Synthetic oligonucleotide
cacagucguuacaggcgaa

SEQ ID NO: 1011229 - RNA, 19 nt, Artificial Sequence
  Description of Artificial Sequence: Synthetic oligonucleotide
gcuacucaacaagaugggu

SEQ ID NO: 1011230 - RNA, 19 nt, Artificial Sequence
  Description of Artificial Sequence: Synthetic oligonucleotide
accuuccauuacagaaaau

SEQ ID NO: 1011231 - RNA, 19 nt, Artificial Sequence
  Description of Artificial Sequence: Synthetic oligonucleotide
gguggacaauaaggcagga

SEQ ID NO: 1011232 - RNA, 19 nt, Artificial Sequence
  Description of Artificial Sequence: Synthetic oligonucleotide
ggcucgagcgcugucugaa

SEQ ID NO: 1011233 - RNA, 19 nt, Artificial Sequence
  Description of Artificial Sequence: Synthetic oligonucleotide
cccgcuuuauuuucugccu

SEQ ID NO: 1011234 - RNA, 19 nt, Artificial Sequence
  Description of Artificial Sequence: Synthetic oligonucleotide
ggguaccgcagcagcagca

SEQ ID NO: 1011235 - RNA, 19 nt, Artificial Sequence
  Description of Artificial Sequence: Synthetic oligonucleotide
ggugucgcaugagguguga

SEQ ID NO: 1011236 - RNA, 19 nt, Artificial Sequence
  Description of Artificial Sequence: Synthetic oligonucleotide
cuaucgggagcaguagguu

SEQ ID NO: 1011237 - RNA, 19 nt, Artificial Sequence
  Description of Artificial Sequence: Synthetic oligonucleotide
gcuccacggauuucacucu

SEQ ID NO: 1011238 - RNA, 19 nt, Artificial Sequence
  Description of Artificial Sequence: Synthetic oligonucleotide
cccgaugaggcuccacgga

SEQ ID NO: 1011239 - RNA, 19 nt, Artificial Sequence
  Description of Artificial Sequence: Synthetic oligonucleotide
aggcucgccccacgaucuu

SEQ ID NO: 1011240 - RNA, 19 nt, Artificial Sequence
  Description of Artificial Sequence: Synthetic oligonucleotide
cuccacggauuucacucuu

SEQ ID NO: 1011241 - RNA, 19 nt, Artificial Sequence
  Description of Artificial Sequence: Synthetic oligonucleotide
cccaagaggcucgccccac

SEQ ID NO: 1011242 - RNA, 19 nt, Artificial Sequence
  Description of Artificial Sequence: Synthetic oligonucleotide
gccgagcaaguugcgaacu

SEQ ID NO: 1011243 - RNA, 19 nt, Artificial Sequence
  Description of Artificial Sequence: Synthetic oligonucleotide
gguggacaaugagguugga

SEQ ID NO: 1011244 - RNA, 19 nt, Artificial Sequence
  Description of Artificial Sequence: Synthetic oligonucleotide
ccgaugaggcuccacggau

SEQ ID NO: 1011245 - RNA, 19 nt, Artificial Sequence
  Description of Artificial Sequence: Synthetic oligonucleotide
gccuacuaucgggagcagu

SEQ ID NO: 1011246 - RNA, 19 nt, Artificial Sequence
  Description of Artificial Sequence: Synthetic oligonucleotide
gccggacucauaguuccau

SEQ ID NO: 1011247 - RNA, 19 nt, Artificial Sequence
  Description of Artificial Sequence: Synthetic oligonucleotide
ggcuucgcugguguacaau

SEQ ID NO: 1011248 - RNA, 19 nt, Artificial Sequence
  Description of Artificial Sequence: Synthetic oligonucleotide
gggccccaagaggcucgcc

SEQ ID NO: 1011249 - RNA, 19 nt, Artificial Sequence
  Description of Artificial Sequence: Synthetic oligonucleotide
gcucgccccacgaucuuuu

SEQ ID NO: 1011250 - RNA, 19 nt, Artificial Sequence
  Description of Artificial Sequence: Synthetic oligonucleotide
ggcucgccccacgaucuuu

SEQ ID NO: 1011251 - RNA, 19 nt, Artificial Sequence
  Description of Artificial Sequence: Synthetic oligonucleotide
aagauauucauccucuugc

SEQ ID NO: 1011252 - RNA, 19 nt, Artificial Sequence
  Description of Artificial Sequence: Synthetic oligonucleotide
aauuucaagacauuaauca

SEQ ID NO: 1011253 - RNA, 19 nt, Artificial Sequence
  Description of Artificial Sequence: Synthetic oligonucleotide
acauuaaucagcuacuugc

SEQ ID NO: 1011254 - RNA, 19 nt, Artificial Sequence
  Description of Artificial Sequence: Synthetic oligonucleotide
agauuaugggucuugaagc

SEQ ID NO: 1011255 - RNA, 19 nt, Artificial Sequence
  Description of Artificial Sequence: Synthetic oligonucleotide
cugaauauuacuuuuaaug

SEQ ID NO: 1011256 - RNA, 19 nt, Artificial Sequence
  Description of Artificial Sequence: Synthetic oligonucleotide
aauacuuccaauuuucuau

SEQ ID NO: 1011257 - RNA, 19 nt, Artificial Sequence
  Description of Artificial Sequence: Synthetic oligonucleotide
aaaguuagggcuugggcgg

SEQ ID NO: 1011258 - RNA, 19 nt, Artificial Sequence
  Description of Artificial Sequence: Synthetic oligonucleotide
auaaguacuaaauaaauuu

SEQ ID NO: 1011259 - RNA, 19 nt, Artificial Sequence
  Description of Artificial Sequence: Synthetic oligonucleotide
uacaagggaagccaaaagg

SEQ ID NO: 1011260 - RNA, 19 nt, Artificial Sequence
  Description of Artificial Sequence: Synthetic oligonucleotide
aagggauuaauccugaaaa

SEQ ID NO: 1011261 - RNA, 19 nt, Artificial Sequence
  Description of Artificial Sequence: Synthetic oligonucleotide
aagacugcggcccaguggg

SEQ ID NO: 1011262 - RNA, 19 nt, Artificial Sequence
  Description of Artificial Sequence: Synthetic oligonucleotide
uggaaauuaccuccuaugg

SEQ ID NO: 1011263 - RNA, 19 nt, Artificial Sequence
  Description of Artificial Sequence: Synthetic oligonucleotide
caaguuucaccucauaucg

SEQ ID NO: 1011264 - RNA, 19 nt, Artificial Sequence
  Description of Artificial Sequence: Synthetic oligonucleotide
uuucaagacauuaaucagc

SEQ ID NO: 1011265 - RNA, 19 nt, Artificial Sequence
  Description of Artificial Sequence: Synthetic oligonucleotide
auuuaagauauucauccuc

SEQ ID NO: 1011266 - RNA, 19 nt, Artificial Sequence
  Description of Artificial Sequence: Synthetic oligonucleotide
uaacuuucaaguuucaccu

SEQ ID NO: 1011267 - RNA, 19 nt, Artificial Sequence
  Description of Artificial Sequence: Synthetic oligonucleotide
augaugauagucuggaauc

SEQ ID NO: 1011268 - RNA, 19 nt, Artificial Sequence
  Description of Artificial Sequence: Synthetic oligonucleotide
uuuucuauaaguucuucac

SEQ ID NO: 1011269 - RNA, 19 nt, Artificial Sequence
  Description of Artificial Sequence: Synthetic oligonucleotide
caagacauuaaucagcuac

SEQ ID NO: 1011270 - RNA, 19 nt, Artificial Sequence
  Description of Artificial Sequence: Synthetic oligonucleotide
uucacaacuagaagggagg

SEQ ID NO: 1011271 - RNA, 19 nt, Artificial Sequence
  Description of Artificial Sequence: Synthetic oligonucleotide
aauaacagacaucaacccu

SEQ ID NO: 1011272 - RNA, 19 nt, Artificial Sequence
  Description of Artificial Sequence: Synthetic oligonucleotide
uguauuaucucaguuaacu

SEQ ID NO: 1011273 - RNA, 19 nt, Artificial Sequence
  Description of Artificial Sequence: Synthetic oligonucleotide
accuuuuacuguuugcugc

SEQ ID NO: 1011274 - RNA, 19 nt, Artificial Sequence
  Description of Artificial Sequence: Synthetic oligonucleotide
ucuggaaucagaaggcgag

SEQ ID NO: 1011275 - RNA, 19 nt, Artificial Sequence
  Description of Artificial Sequence: Synthetic oligonucleotide
ugcuauggaaauuaccucc

SEQ ID NO: 1011276 - RNA, 19 nt, Artificial Sequence
  Description of Artificial Sequence: Synthetic oligonucleotide
aagcgcugaacuuauuuuc

SEQ ID NO: 1011277 - RNA, 19 nt, Artificial Sequence
  Description of Artificial Sequence: Synthetic oligonucleotide
uuuauccccauucaauuca

SEQ ID NO: 1011278 - RNA, 19 nt, Artificial Sequence
  Description of Artificial Sequence: Synthetic oligonucleotide
gacgucuucaacuucuuag

SEQ ID NO: 1011279 - RNA, 19 nt, Artificial Sequence
  Description of Artificial Sequence: Synthetic oligonucleotide
guaacaguggaguuuaccc

SEQ ID NO: 1011280 - RNA, 19 nt, Artificial Sequence
  Description of Artificial Sequence: Synthetic oligonucleotide
uccaugaacggacagauua

SEQ ID NO: 1011281 - RNA, 19 nt, Artificial Sequence
  Description of Artificial Sequence: Synthetic oligonucleotide
uucuauaaguucuucacaa

SEQ ID NO: 1011282 - RNA, 19 nt, Artificial Sequence
  Description of Artificial Sequence: Synthetic oligonucleotide
cucauaucguaguacacgg

SEQ ID NO: 1011283 - RNA, 19 nt, Artificial Sequence
  Description of Artificial Sequence: Synthetic oligonucleotide
aauauuacuuuuaaugaau

SEQ ID NO: 1011284 - RNA, 19 nt, Artificial Sequence
  Description of Artificial Sequence: Synthetic oligonucleotide
aauggagaccaccagaguu

SEQ ID NO: 1011285 - RNA, 19 nt, Artificial Sequence
  Description of Artificial Sequence: Synthetic oligonucleotide
ugcucguuaaggaaucccg

SEQ ID NO: 1011286 - RNA, 19 nt, Artificial Sequence
  Description of Artificial Sequence: Synthetic oligonucleotide
agcaaaacggagcaauggg

SEQ ID NO: 1011287 - RNA, 19 nt, Artificial Sequence
  Description of Artificial Sequence: Synthetic oligonucleotide
uauaaguucuucacaacaa

SEQ ID NO: 1011288 - RNA, 19 nt, Artificial Sequence
  Description of Artificial Sequence: Synthetic oligonucleotide
auggagauuagcaucacac

SEQ ID NO: 1011289 - RNA, 19 nt, Artificial Sequence
  Description of Artificial Sequence: Synthetic oligonucleotide
uucauuuaagauauucauc

SEQ ID NO: 1011290 - RNA, 19 nt, Artificial Sequence
  Description of Artificial Sequence: Synthetic oligonucleotide
uuucuauaaguucuucaca

SEQ ID NO: 1011291 - RNA, 19 nt, Artificial Sequence
  Description of Artificial Sequence: Synthetic oligonucleotide
cagauuaugggucuugaag

SEQ ID NO: 1011292 - RNA, 19 nt, Artificial Sequence
  Description of Artificial Sequence: Synthetic oligonucleotide
aaguuuucgaggggcagcc

SEQ ID NO: 1011293 - RNA, 19 nt, Artificial Sequence
  Description of Artificial Sequence: Synthetic oligonucleotide
ucguaguacacggaggucg

SEQ ID NO: 1011294 - RNA, 19 nt, Artificial Sequence
  Description of Artificial Sequence: Synthetic oligonucleotide
ucaaguuucaccucauauc

SEQ ID NO: 1011295 - RNA, 19 nt, Artificial Sequence
  Description of Artificial Sequence: Synthetic oligonucleotide
cauaucguaguacacggag

SEQ ID NO: 1011296 - RNA, 19 nt, Artificial Sequence
  Description of Artificial Sequence: Synthetic oligonucleotide
uaucguaguacacggaggu

SEQ ID NO: 1011297 - RNA, 19 nt, Artificial Sequence
  Description of Artificial Sequence: Synthetic oligonucleotide
accggcagcacacauugcc

SEQ ID NO: 1011298 - RNA, 19 nt, Artificial Sequence
  Description of Artificial Sequence: Synthetic oligonucleotide
cauucaauucauaauccug

SEQ ID NO: 1011299 - RNA, 19 nt, Artificial Sequence
  Description of Artificial Sequence: Synthetic oligonucleotide
augaccauuucaugauugc

SEQ ID NO: 1011300 - RNA, 19 nt, Artificial Sequence
  Description of Artificial Sequence: Synthetic oligonucleotide
aaucagaaggcgaggcucc

SEQ ID NO: 1011301 - RNA, 19 nt, Artificial Sequence
  Description of Artificial Sequence: Synthetic oligonucleotide
uuugacaccuucugggcag

SEQ ID NO: 1011302 - RNA, 19 nt, Artificial Sequence
  Description of Artificial Sequence: Synthetic oligonucleotide
uggcuaagaaucaaagaga

SEQ ID NO: 1011303 - RNA, 19 nt, Artificial Sequence
  Description of Artificial Sequence: Synthetic oligonucleotide
agccauacaagcuggcugg

SEQ ID NO: 1011304 - RNA, 19 nt, Artificial Sequence
  Description of Artificial Sequence: Synthetic oligonucleotide
aucccgacuaaugaggacc

SEQ ID NO: 1011305 - RNA, 19 nt, Artificial Sequence
  Description of Artificial Sequence: Synthetic oligonucleotide
ccuccuauggaaaugaugc

SEQ ID NO: 1011306 - RNA, 19 nt, Artificial Sequence
  Description of Artificial Sequence: Synthetic oligonucleotide
uuaaucagcuacuugccuc

SEQ ID NO: 1011307 - RNA, 19 nt, Artificial Sequence
  Description of Artificial Sequence: Synthetic oligonucleotide
cuucacaacuagaagggag

SEQ ID NO: 1011308 - RNA, 19 nt, Artificial Sequence
  Description of Artificial Sequence: Synthetic oligonucleotide
aauaaguacuaaauaaauu

SEQ ID NO: 1011309 - RNA, 19 nt, Artificial Sequence
  Description of Artificial Sequence: Synthetic oligonucleotide
aaugcuuccauuggcuaag

SEQ ID NO: 1011310 - RNA, 19 nt, Artificial Sequence
  Description of Artificial Sequence: Synthetic oligonucleotide
uaaucagcuacuugccucc

SEQ ID NO: 1011311 - RNA, 19 nt, Artificial Sequence
  Description of Artificial Sequence: Synthetic oligonucleotide
cacaacaaugcuuccauug

SEQ ID NO: 1011312 - RNA, 19 nt, Artificial Sequence
  Description of Artificial Sequence: Synthetic oligonucleotide
aaggcgaggcuccggagac

SEQ ID NO: 1011313 - RNA, 19 nt, Artificial Sequence
  Description of Artificial Sequence: Synthetic oligonucleotide
cagacaucaacccuuacuc

SEQ ID NO: 1011314 - RNA, 19 nt, Artificial Sequence
  Description of Artificial Sequence: Synthetic oligonucleotide
gaacuuauuuuccuuccug

SEQ ID NO: 1011315 - RNA, 19 nt, Artificial Sequence
  Description of Artificial Sequence: Synthetic oligonucleotide
cauaauccuguuuagguca

SEQ ID NO: 1011316 - RNA, 19 nt, Artificial Sequence
  Description of Artificial Sequence: Synthetic oligonucleotide
ugauagucuggaaucagaa

SEQ ID NO: 1011317 - RNA, 19 nt, Artificial Sequence
  Description of Artificial Sequence: Synthetic oligonucleotide
acaacuagaagggaggcug

SEQ ID NO: 1011318 - RNA, 19 nt, Artificial Sequence
  Description of Artificial Sequence: Synthetic oligonucleotide
aacggacagauuauggguc

SEQ ID NO: 1011319 - RNA, 19 nt, Artificial Sequence
  Description of Artificial Sequence: Synthetic oligonucleotide
uggucaacuuuucuuauaa

SEQ ID NO: 1011320 - RNA, 19 nt, Artificial Sequence
  Description of Artificial Sequence: Synthetic oligonucleotide
cacaauggagauuagcauc

SEQ ID NO: 1011321 - RNA, 19 nt, Artificial Sequence
  Description of Artificial Sequence: Synthetic oligonucleotide
agccgcaaagaugugaggc

SEQ ID NO: 1011322 - RNA, 19 nt, Artificial Sequence
  Description of Artificial Sequence: Synthetic oligonucleotide
ucauaauccuguuuagguc

SEQ ID NO: 1011323 - RNA, 19 nt, Artificial Sequence
  Description of Artificial Sequence: Synthetic oligonucleotide
uuguuuacaaagaggguua

SEQ ID NO: 1011324 - RNA, 19 nt, Artificial Sequence
  Description of Artificial Sequence: Synthetic oligonucleotide
aauuaccuccuauggaaau

SEQ ID NO: 1011325 - RNA, 19 nt, Artificial Sequence
  Description of Artificial Sequence: Synthetic oligonucleotide
cuauaaguucuucacaaca

SEQ ID NO: 1011326 - RNA, 19 nt, Artificial Sequence
  Description of Artificial Sequence: Synthetic oligonucleotide
aaacugguuuuaguguccg

SEQ ID NO: 1011327 - RNA, 19 nt, Artificial Sequence
  Description of Artificial Sequence: Synthetic oligonucleotide
acuuccaauuuucuauaag

SEQ ID NO: 1011328 - RNA, 19 nt, Artificial Sequence
  Description of Artificial Sequence: Synthetic oligonucleotide
cugaacuuauuuuccuucc

SEQ ID NO: 1011329 - RNA, 19 nt, Artificial Sequence
  Description of Artificial Sequence: Synthetic oligonucleotide
ugcuauuuauccccauuca

SEQ ID NO: 1011330 - RNA, 19 nt, Artificial Sequence
  Description of Artificial Sequence: Synthetic oligonucleotide
cuucgcacccgaaacagag

SEQ ID NO: 1011331 - RNA, 19 nt, Artificial Sequence
  Description of Artificial Sequence: Synthetic oligonucleotide
aucugugccgcccuguguc

SEQ ID NO: 1011332 - RNA, 19 nt, Artificial Sequence
  Description of Artificial Sequence: Synthetic oligonucleotide
auugccguacaagggaagc

SEQ ID NO: 1011333 - RNA, 19 nt, Artificial Sequence
  Description of Artificial Sequence: Synthetic oligonucleotide
gauuaugggucuugaagca

SEQ ID NO: 1011334 - RNA, 19 nt, Artificial Sequence
  Description of Artificial Sequence: Synthetic oligonucleotide
uuaugggucuugaagcagu

SEQ ID NO: 1011335 - RNA, 19 nt, Artificial Sequence
  Description of Artificial Sequence: Synthetic oligonucleotide
uacaaagaggguuauuaua

SEQ ID NO: 1011336 - RNA, 19 nt, Artificial Sequence
  Description of Artificial Sequence: Synthetic oligonucleotide
ugguccguaguaacagugg

SEQ ID NO: 1011337 - RNA, 19 nt, Artificial Sequence
  Description of Artificial Sequence: Synthetic oligonucleotide
ucuauaaguucuucacaac

SEQ ID NO: 1011338 - RNA, 19 nt, Artificial Sequence
  Description of Artificial Sequence: Synthetic oligonucleotide
cuagaagggaggcugauca

SEQ ID NO: 1011339 - RNA, 19 nt, Artificial Sequence
  Description of Artificial Sequence: Synthetic oligonucleotide
gaugaccauuucaugauug

SEQ ID NO: 1011340 - RNA, 19 nt, Artificial Sequence
  Description of Artificial Sequence: Synthetic oligonucleotide
acaaagaggguuauuauaa

SEQ ID NO: 1011341 - RNA, 19 nt, Artificial Sequence
  Description of Artificial Sequence: Synthetic oligonucleotide
auuaaucagcuacuugccu

SEQ ID NO: 1011342 - RNA, 19 nt, Artificial Sequence
  Description of Artificial Sequence: Synthetic oligonucleotide
uccagagggcacaauggag

SEQ ID NO: 1011343 - RNA, 19 nt, Artificial Sequence
  Description of Artificial Sequence: Synthetic oligonucleotide
uccguaguaacaguggagu

SEQ ID NO: 1011344 - RNA, 19 nt, Artificial Sequence
  Description of Artificial Sequence: Synthetic oligonucleotide
ugcagcuuuacugauggac

SEQ ID NO: 1011345 - RNA, 19 nt, Artificial Sequence
  Description of Artificial Sequence: Synthetic oligonucleotide
uggugacacagaaaugaug

SEQ ID NO: 1011346 - RNA, 19 nt, Artificial Sequence
  Description of Artificial Sequence: Synthetic oligonucleotide
aagugaugcauggaugaug

SEQ ID NO: 1011347 - RNA, 19 nt, Artificial Sequence
  Description of Artificial Sequence: Synthetic oligonucleotide
uccucaucuccaugaacgg

SEQ ID NO: 1011348 - RNA, 19 nt, Artificial Sequence
  Description of Artificial Sequence: Synthetic oligonucleotide
ugaagcgcugaacuuauuu

SEQ ID NO: 1011349 - RNA, 19 nt, Artificial Sequence
  Description of Artificial Sequence: Synthetic oligonucleotide
ucagcuacuugccucccca

SEQ ID NO: 1011350 - RNA, 19 nt, Artificial Sequence
  Description of Artificial Sequence: Synthetic oligonucleotide
uuacaaagaggguuauuau

SEQ ID NO: 1011351 - RNA, 19 nt, Artificial Sequence
  Description of Artificial Sequence: Synthetic oligonucleotide
agcgcugaacuuauuuucc

SEQ ID NO: 1011352 - RNA, 19 nt, Artificial Sequence
  Description of Artificial Sequence: Synthetic oligonucleotide
guugcuauggaaauuaccu

SEQ ID NO: 1011353 - RNA, 19 nt, Artificial Sequence
  Description of Artificial Sequence: Synthetic oligonucleotide
ugccaucaaagacugcggc

SEQ ID NO: 1011354 - RNA, 19 nt, Artificial Sequence
  Description of Artificial Sequence: Synthetic oligonucleotide
aaucaaagagaugcugccu

SEQ ID NO: 1011355 - RNA, 19 nt, Artificial Sequence
  Description of Artificial Sequence: Synthetic oligonucleotide
auuucugccuuggagccgg

SEQ ID NO: 1011356 - RNA, 19 nt, Artificial Sequence
  Description of Artificial Sequence: Synthetic oligonucleotide
ucgcacccgaaacagagcu

SEQ ID NO: 1011357 - RNA, 19 nt, Artificial Sequence
  Description of Artificial Sequence: Synthetic oligonucleotide
gacaucaacccuuacucaa

SEQ ID NO: 1011358 - RNA, 19 nt, Artificial Sequence
  Description of Artificial Sequence: Synthetic oligonucleotide
gaugauagucuggaaucag

SEQ ID NO: 1011359 - RNA, 19 nt, Artificial Sequence
  Description of Artificial Sequence: Synthetic oligonucleotide
uuuaggucacugugauuag

SEQ ID NO: 1011360 - RNA, 19 nt, Artificial Sequence
  Description of Artificial Sequence: Synthetic oligonucleotide
gcuagcaaaugguacuucg

SEQ ID NO: 1011361 - RNA, 19 nt, Artificial Sequence
  Description of Artificial Sequence: Synthetic oligonucleotide
aacagacaucaacccuuac

SEQ ID NO: 1011362 - RNA, 19 nt, Artificial Sequence
  Description of Artificial Sequence: Synthetic oligonucleotide
aaccagaccuuuuacuguu

SEQ ID NO: 1011363 - RNA, 19 nt, Artificial Sequence
  Description of Artificial Sequence: Synthetic oligonucleotide
ucaucccgacuaaugagga

SEQ ID NO: 1011364 - RNA, 19 nt, Artificial Sequence
  Description of Artificial Sequence: Synthetic oligonucleotide
uuccauuggcuaagaauca

SEQ ID NO: 1011365 - RNA, 19 nt, Artificial Sequence
  Description of Artificial Sequence: Synthetic oligonucleotide
uggaugaccauuucaugau

SEQ ID NO: 1011366 - RNA, 19 nt, Artificial Sequence
  Description of Artificial Sequence: Synthetic oligonucleotide
uuuucgaggggcagccacc

SEQ ID NO: 1011367 - RNA, 19 nt, Artificial Sequence
  Description of Artificial Sequence: Synthetic oligonucleotide
gcagagagaaguuuucgag

SEQ ID NO: 1011368 - RNA, 19 nt, Artificial Sequence
  Description of Artificial Sequence: Synthetic oligonucleotide
ugguuuuaguguccgugug

SEQ ID NO: 1011369 - RNA, 19 nt, Artificial Sequence
  Description of Artificial Sequence: Synthetic oligonucleotide
ucaucagcugaacuguuuu

SEQ ID NO: 1011370 - RNA, 19 nt, Artificial Sequence
  Description of Artificial Sequence: Synthetic oligonucleotide
uuaccuccuauggaaauga

SEQ ID NO: 1011371 - RNA, 19 nt, Artificial Sequence
  Description of Artificial Sequence: Synthetic oligonucleotide
agagcugacgagcaaguau

SEQ ID NO: 1011372 - RNA, 19 nt, Artificial Sequence
  Description of Artificial Sequence: Synthetic oligonucleotide
ugaugauagucuggaauca

SEQ ID NO: 1011373 - RNA, 19 nt, Artificial Sequence
  Description of Artificial Sequence: Synthetic oligonucleotide
ucguuaaggaaucccgcaa

SEQ ID NO: 1011374 - RNA, 19 nt, Artificial Sequence
  Description of Artificial Sequence: Synthetic oligonucleotide
ugaucaguaggaggaagug

SEQ ID NO: 1011375 - RNA, 19 nt, Artificial Sequence
  Description of Artificial Sequence: Synthetic oligonucleotide
uacuauggucaacuuuucu

SEQ ID NO: 1011376 - RNA, 19 nt, Artificial Sequence
  Description of Artificial Sequence: Synthetic oligonucleotide
auaucguaguacacggagg

SEQ ID NO: 1011377 - RNA, 19 nt, Artificial Sequence
  Description of Artificial Sequence: Synthetic oligonucleotide
uuuccguggugacauaaua

SEQ ID NO: 1011378 - RNA, 19 nt, Artificial Sequence
  Description of Artificial Sequence: Synthetic oligonucleotide
auaacagacaucaacccuu

SEQ ID NO: 1011379 - RNA, 19 nt, Artificial Sequence
  Description of Artificial Sequence: Synthetic oligonucleotide
uugcuauggaaauuaccuc

SEQ ID NO: 1011380 - RNA, 19 nt, Artificial Sequence
  Description of Artificial Sequence: Synthetic oligonucleotide
gacuaaugaggaccugccc

SEQ ID NO: 1011381 - RNA, 19 nt, Artificial Sequence
  Description of Artificial Sequence: Synthetic oligonucleotide
gucuucuaggcugucagcc

SEQ ID NO: 1011382 - RNA, 19 nt, Artificial Sequence
  Description of Artificial Sequence: Synthetic oligonucleotide
gaaguuuucgaggggcagc

SEQ ID NO: 1011383 - RNA, 19 nt, Artificial Sequence
  Description of Artificial Sequence: Synthetic oligonucleotide
gugauuacugaauauuacu

SEQ ID NO: 1011384 - RNA, 19 nt, Artificial Sequence
  Description of Artificial Sequence: Synthetic oligonucleotide
ucauaucguaguacacgga

SEQ ID NO: 1011385 - RNA, 19 nt, Artificial Sequence
  Description of Artificial Sequence: Synthetic oligonucleotide
gguacuucgcacccgaaac

SEQ ID NO: 1011386 - RNA, 19 nt, Artificial Sequence
  Description of Artificial Sequence: Synthetic oligonucleotide
aucagcuacuugccucccc

SEQ ID NO: 1011387 - RNA, 19 nt, Artificial Sequence
  Description of Artificial Sequence: Synthetic oligonucleotide
gaaacagagcugacgagca

SEQ ID NO: 1011388 - RNA, 19 nt, Artificial Sequence
  Description of Artificial Sequence: Synthetic oligonucleotide
agggauuaauccugaaaau

SEQ ID NO: 1011389 - RNA, 19 nt, Artificial Sequence
  Description of Artificial Sequence: Synthetic oligonucleotide
agucuggaaucagaaggcg

SEQ ID NO: 1011390 - RNA, 19 nt, Artificial Sequence
  Description of Artificial Sequence: Synthetic oligonucleotide
auuaccuccuauggaaaug

SEQ ID NO: 1011391 - RNA, 19 nt, Artificial Sequence
  Description of Artificial Sequence: Synthetic oligonucleotide
gauuacugaauauuacuuu

SEQ ID NO: 1011392 - RNA, 19 nt, Artificial Sequence
  Description of Artificial Sequence: Synthetic oligonucleotide
cagcaaaacggagcaaugg

SEQ ID NO: 1011393 - RNA, 19 nt, Artificial Sequence
  Description of Artificial Sequence: Synthetic oligonucleotide
uuucgaggggcagccaccg

SEQ ID NO: 1011394 - RNA, 19 nt, Artificial Sequence
  Description of Artificial Sequence: Synthetic oligonucleotide
gaacggacagauuaugggu

SEQ ID NO: 1011395 - RNA, 19 nt, Artificial Sequence
  Description of Artificial Sequence: Synthetic oligonucleotide
ggaacaaaggugguuuccg

SEQ ID NO: 1011396 - RNA, 19 nt, Artificial Sequence
  Description of Artificial Sequence: Synthetic oligonucleotide
uuguauuaucucaguuaac

SEQ ID NO: 1011397 - RNA, 19 nt, Artificial Sequence
  Description of Artificial Sequence: Synthetic oligonucleotide
ugauggacgucuucaacuu

SEQ ID NO: 1011398 - RNA, 19 nt, Artificial Sequence
  Description of Artificial Sequence: Synthetic oligonucleotide
uucaauucauaauccuguu

SEQ ID NO: 1011399 - RNA, 19 nt, Artificial Sequence
  Description of Artificial Sequence: Synthetic oligonucleotide
auacuuccaauuuucuaua

SEQ ID NO: 1011400 - RNA, 19 nt, Artificial Sequence
  Description of Artificial Sequence: Synthetic oligonucleotide
cugguccguaguaacagug

SEQ ID NO: 1011401 - RNA, 19 nt, Artificial Sequence
  Description of Artificial Sequence: Synthetic oligonucleotide
uacuguuugcugcucguua

SEQ ID NO: 1011402 - RNA, 19 nt, Artificial Sequence
  Description of Artificial Sequence: Synthetic oligonucleotide
agacaucaacccuuacuca

SEQ ID NO: 1011403 - RNA, 19 nt, Artificial Sequence
  Description of Artificial Sequence: Synthetic oligonucleotide
aggaccugcccauuagucu

SEQ ID NO: 1011404 - RNA, 19 nt, Artificial Sequence
  Description of Artificial Sequence: Synthetic oligonucleotide
cuccuauggaaaugaugcc

SEQ ID NO: 1011405 - RNA, 19 nt, Artificial Sequence
  Description of Artificial Sequence: Synthetic oligonucleotide
aaauuaccuccuauggaaa

SEQ ID NO: 1011406 - RNA, 19 nt, Artificial Sequence
  Description of Artificial Sequence: Synthetic oligonucleotide
auaauccuguuuaggucac

SEQ ID NO: 1011407 - RNA, 19 nt, Artificial Sequence
  Description of Artificial Sequence: Synthetic oligonucleotide
acuguuugcugcucguuaa

SEQ ID NO: 1011408 - RNA, 19 nt, Artificial Sequence
  Description of Artificial Sequence: Synthetic oligonucleotide
uuggugacacagaaaugau

SEQ ID NO: 1011409 - RNA, 19 nt, Artificial Sequence
  Description of Artificial Sequence: Synthetic oligonucleotide
cuugggcgguccuagacuc

SEQ ID NO: 1011410 - RNA, 19 nt, Artificial Sequence
  Description of Artificial Sequence: Synthetic oligonucleotide
uccuagacucucagggcug

SEQ ID NO: 1011411 - RNA, 19 nt, Artificial Sequence
  Description of Artificial Sequence: Synthetic oligonucleotide
cagccauacaagcuggcug

SEQ ID NO: 1011412 - RNA, 19 nt, Artificial Sequence
  Description of Artificial Sequence: Synthetic oligonucleotide
agggaagccaaaaggaaca

SEQ ID NO: 1011413 - RNA, 19 nt, Artificial Sequence
  Description of Artificial Sequence: Synthetic oligonucleotide
guuuucgaggggcagccac

SEQ ID NO: 1011414 - RNA, 19 nt, Artificial Sequence
  Description of Artificial Sequence: Synthetic oligonucleotide
ugaggaccugcccauuagu

SEQ ID NO: 1011415 - RNA, 19 nt, Artificial Sequence
  Description of Artificial Sequence: Synthetic oligonucleotide
agaaguuuucgaggggcag

SEQ ID NO: 1011416 - RNA, 19 nt, Artificial Sequence
  Description of Artificial Sequence: Synthetic oligonucleotide
aggaaguggugcucgccuc

SEQ ID NO: 1011417 - RNA, 19 nt, Artificial Sequence
  Description of Artificial Sequence: Synthetic oligonucleotide
ugguacuucgcacccgaaa

SEQ ID NO: 1011418 - RNA, 19 nt, Artificial Sequence
  Description of Artificial Sequence: Synthetic oligonucleotide
uuauccccauucaauucau

SEQ ID NO: 1011419 - RNA, 19 nt, Artificial Sequence
  Description of Artificial Sequence: Synthetic oligonucleotide
gguuuuaguguccgugugc

SEQ ID NO: 1011420 - RNA, 19 nt, Artificial Sequence
  Description of Artificial Sequence: Synthetic oligonucleotide
auggagaccaccagaguug

SEQ ID NO: 1011421 - RNA, 19 nt, Artificial Sequence
  Description of Artificial Sequence: Synthetic oligonucleotide
uuggacugaucugugccgc

SEQ ID NO: 1011422 - RNA, 19 nt, Artificial Sequence
  Description of Artificial Sequence: Synthetic oligonucleotide
ugccguacaagggaagcca

SEQ ID NO: 1011423 - RNA, 19 nt, Artificial Sequence
  Description of Artificial Sequence: Synthetic oligonucleotide
accuucugggcaguuuggc

SEQ ID NO: 1011424 - RNA, 19 nt, Artificial Sequence
  Description of Artificial Sequence: Synthetic oligonucleotide
ucgaggggcagccaccggu

SEQ ID NO: 1011425 - RNA, 19 nt, Artificial Sequence
  Description of Artificial Sequence: Synthetic oligonucleotide
ggcacaauggagauuagca

SEQ ID NO: 1011426 - RNA, 19 nt, Artificial Sequence
  Description of Artificial Sequence: Synthetic oligonucleotide
auauuacuuuuaaugaaua

SEQ ID NO: 1011427 - RNA, 19 nt, Artificial Sequence
  Description of Artificial Sequence: Synthetic oligonucleotide
caugaacggacagauuaug

SEQ ID NO: 1011428 - RNA, 19 nt, Artificial Sequence
  Description of Artificial Sequence: Synthetic oligonucleotide
acuagaagggaggcugauc

SEQ ID NO: 1011429 - RNA, 19 nt, Artificial Sequence
  Description of Artificial Sequence: Synthetic oligonucleotide
uaguugcuauggaaauuac

SEQ ID NO: 1011430 - RNA, 19 nt, Artificial Sequence
  Description of Artificial Sequence: Synthetic oligonucleotide
uccggagacacuggccugg

SEQ ID NO: 1011431 - RNA, 19 nt, Artificial Sequence
  Description of Artificial Sequence: Synthetic oligonucleotide
ucccaucaggggcugguug

SEQ ID NO: 1011432 - RNA, 19 nt, Artificial Sequence
  Description of Artificial Sequence: Synthetic oligonucleotide
cuauuuauccccauucaau

SEQ ID NO: 1011433 - RNA, 19 nt, Artificial Sequence
  Description of Artificial Sequence: Synthetic oligonucleotide
ucccgacuaaugaggaccu

SEQ ID NO: 1011434 - RNA, 19 nt, Artificial Sequence
  Description of Artificial Sequence: Synthetic oligonucleotide
uucagccauacaagcuggc

SEQ ID NO: 1011435 - RNA, 19 nt, Artificial Sequence
  Description of Artificial Sequence: Synthetic oligonucleotide
ucuucacaacuagaaggga

SEQ ID NO: 1011436 - RNA, 19 nt, Artificial Sequence
  Description of Artificial Sequence: Synthetic oligonucleotide
uucgcacccgaaacagagc

SEQ ID NO: 1011437 - RNA, 19 nt, Artificial Sequence
  Description of Artificial Sequence: Synthetic oligonucleotide
aguggugcucgccucuucu

SEQ ID NO: 1011438 - RNA, 19 nt, Artificial Sequence
  Description of Artificial Sequence: Synthetic oligonucleotide
guuugacaccuucugggca

SEQ ID NO: 1011439 - RNA, 19 nt, Artificial Sequence
  Description of Artificial Sequence: Synthetic oligonucleotide
ugcugcucguuaaggaauc

SEQ ID NO: 1011440 - RNA, 19 nt, Artificial Sequence
  Description of Artificial Sequence: Synthetic oligonucleotide
caccucauaucguaguaca

SEQ ID NO: 1011441 - RNA, 19 nt, Artificial Sequence
  Description of Artificial Sequence: Synthetic oligonucleotide
gaaggcgaggcuccggaga

SEQ ID NO: 1011442 - RNA, 19 nt, Artificial Sequence
  Description of Artificial Sequence: Synthetic oligonucleotide
ugucaggaacaaagguggu

SEQ ID NO: 1011443 - RNA, 19 nt, Artificial Sequence
  Description of Artificial Sequence: Synthetic oligonucleotide
augggucuugaagcagucc

SEQ ID NO: 1011444 - RNA, 19 nt, Artificial Sequence
  Description of Artificial Sequence: Synthetic oligonucleotide
uggugacauaauacuucca

SEQ ID NO: 1011445 - RNA, 19 nt, Artificial Sequence
  Description of Artificial Sequence: Synthetic oligonucleotide
gaugcuucaucccgacuaa

SEQ ID NO: 1011446 - RNA, 19 nt, Artificial Sequence
  Description of Artificial Sequence: Synthetic oligonucleotide
acccgaaacagagcugacg

SEQ ID NO: 1011447 - RNA, 19 nt, Artificial Sequence
  Description of Artificial Sequence: Synthetic oligonucleotide
ucugguccguaguaacagu

SEQ ID NO: 1011448 - RNA, 19 nt, Artificial Sequence
  Description of Artificial Sequence: Synthetic oligonucleotide
uuaggucacugugauuagu

SEQ ID NO: 1011449 - RNA, 19 nt, Artificial Sequence
  Description of Artificial Sequence: Synthetic oligonucleotide
cuuguuuacaaagaggguu

SEQ ID NO: 1011450 - RNA, 19 nt, Artificial Sequence
  Description of Artificial Sequence: Synthetic oligonucleotide
uccugaagcgcugaacuua

SEQ ID NO: 1011451 - RNA, 19 nt, Artificial Sequence
  Description of Artificial Sequence: Synthetic oligonucleotide
acagauuaugggucuugaa

SEQ ID NO: 1011452 - RNA, 19 nt, Artificial Sequence
  Description of Artificial Sequence: Synthetic oligonucleotide
augauagucuggaaucaga

SEQ ID NO: 1011453 - RNA, 19 nt, Artificial Sequence
  Description of Artificial Sequence: Synthetic oligonucleotide
uaguacacggaggucgccu

SEQ ID NO: 1011454 - RNA, 19 nt, Artificial Sequence
  Description of Artificial Sequence: Synthetic oligonucleotide
cuuccugaagcgcugaacu

SEQ ID NO: 1011455 - RNA, 19 nt, Artificial Sequence
  Description of Artificial Sequence: Synthetic oligonucleotide
uugccguacaagggaagcc

SEQ ID NO: 1011456 - RNA, 19 nt, Artificial Sequence
  Description of Artificial Sequence: Synthetic oligonucleotide
aaguuucaccucauaucgu

SEQ ID NO: 1011457 - RNA, 19 nt, Artificial Sequence
  Description of Artificial Sequence: Synthetic oligonucleotide
accagaguuggcuccacuu

SEQ ID NO: 1011458 - RNA, 19 nt, Artificial Sequence
  Description of Artificial Sequence: Synthetic oligonucleotide
uccauuggcuaagaaucaa

SEQ ID NO: 1011459 - RNA, 19 nt, Artificial Sequence
  Description of Artificial Sequence: Synthetic oligonucleotide
acuaaccggcagcacacau

SEQ ID NO: 1011460 - RNA, 19 nt, Artificial Sequence
  Description of Artificial Sequence: Synthetic oligonucleotide
gaaucccgcaaaugcaucu

SEQ ID NO: 1011461 - RNA, 19 nt, Artificial Sequence
  Description of Artificial Sequence: Synthetic oligonucleotide
gacagauuaugggucuuga

SEQ ID NO: 1011462 - RNA, 19 nt, Artificial Sequence
  Description of Artificial Sequence: Synthetic oligonucleotide
ucagaaggcgaggcuccgg

SEQ ID NO: 1011463 - RNA, 19 nt, Artificial Sequence
  Description of Artificial Sequence: Synthetic oligonucleotide
guacuucgcacccgaaaca

SEQ ID NO: 1011464 - RNA, 19 nt, Artificial Sequence
  Description of Artificial Sequence: Synthetic oligonucleotide
cgguccuagacucucaggg

SEQ ID NO: 1011465 - RNA, 19 nt, Artificial Sequence
  Description of Artificial Sequence: Synthetic oligonucleotide
ggggacaacacuuucuucu

SEQ ID NO: 1011466 - RNA, 19 nt, Artificial Sequence
  Description of Artificial Sequence: Synthetic oligonucleotide
caaagaggguuauuauaaa

SEQ ID NO: 1011467 - RNA, 19 nt, Artificial Sequence
  Description of Artificial Sequence: Synthetic oligonucleotide
cuucugguccguaguaaca

SEQ ID NO: 1011468 - RNA, 19 nt, Artificial Sequence
  Description of Artificial Sequence: Synthetic oligonucleotide
gaagcgcugaacuuauuuu

SEQ ID NO: 1011469 - RNA, 19 nt, Artificial Sequence
  Description of Artificial Sequence: Synthetic oligonucleotide
aucguaguacacggagguc

SEQ ID NO: 1011470 - RNA, 19 nt, Artificial Sequence
  Description of Artificial Sequence: Synthetic oligonucleotide
gagaccaccagaguuggcu

SEQ ID NO: 1011471 - RNA, 19 nt, Artificial Sequence
  Description of Artificial Sequence: Synthetic oligonucleotide
accuccuauggaaaugaug

SEQ ID NO: 1011472 - RNA, 19 nt, Artificial Sequence
  Description of Artificial Sequence: Synthetic oligonucleotide
gggacaacacuuucuucug

SEQ ID NO: 1011473 - RNA, 19 nt, Artificial Sequence
  Description of Artificial Sequence: Synthetic oligonucleotide
guccgugugcucaucauca

SEQ ID NO: 1011474 - RNA, 19 nt, Artificial Sequence
  Description of Artificial Sequence: Synthetic oligonucleotide
gccaucaaagacugcggcc

SEQ ID NO: 1011475 - RNA, 19 nt, Artificial Sequence
  Description of Artificial Sequence: Synthetic oligonucleotide
guccguaguaacaguggag

SEQ ID NO: 1011476 - RNA, 19 nt, Artificial Sequence
  Description of Artificial Sequence: Synthetic oligonucleotide
aggucgccuccuuugucag

SEQ ID NO: 1011477 - RNA, 19 nt, Artificial Sequence
  Description of Artificial Sequence: Synthetic oligonucleotide
gcuacuugccuccccaaac

SEQ ID NO: 1011478 - RNA, 19 nt, Artificial Sequence
  Description of Artificial Sequence: Synthetic oligonucleotide
gaggaccugcccauuaguc

SEQ ID NO: 1011479 - RNA, 19 nt, Artificial Sequence
  Description of Artificial Sequence: Synthetic oligonucleotide
ggaccugcccauuagucuc

SEQ ID NO: 1011480 - RNA, 19 nt, Artificial Sequence
  Description of Artificial Sequence: Synthetic oligonucleotide
cugcucguuaaggaauccc

SEQ ID NO: 1011481 - RNA, 19 nt, Artificial Sequence
  Description of Artificial Sequence: Synthetic oligonucleotide
gcuauuuauccccauucaa

SEQ ID NO: 1011482 - RNA, 19 nt, Artificial Sequence
  Description of Artificial Sequence: Synthetic oligonucleotide
acgagcaaguaugucucug

SEQ ID NO: 1011483 - RNA, 19 nt, Artificial Sequence
  Description of Artificial Sequence: Synthetic oligonucleotide
uggacugaucugugccgcc

SEQ ID NO: 1011484 - RNA, 19 nt, Artificial Sequence
  Description of Artificial Sequence: Synthetic oligonucleotide
guuuuaguguccgugugcu

SEQ ID NO: 1011485 - RNA, 19 nt, Artificial Sequence
  Description of Artificial Sequence: Synthetic oligonucleotide
ugcccauuagucucuccua

SEQ ID NO: 1011486 - RNA, 19 nt, Artificial Sequence
  Description of Artificial Sequence: Synthetic oligonucleotide
ucuugcuauuuauccccau

SEQ ID NO: 1011487 - RNA, 19 nt, Artificial Sequence
  Description of Artificial Sequence: Synthetic oligonucleotide
ggcagagagaaguuuucga

SEQ ID NO: 1011488 - RNA, 19 nt, Artificial Sequence
  Description of Artificial Sequence: Synthetic oligonucleotide
aacuagaagggaggcugau

SEQ ID NO: 1011489 - RNA, 19 nt, Artificial Sequence
  Description of Artificial Sequence: Synthetic oligonucleotide
gaacaaaggugguuuccgu

SEQ ID NO: 1011490 - RNA, 19 nt, Artificial Sequence
  Description of Artificial Sequence: Synthetic oligonucleotide
aaucccgcaaaugcaucuu

SEQ ID NO: 1011491 - RNA, 19 nt, Artificial Sequence
  Description of Artificial Sequence: Synthetic oligonucleotide
agacauuaaucagcuacuu

SEQ ID NO: 1011492 - RNA, 19 nt, Artificial Sequence
  Description of Artificial Sequence: Synthetic oligonucleotide
uucgaggggcagccaccgg

SEQ ID NO: 1011493 - RNA, 19 nt, Artificial Sequence
  Description of Artificial Sequence: Synthetic oligonucleotide
gaggaaguggugcucgccu

SEQ ID NO: 1011494 - RNA, 19 nt, Artificial Sequence
  Description of Artificial Sequence: Synthetic oligonucleotide
ggugcucgccucuucuucc

SEQ ID NO: 1011495 - RNA, 19 nt, Artificial Sequence
  Description of Artificial Sequence: Synthetic oligonucleotide
caucccgacuaaugaggac

SEQ ID NO: 1011496 - RNA, 19 nt, Artificial Sequence
  Description of Artificial Sequence: Synthetic oligonucleotide
uggaugcuucaucccgacu

SEQ ID NO: 1011497 - RNA, 19 nt, Artificial Sequence
  Description of Artificial Sequence: Synthetic oligonucleotide
ugcuuccauuggcuaagaa

SEQ ID NO: 1011498 - RNA, 19 nt, Artificial Sequence
  Description of Artificial Sequence: Synthetic oligonucleotide
aaccggcagcacacauugc

SEQ ID NO: 1011499 - RNA, 19 nt, Artificial Sequence
  Description of Artificial Sequence: Synthetic oligonucleotide
agggcuugggcgguccuag

SEQ ID NO: 1011500 - RNA, 19 nt, Artificial Sequence
  Description of Artificial Sequence: Synthetic oligonucleotide
gguccguaguaacagugga

SEQ ID NO: 1011501 - RNA, 19 nt, Artificial Sequence
  Description of Artificial Sequence: Synthetic oligonucleotide
agcuacuugccuccccaaa

SEQ ID NO: 1011502 - RNA, 19 nt, Artificial Sequence
  Description of Artificial Sequence: Synthetic oligonucleotide
aaguuagggcuugggcggu

SEQ ID NO: 1011503 - RNA, 19 nt, Artificial Sequence
  Description of Artificial Sequence: Synthetic oligonucleotide
cuggaagugaugcauggau

SEQ ID NO: 1011504 - RNA, 19 nt, Artificial Sequence
  Description of Artificial Sequence: Synthetic oligonucleotide
acaucaacccuuacucaaa

SEQ ID NO: 1011505 - RNA, 19 nt, Artificial Sequence
  Description of Artificial Sequence: Synthetic oligonucleotide
gucuggaaucagaaggcga

SEQ ID NO: 1011506 - RNA, 19 nt, Artificial Sequence
  Description of Artificial Sequence: Synthetic oligonucleotide
cucuugcuauuuaucccca

SEQ ID NO: 1011507 - RNA, 19 nt, Artificial Sequence
  Description of Artificial Sequence: Synthetic oligonucleotide
cccgaaacagagcugacga

SEQ ID NO: 1011508 - RNA, 19 nt, Artificial Sequence
  Description of Artificial Sequence: Synthetic oligonucleotide
cgacuaaugaggaccugcc

SEQ ID NO: 1011509 - RNA, 19 nt, Artificial Sequence
  Description of Artificial Sequence: Synthetic oligonucleotide
cugguuuuaguguccgugu

SEQ ID NO: 1011510 - RNA, 19 nt, Artificial Sequence
  Description of Artificial Sequence: Synthetic oligonucleotide
acauugccguacaagggaa

SEQ ID NO: 1011511 - RNA, 19 nt, Artificial Sequence
  Description of Artificial Sequence: Synthetic oligonucleotide
ccuguuuaggucacuguga

SEQ ID NO: 1011512 - RNA, 19 nt, Artificial Sequence
  Description of Artificial Sequence: Synthetic oligonucleotide
ccuauggaaaugaugccaa

SEQ ID NO: 1011513 - RNA, 19 nt, Artificial Sequence
  Description of Artificial Sequence: Synthetic oligonucleotide
ccgacuaaugaggaccugc

SEQ ID NO: 1011514 - RNA, 19 nt, Artificial Sequence
  Description of Artificial Sequence: Synthetic oligonucleotide
cacugugcgcccagcaaca

SEQ ID NO: 1011515 - RNA, 19 nt, Artificial Sequence
  Description of Artificial Sequence: Synthetic oligonucleotide
gucagccgcaaagauguga

SEQ ID NO: 1011516 - RNA, 19 nt, Artificial Sequence
  Description of Artificial Sequence: Synthetic oligonucleotide
guuagggcuugggcggucc

SEQ ID NO: 1011517 - RNA, 19 nt, Artificial Sequence
  Description of Artificial Sequence: Synthetic oligonucleotide
uggacgucuucaacuucuu

SEQ ID NO: 1011518 - RNA, 19 nt, Artificial Sequence
  Description of Artificial Sequence: Synthetic oligonucleotide
cagcacucuccaaggucag

SEQ ID NO: 1011519 - RNA, 19 nt, Artificial Sequence
  Description of Artificial Sequence: Synthetic oligonucleotide
uacacggaggucgccuccu

SEQ ID NO: 1011520 - RNA, 19 nt, Artificial Sequence
  Description of Artificial Sequence: Synthetic oligonucleotide
caaccagaccuuuuacugu

SEQ ID NO: 1011521 - RNA, 19 nt, Artificial Sequence
  Description of Artificial Sequence: Synthetic oligonucleotide
ccggcagcacacauugccg

SEQ ID NO: 1011522 - RNA, 19 nt, Artificial Sequence
  Description of Artificial Sequence: Synthetic oligonucleotide
ugcgcccagcaacaguguu

SEQ ID NO: 1011523 - RNA, 19 nt, Artificial Sequence
  Description of Artificial Sequence: Synthetic oligonucleotide
gcucguuaaggaaucccgc

SEQ ID NO: 1011524 - RNA, 19 nt, Artificial Sequence
  Description of Artificial Sequence: Synthetic oligonucleotide
ggcuaagaaucaaagagau

SEQ ID NO: 1011525 - RNA, 19 nt, Artificial Sequence
  Description of Artificial Sequence: Synthetic oligonucleotide
uugggcgguccuagacucu

SEQ ID NO: 1011526 - RNA, 19 nt, Artificial Sequence
  Description of Artificial Sequence: Synthetic oligonucleotide
ugugccgcccugugucuuc

SEQ ID NO: 1011527 - RNA, 19 nt, Artificial Sequence
  Description of Artificial Sequence: Synthetic oligonucleotide
agcacacauugccguacaa

SEQ ID NO: 1011528 - RNA, 19 nt, Artificial Sequence
  Description of Artificial Sequence: Synthetic oligonucleotide
cuacuugccuccccaaacu

SEQ ID NO: 1011529 - RNA, 19 nt, Artificial Sequence
  Description of Artificial Sequence: Synthetic oligonucleotide
gggcaguuuggcuuggaaa

SEQ ID NO: 1011530 - RNA, 19 nt, Artificial Sequence
  Description of Artificial Sequence: Synthetic oligonucleotide
uggagccggcaccgguuug

SEQ ID NO: 1011531 - RNA, 19 nt, Artificial Sequence
  Description of Artificial Sequence: Synthetic oligonucleotide
ucuuugcauccuuguccau

SEQ ID NO: 1011532 - RNA, 19 nt, Artificial Sequence
  Description of Artificial Sequence: Synthetic oligonucleotide
ggacagauuaugggucuug

SEQ ID NO: 1011533 - RNA, 19 nt, Artificial Sequence
  Description of Artificial Sequence: Synthetic oligonucleotide
ggcgguccuagacucucag

SEQ ID NO: 1011534 - RNA, 19 nt, Artificial Sequence
  Description of Artificial Sequence: Synthetic oligonucleotide
ugggcgguccuagacucuc

SEQ ID NO: 1011535 - RNA, 19 nt, Artificial Sequence
  Description of Artificial Sequence: Synthetic oligonucleotide
gcacccgaaacagagcuga

SEQ ID NO: 1011536 - RNA, 19 nt, Artificial Sequence
  Description of Artificial Sequence: Synthetic oligonucleotide
cuccggagacacuggccug

SEQ ID NO: 1011537 - RNA, 19 nt, Artificial Sequence
  Description of Artificial Sequence: Synthetic oligonucleotide
cguaguacacggaggucgc

SEQ ID NO: 1011538 - RNA, 19 nt, Artificial Sequence
  Description of Artificial Sequence: Synthetic oligonucleotide
guaguacacggaggucgcc

SEQ ID NO: 1011539 - RNA, 19 nt, Artificial Sequence
  Description of Artificial Sequence: Synthetic oligonucleotide
acugugcgcccagcaacag

SEQ ID NO: 1011540 - RNA, 19 nt, Artificial Sequence
  Description of Artificial Sequence: Synthetic oligonucleotide
ggccucgcuacccuuggac

SEQ ID NO: 1011541 - RNA, 19 nt, Artificial Sequence
  Description of Artificial Sequence: Synthetic oligonucleotide
uugacaccuucugggcagu

SEQ ID NO: 1011542 - RNA, 19 nt, Artificial Sequence
  Description of Artificial Sequence: Synthetic oligonucleotide
gggcacaauggagauuagc

SEQ ID NO: 1011543 - RNA, 19 nt, Artificial Sequence
  Description of Artificial Sequence: Synthetic oligonucleotide
gggauuaauccugaaaauu

SEQ ID NO: 1011544 - RNA, 19 nt, Artificial Sequence
  Description of Artificial Sequence: Synthetic oligonucleotide
cuugcuauuuauccccauu

SEQ ID NO: 1011545 - RNA, 19 nt, Artificial Sequence
  Description of Artificial Sequence: Synthetic oligonucleotide
agcugacgagcaaguaugu

SEQ ID NO: 1011546 - RNA, 19 nt, Artificial Sequence
  Description of Artificial Sequence: Synthetic oligonucleotide
ccgaaacagagcugacgag

SEQ ID NO: 1011547 - RNA, 19 nt, Artificial Sequence
  Description of Artificial Sequence: Synthetic oligonucleotide
ggacugaucugugccgccc

SEQ ID NO: 1011548 - RNA, 19 nt, Artificial Sequence
  Description of Artificial Sequence: Synthetic oligonucleotide
ggcuugggcgguccuagac

SEQ ID NO: 1011549 - RNA, 19 nt, Artificial Sequence
  Description of Artificial Sequence: Synthetic oligonucleotide
caccgguuuucuggaagug

SEQ ID NO: 1011550 - RNA, 19 nt, Artificial Sequence
  Description of Artificial Sequence: Synthetic oligonucleotide
cacccgaaacagagcugac

SEQ ID NO: 1011551 - RNA, 19 nt, Artificial Sequence
  Description of Artificial Sequence: Synthetic oligonucleotide
acuucgcacccgaaacaga

SEQ ID NO: 1011552 - RNA, 19 nt, Artificial Sequence
  Description of Artificial Sequence: Synthetic oligonucleotide
gaucugugccgcccugugu

SEQ ID NO: 1011553 - RNA, 19 nt, Artificial Sequence
  Description of Artificial Sequence: Synthetic oligonucleotide
cucgcuacccuuggacuga

SEQ ID NO: 1011554 - RNA, 19 nt, Artificial Sequence
  Description of Artificial Sequence: Synthetic oligonucleotide
aguuuucgaggggcagcca

SEQ ID NO: 1011555 - RNA, 19 nt, Artificial Sequence
  Description of Artificial Sequence: Synthetic oligonucleotide
caaaggugguuuccguggu

SEQ ID NO: 1011556 - RNA, 19 nt, Artificial Sequence
  Description of Artificial Sequence: Synthetic oligonucleotide
gcuccggagacacuggccu

SEQ ID NO: 1011557 - RNA, 19 nt, Artificial Sequence
  Description of Artificial Sequence: Synthetic oligonucleotide
ccauucaauucauaauccu

SEQ ID NO: 1011558 - RNA, 19 nt, Artificial Sequence
  Description of Artificial Sequence: Synthetic oligonucleotide
gcccauuagucucuccuaa

SEQ ID NO: 1011559 - RNA, 19 nt, Artificial Sequence
  Description of Artificial Sequence: Synthetic oligonucleotide
ggaaucccgcaaaugcauc

SEQ ID NO: 1011560 - RNA, 19 nt, Artificial Sequence
  Description of Artificial Sequence: Synthetic oligonucleotide
ggaugaugauagucuggaa

SEQ ID NO: 1011561 - RNA, 19 nt, Artificial Sequence
  Description of Artificial Sequence: Synthetic oligonucleotide
ggagccggcaccgguuugc

SEQ ID NO: 1011562 - RNA, 19 nt, Artificial Sequence
  Description of Artificial Sequence: Synthetic oligonucleotide
gagccggcaccgguuugcc

SEQ ID NO: 1011563 - RNA, 19 nt, Artificial Sequence
  Description of Artificial Sequence: Synthetic oligonucleotide
gguuuccguggugacauaa

SEQ ID NO: 1011564 - RNA, 19 nt, Artificial Sequence
  Description of Artificial Sequence: Synthetic oligonucleotide
ggcgaggcuccggagacac

SEQ ID NO: 1011565 - RNA, 19 nt, Artificial Sequence
  Description of Artificial Sequence: Synthetic oligonucleotide
gcuauggaaauuaccuccu

SEQ ID NO: 1011566 - RNA, 19 nt, Artificial Sequence
  Description of Artificial Sequence: Synthetic oligonucleotide
cuaaccggcagcacacauu

SEQ ID NO: 1011567 - RNA, 19 nt, Artificial Sequence
  Description of Artificial Sequence: Synthetic oligonucleotide
cuauggaaaugaugccaau

SEQ ID NO: 1011568 - RNA, 19 nt, Artificial Sequence
  Description of Artificial Sequence: Synthetic oligonucleotide
gccauacaagcuggcuggg

SEQ ID NO: 1011569 - RNA, 19 nt, Artificial Sequence
  Description of Artificial Sequence: Synthetic oligonucleotide
guuugccuucaaaacuggu

SEQ ID NO: 1011570 - RNA, 19 nt, Artificial Sequence
  Description of Artificial Sequence: Synthetic oligonucleotide
gcugcucguuaaggaaucc

SEQ ID NO: 1011571 - RNA, 19 nt, Artificial Sequence
  Description of Artificial Sequence: Synthetic oligonucleotide
ggucucuuccugaagcgcu

SEQ ID NO: 1011572 - RNA, 19 nt, Artificial Sequence
  Description of Artificial Sequence: Synthetic oligonucleotide
uucccaucaggggcugguu

SEQ ID NO: 1011573 - RNA, 19 nt, Artificial Sequence
  Description of Artificial Sequence: Synthetic oligonucleotide
ccgguuugccuucaaaacu

SEQ ID NO: 1011574 - RNA, 19 nt, Artificial Sequence
  Description of Artificial Sequence: Synthetic oligonucleotide
gucaggaacaaaggugguu

SEQ ID NO: 1011575 - RNA, 19 nt, Artificial Sequence
  Description of Artificial Sequence: Synthetic oligonucleotide
cacaacuagaagggaggcu

SEQ ID NO: 1011576 - RNA, 19 nt, Artificial Sequence
  Description of Artificial Sequence: Synthetic oligonucleotide
gcugacgagcaaguauguc

SEQ ID NO: 1011577 - RNA, 19 nt, Artificial Sequence
  Description of Artificial Sequence: Synthetic oligonucleotide
agccggcaccgguuugccu

SEQ ID NO: 1011578 - RNA, 19 nt, Artificial Sequence
  Description of Artificial Sequence: Synthetic oligonucleotide
ugguuuccguggugacaua

SEQ ID NO: 1011579 - RNA, 19 nt, Artificial Sequence
  Description of Artificial Sequence: Synthetic oligonucleotide
agggcacaauggagauuag

SEQ ID NO: 1011580 - RNA, 19 nt, Artificial Sequence
  Description of Artificial Sequence: Synthetic oligonucleotide
gcuugggcgguccuagacu

SEQ ID NO: 1011581 - RNA, 19 nt, Artificial Sequence
  Description of Artificial Sequence: Synthetic oligonucleotide
ucgccuccuuugucaggaa

SEQ ID NO: 1011582 - RNA, 19 nt, Artificial Sequence
  Description of Artificial Sequence: Synthetic oligonucleotide
cacucuccaaggucagggu

SEQ ID NO: 1011583 - RNA, 19 nt, Artificial Sequence
  Description of Artificial Sequence: Synthetic oligonucleotide
cuaggcugucagccgcaaa

SEQ ID NO: 1011584 - RNA, 19 nt, Artificial Sequence
  Description of Artificial Sequence: Synthetic oligonucleotide
ucgcuacccuuggacugau

SEQ ID NO: 1011585 - RNA, 19 nt, Artificial Sequence
  Description of Artificial Sequence: Synthetic oligonucleotide
gcgcugaacuuauuuuccu

SEQ ID NO: 1011586 - RNA, 19 nt, Artificial Sequence
  Description of Artificial Sequence: Synthetic oligonucleotide
gggccacuaaccggcagca

SEQ ID NO: 1011587 - RNA, 19 nt, Artificial Sequence
  Description of Artificial Sequence: Synthetic oligonucleotide
cguacaagggaagccaaaa

SEQ ID NO: 1011588 - RNA, 19 nt, Artificial Sequence
  Description of Artificial Sequence: Synthetic oligonucleotide
cagcuacuugccuccccaa

SEQ ID NO: 1011589 - RNA, 19 nt, Artificial Sequence
  Description of Artificial Sequence: Synthetic oligonucleotide
cacuaaccggcagcacaca

SEQ ID NO: 1011590 - RNA, 19 nt, Artificial Sequence
  Description of Artificial Sequence: Synthetic oligonucleotide
augguacuucgcacccgaa

SEQ ID NO: 1011591 - RNA, 19 nt, Artificial Sequence
  Description of Artificial Sequence: Synthetic oligonucleotide
ugccgcccugugucuucac

SEQ ID NO: 1011592 - RNA, 19 nt, Artificial Sequence
  Description of Artificial Sequence: Synthetic oligonucleotide
ccugaaggucuucuaggcu

SEQ ID NO: 1011593 - RNA, 19 nt, Artificial Sequence
  Description of Artificial Sequence: Synthetic oligonucleotide
cugugcgcccagcaacagu

SEQ ID NO: 1011594 - RNA, 19 nt, Artificial Sequence
  Description of Artificial Sequence: Synthetic oligonucleotide
gccggcaccgguuugccuu

SEQ ID NO: 1011595 - RNA, 19 nt, Artificial Sequence
  Description of Artificial Sequence: Synthetic oligonucleotide
ccgcccugugucuucacaa

SEQ ID NO: 1011596 - RNA, 19 nt, Artificial Sequence
  Description of Artificial Sequence: Synthetic oligonucleotide
gccguacaagggaagccaa

SEQ ID NO: 1011597 - RNA, 19 nt, Artificial Sequence
  Description of Artificial Sequence: Synthetic oligonucleotide
ccuagacucucagggcuga

SEQ ID NO: 1011598 - RNA, 19 nt, Artificial Sequence
  Description of Artificial Sequence: Synthetic oligonucleotide
ccaccgguuuucuggaagu

SEQ ID NO: 1011599 - RNA, 19 nt, Artificial Sequence
  Description of Artificial Sequence: Synthetic oligonucleotide
gugccgcccugugucuuca

SEQ ID NO: 1011600 - RNA, 19 nt, Artificial Sequence
  Description of Artificial Sequence: Synthetic oligonucleotide
ccggcaccgguuugccuuc

SEQ ID NO: 1011601 - RNA, 19 nt, Artificial Sequence
  Description of Artificial Sequence: Synthetic oligonucleotide
ccguggugacauaauacuu

SEQ ID NO: 1011602 - RNA, 19 nt, Artificial Sequence
  Description of Artificial Sequence: Synthetic oligonucleotide
ggccacuaaccggcagcac

SEQ ID NO: 1011603 - RNA, 19 nt, Artificial Sequence
  Description of Artificial Sequence: Synthetic oligonucleotide
gggcuugggcgguccuaga

SEQ ID NO: 1011604 - RNA, 19 nt, Artificial Sequence
  Description of Artificial Sequence: Synthetic oligonucleotide
cccgacuaaugaggaccug

SEQ ID NO: 1011605 - RNA, 19 nt, Artificial Sequence
  Description of Artificial Sequence: Synthetic oligonucleotide
ggcaccgguuugccuucaa

SEQ ID NO: 1011606 - RNA, 19 nt, Artificial Sequence
  Description of Artificial Sequence: Synthetic oligonucleotide
ccguaguaacaguggaguu

SEQ ID NO: 1011607 - RNA, 19 nt, Artificial Sequence
  Description of Artificial Sequence: Synthetic oligonucleotide
gcuccacuuuagcuucaau

SEQ ID NO: 1011608 - RNA, 19 nt, Artificial Sequence
  Description of Artificial Sequence: Synthetic oligonucleotide
gugcgcccagcaacagugu

SEQ ID NO: 1011609 - RNA, 19 nt, Artificial Sequence
  Description of Artificial Sequence: Synthetic oligonucleotide
gggcgguccuagacucuca

SEQ ID NO: 1011610 - RNA, 19 nt, Artificial Sequence
  Description of Artificial Sequence: Synthetic oligonucleotide
cugugccgcccugugucuu

SEQ ID NO: 1011611 - RNA, 19 nt, Artificial Sequence
  Description of Artificial Sequence: Synthetic oligonucleotide
cgcuacccuuggacugauc

SEQ ID NO: 1011612 - RNA, 19 nt, Artificial Sequence
  Description of Artificial Sequence: Synthetic oligonucleotide
gcccagcaacaguguuggu

SEQ ID NO: 1011613 - RNA, 19 nt, Artificial Sequence
  Description of Artificial Sequence: Synthetic oligonucleotide
gcgaggcuccggagacacu

SEQ ID NO: 1011614 - RNA, 19 nt, Artificial Sequence
  Description of Artificial Sequence: Synthetic oligonucleotide
cggcaccgguuugccuuca

SEQ ID NO: 1011615 - RNA, 19 nt, Artificial Sequence
  Description of Artificial Sequence: Synthetic oligonucleotide
aaaacaguaaggcacugcc

SEQ ID NO: 1011616 - RNA, 19 nt, Artificial Sequence
  Description of Artificial Sequence: Synthetic oligonucleotide
acuuauucagucuugaagc

SEQ ID NO: 1011617 - RNA, 19 nt, Artificial Sequence
  Description of Artificial Sequence: Synthetic oligonucleotide
aagucauuggcauggaggc

SEQ ID NO: 1011618 - RNA, 19 nt, Artificial Sequence
  Description of Artificial Sequence: Synthetic oligonucleotide
ucagauauauuucugagac

SEQ ID NO: 1011619 - RNA, 19 nt, Artificial Sequence
  Description of Artificial Sequence: Synthetic oligonucleotide
uuaauaauagguguguagg

SEQ ID NO: 1011620 - RNA, 19 nt, Artificial Sequence
  Description of Artificial Sequence: Synthetic oligonucleotide
uuauaguugucucagagac

SEQ ID NO: 1011621 - RNA, 19 nt, Artificial Sequence
  Description of Artificial Sequence: Synthetic oligonucleotide
ucggugaucagcauggucg

SEQ ID NO: 1011622 - RNA, 19 nt, Artificial Sequence
  Description of Artificial Sequence: Synthetic oligonucleotide
uguagugacauccucaucu

SEQ ID NO: 1011623 - RNA, 19 nt, Artificial Sequence
  Description of Artificial Sequence: Synthetic oligonucleotide
aaagaguuauuauuuccuc

SEQ ID NO: 1011624 - RNA, 19 nt, Artificial Sequence
  Description of Artificial Sequence: Synthetic oligonucleotide
acaagaggcaucucggucc

SEQ ID NO: 1011625 - RNA, 19 nt, Artificial Sequence
  Description of Artificial Sequence: Synthetic oligonucleotide
aaucauaagaaauccuaca

SEQ ID NO: 1011626 - RNA, 19 nt, Artificial Sequence
  Description of Artificial Sequence: Synthetic oligonucleotide
ugaaaauguggucugacac

SEQ ID NO: 1011627 - RNA, 19 nt, Artificial Sequence
  Description of Artificial Sequence: Synthetic oligonucleotide
agacacaaaacaguaaggc

SEQ ID NO: 1011628 - RNA, 19 nt, Artificial Sequence
  Description of Artificial Sequence: Synthetic oligonucleotide
guaaaggugaaagaguugg

SEQ ID NO: 1011629 - RNA, 19 nt, Artificial Sequence
  Description of Artificial Sequence: Synthetic oligonucleotide
gacuuauucagucuugaag

SEQ ID NO: 1011630 - RNA, 19 nt, Artificial Sequence
  Description of Artificial Sequence: Synthetic oligonucleotide
agauauauuucugagacca

SEQ ID NO: 1011631 - RNA, 19 nt, Artificial Sequence
  Description of Artificial Sequence: Synthetic oligonucleotide
cuuaauaauagguguguag

SEQ ID NO: 1011632 - RNA, 19 nt, Artificial Sequence
  Description of Artificial Sequence: Synthetic oligonucleotide
auugaagucauuggcaugg

SEQ ID NO: 1011633 - RNA, 19 nt, Artificial Sequence
  Description of Artificial Sequence: Synthetic oligonucleotide
ugcacuuaggacauugaag

SEQ ID NO: 1011634 - RNA, 19 nt, Artificial Sequence
  Description of Artificial Sequence: Synthetic oligonucleotide
aacguagaaguagagcucg

SEQ ID NO: 1011635 - RNA, 19 nt, Artificial Sequence
  Description of Artificial Sequence: Synthetic oligonucleotide
ugcaacgugcccuuggugg

SEQ ID NO: 1011636 - RNA, 19 nt, Artificial Sequence
  Description of Artificial Sequence: Synthetic oligonucleotide
aaacacaagggcaagaggu

SEQ ID NO: 1011637 - RNA, 19 nt, Artificial Sequence
  Description of Artificial Sequence: Synthetic oligonucleotide
uagagaugggcacauaaug

SEQ ID NO: 1011638 - RNA, 19 nt, Artificial Sequence
  Description of Artificial Sequence: Synthetic oligonucleotide
uaauggacuacccauggcu

SEQ ID NO: 1011639 - RNA, 19 nt, Artificial Sequence
  Description of Artificial Sequence: Synthetic oligonucleotide
cagucuugaagcuagggcc

SEQ ID NO: 1011640 - RNA, 19 nt, Artificial Sequence
  Description of Artificial Sequence: Synthetic oligonucleotide
ugucagauauauuucugag

SEQ ID NO: 1011641 - RNA, 19 nt, Artificial Sequence
  Description of Artificial Sequence: Synthetic oligonucleotide
cuuguaauuagggaugucc

SEQ ID NO: 1011642 - RNA, 19 nt, Artificial Sequence
  Description of Artificial Sequence: Synthetic oligonucleotide
uaugggauacccuuguaca

SEQ ID NO: 1011643 - RNA, 19 nt, Artificial Sequence
  Description of Artificial Sequence: Synthetic oligonucleotide
ugagguaaggaucuccuga

SEQ ID NO: 1011644 - RNA, 19 nt, Artificial Sequence
  Description of Artificial Sequence: Synthetic oligonucleotide
gggacuaucagacagggcc

SEQ ID NO: 1011645 - RNA, 19 nt, Artificial Sequence
  Description of Artificial Sequence: Synthetic oligonucleotide
aaauccuacaaagaguuau

SEQ ID NO: 1011646 - RNA, 19 nt, Artificial Sequence
  Description of Artificial Sequence: Synthetic oligonucleotide
uuauccacagcccaauggu

SEQ ID NO: 1011647 - RNA, 19 nt, Artificial Sequence
  Description of Artificial Sequence: Synthetic oligonucleotide
ugagugaacggguaaaggu

SEQ ID NO: 1011648 - RNA, 19 nt, Artificial Sequence
  Description of Artificial Sequence: Synthetic oligonucleotide
cuuugagauaucucgguag

SEQ ID NO: 1011649 - RNA, 19 nt, Artificial Sequence
  Description of Artificial Sequence: Synthetic oligonucleotide
auaacgacugagugaacgg

SEQ ID NO: 1011650 - RNA, 19 nt, Artificial Sequence
  Description of Artificial Sequence: Synthetic oligonucleotide
aaagcaaggcacuaacgaa

SEQ ID NO: 1011651 - RNA, 19 nt, Artificial Sequence
  Description of Artificial Sequence: Synthetic oligonucleotide
uaauuagggauguccuugg

SEQ ID NO: 1011652 - RNA, 19 nt, Artificial Sequence
  Description of Artificial Sequence: Synthetic oligonucleotide
agggcaaaugccuacaaca

SEQ ID NO: 1011653 - RNA, 19 nt, Artificial Sequence
  Description of Artificial Sequence: Synthetic oligonucleotide
accagugcuacuaaggaac

SEQ ID NO: 1011654 - RNA, 19 nt, Artificial Sequence
  Description of Artificial Sequence: Synthetic oligonucleotide
ugaagcuagggccaccaag

SEQ ID NO: 1011655 - RNA, 19 nt, Artificial Sequence
  Description of Artificial Sequence: Synthetic oligonucleotide
cauaacgacugagugaacg

SEQ ID NO: 1011656 - RNA, 19 nt, Artificial Sequence
  Description of Artificial Sequence: Synthetic oligonucleotide
uuguaauuagggauguccu

SEQ ID NO: 1011657 - RNA, 19 nt, Artificial Sequence
  Description of Artificial Sequence: Synthetic oligonucleotide
guaacguagaaguagagcu

SEQ ID NO: 1011658 - RNA, 19 nt, Artificial Sequence
  Description of Artificial Sequence: Synthetic oligonucleotide
gucaagcuuauccacagcc

SEQ ID NO: 1011659 - RNA, 19 nt, Artificial Sequence
  Description of Artificial Sequence: Synthetic oligonucleotide
aaagaguuggccauguuau

SEQ ID NO: 1011660 - RNA, 19 nt, Artificial Sequence
  Description of Artificial Sequence: Synthetic oligonucleotide
aacgaaagaagaguguggu

SEQ ID NO: 1011661 - RNA, 19 nt, Artificial Sequence
  Description of Artificial Sequence: Synthetic oligonucleotide
accaagauugccuaaugga

SEQ ID NO: 1011662 - RNA, 19 nt, Artificial Sequence
  Description of Artificial Sequence: Synthetic oligonucleotide
gacaaagacaugcacugac

SEQ ID NO: 1011663 - RNA, 19 nt, Artificial Sequence
  Description of Artificial Sequence: Synthetic oligonucleotide
ugcgccaaagacaaagaca

SEQ ID NO: 1011664 - RNA, 19 nt, Artificial Sequence
  Description of Artificial Sequence: Synthetic oligonucleotide
caagcucucauaacgacug

SEQ ID NO: 1011665 - RNA, 19 nt, Artificial Sequence
  Description of Artificial Sequence: Synthetic oligonucleotide
uugguaacguagaaguaga

SEQ ID NO: 1011666 - RNA, 19 nt, Artificial Sequence
  Description of Artificial Sequence: Synthetic oligonucleotide
ucucauaacgacugaguga

SEQ ID NO: 1011667 - RNA, 19 nt, Artificial Sequence
  Description of Artificial Sequence: Synthetic oligonucleotide
uugucagauauauuucuga

SEQ ID NO: 1011668 - RNA, 19 nt, Artificial Sequence
  Description of Artificial Sequence: Synthetic oligonucleotide
uaggacauugaagucauug

SEQ ID NO: 1011669 - RNA, 19 nt, Artificial Sequence
  Description of Artificial Sequence: Synthetic oligonucleotide
uguuauaagcagacacuug

SEQ ID NO: 1011670 - RNA, 19 nt, Artificial Sequence
  Description of Artificial Sequence: Synthetic oligonucleotide
agagcuaagagggcaagac

SEQ ID NO: 1011671 - RNA, 19 nt, Artificial Sequence
  Description of Artificial Sequence: Synthetic oligonucleotide
uggucuacccacuugcgcc

SEQ ID NO: 1011672 - RNA, 19 nt, Artificial Sequence
  Description of Artificial Sequence: Synthetic oligonucleotide
uacaugcaacgaaagaaga

SEQ ID NO: 1011673 - RNA, 19 nt, Artificial Sequence
  Description of Artificial Sequence: Synthetic oligonucleotide
ggaaccaucugucaccugg

SEQ ID NO: 1011674 - RNA, 19 nt, Artificial Sequence
  Description of Artificial Sequence: Synthetic oligonucleotide
aagcaaggcacuaacgaag

SEQ ID NO: 1011675 - RNA, 19 nt, Artificial Sequence
  Description of Artificial Sequence: Synthetic oligonucleotide
aagacaugcacugacccca

SEQ ID NO: 1011676 - RNA, 19 nt, Artificial Sequence
  Description of Artificial Sequence: Synthetic oligonucleotide
gagauaucucgguaguacc

SEQ ID NO: 1011677 - RNA, 19 nt, Artificial Sequence
  Description of Artificial Sequence: Synthetic oligonucleotide
gaacggguaaaggugaaag

SEQ ID NO: 1011678 - RNA, 19 nt, Artificial Sequence
  Description of Artificial Sequence: Synthetic oligonucleotide
acggacacgaggaaugucc

SEQ ID NO: 1011679 - RNA, 19 nt, Artificial Sequence
  Description of Artificial Sequence: Synthetic oligonucleotide
gguaaggaucuccugacgg

SEQ ID NO: 1011680 - RNA, 19 nt, Artificial Sequence
  Description of Artificial Sequence: Synthetic oligonucleotide
cucagaagugagaagcccc

SEQ ID NO: 1011681 - RNA, 19 nt, Artificial Sequence
  Description of Artificial Sequence: Synthetic oligonucleotide
auggucuacccacuugcgc

SEQ ID NO: 1011682 - RNA, 19 nt, Artificial Sequence
  Description of Artificial Sequence: Synthetic oligonucleotide
augggauacccuuguacac

SEQ ID NO: 1011683 - RNA, 19 nt, Artificial Sequence
  Description of Artificial Sequence: Synthetic oligonucleotide
agcaagcucucauaacgac

SEQ ID NO: 1011684 - RNA, 19 nt, Artificial Sequence
  Description of Artificial Sequence: Synthetic oligonucleotide
uuuguagugacauccucau

SEQ ID NO: 1011685 - RNA, 19 nt, Artificial Sequence
  Description of Artificial Sequence: Synthetic oligonucleotide
ugagauaucucgguaguac

SEQ ID NO: 1011686 - RNA, 19 nt, Artificial Sequence
  Description of Artificial Sequence: Synthetic oligonucleotide
acgaagagggcccaggugu

SEQ ID NO: 1011687 - RNA, 19 nt, Artificial Sequence
  Description of Artificial Sequence: Synthetic oligonucleotide
acuugcgccaaagacaaag

SEQ ID NO: 1011688 - RNA, 19 nt, Artificial Sequence
  Description of Artificial Sequence: Synthetic oligonucleotide
guuauaagcagacacuugu

SEQ ID NO: 1011689 - RNA, 19 nt, Artificial Sequence
  Description of Artificial Sequence: Synthetic oligonucleotide
caaggcacuaacgaagagg

SEQ ID NO: 1011690 - RNA, 19 nt, Artificial Sequence
  Description of Artificial Sequence: Synthetic oligonucleotide
agaaauccuacaaagaguu

SEQ ID NO: 1011691 - RNA, 19 nt, Artificial Sequence
  Description of Artificial Sequence: Synthetic oligonucleotide
uggcaguacggacacgagg

SEQ ID NO: 1011692 - RNA, 19 nt, Artificial Sequence
  Description of Artificial Sequence: Synthetic oligonucleotide
caggccuuaauaauaggug

SEQ ID NO: 1011693 - RNA, 19 nt, Artificial Sequence
  Description of Artificial Sequence: Synthetic oligonucleotide
acuacccauggcuaugauc

SEQ ID NO: 1011694 - RNA, 19 nt, Artificial Sequence
  Description of Artificial Sequence: Synthetic oligonucleotide
ugcuacuaaggaaccaucu

SEQ ID NO: 1011695 - RNA, 19 nt, Artificial Sequence
  Description of Artificial Sequence: Synthetic oligonucleotide
aacggguaaaggugaaaga

SEQ ID NO: 1011696 - RNA, 19 nt, Artificial Sequence
  Description of Artificial Sequence: Synthetic oligonucleotide
aggccuuaauaauaggugu

SEQ ID NO: 1011697 - RNA, 19 nt, Artificial Sequence
  Description of Artificial Sequence: Synthetic oligonucleotide
cuucuugacauggaaacac

SEQ ID NO: 1011698 - RNA, 19 nt, Artificial Sequence
  Description of Artificial Sequence: Synthetic oligonucleotide
ugagcauaggugcucggga

SEQ ID NO: 1011699 - RNA, 19 nt, Artificial Sequence
  Description of Artificial Sequence: Synthetic oligonucleotide
cuuguuugggcaccagugc

SEQ ID NO: 1011700 - RNA, 19 nt, Artificial Sequence
  Description of Artificial Sequence: Synthetic oligonucleotide
caaagcaaggcacuaacga

SEQ ID NO: 1011701 - RNA, 19 nt, Artificial Sequence
  Description of Artificial Sequence: Synthetic oligonucleotide
gcuagggccaccaagauug

SEQ ID NO: 1011702 - RNA, 19 nt, Artificial Sequence
  Description of Artificial Sequence: Synthetic oligonucleotide
uuguuugggcaccagugcu

SEQ ID NO: 1011703 - RNA, 19 nt, Artificial Sequence
  Description of Artificial Sequence: Synthetic oligonucleotide
cuacccauggcuaugaucu

SEQ ID NO: 1011704 - RNA, 19 nt, Artificial Sequence
  Description of Artificial Sequence: Synthetic oligonucleotide
uucuugacauggaaacaca

SEQ ID NO: 1011705 - RNA, 19 nt, Artificial Sequence
  Description of Artificial Sequence: Synthetic oligonucleotide
ugcaacgaaagaagagugu

SEQ ID NO: 1011706 - RNA, 19 nt, Artificial Sequence
  Description of Artificial Sequence: Synthetic oligonucleotide
uucugcaacgugcccuugg

SEQ ID NO: 1011707 - RNA, 19 nt, Artificial Sequence
  Description of Artificial Sequence: Synthetic oligonucleotide
aacgaagagggcccaggug

SEQ ID NO: 1011708 - RNA, 19 nt, Artificial Sequence
  Description of Artificial Sequence: Synthetic oligonucleotide
acuagguaggcguccaugu

SEQ ID NO: 1011709 - RNA, 19 nt, Artificial Sequence
  Description of Artificial Sequence: Synthetic oligonucleotide
agcauaggugcucgggaac

SEQ ID NO: 1011710 - RNA, 19 nt, Artificial Sequence
  Description of Artificial Sequence: Synthetic oligonucleotide
uaacguagaaguagagcuc

SEQ ID NO: 1011711 - RNA, 19 nt, Artificial Sequence
  Description of Artificial Sequence: Synthetic oligonucleotide
gacacgaggaaugucccag

SEQ ID NO: 1011712 - RNA, 19 nt, Artificial Sequence
  Description of Artificial Sequence: Synthetic oligonucleotide
auugccuaauggacuaccc

SEQ ID NO: 1011713 - RNA, 19 nt, Artificial Sequence
  Description of Artificial Sequence: Synthetic oligonucleotide
gagguaaggaucuccugac

SEQ ID NO: 1011714 - RNA, 19 nt, Artificial Sequence
  Description of Artificial Sequence: Synthetic oligonucleotide
ucuuugagauaucucggua

SEQ ID NO: 1011715 - RNA, 19 nt, Artificial Sequence
  Description of Artificial Sequence: Synthetic oligonucleotide
agucaagcuuauccacagc

SEQ ID NO: 1011716 - RNA, 19 nt, Artificial Sequence
  Description of Artificial Sequence: Synthetic oligonucleotide
cuuuguagugacauccuca

SEQ ID NO: 1011717 - RNA, 19 nt, Artificial Sequence
  Description of Artificial Sequence: Synthetic oligonucleotide
aagcagacuuauucagucu

SEQ ID NO: 1011718 - RNA, 19 nt, Artificial Sequence
  Description of Artificial Sequence: Synthetic oligonucleotide
aucuuugagauaucucggu

SEQ ID NO: 1011719 - RNA, 19 nt, Artificial Sequence
  Description of Artificial Sequence: Synthetic oligonucleotide
cacauaauggggcagcuga

SEQ ID NO: 1011720 - RNA, 19 nt, Artificial Sequence
  Description of Artificial Sequence: Synthetic oligonucleotide
aauggucuacccacuugcg

SEQ ID NO: 1011721 - RNA, 19 nt, Artificial Sequence
  Description of Artificial Sequence: Synthetic oligonucleotide
ugccuaauggacuacccau

SEQ ID NO: 1011722 - RNA, 19 nt, Artificial Sequence
  Description of Artificial Sequence: Synthetic oligonucleotide
accugguuauaguugucuc

SEQ ID NO: 1011723 - RNA, 19 nt, Artificial Sequence
  Description of Artificial Sequence: Synthetic oligonucleotide
uugccuaauggacuaccca

SEQ ID NO: 1011724 - RNA, 19 nt, Artificial Sequence
  Description of Artificial Sequence: Synthetic oligonucleotide
caucuugaaggaugaugcg

SEQ ID NO: 1011725 - RNA, 19 nt, Artificial Sequence
  Description of Artificial Sequence: Synthetic oligonucleotide
ucuuuguagugacauccuc

SEQ ID NO: 1011726 - RNA, 19 nt, Artificial Sequence
  Description of Artificial Sequence: Synthetic oligonucleotide
ccauguuauaagcagacac

SEQ ID NO: 1011727 - RNA, 19 nt, Artificial Sequence
  Description of Artificial Sequence: Synthetic oligonucleotide
cucauaacgacugagugaa

SEQ ID NO: 1011728 - RNA, 19 nt, Artificial Sequence
  Description of Artificial Sequence: Synthetic oligonucleotide
ggcacuaacgaagagggcc

SEQ ID NO: 1011729 - RNA, 19 nt, Artificial Sequence
  Description of Artificial Sequence: Synthetic oligonucleotide
aguacggacacgaggaaug

SEQ ID NO: 1011730 - RNA, 19 nt, Artificial Sequence
  Description of Artificial Sequence: Synthetic oligonucleotide
ugguaacguagaaguagag

SEQ ID NO: 1011731 - RNA, 19 nt, Artificial Sequence
  Description of Artificial Sequence: Synthetic oligonucleotide
gauacccuuguacacagua

SEQ ID NO: 1011732 - RNA, 19 nt, Artificial Sequence
  Description of Artificial Sequence: Synthetic oligonucleotide
gaagcuagggccaccaaga

SEQ ID NO: 1011733 - RNA, 19 nt, Artificial Sequence
  Description of Artificial Sequence: Synthetic oligonucleotide
aagaagagugugguggggu

SEQ ID NO: 1011734 - RNA, 19 nt, Artificial Sequence
  Description of Artificial Sequence: Synthetic oligonucleotide
caucugaagagggacacug

SEQ ID NO: 1011735 - RNA, 19 nt, Artificial Sequence
  Description of Artificial Sequence: Synthetic oligonucleotide
cacagucaagcuuauccac

SEQ ID NO: 1011736 - RNA, 19 nt, Artificial Sequence
  Description of Artificial Sequence: Synthetic oligonucleotide
uuauaagcagacacuuguu

SEQ ID NO: 1011737 - RNA, 19 nt, Artificial Sequence
  Description of Artificial Sequence: Synthetic oligonucleotide
ucgcugagugcacuuagga

SEQ ID NO: 1011738 - RNA, 19 nt, Artificial Sequence
  Description of Artificial Sequence: Synthetic oligonucleotide
uguggucugacaccugaaa

SEQ ID NO: 1011739 - RNA, 19 nt, Artificial Sequence
  Description of Artificial Sequence: Synthetic oligonucleotide
gucagauauauuucugaga

SEQ ID NO: 1011740 - RNA, 19 nt, Artificial Sequence
  Description of Artificial Sequence: Synthetic oligonucleotide
cugagaguaugggauaccc

SEQ ID NO: 1011741 - RNA, 19 nt, Artificial Sequence
  Description of Artificial Sequence: Synthetic oligonucleotide
acgaggaaugucccagagg

SEQ ID NO: 1011742 - RNA, 19 nt, Artificial Sequence
  Description of Artificial Sequence: Synthetic oligonucleotide
uguuggaagggaguccuug

SEQ ID NO: 1011743 - RNA, 19 nt, Artificial Sequence
  Description of Artificial Sequence: Synthetic oligonucleotide
cgaaagaagaguguggugg

SEQ ID NO: 1011744 - RNA, 19 nt, Artificial Sequence
  Description of Artificial Sequence: Synthetic oligonucleotide
gauggcucagaagugagaa

SEQ ID NO: 1011745 - RNA, 19 nt, Artificial Sequence
  Description of Artificial Sequence: Synthetic oligonucleotide
uggccauguuauaagcaga

SEQ ID NO: 1011746 - RNA, 19 nt, Artificial Sequence
  Description of Artificial Sequence: Synthetic oligonucleotide
agcacaaccugguuauagu

SEQ ID NO: 1011747 - RNA, 19 nt, Artificial Sequence
  Description of Artificial Sequence: Synthetic oligonucleotide
uguccccuagagaugggca

SEQ ID NO: 1011748 - RNA, 19 nt, Artificial Sequence
  Description of Artificial Sequence: Synthetic oligonucleotide
cacaagggcaagagguggg

SEQ ID NO: 1011749 - RNA, 19 nt, Artificial Sequence
  Description of Artificial Sequence: Synthetic oligonucleotide
uaacgaagagggcccaggu

SEQ ID NO: 1011750 - RNA, 19 nt, Artificial Sequence
  Description of Artificial Sequence: Synthetic oligonucleotide
uaggugcucgggaacggag

SEQ ID NO: 1011751 - RNA, 19 nt, Artificial Sequence
  Description of Artificial Sequence: Synthetic oligonucleotide
ucauuggcauggaggcggg

SEQ ID NO: 1011752 - RNA, 19 nt, Artificial Sequence
  Description of Artificial Sequence: Synthetic oligonucleotide
aacggaggcuauccgggcu

SEQ ID NO: 1011753 - RNA, 19 nt, Artificial Sequence
  Description of Artificial Sequence: Synthetic oligonucleotide
aacuugugcuuccgacaag

SEQ ID NO: 1011754 - RNA, 19 nt, Artificial Sequence
  Description of Artificial Sequence: Synthetic oligonucleotide
ucugcaacgugcccuuggu

SEQ ID NO: 1011755 - RNA, 19 nt, Artificial Sequence
  Description of Artificial Sequence: Synthetic oligonucleotide
cuaauggacuacccauggc

SEQ ID NO: 1011756 - RNA, 19 nt, Artificial Sequence
  Description of Artificial Sequence: Synthetic oligonucleotide
uccccaacaacaccagauc

SEQ ID NO: 1011757 - RNA, 19 nt, Artificial Sequence
  Description of Artificial Sequence: Synthetic oligonucleotide
agggcaagacuucuugaca

SEQ ID NO: 1011758 - RNA, 19 nt, Artificial Sequence
  Description of Artificial Sequence: Synthetic oligonucleotide
auguuauaagcagacacuu

SEQ ID NO: 1011759 - RNA, 19 nt, Artificial Sequence
  Description of Artificial Sequence: Synthetic oligonucleotide
caaaacaguaaggcacugc

SEQ ID NO: 1011760 - RNA, 19 nt, Artificial Sequence
  Description of Artificial Sequence: Synthetic oligonucleotide
ugggauacccuuguacaca

SEQ ID NO: 1011761 - RNA, 19 nt, Artificial Sequence
  Description of Artificial Sequence: Synthetic oligonucleotide
cugagugaacggguaaagg

SEQ ID NO: 1011762 - RNA, 19 nt, Artificial Sequence
  Description of Artificial Sequence: Synthetic oligonucleotide
uauccacagcccaaugguc

SEQ ID NO: 1011763 - RNA, 19 nt, Artificial Sequence
  Description of Artificial Sequence: Synthetic oligonucleotide
acugagugaacggguaaag

SEQ ID NO: 1011764 - RNA, 19 nt, Artificial Sequence
  Description of Artificial Sequence: Synthetic oligonucleotide
ccugaaacaucugaagagg

SEQ ID NO: 1011765 - RNA, 19 nt, Artificial Sequence
  Description of Artificial Sequence: Synthetic oligonucleotide
cauguuauaagcagacacu

SEQ ID NO: 1011766 - RNA, 19 nt, Artificial Sequence
  Description of Artificial Sequence: Synthetic oligonucleotide
gguaacguagaaguagagc

SEQ ID NO: 1011767 - RNA, 19 nt, Artificial Sequence
  Description of Artificial Sequence: Synthetic oligonucleotide
augcaacgaaagaagagug

SEQ ID NO: 1011768 - RNA, 19 nt, Artificial Sequence
  Description of Artificial Sequence: Synthetic oligonucleotide
agggaguccuugcccagac

SEQ ID NO: 1011769 - RNA, 19 nt, Artificial Sequence
  Description of Artificial Sequence: Synthetic oligonucleotide
agugaacggguaaagguga

SEQ ID NO: 1011770 - RNA, 19 nt, Artificial Sequence
  Description of Artificial Sequence: Synthetic oligonucleotide
gcacuuaggacauugaagu

SEQ ID NO: 1011771 - RNA, 19 nt, Artificial Sequence
  Description of Artificial Sequence: Synthetic oligonucleotide
agugcuacuaaggaaccau

SEQ ID NO: 1011772 - RNA, 19 nt, Artificial Sequence
  Description of Artificial Sequence: Synthetic oligonucleotide
gaguuauuauuuccuccca

SEQ ID NO: 1011773 - RNA, 19 nt, Artificial Sequence
  Description of Artificial Sequence: Synthetic oligonucleotide
gagugcacuuaggacauug

SEQ ID NO: 1011774 - RNA, 19 nt, Artificial Sequence
  Description of Artificial Sequence: Synthetic oligonucleotide
acgaaagaagaguguggug

SEQ ID NO: 1011775 - RNA, 19 nt, Artificial Sequence
  Description of Artificial Sequence: Synthetic oligonucleotide
agcuugguccugucacccc

SEQ ID NO: 1011776 - RNA, 19 nt, Artificial Sequence
  Description of Artificial Sequence: Synthetic oligonucleotide
acacaguuucaaauagguc

SEQ ID NO: 1011777 - RNA, 19 nt, Artificial Sequence
  Description of Artificial Sequence: Synthetic oligonucleotide
ccuaauggacuacccaugg

SEQ ID NO: 1011778 - RNA, 19 nt, Artificial Sequence
  Description of Artificial Sequence: Synthetic oligonucleotide
gcaacgaaagaagagugug

SEQ ID NO: 1011779 - RNA, 19 nt, Artificial Sequence
  Description of Artificial Sequence: Synthetic oligonucleotide
agcuaagagggcaagacuu

SEQ ID NO: 1011780 - RNA, 19 nt, Artificial Sequence
  Description of Artificial Sequence: Synthetic oligonucleotide
gagaguaugggauacccuu

SEQ ID NO: 1011781 - RNA, 19 nt, Artificial Sequence
  Description of Artificial Sequence: Synthetic oligonucleotide
gcaagacuucuugacaugg

SEQ ID NO: 1011782 - RNA, 19 nt, Artificial Sequence
  Description of Artificial Sequence: Synthetic oligonucleotide
ucugccgaaacuugugcuu

SEQ ID NO: 1011783 - RNA, 19 nt, Artificial Sequence
  Description of Artificial Sequence: Synthetic oligonucleotide
gcuacuaaggaaccaucug

SEQ ID NO: 1011784 - RNA, 19 nt, Artificial Sequence
  Description of Artificial Sequence: Synthetic oligonucleotide
uguuugggcaccagugcua

SEQ ID NO: 1011785 - RNA, 19 nt, Artificial Sequence
  Description of Artificial Sequence: Synthetic oligonucleotide
cuacuaaggaaccaucugu

SEQ ID NO: 1011786 - RNA, 19 nt, Artificial Sequence
  Description of Artificial Sequence: Synthetic oligonucleotide
agauaucucgguaguaccu

SEQ ID NO: 1011787 - RNA, 19 nt, Artificial Sequence
  Description of Artificial Sequence: Synthetic oligonucleotide
ucgggaacggaggcuaucc

SEQ ID NO: 1011788 - RNA, 19 nt, Artificial Sequence
  Description of Artificial Sequence: Synthetic oligonucleotide
cucgcugagugcacuuagg

SEQ ID NO: 1011789 - RNA, 19 nt, Artificial Sequence
  Description of Artificial Sequence: Synthetic oligonucleotide
gggaacggaggcuauccgg

SEQ ID NO: 1011790 - RNA, 19 nt, Artificial Sequence
  Description of Artificial Sequence: Synthetic oligonucleotide
guaaccuccccaacaacac

SEQ ID NO: 1011791 - RNA, 19 nt, Artificial Sequence
  Description of Artificial Sequence: Synthetic oligonucleotide
ggaacggaggcuauccggg

SEQ ID NO: 1011792 - RNA, 19 nt, Artificial Sequence
  Description of Artificial Sequence: Synthetic oligonucleotide
cacucuaucuuuguaguga

SEQ ID NO: 1011793 - RNA, 19 nt, Artificial Sequence
  Description of Artificial Sequence: Synthetic oligonucleotide
acaguauccaacagcuugu

SEQ ID NO: 1011794 - RNA, 19 nt, Artificial Sequence
  Description of Artificial Sequence: Synthetic oligonucleotide
gugagcauaggugcucggg

SEQ ID NO: 1011795 - RNA, 19 nt, Artificial Sequence
  Description of Artificial Sequence: Synthetic oligonucleotide
cauggcuaugaucuuccuc

SEQ ID NO: 1011796 - RNA, 19 nt, Artificial Sequence
  Description of Artificial Sequence: Synthetic oligonucleotide
agcucucauaacgacugag

SEQ ID NO: 1011797 - RNA, 19 nt, Artificial Sequence
  Description of Artificial Sequence: Synthetic oligonucleotide
cuugugcuuccgacaagag

SEQ ID NO: 1011798 - RNA, 19 nt, Artificial Sequence
  Description of Artificial Sequence: Synthetic oligonucleotide
gaacggaggcuauccgggc

SEQ ID NO: 1011799 - RNA, 19 nt, Artificial Sequence
  Description of Artificial Sequence: Synthetic oligonucleotide
cacgaggaaugucccagag

SEQ ID NO: 1011800 - RNA, 19 nt, Artificial Sequence
  Description of Artificial Sequence: Synthetic oligonucleotide
agaguaugggauacccuug

SEQ ID NO: 1011801 - RNA, 19 nt, Artificial Sequence
  Description of Artificial Sequence: Synthetic oligonucleotide
guucagggcaaaugccuac

SEQ ID NO: 1011802 - RNA, 19 nt, Artificial Sequence
  Description of Artificial Sequence: Synthetic oligonucleotide
guagagcucgcugagugca

SEQ ID NO: 1011803 - RNA, 19 nt, Artificial Sequence
  Description of Artificial Sequence: Synthetic oligonucleotide
aagcucucauaacgacuga

SEQ ID NO: 1011804 - RNA, 19 nt, Artificial Sequence
  Description of Artificial Sequence: Synthetic oligonucleotide
uaagagggcaagacuucuu

SEQ ID NO: 1011805 - RNA, 19 nt, Artificial Sequence
  Description of Artificial Sequence: Synthetic oligonucleotide
cuuggccugguaaccuccc

SEQ ID NO: 1011806 - RNA, 19 nt, Artificial Sequence
  Description of Artificial Sequence: Synthetic oligonucleotide
gguaaccuccccaacaaca

SEQ ID NO: 1011807 - RNA, 19 nt, Artificial Sequence
  Description of Artificial Sequence: Synthetic oligonucleotide
agauugccuaauggacuac

SEQ ID NO: 1011808 - RNA, 19 nt, Artificial Sequence
  Description of Artificial Sequence: Synthetic oligonucleotide
ccgacaagaggcaucucgg

SEQ ID NO: 1011809 - RNA, 19 nt, Artificial Sequence
  Description of Artificial Sequence: Synthetic oligonucleotide
ugccgaaacuugugcuucc

SEQ ID NO: 1011810 - RNA, 19 nt, Artificial Sequence
  Description of Artificial Sequence: Synthetic oligonucleotide
uggacuacccauggcuaug

SEQ ID NO: 1011811 - RNA, 19 nt, Artificial Sequence
  Description of Artificial Sequence: Synthetic oligonucleotide
cuuauucagucuugaagcu

SEQ ID NO: 1011812 - RNA, 19 nt, Artificial Sequence
  Description of Artificial Sequence: Synthetic oligonucleotide
gugagguaaggaucuccug

SEQ ID NO: 1011813 - RNA, 19 nt, Artificial Sequence
  Description of Artificial Sequence: Synthetic oligonucleotide
aucugaagagggacacugg

SEQ ID NO: 1011814 - RNA, 19 nt, Artificial Sequence
  Description of Artificial Sequence: Synthetic oligonucleotide
uugggcaccagugcuacua

SEQ ID NO: 1011815 - RNA, 19 nt, Artificial Sequence
  Description of Artificial Sequence: Synthetic oligonucleotide
agcaaggcacuaacgaaga

SEQ ID NO: 1011816 - RNA, 19 nt, Artificial Sequence
  Description of Artificial Sequence: Synthetic oligonucleotide
acauaauggggcagcugag

SEQ ID NO: 1011817 - RNA, 19 nt, Artificial Sequence
  Description of Artificial Sequence: Synthetic oligonucleotide
cauaggugcucgggaacgg

SEQ ID NO: 1011818 - RNA, 19 nt, Artificial Sequence
  Description of Artificial Sequence: Synthetic oligonucleotide
cuuaggacauugaagucau

SEQ ID NO: 1011819 - RNA, 19 nt, Artificial Sequence
  Description of Artificial Sequence: Synthetic oligonucleotide
uacccacuugcgccaaaga

SEQ ID NO: 1011820 - RNA, 19 nt, Artificial Sequence
  Description of Artificial Sequence: Synthetic oligonucleotide
cuugcgccaaagacaaaga

SEQ ID NO: 1011821 - RNA, 19 nt, Artificial Sequence
  Description of Artificial Sequence: Synthetic oligonucleotide
gccaccuuguccccuagag

SEQ ID NO: 1011822 - RNA, 19 nt, Artificial Sequence
  Description of Artificial Sequence: Synthetic oligonucleotide
gagcaagcucucauaacga

SEQ ID NO: 1011823 - RNA, 19 nt, Artificial Sequence
  Description of Artificial Sequence: Synthetic oligonucleotide
cuagguaggcguccauguc

SEQ ID NO: 1011824 - RNA, 19 nt, Artificial Sequence
  Description of Artificial Sequence: Synthetic oligonucleotide
ugacgguacuugguaacgu

SEQ ID NO: 1011825 - RNA, 19 nt, Artificial Sequence
  Description of Artificial Sequence: Synthetic oligonucleotide
uauccgggcugcuggcagc

SEQ ID NO: 1011826 - RNA, 19 nt, Artificial Sequence
  Description of Artificial Sequence: Synthetic oligonucleotide
gcuaugaucuuccucaaau

SEQ ID NO: 1011827 - RNA, 19 nt, Artificial Sequence
  Description of Artificial Sequence: Synthetic oligonucleotide
gacgguacuugguaacgua

SEQ ID NO: 1011828 - RNA, 19 nt, Artificial Sequence
  Description of Artificial Sequence: Synthetic oligonucleotide
uccacuagguaggcgucca

SEQ ID NO: 1011829 - RNA, 19 nt, Artificial Sequence
  Description of Artificial Sequence: Synthetic oligonucleotide
uaguaccucuccacccaac

SEQ ID NO: 1011830 - RNA, 19 nt, Artificial Sequence
  Description of Artificial Sequence: Synthetic oligonucleotide
guuugggcaccagugcuac

SEQ ID NO: 1011831 - RNA, 19 nt, Artificial Sequence
  Description of Artificial Sequence: Synthetic oligonucleotide
guccagugagguaaggauc

SEQ ID NO: 1011832 - RNA, 19 nt, Artificial Sequence
  Description of Artificial Sequence: Synthetic oligonucleotide
ggccuuaauaauaggugug

SEQ ID NO: 1011833 - RNA, 19 nt, Artificial Sequence
  Description of Artificial Sequence: Synthetic oligonucleotide
gugcacuuaggacauugaa

SEQ ID NO: 1011834 - RNA, 19 nt, Artificial Sequence
  Description of Artificial Sequence: Synthetic oligonucleotide
cuuuggggcgcugagagua

SEQ ID NO: 1011835 - RNA, 19 nt, Artificial Sequence
  Description of Artificial Sequence: Synthetic oligonucleotide
gguaaaggugaaagaguug

SEQ ID NO: 1011836 - RNA, 19 nt, Artificial Sequence
  Description of Artificial Sequence: Synthetic oligonucleotide
caagacuucuugacaugga

SEQ ID NO: 1011837 - RNA, 19 nt, Artificial Sequence
  Description of Artificial Sequence: Synthetic oligonucleotide
ucauaacgacugagugaac

SEQ ID NO: 1011838 - RNA, 19 nt, Artificial Sequence
  Description of Artificial Sequence: Synthetic oligonucleotide
cugguaaccuccccaacaa

SEQ ID NO: 1011839 - RNA, 19 nt, Artificial Sequence
  Description of Artificial Sequence: Synthetic oligonucleotide
aucuuuguagugacauccu

SEQ ID NO: 1011840 - RNA, 19 nt, Artificial Sequence
  Description of Artificial Sequence: Synthetic oligonucleotide
uugagauaucucgguagua

SEQ ID NO: 1011841 - RNA, 19 nt, Artificial Sequence
  Description of Artificial Sequence: Synthetic oligonucleotide
acacgaggaaugucccaga

SEQ ID NO: 1011842 - RNA, 19 nt, Artificial Sequence
  Description of Artificial Sequence: Synthetic oligonucleotide
ggugcucgggaacggaggc

SEQ ID NO: 1011843 - RNA, 19 nt, Artificial Sequence
  Description of Artificial Sequence: Synthetic oligonucleotide
gagcuaagagggcaagacu

SEQ ID NO: 1011844 - RNA, 19 nt, Artificial Sequence
  Description of Artificial Sequence: Synthetic oligonucleotide
gacugagugaacggguaaa

SEQ ID NO: 1011845 - RNA, 19 nt, Artificial Sequence
  Description of Artificial Sequence: Synthetic oligonucleotide
agaggcaucucgguccagu

SEQ ID NO: 1011846 - RNA, 19 nt, Artificial Sequence
  Description of Artificial Sequence: Synthetic oligonucleotide
cuugaagcuagggccacca

SEQ ID NO: 1011847 - RNA, 19 nt, Artificial Sequence
  Description of Artificial Sequence: Synthetic oligonucleotide
acuaacgaagagggcccag

SEQ ID NO: 1011848 - RNA, 19 nt, Artificial Sequence
  Description of Artificial Sequence: Synthetic oligonucleotide
cucggugaucagcaugguc

SEQ ID NO: 1011849 - RNA, 19 nt, Artificial Sequence
  Description of Artificial Sequence: Synthetic oligonucleotide
cacuagguaggcguccaug

SEQ ID NO: 1011850 - RNA, 19 nt, Artificial Sequence
  Description of Artificial Sequence: Synthetic oligonucleotide
ggcaagacuucuugacaug

SEQ ID NO: 1011851 - RNA, 19 nt, Artificial Sequence
  Description of Artificial Sequence: Synthetic oligonucleotide
gcccacaucaggcccaagc

SEQ ID NO: 1011852 - RNA, 19 nt, Artificial Sequence
  Description of Artificial Sequence: Synthetic oligonucleotide
gaggcuauccgggcugcug

SEQ ID NO: 1011853 - RNA, 19 nt, Artificial Sequence
  Description of Artificial Sequence: Synthetic oligonucleotide
aguaugggauacccuugua

SEQ ID NO: 1011854 - RNA, 19 nt, Artificial Sequence
  Description of Artificial Sequence: Synthetic oligonucleotide
ugcucgggaacggaggcua

SEQ ID NO: 1011855 - RNA, 19 nt, Artificial Sequence
  Description of Artificial Sequence: Synthetic oligonucleotide
cugacaccugaaacaucug

SEQ ID NO: 1011856 - RNA, 19 nt, Artificial Sequence
  Description of Artificial Sequence: Synthetic oligonucleotide
ggccaggccuuaauaauag

SEQ ID NO: 1011857 - RNA, 19 nt, Artificial Sequence
  Description of Artificial Sequence: Synthetic oligonucleotide
cagacuuauucagucuuga

SEQ ID NO: 1011858 - RNA, 19 nt, Artificial Sequence
  Description of Artificial Sequence: Synthetic oligonucleotide
guagugggccagugaguug

SEQ ID NO: 1011859 - RNA, 19 nt, Artificial Sequence
  Description of Artificial Sequence: Synthetic oligonucleotide
gcacuaacgaagagggccc

SEQ ID NO: 1011860 - RNA, 19 nt, Artificial Sequence
  Description of Artificial Sequence: Synthetic oligonucleotide
ucuuguaauuagggauguc

SEQ ID NO: 1011861 - RNA, 19 nt, Artificial Sequence
  Description of Artificial Sequence: Synthetic oligonucleotide
ccagugcuacuaaggaacc

SEQ ID NO: 1011862 - RNA, 19 nt, Artificial Sequence
  Description of Artificial Sequence: Synthetic oligonucleotide
cugucaccugguagugggc

SEQ ID NO: 1011863 - RNA, 19 nt, Artificial Sequence
  Description of Artificial Sequence: Synthetic oligonucleotide
aagagggcccaggugugau

SEQ ID NO: 1011864 - RNA, 19 nt, Artificial Sequence
  Description of Artificial Sequence: Synthetic oligonucleotide
ggugaaagaguuggccaug

SEQ ID NO: 1011865 - RNA, 19 nt, Artificial Sequence
  Description of Artificial Sequence: Synthetic oligonucleotide
auacccuuguacacaguau

SEQ ID NO: 1011866 - RNA, 19 nt, Artificial Sequence
  Description of Artificial Sequence: Synthetic oligonucleotide
aacgugcccuugguggcca

SEQ ID NO: 1011867 - RNA, 19 nt, Artificial Sequence
  Description of Artificial Sequence: Synthetic oligonucleotide
gucucccucucggugauca

SEQ ID NO: 1011868 - RNA, 19 nt, Artificial Sequence
  Description of Artificial Sequence: Synthetic oligonucleotide
auaggugcucgggaacgga

SEQ ID NO: 1011869 - RNA, 19 nt, Artificial Sequence
  Description of Artificial Sequence: Synthetic oligonucleotide
gcucgcugagugcacuuag

SEQ ID NO: 1011870 - RNA, 19 nt, Artificial Sequence
  Description of Artificial Sequence: Synthetic oligonucleotide
gccaggccuuaauaauagg

SEQ ID NO: 1011871 - RNA, 19 nt, Artificial Sequence
  Description of Artificial Sequence: Synthetic oligonucleotide
cuccccaacaacaccagau

SEQ ID NO: 1011872 - RNA, 19 nt, Artificial Sequence
  Description of Artificial Sequence: Synthetic oligonucleotide
cugcaacgugcccuuggug

SEQ ID NO: 1011873 - RNA, 19 nt, Artificial Sequence
  Description of Artificial Sequence: Synthetic oligonucleotide
ggcgggacuguuccacuag

SEQ ID NO: 1011874 - RNA, 19 nt, Artificial Sequence
  Description of Artificial Sequence: Synthetic oligonucleotide
gcgggacuguuccacuagg

SEQ ID NO: 1011875 - RNA, 19 nt, Artificial Sequence
  Description of Artificial Sequence: Synthetic oligonucleotide
gcaaggcacuaacgaagag

SEQ ID NO: 1011876 - RNA, 19 nt, Artificial Sequence
  Description of Artificial Sequence: Synthetic oligonucleotide
aguaaggcacugccaccuu

SEQ ID NO: 1011877 - RNA, 19 nt, Artificial Sequence
  Description of Artificial Sequence: Synthetic oligonucleotide
cccaacauuuaauuaggaa

SEQ ID NO: 1011878 - RNA, 19 nt, Artificial Sequence
  Description of Artificial Sequence: Synthetic oligonucleotide
ccacagucaagcuuaucca

SEQ ID NO: 1011879 - RNA, 19 nt, Artificial Sequence
  Description of Artificial Sequence: Synthetic oligonucleotide
ccuggcgccauuccaaguc

SEQ ID NO: 1011880 - RNA, 19 nt, Artificial Sequence
  Description of Artificial Sequence: Synthetic oligonucleotide
gugcuacuaaggaaccauc

SEQ ID NO: 1011881 - RNA, 19 nt, Artificial Sequence
  Description of Artificial Sequence: Synthetic oligonucleotide
gccuaauggacuacccaug

SEQ ID NO: 1011882 - RNA, 19 nt, Artificial Sequence
  Description of Artificial Sequence: Synthetic oligonucleotide
cagaugccacagcuuggug

SEQ ID NO: 1011883 - RNA, 19 nt, Artificial Sequence
  Description of Artificial Sequence: Synthetic oligonucleotide
caacgugcccuugguggcc

SEQ ID NO: 1011884 - RNA, 19 nt, Artificial Sequence
  Description of Artificial Sequence: Synthetic oligonucleotide
gaggaaugucccagagguc

SEQ ID NO: 1011885 - RNA, 19 nt, Artificial Sequence
  Description of Artificial Sequence: Synthetic oligonucleotide
uacggacacgaggaauguc

SEQ ID NO: 1011886 - RNA, 19 nt, Artificial Sequence
  Description of Artificial Sequence: Synthetic oligonucleotide
ucuacccacuugcgccaaa

SEQ ID NO: 1011887 - RNA, 19 nt, Artificial Sequence
  Description of Artificial Sequence: Synthetic oligonucleotide
cuuccgacaagaggcaucu

SEQ ID NO: 1011888 - RNA, 19 nt, Artificial Sequence
  Description of Artificial Sequence: Synthetic oligonucleotide
ccugguaaccuccccaaca

SEQ ID NO: 1011889 - RNA, 19 nt, Artificial Sequence
  Description of Artificial Sequence: Synthetic oligonucleotide
caaauaggucauccacaaa

SEQ ID NO: 1011890 - RNA, 19 nt, Artificial Sequence
  Description of Artificial Sequence: Synthetic oligonucleotide
uuggggcgcugagaguaug

SEQ ID NO: 1011891 - RNA, 19 nt, Artificial Sequence
  Description of Artificial Sequence: Synthetic oligonucleotide
agcugagccccggugggca

SEQ ID NO: 1011892 - RNA, 19 nt, Artificial Sequence
  Description of Artificial Sequence: Synthetic oligonucleotide
cagcccaauggucuaccca

SEQ ID NO: 1011893 - RNA, 19 nt, Artificial Sequence
  Description of Artificial Sequence: Synthetic oligonucleotide
ggucuacccacuugcgcca

SEQ ID NO: 1011894 - RNA, 19 nt, Artificial Sequence
  Description of Artificial Sequence: Synthetic oligonucleotide
gaagagggcccagguguga

SEQ ID NO: 1011895 - RNA, 19 nt, Artificial Sequence
  Description of Artificial Sequence: Synthetic oligonucleotide
gcuaagagggcaagacuuc

SEQ ID NO: 1011896 - RNA, 19 nt, Artificial Sequence
  Description of Artificial Sequence: Synthetic oligonucleotide
gcguccauguccuggucac

SEQ ID NO: 1011897 - RNA, 19 nt, Artificial Sequence
  Description of Artificial Sequence: Synthetic oligonucleotide
gccuugucagauauauuuc

SEQ ID NO: 1011898 - RNA, 19 nt, Artificial Sequence
  Description of Artificial Sequence: Synthetic oligonucleotide
cuaagagggcaagacuucu

SEQ ID NO: 1011899 - RNA, 19 nt, Artificial Sequence
  Description of Artificial Sequence: Synthetic oligonucleotide
ccucucggugaucagcaug

SEQ ID NO: 1011900 - RNA, 19 nt, Artificial Sequence
  Description of Artificial Sequence: Synthetic oligonucleotide
gggacuguuccacuaggua

SEQ ID NO: 1011901 - RNA, 19 nt, Artificial Sequence
  Description of Artificial Sequence: Synthetic oligonucleotide
aggaaccaucugucaccug

SEQ ID NO: 1011902 - RNA, 19 nt, Artificial Sequence
  Description of Artificial Sequence: Synthetic oligonucleotide
gggcaagacuucuugacau

SEQ ID NO: 1011903 - RNA, 19 nt, Artificial Sequence
  Description of Artificial Sequence: Synthetic oligonucleotide
gggcacauaauggggcagc

SEQ ID NO: 1011904 - RNA, 19 nt, Artificial Sequence
  Description of Artificial Sequence: Synthetic oligonucleotide
aucucgguccagugaggua

SEQ ID NO: 1011905 - RNA, 19 nt, Artificial Sequence
  Description of Artificial Sequence: Synthetic oligonucleotide
ccaggccuuaauaauaggu

SEQ ID NO: 1011906 - RNA, 19 nt, Artificial Sequence
  Description of Artificial Sequence: Synthetic oligonucleotide
cucuccacccaacucuugu

SEQ ID NO: 1011907 - RNA, 19 nt, Artificial Sequence
  Description of Artificial Sequence: Synthetic oligonucleotide
acgacugagugaacgggua

SEQ ID NO: 1011908 - RNA, 19 nt, Artificial Sequence
  Description of Artificial Sequence: Synthetic oligonucleotide
gccgaaacuugugcuuccg

SEQ ID NO: 1011909 - RNA, 19 nt, Artificial Sequence
  Description of Artificial Sequence: Synthetic oligonucleotide
ggcuacagccagccacucc

SEQ ID NO: 1011910 - RNA, 19 nt, Artificial Sequence
  Description of Artificial Sequence: Synthetic oligonucleotide
ccaccaagauugccuaaug

SEQ ID NO: 1011911 - RNA, 19 nt, Artificial Sequence
  Description of Artificial Sequence: Synthetic oligonucleotide
agccacucccuggauggga

SEQ ID NO: 1011912 - RNA, 19 nt, Artificial Sequence
  Description of Artificial Sequence: Synthetic oligonucleotide
cucuuguaauuagggaugu

SEQ ID NO: 1011913 - RNA, 19 nt, Artificial Sequence
  Description of Artificial Sequence: Synthetic oligonucleotide
gcugagaguaugggauacc

SEQ ID NO: 1011914 - RNA, 19 nt, Artificial Sequence
  Description of Artificial Sequence: Synthetic oligonucleotide
guccuggucacugauugau

SEQ ID NO: 1011915 - RNA, 19 nt, Artificial Sequence
  Description of Artificial Sequence: Synthetic oligonucleotide
cgcugagugcacuuaggac

SEQ ID NO: 1011916 - RNA, 19 nt, Artificial Sequence
  Description of Artificial Sequence: Synthetic oligonucleotide
aggcgggacuguuccacua

SEQ ID NO: 1011917 - RNA, 19 nt, Artificial Sequence
  Description of Artificial Sequence: Synthetic oligonucleotide
gcagccuugucagauauau

SEQ ID NO: 1011918 - RNA, 19 nt, Artificial Sequence
  Description of Artificial Sequence: Synthetic oligonucleotide
uggcagcacggagcaagcu

SEQ ID NO: 1011919 - RNA, 19 nt, Artificial Sequence
  Description of Artificial Sequence: Synthetic oligonucleotide
ggcuauccgggcugcuggc

SEQ ID NO: 1011920 - RNA, 19 nt, Artificial Sequence
  Description of Artificial Sequence: Synthetic oligonucleotide
gccuuaauaauaggugugu

SEQ ID NO: 1011921 - RNA, 19 nt, Artificial Sequence
  Description of Artificial Sequence: Synthetic oligonucleotide
cggacacgaggaauguccc

SEQ ID NO: 1011922 - RNA, 19 nt, Artificial Sequence
  Description of Artificial Sequence: Synthetic oligonucleotide
ggacacgaggaauguccca

SEQ ID NO: 1011923 - RNA, 19 nt, Artificial Sequence
  Description of Artificial Sequence: Synthetic oligonucleotide
cacuuguuugggcaccagu

SEQ ID NO: 1011924 - RNA, 19 nt, Artificial Sequence
  Description of Artificial Sequence: Synthetic oligonucleotide
ggaagcagacuuauucagu

SEQ ID NO: 1011925 - RNA, 19 nt, Artificial Sequence
  Description of Artificial Sequence: Synthetic oligonucleotide
cagcacggagcaagcucuc

SEQ ID NO: 1011926 - RNA, 19 nt, Artificial Sequence
  Description of Artificial Sequence: Synthetic oligonucleotide
gacuaucagacagggccau

SEQ ID NO: 1011927 - RNA, 19 nt, Artificial Sequence
  Description of Artificial Sequence: Synthetic oligonucleotide
cucgggaacggaggcuauc

SEQ ID NO: 1011928 - RNA, 19 nt, Artificial Sequence
  Description of Artificial Sequence: Synthetic oligonucleotide
ggacuacccauggcuauga

SEQ ID NO: 1011929 - RNA, 19 nt, Artificial Sequence
  Description of Artificial Sequence: Synthetic oligonucleotide
ggucugggacuaucagaca

SEQ ID NO: 1011930 - RNA, 19 nt, Artificial Sequence
  Description of Artificial Sequence: Synthetic oligonucleotide
uggugcccgccuccugguc

SEQ ID NO: 1011931 - RNA, 19 nt, Artificial Sequence
  Description of Artificial Sequence: Synthetic oligonucleotide
ccggugggcaguacugaac

SEQ ID NO: 1011932 - RNA, 19 nt, Artificial Sequence
  Description of Artificial Sequence: Synthetic oligonucleotide
gcuuccgacaagaggcauc

SEQ ID NO: 1011933 - RNA, 19 nt, Artificial Sequence
  Description of Artificial Sequence: Synthetic oligonucleotide
acuaucagacagggccaua

SEQ ID NO: 1011934 - RNA, 19 nt, Artificial Sequence
  Description of Artificial Sequence: Synthetic oligonucleotide
gaggcgggacuguuccacu

SEQ ID NO: 1011935 - RNA, 19 nt, Artificial Sequence
  Description of Artificial Sequence: Synthetic oligonucleotide
ggccugguaaccuccccaa

SEQ ID NO: 1011936 - RNA, 19 nt, Artificial Sequence
  Description of Artificial Sequence: Synthetic oligonucleotide
gcaagcucucauaacgacu

SEQ ID NO: 1011937 - RNA, 19 nt, Artificial Sequence
  Description of Artificial Sequence: Synthetic oligonucleotide
caucuuggccugguaaccu

SEQ ID NO: 1011938 - RNA, 19 nt, Artificial Sequence
  Description of Artificial Sequence: Synthetic oligonucleotide
gccauguuauaagcagaca

SEQ ID NO: 1011939 - RNA, 19 nt, Artificial Sequence
  Description of Artificial Sequence: Synthetic oligonucleotide
ccgggcugcuggcagcacg

SEQ ID NO: 1011940 - RNA, 19 nt, Artificial Sequence
  Description of Artificial Sequence: Synthetic oligonucleotide
ggugaucagcauggucgug

SEQ ID NO: 1011941 - RNA, 19 nt, Artificial Sequence
  Description of Artificial Sequence: Synthetic oligonucleotide
ggcuaugaucuuccucaaa

SEQ ID NO: 1011942 - RNA, 19 nt, Artificial Sequence
  Description of Artificial Sequence: Synthetic oligonucleotide
caucucgguccagugaggu

SEQ ID NO: 1011943 - RNA, 19 nt, Artificial Sequence
  Description of Artificial Sequence: Synthetic oligonucleotide
cacuaacgaagagggccca

SEQ ID NO: 1011944 - RNA, 19 nt, Artificial Sequence
  Description of Artificial Sequence: Synthetic oligonucleotide
cccuggagacucaggcuac

SEQ ID NO: 1011945 - RNA, 19 nt, Artificial Sequence
  Description of Artificial Sequence: Synthetic oligonucleotide
agacaugcacugaccccau

SEQ ID NO: 1011946 - RNA, 19 nt, Artificial Sequence
  Description of Artificial Sequence: Synthetic oligonucleotide
agcucgcugagugcacuua

SEQ ID NO: 1011947 - RNA, 19 nt, Artificial Sequence
  Description of Artificial Sequence: Synthetic oligonucleotide
cgaagagggcccaggugug

SEQ ID NO: 1011948 - RNA, 19 nt, Artificial Sequence
  Description of Artificial Sequence: Synthetic oligonucleotide
gguggggucugggacuauc

SEQ ID NO: 1011949 - RNA, 19 nt, Artificial Sequence
  Description of Artificial Sequence: Synthetic oligonucleotide
ugagccccggugggcagua

SEQ ID NO: 1011950 - RNA, 19 nt, Artificial Sequence
  Description of Artificial Sequence: Synthetic oligonucleotide
acaccagaucugggucuca

SEQ ID NO: 1011951 - RNA, 19 nt, Artificial Sequence
  Description of Artificial Sequence: Synthetic oligonucleotide
ccuuaauaauaggugugua

SEQ ID NO: 1011952 - RNA, 19 nt, Artificial Sequence
  Description of Artificial Sequence: Synthetic oligonucleotide
gaaggaugaugcgggccau

SEQ ID NO: 1011953 - RNA, 19 nt, Artificial Sequence
  Description of Artificial Sequence: Synthetic oligonucleotide
gcaguacggacacgaggaa

SEQ ID NO: 1011954 - RNA, 19 nt, Artificial Sequence
  Description of Artificial Sequence: Synthetic oligonucleotide
gccugguaaccuccccaac

SEQ ID NO: 1011955 - RNA, 19 nt, Artificial Sequence
  Description of Artificial Sequence: Synthetic oligonucleotide
ggacccaaagcaaggcacu

SEQ ID NO: 1011956 - RNA, 19 nt, Artificial Sequence
  Description of Artificial Sequence: Synthetic oligonucleotide
gacuacccauggcuaugau

SEQ ID NO: 1011957 - RNA, 19 nt, Artificial Sequence
  Description of Artificial Sequence: Synthetic oligonucleotide
cgcugagaguaugggauac

SEQ ID NO: 1011958 - RNA, 19 nt, Artificial Sequence
  Description of Artificial Sequence: Synthetic oligonucleotide
caguacggacacgaggaau

SEQ ID NO: 1011959 - RNA, 19 nt, Artificial Sequence
  Description of Artificial Sequence: Synthetic oligonucleotide
gaucagcauggucgugguu

SEQ ID NO: 1011960 - RNA, 19 nt, Artificial Sequence
  Description of Artificial Sequence: Synthetic oligonucleotide
cggguaaaggugaaagagu

SEQ ID NO: 1011961 - RNA, 19 nt, Artificial Sequence
  Description of Artificial Sequence: Synthetic oligonucleotide
ccgaaacuugugcuuccga

SEQ ID NO: 1011962 - RNA, 19 nt, Artificial Sequence
  Description of Artificial Sequence: Synthetic oligonucleotide
cugccacggucucccucuc

SEQ ID NO: 1011963 - RNA, 19 nt, Artificial Sequence
  Description of Artificial Sequence: Synthetic oligonucleotide
gcgcugagaguaugggaua

SEQ ID NO: 1011964 - RNA, 19 nt, Artificial Sequence
  Description of Artificial Sequence: Synthetic oligonucleotide
gcggcccuggcgccauucc

SEQ ID NO: 1011965 - RNA, 19 nt, Artificial Sequence
  Description of Artificial Sequence: Synthetic oligonucleotide
gcuauccgggcugcuggca

SEQ ID NO: 1011966 - RNA, 19 nt, Artificial Sequence
  Description of Artificial Sequence: Synthetic oligonucleotide
ggcacauaauggggcagcu

SEQ ID NO: 1011967 - RNA, 19 nt, Artificial Sequence
  Description of Artificial Sequence: Synthetic oligonucleotide
gucuacccacuugcgccaa

SEQ ID NO: 1011968 - RNA, 19 nt, Artificial Sequence
  Description of Artificial Sequence: Synthetic oligonucleotide
gccaccaagauugccuaau

SEQ ID NO: 1011969 - RNA, 19 nt, Artificial Sequence
  Description of Artificial Sequence: Synthetic oligonucleotide
cacuugcgccaaagacaaa

SEQ ID NO: 1011970 - RNA, 19 nt, Artificial Sequence
  Description of Artificial Sequence: Synthetic oligonucleotide
ccacccaacucuuguaauu

SEQ ID NO: 1011971 - RNA, 19 nt, Artificial Sequence
  Description of Artificial Sequence: Synthetic oligonucleotide
cuacaacacugaggaaguu

SEQ ID NO: 1011972 - RNA, 19 nt, Artificial Sequence
  Description of Artificial Sequence: Synthetic oligonucleotide
ggucucagcccuggagacu

SEQ ID NO: 1011973 - RNA, 19 nt, Artificial Sequence
  Description of Artificial Sequence: Synthetic oligonucleotide
cggugaucagcauggucgu

SEQ ID NO: 1011974 - RNA, 19 nt, Artificial Sequence
  Description of Artificial Sequence: Synthetic oligonucleotide
caccugguagugggccagu

SEQ ID NO: 1011975 - RNA, 19 nt, Artificial Sequence
  Description of Artificial Sequence: Synthetic oligonucleotide
gcauggaggcgggacuguu

SEQ ID NO: 1011976 - RNA, 19 nt, Artificial Sequence
  Description of Artificial Sequence: Synthetic oligonucleotide
cccuggcgccauuccaagu

SEQ ID NO: 1011977 - RNA, 19 nt, Artificial Sequence
  Description of Artificial Sequence: Synthetic oligonucleotide
ccccuagagaugggcacau

SEQ ID NO: 1011978 - RNA, 19 nt, Artificial Sequence
  Description of Artificial Sequence: Synthetic oligonucleotide
cccuagagaugggcacaua

SEQ ID NO: 1011979 - RNA, 19 nt, Artificial Sequence
  Description of Artificial Sequence: Synthetic oligonucleotide
cccucucggugaucagcau

SEQ ID NO: 1011980 - RNA, 19 nt, Artificial Sequence
  Description of Artificial Sequence: Synthetic oligonucleotide
ucgaaguugacaaagaugg

SEQ ID NO: 1011981 - RNA, 19 nt, Artificial Sequence
  Description of Artificial Sequence: Synthetic oligonucleotide
aauccaaucagguucucac

SEQ ID NO: 1011982 - RNA, 19 nt, Artificial Sequence
  Description of Artificial Sequence: Synthetic oligonucleotide
aaagucaaggacuugauaa

SEQ ID NO: 1011983 - RNA, 19 nt, Artificial Sequence
  Description of Artificial Sequence: Synthetic oligonucleotide
uguaauaagccauguaggg

SEQ ID NO: 1011984 - RNA, 19 nt, Artificial Sequence
  Description of Artificial Sequence: Synthetic oligonucleotide
uaugggacgaacaucaaag

SEQ ID NO: 1011985 - RNA, 19 nt, Artificial Sequence
  Description of Artificial Sequence: Synthetic oligonucleotide
cauguaauaagccauguag

SEQ ID NO: 1011986 - RNA, 19 nt, Artificial Sequence
  Description of Artificial Sequence: Synthetic oligonucleotide
acucaauccaaucagguuc

SEQ ID NO: 1011987 - RNA, 19 nt, Artificial Sequence
  Description of Artificial Sequence: Synthetic oligonucleotide
uauaucuagagucaaggca

SEQ ID NO: 1011988 - RNA, 19 nt, Artificial Sequence
  Description of Artificial Sequence: Synthetic oligonucleotide
uuucacucccaucugaggg

SEQ ID NO: 1011989 - RNA, 19 nt, Artificial Sequence
  Description of Artificial Sequence: Synthetic oligonucleotide
cuuccuuauaucuagaguc

SEQ ID NO: 1011990 - RNA, 19 nt, Artificial Sequence
  Description of Artificial Sequence: Synthetic oligonucleotide
uuauuguaggucaauuucc

SEQ ID NO: 1011991 - RNA, 19 nt, Artificial Sequence
  Description of Artificial Sequence: Synthetic oligonucleotide
aaacaauggggcuagcuug

SEQ ID NO: 1011992 - RNA, 19 nt, Artificial Sequence
  Description of Artificial Sequence: Synthetic oligonucleotide
uauuguaggucaauuuccg

SEQ ID NO: 1011993 - RNA, 19 nt, Artificial Sequence
  Description of Artificial Sequence: Synthetic oligonucleotide
uguaggucaauuuccgugg

SEQ ID NO: 1011994 - RNA, 19 nt, Artificial Sequence
  Description of Artificial Sequence: Synthetic oligonucleotide
ugcuuugucacacauaauc

SEQ ID NO: 1011995 - RNA, 19 nt, Artificial Sequence
  Description of Artificial Sequence: Synthetic oligonucleotide
uuugucacacauaauccag

SEQ ID NO: 1011996 - RNA, 19 nt, Artificial Sequence
  Description of Artificial Sequence: Synthetic oligonucleotide
cuuauaucuagagucaagg

SEQ ID NO: 1011997 - RNA, 19 nt, Artificial Sequence
  Description of Artificial Sequence: Synthetic oligonucleotide
ugaucuaugggguuagugc

SEQ ID NO: 1011998 - RNA, 19 nt, Artificial Sequence
  Description of Artificial Sequence: Synthetic oligonucleotide
agaaccuagaccuccuccc

SEQ ID NO: 1011999 - RNA, 19 nt, Artificial Sequence
  Description of Artificial Sequence: Synthetic oligonucleotide
agcacucugucauacaugg

SEQ ID NO: 1012000 - RNA, 19 nt, Artificial Sequence
  Description of Artificial Sequence: Synthetic oligonucleotide
uguuaucauguaauaagcc

SEQ ID NO: 1012001 - RNA, 19 nt, Artificial Sequence
  Description of Artificial Sequence: Synthetic oligonucleotide
cacacuuugccaaaugugg

SEQ ID NO: 1012002 - RNA, 19 nt, Artificial Sequence
  Description of Artificial Sequence: Synthetic oligonucleotide
uaauaagccauguagggaa

SEQ ID NO: 1012003 - RNA, 19 nt, Artificial Sequence
  Description of Artificial Sequence: Synthetic oligonucleotide
ucuacucaauccaaucagg

SEQ ID NO: 1012004 - RNA, 19 nt, Artificial Sequence
  Description of Artificial Sequence: Synthetic oligonucleotide
uagacugaauccuugagcu

SEQ ID NO: 1012005 - RNA, 19 nt, Artificial Sequence
  Description of Artificial Sequence: Synthetic oligonucleotide
ugguauaccagcauguccu

SEQ ID NO: 1012006 - RNA, 19 nt, Artificial Sequence
  Description of Artificial Sequence: Synthetic oligonucleotide
uuaucauguaauaagccau

SEQ ID NO: 1012007 - RNA, 19 nt, Artificial Sequence
  Description of Artificial Sequence: Synthetic oligonucleotide
acgaacaucaaagagcuuc

SEQ ID NO: 1012008 - RNA, 19 nt, Artificial Sequence
  Description of Artificial Sequence: Synthetic oligonucleotide
ugugaaagaaguccucugc

SEQ ID NO: 1012009 - RNA, 19 nt, Artificial Sequence
  Description of Artificial Sequence: Synthetic oligonucleotide
aaugaaacaauggggcuag

SEQ ID NO: 1012010 - RNA, 19 nt, Artificial Sequence
  Description of Artificial Sequence: Synthetic oligonucleotide
aaucaugagugacauggug

SEQ ID NO: 1012011 - RNA, 19 nt, Artificial Sequence
  Description of Artificial Sequence: Synthetic oligonucleotide
cuuauuguaggucaauuuc

SEQ ID NO: 1012012 - RNA, 19 nt, Artificial Sequence
  Description of Artificial Sequence: Synthetic oligonucleotide
cuguuaucauguaauaagc

SEQ ID NO: 1012013 - RNA, 19 nt, Artificial Sequence
  Description of Artificial Sequence: Synthetic oligonucleotide
agugcuuugucacacauaa

SEQ ID NO: 1012014 - RNA, 19 nt, Artificial Sequence
  Description of Artificial Sequence: Synthetic oligonucleotide
uuguacuuauuguagguca

SEQ ID NO: 1012015 - RNA, 19 nt, Artificial Sequence
  Description of Artificial Sequence: Synthetic oligonucleotide
ugcuuugacaggcaugucc

SEQ ID NO: 1012016 - RNA, 19 nt, Artificial Sequence
  Description of Artificial Sequence: Synthetic oligonucleotide
cuagcuugaagcauuuggc

SEQ ID NO: 1012017 - RNA, 19 nt, Artificial Sequence
  Description of Artificial Sequence: Synthetic oligonucleotide
uauaguuguaugugcugcg

SEQ ID NO: 1012018 - RNA, 19 nt, Artificial Sequence
  Description of Artificial Sequence: Synthetic oligonucleotide
aaguccuucuagucuggcc

SEQ ID NO: 1012019 - RNA, 19 nt, Artificial Sequence
  Description of Artificial Sequence: Synthetic oligonucleotide
aacaucugucgauagggug

SEQ ID NO: 1012020 - RNA, 19 nt, Artificial Sequence
  Description of Artificial Sequence: Synthetic oligonucleotide
uuauaucuagagucaaggc

SEQ ID NO: 1012021 - RNA, 19 nt, Artificial Sequence
  Description of Artificial Sequence: Synthetic oligonucleotide
ugagaguacucccagcuga

SEQ ID NO: 1012022 - RNA, 19 nt, Artificial Sequence
  Description of Artificial Sequence: Synthetic oligonucleotide
auugcggugaacaauuuuc

SEQ ID NO: 1012023 - RNA, 19 nt, Artificial Sequence
  Description of Artificial Sequence: Synthetic oligonucleotide
gaagcauuuggcuuuggac

SEQ ID NO: 1012024 - RNA, 19 nt, Artificial Sequence
  Description of Artificial Sequence: Synthetic oligonucleotide
uaucauguaauaagccaug

SEQ ID NO: 1012025 - RNA, 19 nt, Artificial Sequence
  Description of Artificial Sequence: Synthetic oligonucleotide
gguagaugggaccagaacc

SEQ ID NO: 1012026 - RNA, 19 nt, Artificial Sequence
  Description of Artificial Sequence: Synthetic oligonucleotide
ugggacgaacaucaaagag

SEQ ID NO: 1012027 - RNA, 19 nt, Artificial Sequence
  Description of Artificial Sequence: Synthetic oligonucleotide
cuugacagcauuucgugac

SEQ ID NO: 1012028 - RNA, 19 nt, Artificial Sequence
  Description of Artificial Sequence: Synthetic oligonucleotide
ucucaccugagauggaggg

SEQ ID NO: 1012029 - RNA, 19 nt, Artificial Sequence
  Description of Artificial Sequence: Synthetic oligonucleotide
ugugauaaccuucccggug

SEQ ID NO: 1012030 - RNA, 19 nt, Artificial Sequence
  Description of Artificial Sequence: Synthetic oligonucleotide
ucauagccaaaucgaaucc

SEQ ID NO: 1012031 - RNA, 19 nt, Artificial Sequence
  Description of Artificial Sequence: Synthetic oligonucleotide
acggauucgaaagucaagg

SEQ ID NO: 1012032 - RNA, 19 nt, Artificial Sequence
  Description of Artificial Sequence: Synthetic oligonucleotide
ggaaguaagaucuugagcu

SEQ ID NO: 1012033 - RNA, 19 nt, Artificial Sequence
  Description of Artificial Sequence: Synthetic oligonucleotide
acauaauccagaaucuccg

SEQ ID NO: 1012034 - RNA, 19 nt, Artificial Sequence
  Description of Artificial Sequence: Synthetic oligonucleotide
aggcuauaguuguaugugc

SEQ ID NO: 1012035 - RNA, 19 nt, Artificial Sequence
  Description of Artificial Sequence: Synthetic oligonucleotide
auguaauaagccauguagg

SEQ ID NO: 1012036 - RNA, 19 nt, Artificial Sequence
  Description of Artificial Sequence: Synthetic oligonucleotide
augagugacaugguguccc

SEQ ID NO: 1012037 - RNA, 19 nt, Artificial Sequence
  Description of Artificial Sequence: Synthetic oligonucleotide
ggugcugugucucagggcg

SEQ ID NO: 1012038 - RNA, 19 nt, Artificial Sequence
  Description of Artificial Sequence: Synthetic oligonucleotide
uugguauaccagcaugucc

SEQ ID NO: 1012039 - RNA, 19 nt, Artificial Sequence
  Description of Artificial Sequence: Synthetic oligonucleotide
agcuuguacuuauuguagg

SEQ ID NO: 1012040 - RNA, 19 nt, Artificial Sequence
  Description of Artificial Sequence: Synthetic oligonucleotide
acacggucuguccagcugc

SEQ ID NO: 1012041 - RNA, 19 nt, Artificial Sequence
  Description of Artificial Sequence: Synthetic oligonucleotide
ucuagucuggccaaccuaa

SEQ ID NO: 1012042 - RNA, 19 nt, Artificial Sequence
  Description of Artificial Sequence: Synthetic oligonucleotide
agugagaguacucccagcu

SEQ ID NO: 1012043 - RNA, 19 nt, Artificial Sequence
  Description of Artificial Sequence: Synthetic oligonucleotide
ucgauaggguggcagagcc

SEQ ID NO: 1012044 - RNA, 19 nt, Artificial Sequence
  Description of Artificial Sequence: Synthetic oligonucleotide
uccaaucagguucucaccu

SEQ ID NO: 1012045 - RNA, 19 nt, Artificial Sequence
  Description of Artificial Sequence: Synthetic oligonucleotide
gaucuaugggguuagugca

SEQ ID NO: 1012046 - RNA, 19 nt, Artificial Sequence
  Description of Artificial Sequence: Synthetic oligonucleotide
gucauagccaaaucgaauc

SEQ ID NO: 1012047 - RNA, 19 nt, Artificial Sequence
  Description of Artificial Sequence: Synthetic oligonucleotide
caccuucugaucuaugggg

SEQ ID NO: 1012048 - RNA, 19 nt, Artificial Sequence
  Description of Artificial Sequence: Synthetic oligonucleotide
uagaaauaguccacaggug

SEQ ID NO: 1012049 - RNA, 19 nt, Artificial Sequence
  Description of Artificial Sequence: Synthetic oligonucleotide
gacuugacagcauuucgug

SEQ ID NO: 1012050 - RNA, 19 nt, Artificial Sequence
  Description of Artificial Sequence: Synthetic oligonucleotide
cucuacucaauccaaucag

SEQ ID NO: 1012051 - RNA, 19 nt, Artificial Sequence
  Description of Artificial Sequence: Synthetic oligonucleotide
cuauaguuguaugugcugc

SEQ ID NO: 1012052 - RNA, 19 nt, Artificial Sequence
  Description of Artificial Sequence: Synthetic oligonucleotide
gcuagcuugaagcauuugg

SEQ ID NO: 1012053 - RNA, 19 nt, Artificial Sequence
  Description of Artificial Sequence: Synthetic oligonucleotide
caugaggucgcucacucag

SEQ ID NO: 1012054 - RNA, 19 nt, Artificial Sequence
  Description of Artificial Sequence: Synthetic oligonucleotide
aagucaaggacuugauaaa

SEQ ID NO: 1012055 - RNA, 19 nt, Artificial Sequence
  Description of Artificial Sequence: Synthetic oligonucleotide
ugacauuggacuugacagc

SEQ ID NO: 1012056 - RNA, 19 nt, Artificial Sequence
  Description of Artificial Sequence: Synthetic oligonucleotide
acaucugucgauagggugg

SEQ ID NO: 1012057 - RNA, 19 nt, Artificial Sequence
  Description of Artificial Sequence: Synthetic oligonucleotide
ucgaaagucaaggacuuga

SEQ ID NO: 1012058 - RNA, 19 nt, Artificial Sequence
  Description of Artificial Sequence: Synthetic oligonucleotide
aaaugaaacaauggggcua

SEQ ID NO: 1012059 - RNA, 19 nt, Artificial Sequence
  Description of Artificial Sequence: Synthetic oligonucleotide
uugagcuuguacuuauugu

SEQ ID NO: 1012060 - RNA, 19 nt, Artificial Sequence
  Description of Artificial Sequence: Synthetic oligonucleotide
auaguuguaugugcugcgc

SEQ ID NO: 1012061 - RNA, 19 nt, Artificial Sequence
  Description of Artificial Sequence: Synthetic oligonucleotide
uagggaaguaagaucuuga

SEQ ID NO: 1012062 - RNA, 19 nt, Artificial Sequence
  Description of Artificial Sequence: Synthetic oligonucleotide
gauggagggauugugauaa

SEQ ID NO: 1012063 - RNA, 19 nt, Artificial Sequence
  Description of Artificial Sequence: Synthetic oligonucleotide
uuagugcaggccuucuucc

SEQ ID NO: 1012064 - RNA, 19 nt, Artificial Sequence
  Description of Artificial Sequence: Synthetic oligonucleotide
cucagggcgauagaaauag

SEQ ID NO: 1012065 - RNA, 19 nt, Artificial Sequence
  Description of Artificial Sequence: Synthetic oligonucleotide
auaucuagagucaaggcau

SEQ ID NO: 1012066 - RNA, 19 nt, Artificial Sequence
  Description of Artificial Sequence: Synthetic oligonucleotide
gaggcuauaguuguaugug

SEQ ID NO: 1012067 - RNA, 19 nt, Artificial Sequence
  Description of Artificial Sequence: Synthetic oligonucleotide
uccaugucguuacugcagc

SEQ ID NO: 1012068 - RNA, 19 nt, Artificial Sequence
  Description of Artificial Sequence: Synthetic oligonucleotide
aaggcaagacugccauugg

SEQ ID NO: 1012069 - RNA, 19 nt, Artificial Sequence
  Description of Artificial Sequence: Synthetic oligonucleotide
ugacaaagauggcauuaug

SEQ ID NO: 1012070 - RNA, 19 nt, Artificial Sequence
  Description of Artificial Sequence: Synthetic oligonucleotide
ucuagagucaaggcauucc

SEQ ID NO: 1012071 - RNA, 19 nt, Artificial Sequence
  Description of Artificial Sequence: Synthetic oligonucleotide
cacuuaggccaaaugaaac

SEQ ID NO: 1012072 - RNA, 19 nt, Artificial Sequence
  Description of Artificial Sequence: Synthetic oligonucleotide
ugaccauaugggacgaaca

SEQ ID NO: 1012073 - RNA, 19 nt, Artificial Sequence
  Description of Artificial Sequence: Synthetic oligonucleotide
auagccaaaucgaauccac

SEQ ID NO: 1012074 - RNA, 19 nt, Artificial Sequence
  Description of Artificial Sequence: Synthetic oligonucleotide
ggcauuccuggguagaugg

SEQ ID NO: 1012075 - RNA, 19 nt, Artificial Sequence
  Description of Artificial Sequence: Synthetic oligonucleotide
augucguuacugcagccuc

SEQ ID NO: 1012076 - RNA, 19 nt, Artificial Sequence
  Description of Artificial Sequence: Synthetic oligonucleotide
agcuugucaggguggacac

SEQ ID NO: 1012077 - RNA, 19 nt, Artificial Sequence
  Description of Artificial Sequence: Synthetic oligonucleotide
ugcgcuuugcuuugacagg

SEQ ID NO: 1012078 - RNA, 19 nt, Artificial Sequence
  Description of Artificial Sequence: Synthetic oligonucleotide
ucuaugggguuagugcagg

SEQ ID NO: 1012079 - RNA, 19 nt, Artificial Sequence
  Description of Artificial Sequence: Synthetic oligonucleotide
cuuugucacacauaaucca

SEQ ID NO: 1012080 - RNA, 19 nt, Artificial Sequence
  Description of Artificial Sequence: Synthetic oligonucleotide
aauguggcuagaccucaga

SEQ ID NO: 1012081 - RNA, 19 nt, Artificial Sequence
  Description of Artificial Sequence: Synthetic oligonucleotide
accucagaaguccuucuag

SEQ ID NO: 1012082 - RNA, 19 nt, Artificial Sequence
  Description of Artificial Sequence: Synthetic oligonucleotide
uucacucccaucugagggc

SEQ ID NO: 1012083 - RNA, 19 nt, Artificial Sequence
  Description of Artificial Sequence: Synthetic oligonucleotide
ccaaaucgaauccacaagc

SEQ ID NO: 1012084 - RNA, 19 nt, Artificial Sequence
  Description of Artificial Sequence: Synthetic oligonucleotide
gugaacaauuuucugcaac

SEQ ID NO: 1012085 - RNA, 19 nt, Artificial Sequence
  Description of Artificial Sequence: Synthetic oligonucleotide
gauguagacugaauccuug

SEQ ID NO: 1012086 - RNA, 19 nt, Artificial Sequence
  Description of Artificial Sequence: Synthetic oligonucleotide
agugacauggugucccuca

SEQ ID NO: 1012087 - RNA, 19 nt, Artificial Sequence
  Description of Artificial Sequence: Synthetic oligonucleotide
gaacuccuccuucucaggc

SEQ ID NO: 1012088 - RNA, 19 nt, Artificial Sequence
  Description of Artificial Sequence: Synthetic oligonucleotide
uugacagcauuucgugacc

SEQ ID NO: 1012089 - RNA, 19 nt, Artificial Sequence
  Description of Artificial Sequence: Synthetic oligonucleotide
uagaccuccuccccaaaga

SEQ ID NO: 1012090 - RNA, 19 nt, Artificial Sequence
  Description of Artificial Sequence: Synthetic oligonucleotide
ugggaccagaaccuagacc

SEQ ID NO: 1012091 - RNA, 19 nt, Artificial Sequence
  Description of Artificial Sequence: Synthetic oligonucleotide
uugcggugaacaauuuucu

SEQ ID NO: 1012092 - RNA, 19 nt, Artificial Sequence
  Description of Artificial Sequence: Synthetic oligonucleotide
guagaacaucugucgauag

SEQ ID NO: 1012093 - RNA, 19 nt, Artificial Sequence
  Description of Artificial Sequence: Synthetic oligonucleotide
aggacuugauaaaucuugg

SEQ ID NO: 1012094 - RNA, 19 nt, Artificial Sequence
  Description of Artificial Sequence: Synthetic oligonucleotide
ugaggucgcucacucagca

SEQ ID NO: 1012095 - RNA, 19 nt, Artificial Sequence
  Description of Artificial Sequence: Synthetic oligonucleotide
uugacggugauggggaggc

SEQ ID NO: 1012096 - RNA, 19 nt, Artificial Sequence
  Description of Artificial Sequence: Synthetic oligonucleotide
ugacauggugucccucagg

SEQ ID NO: 1012097 - RNA, 19 nt, Artificial Sequence
  Description of Artificial Sequence: Synthetic oligonucleotide
gaauaaccacacuuugcca

SEQ ID NO: 1012098 - RNA, 19 nt, Artificial Sequence
  Description of Artificial Sequence: Synthetic oligonucleotide
uggagccauaaccauauuu

SEQ ID NO: 1012099 - RNA, 19 nt, Artificial Sequence
  Description of Artificial Sequence: Synthetic oligonucleotide
ugucauacauggacacaug

SEQ ID NO: 1012100 - RNA, 19 nt, Artificial Sequence
  Description of Artificial Sequence: Synthetic oligonucleotide
ucauguaauaagccaugua

SEQ ID NO: 1012101 - RNA, 19 nt, Artificial Sequence
  Description of Artificial Sequence: Synthetic oligonucleotide
gagccauaaccauauuuca

SEQ ID NO: 1012102 - RNA, 19 nt, Artificial Sequence
  Description of Artificial Sequence: Synthetic oligonucleotide
cagggcgauagaaauaguc

SEQ ID NO: 1012103 - RNA, 19 nt, Artificial Sequence
  Description of Artificial Sequence: Synthetic oligonucleotide
ugggaaguuccuaggggug

SEQ ID NO: 1012104 - RNA, 19 nt, Artificial Sequence
  Description of Artificial Sequence: Synthetic oligonucleotide
ggauucgaaagucaaggac

SEQ ID NO: 1012105 - RNA, 19 nt, Artificial Sequence
  Description of Artificial Sequence: Synthetic oligonucleotide
gggacgaacaucaaagagc

SEQ ID NO: 1012106 - RNA, 19 nt, Artificial Sequence
  Description of Artificial Sequence: Synthetic oligonucleotide
aacggauucgaaagucaag

SEQ ID NO: 1012107 - RNA, 19 nt, Artificial Sequence
  Description of Artificial Sequence: Synthetic oligonucleotide
uggaccuguuaucauguaa

SEQ ID NO: 1012108 - RNA, 19 nt, Artificial Sequence
  Description of Artificial Sequence: Synthetic oligonucleotide
uaguuguaugugcugcgcu

SEQ ID NO: 1012109 - RNA, 19 nt, Artificial Sequence
  Description of Artificial Sequence: Synthetic oligonucleotide
augggaauucaggagaaga

SEQ ID NO: 1012110 - RNA, 19 nt, Artificial Sequence
  Description of Artificial Sequence: Synthetic oligonucleotide
accauaugggacgaacauc

SEQ ID NO: 1012111 - RNA, 19 nt, Artificial Sequence
  Description of Artificial Sequence: Synthetic oligonucleotide
aggccaaaugaaacaaugg

SEQ ID NO: 1012112 - RNA, 19 nt, Artificial Sequence
  Description of Artificial Sequence: Synthetic oligonucleotide
gaaccuagaccuccucccc

SEQ ID NO: 1012113 - RNA, 19 nt, Artificial Sequence
  Description of Artificial Sequence: Synthetic oligonucleotide
uugcgcaugagcacucugu

SEQ ID NO: 1012114 - RNA, 19 nt, Artificial Sequence
  Description of Artificial Sequence: Synthetic oligonucleotide
auuguaggucaauuuccgu

SEQ ID NO: 1012115 - RNA, 19 nt, Artificial Sequence
  Description of Artificial Sequence: Synthetic oligonucleotide
ugucguuacugcagccucc

SEQ ID NO: 1012116 - RNA, 19 nt, Artificial Sequence
  Description of Artificial Sequence: Synthetic oligonucleotide
caugcauggugacaagcug

SEQ ID NO: 1012117 - RNA, 19 nt, Artificial Sequence
  Description of Artificial Sequence: Synthetic oligonucleotide
auaugggacgaacaucaaa

SEQ ID NO: 1012118 - RNA, 19 nt, Artificial Sequence
  Description of Artificial Sequence: Synthetic oligonucleotide
ugguuggaugucuucuuga

SEQ ID NO: 1012119 - RNA, 19 nt, Artificial Sequence
  Description of Artificial Sequence: Synthetic oligonucleotide
auuccuggguagaugggac

SEQ ID NO: 1012120 - RNA, 19 nt, Artificial Sequence
  Description of Artificial Sequence: Synthetic oligonucleotide
acuugacagcauuucguga

SEQ ID NO: 1012121 - RNA, 19 nt, Artificial Sequence
  Description of Artificial Sequence: Synthetic oligonucleotide
aaccuagaccuccucccca

SEQ ID NO: 1012122 - RNA, 19 nt, Artificial Sequence
  Description of Artificial Sequence: Synthetic oligonucleotide
ucauuccacaacggauucg

SEQ ID NO: 1012123 - RNA, 19 nt, Artificial Sequence
  Description of Artificial Sequence: Synthetic oligonucleotide
aacaauggggcuagcuuga

SEQ ID NO: 1012124 - RNA, 19 nt, Artificial Sequence
  Description of Artificial Sequence: Synthetic oligonucleotide
cuuguacuuauuguagguc

SEQ ID NO: 1012125 - RNA, 19 nt, Artificial Sequence
  Description of Artificial Sequence: Synthetic oligonucleotide
guaauaagccauguaggga

SEQ ID NO: 1012126 - RNA, 19 nt, Artificial Sequence
  Description of Artificial Sequence: Synthetic oligonucleotide
guggcuagaccucagaagu

SEQ ID NO: 1012127 - RNA, 19 nt, Artificial Sequence
  Description of Artificial Sequence: Synthetic oligonucleotide
uccgugggccgucuguucc

SEQ ID NO: 1012128 - RNA, 19 nt, Artificial Sequence
  Description of Artificial Sequence: Synthetic oligonucleotide
uucugaucuaugggguuag

SEQ ID NO: 1012129 - RNA, 19 nt, Artificial Sequence
  Description of Artificial Sequence: Synthetic oligonucleotide
cuaggggugcccacuuagg

SEQ ID NO: 1012130 - RNA, 19 nt, Artificial Sequence
  Description of Artificial Sequence: Synthetic oligonucleotide
ccauaugggacgaacauca

SEQ ID NO: 1012131 - RNA, 19 nt, Artificial Sequence
  Description of Artificial Sequence: Synthetic oligonucleotide
gcaccuuccuuauaucuag

SEQ ID NO: 1012132 - RNA, 19 nt, Artificial Sequence
  Description of Artificial Sequence: Synthetic oligonucleotide
augggacgaacaucaaaga

SEQ ID NO: 1012133 - RNA, 19 nt, Artificial Sequence
  Description of Artificial Sequence: Synthetic oligonucleotide
uugugauaaccuucccggu

SEQ ID NO: 1012134 - RNA, 19 nt, Artificial Sequence
  Description of Artificial Sequence: Synthetic oligonucleotide
aguuguaugugcugcgcuu

SEQ ID NO: 1012135 - RNA, 19 nt, Artificial Sequence
  Description of Artificial Sequence: Synthetic oligonucleotide
aaucagguucucaccugag

SEQ ID NO: 1012136 - RNA, 19 nt, Artificial Sequence
  Description of Artificial Sequence: Synthetic oligonucleotide
cuagaccuccuccccaaag

SEQ ID NO: 1012137 - RNA, 19 nt, Artificial Sequence
  Description of Artificial Sequence: Synthetic oligonucleotide
gcugggaaguuccuagggg

SEQ ID NO: 1012138 - RNA, 19 nt, Artificial Sequence
  Description of Artificial Sequence: Synthetic oligonucleotide
caugagcacucugucauac

SEQ ID NO: 1012139 - RNA, 19 nt, Artificial Sequence
  Description of Artificial Sequence: Synthetic oligonucleotide
aucauugcggugaacaauu

SEQ ID NO: 1012140 - RNA, 19 nt, Artificial Sequence
  Description of Artificial Sequence: Synthetic oligonucleotide
cccaucuugguauaccagc

SEQ ID NO: 1012141 - RNA, 19 nt, Artificial Sequence
  Description of Artificial Sequence: Synthetic oligonucleotide
gacacggucuguccagcug

SEQ ID NO: 1012142 - RNA, 19 nt, Artificial Sequence
  Description of Artificial Sequence: Synthetic oligonucleotide
ggccgucuguuccugaugg

SEQ ID NO: 1012143 - RNA, 19 nt, Artificial Sequence
  Description of Artificial Sequence: Synthetic oligonucleotide
uacuuauuguaggucaauu

SEQ ID NO: 1012144 - RNA, 19 nt, Artificial Sequence
  Description of Artificial Sequence: Synthetic oligonucleotide
ucaaaucacacagcuggua

SEQ ID NO: 1012145 - RNA, 19 nt, Artificial Sequence
  Description of Artificial Sequence: Synthetic oligonucleotide
auuuccgugggccgucugu

SEQ ID NO: 1012146 - RNA, 19 nt, Artificial Sequence
  Description of Artificial Sequence: Synthetic oligonucleotide
ggacuugauaaaucuuggc

SEQ ID NO: 1012147 - RNA, 19 nt, Artificial Sequence
  Description of Artificial Sequence: Synthetic oligonucleotide
gaaguccucugcaguacag

SEQ ID NO: 1012148 - RNA, 19 nt, Artificial Sequence
  Description of Artificial Sequence: Synthetic oligonucleotide
agagcggcaguuccuggug

SEQ ID NO: 1012149 - RNA, 19 nt, Artificial Sequence
  Description of Artificial Sequence: Synthetic oligonucleotide
gaucagucuucccaggccu

SEQ ID NO: 1012150 - RNA, 19 nt, Artificial Sequence
  Description of Artificial Sequence: Synthetic oligonucleotide
ucucagggcgauagaaaua

SEQ ID NO: 1012151 - RNA, 19 nt, Artificial Sequence
  Description of Artificial Sequence: Synthetic oligonucleotide
agucaaggacuugauaaau

SEQ ID NO: 1012152 - RNA, 19 nt, Artificial Sequence
  Description of Artificial Sequence: Synthetic oligonucleotide
gagaguacucccagcugag

SEQ ID NO: 1012153 - RNA, 19 nt, Artificial Sequence
  Description of Artificial Sequence: Synthetic oligonucleotide
cuuaggccaaaugaaacaa

SEQ ID NO: 1012154 - RNA, 19 nt, Artificial Sequence
  Description of Artificial Sequence: Synthetic oligonucleotide
cugugucucagggcgauag

SEQ ID NO: 1012155 - RNA, 19 nt, Artificial Sequence
  Description of Artificial Sequence: Synthetic oligonucleotide
uccuuauaucuagagucaa

SEQ ID NO: 1012156 - RNA, 19 nt, Artificial Sequence
  Description of Artificial Sequence: Synthetic oligonucleotide
uguaugugcugcgcuuugc

SEQ ID NO: 1012157 - RNA, 19 nt, Artificial Sequence
  Description of Artificial Sequence: Synthetic oligonucleotide
gcuauaguuguaugugcug

SEQ ID NO: 1012158 - RNA, 19 nt, Artificial Sequence
  Description of Artificial Sequence: Synthetic oligonucleotide
uccuggguagaugggacca

SEQ ID NO: 1012159 - RNA, 19 nt, Artificial Sequence
  Description of Artificial Sequence: Synthetic oligonucleotide
ucuugacggugauggggag

SEQ ID NO: 1012160 - RNA, 19 nt, Artificial Sequence
  Description of Artificial Sequence: Synthetic oligonucleotide
uagagcggcaguuccuggu

SEQ ID NO: 1012161 - RNA, 19 nt, Artificial Sequence
  Description of Artificial Sequence: Synthetic oligonucleotide
gaagaaguacuuccugccu

SEQ ID NO: 1012162 - RNA, 19 nt, Artificial Sequence
  Description of Artificial Sequence: Synthetic oligonucleotide
auguggcuagaccucagaa

SEQ ID NO: 1012163 - RNA, 19 nt, Artificial Sequence
  Description of Artificial Sequence: Synthetic oligonucleotide
cuagucuggccaaccuaag

SEQ ID NO: 1012164 - RNA, 19 nt, Artificial Sequence
  Description of Artificial Sequence: Synthetic oligonucleotide
cugaucuaugggguuagug

SEQ ID NO: 1012165 - RNA, 19 nt, Artificial Sequence
  Description of Artificial Sequence: Synthetic oligonucleotide
cacgaucagucuucccagg

SEQ ID NO: 1012166 - RNA, 19 nt, Artificial Sequence
  Description of Artificial Sequence: Synthetic oligonucleotide
guauaccagcauguccugg

SEQ ID NO: 1012167 - RNA, 19 nt, Artificial Sequence
  Description of Artificial Sequence: Synthetic oligonucleotide
ggcaagacugccauuggcc

SEQ ID NO: 1012168 - RNA, 19 nt, Artificial Sequence
  Description of Artificial Sequence: Synthetic oligonucleotide
auggggcuagcuugaagca

SEQ ID NO: 1012169 - RNA, 19 nt, Artificial Sequence
  Description of Artificial Sequence: Synthetic oligonucleotide
uaucuagagucaaggcauu

SEQ ID NO: 1012170 - RNA, 19 nt, Artificial Sequence
  Description of Artificial Sequence: Synthetic oligonucleotide
ugcccacuuaggccaaaug

SEQ ID NO: 1012171 - RNA, 19 nt, Artificial Sequence
  Description of Artificial Sequence: Synthetic oligonucleotide
aauuuccgugggccgucug

SEQ ID NO: 1012172 - RNA, 19 nt, Artificial Sequence
  Description of Artificial Sequence: Synthetic oligonucleotide
gucagcaggggacacgguc

SEQ ID NO: 1012173 - RNA, 19 nt, Artificial Sequence
  Description of Artificial Sequence: Synthetic oligonucleotide
cuugacggugauggggagg

SEQ ID NO: 1012174 - RNA, 19 nt, Artificial Sequence
  Description of Artificial Sequence: Synthetic oligonucleotide
aggccuuucagagcggaug

SEQ ID NO: 1012175 - RNA, 19 nt, Artificial Sequence
  Description of Artificial Sequence: Synthetic oligonucleotide
ucgagggucauagccaaau

SEQ ID NO: 1012176 - RNA, 19 nt, Artificial Sequence
  Description of Artificial Sequence: Synthetic oligonucleotide
cugagauggagggauugug

SEQ ID NO: 1012177 - RNA, 19 nt, Artificial Sequence
  Description of Artificial Sequence: Synthetic oligonucleotide
guagagcggcaguuccugg

SEQ ID NO: 1012178 - RNA, 19 nt, Artificial Sequence
  Description of Artificial Sequence: Synthetic oligonucleotide
gguuggaugucuucuugac

SEQ ID NO: 1012179 - RNA, 19 nt, Artificial Sequence
  Description of Artificial Sequence: Synthetic oligonucleotide
accuguuaucauguaauaa

SEQ ID NO: 1012180 - RNA, 19 nt, Artificial Sequence
  Description of Artificial Sequence: Synthetic oligonucleotide
ccauaaccauauuucauuc

SEQ ID NO: 1012181 - RNA, 19 nt, Artificial Sequence
  Description of Artificial Sequence: Synthetic oligonucleotide
gugagaguacucccagcug

SEQ ID NO: 1012182 - RNA, 19 nt, Artificial Sequence
  Description of Artificial Sequence: Synthetic oligonucleotide
caucugucgauaggguggc

SEQ ID NO: 1012183 - RNA, 19 nt, Artificial Sequence
  Description of Artificial Sequence: Synthetic oligonucleotide
ccuuauaucuagagucaag

SEQ ID NO: 1012184 - RNA, 19 nt, Artificial Sequence
  Description of Artificial Sequence: Synthetic oligonucleotide
gaguacucccagcugaggu

SEQ ID NO: 1012185 - RNA, 19 nt, Artificial Sequence
  Description of Artificial Sequence: Synthetic oligonucleotide
agguaccucaggguccucg

SEQ ID NO: 1012186 - RNA, 19 nt, Artificial Sequence
  Description of Artificial Sequence: Synthetic oligonucleotide
caaucagguucucaccuga

SEQ ID NO: 1012187 - RNA, 19 nt, Artificial Sequence
  Description of Artificial Sequence: Synthetic oligonucleotide
augaggucgcucacucagc

SEQ ID NO: 1012188 - RNA, 19 nt, Artificial Sequence
  Description of Artificial Sequence: Synthetic oligonucleotide
ugagugacauggugucccu

SEQ ID NO: 1012189 - RNA, 19 nt, Artificial Sequence
  Description of Artificial Sequence: Synthetic oligonucleotide
gugaccauaugggacgaac

SEQ ID NO: 1012190 - RNA, 19 nt, Artificial Sequence
  Description of Artificial Sequence: Synthetic oligonucleotide
gagcggauggucugcagaa

SEQ ID NO: 1012191 - RNA, 19 nt, Artificial Sequence
  Description of Artificial Sequence: Synthetic oligonucleotide
auggagggauugugauaac

SEQ ID NO: 1012192 - RNA, 19 nt, Artificial Sequence
  Description of Artificial Sequence: Synthetic oligonucleotide
caaaucgaauccacaagcu

SEQ ID NO: 1012193 - RNA, 19 nt, Artificial Sequence
  Description of Artificial Sequence: Synthetic oligonucleotide
gcaucuggguguuuucgag

SEQ ID NO: 1012194 - RNA, 19 nt, Artificial Sequence
  Description of Artificial Sequence: Synthetic oligonucleotide
uaagccauguagggaagua

SEQ ID NO: 1012195 - RNA, 19 nt, Artificial Sequence
  Description of Artificial Sequence: Synthetic oligonucleotide
ggcuagaccucagaagucc

SEQ ID NO: 1012196 - RNA, 19 nt, Artificial Sequence
  Description of Artificial Sequence: Synthetic oligonucleotide
cuggguguuuucgaggguc

SEQ ID NO: 1012197 - RNA, 19 nt, Artificial Sequence
  Description of Artificial Sequence: Synthetic oligonucleotide
uggcuagaccucagaaguc

SEQ ID NO: 1012198 - RNA, 19 nt, Artificial Sequence
  Description of Artificial Sequence: Synthetic oligonucleotide
aaggcauuccuggguagau

SEQ ID NO: 1012199 - RNA, 19 nt, Artificial Sequence
  Description of Artificial Sequence: Synthetic oligonucleotide
caacggauucgaaagucaa

SEQ ID NO: 1012200 - RNA, 19 nt, Artificial Sequence
  Description of Artificial Sequence: Synthetic oligonucleotide
caauggggcuagcuugaag

SEQ ID NO: 1012201 - RNA, 19 nt, Artificial Sequence
  Description of Artificial Sequence: Synthetic oligonucleotide
acaagcugguuggaugucu

SEQ ID NO: 1012202 - RNA, 19 nt, Artificial Sequence
  Description of Artificial Sequence: Synthetic oligonucleotide
gaccauaugggacgaacau

SEQ ID NO: 1012203 - RNA, 19 nt, Artificial Sequence
  Description of Artificial Sequence: Synthetic oligonucleotide
guagaugggaccagaaccu

SEQ ID NO: 1012204 - RNA, 19 nt, Artificial Sequence
  Description of Artificial Sequence: Synthetic oligonucleotide
uccauggaccuguuaucau

SEQ ID NO: 1012205 - RNA, 19 nt, Artificial Sequence
  Description of Artificial Sequence: Synthetic oligonucleotide
cauagccaaaucgaaucca

SEQ ID NO: 1012206 - RNA, 19 nt, Artificial Sequence
  Description of Artificial Sequence: Synthetic oligonucleotide
ccauggaccuguuaucaug

SEQ ID NO: 1012207 - RNA, 19 nt, Artificial Sequence
  Description of Artificial Sequence: Synthetic oligonucleotide
ucaauuuccgugggccguc

SEQ ID NO: 1012208 - RNA, 19 nt, Artificial Sequence
  Description of Artificial Sequence: Synthetic oligonucleotide
ccaaauguggcuagaccuc

SEQ ID NO: 1012209 - RNA, 19 nt, Artificial Sequence
  Description of Artificial Sequence: Synthetic oligonucleotide
cauggaccuguuaucaugu

SEQ ID NO: 1012210 - RNA, 19 nt, Artificial Sequence
  Description of Artificial Sequence: Synthetic oligonucleotide
ucagggcgauagaaauagu

SEQ ID NO: 1012211 - RNA, 19 nt, Artificial Sequence
  Description of Artificial Sequence: Synthetic oligonucleotide
agccauaaccauauuucau

SEQ ID NO: 1012212 - RNA, 19 nt, Artificial Sequence
  Description of Artificial Sequence: Synthetic oligonucleotide
cagcucagaagugagagua

SEQ ID NO: 1012213 - RNA, 19 nt, Artificial Sequence
  Description of Artificial Sequence: Synthetic oligonucleotide
ggcucuacucaauccaauc

SEQ ID NO: 1012214 - RNA, 19 nt, Artificial Sequence
  Description of Artificial Sequence: Synthetic oligonucleotide
cauuuggugaagucaggcu

SEQ ID NO: 1012215 - RNA, 19 nt, Artificial Sequence
  Description of Artificial Sequence: Synthetic oligonucleotide
ccauuuggugaagucaggc

SEQ ID NO: 1012216 - RNA, 19 nt, Artificial Sequence
  Description of Artificial Sequence: Synthetic oligonucleotide
cugggaaguuccuaggggu

SEQ ID NO: 1012217 - RNA, 19 nt, Artificial Sequence
  Description of Artificial Sequence: Synthetic oligonucleotide
cuccauggaccuguuauca

SEQ ID NO: 1012218 - RNA, 19 nt, Artificial Sequence
  Description of Artificial Sequence: Synthetic oligonucleotide
uggccaaccuaaggcaaga

SEQ ID NO: 1012219 - RNA, 19 nt, Artificial Sequence
  Description of Artificial Sequence: Synthetic oligonucleotide
gugucgagccuggagaaga

SEQ ID NO: 1012220 - RNA, 19 nt, Artificial Sequence
  Description of Artificial Sequence: Synthetic oligonucleotide
ucgcucacucagcaccuuc

SEQ ID NO: 1012221 - RNA, 19 nt, Artificial Sequence
  Description of Artificial Sequence: Synthetic oligonucleotide
augaaacaauggggcuagc

SEQ ID NO: 1012222 - RNA, 19 nt, Artificial Sequence
  Description of Artificial Sequence: Synthetic oligonucleotide
accuagaccuccuccccaa

SEQ ID NO: 1012223 - RNA, 19 nt, Artificial Sequence
  Description of Artificial Sequence: Synthetic oligonucleotide
acagcauuucgugaccaua

SEQ ID NO: 1012224 - RNA, 19 nt, Artificial Sequence
  Description of Artificial Sequence: Synthetic oligonucleotide
cugucgauaggguggcaga

SEQ ID NO: 1012225 - RNA, 19 nt, Artificial Sequence
  Description of Artificial Sequence: Synthetic oligonucleotide
agacugaauccuugagcuu

SEQ ID NO: 1012226 - RNA, 19 nt, Artificial Sequence
  Description of Artificial Sequence: Synthetic oligonucleotide
ccacgaucagucuucccag

SEQ ID NO: 1012227 - RNA, 19 nt, Artificial Sequence
  Description of Artificial Sequence: Synthetic oligonucleotide
aggcuugcgcaugagcacu

SEQ ID NO: 1012228 - RNA, 19 nt, Artificial Sequence
  Description of Artificial Sequence: Synthetic oligonucleotide
gaggucgcucacucagcac

SEQ ID NO: 1012229 - RNA, 19 nt, Artificial Sequence
  Description of Artificial Sequence: Synthetic oligonucleotide
ggaggcuauaguuguaugu

SEQ ID NO: 1012230 - RNA, 19 nt, Artificial Sequence
  Description of Artificial Sequence: Synthetic oligonucleotide
ccuaggggugcccacuuag

SEQ ID NO: 1012231 - RNA, 19 nt, Artificial Sequence
  Description of Artificial Sequence: Synthetic oligonucleotide
ucgcccuccucuccagacu

SEQ ID NO: 1012232 - RNA, 19 nt, Artificial Sequence
  Description of Artificial Sequence: Synthetic oligonucleotide
auaccagcauguccugguu

SEQ ID NO: 1012233 - RNA, 19 nt, Artificial Sequence
  Description of Artificial Sequence: Synthetic oligonucleotide
aaccuucccggugcugugu

SEQ ID NO: 1012234 - RNA, 19 nt, Artificial Sequence
  Description of Artificial Sequence: Synthetic oligonucleotide
guaaggccuucagagggca

SEQ ID NO: 1012235 - RNA, 19 nt, Artificial Sequence
  Description of Artificial Sequence: Synthetic oligonucleotide
gguagaacaucugucgaua

SEQ ID NO: 1012236 - RNA, 19 nt, Artificial Sequence
  Description of Artificial Sequence: Synthetic oligonucleotide
uucccacgaucagucuucc

SEQ ID NO: 1012237 - RNA, 19 nt, Artificial Sequence
  Description of Artificial Sequence: Synthetic oligonucleotide
ucgugaccauaugggacga

SEQ ID NO: 1012238 - RNA, 19 nt, Artificial Sequence
  Description of Artificial Sequence: Synthetic oligonucleotide
uuccuaggggugcccacuu

SEQ ID NO: 1012239 - RNA, 19 nt, Artificial Sequence
  Description of Artificial Sequence: Synthetic oligonucleotide
uagaugggaccagaaccua

SEQ ID NO: 1012240 - RNA, 19 nt, Artificial Sequence
  Description of Artificial Sequence: Synthetic oligonucleotide
uggggcuagcuugaagcau

SEQ ID NO: 1012241 - RNA, 19 nt, Artificial Sequence
  Description of Artificial Sequence: Synthetic oligonucleotide
gccauaaccauauuucauu

SEQ ID NO: 1012242 - RNA, 19 nt, Artificial Sequence
  Description of Artificial Sequence: Synthetic oligonucleotide
cccacuuaggccaaaugaa

SEQ ID NO: 1012243 - RNA, 19 nt, Artificial Sequence
  Description of Artificial Sequence: Synthetic oligonucleotide
cuucccggugcugugucuc

SEQ ID NO: 1012244 - RNA, 19 nt, Artificial Sequence
  Description of Artificial Sequence: Synthetic oligonucleotide
ucucaggcuugcgcaugag

SEQ ID NO: 1012245 - RNA, 19 nt, Artificial Sequence
  Description of Artificial Sequence: Synthetic oligonucleotide
cuucugaucuaugggguua

SEQ ID NO: 1012246 - RNA, 19 nt, Artificial Sequence
  Description of Artificial Sequence: Synthetic oligonucleotide
ucugaucuaugggguuagu

SEQ ID NO: 1012247 - RNA, 19 nt, Artificial Sequence
  Description of Artificial Sequence: Synthetic oligonucleotide
ugcugugucucagggcgau

SEQ ID NO: 1012248 - RNA, 19 nt, Artificial Sequence
  Description of Artificial Sequence: Synthetic oligonucleotide
gaacaucugucgauagggu

SEQ ID NO: 1012249 - RNA, 19 nt, Artificial Sequence
  Description of Artificial Sequence: Synthetic oligonucleotide
caguuccugguggaagaac

SEQ ID NO: 1012250 - RNA, 19 nt, Artificial Sequence
  Description of Artificial Sequence: Synthetic oligonucleotide
gucguuacugcagccucca

SEQ ID NO: 1012251 - RNA, 19 nt, Artificial Sequence
  Description of Artificial Sequence: Synthetic oligonucleotide
gaaucaugagugacauggu

SEQ ID NO: 1012252 - RNA, 19 nt, Artificial Sequence
  Description of Artificial Sequence: Synthetic oligonucleotide
ggagggauugugauaaccu

SEQ ID NO: 1012253 - RNA, 19 nt, Artificial Sequence
  Description of Artificial Sequence: Synthetic oligonucleotide
agagggcaugaggucgcuc

SEQ ID NO: 1012254 - RNA, 19 nt, Artificial Sequence
  Description of Artificial Sequence: Synthetic oligonucleotide
aggccuucagagggcauga

SEQ ID NO: 1012255 - RNA, 19 nt, Artificial Sequence
  Description of Artificial Sequence: Synthetic oligonucleotide
guugcccgggaccagugcu

SEQ ID NO: 1012256 - RNA, 19 nt, Artificial Sequence
  Description of Artificial Sequence: Synthetic oligonucleotide
uccuucuagucuggccaac

SEQ ID NO: 1012257 - RNA, 19 nt, Artificial Sequence
  Description of Artificial Sequence: Synthetic oligonucleotide
uggggaggcuauaguugua

SEQ ID NO: 1012258 - RNA, 19 nt, Artificial Sequence
  Description of Artificial Sequence: Synthetic oligonucleotide
uuccgugggccgucuguuc

SEQ ID NO: 1012259 - RNA, 19 nt, Artificial Sequence
  Description of Artificial Sequence: Synthetic oligonucleotide
gacggugauggggaggcua

SEQ ID NO: 1012260 - RNA, 19 nt, Artificial Sequence
  Description of Artificial Sequence: Synthetic oligonucleotide
caaggcauuccuggguaga

SEQ ID NO: 1012261 - RNA, 19 nt, Artificial Sequence
  Description of Artificial Sequence: Synthetic oligonucleotide
ggugaacaauuuucugcaa

SEQ ID NO: 1012262 - RNA, 19 nt, Artificial Sequence
  Description of Artificial Sequence: Synthetic oligonucleotide
gccgggcucuacucaaucc

SEQ ID NO: 1012263 - RNA, 19 nt, Artificial Sequence
  Description of Artificial Sequence: Synthetic oligonucleotide
guccuucuagucuggccaa

SEQ ID NO: 1012264 - RNA, 19 nt, Artificial Sequence
  Description of Artificial Sequence: Synthetic oligonucleotide
ggaccuguuaucauguaau

SEQ ID NO: 1012265 - RNA, 19 nt, Artificial Sequence
  Description of Artificial Sequence: Synthetic oligonucleotide
uccuaggggugcccacuua

SEQ ID NO: 1012266 - RNA, 19 nt, Artificial Sequence
  Description of Artificial Sequence: Synthetic oligonucleotide
cuucuagucuggccaaccu

SEQ ID NO: 1012267 - RNA, 19 nt, Artificial Sequence
  Description of Artificial Sequence: Synthetic oligonucleotide
ucguuacugcagccuccaa

SEQ ID NO: 1012268 - RNA, 19 nt, Artificial Sequence
  Description of Artificial Sequence: Synthetic oligonucleotide
ggucugcagaaucaugagu

SEQ ID NO: 1012269 - RNA, 19 nt, Artificial Sequence
  Description of Artificial Sequence: Synthetic oligonucleotide
gucaauuuccgugggccgu

SEQ ID NO: 1012270 - RNA, 19 nt, Artificial Sequence
  Description of Artificial Sequence: Synthetic oligonucleotide
ccaugucguuacugcagcc

SEQ ID NO: 1012271 - RNA, 19 nt, Artificial Sequence
  Description of Artificial Sequence: Synthetic oligonucleotide
ccuucuagucuggccaacc

SEQ ID NO: 1012272 - RNA, 19 nt, Artificial Sequence
  Description of Artificial Sequence: Synthetic oligonucleotide
caugucguuacugcagccu

SEQ ID NO: 1012273 - RNA, 19 nt, Artificial Sequence
  Description of Artificial Sequence: Synthetic oligonucleotide
cuuccugccucugggcuga

SEQ ID NO: 1012274 - RNA, 19 nt, Artificial Sequence
  Description of Artificial Sequence: Synthetic oligonucleotide
cauuggacuugacagcauu

SEQ ID NO: 1012275 - RNA, 19 nt, Artificial Sequence
  Description of Artificial Sequence: Synthetic oligonucleotide
uggugacaagcugguugga

SEQ ID NO: 1012276 - RNA, 19 nt, Artificial Sequence
  Description of Artificial Sequence: Synthetic oligonucleotide
caccuuccuuauaucuaga

SEQ ID NO: 1012277 - RNA, 19 nt, Artificial Sequence
  Description of Artificial Sequence: Synthetic oligonucleotide
ccuuucagagcggaugguc

SEQ ID NO: 1012278 - RNA, 19 nt, Artificial Sequence
  Description of Artificial Sequence: Synthetic oligonucleotide
ggcuauaguuguaugugcu

SEQ ID NO: 1012279 - RNA, 19 nt, Artificial Sequence
  Description of Artificial Sequence: Synthetic oligonucleotide
gacagcauuucgugaccau

SEQ ID NO: 1012280 - RNA, 19 nt, Artificial Sequence
  Description of Artificial Sequence: Synthetic oligonucleotide
gcauuccuggguagauggg

SEQ ID NO: 1012281 - RNA, 19 nt, Artificial Sequence
  Description of Artificial Sequence: Synthetic oligonucleotide
gcugcgcuuugcuuugaca

SEQ ID NO: 1012282 - RNA, 19 nt, Artificial Sequence
  Description of Artificial Sequence: Synthetic oligonucleotide
caucauugcggugaacaau

SEQ ID NO: 1012283 - RNA, 19 nt, Artificial Sequence
  Description of Artificial Sequence: Synthetic oligonucleotide
gccgucuguuccugauggg

SEQ ID NO: 1012284 - RNA, 19 nt, Artificial Sequence
  Description of Artificial Sequence: Synthetic oligonucleotide
cugucccaucuugguauac

SEQ ID NO: 1012285 - RNA, 19 nt, Artificial Sequence
  Description of Artificial Sequence: Synthetic oligonucleotide
gccaaccuaaggcaagacu

SEQ ID NO: 1012286 - RNA, 19 nt, Artificial Sequence
  Description of Artificial Sequence: Synthetic oligonucleotide
cuuugacaggcaugucccu

SEQ ID NO: 1012287 - RNA, 19 nt, Artificial Sequence
  Description of Artificial Sequence: Synthetic oligonucleotide
acaauggggcuagcuugaa

SEQ ID NO: 1012288 - RNA, 19 nt, Artificial Sequence
  Description of Artificial Sequence: Synthetic oligonucleotide
cuucccugcaaggcuggga

SEQ ID NO: 1012289 - RNA, 19 nt, Artificial Sequence
  Description of Artificial Sequence: Synthetic oligonucleotide
gcauuuggcuuuggacuug

SEQ ID NO: 1012290 - RNA, 19 nt, Artificial Sequence
  Description of Artificial Sequence: Synthetic oligonucleotide
cauugcggugaacaauuuu

SEQ ID NO: 1012291 - RNA, 19 nt, Artificial Sequence
  Description of Artificial Sequence: Synthetic oligonucleotide
auuccacaacggauucgaa

SEQ ID NO: 1012292 - RNA, 19 nt, Artificial Sequence
  Description of Artificial Sequence: Synthetic oligonucleotide
ccaucauugcggugaacaa

SEQ ID NO: 1012293 - RNA, 19 nt, Artificial Sequence
  Description of Artificial Sequence: Synthetic oligonucleotide
gggccgucuguuccugaug

SEQ ID NO: 1012294 - RNA, 19 nt, Artificial Sequence
  Description of Artificial Sequence: Synthetic oligonucleotide
guuccuaggggugcccacu

SEQ ID NO: 1012295 - RNA, 19 nt, Artificial Sequence
  Description of Artificial Sequence: Synthetic oligonucleotide
gcucagaagugagaguacu

SEQ ID NO: 1012296 - RNA, 19 nt, Artificial Sequence
  Description of Artificial Sequence: Synthetic oligonucleotide
ggcacaggccugucccaac

SEQ ID NO: 1012297 - RNA, 19 nt, Artificial Sequence
  Description of Artificial Sequence: Synthetic oligonucleotide
ugcccgggaccagugcuuu

SEQ ID NO: 1012298 - RNA, 19 nt, Artificial Sequence
  Description of Artificial Sequence: Synthetic oligonucleotide
cugucccaacugucccauc

SEQ ID NO: 1012299 - RNA, 19 nt, Artificial Sequence
  Description of Artificial Sequence: Synthetic oligonucleotide
ggacacugacauuggacuu

SEQ ID NO: 1012300 - RNA, 19 nt, Artificial Sequence
  Description of Artificial Sequence: Synthetic oligonucleotide
ggcuagcuugaagcauuug

SEQ ID NO: 1012301 - RNA, 19 nt, Artificial Sequence
  Description of Artificial Sequence: Synthetic oligonucleotide
cacucucugucccaucauu

SEQ ID NO: 1012302 - RNA, 19 nt, Artificial Sequence
  Description of Artificial Sequence: Synthetic oligonucleotide
ggccaaccuaaggcaagac

SEQ ID NO: 1012303 - RNA, 19 nt, Artificial Sequence
  Description of Artificial Sequence: Synthetic oligonucleotide
aucugucgauaggguggca

SEQ ID NO: 1012304 - RNA, 19 nt, Artificial Sequence
  Description of Artificial Sequence: Synthetic oligonucleotide
ggacuugcuggguccauuu

SEQ ID NO: 1012305 - RNA, 19 nt, Artificial Sequence
  Description of Artificial Sequence: Synthetic oligonucleotide
ggugacaagcugguuggau

SEQ ID NO: 1012306 - RNA, 19 nt, Artificial Sequence
  Description of Artificial Sequence: Synthetic oligonucleotide
cuaaggcaagacugccauu

SEQ ID NO: 1012307 - RNA, 19 nt, Artificial Sequence
  Description of Artificial Sequence: Synthetic oligonucleotide
gugcugugucucagggcga

SEQ ID NO: 1012308 - RNA, 19 nt, Artificial Sequence
  Description of Artificial Sequence: Synthetic oligonucleotide
gcaugagcacucugucaua

SEQ ID NO: 1012309 - RNA, 19 nt, Artificial Sequence
  Description of Artificial Sequence: Synthetic oligonucleotide
ggggaggcuauaguuguau

SEQ ID NO: 1012310 - RNA, 19 nt, Artificial Sequence
  Description of Artificial Sequence: Synthetic oligonucleotide
cacggucuguccagcugcu

SEQ ID NO: 1012311 - RNA, 19 nt, Artificial Sequence
  Description of Artificial Sequence: Synthetic oligonucleotide
gcuagaccucagaaguccu

SEQ ID NO: 1012312 - RNA, 19 nt, Artificial Sequence
  Description of Artificial Sequence: Synthetic oligonucleotide
gggauguagagcggcaguu

SEQ ID NO: 1012313 - RNA, 19 nt, Artificial Sequence
  Description of Artificial Sequence: Synthetic oligonucleotide
gcaguuccugguggaagaa

SEQ ID NO: 1012314 - RNA, 19 nt, Artificial Sequence
  Description of Artificial Sequence: Synthetic oligonucleotide
ccggaagauguagacugaa

SEQ ID NO: 1012315 - RNA, 19 nt, Artificial Sequence
  Description of Artificial Sequence: Synthetic oligonucleotide
acggucuguccagcugcuu

SEQ ID NO: 1012316 - RNA, 19 nt, Artificial Sequence
  Description of Artificial Sequence: Synthetic oligonucleotide
ccacaacggauucgaaagu

SEQ ID NO: 1012317 - RNA, 19 nt, Artificial Sequence
  Description of Artificial Sequence: Synthetic oligonucleotide
caauuuccgugggccgucu

SEQ ID NO: 1012318 - RNA, 19 nt, Artificial Sequence
  Description of Artificial Sequence: Synthetic oligonucleotide
gagguaccucaggguccuc

SEQ ID NO: 1012319 - RNA, 19 nt, Artificial Sequence
  Description of Artificial Sequence: Synthetic oligonucleotide
ccaggccuuucagagcgga

SEQ ID NO: 1012320 - RNA, 19 nt, Artificial Sequence
  Description of Artificial Sequence: Synthetic oligonucleotide
ccgggaccagugcuuuguc

SEQ ID NO: 1012321 - RNA, 19 nt, Artificial Sequence
  Description of Artificial Sequence: Synthetic oligonucleotide
caggccuuucagagcggau

SEQ ID NO: 1012322 - RNA, 19 nt, Artificial Sequence
  Description of Artificial Sequence: Synthetic oligonucleotide
ggugucccucagguggucu

SEQ ID NO: 1012323 - RNA, 19 nt, Artificial Sequence
  Description of Artificial Sequence: Synthetic oligonucleotide
cgccgggcucuacucaauc

SEQ ID NO: 1012324 - RNA, 19 nt, Artificial Sequence
  Description of Artificial Sequence: Synthetic oligonucleotide
gggcucuacucaauccaau

SEQ ID NO: 1012325 - RNA, 19 nt, Artificial Sequence
  Description of Artificial Sequence: Synthetic oligonucleotide
ccuagaccuccuccccaaa

SEQ ID NO: 1012326 - RNA, 19 nt, Artificial Sequence
  Description of Artificial Sequence: Synthetic oligonucleotide
gcggcaguuccugguggaa

SEQ ID NO: 1012327 - RNA, 19 nt, Artificial Sequence
  Description of Artificial Sequence: Synthetic oligonucleotide
cagagggcaugaggucgcu

SEQ ID NO: 1012328 - RNA, 19 nt, Artificial Sequence
  Description of Artificial Sequence: Synthetic oligonucleotide
cuggagccauaaccauauu

SEQ ID NO: 1012329 - RNA, 19 nt, Artificial Sequence
  Description of Artificial Sequence: Synthetic oligonucleotide
cccgggaccagugcuuugu

SEQ ID NO: 1012330 - RNA, 19 nt, Artificial Sequence
  Description of Artificial Sequence: Synthetic oligonucleotide
gggcuagcuugaagcauuu

SEQ ID NO: 1012331 - RNA, 19 nt, Artificial Sequence
  Description of Artificial Sequence: Synthetic oligonucleotide
cgugaccauaugggacgaa

SEQ ID NO: 1012332 - RNA, 19 nt, Artificial Sequence
  Description of Artificial Sequence: Synthetic oligonucleotide
gcgccgggcucuacucaau

SEQ ID NO: 1012333 - RNA, 19 nt, Artificial Sequence
  Description of Artificial Sequence: Synthetic oligonucleotide
aguuuaauaaaccucaggg

SEQ ID NO: 1012334 - RNA, 19 nt, Artificial Sequence
  Description of Artificial Sequence: Synthetic oligonucleotide
gaaauagaggcucagagag

SEQ ID NO: 1012335 - RNA, 19 nt, Artificial Sequence
  Description of Artificial Sequence: Synthetic oligonucleotide
aaucaagccacacauuagg

SEQ ID NO: 1012336 - RNA, 19 nt, Artificial Sequence
  Description of Artificial Sequence: Synthetic oligonucleotide
ugaccuaacacaaucaagc

SEQ ID NO: 1012337 - RNA, 19 nt, Artificial Sequence
  Description of Artificial Sequence: Synthetic oligonucleotide
aacuagacaagaugaaggg

SEQ ID NO: 1012338 - RNA, 19 nt, Artificial Sequence
  Description of Artificial Sequence: Synthetic oligonucleotide
aaauacggucacuggaucc

SEQ ID NO: 1012339 - RNA, 19 nt, Artificial Sequence
  Description of Artificial Sequence: Synthetic oligonucleotide
auuaggagagccuagagca

SEQ ID NO: 1012340 - RNA, 19 nt, Artificial Sequence
  Description of Artificial Sequence: Synthetic oligonucleotide
aacuauagaccguacagug

SEQ ID NO: 1012341 - RNA, 19 nt, Artificial Sequence
  Description of Artificial Sequence: Synthetic oligonucleotide
ucuacuacuacauuaucca

SEQ ID NO: 1012342 - RNA, 19 nt, Artificial Sequence
  Description of Artificial Sequence: Synthetic oligonucleotide
gacaauuccaccuuccugc

SEQ ID NO: 1012343 - RNA, 19 nt, Artificial Sequence
  Description of Artificial Sequence: Synthetic oligonucleotide
auaacgggaaaccuuaguc

SEQ ID NO: 1012344 - RNA, 19 nt, Artificial Sequence
  Description of Artificial Sequence: Synthetic oligonucleotide
uacuacuacauuauccagg

SEQ ID NO: 1012345 - RNA, 19 nt, Artificial Sequence
  Description of Artificial Sequence: Synthetic oligonucleotide
aagacacacacauuccccg

SEQ ID NO: 1012346 - RNA, 19 nt, Artificial Sequence
  Description of Artificial Sequence: Synthetic oligonucleotide
aacgggaaaccuuagucag

SEQ ID NO: 1012347 - RNA, 19 nt, Artificial Sequence
  Description of Artificial Sequence: Synthetic oligonucleotide
cuagacaagaugaagggac

SEQ ID NO: 1012348 - RNA, 19 nt, Artificial Sequence
  Description of Artificial Sequence: Synthetic oligonucleotide
ugaguuagcuguaagguaa

SEQ ID NO: 1012349 - RNA, 19 nt, Artificial Sequence
  Description of Artificial Sequence: Synthetic oligonucleotide
caugccguauauaaaaggc

SEQ ID NO: 1012350 - RNA, 19 nt, Artificial Sequence
  Description of Artificial Sequence: Synthetic oligonucleotide
aaagguugaguaaggaggg

SEQ ID NO: 1012351 - RNA, 19 nt, Artificial Sequence
  Description of Artificial Sequence: Synthetic oligonucleotide
ucaaucaagccacacauua

SEQ ID NO: 1012352 - RNA, 19 nt, Artificial Sequence
  Description of Artificial Sequence: Synthetic oligonucleotide
uauuagaccugccuauaag

SEQ ID NO: 1012353 - RNA, 19 nt, Artificial Sequence
  Description of Artificial Sequence: Synthetic oligonucleotide
uaguguacccuccaaacca

SEQ ID NO: 1012354 - RNA, 19 nt, Artificial Sequence
  Description of Artificial Sequence: Synthetic oligonucleotide
aaaccuuagucagaaauca

SEQ ID NO: 1012355 - RNA, 19 nt, Artificial Sequence
  Description of Artificial Sequence: Synthetic oligonucleotide
auaccacuagccugcaugc

SEQ ID NO: 1012356 - RNA, 19 nt, Artificial Sequence
  Description of Artificial Sequence: Synthetic oligonucleotide
uucccggaguccuugaugg

SEQ ID NO: 1012357 - RNA, 19 nt, Artificial Sequence
  Description of Artificial Sequence: Synthetic oligonucleotide
ugauaagcagacccucugg

SEQ ID NO: 1012358 - RNA, 19 nt, Artificial Sequence
  Description of Artificial Sequence: Synthetic oligonucleotide
cuauagaccguacagugac

SEQ ID NO: 1012359 - RNA, 19 nt, Artificial Sequence
  Description of Artificial Sequence: Synthetic oligonucleotide
uguaaaguaguguacccuc

SEQ ID NO: 1012360 - RNA, 19 nt, Artificial Sequence
  Description of Artificial Sequence: Synthetic oligonucleotide
auuagaccugccuauaagu

SEQ ID NO: 1012361 - RNA, 19 nt, Artificial Sequence
  Description of Artificial Sequence: Synthetic oligonucleotide
aaaugugacccaccaagca

SEQ ID NO: 1012362 - RNA, 19 nt, Artificial Sequence
  Description of Artificial Sequence: Synthetic oligonucleotide
aauaacgggaaaccuuagu

SEQ ID NO: 1012363 - RNA, 19 nt, Artificial Sequence
  Description of Artificial Sequence: Synthetic oligonucleotide
ccuaacacaaucaagcaag

SEQ ID NO: 1012364 - RNA, 19 nt, Artificial Sequence
  Description of Artificial Sequence: Synthetic oligonucleotide
ucaagccacacauuaggag

SEQ ID NO: 1012365 - RNA, 19 nt, Artificial Sequence
  Description of Artificial Sequence: Synthetic oligonucleotide
ucaacugagggguucccgg

SEQ ID NO: 1012366 - RNA, 19 nt, Artificial Sequence
  Description of Artificial Sequence: Synthetic oligonucleotide
ugccguauauaaaaggcac

SEQ ID NO: 1012367 - RNA, 19 nt, Artificial Sequence
  Description of Artificial Sequence: Synthetic oligonucleotide
uuugccugacaccucuacg

SEQ ID NO: 1012368 - RNA, 19 nt, Artificial Sequence
  Description of Artificial Sequence: Synthetic oligonucleotide
ucgugauugaagcuguucu

SEQ ID NO: 1012369 - RNA, 19 nt, Artificial Sequence
  Description of Artificial Sequence: Synthetic oligonucleotide
agggacauccucccaauac

SEQ ID NO: 1012370 - RNA, 19 nt, Artificial Sequence
  Description of Artificial Sequence: Synthetic oligonucleotide
uaacgggaaaccuuaguca

SEQ ID NO: 1012371 - RNA, 19 nt, Artificial Sequence
  Description of Artificial Sequence: Synthetic oligonucleotide
caguuugagagccaugggg

SEQ ID NO: 1012372 - RNA, 19 nt, Artificial Sequence
  Description of Artificial Sequence: Synthetic oligonucleotide
guugucuuggggaagcucg

SEQ ID NO: 1012373 - RNA, 19 nt, Artificial Sequence
  Description of Artificial Sequence: Synthetic oligonucleotide
auacacgauaccacuagcc

SEQ ID NO: 1012374 - RNA, 19 nt, Artificial Sequence
  Description of Artificial Sequence: Synthetic oligonucleotide
ugagagccgaggcaaagcc

SEQ ID NO: 1012375 - RNA, 19 nt, Artificial Sequence
  Description of Artificial Sequence: Synthetic oligonucleotide
uacguauccauccuugguc

SEQ ID NO: 1012376 - RNA, 19 nt, Artificial Sequence
  Description of Artificial Sequence: Synthetic oligonucleotide
auaagcagacccucugggg

SEQ ID NO: 1012377 - RNA, 19 nt, Artificial Sequence
  Description of Artificial Sequence: Synthetic oligonucleotide
agagccauggggucaugcc

SEQ ID NO: 1012378 - RNA, 19 nt, Artificial Sequence
  Description of Artificial Sequence: Synthetic oligonucleotide
cauuaggagagccuagagc

SEQ ID NO: 1012379 - RNA, 19 nt, Artificial Sequence
  Description of Artificial Sequence: Synthetic oligonucleotide
uagaggcucagagagacag

SEQ ID NO: 1012380 - RNA, 19 nt, Artificial Sequence
  Description of Artificial Sequence: Synthetic oligonucleotide
uacagugacuucaacuaga

SEQ ID NO: 1012381 - RNA, 19 nt, Artificial Sequence
  Description of Artificial Sequence: Synthetic oligonucleotide
ucuacguauccauccuugg

SEQ ID NO: 1012382 - RNA, 19 nt, Artificial Sequence
  Description of Artificial Sequence: Synthetic oligonucleotide
ugccuauaaguucuccuag

SEQ ID NO: 1012383 - RNA, 19 nt, Artificial Sequence
  Description of Artificial Sequence: Synthetic oligonucleotide
aaggaccaaggcugaauuc

SEQ ID NO: 1012384 - RNA, 19 nt, Artificial Sequence
  Description of Artificial Sequence: Synthetic oligonucleotide
acaggggacacaauaacgg

SEQ ID NO: 1012385 - RNA, 19 nt, Artificial Sequence
  Description of Artificial Sequence: Synthetic oligonucleotide
aggaguuuaauaaaccuca

SEQ ID NO: 1012386 - RNA, 19 nt, Artificial Sequence
  Description of Artificial Sequence: Synthetic oligonucleotide
ugugaccuaacacaaucaa

SEQ ID NO: 1012387 - RNA, 19 nt, Artificial Sequence
  Description of Artificial Sequence: Synthetic oligonucleotide
gacaucuacuacuacauua

SEQ ID NO: 1012388 - RNA, 19 nt, Artificial Sequence
  Description of Artificial Sequence: Synthetic oligonucleotide
agcaaggccauccauugug

SEQ ID NO: 1012389 - RNA, 19 nt, Artificial Sequence
  Description of Artificial Sequence: Synthetic oligonucleotide
cacaggggacacaauaacg

SEQ ID NO: 1012390 - RNA, 19 nt, Artificial Sequence
  Description of Artificial Sequence: Synthetic oligonucleotide
uaaaguaguguacccucca

SEQ ID NO: 1012391 - RNA, 19 nt, Artificial Sequence
  Description of Artificial Sequence: Synthetic oligonucleotide
cuaacacaaucaagcaagg

SEQ ID NO: 1012392 - RNA, 19 nt, Artificial Sequence
  Description of Artificial Sequence: Synthetic oligonucleotide
gcaacuauagaccguacag

SEQ ID NO: 1012393 - RNA, 19 nt, Artificial Sequence
  Description of Artificial Sequence: Synthetic oligonucleotide
ugcuguaaaguaguguacc

SEQ ID NO: 1012394 - RNA, 19 nt, Artificial Sequence
  Description of Artificial Sequence: Synthetic oligonucleotide
aaggccauccauuguguca

SEQ ID NO: 1012395 - RNA, 19 nt, Artificial Sequence
  Description of Artificial Sequence: Synthetic oligonucleotide
guaagguaaagauguaaca

SEQ ID NO: 1012396 - RNA, 19 nt, Artificial Sequence
  Description of Artificial Sequence: Synthetic oligonucleotide
ugcaacuauagaccguaca

SEQ ID NO: 1012397 - RNA, 19 nt, Artificial Sequence
  Description of Artificial Sequence: Synthetic oligonucleotide
uguuuucccucccaucccc

SEQ ID NO: 1012398 - RNA, 19 nt, Artificial Sequence
  Description of Artificial Sequence: Synthetic oligonucleotide
auggggauauuagaccugc

SEQ ID NO: 1012399 - RNA, 19 nt, Artificial Sequence
  Description of Artificial Sequence: Synthetic oligonucleotide
aauacggucacuggaucca

SEQ ID NO: 1012400 - RNA, 19 nt, Artificial Sequence
  Description of Artificial Sequence: Synthetic oligonucleotide
caaaugugacccaccaagc

SEQ ID NO: 1012401 - RNA, 19 nt, Artificial Sequence
  Description of Artificial Sequence: Synthetic oligonucleotide
agacacacacauuccccgc

SEQ ID NO: 1012402 - RNA, 19 nt, Artificial Sequence
  Description of Artificial Sequence: Synthetic oligonucleotide
caaucaagcaaggccaucc

SEQ ID NO: 1012403 - RNA, 19 nt, Artificial Sequence
  Description of Artificial Sequence: Synthetic oligonucleotide
guaaggagggacuugggga

SEQ ID NO: 1012404 - RNA, 19 nt, Artificial Sequence
  Description of Artificial Sequence: Synthetic oligonucleotide
ugaagggacauccucccaa

SEQ ID NO: 1012405 - RNA, 19 nt, Artificial Sequence
  Description of Artificial Sequence: Synthetic oligonucleotide
uagacaagaugaagggaca

SEQ ID NO: 1012406 - RNA, 19 nt, Artificial Sequence
  Description of Artificial Sequence: Synthetic oligonucleotide
uccgcugcccagaagggag

SEQ ID NO: 1012407 - RNA, 19 nt, Artificial Sequence
  Description of Artificial Sequence: Synthetic oligonucleotide
ggaagcucgugauugaagc

SEQ ID NO: 1012408 - RNA, 19 nt, Artificial Sequence
  Description of Artificial Sequence: Synthetic oligonucleotide
guuuagaaacacacugggg

SEQ ID NO: 1012409 - RNA, 19 nt, Artificial Sequence
  Description of Artificial Sequence: Synthetic oligonucleotide
acuuggggagcuucgauga

SEQ ID NO: 1012410 - RNA, 19 nt, Artificial Sequence
  Description of Artificial Sequence: Synthetic oligonucleotide
agguugaguaaggagggac

SEQ ID NO: 1012411 - RNA, 19 nt, Artificial Sequence
  Description of Artificial Sequence: Synthetic oligonucleotide
uuagaccugccuauaaguu

SEQ ID NO: 1012412 - RNA, 19 nt, Artificial Sequence
  Description of Artificial Sequence: Synthetic oligonucleotide
guaguguacccuccaaacc

SEQ ID NO: 1012413 - RNA, 19 nt, Artificial Sequence
  Description of Artificial Sequence: Synthetic oligonucleotide
aaucaacugagggguuccc

SEQ ID NO: 1012414 - RNA, 19 nt, Artificial Sequence
  Description of Artificial Sequence: Synthetic oligonucleotide
agguaaagauguaacauga

SEQ ID NO: 1012415 - RNA, 19 nt, Artificial Sequence
  Description of Artificial Sequence: Synthetic oligonucleotide
augaaguguucaauccucc

SEQ ID NO: 1012416 - RNA, 19 nt, Artificial Sequence
  Description of Artificial Sequence: Synthetic oligonucleotide
agcaaggugauguggcuug

SEQ ID NO: 1012417 - RNA, 19 nt, Artificial Sequence
  Description of Artificial Sequence: Synthetic oligonucleotide
acauuaggagagccuagag

SEQ ID NO: 1012418 - RNA, 19 nt, Artificial Sequence
  Description of Artificial Sequence: Synthetic oligonucleotide
cuacuacuacauuauccag

SEQ ID NO: 1012419 - RNA, 19 nt, Artificial Sequence
  Description of Artificial Sequence: Synthetic oligonucleotide
aggaacaggugacuuccgg

SEQ ID NO: 1012420 - RNA, 19 nt, Artificial Sequence
  Description of Artificial Sequence: Synthetic oligonucleotide
cacgggaaaggcaacugcc

SEQ ID NO: 1012421 - RNA, 19 nt, Artificial Sequence
  Description of Artificial Sequence: Synthetic oligonucleotide
uauggggauauuagaccug

SEQ ID NO: 1012422 - RNA, 19 nt, Artificial Sequence
  Description of Artificial Sequence: Synthetic oligonucleotide
ucguguuugccugacaccu

SEQ ID NO: 1012423 - RNA, 19 nt, Artificial Sequence
  Description of Artificial Sequence: Synthetic oligonucleotide
agcggugagucccggaagg

SEQ ID NO: 1012424 - RNA, 19 nt, Artificial Sequence
  Description of Artificial Sequence: Synthetic oligonucleotide
aaggggucucugcgcaagc

SEQ ID NO: 1012425 - RNA, 19 nt, Artificial Sequence
  Description of Artificial Sequence: Synthetic oligonucleotide
cuuaggaacaggugacuuc

SEQ ID NO: 1012426 - RNA, 19 nt, Artificial Sequence
  Description of Artificial Sequence: Synthetic oligonucleotide
guacagugacuucaacuag

SEQ ID NO: 1012427 - RNA, 19 nt, Artificial Sequence
  Description of Artificial Sequence: Synthetic oligonucleotide
uggugaaguucuuggagac

SEQ ID NO: 1012428 - RNA, 19 nt, Artificial Sequence
  Description of Artificial Sequence: Synthetic oligonucleotide
guacccuccaaaccagagg

SEQ ID NO: 1012429 - RNA, 19 nt, Artificial Sequence
  Description of Artificial Sequence: Synthetic oligonucleotide
caggggacacaauaacggg

SEQ ID NO: 1012430 - RNA, 19 nt, Artificial Sequence
  Description of Artificial Sequence: Synthetic oligonucleotide
aguuugagagccauggggu

SEQ ID NO: 1012431 - RNA, 19 nt, Artificial Sequence
  Description of Artificial Sequence: Synthetic oligonucleotide
caccucuacguauccaucc

SEQ ID NO: 1012432 - RNA, 19 nt, Artificial Sequence
  Description of Artificial Sequence: Synthetic oligonucleotide
cucuacguauccauccuug

SEQ ID NO: 1012433 - RNA, 19 nt, Artificial Sequence
  Description of Artificial Sequence: Synthetic oligonucleotide
acguauccauccuuggucu

SEQ ID NO: 1012434 - RNA, 19 nt, Artificial Sequence
  Description of Artificial Sequence: Synthetic oligonucleotide
cauacacgauaccacuagc

SEQ ID NO: 1012435 - RNA, 19 nt, Artificial Sequence
  Description of Artificial Sequence: Synthetic oligonucleotide
ugagugcuguaaaguagug

SEQ ID NO: 1012436 - RNA, 19 nt, Artificial Sequence
  Description of Artificial Sequence: Synthetic oligonucleotide
uggugacaguuugagagcc

SEQ ID NO: 1012437 - RNA, 19 nt, Artificial Sequence
  Description of Artificial Sequence: Synthetic oligonucleotide
accuaacacaaucaagcaa

SEQ ID NO: 1012438 - RNA, 19 nt, Artificial Sequence
  Description of Artificial Sequence: Synthetic oligonucleotide
uuccccuaaacaacagcac

SEQ ID NO: 1012439 - RNA, 19 nt, Artificial Sequence
  Description of Artificial Sequence: Synthetic oligonucleotide
ugugcacguugacacacac

SEQ ID NO: 1012440 - RNA, 19 nt, Artificial Sequence
  Description of Artificial Sequence: Synthetic oligonucleotide
ugcgcaagcggcuugggua

SEQ ID NO: 1012441 - RNA, 19 nt, Artificial Sequence
  Description of Artificial Sequence: Synthetic oligonucleotide
uuccggguugucuugggga

SEQ ID NO: 1012442 - RNA, 19 nt, Artificial Sequence
  Description of Artificial Sequence: Synthetic oligonucleotide
auauuagaccugccuauaa

SEQ ID NO: 1012443 - RNA, 19 nt, Artificial Sequence
  Description of Artificial Sequence: Synthetic oligonucleotide
acaauaacgggaaaccuua

SEQ ID NO: 1012444 - RNA, 19 nt, Artificial Sequence
  Description of Artificial Sequence: Synthetic oligonucleotide
ugggacgguccccagagaa

SEQ ID NO: 1012445 - RNA, 19 nt, Artificial Sequence
  Description of Artificial Sequence: Synthetic oligonucleotide
ucccaaaagggccucuguc

SEQ ID NO: 1012446 - RNA, 19 nt, Artificial Sequence
  Description of Artificial Sequence: Synthetic oligonucleotide
aguuuaguccuccgcuuca

SEQ ID NO: 1012447 - RNA, 19 nt, Artificial Sequence
  Description of Artificial Sequence: Synthetic oligonucleotide
guaaaguaguguacccucc

SEQ ID NO: 1012448 - RNA, 19 nt, Artificial Sequence
  Description of Artificial Sequence: Synthetic oligonucleotide
acaacccuugaguuagcug

SEQ ID NO: 1012449 - RNA, 19 nt, Artificial Sequence
  Description of Artificial Sequence: Synthetic oligonucleotide
gaaaucaacugagggguuc

SEQ ID NO: 1012450 - RNA, 19 nt, Artificial Sequence
  Description of Artificial Sequence: Synthetic oligonucleotide
uuuaguccuccgcuucaga

SEQ ID NO: 1012451 - RNA, 19 nt, Artificial Sequence
  Description of Artificial Sequence: Synthetic oligonucleotide
gugaccuaacacaaucaag

SEQ ID NO: 1012452 - RNA, 19 nt, Artificial Sequence
  Description of Artificial Sequence: Synthetic oligonucleotide
cuggcucacaaaugugacc

SEQ ID NO: 1012453 - RNA, 19 nt, Artificial Sequence
  Description of Artificial Sequence: Synthetic oligonucleotide
uaggaacaggugacuuccg

SEQ ID NO: 1012454 - RNA, 19 nt, Artificial Sequence
  Description of Artificial Sequence: Synthetic oligonucleotide
ugauggugacaguuugaga

SEQ ID NO: 1012455 - RNA, 19 nt, Artificial Sequence
  Description of Artificial Sequence: Synthetic oligonucleotide
gaucugggugaugggacgg

SEQ ID NO: 1012456 - RNA, 19 nt, Artificial Sequence
  Description of Artificial Sequence: Synthetic oligonucleotide
uauagaccguacagugacu

SEQ ID NO: 1012457 - RNA, 19 nt, Artificial Sequence
  Description of Artificial Sequence: Synthetic oligonucleotide
agaccguacagugacuuca

SEQ ID NO: 1012458 - RNA, 19 nt, Artificial Sequence
  Description of Artificial Sequence: Synthetic oligonucleotide
ggaaauagaggcucagaga

SEQ ID NO: 1012459 - RNA, 19 nt, Artificial Sequence
  Description of Artificial Sequence: Synthetic oligonucleotide
gaguuuaguccuccgcuuc

SEQ ID NO: 1012460 - RNA, 19 nt, Artificial Sequence
  Description of Artificial Sequence: Synthetic oligonucleotide
acuagacaagaugaaggga

SEQ ID NO: 1012461 - RNA, 19 nt, Artificial Sequence
  Description of Artificial Sequence: Synthetic oligonucleotide
aaauagaggcucagagaga

SEQ ID NO: 1012462 - RNA, 19 nt, Artificial Sequence
  Description of Artificial Sequence: Synthetic oligonucleotide
guuagcuguaagguaaaga

SEQ ID NO: 1012463 - RNA, 19 nt, Artificial Sequence
  Description of Artificial Sequence: Synthetic oligonucleotide
caaauacggucacuggauc

SEQ ID NO: 1012464 - RNA, 19 nt, Artificial Sequence
  Description of Artificial Sequence: Synthetic oligonucleotide
ggagcuucgaugauaagca

SEQ ID NO: 1012465 - RNA, 19 nt, Artificial Sequence
  Description of Artificial Sequence: Synthetic oligonucleotide
caauaacgggaaaccuuag

SEQ ID NO: 1012466 - RNA, 19 nt, Artificial Sequence
  Description of Artificial Sequence: Synthetic oligonucleotide
gcuguaaaguaguguaccc

SEQ ID NO: 1012467 - RNA, 19 nt, Artificial Sequence
  Description of Artificial Sequence: Synthetic oligonucleotide
aaaaucugacuuggacaca

SEQ ID NO: 1012468 - RNA, 19 nt, Artificial Sequence
  Description of Artificial Sequence: Synthetic oligonucleotide
ucuggccuuugcuugguuc

SEQ ID NO: 1012469 - RNA, 19 nt, Artificial Sequence
  Description of Artificial Sequence: Synthetic oligonucleotide
uacuguuauuuuccccuaa

SEQ ID NO: 1012470 - RNA, 19 nt, Artificial Sequence
  Description of Artificial Sequence: Synthetic oligonucleotide
uugaguaaggagggacuug

SEQ ID NO: 1012471 - RNA, 19 nt, Artificial Sequence
  Description of Artificial Sequence: Synthetic oligonucleotide
acacaauaacgggaaaccu

SEQ ID NO: 1012472 - RNA, 19 nt, Artificial Sequence
  Description of Artificial Sequence: Synthetic oligonucleotide
aucaacugagggguucccg

SEQ ID NO: 1012473 - RNA, 19 nt, Artificial Sequence
  Description of Artificial Sequence: Synthetic oligonucleotide
aaacaacccuugaguuagc

SEQ ID NO: 1012474 - RNA, 19 nt, Artificial Sequence
  Description of Artificial Sequence: Synthetic oligonucleotide
cccaaucaggccaaggggc

SEQ ID NO: 1012475 - RNA, 19 nt, Artificial Sequence
  Description of Artificial Sequence: Synthetic oligonucleotide
agaguuuaguccuccgcuu

SEQ ID NO: 1012476 - RNA, 19 nt, Artificial Sequence
  Description of Artificial Sequence: Synthetic oligonucleotide
cuugaguuagcuguaaggu

SEQ ID NO: 1012477 - RNA, 19 nt, Artificial Sequence
  Description of Artificial Sequence: Synthetic oligonucleotide
aaucaggccaaggggcugu

SEQ ID NO: 1012478 - RNA, 19 nt, Artificial Sequence
  Description of Artificial Sequence: Synthetic oligonucleotide
accguacagugacuucaac

SEQ ID NO: 1012479 - RNA, 19 nt, Artificial Sequence
  Description of Artificial Sequence: Synthetic oligonucleotide
uuacuguuauuuuccccua

SEQ ID NO: 1012480 - RNA, 19 nt, Artificial Sequence
  Description of Artificial Sequence: Synthetic oligonucleotide
gaaggggucucugcgcaag

SEQ ID NO: 1012481 - RNA, 19 nt, Artificial Sequence
  Description of Artificial Sequence: Synthetic oligonucleotide
ccuacccaagaucacacag

SEQ ID NO: 1012482 - RNA, 19 nt, Artificial Sequence
  Description of Artificial Sequence: Synthetic oligonucleotide
gcuucgaugauaagcagac

SEQ ID NO: 1012483 - RNA, 19 nt, Artificial Sequence
  Description of Artificial Sequence: Synthetic oligonucleotide
ggaucugggugaugggacg

SEQ ID NO: 1012484 - RNA, 19 nt, Artificial Sequence
  Description of Artificial Sequence: Synthetic oligonucleotide
accucuacguauccauccu

SEQ ID NO: 1012485 - RNA, 19 nt, Artificial Sequence
  Description of Artificial Sequence: Synthetic oligonucleotide
ugcuaaauugagugcugua

SEQ ID NO: 1012486 - RNA, 19 nt, Artificial Sequence
  Description of Artificial Sequence: Synthetic oligonucleotide
acuauagaccguacaguga

SEQ ID NO: 1012487 - RNA, 19 nt, Artificial Sequence
  Description of Artificial Sequence: Synthetic oligonucleotide
auacugugaccuaacacaa

SEQ ID NO: 1012488 - RNA, 19 nt, Artificial Sequence
  Description of Artificial Sequence: Synthetic oligonucleotide
augccguauauaaaaggca

SEQ ID NO: 1012489 - RNA, 19 nt, Artificial Sequence
  Description of Artificial Sequence: Synthetic oligonucleotide
guuugccugacaccucuac

SEQ ID NO: 1012490 - RNA, 19 nt, Artificial Sequence
  Description of Artificial Sequence: Synthetic oligonucleotide
caccucaccaggcuaucag

SEQ ID NO: 1012491 - RNA, 19 nt, Artificial Sequence
  Description of Artificial Sequence: Synthetic oligonucleotide
guucccggaguccuugaug

SEQ ID NO: 1012492 - RNA, 19 nt, Artificial Sequence
  Description of Artificial Sequence: Synthetic oligonucleotide
cuuagagacagcucucugu

SEQ ID NO: 1012493 - RNA, 19 nt, Artificial Sequence
  Description of Artificial Sequence: Synthetic oligonucleotide
uugucuuggggaagcucgu

SEQ ID NO: 1012494 - RNA, 19 nt, Artificial Sequence
  Description of Artificial Sequence: Synthetic oligonucleotide
uggagacaucuacuacuac

SEQ ID NO: 1012495 - RNA, 19 nt, Artificial Sequence
  Description of Artificial Sequence: Synthetic oligonucleotide
ugcuugguuccugguagag

SEQ ID NO: 1012496 - RNA, 19 nt, Artificial Sequence
  Description of Artificial Sequence: Synthetic oligonucleotide
aguuagcuguaagguaaag

SEQ ID NO: 1012497 - RNA, 19 nt, Artificial Sequence
  Description of Artificial Sequence: Synthetic oligonucleotide
aggcuaucagcaagucacc

SEQ ID NO: 1012498 - RNA, 19 nt, Artificial Sequence
  Description of Artificial Sequence: Synthetic oligonucleotide
agcuucgaugauaagcaga

SEQ ID NO: 1012499 - RNA, 19 nt, Artificial Sequence
  Description of Artificial Sequence: Synthetic oligonucleotide
ccauacacgauaccacuag

SEQ ID NO: 1012500 - RNA, 19 nt, Artificial Sequence
  Description of Artificial Sequence: Synthetic oligonucleotide
agaugguuuucagaguuua

SEQ ID NO: 1012501 - RNA, 19 nt, Artificial Sequence
  Description of Artificial Sequence: Synthetic oligonucleotide
accugccuauaaguucucc

SEQ ID NO: 1012502 - RNA, 19 nt, Artificial Sequence
  Description of Artificial Sequence: Synthetic oligonucleotide
auguaacaugaaguguuca

SEQ ID NO: 1012503 - RNA, 19 nt, Artificial Sequence
  Description of Artificial Sequence: Synthetic oligonucleotide
auagaccguacagugacuu

SEQ ID NO: 1012504 - RNA, 19 nt, Artificial Sequence
  Description of Artificial Sequence: Synthetic oligonucleotide
ggggucaugccguauauaa

SEQ ID NO: 1012505 - RNA, 19 nt, Artificial Sequence
  Description of Artificial Sequence: Synthetic oligonucleotide
gauauuagaccugccuaua

SEQ ID NO: 1012506 - RNA, 19 nt, Artificial Sequence
  Description of Artificial Sequence: Synthetic oligonucleotide
uggggauauuagaccugcc

SEQ ID NO: 1012507 - RNA, 19 nt, Artificial Sequence
  Description of Artificial Sequence: Synthetic oligonucleotide
aggagcacgggaaaggcaa

SEQ ID NO: 1012508 - RNA, 19 nt, Artificial Sequence
  Description of Artificial Sequence: Synthetic oligonucleotide
ggacacaauaacgggaaac

SEQ ID NO: 1012509 - RNA, 19 nt, Artificial Sequence
  Description of Artificial Sequence: Synthetic oligonucleotide
aucaagccacacauuagga

SEQ ID NO: 1012510 - RNA, 19 nt, Artificial Sequence
  Description of Artificial Sequence: Synthetic oligonucleotide
cuuggguaggagcacggga

SEQ ID NO: 1012511 - RNA, 19 nt, Artificial Sequence
  Description of Artificial Sequence: Synthetic oligonucleotide
gacaccucuacguauccau

SEQ ID NO: 1012512 - RNA, 19 nt, Artificial Sequence
  Description of Artificial Sequence: Synthetic oligonucleotide
gagcggugagucccggaag

SEQ ID NO: 1012513 - RNA, 19 nt, Artificial Sequence
  Description of Artificial Sequence: Synthetic oligonucleotide
ucccaauacugugaccuaa

SEQ ID NO: 1012514 - RNA, 19 nt, Artificial Sequence
  Description of Artificial Sequence: Synthetic oligonucleotide
guuuaguccuccgcuucag

SEQ ID NO: 1012515 - RNA, 19 nt, Artificial Sequence
  Description of Artificial Sequence: Synthetic oligonucleotide
uugcaacuauagaccguac

SEQ ID NO: 1012516 - RNA, 19 nt, Artificial Sequence
  Description of Artificial Sequence: Synthetic oligonucleotide
gggauauuagaccugccua

SEQ ID NO: 1012517 - RNA, 19 nt, Artificial Sequence
  Description of Artificial Sequence: Synthetic oligonucleotide
ccguauauaaaaggcacug

SEQ ID NO: 1012518 - RNA, 19 nt, Artificial Sequence
  Description of Artificial Sequence: Synthetic oligonucleotide
aggggacacaauaacggga

SEQ ID NO: 1012519 - RNA, 19 nt, Artificial Sequence
  Description of Artificial Sequence: Synthetic oligonucleotide
ugccugacaccucuacgua

SEQ ID NO: 1012520 - RNA, 19 nt, Artificial Sequence
  Description of Artificial Sequence: Synthetic oligonucleotide
gcuaaauugagugcuguaa

SEQ ID NO: 1012521 - RNA, 19 nt, Artificial Sequence
  Description of Artificial Sequence: Synthetic oligonucleotide
aaccuuagucagaaaucaa

SEQ ID NO: 1012522 - RNA, 19 nt, Artificial Sequence
  Description of Artificial Sequence: Synthetic oligonucleotide
ggaguuuaauaaaccucag

SEQ ID NO: 1012523 - RNA, 19 nt, Artificial Sequence
  Description of Artificial Sequence: Synthetic oligonucleotide
cugccuauaaguucuccua

SEQ ID NO: 1012524 - RNA, 19 nt, Artificial Sequence
  Description of Artificial Sequence: Synthetic oligonucleotide
acaagcccaaccauccgcu

SEQ ID NO: 1012525 - RNA, 19 nt, Artificial Sequence
  Description of Artificial Sequence: Synthetic oligonucleotide
agcuccuuuauugguauua

SEQ ID NO: 1012526 - RNA, 19 nt, Artificial Sequence
  Description of Artificial Sequence: Synthetic oligonucleotide
gaagggagcugggauccug

SEQ ID NO: 1012527 - RNA, 19 nt, Artificial Sequence
  Description of Artificial Sequence: Synthetic oligonucleotide
ucucugcgcaagcggcuug

SEQ ID NO: 1012528 - RNA, 19 nt, Artificial Sequence
  Description of Artificial Sequence: Synthetic oligonucleotide
gaagcucgugauugaagcu

SEQ ID NO: 1012529 - RNA, 19 nt, Artificial Sequence
  Description of Artificial Sequence: Synthetic oligonucleotide
gaugauaagcagacccucu

SEQ ID NO: 1012530 - RNA, 19 nt, Artificial Sequence
  Description of Artificial Sequence: Synthetic oligonucleotide
uggggaagcucgugauuga

SEQ ID NO: 1012531 - RNA, 19 nt, Artificial Sequence
  Description of Artificial Sequence: Synthetic oligonucleotide
ucucuucguguuugccuga

SEQ ID NO: 1012532 - RNA, 19 nt, Artificial Sequence
  Description of Artificial Sequence: Synthetic oligonucleotide
uagaccguacagugacuuc

SEQ ID NO: 1012533 - RNA, 19 nt, Artificial Sequence
  Description of Artificial Sequence: Synthetic oligonucleotide
cuucgaugauaagcagacc

SEQ ID NO: 1012534 - RNA, 19 nt, Artificial Sequence
  Description of Artificial Sequence: Synthetic oligonucleotide
cugcuuagagacagcucuc

SEQ ID NO: 1012535 - RNA, 19 nt, Artificial Sequence
  Description of Artificial Sequence: Synthetic oligonucleotide
ugccggaucuuaggguucc

SEQ ID NO: 1012536 - RNA, 19 nt, Artificial Sequence
  Description of Artificial Sequence: Synthetic oligonucleotide
cagaguuuaguccuccgcu

SEQ ID NO: 1012537 - RNA, 19 nt, Artificial Sequence
  Description of Artificial Sequence: Synthetic oligonucleotide
aggggaaauagaggcucag

SEQ ID NO: 1012538 - RNA, 19 nt, Artificial Sequence
  Description of Artificial Sequence: Synthetic oligonucleotide
guaacaugaaguguucaau

SEQ ID NO: 1012539 - RNA, 19 nt, Artificial Sequence
  Description of Artificial Sequence: Synthetic oligonucleotide
aggcucagagagacagagc

SEQ ID NO: 1012540 - RNA, 19 nt, Artificial Sequence
  Description of Artificial Sequence: Synthetic oligonucleotide
ucuuaggguuccgggccag

SEQ ID NO: 1012541 - RNA, 19 nt, Artificial Sequence
  Description of Artificial Sequence: Synthetic oligonucleotide
uccucccaauacugugacc

SEQ ID NO: 1012542 - RNA, 19 nt, Artificial Sequence
  Description of Artificial Sequence: Synthetic oligonucleotide
gugcuguaaaguaguguac

SEQ ID NO: 1012543 - RNA, 19 nt, Artificial Sequence
  Description of Artificial Sequence: Synthetic oligonucleotide
ugacaccucuacguaucca

SEQ ID NO: 1012544 - RNA, 19 nt, Artificial Sequence
  Description of Artificial Sequence: Synthetic oligonucleotide
cacaauaacgggaaaccuu

SEQ ID NO: 1012545 - RNA, 19 nt, Artificial Sequence
  Description of Artificial Sequence: Synthetic oligonucleotide
aaccauccgcugcccagaa

SEQ ID NO: 1012546 - RNA, 19 nt, Artificial Sequence
  Description of Artificial Sequence: Synthetic oligonucleotide
ggauauuagaccugccuau

SEQ ID NO: 1012547 - RNA, 19 nt, Artificial Sequence
  Description of Artificial Sequence: Synthetic oligonucleotide
ggacauccucccaauacug

SEQ ID NO: 1012548 - RNA, 19 nt, Artificial Sequence
  Description of Artificial Sequence: Synthetic oligonucleotide
aggcugucuggccuuugcu

SEQ ID NO: 1012549 - RNA, 19 nt, Artificial Sequence
  Description of Artificial Sequence: Synthetic oligonucleotide
agcucgugauugaagcugu

SEQ ID NO: 1012550 - RNA, 19 nt, Artificial Sequence
  Description of Artificial Sequence: Synthetic oligonucleotide
gcagaugagagccgaggca

SEQ ID NO: 1012551 - RNA, 19 nt, Artificial Sequence
  Description of Artificial Sequence: Synthetic oligonucleotide
gcuuagagacagcucucug

SEQ ID NO: 1012552 - RNA, 19 nt, Artificial Sequence
  Description of Artificial Sequence: Synthetic oligonucleotide
uguuugccugacaccucua

SEQ ID NO: 1012553 - RNA, 19 nt, Artificial Sequence
  Description of Artificial Sequence: Synthetic oligonucleotide
ccaaccauccgcugcccag

SEQ ID NO: 1012554 - RNA, 19 nt, Artificial Sequence
  Description of Artificial Sequence: Synthetic oligonucleotide
ggggauauuagaccugccu

SEQ ID NO: 1012555 - RNA, 19 nt, Artificial Sequence
  Description of Artificial Sequence: Synthetic oligonucleotide
gccuauaaguucuccuaga

SEQ ID NO: 1012556 - RNA, 19 nt, Artificial Sequence
  Description of Artificial Sequence: Synthetic oligonucleotide
guggagacaucuacuacua

SEQ ID NO: 1012557 - RNA, 19 nt, Artificial Sequence
  Description of Artificial Sequence: Synthetic oligonucleotide
gaagggacauccucccaau

SEQ ID NO: 1012558 - RNA, 19 nt, Artificial Sequence
  Description of Artificial Sequence: Synthetic oligonucleotide
caacugagggguucccgga

SEQ ID NO: 1012559 - RNA, 19 nt, Artificial Sequence
  Description of Artificial Sequence: Synthetic oligonucleotide
caacuauagaccguacagu

SEQ ID NO: 1012560 - RNA, 19 nt, Artificial Sequence
  Description of Artificial Sequence: Synthetic oligonucleotide
gggaagcucgugauugaag

SEQ ID NO: 1012561 - RNA, 19 nt, Artificial Sequence
  Description of Artificial Sequence: Synthetic oligonucleotide
aaucccauauggggauauu

SEQ ID NO: 1012562 - RNA, 19 nt, Artificial Sequence
  Description of Artificial Sequence: Synthetic oligonucleotide
acuucugcgggaagcugga

SEQ ID NO: 1012563 - RNA, 19 nt, Artificial Sequence
  Description of Artificial Sequence: Synthetic oligonucleotide
cccauauggggauauuaga

SEQ ID NO: 1012564 - RNA, 19 nt, Artificial Sequence
  Description of Artificial Sequence: Synthetic oligonucleotide
cuguaaaguaguguacccu

SEQ ID NO: 1012565 - RNA, 19 nt, Artificial Sequence
  Description of Artificial Sequence: Synthetic oligonucleotide
auccauugugucacccugu

SEQ ID NO: 1012566 - RNA, 19 nt, Artificial Sequence
  Description of Artificial Sequence: Synthetic oligonucleotide
augccggaucuuaggguuc

SEQ ID NO: 1012567 - RNA, 19 nt, Artificial Sequence
  Description of Artificial Sequence: Synthetic oligonucleotide
cauggggucaugccguaua

SEQ ID NO: 1012568 - RNA, 19 nt, Artificial Sequence
  Description of Artificial Sequence: Synthetic oligonucleotide
cuacguauccauccuuggu

SEQ ID NO: 1012569 - RNA, 19 nt, Artificial Sequence
  Description of Artificial Sequence: Synthetic oligonucleotide
cucaccaggcuaucagcaa

SEQ ID NO: 1012570 - RNA, 19 nt, Artificial Sequence
  Description of Artificial Sequence: Synthetic oligonucleotide
aucaaucaagccacacauu

SEQ ID NO: 1012571 - RNA, 19 nt, Artificial Sequence
  Description of Artificial Sequence: Synthetic oligonucleotide
acgggaaaccuuagucaga

SEQ ID NO: 1012572 - RNA, 19 nt, Artificial Sequence
  Description of Artificial Sequence: Synthetic oligonucleotide
ucccggaguccuugauggu

SEQ ID NO: 1012573 - RNA, 19 nt, Artificial Sequence
  Description of Artificial Sequence: Synthetic oligonucleotide
ccucaccaggcuaucagca

SEQ ID NO: 1012574 - RNA, 19 nt, Artificial Sequence
  Description of Artificial Sequence: Synthetic oligonucleotide
gaccguacagugacuucaa

SEQ ID NO: 1012575 - RNA, 19 nt, Artificial Sequence
  Description of Artificial Sequence: Synthetic oligonucleotide
cuacuacauuauccaggga

SEQ ID NO: 1012576 - RNA, 19 nt, Artificial Sequence
  Description of Artificial Sequence: Synthetic oligonucleotide
auagaggcucagagagaca

SEQ ID NO: 1012577 - RNA, 19 nt, Artificial Sequence
  Description of Artificial Sequence: Synthetic oligonucleotide
ggacgguccccagagaaaa

SEQ ID NO: 1012578 - RNA, 19 nt, Artificial Sequence
  Description of Artificial Sequence: Synthetic oligonucleotide
cugugcacguugacacaca

SEQ ID NO: 1012579 - RNA, 19 nt, Artificial Sequence
  Description of Artificial Sequence: Synthetic oligonucleotide
ccaauacugugaccuaaca

SEQ ID NO: 1012580 - RNA, 19 nt, Artificial Sequence
  Description of Artificial Sequence: Synthetic oligonucleotide
ccacaagcccaaccauccg

SEQ ID NO: 1012581 - RNA, 19 nt, Artificial Sequence
  Description of Artificial Sequence: Synthetic oligonucleotide
caaaagggccucugucugu

SEQ ID NO: 1012582 - RNA, 19 nt, Artificial Sequence
  Description of Artificial Sequence: Synthetic oligonucleotide
gcaaauacggucacuggau

SEQ ID NO: 1012583 - RNA, 19 nt, Artificial Sequence
  Description of Artificial Sequence: Synthetic oligonucleotide
gguugaguaaggagggacu

SEQ ID NO: 1012584 - RNA, 19 nt, Artificial Sequence
  Description of Artificial Sequence: Synthetic oligonucleotide
ccagaggcuccaucaauca

SEQ ID NO: 1012585 - RNA, 19 nt, Artificial Sequence
  Description of Artificial Sequence: Synthetic oligonucleotide
cauuauccagggacucugu

SEQ ID NO: 1012586 - RNA, 19 nt, Artificial Sequence
  Description of Artificial Sequence: Synthetic oligonucleotide
ccggaaggggucucugcgc

SEQ ID NO: 1012587 - RNA, 19 nt, Artificial Sequence
  Description of Artificial Sequence: Synthetic oligonucleotide
gugagucccggaagggguc

SEQ ID NO: 1012588 - RNA, 19 nt, Artificial Sequence
  Description of Artificial Sequence: Synthetic oligonucleotide
caaccauccgcugcccaga

SEQ ID NO: 1012589 - RNA, 19 nt, Artificial Sequence
  Description of Artificial Sequence: Synthetic oligonucleotide
agucccggaaggggucucu

SEQ ID NO: 1012590 - RNA, 19 nt, Artificial Sequence
  Description of Artificial Sequence: Synthetic oligonucleotide
ccggaguccuugaugguga

SEQ ID NO: 1012591 - RNA, 19 nt, Artificial Sequence
  Description of Artificial Sequence: Synthetic oligonucleotide
cucccaauacugugaccua

SEQ ID NO: 1012592 - RNA, 19 nt, Artificial Sequence
  Description of Artificial Sequence: Synthetic oligonucleotide
ggugagucccggaaggggu

SEQ ID NO: 1012593 - RNA, 19 nt, Artificial Sequence
  Description of Artificial Sequence: Synthetic oligonucleotide
ccggaucuuaggguuccgg

SEQ ID NO: 1012594 - RNA, 19 nt, Artificial Sequence
  Description of Artificial Sequence: Synthetic oligonucleotide
acgauaccacuagccugca

SEQ ID NO: 1012595 - RNA, 19 nt, Artificial Sequence
  Description of Artificial Sequence: Synthetic oligonucleotide
gcggugagucccggaaggg

SEQ ID NO: 1012596 - RNA, 19 nt, Artificial Sequence
  Description of Artificial Sequence: Synthetic oligonucleotide
gaccugccuauaaguucuc

SEQ ID NO: 1012597 - RNA, 19 nt, Artificial Sequence
  Description of Artificial Sequence: Synthetic oligonucleotide
ccugccuauaaguucuccu

SEQ ID NO: 1012598 - RNA, 19 nt, Artificial Sequence
  Description of Artificial Sequence: Synthetic oligonucleotide
ggggagcuucgaugauaag

SEQ ID NO: 1012599 - RNA, 19 nt, Artificial Sequence
  Description of Artificial Sequence: Synthetic oligonucleotide
cacccuguggagacaucua

SEQ ID NO: 1012600 - RNA, 19 nt, Artificial Sequence
  Description of Artificial Sequence: Synthetic oligonucleotide
caggcgggaagagagcggu

SEQ ID NO: 1012601 - RNA, 19 nt, Artificial Sequence
  Description of Artificial Sequence: Synthetic oligonucleotide
acccaagaucacacagcaa

SEQ ID NO: 1012602 - RNA, 19 nt, Artificial Sequence
  Description of Artificial Sequence: Synthetic oligonucleotide
gggucaugccguauauaaa

SEQ ID NO: 1012603 - RNA, 19 nt, Artificial Sequence
  Description of Artificial Sequence: Synthetic oligonucleotide
agccgaggcaaagcccaau

SEQ ID NO: 1012604 - RNA, 19 nt, Artificial Sequence
  Description of Artificial Sequence: Synthetic oligonucleotide
gccguauauaaaaggcacu

SEQ ID NO: 1012605 - RNA, 19 nt, Artificial Sequence
  Description of Artificial Sequence: Synthetic oligonucleotide
cuuggggaagcucgugauu

SEQ ID NO: 1012606 - RNA, 19 nt, Artificial Sequence
  Description of Artificial Sequence: Synthetic oligonucleotide
gagucccggaaggggucuc

SEQ ID NO: 1012607 - RNA, 19 nt, Artificial Sequence
  Description of Artificial Sequence: Synthetic oligonucleotide
ccuaaacaacagcacaauu

SEQ ID NO: 1012608 - RNA, 19 nt, Artificial Sequence
  Description of Artificial Sequence: Synthetic oligonucleotide
cggggcaccaugccggauc

SEQ ID NO: 1012609 - RNA, 19 nt, Artificial Sequence
  Description of Artificial Sequence: Synthetic oligonucleotide
cuuggggagcuucgaugau

SEQ ID NO: 1012610 - RNA, 19 nt, Artificial Sequence
  Description of Artificial Sequence: Synthetic oligonucleotide
aucguccagcaggcgggaa

SEQ ID NO: 1012611 - RNA, 19 nt, Artificial Sequence
  Description of Artificial Sequence: Synthetic oligonucleotide
gccggaucuuaggguuccg

SEQ ID NO: 1012612 - RNA, 19 nt, Artificial Sequence
  Description of Artificial Sequence: Synthetic oligonucleotide
cgcuucagaaaauucugau

SEQ ID NO: 1012613 - RNA, 19 nt, Artificial Sequence
  Description of Artificial Sequence: Synthetic oligonucleotide
cugcgcaagcggcuugggu

SEQ ID NO: 1012614 - RNA, 19 nt, Artificial Sequence
  Description of Artificial Sequence: Synthetic oligonucleotide
ccggguugucuuggggaag

SEQ ID NO: 1012615 - RNA, 19 nt, Artificial Sequence
  Description of Artificial Sequence: Synthetic oligonucleotide
cagcaaggugauguggcuu

SEQ ID NO: 1012616 - RNA, 19 nt, Artificial Sequence
  Description of Artificial Sequence: Synthetic oligonucleotide
gucucugcgcaagcggcuu

SEQ ID NO: 1012617 - RNA, 19 nt, Artificial Sequence
  Description of Artificial Sequence: Synthetic oligonucleotide
cccaaccauccgcugccca

SEQ ID NO: 1012618 - RNA, 19 nt, Artificial Sequence
  Description of Artificial Sequence: Synthetic oligonucleotide
ccucuacguauccauccuu

SEQ ID NO: 1012619 - RNA, 19 nt, Artificial Sequence
  Description of Artificial Sequence: Synthetic oligonucleotide
ccgggccaggcagaugaga

SEQ ID NO: 1012620 - RNA, 19 nt, Artificial Sequence
  Description of Artificial Sequence: Synthetic oligonucleotide
cagacccucuggggacagu

SEQ ID NO: 1012621 - RNA, 19 nt, Artificial Sequence
  Description of Artificial Sequence: Synthetic oligonucleotide
ccggggcaccaugccggau

SEQ ID NO: 1012622 - RNA, 19 nt, Artificial Sequence
  Description of Artificial Sequence: Synthetic oligonucleotide
acugauguuacucacaagc

SEQ ID NO: 1012623 - RNA, 19 nt, Artificial Sequence
  Description of Artificial Sequence: Synthetic oligonucleotide
aaucauuuuaagcugcagc

SEQ ID NO: 1012624 - RNA, 19 nt, Artificial Sequence
  Description of Artificial Sequence: Synthetic oligonucleotide
uuugucaacagccaauugg

SEQ ID NO: 1012625 - RNA, 19 nt, Artificial Sequence
  Description of Artificial Sequence: Synthetic oligonucleotide
aagaaauuguaccucucgc

SEQ ID NO: 1012626 - RNA, 19 nt, Artificial Sequence
  Description of Artificial Sequence: Synthetic oligonucleotide
uuuaagagggcaaucuugg

SEQ ID NO: 1012627 - RNA, 19 nt, Artificial Sequence
  Description of Artificial Sequence: Synthetic oligonucleotide
ucuacuaaagucuuggcug

SEQ ID NO: 1012628 - RNA, 19 nt, Artificial Sequence
  Description of Artificial Sequence: Synthetic oligonucleotide
aaacaauuggcaguggccc

SEQ ID NO: 1012629 - RNA, 19 nt, Artificial Sequence
  Description of Artificial Sequence: Synthetic oligonucleotide
aauuguaccucucgccucc

SEQ ID NO: 1012630 - RNA, 19 nt, Artificial Sequence
  Description of Artificial Sequence: Synthetic oligonucleotide
caucauuagaaauuguugc

SEQ ID NO: 1012631 - RNA, 19 nt, Artificial Sequence
  Description of Artificial Sequence: Synthetic oligonucleotide
uccacaauaagcuugucca

SEQ ID NO: 1012632 - RNA, 19 nt, Artificial Sequence
  Description of Artificial Sequence: Synthetic oligonucleotide
aacaauugccugguaaucc

SEQ ID NO: 1012633 - RNA, 19 nt, Artificial Sequence
  Description of Artificial Sequence: Synthetic oligonucleotide
ucuuucaacaggauaacug

SEQ ID NO: 1012634 - RNA, 19 nt, Artificial Sequence
  Description of Artificial Sequence: Synthetic oligonucleotide
ucaaccaccaucuuggcga

SEQ ID NO: 1012635 - RNA, 19 nt, Artificial Sequence
  Description of Artificial Sequence: Synthetic oligonucleotide
aagcuucggggcuagacgc

SEQ ID NO: 1012636 - RNA, 19 nt, Artificial Sequence
  Description of Artificial Sequence: Synthetic oligonucleotide
gauagcaucaugcaaggac

SEQ ID NO: 1012637 - RNA, 19 nt, Artificial Sequence
  Description of Artificial Sequence: Synthetic oligonucleotide
ucgaccauccacaauaagc

SEQ ID NO: 1012638 - RNA, 19 nt, Artificial Sequence
  Description of Artificial Sequence: Synthetic oligonucleotide
uacaauaaggcacgcagcc

SEQ ID NO: 1012639 - RNA, 19 nt, Artificial Sequence
  Description of Artificial Sequence: Synthetic oligonucleotide
aaauuguugcuuugccucg

SEQ ID NO: 1012640 - RNA, 19 nt, Artificial Sequence
  Description of Artificial Sequence: Synthetic oligonucleotide
uugauagucucauccacgg

SEQ ID NO: 1012641 - RNA, 19 nt, Artificial Sequence
  Description of Artificial Sequence: Synthetic oligonucleotide
uuuaucuuguuucuucaca

SEQ ID NO: 1012642 - RNA, 19 nt, Artificial Sequence
  Description of Artificial Sequence: Synthetic oligonucleotide
gaucaugauagcaucaugc

SEQ ID NO: 1012643 - RNA, 19 nt, Artificial Sequence
  Description of Artificial Sequence: Synthetic oligonucleotide
auagcaucaugcaaggacc

SEQ ID NO: 1012644 - RNA, 19 nt, Artificial Sequence
  Description of Artificial Sequence: Synthetic oligonucleotide
uccacggauacaauaaggc

SEQ ID NO: 1012645 - RNA, 19 nt, Artificial Sequence
  Description of Artificial Sequence: Synthetic oligonucleotide
aaauuguaccucucgccuc

SEQ ID NO: 1012646 - RNA, 19 nt, Artificial Sequence
  Description of Artificial Sequence: Synthetic oligonucleotide
uuucaaacccggcauaaga

SEQ ID NO: 1012647 - RNA, 19 nt, Artificial Sequence
  Description of Artificial Sequence: Synthetic oligonucleotide
acaucaaggaguuucagaa

SEQ ID NO: 1012648 - RNA, 19 nt, Artificial Sequence
  Description of Artificial Sequence: Synthetic oligonucleotide
ucaaacaauuggcaguggc

SEQ ID NO: 1012649 - RNA, 19 nt, Artificial Sequence
  Description of Artificial Sequence: Synthetic oligonucleotide
ugauguuacucacaagcug

SEQ ID NO: 1012650 - RNA, 19 nt, Artificial Sequence
  Description of Artificial Sequence: Synthetic oligonucleotide
ucguggaauaauuuccagg

SEQ ID NO: 1012651 - RNA, 19 nt, Artificial Sequence
  Description of Artificial Sequence: Synthetic oligonucleotide
aggaguuucagaauugugg

SEQ ID NO: 1012652 - RNA, 19 nt, Artificial Sequence
  Description of Artificial Sequence: Synthetic oligonucleotide
ucuugaaugcgacaccagc

SEQ ID NO: 1012653 - RNA, 19 nt, Artificial Sequence
  Description of Artificial Sequence: Synthetic oligonucleotide
uuugccucgaccauccaca

SEQ ID NO: 1012654 - RNA, 19 nt, Artificial Sequence
  Description of Artificial Sequence: Synthetic oligonucleotide
aacugagacuccucuaaag

SEQ ID NO: 1012655 - RNA, 19 nt, Artificial Sequence
  Description of Artificial Sequence: Synthetic oligonucleotide
agcguugucacacagcugu

SEQ ID NO: 1012656 - RNA, 19 nt, Artificial Sequence
  Description of Artificial Sequence: Synthetic oligonucleotide
cacggauacaauaaggcac

SEQ ID NO: 1012657 - RNA, 19 nt, Artificial Sequence
  Description of Artificial Sequence: Synthetic oligonucleotide
cuugauagucucauccacg

SEQ ID NO: 1012658 - RNA, 19 nt, Artificial Sequence
  Description of Artificial Sequence: Synthetic oligonucleotide
agagucauucuugauggcc

SEQ ID NO: 1012659 - RNA, 19 nt, Artificial Sequence
  Description of Artificial Sequence: Synthetic oligonucleotide
gaugguacacgucuuggcc

SEQ ID NO: 1012660 - RNA, 19 nt, Artificial Sequence
  Description of Artificial Sequence: Synthetic oligonucleotide
cuugaaugcgacaccagcc

SEQ ID NO: 1012661 - RNA, 19 nt, Artificial Sequence
  Description of Artificial Sequence: Synthetic oligonucleotide
ugggcugcauuucaaaccc

SEQ ID NO: 1012662 - RNA, 19 nt, Artificial Sequence
  Description of Artificial Sequence: Synthetic oligonucleotide
ucaacaggauaacuggugu

SEQ ID NO: 1012663 - RNA, 19 nt, Artificial Sequence
  Description of Artificial Sequence: Synthetic oligonucleotide
caaacaauuggcaguggcc

SEQ ID NO: 1012664 - RNA, 19 nt, Artificial Sequence
  Description of Artificial Sequence: Synthetic oligonucleotide
aggaugaugguacacgucu

SEQ ID NO: 1012665 - RNA, 19 nt, Artificial Sequence
  Description of Artificial Sequence: Synthetic oligonucleotide
agagcuccaucucaauggc

SEQ ID NO: 1012666 - RNA, 19 nt, Artificial Sequence
  Description of Artificial Sequence: Synthetic oligonucleotide
aaagcucggaugaugaucu

SEQ ID NO: 1012667 - RNA, 19 nt, Artificial Sequence
  Description of Artificial Sequence: Synthetic oligonucleotide
cugucguggaauaauuucc

SEQ ID NO: 1012668 - RNA, 19 nt, Artificial Sequence
  Description of Artificial Sequence: Synthetic oligonucleotide
ucaacauuuaagagggcaa

SEQ ID NO: 1012669 - RNA, 19 nt, Artificial Sequence
  Description of Artificial Sequence: Synthetic oligonucleotide
ucauccacggauacaauaa

SEQ ID NO: 1012670 - RNA, 19 nt, Artificial Sequence
  Description of Artificial Sequence: Synthetic oligonucleotide
uugaaugcgacaccagcca

SEQ ID NO: 1012671 - RNA, 19 nt, Artificial Sequence
  Description of Artificial Sequence: Synthetic oligonucleotide
guacccagaagcuucgggg

SEQ ID NO: 1012672 - RNA, 19 nt, Artificial Sequence
  Description of Artificial Sequence: Synthetic oligonucleotide
agaaguacccagaagcuuc

SEQ ID NO: 1012673 - RNA, 19 nt, Artificial Sequence
  Description of Artificial Sequence: Synthetic oligonucleotide
agugaagaaauuguaccuc

SEQ ID NO: 1012674 - RNA, 19 nt, Artificial Sequence
  Description of Artificial Sequence: Synthetic oligonucleotide
ucuugauagucucauccac

SEQ ID NO: 1012675 - RNA, 19 nt, Artificial Sequence
  Description of Artificial Sequence: Synthetic oligonucleotide
ugauggaucuucucuagcu

SEQ ID NO: 1012676 - RNA, 19 nt, Artificial Sequence
  Description of Artificial Sequence: Synthetic oligonucleotide
ucaacaauugccugguaau

SEQ ID NO: 1012677 - RNA, 19 nt, Artificial Sequence
  Description of Artificial Sequence: Synthetic oligonucleotide
ugcauuucaaacccggcau

SEQ ID NO: 1012678 - RNA, 19 nt, Artificial Sequence
  Description of Artificial Sequence: Synthetic oligonucleotide
cuacuaaagucuuggcugc

SEQ ID NO: 1012679 - RNA, 19 nt, Artificial Sequence
  Description of Artificial Sequence: Synthetic oligonucleotide
aagaaggucuucugcugag

SEQ ID NO: 1012680 - RNA, 19 nt, Artificial Sequence
  Description of Artificial Sequence: Synthetic oligonucleotide
ucaucgcacacuuuuccag

SEQ ID NO: 1012681 - RNA, 19 nt, Artificial Sequence
  Description of Artificial Sequence: Synthetic oligonucleotide
uucaaacccggcauaagaa

SEQ ID NO: 1012682 - RNA, 19 nt, Artificial Sequence
  Description of Artificial Sequence: Synthetic oligonucleotide
uuaagagggcaaucuuggg

SEQ ID NO: 1012683 - RNA, 19 nt, Artificial Sequence
  Description of Artificial Sequence: Synthetic oligonucleotide
ugugcggaaagcucggaug

SEQ ID NO: 1012684 - RNA, 19 nt, Artificial Sequence
  Description of Artificial Sequence: Synthetic oligonucleotide
ucccuaucagcaaaguacu

SEQ ID NO: 1012685 - RNA, 19 nt, Artificial Sequence
  Description of Artificial Sequence: Synthetic oligonucleotide
aucaugauagcaucaugca

SEQ ID NO: 1012686 - RNA, 19 nt, Artificial Sequence
  Description of Artificial Sequence: Synthetic oligonucleotide
uaauccuccaccgugugga

SEQ ID NO: 1012687 - RNA, 19 nt, Artificial Sequence
  Description of Artificial Sequence: Synthetic oligonucleotide
ggaguuucagaauuguggc

SEQ ID NO: 1012688 - RNA, 19 nt, Artificial Sequence
  Description of Artificial Sequence: Synthetic oligonucleotide
gauggacaacaucaaggag

SEQ ID NO: 1012689 - RNA, 19 nt, Artificial Sequence
  Description of Artificial Sequence: Synthetic oligonucleotide
ugcgacaccagccaccaac

SEQ ID NO: 1012690 - RNA, 19 nt, Artificial Sequence
  Description of Artificial Sequence: Synthetic oligonucleotide
aucaaggaguuucagaauu

SEQ ID NO: 1012691 - RNA, 19 nt, Artificial Sequence
  Description of Artificial Sequence: Synthetic oligonucleotide
auacaauaaggcacgcagc

SEQ ID NO: 1012692 - RNA, 19 nt, Artificial Sequence
  Description of Artificial Sequence: Synthetic oligonucleotide
auuuaagagggcaaucuug

SEQ ID NO: 1012693 - RNA, 19 nt, Artificial Sequence
  Description of Artificial Sequence: Synthetic oligonucleotide
ggaaucagagcauucacac

SEQ ID NO: 1012694 - RNA, 19 nt, Artificial Sequence
  Description of Artificial Sequence: Synthetic oligonucleotide
uucuugauagucucaucca

SEQ ID NO: 1012695 - RNA, 19 nt, Artificial Sequence
  Description of Artificial Sequence: Synthetic oligonucleotide
gucccuaucagcaaaguac

SEQ ID NO: 1012696 - RNA, 19 nt, Artificial Sequence
  Description of Artificial Sequence: Synthetic oligonucleotide
uuacucacaagcugaggga

SEQ ID NO: 1012697 - RNA, 19 nt, Artificial Sequence
  Description of Artificial Sequence: Synthetic oligonucleotide
aguacccagaagcuucggg

SEQ ID NO: 1012698 - RNA, 19 nt, Artificial Sequence
  Description of Artificial Sequence: Synthetic oligonucleotide
ggcaaugucuacuaaaguc

SEQ ID NO: 1012699 - RNA, 19 nt, Artificial Sequence
  Description of Artificial Sequence: Synthetic oligonucleotide
cucgccuccaauuuggguc

SEQ ID NO: 1012700 - RNA, 19 nt, Artificial Sequence
  Description of Artificial Sequence: Synthetic oligonucleotide
uugggguucuuauauuucu

SEQ ID NO: 1012701 - RNA, 19 nt, Artificial Sequence
  Description of Artificial Sequence: Synthetic oligonucleotide
uccuugaguaaucccgaag

SEQ ID NO: 1012702 - RNA, 19 nt, Artificial Sequence
  Description of Artificial Sequence: Synthetic oligonucleotide
aucaacaauugccugguaa

SEQ ID NO: 1012703 - RNA, 19 nt, Artificial Sequence
  Description of Artificial Sequence: Synthetic oligonucleotide
acacgucuuggccuuaggg

SEQ ID NO: 1012704 - RNA, 19 nt, Artificial Sequence
  Description of Artificial Sequence: Synthetic oligonucleotide
uugauggcccuccucacga

SEQ ID NO: 1012705 - RNA, 19 nt, Artificial Sequence
  Description of Artificial Sequence: Synthetic oligonucleotide
ccuugaguaaucccgaagg

SEQ ID NO: 1012706 - RNA, 19 nt, Artificial Sequence
  Description of Artificial Sequence: Synthetic oligonucleotide
uucagcucaagcucaacau

SEQ ID NO: 1012707 - RNA, 19 nt, Artificial Sequence
  Description of Artificial Sequence: Synthetic oligonucleotide
gaaauuguaccucucgccu

SEQ ID NO: 1012708 - RNA, 19 nt, Artificial Sequence
  Description of Artificial Sequence: Synthetic oligonucleotide
cuucaccugcuucagaaac

SEQ ID NO: 1012709 - RNA, 19 nt, Artificial Sequence
  Description of Artificial Sequence: Synthetic oligonucleotide
ugucauagagaauguucca

SEQ ID NO: 1012710 - RNA, 19 nt, Artificial Sequence
  Description of Artificial Sequence: Synthetic oligonucleotide
uuuugucaacagccaauug

SEQ ID NO: 1012711 - RNA, 19 nt, Artificial Sequence
  Description of Artificial Sequence: Synthetic oligonucleotide
uaagcuuguccaugccacg

SEQ ID NO: 1012712 - RNA, 19 nt, Artificial Sequence
  Description of Artificial Sequence: Synthetic oligonucleotide
cuuauauuucuugggcugc

SEQ ID NO: 1012713 - RNA, 19 nt, Artificial Sequence
  Description of Artificial Sequence: Synthetic oligonucleotide
acaauugccugguaauccu

SEQ ID NO: 1012714 - RNA, 19 nt, Artificial Sequence
  Description of Artificial Sequence: Synthetic oligonucleotide
aaaccuuccuccacauagg

SEQ ID NO: 1012715 - RNA, 19 nt, Artificial Sequence
  Description of Artificial Sequence: Synthetic oligonucleotide
caauaaggcacgcagccuc

SEQ ID NO: 1012716 - RNA, 19 nt, Artificial Sequence
  Description of Artificial Sequence: Synthetic oligonucleotide
gagucauucuugauggccc

SEQ ID NO: 1012717 - RNA, 19 nt, Artificial Sequence
  Description of Artificial Sequence: Synthetic oligonucleotide
aaguuuguuaaggauguuu

SEQ ID NO: 1012718 - RNA, 19 nt, Artificial Sequence
  Description of Artificial Sequence: Synthetic oligonucleotide
ucaaacccggcauaagaaa

SEQ ID NO: 1012719 - RNA, 19 nt, Artificial Sequence
  Description of Artificial Sequence: Synthetic oligonucleotide
ccauaaacuguucagcgcc

SEQ ID NO: 1012720 - RNA, 19 nt, Artificial Sequence
  Description of Artificial Sequence: Synthetic oligonucleotide
uuggaagcggcuucagggc

SEQ ID NO: 1012721 - RNA, 19 nt, Artificial Sequence
  Description of Artificial Sequence: Synthetic oligonucleotide
aauuguggccccaucauua

SEQ ID NO: 1012722 - RNA, 19 nt, Artificial Sequence
  Description of Artificial Sequence: Synthetic oligonucleotide
ggguucuuauauuucuugg

SEQ ID NO: 1012723 - RNA, 19 nt, Artificial Sequence
  Description of Artificial Sequence: Synthetic oligonucleotide
aaggcacgcagccucagaa

SEQ ID NO: 1012724 - RNA, 19 nt, Artificial Sequence
  Description of Artificial Sequence: Synthetic oligonucleotide
aaugcgacaccagccacca

SEQ ID NO: 1012725 - RNA, 19 nt, Artificial Sequence
  Description of Artificial Sequence: Synthetic oligonucleotide
auuggcaguggcccagcac

SEQ ID NO: 1012726 - RNA, 19 nt, Artificial Sequence
  Description of Artificial Sequence: Synthetic oligonucleotide
ucacgaucaugauagcauc

SEQ ID NO: 1012727 - RNA, 19 nt, Artificial Sequence
  Description of Artificial Sequence: Synthetic oligonucleotide
auguccucguuguugacgu

SEQ ID NO: 1012728 - RNA, 19 nt, Artificial Sequence
  Description of Artificial Sequence: Synthetic oligonucleotide
gaaguacccagaagcuucg

SEQ ID NO: 1012729 - RNA, 19 nt, Artificial Sequence
  Description of Artificial Sequence: Synthetic oligonucleotide
agcgucuugggauuuggca

SEQ ID NO: 1012730 - RNA, 19 nt, Artificial Sequence
  Description of Artificial Sequence: Synthetic oligonucleotide
ggauugagccuccacaggc

SEQ ID NO: 1012731 - RNA, 19 nt, Artificial Sequence
  Description of Artificial Sequence: Synthetic oligonucleotide
auuguggccccaucauuag

SEQ ID NO: 1012732 - RNA, 19 nt, Artificial Sequence
  Description of Artificial Sequence: Synthetic oligonucleotide
ucguuguugacguccacuc

SEQ ID NO: 1012733 - RNA, 19 nt, Artificial Sequence
  Description of Artificial Sequence: Synthetic oligonucleotide
caucgcacacuuuuccagc

SEQ ID NO: 1012734 - RNA, 19 nt, Artificial Sequence
  Description of Artificial Sequence: Synthetic oligonucleotide
uguuacucacaagcugagg

SEQ ID NO: 1012735 - RNA, 19 nt, Artificial Sequence
  Description of Artificial Sequence: Synthetic oligonucleotide
ugaugccaaucauuuuaag

SEQ ID NO: 1012736 - RNA, 19 nt, Artificial Sequence
  Description of Artificial Sequence: Synthetic oligonucleotide
ucaugcaaggaccguucug

SEQ ID NO: 1012737 - RNA, 19 nt, Artificial Sequence
  Description of Artificial Sequence: Synthetic oligonucleotide
augguacacgucuuggccu

SEQ ID NO: 1012738 - RNA, 19 nt, Artificial Sequence
  Description of Artificial Sequence: Synthetic oligonucleotide
aggauaacuggugugggca

SEQ ID NO: 1012739 - RNA, 19 nt, Artificial Sequence
  Description of Artificial Sequence: Synthetic oligonucleotide
aacaugucccuaucagcaa

SEQ ID NO: 1012740 - RNA, 19 nt, Artificial Sequence
  Description of Artificial Sequence: Synthetic oligonucleotide
uaucaguccccucuuucaa

SEQ ID NO: 1012741 - RNA, 19 nt, Artificial Sequence
  Description of Artificial Sequence: Synthetic oligonucleotide
acuguucagcgccuccacg

SEQ ID NO: 1012742 - RNA, 19 nt, Artificial Sequence
  Description of Artificial Sequence: Synthetic oligonucleotide
ugguaauccuccaccgugu

SEQ ID NO: 1012743 - RNA, 19 nt, Artificial Sequence
  Description of Artificial Sequence: Synthetic oligonucleotide
acagaacaugucccuauca

SEQ ID NO: 1012744 - RNA, 19 nt, Artificial Sequence
  Description of Artificial Sequence: Synthetic oligonucleotide
uuguccaugccacggggac

SEQ ID NO: 1012745 - RNA, 19 nt, Artificial Sequence
  Description of Artificial Sequence: Synthetic oligonucleotide
ugaaugcgacaccagccac

SEQ ID NO: 1012746 - RNA, 19 nt, Artificial Sequence
  Description of Artificial Sequence: Synthetic oligonucleotide
ugcaugccgagcccgaagu

SEQ ID NO: 1012747 - RNA, 19 nt, Artificial Sequence
  Description of Artificial Sequence: Synthetic oligonucleotide
cauaugccccaaucaacag

SEQ ID NO: 1012748 - RNA, 19 nt, Artificial Sequence
  Description of Artificial Sequence: Synthetic oligonucleotide
auccacggauacaauaagg

SEQ ID NO: 1012749 - RNA, 19 nt, Artificial Sequence
  Description of Artificial Sequence: Synthetic oligonucleotide
gaugaugaucugagggugc

SEQ ID NO: 1012750 - RNA, 19 nt, Artificial Sequence
  Description of Artificial Sequence: Synthetic oligonucleotide
aguuuggacaagaugacuu

SEQ ID NO: 1012751 - RNA, 19 nt, Artificial Sequence
  Description of Artificial Sequence: Synthetic oligonucleotide
cggagaaguacccagaagc

SEQ ID NO: 1012752 - RNA, 19 nt, Artificial Sequence
  Description of Artificial Sequence: Synthetic oligonucleotide
cucaacauuuaagagggca

SEQ ID NO: 1012753 - RNA, 19 nt, Artificial Sequence
  Description of Artificial Sequence: Synthetic oligonucleotide
gagggugcaaaccuuccuc

SEQ ID NO: 1012754 - RNA, 19 nt, Artificial Sequence
  Description of Artificial Sequence: Synthetic oligonucleotide
uuggagagcuccaucucaa

SEQ ID NO: 1012755 - RNA, 19 nt, Artificial Sequence
  Description of Artificial Sequence: Synthetic oligonucleotide
gaugccuugggagcuauca

SEQ ID NO: 1012756 - RNA, 19 nt, Artificial Sequence
  Description of Artificial Sequence: Synthetic oligonucleotide
cacuccguaccacaugccc

SEQ ID NO: 1012757 - RNA, 19 nt, Artificial Sequence
  Description of Artificial Sequence: Synthetic oligonucleotide
ucaccuggcaagcacugau

SEQ ID NO: 1012758 - RNA, 19 nt, Artificial Sequence
  Description of Artificial Sequence: Synthetic oligonucleotide
guugacguccacuccguac

SEQ ID NO: 1012759 - RNA, 19 nt, Artificial Sequence
  Description of Artificial Sequence: Synthetic oligonucleotide
caacaggauaacuggugug

SEQ ID NO: 1012760 - RNA, 19 nt, Artificial Sequence
  Description of Artificial Sequence: Synthetic oligonucleotide
uuggcgaagaaggucuucu

SEQ ID NO: 1012761 - RNA, 19 nt, Artificial Sequence
  Description of Artificial Sequence: Synthetic oligonucleotide
uagucucauccacggauac

SEQ ID NO: 1012762 - RNA, 19 nt, Artificial Sequence
  Description of Artificial Sequence: Synthetic oligonucleotide
caagcacugauguuacuca

SEQ ID NO: 1012763 - RNA, 19 nt, Artificial Sequence
  Description of Artificial Sequence: Synthetic oligonucleotide
ucagcgucuugggauuugg

SEQ ID NO: 1012764 - RNA, 19 nt, Artificial Sequence
  Description of Artificial Sequence: Synthetic oligonucleotide
ugucccuaucagcaaagua

SEQ ID NO: 1012765 - RNA, 19 nt, Artificial Sequence
  Description of Artificial Sequence: Synthetic oligonucleotide
gagcauucacacuggucug

SEQ ID NO: 1012766 - RNA, 19 nt, Artificial Sequence
  Description of Artificial Sequence: Synthetic oligonucleotide
ggugugggcaucaucuugg

SEQ ID NO: 1012767 - RNA, 19 nt, Artificial Sequence
  Description of Artificial Sequence: Synthetic oligonucleotide
uccucuguucuacuuuauc

SEQ ID NO: 1012768 - RNA, 19 nt, Artificial Sequence
  Description of Artificial Sequence: Synthetic oligonucleotide
aaucaccuggcaagcacug

SEQ ID NO: 1012769 - RNA, 19 nt, Artificial Sequence
  Description of Artificial Sequence: Synthetic oligonucleotide
gaaugcgacaccagccacc

SEQ ID NO: 1012770 - RNA, 19 nt, Artificial Sequence
  Description of Artificial Sequence: Synthetic oligonucleotide
caauaagcuuguccaugcc

SEQ ID NO: 1012771 - RNA, 19 nt, Artificial Sequence
  Description of Artificial Sequence: Synthetic oligonucleotide
aauuguugcuuugccucga

SEQ ID NO: 1012772 - RNA, 19 nt, Artificial Sequence
  Description of Artificial Sequence: Synthetic oligonucleotide
aggaccguucuguuuccuc

SEQ ID NO: 1012773 - RNA, 19 nt, Artificial Sequence
  Description of Artificial Sequence: Synthetic oligonucleotide
acuaaagucuuggcugcag

SEQ ID NO: 1012774 - RNA, 19 nt, Artificial Sequence
  Description of Artificial Sequence: Synthetic oligonucleotide
cuuugccucgaccauccac

SEQ ID NO: 1012775 - RNA, 19 nt, Artificial Sequence
  Description of Artificial Sequence: Synthetic oligonucleotide
uacacgucuuggccuuagg

SEQ ID NO: 1012776 - RNA, 19 nt, Artificial Sequence
  Description of Artificial Sequence: Synthetic oligonucleotide
aauaaggcacgcagccuca

SEQ ID NO: 1012777 - RNA, 19 nt, Artificial Sequence
  Description of Artificial Sequence: Synthetic oligonucleotide
gagcauccacgguggagcg

SEQ ID NO: 1012778 - RNA, 19 nt, Artificial Sequence
  Description of Artificial Sequence: Synthetic oligonucleotide
cuugggauuuggcaauguc

SEQ ID NO: 1012779 - RNA, 19 nt, Artificial Sequence
  Description of Artificial Sequence: Synthetic oligonucleotide
cugauggaucuucucuagc

SEQ ID NO: 1012780 - RNA, 19 nt, Artificial Sequence
  Description of Artificial Sequence: Synthetic oligonucleotide
ucagagcauucacacuggu

SEQ ID NO: 1012781 - RNA, 19 nt, Artificial Sequence
  Description of Artificial Sequence: Synthetic oligonucleotide
acaauuggcaguggcccag

SEQ ID NO: 1012782 - RNA, 19 nt, Artificial Sequence
  Description of Artificial Sequence: Synthetic oligonucleotide
caaacccggcauaagaaaa

SEQ ID NO: 1012783 - RNA, 19 nt, Artificial Sequence
  Description of Artificial Sequence: Synthetic oligonucleotide
cugagggugcaaaccuucc

SEQ ID NO: 1012784 - RNA, 19 nt, Artificial Sequence
  Description of Artificial Sequence: Synthetic oligonucleotide
acuggucuggauugagccu

SEQ ID NO: 1012785 - RNA, 19 nt, Artificial Sequence
  Description of Artificial Sequence: Synthetic oligonucleotide
aucgcacacuuuuccagca

SEQ ID NO: 1012786 - RNA, 19 nt, Artificial Sequence
  Description of Artificial Sequence: Synthetic oligonucleotide
gggguucuuauauuucuug

SEQ ID NO: 1012787 - RNA, 19 nt, Artificial Sequence
  Description of Artificial Sequence: Synthetic oligonucleotide
gaugaucugagggugcaaa

SEQ ID NO: 1012788 - RNA, 19 nt, Artificial Sequence
  Description of Artificial Sequence: Synthetic oligonucleotide
augccuugggagcuaucag

SEQ ID NO: 1012789 - RNA, 19 nt, Artificial Sequence
  Description of Artificial Sequence: Synthetic oligonucleotide
uugucagcgauguccucgu

SEQ ID NO: 1012790 - RNA, 19 nt, Artificial Sequence
  Description of Artificial Sequence: Synthetic oligonucleotide
uccucguuguugacgucca

SEQ ID NO: 1012791 - RNA, 19 nt, Artificial Sequence
  Description of Artificial Sequence: Synthetic oligonucleotide
agcugagggaugccuuggg

SEQ ID NO: 1012792 - RNA, 19 nt, Artificial Sequence
  Description of Artificial Sequence: Synthetic oligonucleotide
gcugucguggaauaauuuc

SEQ ID NO: 1012793 - RNA, 19 nt, Artificial Sequence
  Description of Artificial Sequence: Synthetic oligonucleotide
uggaaugguccuugaguaa

SEQ ID NO: 1012794 - RNA, 19 nt, Artificial Sequence
  Description of Artificial Sequence: Synthetic oligonucleotide
gugaagaaauuguaccucu

SEQ ID NO: 1012795 - RNA, 19 nt, Artificial Sequence
  Description of Artificial Sequence: Synthetic oligonucleotide
gugugguucuuacagccuc

SEQ ID NO: 1012796 - RNA, 19 nt, Artificial Sequence
  Description of Artificial Sequence: Synthetic oligonucleotide
aauggggaguuuggacaag

SEQ ID NO: 1012797 - RNA, 19 nt, Artificial Sequence
  Description of Artificial Sequence: Synthetic oligonucleotide
caauuggguggcugugcgg

SEQ ID NO: 1012798 - RNA, 19 nt, Artificial Sequence
  Description of Artificial Sequence: Synthetic oligonucleotide
uccgcgccggagaaguacc

SEQ ID NO: 1012799 - RNA, 19 nt, Artificial Sequence
  Description of Artificial Sequence: Synthetic oligonucleotide
ggagagcuccaucucaaug

SEQ ID NO: 1012800 - RNA, 19 nt, Artificial Sequence
  Description of Artificial Sequence: Synthetic oligonucleotide
gacccagugugguucuuac

SEQ ID NO: 1012801 - RNA, 19 nt, Artificial Sequence
  Description of Artificial Sequence: Synthetic oligonucleotide
cucaauggccccaccacca

SEQ ID NO: 1012802 - RNA, 19 nt, Artificial Sequence
  Description of Artificial Sequence: Synthetic oligonucleotide
auugccugguaauccucca

SEQ ID NO: 1012803 - RNA, 19 nt, Artificial Sequence
  Description of Artificial Sequence: Synthetic oligonucleotide
gugcggaaagcucggauga

SEQ ID NO: 1012804 - RNA, 19 nt, Artificial Sequence
  Description of Artificial Sequence: Synthetic oligonucleotide
gguagccacauccccaaug

SEQ ID NO: 1012805 - RNA, 19 nt, Artificial Sequence
  Description of Artificial Sequence: Synthetic oligonucleotide
caacaauugccugguaauc

SEQ ID NO: 1012806 - RNA, 19 nt, Artificial Sequence
  Description of Artificial Sequence: Synthetic oligonucleotide
uaaggcacgcagccucaga

SEQ ID NO: 1012807 - RNA, 19 nt, Artificial Sequence
  Description of Artificial Sequence: Synthetic oligonucleotide
cagugaagaaauuguaccu

SEQ ID NO: 1012808 - RNA, 19 nt, Artificial Sequence
  Description of Artificial Sequence: Synthetic oligonucleotide
ggggaguuuggacaagaug

SEQ ID NO: 1012809 - RNA, 19 nt, Artificial Sequence
  Description of Artificial Sequence: Synthetic oligonucleotide
aaguacccagaagcuucgg

SEQ ID NO: 1012810 - RNA, 19 nt, Artificial Sequence
  Description of Artificial Sequence: Synthetic oligonucleotide
cagagcauucacacugguc

SEQ ID NO: 1012811 - RNA, 19 nt, Artificial Sequence
  Description of Artificial Sequence: Synthetic oligonucleotide
uuguggccccaucauuaga

SEQ ID NO: 1012812 - RNA, 19 nt, Artificial Sequence
  Description of Artificial Sequence: Synthetic oligonucleotide
ugcaaaccuuccuccacau

SEQ ID NO: 1012813 - RNA, 19 nt, Artificial Sequence
  Description of Artificial Sequence: Synthetic oligonucleotide
auguuacucacaagcugag

SEQ ID NO: 1012814 - RNA, 19 nt, Artificial Sequence
  Description of Artificial Sequence: Synthetic oligonucleotide
caauugccugguaauccuc

SEQ ID NO: 1012815 - RNA, 19 nt, Artificial Sequence
  Description of Artificial Sequence: Synthetic oligonucleotide
aggcacgcagccucagaag

SEQ ID NO: 1012816 - RNA, 19 nt, Artificial Sequence
  Description of Artificial Sequence: Synthetic oligonucleotide
cucuaaagcuccacccuga

SEQ ID NO: 1012817 - RNA, 19 nt, Artificial Sequence
  Description of Artificial Sequence: Synthetic oligonucleotide
ucgucuguucucggccucg

SEQ ID NO: 1012818 - RNA, 19 nt, Artificial Sequence
  Description of Artificial Sequence: Synthetic oligonucleotide
acguccacuccguaccaca

SEQ ID NO: 1012819 - RNA, 19 nt, Artificial Sequence
  Description of Artificial Sequence: Synthetic oligonucleotide
cacgaucaugauagcauca

SEQ ID NO: 1012820 - RNA, 19 nt, Artificial Sequence
  Description of Artificial Sequence: Synthetic oligonucleotide
ccaauggggaguuuggaca

SEQ ID NO: 1012821 - RNA, 19 nt, Artificial Sequence
  Description of Artificial Sequence: Synthetic oligonucleotide
cugucaucgcacacuuuuc

SEQ ID NO: 1012822 - RNA, 19 nt, Artificial Sequence
  Description of Artificial Sequence: Synthetic oligonucleotide
ugugggcaucaucuuggaa

SEQ ID NO: 1012823 - RNA, 19 nt, Artificial Sequence
  Description of Artificial Sequence: Synthetic oligonucleotide
gccugguaauccuccaccg

SEQ ID NO: 1012824 - RNA, 19 nt, Artificial Sequence
  Description of Artificial Sequence: Synthetic oligonucleotide
agggccccgacacucgucu

SEQ ID NO: 1012825 - RNA, 19 nt, Artificial Sequence
  Description of Artificial Sequence: Synthetic oligonucleotide
gauaacuggugugggcauc

SEQ ID NO: 1012826 - RNA, 19 nt, Artificial Sequence
  Description of Artificial Sequence: Synthetic oligonucleotide
acgaucaugauagcaucau

SEQ ID NO: 1012827 - RNA, 19 nt, Artificial Sequence
  Description of Artificial Sequence: Synthetic oligonucleotide
ugcaaggaccguucuguuu

SEQ ID NO: 1012828 - RNA, 19 nt, Artificial Sequence
  Description of Artificial Sequence: Synthetic oligonucleotide
acagccaauuggguggcug

SEQ ID NO: 1012829 - RNA, 19 nt, Artificial Sequence
  Description of Artificial Sequence: Synthetic oligonucleotide
ccaauuggguggcugugcg

SEQ ID NO: 1012830 - RNA, 19 nt, Artificial Sequence
  Description of Artificial Sequence: Synthetic oligonucleotide
caucucaauggccccacca

SEQ ID NO: 1012831 - RNA, 19 nt, Artificial Sequence
  Description of Artificial Sequence: Synthetic oligonucleotide
caauggggaguuuggacaa

SEQ ID NO: 1012832 - RNA, 19 nt, Artificial Sequence
  Description of Artificial Sequence: Synthetic oligonucleotide
gcaaucaccuggcaagcac

SEQ ID NO: 1012833 - RNA, 19 nt, Artificial Sequence
  Description of Artificial Sequence: Synthetic oligonucleotide
agccagcguugucacacag

SEQ ID NO: 1012834 - RNA, 19 nt, Artificial Sequence
  Description of Artificial Sequence: Synthetic oligonucleotide
ugguacacgucuuggccuu

SEQ ID NO: 1012835 - RNA, 19 nt, Artificial Sequence
  Description of Artificial Sequence: Synthetic oligonucleotide
uguccaugccacggggacc

SEQ ID NO: 1012836 - RNA, 19 nt, Artificial Sequence
  Description of Artificial Sequence: Synthetic oligonucleotide
cucucgccuccaauuuggg

SEQ ID NO: 1012837 - RNA, 19 nt, Artificial Sequence
  Description of Artificial Sequence: Synthetic oligonucleotide
aagccagcguugucacaca

SEQ ID NO: 1012838 - RNA, 19 nt, Artificial Sequence
  Description of Artificial Sequence: Synthetic oligonucleotide
gcauaugccccaaucaaca

SEQ ID NO: 1012839 - RNA, 19 nt, Artificial Sequence
  Description of Artificial Sequence: Synthetic oligonucleotide
ugauagcaucaugcaagga

SEQ ID NO: 1012840 - RNA, 19 nt, Artificial Sequence
  Description of Artificial Sequence: Synthetic oligonucleotide
gaaugguccuugaguaauc

SEQ ID NO: 1012841 - RNA, 19 nt, Artificial Sequence
  Description of Artificial Sequence: Synthetic oligonucleotide
cucgaccauccacaauaag

SEQ ID NO: 1012842 - RNA, 19 nt, Artificial Sequence
  Description of Artificial Sequence: Synthetic oligonucleotide
gcucggaugaugaucugag

SEQ ID NO: 1012843 - RNA, 19 nt, Artificial Sequence
  Description of Artificial Sequence: Synthetic oligonucleotide
uggggaguuuggacaagau

SEQ ID NO: 1012844 - RNA, 19 nt, Artificial Sequence
  Description of Artificial Sequence: Synthetic oligonucleotide
cuguuucccuggaaugguc

SEQ ID NO: 1012845 - RNA, 19 nt, Artificial Sequence
  Description of Artificial Sequence: Synthetic oligonucleotide
gccucgaccauccacaaua

SEQ ID NO: 1012846 - RNA, 19 nt, Artificial Sequence
  Description of Artificial Sequence: Synthetic oligonucleotide
aagcucggaugaugaucug

SEQ ID NO: 1012847 - RNA, 19 nt, Artificial Sequence
  Description of Artificial Sequence: Synthetic oligonucleotide
agggcugucaucgcacacu

SEQ ID NO: 1012848 - RNA, 19 nt, Artificial Sequence
  Description of Artificial Sequence: Synthetic oligonucleotide
aggagcauccacgguggag

SEQ ID NO: 1012849 - RNA, 19 nt, Artificial Sequence
  Description of Artificial Sequence: Synthetic oligonucleotide
gcaagcacugauguuacuc

SEQ ID NO: 1012850 - RNA, 19 nt, Artificial Sequence
  Description of Artificial Sequence: Synthetic oligonucleotide
agcucggaugaugaucuga

SEQ ID NO: 1012851 - RNA, 19 nt, Artificial Sequence
  Description of Artificial Sequence: Synthetic oligonucleotide
uagacgcaggccggggaag

SEQ ID NO: 1012852 - RNA, 19 nt, Artificial Sequence
  Description of Artificial Sequence: Synthetic oligonucleotide
cuugaguaaucccgaaggu

SEQ ID NO: 1012853 - RNA, 19 nt, Artificial Sequence
  Description of Artificial Sequence: Synthetic oligonucleotide
ggaccgcccacccaagccc

SEQ ID NO: 1012854 - RNA, 19 nt, Artificial Sequence
  Description of Artificial Sequence: Synthetic oligonucleotide
gcacugauguuacucacaa

SEQ ID NO: 1012855 - RNA, 19 nt, Artificial Sequence
  Description of Artificial Sequence: Synthetic oligonucleotide
cuuguccaugccacgggga

SEQ ID NO: 1012856 - RNA, 19 nt, Artificial Sequence
  Description of Artificial Sequence: Synthetic oligonucleotide
gugcaugccgagcccgaag

SEQ ID NO: 1012857 - RNA, 19 nt, Artificial Sequence
  Description of Artificial Sequence: Synthetic oligonucleotide
caguccccucuuucaacag

SEQ ID NO: 1012858 - RNA, 19 nt, Artificial Sequence
  Description of Artificial Sequence: Synthetic oligonucleotide
uccucacgaucaugauagc

SEQ ID NO: 1012859 - RNA, 19 nt, Artificial Sequence
  Description of Artificial Sequence: Synthetic oligonucleotide
gucuguucucggccucggg

SEQ ID NO: 1012860 - RNA, 19 nt, Artificial Sequence
  Description of Artificial Sequence: Synthetic oligonucleotide
auaaggcacgcagccucag

SEQ ID NO: 1012861 - RNA, 19 nt, Artificial Sequence
  Description of Artificial Sequence: Synthetic oligonucleotide
ugccacggggacccagugu

SEQ ID NO: 1012862 - RNA, 19 nt, Artificial Sequence
  Description of Artificial Sequence: Synthetic oligonucleotide
ccucuaaagcuccacccug

SEQ ID NO: 1012863 - RNA, 19 nt, Artificial Sequence
  Description of Artificial Sequence: Synthetic oligonucleotide
accucagcgucuugggauu

SEQ ID NO: 1012864 - RNA, 19 nt, Artificial Sequence
  Description of Artificial Sequence: Synthetic oligonucleotide
ucgcacacuuuuccagcau

SEQ ID NO: 1012865 - RNA, 19 nt, Artificial Sequence
  Description of Artificial Sequence: Synthetic oligonucleotide
cagcgucuugggauuuggc

SEQ ID NO: 1012866 - RNA, 19 nt, Artificial Sequence
  Description of Artificial Sequence: Synthetic oligonucleotide
cucaauggaggcggccuug

SEQ ID NO: 1012867 - RNA, 19 nt, Artificial Sequence
  Description of Artificial Sequence: Synthetic oligonucleotide
uguugacguccacuccgua

SEQ ID NO: 1012868 - RNA, 19 nt, Artificial Sequence
  Description of Artificial Sequence: Synthetic oligonucleotide
ggaauaauuuccagggccu

SEQ ID NO: 1012869 - RNA, 19 nt, Artificial Sequence
  Description of Artificial Sequence: Synthetic oligonucleotide
caaucaccuggcaagcacu

SEQ ID NO: 1012870 - RNA, 19 nt, Artificial Sequence
  Description of Artificial Sequence: Synthetic oligonucleotide
gaagcggcuucagggcccc

SEQ ID NO: 1012871 - RNA, 19 nt, Artificial Sequence
  Description of Artificial Sequence: Synthetic oligonucleotide
ccacggauacaauaaggca

SEQ ID NO: 1012872 - RNA, 19 nt, Artificial Sequence
  Description of Artificial Sequence: Synthetic oligonucleotide
aaggaccguucuguuuccu

SEQ ID NO: 1012873 - RNA, 19 nt, Artificial Sequence
  Description of Artificial Sequence: Synthetic oligonucleotide
agccaauuggguggcugug

SEQ ID NO: 1012874 - RNA, 19 nt, Artificial Sequence
  Description of Artificial Sequence: Synthetic oligonucleotide
acccagugugguucuuaca

SEQ ID NO: 1012875 - RNA, 19 nt, Artificial Sequence
  Description of Artificial Sequence: Synthetic oligonucleotide
cauaaacuguucagcgccu

SEQ ID NO: 1012876 - RNA, 19 nt, Artificial Sequence
  Description of Artificial Sequence: Synthetic oligonucleotide
gggaccgcccacccaagcc

SEQ ID NO: 1012877 - RNA, 19 nt, Artificial Sequence
  Description of Artificial Sequence: Synthetic oligonucleotide
cucgggaccgcccacccaa

SEQ ID NO: 1012878 - RNA, 19 nt, Artificial Sequence
  Description of Artificial Sequence: Synthetic oligonucleotide
ucgggaccgcccacccaag

SEQ ID NO: 1012879 - RNA, 19 nt, Artificial Sequence
  Description of Artificial Sequence: Synthetic oligonucleotide
augccacggggacccagug

SEQ ID NO: 1012880 - RNA, 19 nt, Artificial Sequence
  Description of Artificial Sequence: Synthetic oligonucleotide
caauuggcaguggcccagc

SEQ ID NO: 1012881 - RNA, 19 nt, Artificial Sequence
  Description of Artificial Sequence: Synthetic oligonucleotide
cuagacgcaggccggggaa

SEQ ID NO: 1012882 - RNA, 19 nt, Artificial Sequence
  Description of Artificial Sequence: Synthetic oligonucleotide
caacugagacuccucuaaa

SEQ ID NO: 1012883 - RNA, 19 nt, Artificial Sequence
  Description of Artificial Sequence: Synthetic oligonucleotide
uuguaccucucgccuccaa

SEQ ID NO: 1012884 - RNA, 19 nt, Artificial Sequence
  Description of Artificial Sequence: Synthetic oligonucleotide
ugccgucaccaaccucagc

SEQ ID NO: 1012885 - RNA, 19 nt, Artificial Sequence
  Description of Artificial Sequence: Synthetic oligonucleotide
guuucccuggaaugguccu

SEQ ID NO: 1012886 - RNA, 19 nt, Artificial Sequence
  Description of Artificial Sequence: Synthetic oligonucleotide
augcaaggaccguucuguu

SEQ ID NO: 1012887 - RNA, 19 nt, Artificial Sequence
  Description of Artificial Sequence: Synthetic oligonucleotide
ugccgagcccgaaguuugu

SEQ ID NO: 1012888 - RNA, 19 nt, Artificial Sequence
  Description of Artificial Sequence: Synthetic oligonucleotide
guugcuuugccucgaccau

SEQ ID NO: 1012889 - RNA, 19 nt, Artificial Sequence
  Description of Artificial Sequence: Synthetic oligonucleotide
gacgcaggccggggaagag

SEQ ID NO: 1012890 - RNA, 19 nt, Artificial Sequence
  Description of Artificial Sequence: Synthetic oligonucleotide
agcuaucaguccccucuuu

SEQ ID NO: 1012891 - RNA, 19 nt, Artificial Sequence
  Description of Artificial Sequence: Synthetic oligonucleotide
accguucuguuuccuccau

SEQ ID NO: 1012892 - RNA, 19 nt, Artificial Sequence
  Description of Artificial Sequence: Synthetic oligonucleotide
cagcguugucacacagcug

SEQ ID NO: 1012893 - RNA, 19 nt, Artificial Sequence
  Description of Artificial Sequence: Synthetic oligonucleotide
ggauacaauaaggcacgca

SEQ ID NO: 1012894 - RNA, 19 nt, Artificial Sequence
  Description of Artificial Sequence: Synthetic oligonucleotide
gcugcauuucaaacccggc

SEQ ID NO: 1012895 - RNA, 19 nt, Artificial Sequence
  Description of Artificial Sequence: Synthetic oligonucleotide
ccuuagggcagccagugaa

SEQ ID NO: 1012896 - RNA, 19 nt, Artificial Sequence
  Description of Artificial Sequence: Synthetic oligonucleotide
gguccuugaguaaucccga

SEQ ID NO: 1012897 - RNA, 19 nt, Artificial Sequence
  Description of Artificial Sequence: Synthetic oligonucleotide
caguggcccagcacaucug

SEQ ID NO: 1012898 - RNA, 19 nt, Artificial Sequence
  Description of Artificial Sequence: Synthetic oligonucleotide
aucaccuggcaagcacuga

SEQ ID NO: 1012899 - RNA, 19 nt, Artificial Sequence
  Description of Artificial Sequence: Synthetic oligonucleotide
gaugcgcaccauggcuggc

SEQ ID NO: 1012900 - RNA, 19 nt, Artificial Sequence
  Description of Artificial Sequence: Synthetic oligonucleotide
ugccucgaccauccacaau

SEQ ID NO: 1012901 - RNA, 19 nt, Artificial Sequence
  Description of Artificial Sequence: Synthetic oligonucleotide
agcugucguggaauaauuu

SEQ ID NO: 1012902 - RNA, 19 nt, Artificial Sequence
  Description of Artificial Sequence: Synthetic oligonucleotide
ggagaaguacccagaagcu

SEQ ID NO: 1012903 - RNA, 19 nt, Artificial Sequence
  Description of Artificial Sequence: Synthetic oligonucleotide
ggggcuagacgcaggccgg

SEQ ID NO: 1012904 - RNA, 19 nt, Artificial Sequence
  Description of Artificial Sequence: Synthetic oligonucleotide
gcucaagcucaacauuuaa

SEQ ID NO: 1012905 - RNA, 19 nt, Artificial Sequence
  Description of Artificial Sequence: Synthetic oligonucleotide
gaauaauuuccagggccuu

SEQ ID NO: 1012906 - RNA, 19 nt, Artificial Sequence
  Description of Artificial Sequence: Synthetic oligonucleotide
gccucagcaaucaccuggc

SEQ ID NO: 1012907 - RNA, 19 nt, Artificial Sequence
  Description of Artificial Sequence: Synthetic oligonucleotide
caucaaggaguuucagaau

SEQ ID NO: 1012908 - RNA, 19 nt, Artificial Sequence
  Description of Artificial Sequence: Synthetic oligonucleotide
cgaccauccacaauaagcu

SEQ ID NO: 1012909 - RNA, 19 nt, Artificial Sequence
  Description of Artificial Sequence: Synthetic oligonucleotide
ggaagcggcuucagggccc

SEQ ID NO: 1012910 - RNA, 19 nt, Artificial Sequence
  Description of Artificial Sequence: Synthetic oligonucleotide
guccuugaguaaucccgaa

SEQ ID NO: 1012911 - RNA, 19 nt, Artificial Sequence
  Description of Artificial Sequence: Synthetic oligonucleotide
ccugugcaugccgagcccg

SEQ ID NO: 1012912 - RNA, 19 nt, Artificial Sequence
  Description of Artificial Sequence: Synthetic oligonucleotide
gaccauccacaauaagcuu

SEQ ID NO: 1012913 - RNA, 19 nt, Artificial Sequence
  Description of Artificial Sequence: Synthetic oligonucleotide
ccuggaaugguccuugagu

SEQ ID NO: 1012914 - RNA, 19 nt, Artificial Sequence
  Description of Artificial Sequence: Synthetic oligonucleotide
ggaaugguccuugaguaau

SEQ ID NO: 1012915 - RNA, 19 nt, Artificial Sequence
  Description of Artificial Sequence: Synthetic oligonucleotide
gccaauuggguggcugugc

SEQ ID NO: 1012916 - RNA, 19 nt, Artificial Sequence
  Description of Artificial Sequence: Synthetic oligonucleotide
gucacugagguggugccgu

SEQ ID NO: 1012917 - RNA, 19 nt, Artificial Sequence
  Description of Artificial Sequence: Synthetic oligonucleotide
cucagcgucuugggauuug

SEQ ID NO: 1012918 - RNA, 19 nt, Artificial Sequence
  Description of Artificial Sequence: Synthetic oligonucleotide
gggugcaaaccuuccucca

SEQ ID NO: 1012919 - RNA, 19 nt, Artificial Sequence
  Description of Artificial Sequence: Synthetic oligonucleotide
ccggagaaguacccagaag

SEQ ID NO: 1012920 - RNA, 19 nt, Artificial Sequence
  Description of Artificial Sequence: Synthetic oligonucleotide
uggugccgucaccaaccuc

SEQ ID NO: 1012921 - RNA, 19 nt, Artificial Sequence
  Description of Artificial Sequence: Synthetic oligonucleotide
gccuccacggaggaugaug

SEQ ID NO: 1012922 - RNA, 19 nt, Artificial Sequence
  Description of Artificial Sequence: Synthetic oligonucleotide
cgaucaugauagcaucaug

SEQ ID NO: 1012923 - RNA, 19 nt, Artificial Sequence
  Description of Artificial Sequence: Synthetic oligonucleotide
auuguaccucucgccucca

SEQ ID NO: 1012924 - RNA, 19 nt, Artificial Sequence
  Description of Artificial Sequence: Synthetic oligonucleotide
gcuucggggcuagacgcag

SEQ ID NO: 1012925 - RNA, 19 nt, Artificial Sequence
  Description of Artificial Sequence: Synthetic oligonucleotide
cuagcuugucauagagaau

SEQ ID NO: 1012926 - RNA, 19 nt, Artificial Sequence
  Description of Artificial Sequence: Synthetic oligonucleotide
cccuaucagcaaaguacug

SEQ ID NO: 1012927 - RNA, 19 nt, Artificial Sequence
  Description of Artificial Sequence: Synthetic oligonucleotide
cauggcuggcucccacaca

SEQ ID NO: 1012928 - RNA, 19 nt, Artificial Sequence
  Description of Artificial Sequence: Synthetic oligonucleotide
uggcccuccucacgaucau

SEQ ID NO: 1012929 - RNA, 19 nt, Artificial Sequence
  Description of Artificial Sequence: Synthetic oligonucleotide
caaccaccaucuuggcgaa

SEQ ID NO: 1012930 - RNA, 19 nt, Artificial Sequence
  Description of Artificial Sequence: Synthetic oligonucleotide
gugccgucaccaaccucag

SEQ ID NO: 1012931 - RNA, 19 nt, Artificial Sequence
  Description of Artificial Sequence: Synthetic oligonucleotide
cugugcaugccgagcccga

SEQ ID NO: 1012932 - RNA, 19 nt, Artificial Sequence
  Description of Artificial Sequence: Synthetic oligonucleotide
gaccgcccacccaagccca

SEQ ID NO: 1012933 - RNA, 19 nt, Artificial Sequence
  Description of Artificial Sequence: Synthetic oligonucleotide
ggaaguugucagcgauguc

SEQ ID NO: 1012934 - RNA, 19 nt, Artificial Sequence
  Description of Artificial Sequence: Synthetic oligonucleotide
ugucagcgauguccucguu

SEQ ID NO: 1012935 - RNA, 19 nt, Artificial Sequence
  Description of Artificial Sequence: Synthetic oligonucleotide
agcuucggggcuagacgca

SEQ ID NO: 1012936 - RNA, 19 nt, Artificial Sequence
  Description of Artificial Sequence: Synthetic oligonucleotide
cagccaauuggguggcugu

SEQ ID NO: 1012937 - RNA, 19 nt, Artificial Sequence
  Description of Artificial Sequence: Synthetic oligonucleotide
gccggagaaguacccagaa

SEQ ID NO: 1012938 - RNA, 19 nt, Artificial Sequence
  Description of Artificial Sequence: Synthetic oligonucleotide
ccacaaugcuccgcgccgg

SEQ ID NO: 1012939 - RNA, 19 nt, Artificial Sequence
  Description of Artificial Sequence: Synthetic oligonucleotide
ccucacgaucaugauagca

SEQ ID NO: 1012940 - RNA, 19 nt, Artificial Sequence
  Description of Artificial Sequence: Synthetic oligonucleotide
gggcugcauuucaaacccg

SEQ ID NO: 1012941 - RNA, 19 nt, Artificial Sequence
  Description of Artificial Sequence: Synthetic oligonucleotide
cacaaugcuccgcgccgga

SEQ ID NO: 1012942 - RNA, 19 nt, Artificial Sequence
  Description of Artificial Sequence: Synthetic oligonucleotide
ccgaagguauuuggagagc

SEQ ID NO: 1012943 - RNA, 19 nt, Artificial Sequence
  Description of Artificial Sequence: Synthetic oligonucleotide
ccauccacaauaagcuugu

SEQ ID NO: 1012944 - RNA, 19 nt, Artificial Sequence
  Description of Artificial Sequence: Synthetic oligonucleotide
acggggacccagugugguu

SEQ ID NO: 1012945 - RNA, 19 nt, Artificial Sequence
  Description of Artificial Sequence: Synthetic oligonucleotide
gccagcguugucacacagc

SEQ ID NO: 1012946 - RNA, 19 nt, Artificial Sequence
  Description of Artificial Sequence: Synthetic oligonucleotide
ccacuccguaccacaugcc

SEQ ID NO: 1012947 - RNA, 19 nt, Artificial Sequence
  Description of Artificial Sequence: Synthetic oligonucleotide
gagcuaucaguccccucuu

SEQ ID NO: 1012948 - RNA, 19 nt, Artificial Sequence
  Description of Artificial Sequence: Synthetic oligonucleotide
cagggccccgacacucguc

SEQ ID NO: 1012949 - RNA, 19 nt, Artificial Sequence
  Description of Artificial Sequence: Synthetic oligonucleotide
ggauaacuggugugggcau

SEQ ID NO: 1012950 - RNA, 19 nt, Artificial Sequence
  Description of Artificial Sequence: Synthetic oligonucleotide
cuuggccuuagggcagcca

SEQ ID NO: 1012951 - RNA, 19 nt, Artificial Sequence
  Description of Artificial Sequence: Synthetic oligonucleotide
aagcggcuucagggccccg

SEQ ID NO: 1012952 - RNA, 19 nt, Artificial Sequence
  Description of Artificial Sequence: Synthetic oligonucleotide
ccgacacucgucuguucuc

SEQ ID NO: 1012953 - RNA, 19 nt, Artificial Sequence
  Description of Artificial Sequence: Synthetic oligonucleotide
cagcugucguggaauaauu

SEQ ID NO: 1012954 - RNA, 19 nt, Artificial Sequence
  Description of Artificial Sequence: Synthetic oligonucleotide
gggcuagacgcaggccggg

SEQ ID NO: 1012955 - RNA, 19 nt, Artificial Sequence
  Description of Artificial Sequence: Synthetic oligonucleotide
cuuggagcucagggcuguc

SEQ ID NO: 1012956 - RNA, 19 nt, Artificial Sequence
  Description of Artificial Sequence: Synthetic oligonucleotide
gggguucuugauagucuca

SEQ ID NO: 1012957 - RNA, 19 nt, Artificial Sequence
  Description of Artificial Sequence: Synthetic oligonucleotide
gcucaacauuuaagagggc

SEQ ID NO: 1012958 - RNA, 19 nt, Artificial Sequence
  Description of Artificial Sequence: Synthetic oligonucleotide
cugugcggaaagcucggau

SEQ ID NO: 1012959 - RNA, 19 nt, Artificial Sequence
  Description of Artificial Sequence: Synthetic oligonucleotide
cgagcccgaaguuuguuaa

SEQ ID NO: 1012960 - RNA, 19 nt, Artificial Sequence
  Description of Artificial Sequence: Synthetic oligonucleotide
caugccgagcccgaaguuu

SEQ ID NO: 1012961 - RNA, 19 nt, Artificial Sequence
  Description of Artificial Sequence: Synthetic oligonucleotide
ccaucucaauggccccacc

SEQ ID NO: 1012962 - RNA, 19 nt, Artificial Sequence
  Description of Artificial Sequence: Synthetic oligonucleotide
guggugccgucaccaaccu

SEQ ID NO: 1012963 - RNA, 19 nt, Artificial Sequence
  Description of Artificial Sequence: Synthetic oligonucleotide
cacauccccaauggggagu

SEQ ID NO: 1012964 - RNA, 19 nt, Artificial Sequence
  Description of Artificial Sequence: Synthetic oligonucleotide
cguguggacucugauuuca

SEQ ID NO: 1012965 - RNA, 19 nt, Artificial Sequence
  Description of Artificial Sequence: Synthetic oligonucleotide
cagggucacugagguggug

SEQ ID NO: 1012966 - RNA, 19 nt, Artificial Sequence
  Description of Artificial Sequence: Synthetic oligonucleotide
cacccugaacuuucuugau

SEQ ID NO: 1012967 - RNA, 19 nt, Artificial Sequence
  Description of Artificial Sequence: Synthetic oligonucleotide
cauucacacuggucuggau

SEQ ID NO: 1012968 - RNA, 19 nt, Artificial Sequence
  Description of Artificial Sequence: Synthetic oligonucleotide
caccaaccucagcgucuug

SEQ ID NO: 1012969 - RNA, 19 nt, Artificial Sequence
  Description of Artificial Sequence: Synthetic oligonucleotide
gcggcuucagggccccgac

SEQ ID NO: 1012970 - RNA, 19 nt, Artificial Sequence
  Description of Artificial Sequence: Synthetic oligonucleotide
cccgacacucgucuguucu

SEQ ID NO: 1012971 - RNA, 19 nt, Artificial Sequence
  Description of Artificial Sequence: Synthetic oligonucleotide
ccgcgccggagaaguaccc

SEQ ID NO: 1012972 - RNA, 19 nt, Artificial Sequence
  Description of Artificial Sequence: Synthetic oligonucleotide
ggcccuccucacgaucaug

SEQ ID NO: 1012973 - RNA, 19 nt, Artificial Sequence
  Description of Artificial Sequence: Synthetic oligonucleotide
cgaagguauuuggagagcu

SEQ ID NO: 1012974 - RNA, 19 nt, Artificial Sequence
  Description of Artificial Sequence: Synthetic oligonucleotide
ccucguuguugacguccac

SEQ ID NO: 1012975 - RNA, 19 nt, Artificial Sequence
  Description of Artificial Sequence: Synthetic oligonucleotide
cggggacccagugugguuc

SEQ ID NO: 1012976 - RNA, 19 nt, Artificial Sequence
  Description of Artificial Sequence: Synthetic oligonucleotide
ggccccgacacucgucugu

SEQ ID NO: 1012977 - RNA, 19 nt, Artificial Sequence
  Description of Artificial Sequence: Synthetic oligonucleotide
ccgagcccgaaguuuguua

SEQ ID NO: 1012978 - RNA, 19 nt, Artificial Sequence
  Description of Artificial Sequence: Synthetic oligonucleotide
ggacccagugugguucuua

SEQ ID NO: 1012979 - RNA, 19 nt, Artificial Sequence
  Description of Artificial Sequence: Synthetic oligonucleotide
ggcaagcacugauguuacu

SEQ ID NO: 1012980 - RNA, 19 nt, Artificial Sequence
  Description of Artificial Sequence: Synthetic oligonucleotide
cgucuguucucggccucgg

SEQ ID NO: 1012981 - RNA, 19 nt, Artificial Sequence
  Description of Artificial Sequence: Synthetic oligonucleotide
gggccccgacacucgucug

SEQ ID NO: 1012982 - RNA, 19 nt, Artificial Sequence
  Description of Artificial Sequence: Synthetic oligonucleotide
gcugugcggaaagcucgga

SEQ ID NO: 1012983 - RNA, 19 nt, Artificial Sequence
  Description of Artificial Sequence: Synthetic oligonucleotide
ggggacccagugugguucu

SEQ ID NO: 1012984 - RNA, 19 nt, Artificial Sequence
  Description of Artificial Sequence: Synthetic oligonucleotide
cgucuugggauuuggcaau

SEQ ID NO: 1012985 - RNA, 19 nt, Artificial Sequence
  Description of Artificial Sequence: Synthetic oligonucleotide
ggaugccuugggagcuauc

SEQ ID NO: 1012986 - RNA, 19 nt, Artificial Sequence
  Description of Artificial Sequence: Synthetic oligonucleotide
cgggaccgcccacccaagc

SEQ ID NO: 1012987 - RNA, 19 nt, Artificial Sequence
  Description of Artificial Sequence: Synthetic oligonucleotide
ccccgacacucgucuguuc

SEQ ID NO: 1012988 - RNA, 19 nt, Artificial Sequence
  Description of Artificial Sequence: Synthetic oligonucleotide
gguacacgucuuggccuua

SEQ ID NO: 1012989 - RNA, 19 nt, Artificial Sequence
  Description of Artificial Sequence: Synthetic oligonucleotide
gcgccuccacggaggauga

SEQ ID NO: 1012990 - RNA, 19 nt, Artificial Sequence
  Description of Artificial Sequence: Synthetic oligonucleotide
ccguucuguuuccuccaua

SEQ ID NO: 1012991 - RNA, 19 nt, Artificial Sequence
  Description of Artificial Sequence: Synthetic oligonucleotide
ccuggcaagcacugauguu

SEQ ID NO: 1012992 - RNA, 19 nt, Artificial Sequence
  Description of Artificial Sequence: Synthetic oligonucleotide
gcaugccgagcccgaaguu

SEQ ID NO: 1012993 - RNA, 19 nt, Artificial Sequence
  Description of Artificial Sequence: Synthetic oligonucleotide
ggguagccacauccccaau

SEQ ID NO: 1012994 - RNA, 19 nt, Artificial Sequence
  Description of Artificial Sequence: Synthetic oligonucleotide
gccuccaauuugggucucu

SEQ ID NO: 1012995 - RNA, 19 nt, Artificial Sequence
  Description of Artificial Sequence: Synthetic oligonucleotide
cgcgccggagaaguaccca

SEQ ID NO: 1012996 - RNA, 19 nt, Artificial Sequence
  Description of Artificial Sequence: Synthetic oligonucleotide
ccgcccacccaagcccaca

SEQ ID NO: 1012997 - RNA, 19 nt, Artificial Sequence
  Description of Artificial Sequence: Synthetic oligonucleotide
gccgagcccgaaguuuguu

SEQ ID NO: 1012998 - RNA, 19 nt, Artificial Sequence
  Description of Artificial Sequence: Synthetic oligonucleotide
ccuuggcauaugccccaau

SEQ ID NO: 1012999 - RNA, 19 nt, Artificial Sequence
  Description of Artificial Sequence: Synthetic oligonucleotide
cggccucgggaccgcccac

SEQ ID NO: 1013000 - RNA, 19 nt, Artificial Sequence
  Description of Artificial Sequence: Synthetic oligonucleotide
ccucagcgucuugggauuu

SEQ ID NO: 1013001 - RNA, 19 nt, Artificial Sequence
  Description of Artificial Sequence: Synthetic oligonucleotide
gggacccagugugguucuu

SEQ ID NO: 1013002 - RNA, 19 nt, Artificial Sequence
  Description of Artificial Sequence: Synthetic oligonucleotide
uuggauuuaucauagaaag

SEQ ID NO: 1013003 - RNA, 19 nt, Artificial Sequence
  Description of Artificial Sequence: Synthetic oligonucleotide
uugaacucuucuaagaccg

SEQ ID NO: 1013004 - RNA, 19 nt, Artificial Sequence
  Description of Artificial Sequence: Synthetic oligonucleotide
uuauggaacacucugaggu

SEQ ID NO: 1013005 - RNA, 19 nt, Artificial Sequence
  Description of Artificial Sequence: Synthetic oligonucleotide
aaugguaagcccgaugugc

SEQ ID NO: 1013006 - RNA, 19 nt, Artificial Sequence
  Description of Artificial Sequence: Synthetic oligonucleotide
uuaaaagccguccuaaggc

SEQ ID NO: 1013007 - RNA, 19 nt, Artificial Sequence
  Description of Artificial Sequence: Synthetic oligonucleotide
uaucauagaaagcauuagg

SEQ ID NO: 1013008 - RNA, 19 nt, Artificial Sequence
  Description of Artificial Sequence: Synthetic oligonucleotide
gaauccaugagugagcugg

SEQ ID NO: 1013009 - RNA, 19 nt, Artificial Sequence
  Description of Artificial Sequence: Synthetic oligonucleotide
uucacuacaguccaugcag

SEQ ID NO: 1013010 - RNA, 19 nt, Artificial Sequence
  Description of Artificial Sequence: Synthetic oligonucleotide
aaugguguuagcagggucc

SEQ ID NO: 1013011 - RNA, 19 nt, Artificial Sequence
  Description of Artificial Sequence: Synthetic oligonucleotide
ucuaagaccguagaguugg

SEQ ID NO: 1013012 - RNA, 19 nt, Artificial Sequence
  Description of Artificial Sequence: Synthetic oligonucleotide
ucaaccuugaaccaaaaua

SEQ ID NO: 1013013 - RNA, 19 nt, Artificial Sequence
  Description of Artificial Sequence: Synthetic oligonucleotide
aaugaggccacacugcucu

SEQ ID NO: 1013014 - RNA, 19 nt, Artificial Sequence
  Description of Artificial Sequence: Synthetic oligonucleotide
gucauaaaccacuugaagc

SEQ ID NO: 1013015 - RNA, 19 nt, Artificial Sequence
  Description of Artificial Sequence: Synthetic oligonucleotide
cuccauagcaaccugaggg

SEQ ID NO: 1013016 - RNA, 19 nt, Artificial Sequence
  Description of Artificial Sequence: Synthetic oligonucleotide
aaggagauagagaaagggc

SEQ ID NO: 1013017 - RNA, 19 nt, Artificial Sequence
  Description of Artificial Sequence: Synthetic oligonucleotide
aaaaggaagcuaggaaucc

SEQ ID NO: 1013018 - RNA, 19 nt, Artificial Sequence
  Description of Artificial Sequence: Synthetic oligonucleotide
uugguauguucaaagagcc

SEQ ID NO: 1013019 - RNA, 19 nt, Artificial Sequence
  Description of Artificial Sequence: Synthetic oligonucleotide
uaaggagauagagaaaggg

SEQ ID NO: 1013020 - RNA, 19 nt, Artificial Sequence
  Description of Artificial Sequence: Synthetic oligonucleotide
uucaugaagauccuguggu

SEQ ID NO: 1013021 - RNA, 19 nt, Artificial Sequence
  Description of Artificial Sequence: Synthetic oligonucleotide
uaagguagaauguucauau

SEQ ID NO: 1013022 - RNA, 19 nt, Artificial Sequence
  Description of Artificial Sequence: Synthetic oligonucleotide
gagguuagaaccacaaugg

SEQ ID NO: 1013023 - RNA, 19 nt, Artificial Sequence
  Description of Artificial Sequence: Synthetic oligonucleotide
aucauagaaagcauuaggg

SEQ ID NO: 1013024 - RNA, 19 nt, Artificial Sequence
  Description of Artificial Sequence: Synthetic oligonucleotide
uuuguaaaaggcacgauuu

SEQ ID NO: 1013025 - RNA, 19 nt, Artificial Sequence
  Description of Artificial Sequence: Synthetic oligonucleotide
uuugauuccuuccuagcug

SEQ ID NO: 1013026 - RNA, 19 nt, Artificial Sequence
  Description of Artificial Sequence: Synthetic oligonucleotide
auucuagacacccuuccac

SEQ ID NO: 1013027 - RNA, 19 nt, Artificial Sequence
  Description of Artificial Sequence: Synthetic oligonucleotide
aaauugccuugccaguggc

SEQ ID NO: 1013028 - RNA, 19 nt, Artificial Sequence
  Description of Artificial Sequence: Synthetic oligonucleotide
cuuaaaagccguccuaagg

SEQ ID NO: 1013029 - RNA, 19 nt, Artificial Sequence
  Description of Artificial Sequence: Synthetic oligonucleotide
aguuauggaacacucugag

SEQ ID NO: 1013030 - RNA, 19 nt, Artificial Sequence
  Description of Artificial Sequence: Synthetic oligonucleotide
gagcuguucagucuggagg

SEQ ID NO: 1013031 - RNA, 19 nt, Artificial Sequence
  Description of Artificial Sequence: Synthetic oligonucleotide
uggcacauaggcuuaaaag

SEQ ID NO: 1013032 - RNA, 19 nt, Artificial Sequence
  Description of Artificial Sequence: Synthetic oligonucleotide
cuaguuauggaacacucug

SEQ ID NO: 1013033 - RNA, 19 nt, Artificial Sequence
  Description of Artificial Sequence: Synthetic oligonucleotide
gaagcuaggaauccaugag

SEQ ID NO: 1013034 - RNA, 19 nt, Artificial Sequence
  Description of Artificial Sequence: Synthetic oligonucleotide
ucugaaauacccagagagc

SEQ ID NO: 1013035 - RNA, 19 nt, Artificial Sequence
  Description of Artificial Sequence: Synthetic oligonucleotide
ucgagcaucaaccuugaac

SEQ ID NO: 1013036 - RNA, 19 nt, Artificial Sequence
  Description of Artificial Sequence: Synthetic oligonucleotide
auuguaugcucacacaccu

SEQ ID NO: 1013037 - RNA, 19 nt, Artificial Sequence
  Description of Artificial Sequence: Synthetic oligonucleotide
uuguaagguagaauguuca

SEQ ID NO: 1013038 - RNA, 19 nt, Artificial Sequence
  Description of Artificial Sequence: Synthetic oligonucleotide
uagaauguucauauggaaa

SEQ ID NO: 1013039 - RNA, 19 nt, Artificial Sequence
  Description of Artificial Sequence: Synthetic oligonucleotide
acaauggucauuaucuggg

SEQ ID NO: 1013040 - RNA, 19 nt, Artificial Sequence
  Description of Artificial Sequence: Synthetic oligonucleotide
uauugugggagacagcauc

SEQ ID NO: 1013041 - RNA, 19 nt, Artificial Sequence
  Description of Artificial Sequence: Synthetic oligonucleotide
auaggcuuaaaagccgucc

SEQ ID NO: 1013042 - RNA, 19 nt, Artificial Sequence
  Description of Artificial Sequence: Synthetic oligonucleotide
aagaccguagaguugguau

SEQ ID NO: 1013043 - RNA, 19 nt, Artificial Sequence
  Description of Artificial Sequence: Synthetic oligonucleotide
accuaaugguguuagcagg

SEQ ID NO: 1013044 - RNA, 19 nt, Artificial Sequence
  Description of Artificial Sequence: Synthetic oligonucleotide
uguaugcucacacaccuaa

SEQ ID NO: 1013045 - RNA, 19 nt, Artificial Sequence
  Description of Artificial Sequence: Synthetic oligonucleotide
uuauccagcugaacuagcc

SEQ ID NO: 1013046 - RNA, 19 nt, Artificial Sequence
  Description of Artificial Sequence: Synthetic oligonucleotide
uguucauauggaaaaggaa

SEQ ID NO: 1013047 - RNA, 19 nt, Artificial Sequence
  Description of Artificial Sequence: Synthetic oligonucleotide
uuaucauagaaagcauuag

SEQ ID NO: 1013048 - RNA, 19 nt, Artificial Sequence
  Description of Artificial Sequence: Synthetic oligonucleotide
auauguauucugcguacuc

SEQ ID NO: 1013049 - RNA, 19 nt, Artificial Sequence
  Description of Artificial Sequence: Synthetic oligonucleotide
uaaaagccguccuaaggcc

SEQ ID NO: 1013050 - RNA, 19 nt, Artificial Sequence
  Description of Artificial Sequence: Synthetic oligonucleotide
aauggucauuaucugggga

SEQ ID NO: 1013051 - RNA, 19 nt, Artificial Sequence
  Description of Artificial Sequence: Synthetic oligonucleotide
aauaugacuuggauuuauc

SEQ ID NO: 1013052 - RNA, 19 nt, Artificial Sequence
  Description of Artificial Sequence: Synthetic oligonucleotide
cuagcuggcuauuuguaag

SEQ ID NO: 1013053 - RNA, 19 nt, Artificial Sequence
  Description of Artificial Sequence: Synthetic oligonucleotide
cacauaggcuuaaaagccg

SEQ ID NO: 1013054 - RNA, 19 nt, Artificial Sequence
  Description of Artificial Sequence: Synthetic oligonucleotide
cugguauauguauucugcg

SEQ ID NO: 1013055 - RNA, 19 nt, Artificial Sequence
  Description of Artificial Sequence: Synthetic oligonucleotide
uguacugggagcuguucag

SEQ ID NO: 1013056 - RNA, 19 nt, Artificial Sequence
  Description of Artificial Sequence: Synthetic oligonucleotide
ucuacaugacacucggcug

SEQ ID NO: 1013057 - RNA, 19 nt, Artificial Sequence
  Description of Artificial Sequence: Synthetic oligonucleotide
uuagcaggguccuggcucg

SEQ ID NO: 1013058 - RNA, 19 nt, Artificial Sequence
  Description of Artificial Sequence: Synthetic oligonucleotide
ugugagguuagaaccacaa

SEQ ID NO: 1013059 - RNA, 19 nt, Artificial Sequence
  Description of Artificial Sequence: Synthetic oligonucleotide
cauuguaugcucacacacc

SEQ ID NO: 1013060 - RNA, 19 nt, Artificial Sequence
  Description of Artificial Sequence: Synthetic oligonucleotide
uuucacuacaguccaugca

SEQ ID NO: 1013061 - RNA, 19 nt, Artificial Sequence
  Description of Artificial Sequence: Synthetic oligonucleotide
auguucaaagagccacugc

SEQ ID NO: 1013062 - RNA, 19 nt, Artificial Sequence
  Description of Artificial Sequence: Synthetic oligonucleotide
ucucaagccucaaugguaa

SEQ ID NO: 1013063 - RNA, 19 nt, Artificial Sequence
  Description of Artificial Sequence: Synthetic oligonucleotide
uuuacaccuggcugcagag

SEQ ID NO: 1013064 - RNA, 19 nt, Artificial Sequence
  Description of Artificial Sequence: Synthetic oligonucleotide
caaucuuggucauaaacca

SEQ ID NO: 1013065 - RNA, 19 nt, Artificial Sequence
  Description of Artificial Sequence: Synthetic oligonucleotide
uugcauuguaugcucacac

SEQ ID NO: 1013066 - RNA, 19 nt, Artificial Sequence
  Description of Artificial Sequence: Synthetic oligonucleotide
ugguauauguauucugcgu

SEQ ID NO: 1013067 - RNA, 19 nt, Artificial Sequence
  Description of Artificial Sequence: Synthetic oligonucleotide
uuguugaggaggucugagg

SEQ ID NO: 1013068 - RNA, 19 nt, Artificial Sequence
  Description of Artificial Sequence: Synthetic oligonucleotide
ucuuuguagggcacuguca

SEQ ID NO: 1013069 - RNA, 19 nt, Artificial Sequence
  Description of Artificial Sequence: Synthetic oligonucleotide
uaguuauggaacacucuga

SEQ ID NO: 1013070 - RNA, 19 nt, Artificial Sequence
  Description of Artificial Sequence: Synthetic oligonucleotide
acuugacuccccuuggcag

SEQ ID NO: 1013071 - RNA, 19 nt, Artificial Sequence
  Description of Artificial Sequence: Synthetic oligonucleotide
caccuaauggcucaucuug

SEQ ID NO: 1013072 - RNA, 19 nt, Artificial Sequence
  Description of Artificial Sequence: Synthetic oligonucleotide
cauccuuuacaccuggcug

SEQ ID NO: 1013073 - RNA, 19 nt, Artificial Sequence
  Description of Artificial Sequence: Synthetic oligonucleotide
cugauagugaggcauuuuc

SEQ ID NO: 1013074 - RNA, 19 nt, Artificial Sequence
  Description of Artificial Sequence: Synthetic oligonucleotide
caagccucaaugguaagcc

SEQ ID NO: 1013075 - RNA, 19 nt, Artificial Sequence
  Description of Artificial Sequence: Synthetic oligonucleotide
aacucuucuaagaccguag

SEQ ID NO: 1013076 - RNA, 19 nt, Artificial Sequence
  Description of Artificial Sequence: Synthetic oligonucleotide
cuuucacuacaguccaugc

SEQ ID NO: 1013077 - RNA, 19 nt, Artificial Sequence
  Description of Artificial Sequence: Synthetic oligonucleotide
caccuaaugguguuagcag

SEQ ID NO: 1013078 - RNA, 19 nt, Artificial Sequence
  Description of Artificial Sequence: Synthetic oligonucleotide
uacuuauccagcugaacua

SEQ ID NO: 1013079 - RNA, 19 nt, Artificial Sequence
  Description of Artificial Sequence: Synthetic oligonucleotide
uuagggacaaguguugauc

SEQ ID NO: 1013080 - RNA, 19 nt, Artificial Sequence
  Description of Artificial Sequence: Synthetic oligonucleotide
augguaagcccgaugugcc

SEQ ID NO: 1013081 - RNA, 19 nt, Artificial Sequence
  Description of Artificial Sequence: Synthetic oligonucleotide
ucaccccugauagugaggc

SEQ ID NO: 1013082 - RNA, 19 nt, Artificial Sequence
  Description of Artificial Sequence: Synthetic oligonucleotide
cuuuggaagcauguacugg

SEQ ID NO: 1013083 - RNA, 19 nt, Artificial Sequence
  Description of Artificial Sequence: Synthetic oligonucleotide
caaauugccuugccagugg

SEQ ID NO: 1013084 - RNA, 19 nt, Artificial Sequence
  Description of Artificial Sequence: Synthetic oligonucleotide
uccuaaggccaauaccacc

SEQ ID NO: 1013085 - RNA, 19 nt, Artificial Sequence
  Description of Artificial Sequence: Synthetic oligonucleotide
acuuauccagcugaacuag

SEQ ID NO: 1013086 - RNA, 19 nt, Artificial Sequence
  Description of Artificial Sequence: Synthetic oligonucleotide
uucuaagaccguagaguug

SEQ ID NO: 1013087 - RNA, 19 nt, Artificial Sequence
  Description of Artificial Sequence: Synthetic oligonucleotide
uauucugcguacucaucca

SEQ ID NO: 1013088 - RNA, 19 nt, Artificial Sequence
  Description of Artificial Sequence: Synthetic oligonucleotide
guuagcaggguccuggcuc

SEQ ID NO: 1013089 - RNA, 19 nt, Artificial Sequence
  Description of Artificial Sequence: Synthetic oligonucleotide
uugcgguacuuccacagcu

SEQ ID NO: 1013090 - RNA, 19 nt, Artificial Sequence
  Description of Artificial Sequence: Synthetic oligonucleotide
agccacaacauccccagcu

SEQ ID NO: 1013091 - RNA, 19 nt, Artificial Sequence
  Description of Artificial Sequence: Synthetic oligonucleotide
ugcauuguaugcucacaca

SEQ ID NO: 1013092 - RNA, 19 nt, Artificial Sequence
  Description of Artificial Sequence: Synthetic oligonucleotide
ucaagccucaaugguaagc

SEQ ID NO: 1013093 - RNA, 19 nt, Artificial Sequence
  Description of Artificial Sequence: Synthetic oligonucleotide
caugcuuugugucugugca

SEQ ID NO: 1013094 - RNA, 19 nt, Artificial Sequence
  Description of Artificial Sequence: Synthetic oligonucleotide
uauuguaaugaggccacac

SEQ ID NO: 1013095 - RNA, 19 nt, Artificial Sequence
  Description of Artificial Sequence: Synthetic oligonucleotide
aaugggcaucugaaauacc

SEQ ID NO: 1013096 - RNA, 19 nt, Artificial Sequence
  Description of Artificial Sequence: Synthetic oligonucleotide
uguaagguagaauguucau

SEQ ID NO: 1013097 - RNA, 19 nt, Artificial Sequence
  Description of Artificial Sequence: Synthetic oligonucleotide
ucucaccuaaugguguuag

SEQ ID NO: 1013098 - RNA, 19 nt, Artificial Sequence
  Description of Artificial Sequence: Synthetic oligonucleotide
acuacaguccaugcagccg

SEQ ID NO: 1013099 - RNA, 19 nt, Artificial Sequence
  Description of Artificial Sequence: Synthetic oligonucleotide
ucacacaccuaauggcuca

SEQ ID NO: 1013100 - RNA, 19 nt, Artificial Sequence
  Description of Artificial Sequence: Synthetic oligonucleotide
ugggcaucugaaauaccca

SEQ ID NO: 1013101 - RNA, 19 nt, Artificial Sequence
  Description of Artificial Sequence: Synthetic oligonucleotide
agaccguagaguugguaug

SEQ ID NO: 1013102 - RNA, 19 nt, Artificial Sequence
  Description of Artificial Sequence: Synthetic oligonucleotide
ucucaccccugauagugag

SEQ ID NO: 1013103 - RNA, 19 nt, Artificial Sequence
  Description of Artificial Sequence: Synthetic oligonucleotide
accuugaaccaaaauauga

SEQ ID NO: 1013104 - RNA, 19 nt, Artificial Sequence
  Description of Artificial Sequence: Synthetic oligonucleotide
ugcuuugugucugugcaca

SEQ ID NO: 1013105 - RNA, 19 nt, Artificial Sequence
  Description of Artificial Sequence: Synthetic oligonucleotide
uauggaacacucugagguc

SEQ ID NO: 1013106 - RNA, 19 nt, Artificial Sequence
  Description of Artificial Sequence: Synthetic oligonucleotide
auguucauauggaaaagga

SEQ ID NO: 1013107 - RNA, 19 nt, Artificial Sequence
  Description of Artificial Sequence: Synthetic oligonucleotide
agcacaggcaaauugccuu

SEQ ID NO: 1013108 - RNA, 19 nt, Artificial Sequence
  Description of Artificial Sequence: Synthetic oligonucleotide
auaccaccuuucuuuguag

SEQ ID NO: 1013109 - RNA, 19 nt, Artificial Sequence
  Description of Artificial Sequence: Synthetic oligonucleotide
agucguagagggugacugg

SEQ ID NO: 1013110 - RNA, 19 nt, Artificial Sequence
  Description of Artificial Sequence: Synthetic oligonucleotide
uuccuagcuggcuauuugu

SEQ ID NO: 1013111 - RNA, 19 nt, Artificial Sequence
  Description of Artificial Sequence: Synthetic oligonucleotide
ugcgcugguauauguauuc

SEQ ID NO: 1013112 - RNA, 19 nt, Artificial Sequence
  Description of Artificial Sequence: Synthetic oligonucleotide
uaaugguguuagcaggguc

SEQ ID NO: 1013113 - RNA, 19 nt, Artificial Sequence
  Description of Artificial Sequence: Synthetic oligonucleotide
agcuaggaauccaugagug

SEQ ID NO: 1013114 - RNA, 19 nt, Artificial Sequence
  Description of Artificial Sequence: Synthetic oligonucleotide
cuuauccagcugaacuagc

SEQ ID NO: 1013115 - RNA, 19 nt, Artificial Sequence
  Description of Artificial Sequence: Synthetic oligonucleotide
agcaccucacagcaccccg

SEQ ID NO: 1013116 - RNA, 19 nt, Artificial Sequence
  Description of Artificial Sequence: Synthetic oligonucleotide
auguauucugcguacucau

SEQ ID NO: 1013117 - RNA, 19 nt, Artificial Sequence
  Description of Artificial Sequence: Synthetic oligonucleotide
ggugacugggcuauugugg

SEQ ID NO: 1013118 - RNA, 19 nt, Artificial Sequence
  Description of Artificial Sequence: Synthetic oligonucleotide
gauucuagacacccuucca

SEQ ID NO: 1013119 - RNA, 19 nt, Artificial Sequence
  Description of Artificial Sequence: Synthetic oligonucleotide
ugucaugucugcccagcac

SEQ ID NO: 1013120 - RNA, 19 nt, Artificial Sequence
  Description of Artificial Sequence: Synthetic oligonucleotide
caugagugagcugggacag

SEQ ID NO: 1013121 - RNA, 19 nt, Artificial Sequence
  Description of Artificial Sequence: Synthetic oligonucleotide
aguccugugcccacauugc

SEQ ID NO: 1013122 - RNA, 19 nt, Artificial Sequence
  Description of Artificial Sequence: Synthetic oligonucleotide
uguccuugcgguacuucca

SEQ ID NO: 1013123 - RNA, 19 nt, Artificial Sequence
  Description of Artificial Sequence: Synthetic oligonucleotide
ccuggcucgagcaucaacc

SEQ ID NO: 1013124 - RNA, 19 nt, Artificial Sequence
  Description of Artificial Sequence: Synthetic oligonucleotide
ugaagcuaaaaugggcauc

SEQ ID NO: 1013125 - RNA, 19 nt, Artificial Sequence
  Description of Artificial Sequence: Synthetic oligonucleotide
aggacucaguuucuguuga

SEQ ID NO: 1013126 - RNA, 19 nt, Artificial Sequence
  Description of Artificial Sequence: Synthetic oligonucleotide
gcacauaggcuuaaaagcc

SEQ ID NO: 1013127 - RNA, 19 nt, Artificial Sequence
  Description of Artificial Sequence: Synthetic oligonucleotide
cuugaaccaaaauaugacu

SEQ ID NO: 1013128 - RNA, 19 nt, Artificial Sequence
  Description of Artificial Sequence: Synthetic oligonucleotide
gcauuguaugcucacacac

SEQ ID NO: 1013129 - RNA, 19 nt, Artificial Sequence
  Description of Artificial Sequence: Synthetic oligonucleotide
uguauucugcguacucauc

SEQ ID NO: 1013130 - RNA, 19 nt, Artificial Sequence
  Description of Artificial Sequence: Synthetic oligonucleotide
ugcgguacuuccacagcug

SEQ ID NO: 1013131 - RNA, 19 nt, Artificial Sequence
  Description of Artificial Sequence: Synthetic oligonucleotide
ugguauguucaaagagcca

SEQ ID NO: 1013132 - RNA, 19 nt, Artificial Sequence
  Description of Artificial Sequence: Synthetic oligonucleotide
cuacuuauccagcugaacu

SEQ ID NO: 1013133 - RNA, 19 nt, Artificial Sequence
  Description of Artificial Sequence: Synthetic oligonucleotide
aauccaugagugagcuggg

SEQ ID NO: 1013134 - RNA, 19 nt, Artificial Sequence
  Description of Artificial Sequence: Synthetic oligonucleotide
ggauucuagacacccuucc

SEQ ID NO: 1013135 - RNA, 19 nt, Artificial Sequence
  Description of Artificial Sequence: Synthetic oligonucleotide
uugguagggcacauauuuc

SEQ ID NO: 1013136 - RNA, 19 nt, Artificial Sequence
  Description of Artificial Sequence: Synthetic oligonucleotide
gucguagagggugacuggg

SEQ ID NO: 1013137 - RNA, 19 nt, Artificial Sequence
  Description of Artificial Sequence: Synthetic oligonucleotide
uucaugcuguggcagucgu

SEQ ID NO: 1013138 - RNA, 19 nt, Artificial Sequence
  Description of Artificial Sequence: Synthetic oligonucleotide
gcugguauauguauucugc

SEQ ID NO: 1013139 - RNA, 19 nt, Artificial Sequence
  Description of Artificial Sequence: Synthetic oligonucleotide
auuagggacaaguguugau

SEQ ID NO: 1013140 - RNA, 19 nt, Artificial Sequence
  Description of Artificial Sequence: Synthetic oligonucleotide
cugguugcccuucaugcug

SEQ ID NO: 1013141 - RNA, 19 nt, Artificial Sequence
  Description of Artificial Sequence: Synthetic oligonucleotide
ucuacuuauccagcugaac

SEQ ID NO: 1013142 - RNA, 19 nt, Artificial Sequence
  Description of Artificial Sequence: Synthetic oligonucleotide
accuaauggcucaucuugg

SEQ ID NO: 1013143 - RNA, 19 nt, Artificial Sequence
  Description of Artificial Sequence: Synthetic oligonucleotide
uccccuucucccacgggag

SEQ ID NO: 1013144 - RNA, 19 nt, Artificial Sequence
  Description of Artificial Sequence: Synthetic oligonucleotide
ggggagacauccuuuacac

SEQ ID NO: 1013145 - RNA, 19 nt, Artificial Sequence
  Description of Artificial Sequence: Synthetic oligonucleotide
cuuccuagcuggcuauuug

SEQ ID NO: 1013146 - RNA, 19 nt, Artificial Sequence
  Description of Artificial Sequence: Synthetic oligonucleotide
gcuauugugggagacagca

SEQ ID NO: 1013147 - RNA, 19 nt, Artificial Sequence
  Description of Artificial Sequence: Synthetic oligonucleotide
uggucauuaucuggggaug

SEQ ID NO: 1013148 - RNA, 19 nt, Artificial Sequence
  Description of Artificial Sequence: Synthetic oligonucleotide
auaaaccacuugaagcucu

SEQ ID NO: 1013149 - RNA, 19 nt, Artificial Sequence
  Description of Artificial Sequence: Synthetic oligonucleotide
cucgggagccuuuucugag

SEQ ID NO: 1013150 - RNA, 19 nt, Artificial Sequence
  Description of Artificial Sequence: Synthetic oligonucleotide
ugcuugcauuguaugcuca

SEQ ID NO: 1013151 - RNA, 19 nt, Artificial Sequence
  Description of Artificial Sequence: Synthetic oligonucleotide
ucguagagggugacugggc

SEQ ID NO: 1013152 - RNA, 19 nt, Artificial Sequence
  Description of Artificial Sequence: Synthetic oligonucleotide
ucugugagguuagaaccac

SEQ ID NO: 1013153 - RNA, 19 nt, Artificial Sequence
  Description of Artificial Sequence: Synthetic oligonucleotide
ggaagcuaggaauccauga

SEQ ID NO: 1013154 - RNA, 19 nt, Artificial Sequence
  Description of Artificial Sequence: Synthetic oligonucleotide
uucugcguacucauccauc

SEQ ID NO: 1013155 - RNA, 19 nt, Artificial Sequence
  Description of Artificial Sequence: Synthetic oligonucleotide
agggacaaguguugaucag

SEQ ID NO: 1013156 - RNA, 19 nt, Artificial Sequence
  Description of Artificial Sequence: Synthetic oligonucleotide
agugggcuuucauuguccu

SEQ ID NO: 1013157 - RNA, 19 nt, Artificial Sequence
  Description of Artificial Sequence: Synthetic oligonucleotide
cucacacaccuaauggcuc

SEQ ID NO: 1013158 - RNA, 19 nt, Artificial Sequence
  Description of Artificial Sequence: Synthetic oligonucleotide
ugugcccacauugcgaauc

SEQ ID NO: 1013159 - RNA, 19 nt, Artificial Sequence
  Description of Artificial Sequence: Synthetic oligonucleotide
aggaauccaugagugagcu

SEQ ID NO: 1013160 - RNA, 19 nt, Artificial Sequence
  Description of Artificial Sequence: Synthetic oligonucleotide
cagucguagagggugacug

SEQ ID NO: 1013161 - RNA, 19 nt, Artificial Sequence
  Description of Artificial Sequence: Synthetic oligonucleotide
guugaggggagccucggga

SEQ ID NO: 1013162 - RNA, 19 nt, Artificial Sequence
  Description of Artificial Sequence: Synthetic oligonucleotide
cuuucuuuguagggcacug

SEQ ID NO: 1013163 - RNA, 19 nt, Artificial Sequence
  Description of Artificial Sequence: Synthetic oligonucleotide
cuugguagggcacauauuu

SEQ ID NO: 1013164 - RNA, 19 nt, Artificial Sequence
  Description of Artificial Sequence: Synthetic oligonucleotide
cuugcgguacuuccacagc

SEQ ID NO: 1013165 - RNA, 19 nt, Artificial Sequence
  Description of Artificial Sequence: Synthetic oligonucleotide
gggcaucugaaauacccag

SEQ ID NO: 1013166 - RNA, 19 nt, Artificial Sequence
  Description of Artificial Sequence: Synthetic oligonucleotide
aguugaggggagccucggg

SEQ ID NO: 1013167 - RNA, 19 nt, Artificial Sequence
  Description of Artificial Sequence: Synthetic oligonucleotide
gcccagacagcccugaagc

SEQ ID NO: 1013168 - RNA, 19 nt, Artificial Sequence
  Description of Artificial Sequence: Synthetic oligonucleotide
cucaaugguaagcccgaug

SEQ ID NO: 1013169 - RNA, 19 nt, Artificial Sequence
  Description of Artificial Sequence: Synthetic oligonucleotide
ugugcacaguccugugccc

SEQ ID NO: 1013170 - RNA, 19 nt, Artificial Sequence
  Description of Artificial Sequence: Synthetic oligonucleotide
gaagcauguacugggagcu

SEQ ID NO: 1013171 - RNA, 19 nt, Artificial Sequence
  Description of Artificial Sequence: Synthetic oligonucleotide
acucgcuucaggguuccgg

SEQ ID NO: 1013172 - RNA, 19 nt, Artificial Sequence
  Description of Artificial Sequence: Synthetic oligonucleotide
uccccacuggauucuagac

SEQ ID NO: 1013173 - RNA, 19 nt, Artificial Sequence
  Description of Artificial Sequence: Synthetic oligonucleotide
caaguguugaucagcaggu

SEQ ID NO: 1013174 - RNA, 19 nt, Artificial Sequence
  Description of Artificial Sequence: Synthetic oligonucleotide
cuuuacaccuggcugcaga

SEQ ID NO: 1013175 - RNA, 19 nt, Artificial Sequence
  Description of Artificial Sequence: Synthetic oligonucleotide
cauaaaccacuugaagcuc

SEQ ID NO: 1013176 - RNA, 19 nt, Artificial Sequence
  Description of Artificial Sequence: Synthetic oligonucleotide
ugggacagcacaggggcug

SEQ ID NO: 1013177 - RNA, 19 nt, Artificial Sequence
  Description of Artificial Sequence: Synthetic oligonucleotide
accccguuccucucugagg

SEQ ID NO: 1013178 - RNA, 19 nt, Artificial Sequence
  Description of Artificial Sequence: Synthetic oligonucleotide
auugugggagacagcauca

SEQ ID NO: 1013179 - RNA, 19 nt, Artificial Sequence
  Description of Artificial Sequence: Synthetic oligonucleotide
uguuccaggcagccucccc

SEQ ID NO: 1013180 - RNA, 19 nt, Artificial Sequence
  Description of Artificial Sequence: Synthetic oligonucleotide
agauagagaaagggcuuug

SEQ ID NO: 1013181 - RNA, 19 nt, Artificial Sequence
  Description of Artificial Sequence: Synthetic oligonucleotide
ucggcugcuugcauuguau

SEQ ID NO: 1013182 - RNA, 19 nt, Artificial Sequence
  Description of Artificial Sequence: Synthetic oligonucleotide
ucgggagccuuuucugagc

SEQ ID NO: 1013183 - RNA, 19 nt, Artificial Sequence
  Description of Artificial Sequence: Synthetic oligonucleotide
ccugaagcuaaaaugggca

SEQ ID NO: 1013184 - RNA, 19 nt, Artificial Sequence
  Description of Artificial Sequence: Synthetic oligonucleotide
ugcccauagguccccuucu

SEQ ID NO: 1013185 - RNA, 19 nt, Artificial Sequence
  Description of Artificial Sequence: Synthetic oligonucleotide
guaaugaggccacacugcu

SEQ ID NO: 1013186 - RNA, 19 nt, Artificial Sequence
  Description of Artificial Sequence: Synthetic oligonucleotide
gcuuaaaagccguccuaag

SEQ ID NO: 1013187 - RNA, 19 nt, Artificial Sequence
  Description of Artificial Sequence: Synthetic oligonucleotide
gcuuuggaagcauguacug

SEQ ID NO: 1013188 - RNA, 19 nt, Artificial Sequence
  Description of Artificial Sequence: Synthetic oligonucleotide
uaaaccacuugaagcucuu

SEQ ID NO: 1013189 - RNA, 19 nt, Artificial Sequence
  Description of Artificial Sequence: Synthetic oligonucleotide
accuuggugcccauagguc

SEQ ID NO: 1013190 - RNA, 19 nt, Artificial Sequence
  Description of Artificial Sequence: Synthetic oligonucleotide
acauaggcuuaaaagccgu

SEQ ID NO: 1013191 - RNA, 19 nt, Artificial Sequence
  Description of Artificial Sequence: Synthetic oligonucleotide
uggucacuuucacuacagu

SEQ ID NO: 1013192 - RNA, 19 nt, Artificial Sequence
  Description of Artificial Sequence: Synthetic oligonucleotide
cuucuaagaccguagaguu

SEQ ID NO: 1013193 - RNA, 19 nt, Artificial Sequence
  Description of Artificial Sequence: Synthetic oligonucleotide
cauaggcuuaaaagccguc

SEQ ID NO: 1013194 - RNA, 19 nt, Artificial Sequence
  Description of Artificial Sequence: Synthetic oligonucleotide
guagaguugguauguucaa

SEQ ID NO: 1013195 - RNA, 19 nt, Artificial Sequence
  Description of Artificial Sequence: Synthetic oligonucleotide
uaaggccaauaccaccuuu

SEQ ID NO: 1013196 - RNA, 19 nt, Artificial Sequence
  Description of Artificial Sequence: Synthetic oligonucleotide
auucugcguacucauccau

SEQ ID NO: 1013197 - RNA, 19 nt, Artificial Sequence
  Description of Artificial Sequence: Synthetic oligonucleotide
cugcuugcauuguaugcuc

SEQ ID NO: 1013198 - RNA, 19 nt, Artificial Sequence
  Description of Artificial Sequence: Synthetic oligonucleotide
aguccaugcagccgccacu

SEQ ID NO: 1013199 - RNA, 19 nt, Artificial Sequence
  Description of Artificial Sequence: Synthetic oligonucleotide
cucaccuaaugguguuagc

SEQ ID NO: 1013200 - RNA, 19 nt, Artificial Sequence
  Description of Artificial Sequence: Synthetic oligonucleotide
uguggcagucguagagggu

SEQ ID NO: 1013201 - RNA, 19 nt, Artificial Sequence
  Description of Artificial Sequence: Synthetic oligonucleotide
accugaggggcuuguugag

SEQ ID NO: 1013202 - RNA, 19 nt, Artificial Sequence
  Description of Artificial Sequence: Synthetic oligonucleotide
cucaccccugauagugagg

SEQ ID NO: 1013203 - RNA, 19 nt, Artificial Sequence
  Description of Artificial Sequence: Synthetic oligonucleotide
gagcaucaaccuugaacca

SEQ ID NO: 1013204 - RNA, 19 nt, Artificial Sequence
  Description of Artificial Sequence: Synthetic oligonucleotide
agcaucaaccuugaaccaa

SEQ ID NO: 1013205 - RNA, 19 nt, Artificial Sequence
  Description of Artificial Sequence: Synthetic oligonucleotide
ucuuuguaaaaggcacgau

SEQ ID NO: 1013206 - RNA, 19 nt, Artificial Sequence
  Description of Artificial Sequence: Synthetic oligonucleotide
agcauguacugggagcugu

SEQ ID NO: 1013207 - RNA, 19 nt, Artificial Sequence
  Description of Artificial Sequence: Synthetic oligonucleotide
ugguaagcccgaugugcca

SEQ ID NO: 1013208 - RNA, 19 nt, Artificial Sequence
  Description of Artificial Sequence: Synthetic oligonucleotide
gguacucuggucugcgcug

SEQ ID NO: 1013209 - RNA, 19 nt, Artificial Sequence
  Description of Artificial Sequence: Synthetic oligonucleotide
ccuaauggcucaucuuggc

SEQ ID NO: 1013210 - RNA, 19 nt, Artificial Sequence
  Description of Artificial Sequence: Synthetic oligonucleotide
cguccuaaggccaauacca

SEQ ID NO: 1013211 - RNA, 19 nt, Artificial Sequence
  Description of Artificial Sequence: Synthetic oligonucleotide
gccaguggcuggcacauag

SEQ ID NO: 1013212 - RNA, 19 nt, Artificial Sequence
  Description of Artificial Sequence: Synthetic oligonucleotide
gggacaaguguugaucagc

SEQ ID NO: 1013213 - RNA, 19 nt, Artificial Sequence
  Description of Artificial Sequence: Synthetic oligonucleotide
ucccacgggaggaaggcuu

SEQ ID NO: 1013214 - RNA, 19 nt, Artificial Sequence
  Description of Artificial Sequence: Synthetic oligonucleotide
acaccuaauggcucaucuu

SEQ ID NO: 1013215 - RNA, 19 nt, Artificial Sequence
  Description of Artificial Sequence: Synthetic oligonucleotide
aaagccguccuaaggccaa

SEQ ID NO: 1013216 - RNA, 19 nt, Artificial Sequence
  Description of Artificial Sequence: Synthetic oligonucleotide
uuguaugcucacacaccua

SEQ ID NO: 1013217 - RNA, 19 nt, Artificial Sequence
  Description of Artificial Sequence: Synthetic oligonucleotide
ugggcuauugugggagaca

SEQ ID NO: 1013218 - RNA, 19 nt, Artificial Sequence
  Description of Artificial Sequence: Synthetic oligonucleotide
ugacugggcuauuguggga

SEQ ID NO: 1013219 - RNA, 19 nt, Artificial Sequence
  Description of Artificial Sequence: Synthetic oligonucleotide
guccuugcgguacuuccac

SEQ ID NO: 1013220 - RNA, 19 nt, Artificial Sequence
  Description of Artificial Sequence: Synthetic oligonucleotide
cgagcggggaccuugguag

SEQ ID NO: 1013221 - RNA, 19 nt, Artificial Sequence
  Description of Artificial Sequence: Synthetic oligonucleotide
gcgguacuuccacagcugg

SEQ ID NO: 1013222 - RNA, 19 nt, Artificial Sequence
  Description of Artificial Sequence: Synthetic oligonucleotide
aagcuaaaaugggcaucug

SEQ ID NO: 1013223 - RNA, 19 nt, Artificial Sequence
  Description of Artificial Sequence: Synthetic oligonucleotide
augagugagcugggacagc

SEQ ID NO: 1013224 - RNA, 19 nt, Artificial Sequence
  Description of Artificial Sequence: Synthetic oligonucleotide
cugacuccgagcggggacc

SEQ ID NO: 1013225 - RNA, 19 nt, Artificial Sequence
  Description of Artificial Sequence: Synthetic oligonucleotide
uguagggcacugucauguc

SEQ ID NO: 1013226 - RNA, 19 nt, Artificial Sequence
  Description of Artificial Sequence: Synthetic oligonucleotide
aggcuuaaaagccguccua

SEQ ID NO: 1013227 - RNA, 19 nt, Artificial Sequence
  Description of Artificial Sequence: Synthetic oligonucleotide
cucaagccucaaugguaag

SEQ ID NO: 1013228 - RNA, 19 nt, Artificial Sequence
  Description of Artificial Sequence: Synthetic oligonucleotide
agcccgaugugccaugcuu

SEQ ID NO: 1013229 - RNA, 19 nt, Artificial Sequence
  Description of Artificial Sequence: Synthetic oligonucleotide
aagcauguacugggagcug

SEQ ID NO: 1013230 - RNA, 19 nt, Artificial Sequence
  Description of Artificial Sequence: Synthetic oligonucleotide
aggaagcuaggaauccaug

SEQ ID NO: 1013231 - RNA, 19 nt, Artificial Sequence
  Description of Artificial Sequence: Synthetic oligonucleotide
guaagcccgaugugccaug

SEQ ID NO: 1013232 - RNA, 19 nt, Artificial Sequence
  Description of Artificial Sequence: Synthetic oligonucleotide
augguguuagcaggguccu

SEQ ID NO: 1013233 - RNA, 19 nt, Artificial Sequence
  Description of Artificial Sequence: Synthetic oligonucleotide
cuugcauuguaugcucaca

SEQ ID NO: 1013234 - RNA, 19 nt, Artificial Sequence
  Description of Artificial Sequence: Synthetic oligonucleotide
cguagaguugguauguuca

SEQ ID NO: 1013235 - RNA, 19 nt, Artificial Sequence
  Description of Artificial Sequence: Synthetic oligonucleotide
guggcgguacucuggucug

SEQ ID NO: 1013236 - RNA, 19 nt, Artificial Sequence
  Description of Artificial Sequence: Synthetic oligonucleotide
gaacucuucuaagaccgua

SEQ ID NO: 1013237 - RNA, 19 nt, Artificial Sequence
  Description of Artificial Sequence: Synthetic oligonucleotide
ugaggccacacugcucucu

SEQ ID NO: 1013238 - RNA, 19 nt, Artificial Sequence
  Description of Artificial Sequence: Synthetic oligonucleotide
ucuggucugcgcugguaua

SEQ ID NO: 1013239 - RNA, 19 nt, Artificial Sequence
  Description of Artificial Sequence: Synthetic oligonucleotide
cauuagggacaaguguuga

SEQ ID NO: 1013240 - RNA, 19 nt, Artificial Sequence
  Description of Artificial Sequence: Synthetic oligonucleotide
ggucauuaucuggggaugc

SEQ ID NO: 1013241 - RNA, 19 nt, Artificial Sequence
  Description of Artificial Sequence: Synthetic oligonucleotide
gggugacugggcuauugug

SEQ ID NO: 1013242 - RNA, 19 nt, Artificial Sequence
  Description of Artificial Sequence: Synthetic oligonucleotide
ggacaaguguugaucagca

SEQ ID NO: 1013243 - RNA, 19 nt, Artificial Sequence
  Description of Artificial Sequence: Synthetic oligonucleotide
uuacaccuggcugcagagu

SEQ ID NO: 1013244 - RNA, 19 nt, Artificial Sequence
  Description of Artificial Sequence: Synthetic oligonucleotide
guccuggaccaacacagaa

SEQ ID NO: 1013245 - RNA, 19 nt, Artificial Sequence
  Description of Artificial Sequence: Synthetic oligonucleotide
uccuugcgguacuuccaca

SEQ ID NO: 1013246 - RNA, 19 nt, Artificial Sequence
  Description of Artificial Sequence: Synthetic oligonucleotide
ccagggcuaguuauggaac

SEQ ID NO: 1013247 - RNA, 19 nt, Artificial Sequence
  Description of Artificial Sequence: Synthetic oligonucleotide
gggcucuacagguggguag

SEQ ID NO: 1013248 - RNA, 19 nt, Artificial Sequence
  Description of Artificial Sequence: Synthetic oligonucleotide
uaagaccguagaguuggua

SEQ ID NO: 1013249 - RNA, 19 nt, Artificial Sequence
  Description of Artificial Sequence: Synthetic oligonucleotide
ccacucucaccuaauggug

SEQ ID NO: 1013250 - RNA, 19 nt, Artificial Sequence
  Description of Artificial Sequence: Synthetic oligonucleotide
ggcuaguuauggaacacuc

SEQ ID NO: 1013251 - RNA, 19 nt, Artificial Sequence
  Description of Artificial Sequence: Synthetic oligonucleotide
ccaugcuuugugucugugc

SEQ ID NO: 1013252 - RNA, 19 nt, Artificial Sequence
  Description of Artificial Sequence: Synthetic oligonucleotide
agcggggaccuugguaggg

SEQ ID NO: 1013253 - RNA, 19 nt, Artificial Sequence
  Description of Artificial Sequence: Synthetic oligonucleotide
aagcccgaugugccaugcu

SEQ ID NO: 1013254 - RNA, 19 nt, Artificial Sequence
  Description of Artificial Sequence: Synthetic oligonucleotide
gcuugcauuguaugcucac

SEQ ID NO: 1013255 - RNA, 19 nt, Artificial Sequence
  Description of Artificial Sequence: Synthetic oligonucleotide
cuaauggcucaucuuggcu

SEQ ID NO: 1013256 - RNA, 19 nt, Artificial Sequence
  Description of Artificial Sequence: Synthetic oligonucleotide
gggagacauccuuuacacc

SEQ ID NO: 1013257 - RNA, 19 nt, Artificial Sequence
  Description of Artificial Sequence: Synthetic oligonucleotide
acuggauucuagacacccu

SEQ ID NO: 1013258 - RNA, 19 nt, Artificial Sequence
  Description of Artificial Sequence: Synthetic oligonucleotide
guccuaaggccaauaccac

SEQ ID NO: 1013259 - RNA, 19 nt, Artificial Sequence
  Description of Artificial Sequence: Synthetic oligonucleotide
ugaagaccugcaugcuguu

SEQ ID NO: 1013260 - RNA, 19 nt, Artificial Sequence
  Description of Artificial Sequence: Synthetic oligonucleotide
acacucggcugcuugcauu

SEQ ID NO: 1013261 - RNA, 19 nt, Artificial Sequence
  Description of Artificial Sequence: Synthetic oligonucleotide
acacaccuaauggcucauc

SEQ ID NO: 1013262 - RNA, 19 nt, Artificial Sequence
  Description of Artificial Sequence: Synthetic oligonucleotide
caggggagacauccuuuac

SEQ ID NO: 1013263 - RNA, 19 nt, Artificial Sequence
  Description of Artificial Sequence: Synthetic oligonucleotide
ggacuugacuccccuuggc

SEQ ID NO: 1013264 - RNA, 19 nt, Artificial Sequence
  Description of Artificial Sequence: Synthetic oligonucleotide
ucuuggugugcuggagggu

SEQ ID NO: 1013265 - RNA, 19 nt, Artificial Sequence
  Description of Artificial Sequence: Synthetic oligonucleotide
ccaugagugagcugggaca

SEQ ID NO: 1013266 - RNA, 19 nt, Artificial Sequence
  Description of Artificial Sequence: Synthetic oligonucleotide
cacaccuaauggcucaucu

SEQ ID NO: 1013267 - RNA, 19 nt, Artificial Sequence
  Description of Artificial Sequence: Synthetic oligonucleotide
ccguccuaaggccaauacc

SEQ ID NO: 1013268 - RNA, 19 nt, Artificial Sequence
  Description of Artificial Sequence: Synthetic oligonucleotide
gguggcgguacucuggucu

SEQ ID NO: 1013269 - RNA, 19 nt, Artificial Sequence
  Description of Artificial Sequence: Synthetic oligonucleotide
gcuaggaauccaugaguga

SEQ ID NO: 1013270 - RNA, 19 nt, Artificial Sequence
  Description of Artificial Sequence: Synthetic oligonucleotide
uggcucgagcaucaaccuu

SEQ ID NO: 1013271 - RNA, 19 nt, Artificial Sequence
  Description of Artificial Sequence: Synthetic oligonucleotide
cucuugcaguugaggggag

SEQ ID NO: 1013272 - RNA, 19 nt, Artificial Sequence
  Description of Artificial Sequence: Synthetic oligonucleotide
gaccguagaguugguaugu

SEQ ID NO: 1013273 - RNA, 19 nt, Artificial Sequence
  Description of Artificial Sequence: Synthetic oligonucleotide
cuccccuuggcagcaacuc

SEQ ID NO: 1013274 - RNA, 19 nt, Artificial Sequence
  Description of Artificial Sequence: Synthetic oligonucleotide
guagagggugacugggcua

SEQ ID NO: 1013275 - RNA, 19 nt, Artificial Sequence
  Description of Artificial Sequence: Synthetic oligonucleotide
ggcuuaaaagccguccuaa

SEQ ID NO: 1013276 - RNA, 19 nt, Artificial Sequence
  Description of Artificial Sequence: Synthetic oligonucleotide
cugaagcuaaaaugggcau

SEQ ID NO: 1013277 - RNA, 19 nt, Artificial Sequence
  Description of Artificial Sequence: Synthetic oligonucleotide
cacucucaccuaauggugu

SEQ ID NO: 1013278 - RNA, 19 nt, Artificial Sequence
  Description of Artificial Sequence: Synthetic oligonucleotide
cugugagguuagaaccaca

SEQ ID NO: 1013279 - RNA, 19 nt, Artificial Sequence
  Description of Artificial Sequence: Synthetic oligonucleotide
gagauagagaaagggcuuu

SEQ ID NO: 1013280 - RNA, 19 nt, Artificial Sequence
  Description of Artificial Sequence: Synthetic oligonucleotide
agguggcgguacucugguc

SEQ ID NO: 1013281 - RNA, 19 nt, Artificial Sequence
  Description of Artificial Sequence: Synthetic oligonucleotide
uggcuggcacauaggcuua

SEQ ID NO: 1013282 - RNA, 19 nt, Artificial Sequence
  Description of Artificial Sequence: Synthetic oligonucleotide
uccgagggccggaugucuu

SEQ ID NO: 1013283 - RNA, 19 nt, Artificial Sequence
  Description of Artificial Sequence: Synthetic oligonucleotide
gcaguugaggggagccucg

SEQ ID NO: 1013284 - RNA, 19 nt, Artificial Sequence
  Description of Artificial Sequence: Synthetic oligonucleotide
cgaugugccaugcuuugug

SEQ ID NO: 1013285 - RNA, 19 nt, Artificial Sequence
  Description of Artificial Sequence: Synthetic oligonucleotide
ggcgguacucuggucugcg

SEQ ID NO: 1013286 - RNA, 19 nt, Artificial Sequence
  Description of Artificial Sequence: Synthetic oligonucleotide
aucucaccccugauaguga

SEQ ID NO: 1013287 - RNA, 19 nt, Artificial Sequence
  Description of Artificial Sequence: Synthetic oligonucleotide
ggucaucucaccccugaua

SEQ ID NO: 1013288 - RNA, 19 nt, Artificial Sequence
  Description of Artificial Sequence: Synthetic oligonucleotide
gcugacuccgagcggggac

SEQ ID NO: 1013289 - RNA, 19 nt, Artificial Sequence
  Description of Artificial Sequence: Synthetic oligonucleotide
gccacucacagggugguac

SEQ ID NO: 1013290 - RNA, 19 nt, Artificial Sequence
  Description of Artificial Sequence: Synthetic oligonucleotide
gccucgggagccuuuucug

SEQ ID NO: 1013291 - RNA, 19 nt, Artificial Sequence
  Description of Artificial Sequence: Synthetic oligonucleotide
caucaaccuugaaccaaaa

SEQ ID NO: 1013292 - RNA, 19 nt, Artificial Sequence
  Description of Artificial Sequence: Synthetic oligonucleotide
ggaauccaugagugagcug

SEQ ID NO: 1013293 - RNA, 19 nt, Artificial Sequence
  Description of Artificial Sequence: Synthetic oligonucleotide
acggccccgaaugcagguc

SEQ ID NO: 1013294 - RNA, 19 nt, Artificial Sequence
  Description of Artificial Sequence: Synthetic oligonucleotide
ggcuauuuguaagguagaa

SEQ ID NO: 1013295 - RNA, 19 nt, Artificial Sequence
  Description of Artificial Sequence: Synthetic oligonucleotide
cugucaugucugcccagca

SEQ ID NO: 1013296 - RNA, 19 nt, Artificial Sequence
  Description of Artificial Sequence: Synthetic oligonucleotide
agaaagcauuagggacaag

SEQ ID NO: 1013297 - RNA, 19 nt, Artificial Sequence
  Description of Artificial Sequence: Synthetic oligonucleotide
ccguagaguugguauguuc

SEQ ID NO: 1013298 - RNA, 19 nt, Artificial Sequence
  Description of Artificial Sequence: Synthetic oligonucleotide
gccguccuaaggccaauac

SEQ ID NO: 1013299 - RNA, 19 nt, Artificial Sequence
  Description of Artificial Sequence: Synthetic oligonucleotide
cccgaugugccaugcuuug

SEQ ID NO: 1013300 - RNA, 19 nt, Artificial Sequence
  Description of Artificial Sequence: Synthetic oligonucleotide
uggcgguacucuggucugc

SEQ ID NO: 1013301 - RNA, 19 nt, Artificial Sequence
  Description of Artificial Sequence: Synthetic oligonucleotide
agcaaccugaggggcuugu

SEQ ID NO: 1013302 - RNA, 19 nt, Artificial Sequence
  Description of Artificial Sequence: Synthetic oligonucleotide
cuacagguggguagaacuu

SEQ ID NO: 1013303 - RNA, 19 nt, Artificial Sequence
  Description of Artificial Sequence: Synthetic oligonucleotide
ugacuccgagcggggaccu

SEQ ID NO: 1013304 - RNA, 19 nt, Artificial Sequence
  Description of Artificial Sequence: Synthetic oligonucleotide
ccaugcagccgccacucac

SEQ ID NO: 1013305 - RNA, 19 nt, Artificial Sequence
  Description of Artificial Sequence: Synthetic oligonucleotide
gugagguuagaaccacaau

SEQ ID NO: 1013306 - RNA, 19 nt, Artificial Sequence
  Description of Artificial Sequence: Synthetic oligonucleotide
cugcguacucauccaucca

SEQ ID NO: 1013307 - RNA, 19 nt, Artificial Sequence
  Description of Artificial Sequence: Synthetic oligonucleotide
ccuagcuggcuauuuguaa

SEQ ID NO: 1013308 - RNA, 19 nt, Artificial Sequence
  Description of Artificial Sequence: Synthetic oligonucleotide
uccgagcggggaccuuggu

SEQ ID NO: 1013309 - RNA, 19 nt, Artificial Sequence
  Description of Artificial Sequence: Synthetic oligonucleotide
gaagauccuguggucacuu

SEQ ID NO: 1013310 - RNA, 19 nt, Artificial Sequence
  Description of Artificial Sequence: Synthetic oligonucleotide
ggcuugcaagcuccauagc

SEQ ID NO: 1013311 - RNA, 19 nt, Artificial Sequence
  Description of Artificial Sequence: Synthetic oligonucleotide
ggcucuacagguggguaga

SEQ ID NO: 1013312 - RNA, 19 nt, Artificial Sequence
  Description of Artificial Sequence: Synthetic oligonucleotide
gcucacacaccuaauggcu

SEQ ID NO: 1013313 - RNA, 19 nt, Artificial Sequence
  Description of Artificial Sequence: Synthetic oligonucleotide
cacaccuccgccacucgcu

SEQ ID NO: 1013314 - RNA, 19 nt, Artificial Sequence
  Description of Artificial Sequence: Synthetic oligonucleotide
cuggcucgagcaucaaccu

SEQ ID NO: 1013315 - RNA, 19 nt, Artificial Sequence
  Description of Artificial Sequence: Synthetic oligonucleotide
aggcugacuccgagcgggg

SEQ ID NO: 1013316 - RNA, 19 nt, Artificial Sequence
  Description of Artificial Sequence: Synthetic oligonucleotide
gggccggaugucuuccuuc

SEQ ID NO: 1013317 - RNA, 19 nt, Artificial Sequence
  Description of Artificial Sequence: Synthetic oligonucleotide
cuauugugggagacagcau

SEQ ID NO: 1013318 - RNA, 19 nt, Artificial Sequence
  Description of Artificial Sequence: Synthetic oligonucleotide
cucuggucugcgcugguau

SEQ ID NO: 1013319 - RNA, 19 nt, Artificial Sequence
  Description of Artificial Sequence: Synthetic oligonucleotide
aagccguccuaaggccaau

SEQ ID NO: 1013320 - RNA, 19 nt, Artificial Sequence
  Description of Artificial Sequence: Synthetic oligonucleotide
gcuaguuauggaacacucu

SEQ ID NO: 1013321 - RNA, 19 nt, Artificial Sequence
  Description of Artificial Sequence: Synthetic oligonucleotide
gggaccuugguagggcaca

SEQ ID NO: 1013322 - RNA, 19 nt, Artificial Sequence
  Description of Artificial Sequence: Synthetic oligonucleotide
ggcuauugugggagacagc

SEQ ID NO: 1013323 - RNA, 19 nt, Artificial Sequence
  Description of Artificial Sequence: Synthetic oligonucleotide
ccaggcugacuccgagcgg

SEQ ID NO: 1013324 - RNA, 19 nt, Artificial Sequence
  Description of Artificial Sequence: Synthetic oligonucleotide
ccauuuugauuccuuccua

SEQ ID NO: 1013325 - RNA, 19 nt, Artificial Sequence
  Description of Artificial Sequence: Synthetic oligonucleotide
acucuggucugcgcuggua

SEQ ID NO: 1013326 - RNA, 19 nt, Artificial Sequence
  Description of Artificial Sequence: Synthetic oligonucleotide
gcugguugcccuucaugcu

SEQ ID NO: 1013327 - RNA, 19 nt, Artificial Sequence
  Description of Artificial Sequence: Synthetic oligonucleotide
cucggcugcuugcauugua

SEQ ID NO: 1013328 - RNA, 19 nt, Artificial Sequence
  Description of Artificial Sequence: Synthetic oligonucleotide
cacgggaggaaggcuugca

SEQ ID NO: 1013329 - RNA, 19 nt, Artificial Sequence
  Description of Artificial Sequence: Synthetic oligonucleotide
ccucgggagccuuuucuga

SEQ ID NO: 1013330 - RNA, 19 nt, Artificial Sequence
  Description of Artificial Sequence: Synthetic oligonucleotide
ggguucugugagguuagaa

SEQ ID NO: 1013331 - RNA, 19 nt, Artificial Sequence
  Description of Artificial Sequence: Synthetic oligonucleotide
gcgguacucuggucugcgc

SEQ ID NO: 1013332 - RNA, 19 nt, Artificial Sequence
  Description of Artificial Sequence: Synthetic oligonucleotide
caccccugauagugaggca

SEQ ID NO: 1013333 - RNA, 19 nt, Artificial Sequence
  Description of Artificial Sequence: Synthetic oligonucleotide
cuaagaccguagaguuggu

SEQ ID NO: 1013334 - RNA, 19 nt, Artificial Sequence
  Description of Artificial Sequence: Synthetic oligonucleotide
cucucaccuaaugguguua

SEQ ID NO: 1013335 - RNA, 19 nt, Artificial Sequence
  Description of Artificial Sequence: Synthetic oligonucleotide
guaugcucacacaccuaau

SEQ ID NO: 1013336 - RNA, 19 nt, Artificial Sequence
  Description of Artificial Sequence: Synthetic oligonucleotide
gguaagcccgaugugccau

SEQ ID NO: 1013337 - RNA, 19 nt, Artificial Sequence
  Description of Artificial Sequence: Synthetic oligonucleotide
gcggggaccuugguagggc

SEQ ID NO: 1013338 - RNA, 19 nt, Artificial Sequence
  Description of Artificial Sequence: Synthetic oligonucleotide
cuaaggccaauaccaccuu

SEQ ID NO: 1013339 - RNA, 19 nt, Artificial Sequence
  Description of Artificial Sequence: Synthetic oligonucleotide
ggcagucguagagggugac

SEQ ID NO: 1013340 - RNA, 19 nt, Artificial Sequence
  Description of Artificial Sequence: Synthetic oligonucleotide
gggcuaguuauggaacacu

SEQ ID NO: 1013341 - RNA, 19 nt, Artificial Sequence
  Description of Artificial Sequence: Synthetic oligonucleotide
cuggucugcgcugguauau

SEQ ID NO: 1013342 - RNA, 19 nt, Artificial Sequence
  Description of Artificial Sequence: Synthetic oligonucleotide
gggucuuguccuugcggua

SEQ ID NO: 1013343 - RNA, 19 nt, Artificial Sequence
  Description of Artificial Sequence: Synthetic oligonucleotide
ggggaccuugguagggcac

SEQ ID NO: 1013344 - RNA, 19 nt, Artificial Sequence
  Description of Artificial Sequence: Synthetic oligonucleotide
agccguccuaaggccaaua

SEQ ID NO: 1013345 - RNA, 19 nt, Artificial Sequence
  Description of Artificial Sequence: Synthetic oligonucleotide
gaccuugguagggcacaua

SEQ ID NO: 1013346 - RNA, 19 nt, Artificial Sequence
  Description of Artificial Sequence: Synthetic oligonucleotide
ccgagggccggaugucuuc

SEQ ID NO: 1013347 - RNA, 19 nt, Artificial Sequence
  Description of Artificial Sequence: Synthetic oligonucleotide
ggucacagugggcuuucau

SEQ ID NO: 1013348 - RNA, 19 nt, Artificial Sequence
  Description of Artificial Sequence: Synthetic oligonucleotide
gccacucgcuucaggguuc

SEQ ID NO: 1013349 - RNA, 19 nt, Artificial Sequence
  Description of Artificial Sequence: Synthetic oligonucleotide
ggccaauaccaccuuucuu

SEQ ID NO: 1013350 - RNA, 19 nt, Artificial Sequence
  Description of Artificial Sequence: Synthetic oligonucleotide
cagcaucaaagcagagcuu

SEQ ID NO: 1013351 - RNA, 19 nt, Artificial Sequence
  Description of Artificial Sequence: Synthetic oligonucleotide
cucgagcaucaaccuugaa

SEQ ID NO: 1013352 - RNA, 19 nt, Artificial Sequence
  Description of Artificial Sequence: Synthetic oligonucleotide
cacuuucacuacaguccau

SEQ ID NO: 1013353 - RNA, 19 nt, Artificial Sequence
  Description of Artificial Sequence: Synthetic oligonucleotide
cgagggccggaugucuucc

SEQ ID NO: 1013354 - RNA, 19 nt, Artificial Sequence
  Description of Artificial Sequence: Synthetic oligonucleotide
agacagcccugaagcuaaa

SEQ ID NO: 1013355 - RNA, 19 nt, Artificial Sequence
  Description of Artificial Sequence: Synthetic oligonucleotide
gcaggucucaagccucaau

SEQ ID NO: 1013356 - RNA, 19 nt, Artificial Sequence
  Description of Artificial Sequence: Synthetic oligonucleotide
ccacgggaggaaggcuugc

SEQ ID NO: 1013357 - RNA, 19 nt, Artificial Sequence
  Description of Artificial Sequence: Synthetic oligonucleotide
caccucacagcaccccguu

SEQ ID NO: 1013358 - RNA, 19 nt, Artificial Sequence
  Description of Artificial Sequence: Synthetic oligonucleotide
ggcugacuccgagcgggga

SEQ ID NO: 1013359 - RNA, 19 nt, Artificial Sequence
  Description of Artificial Sequence: Synthetic oligonucleotide
gcgcugguauauguauucu

SEQ ID NO: 1013360 - RNA, 19 nt, Artificial Sequence
  Description of Artificial Sequence: Synthetic oligonucleotide
gcucuacagguggguagaa

SEQ ID NO: 1013361 - RNA, 19 nt, Artificial Sequence
  Description of Artificial Sequence: Synthetic oligonucleotide
gcagucguagagggugacu

SEQ ID NO: 1013362 - RNA, 19 nt, Artificial Sequence
  Description of Artificial Sequence: Synthetic oligonucleotide
ccgagcggggaccuuggua

SEQ ID NO: 1013363 - RNA, 19 nt, Artificial Sequence
  Description of Artificial Sequence: Synthetic oligonucleotide
gcccgaugugccaugcuuu

SEQ ID NO: 1013364 - RNA, 19 nt, Artificial Sequence
  Description of Artificial Sequence: Synthetic oligonucleotide
ccagcugaacuagccccaa

SEQ ID NO: 1013365 - RNA, 19 nt, Artificial Sequence
  Description of Artificial Sequence: Synthetic oligonucleotide
ggaccuugguagggcacau

SEQ ID NO: 1013366 - RNA, 19 nt, Artificial Sequence
  Description of Artificial Sequence: Synthetic oligonucleotide
guccuggcucgagcaucaa

SEQ ID NO: 1013367 - RNA, 19 nt, Artificial Sequence
  Description of Artificial Sequence: Synthetic oligonucleotide
ggugcccauagguccccuu

SEQ ID NO: 1013368 - RNA, 19 nt, Artificial Sequence
  Description of Artificial Sequence: Synthetic oligonucleotide
ggagccucgggagccuuuu

SEQ ID NO: 1013369 - RNA, 19 nt, Artificial Sequence
  Description of Artificial Sequence: Synthetic oligonucleotide
ccugauagugaggcauuuu

SEQ ID NO: 1013370 - RNA, 19 nt, Artificial Sequence
  Description of Artificial Sequence: Synthetic oligonucleotide
cgguacuuccacagcuggu

SEQ ID NO: 1013371 - RNA, 19 nt, Artificial Sequence
  Description of Artificial Sequence: Synthetic oligonucleotide
cccaggcaaucuuggucau

SEQ ID NO: 1013372 - RNA, 19 nt, Artificial Sequence
  Description of Artificial Sequence: Synthetic oligonucleotide
ccgaugugccaugcuuugu

SEQ ID NO: 1013373 - RNA, 19 nt, Artificial Sequence
  Description of Artificial Sequence: Synthetic oligonucleotide
gacuccgagcggggaccuu

SEQ ID NO: 1013374 - RNA, 19 nt, Artificial Sequence
  Description of Artificial Sequence: Synthetic oligonucleotide
cggccccgaaugcaggucu

SEQ ID NO: 1013375 - RNA, 19 nt, Artificial Sequence
  Description of Artificial Sequence: Synthetic oligonucleotide
ccucaaugguaagcccgau

SEQ ID NO: 1013376 - RNA, 19 nt, Artificial Sequence
  Description of Artificial Sequence: Synthetic oligonucleotide
ccgccacucacaggguggu

SEQ ID NO: 1013377 - RNA, 19 nt, Artificial Sequence
  Description of Artificial Sequence: Synthetic oligonucleotide
uuagaguuaagcaugaucu

SEQ ID NO: 1013378 - RNA, 19 nt, Artificial Sequence
  Description of Artificial Sequence: Synthetic oligonucleotide
auaacccacacacagaagc

SEQ ID NO: 1013379 - RNA, 19 nt, Artificial Sequence
  Description of Artificial Sequence: Synthetic oligonucleotide
uuucuaauaaucugcagag

SEQ ID NO: 1013380 - RNA, 19 nt, Artificial Sequence
  Description of Artificial Sequence: Synthetic oligonucleotide
ucuauauuuauauauuaga

SEQ ID NO: 1013381 - RNA, 19 nt, Artificial Sequence
  Description of Artificial Sequence: Synthetic oligonucleotide
uugauaagcagguuggagg

SEQ ID NO: 1013382 - RNA, 19 nt, Artificial Sequence
  Description of Artificial Sequence: Synthetic oligonucleotide
uguagcauagguccuaggg

SEQ ID NO: 1013383 - RNA, 19 nt, Artificial Sequence
  Description of Artificial Sequence: Synthetic oligonucleotide
ugggguuccaacaagauga

SEQ ID NO: 1013384 - RNA, 19 nt, Artificial Sequence
  Description of Artificial Sequence: Synthetic oligonucleotide
auuagauacaggcacgggg

SEQ ID NO: 1013385 - RNA, 19 nt, Artificial Sequence
  Description of Artificial Sequence: Synthetic oligonucleotide
ugagacuuaggaauguucc

SEQ ID NO: 1013386 - RNA, 19 nt, Artificial Sequence
  Description of Artificial Sequence: Synthetic oligonucleotide
aauagggugggguuccaac

SEQ ID NO: 1013387 - RNA, 19 nt, Artificial Sequence
  Description of Artificial Sequence: Synthetic oligonucleotide
uccaacaagaugaguaggg

SEQ ID NO: 1013388 - RNA, 19 nt, Artificial Sequence
  Description of Artificial Sequence: Synthetic oligonucleotide
uuuuagagggcagagacug

SEQ ID NO: 1013389 - RNA, 19 nt, Artificial Sequence
  Description of Artificial Sequence: Synthetic oligonucleotide
aaagccaguguggucaugc

SEQ ID NO: 1013390 - RNA, 19 nt, Artificial Sequence
  Description of Artificial Sequence: Synthetic oligonucleotide
aguucauuuucuaauaauc

SEQ ID NO: 1013391 - RNA, 19 nt, Artificial Sequence
  Description of Artificial Sequence: Synthetic oligonucleotide
ucuagucuugcgcacgugg

SEQ ID NO: 1013392 - RNA, 19 nt, Artificial Sequence
  Description of Artificial Sequence: Synthetic oligonucleotide
agagacuguagguaguuuc

SEQ ID NO: 1013393 - RNA, 19 nt, Artificial Sequence
  Description of Artificial Sequence: Synthetic oligonucleotide
cucccaauaacccacacac

SEQ ID NO: 1013394 - RNA, 19 nt, Artificial Sequence
  Description of Artificial Sequence: Synthetic oligonucleotide
caccucaccacuuaggccc

SEQ ID NO: 1013395 - RNA, 19 nt, Artificial Sequence
  Description of Artificial Sequence: Synthetic oligonucleotide
gaugcaauuaagguccucc

SEQ ID NO: 1013396 - RNA, 19 nt, Artificial Sequence
  Description of Artificial Sequence: Synthetic oligonucleotide
agggucagcaauccgggcc

SEQ ID NO: 1013397 - RNA, 19 nt, Artificial Sequence
  Description of Artificial Sequence: Synthetic oligonucleotide
cuguagguaguuucgagcc

SEQ ID NO: 1013398 - RNA, 19 nt, Artificial Sequence
  Description of Artificial Sequence: Synthetic oligonucleotide
uagguuuggugcucgaagg

SEQ ID NO: 1013399 - RNA, 19 nt, Artificial Sequence
  Description of Artificial Sequence: Synthetic oligonucleotide
aagaucuggauuucucuca

SEQ ID NO: 1013400 - RNA, 19 nt, Artificial Sequence
  Description of Artificial Sequence: Synthetic oligonucleotide
caugucaaaagugaagggc

SEQ ID NO: 1013401 - RNA, 19 nt, Artificial Sequence
  Description of Artificial Sequence: Synthetic oligonucleotide
uccagauagugcuugccgg

SEQ ID NO: 1013402 - RNA, 19 nt, Artificial Sequence
  Description of Artificial Sequence: Synthetic oligonucleotide
ggugguauugauaagcagg

SEQ ID NO: 1013403 - RNA, 19 nt, Artificial Sequence
  Description of Artificial Sequence: Synthetic oligonucleotide
cucagggucagcaauccgg

SEQ ID NO: 1013404 - RNA, 19 nt, Artificial Sequence
  Description of Artificial Sequence: Synthetic oligonucleotide
uagcauagguccuagggca

SEQ ID NO: 1013405 - RNA, 19 nt, Artificial Sequence
  Description of Artificial Sequence: Synthetic oligonucleotide
agggcagucauauagcccu

SEQ ID NO: 1013406 - RNA, 19 nt, Artificial Sequence
  Description of Artificial Sequence: Synthetic oligonucleotide
ucugguagaggaaguagca

SEQ ID NO: 1013407 - RNA, 19 nt, Artificial Sequence
  Description of Artificial Sequence: Synthetic oligonucleotide
auaaucugcagagaaggag

SEQ ID NO: 1013408 - RNA, 19 nt, Artificial Sequence
  Description of Artificial Sequence: Synthetic oligonucleotide
gguagauaaaggcagagca

SEQ ID NO: 1013409 - RNA, 19 nt, Artificial Sequence
  Description of Artificial Sequence: Synthetic oligonucleotide
cugaccaugccauacgcgc

SEQ ID NO: 1013410 - RNA, 19 nt, Artificial Sequence
  Description of Artificial Sequence: Synthetic oligonucleotide
guacgggugagccagugcg

SEQ ID NO: 1013411 - RNA, 19 nt, Artificial Sequence
  Description of Artificial Sequence: Synthetic oligonucleotide
uuaguuuuagagggcagag

SEQ ID NO: 1013412 - RNA, 19 nt, Artificial Sequence
  Description of Artificial Sequence: Synthetic oligonucleotide
guaguuucgagccuucaug

SEQ ID NO: 1013413 - RNA, 19 nt, Artificial Sequence
  Description of Artificial Sequence: Synthetic oligonucleotide
ugcucgaaggggcugaucu

SEQ ID NO: 1013414 - RNA, 19 nt, Artificial Sequence
  Description of Artificial Sequence: Synthetic oligonucleotide
ugaagguuaacauccgguc

SEQ ID NO: 1013415 - RNA, 19 nt, Artificial Sequence
  Description of Artificial Sequence: Synthetic oligonucleotide
auauuagauacaggcacgg

SEQ ID NO: 1013416 - RNA, 19 nt, Artificial Sequence
  Description of Artificial Sequence: Synthetic oligonucleotide
auuaagguccuccugggau

SEQ ID NO: 1013417 - RNA, 19 nt, Artificial Sequence
  Description of Artificial Sequence: Synthetic oligonucleotide
auaaaggcagagcagcaga

SEQ ID NO: 1013418 - RNA, 19 nt, Artificial Sequence
  Description of Artificial Sequence: Synthetic oligonucleotide
uuucgagccuucauguuga

SEQ ID NO: 1013419 - RNA, 19 nt, Artificial Sequence
  Description of Artificial Sequence: Synthetic oligonucleotide
ucuacugugaugcgcuugu

SEQ ID NO: 1013420 - RNA, 19 nt, Artificial Sequence
  Description of Artificial Sequence: Synthetic oligonucleotide
ugguguagcccuuagaguu

SEQ ID NO: 1013421 - RNA, 19 nt, Artificial Sequence
  Description of Artificial Sequence: Synthetic oligonucleotide
guagcauagguccuagggc

SEQ ID NO: 1013422 - RNA, 19 nt, Artificial Sequence
  Description of Artificial Sequence: Synthetic oligonucleotide
ugugaugcgcuuguugggg

SEQ ID NO: 1013423 - RNA, 19 nt, Artificial Sequence
  Description of Artificial Sequence: Synthetic oligonucleotide
aagaugaguagggcagagc

SEQ ID NO: 1013424 - RNA, 19 nt, Artificial Sequence
  Description of Artificial Sequence: Synthetic oligonucleotide
gaccccagcaaagugaaag

SEQ ID NO: 1013425 - RNA, 19 nt, Artificial Sequence
  Description of Artificial Sequence: Synthetic oligonucleotide
gagacuguagguaguuucg

SEQ ID NO: 1013426 - RNA, 19 nt, Artificial Sequence
  Description of Artificial Sequence: Synthetic oligonucleotide
guuucgagccuucauguug

SEQ ID NO: 1013427 - RNA, 19 nt, Artificial Sequence
  Description of Artificial Sequence: Synthetic oligonucleotide
uuaagguccuccugggaug

SEQ ID NO: 1013428 - RNA, 19 nt, Artificial Sequence
  Description of Artificial Sequence: Synthetic oligonucleotide
agcugaccaugccauacgc

SEQ ID NO: 1013429 - RNA, 19 nt, Artificial Sequence
  Description of Artificial Sequence: Synthetic oligonucleotide
caauuaagguccuccuggg

SEQ ID NO: 1013430 - RNA, 19 nt, Artificial Sequence
  Description of Artificial Sequence: Synthetic oligonucleotide
cucuuaagcagcuuguaca

SEQ ID NO: 1013431 - RNA, 19 nt, Artificial Sequence
  Description of Artificial Sequence: Synthetic oligonucleotide
uccuauauacacaucucua

SEQ ID NO: 1013432 - RNA, 19 nt, Artificial Sequence
  Description of Artificial Sequence: Synthetic oligonucleotide
ucgcaggugguauugauaa

SEQ ID NO: 1013433 - RNA, 19 nt, Artificial Sequence
  Description of Artificial Sequence: Synthetic oligonucleotide
cuagggcagucauauagcc

SEQ ID NO: 1013434 - RNA, 19 nt, Artificial Sequence
  Description of Artificial Sequence: Synthetic oligonucleotide
ucuuggaagaucaguuccu

SEQ ID NO: 1013435 - RNA, 19 nt, Artificial Sequence
  Description of Artificial Sequence: Synthetic oligonucleotide
auaccuagaaugugguuga

SEQ ID NO: 1013436 - RNA, 19 nt, Artificial Sequence
  Description of Artificial Sequence: Synthetic oligonucleotide
uaguuucgagccuucaugu

SEQ ID NO: 1013437 - RNA, 19 nt, Artificial Sequence
  Description of Artificial Sequence: Synthetic oligonucleotide
uuggcugaguguauguacu

SEQ ID NO: 1013438 - RNA, 19 nt, Artificial Sequence
  Description of Artificial Sequence: Synthetic oligonucleotide
aauuaagguccuccuggga

SEQ ID NO: 1013439 - RNA, 19 nt, Artificial Sequence
  Description of Artificial Sequence: Synthetic oligonucleotide
uguggucaugcucaggguc

SEQ ID NO: 1013440 - RNA, 19 nt, Artificial Sequence
  Description of Artificial Sequence: Synthetic oligonucleotide
cauacuccgucagaaagcc

SEQ ID NO: 1013441 - RNA, 19 nt, Artificial Sequence
  Description of Artificial Sequence: Synthetic oligonucleotide
uacaggucugucuccauga

SEQ ID NO: 1013442 - RNA, 19 nt, Artificial Sequence
  Description of Artificial Sequence: Synthetic oligonucleotide
uuccaacaagaugaguagg

SEQ ID NO: 1013443 - RNA, 19 nt, Artificial Sequence
  Description of Artificial Sequence: Synthetic oligonucleotide
cuagcagggguagauaaag

SEQ ID NO: 1013444 - RNA, 19 nt, Artificial Sequence
  Description of Artificial Sequence: Synthetic oligonucleotide
guccagauagugcuugccg

SEQ ID NO: 1013445 - RNA, 19 nt, Artificial Sequence
  Description of Artificial Sequence: Synthetic oligonucleotide
ucuuagggaacagggaugu

SEQ ID NO: 1013446 - RNA, 19 nt, Artificial Sequence
  Description of Artificial Sequence: Synthetic oligonucleotide
uggucauaagcagagcuga

SEQ ID NO: 1013447 - RNA, 19 nt, Artificial Sequence
  Description of Artificial Sequence: Synthetic oligonucleotide
auuucucucagugugcgcu

SEQ ID NO: 1013448 - RNA, 19 nt, Artificial Sequence
  Description of Artificial Sequence: Synthetic oligonucleotide
uuaggccccggggagaugg

SEQ ID NO: 1013449 - RNA, 19 nt, Artificial Sequence
  Description of Artificial Sequence: Synthetic oligonucleotide
guguauguacuugaggccc

SEQ ID NO: 1013450 - RNA, 19 nt, Artificial Sequence
  Description of Artificial Sequence: Synthetic oligonucleotide
aaacuagcccuugagacuu

SEQ ID NO: 1013451 - RNA, 19 nt, Artificial Sequence
  Description of Artificial Sequence: Synthetic oligonucleotide
gaagcgggcugucucuugg

SEQ ID NO: 1013452 - RNA, 19 nt, Artificial Sequence
  Description of Artificial Sequence: Synthetic oligonucleotide
guagauaaaggcagagcag

SEQ ID NO: 1013453 - RNA, 19 nt, Artificial Sequence
  Description of Artificial Sequence: Synthetic oligonucleotide
gaucugguagaggaaguag

SEQ ID NO: 1013454 - RNA, 19 nt, Artificial Sequence
  Description of Artificial Sequence: Synthetic oligonucleotide
uaguacuguuccagguacg

SEQ ID NO: 1013455 - RNA, 19 nt, Artificial Sequence
  Description of Artificial Sequence: Synthetic oligonucleotide
uggauuucucucagugugc

SEQ ID NO: 1013456 - RNA, 19 nt, Artificial Sequence
  Description of Artificial Sequence: Synthetic oligonucleotide
agggaaacuagcccuugag

SEQ ID NO: 1013457 - RNA, 19 nt, Artificial Sequence
  Description of Artificial Sequence: Synthetic oligonucleotide
agguuuggugcucgaaggg

SEQ ID NO: 1013458 - RNA, 19 nt, Artificial Sequence
  Description of Artificial Sequence: Synthetic oligonucleotide
augucaaaagugaagggcu

SEQ ID NO: 1013459 - RNA, 19 nt, Artificial Sequence
  Description of Artificial Sequence: Synthetic oligonucleotide
aagauaccuagaauguggu

SEQ ID NO: 1013460 - RNA, 19 nt, Artificial Sequence
  Description of Artificial Sequence: Synthetic oligonucleotide
ugcgcacguggucauaagc

SEQ ID NO: 1013461 - RNA, 19 nt, Artificial Sequence
  Description of Artificial Sequence: Synthetic oligonucleotide
ucucuuggaagaucaguuc

SEQ ID NO: 1013462 - RNA, 19 nt, Artificial Sequence
  Description of Artificial Sequence: Synthetic oligonucleotide
uguaaacaucccucauggc

SEQ ID NO: 1013463 - RNA, 19 nt, Artificial Sequence
  Description of Artificial Sequence: Synthetic oligonucleotide
cucuccacgggccaccucc

SEQ ID NO: 1013464 - RNA, 19 nt, Artificial Sequence
  Description of Artificial Sequence: Synthetic oligonucleotide
cuggguugagcaaaguuca

SEQ ID NO: 1013465 - RNA, 19 nt, Artificial Sequence
  Description of Artificial Sequence: Synthetic oligonucleotide
gauuugguguagcccuuag

SEQ ID NO: 1013466 - RNA, 19 nt, Artificial Sequence
  Description of Artificial Sequence: Synthetic oligonucleotide
agcaauccgggccaggcca

SEQ ID NO: 1013467 - RNA, 19 nt, Artificial Sequence
  Description of Artificial Sequence: Synthetic oligonucleotide
ucggaugccuaugacauuc

SEQ ID NO: 1013468 - RNA, 19 nt, Artificial Sequence
  Description of Artificial Sequence: Synthetic oligonucleotide
uugccggggaagaugggcc

SEQ ID NO: 1013469 - RNA, 19 nt, Artificial Sequence
  Description of Artificial Sequence: Synthetic oligonucleotide
augaguagggcagagcccu

SEQ ID NO: 1013470 - RNA, 19 nt, Artificial Sequence
  Description of Artificial Sequence: Synthetic oligonucleotide
uugguguagcccuuagagu

SEQ ID NO: 1013471 - RNA, 19 nt, Artificial Sequence
  Description of Artificial Sequence: Synthetic oligonucleotide
uguagguaguuucgagccu

SEQ ID NO: 1013472 - RNA, 19 nt, Artificial Sequence
  Description of Artificial Sequence: Synthetic oligonucleotide
gagcugaccaugccauacg

SEQ ID NO: 1013473 - RNA, 19 nt, Artificial Sequence
  Description of Artificial Sequence: Synthetic oligonucleotide
aauaacccacacacagaag

SEQ ID NO: 1013474 - RNA, 19 nt, Artificial Sequence
  Description of Artificial Sequence: Synthetic oligonucleotide
aaucgcagcaagaucugga

SEQ ID NO: 1013475 - RNA, 19 nt, Artificial Sequence
  Description of Artificial Sequence: Synthetic oligonucleotide
gcaagggcguuacaggugg

SEQ ID NO: 1013476 - RNA, 19 nt, Artificial Sequence
  Description of Artificial Sequence: Synthetic oligonucleotide
uagaguuaagcaugaucuc

SEQ ID NO: 1013477 - RNA, 19 nt, Artificial Sequence
  Description of Artificial Sequence: Synthetic oligonucleotide
caacaagaugaguagggca

SEQ ID NO: 1013478 - RNA, 19 nt, Artificial Sequence
  Description of Artificial Sequence: Synthetic oligonucleotide
cucauggcggaaucgcagc

SEQ ID NO: 1013479 - RNA, 19 nt, Artificial Sequence
  Description of Artificial Sequence: Synthetic oligonucleotide
uuuggugcucgaaggggcu

SEQ ID NO: 1013480 - RNA, 19 nt, Artificial Sequence
  Description of Artificial Sequence: Synthetic oligonucleotide
gucauaagcagagcugacc

SEQ ID NO: 1013481 - RNA, 19 nt, Artificial Sequence
  Description of Artificial Sequence: Synthetic oligonucleotide
uuggggagaucauccagcu

SEQ ID NO: 1013482 - RNA, 19 nt, Artificial Sequence
  Description of Artificial Sequence: Synthetic oligonucleotide
gaaacuagcccuugagacu

SEQ ID NO: 1013483 - RNA, 19 nt, Artificial Sequence
  Description of Artificial Sequence: Synthetic oligonucleotide
ugccugaagcaggagaccc

SEQ ID NO: 1013484 - RNA, 19 nt, Artificial Sequence
  Description of Artificial Sequence: Synthetic oligonucleotide
gaauggcugucccuucacc

SEQ ID NO: 1013485 - RNA, 19 nt, Artificial Sequence
  Description of Artificial Sequence: Synthetic oligonucleotide
guagcgcgggcccacgucg

SEQ ID NO: 1013486 - RNA, 19 nt, Artificial Sequence
  Description of Artificial Sequence: Synthetic oligonucleotide
acuuaggaauguuccuuca

SEQ ID NO: 1013487 - RNA, 19 nt, Artificial Sequence
  Description of Artificial Sequence: Synthetic oligonucleotide
auaagcagguuggagggcu

SEQ ID NO: 1013488 - RNA, 19 nt, Artificial Sequence
  Description of Artificial Sequence: Synthetic oligonucleotide
guagcccuuagaguuaagc

SEQ ID NO: 1013489 - RNA, 19 nt, Artificial Sequence
  Description of Artificial Sequence: Synthetic oligonucleotide
auggcggaaucgcagcaag

SEQ ID NO: 1013490 - RNA, 19 nt, Artificial Sequence
  Description of Artificial Sequence: Synthetic oligonucleotide
cugugaugcgcuuguuggg

SEQ ID NO: 1013491 - RNA, 19 nt, Artificial Sequence
  Description of Artificial Sequence: Synthetic oligonucleotide
agcuccaugucaaaaguga

SEQ ID NO: 1013492 - RNA, 19 nt, Artificial Sequence
  Description of Artificial Sequence: Synthetic oligonucleotide
gaaucgcagcaagaucugg

SEQ ID NO: 1013493 - RNA, 19 nt, Artificial Sequence
  Description of Artificial Sequence: Synthetic oligonucleotide
ucauggcggaaucgcagca

SEQ ID NO: 1013494 - RNA, 19 nt, Artificial Sequence
  Description of Artificial Sequence: Synthetic oligonucleotide
ucccgguggagcacauugg

SEQ ID NO: 1013495 - RNA, 19 nt, Artificial Sequence
  Description of Artificial Sequence: Synthetic oligonucleotide
ucaucuguugggucauagu

SEQ ID NO: 1013496 - RNA, 19 nt, Artificial Sequence
  Description of Artificial Sequence: Synthetic oligonucleotide
aaggucgcaggugguauug

SEQ ID NO: 1013497 - RNA, 19 nt, Artificial Sequence
  Description of Artificial Sequence: Synthetic oligonucleotide
gugggguuccaacaagaug

SEQ ID NO: 1013498 - RNA, 19 nt, Artificial Sequence
  Description of Artificial Sequence: Synthetic oligonucleotide
ggaauuggggugaaaggag

SEQ ID NO: 1013499 - RNA, 19 nt, Artificial Sequence
  Description of Artificial Sequence: Synthetic oligonucleotide
uuucucucagugugcgcug

SEQ ID NO: 1013500 - RNA, 19 nt, Artificial Sequence
  Description of Artificial Sequence: Synthetic oligonucleotide
caucuguugggucauagua

SEQ ID NO: 1013501 - RNA, 19 nt, Artificial Sequence
  Description of Artificial Sequence: Synthetic oligonucleotide
gagcccaagauaccuagaa

SEQ ID NO: 1013502 - RNA, 19 nt, Artificial Sequence
  Description of Artificial Sequence: Synthetic oligonucleotide
cuuaguuuuagagggcaga

SEQ ID NO: 1013503 - RNA, 19 nt, Artificial Sequence
  Description of Artificial Sequence: Synthetic oligonucleotide
uuaaggucgcaggugguau

SEQ ID NO: 1013504 - RNA, 19 nt, Artificial Sequence
  Description of Artificial Sequence: Synthetic oligonucleotide
gaagcagcaagggcguuac

SEQ ID NO: 1013505 - RNA, 19 nt, Artificial Sequence
  Description of Artificial Sequence: Synthetic oligonucleotide
uaguuuuagagggcagaga

SEQ ID NO: 1013506 - RNA, 19 nt, Artificial Sequence
  Description of Artificial Sequence: Synthetic oligonucleotide
ucgccgauguacugcagcu

SEQ ID NO: 1013507 - RNA, 19 nt, Artificial Sequence
  Description of Artificial Sequence: Synthetic oligonucleotide
cucgccgauguacugcagc

SEQ ID NO: 1013508 - RNA, 19 nt, Artificial Sequence
  Description of Artificial Sequence: Synthetic oligonucleotide
agggagaggguuuggccug

SEQ ID NO: 1013509 - RNA, 19 nt, Artificial Sequence
  Description of Artificial Sequence: Synthetic oligonucleotide
cuugccggggaagaugggc

SEQ ID NO: 1013510 - RNA, 19 nt, Artificial Sequence
  Description of Artificial Sequence: Synthetic oligonucleotide
agcccuugagacuuaggaa

SEQ ID NO: 1013511 - RNA, 19 nt, Artificial Sequence
  Description of Artificial Sequence: Synthetic oligonucleotide
agucuugcgcacgugguca

SEQ ID NO: 1013512 - RNA, 19 nt, Artificial Sequence
  Description of Artificial Sequence: Synthetic oligonucleotide
augucucggaugccuauga

SEQ ID NO: 1013513 - RNA, 19 nt, Artificial Sequence
  Description of Artificial Sequence: Synthetic oligonucleotide
uagucuugcgcacgugguc

SEQ ID NO: 1013514 - RNA, 19 nt, Artificial Sequence
  Description of Artificial Sequence: Synthetic oligonucleotide
cagugcguccucuacugug

SEQ ID NO: 1013515 - RNA, 19 nt, Artificial Sequence
  Description of Artificial Sequence: Synthetic oligonucleotide
gcguccucuacugugaugc

SEQ ID NO: 1013516 - RNA, 19 nt, Artificial Sequence
  Description of Artificial Sequence: Synthetic oligonucleotide
uggcaguagguuuggugcu

SEQ ID NO: 1013517 - RNA, 19 nt, Artificial Sequence
  Description of Artificial Sequence: Synthetic oligonucleotide
gucuuagggaacagggaug

SEQ ID NO: 1013518 - RNA, 19 nt, Artificial Sequence
  Description of Artificial Sequence: Synthetic oligonucleotide
ugucucggaugccuaugac

SEQ ID NO: 1013519 - RNA, 19 nt, Artificial Sequence
  Description of Artificial Sequence: Synthetic oligonucleotide
cagcuccaugucaaaagug

SEQ ID NO: 1013520 - RNA, 19 nt, Artificial Sequence
  Description of Artificial Sequence: Synthetic oligonucleotide
cagauagugcuugccgggg

SEQ ID NO: 1013521 - RNA, 19 nt, Artificial Sequence
  Description of Artificial Sequence: Synthetic oligonucleotide
agggugggguuccaacaag

SEQ ID NO: 1013522 - RNA, 19 nt, Artificial Sequence
  Description of Artificial Sequence: Synthetic oligonucleotide
agauagugcuugccgggga

SEQ ID NO: 1013523 - RNA, 19 nt, Artificial Sequence
  Description of Artificial Sequence: Synthetic oligonucleotide
acucuagucuugcgcacgu

SEQ ID NO: 1013524 - RNA, 19 nt, Artificial Sequence
  Description of Artificial Sequence: Synthetic oligonucleotide
caccacuuaggccccgggg

SEQ ID NO: 1013525 - RNA, 19 nt, Artificial Sequence
  Description of Artificial Sequence: Synthetic oligonucleotide
gggcagagacuguagguag

SEQ ID NO: 1013526 - RNA, 19 nt, Artificial Sequence
  Description of Artificial Sequence: Synthetic oligonucleotide
cuagcccuugagacuuagg

SEQ ID NO: 1013527 - RNA, 19 nt, Artificial Sequence
  Description of Artificial Sequence: Synthetic oligonucleotide
gaggccccgaaggaucugg

SEQ ID NO: 1013528 - RNA, 19 nt, Artificial Sequence
  Description of Artificial Sequence: Synthetic oligonucleotide
cacucuagucuugcgcacg

SEQ ID NO: 1013529 - RNA, 19 nt, Artificial Sequence
  Description of Artificial Sequence: Synthetic oligonucleotide
ccuagggcagucauauagc

SEQ ID NO: 1013530 - RNA, 19 nt, Artificial Sequence
  Description of Artificial Sequence: Synthetic oligonucleotide
aagggcguuacagguggca

SEQ ID NO: 1013531 - RNA, 19 nt, Artificial Sequence
  Description of Artificial Sequence: Synthetic oligonucleotide
accagaugucgauggauuu

SEQ ID NO: 1013532 - RNA, 19 nt, Artificial Sequence
  Description of Artificial Sequence: Synthetic oligonucleotide
cacgucgaauggcuguccc

SEQ ID NO: 1013533 - RNA, 19 nt, Artificial Sequence
  Description of Artificial Sequence: Synthetic oligonucleotide
cauccgguccagcagguca

SEQ ID NO: 1013534 - RNA, 19 nt, Artificial Sequence
  Description of Artificial Sequence: Synthetic oligonucleotide
uguagcgcgggcccacguc

SEQ ID NO: 1013535 - RNA, 19 nt, Artificial Sequence
  Description of Artificial Sequence: Synthetic oligonucleotide
aguagggcagagcccuacu

SEQ ID NO: 1013536 - RNA, 19 nt, Artificial Sequence
  Description of Artificial Sequence: Synthetic oligonucleotide
gcucuuaagcagcuuguac

SEQ ID NO: 1013537 - RNA, 19 nt, Artificial Sequence
  Description of Artificial Sequence: Synthetic oligonucleotide
ccuagaaugugguugagcu

SEQ ID NO: 1013538 - RNA, 19 nt, Artificial Sequence
  Description of Artificial Sequence: Synthetic oligonucleotide
gagcaaaguucauuuucua

SEQ ID NO: 1013539 - RNA, 19 nt, Artificial Sequence
  Description of Artificial Sequence: Synthetic oligonucleotide
agauaccuagaaugugguu

SEQ ID NO: 1013540 - RNA, 19 nt, Artificial Sequence
  Description of Artificial Sequence: Synthetic oligonucleotide
ccuccacucccaauaaccc

SEQ ID NO: 1013541 - RNA, 19 nt, Artificial Sequence
  Description of Artificial Sequence: Synthetic oligonucleotide
ccgucagaaagccagugug

SEQ ID NO: 1013542 - RNA, 19 nt, Artificial Sequence
  Description of Artificial Sequence: Synthetic oligonucleotide
agggcguuacagguggcag

SEQ ID NO: 1013543 - RNA, 19 nt, Artificial Sequence
  Description of Artificial Sequence: Synthetic oligonucleotide
uguagcccuuagaguuaag

SEQ ID NO: 1013544 - RNA, 19 nt, Artificial Sequence
  Description of Artificial Sequence: Synthetic oligonucleotide
aguuucgagccuucauguu

SEQ ID NO: 1013545 - RNA, 19 nt, Artificial Sequence
  Description of Artificial Sequence: Synthetic oligonucleotide
gaacagggaugucuguugu

SEQ ID NO: 1013546 - RNA, 19 nt, Artificial Sequence
  Description of Artificial Sequence: Synthetic oligonucleotide
gggaaacuagcccuugaga

SEQ ID NO: 1013547 - RNA, 19 nt, Artificial Sequence
  Description of Artificial Sequence: Synthetic oligonucleotide
ggccacucuagucuugcgc

SEQ ID NO: 1013548 - RNA, 19 nt, Artificial Sequence
  Description of Artificial Sequence: Synthetic oligonucleotide
aagcgggcugucucuugga

SEQ ID NO: 1013549 - RNA, 19 nt, Artificial Sequence
  Description of Artificial Sequence: Synthetic oligonucleotide
gccacucuagucuugcgca

SEQ ID NO: 1013550 - RNA, 19 nt, Artificial Sequence
  Description of Artificial Sequence: Synthetic oligonucleotide
gguugagcaaaguucauuu

SEQ ID NO: 1013551 - RNA, 19 nt, Artificial Sequence
  Description of Artificial Sequence: Synthetic oligonucleotide
uacgcgcccucgccgaugu

SEQ ID NO: 1013552 - RNA, 19 nt, Artificial Sequence
  Description of Artificial Sequence: Synthetic oligonucleotide
gcagucauauagcccuucc

SEQ ID NO: 1013553 - RNA, 19 nt, Artificial Sequence
  Description of Artificial Sequence: Synthetic oligonucleotide
cugcguguagcgcgggccc

SEQ ID NO: 1013554 - RNA, 19 nt, Artificial Sequence
  Description of Artificial Sequence: Synthetic oligonucleotide
ugcguccucuacugugaug

SEQ ID NO: 1013555 - RNA, 19 nt, Artificial Sequence
  Description of Artificial Sequence: Synthetic oligonucleotide
ugaaaggagccugccugaa

SEQ ID NO: 1013556 - RNA, 19 nt, Artificial Sequence
  Description of Artificial Sequence: Synthetic oligonucleotide
acuagcccuugagacuuag

SEQ ID NO: 1013557 - RNA, 19 nt, Artificial Sequence
  Description of Artificial Sequence: Synthetic oligonucleotide
agaaagccaguguggucau

SEQ ID NO: 1013558 - RNA, 19 nt, Artificial Sequence
  Description of Artificial Sequence: Synthetic oligonucleotide
gagaggguuuggccugggc

SEQ ID NO: 1013559 - RNA, 19 nt, Artificial Sequence
  Description of Artificial Sequence: Synthetic oligonucleotide
uugcgcacguggucauaag

SEQ ID NO: 1013560 - RNA, 19 nt, Artificial Sequence
  Description of Artificial Sequence: Synthetic oligonucleotide
ucagugugcgcuggcagua

SEQ ID NO: 1013561 - RNA, 19 nt, Artificial Sequence
  Description of Artificial Sequence: Synthetic oligonucleotide
ccaacaagaugaguagggc

SEQ ID NO: 1013562 - RNA, 19 nt, Artificial Sequence
  Description of Artificial Sequence: Synthetic oligonucleotide
uggauuugguguagcccuu

SEQ ID NO: 1013563 - RNA, 19 nt, Artificial Sequence
  Description of Artificial Sequence: Synthetic oligonucleotide
gugcucggaggaugucucg

SEQ ID NO: 1013564 - RNA, 19 nt, Artificial Sequence
  Description of Artificial Sequence: Synthetic oligonucleotide
gcccuuccauuccagaaug

SEQ ID NO: 1013565 - RNA, 19 nt, Artificial Sequence
  Description of Artificial Sequence: Synthetic oligonucleotide
uggguugagcaaaguucau

SEQ ID NO: 1013566 - RNA, 19 nt, Artificial Sequence
  Description of Artificial Sequence: Synthetic oligonucleotide
acgucgaauggcugucccu

SEQ ID NO: 1013567 - RNA, 19 nt, Artificial Sequence
  Description of Artificial Sequence: Synthetic oligonucleotide
gccagugcguccucuacug

SEQ ID NO: 1013568 - RNA, 19 nt, Artificial Sequence
  Description of Artificial Sequence: Synthetic oligonucleotide
agcagcuuguacaggucug

SEQ ID NO: 1013569 - RNA, 19 nt, Artificial Sequence
  Description of Artificial Sequence: Synthetic oligonucleotide
uaaggucgcaggugguauu

SEQ ID NO: 1013570 - RNA, 19 nt, Artificial Sequence
  Description of Artificial Sequence: Synthetic oligonucleotide
ggucuuagggaacagggau

SEQ ID NO: 1013571 - RNA, 19 nt, Artificial Sequence
  Description of Artificial Sequence: Synthetic oligonucleotide
agcaagggcguuacaggug

SEQ ID NO: 1013572 - RNA, 19 nt, Artificial Sequence
  Description of Artificial Sequence: Synthetic oligonucleotide
ucuccacgggccaccucca

SEQ ID NO: 1013573 - RNA, 19 nt, Artificial Sequence
  Description of Artificial Sequence: Synthetic oligonucleotide
caaaagugaagggcuccuc

SEQ ID NO: 1013574 - RNA, 19 nt, Artificial Sequence
  Description of Artificial Sequence: Synthetic oligonucleotide
aggaaguagcagauauggu

SEQ ID NO: 1013575 - RNA, 19 nt, Artificial Sequence
  Description of Artificial Sequence: Synthetic oligonucleotide
ucgagccuucauguugaug

SEQ ID NO: 1013576 - RNA, 19 nt, Artificial Sequence
  Description of Artificial Sequence: Synthetic oligonucleotide
gccauacgcgcccucgccg

SEQ ID NO: 1013577 - RNA, 19 nt, Artificial Sequence
  Description of Artificial Sequence: Synthetic oligonucleotide
aggucuuagggaacaggga

SEQ ID NO: 1013578 - RNA, 19 nt, Artificial Sequence
  Description of Artificial Sequence: Synthetic oligonucleotide
aguagguuuggugcucgaa

SEQ ID NO: 1013579 - RNA, 19 nt, Artificial Sequence
  Description of Artificial Sequence: Synthetic oligonucleotide
uuggugcucgaaggggcug

SEQ ID NO: 1013580 - RNA, 19 nt, Artificial Sequence
  Description of Artificial Sequence: Synthetic oligonucleotide
gaguagggcagagcccuac

SEQ ID NO: 1013581 - RNA, 19 nt, Artificial Sequence
  Description of Artificial Sequence: Synthetic oligonucleotide
uggugcucgaaggggcuga

SEQ ID NO: 1013582 - RNA, 19 nt, Artificial Sequence
  Description of Artificial Sequence: Synthetic oligonucleotide
agggcuagcagggguagau

SEQ ID NO: 1013583 - RNA, 19 nt, Artificial Sequence
  Description of Artificial Sequence: Synthetic oligonucleotide
gucauauagcccuuccauu

SEQ ID NO: 1013584 - RNA, 19 nt, Artificial Sequence
  Description of Artificial Sequence: Synthetic oligonucleotide
cagggucagcaauccgggc

SEQ ID NO: 1013585 - RNA, 19 nt, Artificial Sequence
  Description of Artificial Sequence: Synthetic oligonucleotide
cauagguccuagggcaguc

SEQ ID NO: 1013586 - RNA, 19 nt, Artificial Sequence
  Description of Artificial Sequence: Synthetic oligonucleotide
ggugccccuggcuggaagc

SEQ ID NO: 1013587 - RNA, 19 nt, Artificial Sequence
  Description of Artificial Sequence: Synthetic oligonucleotide
gcugaccaugccauacgcg

SEQ ID NO: 1013588 - RNA, 19 nt, Artificial Sequence
  Description of Artificial Sequence: Synthetic oligonucleotide
gguggagcacauuggcuga

SEQ ID NO: 1013589 - RNA, 19 nt, Artificial Sequence
  Description of Artificial Sequence: Synthetic oligonucleotide
agaagcagcaagggcguua

SEQ ID NO: 1013590 - RNA, 19 nt, Artificial Sequence
  Description of Artificial Sequence: Synthetic oligonucleotide
gcaagaucuggauuucucu

SEQ ID NO: 1013591 - RNA, 19 nt, Artificial Sequence
  Description of Artificial Sequence: Synthetic oligonucleotide
ugugcgcuggcaguagguu

SEQ ID NO: 1013592 - RNA, 19 nt, Artificial Sequence
  Description of Artificial Sequence: Synthetic oligonucleotide
gcaguagguuuggugcucg

SEQ ID NO: 1013593 - RNA, 19 nt, Artificial Sequence
  Description of Artificial Sequence: Synthetic oligonucleotide
cuuccaccccucuguagca

SEQ ID NO: 1013594 - RNA, 19 nt, Artificial Sequence
  Description of Artificial Sequence: Synthetic oligonucleotide
cugccugaagcaggagacc

SEQ ID NO: 1013595 - RNA, 19 nt, Artificial Sequence
  Description of Artificial Sequence: Synthetic oligonucleotide
cacucccaauaacccacac

SEQ ID NO: 1013596 - RNA, 19 nt, Artificial Sequence
  Description of Artificial Sequence: Synthetic oligonucleotide
gcccuugagacuuaggaau

SEQ ID NO: 1013597 - RNA, 19 nt, Artificial Sequence
  Description of Artificial Sequence: Synthetic oligonucleotide
cacggggaagguggggagg

SEQ ID NO: 1013598 - RNA, 19 nt, Artificial Sequence
  Description of Artificial Sequence: Synthetic oligonucleotide
ggcugaguguauguacuug

SEQ ID NO: 1013599 - RNA, 19 nt, Artificial Sequence
  Description of Artificial Sequence: Synthetic oligonucleotide
auccgggccaggccaaaau

SEQ ID NO: 1013600 - RNA, 19 nt, Artificial Sequence
  Description of Artificial Sequence: Synthetic oligonucleotide
cuagucuugcgcacguggu

SEQ ID NO: 1013601 - RNA, 19 nt, Artificial Sequence
  Description of Artificial Sequence: Synthetic oligonucleotide
ugaugcaauuaagguccuc

SEQ ID NO: 1013602 - RNA, 19 nt, Artificial Sequence
  Description of Artificial Sequence: Synthetic oligonucleotide
ggcugaucuucuugauggc

SEQ ID NO: 1013603 - RNA, 19 nt, Artificial Sequence
  Description of Artificial Sequence: Synthetic oligonucleotide
agcgggcugucucuuggaa

SEQ ID NO: 1013604 - RNA, 19 nt, Artificial Sequence
  Description of Artificial Sequence: Synthetic oligonucleotide
gucgaauggcugucccuuc

SEQ ID NO: 1013605 - RNA, 19 nt, Artificial Sequence
  Description of Artificial Sequence: Synthetic oligonucleotide
ugguauugauaagcagguu

SEQ ID NO: 1013606 - RNA, 19 nt, Artificial Sequence
  Description of Artificial Sequence: Synthetic oligonucleotide
caagggcguuacagguggc

SEQ ID NO: 1013607 - RNA, 19 nt, Artificial Sequence
  Description of Artificial Sequence: Synthetic oligonucleotide
caccuccacucccaauaac

SEQ ID NO: 1013608 - RNA, 19 nt, Artificial Sequence
  Description of Artificial Sequence: Synthetic oligonucleotide
ccaauaacccacacacaga

SEQ ID NO: 1013609 - RNA, 19 nt, Artificial Sequence
  Description of Artificial Sequence: Synthetic oligonucleotide
guuccagguacgggugagc

SEQ ID NO: 1013610 - RNA, 19 nt, Artificial Sequence
  Description of Artificial Sequence: Synthetic oligonucleotide
ugccuuccaccccucugua

SEQ ID NO: 1013611 - RNA, 19 nt, Artificial Sequence
  Description of Artificial Sequence: Synthetic oligonucleotide
aggggcugaucuucuugau

SEQ ID NO: 1013612 - RNA, 19 nt, Artificial Sequence
  Description of Artificial Sequence: Synthetic oligonucleotide
cagcuuugagagggagagg

SEQ ID NO: 1013613 - RNA, 19 nt, Artificial Sequence
  Description of Artificial Sequence: Synthetic oligonucleotide
cccgguggagcacauuggc

SEQ ID NO: 1013614 - RNA, 19 nt, Artificial Sequence
  Description of Artificial Sequence: Synthetic oligonucleotide
acuuaggccccggggagau

SEQ ID NO: 1013615 - RNA, 19 nt, Artificial Sequence
  Description of Artificial Sequence: Synthetic oligonucleotide
guugggguugaagguuaac

SEQ ID NO: 1013616 - RNA, 19 nt, Artificial Sequence
  Description of Artificial Sequence: Synthetic oligonucleotide
guggagcacauuggcugag

SEQ ID NO: 1013617 - RNA, 19 nt, Artificial Sequence
  Description of Artificial Sequence: Synthetic oligonucleotide
augccaccuuaguuuuaga

SEQ ID NO: 1013618 - RNA, 19 nt, Artificial Sequence
  Description of Artificial Sequence: Synthetic oligonucleotide
ggaugccuaugacauucuc

SEQ ID NO: 1013619 - RNA, 19 nt, Artificial Sequence
  Description of Artificial Sequence: Synthetic oligonucleotide
ccacuuaggccccggggag

SEQ ID NO: 1013620 - RNA, 19 nt, Artificial Sequence
  Description of Artificial Sequence: Synthetic oligonucleotide
cagggaaacuagcccuuga

SEQ ID NO: 1013621 - RNA, 19 nt, Artificial Sequence
  Description of Artificial Sequence: Synthetic oligonucleotide
cuugcgcacguggucauaa

SEQ ID NO: 1013622 - RNA, 19 nt, Artificial Sequence
  Description of Artificial Sequence: Synthetic oligonucleotide
gaccagaugucgauggauu

SEQ ID NO: 1013623 - RNA, 19 nt, Artificial Sequence
  Description of Artificial Sequence: Synthetic oligonucleotide
agguacgggugagccagug

SEQ ID NO: 1013624 - RNA, 19 nt, Artificial Sequence
  Description of Artificial Sequence: Synthetic oligonucleotide
agaaugugguugagcuggu

SEQ ID NO: 1013625 - RNA, 19 nt, Artificial Sequence
  Description of Artificial Sequence: Synthetic oligonucleotide
cuuugagagggagaggguu

SEQ ID NO: 1013626 - RNA, 19 nt, Artificial Sequence
  Description of Artificial Sequence: Synthetic oligonucleotide
cucagugugcgcuggcagu

SEQ ID NO: 1013627 - RNA, 19 nt, Artificial Sequence
  Description of Artificial Sequence: Synthetic oligonucleotide
gcggaaucgcagcaagauc

SEQ ID NO: 1013628 - RNA, 19 nt, Artificial Sequence
  Description of Artificial Sequence: Synthetic oligonucleotide
cccuuccauuccagaaugg

SEQ ID NO: 1013629 - RNA, 19 nt, Artificial Sequence
  Description of Artificial Sequence: Synthetic oligonucleotide
gcgcacguggucauaagca

SEQ ID NO: 1013630 - RNA, 19 nt, Artificial Sequence
  Description of Artificial Sequence: Synthetic oligonucleotide
uucgagccuucauguugau

SEQ ID NO: 1013631 - RNA, 19 nt, Artificial Sequence
  Description of Artificial Sequence: Synthetic oligonucleotide
gcugcguguagcgcgggcc

SEQ ID NO: 1013632 - RNA, 19 nt, Artificial Sequence
  Description of Artificial Sequence: Synthetic oligonucleotide
guagguaguuucgagccuu

SEQ ID NO: 1013633 - RNA, 19 nt, Artificial Sequence
  Description of Artificial Sequence: Synthetic oligonucleotide
guagaggaaguagcagaua

SEQ ID NO: 1013634 - RNA, 19 nt, Artificial Sequence
  Description of Artificial Sequence: Synthetic oligonucleotide
ccacgggccaccuccacuc

SEQ ID NO: 1013635 - RNA, 19 nt, Artificial Sequence
  Description of Artificial Sequence: Synthetic oligonucleotide
ggucauaagcagagcugac

SEQ ID NO: 1013636 - RNA, 19 nt, Artificial Sequence
  Description of Artificial Sequence: Synthetic oligonucleotide
gguagaggaaguagcagau

SEQ ID NO: 1013637 - RNA, 19 nt, Artificial Sequence
  Description of Artificial Sequence: Synthetic oligonucleotide
gguaguuucgagccuucau

SEQ ID NO: 1013638 - RNA, 19 nt, Artificial Sequence
  Description of Artificial Sequence: Synthetic oligonucleotide
cuuagggaacagggauguc

SEQ ID NO: 1013639 - RNA, 19 nt, Artificial Sequence
  Description of Artificial Sequence: Synthetic oligonucleotide
cagugugcgcuggcaguag

SEQ ID NO: 1013640 - RNA, 19 nt, Artificial Sequence
  Description of Artificial Sequence: Synthetic oligonucleotide
cucuagucuugcgcacgug

SEQ ID NO: 1013641 - RNA, 19 nt, Artificial Sequence
  Description of Artificial Sequence: Synthetic oligonucleotide
ccaccccucuguagcauag

SEQ ID NO: 1013642 - RNA, 19 nt, Artificial Sequence
  Description of Artificial Sequence: Synthetic oligonucleotide
uuccaccccucuguagcau

SEQ ID NO: 1013643 - RNA, 19 nt, Artificial Sequence
  Description of Artificial Sequence: Synthetic oligonucleotide
gucgcaggugguauugaua

SEQ ID NO: 1013644 - RNA, 19 nt, Artificial Sequence
  Description of Artificial Sequence: Synthetic oligonucleotide
agagcccuacucagugccu

SEQ ID NO: 1013645 - RNA, 19 nt, Artificial Sequence
  Description of Artificial Sequence: Synthetic oligonucleotide
cccuuagaguuaagcauga

SEQ ID NO: 1013646 - RNA, 19 nt, Artificial Sequence
  Description of Artificial Sequence: Synthetic oligonucleotide
auccgguccagcaggucaa

SEQ ID NO: 1013647 - RNA, 19 nt, Artificial Sequence
  Description of Artificial Sequence: Synthetic oligonucleotide
gggucuggguugagcaaag

SEQ ID NO: 1013648 - RNA, 19 nt, Artificial Sequence
  Description of Artificial Sequence: Synthetic oligonucleotide
auacgcgcccucgccgaug

SEQ ID NO: 1013649 - RNA, 19 nt, Artificial Sequence
  Description of Artificial Sequence: Synthetic oligonucleotide
gcaggucaagagcuuugga

SEQ ID NO: 1013650 - RNA, 19 nt, Artificial Sequence
  Description of Artificial Sequence: Synthetic oligonucleotide
auacuccgucagaaagcca

SEQ ID NO: 1013651 - RNA, 19 nt, Artificial Sequence
  Description of Artificial Sequence: Synthetic oligonucleotide
ggcacggggaaggugggga

SEQ ID NO: 1013652 - RNA, 19 nt, Artificial Sequence
  Description of Artificial Sequence: Synthetic oligonucleotide
gggaugucuguuguuguua

SEQ ID NO: 1013653 - RNA, 19 nt, Artificial Sequence
  Description of Artificial Sequence: Synthetic oligonucleotide
aggaugucucggaugccua

SEQ ID NO: 1013654 - RNA, 19 nt, Artificial Sequence
  Description of Artificial Sequence: Synthetic oligonucleotide
cauggcggaaucgcagcaa

SEQ ID NO: 1013655 - RNA, 19 nt, Artificial Sequence
  Description of Artificial Sequence: Synthetic oligonucleotide
aggucgcaggugguauuga

SEQ ID NO: 1013656 - RNA, 19 nt, Artificial Sequence
  Description of Artificial Sequence: Synthetic oligonucleotide
guguggucaugcucagggu

SEQ ID NO: 1013657 - RNA, 19 nt, Artificial Sequence
  Description of Artificial Sequence: Synthetic oligonucleotide
accaugccauacgcgcccu

SEQ ID NO: 1013658 - RNA, 19 nt, Artificial Sequence
  Description of Artificial Sequence: Synthetic oligonucleotide
ggcguuacagguggcagcu

SEQ ID NO: 1013659 - RNA, 19 nt, Artificial Sequence
  Description of Artificial Sequence: Synthetic oligonucleotide
ccgaaggaucugguagagg

SEQ ID NO: 1013660 - RNA, 19 nt, Artificial Sequence
  Description of Artificial Sequence: Synthetic oligonucleotide
gcgggcccacgucgaaugg

SEQ ID NO: 1013661 - RNA, 19 nt, Artificial Sequence
  Description of Artificial Sequence: Synthetic oligonucleotide
gguguagcccuuagaguua

SEQ ID NO: 1013662 - RNA, 19 nt, Artificial Sequence
  Description of Artificial Sequence: Synthetic oligonucleotide
ggaccaggucuuagggaac

SEQ ID NO: 1013663 - RNA, 19 nt, Artificial Sequence
  Description of Artificial Sequence: Synthetic oligonucleotide
ggcagucauauagcccuuc

SEQ ID NO: 1013664 - RNA, 19 nt, Artificial Sequence
  Description of Artificial Sequence: Synthetic oligonucleotide
ccgccaucuccacuccgcc

SEQ ID NO: 1013665 - RNA, 19 nt, Artificial Sequence
  Description of Artificial Sequence: Synthetic oligonucleotide
gcccucgccgauguacugc

SEQ ID NO: 1013666 - RNA, 19 nt, Artificial Sequence
  Description of Artificial Sequence: Synthetic oligonucleotide
ccagcuccaugucaaaagu

SEQ ID NO: 1013667 - RNA, 19 nt, Artificial Sequence
  Description of Artificial Sequence: Synthetic oligonucleotide
gcuagcagggguagauaaa

SEQ ID NO: 1013668 - RNA, 19 nt, Artificial Sequence
  Description of Artificial Sequence: Synthetic oligonucleotide
ugggugcucggaggauguc

SEQ ID NO: 1013669 - RNA, 19 nt, Artificial Sequence
  Description of Artificial Sequence: Synthetic oligonucleotide
ggagggcuucaggucccgg

SEQ ID NO: 1013670 - RNA, 19 nt, Artificial Sequence
  Description of Artificial Sequence: Synthetic oligonucleotide
gggugaaaggagccugccu

SEQ ID NO: 1013671 - RNA, 19 nt, Artificial Sequence
  Description of Artificial Sequence: Synthetic oligonucleotide
cguccucuacugugaugcg

SEQ ID NO: 1013672 - RNA, 19 nt, Artificial Sequence
  Description of Artificial Sequence: Synthetic oligonucleotide
ccauacgcgcccucgccga

SEQ ID NO: 1013673 - RNA, 19 nt, Artificial Sequence
  Description of Artificial Sequence: Synthetic oligonucleotide
cuuaggccccggggagaug

SEQ ID NO: 1013674 - RNA, 19 nt, Artificial Sequence
  Description of Artificial Sequence: Synthetic oligonucleotide
agcgcgggcccacgucgaa

SEQ ID NO: 1013675 - RNA, 19 nt, Artificial Sequence
  Description of Artificial Sequence: Synthetic oligonucleotide
ggagauggggaagggaauu

SEQ ID NO: 1013676 - RNA, 19 nt, Artificial Sequence
  Description of Artificial Sequence: Synthetic oligonucleotide
ggcucuuaagcagcuugua

SEQ ID NO: 1013677 - RNA, 19 nt, Artificial Sequence
  Description of Artificial Sequence: Synthetic oligonucleotide
ggaugucucggaugccuau

SEQ ID NO: 1013678 - RNA, 19 nt, Artificial Sequence
  Description of Artificial Sequence: Synthetic oligonucleotide
ggucaugcucagggucagc

SEQ ID NO: 1013679 - RNA, 19 nt, Artificial Sequence
  Description of Artificial Sequence: Synthetic oligonucleotide
cgcgggcccacgucgaaug

SEQ ID NO: 1013680 - RNA, 19 nt, Artificial Sequence
  Description of Artificial Sequence: Synthetic oligonucleotide
cccucgccgauguacugca

SEQ ID NO: 1013681 - RNA, 19 nt, Artificial Sequence
  Description of Artificial Sequence: Synthetic oligonucleotide
cccacgucgaauggcuguc

SEQ ID NO: 1013682 - RNA, 19 nt, Artificial Sequence
  Description of Artificial Sequence: Synthetic oligonucleotide
gagcccuacucagugccuu

SEQ ID NO: 1013683 - RNA, 19 nt, Artificial Sequence
  Description of Artificial Sequence: Synthetic oligonucleotide
ggucgcaggugguauugau

SEQ ID NO: 1013684 - RNA, 19 nt, Artificial Sequence
  Description of Artificial Sequence: Synthetic oligonucleotide
aggccccgaaggaucuggu

SEQ ID NO: 1013685 - RNA, 19 nt, Artificial Sequence
  Description of Artificial Sequence: Synthetic oligonucleotide
ggauuugguguagcccuua

SEQ ID NO: 1013686 - RNA, 19 nt, Artificial Sequence
  Description of Artificial Sequence: Synthetic oligonucleotide
gcuugccggggaagauggg

SEQ ID NO: 1013687 - RNA, 19 nt, Artificial Sequence
  Description of Artificial Sequence: Synthetic oligonucleotide
gcgcuggcaguagguuugg

SEQ ID NO: 1013688 - RNA, 19 nt, Artificial Sequence
  Description of Artificial Sequence: Synthetic oligonucleotide
ccacgucgaauggcugucc

SEQ ID NO: 1013689 - RNA, 19 nt, Artificial Sequence
  Description of Artificial Sequence: Synthetic oligonucleotide
gugugcgcuggcaguaggu

SEQ ID NO: 1013690 - RNA, 19 nt, Artificial Sequence
  Description of Artificial Sequence: Synthetic oligonucleotide
guccuagggcagucauaua

SEQ ID NO: 1013691 - RNA, 19 nt, Artificial Sequence
  Description of Artificial Sequence: Synthetic oligonucleotide
gucuugcgcacguggucau

SEQ ID NO: 1013692 - RNA, 19 nt, Artificial Sequence
  Description of Artificial Sequence: Synthetic oligonucleotide
uaccagcguguggccacau

SEQ ID NO: 1013693 - RNA, 19 nt, Artificial Sequence
  Description of Artificial Sequence: Synthetic oligonucleotide
gcccacgucgaauggcugu

SEQ ID NO: 1013694 - RNA, 19 nt, Artificial Sequence
  Description of Artificial Sequence: Synthetic oligonucleotide
cagccucuccuuggggaga

SEQ ID NO: 1013695 - RNA, 19 nt, Artificial Sequence
  Description of Artificial Sequence: Synthetic oligonucleotide
ggugggguuccaacaagau

SEQ ID NO: 1013696 - RNA, 19 nt, Artificial Sequence
  Description of Artificial Sequence: Synthetic oligonucleotide
ggcagagacuguagguagu

SEQ ID NO: 1013697 - RNA, 19 nt, Artificial Sequence
  Description of Artificial Sequence: Synthetic oligonucleotide
gugcucgaaggggcugauc

SEQ ID NO: 1013698 - RNA, 19 nt, Artificial Sequence
  Description of Artificial Sequence: Synthetic oligonucleotide
gugcguccucuacugugau

SEQ ID NO: 1013699 - RNA, 19 nt, Artificial Sequence
  Description of Artificial Sequence: Synthetic oligonucleotide
ccggggagauggggaaggg

SEQ ID NO: 1013700 - RNA, 19 nt, Artificial Sequence
  Description of Artificial Sequence: Synthetic oligonucleotide
ccaccuccacucccaauaa

SEQ ID NO: 1013701 - RNA, 19 nt, Artificial Sequence
  Description of Artificial Sequence: Synthetic oligonucleotide
cucggaugccuaugacauu

SEQ ID NO: 1013702 - RNA, 19 nt, Artificial Sequence
  Description of Artificial Sequence: Synthetic oligonucleotide
cagggcuagcagggguaga

SEQ ID NO: 1013703 - RNA, 19 nt, Artificial Sequence
  Description of Artificial Sequence: Synthetic oligonucleotide
gcauagguccuagggcagu

SEQ ID NO: 1013704 - RNA, 19 nt, Artificial Sequence
  Description of Artificial Sequence: Synthetic oligonucleotide
cagagacuguagguaguuu

SEQ ID NO: 1013705 - RNA, 19 nt, Artificial Sequence
  Description of Artificial Sequence: Synthetic oligonucleotide
ccgguggagcacauuggcu

SEQ ID NO: 1013706 - RNA, 19 nt, Artificial Sequence
  Description of Artificial Sequence: Synthetic oligonucleotide
cguguagcgcgggcccacg

SEQ ID NO: 1013707 - RNA, 19 nt, Artificial Sequence
  Description of Artificial Sequence: Synthetic oligonucleotide
ccaugccauacgcgcccuc

SEQ ID NO: 1013708 - RNA, 19 nt, Artificial Sequence
  Description of Artificial Sequence: Synthetic oligonucleotide
cguuacagguggcagcuuu

SEQ ID NO: 1013709 - RNA, 19 nt, Artificial Sequence
  Description of Artificial Sequence: Synthetic oligonucleotide
cauacgcgcccucgccgau

SEQ ID NO: 1013710 - RNA, 19 nt, Artificial Sequence
  Description of Artificial Sequence: Synthetic oligonucleotide
ccccggggagauggggaag

SEQ ID NO: 1013711 - RNA, 19 nt, Artificial Sequence
  Description of Artificial Sequence: Synthetic oligonucleotide
cagguacgggugagccagu

SEQ ID NO: 1013712 - RNA, 19 nt, Artificial Sequence
  Description of Artificial Sequence: Synthetic oligonucleotide
ggcuggaagcgggcugucu

SEQ ID NO: 1013713 - RNA, 19 nt, Artificial Sequence
  Description of Artificial Sequence: Synthetic oligonucleotide
cgucgaauggcugucccuu

SEQ ID NO: 1013714 - RNA, 19 nt, Artificial Sequence
  Description of Artificial Sequence: Synthetic oligonucleotide
ccuuagaguuaagcaugau

SEQ ID NO: 1013715 - RNA, 19 nt, Artificial Sequence
  Description of Artificial Sequence: Synthetic oligonucleotide
ggugcucgaaggggcugau

SEQ ID NO: 1013716 - RNA, 19 nt, Artificial Sequence
  Description of Artificial Sequence: Synthetic oligonucleotide
gggcagucauauagcccuu

SEQ ID NO: 1013717 - RNA, 19 nt, Artificial Sequence
  Description of Artificial Sequence: Synthetic oligonucleotide
gcgcgggcccacgucgaau

SEQ ID NO: 1013718 - RNA, 19 nt, Artificial Sequence
  Description of Artificial Sequence: Synthetic oligonucleotide
gcguuacagguggcagcuu

SEQ ID NO: 1013719 - RNA, 19 nt, Artificial Sequence
  Description of Artificial Sequence: Synthetic oligonucleotide
ugaauuauacaaaagauag

SEQ ID NO: 1013720 - RNA, 19 nt, Artificial Sequence
  Description of Artificial Sequence: Synthetic oligonucleotide
acaacuuuuaguuaguuac

SEQ ID NO: 1013721 - RNA, 19 nt, Artificial Sequence
  Description of Artificial Sequence: Synthetic oligonucleotide
uauaguacccacuagacag

SEQ ID NO: 1013722 - RNA, 19 nt, Artificial Sequence
  Description of Artificial Sequence: Synthetic oligonucleotide
aauacucauuaucagauag

SEQ ID NO: 1013723 - RNA, 19 nt, Artificial Sequence
  Description of Artificial Sequence: Synthetic oligonucleotide
augcuaaagauauaguacc

SEQ ID NO: 1013724 - RNA, 19 nt, Artificial Sequence
  Description of Artificial Sequence: Synthetic oligonucleotide
guuacuuuaagagagagag

SEQ ID NO: 1013725 - RNA, 19 nt, Artificial Sequence
  Description of Artificial Sequence: Synthetic oligonucleotide
aaucauaacuucuugugug

SEQ ID NO: 1013726 - RNA, 19 nt, Artificial Sequence
  Description of Artificial Sequence: Synthetic oligonucleotide
uuaucagauagucaaaucu

SEQ ID NO: 1013727 - RNA, 19 nt, Artificial Sequence
  Description of Artificial Sequence: Synthetic oligonucleotide
aaagcaugauuauuugugg

SEQ ID NO: 1013728 - RNA, 19 nt, Artificial Sequence
  Description of Artificial Sequence: Synthetic oligonucleotide
aaaguuguguucccaaacg

SEQ ID NO: 1013729 - RNA, 19 nt, Artificial Sequence
  Description of Artificial Sequence: Synthetic oligonucleotide
uacuuuaagagagagagag

SEQ ID NO: 1013730 - RNA, 19 nt, Artificial Sequence
  Description of Artificial Sequence: Synthetic oligonucleotide
uuugucaauccucagauac

SEQ ID NO: 1013731 - RNA, 19 nt, Artificial Sequence
  Description of Artificial Sequence: Synthetic oligonucleotide
uuaagagagagagagagag

SEQ ID NO: 1013732 - RNA, 19 nt, Artificial Sequence
  Description of Artificial Sequence: Synthetic oligonucleotide
uaguuaguuacucugaucu

SEQ ID NO: 1013733 - RNA, 19 nt, Artificial Sequence
  Description of Artificial Sequence: Synthetic oligonucleotide
auuacuaacaugauuguac

SEQ ID NO: 1013734 - RNA, 19 nt, Artificial Sequence
  Description of Artificial Sequence: Synthetic oligonucleotide
aaaucuaacauacucuuaa

SEQ ID NO: 1013735 - RNA, 19 nt, Artificial Sequence
  Description of Artificial Sequence: Synthetic oligonucleotide
uugguuugagaaaagguag

SEQ ID NO: 1013736 - RNA, 19 nt, Artificial Sequence
  Description of Artificial Sequence: Synthetic oligonucleotide
aagagagagagagagagag

SEQ ID NO: 1013737 - RNA, 19 nt, Artificial Sequence
  Description of Artificial Sequence: Synthetic oligonucleotide
uaugauuagguuauugcca

SEQ ID NO: 1013738 - RNA, 19 nt, Artificial Sequence
  Description of Artificial Sequence: Synthetic oligonucleotide
uguaugauuagguuauugc

SEQ ID NO: 1013739 - RNA, 19 nt, Artificial Sequence
  Description of Artificial Sequence: Synthetic oligonucleotide
guaguauucacuuuccacc

SEQ ID NO: 1013740 - RNA, 19 nt, Artificial Sequence
  Description of Artificial Sequence: Synthetic oligonucleotide
aaaacauccuguuagcaau

SEQ ID NO: 1013741 - RNA, 19 nt, Artificial Sequence
  Description of Artificial Sequence: Synthetic oligonucleotide
uuuuauaagcagauaguga

SEQ ID NO: 1013742 - RNA, 19 nt, Artificial Sequence
  Description of Artificial Sequence: Synthetic oligonucleotide
ugcauuauaguguagugcu

SEQ ID NO: 1013743 - RNA, 19 nt, Artificial Sequence
  Description of Artificial Sequence: Synthetic oligonucleotide
cuuuaagagagagagagag

SEQ ID NO: 1013744 - RNA, 19 nt, Artificial Sequence
  Description of Artificial Sequence: Synthetic oligonucleotide
uuuuagaacagcuggguac

SEQ ID NO: 1013745 - RNA, 19 nt, Artificial Sequence
  Description of Artificial Sequence: Synthetic oligonucleotide
uacaacuuagaguuuaaug

SEQ ID NO: 1013746 - RNA, 19 nt, Artificial Sequence
  Description of Artificial Sequence: Synthetic oligonucleotide
uuuuguguauucuucuucc

SEQ ID NO: 1013747 - RNA, 19 nt, Artificial Sequence
  Description of Artificial Sequence: Synthetic oligonucleotide
acaagguggaagcaugacc

SEQ ID NO: 1013748 - RNA, 19 nt, Artificial Sequence
  Description of Artificial Sequence: Synthetic oligonucleotide
guaaucauaacuucuugug

SEQ ID NO: 1013749 - RNA, 19 nt, Artificial Sequence
  Description of Artificial Sequence: Synthetic oligonucleotide
ugaacuguagauugguuug

SEQ ID NO: 1013750 - RNA, 19 nt, Artificial Sequence
  Description of Artificial Sequence: Synthetic oligonucleotide
uuuauuauuauagcagcca

SEQ ID NO: 1013751 - RNA, 19 nt, Artificial Sequence
  Description of Artificial Sequence: Synthetic oligonucleotide
cuuuuaguuaguuacucug

SEQ ID NO: 1013752 - RNA, 19 nt, Artificial Sequence
  Description of Artificial Sequence: Synthetic oligonucleotide
guaugauuagguuauugcc

SEQ ID NO: 1013753 - RNA, 19 nt, Artificial Sequence
  Description of Artificial Sequence: Synthetic oligonucleotide
uguuguaaugguuuuccag

SEQ ID NO: 1013754 - RNA, 19 nt, Artificial Sequence
  Description of Artificial Sequence: Synthetic oligonucleotide
uaaggguaaauuaauuuaa

SEQ ID NO: 1013755 - RNA, 19 nt, Artificial Sequence
  Description of Artificial Sequence: Synthetic oligonucleotide
auuuauuauuauagcagcc

SEQ ID NO: 1013756 - RNA, 19 nt, Artificial Sequence
  Description of Artificial Sequence: Synthetic oligonucleotide
aaucuaacauacucuuaag

SEQ ID NO: 1013757 - RNA, 19 nt, Artificial Sequence
  Description of Artificial Sequence: Synthetic oligonucleotide
ucaguaagacaguugguag

SEQ ID NO: 1013758 - RNA, 19 nt, Artificial Sequence
  Description of Artificial Sequence: Synthetic oligonucleotide
agauauaguacccacuaga

SEQ ID NO: 1013759 - RNA, 19 nt, Artificial Sequence
  Description of Artificial Sequence: Synthetic oligonucleotide
auugcaagguaguauucac

SEQ ID NO: 1013760 - RNA, 19 nt, Artificial Sequence
  Description of Artificial Sequence: Synthetic oligonucleotide
gagagagagagagagagag

SEQ ID NO: 1013761 - RNA, 19 nt, Artificial Sequence
  Description of Artificial Sequence: Synthetic oligonucleotide
aaugguuuuccagaauuag

SEQ ID NO: 1013762 - RNA, 19 nt, Artificial Sequence
  Description of Artificial Sequence: Synthetic oligonucleotide
agaggcaaaggguuucucc

SEQ ID NO: 1013763 - RNA, 19 nt, Artificial Sequence
  Description of Artificial Sequence: Synthetic oligonucleotide
uuuuaguuaguuacucuga

SEQ ID NO: 1013764 - RNA, 19 nt, Artificial Sequence
  Description of Artificial Sequence: Synthetic oligonucleotide
auuguuuccauaaaucaag

SEQ ID NO: 1013765 - RNA, 19 nt, Artificial Sequence
  Description of Artificial Sequence: Synthetic oligonucleotide
uaaucauaacuucuugugu

SEQ ID NO: 1013766 - RNA, 19 nt, Artificial Sequence
  Description of Artificial Sequence: Synthetic oligonucleotide
auugccacgauuccaacug

SEQ ID NO: 1013767 - RNA, 19 nt, Artificial Sequence
  Description of Artificial Sequence: Synthetic oligonucleotide
agauagucaaaucuaacau

SEQ ID NO: 1013768 - RNA, 19 nt, Artificial Sequence
  Description of Artificial Sequence: Synthetic oligonucleotide
cuaaagauauaguacccac

SEQ ID NO: 1013769 - RNA, 19 nt, Artificial Sequence
  Description of Artificial Sequence: Synthetic oligonucleotide
aaugcgcaaguccagcuug

SEQ ID NO: 1013770 - RNA, 19 nt, Artificial Sequence
  Description of Artificial Sequence: Synthetic oligonucleotide
uuacuaacaugauuguaca

SEQ ID NO: 1013771 - RNA, 19 nt, Artificial Sequence
  Description of Artificial Sequence: Synthetic oligonucleotide
ucuaaaacauccuguuagc

SEQ ID NO: 1013772 - RNA, 19 nt, Artificial Sequence
  Description of Artificial Sequence: Synthetic oligonucleotide
aacaaggccaguugcuguc

SEQ ID NO: 1013773 - RNA, 19 nt, Artificial Sequence
  Description of Artificial Sequence: Synthetic oligonucleotide
gauugcuacuccuagguca

SEQ ID NO: 1013774 - RNA, 19 nt, Artificial Sequence
  Description of Artificial Sequence: Synthetic oligonucleotide
ugagaacugaaucuugagu

SEQ ID NO: 1013775 - RNA, 19 nt, Artificial Sequence
  Description of Artificial Sequence: Synthetic oligonucleotide
uuauuauuauagcagccau

SEQ ID NO: 1013776 - RNA, 19 nt, Artificial Sequence
  Description of Artificial Sequence: Synthetic oligonucleotide
caaacuauuucucagcuga

SEQ ID NO: 1013777 - RNA, 19 nt, Artificial Sequence
  Description of Artificial Sequence: Synthetic oligonucleotide
uaacauacucuuaagggua

SEQ ID NO: 1013778 - RNA, 19 nt, Artificial Sequence
  Description of Artificial Sequence: Synthetic oligonucleotide
aggcaacaaacauuucucc

SEQ ID NO: 1013779 - RNA, 19 nt, Artificial Sequence
  Description of Artificial Sequence: Synthetic oligonucleotide
auuauugcuauuuuauaua

SEQ ID NO: 1013780 - RNA, 19 nt, Artificial Sequence
  Description of Artificial Sequence: Synthetic oligonucleotide
aaugggccgucuuuuguuc

SEQ ID NO: 1013781 - RNA, 19 nt, Artificial Sequence
  Description of Artificial Sequence: Synthetic oligonucleotide
agaacauuauuaaaaguug

SEQ ID NO: 1013782 - RNA, 19 nt, Artificial Sequence
  Description of Artificial Sequence: Synthetic oligonucleotide
uaaaacauccuguuagcaa

SEQ ID NO: 1013783 - RNA, 19 nt, Artificial Sequence
  Description of Artificial Sequence: Synthetic oligonucleotide
aauaacaggauuccuccuu

SEQ ID NO: 1013784 - RNA, 19 nt, Artificial Sequence
  Description of Artificial Sequence: Synthetic oligonucleotide
ugcuaaagauauaguaccc

SEQ ID NO: 1013785 - RNA, 19 nt, Artificial Sequence
  Description of Artificial Sequence: Synthetic oligonucleotide
auaacaggauuccuccuuc

SEQ ID NO: 1013786 - RNA, 19 nt, Artificial Sequence
  Description of Artificial Sequence: Synthetic oligonucleotide
aacaccguguaugauuagg

SEQ ID NO: 1013787 - RNA, 19 nt, Artificial Sequence
  Description of Artificial Sequence: Synthetic oligonucleotide
cauaacuucuugugugucg

SEQ ID NO: 1013788 - RNA, 19 nt, Artificial Sequence
  Description of Artificial Sequence: Synthetic oligonucleotide
aagguaguauucacuuucc

SEQ ID NO: 1013789 - RNA, 19 nt, Artificial Sequence
  Description of Artificial Sequence: Synthetic oligonucleotide
ugauuguacaaccacuuuu

SEQ ID NO: 1013790 - RNA, 19 nt, Artificial Sequence
  Description of Artificial Sequence: Synthetic oligonucleotide
ugugcgacagaacagucuc

SEQ ID NO: 1013791 - RNA, 19 nt, Artificial Sequence
  Description of Artificial Sequence: Synthetic oligonucleotide
uuuaguuaguuacucugau

SEQ ID NO: 1013792 - RNA, 19 nt, Artificial Sequence
  Description of Artificial Sequence: Synthetic oligonucleotide
aaaaugcgcaaguccagcu

SEQ ID NO: 1013793 - RNA, 19 nt, Artificial Sequence
  Description of Artificial Sequence: Synthetic oligonucleotide
gauauaguacccacuagac

SEQ ID NO: 1013794 - RNA, 19 nt, Artificial Sequence
  Description of Artificial Sequence: Synthetic oligonucleotide
ugaauaacauaaugagaac

SEQ ID NO: 1013795 - RNA, 19 nt, Artificial Sequence
  Description of Artificial Sequence: Synthetic oligonucleotide
ucccaaacgugaauuauac

SEQ ID NO: 1013796 - RNA, 19 nt, Artificial Sequence
  Description of Artificial Sequence: Synthetic oligonucleotide
ugugcauuauaguguagug

SEQ ID NO: 1013797 - RNA, 19 nt, Artificial Sequence
  Description of Artificial Sequence: Synthetic oligonucleotide
aauuguuuccauaaaucaa

SEQ ID NO: 1013798 - RNA, 19 nt, Artificial Sequence
  Description of Artificial Sequence: Synthetic oligonucleotide
gucugugaacuguagauug

SEQ ID NO: 1013799 - RNA, 19 nt, Artificial Sequence
  Description of Artificial Sequence: Synthetic oligonucleotide
ugguuucucaaacaccgug

SEQ ID NO: 1013800 - RNA, 19 nt, Artificial Sequence
  Description of Artificial Sequence: Synthetic oligonucleotide
guuugagaaaagguagucg

SEQ ID NO: 1013801 - RNA, 19 nt, Artificial Sequence
  Description of Artificial Sequence: Synthetic oligonucleotide
aggguaaauuaauuuaaga

SEQ ID NO: 1013802 - RNA, 19 nt, Artificial Sequence
  Description of Artificial Sequence: Synthetic oligonucleotide
ugaccuguagagcagaguu

SEQ ID NO: 1013803 - RNA, 19 nt, Artificial Sequence
  Description of Artificial Sequence: Synthetic oligonucleotide
uuuaagagagagagagaga

SEQ ID NO: 1013804 - RNA, 19 nt, Artificial Sequence
  Description of Artificial Sequence: Synthetic oligonucleotide
aaguugcaauccucauugc

SEQ ID NO: 1013805 - RNA, 19 nt, Artificial Sequence
  Description of Artificial Sequence: Synthetic oligonucleotide
ucagauagucaaaucuaac

SEQ ID NO: 1013806 - RNA, 19 nt, Artificial Sequence
  Description of Artificial Sequence: Synthetic oligonucleotide
uuuagaacagcuggguaca

SEQ ID NO: 1013807 - RNA, 19 nt, Artificial Sequence
  Description of Artificial Sequence: Synthetic oligonucleotide
uguagauugguuugagaaa

SEQ ID NO: 1013808 - RNA, 19 nt, Artificial Sequence
  Description of Artificial Sequence: Synthetic oligonucleotide
ucaaacaccguguaugauu

SEQ ID NO: 1013809 - RNA, 19 nt, Artificial Sequence
  Description of Artificial Sequence: Synthetic oligonucleotide
gagagagagagagagaaga

SEQ ID NO: 1013810 - RNA, 19 nt, Artificial Sequence
  Description of Artificial Sequence: Synthetic oligonucleotide
ugucaauccucagauacca

SEQ ID NO: 1013811 - RNA, 19 nt, Artificial Sequence
  Description of Artificial Sequence: Synthetic oligonucleotide
aagaguuccgugucugcug

SEQ ID NO: 1013812 - RNA, 19 nt, Artificial Sequence
  Description of Artificial Sequence: Synthetic oligonucleotide
cagauagucaaaucuaaca

SEQ ID NO: 1013813 - RNA, 19 nt, Artificial Sequence
  Description of Artificial Sequence: Synthetic oligonucleotide
ugucaguauccauuugugc

SEQ ID NO: 1013814 - RNA, 19 nt, Artificial Sequence
  Description of Artificial Sequence: Synthetic oligonucleotide
aacuuagaguuuaaugcug

SEQ ID NO: 1013815 - RNA, 19 nt, Artificial Sequence
  Description of Artificial Sequence: Synthetic oligonucleotide
auuagguuauugccauagg

SEQ ID NO: 1013816 - RNA, 19 nt, Artificial Sequence
  Description of Artificial Sequence: Synthetic oligonucleotide
auauaguacccacuagaca

SEQ ID NO: 1013817 - RNA, 19 nt, Artificial Sequence
  Description of Artificial Sequence: Synthetic oligonucleotide
uucaauuugaguggcauuu

SEQ ID NO: 1013818 - RNA, 19 nt, Artificial Sequence
  Description of Artificial Sequence: Synthetic oligonucleotide
uuaaugcuguaaccacagg

SEQ ID NO: 1013819 - RNA, 19 nt, Artificial Sequence
  Description of Artificial Sequence: Synthetic oligonucleotide
uacucauuaucagauaguc

SEQ ID NO: 1013820 - RNA, 19 nt, Artificial Sequence
  Description of Artificial Sequence: Synthetic oligonucleotide
uugucaauccucagauacc

SEQ ID NO: 1013821 - RNA, 19 nt, Artificial Sequence
  Description of Artificial Sequence: Synthetic oligonucleotide
ucguuugucaauccucaga

SEQ ID NO: 1013822 - RNA, 19 nt, Artificial Sequence
  Description of Artificial Sequence: Synthetic oligonucleotide
acccacuagacagacaagg

SEQ ID NO: 1013823 - RNA, 19 nt, Artificial Sequence
  Description of Artificial Sequence: Synthetic oligonucleotide
guuagcaauaccuuuucaa

SEQ ID NO: 1013824 - RNA, 19 nt, Artificial Sequence
  Description of Artificial Sequence: Synthetic oligonucleotide
aacauccuguuagcaauac

SEQ ID NO: 1013825 - RNA, 19 nt, Artificial Sequence
  Description of Artificial Sequence: Synthetic oligonucleotide
cauaaugagaacugaaucu

SEQ ID NO: 1013826 - RNA, 19 nt, Artificial Sequence
  Description of Artificial Sequence: Synthetic oligonucleotide
agccccuuuugauuuaagg

SEQ ID NO: 1013827 - RNA, 19 nt, Artificial Sequence
  Description of Artificial Sequence: Synthetic oligonucleotide
cuguagauugguuugagaa

SEQ ID NO: 1013828 - RNA, 19 nt, Artificial Sequence
  Description of Artificial Sequence: Synthetic oligonucleotide
auuugugcauuauagugua

SEQ ID NO: 1013829 - RNA, 19 nt, Artificial Sequence
  Description of Artificial Sequence: Synthetic oligonucleotide
aacuucuugugugucgcuc

SEQ ID NO: 1013830 - RNA, 19 nt, Artificial Sequence
  Description of Artificial Sequence: Synthetic oligonucleotide
ugcauacguguuguaaugg

SEQ ID NO: 1013831 - RNA, 19 nt, Artificial Sequence
  Description of Artificial Sequence: Synthetic oligonucleotide
uacacaagaguuccguguc

SEQ ID NO: 1013832 - RNA, 19 nt, Artificial Sequence
  Description of Artificial Sequence: Synthetic oligonucleotide
cagauagugauauuaaaua

SEQ ID NO: 1013833 - RNA, 19 nt, Artificial Sequence
  Description of Artificial Sequence: Synthetic oligonucleotide
gagagagagagaagaaaag

SEQ ID NO: 1013834 - RNA, 19 nt, Artificial Sequence
  Description of Artificial Sequence: Synthetic oligonucleotide
uccauuugugcauuauagu

SEQ ID NO: 1013835 - RNA, 19 nt, Artificial Sequence
  Description of Artificial Sequence: Synthetic oligonucleotide
acagguugcaacaaggcca

SEQ ID NO: 1013836 - RNA, 19 nt, Artificial Sequence
  Description of Artificial Sequence: Synthetic oligonucleotide
agcuucugauaccaauaac

SEQ ID NO: 1013837 - RNA, 19 nt, Artificial Sequence
  Description of Artificial Sequence: Synthetic oligonucleotide
gaauaacauaaugagaacu

SEQ ID NO: 1013838 - RNA, 19 nt, Artificial Sequence
  Description of Artificial Sequence: Synthetic oligonucleotide
ggcaacaaacauuucuccg

SEQ ID NO: 1013839 - RNA, 19 nt, Artificial Sequence
  Description of Artificial Sequence: Synthetic oligonucleotide
guuucuccgugugugagcg

SEQ ID NO: 1013840 - RNA, 19 nt, Artificial Sequence
  Description of Artificial Sequence: Synthetic oligonucleotide
guuauuuuguggugagaug

SEQ ID NO: 1013841 - RNA, 19 nt, Artificial Sequence
  Description of Artificial Sequence: Synthetic oligonucleotide
ccaauaacaggauuccucc

SEQ ID NO: 1013842 - RNA, 19 nt, Artificial Sequence
  Description of Artificial Sequence: Synthetic oligonucleotide
ugguuugagaaaagguagu

SEQ ID NO: 1013843 - RNA, 19 nt, Artificial Sequence
  Description of Artificial Sequence: Synthetic oligonucleotide
aguugcaauccucauugca

SEQ ID NO: 1013844 - RNA, 19 nt, Artificial Sequence
  Description of Artificial Sequence: Synthetic oligonucleotide
uucuccgugugugagcgcg

SEQ ID NO: 1013845 - RNA, 19 nt, Artificial Sequence
  Description of Artificial Sequence: Synthetic oligonucleotide
gagaacugaaucuugaguu

SEQ ID NO: 1013846 - RNA, 19 nt, Artificial Sequence
  Description of Artificial Sequence: Synthetic oligonucleotide
uuucuaaaacauccuguua

SEQ ID NO: 1013847 - RNA, 19 nt, Artificial Sequence
  Description of Artificial Sequence: Synthetic oligonucleotide
gagagagagagagagagaa

SEQ ID NO: 1013848 - RNA, 19 nt, Artificial Sequence
  Description of Artificial Sequence: Synthetic oligonucleotide
uuugaguggcauuuauuau

SEQ ID NO: 1013849 - RNA, 19 nt, Artificial Sequence
  Description of Artificial Sequence: Synthetic oligonucleotide
guacccacuagacagacaa

SEQ ID NO: 1013850 - RNA, 19 nt, Artificial Sequence
  Description of Artificial Sequence: Synthetic oligonucleotide
uuaguuacucugaucugau

SEQ ID NO: 1013851 - RNA, 19 nt, Artificial Sequence
  Description of Artificial Sequence: Synthetic oligonucleotide
agucuccucacccuuauau

SEQ ID NO: 1013852 - RNA, 19 nt, Artificial Sequence
  Description of Artificial Sequence: Synthetic oligonucleotide
uuaguuaguuacucugauc

SEQ ID NO: 1013853 - RNA, 19 nt, Artificial Sequence
  Description of Artificial Sequence: Synthetic oligonucleotide
gaaaaugggccgucuuuug

SEQ ID NO: 1013854 - RNA, 19 nt, Artificial Sequence
  Description of Artificial Sequence: Synthetic oligonucleotide
ugcuacuccuaggucaugg

SEQ ID NO: 1013855 - RNA, 19 nt, Artificial Sequence
  Description of Artificial Sequence: Synthetic oligonucleotide
uguuagcaauaccuuuuca

SEQ ID NO: 1013856 - RNA, 19 nt, Artificial Sequence
  Description of Artificial Sequence: Synthetic oligonucleotide
uuauaguguagugcuccgg

SEQ ID NO: 1013857 - RNA, 19 nt, Artificial Sequence
  Description of Artificial Sequence: Synthetic oligonucleotide
augcauacguguuguaaug

SEQ ID NO: 1013858 - RNA, 19 nt, Artificial Sequence
  Description of Artificial Sequence: Synthetic oligonucleotide
uuguggugagaugaaauac

SEQ ID NO: 1013859 - RNA, 19 nt, Artificial Sequence
  Description of Artificial Sequence: Synthetic oligonucleotide
uauauccccuccuuccaug

SEQ ID NO: 1013860 - RNA, 19 nt, Artificial Sequence
  Description of Artificial Sequence: Synthetic oligonucleotide
cuggguacacaagaguucc

SEQ ID NO: 1013861 - RNA, 19 nt, Artificial Sequence
  Description of Artificial Sequence: Synthetic oligonucleotide
agagagagagagaagaaaa

SEQ ID NO: 1013862 - RNA, 19 nt, Artificial Sequence
  Description of Artificial Sequence: Synthetic oligonucleotide
uauccauuugugcauuaua

SEQ ID NO: 1013863 - RNA, 19 nt, Artificial Sequence
  Description of Artificial Sequence: Synthetic oligonucleotide
uaagagagagagagagaga

SEQ ID NO: 1013864 - RNA, 19 nt, Artificial Sequence
  Description of Artificial Sequence: Synthetic oligonucleotide
aacuauuucucagcugaga

SEQ ID NO: 1013865 - RNA, 19 nt, Artificial Sequence
  Description of Artificial Sequence: Synthetic oligonucleotide
cuaacauacucuuaagggu

SEQ ID NO: 1013866 - RNA, 19 nt, Artificial Sequence
  Description of Artificial Sequence: Synthetic oligonucleotide
agucgcucuuuccaaacug

SEQ ID NO: 1013867 - RNA, 19 nt, Artificial Sequence
  Description of Artificial Sequence: Synthetic oligonucleotide
guuaguuacucugaucuga

SEQ ID NO: 1013868 - RNA, 19 nt, Artificial Sequence
  Description of Artificial Sequence: Synthetic oligonucleotide
guagauugguuugagaaaa

SEQ ID NO: 1013869 - RNA, 19 nt, Artificial Sequence
  Description of Artificial Sequence: Synthetic oligonucleotide
aguuaguuacucugaucug

SEQ ID NO: 1013870 - RNA, 19 nt, Artificial Sequence
  Description of Artificial Sequence: Synthetic oligonucleotide
ugcaugcuaaagauauagu

SEQ ID NO: 1013871 - RNA, 19 nt, Artificial Sequence
  Description of Artificial Sequence: Synthetic oligonucleotide
ucacauucguagccguuug

SEQ ID NO: 1013872 - RNA, 19 nt, Artificial Sequence
  Description of Artificial Sequence: Synthetic oligonucleotide
cucagauaccacugugugc

SEQ ID NO: 1013873 - RNA, 19 nt, Artificial Sequence
  Description of Artificial Sequence: Synthetic oligonucleotide
cuuugaaguugcaauccuc

SEQ ID NO: 1013874 - RNA, 19 nt, Artificial Sequence
  Description of Artificial Sequence: Synthetic oligonucleotide
aacuguagauugguuugag

SEQ ID NO: 1013875 - RNA, 19 nt, Artificial Sequence
  Description of Artificial Sequence: Synthetic oligonucleotide
guagaugucuccuucuaaa

SEQ ID NO: 1013876 - RNA, 19 nt, Artificial Sequence
  Description of Artificial Sequence: Synthetic oligonucleotide
accguguaugauuagguua

SEQ ID NO: 1013877 - RNA, 19 nt, Artificial Sequence
  Description of Artificial Sequence: Synthetic oligonucleotide
ccaaacgugaauuauacaa

SEQ ID NO: 1013878 - RNA, 19 nt, Artificial Sequence
  Description of Artificial Sequence: Synthetic oligonucleotide
cagguugcaacaaggccag

SEQ ID NO: 1013879 - RNA, 19 nt, Artificial Sequence
  Description of Artificial Sequence: Synthetic oligonucleotide
agggauuauaaaauguuau

SEQ ID NO: 1013880 - RNA, 19 nt, Artificial Sequence
  Description of Artificial Sequence: Synthetic oligonucleotide
aguguagugcuccgggugu

SEQ ID NO: 1013881 - RNA, 19 nt, Artificial Sequence
  Description of Artificial Sequence: Synthetic oligonucleotide
caaacgugaauuauacaaa

SEQ ID NO: 1013882 - RNA, 19 nt, Artificial Sequence
  Description of Artificial Sequence: Synthetic oligonucleotide
gugcauuauaguguagugc

SEQ ID NO: 1013883 - RNA, 19 nt, Artificial Sequence
  Description of Artificial Sequence: Synthetic oligonucleotide
aguaagacaguugguagau

SEQ ID NO: 1013884 - RNA, 19 nt, Artificial Sequence
  Description of Artificial Sequence: Synthetic oligonucleotide
acucuuaaggguaaauuaa

SEQ ID NO: 1013885 - RNA, 19 nt, Artificial Sequence
  Description of Artificial Sequence: Synthetic oligonucleotide
uucaccuugccucguuugu

SEQ ID NO: 1013886 - RNA, 19 nt, Artificial Sequence
  Description of Artificial Sequence: Synthetic oligonucleotide
gcuucugauaccaauaaca

SEQ ID NO: 1013887 - RNA, 19 nt, Artificial Sequence
  Description of Artificial Sequence: Synthetic oligonucleotide
ugaugcauacguguuguaa

SEQ ID NO: 1013888 - RNA, 19 nt, Artificial Sequence
  Description of Artificial Sequence: Synthetic oligonucleotide
ugauaccaauaacaggauu

SEQ ID NO: 1013889 - RNA, 19 nt, Artificial Sequence
  Description of Artificial Sequence: Synthetic oligonucleotide
uagucaaaucuaacauacu

SEQ ID NO: 1013890 - RNA, 19 nt, Artificial Sequence
  Description of Artificial Sequence: Synthetic oligonucleotide
ccuuugauugccacgauuc

SEQ ID NO: 1013891 - RNA, 19 nt, Artificial Sequence
  Description of Artificial Sequence: Synthetic oligonucleotide
ucaugucauugcaugcuaa

SEQ ID NO: 1013892 - RNA, 19 nt, Artificial Sequence
  Description of Artificial Sequence: Synthetic oligonucleotide
ucccugcugaaugaaacug

SEQ ID NO: 1013893 - RNA, 19 nt, Artificial Sequence
  Description of Artificial Sequence: Synthetic oligonucleotide
agcugaugcauacguguug

SEQ ID NO: 1013894 - RNA, 19 nt, Artificial Sequence
  Description of Artificial Sequence: Synthetic oligonucleotide
aaacaccguguaugauuag

SEQ ID NO: 1013895 - RNA, 19 nt, Artificial Sequence
  Description of Artificial Sequence: Synthetic oligonucleotide
agaguuccgugucugcugu

SEQ ID NO: 1013896 - RNA, 19 nt, Artificial Sequence
  Description of Artificial Sequence: Synthetic oligonucleotide
gaugcauacguguuguaau

SEQ ID NO: 1013897 - RNA, 19 nt, Artificial Sequence
  Description of Artificial Sequence: Synthetic oligonucleotide
gauugguuugagaaaaggu

SEQ ID NO: 1013898 - RNA, 19 nt, Artificial Sequence
  Description of Artificial Sequence: Synthetic oligonucleotide
acuguagauugguuugaga

SEQ ID NO: 1013899 - RNA, 19 nt, Artificial Sequence
  Description of Artificial Sequence: Synthetic oligonucleotide
uuguguucccaaacgugaa

SEQ ID NO: 1013900 - RNA, 19 nt, Artificial Sequence
  Description of Artificial Sequence: Synthetic oligonucleotide
aguucacauucguagccgu

SEQ ID NO: 1013901 - RNA, 19 nt, Artificial Sequence
  Description of Artificial Sequence: Synthetic oligonucleotide
caaacaccguguaugauua

SEQ ID NO: 1013902 - RNA, 19 nt, Artificial Sequence
  Description of Artificial Sequence: Synthetic oligonucleotide
aagcagauagugauauuaa

SEQ ID NO: 1013903 - RNA, 19 nt, Artificial Sequence
  Description of Artificial Sequence: Synthetic oligonucleotide
ugcgacagaacagucuccu

SEQ ID NO: 1013904 - RNA, 19 nt, Artificial Sequence
  Description of Artificial Sequence: Synthetic oligonucleotide
ucacuauuacuaacaugau

SEQ ID NO: 1013905 - RNA, 19 nt, Artificial Sequence
  Description of Artificial Sequence: Synthetic oligonucleotide
ugauugcuacuccuagguc

SEQ ID NO: 1013906 - RNA, 19 nt, Artificial Sequence
  Description of Artificial Sequence: Synthetic oligonucleotide
uacuaacaugauuguacaa

SEQ ID NO: 1013907 - RNA, 19 nt, Artificial Sequence
  Description of Artificial Sequence: Synthetic oligonucleotide
uugcaauccucauugcauu

SEQ ID NO: 1013908 - RNA, 19 nt, Artificial Sequence
  Description of Artificial Sequence: Synthetic oligonucleotide
uguucccaaacgugaauua

SEQ ID NO: 1013909 - RNA, 19 nt, Artificial Sequence
  Description of Artificial Sequence: Synthetic oligonucleotide
uucuccgccacuguguguc

SEQ ID NO: 1013910 - RNA, 19 nt, Artificial Sequence
  Description of Artificial Sequence: Synthetic oligonucleotide
uaacaggauuccuccuuca

SEQ ID NO: 1013911 - RNA, 19 nt, Artificial Sequence
  Description of Artificial Sequence: Synthetic oligonucleotide
uuauuauagcagccauuuu

SEQ ID NO: 1013912 - RNA, 19 nt, Artificial Sequence
  Description of Artificial Sequence: Synthetic oligonucleotide
cuugccucguuugucaauc

SEQ ID NO: 1013913 - RNA, 19 nt, Artificial Sequence
  Description of Artificial Sequence: Synthetic oligonucleotide
guguaugauuagguuauug

SEQ ID NO: 1013914 - RNA, 19 nt, Artificial Sequence
  Description of Artificial Sequence: Synthetic oligonucleotide
cauucguagccguuugcuc

SEQ ID NO: 1013915 - RNA, 19 nt, Artificial Sequence
  Description of Artificial Sequence: Synthetic oligonucleotide
cuguuagcaauaccuuuuc

SEQ ID NO: 1013916 - RNA, 19 nt, Artificial Sequence
  Description of Artificial Sequence: Synthetic oligonucleotide
gagagagagagagaagaaa

SEQ ID NO: 1013917 - RNA, 19 nt, Artificial Sequence
  Description of Artificial Sequence: Synthetic oligonucleotide
augucaguauccauuugug

SEQ ID NO: 1013918 - RNA, 19 nt, Artificial Sequence
  Description of Artificial Sequence: Synthetic oligonucleotide
guagucgcucuuuccaaac

SEQ ID NO: 1013919 - RNA, 19 nt, Artificial Sequence
  Description of Artificial Sequence: Synthetic oligonucleotide
uagucgcucuuuccaaacu

SEQ ID NO: 1013920 - RNA, 19 nt, Artificial Sequence
  Description of Artificial Sequence: Synthetic oligonucleotide
ugaaugaaacugguuucuc

SEQ ID NO: 1013921 - RNA, 19 nt, Artificial Sequence
  Description of Artificial Sequence: Synthetic oligonucleotide
cuuauauccccuccuucca

SEQ ID NO: 1013922 - RNA, 19 nt, Artificial Sequence
  Description of Artificial Sequence: Synthetic oligonucleotide
acauucguagccguuugcu

SEQ ID NO: 1013923 - RNA, 19 nt, Artificial Sequence
  Description of Artificial Sequence: Synthetic oligonucleotide
auauccccuccuuccaugu

SEQ ID NO: 1013924 - RNA, 19 nt, Artificial Sequence
  Description of Artificial Sequence: Synthetic oligonucleotide
agguaguauucacuuucca

SEQ ID NO: 1013925 - RNA, 19 nt, Artificial Sequence
  Description of Artificial Sequence: Synthetic oligonucleotide
uugccacgauuccaacugc

SEQ ID NO: 1013926 - RNA, 19 nt, Artificial Sequence
  Description of Artificial Sequence: Synthetic oligonucleotide
auacucauuaucagauagu

SEQ ID NO: 1013927 - RNA, 19 nt, Artificial Sequence
  Description of Artificial Sequence: Synthetic oligonucleotide
accccuuugauugccacga

SEQ ID NO: 1013928 - RNA, 19 nt, Artificial Sequence
  Description of Artificial Sequence: Synthetic oligonucleotide
guagccguuugcucugggc

SEQ ID NO: 1013929 - RNA, 19 nt, Artificial Sequence
  Description of Artificial Sequence: Synthetic oligonucleotide
ugccucguuugucaauccu

SEQ ID NO: 1013930 - RNA, 19 nt, Artificial Sequence
  Description of Artificial Sequence: Synthetic oligonucleotide
ugucugugaacuguagauu

SEQ ID NO: 1013931 - RNA, 19 nt, Artificial Sequence
  Description of Artificial Sequence: Synthetic oligonucleotide
caccccuuugauugccacg

SEQ ID NO: 1013932 - RNA, 19 nt, Artificial Sequence
  Description of Artificial Sequence: Synthetic oligonucleotide
gagcgcgugcgcuugugug

SEQ ID NO: 1013933 - RNA, 19 nt, Artificial Sequence
  Description of Artificial Sequence: Synthetic oligonucleotide
acacaagaguuccgugucu

SEQ ID NO: 1013934 - RNA, 19 nt, Artificial Sequence
  Description of Artificial Sequence: Synthetic oligonucleotide
gcaacuugagccucucuac

SEQ ID NO: 1013935 - RNA, 19 nt, Artificial Sequence
  Description of Artificial Sequence: Synthetic oligonucleotide
cauugcaagguaguauuca

SEQ ID NO: 1013936 - RNA, 19 nt, Artificial Sequence
  Description of Artificial Sequence: Synthetic oligonucleotide
gguacacaagaguuccgug

SEQ ID NO: 1013937 - RNA, 19 nt, Artificial Sequence
  Description of Artificial Sequence: Synthetic oligonucleotide
cucguuugucaauccucag

SEQ ID NO: 1013938 - RNA, 19 nt, Artificial Sequence
  Description of Artificial Sequence: Synthetic oligonucleotide
cauguaaucauaacuucuu

SEQ ID NO: 1013939 - RNA, 19 nt, Artificial Sequence
  Description of Artificial Sequence: Synthetic oligonucleotide
acguguuguaaugguuuuc

SEQ ID NO: 1013940 - RNA, 19 nt, Artificial Sequence
  Description of Artificial Sequence: Synthetic oligonucleotide
ugauugccacgauuccaac

SEQ ID NO: 1013941 - RNA, 19 nt, Artificial Sequence
  Description of Artificial Sequence: Synthetic oligonucleotide
agagagagagagagagaag

SEQ ID NO: 1013942 - RNA, 19 nt, Artificial Sequence
  Description of Artificial Sequence: Synthetic oligonucleotide
gacaagguggaagcaugac

SEQ ID NO: 1013943 - RNA, 19 nt, Artificial Sequence
  Description of Artificial Sequence: Synthetic oligonucleotide
cacauucguagccguuugc

SEQ ID NO: 1013944 - RNA, 19 nt, Artificial Sequence
  Description of Artificial Sequence: Synthetic oligonucleotide
gguuauugccauaggaaga

SEQ ID NO: 1013945 - RNA, 19 nt, Artificial Sequence
  Description of Artificial Sequence: Synthetic oligonucleotide
gauugccacgauuccaacu

SEQ ID NO: 1013946 - RNA, 19 nt, Artificial Sequence
  Description of Artificial Sequence: Synthetic oligonucleotide
ucaauuugaguggcauuua

SEQ ID NO: 1013947 - RNA, 19 nt, Artificial Sequence
  Description of Artificial Sequence: Synthetic oligonucleotide
acaccguguaugauuaggu

SEQ ID NO: 1013948 - RNA, 19 nt, Artificial Sequence
  Description of Artificial Sequence: Synthetic oligonucleotide
agcuggguacacaagaguu

SEQ ID NO: 1013949 - RNA, 19 nt, Artificial Sequence
  Description of Artificial Sequence: Synthetic oligonucleotide
auugcuacuccuaggucau

SEQ ID NO: 1013950 - RNA, 19 nt, Artificial Sequence
  Description of Artificial Sequence: Synthetic oligonucleotide
acuuuaagagagagagaga

SEQ ID NO: 1013951 - RNA, 19 nt, Artificial Sequence
  Description of Artificial Sequence: Synthetic oligonucleotide
agguagucgcucuuuccaa

SEQ ID NO: 1013952 - RNA, 19 nt, Artificial Sequence
  Description of Artificial Sequence: Synthetic oligonucleotide
aacugaaucuugaguugau

SEQ ID NO: 1013953 - RNA, 19 nt, Artificial Sequence
  Description of Artificial Sequence: Synthetic oligonucleotide
cagcuugaucaguuuucag

SEQ ID NO: 1013954 - RNA, 19 nt, Artificial Sequence
  Description of Artificial Sequence: Synthetic oligonucleotide
aaacauccuguuagcaaua

SEQ ID NO: 1013955 - RNA, 19 nt, Artificial Sequence
  Description of Artificial Sequence: Synthetic oligonucleotide
uugccucguuugucaaucc

SEQ ID NO: 1013956 - RNA, 19 nt, Artificial Sequence
  Description of Artificial Sequence: Synthetic oligonucleotide
agcgcgugcgcuugugugu

SEQ ID NO: 1013957 - RNA, 19 nt, Artificial Sequence
  Description of Artificial Sequence: Synthetic oligonucleotide
gcuaaagauauaguaccca

SEQ ID NO: 1013958 - RNA, 19 nt, Artificial Sequence
  Description of Artificial Sequence: Synthetic oligonucleotide
uauucacuuuccaccccuu

SEQ ID NO: 1013959 - RNA, 19 nt, Artificial Sequence
  Description of Artificial Sequence: Synthetic oligonucleotide
guugcaauccucauugcau

SEQ ID NO: 1013960 - RNA, 19 nt, Artificial Sequence
  Description of Artificial Sequence: Synthetic oligonucleotide
auaguacccacuagacaga

SEQ ID NO: 1013961 - RNA, 19 nt, Artificial Sequence
  Description of Artificial Sequence: Synthetic oligonucleotide
cccuuugacgggaagcccc

SEQ ID NO: 1013962 - RNA, 19 nt, Artificial Sequence
  Description of Artificial Sequence: Synthetic oligonucleotide
uccggguguucaugaauaa

SEQ ID NO: 1013963 - RNA, 19 nt, Artificial Sequence
  Description of Artificial Sequence: Synthetic oligonucleotide
cguguuguaaugguuuucc

SEQ ID NO: 1013964 - RNA, 19 nt, Artificial Sequence
  Description of Artificial Sequence: Synthetic oligonucleotide
agguggaagcaugaccugu

SEQ ID NO: 1013965 - RNA, 19 nt, Artificial Sequence
  Description of Artificial Sequence: Synthetic oligonucleotide
agagagagagagagaagaa

SEQ ID NO: 1013966 - RNA, 19 nt, Artificial Sequence
  Description of Artificial Sequence: Synthetic oligonucleotide
ucgugcaacuugagccucu

SEQ ID NO: 1013967 - RNA, 19 nt, Artificial Sequence
  Description of Artificial Sequence: Synthetic oligonucleotide
aguauccauuugugcauua

SEQ ID NO: 1013968 - RNA, 19 nt, Artificial Sequence
  Description of Artificial Sequence: Synthetic oligonucleotide
ucccuuugacgggaagccc

SEQ ID NO: 1013969 - RNA, 19 nt, Artificial Sequence
  Description of Artificial Sequence: Synthetic oligonucleotide
guaagacaguugguagaug

SEQ ID NO: 1013970 - RNA, 19 nt, Artificial Sequence
  Description of Artificial Sequence: Synthetic oligonucleotide
cauuaucagauagucaaau

SEQ ID NO: 1013971 - RNA, 19 nt, Artificial Sequence
  Description of Artificial Sequence: Synthetic oligonucleotide
augggccgucuuuuguucu

SEQ ID NO: 1013972 - RNA, 19 nt, Artificial Sequence
  Description of Artificial Sequence: Synthetic oligonucleotide
cuccggguguucaugaaua

SEQ ID NO: 1013973 - RNA, 19 nt, Artificial Sequence
  Description of Artificial Sequence: Synthetic oligonucleotide
ggaaagcaugauuauuugu

SEQ ID NO: 1013974 - RNA, 19 nt, Artificial Sequence
  Description of Artificial Sequence: Synthetic oligonucleotide
agagagagagagagagaga

SEQ ID NO: 1013975 - RNA, 19 nt, Artificial Sequence
  Description of Artificial Sequence: Synthetic oligonucleotide
ccagaauuaguucuuugaa

SEQ ID NO: 1013976 - RNA, 19 nt, Artificial Sequence
  Description of Artificial Sequence: Synthetic oligonucleotide
gggauuauaaaauguuauu

SEQ ID NO: 1013977 - RNA, 19 nt, Artificial Sequence
  Description of Artificial Sequence: Synthetic oligonucleotide
uuucuccgccacugugugu

SEQ ID NO: 1013978 - RNA, 19 nt, Artificial Sequence
  Description of Artificial Sequence: Synthetic oligonucleotide
gugauauuaaauacucauu

SEQ ID NO: 1013979 - RNA, 19 nt, Artificial Sequence
  Description of Artificial Sequence: Synthetic oligonucleotide
gguagaugucuccuucuaa

SEQ ID NO: 1013980 - RNA, 19 nt, Artificial Sequence
  Description of Artificial Sequence: Synthetic oligonucleotide
gguuacuuuaagagagaga

SEQ ID NO: 1013981 - RNA, 19 nt, Artificial Sequence
  Description of Artificial Sequence: Synthetic oligonucleotide
gccucucuacuguagcuac

SEQ ID NO: 1013982 - RNA, 19 nt, Artificial Sequence
  Description of Artificial Sequence: Synthetic oligonucleotide
ggauccaugucaguaucca

SEQ ID NO: 1013983 - RNA, 19 nt, Artificial Sequence
  Description of Artificial Sequence: Synthetic oligonucleotide
gcagauagugauauuaaau

SEQ ID NO: 1013984 - RNA, 19 nt, Artificial Sequence
  Description of Artificial Sequence: Synthetic oligonucleotide
gguguucaugaauaacaua

SEQ ID NO: 1013985 - RNA, 19 nt, Artificial Sequence
  Description of Artificial Sequence: Synthetic oligonucleotide
ugggucccuuucaccuugc

SEQ ID NO: 1013986 - RNA, 19 nt, Artificial Sequence
  Description of Artificial Sequence: Synthetic oligonucleotide
uuucuccgugugugagcgc

SEQ ID NO: 1013987 - RNA, 19 nt, Artificial Sequence
  Description of Artificial Sequence: Synthetic oligonucleotide
ucguagccguuugcucugg

SEQ ID NO: 1013988 - RNA, 19 nt, Artificial Sequence
  Description of Artificial Sequence: Synthetic oligonucleotide
ugugagcgcgugcgcuugu

SEQ ID NO: 1013989 - RNA, 19 nt, Artificial Sequence
  Description of Artificial Sequence: Synthetic oligonucleotide
auccuguuagcaauaccuu

SEQ ID NO: 1013990 - RNA, 19 nt, Artificial Sequence
  Description of Artificial Sequence: Synthetic oligonucleotide
uguguccauuuagcugaug

SEQ ID NO: 1013991 - RNA, 19 nt, Artificial Sequence
  Description of Artificial Sequence: Synthetic oligonucleotide
ucuccgccacugugugucc

SEQ ID NO: 1013992 - RNA, 19 nt, Artificial Sequence
  Description of Artificial Sequence: Synthetic oligonucleotide
ccucguuugucaauccuca

SEQ ID NO: 1013993 - RNA, 19 nt, Artificial Sequence
  Description of Artificial Sequence: Synthetic oligonucleotide
cauacguguuguaaugguu

SEQ ID NO: 1013994 - RNA, 19 nt, Artificial Sequence
  Description of Artificial Sequence: Synthetic oligonucleotide
ccauguaaucauaacuucu

SEQ ID NO: 1013995 - RNA, 19 nt, Artificial Sequence
  Description of Artificial Sequence: Synthetic oligonucleotide
caauuugaguggcauuuau

SEQ ID NO: 1013996 - RNA, 19 nt, Artificial Sequence
  Description of Artificial Sequence: Synthetic oligonucleotide
gguagucgcucuuuccaaa

SEQ ID NO: 1013997 - RNA, 19 nt, Artificial Sequence
  Description of Artificial Sequence: Synthetic oligonucleotide
caauaacaggauuccuccu

SEQ ID NO: 1013998 - RNA, 19 nt, Artificial Sequence
  Description of Artificial Sequence: Synthetic oligonucleotide
gucaauccucagauaccac

SEQ ID NO: 1013999 - RNA, 19 nt, Artificial Sequence
  Description of Artificial Sequence: Synthetic oligonucleotide
gcuggguacacaagaguuc

SEQ ID NO: 1014000 - RNA, 19 nt, Artificial Sequence
  Description of Artificial Sequence: Synthetic oligonucleotide
ccgugugugagcgcgugcg

SEQ ID NO: 1014001 - RNA, 19 nt, Artificial Sequence
  Description of Artificial Sequence: Synthetic oligonucleotide
uccgccacuguguguccau

SEQ ID NO: 1014002 - RNA, 19 nt, Artificial Sequence
  Description of Artificial Sequence: Synthetic oligonucleotide
cucgugcaacuugagccuc

SEQ ID NO: 1014003 - RNA, 19 nt, Artificial Sequence
  Description of Artificial Sequence: Synthetic oligonucleotide
uagugcuccggguguucau

SEQ ID NO: 1014004 - RNA, 19 nt, Artificial Sequence
  Description of Artificial Sequence: Synthetic oligonucleotide
gugcgacagaacagucucc

SEQ ID NO: 1014005 - RNA, 19 nt, Artificial Sequence
  Description of Artificial Sequence: Synthetic oligonucleotide
cugauaccaauaacaggau

SEQ ID NO: 1014006 - RNA, 19 nt, Artificial Sequence
  Description of Artificial Sequence: Synthetic oligonucleotide
gcauacguguuguaauggu

SEQ ID NO: 1014007 - RNA, 19 nt, Artificial Sequence
  Description of Artificial Sequence: Synthetic oligonucleotide
gugugagcgcgugcgcuug

SEQ ID NO: 1014008 - RNA, 19 nt, Artificial Sequence
  Description of Artificial Sequence: Synthetic oligonucleotide
gucgcucuuuccaaacugu

SEQ ID NO: 1014009 - RNA, 19 nt, Artificial Sequence
  Description of Artificial Sequence: Synthetic oligonucleotide
gccucguuugucaauccuc

SEQ ID NO: 1014010 - RNA, 19 nt, Artificial Sequence
  Description of Artificial Sequence: Synthetic oligonucleotide
cauacucuuaaggguaaau

SEQ ID NO: 1014011 - RNA, 19 nt, Artificial Sequence
  Description of Artificial Sequence: Synthetic oligonucleotide
ccguguaugauuagguuau

SEQ ID NO: 1014012 - RNA, 19 nt, Artificial Sequence
  Description of Artificial Sequence: Synthetic oligonucleotide
gugugcgacagaacagucu

SEQ ID NO: 1014013 - RNA, 19 nt, Artificial Sequence
  Description of Artificial Sequence: Synthetic oligonucleotide
ccuguuagcaauaccuuuu

SEQ ID NO: 1014014 - RNA, 19 nt, Artificial Sequence
  Description of Artificial Sequence: Synthetic oligonucleotide
cacccuuauauccccuccu

SEQ ID NO: 1014015 - RNA, 19 nt, Artificial Sequence
  Description of Artificial Sequence: Synthetic oligonucleotide
gcucaugucauugcaugcu

SEQ ID NO: 1014016 - RNA, 19 nt, Artificial Sequence
  Description of Artificial Sequence: Synthetic oligonucleotide
gguggaagcaugaccugua

SEQ ID NO: 1014017 - RNA, 19 nt, Artificial Sequence
  Description of Artificial Sequence: Synthetic oligonucleotide
ggguacacaagaguuccgu

SEQ ID NO: 1014018 - RNA, 19 nt, Artificial Sequence
  Description of Artificial Sequence: Synthetic oligonucleotide
gcgcaaguccagcuugauc

SEQ ID NO: 1014019 - RNA, 19 nt, Artificial Sequence
  Description of Artificial Sequence: Synthetic oligonucleotide
caccguguaugauuagguu

SEQ ID NO: 1014020 - RNA, 19 nt, Artificial Sequence
  Description of Artificial Sequence: Synthetic oligonucleotide
cugaugcauacguguugua

SEQ ID NO: 1014021 - RNA, 19 nt, Artificial Sequence
  Description of Artificial Sequence: Synthetic oligonucleotide
gccacgauuccaacugcca

SEQ ID NO: 1014022 - RNA, 19 nt, Artificial Sequence
  Description of Artificial Sequence: Synthetic oligonucleotide
ccggguguucaugaauaac

SEQ ID NO: 1014023 - RNA, 19 nt, Artificial Sequence
  Description of Artificial Sequence: Synthetic oligonucleotide
gugagcgcgugcgcuugug

SEQ ID NO: 1014024 - RNA, 19 nt, Artificial Sequence
  Description of Artificial Sequence: Synthetic oligonucleotide
ccaccccuuugauugccac

SEQ ID NO: 1014025 - RNA, 19 nt, Artificial Sequence
  Description of Artificial Sequence: Synthetic oligonucleotide
ggguguucaugaauaacau

SEQ ID NO: 1014026 - RNA, 19 nt, Artificial Sequence
  Description of Artificial Sequence: Synthetic oligonucleotide
gguugcaacaaggccaguu

SEQ ID NO: 1014027 - RNA, 19 nt, Artificial Sequence
  Description of Artificial Sequence: Synthetic oligonucleotide
gcaagguaguauucacuuu

SEQ ID NO: 1014028 - RNA, 19 nt, Artificial Sequence
  Description of Artificial Sequence: Synthetic oligonucleotide
ccucgugcaacuugagccu

SEQ ID NO: 1014029 - RNA, 19 nt, Artificial Sequence
  Description of Artificial Sequence: Synthetic oligonucleotide
gcgcgugcgcuugugugug

SEQ ID NO: 1014030 - RNA, 19 nt, Artificial Sequence
  Description of Artificial Sequence: Synthetic oligonucleotide
ccucucuacuguagcuaca

SEQ ID NO: 1014031 - RNA, 19 nt, Artificial Sequence
  Description of Artificial Sequence: Synthetic oligonucleotide
cucaaacaccguguaugau

SEQ ID NO: 1014032 - RNA, 19 nt, Artificial Sequence
  Description of Artificial Sequence: Synthetic oligonucleotide
gugcaacuugagccucucu

SEQ ID NO: 1014033 - RNA, 19 nt, Artificial Sequence
  Description of Artificial Sequence: Synthetic oligonucleotide
cguagccguuugcucuggg

SEQ ID NO: 1014034 - RNA, 19 nt, Artificial Sequence
  Description of Artificial Sequence: Synthetic oligonucleotide
agguugcaacaaggccagu

SEQ ID NO: 1014035 - RNA, 19 nt, Artificial Sequence
  Description of Artificial Sequence: Synthetic oligonucleotide
ccuuugacgggaagccccu

SEQ ID NO: 1014036 - RNA, 19 nt, Artificial Sequence
  Description of Artificial Sequence: Synthetic oligonucleotide
ccccuccuuccauguaauc

SEQ ID NO: 1014037 - RNA, 19 nt, Artificial Sequence
  Description of Artificial Sequence: Synthetic oligonucleotide
cgugcaacuugagccucuc

SEQ ID NO: 1014038 - RNA, 19 nt, Artificial Sequence
  Description of Artificial Sequence: Synthetic oligonucleotide
ggccaguugcugucguguu

SEQ ID NO: 1014039 - RNA, 19 nt, Artificial Sequence
  Description of Artificial Sequence: Synthetic oligonucleotide
cccuuugauugccacgauu

SEQ ID NO: 1014040 - RNA, 19 nt, Artificial Sequence
  Description of Artificial Sequence: Synthetic oligonucleotide
ccucacccuuauauccccu

SEQ ID NO: 1014041 - RNA, 19 nt, Artificial Sequence
  Description of Artificial Sequence: Synthetic oligonucleotide
cgggaagccccuuuugauu

SEQ ID NO: 1014042 - RNA, 19 nt, Artificial Sequence
  Description of Artificial Sequence: Synthetic oligonucleotide
cguuugcucugggcucaug

SEQ ID NO: 1014043 - RNA, 19 nt, Artificial Sequence
  Description of Artificial Sequence: Synthetic oligonucleotide
ccuaggucaugggccuccu

SEQ ID NO: 1014044 - RNA, 19 nt, Artificial Sequence
  Description of Artificial Sequence: Synthetic oligonucleotide
cguguaugauuagguuauu

SEQ ID NO: 1014045 - RNA, 19 nt, Artificial Sequence
  Description of Artificial Sequence: Synthetic oligonucleotide
aaaguaaucccgcugagcc

SEQ ID NO: 1014046 - RNA, 19 nt, Artificial Sequence
  Description of Artificial Sequence: Synthetic oligonucleotide
uucacgagaaguaugaucc

SEQ ID NO: 1014047 - RNA, 19 nt, Artificial Sequence
  Description of Artificial Sequence: Synthetic oligonucleotide
agaacgagcacuccgaggc

SEQ ID NO: 1014048 - RNA, 19 nt, Artificial Sequence
  Description of Artificial Sequence: Synthetic oligonucleotide
aaugacuccuuauuguggg

SEQ ID NO: 1014049 - RNA, 19 nt, Artificial Sequence
  Description of Artificial Sequence: Synthetic oligonucleotide
ugagugacggcccauaccg

SEQ ID NO: 1014050 - RNA, 19 nt, Artificial Sequence
  Description of Artificial Sequence: Synthetic oligonucleotide
caaaauuaaguucuggccc

SEQ ID NO: 1014051 - RNA, 19 nt, Artificial Sequence
  Description of Artificial Sequence: Synthetic oligonucleotide
aaucaaagccgacacuugg

SEQ ID NO: 1014052 - RNA, 19 nt, Artificial Sequence
  Description of Artificial Sequence: Synthetic oligonucleotide
ucuucggcaaucaaagccg

SEQ ID NO: 1014053 - RNA, 19 nt, Artificial Sequence
  Description of Artificial Sequence: Synthetic oligonucleotide
agaaguaugauccggcggg

SEQ ID NO: 1014054 - RNA, 19 nt, Artificial Sequence
  Description of Artificial Sequence: Synthetic oligonucleotide
aaugccaccauaauugagg

SEQ ID NO: 1014055 - RNA, 19 nt, Artificial Sequence
  Description of Artificial Sequence: Synthetic oligonucleotide
ugauccacgguucagguug

SEQ ID NO: 1014056 - RNA, 19 nt, Artificial Sequence
  Description of Artificial Sequence: Synthetic oligonucleotide
uuaugcaccaucuucacaa

SEQ ID NO: 1014057 - RNA, 19 nt, Artificial Sequence
  Description of Artificial Sequence: Synthetic oligonucleotide
ggaagaagcaccgagaacg

SEQ ID NO: 1014058 - RNA, 19 nt, Artificial Sequence
  Description of Artificial Sequence: Synthetic oligonucleotide
cuggguuucgcucaaaugc

SEQ ID NO: 1014059 - RNA, 19 nt, Artificial Sequence
  Description of Artificial Sequence: Synthetic oligonucleotide
uccuauugaaaguacagac

SEQ ID NO: 1014060 - RNA, 19 nt, Artificial Sequence
  Description of Artificial Sequence: Synthetic oligonucleotide
uuggcuaagaguucauagg

SEQ ID NO: 1014061 - RNA, 19 nt, Artificial Sequence
  Description of Artificial Sequence: Synthetic oligonucleotide
aguugguauggauaaacuc

SEQ ID NO: 1014062 - RNA, 19 nt, Artificial Sequence
  Description of Artificial Sequence: Synthetic oligonucleotide
auucccuuggccuugaggu

SEQ ID NO: 1014063 - RNA, 19 nt, Artificial Sequence
  Description of Artificial Sequence: Synthetic oligonucleotide
aucgucuugauguggggcc

SEQ ID NO: 1014064 - RNA, 19 nt, Artificial Sequence
  Description of Artificial Sequence: Synthetic oligonucleotide
ucuccgaugagggugacgg

SEQ ID NO: 1014065 - RNA, 19 nt, Artificial Sequence
  Description of Artificial Sequence: Synthetic oligonucleotide
uccaucaaugaugauauca

SEQ ID NO: 1014066 - RNA, 19 nt, Artificial Sequence
  Description of Artificial Sequence: Synthetic oligonucleotide
agguuguacaaucccacac

SEQ ID NO: 1014067 - RNA, 19 nt, Artificial Sequence
  Description of Artificial Sequence: Synthetic oligonucleotide
agcgaagacagcuucuccg

SEQ ID NO: 1014068 - RNA, 19 nt, Artificial Sequence
  Description of Artificial Sequence: Synthetic oligonucleotide
aagcauacagcgccuuucg

SEQ ID NO: 1014069 - RNA, 19 nt, Artificial Sequence
  Description of Artificial Sequence: Synthetic oligonucleotide
ugguaagccucgcagauca

SEQ ID NO: 1014070 - RNA, 19 nt, Artificial Sequence
  Description of Artificial Sequence: Synthetic oligonucleotide
uuucaaucaggaacgaguc

SEQ ID NO: 1014071 - RNA, 19 nt, Artificial Sequence
  Description of Artificial Sequence: Synthetic oligonucleotide
ucguucauguucaaaauua

SEQ ID NO: 1014072 - RNA, 19 nt, Artificial Sequence
  Description of Artificial Sequence: Synthetic oligonucleotide
ggaacuaggacaaagagga

SEQ ID NO: 1014073 - RNA, 19 nt, Artificial Sequence
  Description of Artificial Sequence: Synthetic oligonucleotide
uggcuaagaguucauaggu

SEQ ID NO: 1014074 - RNA, 19 nt, Artificial Sequence
  Description of Artificial Sequence: Synthetic oligonucleotide
agcaccucgugucuguacc

SEQ ID NO: 1014075 - RNA, 19 nt, Artificial Sequence
  Description of Artificial Sequence: Synthetic oligonucleotide
aaagccgacacuuggcuaa

SEQ ID NO: 1014076 - RNA, 19 nt, Artificial Sequence
  Description of Artificial Sequence: Synthetic oligonucleotide
aacgaguccagcucugucu

SEQ ID NO: 1014077 - RNA, 19 nt, Artificial Sequence
  Description of Artificial Sequence: Synthetic oligonucleotide
ugagcaggaacuaggacaa

SEQ ID NO: 1014078 - RNA, 19 nt, Artificial Sequence
  Description of Artificial Sequence: Synthetic oligonucleotide
acuucuucggcaaucaaag

SEQ ID NO: 1014079 - RNA, 19 nt, Artificial Sequence
  Description of Artificial Sequence: Synthetic oligonucleotide
aaucagggcaaugucagcu

SEQ ID NO: 1014080 - RNA, 19 nt, Artificial Sequence
  Description of Artificial Sequence: Synthetic oligonucleotide
uuugcgccaaccacuuugg

SEQ ID NO: 1014081 - RNA, 19 nt, Artificial Sequence
  Description of Artificial Sequence: Synthetic oligonucleotide
gacgacacaguccuacuag

SEQ ID NO: 1014082 - RNA, 19 nt, Artificial Sequence
  Description of Artificial Sequence: Synthetic oligonucleotide
uucagguuguacaauccca

SEQ ID NO: 1014083 - RNA, 19 nt, Artificial Sequence
  Description of Artificial Sequence: Synthetic oligonucleotide
agccucgcagaucagcugc

SEQ ID NO: 1014084 - RNA, 19 nt, Artificial Sequence
  Description of Artificial Sequence: Synthetic oligonucleotide
acucgaucccguuaugcac

SEQ ID NO: 1014085 - RNA, 19 nt, Artificial Sequence
  Description of Artificial Sequence: Synthetic oligonucleotide
acaagcaccgagcgaagac

SEQ ID NO: 1014086 - RNA, 19 nt, Artificial Sequence
  Description of Artificial Sequence: Synthetic oligonucleotide
aagaucgucuugauguggg

SEQ ID NO: 1014087 - RNA, 19 nt, Artificial Sequence
  Description of Artificial Sequence: Synthetic oligonucleotide
ugcgcguaggagaugaucu

SEQ ID NO: 1014088 - RNA, 19 nt, Artificial Sequence
  Description of Artificial Sequence: Synthetic oligonucleotide
uaucccgguauucagaauu

SEQ ID NO: 1014089 - RNA, 19 nt, Artificial Sequence
  Description of Artificial Sequence: Synthetic oligonucleotide
agaggacaagcaccgagcg

SEQ ID NO: 1014090 - RNA, 19 nt, Artificial Sequence
  Description of Artificial Sequence: Synthetic oligonucleotide
auugugggccagcugaguc

SEQ ID NO: 1014091 - RNA, 19 nt, Artificial Sequence
  Description of Artificial Sequence: Synthetic oligonucleotide
ucagguuguacaaucccac

SEQ ID NO: 1014092 - RNA, 19 nt, Artificial Sequence
  Description of Artificial Sequence: Synthetic oligonucleotide
gaucugagcaggaacuagg

SEQ ID NO: 1014093 - RNA, 19 nt, Artificial Sequence
  Description of Artificial Sequence: Synthetic oligonucleotide
ucaaagccgacacuuggcu

SEQ ID NO: 1014094 - RNA, 19 nt, Artificial Sequence
  Description of Artificial Sequence: Synthetic oligonucleotide
ggcaaugccaccauaauug

SEQ ID NO: 1014095 - RNA, 19 nt, Artificial Sequence
  Description of Artificial Sequence: Synthetic oligonucleotide
auaauugaggguccagcca

SEQ ID NO: 1014096 - RNA, 19 nt, Artificial Sequence
  Description of Artificial Sequence: Synthetic oligonucleotide
cuuugcgccaaccacuuug

SEQ ID NO: 1014097 - RNA, 19 nt, Artificial Sequence
  Description of Artificial Sequence: Synthetic oligonucleotide
aagaggagugcugcauacc

SEQ ID NO: 1014098 - RNA, 19 nt, Artificial Sequence
  Description of Artificial Sequence: Synthetic oligonucleotide
aaagccuugcgcguaggag

SEQ ID NO: 1014099 - RNA, 19 nt, Artificial Sequence
  Description of Artificial Sequence: Synthetic oligonucleotide
ucgcagaucagcugcaugu

SEQ ID NO: 1014100 - RNA, 19 nt, Artificial Sequence
  Description of Artificial Sequence: Synthetic oligonucleotide
uaagccucgcagaucagcu

SEQ ID NO: 1014101 - RNA, 19 nt, Artificial Sequence
  Description of Artificial Sequence: Synthetic oligonucleotide
agcagucacgcagugagac

SEQ ID NO: 1014102 - RNA, 19 nt, Artificial Sequence
  Description of Artificial Sequence: Synthetic oligonucleotide
uguaucccgguauucagaa

SEQ ID NO: 1014103 - RNA, 19 nt, Artificial Sequence
  Description of Artificial Sequence: Synthetic oligonucleotide
uucaaucaggaacgagucc

SEQ ID NO: 1014104 - RNA, 19 nt, Artificial Sequence
  Description of Artificial Sequence: Synthetic oligonucleotide
acucgcuccuccuucagag

SEQ ID NO: 1014105 - RNA, 19 nt, Artificial Sequence
  Description of Artificial Sequence: Synthetic oligonucleotide
uggguuucgcucaaaugca

SEQ ID NO: 1014106 - RNA, 19 nt, Artificial Sequence
  Description of Artificial Sequence: Synthetic oligonucleotide
caggaacuaggacaaagag

SEQ ID NO: 1014107 - RNA, 19 nt, Artificial Sequence
  Description of Artificial Sequence: Synthetic oligonucleotide
guuguaucccgguauucag

SEQ ID NO: 1014108 - RNA, 19 nt, Artificial Sequence
  Description of Artificial Sequence: Synthetic oligonucleotide
uccuacuaggcguuguaug

SEQ ID NO: 1014109 - RNA, 19 nt, Artificial Sequence
  Description of Artificial Sequence: Synthetic oligonucleotide
uguuguaucccgguauuca

SEQ ID NO: 1014110 - RNA, 19 nt, Artificial Sequence
  Description of Artificial Sequence: Synthetic oligonucleotide
accucagcgacuucuucgg

SEQ ID NO: 1014111 - RNA, 19 nt, Artificial Sequence
  Description of Artificial Sequence: Synthetic oligonucleotide
cuucacgagaaguaugauc

SEQ ID NO: 1014112 - RNA, 19 nt, Artificial Sequence
  Description of Artificial Sequence: Synthetic oligonucleotide
acgcagugagaccucagcg

SEQ ID NO: 1014113 - RNA, 19 nt, Artificial Sequence
  Description of Artificial Sequence: Synthetic oligonucleotide
cucgaucccguuaugcacc

SEQ ID NO: 1014114 - RNA, 19 nt, Artificial Sequence
  Description of Artificial Sequence: Synthetic oligonucleotide
uacuaggcguuguaugaag

SEQ ID NO: 1014115 - RNA, 19 nt, Artificial Sequence
  Description of Artificial Sequence: Synthetic oligonucleotide
aaguaugauccggcggggc

SEQ ID NO: 1014116 - RNA, 19 nt, Artificial Sequence
  Description of Artificial Sequence: Synthetic oligonucleotide
uagguaugagccccaaagu

SEQ ID NO: 1014117 - RNA, 19 nt, Artificial Sequence
  Description of Artificial Sequence: Synthetic oligonucleotide
aucaaagccgacacuuggc

SEQ ID NO: 1014118 - RNA, 19 nt, Artificial Sequence
  Description of Artificial Sequence: Synthetic oligonucleotide
cauaccacugggacugucc

SEQ ID NO: 1014119 - RNA, 19 nt, Artificial Sequence
  Description of Artificial Sequence: Synthetic oligonucleotide
gaagaucgucuugaugugg

SEQ ID NO: 1014120 - RNA, 19 nt, Artificial Sequence
  Description of Artificial Sequence: Synthetic oligonucleotide
aguaaucccgcugagccug

SEQ ID NO: 1014121 - RNA, 19 nt, Artificial Sequence
  Description of Artificial Sequence: Synthetic oligonucleotide
uucaucaggugguaagccu

SEQ ID NO: 1014122 - RNA, 19 nt, Artificial Sequence
  Description of Artificial Sequence: Synthetic oligonucleotide
gggacuguccuguuggugg

SEQ ID NO: 1014123 - RNA, 19 nt, Artificial Sequence
  Description of Artificial Sequence: Synthetic oligonucleotide
cuaggcguuguaugaagag

SEQ ID NO: 1014124 - RNA, 19 nt, Artificial Sequence
  Description of Artificial Sequence: Synthetic oligonucleotide
aucauagaaggagagggca

SEQ ID NO: 1014125 - RNA, 19 nt, Artificial Sequence
  Description of Artificial Sequence: Synthetic oligonucleotide
gagaacgagcacuccgagg

SEQ ID NO: 1014126 - RNA, 19 nt, Artificial Sequence
  Description of Artificial Sequence: Synthetic oligonucleotide
guucagguuguacaauccc

SEQ ID NO: 1014127 - RNA, 19 nt, Artificial Sequence
  Description of Artificial Sequence: Synthetic oligonucleotide
agugacggcccauaccgag

SEQ ID NO: 1014128 - RNA, 19 nt, Artificial Sequence
  Description of Artificial Sequence: Synthetic oligonucleotide
ggaaugacuccuuauugug

SEQ ID NO: 1014129 - RNA, 19 nt, Artificial Sequence
  Description of Artificial Sequence: Synthetic oligonucleotide
cuaagaguucauagguaug

SEQ ID NO: 1014130 - RNA, 19 nt, Artificial Sequence
  Description of Artificial Sequence: Synthetic oligonucleotide
ugacacgcugccaccgugg

SEQ ID NO: 1014131 - RNA, 19 nt, Artificial Sequence
  Description of Artificial Sequence: Synthetic oligonucleotide
acacuuggcuaaaagaucu

SEQ ID NO: 1014132 - RNA, 19 nt, Artificial Sequence
  Description of Artificial Sequence: Synthetic oligonucleotide
ucacgagaaguaugauccg

SEQ ID NO: 1014133 - RNA, 19 nt, Artificial Sequence
  Description of Artificial Sequence: Synthetic oligonucleotide
uuguaucccgguauucaga

SEQ ID NO: 1014134 - RNA, 19 nt, Artificial Sequence
  Description of Artificial Sequence: Synthetic oligonucleotide
ugaggauauuagcagugau

SEQ ID NO: 1014135 - RNA, 19 nt, Artificial Sequence
  Description of Artificial Sequence: Synthetic oligonucleotide
acacgcaugauccacgguu

SEQ ID NO: 1014136 - RNA, 19 nt, Artificial Sequence
  Description of Artificial Sequence: Synthetic oligonucleotide
ugacggcccauaccgagcc

SEQ ID NO: 1014137 - RNA, 19 nt, Artificial Sequence
  Description of Artificial Sequence: Synthetic oligonucleotide
ugacgggcaugccauauuc

SEQ ID NO: 1014138 - RNA, 19 nt, Artificial Sequence
  Description of Artificial Sequence: Synthetic oligonucleotide
ucggcaaucaaagccgaca

SEQ ID NO: 1014139 - RNA, 19 nt, Artificial Sequence
  Description of Artificial Sequence: Synthetic oligonucleotide
ugagaccucagcgacuucu

SEQ ID NO: 1014140 - RNA, 19 nt, Artificial Sequence
  Description of Artificial Sequence: Synthetic oligonucleotide
agcauaaagccuugcgcgu

SEQ ID NO: 1014141 - RNA, 19 nt, Artificial Sequence
  Description of Artificial Sequence: Synthetic oligonucleotide
ugcugacuuaaagaaguca

SEQ ID NO: 1014142 - RNA, 19 nt, Artificial Sequence
  Description of Artificial Sequence: Synthetic oligonucleotide
aguacagaccacaaaucca

SEQ ID NO: 1014143 - RNA, 19 nt, Artificial Sequence
  Description of Artificial Sequence: Synthetic oligonucleotide
ugguaacagcucuuggcca

SEQ ID NO: 1014144 - RNA, 19 nt, Artificial Sequence
  Description of Artificial Sequence: Synthetic oligonucleotide
uggauaaacucuccugguu

SEQ ID NO: 1014145 - RNA, 19 nt, Artificial Sequence
  Description of Artificial Sequence: Synthetic oligonucleotide
gaucgucuugauguggggc

SEQ ID NO: 1014146 - RNA, 19 nt, Artificial Sequence
  Description of Artificial Sequence: Synthetic oligonucleotide
uacagcgccuuucgaaugu

SEQ ID NO: 1014147 - RNA, 19 nt, Artificial Sequence
  Description of Artificial Sequence: Synthetic oligonucleotide
agaucgucuugaugugggg

SEQ ID NO: 1014148 - RNA, 19 nt, Artificial Sequence
  Description of Artificial Sequence: Synthetic oligonucleotide
cacgagaaguaugauccgg

SEQ ID NO: 1014149 - RNA, 19 nt, Artificial Sequence
  Description of Artificial Sequence: Synthetic oligonucleotide
auaccgagccccuuccuca

SEQ ID NO: 1014150 - RNA, 19 nt, Artificial Sequence
  Description of Artificial Sequence: Synthetic oligonucleotide
gaucccguuaugcaccauc

SEQ ID NO: 1014151 - RNA, 19 nt, Artificial Sequence
  Description of Artificial Sequence: Synthetic oligonucleotide
uaaagccuugcgcguagga

SEQ ID NO: 1014152 - RNA, 19 nt, Artificial Sequence
  Description of Artificial Sequence: Synthetic oligonucleotide
gauggcuuggaagaucguc

SEQ ID NO: 1014153 - RNA, 19 nt, Artificial Sequence
  Description of Artificial Sequence: Synthetic oligonucleotide
aucagugucucggaauuug

SEQ ID NO: 1014154 - RNA, 19 nt, Artificial Sequence
  Description of Artificial Sequence: Synthetic oligonucleotide
caaaguaaucccgcugagc

SEQ ID NO: 1014155 - RNA, 19 nt, Artificial Sequence
  Description of Artificial Sequence: Synthetic oligonucleotide
uucauagguaugagcccca

SEQ ID NO: 1014156 - RNA, 19 nt, Artificial Sequence
  Description of Artificial Sequence: Synthetic oligonucleotide
gaaguaugauccggcgggg

SEQ ID NO: 1014157 - RNA, 19 nt, Artificial Sequence
  Description of Artificial Sequence: Synthetic oligonucleotide
agcaccgagaacgagcacu

SEQ ID NO: 1014158 - RNA, 19 nt, Artificial Sequence
  Description of Artificial Sequence: Synthetic oligonucleotide
gggaaugccugcuugcacc

SEQ ID NO: 1014159 - RNA, 19 nt, Artificial Sequence
  Description of Artificial Sequence: Synthetic oligonucleotide
aauuaaguucuggcccaug

SEQ ID NO: 1014160 - RNA, 19 nt, Artificial Sequence
  Description of Artificial Sequence: Synthetic oligonucleotide
ucucggaauuugaggauau

SEQ ID NO: 1014161 - RNA, 19 nt, Artificial Sequence
  Description of Artificial Sequence: Synthetic oligonucleotide
auacagcgccuuucgaaug

SEQ ID NO: 1014162 - RNA, 19 nt, Artificial Sequence
  Description of Artificial Sequence: Synthetic oligonucleotide
uccucgugcugcaugccca

SEQ ID NO: 1014163 - RNA, 19 nt, Artificial Sequence
  Description of Artificial Sequence: Synthetic oligonucleotide
auugaggguccagccaaac

SEQ ID NO: 1014164 - RNA, 19 nt, Artificial Sequence
  Description of Artificial Sequence: Synthetic oligonucleotide
cacgcagugagaccucagc

SEQ ID NO: 1014165 - RNA, 19 nt, Artificial Sequence
  Description of Artificial Sequence: Synthetic oligonucleotide
cacuuugguucccuuugcc

SEQ ID NO: 1014166 - RNA, 19 nt, Artificial Sequence
  Description of Artificial Sequence: Synthetic oligonucleotide
aggcguuguaugaagagga

SEQ ID NO: 1014167 - RNA, 19 nt, Artificial Sequence
  Description of Artificial Sequence: Synthetic oligonucleotide
gcgccaaccacuuugguuc

SEQ ID NO: 1014168 - RNA, 19 nt, Artificial Sequence
  Description of Artificial Sequence: Synthetic oligonucleotide
gguuguacaaucccacaca

SEQ ID NO: 1014169 - RNA, 19 nt, Artificial Sequence
  Description of Artificial Sequence: Synthetic oligonucleotide
ugucuguacccaucauaga

SEQ ID NO: 1014170 - RNA, 19 nt, Artificial Sequence
  Description of Artificial Sequence: Synthetic oligonucleotide
uaugagccccaaaguaauc

SEQ ID NO: 1014171 - RNA, 19 nt, Artificial Sequence
  Description of Artificial Sequence: Synthetic oligonucleotide
caugucgccguacucgauc

SEQ ID NO: 1014172 - RNA, 19 nt, Artificial Sequence
  Description of Artificial Sequence: Synthetic oligonucleotide
aguugucaacugcugacuu

SEQ ID NO: 1014173 - RNA, 19 nt, Artificial Sequence
  Description of Artificial Sequence: Synthetic oligonucleotide
ugacgacacaguccuacua

SEQ ID NO: 1014174 - RNA, 19 nt, Artificial Sequence
  Description of Artificial Sequence: Synthetic oligonucleotide
guaagccucgcagaucagc

SEQ ID NO: 1014175 - RNA, 19 nt, Artificial Sequence
  Description of Artificial Sequence: Synthetic oligonucleotide
guuucgcucaaaugcaucu

SEQ ID NO: 1014176 - RNA, 19 nt, Artificial Sequence
  Description of Artificial Sequence: Synthetic oligonucleotide
guacucgaucccguuaugc

SEQ ID NO: 1014177 - RNA, 19 nt, Artificial Sequence
  Description of Artificial Sequence: Synthetic oligonucleotide
ugauuucaaucaggaacga

SEQ ID NO: 1014178 - RNA, 19 nt, Artificial Sequence
  Description of Artificial Sequence: Synthetic oligonucleotide
ugcgccaaccacuuugguu

SEQ ID NO: 1014179 - RNA, 19 nt, Artificial Sequence
  Description of Artificial Sequence: Synthetic oligonucleotide
cacgcaugauccacgguuc

SEQ ID NO: 1014180 - RNA, 19 nt, Artificial Sequence
  Description of Artificial Sequence: Synthetic oligonucleotide
cugaacucgcuccuccuuc

SEQ ID NO: 1014181 - RNA, 19 nt, Artificial Sequence
  Description of Artificial Sequence: Synthetic oligonucleotide
gacuccuuauugugggcca

SEQ ID NO: 1014182 - RNA, 19 nt, Artificial Sequence
  Description of Artificial Sequence: Synthetic oligonucleotide
gagggugacgggcaugcca

SEQ ID NO: 1014183 - RNA, 19 nt, Artificial Sequence
  Description of Artificial Sequence: Synthetic oligonucleotide
cauaccgagccccuuccuc

SEQ ID NO: 1014184 - RNA, 19 nt, Artificial Sequence
  Description of Artificial Sequence: Synthetic oligonucleotide
uaugcaccaucuucacaaa

SEQ ID NO: 1014185 - RNA, 19 nt, Artificial Sequence
  Description of Artificial Sequence: Synthetic oligonucleotide
cuccuggcaugagugacgg

SEQ ID NO: 1014186 - RNA, 19 nt, Artificial Sequence
  Description of Artificial Sequence: Synthetic oligonucleotide
ggaagaucgucuugaugug

SEQ ID NO: 1014187 - RNA, 19 nt, Artificial Sequence
  Description of Artificial Sequence: Synthetic oligonucleotide
agcgauggcuuggaagauc

SEQ ID NO: 1014188 - RNA, 19 nt, Artificial Sequence
  Description of Artificial Sequence: Synthetic oligonucleotide
cugucugacccacauggca

SEQ ID NO: 1014189 - RNA, 19 nt, Artificial Sequence
  Description of Artificial Sequence: Synthetic oligonucleotide
agugagaccucagcgacuu

SEQ ID NO: 1014190 - RNA, 19 nt, Artificial Sequence
  Description of Artificial Sequence: Synthetic oligonucleotide
cccgguauucagaauuucc

SEQ ID NO: 1014191 - RNA, 19 nt, Artificial Sequence
  Description of Artificial Sequence: Synthetic oligonucleotide
guccuauugaaaguacaga

SEQ ID NO: 1014192 - RNA, 19 nt, Artificial Sequence
  Description of Artificial Sequence: Synthetic oligonucleotide
caguccuauugaaaguaca

SEQ ID NO: 1014193 - RNA, 19 nt, Artificial Sequence
  Description of Artificial Sequence: Synthetic oligonucleotide
gucgccguacucgaucccg

SEQ ID NO: 1014194 - RNA, 19 nt, Artificial Sequence
  Description of Artificial Sequence: Synthetic oligonucleotide
guuguaugaagaggaugac

SEQ ID NO: 1014195 - RNA, 19 nt, Artificial Sequence
  Description of Artificial Sequence: Synthetic oligonucleotide
gaacgaguccagcucuguc

SEQ ID NO: 1014196 - RNA, 19 nt, Artificial Sequence
  Description of Artificial Sequence: Synthetic oligonucleotide
gaacuaggacaaagaggag

SEQ ID NO: 1014197 - RNA, 19 nt, Artificial Sequence
  Description of Artificial Sequence: Synthetic oligonucleotide
augacacgcugccaccgug

SEQ ID NO: 1014198 - RNA, 19 nt, Artificial Sequence
  Description of Artificial Sequence: Synthetic oligonucleotide
gcagugagaccucagcgac

SEQ ID NO: 1014199 - RNA, 19 nt, Artificial Sequence
  Description of Artificial Sequence: Synthetic oligonucleotide
accauaauugaggguccag

SEQ ID NO: 1014200 - RNA, 19 nt, Artificial Sequence
  Description of Artificial Sequence: Synthetic oligonucleotide
aacgagcacuccgaggcaa

SEQ ID NO: 1014201 - RNA, 19 nt, Artificial Sequence
  Description of Artificial Sequence: Synthetic oligonucleotide
gacacgcugccaccguggc

SEQ ID NO: 1014202 - RNA, 19 nt, Artificial Sequence
  Description of Artificial Sequence: Synthetic oligonucleotide
caugacggccaguccaauc

SEQ ID NO: 1014203 - RNA, 19 nt, Artificial Sequence
  Description of Artificial Sequence: Synthetic oligonucleotide
ucccacuuuugcagcgaug

SEQ ID NO: 1014204 - RNA, 19 nt, Artificial Sequence
  Description of Artificial Sequence: Synthetic oligonucleotide
uucggcaaucaaagccgac

SEQ ID NO: 1014205 - RNA, 19 nt, Artificial Sequence
  Description of Artificial Sequence: Synthetic oligonucleotide
ucgaucccguuaugcacca

SEQ ID NO: 1014206 - RNA, 19 nt, Artificial Sequence
  Description of Artificial Sequence: Synthetic oligonucleotide
auauuccagcgcugagaug

SEQ ID NO: 1014207 - RNA, 19 nt, Artificial Sequence
  Description of Artificial Sequence: Synthetic oligonucleotide
agggcaaugccaccauaau

SEQ ID NO: 1014208 - RNA, 19 nt, Artificial Sequence
  Description of Artificial Sequence: Synthetic oligonucleotide
gguaugagccccaaaguaa

SEQ ID NO: 1014209 - RNA, 19 nt, Artificial Sequence
  Description of Artificial Sequence: Synthetic oligonucleotide
acuaggcguuguaugaaga

SEQ ID NO: 1014210 - RNA, 19 nt, Artificial Sequence
  Description of Artificial Sequence: Synthetic oligonucleotide
ucccggaucuuugguaaca

SEQ ID NO: 1014211 - RNA, 19 nt, Artificial Sequence
  Description of Artificial Sequence: Synthetic oligonucleotide
acgaguccagcucugucuu

SEQ ID NO: 1014212 - RNA, 19 nt, Artificial Sequence
  Description of Artificial Sequence: Synthetic oligonucleotide
acccaaucacagcaggguu

SEQ ID NO: 1014213 - RNA, 19 nt, Artificial Sequence
  Description of Artificial Sequence: Synthetic oligonucleotide
aaucccgcugagccuggau

SEQ ID NO: 1014214 - RNA, 19 nt, Artificial Sequence
  Description of Artificial Sequence: Synthetic oligonucleotide
cuugcccagccuucacgag

SEQ ID NO: 1014215 - RNA, 19 nt, Artificial Sequence
  Description of Artificial Sequence: Synthetic oligonucleotide
ccauuccucaaaugccugg

SEQ ID NO: 1014216 - RNA, 19 nt, Artificial Sequence
  Description of Artificial Sequence: Synthetic oligonucleotide
uguggggccaagccucuuu

SEQ ID NO: 1014217 - RNA, 19 nt, Artificial Sequence
  Description of Artificial Sequence: Synthetic oligonucleotide
gacgggcaugccauauucc

SEQ ID NO: 1014218 - RNA, 19 nt, Artificial Sequence
  Description of Artificial Sequence: Synthetic oligonucleotide
ccuacuaggcguuguauga

SEQ ID NO: 1014219 - RNA, 19 nt, Artificial Sequence
  Description of Artificial Sequence: Synthetic oligonucleotide
cacaugcccucugugugcc

SEQ ID NO: 1014220 - RNA, 19 nt, Artificial Sequence
  Description of Artificial Sequence: Synthetic oligonucleotide
uauugugggccagcugagu

SEQ ID NO: 1014221 - RNA, 19 nt, Artificial Sequence
  Description of Artificial Sequence: Synthetic oligonucleotide
cccguuaugcaccaucuuc

SEQ ID NO: 1014222 - RNA, 19 nt, Artificial Sequence
  Description of Artificial Sequence: Synthetic oligonucleotide
cauacagcgccuuucgaau

SEQ ID NO: 1014223 - RNA, 19 nt, Artificial Sequence
  Description of Artificial Sequence: Synthetic oligonucleotide
gcguaggagaugaucuugg

SEQ ID NO: 1014224 - RNA, 19 nt, Artificial Sequence
  Description of Artificial Sequence: Synthetic oligonucleotide
aguccuacuaggcguugua

SEQ ID NO: 1014225 - RNA, 19 nt, Artificial Sequence
  Description of Artificial Sequence: Synthetic oligonucleotide
aucccguuaugcaccaucu

SEQ ID NO: 1014226 - RNA, 19 nt, Artificial Sequence
  Description of Artificial Sequence: Synthetic oligonucleotide
gauggcgguccacuuccca

SEQ ID NO: 1014227 - RNA, 19 nt, Artificial Sequence
  Description of Artificial Sequence: Synthetic oligonucleotide
cgagaaguaugauccggcg

SEQ ID NO: 1014228 - RNA, 19 nt, Artificial Sequence
  Description of Artificial Sequence: Synthetic oligonucleotide
ugucgccguacucgauccc

SEQ ID NO: 1014229 - RNA, 19 nt, Artificial Sequence
  Description of Artificial Sequence: Synthetic oligonucleotide
ggauauuagcagugauuuc

SEQ ID NO: 1014230 - RNA, 19 nt, Artificial Sequence
  Description of Artificial Sequence: Synthetic oligonucleotide
ucgucuugauguggggcca

SEQ ID NO: 1014231 - RNA, 19 nt, Artificial Sequence
  Description of Artificial Sequence: Synthetic oligonucleotide
cuccacuccccacaaacaa

SEQ ID NO: 1014232 - RNA, 19 nt, Artificial Sequence
  Description of Artificial Sequence: Synthetic oligonucleotide
cgaauguccuccaggaaug

SEQ ID NO: 1014233 - RNA, 19 nt, Artificial Sequence
  Description of Artificial Sequence: Synthetic oligonucleotide
caagcaccgagcgaagaca

SEQ ID NO: 1014234 - RNA, 19 nt, Artificial Sequence
  Description of Artificial Sequence: Synthetic oligonucleotide
cagguuguacaaucccaca

SEQ ID NO: 1014235 - RNA, 19 nt, Artificial Sequence
  Description of Artificial Sequence: Synthetic oligonucleotide
uugcgcguaggagaugauc

SEQ ID NO: 1014236 - RNA, 19 nt, Artificial Sequence
  Description of Artificial Sequence: Synthetic oligonucleotide
cuucggcaaucaaagccga

SEQ ID NO: 1014237 - RNA, 19 nt, Artificial Sequence
  Description of Artificial Sequence: Synthetic oligonucleotide
acgcaugauccacgguuca

SEQ ID NO: 1014238 - RNA, 19 nt, Artificial Sequence
  Description of Artificial Sequence: Synthetic oligonucleotide
uagcaccucgugucuguac

SEQ ID NO: 1014239 - RNA, 19 nt, Artificial Sequence
  Description of Artificial Sequence: Synthetic oligonucleotide
agcaccgagcgaagacagc

SEQ ID NO: 1014240 - RNA, 19 nt, Artificial Sequence
  Description of Artificial Sequence: Synthetic oligonucleotide
gaggauauuagcagugauu

SEQ ID NO: 1014241 - RNA, 19 nt, Artificial Sequence
  Description of Artificial Sequence: Synthetic oligonucleotide
gaacgagcacuccgaggca

SEQ ID NO: 1014242 - RNA, 19 nt, Artificial Sequence
  Description of Artificial Sequence: Synthetic oligonucleotide
ucgccguacucgaucccgu

SEQ ID NO: 1014243 - RNA, 19 nt, Artificial Sequence
  Description of Artificial Sequence: Synthetic oligonucleotide
ccguuaugcaccaucuuca

SEQ ID NO: 1014244 - RNA, 19 nt, Artificial Sequence
  Description of Artificial Sequence: Synthetic oligonucleotide
ccacccaaucacagcaggg

SEQ ID NO: 1014245 - RNA, 19 nt, Artificial Sequence
  Description of Artificial Sequence: Synthetic oligonucleotide
cuccgaugagggugacggg

SEQ ID NO: 1014246 - RNA, 19 nt, Artificial Sequence
  Description of Artificial Sequence: Synthetic oligonucleotide
agaugaucuuggaagcaua

SEQ ID NO: 1014247 - RNA, 19 nt, Artificial Sequence
  Description of Artificial Sequence: Synthetic oligonucleotide
cagugcugaccacccgccg

SEQ ID NO: 1014248 - RNA, 19 nt, Artificial Sequence
  Description of Artificial Sequence: Synthetic oligonucleotide
ucauagguaugagccccaa

SEQ ID NO: 1014249 - RNA, 19 nt, Artificial Sequence
  Description of Artificial Sequence: Synthetic oligonucleotide
agggugacgggcaugccau

SEQ ID NO: 1014250 - RNA, 19 nt, Artificial Sequence
  Description of Artificial Sequence: Synthetic oligonucleotide
caguugguauggauaaacu

SEQ ID NO: 1014251 - RNA, 19 nt, Artificial Sequence
  Description of Artificial Sequence: Synthetic oligonucleotide
ccuccuggcaugagugacg

SEQ ID NO: 1014252 - RNA, 19 nt, Artificial Sequence
  Description of Artificial Sequence: Synthetic oligonucleotide
guacaaucccacacacaca

SEQ ID NO: 1014253 - RNA, 19 nt, Artificial Sequence
  Description of Artificial Sequence: Synthetic oligonucleotide
gcguuguaugaagaggaug

SEQ ID NO: 1014254 - RNA, 19 nt, Artificial Sequence
  Description of Artificial Sequence: Synthetic oligonucleotide
ccacaugagggcaaugcca

SEQ ID NO: 1014255 - RNA, 19 nt, Artificial Sequence
  Description of Artificial Sequence: Synthetic oligonucleotide
guaugagccccaaaguaau

SEQ ID NO: 1014256 - RNA, 19 nt, Artificial Sequence
  Description of Artificial Sequence: Synthetic oligonucleotide
gggccaagccucuuuguuc

SEQ ID NO: 1014257 - RNA, 19 nt, Artificial Sequence
  Description of Artificial Sequence: Synthetic oligonucleotide
uugcgccaaccacuuuggu

SEQ ID NO: 1014258 - RNA, 19 nt, Artificial Sequence
  Description of Artificial Sequence: Synthetic oligonucleotide
gcuugcccagccuucacga

SEQ ID NO: 1014259 - RNA, 19 nt, Artificial Sequence
  Description of Artificial Sequence: Synthetic oligonucleotide
ucccguuaugcaccaucuu

SEQ ID NO: 1014260 - RNA, 19 nt, Artificial Sequence
  Description of Artificial Sequence: Synthetic oligonucleotide
gugacggcccauaccgagc

SEQ ID NO: 1014261 - RNA, 19 nt, Artificial Sequence
  Description of Artificial Sequence: Synthetic oligonucleotide
guaaucccgcugagccugg

SEQ ID NO: 1014262 - RNA, 19 nt, Artificial Sequence
  Description of Artificial Sequence: Synthetic oligonucleotide
ucccgguauucagaauuuc

SEQ ID NO: 1014263 - RNA, 19 nt, Artificial Sequence
  Description of Artificial Sequence: Synthetic oligonucleotide
gcagucacgcagugagacc

SEQ ID NO: 1014264 - RNA, 19 nt, Artificial Sequence
  Description of Artificial Sequence: Synthetic oligonucleotide
ccacuccccacaaacaaga

SEQ ID NO: 1014265 - RNA, 19 nt, Artificial Sequence
  Description of Artificial Sequence: Synthetic oligonucleotide
ccauggucguucauguuca

SEQ ID NO: 1014266 - RNA, 19 nt, Artificial Sequence
  Description of Artificial Sequence: Synthetic oligonucleotide
caaagccgacacuuggcua

SEQ ID NO: 1014267 - RNA, 19 nt, Artificial Sequence
  Description of Artificial Sequence: Synthetic oligonucleotide
gaugacacgcugccaccgu

SEQ ID NO: 1014268 - RNA, 19 nt, Artificial Sequence
  Description of Artificial Sequence: Synthetic oligonucleotide
agucacgcagugagaccuc

SEQ ID NO: 1014269 - RNA, 19 nt, Artificial Sequence
  Description of Artificial Sequence: Synthetic oligonucleotide
cgacacaguccuacuaggc

SEQ ID NO: 1014270 - RNA, 19 nt, Artificial Sequence
  Description of Artificial Sequence: Synthetic oligonucleotide
gguuucgcucaaaugcauc

SEQ ID NO: 1014271 - RNA, 19 nt, Artificial Sequence
  Description of Artificial Sequence: Synthetic oligonucleotide
cacgcugccaccguggccu

SEQ ID NO: 1014272 - RNA, 19 nt, Artificial Sequence
  Description of Artificial Sequence: Synthetic oligonucleotide
cuacuaggcguuguaugaa

SEQ ID NO: 1014273 - RNA, 19 nt, Artificial Sequence
  Description of Artificial Sequence: Synthetic oligonucleotide
ggagugcugcauaccacug

SEQ ID NO: 1014274 - RNA, 19 nt, Artificial Sequence
  Description of Artificial Sequence: Synthetic oligonucleotide
cuuguuguaucccgguauu

SEQ ID NO: 1014275 - RNA, 19 nt, Artificial Sequence
  Description of Artificial Sequence: Synthetic oligonucleotide
gacggcccauaccgagccc

SEQ ID NO: 1014276 - RNA, 19 nt, Artificial Sequence
  Description of Artificial Sequence: Synthetic oligonucleotide
gguaacagcucuuggccau

SEQ ID NO: 1014277 - RNA, 19 nt, Artificial Sequence
  Description of Artificial Sequence: Synthetic oligonucleotide
acaguccuacuaggcguug

SEQ ID NO: 1014278 - RNA, 19 nt, Artificial Sequence
  Description of Artificial Sequence: Synthetic oligonucleotide
gggcccgucagcguuuugc

SEQ ID NO: 1014279 - RNA, 19 nt, Artificial Sequence
  Description of Artificial Sequence: Synthetic oligonucleotide
acgagcacuccgaggcaag

SEQ ID NO: 1014280 - RNA, 19 nt, Artificial Sequence
  Description of Artificial Sequence: Synthetic oligonucleotide
augccauauuccagcgcug

SEQ ID NO: 1014281 - RNA, 19 nt, Artificial Sequence
  Description of Artificial Sequence: Synthetic oligonucleotide
aagccgacacuuggcuaaa

SEQ ID NO: 1014282 - RNA, 19 nt, Artificial Sequence
  Description of Artificial Sequence: Synthetic oligonucleotide
ccggaucuuugguaacagc

SEQ ID NO: 1014283 - RNA, 19 nt, Artificial Sequence
  Description of Artificial Sequence: Synthetic oligonucleotide
gcaccucgugucuguaccc

SEQ ID NO: 1014284 - RNA, 19 nt, Artificial Sequence
  Description of Artificial Sequence: Synthetic oligonucleotide
ccucugugugccaagagcu

SEQ ID NO: 1014285 - RNA, 19 nt, Artificial Sequence
  Description of Artificial Sequence: Synthetic oligonucleotide
cggcaaucaaagccgacac

SEQ ID NO: 1014286 - RNA, 19 nt, Artificial Sequence
  Description of Artificial Sequence: Synthetic oligonucleotide
cucuccugguuuggcuaag

SEQ ID NO: 1014287 - RNA, 19 nt, Artificial Sequence
  Description of Artificial Sequence: Synthetic oligonucleotide
caguagugaagcagggcau

SEQ ID NO: 1014288 - RNA, 19 nt, Artificial Sequence
  Description of Artificial Sequence: Synthetic oligonucleotide
ggcgguccacuucccagug

SEQ ID NO: 1014289 - RNA, 19 nt, Artificial Sequence
  Description of Artificial Sequence: Synthetic oligonucleotide
ccgagaacgagcacuccga

SEQ ID NO: 1014290 - RNA, 19 nt, Artificial Sequence
  Description of Artificial Sequence: Synthetic oligonucleotide
caccauaauugagggucca

SEQ ID NO: 1014291 - RNA, 19 nt, Artificial Sequence
  Description of Artificial Sequence: Synthetic oligonucleotide
agcguuuugcuggccugaa

SEQ ID NO: 1014292 - RNA, 19 nt, Artificial Sequence
  Description of Artificial Sequence: Synthetic oligonucleotide
gacuuugcgccaaccacuu

SEQ ID NO: 1014293 - RNA, 19 nt, Artificial Sequence
  Description of Artificial Sequence: Synthetic oligonucleotide
gaccacccgccgccaggag

SEQ ID NO: 1014294 - RNA, 19 nt, Artificial Sequence
  Description of Artificial Sequence: Synthetic oligonucleotide
uaaucccgcugagccugga

SEQ ID NO: 1014295 - RNA, 19 nt, Artificial Sequence
  Description of Artificial Sequence: Synthetic oligonucleotide
gagugacggcccauaccga

SEQ ID NO: 1014296 - RNA, 19 nt, Artificial Sequence
  Description of Artificial Sequence: Synthetic oligonucleotide
cgagaacgagcacuccgag

SEQ ID NO: 1014297 - RNA, 19 nt, Artificial Sequence
  Description of Artificial Sequence: Synthetic oligonucleotide
ccuugcgcguaggagauga

SEQ ID NO: 1014298 - RNA, 19 nt, Artificial Sequence
  Description of Artificial Sequence: Synthetic oligonucleotide
gcaccgagaacgagcacuc

SEQ ID NO: 1014299 - RNA, 19 nt, Artificial Sequence
  Description of Artificial Sequence: Synthetic oligonucleotide
ccucgugucuguacccauc

SEQ ID NO: 1014300 - RNA, 19 nt, Artificial Sequence
  Description of Artificial Sequence: Synthetic oligonucleotide
caccucgugucuguaccca

SEQ ID NO: 1014301 - RNA, 19 nt, Artificial Sequence
  Description of Artificial Sequence: Synthetic oligonucleotide
cgcagugagaccucagcga

SEQ ID NO: 1014302 - RNA, 19 nt, Artificial Sequence
  Description of Artificial Sequence: Synthetic oligonucleotide
ggcaaucaaagccgacacu

SEQ ID NO: 1014303 - RNA, 19 nt, Artificial Sequence
  Description of Artificial Sequence: Synthetic oligonucleotide
cccggaucuuugguaacag

SEQ ID NO: 1014304 - RNA, 19 nt, Artificial Sequence
  Description of Artificial Sequence: Synthetic oligonucleotide
gauguggggccaagccucu

SEQ ID NO: 1014305 - RNA, 19 nt, Artificial Sequence
  Description of Artificial Sequence: Synthetic oligonucleotide
gguaagccucgcagaucag

SEQ ID NO: 1014306 - RNA, 19 nt, Artificial Sequence
  Description of Artificial Sequence: Synthetic oligonucleotide
gcguuuugcuggccugaac

SEQ ID NO: 1014307 - RNA, 19 nt, Artificial Sequence
  Description of Artificial Sequence: Synthetic oligonucleotide
gcauaaagccuugcgcgua

SEQ ID NO: 1014308 - RNA, 19 nt, Artificial Sequence
  Description of Artificial Sequence: Synthetic oligonucleotide
ccuuguuguaucccgguau

SEQ ID NO: 1014309 - RNA, 19 nt, Artificial Sequence
  Description of Artificial Sequence: Synthetic oligonucleotide
ccucagcgacuucuucggc

SEQ ID NO: 1014310 - RNA, 19 nt, Artificial Sequence
  Description of Artificial Sequence: Synthetic oligonucleotide
cgcugucccggaucuuugg

SEQ ID NO: 1014311 - RNA, 19 nt, Artificial Sequence
  Description of Artificial Sequence: Synthetic oligonucleotide
cagugagaccucagcgacu

SEQ ID NO: 1014312 - RNA, 19 nt, Artificial Sequence
  Description of Artificial Sequence: Synthetic oligonucleotide
cugagggcccgucagcguu

SEQ ID NO: 1014313 - RNA, 19 nt, Artificial Sequence
  Description of Artificial Sequence: Synthetic oligonucleotide
ugauccggcggggcuucuu

SEQ ID NO: 1014314 - RNA, 19 nt, Artificial Sequence
  Description of Artificial Sequence: Synthetic oligonucleotide
gagaccucagcgacuucuu

SEQ ID NO: 1014315 - RNA, 19 nt, Artificial Sequence
  Description of Artificial Sequence: Synthetic oligonucleotide
ccgcugagccuggaugagg

SEQ ID NO: 1014316 - RNA, 19 nt, Artificial Sequence
  Description of Artificial Sequence: Synthetic oligonucleotide
cgccaaccacuuugguucc

SEQ ID NO: 1014317 - RNA, 19 nt, Artificial Sequence
  Description of Artificial Sequence: Synthetic oligonucleotide
gcugucccggaucuuuggu

SEQ ID NO: 1014318 - RNA, 19 nt, Artificial Sequence
  Description of Artificial Sequence: Synthetic oligonucleotide
gccguacucgaucccguua

SEQ ID NO: 1014319 - RNA, 19 nt, Artificial Sequence
  Description of Artificial Sequence: Synthetic oligonucleotide
cagcugcaugucgccguac

SEQ ID NO: 1014320 - RNA, 19 nt, Artificial Sequence
  Description of Artificial Sequence: Synthetic oligonucleotide
cgcaugauccacgguucag

SEQ ID NO: 1014321 - RNA, 19 nt, Artificial Sequence
  Description of Artificial Sequence: Synthetic oligonucleotide
gugacgggcaugccauauu

SEQ ID NO: 1014322 - RNA, 19 nt, Artificial Sequence
  Description of Artificial Sequence: Synthetic oligonucleotide
cguacucgaucccguuaug

SEQ ID NO: 1014323 - RNA, 19 nt, Artificial Sequence
  Description of Artificial Sequence: Synthetic oligonucleotide
gggagcagucacgcaguga

SEQ ID NO: 1014324 - RNA, 19 nt, Artificial Sequence
  Description of Artificial Sequence: Synthetic oligonucleotide
ggggccaagccucuuuguu

SEQ ID NO: 1014325 - RNA, 19 nt, Artificial Sequence
  Description of Artificial Sequence: Synthetic oligonucleotide
agccgacacuuggcuaaaa

SEQ ID NO: 1014326 - RNA, 19 nt, Artificial Sequence
  Description of Artificial Sequence: Synthetic oligonucleotide
gcauaccacugggacuguc

SEQ ID NO: 1014327 - RNA, 19 nt, Artificial Sequence
  Description of Artificial Sequence: Synthetic oligonucleotide
ggugacgggcaugccauau

SEQ ID NO: 1014328 - RNA, 19 nt, Artificial Sequence
  Description of Artificial Sequence: Synthetic oligonucleotide
cccgcugagccuggaugag

SEQ ID NO: 1014329 - RNA, 19 nt, Artificial Sequence
  Description of Artificial Sequence: Synthetic oligonucleotide
caguccuacuaggcguugu

SEQ ID NO: 1014330 - RNA, 19 nt, Artificial Sequence
  Description of Artificial Sequence: Synthetic oligonucleotide
ccguacucgaucccguuau

SEQ ID NO: 1014331 - RNA, 19 nt, Artificial Sequence
  Description of Artificial Sequence: Synthetic oligonucleotide
gccugaacucgcuccuccu

SEQ ID NO: 1014332 - RNA, 19 nt, Artificial Sequence
  Description of Artificial Sequence: Synthetic oligonucleotide
ggcguuguaugaagaggau

SEQ ID NO: 1014333 - RNA, 19 nt, Artificial Sequence
  Description of Artificial Sequence: Synthetic oligonucleotide
ggguuucgcucaaaugcau

SEQ ID NO: 1014334 - RNA, 19 nt, Artificial Sequence
  Description of Artificial Sequence: Synthetic oligonucleotide
caucagugucucggaauuu

SEQ ID NO: 1014335 - RNA, 19 nt, Artificial Sequence
  Description of Artificial Sequence: Synthetic oligonucleotide
cuugcgcguaggagaugau

SEQ ID NO: 1014336 - RNA, 19 nt, Artificial Sequence
  Description of Artificial Sequence: Synthetic oligonucleotide
cucggaauuugaggauauu

SEQ ID NO: 1014337 - RNA, 19 nt, Artificial Sequence
  Description of Artificial Sequence: Synthetic oligonucleotide
gccuugcgcguaggagaug

SEQ ID NO: 1014338 - RNA, 19 nt, Artificial Sequence
  Description of Artificial Sequence: Synthetic oligonucleotide
gggugacgggcaugccaua

SEQ ID NO: 1014339 - RNA, 19 nt, Artificial Sequence
  Description of Artificial Sequence: Synthetic oligonucleotide
ccauaccgagccccuuccu

SEQ ID NO: 1014340 - RNA, 19 nt, Artificial Sequence
  Description of Artificial Sequence: Synthetic oligonucleotide
ccuucacgagaaguaugau

SEQ ID NO: 1014341 - RNA, 19 nt, Artificial Sequence
  Description of Artificial Sequence: Synthetic oligonucleotide
gcaugucgccguacucgau

SEQ ID NO: 1014342 - RNA, 19 nt, Artificial Sequence
  Description of Artificial Sequence: Synthetic oligonucleotide
cgucuugauguggggccaa

SEQ ID NO: 1014343 - RNA, 19 nt, Artificial Sequence
  Description of Artificial Sequence: Synthetic oligonucleotide
cgagcacuccgaggcaagu

SEQ ID NO: 1014344 - RNA, 19 nt, Artificial Sequence
  Description of Artificial Sequence: Synthetic oligonucleotide
ccucgcagaucagcugcau

SEQ ID NO: 1014345 - RNA, 19 nt, Artificial Sequence
  Description of Artificial Sequence: Synthetic oligonucleotide
ccaguccaaucagggcaau

SEQ ID NO: 1014346 - RNA, 19 nt, Artificial Sequence
  Description of Artificial Sequence: Synthetic oligonucleotide
gcccagcgcugucccggau

SEQ ID NO: 1014347 - RNA, 19 nt, Artificial Sequence
  Description of Artificial Sequence: Synthetic oligonucleotide
aauuuugagaacuuugugc

SEQ ID NO: 1014348 - RNA, 19 nt, Artificial Sequence
  Description of Artificial Sequence: Synthetic oligonucleotide
guaaauaugaggcaaaagg

SEQ ID NO: 1014349 - RNA, 19 nt, Artificial Sequence
  Description of Artificial Sequence: Synthetic oligonucleotide
acaaagaccauacaaauuc

SEQ ID NO: 1014350 - RNA, 19 nt, Artificial Sequence
  Description of Artificial Sequence: Synthetic oligonucleotide
aauuuuaaguccucaauca

SEQ ID NO: 1014351 - RNA, 19 nt, Artificial Sequence
  Description of Artificial Sequence: Synthetic oligonucleotide
uuuaugauacaucuguuca

SEQ ID NO: 1014352 - RNA, 19 nt, Artificial Sequence
  Description of Artificial Sequence: Synthetic oligonucleotide
uaaauaugaggcaaaagga

SEQ ID NO: 1014353 - RNA, 19 nt, Artificial Sequence
  Description of Artificial Sequence: Synthetic oligonucleotide
aaaucaccgaauucuuucc

SEQ ID NO: 1014354 - RNA, 19 nt, Artificial Sequence
  Description of Artificial Sequence: Synthetic oligonucleotide
uacaaggucauuuauuucc

SEQ ID NO: 1014355 - RNA, 19 nt, Artificial Sequence
  Description of Artificial Sequence: Synthetic oligonucleotide
uuuacaagcauguuugucu

SEQ ID NO: 1014356 - RNA, 19 nt, Artificial Sequence
  Description of Artificial Sequence: Synthetic oligonucleotide
uuauuguuaucuaaugucu

SEQ ID NO: 1014357 - RNA, 19 nt, Artificial Sequence
  Description of Artificial Sequence: Synthetic oligonucleotide
ugugaggagacucagcuug

SEQ ID NO: 1014358 - RNA, 19 nt, Artificial Sequence
  Description of Artificial Sequence: Synthetic oligonucleotide
uucauaacugucaaauacc

SEQ ID NO: 1014359 - RNA, 19 nt, Artificial Sequence
  Description of Artificial Sequence: Synthetic oligonucleotide
uccacgaccaagcugacag

SEQ ID NO: 1014360 - RNA, 19 nt, Artificial Sequence
  Description of Artificial Sequence: Synthetic oligonucleotide
aaauuuugagaacuuugug

SEQ ID NO: 1014361 - RNA, 19 nt, Artificial Sequence
  Description of Artificial Sequence: Synthetic oligonucleotide
uuuaguacugauucggucu

SEQ ID NO: 1014362 - RNA, 19 nt, Artificial Sequence
  Description of Artificial Sequence: Synthetic oligonucleotide
ugauuuaguacugauucgg

SEQ ID NO: 1014363 - RNA, 19 nt, Artificial Sequence
  Description of Artificial Sequence: Synthetic oligonucleotide
ugaauuuacuuucugucga

SEQ ID NO: 1014364 - RNA, 19 nt, Artificial Sequence
  Description of Artificial Sequence: Synthetic oligonucleotide
uuuucaaguacuuucuaac

SEQ ID NO: 1014365 - RNA, 19 nt, Artificial Sequence
  Description of Artificial Sequence: Synthetic oligonucleotide
acuuuguaacucuuugacc

SEQ ID NO: 1014366 - RNA, 19 nt, Artificial Sequence
  Description of Artificial Sequence: Synthetic oligonucleotide
ugacuuguaaaauuuccag

SEQ ID NO: 1014367 - RNA, 19 nt, Artificial Sequence
  Description of Artificial Sequence: Synthetic oligonucleotide
uuuaguuuuaugauacauc

SEQ ID NO: 1014368 - RNA, 19 nt, Artificial Sequence
  Description of Artificial Sequence: Synthetic oligonucleotide
uugcuuuagugaaucaacg

SEQ ID NO: 1014369 - RNA, 19 nt, Artificial Sequence
  Description of Artificial Sequence: Synthetic oligonucleotide
uuuuguugcugcaaggaca

SEQ ID NO: 1014370 - RNA, 19 nt, Artificial Sequence
  Description of Artificial Sequence: Synthetic oligonucleotide
auauacaacagccauuccu

SEQ ID NO: 1014371 - RNA, 19 nt, Artificial Sequence
  Description of Artificial Sequence: Synthetic oligonucleotide
acggauaccuucuuguugg

SEQ ID NO: 1014372 - RNA, 19 nt, Artificial Sequence
  Description of Artificial Sequence: Synthetic oligonucleotide
ucucguaauaaaauagugu

SEQ ID NO: 1014373 - RNA, 19 nt, Artificial Sequence
  Description of Artificial Sequence: Synthetic oligonucleotide
ucugucgaaauuuuaaguc

SEQ ID NO: 1014374 - RNA, 19 nt, Artificial Sequence
  Description of Artificial Sequence: Synthetic oligonucleotide
cugaauuuacuuucugucg

SEQ ID NO: 1014375 - RNA, 19 nt, Artificial Sequence
  Description of Artificial Sequence: Synthetic oligonucleotide
uccauucgagaguugaugg

SEQ ID NO: 1014376 - RNA, 19 nt, Artificial Sequence
  Description of Artificial Sequence: Synthetic oligonucleotide
uaagucuuugcuuuaguga

SEQ ID NO: 1014377 - RNA, 19 nt, Artificial Sequence
  Description of Artificial Sequence: Synthetic oligonucleotide
uacugauucggucugcucc

SEQ ID NO: 1014378 - RNA, 19 nt, Artificial Sequence
  Description of Artificial Sequence: Synthetic oligonucleotide
uugaugucggguccuaugg

SEQ ID NO: 1014379 - RNA, 19 nt, Artificial Sequence
  Description of Artificial Sequence: Synthetic oligonucleotide
ucuugguauucuuauaaug

SEQ ID NO: 1014380 - RNA, 19 nt, Artificial Sequence
  Description of Artificial Sequence: Synthetic oligonucleotide
uucucguaauaaaauagug

SEQ ID NO: 1014381 - RNA, 19 nt, Artificial Sequence
  Description of Artificial Sequence: Synthetic oligonucleotide
uugguauucuuauaaugag

SEQ ID NO: 1014382 - RNA, 19 nt, Artificial Sequence
  Description of Artificial Sequence: Synthetic oligonucleotide
uuucauuacuuucugaauu

SEQ ID NO: 1014383 - RNA, 19 nt, Artificial Sequence
  Description of Artificial Sequence: Synthetic oligonucleotide
uauacuccuuagcagauga

SEQ ID NO: 1014384 - RNA, 19 nt, Artificial Sequence
  Description of Artificial Sequence: Synthetic oligonucleotide
gacguuuccacaaagacca

SEQ ID NO: 1014385 - RNA, 19 nt, Artificial Sequence
  Description of Artificial Sequence: Synthetic oligonucleotide
auaacugucaaauacccuu

SEQ ID NO: 1014386 - RNA, 19 nt, Artificial Sequence
  Description of Artificial Sequence: Synthetic oligonucleotide
uucuauagggcuuauuuuc

SEQ ID NO: 1014387 - RNA, 19 nt, Artificial Sequence
  Description of Artificial Sequence: Synthetic oligonucleotide
gauggugaaauguucagga

SEQ ID NO: 1014388 - RNA, 19 nt, Artificial Sequence
  Description of Artificial Sequence: Synthetic oligonucleotide
uuauaaugagaaauauccu

SEQ ID NO: 1014389 - RNA, 19 nt, Artificial Sequence
  Description of Artificial Sequence: Synthetic oligonucleotide
ugagaucaggauuuguugc

SEQ ID NO: 1014390 - RNA, 19 nt, Artificial Sequence
  Description of Artificial Sequence: Synthetic oligonucleotide
auuuaguacugauucgguc

SEQ ID NO: 1014391 - RNA, 19 nt, Artificial Sequence
  Description of Artificial Sequence: Synthetic oligonucleotide
ugcuuuagugaaucaacgg

SEQ ID NO: 1014392 - RNA, 19 nt, Artificial Sequence
  Description of Artificial Sequence: Synthetic oligonucleotide
agaacuuugugcuucagaa

SEQ ID NO: 1014393 - RNA, 19 nt, Artificial Sequence
  Description of Artificial Sequence: Synthetic oligonucleotide
ggcauuaugaagcaaacug

SEQ ID NO: 1014394 - RNA, 19 nt, Artificial Sequence
  Description of Artificial Sequence: Synthetic oligonucleotide
uuuuaugauacaucuguuc

SEQ ID NO: 1014395 - RNA, 19 nt, Artificial Sequence
  Description of Artificial Sequence: Synthetic oligonucleotide
uguuggaacauucuucagu

SEQ ID NO: 1014396 - RNA, 19 nt, Artificial Sequence
  Description of Artificial Sequence: Synthetic oligonucleotide
ucugaauauacaacagcca

SEQ ID NO: 1014397 - RNA, 19 nt, Artificial Sequence
  Description of Artificial Sequence: Synthetic oligonucleotide
uugacuuguaaaauuucca

SEQ ID NO: 1014398 - RNA, 19 nt, Artificial Sequence
  Description of Artificial Sequence: Synthetic oligonucleotide
ugaaucaacggauaccuuc

SEQ ID NO: 1014399 - RNA, 19 nt, Artificial Sequence
  Description of Artificial Sequence: Synthetic oligonucleotide
auugugacuucucuuucac

SEQ ID NO: 1014400 - RNA, 19 nt, Artificial Sequence
  Description of Artificial Sequence: Synthetic oligonucleotide
cugucgaaauuuuaagucc

SEQ ID NO: 1014401 - RNA, 19 nt, Artificial Sequence
  Description of Artificial Sequence: Synthetic oligonucleotide
aacuacuguauggaaacuc

SEQ ID NO: 1014402 - RNA, 19 nt, Artificial Sequence
  Description of Artificial Sequence: Synthetic oligonucleotide
uauacaacagccauuccuu

SEQ ID NO: 1014403 - RNA, 19 nt, Artificial Sequence
  Description of Artificial Sequence: Synthetic oligonucleotide
cuuuccacgaccaagcuga

SEQ ID NO: 1014404 - RNA, 19 nt, Artificial Sequence
  Description of Artificial Sequence: Synthetic oligonucleotide
auaauuaaucuuuauuguu

SEQ ID NO: 1014405 - RNA, 19 nt, Artificial Sequence
  Description of Artificial Sequence: Synthetic oligonucleotide
aacggauaccuucuuguug

SEQ ID NO: 1014406 - RNA, 19 nt, Artificial Sequence
  Description of Artificial Sequence: Synthetic oligonucleotide
uuagugaaucaacggauac

SEQ ID NO: 1014407 - RNA, 19 nt, Artificial Sequence
  Description of Artificial Sequence: Synthetic oligonucleotide
acaauaauuguucccaaau

SEQ ID NO: 1014408 - RNA, 19 nt, Artificial Sequence
  Description of Artificial Sequence: Synthetic oligonucleotide
ugucgaaauuuuaaguccu

SEQ ID NO: 1014409 - RNA, 19 nt, Artificial Sequence
  Description of Artificial Sequence: Synthetic oligonucleotide
caugguuauaucucucucc

SEQ ID NO: 1014410 - RNA, 19 nt, Artificial Sequence
  Description of Artificial Sequence: Synthetic oligonucleotide
aaauaugaggcaaaaggaa

SEQ ID NO: 1014411 - RNA, 19 nt, Artificial Sequence
  Description of Artificial Sequence: Synthetic oligonucleotide
aagccuuggagcuguuucg

SEQ ID NO: 1014412 - RNA, 19 nt, Artificial Sequence
  Description of Artificial Sequence: Synthetic oligonucleotide
uuugagugagaucaggauu

SEQ ID NO: 1014413 - RNA, 19 nt, Artificial Sequence
  Description of Artificial Sequence: Synthetic oligonucleotide
ucaacggauaccuucuugu

SEQ ID NO: 1014414 - RNA, 19 nt, Artificial Sequence
  Description of Artificial Sequence: Synthetic oligonucleotide
agugaaucaacggauaccu

SEQ ID NO: 1014415 - RNA, 19 nt, Artificial Sequence
  Description of Artificial Sequence: Synthetic oligonucleotide
uauggguugagguuuuaca

SEQ ID NO: 1014416 - RNA, 19 nt, Artificial Sequence
  Description of Artificial Sequence: Synthetic oligonucleotide
agacguuuccacaaagacc

SEQ ID NO: 1014417 - RNA, 19 nt, Artificial Sequence
  Description of Artificial Sequence: Synthetic oligonucleotide
ucuauagggcuuauuuucu

SEQ ID NO: 1014418 - RNA, 19 nt, Artificial Sequence
  Description of Artificial Sequence: Synthetic oligonucleotide
uuauuuccugauuuaguac

SEQ ID NO: 1014419 - RNA, 19 nt, Artificial Sequence
  Description of Artificial Sequence: Synthetic oligonucleotide
uucugucgaaauuuuaagu

SEQ ID NO: 1014420 - RNA, 19 nt, Artificial Sequence
  Description of Artificial Sequence: Synthetic oligonucleotide
auauugugacuucucuuuc

SEQ ID NO: 1014421 - RNA, 19 nt, Artificial Sequence
  Description of Artificial Sequence: Synthetic oligonucleotide
uguuaucuaaugucuuuca

SEQ ID NO: 1014422 - RNA, 19 nt, Artificial Sequence
  Description of Artificial Sequence: Synthetic oligonucleotide
uuuccacaauaauuguucc

SEQ ID NO: 1014423 - RNA, 19 nt, Artificial Sequence
  Description of Artificial Sequence: Synthetic oligonucleotide
uccaguauugcuucuagua

SEQ ID NO: 1014424 - RNA, 19 nt, Artificial Sequence
  Description of Artificial Sequence: Synthetic oligonucleotide
augguuauaucucucucca

SEQ ID NO: 1014425 - RNA, 19 nt, Artificial Sequence
  Description of Artificial Sequence: Synthetic oligonucleotide
aaggcaaacucuucuaguu

SEQ ID NO: 1014426 - RNA, 19 nt, Artificial Sequence
  Description of Artificial Sequence: Synthetic oligonucleotide
uaauaaaauaguguugcua

SEQ ID NO: 1014427 - RNA, 19 nt, Artificial Sequence
  Description of Artificial Sequence: Synthetic oligonucleotide
ugauggugaaauguucagg

SEQ ID NO: 1014428 - RNA, 19 nt, Artificial Sequence
  Description of Artificial Sequence: Synthetic oligonucleotide
uucuaguaaauaugaggca

SEQ ID NO: 1014429 - RNA, 19 nt, Artificial Sequence
  Description of Artificial Sequence: Synthetic oligonucleotide
uuuagugaaucaacggaua

SEQ ID NO: 1014430 - RNA, 19 nt, Artificial Sequence
  Description of Artificial Sequence: Synthetic oligonucleotide
gacuuguaaaauuuccaga

SEQ ID NO: 1014431 - RNA, 19 nt, Artificial Sequence
  Description of Artificial Sequence: Synthetic oligonucleotide
cuuucuaacauuucauuaa

SEQ ID NO: 1014432 - RNA, 19 nt, Artificial Sequence
  Description of Artificial Sequence: Synthetic oligonucleotide
uucacuuauuuucuccagu

SEQ ID NO: 1014433 - RNA, 19 nt, Artificial Sequence
  Description of Artificial Sequence: Synthetic oligonucleotide
uucccaaauuuugagaacu

SEQ ID NO: 1014434 - RNA, 19 nt, Artificial Sequence
  Description of Artificial Sequence: Synthetic oligonucleotide
ccugauuuaguacugauuc

SEQ ID NO: 1014435 - RNA, 19 nt, Artificial Sequence
  Description of Artificial Sequence: Synthetic oligonucleotide
uccuauggacaucacuuug

SEQ ID NO: 1014436 - RNA, 19 nt, Artificial Sequence
  Description of Artificial Sequence: Synthetic oligonucleotide
uguuuuguugcugcaagga

SEQ ID NO: 1014437 - RNA, 19 nt, Artificial Sequence
  Description of Artificial Sequence: Synthetic oligonucleotide
uuuauacuccuuagcagau

SEQ ID NO: 1014438 - RNA, 19 nt, Artificial Sequence
  Description of Artificial Sequence: Synthetic oligonucleotide
uucuguaaaucaccgaauu

SEQ ID NO: 1014439 - RNA, 19 nt, Artificial Sequence
  Description of Artificial Sequence: Synthetic oligonucleotide
ucaaguacuuucuaacauu

SEQ ID NO: 1014440 - RNA, 19 nt, Artificial Sequence
  Description of Artificial Sequence: Synthetic oligonucleotide
gugagaucaggauuuguug

SEQ ID NO: 1014441 - RNA, 19 nt, Artificial Sequence
  Description of Artificial Sequence: Synthetic oligonucleotide
cauuacuuucugaauuuac

SEQ ID NO: 1014442 - RNA, 19 nt, Artificial Sequence
  Description of Artificial Sequence: Synthetic oligonucleotide
aaucaccgaauucuuuccu

SEQ ID NO: 1014443 - RNA, 19 nt, Artificial Sequence
  Description of Artificial Sequence: Synthetic oligonucleotide
uucaguuaguuucuuguuu

SEQ ID NO: 1014444 - RNA, 19 nt, Artificial Sequence
  Description of Artificial Sequence: Synthetic oligonucleotide
uccucaagaaggcauuuuc

SEQ ID NO: 1014445 - RNA, 19 nt, Artificial Sequence
  Description of Artificial Sequence: Synthetic oligonucleotide
uucauuacuuucugaauuu

SEQ ID NO: 1014446 - RNA, 19 nt, Artificial Sequence
  Description of Artificial Sequence: Synthetic oligonucleotide
gaacauucuucaguuagug

SEQ ID NO: 1014447 - RNA, 19 nt, Artificial Sequence
  Description of Artificial Sequence: Synthetic oligonucleotide
uucacucacguccucccag

SEQ ID NO: 1014448 - RNA, 19 nt, Artificial Sequence
  Description of Artificial Sequence: Synthetic oligonucleotide
aucaccgaauucuuuccuc

SEQ ID NO: 1014449 - RNA, 19 nt, Artificial Sequence
  Description of Artificial Sequence: Synthetic oligonucleotide
uggaaacucuucugcaugc

SEQ ID NO: 1014450 - RNA, 19 nt, Artificial Sequence
  Description of Artificial Sequence: Synthetic oligonucleotide
ucuguuaacuuuggcagga

SEQ ID NO: 1014451 - RNA, 19 nt, Artificial Sequence
  Description of Artificial Sequence: Synthetic oligonucleotide
uccuugacuuguaaaauuu

SEQ ID NO: 1014452 - RNA, 19 nt, Artificial Sequence
  Description of Artificial Sequence: Synthetic oligonucleotide
uggacuuuauggguugagg

SEQ ID NO: 1014453 - RNA, 19 nt, Artificial Sequence
  Description of Artificial Sequence: Synthetic oligonucleotide
uccuuuaggcugcucagcu

SEQ ID NO: 1014454 - RNA, 19 nt, Artificial Sequence
  Description of Artificial Sequence: Synthetic oligonucleotide
gaugucggguccuauggac

SEQ ID NO: 1014455 - RNA, 19 nt, Artificial Sequence
  Description of Artificial Sequence: Synthetic oligonucleotide
ucacuuauuuucuccagua

SEQ ID NO: 1014456 - RNA, 19 nt, Artificial Sequence
  Description of Artificial Sequence: Synthetic oligonucleotide
ugcaaggacacaauccuuu

SEQ ID NO: 1014457 - RNA, 19 nt, Artificial Sequence
  Description of Artificial Sequence: Synthetic oligonucleotide
cauucgagaguugauggag

SEQ ID NO: 1014458 - RNA, 19 nt, Artificial Sequence
  Description of Artificial Sequence: Synthetic oligonucleotide
uagugaaucaacggauacc

SEQ ID NO: 1014459 - RNA, 19 nt, Artificial Sequence
  Description of Artificial Sequence: Synthetic oligonucleotide
uccucaaucaggugucucu

SEQ ID NO: 1014460 - RNA, 19 nt, Artificial Sequence
  Description of Artificial Sequence: Synthetic oligonucleotide
uucggucugcuccaguucu

SEQ ID NO: 1014461 - RNA, 19 nt, Artificial Sequence
  Description of Artificial Sequence: Synthetic oligonucleotide
agguucucaauguggcuuc

SEQ ID NO: 1014462 - RNA, 19 nt, Artificial Sequence
  Description of Artificial Sequence: Synthetic oligonucleotide
acuccuuagcagaugacuc

SEQ ID NO: 1014463 - RNA, 19 nt, Artificial Sequence
  Description of Artificial Sequence: Synthetic oligonucleotide
ucaugguuauaucucucuc

SEQ ID NO: 1014464 - RNA, 19 nt, Artificial Sequence
  Description of Artificial Sequence: Synthetic oligonucleotide
uccuuaguguucuuaacuu

SEQ ID NO: 1014465 - RNA, 19 nt, Artificial Sequence
  Description of Artificial Sequence: Synthetic oligonucleotide
ucuguucauauugugacuu

SEQ ID NO: 1014466 - RNA, 19 nt, Artificial Sequence
  Description of Artificial Sequence: Synthetic oligonucleotide
cugugcacuuuccaggacc

SEQ ID NO: 1014467 - RNA, 19 nt, Artificial Sequence
  Description of Artificial Sequence: Synthetic oligonucleotide
auagcugucuucuguuuga

SEQ ID NO: 1014468 - RNA, 19 nt, Artificial Sequence
  Description of Artificial Sequence: Synthetic oligonucleotide
ggauuuguugccuggagac

SEQ ID NO: 1014469 - RNA, 19 nt, Artificial Sequence
  Description of Artificial Sequence: Synthetic oligonucleotide
aacuuuggcaggaacuacu

SEQ ID NO: 1014470 - RNA, 19 nt, Artificial Sequence
  Description of Artificial Sequence: Synthetic oligonucleotide
ucuuuaguuuuaugauaca

SEQ ID NO: 1014471 - RNA, 19 nt, Artificial Sequence
  Description of Artificial Sequence: Synthetic oligonucleotide
uucgagaguugauggagga

SEQ ID NO: 1014472 - RNA, 19 nt, Artificial Sequence
  Description of Artificial Sequence: Synthetic oligonucleotide
auuuguugccuggagacgu

SEQ ID NO: 1014473 - RNA, 19 nt, Artificial Sequence
  Description of Artificial Sequence: Synthetic oligonucleotide
acuuccuuaguguucuuaa

SEQ ID NO: 1014474 - RNA, 19 nt, Artificial Sequence
  Description of Artificial Sequence: Synthetic oligonucleotide
uacuccuuagcagaugacu

SEQ ID NO: 1014475 - RNA, 19 nt, Artificial Sequence
  Description of Artificial Sequence: Synthetic oligonucleotide
guuuuguugcugcaaggac

SEQ ID NO: 1014476 - RNA, 19 nt, Artificial Sequence
  Description of Artificial Sequence: Synthetic oligonucleotide
uuguuaucuaaugucuuuc

SEQ ID NO: 1014477 - RNA, 19 nt, Artificial Sequence
  Description of Artificial Sequence: Synthetic oligonucleotide
ucauauugugacuucucuu

SEQ ID NO: 1014478 - RNA, 19 nt, Artificial Sequence
  Description of Artificial Sequence: Synthetic oligonucleotide
cuguuuuguugcugcaagg

SEQ ID NO: 1014479 - RNA, 19 nt, Artificial Sequence
  Description of Artificial Sequence: Synthetic oligonucleotide
auaguguugcuacuggauu

SEQ ID NO: 1014480 - RNA, 19 nt, Artificial Sequence
  Description of Artificial Sequence: Synthetic oligonucleotide
ggcaggaacuacuguaugg

SEQ ID NO: 1014481 - RNA, 19 nt, Artificial Sequence
  Description of Artificial Sequence: Synthetic oligonucleotide
cucguaauaaaauaguguu

SEQ ID NO: 1014482 - RNA, 19 nt, Artificial Sequence
  Description of Artificial Sequence: Synthetic oligonucleotide
aucaacggauaccuucuug

SEQ ID NO: 1014483 - RNA, 19 nt, Artificial Sequence
  Description of Artificial Sequence: Synthetic oligonucleotide
ugaugugaggagacucagc

SEQ ID NO: 1014484 - RNA, 19 nt, Artificial Sequence
  Description of Artificial Sequence: Synthetic oligonucleotide
uuacaagcauguuugucuu

SEQ ID NO: 1014485 - RNA, 19 nt, Artificial Sequence
  Description of Artificial Sequence: Synthetic oligonucleotide
gguauucuuauaaugagaa

SEQ ID NO: 1014486 - RNA, 19 nt, Artificial Sequence
  Description of Artificial Sequence: Synthetic oligonucleotide
acuacuguauggaaacucu

SEQ ID NO: 1014487 - RNA, 19 nt, Artificial Sequence
  Description of Artificial Sequence: Synthetic oligonucleotide
acugauucggucugcucca

SEQ ID NO: 1014488 - RNA, 19 nt, Artificial Sequence
  Description of Artificial Sequence: Synthetic oligonucleotide
ucguuugcuucuuuauacu

SEQ ID NO: 1014489 - RNA, 19 nt, Artificial Sequence
  Description of Artificial Sequence: Synthetic oligonucleotide
ucucguuugcuucuuuaua

SEQ ID NO: 1014490 - RNA, 19 nt, Artificial Sequence
  Description of Artificial Sequence: Synthetic oligonucleotide
gcuuuagugaaucaacgga

SEQ ID NO: 1014491 - RNA, 19 nt, Artificial Sequence
  Description of Artificial Sequence: Synthetic oligonucleotide
ugauacaucuguucauauu

SEQ ID NO: 1014492 - RNA, 19 nt, Artificial Sequence
  Description of Artificial Sequence: Synthetic oligonucleotide
acuuuauggguugagguuu

SEQ ID NO: 1014493 - RNA, 19 nt, Artificial Sequence
  Description of Artificial Sequence: Synthetic oligonucleotide
gaugacucugcugcuuucc

SEQ ID NO: 1014494 - RNA, 19 nt, Artificial Sequence
  Description of Artificial Sequence: Synthetic oligonucleotide
auucgagaguugauggagg

SEQ ID NO: 1014495 - RNA, 19 nt, Artificial Sequence
  Description of Artificial Sequence: Synthetic oligonucleotide
aggucugauggugaaaugu

SEQ ID NO: 1014496 - RNA, 19 nt, Artificial Sequence
  Description of Artificial Sequence: Synthetic oligonucleotide
uagacacuuccuuaguguu

SEQ ID NO: 1014497 - RNA, 19 nt, Artificial Sequence
  Description of Artificial Sequence: Synthetic oligonucleotide
aaaagccauuuucuuggua

SEQ ID NO: 1014498 - RNA, 19 nt, Artificial Sequence
  Description of Artificial Sequence: Synthetic oligonucleotide
uccuuagcagaugacucug

SEQ ID NO: 1014499 - RNA, 19 nt, Artificial Sequence
  Description of Artificial Sequence: Synthetic oligonucleotide
aucuguucauauugugacu

SEQ ID NO: 1014500 - RNA, 19 nt, Artificial Sequence
  Description of Artificial Sequence: Synthetic oligonucleotide
gaauuuacuuucugucgaa

SEQ ID NO: 1014501 - RNA, 19 nt, Artificial Sequence
  Description of Artificial Sequence: Synthetic oligonucleotide
aguuugagugagaucagga

SEQ ID NO: 1014502 - RNA, 19 nt, Artificial Sequence
  Description of Artificial Sequence: Synthetic oligonucleotide
uuauacuccuuagcagaug

SEQ ID NO: 1014503 - RNA, 19 nt, Artificial Sequence
  Description of Artificial Sequence: Synthetic oligonucleotide
agaugacucugcugcuuuc

SEQ ID NO: 1014504 - RNA, 19 nt, Artificial Sequence
  Description of Artificial Sequence: Synthetic oligonucleotide
cuaguaaauaugaggcaaa

SEQ ID NO: 1014505 - RNA, 19 nt, Artificial Sequence
  Description of Artificial Sequence: Synthetic oligonucleotide
cuuuagugaaucaacggau

SEQ ID NO: 1014506 - RNA, 19 nt, Artificial Sequence
  Description of Artificial Sequence: Synthetic oligonucleotide
uggcaggaacuacuguaug

SEQ ID NO: 1014507 - RNA, 19 nt, Artificial Sequence
  Description of Artificial Sequence: Synthetic oligonucleotide
accaagcugacaguuugag

SEQ ID NO: 1014508 - RNA, 19 nt, Artificial Sequence
  Description of Artificial Sequence: Synthetic oligonucleotide
augaagcaaacuguuuugu

SEQ ID NO: 1014509 - RNA, 19 nt, Artificial Sequence
  Description of Artificial Sequence: Synthetic oligonucleotide
cuccauucgagaguugaug

SEQ ID NO: 1014510 - RNA, 19 nt, Artificial Sequence
  Description of Artificial Sequence: Synthetic oligonucleotide
aacuguuuuguugcugcaa

SEQ ID NO: 1014511 - RNA, 19 nt, Artificial Sequence
  Description of Artificial Sequence: Synthetic oligonucleotide
uuauggguugagguuuuac

SEQ ID NO: 1014512 - RNA, 19 nt, Artificial Sequence
  Description of Artificial Sequence: Synthetic oligonucleotide
gacaucacuuuguaacucu

SEQ ID NO: 1014513 - RNA, 19 nt, Artificial Sequence
  Description of Artificial Sequence: Synthetic oligonucleotide
caguuugagugagaucagg

SEQ ID NO: 1014514 - RNA, 19 nt, Artificial Sequence
  Description of Artificial Sequence: Synthetic oligonucleotide
gaaggcaaacucuucuagu

SEQ ID NO: 1014515 - RNA, 19 nt, Artificial Sequence
  Description of Artificial Sequence: Synthetic oligonucleotide
ugcaugcuuccacucuucu

SEQ ID NO: 1014516 - RNA, 19 nt, Artificial Sequence
  Description of Artificial Sequence: Synthetic oligonucleotide
agacacuuccuuaguguuc

SEQ ID NO: 1014517 - RNA, 19 nt, Artificial Sequence
  Description of Artificial Sequence: Synthetic oligonucleotide
ucggguccuauggacauca

SEQ ID NO: 1014518 - RNA, 19 nt, Artificial Sequence
  Description of Artificial Sequence: Synthetic oligonucleotide
uucacucugcagugcuaag

SEQ ID NO: 1014519 - RNA, 19 nt, Artificial Sequence
  Description of Artificial Sequence: Synthetic oligonucleotide
aaucaacggauaccuucuu

SEQ ID NO: 1014520 - RNA, 19 nt, Artificial Sequence
  Description of Artificial Sequence: Synthetic oligonucleotide
ugauuugaugucggguccu

SEQ ID NO: 1014521 - RNA, 19 nt, Artificial Sequence
  Description of Artificial Sequence: Synthetic oligonucleotide
guuucgacgcugcugucuc

SEQ ID NO: 1014522 - RNA, 19 nt, Artificial Sequence
  Description of Artificial Sequence: Synthetic oligonucleotide
ucuccauucgagaguugau

SEQ ID NO: 1014523 - RNA, 19 nt, Artificial Sequence
  Description of Artificial Sequence: Synthetic oligonucleotide
ugucggguccuauggacau

SEQ ID NO: 1014524 - RNA, 19 nt, Artificial Sequence
  Description of Artificial Sequence: Synthetic oligonucleotide
ugcuaagccuuggagcugu

SEQ ID NO: 1014525 - RNA, 19 nt, Artificial Sequence
  Description of Artificial Sequence: Synthetic oligonucleotide
gaaucaacggauaccuucu

SEQ ID NO: 1014526 - RNA, 19 nt, Artificial Sequence
  Description of Artificial Sequence: Synthetic oligonucleotide
aaauacccuucaguuaguu

SEQ ID NO: 1014527 - RNA, 19 nt, Artificial Sequence
  Description of Artificial Sequence: Synthetic oligonucleotide
uggcauuaugaagcaaacu

SEQ ID NO: 1014528 - RNA, 19 nt, Artificial Sequence
  Description of Artificial Sequence: Synthetic oligonucleotide
ucauuacuuucugaauuua

SEQ ID NO: 1014529 - RNA, 19 nt, Artificial Sequence
  Description of Artificial Sequence: Synthetic oligonucleotide
cauuucccuuuguugagca

SEQ ID NO: 1014530 - RNA, 19 nt, Artificial Sequence
  Description of Artificial Sequence: Synthetic oligonucleotide
acuuuggcaggaacuacug

SEQ ID NO: 1014531 - RNA, 19 nt, Artificial Sequence
  Description of Artificial Sequence: Synthetic oligonucleotide
auacaucuguucauauugu

SEQ ID NO: 1014532 - RNA, 19 nt, Artificial Sequence
  Description of Artificial Sequence: Synthetic oligonucleotide
ucccaaauuuugagaacuu

SEQ ID NO: 1014533 - RNA, 19 nt, Artificial Sequence
  Description of Artificial Sequence: Synthetic oligonucleotide
aguacugauucggucugcu

SEQ ID NO: 1014534 - RNA, 19 nt, Artificial Sequence
  Description of Artificial Sequence: Synthetic oligonucleotide
ucugugcacuuuccaggac

SEQ ID NO: 1014535 - RNA, 19 nt, Artificial Sequence
  Description of Artificial Sequence: Synthetic oligonucleotide
cacaauaauuguucccaaa

SEQ ID NO: 1014536 - RNA, 19 nt, Artificial Sequence
  Description of Artificial Sequence: Synthetic oligonucleotide
guucauauugugacuucuc

SEQ ID NO: 1014537 - RNA, 19 nt, Artificial Sequence
  Description of Artificial Sequence: Synthetic oligonucleotide
caugcuuccacucuucuuu

SEQ ID NO: 1014538 - RNA, 19 nt, Artificial Sequence
  Description of Artificial Sequence: Synthetic oligonucleotide
agcuguuucgacgcugcug

SEQ ID NO: 1014539 - RNA, 19 nt, Artificial Sequence
  Description of Artificial Sequence: Synthetic oligonucleotide
augaggcaaaaggaagcug

SEQ ID NO: 1014540 - RNA, 19 nt, Artificial Sequence
  Description of Artificial Sequence: Synthetic oligonucleotide
auacuccuuagcagaugac

SEQ ID NO: 1014541 - RNA, 19 nt, Artificial Sequence
  Description of Artificial Sequence: Synthetic oligonucleotide
cuuuaguuuuaugauacau

SEQ ID NO: 1014542 - RNA, 19 nt, Artificial Sequence
  Description of Artificial Sequence: Synthetic oligonucleotide
ggacuuuauggguugaggu

SEQ ID NO: 1014543 - RNA, 19 nt, Artificial Sequence
  Description of Artificial Sequence: Synthetic oligonucleotide
ugguuauaucucucuccau

SEQ ID NO: 1014544 - RNA, 19 nt, Artificial Sequence
  Description of Artificial Sequence: Synthetic oligonucleotide
ucuggacuuuauggguuga

SEQ ID NO: 1014545 - RNA, 19 nt, Artificial Sequence
  Description of Artificial Sequence: Synthetic oligonucleotide
ggaccuguucacucugcag

SEQ ID NO: 1014546 - RNA, 19 nt, Artificial Sequence
  Description of Artificial Sequence: Synthetic oligonucleotide
cucaauguggcuucuguuu

SEQ ID NO: 1014547 - RNA, 19 nt, Artificial Sequence
  Description of Artificial Sequence: Synthetic oligonucleotide
gguuauaucucucuccauu

SEQ ID NO: 1014548 - RNA, 19 nt, Artificial Sequence
  Description of Artificial Sequence: Synthetic oligonucleotide
uaguacugauucggucugc

SEQ ID NO: 1014549 - RNA, 19 nt, Artificial Sequence
  Description of Artificial Sequence: Synthetic oligonucleotide
cuggacuuuauggguugag

SEQ ID NO: 1014550 - RNA, 19 nt, Artificial Sequence
  Description of Artificial Sequence: Synthetic oligonucleotide
ccuugacuuguaaaauuuc

SEQ ID NO: 1014551 - RNA, 19 nt, Artificial Sequence
  Description of Artificial Sequence: Synthetic oligonucleotide
uuuccacgaccaagcugac

SEQ ID NO: 1014552 - RNA, 19 nt, Artificial Sequence
  Description of Artificial Sequence: Synthetic oligonucleotide
uuucgacgcugcugucuca

SEQ ID NO: 1014553 - RNA, 19 nt, Artificial Sequence
  Description of Artificial Sequence: Synthetic oligonucleotide
gucgaaauuuuaaguccuc

SEQ ID NO: 1014554 - RNA, 19 nt, Artificial Sequence
  Description of Artificial Sequence: Synthetic oligonucleotide
cuucuauagggcuuauuuu

SEQ ID NO: 1014555 - RNA, 19 nt, Artificial Sequence
  Description of Artificial Sequence: Synthetic oligonucleotide
guacuuucuaacauuucau

SEQ ID NO: 1014556 - RNA, 19 nt, Artificial Sequence
  Description of Artificial Sequence: Synthetic oligonucleotide
cuuagcagaugacucugcu

SEQ ID NO: 1014557 - RNA, 19 nt, Artificial Sequence
  Description of Artificial Sequence: Synthetic oligonucleotide
guacugauucggucugcuc

SEQ ID NO: 1014558 - RNA, 19 nt, Artificial Sequence
  Description of Artificial Sequence: Synthetic oligonucleotide
cugcaugcuuccacucuuc

SEQ ID NO: 1014559 - RNA, 19 nt, Artificial Sequence
  Description of Artificial Sequence: Synthetic oligonucleotide
cugggauguuuccacaaua

SEQ ID NO: 1014560 - RNA, 19 nt, Artificial Sequence
  Description of Artificial Sequence: Synthetic oligonucleotide
augucggguccuauggaca

SEQ ID NO: 1014561 - RNA, 19 nt, Artificial Sequence
  Description of Artificial Sequence: Synthetic oligonucleotide
ggauguuuccacaauaauu

SEQ ID NO: 1014562 - RNA, 19 nt, Artificial Sequence
  Description of Artificial Sequence: Synthetic oligonucleotide
caggaacuacuguauggaa

SEQ ID NO: 1014563 - RNA, 19 nt, Artificial Sequence
  Description of Artificial Sequence: Synthetic oligonucleotide
ccgaauucuuuccucaaga

SEQ ID NO: 1014564 - RNA, 19 nt, Artificial Sequence
  Description of Artificial Sequence: Synthetic oligonucleotide
gguccuauggacaucacuu

SEQ ID NO: 1014565 - RNA, 19 nt, Artificial Sequence
  Description of Artificial Sequence: Synthetic oligonucleotide
cacaaagaccauacaaauu

SEQ ID NO: 1014566 - RNA, 19 nt, Artificial Sequence
  Description of Artificial Sequence: Synthetic oligonucleotide
ggagacguuuccacaaaga

SEQ ID NO: 1014567 - RNA, 19 nt, Artificial Sequence
  Description of Artificial Sequence: Synthetic oligonucleotide
ccaguauugcuucuaguaa

SEQ ID NO: 1014568 - RNA, 19 nt, Artificial Sequence
  Description of Artificial Sequence: Synthetic oligonucleotide
ccaaggucuggacuuuaug

SEQ ID NO: 1014569 - RNA, 19 nt, Artificial Sequence
  Description of Artificial Sequence: Synthetic oligonucleotide
uuuauggguugagguuuua

SEQ ID NO: 1014570 - RNA, 19 nt, Artificial Sequence
  Description of Artificial Sequence: Synthetic oligonucleotide
uuccacgaccaagcugaca

SEQ ID NO: 1014571 - RNA, 19 nt, Artificial Sequence
  Description of Artificial Sequence: Synthetic oligonucleotide
gaccaagcugacaguuuga

SEQ ID NO: 1014572 - RNA, 19 nt, Artificial Sequence
  Description of Artificial Sequence: Synthetic oligonucleotide
uccucacgugaggauuucu

SEQ ID NO: 1014573 - RNA, 19 nt, Artificial Sequence
  Description of Artificial Sequence: Synthetic oligonucleotide
ggacaucacuuuguaacuc

SEQ ID NO: 1014574 - RNA, 19 nt, Artificial Sequence
  Description of Artificial Sequence: Synthetic oligonucleotide
cuucacucacguccuccca

SEQ ID NO: 1014575 - RNA, 19 nt, Artificial Sequence
  Description of Artificial Sequence: Synthetic oligonucleotide
cugcagugcuaagccuugg

SEQ ID NO: 1014576 - RNA, 19 nt, Artificial Sequence
  Description of Artificial Sequence: Synthetic oligonucleotide
gauuugaugucggguccua

SEQ ID NO: 1014577 - RNA, 19 nt, Artificial Sequence
  Description of Artificial Sequence: Synthetic oligonucleotide
gaacuacuguauggaaacu

SEQ ID NO: 1014578 - RNA, 19 nt, Artificial Sequence
  Description of Artificial Sequence: Synthetic oligonucleotide
cgaaauuuuaaguccucaa

SEQ ID NO: 1014579 - RNA, 19 nt, Artificial Sequence
  Description of Artificial Sequence: Synthetic oligonucleotide
ucccuuuguugagcauagc

SEQ ID NO: 1014580 - RNA, 19 nt, Artificial Sequence
  Description of Artificial Sequence: Synthetic oligonucleotide
cugauucggucugcuccag

SEQ ID NO: 1014581 - RNA, 19 nt, Artificial Sequence
  Description of Artificial Sequence: Synthetic oligonucleotide
ggacacaauccuuucucgu

SEQ ID NO: 1014582 - RNA, 19 nt, Artificial Sequence
  Description of Artificial Sequence: Synthetic oligonucleotide
cuggagacguuuccacaaa

SEQ ID NO: 1014583 - RNA, 19 nt, Artificial Sequence
  Description of Artificial Sequence: Synthetic oligonucleotide
cauccuugacuuguaaaau

SEQ ID NO: 1014584 - RNA, 19 nt, Artificial Sequence
  Description of Artificial Sequence: Synthetic oligonucleotide
cacguccucccagccgucc

SEQ ID NO: 1014585 - RNA, 19 nt, Artificial Sequence
  Description of Artificial Sequence: Synthetic oligonucleotide
ccauucgagaguugaugga

SEQ ID NO: 1014586 - RNA, 19 nt, Artificial Sequence
  Description of Artificial Sequence: Synthetic oligonucleotide
cuguuucgacgcugcuguc

SEQ ID NO: 1014587 - RNA, 19 nt, Artificial Sequence
  Description of Artificial Sequence: Synthetic oligonucleotide
caaauacccuucaguuagu

SEQ ID NO: 1014588 - RNA, 19 nt, Artificial Sequence
  Description of Artificial Sequence: Synthetic oligonucleotide
guccucaaucaggugucuc

SEQ ID NO: 1014589 - RNA, 19 nt, Artificial Sequence
  Description of Artificial Sequence: Synthetic oligonucleotide
cuuuauggguugagguuuu

SEQ ID NO: 1014590 - RNA, 19 nt, Artificial Sequence
  Description of Artificial Sequence: Synthetic oligonucleotide
ccuuuaggcugcucagcuc

SEQ ID NO: 1014591 - RNA, 19 nt, Artificial Sequence
  Description of Artificial Sequence: Synthetic oligonucleotide
gagaguugauggaggaguu

SEQ ID NO: 1014592 - RNA, 19 nt, Artificial Sequence
  Description of Artificial Sequence: Synthetic oligonucleotide
ucgacgcugcugucucaau

SEQ ID NO: 1014593 - RNA, 19 nt, Artificial Sequence
  Description of Artificial Sequence: Synthetic oligonucleotide
gccuggagacguuuccaca

SEQ ID NO: 1014594 - RNA, 19 nt, Artificial Sequence
  Description of Artificial Sequence: Synthetic oligonucleotide
cuccaguauugcuucuagu

SEQ ID NO: 1014595 - RNA, 19 nt, Artificial Sequence
  Description of Artificial Sequence: Synthetic oligonucleotide
gccuuggagcuguuucgac

SEQ ID NO: 1014596 - RNA, 19 nt, Artificial Sequence
  Description of Artificial Sequence: Synthetic oligonucleotide
caacggauaccuucuuguu

SEQ ID NO: 1014597 - RNA, 19 nt, Artificial Sequence
  Description of Artificial Sequence: Synthetic oligonucleotide
cacaauccuuucucguaau

SEQ ID NO: 1014598 - RNA, 19 nt, Artificial Sequence
  Description of Artificial Sequence: Synthetic oligonucleotide
ggguccuauggacaucacu

SEQ ID NO: 1014599 - RNA, 19 nt, Artificial Sequence
  Description of Artificial Sequence: Synthetic oligonucleotide
ggugucucuucaugguuau

SEQ ID NO: 1014600 - RNA, 19 nt, Artificial Sequence
  Description of Artificial Sequence: Synthetic oligonucleotide
cuguuaacuuuggcaggaa

SEQ ID NO: 1014601 - RNA, 19 nt, Artificial Sequence
  Description of Artificial Sequence: Synthetic oligonucleotide
ggauaccuucuuguuggaa

SEQ ID NO: 1014602 - RNA, 19 nt, Artificial Sequence
  Description of Artificial Sequence: Synthetic oligonucleotide
cacgaccaagcugacaguu

SEQ ID NO: 1014603 - RNA, 19 nt, Artificial Sequence
  Description of Artificial Sequence: Synthetic oligonucleotide
gucggguccuauggacauc

SEQ ID NO: 1014604 - RNA, 19 nt, Artificial Sequence
  Description of Artificial Sequence: Synthetic oligonucleotide
ccaagcugacaguuugagu

SEQ ID NO: 1014605 - RNA, 19 nt, Artificial Sequence
  Description of Artificial Sequence: Synthetic oligonucleotide
cagcugcguccgagucgcc

SEQ ID NO: 1014606 - RNA, 19 nt, Artificial Sequence
  Description of Artificial Sequence: Synthetic oligonucleotide
gguucucaauguggcuucu

SEQ ID NO: 1014607 - RNA, 19 nt, Artificial Sequence
  Description of Artificial Sequence: Synthetic oligonucleotide
gcagaugacucugcugcuu

SEQ ID NO: 1014608 - RNA, 19 nt, Artificial Sequence
  Description of Artificial Sequence: Synthetic oligonucleotide
ccacgaccaagcugacagu

SEQ ID NO: 1014609 - RNA, 19 nt, Artificial Sequence
  Description of Artificial Sequence: Synthetic oligonucleotide
gcccuccucacgugaggau

SEQ ID NO: 1014610 - RNA, 19 nt, Artificial Sequence
  Description of Artificial Sequence: Synthetic oligonucleotide
agugcuucaagccaauggc

SEQ ID NO: 1014611 - RNA, 19 nt, Artificial Sequence
  Description of Artificial Sequence: Synthetic oligonucleotide
uauaaugugagcccucagg

SEQ ID NO: 1014612 - RNA, 19 nt, Artificial Sequence
  Description of Artificial Sequence: Synthetic oligonucleotide
aaagcuagagcaguggugg

SEQ ID NO: 1014613 - RNA, 19 nt, Artificial Sequence
  Description of Artificial Sequence: Synthetic oligonucleotide
cucuuaagggcauugaugg

SEQ ID NO: 1014614 - RNA, 19 nt, Artificial Sequence
  Description of Artificial Sequence: Synthetic oligonucleotide
auaaugugagcccucaggg

SEQ ID NO: 1014615 - RNA, 19 nt, Artificial Sequence
  Description of Artificial Sequence: Synthetic oligonucleotide
aaugccaguggguauaaug

SEQ ID NO: 1014616 - RNA, 19 nt, Artificial Sequence
  Description of Artificial Sequence: Synthetic oligonucleotide
uuugcaagugcuuuugaug

SEQ ID NO: 1014617 - RNA, 19 nt, Artificial Sequence
  Description of Artificial Sequence: Synthetic oligonucleotide
aacucuuggggaugcagac

SEQ ID NO: 1014618 - RNA, 19 nt, Artificial Sequence
  Description of Artificial Sequence: Synthetic oligonucleotide
gacgauaauguccagucgc

SEQ ID NO: 1014619 - RNA, 19 nt, Artificial Sequence
  Description of Artificial Sequence: Synthetic oligonucleotide
aaugugagugacuccuggg

SEQ ID NO: 1014620 - RNA, 19 nt, Artificial Sequence
  Description of Artificial Sequence: Synthetic oligonucleotide
gagaagagcuccaagacag

SEQ ID NO: 1014621 - RNA, 19 nt, Artificial Sequence
  Description of Artificial Sequence: Synthetic oligonucleotide
cuuacuaggcccuaggguc

SEQ ID NO: 1014622 - RNA, 19 nt, Artificial Sequence
  Description of Artificial Sequence: Synthetic oligonucleotide
aaugucaaagccucuuacu

SEQ ID NO: 1014623 - RNA, 19 nt, Artificial Sequence
  Description of Artificial Sequence: Synthetic oligonucleotide
aauuaguugccuucuggcu

SEQ ID NO: 1014624 - RNA, 19 nt, Artificial Sequence
  Description of Artificial Sequence: Synthetic oligonucleotide
aaugugagcccucagggaa

SEQ ID NO: 1014625 - RNA, 19 nt, Artificial Sequence
  Description of Artificial Sequence: Synthetic oligonucleotide
agaggagccggguagugcc

SEQ ID NO: 1014626 - RNA, 19 nt, Artificial Sequence
  Description of Artificial Sequence: Synthetic oligonucleotide
aguccauauuuucaucuac

SEQ ID NO: 1014627 - RNA, 19 nt, Artificial Sequence
  Description of Artificial Sequence: Synthetic oligonucleotide
ugugguugguccaaggaac

SEQ ID NO: 1014628 - RNA, 19 nt, Artificial Sequence
  Description of Artificial Sequence: Synthetic oligonucleotide
aaucagccgucucuccugc

SEQ ID NO: 1014629 - RNA, 19 nt, Artificial Sequence
  Description of Artificial Sequence: Synthetic oligonucleotide
ugucaaagccucuuacuag

SEQ ID NO: 1014630 - RNA, 19 nt, Artificial Sequence
  Description of Artificial Sequence: Synthetic oligonucleotide
uagggcacgacgauaaugu

SEQ ID NO: 1014631 - RNA, 19 nt, Artificial Sequence
  Description of Artificial Sequence: Synthetic oligonucleotide
agcuaggcaaagcuagagc

SEQ ID NO: 1014632 - RNA, 19 nt, Artificial Sequence
  Description of Artificial Sequence: Synthetic oligonucleotide
ucuuacuaggcccuagggu

SEQ ID NO: 1014633 - RNA, 19 nt, Artificial Sequence
  Description of Artificial Sequence: Synthetic oligonucleotide
ugagugaugagcacaucga

SEQ ID NO: 1014634 - RNA, 19 nt, Artificial Sequence
  Description of Artificial Sequence: Synthetic oligonucleotide
uauccggacugucuuuucg

SEQ ID NO: 1014635 - RNA, 19 nt, Artificial Sequence
  Description of Artificial Sequence: Synthetic oligonucleotide
ugugagugacuccuggggc

SEQ ID NO: 1014636 - RNA, 19 nt, Artificial Sequence
  Description of Artificial Sequence: Synthetic oligonucleotide
agaagcuaggcaaagcuag

SEQ ID NO: 1014637 - RNA, 19 nt, Artificial Sequence
  Description of Artificial Sequence: Synthetic oligonucleotide
ucaccaagucaucugugag

SEQ ID NO: 1014638 - RNA, 19 nt, Artificial Sequence
  Description of Artificial Sequence: Synthetic oligonucleotide
uuucucaagaggagccggg

SEQ ID NO: 1014639 - RNA, 19 nt, Artificial Sequence
  Description of Artificial Sequence: Synthetic oligonucleotide
ugcaugaauuuucuuucgc

SEQ ID NO: 1014640 - RNA, 19 nt, Artificial Sequence
  Description of Artificial Sequence: Synthetic oligonucleotide
aggcaaauucacuguaggg

SEQ ID NO: 1014641 - RNA, 19 nt, Artificial Sequence
  Description of Artificial Sequence: Synthetic oligonucleotide
agugaauccaggcuucuga

SEQ ID NO: 1014642 - RNA, 19 nt, Artificial Sequence
  Description of Artificial Sequence: Synthetic oligonucleotide
cagucuuagucccagcucc

SEQ ID NO: 1014643 - RNA, 19 nt, Artificial Sequence
  Description of Artificial Sequence: Synthetic oligonucleotide
uuaguugccuucuggcuug

SEQ ID NO: 1014644 - RNA, 19 nt, Artificial Sequence
  Description of Artificial Sequence: Synthetic oligonucleotide
cugaugguaccacaucugg

SEQ ID NO: 1014645 - RNA, 19 nt, Artificial Sequence
  Description of Artificial Sequence: Synthetic oligonucleotide
auaucuggccaccaugaug

SEQ ID NO: 1014646 - RNA, 19 nt, Artificial Sequence
  Description of Artificial Sequence: Synthetic oligonucleotide
cuuucgcuugggaaaagcc

SEQ ID NO: 1014647 - RNA, 19 nt, Artificial Sequence
  Description of Artificial Sequence: Synthetic oligonucleotide
caucuuuccccuucgguag

SEQ ID NO: 1014648 - RNA, 19 nt, Artificial Sequence
  Description of Artificial Sequence: Synthetic oligonucleotide
acgaucuucucagccaucc

SEQ ID NO: 1014649 - RNA, 19 nt, Artificial Sequence
  Description of Artificial Sequence: Synthetic oligonucleotide
uuaagggcauugauggccu

SEQ ID NO: 1014650 - RNA, 19 nt, Artificial Sequence
  Description of Artificial Sequence: Synthetic oligonucleotide
ucaccagucccgcucagcc

SEQ ID NO: 1014651 - RNA, 19 nt, Artificial Sequence
  Description of Artificial Sequence: Synthetic oligonucleotide
ucuaaggagccggagagcu

SEQ ID NO: 1014652 - RNA, 19 nt, Artificial Sequence
  Description of Artificial Sequence: Synthetic oligonucleotide
agacacugaauccagccgu

SEQ ID NO: 1014653 - RNA, 19 nt, Artificial Sequence
  Description of Artificial Sequence: Synthetic oligonucleotide
cuagcuuccgaagaugccc

SEQ ID NO: 1014654 - RNA, 19 nt, Artificial Sequence
  Description of Artificial Sequence: Synthetic oligonucleotide
uguggucuagcuuccgaag

SEQ ID NO: 1014655 - RNA, 19 nt, Artificial Sequence
  Description of Artificial Sequence: Synthetic oligonucleotide
ugggaaucuuugcaagugc

SEQ ID NO: 1014656 - RNA, 19 nt, Artificial Sequence
  Description of Artificial Sequence: Synthetic oligonucleotide
ucaucugugaggaacccuu

SEQ ID NO: 1014657 - RNA, 19 nt, Artificial Sequence
  Description of Artificial Sequence: Synthetic oligonucleotide
uuacuaggcccuagggucc

SEQ ID NO: 1014658 - RNA, 19 nt, Artificial Sequence
  Description of Artificial Sequence: Synthetic oligonucleotide
agccgugucaaucagccgu

SEQ ID NO: 1014659 - RNA, 19 nt, Artificial Sequence
  Description of Artificial Sequence: Synthetic oligonucleotide
ucacuguagggcacgacga

SEQ ID NO: 1014660 - RNA, 19 nt, Artificial Sequence
  Description of Artificial Sequence: Synthetic oligonucleotide
auuaguugccuucuggcuu

SEQ ID NO: 1014661 - RNA, 19 nt, Artificial Sequence
  Description of Artificial Sequence: Synthetic oligonucleotide
uucucuguaggagugggca

SEQ ID NO: 1014662 - RNA, 19 nt, Artificial Sequence
  Description of Artificial Sequence: Synthetic oligonucleotide
guagggcaggccuaaaagc

SEQ ID NO: 1014663 - RNA, 19 nt, Artificial Sequence
  Description of Artificial Sequence: Synthetic oligonucleotide
guggguauaaugugagccc

SEQ ID NO: 1014664 - RNA, 19 nt, Artificial Sequence
  Description of Artificial Sequence: Synthetic oligonucleotide
aggaagugagaagcuaggc

SEQ ID NO: 1014665 - RNA, 19 nt, Artificial Sequence
  Description of Artificial Sequence: Synthetic oligonucleotide
caaugugagugacuccugg

SEQ ID NO: 1014666 - RNA, 19 nt, Artificial Sequence
  Description of Artificial Sequence: Synthetic oligonucleotide
ugugaugugcugguuauaa

SEQ ID NO: 1014667 - RNA, 19 nt, Artificial Sequence
  Description of Artificial Sequence: Synthetic oligonucleotide
acgauaauguccagucgcc

SEQ ID NO: 1014668 - RNA, 19 nt, Artificial Sequence
  Description of Artificial Sequence: Synthetic oligonucleotide
ucuagcuuccgaagaugcc

SEQ ID NO: 1014669 - RNA, 19 nt, Artificial Sequence
  Description of Artificial Sequence: Synthetic oligonucleotide
uugggaaucuuugcaagug

SEQ ID NO: 1014670 - RNA, 19 nt, Artificial Sequence
  Description of Artificial Sequence: Synthetic oligonucleotide
uugccaaucccugggaugc

SEQ ID NO: 1014671 - RNA, 19 nt, Artificial Sequence
  Description of Artificial Sequence: Synthetic oligonucleotide
guugacuucaccagcugag

SEQ ID NO: 1014672 - RNA, 19 nt, Artificial Sequence
  Description of Artificial Sequence: Synthetic oligonucleotide
cuuccccucacccaagccc

SEQ ID NO: 1014673 - RNA, 19 nt, Artificial Sequence
  Description of Artificial Sequence: Synthetic oligonucleotide
agcccuaggucaccagucc

SEQ ID NO: 1014674 - RNA, 19 nt, Artificial Sequence
  Description of Artificial Sequence: Synthetic oligonucleotide
caggaagugagaagcuagg

SEQ ID NO: 1014675 - RNA, 19 nt, Artificial Sequence
  Description of Artificial Sequence: Synthetic oligonucleotide
auaauguccagucgccggu

SEQ ID NO: 1014676 - RNA, 19 nt, Artificial Sequence
  Description of Artificial Sequence: Synthetic oligonucleotide
uucgcuugggaaaagccuu

SEQ ID NO: 1014677 - RNA, 19 nt, Artificial Sequence
  Description of Artificial Sequence: Synthetic oligonucleotide
ggauggcuaaaugagagag

SEQ ID NO: 1014678 - RNA, 19 nt, Artificial Sequence
  Description of Artificial Sequence: Synthetic oligonucleotide
cuccucauggcucaccaag

SEQ ID NO: 1014679 - RNA, 19 nt, Artificial Sequence
  Description of Artificial Sequence: Synthetic oligonucleotide
caaagcuagagcaguggug

SEQ ID NO: 1014680 - RNA, 19 nt, Artificial Sequence
  Description of Artificial Sequence: Synthetic oligonucleotide
ucgaccaggccccaccuug

SEQ ID NO: 1014681 - RNA, 19 nt, Artificial Sequence
  Description of Artificial Sequence: Synthetic oligonucleotide
cuaaaugagagagacagcu

SEQ ID NO: 1014682 - RNA, 19 nt, Artificial Sequence
  Description of Artificial Sequence: Synthetic oligonucleotide
cagacacugaauccagccg

SEQ ID NO: 1014683 - RNA, 19 nt, Artificial Sequence
  Description of Artificial Sequence: Synthetic oligonucleotide
uaaugugagcccucaggga

SEQ ID NO: 1014684 - RNA, 19 nt, Artificial Sequence
  Description of Artificial Sequence: Synthetic oligonucleotide
uuuagccagcaccucuagc

SEQ ID NO: 1014685 - RNA, 19 nt, Artificial Sequence
  Description of Artificial Sequence: Synthetic oligonucleotide
agugguggauggcuaaaug

SEQ ID NO: 1014686 - RNA, 19 nt, Artificial Sequence
  Description of Artificial Sequence: Synthetic oligonucleotide
ugaauccaggcuucugaug

SEQ ID NO: 1014687 - RNA, 19 nt, Artificial Sequence
  Description of Artificial Sequence: Synthetic oligonucleotide
aaacccugaugguaccaca

SEQ ID NO: 1014688 - RNA, 19 nt, Artificial Sequence
  Description of Artificial Sequence: Synthetic oligonucleotide
gguagggcaggccuaaaag

SEQ ID NO: 1014689 - RNA, 19 nt, Artificial Sequence
  Description of Artificial Sequence: Synthetic oligonucleotide
uucuagguuccggaaaccc

SEQ ID NO: 1014690 - RNA, 19 nt, Artificial Sequence
  Description of Artificial Sequence: Synthetic oligonucleotide
ucuuaagggcauugauggc

SEQ ID NO: 1014691 - RNA, 19 nt, Artificial Sequence
  Description of Artificial Sequence: Synthetic oligonucleotide
agccacguugacuucacca

SEQ ID NO: 1014692 - RNA, 19 nt, Artificial Sequence
  Description of Artificial Sequence: Synthetic oligonucleotide
cuuucucaagaggagccgg

SEQ ID NO: 1014693 - RNA, 19 nt, Artificial Sequence
  Description of Artificial Sequence: Synthetic oligonucleotide
gcuaggcaaagcuagagca

SEQ ID NO: 1014694 - RNA, 19 nt, Artificial Sequence
  Description of Artificial Sequence: Synthetic oligonucleotide
cuagagcagugguggaugg

SEQ ID NO: 1014695 - RNA, 19 nt, Artificial Sequence
  Description of Artificial Sequence: Synthetic oligonucleotide
caaagccucuuacuaggcc

SEQ ID NO: 1014696 - RNA, 19 nt, Artificial Sequence
  Description of Artificial Sequence: Synthetic oligonucleotide
ugccaguggguauaaugug

SEQ ID NO: 1014697 - RNA, 19 nt, Artificial Sequence
  Description of Artificial Sequence: Synthetic oligonucleotide
uaggcaaagcuagagcagu

SEQ ID NO: 1014698 - RNA, 19 nt, Artificial Sequence
  Description of Artificial Sequence: Synthetic oligonucleotide
aagcccuaggucaccaguc

SEQ ID NO: 1014699 - RNA, 19 nt, Artificial Sequence
  Description of Artificial Sequence: Synthetic oligonucleotide
agccgucucuccugcaggc

SEQ ID NO: 1014700 - RNA, 19 nt, Artificial Sequence
  Description of Artificial Sequence: Synthetic oligonucleotide
gugagugacuccuggggcc

SEQ ID NO: 1014701 - RNA, 19 nt, Artificial Sequence
  Description of Artificial Sequence: Synthetic oligonucleotide
ucuuucgcuugggaaaagc

SEQ ID NO: 1014702 - RNA, 19 nt, Artificial Sequence
  Description of Artificial Sequence: Synthetic oligonucleotide
uagcuuccgaagaugccca

SEQ ID NO: 1014703 - RNA, 19 nt, Artificial Sequence
  Description of Artificial Sequence: Synthetic oligonucleotide
uggauggcuaaaugagaga

SEQ ID NO: 1014704 - RNA, 19 nt, Artificial Sequence
  Description of Artificial Sequence: Synthetic oligonucleotide
ugcccacugaucaaggcuu

SEQ ID NO: 1014705 - RNA, 19 nt, Artificial Sequence
  Description of Artificial Sequence: Synthetic oligonucleotide
uggguauaaugugagcccu

SEQ ID NO: 1014706 - RNA, 19 nt, Artificial Sequence
  Description of Artificial Sequence: Synthetic oligonucleotide
gaugugcugguuauaauua

SEQ ID NO: 1014707 - RNA, 19 nt, Artificial Sequence
  Description of Artificial Sequence: Synthetic oligonucleotide
caccaugauggauaaucug

SEQ ID NO: 1014708 - RNA, 19 nt, Artificial Sequence
  Description of Artificial Sequence: Synthetic oligonucleotide
cuuccgaagaugcccacuc

SEQ ID NO: 1014709 - RNA, 19 nt, Artificial Sequence
  Description of Artificial Sequence: Synthetic oligonucleotide
augccaguggguauaaugu

SEQ ID NO: 1014710 - RNA, 19 nt, Artificial Sequence
  Description of Artificial Sequence: Synthetic oligonucleotide
uggucuagcuuccgaagau

SEQ ID NO: 1014711 - RNA, 19 nt, Artificial Sequence
  Description of Artificial Sequence: Synthetic oligonucleotide
uccucauggcucaccaagu

SEQ ID NO: 1014712 - RNA, 19 nt, Artificial Sequence
  Description of Artificial Sequence: Synthetic oligonucleotide
ugggugagugaugagcaca

SEQ ID NO: 1014713 - RNA, 19 nt, Artificial Sequence
  Description of Artificial Sequence: Synthetic oligonucleotide
agagcucgcucacagucca

SEQ ID NO: 1014714 - RNA, 19 nt, Artificial Sequence
  Description of Artificial Sequence: Synthetic oligonucleotide
guagugcccacugaucaag

SEQ ID NO: 1014715 - RNA, 19 nt, Artificial Sequence
  Description of Artificial Sequence: Synthetic oligonucleotide
gaccgguugaagugagcag

SEQ ID NO: 1014716 - RNA, 19 nt, Artificial Sequence
  Description of Artificial Sequence: Synthetic oligonucleotide
aaccuggggcccuucuuca

SEQ ID NO: 1014717 - RNA, 19 nt, Artificial Sequence
  Description of Artificial Sequence: Synthetic oligonucleotide
gaagccggcacacacccaa

SEQ ID NO: 1014718 - RNA, 19 nt, Artificial Sequence
  Description of Artificial Sequence: Synthetic oligonucleotide
aucuuuccccuucgguagg

SEQ ID NO: 1014719 - RNA, 19 nt, Artificial Sequence
  Description of Artificial Sequence: Synthetic oligonucleotide
gccuaaaagccugaagacg

SEQ ID NO: 1014720 - RNA, 19 nt, Artificial Sequence
  Description of Artificial Sequence: Synthetic oligonucleotide
caaucagccgucucuccug

SEQ ID NO: 1014721 - RNA, 19 nt, Artificial Sequence
  Description of Artificial Sequence: Synthetic oligonucleotide
accgguugaagugagcaga

SEQ ID NO: 1014722 - RNA, 19 nt, Artificial Sequence
  Description of Artificial Sequence: Synthetic oligonucleotide
ugccuuguugggcuguggu

SEQ ID NO: 1014723 - RNA, 19 nt, Artificial Sequence
  Description of Artificial Sequence: Synthetic oligonucleotide
guauaaugugagcccucag

SEQ ID NO: 1014724 - RNA, 19 nt, Artificial Sequence
  Description of Artificial Sequence: Synthetic oligonucleotide
acccugaugguaccacauc

SEQ ID NO: 1014725 - RNA, 19 nt, Artificial Sequence
  Description of Artificial Sequence: Synthetic oligonucleotide
gacagcucacccagcgugg

SEQ ID NO: 1014726 - RNA, 19 nt, Artificial Sequence
  Description of Artificial Sequence: Synthetic oligonucleotide
agucuuagucccagcuccc

SEQ ID NO: 1014727 - RNA, 19 nt, Artificial Sequence
  Description of Artificial Sequence: Synthetic oligonucleotide
cucguccaaugccaguggg

SEQ ID NO: 1014728 - RNA, 19 nt, Artificial Sequence
  Description of Artificial Sequence: Synthetic oligonucleotide
ugucaaucagccgucucuc

SEQ ID NO: 1014729 - RNA, 19 nt, Artificial Sequence
  Description of Artificial Sequence: Synthetic oligonucleotide
ggagagcucgcucacaguc

SEQ ID NO: 1014730 - RNA, 19 nt, Artificial Sequence
  Description of Artificial Sequence: Synthetic oligonucleotide
cagcacucgaccaggcccc

SEQ ID NO: 1014731 - RNA, 19 nt, Artificial Sequence
  Description of Artificial Sequence: Synthetic oligonucleotide
cuggaagccggcacacacc

SEQ ID NO: 1014732 - RNA, 19 nt, Artificial Sequence
  Description of Artificial Sequence: Synthetic oligonucleotide
ucguccaaugccagugggu

SEQ ID NO: 1014733 - RNA, 19 nt, Artificial Sequence
  Description of Artificial Sequence: Synthetic oligonucleotide
auguggucuagcuuccgaa

SEQ ID NO: 1014734 - RNA, 19 nt, Artificial Sequence
  Description of Artificial Sequence: Synthetic oligonucleotide
gccacguugacuucaccag

SEQ ID NO: 1014735 - RNA, 19 nt, Artificial Sequence
  Description of Artificial Sequence: Synthetic oligonucleotide
uaggagugggcagcacucg

SEQ ID NO: 1014736 - RNA, 19 nt, Artificial Sequence
  Description of Artificial Sequence: Synthetic oligonucleotide
uccagccgugucaaucagc

SEQ ID NO: 1014737 - RNA, 19 nt, Artificial Sequence
  Description of Artificial Sequence: Synthetic oligonucleotide
acguccuucucuguaggag

SEQ ID NO: 1014738 - RNA, 19 nt, Artificial Sequence
  Description of Artificial Sequence: Synthetic oligonucleotide
guagggcacgacgauaaug

SEQ ID NO: 1014739 - RNA, 19 nt, Artificial Sequence
  Description of Artificial Sequence: Synthetic oligonucleotide
gaacucuuggggaugcaga

SEQ ID NO: 1014740 - RNA, 19 nt, Artificial Sequence
  Description of Artificial Sequence: Synthetic oligonucleotide
aauucacuguagggcacga

SEQ ID NO: 1014741 - RNA, 19 nt, Artificial Sequence
  Description of Artificial Sequence: Synthetic oligonucleotide
ucucaagaggagccgggua

SEQ ID NO: 1014742 - RNA, 19 nt, Artificial Sequence
  Description of Artificial Sequence: Synthetic oligonucleotide
cuucucuguaggagugggc

SEQ ID NO: 1014743 - RNA, 19 nt, Artificial Sequence
  Description of Artificial Sequence: Synthetic oligonucleotide
aggcccuaggguccuuucg

SEQ ID NO: 1014744 - RNA, 19 nt, Artificial Sequence
  Description of Artificial Sequence: Synthetic oligonucleotide
ugggcagucuuagucccag

SEQ ID NO: 1014745 - RNA, 19 nt, Artificial Sequence
  Description of Artificial Sequence: Synthetic oligonucleotide
cacaucugggcagucuuag

SEQ ID NO: 1014746 - RNA, 19 nt, Artificial Sequence
  Description of Artificial Sequence: Synthetic oligonucleotide
agcguggcuuccccucacc

SEQ ID NO: 1014747 - RNA, 19 nt, Artificial Sequence
  Description of Artificial Sequence: Synthetic oligonucleotide
uagguuccggaaacccuga

SEQ ID NO: 1014748 - RNA, 19 nt, Artificial Sequence
  Description of Artificial Sequence: Synthetic oligonucleotide
agggcacgacgauaauguc

SEQ ID NO: 1014749 - RNA, 19 nt, Artificial Sequence
  Description of Artificial Sequence: Synthetic oligonucleotide
gaggcagucuaaggagccg

SEQ ID NO: 1014750 - RNA, 19 nt, Artificial Sequence
  Description of Artificial Sequence: Synthetic oligonucleotide
aagcuagagcaguggugga

SEQ ID NO: 1014751 - RNA, 19 nt, Artificial Sequence
  Description of Artificial Sequence: Synthetic oligonucleotide
cacaguccauauuuucauc

SEQ ID NO: 1014752 - RNA, 19 nt, Artificial Sequence
  Description of Artificial Sequence: Synthetic oligonucleotide
gauggcuaaaugagagaga

SEQ ID NO: 1014753 - RNA, 19 nt, Artificial Sequence
  Description of Artificial Sequence: Synthetic oligonucleotide
uccggaaacccugauggua

SEQ ID NO: 1014754 - RNA, 19 nt, Artificial Sequence
  Description of Artificial Sequence: Synthetic oligonucleotide
gugcuucaagccaauggcc

SEQ ID NO: 1014755 - RNA, 19 nt, Artificial Sequence
  Description of Artificial Sequence: Synthetic oligonucleotide
ccuguuugggaaucuuugc

SEQ ID NO: 1014756 - RNA, 19 nt, Artificial Sequence
  Description of Artificial Sequence: Synthetic oligonucleotide
gccaauggccugcugagug

SEQ ID NO: 1014757 - RNA, 19 nt, Artificial Sequence
  Description of Artificial Sequence: Synthetic oligonucleotide
ggcacgacgauaaugucca

SEQ ID NO: 1014758 - RNA, 19 nt, Artificial Sequence
  Description of Artificial Sequence: Synthetic oligonucleotide
gugggcagcacucgaccag

SEQ ID NO: 1014759 - RNA, 19 nt, Artificial Sequence
  Description of Artificial Sequence: Synthetic oligonucleotide
ggcaaagcuagagcagugg

SEQ ID NO: 1014760 - RNA, 19 nt, Artificial Sequence
  Description of Artificial Sequence: Synthetic oligonucleotide
agugcuuuugaugguggau

SEQ ID NO: 1014761 - RNA, 19 nt, Artificial Sequence
  Description of Artificial Sequence: Synthetic oligonucleotide
agcuuccgaagaugcccac

SEQ ID NO: 1014762 - RNA, 19 nt, Artificial Sequence
  Description of Artificial Sequence: Synthetic oligonucleotide
caucugugaggaacccuug

SEQ ID NO: 1014763 - RNA, 19 nt, Artificial Sequence
  Description of Artificial Sequence: Synthetic oligonucleotide
ugccgaaggcugucaagga

SEQ ID NO: 1014764 - RNA, 19 nt, Artificial Sequence
  Description of Artificial Sequence: Synthetic oligonucleotide
augugagcccucagggaac

SEQ ID NO: 1014765 - RNA, 19 nt, Artificial Sequence
  Description of Artificial Sequence: Synthetic oligonucleotide
ccaggccccaccuugacac

SEQ ID NO: 1014766 - RNA, 19 nt, Artificial Sequence
  Description of Artificial Sequence: Synthetic oligonucleotide
cacaaugugagugacuccu

SEQ ID NO: 1014767 - RNA, 19 nt, Artificial Sequence
  Description of Artificial Sequence: Synthetic oligonucleotide
uucucaagaggagccgggu

SEQ ID NO: 1014768 - RNA, 19 nt, Artificial Sequence
  Description of Artificial Sequence: Synthetic oligonucleotide
gaaucuuugcaagugcuuu

SEQ ID NO: 1014769 - RNA, 19 nt, Artificial Sequence
  Description of Artificial Sequence: Synthetic oligonucleotide
ugagugacuccuggggccu

SEQ ID NO: 1014770 - RNA, 19 nt, Artificial Sequence
  Description of Artificial Sequence: Synthetic oligonucleotide
cacucgaccaggccccacc

SEQ ID NO: 1014771 - RNA, 19 nt, Artificial Sequence
  Description of Artificial Sequence: Synthetic oligonucleotide
aacccugaugguaccacau

SEQ ID NO: 1014772 - RNA, 19 nt, Artificial Sequence
  Description of Artificial Sequence: Synthetic oligonucleotide
cuucgguaggagccacagg

SEQ ID NO: 1014773 - RNA, 19 nt, Artificial Sequence
  Description of Artificial Sequence: Synthetic oligonucleotide
ucgcuugggaaaagccuuc

SEQ ID NO: 1014774 - RNA, 19 nt, Artificial Sequence
  Description of Artificial Sequence: Synthetic oligonucleotide
gagcucuugcccgggcucg

SEQ ID NO: 1014775 - RNA, 19 nt, Artificial Sequence
  Description of Artificial Sequence: Synthetic oligonucleotide
acguugacuucaccagcug

SEQ ID NO: 1014776 - RNA, 19 nt, Artificial Sequence
  Description of Artificial Sequence: Synthetic oligonucleotide
ccagagcacgcauggaccg

SEQ ID NO: 1014777 - RNA, 19 nt, Artificial Sequence
  Description of Artificial Sequence: Synthetic oligonucleotide
cuaccacaaugugagugac

SEQ ID NO: 1014778 - RNA, 19 nt, Artificial Sequence
  Description of Artificial Sequence: Synthetic oligonucleotide
ucucuaggaucuccacgau

SEQ ID NO: 1014779 - RNA, 19 nt, Artificial Sequence
  Description of Artificial Sequence: Synthetic oligonucleotide
ucuugcccgggcucgucca

SEQ ID NO: 1014780 - RNA, 19 nt, Artificial Sequence
  Description of Artificial Sequence: Synthetic oligonucleotide
cucacccaagcccuagguc

SEQ ID NO: 1014781 - RNA, 19 nt, Artificial Sequence
  Description of Artificial Sequence: Synthetic oligonucleotide
cacugaauccagccguguc

SEQ ID NO: 1014782 - RNA, 19 nt, Artificial Sequence
  Description of Artificial Sequence: Synthetic oligonucleotide
ccuaaaagccugaagacgu

SEQ ID NO: 1014783 - RNA, 19 nt, Artificial Sequence
  Description of Artificial Sequence: Synthetic oligonucleotide
gguuccggaaacccugaug

SEQ ID NO: 1014784 - RNA, 19 nt, Artificial Sequence
  Description of Artificial Sequence: Synthetic oligonucleotide
ugugagcccucagggaacu

SEQ ID NO: 1014785 - RNA, 19 nt, Artificial Sequence
  Description of Artificial Sequence: Synthetic oligonucleotide
uccccacaggucaucuuuc

SEQ ID NO: 1014786 - RNA, 19 nt, Artificial Sequence
  Description of Artificial Sequence: Synthetic oligonucleotide
cagucuaaggagccggaga

SEQ ID NO: 1014787 - RNA, 19 nt, Artificial Sequence
  Description of Artificial Sequence: Synthetic oligonucleotide
caccagucccgcucagccg

SEQ ID NO: 1014788 - RNA, 19 nt, Artificial Sequence
  Description of Artificial Sequence: Synthetic oligonucleotide
agcagugguggauggcuaa

SEQ ID NO: 1014789 - RNA, 19 nt, Artificial Sequence
  Description of Artificial Sequence: Synthetic oligonucleotide
ccggaaacccugaugguac

SEQ ID NO: 1014790 - RNA, 19 nt, Artificial Sequence
  Description of Artificial Sequence: Synthetic oligonucleotide
cugagcuaaccuggggccc

SEQ ID NO: 1014791 - RNA, 19 nt, Artificial Sequence
  Description of Artificial Sequence: Synthetic oligonucleotide
uuccggaaacccugauggu

SEQ ID NO: 1014792 - RNA, 19 nt, Artificial Sequence
  Description of Artificial Sequence: Synthetic oligonucleotide
aggagugggcagcacucga

SEQ ID NO: 1014793 - RNA, 19 nt, Artificial Sequence
  Description of Artificial Sequence: Synthetic oligonucleotide
uguccagucgccggugccu

SEQ ID NO: 1014794 - RNA, 19 nt, Artificial Sequence
  Description of Artificial Sequence: Synthetic oligonucleotide
uggaccgguugaagugagc

SEQ ID NO: 1014795 - RNA, 19 nt, Artificial Sequence
  Description of Artificial Sequence: Synthetic oligonucleotide
gggcacgacgauaaugucc

SEQ ID NO: 1014796 - RNA, 19 nt, Artificial Sequence
  Description of Artificial Sequence: Synthetic oligonucleotide
gguauaaugugagcccuca

SEQ ID NO: 1014797 - RNA, 19 nt, Artificial Sequence
  Description of Artificial Sequence: Synthetic oligonucleotide
ggaacucuuggggaugcag

SEQ ID NO: 1014798 - RNA, 19 nt, Artificial Sequence
  Description of Artificial Sequence: Synthetic oligonucleotide
cuugacaccuuggcuguuc

SEQ ID NO: 1014799 - RNA, 19 nt, Artificial Sequence
  Description of Artificial Sequence: Synthetic oligonucleotide
uguagggcacgacgauaau

SEQ ID NO: 1014800 - RNA, 19 nt, Artificial Sequence
  Description of Artificial Sequence: Synthetic oligonucleotide
gucagugaauccaggcuuc

SEQ ID NO: 1014801 - RNA, 19 nt, Artificial Sequence
  Description of Artificial Sequence: Synthetic oligonucleotide
auagugcuucaagccaaug

SEQ ID NO: 1014802 - RNA, 19 nt, Artificial Sequence
  Description of Artificial Sequence: Synthetic oligonucleotide
ggacacuguaggcuuuagc

SEQ ID NO: 1014803 - RNA, 19 nt, Artificial Sequence
  Description of Artificial Sequence: Synthetic oligonucleotide
uucuuucgcuugggaaaag

SEQ ID NO: 1014804 - RNA, 19 nt, Artificial Sequence
  Description of Artificial Sequence: Synthetic oligonucleotide
caccucuagcuucucugug

SEQ ID NO: 1014805 - RNA, 19 nt, Artificial Sequence
  Description of Artificial Sequence: Synthetic oligonucleotide
cugggugagugaugagcac

SEQ ID NO: 1014806 - RNA, 19 nt, Artificial Sequence
  Description of Artificial Sequence: Synthetic oligonucleotide
gacguccuucucuguagga

SEQ ID NO: 1014807 - RNA, 19 nt, Artificial Sequence
  Description of Artificial Sequence: Synthetic oligonucleotide
gcuagagcagugguggaug

SEQ ID NO: 1014808 - RNA, 19 nt, Artificial Sequence
  Description of Artificial Sequence: Synthetic oligonucleotide
cauggcucaccaagucauc

SEQ ID NO: 1014809 - RNA, 19 nt, Artificial Sequence
  Description of Artificial Sequence: Synthetic oligonucleotide
cucuugcccgggcucgucc

SEQ ID NO: 1014810 - RNA, 19 nt, Artificial Sequence
  Description of Artificial Sequence: Synthetic oligonucleotide
gcucacaguccauauuuuc

SEQ ID NO: 1014811 - RNA, 19 nt, Artificial Sequence
  Description of Artificial Sequence: Synthetic oligonucleotide
ggucaucuuuccccuucgg

SEQ ID NO: 1014812 - RNA, 19 nt, Artificial Sequence
  Description of Artificial Sequence: Synthetic oligonucleotide
acucgaccaggccccaccu

SEQ ID NO: 1014813 - RNA, 19 nt, Artificial Sequence
  Description of Artificial Sequence: Synthetic oligonucleotide
ccuaggguccuuucgagga

SEQ ID NO: 1014814 - RNA, 19 nt, Artificial Sequence
  Description of Artificial Sequence: Synthetic oligonucleotide
agucccgcucagccggcuc

SEQ ID NO: 1014815 - RNA, 19 nt, Artificial Sequence
  Description of Artificial Sequence: Synthetic oligonucleotide
agccggguagugcccacug

SEQ ID NO: 1014816 - RNA, 19 nt, Artificial Sequence
  Description of Artificial Sequence: Synthetic oligonucleotide
uggacacuguaggcuuuag

SEQ ID NO: 1014817 - RNA, 19 nt, Artificial Sequence
  Description of Artificial Sequence: Synthetic oligonucleotide
cauggaccgguugaaguga

SEQ ID NO: 1014818 - RNA, 19 nt, Artificial Sequence
  Description of Artificial Sequence: Synthetic oligonucleotide
ucccaccuccuguuuggga

SEQ ID NO: 1014819 - RNA, 19 nt, Artificial Sequence
  Description of Artificial Sequence: Synthetic oligonucleotide
cuuugcaagugcuuuugau

SEQ ID NO: 1014820 - RNA, 19 nt, Artificial Sequence
  Description of Artificial Sequence: Synthetic oligonucleotide
gucaggcccaccaucuuuc

SEQ ID NO: 1014821 - RNA, 19 nt, Artificial Sequence
  Description of Artificial Sequence: Synthetic oligonucleotide
uccggaccacagcugcgcu

SEQ ID NO: 1014822 - RNA, 19 nt, Artificial Sequence
  Description of Artificial Sequence: Synthetic oligonucleotide
gucuuagucccagcucccc

SEQ ID NO: 1014823 - RNA, 19 nt, Artificial Sequence
  Description of Artificial Sequence: Synthetic oligonucleotide
ggaccgguugaagugagca

SEQ ID NO: 1014824 - RNA, 19 nt, Artificial Sequence
  Description of Artificial Sequence: Synthetic oligonucleotide
caccuuggcuguuccggac

SEQ ID NO: 1014825 - RNA, 19 nt, Artificial Sequence
  Description of Artificial Sequence: Synthetic oligonucleotide
gguuauaauuaguugccuu

SEQ ID NO: 1014826 - RNA, 19 nt, Artificial Sequence
  Description of Artificial Sequence: Synthetic oligonucleotide
cagccgugucaaucagccg

SEQ ID NO: 1014827 - RNA, 19 nt, Artificial Sequence
  Description of Artificial Sequence: Synthetic oligonucleotide
ggcugugguugguccaagg

SEQ ID NO: 1014828 - RNA, 19 nt, Artificial Sequence
  Description of Artificial Sequence: Synthetic oligonucleotide
gcucguccaaugccagugg

SEQ ID NO: 1014829 - RNA, 19 nt, Artificial Sequence
  Description of Artificial Sequence: Synthetic oligonucleotide
gguggauggcuaaaugaga

SEQ ID NO: 1014830 - RNA, 19 nt, Artificial Sequence
  Description of Artificial Sequence: Synthetic oligonucleotide
cacguugacuucaccagcu

SEQ ID NO: 1014831 - RNA, 19 nt, Artificial Sequence
  Description of Artificial Sequence: Synthetic oligonucleotide
acuguagggcacgacgaua

SEQ ID NO: 1014832 - RNA, 19 nt, Artificial Sequence
  Description of Artificial Sequence: Synthetic oligonucleotide
ugguugguccaaggaacuc

SEQ ID NO: 1014833 - RNA, 19 nt, Artificial Sequence
  Description of Artificial Sequence: Synthetic oligonucleotide
ggucuagcuuccgaagaug

SEQ ID NO: 1014834 - RNA, 19 nt, Artificial Sequence
  Description of Artificial Sequence: Synthetic oligonucleotide
ugcccgggcucguccaaug

SEQ ID NO: 1014835 - RNA, 19 nt, Artificial Sequence
  Description of Artificial Sequence: Synthetic oligonucleotide
gugcccacugaucaaggcu

SEQ ID NO: 1014836 - RNA, 19 nt, Artificial Sequence
  Description of Artificial Sequence: Synthetic oligonucleotide
auggaccgguugaagugag

SEQ ID NO: 1014837 - RNA, 19 nt, Artificial Sequence
  Description of Artificial Sequence: Synthetic oligonucleotide
aggcacaagcucagccacg

SEQ ID NO: 1014838 - RNA, 19 nt, Artificial Sequence
  Description of Artificial Sequence: Synthetic oligonucleotide
caguccauauuuucaucua

SEQ ID NO: 1014839 - RNA, 19 nt, Artificial Sequence
  Description of Artificial Sequence: Synthetic oligonucleotide
auccgcuugccaaucccug

SEQ ID NO: 1014840 - RNA, 19 nt, Artificial Sequence
  Description of Artificial Sequence: Synthetic oligonucleotide
aggcuuuagccagcaccuc

SEQ ID NO: 1014841 - RNA, 19 nt, Artificial Sequence
  Description of Artificial Sequence: Synthetic oligonucleotide
gcuguuccggaccacagcu

SEQ ID NO: 1014842 - RNA, 19 nt, Artificial Sequence
  Description of Artificial Sequence: Synthetic oligonucleotide
uccccuucgguaggagcca

SEQ ID NO: 1014843 - RNA, 19 nt, Artificial Sequence
  Description of Artificial Sequence: Synthetic oligonucleotide
gauauccggacugucuuuu

SEQ ID NO: 1014844 - RNA, 19 nt, Artificial Sequence
  Description of Artificial Sequence: Synthetic oligonucleotide
uacuaggcccuaggguccu

SEQ ID NO: 1014845 - RNA, 19 nt, Artificial Sequence
  Description of Artificial Sequence: Synthetic oligonucleotide
ggcuguuccggaccacagc

SEQ ID NO: 1014846 - RNA, 19 nt, Artificial Sequence
  Description of Artificial Sequence: Synthetic oligonucleotide
acgcauggaccgguugaag

SEQ ID NO: 1014847 - RNA, 19 nt, Artificial Sequence
  Description of Artificial Sequence: Synthetic oligonucleotide
cagugaauccaggcuucug

SEQ ID NO: 1014848 - RNA, 19 nt, Artificial Sequence
  Description of Artificial Sequence: Synthetic oligonucleotide
gccaguggguauaauguga

SEQ ID NO: 1014849 - RNA, 19 nt, Artificial Sequence
  Description of Artificial Sequence: Synthetic oligonucleotide
uaggcccuaggguccuuuc

SEQ ID NO: 1014850 - RNA, 19 nt, Artificial Sequence
  Description of Artificial Sequence: Synthetic oligonucleotide
ccauccgcuugccaauccc

SEQ ID NO: 1014851 - RNA, 19 nt, Artificial Sequence
  Description of Artificial Sequence: Synthetic oligonucleotide
ggcccuaggguccuuucga

SEQ ID NO: 1014852 - RNA, 19 nt, Artificial Sequence
  Description of Artificial Sequence: Synthetic oligonucleotide
gaggagccggguagugccc

SEQ ID NO: 1014853 - RNA, 19 nt, Artificial Sequence
  Description of Artificial Sequence: Synthetic oligonucleotide
gcaaagcuagagcaguggu

SEQ ID NO: 1014854 - RNA, 19 nt, Artificial Sequence
  Description of Artificial Sequence: Synthetic oligonucleotide
gcacgcauggaccgguuga

SEQ ID NO: 1014855 - RNA, 19 nt, Artificial Sequence
  Description of Artificial Sequence: Synthetic oligonucleotide
gucaccagucccgcucagc

SEQ ID NO: 1014856 - RNA, 19 nt, Artificial Sequence
  Description of Artificial Sequence: Synthetic oligonucleotide
ggaacccuugcugccgaag

SEQ ID NO: 1014857 - RNA, 19 nt, Artificial Sequence
  Description of Artificial Sequence: Synthetic oligonucleotide
cugcgcugagggcaugcuc

SEQ ID NO: 1014858 - RNA, 19 nt, Artificial Sequence
  Description of Artificial Sequence: Synthetic oligonucleotide
caaucccugggaugccgca

SEQ ID NO: 1014859 - RNA, 19 nt, Artificial Sequence
  Description of Artificial Sequence: Synthetic oligonucleotide
gcccuaggucaccaguccc

SEQ ID NO: 1014860 - RNA, 19 nt, Artificial Sequence
  Description of Artificial Sequence: Synthetic oligonucleotide
caggccccaccuugacacc

SEQ ID NO: 1014861 - RNA, 19 nt, Artificial Sequence
  Description of Artificial Sequence: Synthetic oligonucleotide
gcuugggcccuggaagccg

SEQ ID NO: 1014862 - RNA, 19 nt, Artificial Sequence
  Description of Artificial Sequence: Synthetic oligonucleotide
gcagucuaaggagccggag

SEQ ID NO: 1014863 - RNA, 19 nt, Artificial Sequence
  Description of Artificial Sequence: Synthetic oligonucleotide
caagcccuaggucaccagu

SEQ ID NO: 1014864 - RNA, 19 nt, Artificial Sequence
  Description of Artificial Sequence: Synthetic oligonucleotide
gguccuuucgaggagcagu

SEQ ID NO: 1014865 - RNA, 19 nt, Artificial Sequence
  Description of Artificial Sequence: Synthetic oligonucleotide
gcaggccauccccagcagc

SEQ ID NO: 1014866 - RNA, 19 nt, Artificial Sequence
  Description of Artificial Sequence: Synthetic oligonucleotide
caucgacauccccacaggu

SEQ ID NO: 1014867 - RNA, 19 nt, Artificial Sequence
  Description of Artificial Sequence: Synthetic oligonucleotide
gguugguccaaggaacucu

SEQ ID NO: 1014868 - RNA, 19 nt, Artificial Sequence
  Description of Artificial Sequence: Synthetic oligonucleotide
cauccgcuugccaaucccu

SEQ ID NO: 1014869 - RNA, 19 nt, Artificial Sequence
  Description of Artificial Sequence: Synthetic oligonucleotide
gggcaggccuaaaagccug

SEQ ID NO: 1014870 - RNA, 19 nt, Artificial Sequence
  Description of Artificial Sequence: Synthetic oligonucleotide
caggcccaccaucuuucuc

SEQ ID NO: 1014871 - RNA, 19 nt, Artificial Sequence
  Description of Artificial Sequence: Synthetic oligonucleotide
ccuaggucaccagucccgc

SEQ ID NO: 1014872 - RNA, 19 nt, Artificial Sequence
  Description of Artificial Sequence: Synthetic oligonucleotide
ccggccaucugggugagug

SEQ ID NO: 1014873 - RNA, 19 nt, Artificial Sequence
  Description of Artificial Sequence: Synthetic oligonucleotide
ccggacugucuuuucgaug

SEQ ID NO: 1014874 - RNA, 19 nt, Artificial Sequence
  Description of Artificial Sequence: Synthetic oligonucleotide
agucgccggugccucugcu

SEQ ID NO: 1014875 - RNA, 19 nt, Artificial Sequence
  Description of Artificial Sequence: Synthetic oligonucleotide
ggagugggcagcacucgac

SEQ ID NO: 1014876 - RNA, 19 nt, Artificial Sequence
  Description of Artificial Sequence: Synthetic oligonucleotide
aggagccggguagugccca

SEQ ID NO: 1014877 - RNA, 19 nt, Artificial Sequence
  Description of Artificial Sequence: Synthetic oligonucleotide
agcaguccucacagagucu

SEQ ID NO: 1014878 - RNA, 19 nt, Artificial Sequence
  Description of Artificial Sequence: Synthetic oligonucleotide
cuuggcuguuccggaccac

SEQ ID NO: 1014879 - RNA, 19 nt, Artificial Sequence
  Description of Artificial Sequence: Synthetic oligonucleotide
cauagugcuucaagccaau

SEQ ID NO: 1014880 - RNA, 19 nt, Artificial Sequence
  Description of Artificial Sequence: Synthetic oligonucleotide
caccuccuguuugggaauc

SEQ ID NO: 1014881 - RNA, 19 nt, Artificial Sequence
  Description of Artificial Sequence: Synthetic oligonucleotide
cggacugucuuuucgaugu

SEQ ID NO: 1014882 - RNA, 19 nt, Artificial Sequence
  Description of Artificial Sequence: Synthetic oligonucleotide
cccgggcucguccaaugcc

SEQ ID NO: 1014883 - RNA, 19 nt, Artificial Sequence
  Description of Artificial Sequence: Synthetic oligonucleotide
gcacacacccaaguacuuc

SEQ ID NO: 1014884 - RNA, 19 nt, Artificial Sequence
  Description of Artificial Sequence: Synthetic oligonucleotide
cugggcagucuuaguccca

SEQ ID NO: 1014885 - RNA, 19 nt, Artificial Sequence
  Description of Artificial Sequence: Synthetic oligonucleotide
cagucgccggugccucugc

SEQ ID NO: 1014886 - RNA, 19 nt, Artificial Sequence
  Description of Artificial Sequence: Synthetic oligonucleotide
uaguugccuucuggcuuga

SEQ ID NO: 1014887 - RNA, 19 nt, Artificial Sequence
  Description of Artificial Sequence: Synthetic oligonucleotide
gcaugcuccgacaggcuca

SEQ ID NO: 1014888 - RNA, 19 nt, Artificial Sequence
  Description of Artificial Sequence: Synthetic oligonucleotide
cacgacgauaauguccagu

SEQ ID NO: 1014889 - RNA, 19 nt, Artificial Sequence
  Description of Artificial Sequence: Synthetic oligonucleotide
gccauccgcuugccaaucc

SEQ ID NO: 1014890 - RNA, 19 nt, Artificial Sequence
  Description of Artificial Sequence: Synthetic oligonucleotide
ggguauaaugugagcccuc

SEQ ID NO: 1014891 - RNA, 19 nt, Artificial Sequence
  Description of Artificial Sequence: Synthetic oligonucleotide
gaccggccaucugggugag

SEQ ID NO: 1014892 - RNA, 19 nt, Artificial Sequence
  Description of Artificial Sequence: Synthetic oligonucleotide
cacgcauggaccgguugaa

SEQ ID NO: 1014893 - RNA, 19 nt, Artificial Sequence
  Description of Artificial Sequence: Synthetic oligonucleotide
gcucaugcccuuggucuug

SEQ ID NO: 1014894 - RNA, 19 nt, Artificial Sequence
  Description of Artificial Sequence: Synthetic oligonucleotide
ccaagcccuaggucaccag

SEQ ID NO: 1014895 - RNA, 19 nt, Artificial Sequence
  Description of Artificial Sequence: Synthetic oligonucleotide
ggucaccagucccgcucag

SEQ ID NO: 1014896 - RNA, 19 nt, Artificial Sequence
  Description of Artificial Sequence: Synthetic oligonucleotide
cucgguagggcaggccuaa

SEQ ID NO: 1014897 - RNA, 19 nt, Artificial Sequence
  Description of Artificial Sequence: Synthetic oligonucleotide
cccugaugguaccacaucu

SEQ ID NO: 1014898 - RNA, 19 nt, Artificial Sequence
  Description of Artificial Sequence: Synthetic oligonucleotide
guggaucugcaugaauuuu

SEQ ID NO: 1014899 - RNA, 19 nt, Artificial Sequence
  Description of Artificial Sequence: Synthetic oligonucleotide
cauagcccagggcccucca

SEQ ID NO: 1014900 - RNA, 19 nt, Artificial Sequence
  Description of Artificial Sequence: Synthetic oligonucleotide
ccaccaugauggauaaucu

SEQ ID NO: 1014901 - RNA, 19 nt, Artificial Sequence
  Description of Artificial Sequence: Synthetic oligonucleotide
caauggccugcugaguggu

SEQ ID NO: 1014902 - RNA, 19 nt, Artificial Sequence
  Description of Artificial Sequence: Synthetic oligonucleotide
ccuccugguaggagcugac

SEQ ID NO: 1014903 - RNA, 19 nt, Artificial Sequence
  Description of Artificial Sequence: Synthetic oligonucleotide
ccgggcucguccaaugcca

SEQ ID NO: 1014904 - RNA, 19 nt, Artificial Sequence
  Description of Artificial Sequence: Synthetic oligonucleotide
caucuaccacaaugugagu

SEQ ID NO: 1014905 - RNA, 19 nt, Artificial Sequence
  Description of Artificial Sequence: Synthetic oligonucleotide
cacugauguggucuagcuu

SEQ ID NO: 1014906 - RNA, 19 nt, Artificial Sequence
  Description of Artificial Sequence: Synthetic oligonucleotide
uugcccgggcucguccaau

SEQ ID NO: 1014907 - RNA, 19 nt, Artificial Sequence
  Description of Artificial Sequence: Synthetic oligonucleotide
ccuuucgaggagcaguccu

SEQ ID NO: 1014908 - RNA, 19 nt, Artificial Sequence
  Description of Artificial Sequence: Synthetic oligonucleotide
gcacgacgauaauguccag

SEQ ID NO: 1014909 - RNA, 19 nt, Artificial Sequence
  Description of Artificial Sequence: Synthetic oligonucleotide
ggaugccgcaggccuccug

SEQ ID NO: 1014910 - RNA, 19 nt, Artificial Sequence
  Description of Artificial Sequence: Synthetic oligonucleotide
gccgugucaaucagccguc

SEQ ID NO: 1014911 - RNA, 19 nt, Artificial Sequence
  Description of Artificial Sequence: Synthetic oligonucleotide
agcacucgaccaggcccca

SEQ ID NO: 1014912 - RNA, 19 nt, Artificial Sequence
  Description of Artificial Sequence: Synthetic oligonucleotide
ggcagucuaaggagccgga

SEQ ID NO: 1014913 - RNA, 19 nt, Artificial Sequence
  Description of Artificial Sequence: Synthetic oligonucleotide
gcccgggcucguccaaugc

SEQ ID NO: 1014914 - RNA, 19 nt, Artificial Sequence
  Description of Artificial Sequence: Synthetic oligonucleotide
cuaggucaccagucccgcu

SEQ ID NO: 1014915 - RNA, 19 nt, Artificial Sequence
  Description of Artificial Sequence: Synthetic oligonucleotide
ccggaccacagcugcgcug

SEQ ID NO: 1014916 - RNA, 19 nt, Artificial Sequence
  Description of Artificial Sequence: Synthetic oligonucleotide
cggguagugcccacugauc

SEQ ID NO: 1014917 - RNA, 19 nt, Artificial Sequence
  Description of Artificial Sequence: Synthetic oligonucleotide
ggagccggguagugcccac

SEQ ID NO: 1014918 - RNA, 19 nt, Artificial Sequence
  Description of Artificial Sequence: Synthetic oligonucleotide
cucgcucacaguccauauu

SEQ ID NO: 1014919 - RNA, 19 nt, Artificial Sequence
  Description of Artificial Sequence: Synthetic oligonucleotide
gcucagccggcucucggua

SEQ ID NO: 1014920 - RNA, 19 nt, Artificial Sequence
  Description of Artificial Sequence: Synthetic oligonucleotide
gcuaaccuggggcccuucu

SEQ ID NO: 1014921 - RNA, 19 nt, Artificial Sequence
  Description of Artificial Sequence: Synthetic oligonucleotide
cgggcucguccaaugccag

SEQ ID NO: 1014922 - RNA, 19 nt, Artificial Sequence
  Description of Artificial Sequence: Synthetic oligonucleotide
ccagucccgcucagccggc

SEQ ID NO: 1014923 - RNA, 19 nt, Artificial Sequence
  Description of Artificial Sequence: Synthetic oligonucleotide
ccaccuugacaccuuggcu

SEQ ID NO: 1014924 - RNA, 19 nt, Artificial Sequence
  Description of Artificial Sequence: Synthetic oligonucleotide
cgcauggaccgguugaagu

SEQ ID NO: 1014925 - RNA, 19 nt, Artificial Sequence
  Description of Artificial Sequence: Synthetic oligonucleotide
ggccaucugggugagugau

SEQ ID NO: 1014926 - RNA, 19 nt, Artificial Sequence
  Description of Artificial Sequence: Synthetic oligonucleotide
gccggguagugcccacuga

SEQ ID NO: 1014927 - RNA, 19 nt, Artificial Sequence
  Description of Artificial Sequence: Synthetic oligonucleotide
caugcuccgacaggcucau

SEQ ID NO: 1014928 - RNA, 19 nt, Artificial Sequence
  Description of Artificial Sequence: Synthetic oligonucleotide
gucgccggugccucugcuu

SEQ ID NO: 1014929 - RNA, 19 nt, Artificial Sequence
  Description of Artificial Sequence: Synthetic oligonucleotide
gagccggguagugcccacu

SEQ ID NO: 1014930 - RNA, 19 nt, Artificial Sequence
  Description of Artificial Sequence: Synthetic oligonucleotide
gcuuccgaagaugcccacu

SEQ ID NO: 1014931 - RNA, 19 nt, Artificial Sequence
  Description of Artificial Sequence: Synthetic oligonucleotide
ggcaugcgcuccaggaagu

SEQ ID NO: 1014932 - RNA, 19 nt, Artificial Sequence
  Description of Artificial Sequence: Synthetic oligonucleotide
cuggugggaccggccaucu

SEQ ID NO: 1014933 - RNA, 19 nt, Artificial Sequence
  Description of Artificial Sequence: Synthetic oligonucleotide
ccggguagugcccacugau

SEQ ID NO: 1014934 - RNA, 19 nt, Artificial Sequence
  Description of Artificial Sequence: Synthetic oligonucleotide
ccaaugccaguggguauaa

SEQ ID NO: 1014935 - RNA, 19 nt, Artificial Sequence
  Description of Artificial Sequence: Synthetic oligonucleotide
gggcucguccaaugccagu

SEQ ID NO: 1014936 - RNA, 19 nt, Artificial Sequence
  Description of Artificial Sequence: Synthetic oligonucleotide
cgguagggcaggccuaaaa

SEQ ID NO: 1014937 - RNA, 19 nt, Artificial Sequence
  Description of Artificial Sequence: Synthetic oligonucleotide
gccggagagcucgcucaca

SEQ ID NO: 1014938 - RNA, 19 nt, Artificial Sequence
  Description of Artificial Sequence: Synthetic oligonucleotide
cucgaccaggccccaccuu

SEQ ID NO: 1014939 - RNA, 19 nt, Artificial Sequence
  Description of Artificial Sequence: Synthetic oligonucleotide
gagcuaaccuggggcccuu

SEQ ID NO: 1014940 - RNA, 19 nt, Artificial Sequence
  Description of Artificial Sequence: Synthetic oligonucleotide
caaugccaguggguauaau

SEQ ID NO: 1014941 - RNA, 19 nt, Artificial Sequence
  Description of Artificial Sequence: Synthetic oligonucleotide
gggcaugcuccgacaggcu

SEQ ID NO: 1014942 - RNA, 19 nt, Artificial Sequence
  Description of Artificial Sequence: Synthetic oligonucleotide
ggcugucaaggaggcggcu

SEQ ID NO: 1014943 - RNA, 19 nt, Artificial Sequence
  Description of Artificial Sequence: Synthetic oligonucleotide
gcacaagcucagccacguu

SEQ ID NO: 1014944 - RNA, 19 nt, Artificial Sequence
  Description of Artificial Sequence: Synthetic oligonucleotide
gggaugccgcaggccuccu

SEQ ID NO: 1014945 - RNA, 19 nt, Artificial Sequence
  Description of Artificial Sequence: Synthetic oligonucleotide
ccuugacaccuuggcuguu

SEQ ID NO: 1014946 - RNA, 19 nt, Artificial Sequence
  Description of Artificial Sequence: Synthetic oligonucleotide
aaugaguacacguauaauc

SEQ ID NO: 1014947 - RNA, 19 nt, Artificial Sequence
  Description of Artificial Sequence: Synthetic oligonucleotide
cuuuaauuugccuucaucg

SEQ ID NO: 1014948 - RNA, 19 nt, Artificial Sequence
  Description of Artificial Sequence: Synthetic oligonucleotide
aaggcaacuauuuagggag

SEQ ID NO: 1014949 - RNA, 19 nt, Artificial Sequence
  Description of Artificial Sequence: Synthetic oligonucleotide
auaauaguguuuuaggaag

SEQ ID NO: 1014950 - RNA, 19 nt, Artificial Sequence
  Description of Artificial Sequence: Synthetic oligonucleotide
aaccaauuacacuuuggcc

SEQ ID NO: 1014951 - RNA, 19 nt, Artificial Sequence
  Description of Artificial Sequence: Synthetic oligonucleotide
aaugggauaaguuuaugcu

SEQ ID NO: 1014952 - RNA, 19 nt, Artificial Sequence
  Description of Artificial Sequence: Synthetic oligonucleotide
auuuuagucuuccauguac

SEQ ID NO: 1014953 - RNA, 19 nt, Artificial Sequence
  Description of Artificial Sequence: Synthetic oligonucleotide
aaugcauagaucuucaaua

SEQ ID NO: 1014954 - RNA, 19 nt, Artificial Sequence
  Description of Artificial Sequence: Synthetic oligonucleotide
aaaguugccgauauucucc

SEQ ID NO: 1014955 - RNA, 19 nt, Artificial Sequence
  Description of Artificial Sequence: Synthetic oligonucleotide
aauacugcgcuccuguauc

SEQ ID NO: 1014956 - RNA, 19 nt, Artificial Sequence
  Description of Artificial Sequence: Synthetic oligonucleotide
aaagaugccuccugguccc

SEQ ID NO: 1014957 - RNA, 19 nt, Artificial Sequence
  Description of Artificial Sequence: Synthetic oligonucleotide
ugacuaguaaucaaugccc

SEQ ID NO: 1014958 - RNA, 19 nt, Artificial Sequence
  Description of Artificial Sequence: Synthetic oligonucleotide
accaauuacacuuuggcca

SEQ ID NO: 1014959 - RNA, 19 nt, Artificial Sequence
  Description of Artificial Sequence: Synthetic oligonucleotide
uaguguuuuaggaagacga

SEQ ID NO: 1014960 - RNA, 19 nt, Artificial Sequence
  Description of Artificial Sequence: Synthetic oligonucleotide
aacuauuuagggaggaggc

SEQ ID NO: 1014961 - RNA, 19 nt, Artificial Sequence
  Description of Artificial Sequence: Synthetic oligonucleotide
uuuaagguaagauaagcau

SEQ ID NO: 1014962 - RNA, 19 nt, Artificial Sequence
  Description of Artificial Sequence: Synthetic oligonucleotide
uuuagcaaaucaaacauuu

SEQ ID NO: 1014963 - RNA, 19 nt, Artificial Sequence
  Description of Artificial Sequence: Synthetic oligonucleotide
aaaccugcacgucugcggc

SEQ ID NO: 1014964 - RNA, 19 nt, Artificial Sequence
  Description of Artificial Sequence: Synthetic oligonucleotide
augguuacagcacuaaaag

SEQ ID NO: 1014965 - RNA, 19 nt, Artificial Sequence
  Description of Artificial Sequence: Synthetic oligonucleotide
agauuuaguuggcaaagac

SEQ ID NO: 1014966 - RNA, 19 nt, Artificial Sequence
  Description of Artificial Sequence: Synthetic oligonucleotide
uaagguaagauaagcauaa

SEQ ID NO: 1014967 - RNA, 19 nt, Artificial Sequence
  Description of Artificial Sequence: Synthetic oligonucleotide
ucauaaagaugccuccugg

SEQ ID NO: 1014968 - RNA, 19 nt, Artificial Sequence
  Description of Artificial Sequence: Synthetic oligonucleotide
uaaagaugccuccuggucc

SEQ ID NO: 1014969 - RNA, 19 nt, Artificial Sequence
  Description of Artificial Sequence: Synthetic oligonucleotide
auuguuugaaaauaccagu

SEQ ID NO: 1014970 - RNA, 19 nt, Artificial Sequence
  Description of Artificial Sequence: Synthetic oligonucleotide
uuagugaggauucauugac

SEQ ID NO: 1014971 - RNA, 19 nt, Artificial Sequence
  Description of Artificial Sequence: Synthetic oligonucleotide
uuaaguguaagguuguaaa

SEQ ID NO: 1014972 - RNA, 19 nt, Artificial Sequence
  Description of Artificial Sequence: Synthetic oligonucleotide
caauggacuaaauacugcg

SEQ ID NO: 1014973 - RNA, 19 nt, Artificial Sequence
  Description of Artificial Sequence: Synthetic oligonucleotide
aguuuaugcugagaaaugc

SEQ ID NO: 1014974 - RNA, 19 nt, Artificial Sequence
  Description of Artificial Sequence: Synthetic oligonucleotide
uuuagaacucagcaagcag

SEQ ID NO: 1014975 - RNA, 19 nt, Artificial Sequence
  Description of Artificial Sequence: Synthetic oligonucleotide
cauauugguacucucgggg

SEQ ID NO: 1014976 - RNA, 19 nt, Artificial Sequence
  Description of Artificial Sequence: Synthetic oligonucleotide
ugcaucuuagauuuaguug

SEQ ID NO: 1014977 - RNA, 19 nt, Artificial Sequence
  Description of Artificial Sequence: Synthetic oligonucleotide
aaaggcaacuauuuaggga

SEQ ID NO: 1014978 - RNA, 19 nt, Artificial Sequence
  Description of Artificial Sequence: Synthetic oligonucleotide
uuaauaaaguugccgauau

SEQ ID NO: 1014979 - RNA, 19 nt, Artificial Sequence
  Description of Artificial Sequence: Synthetic oligonucleotide
aauaguguuuuaggaagac

SEQ ID NO: 1014980 - RNA, 19 nt, Artificial Sequence
  Description of Artificial Sequence: Synthetic oligonucleotide
ucguagaugucucuucugg

SEQ ID NO: 1014981 - RNA, 19 nt, Artificial Sequence
  Description of Artificial Sequence: Synthetic oligonucleotide
gucaucaccauauugguac

SEQ ID NO: 1014982 - RNA, 19 nt, Artificial Sequence
  Description of Artificial Sequence: Synthetic oligonucleotide
uuacugguuaugcuguagg

SEQ ID NO: 1014983 - RNA, 19 nt, Artificial Sequence
  Description of Artificial Sequence: Synthetic oligonucleotide
cauagaucuucaauaaaag

SEQ ID NO: 1014984 - RNA, 19 nt, Artificial Sequence
  Description of Artificial Sequence: Synthetic oligonucleotide
uacacguauaaucacaaau

SEQ ID NO: 1014985 - RNA, 19 nt, Artificial Sequence
  Description of Artificial Sequence: Synthetic oligonucleotide
aagauaagcauaauagugu

SEQ ID NO: 1014986 - RNA, 19 nt, Artificial Sequence
  Description of Artificial Sequence: Synthetic oligonucleotide
acgagaauuacucaaggcu

SEQ ID NO: 1014987 - RNA, 19 nt, Artificial Sequence
  Description of Artificial Sequence: Synthetic oligonucleotide
cugacuaguaaucaaugcc

SEQ ID NO: 1014988 - RNA, 19 nt, Artificial Sequence
  Description of Artificial Sequence: Synthetic oligonucleotide
auaaagaugccuccugguc

SEQ ID NO: 1014989 - RNA, 19 nt, Artificial Sequence
  Description of Artificial Sequence: Synthetic oligonucleotide
aauuacacuuuggccagcc

SEQ ID NO: 1014990 - RNA, 19 nt, Artificial Sequence
  Description of Artificial Sequence: Synthetic oligonucleotide
uuaagguaagauaagcaua

SEQ ID NO: 1014991 - RNA, 19 nt, Artificial Sequence
  Description of Artificial Sequence: Synthetic oligonucleotide
uauccaauugcggagaucu

SEQ ID NO: 1014992 - RNA, 19 nt, Artificial Sequence
  Description of Artificial Sequence: Synthetic oligonucleotide
auuccauaagccugaauag

SEQ ID NO: 1014993 - RNA, 19 nt, Artificial Sequence
  Description of Artificial Sequence: Synthetic oligonucleotide
uaaguuuaugcugagaaau

SEQ ID NO: 1014994 - RNA, 19 nt, Artificial Sequence
  Description of Artificial Sequence: Synthetic oligonucleotide
aagcauaauaguguuuuag

SEQ ID NO: 1014995 - RNA, 19 nt, Artificial Sequence
  Description of Artificial Sequence: Synthetic oligonucleotide
aaaugcagcaauaaauaca

SEQ ID NO: 1014996 - RNA, 19 nt, Artificial Sequence
  Description of Artificial Sequence: Synthetic oligonucleotide
caguuuaaguguaagguug

SEQ ID NO: 1014997 - RNA, 19 nt, Artificial Sequence
  Description of Artificial Sequence: Synthetic oligonucleotide
aggauuuaaugguuacagc

SEQ ID NO: 1014998 - RNA, 19 nt, Artificial Sequence
  Description of Artificial Sequence: Synthetic oligonucleotide
cacguauaaucacaaaugc

SEQ ID NO: 1014999 - RNA, 19 nt, Artificial Sequence
  Description of Artificial Sequence: Synthetic oligonucleotide
aauugcggagaucuuccuc

SEQ ID NO: 1015000 - RNA, 19 nt, Artificial Sequence
  Description of Artificial Sequence: Synthetic oligonucleotide
uuaauuugccuucaucgaa

SEQ ID NO: 1015001 - RNA, 19 nt, Artificial Sequence
  Description of Artificial Sequence: Synthetic oligonucleotide
accauauugguacucucgg

SEQ ID NO: 1015002 - RNA, 19 nt, Artificial Sequence
  Description of Artificial Sequence: Synthetic oligonucleotide
agaagcgccacucugaaaa

SEQ ID NO: 1015003 - RNA, 19 nt, Artificial Sequence
  Description of Artificial Sequence: Synthetic oligonucleotide
cuaguaaucaaugcccugg

SEQ ID NO: 1015004 - RNA, 19 nt, Artificial Sequence
  Description of Artificial Sequence: Synthetic oligonucleotide
uuacucaaggcuagcuugg

SEQ ID NO: 1015005 - RNA, 19 nt, Artificial Sequence
  Description of Artificial Sequence: Synthetic oligonucleotide
uacacacgcccuuagaagc

SEQ ID NO: 1015006 - RNA, 19 nt, Artificial Sequence
  Description of Artificial Sequence: Synthetic oligonucleotide
agcuuuaauaaaguugccg

SEQ ID NO: 1015007 - RNA, 19 nt, Artificial Sequence
  Description of Artificial Sequence: Synthetic oligonucleotide
aacagagcgagucuacagu

SEQ ID NO: 1015008 - RNA, 19 nt, Artificial Sequence
  Description of Artificial Sequence: Synthetic oligonucleotide
caucgaaacgucuuguuug

SEQ ID NO: 1015009 - RNA, 19 nt, Artificial Sequence
  Description of Artificial Sequence: Synthetic oligonucleotide
uuguugaugaguucgcaga

SEQ ID NO: 1015010 - RNA, 19 nt, Artificial Sequence
  Description of Artificial Sequence: Synthetic oligonucleotide
ucuguaaaccaauuacacu

SEQ ID NO: 1015011 - RNA, 19 nt, Artificial Sequence
  Description of Artificial Sequence: Synthetic oligonucleotide
uccguugugaaugacaggu

SEQ ID NO: 1015012 - RNA, 19 nt, Artificial Sequence
  Description of Artificial Sequence: Synthetic oligonucleotide
aguucgcagaggaugaugc

SEQ ID NO: 1015013 - RNA, 19 nt, Artificial Sequence
  Description of Artificial Sequence: Synthetic oligonucleotide
uguacacacgcccuuagaa

SEQ ID NO: 1015014 - RNA, 19 nt, Artificial Sequence
  Description of Artificial Sequence: Synthetic oligonucleotide
augggauaaguuuaugcug

SEQ ID NO: 1015015 - RNA, 19 nt, Artificial Sequence
  Description of Artificial Sequence: Synthetic oligonucleotide
uccuauuguuugaaaauac

SEQ ID NO: 1015016 - RNA, 19 nt, Artificial Sequence
  Description of Artificial Sequence: Synthetic oligonucleotide
agacgagaauuacucaagg

SEQ ID NO: 1015017 - RNA, 19 nt, Artificial Sequence
  Description of Artificial Sequence: Synthetic oligonucleotide
gaugcaaucuuguucuuga

SEQ ID NO: 1015018 - RNA, 19 nt, Artificial Sequence
  Description of Artificial Sequence: Synthetic oligonucleotide
uguagcuuguugaugaguu

SEQ ID NO: 1015019 - RNA, 19 nt, Artificial Sequence
  Description of Artificial Sequence: Synthetic oligonucleotide
gauuuaaugguuacagcac

SEQ ID NO: 1015020 - RNA, 19 nt, Artificial Sequence
  Description of Artificial Sequence: Synthetic oligonucleotide
agcccauauacgcucauuc

SEQ ID NO: 1015021 - RNA, 19 nt, Artificial Sequence
  Description of Artificial Sequence: Synthetic oligonucleotide
ucuuagauuuaguuggcaa

SEQ ID NO: 1015022 - RNA, 19 nt, Artificial Sequence
  Description of Artificial Sequence: Synthetic oligonucleotide
ugaggauucauugacuuuc

SEQ ID NO: 1015023 - RNA, 19 nt, Artificial Sequence
  Description of Artificial Sequence: Synthetic oligonucleotide
auacacuugccgcccaagc

SEQ ID NO: 1015024 - RNA, 19 nt, Artificial Sequence
  Description of Artificial Sequence: Synthetic oligonucleotide
accaguuuaaguguaaggu

SEQ ID NO: 1015025 - RNA, 19 nt, Artificial Sequence
  Description of Artificial Sequence: Synthetic oligonucleotide
agcacuaaaaggcaacuau

SEQ ID NO: 1015026 - RNA, 19 nt, Artificial Sequence
  Description of Artificial Sequence: Synthetic oligonucleotide
cauuccauaagccugaaua

SEQ ID NO: 1015027 - RNA, 19 nt, Artificial Sequence
  Description of Artificial Sequence: Synthetic oligonucleotide
gaagacgagaauuacucaa

SEQ ID NO: 1015028 - RNA, 19 nt, Artificial Sequence
  Description of Artificial Sequence: Synthetic oligonucleotide
agguucuaaaugcugcauc

SEQ ID NO: 1015029 - RNA, 19 nt, Artificial Sequence
  Description of Artificial Sequence: Synthetic oligonucleotide
uguaucugacuaguaauca

SEQ ID NO: 1015030 - RNA, 19 nt, Artificial Sequence
  Description of Artificial Sequence: Synthetic oligonucleotide
gacgagaauuacucaaggc

SEQ ID NO: 1015031 - RNA, 19 nt, Artificial Sequence
  Description of Artificial Sequence: Synthetic oligonucleotide
aaauacugcgcuccuguau

SEQ ID NO: 1015032 - RNA, 19 nt, Artificial Sequence
  Description of Artificial Sequence: Synthetic oligonucleotide
uuuaauaaaguugccgaua

SEQ ID NO: 1015033 - RNA, 19 nt, Artificial Sequence
  Description of Artificial Sequence: Synthetic oligonucleotide
acacguauaaucacaaaug

SEQ ID NO: 1015034 - RNA, 19 nt, Artificial Sequence
  Description of Artificial Sequence: Synthetic oligonucleotide
gaucauuugcuucaaauau

SEQ ID NO: 1015035 - RNA, 19 nt, Artificial Sequence
  Description of Artificial Sequence: Synthetic oligonucleotide
aucaugacuuuauuuagaa

SEQ ID NO: 1015036 - RNA, 19 nt, Artificial Sequence
  Description of Artificial Sequence: Synthetic oligonucleotide
agagaaugaguacacguau

SEQ ID NO: 1015037 - RNA, 19 nt, Artificial Sequence
  Description of Artificial Sequence: Synthetic oligonucleotide
aagacgagaauuacucaag

SEQ ID NO: 1015038 - RNA, 19 nt, Artificial Sequence
  Description of Artificial Sequence: Synthetic oligonucleotide
auacuuaacuccaauguca

SEQ ID NO: 1015039 - RNA, 19 nt, Artificial Sequence
  Description of Artificial Sequence: Synthetic oligonucleotide
uguggaacccuuuuguuuu

SEQ ID NO: 1015040 - RNA, 19 nt, Artificial Sequence
  Description of Artificial Sequence: Synthetic oligonucleotide
caccauauugguacucucg

SEQ ID NO: 1015041 - RNA, 19 nt, Artificial Sequence
  Description of Artificial Sequence: Synthetic oligonucleotide
uuguuggucauacuuggau

SEQ ID NO: 1015042 - RNA, 19 nt, Artificial Sequence
  Description of Artificial Sequence: Synthetic oligonucleotide
augaguacacguauaauca

SEQ ID NO: 1015043 - RNA, 19 nt, Artificial Sequence
  Description of Artificial Sequence: Synthetic oligonucleotide
acuaaucguggucugguca

SEQ ID NO: 1015044 - RNA, 19 nt, Artificial Sequence
  Description of Artificial Sequence: Synthetic oligonucleotide
aauuacaaugggauaaguu

SEQ ID NO: 1015045 - RNA, 19 nt, Artificial Sequence
  Description of Artificial Sequence: Synthetic oligonucleotide
agauaagcauaauaguguu

SEQ ID NO: 1015046 - RNA, 19 nt, Artificial Sequence
  Description of Artificial Sequence: Synthetic oligonucleotide
uggguacucgccaugguac

SEQ ID NO: 1015047 - RNA, 19 nt, Artificial Sequence
  Description of Artificial Sequence: Synthetic oligonucleotide
uuuaaugguuacagcacua

SEQ ID NO: 1015048 - RNA, 19 nt, Artificial Sequence
  Description of Artificial Sequence: Synthetic oligonucleotide
gcuuuaauaaaguugccga

SEQ ID NO: 1015049 - RNA, 19 nt, Artificial Sequence
  Description of Artificial Sequence: Synthetic oligonucleotide
ugaguacacguauaaucac

SEQ ID NO: 1015050 - RNA, 19 nt, Artificial Sequence
  Description of Artificial Sequence: Synthetic oligonucleotide
uacgcucauuccuuucugg

SEQ ID NO: 1015051 - RNA, 19 nt, Artificial Sequence
  Description of Artificial Sequence: Synthetic oligonucleotide
aguaaucaaugcccugguc

SEQ ID NO: 1015052 - RNA, 19 nt, Artificial Sequence
  Description of Artificial Sequence: Synthetic oligonucleotide
ucguguggaacccuuuugu

SEQ ID NO: 1015053 - RNA, 19 nt, Artificial Sequence
  Description of Artificial Sequence: Synthetic oligonucleotide
uucaagcccagcuggaagu

SEQ ID NO: 1015054 - RNA, 19 nt, Artificial Sequence
  Description of Artificial Sequence: Synthetic oligonucleotide
uguaaaccaauuacacuuu

SEQ ID NO: 1015055 - RNA, 19 nt, Artificial Sequence
  Description of Artificial Sequence: Synthetic oligonucleotide
auaaguuuaugcugagaaa

SEQ ID NO: 1015056 - RNA, 19 nt, Artificial Sequence
  Description of Artificial Sequence: Synthetic oligonucleotide
cuguaucugacuaguaauc

SEQ ID NO: 1015057 - RNA, 19 nt, Artificial Sequence
  Description of Artificial Sequence: Synthetic oligonucleotide
auauacgcucauuccuuuc

SEQ ID NO: 1015058 - RNA, 19 nt, Artificial Sequence
  Description of Artificial Sequence: Synthetic oligonucleotide
uuacacuuuggccagccuu

SEQ ID NO: 1015059 - RNA, 19 nt, Artificial Sequence
  Description of Artificial Sequence: Synthetic oligonucleotide
uuagaagcgccacucugaa

SEQ ID NO: 1015060 - RNA, 19 nt, Artificial Sequence
  Description of Artificial Sequence: Synthetic oligonucleotide
cuuagauuuaguuggcaaa

SEQ ID NO: 1015061 - RNA, 19 nt, Artificial Sequence
  Description of Artificial Sequence: Synthetic oligonucleotide
ccagauacacgcuaaacug

SEQ ID NO: 1015062 - RNA, 19 nt, Artificial Sequence
  Description of Artificial Sequence: Synthetic oligonucleotide
uacacgcuaaacuguaaaa

SEQ ID NO: 1015063 - RNA, 19 nt, Artificial Sequence
  Description of Artificial Sequence: Synthetic oligonucleotide
augcauagaucuucaauaa

SEQ ID NO: 1015064 - RNA, 19 nt, Artificial Sequence
  Description of Artificial Sequence: Synthetic oligonucleotide
ucaucgaaacgucuuguuu

SEQ ID NO: 1015065 - RNA, 19 nt, Artificial Sequence
  Description of Artificial Sequence: Synthetic oligonucleotide
ugcauagaucuucaauaaa

SEQ ID NO: 1015066 - RNA, 19 nt, Artificial Sequence
  Description of Artificial Sequence: Synthetic oligonucleotide
acuaguaaucaaugcccug

SEQ ID NO: 1015067 - RNA, 19 nt, Artificial Sequence
  Description of Artificial Sequence: Synthetic oligonucleotide
uucugccugauaaucacua

SEQ ID NO: 1015068 - RNA, 19 nt, Artificial Sequence
  Description of Artificial Sequence: Synthetic oligonucleotide
cuguaaaccaauuacacuu

SEQ ID NO: 1015069 - RNA, 19 nt, Artificial Sequence
  Description of Artificial Sequence: Synthetic oligonucleotide
aucgaaacgucuuguuugu

SEQ ID NO: 1015070 - RNA, 19 nt, Artificial Sequence
  Description of Artificial Sequence: Synthetic oligonucleotide
auacacgcuaaacuguaaa

SEQ ID NO: 1015071 - RNA, 19 nt, Artificial Sequence
  Description of Artificial Sequence: Synthetic oligonucleotide
ggaaaaggaauguauguaa

SEQ ID NO: 1015072 - RNA, 19 nt, Artificial Sequence
  Description of Artificial Sequence: Synthetic oligonucleotide
cuuagaagcgccacucuga

SEQ ID NO: 1015073 - RNA, 19 nt, Artificial Sequence
  Description of Artificial Sequence: Synthetic oligonucleotide
uucuggguacucgccaugg

SEQ ID NO: 1015074 - RNA, 19 nt, Artificial Sequence
  Description of Artificial Sequence: Synthetic oligonucleotide
uggacuaaauacugcgcuc

SEQ ID NO: 1015075 - RNA, 19 nt, Artificial Sequence
  Description of Artificial Sequence: Synthetic oligonucleotide
aguguuuuaggaagacgag

SEQ ID NO: 1015076 - RNA, 19 nt, Artificial Sequence
  Description of Artificial Sequence: Synthetic oligonucleotide
gccugaauagcuuuaauaa

SEQ ID NO: 1015077 - RNA, 19 nt, Artificial Sequence
  Description of Artificial Sequence: Synthetic oligonucleotide
ugguugaguuguccacugg

SEQ ID NO: 1015078 - RNA, 19 nt, Artificial Sequence
  Description of Artificial Sequence: Synthetic oligonucleotide
acuggcuguaaugucagcu

SEQ ID NO: 1015079 - RNA, 19 nt, Artificial Sequence
  Description of Artificial Sequence: Synthetic oligonucleotide
auaccaguuuaaguguaag

SEQ ID NO: 1015080 - RNA, 19 nt, Artificial Sequence
  Description of Artificial Sequence: Synthetic oligonucleotide
gaucaugacuuuauuuaga

SEQ ID NO: 1015081 - RNA, 19 nt, Artificial Sequence
  Description of Artificial Sequence: Synthetic oligonucleotide
uucuauccaauugcggaga

SEQ ID NO: 1015082 - RNA, 19 nt, Artificial Sequence
  Description of Artificial Sequence: Synthetic oligonucleotide
agcgccacucugaaaagac

SEQ ID NO: 1015083 - RNA, 19 nt, Artificial Sequence
  Description of Artificial Sequence: Synthetic oligonucleotide
uagauuuaguuggcaaaga

SEQ ID NO: 1015084 - RNA, 19 nt, Artificial Sequence
  Description of Artificial Sequence: Synthetic oligonucleotide
ugcuagagccaccagcgua

SEQ ID NO: 1015085 - RNA, 19 nt, Artificial Sequence
  Description of Artificial Sequence: Synthetic oligonucleotide
gaguacacguauaaucaca

SEQ ID NO: 1015086 - RNA, 19 nt, Artificial Sequence
  Description of Artificial Sequence: Synthetic oligonucleotide
agccagauacacgcuaaac

SEQ ID NO: 1015087 - RNA, 19 nt, Artificial Sequence
  Description of Artificial Sequence: Synthetic oligonucleotide
gaugucucuucugguaccc

SEQ ID NO: 1015088 - RNA, 19 nt, Artificial Sequence
  Description of Artificial Sequence: Synthetic oligonucleotide
ugguuaugcuguaggauuu

SEQ ID NO: 1015089 - RNA, 19 nt, Artificial Sequence
  Description of Artificial Sequence: Synthetic oligonucleotide
acaccacccaaaccugcac

SEQ ID NO: 1015090 - RNA, 19 nt, Artificial Sequence
  Description of Artificial Sequence: Synthetic oligonucleotide
aucugcagacuaaucgugg

SEQ ID NO: 1015091 - RNA, 19 nt, Artificial Sequence
  Description of Artificial Sequence: Synthetic oligonucleotide
gaagcgccacucugaaaag

SEQ ID NO: 1015092 - RNA, 19 nt, Artificial Sequence
  Description of Artificial Sequence: Synthetic oligonucleotide
ugccgauauucuccaacug

SEQ ID NO: 1015093 - RNA, 19 nt, Artificial Sequence
  Description of Artificial Sequence: Synthetic oligonucleotide
aaauaccaguuuaagugua

SEQ ID NO: 1015094 - RNA, 19 nt, Artificial Sequence
  Description of Artificial Sequence: Synthetic oligonucleotide
uuccguugugaaugacagg

SEQ ID NO: 1015095 - RNA, 19 nt, Artificial Sequence
  Description of Artificial Sequence: Synthetic oligonucleotide
agcgagucuacagugauua

SEQ ID NO: 1015096 - RNA, 19 nt, Artificial Sequence
  Description of Artificial Sequence: Synthetic oligonucleotide
caccagcguagucugaacc

SEQ ID NO: 1015097 - RNA, 19 nt, Artificial Sequence
  Description of Artificial Sequence: Synthetic oligonucleotide
aauaccaguuuaaguguaa

SEQ ID NO: 1015098 - RNA, 19 nt, Artificial Sequence
  Description of Artificial Sequence: Synthetic oligonucleotide
agagcgagucuacagugau

SEQ ID NO: 1015099 - RNA, 19 nt, Artificial Sequence
  Description of Artificial Sequence: Synthetic oligonucleotide
acguauaaucacaaaugca

SEQ ID NO: 1015100 - RNA, 19 nt, Artificial Sequence
  Description of Artificial Sequence: Synthetic oligonucleotide
uugcggagaucuuccuccg

SEQ ID NO: 1015101 - RNA, 19 nt, Artificial Sequence
  Description of Artificial Sequence: Synthetic oligonucleotide
ccgauauucuccaacugag

SEQ ID NO: 1015102 - RNA, 19 nt, Artificial Sequence
  Description of Artificial Sequence: Synthetic oligonucleotide
auacgcucauuccuuucug

SEQ ID NO: 1015103 - RNA, 19 nt, Artificial Sequence
  Description of Artificial Sequence: Synthetic oligonucleotide
uugccuucaucgaaacguc

SEQ ID NO: 1015104 - RNA, 19 nt, Artificial Sequence
  Description of Artificial Sequence: Synthetic oligonucleotide
ccaauugcggagaucuucc

SEQ ID NO: 1015105 - RNA, 19 nt, Artificial Sequence
  Description of Artificial Sequence: Synthetic oligonucleotide
aguuuaaguguaagguugu

SEQ ID NO: 1015106 - RNA, 19 nt, Artificial Sequence
  Description of Artificial Sequence: Synthetic oligonucleotide
guuacugguuaugcuguag

SEQ ID NO: 1015107 - RNA, 19 nt, Artificial Sequence
  Description of Artificial Sequence: Synthetic oligonucleotide
cuuaaggaagagaaugagu

SEQ ID NO: 1015108 - RNA, 19 nt, Artificial Sequence
  Description of Artificial Sequence: Synthetic oligonucleotide
caccucuucuauccaauug

SEQ ID NO: 1015109 - RNA, 19 nt, Artificial Sequence
  Description of Artificial Sequence: Synthetic oligonucleotide
ggacuaaauacugcgcucc

SEQ ID NO: 1015110 - RNA, 19 nt, Artificial Sequence
  Description of Artificial Sequence: Synthetic oligonucleotide
acuauuuagggaggaggca

SEQ ID NO: 1015111 - RNA, 19 nt, Artificial Sequence
  Description of Artificial Sequence: Synthetic oligonucleotide
uaagcauaauaguguuuua

SEQ ID NO: 1015112 - RNA, 19 nt, Artificial Sequence
  Description of Artificial Sequence: Synthetic oligonucleotide
cagcguagucugaaccugg

SEQ ID NO: 1015113 - RNA, 19 nt, Artificial Sequence
  Description of Artificial Sequence: Synthetic oligonucleotide
ugcuaacaucccagccugg

SEQ ID NO: 1015114 - RNA, 19 nt, Artificial Sequence
  Description of Artificial Sequence: Synthetic oligonucleotide
uucaucgaaacgucuuguu

SEQ ID NO: 1015115 - RNA, 19 nt, Artificial Sequence
  Description of Artificial Sequence: Synthetic oligonucleotide
uucuggucguagaugucuc

SEQ ID NO: 1015116 - RNA, 19 nt, Artificial Sequence
  Description of Artificial Sequence: Synthetic oligonucleotide
gucauggcgguuccgacga

SEQ ID NO: 1015117 - RNA, 19 nt, Artificial Sequence
  Description of Artificial Sequence: Synthetic oligonucleotide
gcuuaaggaagagaaugag

SEQ ID NO: 1015118 - RNA, 19 nt, Artificial Sequence
  Description of Artificial Sequence: Synthetic oligonucleotide
gguauucugccugauaauc

SEQ ID NO: 1015119 - RNA, 19 nt, Artificial Sequence
  Description of Artificial Sequence: Synthetic oligonucleotide
agacuaaucguggucuggu

SEQ ID NO: 1015120 - RNA, 19 nt, Artificial Sequence
  Description of Artificial Sequence: Synthetic oligonucleotide
uaauaaaguugccgauauu

SEQ ID NO: 1015121 - RNA, 19 nt, Artificial Sequence
  Description of Artificial Sequence: Synthetic oligonucleotide
gaaacgucuuguuuguuuu

SEQ ID NO: 1015122 - RNA, 19 nt, Artificial Sequence
  Description of Artificial Sequence: Synthetic oligonucleotide
gggguauucugccugauaa

SEQ ID NO: 1015123 - RNA, 19 nt, Artificial Sequence
  Description of Artificial Sequence: Synthetic oligonucleotide
acagcacuaaaaggcaacu

SEQ ID NO: 1015124 - RNA, 19 nt, Artificial Sequence
  Description of Artificial Sequence: Synthetic oligonucleotide
ucaccauauugguacucuc

SEQ ID NO: 1015125 - RNA, 19 nt, Artificial Sequence
  Description of Artificial Sequence: Synthetic oligonucleotide
caucgggguauucugccug

SEQ ID NO: 1015126 - RNA, 19 nt, Artificial Sequence
  Description of Artificial Sequence: Synthetic oligonucleotide
gcauacuuaacuccaaugu

SEQ ID NO: 1015127 - RNA, 19 nt, Artificial Sequence
  Description of Artificial Sequence: Synthetic oligonucleotide
cuaaucguggucuggucaa

SEQ ID NO: 1015128 - RNA, 19 nt, Artificial Sequence
  Description of Artificial Sequence: Synthetic oligonucleotide
ccucuucuauccaauugcg

SEQ ID NO: 1015129 - RNA, 19 nt, Artificial Sequence
  Description of Artificial Sequence: Synthetic oligonucleotide
gucguguggaacccuuuug

SEQ ID NO: 1015130 - RNA, 19 nt, Artificial Sequence
  Description of Artificial Sequence: Synthetic oligonucleotide
uuuuguacacacgcccuua

SEQ ID NO: 1015131 - RNA, 19 nt, Artificial Sequence
  Description of Artificial Sequence: Synthetic oligonucleotide
uggucguagaugucucuuc

SEQ ID NO: 1015132 - RNA, 19 nt, Artificial Sequence
  Description of Artificial Sequence: Synthetic oligonucleotide
cagacuaaucguggucugg

SEQ ID NO: 1015133 - RNA, 19 nt, Artificial Sequence
  Description of Artificial Sequence: Synthetic oligonucleotide
acugcgcuccuguaucuga

SEQ ID NO: 1015134 - RNA, 19 nt, Artificial Sequence
  Description of Artificial Sequence: Synthetic oligonucleotide
gucguagaugucucuucug

SEQ ID NO: 1015135 - RNA, 19 nt, Artificial Sequence
  Description of Artificial Sequence: Synthetic oligonucleotide
guaggauuuaaugguuaca

SEQ ID NO: 1015136 - RNA, 19 nt, Artificial Sequence
  Description of Artificial Sequence: Synthetic oligonucleotide
ugaugaguucgcagaggau

SEQ ID NO: 1015137 - RNA, 19 nt, Artificial Sequence
  Description of Artificial Sequence: Synthetic oligonucleotide
gacuaaucguggucugguc

SEQ ID NO: 1015138 - RNA, 19 nt, Artificial Sequence
  Description of Artificial Sequence: Synthetic oligonucleotide
agaaugcauagaucuucaa

SEQ ID NO: 1015139 - RNA, 19 nt, Artificial Sequence
  Description of Artificial Sequence: Synthetic oligonucleotide
gaguucgcagaggaugaug

SEQ ID NO: 1015140 - RNA, 19 nt, Artificial Sequence
  Description of Artificial Sequence: Synthetic oligonucleotide
acaaugggauaaguuuaug

SEQ ID NO: 1015141 - RNA, 19 nt, Artificial Sequence
  Description of Artificial Sequence: Synthetic oligonucleotide
auuacacuuuggccagccu

SEQ ID NO: 1015142 - RNA, 19 nt, Artificial Sequence
  Description of Artificial Sequence: Synthetic oligonucleotide
aauggucguguggaacccu

SEQ ID NO: 1015143 - RNA, 19 nt, Artificial Sequence
  Description of Artificial Sequence: Synthetic oligonucleotide
gucaauggucguguggaac

SEQ ID NO: 1015144 - RNA, 19 nt, Artificial Sequence
  Description of Artificial Sequence: Synthetic oligonucleotide
ucauacacuugccgcccaa

SEQ ID NO: 1015145 - RNA, 19 nt, Artificial Sequence
  Description of Artificial Sequence: Synthetic oligonucleotide
aucuuagauuuaguuggca

SEQ ID NO: 1015146 - RNA, 19 nt, Artificial Sequence
  Description of Artificial Sequence: Synthetic oligonucleotide
cauggcgguuccgacgacg

SEQ ID NO: 1015147 - RNA, 19 nt, Artificial Sequence
  Description of Artificial Sequence: Synthetic oligonucleotide
ccauauugguacucucggg

SEQ ID NO: 1015148 - RNA, 19 nt, Artificial Sequence
  Description of Artificial Sequence: Synthetic oligonucleotide
aagcgccacucugaaaaga

SEQ ID NO: 1015149 - RNA, 19 nt, Artificial Sequence
  Description of Artificial Sequence: Synthetic oligonucleotide
agauacacgcuaaacugua

SEQ ID NO: 1015150 - RNA, 19 nt, Artificial Sequence
  Description of Artificial Sequence: Synthetic oligonucleotide
gccgauauucuccaacuga

SEQ ID NO: 1015151 - RNA, 19 nt, Artificial Sequence
  Description of Artificial Sequence: Synthetic oligonucleotide
auacugcgcuccuguaucu

SEQ ID NO: 1015152 - RNA, 19 nt, Artificial Sequence
  Description of Artificial Sequence: Synthetic oligonucleotide
gaauuacucaaggcuagcu

SEQ ID NO: 1015153 - RNA, 19 nt, Artificial Sequence
  Description of Artificial Sequence: Synthetic oligonucleotide
uacccggugcuaacauccc

SEQ ID NO: 1015154 - RNA, 19 nt, Artificial Sequence
  Description of Artificial Sequence: Synthetic oligonucleotide
aacauccacgugucagguu

SEQ ID NO: 1015155 - RNA, 19 nt, Artificial Sequence
  Description of Artificial Sequence: Synthetic oligonucleotide
caauggucguguggaaccc

SEQ ID NO: 1015156 - RNA, 19 nt, Artificial Sequence
  Description of Artificial Sequence: Synthetic oligonucleotide
augcaaguuacugguuaug

SEQ ID NO: 1015157 - RNA, 19 nt, Artificial Sequence
  Description of Artificial Sequence: Synthetic oligonucleotide
cugcagacuaaucgugguc

SEQ ID NO: 1015158 - RNA, 19 nt, Artificial Sequence
  Description of Artificial Sequence: Synthetic oligonucleotide
ucauuccauaagccugaau

SEQ ID NO: 1015159 - RNA, 19 nt, Artificial Sequence
  Description of Artificial Sequence: Synthetic oligonucleotide
agcguagucugaaccuggg

SEQ ID NO: 1015160 - RNA, 19 nt, Artificial Sequence
  Description of Artificial Sequence: Synthetic oligonucleotide
ugguacccggugcuaacau

SEQ ID NO: 1015161 - RNA, 19 nt, Artificial Sequence
  Description of Artificial Sequence: Synthetic oligonucleotide
caaugucaauggucgugug

SEQ ID NO: 1015162 - RNA, 19 nt, Artificial Sequence
  Description of Artificial Sequence: Synthetic oligonucleotide
ggugcuaacaucccagccu

SEQ ID NO: 1015163 - RNA, 19 nt, Artificial Sequence
  Description of Artificial Sequence: Synthetic oligonucleotide
gucuucuggguacucgcca

SEQ ID NO: 1015164 - RNA, 19 nt, Artificial Sequence
  Description of Artificial Sequence: Synthetic oligonucleotide
ugcggagaucuuccuccgc

SEQ ID NO: 1015165 - RNA, 19 nt, Artificial Sequence
  Description of Artificial Sequence: Synthetic oligonucleotide
ggaagacgagaauuacuca

SEQ ID NO: 1015166 - RNA, 19 nt, Artificial Sequence
  Description of Artificial Sequence: Synthetic oligonucleotide
gggauaaguuuaugcugag

SEQ ID NO: 1015167 - RNA, 19 nt, Artificial Sequence
  Description of Artificial Sequence: Synthetic oligonucleotide
caggcacaccacccaaacc

SEQ ID NO: 1015168 - RNA, 19 nt, Artificial Sequence
  Description of Artificial Sequence: Synthetic oligonucleotide
ggucuggucaaaaggcuug

SEQ ID NO: 1015169 - RNA, 19 nt, Artificial Sequence
  Description of Artificial Sequence: Synthetic oligonucleotide
aucgggguauucugccuga

SEQ ID NO: 1015170 - RNA, 19 nt, Artificial Sequence
  Description of Artificial Sequence: Synthetic oligonucleotide
cuguaggauuuaaugguua

SEQ ID NO: 1015171 - RNA, 19 nt, Artificial Sequence
  Description of Artificial Sequence: Synthetic oligonucleotide
cagauacacgcuaaacugu

SEQ ID NO: 1015172 - RNA, 19 nt, Artificial Sequence
  Description of Artificial Sequence: Synthetic oligonucleotide
gggguagucuucuggguac

SEQ ID NO: 1015173 - RNA, 19 nt, Artificial Sequence
  Description of Artificial Sequence: Synthetic oligonucleotide
gcucauuccuuucugggaa

SEQ ID NO: 1015174 - RNA, 19 nt, Artificial Sequence
  Description of Artificial Sequence: Synthetic oligonucleotide
ccacauuuagcaaaucaaa

SEQ ID NO: 1015175 - RNA, 19 nt, Artificial Sequence
  Description of Artificial Sequence: Synthetic oligonucleotide
gccagauacacgcuaaacu

SEQ ID NO: 1015176 - RNA, 19 nt, Artificial Sequence
  Description of Artificial Sequence: Synthetic oligonucleotide
acgcccuuagaagcgccac

SEQ ID NO: 1015177 - RNA, 19 nt, Artificial Sequence
  Description of Artificial Sequence: Synthetic oligonucleotide
gaaaagaccuugucagcuu

SEQ ID NO: 1015178 - RNA, 19 nt, Artificial Sequence
  Description of Artificial Sequence: Synthetic oligonucleotide
gccugcuagagccaccagc

SEQ ID NO: 1015179 - RNA, 19 nt, Artificial Sequence
  Description of Artificial Sequence: Synthetic oligonucleotide
gguacccaucuguagagaa

SEQ ID NO: 1015180 - RNA, 19 nt, Artificial Sequence
  Description of Artificial Sequence: Synthetic oligonucleotide
ccuucaucgaaacgucuug

SEQ ID NO: 1015181 - RNA, 19 nt, Artificial Sequence
  Description of Artificial Sequence: Synthetic oligonucleotide
gccaguuuagugaggauuc

SEQ ID NO: 1015182 - RNA, 19 nt, Artificial Sequence
  Description of Artificial Sequence: Synthetic oligonucleotide
aguuacugguuaugcugua

SEQ ID NO: 1015183 - RNA, 19 nt, Artificial Sequence
  Description of Artificial Sequence: Synthetic oligonucleotide
cuccgcuuguuggucauac

SEQ ID NO: 1015184 - RNA, 19 nt, Artificial Sequence
  Description of Artificial Sequence: Synthetic oligonucleotide
cgauauucuccaacugagg

SEQ ID NO: 1015185 - RNA, 19 nt, Artificial Sequence
  Description of Artificial Sequence: Synthetic oligonucleotide
gauacacgcuaaacuguaa

SEQ ID NO: 1015186 - RNA, 19 nt, Artificial Sequence
  Description of Artificial Sequence: Synthetic oligonucleotide
acacgcccuuagaagcgcc

SEQ ID NO: 1015187 - RNA, 19 nt, Artificial Sequence
  Description of Artificial Sequence: Synthetic oligonucleotide
uggucccauaggcugucau

SEQ ID NO: 1015188 - RNA, 19 nt, Artificial Sequence
  Description of Artificial Sequence: Synthetic oligonucleotide
gcuaacaucccagccuggc

SEQ ID NO: 1015189 - RNA, 19 nt, Artificial Sequence
  Description of Artificial Sequence: Synthetic oligonucleotide
gcaacuauuuagggaggag

SEQ ID NO: 1015190 - RNA, 19 nt, Artificial Sequence
  Description of Artificial Sequence: Synthetic oligonucleotide
guacacguauaaucacaaa

SEQ ID NO: 1015191 - RNA, 19 nt, Artificial Sequence
  Description of Artificial Sequence: Synthetic oligonucleotide
auaagccugaauagcuuua

SEQ ID NO: 1015192 - RNA, 19 nt, Artificial Sequence
  Description of Artificial Sequence: Synthetic oligonucleotide
cauaagccugaauagcuuu

SEQ ID NO: 1015193 - RNA, 19 nt, Artificial Sequence
  Description of Artificial Sequence: Synthetic oligonucleotide
gaagggcccuuguugaaau

SEQ ID NO: 1015194 - RNA, 19 nt, Artificial Sequence
  Description of Artificial Sequence: Synthetic oligonucleotide
uagaagcgccacucugaaa

SEQ ID NO: 1015195 - RNA, 19 nt, Artificial Sequence
  Description of Artificial Sequence: Synthetic oligonucleotide
guacucgccaugguacuca

SEQ ID NO: 1015196 - RNA, 19 nt, Artificial Sequence
  Description of Artificial Sequence: Synthetic oligonucleotide
cccggugcuaacaucccag

SEQ ID NO: 1015197 - RNA, 19 nt, Artificial Sequence
  Description of Artificial Sequence: Synthetic oligonucleotide
agccuuuaauuugccuuca

SEQ ID NO: 1015198 - RNA, 19 nt, Artificial Sequence
  Description of Artificial Sequence: Synthetic oligonucleotide
cauuuuagucuuccaugua

SEQ ID NO: 1015199 - RNA, 19 nt, Artificial Sequence
  Description of Artificial Sequence: Synthetic oligonucleotide
cacacgcccuuagaagcgc

SEQ ID NO: 1015200 - RNA, 19 nt, Artificial Sequence
  Description of Artificial Sequence: Synthetic oligonucleotide
gagaaaugguugaguuguc

SEQ ID NO: 1015201 - RNA, 19 nt, Artificial Sequence
  Description of Artificial Sequence: Synthetic oligonucleotide
ggaaacagagcgagucuac

SEQ ID NO: 1015202 - RNA, 19 nt, Artificial Sequence
  Description of Artificial Sequence: Synthetic oligonucleotide
gcagacuaaucguggucug

SEQ ID NO: 1015203 - RNA, 19 nt, Artificial Sequence
  Description of Artificial Sequence: Synthetic oligonucleotide
cuauccaauugcggagauc

SEQ ID NO: 1015204 - RNA, 19 nt, Artificial Sequence
  Description of Artificial Sequence: Synthetic oligonucleotide
uaaucguggucuggucaaa

SEQ ID NO: 1015205 - RNA, 19 nt, Artificial Sequence
  Description of Artificial Sequence: Synthetic oligonucleotide
guguggaacccuuuuguuu

SEQ ID NO: 1015206 - RNA, 19 nt, Artificial Sequence
  Description of Artificial Sequence: Synthetic oligonucleotide
cagaggaugaugccguccu

SEQ ID NO: 1015207 - RNA, 19 nt, Artificial Sequence
  Description of Artificial Sequence: Synthetic oligonucleotide
aagcccauauacgcucauu

SEQ ID NO: 1015208 - RNA, 19 nt, Artificial Sequence
  Description of Artificial Sequence: Synthetic oligonucleotide
cgcuuguuggucauacuug

SEQ ID NO: 1015209 - RNA, 19 nt, Artificial Sequence
  Description of Artificial Sequence: Synthetic oligonucleotide
ccgcccaagcccauauacg

SEQ ID NO: 1015210 - RNA, 19 nt, Artificial Sequence
  Description of Artificial Sequence: Synthetic oligonucleotide
uacucgccaugguacucau

SEQ ID NO: 1015211 - RNA, 19 nt, Artificial Sequence
  Description of Artificial Sequence: Synthetic oligonucleotide
ugcacgucugcggccauuu

SEQ ID NO: 1015212 - RNA, 19 nt, Artificial Sequence
  Description of Artificial Sequence: Synthetic oligonucleotide
accugcacgucugcggcca

SEQ ID NO: 1015213 - RNA, 19 nt, Artificial Sequence
  Description of Artificial Sequence: Synthetic oligonucleotide
guacucaucgggguauucu

SEQ ID NO: 1015214 - RNA, 19 nt, Artificial Sequence
  Description of Artificial Sequence: Synthetic oligonucleotide
gcuuccguugugaaugaca

SEQ ID NO: 1015215 - RNA, 19 nt, Artificial Sequence
  Description of Artificial Sequence: Synthetic oligonucleotide
cauuccuuucugggaagca

SEQ ID NO: 1015216 - RNA, 19 nt, Artificial Sequence
  Description of Artificial Sequence: Synthetic oligonucleotide
gucauacacuugccgccca

SEQ ID NO: 1015217 - RNA, 19 nt, Artificial Sequence
  Description of Artificial Sequence: Synthetic oligonucleotide
gguacccggugcuaacauc

SEQ ID NO: 1015218 - RNA, 19 nt, Artificial Sequence
  Description of Artificial Sequence: Synthetic oligonucleotide
guuuaaguguaagguugua

SEQ ID NO: 1015219 - RNA, 19 nt, Artificial Sequence
  Description of Artificial Sequence: Synthetic oligonucleotide
uggucguguggaacccuuu

SEQ ID NO: 1015220 - RNA, 19 nt, Artificial Sequence
  Description of Artificial Sequence: Synthetic oligonucleotide
aguugccgauauucuccaa

SEQ ID NO: 1015221 - RNA, 19 nt, Artificial Sequence
  Description of Artificial Sequence: Synthetic oligonucleotide
caaggcuagcuugggucuc

SEQ ID NO: 1015222 - RNA, 19 nt, Artificial Sequence
  Description of Artificial Sequence: Synthetic oligonucleotide
cauauacgcucauuccuuu

SEQ ID NO: 1015223 - RNA, 19 nt, Artificial Sequence
  Description of Artificial Sequence: Synthetic oligonucleotide
cacccaaaccugcacgucu

SEQ ID NO: 1015224 - RNA, 19 nt, Artificial Sequence
  Description of Artificial Sequence: Synthetic oligonucleotide
cuucaucgaaacgucuugu

SEQ ID NO: 1015225 - RNA, 19 nt, Artificial Sequence
  Description of Artificial Sequence: Synthetic oligonucleotide
ccggugcuaacaucccagc

SEQ ID NO: 1015226 - RNA, 19 nt, Artificial Sequence
  Description of Artificial Sequence: Synthetic oligonucleotide
ucgaaacgucuuguuuguu

SEQ ID NO: 1015227 - RNA, 19 nt, Artificial Sequence
  Description of Artificial Sequence: Synthetic oligonucleotide
gugaggauucauugacuuu

SEQ ID NO: 1015228 - RNA, 19 nt, Artificial Sequence
  Description of Artificial Sequence: Synthetic oligonucleotide
cacgcccuuagaagcgcca

SEQ ID NO: 1015229 - RNA, 19 nt, Artificial Sequence
  Description of Artificial Sequence: Synthetic oligonucleotide
cgagucuacagugauuaca

SEQ ID NO: 1015230 - RNA, 19 nt, Artificial Sequence
  Description of Artificial Sequence: Synthetic oligonucleotide
auggucguguggaacccuu

SEQ ID NO: 1015231 - RNA, 19 nt, Artificial Sequence
  Description of Artificial Sequence: Synthetic oligonucleotide
ccaguuuaaguguaagguu

SEQ ID NO: 1015232 - RNA, 19 nt, Artificial Sequence
  Description of Artificial Sequence: Synthetic oligonucleotide
caauugcggagaucuuccu

SEQ ID NO: 1015233 - RNA, 19 nt, Artificial Sequence
  Description of Artificial Sequence: Synthetic oligonucleotide
gguacucgccaugguacuc

SEQ ID NO: 1015234 - RNA, 19 nt, Artificial Sequence
  Description of Artificial Sequence: Synthetic oligonucleotide
ugguacucaucgggguauu

SEQ ID NO: 1015235 - RNA, 19 nt, Artificial Sequence
  Description of Artificial Sequence: Synthetic oligonucleotide
cggugcuaacaucccagcc

SEQ ID NO: 1015236 - RNA, 19 nt, Artificial Sequence
  Description of Artificial Sequence: Synthetic oligonucleotide
cagcacuaaaaggcaacua

SEQ ID NO: 1015237 - RNA, 19 nt, Artificial Sequence
  Description of Artificial Sequence: Synthetic oligonucleotide
gcgccacucugaaaagacc

SEQ ID NO: 1015238 - RNA, 19 nt, Artificial Sequence
  Description of Artificial Sequence: Synthetic oligonucleotide
cuccuguaucugacuagua

SEQ ID NO: 1015239 - RNA, 19 nt, Artificial Sequence
  Description of Artificial Sequence: Synthetic oligonucleotide
ucgggguauucugccugau

SEQ ID NO: 1015240 - RNA, 19 nt, Artificial Sequence
  Description of Artificial Sequence: Synthetic oligonucleotide
gcgagucuacagugauuac

SEQ ID NO: 1015241 - RNA, 19 nt, Artificial Sequence
  Description of Artificial Sequence: Synthetic oligonucleotide
cuccaaugucaauggucgu

SEQ ID NO: 1015242 - RNA, 19 nt, Artificial Sequence
  Description of Artificial Sequence: Synthetic oligonucleotide
caguuuagugaggauucau

SEQ ID NO: 1015243 - RNA, 19 nt, Artificial Sequence
  Description of Artificial Sequence: Synthetic oligonucleotide
ccauauacgcucauuccuu

SEQ ID NO: 1015244 - RNA, 19 nt, Artificial Sequence
  Description of Artificial Sequence: Synthetic oligonucleotide
ccaaugucaauggucgugu

SEQ ID NO: 1015245 - RNA, 19 nt, Artificial Sequence
  Description of Artificial Sequence: Synthetic oligonucleotide
cacugaucaugacuuuauu

SEQ ID NO: 1015246 - RNA, 19 nt, Artificial Sequence
  Description of Artificial Sequence: Synthetic oligonucleotide
gcuguaggauuuaaugguu

SEQ ID NO: 1015247 - RNA, 19 nt, Artificial Sequence
  Description of Artificial Sequence: Synthetic oligonucleotide
gcgcuccuguaucugacua

SEQ ID NO: 1015248 - RNA, 19 nt, Artificial Sequence
  Description of Artificial Sequence: Synthetic oligonucleotide
cagguucuaaaugcugcau

SEQ ID NO: 1015249 - RNA, 19 nt, Artificial Sequence
  Description of Artificial Sequence: Synthetic oligonucleotide
agcuugggucucacuggau

SEQ ID NO: 1015250 - RNA, 19 nt, Artificial Sequence
  Description of Artificial Sequence: Synthetic oligonucleotide
ggccugcuagagccaccag

SEQ ID NO: 1015251 - RNA, 19 nt, Artificial Sequence
  Description of Artificial Sequence: Synthetic oligonucleotide
ggucguguggaacccuuuu

SEQ ID NO: 1015252 - RNA, 19 nt, Artificial Sequence
  Description of Artificial Sequence: Synthetic oligonucleotide
cuggucguagaugucucuu

SEQ ID NO: 1015253 - RNA, 19 nt, Artificial Sequence
  Description of Artificial Sequence: Synthetic oligonucleotide
ccguccuucaagcccagcu

SEQ ID NO: 1015254 - RNA, 19 nt, Artificial Sequence
  Description of Artificial Sequence: Synthetic oligonucleotide
gagcgagucuacagugauu

SEQ ID NO: 1015255 - RNA, 19 nt, Artificial Sequence
  Description of Artificial Sequence: Synthetic oligonucleotide
ccgcuuguuggucauacuu

SEQ ID NO: 1015256 - RNA, 19 nt, Artificial Sequence
  Description of Artificial Sequence: Synthetic oligonucleotide
cacugauuucugacccauu

SEQ ID NO: 1015257 - RNA, 19 nt, Artificial Sequence
  Description of Artificial Sequence: Synthetic oligonucleotide
ccacccaaaccugcacguc

SEQ ID NO: 1015258 - RNA, 19 nt, Artificial Sequence
  Description of Artificial Sequence: Synthetic oligonucleotide
cuagagccaccagcguagu

SEQ ID NO: 1015259 - RNA, 19 nt, Artificial Sequence
  Description of Artificial Sequence: Synthetic oligonucleotide
gcccaagcccauauacgcu

SEQ ID NO: 1015260 - RNA, 19 nt, Artificial Sequence
  Description of Artificial Sequence: Synthetic oligonucleotide
cccuuagaagcgccacucu

SEQ ID NO: 1015261 - RNA, 19 nt, Artificial Sequence
  Description of Artificial Sequence: Synthetic oligonucleotide
gccguccuucaagcccagc

SEQ ID NO: 1015262 - RNA, 19 nt, Artificial Sequence
  Description of Artificial Sequence: Synthetic oligonucleotide
cauccccgccuggcuggca

SEQ ID NO: 1015263 - RNA, 19 nt, Artificial Sequence
  Description of Artificial Sequence: Synthetic oligonucleotide
cgguuccgacgacgggaag

SEQ ID NO: 1015264 - RNA, 19 nt, Artificial Sequence
  Description of Artificial Sequence: Synthetic oligonucleotide
ccguugugaaugacagguu

SEQ ID NO: 1015265 - RNA, 19 nt, Artificial Sequence
  Description of Artificial Sequence: Synthetic oligonucleotide
ccuccgcuuguuggucaua

SEQ ID NO: 1015266 - RNA, 19 nt, Artificial Sequence
  Description of Artificial Sequence: Synthetic oligonucleotide
ugugaaacuaacuugaggg

SEQ ID NO: 1015267 - RNA, 19 nt, Artificial Sequence
  Description of Artificial Sequence: Synthetic oligonucleotide
aaacauucaugauugaccc

SEQ ID NO: 1015268 - RNA, 19 nt, Artificial Sequence
  Description of Artificial Sequence: Synthetic oligonucleotide
aaaaccggaguucaguagc

SEQ ID NO: 1015269 - RNA, 19 nt, Artificial Sequence
  Description of Artificial Sequence: Synthetic oligonucleotide
aaacgggugcuucaggagc

SEQ ID NO: 1015270 - RNA, 19 nt, Artificial Sequence
  Description of Artificial Sequence: Synthetic oligonucleotide
caaacauucaugauugacc

SEQ ID NO: 1015271 - RNA, 19 nt, Artificial Sequence
  Description of Artificial Sequence: Synthetic oligonucleotide
gacgauaucggugagggcg

SEQ ID NO: 1015272 - RNA, 19 nt, Artificial Sequence
  Description of Artificial Sequence: Synthetic oligonucleotide
acacgauaccaguagagcc

SEQ ID NO: 1015273 - RNA, 19 nt, Artificial Sequence
  Description of Artificial Sequence: Synthetic oligonucleotide
ucuucaaacauucaugauu

SEQ ID NO: 1015274 - RNA, 19 nt, Artificial Sequence
  Description of Artificial Sequence: Synthetic oligonucleotide
uaucuagauaggaacgggg

SEQ ID NO: 1015275 - RNA, 19 nt, Artificial Sequence
  Description of Artificial Sequence: Synthetic oligonucleotide
agucauggaaccaaaaccg

SEQ ID NO: 1015276 - RNA, 19 nt, Artificial Sequence
  Description of Artificial Sequence: Synthetic oligonucleotide
uugugaaacuaacuugagg

SEQ ID NO: 1015277 - RNA, 19 nt, Artificial Sequence
  Description of Artificial Sequence: Synthetic oligonucleotide
cacacauacacacacacac

SEQ ID NO: 1015278 - RNA, 19 nt, Artificial Sequence
  Description of Artificial Sequence: Synthetic oligonucleotide
ugcuuuacaagucauggaa

SEQ ID NO: 1015279 - RNA, 19 nt, Artificial Sequence
  Description of Artificial Sequence: Synthetic oligonucleotide
uagacuucuagaaaaugga

SEQ ID NO: 1015280 - RNA, 19 nt, Artificial Sequence
  Description of Artificial Sequence: Synthetic oligonucleotide
uacacacacacacacacac

SEQ ID NO: 1015281 - RNA, 19 nt, Artificial Sequence
  Description of Artificial Sequence: Synthetic oligonucleotide
cauacacacacacacacac

SEQ ID NO: 1015282 - RNA, 19 nt, Artificial Sequence
  Description of Artificial Sequence: Synthetic oligonucleotide
uguuccucguucauccugg

SEQ ID NO: 1015283 - RNA, 19 nt, Artificial Sequence
  Description of Artificial Sequence: Synthetic oligonucleotide
uccacacacacauacacac

SEQ ID NO: 1015284 - RNA, 19 nt, Artificial Sequence
  Description of Artificial Sequence: Synthetic oligonucleotide
agggguacgaugcuggccg

SEQ ID NO: 1015285 - RNA, 19 nt, Artificial Sequence
  Description of Artificial Sequence: Synthetic oligonucleotide
acucuucaaacauucauga

SEQ ID NO: 1015286 - RNA, 19 nt, Artificial Sequence
  Description of Artificial Sequence: Synthetic oligonucleotide
uagucaucgcugcagaggc

SEQ ID NO: 1015287 - RNA, 19 nt, Artificial Sequence
  Description of Artificial Sequence: Synthetic oligonucleotide
ucaugauugacccuucaau

SEQ ID NO: 1015288 - RNA, 19 nt, Artificial Sequence
  Description of Artificial Sequence: Synthetic oligonucleotide
uggcugauggcccauuagg

SEQ ID NO: 1015289 - RNA, 19 nt, Artificial Sequence
  Description of Artificial Sequence: Synthetic oligonucleotide
uuaucuagauaggaacggg

SEQ ID NO: 1015290 - RNA, 19 nt, Artificial Sequence
  Description of Artificial Sequence: Synthetic oligonucleotide
guuaucuagauaggaacgg

SEQ ID NO: 1015291 - RNA, 19 nt, Artificial Sequence
  Description of Artificial Sequence: Synthetic oligonucleotide
aagccuuucagagauggug

SEQ ID NO: 1015292 - RNA, 19 nt, Artificial Sequence
  Description of Artificial Sequence: Synthetic oligonucleotide
agauggugaugccuugugc

SEQ ID NO: 1015293 - RNA, 19 nt, Artificial Sequence
  Description of Artificial Sequence: Synthetic oligonucleotide
ucuccauggagagaaggcg

SEQ ID NO: 1015294 - RNA, 19 nt, Artificial Sequence
  Description of Artificial Sequence: Synthetic oligonucleotide
cuuggugagaaacgggugc

SEQ ID NO: 1015295 - RNA, 19 nt, Artificial Sequence
  Description of Artificial Sequence: Synthetic oligonucleotide
cacauacacacacacacac

SEQ ID NO: 1015296 - RNA, 19 nt, Artificial Sequence
  Description of Artificial Sequence: Synthetic oligonucleotide
ucgccaaucuugaugaagu

SEQ ID NO: 1015297 - RNA, 19 nt, Artificial Sequence
  Description of Artificial Sequence: Synthetic oligonucleotide
gugacgauaucggugaggg

SEQ ID NO: 1015298 - RNA, 19 nt, Artificial Sequence
  Description of Artificial Sequence: Synthetic oligonucleotide
cacgauaccaguagagccc

SEQ ID NO: 1015299 - RNA, 19 nt, Artificial Sequence
  Description of Artificial Sequence: Synthetic oligonucleotide
cacucuucaaacauucaug

SEQ ID NO: 1015300 - RNA, 19 nt, Artificial Sequence
  Description of Artificial Sequence: Synthetic oligonucleotide
aaggccacucuucaaacau

SEQ ID NO: 1015301 - RNA, 19 nt, Artificial Sequence
  Description of Artificial Sequence: Synthetic oligonucleotide
aguucaguagcuggguccc

SEQ ID NO: 1015302 - RNA, 19 nt, Artificial Sequence
  Description of Artificial Sequence: Synthetic oligonucleotide
ugggucuacuaccagcugc

SEQ ID NO: 1015303 - RNA, 19 nt, Artificial Sequence
  Description of Artificial Sequence: Synthetic oligonucleotide
uguugcuuuacaagucaug

SEQ ID NO: 1015304 - RNA, 19 nt, Artificial Sequence
  Description of Artificial Sequence: Synthetic oligonucleotide
gaguucaguagcugggucc

SEQ ID NO: 1015305 - RNA, 19 nt, Artificial Sequence
  Description of Artificial Sequence: Synthetic oligonucleotide
cacacacacauacacacac

SEQ ID NO: 1015306 - RNA, 19 nt, Artificial Sequence
  Description of Artificial Sequence: Synthetic oligonucleotide
acuaacuugagggaguggu

SEQ ID NO: 1015307 - RNA, 19 nt, Artificial Sequence
  Description of Artificial Sequence: Synthetic oligonucleotide
ugauacagaucuccagaug

SEQ ID NO: 1015308 - RNA, 19 nt, Artificial Sequence
  Description of Artificial Sequence: Synthetic oligonucleotide
uacagaucuccagaugggg

SEQ ID NO: 1015309 - RNA, 19 nt, Artificial Sequence
  Description of Artificial Sequence: Synthetic oligonucleotide
cacacacauacacacacac

SEQ ID NO: 1015310 - RNA, 19 nt, Artificial Sequence
  Description of Artificial Sequence: Synthetic oligonucleotide
acacacacacacucuuuac

SEQ ID NO: 1015311 - RNA, 19 nt, Artificial Sequence
  Description of Artificial Sequence: Synthetic oligonucleotide
aaaggccacucuucaaaca

SEQ ID NO: 1015312 - RNA, 19 nt, Artificial Sequence
  Description of Artificial Sequence: Synthetic oligonucleotide
accggaguucaguagcugg

SEQ ID NO: 1015313 - RNA, 19 nt, Artificial Sequence
  Description of Artificial Sequence: Synthetic oligonucleotide
uuuacaagucauggaacca

SEQ ID NO: 1015314 - RNA, 19 nt, Artificial Sequence
  Description of Artificial Sequence: Synthetic oligonucleotide
gaaacgggugcuucaggag

SEQ ID NO: 1015315 - RNA, 19 nt, Artificial Sequence
  Description of Artificial Sequence: Synthetic oligonucleotide
agaacccgaagucggacag

SEQ ID NO: 1015316 - RNA, 19 nt, Artificial Sequence
  Description of Artificial Sequence: Synthetic oligonucleotide
cacacacacacacacacuc

SEQ ID NO: 1015317 - RNA, 19 nt, Artificial Sequence
  Description of Artificial Sequence: Synthetic oligonucleotide
acaguggcuaugcacacga

SEQ ID NO: 1015318 - RNA, 19 nt, Artificial Sequence
  Description of Artificial Sequence: Synthetic oligonucleotide
augcacacgauaccaguag

SEQ ID NO: 1015319 - RNA, 19 nt, Artificial Sequence
  Description of Artificial Sequence: Synthetic oligonucleotide
agucggacagcuucacccg

SEQ ID NO: 1015320 - RNA, 19 nt, Artificial Sequence
  Description of Artificial Sequence: Synthetic oligonucleotide
ugaaugacgcccugggcgu

SEQ ID NO: 1015321 - RNA, 19 nt, Artificial Sequence
  Description of Artificial Sequence: Synthetic oligonucleotide
accaguagagcccucgcca

SEQ ID NO: 1015322 - RNA, 19 nt, Artificial Sequence
  Description of Artificial Sequence: Synthetic oligonucleotide
ugaugaaguuaucuagaua

SEQ ID NO: 1015323 - RNA, 19 nt, Artificial Sequence
  Description of Artificial Sequence: Synthetic oligonucleotide
guggcuaugcacacgauac

SEQ ID NO: 1015324 - RNA, 19 nt, Artificial Sequence
  Description of Artificial Sequence: Synthetic oligonucleotide
ugagaaacgggugcuucag

SEQ ID NO: 1015325 - RNA, 19 nt, Artificial Sequence
  Description of Artificial Sequence: Synthetic oligonucleotide
caaguugucccgaaucauc

SEQ ID NO: 1015326 - RNA, 19 nt, Artificial Sequence
  Description of Artificial Sequence: Synthetic oligonucleotide
ugccuuggugagaaacggg

SEQ ID NO: 1015327 - RNA, 19 nt, Artificial Sequence
  Description of Artificial Sequence: Synthetic oligonucleotide
ucguucauccugguguggg

SEQ ID NO: 1015328 - RNA, 19 nt, Artificial Sequence
  Description of Artificial Sequence: Synthetic oligonucleotide
uggcccguagggcaggcgg

SEQ ID NO: 1015329 - RNA, 19 nt, Artificial Sequence
  Description of Artificial Sequence: Synthetic oligonucleotide
aacugcucgugggacacuc

SEQ ID NO: 1015330 - RNA, 19 nt, Artificial Sequence
  Description of Artificial Sequence: Synthetic oligonucleotide
uuugagggguggcucguug

SEQ ID NO: 1015331 - RNA, 19 nt, Artificial Sequence
  Description of Artificial Sequence: Synthetic oligonucleotide
agacuucuagaaaauggag

SEQ ID NO: 1015332 - RNA, 19 nt, Artificial Sequence
  Description of Artificial Sequence: Synthetic oligonucleotide
uugucccgaaucaucuuca

SEQ ID NO: 1015333 - RNA, 19 nt, Artificial Sequence
  Description of Artificial Sequence: Synthetic oligonucleotide
ugcacacgauaccaguaga

SEQ ID NO: 1015334 - RNA, 19 nt, Artificial Sequence
  Description of Artificial Sequence: Synthetic oligonucleotide
augaaguuaucuagauagg

SEQ ID NO: 1015335 - RNA, 19 nt, Artificial Sequence
  Description of Artificial Sequence: Synthetic oligonucleotide
ucugguccggugcuggcgc

SEQ ID NO: 1015336 - RNA, 19 nt, Artificial Sequence
  Description of Artificial Sequence: Synthetic oligonucleotide
uggcaaguugucccgaauc

SEQ ID NO: 1015337 - RNA, 19 nt, Artificial Sequence
  Description of Artificial Sequence: Synthetic oligonucleotide
gucauggaaccaaaaccgg

SEQ ID NO: 1015338 - RNA, 19 nt, Artificial Sequence
  Description of Artificial Sequence: Synthetic oligonucleotide
gaaccaaaaccggaguuca

SEQ ID NO: 1015339 - RNA, 19 nt, Artificial Sequence
  Description of Artificial Sequence: Synthetic oligonucleotide
ucuccgggagccucacucg

SEQ ID NO: 1015340 - RNA, 19 nt, Artificial Sequence
  Description of Artificial Sequence: Synthetic oligonucleotide
cuaacuugagggaguggug

SEQ ID NO: 1015341 - RNA, 19 nt, Artificial Sequence
  Description of Artificial Sequence: Synthetic oligonucleotide
gugaaacuaacuugaggga

SEQ ID NO: 1015342 - RNA, 19 nt, Artificial Sequence
  Description of Artificial Sequence: Synthetic oligonucleotide
ggugugggugacgauaucg

SEQ ID NO: 1015343 - RNA, 19 nt, Artificial Sequence
  Description of Artificial Sequence: Synthetic oligonucleotide
aacccgaagucggacagcu

SEQ ID NO: 1015344 - RNA, 19 nt, Artificial Sequence
  Description of Artificial Sequence: Synthetic oligonucleotide
gaugaagacugaggggcag

SEQ ID NO: 1015345 - RNA, 19 nt, Artificial Sequence
  Description of Artificial Sequence: Synthetic oligonucleotide
ugugggugacgauaucggu

SEQ ID NO: 1015346 - RNA, 19 nt, Artificial Sequence
  Description of Artificial Sequence: Synthetic oligonucleotide
auugugaaacuaacuugag

SEQ ID NO: 1015347 - RNA, 19 nt, Artificial Sequence
  Description of Artificial Sequence: Synthetic oligonucleotide
gugucucgaaggcuguggg

SEQ ID NO: 1015348 - RNA, 19 nt, Artificial Sequence
  Description of Artificial Sequence: Synthetic oligonucleotide
acgauaucggugagggcgc

SEQ ID NO: 1015349 - RNA, 19 nt, Artificial Sequence
  Description of Artificial Sequence: Synthetic oligonucleotide
aacuaacuugagggagugg

SEQ ID NO: 1015350 - RNA, 19 nt, Artificial Sequence
  Description of Artificial Sequence: Synthetic oligonucleotide
augggcucgggugggaggc

SEQ ID NO: 1015351 - RNA, 19 nt, Artificial Sequence
  Description of Artificial Sequence: Synthetic oligonucleotide
ugugggagugggucggccc

SEQ ID NO: 1015352 - RNA, 19 nt, Artificial Sequence
  Description of Artificial Sequence: Synthetic oligonucleotide
ugacccuucaauggcucag

SEQ ID NO: 1015353 - RNA, 19 nt, Artificial Sequence
  Description of Artificial Sequence: Synthetic oligonucleotide
ucucgaucaccaucacccc

SEQ ID NO: 1015354 - RNA, 19 nt, Artificial Sequence
  Description of Artificial Sequence: Synthetic oligonucleotide
gcuguuguacaucuccacc

SEQ ID NO: 1015355 - RNA, 19 nt, Artificial Sequence
  Description of Artificial Sequence: Synthetic oligonucleotide
uucaaacauucaugauuga

SEQ ID NO: 1015356 - RNA, 19 nt, Artificial Sequence
  Description of Artificial Sequence: Synthetic oligonucleotide
aaugacgcccugggcgugg

SEQ ID NO: 1015357 - RNA, 19 nt, Artificial Sequence
  Description of Artificial Sequence: Synthetic oligonucleotide
gaagucggacagcuucacc

SEQ ID NO: 1015358 - RNA, 19 nt, Artificial Sequence
  Description of Artificial Sequence: Synthetic oligonucleotide
gugugggugacgauaucgg

SEQ ID NO: 1015359 - RNA, 19 nt, Artificial Sequence
  Description of Artificial Sequence: Synthetic oligonucleotide
accaccucguugaagagca

SEQ ID NO: 1015360 - RNA, 19 nt, Artificial Sequence
  Description of Artificial Sequence: Synthetic oligonucleotide
ucacucgcucccacguucc

SEQ ID NO: 1015361 - RNA, 19 nt, Artificial Sequence
  Description of Artificial Sequence: Synthetic oligonucleotide
uccuugcucaccugggcac

SEQ ID NO: 1015362 - RNA, 19 nt, Artificial Sequence
  Description of Artificial Sequence: Synthetic oligonucleotide
ugagcugcgcacaguggcu

SEQ ID NO: 1015363 - RNA, 19 nt, Artificial Sequence
  Description of Artificial Sequence: Synthetic oligonucleotide
accaaaaccggaguucagu

SEQ ID NO: 1015364 - RNA, 19 nt, Artificial Sequence
  Description of Artificial Sequence: Synthetic oligonucleotide
guucucaugccgguagucc

SEQ ID NO: 1015365 - RNA, 19 nt, Artificial Sequence
  Description of Artificial Sequence: Synthetic oligonucleotide
auaucggugagggcgccuc

SEQ ID NO: 1015366 - RNA, 19 nt, Artificial Sequence
  Description of Artificial Sequence: Synthetic oligonucleotide
gcguggagcacagacagcg

SEQ ID NO: 1015367 - RNA, 19 nt, Artificial Sequence
  Description of Artificial Sequence: Synthetic oligonucleotide
cagaucuccagauggggca

SEQ ID NO: 1015368 - RNA, 19 nt, Artificial Sequence
  Description of Artificial Sequence: Synthetic oligonucleotide
cccggcacaguaauggugg

SEQ ID NO: 1015369 - RNA, 19 nt, Artificial Sequence
  Description of Artificial Sequence: Synthetic oligonucleotide
cccaccaacgacuuccucc

SEQ ID NO: 1015370 - RNA, 19 nt, Artificial Sequence
  Description of Artificial Sequence: Synthetic oligonucleotide
aucuacaggucagggauca

SEQ ID NO: 1015371 - RNA, 19 nt, Artificial Sequence
  Description of Artificial Sequence: Synthetic oligonucleotide
uggcucguugaaguagggg

SEQ ID NO: 1015372 - RNA, 19 nt, Artificial Sequence
  Description of Artificial Sequence: Synthetic oligonucleotide
uagucgggguggcaaguug

SEQ ID NO: 1015373 - RNA, 19 nt, Artificial Sequence
  Description of Artificial Sequence: Synthetic oligonucleotide
ucacccggccaucaugggu

SEQ ID NO: 1015374 - RNA, 19 nt, Artificial Sequence
  Description of Artificial Sequence: Synthetic oligonucleotide
cucgccaaucuugaugaag

SEQ ID NO: 1015375 - RNA, 19 nt, Artificial Sequence
  Description of Artificial Sequence: Synthetic oligonucleotide
agccugucucuccauggag

SEQ ID NO: 1015376 - RNA, 19 nt, Artificial Sequence
  Description of Artificial Sequence: Synthetic oligonucleotide
ucggugaaugacgcccugg

SEQ ID NO: 1015377 - RNA, 19 nt, Artificial Sequence
  Description of Artificial Sequence: Synthetic oligonucleotide
acaggggccugauucuuca

SEQ ID NO: 1015378 - RNA, 19 nt, Artificial Sequence
  Description of Artificial Sequence: Synthetic oligonucleotide
ucagcaagauggagucacu

SEQ ID NO: 1015379 - RNA, 19 nt, Artificial Sequence
  Description of Artificial Sequence: Synthetic oligonucleotide
gacccuucaauggcucagg

SEQ ID NO: 1015380 - RNA, 19 nt, Artificial Sequence
  Description of Artificial Sequence: Synthetic oligonucleotide
guacgaugcuggccggugg

SEQ ID NO: 1015381 - RNA, 19 nt, Artificial Sequence
  Description of Artificial Sequence: Synthetic oligonucleotide
agcaucaucucugccccag

SEQ ID NO: 1015382 - RNA, 19 nt, Artificial Sequence
  Description of Artificial Sequence: Synthetic oligonucleotide
caccccaucuacaggucag

SEQ ID NO: 1015383 - RNA, 19 nt, Artificial Sequence
  Description of Artificial Sequence: Synthetic oligonucleotide
uugacccuucaauggcuca

SEQ ID NO: 1015384 - RNA, 19 nt, Artificial Sequence
  Description of Artificial Sequence: Synthetic oligonucleotide
caccuccuugcucaccugg

SEQ ID NO: 1015385 - RNA, 19 nt, Artificial Sequence
  Description of Artificial Sequence: Synthetic oligonucleotide
cuucaauggcucaggguca

SEQ ID NO: 1015386 - RNA, 19 nt, Artificial Sequence
  Description of Artificial Sequence: Synthetic oligonucleotide
agccuuucagagaugguga

SEQ ID NO: 1015387 - RNA, 19 nt, Artificial Sequence
  Description of Artificial Sequence: Synthetic oligonucleotide
ugcucgugggacacucucu

SEQ ID NO: 1015388 - RNA, 19 nt, Artificial Sequence
  Description of Artificial Sequence: Synthetic oligonucleotide
uagcugggucccaggaagc

SEQ ID NO: 1015389 - RNA, 19 nt, Artificial Sequence
  Description of Artificial Sequence: Synthetic oligonucleotide
aguagcugggucccaggaa

SEQ ID NO: 1015390 - RNA, 19 nt, Artificial Sequence
  Description of Artificial Sequence: Synthetic oligonucleotide
cucgugggacacucucugg

SEQ ID NO: 1015391 - RNA, 19 nt, Artificial Sequence
  Description of Artificial Sequence: Synthetic oligonucleotide
aucggugagggcgccuccc

SEQ ID NO: 1015392 - RNA, 19 nt, Artificial Sequence
  Description of Artificial Sequence: Synthetic oligonucleotide
gucucgcaccagcaggcgg

SEQ ID NO: 1015393 - RNA, 19 nt, Artificial Sequence
  Description of Artificial Sequence: Synthetic oligonucleotide
ggcuuugagggguggcucg

SEQ ID NO: 1015394 - RNA, 19 nt, Artificial Sequence
  Description of Artificial Sequence: Synthetic oligonucleotide
gugagaaacgggugcuuca

SEQ ID NO: 1015395 - RNA, 19 nt, Artificial Sequence
  Description of Artificial Sequence: Synthetic oligonucleotide
ccaacgacuuccuccuugg

SEQ ID NO: 1015396 - RNA, 19 nt, Artificial Sequence
  Description of Artificial Sequence: Synthetic oligonucleotide
ggcaaguugucccgaauca

SEQ ID NO: 1015397 - RNA, 19 nt, Artificial Sequence
  Description of Artificial Sequence: Synthetic oligonucleotide
aaccggaguucaguagcug

SEQ ID NO: 1015398 - RNA, 19 nt, Artificial Sequence
  Description of Artificial Sequence: Synthetic oligonucleotide
aggagcucagcagcaguag

SEQ ID NO: 1015399 - RNA, 19 nt, Artificial Sequence
  Description of Artificial Sequence: Synthetic oligonucleotide
aucugguccggugcuggcg

SEQ ID NO: 1015400 - RNA, 19 nt, Artificial Sequence
  Description of Artificial Sequence: Synthetic oligonucleotide
guuuagaaccaggcuccag

SEQ ID NO: 1015401 - RNA, 19 nt, Artificial Sequence
  Description of Artificial Sequence: Synthetic oligonucleotide
caucuacaggucagggauc

SEQ ID NO: 1015402 - RNA, 19 nt, Artificial Sequence
  Description of Artificial Sequence: Synthetic oligonucleotide
cuguccaggugcaguaguc

SEQ ID NO: 1015403 - RNA, 19 nt, Artificial Sequence
  Description of Artificial Sequence: Synthetic oligonucleotide
ugacgauaucggugagggc

SEQ ID NO: 1015404 - RNA, 19 nt, Artificial Sequence
  Description of Artificial Sequence: Synthetic oligonucleotide
caccaguuugccugagcug

SEQ ID NO: 1015405 - RNA, 19 nt, Artificial Sequence
  Description of Artificial Sequence: Synthetic oligonucleotide
acacauacacacacacaca

SEQ ID NO: 1015406 - RNA, 19 nt, Artificial Sequence
  Description of Artificial Sequence: Synthetic oligonucleotide
cagcgcuuggagcaccgcc

SEQ ID NO: 1015407 - RNA, 19 nt, Artificial Sequence
  Description of Artificial Sequence: Synthetic oligonucleotide
gguugggacacagcuagug

SEQ ID NO: 1015408 - RNA, 19 nt, Artificial Sequence
  Description of Artificial Sequence: Synthetic oligonucleotide
acauacacacacacacaca

SEQ ID NO: 1015409 - RNA, 19 nt, Artificial Sequence
  Description of Artificial Sequence: Synthetic oligonucleotide
ucgaaggcugugggagugg

SEQ ID NO: 1015410 - RNA, 19 nt, Artificial Sequence
  Description of Artificial Sequence: Synthetic oligonucleotide
gagggguacgaugcuggcc

SEQ ID NO: 1015411 - RNA, 19 nt, Artificial Sequence
  Description of Artificial Sequence: Synthetic oligonucleotide
gacagcgcuuggagcaccg

SEQ ID NO: 1015412 - RNA, 19 nt, Artificial Sequence
  Description of Artificial Sequence: Synthetic oligonucleotide
acgaugcuggccgguggcc

SEQ ID NO: 1015413 - RNA, 19 nt, Artificial Sequence
  Description of Artificial Sequence: Synthetic oligonucleotide
acacagcuaguguuauaaa

SEQ ID NO: 1015414 - RNA, 19 nt, Artificial Sequence
  Description of Artificial Sequence: Synthetic oligonucleotide
ggugaaugacgcccugggc

SEQ ID NO: 1015415 - RNA, 19 nt, Artificial Sequence
  Description of Artificial Sequence: Synthetic oligonucleotide
acacacauacacacacaca

SEQ ID NO: 1015416 - RNA, 19 nt, Artificial Sequence
  Description of Artificial Sequence: Synthetic oligonucleotide
agauggagucacucuugau

SEQ ID NO: 1015417 - RNA, 19 nt, Artificial Sequence
  Description of Artificial Sequence: Synthetic oligonucleotide
cuaugcacacgauaccagu

SEQ ID NO: 1015418 - RNA, 19 nt, Artificial Sequence
  Description of Artificial Sequence: Synthetic oligonucleotide
auacacacacacacacaca

SEQ ID NO: 1015419 - RNA, 19 nt, Artificial Sequence
  Description of Artificial Sequence: Synthetic oligonucleotide
guucuuuagucgggguggc

SEQ ID NO: 1015420 - RNA, 19 nt, Artificial Sequence
  Description of Artificial Sequence: Synthetic oligonucleotide
acucgcucccacguuccgg

SEQ ID NO: 1015421 - RNA, 19 nt, Artificial Sequence
  Description of Artificial Sequence: Synthetic oligonucleotide
gcuuggagcaccgccaggc

SEQ ID NO: 1015422 - RNA, 19 nt, Artificial Sequence
  Description of Artificial Sequence: Synthetic oligonucleotide
ggugagggcgccucccucc

SEQ ID NO: 1015423 - RNA, 19 nt, Artificial Sequence
  Description of Artificial Sequence: Synthetic oligonucleotide
cacacacacacacucuuua

SEQ ID NO: 1015424 - RNA, 19 nt, Artificial Sequence
  Description of Artificial Sequence: Synthetic oligonucleotide
ccgucuuugcuguuugcgc

SEQ ID NO: 1015425 - RNA, 19 nt, Artificial Sequence
  Description of Artificial Sequence: Synthetic oligonucleotide
gcacacgauaccaguagag

SEQ ID NO: 1015426 - RNA, 19 nt, Artificial Sequence
  Description of Artificial Sequence: Synthetic oligonucleotide
ggcuaugcacacgauacca

SEQ ID NO: 1015427 - RNA, 19 nt, Artificial Sequence
  Description of Artificial Sequence: Synthetic oligonucleotide
ucccacguuccgguguugc

SEQ ID NO: 1015428 - RNA, 19 nt, Artificial Sequence
  Description of Artificial Sequence: Synthetic oligonucleotide
accccaucuacaggucagg

SEQ ID NO: 1015429 - RNA, 19 nt, Artificial Sequence
  Description of Artificial Sequence: Synthetic oligonucleotide
caugggucagcaagaugga

SEQ ID NO: 1015430 - RNA, 19 nt, Artificial Sequence
  Description of Artificial Sequence: Synthetic oligonucleotide
cugcucgugggacacucuc

SEQ ID NO: 1015431 - RNA, 19 nt, Artificial Sequence
  Description of Artificial Sequence: Synthetic oligonucleotide
guuccgguguugcuuuaca

SEQ ID NO: 1015432 - RNA, 19 nt, Artificial Sequence
  Description of Artificial Sequence: Synthetic oligonucleotide
gcuaugcacacgauaccag

SEQ ID NO: 1015433 - RNA, 19 nt, Artificial Sequence
  Description of Artificial Sequence: Synthetic oligonucleotide
cagaacccgaagucggaca

SEQ ID NO: 1015434 - RNA, 19 nt, Artificial Sequence
  Description of Artificial Sequence: Synthetic oligonucleotide
aguugucccgaaucaucuu

SEQ ID NO: 1015435 - RNA, 19 nt, Artificial Sequence
  Description of Artificial Sequence: Synthetic oligonucleotide
gcucgugggacacucucug

SEQ ID NO: 1015436 - RNA, 19 nt, Artificial Sequence
  Description of Artificial Sequence: Synthetic oligonucleotide
guugggacacagcuagugu

SEQ ID NO: 1015437 - RNA, 19 nt, Artificial Sequence
  Description of Artificial Sequence: Synthetic oligonucleotide
cucccgucuuugcuguuug

SEQ ID NO: 1015438 - RNA, 19 nt, Artificial Sequence
  Description of Artificial Sequence: Synthetic oligonucleotide
uguggugagcgaggcccag

SEQ ID NO: 1015439 - RNA, 19 nt, Artificial Sequence
  Description of Artificial Sequence: Synthetic oligonucleotide
agucgggguggcaaguugu

SEQ ID NO: 1015440 - RNA, 19 nt, Artificial Sequence
  Description of Artificial Sequence: Synthetic oligonucleotide
gggagugcccaccaacgac

SEQ ID NO: 1015441 - RNA, 19 nt, Artificial Sequence
  Description of Artificial Sequence: Synthetic oligonucleotide
acacacacacacacacucu

SEQ ID NO: 1015442 - RNA, 19 nt, Artificial Sequence
  Description of Artificial Sequence: Synthetic oligonucleotide
cagcucaucugguccggug

SEQ ID NO: 1015443 - RNA, 19 nt, Artificial Sequence
  Description of Artificial Sequence: Synthetic oligonucleotide
agcgcuuggagcaccgcca

SEQ ID NO: 1015444 - RNA, 19 nt, Artificial Sequence
  Description of Artificial Sequence: Synthetic oligonucleotide
acacacacauacacacaca

SEQ ID NO: 1015445 - RNA, 19 nt, Artificial Sequence
  Description of Artificial Sequence: Synthetic oligonucleotide
cccugauacagaucuccag

SEQ ID NO: 1015446 - RNA, 19 nt, Artificial Sequence
  Description of Artificial Sequence: Synthetic oligonucleotide
ucggugagggcgccucccu

SEQ ID NO: 1015447 - RNA, 19 nt, Artificial Sequence
  Description of Artificial Sequence: Synthetic oligonucleotide
gucccgcaugaucaccacc

SEQ ID NO: 1015448 - RNA, 19 nt, Artificial Sequence
  Description of Artificial Sequence: Synthetic oligonucleotide
uucuuuagucgggguggca

SEQ ID NO: 1015449 - RNA, 19 nt, Artificial Sequence
  Description of Artificial Sequence: Synthetic oligonucleotide
agagaaggcguggggcucu

SEQ ID NO: 1015450 - RNA, 19 nt, Artificial Sequence
  Description of Artificial Sequence: Synthetic oligonucleotide
acgcccugggcguggagca

SEQ ID NO: 1015451 - RNA, 19 nt, Artificial Sequence
  Description of Artificial Sequence: Synthetic oligonucleotide
gaacccgaagucggacagc

SEQ ID NO: 1015452 - RNA, 19 nt, Artificial Sequence
  Description of Artificial Sequence: Synthetic oligonucleotide
caacgacuuccuccuuggc

SEQ ID NO: 1015453 - RNA, 19 nt, Artificial Sequence
  Description of Artificial Sequence: Synthetic oligonucleotide
uagcccgcugggcuggguc

SEQ ID NO: 1015454 - RNA, 19 nt, Artificial Sequence
  Description of Artificial Sequence: Synthetic oligonucleotide
gcucccgcuguggugagcg

SEQ ID NO: 1015455 - RNA, 19 nt, Artificial Sequence
  Description of Artificial Sequence: Synthetic oligonucleotide
gccccugauacagaucucc

SEQ ID NO: 1015456 - RNA, 19 nt, Artificial Sequence
  Description of Artificial Sequence: Synthetic oligonucleotide
cagagcucgucacccacca

SEQ ID NO: 1015457 - RNA, 19 nt, Artificial Sequence
  Description of Artificial Sequence: Synthetic oligonucleotide
ccuuggugagaaacgggug

SEQ ID NO: 1015458 - RNA, 19 nt, Artificial Sequence
  Description of Artificial Sequence: Synthetic oligonucleotide
cucguucauccuggugugg

SEQ ID NO: 1015459 - RNA, 19 nt, Artificial Sequence
  Description of Artificial Sequence: Synthetic oligonucleotide
acacacacacacacacacu

SEQ ID NO: 1015460 - RNA, 19 nt, Artificial Sequence
  Description of Artificial Sequence: Synthetic oligonucleotide
cuugcucaccugggcacag

SEQ ID NO: 1015461 - RNA, 19 nt, Artificial Sequence
  Description of Artificial Sequence: Synthetic oligonucleotide
uuagucgggguggcaaguu

SEQ ID NO: 1015462 - RNA, 19 nt, Artificial Sequence
  Description of Artificial Sequence: Synthetic oligonucleotide
ccgcaugaucaccaccucg

SEQ ID NO: 1015463 - RNA, 19 nt, Artificial Sequence
  Description of Artificial Sequence: Synthetic oligonucleotide
caguuugccugagcugcgc

SEQ ID NO: 1015464 - RNA, 19 nt, Artificial Sequence
  Description of Artificial Sequence: Synthetic oligonucleotide
guggcucguugaaguaggg

SEQ ID NO: 1015465 - RNA, 19 nt, Artificial Sequence
  Description of Artificial Sequence: Synthetic oligonucleotide
cccgucuuugcuguuugcg

SEQ ID NO: 1015466 - RNA, 19 nt, Artificial Sequence
  Description of Artificial Sequence: Synthetic oligonucleotide
cauccuggugugggugacg

SEQ ID NO: 1015467 - RNA, 19 nt, Artificial Sequence
  Description of Artificial Sequence: Synthetic oligonucleotide
gaaugacgcccugggcgug

SEQ ID NO: 1015468 - RNA, 19 nt, Artificial Sequence
  Description of Artificial Sequence: Synthetic oligonucleotide
gguacgaugcuggccggug

SEQ ID NO: 1015469 - RNA, 19 nt, Artificial Sequence
  Description of Artificial Sequence: Synthetic oligonucleotide
ccaucuacaggucagggau

SEQ ID NO: 1015470 - RNA, 19 nt, Artificial Sequence
  Description of Artificial Sequence: Synthetic oligonucleotide
cucggugaaugacgcccug

SEQ ID NO: 1015471 - RNA, 19 nt, Artificial Sequence
  Description of Artificial Sequence: Synthetic oligonucleotide
uggugugggugacgauauc

SEQ ID NO: 1015472 - RNA, 19 nt, Artificial Sequence
  Description of Artificial Sequence: Synthetic oligonucleotide
gcgcacaguggcuaugcac

SEQ ID NO: 1015473 - RNA, 19 nt, Artificial Sequence
  Description of Artificial Sequence: Synthetic oligonucleotide
ugacggccaccaguuugcc

SEQ ID NO: 1015474 - RNA, 19 nt, Artificial Sequence
  Description of Artificial Sequence: Synthetic oligonucleotide
ccccaguggccccugauac

SEQ ID NO: 1015475 - RNA, 19 nt, Artificial Sequence
  Description of Artificial Sequence: Synthetic oligonucleotide
ucuacaggucagggaucac

SEQ ID NO: 1015476 - RNA, 19 nt, Artificial Sequence
  Description of Artificial Sequence: Synthetic oligonucleotide
caccucuggcccguagggc

SEQ ID NO: 1015477 - RNA, 19 nt, Artificial Sequence
  Description of Artificial Sequence: Synthetic oligonucleotide
cagacagcgcuuggagcac

SEQ ID NO: 1015478 - RNA, 19 nt, Artificial Sequence
  Description of Artificial Sequence: Synthetic oligonucleotide
cccgcuguggugagcgagg

SEQ ID NO: 1015479 - RNA, 19 nt, Artificial Sequence
  Description of Artificial Sequence: Synthetic oligonucleotide
ccccaaugaccagaugucc

SEQ ID NO: 1015480 - RNA, 19 nt, Artificial Sequence
  Description of Artificial Sequence: Synthetic oligonucleotide
ucaugccgguagucccgca

SEQ ID NO: 1015481 - RNA, 19 nt, Artificial Sequence
  Description of Artificial Sequence: Synthetic oligonucleotide
ccaaaaccggaguucagua

SEQ ID NO: 1015482 - RNA, 19 nt, Artificial Sequence
  Description of Artificial Sequence: Synthetic oligonucleotide
caggugcaguagucaucgc

SEQ ID NO: 1015483 - RNA, 19 nt, Artificial Sequence
  Description of Artificial Sequence: Synthetic oligonucleotide
acacacacacacacucuuu

SEQ ID NO: 1015484 - RNA, 19 nt, Artificial Sequence
  Description of Artificial Sequence: Synthetic oligonucleotide
agcuucacccggccaucau

SEQ ID NO: 1015485 - RNA, 19 nt, Artificial Sequence
  Description of Artificial Sequence: Synthetic oligonucleotide
gggaucacaugucccaggu

SEQ ID NO: 1015486 - RNA, 19 nt, Artificial Sequence
  Description of Artificial Sequence: Synthetic oligonucleotide
cugggaaaaggccacucuu

SEQ ID NO: 1015487 - RNA, 19 nt, Artificial Sequence
  Description of Artificial Sequence: Synthetic oligonucleotide
cacacacacacacacucuu

SEQ ID NO: 1015488 - RNA, 19 nt, Artificial Sequence
  Description of Artificial Sequence: Synthetic oligonucleotide
cacaugucccagguuggga

SEQ ID NO: 1015489 - RNA, 19 nt, Artificial Sequence
  Description of Artificial Sequence: Synthetic oligonucleotide
cuggugugggugacgauau

SEQ ID NO: 1015490 - RNA, 19 nt, Artificial Sequence
  Description of Artificial Sequence: Synthetic oligonucleotide
guagagcccucgccaaucu

SEQ ID NO: 1015491 - RNA, 19 nt, Artificial Sequence
  Description of Artificial Sequence: Synthetic oligonucleotide
augaccacccagagcucgu

SEQ ID NO: 1015492 - RNA, 19 nt, Artificial Sequence
  Description of Artificial Sequence: Synthetic oligonucleotide
ucgcucccacguuccggug

SEQ ID NO: 1015493 - RNA, 19 nt, Artificial Sequence
  Description of Artificial Sequence: Synthetic oligonucleotide
agaaggcguggggcucugg

SEQ ID NO: 1015494 - RNA, 19 nt, Artificial Sequence
  Description of Artificial Sequence: Synthetic oligonucleotide
ggucucgcaccagcaggcg

SEQ ID NO: 1015495 - RNA, 19 nt, Artificial Sequence
  Description of Artificial Sequence: Synthetic oligonucleotide
cuguggugagcgaggccca

SEQ ID NO: 1015496 - RNA, 19 nt, Artificial Sequence
  Description of Artificial Sequence: Synthetic oligonucleotide
guuuccccagugucucgaa

SEQ ID NO: 1015497 - RNA, 19 nt, Artificial Sequence
  Description of Artificial Sequence: Synthetic oligonucleotide
ccgguguugcuuuacaagu

SEQ ID NO: 1015498 - RNA, 19 nt, Artificial Sequence
  Description of Artificial Sequence: Synthetic oligonucleotide
gugagggcgccucccucca

SEQ ID NO: 1015499 - RNA, 19 nt, Artificial Sequence
  Description of Artificial Sequence: Synthetic oligonucleotide
gcgcuuggagcaccgccag

SEQ ID NO: 1015500 - RNA, 19 nt, Artificial Sequence
  Description of Artificial Sequence: Synthetic oligonucleotide
cucuggcccguagggcagg

SEQ ID NO: 1015501 - RNA, 19 nt, Artificial Sequence
  Description of Artificial Sequence: Synthetic oligonucleotide
ggugguuuccccagugucu

SEQ ID NO: 1015502 - RNA, 19 nt, Artificial Sequence
  Description of Artificial Sequence: Synthetic oligonucleotide
ggagugcccaccaacgacu

SEQ ID NO: 1015503 - RNA, 19 nt, Artificial Sequence
  Description of Artificial Sequence: Synthetic oligonucleotide
cccaucuacaggucaggga

SEQ ID NO: 1015504 - RNA, 19 nt, Artificial Sequence
  Description of Artificial Sequence: Synthetic oligonucleotide
agucaucgcugcagaggcu

SEQ ID NO: 1015505 - RNA, 19 nt, Artificial Sequence
  Description of Artificial Sequence: Synthetic oligonucleotide
gccugucucuccauggaga

SEQ ID NO: 1015506 - RNA, 19 nt, Artificial Sequence
  Description of Artificial Sequence: Synthetic oligonucleotide
ccccaucuacaggucaggg

SEQ ID NO: 1015507 - RNA, 19 nt, Artificial Sequence
  Description of Artificial Sequence: Synthetic oligonucleotide
gguggcaaguugucccgaa

SEQ ID NO: 1015508 - RNA, 19 nt, Artificial Sequence
  Description of Artificial Sequence: Synthetic oligonucleotide
caggcccguggcugauggc

SEQ ID NO: 1015509 - RNA, 19 nt, Artificial Sequence
  Description of Artificial Sequence: Synthetic oligonucleotide
ggcuguccaggugcaguag

SEQ ID NO: 1015510 - RNA, 19 nt, Artificial Sequence
  Description of Artificial Sequence: Synthetic oligonucleotide
ccacacacacauacacaca

SEQ ID NO: 1015511 - RNA, 19 nt, Artificial Sequence
  Description of Artificial Sequence: Synthetic oligonucleotide
cuggcgcaugagggguacg

SEQ ID NO: 1015512 - RNA, 19 nt, Artificial Sequence
  Description of Artificial Sequence: Synthetic oligonucleotide
acugcucgugggacacucu

SEQ ID NO: 1015513 - RNA, 19 nt, Artificial Sequence
  Description of Artificial Sequence: Synthetic oligonucleotide
ccacucuucaaacauucau

SEQ ID NO: 1015514 - RNA, 19 nt, Artificial Sequence
  Description of Artificial Sequence: Synthetic oligonucleotide
gauaucggugagggcgccu

SEQ ID NO: 1015515 - RNA, 19 nt, Artificial Sequence
  Description of Artificial Sequence: Synthetic oligonucleotide
gggccugauucuucaaagu

SEQ ID NO: 1015516 - RNA, 19 nt, Artificial Sequence
  Description of Artificial Sequence: Synthetic oligonucleotide
ugggcucgggugggaggcc

SEQ ID NO: 1015517 - RNA, 19 nt, Artificial Sequence
  Description of Artificial Sequence: Synthetic oligonucleotide
agcccucgccaaucuugau

SEQ ID NO: 1015518 - RNA, 19 nt, Artificial Sequence
  Description of Artificial Sequence: Synthetic oligonucleotide
gaagagcagcucccgucuu

SEQ ID NO: 1015519 - RNA, 19 nt, Artificial Sequence
  Description of Artificial Sequence: Synthetic oligonucleotide
cacguuccgguguugcuuu

SEQ ID NO: 1015520 - RNA, 19 nt, Artificial Sequence
  Description of Artificial Sequence: Synthetic oligonucleotide
guggcaaguugucccgaau

SEQ ID NO: 1015521 - RNA, 19 nt, Artificial Sequence
  Description of Artificial Sequence: Synthetic oligonucleotide
guuugcgcagguccaucuu

SEQ ID NO: 1015522 - RNA, 19 nt, Artificial Sequence
  Description of Artificial Sequence: Synthetic oligonucleotide
ccaguagagcccucgccaa

SEQ ID NO: 1015523 - RNA, 19 nt, Artificial Sequence
  Description of Artificial Sequence: Synthetic oligonucleotide
ccuggugugggugacgaua

SEQ ID NO: 1015524 - RNA, 19 nt, Artificial Sequence
  Description of Artificial Sequence: Synthetic oligonucleotide
cucgcaccagcaggcgguc

SEQ ID NO: 1015525 - RNA, 19 nt, Artificial Sequence
  Description of Artificial Sequence: Synthetic oligonucleotide
caucaugggucagcaagau

SEQ ID NO: 1015526 - RNA, 19 nt, Artificial Sequence
  Description of Artificial Sequence: Synthetic oligonucleotide
caugccgguagucccgcau

SEQ ID NO: 1015527 - RNA, 19 nt, Artificial Sequence
  Description of Artificial Sequence: Synthetic oligonucleotide
ugguccggugcuggcgcau

SEQ ID NO: 1015528 - RNA, 19 nt, Artificial Sequence
  Description of Artificial Sequence: Synthetic oligonucleotide
ccuuggcaccuccuugcuc

SEQ ID NO: 1015529 - RNA, 19 nt, Artificial Sequence
  Description of Artificial Sequence: Synthetic oligonucleotide
gcucaucugguccggugcu

SEQ ID NO: 1015530 - RNA, 19 nt, Artificial Sequence
  Description of Artificial Sequence: Synthetic oligonucleotide
ggucagcaagauggaguca

SEQ ID NO: 1015531 - RNA, 19 nt, Artificial Sequence
  Description of Artificial Sequence: Synthetic oligonucleotide
acguuccgguguugcuuua

SEQ ID NO: 1015532 - RNA, 19 nt, Artificial Sequence
  Description of Artificial Sequence: Synthetic oligonucleotide
ccgggagccucacucgcuc

SEQ ID NO: 1015533 - RNA, 19 nt, Artificial Sequence
  Description of Artificial Sequence: Synthetic oligonucleotide
gcugcgcacaguggcuaug

SEQ ID NO: 1015534 - RNA, 19 nt, Artificial Sequence
  Description of Artificial Sequence: Synthetic oligonucleotide
ggcguggagcacagacagc

SEQ ID NO: 1015535 - RNA, 19 nt, Artificial Sequence
  Description of Artificial Sequence: Synthetic oligonucleotide
ggacacagcuaguguuaua

SEQ ID NO: 1015536 - RNA, 19 nt, Artificial Sequence
  Description of Artificial Sequence: Synthetic oligonucleotide
gcucgggugggaggccggg

SEQ ID NO: 1015537 - RNA, 19 nt, Artificial Sequence
  Description of Artificial Sequence: Synthetic oligonucleotide
gcaaguugucccgaaucau

SEQ ID NO: 1015538 - RNA, 19 nt, Artificial Sequence
  Description of Artificial Sequence: Synthetic oligonucleotide
gggguggcucguugaagua

SEQ ID NO: 1015539 - RNA, 19 nt, Artificial Sequence
  Description of Artificial Sequence: Synthetic oligonucleotide
ggcguggggcucugggaaa

SEQ ID NO: 1015540 - RNA, 19 nt, Artificial Sequence
  Description of Artificial Sequence: Synthetic oligonucleotide
guagggcaggcgggagauc

SEQ ID NO: 1015541 - RNA, 19 nt, Artificial Sequence
  Description of Artificial Sequence: Synthetic oligonucleotide
ggcucgggugggaggccgg

SEQ ID NO: 1015542 - RNA, 19 nt, Artificial Sequence
  Description of Artificial Sequence: Synthetic oligonucleotide
cucccacguuccgguguug

SEQ ID NO: 1015543 - RNA, 19 nt, Artificial Sequence
  Description of Artificial Sequence: Synthetic oligonucleotide
ccgcuguggugagcgaggc

SEQ ID NO: 1015544 - RNA, 19 nt, Artificial Sequence
  Description of Artificial Sequence: Synthetic oligonucleotide
cguucucaugccgguaguc

SEQ ID NO: 1015545 - RNA, 19 nt, Artificial Sequence
  Description of Artificial Sequence: Synthetic oligonucleotide
gcaugagggguacgaugcu

SEQ ID NO: 1015546 - RNA, 19 nt, Artificial Sequence
  Description of Artificial Sequence: Synthetic oligonucleotide
gaacugcucgugggacacu

SEQ ID NO: 1015547 - RNA, 19 nt, Artificial Sequence
  Description of Artificial Sequence: Synthetic oligonucleotide
ggaucacaugucccagguu

SEQ ID NO: 1015548 - RNA, 19 nt, Artificial Sequence
  Description of Artificial Sequence: Synthetic oligonucleotide
cguuccgguguugcuuuac

SEQ ID NO: 1015549 - RNA, 19 nt, Artificial Sequence
  Description of Artificial Sequence: Synthetic oligonucleotide
cgauaucggugagggcgcc

SEQ ID NO: 1015550 - RNA, 19 nt, Artificial Sequence
  Description of Artificial Sequence: Synthetic oligonucleotide
gcccaccaacgacuuccuc

SEQ ID NO: 1015551 - RNA, 19 nt, Artificial Sequence
  Description of Artificial Sequence: Synthetic oligonucleotide
cccguagggcaggcgggag

SEQ ID NO: 1015552 - RNA, 19 nt, Artificial Sequence
  Description of Artificial Sequence: Synthetic oligonucleotide
gcuuugagggguggcucgu

SEQ ID NO: 1015553 - RNA, 19 nt, Artificial Sequence
  Description of Artificial Sequence: Synthetic oligonucleotide
gcguggggcucugggaaaa

SEQ ID NO: 1015554 - RNA, 19 nt, Artificial Sequence
  Description of Artificial Sequence: Synthetic oligonucleotide
caguggcuaugcacacgau

SEQ ID NO: 1015555 - RNA, 19 nt, Artificial Sequence
  Description of Artificial Sequence: Synthetic oligonucleotide
ggccccugauacagaucuc

SEQ ID NO: 1015556 - RNA, 19 nt, Artificial Sequence
  Description of Artificial Sequence: Synthetic oligonucleotide
cuucuccgggagccucacu

SEQ ID NO: 1015557 - RNA, 19 nt, Artificial Sequence
  Description of Artificial Sequence: Synthetic oligonucleotide
gcucccacguuccgguguu

SEQ ID NO: 1015558 - RNA, 19 nt, Artificial Sequence
  Description of Artificial Sequence: Synthetic oligonucleotide
cuuugagggguggcucguu

SEQ ID NO: 1015559 - RNA, 19 nt, Artificial Sequence
  Description of Artificial Sequence: Synthetic oligonucleotide
ggcgcaugagggguacgau

SEQ ID NO: 1015560 - RNA, 19 nt, Artificial Sequence
  Description of Artificial Sequence: Synthetic oligonucleotide
ccucgccaaucuugaugaa

SEQ ID NO: 1015561 - RNA, 19 nt, Artificial Sequence
  Description of Artificial Sequence: Synthetic oligonucleotide
ggguacgaugcuggccggu

SEQ ID NO: 1015562 - RNA, 19 nt, Artificial Sequence
  Description of Artificial Sequence: Synthetic oligonucleotide
caccaacgacuuccuccuu

SEQ ID NO: 1015563 - RNA, 19 nt, Artificial Sequence
  Description of Artificial Sequence: Synthetic oligonucleotide
cggccaccaguuugccuga

SEQ ID NO: 1015564 - RNA, 19 nt, Artificial Sequence
  Description of Artificial Sequence: Synthetic oligonucleotide
gggguccccugggucuacu

SEQ ID NO: 1015565 - RNA, 19 nt, Artificial Sequence
  Description of Artificial Sequence: Synthetic oligonucleotide
ccgguggcccugccuuggu

SEQ ID NO: 1015566 - RNA, 19 nt, Artificial Sequence
  Description of Artificial Sequence: Synthetic oligonucleotide
cgccucccuccaggaacuc

SEQ ID NO: 1015567 - RNA, 19 nt, Artificial Sequence
  Description of Artificial Sequence: Synthetic oligonucleotide
auugaauuguucuucgccc

SEQ ID NO: 1015568 - RNA, 19 nt, Artificial Sequence
  Description of Artificial Sequence: Synthetic oligonucleotide
auaaguaaugcacaauagg

SEQ ID NO: 1015569 - RNA, 19 nt, Artificial Sequence
  Description of Artificial Sequence: Synthetic oligonucleotide
agaacauccauccaagcgg

SEQ ID NO: 1015570 - RNA, 19 nt, Artificial Sequence
  Description of Artificial Sequence: Synthetic oligonucleotide
ugugcaacccaucaaaugc

SEQ ID NO: 1015571 - RNA, 19 nt, Artificial Sequence
  Description of Artificial Sequence: Synthetic oligonucleotide
uugaacgucaccaacucgg

SEQ ID NO: 1015572 - RNA, 19 nt, Artificial Sequence
  Description of Artificial Sequence: Synthetic oligonucleotide
auuccgauucauuagugcc

SEQ ID NO: 1015573 - RNA, 19 nt, Artificial Sequence
  Description of Artificial Sequence: Synthetic oligonucleotide
uccaaauauggguagauag

SEQ ID NO: 1015574 - RNA, 19 nt, Artificial Sequence
  Description of Artificial Sequence: Synthetic oligonucleotide
ugcuuaaguccaaagaccg

SEQ ID NO: 1015575 - RNA, 19 nt, Artificial Sequence
  Description of Artificial Sequence: Synthetic oligonucleotide
auucauuagugccagugcc

SEQ ID NO: 1015576 - RNA, 19 nt, Artificial Sequence
  Description of Artificial Sequence: Synthetic oligonucleotide
acucaugcugcuuaagucc

SEQ ID NO: 1015577 - RNA, 19 nt, Artificial Sequence
  Description of Artificial Sequence: Synthetic oligonucleotide
uccacuaacuuuaaauuag

SEQ ID NO: 1015578 - RNA, 19 nt, Artificial Sequence
  Description of Artificial Sequence: Synthetic oligonucleotide
ugaauaaacaaaccacgag

SEQ ID NO: 1015579 - RNA, 19 nt, Artificial Sequence
  Description of Artificial Sequence: Synthetic oligonucleotide
uuuccugucauagugaaag

SEQ ID NO: 1015580 - RNA, 19 nt, Artificial Sequence
  Description of Artificial Sequence: Synthetic oligonucleotide
uguguuaugaggucugagg

SEQ ID NO: 1015581 - RNA, 19 nt, Artificial Sequence
  Description of Artificial Sequence: Synthetic oligonucleotide
uaaacaaacgcccaucacu

SEQ ID NO: 1015582 - RNA, 19 nt, Artificial Sequence
  Description of Artificial Sequence: Synthetic oligonucleotide
uuagcauuaucacagggga

SEQ ID NO: 1015583 - RNA, 19 nt, Artificial Sequence
  Description of Artificial Sequence: Synthetic oligonucleotide
gauugaauuguucuuggcc

SEQ ID NO: 1015584 - RNA, 19 nt, Artificial Sequence
  Description of Artificial Sequence: Synthetic oligonucleotide
ugacuuguaaaacacagaa

SEQ ID NO: 1015585 - RNA, 19 nt, Artificial Sequence
  Description of Artificial Sequence: Synthetic oligonucleotide
ugagacaccgguaaugaag

SEQ ID NO: 1015586 - RNA, 19 nt, Artificial Sequence
  Description of Artificial Sequence: Synthetic oligonucleotide
ugccaaacuuuccaaaugg

SEQ ID NO: 1015587 - RNA, 19 nt, Artificial Sequence
  Description of Artificial Sequence: Synthetic oligonucleotide
aguaaugcacaauaggugu

SEQ ID NO: 1015588 - RNA, 19 nt, Artificial Sequence
  Description of Artificial Sequence: Synthetic oligonucleotide
auguauauuggcugcaagg

SEQ ID NO: 1015589 - RNA, 19 nt, Artificial Sequence
  Description of Artificial Sequence: Synthetic oligonucleotide
uaaacugcaccccauauau

SEQ ID NO: 1015590 - RNA, 19 nt, Artificial Sequence
  Description of Artificial Sequence: Synthetic oligonucleotide
aauuccucguuuccugucg

SEQ ID NO: 1015591 - RNA, 19 nt, Artificial Sequence
  Description of Artificial Sequence: Synthetic oligonucleotide
aacaaguuuucccucguug

SEQ ID NO: 1015592 - RNA, 19 nt, Artificial Sequence
  Description of Artificial Sequence: Synthetic oligonucleotide
aguggaauucaauggcugc

SEQ ID NO: 1015593 - RNA, 19 nt, Artificial Sequence
  Description of Artificial Sequence: Synthetic oligonucleotide
guaaugaagugucacuagg

SEQ ID NO: 1015594 - RNA, 19 nt, Artificial Sequence
  Description of Artificial Sequence: Synthetic oligonucleotide
uauauuggcugcaaggaaa

SEQ ID NO: 1015595 - RNA, 19 nt, Artificial Sequence
  Description of Artificial Sequence: Synthetic oligonucleotide
augaucaucacuauuacca

SEQ ID NO: 1015596 - RNA, 19 nt, Artificial Sequence
  Description of Artificial Sequence: Synthetic oligonucleotide
caagggacuauguauauug

SEQ ID NO: 1015597 - RNA, 19 nt, Artificial Sequence
  Description of Artificial Sequence: Synthetic oligonucleotide
agaacugacuuguaaaaca

SEQ ID NO: 1015598 - RNA, 19 nt, Artificial Sequence
  Description of Artificial Sequence: Synthetic oligonucleotide
aguguuguacuggaaacgc

SEQ ID NO: 1015599 - RNA, 19 nt, Artificial Sequence
  Description of Artificial Sequence: Synthetic oligonucleotide
acagcaugcucguaaacgg

SEQ ID NO: 1015600 - RNA, 19 nt, Artificial Sequence
  Description of Artificial Sequence: Synthetic oligonucleotide
accacaggugcguaaaucg

SEQ ID NO: 1015601 - RNA, 19 nt, Artificial Sequence
  Description of Artificial Sequence: Synthetic oligonucleotide
agucacaauaauaugugcg

SEQ ID NO: 1015602 - RNA, 19 nt, Artificial Sequence
  Description of Artificial Sequence: Synthetic oligonucleotide
uaaacggcugcaacaaaag

SEQ ID NO: 1015603 - RNA, 19 nt, Artificial Sequence
  Description of Artificial Sequence: Synthetic oligonucleotide
uagauaguaucccugguaa

SEQ ID NO: 1015604 - RNA, 19 nt, Artificial Sequence
  Description of Artificial Sequence: Synthetic oligonucleotide
aguacagaucugcagauga

SEQ ID NO: 1015605 - RNA, 19 nt, Artificial Sequence
  Description of Artificial Sequence: Synthetic oligonucleotide
aacgcccaucacuugacac

SEQ ID NO: 1015606 - RNA, 19 nt, Artificial Sequence
  Description of Artificial Sequence: Synthetic oligonucleotide
uguauauuggcugcaagga

SEQ ID NO: 1015607 - RNA, 19 nt, Artificial Sequence
  Description of Artificial Sequence: Synthetic oligonucleotide
auauggguagauaguaucc

SEQ ID NO: 1015608 - RNA, 19 nt, Artificial Sequence
  Description of Artificial Sequence: Synthetic oligonucleotide
uuaguguuguacuggaaac

SEQ ID NO: 1015609 - RNA, 19 nt, Artificial Sequence
  Description of Artificial Sequence: Synthetic oligonucleotide
gaaaacgacacucugaaau

SEQ ID NO: 1015610 - RNA, 19 nt, Artificial Sequence
  Description of Artificial Sequence: Synthetic oligonucleotide
uauguauauuggcugcaag

SEQ ID NO: 1015611 - RNA, 19 nt, Artificial Sequence
  Description of Artificial Sequence: Synthetic oligonucleotide
guuagcauuaucacagggg

SEQ ID NO: 1015612 - RNA, 19 nt, Artificial Sequence
  Description of Artificial Sequence: Synthetic oligonucleotide
auuaguguuguacuggaaa

SEQ ID NO: 1015613 - RNA, 19 nt, Artificial Sequence
  Description of Artificial Sequence: Synthetic oligonucleotide
aaguaaugcacaauaggug

SEQ ID NO: 1015614 - RNA, 19 nt, Artificial Sequence
  Description of Artificial Sequence: Synthetic oligonucleotide
aucccugguaaacugcacc

SEQ ID NO: 1015615 - RNA, 19 nt, Artificial Sequence
  Description of Artificial Sequence: Synthetic oligonucleotide
uuucaaaccugguggaagc

SEQ ID NO: 1015616 - RNA, 19 nt, Artificial Sequence
  Description of Artificial Sequence: Synthetic oligonucleotide
ugauacuggccuuccacgg

SEQ ID NO: 1015617 - RNA, 19 nt, Artificial Sequence
  Description of Artificial Sequence: Synthetic oligonucleotide
ucacguguuccccagaccu

SEQ ID NO: 1015618 - RNA, 19 nt, Artificial Sequence
  Description of Artificial Sequence: Synthetic oligonucleotide
auagauugaauuguucuug

SEQ ID NO: 1015619 - RNA, 19 nt, Artificial Sequence
  Description of Artificial Sequence: Synthetic oligonucleotide
aaacgacacucugaaauuc

SEQ ID NO: 1015620 - RNA, 19 nt, Artificial Sequence
  Description of Artificial Sequence: Synthetic oligonucleotide
gaugauacuggccuuccac

SEQ ID NO: 1015621 - RNA, 19 nt, Artificial Sequence
  Description of Artificial Sequence: Synthetic oligonucleotide
cacggagacacacucaugc

SEQ ID NO: 1015622 - RNA, 19 nt, Artificial Sequence
  Description of Artificial Sequence: Synthetic oligonucleotide
aaaacgacacucugaaauu

SEQ ID NO: 1015623 - RNA, 19 nt, Artificial Sequence
  Description of Artificial Sequence: Synthetic oligonucleotide
gaugaucaucacuauuacc

SEQ ID NO: 1015624 - RNA, 19 nt, Artificial Sequence
  Description of Artificial Sequence: Synthetic oligonucleotide
aacauagauugaauuguuc

SEQ ID NO: 1015625 - RNA, 19 nt, Artificial Sequence
  Description of Artificial Sequence: Synthetic oligonucleotide
gauuccgauucauuagugc

SEQ ID NO: 1015626 - RNA, 19 nt, Artificial Sequence
  Description of Artificial Sequence: Synthetic oligonucleotide
cacaauaauaugugcgccc

SEQ ID NO: 1015627 - RNA, 19 nt, Artificial Sequence
  Description of Artificial Sequence: Synthetic oligonucleotide
aaucggugguuuuacauuu

SEQ ID NO: 1015628 - RNA, 19 nt, Artificial Sequence
  Description of Artificial Sequence: Synthetic oligonucleotide
ucauacacccucccaaaca

SEQ ID NO: 1015629 - RNA, 19 nt, Artificial Sequence
  Description of Artificial Sequence: Synthetic oligonucleotide
cuuaugguaucgugcaacc

SEQ ID NO: 1015630 - RNA, 19 nt, Artificial Sequence
  Description of Artificial Sequence: Synthetic oligonucleotide
aaaucggugguuuuacauu

SEQ ID NO: 1015631 - RNA, 19 nt, Artificial Sequence
  Description of Artificial Sequence: Synthetic oligonucleotide
uuccaaacgugccacugag

SEQ ID NO: 1015632 - RNA, 19 nt, Artificial Sequence
  Description of Artificial Sequence: Synthetic oligonucleotide
agaucugcagaugauacug

SEQ ID NO: 1015633 - RNA, 19 nt, Artificial Sequence
  Description of Artificial Sequence: Synthetic oligonucleotide
uugcuuaugguaucgugca

SEQ ID NO: 1015634 - RNA, 19 nt, Artificial Sequence
  Description of Artificial Sequence: Synthetic oligonucleotide
acgcccaucacuugacacc

SEQ ID NO: 1015635 - RNA, 19 nt, Artificial Sequence
  Description of Artificial Sequence: Synthetic oligonucleotide
ucuucgcccaugaaaaggu

SEQ ID NO: 1015636 - RNA, 19 nt, Artificial Sequence
  Description of Artificial Sequence: Synthetic oligonucleotide
uucuucgcccaugaaaagg

SEQ ID NO: 1015637 - RNA, 19 nt, Artificial Sequence
  Description of Artificial Sequence: Synthetic oligonucleotide
uaaaucggugguuuuacau

SEQ ID NO: 1015638 - RNA, 19 nt, Artificial Sequence
  Description of Artificial Sequence: Synthetic oligonucleotide
auaaacaaaccacgaguca

SEQ ID NO: 1015639 - RNA, 19 nt, Artificial Sequence
  Description of Artificial Sequence: Synthetic oligonucleotide
ccaaaugggguguugaacg

SEQ ID NO: 1015640 - RNA, 19 nt, Artificial Sequence
  Description of Artificial Sequence: Synthetic oligonucleotide
uaguguuguacuggaaacg

SEQ ID NO: 1015641 - RNA, 19 nt, Artificial Sequence
  Description of Artificial Sequence: Synthetic oligonucleotide
aucauucuggcaaacagug

SEQ ID NO: 1015642 - RNA, 19 nt, Artificial Sequence
  Description of Artificial Sequence: Synthetic oligonucleotide
auuggcugcaaggaaauug

SEQ ID NO: 1015643 - RNA, 19 nt, Artificial Sequence
  Description of Artificial Sequence: Synthetic oligonucleotide
gauauccuccaaauauggg

SEQ ID NO: 1015644 - RNA, 19 nt, Artificial Sequence
  Description of Artificial Sequence: Synthetic oligonucleotide
ggaaacgcccaucaggagg

SEQ ID NO: 1015645 - RNA, 19 nt, Artificial Sequence
  Description of Artificial Sequence: Synthetic oligonucleotide
uauggguagauaguauccc

SEQ ID NO: 1015646 - RNA, 19 nt, Artificial Sequence
  Description of Artificial Sequence: Synthetic oligonucleotide
uccucaagggacuauguau

SEQ ID NO: 1015647 - RNA, 19 nt, Artificial Sequence
  Description of Artificial Sequence: Synthetic oligonucleotide
uguugaacgucaccaacuc

SEQ ID NO: 1015648 - RNA, 19 nt, Artificial Sequence
  Description of Artificial Sequence: Synthetic oligonucleotide
aaaaguguccagagaacug

SEQ ID NO: 1015649 - RNA, 19 nt, Artificial Sequence
  Description of Artificial Sequence: Synthetic oligonucleotide
uucgcuagaacaaguuuuc

SEQ ID NO: 1015650 - RNA, 19 nt, Artificial Sequence
  Description of Artificial Sequence: Synthetic oligonucleotide
ucacaauaauaugugcgcc

SEQ ID NO: 1015651 - RNA, 19 nt, Artificial Sequence
  Description of Artificial Sequence: Synthetic oligonucleotide
uugaauuguucuucgccca

SEQ ID NO: 1015652 - RNA, 19 nt, Artificial Sequence
  Description of Artificial Sequence: Synthetic oligonucleotide
agguuaaucuuaagaaaac

SEQ ID NO: 1015653 - RNA, 19 nt, Artificial Sequence
  Description of Artificial Sequence: Synthetic oligonucleotide
uuccgauucauuagugcca

SEQ ID NO: 1015654 - RNA, 19 nt, Artificial Sequence
  Description of Artificial Sequence: Synthetic oligonucleotide
cacauuaguguuguacugg

SEQ ID NO: 1015655 - RNA, 19 nt, Artificial Sequence
  Description of Artificial Sequence: Synthetic oligonucleotide
acaaagguaaacucaucaa

SEQ ID NO: 1015656 - RNA, 19 nt, Artificial Sequence
  Description of Artificial Sequence: Synthetic oligonucleotide
gacauacuggguuccaaac

SEQ ID NO: 1015657 - RNA, 19 nt, Artificial Sequence
  Description of Artificial Sequence: Synthetic oligonucleotide
ugaacuaccacaggugcgu

SEQ ID NO: 1015658 - RNA, 19 nt, Artificial Sequence
  Description of Artificial Sequence: Synthetic oligonucleotide
ugugagacaccgguaauga

SEQ ID NO: 1015659 - RNA, 19 nt, Artificial Sequence
  Description of Artificial Sequence: Synthetic oligonucleotide
aaaugggguguugaacguc

SEQ ID NO: 1015660 - RNA, 19 nt, Artificial Sequence
  Description of Artificial Sequence: Synthetic oligonucleotide
acaaacgcccaucacuuga

SEQ ID NO: 1015661 - RNA, 19 nt, Artificial Sequence
  Description of Artificial Sequence: Synthetic oligonucleotide
aaacaaacgcccaucacuu

SEQ ID NO: 1015662 - RNA, 19 nt, Artificial Sequence
  Description of Artificial Sequence: Synthetic oligonucleotide
acaaaaguguccagagaac

SEQ ID NO: 1015663 - RNA, 19 nt, Artificial Sequence
  Description of Artificial Sequence: Synthetic oligonucleotide
acaauaggugugaugauca

SEQ ID NO: 1015664 - RNA, 19 nt, Artificial Sequence
  Description of Artificial Sequence: Synthetic oligonucleotide
gguuuuacauuucagcaga

SEQ ID NO: 1015665 - RNA, 19 nt, Artificial Sequence
  Description of Artificial Sequence: Synthetic oligonucleotide
ugcaacccaucaaaugccc

SEQ ID NO: 1015666 - RNA, 19 nt, Artificial Sequence
  Description of Artificial Sequence: Synthetic oligonucleotide
cugaacuaccacaggugcg

SEQ ID NO: 1015667 - RNA, 19 nt, Artificial Sequence
  Description of Artificial Sequence: Synthetic oligonucleotide
cacggagcgaccugggugg

SEQ ID NO: 1015668 - RNA, 19 nt, Artificial Sequence
  Description of Artificial Sequence: Synthetic oligonucleotide
agcgguugggaacaguaug

SEQ ID NO: 1015669 - RNA, 19 nt, Artificial Sequence
  Description of Artificial Sequence: Synthetic oligonucleotide
auccacuaacuuuaaauua

SEQ ID NO: 1015670 - RNA, 19 nt, Artificial Sequence
  Description of Artificial Sequence: Synthetic oligonucleotide
aaagcaccgcacaagccag

SEQ ID NO: 1015671 - RNA, 19 nt, Artificial Sequence
  Description of Artificial Sequence: Synthetic oligonucleotide
accgguaaugaagugucac

SEQ ID NO: 1015672 - RNA, 19 nt, Artificial Sequence
  Description of Artificial Sequence: Synthetic oligonucleotide
guugaacgucaccaacucg

SEQ ID NO: 1015673 - RNA, 19 nt, Artificial Sequence
  Description of Artificial Sequence: Synthetic oligonucleotide
uucuggagucacaauaaua

SEQ ID NO: 1015674 - RNA, 19 nt, Artificial Sequence
  Description of Artificial Sequence: Synthetic oligonucleotide
aaugggguguugaacguca

SEQ ID NO: 1015675 - RNA, 19 nt, Artificial Sequence
  Description of Artificial Sequence: Synthetic oligonucleotide
uucuauacugcuggcauaa

SEQ ID NO: 1015676 - RNA, 19 nt, Artificial Sequence
  Description of Artificial Sequence: Synthetic oligonucleotide
acaccgguaaugaaguguc

SEQ ID NO: 1015677 - RNA, 19 nt, Artificial Sequence
  Description of Artificial Sequence: Synthetic oligonucleotide
caaagguaaacucaucaaa

SEQ ID NO: 1015678 - RNA, 19 nt, Artificial Sequence
  Description of Artificial Sequence: Synthetic oligonucleotide
uccgauucauuagugccag

SEQ ID NO: 1015679 - RNA, 19 nt, Artificial Sequence
  Description of Artificial Sequence: Synthetic oligonucleotide
ggauauccuccaaauaugg

SEQ ID NO: 1015680 - RNA, 19 nt, Artificial Sequence
  Description of Artificial Sequence: Synthetic oligonucleotide
aacaaacgcccaucacuug

SEQ ID NO: 1015681 - RNA, 19 nt, Artificial Sequence
  Description of Artificial Sequence: Synthetic oligonucleotide
ucggugguuuuacauuuca

SEQ ID NO: 1015682 - RNA, 19 nt, Artificial Sequence
  Description of Artificial Sequence: Synthetic oligonucleotide
auccaguucacuugagggu

SEQ ID NO: 1015683 - RNA, 19 nt, Artificial Sequence
  Description of Artificial Sequence: Synthetic oligonucleotide
acaauaauaugugcgcccu

SEQ ID NO: 1015684 - RNA, 19 nt, Artificial Sequence
  Description of Artificial Sequence: Synthetic oligonucleotide
guagcuuagaugacagcag

SEQ ID NO: 1015685 - RNA, 19 nt, Artificial Sequence
  Description of Artificial Sequence: Synthetic oligonucleotide
gagaacugacuuguaaaac

SEQ ID NO: 1015686 - RNA, 19 nt, Artificial Sequence
  Description of Artificial Sequence: Synthetic oligonucleotide
guucacuugagggucuggg

SEQ ID NO: 1015687 - RNA, 19 nt, Artificial Sequence
  Description of Artificial Sequence: Synthetic oligonucleotide
aggggauccaguucacuug

SEQ ID NO: 1015688 - RNA, 19 nt, Artificial Sequence
  Description of Artificial Sequence: Synthetic oligonucleotide
agaguacagaucugcagau

SEQ ID NO: 1015689 - RNA, 19 nt, Artificial Sequence
  Description of Artificial Sequence: Synthetic oligonucleotide
cuaaacaaacgcccaucac

SEQ ID NO: 1015690 - RNA, 19 nt, Artificial Sequence
  Description of Artificial Sequence: Synthetic oligonucleotide
uccaguucacuugaggguc

SEQ ID NO: 1015691 - RNA, 19 nt, Artificial Sequence
  Description of Artificial Sequence: Synthetic oligonucleotide
ggaaucaaacaccacauua

SEQ ID NO: 1015692 - RNA, 19 nt, Artificial Sequence
  Description of Artificial Sequence: Synthetic oligonucleotide
gguagcuuagaugacagca

SEQ ID NO: 1015693 - RNA, 19 nt, Artificial Sequence
  Description of Artificial Sequence: Synthetic oligonucleotide
cauggaagaguauaucaaa

SEQ ID NO: 1015694 - RNA, 19 nt, Artificial Sequence
  Description of Artificial Sequence: Synthetic oligonucleotide
ucgaggguacuucuauacu

SEQ ID NO: 1015695 - RNA, 19 nt, Artificial Sequence
  Description of Artificial Sequence: Synthetic oligonucleotide
aagcuugacuucgcucagc

SEQ ID NO: 1015696 - RNA, 19 nt, Artificial Sequence
  Description of Artificial Sequence: Synthetic oligonucleotide
ugaauuguucuuggccaag

SEQ ID NO: 1015697 - RNA, 19 nt, Artificial Sequence
  Description of Artificial Sequence: Synthetic oligonucleotide
agacucgaucgcuccuucc

SEQ ID NO: 1015698 - RNA, 19 nt, Artificial Sequence
  Description of Artificial Sequence: Synthetic oligonucleotide
uccucguuuccugucgagg

SEQ ID NO: 1015699 - RNA, 19 nt, Artificial Sequence
  Description of Artificial Sequence: Synthetic oligonucleotide
acggcugcaacaaaagugu

SEQ ID NO: 1015700 - RNA, 19 nt, Artificial Sequence
  Description of Artificial Sequence: Synthetic oligonucleotide
gugugcaacccaucaaaug

SEQ ID NO: 1015701 - RNA, 19 nt, Artificial Sequence
  Description of Artificial Sequence: Synthetic oligonucleotide
agaacaaguuuucccucgu

SEQ ID NO: 1015702 - RNA, 19 nt, Artificial Sequence
  Description of Artificial Sequence: Synthetic oligonucleotide
gaaacgcccaucaggagga

SEQ ID NO: 1015703 - RNA, 19 nt, Artificial Sequence
  Description of Artificial Sequence: Synthetic oligonucleotide
auaauaugugcgcccugcu

SEQ ID NO: 1015704 - RNA, 19 nt, Artificial Sequence
  Description of Artificial Sequence: Synthetic oligonucleotide
auaugugcgcccugcuuug

SEQ ID NO: 1015705 - RNA, 19 nt, Artificial Sequence
  Description of Artificial Sequence: Synthetic oligonucleotide
cucguaaacggcugcaaca

SEQ ID NO: 1015706 - RNA, 19 nt, Artificial Sequence
  Description of Artificial Sequence: Synthetic oligonucleotide
aacuuggucaccaggguua

SEQ ID NO: 1015707 - RNA, 19 nt, Artificial Sequence
  Description of Artificial Sequence: Synthetic oligonucleotide
uuaucacaggggauccagu

SEQ ID NO: 1015708 - RNA, 19 nt, Artificial Sequence
  Description of Artificial Sequence: Synthetic oligonucleotide
ugaauuguucuucgcccau

SEQ ID NO: 1015709 - RNA, 19 nt, Artificial Sequence
  Description of Artificial Sequence: Synthetic oligonucleotide
ucgugcaaccaguuuuccc

SEQ ID NO: 1015710 - RNA, 19 nt, Artificial Sequence
  Description of Artificial Sequence: Synthetic oligonucleotide
caagcagcugagucuuucc

SEQ ID NO: 1015711 - RNA, 19 nt, Artificial Sequence
  Description of Artificial Sequence: Synthetic oligonucleotide
uacuucuauacugcuggca

SEQ ID NO: 1015712 - RNA, 19 nt, Artificial Sequence
  Description of Artificial Sequence: Synthetic oligonucleotide
ugcaaccaguuuucccagg

SEQ ID NO: 1015713 - RNA, 19 nt, Artificial Sequence
  Description of Artificial Sequence: Synthetic oligonucleotide
gacucgaucgcuccuucca

SEQ ID NO: 1015714 - RNA, 19 nt, Artificial Sequence
  Description of Artificial Sequence: Synthetic oligonucleotide
acucgaucgcuccuuccag

SEQ ID NO: 1015715 - RNA, 19 nt, Artificial Sequence
  Description of Artificial Sequence: Synthetic oligonucleotide
guaaugcacaauaggugug

SEQ ID NO: 1015716 - RNA, 19 nt, Artificial Sequence
  Description of Artificial Sequence: Synthetic oligonucleotide
caccgcacaagccagccac

SEQ ID NO: 1015717 - RNA, 19 nt, Artificial Sequence
  Description of Artificial Sequence: Synthetic oligonucleotide
aggaucauggaagaguaua

SEQ ID NO: 1015718 - RNA, 19 nt, Artificial Sequence
  Description of Artificial Sequence: Synthetic oligonucleotide
acgcccaucaggaggacac

SEQ ID NO: 1015719 - RNA, 19 nt, Artificial Sequence
  Description of Artificial Sequence: Synthetic oligonucleotide
guagauaguaucccuggua

SEQ ID NO: 1015720 - RNA, 19 nt, Artificial Sequence
  Description of Artificial Sequence: Synthetic oligonucleotide
cuauacugcuggcauaaga

SEQ ID NO: 1015721 - RNA, 19 nt, Artificial Sequence
  Description of Artificial Sequence: Synthetic oligonucleotide
caugcucguaaacggcugc

SEQ ID NO: 1015722 - RNA, 19 nt, Artificial Sequence
  Description of Artificial Sequence: Synthetic oligonucleotide
ucauagugaaaggccuuug

SEQ ID NO: 1015723 - RNA, 19 nt, Artificial Sequence
  Description of Artificial Sequence: Synthetic oligonucleotide
gaacgucaccaacucgggc

SEQ ID NO: 1015724 - RNA, 19 nt, Artificial Sequence
  Description of Artificial Sequence: Synthetic oligonucleotide
aggugcguaaaucgguggu

SEQ ID NO: 1015725 - RNA, 19 nt, Artificial Sequence
  Description of Artificial Sequence: Synthetic oligonucleotide
uucgcccaugaaaagguuu

SEQ ID NO: 1015726 - RNA, 19 nt, Artificial Sequence
  Description of Artificial Sequence: Synthetic oligonucleotide
caaacgcccaucacuugac

SEQ ID NO: 1015727 - RNA, 19 nt, Artificial Sequence
  Description of Artificial Sequence: Synthetic oligonucleotide
uucaaaccugguggaagcc

SEQ ID NO: 1015728 - RNA, 19 nt, Artificial Sequence
  Description of Artificial Sequence: Synthetic oligonucleotide
caggugcguaaaucggugg

SEQ ID NO: 1015729 - RNA, 19 nt, Artificial Sequence
  Description of Artificial Sequence: Synthetic oligonucleotide
uuaugguaucgugcaacca

SEQ ID NO: 1015730 - RNA, 19 nt, Artificial Sequence
  Description of Artificial Sequence: Synthetic oligonucleotide
ugagggucugggauauccu

SEQ ID NO: 1015731 - RNA, 19 nt, Artificial Sequence
  Description of Artificial Sequence: Synthetic oligonucleotide
guauauuggcugcaaggaa

SEQ ID NO: 1015732 - RNA, 19 nt, Artificial Sequence
  Description of Artificial Sequence: Synthetic oligonucleotide
ucccucguugguuuuccug

SEQ ID NO: 1015733 - RNA, 19 nt, Artificial Sequence
  Description of Artificial Sequence: Synthetic oligonucleotide
ggcauaagaaguccaguuc

SEQ ID NO: 1015734 - RNA, 19 nt, Artificial Sequence
  Description of Artificial Sequence: Synthetic oligonucleotide
caguguguuaugaggucug

SEQ ID NO: 1015735 - RNA, 19 nt, Artificial Sequence
  Description of Artificial Sequence: Synthetic oligonucleotide
caaagaccgcugaaaacca

SEQ ID NO: 1015736 - RNA, 19 nt, Artificial Sequence
  Description of Artificial Sequence: Synthetic oligonucleotide
gcuagaacaaguuuucccu

SEQ ID NO: 1015737 - RNA, 19 nt, Artificial Sequence
  Description of Artificial Sequence: Synthetic oligonucleotide
agaguauaucaaagcaugu

SEQ ID NO: 1015738 - RNA, 19 nt, Artificial Sequence
  Description of Artificial Sequence: Synthetic oligonucleotide
uggaaacgcccaucaggag

SEQ ID NO: 1015739 - RNA, 19 nt, Artificial Sequence
  Description of Artificial Sequence: Synthetic oligonucleotide
agauaguaucccugguaaa

SEQ ID NO: 1015740 - RNA, 19 nt, Artificial Sequence
  Description of Artificial Sequence: Synthetic oligonucleotide
aacuaccacaggugcguaa

SEQ ID NO: 1015741 - RNA, 19 nt, Artificial Sequence
  Description of Artificial Sequence: Synthetic oligonucleotide
ugugcgcccugcuuugcug

SEQ ID NO: 1015742 - RNA, 19 nt, Artificial Sequence
  Description of Artificial Sequence: Synthetic oligonucleotide
agcuuagaugacagcagag

SEQ ID NO: 1015743 - RNA, 19 nt, Artificial Sequence
  Description of Artificial Sequence: Synthetic oligonucleotide
gacuucgcucagcaacacc

SEQ ID NO: 1015744 - RNA, 19 nt, Artificial Sequence
  Description of Artificial Sequence: Synthetic oligonucleotide
aggguacuucuauacugcu

SEQ ID NO: 1015745 - RNA, 19 nt, Artificial Sequence
  Description of Artificial Sequence: Synthetic oligonucleotide
guaucgugcaaccaguuuu

SEQ ID NO: 1015746 - RNA, 19 nt, Artificial Sequence
  Description of Artificial Sequence: Synthetic oligonucleotide
cuuagaugacagcagagau

SEQ ID NO: 1015747 - RNA, 19 nt, Artificial Sequence
  Description of Artificial Sequence: Synthetic oligonucleotide
uggguuccaaacgugccac

SEQ ID NO: 1015748 - RNA, 19 nt, Artificial Sequence
  Description of Artificial Sequence: Synthetic oligonucleotide
guaaacugcaccccauaua

SEQ ID NO: 1015749 - RNA, 19 nt, Artificial Sequence
  Description of Artificial Sequence: Synthetic oligonucleotide
gucaccaggguuacagcag

SEQ ID NO: 1015750 - RNA, 19 nt, Artificial Sequence
  Description of Artificial Sequence: Synthetic oligonucleotide
cauagcccacgcugagugg

SEQ ID NO: 1015751 - RNA, 19 nt, Artificial Sequence
  Description of Artificial Sequence: Synthetic oligonucleotide
cugugagacaccgguaaug

SEQ ID NO: 1015752 - RNA, 19 nt, Artificial Sequence
  Description of Artificial Sequence: Synthetic oligonucleotide
agaccgcugaaaaccaaag

SEQ ID NO: 1015753 - RNA, 19 nt, Artificial Sequence
  Description of Artificial Sequence: Synthetic oligonucleotide
auagcccacgcugagugga

SEQ ID NO: 1015754 - RNA, 19 nt, Artificial Sequence
  Description of Artificial Sequence: Synthetic oligonucleotide
agccaguguguuaugaggu

SEQ ID NO: 1015755 - RNA, 19 nt, Artificial Sequence
  Description of Artificial Sequence: Synthetic oligonucleotide
cauuucagcagaguacaga

SEQ ID NO: 1015756 - RNA, 19 nt, Artificial Sequence
  Description of Artificial Sequence: Synthetic oligonucleotide
guaaaucggugguuuuaca

SEQ ID NO: 1015757 - RNA, 19 nt, Artificial Sequence
  Description of Artificial Sequence: Synthetic oligonucleotide
cacuaggcaggaucacagc

SEQ ID NO: 1015758 - RNA, 19 nt, Artificial Sequence
  Description of Artificial Sequence: Synthetic oligonucleotide
agauuccgauucauuagug

SEQ ID NO: 1015759 - RNA, 19 nt, Artificial Sequence
  Description of Artificial Sequence: Synthetic oligonucleotide
ugcaccccauauaugccau

SEQ ID NO: 1015760 - RNA, 19 nt, Artificial Sequence
  Description of Artificial Sequence: Synthetic oligonucleotide
acaggugcguaaaucggug

SEQ ID NO: 1015761 - RNA, 19 nt, Artificial Sequence
  Description of Artificial Sequence: Synthetic oligonucleotide
gggauauccuccaaauaug

SEQ ID NO: 1015762 - RNA, 19 nt, Artificial Sequence
  Description of Artificial Sequence: Synthetic oligonucleotide
caauaauaugugcgcccug

SEQ ID NO: 1015763 - RNA, 19 nt, Artificial Sequence
  Description of Artificial Sequence: Synthetic oligonucleotide
uuccucguuuccugucgag

SEQ ID NO: 1015764 - RNA, 19 nt, Artificial Sequence
  Description of Artificial Sequence: Synthetic oligonucleotide
ucgcuagaacaaguuuucc

SEQ ID NO: 1015765 - RNA, 19 nt, Artificial Sequence
  Description of Artificial Sequence: Synthetic oligonucleotide
cugagggagaacauuucaa

SEQ ID NO: 1015766 - RNA, 19 nt, Artificial Sequence
  Description of Artificial Sequence: Synthetic oligonucleotide
cauccacuaacuuuaaauu

SEQ ID NO: 1015767 - RNA, 19 nt, Artificial Sequence
  Description of Artificial Sequence: Synthetic oligonucleotide
aagcaccgcacaagccagc

SEQ ID NO: 1015768 - RNA, 19 nt, Artificial Sequence
  Description of Artificial Sequence: Synthetic oligonucleotide
ugcagacucgaucgcuccu

SEQ ID NO: 1015769 - RNA, 19 nt, Artificial Sequence
  Description of Artificial Sequence: Synthetic oligonucleotide
auauuggcugcaaggaaau

SEQ ID NO: 1015770 - RNA, 19 nt, Artificial Sequence
  Description of Artificial Sequence: Synthetic oligonucleotide
ucuauacugcuggcauaag

SEQ ID NO: 1015771 - RNA, 19 nt, Artificial Sequence
  Description of Artificial Sequence: Synthetic oligonucleotide
gaguacagaucugcagaug

SEQ ID NO: 1015772 - RNA, 19 nt, Artificial Sequence
  Description of Artificial Sequence: Synthetic oligonucleotide
caucacuugacaccugaaa

SEQ ID NO: 1015773 - RNA, 19 nt, Artificial Sequence
  Description of Artificial Sequence: Synthetic oligonucleotide
acggagacacacucaugcu

SEQ ID NO: 1015774 - RNA, 19 nt, Artificial Sequence
  Description of Artificial Sequence: Synthetic oligonucleotide
ugcuuaugguaucgugcaa

SEQ ID NO: 1015775 - RNA, 19 nt, Artificial Sequence
  Description of Artificial Sequence: Synthetic oligonucleotide
gguugggaacaguauggug

SEQ ID NO: 1015776 - RNA, 19 nt, Artificial Sequence
  Description of Artificial Sequence: Synthetic oligonucleotide
gagacaccgguaaugaagu

SEQ ID NO: 1015777 - RNA, 19 nt, Artificial Sequence
  Description of Artificial Sequence: Synthetic oligonucleotide
auuccucguuuccugucga

SEQ ID NO: 1015778 - RNA, 19 nt, Artificial Sequence
  Description of Artificial Sequence: Synthetic oligonucleotide
guuccaaacgugccacuga

SEQ ID NO: 1015779 - RNA, 19 nt, Artificial Sequence
  Description of Artificial Sequence: Synthetic oligonucleotide
gcgguugggaacaguaugg

SEQ ID NO: 1015780 - RNA, 19 nt, Artificial Sequence
  Description of Artificial Sequence: Synthetic oligonucleotide
uauuaccaucagccagugu

SEQ ID NO: 1015781 - RNA, 19 nt, Artificial Sequence
  Description of Artificial Sequence: Synthetic oligonucleotide
uaccacaggugcguaaauc

SEQ ID NO: 1015782 - RNA, 19 nt, Artificial Sequence
  Description of Artificial Sequence: Synthetic oligonucleotide
agcaacaccucggggaaga

SEQ ID NO: 1015783 - RNA, 19 nt, Artificial Sequence
  Description of Artificial Sequence: Synthetic oligonucleotide
auccaagcgguugggaaca

SEQ ID NO: 1015784 - RNA, 19 nt, Artificial Sequence
  Description of Artificial Sequence: Synthetic oligonucleotide
aagcggggcuugcuauuug

SEQ ID NO: 1015785 - RNA, 19 nt, Artificial Sequence
  Description of Artificial Sequence: Synthetic oligonucleotide
aguaugguguccaccugca

SEQ ID NO: 1015786 - RNA, 19 nt, Artificial Sequence
  Description of Artificial Sequence: Synthetic oligonucleotide
cauagauugaauuguucuu

SEQ ID NO: 1015787 - RNA, 19 nt, Artificial Sequence
  Description of Artificial Sequence: Synthetic oligonucleotide
aggcuaaacaaacgcccau

SEQ ID NO: 1015788 - RNA, 19 nt, Artificial Sequence
  Description of Artificial Sequence: Synthetic oligonucleotide
acugugagacaccgguaau

SEQ ID NO: 1015789 - RNA, 19 nt, Artificial Sequence
  Description of Artificial Sequence: Synthetic oligonucleotide
cacugugagacaccgguaa

SEQ ID NO: 1015790 - RNA, 19 nt, Artificial Sequence
  Description of Artificial Sequence: Synthetic oligonucleotide
uggcugcaaggaaauugac

SEQ ID NO: 1015791 - RNA, 19 nt, Artificial Sequence
  Description of Artificial Sequence: Synthetic oligonucleotide
acguguuccccagaccuug

SEQ ID NO: 1015792 - RNA, 19 nt, Artificial Sequence
  Description of Artificial Sequence: Synthetic oligonucleotide
guguuguacuggaaacgcc

SEQ ID NO: 1015793 - RNA, 19 nt, Artificial Sequence
  Description of Artificial Sequence: Synthetic oligonucleotide
ugucgaggguacuucuaua

SEQ ID NO: 1015794 - RNA, 19 nt, Artificial Sequence
  Description of Artificial Sequence: Synthetic oligonucleotide
agcggggcuugcuauuuga

SEQ ID NO: 1015795 - RNA, 19 nt, Artificial Sequence
  Description of Artificial Sequence: Synthetic oligonucleotide
aaagcggggcuugcuauuu

SEQ ID NO: 1015796 - RNA, 19 nt, Artificial Sequence
  Description of Artificial Sequence: Synthetic oligonucleotide
guguguuaugaggucugag

SEQ ID NO: 1015797 - RNA, 19 nt, Artificial Sequence
  Description of Artificial Sequence: Synthetic oligonucleotide
gacaccgguaaugaagugu

SEQ ID NO: 1015798 - RNA, 19 nt, Artificial Sequence
  Description of Artificial Sequence: Synthetic oligonucleotide
acgagucacguguucccca

SEQ ID NO: 1015799 - RNA, 19 nt, Artificial Sequence
  Description of Artificial Sequence: Synthetic oligonucleotide
gccauguccacugaacuac

SEQ ID NO: 1015800 - RNA, 19 nt, Artificial Sequence
  Description of Artificial Sequence: Synthetic oligonucleotide
ccacaggugcguaaaucgg

SEQ ID NO: 1015801 - RNA, 19 nt, Artificial Sequence
  Description of Artificial Sequence: Synthetic oligonucleotide
gggguguugaacgucacca

SEQ ID NO: 1015802 - RNA, 19 nt, Artificial Sequence
  Description of Artificial Sequence: Synthetic oligonucleotide
cgaggguacuucuauacug

SEQ ID NO: 1015803 - RNA, 19 nt, Artificial Sequence
  Description of Artificial Sequence: Synthetic oligonucleotide
agggucacuaguguugcau

SEQ ID NO: 1015804 - RNA, 19 nt, Artificial Sequence
  Description of Artificial Sequence: Synthetic oligonucleotide
agacaccgguaaugaagug

SEQ ID NO: 1015805 - RNA, 19 nt, Artificial Sequence
  Description of Artificial Sequence: Synthetic oligonucleotide
ucaagggacuauguauauu

SEQ ID NO: 1015806 - RNA, 19 nt, Artificial Sequence
  Description of Artificial Sequence: Synthetic oligonucleotide
uuagugccagugccucacu

SEQ ID NO: 1015807 - RNA, 19 nt, Artificial Sequence
  Description of Artificial Sequence: Synthetic oligonucleotide
ugguaucgugcaaccaguu

SEQ ID NO: 1015808 - RNA, 19 nt, Artificial Sequence
  Description of Artificial Sequence: Synthetic oligonucleotide
uccccagaccuugggaucu

SEQ ID NO: 1015809 - RNA, 19 nt, Artificial Sequence
  Description of Artificial Sequence: Synthetic oligonucleotide
agcgaccugggugggacuc

SEQ ID NO: 1015810 - RNA, 19 nt, Artificial Sequence
  Description of Artificial Sequence: Synthetic oligonucleotide
aaagaccgcugaaaaccaa

SEQ ID NO: 1015811 - RNA, 19 nt, Artificial Sequence
  Description of Artificial Sequence: Synthetic oligonucleotide
ccacauuaguguuguacug

SEQ ID NO: 1015812 - RNA, 19 nt, Artificial Sequence
  Description of Artificial Sequence: Synthetic oligonucleotide
gauacuggccuuccacggu

SEQ ID NO: 1015813 - RNA, 19 nt, Artificial Sequence
  Description of Artificial Sequence: Synthetic oligonucleotide
gcuggcauaagaaguccag

SEQ ID NO: 1015814 - RNA, 19 nt, Artificial Sequence
  Description of Artificial Sequence: Synthetic oligonucleotide
cugaaacuccccaggugca

SEQ ID NO: 1015815 - RNA, 19 nt, Artificial Sequence
  Description of Artificial Sequence: Synthetic oligonucleotide
acauuucagcagaguacag

SEQ ID NO: 1015816 - RNA, 19 nt, Artificial Sequence
  Description of Artificial Sequence: Synthetic oligonucleotide
gcuuagaugacagcagaga

SEQ ID NO: 1015817 - RNA, 19 nt, Artificial Sequence
  Description of Artificial Sequence: Synthetic oligonucleotide
aucggugguuuuacauuuc

SEQ ID NO: 1015818 - RNA, 19 nt, Artificial Sequence
  Description of Artificial Sequence: Synthetic oligonucleotide
acgacacucugaaauuccu

SEQ ID NO: 1015819 - RNA, 19 nt, Artificial Sequence
  Description of Artificial Sequence: Synthetic oligonucleotide
gugcgcccugcuuugcugc

SEQ ID NO: 1015820 - RNA, 19 nt, Artificial Sequence
  Description of Artificial Sequence: Synthetic oligonucleotide
aagcgguugggaacaguau

SEQ ID NO: 1015821 - RNA, 19 nt, Artificial Sequence
  Description of Artificial Sequence: Synthetic oligonucleotide
acggugugcaacccaucaa

SEQ ID NO: 1015822 - RNA, 19 nt, Artificial Sequence
  Description of Artificial Sequence: Synthetic oligonucleotide
ugcucguaaacggcugcaa

SEQ ID NO: 1015823 - RNA, 19 nt, Artificial Sequence
  Description of Artificial Sequence: Synthetic oligonucleotide
cagagaucauucuggcaaa

SEQ ID NO: 1015824 - RNA, 19 nt, Artificial Sequence
  Description of Artificial Sequence: Synthetic oligonucleotide
gcucguaaacggcugcaac

SEQ ID NO: 1015825 - RNA, 19 nt, Artificial Sequence
  Description of Artificial Sequence: Synthetic oligonucleotide
cuucuauacugcuggcaua

SEQ ID NO: 1015826 - RNA, 19 nt, Artificial Sequence
  Description of Artificial Sequence: Synthetic oligonucleotide
uaugugcgcccugcuuugc

SEQ ID NO: 1015827 - RNA, 19 nt, Artificial Sequence
  Description of Artificial Sequence: Synthetic oligonucleotide
ugacuucgcucagcaacac

SEQ ID NO: 1015828 - RNA, 19 nt, Artificial Sequence
  Description of Artificial Sequence: Synthetic oligonucleotide
cacacucaugcugcuuaag

SEQ ID NO: 1015829 - RNA, 19 nt, Artificial Sequence
  Description of Artificial Sequence: Synthetic oligonucleotide
cuauguauauuggcugcaa

SEQ ID NO: 1015830 - RNA, 19 nt, Artificial Sequence
  Description of Artificial Sequence: Synthetic oligonucleotide
cucgaucgcuccuuccaga

SEQ ID NO: 1015831 - RNA, 19 nt, Artificial Sequence
  Description of Artificial Sequence: Synthetic oligonucleotide
caaguuuucccucguuggu

SEQ ID NO: 1015832 - RNA, 19 nt, Artificial Sequence
  Description of Artificial Sequence: Synthetic oligonucleotide
cucguugguuuuccuguca

SEQ ID NO: 1015833 - RNA, 19 nt, Artificial Sequence
  Description of Artificial Sequence: Synthetic oligonucleotide
caccacggagcgaccuggg

SEQ ID NO: 1015834 - RNA, 19 nt, Artificial Sequence
  Description of Artificial Sequence: Synthetic oligonucleotide
gggaacaguauggugucca

SEQ ID NO: 1015835 - RNA, 19 nt, Artificial Sequence
  Description of Artificial Sequence: Synthetic oligonucleotide
cacaggugcguaaaucggu

SEQ ID NO: 1015836 - RNA, 19 nt, Artificial Sequence
  Description of Artificial Sequence: Synthetic oligonucleotide
ggcuaaacaaacgcccauc

SEQ ID NO: 1015837 - RNA, 19 nt, Artificial Sequence
  Description of Artificial Sequence: Synthetic oligonucleotide
caaaugggguguugaacgu

SEQ ID NO: 1015838 - RNA, 19 nt, Artificial Sequence
  Description of Artificial Sequence: Synthetic oligonucleotide
aaaccacgagucacguguu

SEQ ID NO: 1015839 - RNA, 19 nt, Artificial Sequence
  Description of Artificial Sequence: Synthetic oligonucleotide
cagugugauuuccugagau

SEQ ID NO: 1015840 - RNA, 19 nt, Artificial Sequence
  Description of Artificial Sequence: Synthetic oligonucleotide
cacuugagggucugggaua

SEQ ID NO: 1015841 - RNA, 19 nt, Artificial Sequence
  Description of Artificial Sequence: Synthetic oligonucleotide
cagacucgaucgcuccuuc

SEQ ID NO: 1015842 - RNA, 19 nt, Artificial Sequence
  Description of Artificial Sequence: Synthetic oligonucleotide
agcuucgcuagaacaaguu

SEQ ID NO: 1015843 - RNA, 19 nt, Artificial Sequence
  Description of Artificial Sequence: Synthetic oligonucleotide
ugcgcccugcuuugcugca

SEQ ID NO: 1015844 - RNA, 19 nt, Artificial Sequence
  Description of Artificial Sequence: Synthetic oligonucleotide
cguaaaucggugguuuuac

SEQ ID NO: 1015845 - RNA, 19 nt, Artificial Sequence
  Description of Artificial Sequence: Synthetic oligonucleotide
ccucaagggacuauguaua

SEQ ID NO: 1015846 - RNA, 19 nt, Artificial Sequence
  Description of Artificial Sequence: Synthetic oligonucleotide
gugagacaccgguaaugaa

SEQ ID NO: 1015847 - RNA, 19 nt, Artificial Sequence
  Description of Artificial Sequence: Synthetic oligonucleotide
cugggauauccuccaaaua

SEQ ID NO: 1015848 - RNA, 19 nt, Artificial Sequence
  Description of Artificial Sequence: Synthetic oligonucleotide
uccaagcgguugggaacag

SEQ ID NO: 1015849 - RNA, 19 nt, Artificial Sequence
  Description of Artificial Sequence: Synthetic oligonucleotide
cagaucugcagaugauacu

SEQ ID NO: 1015850 - RNA, 19 nt, Artificial Sequence
  Description of Artificial Sequence: Synthetic oligonucleotide
accccauauaugccaucuu

SEQ ID NO: 1015851 - RNA, 19 nt, Artificial Sequence
  Description of Artificial Sequence: Synthetic oligonucleotide
ggagcgaccugggugggac

SEQ ID NO: 1015852 - RNA, 19 nt, Artificial Sequence
  Description of Artificial Sequence: Synthetic oligonucleotide
gcaacccaucaaaugcccc

SEQ ID NO: 1015853 - RNA, 19 nt, Artificial Sequence
  Description of Artificial Sequence: Synthetic oligonucleotide
cucaagggacuauguauau

SEQ ID NO: 1015854 - RNA, 19 nt, Artificial Sequence
  Description of Artificial Sequence: Synthetic oligonucleotide
gagggucacuaguguugca

SEQ ID NO: 1015855 - RNA, 19 nt, Artificial Sequence
  Description of Artificial Sequence: Synthetic oligonucleotide
gaacaaguuuucccucguu

SEQ ID NO: 1015856 - RNA, 19 nt, Artificial Sequence
  Description of Artificial Sequence: Synthetic oligonucleotide
cuccaaauauggguagaua

SEQ ID NO: 1015857 - RNA, 19 nt, Artificial Sequence
  Description of Artificial Sequence: Synthetic oligonucleotide
gcaugcucguaaacggcug

SEQ ID NO: 1015858 - RNA, 19 nt, Artificial Sequence
  Description of Artificial Sequence: Synthetic oligonucleotide
caccgguaaugaaguguca

SEQ ID NO: 1015859 - RNA, 19 nt, Artificial Sequence
  Description of Artificial Sequence: Synthetic oligonucleotide
cugucgaggguacuucuau

SEQ ID NO: 1015860 - RNA, 19 nt, Artificial Sequence
  Description of Artificial Sequence: Synthetic oligonucleotide
gucauagugaaaggccuuu

SEQ ID NO: 1015861 - RNA, 19 nt, Artificial Sequence
  Description of Artificial Sequence: Synthetic oligonucleotide
caacuuggucaccaggguu

SEQ ID NO: 1015862 - RNA, 19 nt, Artificial Sequence
  Description of Artificial Sequence: Synthetic oligonucleotide
caccccauauaugccaucu

SEQ ID NO: 1015863 - RNA, 19 nt, Artificial Sequence
  Description of Artificial Sequence: Synthetic oligonucleotide
cccucccaaacagagugac

SEQ ID NO: 1015864 - RNA, 19 nt, Artificial Sequence
  Description of Artificial Sequence: Synthetic oligonucleotide
caauaggugugaugaucau

SEQ ID NO: 1015865 - RNA, 19 nt, Artificial Sequence
  Description of Artificial Sequence: Synthetic oligonucleotide
caccugaaacuccccaggu

SEQ ID NO: 1015866 - RNA, 19 nt, Artificial Sequence
  Description of Artificial Sequence: Synthetic oligonucleotide
ccaagcagcugagucuuuc

SEQ ID NO: 1015867 - RNA, 19 nt, Artificial Sequence
  Description of Artificial Sequence: Synthetic oligonucleotide
cucguuuccugucgagggu

SEQ ID NO: 1015868 - RNA, 19 nt, Artificial Sequence
  Description of Artificial Sequence: Synthetic oligonucleotide
acgcugaguggaauucaau

SEQ ID NO: 1015869 - RNA, 19 nt, Artificial Sequence
  Description of Artificial Sequence: Synthetic oligonucleotide
acggagcgaccuggguggg

SEQ ID NO: 1015870 - RNA, 19 nt, Artificial Sequence
  Description of Artificial Sequence: Synthetic oligonucleotide
gaacuaccacaggugcgua

SEQ ID NO: 1015871 - RNA, 19 nt, Artificial Sequence
  Description of Artificial Sequence: Synthetic oligonucleotide
cagcuucgcuagaacaagu

SEQ ID NO: 1015872 - RNA, 19 nt, Artificial Sequence
  Description of Artificial Sequence: Synthetic oligonucleotide
agcucgcuucucagacauc

SEQ ID NO: 1015873 - RNA, 19 nt, Artificial Sequence
  Description of Artificial Sequence: Synthetic oligonucleotide
cacuaguguugcauggcuu

SEQ ID NO: 1015874 - RNA, 19 nt, Artificial Sequence
  Description of Artificial Sequence: Synthetic oligonucleotide
gguaucgugcaaccaguuu

SEQ ID NO: 1015875 - RNA, 19 nt, Artificial Sequence
  Description of Artificial Sequence: Synthetic oligonucleotide
cccucguugguuuuccugu

SEQ ID NO: 1015876 - RNA, 19 nt, Artificial Sequence
  Description of Artificial Sequence: Synthetic oligonucleotide
ccagaccuugggaucuuca

SEQ ID NO: 1015877 - RNA, 19 nt, Artificial Sequence
  Description of Artificial Sequence: Synthetic oligonucleotide
gcguaaaucggugguuuua

SEQ ID NO: 1015878 - RNA, 19 nt, Artificial Sequence
  Description of Artificial Sequence: Synthetic oligonucleotide
cguuuccugucgaggguac

SEQ ID NO: 1015879 - RNA, 19 nt, Artificial Sequence
  Description of Artificial Sequence: Synthetic oligonucleotide
gcuccgugggugcauugaa

SEQ ID NO: 1015880 - RNA, 19 nt, Artificial Sequence
  Description of Artificial Sequence: Synthetic oligonucleotide
gggguguagccaaaucugu

SEQ ID NO: 1015881 - RNA, 19 nt, Artificial Sequence
  Description of Artificial Sequence: Synthetic oligonucleotide
ggcuugcuauuugaauaaa

SEQ ID NO: 1015882 - RNA, 19 nt, Artificial Sequence
  Description of Artificial Sequence: Synthetic oligonucleotide
cuccgugggugcauugaau

SEQ ID NO: 1015883 - RNA, 19 nt, Artificial Sequence
  Description of Artificial Sequence: Synthetic oligonucleotide
ucgggcuccgugggugcau

SEQ ID NO: 1015884 - RNA, 19 nt, Artificial Sequence
  Description of Artificial Sequence: Synthetic oligonucleotide
cgaucgcuccuuccagaag

SEQ ID NO: 1015885 - RNA, 19 nt, Artificial Sequence
  Description of Artificial Sequence: Synthetic oligonucleotide
cuucgcccaugaaaagguu

SEQ ID NO: 1015886 - RNA, 19 nt, Artificial Sequence
  Description of Artificial Sequence: Synthetic oligonucleotide
gcaccccauauaugccauc

SEQ ID NO: 1015887 - RNA, 19 nt, Artificial Sequence
  Description of Artificial Sequence: Synthetic oligonucleotide
ccaucacuugacaccugaa

SEQ ID NO: 1015888 - RNA, 19 nt, Artificial Sequence
  Description of Artificial Sequence: Synthetic oligonucleotide
gagcgaccugggugggacu

SEQ ID NO: 1015889 - RNA, 19 nt, Artificial Sequence
  Description of Artificial Sequence: Synthetic oligonucleotide
ggugcguaaaucggugguu

SEQ ID NO: 1015890 - RNA, 19 nt, Artificial Sequence
  Description of Artificial Sequence: Synthetic oligonucleotide
ggguguagccaaaucuguu

SEQ ID NO: 1015891 - RNA, 19 nt, Artificial Sequence
  Description of Artificial Sequence: Synthetic oligonucleotide
ccacgcugaguggaauuca

SEQ ID NO: 1015892 - RNA, 19 nt, Artificial Sequence
  Description of Artificial Sequence: Synthetic oligonucleotide
cguaaacggcugcaacaaa

SEQ ID NO: 1015893 - RNA, 19 nt, Artificial Sequence
  Description of Artificial Sequence: Synthetic oligonucleotide
gcggggcuugcuauuugaa

SEQ ID NO: 1015894 - RNA, 19 nt, Artificial Sequence
  Description of Artificial Sequence: Synthetic oligonucleotide
ccucccaaacagagugacu

SEQ ID NO: 1015895 - RNA, 19 nt, Artificial Sequence
  Description of Artificial Sequence: Synthetic oligonucleotide
cccagaccuugggaucuuc

SEQ ID NO: 1015896 - RNA, 19 nt, Artificial Sequence
  Description of Artificial Sequence: Synthetic oligonucleotide
cgcacaagccagccacgga

SEQ ID NO: 1015897 - RNA, 19 nt, Artificial Sequence
  Description of Artificial Sequence: Synthetic oligonucleotide
cggggcuugcuauuugaau

SEQ ID NO: 1015898 - RNA, 19 nt, Artificial Sequence
  Description of Artificial Sequence: Synthetic oligonucleotide
cgguugggaacaguauggu

SEQ ID NO: 1015899 - RNA, 19 nt, Artificial Sequence
  Description of Artificial Sequence: Synthetic oligonucleotide
ccgauucauuagugccagu

SEQ ID NO: 1015900 - RNA, 19 nt, Artificial Sequence
  Description of Artificial Sequence: Synthetic oligonucleotide
cggagcgaccuggguggga

SEQ ID NO: 1015901 - RNA, 19 nt, Artificial Sequence
  Description of Artificial Sequence: Synthetic oligonucleotide
ccccagaccuugggaucuu

SEQ ID NO: 1015902 - RNA, 19 nt, Artificial Sequence
  Description of Artificial Sequence: Synthetic oligonucleotide
uguacgaacaucaacaugg

SEQ ID NO: 1015903 - RNA, 19 nt, Artificial Sequence
  Description of Artificial Sequence: Synthetic oligonucleotide
aaugcaaccauauaguaag

SEQ ID NO: 1015904 - RNA, 19 nt, Artificial Sequence
  Description of Artificial Sequence: Synthetic oligonucleotide
aguuauauaaugugggucc

SEQ ID NO: 1015905 - RNA, 19 nt, Artificial Sequence
  Description of Artificial Sequence: Synthetic oligonucleotide
aauccuucuauaugcaucc

SEQ ID NO: 1015906 - RNA, 19 nt, Artificial Sequence
  Description of Artificial Sequence: Synthetic oligonucleotide
ugaaguuauauaauguggg

SEQ ID NO: 1015907 - RNA, 19 nt, Artificial Sequence
  Description of Artificial Sequence: Synthetic oligonucleotide
uuaauaaauuguaugcccg

SEQ ID NO: 1015908 - RNA, 19 nt, Artificial Sequence
  Description of Artificial Sequence: Synthetic oligonucleotide
auguaugcuauacaaagcc

SEQ ID NO: 1015909 - RNA, 19 nt, Artificial Sequence
  Description of Artificial Sequence: Synthetic oligonucleotide
uauacauagacccaucacc

SEQ ID NO: 1015910 - RNA, 19 nt, Artificial Sequence
  Description of Artificial Sequence: Synthetic oligonucleotide
uugaaguuauauaaugugg

SEQ ID NO: 1015911 - RNA, 19 nt, Artificial Sequence
  Description of Artificial Sequence: Synthetic oligonucleotide
ucuucuaugaaacaggaaa

SEQ ID NO: 1015912 - RNA, 19 nt, Artificial Sequence
  Description of Artificial Sequence: Synthetic oligonucleotide
aacaauauguaugcuauac

SEQ ID NO: 1015913 - RNA, 19 nt, Artificial Sequence
  Description of Artificial Sequence: Synthetic oligonucleotide
gauaugagguacaauaugg

SEQ ID NO: 1015914 - RNA, 19 nt, Artificial Sequence
  Description of Artificial Sequence: Synthetic oligonucleotide
ucuuaguaaacaccgagcc

SEQ ID NO: 1015915 - RNA, 19 nt, Artificial Sequence
  Description of Artificial Sequence: Synthetic oligonucleotide
aagauaguaugauugcuag

SEQ ID NO: 1015916 - RNA, 19 nt, Artificial Sequence
  Description of Artificial Sequence: Synthetic oligonucleotide
uccccaaugacuuaugagg

SEQ ID NO: 1015917 - RNA, 19 nt, Artificial Sequence
  Description of Artificial Sequence: Synthetic oligonucleotide
ucuauaugcauccuguucu

SEQ ID NO: 1015918 - RNA, 19 nt, Artificial Sequence
  Description of Artificial Sequence: Synthetic oligonucleotide
uuguguacgaacaucaaca

SEQ ID NO: 1015919 - RNA, 19 nt, Artificial Sequence
  Description of Artificial Sequence: Synthetic oligonucleotide
aaguauagaguacccgacc

SEQ ID NO: 1015920 - RNA, 19 nt, Artificial Sequence
  Description of Artificial Sequence: Synthetic oligonucleotide
aauucuacccagcaacuag

SEQ ID NO: 1015921 - RNA, 19 nt, Artificial Sequence
  Description of Artificial Sequence: Synthetic oligonucleotide
uggagaaauuucuacacgg

SEQ ID NO: 1015922 - RNA, 19 nt, Artificial Sequence
  Description of Artificial Sequence: Synthetic oligonucleotide
aacagauuuauaacaacac

SEQ ID NO: 1015923 - RNA, 19 nt, Artificial Sequence
  Description of Artificial Sequence: Synthetic oligonucleotide
aauaucauaguaucuuggu

SEQ ID NO: 1015924 - RNA, 19 nt, Artificial Sequence
  Description of Artificial Sequence: Synthetic oligonucleotide
ucuuaagacuaaaugaacu

SEQ ID NO: 1015925 - RNA, 19 nt, Artificial Sequence
  Description of Artificial Sequence: Synthetic oligonucleotide
auaacuauaaagaauguca

SEQ ID NO: 1015926 - RNA, 19 nt, Artificial Sequence
  Description of Artificial Sequence: Synthetic oligonucleotide
uucauuuacuauaugcccc

SEQ ID NO: 1015927 - RNA, 19 nt, Artificial Sequence
  Description of Artificial Sequence: Synthetic oligonucleotide
agugauaugagguacaaua

SEQ ID NO: 1015928 - RNA, 19 nt, Artificial Sequence
  Description of Artificial Sequence: Synthetic oligonucleotide
uguauguaaauuuggaguc

SEQ ID NO: 1015929 - RNA, 19 nt, Artificial Sequence
  Description of Artificial Sequence: Synthetic oligonucleotide
aacuccccuauacauagac

SEQ ID NO: 1015930 - RNA, 19 nt, Artificial Sequence
  Description of Artificial Sequence: Synthetic oligonucleotide
cuugaaguuauauaaugug

SEQ ID NO: 1015931 - RNA, 19 nt, Artificial Sequence
  Description of Artificial Sequence: Synthetic oligonucleotide
uaauaaauuguaugcccgg

SEQ ID NO: 1015932 - RNA, 19 nt, Artificial Sequence
  Description of Artificial Sequence: Synthetic oligonucleotide
cuagcuguauuuuacauuc

SEQ ID NO: 1015933 - RNA, 19 nt, Artificial Sequence
  Description of Artificial Sequence: Synthetic oligonucleotide
uuaugucacaccauaauaa

SEQ ID NO: 1015934 - RNA, 19 nt, Artificial Sequence
  Description of Artificial Sequence: Synthetic oligonucleotide
aaaucuaguuugcauccuc

SEQ ID NO: 1015935 - RNA, 19 nt, Artificial Sequence
  Description of Artificial Sequence: Synthetic oligonucleotide
aguguauguaaauuuggag

SEQ ID NO: 1015936 - RNA, 19 nt, Artificial Sequence
  Description of Artificial Sequence: Synthetic oligonucleotide
uacaauauggauuggaauu

SEQ ID NO: 1015937 - RNA, 19 nt, Artificial Sequence
  Description of Artificial Sequence: Synthetic oligonucleotide
ugucacaccauaauaacaa

SEQ ID NO: 1015938 - RNA, 19 nt, Artificial Sequence
  Description of Artificial Sequence: Synthetic oligonucleotide
aaauuagcuaagcauacua

SEQ ID NO: 1015939 - RNA, 19 nt, Artificial Sequence
  Description of Artificial Sequence: Synthetic oligonucleotide
uugagacaaacuaggaaag

SEQ ID NO: 1015940 - RNA, 19 nt, Artificial Sequence
  Description of Artificial Sequence: Synthetic oligonucleotide
ugauccaucauuugguaca

SEQ ID NO: 1015941 - RNA, 19 nt, Artificial Sequence
  Description of Artificial Sequence: Synthetic oligonucleotide
uguaugagaaaucuaguuu

SEQ ID NO: 1015942 - RNA, 19 nt, Artificial Sequence
  Description of Artificial Sequence: Synthetic oligonucleotide
aagaugaugacagaaugga

SEQ ID NO: 1015943 - RNA, 19 nt, Artificial Sequence
  Description of Artificial Sequence: Synthetic oligonucleotide
uuagguuguuucuaguuug

SEQ ID NO: 1015944 - RNA, 19 nt, Artificial Sequence
  Description of Artificial Sequence: Synthetic oligonucleotide
cuccccuauacauagaccc

SEQ ID NO: 1015945 - RNA, 19 nt, Artificial Sequence
  Description of Artificial Sequence: Synthetic oligonucleotide
auguguaaggcugugaauc

SEQ ID NO: 1015946 - RNA, 19 nt, Artificial Sequence
  Description of Artificial Sequence: Synthetic oligonucleotide
aguaagugaccuuuuaaga

SEQ ID NO: 1015947 - RNA, 19 nt, Artificial Sequence
  Description of Artificial Sequence: Synthetic oligonucleotide
uucuuaguaaacaccgagc

SEQ ID NO: 1015948 - RNA, 19 nt, Artificial Sequence
  Description of Artificial Sequence: Synthetic oligonucleotide
ugcuaggucauguuaagug

SEQ ID NO: 1015949 - RNA, 19 nt, Artificial Sequence
  Description of Artificial Sequence: Synthetic oligonucleotide
gaaagcgucagacucaaga

SEQ ID NO: 1015950 - RNA, 19 nt, Artificial Sequence
  Description of Artificial Sequence: Synthetic oligonucleotide
augcucuagaaaugcaacc

SEQ ID NO: 1015951 - RNA, 19 nt, Artificial Sequence
  Description of Artificial Sequence: Synthetic oligonucleotide
uccuuuucagugcucagag

SEQ ID NO: 1015952 - RNA, 19 nt, Artificial Sequence
  Description of Artificial Sequence: Synthetic oligonucleotide
agggucaauauauuuucac

SEQ ID NO: 1015953 - RNA, 19 nt, Artificial Sequence
  Description of Artificial Sequence: Synthetic oligonucleotide
uguuccauugauuuauacu

SEQ ID NO: 1015954 - RNA, 19 nt, Artificial Sequence
  Description of Artificial Sequence: Synthetic oligonucleotide
uguaugcuauacaaagccc

SEQ ID NO: 1015955 - RNA, 19 nt, Artificial Sequence
  Description of Artificial Sequence: Synthetic oligonucleotide
guaagugaccuuuuaagac

SEQ ID NO: 1015956 - RNA, 19 nt, Artificial Sequence
  Description of Artificial Sequence: Synthetic oligonucleotide
agaugaaccgcuugcacag

SEQ ID NO: 1015957 - RNA, 19 nt, Artificial Sequence
  Description of Artificial Sequence: Synthetic oligonucleotide
gguuacugcagcuuuauag

SEQ ID NO: 1015958 - RNA, 19 nt, Artificial Sequence
  Description of Artificial Sequence: Synthetic oligonucleotide
uaguaugauugcuagguca

SEQ ID NO: 1015959 - RNA, 19 nt, Artificial Sequence
  Description of Artificial Sequence: Synthetic oligonucleotide
auggauaugaacaauucug

SEQ ID NO: 1015960 - RNA, 19 nt, Artificial Sequence
  Description of Artificial Sequence: Synthetic oligonucleotide
uuuaauuuguauuccccaa

SEQ ID NO: 1015961 - RNA, 19 nt, Artificial Sequence
  Description of Artificial Sequence: Synthetic oligonucleotide
uucucuugucagaacgucg

SEQ ID NO: 1015962 - RNA, 19 nt, Artificial Sequence
  Description of Artificial Sequence: Synthetic oligonucleotide
acagauuuauaacaacacu

SEQ ID NO: 1015963 - RNA, 19 nt, Artificial Sequence
  Description of Artificial Sequence: Synthetic oligonucleotide
ucucuugucagaacgucgc

SEQ ID NO: 1015964 - RNA, 19 nt, Artificial Sequence
  Description of Artificial Sequence: Synthetic oligonucleotide
aggccaaacgguuauauga

SEQ ID NO: 1015965 - RNA, 19 nt, Artificial Sequence
  Description of Artificial Sequence: Synthetic oligonucleotide
uauaguaagucuugaaguu

SEQ ID NO: 1015966 - RNA, 19 nt, Artificial Sequence
  Description of Artificial Sequence: Synthetic oligonucleotide
uaaauuguaugcccgguau

SEQ ID NO: 1015967 - RNA, 19 nt, Artificial Sequence
  Description of Artificial Sequence: Synthetic oligonucleotide
aaagcgucagacucaagau

SEQ ID NO: 1015968 - RNA, 19 nt, Artificial Sequence
  Description of Artificial Sequence: Synthetic oligonucleotide
aacgucgcaagaugaugac

SEQ ID NO: 1015969 - RNA, 19 nt, Artificial Sequence
  Description of Artificial Sequence: Synthetic oligonucleotide
uauccaucuuuucugcacc

SEQ ID NO: 1015970 - RNA, 19 nt, Artificial Sequence
  Description of Artificial Sequence: Synthetic oligonucleotide
ucccaauagugauaugagg

SEQ ID NO: 1015971 - RNA, 19 nt, Artificial Sequence
  Description of Artificial Sequence: Synthetic oligonucleotide
ugcauccucaacauauuug

SEQ ID NO: 1015972 - RNA, 19 nt, Artificial Sequence
  Description of Artificial Sequence: Synthetic oligonucleotide
ucauuuacuauaugcccca

SEQ ID NO: 1015973 - RNA, 19 nt, Artificial Sequence
  Description of Artificial Sequence: Synthetic oligonucleotide
cauacuuucccaauaguga

SEQ ID NO: 1015974 - RNA, 19 nt, Artificial Sequence
  Description of Artificial Sequence: Synthetic oligonucleotide
uuauaugagggugggaaug

SEQ ID NO: 1015975 - RNA, 19 nt, Artificial Sequence
  Description of Artificial Sequence: Synthetic oligonucleotide
aaacgguuauaugagggug

SEQ ID NO: 1015976 - RNA, 19 nt, Artificial Sequence
  Description of Artificial Sequence: Synthetic oligonucleotide
uuuagguuguuucuaguuu

SEQ ID NO: 1015977 - RNA, 19 nt, Artificial Sequence
  Description of Artificial Sequence: Synthetic oligonucleotide
ugcuauacaaagcccaguc

SEQ ID NO: 1015978 - RNA, 19 nt, Artificial Sequence
  Description of Artificial Sequence: Synthetic oligonucleotide
acuauaugccccaaggcuc

SEQ ID NO: 1015979 - RNA, 19 nt, Artificial Sequence
  Description of Artificial Sequence: Synthetic oligonucleotide
uggauuggaagcaaguaua

SEQ ID NO: 1015980 - RNA, 19 nt, Artificial Sequence
  Description of Artificial Sequence: Synthetic oligonucleotide
ucaugggacggccuguuag

SEQ ID NO: 1015981 - RNA, 19 nt, Artificial Sequence
  Description of Artificial Sequence: Synthetic oligonucleotide
uucuauaugcauccuguuc

SEQ ID NO: 1015982 - RNA, 19 nt, Artificial Sequence
  Description of Artificial Sequence: Synthetic oligonucleotide
ucagaacgucgcaagauga

SEQ ID NO: 1015983 - RNA, 19 nt, Artificial Sequence
  Description of Artificial Sequence: Synthetic oligonucleotide
gaacucuuaugucacacca

SEQ ID NO: 1015984 - RNA, 19 nt, Artificial Sequence
  Description of Artificial Sequence: Synthetic oligonucleotide
aauaaauuguaugcccggu

SEQ ID NO: 1015985 - RNA, 19 nt, Artificial Sequence
  Description of Artificial Sequence: Synthetic oligonucleotide
aacgguuauaugagggugg

SEQ ID NO: 1015986 - RNA, 19 nt, Artificial Sequence
  Description of Artificial Sequence: Synthetic oligonucleotide
aagcgucagacucaagaug

SEQ ID NO: 1015987 - RNA, 19 nt, Artificial Sequence
  Description of Artificial Sequence: Synthetic oligonucleotide
uaugagguacaauauggau

SEQ ID NO: 1015988 - RNA, 19 nt, Artificial Sequence
  Description of Artificial Sequence: Synthetic oligonucleotide
gauaguaugauugcuaggu

SEQ ID NO: 1015989 - RNA, 19 nt, Artificial Sequence
  Description of Artificial Sequence: Synthetic oligonucleotide
uagcuaagcauacuauugu

SEQ ID NO: 1015990 - RNA, 19 nt, Artificial Sequence
  Description of Artificial Sequence: Synthetic oligonucleotide
auaguaugauugcuagguc

SEQ ID NO: 1015991 - RNA, 19 nt, Artificial Sequence
  Description of Artificial Sequence: Synthetic oligonucleotide
guuuuguucuaaucugucc

SEQ ID NO: 1015992 - RNA, 19 nt, Artificial Sequence
  Description of Artificial Sequence: Synthetic oligonucleotide
acuccuuaugucaucauuc

SEQ ID NO: 1015993 - RNA, 19 nt, Artificial Sequence
  Description of Artificial Sequence: Synthetic oligonucleotide
gugguugagacaaacuagg

SEQ ID NO: 1015994 - RNA, 19 nt, Artificial Sequence
  Description of Artificial Sequence: Synthetic oligonucleotide
cuugucagaacgucgcaag

SEQ ID NO: 1015995 - RNA, 19 nt, Artificial Sequence
  Description of Artificial Sequence: Synthetic oligonucleotide
uauuguguuuauuucugaa

SEQ ID NO: 1015996 - RNA, 19 nt, Artificial Sequence
  Description of Artificial Sequence: Synthetic oligonucleotide
uaugccccaaggcucauca

SEQ ID NO: 1015997 - RNA, 19 nt, Artificial Sequence
  Description of Artificial Sequence: Synthetic oligonucleotide
agauaguaugauugcuagg

SEQ ID NO: 1015998 - RNA, 19 nt, Artificial Sequence
  Description of Artificial Sequence: Synthetic oligonucleotide
cacauaauuaaugacuguc

SEQ ID NO: 1015999 - RNA, 19 nt, Artificial Sequence
  Description of Artificial Sequence: Synthetic oligonucleotide
uuauggaucuugguuacug

SEQ ID NO: 1016000 - RNA, 19 nt, Artificial Sequence
  Description of Artificial Sequence: Synthetic oligonucleotide
acauagcuuguguacgaac

SEQ ID NO: 1016001 - RNA, 19 nt, Artificial Sequence
  Description of Artificial Sequence: Synthetic oligonucleotide
ucuaguuugcauccucaac

SEQ ID NO: 1016002 - RNA, 19 nt, Artificial Sequence
  Description of Artificial Sequence: Synthetic oligonucleotide
cugguuuuguucuaaucug

SEQ ID NO: 1016003 - RNA, 19 nt, Artificial Sequence
  Description of Artificial Sequence: Synthetic oligonucleotide
acaauauguaugcuauaca

SEQ ID NO: 1016004 - RNA, 19 nt, Artificial Sequence
  Description of Artificial Sequence: Synthetic oligonucleotide
gucagacucaagaugaacc

SEQ ID NO: 1016005 - RNA, 19 nt, Artificial Sequence
  Description of Artificial Sequence: Synthetic oligonucleotide
auacuuucccaauagugau

SEQ ID NO: 1016006 - RNA, 19 nt, Artificial Sequence
  Description of Artificial Sequence: Synthetic oligonucleotide
auugcuaggucauguuaag

SEQ ID NO: 1016007 - RNA, 19 nt, Artificial Sequence
  Description of Artificial Sequence: Synthetic oligonucleotide
aaaauuagcuaagcauacu

SEQ ID NO: 1016008 - RNA, 19 nt, Artificial Sequence
  Description of Artificial Sequence: Synthetic oligonucleotide
uguaugcccgguauuuuca

SEQ ID NO: 1016009 - RNA, 19 nt, Artificial Sequence
  Description of Artificial Sequence: Synthetic oligonucleotide
auucuacccagcaacuagc

SEQ ID NO: 1016010 - RNA, 19 nt, Artificial Sequence
  Description of Artificial Sequence: Synthetic oligonucleotide
aauagugauaugagguaca

SEQ ID NO: 1016011 - RNA, 19 nt, Artificial Sequence
  Description of Artificial Sequence: Synthetic oligonucleotide
cuuguguacgaacaucaac

SEQ ID NO: 1016012 - RNA, 19 nt, Artificial Sequence
  Description of Artificial Sequence: Synthetic oligonucleotide
ugcucuagaaaugcaacca

SEQ ID NO: 1016013 - RNA, 19 nt, Artificial Sequence
  Description of Artificial Sequence: Synthetic oligonucleotide
aacaccgagccauuaugga

SEQ ID NO: 1016014 - RNA, 19 nt, Artificial Sequence
  Description of Artificial Sequence: Synthetic oligonucleotide
aauuguaugcccgguauuu

SEQ ID NO: 1016015 - RNA, 19 nt, Artificial Sequence
  Description of Artificial Sequence: Synthetic oligonucleotide
guaucuugguuacugcagc

SEQ ID NO: 1016016 - RNA, 19 nt, Artificial Sequence
  Description of Artificial Sequence: Synthetic oligonucleotide
uacccgaccagucuuugug

SEQ ID NO: 1016017 - RNA, 19 nt, Artificial Sequence
  Description of Artificial Sequence: Synthetic oligonucleotide
uauguaaauuuggagucac

SEQ ID NO: 1016018 - RNA, 19 nt, Artificial Sequence
  Description of Artificial Sequence: Synthetic oligonucleotide
caaguauagaguacccgac

SEQ ID NO: 1016019 - RNA, 19 nt, Artificial Sequence
  Description of Artificial Sequence: Synthetic oligonucleotide
aaaugcaaccauauaguaa

SEQ ID NO: 1016020 - RNA, 19 nt, Artificial Sequence
  Description of Artificial Sequence: Synthetic oligonucleotide
agcuaagcauacuauugug

SEQ ID NO: 1016021 - RNA, 19 nt, Artificial Sequence
  Description of Artificial Sequence: Synthetic oligonucleotide
auggauuggaagcaaguau

SEQ ID NO: 1016022 - RNA, 19 nt, Artificial Sequence
  Description of Artificial Sequence: Synthetic oligonucleotide
ugacuuaugagggucaaua

SEQ ID NO: 1016023 - RNA, 19 nt, Artificial Sequence
  Description of Artificial Sequence: Synthetic oligonucleotide
cauuauggaucuugguuac

SEQ ID NO: 1016024 - RNA, 19 nt, Artificial Sequence
  Description of Artificial Sequence: Synthetic oligonucleotide
aauuagcuaagcauacuau

SEQ ID NO: 1016025 - RNA, 19 nt, Artificial Sequence
  Description of Artificial Sequence: Synthetic oligonucleotide
ucaucauucaacuccccua

SEQ ID NO: 1016026 - RNA, 19 nt, Artificial Sequence
  Description of Artificial Sequence: Synthetic oligonucleotide
auaccagccaacaacucuc

SEQ ID NO: 1016027 - RNA, 19 nt, Artificial Sequence
  Description of Artificial Sequence: Synthetic oligonucleotide
uucaaggcauacuuuccca

SEQ ID NO: 1016028 - RNA, 19 nt, Artificial Sequence
  Description of Artificial Sequence: Synthetic oligonucleotide
ugacugcauaaauucuuag

SEQ ID NO: 1016029 - RNA, 19 nt, Artificial Sequence
  Description of Artificial Sequence: Synthetic oligonucleotide
ucauguuaaguguaugcuu

SEQ ID NO: 1016030 - RNA, 19 nt, Artificial Sequence
  Description of Artificial Sequence: Synthetic oligonucleotide
uaauguggguccuccaacu

SEQ ID NO: 1016031 - RNA, 19 nt, Artificial Sequence
  Description of Artificial Sequence: Synthetic oligonucleotide
uauagaguacccgaccagu

SEQ ID NO: 1016032 - RNA, 19 nt, Artificial Sequence
  Description of Artificial Sequence: Synthetic oligonucleotide
aaguguaugcuuaauuuua

SEQ ID NO: 1016033 - RNA, 19 nt, Artificial Sequence
  Description of Artificial Sequence: Synthetic oligonucleotide
aguaucuugguuacugcag

SEQ ID NO: 1016034 - RNA, 19 nt, Artificial Sequence
  Description of Artificial Sequence: Synthetic oligonucleotide
uucuacacgguccuuucuc

SEQ ID NO: 1016035 - RNA, 19 nt, Artificial Sequence
  Description of Artificial Sequence: Synthetic oligonucleotide
ugaccuuuuaagacucacu

SEQ ID NO: 1016036 - RNA, 19 nt, Artificial Sequence
  Description of Artificial Sequence: Synthetic oligonucleotide
aaccacuguaguagaggcc

SEQ ID NO: 1016037 - RNA, 19 nt, Artificial Sequence
  Description of Artificial Sequence: Synthetic oligonucleotide
ggucauguuaaguguaugc

SEQ ID NO: 1016038 - RNA, 19 nt, Artificial Sequence
  Description of Artificial Sequence: Synthetic oligonucleotide
gaaaugcaaccauauagua

SEQ ID NO: 1016039 - RNA, 19 nt, Artificial Sequence
  Description of Artificial Sequence: Synthetic oligonucleotide
auaucauaguaucuugguu

SEQ ID NO: 1016040 - RNA, 19 nt, Artificial Sequence
  Description of Artificial Sequence: Synthetic oligonucleotide
gguacauagcuuguguacg

SEQ ID NO: 1016041 - RNA, 19 nt, Artificial Sequence
  Description of Artificial Sequence: Synthetic oligonucleotide
ugauugcuaggucauguua

SEQ ID NO: 1016042 - RNA, 19 nt, Artificial Sequence
  Description of Artificial Sequence: Synthetic oligonucleotide
augcccgguauuuucaucu

SEQ ID NO: 1016043 - RNA, 19 nt, Artificial Sequence
  Description of Artificial Sequence: Synthetic oligonucleotide
ucauuaauucugacauuuc

SEQ ID NO: 1016044 - RNA, 19 nt, Artificial Sequence
  Description of Artificial Sequence: Synthetic oligonucleotide
uauggaucuugguuacuga

SEQ ID NO: 1016045 - RNA, 19 nt, Artificial Sequence
  Description of Artificial Sequence: Synthetic oligonucleotide
caucauuugguacauagcu

SEQ ID NO: 1016046 - RNA, 19 nt, Artificial Sequence
  Description of Artificial Sequence: Synthetic oligonucleotide
cauguuaaguguaugcuua

SEQ ID NO: 1016047 - RNA, 19 nt, Artificial Sequence
  Description of Artificial Sequence: Synthetic oligonucleotide
accauaauaacaauaugua

SEQ ID NO: 1016048 - RNA, 19 nt, Artificial Sequence
  Description of Artificial Sequence: Synthetic oligonucleotide
cauacuauuguguuuauuu

SEQ ID NO: 1016049 - RNA, 19 nt, Artificial Sequence
  Description of Artificial Sequence: Synthetic oligonucleotide
ugcaaccauauaguaagug

SEQ ID NO: 1016050 - RNA, 19 nt, Artificial Sequence
  Description of Artificial Sequence: Synthetic oligonucleotide
agacuaaaugaacucuuau

SEQ ID NO: 1016051 - RNA, 19 nt, Artificial Sequence
  Description of Artificial Sequence: Synthetic oligonucleotide
guauagaguacccgaccag

SEQ ID NO: 1016052 - RNA, 19 nt, Artificial Sequence
  Description of Artificial Sequence: Synthetic oligonucleotide
aaauuguaugcccgguauu

SEQ ID NO: 1016053 - RNA, 19 nt, Artificial Sequence
  Description of Artificial Sequence: Synthetic oligonucleotide
gaaguuauauaaugugggu

SEQ ID NO: 1016054 - RNA, 19 nt, Artificial Sequence
  Description of Artificial Sequence: Synthetic oligonucleotide
gucagaacgucgcaagaug

SEQ ID NO: 1016055 - RNA, 19 nt, Artificial Sequence
  Description of Artificial Sequence: Synthetic oligonucleotide
gaacaauucugaugguauc

SEQ ID NO: 1016056 - RNA, 19 nt, Artificial Sequence
  Description of Artificial Sequence: Synthetic oligonucleotide
cuucuaugaaacaggaaaa

SEQ ID NO: 1016057 - RNA, 19 nt, Artificial Sequence
  Description of Artificial Sequence: Synthetic oligonucleotide
cuuaugucaucauucaacu

SEQ ID NO: 1016058 - RNA, 19 nt, Artificial Sequence
  Description of Artificial Sequence: Synthetic oligonucleotide
ucuacacgguccuuucucu

SEQ ID NO: 1016059 - RNA, 19 nt, Artificial Sequence
  Description of Artificial Sequence: Synthetic oligonucleotide
uucagugcucagagcgugg

SEQ ID NO: 1016060 - RNA, 19 nt, Artificial Sequence
  Description of Artificial Sequence: Synthetic oligonucleotide
acuagcuguauuuuacauu

SEQ ID NO: 1016061 - RNA, 19 nt, Artificial Sequence
  Description of Artificial Sequence: Synthetic oligonucleotide
uacacgguccuuucucuug

SEQ ID NO: 1016062 - RNA, 19 nt, Artificial Sequence
  Description of Artificial Sequence: Synthetic oligonucleotide
uguucuaaucuguccucca

SEQ ID NO: 1016063 - RNA, 19 nt, Artificial Sequence
  Description of Artificial Sequence: Synthetic oligonucleotide
gccuugauccaucauuugg

SEQ ID NO: 1016064 - RNA, 19 nt, Artificial Sequence
  Description of Artificial Sequence: Synthetic oligonucleotide
ugguuacugaguccagaug

SEQ ID NO: 1016065 - RNA, 19 nt, Artificial Sequence
  Description of Artificial Sequence: Synthetic oligonucleotide
agcgucagacucaagauga

SEQ ID NO: 1016066 - RNA, 19 nt, Artificial Sequence
  Description of Artificial Sequence: Synthetic oligonucleotide
auaaauuguaugcccggua

SEQ ID NO: 1016067 - RNA, 19 nt, Artificial Sequence
  Description of Artificial Sequence: Synthetic oligonucleotide
gacucuggaaaccuguucu

SEQ ID NO: 1016068 - RNA, 19 nt, Artificial Sequence
  Description of Artificial Sequence: Synthetic oligonucleotide
uauggauuggaagcaagua

SEQ ID NO: 1016069 - RNA, 19 nt, Artificial Sequence
  Description of Artificial Sequence: Synthetic oligonucleotide
cuuuagcaauucuuauaac

SEQ ID NO: 1016070 - RNA, 19 nt, Artificial Sequence
  Description of Artificial Sequence: Synthetic oligonucleotide
gauugcuaggucauguuaa

SEQ ID NO: 1016071 - RNA, 19 nt, Artificial Sequence
  Description of Artificial Sequence: Synthetic oligonucleotide
uugucagaacgucgcaaga

SEQ ID NO: 1016072 - RNA, 19 nt, Artificial Sequence
  Description of Artificial Sequence: Synthetic oligonucleotide
caccgagccauuauggauc

SEQ ID NO: 1016073 - RNA, 19 nt, Artificial Sequence
  Description of Artificial Sequence: Synthetic oligonucleotide
gcaaguauagaguacccga

SEQ ID NO: 1016074 - RNA, 19 nt, Artificial Sequence
  Description of Artificial Sequence: Synthetic oligonucleotide
agacaaacuaggaaagcgu

SEQ ID NO: 1016075 - RNA, 19 nt, Artificial Sequence
  Description of Artificial Sequence: Synthetic oligonucleotide
gaacgucgcaagaugauga

SEQ ID NO: 1016076 - RNA, 19 nt, Artificial Sequence
  Description of Artificial Sequence: Synthetic oligonucleotide
cauccucaacauauuuggc

SEQ ID NO: 1016077 - RNA, 19 nt, Artificial Sequence
  Description of Artificial Sequence: Synthetic oligonucleotide
uauuccccaaugacuuaug

SEQ ID NO: 1016078 - RNA, 19 nt, Artificial Sequence
  Description of Artificial Sequence: Synthetic oligonucleotide
gcaaccauauaguaaguga

SEQ ID NO: 1016079 - RNA, 19 nt, Artificial Sequence
  Description of Artificial Sequence: Synthetic oligonucleotide
agguuguuucuaguuuggc

SEQ ID NO: 1016080 - RNA, 19 nt, Artificial Sequence
  Description of Artificial Sequence: Synthetic oligonucleotide
auagcuuguguacgaacau

SEQ ID NO: 1016081 - RNA, 19 nt, Artificial Sequence
  Description of Artificial Sequence: Synthetic oligonucleotide
uugugccaagauaguauga

SEQ ID NO: 1016082 - RNA, 19 nt, Artificial Sequence
  Description of Artificial Sequence: Synthetic oligonucleotide
ucuugguuacugaguccag

SEQ ID NO: 1016083 - RNA, 19 nt, Artificial Sequence
  Description of Artificial Sequence: Synthetic oligonucleotide
cauaauuaaugacuguccu

SEQ ID NO: 1016084 - RNA, 19 nt, Artificial Sequence
  Description of Artificial Sequence: Synthetic oligonucleotide
cuuuauaguaagucuugaa

SEQ ID NO: 1016085 - RNA, 19 nt, Artificial Sequence
  Description of Artificial Sequence: Synthetic oligonucleotide
cugugcgcauuucaguccc

SEQ ID NO: 1016086 - RNA, 19 nt, Artificial Sequence
  Description of Artificial Sequence: Synthetic oligonucleotide
auagaguacccgaccaguc

SEQ ID NO: 1016087 - RNA, 19 nt, Artificial Sequence
  Description of Artificial Sequence: Synthetic oligonucleotide
uccccuauacauagaccca

SEQ ID NO: 1016088 - RNA, 19 nt, Artificial Sequence
  Description of Artificial Sequence: Synthetic oligonucleotide
ugcuuuacuccagggaaga

SEQ ID NO: 1016089 - RNA, 19 nt, Artificial Sequence
  Description of Artificial Sequence: Synthetic oligonucleotide
augagguacaauauggauu

SEQ ID NO: 1016090 - RNA, 19 nt, Artificial Sequence
  Description of Artificial Sequence: Synthetic oligonucleotide
agaacgucgcaagaugaug

SEQ ID NO: 1016091 - RNA, 19 nt, Artificial Sequence
  Description of Artificial Sequence: Synthetic oligonucleotide
uuaugagggucaauauauu

SEQ ID NO: 1016092 - RNA, 19 nt, Artificial Sequence
  Description of Artificial Sequence: Synthetic oligonucleotide
gguuacugaguccagaugu

SEQ ID NO: 1016093 - RNA, 19 nt, Artificial Sequence
  Description of Artificial Sequence: Synthetic oligonucleotide
auaugagguacaauaugga

SEQ ID NO: 1016094 - RNA, 19 nt, Artificial Sequence
  Description of Artificial Sequence: Synthetic oligonucleotide
acgguuauaugaggguggg

SEQ ID NO: 1016095 - RNA, 19 nt, Artificial Sequence
  Description of Artificial Sequence: Synthetic oligonucleotide
aguccuacaaagccuugau

SEQ ID NO: 1016096 - RNA, 19 nt, Artificial Sequence
  Description of Artificial Sequence: Synthetic oligonucleotide
uagcuguauuuuacauucc

SEQ ID NO: 1016097 - RNA, 19 nt, Artificial Sequence
  Description of Artificial Sequence: Synthetic oligonucleotide
aguaugauugcuaggucau

SEQ ID NO: 1016098 - RNA, 19 nt, Artificial Sequence
  Description of Artificial Sequence: Synthetic oligonucleotide
aaccgcuugcacagcuugc

SEQ ID NO: 1016099 - RNA, 19 nt, Artificial Sequence
  Description of Artificial Sequence: Synthetic oligonucleotide
uaguagaggcccacugacu

SEQ ID NO: 1016100 - RNA, 19 nt, Artificial Sequence
  Description of Artificial Sequence: Synthetic oligonucleotide
agacucaagaugaaccgcu

SEQ ID NO: 1016101 - RNA, 19 nt, Artificial Sequence
  Description of Artificial Sequence: Synthetic oligonucleotide
acuccccuauacauagacc

SEQ ID NO: 1016102 - RNA, 19 nt, Artificial Sequence
  Description of Artificial Sequence: Synthetic oligonucleotide
acucucaugggacggccug

SEQ ID NO: 1016103 - RNA, 19 nt, Artificial Sequence
  Description of Artificial Sequence: Synthetic oligonucleotide
guacgaacaucaacauggg

SEQ ID NO: 1016104 - RNA, 19 nt, Artificial Sequence
  Description of Artificial Sequence: Synthetic oligonucleotide
uacaaagcccagucccuga

SEQ ID NO: 1016105 - RNA, 19 nt, Artificial Sequence
  Description of Artificial Sequence: Synthetic oligonucleotide
acaccgagccauuauggau

SEQ ID NO: 1016106 - RNA, 19 nt, Artificial Sequence
  Description of Artificial Sequence: Synthetic oligonucleotide
cauucaacuccccuauaca

SEQ ID NO: 1016107 - RNA, 19 nt, Artificial Sequence
  Description of Artificial Sequence: Synthetic oligonucleotide
auaguaagucuugaaguua

SEQ ID NO: 1016108 - RNA, 19 nt, Artificial Sequence
  Description of Artificial Sequence: Synthetic oligonucleotide
acuguaugagaaaucuagu

SEQ ID NO: 1016109 - RNA, 19 nt, Artificial Sequence
  Description of Artificial Sequence: Synthetic oligonucleotide
ucgcaagaugaugacagaa

SEQ ID NO: 1016110 - RNA, 19 nt, Artificial Sequence
  Description of Artificial Sequence: Synthetic oligonucleotide
gggucaauauauuuucaca

SEQ ID NO: 1016111 - RNA, 19 nt, Artificial Sequence
  Description of Artificial Sequence: Synthetic oligonucleotide
ugucagaacgucgcaagau

SEQ ID NO: 1016112 - RNA, 19 nt, Artificial Sequence
  Description of Artificial Sequence: Synthetic oligonucleotide
ucuugucagaacgucgcaa

SEQ ID NO: 1016113 - RNA, 19 nt, Artificial Sequence
  Description of Artificial Sequence: Synthetic oligonucleotide
agcaacuagcuguauuuua

SEQ ID NO: 1016114 - RNA, 19 nt, Artificial Sequence
  Description of Artificial Sequence: Synthetic oligonucleotide
cuuuacuccagggaagaca

SEQ ID NO: 1016115 - RNA, 19 nt, Artificial Sequence
  Description of Artificial Sequence: Synthetic oligonucleotide
guacauagcuuguguacga

SEQ ID NO: 1016116 - RNA, 19 nt, Artificial Sequence
  Description of Artificial Sequence: Synthetic oligonucleotide
uucuaguuuggcagcuauc

SEQ ID NO: 1016117 - RNA, 19 nt, Artificial Sequence
  Description of Artificial Sequence: Synthetic oligonucleotide
gcuauacaaagcccagucc

SEQ ID NO: 1016118 - RNA, 19 nt, Artificial Sequence
  Description of Artificial Sequence: Synthetic oligonucleotide
agguacaauauggauugga

SEQ ID NO: 1016119 - RNA, 19 nt, Artificial Sequence
  Description of Artificial Sequence: Synthetic oligonucleotide
augaaccgcuugcacagcu

SEQ ID NO: 1016120 - RNA, 19 nt, Artificial Sequence
  Description of Artificial Sequence: Synthetic oligonucleotide
guuacugaguccagaugug

SEQ ID NO: 1016121 - RNA, 19 nt, Artificial Sequence
  Description of Artificial Sequence: Synthetic oligonucleotide
augucacaccauaauaaca

SEQ ID NO: 1016122 - RNA, 19 nt, Artificial Sequence
  Description of Artificial Sequence: Synthetic oligonucleotide
cagacucaagaugaaccgc

SEQ ID NO: 1016123 - RNA, 19 nt, Artificial Sequence
  Description of Artificial Sequence: Synthetic oligonucleotide
cgucgcaagaugaugacag

SEQ ID NO: 1016124 - RNA, 19 nt, Artificial Sequence
  Description of Artificial Sequence: Synthetic oligonucleotide
augaacaauucugauggua

SEQ ID NO: 1016125 - RNA, 19 nt, Artificial Sequence
  Description of Artificial Sequence: Synthetic oligonucleotide
cugacaucugacugcauaa

SEQ ID NO: 1016126 - RNA, 19 nt, Artificial Sequence
  Description of Artificial Sequence: Synthetic oligonucleotide
gcgcauuucagucccagug

SEQ ID NO: 1016127 - RNA, 19 nt, Artificial Sequence
  Description of Artificial Sequence: Synthetic oligonucleotide
auacaaagcccagucccug

SEQ ID NO: 1016128 - RNA, 19 nt, Artificial Sequence
  Description of Artificial Sequence: Synthetic oligonucleotide
gguugagacaaacuaggaa

SEQ ID NO: 1016129 - RNA, 19 nt, Artificial Sequence
  Description of Artificial Sequence: Synthetic oligonucleotide
cuaaucuguccuccaacca

SEQ ID NO: 1016130 - RNA, 19 nt, Artificial Sequence
  Description of Artificial Sequence: Synthetic oligonucleotide
auagugauaugagguacaa

SEQ ID NO: 1016131 - RNA, 19 nt, Artificial Sequence
  Description of Artificial Sequence: Synthetic oligonucleotide
uguuaaguguaugcuuaau

SEQ ID NO: 1016132 - RNA, 19 nt, Artificial Sequence
  Description of Artificial Sequence: Synthetic oligonucleotide
cccaguguauguaaauuug

SEQ ID NO: 1016133 - RNA, 19 nt, Artificial Sequence
  Description of Artificial Sequence: Synthetic oligonucleotide
guacaauauggauuggaau

SEQ ID NO: 1016134 - RNA, 19 nt, Artificial Sequence
  Description of Artificial Sequence: Synthetic oligonucleotide
agcucuacugcugauucaa

SEQ ID NO: 1016135 - RNA, 19 nt, Artificial Sequence
  Description of Artificial Sequence: Synthetic oligonucleotide
aguguaugcuuaauuuuau

SEQ ID NO: 1016136 - RNA, 19 nt, Artificial Sequence
  Description of Artificial Sequence: Synthetic oligonucleotide
auuuggagucacuccuuau

SEQ ID NO: 1016137 - RNA, 19 nt, Artificial Sequence
  Description of Artificial Sequence: Synthetic oligonucleotide
aacucuuaugucacaccau

SEQ ID NO: 1016138 - RNA, 19 nt, Artificial Sequence
  Description of Artificial Sequence: Synthetic oligonucleotide
agcaauucuuauaacuaua

SEQ ID NO: 1016139 - RNA, 19 nt, Artificial Sequence
  Description of Artificial Sequence: Synthetic oligonucleotide
cgugguugagacaaacuag

SEQ ID NO: 1016140 - RNA, 19 nt, Artificial Sequence
  Description of Artificial Sequence: Synthetic oligonucleotide
accgagccauuauggaucu

SEQ ID NO: 1016141 - RNA, 19 nt, Artificial Sequence
  Description of Artificial Sequence: Synthetic oligonucleotide
uaugcccgguauuuucauc

SEQ ID NO: 1016142 - RNA, 19 nt, Artificial Sequence
  Description of Artificial Sequence: Synthetic oligonucleotide
augauugcuaggucauguu

SEQ ID NO: 1016143 - RNA, 19 nt, Artificial Sequence
  Description of Artificial Sequence: Synthetic oligonucleotide
ggccaaacgguuauaugag

SEQ ID NO: 1016144 - RNA, 19 nt, Artificial Sequence
  Description of Artificial Sequence: Synthetic oligonucleotide
caugggaaggccaaacggu

SEQ ID NO: 1016145 - RNA, 19 nt, Artificial Sequence
  Description of Artificial Sequence: Synthetic oligonucleotide
cauuccugucacuguauga

SEQ ID NO: 1016146 - RNA, 19 nt, Artificial Sequence
  Description of Artificial Sequence: Synthetic oligonucleotide
cccgguauuuucaucugcc

SEQ ID NO: 1016147 - RNA, 19 nt, Artificial Sequence
  Description of Artificial Sequence: Synthetic oligonucleotide
uagcuuguguacgaacauc

SEQ ID NO: 1016148 - RNA, 19 nt, Artificial Sequence
  Description of Artificial Sequence: Synthetic oligonucleotide
caucaacaugggaaggcca

SEQ ID NO: 1016149 - RNA, 19 nt, Artificial Sequence
  Description of Artificial Sequence: Synthetic oligonucleotide
gucauguuaaguguaugcu

SEQ ID NO: 1016150 - RNA, 19 nt, Artificial Sequence
  Description of Artificial Sequence: Synthetic oligonucleotide
uacauagcuuguguacgaa

SEQ ID NO: 1016151 - RNA, 19 nt, Artificial Sequence
  Description of Artificial Sequence: Synthetic oligonucleotide
uugcuaggucauguuaagu

SEQ ID NO: 1016152 - RNA, 19 nt, Artificial Sequence
  Description of Artificial Sequence: Synthetic oligonucleotide
ggaaugauaccagccaaca

SEQ ID NO: 1016153 - RNA, 19 nt, Artificial Sequence
  Description of Artificial Sequence: Synthetic oligonucleotide
ccauuauggaucuugguua

SEQ ID NO: 1016154 - RNA, 19 nt, Artificial Sequence
  Description of Artificial Sequence: Synthetic oligonucleotide
gacaucugacugcauaaau

SEQ ID NO: 1016155 - RNA, 19 nt, Artificial Sequence
  Description of Artificial Sequence: Synthetic oligonucleotide
uuacuccagggaagacagc

SEQ ID NO: 1016156 - RNA, 19 nt, Artificial Sequence
  Description of Artificial Sequence: Synthetic oligonucleotide
gguacaauauggauuggaa

SEQ ID NO: 1016157 - RNA, 19 nt, Artificial Sequence
  Description of Artificial Sequence: Synthetic oligonucleotide
gugaccuuuuaagacucac

SEQ ID NO: 1016158 - RNA, 19 nt, Artificial Sequence
  Description of Artificial Sequence: Synthetic oligonucleotide
ucucauacucugagcuuuu

SEQ ID NO: 1016159 - RNA, 19 nt, Artificial Sequence
  Description of Artificial Sequence: Synthetic oligonucleotide
ugcccgguauuuucaucug

SEQ ID NO: 1016160 - RNA, 19 nt, Artificial Sequence
  Description of Artificial Sequence: Synthetic oligonucleotide
cuguaugagaaaucuaguu

SEQ ID NO: 1016161 - RNA, 19 nt, Artificial Sequence
  Description of Artificial Sequence: Synthetic oligonucleotide
aggucauguuaaguguaug

SEQ ID NO: 1016162 - RNA, 19 nt, Artificial Sequence
  Description of Artificial Sequence: Synthetic oligonucleotide
caaacgguuauaugagggu

SEQ ID NO: 1016163 - RNA, 19 nt, Artificial Sequence
  Description of Artificial Sequence: Synthetic oligonucleotide
caacucucaugggacggcc

SEQ ID NO: 1016164 - RNA, 19 nt, Artificial Sequence
  Description of Artificial Sequence: Synthetic oligonucleotide
gauguguaaggcugugaau

SEQ ID NO: 1016165 - RNA, 19 nt, Artificial Sequence
  Description of Artificial Sequence: Synthetic oligonucleotide
ugcgcauuucagucccagu

SEQ ID NO: 1016166 - RNA, 19 nt, Artificial Sequence
  Description of Artificial Sequence: Synthetic oligonucleotide
agaugaugacagaauggau

SEQ ID NO: 1016167 - RNA, 19 nt, Artificial Sequence
  Description of Artificial Sequence: Synthetic oligonucleotide
aguuugcauccucaacaua

SEQ ID NO: 1016168 - RNA, 19 nt, Artificial Sequence
  Description of Artificial Sequence: Synthetic oligonucleotide
uucugaugguauccaucuu

SEQ ID NO: 1016169 - RNA, 19 nt, Artificial Sequence
  Description of Artificial Sequence: Synthetic oligonucleotide
aggaaagcgucagacucaa

SEQ ID NO: 1016170 - RNA, 19 nt, Artificial Sequence
  Description of Artificial Sequence: Synthetic oligonucleotide
auuauggaucuugguuacu

SEQ ID NO: 1016171 - RNA, 19 nt, Artificial Sequence
  Description of Artificial Sequence: Synthetic oligonucleotide
augcuauacaaagcccagu

SEQ ID NO: 1016172 - RNA, 19 nt, Artificial Sequence
  Description of Artificial Sequence: Synthetic oligonucleotide
augccccaaggcucaucac

SEQ ID NO: 1016173 - RNA, 19 nt, Artificial Sequence
  Description of Artificial Sequence: Synthetic oligonucleotide
gagcgugguugagacaaac

SEQ ID NO: 1016174 - RNA, 19 nt, Artificial Sequence
  Description of Artificial Sequence: Synthetic oligonucleotide
gugaauccuucuauaugca

SEQ ID NO: 1016175 - RNA, 19 nt, Artificial Sequence
  Description of Artificial Sequence: Synthetic oligonucleotide
augcuaacacaggaacaga

SEQ ID NO: 1016176 - RNA, 19 nt, Artificial Sequence
  Description of Artificial Sequence: Synthetic oligonucleotide
gcuaggucauguuaagugu

SEQ ID NO: 1016177 - RNA, 19 nt, Artificial Sequence
  Description of Artificial Sequence: Synthetic oligonucleotide
caucauucaacuccccuau

SEQ ID NO: 1016178 - RNA, 19 nt, Artificial Sequence
  Description of Artificial Sequence: Synthetic oligonucleotide
uagugauaugagguacaau

SEQ ID NO: 1016179 - RNA, 19 nt, Artificial Sequence
  Description of Artificial Sequence: Synthetic oligonucleotide
guuauauaauguggguccu

SEQ ID NO: 1016180 - RNA, 19 nt, Artificial Sequence
  Description of Artificial Sequence: Synthetic oligonucleotide
ccugugcgcauuucagucc

SEQ ID NO: 1016181 - RNA, 19 nt, Artificial Sequence
  Description of Artificial Sequence: Synthetic oligonucleotide
ugugcgcauuucaguccca

SEQ ID NO: 1016182 - RNA, 19 nt, Artificial Sequence
  Description of Artificial Sequence: Synthetic oligonucleotide
aguacccgaccagucuuug

SEQ ID NO: 1016183 - RNA, 19 nt, Artificial Sequence
  Description of Artificial Sequence: Synthetic oligonucleotide
gcgugguugagacaaacua

SEQ ID NO: 1016184 - RNA, 19 nt, Artificial Sequence
  Description of Artificial Sequence: Synthetic oligonucleotide
auauaguaagugaccuuuu

SEQ ID NO: 1016185 - RNA, 19 nt, Artificial Sequence
  Description of Artificial Sequence: Synthetic oligonucleotide
guauggauuggaagcaagu

SEQ ID NO: 1016186 - RNA, 19 nt, Artificial Sequence
  Description of Artificial Sequence: Synthetic oligonucleotide
gaaaucuaguuugcauccu

SEQ ID NO: 1016187 - RNA, 19 nt, Artificial Sequence
  Description of Artificial Sequence: Synthetic oligonucleotide
ccgguauuuucaucugccc

SEQ ID NO: 1016188 - RNA, 19 nt, Artificial Sequence
  Description of Artificial Sequence: Synthetic oligonucleotide
gucgcaagaugaugacaga

SEQ ID NO: 1016189 - RNA, 19 nt, Artificial Sequence
  Description of Artificial Sequence: Synthetic oligonucleotide
ggccuguuaguucagccaa

SEQ ID NO: 1016190 - RNA, 19 nt, Artificial Sequence
  Description of Artificial Sequence: Synthetic oligonucleotide
ugcucagagcgugguugag

SEQ ID NO: 1016191 - RNA, 19 nt, Artificial Sequence
  Description of Artificial Sequence: Synthetic oligonucleotide
agcgugguugagacaaacu

SEQ ID NO: 1016192 - RNA, 19 nt, Artificial Sequence
  Description of Artificial Sequence: Synthetic oligonucleotide
gaaaccuguucuuccuuuu

SEQ ID NO: 1016193 - RNA, 19 nt, Artificial Sequence
  Description of Artificial Sequence: Synthetic oligonucleotide
acgucgcaagaugaugaca

SEQ ID NO: 1016194 - RNA, 19 nt, Artificial Sequence
  Description of Artificial Sequence: Synthetic oligonucleotide
gugcgcauuucagucccag

SEQ ID NO: 1016195 - RNA, 19 nt, Artificial Sequence
  Description of Artificial Sequence: Synthetic oligonucleotide
ccaauagugauaugaggua

SEQ ID NO: 1016196 - RNA, 19 nt, Artificial Sequence
  Description of Artificial Sequence: Synthetic oligonucleotide
ccuucuauaugcauccugu

SEQ ID NO: 1016197 - RNA, 19 nt, Artificial Sequence
  Description of Artificial Sequence: Synthetic oligonucleotide
auaugagggugggaaugau

SEQ ID NO: 1016198 - RNA, 19 nt, Artificial Sequence
  Description of Artificial Sequence: Synthetic oligonucleotide
ccuuuucagugcucagagc

SEQ ID NO: 1016199 - RNA, 19 nt, Artificial Sequence
  Description of Artificial Sequence: Synthetic oligonucleotide
cucuugucagaacgucgca

SEQ ID NO: 1016200 - RNA, 19 nt, Artificial Sequence
  Description of Artificial Sequence: Synthetic oligonucleotide
augcaaccauauaguaagu

SEQ ID NO: 1016201 - RNA, 19 nt, Artificial Sequence
  Description of Artificial Sequence: Synthetic oligonucleotide
agugaccuuuuaagacuca

SEQ ID NO: 1016202 - RNA, 19 nt, Artificial Sequence
  Description of Artificial Sequence: Synthetic oligonucleotide
augacuuaugagggucaau

SEQ ID NO: 1016203 - RNA, 19 nt, Artificial Sequence
  Description of Artificial Sequence: Synthetic oligonucleotide
gcccgguauuuucaucugc

SEQ ID NO: 1016204 - RNA, 19 nt, Artificial Sequence
  Description of Artificial Sequence: Synthetic oligonucleotide
accagccaacaacucucau

SEQ ID NO: 1016205 - RNA, 19 nt, Artificial Sequence
  Description of Artificial Sequence: Synthetic oligonucleotide
ggagaaauuucuacacggu

SEQ ID NO: 1016206 - RNA, 19 nt, Artificial Sequence
  Description of Artificial Sequence: Synthetic oligonucleotide
uuucugcaccugugcgcau

SEQ ID NO: 1016207 - RNA, 19 nt, Artificial Sequence
  Description of Artificial Sequence: Synthetic oligonucleotide
cauuucagucccaguguau

SEQ ID NO: 1016208 - RNA, 19 nt, Artificial Sequence
  Description of Artificial Sequence: Synthetic oligonucleotide
uauaugccccaaggcucau

SEQ ID NO: 1016209 - RNA, 19 nt, Artificial Sequence
  Description of Artificial Sequence: Synthetic oligonucleotide
cuucuauaugcauccuguu

SEQ ID NO: 1016210 - RNA, 19 nt, Artificial Sequence
  Description of Artificial Sequence: Synthetic oligonucleotide
cccuauacauagacccauc

SEQ ID NO: 1016211 - RNA, 19 nt, Artificial Sequence
  Description of Artificial Sequence: Synthetic oligonucleotide
gugccaagauaguaugauu

SEQ ID NO: 1016212 - RNA, 19 nt, Artificial Sequence
  Description of Artificial Sequence: Synthetic oligonucleotide
cuacaaagccuugauccau

SEQ ID NO: 1016213 - RNA, 19 nt, Artificial Sequence
  Description of Artificial Sequence: Synthetic oligonucleotide
cagaacgucgcaagaugau

SEQ ID NO: 1016214 - RNA, 19 nt, Artificial Sequence
  Description of Artificial Sequence: Synthetic oligonucleotide
guaugcccgguauuuucau

SEQ ID NO: 1016215 - RNA, 19 nt, Artificial Sequence
  Description of Artificial Sequence: Synthetic oligonucleotide
cacuccuuaugucaucauu

SEQ ID NO: 1016216 - RNA, 19 nt, Artificial Sequence
  Description of Artificial Sequence: Synthetic oligonucleotide
cauuuacuauaugccccaa

SEQ ID NO: 1016217 - RNA, 19 nt, Artificial Sequence
  Description of Artificial Sequence: Synthetic oligonucleotide
caccugugcgcauuucagu

SEQ ID NO: 1016218 - RNA, 19 nt, Artificial Sequence
  Description of Artificial Sequence: Synthetic oligonucleotide
acacaggaacagauuuaua

SEQ ID NO: 1016219 - RNA, 19 nt, Artificial Sequence
  Description of Artificial Sequence: Synthetic oligonucleotide
cgucagacucaagaugaac

SEQ ID NO: 1016220 - RNA, 19 nt, Artificial Sequence
  Description of Artificial Sequence: Synthetic oligonucleotide
guacccgaccagucuuugu

SEQ ID NO: 1016221 - RNA, 19 nt, Artificial Sequence
  Description of Artificial Sequence: Synthetic oligonucleotide
gggcuuguauggauuggaa

SEQ ID NO: 1016222 - RNA, 19 nt, Artificial Sequence
  Description of Artificial Sequence: Synthetic oligonucleotide
ggaaagcgucagacucaag

SEQ ID NO: 1016223 - RNA, 19 nt, Artificial Sequence
  Description of Artificial Sequence: Synthetic oligonucleotide
agagcgugguugagacaaa

SEQ ID NO: 1016224 - RNA, 19 nt, Artificial Sequence
  Description of Artificial Sequence: Synthetic oligonucleotide
cuacacgguccuuucucuu

SEQ ID NO: 1016225 - RNA, 19 nt, Artificial Sequence
  Description of Artificial Sequence: Synthetic oligonucleotide
gaguacccgaccagucuuu

SEQ ID NO: 1016226 - RNA, 19 nt, Artificial Sequence
  Description of Artificial Sequence: Synthetic oligonucleotide
cugcaccugugcgcauuuc

SEQ ID NO: 1016227 - RNA, 19 nt, Artificial Sequence
  Description of Artificial Sequence: Synthetic oligonucleotide
cagcaacuagcuguauuuu

SEQ ID NO: 1016228 - RNA, 19 nt, Artificial Sequence
  Description of Artificial Sequence: Synthetic oligonucleotide
gaccagucuuuguguucuu

SEQ ID NO: 1016229 - RNA, 19 nt, Artificial Sequence
  Description of Artificial Sequence: Synthetic oligonucleotide
gcgucagacucaagaugaa

SEQ ID NO: 1016230 - RNA, 19 nt, Artificial Sequence
  Description of Artificial Sequence: Synthetic oligonucleotide
cgaccagucuuuguguucu

SEQ ID NO: 1016231 - RNA, 19 nt, Artificial Sequence
  Description of Artificial Sequence: Synthetic oligonucleotide
ccccuauacauagacccau

SEQ ID NO: 1016232 - RNA, 19 nt, Artificial Sequence
  Description of Artificial Sequence: Synthetic oligonucleotide
aaagauuugggcucgaagu

SEQ ID NO: 1016233 - RNA, 19 nt, Artificial Sequence
  Description of Artificial Sequence: Synthetic oligonucleotide
uuuaacuacaacucgauau

SEQ ID NO: 1016234 - RNA, 19 nt, Artificial Sequence
  Description of Artificial Sequence: Synthetic oligonucleotide
aacuauugcacgcacugcg

SEQ ID NO: 1016235 - RNA, 19 nt, Artificial Sequence
  Description of Artificial Sequence: Synthetic oligonucleotide
uguauuaugcauaaauuuc

SEQ ID NO: 1016236 - RNA, 19 nt, Artificial Sequence
  Description of Artificial Sequence: Synthetic oligonucleotide
acuagguugaacugaaugg

SEQ ID NO: 1016237 - RNA, 19 nt, Artificial Sequence
  Description of Artificial Sequence: Synthetic oligonucleotide
auuaggaacuauugcacgc

SEQ ID NO: 1016238 - RNA, 19 nt, Artificial Sequence
  Description of Artificial Sequence: Synthetic oligonucleotide
aaguauacauuuccuaaag

SEQ ID NO: 1016239 - RNA, 19 nt, Artificial Sequence
  Description of Artificial Sequence: Synthetic oligonucleotide
uuggaugugacacuugucc

SEQ ID NO: 1016240 - RNA, 19 nt, Artificial Sequence
  Description of Artificial Sequence: Synthetic oligonucleotide
acagauaccacggagcugc

SEQ ID NO: 1016241 - RNA, 19 nt, Artificial Sequence
  Description of Artificial Sequence: Synthetic oligonucleotide
ucaauacucuguuucaggg

SEQ ID NO: 1016242 - RNA, 19 nt, Artificial Sequence
  Description of Artificial Sequence: Synthetic oligonucleotide
uuuccgcucacuaacaaag

SEQ ID NO: 1016243 - RNA, 19 nt, Artificial Sequence
  Description of Artificial Sequence: Synthetic oligonucleotide
uccaaaugaaucaauacuc

SEQ ID NO: 1016244 - RNA, 19 nt, Artificial Sequence
  Description of Artificial Sequence: Synthetic oligonucleotide
uuacuauccauucuuugag

SEQ ID NO: 1016245 - RNA, 19 nt, Artificial Sequence
  Description of Artificial Sequence: Synthetic oligonucleotide
cauuauugcucuuauuagg

SEQ ID NO: 1016246 - RNA, 19 nt, Artificial Sequence
  Description of Artificial Sequence: Synthetic oligonucleotide
ugaaugggauagaagagag

SEQ ID NO: 1016247 - RNA, 19 nt, Artificial Sequence
  Description of Artificial Sequence: Synthetic oligonucleotide
ucauuauugcucuuauuag

SEQ ID NO: 1016248 - RNA, 19 nt, Artificial Sequence
  Description of Artificial Sequence: Synthetic oligonucleotide
ugggauagaagagaggccg

SEQ ID NO: 1016249 - RNA, 19 nt, Artificial Sequence
  Description of Artificial Sequence: Synthetic oligonucleotide
aaugaaucaauacucuguu

SEQ ID NO: 1016250 - RNA, 19 nt, Artificial Sequence
  Description of Artificial Sequence: Synthetic oligonucleotide
auugauagccccguuaacg

SEQ ID NO: 1016251 - RNA, 19 nt, Artificial Sequence
  Description of Artificial Sequence: Synthetic oligonucleotide
uuaacuacaacucgauauc

SEQ ID NO: 1016252 - RNA, 19 nt, Artificial Sequence
  Description of Artificial Sequence: Synthetic oligonucleotide
ucucgauccauuaaacagc

SEQ ID NO: 1016253 - RNA, 19 nt, Artificial Sequence
  Description of Artificial Sequence: Synthetic oligonucleotide
uauugguagaagacagugg

SEQ ID NO: 1016254 - RNA, 19 nt, Artificial Sequence
  Description of Artificial Sequence: Synthetic oligonucleotide
aucuauugaaagugucucc

SEQ ID NO: 1016255 - RNA, 19 nt, Artificial Sequence
  Description of Artificial Sequence: Synthetic oligonucleotide
uuuguauuaugcauaaauu

SEQ ID NO: 1016256 - RNA, 19 nt, Artificial Sequence
  Description of Artificial Sequence: Synthetic oligonucleotide
ugcguugucaaagauuugg

SEQ ID NO: 1016257 - RNA, 19 nt, Artificial Sequence
  Description of Artificial Sequence: Synthetic oligonucleotide
ucgauaucuugcaagagac

SEQ ID NO: 1016258 - RNA, 19 nt, Artificial Sequence
  Description of Artificial Sequence: Synthetic oligonucleotide
aacgugguaaccauuaaug

SEQ ID NO: 1016259 - RNA, 19 nt, Artificial Sequence
  Description of Artificial Sequence: Synthetic oligonucleotide
acgugguaaccauuaaugc

SEQ ID NO: 1016260 - RNA, 19 nt, Artificial Sequence
  Description of Artificial Sequence: Synthetic oligonucleotide
uucuuuaacuacaacucga

SEQ ID NO: 1016261 - RNA, 19 nt, Artificial Sequence
  Description of Artificial Sequence: Synthetic oligonucleotide
uuguauuaugcauaaauuu

SEQ ID NO: 1016262 - RNA, 19 nt, Artificial Sequence
  Description of Artificial Sequence: Synthetic oligonucleotide
uacucugauaccuggaccc

SEQ ID NO: 1016263 - RNA, 19 nt, Artificial Sequence
  Description of Artificial Sequence: Synthetic oligonucleotide
uucacuagcguuuccuggg

SEQ ID NO: 1016264 - RNA, 19 nt, Artificial Sequence
  Description of Artificial Sequence: Synthetic oligonucleotide
uuauugguagaagacagug

SEQ ID NO: 1016265 - RNA, 19 nt, Artificial Sequence
  Description of Artificial Sequence: Synthetic oligonucleotide
cauauuuccgcucacuaac

SEQ ID NO: 1016266 - RNA, 19 nt, Artificial Sequence
  Description of Artificial Sequence: Synthetic oligonucleotide
uggaaauuucccucaagag

SEQ ID NO: 1016267 - RNA, 19 nt, Artificial Sequence
  Description of Artificial Sequence: Synthetic oligonucleotide
uuugaaugaaggcuugggu

SEQ ID NO: 1016268 - RNA, 19 nt, Artificial Sequence
  Description of Artificial Sequence: Synthetic oligonucleotide
aacucgauaucuugcaaga

SEQ ID NO: 1016269 - RNA, 19 nt, Artificial Sequence
  Description of Artificial Sequence: Synthetic oligonucleotide
uuuugaaugaaggcuuggg

SEQ ID NO: 1016270 - RNA, 19 nt, Artificial Sequence
  Description of Artificial Sequence: Synthetic oligonucleotide
auuaucaaagugcugcaga

SEQ ID NO: 1016271 - RNA, 19 nt, Artificial Sequence
  Description of Artificial Sequence: Synthetic oligonucleotide
aguauuggacugcaaauca

SEQ ID NO: 1016272 - RNA, 19 nt, Artificial Sequence
  Description of Artificial Sequence: Synthetic oligonucleotide
uuguuauuauaucuaagua

SEQ ID NO: 1016273 - RNA, 19 nt, Artificial Sequence
  Description of Artificial Sequence: Synthetic oligonucleotide
caugcguacagccacgucc

SEQ ID NO: 1016274 - RNA, 19 nt, Artificial Sequence
  Description of Artificial Sequence: Synthetic oligonucleotide
uugaguacgucacuggcac

SEQ ID NO: 1016275 - RNA, 19 nt, Artificial Sequence
  Description of Artificial Sequence: Synthetic oligonucleotide
uacaguauuggacugcaaa

SEQ ID NO: 1016276 - RNA, 19 nt, Artificial Sequence
  Description of Artificial Sequence: Synthetic oligonucleotide
aauaggcacugacuuacug

SEQ ID NO: 1016277 - RNA, 19 nt, Artificial Sequence
  Description of Artificial Sequence: Synthetic oligonucleotide
ucuuugaguacgucacugg

SEQ ID NO: 1016278 - RNA, 19 nt, Artificial Sequence
  Description of Artificial Sequence: Synthetic oligonucleotide
agcauuccgagacugcugg

SEQ ID NO: 1016279 - RNA, 19 nt, Artificial Sequence
  Description of Artificial Sequence: Synthetic oligonucleotide
acuagcguuuccuggggcc

SEQ ID NO: 1016280 - RNA, 19 nt, Artificial Sequence
  Description of Artificial Sequence: Synthetic oligonucleotide
uugcaagagacacugugca

SEQ ID NO: 1016281 - RNA, 19 nt, Artificial Sequence
  Description of Artificial Sequence: Synthetic oligonucleotide
ugugcaucgcugaaggucu

SEQ ID NO: 1016282 - RNA, 19 nt, Artificial Sequence
  Description of Artificial Sequence: Synthetic oligonucleotide
aaucaauacucuguuucag

SEQ ID NO: 1016283 - RNA, 19 nt, Artificial Sequence
  Description of Artificial Sequence: Synthetic oligonucleotide
auucacuagcguuuccugg

SEQ ID NO: 1016284 - RNA, 19 nt, Artificial Sequence
  Description of Artificial Sequence: Synthetic oligonucleotide
cucuuauuaggaacuauug

SEQ ID NO: 1016285 - RNA, 19 nt, Artificial Sequence
  Description of Artificial Sequence: Synthetic oligonucleotide
uuugaguacgucacuggca

SEQ ID NO: 1016286 - RNA, 19 nt, Artificial Sequence
  Description of Artificial Sequence: Synthetic oligonucleotide
uaaaguccaguuacuaggu

SEQ ID NO: 1016287 - RNA, 19 nt, Artificial Sequence
  Description of Artificial Sequence: Synthetic oligonucleotide
ugucuccaaaccuucacug

SEQ ID NO: 1016288 - RNA, 19 nt, Artificial Sequence
  Description of Artificial Sequence: Synthetic oligonucleotide
gauagccccguuaacgugg

SEQ ID NO: 1016289 - RNA, 19 nt, Artificial Sequence
  Description of Artificial Sequence: Synthetic oligonucleotide
uccauuaaacagcuuugca

SEQ ID NO: 1016290 - RNA, 19 nt, Artificial Sequence
  Description of Artificial Sequence: Synthetic oligonucleotide
uccaaaccuucacugagug

SEQ ID NO: 1016291 - RNA, 19 nt, Artificial Sequence
  Description of Artificial Sequence: Synthetic oligonucleotide
ucgagaucugguugaauag

SEQ ID NO: 1016292 - RNA, 19 nt, Artificial Sequence
  Description of Artificial Sequence: Synthetic oligonucleotide
ugggcucgaagucagacac

SEQ ID NO: 1016293 - RNA, 19 nt, Artificial Sequence
  Description of Artificial Sequence: Synthetic oligonucleotide
cucaagaguucacagcugc

SEQ ID NO: 1016294 - RNA, 19 nt, Artificial Sequence
  Description of Artificial Sequence: Synthetic oligonucleotide
auccauuaaacagcuuugc

SEQ ID NO: 1016295 - RNA, 19 nt, Artificial Sequence
  Description of Artificial Sequence: Synthetic oligonucleotide
uuuauugguagaagacagu

SEQ ID NO: 1016296 - RNA, 19 nt, Artificial Sequence
  Description of Artificial Sequence: Synthetic oligonucleotide
uacaacucgauaucuugca

SEQ ID NO: 1016297 - RNA, 19 nt, Artificial Sequence
  Description of Artificial Sequence: Synthetic oligonucleotide
aauccugaugaauccuucu

SEQ ID NO: 1016298 - RNA, 19 nt, Artificial Sequence
  Description of Artificial Sequence: Synthetic oligonucleotide
uaggcacugacuuacugga

SEQ ID NO: 1016299 - RNA, 19 nt, Artificial Sequence
  Description of Artificial Sequence: Synthetic oligonucleotide
cuuugaguacgucacuggc

SEQ ID NO: 1016300 - RNA, 19 nt, Artificial Sequence
  Description of Artificial Sequence: Synthetic oligonucleotide
auuauugcucuuauuagga

SEQ ID NO: 1016301 - RNA, 19 nt, Artificial Sequence
  Description of Artificial Sequence: Synthetic oligonucleotide
ucugaugcuagguuuuggu

SEQ ID NO: 1016302 - RNA, 19 nt, Artificial Sequence
  Description of Artificial Sequence: Synthetic oligonucleotide
aaccuagccuuuuauuggu

SEQ ID NO: 1016303 - RNA, 19 nt, Artificial Sequence
  Description of Artificial Sequence: Synthetic oligonucleotide
caacucgauaucuugcaag

SEQ ID NO: 1016304 - RNA, 19 nt, Artificial Sequence
  Description of Artificial Sequence: Synthetic oligonucleotide
uggaguuugucauggcugc

SEQ ID NO: 1016305 - RNA, 19 nt, Artificial Sequence
  Description of Artificial Sequence: Synthetic oligonucleotide
cucgaagucagacacacca

SEQ ID NO: 1016306 - RNA, 19 nt, Artificial Sequence
  Description of Artificial Sequence: Synthetic oligonucleotide
uucuguaacgacccgcacu

SEQ ID NO: 1016307 - RNA, 19 nt, Artificial Sequence
  Description of Artificial Sequence: Synthetic oligonucleotide
gauaccacggagcugcauc

SEQ ID NO: 1016308 - RNA, 19 nt, Artificial Sequence
  Description of Artificial Sequence: Synthetic oligonucleotide
ugaugcuagguuuugguuu

SEQ ID NO: 1016309 - RNA, 19 nt, Artificial Sequence
  Description of Artificial Sequence: Synthetic oligonucleotide
aguaagccuggcuccauuc

SEQ ID NO: 1016310 - RNA, 19 nt, Artificial Sequence
  Description of Artificial Sequence: Synthetic oligonucleotide
aguauacauuuccuaaagu

SEQ ID NO: 1016311 - RNA, 19 nt, Artificial Sequence
  Description of Artificial Sequence: Synthetic oligonucleotide
uugauagccccguuaacgu

SEQ ID NO: 1016312 - RNA, 19 nt, Artificial Sequence
  Description of Artificial Sequence: Synthetic oligonucleotide
auaccacggagcugcaucg

SEQ ID NO: 1016313 - RNA, 19 nt, Artificial Sequence
  Description of Artificial Sequence: Synthetic oligonucleotide
ugggcauucggaauagagu

SEQ ID NO: 1016314 - RNA, 19 nt, Artificial Sequence
  Description of Artificial Sequence: Synthetic oligonucleotide
acaguauuggacugcaaau

SEQ ID NO: 1016315 - RNA, 19 nt, Artificial Sequence
  Description of Artificial Sequence: Synthetic oligonucleotide
uucggaauagagugcguug

SEQ ID NO: 1016316 - RNA, 19 nt, Artificial Sequence
  Description of Artificial Sequence: Synthetic oligonucleotide
cuggcaucuauugaaagug

SEQ ID NO: 1016317 - RNA, 19 nt, Artificial Sequence
  Description of Artificial Sequence: Synthetic oligonucleotide
acugacuuacuggaguccg

SEQ ID NO: 1016318 - RNA, 19 nt, Artificial Sequence
  Description of Artificial Sequence: Synthetic oligonucleotide
ucucuuguuagcaccugga

SEQ ID NO: 1016319 - RNA, 19 nt, Artificial Sequence
  Description of Artificial Sequence: Synthetic oligonucleotide
ucacuaacaaagugcuuga

SEQ ID NO: 1016320 - RNA, 19 nt, Artificial Sequence
  Description of Artificial Sequence: Synthetic oligonucleotide
aucgagaucugguugaaua

SEQ ID NO: 1016321 - RNA, 19 nt, Artificial Sequence
  Description of Artificial Sequence: Synthetic oligonucleotide
gggcauucggaauagagug

SEQ ID NO: 1016322 - RNA, 19 nt, Artificial Sequence
  Description of Artificial Sequence: Synthetic oligonucleotide
ugacuuacuggaguccggg

SEQ ID NO: 1016323 - RNA, 19 nt, Artificial Sequence
  Description of Artificial Sequence: Synthetic oligonucleotide
uguuucuguaacgacccgc

SEQ ID NO: 1016324 - RNA, 19 nt, Artificial Sequence
  Description of Artificial Sequence: Synthetic oligonucleotide
acgacccgcacugucaugc

SEQ ID NO: 1016325 - RNA, 19 nt, Artificial Sequence
  Description of Artificial Sequence: Synthetic oligonucleotide
ucacuagcguuuccugggg

SEQ ID NO: 1016326 - RNA, 19 nt, Artificial Sequence
  Description of Artificial Sequence: Synthetic oligonucleotide
cugggcauucggaauagag

SEQ ID NO: 1016327 - RNA, 19 nt, Artificial Sequence
  Description of Artificial Sequence: Synthetic oligonucleotide
ucgguuugcgcugugggag

SEQ ID NO: 1016328 - RNA, 19 nt, Artificial Sequence
  Description of Artificial Sequence: Synthetic oligonucleotide
uaacgugguaaccauuaau

SEQ ID NO: 1016329 - RNA, 19 nt, Artificial Sequence
  Description of Artificial Sequence: Synthetic oligonucleotide
caucuauugaaagugucuc

SEQ ID NO: 1016330 - RNA, 19 nt, Artificial Sequence
  Description of Artificial Sequence: Synthetic oligonucleotide
acuucucgauccauuaaac

SEQ ID NO: 1016331 - RNA, 19 nt, Artificial Sequence
  Description of Artificial Sequence: Synthetic oligonucleotide
agaugaauaccacgagcug

SEQ ID NO: 1016332 - RNA, 19 nt, Artificial Sequence
  Description of Artificial Sequence: Synthetic oligonucleotide
uuaggaacuauugcacgca

SEQ ID NO: 1016333 - RNA, 19 nt, Artificial Sequence
  Description of Artificial Sequence: Synthetic oligonucleotide
uaucugguguggcaaacuc

SEQ ID NO: 1016334 - RNA, 19 nt, Artificial Sequence
  Description of Artificial Sequence: Synthetic oligonucleotide
uggccuguagccuuguccu

SEQ ID NO: 1016335 - RNA, 19 nt, Artificial Sequence
  Description of Artificial Sequence: Synthetic oligonucleotide
cuggaaauuucccucaaga

SEQ ID NO: 1016336 - RNA, 19 nt, Artificial Sequence
  Description of Artificial Sequence: Synthetic oligonucleotide
acuauccauucuuugagua

SEQ ID NO: 1016337 - RNA, 19 nt, Artificial Sequence
  Description of Artificial Sequence: Synthetic oligonucleotide
aguuacuagguugaacuga

SEQ ID NO: 1016338 - RNA, 19 nt, Artificial Sequence
  Description of Artificial Sequence: Synthetic oligonucleotide
cuaggugccaugcuggcuc

SEQ ID NO: 1016339 - RNA, 19 nt, Artificial Sequence
  Description of Artificial Sequence: Synthetic oligonucleotide
uguaacgacccgcacuguc

SEQ ID NO: 1016340 - RNA, 19 nt, Artificial Sequence
  Description of Artificial Sequence: Synthetic oligonucleotide
gauuugggcucgaagucag

SEQ ID NO: 1016341 - RNA, 19 nt, Artificial Sequence
  Description of Artificial Sequence: Synthetic oligonucleotide
aaaguuccucccugggcca

SEQ ID NO: 1016342 - RNA, 19 nt, Artificial Sequence
  Description of Artificial Sequence: Synthetic oligonucleotide
uccuccgacaugcguacag

SEQ ID NO: 1016343 - RNA, 19 nt, Artificial Sequence
  Description of Artificial Sequence: Synthetic oligonucleotide
guacucugauaccuggacc

SEQ ID NO: 1016344 - RNA, 19 nt, Artificial Sequence
  Description of Artificial Sequence: Synthetic oligonucleotide
ugcguuuaucuucucuuuc

SEQ ID NO: 1016345 - RNA, 19 nt, Artificial Sequence
  Description of Artificial Sequence: Synthetic oligonucleotide
uauuuccgcucacuaacaa

SEQ ID NO: 1016346 - RNA, 19 nt, Artificial Sequence
  Description of Artificial Sequence: Synthetic oligonucleotide
uacuauccauucuuugagu

SEQ ID NO: 1016347 - RNA, 19 nt, Artificial Sequence
  Description of Artificial Sequence: Synthetic oligonucleotide
ucccucaagaguucacagc

SEQ ID NO: 1016348 - RNA, 19 nt, Artificial Sequence
  Description of Artificial Sequence: Synthetic oligonucleotide
uagagugcguugucaaaga

SEQ ID NO: 1016349 - RNA, 19 nt, Artificial Sequence
  Description of Artificial Sequence: Synthetic oligonucleotide
uccuagacauugcaguuuu

SEQ ID NO: 1016350 - RNA, 19 nt, Artificial Sequence
  Description of Artificial Sequence: Synthetic oligonucleotide
aguuccauuggucccugca

SEQ ID NO: 1016351 - RNA, 19 nt, Artificial Sequence
  Description of Artificial Sequence: Synthetic oligonucleotide
cucgauaucuugcaagaga

SEQ ID NO: 1016352 - RNA, 19 nt, Artificial Sequence
  Description of Artificial Sequence: Synthetic oligonucleotide
ugauaccuggacccagaug

SEQ ID NO: 1016353 - RNA, 19 nt, Artificial Sequence
  Description of Artificial Sequence: Synthetic oligonucleotide
uccgacaugcguacagcca

SEQ ID NO: 1016354 - RNA, 19 nt, Artificial Sequence
  Description of Artificial Sequence: Synthetic oligonucleotide
uuaacgugguaaccauuaa

SEQ ID NO: 1016355 - RNA, 19 nt, Artificial Sequence
  Description of Artificial Sequence: Synthetic oligonucleotide
ugauagccccguuaacgug

SEQ ID NO: 1016356 - RNA, 19 nt, Artificial Sequence
  Description of Artificial Sequence: Synthetic oligonucleotide
uccucuugaauaggcacug

SEQ ID NO: 1016357 - RNA, 19 nt, Artificial Sequence
  Description of Artificial Sequence: Synthetic oligonucleotide
uuuguggggucaguggucu

SEQ ID NO: 1016358 - RNA, 19 nt, Artificial Sequence
  Description of Artificial Sequence: Synthetic oligonucleotide
uuugggcucgaagucagac

SEQ ID NO: 1016359 - RNA, 19 nt, Artificial Sequence
  Description of Artificial Sequence: Synthetic oligonucleotide
uucucaauauuagaaccua

SEQ ID NO: 1016360 - RNA, 19 nt, Artificial Sequence
  Description of Artificial Sequence: Synthetic oligonucleotide
aggccgacuggaaauuucc

SEQ ID NO: 1016361 - RNA, 19 nt, Artificial Sequence
  Description of Artificial Sequence: Synthetic oligonucleotide
ucuuuggaugugacacuug

SEQ ID NO: 1016362 - RNA, 19 nt, Artificial Sequence
  Description of Artificial Sequence: Synthetic oligonucleotide
cagaugaauaccacgagcu

SEQ ID NO: 1016363 - RNA, 19 nt, Artificial Sequence
  Description of Artificial Sequence: Synthetic oligonucleotide
ucggaauagagugcguugu

SEQ ID NO: 1016364 - RNA, 19 nt, Artificial Sequence
  Description of Artificial Sequence: Synthetic oligonucleotide
gaugaauaccacgagcugu

SEQ ID NO: 1016365 - RNA, 19 nt, Artificial Sequence
  Description of Artificial Sequence: Synthetic oligonucleotide
aucauugauagccccguua

SEQ ID NO: 1016366 - RNA, 19 nt, Artificial Sequence
  Description of Artificial Sequence: Synthetic oligonucleotide
uggcaucuauugaaagugu

SEQ ID NO: 1016367 - RNA, 19 nt, Artificial Sequence
  Description of Artificial Sequence: Synthetic oligonucleotide
uagccuuuuauugguagaa

SEQ ID NO: 1016368 - RNA, 19 nt, Artificial Sequence
  Description of Artificial Sequence: Synthetic oligonucleotide
ugaaccgggcuacccuucc

SEQ ID NO: 1016369 - RNA, 19 nt, Artificial Sequence
  Description of Artificial Sequence: Synthetic oligonucleotide
cuucucgauccauuaaaca

SEQ ID NO: 1016370 - RNA, 19 nt, Artificial Sequence
  Description of Artificial Sequence: Synthetic oligonucleotide
cgugguaaccauuaaugcc

SEQ ID NO: 1016371 - RNA, 19 nt, Artificial Sequence
  Description of Artificial Sequence: Synthetic oligonucleotide
caguuacuagguugaacug

SEQ ID NO: 1016372 - RNA, 19 nt, Artificial Sequence
  Description of Artificial Sequence: Synthetic oligonucleotide
augcguacagccacguccg

SEQ ID NO: 1016373 - RNA, 19 nt, Artificial Sequence
  Description of Artificial Sequence: Synthetic oligonucleotide
gugguaaccauuaaugccu

SEQ ID NO: 1016374 - RNA, 19 nt, Artificial Sequence
  Description of Artificial Sequence: Synthetic oligonucleotide
cauuccgagacugcugggc

SEQ ID NO: 1016375 - RNA, 19 nt, Artificial Sequence
  Description of Artificial Sequence: Synthetic oligonucleotide
cuccgacaugcguacagcc

SEQ ID NO: 1016376 - RNA, 19 nt, Artificial Sequence
  Description of Artificial Sequence: Synthetic oligonucleotide
cugaaugggauagaagaga

SEQ ID NO: 1016377 - RNA, 19 nt, Artificial Sequence
  Description of Artificial Sequence: Synthetic oligonucleotide
aguccaguuacuagguuga

SEQ ID NO: 1016378 - RNA, 19 nt, Artificial Sequence
  Description of Artificial Sequence: Synthetic oligonucleotide
guuaacgugguaaccauua

SEQ ID NO: 1016379 - RNA, 19 nt, Artificial Sequence
  Description of Artificial Sequence: Synthetic oligonucleotide
cugacuuacuggaguccgg

SEQ ID NO: 1016380 - RNA, 19 nt, Artificial Sequence
  Description of Artificial Sequence: Synthetic oligonucleotide
uucagcaagcaaugccacu

SEQ ID NO: 1016381 - RNA, 19 nt, Artificial Sequence
  Description of Artificial Sequence: Synthetic oligonucleotide
uuucuguaacgacccgcac

SEQ ID NO: 1016382 - RNA, 19 nt, Artificial Sequence
  Description of Artificial Sequence: Synthetic oligonucleotide
ugguaaccauuaaugccuc

SEQ ID NO: 1016383 - RNA, 19 nt, Artificial Sequence
  Description of Artificial Sequence: Synthetic oligonucleotide
ggugaaguacucugauacc

SEQ ID NO: 1016384 - RNA, 19 nt, Artificial Sequence
  Description of Artificial Sequence: Synthetic oligonucleotide
uguaucugguguggcaaac

SEQ ID NO: 1016385 - RNA, 19 nt, Artificial Sequence
  Description of Artificial Sequence: Synthetic oligonucleotide
acaacucgauaucuugcaa

SEQ ID NO: 1016386 - RNA, 19 nt, Artificial Sequence
  Description of Artificial Sequence: Synthetic oligonucleotide
guuucuguaacgacccgca

SEQ ID NO: 1016387 - RNA, 19 nt, Artificial Sequence
  Description of Artificial Sequence: Synthetic oligonucleotide
ucgaagucagacacaccau

SEQ ID NO: 1016388 - RNA, 19 nt, Artificial Sequence
  Description of Artificial Sequence: Synthetic oligonucleotide
gagagguccucgguuugcg

SEQ ID NO: 1016389 - RNA, 19 nt, Artificial Sequence
  Description of Artificial Sequence: Synthetic oligonucleotide
uauugcacgcacugcguuu

SEQ ID NO: 1016390 - RNA, 19 nt, Artificial Sequence
  Description of Artificial Sequence: Synthetic oligonucleotide
uaacgacccgcacugucau

SEQ ID NO: 1016391 - RNA, 19 nt, Artificial Sequence
  Description of Artificial Sequence: Synthetic oligonucleotide
uccauucacuagcguuucc

SEQ ID NO: 1016392 - RNA, 19 nt, Artificial Sequence
  Description of Artificial Sequence: Synthetic oligonucleotide
ccgcucacuaacaaagugc

SEQ ID NO: 1016393 - RNA, 19 nt, Artificial Sequence
  Description of Artificial Sequence: Synthetic oligonucleotide
accacggagcugcaucgag

SEQ ID NO: 1016394 - RNA, 19 nt, Artificial Sequence
  Description of Artificial Sequence: Synthetic oligonucleotide
aguacgucacuggcacuac

SEQ ID NO: 1016395 - RNA, 19 nt, Artificial Sequence
  Description of Artificial Sequence: Synthetic oligonucleotide
acucgauaucuugcaagag

SEQ ID NO: 1016396 - RNA, 19 nt, Artificial Sequence
  Description of Artificial Sequence: Synthetic oligonucleotide
auaucuugcaagagacacu

SEQ ID NO: 1016397 - RNA, 19 nt, Artificial Sequence
  Description of Artificial Sequence: Synthetic oligonucleotide
aacuacaacucgauaucuu

SEQ ID NO: 1016398 - RNA, 19 nt, Artificial Sequence
  Description of Artificial Sequence: Synthetic oligonucleotide
auuggacugcaaaucaaaa

SEQ ID NO: 1016399 - RNA, 19 nt, Artificial Sequence
  Description of Artificial Sequence: Synthetic oligonucleotide
aggugaaccgggcuacccu

SEQ ID NO: 1016400 - RNA, 19 nt, Artificial Sequence
  Description of Artificial Sequence: Synthetic oligonucleotide
uuggcagcauuccgagacu

SEQ ID NO: 1016401 - RNA, 19 nt, Artificial Sequence
  Description of Artificial Sequence: Synthetic oligonucleotide
cacuucucgauccauuaaa

SEQ ID NO: 1016402 - RNA, 19 nt, Artificial Sequence
  Description of Artificial Sequence: Synthetic oligonucleotide
acaugcguacagccacguc

SEQ ID NO: 1016403 - RNA, 19 nt, Artificial Sequence
  Description of Artificial Sequence: Synthetic oligonucleotide
ugagagguccucgguuugc

SEQ ID NO: 1016404 - RNA, 19 nt, Artificial Sequence
  Description of Artificial Sequence: Synthetic oligonucleotide
gacacaucaccagggccgc

SEQ ID NO: 1016405 - RNA, 19 nt, Artificial Sequence
  Description of Artificial Sequence: Synthetic oligonucleotide
uauuagaaccuagccuuuu

SEQ ID NO: 1016406 - RNA, 19 nt, Artificial Sequence
  Description of Artificial Sequence: Synthetic oligonucleotide
auucggaauagagugcguu

SEQ ID NO: 1016407 - RNA, 19 nt, Artificial Sequence
  Description of Artificial Sequence: Synthetic oligonucleotide
ugguugaauagcuguucuu

SEQ ID NO: 1016408 - RNA, 19 nt, Artificial Sequence
  Description of Artificial Sequence: Synthetic oligonucleotide
agguccucgguuugcgcug

SEQ ID NO: 1016409 - RNA, 19 nt, Artificial Sequence
  Description of Artificial Sequence: Synthetic oligonucleotide
cuacccuucccagaucuuc

SEQ ID NO: 1016410 - RNA, 19 nt, Artificial Sequence
  Description of Artificial Sequence: Synthetic oligonucleotide
accacgagcuguuucugua

SEQ ID NO: 1016411 - RNA, 19 nt, Artificial Sequence
  Description of Artificial Sequence: Synthetic oligonucleotide
guaacgacccgcacuguca

SEQ ID NO: 1016412 - RNA, 19 nt, Artificial Sequence
  Description of Artificial Sequence: Synthetic oligonucleotide
uaccacgagcuguuucugu

SEQ ID NO: 1016413 - RNA, 19 nt, Artificial Sequence
  Description of Artificial Sequence: Synthetic oligonucleotide
augaauaccacgagcuguu

SEQ ID NO: 1016414 - RNA, 19 nt, Artificial Sequence
  Description of Artificial Sequence: Synthetic oligonucleotide
agguugaacugaaugggau

SEQ ID NO: 1016415 - RNA, 19 nt, Artificial Sequence
  Description of Artificial Sequence: Synthetic oligonucleotide
ugcugggcauucggaauag

SEQ ID NO: 1016416 - RNA, 19 nt, Artificial Sequence
  Description of Artificial Sequence: Synthetic oligonucleotide
aacgacccgcacugucaug

SEQ ID NO: 1016417 - RNA, 19 nt, Artificial Sequence
  Description of Artificial Sequence: Synthetic oligonucleotide
acuauugcacgcacugcgu

SEQ ID NO: 1016418 - RNA, 19 nt, Artificial Sequence
  Description of Artificial Sequence: Synthetic oligonucleotide
cuggcacuaccuuccauga

SEQ ID NO: 1016419 - RNA, 19 nt, Artificial Sequence
  Description of Artificial Sequence: Synthetic oligonucleotide
uggcagcauuccgagacug

SEQ ID NO: 1016420 - RNA, 19 nt, Artificial Sequence
  Description of Artificial Sequence: Synthetic oligonucleotide
acaggugaaccgggcuacc

SEQ ID NO: 1016421 - RNA, 19 nt, Artificial Sequence
  Description of Artificial Sequence: Synthetic oligonucleotide
cucgauccauuaaacagcu

SEQ ID NO: 1016422 - RNA, 19 nt, Artificial Sequence
  Description of Artificial Sequence: Synthetic oligonucleotide
uccucgguuugcgcugugg

SEQ ID NO: 1016423 - RNA, 19 nt, Artificial Sequence
  Description of Artificial Sequence: Synthetic oligonucleotide
ugcucuuauuaggaacuau

SEQ ID NO: 1016424 - RNA, 19 nt, Artificial Sequence
  Description of Artificial Sequence: Synthetic oligonucleotide
cacugacuuacuggagucc

SEQ ID NO: 1016425 - RNA, 19 nt, Artificial Sequence
  Description of Artificial Sequence: Synthetic oligonucleotide
cuuuaacuacaacucgaua

SEQ ID NO: 1016426 - RNA, 19 nt, Artificial Sequence
  Description of Artificial Sequence: Synthetic oligonucleotide
gcguugucaaagauuuggg

SEQ ID NO: 1016427 - RNA, 19 nt, Artificial Sequence
  Description of Artificial Sequence: Synthetic oligonucleotide
guacgucacuggcacuacc

SEQ ID NO: 1016428 - RNA, 19 nt, Artificial Sequence
  Description of Artificial Sequence: Synthetic oligonucleotide
cacuagcguuuccuggggc

SEQ ID NO: 1016429 - RNA, 19 nt, Artificial Sequence
  Description of Artificial Sequence: Synthetic oligonucleotide
agccccguuaacgugguaa

SEQ ID NO: 1016430 - RNA, 19 nt, Artificial Sequence
  Description of Artificial Sequence: Synthetic oligonucleotide
ccauucuuugaguacguca

SEQ ID NO: 1016431 - RNA, 19 nt, Artificial Sequence
  Description of Artificial Sequence: Synthetic oligonucleotide
ccgacuggaaauuucccuc

SEQ ID NO: 1016432 - RNA, 19 nt, Artificial Sequence
  Description of Artificial Sequence: Synthetic oligonucleotide
ugaguacgucacuggcacu

SEQ ID NO: 1016433 - RNA, 19 nt, Artificial Sequence
  Description of Artificial Sequence: Synthetic oligonucleotide
accgggcuacccuucccag

SEQ ID NO: 1016434 - RNA, 19 nt, Artificial Sequence
  Description of Artificial Sequence: Synthetic oligonucleotide
gaaccgggcuacccuuccc

SEQ ID NO: 1016435 - RNA, 19 nt, Artificial Sequence
  Description of Artificial Sequence: Synthetic oligonucleotide
augcuagguuuugguuugc

SEQ ID NO: 1016436 - RNA, 19 nt, Artificial Sequence
  Description of Artificial Sequence: Synthetic oligonucleotide
ccgacaugcguacagccac

SEQ ID NO: 1016437 - RNA, 19 nt, Artificial Sequence
  Description of Artificial Sequence: Synthetic oligonucleotide
gguaaccauuaaugccucc

SEQ ID NO: 1016438 - RNA, 19 nt, Artificial Sequence
  Description of Artificial Sequence: Synthetic oligonucleotide
auaccacgagcuguuucug

SEQ ID NO: 1016439 - RNA, 19 nt, Artificial Sequence
  Description of Artificial Sequence: Synthetic oligonucleotide
auugcacgcacugcguuua

SEQ ID NO: 1016440 - RNA, 19 nt, Artificial Sequence
  Description of Artificial Sequence: Synthetic oligonucleotide
ggccaguacaguauuggac

SEQ ID NO: 1016441 - RNA, 19 nt, Artificial Sequence
  Description of Artificial Sequence: Synthetic oligonucleotide
ugcuagguuuugguuugcu

SEQ ID NO: 1016442 - RNA, 19 nt, Artificial Sequence
  Description of Artificial Sequence: Synthetic oligonucleotide
uccauucuuugaguacguc

SEQ ID NO: 1016443 - RNA, 19 nt, Artificial Sequence
  Description of Artificial Sequence: Synthetic oligonucleotide
cucuuguuagcaccuggaa

SEQ ID NO: 1016444 - RNA, 19 nt, Artificial Sequence
  Description of Artificial Sequence: Synthetic oligonucleotide
uggcacuaccuuccaugaa

SEQ ID NO: 1016445 - RNA, 19 nt, Artificial Sequence
  Description of Artificial Sequence: Synthetic oligonucleotide
aggaacuauugcacgcacu

SEQ ID NO: 1016446 - RNA, 19 nt, Artificial Sequence
  Description of Artificial Sequence: Synthetic oligonucleotide
gaguccggggcauugcuau

SEQ ID NO: 1016447 - RNA, 19 nt, Artificial Sequence
  Description of Artificial Sequence: Synthetic oligonucleotide
caguucuauccaguguauc

SEQ ID NO: 1016448 - RNA, 19 nt, Artificial Sequence
  Description of Artificial Sequence: Synthetic oligonucleotide
ggcaucuauugaaaguguc

SEQ ID NO: 1016449 - RNA, 19 nt, Artificial Sequence
  Description of Artificial Sequence: Synthetic oligonucleotide
caggugaaccgggcuaccc

SEQ ID NO: 1016450 - RNA, 19 nt, Artificial Sequence
  Description of Artificial Sequence: Synthetic oligonucleotide
ccucgguuugcgcuguggg

SEQ ID NO: 1016451 - RNA, 19 nt, Artificial Sequence
  Description of Artificial Sequence: Synthetic oligonucleotide
aguggucuuuugguuuugu

SEQ ID NO: 1016452 - RNA, 19 nt, Artificial Sequence
  Description of Artificial Sequence: Synthetic oligonucleotide
ccggcugagcagaauuucc

SEQ ID NO: 1016453 - RNA, 19 nt, Artificial Sequence
  Description of Artificial Sequence: Synthetic oligonucleotide
uugcucuuauuaggaacua

SEQ ID NO: 1016454 - RNA, 19 nt, Artificial Sequence
  Description of Artificial Sequence: Synthetic oligonucleotide
ggauagaagagaggccgac

SEQ ID NO: 1016455 - RNA, 19 nt, Artificial Sequence
  Description of Artificial Sequence: Synthetic oligonucleotide
ccaaaugaaucaauacucu

SEQ ID NO: 1016456 - RNA, 19 nt, Artificial Sequence
  Description of Artificial Sequence: Synthetic oligonucleotide
uaccuggacccagaugaau

SEQ ID NO: 1016457 - RNA, 19 nt, Artificial Sequence
  Description of Artificial Sequence: Synthetic oligonucleotide
cacagauaccacggagcug

SEQ ID NO: 1016458 - RNA, 19 nt, Artificial Sequence
  Description of Artificial Sequence: Synthetic oligonucleotide
uggaugcauccaucucuuc

SEQ ID NO: 1016459 - RNA, 19 nt, Artificial Sequence
  Description of Artificial Sequence: Synthetic oligonucleotide
ugaauaccacgagcuguuu

SEQ ID NO: 1016460 - RNA, 19 nt, Artificial Sequence
  Description of Artificial Sequence: Synthetic oligonucleotide
uagcguuuccuggggccug

SEQ ID NO: 1016461 - RNA, 19 nt, Artificial Sequence
  Description of Artificial Sequence: Synthetic oligonucleotide
gcuccuccgacaugcguac

SEQ ID NO: 1016462 - RNA, 19 nt, Artificial Sequence
  Description of Artificial Sequence: Synthetic oligonucleotide
ugcguacagccacguccgu

SEQ ID NO: 1016463 - RNA, 19 nt, Artificial Sequence
  Description of Artificial Sequence: Synthetic oligonucleotide
ucgauccauuaaacagcuu

SEQ ID NO: 1016464 - RNA, 19 nt, Artificial Sequence
  Description of Artificial Sequence: Synthetic oligonucleotide
uaccacggagcugcaucga

SEQ ID NO: 1016465 - RNA, 19 nt, Artificial Sequence
  Description of Artificial Sequence: Synthetic oligonucleotide
gcacgcacugcguuuaucu

SEQ ID NO: 1016466 - RNA, 19 nt, Artificial Sequence
  Description of Artificial Sequence: Synthetic oligonucleotide
ccucaagaguucacagcug

SEQ ID NO: 1016467 - RNA, 19 nt, Artificial Sequence
  Description of Artificial Sequence: Synthetic oligonucleotide
cccucaagaguucacagcu

SEQ ID NO: 1016468 - RNA, 19 nt, Artificial Sequence
  Description of Artificial Sequence: Synthetic oligonucleotide
gggccgcucaaggacacag

SEQ ID NO: 1016469 - RNA, 19 nt, Artificial Sequence
  Description of Artificial Sequence: Synthetic oligonucleotide
gccccguuaacgugguaac

SEQ ID NO: 1016470 - RNA, 19 nt, Artificial Sequence
  Description of Artificial Sequence: Synthetic oligonucleotide
cagaguaagccuggcucca

SEQ ID NO: 1016471 - RNA, 19 nt, Artificial Sequence
  Description of Artificial Sequence: Synthetic oligonucleotide
cacggagcugcaucgagau

SEQ ID NO: 1016472 - RNA, 19 nt, Artificial Sequence
  Description of Artificial Sequence: Synthetic oligonucleotide
auagccccguuaacguggu

SEQ ID NO: 1016473 - RNA, 19 nt, Artificial Sequence
  Description of Artificial Sequence: Synthetic oligonucleotide
ugcacgcacugcguuuauc

SEQ ID NO: 1016474 - RNA, 19 nt, Artificial Sequence
  Description of Artificial Sequence: Synthetic oligonucleotide
cccguuaacgugguaacca

SEQ ID NO: 1016475 - RNA, 19 nt, Artificial Sequence
  Description of Artificial Sequence: Synthetic oligonucleotide
uugcacgcacugcguuuau

SEQ ID NO: 1016476 - RNA, 19 nt, Artificial Sequence
  Description of Artificial Sequence: Synthetic oligonucleotide
agaguaagccuggcuccau

SEQ ID NO: 1016477 - RNA, 19 nt, Artificial Sequence
  Description of Artificial Sequence: Synthetic oligonucleotide
auuggucccugcagaguaa

SEQ ID NO: 1016478 - RNA, 19 nt, Artificial Sequence
  Description of Artificial Sequence: Synthetic oligonucleotide
guaucugguguggcaaacu

SEQ ID NO: 1016479 - RNA, 19 nt, Artificial Sequence
  Description of Artificial Sequence: Synthetic oligonucleotide
gguuugcgcugugggagcc

SEQ ID NO: 1016480 - RNA, 19 nt, Artificial Sequence
  Description of Artificial Sequence: Synthetic oligonucleotide
gccgacuggaaauuucccu

SEQ ID NO: 1016481 - RNA, 19 nt, Artificial Sequence
  Description of Artificial Sequence: Synthetic oligonucleotide
ugucagcccugaguucaau

SEQ ID NO: 1016482 - RNA, 19 nt, Artificial Sequence
  Description of Artificial Sequence: Synthetic oligonucleotide
gacaugcguacagccacgu

SEQ ID NO: 1016483 - RNA, 19 nt, Artificial Sequence
  Description of Artificial Sequence: Synthetic oligonucleotide
auaccuggacccagaugaa

SEQ ID NO: 1016484 - RNA, 19 nt, Artificial Sequence
  Description of Artificial Sequence: Synthetic oligonucleotide
agauaccacggagcugcau

SEQ ID NO: 1016485 - RNA, 19 nt, Artificial Sequence
  Description of Artificial Sequence: Synthetic oligonucleotide
ggccgacuggaaauuuccc

SEQ ID NO: 1016486 - RNA, 19 nt, Artificial Sequence
  Description of Artificial Sequence: Synthetic oligonucleotide
cgacaugcguacagccacg

SEQ ID NO: 1016487 - RNA, 19 nt, Artificial Sequence
  Description of Artificial Sequence: Synthetic oligonucleotide
auuugggcucgaagucaga

SEQ ID NO: 1016488 - RNA, 19 nt, Artificial Sequence
  Description of Artificial Sequence: Synthetic oligonucleotide
gcucuuauuaggaacuauu

SEQ ID NO: 1016489 - RNA, 19 nt, Artificial Sequence
  Description of Artificial Sequence: Synthetic oligonucleotide
cuauugcacgcacugcguu

SEQ ID NO: 1016490 - RNA, 19 nt, Artificial Sequence
  Description of Artificial Sequence: Synthetic oligonucleotide
caguggagcauucuccauu

SEQ ID NO: 1016491 - RNA, 19 nt, Artificial Sequence
  Description of Artificial Sequence: Synthetic oligonucleotide
aguccggggcauugcuauu

SEQ ID NO: 1016492 - RNA, 19 nt, Artificial Sequence
  Description of Artificial Sequence: Synthetic oligonucleotide
gugaaccgggcuacccuuc

SEQ ID NO: 1016493 - RNA, 19 nt, Artificial Sequence
  Description of Artificial Sequence: Synthetic oligonucleotide
cacugucaugccgcccuug

SEQ ID NO: 1016494 - RNA, 19 nt, Artificial Sequence
  Description of Artificial Sequence: Synthetic oligonucleotide
ccuccgacaugcguacagc

SEQ ID NO: 1016495 - RNA, 19 nt, Artificial Sequence
  Description of Artificial Sequence: Synthetic oligonucleotide
gggauagaagagaggccga

SEQ ID NO: 1016496 - RNA, 19 nt, Artificial Sequence
  Description of Artificial Sequence: Synthetic oligonucleotide
gucaaagauuugggcucga

SEQ ID NO: 1016497 - RNA, 19 nt, Artificial Sequence
  Description of Artificial Sequence: Synthetic oligonucleotide
cgcucacuaacaaagugcu

SEQ ID NO: 1016498 - RNA, 19 nt, Artificial Sequence
  Description of Artificial Sequence: Synthetic oligonucleotide
ccggggcauugcuauuugc

SEQ ID NO: 1016499 - RNA, 19 nt, Artificial Sequence
  Description of Artificial Sequence: Synthetic oligonucleotide
cuagcguuuccuggggccu

SEQ ID NO: 1016500 - RNA, 19 nt, Artificial Sequence
  Description of Artificial Sequence: Synthetic oligonucleotide
gcaucauugauagccccgu

SEQ ID NO: 1016501 - RNA, 19 nt, Artificial Sequence
  Description of Artificial Sequence: Synthetic oligonucleotide
accuagccuuuuauuggua

SEQ ID NO: 1016502 - RNA, 19 nt, Artificial Sequence
  Description of Artificial Sequence: Synthetic oligonucleotide
guacaguauuggacugcaa

SEQ ID NO: 1016503 - RNA, 19 nt, Artificial Sequence
  Description of Artificial Sequence: Synthetic oligonucleotide
cagauaccacggagcugca

SEQ ID NO: 1016504 - RNA, 19 nt, Artificial Sequence
  Description of Artificial Sequence: Synthetic oligonucleotide
ccccguuaacgugguaacc

SEQ ID NO: 1016505 - RNA, 19 nt, Artificial Sequence
  Description of Artificial Sequence: Synthetic oligonucleotide
ggugaaccgggcuacccuu

SEQ ID NO: 1016506 - RNA, 19 nt, Artificial Sequence
  Description of Artificial Sequence: Synthetic oligonucleotide
cugauaccuggacccagau

SEQ ID NO: 1016507 - RNA, 19 nt, Artificial Sequence
  Description of Artificial Sequence: Synthetic oligonucleotide
gccgcucaaggacacagau

SEQ ID NO: 1016508 - RNA, 19 nt, Artificial Sequence
  Description of Artificial Sequence: Synthetic oligonucleotide
gccacguccgucaucuucu

SEQ ID NO: 1016509 - RNA, 19 nt, Artificial Sequence
  Description of Artificial Sequence: Synthetic oligonucleotide
gcuagguuuugguuugcuu

SEQ ID NO: 1016510 - RNA, 19 nt, Artificial Sequence
  Description of Artificial Sequence: Synthetic oligonucleotide
ccaugaaugcuuguacugu

SEQ ID NO: 1016511 - RNA, 19 nt, Artificial Sequence
  Description of Artificial Sequence: Synthetic oligonucleotide
cgguuugcgcugugggagc

SEQ ID NO: 1016512 - RNA, 19 nt, Artificial Sequence
  Description of Artificial Sequence: Synthetic oligonucleotide
ccacggagcugcaucgaga

SEQ ID NO: 1016513 - RNA, 19 nt, Artificial Sequence
  Description of Artificial Sequence: Synthetic oligonucleotide
gcucgaagucagacacacc

SEQ ID NO: 1016514 - RNA, 19 nt, Artificial Sequence
  Description of Artificial Sequence: Synthetic oligonucleotide
guccaguuacuagguugaa

SEQ ID NO: 1016515 - RNA, 19 nt, Artificial Sequence
  Description of Artificial Sequence: Synthetic oligonucleotide
ccacgagcuguuucuguaa

SEQ ID NO: 1016516 - RNA, 19 nt, Artificial Sequence
  Description of Artificial Sequence: Synthetic oligonucleotide
guccucgguuugcgcugug

SEQ ID NO: 1016517 - RNA, 19 nt, Artificial Sequence
  Description of Artificial Sequence: Synthetic oligonucleotide
gaugagccuggcagggcuu

SEQ ID NO: 1016518 - RNA, 19 nt, Artificial Sequence
  Description of Artificial Sequence: Synthetic oligonucleotide
uagccccguuaacguggua

SEQ ID NO: 1016519 - RNA, 19 nt, Artificial Sequence
  Description of Artificial Sequence: Synthetic oligonucleotide
cacuaacaaagugcuugau

SEQ ID NO: 1016520 - RNA, 19 nt, Artificial Sequence
  Description of Artificial Sequence: Synthetic oligonucleotide
agggccgcucaaggacaca

SEQ ID NO: 1016521 - RNA, 19 nt, Artificial Sequence
  Description of Artificial Sequence: Synthetic oligonucleotide
caucauugauagccccguu

SEQ ID NO: 1016522 - RNA, 19 nt, Artificial Sequence
  Description of Artificial Sequence: Synthetic oligonucleotide
caugccgcccuugguuugu

SEQ ID NO: 1016523 - RNA, 19 nt, Artificial Sequence
  Description of Artificial Sequence: Synthetic oligonucleotide
gccugagagguccucgguu

SEQ ID NO: 1016524 - RNA, 19 nt, Artificial Sequence
  Description of Artificial Sequence: Synthetic oligonucleotide
ccguuaacgugguaaccau

SEQ ID NO: 1016525 - RNA, 19 nt, Artificial Sequence
  Description of Artificial Sequence: Synthetic oligonucleotide
ccaguucuauccaguguau

SEQ ID NO: 1016526 - RNA, 19 nt, Artificial Sequence
  Description of Artificial Sequence: Synthetic oligonucleotide
ccgcucaaggacacagaua

SEQ ID NO: 1016527 - RNA, 19 nt, Artificial Sequence
  Description of Artificial Sequence: Synthetic oligonucleotide
caucgagaucugguugaau

SEQ ID NO: 1016528 - RNA, 19 nt, Artificial Sequence
  Description of Artificial Sequence: Synthetic oligonucleotide
ccgggcuacccuucccaga

SEQ ID NO: 1016529 - RNA, 19 nt, Artificial Sequence
  Description of Artificial Sequence: Synthetic oligonucleotide
cuccuccgacaugcguaca

SEQ ID NO: 1016530 - RNA, 19 nt, Artificial Sequence
  Description of Artificial Sequence: Synthetic oligonucleotide
gcugggcauucggaauaga

SEQ ID NO: 1016531 - RNA, 19 nt, Artificial Sequence
  Description of Artificial Sequence: Synthetic oligonucleotide
ccucuugaauaggcacuga

SEQ ID NO: 1016532 - RNA, 19 nt, Artificial Sequence
  Description of Artificial Sequence: Synthetic oligonucleotide
ccgagacugcugggcauuc

SEQ ID NO: 1016533 - RNA, 19 nt, Artificial Sequence
  Description of Artificial Sequence: Synthetic oligonucleotide
gguccucgguuugcgcugu

SEQ ID NO: 1016534 - RNA, 19 nt, Artificial Sequence
  Description of Artificial Sequence: Synthetic oligonucleotide
ccauuggucccugcagagu

SEQ ID NO: 1016535 - RNA, 19 nt, Artificial Sequence
  Description of Artificial Sequence: Synthetic oligonucleotide
cguuaacgugguaaccauu

SEQ ID NO: 1016536 - RNA, 19 nt, Artificial Sequence
  Description of Artificial Sequence: Synthetic oligonucleotide
gcuacccuucccagaucuu

SEQ ID NO: 1016537 - RNA, 19 nt, Artificial Sequence
  Description of Artificial Sequence: Synthetic oligonucleotide
uuuacuaaaauccuggggu

SEQ ID NO: 1016538 - RNA, 19 nt, Artificial Sequence
  Description of Artificial Sequence: Synthetic oligonucleotide
uucguguuuacuaaaaucc

SEQ ID NO: 1016539 - RNA, 19 nt, Artificial Sequence
  Description of Artificial Sequence: Synthetic oligonucleotide
aaaccacacacacacacac

SEQ ID NO: 1016540 - RNA, 19 nt, Artificial Sequence
  Description of Artificial Sequence: Synthetic oligonucleotide
ucuuuggcaacuuuuauca

SEQ ID NO: 1016541 - RNA, 19 nt, Artificial Sequence
  Description of Artificial Sequence: Synthetic oligonucleotide
acacacacacacuaaaccc

SEQ ID NO: 1016542 - RNA, 19 nt, Artificial Sequence
  Description of Artificial Sequence: Synthetic oligonucleotide
uuuaaggaggaaaagggga

SEQ ID NO: 1016543 - RNA, 19 nt, Artificial Sequence
  Description of Artificial Sequence: Synthetic oligonucleotide
gauauuuaagcugugggcc

SEQ ID NO: 1016544 - RNA, 19 nt, Artificial Sequence
  Description of Artificial Sequence: Synthetic oligonucleotide
aagggguuagugcaauucc

SEQ ID NO: 1016545 - RNA, 19 nt, Artificial Sequence
  Description of Artificial Sequence: Synthetic oligonucleotide
acacacuaaacccucaaac

SEQ ID NO: 1016546 - RNA, 19 nt, Artificial Sequence
  Description of Artificial Sequence: Synthetic oligonucleotide
ucuauaucucuauauaaac

SEQ ID NO: 1016547 - RNA, 19 nt, Artificial Sequence
  Description of Artificial Sequence: Synthetic oligonucleotide
uuuaucacggccuuaauuu

SEQ ID NO: 1016548 - RNA, 19 nt, Artificial Sequence
  Description of Artificial Sequence: Synthetic oligonucleotide
auauuuaagcugugggccc

SEQ ID NO: 1016549 - RNA, 19 nt, Artificial Sequence
  Description of Artificial Sequence: Synthetic oligonucleotide
uucuuaaucucgaaaggcc

SEQ ID NO: 1016550 - RNA, 19 nt, Artificial Sequence
  Description of Artificial Sequence: Synthetic oligonucleotide
uucuacagcacccucgucc

SEQ ID NO: 1016551 - RNA, 19 nt, Artificial Sequence
  Description of Artificial Sequence: Synthetic oligonucleotide
accacacacacacacacac

SEQ ID NO: 1016552 - RNA, 19 nt, Artificial Sequence
  Description of Artificial Sequence: Synthetic oligonucleotide
cuuuaaggaggaaaagggg

SEQ ID NO: 1016553 - RNA, 19 nt, Artificial Sequence
  Description of Artificial Sequence: Synthetic oligonucleotide
gugauugcaguauaugggg

SEQ ID NO: 1016554 - RNA, 19 nt, Artificial Sequence
  Description of Artificial Sequence: Synthetic oligonucleotide
aagucugguggccacuggc

SEQ ID NO: 1016555 - RNA, 19 nt, Artificial Sequence
  Description of Artificial Sequence: Synthetic oligonucleotide
gacgguuaaggcaaggugg

SEQ ID NO: 1016556 - RNA, 19 nt, Artificial Sequence
  Description of Artificial Sequence: Synthetic oligonucleotide
ugucggggagcccagaggg

SEQ ID NO: 1016557 - RNA, 19 nt, Artificial Sequence
  Description of Artificial Sequence: Synthetic oligonucleotide
acagguacggcuucucccc

SEQ ID NO: 1016558 - RNA, 19 nt, Artificial Sequence
  Description of Artificial Sequence: Synthetic oligonucleotide
gaugacguguuauugcagc

SEQ ID NO: 1016559 - RNA, 19 nt, Artificial Sequence
  Description of Artificial Sequence: Synthetic oligonucleotide
aagcgaaccuugcagaugu

SEQ ID NO: 1016560 - RNA, 19 nt, Artificial Sequence
  Description of Artificial Sequence: Synthetic oligonucleotide
ucugaucuuggcuacauuc

SEQ ID NO: 1016561 - RNA, 19 nt, Artificial Sequence
  Description of Artificial Sequence: Synthetic oligonucleotide
ugugauauuuaagcugugg

SEQ ID NO: 1016562 - RNA, 19 nt, Artificial Sequence
  Description of Artificial Sequence: Synthetic oligonucleotide
cuggguuacagucagugcc

SEQ ID NO: 1016563 - RNA, 19 nt, Artificial Sequence
  Description of Artificial Sequence: Synthetic oligonucleotide
uaguugugcgcgaaggccg

SEQ ID NO: 1016564 - RNA, 19 nt, Artificial Sequence
  Description of Artificial Sequence: Synthetic oligonucleotide
aaucucgaaaggccgguag

SEQ ID NO: 1016565 - RNA, 19 nt, Artificial Sequence
  Description of Artificial Sequence: Synthetic oligonucleotide
acggccuuaauuuaaagaa

SEQ ID NO: 1016566 - RNA, 19 nt, Artificial Sequence
  Description of Artificial Sequence: Synthetic oligonucleotide
caaaaccacacacacacac

SEQ ID NO: 1016567 - RNA, 19 nt, Artificial Sequence
  Description of Artificial Sequence: Synthetic oligonucleotide
aaucgauccacauucuaua

SEQ ID NO: 1016568 - RNA, 19 nt, Artificial Sequence
  Description of Artificial Sequence: Synthetic oligonucleotide
ucuauauaaacugucuuua

SEQ ID NO: 1016569 - RNA, 19 nt, Artificial Sequence
  Description of Artificial Sequence: Synthetic oligonucleotide
cacacacacacacuaaacc

SEQ ID NO: 1016570 - RNA, 19 nt, Artificial Sequence
  Description of Artificial Sequence: Synthetic oligonucleotide
accgcugccugcuacauuc

SEQ ID NO: 1016571 - RNA, 19 nt, Artificial Sequence
  Description of Artificial Sequence: Synthetic oligonucleotide
ugaucggagcgcacgaagg

SEQ ID NO: 1016572 - RNA, 19 nt, Artificial Sequence
  Description of Artificial Sequence: Synthetic oligonucleotide
uucaggucguaguugugcg

SEQ ID NO: 1016573 - RNA, 19 nt, Artificial Sequence
  Description of Artificial Sequence: Synthetic oligonucleotide
agugaauuccacaauucuc

SEQ ID NO: 1016574 - RNA, 19 nt, Artificial Sequence
  Description of Artificial Sequence: Synthetic oligonucleotide
aagcaaacuggcgagccgg

SEQ ID NO: 1016575 - RNA, 19 nt, Artificial Sequence
  Description of Artificial Sequence: Synthetic oligonucleotide
ugagcgcagagcuaggggc

SEQ ID NO: 1016576 - RNA, 19 nt, Artificial Sequence
  Description of Artificial Sequence: Synthetic oligonucleotide
uuuuaucacggccuuaauu

SEQ ID NO: 1016577 - RNA, 19 nt, Artificial Sequence
  Description of Artificial Sequence: Synthetic oligonucleotide
ugacgguuaaggcaaggug

SEQ ID NO: 1016578 - RNA, 19 nt, Artificial Sequence
  Description of Artificial Sequence: Synthetic oligonucleotide
acacuaaacccucaaacaa

SEQ ID NO: 1016579 - RNA, 19 nt, Artificial Sequence
  Description of Artificial Sequence: Synthetic oligonucleotide
caaaccucuagugaauucc

SEQ ID NO: 1016580 - RNA, 19 nt, Artificial Sequence
  Description of Artificial Sequence: Synthetic oligonucleotide
cugccugcuacauucaggc

SEQ ID NO: 1016581 - RNA, 19 nt, Artificial Sequence
  Description of Artificial Sequence: Synthetic oligonucleotide
acagagaaaauauguucug

SEQ ID NO: 1016582 - RNA, 19 nt, Artificial Sequence
  Description of Artificial Sequence: Synthetic oligonucleotide
aaccuugcagauguugcac

SEQ ID NO: 1016583 - RNA, 19 nt, Artificial Sequence
  Description of Artificial Sequence: Synthetic oligonucleotide
uaugugauugcaguauaug

SEQ ID NO: 1016584 - RNA, 19 nt, Artificial Sequence
  Description of Artificial Sequence: Synthetic oligonucleotide
guuauugcagcgauguccc

SEQ ID NO: 1016585 - RNA, 19 nt, Artificial Sequence
  Description of Artificial Sequence: Synthetic oligonucleotide
cacacacacacacacacac

SEQ ID NO: 1016586 - RNA, 19 nt, Artificial Sequence
  Description of Artificial Sequence: Synthetic oligonucleotide
ucguguuuacuaaaauccu

SEQ ID NO: 1016587 - RNA, 19 nt, Artificial Sequence
  Description of Artificial Sequence: Synthetic oligonucleotide
aaaccagcccucucucggg

SEQ ID NO: 1016588 - RNA, 19 nt, Artificial Sequence
  Description of Artificial Sequence: Synthetic oligonucleotide
uuaaagugcuucuccuggc

SEQ ID NO: 1016589 - RNA, 19 nt, Artificial Sequence
  Description of Artificial Sequence: Synthetic oligonucleotide
aaaucgauccacauucuau

SEQ ID NO: 1016590 - RNA, 19 nt, Artificial Sequence
  Description of Artificial Sequence: Synthetic oligonucleotide
augacguguuauugcagcg

SEQ ID NO: 1016591 - RNA, 19 nt, Artificial Sequence
  Description of Artificial Sequence: Synthetic oligonucleotide
aaaaucgauccacauucua

SEQ ID NO: 1016592 - RNA, 19 nt, Artificial Sequence
  Description of Artificial Sequence: Synthetic oligonucleotide
ucucgaaaggccgguaggg

SEQ ID NO: 1016593 - RNA, 19 nt, Artificial Sequence
  Description of Artificial Sequence: Synthetic oligonucleotide
gaagcaaacuggcgagccg

SEQ ID NO: 1016594 - RNA, 19 nt, Artificial Sequence
  Description of Artificial Sequence: Synthetic oligonucleotide
aggaugacguguuauugca

SEQ ID NO: 1016595 - RNA, 19 nt, Artificial Sequence
  Description of Artificial Sequence: Synthetic oligonucleotide
acauucaggcggcccaagc

SEQ ID NO: 1016596 - RNA, 19 nt, Artificial Sequence
  Description of Artificial Sequence: Synthetic oligonucleotide
aucucgaaaggccgguagg

SEQ ID NO: 1016597 - RNA, 19 nt, Artificial Sequence
  Description of Artificial Sequence: Synthetic oligonucleotide
acugguacggccgcagccc

SEQ ID NO: 1016598 - RNA, 19 nt, Artificial Sequence
  Description of Artificial Sequence: Synthetic oligonucleotide
ucguaguugugcgcgaagg

SEQ ID NO: 1016599 - RNA, 19 nt, Artificial Sequence
  Description of Artificial Sequence: Synthetic oligonucleotide
ugauugcaguauauggggu

SEQ ID NO: 1016600 - RNA, 19 nt, Artificial Sequence
  Description of Artificial Sequence: Synthetic oligonucleotide
uguggcucggucacaccgg

SEQ ID NO: 1016601 - RNA, 19 nt, Artificial Sequence
  Description of Artificial Sequence: Synthetic oligonucleotide
guuacagucagugccuuug

SEQ ID NO: 1016602 - RNA, 19 nt, Artificial Sequence
  Description of Artificial Sequence: Synthetic oligonucleotide
uguccugccuggugaagcg

SEQ ID NO: 1016603 - RNA, 19 nt, Artificial Sequence
  Description of Artificial Sequence: Synthetic oligonucleotide
gguuagugcaauucccggg

SEQ ID NO: 1016604 - RNA, 19 nt, Artificial Sequence
  Description of Artificial Sequence: Synthetic oligonucleotide
agccggaggggacagcggc

SEQ ID NO: 1016605 - RNA, 19 nt, Artificial Sequence
  Description of Artificial Sequence: Synthetic oligonucleotide
uaucacggccuuaauuuaa

SEQ ID NO: 1016606 - RNA, 19 nt, Artificial Sequence
  Description of Artificial Sequence: Synthetic oligonucleotide
uuacuaaaauccugggguu

SEQ ID NO: 1016607 - RNA, 19 nt, Artificial Sequence
  Description of Artificial Sequence: Synthetic oligonucleotide
uuuggggcaagccggaguu

SEQ ID NO: 1016608 - RNA, 19 nt, Artificial Sequence
  Description of Artificial Sequence: Synthetic oligonucleotide
acccucguccgcucaaacc

SEQ ID NO: 1016609 - RNA, 19 nt, Artificial Sequence
  Description of Artificial Sequence: Synthetic oligonucleotide
uggguuacagucagugccu

SEQ ID NO: 1016610 - RNA, 19 nt, Artificial Sequence
  Description of Artificial Sequence: Synthetic oligonucleotide
aaaaccacacacacacaca

SEQ ID NO: 1016611 - RNA, 19 nt, Artificial Sequence
  Description of Artificial Sequence: Synthetic oligonucleotide
acgggcugacgguuaaggc

SEQ ID NO: 1016612 - RNA, 19 nt, Artificial Sequence
  Description of Artificial Sequence: Synthetic oligonucleotide
uccccaagggcuccacugg

SEQ ID NO: 1016613 - RNA, 19 nt, Artificial Sequence
  Description of Artificial Sequence: Synthetic oligonucleotide
cuguggcucggucacaccg

SEQ ID NO: 1016614 - RNA, 19 nt, Artificial Sequence
  Description of Artificial Sequence: Synthetic oligonucleotide
cacagguacggcuucuccc

SEQ ID NO: 1016615 - RNA, 19 nt, Artificial Sequence
  Description of Artificial Sequence: Synthetic oligonucleotide
uuuuggggcaagccggagu

SEQ ID NO: 1016616 - RNA, 19 nt, Artificial Sequence
  Description of Artificial Sequence: Synthetic oligonucleotide
acacacacacacacuaaac

SEQ ID NO: 1016617 - RNA, 19 nt, Artificial Sequence
  Description of Artificial Sequence: Synthetic oligonucleotide
guaguugugcgcgaaggcc

SEQ ID NO: 1016618 - RNA, 19 nt, Artificial Sequence
  Description of Artificial Sequence: Synthetic oligonucleotide
ucgaaaggccgguaggggu

SEQ ID NO: 1016619 - RNA, 19 nt, Artificial Sequence
  Description of Artificial Sequence: Synthetic oligonucleotide
ucggagcgcacgaaggucu

SEQ ID NO: 1016620 - RNA, 19 nt, Artificial Sequence
  Description of Artificial Sequence: Synthetic oligonucleotide
gcagcaacuacucggcagg

SEQ ID NO: 1016621 - RNA, 19 nt, Artificial Sequence
  Description of Artificial Sequence: Synthetic oligonucleotide
cacaauucucuuuggcaac

SEQ ID NO: 1016622 - RNA, 19 nt, Artificial Sequence
  Description of Artificial Sequence: Synthetic oligonucleotide
aaccucuagugaauuccac

SEQ ID NO: 1016623 - RNA, 19 nt, Artificial Sequence
  Description of Artificial Sequence: Synthetic oligonucleotide
cacaccgggccuuuugggg

SEQ ID NO: 1016624 - RNA, 19 nt, Artificial Sequence
  Description of Artificial Sequence: Synthetic oligonucleotide
guggccuaugcucagguca

SEQ ID NO: 1016625 - RNA, 19 nt, Artificial Sequence
  Description of Artificial Sequence: Synthetic oligonucleotide
aucucuauauaaacugucu

SEQ ID NO: 1016626 - RNA, 19 nt, Artificial Sequence
  Description of Artificial Sequence: Synthetic oligonucleotide
gacgggcugacgguuaagg

SEQ ID NO: 1016627 - RNA, 19 nt, Artificial Sequence
  Description of Artificial Sequence: Synthetic oligonucleotide
ucacaccgggccuuuuggg

SEQ ID NO: 1016628 - RNA, 19 nt, Artificial Sequence
  Description of Artificial Sequence: Synthetic oligonucleotide
ucaaaccucuagugaauuc

SEQ ID NO: 1016629 - RNA, 19 nt, Artificial Sequence
  Description of Artificial Sequence: Synthetic oligonucleotide
ugaagcgaaccuugcagau

SEQ ID NO: 1016630 - RNA, 19 nt, Artificial Sequence
  Description of Artificial Sequence: Synthetic oligonucleotide
acgguuaaggcaagguggg

SEQ ID NO: 1016631 - RNA, 19 nt, Artificial Sequence
  Description of Artificial Sequence: Synthetic oligonucleotide
uuaaucucgaaaggccggu

SEQ ID NO: 1016632 - RNA, 19 nt, Artificial Sequence
  Description of Artificial Sequence: Synthetic oligonucleotide
uuaucacggccuuaauuua

SEQ ID NO: 1016633 - RNA, 19 nt, Artificial Sequence
  Description of Artificial Sequence: Synthetic oligonucleotide
cugggaagcaaacuggcga

SEQ ID NO: 1016634 - RNA, 19 nt, Artificial Sequence
  Description of Artificial Sequence: Synthetic oligonucleotide
ucacggccuuaauuuaaag

SEQ ID NO: 1016635 - RNA, 19 nt, Artificial Sequence
  Description of Artificial Sequence: Synthetic oligonucleotide
ugcauucguguuuacuaaa

SEQ ID NO: 1016636 - RNA, 19 nt, Artificial Sequence
  Description of Artificial Sequence: Synthetic oligonucleotide
uguucugcauucguguuua

SEQ ID NO: 1016637 - RNA, 19 nt, Artificial Sequence
  Description of Artificial Sequence: Synthetic oligonucleotide
uauuuaagcugugggcccu

SEQ ID NO: 1016638 - RNA, 19 nt, Artificial Sequence
  Description of Artificial Sequence: Synthetic oligonucleotide
gugaucggagcgcacgaag

SEQ ID NO: 1016639 - RNA, 19 nt, Artificial Sequence
  Description of Artificial Sequence: Synthetic oligonucleotide
uggccuaugcucaggucac

SEQ ID NO: 1016640 - RNA, 19 nt, Artificial Sequence
  Description of Artificial Sequence: Synthetic oligonucleotide
aucgauccacauucuauau

SEQ ID NO: 1016641 - RNA, 19 nt, Artificial Sequence
  Description of Artificial Sequence: Synthetic oligonucleotide
gugaagcgaaccuugcaga

SEQ ID NO: 1016642 - RNA, 19 nt, Artificial Sequence
  Description of Artificial Sequence: Synthetic oligonucleotide
ggguuagugcaauucccgg

SEQ ID NO: 1016643 - RNA, 19 nt, Artificial Sequence
  Description of Artificial Sequence: Synthetic oligonucleotide
ugacguguuauugcagcga

SEQ ID NO: 1016644 - RNA, 19 nt, Artificial Sequence
  Description of Artificial Sequence: Synthetic oligonucleotide
cacggccuuaauuuaaaga

SEQ ID NO: 1016645 - RNA, 19 nt, Artificial Sequence
  Description of Artificial Sequence: Synthetic oligonucleotide
gaagcgaaccuugcagaug

SEQ ID NO: 1016646 - RNA, 19 nt, Artificial Sequence
  Description of Artificial Sequence: Synthetic oligonucleotide
caagggguuagugcaauuc

SEQ ID NO: 1016647 - RNA, 19 nt, Artificial Sequence
  Description of Artificial Sequence: Synthetic oligonucleotide
gguuaaggcaaggugggug

SEQ ID NO: 1016648 - RNA, 19 nt, Artificial Sequence
  Description of Artificial Sequence: Synthetic oligonucleotide
cacacacacacacacacua

SEQ ID NO: 1016649 - RNA, 19 nt, Artificial Sequence
  Description of Artificial Sequence: Synthetic oligonucleotide
uccugggguuuuauugcug

SEQ ID NO: 1016650 - RNA, 19 nt, Artificial Sequence
  Description of Artificial Sequence: Synthetic oligonucleotide
uguugcgcugucgcuggcg

SEQ ID NO: 1016651 - RNA, 19 nt, Artificial Sequence
  Description of Artificial Sequence: Synthetic oligonucleotide
caucccugagcugggaagc

SEQ ID NO: 1016652 - RNA, 19 nt, Artificial Sequence
  Description of Artificial Sequence: Synthetic oligonucleotide
uucugcauucguguuuacu

SEQ ID NO: 1016653 - RNA, 19 nt, Artificial Sequence
  Description of Artificial Sequence: Synthetic oligonucleotide
caggugaucggagcgcacg

SEQ ID NO: 1016654 - RNA, 19 nt, Artificial Sequence
  Description of Artificial Sequence: Synthetic oligonucleotide
cucgaaaggccgguagggg

SEQ ID NO: 1016655 - RNA, 19 nt, Artificial Sequence
  Description of Artificial Sequence: Synthetic oligonucleotide
aacccuucuacagcacccu

SEQ ID NO: 1016656 - RNA, 19 nt, Artificial Sequence
  Description of Artificial Sequence: Synthetic oligonucleotide
gucgcuggcgggcuauggg

SEQ ID NO: 1016657 - RNA, 19 nt, Artificial Sequence
  Description of Artificial Sequence: Synthetic oligonucleotide
gugggcagaagcugagcgc

SEQ ID NO: 1016658 - RNA, 19 nt, Artificial Sequence
  Description of Artificial Sequence: Synthetic oligonucleotide
gggguuagugcaauucccg

SEQ ID NO: 1016659 - RNA, 19 nt, Artificial Sequence
  Description of Artificial Sequence: Synthetic oligonucleotide
cacugguacggccgcagcc

SEQ ID NO: 1016660 - RNA, 19 nt, Artificial Sequence
  Description of Artificial Sequence: Synthetic oligonucleotide
caacuacucggcaggggug

SEQ ID NO: 1016661 - RNA, 19 nt, Artificial Sequence
  Description of Artificial Sequence: Synthetic oligonucleotide
agcugucgcacugguacgg

SEQ ID NO: 1016662 - RNA, 19 nt, Artificial Sequence
  Description of Artificial Sequence: Synthetic oligonucleotide
aacccucaaacaagcaaau

SEQ ID NO: 1016663 - RNA, 19 nt, Artificial Sequence
  Description of Artificial Sequence: Synthetic oligonucleotide
ggaaaccagcccucucucg

SEQ ID NO: 1016664 - RNA, 19 nt, Artificial Sequence
  Description of Artificial Sequence: Synthetic oligonucleotide
gaaaggccgguagggguag

SEQ ID NO: 1016665 - RNA, 19 nt, Artificial Sequence
  Description of Artificial Sequence: Synthetic oligonucleotide
gugucggggagcccagagg

SEQ ID NO: 1016666 - RNA, 19 nt, Artificial Sequence
  Description of Artificial Sequence: Synthetic oligonucleotide
uuauugcagcgaugucccc

SEQ ID NO: 1016667 - RNA, 19 nt, Artificial Sequence
  Description of Artificial Sequence: Synthetic oligonucleotide
cuaaacccucaaacaagca

SEQ ID NO: 1016668 - RNA, 19 nt, Artificial Sequence
  Description of Artificial Sequence: Synthetic oligonucleotide
uuaaggcaaggugggugug

SEQ ID NO: 1016669 - RNA, 19 nt, Artificial Sequence
  Description of Artificial Sequence: Synthetic oligonucleotide
cacacacacacacacuaaa

SEQ ID NO: 1016670 - RNA, 19 nt, Artificial Sequence
  Description of Artificial Sequence: Synthetic oligonucleotide
agucccugggguucccucu

SEQ ID NO: 1016671 - RNA, 19 nt, Artificial Sequence
  Description of Artificial Sequence: Synthetic oligonucleotide
aaccacacacacacacaca

SEQ ID NO: 1016672 - RNA, 19 nt, Artificial Sequence
  Description of Artificial Sequence: Synthetic oligonucleotide
aacugucgccggcuccucu

SEQ ID NO: 1016673 - RNA, 19 nt, Artificial Sequence
  Description of Artificial Sequence: Synthetic oligonucleotide
auugcgcggggugucgggg

SEQ ID NO: 1016674 - RNA, 19 nt, Artificial Sequence
  Description of Artificial Sequence: Synthetic oligonucleotide
gaaggccgcaccacacugc

SEQ ID NO: 1016675 - RNA, 19 nt, Artificial Sequence
  Description of Artificial Sequence: Synthetic oligonucleotide
uuaagcugugggcccucuc

SEQ ID NO: 1016676 - RNA, 19 nt, Artificial Sequence
  Description of Artificial Sequence: Synthetic oligonucleotide
cauugcgcggggugucggg

SEQ ID NO: 1016677 - RNA, 19 nt, Artificial Sequence
  Description of Artificial Sequence: Synthetic oligonucleotide
caagucugguggccacugg

SEQ ID NO: 1016678 - RNA, 19 nt, Artificial Sequence
  Description of Artificial Sequence: Synthetic oligonucleotide
aggugaucggagcgcacga

SEQ ID NO: 1016679 - RNA, 19 nt, Artificial Sequence
  Description of Artificial Sequence: Synthetic oligonucleotide
cugcauucguguuuacuaa

SEQ ID NO: 1016680 - RNA, 19 nt, Artificial Sequence
  Description of Artificial Sequence: Synthetic oligonucleotide
ugguacggccgcagccccg

SEQ ID NO: 1016681 - RNA, 19 nt, Artificial Sequence
  Description of Artificial Sequence: Synthetic oligonucleotide
gauccacauucuauauaca

SEQ ID NO: 1016682 - RNA, 19 nt, Artificial Sequence
  Description of Artificial Sequence: Synthetic oligonucleotide
ugucgcuggcgggcuaugg

SEQ ID NO: 1016683 - RNA, 19 nt, Artificial Sequence
  Description of Artificial Sequence: Synthetic oligonucleotide
gacguguuauugcagcgau

SEQ ID NO: 1016684 - RNA, 19 nt, Artificial Sequence
  Description of Artificial Sequence: Synthetic oligonucleotide
acuacucggcagggguggc

SEQ ID NO: 1016685 - RNA, 19 nt, Artificial Sequence
  Description of Artificial Sequence: Synthetic oligonucleotide
cuccuggccauugcgcggg

SEQ ID NO: 1016686 - RNA, 19 nt, Artificial Sequence
  Description of Artificial Sequence: Synthetic oligonucleotide
ugcgcggggugucggggag

SEQ ID NO: 1016687 - RNA, 19 nt, Artificial Sequence
  Description of Artificial Sequence: Synthetic oligonucleotide
uacauucaggcggcccaag

SEQ ID NO: 1016688 - RNA, 19 nt, Artificial Sequence
  Description of Artificial Sequence: Synthetic oligonucleotide
gaucggagcgcacgaaggu

SEQ ID NO: 1016689 - RNA, 19 nt, Artificial Sequence
  Description of Artificial Sequence: Synthetic oligonucleotide
gccgguagggguagaaagg

SEQ ID NO: 1016690 - RNA, 19 nt, Artificial Sequence
  Description of Artificial Sequence: Synthetic oligonucleotide
ggccgcaccacacugcuga

SEQ ID NO: 1016691 - RNA, 19 nt, Artificial Sequence
  Description of Artificial Sequence: Synthetic oligonucleotide
gguagggguagaaaggcaa

SEQ ID NO: 1016692 - RNA, 19 nt, Artificial Sequence
  Description of Artificial Sequence: Synthetic oligonucleotide
acggccgcagccccgugug

SEQ ID NO: 1016693 - RNA, 19 nt, Artificial Sequence
  Description of Artificial Sequence: Synthetic oligonucleotide
cugguacggccgcagcccc

SEQ ID NO: 1016694 - RNA, 19 nt, Artificial Sequence
  Description of Artificial Sequence: Synthetic oligonucleotide
ggugucggggagcccagag

SEQ ID NO: 1016695 - RNA, 19 nt, Artificial Sequence
  Description of Artificial Sequence: Synthetic oligonucleotide
uccccugucccugccugag

SEQ ID NO: 1016696 - RNA, 19 nt, Artificial Sequence
  Description of Artificial Sequence: Synthetic oligonucleotide
guggccuguggcucgguca

SEQ ID NO: 1016697 - RNA, 19 nt, Artificial Sequence
  Description of Artificial Sequence: Synthetic oligonucleotide
acaaaaccacacacacaca

SEQ ID NO: 1016698 - RNA, 19 nt, Artificial Sequence
  Description of Artificial Sequence: Synthetic oligonucleotide
cacacacuaaacccucaaa

SEQ ID NO: 1016699 - RNA, 19 nt, Artificial Sequence
  Description of Artificial Sequence: Synthetic oligonucleotide
uacggccgcagccccgugu

SEQ ID NO: 1016700 - RNA, 19 nt, Artificial Sequence
  Description of Artificial Sequence: Synthetic oligonucleotide
gagccagucccuggguuac

SEQ ID NO: 1016701 - RNA, 19 nt, Artificial Sequence
  Description of Artificial Sequence: Synthetic oligonucleotide
ggaugacguguuauugcag

SEQ ID NO: 1016702 - RNA, 19 nt, Artificial Sequence
  Description of Artificial Sequence: Synthetic oligonucleotide
uaaucucgaaaggccggua

SEQ ID NO: 1016703 - RNA, 19 nt, Artificial Sequence
  Description of Artificial Sequence: Synthetic oligonucleotide
acacacacacacacacaca

SEQ ID NO: 1016704 - RNA, 19 nt, Artificial Sequence
  Description of Artificial Sequence: Synthetic oligonucleotide
acacacacacacacacacu

SEQ ID NO: 1016705 - RNA, 19 nt, Artificial Sequence
  Description of Artificial Sequence: Synthetic oligonucleotide
cagcaacuacucggcaggg

SEQ ID NO: 1016706 - RNA, 19 nt, Artificial Sequence
  Description of Artificial Sequence: Synthetic oligonucleotide
gcaacuacucggcaggggu

SEQ ID NO: 1016707 - RNA, 19 nt, Artificial Sequence
  Description of Artificial Sequence: Synthetic oligonucleotide
ccaggaugacguguuauug

SEQ ID NO: 1016708 - RNA, 19 nt, Artificial Sequence
  Description of Artificial Sequence: Synthetic oligonucleotide
caggcggcccaagccaucc

SEQ ID NO: 1016709 - RNA, 19 nt, Artificial Sequence
  Description of Artificial Sequence: Synthetic oligonucleotide
uggccauugcgcggggugu

SEQ ID NO: 1016710 - RNA, 19 nt, Artificial Sequence
  Description of Artificial Sequence: Synthetic oligonucleotide
ccgguagggguagaaaggc

SEQ ID NO: 1016711 - RNA, 19 nt, Artificial Sequence
  Description of Artificial Sequence: Synthetic oligonucleotide
aggucguaguugugcgcga

SEQ ID NO: 1016712 - RNA, 19 nt, Artificial Sequence
  Description of Artificial Sequence: Synthetic oligonucleotide
uugcgcggggugucgggga

SEQ ID NO: 1016713 - RNA, 19 nt, Artificial Sequence
  Description of Artificial Sequence: Synthetic oligonucleotide
cuggccggaaaccagcccu

SEQ ID NO: 1016714 - RNA, 19 nt, Artificial Sequence
  Description of Artificial Sequence: Synthetic oligonucleotide
gugaccgcugccugcuaca

SEQ ID NO: 1016715 - RNA, 19 nt, Artificial Sequence
  Description of Artificial Sequence: Synthetic oligonucleotide
cuggcgagccggaggggac

SEQ ID NO: 1016716 - RNA, 19 nt, Artificial Sequence
  Description of Artificial Sequence: Synthetic oligonucleotide
ccccaggacgggcugacgg

SEQ ID NO: 1016717 - RNA, 19 nt, Artificial Sequence
  Description of Artificial Sequence: Synthetic oligonucleotide
aguggggcgcggggugacc

SEQ ID NO: 1016718 - RNA, 19 nt, Artificial Sequence
  Description of Artificial Sequence: Synthetic oligonucleotide
acacacacacacacacuaa

SEQ ID NO: 1016719 - RNA, 19 nt, Artificial Sequence
  Description of Artificial Sequence: Synthetic oligonucleotide
cguaguugugcgcgaaggc

SEQ ID NO: 1016720 - RNA, 19 nt, Artificial Sequence
  Description of Artificial Sequence: Synthetic oligonucleotide
ggugaccgcugccugcuac

SEQ ID NO: 1016721 - RNA, 19 nt, Artificial Sequence
  Description of Artificial Sequence: Synthetic oligonucleotide
guggggcgcggggugaccg

SEQ ID NO: 1016722 - RNA, 19 nt, Artificial Sequence
  Description of Artificial Sequence: Synthetic oligonucleotide
ggguguugcgcugucgcug

SEQ ID NO: 1016723 - RNA, 19 nt, Artificial Sequence
  Description of Artificial Sequence: Synthetic oligonucleotide
uugugcgcgaaggccgcac

SEQ ID NO: 1016724 - RNA, 19 nt, Artificial Sequence
  Description of Artificial Sequence: Synthetic oligonucleotide
gcgaaccuugcagauguug

SEQ ID NO: 1016725 - RNA, 19 nt, Artificial Sequence
  Description of Artificial Sequence: Synthetic oligonucleotide
gagccggaggggacagcgg

SEQ ID NO: 1016726 - RNA, 19 nt, Artificial Sequence
  Description of Artificial Sequence: Synthetic oligonucleotide
gagcccagagggcgcggug

SEQ ID NO: 1016727 - RNA, 19 nt, Artificial Sequence
  Description of Artificial Sequence: Synthetic oligonucleotide
gccuaugcucaggucacag

SEQ ID NO: 1016728 - RNA, 19 nt, Artificial Sequence
  Description of Artificial Sequence: Synthetic oligonucleotide
caguaugugauugcaguau

SEQ ID NO: 1016729 - RNA, 19 nt, Artificial Sequence
  Description of Artificial Sequence: Synthetic oligonucleotide
gggcugacgguuaaggcaa

SEQ ID NO: 1016730 - RNA, 19 nt, Artificial Sequence
  Description of Artificial Sequence: Synthetic oligonucleotide
gcugacgguuaaggcaagg

SEQ ID NO: 1016731 - RNA, 19 nt, Artificial Sequence
  Description of Artificial Sequence: Synthetic oligonucleotide
accccguugcagccguccu

SEQ ID NO: 1016732 - RNA, 19 nt, Artificial Sequence
  Description of Artificial Sequence: Synthetic oligonucleotide
cacccucguccgcucaaac

SEQ ID NO: 1016733 - RNA, 19 nt, Artificial Sequence
  Description of Artificial Sequence: Synthetic oligonucleotide
gcauucguguuuacuaaaa

SEQ ID NO: 1016734 - RNA, 19 nt, Artificial Sequence
  Description of Artificial Sequence: Synthetic oligonucleotide
ugaccgcugccugcuacau

SEQ ID NO: 1016735 - RNA, 19 nt, Artificial Sequence
  Description of Artificial Sequence: Synthetic oligonucleotide
ggugccuaggaggggacca

SEQ ID NO: 1016736 - RNA, 19 nt, Artificial Sequence
  Description of Artificial Sequence: Synthetic oligonucleotide
agcugagcgcagagcuagg

SEQ ID NO: 1016737 - RNA, 19 nt, Artificial Sequence
  Description of Artificial Sequence: Synthetic oligonucleotide
acccucaaacaagcaaaua

SEQ ID NO: 1016738 - RNA, 19 nt, Artificial Sequence
  Description of Artificial Sequence: Synthetic oligonucleotide
cgcucaaaccucuagugaa

SEQ ID NO: 1016739 - RNA, 19 nt, Artificial Sequence
  Description of Artificial Sequence: Synthetic oligonucleotide
ugagucccugggguucccu

SEQ ID NO: 1016740 - RNA, 19 nt, Artificial Sequence
  Description of Artificial Sequence: Synthetic oligonucleotide
ccccacuggggacaucggg

SEQ ID NO: 1016741 - RNA, 19 nt, Artificial Sequence
  Description of Artificial Sequence: Synthetic oligonucleotide
ucguccgcucaaaccucua

SEQ ID NO: 1016742 - RNA, 19 nt, Artificial Sequence
  Description of Artificial Sequence: Synthetic oligonucleotide
gggccuuuuggggcaagcc

SEQ ID NO: 1016743 - RNA, 19 nt, Artificial Sequence
  Description of Artificial Sequence: Synthetic oligonucleotide
uggggcgcggggugaccgc

SEQ ID NO: 1016744 - RNA, 19 nt, Artificial Sequence
  Description of Artificial Sequence: Synthetic oligonucleotide
aaaggccgguagggguaga

SEQ ID NO: 1016745 - RNA, 19 nt, Artificial Sequence
  Description of Artificial Sequence: Synthetic oligonucleotide
ccuaggaggggaccaccac

SEQ ID NO: 1016746 - RNA, 19 nt, Artificial Sequence
  Description of Artificial Sequence: Synthetic oligonucleotide
cugacgguuaaggcaaggu

SEQ ID NO: 1016747 - RNA, 19 nt, Artificial Sequence
  Description of Artificial Sequence: Synthetic oligonucleotide
gcccaagccauccgggcca

SEQ ID NO: 1016748 - RNA, 19 nt, Artificial Sequence
  Description of Artificial Sequence: Synthetic oligonucleotide
gccggcuccucugagaaaa

SEQ ID NO: 1016749 - RNA, 19 nt, Artificial Sequence
  Description of Artificial Sequence: Synthetic oligonucleotide
cgggcugacgguuaaggca

SEQ ID NO: 1016750 - RNA, 19 nt, Artificial Sequence
  Description of Artificial Sequence: Synthetic oligonucleotide
ggcacaccccgcacgcgcg

SEQ ID NO: 1016751 - RNA, 19 nt, Artificial Sequence
  Description of Artificial Sequence: Synthetic oligonucleotide
uggcgggcuauggggcacc

SEQ ID NO: 1016752 - RNA, 19 nt, Artificial Sequence
  Description of Artificial Sequence: Synthetic oligonucleotide
caccgggccuuuuggggca

SEQ ID NO: 1016753 - RNA, 19 nt, Artificial Sequence
  Description of Artificial Sequence: Synthetic oligonucleotide
uugcggccacggcgcgagg

SEQ ID NO: 1016754 - RNA, 19 nt, Artificial Sequence
  Description of Artificial Sequence: Synthetic oligonucleotide
acaccccgcacgcgcggcu

SEQ ID NO: 1016755 - RNA, 19 nt, Artificial Sequence
  Description of Artificial Sequence: Synthetic oligonucleotide
acgcgcggcuugcggccac

SEQ ID NO: 1016756 - RNA, 19 nt, Artificial Sequence
  Description of Artificial Sequence: Synthetic oligonucleotide
cuacauucaggcggcccaa

SEQ ID NO: 1016757 - RNA, 19 nt, Artificial Sequence
  Description of Artificial Sequence: Synthetic oligonucleotide
agcgcagagcuaggggcaa

SEQ ID NO: 1016758 - RNA, 19 nt, Artificial Sequence
  Description of Artificial Sequence: Synthetic oligonucleotide
gugccuaggaggggaccac

SEQ ID NO: 1016759 - RNA, 19 nt, Artificial Sequence
  Description of Artificial Sequence: Synthetic oligonucleotide
ccccaagggcuccacuggc

SEQ ID NO: 1016760 - RNA, 19 nt, Artificial Sequence
  Description of Artificial Sequence: Synthetic oligonucleotide
cgcgaggggaccccguugc

SEQ ID NO: 1016761 - RNA, 19 nt, Artificial Sequence
  Description of Artificial Sequence: Synthetic oligonucleotide
cuuuuaucacggccuuaau

SEQ ID NO: 1016762 - RNA, 19 nt, Artificial Sequence
  Description of Artificial Sequence: Synthetic oligonucleotide
gccauugcgcggggugucg

SEQ ID NO: 1016763 - RNA, 19 nt, Artificial Sequence
  Description of Artificial Sequence: Synthetic oligonucleotide
cucguccgcucaaaccucu

SEQ ID NO: 1016764 - RNA, 19 nt, Artificial Sequence
  Description of Artificial Sequence: Synthetic oligonucleotide
ccgcucaaaccucuaguga

SEQ ID NO: 1016765 - RNA, 19 nt, Artificial Sequence
  Description of Artificial Sequence: Synthetic oligonucleotide
aggccgguagggguagaaa

SEQ ID NO: 1016766 - RNA, 19 nt, Artificial Sequence
  Description of Artificial Sequence: Synthetic oligonucleotide
cucaaaccucuagugaauu

SEQ ID NO: 1016767 - RNA, 19 nt, Artificial Sequence
  Description of Artificial Sequence: Synthetic oligonucleotide
cucucucggggacaucccu

SEQ ID NO: 1016768 - RNA, 19 nt, Artificial Sequence
  Description of Artificial Sequence: Synthetic oligonucleotide
gcugucgcacugguacggc

SEQ ID NO: 1016769 - RNA, 19 nt, Artificial Sequence
  Description of Artificial Sequence: Synthetic oligonucleotide
ccugccuggugaagcgaac

SEQ ID NO: 1016770 - RNA, 19 nt, Artificial Sequence
  Description of Artificial Sequence: Synthetic oligonucleotide
ccugggguuuuauugcugu

SEQ ID NO: 1016771 - RNA, 19 nt, Artificial Sequence
  Description of Artificial Sequence: Synthetic oligonucleotide
ccacacacacacacacaca

SEQ ID NO: 1016772 - RNA, 19 nt, Artificial Sequence
  Description of Artificial Sequence: Synthetic oligonucleotide
cccguugcagccguccuuc

SEQ ID NO: 1016773 - RNA, 19 nt, Artificial Sequence
  Description of Artificial Sequence: Synthetic oligonucleotide
agcccucucucggggacau

SEQ ID NO: 1016774 - RNA, 19 nt, Artificial Sequence
  Description of Artificial Sequence: Synthetic oligonucleotide
cugagucccugggguuccc

SEQ ID NO: 1016775 - RNA, 19 nt, Artificial Sequence
  Description of Artificial Sequence: Synthetic oligonucleotide
ccagcccucucucggggac

SEQ ID NO: 1016776 - RNA, 19 nt, Artificial Sequence
  Description of Artificial Sequence: Synthetic oligonucleotide
ccucguccgcucaaaccuc

SEQ ID NO: 1016777 - RNA, 19 nt, Artificial Sequence
  Description of Artificial Sequence: Synthetic oligonucleotide
cacggcgcgaggggacccc

SEQ ID NO: 1016778 - RNA, 19 nt, Artificial Sequence
  Description of Artificial Sequence: Synthetic oligonucleotide
agcuaggggcaagggguua

SEQ ID NO: 1016779 - RNA, 19 nt, Artificial Sequence
  Description of Artificial Sequence: Synthetic oligonucleotide
ccguccuucuugagguguc

SEQ ID NO: 1016780 - RNA, 19 nt, Artificial Sequence
  Description of Artificial Sequence: Synthetic oligonucleotide
gcacugggcccaugcggug

SEQ ID NO: 1016781 - RNA, 19 nt, Artificial Sequence
  Description of Artificial Sequence: Synthetic oligonucleotide
cccaaacugucgccggcuc

SEQ ID NO: 1016782 - RNA, 19 nt, Artificial Sequence
  Description of Artificial Sequence: Synthetic oligonucleotide
agccccgugugcacacgca

SEQ ID NO: 1016783 - RNA, 19 nt, Artificial Sequence
  Description of Artificial Sequence: Synthetic oligonucleotide
cuccccugucccugccuga

SEQ ID NO: 1016784 - RNA, 19 nt, Artificial Sequence
  Description of Artificial Sequence: Synthetic oligonucleotide
gccugagucccugggguuc

SEQ ID NO: 1016785 - RNA, 19 nt, Artificial Sequence
  Description of Artificial Sequence: Synthetic oligonucleotide
ggcgagccggaggggacag

SEQ ID NO: 1016786 - RNA, 19 nt, Artificial Sequence
  Description of Artificial Sequence: Synthetic oligonucleotide
cgcgaaggccgcaccacac

SEQ ID NO: 1016787 - RNA, 19 nt, Artificial Sequence
  Description of Artificial Sequence: Synthetic oligonucleotide
ccauugcgcggggugucgg

SEQ ID NO: 1016788 - RNA, 19 nt, Artificial Sequence
  Description of Artificial Sequence: Synthetic oligonucleotide
ccggaaaccagcccucucu

SEQ ID NO: 1016789 - RNA, 19 nt, Artificial Sequence
  Description of Artificial Sequence: Synthetic oligonucleotide
gccaggaugacguguuauu

SEQ ID NO: 1016790 - RNA, 19 nt, Artificial Sequence
  Description of Artificial Sequence: Synthetic oligonucleotide
ggugaucggagcgcacgaa

SEQ ID NO: 1016791 - RNA, 19 nt, Artificial Sequence
  Description of Artificial Sequence: Synthetic oligonucleotide
ggcugacgguuaaggcaag

SEQ ID NO: 1016792 - RNA, 19 nt, Artificial Sequence
  Description of Artificial Sequence: Synthetic oligonucleotide
ggucguaguugugcgcgaa

SEQ ID NO: 1016793 - RNA, 19 nt, Artificial Sequence
  Description of Artificial Sequence: Synthetic oligonucleotide
gcgcgaggggaccccguug

SEQ ID NO: 1016794 - RNA, 19 nt, Artificial Sequence
  Description of Artificial Sequence: Synthetic oligonucleotide
gagggcgcgguggccccac

SEQ ID NO: 1016795 - RNA, 19 nt, Artificial Sequence
  Description of Artificial Sequence: Synthetic oligonucleotide
ccggcuccucugagaaaag

SEQ ID NO: 1016796 - RNA, 19 nt, Artificial Sequence
  Description of Artificial Sequence: Synthetic oligonucleotide
gcgcgaaggccgcaccaca

SEQ ID NO: 1016797 - RNA, 19 nt, Artificial Sequence
  Description of Artificial Sequence: Synthetic oligonucleotide
ggacgggcugacgguuaag

SEQ ID NO: 1016798 - RNA, 19 nt, Artificial Sequence
  Description of Artificial Sequence: Synthetic oligonucleotide
gcucaaaccucuagugaau

SEQ ID NO: 1016799 - RNA, 19 nt, Artificial Sequence
  Description of Artificial Sequence: Synthetic oligonucleotide
guacggccgcagccccgug

SEQ ID NO: 1016800 - RNA, 19 nt, Artificial Sequence
  Description of Artificial Sequence: Synthetic oligonucleotide
cgaggggaccccguugcag

SEQ ID NO: 1016801 - RNA, 19 nt, Artificial Sequence
  Description of Artificial Sequence: Synthetic oligonucleotide
cccgugugcacacgcaugu

SEQ ID NO: 1016802 - RNA, 19 nt, Artificial Sequence
  Description of Artificial Sequence: Synthetic oligonucleotide
cggggugaccgcugccugc

SEQ ID NO: 1016803 - RNA, 19 nt, Artificial Sequence
  Description of Artificial Sequence: Synthetic oligonucleotide
aggccgcaccacacugcug

SEQ ID NO: 1016804 - RNA, 19 nt, Artificial Sequence
  Description of Artificial Sequence: Synthetic oligonucleotide
gccacggcgcgaggggacc

SEQ ID NO: 1016805 - RNA, 19 nt, Artificial Sequence
  Description of Artificial Sequence: Synthetic oligonucleotide
gggguguugcgcugucgcu

SEQ ID NO: 1016806 - RNA, 19 nt, Artificial Sequence
  Description of Artificial Sequence: Synthetic oligonucleotide
gguuacagucagugccuuu

SEQ ID NO: 1016807 - RNA, 19 nt, Artificial Sequence
  Description of Artificial Sequence: Synthetic oligonucleotide
gccccaagucugguggcca

SEQ ID NO: 1016808 - RNA, 19 nt, Artificial Sequence
  Description of Artificial Sequence: Synthetic oligonucleotide
cagcccucucucggggaca

SEQ ID NO: 1016809 - RNA, 19 nt, Artificial Sequence
  Description of Artificial Sequence: Synthetic oligonucleotide
ggcaagggguuagugcaau

SEQ ID NO: 1016810 - RNA, 19 nt, Artificial Sequence
  Description of Artificial Sequence: Synthetic oligonucleotide
agcgaaccuugcagauguu

SEQ ID NO: 1016811 - RNA, 19 nt, Artificial Sequence
  Description of Artificial Sequence: Synthetic oligonucleotide
gggcaagggguuagugcaa

SEQ ID NO: 1016812 - RNA, 19 nt, Artificial Sequence
  Description of Artificial Sequence: Synthetic oligonucleotide
gggaccccguugcagccgu

SEQ ID NO: 1016813 - RNA, 19 nt, Artificial Sequence
  Description of Artificial Sequence: Synthetic oligonucleotide
ggccacggcgcgaggggac

SEQ ID NO: 1016814 - RNA, 19 nt, Artificial Sequence
  Description of Artificial Sequence: Synthetic oligonucleotide
cggccuuaauuuaaagaau

SEQ ID NO: 1016815 - RNA, 19 nt, Artificial Sequence
  Description of Artificial Sequence: Synthetic oligonucleotide
ggccuaugcucaggucaca

SEQ ID NO: 1016816 - RNA, 19 nt, Artificial Sequence
  Description of Artificial Sequence: Synthetic oligonucleotide
gcgaggggaccccguugca

SEQ ID NO: 1016817 - RNA, 19 nt, Artificial Sequence
  Description of Artificial Sequence: Synthetic oligonucleotide
ggcgggcuauggggcaccc

SEQ ID NO: 1016818 - RNA, 19 nt, Artificial Sequence
  Description of Artificial Sequence: Synthetic oligonucleotide
cgcggggugucggggagcc

SEQ ID NO: 1016819 - RNA, 19 nt, Artificial Sequence
  Description of Artificial Sequence: Synthetic oligonucleotide
gcaagggguuagugcaauu

SEQ ID NO: 1016820 - RNA, 19 nt, Artificial Sequence
  Description of Artificial Sequence: Synthetic oligonucleotide
cggcagggguggccuaugc

SEQ ID NO: 1016821 - RNA, 19 nt, Artificial Sequence
  Description of Artificial Sequence: Synthetic oligonucleotide
cacgcgcggcuugcggcca

SEQ ID NO: 1016822 - RNA, 19 nt, Artificial Sequence
  Description of Artificial Sequence: Synthetic oligonucleotide
cguggccuguggcucgguc

SEQ ID NO: 1016823 - RNA, 19 nt, Artificial Sequence
  Description of Artificial Sequence: Synthetic oligonucleotide
cgggccuuuuggggcaagc

SEQ ID NO: 1016824 - RNA, 19 nt, Artificial Sequence
  Description of Artificial Sequence: Synthetic oligonucleotide
gcgggcuauggggcacccc

SEQ ID NO: 1016825 - RNA, 19 nt, Artificial Sequence
  Description of Artificial Sequence: Synthetic oligonucleotide
cgcggcuugcggccacggc

SEQ ID NO: 1016826 - RNA, 19 nt, Artificial Sequence
  Description of Artificial Sequence: Synthetic oligonucleotide
ccucugaucuuggcuacau

SEQ ID NO: 1016827 - RNA, 19 nt, Artificial Sequence
  Description of Artificial Sequence: Synthetic oligonucleotide
gcuugcggccacggcgcga

SEQ ID NO: 1016828 - RNA, 19 nt, Artificial Sequence
  Description of Artificial Sequence: Synthetic oligonucleotide
cgguggccccacuggggac

SEQ ID NO: 1016829 - RNA, 19 nt, Artificial Sequence
  Description of Artificial Sequence: Synthetic oligonucleotide
gcccgggccuguggucucc

SEQ ID NO: 1016830 - RNA, 19 nt, Artificial Sequence
  Description of Artificial Sequence: Synthetic oligonucleotide
gcgcggggugucggggagc

SEQ ID NO: 1016831 - RNA, 19 nt, Artificial Sequence
  Description of Artificial Sequence: Synthetic oligonucleotide
ccagucccuggguuacagu

SEQ ID NO: 1016832 - RNA, 19 nt, Artificial Sequence
  Description of Artificial Sequence: Synthetic oligonucleotide
gcugucgcuggcgggcuau

SEQ ID NO: 1016833 - RNA, 19 nt, Artificial Sequence
  Description of Artificial Sequence: Synthetic oligonucleotide
gcgagccggaggggacagc

SEQ ID NO: 1016834 - RNA, 19 nt, Artificial Sequence
  Description of Artificial Sequence: Synthetic oligonucleotide
ggcgcgaggggaccccguu

SEQ ID NO: 1016835 - RNA, 19 nt, Artificial Sequence
  Description of Artificial Sequence: Synthetic oligonucleotide
gggugucggggagcccaga

SEQ ID NO: 1016836 - RNA, 19 nt, Artificial Sequence
  Description of Artificial Sequence: Synthetic oligonucleotide
ggggcgcggggugaccgcu

SEQ ID NO: 1016837 - RNA, 19 nt, Artificial Sequence
  Description of Artificial Sequence: Synthetic oligonucleotide
cgcgcggcuugcggccacg

SEQ ID NO: 1016838 - RNA, 19 nt, Artificial Sequence
  Description of Artificial Sequence: Synthetic oligonucleotide
ccgcagccccgugugcaca

SEQ ID NO: 1016839 - RNA, 19 nt, Artificial Sequence
  Description of Artificial Sequence: Synthetic oligonucleotide
ccguugcagccguccuucu

SEQ ID NO: 1016840 - RNA, 19 nt, Artificial Sequence
  Description of Artificial Sequence: Synthetic oligonucleotide
caccccgcacgcgcggcuu

SEQ ID NO: 1016841 - RNA, 19 nt, Artificial Sequence
  Description of Artificial Sequence: Synthetic oligonucleotide
gcgcugucgcuggcgggcu

SEQ ID NO: 1016842 - RNA, 19 nt, Artificial Sequence
  Description of Artificial Sequence: Synthetic oligonucleotide
ccgggccuguggucuccaa

SEQ ID NO: 1016843 - RNA, 19 nt, Artificial Sequence
  Description of Artificial Sequence: Synthetic oligonucleotide
ccccguugcagccguccuu

SEQ ID NO: 1016844 - RNA, 19 nt, Artificial Sequence
  Description of Artificial Sequence: Synthetic oligonucleotide
cccgggccuguggucucca

SEQ ID NO: 1016845 - RNA, 19 nt, Artificial Sequence
  Description of Artificial Sequence: Synthetic oligonucleotide
ccauccgggccagccucgu

SEQ ID NO: 1016846 - RNA, 19 nt, Artificial Sequence
  Description of Artificial Sequence: Synthetic oligonucleotide
cggagcgcacgaaggucuu

SEQ ID NO: 1016847 - RNA, 19 nt, Artificial Sequence
  Description of Artificial Sequence: Synthetic oligonucleotide
ccguggccuguggcucggu

SEQ ID NO: 1016848 - RNA, 19 nt, Artificial Sequence
  Description of Artificial Sequence: Synthetic oligonucleotide
aauccuguaacuuaaauac

SEQ ID NO: 1016849 - RNA, 19 nt, Artificial Sequence
  Description of Artificial Sequence: Synthetic oligonucleotide
aauacuaaagauucauucc

SEQ ID NO: 1016850 - RNA, 19 nt, Artificial Sequence
  Description of Artificial Sequence: Synthetic oligonucleotide
aaauacuaaagauucauuc

SEQ ID NO: 1016851 - RNA, 19 nt, Artificial Sequence
  Description of Artificial Sequence: Synthetic oligonucleotide
uguaacuuaaauacuaaag

SEQ ID NO: 1016852 - RNA, 19 nt, Artificial Sequence
  Description of Artificial Sequence: Synthetic oligonucleotide
uuuauguuugcuuauagca

SEQ ID NO: 1016853 - RNA, 19 nt, Artificial Sequence
  Description of Artificial Sequence: Synthetic oligonucleotide
uaaauuucgagguaccugg

SEQ ID NO: 1016854 - RNA, 19 nt, Artificial Sequence
  Description of Artificial Sequence: Synthetic oligonucleotide
ugaacgaacaagaaagggg

SEQ ID NO: 1016855 - RNA, 19 nt, Artificial Sequence
  Description of Artificial Sequence: Synthetic oligonucleotide
aagacgugaauccgaaucc

SEQ ID NO: 1016856 - RNA, 19 nt, Artificial Sequence
  Description of Artificial Sequence: Synthetic oligonucleotide
aaacgaauuagcuuuucuc

SEQ ID NO: 1016857 - RNA, 19 nt, Artificial Sequence
  Description of Artificial Sequence: Synthetic oligonucleotide
agcacucaaguacagaucc

SEQ ID NO: 1016858 - RNA, 19 nt, Artificial Sequence
  Description of Artificial Sequence: Synthetic oligonucleotide
ucgauauauagcuacauug

SEQ ID NO: 1016859 - RNA, 19 nt, Artificial Sequence
  Description of Artificial Sequence: Synthetic oligonucleotide
uacuccauagcguugacgg

SEQ ID NO: 1016860 - RNA, 19 nt, Artificial Sequence
  Description of Artificial Sequence: Synthetic oligonucleotide
agucaauccacgcugaggg

SEQ ID NO: 1016861 - RNA, 19 nt, Artificial Sequence
  Description of Artificial Sequence: Synthetic oligonucleotide
aacgaauuagcuuuucucu

SEQ ID NO: 1016862 - RNA, 19 nt, Artificial Sequence
  Description of Artificial Sequence: Synthetic oligonucleotide
gagugaacgaacaagaaag

SEQ ID NO: 1016863 - RNA, 19 nt, Artificial Sequence
  Description of Artificial Sequence: Synthetic oligonucleotide
uucuuugucggaaugaucu

SEQ ID NO: 1016864 - RNA, 19 nt, Artificial Sequence
  Description of Artificial Sequence: Synthetic oligonucleotide
agagacuacuaccuaaagc

SEQ ID NO: 1016865 - RNA, 19 nt, Artificial Sequence
  Description of Artificial Sequence: Synthetic oligonucleotide
ucuucgucgauauauagcu

SEQ ID NO: 1016866 - RNA, 19 nt, Artificial Sequence
  Description of Artificial Sequence: Synthetic oligonucleotide
acuaccuaaagcuucaugu

SEQ ID NO: 1016867 - RNA, 19 nt, Artificial Sequence
  Description of Artificial Sequence: Synthetic oligonucleotide
agauauacuuguuugaaga

SEQ ID NO: 1016868 - RNA, 19 nt, Artificial Sequence
  Description of Artificial Sequence: Synthetic oligonucleotide
aaauuugguuuauguuugc

SEQ ID NO: 1016869 - RNA, 19 nt, Artificial Sequence
  Description of Artificial Sequence: Synthetic oligonucleotide
aacugauagaaguggguuc

SEQ ID NO: 1016870 - RNA, 19 nt, Artificial Sequence
  Description of Artificial Sequence: Synthetic oligonucleotide
uuuuagucgcuuuaaauuc

SEQ ID NO: 1016871 - RNA, 19 nt, Artificial Sequence
  Description of Artificial Sequence: Synthetic oligonucleotide
cucaaguacagauccaugg

SEQ ID NO: 1016872 - RNA, 19 nt, Artificial Sequence
  Description of Artificial Sequence: Synthetic oligonucleotide
gagaugaucagagauauac

SEQ ID NO: 1016873 - RNA, 19 nt, Artificial Sequence
  Description of Artificial Sequence: Synthetic oligonucleotide
uuucucuaaauuucgaggu

SEQ ID NO: 1016874 - RNA, 19 nt, Artificial Sequence
  Description of Artificial Sequence: Synthetic oligonucleotide
aggaucaaagagcaagggc

SEQ ID NO: 1016875 - RNA, 19 nt, Artificial Sequence
  Description of Artificial Sequence: Synthetic oligonucleotide
auacuaaagauucauuccu

SEQ ID NO: 1016876 - RNA, 19 nt, Artificial Sequence
  Description of Artificial Sequence: Synthetic oligonucleotide
uguaugagccuguugagca

SEQ ID NO: 1016877 - RNA, 19 nt, Artificial Sequence
  Description of Artificial Sequence: Synthetic oligonucleotide
acugauucgagcaacgaac

SEQ ID NO: 1016878 - RNA, 19 nt, Artificial Sequence
  Description of Artificial Sequence: Synthetic oligonucleotide
gaacgaacaagaaaggggc

SEQ ID NO: 1016879 - RNA, 19 nt, Artificial Sequence
  Description of Artificial Sequence: Synthetic oligonucleotide
uucgauugugcaaguaacg

SEQ ID NO: 1016880 - RNA, 19 nt, Artificial Sequence
  Description of Artificial Sequence: Synthetic oligonucleotide
uguguagacaccagcaugu

SEQ ID NO: 1016881 - RNA, 19 nt, Artificial Sequence
  Description of Artificial Sequence: Synthetic oligonucleotide
gucauaugagcucaacugg

SEQ ID NO: 1016882 - RNA, 19 nt, Artificial Sequence
  Description of Artificial Sequence: Synthetic oligonucleotide
agcuacauuguuugaaggg

SEQ ID NO: 1016883 - RNA, 19 nt, Artificial Sequence
  Description of Artificial Sequence: Synthetic oligonucleotide
gugguaaacucucaguggg

SEQ ID NO: 1016884 - RNA, 19 nt, Artificial Sequence
  Description of Artificial Sequence: Synthetic oligonucleotide
auagcuacauuguuugaag

SEQ ID NO: 1016885 - RNA, 19 nt, Artificial Sequence
  Description of Artificial Sequence: Synthetic oligonucleotide
ucauaugagcucaacuggc

SEQ ID NO: 1016886 - RNA, 19 nt, Artificial Sequence
  Description of Artificial Sequence: Synthetic oligonucleotide
auaagagccacuucuucag

SEQ ID NO: 1016887 - RNA, 19 nt, Artificial Sequence
  Description of Artificial Sequence: Synthetic oligonucleotide
uuuucgauugugcaaguaa

SEQ ID NO: 1016888 - RNA, 19 nt, Artificial Sequence
  Description of Artificial Sequence: Synthetic oligonucleotide
uucauuugagcaugaagug

SEQ ID NO: 1016889 - RNA, 19 nt, Artificial Sequence
  Description of Artificial Sequence: Synthetic oligonucleotide
gacgguaucgccuaagaca

SEQ ID NO: 1016890 - RNA, 19 nt, Artificial Sequence
  Description of Artificial Sequence: Synthetic oligonucleotide
ugucaacugauagaagugg

SEQ ID NO: 1016891 - RNA, 19 nt, Artificial Sequence
  Description of Artificial Sequence: Synthetic oligonucleotide
gucggaaugaucuucaaga

SEQ ID NO: 1016892 - RNA, 19 nt, Artificial Sequence
  Description of Artificial Sequence: Synthetic oligonucleotide
acuggaacgaguuguauga

SEQ ID NO: 1016893 - RNA, 19 nt, Artificial Sequence
  Description of Artificial Sequence: Synthetic oligonucleotide
gcaaauauggguaaggcag

SEQ ID NO: 1016894 - RNA, 19 nt, Artificial Sequence
  Description of Artificial Sequence: Synthetic oligonucleotide
uucgucgauauauagcuac

SEQ ID NO: 1016895 - RNA, 19 nt, Artificial Sequence
  Description of Artificial Sequence: Synthetic oligonucleotide
uggucauuggaagagacug

SEQ ID NO: 1016896 - RNA, 19 nt, Artificial Sequence
  Description of Artificial Sequence: Synthetic oligonucleotide
gagauauacuuguuugaag

SEQ ID NO: 1016897 - RNA, 19 nt, Artificial Sequence
  Description of Artificial Sequence: Synthetic oligonucleotide
ugagugaacgaacaagaaa

SEQ ID NO: 1016898 - RNA, 19 nt, Artificial Sequence
  Description of Artificial Sequence: Synthetic oligonucleotide
ucgauugugcaaguaacgg

SEQ ID NO: 1016899 - RNA, 19 nt, Artificial Sequence
  Description of Artificial Sequence: Synthetic oligonucleotide
ugaauccgaauccuguuca

SEQ ID NO: 1016900 - RNA, 19 nt, Artificial Sequence
  Description of Artificial Sequence: Synthetic oligonucleotide
aaggcuuacaggaacaggu

SEQ ID NO: 1016901 - RNA, 19 nt, Artificial Sequence
  Description of Artificial Sequence: Synthetic oligonucleotide
acgaauuagcuuuucucuc

SEQ ID NO: 1016902 - RNA, 19 nt, Artificial Sequence
  Description of Artificial Sequence: Synthetic oligonucleotide
ugugcaguaaggcuucuac

SEQ ID NO: 1016903 - RNA, 19 nt, Artificial Sequence
  Description of Artificial Sequence: Synthetic oligonucleotide
gaaggaucaaagagcaagg

SEQ ID NO: 1016904 - RNA, 19 nt, Artificial Sequence
  Description of Artificial Sequence: Synthetic oligonucleotide
agucgcuuuaaauucucuc

SEQ ID NO: 1016905 - RNA, 19 nt, Artificial Sequence
  Description of Artificial Sequence: Synthetic oligonucleotide
uuuagucgcuuuaaauucu

SEQ ID NO: 1016906 - RNA, 19 nt, Artificial Sequence
  Description of Artificial Sequence: Synthetic oligonucleotide
uuugucggaaugaucuuca

SEQ ID NO: 1016907 - RNA, 19 nt, Artificial Sequence
  Description of Artificial Sequence: Synthetic oligonucleotide
uccuguaacuuaaauacua

SEQ ID NO: 1016908 - RNA, 19 nt, Artificial Sequence
  Description of Artificial Sequence: Synthetic oligonucleotide
uacauuguuugaagggugc

SEQ ID NO: 1016909 - RNA, 19 nt, Artificial Sequence
  Description of Artificial Sequence: Synthetic oligonucleotide
ucauccaguauccggcuag

SEQ ID NO: 1016910 - RNA, 19 nt, Artificial Sequence
  Description of Artificial Sequence: Synthetic oligonucleotide
uagucuccaauauuuauuc

SEQ ID NO: 1016911 - RNA, 19 nt, Artificial Sequence
  Description of Artificial Sequence: Synthetic oligonucleotide
acuaaagauucauuccuca

SEQ ID NO: 1016912 - RNA, 19 nt, Artificial Sequence
  Description of Artificial Sequence: Synthetic oligonucleotide
guuaucccugcuuagugag

SEQ ID NO: 1016913 - RNA, 19 nt, Artificial Sequence
  Description of Artificial Sequence: Synthetic oligonucleotide
caagacgugaauccgaauc

SEQ ID NO: 1016914 - RNA, 19 nt, Artificial Sequence
  Description of Artificial Sequence: Synthetic oligonucleotide
acaacguccaagucaucac

SEQ ID NO: 1016915 - RNA, 19 nt, Artificial Sequence
  Description of Artificial Sequence: Synthetic oligonucleotide
ucauuugagcaugaagugc

SEQ ID NO: 1016916 - RNA, 19 nt, Artificial Sequence
  Description of Artificial Sequence: Synthetic oligonucleotide
ucggaaugaucuucaagag

SEQ ID NO: 1016917 - RNA, 19 nt, Artificial Sequence
  Description of Artificial Sequence: Synthetic oligonucleotide
aacgaguuguaugagccug

SEQ ID NO: 1016918 - RNA, 19 nt, Artificial Sequence
  Description of Artificial Sequence: Synthetic oligonucleotide
gcuuauacaucugaggagg

SEQ ID NO: 1016919 - RNA, 19 nt, Artificial Sequence
  Description of Artificial Sequence: Synthetic oligonucleotide
ucaacugauagaagugggu

SEQ ID NO: 1016920 - RNA, 19 nt, Artificial Sequence
  Description of Artificial Sequence: Synthetic oligonucleotide
ugaugcacaggcuuucucu

SEQ ID NO: 1016921 - RNA, 19 nt, Artificial Sequence
  Description of Artificial Sequence: Synthetic oligonucleotide
ucgccuaagacauuuuagu

SEQ ID NO: 1016922 - RNA, 19 nt, Artificial Sequence
  Description of Artificial Sequence: Synthetic oligonucleotide
ucaacuggcauaagagggu

SEQ ID NO: 1016923 - RNA, 19 nt, Artificial Sequence
  Description of Artificial Sequence: Synthetic oligonucleotide
uaaauacuaaagauucauu

SEQ ID NO: 1016924 - RNA, 19 nt, Artificial Sequence
  Description of Artificial Sequence: Synthetic oligonucleotide
aguuagugaaggaucaaag

SEQ ID NO: 1016925 - RNA, 19 nt, Artificial Sequence
  Description of Artificial Sequence: Synthetic oligonucleotide
aggcuucuacuccauagcg

SEQ ID NO: 1016926 - RNA, 19 nt, Artificial Sequence
  Description of Artificial Sequence: Synthetic oligonucleotide
ucucuaaauuucgagguac

SEQ ID NO: 1016927 - RNA, 19 nt, Artificial Sequence
  Description of Artificial Sequence: Synthetic oligonucleotide
aauuucgagguaccuggga

SEQ ID NO: 1016928 - RNA, 19 nt, Artificial Sequence
  Description of Artificial Sequence: Synthetic oligonucleotide
aagaguuagugaaggauca

SEQ ID NO: 1016929 - RNA, 19 nt, Artificial Sequence
  Description of Artificial Sequence: Synthetic oligonucleotide
aguaacggcgcuucuucuc

SEQ ID NO: 1016930 - RNA, 19 nt, Artificial Sequence
  Description of Artificial Sequence: Synthetic oligonucleotide
gacuaccacacucucuucc

SEQ ID NO: 1016931 - RNA, 19 nt, Artificial Sequence
  Description of Artificial Sequence: Synthetic oligonucleotide
guuagugaaggaucaaaga

SEQ ID NO: 1016932 - RNA, 19 nt, Artificial Sequence
  Description of Artificial Sequence: Synthetic oligonucleotide
cgagcaacgaacaucaucc

SEQ ID NO: 1016933 - RNA, 19 nt, Artificial Sequence
  Description of Artificial Sequence: Synthetic oligonucleotide
uuggaagagacugauucga

SEQ ID NO: 1016934 - RNA, 19 nt, Artificial Sequence
  Description of Artificial Sequence: Synthetic oligonucleotide
cucggcagcacucaaguac

SEQ ID NO: 1016935 - RNA, 19 nt, Artificial Sequence
  Description of Artificial Sequence: Synthetic oligonucleotide
auucgagcaacgaacauca

SEQ ID NO: 1016936 - RNA, 19 nt, Artificial Sequence
  Description of Artificial Sequence: Synthetic oligonucleotide
aaaggaacugucaacugau

SEQ ID NO: 1016937 - RNA, 19 nt, Artificial Sequence
  Description of Artificial Sequence: Synthetic oligonucleotide
ugcaguagucaauccacgc

SEQ ID NO: 1016938 - RNA, 19 nt, Artificial Sequence
  Description of Artificial Sequence: Synthetic oligonucleotide
uagaaguggguucugguuu

SEQ ID NO: 1016939 - RNA, 19 nt, Artificial Sequence
  Description of Artificial Sequence: Synthetic oligonucleotide
uuuggcuaaaagucccucu

SEQ ID NO: 1016940 - RNA, 19 nt, Artificial Sequence
  Description of Artificial Sequence: Synthetic oligonucleotide
uaucccugcuuagugagag

SEQ ID NO: 1016941 - RNA, 19 nt, Artificial Sequence
  Description of Artificial Sequence: Synthetic oligonucleotide
ugauagaaguggguucugg

SEQ ID NO: 1016942 - RNA, 19 nt, Artificial Sequence
  Description of Artificial Sequence: Synthetic oligonucleotide
agacaguaccugcucgggc

SEQ ID NO: 1016943 - RNA, 19 nt, Artificial Sequence
  Description of Artificial Sequence: Synthetic oligonucleotide
agagacugauucgagcaac

SEQ ID NO: 1016944 - RNA, 19 nt, Artificial Sequence
  Description of Artificial Sequence: Synthetic oligonucleotide
uggaagagacugauucgag

SEQ ID NO: 1016945 - RNA, 19 nt, Artificial Sequence
  Description of Artificial Sequence: Synthetic oligonucleotide
uggaacgaguuguaugagc

SEQ ID NO: 1016946 - RNA, 19 nt, Artificial Sequence
  Description of Artificial Sequence: Synthetic oligonucleotide
acuggcauaagaggguuuc

SEQ ID NO: 1016947 - RNA, 19 nt, Artificial Sequence
  Description of Artificial Sequence: Synthetic oligonucleotide
uucgacugcucucuggggu

SEQ ID NO: 1016948 - RNA, 19 nt, Artificial Sequence
  Description of Artificial Sequence: Synthetic oligonucleotide
ucagauccaccaaagucaa

SEQ ID NO: 1016949 - RNA, 19 nt, Artificial Sequence
  Description of Artificial Sequence: Synthetic oligonucleotide
ucacccacaacguccaagu

SEQ ID NO: 1016950 - RNA, 19 nt, Artificial Sequence
  Description of Artificial Sequence: Synthetic oligonucleotide
ucgagcaacgaacaucauc

SEQ ID NO: 1016951 - RNA, 19 nt, Artificial Sequence
  Description of Artificial Sequence: Synthetic oligonucleotide
uccucauaaauuugguuua

SEQ ID NO: 1016952 - RNA, 19 nt, Artificial Sequence
  Description of Artificial Sequence: Synthetic oligonucleotide
ucgggcuuauacaucugag

SEQ ID NO: 1016953 - RNA, 19 nt, Artificial Sequence
  Description of Artificial Sequence: Synthetic oligonucleotide
cugucaacugauagaagug

SEQ ID NO: 1016954 - RNA, 19 nt, Artificial Sequence
  Description of Artificial Sequence: Synthetic oligonucleotide
gauucgagcaacgaacauc

SEQ ID NO: 1016955 - RNA, 19 nt, Artificial Sequence
  Description of Artificial Sequence: Synthetic oligonucleotide
caguagucaauccacgcug

SEQ ID NO: 1016956 - RNA, 19 nt, Artificial Sequence
  Description of Artificial Sequence: Synthetic oligonucleotide
gcuagcuucgcuucgacug

SEQ ID NO: 1016957 - RNA, 19 nt, Artificial Sequence
  Description of Artificial Sequence: Synthetic oligonucleotide
agcucaacuggcauaagag

SEQ ID NO: 1016958 - RNA, 19 nt, Artificial Sequence
  Description of Artificial Sequence: Synthetic oligonucleotide
uacuaccuaaagcuucaug

SEQ ID NO: 1016959 - RNA, 19 nt, Artificial Sequence
  Description of Artificial Sequence: Synthetic oligonucleotide
auuucgagguaccugggau

SEQ ID NO: 1016960 - RNA, 19 nt, Artificial Sequence
  Description of Artificial Sequence: Synthetic oligonucleotide
cuuauacaucugaggaggc

SEQ ID NO: 1016961 - RNA, 19 nt, Artificial Sequence
  Description of Artificial Sequence: Synthetic oligonucleotide
ugcucgggcuuauacaucu

SEQ ID NO: 1016962 - RNA, 19 nt, Artificial Sequence
  Description of Artificial Sequence: Synthetic oligonucleotide
agugaacgaacaagaaagg

SEQ ID NO: 1016963 - RNA, 19 nt, Artificial Sequence
  Description of Artificial Sequence: Synthetic oligonucleotide
cauagcguugacgguaucg

SEQ ID NO: 1016964 - RNA, 19 nt, Artificial Sequence
  Description of Artificial Sequence: Synthetic oligonucleotide
cuaucagcuucacugucag

SEQ ID NO: 1016965 - RNA, 19 nt, Artificial Sequence
  Description of Artificial Sequence: Synthetic oligonucleotide
uagucaauccacgcugagg

SEQ ID NO: 1016966 - RNA, 19 nt, Artificial Sequence
  Description of Artificial Sequence: Synthetic oligonucleotide
uuccagaucgucuggcaca

SEQ ID NO: 1016967 - RNA, 19 nt, Artificial Sequence
  Description of Artificial Sequence: Synthetic oligonucleotide
ucuaaauuucgagguaccu

SEQ ID NO: 1016968 - RNA, 19 nt, Artificial Sequence
  Description of Artificial Sequence: Synthetic oligonucleotide
acgaacaagaaaggggcuc

SEQ ID NO: 1016969 - RNA, 19 nt, Artificial Sequence
  Description of Artificial Sequence: Synthetic oligonucleotide
auggaaaguucagauccac

SEQ ID NO: 1016970 - RNA, 19 nt, Artificial Sequence
  Description of Artificial Sequence: Synthetic oligonucleotide
uugacgguaucgccuaaga

SEQ ID NO: 1016971 - RNA, 19 nt, Artificial Sequence
  Description of Artificial Sequence: Synthetic oligonucleotide
uggcaaauauggguaaggc

SEQ ID NO: 1016972 - RNA, 19 nt, Artificial Sequence
  Description of Artificial Sequence: Synthetic oligonucleotide
aagggugcauucuugucuu

SEQ ID NO: 1016973 - RNA, 19 nt, Artificial Sequence
  Description of Artificial Sequence: Synthetic oligonucleotide
ugcuuagugagagaugauc

SEQ ID NO: 1016974 - RNA, 19 nt, Artificial Sequence
  Description of Artificial Sequence: Synthetic oligonucleotide
agagauauacuuguuugaa

SEQ ID NO: 1016975 - RNA, 19 nt, Artificial Sequence
  Description of Artificial Sequence: Synthetic oligonucleotide
ggaacgaguuguaugagcc

SEQ ID NO: 1016976 - RNA, 19 nt, Artificial Sequence
  Description of Artificial Sequence: Synthetic oligonucleotide
caaguaacggcgcuucuuc

SEQ ID NO: 1016977 - RNA, 19 nt, Artificial Sequence
  Description of Artificial Sequence: Synthetic oligonucleotide
guucggcacagaaagauac

SEQ ID NO: 1016978 - RNA, 19 nt, Artificial Sequence
  Description of Artificial Sequence: Synthetic oligonucleotide
cacucuauagccccaaaga

SEQ ID NO: 1016979 - RNA, 19 nt, Artificial Sequence
  Description of Artificial Sequence: Synthetic oligonucleotide
gagacugauucgagcaacg

SEQ ID NO: 1016980 - RNA, 19 nt, Artificial Sequence
  Description of Artificial Sequence: Synthetic oligonucleotide
agguuuguugcaggguacc

SEQ ID NO: 1016981 - RNA, 19 nt, Artificial Sequence
  Description of Artificial Sequence: Synthetic oligonucleotide
auauauagcuacauuguuu

SEQ ID NO: 1016982 - RNA, 19 nt, Artificial Sequence
  Description of Artificial Sequence: Synthetic oligonucleotide
uuauacaucugaggaggca

SEQ ID NO: 1016983 - RNA, 19 nt, Artificial Sequence
  Description of Artificial Sequence: Synthetic oligonucleotide
uuguuugaagggugcauuc

SEQ ID NO: 1016984 - RNA, 19 nt, Artificial Sequence
  Description of Artificial Sequence: Synthetic oligonucleotide
aauggaaaguucagaucca

SEQ ID NO: 1016985 - RNA, 19 nt, Artificial Sequence
  Description of Artificial Sequence: Synthetic oligonucleotide
gacuacuaccuaaagcuuc

SEQ ID NO: 1016986 - RNA, 19 nt, Artificial Sequence
  Description of Artificial Sequence: Synthetic oligonucleotide
uaucgccuaagacauuuua

SEQ ID NO: 1016987 - RNA, 19 nt, Artificial Sequence
  Description of Artificial Sequence: Synthetic oligonucleotide
gcucaacuggcauaagagg

SEQ ID NO: 1016988 - RNA, 19 nt, Artificial Sequence
  Description of Artificial Sequence: Synthetic oligonucleotide
uucucuaaauuucgaggua

SEQ ID NO: 1016989 - RNA, 19 nt, Artificial Sequence
  Description of Artificial Sequence: Synthetic oligonucleotide
gaagggugcauucuugucu

SEQ ID NO: 1016990 - RNA, 19 nt, Artificial Sequence
  Description of Artificial Sequence: Synthetic oligonucleotide
cuggcaaauauggguaagg

SEQ ID NO: 1016991 - RNA, 19 nt, Artificial Sequence
  Description of Artificial Sequence: Synthetic oligonucleotide
auaagaggguuucacccau

SEQ ID NO: 1016992 - RNA, 19 nt, Artificial Sequence
  Description of Artificial Sequence: Synthetic oligonucleotide
uucguuggcaagacgugaa

SEQ ID NO: 1016993 - RNA, 19 nt, Artificial Sequence
  Description of Artificial Sequence: Synthetic oligonucleotide
aaguaacggcgcuucuucu

SEQ ID NO: 1016994 - RNA, 19 nt, Artificial Sequence
  Description of Artificial Sequence: Synthetic oligonucleotide
cugggaucugcacccaucc

SEQ ID NO: 1016995 - RNA, 19 nt, Artificial Sequence
  Description of Artificial Sequence: Synthetic oligonucleotide
ugacgguaucgccuaagac

SEQ ID NO: 1016996 - RNA, 19 nt, Artificial Sequence
  Description of Artificial Sequence: Synthetic oligonucleotide
ucgucgauauauagcuaca

SEQ ID NO: 1016997 - RNA, 19 nt, Artificial Sequence
  Description of Artificial Sequence: Synthetic oligonucleotide
cagaucgucuggcacagac

SEQ ID NO: 1016998 - RNA, 19 nt, Artificial Sequence
  Description of Artificial Sequence: Synthetic oligonucleotide
ugagggaaugaugcacagg

SEQ ID NO: 1016999 - RNA, 19 nt, Artificial Sequence
  Description of Artificial Sequence: Synthetic oligonucleotide
cauuugagcaugaagugcu

SEQ ID NO: 1017000 - RNA, 19 nt, Artificial Sequence
  Description of Artificial Sequence: Synthetic oligonucleotide
cacugucuaugcuaucagc

SEQ ID NO: 1017001 - RNA, 19 nt, Artificial Sequence
  Description of Artificial Sequence: Synthetic oligonucleotide
uuucgagguaccugggauc

SEQ ID NO: 1017002 - RNA, 19 nt, Artificial Sequence
  Description of Artificial Sequence: Synthetic oligonucleotide
ggcuuauacaucugaggag

SEQ ID NO: 1017003 - RNA, 19 nt, Artificial Sequence
  Description of Artificial Sequence: Synthetic oligonucleotide
aucgccuaagacauuuuag

SEQ ID NO: 1017004 - RNA, 19 nt, Artificial Sequence
  Description of Artificial Sequence: Synthetic oligonucleotide
uucgagguaccugggaucu

SEQ ID NO: 1017005 - RNA, 19 nt, Artificial Sequence
  Description of Artificial Sequence: Synthetic oligonucleotide
ggaagagacugauucgagc

SEQ ID NO: 1017006 - RNA, 19 nt, Artificial Sequence
  Description of Artificial Sequence: Synthetic oligonucleotide
agagcaagggcgacggagg

SEQ ID NO: 1017007 - RNA, 19 nt, Artificial Sequence
  Description of Artificial Sequence: Synthetic oligonucleotide
cauaagaggguuucaccca

SEQ ID NO: 1017008 - RNA, 19 nt, Artificial Sequence
  Description of Artificial Sequence: Synthetic oligonucleotide
uucgcuucgacugcucucu

SEQ ID NO: 1017009 - RNA, 19 nt, Artificial Sequence
  Description of Artificial Sequence: Synthetic oligonucleotide
cuagcuucgcuucgacugc

SEQ ID NO: 1017010 - RNA, 19 nt, Artificial Sequence
  Description of Artificial Sequence: Synthetic oligonucleotide
ggaacugucaacugauaga

SEQ ID NO: 1017011 - RNA, 19 nt, Artificial Sequence
  Description of Artificial Sequence: Synthetic oligonucleotide
uugguuuauguuugcuuau

SEQ ID NO: 1017012 - RNA, 19 nt, Artificial Sequence
  Description of Artificial Sequence: Synthetic oligonucleotide
ugaagugcuagggcauucc

SEQ ID NO: 1017013 - RNA, 19 nt, Artificial Sequence
  Description of Artificial Sequence: Synthetic oligonucleotide
gcuucgacugcucucuggg

SEQ ID NO: 1017014 - RNA, 19 nt, Artificial Sequence
  Description of Artificial Sequence: Synthetic oligonucleotide
cucucauaauaagagccac

SEQ ID NO: 1017015 - RNA, 19 nt, Artificial Sequence
  Description of Artificial Sequence: Synthetic oligonucleotide
uccaguauccggcuagcuu

SEQ ID NO: 1017016 - RNA, 19 nt, Artificial Sequence
  Description of Artificial Sequence: Synthetic oligonucleotide
gagcucaacuggcauaaga

SEQ ID NO: 1017017 - RNA, 19 nt, Artificial Sequence
  Description of Artificial Sequence: Synthetic oligonucleotide
gacugauucgagcaacgaa

SEQ ID NO: 1017018 - RNA, 19 nt, Artificial Sequence
  Description of Artificial Sequence: Synthetic oligonucleotide
aacaagaaaggggcuccug

SEQ ID NO: 1017019 - RNA, 19 nt, Artificial Sequence
  Description of Artificial Sequence: Synthetic oligonucleotide
guaugagccuguugagcag

SEQ ID NO: 1017020 - RNA, 19 nt, Artificial Sequence
  Description of Artificial Sequence: Synthetic oligonucleotide
ugaagggugcauucuuguc

SEQ ID NO: 1017021 - RNA, 19 nt, Artificial Sequence
  Description of Artificial Sequence: Synthetic oligonucleotide
auauagcuacauuguuuga

SEQ ID NO: 1017022 - RNA, 19 nt, Artificial Sequence
  Description of Artificial Sequence: Synthetic oligonucleotide
ugcuagggcauuccuucga

SEQ ID NO: 1017023 - RNA, 19 nt, Artificial Sequence
  Description of Artificial Sequence: Synthetic oligonucleotide
gauagaaguggguucuggu

SEQ ID NO: 1017024 - RNA, 19 nt, Artificial Sequence
  Description of Artificial Sequence: Synthetic oligonucleotide
auagggccuggauuguucu

SEQ ID NO: 1017025 - RNA, 19 nt, Artificial Sequence
  Description of Artificial Sequence: Synthetic oligonucleotide
gacgcgguugagagcaugg

SEQ ID NO: 1017026 - RNA, 19 nt, Artificial Sequence
  Description of Artificial Sequence: Synthetic oligonucleotide
uguucggcacagaaagaua

SEQ ID NO: 1017027 - RNA, 19 nt, Artificial Sequence
  Description of Artificial Sequence: Synthetic oligonucleotide
gcgguugagagcaugggcg

SEQ ID NO: 1017028 - RNA, 19 nt, Artificial Sequence
  Description of Artificial Sequence: Synthetic oligonucleotide
agggucaccucuccauguc

SEQ ID NO: 1017029 - RNA, 19 nt, Artificial Sequence
  Description of Artificial Sequence: Synthetic oligonucleotide
caguauccggcuagcuucg

SEQ ID NO: 1017030 - RNA, 19 nt, Artificial Sequence
  Description of Artificial Sequence: Synthetic oligonucleotide
uccggcuagcuucgcuucg

SEQ ID NO: 1017031 - RNA, 19 nt, Artificial Sequence
  Description of Artificial Sequence: Synthetic oligonucleotide
ucucucuuucuuuggcuaa

SEQ ID NO: 1017032 - RNA, 19 nt, Artificial Sequence
  Description of Artificial Sequence: Synthetic oligonucleotide
uuuccauucuucgucgaua

SEQ ID NO: 1017033 - RNA, 19 nt, Artificial Sequence
  Description of Artificial Sequence: Synthetic oligonucleotide
uugugcaaguaacggcgcu

SEQ ID NO: 1017034 - RNA, 19 nt, Artificial Sequence
  Description of Artificial Sequence: Synthetic oligonucleotide
acgguaucgccuaagacau

SEQ ID NO: 1017035 - RNA, 19 nt, Artificial Sequence
  Description of Artificial Sequence: Synthetic oligonucleotide
uuaucccugcuuagugaga

SEQ ID NO: 1017036 - RNA, 19 nt, Artificial Sequence
  Description of Artificial Sequence: Synthetic oligonucleotide
aagauaccccaucuuucuu

SEQ ID NO: 1017037 - RNA, 19 nt, Artificial Sequence
  Description of Artificial Sequence: Synthetic oligonucleotide
uaccugcucgggcuuauac

SEQ ID NO: 1017038 - RNA, 19 nt, Artificial Sequence
  Description of Artificial Sequence: Synthetic oligonucleotide
cugauucgagcaacgaaca

SEQ ID NO: 1017039 - RNA, 19 nt, Artificial Sequence
  Description of Artificial Sequence: Synthetic oligonucleotide
ugauucgagcaacgaacau

SEQ ID NO: 1017040 - RNA, 19 nt, Artificial Sequence
  Description of Artificial Sequence: Synthetic oligonucleotide
cugagggaaugaugcacag

SEQ ID NO: 1017041 - RNA, 19 nt, Artificial Sequence
  Description of Artificial Sequence: Synthetic oligonucleotide
cuucgagcauguucggcac

SEQ ID NO: 1017042 - RNA, 19 nt, Artificial Sequence
  Description of Artificial Sequence: Synthetic oligonucleotide
ccaguauccggcuagcuuc

SEQ ID NO: 1017043 - RNA, 19 nt, Artificial Sequence
  Description of Artificial Sequence: Synthetic oligonucleotide
cugcaaacgaauuagcuuu

SEQ ID NO: 1017044 - RNA, 19 nt, Artificial Sequence
  Description of Artificial Sequence: Synthetic oligonucleotide
guagucaauccacgcugag

SEQ ID NO: 1017045 - RNA, 19 nt, Artificial Sequence
  Description of Artificial Sequence: Synthetic oligonucleotide
auccggcuagcuucgcuuc

SEQ ID NO: 1017046 - RNA, 19 nt, Artificial Sequence
  Description of Artificial Sequence: Synthetic oligonucleotide
aacgaacaagaaaggggcu

SEQ ID NO: 1017047 - RNA, 19 nt, Artificial Sequence
  Description of Artificial Sequence: Synthetic oligonucleotide
gaguuguaugagccuguug

SEQ ID NO: 1017048 - RNA, 19 nt, Artificial Sequence
  Description of Artificial Sequence: Synthetic oligonucleotide
cuagggcauuccuucgagc

SEQ ID NO: 1017049 - RNA, 19 nt, Artificial Sequence
  Description of Artificial Sequence: Synthetic oligonucleotide
uauccggcuagcuucgcuu

SEQ ID NO: 1017050 - RNA, 19 nt, Artificial Sequence
  Description of Artificial Sequence: Synthetic oligonucleotide
cuucgacugcucucugggg

SEQ ID NO: 1017051 - RNA, 19 nt, Artificial Sequence
  Description of Artificial Sequence: Synthetic oligonucleotide
ggcaaauauggguaaggca

SEQ ID NO: 1017052 - RNA, 19 nt, Artificial Sequence
  Description of Artificial Sequence: Synthetic oligonucleotide
ggguuucacccauagggcc

SEQ ID NO: 1017053 - RNA, 19 nt, Artificial Sequence
  Description of Artificial Sequence: Synthetic oligonucleotide
guagucuggguuaucccug

SEQ ID NO: 1017054 - RNA, 19 nt, Artificial Sequence
  Description of Artificial Sequence: Synthetic oligonucleotide
agaugaucagagauauacu

SEQ ID NO: 1017055 - RNA, 19 nt, Artificial Sequence
  Description of Artificial Sequence: Synthetic oligonucleotide
gaaugaugcacaggcuuuc

SEQ ID NO: 1017056 - RNA, 19 nt, Artificial Sequence
  Description of Artificial Sequence: Synthetic oligonucleotide
ugaagcucggcagcacuca

SEQ ID NO: 1017057 - RNA, 19 nt, Artificial Sequence
  Description of Artificial Sequence: Synthetic oligonucleotide
uuccuucgagcauguucgg

SEQ ID NO: 1017058 - RNA, 19 nt, Artificial Sequence
  Description of Artificial Sequence: Synthetic oligonucleotide
auaauaagagccacuucuu

SEQ ID NO: 1017059 - RNA, 19 nt, Artificial Sequence
  Description of Artificial Sequence: Synthetic oligonucleotide
gacgugaauccgaauccug

SEQ ID NO: 1017060 - RNA, 19 nt, Artificial Sequence
  Description of Artificial Sequence: Synthetic oligonucleotide
ugcaaacgaauuagcuuuu

SEQ ID NO: 1017061 - RNA, 19 nt, Artificial Sequence
  Description of Artificial Sequence: Synthetic oligonucleotide
agaaguggguucugguuuu

SEQ ID NO: 1017062 - RNA, 19 nt, Artificial Sequence
  Description of Artificial Sequence: Synthetic oligonucleotide
cacaacguccaagucauca

SEQ ID NO: 1017063 - RNA, 19 nt, Artificial Sequence
  Description of Artificial Sequence: Synthetic oligonucleotide
uggguuaucccugcuuagu

SEQ ID NO: 1017064 - RNA, 19 nt, Artificial Sequence
  Description of Artificial Sequence: Synthetic oligonucleotide
cuaagcaccucugacugga

SEQ ID NO: 1017065 - RNA, 19 nt, Artificial Sequence
  Description of Artificial Sequence: Synthetic oligonucleotide
cuggguuaucccugcuuag

SEQ ID NO: 1017066 - RNA, 19 nt, Artificial Sequence
  Description of Artificial Sequence: Synthetic oligonucleotide
augaagugcuagggcauuc

SEQ ID NO: 1017067 - RNA, 19 nt, Artificial Sequence
  Description of Artificial Sequence: Synthetic oligonucleotide
gcaacgaacaucauccaca

SEQ ID NO: 1017068 - RNA, 19 nt, Artificial Sequence
  Description of Artificial Sequence: Synthetic oligonucleotide
gcuuagugagagaugauca

SEQ ID NO: 1017069 - RNA, 19 nt, Artificial Sequence
  Description of Artificial Sequence: Synthetic oligonucleotide
cagguuuguugcaggguac

SEQ ID NO: 1017070 - RNA, 19 nt, Artificial Sequence
  Description of Artificial Sequence: Synthetic oligonucleotide
aagggcgacggagggcacg

SEQ ID NO: 1017071 - RNA, 19 nt, Artificial Sequence
  Description of Artificial Sequence: Synthetic oligonucleotide
ugggcggugagugaacgaa

SEQ ID NO: 1017072 - RNA, 19 nt, Artificial Sequence
  Description of Artificial Sequence: Synthetic oligonucleotide
caugggcggugagugaacg

SEQ ID NO: 1017073 - RNA, 19 nt, Artificial Sequence
  Description of Artificial Sequence: Synthetic oligonucleotide
auaccaucacccacaacgu

SEQ ID NO: 1017074 - RNA, 19 nt, Artificial Sequence
  Description of Artificial Sequence: Synthetic oligonucleotide
ggcagugucuggucauugg

SEQ ID NO: 1017075 - RNA, 19 nt, Artificial Sequence
  Description of Artificial Sequence: Synthetic oligonucleotide
gcaggguaccucuucagac

SEQ ID NO: 1017076 - RNA, 19 nt, Artificial Sequence
  Description of Artificial Sequence: Synthetic oligonucleotide
uccacaguaauggguuccu

SEQ ID NO: 1017077 - RNA, 19 nt, Artificial Sequence
  Description of Artificial Sequence: Synthetic oligonucleotide
agcguugacgguaucgccu

SEQ ID NO: 1017078 - RNA, 19 nt, Artificial Sequence
  Description of Artificial Sequence: Synthetic oligonucleotide
acauuguuugaagggugca

SEQ ID NO: 1017079 - RNA, 19 nt, Artificial Sequence
  Description of Artificial Sequence: Synthetic oligonucleotide
aguagucaauccacgcuga

SEQ ID NO: 1017080 - RNA, 19 nt, Artificial Sequence
  Description of Artificial Sequence: Synthetic oligonucleotide
agacgugaauccgaauccu

SEQ ID NO: 1017081 - RNA, 19 nt, Artificial Sequence
  Description of Artificial Sequence: Synthetic oligonucleotide
gaaccugauuuguguccug

SEQ ID NO: 1017082 - RNA, 19 nt, Artificial Sequence
  Description of Artificial Sequence: Synthetic oligonucleotide
ugcaucuggccuaggccuc

SEQ ID NO: 1017083 - RNA, 19 nt, Artificial Sequence
  Description of Artificial Sequence: Synthetic oligonucleotide
gguuaucccugcuuaguga

SEQ ID NO: 1017084 - RNA, 19 nt, Artificial Sequence
  Description of Artificial Sequence: Synthetic oligonucleotide
ugguuuauguuugcuuaua

SEQ ID NO: 1017085 - RNA, 19 nt, Artificial Sequence
  Description of Artificial Sequence: Synthetic oligonucleotide
guugacgguaucgccuaag

SEQ ID NO: 1017086 - RNA, 19 nt, Artificial Sequence
  Description of Artificial Sequence: Synthetic oligonucleotide
acuccauagcguugacggu

SEQ ID NO: 1017087 - RNA, 19 nt, Artificial Sequence
  Description of Artificial Sequence: Synthetic oligonucleotide
ucguuggcaagacgugaau

SEQ ID NO: 1017088 - RNA, 19 nt, Artificial Sequence
  Description of Artificial Sequence: Synthetic oligonucleotide
aacgaacaucauccacaaa

SEQ ID NO: 1017089 - RNA, 19 nt, Artificial Sequence
  Description of Artificial Sequence: Synthetic oligonucleotide
guuugcuuauagcacucua

SEQ ID NO: 1017090 - RNA, 19 nt, Artificial Sequence
  Description of Artificial Sequence: Synthetic oligonucleotide
cauucuucgucgauauaua

SEQ ID NO: 1017091 - RNA, 19 nt, Artificial Sequence
  Description of Artificial Sequence: Synthetic oligonucleotide
uccuucgagcauguucggc

SEQ ID NO: 1017092 - RNA, 19 nt, Artificial Sequence
  Description of Artificial Sequence: Synthetic oligonucleotide
aagcucggcagcacucaag

SEQ ID NO: 1017093 - RNA, 19 nt, Artificial Sequence
  Description of Artificial Sequence: Synthetic oligonucleotide
ugugcaaguaacggcgcuu

SEQ ID NO: 1017094 - RNA, 19 nt, Artificial Sequence
  Description of Artificial Sequence: Synthetic oligonucleotide
aggcauagucuccaauauu

SEQ ID NO: 1017095 - RNA, 19 nt, Artificial Sequence
  Description of Artificial Sequence: Synthetic oligonucleotide
gucguuuaaacugaucaau

SEQ ID NO: 1017096 - RNA, 19 nt, Artificial Sequence
  Description of Artificial Sequence: Synthetic oligonucleotide
gaaaugcaguggacagcag

SEQ ID NO: 1017097 - RNA, 19 nt, Artificial Sequence
  Description of Artificial Sequence: Synthetic oligonucleotide
aacggcgcuucuucucuuu

SEQ ID NO: 1017098 - RNA, 19 nt, Artificial Sequence
  Description of Artificial Sequence: Synthetic oligonucleotide
ucuaugcuaucagcuucac

SEQ ID NO: 1017099 - RNA, 19 nt, Artificial Sequence
  Description of Artificial Sequence: Synthetic oligonucleotide
agacugauucgagcaacga

SEQ ID NO: 1017100 - RNA, 19 nt, Artificial Sequence
  Description of Artificial Sequence: Synthetic oligonucleotide
aguauccggcuagcuucgc

SEQ ID NO: 1017101 - RNA, 19 nt, Artificial Sequence
  Description of Artificial Sequence: Synthetic oligonucleotide
guaacggcgcuucuucucu

SEQ ID NO: 1017102 - RNA, 19 nt, Artificial Sequence
  Description of Artificial Sequence: Synthetic oligonucleotide
aagugcuagggcauuccuu

SEQ ID NO: 1017103 - RNA, 19 nt, Artificial Sequence
  Description of Artificial Sequence: Synthetic oligonucleotide
cucgggcuuauacaucuga

SEQ ID NO: 1017104 - RNA, 19 nt, Artificial Sequence
  Description of Artificial Sequence: Synthetic oligonucleotide
cuggaacgaguuguaugag

SEQ ID NO: 1017105 - RNA, 19 nt, Artificial Sequence
  Description of Artificial Sequence: Synthetic oligonucleotide
agcaugggcggugagugaa

SEQ ID NO: 1017106 - RNA, 19 nt, Artificial Sequence
  Description of Artificial Sequence: Synthetic oligonucleotide
caaacgaauuagcuuuucu

SEQ ID NO: 1017107 - RNA, 19 nt, Artificial Sequence
  Description of Artificial Sequence: Synthetic oligonucleotide
cccaucuuucuucucgggc

SEQ ID NO: 1017108 - RNA, 19 nt, Artificial Sequence
  Description of Artificial Sequence: Synthetic oligonucleotide
cauggggccggcuuccaga

SEQ ID NO: 1017109 - RNA, 19 nt, Artificial Sequence
  Description of Artificial Sequence: Synthetic oligonucleotide
gaacgaguuguaugagccu

SEQ ID NO: 1017110 - RNA, 19 nt, Artificial Sequence
  Description of Artificial Sequence: Synthetic oligonucleotide
agggugcauucuugucuuc

SEQ ID NO: 1017111 - RNA, 19 nt, Artificial Sequence
  Description of Artificial Sequence: Synthetic oligonucleotide
cauguucggcacagaaaga

SEQ ID NO: 1017112 - RNA, 19 nt, Artificial Sequence
  Description of Artificial Sequence: Synthetic oligonucleotide
gaagugcuagggcauuccu

SEQ ID NO: 1017113 - RNA, 19 nt, Artificial Sequence
  Description of Artificial Sequence: Synthetic oligonucleotide
agggcgacggagggcacgg

SEQ ID NO: 1017114 - RNA, 19 nt, Artificial Sequence
  Description of Artificial Sequence: Synthetic oligonucleotide
acgcgguugagagcauggg

SEQ ID NO: 1017115 - RNA, 19 nt, Artificial Sequence
  Description of Artificial Sequence: Synthetic oligonucleotide
agaucgucuggcacagaca

SEQ ID NO: 1017116 - RNA, 19 nt, Artificial Sequence
  Description of Artificial Sequence: Synthetic oligonucleotide
agaguuagugaaggaucaa

SEQ ID NO: 1017117 - RNA, 19 nt, Artificial Sequence
  Description of Artificial Sequence: Synthetic oligonucleotide
cacggcauaccaucaccca

SEQ ID NO: 1017118 - RNA, 19 nt, Artificial Sequence
  Description of Artificial Sequence: Synthetic oligonucleotide
agacuacuaccuaaagcuu

SEQ ID NO: 1017119 - RNA, 19 nt, Artificial Sequence
  Description of Artificial Sequence: Synthetic oligonucleotide
gucgauauauagcuacauu

SEQ ID NO: 1017120 - RNA, 19 nt, Artificial Sequence
  Description of Artificial Sequence: Synthetic oligonucleotide
ugagcucaacuggcauaag

SEQ ID NO: 1017121 - RNA, 19 nt, Artificial Sequence
  Description of Artificial Sequence: Synthetic oligonucleotide
guuugaagggugcauucuu

SEQ ID NO: 1017122 - RNA, 19 nt, Artificial Sequence
  Description of Artificial Sequence: Synthetic oligonucleotide
cagggacuaccacacucuc

SEQ ID NO: 1017123 - RNA, 19 nt, Artificial Sequence
  Description of Artificial Sequence: Synthetic oligonucleotide
gugagugaacgaacaagaa

SEQ ID NO: 1017124 - RNA, 19 nt, Artificial Sequence
  Description of Artificial Sequence: Synthetic oligonucleotide
cuaccuaaagcuucauguu

SEQ ID NO: 1017125 - RNA, 19 nt, Artificial Sequence
  Description of Artificial Sequence: Synthetic oligonucleotide
gaagcucggcagcacucaa

SEQ ID NO: 1017126 - RNA, 19 nt, Artificial Sequence
  Description of Artificial Sequence: Synthetic oligonucleotide
guggccagcauucugcguu

SEQ ID NO: 1017127 - RNA, 19 nt, Artificial Sequence
  Description of Artificial Sequence: Synthetic oligonucleotide
augggcggugagugaacga

SEQ ID NO: 1017128 - RNA, 19 nt, Artificial Sequence
  Description of Artificial Sequence: Synthetic oligonucleotide
caucccaaaggcagggacu

SEQ ID NO: 1017129 - RNA, 19 nt, Artificial Sequence
  Description of Artificial Sequence: Synthetic oligonucleotide
ccagacgcgguugagagca

SEQ ID NO: 1017130 - RNA, 19 nt, Artificial Sequence
  Description of Artificial Sequence: Synthetic oligonucleotide
cgaauuagcuuuucucuca

SEQ ID NO: 1017131 - RNA, 19 nt, Artificial Sequence
  Description of Artificial Sequence: Synthetic oligonucleotide
gacggagggcacggcauac

SEQ ID NO: 1017132 - RNA, 19 nt, Artificial Sequence
  Description of Artificial Sequence: Synthetic oligonucleotide
gggacuaccacacucucuu

SEQ ID NO: 1017133 - RNA, 19 nt, Artificial Sequence
  Description of Artificial Sequence: Synthetic oligonucleotide
gcaagggcgacggagggca

SEQ ID NO: 1017134 - RNA, 19 nt, Artificial Sequence
  Description of Artificial Sequence: Synthetic oligonucleotide
acgaguuguaugagccugu

SEQ ID NO: 1017135 - RNA, 19 nt, Artificial Sequence
  Description of Artificial Sequence: Synthetic oligonucleotide
ggucaccucuccaugucug

SEQ ID NO: 1017136 - RNA, 19 nt, Artificial Sequence
  Description of Artificial Sequence: Synthetic oligonucleotide
cugcucgggcuuauacauc

SEQ ID NO: 1017137 - RNA, 19 nt, Artificial Sequence
  Description of Artificial Sequence: Synthetic oligonucleotide
gcaguagucaauccacgcu

SEQ ID NO: 1017138 - RNA, 19 nt, Artificial Sequence
  Description of Artificial Sequence: Synthetic oligonucleotide
aucccugcuuagugagaga

SEQ ID NO: 1017139 - RNA, 19 nt, Artificial Sequence
  Description of Artificial Sequence: Synthetic oligonucleotide
gcacggcauaccaucaccc

SEQ ID NO: 1017140 - RNA, 19 nt, Artificial Sequence
  Description of Artificial Sequence: Synthetic oligonucleotide
ucgcuucgacugcucucug

SEQ ID NO: 1017141 - RNA, 19 nt, Artificial Sequence
  Description of Artificial Sequence: Synthetic oligonucleotide
uucgagcaacgaacaucau

SEQ ID NO: 1017142 - RNA, 19 nt, Artificial Sequence
  Description of Artificial Sequence: Synthetic oligonucleotide
gaauccgaauccuguucau

SEQ ID NO: 1017143 - RNA, 19 nt, Artificial Sequence
  Description of Artificial Sequence: Synthetic oligonucleotide
agacgcgguugagagcaug

SEQ ID NO: 1017144 - RNA, 19 nt, Artificial Sequence
  Description of Artificial Sequence: Synthetic oligonucleotide
aacuggcauaagaggguuu

SEQ ID NO: 1017145 - RNA, 19 nt, Artificial Sequence
  Description of Artificial Sequence: Synthetic oligonucleotide
gaaguggguucugguuuuc

SEQ ID NO: 1017146 - RNA, 19 nt, Artificial Sequence
  Description of Artificial Sequence: Synthetic oligonucleotide
cuucgucgauauauagcua

SEQ ID NO: 1017147 - RNA, 19 nt, Artificial Sequence
  Description of Artificial Sequence: Synthetic oligonucleotide
caggcauagucuccaauau

SEQ ID NO: 1017148 - RNA, 19 nt, Artificial Sequence
  Description of Artificial Sequence: Synthetic oligonucleotide
cggugagugaacgaacaag

SEQ ID NO: 1017149 - RNA, 19 nt, Artificial Sequence
  Description of Artificial Sequence: Synthetic oligonucleotide
cacccacaacguccaaguc

SEQ ID NO: 1017150 - RNA, 19 nt, Artificial Sequence
  Description of Artificial Sequence: Synthetic oligonucleotide
uaacggcgcuucuucucuu

SEQ ID NO: 1017151 - RNA, 19 nt, Artificial Sequence
  Description of Artificial Sequence: Synthetic oligonucleotide
ggcggugagugaacgaaca

SEQ ID NO: 1017152 - RNA, 19 nt, Artificial Sequence
  Description of Artificial Sequence: Synthetic oligonucleotide
cuuuucgauugugcaagua

SEQ ID NO: 1017153 - RNA, 19 nt, Artificial Sequence
  Description of Artificial Sequence: Synthetic oligonucleotide
cgauucguuggcaagacgu

SEQ ID NO: 1017154 - RNA, 19 nt, Artificial Sequence
  Description of Artificial Sequence: Synthetic oligonucleotide
gguaucgccuaagacauuu

SEQ ID NO: 1017155 - RNA, 19 nt, Artificial Sequence
  Description of Artificial Sequence: Synthetic oligonucleotide
ccgauucguuggcaagacg

SEQ ID NO: 1017156 - RNA, 19 nt, Artificial Sequence
  Description of Artificial Sequence: Synthetic oligonucleotide
cgcgguugagagcaugggc

SEQ ID NO: 1017157 - RNA, 19 nt, Artificial Sequence
  Description of Artificial Sequence: Synthetic oligonucleotide
ggcaagacgugaauccgaa

SEQ ID NO: 1017158 - RNA, 19 nt, Artificial Sequence
  Description of Artificial Sequence: Synthetic oligonucleotide
cgagguaccugggaucugc

SEQ ID NO: 1017159 - RNA, 19 nt, Artificial Sequence
  Description of Artificial Sequence: Synthetic oligonucleotide
guauccggcuagcuucgcu

SEQ ID NO: 1017160 - RNA, 19 nt, Artificial Sequence
  Description of Artificial Sequence: Synthetic oligonucleotide
ccauucuucgucgauauau

SEQ ID NO: 1017161 - RNA, 19 nt, Artificial Sequence
  Description of Artificial Sequence: Synthetic oligonucleotide
cuaugcuaucagcuucacu

SEQ ID NO: 1017162 - RNA, 19 nt, Artificial Sequence
  Description of Artificial Sequence: Synthetic oligonucleotide
gcaaacgaauuagcuuuuc

SEQ ID NO: 1017163 - RNA, 19 nt, Artificial Sequence
  Description of Artificial Sequence: Synthetic oligonucleotide
gcacccauccccagucacc

SEQ ID NO: 1017164 - RNA, 19 nt, Artificial Sequence
  Description of Artificial Sequence: Synthetic oligonucleotide
gguuucacccauagggccu

SEQ ID NO: 1017165 - RNA, 19 nt, Artificial Sequence
  Description of Artificial Sequence: Synthetic oligonucleotide
ggggcuccugcgaucuggg

SEQ ID NO: 1017166 - RNA, 19 nt, Artificial Sequence
  Description of Artificial Sequence: Synthetic oligonucleotide
gguccucagaaaggcuuac

SEQ ID NO: 1017167 - RNA, 19 nt, Artificial Sequence
  Description of Artificial Sequence: Synthetic oligonucleotide
cacccauagggccuggauu

SEQ ID NO: 1017168 - RNA, 19 nt, Artificial Sequence
  Description of Artificial Sequence: Synthetic oligonucleotide
gcauagucuccaauauuua

SEQ ID NO: 1017169 - RNA, 19 nt, Artificial Sequence
  Description of Artificial Sequence: Synthetic oligonucleotide
gcguugacgguaucgccua

SEQ ID NO: 1017170 - RNA, 19 nt, Artificial Sequence
  Description of Artificial Sequence: Synthetic oligonucleotide
cccgauucguuggcaagac

SEQ ID NO: 1017171 - RNA, 19 nt, Artificial Sequence
  Description of Artificial Sequence: Synthetic oligonucleotide
gcggugagugaacgaacaa

SEQ ID NO: 1017172 - RNA, 19 nt, Artificial Sequence
  Description of Artificial Sequence: Synthetic oligonucleotide
gggcggugagugaacgaac

SEQ ID NO: 1017173 - RNA, 19 nt, Artificial Sequence
  Description of Artificial Sequence: Synthetic oligonucleotide
gcauaccaucacccacaac

SEQ ID NO: 1017174 - RNA, 19 nt, Artificial Sequence
  Description of Artificial Sequence: Synthetic oligonucleotide
gguuuguugcaggguaccu

SEQ ID NO: 1017175 - RNA, 19 nt, Artificial Sequence
  Description of Artificial Sequence: Synthetic oligonucleotide
ggcuagcuucgcuucgacu

SEQ ID NO: 1017176 - RNA, 19 nt, Artificial Sequence
  Description of Artificial Sequence: Synthetic oligonucleotide
cugcuuagugagagaugau

SEQ ID NO: 1017177 - RNA, 19 nt, Artificial Sequence
  Description of Artificial Sequence: Synthetic oligonucleotide
ccacaguaauggguuccug

SEQ ID NO: 1017178 - RNA, 19 nt, Artificial Sequence
  Description of Artificial Sequence: Synthetic oligonucleotide
ggguccucagaaaggcuua

SEQ ID NO: 1017179 - RNA, 19 nt, Artificial Sequence
  Description of Artificial Sequence: Synthetic oligonucleotide
gccccuccagacgcgguug

SEQ ID NO: 1017180 - RNA, 19 nt, Artificial Sequence
  Description of Artificial Sequence: Synthetic oligonucleotide
ccuccagacgcgguugaga

SEQ ID NO: 1017181 - RNA, 19 nt, Artificial Sequence
  Description of Artificial Sequence: Synthetic oligonucleotide
gcaaguaacggcgcuucuu

SEQ ID NO: 1017182 - RNA, 19 nt, Artificial Sequence
  Description of Artificial Sequence: Synthetic oligonucleotide
ccccgauucguuggcaaga

SEQ ID NO: 1017183 - RNA, 19 nt, Artificial Sequence
  Description of Artificial Sequence: Synthetic oligonucleotide
gccagucaagagacuacua

SEQ ID NO: 1017184 - RNA, 19 nt, Artificial Sequence
  Description of Artificial Sequence: Synthetic oligonucleotide
guaucgccuaagacauuuu

SEQ ID NO: 1017185 - RNA, 19 nt, Artificial Sequence
  Description of Artificial Sequence: Synthetic oligonucleotide
gcaagacgugaauccgaau

SEQ ID NO: 1017186 - RNA, 19 nt, Artificial Sequence
  Description of Artificial Sequence: Synthetic oligonucleotide
cggcuagcuucgcuucgac

SEQ ID NO: 1017187 - RNA, 19 nt, Artificial Sequence
  Description of Artificial Sequence: Synthetic oligonucleotide
ccggcuagcuucgcuucga

SEQ ID NO: 1017188 - RNA, 19 nt, Artificial Sequence
  Description of Artificial Sequence: Synthetic oligonucleotide
cgucgauauauagcuacau

SEQ ID NO: 1017189 - RNA, 19 nt, Artificial Sequence
  Description of Artificial Sequence: Synthetic oligonucleotide
ccccuccagacgcgguuga

SEQ ID NO: 1017190 - RNA, 19 nt, Artificial Sequence
  Description of Artificial Sequence: Synthetic oligonucleotide
cagacgcgguugagagcau

SEQ ID NO: 1017191 - RNA, 19 nt, Artificial Sequence
  Description of Artificial Sequence: Synthetic oligonucleotide
cguugacgguaucgccuaa

SEQ ID NO: 1017192 - RNA, 19 nt, Artificial Sequence
  Description of Artificial Sequence: Synthetic oligonucleotide
cccauagggccuggauugu

SEQ ID NO: 1017193 - RNA, 19 nt, Artificial Sequence
  Description of Artificial Sequence: Synthetic oligonucleotide
ccagaucgucuggcacaga

SEQ ID NO: 1017194 - RNA, 19 nt, Artificial Sequence
  Description of Artificial Sequence: Synthetic oligonucleotide
ccauagggccuggauuguu

SEQ ID NO: 1017195 - RNA, 19 nt, Artificial Sequence
  Description of Artificial Sequence: Synthetic oligonucleotide
cgaguuguaugagccuguu

SEQ ID NO: 1017196 - RNA, 19 nt, Artificial Sequence
  Description of Artificial Sequence: Synthetic oligonucleotide
gggccggcuuccagaucgu

SEQ ID NO: 1017197 - RNA, 19 nt, Artificial Sequence
  Description of Artificial Sequence: Synthetic oligonucleotide
cgguaucgccuaagacauu

SEQ ID NO: 1017198 - RNA, 19 nt, Artificial Sequence
  Description of Artificial Sequence: Synthetic oligonucleotide
ugugauaacuagcauaagg

SEQ ID NO: 1017199 - RNA, 19 nt, Artificial Sequence
  Description of Artificial Sequence: Synthetic oligonucleotide
uguaucaacagggugaucg

SEQ ID NO: 1017200 - RNA, 19 nt, Artificial Sequence
  Description of Artificial Sequence: Synthetic oligonucleotide
uuuauaagaaagaucucag

SEQ ID NO: 1017201 - RNA, 19 nt, Artificial Sequence
  Description of Artificial Sequence: Synthetic oligonucleotide
aauccuaugguaucuuugg

SEQ ID NO: 1017202 - RNA, 19 nt, Artificial Sequence
  Description of Artificial Sequence: Synthetic oligonucleotide
aaugaaucgcuuccacucc

SEQ ID NO: 1017203 - RNA, 19 nt, Artificial Sequence
  Description of Artificial Sequence: Synthetic oligonucleotide
aaguguaugggagugaguc

SEQ ID NO: 1017204 - RNA, 19 nt, Artificial Sequence
  Description of Artificial Sequence: Synthetic oligonucleotide
aauucugacaucuggcucu

SEQ ID NO: 1017205 - RNA, 19 nt, Artificial Sequence
  Description of Artificial Sequence: Synthetic oligonucleotide
aaggcagugacuucuuacg

SEQ ID NO: 1017206 - RNA, 19 nt, Artificial Sequence
  Description of Artificial Sequence: Synthetic oligonucleotide
auaacuagcauaagggccc

SEQ ID NO: 1017207 - RNA, 19 nt, Artificial Sequence
  Description of Artificial Sequence: Synthetic oligonucleotide
acgcuugccaccuacacgc

SEQ ID NO: 1017208 - RNA, 19 nt, Artificial Sequence
  Description of Artificial Sequence: Synthetic oligonucleotide
uugcuuacugacaugaagc

SEQ ID NO: 1017209 - RNA, 19 nt, Artificial Sequence
  Description of Artificial Sequence: Synthetic oligonucleotide
ucuaaagggaguauaggca

SEQ ID NO: 1017210 - RNA, 19 nt, Artificial Sequence
  Description of Artificial Sequence: Synthetic oligonucleotide
cuuuuguucacccuguccc

SEQ ID NO: 1017211 - RNA, 19 nt, Artificial Sequence
  Description of Artificial Sequence: Synthetic oligonucleotide
uguugagccuucuuggugg

SEQ ID NO: 1017212 - RNA, 19 nt, Artificial Sequence
  Description of Artificial Sequence: Synthetic oligonucleotide
gugauaacuagcauaaggg

SEQ ID NO: 1017213 - RNA, 19 nt, Artificial Sequence
  Description of Artificial Sequence: Synthetic oligonucleotide
agagauacaauguguauca

SEQ ID NO: 1017214 - RNA, 19 nt, Artificial Sequence
  Description of Artificial Sequence: Synthetic oligonucleotide
gauacaauguguaucaaca

SEQ ID NO: 1017215 - RNA, 19 nt, Artificial Sequence
  Description of Artificial Sequence: Synthetic oligonucleotide
agauacaauguguaucaac

SEQ ID NO: 1017216 - RNA, 19 nt, Artificial Sequence
  Description of Artificial Sequence: Synthetic oligonucleotide
cauaauucugacaucuggc

SEQ ID NO: 1017217 - RNA, 19 nt, Artificial Sequence
  Description of Artificial Sequence: Synthetic oligonucleotide
ugauaacuagcauaagggc

SEQ ID NO: 1017218 - RNA, 19 nt, Artificial Sequence
  Description of Artificial Sequence: Synthetic oligonucleotide
acaauguguaucaacaggg

SEQ ID NO: 1017219 - RNA, 19 nt, Artificial Sequence
  Description of Artificial Sequence: Synthetic oligonucleotide
cuaaagggaguauaggcag

SEQ ID NO: 1017220 - RNA, 19 nt, Artificial Sequence
  Description of Artificial Sequence: Synthetic oligonucleotide
ucauuggagacuaccaccc

SEQ ID NO: 1017221 - RNA, 19 nt, Artificial Sequence
  Description of Artificial Sequence: Synthetic oligonucleotide
ugacuucuuacgaaggaag

SEQ ID NO: 1017222 - RNA, 19 nt, Artificial Sequence
  Description of Artificial Sequence: Synthetic oligonucleotide
gagacuaccaccccaucgg

SEQ ID NO: 1017223 - RNA, 19 nt, Artificial Sequence
  Description of Artificial Sequence: Synthetic oligonucleotide
uuauaagaaagaucucagc

SEQ ID NO: 1017224 - RNA, 19 nt, Artificial Sequence
  Description of Artificial Sequence: Synthetic oligonucleotide
aaucgcuuccacuccugcc

SEQ ID NO: 1017225 - RNA, 19 nt, Artificial Sequence
  Description of Artificial Sequence: Synthetic oligonucleotide
cuugucauugacgaaagag

SEQ ID NO: 1017226 - RNA, 19 nt, Artificial Sequence
  Description of Artificial Sequence: Synthetic oligonucleotide
auagggacauggcugcucc

SEQ ID NO: 1017227 - RNA, 19 nt, Artificial Sequence
  Description of Artificial Sequence: Synthetic oligonucleotide
acccgugugggauagauag

SEQ ID NO: 1017228 - RNA, 19 nt, Artificial Sequence
  Description of Artificial Sequence: Synthetic oligonucleotide
gacgaaagaguacaugagc

SEQ ID NO: 1017229 - RNA, 19 nt, Artificial Sequence
  Description of Artificial Sequence: Synthetic oligonucleotide
gucuaaagggaguauaggc

SEQ ID NO: 1017230 - RNA, 19 nt, Artificial Sequence
  Description of Artificial Sequence: Synthetic oligonucleotide
ucauugacgaaagaguaca

SEQ ID NO: 1017231 - RNA, 19 nt, Artificial Sequence
  Description of Artificial Sequence: Synthetic oligonucleotide
auaauucugacaucuggcu

SEQ ID NO: 1017232 - RNA, 19 nt, Artificial Sequence
  Description of Artificial Sequence: Synthetic oligonucleotide
agaugguacaaacacggug

SEQ ID NO: 1017233 - RNA, 19 nt, Artificial Sequence
  Description of Artificial Sequence: Synthetic oligonucleotide
aguauaggcaggugcugcc

SEQ ID NO: 1017234 - RNA, 19 nt, Artificial Sequence
  Description of Artificial Sequence: Synthetic oligonucleotide
gguuauaagaagcaucuug

SEQ ID NO: 1017235 - RNA, 19 nt, Artificial Sequence
  Description of Artificial Sequence: Synthetic oligonucleotide
uuacgaaggaaguugucca

SEQ ID NO: 1017236 - RNA, 19 nt, Artificial Sequence
  Description of Artificial Sequence: Synthetic oligonucleotide
gucuccuuaaaugacagag

SEQ ID NO: 1017237 - RNA, 19 nt, Artificial Sequence
  Description of Artificial Sequence: Synthetic oligonucleotide
ugacgaaagaguacaugag

SEQ ID NO: 1017238 - RNA, 19 nt, Artificial Sequence
  Description of Artificial Sequence: Synthetic oligonucleotide
ugucauugacgaaagagua

SEQ ID NO: 1017239 - RNA, 19 nt, Artificial Sequence
  Description of Artificial Sequence: Synthetic oligonucleotide
aguguaugggagugagucc

SEQ ID NO: 1017240 - RNA, 19 nt, Artificial Sequence
  Description of Artificial Sequence: Synthetic oligonucleotide
ucuaguucaggccucugcu

SEQ ID NO: 1017241 - RNA, 19 nt, Artificial Sequence
  Description of Artificial Sequence: Synthetic oligonucleotide
cauagguacacuuccuccc

SEQ ID NO: 1017242 - RNA, 19 nt, Artificial Sequence
  Description of Artificial Sequence: Synthetic oligonucleotide
ggauuuauaagaaagaucu

SEQ ID NO: 1017243 - RNA, 19 nt, Artificial Sequence
  Description of Artificial Sequence: Synthetic oligonucleotide
cuuacgaaggaaguugucc

SEQ ID NO: 1017244 - RNA, 19 nt, Artificial Sequence
  Description of Artificial Sequence: Synthetic oligonucleotide
cacuugauuccauagguac

SEQ ID NO: 1017245 - RNA, 19 nt, Artificial Sequence
  Description of Artificial Sequence: Synthetic oligonucleotide
uaaagggaguauaggcagg

SEQ ID NO: 1017246 - RNA, 19 nt, Artificial Sequence
  Description of Artificial Sequence: Synthetic oligonucleotide
gaugguacaaacacgguga

SEQ ID NO: 1017247 - RNA, 19 nt, Artificial Sequence
  Description of Artificial Sequence: Synthetic oligonucleotide
cuugcuuacugacaugaag

SEQ ID NO: 1017248 - RNA, 19 nt, Artificial Sequence
  Description of Artificial Sequence: Synthetic oligonucleotide
agaggucggcacuugauuc

SEQ ID NO: 1017249 - RNA, 19 nt, Artificial Sequence
  Description of Artificial Sequence: Synthetic oligonucleotide
ucccauagggacauggcug

SEQ ID NO: 1017250 - RNA, 19 nt, Artificial Sequence
  Description of Artificial Sequence: Synthetic oligonucleotide
ucuaguucccgaagaaugu

SEQ ID NO: 1017251 - RNA, 19 nt, Artificial Sequence
  Description of Artificial Sequence: Synthetic oligonucleotide
agccgcauuggcuugagag

SEQ ID NO: 1017252 - RNA, 19 nt, Artificial Sequence
  Description of Artificial Sequence: Synthetic oligonucleotide
ugacagagauacaaugugu

SEQ ID NO: 1017253 - RNA, 19 nt, Artificial Sequence
  Description of Artificial Sequence: Synthetic oligonucleotide
uaguucaggccucugcucc

SEQ ID NO: 1017254 - RNA, 19 nt, Artificial Sequence
  Description of Artificial Sequence: Synthetic oligonucleotide
caccccaucggauucauag

SEQ ID NO: 1017255 - RNA, 19 nt, Artificial Sequence
  Description of Artificial Sequence: Synthetic oligonucleotide
cuguguugagccuucuugg

SEQ ID NO: 1017256 - RNA, 19 nt, Artificial Sequence
  Description of Artificial Sequence: Synthetic oligonucleotide
gccagaaccaauccuaugg

SEQ ID NO: 1017257 - RNA, 19 nt, Artificial Sequence
  Description of Artificial Sequence: Synthetic oligonucleotide
gucauuggagacuaccacc

SEQ ID NO: 1017258 - RNA, 19 nt, Artificial Sequence
  Description of Artificial Sequence: Synthetic oligonucleotide
uugagaggggucucggagg

SEQ ID NO: 1017259 - RNA, 19 nt, Artificial Sequence
  Description of Artificial Sequence: Synthetic oligonucleotide
ccugauagccccuugagcc

SEQ ID NO: 1017260 - RNA, 19 nt, Artificial Sequence
  Description of Artificial Sequence: Synthetic oligonucleotide
uucacaaugaagcggucau

SEQ ID NO: 1017261 - RNA, 19 nt, Artificial Sequence
  Description of Artificial Sequence: Synthetic oligonucleotide
auagauagaggugccacag

SEQ ID NO: 1017262 - RNA, 19 nt, Artificial Sequence
  Description of Artificial Sequence: Synthetic oligonucleotide
ugugucauuggagacuacc

SEQ ID NO: 1017263 - RNA, 19 nt, Artificial Sequence
  Description of Artificial Sequence: Synthetic oligonucleotide
ucaugcccugugaacaggg

SEQ ID NO: 1017264 - RNA, 19 nt, Artificial Sequence
  Description of Artificial Sequence: Synthetic oligonucleotide
cuucuuacgaaggaaguug

SEQ ID NO: 1017265 - RNA, 19 nt, Artificial Sequence
  Description of Artificial Sequence: Synthetic oligonucleotide
ugaagcuucaugcccugug

SEQ ID NO: 1017266 - RNA, 19 nt, Artificial Sequence
  Description of Artificial Sequence: Synthetic oligonucleotide
ucugugaugggcacaucug

SEQ ID NO: 1017267 - RNA, 19 nt, Artificial Sequence
  Description of Artificial Sequence: Synthetic oligonucleotide
aagaaagaucucagcggcc

SEQ ID NO: 1017268 - RNA, 19 nt, Artificial Sequence
  Description of Artificial Sequence: Synthetic oligonucleotide
aaaagucuguguugagccu

SEQ ID NO: 1017269 - RNA, 19 nt, Artificial Sequence
  Description of Artificial Sequence: Synthetic oligonucleotide
uaauucugacaucuggcuc

SEQ ID NO: 1017270 - RNA, 19 nt, Artificial Sequence
  Description of Artificial Sequence: Synthetic oligonucleotide
ucaaugaaucgcuuccacu

SEQ ID NO: 1017271 - RNA, 19 nt, Artificial Sequence
  Description of Artificial Sequence: Synthetic oligonucleotide
auaggugugauaacuagca

SEQ ID NO: 1017272 - RNA, 19 nt, Artificial Sequence
  Description of Artificial Sequence: Synthetic oligonucleotide
aguacaugagcagucgcuc

SEQ ID NO: 1017273 - RNA, 19 nt, Artificial Sequence
  Description of Artificial Sequence: Synthetic oligonucleotide
uguucacccugucccaggg

SEQ ID NO: 1017274 - RNA, 19 nt, Artificial Sequence
  Description of Artificial Sequence: Synthetic oligonucleotide
cuugagaggggucucggag

SEQ ID NO: 1017275 - RNA, 19 nt, Artificial Sequence
  Description of Artificial Sequence: Synthetic oligonucleotide
ugugaacagggaugaagcc

SEQ ID NO: 1017276 - RNA, 19 nt, Artificial Sequence
  Description of Artificial Sequence: Synthetic oligonucleotide
ugggauuuauaagaaagau

SEQ ID NO: 1017277 - RNA, 19 nt, Artificial Sequence
  Description of Artificial Sequence: Synthetic oligonucleotide
aagcggucaucauagcaca

SEQ ID NO: 1017278 - RNA, 19 nt, Artificial Sequence
  Description of Artificial Sequence: Synthetic oligonucleotide
uaguucccgaagaaugugc

SEQ ID NO: 1017279 - RNA, 19 nt, Artificial Sequence
  Description of Artificial Sequence: Synthetic oligonucleotide
ugcuuacugacaugaagcu

SEQ ID NO: 1017280 - RNA, 19 nt, Artificial Sequence
  Description of Artificial Sequence: Synthetic oligonucleotide
acgagugggcgauuggagg

SEQ ID NO: 1017281 - RNA, 19 nt, Artificial Sequence
  Description of Artificial Sequence: Synthetic oligonucleotide
gcugggauuuauaagaaag

SEQ ID NO: 1017282 - RNA, 19 nt, Artificial Sequence
  Description of Artificial Sequence: Synthetic oligonucleotide
caugccgucccaaaggguc

SEQ ID NO: 1017283 - RNA, 19 nt, Artificial Sequence
  Description of Artificial Sequence: Synthetic oligonucleotide
caauccuaugguaucuuug

SEQ ID NO: 1017284 - RNA, 19 nt, Artificial Sequence
  Description of Artificial Sequence: Synthetic oligonucleotide
uaagaagcaucuugcuuac

SEQ ID NO: 1017285 - RNA, 19 nt, Artificial Sequence
  Description of Artificial Sequence: Synthetic oligonucleotide
uacgaaggaaguuguccag

SEQ ID NO: 1017286 - RNA, 19 nt, Artificial Sequence
  Description of Artificial Sequence: Synthetic oligonucleotide
aacuugucauugacgaaag

SEQ ID NO: 1017287 - RNA, 19 nt, Artificial Sequence
  Description of Artificial Sequence: Synthetic oligonucleotide
ucggcacuugauuccauag

SEQ ID NO: 1017288 - RNA, 19 nt, Artificial Sequence
  Description of Artificial Sequence: Synthetic oligonucleotide
cuaacagggaggcuucuac

SEQ ID NO: 1017289 - RNA, 19 nt, Artificial Sequence
  Description of Artificial Sequence: Synthetic oligonucleotide
ugggagugaguccacggug

SEQ ID NO: 1017290 - RNA, 19 nt, Artificial Sequence
  Description of Artificial Sequence: Synthetic oligonucleotide
agacccauaggugugauaa

SEQ ID NO: 1017291 - RNA, 19 nt, Artificial Sequence
  Description of Artificial Sequence: Synthetic oligonucleotide
aguucaggccucugcuccc

SEQ ID NO: 1017292 - RNA, 19 nt, Artificial Sequence
  Description of Artificial Sequence: Synthetic oligonucleotide
cacaucagcccuuucuuug

SEQ ID NO: 1017293 - RNA, 19 nt, Artificial Sequence
  Description of Artificial Sequence: Synthetic oligonucleotide
aucgcuuccacuccugccu

SEQ ID NO: 1017294 - RNA, 19 nt, Artificial Sequence
  Description of Artificial Sequence: Synthetic oligonucleotide
uagcauaagggccccgagc

SEQ ID NO: 1017295 - RNA, 19 nt, Artificial Sequence
  Description of Artificial Sequence: Synthetic oligonucleotide
ugugugggaaccacucugu

SEQ ID NO: 1017296 - RNA, 19 nt, Artificial Sequence
  Description of Artificial Sequence: Synthetic oligonucleotide
aucggauucauaggccagc

SEQ ID NO: 1017297 - RNA, 19 nt, Artificial Sequence
  Description of Artificial Sequence: Synthetic oligonucleotide
agucgcuccucaaugaauc

SEQ ID NO: 1017298 - RNA, 19 nt, Artificial Sequence
  Description of Artificial Sequence: Synthetic oligonucleotide
ggcaacgucuccuuaaaug

SEQ ID NO: 1017299 - RNA, 19 nt, Artificial Sequence
  Description of Artificial Sequence: Synthetic oligonucleotide
gaaccaauccuaugguauc

SEQ ID NO: 1017300 - RNA, 19 nt, Artificial Sequence
  Description of Artificial Sequence: Synthetic oligonucleotide
acacgcuugccaccuacac

SEQ ID NO: 1017301 - RNA, 19 nt, Artificial Sequence
  Description of Artificial Sequence: Synthetic oligonucleotide
aucagccacggauggacgg

SEQ ID NO: 1017302 - RNA, 19 nt, Artificial Sequence
  Description of Artificial Sequence: Synthetic oligonucleotide
guacucucuggcuggaaag

SEQ ID NO: 1017303 - RNA, 19 nt, Artificial Sequence
  Description of Artificial Sequence: Synthetic oligonucleotide
cagagauacaauguguauc

SEQ ID NO: 1017304 - RNA, 19 nt, Artificial Sequence
  Description of Artificial Sequence: Synthetic oligonucleotide
aagaggucggcacuugauu

SEQ ID NO: 1017305 - RNA, 19 nt, Artificial Sequence
  Description of Artificial Sequence: Synthetic oligonucleotide
ugccugauagccccuugag

SEQ ID NO: 1017306 - RNA, 19 nt, Artificial Sequence
  Description of Artificial Sequence: Synthetic oligonucleotide
cauaagggccccgagcagg

SEQ ID NO: 1017307 - RNA, 19 nt, Artificial Sequence
  Description of Artificial Sequence: Synthetic oligonucleotide
ggagacuaccaccccaucg

SEQ ID NO: 1017308 - RNA, 19 nt, Artificial Sequence
  Description of Artificial Sequence: Synthetic oligonucleotide
uguguugagccuucuuggu

SEQ ID NO: 1017309 - RNA, 19 nt, Artificial Sequence
  Description of Artificial Sequence: Synthetic oligonucleotide
cugccgggaguucagaccc

SEQ ID NO: 1017310 - RNA, 19 nt, Artificial Sequence
  Description of Artificial Sequence: Synthetic oligonucleotide
agaaccaauccuaugguau

SEQ ID NO: 1017311 - RNA, 19 nt, Artificial Sequence
  Description of Artificial Sequence: Synthetic oligonucleotide
uccuaugguaucuuugguu

SEQ ID NO: 1017312 - RNA, 19 nt, Artificial Sequence
  Description of Artificial Sequence: Synthetic oligonucleotide
gaggucggcacuugauucc

SEQ ID NO: 1017313 - RNA, 19 nt, Artificial Sequence
  Description of Artificial Sequence: Synthetic oligonucleotide
auagguacacuuccuccca

SEQ ID NO: 1017314 - RNA, 19 nt, Artificial Sequence
  Description of Artificial Sequence: Synthetic oligonucleotide
caccuacacgccuggaugg

SEQ ID NO: 1017315 - RNA, 19 nt, Artificial Sequence
  Description of Artificial Sequence: Synthetic oligonucleotide
ucagaccaguacucucugg

SEQ ID NO: 1017316 - RNA, 19 nt, Artificial Sequence
  Description of Artificial Sequence: Synthetic oligonucleotide
ggggugacgggguaggugg

SEQ ID NO: 1017317 - RNA, 19 nt, Artificial Sequence
  Description of Artificial Sequence: Synthetic oligonucleotide
aacgagugggcgauuggag

SEQ ID NO: 1017318 - RNA, 19 nt, Artificial Sequence
  Description of Artificial Sequence: Synthetic oligonucleotide
ugaguccacgguguguggg

SEQ ID NO: 1017319 - RNA, 19 nt, Artificial Sequence
  Description of Artificial Sequence: Synthetic oligonucleotide
aacagggugaucgcuucug

SEQ ID NO: 1017320 - RNA, 19 nt, Artificial Sequence
  Description of Artificial Sequence: Synthetic oligonucleotide
uccucccauagggacaugg

SEQ ID NO: 1017321 - RNA, 19 nt, Artificial Sequence
  Description of Artificial Sequence: Synthetic oligonucleotide
gcagugacuucuuacgaag

SEQ ID NO: 1017322 - RNA, 19 nt, Artificial Sequence
  Description of Artificial Sequence: Synthetic oligonucleotide
guaucaacagggugaucgc

SEQ ID NO: 1017323 - RNA, 19 nt, Artificial Sequence
  Description of Artificial Sequence: Synthetic oligonucleotide
acauagucucccgggacac

SEQ ID NO: 1017324 - RNA, 19 nt, Artificial Sequence
  Description of Artificial Sequence: Synthetic oligonucleotide
gaagcuucaugcccuguga

SEQ ID NO: 1017325 - RNA, 19 nt, Artificial Sequence
  Description of Artificial Sequence: Synthetic oligonucleotide
cugggauuuauaagaaaga

SEQ ID NO: 1017326 - RNA, 19 nt, Artificial Sequence
  Description of Artificial Sequence: Synthetic oligonucleotide
uguguaucaacagggugau

SEQ ID NO: 1017327 - RNA, 19 nt, Artificial Sequence
  Description of Artificial Sequence: Synthetic oligonucleotide
gauuuauaagaaagaucuc

SEQ ID NO: 1017328 - RNA, 19 nt, Artificial Sequence
  Description of Artificial Sequence: Synthetic oligonucleotide
aguacucucuggcuggaaa

SEQ ID NO: 1017329 - RNA, 19 nt, Artificial Sequence
  Description of Artificial Sequence: Synthetic oligonucleotide
cucaaugaaucgcuuccac

SEQ ID NO: 1017330 - RNA, 19 nt, Artificial Sequence
  Description of Artificial Sequence: Synthetic oligonucleotide
guacaugagcagucgcucc

SEQ ID NO: 1017331 - RNA, 19 nt, Artificial Sequence
  Description of Artificial Sequence: Synthetic oligonucleotide
uuggagacuaccaccccau

SEQ ID NO: 1017332 - RNA, 19 nt, Artificial Sequence
  Description of Artificial Sequence: Synthetic oligonucleotide
auucauaggccagcuucac

SEQ ID NO: 1017333 - RNA, 19 nt, Artificial Sequence
  Description of Artificial Sequence: Synthetic oligonucleotide
ucaacagggugaucgcuuc

SEQ ID NO: 1017334 - RNA, 19 nt, Artificial Sequence
  Description of Artificial Sequence: Synthetic oligonucleotide
gaaucgcuuccacuccugc

SEQ ID NO: 1017335 - RNA, 19 nt, Artificial Sequence
  Description of Artificial Sequence: Synthetic oligonucleotide
gauucauaggccagcuuca

SEQ ID NO: 1017336 - RNA, 19 nt, Artificial Sequence
  Description of Artificial Sequence: Synthetic oligonucleotide
acuaccaccccaucggauu

SEQ ID NO: 1017337 - RNA, 19 nt, Artificial Sequence
  Description of Artificial Sequence: Synthetic oligonucleotide
ccaugggcugucuaaaggg

SEQ ID NO: 1017338 - RNA, 19 nt, Artificial Sequence
  Description of Artificial Sequence: Synthetic oligonucleotide
ggcuuacucacugaggugc

SEQ ID NO: 1017339 - RNA, 19 nt, Artificial Sequence
  Description of Artificial Sequence: Synthetic oligonucleotide
cacgcuugccaccuacacg

SEQ ID NO: 1017340 - RNA, 19 nt, Artificial Sequence
  Description of Artificial Sequence: Synthetic oligonucleotide
gaaagaguacaugagcagu

SEQ ID NO: 1017341 - RNA, 19 nt, Artificial Sequence
  Description of Artificial Sequence: Synthetic oligonucleotide
caacgucuccuuaaaugac

SEQ ID NO: 1017342 - RNA, 19 nt, Artificial Sequence
  Description of Artificial Sequence: Synthetic oligonucleotide
uuggcccuuuuguucaccc

SEQ ID NO: 1017343 - RNA, 19 nt, Artificial Sequence
  Description of Artificial Sequence: Synthetic oligonucleotide
gguacacuuccucccauag

SEQ ID NO: 1017344 - RNA, 19 nt, Artificial Sequence
  Description of Artificial Sequence: Synthetic oligonucleotide
gacagagauacaaugugua

SEQ ID NO: 1017345 - RNA, 19 nt, Artificial Sequence
  Description of Artificial Sequence: Synthetic oligonucleotide
ugacgggguagguggacag

SEQ ID NO: 1017346 - RNA, 19 nt, Artificial Sequence
  Description of Artificial Sequence: Synthetic oligonucleotide
ggugugauaacuagcauaa

SEQ ID NO: 1017347 - RNA, 19 nt, Artificial Sequence
  Description of Artificial Sequence: Synthetic oligonucleotide
uggcgugaacaccaggauc

SEQ ID NO: 1017348 - RNA, 19 nt, Artificial Sequence
  Description of Artificial Sequence: Synthetic oligonucleotide
gugugggauagauagaggu

SEQ ID NO: 1017349 - RNA, 19 nt, Artificial Sequence
  Description of Artificial Sequence: Synthetic oligonucleotide
acccauaggugugauaacu

SEQ ID NO: 1017350 - RNA, 19 nt, Artificial Sequence
  Description of Artificial Sequence: Synthetic oligonucleotide
guugagccuucuugguggg

SEQ ID NO: 1017351 - RNA, 19 nt, Artificial Sequence
  Description of Artificial Sequence: Synthetic oligonucleotide
agcgccccaucacagcuuc

SEQ ID NO: 1017352 - RNA, 19 nt, Artificial Sequence
  Description of Artificial Sequence: Synthetic oligonucleotide
ugcccaacuagccgguggu

SEQ ID NO: 1017353 - RNA, 19 nt, Artificial Sequence
  Description of Artificial Sequence: Synthetic oligonucleotide
augggagugaguccacggu

SEQ ID NO: 1017354 - RNA, 19 nt, Artificial Sequence
  Description of Artificial Sequence: Synthetic oligonucleotide
acaacuugguguacacauc

SEQ ID NO: 1017355 - RNA, 19 nt, Artificial Sequence
  Description of Artificial Sequence: Synthetic oligonucleotide
ugaaguggccugcacccau

SEQ ID NO: 1017356 - RNA, 19 nt, Artificial Sequence
  Description of Artificial Sequence: Synthetic oligonucleotide
ggaaguguaugggagugag

SEQ ID NO: 1017357 - RNA, 19 nt, Artificial Sequence
  Description of Artificial Sequence: Synthetic oligonucleotide
caguaaaagucuguguuga

SEQ ID NO: 1017358 - RNA, 19 nt, Artificial Sequence
  Description of Artificial Sequence: Synthetic oligonucleotide
uaucaacagggugaucgcu

SEQ ID NO: 1017359 - RNA, 19 nt, Artificial Sequence
  Description of Artificial Sequence: Synthetic oligonucleotide
guauaggcaggugcugccg

SEQ ID NO: 1017360 - RNA, 19 nt, Artificial Sequence
  Description of Artificial Sequence: Synthetic oligonucleotide
auccuaugguaucuuuggu

SEQ ID NO: 1017361 - RNA, 19 nt, Artificial Sequence
  Description of Artificial Sequence: Synthetic oligonucleotide
cuagcauaagggccccgag

SEQ ID NO: 1017362 - RNA, 19 nt, Artificial Sequence
  Description of Artificial Sequence: Synthetic oligonucleotide
uguaugggagugaguccac

SEQ ID NO: 1017363 - RNA, 19 nt, Artificial Sequence
  Description of Artificial Sequence: Synthetic oligonucleotide
cuaguucccgaagaaugug

SEQ ID NO: 1017364 - RNA, 19 nt, Artificial Sequence
  Description of Artificial Sequence: Synthetic oligonucleotide
gggaguucagacccauagg

SEQ ID NO: 1017365 - RNA, 19 nt, Artificial Sequence
  Description of Artificial Sequence: Synthetic oligonucleotide
acggauggacggccugacc

SEQ ID NO: 1017366 - RNA, 19 nt, Artificial Sequence
  Description of Artificial Sequence: Synthetic oligonucleotide
gggauuuauaagaaagauc

SEQ ID NO: 1017367 - RNA, 19 nt, Artificial Sequence
  Description of Artificial Sequence: Synthetic oligonucleotide
uggcuuacucacugaggug

SEQ ID NO: 1017368 - RNA, 19 nt, Artificial Sequence
  Description of Artificial Sequence: Synthetic oligonucleotide
ugccucucgccuuggaggu

SEQ ID NO: 1017369 - RNA, 19 nt, Artificial Sequence
  Description of Artificial Sequence: Synthetic oligonucleotide
ugaggugcugggauuuaua

SEQ ID NO: 1017370 - RNA, 19 nt, Artificial Sequence
  Description of Artificial Sequence: Synthetic oligonucleotide
ugaugucuguguggccucg

SEQ ID NO: 1017371 - RNA, 19 nt, Artificial Sequence
  Description of Artificial Sequence: Synthetic oligonucleotide
ccucgggccacuuuugucc

SEQ ID NO: 1017372 - RNA, 19 nt, Artificial Sequence
  Description of Artificial Sequence: Synthetic oligonucleotide
guacacaucagcccuuucu

SEQ ID NO: 1017373 - RNA, 19 nt, Artificial Sequence
  Description of Artificial Sequence: Synthetic oligonucleotide
gccgcauuggcuugagagg

SEQ ID NO: 1017374 - RNA, 19 nt, Artificial Sequence
  Description of Artificial Sequence: Synthetic oligonucleotide
cauuggagacuaccacccc

SEQ ID NO: 1017375 - RNA, 19 nt, Artificial Sequence
  Description of Artificial Sequence: Synthetic oligonucleotide
  modified_base (7)..(7): a, c, u, g, unknown or other
aggagcngcggaagcgccc

SEQ ID NO: 1017376 - RNA, 19 nt, Artificial Sequence
  Description of Artificial Sequence: Synthetic oligonucleotide
gcgauuggaggccugguug

SEQ ID NO: 1017377 - RNA, 19 nt, Artificial Sequence
  Description of Artificial Sequence: Synthetic oligonucleotide
gucugugaugccugauagc

SEQ ID NO: 1017378 - RNA, 19 nt, Artificial Sequence
  Description of Artificial Sequence: Synthetic oligonucleotide
gaugccugauagccccuug

SEQ ID NO: 1017379 - RNA, 19 nt, Artificial Sequence
  Description of Artificial Sequence: Synthetic oligonucleotide
ucgcuccucaaugaaucgc

SEQ ID NO: 1017380 - RNA, 19 nt, Artificial Sequence
  Description of Artificial Sequence: Synthetic oligonucleotide
gaacgagugggcgauugga

SEQ ID NO: 1017381 - RNA, 19 nt, Artificial Sequence
  Description of Artificial Sequence: Synthetic oligonucleotide
augaagccgcauuggcuug

SEQ ID NO: 1017382 - RNA, 19 nt, Artificial Sequence
  Description of Artificial Sequence: Synthetic oligonucleotide
ggauagauagaggugccac

SEQ ID NO: 1017383 - RNA, 19 nt, Artificial Sequence
  Description of Artificial Sequence: Synthetic oligonucleotide
acuucuuacgaaggaaguu

SEQ ID NO: 1017384 - RNA, 19 nt, Artificial Sequence
  Description of Artificial Sequence: Synthetic oligonucleotide
ucccgguaugugucauugg

SEQ ID NO: 1017385 - RNA, 19 nt, Artificial Sequence
  Description of Artificial Sequence: Synthetic oligonucleotide
accuacacgccuggauggc

SEQ ID NO: 1017386 - RNA, 19 nt, Artificial Sequence
  Description of Artificial Sequence: Synthetic oligonucleotide
gcacauggugcccaacuag

SEQ ID NO: 1017387 - RNA, 19 nt, Artificial Sequence
  Description of Artificial Sequence: Synthetic oligonucleotide
uaacuagcauaagggcccc

SEQ ID NO: 1017388 - RNA, 19 nt, Artificial Sequence
  Description of Artificial Sequence: Synthetic oligonucleotide
acccaugggcugucuaaag

SEQ ID NO: 1017389 - RNA, 19 nt, Artificial Sequence
  Description of Artificial Sequence: Synthetic oligonucleotide
acuagcauaagggccccga

SEQ ID NO: 1017390 - RNA, 19 nt, Artificial Sequence
  Description of Artificial Sequence: Synthetic oligonucleotide
ucagccacggauggacggc

SEQ ID NO: 1017391 - RNA, 19 nt, Artificial Sequence
  Description of Artificial Sequence: Synthetic oligonucleotide
guucagacccauaggugug

SEQ ID NO: 1017392 - RNA, 19 nt, Artificial Sequence
  Description of Artificial Sequence: Synthetic oligonucleotide
ugauagccccuugagccac

SEQ ID NO: 1017393 - RNA, 19 nt, Artificial Sequence
  Description of Artificial Sequence: Synthetic oligonucleotide
ccaggcuaggcccaugccg

SEQ ID NO: 1017394 - RNA, 19 nt, Artificial Sequence
  Description of Artificial Sequence: Synthetic oligonucleotide
augguacaaacacggugau

SEQ ID NO: 1017395 - RNA, 19 nt, Artificial Sequence
  Description of Artificial Sequence: Synthetic oligonucleotide
cuccaagaugguacaaaca

SEQ ID NO: 1017396 - RNA, 19 nt, Artificial Sequence
  Description of Artificial Sequence: Synthetic oligonucleotide
cacauagucucccgggaca

SEQ ID NO: 1017397 - RNA, 19 nt, Artificial Sequence
  Description of Artificial Sequence: Synthetic oligonucleotide
aucuggccgaggcuguucu

SEQ ID NO: 1017398 - RNA, 19 nt, Artificial Sequence
  Description of Artificial Sequence: Synthetic oligonucleotide
cucagaccaguacucucug

SEQ ID NO: 1017399 - RNA, 19 nt, Artificial Sequence
  Description of Artificial Sequence: Synthetic oligonucleotide
ucggauucauaggccagcu

SEQ ID NO: 1017400 - RNA, 19 nt, Artificial Sequence
  Description of Artificial Sequence: Synthetic oligonucleotide
agacuaccaccccaucgga

SEQ ID NO: 1017401 - RNA, 19 nt, Artificial Sequence
  Description of Artificial Sequence: Synthetic oligonucleotide
aacuagcauaagggccccg

SEQ ID NO: 1017402 - RNA, 19 nt, Artificial Sequence
  Description of Artificial Sequence: Synthetic oligonucleotide
acuugucauugacgaaaga

SEQ ID NO: 1017403 - RNA, 19 nt, Artificial Sequence
  Description of Artificial Sequence: Synthetic oligonucleotide
acagggugaucgcuucuga

SEQ ID NO: 1017404 - RNA, 19 nt, Artificial Sequence
  Description of Artificial Sequence: Synthetic oligonucleotide
cccauagggacauggcugc

SEQ ID NO: 1017405 - RNA, 19 nt, Artificial Sequence
  Description of Artificial Sequence: Synthetic oligonucleotide
cuucacaaugaagcgguca

SEQ ID NO: 1017406 - RNA, 19 nt, Artificial Sequence
  Description of Artificial Sequence: Synthetic oligonucleotide
gucccgguaugugucauug

SEQ ID NO: 1017407 - RNA, 19 nt, Artificial Sequence
  Description of Artificial Sequence: Synthetic oligonucleotide
cagggugaucgcuucugac

SEQ ID NO: 1017408 - RNA, 19 nt, Artificial Sequence
  Description of Artificial Sequence: Synthetic oligonucleotide
cuaccaccccaucggauuc

SEQ ID NO: 1017409 - RNA, 19 nt, Artificial Sequence
  Description of Artificial Sequence: Synthetic oligonucleotide
ggaaccacucugugggccc

SEQ ID NO: 1017410 - RNA, 19 nt, Artificial Sequence
  Description of Artificial Sequence: Synthetic oligonucleotide
gacccauaggugugauaac

SEQ ID NO: 1017411 - RNA, 19 nt, Artificial Sequence
  Description of Artificial Sequence: Synthetic oligonucleotide
accggcaacgucuccuuaa

SEQ ID NO: 1017412 - RNA, 19 nt, Artificial Sequence
  Description of Artificial Sequence: Synthetic oligonucleotide
ccccaucggauucauaggc

SEQ ID NO: 1017413 - RNA, 19 nt, Artificial Sequence
  Description of Artificial Sequence: Synthetic oligonucleotide
ggaacgagugggcgauugg

SEQ ID NO: 1017414 - RNA, 19 nt, Artificial Sequence
  Description of Artificial Sequence: Synthetic oligonucleotide
gauggacggccugaccggc

SEQ ID NO: 1017415 - RNA, 19 nt, Artificial Sequence
  Description of Artificial Sequence: Synthetic oligonucleotide
cggauggacggccugaccg

SEQ ID NO: 1017416 - RNA, 19 nt, Artificial Sequence
  Description of Artificial Sequence: Synthetic oligonucleotide
ugacccgugugggauagau

SEQ ID NO: 1017417 - RNA, 19 nt, Artificial Sequence
  Description of Artificial Sequence: Synthetic oligonucleotide
ugggaaccacucugugggc

SEQ ID NO: 1017418 - RNA, 19 nt, Artificial Sequence
  Description of Artificial Sequence: Synthetic oligonucleotide
accacacaacuugguguac

SEQ ID NO: 1017419 - RNA, 19 nt, Artificial Sequence
  Description of Artificial Sequence: Synthetic oligonucleotide
gugaguccacggugugugg

SEQ ID NO: 1017420 - RNA, 19 nt, Artificial Sequence
  Description of Artificial Sequence: Synthetic oligonucleotide
gguuugggcaucagccacg

SEQ ID NO: 1017421 - RNA, 19 nt, Artificial Sequence
  Description of Artificial Sequence: Synthetic oligonucleotide
caacuagccgguggugccg

SEQ ID NO: 1017422 - RNA, 19 nt, Artificial Sequence
  Description of Artificial Sequence: Synthetic oligonucleotide
cugauagccccuugagcca

SEQ ID NO: 1017423 - RNA, 19 nt, Artificial Sequence
  Description of Artificial Sequence: Synthetic oligonucleotide
uagucucccgggacacuga

SEQ ID NO: 1017424 - RNA, 19 nt, Artificial Sequence
  Description of Artificial Sequence: Synthetic oligonucleotide
ccuggggaugaucuggccc

SEQ ID NO: 1017425 - RNA, 19 nt, Artificial Sequence
  Description of Artificial Sequence: Synthetic oligonucleotide
guacaaacacggugauguc

SEQ ID NO: 1017426 - RNA, 19 nt, Artificial Sequence
  Description of Artificial Sequence: Synthetic oligonucleotide
cacuccugggaaguguaug

SEQ ID NO: 1017427 - RNA, 19 nt, Artificial Sequence
  Description of Artificial Sequence: Synthetic oligonucleotide
gacuucuuacgaaggaagu

SEQ ID NO: 1017428 - RNA, 19 nt, Artificial Sequence
  Description of Artificial Sequence: Synthetic oligonucleotide
ccgugugggauagauagag

SEQ ID NO: 1017429 - RNA, 19 nt, Artificial Sequence
  Description of Artificial Sequence: Synthetic oligonucleotide
gcggguggguuauaagaag

SEQ ID NO: 1017430 - RNA, 19 nt, Artificial Sequence
  Description of Artificial Sequence: Synthetic oligonucleotide
ggugaucgcuucugacccg

SEQ ID NO: 1017431 - RNA, 19 nt, Artificial Sequence
  Description of Artificial Sequence: Synthetic oligonucleotide
gggcaucagccacggaugg

SEQ ID NO: 1017432 - RNA, 19 nt, Artificial Sequence
  Description of Artificial Sequence: Synthetic oligonucleotide
agccaaugccugaaucaag

SEQ ID NO: 1017433 - RNA, 19 nt, Artificial Sequence
  Description of Artificial Sequence: Synthetic oligonucleotide
gggcggguggguuauaaga

SEQ ID NO: 1017434 - RNA, 19 nt, Artificial Sequence
  Description of Artificial Sequence: Synthetic oligonucleotide
caauguguaucaacagggu

SEQ ID NO: 1017435 - RNA, 19 nt, Artificial Sequence
  Description of Artificial Sequence: Synthetic oligonucleotide
ccaccuacacgccuggaug

SEQ ID NO: 1017436 - RNA, 19 nt, Artificial Sequence
  Description of Artificial Sequence: Synthetic oligonucleotide
gugccggcgucccagggac

SEQ ID NO: 1017437 - RNA, 19 nt, Artificial Sequence
  Description of Artificial Sequence: Synthetic oligonucleotide
ugaucgcuucugacccgug

SEQ ID NO: 1017438 - RNA, 19 nt, Artificial Sequence
  Description of Artificial Sequence: Synthetic oligonucleotide
ccgguaugugucauuggag

SEQ ID NO: 1017439 - RNA, 19 nt, Artificial Sequence
  Description of Artificial Sequence: Synthetic oligonucleotide
gccugauagccccuugagc

SEQ ID NO: 1017440 - RNA, 19 nt, Artificial Sequence
  Description of Artificial Sequence: Synthetic oligonucleotide
agcggucaucauagcacac

SEQ ID NO: 1017441 - RNA, 19 nt, Artificial Sequence
  Description of Artificial Sequence: Synthetic oligonucleotide
cgggaguucagacccauag

SEQ ID NO: 1017442 - RNA, 19 nt, Artificial Sequence
  Description of Artificial Sequence: Synthetic oligonucleotide
gcuggcuuacucacugagg

SEQ ID NO: 1017443 - RNA, 19 nt, Artificial Sequence
  Description of Artificial Sequence: Synthetic oligonucleotide
uggagacuaccaccccauc

SEQ ID NO: 1017444 - RNA, 19 nt, Artificial Sequence
  Description of Artificial Sequence: Synthetic oligonucleotide
cccaucggauucauaggcc

SEQ ID NO: 1017445 - RNA, 19 nt, Artificial Sequence
  Description of Artificial Sequence: Synthetic oligonucleotide
ucgccuuggaggucccggu

SEQ ID NO: 1017446 - RNA, 19 nt, Artificial Sequence
  Description of Artificial Sequence: Synthetic oligonucleotide
cagaaccaauccuauggua

SEQ ID NO: 1017447 - RNA, 19 nt, Artificial Sequence
  Description of Artificial Sequence: Synthetic oligonucleotide
uggcucagaccaguacucu

SEQ ID NO: 1017448 - RNA, 19 nt, Artificial Sequence
  Description of Artificial Sequence: Synthetic oligonucleotide
ggcgugaacaccaggaucu

SEQ ID NO: 1017449 - RNA, 19 nt, Artificial Sequence
  Description of Artificial Sequence: Synthetic oligonucleotide
cggguggguuauaagaagc

SEQ ID NO: 1017450 - RNA, 19 nt, Artificial Sequence
  Description of Artificial Sequence: Synthetic oligonucleotide
cuuacucacugaggugcug

SEQ ID NO: 1017451 - RNA, 19 nt, Artificial Sequence
  Description of Artificial Sequence: Synthetic oligonucleotide
cgagugggcgauuggaggc

SEQ ID NO: 1017452 - RNA, 19 nt, Artificial Sequence
  Description of Artificial Sequence: Synthetic oligonucleotide
gccugaaucaaggcacucc

SEQ ID NO: 1017453 - RNA, 19 nt, Artificial Sequence
  Description of Artificial Sequence: Synthetic oligonucleotide
ucaucccucuguccagcuu

SEQ ID NO: 1017454 - RNA, 19 nt, Artificial Sequence
  Description of Artificial Sequence: Synthetic oligonucleotide
uggccgaggcuguucuuuc

SEQ ID NO: 1017455 - RNA, 19 nt, Artificial Sequence
  Description of Artificial Sequence: Synthetic oligonucleotide
uccagcuuccagggugggc

SEQ ID NO: 1017456 - RNA, 19 nt, Artificial Sequence
  Description of Artificial Sequence: Synthetic oligonucleotide
ugcacccaugggcugucua

SEQ ID NO: 1017457 - RNA, 19 nt, Artificial Sequence
  Description of Artificial Sequence: Synthetic oligonucleotide
augagcagucgcuccucaa

SEQ ID NO: 1017458 - RNA, 19 nt, Artificial Sequence
  Description of Artificial Sequence: Synthetic oligonucleotide
uucugacccgugugggaua

SEQ ID NO: 1017459 - RNA, 19 nt, Artificial Sequence
  Description of Artificial Sequence: Synthetic oligonucleotide
aagccgcauuggcuugaga

SEQ ID NO: 1017460 - RNA, 19 nt, Artificial Sequence
  Description of Artificial Sequence: Synthetic oligonucleotide
gaagaaugugcuggucugu

SEQ ID NO: 1017461 - RNA, 19 nt, Artificial Sequence
  Description of Artificial Sequence: Synthetic oligonucleotide
gagauacaauguguaucaa

SEQ ID NO: 1017462 - RNA, 19 nt, Artificial Sequence
  Description of Artificial Sequence: Synthetic oligonucleotide
ggagugaguccacggugug

SEQ ID NO: 1017463 - RNA, 19 nt, Artificial Sequence
  Description of Artificial Sequence: Synthetic oligonucleotide
aggucggcacuugauucca

SEQ ID NO: 1017464 - RNA, 19 nt, Artificial Sequence
  Description of Artificial Sequence: Synthetic oligonucleotide
acgccuggauggcgugaac

SEQ ID NO: 1017465 - RNA, 19 nt, Artificial Sequence
  Description of Artificial Sequence: Synthetic oligonucleotide
caggcuaggcccaugccgu

SEQ ID NO: 1017466 - RNA, 19 nt, Artificial Sequence
  Description of Artificial Sequence: Synthetic oligonucleotide
cucccauagggacauggcu

SEQ ID NO: 1017467 - RNA, 19 nt, Artificial Sequence
  Description of Artificial Sequence: Synthetic oligonucleotide
  modified_base (6)..(6): a, c, u, g, unknown or other
ggagcngcggaagcgcccc

SEQ ID NO: 1017468 - RNA, 19 nt, Artificial Sequence
  Description of Artificial Sequence: Synthetic oligonucleotide
gcauaagggccccgagcag

SEQ ID NO: 1017469 - RNA, 19 nt, Artificial Sequence
  Description of Artificial Sequence: Synthetic oligonucleotide
augccugaaucaaggcacu

SEQ ID NO: 1017470 - RNA, 19 nt, Artificial Sequence
  Description of Artificial Sequence: Synthetic oligonucleotide
cgguaugugucauuggaga

SEQ ID NO: 1017471 - RNA, 19 nt, Artificial Sequence
  Description of Artificial Sequence: Synthetic oligonucleotide
cgugugggauagauagagg

SEQ ID NO: 1017472 - RNA, 19 nt, Artificial Sequence
  Description of Artificial Sequence: Synthetic oligonucleotide
gaagaggucggcacuugau

SEQ ID NO: 1017473 - RNA, 19 nt, Artificial Sequence
  Description of Artificial Sequence: Synthetic oligonucleotide
ggcuugagaggggucucgg

SEQ ID NO: 1017474 - RNA, 19 nt, Artificial Sequence
  Description of Artificial Sequence: Synthetic oligonucleotide
cccaacuagccgguggugc

SEQ ID NO: 1017475 - RNA, 19 nt, Artificial Sequence
  Description of Artificial Sequence: Synthetic oligonucleotide
cgaggcuguucuuuccucc

SEQ ID NO: 1017476 - RNA, 19 nt, Artificial Sequence
  Description of Artificial Sequence: Synthetic oligonucleotide
cagccacggauggacggcc

SEQ ID NO: 1017477 - RNA, 19 nt, Artificial Sequence
  Description of Artificial Sequence: Synthetic oligonucleotide
cccgguaugugucauugga

SEQ ID NO: 1017478 - RNA, 19 nt, Artificial Sequence
  Description of Artificial Sequence: Synthetic oligonucleotide
  modified_base (2)..(2): a, c, u, g, unknown or other
cngcggaagcgccccauca

SEQ ID NO: 1017479 - RNA, 19 nt, Artificial Sequence
  Description of Artificial Sequence: Synthetic oligonucleotide
ugccgggaguucagaccca

SEQ ID NO: 1017480 - RNA, 19 nt, Artificial Sequence
  Description of Artificial Sequence: Synthetic oligonucleotide
accaauccuaugguaucuu

SEQ ID NO: 1017481 - RNA, 19 nt, Artificial Sequence
  Description of Artificial Sequence: Synthetic oligonucleotide
ggaggucccgguauguguc

SEQ ID NO: 1017482 - RNA, 19 nt, Artificial Sequence
  Description of Artificial Sequence: Synthetic oligonucleotide
agugggcgauuggaggccu

SEQ ID NO: 1017483 - RNA, 19 nt, Artificial Sequence
  Description of Artificial Sequence: Synthetic oligonucleotide
  modified_base (14)..(14): a, c, u, g, unknown or other
ggguccgaggagcngcgga

SEQ ID NO: 1017484 - RNA, 19 nt, Artificial Sequence
  Description of Artificial Sequence: Synthetic oligonucleotide
cacacgcuugccaccuaca

SEQ ID NO: 1017485 - RNA, 19 nt, Artificial Sequence
  Description of Artificial Sequence: Synthetic oligonucleotide
ccacuaacagggaggcuuc

SEQ ID NO: 1017486 - RNA, 19 nt, Artificial Sequence
  Description of Artificial Sequence: Synthetic oligonucleotide
cacggauggacggccugac

SEQ ID NO: 1017487 - RNA, 19 nt, Artificial Sequence
  Description of Artificial Sequence: Synthetic oligonucleotide
augccgucccaaaggguca

SEQ ID NO: 1017488 - RNA, 19 nt, Artificial Sequence
  Description of Artificial Sequence: Synthetic oligonucleotide
cuacacgccuggauggcgu

SEQ ID NO: 1017489 - RNA, 19 nt, Artificial Sequence
  Description of Artificial Sequence: Synthetic oligonucleotide
gugacgggguagguggaca

SEQ ID NO: 1017490 - RNA, 19 nt, Artificial Sequence
  Description of Artificial Sequence: Synthetic oligonucleotide
ccucucgccuuggaggucc

SEQ ID NO: 1017491 - RNA, 19 nt, Artificial Sequence
  Description of Artificial Sequence: Synthetic oligonucleotide
cauugacgaaagaguacau

SEQ ID NO: 1017492 - RNA, 19 nt, Artificial Sequence
  Description of Artificial Sequence: Synthetic oligonucleotide
ccugaaucaaggcacuccu

SEQ ID NO: 1017493 - RNA, 19 nt, Artificial Sequence
  Description of Artificial Sequence: Synthetic oligonucleotide
acggugugugggaaccacu

SEQ ID NO: 1017494 - RNA, 19 nt, Artificial Sequence
  Description of Artificial Sequence: Synthetic oligonucleotide
gaaguguaugggagugagu

SEQ ID NO: 1017495 - RNA, 19 nt, Artificial Sequence
  Description of Artificial Sequence: Synthetic oligonucleotide
ggcggguggguuauaagaa

SEQ ID NO: 1017496 - RNA, 19 nt, Artificial Sequence
  Description of Artificial Sequence: Synthetic oligonucleotide
ccuacacgccuggauggcg

SEQ ID NO: 1017497 - RNA, 19 nt, Artificial Sequence
  Description of Artificial Sequence: Synthetic oligonucleotide
gcuucugacccguguggga

SEQ ID NO: 1017498 - RNA, 19 nt, Artificial Sequence
  Description of Artificial Sequence: Synthetic oligonucleotide
caucuggccgaggcuguuc

SEQ ID NO: 1017499 - RNA, 19 nt, Artificial Sequence
  Description of Artificial Sequence: Synthetic oligonucleotide
cucucgccuuggagguccc

SEQ ID NO: 1017500 - RNA, 19 nt, Artificial Sequence
  Description of Artificial Sequence: Synthetic oligonucleotide
ggccgaggcuguucuuucc

SEQ ID NO: 1017501 - RNA, 19 nt, Artificial Sequence
  Description of Artificial Sequence: Synthetic oligonucleotide
ggaugaagccgcauuggcu

SEQ ID NO: 1017502 - RNA, 19 nt, Artificial Sequence
  Description of Artificial Sequence: Synthetic oligonucleotide
gaccucgggccacuuuugu

SEQ ID NO: 1017503 - RNA, 19 nt, Artificial Sequence
  Description of Artificial Sequence: Synthetic oligonucleotide
gcacccaugggcugucuaa

SEQ ID NO: 1017504 - RNA, 19 nt, Artificial Sequence
  Description of Artificial Sequence: Synthetic oligonucleotide
cuucugacccgugugggau

SEQ ID NO: 1017505 - RNA, 19 nt, Artificial Sequence
  Description of Artificial Sequence: Synthetic oligonucleotide
ccgagcagggcccgacucc

SEQ ID NO: 1017506 - RNA, 19 nt, Artificial Sequence
  Description of Artificial Sequence: Synthetic oligonucleotide
ucuggccgaggcuguucuu

SEQ ID NO: 1017507 - RNA, 19 nt, Artificial Sequence
  Description of Artificial Sequence: Synthetic oligonucleotide
ggauauggcucagaccagu

SEQ ID NO: 1017508 - RNA, 19 nt, Artificial Sequence
  Description of Artificial Sequence: Synthetic oligonucleotide
gagugaguccacggugugu

SEQ ID NO: 1017509 - RNA, 19 nt, Artificial Sequence
  Description of Artificial Sequence: Synthetic oligonucleotide
ugccgucccaaagggucau

SEQ ID NO: 1017510 - RNA, 19 nt, Artificial Sequence
  Description of Artificial Sequence: Synthetic oligonucleotide
  modified_base (4)..(4): a, c, u, g, unknown or other
agcngcggaagcgccccau

SEQ ID NO: 1017511 - RNA, 19 nt, Artificial Sequence
  Description of Artificial Sequence: Synthetic oligonucleotide
gcccugugaacagggauga

SEQ ID NO: 1017512 - RNA, 19 nt, Artificial Sequence
  Description of Artificial Sequence: Synthetic oligonucleotide
ggugccggcgucccaggga

SEQ ID NO: 1017513 - RNA, 19 nt, Artificial Sequence
  Description of Artificial Sequence: Synthetic oligonucleotide
gccccaucacagcuucuac

SEQ ID NO: 1017514 - RNA, 19 nt, Artificial Sequence
  Description of Artificial Sequence: Synthetic oligonucleotide
cugaccggcaacgucuccu

SEQ ID NO: 1017515 - RNA, 19 nt, Artificial Sequence
  Description of Artificial Sequence: Synthetic oligonucleotide
aagcgccccaucacagcuu

SEQ ID NO: 1017516 - RNA, 19 nt, Artificial Sequence
  Description of Artificial Sequence: Synthetic oligonucleotide
aaccacucugugggcccaa

SEQ ID NO: 1017517 - RNA, 19 nt, Artificial Sequence
  Description of Artificial Sequence: Synthetic oligonucleotide
ugcuagccccugggcuggg

SEQ ID NO: 1017518 - RNA, 19 nt, Artificial Sequence
  Description of Artificial Sequence: Synthetic oligonucleotide
acacgccuggauggcguga

SEQ ID NO: 1017519 - RNA, 19 nt, Artificial Sequence
  Description of Artificial Sequence: Synthetic oligonucleotide
gguggguuauaagaagcau

SEQ ID NO: 1017520 - RNA, 19 nt, Artificial Sequence
  Description of Artificial Sequence: Synthetic oligonucleotide
gugaucgcuucugacccgu

SEQ ID NO: 1017521 - RNA, 19 nt, Artificial Sequence
  Description of Artificial Sequence: Synthetic oligonucleotide
cccauaggugugauaacua

SEQ ID NO: 1017522 - RNA, 19 nt, Artificial Sequence
  Description of Artificial Sequence: Synthetic oligonucleotide
ugccggcgucccagggaca

SEQ ID NO: 1017523 - RNA, 19 nt, Artificial Sequence
  Description of Artificial Sequence: Synthetic oligonucleotide
cacccaugggcugucuaaa

SEQ ID NO: 1017524 - RNA, 19 nt, Artificial Sequence
  Description of Artificial Sequence: Synthetic oligonucleotide
gugggaacgagugggcgau

SEQ ID NO: 1017525 - RNA, 19 nt, Artificial Sequence
  Description of Artificial Sequence: Synthetic oligonucleotide
gccacggauggacggccug

SEQ ID NO: 1017526 - RNA, 19 nt, Artificial Sequence
  Description of Artificial Sequence: Synthetic oligonucleotide
cucgggccacuuuuguccu

SEQ ID NO: 1017527 - RNA, 19 nt, Artificial Sequence
  Description of Artificial Sequence: Synthetic oligonucleotide
gaagaccucgggccacuuu

SEQ ID NO: 1017528 - RNA, 19 nt, Artificial Sequence
  Description of Artificial Sequence: Synthetic oligonucleotide
gacuaccaccccaucggau

SEQ ID NO: 1017529 - RNA, 19 nt, Artificial Sequence
  Description of Artificial Sequence: Synthetic oligonucleotide
acggccugaccggcaacgu

SEQ ID NO: 1017530 - RNA, 19 nt, Artificial Sequence
  Description of Artificial Sequence: Synthetic oligonucleotide
gccggcgucccagggacag

SEQ ID NO: 1017531 - RNA, 19 nt, Artificial Sequence
  Description of Artificial Sequence: Synthetic oligonucleotide
ggccugaccggcaacgucu

SEQ ID NO: 1017532 - RNA, 19 nt, Artificial Sequence
  Description of Artificial Sequence: Synthetic oligonucleotide
ggugacgggguagguggac

SEQ ID NO: 1017533 - RNA, 19 nt, Artificial Sequence
  Description of Artificial Sequence: Synthetic oligonucleotide
gcacuugauuccauaggua

SEQ ID NO: 1017534 - RNA, 19 nt, Artificial Sequence
  Description of Artificial Sequence: Synthetic oligonucleotide
gggagugaguccacggugu

SEQ ID NO: 1017535 - RNA, 19 nt, Artificial Sequence
  Description of Artificial Sequence: Synthetic oligonucleotide
  modified_base (5)..(5): a, c, u, g, unknown or other
gagcngcggaagcgcccca

SEQ ID NO: 1017536 - RNA, 19 nt, Artificial Sequence
  Description of Artificial Sequence: Synthetic oligonucleotide
auggacggccugaccggca

SEQ ID NO: 1017537 - RNA, 19 nt, Artificial Sequence
  Description of Artificial Sequence: Synthetic oligonucleotide
gaccggcaacgucuccuua

SEQ ID NO: 1017538 - RNA, 19 nt, Artificial Sequence
  Description of Artificial Sequence: Synthetic oligonucleotide
gacccgugugggauagaua

SEQ ID NO: 1017539 - RNA, 19 nt, Artificial Sequence
  Description of Artificial Sequence: Synthetic oligonucleotide
ggacuggucugugaugccu

SEQ ID NO: 1017540 - RNA, 19 nt, Artificial Sequence
  Description of Artificial Sequence: Synthetic oligonucleotide
cagacccauaggugugaua

SEQ ID NO: 1017541 - RNA, 19 nt, Artificial Sequence
  Description of Artificial Sequence: Synthetic oligonucleotide
ggucuaguucaggccucug

SEQ ID NO: 1017542 - RNA, 19 nt, Artificial Sequence
  Description of Artificial Sequence: Synthetic oligonucleotide
  modified_base (3)..(3): a, c, u, g, unknown or other
gcngcggaagcgccccauc

SEQ ID NO: 1017543 - RNA, 19 nt, Artificial Sequence
  Description of Artificial Sequence: Synthetic oligonucleotide
caacagggugaucgcuucu

SEQ ID NO: 1017544 - RNA, 19 nt, Artificial Sequence
  Description of Artificial Sequence: Synthetic oligonucleotide
ggggucuaguucaggccuc

SEQ ID NO: 1017545 - RNA, 19 nt, Artificial Sequence
  Description of Artificial Sequence: Synthetic oligonucleotide
gugggcgauuggaggccug

SEQ ID NO: 1017546 - RNA, 19 nt, Artificial Sequence
  Description of Artificial Sequence: Synthetic oligonucleotide
accacucugugggcccaaa

SEQ ID NO: 1017547 - RNA, 19 nt, Artificial Sequence
  Description of Artificial Sequence: Synthetic oligonucleotide
cccgagcagggcccgacuc

SEQ ID NO: 1017548 - RNA, 19 nt, Artificial Sequence
  Description of Artificial Sequence: Synthetic oligonucleotide
ccugaccggcaacgucucc

SEQ ID NO: 1017549 - RNA, 19 nt, Artificial Sequence
  Description of Artificial Sequence: Synthetic oligonucleotide
gccgaggcuguucuuuccu

SEQ ID NO: 1017550 - RNA, 19 nt, Artificial Sequence
  Description of Artificial Sequence: Synthetic oligonucleotide
cggcgucccagggacaggg

SEQ ID NO: 1017551 - RNA, 19 nt, Artificial Sequence
  Description of Artificial Sequence: Synthetic oligonucleotide
gcuugccaccuacacgccu

SEQ ID NO: 1017552 - RNA, 19 nt, Artificial Sequence
  Description of Artificial Sequence: Synthetic oligonucleotide
ugggaacgagugggcgauu

SEQ ID NO: 1017553 - RNA, 19 nt, Artificial Sequence
  Description of Artificial Sequence: Synthetic oligonucleotide
ggcgauuggaggccugguu

SEQ ID NO: 1017554 - RNA, 19 nt, Artificial Sequence
  Description of Artificial Sequence: Synthetic oligonucleotide
gcccaacuagccgguggug

SEQ ID NO: 1017555 - RNA, 19 nt, Artificial Sequence
  Description of Artificial Sequence: Synthetic oligonucleotide
ccgucccaaagggucauca

SEQ ID NO: 1017556 - RNA, 19 nt, Artificial Sequence
  Description of Artificial Sequence: Synthetic oligonucleotide
cccgugugggauagauaga

SEQ ID NO: 1017557 - RNA, 19 nt, Artificial Sequence
  Description of Artificial Sequence: Synthetic oligonucleotide
cuggccgaggcuguucuuu

SEQ ID NO: 1017558 - RNA, 19 nt, Artificial Sequence
  Description of Artificial Sequence: Synthetic oligonucleotide
ccggcaacgucuccuuaaa

SEQ ID NO: 1017559 - RNA, 19 nt, Artificial Sequence
  Description of Artificial Sequence: Synthetic oligonucleotide
caggugcugccgggaguuc

SEQ ID NO: 1017560 - RNA, 19 nt, Artificial Sequence
  Description of Artificial Sequence: Synthetic oligonucleotide
cgggcggguggguuauaag

SEQ ID NO: 1017561 - RNA, 19 nt, Artificial Sequence
  Description of Artificial Sequence: Synthetic oligonucleotide
ccaauccuaugguaucuuu

SEQ ID NO: 1017562 - RNA, 19 nt, Artificial Sequence
  Description of Artificial Sequence: Synthetic oligonucleotide
gcccuuuuguucacccugu

SEQ ID NO: 1017563 - RNA, 19 nt, Artificial Sequence
  Description of Artificial Sequence: Synthetic oligonucleotide
cacuaacagggaggcuucu

SEQ ID NO: 1017564 - RNA, 19 nt, Artificial Sequence
  Description of Artificial Sequence: Synthetic oligonucleotide
gguguacacaucagcccuu

SEQ ID NO: 1017565 - RNA, 19 nt, Artificial Sequence
  Description of Artificial Sequence: Synthetic oligonucleotide
ccacggauggacggccuga

SEQ ID NO: 1017566 - RNA, 19 nt, Artificial Sequence
  Description of Artificial Sequence: Synthetic oligonucleotide
gcuagccccugggcugggc

SEQ ID NO: 1017567 - RNA, 19 nt, Artificial Sequence
  Description of Artificial Sequence: Synthetic oligonucleotide
ggguuauaagaagcaucuu

SEQ ID NO: 1017568 - RNA, 19 nt, Artificial Sequence
  Description of Artificial Sequence: Synthetic oligonucleotide
gggucuaguucaggccucu

SEQ ID NO: 1017569 - RNA, 19 nt, Artificial Sequence
  Description of Artificial Sequence: Synthetic oligonucleotide
ggcugucuaaagggaguau

SEQ ID NO: 1017570 - RNA, 19 nt, Artificial Sequence
  Description of Artificial Sequence: Synthetic oligonucleotide
cggccugaccggcaacguc

SEQ ID NO: 1017571 - RNA, 19 nt, Artificial Sequence
  Description of Artificial Sequence: Synthetic oligonucleotide
gcgggcggguggguuauaa

SEQ ID NO: 1017572 - RNA, 19 nt, Artificial Sequence
  Description of Artificial Sequence: Synthetic oligonucleotide
cugacccgugugggauaga

SEQ ID NO: 1017573 - RNA, 19 nt, Artificial Sequence
  Description of Artificial Sequence: Synthetic oligonucleotide
ccaugccgucccaaagggu

SEQ ID NO: 1017574 - RNA, 19 nt, Artificial Sequence
  Description of Artificial Sequence: Synthetic oligonucleotide
ggucccgguaugugucauu

SEQ ID NO: 1017575 - RNA, 19 nt, Artificial Sequence
  Description of Artificial Sequence: Synthetic oligonucleotide
ccggcgucccagggacagg

SEQ ID NO: 1017576 - RNA, 19 nt, Artificial Sequence
  Description of Artificial Sequence: Synthetic oligonucleotide
gccucucgccuuggagguc

SEQ ID NO: 1017577 - RNA, 19 nt, Artificial Sequence
  Description of Artificial Sequence: Synthetic oligonucleotide
gccgucccaaagggucauc

SEQ ID NO: 1017578 - RNA, 19 nt, Artificial Sequence
  Description of Artificial Sequence: Synthetic oligonucleotide
gggcgauuggaggccuggu

SEQ ID NO: 1017579 - RNA, 19 nt, Artificial Sequence
  Description of Artificial Sequence: Synthetic oligonucleotide
cagagcgggcggguggguu

SEQ ID NO: 1017580 - RNA, 19 nt, Artificial Sequence
  Description of Artificial Sequence: Synthetic oligonucleotide
gccgggaguucagacccau

SEQ ID NO: 1017581 - RNA, 19 nt, Artificial Sequence
  Description of Artificial Sequence: Synthetic oligonucleotide
gcacuccugggaaguguau

SEQ ID NO: 1017582 - RNA, 19 nt, Artificial Sequence
  Description of Artificial Sequence: Synthetic oligonucleotide
ccgggaguucagacccaua

SEQ ID NO: 1017583 - RNA, 19 nt, Artificial Sequence
  Description of Artificial Sequence: Synthetic oligonucleotide
cgccccaucacagcuucua

SEQ ID NO: 1017584 - RNA, 19 nt, Artificial Sequence
  Description of Artificial Sequence: Synthetic oligonucleotide
agcgggcggguggguuaua

SEQ ID NO: 1017585 - RNA, 19 nt, Artificial Sequence
  Description of Artificial Sequence: Synthetic oligonucleotide
gcgugaacaccaggaucuu

SEQ ID NO: 1017586 - RNA, 19 nt, Artificial Sequence
  Description of Artificial Sequence: Synthetic oligonucleotide
ggcgucccagggacagggu

SEQ ID NO: 1017587 - RNA, 19 nt, Artificial Sequence
  Description of Artificial Sequence: Synthetic oligonucleotide
ccccgagcagggcccgacu

SEQ ID NO: 1017588 - RNA, 19 nt, Artificial Sequence
  Description of Artificial Sequence: Synthetic oligonucleotide
ccccacuaacagggaggcu

SEQ ID NO: 1017589 - RNA, 19 nt, Artificial Sequence
  Description of Artificial Sequence: Synthetic oligonucleotide
  modified_base (1)..(1): a, c, u, g, unknown or other
ngcggaagcgccccaucac

SEQ ID NO: 1017590 - RNA, 19 nt, Artificial Sequence
  Description of Artificial Sequence: Synthetic oligonucleotide
ucugucaccauauugauag

SEQ ID NO: 1017591 - RNA, 19 nt, Artificial Sequence
  Description of Artificial Sequence: Synthetic oligonucleotide
uaauugaugacuaaggaga

SEQ ID NO: 1017592 - RNA, 19 nt, Artificial Sequence
  Description of Artificial Sequence: Synthetic oligonucleotide
uauaucauauaucuggucc

SEQ ID NO: 1017593 - RNA, 19 nt, Artificial Sequence
  Description of Artificial Sequence: Synthetic oligonucleotide
guaucuauaauguucacgg

SEQ ID NO: 1017594 - RNA, 19 nt, Artificial Sequence
  Description of Artificial Sequence: Synthetic oligonucleotide
uauucaaagagagagagag

SEQ ID NO: 1017595 - RNA, 19 nt, Artificial Sequence
  Description of Artificial Sequence: Synthetic oligonucleotide
guaauuaauacucugcuag

SEQ ID NO: 1017596 - RNA, 19 nt, Artificial Sequence
  Description of Artificial Sequence: Synthetic oligonucleotide
uagaaaaucagguuagggg

SEQ ID NO: 1017597 - RNA, 19 nt, Artificial Sequence
  Description of Artificial Sequence: Synthetic oligonucleotide
auaaauaccacggaggagg

SEQ ID NO: 1017598 - RNA, 19 nt, Artificial Sequence
  Description of Artificial Sequence: Synthetic oligonucleotide
aaaacuaccuguguguuac

SEQ ID NO: 1017599 - RNA, 19 nt, Artificial Sequence
  Description of Artificial Sequence: Synthetic oligonucleotide
aaagauuacugcuugggug

SEQ ID NO: 1017600 - RNA, 19 nt, Artificial Sequence
  Description of Artificial Sequence: Synthetic oligonucleotide
uuuauucaaagagagagag

SEQ ID NO: 1017601 - RNA, 19 nt, Artificial Sequence
  Description of Artificial Sequence: Synthetic oligonucleotide
aaaacaagauguccauccc

SEQ ID NO: 1017602 - RNA, 19 nt, Artificial Sequence
  Description of Artificial Sequence: Synthetic oligonucleotide
uucaaagagagagagagag

SEQ ID NO: 1017603 - RNA, 19 nt, Artificial Sequence
  Description of Artificial Sequence: Synthetic oligonucleotide
auugauauggcaaauguag

SEQ ID NO: 1017604 - RNA, 19 nt, Artificial Sequence
  Description of Artificial Sequence: Synthetic oligonucleotide
uauugauaaagauuacugc

SEQ ID NO: 1017605 - RNA, 19 nt, Artificial Sequence
  Description of Artificial Sequence: Synthetic oligonucleotide
ucauccaguacaaacaucu

SEQ ID NO: 1017606 - RNA, 19 nt, Artificial Sequence
  Description of Artificial Sequence: Synthetic oligonucleotide
uaagaucuaacucaaucug

SEQ ID NO: 1017607 - RNA, 19 nt, Artificial Sequence
  Description of Artificial Sequence: Synthetic oligonucleotide
ucuccuaaugccaugacca

SEQ ID NO: 1017608 - RNA, 19 nt, Artificial Sequence
  Description of Artificial Sequence: Synthetic oligonucleotide
aaacagugaaaucccgggc

SEQ ID NO: 1017609 - RNA, 19 nt, Artificial Sequence
  Description of Artificial Sequence: Synthetic oligonucleotide
uuaagaucuaacucaaucu

SEQ ID NO: 1017610 - RNA, 19 nt, Artificial Sequence
  Description of Artificial Sequence: Synthetic oligonucleotide
ucagugguaauuaauacuc

SEQ ID NO: 1017611 - RNA, 19 nt, Artificial Sequence
  Description of Artificial Sequence: Synthetic oligonucleotide
ucguaauugaugacuaagg

SEQ ID NO: 1017612 - RNA, 19 nt, Artificial Sequence
  Description of Artificial Sequence: Synthetic oligonucleotide
uguuuuagccccuugauuc

SEQ ID NO: 1017613 - RNA, 19 nt, Artificial Sequence
  Description of Artificial Sequence: Synthetic oligonucleotide
uuuccaaguaauuuuauuc

SEQ ID NO: 1017614 - RNA, 19 nt, Artificial Sequence
  Description of Artificial Sequence: Synthetic oligonucleotide
auuaauacucugcuagaac

SEQ ID NO: 1017615 - RNA, 19 nt, Artificial Sequence
  Description of Artificial Sequence: Synthetic oligonucleotide
guaauugaugacuaaggag

SEQ ID NO: 1017616 - RNA, 19 nt, Artificial Sequence
  Description of Artificial Sequence: Synthetic oligonucleotide
aauggauuaguguuugggu

SEQ ID NO: 1017617 - RNA, 19 nt, Artificial Sequence
  Description of Artificial Sequence: Synthetic oligonucleotide
aagucuuuagaaaaucagg

SEQ ID NO: 1017618 - RNA, 19 nt, Artificial Sequence
  Description of Artificial Sequence: Synthetic oligonucleotide
cucugcuagaaccagaccg

SEQ ID NO: 1017619 - RNA, 19 nt, Artificial Sequence
  Description of Artificial Sequence: Synthetic oligonucleotide
ugauaaagauuacugcuug

SEQ ID NO: 1017620 - RNA, 19 nt, Artificial Sequence
  Description of Artificial Sequence: Synthetic oligonucleotide
aagaucuaacucaaucugc

SEQ ID NO: 1017621 - RNA, 19 nt, Artificial Sequence
  Description of Artificial Sequence: Synthetic oligonucleotide
uuugguccagcaaaugagg

SEQ ID NO: 1017622 - RNA, 19 nt, Artificial Sequence
  Description of Artificial Sequence: Synthetic oligonucleotide
agaauugacggauacccuc

SEQ ID NO: 1017623 - RNA, 19 nt, Artificial Sequence
  Description of Artificial Sequence: Synthetic oligonucleotide
aagaaaaggguaucuauaa

SEQ ID NO: 1017624 - RNA, 19 nt, Artificial Sequence
  Description of Artificial Sequence: Synthetic oligonucleotide
acaagaggcacccauguag

SEQ ID NO: 1017625 - RNA, 19 nt, Artificial Sequence
  Description of Artificial Sequence: Synthetic oligonucleotide
cuuaagaucuaacucaauc

SEQ ID NO: 1017626 - RNA, 19 nt, Artificial Sequence
  Description of Artificial Sequence: Synthetic oligonucleotide
ucugcuagaaccagaccgg

SEQ ID NO: 1017627 - RNA, 19 nt, Artificial Sequence
  Description of Artificial Sequence: Synthetic oligonucleotide
uuagaaaaucagguuaggg

SEQ ID NO: 1017628 - RNA, 19 nt, Artificial Sequence
  Description of Artificial Sequence: Synthetic oligonucleotide
uguagcagacaacaaaacu

SEQ ID NO: 1017629 - RNA, 19 nt, Artificial Sequence
  Description of Artificial Sequence: Synthetic oligonucleotide
guagaauugacggauaccc

SEQ ID NO: 1017630 - RNA, 19 nt, Artificial Sequence
  Description of Artificial Sequence: Synthetic oligonucleotide
acauuagugccuccaauac

SEQ ID NO: 1017631 - RNA, 19 nt, Artificial Sequence
  Description of Artificial Sequence: Synthetic oligonucleotide
aaccauaggcauaaauacc

SEQ ID NO: 1017632 - RNA, 19 nt, Artificial Sequence
  Description of Artificial Sequence: Synthetic oligonucleotide
aacagugaaaucccgggca

SEQ ID NO: 1017633 - RNA, 19 nt, Artificial Sequence
  Description of Artificial Sequence: Synthetic oligonucleotide
auaaagauuacugcuuggg

SEQ ID NO: 1017634 - RNA, 19 nt, Artificial Sequence
  Description of Artificial Sequence: Synthetic oligonucleotide
cauugauguagaauugacg

SEQ ID NO: 1017635 - RNA, 19 nt, Artificial Sequence
  Description of Artificial Sequence: Synthetic oligonucleotide
accacgaccaauucugugg

SEQ ID NO: 1017636 - RNA, 19 nt, Artificial Sequence
  Description of Artificial Sequence: Synthetic oligonucleotide
agaauccugacucgcagac

SEQ ID NO: 1017637 - RNA, 19 nt, Artificial Sequence
  Description of Artificial Sequence: Synthetic oligonucleotide
ucugguauugauaaagauu

SEQ ID NO: 1017638 - RNA, 19 nt, Artificial Sequence
  Description of Artificial Sequence: Synthetic oligonucleotide
aaugaggccagacauguuu

SEQ ID NO: 1017639 - RNA, 19 nt, Artificial Sequence
  Description of Artificial Sequence: Synthetic oligonucleotide
ugauauggcaaauguagcu

SEQ ID NO: 1017640 - RNA, 19 nt, Artificial Sequence
  Description of Artificial Sequence: Synthetic oligonucleotide
auuagugccuccaauacag

SEQ ID NO: 1017641 - RNA, 19 nt, Artificial Sequence
  Description of Artificial Sequence: Synthetic oligonucleotide
aagagagagagagagaaaa

SEQ ID NO: 1017642 - RNA, 19 nt, Artificial Sequence
  Description of Artificial Sequence: Synthetic oligonucleotide
gauucugagagauucaugu

SEQ ID NO: 1017643 - RNA, 19 nt, Artificial Sequence
  Description of Artificial Sequence: Synthetic oligonucleotide
cuuuugaaucugcugagcc

SEQ ID NO: 1017644 - RNA, 19 nt, Artificial Sequence
  Description of Artificial Sequence: Synthetic oligonucleotide
aauauaucauauaucuggu

SEQ ID NO: 1017645 - RNA, 19 nt, Artificial Sequence
  Description of Artificial Sequence: Synthetic oligonucleotide
ucuggaucgagaauccuga

SEQ ID NO: 1017646 - RNA, 19 nt, Artificial Sequence
  Description of Artificial Sequence: Synthetic oligonucleotide
uugauauggcaaauguagc

SEQ ID NO: 1017647 - RNA, 19 nt, Artificial Sequence
  Description of Artificial Sequence: Synthetic oligonucleotide
uuacuguugagcuuuugga

SEQ ID NO: 1017648 - RNA, 19 nt, Artificial Sequence
  Description of Artificial Sequence: Synthetic oligonucleotide
uugaugacuaaggagaccu

SEQ ID NO: 1017649 - RNA, 19 nt, Artificial Sequence
  Description of Artificial Sequence: Synthetic oligonucleotide
uagaaugucucaaugucuc

SEQ ID NO: 1017650 - RNA, 19 nt, Artificial Sequence
  Description of Artificial Sequence: Synthetic oligonucleotide
acggauacccuccaggguc

SEQ ID NO: 1017651 - RNA, 19 nt, Artificial Sequence
  Description of Artificial Sequence: Synthetic oligonucleotide
uaacccuugauacaaggaa

SEQ ID NO: 1017652 - RNA, 19 nt, Artificial Sequence
  Description of Artificial Sequence: Synthetic oligonucleotide
auguagaauugacggauac

SEQ ID NO: 1017653 - RNA, 19 nt, Artificial Sequence
  Description of Artificial Sequence: Synthetic oligonucleotide
aaucacaucauaacccuug

SEQ ID NO: 1017654 - RNA, 19 nt, Artificial Sequence
  Description of Artificial Sequence: Synthetic oligonucleotide
aggggcaucucuucaaugg

SEQ ID NO: 1017655 - RNA, 19 nt, Artificial Sequence
  Description of Artificial Sequence: Synthetic oligonucleotide
uaaagauuacugcuugggu

SEQ ID NO: 1017656 - RNA, 19 nt, Artificial Sequence
  Description of Artificial Sequence: Synthetic oligonucleotide
cauaacccuugauacaagg

SEQ ID NO: 1017657 - RNA, 19 nt, Artificial Sequence
  Description of Artificial Sequence: Synthetic oligonucleotide
cauaggcauaaauaccacg

SEQ ID NO: 1017658 - RNA, 19 nt, Artificial Sequence
  Description of Artificial Sequence: Synthetic oligonucleotide
ucuaacucaaucugcugca

SEQ ID NO: 1017659 - RNA, 19 nt, Artificial Sequence
  Description of Artificial Sequence: Synthetic oligonucleotide
ucccuggacaacuucaugc

SEQ ID NO: 1017660 - RNA, 19 nt, Artificial Sequence
  Description of Artificial Sequence: Synthetic oligonucleotide
caucuugauguauuugggg

SEQ ID NO: 1017661 - RNA, 19 nt, Artificial Sequence
  Description of Artificial Sequence: Synthetic oligonucleotide
aagugacauuuauucaaag

SEQ ID NO: 1017662 - RNA, 19 nt, Artificial Sequence
  Description of Artificial Sequence: Synthetic oligonucleotide
auaucauauaucugguccu

SEQ ID NO: 1017663 - RNA, 19 nt, Artificial Sequence
  Description of Artificial Sequence: Synthetic oligonucleotide
uuuacggccaaagcgacca

SEQ ID NO: 1017664 - RNA, 19 nt, Artificial Sequence
  Description of Artificial Sequence: Synthetic oligonucleotide
cuggacaacuucaugcagg

SEQ ID NO: 1017665 - RNA, 19 nt, Artificial Sequence
  Description of Artificial Sequence: Synthetic oligonucleotide
uuuugaaucugcugagcca

SEQ ID NO: 1017666 - RNA, 19 nt, Artificial Sequence
  Description of Artificial Sequence: Synthetic oligonucleotide
aaucagguuaggggaaugg

SEQ ID NO: 1017667 - RNA, 19 nt, Artificial Sequence
  Description of Artificial Sequence: Synthetic oligonucleotide
ucaaggacaucugagggca

SEQ ID NO: 1017668 - RNA, 19 nt, Artificial Sequence
  Description of Artificial Sequence: Synthetic oligonucleotide
aauaccacggaggagggau

SEQ ID NO: 1017669 - RNA, 19 nt, Artificial Sequence
  Description of Artificial Sequence: Synthetic oligonucleotide
ucagcacgcacauuagugc

SEQ ID NO: 1017670 - RNA, 19 nt, Artificial Sequence
  Description of Artificial Sequence: Synthetic oligonucleotide
aauuaauacucugcuagaa

SEQ ID NO: 1017671 - RNA, 19 nt, Artificial Sequence
  Description of Artificial Sequence: Synthetic oligonucleotide
auuacugcuugggugauag

SEQ ID NO: 1017672 - RNA, 19 nt, Artificial Sequence
  Description of Artificial Sequence: Synthetic oligonucleotide
uucaauggagguguuguag

SEQ ID NO: 1017673 - RNA, 19 nt, Artificial Sequence
  Description of Artificial Sequence: Synthetic oligonucleotide
gacuaaggagaccugcugc

SEQ ID NO: 1017674 - RNA, 19 nt, Artificial Sequence
  Description of Artificial Sequence: Synthetic oligonucleotide
aggcauaaauaccacggag

SEQ ID NO: 1017675 - RNA, 19 nt, Artificial Sequence
  Description of Artificial Sequence: Synthetic oligonucleotide
auggggagcuuccaucugc

SEQ ID NO: 1017676 - RNA, 19 nt, Artificial Sequence
  Description of Artificial Sequence: Synthetic oligonucleotide
ugagcuuuuggaauauauc

SEQ ID NO: 1017677 - RNA, 19 nt, Artificial Sequence
  Description of Artificial Sequence: Synthetic oligonucleotide
aggccagacauguuuuagc

SEQ ID NO: 1017678 - RNA, 19 nt, Artificial Sequence
  Description of Artificial Sequence: Synthetic oligonucleotide
ucaauggagguguuguaga

SEQ ID NO: 1017679 - RNA, 19 nt, Artificial Sequence
  Description of Artificial Sequence: Synthetic oligonucleotide
cagacaacaaaacuaccug

SEQ ID NO: 1017680 - RNA, 19 nt, Artificial Sequence
  Description of Artificial Sequence: Synthetic oligonucleotide
caucugagggcauuguagc

SEQ ID NO: 1017681 - RNA, 19 nt, Artificial Sequence
  Description of Artificial Sequence: Synthetic oligonucleotide
uuugaaucugcugagccaa

SEQ ID NO: 1017682 - RNA, 19 nt, Artificial Sequence
  Description of Artificial Sequence: Synthetic oligonucleotide
ugggguaguaggaaagucu

SEQ ID NO: 1017683 - RNA, 19 nt, Artificial Sequence
  Description of Artificial Sequence: Synthetic oligonucleotide
aacccuugauacaaggaag

SEQ ID NO: 1017684 - RNA, 19 nt, Artificial Sequence
  Description of Artificial Sequence: Synthetic oligonucleotide
agcauaucaaacacccggc

SEQ ID NO: 1017685 - RNA, 19 nt, Artificial Sequence
  Description of Artificial Sequence: Synthetic oligonucleotide
uuauucaaagagagagaga

SEQ ID NO: 1017686 - RNA, 19 nt, Artificial Sequence
  Description of Artificial Sequence: Synthetic oligonucleotide
auucugagagauucauguc

SEQ ID NO: 1017687 - RNA, 19 nt, Artificial Sequence
  Description of Artificial Sequence: Synthetic oligonucleotide
uugagcuuuuggaauauau

SEQ ID NO: 1017688 - RNA, 19 nt, Artificial Sequence
  Description of Artificial Sequence: Synthetic oligonucleotide
gaugacuaaggagaccugc

SEQ ID NO: 1017689 - RNA, 19 nt, Artificial Sequence
  Description of Artificial Sequence: Synthetic oligonucleotide
gaugauauggggagcuucc

SEQ ID NO: 1017690 - RNA, 19 nt, Artificial Sequence
  Description of Artificial Sequence: Synthetic oligonucleotide
ucaccuggggacaauuccc

SEQ ID NO: 1017691 - RNA, 19 nt, Artificial Sequence
  Description of Artificial Sequence: Synthetic oligonucleotide
auugaugacuaaggagacc

SEQ ID NO: 1017692 - RNA, 19 nt, Artificial Sequence
  Description of Artificial Sequence: Synthetic oligonucleotide
ugucaccauauugauagcc

SEQ ID NO: 1017693 - RNA, 19 nt, Artificial Sequence
  Description of Artificial Sequence: Synthetic oligonucleotide
auauggcaaauguagcugu

SEQ ID NO: 1017694 - RNA, 19 nt, Artificial Sequence
  Description of Artificial Sequence: Synthetic oligonucleotide
cucagcacgcacauuagug

SEQ ID NO: 1017695 - RNA, 19 nt, Artificial Sequence
  Description of Artificial Sequence: Synthetic oligonucleotide
uggccuuaagaucuaacuc

SEQ ID NO: 1017696 - RNA, 19 nt, Artificial Sequence
  Description of Artificial Sequence: Synthetic oligonucleotide
aggggaauggauuaguguu

SEQ ID NO: 1017697 - RNA, 19 nt, Artificial Sequence
  Description of Artificial Sequence: Synthetic oligonucleotide
ugacaagaggcacccaugu

SEQ ID NO: 1017698 - RNA, 19 nt, Artificial Sequence
  Description of Artificial Sequence: Synthetic oligonucleotide
uguguuacuguugagcuuu

SEQ ID NO: 1017699 - RNA, 19 nt, Artificial Sequence
  Description of Artificial Sequence: Synthetic oligonucleotide
ugacuaaggagaccugcug

SEQ ID NO: 1017700 - RNA, 19 nt, Artificial Sequence
  Description of Artificial Sequence: Synthetic oligonucleotide
accauaggcauaaauacca

SEQ ID NO: 1017701 - RNA, 19 nt, Artificial Sequence
  Description of Artificial Sequence: Synthetic oligonucleotide
gaucgagaauccugacucg

SEQ ID NO: 1017702 - RNA, 19 nt, Artificial Sequence
  Description of Artificial Sequence: Synthetic oligonucleotide
uguagaauugacggauacc

SEQ ID NO: 1017703 - RNA, 19 nt, Artificial Sequence
  Description of Artificial Sequence: Synthetic oligonucleotide
auuguagcagacaacaaaa

SEQ ID NO: 1017704 - RNA, 19 nt, Artificial Sequence
  Description of Artificial Sequence: Synthetic oligonucleotide
caggguuucauacaaguca

SEQ ID NO: 1017705 - RNA, 19 nt, Artificial Sequence
  Description of Artificial Sequence: Synthetic oligonucleotide
aucgagaauccugacucgc

SEQ ID NO: 1017706 - RNA, 19 nt, Artificial Sequence
  Description of Artificial Sequence: Synthetic oligonucleotide
ggcauaaauaccacggagg

SEQ ID NO: 1017707 - RNA, 19 nt, Artificial Sequence
  Description of Artificial Sequence: Synthetic oligonucleotide
uaggcauaaauaccacgga

SEQ ID NO: 1017708 - RNA, 19 nt, Artificial Sequence
  Description of Artificial Sequence: Synthetic oligonucleotide
ggcggaaacagugaaaucc

SEQ ID NO: 1017709 - RNA, 19 nt, Artificial Sequence
  Description of Artificial Sequence: Synthetic oligonucleotide
ucaaagagagagagagaga

SEQ ID NO: 1017710 - RNA, 19 nt, Artificial Sequence
  Description of Artificial Sequence: Synthetic oligonucleotide
gaauugacggauacccucc

SEQ ID NO: 1017711 - RNA, 19 nt, Artificial Sequence
  Description of Artificial Sequence: Synthetic oligonucleotide
auauggggagcuuccaucu

SEQ ID NO: 1017712 - RNA, 19 nt, Artificial Sequence
  Description of Artificial Sequence: Synthetic oligonucleotide
uggggcagaaccuacccca

SEQ ID NO: 1017713 - RNA, 19 nt, Artificial Sequence
  Description of Artificial Sequence: Synthetic oligonucleotide
ggaucgagaauccugacuc

SEQ ID NO: 1017714 - RNA, 19 nt, Artificial Sequence
  Description of Artificial Sequence: Synthetic oligonucleotide
gagggauucugagagauuc

SEQ ID NO: 1017715 - RNA, 19 nt, Artificial Sequence
  Description of Artificial Sequence: Synthetic oligonucleotide
acauguuuuagccccuuga

SEQ ID NO: 1017716 - RNA, 19 nt, Artificial Sequence
  Description of Artificial Sequence: Synthetic oligonucleotide
uccgguuaagcauaucaaa

SEQ ID NO: 1017717 - RNA, 19 nt, Artificial Sequence
  Description of Artificial Sequence: Synthetic oligonucleotide
ccagacauguuuuagcccc

SEQ ID NO: 1017718 - RNA, 19 nt, Artificial Sequence
  Description of Artificial Sequence: Synthetic oligonucleotide
auuaguguuuggguugggg

SEQ ID NO: 1017719 - RNA, 19 nt, Artificial Sequence
  Description of Artificial Sequence: Synthetic oligonucleotide
aagaauccgaauggggucu

SEQ ID NO: 1017720 - RNA, 19 nt, Artificial Sequence
  Description of Artificial Sequence: Synthetic oligonucleotide
gugguaauuaauacucugc

SEQ ID NO: 1017721 - RNA, 19 nt, Artificial Sequence
  Description of Artificial Sequence: Synthetic oligonucleotide
acacaaugugucaagcuuc

SEQ ID NO: 1017722 - RNA, 19 nt, Artificial Sequence
  Description of Artificial Sequence: Synthetic oligonucleotide
uguagucuccuaaugccau

SEQ ID NO: 1017723 - RNA, 19 nt, Artificial Sequence
  Description of Artificial Sequence: Synthetic oligonucleotide
uuuguguuuguuuccugaa

SEQ ID NO: 1017724 - RNA, 19 nt, Artificial Sequence
  Description of Artificial Sequence: Synthetic oligonucleotide
aaaucccgggcaugcaucu

SEQ ID NO: 1017725 - RNA, 19 nt, Artificial Sequence
  Description of Artificial Sequence: Synthetic oligonucleotide
uuagugccuccaauacagg

SEQ ID NO: 1017726 - RNA, 19 nt, Artificial Sequence
  Description of Artificial Sequence: Synthetic oligonucleotide
aaugucucgaagaguccuc

SEQ ID NO: 1017727 - RNA, 19 nt, Artificial Sequence
  Description of Artificial Sequence: Synthetic oligonucleotide
caaagagagagagagagaa

SEQ ID NO: 1017728 - RNA, 19 nt, Artificial Sequence
  Description of Artificial Sequence: Synthetic oligonucleotide
caagaauccgaaugggguc

SEQ ID NO: 1017729 - RNA, 19 nt, Artificial Sequence
  Description of Artificial Sequence: Synthetic oligonucleotide
auggauuaguguuuggguu

SEQ ID NO: 1017730 - RNA, 19 nt, Artificial Sequence
  Description of Artificial Sequence: Synthetic oligonucleotide
uggaucgagaauccugacu

SEQ ID NO: 1017731 - RNA, 19 nt, Artificial Sequence
  Description of Artificial Sequence: Synthetic oligonucleotide
ugguccuugaacccacggc

SEQ ID NO: 1017732 - RNA, 19 nt, Artificial Sequence
  Description of Artificial Sequence: Synthetic oligonucleotide
aauugauauggcaaaugua

SEQ ID NO: 1017733 - RNA, 19 nt, Artificial Sequence
  Description of Artificial Sequence: Synthetic oligonucleotide
cacggcuuaacauuucauc

SEQ ID NO: 1017734 - RNA, 19 nt, Artificial Sequence
  Description of Artificial Sequence: Synthetic oligonucleotide
ugaacccacggcuuaacau

SEQ ID NO: 1017735 - RNA, 19 nt, Artificial Sequence
  Description of Artificial Sequence: Synthetic oligonucleotide
uagaauugacggauacccu

SEQ ID NO: 1017736 - RNA, 19 nt, Artificial Sequence
  Description of Artificial Sequence: Synthetic oligonucleotide
aauugacggauacccucca

SEQ ID NO: 1017737 - RNA, 19 nt, Artificial Sequence
  Description of Artificial Sequence: Synthetic oligonucleotide
agaucuaacucaaucugcu

SEQ ID NO: 1017738 - RNA, 19 nt, Artificial Sequence
  Description of Artificial Sequence: Synthetic oligonucleotide
auaucuccaugcauggcgg

SEQ ID NO: 1017739 - RNA, 19 nt, Artificial Sequence
  Description of Artificial Sequence: Synthetic oligonucleotide
uaucuauaauguucacggu

SEQ ID NO: 1017740 - RNA, 19 nt, Artificial Sequence
  Description of Artificial Sequence: Synthetic oligonucleotide
ucaccucaaggacaucuga

SEQ ID NO: 1017741 - RNA, 19 nt, Artificial Sequence
  Description of Artificial Sequence: Synthetic oligonucleotide
caugcagggacucucccug

SEQ ID NO: 1017742 - RNA, 19 nt, Artificial Sequence
  Description of Artificial Sequence: Synthetic oligonucleotide
ggccuuaagaucuaacuca

SEQ ID NO: 1017743 - RNA, 19 nt, Artificial Sequence
  Description of Artificial Sequence: Synthetic oligonucleotide
aauccgaauggggucucuc

SEQ ID NO: 1017744 - RNA, 19 nt, Artificial Sequence
  Description of Artificial Sequence: Synthetic oligonucleotide
gucuccuaaugccaugacc

SEQ ID NO: 1017745 - RNA, 19 nt, Artificial Sequence
  Description of Artificial Sequence: Synthetic oligonucleotide
agguguuguagaaugucuc

SEQ ID NO: 1017746 - RNA, 19 nt, Artificial Sequence
  Description of Artificial Sequence: Synthetic oligonucleotide
ugcauggcggaaacaguga

SEQ ID NO: 1017747 - RNA, 19 nt, Artificial Sequence
  Description of Artificial Sequence: Synthetic oligonucleotide
ucgagaauccugacucgca

SEQ ID NO: 1017748 - RNA, 19 nt, Artificial Sequence
  Description of Artificial Sequence: Synthetic oligonucleotide
caccucaaggacaucugag

SEQ ID NO: 1017749 - RNA, 19 nt, Artificial Sequence
  Description of Artificial Sequence: Synthetic oligonucleotide
ugggugauagucaggguuu

SEQ ID NO: 1017750 - RNA, 19 nt, Artificial Sequence
  Description of Artificial Sequence: Synthetic oligonucleotide
uuguguuuguuuccugaau

SEQ ID NO: 1017751 - RNA, 19 nt, Artificial Sequence
  Description of Artificial Sequence: Synthetic oligonucleotide
accuuuacggccaaagcga

SEQ ID NO: 1017752 - RNA, 19 nt, Artificial Sequence
  Description of Artificial Sequence: Synthetic oligonucleotide
aaaucagguuaggggaaug

SEQ ID NO: 1017753 - RNA, 19 nt, Artificial Sequence
  Description of Artificial Sequence: Synthetic oligonucleotide
uggcaaauguagcuguuuu

SEQ ID NO: 1017754 - RNA, 19 nt, Artificial Sequence
  Description of Artificial Sequence: Synthetic oligonucleotide
ugguauugauaaagauuac

SEQ ID NO: 1017755 - RNA, 19 nt, Artificial Sequence
  Description of Artificial Sequence: Synthetic oligonucleotide
aagucacacaaugugucaa

SEQ ID NO: 1017756 - RNA, 19 nt, Artificial Sequence
  Description of Artificial Sequence: Synthetic oligonucleotide
gagagauucaugucaucaa

SEQ ID NO: 1017757 - RNA, 19 nt, Artificial Sequence
  Description of Artificial Sequence: Synthetic oligonucleotide
ggaaacagugaaaucccgg

SEQ ID NO: 1017758 - RNA, 19 nt, Artificial Sequence
  Description of Artificial Sequence: Synthetic oligonucleotide
ggagauuuggcugggguag

SEQ ID NO: 1017759 - RNA, 19 nt, Artificial Sequence
  Description of Artificial Sequence: Synthetic oligonucleotide
gcuagaaccagaccggaac

SEQ ID NO: 1017760 - RNA, 19 nt, Artificial Sequence
  Description of Artificial Sequence: Synthetic oligonucleotide
cauaaauaccacggaggag

SEQ ID NO: 1017761 - RNA, 19 nt, Artificial Sequence
  Description of Artificial Sequence: Synthetic oligonucleotide
aacaggucagugguaauua

SEQ ID NO: 1017762 - RNA, 19 nt, Artificial Sequence
  Description of Artificial Sequence: Synthetic oligonucleotide
ugauauggggagcuuccau

SEQ ID NO: 1017763 - RNA, 19 nt, Artificial Sequence
  Description of Artificial Sequence: Synthetic oligonucleotide
cuggcuagagccagguaac

SEQ ID NO: 1017764 - RNA, 19 nt, Artificial Sequence
  Description of Artificial Sequence: Synthetic oligonucleotide
aagcuauccacaaucucau

SEQ ID NO: 1017765 - RNA, 19 nt, Artificial Sequence
  Description of Artificial Sequence: Synthetic oligonucleotide
ucgaugacgccuucaggcu

SEQ ID NO: 1017766 - RNA, 19 nt, Artificial Sequence
  Description of Artificial Sequence: Synthetic oligonucleotide
uauaauguucacgguuccu

SEQ ID NO: 1017767 - RNA, 19 nt, Artificial Sequence
  Description of Artificial Sequence: Synthetic oligonucleotide
aucacaucauaacccuuga

SEQ ID NO: 1017768 - RNA, 19 nt, Artificial Sequence
  Description of Artificial Sequence: Synthetic oligonucleotide
auggcggaaacagugaaau

SEQ ID NO: 1017769 - RNA, 19 nt, Artificial Sequence
  Description of Artificial Sequence: Synthetic oligonucleotide
acaagauguccaucccuug

SEQ ID NO: 1017770 - RNA, 19 nt, Artificial Sequence
  Description of Artificial Sequence: Synthetic oligonucleotide
ggccagacauguuuuagcc

SEQ ID NO: 1017771 - RNA, 19 nt, Artificial Sequence
  Description of Artificial Sequence: Synthetic oligonucleotide
auaauguucacgguuccuu

SEQ ID NO: 1017772 - RNA, 19 nt, Artificial Sequence
  Description of Artificial Sequence: Synthetic oligonucleotide
ugaugacuaaggagaccug

SEQ ID NO: 1017773 - RNA, 19 nt, Artificial Sequence
  Description of Artificial Sequence: Synthetic oligonucleotide
gacagccccucaaaugagg

SEQ ID NO: 1017774 - RNA, 19 nt, Artificial Sequence
  Description of Artificial Sequence: Synthetic oligonucleotide
acggaggagggauucugag

SEQ ID NO: 1017775 - RNA, 19 nt, Artificial Sequence
  Description of Artificial Sequence: Synthetic oligonucleotide
aggcaugacaagaggcacc

SEQ ID NO: 1017776 - RNA, 19 nt, Artificial Sequence
  Description of Artificial Sequence: Synthetic oligonucleotide
ggucagugguaauuaauac

SEQ ID NO: 1017777 - RNA, 19 nt, Artificial Sequence
  Description of Artificial Sequence: Synthetic oligonucleotide
caaagcuauccacaaucuc

SEQ ID NO: 1017778 - RNA, 19 nt, Artificial Sequence
  Description of Artificial Sequence: Synthetic oligonucleotide
cugacucgcagacaugauc

SEQ ID NO: 1017779 - RNA, 19 nt, Artificial Sequence
  Description of Artificial Sequence: Synthetic oligonucleotide
auugacggauacccuccag

SEQ ID NO: 1017780 - RNA, 19 nt, Artificial Sequence
  Description of Artificial Sequence: Synthetic oligonucleotide
agauguccaucccuuggcu

SEQ ID NO: 1017781 - RNA, 19 nt, Artificial Sequence
  Description of Artificial Sequence: Synthetic oligonucleotide
ggcagaaccuaccccaaag

SEQ ID NO: 1017782 - RNA, 19 nt, Artificial Sequence
  Description of Artificial Sequence: Synthetic oligonucleotide
ggccauugucucuggaucg

SEQ ID NO: 1017783 - RNA, 19 nt, Artificial Sequence
  Description of Artificial Sequence: Synthetic oligonucleotide
cuuuacggccaaagcgacc

SEQ ID NO: 1017784 - RNA, 19 nt, Artificial Sequence
  Description of Artificial Sequence: Synthetic oligonucleotide
cccacgaugauauggggag

SEQ ID NO: 1017785 - RNA, 19 nt, Artificial Sequence
  Description of Artificial Sequence: Synthetic oligonucleotide
ugcccacgaugauaugggg

SEQ ID NO: 1017786 - RNA, 19 nt, Artificial Sequence
  Description of Artificial Sequence: Synthetic oligonucleotide
ccgguuaagcauaucaaac

SEQ ID NO: 1017787 - RNA, 19 nt, Artificial Sequence
  Description of Artificial Sequence: Synthetic oligonucleotide
gacgccuucaggcuccauc

SEQ ID NO: 1017788 - RNA, 19 nt, Artificial Sequence
  Description of Artificial Sequence: Synthetic oligonucleotide
guuuuagccccuugauuca

SEQ ID NO: 1017789 - RNA, 19 nt, Artificial Sequence
  Description of Artificial Sequence: Synthetic oligonucleotide
uccgaauggggucucucau

SEQ ID NO: 1017790 - RNA, 19 nt, Artificial Sequence
  Description of Artificial Sequence: Synthetic oligonucleotide
auacccuccagggucaacu

SEQ ID NO: 1017791 - RNA, 19 nt, Artificial Sequence
  Description of Artificial Sequence: Synthetic oligonucleotide
uuuggagauuuggcugggg

SEQ ID NO: 1017792 - RNA, 19 nt, Artificial Sequence
  Description of Artificial Sequence: Synthetic oligonucleotide
agccugaguggccuuaaga

SEQ ID NO: 1017793 - RNA, 19 nt, Artificial Sequence
  Description of Artificial Sequence: Synthetic oligonucleotide
agguuaggggaauggauua

SEQ ID NO: 1017794 - RNA, 19 nt, Artificial Sequence
  Description of Artificial Sequence: Synthetic oligonucleotide
acagugaaaucccgggcau

SEQ ID NO: 1017795 - RNA, 19 nt, Artificial Sequence
  Description of Artificial Sequence: Synthetic oligonucleotide
agcaacauugaggggcauc

SEQ ID NO: 1017796 - RNA, 19 nt, Artificial Sequence
  Description of Artificial Sequence: Synthetic oligonucleotide
gacugaacccuggcuagag

SEQ ID NO: 1017797 - RNA, 19 nt, Artificial Sequence
  Description of Artificial Sequence: Synthetic oligonucleotide
gagaauccugacucgcaga

SEQ ID NO: 1017798 - RNA, 19 nt, Artificial Sequence
  Description of Artificial Sequence: Synthetic oligonucleotide
uggggagcuuccaucugca

SEQ ID NO: 1017799 - RNA, 19 nt, Artificial Sequence
  Description of Artificial Sequence: Synthetic oligonucleotide
aacacccggccaggggugc

SEQ ID NO: 1017800 - RNA, 19 nt, Artificial Sequence
  Description of Artificial Sequence: Synthetic oligonucleotide
agaggcacccauguagucu

SEQ ID NO: 1017801 - RNA, 19 nt, Artificial Sequence
  Description of Artificial Sequence: Synthetic oligonucleotide
agccagguaacaggacagc

SEQ ID NO: 1017802 - RNA, 19 nt, Artificial Sequence
  Description of Artificial Sequence: Synthetic oligonucleotide
ugaggggcaucucuucaau

SEQ ID NO: 1017803 - RNA, 19 nt, Artificial Sequence
  Description of Artificial Sequence: Synthetic oligonucleotide
cauuagugccuccaauaca

SEQ ID NO: 1017804 - RNA, 19 nt, Artificial Sequence
  Description of Artificial Sequence: Synthetic oligonucleotide
ggauuaguguuuggguugg

SEQ ID NO: 1017805 - RNA, 19 nt, Artificial Sequence
  Description of Artificial Sequence: Synthetic oligonucleotide
uauggcaaauguagcuguu

SEQ ID NO: 1017806 - RNA, 19 nt, Artificial Sequence
  Description of Artificial Sequence: Synthetic oligonucleotide
aaagagagagagagagaaa

SEQ ID NO: 1017807 - RNA, 19 nt, Artificial Sequence
  Description of Artificial Sequence: Synthetic oligonucleotide
uuuuagccccuugauucac

SEQ ID NO: 1017808 - RNA, 19 nt, Artificial Sequence
  Description of Artificial Sequence: Synthetic oligonucleotide
guggccuuaagaucuaacu

SEQ ID NO: 1017809 - RNA, 19 nt, Artificial Sequence
  Description of Artificial Sequence: Synthetic oligonucleotide
caagucacacaauguguca

SEQ ID NO: 1017810 - RNA, 19 nt, Artificial Sequence
  Description of Artificial Sequence: Synthetic oligonucleotide
gaaaucccgggcaugcauc

SEQ ID NO: 1017811 - RNA, 19 nt, Artificial Sequence
  Description of Artificial Sequence: Synthetic oligonucleotide
ugggaaggucguaauugau

SEQ ID NO: 1017812 - RNA, 19 nt, Artificial Sequence
  Description of Artificial Sequence: Synthetic oligonucleotide
guagucuccuaaugccaug

SEQ ID NO: 1017813 - RNA, 19 nt, Artificial Sequence
  Description of Artificial Sequence: Synthetic oligonucleotide
ucuugacaagaauccgaau

SEQ ID NO: 1017814 - RNA, 19 nt, Artificial Sequence
  Description of Artificial Sequence: Synthetic oligonucleotide
cuccuaaugccaugaccac

SEQ ID NO: 1017815 - RNA, 19 nt, Artificial Sequence
  Description of Artificial Sequence: Synthetic oligonucleotide
cuaacucaaucugcugcag

SEQ ID NO: 1017816 - RNA, 19 nt, Artificial Sequence
  Description of Artificial Sequence: Synthetic oligonucleotide
aggagggauucugagagau

SEQ ID NO: 1017817 - RNA, 19 nt, Artificial Sequence
  Description of Artificial Sequence: Synthetic oligonucleotide
aucagguuaggggaaugga

SEQ ID NO: 1017818 - RNA, 19 nt, Artificial Sequence
  Description of Artificial Sequence: Synthetic oligonucleotide
gguaauuaauacucugcua

SEQ ID NO: 1017819 - RNA, 19 nt, Artificial Sequence
  Description of Artificial Sequence: Synthetic oligonucleotide
cacauugauguagaauuga

SEQ ID NO: 1017820 - RNA, 19 nt, Artificial Sequence
  Description of Artificial Sequence: Synthetic oligonucleotide
augacuaaggagaccugcu

SEQ ID NO: 1017821 - RNA, 19 nt, Artificial Sequence
  Description of Artificial Sequence: Synthetic oligonucleotide
auauugauagccacaccuu

SEQ ID NO: 1017822 - RNA, 19 nt, Artificial Sequence
  Description of Artificial Sequence: Synthetic oligonucleotide
caguuuccaaguaauuuua

SEQ ID NO: 1017823 - RNA, 19 nt, Artificial Sequence
  Description of Artificial Sequence: Synthetic oligonucleotide
cucgaagaguccucuuguc

SEQ ID NO: 1017824 - RNA, 19 nt, Artificial Sequence
  Description of Artificial Sequence: Synthetic oligonucleotide
gaacccacggcuuaacauu

SEQ ID NO: 1017825 - RNA, 19 nt, Artificial Sequence
  Description of Artificial Sequence: Synthetic oligonucleotide
uacggccaaagcgaccacc

SEQ ID NO: 1017826 - RNA, 19 nt, Artificial Sequence
  Description of Artificial Sequence: Synthetic oligonucleotide
gauuaguguuuggguuggg

SEQ ID NO: 1017827 - RNA, 19 nt, Artificial Sequence
  Description of Artificial Sequence: Synthetic oligonucleotide
uaucuccaugcauggcgga

SEQ ID NO: 1017828 - RNA, 19 nt, Artificial Sequence
  Description of Artificial Sequence: Synthetic oligonucleotide
ccaugcauggcggaaacag

SEQ ID NO: 1017829 - RNA, 19 nt, Artificial Sequence
  Description of Artificial Sequence: Synthetic oligonucleotide
cagaaccuaccccaaagaa

SEQ ID NO: 1017830 - RNA, 19 nt, Artificial Sequence
  Description of Artificial Sequence: Synthetic oligonucleotide
acucucccuguagauuugg

SEQ ID NO: 1017831 - RNA, 19 nt, Artificial Sequence
  Description of Artificial Sequence: Synthetic oligonucleotide
auucaaagagagagagaga

SEQ ID NO: 1017832 - RNA, 19 nt, Artificial Sequence
  Description of Artificial Sequence: Synthetic oligonucleotide
gguaguaggaaagucuuua

SEQ ID NO: 1017833 - RNA, 19 nt, Artificial Sequence
  Description of Artificial Sequence: Synthetic oligonucleotide
ugagggcauuguagcagac

SEQ ID NO: 1017834 - RNA, 19 nt, Artificial Sequence
  Description of Artificial Sequence: Synthetic oligonucleotide
gacaucugagggcauugua

SEQ ID NO: 1017835 - RNA, 19 nt, Artificial Sequence
  Description of Artificial Sequence: Synthetic oligonucleotide
aaccagaccggaacucccu

SEQ ID NO: 1017836 - RNA, 19 nt, Artificial Sequence
  Description of Artificial Sequence: Synthetic oligonucleotide
uggcuaccauuuucucucc

SEQ ID NO: 1017837 - RNA, 19 nt, Artificial Sequence
  Description of Artificial Sequence: Synthetic oligonucleotide
cugucaccauauugauagc

SEQ ID NO: 1017838 - RNA, 19 nt, Artificial Sequence
  Description of Artificial Sequence: Synthetic oligonucleotide
cauugucucuggaucgaga

SEQ ID NO: 1017839 - RNA, 19 nt, Artificial Sequence
  Description of Artificial Sequence: Synthetic oligonucleotide
caauggagguguuguagaa

SEQ ID NO: 1017840 - RNA, 19 nt, Artificial Sequence
  Description of Artificial Sequence: Synthetic oligonucleotide
guaucuccgguuaagcaua

SEQ ID NO: 1017841 - RNA, 19 nt, Artificial Sequence
  Description of Artificial Sequence: Synthetic oligonucleotide
agaauccgaauggggucuc

SEQ ID NO: 1017842 - RNA, 19 nt, Artificial Sequence
  Description of Artificial Sequence: Synthetic oligonucleotide
caggacugaacccuggcua

SEQ ID NO: 1017843 - RNA, 19 nt, Artificial Sequence
  Description of Artificial Sequence: Synthetic oligonucleotide
gcggaaacagugaaauccc

SEQ ID NO: 1017844 - RNA, 19 nt, Artificial Sequence
  Description of Artificial Sequence: Synthetic oligonucleotide
agggacucucccuguagau

SEQ ID NO: 1017845 - RNA, 19 nt, Artificial Sequence
  Description of Artificial Sequence: Synthetic oligonucleotide
uaucuccgguuaagcauau

SEQ ID NO: 1017846 - RNA, 19 nt, Artificial Sequence
  Description of Artificial Sequence: Synthetic oligonucleotide
cuggaucgagaauccugac

SEQ ID NO: 1017847 - RNA, 19 nt, Artificial Sequence
  Description of Artificial Sequence: Synthetic oligonucleotide
gauguagaauugacggaua

SEQ ID NO: 1017848 - RNA, 19 nt, Artificial Sequence
  Description of Artificial Sequence: Synthetic oligonucleotide
ccugaguggccuuaagauc

SEQ ID NO: 1017849 - RNA, 19 nt, Artificial Sequence
  Description of Artificial Sequence: Synthetic oligonucleotide
gguuaggggaauggauuag

SEQ ID NO: 1017850 - RNA, 19 nt, Artificial Sequence
  Description of Artificial Sequence: Synthetic oligonucleotide
uguccaucccuuggcuccc

SEQ ID NO: 1017851 - RNA, 19 nt, Artificial Sequence
  Description of Artificial Sequence: Synthetic oligonucleotide
gggccauugucucuggauc

SEQ ID NO: 1017852 - RNA, 19 nt, Artificial Sequence
  Description of Artificial Sequence: Synthetic oligonucleotide
cuugaacccacggcuuaac

SEQ ID NO: 1017853 - RNA, 19 nt, Artificial Sequence
  Description of Artificial Sequence: Synthetic oligonucleotide
ugaguggccuuaagaucua

SEQ ID NO: 1017854 - RNA, 19 nt, Artificial Sequence
  Description of Artificial Sequence: Synthetic oligonucleotide
gacagguaucuccgguuaa

SEQ ID NO: 1017855 - RNA, 19 nt, Artificial Sequence
  Description of Artificial Sequence: Synthetic oligonucleotide
ggcuccaucccgucggggc

SEQ ID NO: 1017856 - RNA, 19 nt, Artificial Sequence
  Description of Artificial Sequence: Synthetic oligonucleotide
acagccccucaaaugaggu

SEQ ID NO: 1017857 - RNA, 19 nt, Artificial Sequence
  Description of Artificial Sequence: Synthetic oligonucleotide
gucggggccauugucucug

SEQ ID NO: 1017858 - RNA, 19 nt, Artificial Sequence
  Description of Artificial Sequence: Synthetic oligonucleotide
uggcggaaacagugaaauc

SEQ ID NO: 1017859 - RNA, 19 nt, Artificial Sequence
  Description of Artificial Sequence: Synthetic oligonucleotide
augauauggggagcuucca

SEQ ID NO: 1017860 - RNA, 19 nt, Artificial Sequence
  Description of Artificial Sequence: Synthetic oligonucleotide
caaaacuaccuguguguua

SEQ ID NO: 1017861 - RNA, 19 nt, Artificial Sequence
  Description of Artificial Sequence: Synthetic oligonucleotide
aggucguaauugaugacua

SEQ ID NO: 1017862 - RNA, 19 nt, Artificial Sequence
  Description of Artificial Sequence: Synthetic oligonucleotide
gagacggcgccuggggcag

SEQ ID NO: 1017863 - RNA, 19 nt, Artificial Sequence
  Description of Artificial Sequence: Synthetic oligonucleotide
gagggcauuguagcagaca

SEQ ID NO: 1017864 - RNA, 19 nt, Artificial Sequence
  Description of Artificial Sequence: Synthetic oligonucleotide
ggagguguuguagaauguc

SEQ ID NO: 1017865 - RNA, 19 nt, Artificial Sequence
  Description of Artificial Sequence: Synthetic oligonucleotide
gcagacaacaaaacuaccu

SEQ ID NO: 1017866 - RNA, 19 nt, Artificial Sequence
  Description of Artificial Sequence: Synthetic oligonucleotide
ccuggcuagagccagguaa

SEQ ID NO: 1017867 - RNA, 19 nt, Artificial Sequence
  Description of Artificial Sequence: Synthetic oligonucleotide
auacucugcuagaaccaga

SEQ ID NO: 1017868 - RNA, 19 nt, Artificial Sequence
  Description of Artificial Sequence: Synthetic oligonucleotide
cauggcggaaacagugaaa

SEQ ID NO: 1017869 - RNA, 19 nt, Artificial Sequence
  Description of Artificial Sequence: Synthetic oligonucleotide
acggccaaagcgaccacca

SEQ ID NO: 1017870 - RNA, 19 nt, Artificial Sequence
  Description of Artificial Sequence: Synthetic oligonucleotide
uggcuagagccagguaaca

SEQ ID NO: 1017871 - RNA, 19 nt, Artificial Sequence
  Description of Artificial Sequence: Synthetic oligonucleotide
gaauccugacucgcagaca

SEQ ID NO: 1017872 - RNA, 19 nt, Artificial Sequence
  Description of Artificial Sequence: Synthetic oligonucleotide
acauugaggggcaucucuu

SEQ ID NO: 1017873 - RNA, 19 nt, Artificial Sequence
  Description of Artificial Sequence: Synthetic oligonucleotide
ccuuuacggccaaagcgac

SEQ ID NO: 1017874 - RNA, 19 nt, Artificial Sequence
  Description of Artificial Sequence: Synthetic oligonucleotide
caucccgucggggccauug

SEQ ID NO: 1017875 - RNA, 19 nt, Artificial Sequence
  Description of Artificial Sequence: Synthetic oligonucleotide
gguaacaggacagccccuc

SEQ ID NO: 1017876 - RNA, 19 nt, Artificial Sequence
  Description of Artificial Sequence: Synthetic oligonucleotide
uuacggccaaagcgaccac

SEQ ID NO: 1017877 - RNA, 19 nt, Artificial Sequence
  Description of Artificial Sequence: Synthetic oligonucleotide
uccaugcauggcggaaaca

SEQ ID NO: 1017878 - RNA, 19 nt, Artificial Sequence
  Description of Artificial Sequence: Synthetic oligonucleotide
uuacugcuugggugauagu

SEQ ID NO: 1017879 - RNA, 19 nt, Artificial Sequence
  Description of Artificial Sequence: Synthetic oligonucleotide
ucccuguuggugggaaggu

SEQ ID NO: 1017880 - RNA, 19 nt, Artificial Sequence
  Description of Artificial Sequence: Synthetic oligonucleotide
cacccauguagucuccuaa

SEQ ID NO: 1017881 - RNA, 19 nt, Artificial Sequence
  Description of Artificial Sequence: Synthetic oligonucleotide
cgagaauccugacucgcag

SEQ ID NO: 1017882 - RNA, 19 nt, Artificial Sequence
  Description of Artificial Sequence: Synthetic oligonucleotide
gacggauacccuccagggu

SEQ ID NO: 1017883 - RNA, 19 nt, Artificial Sequence
  Description of Artificial Sequence: Synthetic oligonucleotide
ccccuugauucacuuuugg

SEQ ID NO: 1017884 - RNA, 19 nt, Artificial Sequence
  Description of Artificial Sequence: Synthetic oligonucleotide
ccauauugauagccacacc

SEQ ID NO: 1017885 - RNA, 19 nt, Artificial Sequence
  Description of Artificial Sequence: Synthetic oligonucleotide
ucccgucggggccauuguc

SEQ ID NO: 1017886 - RNA, 19 nt, Artificial Sequence
  Description of Artificial Sequence: Synthetic oligonucleotide
cggaaacagugaaaucccg

SEQ ID NO: 1017887 - RNA, 19 nt, Artificial Sequence
  Description of Artificial Sequence: Synthetic oligonucleotide
cagugaaaucccgggcaug

SEQ ID NO: 1017888 - RNA, 19 nt, Artificial Sequence
  Description of Artificial Sequence: Synthetic oligonucleotide
ggagacggcgccuggggca

SEQ ID NO: 1017889 - RNA, 19 nt, Artificial Sequence
  Description of Artificial Sequence: Synthetic oligonucleotide
cagccccucaaaugagguc

SEQ ID NO: 1017890 - RNA, 19 nt, Artificial Sequence
  Description of Artificial Sequence: Synthetic oligonucleotide
agauuacugcuugggugau

SEQ ID NO: 1017891 - RNA, 19 nt, Artificial Sequence
  Description of Artificial Sequence: Synthetic oligonucleotide
cacgcacauuagugccucc

SEQ ID NO: 1017892 - RNA, 19 nt, Artificial Sequence
  Description of Artificial Sequence: Synthetic oligonucleotide
caugcauggcggaaacagu

SEQ ID NO: 1017893 - RNA, 19 nt, Artificial Sequence
  Description of Artificial Sequence: Synthetic oligonucleotide
gccugaguggccuuaagau

SEQ ID NO: 1017894 - RNA, 19 nt, Artificial Sequence
  Description of Artificial Sequence: Synthetic oligonucleotide
gcaacauugaggggcaucu

SEQ ID NO: 1017895 - RNA, 19 nt, Artificial Sequence
  Description of Artificial Sequence: Synthetic oligonucleotide
gauacccuccagggucaac

SEQ ID NO: 1017896 - RNA, 19 nt, Artificial Sequence
  Description of Artificial Sequence: Synthetic oligonucleotide
cacgaugauauggggagcu

SEQ ID NO: 1017897 - RNA, 19 nt, Artificial Sequence
  Description of Artificial Sequence: Synthetic oligonucleotide
acaauucccuggacaacuu

SEQ ID NO: 1017898 - RNA, 19 nt, Artificial Sequence
  Description of Artificial Sequence: Synthetic oligonucleotide
acacccggccaggggugcc

SEQ ID NO: 1017899 - RNA, 19 nt, Artificial Sequence
  Description of Artificial Sequence: Synthetic oligonucleotide
caacauugaggggcaucuc

SEQ ID NO: 1017900 - RNA, 19 nt, Artificial Sequence
  Description of Artificial Sequence: Synthetic oligonucleotide
gcauggcggaaacagugaa

SEQ ID NO: 1017901 - RNA, 19 nt, Artificial Sequence
  Description of Artificial Sequence: Synthetic oligonucleotide
cugcuagaaccagaccgga

SEQ ID NO: 1017902 - RNA, 19 nt, Artificial Sequence
  Description of Artificial Sequence: Synthetic oligonucleotide
aaucccgggcaugcaucuu

SEQ ID NO: 1017903 - RNA, 19 nt, Artificial Sequence
  Description of Artificial Sequence: Synthetic oligonucleotide
gauuacugcuugggugaua

SEQ ID NO: 1017904 - RNA, 19 nt, Artificial Sequence
  Description of Artificial Sequence: Synthetic oligonucleotide
accacggaggagggauucu

SEQ ID NO: 1017905 - RNA, 19 nt, Artificial Sequence
  Description of Artificial Sequence: Synthetic oligonucleotide
ccacgaccaauucugugga

SEQ ID NO: 1017906 - RNA, 19 nt, Artificial Sequence
  Description of Artificial Sequence: Synthetic oligonucleotide
cagaauugauauggcaaau

SEQ ID NO: 1017907 - RNA, 19 nt, Artificial Sequence
  Description of Artificial Sequence: Synthetic oligonucleotide
auccugacucgcagacaug

SEQ ID NO: 1017908 - RNA, 19 nt, Artificial Sequence
  Description of Artificial Sequence: Synthetic oligonucleotide
cuugggugauagucagggu

SEQ ID NO: 1017909 - RNA, 19 nt, Artificial Sequence
  Description of Artificial Sequence: Synthetic oligonucleotide
ccauugucucuggaucgag

SEQ ID NO: 1017910 - RNA, 19 nt, Artificial Sequence
  Description of Artificial Sequence: Synthetic oligonucleotide
gcccacgaugauaugggga

SEQ ID NO: 1017911 - RNA, 19 nt, Artificial Sequence
  Description of Artificial Sequence: Synthetic oligonucleotide
gggcauuguagcagacaac

SEQ ID NO: 1017912 - RNA, 19 nt, Artificial Sequence
  Description of Artificial Sequence: Synthetic oligonucleotide
caaagccugaguggccuua

SEQ ID NO: 1017913 - RNA, 19 nt, Artificial Sequence
  Description of Artificial Sequence: Synthetic oligonucleotide
gggguaguaggaaagucuu

SEQ ID NO: 1017914 - RNA, 19 nt, Artificial Sequence
  Description of Artificial Sequence: Synthetic oligonucleotide
ccacgaugauauggggagc

SEQ ID NO: 1017915 - RNA, 19 nt, Artificial Sequence
  Description of Artificial Sequence: Synthetic oligonucleotide
gaauggcucgcugcuggau

SEQ ID NO: 1017916 - RNA, 19 nt, Artificial Sequence
  Description of Artificial Sequence: Synthetic oligonucleotide
auaccacggaggagggauu

SEQ ID NO: 1017917 - RNA, 19 nt, Artificial Sequence
  Description of Artificial Sequence: Synthetic oligonucleotide
ggggacagguaucuccggu

SEQ ID NO: 1017918 - RNA, 19 nt, Artificial Sequence
  Description of Artificial Sequence: Synthetic oligonucleotide
ccaauccaccuuccuucug

SEQ ID NO: 1017919 - RNA, 19 nt, Artificial Sequence
  Description of Artificial Sequence: Synthetic oligonucleotide
ccacggaggagggauucug

SEQ ID NO: 1017920 - RNA, 19 nt, Artificial Sequence
  Description of Artificial Sequence: Synthetic oligonucleotide
gcacauuagugccuccaau

SEQ ID NO: 1017921 - RNA, 19 nt, Artificial Sequence
  Description of Artificial Sequence: Synthetic oligonucleotide
gccccuugauucacuuuug

SEQ ID NO: 1017922 - RNA, 19 nt, Artificial Sequence
  Description of Artificial Sequence: Synthetic oligonucleotide
cacccggccaggggugccc

SEQ ID NO: 1017923 - RNA, 19 nt, Artificial Sequence
  Description of Artificial Sequence: Synthetic oligonucleotide
gaauccgaauggggucucu

SEQ ID NO: 1017924 - RNA, 19 nt, Artificial Sequence
  Description of Artificial Sequence: Synthetic oligonucleotide
ccgucggggccauugucuc

SEQ ID NO: 1017925 - RNA, 19 nt, Artificial Sequence
  Description of Artificial Sequence: Synthetic oligonucleotide
ccuugauacaaggaagaau

SEQ ID NO: 1017926 - RNA, 19 nt, Artificial Sequence
  Description of Artificial Sequence: Synthetic oligonucleotide
cccaaagaaaaggguaucu

SEQ ID NO: 1017927 - RNA, 19 nt, Artificial Sequence
  Description of Artificial Sequence: Synthetic oligonucleotide
cuccaucccgucggggcca

SEQ ID NO: 1017928 - RNA, 19 nt, Artificial Sequence
  Description of Artificial Sequence: Synthetic oligonucleotide
gggacagguaucuccgguu

SEQ ID NO: 1017929 - RNA, 19 nt, Artificial Sequence
  Description of Artificial Sequence: Synthetic oligonucleotide
ggggaauggauuaguguuu

SEQ ID NO: 1017930 - RNA, 19 nt, Artificial Sequence
  Description of Artificial Sequence: Synthetic oligonucleotide
gcacccauguagucuccua

SEQ ID NO: 1017931 - RNA, 19 nt, Artificial Sequence
  Description of Artificial Sequence: Synthetic oligonucleotide
gacggcgccuggggcagaa

SEQ ID NO: 1017932 - RNA, 19 nt, Artificial Sequence
  Description of Artificial Sequence: Synthetic oligonucleotide
gcgaccaccacgaccaauu

SEQ ID NO: 1017933 - RNA, 19 nt, Artificial Sequence
  Description of Artificial Sequence: Synthetic oligonucleotide
cccuugauacaaggaagaa

SEQ ID NO: 1017934 - RNA, 19 nt, Artificial Sequence
  Description of Artificial Sequence: Synthetic oligonucleotide
cggauacccuccaggguca

SEQ ID NO: 1017935 - RNA, 19 nt, Artificial Sequence
  Description of Artificial Sequence: Synthetic oligonucleotide
cacgaccaauucuguggau

SEQ ID NO: 1017936 - RNA, 19 nt, Artificial Sequence
  Description of Artificial Sequence: Synthetic oligonucleotide
cccgucggggccauugucu

SEQ ID NO: 1017937 - RNA, 19 nt, Artificial Sequence
  Description of Artificial Sequence: Synthetic oligonucleotide
caaggacaucugagggcau

SEQ ID NO: 1017938 - RNA, 19 nt, Artificial Sequence
  Description of Artificial Sequence: Synthetic oligonucleotide
ccaugaccaccuuuugaau

SEQ ID NO: 1017939 - RNA, 19 nt, Artificial Sequence
  Description of Artificial Sequence: Synthetic oligonucleotide
cgaccaccacgaccaauuc

SEQ ID NO: 1017940 - RNA, 19 nt, Artificial Sequence
  Description of Artificial Sequence: Synthetic oligonucleotide
cuaaugccaugaccaccuu

SEQ ID NO: 1017941 - RNA, 19 nt, Artificial Sequence
  Description of Artificial Sequence: Synthetic oligonucleotide
ccccucaaaugaggucagc

SEQ ID NO: 1017942 - RNA, 19 nt, Artificial Sequence
  Description of Artificial Sequence: Synthetic oligonucleotide
ccuugaacccacggcuuaa

SEQ ID NO: 1017943 - RNA, 19 nt, Artificial Sequence
  Description of Artificial Sequence: Synthetic oligonucleotide
cgcacauuagugccuccaa

SEQ ID NO: 1017944 - RNA, 19 nt, Artificial Sequence
  Description of Artificial Sequence: Synthetic oligonucleotide
gggacucucccuguagauu

SEQ ID NO: 1017945 - RNA, 19 nt, Artificial Sequence
  Description of Artificial Sequence: Synthetic oligonucleotide
ccucagcacgcacauuagu

SEQ ID NO: 1017946 - RNA, 19 nt, Artificial Sequence
  Description of Artificial Sequence: Synthetic oligonucleotide
ggcgccuggggcagaaccu

SEQ ID NO: 1017947 - RNA, 19 nt, Artificial Sequence
  Description of Artificial Sequence: Synthetic oligonucleotide
ccacggcuuaacauuucau

SEQ ID NO: 1017948 - RNA, 19 nt, Artificial Sequence
  Description of Artificial Sequence: Synthetic oligonucleotide
ggauacccuccagggucaa

SEQ ID NO: 1017949 - RNA, 19 nt, Artificial Sequence
  Description of Artificial Sequence: Synthetic oligonucleotide
gcgccuggggcagaaccua

SEQ ID NO: 1017950 - RNA, 19 nt, Artificial Sequence
  Description of Artificial Sequence: Synthetic oligonucleotide
ggagggauucugagagauu

SEQ ID NO: 1017951 - RNA, 19 nt, Artificial Sequence
  Description of Artificial Sequence: Synthetic oligonucleotide
ggccaacaggucaguggua

SEQ ID NO: 1017952 - RNA, 19 nt, Artificial Sequence
  Description of Artificial Sequence: Synthetic oligonucleotide
ccaacaggucagugguaau

SEQ ID NO: 1017953 - RNA, 19 nt, Artificial Sequence
  Description of Artificial Sequence: Synthetic oligonucleotide
caggggugcccacgaugau

SEQ ID NO: 1017954 - RNA, 19 nt, Artificial Sequence
  Description of Artificial Sequence: Synthetic oligonucleotide
cgucggggccauugucucu

SEQ ID NO: 1017955 - RNA, 19 nt, Artificial Sequence
  Description of Artificial Sequence: Synthetic oligonucleotide
aauagagcagcucauuucc

SEQ ID NO: 1017956 - RNA, 19 nt, Artificial Sequence
  Description of Artificial Sequence: Synthetic oligonucleotide
ugaucugucacaaagagcc

SEQ ID NO: 1017957 - RNA, 19 nt, Artificial Sequence
  Description of Artificial Sequence: Synthetic oligonucleotide
aaaguugugaagcaugcac

SEQ ID NO: 1017958 - RNA, 19 nt, Artificial Sequence
  Description of Artificial Sequence: Synthetic oligonucleotide
aaaucauggccucauagac

SEQ ID NO: 1017959 - RNA, 19 nt, Artificial Sequence
  Description of Artificial Sequence: Synthetic oligonucleotide
cauaauguuacccucaggc

SEQ ID NO: 1017960 - RNA, 19 nt, Artificial Sequence
  Description of Artificial Sequence: Synthetic oligonucleotide
auuuaauagauucagcagu

SEQ ID NO: 1017961 - RNA, 19 nt, Artificial Sequence
  Description of Artificial Sequence: Synthetic oligonucleotide
uguucaguucauaaaacug

SEQ ID NO: 1017962 - RNA, 19 nt, Artificial Sequence
  Description of Artificial Sequence: Synthetic oligonucleotide
uucaguucauaaaacuggg

SEQ ID NO: 1017963 - RNA, 19 nt, Artificial Sequence
  Description of Artificial Sequence: Synthetic oligonucleotide
gaagacauucaccuguggg

SEQ ID NO: 1017964 - RNA, 19 nt, Artificial Sequence
  Description of Artificial Sequence: Synthetic oligonucleotide
auugcuaacagaaaauuag

SEQ ID NO: 1017965 - RNA, 19 nt, Artificial Sequence
  Description of Artificial Sequence: Synthetic oligonucleotide
aagacauucaccuguggga

SEQ ID NO: 1017966 - RNA, 19 nt, Artificial Sequence
  Description of Artificial Sequence: Synthetic oligonucleotide
aaguugugaagcaugcacc

SEQ ID NO: 1017967 - RNA, 19 nt, Artificial Sequence
  Description of Artificial Sequence: Synthetic oligonucleotide
aauguuacccucaggcccc

SEQ ID NO: 1017968 - RNA, 19 nt, Artificial Sequence
  Description of Artificial Sequence: Synthetic oligonucleotide
aauacaucugaucgguugu

SEQ ID NO: 1017969 - RNA, 19 nt, Artificial Sequence
  Description of Artificial Sequence: Synthetic oligonucleotide
uguacguuuccccagggca

SEQ ID NO: 1017970 - RNA, 19 nt, Artificial Sequence
  Description of Artificial Sequence: Synthetic oligonucleotide
acuuuuaaccccgagaucu

SEQ ID NO: 1017971 - RNA, 19 nt, Artificial Sequence
  Description of Artificial Sequence: Synthetic oligonucleotide
aguaggagcaauugaagug

SEQ ID NO: 1017972 - RNA, 19 nt, Artificial Sequence
  Description of Artificial Sequence: Synthetic oligonucleotide
aauugaaguguccccagcu

SEQ ID NO: 1017973 - RNA, 19 nt, Artificial Sequence
  Description of Artificial Sequence: Synthetic oligonucleotide
gauccgaggagauaggcug

SEQ ID NO: 1017974 - RNA, 19 nt, Artificial Sequence
  Description of Artificial Sequence: Synthetic oligonucleotide
auagaacaaacugaccagc

SEQ ID NO: 1017975 - RNA, 19 nt, Artificial Sequence
  Description of Artificial Sequence: Synthetic oligonucleotide
auuaguacuuuuaaccccg

SEQ ID NO: 1017976 - RNA, 19 nt, Artificial Sequence
  Description of Artificial Sequence: Synthetic oligonucleotide
gaugggacaucccguaucg

SEQ ID NO: 1017977 - RNA, 19 nt, Artificial Sequence
  Description of Artificial Sequence: Synthetic oligonucleotide
gcuguuugcauguaaacgg

SEQ ID NO: 1017978 - RNA, 19 nt, Artificial Sequence
  Description of Artificial Sequence: Synthetic oligonucleotide
cauagaacaaacugaccag

SEQ ID NO: 1017979 - RNA, 19 nt, Artificial Sequence
  Description of Artificial Sequence: Synthetic oligonucleotide
uuuaauagauucagcaguu

SEQ ID NO: 1017980 - RNA, 19 nt, Artificial Sequence
  Description of Artificial Sequence: Synthetic oligonucleotide
agcaguuuauugcuaacag

SEQ ID NO: 1017981 - RNA, 19 nt, Artificial Sequence
  Description of Artificial Sequence: Synthetic oligonucleotide
aguaaucagccaccagucc

SEQ ID NO: 1017982 - RNA, 19 nt, Artificial Sequence
  Description of Artificial Sequence: Synthetic oligonucleotide
uuugcauguaaacgggaug

SEQ ID NO: 1017983 - RNA, 19 nt, Artificial Sequence
  Description of Artificial Sequence: Synthetic oligonucleotide
acaucugaucgguuguacc

SEQ ID NO: 1017984 - RNA, 19 nt, Artificial Sequence
  Description of Artificial Sequence: Synthetic oligonucleotide
uuuacgggugauaaugccu

SEQ ID NO: 1017985 - RNA, 19 nt, Artificial Sequence
  Description of Artificial Sequence: Synthetic oligonucleotide
gaguuuacgggugauaaug

SEQ ID NO: 1017986 - RNA, 19 nt, Artificial Sequence
  Description of Artificial Sequence: Synthetic oligonucleotide
agcuguuaacagcagucgc

SEQ ID NO: 1017987 - RNA, 19 nt, Artificial Sequence
  Description of Artificial Sequence: Synthetic oligonucleotide
uccaccgaaaucauggccu

SEQ ID NO: 1017988 - RNA, 19 nt, Artificial Sequence
  Description of Artificial Sequence: Synthetic oligonucleotide
agcagguaggaguuuacgg

SEQ ID NO: 1017989 - RNA, 19 nt, Artificial Sequence
  Description of Artificial Sequence: Synthetic oligonucleotide
agcucucuuaggaagaggc

SEQ ID NO: 1017990 - RNA, 19 nt, Artificial Sequence
  Description of Artificial Sequence: Synthetic oligonucleotide
ugggaucaugccaaaggcg

SEQ ID NO: 1017991 - RNA, 19 nt, Artificial Sequence
  Description of Artificial Sequence: Synthetic oligonucleotide
ugauaaugccuccagcccu

SEQ ID NO: 1017992 - RNA, 19 nt, Artificial Sequence
  Description of Artificial Sequence: Synthetic oligonucleotide
uaauagauucagcaguuua

SEQ ID NO: 1017993 - RNA, 19 nt, Artificial Sequence
  Description of Artificial Sequence: Synthetic oligonucleotide
aaucauggccucauagacg

SEQ ID NO: 1017994 - RNA, 19 nt, Artificial Sequence
  Description of Artificial Sequence: Synthetic oligonucleotide
aaacugaccagcuccugca

SEQ ID NO: 1017995 - RNA, 19 nt, Artificial Sequence
  Description of Artificial Sequence: Synthetic oligonucleotide
aaccccgagaucuggagug

SEQ ID NO: 1017996 - RNA, 19 nt, Artificial Sequence
  Description of Artificial Sequence: Synthetic oligonucleotide
agcaagaagcggcugucgc

SEQ ID NO: 1017997 - RNA, 19 nt, Artificial Sequence
  Description of Artificial Sequence: Synthetic oligonucleotide
uuuggagcagcuguuaaca

SEQ ID NO: 1017998 - RNA, 19 nt, Artificial Sequence
  Description of Artificial Sequence: Synthetic oligonucleotide
aaacgggaugacucucagc

SEQ ID NO: 1017999 - RNA, 19 nt, Artificial Sequence
  Description of Artificial Sequence: Synthetic oligonucleotide
ugaagagaccccagcgugg

SEQ ID NO: 1018000 - RNA, 19 nt, Artificial Sequence
  Description of Artificial Sequence: Synthetic oligonucleotide
ugguagucagguuuggagc

SEQ ID NO: 1018001 - RNA, 19 nt, Artificial Sequence
  Description of Artificial Sequence: Synthetic oligonucleotide
uauugcuaacagaaaauua

SEQ ID NO: 1018002 - RNA, 19 nt, Artificial Sequence
  Description of Artificial Sequence: Synthetic oligonucleotide
gaaaucauggccucauaga

SEQ ID NO: 1018003 - RNA, 19 nt, Artificial Sequence
  Description of Artificial Sequence: Synthetic oligonucleotide
uucaccugugggaacaccc

SEQ ID NO: 1018004 - RNA, 19 nt, Artificial Sequence
  Description of Artificial Sequence: Synthetic oligonucleotide
uugcuaacagaaaauuagu

SEQ ID NO: 1018005 - RNA, 19 nt, Artificial Sequence
  Description of Artificial Sequence: Synthetic oligonucleotide
uccauaauguuacccucag

SEQ ID NO: 1018006 - RNA, 19 nt, Artificial Sequence
  Description of Artificial Sequence: Synthetic oligonucleotide
uaguccauaauguuacccu

SEQ ID NO: 1018007 - RNA, 19 nt, Artificial Sequence
  Description of Artificial Sequence: Synthetic oligonucleotide
ggugauaaugccuccagcc

SEQ ID NO: 1018008 - RNA, 19 nt, Artificial Sequence
  Description of Artificial Sequence: Synthetic oligonucleotide
aaaagccagccuuggagca

SEQ ID NO: 1018009 - RNA, 19 nt, Artificial Sequence
  Description of Artificial Sequence: Synthetic oligonucleotide
agggccuccaugaagagac

SEQ ID NO: 1018010 - RNA, 19 nt, Artificial Sequence
  Description of Artificial Sequence: Synthetic oligonucleotide
uugugaagcaugcaccaga

SEQ ID NO: 1018011 - RNA, 19 nt, Artificial Sequence
  Description of Artificial Sequence: Synthetic oligonucleotide
uaaucagccaccaguccug

SEQ ID NO: 1018012 - RNA, 19 nt, Artificial Sequence
  Description of Artificial Sequence: Synthetic oligonucleotide
gagggauccgaggagauag

SEQ ID NO: 1018013 - RNA, 19 nt, Artificial Sequence
  Description of Artificial Sequence: Synthetic oligonucleotide
uuaacagcagucgccaagc

SEQ ID NO: 1018014 - RNA, 19 nt, Artificial Sequence
  Description of Artificial Sequence: Synthetic oligonucleotide
guuaacagcagucgccaag

SEQ ID NO: 1018015 - RNA, 19 nt, Artificial Sequence
  Description of Artificial Sequence: Synthetic oligonucleotide
uaguaaucagccaccaguc

SEQ ID NO: 1018016 - RNA, 19 nt, Artificial Sequence
  Description of Artificial Sequence: Synthetic oligonucleotide
uuguaccagacuaugguau

SEQ ID NO: 1018017 - RNA, 19 nt, Artificial Sequence
  Description of Artificial Sequence: Synthetic oligonucleotide
uuacgggugauaaugccuc

SEQ ID NO: 1018018 - RNA, 19 nt, Artificial Sequence
  Description of Artificial Sequence: Synthetic oligonucleotide
cagacuaugguauuuaucu

SEQ ID NO: 1018019 - RNA, 19 nt, Artificial Sequence
  Description of Artificial Sequence: Synthetic oligonucleotide
uuuggggacaugcccugcg

SEQ ID NO: 1018020 - RNA, 19 nt, Artificial Sequence
  Description of Artificial Sequence: Synthetic oligonucleotide
augacucucagcaaacagg

SEQ ID NO: 1018021 - RNA, 19 nt, Artificial Sequence
  Description of Artificial Sequence: Synthetic oligonucleotide
ugcuaacagaaaauuagua

SEQ ID NO: 1018022 - RNA, 19 nt, Artificial Sequence
  Description of Artificial Sequence: Synthetic oligonucleotide
agccaugagagcauagacc

SEQ ID NO: 1018023 - RNA, 19 nt, Artificial Sequence
  Description of Artificial Sequence: Synthetic oligonucleotide
uccaaacagaccgugguug

SEQ ID NO: 1018024 - RNA, 19 nt, Artificial Sequence
  Description of Artificial Sequence: Synthetic oligonucleotide
gccugauucaaccaggugc

SEQ ID NO: 1018025 - RNA, 19 nt, Artificial Sequence
  Description of Artificial Sequence: Synthetic oligonucleotide
gucgccaagccucaaauac

SEQ ID NO: 1018026 - RNA, 19 nt, Artificial Sequence
  Description of Artificial Sequence: Synthetic oligonucleotide
cauugcucgggccugauuc

SEQ ID NO: 1018027 - RNA, 19 nt, Artificial Sequence
  Description of Artificial Sequence: Synthetic oligonucleotide
uaaacgggaugacucucag

SEQ ID NO: 1018028 - RNA, 19 nt, Artificial Sequence
  Description of Artificial Sequence: Synthetic oligonucleotide
ucgguugugcccauuguac

SEQ ID NO: 1018029 - RNA, 19 nt, Artificial Sequence
  Description of Artificial Sequence: Synthetic oligonucleotide
ugagcaggagaucaagcuc

SEQ ID NO: 1018030 - RNA, 19 nt, Artificial Sequence
  Description of Artificial Sequence: Synthetic oligonucleotide
uuuuaaccccgagaucugg

SEQ ID NO: 1018031 - RNA, 19 nt, Artificial Sequence
  Description of Artificial Sequence: Synthetic oligonucleotide
caggagacgaccacggggc

SEQ ID NO: 1018032 - RNA, 19 nt, Artificial Sequence
  Description of Artificial Sequence: Synthetic oligonucleotide
augaaggcgauccuugccu

SEQ ID NO: 1018033 - RNA, 19 nt, Artificial Sequence
  Description of Artificial Sequence: Synthetic oligonucleotide
uuauugcuaacagaaaauu

SEQ ID NO: 1018034 - RNA, 19 nt, Artificial Sequence
  Description of Artificial Sequence: Synthetic oligonucleotide
guaguaaucagccaccagu

SEQ ID NO: 1018035 - RNA, 19 nt, Artificial Sequence
  Description of Artificial Sequence: Synthetic oligonucleotide
gugauaaugccuccagccc

SEQ ID NO: 1018036 - RNA, 19 nt, Artificial Sequence
  Description of Artificial Sequence: Synthetic oligonucleotide
ugguauuuaucuguaggga

SEQ ID NO: 1018037 - RNA, 19 nt, Artificial Sequence
  Description of Artificial Sequence: Synthetic oligonucleotide
gauaggcugcaucucguug

SEQ ID NO: 1018038 - RNA, 19 nt, Artificial Sequence
  Description of Artificial Sequence: Synthetic oligonucleotide
uucauucuggccgauuccc

SEQ ID NO: 1018039 - RNA, 19 nt, Artificial Sequence
  Description of Artificial Sequence: Synthetic oligonucleotide
aggcuguuugcauguaaac

SEQ ID NO: 1018040 - RNA, 19 nt, Artificial Sequence
  Description of Artificial Sequence: Synthetic oligonucleotide
uauagcgucaggguccacc

SEQ ID NO: 1018041 - RNA, 19 nt, Artificial Sequence
  Description of Artificial Sequence: Synthetic oligonucleotide
ucacucacagccauugcuc

SEQ ID NO: 1018042 - RNA, 19 nt, Artificial Sequence
  Description of Artificial Sequence: Synthetic oligonucleotide
uuuaaccccgagaucugga

SEQ ID NO: 1018043 - RNA, 19 nt, Artificial Sequence
  Description of Artificial Sequence: Synthetic oligonucleotide
cauuguacguuuccccagg

SEQ ID NO: 1018044 - RNA, 19 nt, Artificial Sequence
  Description of Artificial Sequence: Synthetic oligonucleotide
agagcagcucauuucccuc

SEQ ID NO: 1018045 - RNA, 19 nt, Artificial Sequence
  Description of Artificial Sequence: Synthetic oligonucleotide
guuuacgggugauaaugcc

SEQ ID NO: 1018046 - RNA, 19 nt, Artificial Sequence
  Description of Artificial Sequence: Synthetic oligonucleotide
aaaucuggcacaggguccu

SEQ ID NO: 1018047 - RNA, 19 nt, Artificial Sequence
  Description of Artificial Sequence: Synthetic oligonucleotide
gacuaugguauuuaucugu

SEQ ID NO: 1018048 - RNA, 19 nt, Artificial Sequence
  Description of Artificial Sequence: Synthetic oligonucleotide
cugaucugucacaaagagc

SEQ ID NO: 1018049 - RNA, 19 nt, Artificial Sequence
  Description of Artificial Sequence: Synthetic oligonucleotide
gaucgguuguaccagacua

SEQ ID NO: 1018050 - RNA, 19 nt, Artificial Sequence
  Description of Artificial Sequence: Synthetic oligonucleotide
guagaggcuguucaguuca

SEQ ID NO: 1018051 - RNA, 19 nt, Artificial Sequence
  Description of Artificial Sequence: Synthetic oligonucleotide
agacuaugguauuuaucug

SEQ ID NO: 1018052 - RNA, 19 nt, Artificial Sequence
  Description of Artificial Sequence: Synthetic oligonucleotide
caagccucaaauacaucug

SEQ ID NO: 1018053 - RNA, 19 nt, Artificial Sequence
  Description of Artificial Sequence: Synthetic oligonucleotide
uccugcagcgauuggcggg

SEQ ID NO: 1018054 - RNA, 19 nt, Artificial Sequence
  Description of Artificial Sequence: Synthetic oligonucleotide
auuguacguuuccccaggg

SEQ ID NO: 1018055 - RNA, 19 nt, Artificial Sequence
  Description of Artificial Sequence: Synthetic oligonucleotide
gagaucaagcuccucuuuc

SEQ ID NO: 1018056 - RNA, 19 nt, Artificial Sequence
  Description of Artificial Sequence: Synthetic oligonucleotide
cacucacagccauugcucg

SEQ ID NO: 1018057 - RNA, 19 nt, Artificial Sequence
  Description of Artificial Sequence: Synthetic oligonucleotide
ccucauagaacaaacugac

SEQ ID NO: 1018058 - RNA, 19 nt, Artificial Sequence
  Description of Artificial Sequence: Synthetic oligonucleotide
guacuuuuaaccccgagau

SEQ ID NO: 1018059 - RNA, 19 nt, Artificial Sequence
  Description of Artificial Sequence: Synthetic oligonucleotide
auguaaacgggaugacucu

SEQ ID NO: 1018060 - RNA, 19 nt, Artificial Sequence
  Description of Artificial Sequence: Synthetic oligonucleotide
ucaugaaggcgauccuugc

SEQ ID NO: 1018061 - RNA, 19 nt, Artificial Sequence
  Description of Artificial Sequence: Synthetic oligonucleotide
uaguacuuuuaaccccgag

SEQ ID NO: 1018062 - RNA, 19 nt, Artificial Sequence
  Description of Artificial Sequence: Synthetic oligonucleotide
guagacacuccugagcagc

SEQ ID NO: 1018063 - RNA, 19 nt, Artificial Sequence
  Description of Artificial Sequence: Synthetic oligonucleotide
uaucuguagggauggccgc

SEQ ID NO: 1018064 - RNA, 19 nt, Artificial Sequence
  Description of Artificial Sequence: Synthetic oligonucleotide
uguagacacuccugagcag

SEQ ID NO: 1018065 - RNA, 19 nt, Artificial Sequence
  Description of Artificial Sequence: Synthetic oligonucleotide
ugacuaggauaccucuucu

SEQ ID NO: 1018066 - RNA, 19 nt, Artificial Sequence
  Description of Artificial Sequence: Synthetic oligonucleotide
cagccauauagcgucaggg

SEQ ID NO: 1018067 - RNA, 19 nt, Artificial Sequence
  Description of Artificial Sequence: Synthetic oligonucleotide
uucagguuugaagaccugu

SEQ ID NO: 1018068 - RNA, 19 nt, Artificial Sequence
  Description of Artificial Sequence: Synthetic oligonucleotide
ggggccuugguucacagcc

SEQ ID NO: 1018069 - RNA, 19 nt, Artificial Sequence
  Description of Artificial Sequence: Synthetic oligonucleotide
ucgccaagccucaaauaca

SEQ ID NO: 1018070 - RNA, 19 nt, Artificial Sequence
  Description of Artificial Sequence: Synthetic oligonucleotide
ccauauagcgucagggucc

SEQ ID NO: 1018071 - RNA, 19 nt, Artificial Sequence
  Description of Artificial Sequence: Synthetic oligonucleotide
ggcuguuugcauguaaacg

SEQ ID NO: 1018072 - RNA, 19 nt, Artificial Sequence
  Description of Artificial Sequence: Synthetic oligonucleotide
caucugaucgguuguacca

SEQ ID NO: 1018073 - RNA, 19 nt, Artificial Sequence
  Description of Artificial Sequence: Synthetic oligonucleotide
uccagaaccaggagacgac

SEQ ID NO: 1018074 - RNA, 19 nt, Artificial Sequence
  Description of Artificial Sequence: Synthetic oligonucleotide
agccauauagcgucagggu

SEQ ID NO: 1018075 - RNA, 19 nt, Artificial Sequence
  Description of Artificial Sequence: Synthetic oligonucleotide
ggagcaauugaaguguccc

SEQ ID NO: 1018076 - RNA, 19 nt, Artificial Sequence
  Description of Artificial Sequence: Synthetic oligonucleotide
agagcauagaccauuucau

SEQ ID NO: 1018077 - RNA, 19 nt, Artificial Sequence
  Description of Artificial Sequence: Synthetic oligonucleotide
uggcgggugacauccagca

SEQ ID NO: 1018078 - RNA, 19 nt, Artificial Sequence
  Description of Artificial Sequence: Synthetic oligonucleotide
uucgguugugcccauugua

SEQ ID NO: 1018079 - RNA, 19 nt, Artificial Sequence
  Description of Artificial Sequence: Synthetic oligonucleotide
accauuucauucuggccga

SEQ ID NO: 1018080 - RNA, 19 nt, Artificial Sequence
  Description of Artificial Sequence: Synthetic oligonucleotide
acucacagccauugcucgg

SEQ ID NO: 1018081 - RNA, 19 nt, Artificial Sequence
  Description of Artificial Sequence: Synthetic oligonucleotide
cauaguccauaauguuacc

SEQ ID NO: 1018082 - RNA, 19 nt, Artificial Sequence
  Description of Artificial Sequence: Synthetic oligonucleotide
uacuuuuaaccccgagauc

SEQ ID NO: 1018083 - RNA, 19 nt, Artificial Sequence
  Description of Artificial Sequence: Synthetic oligonucleotide
uggccgcuugaccagcggg

SEQ ID NO: 1018084 - RNA, 19 nt, Artificial Sequence
  Description of Artificial Sequence: Synthetic oligonucleotide
uuaggaagaggcucccgau

SEQ ID NO: 1018085 - RNA, 19 nt, Artificial Sequence
  Description of Artificial Sequence: Synthetic oligonucleotide
gaucaugccaaaggcgcgc

SEQ ID NO: 1018086 - RNA, 19 nt, Artificial Sequence
  Description of Artificial Sequence: Synthetic oligonucleotide
cuuuuaaccccgagaucug

SEQ ID NO: 1018087 - RNA, 19 nt, Artificial Sequence
  Description of Artificial Sequence: Synthetic oligonucleotide
auuggcgggugacauccag

SEQ ID NO: 1018088 - RNA, 19 nt, Artificial Sequence
  Description of Artificial Sequence: Synthetic oligonucleotide
caauugaaguguccccagc

SEQ ID NO: 1018089 - RNA, 19 nt, Artificial Sequence
  Description of Artificial Sequence: Synthetic oligonucleotide
ucgguuguaccagacuaug

SEQ ID NO: 1018090 - RNA, 19 nt, Artificial Sequence
  Description of Artificial Sequence: Synthetic oligonucleotide
gggaucaugccaaaggcgc

SEQ ID NO: 1018091 - RNA, 19 nt, Artificial Sequence
  Description of Artificial Sequence: Synthetic oligonucleotide
uggccgauucccucagggg

SEQ ID NO: 1018092 - RNA, 19 nt, Artificial Sequence
  Description of Artificial Sequence: Synthetic oligonucleotide
guagggaccauccugugcu

SEQ ID NO: 1018093 - RNA, 19 nt, Artificial Sequence
  Description of Artificial Sequence: Synthetic oligonucleotide
cucacagccauugcucggg

SEQ ID NO: 1018094 - RNA, 19 nt, Artificial Sequence
  Description of Artificial Sequence: Synthetic oligonucleotide
cuuaggaagaggcucccga

SEQ ID NO: 1018095 - RNA, 19 nt, Artificial Sequence
  Description of Artificial Sequence: Synthetic oligonucleotide
aggaguuuacgggugauaa

SEQ ID NO: 1018096 - RNA, 19 nt, Artificial Sequence
  Description of Artificial Sequence: Synthetic oligonucleotide
ucugaucgguuguaccaga

SEQ ID NO: 1018097 - RNA, 19 nt, Artificial Sequence
  Description of Artificial Sequence: Synthetic oligonucleotide
gagcagguaggaguuuacg

SEQ ID NO: 1018098 - RNA, 19 nt, Artificial Sequence
  Description of Artificial Sequence: Synthetic oligonucleotide
guaaucagccaccaguccu

SEQ ID NO: 1018099 - RNA, 19 nt, Artificial Sequence
  Description of Artificial Sequence: Synthetic oligonucleotide
ucaccugugggaacacccu

SEQ ID NO: 1018100 - RNA, 19 nt, Artificial Sequence
  Description of Artificial Sequence: Synthetic oligonucleotide
agaagcggcugucgcucgc

SEQ ID NO: 1018101 - RNA, 19 nt, Artificial Sequence
  Description of Artificial Sequence: Synthetic oligonucleotide
auagauucagcaguuuauu

SEQ ID NO: 1018102 - RNA, 19 nt, Artificial Sequence
  Description of Artificial Sequence: Synthetic oligonucleotide
cagcuguuaacagcagucg

SEQ ID NO: 1018103 - RNA, 19 nt, Artificial Sequence
  Description of Artificial Sequence: Synthetic oligonucleotide
aggcguagggaccauccug

SEQ ID NO: 1018104 - RNA, 19 nt, Artificial Sequence
  Description of Artificial Sequence: Synthetic oligonucleotide
aggauaccucuucuuguug

SEQ ID NO: 1018105 - RNA, 19 nt, Artificial Sequence
  Description of Artificial Sequence: Synthetic oligonucleotide
aucugaucgguuguaccag

SEQ ID NO: 1018106 - RNA, 19 nt, Artificial Sequence
  Description of Artificial Sequence: Synthetic oligonucleotide
uguaccagacuaugguauu

SEQ ID NO: 1018107 - RNA, 19 nt, Artificial Sequence
  Description of Artificial Sequence: Synthetic oligonucleotide
uguagggauggccgcuuga

SEQ ID NO: 1018108 - RNA, 19 nt, Artificial Sequence
  Description of Artificial Sequence: Synthetic oligonucleotide
uguaaacgggaugacucuc

SEQ ID NO: 1018109 - RNA, 19 nt, Artificial Sequence
  Description of Artificial Sequence: Synthetic oligonucleotide
acauucaccugugggaaca

SEQ ID NO: 1018110 - RNA, 19 nt, Artificial Sequence
  Description of Artificial Sequence: Synthetic oligonucleotide
cauagacggcugcaguggc

SEQ ID NO: 1018111 - RNA, 19 nt, Artificial Sequence
  Description of Artificial Sequence: Synthetic oligonucleotide
ggacaucccguaucggugg

SEQ ID NO: 1018112 - RNA, 19 nt, Artificial Sequence
  Description of Artificial Sequence: Synthetic oligonucleotide
gaaggcgauccuugccucc

SEQ ID NO: 1018113 - RNA, 19 nt, Artificial Sequence
  Description of Artificial Sequence: Synthetic oligonucleotide
ccgaugaggggaaacacag

SEQ ID NO: 1018114 - RNA, 19 nt, Artificial Sequence
  Description of Artificial Sequence: Synthetic oligonucleotide
gguagucagguuuggagca

SEQ ID NO: 1018115 - RNA, 19 nt, Artificial Sequence
  Description of Artificial Sequence: Synthetic oligonucleotide
uuucaugaaggcgauccuu

SEQ ID NO: 1018116 - RNA, 19 nt, Artificial Sequence
  Description of Artificial Sequence: Synthetic oligonucleotide
uaacagcagucgccaagcc

SEQ ID NO: 1018117 - RNA, 19 nt, Artificial Sequence
  Description of Artificial Sequence: Synthetic oligonucleotide
guacguuuccccagggcag

SEQ ID NO: 1018118 - RNA, 19 nt, Artificial Sequence
  Description of Artificial Sequence: Synthetic oligonucleotide
caguuguagacacuccuga

SEQ ID NO: 1018119 - RNA, 19 nt, Artificial Sequence
  Description of Artificial Sequence: Synthetic oligonucleotide
agcgggcuucgguugugcc

SEQ ID NO: 1018120 - RNA, 19 nt, Artificial Sequence
  Description of Artificial Sequence: Synthetic oligonucleotide
auugcucgggccugauuca

SEQ ID NO: 1018121 - RNA, 19 nt, Artificial Sequence
  Description of Artificial Sequence: Synthetic oligonucleotide
uaggagcaauugaaguguc

SEQ ID NO: 1018122 - RNA, 19 nt, Artificial Sequence
  Description of Artificial Sequence: Synthetic oligonucleotide
ugagagcauagaccauuuc

SEQ ID NO: 1018123 - RNA, 19 nt, Artificial Sequence
  Description of Artificial Sequence: Synthetic oligonucleotide
uacaucugaucgguuguac

SEQ ID NO: 1018124 - RNA, 19 nt, Artificial Sequence
  Description of Artificial Sequence: Synthetic oligonucleotide
ugaaggcgauccuugccuc

SEQ ID NO: 1018125 - RNA, 19 nt, Artificial Sequence
  Description of Artificial Sequence: Synthetic oligonucleotide
uuaauagauucagcaguuu

SEQ ID NO: 1018126 - RNA, 19 nt, Artificial Sequence
  Description of Artificial Sequence: Synthetic oligonucleotide
gcuguuaacagcagucgcc

SEQ ID NO: 1018127 - RNA, 19 nt, Artificial Sequence
  Description of Artificial Sequence: Synthetic oligonucleotide
ggccgauucccucaggggc

SEQ ID NO: 1018128 - RNA, 19 nt, Artificial Sequence
  Description of Artificial Sequence: Synthetic oligonucleotide
guaggagcaauugaagugu

SEQ ID NO: 1018129 - RNA, 19 nt, Artificial Sequence
  Description of Artificial Sequence: Synthetic oligonucleotide
agagaccccagcguggcug

SEQ ID NO: 1018130 - RNA, 19 nt, Artificial Sequence
  Description of Artificial Sequence: Synthetic oligonucleotide
cugaucgguuguaccagac

SEQ ID NO: 1018131 - RNA, 19 nt, Artificial Sequence
  Description of Artificial Sequence: Synthetic oligonucleotide
gauggcugaucugucacaa

SEQ ID NO: 1018132 - RNA, 19 nt, Artificial Sequence
  Description of Artificial Sequence: Synthetic oligonucleotide
agcgucaggguccaccgaa

SEQ ID NO: 1018133 - RNA, 19 nt, Artificial Sequence
  Description of Artificial Sequence: Synthetic oligonucleotide
agagcagguaggaguuuac

SEQ ID NO: 1018134 - RNA, 19 nt, Artificial Sequence
  Description of Artificial Sequence: Synthetic oligonucleotide
gcaauugaaguguccccag

SEQ ID NO: 1018135 - RNA, 19 nt, Artificial Sequence
  Description of Artificial Sequence: Synthetic oligonucleotide
uacgggugauaaugccucc

SEQ ID NO: 1018136 - RNA, 19 nt, Artificial Sequence
  Description of Artificial Sequence: Synthetic oligonucleotide
ggcgaagcggcucacccag

SEQ ID NO: 1018137 - RNA, 19 nt, Artificial Sequence
  Description of Artificial Sequence: Synthetic oligonucleotide
acuaugguauuuaucugua

SEQ ID NO: 1018138 - RNA, 19 nt, Artificial Sequence
  Description of Artificial Sequence: Synthetic oligonucleotide
ugaccagcgggcuucgguu

SEQ ID NO: 1018139 - RNA, 19 nt, Artificial Sequence
  Description of Artificial Sequence: Synthetic oligonucleotide
aaggcgauccuugccuccu

SEQ ID NO: 1018140 - RNA, 19 nt, Artificial Sequence
  Description of Artificial Sequence: Synthetic oligonucleotide
ggauaccucuucuuguuga

SEQ ID NO: 1018141 - RNA, 19 nt, Artificial Sequence
  Description of Artificial Sequence: Synthetic oligonucleotide
accagacuaugguauuuau

SEQ ID NO: 1018142 - RNA, 19 nt, Artificial Sequence
  Description of Artificial Sequence: Synthetic oligonucleotide
gguuguaccagacuauggu

SEQ ID NO: 1018143 - RNA, 19 nt, Artificial Sequence
  Description of Artificial Sequence: Synthetic oligonucleotide
gccauauagcgucaggguc

SEQ ID NO: 1018144 - RNA, 19 nt, Artificial Sequence
  Description of Artificial Sequence: Synthetic oligonucleotide
cuuauuggcauaguccaua

SEQ ID NO: 1018145 - RNA, 19 nt, Artificial Sequence
  Description of Artificial Sequence: Synthetic oligonucleotide
cuguuaacagcagucgcca

SEQ ID NO: 1018146 - RNA, 19 nt, Artificial Sequence
  Description of Artificial Sequence: Synthetic oligonucleotide
uaaugccuccagcccugag

SEQ ID NO: 1018147 - RNA, 19 nt, Artificial Sequence
  Description of Artificial Sequence: Synthetic oligonucleotide
uguuaacagcagucgccaa

SEQ ID NO: 1018148 - RNA, 19 nt, Artificial Sequence
  Description of Artificial Sequence: Synthetic oligonucleotide
ggaagacauucaccugugg

SEQ ID NO: 1018149 - RNA, 19 nt, Artificial Sequence
  Description of Artificial Sequence: Synthetic oligonucleotide
gccagugccgaccauggug

SEQ ID NO: 1018150 - RNA, 19 nt, Artificial Sequence
  Description of Artificial Sequence: Synthetic oligonucleotide
caaacagaccgugguugcc

SEQ ID NO: 1018151 - RNA, 19 nt, Artificial Sequence
  Description of Artificial Sequence: Synthetic oligonucleotide
ugcauguaaacgggaugac

SEQ ID NO: 1018152 - RNA, 19 nt, Artificial Sequence
  Description of Artificial Sequence: Synthetic oligonucleotide
gacaucccguaucgguggc

SEQ ID NO: 1018153 - RNA, 19 nt, Artificial Sequence
  Description of Artificial Sequence: Synthetic oligonucleotide
guaucgguggcuggcgaag

SEQ ID NO: 1018154 - RNA, 19 nt, Artificial Sequence
  Description of Artificial Sequence: Synthetic oligonucleotide
acggggcacagcuugcagu

SEQ ID NO: 1018155 - RNA, 19 nt, Artificial Sequence
  Description of Artificial Sequence: Synthetic oligonucleotide
ccgaccaugguggaguugg

SEQ ID NO: 1018156 - RNA, 19 nt, Artificial Sequence
  Description of Artificial Sequence: Synthetic oligonucleotide
gaccagcgggcuucgguug

SEQ ID NO: 1018157 - RNA, 19 nt, Artificial Sequence
  Description of Artificial Sequence: Synthetic oligonucleotide
gaggcuguuugcauguaaa

SEQ ID NO: 1018158 - RNA, 19 nt, Artificial Sequence
  Description of Artificial Sequence: Synthetic oligonucleotide
guaaacgggaugacucuca

SEQ ID NO: 1018159 - RNA, 19 nt, Artificial Sequence
  Description of Artificial Sequence: Synthetic oligonucleotide
ugcugguagucagguuugg

SEQ ID NO: 1018160 - RNA, 19 nt, Artificial Sequence
  Description of Artificial Sequence: Synthetic oligonucleotide
gccucaaauacaucugauc

SEQ ID NO: 1018161 - RNA, 19 nt, Artificial Sequence
  Description of Artificial Sequence: Synthetic oligonucleotide
ccaucugcgucacucacug

SEQ ID NO: 1018162 - RNA, 19 nt, Artificial Sequence
  Description of Artificial Sequence: Synthetic oligonucleotide
uaccagacuaugguauuua

SEQ ID NO: 1018163 - RNA, 19 nt, Artificial Sequence
  Description of Artificial Sequence: Synthetic oligonucleotide
guagucagguuuggagcag

SEQ ID NO: 1018164 - RNA, 19 nt, Artificial Sequence
  Description of Artificial Sequence: Synthetic oligonucleotide
guccauaauguuacccuca

SEQ ID NO: 1018165 - RNA, 19 nt, Artificial Sequence
  Description of Artificial Sequence: Synthetic oligonucleotide
gagacgaccacggggcaca

SEQ ID NO: 1018166 - RNA, 19 nt, Artificial Sequence
  Description of Artificial Sequence: Synthetic oligonucleotide
ucccguaucgguggcuggc

SEQ ID NO: 1018167 - RNA, 19 nt, Artificial Sequence
  Description of Artificial Sequence: Synthetic oligonucleotide
ggaucaugccaaaggcgcg

SEQ ID NO: 1018168 - RNA, 19 nt, Artificial Sequence
  Description of Artificial Sequence: Synthetic oligonucleotide
cccauagauaugaucugug

SEQ ID NO: 1018169 - RNA, 19 nt, Artificial Sequence
  Description of Artificial Sequence: Synthetic oligonucleotide
agauaggcugcaucucguu

SEQ ID NO: 1018170 - RNA, 19 nt, Artificial Sequence
  Description of Artificial Sequence: Synthetic oligonucleotide
gaccuccaaaucuggcaca

SEQ ID NO: 1018171 - RNA, 19 nt, Artificial Sequence
  Description of Artificial Sequence: Synthetic oligonucleotide
uggcgaagcggcucaccca

SEQ ID NO: 1018172 - RNA, 19 nt, Artificial Sequence
  Description of Artificial Sequence: Synthetic oligonucleotide
uacguuuccccagggcagu

SEQ ID NO: 1018173 - RNA, 19 nt, Artificial Sequence
  Description of Artificial Sequence: Synthetic oligonucleotide
ugccaaaggcgcgcauccg

SEQ ID NO: 1018174 - RNA, 19 nt, Artificial Sequence
  Description of Artificial Sequence: Synthetic oligonucleotide
ugcagcgauuggcggguga

SEQ ID NO: 1018175 - RNA, 19 nt, Artificial Sequence
  Description of Artificial Sequence: Synthetic oligonucleotide
accgaaaucauggccucau

SEQ ID NO: 1018176 - RNA, 19 nt, Artificial Sequence
  Description of Artificial Sequence: Synthetic oligonucleotide
ugucggaaggggacaccuc

SEQ ID NO: 1018177 - RNA, 19 nt, Artificial Sequence
  Description of Artificial Sequence: Synthetic oligonucleotide
gaggggaaacacaggaucu

SEQ ID NO: 1018178 - RNA, 19 nt, Artificial Sequence
  Description of Artificial Sequence: Synthetic oligonucleotide
gcucgggccugauucaacc

SEQ ID NO: 1018179 - RNA, 19 nt, Artificial Sequence
  Description of Artificial Sequence: Synthetic oligonucleotide
gcuucgguugugcccauug

SEQ ID NO: 1018180 - RNA, 19 nt, Artificial Sequence
  Description of Artificial Sequence: Synthetic oligonucleotide
agcgauuggcgggugacau

SEQ ID NO: 1018181 - RNA, 19 nt, Artificial Sequence
  Description of Artificial Sequence: Synthetic oligonucleotide
caccugugggaacacccug

SEQ ID NO: 1018182 - RNA, 19 nt, Artificial Sequence
  Description of Artificial Sequence: Synthetic oligonucleotide
ccagacuaugguauuuauc

SEQ ID NO: 1018183 - RNA, 19 nt, Artificial Sequence
  Description of Artificial Sequence: Synthetic oligonucleotide
ggaugggacaucccguauc

SEQ ID NO: 1018184 - RNA, 19 nt, Artificial Sequence
  Description of Artificial Sequence: Synthetic oligonucleotide
ugcucgggccugauucaac

SEQ ID NO: 1018185 - RNA, 19 nt, Artificial Sequence
  Description of Artificial Sequence: Synthetic oligonucleotide
ccaggcguagggaccaucc

SEQ ID NO: 1018186 - RNA, 19 nt, Artificial Sequence
  Description of Artificial Sequence: Synthetic oligonucleotide
ggcauaguccauaauguua

SEQ ID NO: 1018187 - RNA, 19 nt, Artificial Sequence
  Description of Artificial Sequence: Synthetic oligonucleotide
gaagcggcugucgcucgcc

SEQ ID NO: 1018188 - RNA, 19 nt, Artificial Sequence
  Description of Artificial Sequence: Synthetic oligonucleotide
caccagaugaagggcuggc

SEQ ID NO: 1018189 - RNA, 19 nt, Artificial Sequence
  Description of Artificial Sequence: Synthetic oligonucleotide
cugcgucacucacuggcug

SEQ ID NO: 1018190 - RNA, 19 nt, Artificial Sequence
  Description of Artificial Sequence: Synthetic oligonucleotide
agccuugaccugagcaggg

SEQ ID NO: 1018191 - RNA, 19 nt, Artificial Sequence
  Description of Artificial Sequence: Synthetic oligonucleotide
agugccgaccaugguggag

SEQ ID NO: 1018192 - RNA, 19 nt, Artificial Sequence
  Description of Artificial Sequence: Synthetic oligonucleotide
agucgccaagccucaaaua

SEQ ID NO: 1018193 - RNA, 19 nt, Artificial Sequence
  Description of Artificial Sequence: Synthetic oligonucleotide
aggccaucugcgucacuca

SEQ ID NO: 1018194 - RNA, 19 nt, Artificial Sequence
  Description of Artificial Sequence: Synthetic oligonucleotide
uaggaguuuacgggugaua

SEQ ID NO: 1018195 - RNA, 19 nt, Artificial Sequence
  Description of Artificial Sequence: Synthetic oligonucleotide
ggcuaugccagugccgacc

SEQ ID NO: 1018196 - RNA, 19 nt, Artificial Sequence
  Description of Artificial Sequence: Synthetic oligonucleotide
cauauagcgucagggucca

SEQ ID NO: 1018197 - RNA, 19 nt, Artificial Sequence
  Description of Artificial Sequence: Synthetic oligonucleotide
caucugcgucacucacugg

SEQ ID NO: 1018198 - RNA, 19 nt, Artificial Sequence
  Description of Artificial Sequence: Synthetic oligonucleotide
cgauuggcgggugacaucc

SEQ ID NO: 1018199 - RNA, 19 nt, Artificial Sequence
  Description of Artificial Sequence: Synthetic oligonucleotide
aggggcuaugccagugccg

SEQ ID NO: 1018200 - RNA, 19 nt, Artificial Sequence
  Description of Artificial Sequence: Synthetic oligonucleotide
ugcugucggaaggggacac

SEQ ID NO: 1018201 - RNA, 19 nt, Artificial Sequence
  Description of Artificial Sequence: Synthetic oligonucleotide
cagcucucuuaggaagagg

SEQ ID NO: 1018202 - RNA, 19 nt, Artificial Sequence
  Description of Artificial Sequence: Synthetic oligonucleotide
caaaguugugaagcaugca

SEQ ID NO: 1018203 - RNA, 19 nt, Artificial Sequence
  Description of Artificial Sequence: Synthetic oligonucleotide
agcagggccccagaacuga

SEQ ID NO: 1018204 - RNA, 19 nt, Artificial Sequence
  Description of Artificial Sequence: Synthetic oligonucleotide
ggaugacuaggauaccucu

SEQ ID NO: 1018205 - RNA, 19 nt, Artificial Sequence
  Description of Artificial Sequence: Synthetic oligonucleotide
gagaucuggaguggaggaa

SEQ ID NO: 1018206 - RNA, 19 nt, Artificial Sequence
  Description of Artificial Sequence: Synthetic oligonucleotide
aucgguuguaccagacuau

SEQ ID NO: 1018207 - RNA, 19 nt, Artificial Sequence
  Description of Artificial Sequence: Synthetic oligonucleotide
ccuugaccugagcagggcc

SEQ ID NO: 1018208 - RNA, 19 nt, Artificial Sequence
  Description of Artificial Sequence: Synthetic oligonucleotide
ccgagaucuggaguggagg

SEQ ID NO: 1018209 - RNA, 19 nt, Artificial Sequence
  Description of Artificial Sequence: Synthetic oligonucleotide
agggauccgaggagauagg

SEQ ID NO: 1018210 - RNA, 19 nt, Artificial Sequence
  Description of Artificial Sequence: Synthetic oligonucleotide
guccccagauggcugaucu

SEQ ID NO: 1018211 - RNA, 19 nt, Artificial Sequence
  Description of Artificial Sequence: Synthetic oligonucleotide
accagcgggcuucgguugu

SEQ ID NO: 1018212 - RNA, 19 nt, Artificial Sequence
  Description of Artificial Sequence: Synthetic oligonucleotide
ucaugccaaaggcgcgcau

SEQ ID NO: 1018213 - RNA, 19 nt, Artificial Sequence
  Description of Artificial Sequence: Synthetic oligonucleotide
acgggugauaaugccucca

SEQ ID NO: 1018214 - RNA, 19 nt, Artificial Sequence
  Description of Artificial Sequence: Synthetic oligonucleotide
auacaucugaucgguugua

SEQ ID NO: 1018215 - RNA, 19 nt, Artificial Sequence
  Description of Artificial Sequence: Synthetic oligonucleotide
aucaugccaaaggcgcgca

SEQ ID NO: 1018216 - RNA, 19 nt, Artificial Sequence
  Description of Artificial Sequence: Synthetic oligonucleotide
ucuguagggauggccgcuu

SEQ ID NO: 1018217 - RNA, 19 nt, Artificial Sequence
  Description of Artificial Sequence: Synthetic oligonucleotide
ggcuccaaacagaccgugg

SEQ ID NO: 1018218 - RNA, 19 nt, Artificial Sequence
  Description of Artificial Sequence: Synthetic oligonucleotide
acgggaugacucucagcaa

SEQ ID NO: 1018219 - RNA, 19 nt, Artificial Sequence
  Description of Artificial Sequence: Synthetic oligonucleotide
gacuaggauaccucuucuu

SEQ ID NO: 1018220 - RNA, 19 nt, Artificial Sequence
  Description of Artificial Sequence: Synthetic oligonucleotide
gccccauagauaugaucug

SEQ ID NO: 1018221 - RNA, 19 nt, Artificial Sequence
  Description of Artificial Sequence: Synthetic oligonucleotide
gguuuggagcagcuguuaa

SEQ ID NO: 1018222 - RNA, 19 nt, Artificial Sequence
  Description of Artificial Sequence: Synthetic oligonucleotide
cgguugugcccauuguacg

SEQ ID NO: 1018223 - RNA, 19 nt, Artificial Sequence
  Description of Artificial Sequence: Synthetic oligonucleotide
ggguccuugcgccagccca

SEQ ID NO: 1018224 - RNA, 19 nt, Artificial Sequence
  Description of Artificial Sequence: Synthetic oligonucleotide
gggauccgaggagauaggc

SEQ ID NO: 1018225 - RNA, 19 nt, Artificial Sequence
  Description of Artificial Sequence: Synthetic oligonucleotide
uggggaugacuaggauacc

SEQ ID NO: 1018226 - RNA, 19 nt, Artificial Sequence
  Description of Artificial Sequence: Synthetic oligonucleotide
ggcuuugcugguagucagg

SEQ ID NO: 1018227 - RNA, 19 nt, Artificial Sequence
  Description of Artificial Sequence: Synthetic oligonucleotide
auagacggcugcaguggcu

SEQ ID NO: 1018228 - RNA, 19 nt, Artificial Sequence
  Description of Artificial Sequence: Synthetic oligonucleotide
gggaugacuaggauaccuc

SEQ ID NO: 1018229 - RNA, 19 nt, Artificial Sequence
  Description of Artificial Sequence: Synthetic oligonucleotide
cauucaccugugggaacac

SEQ ID NO: 1018230 - RNA, 19 nt, Artificial Sequence
  Description of Artificial Sequence: Synthetic oligonucleotide
aguguccccuuggggauga

SEQ ID NO: 1018231 - RNA, 19 nt, Artificial Sequence
  Description of Artificial Sequence: Synthetic oligonucleotide
cucccgaugaggggaaaca

SEQ ID NO: 1018232 - RNA, 19 nt, Artificial Sequence
  Description of Artificial Sequence: Synthetic oligonucleotide
gagauaggcugcaucucgu

SEQ ID NO: 1018233 - RNA, 19 nt, Artificial Sequence
  Description of Artificial Sequence: Synthetic oligonucleotide
gguugugcccauuguacgu

SEQ ID NO: 1018234 - RNA, 19 nt, Artificial Sequence
  Description of Artificial Sequence: Synthetic oligonucleotide
gaugacuaggauaccucuu

SEQ ID NO: 1018235 - RNA, 19 nt, Artificial Sequence
  Description of Artificial Sequence: Synthetic oligonucleotide
uccuugcgccagcccagcu

SEQ ID NO: 1018236 - RNA, 19 nt, Artificial Sequence
  Description of Artificial Sequence: Synthetic oligonucleotide
agaugaagggcuggccgua

SEQ ID NO: 1018237 - RNA, 19 nt, Artificial Sequence
  Description of Artificial Sequence: Synthetic oligonucleotide
cucgggccugauucaacca

SEQ ID NO: 1018238 - RNA, 19 nt, Artificial Sequence
  Description of Artificial Sequence: Synthetic oligonucleotide
uugcucgggccugauucaa

SEQ ID NO: 1018239 - RNA, 19 nt, Artificial Sequence
  Description of Artificial Sequence: Synthetic oligonucleotide
ggaagaugcgggcugcccu

SEQ ID NO: 1018240 - RNA, 19 nt, Artificial Sequence
  Description of Artificial Sequence: Synthetic oligonucleotide
gcgggcuucgguugugccc

SEQ ID NO: 1018241 - RNA, 19 nt, Artificial Sequence
  Description of Artificial Sequence: Synthetic oligonucleotide
ggcugaucugucacaaaga

SEQ ID NO: 1018242 - RNA, 19 nt, Artificial Sequence
  Description of Artificial Sequence: Synthetic oligonucleotide
auaaugccuccagcccuga

SEQ ID NO: 1018243 - RNA, 19 nt, Artificial Sequence
  Description of Artificial Sequence: Synthetic oligonucleotide
ggccaucugcgucacucac

SEQ ID NO: 1018244 - RNA, 19 nt, Artificial Sequence
  Description of Artificial Sequence: Synthetic oligonucleotide
gcccaacuggaagacauuc

SEQ ID NO: 1018245 - RNA, 19 nt, Artificial Sequence
  Description of Artificial Sequence: Synthetic oligonucleotide
uugcgccagcccagcucag

SEQ ID NO: 1018246 - RNA, 19 nt, Artificial Sequence
  Description of Artificial Sequence: Synthetic oligonucleotide
ggcuggccguagaaggagg

SEQ ID NO: 1018247 - RNA, 19 nt, Artificial Sequence
  Description of Artificial Sequence: Synthetic oligonucleotide
cccgagaucuggaguggag

SEQ ID NO: 1018248 - RNA, 19 nt, Artificial Sequence
  Description of Artificial Sequence: Synthetic oligonucleotide
agggcuccaaacagaccgu

SEQ ID NO: 1018249 - RNA, 19 nt, Artificial Sequence
  Description of Artificial Sequence: Synthetic oligonucleotide
gggcuggccguagaaggag

SEQ ID NO: 1018250 - RNA, 19 nt, Artificial Sequence
  Description of Artificial Sequence: Synthetic oligonucleotide
cagagcagguaggaguuua

SEQ ID NO: 1018251 - RNA, 19 nt, Artificial Sequence
  Description of Artificial Sequence: Synthetic oligonucleotide
auauagcgucaggguccac

SEQ ID NO: 1018252 - RNA, 19 nt, Artificial Sequence
  Description of Artificial Sequence: Synthetic oligonucleotide
gggaagaugcgggcugccc

SEQ ID NO: 1018253 - RNA, 19 nt, Artificial Sequence
  Description of Artificial Sequence: Synthetic oligonucleotide
gugccgaccaugguggagu

SEQ ID NO: 1018254 - RNA, 19 nt, Artificial Sequence
  Description of Artificial Sequence: Synthetic oligonucleotide
acaucccguaucgguggcu

SEQ ID NO: 1018255 - RNA, 19 nt, Artificial Sequence
  Description of Artificial Sequence: Synthetic oligonucleotide
ccaccgaaaucauggccuc

SEQ ID NO: 1018256 - RNA, 19 nt, Artificial Sequence
  Description of Artificial Sequence: Synthetic oligonucleotide
ggcgggugacauccagcag

SEQ ID NO: 1018257 - RNA, 19 nt, Artificial Sequence
  Description of Artificial Sequence: Synthetic oligonucleotide
ggccgcuugaccagcgggc

SEQ ID NO: 1018258 - RNA, 19 nt, Artificial Sequence
  Description of Artificial Sequence: Synthetic oligonucleotide
cgagaucuggaguggagga

SEQ ID NO: 1018259 - RNA, 19 nt, Artificial Sequence
  Description of Artificial Sequence: Synthetic oligonucleotide
gcagcgauuggcgggugac

SEQ ID NO: 1018260 - RNA, 19 nt, Artificial Sequence
  Description of Artificial Sequence: Synthetic oligonucleotide
gggugauauuugaggaaga

SEQ ID NO: 1018261 - RNA, 19 nt, Artificial Sequence
  Description of Artificial Sequence: Synthetic oligonucleotide
ggggaugacuaggauaccu

SEQ ID NO: 1018262 - RNA, 19 nt, Artificial Sequence
  Description of Artificial Sequence: Synthetic oligonucleotide
ugccgaccaugguggaguu

SEQ ID NO: 1018263 - RNA, 19 nt, Artificial Sequence
  Description of Artificial Sequence: Synthetic oligonucleotide
cagucgccaagccucaaau

SEQ ID NO: 1018264 - RNA, 19 nt, Artificial Sequence
  Description of Artificial Sequence: Synthetic oligonucleotide
gauuggcgggugacaucca

SEQ ID NO: 1018265 - RNA, 19 nt, Artificial Sequence
  Description of Artificial Sequence: Synthetic oligonucleotide
caguguccccuuggggaug

SEQ ID NO: 1018266 - RNA, 19 nt, Artificial Sequence
  Description of Artificial Sequence: Synthetic oligonucleotide
gcauguaaacgggaugacu

SEQ ID NO: 1018267 - RNA, 19 nt, Artificial Sequence
  Description of Artificial Sequence: Synthetic oligonucleotide
guccuugcgccagcccagc

SEQ ID NO: 1018268 - RNA, 19 nt, Artificial Sequence
  Description of Artificial Sequence: Synthetic oligonucleotide
ggcguagggaccauccugu

SEQ ID NO: 1018269 - RNA, 19 nt, Artificial Sequence
  Description of Artificial Sequence: Synthetic oligonucleotide
cugucggaaggggacaccu

SEQ ID NO: 1018270 - RNA, 19 nt, Artificial Sequence
  Description of Artificial Sequence: Synthetic oligonucleotide
gggcaguuguagacacucc

SEQ ID NO: 1018271 - RNA, 19 nt, Artificial Sequence
  Description of Artificial Sequence: Synthetic oligonucleotide
agggaccauccugugcuuu

SEQ ID NO: 1018272 - RNA, 19 nt, Artificial Sequence
  Description of Artificial Sequence: Synthetic oligonucleotide
ggaguuuacgggugauaau

SEQ ID NO: 1018273 - RNA, 19 nt, Artificial Sequence
  Description of Artificial Sequence: Synthetic oligonucleotide
gugcuggaaaagccagccu

SEQ ID NO: 1018274 - RNA, 19 nt, Artificial Sequence
  Description of Artificial Sequence: Synthetic oligonucleotide
agacgaccacggggcacag

SEQ ID NO: 1018275 - RNA, 19 nt, Artificial Sequence
  Description of Artificial Sequence: Synthetic oligonucleotide
gcguggcugguaguaauca

SEQ ID NO: 1018276 - RNA, 19 nt, Artificial Sequence
  Description of Artificial Sequence: Synthetic oligonucleotide
guaccagacuaugguauuu

SEQ ID NO: 1018277 - RNA, 19 nt, Artificial Sequence
  Description of Artificial Sequence: Synthetic oligonucleotide
gcuugaccagcgggcuucg

SEQ ID NO: 1018278 - RNA, 19 nt, Artificial Sequence
  Description of Artificial Sequence: Synthetic oligonucleotide
ggauccgaggagauaggcu

SEQ ID NO: 1018279 - RNA, 19 nt, Artificial Sequence
  Description of Artificial Sequence: Synthetic oligonucleotide
agccauugcucgggccuga

SEQ ID NO: 1018280 - RNA, 19 nt, Artificial Sequence
  Description of Artificial Sequence: Synthetic oligonucleotide
gcggcucacccagaccucc

SEQ ID NO: 1018281 - RNA, 19 nt, Artificial Sequence
  Description of Artificial Sequence: Synthetic oligonucleotide
cuccaaacagaccgugguu

SEQ ID NO: 1018282 - RNA, 19 nt, Artificial Sequence
  Description of Artificial Sequence: Synthetic oligonucleotide
cccguaucgguggcuggcg

SEQ ID NO: 1018283 - RNA, 19 nt, Artificial Sequence
  Description of Artificial Sequence: Synthetic oligonucleotide
gcagucgccaagccucaaa

SEQ ID NO: 1018284 - RNA, 19 nt, Artificial Sequence
  Description of Artificial Sequence: Synthetic oligonucleotide
guaggaguuuacgggugau

SEQ ID NO: 1018285 - RNA, 19 nt, Artificial Sequence
  Description of Artificial Sequence: Synthetic oligonucleotide
caccgaaaucauggccuca

SEQ ID NO: 1018286 - RNA, 19 nt, Artificial Sequence
  Description of Artificial Sequence: Synthetic oligonucleotide
gggaaacacaggaucuccu

SEQ ID NO: 1018287 - RNA, 19 nt, Artificial Sequence
  Description of Artificial Sequence: Synthetic oligonucleotide
gcgauuggcgggugacauc

SEQ ID NO: 1018288 - RNA, 19 nt, Artificial Sequence
  Description of Artificial Sequence: Synthetic oligonucleotide
gcugucggaaggggacacc

SEQ ID NO: 1018289 - RNA, 19 nt, Artificial Sequence
  Description of Artificial Sequence: Synthetic oligonucleotide
ggccucauagacggcugca

SEQ ID NO: 1018290 - RNA, 19 nt, Artificial Sequence
  Description of Artificial Sequence: Synthetic oligonucleotide
cagcgauuggcgggugaca

SEQ ID NO: 1018291 - RNA, 19 nt, Artificial Sequence
  Description of Artificial Sequence: Synthetic oligonucleotide
ccuccucauagaacaaacu

SEQ ID NO: 1018292 - RNA, 19 nt, Artificial Sequence
  Description of Artificial Sequence: Synthetic oligonucleotide
ggggaagaugcgggcugcc

SEQ ID NO: 1018293 - RNA, 19 nt, Artificial Sequence
  Description of Artificial Sequence: Synthetic oligonucleotide
gcuggcgaagcggcucacc

SEQ ID NO: 1018294 - RNA, 19 nt, Artificial Sequence
  Description of Artificial Sequence: Synthetic oligonucleotide
cagugccgaccauggugga

SEQ ID NO: 1018295 - RNA, 19 nt, Artificial Sequence
  Description of Artificial Sequence: Synthetic oligonucleotide
caggcguagggaccauccu

SEQ ID NO: 1018296 - RNA, 19 nt, Artificial Sequence
  Description of Artificial Sequence: Synthetic oligonucleotide
gggcuaugccagugccgac

SEQ ID NO: 1018297 - RNA, 19 nt, Artificial Sequence
  Description of Artificial Sequence: Synthetic oligonucleotide
cgcuugaccagcgggcuuc

SEQ ID NO: 1018298 - RNA, 19 nt, Artificial Sequence
  Description of Artificial Sequence: Synthetic oligonucleotide
aggcucccgaugaggggaa

SEQ ID NO: 1018299 - RNA, 19 nt, Artificial Sequence
  Description of Artificial Sequence: Synthetic oligonucleotide
acguuuccccagggcaguu

SEQ ID NO: 1018300 - RNA, 19 nt, Artificial Sequence
  Description of Artificial Sequence: Synthetic oligonucleotide
gccaagccucaaauacauc

SEQ ID NO: 1018301 - RNA, 19 nt, Artificial Sequence
  Description of Artificial Sequence: Synthetic oligonucleotide
ggagggauccgaggagaua

SEQ ID NO: 1018302 - RNA, 19 nt, Artificial Sequence
  Description of Artificial Sequence: Synthetic oligonucleotide
gccgauucccucaggggcu

SEQ ID NO: 1018303 - RNA, 19 nt, Artificial Sequence
  Description of Artificial Sequence: Synthetic oligonucleotide
cugcagcgauuggcgggug

SEQ ID NO: 1018304 - RNA, 19 nt, Artificial Sequence
  Description of Artificial Sequence: Synthetic oligonucleotide
ccccauagauaugaucugu

SEQ ID NO: 1018305 - RNA, 19 nt, Artificial Sequence
  Description of Artificial Sequence: Synthetic oligonucleotide
agaccccagcguggcuggu

SEQ ID NO: 1018306 - RNA, 19 nt, Artificial Sequence
  Description of Artificial Sequence: Synthetic oligonucleotide
cgccaagccucaaauacau

SEQ ID NO: 1018307 - RNA, 19 nt, Artificial Sequence
  Description of Artificial Sequence: Synthetic oligonucleotide
cguaucgguggcuggcgaa

SEQ ID NO: 1018308 - RNA, 19 nt, Artificial Sequence
  Description of Artificial Sequence: Synthetic oligonucleotide
gccaucugcgucacucacu

SEQ ID NO: 1018309 - RNA, 19 nt, Artificial Sequence
  Description of Artificial Sequence: Synthetic oligonucleotide
gccgaccaugguggaguug

SEQ ID NO: 1018310 - RNA, 19 nt, Artificial Sequence
  Description of Artificial Sequence: Synthetic oligonucleotide
ccguaucgguggcuggcga

SEQ ID NO: 1018311 - RNA, 19 nt, Artificial Sequence
  Description of Artificial Sequence: Synthetic oligonucleotide
cccagcguggcugguagua

SEQ ID NO: 1018312 - RNA, 19 nt, Artificial Sequence
  Description of Artificial Sequence: Synthetic oligonucleotide
ccgaaaucauggccucaua

SEQ ID NO: 1018313 - RNA, 19 nt, Artificial Sequence
  Description of Artificial Sequence: Synthetic oligonucleotide
gcgucaggguccaccgaaa

SEQ ID NO: 1018314 - RNA, 19 nt, Artificial Sequence
  Description of Artificial Sequence: Synthetic oligonucleotide
gccgcuugaccagcgggcu

SEQ ID NO: 1018315 - RNA, 19 nt, Artificial Sequence
  Description of Artificial Sequence: Synthetic oligonucleotide
ccagcgggcuucgguugug

SEQ ID NO: 1018316 - RNA, 19 nt, Artificial Sequence
  Description of Artificial Sequence: Synthetic oligonucleotide
cuaugccagugccgaccau

SEQ ID NO: 1018317 - RNA, 19 nt, Artificial Sequence
  Description of Artificial Sequence: Synthetic oligonucleotide
gcggaaggcuuugcuggua

SEQ ID NO: 1018318 - RNA, 19 nt, Artificial Sequence
  Description of Artificial Sequence: Synthetic oligonucleotide
gccuuggagcagccauaua

SEQ ID NO: 1018319 - RNA, 19 nt, Artificial Sequence
  Description of Artificial Sequence: Synthetic oligonucleotide
gcgaagcggcucacccaga

SEQ ID NO: 1018320 - RNA, 19 nt, Artificial Sequence
  Description of Artificial Sequence: Synthetic oligonucleotide
ggcucccgaugaggggaaa

SEQ ID NO: 1018321 - RNA, 19 nt, Artificial Sequence
  Description of Artificial Sequence: Synthetic oligonucleotide
ccgauucccucaggggcua

SEQ ID NO: 1018322 - RNA, 19 nt, Artificial Sequence
  Description of Artificial Sequence: Synthetic oligonucleotide
cgucaggguccaccgaaau

SEQ ID NO: 1018323 - RNA, 19 nt, Artificial Sequence
  Description of Artificial Sequence: Synthetic oligonucleotide
ccauugcucgggccugauu

SEQ ID NO: 1018324 - RNA, 19 nt, Artificial Sequence
  Description of Artificial Sequence: Synthetic oligonucleotide
gccauugcucgggccugau

SEQ ID NO: 1018325 - RNA, 19 nt, Artificial Sequence
  Description of Artificial Sequence: Synthetic oligonucleotide
cgucacucacuggcugacu

SEQ ID NO: 1018326 - RNA, 19 nt, Artificial Sequence
  Description of Artificial Sequence: Synthetic oligonucleotide
ccgcuugaccagcgggcuu

SEQ ID NO: 1018327 - RNA, 19 nt, Artificial Sequence
  Description of Artificial Sequence: Synthetic oligonucleotide
aaaccauugaaacagagaa

SEQ ID NO: 1018328 - RNA, 19 nt, Artificial Sequence
  Description of Artificial Sequence: Synthetic oligonucleotide
aauaaaacgcaaaaccucg

SEQ ID NO: 1018329 - RNA, 19 nt, Artificial Sequence
  Description of Artificial Sequence: Synthetic oligonucleotide
ucuaugaauuccacgaugg

SEQ ID NO: 1018330 - RNA, 19 nt, Artificial Sequence
  Description of Artificial Sequence: Synthetic oligonucleotide
uuuaggacaagacacuucc

SEQ ID NO: 1018331 - RNA, 19 nt, Artificial Sequence
  Description of Artificial Sequence: Synthetic oligonucleotide
gaaugcauucacuucaucg

SEQ ID NO: 1018332 - RNA, 19 nt, Artificial Sequence
  Description of Artificial Sequence: Synthetic oligonucleotide
ugaguuuaggacaagacac

SEQ ID NO: 1018333 - RNA, 19 nt, Artificial Sequence
  Description of Artificial Sequence: Synthetic oligonucleotide
uuagacuuaguacagcugc

SEQ ID NO: 1018334 - RNA, 19 nt, Artificial Sequence
  Description of Artificial Sequence: Synthetic oligonucleotide
cuugagacaauauggagcc

SEQ ID NO: 1018335 - RNA, 19 nt, Artificial Sequence
  Description of Artificial Sequence: Synthetic oligonucleotide
ggucauagguauuagaucg

SEQ ID NO: 1018336 - RNA, 19 nt, Artificial Sequence
  Description of Artificial Sequence: Synthetic oligonucleotide
aaugcauucacuucaucgu

SEQ ID NO: 1018337 - RNA, 19 nt, Artificial Sequence
  Description of Artificial Sequence: Synthetic oligonucleotide
aguucggcaaccuucgccc

SEQ ID NO: 1018338 - RNA, 19 nt, Artificial Sequence
  Description of Artificial Sequence: Synthetic oligonucleotide
ugucaaaccccacaugucc

SEQ ID NO: 1018339 - RNA, 19 nt, Artificial Sequence
  Description of Artificial Sequence: Synthetic oligonucleotide
aaacugaaugguuugcugu

SEQ ID NO: 1018340 - RNA, 19 nt, Artificial Sequence
  Description of Artificial Sequence: Synthetic oligonucleotide
aaucgugagcuuaagcccc

SEQ ID NO: 1018341 - RNA, 19 nt, Artificial Sequence
  Description of Artificial Sequence: Synthetic oligonucleotide
caaaaccucgugaacagcg

SEQ ID NO: 1018342 - RNA, 19 nt, Artificial Sequence
  Description of Artificial Sequence: Synthetic oligonucleotide
aaaacgcaaaaccucguga

SEQ ID NO: 1018343 - RNA, 19 nt, Artificial Sequence
  Description of Artificial Sequence: Synthetic oligonucleotide
ucacuuaacaccuggguga

SEQ ID NO: 1018344 - RNA, 19 nt, Artificial Sequence
  Description of Artificial Sequence: Synthetic oligonucleotide
uuccauguaaaacaccaug

SEQ ID NO: 1018345 - RNA, 19 nt, Artificial Sequence
  Description of Artificial Sequence: Synthetic oligonucleotide
auagguauuagaucggagu

SEQ ID NO: 1018346 - RNA, 19 nt, Artificial Sequence
  Description of Artificial Sequence: Synthetic oligonucleotide
aauauggagcccuaacuaa

SEQ ID NO: 1018347 - RNA, 19 nt, Artificial Sequence
  Description of Artificial Sequence: Synthetic oligonucleotide
gaaguacaagcagacaugg

SEQ ID NO: 1018348 - RNA, 19 nt, Artificial Sequence
  Description of Artificial Sequence: Synthetic oligonucleotide
ugaaguacaagcagacaug

SEQ ID NO: 1018349 - RNA, 19 nt, Artificial Sequence
  Description of Artificial Sequence: Synthetic oligonucleotide
aguacaagcagacauggau

SEQ ID NO: 1018350 - RNA, 19 nt, Artificial Sequence
  Description of Artificial Sequence: Synthetic oligonucleotide
ucaaacugagcaucuauga

SEQ ID NO: 1018351 - RNA, 19 nt, Artificial Sequence
  Description of Artificial Sequence: Synthetic oligonucleotide
uuaaugugcacaguugcag

SEQ ID NO: 1018352 - RNA, 19 nt, Artificial Sequence
  Description of Artificial Sequence: Synthetic oligonucleotide
agagacuuaagugaauguc

SEQ ID NO: 1018353 - RNA, 19 nt, Artificial Sequence
  Description of Artificial Sequence: Synthetic oligonucleotide
ugagugugguuuaaugugc

SEQ ID NO: 1018354 - RNA, 19 nt, Artificial Sequence
  Description of Artificial Sequence: Synthetic oligonucleotide
agcuauaucggccgcugcc

SEQ ID NO: 1018355 - RNA, 19 nt, Artificial Sequence
  Description of Artificial Sequence: Synthetic oligonucleotide
ugagguuacauuuggucca

SEQ ID NO: 1018356 - RNA, 19 nt, Artificial Sequence
  Description of Artificial Sequence: Synthetic oligonucleotide
uaaaacgcaaaaccucgug

SEQ ID NO: 1018357 - RNA, 19 nt, Artificial Sequence
  Description of Artificial Sequence: Synthetic oligonucleotide
caccuggcgagcuauaucg

SEQ ID NO: 1018358 - RNA, 19 nt, Artificial Sequence
  Description of Artificial Sequence: Synthetic oligonucleotide
gagacuuaagugaaugucc

SEQ ID NO: 1018359 - RNA, 19 nt, Artificial Sequence
  Description of Artificial Sequence: Synthetic oligonucleotide
cuugucuggacacagggac

SEQ ID NO: 1018360 - RNA, 19 nt, Artificial Sequence
  Description of Artificial Sequence: Synthetic oligonucleotide
caaucgugagcuuaagccc

SEQ ID NO: 1018361 - RNA, 19 nt, Artificial Sequence
  Description of Artificial Sequence: Synthetic oligonucleotide
acaauaaaacgcaaaaccu

SEQ ID NO: 1018362 - RNA, 19 nt, Artificial Sequence
  Description of Artificial Sequence: Synthetic oligonucleotide
acaauauggagcccuaacu

SEQ ID NO: 1018363 - RNA, 19 nt, Artificial Sequence
  Description of Artificial Sequence: Synthetic oligonucleotide
uuacugucgagcuucuuca

SEQ ID NO: 1018364 - RNA, 19 nt, Artificial Sequence
  Description of Artificial Sequence: Synthetic oligonucleotide
aggucauagguauuagauc

SEQ ID NO: 1018365 - RNA, 19 nt, Artificial Sequence
  Description of Artificial Sequence: Synthetic oligonucleotide
uugcucacaaguucacugg

SEQ ID NO: 1018366 - RNA, 19 nt, Artificial Sequence
  Description of Artificial Sequence: Synthetic oligonucleotide
ugucagcucacucuuagaa

SEQ ID NO: 1018367 - RNA, 19 nt, Artificial Sequence
  Description of Artificial Sequence: Synthetic oligonucleotide
ucucccuuagacuuaguac

SEQ ID NO: 1018368 - RNA, 19 nt, Artificial Sequence
  Description of Artificial Sequence: Synthetic oligonucleotide
ugaugauucuuuuccugcc

SEQ ID NO: 1018369 - RNA, 19 nt, Artificial Sequence
  Description of Artificial Sequence: Synthetic oligonucleotide
gguuacuagguccagagac

SEQ ID NO: 1018370 - RNA, 19 nt, Artificial Sequence
  Description of Artificial Sequence: Synthetic oligonucleotide
guacaguucauagugccgg

SEQ ID NO: 1018371 - RNA, 19 nt, Artificial Sequence
  Description of Artificial Sequence: Synthetic oligonucleotide
uuaguacagcugcugaaga

SEQ ID NO: 1018372 - RNA, 19 nt, Artificial Sequence
  Description of Artificial Sequence: Synthetic oligonucleotide
ugcaguacucuccggaucu

SEQ ID NO: 1018373 - RNA, 19 nt, Artificial Sequence
  Description of Artificial Sequence: Synthetic oligonucleotide
aaugguuugcuguccgggu

SEQ ID NO: 1018374 - RNA, 19 nt, Artificial Sequence
  Description of Artificial Sequence: Synthetic oligonucleotide
gaacugguugguuucuugc

SEQ ID NO: 1018375 - RNA, 19 nt, Artificial Sequence
  Description of Artificial Sequence: Synthetic oligonucleotide
cauuugguccauuuccagc

SEQ ID NO: 1018376 - RNA, 19 nt, Artificial Sequence
  Description of Artificial Sequence: Synthetic oligonucleotide
uagguauuagaucggaguu

SEQ ID NO: 1018377 - RNA, 19 nt, Artificial Sequence
  Description of Artificial Sequence: Synthetic oligonucleotide
aaggauacugccgugcccu

SEQ ID NO: 1018378 - RNA, 19 nt, Artificial Sequence
  Description of Artificial Sequence: Synthetic oligonucleotide
cuuaacaccugggugagug

SEQ ID NO: 1018379 - RNA, 19 nt, Artificial Sequence
  Description of Artificial Sequence: Synthetic oligonucleotide
cuucagacggucaaacuuc

SEQ ID NO: 1018380 - RNA, 19 nt, Artificial Sequence
  Description of Artificial Sequence: Synthetic oligonucleotide
uuuccagcucugaugauuc

SEQ ID NO: 1018381 - RNA, 19 nt, Artificial Sequence
  Description of Artificial Sequence: Synthetic oligonucleotide
gacaauauggagcccuaac

SEQ ID NO: 1018382 - RNA, 19 nt, Artificial Sequence
  Description of Artificial Sequence: Synthetic oligonucleotide
auaguggcugaagacaguc

SEQ ID NO: 1018383 - RNA, 19 nt, Artificial Sequence
  Description of Artificial Sequence: Synthetic oligonucleotide
gaaugguuugcuguccggg

SEQ ID NO: 1018384 - RNA, 19 nt, Artificial Sequence
  Description of Artificial Sequence: Synthetic oligonucleotide
ugacucaucaucggugggg

SEQ ID NO: 1018385 - RNA, 19 nt, Artificial Sequence
  Description of Artificial Sequence: Synthetic oligonucleotide
cuuaguacagcugcugaag

SEQ ID NO: 1018386 - RNA, 19 nt, Artificial Sequence
  Description of Artificial Sequence: Synthetic oligonucleotide
guuccauugaucucggcca

SEQ ID NO: 1018387 - RNA, 19 nt, Artificial Sequence
  Description of Artificial Sequence: Synthetic oligonucleotide
uauggagcccuaacuaacu

SEQ ID NO: 1018388 - RNA, 19 nt, Artificial Sequence
  Description of Artificial Sequence: Synthetic oligonucleotide
gcaucuaugaauuccacga

SEQ ID NO: 1018389 - RNA, 19 nt, Artificial Sequence
  Description of Artificial Sequence: Synthetic oligonucleotide
gacaguucggcaaccuucg

SEQ ID NO: 1018390 - RNA, 19 nt, Artificial Sequence
  Description of Artificial Sequence: Synthetic oligonucleotide
cuuuucagagucugcgagc

SEQ ID NO: 1018391 - RNA, 19 nt, Artificial Sequence
  Description of Artificial Sequence: Synthetic oligonucleotide
auauggagcccuaacuaac

SEQ ID NO: 1018392 - RNA, 19 nt, Artificial Sequence
  Description of Artificial Sequence: Synthetic oligonucleotide
ugaacaggguauccaugag

SEQ ID NO: 1018393 - RNA, 19 nt, Artificial Sequence
  Description of Artificial Sequence: Synthetic oligonucleotide
gauucgggagucgugguag

SEQ ID NO: 1018394 - RNA, 19 nt, Artificial Sequence
  Description of Artificial Sequence: Synthetic oligonucleotide
agucacuuaacaccugggu

SEQ ID NO: 1018395 - RNA, 19 nt, Artificial Sequence
  Description of Artificial Sequence: Synthetic oligonucleotide
cugcagauaggccucaaac

SEQ ID NO: 1018396 - RNA, 19 nt, Artificial Sequence
  Description of Artificial Sequence: Synthetic oligonucleotide
agugugguuuaaugugcac

SEQ ID NO: 1018397 - RNA, 19 nt, Artificial Sequence
  Description of Artificial Sequence: Synthetic oligonucleotide
cuuagacuuaguacagcug

SEQ ID NO: 1018398 - RNA, 19 nt, Artificial Sequence
  Description of Artificial Sequence: Synthetic oligonucleotide
agcucugaugauucuuuuc

SEQ ID NO: 1018399 - RNA, 19 nt, Artificial Sequence
  Description of Artificial Sequence: Synthetic oligonucleotide
ucuggacaaacaucugucu

SEQ ID NO: 1018400 - RNA, 19 nt, Artificial Sequence
  Description of Artificial Sequence: Synthetic oligonucleotide
auaucggccgcugccaucg

SEQ ID NO: 1018401 - RNA, 19 nt, Artificial Sequence
  Description of Artificial Sequence: Synthetic oligonucleotide
aggacaagacacuuccaug

SEQ ID NO: 1018402 - RNA, 19 nt, Artificial Sequence
  Description of Artificial Sequence: Synthetic oligonucleotide
auggauucgggagucgugg

SEQ ID NO: 1018403 - RNA, 19 nt, Artificial Sequence
  Description of Artificial Sequence: Synthetic oligonucleotide
cuaugaauuccacgauggg

SEQ ID NO: 1018404 - RNA, 19 nt, Artificial Sequence
  Description of Artificial Sequence: Synthetic oligonucleotide
caagcagacauggauucgg

SEQ ID NO: 1018405 - RNA, 19 nt, Artificial Sequence
  Description of Artificial Sequence: Synthetic oligonucleotide
acucuuagaaauggcaucu

SEQ ID NO: 1018406 - RNA, 19 nt, Artificial Sequence
  Description of Artificial Sequence: Synthetic oligonucleotide
uaagggugccgccgcaacg

SEQ ID NO: 1018407 - RNA, 19 nt, Artificial Sequence
  Description of Artificial Sequence: Synthetic oligonucleotide
aggugugcaguacucuccg

SEQ ID NO: 1018408 - RNA, 19 nt, Artificial Sequence
  Description of Artificial Sequence: Synthetic oligonucleotide
uuaacaccugggugagugg

SEQ ID NO: 1018409 - RNA, 19 nt, Artificial Sequence
  Description of Artificial Sequence: Synthetic oligonucleotide
cauagguauuagaucggag

SEQ ID NO: 1018410 - RNA, 19 nt, Artificial Sequence
  Description of Artificial Sequence: Synthetic oligonucleotide
aagggugccgccgcaacgg

SEQ ID NO: 1018411 - RNA, 19 nt, Artificial Sequence
  Description of Artificial Sequence: Synthetic oligonucleotide
uacaguucauagugccggg

SEQ ID NO: 1018412 - RNA, 19 nt, Artificial Sequence
  Description of Artificial Sequence: Synthetic oligonucleotide
uggcgagcuauaucggccg

SEQ ID NO: 1018413 - RNA, 19 nt, Artificial Sequence
  Description of Artificial Sequence: Synthetic oligonucleotide
augguuugcuguccggguc

SEQ ID NO: 1018414 - RNA, 19 nt, Artificial Sequence
  Description of Artificial Sequence: Synthetic oligonucleotide
cugaaugguuugcuguccg

SEQ ID NO: 1018415 - RNA, 19 nt, Artificial Sequence
  Description of Artificial Sequence: Synthetic oligonucleotide
agcaaaugguaggugggcg

SEQ ID NO: 1018416 - RNA, 19 nt, Artificial Sequence
  Description of Artificial Sequence: Synthetic oligonucleotide
cacucuuagaaauggcauc

SEQ ID NO: 1018417 - RNA, 19 nt, Artificial Sequence
  Description of Artificial Sequence: Synthetic oligonucleotide
uacucuccggaucuucagc

SEQ ID NO: 1018418 - RNA, 19 nt, Artificial Sequence
  Description of Artificial Sequence: Synthetic oligonucleotide
uagacuuaguacagcugcu

SEQ ID NO: 1018419 - RNA, 19 nt, Artificial Sequence
  Description of Artificial Sequence: Synthetic oligonucleotide
gauggggaugauauucacc

SEQ ID NO: 1018420 - RNA, 19 nt, Artificial Sequence
  Description of Artificial Sequence: Synthetic oligonucleotide
uucucccuuagacuuagua

SEQ ID NO: 1018421 - RNA, 19 nt, Artificial Sequence
  Description of Artificial Sequence: Synthetic oligonucleotide
auggagcccuaacuaacuc

SEQ ID NO: 1018422 - RNA, 19 nt, Artificial Sequence
  Description of Artificial Sequence: Synthetic oligonucleotide
acucuccggaucuucagcu

SEQ ID NO: 1018423 - RNA, 19 nt, Artificial Sequence
  Description of Artificial Sequence: Synthetic oligonucleotide
gacuuaagugaauguccug

SEQ ID NO: 1018424 - RNA, 19 nt, Artificial Sequence
  Description of Artificial Sequence: Synthetic oligonucleotide
gacggucaaacuucucaug

SEQ ID NO: 1018425 - RNA, 19 nt, Artificial Sequence
  Description of Artificial Sequence: Synthetic oligonucleotide
ugacugacuuauucaccag

SEQ ID NO: 1018426 - RNA, 19 nt, Artificial Sequence
  Description of Artificial Sequence: Synthetic oligonucleotide
uccuguaaacugaaugguu

SEQ ID NO: 1018427 - RNA, 19 nt, Artificial Sequence
  Description of Artificial Sequence: Synthetic oligonucleotide
agcccuaacuaacucuucu

SEQ ID NO: 1018428 - RNA, 19 nt, Artificial Sequence
  Description of Artificial Sequence: Synthetic oligonucleotide
uggagcccuaacuaacucu

SEQ ID NO: 1018429 - RNA, 19 nt, Artificial Sequence
  Description of Artificial Sequence: Synthetic oligonucleotide
acacguacacuugagugug

SEQ ID NO: 1018430 - RNA, 19 nt, Artificial Sequence
  Description of Artificial Sequence: Synthetic oligonucleotide
acuuaguacagcugcugaa

SEQ ID NO: 1018431 - RNA, 19 nt, Artificial Sequence
  Description of Artificial Sequence: Synthetic oligonucleotide
uugaaugcauucacuucau

SEQ ID NO: 1018432 - RNA, 19 nt, Artificial Sequence
  Description of Artificial Sequence: Synthetic oligonucleotide
ggguuuauagcuguccucc

SEQ ID NO: 1018433 - RNA, 19 nt, Artificial Sequence
  Description of Artificial Sequence: Synthetic oligonucleotide
acgauggguuuauagcugu

SEQ ID NO: 1018434 - RNA, 19 nt, Artificial Sequence
  Description of Artificial Sequence: Synthetic oligonucleotide
gaacuuugucagcucacuc

SEQ ID NO: 1018435 - RNA, 19 nt, Artificial Sequence
  Description of Artificial Sequence: Synthetic oligonucleotide
acgcaaaaccucgugaaca

SEQ ID NO: 1018436 - RNA, 19 nt, Artificial Sequence
  Description of Artificial Sequence: Synthetic oligonucleotide
agguauuagaucggaguug

SEQ ID NO: 1018437 - RNA, 19 nt, Artificial Sequence
  Description of Artificial Sequence: Synthetic oligonucleotide
guaaaacaccauguaaguc

SEQ ID NO: 1018438 - RNA, 19 nt, Artificial Sequence
  Description of Artificial Sequence: Synthetic oligonucleotide
agacggucaaacuucucau

SEQ ID NO: 1018439 - RNA, 19 nt, Artificial Sequence
  Description of Artificial Sequence: Synthetic oligonucleotide
aauuccacgauggguuuau

SEQ ID NO: 1018440 - RNA, 19 nt, Artificial Sequence
  Description of Artificial Sequence: Synthetic oligonucleotide
gucauagguauuagaucgg

SEQ ID NO: 1018441 - RNA, 19 nt, Artificial Sequence
  Description of Artificial Sequence: Synthetic oligonucleotide
gaguugaacaccuggcugu

SEQ ID NO: 1018442 - RNA, 19 nt, Artificial Sequence
  Description of Artificial Sequence: Synthetic oligonucleotide
ucaucaucgguggggaacu

SEQ ID NO: 1018443 - RNA, 19 nt, Artificial Sequence
  Description of Artificial Sequence: Synthetic oligonucleotide
caguucggcaaccuucgcc

SEQ ID NO: 1018444 - RNA, 19 nt, Artificial Sequence
  Description of Artificial Sequence: Synthetic oligonucleotide
ugagcuuaagccccacguu

SEQ ID NO: 1018445 - RNA, 19 nt, Artificial Sequence
  Description of Artificial Sequence: Synthetic oligonucleotide
caauauggagcccuaacua

SEQ ID NO: 1018446 - RNA, 19 nt, Artificial Sequence
  Description of Artificial Sequence: Synthetic oligonucleotide
uacacuugagugugguuua

SEQ ID NO: 1018447 - RNA, 19 nt, Artificial Sequence
  Description of Artificial Sequence: Synthetic oligonucleotide
agacauggauucgggaguc

SEQ ID NO: 1018448 - RNA, 19 nt, Artificial Sequence
  Description of Artificial Sequence: Synthetic oligonucleotide
aaccuucgcccaccuggcg

SEQ ID NO: 1018449 - RNA, 19 nt, Artificial Sequence
  Description of Artificial Sequence: Synthetic oligonucleotide
acaguucggcaaccuucgc

SEQ ID NO: 1018450 - RNA, 19 nt, Artificial Sequence
  Description of Artificial Sequence: Synthetic oligonucleotide
gaacaccuggcugugugug

SEQ ID NO: 1018451 - RNA, 19 nt, Artificial Sequence
  Description of Artificial Sequence: Synthetic oligonucleotide
uggacuccauugcucacaa

SEQ ID NO: 1018452 - RNA, 19 nt, Artificial Sequence
  Description of Artificial Sequence: Synthetic oligonucleotide
ugguuacuagguccagaga

SEQ ID NO: 1018453 - RNA, 19 nt, Artificial Sequence
  Description of Artificial Sequence: Synthetic oligonucleotide
gguauuagaucggaguuga

SEQ ID NO: 1018454 - RNA, 19 nt, Artificial Sequence
  Description of Artificial Sequence: Synthetic oligonucleotide
agacuuaguacagcugcug

SEQ ID NO: 1018455 - RNA, 19 nt, Artificial Sequence
  Description of Artificial Sequence: Synthetic oligonucleotide
ugaaugcauucacuucauc

SEQ ID NO: 1018456 - RNA, 19 nt, Artificial Sequence
  Description of Artificial Sequence: Synthetic oligonucleotide
auagugccggguguggguc

SEQ ID NO: 1018457 - RNA, 19 nt, Artificial Sequence
  Description of Artificial Sequence: Synthetic oligonucleotide
auucgggagucgugguagg

SEQ ID NO: 1018458 - RNA, 19 nt, Artificial Sequence
  Description of Artificial Sequence: Synthetic oligonucleotide
uuacuagguccagagacuu

SEQ ID NO: 1018459 - RNA, 19 nt, Artificial Sequence
  Description of Artificial Sequence: Synthetic oligonucleotide
cacuucaucgucuagggau

SEQ ID NO: 1018460 - RNA, 19 nt, Artificial Sequence
  Description of Artificial Sequence: Synthetic oligonucleotide
guacucuccggaucuucag

SEQ ID NO: 1018461 - RNA, 19 nt, Artificial Sequence
  Description of Artificial Sequence: Synthetic oligonucleotide
cauggauucgggagucgug

SEQ ID NO: 1018462 - RNA, 19 nt, Artificial Sequence
  Description of Artificial Sequence: Synthetic oligonucleotide
aauaguggcugaagacagu

SEQ ID NO: 1018463 - RNA, 19 nt, Artificial Sequence
  Description of Artificial Sequence: Synthetic oligonucleotide
ugguaggugugcaguacuc

SEQ ID NO: 1018464 - RNA, 19 nt, Artificial Sequence
  Description of Artificial Sequence: Synthetic oligonucleotide
caaccuucgcccaccuggc

SEQ ID NO: 1018465 - RNA, 19 nt, Artificial Sequence
  Description of Artificial Sequence: Synthetic oligonucleotide
cugucaaaccccacauguc

SEQ ID NO: 1018466 - RNA, 19 nt, Artificial Sequence
  Description of Artificial Sequence: Synthetic oligonucleotide
gugugguuuaaugugcaca

SEQ ID NO: 1018467 - RNA, 19 nt, Artificial Sequence
  Description of Artificial Sequence: Synthetic oligonucleotide
uggaggucauagguauuag

SEQ ID NO: 1018468 - RNA, 19 nt, Artificial Sequence
  Description of Artificial Sequence: Synthetic oligonucleotide
accucgugaacagcgcuuc

SEQ ID NO: 1018469 - RNA, 19 nt, Artificial Sequence
  Description of Artificial Sequence: Synthetic oligonucleotide
uggcaucugauuuggcaau

SEQ ID NO: 1018470 - RNA, 19 nt, Artificial Sequence
  Description of Artificial Sequence: Synthetic oligonucleotide
agcagacauggauucggga

SEQ ID NO: 1018471 - RNA, 19 nt, Artificial Sequence
  Description of Artificial Sequence: Synthetic oligonucleotide
acucuucuauaauggcagu

SEQ ID NO: 1018472 - RNA, 19 nt, Artificial Sequence
  Description of Artificial Sequence: Synthetic oligonucleotide
auaaaacgcaaaaccucgu

SEQ ID NO: 1018473 - RNA, 19 nt, Artificial Sequence
  Description of Artificial Sequence: Synthetic oligonucleotide
cugacucaucaucgguggg

SEQ ID NO: 1018474 - RNA, 19 nt, Artificial Sequence
  Description of Artificial Sequence: Synthetic oligonucleotide
cacuuaacaccugggugag

SEQ ID NO: 1018475 - RNA, 19 nt, Artificial Sequence
  Description of Artificial Sequence: Synthetic oligonucleotide
guucauagugccgggugug

SEQ ID NO: 1018476 - RNA, 19 nt, Artificial Sequence
  Description of Artificial Sequence: Synthetic oligonucleotide
guuuaggacaagacacuuc

SEQ ID NO: 1018477 - RNA, 19 nt, Artificial Sequence
  Description of Artificial Sequence: Synthetic oligonucleotide
cuagguccagagacuuaag

SEQ ID NO: 1018478 - RNA, 19 nt, Artificial Sequence
  Description of Artificial Sequence: Synthetic oligonucleotide
acguugcucuccuggaggu

SEQ ID NO: 1018479 - RNA, 19 nt, Artificial Sequence
  Description of Artificial Sequence: Synthetic oligonucleotide
accuucgcccaccuggcga

SEQ ID NO: 1018480 - RNA, 19 nt, Artificial Sequence
  Description of Artificial Sequence: Synthetic oligonucleotide
cugccuugugaguuuagga

SEQ ID NO: 1018481 - RNA, 19 nt, Artificial Sequence
  Description of Artificial Sequence: Synthetic oligonucleotide
aguugaacaccuggcugug

SEQ ID NO: 1018482 - RNA, 19 nt, Artificial Sequence
  Description of Artificial Sequence: Synthetic oligonucleotide
ucgguggggaacugauaga

SEQ ID NO: 1018483 - RNA, 19 nt, Artificial Sequence
  Description of Artificial Sequence: Synthetic oligonucleotide
gugagcuuaagccccacgu

SEQ ID NO: 1018484 - RNA, 19 nt, Artificial Sequence
  Description of Artificial Sequence: Synthetic oligonucleotide
aaguacaagcagacaugga

SEQ ID NO: 1018485 - RNA, 19 nt, Artificial Sequence
  Description of Artificial Sequence: Synthetic oligonucleotide
gugcucacaaucgugagcu

SEQ ID NO: 1018486 - RNA, 19 nt, Artificial Sequence
  Description of Artificial Sequence: Synthetic oligonucleotide
cagcucacucuuagaaaug

SEQ ID NO: 1018487 - RNA, 19 nt, Artificial Sequence
  Description of Artificial Sequence: Synthetic oligonucleotide
ccgcaguuucacaaagucg

SEQ ID NO: 1018488 - RNA, 19 nt, Artificial Sequence
  Description of Artificial Sequence: Synthetic oligonucleotide
cuaagggugccgccgcaac

SEQ ID NO: 1018489 - RNA, 19 nt, Artificial Sequence
  Description of Artificial Sequence: Synthetic oligonucleotide
ugcagcggcgguacaguuc

SEQ ID NO: 1018490 - RNA, 19 nt, Artificial Sequence
  Description of Artificial Sequence: Synthetic oligonucleotide
ggcugaagacagucaaacc

SEQ ID NO: 1018491 - RNA, 19 nt, Artificial Sequence
  Description of Artificial Sequence: Synthetic oligonucleotide
gacuuauucaccagcuggu

SEQ ID NO: 1018492 - RNA, 19 nt, Artificial Sequence
  Description of Artificial Sequence: Synthetic oligonucleotide
acauggauucgggagucgu

SEQ ID NO: 1018493 - RNA, 19 nt, Artificial Sequence
  Description of Artificial Sequence: Synthetic oligonucleotide
aucucggccacugacucau

SEQ ID NO: 1018494 - RNA, 19 nt, Artificial Sequence
  Description of Artificial Sequence: Synthetic oligonucleotide
aaagucgcagugggccuca

SEQ ID NO: 1018495 - RNA, 19 nt, Artificial Sequence
  Description of Artificial Sequence: Synthetic oligonucleotide
gagcuauaucggccgcugc

SEQ ID NO: 1018496 - RNA, 19 nt, Artificial Sequence
  Description of Artificial Sequence: Synthetic oligonucleotide
gugagugguccugcugucg

SEQ ID NO: 1018497 - RNA, 19 nt, Artificial Sequence
  Description of Artificial Sequence: Synthetic oligonucleotide
cacacguacacuugagugu

SEQ ID NO: 1018498 - RNA, 19 nt, Artificial Sequence
  Description of Artificial Sequence: Synthetic oligonucleotide
ucggccgcugccaucgcuc

SEQ ID NO: 1018499 - RNA, 19 nt, Artificial Sequence
  Description of Artificial Sequence: Synthetic oligonucleotide
aggauacugccgugcccuc

SEQ ID NO: 1018500 - RNA, 19 nt, Artificial Sequence
  Description of Artificial Sequence: Synthetic oligonucleotide
gaguuuaggacaagacacu

SEQ ID NO: 1018501 - RNA, 19 nt, Artificial Sequence
  Description of Artificial Sequence: Synthetic oligonucleotide
ggcguucaugguuccauug

SEQ ID NO: 1018502 - RNA, 19 nt, Artificial Sequence
  Description of Artificial Sequence: Synthetic oligonucleotide
uugagacaauauggagccc

SEQ ID NO: 1018503 - RNA, 19 nt, Artificial Sequence
  Description of Artificial Sequence: Synthetic oligonucleotide
guacacuugagugugguuu

SEQ ID NO: 1018504 - RNA, 19 nt, Artificial Sequence
  Description of Artificial Sequence: Synthetic oligonucleotide
cccgaaucagcaucucccg

SEQ ID NO: 1018505 - RNA, 19 nt, Artificial Sequence
  Description of Artificial Sequence: Synthetic oligonucleotide
ucggcaaccuucgcccacc

SEQ ID NO: 1018506 - RNA, 19 nt, Artificial Sequence
  Description of Artificial Sequence: Synthetic oligonucleotide
acguacacuugaguguggu

SEQ ID NO: 1018507 - RNA, 19 nt, Artificial Sequence
  Description of Artificial Sequence: Synthetic oligonucleotide
uccugccuugugaguuuag

SEQ ID NO: 1018508 - RNA, 19 nt, Artificial Sequence
  Description of Artificial Sequence: Synthetic oligonucleotide
uacuagguccagagacuua

SEQ ID NO: 1018509 - RNA, 19 nt, Artificial Sequence
  Description of Artificial Sequence: Synthetic oligonucleotide
ucggccacugacucaucau

SEQ ID NO: 1018510 - RNA, 19 nt, Artificial Sequence
  Description of Artificial Sequence: Synthetic oligonucleotide
ggacaguucggcaaccuuc

SEQ ID NO: 1018511 - RNA, 19 nt, Artificial Sequence
  Description of Artificial Sequence: Synthetic oligonucleotide
ugcuaagggugccgccgca

SEQ ID NO: 1018512 - RNA, 19 nt, Artificial Sequence
  Description of Artificial Sequence: Synthetic oligonucleotide
agggcugcuaagggugccg

SEQ ID NO: 1018513 - RNA, 19 nt, Artificial Sequence
  Description of Artificial Sequence: Synthetic oligonucleotide
ucgugguaggugugcagua

SEQ ID NO: 1018514 - RNA, 19 nt, Artificial Sequence
  Description of Artificial Sequence: Synthetic oligonucleotide
ggaggucauagguauuaga

SEQ ID NO: 1018515 - RNA, 19 nt, Artificial Sequence
  Description of Artificial Sequence: Synthetic oligonucleotide
ggccucauuuucaaccugc

SEQ ID NO: 1018516 - RNA, 19 nt, Artificial Sequence
  Description of Artificial Sequence: Synthetic oligonucleotide
cgguacaguucauagugcc

SEQ ID NO: 1018517 - RNA, 19 nt, Artificial Sequence
  Description of Artificial Sequence: Synthetic oligonucleotide
gcugucguuucucugaggu

SEQ ID NO: 1018518 - RNA, 19 nt, Artificial Sequence
  Description of Artificial Sequence: Synthetic oligonucleotide
caucgcuccuucguccgcc

SEQ ID NO: 1018519 - RNA, 19 nt, Artificial Sequence
  Description of Artificial Sequence: Synthetic oligonucleotide
gccaucgcuccuucguccg

SEQ ID NO: 1018520 - RNA, 19 nt, Artificial Sequence
  Description of Artificial Sequence: Synthetic oligonucleotide
cagagucacuuaacaccug

SEQ ID NO: 1018521 - RNA, 19 nt, Artificial Sequence
  Description of Artificial Sequence: Synthetic oligonucleotide
cuccccaagaaacucauuu

SEQ ID NO: 1018522 - RNA, 19 nt, Artificial Sequence
  Description of Artificial Sequence: Synthetic oligonucleotide
gugcaguacucuccggauc

SEQ ID NO: 1018523 - RNA, 19 nt, Artificial Sequence
  Description of Artificial Sequence: Synthetic oligonucleotide
cgcaaaaccucgugaacag

SEQ ID NO: 1018524 - RNA, 19 nt, Artificial Sequence
  Description of Artificial Sequence: Synthetic oligonucleotide
aaccucgugaacagcgcuu

SEQ ID NO: 1018525 - RNA, 19 nt, Artificial Sequence
  Description of Artificial Sequence: Synthetic oligonucleotide
agggugccgccgcaacggg

SEQ ID NO: 1018526 - RNA, 19 nt, Artificial Sequence
  Description of Artificial Sequence: Synthetic oligonucleotide
agggacacacguacacuug

SEQ ID NO: 1018527 - RNA, 19 nt, Artificial Sequence
  Description of Artificial Sequence: Synthetic oligonucleotide
gagaacccugagacuggag

SEQ ID NO: 1018528 - RNA, 19 nt, Artificial Sequence
  Description of Artificial Sequence: Synthetic oligonucleotide
cucuccggaucuucagcuc

SEQ ID NO: 1018529 - RNA, 19 nt, Artificial Sequence
  Description of Artificial Sequence: Synthetic oligonucleotide
auacugccgugcccucauc

SEQ ID NO: 1018530 - RNA, 19 nt, Artificial Sequence
  Description of Artificial Sequence: Synthetic oligonucleotide
gauacugccgugcccucau

SEQ ID NO: 1018531 - RNA, 19 nt, Artificial Sequence
  Description of Artificial Sequence: Synthetic oligonucleotide
cugccaucgcuccuucguc

SEQ ID NO: 1018532 - RNA, 19 nt, Artificial Sequence
  Description of Artificial Sequence: Synthetic oligonucleotide
ggugccgccgcaacgggag

SEQ ID NO: 1018533 - RNA, 19 nt, Artificial Sequence
  Description of Artificial Sequence: Synthetic oligonucleotide
aacccacagugcucacaau

SEQ ID NO: 1018534 - RNA, 19 nt, Artificial Sequence
  Description of Artificial Sequence: Synthetic oligonucleotide
cagucuucucccuuagacu

SEQ ID NO: 1018535 - RNA, 19 nt, Artificial Sequence
  Description of Artificial Sequence: Synthetic oligonucleotide
gaucggaguugaacaccug

SEQ ID NO: 1018536 - RNA, 19 nt, Artificial Sequence
  Description of Artificial Sequence: Synthetic oligonucleotide
cuggaggucauagguauua

SEQ ID NO: 1018537 - RNA, 19 nt, Artificial Sequence
  Description of Artificial Sequence: Synthetic oligonucleotide
cucgugaacagcgcuucca

SEQ ID NO: 1018538 - RNA, 19 nt, Artificial Sequence
  Description of Artificial Sequence: Synthetic oligonucleotide
agacaauauggagcccuaa

SEQ ID NO: 1018539 - RNA, 19 nt, Artificial Sequence
  Description of Artificial Sequence: Synthetic oligonucleotide
ccuucguccgccagggcug

SEQ ID NO: 1018540 - RNA, 19 nt, Artificial Sequence
  Description of Artificial Sequence: Synthetic oligonucleotide
gcguucaugguuccauuga

SEQ ID NO: 1018541 - RNA, 19 nt, Artificial Sequence
  Description of Artificial Sequence: Synthetic oligonucleotide
ucgcuccuucguccgccag

SEQ ID NO: 1018542 - RNA, 19 nt, Artificial Sequence
  Description of Artificial Sequence: Synthetic oligonucleotide
ccccagagucacuuaacac

SEQ ID NO: 1018543 - RNA, 19 nt, Artificial Sequence
  Description of Artificial Sequence: Synthetic oligonucleotide
ggagucgugguaggugugc

SEQ ID NO: 1018544 - RNA, 19 nt, Artificial Sequence
  Description of Artificial Sequence: Synthetic oligonucleotide
ccuuagacuuaguacagcu

SEQ ID NO: 1018545 - RNA, 19 nt, Artificial Sequence
  Description of Artificial Sequence: Synthetic oligonucleotide
gugguaggugugcaguacu

SEQ ID NO: 1018546 - RNA, 19 nt, Artificial Sequence
  Description of Artificial Sequence: Synthetic oligonucleotide
gagacaauauggagcccua

SEQ ID NO: 1018547 - RNA, 19 nt, Artificial Sequence
  Description of Artificial Sequence: Synthetic oligonucleotide
cuccuguaaacugaauggu

SEQ ID NO: 1018548 - RNA, 19 nt, Artificial Sequence
  Description of Artificial Sequence: Synthetic oligonucleotide
ucguuucucugagguuaca

SEQ ID NO: 1018549 - RNA, 19 nt, Artificial Sequence
  Description of Artificial Sequence: Synthetic oligonucleotide
cagcuugcagcggcgguac

SEQ ID NO: 1018550 - RNA, 19 nt, Artificial Sequence
  Description of Artificial Sequence: Synthetic oligonucleotide
gaauuccacgauggguuua

SEQ ID NO: 1018551 - RNA, 19 nt, Artificial Sequence
  Description of Artificial Sequence: Synthetic oligonucleotide
ccuucgcccaccuggcgag

SEQ ID NO: 1018552 - RNA, 19 nt, Artificial Sequence
  Description of Artificial Sequence: Synthetic oligonucleotide
aucggccgcugccaucgcu

SEQ ID NO: 1018553 - RNA, 19 nt, Artificial Sequence
  Description of Artificial Sequence: Synthetic oligonucleotide
gcuauaucggccgcugcca

SEQ ID NO: 1018554 - RNA, 19 nt, Artificial Sequence
  Description of Artificial Sequence: Synthetic oligonucleotide
ccuaacuaacucuucuaua

SEQ ID NO: 1018555 - RNA, 19 nt, Artificial Sequence
  Description of Artificial Sequence: Synthetic oligonucleotide
caucuaugaauuccacgau

SEQ ID NO: 1018556 - RNA, 19 nt, Artificial Sequence
  Description of Artificial Sequence: Synthetic oligonucleotide
cauagugccgggugugggu

SEQ ID NO: 1018557 - RNA, 19 nt, Artificial Sequence
  Description of Artificial Sequence: Synthetic oligonucleotide
agcuccccaagaaacucau

SEQ ID NO: 1018558 - RNA, 19 nt, Artificial Sequence
  Description of Artificial Sequence: Synthetic oligonucleotide
gggugagugguccugcugu

SEQ ID NO: 1018559 - RNA, 19 nt, Artificial Sequence
  Description of Artificial Sequence: Synthetic oligonucleotide
uugcagcggcgguacaguu

SEQ ID NO: 1018560 - RNA, 19 nt, Artificial Sequence
  Description of Artificial Sequence: Synthetic oligonucleotide
ccgaaucagcaucucccgc

SEQ ID NO: 1018561 - RNA, 19 nt, Artificial Sequence
  Description of Artificial Sequence: Synthetic oligonucleotide
uucgcccaccuggcgagcu

SEQ ID NO: 1018562 - RNA, 19 nt, Artificial Sequence
  Description of Artificial Sequence: Synthetic oligonucleotide
gagcccuaacuaacucuuc

SEQ ID NO: 1018563 - RNA, 19 nt, Artificial Sequence
  Description of Artificial Sequence: Synthetic oligonucleotide
ggugagugguccugcuguc

SEQ ID NO: 1018564 - RNA, 19 nt, Artificial Sequence
  Description of Artificial Sequence: Synthetic oligonucleotide
gcaaaugguaggugggcgu

SEQ ID NO: 1018565 - RNA, 19 nt, Artificial Sequence
  Description of Artificial Sequence: Synthetic oligonucleotide
aucgugagcuuaagcccca

SEQ ID NO: 1018566 - RNA, 19 nt, Artificial Sequence
  Description of Artificial Sequence: Synthetic oligonucleotide
uaucggccgcugccaucgc

SEQ ID NO: 1018567 - RNA, 19 nt, Artificial Sequence
  Description of Artificial Sequence: Synthetic oligonucleotide
acacuugagugugguuuaa

SEQ ID NO: 1018568 - RNA, 19 nt, Artificial Sequence
  Description of Artificial Sequence: Synthetic oligonucleotide
guugcaggggaggggaacu

SEQ ID NO: 1018569 - RNA, 19 nt, Artificial Sequence
  Description of Artificial Sequence: Synthetic oligonucleotide
cuggugcaguuucuucaga

SEQ ID NO: 1018570 - RNA, 19 nt, Artificial Sequence
  Description of Artificial Sequence: Synthetic oligonucleotide
ggcaagcugucaaacccca

SEQ ID NO: 1018571 - RNA, 19 nt, Artificial Sequence
  Description of Artificial Sequence: Synthetic oligonucleotide
ggcgagcuauaucggccgc

SEQ ID NO: 1018572 - RNA, 19 nt, Artificial Sequence
  Description of Artificial Sequence: Synthetic oligonucleotide
acuuaacaccugggugagu

SEQ ID NO: 1018573 - RNA, 19 nt, Artificial Sequence
  Description of Artificial Sequence: Synthetic oligonucleotide
cccuuagacuuaguacagc

SEQ ID NO: 1018574 - RNA, 19 nt, Artificial Sequence
  Description of Artificial Sequence: Synthetic oligonucleotide
gcugccaucgcuccuucgu

SEQ ID NO: 1018575 - RNA, 19 nt, Artificial Sequence
  Description of Artificial Sequence: Synthetic oligonucleotide
ugcucacaaucgugagcuu

SEQ ID NO: 1018576 - RNA, 19 nt, Artificial Sequence
  Description of Artificial Sequence: Synthetic oligonucleotide
ucgugagcuuaagccccac

SEQ ID NO: 1018577 - RNA, 19 nt, Artificial Sequence
  Description of Artificial Sequence: Synthetic oligonucleotide
gcccuaacuaacucuucua

SEQ ID NO: 1018578 - RNA, 19 nt, Artificial Sequence
  Description of Artificial Sequence: Synthetic oligonucleotide
caucaucgguggggaacug

SEQ ID NO: 1018579 - RNA, 19 nt, Artificial Sequence
  Description of Artificial Sequence: Synthetic oligonucleotide
agcggcgguacaguucaua

SEQ ID NO: 1018580 - RNA, 19 nt, Artificial Sequence
  Description of Artificial Sequence: Synthetic oligonucleotide
guccgccagggcugcuaag

SEQ ID NO: 1018581 - RNA, 19 nt, Artificial Sequence
  Description of Artificial Sequence: Synthetic oligonucleotide
agucgcagugggccucauu

SEQ ID NO: 1018582 - RNA, 19 nt, Artificial Sequence
  Description of Artificial Sequence: Synthetic oligonucleotide
guauuagaucggaguugaa

SEQ ID NO: 1018583 - RNA, 19 nt, Artificial Sequence
  Description of Artificial Sequence: Synthetic oligonucleotide
agcuugcagcggcgguaca

SEQ ID NO: 1018584 - RNA, 19 nt, Artificial Sequence
  Description of Artificial Sequence: Synthetic oligonucleotide
ucgcccaccuggcgagcua

SEQ ID NO: 1018585 - RNA, 19 nt, Artificial Sequence
  Description of Artificial Sequence: Synthetic oligonucleotide
ucguccgccagggcugcua

SEQ ID NO: 1018586 - RNA, 19 nt, Artificial Sequence
  Description of Artificial Sequence: Synthetic oligonucleotide
cuccuucguccgccagggc

SEQ ID NO: 1018587 - RNA, 19 nt, Artificial Sequence
  Description of Artificial Sequence: Synthetic oligonucleotide
cuauaucggccgcugccau

SEQ ID NO: 1018588 - RNA, 19 nt, Artificial Sequence
  Description of Artificial Sequence: Synthetic oligonucleotide
gcuguccuccuuguugauc

SEQ ID NO: 1018589 - RNA, 19 nt, Artificial Sequence
  Description of Artificial Sequence: Synthetic oligonucleotide
ccucgugaacagcgcuucc

SEQ ID NO: 1018590 - RNA, 19 nt, Artificial Sequence
  Description of Artificial Sequence: Synthetic oligonucleotide
ggagcccuaacuaacucuu

SEQ ID NO: 1018591 - RNA, 19 nt, Artificial Sequence
  Description of Artificial Sequence: Synthetic oligonucleotide
cuucgcccaccuggcgagc

SEQ ID NO: 1018592 - RNA, 19 nt, Artificial Sequence
  Description of Artificial Sequence: Synthetic oligonucleotide
cgcuccuucguccgccagg

SEQ ID NO: 1018593 - RNA, 19 nt, Artificial Sequence
  Description of Artificial Sequence: Synthetic oligonucleotide
gggcugcuaagggugccgc

SEQ ID NO: 1018594 - RNA, 19 nt, Artificial Sequence
  Description of Artificial Sequence: Synthetic oligonucleotide
cgagcuauaucggccgcug

SEQ ID NO: 1018595 - RNA, 19 nt, Artificial Sequence
  Description of Artificial Sequence: Synthetic oligonucleotide
cccuaacuaacucuucuau

SEQ ID NO: 1018596 - RNA, 19 nt, Artificial Sequence
  Description of Artificial Sequence: Synthetic oligonucleotide
cgugguaggugugcaguac

SEQ ID NO: 1018597 - RNA, 19 nt, Artificial Sequence
  Description of Artificial Sequence: Synthetic oligonucleotide
gcuuaagccccacguugcu

SEQ ID NO: 1018598 - RNA, 19 nt, Artificial Sequence
  Description of Artificial Sequence: Synthetic oligonucleotide
auuccacgauggguuuaua

SEQ ID NO: 1018599 - RNA, 19 nt, Artificial Sequence
  Description of Artificial Sequence: Synthetic oligonucleotide
ccaucgcuccuucguccgc

SEQ ID NO: 1018600 - RNA, 19 nt, Artificial Sequence
  Description of Artificial Sequence: Synthetic oligonucleotide
gguauccaugaggguggac

SEQ ID NO: 1018601 - RNA, 19 nt, Artificial Sequence
  Description of Artificial Sequence: Synthetic oligonucleotide
gcaagcugucaaaccccac

SEQ ID NO: 1018602 - RNA, 19 nt, Artificial Sequence
  Description of Artificial Sequence: Synthetic oligonucleotide
gugggcguucaugguucca

SEQ ID NO: 1018603 - RNA, 19 nt, Artificial Sequence
  Description of Artificial Sequence: Synthetic oligonucleotide
cccucgaacuugguguuga

SEQ ID NO: 1018604 - RNA, 19 nt, Artificial Sequence
  Description of Artificial Sequence: Synthetic oligonucleotide
aagucgcagugggccucau

SEQ ID NO: 1018605 - RNA, 19 nt, Artificial Sequence
  Description of Artificial Sequence: Synthetic oligonucleotide
cauuuccagcucugaugau

SEQ ID NO: 1018606 - RNA, 19 nt, Artificial Sequence
  Description of Artificial Sequence: Synthetic oligonucleotide
gcuaagggugccgccgcaa

SEQ ID NO: 1018607 - RNA, 19 nt, Artificial Sequence
  Description of Artificial Sequence: Synthetic oligonucleotide
cguucaugguuccauugau

SEQ ID NO: 1018608 - RNA, 19 nt, Artificial Sequence
  Description of Artificial Sequence: Synthetic oligonucleotide
ggggaacugguugguuucu

SEQ ID NO: 1018609 - RNA, 19 nt, Artificial Sequence
  Description of Artificial Sequence: Synthetic oligonucleotide
gccgggugugggucugcuc

SEQ ID NO: 1018610 - RNA, 19 nt, Artificial Sequence
  Description of Artificial Sequence: Synthetic oligonucleotide
gggugccgccgcaacggga

SEQ ID NO: 1018611 - RNA, 19 nt, Artificial Sequence
  Description of Artificial Sequence: Synthetic oligonucleotide
ccccucgaacuugguguug

SEQ ID NO: 1018612 - RNA, 19 nt, Artificial Sequence
  Description of Artificial Sequence: Synthetic oligonucleotide
gcgagcuauaucggccgcu

SEQ ID NO: 1018613 - RNA, 19 nt, Artificial Sequence
  Description of Artificial Sequence: Synthetic oligonucleotide
gcccuggcugacugacuua

SEQ ID NO: 1018614 - RNA, 19 nt, Artificial Sequence
  Description of Artificial Sequence: Synthetic oligonucleotide
gcucagccgcugucuuucu

SEQ ID NO: 1018615 - RNA, 19 nt, Artificial Sequence
  Description of Artificial Sequence: Synthetic oligonucleotide
cguccgccagggcugcuaa

SEQ ID NO: 1018616 - RNA, 19 nt, Artificial Sequence
  Description of Artificial Sequence: Synthetic oligonucleotide
cguacacuugagugugguu

SEQ ID NO: 1018617 - RNA, 19 nt, Artificial Sequence
  Description of Artificial Sequence: Synthetic oligonucleotide
gcaguacucuccggaucuu

SEQ ID NO: 1018618 - RNA, 19 nt, Artificial Sequence
  Description of Artificial Sequence: Synthetic oligonucleotide
ccgcugucuuucucuguuu

SEQ ID NO: 1018619 - RNA, 19 nt, Artificial Sequence
  Description of Artificial Sequence: Synthetic oligonucleotide
gcuccccaagaaacucauu

SEQ ID NO: 1018620 - RNA, 19 nt, Artificial Sequence
  Description of Artificial Sequence: Synthetic oligonucleotide
cggcaaccuucgcccaccu

SEQ ID NO: 1018621 - RNA, 19 nt, Artificial Sequence
  Description of Artificial Sequence: Synthetic oligonucleotide
aaagaggaaaggcaauucg

SEQ ID NO: 1018622 - RNA, 19 nt, Artificial Sequence
  Description of Artificial Sequence: Synthetic oligonucleotide
uuccuuaaaucucagauca

SEQ ID NO: 1018623 - RNA, 19 nt, Artificial Sequence
  Description of Artificial Sequence: Synthetic oligonucleotide
aaaaguucguccuggagug

SEQ ID NO: 1018624 - RNA, 19 nt, Artificial Sequence
  Description of Artificial Sequence: Synthetic oligonucleotide
  modified_base (5)..(5): a, c, u, g, unknown or other
uggancuugaguagcaggg

SEQ ID NO: 1018625 - RNA, 19 nt, Artificial Sequence
  Description of Artificial Sequence: Synthetic oligonucleotide
aaaccuggugagcacaucg

SEQ ID NO: 1018626 - RNA, 19 nt, Artificial Sequence
  Description of Artificial Sequence: Synthetic oligonucleotide
aaggcgaaugcauuccggc

SEQ ID NO: 1018627 - RNA, 19 nt, Artificial Sequence
  Description of Artificial Sequence: Synthetic oligonucleotide
auaggcaaaagaaaagucg

SEQ ID NO: 1018628 - RNA, 19 nt, Artificial Sequence
  Description of Artificial Sequence: Synthetic oligonucleotide
gaugaaagcgcgcauauuc

SEQ ID NO: 1018629 - RNA, 19 nt, Artificial Sequence
  Description of Artificial Sequence: Synthetic oligonucleotide
uagaaaacuguccacacau

SEQ ID NO: 1018630 - RNA, 19 nt, Artificial Sequence
  Description of Artificial Sequence: Synthetic oligonucleotide
aaaagucgugaccucuugg

SEQ ID NO: 1018631 - RNA, 19 nt, Artificial Sequence
  Description of Artificial Sequence: Synthetic oligonucleotide
aaagaaaagucgugaccuc

SEQ ID NO: 1018632 - RNA, 19 nt, Artificial Sequence
  Description of Artificial Sequence: Synthetic oligonucleotide
aggaaaggcaauucgugac

SEQ ID NO: 1018633 - RNA, 19 nt, Artificial Sequence
  Description of Artificial Sequence: Synthetic oligonucleotide
aauucgugaccaucugggg

SEQ ID NO: 1018634 - RNA, 19 nt, Artificial Sequence
  Description of Artificial Sequence: Synthetic oligonucleotide
uauaggcaaaagaaaaguc

SEQ ID NO: 1018635 - RNA, 19 nt, Artificial Sequence
  Description of Artificial Sequence: Synthetic oligonucleotide
aaagcgcgcauauucggag

SEQ ID NO: 1018636 - RNA, 19 nt, Artificial Sequence
  Description of Artificial Sequence: Synthetic oligonucleotide
ugaguagcagggaaccagg

SEQ ID NO: 1018637 - RNA, 19 nt, Artificial Sequence
  Description of Artificial Sequence: Synthetic oligonucleotide
ucaggcuauaggcaaaaga

SEQ ID NO: 1018638 - RNA, 19 nt, Artificial Sequence
  Description of Artificial Sequence: Synthetic oligonucleotide
uccgugaagacgaaggcac

SEQ ID NO: 1018639 - RNA, 19 nt, Artificial Sequence
  Description of Artificial Sequence: Synthetic oligonucleotide
uccagaacgucauaccgag

SEQ ID NO: 1018640 - RNA, 19 nt, Artificial Sequence
  Description of Artificial Sequence: Synthetic oligonucleotide
aaucucagaucacucccag

SEQ ID NO: 1018641 - RNA, 19 nt, Artificial Sequence
  Description of Artificial Sequence: Synthetic oligonucleotide
aaaaggguccaugguuucc

SEQ ID NO: 1018642 - RNA, 19 nt, Artificial Sequence
  Description of Artificial Sequence: Synthetic oligonucleotide
auagcugacacuguggaug

SEQ ID NO: 1018643 - RNA, 19 nt, Artificial Sequence
  Description of Artificial Sequence: Synthetic oligonucleotide
ugaaagcgcgcauauucgg

SEQ ID NO: 1018644 - RNA, 19 nt, Artificial Sequence
  Description of Artificial Sequence: Synthetic oligonucleotide
aggucaaauucucaaaccu

SEQ ID NO: 1018645 - RNA, 19 nt, Artificial Sequence
  Description of Artificial Sequence: Synthetic oligonucleotide
ugaaaucuccgcuagugaa

SEQ ID NO: 1018646 - RNA, 19 nt, Artificial Sequence
  Description of Artificial Sequence: Synthetic oligonucleotide
guagugugggagucgaugg

SEQ ID NO: 1018647 - RNA, 19 nt, Artificial Sequence
  Description of Artificial Sequence: Synthetic oligonucleotide
  modified_base (2)..(2): a, c, u, g, unknown or other
ancuugaguagcagggaac

SEQ ID NO: 1018648 - RNA, 19 nt, Artificial Sequence
  Description of Artificial Sequence: Synthetic oligonucleotide
ucauacaaggcgaaugcau

SEQ ID NO: 1018649 - RNA, 19 nt, Artificial Sequence
  Description of Artificial Sequence: Synthetic oligonucleotide
ucgagcaaccgguacagcc

SEQ ID NO: 1018650 - RNA, 19 nt, Artificial Sequence
  Description of Artificial Sequence: Synthetic oligonucleotide
agcucagucaggcuauagg

SEQ ID NO: 1018651 - RNA, 19 nt, Artificial Sequence
  Description of Artificial Sequence: Synthetic oligonucleotide
aagcauagcuucuguggag

SEQ ID NO: 1018652 - RNA, 19 nt, Artificial Sequence
  Description of Artificial Sequence: Synthetic oligonucleotide
cucgcaagggugcauagcc

SEQ ID NO: 1018653 - RNA, 19 nt, Artificial Sequence
  Description of Artificial Sequence: Synthetic oligonucleotide
cauacaggugagcagcugc

SEQ ID NO: 1018654 - RNA, 19 nt, Artificial Sequence
  Description of Artificial Sequence: Synthetic oligonucleotide
augcauuccggcuccgagc

SEQ ID NO: 1018655 - RNA, 19 nt, Artificial Sequence
  Description of Artificial Sequence: Synthetic oligonucleotide
uugaguagcagggaaccag

SEQ ID NO: 1018656 - RNA, 19 nt, Artificial Sequence
  Description of Artificial Sequence: Synthetic oligonucleotide
ugaagacgaaggcacaguc

SEQ ID NO: 1018657 - RNA, 19 nt, Artificial Sequence
  Description of Artificial Sequence: Synthetic oligonucleotide
aacgucauaccgagcagcg

SEQ ID NO: 1018658 - RNA, 19 nt, Artificial Sequence
  Description of Artificial Sequence: Synthetic oligonucleotide
caggcuauaggcaaaagaa

SEQ ID NO: 1018659 - RNA, 19 nt, Artificial Sequence
  Description of Artificial Sequence: Synthetic oligonucleotide
uguagugugggagucgaug

SEQ ID NO: 1018660 - RNA, 19 nt, Artificial Sequence
  Description of Artificial Sequence: Synthetic oligonucleotide
  modified_base (6)..(6): a, c, u, g, unknown or other
cuggancuugaguagcagg

SEQ ID NO: 1018661 - RNA, 19 nt, Artificial Sequence
  Description of Artificial Sequence: Synthetic oligonucleotide
agcacaucggccacgaggg

SEQ ID NO: 1018662 - RNA, 19 nt, Artificial Sequence
  Description of Artificial Sequence: Synthetic oligonucleotide
gaaaucuccgcuagugaag

SEQ ID NO: 1018663 - RNA, 19 nt, Artificial Sequence
  Description of Artificial Sequence: Synthetic oligonucleotide
accuggugagcacaucggc

SEQ ID NO: 1018664 - RNA, 19 nt, Artificial Sequence
  Description of Artificial Sequence: Synthetic oligonucleotide
cuuaaguguggguguaccc

SEQ ID NO: 1018665 - RNA, 19 nt, Artificial Sequence
  Description of Artificial Sequence: Synthetic oligonucleotide
uggggauagcccuucuggg

SEQ ID NO: 1018666 - RNA, 19 nt, Artificial Sequence
  Description of Artificial Sequence: Synthetic oligonucleotide
uguaaacucugcaggcgca

SEQ ID NO: 1018667 - RNA, 19 nt, Artificial Sequence
  Description of Artificial Sequence: Synthetic oligonucleotide
ucucaccaggccucgagag

SEQ ID NO: 1018668 - RNA, 19 nt, Artificial Sequence
  Description of Artificial Sequence: Synthetic oligonucleotide
aagcgcgcauauucggagg

SEQ ID NO: 1018669 - RNA, 19 nt, Artificial Sequence
  Description of Artificial Sequence: Synthetic oligonucleotide
aagucgugaccucuuggca

SEQ ID NO: 1018670 - RNA, 19 nt, Artificial Sequence
  Description of Artificial Sequence: Synthetic oligonucleotide
gaggaaaggcaauucguga

SEQ ID NO: 1018671 - RNA, 19 nt, Artificial Sequence
  Description of Artificial Sequence: Synthetic oligonucleotide
aaucgggcgaguccuccag

SEQ ID NO: 1018672 - RNA, 19 nt, Artificial Sequence
  Description of Artificial Sequence: Synthetic oligonucleotide
gaaaagucgugaccucuug

SEQ ID NO: 1018673 - RNA, 19 nt, Artificial Sequence
  Description of Artificial Sequence: Synthetic oligonucleotide
guguaaacucugcaggcgc

SEQ ID NO: 1018674 - RNA, 19 nt, Artificial Sequence
  Description of Artificial Sequence: Synthetic oligonucleotide
cagaacgucauaccgagca

SEQ ID NO: 1018675 - RNA, 19 nt, Artificial Sequence
  Description of Artificial Sequence: Synthetic oligonucleotide
cucccuaccaacucucgag

SEQ ID NO: 1018676 - RNA, 19 nt, Artificial Sequence
  Description of Artificial Sequence: Synthetic oligonucleotide
gaccauagcugacacugug

SEQ ID NO: 1018677 - RNA, 19 nt, Artificial Sequence
  Description of Artificial Sequence: Synthetic oligonucleotide
augaaagcgcgcauauucg

SEQ ID NO: 1018678 - RNA, 19 nt, Artificial Sequence
  Description of Artificial Sequence: Synthetic oligonucleotide
aaaguucguccuggagugc

SEQ ID NO: 1018679 - RNA, 19 nt, Artificial Sequence
  Description of Artificial Sequence: Synthetic oligonucleotide
uauucggaggugcccucgg

SEQ ID NO: 1018680 - RNA, 19 nt, Artificial Sequence
  Description of Artificial Sequence: Synthetic oligonucleotide
ugucucaccaggccucgag

SEQ ID NO: 1018681 - RNA, 19 nt, Artificial Sequence
  Description of Artificial Sequence: Synthetic oligonucleotide
ucccuaccaacucucgagc

SEQ ID NO: 1018682 - RNA, 19 nt, Artificial Sequence
  Description of Artificial Sequence: Synthetic oligonucleotide
agaggaaaggcaauucgug

SEQ ID NO: 1018683 - RNA, 19 nt, Artificial Sequence
  Description of Artificial Sequence: Synthetic oligonucleotide
aaccgguacagccgccccg

SEQ ID NO: 1018684 - RNA, 19 nt, Artificial Sequence
  Description of Artificial Sequence: Synthetic oligonucleotide
cucagcgcugaaaucuccg

SEQ ID NO: 1018685 - RNA, 19 nt, Artificial Sequence
  Description of Artificial Sequence: Synthetic oligonucleotide
agucgauggccacaggaca

SEQ ID NO: 1018686 - RNA, 19 nt, Artificial Sequence
  Description of Artificial Sequence: Synthetic oligonucleotide
gucgugaccucuuggcagg

SEQ ID NO: 1018687 - RNA, 19 nt, Artificial Sequence
  Description of Artificial Sequence: Synthetic oligonucleotide
cuauuagcuggcaggcggc

SEQ ID NO: 1018688 - RNA, 19 nt, Artificial Sequence
  Description of Artificial Sequence: Synthetic oligonucleotide
ccuauuagcuggcaggcgg

SEQ ID NO: 1018689 - RNA, 19 nt, Artificial Sequence
  Description of Artificial Sequence: Synthetic oligonucleotide
gaacgucauaccgagcagc

SEQ ID NO: 1018690 - RNA, 19 nt, Artificial Sequence
  Description of Artificial Sequence: Synthetic oligonucleotide
agaacgucauaccgagcag

SEQ ID NO: 1018691 - RNA, 19 nt, Artificial Sequence
  Description of Artificial Sequence: Synthetic oligonucleotide
  modified_base (3)..(3): a, c, u, g, unknown or other
gancuugaguagcagggaa

SEQ ID NO: 1018692 - RNA, 19 nt, Artificial Sequence
  Description of Artificial Sequence: Synthetic oligonucleotide
aaaucucagaucacuccca

SEQ ID NO: 1018693 - RNA, 19 nt, Artificial Sequence
  Description of Artificial Sequence: Synthetic oligonucleotide
aggacagugcaccgugcac

SEQ ID NO: 1018694 - RNA, 19 nt, Artificial Sequence
  Description of Artificial Sequence: Synthetic oligonucleotide
caaggcgaaugcauuccgg

SEQ ID NO: 1018695 - RNA, 19 nt, Artificial Sequence
  Description of Artificial Sequence: Synthetic oligonucleotide
cuucccgucgagcaaccgg

SEQ ID NO: 1018696 - RNA, 19 nt, Artificial Sequence
  Description of Artificial Sequence: Synthetic oligonucleotide
uaccgagcagcgccgaacc

SEQ ID NO: 1018697 - RNA, 19 nt, Artificial Sequence
  Description of Artificial Sequence: Synthetic oligonucleotide
agggcgcagggauuguucg

SEQ ID NO: 1018698 - RNA, 19 nt, Artificial Sequence
  Description of Artificial Sequence: Synthetic oligonucleotide
uuuuagccaggcccgggcu

SEQ ID NO: 1018699 - RNA, 19 nt, Artificial Sequence
  Description of Artificial Sequence: Synthetic oligonucleotide
aaccuggugagcacaucgg

SEQ ID NO: 1018700 - RNA, 19 nt, Artificial Sequence
  Description of Artificial Sequence: Synthetic oligonucleotide
  modified_base (8)..(8): a, c, u, g, unknown or other
ugcuggancuugaguagca

SEQ ID NO: 1018701 - RNA, 19 nt, Artificial Sequence
  Description of Artificial Sequence: Synthetic oligonucleotide
  modified_base (18)..(18): a, c, u, g, unknown or other
accgcaggguugcugganc

SEQ ID NO: 1018702 - RNA, 19 nt, Artificial Sequence
  Description of Artificial Sequence: Synthetic oligonucleotide
ggaaaggcaauucgugacc

SEQ ID NO: 1018703 - RNA, 19 nt, Artificial Sequence
  Description of Artificial Sequence: Synthetic oligonucleotide
uucugucucaccaggccuc

SEQ ID NO: 1018704 - RNA, 19 nt, Artificial Sequence
  Description of Artificial Sequence: Synthetic oligonucleotide
  modified_base (11)..(11): a, c, u, g, unknown or other
gguugcuggancuugagua

SEQ ID NO: 1018705 - RNA, 19 nt, Artificial Sequence
  Description of Artificial Sequence: Synthetic oligonucleotide
agcgccgaaccccggacac

SEQ ID NO: 1018706 - RNA, 19 nt, Artificial Sequence
  Description of Artificial Sequence: Synthetic oligonucleotide
gaaccccggacacugcgcc

SEQ ID NO: 1018707 - RNA, 19 nt, Artificial Sequence
  Description of Artificial Sequence: Synthetic oligonucleotide
ucuccacccggaaucgggc

SEQ ID NO: 1018708 - RNA, 19 nt, Artificial Sequence
  Description of Artificial Sequence: Synthetic oligonucleotide
gggccuauuagcuggcagg

SEQ ID NO: 1018709 - RNA, 19 nt, Artificial Sequence
  Description of Artificial Sequence: Synthetic oligonucleotide
acaucggccacgaggguac

SEQ ID NO: 1018710 - RNA, 19 nt, Artificial Sequence
  Description of Artificial Sequence: Synthetic oligonucleotide
aaguucguccuggagugca

SEQ ID NO: 1018711 - RNA, 19 nt, Artificial Sequence
  Description of Artificial Sequence: Synthetic oligonucleotide
uggccaaguaggcauucac

SEQ ID NO: 1018712 - RNA, 19 nt, Artificial Sequence
  Description of Artificial Sequence: Synthetic oligonucleotide
gaaaggcaauucgugacca

SEQ ID NO: 1018713 - RNA, 19 nt, Artificial Sequence
  Description of Artificial Sequence: Synthetic oligonucleotide
gcuucuguggagcaccucc

SEQ ID NO: 1018714 - RNA, 19 nt, Artificial Sequence
  Description of Artificial Sequence: Synthetic oligonucleotide
gugcacaagagcuccugcc

SEQ ID NO: 1018715 - RNA, 19 nt, Artificial Sequence
  Description of Artificial Sequence: Synthetic oligonucleotide
uggccuuugcucccagacc

SEQ ID NO: 1018716 - RNA, 19 nt, Artificial Sequence
  Description of Artificial Sequence: Synthetic oligonucleotide
auaccgagcagcgccgaac

SEQ ID NO: 1018717 - RNA, 19 nt, Artificial Sequence
  Description of Artificial Sequence: Synthetic oligonucleotide
ucaaaccuggugagcacau

SEQ ID NO: 1018718 - RNA, 19 nt, Artificial Sequence
  Description of Artificial Sequence: Synthetic oligonucleotide
uucggaggugcccucggac

SEQ ID NO: 1018719 - RNA, 19 nt, Artificial Sequence
  Description of Artificial Sequence: Synthetic oligonucleotide
ucgauggccacaggacacg

SEQ ID NO: 1018720 - RNA, 19 nt, Artificial Sequence
  Description of Artificial Sequence: Synthetic oligonucleotide
  modified_base (9)..(9): a, c, u, g, unknown or other
uugcuggancuugaguagc

SEQ ID NO: 1018721 - RNA, 19 nt, Artificial Sequence
  Description of Artificial Sequence: Synthetic oligonucleotide
augccccguagccucuucc

SEQ ID NO: 1018722 - RNA, 19 nt, Artificial Sequence
  Description of Artificial Sequence: Synthetic oligonucleotide
ugcccaguaccgcagucgu

SEQ ID NO: 1018723 - RNA, 19 nt, Artificial Sequence
  Description of Artificial Sequence: Synthetic oligonucleotide
aguccuccaguccggcuuc

SEQ ID NO: 1018724 - RNA, 19 nt, Artificial Sequence
  Description of Artificial Sequence: Synthetic oligonucleotide
ugcgugcagggccucuccg

SEQ ID NO: 1018725 - RNA, 19 nt, Artificial Sequence
  Description of Artificial Sequence: Synthetic oligonucleotide
uccggcuccgagccaagcc

SEQ ID NO: 1018726 - RNA, 19 nt, Artificial Sequence
  Description of Artificial Sequence: Synthetic oligonucleotide
ucucaaaccuggugagcac

SEQ ID NO: 1018727 - RNA, 19 nt, Artificial Sequence
  Description of Artificial Sequence: Synthetic oligonucleotide
cuauaggcaaaagaaaagu

SEQ ID NO: 1018728 - RNA, 19 nt, Artificial Sequence
  Description of Artificial Sequence: Synthetic oligonucleotide
guacccugucccugcaggg

SEQ ID NO: 1018729 - RNA, 19 nt, Artificial Sequence
  Description of Artificial Sequence: Synthetic oligonucleotide
gguucugucucaccaggcc

SEQ ID NO: 1018730 - RNA, 19 nt, Artificial Sequence
  Description of Artificial Sequence: Synthetic oligonucleotide
auauucggaggugcccucg

SEQ ID NO: 1018731 - RNA, 19 nt, Artificial Sequence
  Description of Artificial Sequence: Synthetic oligonucleotide
cuaccaacucucgagccac

SEQ ID NO: 1018732 - RNA, 19 nt, Artificial Sequence
  Description of Artificial Sequence: Synthetic oligonucleotide
aguccggcuuccucugagg

SEQ ID NO: 1018733 - RNA, 19 nt, Artificial Sequence
  Description of Artificial Sequence: Synthetic oligonucleotide
uuuagccaggcccgggcuc

SEQ ID NO: 1018734 - RNA, 19 nt, Artificial Sequence
  Description of Artificial Sequence: Synthetic oligonucleotide
gaguagcagggaaccaggg

SEQ ID NO: 1018735 - RNA, 19 nt, Artificial Sequence
  Description of Artificial Sequence: Synthetic oligonucleotide
cagcccuuaagugugggug

SEQ ID NO: 1018736 - RNA, 19 nt, Artificial Sequence
  Description of Artificial Sequence: Synthetic oligonucleotide
aaccccggacacugcgccg

SEQ ID NO: 1018737 - RNA, 19 nt, Artificial Sequence
  Description of Artificial Sequence: Synthetic oligonucleotide
gcugaaaucuccgcuagug

SEQ ID NO: 1018738 - RNA, 19 nt, Artificial Sequence
  Description of Artificial Sequence: Synthetic oligonucleotide
agcccuuaagugugggugu

SEQ ID NO: 1018739 - RNA, 19 nt, Artificial Sequence
  Description of Artificial Sequence: Synthetic oligonucleotide
gggauagcccuucugggug

SEQ ID NO: 1018740 - RNA, 19 nt, Artificial Sequence
  Description of Artificial Sequence: Synthetic oligonucleotide
ggcuauaggcaaaagaaaa

SEQ ID NO: 1018741 - RNA, 19 nt, Artificial Sequence
  Description of Artificial Sequence: Synthetic oligonucleotide
aggcgaaugcauuccggcu

SEQ ID NO: 1018742 - RNA, 19 nt, Artificial Sequence
  Description of Artificial Sequence: Synthetic oligonucleotide
agcgcugaaaucuccgcua

SEQ ID NO: 1018743 - RNA, 19 nt, Artificial Sequence
  Description of Artificial Sequence: Synthetic oligonucleotide
uuguucgcgcggcggagug

SEQ ID NO: 1018744 - RNA, 19 nt, Artificial Sequence
  Description of Artificial Sequence: Synthetic oligonucleotide
ccgccuuuuagccaggccc

SEQ ID NO: 1018745 - RNA, 19 nt, Artificial Sequence
  Description of Artificial Sequence: Synthetic oligonucleotide
guaaacucugcaggcgcag

SEQ ID NO: 1018746 - RNA, 19 nt, Artificial Sequence
  Description of Artificial Sequence: Synthetic oligonucleotide
gaaagcgcgcauauucgga

SEQ ID NO: 1018747 - RNA, 19 nt, Artificial Sequence
  Description of Artificial Sequence: Synthetic oligonucleotide
gauuguucgcgcggcggag

SEQ ID NO: 1018748 - RNA, 19 nt, Artificial Sequence
  Description of Artificial Sequence: Synthetic oligonucleotide
uccgcuagugaaggcacca
